United States Patent Application Publication US 2011/0183924 A1 - sequence listing, part 125

SEQ ID NO: 351844 - DNA, 4883 bp, Homo sapiens
tcatttttctcacttgtgatttctgagtccttttaacaatgatgaggcatgattggggatgtggaagatgagtaggatggtggtgctacagctggaggccacaggagaggtgcaagctgggctcagtttgtgtggctgccccacccactgtgttacgccacagaggcagccctgggggttaggattggcagagctctcgtggagacctgccatcgtgctgatccagagccaccttgctattctctctgtagaggagaaggcagagcccccccaggctatgaatgccctgatgcggttgaaccagctgaagccagggctgcagtacaagctggtgtcccagactgggcccgtccatgcccccatctttaccatgtctgtggaggttgatggcaattcattcgaggcctctgggccctccaaaaagacggccaagctgcacgtggccgttaaggtgttacaggacatgggcttgccgacgggtgctgaaggcagggactcgagcaagggggaggactcggctgaggagaccgaggcgaagccagcagtggtggcccctgccccagtggtagaagctgtctccacccctagtgcggcctttccctcagatgccactgccgagcaggggccgatcctgacaaagcacggcaagaacccagtcatggagctgaacgagaagaggcgtgggctcaagtacgagctcatctccgagaccgggggcagccacgacaagcgcttcgtcatggaggtcgaagtggatggacagaagttccaaggtgctggttccaacaaaaaggtggcgaaggcctacgctgctcttgctgccctagaaaagcttttccctgacacccctctcgcccttgatgccaacaaaaagaagagagccccagtacccgtcagagggggaccgaaatttgctgctaagccacataaccctggcttcggcatgggaggccccatgcacaacgaagtgcccccaccccccaaccttcgagggcggggaagaggcgggagcatccggggacgagggcgcgggcgaggatttggtggcgccaaccatggaggctacatgaatgccggtgctgggtatggaagctatgggtacggaggcaactcggcgacagcaggctacagtcagttctacagcaacggagggcattctgggaatgccagtggcggtggcggcgggggcggtggtggctcctccggctatggctcctactaccaaggtgacaactacaactcaccggtgcccccaaaacacgctgggaagaagcagccgcacgggggccagcagaagccctcctacggctcgggctaccagtcccaccagggccagcagcagtcctacaaccagagcccctacagcaactatggccctccacagggcaagcagaaaggctataaccatggacaaggcagctactcctactcgaactcctacaactctcccgggggcgggggcggatccgactacaactacgagagcaaattcaactacagtggtagtggaggccgaagcggcgggaacagctacggctcaggcggggcatcctacaacccagggtcacacgggggctacggcggaggttctgggggcggctcctcataccaaggcaaacaaggaggctactcacagtcgaactacaactccccggggtccggccagaactacagtggccctcccagctcctaccagtcctcacaaggcggctatggcagaaacgcagaccacagcatgaactaccagtacagataagcccccgcggggcggagatttctaccttctgcacttactccccatcagaagatcgagttttatgcatcacagttaacatgtcagctggccctccaggcccccgcccccatcccgtccacgttgctgtgtcgtgaggtgcagcgggtcaccctgtggcccgtcctgtgacccatatttagccgtgtttgggactccgtgtcttcaatggtttgttagttgccattacaactttgtctgggtagagtttttgagtttttgcagttcagtatccctctgtctattcacacttcgtgttagtggtaactcagtttgtctttaaatagttacagaagggatacgtcatttgttaatgcttttgtgaagtgagttaaacgagctttctgtattttaatgctttagtgtttcagttttataagtgaagattttattttaaaaaccagtgggaaagagtggggggtttctttttatgtctgggtcattcaggcagtacatctgaattaagctgaatgtagacaaataaagaaaaacaaaactgcgcccgtcttaggcctgggtgtctgacccaccagcagtgcaatgggcaggtttccccactctattcctgctcttgggaaagcagcgtgggccatcaggatggtccctggtccttagagagggtccagttcaggcttctagacattttactcatgctcagcgaaggctggttcctggtcccctgggctgtgtagacccggtgtcccaccaggctccaggctcccaccatctacagaggggcttacagcgcccattctggtcttggggaacccatcacaaaataggctttttctgctccccgattctggtgtagttctaagtacacagtgatgtcctctgtaggggcgtgcctgtggtggaacataacgcagttacaaaagaaagggcaggtgaggcctgggtaaccccagccatggaccgtcagtggctggagggagcttcgtgtctgtgctggagctgcagcctgctcgccatctggaggctcagtggagtggggagttggggttctcataccagcagatttccctagagcgtgattctcccatctgaggcaatcttgcctcccaggggaaattttgcaatgtttggaggatgttgtcacagctagtagcgggtgctctgggatctggtggatagatgccaaggatgctgtcaagcatactgtactgcccagaacagtggcccatagcagggacctgccctatcaaaatatcaggtgtatggaggtggagtcccaacgctagagcagcccttctcagctccaccctgcccggggagggaggaggagctctggtttcagagcagtgccgggattgcctttccccaggatctgtgtcggccatccaggaagaactgtactggccaagcctgggaccacacgtctgcagagatcctgctctgctggcctgagccccaggccttggcctcctgtgcttgggtaaccatggccactgggaaaagcaaggaccgtgtttgactttcttggagaggtgaaagaggtgaaagaacaagttgtgtgctagaaaacttttgaggaattcttatttgtgttagagcagaggaggtcccagataccaagtggcgcctcccaggaaaggctgggagaagaggtggcctggagtaccccgagatcccagcagcgcacacagtggagggatgaggatggatgggtcctaacccctgattttgatgggatgtgttcatgtcctatctcctctcctggacacattaaggggttgggacaagaagagactcctgtgagatcagcagacctcgtgtttaaggagagaatgcctgcctgcaacactcatggagagggacacttcctggccccacctgctaaatacctccaaactctgggcaggcgcctgcattctcaacacaggacttcccttaacagtttccggatcagtgaccaccaccacgttcaggtttctgaatgcagacccaccacgagggatggattccacccgcccgccctgctgcagatacatgcggcacagcaggcacgtgcctggagagaacagctcctgagcacagcacccttggagccctcaccccgctcacgatcctcaccagtgctgatgatgccgtcatgctgctggcctgagacagtatcccagctacaacaggacgacaccgggttcaggaatatgtggctatcaccttgagcactgacagtggccttccaggctagttgccttccaaacgcaggtagccgacctgcaggagggcctacaaacgggcccagcaagagctgggcaacagctggcttgtgaaatgagacaccttgaccaatatgctttgggtggacggtctcctacatgttcagtggaggccaccaggagcatccatgagcggggaaggggtccacacccttacatggcaagttgatacgatggggtgcttggtggatgggccatggaggtccgtgagctggaactgggcacacgccatcccagagggctcaggatgccccaggaaggaaagaagggcaacagactacacgattggacgtgtgtggttgactgggatgaagttggagggaggggcagggccttgcaggggattggtactgatcccagggaggaagtgttggggcttcatgaactaggatgaaaggaggcccctgagccatgacaaggggcacatccaggatttccgccaccctgaatttagtagagctagtaggccctggtcgtcactctgggcagggatgccgtcagccttgagggtcgccacccacctgtgtgttgccctctgtcctggcggggaaacatacaccccttgtctcaccaccaaccttgcttgtgtagtcagcagggctggccctgccccaaggactcactgcatgtacccggacccctaggcctggcctttgcagcatagttgggagcttctggattccatctgcacctgtgagccccatgctggctgtgcactgcgcgggcctgagactgctggatacaatgttgggcaacaactcagccagcctgatggcagcctcagaggcttctgactctgtgtttgcggacgcagttctgggtctgaagcagcccttgacctctctagacagcatcaaagaacttattaa

SEQ ID NO: 351845 - DNA, 2291 bp, Homo sapiens
tcatttttctcacttgtgatttctgagtccttttaacaatgatgaggcatgattggggatgtggaagatgagtaggatggtggtgctacagctggaggccacaggagaggtgcaagctgggctcagtttgtgtggctgccccacccactgtgttacgccacagaggcagccctgggggttaggattggcagagctctcgtggagacctgccatcgtgctgatccagagccaccttgctattctctctgtagaggagaaggcagagcccccccaggctatgaatgccctgatgcggttgaaccagctgaagccagggctgcagtacaagctggtgtcccagactgggcccgtccatgcccccatctttaccatgtctgtggaggttgatggcaattcattcgaggcctctgggccctccaaaaagacggccaagctgcacgtggccgttaaggtgttacaggacatgggcttgccgacgggtgctgaaggcagggactcgagcaagggggaggactcggctgaggagaccgaggcgaagccagcagtggtggcccctgccccagtggtagaagctgtctccacccctagtgcggcctttccctcagatgccactgccgagcaggggccgatcctgacaaagcacggcaagaacccagtcatggagctgaacgagaagaggcgtgggctcaagtacgagctcatctccgagaccgggggcagccacgacaagcgcttcgtcatggaggtcgaagtggatggacagaagttccaaggtgctggttccaacaaaaaggtggcgaaggcctacgctgctcttgctgccctagaaaagcttttccctgacacccctctcgcccttgatgccaacaaaaagaagagagccccagtacccgtcagagggggaccgaaatttgctgctaagccacataaccctggcttcggcatgggaggccccatgcacaacgaagtgcccccaccccccaaccttcgagggcggggaagaggcgggagcatccggggacgagggcgcgggcgaggatttggtggcgccaaccatggaggctacatgaatgccggtgctgggtatggaagctatgggtacggaggcaactcggcgacagcaggctacagtcagttctacagcaacggagggcattctgggaatgccagtggcggtggcggcgggggcggtggtggctcctccggctatggctcctactaccaaggtgacaactacaactcaccggtgcccccaaaacacgctgggaagaagcagccgcacgggggccagcagaagccctcctacggctcgggctaccagtcccaccagggccagcagcagtcctacaaccagagcccctacagcaactatggccctccacagggcaagcagaaaggctataaccatggacaaggcagctactcctactcgaactcctacaactctcccgggggcgggggcggatccgactacaactacgagagcaaattcaactacagtggtagtggaggccgaagcggcgggaacagctacggctcaggcggggcatcctacaacccagggtcacacgggggctacggcggaggttctgggggcggctcctcataccaaggcaaacaaggaggctactcacagtcgaactacaactccccggggtccggccagaactacagtggccctcccagctcctaccagtcctcacaaggcggctatggcagaaacgcagaccacagcatgaactaccagtacagataagcccccgcggggcggagatttctaccttctgcacttactccccatcagaagatcgagttttatgcatcacagttaacatgtcagctggccctccaggcccccgcccccatcccgtccacgttgctgtgtcgtgaggtgcagcgggtcaccctgtggcccgtcctgtgacccatatttagccgtgtttgggactccgtgtcttcaatggtttgttagttgccattacaactttgtctgggtagagtttttgagtttttgcagttcagtatccctctgtctattcacacttcgtgttagtggtaactcagtttgtctttaaatagttacagaagggatacgtcatttgttaatgcttttgtgaagtgagttaaacgagctttctgtattttaatgctttagtgtttcagttttataagtgaagattttattttaaaaaccagtgggaaagagtggggggtttctttttatgtctgggtcattcaggcagtacatctgaattaagctgaatgtagacaaataaagaaaaacaaaactg

SEQ ID NO: 351846 - DNA, 2226 bp, Homo sapiens
tcatttttctcacttgtgatttctgagtccttttaacaatgatgaggcatgattggggatgtggaagatgagtaggatggtggtgctacagctggaggccacaggagaggtgcaagctgggctcagtttgtgtggctgccccacccactgtgttacgccacagaggcagccctgggggttaggattggcagagctctcgtggagacctgccatcgtgctgatccagagccaccttgctattctctctgtagaggagaaggcagagcccccccaggctatgaatgccctgatgcggttgaaccagctgaagccagggctgcagtacaagctggtgtcccagactgggcccgtccatgcccccatctttaccatgtctgtggaggttgatggcaattcattcgaggcctctgggccctccaaaaagacggccaagctgcacgtggccgttaaggtgttacaggacatgggcttgccgacgggtgctgaaggcagggactcgagcaagggggaggactcggctgaggagaccgaggcgaagccagcagtggtggcccctgccccagtggtagaagctgtctccacccctagtgcggcctttccctcagatgccactgccgagcaggggccgatcctgacaaagcacggcaagaacccagtcatggagctgaacgagaagaggcgtgggctcaagtacgagctcatctccgagaccgggggcagccacgacaagcgcttcgtcatggaggtcgaagtggatggacagaagttccaaggtgctggttccaacaaaaaggtggcgaaggcctacgctgctcttgctgccctagaaaagcttttccctgacacccctctcgcccttgatgccaacaaaaagaagagagccccagtacccgtcagagggggaccgaaatttgctgctaagccacataaccctggcttcggcatgggaggccccatgcacaacgaagtgcccccaccccccaaccttcgagggcggggaagaggcgggagcatccggggacgagggcgcgggcgaggatttggtggcgccaaccatggaggctacatgaatgccggtgctgggtatggaagctatgggtacggaggcaactcggcgacagcaggctacagtcagttctacagcaacggagggcattctgggaatgccagtggcggtggcggcgggggcggtggtggctcctccggctatggctcctactaccaaggtgacaactacaactcaccggtgcccccaaaacacgctgggaagaagcagccgcacgggggccagcagaagccctcctacggctcgggctaccagtcccaccagggccagcagcagtcctacaaccagagcccctacagcaactatggccctccacagggcaagcagaaaggctataaccatggacaaggcagctactcctactcgaactcctacaactctcccgggggcgggggcggatccgactacaactacgagagcaaattcaactacagtggtagtggaggccgaagcggcgggaacagctacggctcaggcggggcatcctacaacccagggtcacacgggggctacggcggaggttctgggggcggctcctcataccaaggcaaacaaggaggctactcacagtcgaactacaactccccggggtccggccagaactacagtggccctcccagctcctaccagtcctcacaaggcggctatggcagaaacgcagaccacagcatgaactaccagtacagataagcccccgcggggcggagatttctaccttctgcacttactccccatcccgtccacgttgctgtgtcgtgaggtgcagcgggtcaccctgtggcccgtcctgtgacccatatttagccgtgtttgggactccgtgtcttcaatggtttgttagttgccattacaactttgtctgggtagagtttttgagtttttgcagttcagtatccctctgtctattcacacttcgtgttagtggtaactcagtttgtctttaaatagttacagaagggatacgtcatttgttaatgcttttgtgaagtgagttaaacgagctttctgtattttaatgctttagtgtttcagttttataagtgaagattttattttaaaaaccagtgggaaagagtggggggtttctttttatgtctgggtcattcaggcagtacatctgaattaagctgaatgtagacaaataaagaaaaacaaaactg

SEQ ID NO: 351847 - DNA, 584 bp, Homo sapiens
gtttatcaaaggacaacactgagctcatatttcaatcaataaaagaagataatcagggtttaatatcccaagaaattttatagaaatcatagagggctatacatttttattgtaactttctatctcttgtttttctattttttctttctgttcgtatttcttcttcttgggattcttcataaagaagtgttttgatttgacaaaagtcttaatcatggtctttaaatttaaaaaaaggatttatttagtcctcaaccacaatgataagagattctgtcttttccacttgagattacttgtaagcgacaataaaaatgtatagccctctatgatttctataaaatttcttgggatattaaaccctgattatcttcttttattgattgaaatatgagctcagtgttgtcctttgataaacttcttaccttttcccacattgttcttttcacttggattacaactagatgggaaataaaggtggagtctcccctcttcccaatcccatttgaagtatctgtgactccctatctctgatttggaaacatatttattttcctctgaataaattacctactgaagaattt

SEQ ID NO: 351848 - DNA, 584 bp, Homo sapiens
gtttatcaaaggacaacactgagctcatatttcaatcaataaaagaagataatcagggtttaatatcccaagaaattttatagaaatcatagagggctatacatttttattgtcgcttacaagtaatctcaagtggaaaagacagaatcgcttatcattgtggttgaggactaaataaatgctttttttaaatttaaagaccatgattaagacttttgtcagatcaaaacacttctttatgaagaatgccatgaagaagaaatacgaacagaaagaaaaaatagaaaaacaagagatagaaaggtacaataaaaatgtatagccctctatgatttctataaaatttcttgggatattaaaccctgattatcttcttttattgattgaaatatgagctcagtgttgtcctttgataaacttcttaccttttcccacattgttcttttcacttggattacaactagatgggaaataaaggtggagtctcccctcttcccaatcccatttgaagtatctgtgactccctatctctgatttggaaacatatttattttcctctgaataaattacctactgaagaattt

SEQ ID NO: 351849 - DNA, 4772 bp, Homo sapiens
cccctcaccccactcaactgccccgggcccccgcgcgcgcggccgcccctccactcaccctgtgtcggccccgctcccctctcccccaccaggcgagcaggcgagcgggcagagcccgcggcggaggtcggcgcggctccggggttcatggtgacgaggcggcggccgctcgagcccagcggcggcgggcggcgggagctggggcgcgggcccgggccgcctctcccagagcgcggggccgggcggcgggcgcgcccaggcagcggctgcgagcgcccccccgcgccgcgcccccgcgccccccgcgccgcgcccccgcgcgcttggcttgcggggggccgggcctgcgggcggccgccgcgccgcgcacccatggacggcccggccatcatcacccaggtgaccaaccccaaggaggacgagggccggttgccgggcgcgggcgagaaagcctcccagtgcaacgtcagcttaaagaagcagaggagccgcagcatccttagctccttcttctgctgcttccgtgattacaatgtggaggcccctccacccagcagccccagtgtgcttccgccactggtggaggagaatggtgggcttcagaagccaccagctaagtaccttcttccagaggtgacggtgcttgactatggaaagaaatgtgtggtcattgatttagatgaaacattggtgcacagttcgtttaagcctattagtaatgctgattttattgttccggttgaaatcgatggaactatacatcaggtgtatgtgctgaagcggccacatgtggacgagttcctccagaggatggggcagctttttgaatgtgtgctctttactgccagcttggccaagtatgcagaccctgtggctgacctcctagaccgctggggtgtgttccgggcccggctcttcagagaatcatgtgtttttcatcgtgggaactacgtgaaggacctgagtcgccttgggcgggagctgagcaaagtgatcattgttgacaattcccctgcctcatacatcttccatcctgagaatgcagtgcctgtgcagtcctggttcgatgacatgacggacacggagctgctggacctcatccccttctttgagggcctgagccgggaggacgacgtgtacagcatgctgcacagactctgcaataggtagccctggcctctgcctgcctcccgcctgtgcactctggaacctctggcctcaggggacctgcctgtcctcagctccctgggagctgaaagtgaggatactccgtgctccaggccacagggtgaatgtggccatgcctacctgttttgtttttttaagaacagaaacaactattttaaaagaactcttttaagaaatttcataaagggacatgcattttactgggtttgcttttcttaaaacataccaaaaaagaaaaaaatagaaaaaaaaaaaaaaaaagcttgatctctatcagacttcctttcaactgtcctcccctccaagcagaccacctgtccccttctatcccagctcagagcagctgacccaactcagaatctctttcctacaggatgaagtgccttttgaatgttattttaagccgagagttaatttttctacacaacatatttccagacatcttttagtcttttattgtcttagatactataagaagatgaacatgacaattttctagaacctggtagcgtgtgtgtgtgtggcggggggtgctgagggaggggagtgagtcacaggagcctgtcccccaacaggtgtgactgctctgacaacctgtggcatgctgcagggtcaggctcctgataggaggatttcatgactatgtcattgtctccactcatttttgacccagtttggaatgtatctgcaattgtgtggctcaacactttaggaaacaatagattattttatattattatttctgatggtgacaagtttgtcttgaggtcacattttctccttgaaaagtgacatcctgtcacttctgctctcacactactgccatacatttgtgttttttgttgttattgtttgggtagagcagttacaagaaaccctaaaacccttggatataaaagaaatctgtttattgatttttaaatctttcctttccaaaagctggatacacatggagctgtttgggaattttccttgctgctaccgcgctgccaccaaatggaattgaccagcggctgttacactgttctttgccactgtgcctatgctcagaatatgctcactgctaagctacaaactcggacagggtcagaaacagaggtgtcccatcccattgcagcctccaccacctgtaaccccttcctggcattggccactgaagggtacaaaggcaaaaggaccacagcaccacttaggtgtagcatggattttaaactgcagtcagtatcagatcctgtttgataaataagctgactgttctctcttgagaacctgtggcctcaaccagccaccaagctgatgtggcccaagtccatctcttggtcttctcctttgaagcacagcctatttctgagccaagggttggggaagcctgtctagatgtgggactcattgccccaaaccagggagaggaagagctcccacagggagagcccaggctctctttgcagcctttcccagtttggtgtttaagcagtgccatgttccttgtttgacaacaagacagtctgtaaagtattgctcttaaaaacaattaaaaagaaccctttcatattggcaccattgccttagtcctctgtgggttggtcttcagccagcattctggtgggagtgactggcattaacaagactggaaatcgggggtcaaagtaaaatatctttgttttgctttcattcacaaagtaatgaagccagctgccaattacatcctcccaacagcactttggtctgtggactgctgtgtgaatattcagaagggaagtaagtattcagggggtaaacaggtctcccagcattctgagtgttccaaaccagtaatccacatgccaattcaaatagaacagccccttgctagatattaccacagataatgacagttacatggtagaactgcccatgccacaaatatttatttggaaaagtagtcattaaatgaacccactgccttaaatgtcttgaatgttgcagtcaagtgtctgtcatgtgttgatatccacacagaattaggccctaatgagagccttagaccctcaaccatgcccccttcgttggcatcacagggccttatttggaagagcgggcaaagaggatggaaatcataaaatatttcatgggaatcgaacctagggatagtgctccacttctgacgatggagtgaagacacttggcagacttgagccagacacttcacctagtagttcctgaaactgtgagcaccactgcactaagccagtgcggagctgttagggacgggcccagctcctgcaccacggacacagaatgtctggagagggccagcaggccctctgagggttctggaatctgtgcaccttatttgaccacactccaaaattctgtttttattttaacccttgaatctgctttatgtacataatcaaaatatctatatctatatctatatctatatctatatatttttaatcatctacatgtaaatgaagcaatagaattctaacataaggccaagaaatgagacgaatgtttggggtttatgttttttaaggtaaatacgggtattgtttttaattattaccatgtattaaattgtgggctttgaaacctaatgaaacctgttagccacttctctgtgccatatacttcccatgttaccaaaatacccccaactctttagccaaaagagaaccctgacctcctgagtttccatgctcctttctgtaccaggtttaaatgtagtcttctggagaagtatttttgacattgagctctgggacaggacaccttgggtttgtggactgcagcccactatgatgttattacttctctggccaggcctccagtggaagtgcacaggcactcccaatgttgttaatgctctgtcttccatttgttctggaatcctacgtgttggtctgtggttccatgcattagctgtttgtaaataatgcatttgcatactgaaaaaggaatgccacctgccacagttgatggtgaggaagctcctttgacgtggtgcaattttgatgagatgtctctggggacacgaggatgccctaatgatgctgacttgtcatggttgcagcatttgaacttttggtgttaaaaaaaaaaacctgtaagtctgtaacctggcaacattttacaaccctgtatttttaaagatggctttctaataaaaaatccagaaccacacagccctatggtcaaacaatcctacgtttgtgcctctgcttttaaaggtgctgtgctggacagttggcatgccagggttcgagaagagtgaatggcttgacgtacttgcagttaactgtgcaaaattggctggctgcctctgttcctactgtactgtaactttgatcatgtctgttcctgttccattctcccaggagcttctctgcagactgacacaccctcccccaccccgggtagtggagatgctggtgtctgggtagtcatggatttctgctggacatttgaatgtgataaacaatccagcattacttaggaaatgctacatgcggaatgtgcacgtttccaggggcgagtattgtcaatcaaaaggtttgcaatgatttccttcctgccaaaaataaacatgtgaaactgca

SEQ ID NO: 351850 - DNA, 435 bp, Homo sapiens
gtgtcctgtcccagagctcaatgtcaaaaatacttctccagaagactacatttaaacctggtacagaaaggagcatggaaactcaggaggtcagggttcgagaagagtgaatggcttgacgtacttgcagttaactgtgcaaaattggctggctgcctctgttcctactgtactgtaactttgatcatgtctgttcctgttccattctcccaggagcttctctgcagactgacacaccctcccccaccccgggtagtggagatgctggtgtctgggtagtcatggatttctgctggacatttgaatgtgataaacaatccagcattacttaggaaatgctacatgcggaatgtgcacgtttccaggggcgagtattgtcaatcaaaaggtttgcaatgatttccttcctgccaaaaataaacatgtgaaactgca

SEQ ID NO: 351851 - DNA, 4751 bp, Homo sapiens
cccctcaccccactcaactgccccgggcccccgcgcgcgcggccgcccctccactcaccctgtgtcggccccgctcccctctcccccaccaggcgagcaggcgagcgggcagagcccgcggcggaggtcggcgcggctccggggttcatggtgacgaggcggcggccgctcgagcccagcggcggcgggcggcgggagctggggcgcgggcccgggccgcctctcccagagcgcggggccgggcggcgggcgcgcccaggcagcggctgcgagcgcccccccgcgccgcgcccccgcgccccccgcgccgcgcccccgcgcgcttggcttgcggggggccgggcctgcgggcggccgccgcgccgcgcacccatggacggcccggccatcatcacccaggtgaccaaccccaaggaggacgagggccggttgccgggcgcgggcgagaaagcctcccagtgcaacgtcagcttaaagaagcagaggagccgcagcatccttagctccttcttctgctgcttccgtgattacaatgtggaggcccctccacccagcagccccagtgtgcttccgccactggtggaggagaatggtgggcttcagaagggtgaccagaggcaggtcattcccataccaagtccaccagctaagtaccttcttccagaggtgacggtgcttgactatggaaagaaatgtgtggtcattgatttagatgaaacattggtgcacagttcgtttaagcctattagtaatgctgattttattgttccggttgaaatcgatggaactatacatcaggtgtatgtgctgaagcggccacatgtggacgagttcctccagaggatggggcagctttttgaatgtgtgctctttactgccagcttggccaagtatgcagaccctgtggctgacctcctagaccgctggggtgtgttccgggcccggctcttcagagaatcatgtgtttttcatcgtgggaactacgtgaaggacctgagtcgccttgggcgggagctgagcaaagtgatcattgttgacaattcccctgcctcatacatcttccatcctgagaatgcagtgcctgtgcagtcctggttcgatgacatgacggacacggagctgctggacctcatccccttctttgagggcctgagccgggaggacgacgtgtacagcatgctgcacagactctgcaataggtagccctggcctctgcctgcctcccgcctgtgcactctggaacctctggcctcaggggacctgcctgtcctcagctccctgggagctgaaagtgaggatactccgtgctccaggccacagggtgaatgtggccatgcctacctgttttgtttttttaagaacagaaacaactattttaaaagaactcttttaagaaatttcataaagggacatgcattttactgggtttgcttttcttaaaacataccaaaaaagaaaaaaatagaaaaaaaaaaaaaaaaagcttgatctctatcagacttcctttcaactgtcctcccctccaagcagaccacctgtccccttctatcccagctcagagcagctgacccaactcagaatctctttcctacaggatgaagtgccttttgaatgttattttaagccgagagttaatttttctacacaacatatttccagacatcttttagtcttttattgtcttagatactataagaagatgaacatgacaattttctagaacctggtagcgtgtgtgtgtgtggcggggggtgctgagggaggggagtgagtcacaggagcctgtcccccaacaggtgtgactgctctgacaacctgtggcatgctgcagggtcaggctcctgataggaggatttcatgactatgtcattgtctccactcatttttgacccagtttggaatgtatctgcaattgtgtggctcaacactttaggaaacaatagattattttatattattatttctgatggtgacaagtttgtcttgaggtcacattttctccttgaaaagtgacatcctgtcacttctgctctcacactactgccatacatttgtgttttttgttgttattgtttgggtagagcagttacaagaaaccctaaaacccttggatataaaagaaatctgtttattgatttttaaatctttcctttccaaaagctggatacacatggagctgtttgggaattttccttgctgctaccgcgctgccaccaaatggaattgaccagcggctgttacactgttctttgccactgtgcctatgctcagaatatgctcactgctaagctacaaactcggacagggtcagaaacagaggtgtcccatcccattgcagcctccaccacctgtaaccccttcctggcattggccactgaagggtacaaaggcaaaaggaccacagcaccacttaggtgtagcatggattttaaactgcagtcagtatcagatcctgtttgataaataagctgactgttctctcttgagaacctgtggcctcaaccagccaccaagctgatgtggcccaagtccatctcttggtcttctcctttgaagcacagcctatttctgagccaagggttggggaagcctgtctagatgtgggactcattgccccaaaccagggagaggaagagctcccacagggagagcccaggctctctttgcagcctttcccagtttggtgtttaagcagtgccatgttccttgtttgacaacaagacagtctgtaaagtattgctcttaaaaacaattaaaaagaaccctttcatattggcaccattgccttagtcctctgtgggttggtcttcagccagcattctggtgggagtgactggcattaacaagactggaaatcgggggtcaaagtaaaatatctttgttttgctttcattcacaaagtaatgaagccagctgccaattacatcctcccaacagcactttggtctgtggactgctgtgtgaatattcagaagggaagtaagtattcagggggtaaacaggtctcccagcattctgagtgttccaaaccagtaatccacatgccaattcaaatagaacagccccttgctagatattaccacagataatgacagttacatggtagaactgcccatgccacaaatatttatttggaaaagtagtcattaaatgaacccactgccttaaatgtcttgaatgttgcagtcaagtgtctgtcatgtgttgatatccacacagaattaggccctaatgagagccttagaccctcaaccatgcccccttcgttggcatcacagggccttatttggaagagcgggcaaagaggatggaaatcataaaatatttcatgggaatcgaacctagggatagtgctccacttctgacgatggagtgaagacacttggcagacttgagccagacacttcacctagtagttcctgaaactgtgagcaccactgcactaagccagtgcggagctgttagggacgggcccagctcctgcaccacggacacagaatgtctggagagggccagcaggccctctgagggttctggaatctgtgcaccttatttgaccacactccaaaattctgtttttattttaacccttgaatctgctttatgtacataatcaaaatatctatatctatatctatatctatatctatatatttttaatcatctacatgtaaatgaagcaatagaattctaacataaggccaagaaatgagacgaatgtttggggtttatgttttttaaggtaaatacgggtattgtttttaattattaccatgtattaaattgtgggctttgaaacctaatgaaacctgttagccacttctctgtgccatatacttcccatgttaccaaaatacccccaactctttagccatgtagtcttctggagaagtatttttgacattgagctctgggacaggacaccttgggtttgtggactgcagcccactatgatgttattacttctctggccaggcctccagtggaagtgcacaggcactcccaatgttgttaatgctctgtcttccatttgttctggaatcctacgtgttggtctgtggttccatgcattagctgtttgtaaataatgcatttgcatactgaaaaaggaatgccacctgccacagttgatggtgaggaagctcctttgacgtggtgcaattttgatgagatgtctctggggacacgaggatgccctaatgatgctgacttgtcatggttgcagcatttgaacttttggtgttaaaaaaaaaaacctgtaagtctgtaacctggcaacattttacaaccctgtatttttaaagatggctttctaataaaaaatccagaaccacacagccctatggtcaaacaatcctacgtttgtgcctctgcttttaaaggtgctgtgctggacagttggcatgccagggttcgagaagagtgaatggcttgacgtacttgcagttaactgtgcaaaattggctggctgcctctgttcctactgtactgtaactttgatcatgtctgttcctgttccattctcccaggagcttctctgcagactgacacaccctcccccaccccgggtagtggagatgctggtgtctgggtagtcatggatttctgctggacatttgaatgtgataaacaatccagcattacttaggaaatgctacatgcggaatgtgcacgtttccaggggcgagtattgtcaatcaaaaggtttgcaatgatttccttcctgccaaaaataaacatgtgaaactgca

SEQ ID NO: 351852 - DNA, 4789 bp, Homo sapiens
cccctcaccccactcaactgccccgggcccccgcgcgcgcggccgcccctccactcaccctgtgtcggccccgctcccctctcccccaccaggcgagcaggcgagcgggcagagcccgcggcggaggtcggcgcggctccggggttcatggtgacgaggcggcggccgctcgagcccagcggcggcgggcggcgggagctggggcgcgggcccgggccgcctctcccagagcgcggggccgggcggcgggcgcgcccaggcagcggctgcgagcgcccccccgcgccgcgcccccgcgccccccgcgccgcgcccccgcgcgcttggcttgcggggggccgggcctgcgggcggccgccgcgccgcgcacccatggacggcccggccatcatcacccaggtgaccaaccccaaggaggacgagggccggttgccgggcgcgggcgagaaagcctcccagtgcaacgtcagcttaaagaagcagaggagccgcagcatccttagctccttcttctgctgcttccgtgattacaatgtggaggcccctccacccagcagccccagtgtgcttccgccactggtggaggagaatggtgggcttcagaagggtgaccagaggcaggtcattcccataccaagtccaccagctaagtaccttcttccagaggtgacggtgcttgactatggaaagaaatgtgtggtcattgatttagatgaaacattggtgcacagttcgtttaagcctattagtaatgctgattttattgttccggttgaaatcgatggaactatacatcaggtgtatgtgctgaagcggccacatgtggacgagttcctccagaggatggggcagctttttgaatgtgtgctctttactgccagcttggccaagtatgcagaccctgtggctgacctcctagaccgctggggtgtgttccgggcccggctcttcagagaatcatgtgtttttcatcgtgggaactacgtgaaggacctgagtcgccttgggcgggagctgagcaaagtgatcattgttgacaattcccctgcctcatacatcttccatcctgagaatgcagtgcctgtgcagtcctggttcgatgacatgacggacacggagctgctggacctcatccccttctttgagggcctgagccgggaggacgacgtgtacagcatgctgcacagactctgcaataggtagccctggcctctgcctgcctcccgcctgtgcactctggaacctctggcctcaggggacctgcctgtcctcagctccctgggagctgaaagtgaggatactccgtgctccaggccacagggtgaatgtggccatgcctacctgttttgtttttttaagaacagaaacaactattttaaaagaactcttttaagaaatttcataaagggacatgcattttactgggtttgcttttcttaaaacataccaaaaaagaaaaaaatagaaaaaaaaaaaaaaaaagcttgatctctatcagacttcctttcaactgtcctcccctccaagcagaccacctgtccccttctatcccagctcagagcagctgacccaactcagaatctctttcctacaggatgaagtgccttttgaatgttattttaagccgagagttaatttttctacacaacatatttccagacatcttttagtcttttattgtcttagatactataagaagatgaacatgacaattttctagaacctggtagcgtgtgtgtgtgtggcggggggtgctgagggaggggagtgagtcacaggagcctgtcccccaacaggtgtgactgctctgacaacctgtggcatgctgcagggtcaggctcctgataggaggatttcatgactatgtcattgtctccactcatttttgacccagtttggaatgtatctgcaattgtgtggctcaacactttaggaaacaatagattattttatattattatttctgatggtgacaagtttgtcttgaggtcacattttctccttgaaaagtgacatcctgtcacttctgctctcacactactgccatacatttgtgttttttgttgttattgtttgggtagagcagttacaagaaaccctaaaacccttggatataaaagaaatctgtttattgatttttaaatctttcctttccaaaagctggatacacatggagctgtttgggaattttccttgctgctaccgcgctgccaccaaatggaattgaccagcggctgttacactgttctttgccactgtgcctatgctcagaatatgctcactgctaagctacaaactcggacagggtcagaaacagaggtgtcccatcccattgcagcctccaccacctgtaaccccttcctggcattggccactgaagggtacaaaggcaaaaggaccacagcaccacttaggtgtagcatggattttaaactgcagtcagtatcagatcctgtttgataaataagctgactgttctctcttgagaacctgtggcctcaaccagccaccaagctgatgtggcccaagtccatctcttggtcttctcctttgaagcacagcctatttctgagccaagggttggggaagcctgtctagatgtgggactcattgccccaaaccagggagaggaagagctcccacagggagagcccaggctctctttgcagcctttcccagtttggtgtttaagcagtgccatgttccttgtttgacaacaagacagtctgtaaagtattgctcttaaaaacaattaaaaagaaccctttcatattggcaccattgccttagtcctctgtgggttggtcttcagccagcattctggtgggagtgactggcattaacaagactggaaatcgggggtcaaagtaaaatatctttgttttgctttcattcacaaagtaatgaagccagctgccaattacatcctcccaacagcactttggtctgtggactgctgtgtgaatattcagaagggaagtaagtattcagggggtaaacaggtctcccagcattctgagtgttccaaaccagtaatccacatgccaattcaaatagaacagccccttgctagatattaccacagataatgacagttacatggtagaactgcccatgccacaaatatttatttggaaaagtagtcattaaatgaacccactgccttaaatgtcttgaatgttgcagtcaagtgtctgtcatgtgttgatatccacacagaattaggccctaatgagagccttagaccctcaaccatgcccccttcgttggcatcacagggccttatttggaagagcgggcaaagaggatggaaatcataaaatatttcatgggaatcgaacctagggatagtgctccacttctgacgatggagtgaagacacttggcagacttgagccagacacttcacctagtagttcctgaaactgtgagcaccactgcactaagccagtgcggagctgttagggacgggcccagctcctgcaccacggacacagaatgtctggagagggccagcaggccctctgagggttctggaatctgtgcaccttatttgaccacactccaaaattctgtttttattttaacccttgaatctgctttatgtacataatcaaaatatctatatctatatctatatctatatctatatatttttaatcatctacatgtaaatgaagcaatagaattctaacataaggccaagaaatgagacgaatgtttggggtttatgttttttaaggtaaatacgggtattgtttttaattattaccatgtattaaattgtgggctttgaaacctaatgaaacctgttagccacttctctgtgccatatacttcccatgttaccaaaatacccccaactctttagccaaaagagaaccctgacctcctgagtttccatgctcctttctgtaccaggtttaaatgtagtcttctggagaagtatttttgacattgagctctgggacaggacaccttgggtttgtggactgcagcccactatgatgttattacttctctggccaggcctccagtggaagtgcacaggcactcccaatgttgttaatgctctgtcttccatttgttctggaatcctacgtgttggtctgtggttccatgcattagctgtttgtaaataatgcatttgcatactgaaaaaggaatgccacctgccacagttgatggtgaggaagctcctttgacgtggtgcaattttgatgagatgtctctggggacacgaggatgccctaatgatgctgacttgtcatggttgcagcatttgaacttttggtgttaaaaaaaaaaacctgtaagtctgtaacctggcaacattttacaaccctgtatttttaaagatggctttctaataaaaaatccagaaccacacagccctatggtcaaacaatcctacgtttgtgcctctgcttttaaaggtgctgtgctggacagttggcatgccagggttcgagaagagtgaatggcttgacgtacttgcagttaactgtgcaaaattggctggctgcctctgttcctactgtactgtaactttgatcatgtctgttcctgttccattctcccaggagcttctctgcagactgacacaccctcccccaccccgtcgggtggagcgctccacccgacggggtgggaaggtgttgcttaaaaagaacaaacaggctgggcgcagtggctcacgcctgtaatcccaacactttgggaggctgaggcgggcagatcatgaggtcaggagttcaagaccagcctggccaacatggtgaaaccctgt

SEQ ID NO: 351853 - DNA, 4617 bp, Homo sapiens
cccctcaccccactcaactgccccgggcccccgcgcgcgcggccgcccctccactcaccctgtgtcggccccgctcccctctcccccaccaggcgagcaggcgagcgggcagagcccgcggcggaggtcggcgcggctccggggttcatggtgacgaggcggcggccgctcgagcccagcggcggcgggcggcgggagctggggcgcgggcccgggccgcctctcccagagcgcggggccgggcggcgggcgcgcccaggcagcggctgcgagcgcccccccgcgccgcgcccccgcgccccccgcgccgcgcccccgcgcgcttggcttgcggggggccgggcctgcgggcggccgccgcgccgcgcacccatggacggcccggccatcatcacccaggtgaccaaccccaaggaggacgagggccggttgccgggcgcgggcgagaaagccaccagctaagtaccttcttccagaggtgacggtgcttgactatggaaagaaatgtgtggtcattgatttagatgaaacattggtgcacagttcgtttaagcctattagtaatgctgattttattgttccggttgaaatcgatggaactatacatcaggtgtatgtgctgaagcggccacatgtggacgagttcctccagaggatggggcagctttttgaatgtgtgctctttactgccagcttggccaagtatgcagaccctgtggctgacctcctagaccgctggggtgtgttccgggcccggctcttcagagaatcatgtgtttttcatcgtgggaactacgtgaaggacctgagtcgccttgggcgggagctgagcaaagtgatcattgttgacaattcccctgcctcatacatcttccatcctgagaatgcagtgcctgtgcagtcctggttcgatgacatgacggacacggagctgctggacctcatccccttctttgagggcctgagccgggaggacgacgtgtacagcatgctgcacagactctgcaataggtagccctggcctctgcctgcctcccgcctgtgcactctggaacctctggcctcaggggacctgcctgtcctcagctccctgggagctgaaagtgaggatactccgtgctccaggccacagggtgaatgtggccatgcctacctgttttgtttttttaagaacagaaacaactattttaaaagaactcttttaagaaatttcataaagggacatgcattttactgggtttgcttttcttaaaacataccaaaaaagaaaaaaatagaaaaaaaaaaaaaaaaagcttgatctctatcagacttcctttcaactgtcctcccctccaagcagaccacctgtccccttctatcccagctcagagcagctgacccaactcagaatctctttcctacaggatgaagtgccttttgaatgttattttaagccgagagttaatttttctacacaacatatttccagacatcttttagtcttttattgtcttagatactataagaagatgaacatgacaattttctagaacctggtagcgtgtgtgtgtgtggcggggggtgctgagggaggggagtgagtcacaggagcctgtcccccaacaggtgtgactgctctgacaacctgtggcatgctgcagggtcaggctcctgataggaggatttcatgactatgtcattgtctccactcatttttgacccagtttggaatgtatctgcaattgtgtggctcaacactttaggaaacaatagattattttatattattatttctgatggtgacaagtttgtcttgaggtcacattttctccttgaaaagtgacatcctgtcacttctgctctcacactactgccatacatttgtgttttttgttgttattgtttgggtagagcagttacaagaaaccctaaaacccttggatataaaagaaatctgtttattgatttttaaatctttcctttccaaaagctggatacacatggagctgtttgggaattttccttgctgctaccgcgctgccaccaaatggaattgaccagcggctgttacactgttctttgccactgtgcctatgctcagaatatgctcactgctaagctacaaactcggacagggtcagaaacagaggtgtcccatcccattgcagcctccaccacctgtaaccccttcctggcattggccactgaagggtacaaaggcaaaaggaccacagcaccacttaggtgtagcatggattttaaactgcagtcagtatcagatcctgtttgataaataagctgactgttctctcttgagaacctgtggcctcaaccagccaccaagctgatgtggcccaagtccatctcttggtcttctcctttgaagcacagcctatttctgagccaagggttggggaagcctgtctagatgtgggactcattgccccaaaccagggagaggaagagctcccacagggagagcccaggctctctttgcagcctttcccagtttggtgtttaagcagtgccatgttccttgtttgacaacaagacagtctgtaaagtattgctcttaaaaacaattaaaaagaaccctttcatattggcaccattgccttagtcctctgtgggttggtcttcagccagcattctggtgggagtgactggcattaacaagactggaaatcgggggtcaaagtaaaatatctttgttttgctttcattcacaaagtaatgaagccagctgccaattacatcctcccaacagcactttggtctgtggactgctgtgtgaatattcagaagggaagtaagtattcagggggtaaacaggtctcccagcattctgagtgttccaaaccagtaatccacatgccaattcaaatagaacagccccttgctagatattaccacagataatgacagttacatggtagaactgcccatgccacaaatatttatttggaaaagtagtcattaaatgaacccactgccttaaatgtcttgaatgttgcagtcaagtgtctgtcatgtgttgatatccacacagaattaggccctaatgagagccttagaccctcaaccatgcccccttcgttggcatcacagggccttatttggaagagcgggcaaagaggatggaaatcataaaatatttcatgggaatcgaacctagggatagtgctccacttctgacgatggagtgaagacacttggcagacttgagccagacacttcacctagtagttcctgaaactgtgagcaccactgcactaagccagtgcggagctgttagggacgggcccagctcctgcaccacggacacagaatgtctggagagggccagcaggccctctgagggttctggaatctgtgcaccttatttgaccacactccaaaattctgtttttattttaacccttgaatctgctttatgtacataatcaaaatatctatatctatatctatatctatatctatatatttttaatcatctacatgtaaatgaagcaatagaattctaacataaggccaagaaatgagacgaatgtttggggtttatgttttttaaggtaaatacgggtattgtttttaattattaccatgtattaaattgtgggctttgaaacctaatgaaacctgttagccacttctctgtgccatatacttcccatgttaccaaaatacccccaactctttagccaaaagagaaccctgacctcctgagtttccatgctcctttctgtaccaggtttaaatgtagtcttctggagaagtatttttgacattgagctctgggacaggacaccttgggtttgtggactgcagcccactatgatgttattacttctctggccaggcctccagtggaagtgcacaggcactcccaatgttgttaatgctctgtcttccatttgttctggaatcctacgtgttggtctgtggttccatgcattagctgtttgtaaataatgcatttgcatactgaaaaaggaatgccacctgccacagttgatggtgaggaagctcctttgacgtggtgcaattttgatgagatgtctctggggacacgaggatgccctaatgatgctgacttgtcatggttgcagcatttgaacttttggtgttaaaaaaaaaaacctgtaagtctgtaacctggcaacattttacaaccctgtatttttaaagatggctttctaataaaaaatccagaaccacacagccctatggtcaaacaatcctacgtttgtgcctctgcttttaaaggtgctgtgctggacagttggcatgccagggttcgagaagagtgaatggcttgacgtacttgcagttaactgtgcaaaattggctggctgcctctgttcctactgtactgtaactttgatcatgtctgttcctgttccattctcccaggagcttctctgcagactgacacaccctcccccaccccgggtagtggagatgctggtgtctgggtagtcatggatttctgctggacatttgaatgtgataaacaatccagcattacttaggaaatgctacatgcggaatgtgcacgtttccaggggcgagtattgtcaatcaaaaggtttgcaatgatttccttcctgccaaaaataaacatgtgaaactgca

SEQ ID NO: 351854 - DNA, 3844 bp, Homo sapiens
cccctcaccccactcaactgccccgggcccccgcgcgcgcggccgcccctccactcaccctgtgtcggccccgctcccctctcccccaccaggcgagcaggcgagcgggcagagcccgcggcggaggtcggcgcggctccggggttcatggtgacgaggcggcggccgctcgagcccagcggcggcgggcggcgggagctggggcgcgggcccgggccgcctctcccagagcgcggggccgggcggcgggcgcgcccaggcagcggctgcgagcgcccccccgcgccgcgcccccgcgccccccgcgccgcgcccccgcgcgcttggcttgcggggggccgggcctgcgggcggccgccgcgccgcgcacccatggacggcccggccatcatcacccaggtgaccaaccccaaggaggacgagggccggttgccgggcgcgggcgagaaagcctcccagtgcaacgtcagcttaaagaagcagaggagccgcagcatccttagctccttcttctgctgcttccgtgattacaatgtggaggcccctccacccagcagccccagtgtgcttccgccactggtggaggagaatggtgggcttcagaagggtgaccagaggcaggtcattcccataccaagtccaccagctaagtaccttcttccagaggtgacggtgcttgactatggaaagaaatgtgtggtcattgatttagatgaaacattggtgcacagttcgtttaagcctattagtaatgctgattttattgttccggttgaaatcgatggaactatacatcaggtgtatgtgctgaagcggccacatgtggacgagttcctccagaggatggggcagctttttgaatgtgtgctctttactgccagcttggccaagtatgcagaccctgtggctgacctcctagaccgctggggtgtgttccgggcccggctcttcagagaatcatgtgtttttcatcgtgggaactacgtgaaggacctgagtcgccttgggcgggagctgagcaaagtgatcattgttgacaattcccctgcctcatacatcttccatcctgagaatgcagtgcctgtgcagtcctggttcgatgacatgacggacacggagctgctggacctcatccccttctttgagggcctgagccgggaggacgacgtgtacagcatgctgcacagactctgcaatagctggatacacatggagctgtttgggaattttccttgctgctaccgcgctgccaccaaatggaattgaccagcggctgttacactgttctttgccactgtgcctatgctcagaatatgctcactgctaagctacaaactcggacagggtcagaaacagaggtgtcccatcccattgcagcctccaccacctgtaaccccttcctggcattggccactgaagggtacaaaggcaaaaggaccacagcaccacttaggtgtagcatggattttaaactgcagtcagtatcagatcctgtttgataaataagctgactgttctctcttgagaacctgtggcctcaaccagccaccaagctgatgtggcccaagtccatctcttggtcttctcctttgaagcacagcctatttctgagccaagggttggggaagcctgtctagatgtgggactcattgccccaaaccagggagaggaagagctcccacagggagagcccaggctctctttgcagcctttcccagtttggtgtttaagcagtgccatgttccttgtttgacaacaagacagtctgtaaagtattgctcttaaaaacaattaaaaagaaccctttcatattggcaccattgccttagtcctctgtgggttggtcttcagccagcattctggtgggagtgactggcattaacaagactggaaatcgggggtcaaagtaaaatatctttgttttgctttcattcacaaagtaatgaagccagctgccaattacatcctcccaacagcactttggtctgtggactgctgtgtgaatattcagaagggaagtaagtattcagggggtaaacaggtctcccagcattctgagtgttccaaaccagtaatccacatgccaattcaaatagaacagccccttgctagatattaccacagataatgacagttacatggtagaactgcccatgccacaaatatttatttggaaaagtagtcattaaatgaacccactgccttaaatgtcttgaatgttgcagtcaagtgtctgtcatgtgttgatatccacacagaattaggccctaatgagagccttagaccctcaaccatgcccccttcgttggcatcacagggccttatttggaagagcgggcaaagaggatggaaatcataaaatatttcatgggaatcgaacctagggatagtgctccacttctgacgatggagtgaagacacttggcagacttgagccagacacttcacctagtagttcctgaaactgtgagcaccactgcactaagccagtgcggagctgttagggacgggcccagctcctgcaccacggacacagaatgtctggagagggccagcaggccctctgagggttctggaatctgtgcaccttatttgaccacactccaaaattctgtttttattttaacccttgaatctgctttatgtacataatcaaaatatctatatctatatctatatctatatctatatatttttaatcatctacatgtaaatgaagcaatagaattctaacataaggccaagaaatgagacgaatgtttggggtttatgttttttaaggtaaatacgggtattgtttttaattattaccatgtattaaattgtgggctttgaaacctaatgaaacctgttagccacttctctgtgccatatacttcccatgttaccaaaatacccccaactctttagccaaaagagaaccctgacctcctgagtttccatgctcctttctgtaccaggtttaaatgtagtcttctggagaagtatttttgacattgagctctgggacaggacaccttgggtttgtggactgcagcccactatgatgttattacttctctggccaggcctccagtggaagtgcacaggcactcccaatgttgttaatgctctgtcttccatttgttctggaatcctacgtgttggtctgtggttccatgcattagctgtttgtaaataatgcatttgcatactgaaaaaggaatgccacctgccacagttgatggtgaggaagctcctttgacgtggtgcaattttgatgagatgtctctggggacacgaggatgccctaatgatgctgacttgtcatggttgcagcatttgaacttttggtgttaaaaaaaaaaacctgtaagtctgtaacctggcaacattttacaaccctgtatttttaaagatggctttctaataaaaaatccagaaccacacagccctatggtcaaacaatcctacgtttgtgcctctgcttttaaaggtgctgtgctggacagttggcatgccagggttcgagaagagtgaatggcttgacgtacttgcagttaactgtgcaaaattggctggctgcctctgttcctactgtactgtaactttgatcatgtctgttcctgttccattctcccaggagcttctctgcagactgacacaccctcccccaccccgggtagtggagatgctggtgtctgggtagtcatggatttctgctggacatttgaatgtgataaacaatccagcattacttaggaaatgctacatgcggaatgtgcacgtttccaggggcgagtattgtcaatcaaaaggtttgcaatgatttccttcctgccaaaaataaacatgtgaaactgca

SEQ ID NO: 351855 - DNA, 3722 bp, Homo sapiens
cccctcaccccactcaactgccccgggcccccgcgcgcgcggccgcccctccactcaccctgtgtcggccccgctcccctctcccccaccaggcgagcaggcgagcgggcagagcccgcggcggaggtcggcgcggctccggggttcatggtgacgaggcggcggccgctcgagcccagcggcggcgggcggcgggagctggggcgcgggcccgggccgcctctcccagagcgcggggccgggcggcgggcgcgcccaggcagcggctgcgagcgcccccccgcgccgcgcccccgcgccccccgcgccgcgcccccgcgcgcttggcttgcggggggccgggcctgcgggcggccgccgcgccgcgcacccatggacggcccggccatcatcacccaggtgaccaaccccaaggaggacgagggccggttgccgggcgcgggcgagaaagcctcccagtgcaacgtcagcttaaagaagcagaggagccgcagcatccttagctccttcttctgctgcttccgtgattacaatgtggaggcccctccacccagcagccccagtgtgcttccgccactggtggaggagaatggtgggcttcagaagggtgaccagaggcaggtcattcccataccaagtccaccagctaagtaccttcttccagaggtgacggtgcttgactatggaaagaaatgtgtggtcattgatttagatgaaacattggtgcacagttcgtttaagcctattagtaatgctgattttattgttccggttgaaatcgatggaactatacatcaggtgtatgtgctgaagcggccacatgtggacgagttcctccagaggatggggcagctttttgaatgtgtgctctttactgccagcttggccaagtatgcagaccctgtggctgacctcctagaccgctggggtgtgttccgggcccggctcttcagagaatcatgtgtttttcatcgtgggaactacgtgaaggacctgagtcgccttgggcgggagctgagcaaagtgatcattgttgacaattcccctgcctcatacatcttccatcctgagaatgcactggatacacatggagctgtttgggaattttccttgctgctaccgcgctgccaccaaatggaattgaccagcggctgttacactgttctttgccactgtgcctatgctcagaatatgctcactgctaagctacaaactcggacagggtcagaaacagaggtgtcccatcccattgcagcctccaccacctgtaaccccttcctggcattggccactgaagggtacaaaggcaaaaggaccacagcaccacttaggtgtagcatggattttaaactgcagtcagtatcagatcctgtttgataaataagctgactgttctctcttgagaacctgtggcctcaaccagccaccaagctgatgtggcccaagtccatctcttggtcttctcctttgaagcacagcctatttctgagccaagggttggggaagcctgtctagatgtgggactcattgccccaaaccagggagaggaagagctcccacagggagagcccaggctctctttgcagcctttcccagtttggtgtttaagcagtgccatgttccttgtttgacaacaagacagtctgtaaagtattgctcttaaaaacaattaaaaagaaccctttcatattggcaccattgccttagtcctctgtgggttggtcttcagccagcattctggtgggagtgactggcattaacaagactggaaatcgggggtcaaagtaaaatatctttgttttgctttcattcacaaagtaatgaagccagctgccaattacatcctcccaacagcactttggtctgtggactgctgtgtgaatattcagaagggaagtaagtattcagggggtaaacaggtctcccagcattctgagtgttccaaaccagtaatccacatgccaattcaaatagaacagccccttgctagatattaccacagataatgacagttacatggtagaactgcccatgccacaaatatttatttggaaaagtagtcattaaatgaacccactgccttaaatgtcttgaatgttgcagtcaagtgtctgtcatgtgttgatatccacacagaattaggccctaatgagagccttagaccctcaaccatgcccccttcgttggcatcacagggccttatttggaagagcgggcaaagaggatggaaatcataaaatatttcatgggaatcgaacctagggatagtgctccacttctgacgatggagtgaagacacttggcagacttgagccagacacttcacctagtagttcctgaaactgtgagcaccactgcactaagccagtgcggagctgttagggacgggcccagctcctgcaccacggacacagaatgtctggagagggccagcaggccctctgagggttctggaatctgtgcaccttatttgaccacactccaaaattctgtttttattttaacccttgaatctgctttatgtacataatcaaaatatctatatctatatctatatctatatctatatatttttaatcatctacatgtaaatgaagcaatagaattctaacataaggccaagaaatgagacgaatgtttggggtttatgttttttaaggtaaatacgggtattgtttttaattattaccatgtattaaattgtgggctttgaaacctaatgaaacctgttagccacttctctgtgccatatacttcccatgttaccaaaatacccccaactctttagccaaaagagaaccctgacctcctgagtttccatgctcctttctgtaccaggtttaaatgtagtcttctggagaagtatttttgacattgagctctgggacaggacaccttgggtttgtggactgcagcccactatgatgttattacttctctggccaggcctccagtggaagtgcacaggcactcccaatgttgttaatgctctgtcttccatttgttctggaatcctacgtgttggtctgtggttccatgcattagctgtttgtaaataatgcatttgcatactgaaaaaggaatgccacctgccacagttgatggtgaggaagctcctttgacgtggtgcaattttgatgagatgtctctggggacacgaggatgccctaatgatgctgacttgtcatggttgcagcatttgaacttttggtgttaaaaaaaaaaacctgtaagtctgtaacctggcaacattttacaaccctgtatttttaaagatggctttctaataaaaaatccagaaccacacagccctatggtcaaacaatcctacgtttgtgcctctgcttttaaaggtgctgtgctggacagttggcatgccagggttcgagaagagtgaatggcttgacgtacttgcagttaactgtgcaaaattggctggctgcctctgttcctactgtactgtaactttgatcatgtctgttcctgttccattctcccaggagcttctctgcagactgacacaccctcccccaccccgggtagtggagatgctggtgtctgggtagtcatggatttctgctggacatttgaatgtgataaacaatccagcattacttaggaaatgctacatgcggaatgtgcacgtttccaggggcgagtattgtcaatcaaaaggtttgcaatgatttccttcctgccaaaaataaacatgtgaaactgca

SEQ ID NO: 351856 - DNA, 3201 bp, Homo sapiens
cccctcaccccactcaactgccccgggcccccgcgcgcgcggccgcccctccactcaccctgtgtcggccccgctcccctctcccccaccaggcgagcaggcgagcgggcagagcccgcggcggaggtcggcgcggctccggggttcatggtgacgaggcggcggccgctcgagcccagcggcggcgggcggcgggagctggggcgcgggcccgggccgcctctcccagagcgcggggccgggcggcgggcgcgcccaggcagcggctgcgagcgcccccccgcgccgcgcccccgcgccccccgcgccgcgcccccgcgcgcttggcttgcggggggccgggcctgcgggcggccgccgcgccgcgcacccatggacggcccggccatcatcacccaggtgaccaaccccaaggaggacgagggccggttgccgggcgcgggcgagaaagcctcccagtgcaacgtcagcttaaagaagcagaggagccgcagcatccttagctccttcttctgctgcttccgtgattacaatgtggaggcccctccacccagcagccccagtgtgcttccgccactggtggaggagaatggtgggcttcagaagggtgaccagaggcaggtcattcccataccaagtccaccagctaagtaccttcttccagaggtgacggtgcttgactatggaaagaaatgtgtggtcattgatttagatgaaacattggtgcacagttcgtttaagcctattagtaatgctgattttattgttccggttgaaatcgatggaactatacatcaggtgtatgtgctgaagcggccacatgtggacgagttcctccagaggatggggcagctttttgaatgtgtgctctttactgccagcttggccaagtatgcagaccctgtggctgacctcctagaccgctggggtgtgttccgggcccggctcttcagagaatcatgtgtttttcatcgtgggaactacgtgaaggacctgagtcgccttgggcgggagctgagcaaagtgatcattgttgacaattcccctgcctcatacatcttccatcctgagaatgcagtgcctgtgcagtcctggttcgatgacatgacggacacggagctgctggacctcatccccttctttgagggcctgagccgggaggacgacgtgtacagcatgctgcacagactctgcaataggtagccctggcctctgcctgcctcccgcctgtgcactctggaacctctggcctcaggggacctgcctgtcctcagctccctgggagctgaaagtgaggatactccgtgctccaggccacagggtgaatgtggccatgcctacctgttttgtttttttaagaacagaaacaactattttaaaagaactcttttaagaaatttcataaagggacatgcattttactgggtttgcttttcttaaaacataccaaaaaagaaaaaaatagaaaaaaaaaaaaaaaaagcttgatctctatcagacttcctttcaactgtcctcccctccaagcagaccacctgtccccttctatcccagctcagagcagctgacccaactcagaatctctttcctacaggatgaagtgccttttgaatgttattttaagccgagagttaatttttctacacaacatatttccagacatcttttagtcttttattgtcttagatactataagaagatgaacatgacaattttctagaacctggtagcgtgtgtgtgtgtggcggggggtgctgagggaggggagtgagtcacaggagcctgtcccccaacaggtgtgactgctctgacaacctgtggcatgctgcagggtcaggctcctgataggaggatttcatgactatgtcattgtctccactcatttttgacccagtttggaatgtatctgcaattgtgtggctcaacactttaggaaacaatagattattttatattattatttctgatggtgacaagtttgtcttgaggtcacattttctccttgaaaagtgacatcctgtcacttctgctctcacactactgccatacatttgtgttttttgttgttattgtttgggtagagcagttacaagaaaccctaaaacccttggatataaaagaaatctgtttattgatttttaaatctttcctttccaaaagctggatacacatggagctgtttgggaattttccttgctgctaccgcgctgccaccaaatggaattgaccagcggctgttacactgttctttgccactgtgcctatgctcagaatatgctcactgctaagctacaaactcggacagggtcagaaacagaggtgtcccatcccattgcagcctccaccacctgtaaccccttcctggcattggccactgaagggtacaaaggcaaaaggaccacagcaccacttaggtgtagcatggattttaaactgcagtcagtatcagatcctgtttgataaataagctgactgttctctcttgagaacctgtggcctcaaccagccaccaagctgatgtggcccaagtccatctcttggtcttctcctttgaagcacagcctatttctgagccaagggttggggaagcctgtctagatgtgggactcattgccccaaaccagggagaggaagagctcccacagggagagcccaggctctctttgcagcctttcccagtttggtgtttaagcagtgccatgttccttgtttgacaacaagacagtctgtaaagtattgctcttaaaaacaattaaaaagaaccctttcatattggcaccattgccttagtcctctgtgggttggtcttcagccagcattctggtgggagtgactggcattaacaagactggaaatcgggggtcaaagtaaaatatctttgttttgctttcattcacaaagtaatgaagccagctgccaattacatcctcccaacagcactttggtctgtggactgctgtgtgaatattcagaagggaagagcttctctgcagactgacacaccctcccccaccccgggtagtggagatgctggtgtctgggtagtcatggatttctgctggacatttgaatgtgataaacaatccagcattacttaggaaatgctacatgcggaatgtgcacgtttccaggggcgagtattgtcaatcaaaaggtttgcaatgatttccttcctgccaaaaataaacatgtgaaactgca

SEQ ID NO: 351857 - DNA, 1499 bp, Homo sapiens
cccctcaccccactcaactgccccgggcccccgcgcgcgcggccgcccctccactcaccctgtgtcggccccgctcccctctcccccaccaggcgagcaggcgagcgggcagagcccgcggcggaggtcggcgcggctccggggttcatggtgacgaggcggcggccgctcgagcccagcggcggcgggcggcgggagctggggcgcgggcccgggccgcctctcccagagcgcggggccgggcggcgggcgcgcccaggcagcggctgcgagcgcccccccgcgccgcgcccccgcgccccccgcgccgcgcccccgcgcgcttggcttgcggggggccgggcctgcgggcggccgccgcgccgcgcacccatggacggcccggccatcatcacccaggtgaccaaccccaaggaggacgagggccggttgccgggcgcgggcgagaaagcctcccagtgcaacgtcagcttaaagaagcagaggagccgcagcatccttagctccttcttctgctgcttccgtgattacaatgtggaggcccctccacccagcagccccagtgtgcttccgccactggtggaggagaatggtgggcttcagaagggtgaccagaggcaggtcattcccataccaagtccaccagctaagtaccttcttccagaggtgacggtgcttgactatggaaagaaatgtgtggtcattgatttagatgaaacattggtgcacagttcgtttaagcctattagtaatgctgattttattgttccggttgaaatcgatggaactatacatcaggtgtatgtgctgaagcggccacatgtggacgagttcctccagaggatggggcagctttttgaatgtgtgctctttactgccagcttggccaagtatgcagaccctgtggctgacctcctagaccgctggggtgtgttccgggcccggctcttcagagaatcatgtgtttttcatcgtgggaactacgtgaaggacctgagtcgccttgggcgggagctgagcaaagtgatcattgttgacaattcccctgcctcatacatcttccatcctgagaatgcagtgcctgtgcagtcctggttcgatgacatgacggacacggagctgctggacctcatccccttctttgagggcctgagccgggaggacgacgtgtacagcatgctgcacagactctgcaatagtaatgaagccagctgccaattacatcctcccaacagcactttggtctgtggactgctgtgtgaatattcagaagggaagagcttctctgcagactgacacaccctcccccaccccgggtagtggagatgctggtgtctgggtagtcatggatttctgctggacatttgaatgtgataaacaatccagcattacttaggaaatgctacatgcggaatgtgcacgtttccaggggcgagtattgtcaatcaaaaggtttgcaatgatttccttcctgccaaaaataaacatgtgaaactgca

SEQ ID NO: 351858 - DNA, 548 bp, Homo sapiens
ctgctccaccgacggggtgcatttgatgagatgttatgatggttgcacattgacttgtaaaagtctacctggcaacattttacaaccctgtatttttaaagatggctttctaataaaaaatccagaaccacacagccctatggtcaaacaatcctacgtttgtgcctctgcttttaaaggtgctgtgctggacagttggcatgccagggttcgagaagagtgaatggcttgacgtacttgcagttaactgtgcaaaattggctggctgcctctgttcctactgtactgtaactttgatcatgtctgttcctgttccattctcccaggagcttctctgcagactgacacaccctcccccaccccgggtagtggagatgctggtgtctgggtagtcatggatttctgctggacatttgaatgtgataaacaatccagcattacttaggaaatgctacatgcggaatgtgcacgtttccaggggcgagtattgtcaatcaaaaggtttgcaatgatttccttcctgccaaaaataaacatgtgaaactgca

SEQ ID NO: 351859 - DNA, 4805 bp, Homo sapiens
cccctcaccccactcaactgccccgggcccccgcgcgcgcggccgcccctccactcaccctgtgtcggccccgctcccctctcccccaccaggcgagcaggcgagcgggcagagcccgcggcggaggtcggcgcggctccggggttcatggtgacgaggcggcggccgctcgagcccagcggcggcgggcggcgggagctggggcgcgggcccgggccgcctctcccagagcgcggggccgggcggcgggcgcgcccaggcagcggctgcgagcgcccccccgcgccgcgcccccgcgccccccgcgccgcgcccccgcgcgcttggcttgcggggggccgggcctgcgggcggccgccgcgccgcgcacccatggacggcccggccatcatcacccaggtgaccaaccccaaggaggacgagggccggttgccgggcgcgggcgagaaagcctcccagtgcaacgtcagcttaaagaagcagaggagccgcagcatccttagctccttcttctgctgcttccgtgattacaatgtggaggcccctccacccagcagccccagtgtgcttccgccactggtggaggagaatggtgggcttcagaagggtgaccagaggcaggtcattcccataccaagtccaccagctaagtaccttcttccagaggtgacggtgcttgactatggaaagaaatgtgtggtcattgatttagatgaaacattggtgcacagttcgtttaagcctattagtaatgctgattttattgttccggttgaaatcgatggaactatacatcaggtgtatgtgctgaagcggccacatgtggacgagttcctccagaggatggggcagctttttgaatgtgtgctctttactgccagcttggccaagtatgcagaccctgtggctgacctcctagaccgctggggtgtgttccgggcccggctcttcagagaatcatgtgtttttcatcgtgggaactacgtgaaggacctgagtcgccttgggcgggagctgagcaaagtgatcattgttgacaattcccctgcctcatacatcttccatcctgagaatgcagtgcctgtgcagtcctggttcgatgacatgacggacacggagctgctggacctcatccccttctttgagggcctgagccgggaggacgacgtgtacagcatgctgcacagactctgcaataggtagccctggcctctgcctgcctcccgcctgtgcactctggaacctctggcctcaggggacctgcctgtcctcagctccctgggagctgaaagtgaggatactccgtgctccaggccacagggtgaatgtggccatgcctacctgttttgtttttttaagaacagaaacaactattttaaaagaactcttttaagaaatttcataaagggacatgcattttactgggtttgcttttcttaaaacataccaaaaaagaaaaaaatagaaaaaaaaaaaaaaaaagcttgatctctatcagacttcctttcaactgtcctcccctccaagcagaccacctgtccccttctatcccagctcagagcagctgacccaactcagaatctctttcctacaggatgaagtgccttttgaatgttattttaagccgagagttaatttttctacacaacatatttccagacatcttttagtcttttattgtcttagatactataagaagatgaacatgacaattttctagaacctggtagcgtgtgtgtgtgtggcggggggtgctgagggaggggagtgagtcacaggagcctgtcccccaacaggtgtgactgctctgacaacctgtggcatgctgcagggtcaggctcctgataggaggatttcatgactatgtcattgtctccactcatttttgacccagtttggaatgtatctgcaattgtgtggctcaacactttaggaaacaatagattattttatattattatttctgatggtgacaagtttgtcttgaggtcacattttctccttgaaaagtgacatcctgtcacttctgctctcacactactgccatacatttgtgttttttgttgttattgtttgggtagagcagttacaagaaaccctaaaacccttggatataaaagaaatctgtttattgatttttaaatctttcctttccaaaagctggatacacatggagctgtttgggaattttccttgctgctaccgcgctgccaccaaatggaattgaccagcggctgttacactgttctttgccactgtgcctatgctcagaatatgctcactgctaagctacaaactcggacagggtcagaaacagaggtgtcccatcccattgcagcctccaccacctgtaaccccttcctggcattggccactgaagggtacaaaggcaaaaggaccacagcaccacttaggtgtagcatggattttaaactgcagtcagtatcagatcctgtttgataaataagctgactgttctctcttgagaacctgtggcctcaaccagccaccaagctgatgtggcccaagtccatctcttggtcttctcctttgaagcacagcctatttctgagccaagggttggggaagcctgtctagatgtgggactcattgccccaaaccagggagaggaagagctcccacagggagagcccaggctctctttgcagcctttcccagtttggtgtttaagcagtgccatgttccttgtttgacaacaagacagtctgtaaagtattgctcttaaaaacaattaaaaagaaccctttcatattggcaccattgccttagtcctctgtgggttggtcttcagccagcattctggtgggagtgactggcattaacaagactggaaatcgggggtcaaagtaaaatatctttgttttgctttcattcacaaagtaatgaagccagctgccaattacatcctcccaacagcactttggtctgtggactgctgtgtgaatattcagaagggaagtaagtattcagggggtaaacaggtctcccagcattctgagtgttccaaaccagtaatccacatgccaattcaaatagaacagccccttgctagatattaccacagataatgacagttacatggtagaactgcccatgccacaaatatttatttggaaaagtagtcattaaatgaacccactgccttaaatgtcttgaatgttgcagtcaagtgtctgtcatgtgttgatatccacacagaattaggccctaatgagagccttagaccctcaaccatgcccccttcgttggcatcacagggccttatttggaagagcgggcaaagaggatggaaatcataaaatatttcatgggaatcgaacctagggatagtgctccacttctgacgatggagtgaagacacttggcagacttgagccagacacttcacctagtagttcctgaaactgtgagcaccactgcactaagccagtgcggagctgttagggacgggcccagctcctgcaccacggacacagaatgtctggagagggccagcaggccctctgagggttctggaatctgtgcaccttatttgaccacactccaaaattctgtttttattttaacccttgaatctgctttatgtacataatcaaaatatctatatctatatctatatctatatctatatatttttaatcatctacatgtaaatgaagcaatagaattctaacataaggccaagaaatgagacgaatgtttggggtttatgttttttaaggtaaatacgggtattgtttttaattattaccatgtattaaattgtgggctttgaaacctaatgaaacctgttagccacttctctgtgccatatacttcccatgttaccaaaatacccccaactctttagccaaaagagaaccctgacctcctgagtttccatgctcctttctgtaccaggtttaaatgtagtcttctggagaagtatttttgacattgagctctgggacaggacaccttgggtttgtggactgcagcccactatgatgttattacttctctggccaggcctccagtggaagtgcacaggcactcccaatgttgttaatgctctgtcttccatttgttctggaatcctacgtgttggtctgtggttccatgcattagctgtttgtaaataatgcatttgcatactgaaaaaggaatgccacctgccacagttgatggtgaggaagctcctttgacgtggtgcaattttgatgagatgtctctggggacacgaggatgccctaatgatgctgacttgtcatggttgcagcatttgaacttttggtgttaaaaaaaaaaacctgtaagtctgtaacctggcaacattttacaaccctgtatttttaaagatggctttctaataaaaaatccagaaccacacagccctatggtcaaacaatcctacgtttgtgcctctgcttttaaaggtgctgtgctggacagttggcatgccagggttcgagaagagtgaatggcttgacgtacttgcagttaactgtgcaaaattggctggctgcctctgttcctactgtactgtaactttgatcatgtctgttcctgttccattctcccaggagcttctctgcagactgacacaccctcccccaccccgggtagtggagatgctggtgtctgggtagtcatggatttctgctggacatttgaatgtgataaacaatccagcattacttaggaaatgctacatgcggaatgtgcacgtttccaggggcgagtattgtcaatcaaaaggtttgcaatgatttccttcctgccaaaaataaacatgtgaaactgca

SEQ ID NO: 351860 - DNA, 4960 bp, Homo sapiens
cccctcaccccactcaactgccccgggcccccgcgcgcgcggccgcccctccactcaccctgtgtcggccccgctcccctctcccccaccaggcgagcaggcgagcgggcagagcccgcggcggaggtcggcgcggctccggggttcatggtgacgaggcggcggccgctcgagcccagcggcggcgggcggcgggagctggggcgcgggcccgggccgcctctcccagagcgcggggccgggcggcgggcgcgcccaggcagcggctgcgagcgcccccccgcgccgcgcccccgcgccccccgcgccgcgcccccgcgcgcttggcttgcggggggccgggcctgcgggcggccgccgcgccgcgcacccatggacggcccggccatcatcacccaggtgaccaaccccaaggaggacgagggccggttgccgggcgcgggcgagaaagattctctttctgagaagggcaagaagacgagtggcagaagaatcagaaagttgtctacacacctgggtggcaggtgtaaccctcgctaaagagagaaggaggacagccaggcgcggtggttcacgcctataatcccagcactttgggaggccaagcctcccagtgcaacgtcagcttaaagaagcagaggagccgcagcatccttagctccttcttctgctgcttccgtgattacaatgtggaggcccctccacccagcagccccagtgtgcttccgccactggtggaggagaatggtgggcttcagaagggtgaccagaggcaggtcattcccataccaagtccaccagctaagtaccttcttccagaggtgacggtgcttgactatggaaagaaatgtgtggtcattgatttagatgaaacattggtgcacagttcgtttaagcctattagtaatgctgattttattgttccggttgaaatcgatggaactatacatcaggtgtatgtgctgaagcggccacatgtggacgagttcctccagaggatggggcagctttttgaatgtgtgctctttactgccagcttggccaagtatgcagaccctgtggctgacctcctagaccgctggggtgtgttccgggcccggctcttcagagaatcatgtgtttttcatcgtgggaactacgtgaaggacctgagtcgccttgggcgggagctgagcaaagtgatcattgttgacaattcccctgcctcatacatcttccatcctgagaatgcagtgcctgtgcagtcctggttcgatgacatgacggacacggagctgctggacctcatccccttctttgagggcctgagccgggaggacgacgtgtacagcatgctgcacagactctgcaataggtagccctggcctctgcctgcctcccgcctgtgcactctggaacctctggcctcaggggacctgcctgtcctcagctccctgggagctgaaagtgaggatactccgtgctccaggccacagggtgaatgtggccatgcctacctgttttgtttttttaagaacagaaacaactattttaaaagaactcttttaagaaatttcataaagggacatgcattttactgggtttgcttttcttaaaacataccaaaaaagaaaaaaatagaaaaaaaaaaaaaaaaagcttgatctctatcagacttcctttcaactgtcctcccctccaagcagaccacctgtccccttctatcccagctcagagcagctgacccaactcagaatctctttcctacaggatgaagtgccttttgaatgttattttaagccgagagttaatttttctacacaacatatttccagacatcttttagtcttttattgtcttagatactataagaagatgaacatgacaattttctagaacctggtagcgtgtgtgtgtgtggcggggggtgctgagggaggggagtgagtcacaggagcctgtcccccaacaggtgtgactgctctgacaacctgtggcatgctgcagggtcaggctcctgataggaggatttcatgactatgtcattgtctccactcatttttgacccagtttggaatgtatctgcaattgtgtggctcaacactttaggaaacaatagattattttatattattatttctgatggtgacaagtttgtcttgaggtcacattttctccttgaaaagtgacatcctgtcacttctgctctcacactactgccatacatttgtgttttttgttgttattgtttgggtagagcagttacaagaaaccctaaaacccttggatataaaagaaatctgtttattgatttttaaatctttcctttccaaaagctggatacacatggagctgtttgggaattttccttgctgctaccgcgctgccaccaaatggaattgaccagcggctgttacactgttctttgccactgtgcctatgctcagaatatgctcactgctaagctacaaactcggacagggtcagaaacagaggtgtcccatcccattgcagcctccaccacctgtaaccccttcctggcattggccactgaagggtacaaaggcaaaaggaccacagcaccacttaggtgtagcatggattttaaactgcagtcagtatcagatcctgtttgataaataagctgactgttctctcttgagaacctgtggcctcaaccagccaccaagctgatgtggcccaagtccatctcttggtcttctcctttgaagcacagcctatttctgagccaagggttggggaagcctgtctagatgtgggactcattgccccaaaccagggagaggaagagctcccacagggagagcccaggctctctttgcagcctttcccagtttggtgtttaagcagtgccatgttccttgtttgacaacaagacagtctgtaaagtattgctcttaaaaacaattaaaaagaaccctttcatattggcaccattgccttagtcctctgtgggttggtcttcagccagcattctggtgggagtgactggcattaacaagactggaaatcgggggtcaaagtaaaatatctttgttttgctttcattcacaaagtaatgaagccagctgccaattacatcctcccaacagcactttggtctgtggactgctgtgtgaatattcagaagggaagtaagtattcagggggtaaacaggtctcccagcattctgagtgttccaaaccagtaatccacatgccaattcaaatagaacagccccttgctagatattaccacagataatgacagttacatggtagaactgcccatgccacaaatatttatttggaaaagtagtcattaaatgaacccactgccttaaatgtcttgaatgttgcagtcaagtgtctgtcatgtgttgatatccacacagaattaggccctaatgagagccttagaccctcaaccatgcccccttcgttggcatcacagggccttatttggaagagcgggcaaagaggatggaaatcataaaatatttcatgggaatcgaacctagggatagtgctccacttctgacgatggagtgaagacacttggcagacttgagccagacacttcacctagtagttcctgaaactgtgagcaccactgcactaagccagtgcggagctgttagggacgggcccagctcctgcaccacggacacagaatgtctggagagggccagcaggccctctgagggttctggaatctgtgcaccttatttgaccacactccaaaattctgtttttattttaacccttgaatctgctttatgtacataatcaaaatatctatatctatatctatatctatatctatatatttttaatcatctacatgtaaatgaagcaatagaattctaacataaggccaagaaatgagacgaatgtttggggtttatgttttttaaggtaaatacgggtattgtttttaattattaccatgtattaaattgtgggctttgaaacctaatgaaacctgttagccacttctctgtgccatatacttcccatgttaccaaaatacccccaactctttagccaaaagagaaccctgacctcctgagtttccatgctcctttctgtaccaggtttaaatgtagtcttctggagaagtatttttgacattgagctctgggacaggacaccttgggtttgtggactgcagcccactatgatgttattacttctctggccaggcctccagtggaagtgcacaggcactcccaatgttgttaatgctctgtcttccatttgttctggaatcctacgtgttggtctgtggttccatgcattagctgtttgtaaataatgcatttgcatactgaaaaaggaatgccacctgccacagttgatggtgaggaagctcctttgacgtggtgcaattttgatgagatgtctctggggacacgaggatgccctaatgatgctgacttgtcatggttgcagcatttgaacttttggtgttaaaaaaaaaaacctgtaagtctgtaacctggcaacattttacaaccctgtatttttaaagatggctttctaataaaaaatccagaaccacacagccctatggtcaaacaatcctacgtttgtgcctctgcttttaaaggtgctgtgctggacagttggcatgccagggttcgagaagagtgaatggcttgacgtacttgcagttaactgtgcaaaattggctggctgcctctgttcctactgtactgtaactttgatcatgtctgttcctgttccattctcccaggagcttctctgcagactgacacaccctcccccaccccgggtagtggagatgctggtgtctgggtagtcatggatttctgctggacatttgaatgtgataaacaatccagcattacttaggaaatgctacatgcggaatgtgcacgtttccaggggcgagtattgtcaatcaaaaggtttgcaatgatttccttcctgccaaaaataaacatgtgaaactgca

SEQ ID NO: 351861 - DNA, 4375 bp, Homo sapiens
gggacctcacaccatgaagcgatgatggcggttgcggggaacgcacgcgagaaacctcccagtgcaacgtcagcttaaagaagcagaggagccgcagcatccttagctccttcttctgctgcttccgtgattacaatgtggaggcccctccacccagcagccccagtgtgcttccgccactggtggaggagaatggtgggcttcagaagccaccagctaagtaccttcttccagaggtgacggtgcttgactatggaaagaaatgtgtggtcattgatttagatgaaacattggtgcacagttcgtttaagcctattagtaatgctgattttattgttccggttgaaatcgatggaactatacatcaggtgtatgtgctgaagcggccacatgtggacgagttcctccagaggatggggcagctttttgaatgtgtgctctttactgccagcttggccaagtatgcagaccctgtggctgacctcctagaccgctggggtgtgttccgggcccggctcttcagagaatcatgtgtttttcatcgtgggaactacgtgaaggacctgagtcgccttgggcgggagctgagcaaagtgatcattgttgacaattcccctgcctcatacatcttccatcctgagaatgcagtgcctgtgcagtcctggttcgatgacatgacggacacggagctgctggacctcatccccttctttgagggcctgagccgggaggacgacgtgtacagcatgctgcacagactctgcaataggtagccctggcctctgcctgcctcccgcctgtgcactctggaacctctggcctcaggggacctgcctgtcctcagctccctgggagctgaaagtgaggatactccgtgctccaggccacagggtgaatgtggccatgcctacctgttttgtttttttaagaacagaaacaactattttaaaagaactcttttaagaaatttcataaagggacatgcattttactgggtttgcttttcttaaaacataccaaaaaagaaaaaaatagaaaaaaaaaaaaaaaaagcttgatctctatcagacttcctttcaactgtcctcccctccaagcagaccacctgtccccttctatcccagctcagagcagctgacccaactcagaatctctttcctacaggatgaagtgccttttgaatgttattttaagccgagagttaatttttctacacaacatatttccagacatcttttagtcttttattgtcttagatactataagaagatgaacatgacaattttctagaacctggtagcgtgtgtgtgtgtggcggggggtgctgagggaggggagtgagtcacaggagcctgtcccccaacaggtgtgactgctctgacaacctgtggcatgctgcagggtcaggctcctgataggaggatttcatgactatgtcattgtctccactcatttttgacccagtttggaatgtatctgcaattgtgtggctcaacactttaggaaacaatagattattttatattattatttctgatggtgacaagtttgtcttgaggtcacattttctccttgaaaagtgacatcctgtcacttctgctctcacactactgccatacatttgtgttttttgttgttattgtttgggtagagcagttacaagaaaccctaaaacccttggatataaaagaaatctgtttattgatttttaaatctttcctttccaaaagctggatacacatggagctgtttgggaattttccttgctgctaccgcgctgccaccaaatggaattgaccagcggctgttacactgttctttgccactgtgcctatgctcagaatatgctcactgctaagctacaaactcggacagggtcagaaacagaggtgtcccatcccattgcagcctccaccacctgtaaccccttcctggcattggccactgaagggtacaaaggcaaaaggaccacagcaccacttaggtgtagcatggattttaaactgcagtcagtatcagatcctgtttgataaataagctgactgttctctcttgagaacctgtggcctcaaccagccaccaagctgatgtggcccaagtccatctcttggtcttctcctttgaagcacagcctatttctgagccaagggttggggaagcctgtctagatgtgggactcattgccccaaaccagggagaggaagagctcccacagggagagcccaggctctctttgcagcctttcccagtttggtgtttaagcagtgccatgttccttgtttgacaacaagacagtctgtaaagtattgctcttaaaaacaattaaaaagaaccctttcatattggcaccattgccttagtcctctgtgggttggtcttcagccagcattctggtgggagtgactggcattaacaagactggaaatcgggggtcaaagtaaaatatctttgttttgctttcattcacaaagtaatgaagccagctgccaattacatcctcccaacagcactttggtctgtggactgctgtgtgaatattcagaagggaagtaagtattcagggggtaaacaggtctcccagcattctgagtgttccaaaccagtaatccacatgccaattcaaatagaacagccccttgctagatattaccacagataatgacagttacatggtagaactgcccatgccacaaatatttatttggaaaagtagtcattaaatgaacccactgccttaaatgtcttgaatgttgcagtcaagtgtctgtcatgtgttgatatccacacagaattaggccctaatgagagccttagaccctcaaccatgcccccttcgttggcatcacagggccttatttggaagagcgggcaaagaggatggaaatcataaaatatttcatgggaatcgaacctagggatagtgctccacttctgacgatggagtgaagacacttggcagacttgagccagacacttcacctagtagttcctgaaactgtgagcaccactgcactaagccagtgcggagctgttagggacgggcccagctcctgcaccacggacacagaatgtctggagagggccagcaggccctctgagggttctggaatctgtgcaccttatttgaccacactccaaaattctgtttttattttaacccttgaatctgctttatgtacataatcaaaatatctatatctatatctatatctatatctatatatttttaatcatctacatgtaaatgaagcaatagaattctaacataaggccaagaaatgagacgaatgtttggggtttatgttttttaaggtaaatacgggtattgtttttaattattaccatgtattaaattgtgggctttgaaacctaatgaaacctgttagccacttctctgtgccatatacttcccatgttaccaaaatacccccaactctttagccaaaagagaaccctgacctcctgagtttccatgctcctttctgtaccaggtttaaatgtagtcttctggagaagtatttttgacattgagctctgggacaggacaccttgggtttgtggactgcagcccactatgatgttattacttctctggccaggcctccagtggaagtgcacaggcactcccaatgttgttaatgctctgtcttccatttgttctggaatcctacgtgttggtctgtggttccatgcattagctgtttgtaaataatgcatttgcatactgaaaaaggaatgccacctgccacagttgatggtgaggaagctcctttgacgtggtgcaattttgatgagatgtctctggggacacgaggatgccctaatgatgctgacttgtcatggttgcagcatttgaacttttggtgttaaaaaaaaaaacctgtaagtctgtaacctggcaacattttacaaccctgtatttttaaagatggctttctaataaaaaatccagaaccacacagccctatggtcaaacaatcctacgtttgtgcctctgcttttaaaggtgctgtgctggacagttggcatgccagggttcgagaagagtgaatggcttgacgtacttgcagttaactgtgcaaaattggctggctgcctctgttcctactgtactgtaactttgatcatgtctgttcctgttccattctcccaggagcttctctgcagactgacacaccctcccccaccccgggtagtggagatgctggtgtctgggtagtcatggatttctgctggacatttgaatgtgataaacaatccagcattacttaggaaatgctacatgcggaatgtgcacgtttccaggggcgagtattgtcaatcaaaaggtttgcaatgatttccttcctgccaaaaataaacatgtgaaactgca

SEQ ID NO: 351862 - DNA, 4027 bp, Homo sapiens
cccgggtatgatatggtgtggctgtgtccccaccatctctaattgtagttcccataatcaccacatgttgtgggagggacctagtgggaggtaactgaatcatggggtgggtctatgcagaccctgtggctgacctcctagaccgctggggtgtgttccgggcccggctcttcagagaatcatgtgtttttcatcgtgggaactacgtgaaggacctgagtcgccttgggcgggagctgagcaaagtgatcattgttgacaattcccctgcctcatacatcttccatcctgagaatgcagtgcctgtgcagtcctggttcgatgacatgacggacacggagctgctggacctcatccccttctttgagggcctgagccgggaggacgacgtgtacagcatgctgcacagactctgcaataggtagccctggcctctgcctgcctcccgcctgtgcactctggaacctctggcctcaggggacctgcctgtcctcagctccctgggagctgaaagtgaggatactccgtgctccaggccacagggtgaatgtggccatgcctacctgttttgtttttttaagaacagaaacaactattttaaaagaactcttttaagaaatttcataaagggacatgcattttactgggtttgcttttcttaaaacataccaaaaaagaaaaaaatagaaaaaaaaaaaaaaaaagcttgatctctatcagacttcctttcaactgtcctcccctccaagcagaccacctgtccccttctatcccagctcagagcagctgacccaactcagaatctctttcctacaggatgaagtgccttttgaatgttattttaagccgagagttaatttttctacacaacatatttccagacatcttttagtcttttattgtcttagatactataagaagatgaacatgacaattttctagaacctggtagcgtgtgtgtgtgtggcggggggtgctgagggaggggagtgagtcacaggagcctgtcccccaacaggtgtgactgctctgacaacctgtggcatgctgcagggtcaggctcctgataggaggatttcatgactatgtcattgtctccactcatttttgacccagtttggaatgtatctgcaattgtgtggctcaacactttaggaaacaatagattattttatattattatttctgatggtgacaagtttgtcttgaggtcacattttctccttgaaaagtgacatcctgtcacttctgctctcacactactgccatacatttgtgttttttgttgttattgtttgggtagagcagttacaagaaaccctaaaacccttggatataaaagaaatctgtttattgatttttaaatctttcctttccaaaagctggatacacatggagctgtttgggaattttccttgctgctaccgcgctgccaccaaatggaattgaccagcggctgttacactgttctttgccactgtgcctatgctcagaatatgctcactgctaagctacaaactcggacagggtcagaaacagaggtgtcccatcccattgcagcctccaccacctgtaaccccttcctggcattggccactgaagggtacaaaggcaaaaggaccacagcaccacttaggtgtagcatggattttaaactgcagtcagtatcagatcctgtttgataaataagctgactgttctctcttgagaacctgtggcctcaaccagccaccaagctgatgtggcccaagtccatctcttggtcttctcctttgaagcacagcctatttctgagccaagggttggggaagcctgtctagatgtgggactcattgccccaaaccagggagaggaagagctcccacagggagagcccaggctctctttgcagcctttcccagtttggtgtttaagcagtgccatgttccttgtttgacaacaagacagtctgtaaagtattgctcttaaaaacaattaaaaagaaccctttcatattggcaccattgccttagtcctctgtgggttggtcttcagccagcattctggtgggagtgactggcattaacaagactggaaatcgggggtcaaagtaaaatatctttgttttgctttcattcacaaagtaatgaagccagctgccaattacatcctcccaacagcactttggtctgtggactgctgtgtgaatattcagaagggaagtaagtattcagggggtaaacaggtctcccagcattctgagtgttccaaaccagtaatccacatgccaattcaaatagaacagccccttgctagatattaccacagataatgacagttacatggtagaactgcccatgccacaaatatttatttggaaaagtagtcattaaatgaacccactgccttaaatgtcttgaatgttgcagtcaagtgtctgtcatgtgttgatatccacacagaattaggccctaatgagagccttagaccctcaaccatgcccccttcgttggcatcacagggccttatttggaagagcgggcaaagaggatggaaatcataaaatatttcatgggaatcgaacctagggatagtgctccacttctgacgatggagtgaagacacttggcagacttgagccagacacttcacctagtagttcctgaaactgtgagcaccactgcactaagccagtgcggagctgttagggacgggcccagctcctgcaccacggacacagaatgtctggagagggccagcaggccctctgagggttctggaatctgtgcaccttatttgaccacactccaaaattctgtttttattttaacccttgaatctgctttatgtacataatcaaaatatctatatctatatctatatctatatctatatatttttaatcatctacatgtaaatgaagcaatagaattctaacataaggccaagaaatgagacgaatgtttggggtttatgttttttaaggtaaatacgggtattgtttttaattattaccatgtattaaattgtgggctttgaaacctaatgaaacctgttagccacttctctgtgccatatacttcccatgttaccaaaatacccccaactctttagccaaaagagaaccctgacctcctgagtttccatgctcctttctgtaccaggtttaaatgtagtcttctggagaagtatttttgacattgagctctgggacaggacaccttgggtttgtggactgcagcccactatgatgttattacttctctggccaggcctccagtggaagtgcacaggcactcccaatgttgttaatgctctgtcttccatttgttctggaatcctacgtgttggtctgtggttccatgcattagctgtttgtaaataatgcatttgcatactgaaaaaggaatgccacctgccacagttgatggtgaggaagctcctttgacgtggtgcaattttgatgagatgtctctggggacacgaggatgccctaatgatgctgacttgtcatggttgcagcatttgaacttttggtgttaaaaaaaaaaacctgtaagtctgtaacctggcaacattttacaaccctgtatttttaaagatggctttctaataaaaaatccagaaccacacagccctatggtcaaacaatcctacgtttgtgcctctgcttttaaaggtgctgtgctggacagttggcatgccagggttcgagaagagtgaatggcttgacgtacttgcagttaactgtgcaaaattggctggctgcctctgttcctactgtactgtaactttgatcatgtctgttcctgttccattctcccaggagcttctctgcagactgacacaccctcccccaccccgggtagtggagatgctggtgtctgggtagtcatggatttctgctggacatttgaatgtgataaacaatccagcattacttaggaaatgctacatgcggaatgtgcacgtttccaggggcgagtattgtcaatcaaaaggtttgcaatgatttccttcctgccaaaaataaacatgtgaaactgca

SEQ ID NO: 351863 - DNA, 3890 bp, Homo sapiens
ctcaatttgaacaagggaacaaacaaaatcatgatgataacgatgatgacaccagtcgtccttactaaagaaagtgctcaaagtccgggtacccggttaggttaggagcagcccccagcgctagatgcagtcctgctgcctcctccatgcactgtcttccaggtgcctgtgcagtcctggttcgatgacatgacggacacggagctgctggacctcatccccttctttgagggcctgagccgggaggacgacgtgtacagcatgctgcacagactctgcaataggtagccctggcctctgcctgcctcccgcctgtgcactctggaacctctggcctcaggggacctgcctgtcctcagctccctgggagctgaaagtgaggatactccgtgctccaggccacagggtgaatgtggccatgcctacctgttttgtttttttaagaacagaaacaactattttaaaagaactcttttaagaaatttcataaagggacatgcattttactgggtttgcttttcttaaaacataccaaaaaagaaaaaaatagaaaaaaaaaaaaaaaaagcttgatctctatcagacttcctttcaactgtcctcccctccaagcagaccacctgtccccttctatcccagctcagagcagctgacccaactcagaatctctttcctacaggatgaagtgccttttgaatgttattttaagccgagagttaatttttctacacaacatatttccagacatcttttagtcttttattgtcttagatactataagaagatgaacatgacaattttctagaacctggtagcgtgtgtgtgtgtggcggggggtgctgagggaggggagtgagtcacaggagcctgtcccccaacaggtgtgactgctctgacaacctgtggcatgctgcagggtcaggctcctgataggaggatttcatgactatgtcattgtctccactcatttttgacccagtttggaatgtatctgcaattgtgtggctcaacactttaggaaacaatagattattttatattattatttctgatggtgacaagtttgtcttgaggtcacattttctccttgaaaagtgacatcctgtcacttctgctctcacactactgccatacatttgtgttttttgttgttattgtttgggtagagcagttacaagaaaccctaaaacccttggatataaaagaaatctgtttattgatttttaaatctttcctttccaaaagctggatacacatggagctgtttgggaattttccttgctgctaccgcgctgccaccaaatggaattgaccagcggctgttacactgttctttgccactgtgcctatgctcagaatatgctcactgctaagctacaaactcggacagggtcagaaacagaggtgtcccatcccattgcagcctccaccacctgtaaccccttcctggcattggccactgaagggtacaaaggcaaaaggaccacagcaccacttaggtgtagcatggattttaaactgcagtcagtatcagatcctgtttgataaataagctgactgttctctcttgagaacctgtggcctcaaccagccaccaagctgatgtggcccaagtccatctcttggtcttctcctttgaagcacagcctatttctgagccaagggttggggaagcctgtctagatgtgggactcattgccccaaaccagggagaggaagagctcccacagggagagcccaggctctctttgcagcctttcccagtttggtgtttaagcagtgccatgttccttgtttgacaacaagacagtctgtaaagtattgctcttaaaaacaattaaaaagaaccctttcatattggcaccattgccttagtcctctgtgggttggtcttcagccagcattctggtgggagtgactggcattaacaagactggaaatcgggggtcaaagtaaaatatctttgttttgctttcattcacaaagtaatgaagccagctgccaattacatcctcccaacagcactttggtctgtggactgctgtgtgaatattcagaagggaagtaagtattcagggggtaaacaggtctcccagcattctgagtgttccaaaccagtaatccacatgccaattcaaatagaacagccccttgctagatattaccacagataatgacagttacatggtagaactgcccatgccacaaatatttatttggaaaagtagtcattaaatgaacccactgccttaaatgtcttgaatgttgcagtcaagtgtctgtcatgtgttgatatccacacagaattaggccctaatgagagccttagaccctcaaccatgcccccttcgttggcatcacagggccttatttggaagagcgggcaaagaggatggaaatcataaaatatttcatgggaatcgaacctagggatagtgctccacttctgacgatggagtgaagacacttggcagacttgagccagacacttcacctagtagttcctgaaactgtgagcaccactgcactaagccagtgcggagctgttagggacgggcccagctcctgcaccacggacacagaatgtctggagagggccagcaggccctctgagggttctggaatctgtgcaccttatttgaccacactccaaaattctgtttttattttaacccttgaatctgctttatgtacataatcaaaatatctatatctatatctatatctatatctatatatttttaatcatctacatgtaaatgaagcaatagaattctaacataaggccaagaaatgagacgaatgtttggggtttatgttttttaaggtaaatacgggtattgtttttaattattaccatgtattaaattgtgggctttgaaacctaatgaaacctgttagccacttctctgtgccatatacttcccatgttaccaaaatacccccaactctttagccaaaagagaaccctgacctcctgagtttccatgctcctttctgtaccaggtttaaatgtagtcttctggagaagtatttttgacattgagctctgggacaggacaccttgggtttgtggactgcagcccactatgatgttattacttctctggccaggcctccagtggaagtgcacaggcactcccaatgttgttaatgctctgtcttccatttgttctggaatcctacgtgttggtctgtggttccatgcattagctgtttgtaaataatgcatttgcatactgaaaaaggaatgccacctgccacagttgatggtgaggaagctcctttgacgtggtgcaattttgatgagatgtctctggggacacgaggatgccctaatgatgctgacttgtcatggttgcagcatttgaacttttggtgttaaaaaaaaaaacctgtaagtctgtaacctggcaacattttacaaccctgtatttttaaagatggctttctaataaaaaatccagaaccacacagccctatggtcaaacaatcctacgtttgtgcctctgcttttaaaggtgctgtgctggacagttggcatgccagggttcgagaagagtgaatggcttgacgtacttgcagttaactgtgcaaaattggctggctgcctctgttcctactgtactgtaactttgatcatgtctgttcctgttccattctcccaggagcttctctgcagactgacacaccctcccccaccccgggtagtggagatgctggtgtctgggtagtcatggatttctgctggacatttgaatgtgataaacaatccagcattacttaggaaatgctacatgcggaatgtgcacgtttccaggggcgagtattgtcaatcaaaaggtttgcaatgatttccttcctgccaaaaataaacatgtgaaactgca

SEQ ID NO: 351864 - DNA, 2497 bp, Homo sapiens
cccctcaccccactcaactgccccgggcccccgcgcgcgcggccgcccctccactcaccctgtgtcggccccgctcccctctcccccaccaggcgagcaggcgagcgggcagagcccgcggcggaggtcggcgcggctccggggttcatggtgacgaggcggcggccgctcgagcccagcggcggcgggcggcgggagctggggcgcgggcccgggccgcctctcccagagcgcggggccgggcggcgggcgcgcccaggcagcggctgcgagcgcccccccgcgccgcgcccccgcgccccccgcgccgcgcccccgcgcgcttggcttgcggggggccgggcctgcgggcggccgccgcgccgcgcacccatggacggcccggccatcatcacccaggtgaccaaccccaaggaggacgagggccggttgccgggcgcgggcgagaaagcctcccagtgcaacgtcagcttaaagaagcagaggagccgcagcatccttagctccttcttctgctgcttccgtgattacaatgtggaggcccctccacccagcagccccagtgtgcttccgccactggtggaggagaatggtgggcttcagaagggtgaccagaggcaggtcattcccataccaagtccaccagctaagtaccttcttccagaggtgacggtgcttgactatggaaagaaatgtgtggtcattgatttagatgaaacattggtgcacagttcgtttaagcctattagtaatgctgattttattgttccggttgaaatcgatggaactatacatcaggtgtatgtgctgaagcggccacatgtggacgagttcctccagaggatggggcagctttttgaatgtgtgctctttactgccagcttggccaagtatgcagaccctgtggctgacctcctagaccgctggggtgtgttccgggcccggctcttcagagaatcatgtgtttttcatcgtgggaactacgtgaaggacctgagtcgccttgggcgggagctgagcaaagtgatcattgttgacaattcccctgcctcatacatcttccatcctgagaatgcagtgcctgtgcagtcctggttcgatgacatgacggacacggagctgctggacctcatccccttctttgagggcctgagccgggaggacgacgtgtacagcatgctgcacagactctgcaataggtagccctggcctctgcctgcctcccgcctgtgcactctggaacctctggcctcaggggacctgcctgtcctcagctccctgggagctgaaagtgaggatactccgtgctccaggccacagggtgaatgtggccatgcctacctgttttgtttttttaagaacagaaacaactattttaaaagaactcttttaagaaatttcataaagggacatgcattttactgggtttgcttttcttaaaacataccaaaaaagaaaaaaatagaaaaaaaaaaaaaaaaagcttgatctctatcagacttcctttcaactgtcctcccctccaagcagaccacctgtccccttctatcccagctcagagcagctgacccaactcagaatctctttcctacaggatgaagtgccttttgaatgttattttaagccgagagttaatttttctacacaacatatttccagacatcttttagtcttttattgtcttagatactataagaagatgaacatgacaattttctagaacctggtagcgtgtgtgtgtgtggcggggggtgctgagggaggggagtgagtcacaggagcctgtcccccaacaggtgtgactgctctgacaacctgtggcatgctgcagggtcaggctcctgataggaggatttcatgactatgtcattgtctccactcatttttgacccagtttggaatgtatctgcaattgtgtggctcaacactttaggaaacaatagattattttatattattatttctgatggtgacaagtttgtcttgaggtcacattttctccttgaaaagtgacatcctgtcacttctgctctcacactactgccatacatttgtgttttttgttgttattgtttgggtagagcagttacaagaaaccctaaaacccttggatataaaagaaatctgtttattgatttttaaatctttcctttccaaaagctggatacacatggagctgtttgggaattttccttgctgctaccgcgctgccaccaaatggaattgaccagcggctgttacactgttctttgccactgtgcctatgctcagaatatgctcactgctaagctacaaactcggacagggtcagaaacagaggtgtcccatcccattgcagcctccaccacctgtaaccccttcctgcatgcatgagtcaagaagccacacctagttacatgaatttaactcagtcagtacagaccgtgataataactgactgttctctctgagactggcctcaccaccaccaagctattgcccagctctctgctatccg

SEQ ID NO: 351865 - DNA, 1833 bp, Homo sapiens
  misc_feature (11)..(11): n is a, c, g, or t
  misc_feature (364)..(364): n is a, c, g, or t
  misc_feature (512)..(512): n is a, c, g, or t
atcccccctanttttagaagttcaatagcagttgtaaaatatggggggaaaagggatcatttgctttcctttcatggtgttaatgtgtgcctgaatctatagccgctaaaatgtaaggctgtccacctgacttatttaaatattatcagagaatagaaagtaatcactttttaagtgtacctatgtgctgccccttaaaacattcatggcatctggcaaatagacccttgtaggctggcctggcatattcagatgttgccgcatcatcacagagaaggtcaaatgaagatgtaaccattgctgctcatgtgtcttctctaagcaacaaggggagcgggatgtaagagagaagttgctaatgatnctgtacaaaggatggattaaataatgaagtcaatttcattgatagaaaatgcaaattttaagattctcagtgtatgaggtctcagcctcgggagcatttattttttactttcctgctaaaaatccactggggaggtataaaattcacnccaaagaagtttgcctgggccaaaagcctccaggttccttctgagaacaaaatactaatgatttttttttttttttggctgcttgggagagactttcagcattctttcacgatatccagatatgtcccttcagcacacacactcaactttctcatctggttcgtttcatcctcccgaaagaacggtgctctcccactcttactctatttcaaagagctactctgtctcaaccacagcagccctgccaagaaaaggcaagatgaaaggctagagcatgtgctaccttgagatttcaagaagtgtcctacctcagctgaagatggagaaacggggagtggagaggggatcagcccagggtaccatgtgatgactaatatgccactcattaagggcttttacctcggctgtccacatccagtcatgcatttggggccaggcatgcctgcgaaatgattgacattcctgtaggtgccccatagaggtgtggcattgagaaattatgtctggaaaatacagccagtgtagtgaccagctgagttaccatataccctgatgattccccttctgtaacagaaggtgacaacaactttgtgaactttctatatctttatctgatgccccaagtggcatcatctttatgtacatgccttagttgagaatatgagactgctctaatctttgtgaatgccttcacacttcagctgaggatgtcaccttctctgtcactccccatcctgcaacctctgcctttgctctgtctaccccagcaattttcatagtgttatccaggtactgtgctaaaaggtcagctcttctgtaaaatgccatgcttcgcagcttcaaaaagcaaaattctgtatttcatggagggagggaagggtcattctcttctaagaaaaatagactggacaggcgaatgcatgcatgcatgtgtttagagttgcttctcagaagacaaagagatgatagcaactattaaaatatgaatgaatgaatgagtgaatgagttgaaggcctagctcgggctgataaagcttttgccttagtagaggttttatgtcaacaccttcaggagggaagcccttatttctgggttgaactccccttccatgatattatgctagcaattgccatcacttagttcctggcgaaggcagaaaaagaaaacaaaaaatcagcattgtcattgacaaaactggatgctgaagataaagtaaaattgtcttttcccttgtcccacatttttgggattaaagccagaattgaataggaaatacagtactatttctgaagtgtcaacgtggggaaactctagagcgaa

SEQ ID NO: 351866 - DNA, 2074 bp, Homo sapiens
  misc_feature (11)..(11): n is a, c, g, or t
  misc_feature (364)..(364): n is a, c, g, or t
  misc_feature (512)..(512): n is a, c, g, or t
atcccccctanttttagaagttcaatagcagttgtaaaatatggggggaaaagggatcatttgctttcctttcatggtgttaatgtgtgcctgaatctatagccgctaaaatgtaaggctgtccacctgacttatttaaatattatcagagaatagaaagtaatcactttttaagtgtacctatgtgctgccccttaaaacattcatggcatctggcaaatagacccttgtaggctggcctggcatattcagatgttgccgcatcatcacagagaaggtcaaatgaagatgtaaccattgctgctcatgtgtcttctctaagcaacaaggggagcgggatgtaagagagaagttgctaatgatnctgtacaaaggatggattaaataatgaagtcaatttcattgatagaaaatgcaaattttaagattctcagtgtatgaggtctcagcctcgggagcatttattttttactttcctgctaaaaatccactggggaggtataaaattcacnccaaagaagtttgcctgggccaaaagcctccaggttccttctgagaacaaaatactaatgatttttttttttttttggctgcttgggagagactttcagcattctttcacgatatccagatatgtcccttcagcacacacactcaactttctcatctggttcgtttcatcctcccgaaagaacggtgctctcccactcttactctatttcaaagagctactctgtctcaaccacagcagccctgccaagaaaaggcaagatgaaaggctagagcatgtgctaccttgagatttcaagaagtgtcctacctcagctgaagatggagaaacggggagtggagaggggatcagcccagggtaccatgtgatgactaatatgccactcattaagggcttttacctcggctgtccacatccagtcatgcatttggggccaggcatgcctgcgaaatgattgacattcctgtaggtgccccatagaggtgtggcattgagaaattatgtctggaaaatacagccagtgtagtgaccagctgagttaccatataccctgatgattccccttctgtaacagaaggtgacaacaactttgtgaactttctatatctttatctgatgccccaagtggcatcatctttatgtacatgccttagttgagaatatgagactgctctaatctttgtgaatgccttcacacttcagctgaggatgtcaccttctctgtcactccccatcctgcaacctctgcctttgctctgtctaccccagcaattttcatagtgttatccaggtactgtgctaaaaggtcagctcttctgtaaaatgccatgcttcgcagcttcaaaaagcaaaattctgtatttcatggagggagggaagggtcattctcttctaagaaaaatagactggacaggcgaatgcatgcatgcatgtgtttagagttgcttctcagaagacaaagagatgatagcaactattaaaatatgaatgaatgaatgagtgaatgagttgaaggcctagctcgggctgataaagcttttgccttagtagaggttttatgtcaacaccttcaggagggaagcccttatttctgggttgaactccccttccatgatattatgctagcaattgccatcacttagttcctggcgaaggcagaaaaagaaaacaaaaaatcagcattgtcattgacaaaactggatgctgaagataaagtaaaattgtcttttcccttgtcccacatttttgggattaaagccagaattgaataggaaatacagtactatttctgaagttgatagccgatctttaagaagaccctgtctttaaaatgaaactagcaggcaaacacctaaataatcgaaaattaccaaagaacaacaacgaaacaagaaaacctaaagatttttacttcctattcttattcctttccttattactgtgacaccccttgcattgctcagttgcctgtgtgtcaaaataacttgtggacgttggaaattatttgaaaatgtattgtgtggaatgtaataaaatgatgatatttttatacaaaaatgtgag

SEQ ID NO: 351867 - DNA, 2940 bp, Homo sapiens
ctgcagtcagcggtgaactgacttcatcccaatccctcagcccccaccaggaccagtctggagtccctcccctgcccccattgaaatttcccttccgtccccaaacttacctctgatctagaccttactcacctccttcctgtttcctaagactccttcctgccgtccacagaccgagccttttatctttgtccaccctgtgccagacacctccttttccagaaccttctccttactggtgaccttacttatctctgttgctttctggggtcctaggaaatgccagcactcccacccacattgcctgaactttccaacactccctaactgcgctgtgtcctatctcaacactttctcatgtatttcttgtgtcttctagaacattcccccgccattattacttcaatatggctacacatacttcctaattgccctgcaaaccatctccttctcaccattgcccagcgatgctttcgtctcctccataaacactcccggagaccaatttttgtgtcacccccatactccctcgttgacacactgactccatacataacctccttgaaaaacctctttattaatctcaccatcctccagacttccctcctgtcataattccatccctcctccaacttttccctctcaagctctgcccttcccagcccagcccagcctacccaacctcatctcttccctgtagaccacatcccaccatgttcccctgagcctccaaggaaggggctcagggggccccatggcctcccgctccctgtggccccacagcccccgtgggccaggggaagcgccccagaagccgaagtgcccaccatgggcaaccacacgtgggagggctgccacgtggactcgcgcgtggaccacctctttccgccatccctctacatctttgtcatcggcgtggggctgcccaccaactgcctggctctgtgggcggcctaccgccaggtgcaacagcgcaacgagctgggcgtctacctgatgaacctcagcatcgccgacctgctgtacatctgcacgctgccgctgtgggtggactacttcctgcaccacgacaactggatccacggccccgggtcctgcaagctctttgggttcatcttctacaccaatatctacatcagcatcgccttcctgtgctgcatctcggtggaccgctacctggctgtggcccacccactccgcttcgcccgcctgcgccgcgtcaagaccgccgtggccgtgagctccgtggtctgggccacggagctgggcgccaactcggcgcccctgttccatgacgagctcttccgagaccgctacaaccacaccttctgctttgagaagttccccatggaaggctgggtggcctggatgaacctctatcgggtgttcgtgggcttcctcttcccgtgggcgctcatgctgctgtcgtaccggggcatcctgcgggccgtgcggggcagcgtgtccaccgagcgccaggagaaggccaagatcaagcggctggccctcagcctcatcgccatcgtgctggtctgctttgcgccctatcacgtgctcttgctgtcccgcagcgccatctacctgggccgcccctgggactgcggcttcgaggagcgcgtcttttctgcataccacagctcactggctttcaccagcctcaactgtgtggcggaccccatcctctactgcctggtcaacgagggcgcccgcagcgatgtggccaaggccctgcacaacctgctccgctttctggccagcgacaagccccaggagatggccaatgcctcgctcaccctggagaccccactcacctccaagaggaacagcacagccaaagccatgactggcagctgggcggccactccgccctcccagggggaccaggtgcagctgaagatgctgccgccagcacaatgaaccccgagtggcacagaatccccagttttcccctctcatcccacagtcccttctctcctggtctggtgtatgcaaattgtatggaaaaagggctgtgttaatattcataagaatacaagaacttaggaagagtgaggttggtgtgtcactggtcaacctttgtgctcccagatcccatcacagtttggcgattgtggagggcctcctgaaggaggagatgagtaaatatatttttttggagacagggtctcactgtgttgcccaggctggagtgcagtagtgcagtcgtggctcactgcagcctccacctcctgggctctccagcgatcttcccacatcagcctcccgagtagctgggaccacaaatgtgagccaccatgcctggctaatttttgtactttttgtagaaatggagtctcactatgtttcccaggctgatcttgaactcctgggctcaagagatcctcctgccttggcctcccaaagtgctcagattagagatgtgagccgccatgtctggccagataaattaagtcaaacatttggtttccagaaaataaagacaaatagagaaggttagatttttttttttccaacaagtggataaaagtctgtgactcgggggaaagtggaaggagaaatgcagccgatatagagtcattatgtttgcaaagcccctggtcatacaggccagggaacataagaccgcaattctaagtttctagataaacagcgatctccaagtcaagactgaggatgaagagggagaatgtcagaactcaagtgaagggcaatcagggcagactgcctggaggagtgatgccagaaggtttgggaagaaggtgtgggacaagaagaaagggtatttattcattcattcaacagaggtttatgtagggcactgtgctgggtggggctggggacacaacaatgactgaggcagcctggccttgccttcacagggctcaccatacacaagtaaataaaaaatatgtaatgtttggaattgctaaatgggaaggg

SEQ ID NO: 351868 - DNA, 1194 bp, Homo sapiens
tcccctgcagaataaatgcggatgacagaaagcttatgctgtctaccactgaacagtgatggagatggtgctaagtttttacagttgtcttagccccagtggttctcaaggtggggctcctggcccagcagcagcaacttgtttgttagaatgcagacgcgcaggccccacctggcctcctgaatcaaaatggtgtgcggcagggtgcagcgagctgttttcacgaggcctccaggtgactggatgtaagcttgcttgagaactatgggttttagctattctggtgtctccctgattttctacagcgccaggatcctagtttggtgaggttttaaatttaatcttatttttatataaaatgattgccagacgtactatattaagcttgaagaagcagaagatccctgttaatgtgtatggcccaggccaagagctgtcaaatgaaaaactttgtgctgaagcaggtttttagtatgtatatctttttgatggtatgaagaatttatttaggcttgactgttttaaaacaccataatgaatgtataattaatttatgttaaagtattaaccctttgtcacaaaggaatggtaatgtgattggctgcctgttagcccatcgactattcccgtcacggtagtccttacctctgtcggcagctcagagcctccacatttttatatttaattctcatgataaattagccaccataatcccatggaattaggtcttgttaaaatctagtccgggcgcagtggctcacgcctgtaatcccagcactttgggaggccaaggcgggctgatcacgaggtcaagagatcgagaccatcctggccaacatggtgaaaccctgtctctactaaaaatacaaaaattagctgggtgtggtggtgcatgcctgtagtcccagctacttgggaggctgaggtaggagaattgcttgaacctgggaggcggaggttgcggtgagctgagatcacgccactacactccagcctggtgacagagcaagactccatctcaaaaaaaaaaaatctaagcaaactatctttgagtcaaaaaaagttggataactcatctatatttgaaataatgctgtctgaatggccaacatcccaagaatgtattaaaaacagcaacctgcctaccgttttgatgacctttttccatattaaacaagttgagaacaaaagagt

SEQ ID NO: 351869 - DNA, 388 bp, Homo sapiens
agacggagtcttgctgttgcccaggctggagtggagtgcgtggtgtgatctcggctcactgcaaactccgcctcctgggttcaagcgattctcctgtcccagctacttgggaggctgaggtaggagaattgcttgaacctgggaggcggaggttgcggtgagctgagatcacgccactacactccagcctggtgacagagcaagactccatctcaaaaaaaaaaaatctaagcaaactatctttgagtcaaaaaaagttggataactcatctatatttgaaataatgctgtctgaatggccaacatcccaagaatgtattaaaaacagcaacctgcctaccgttttgatgacctttttccatattaaacaagttgagaacaaaagagt

SEQ ID NO: 351870 - DNA, 598 bp, Homo sapiens
tacctcaccagcctcatgtcccaccagcgccctactccagccacaccaaggtctgctgtcacccagcacactgtgtctgttcacttccatgtattcgtgctgcactttttaaggcactttgccagatggtgcaggtgtattggtgaacacacagactgggctccctcagagctcagaagctaagtaagagatacagataattacagtgtggtacgatttacactacaatggaaatctggagtgctgaaattatacagagtaacctatctcagaccaggagaatcaggactatcttttgggaaatataagctgggtccttatgatggagtcggggggtccaaaaaaaaaaaaaaaagaaaaaagaattgagtggcatctatccaggtgaagggtgaaagcagagtcacatattcattctttctttctgcaggtatttatggagtacccactatgttctaggcacttttctaggtgttgggactacagcagtgaacgagagagaccaaaaagtctctgccttctggccaggaggctaggagagctccagtgcttccagcaacaaacaggtcatgctccaataaaaatgattctacctaca

SEQ ID NO: 351871 - DNA, 848 bp, Homo sapiens
cctgcctgcattggggatgtgacggttaacagcaaacagctggacaaggacagcccggtgtctgccttcacggtgaacaggtgctacgcagtggcccaggaaggaacatactttgacggaagcggatatgcagctcttgtcaaagagggctacaaagtccagtcagatgtgaacatcacactggagtttcgaacctcttcgcagaatggcgtcctcctggggatcagcactgccaaagtggatgccattggactagagcttgtggacggcaaggtcttgttccatgtcaacaatggtgctggcaggataacagctgcatatgagcccaaaaccgccactgtgctctgtgatggaaaatggcacactcttcaagctaacaaaagcaaacaccgtatcactctgattgttgacgggaacgcagttggcgctgaaagtccacacacccagtctacctcagtggacaccaacaatcccatttatgttggtggctatcctgctggtgtgaagcaaaaatgcctgcgcagccagacctcgttccgcgggtgtttgaggaagctagctctgattaagagcccgcaggtgcagtcctttgacttcagcagagcgttcgaactgcacggagttttccttcattcctgtcctgggaccgagtcctgaacttcaagcagaatcctcagttggaatcattgctaatattttgaggagaagtgtatgtgtgaattaagaatctcttcagttcatatttcatttccaactcaggttaagtgtttctggggagagatgttgtgtttacgttacactaaaaccacatgtgcaacaaatacctccattaaatggtctaaaatgta

SEQ ID NO: 351872 - DNA, 619 bp, Homo sapiens
agacaaacagatttcaagagaatgctgttgaaattaccaggcaaaccaatgaatcactcttgatacttagagcaattcctgaaggtataagagacaagggagccaaaaccaaagagctggccacgtctgcaagccagagcgcggtgagcacgctgagggacgtggcggggctgagccaggagctgctgaacacatctgccagcctgtccagggtcaacaccacattacgagcgttcgaactgcacggagttttccttcattcctgtcctgggaccgagtcctgaacttcaagcagaatcctcagttggaatcattgctaatattttgaggagaagtgtatgtgtgaattaagaatctcttcagttcatatttcatttccaactcaggttaagtgtttctggggagagatgttgtgtttacgttacactaaaaccacatgtgcaacaaatacctccattaaatggtctaaaatgtaaattgaattccctggctctctttttaaacgtatttttaaaaaaatctttatacacattgaatgttctgttgattacttgatagtattttatgtttttcattttgagctttttaaaaaagtatcaatacagatgataacagatca

SEQ ID NO: 351873 - DNA, 992 bp, Homo sapiens
cctgcctgcattggggatgtgacggttaacagcaaacagctggacaaggacagcccggtgtctgccttcacggtgaacaggtgctacgcagtggcccaggaaggaacatactttgacggaagcggatatgcagctcttgtcaaagagggctacaaagtccagtcagatgtgaacatcacactggagtttcgaacctcttcgcagaatggcgtcctcctggggatcagcactgccaaagtggatgccattggactagagcttgtggacggcaaggtcttgttccatgtcaacaatggtgctggcaggataacagctgcatatgagcccaaaaccgccactgtgctctgtgatggaaaatggcacactcttcaagctaacaaaagcaaacaccgtatcactctgattgttgacgggaacgcagttggcgctgaaagtccacacacccagtctacctcagtggacaccaacaatcccatttatgttggtggctatcctgctggtgtgaagcaaaaatgcctgcgcagccagacctcgttccgcgggtgtttgaggaagctagctctgattaagagcccgcaggtgcagtcctttgacttcagcagagcgttcgaactgcacggagttttccttcattcctgtcctgggaccgagtcctgaacttcaagcagaatcctcagttggaatcattgctaatattttgaggagaagtgtatgtgtgaattaagaatctcttcagttcatatttcatttccaactcaggttaagtgtttctggggagagatgttgtgtttacgttacactaaaaccacatgtgcaacaaatacctccattaaatggtctaaaatgtaaattgaattccctggctctctttttaaacgtatttttaaaaaaatctttatacacattgaatgttctgttgattacttgatagtattttatgtttttcattttgagctttttaaaaaagtatcaatacagatgataacagatca

SEQ ID NO: 351874 - DNA, 263 bp, Homo sapiens
attggaagcaggagggagggctctgcagtagttcagttgatgcatacataaggcctgaattagggaattaggagagtgatcataggtgtggaaaggaggggagggcttccaggcacatttggtgtaaaatggatacaacttggtaacctgtacattgctacctttgcacatttggtttcccctgtctcaaaggctccctcttctcgagtgttgctctactcaaccatcaatactcagctcaacactcagggaagtctttttgg

SEQ ID NO: 351875 - DNA, 2147 bp, Homo sapiens
gtagcagacactcgctgggctaaacagcatcaccatgtctgttcgatacagctcaagcaagcactactcttcctcccgcagtggaggaggaggaggaggaggaggatgtggaggaggaggaggagtgtcatccctaagaatttctagcagcaaaggctcccttggtggaggatttagctcaggggggttcagtggtggctcttttagccgtgggagctctggtgggggctgctttgggggctcatcaggtggctatggaggattaggaggttttggtggaggtagctttcgtggaagctatggaagtagcagctttggtgggagttatggaggcagctttggagggggcagtttcggaggtggcagctttggtgggggcagctttggtggaggcggctttggtggaggcggctttggaggaggctttggtggtggatttggaggagatggtggccttctctctggaaatgaaaaagtaaccatgcagaatctgaatgaccgcctggcttcctacttggacaaagttcgggctctggaagaatcaaactatgagctggaaggcaaaatcaaggagtggtatgaaaagcatggcaactcacatcagggggagcctcgtgactacagcaaatactacaaaaccatcgatgaccttaaaaatcagattctcaacctaacaactgataatgccaacatcctgcttcagatcgacaatgccaggctggcagctgatgacttcaggctgaagtatgagaatgaggtagctctgcgccagagcgtggaggctgacatcaacggcctgcgtagggtgctggatgagctgaccctgaccaaggctgacctggagatgcaaattgagagcctgactgaagagctggcctatctgaagaagaaccacgaggaggaaatgaaagaccttcgaaatgtgtccactggtgatgtgaatgtggaaatgaatgctgccccgggtgttgatctgactcaacttctgaataacatgagaagccaatatgaacaacttgctgaacaaaaccgcaaagatgctgaagcctggttcaatgaaaagagcaaggaactgactacagaaattgataataacattgaacagatatccagctataaatctgagattactgaattgagacgtaatgtacaagctctggagatagaactacagtcccaactggccttgaaacaatccctggaagcctccttggcagaaacagaaggtcgctactgtgtgcagctctcacagattcaggcccagatatccgctctggaagaacagttgcaacagattcgagctgaaaccgagtgccagaatactgaataccaacaactcctggatattaagatccgactggagaatgaaattcaaacctaccgcagcctgctagaaggagagggaagttccggaggcggcggacgcggcggcggaagtttcggcggcggctacggcggcggaagctccggcggcggaagctccggcggcggctacggcggcggccacggcggcagttccggcggcggctacggaggcggaagctccggcggcggaagctccggcggcggctacgggggcggaagctccagcggcggccacggcggcagttccagcggcggctacggtggtggcagttccggcggcggcggcggcggctacgggggcggcagctccggcggcggcagcagctccggcggcggatacggcggcggcagctccagcggaggccacaagtcctcctcttccgggtccgtgggcgagtcttcatctaagggaccaagatactaacaaaaccagagtaatcaagacaattattgaagaggtggcgcccgacggtagagttctttcatctatggttgaatcagaaaccaagaaacactactattaaactgcatcaagaggaaagagtctcccttcacacagaccattatttacagatgcatggaaaacaaagtctccaagaaaacacttctgtcttgatggtctatggaaatagaccttgaaaataaggtgtctacaaggtgttttgtggtttctgtatttcttcttttcactttaccagaaagtgttctttaatggaaagaaaaacaactttctgttctcatttactaatgaatttcaataaactttcttactgatgcaaact

SEQ ID NO: 351876 - DNA, 1621 bp, Homo sapiens
gcggccgccgcggggccccggcggcgggggcacggtcccccgcgaggggggcccgggcaccatggcaactcacatcagggggagcctcgtgactacagcaaatactacaaaaccatcgatgaccttaaaaatcagattctcaacctaacaactgataatgccaacatcctgcttcagatcgacaatgccaggctggcagctgatgacttcaggctgaagtatgagaatgaggtagctctgcgccagagcgtggaggctgacatcaacggcctgcgtagggtgctggatgagctgaccctgaccaaggctgacctggagatgcaaattgagagcctgactgaagagctggcctatctgaagaagaaccacgaggaggaaatgaaagaccttcgaaatgtgtccactggtgatgtgaatgtggaaatgaatgctgccccgggtgttgatctgactcaacttctgaataacatgagaagccaatatgaacaacttgctgaacaaaaccgcaaagatgctgaagcctggttcaatgaaaagagcaaggaactgactacagaaattgataataacattgaacagatatccagctataaatctgagattactgaattgagacgtaatgtacaagctctggagatagaactacagtcccaactggccttgaaacaatccctggaagcctccttggcagaaacagaaggtcgctactgtgtgcagctctcacagattcaggcccagatatccgctctggaagaacagttgcaacagattcgagctgaaaccgagtgccagaatactgaataccaacaactcctggatattaagatccgactggagaatgaaattcaaacctaccgcagcctgctagaaggagagggaagttccggaggcggcggacgcggcggcggaagtttcggcggcggctacggcggcggaagctccggcggcggaagctccggcggcggctacggcggcggccacggcggcagttccggcggcggctacggaggcggaagctccggcggcggaagctccggcggcggctacgggggcggaagctccagcggcggccacggcggcagttccagcggcggctacggtggtggcagttccggcggcggcggcggcggctacgggggcggcagctccggcggcggcagcagctccggcggcggatacggcggcggcagctccagcggaggccacaagtcctcctcttccgggtccgtgggcgagtcttcatctaagggaccaagatactaacaaaaccagagtaatcaagacaattattgaagaggtggcgcccgacggtagagttctttcatctatggttgaatcagaaaccaagaaacactactattaaactgcatcaagaggaaagagtctcccttcacacagaccattatttacagatgcatggaaaacaaagtctccaagaaaacacttctgtcttgatggtctatggaaatagaccttgaaaataaggtgtctacaaggtgttttgtggtttctgtatttcttcttttcactttaccagaaagtgttctttaatggaaagaaaaacaactttctgttctcatttactaatgaatttcaataaactttcttactgatgcaaact

SEQ ID NO: 351877 - DNA, 1565 bp, Homo sapiens
  misc_feature (18)..(19): n is a, c, g, or t
actggtacggtccggaannttgggatcattctcaacctaacaactgataatgccaacatcctgcttcagatcgacaatgccaggctggcagctgatgacttcaggctgaagtatgagaatgaggtagctctgcgccagagcgtggaggctgacatcaacggcctgcgtagggtgctggatgagctgaccctgaccaaggctgacctggagatgcaaattgagagcctgactgaagagctggcctatctgaagaagaaccacgaggaggaaatgaaagaccttcgaaatgtgtccactggtgatgtgaatgtggaaatgaatgctgccccgggtgttgatctgactcaacttctgaataacatgagaagccaatatgaacaacttgctgaacaaaaccgcaaagatgctgaagcctggttcaatgaaaagagcaaggaactgactacagaaattgataataacattgaacagatatccagctataaatctgagattactgaattgagacgtaatgtacaagctctggagatagaactacagtcccaactggccttgaaacaatccctggaagcctccttggcagaaacagaaggtcgctactgtgtgcagctctcacagattcaggcccagatatccgctctggaagaacagttgcaacagattcgagctgaaaccgagtgccagaatactgaataccaacaactcctggatattaagatccgactggagaatgaaattcaaacctaccgcagcctgctagaaggagagggaagttccggaggcggcggacgcggcggcggaagtttcggcggcggctacggcggcggaagctccggcggcggaagctccggcggcggctacggcggcggccacggcggcagttccggcggcggctacggaggcggaagctccggcggcggaagctccggcggcggctacgggggcggaagctccagcggcggccacggcggcagttccagcggcggctacggtggtggcagttccggcggcggcggcggcggctacgggggcggcagctccggcggcggcagcagctccggcggcggatacggcggcggcagctccagcggaggccacaagtcctcctcttccgggtccgtgggcgagtcttcatctaagggaccaagatactaacaaaaccagagtaatcaagacaattattgaagaggtggcgcccgacggtagagttctttcatctatggttgaatcagaaaccaagaaacactactattaaactgcatcaagaggaaagagtctcccttcacacagaccattatttacagatgcatggaaaacaaagtctccaagaaaacacttctgtcttgatggtctatggaaatagaccttgaaaataaggtgtctacaaggtgttttgtggtttctgtatttcttcttttcactttaccagaaagtgttctttaatggaaagaaaaacaactttctgttctcatttactaatgaatttcaataaactttcttactgatgcaaactatcccaatttgtcagaatttatctttacttaagtacataatactctttaaaa

SEQ ID NO: 351878 - DNA, 2218 bp, Homo sapiens
gtagcagacactcgctgggctaaacagcatcaccatgtctgttcgatacagctcaagcaagcactactcttcctcccgcagtggaggaggaggaggaggaggaggatgtggaggaggaggaggagtgtcatccctaagaatttctagcagcaaaggctcccttggtggaggatttagctcaggggggttcagtggtggctcttttagccgtgggagctctggtgggggctgctttgggggctcatcaggtggctatggaggattaggaggttttggtggaggtagctttcgtggaagctatggaagtagcagctttggtgggagttatggaggcagctttggagggggcagtttcggaggtggcagctttggtgggggcagctttggtggaggcggctttggtggaggcggctttggaggaggctttggtggtggatttggaggagatggtggccttctctctggaaatgaaaaagtaaccatgcagaatctgaatgaccgcctggcttcctacttggacaaagttcgggctctggaagaatcaaactatgagctggaaggcaaaatcaaggagtggtatgaaaagcatggcaactcacatcagggggagcctcgtgactacagcaaatactacaaaaccatcgatgaccttaaaaatcagattctcaacctaacaactgataatgccaacatcctgcttcagatcgacaatgccaggctggcagctgatgacttcaggctgaagtatgagaatgaggtagctctgcgccagagcgtggaggctgacatcaacggcctgcgtagggtgctggatgagctgaccctgaccaaggctgacctggagatgcaaattgagagcctgactgaagagctggcctatctgaagaagaaccacgaggaggaaatgaaagaccttcgaaatgtgtccactggtgatgtgaatgtggaaatgaatgctgccccgggtgttgatctgactcaacttctgaataacatgagaagccaatatgaacaacttgctgaacaaaaccgcaaagatgctgaagcctggttcaatgaaaagagcaaggaactgactacagaaattgataataacattgaacagatatccagctataaatctgagattactgaattgagacgtaatgtacaagctctggagatagaactacagtcccaactggccttgaaacaatccctggaagcctccttggcagaaacagaaggtcgctactgtgtgcagctctcacagattcaggcccagatatccgctctggaagaacagttgcaacagattcgagctgaaaccgagtgccagaatactgaataccaacaactcctggatattaagatccgactggagaatgaaattcaaacctaccgcagcctgctagaaggagagggaagttccggaggcggcggacgcggcggcggaagtttcggcggcggctacggcggcggaagctccggcggcggaagctccggcggcggctacggcggcggccacggcggcagttccggcggcggctacggaggcggaagctccggcggcggaagctccggcggcggctacgggggcggaagctccagcggcggccacggcggcagttccagcggcggctacggtggtggcagttccggcggcggcggcggcggctacgggggcggcagctccggcggcggcagcagctccggcggcggatacggcggcggcagctccagcggaggccacaagtcctcctcttccgggtccgtgggcgagtcttcatctaagggaccaagatactaacaaaaccagagtaatcaagacaattattgaagaggtggcgcccgacggtagagttctttcatctatggttgaatcagaaaccaagaaacactactattaaactgcatcaagaggaaagagtctcccttcacacagaccattatttacagatgcatggaaaacaaagtctccaagaaaacacttctgtcttgatggtctatggaaatagaccttgaaaataaggtgtctacaaggtgttttgtggtttctgtatttcttcttttcactttaccagaaagtgttctttaatggagaaaaagtggacgtagaggccggccacccggcagaacctgtcacagtttgaggcacaggctcggaaacgtgagtgtgtccgagtcccaagagggggaatacctccacgggcccattccacgagattactagtgattc

SEQ ID NO: 351879 - DNA, 2085 bp, Homo sapiens
gtagcagacactcgctgggctaaacagcatcaccatgtctgttcgatacagctcaagcaagcactactcttcctcccgcagtggaggaggaggaggaggaggaggatgtggaggaggaggaggagtgtcatccctaagaatttctagcagcaaaggctcccttggtggaggatttagctcaggggggttcagtggtggctcttttagccgtgggagctctggtgggggctgctttgggggctcatcaggtggctatggaggattaggaggttttggtggaggtagctttcgtggaagctatggaagtagcagctttggtgggagttatggaggcagctttggagggggcagtttcggaggtggcagctttggtgggggcagctttggtggaggcggctttggtggaggcggctttggaggaggctttggtggtggatttggaggagatggtggccttctctctggaaatgaaaaagtaaccatgcagaatctgaatgaccgcctggcttcctacttggacaaagttcgggctctggaagaatcaaactatgagctggaaggcaaaatcaaggagtggtatgaaaagcatggcaactcacatcagggggagcctcgtgactacagcaaatactacaaaaccatcgatgaccttaaaaatcagattctcaacctaacaactgataatgccaacatcctgcttcagatcgacaatgccaggctggcagctgatgacttcaggctgaagtatgagaatgaggtagctctgcgccagagcgtggaggctgacatcaacggcctgcgtagggtgctggatgagctgaccctgaccaaggctgacctggagatgcaaattgagagcctgactgaagagctggcctatctgaagaagaaccacgaggaggaaatgaaagaccttcgaaatgtgtccactggtgatgtgaatgtggaaatgaatgctgccccgggtgttgatctgactcaacttctgaataacatgagaagccaatatgaacaacttgctgaacaaaaccgcaaagatgctgaagcctggttcaatgaaaagagcaaggaactgactacagaaattgataataacattgaacagatatccagctataaatctgagattactgaattgagacgtaatgtacaagctctggagatagaactacagtcccaactggccttgaaacaatccctggaagcctccttggcagaaacagaaggtcgctactgtgtgcagctctcacagattcaggcccagatatccgctctggaagaacagttgcaacagattcgagctgaaaccgagtgccagaatactgaataccaacaactcctggatattaagatccgactggagaatgaaattcaaacctaccgcagcctgctagaaggagagggaagttccggaggcggcggacgcggcggcggaagtttcggcggcggctacggcggcggaagctccggcggcggaagctccggcggcggctacggcggcggccacggcggcagttccggcggcggctacggaggcggaagctccggcggcggaagctccggcggcggcagcagctccggcggcggatacggcggcggcagctccagcggaggccacaagtcctcctcttccgggtccgtgggcgagtcttcatctaagggaccaagatactaacaaaaccagagtaatcaagacaattattgaagaggtggcgcccgacggtagagttctttcatctatggttgaatcagaaaccaagaaacactactattaaactgcatcaagaggaaagagtctcccttcacacagaccattatttacagatgcatggaaaacaaagtctccaagaaaacacttctgtcttgatggtctatggaaatagaccttgaaaataaggtgtctacaaggtgttttgtggtttctgtatttcttcttttcactttaccagaaagtgttctttaatggaaagaaaaacaactttctgttctcatttactaatgaatttcaataaactttcttactgatgcaaactatcccaatttgtcagaatttatctttacttaagtacataatactctttaaaa

SEQ ID NO: 351880 - DNA, 2017 bp, Homo sapiens
gtagcagacactcgctgggctaaacagcatcaccatgtctgttcgatacagctcaagcaagcactactcttcctcccgcagtggaggaggaggaggaggaggaggatgtggaggaggaggaggagtgtcatccctaagaatttctagcagcaaaggctcccttggtggaggatttagctcaggggggttcagtggtggctcttttagccgtgggagctctggtgggggctgctttgggggctcatcaggtggctatggaggattaggaggttttggtggaggtagctttcgtggaagctatggaagtagcagctttggtgggagttatggaggcagctttggagggggcagtttcggaggtggcagctttggtgggggcagctttggtggaggcggctttggtggaggcggctttggaggaggctttggtggtggatttggaggagatggtggccttctctctggaaatgaaaaagtaaccatgcagaatctgaatgaccgcctggcttcctacttggacaaagttcgggctctggaagaatcaaactatgagctggaaggcaaaatcaaggagtggtatgaaaagcatggcaactcacatcagggggagcctcgtgactacagcaaatactacaaaaccatcgatgaccttaaaaatcagattctcaacctaacaactgataatgccaacatcctgcttcagatcgacaatgccaggctggcagctgatgacttcaggctgaagtatgagaatgaggtagctctgcgccagagcgtggaggctgacatcaacggcctgcgtagggtgctggatgagctgaccctgaccaaggctgacctggagatgcaaattgagagcctgactgaagagctggcctatctgaagaagaaccacgaggaggaaatgaaagaccttcgaaatgtgtccactggtgatgtgaatgtggaaatgaatgctgccccgggtgttgatctgactcaacttctgaataacatgagaagccaatatgaacaacttgctgaacaaaaccgcaaagatgctgaagcctggttcaatgaaaagagcaaggaactgactacagaaattgataataacattgaacagatatccagctataaatctgagattactgaattgagacgtaatgtacaagctctggagatagaactacagtcccaactggccttgaaacaatccctggaagcctccttggcagaaacagaaggtcgctactgtgtgcagctctcacagattcaggcccagatatccgctctggaagaacagttgcaacagattcgagctgaaaccgagtgccagaatactgaataccaacaactcctggatattaagatccgactggagaatgaaattcaaacctaccgcagcctgctagaaggagagggaagttccggaggcggcggacgcggcggcggaagtttcggcggcggctacggcggcggaagctccggcggcggaagctccggcggcctccggcggcggcagcagctccggcggcggatacggcggcggcagctccagcggaggccacaagtcctcctcttccgggtccgtgggcgagtcttcatctaagggaccaagatactaacaaaaccagagtaatcaagacaattattgaagaggtggcgcccgacggtagagttctttcatctatggttgaatcagaaaccaagaaacactactattaaactgcatcaagaggaaagagtctcccttcacacagaccattatttacagatgcatggaaaacaaagtctccaagaaaacacttctgtcttgatggtctatggaaatagaccttgaaaataaggtgtctacaaggtgttttgtggtttctgtatttcttcttttcactttaccagaaagtgttctttaatggaaagaaaaacaactttctgttctcatttactaatgaatttcaataaactttcttactgatgcaaactatcccaatttgtcagaatttatctttacttaagtacataatactctttaaaa

SEQ ID NO: 351881 - DNA, 2038 bp, Homo sapiens
gtagcagacactcgctgggctaaacagcatcaccatgtctgttcgatacagctcaagcaagcactactcttcctcccgcagtggaggaggaggaggaggaggaggatgtggaggaggaggaggagtgtcatccctaagaatttctagcagcaaaggctcccttggtggaggatttagctcaggggggttcagtggtggctcttttagccgtgggagctctggtgggggctgctttgggggctcatcaggtggctatggaggattaggaggttttggtggaggtagctttcgtggaagctatggaagtagcagctttggtgggagttatggaggcagctttggagggggcagtttcggaggtggcagctttggtgggggcagctttggtggaggcggctttggtggaggcggctttggaggaggctttggtggtggatttggaggagatggtggccttctctctggaaatgaaaaagtaaccatgcagaatctgaatgaccgcctggcttcctacttggacaaagttcgggctctggaagaatcaaactatgagctggaaggcaaaatcaaggagtggtatgaaaagcatggcaactcacatcagggggagcctcgtgactacagcaaatactacaaaaccatcgatgaccttaaaaatcagattctcaacctaacaactgataatgccaacatcctgcttcagatcgacaatgccaggctggcagctgatgacttcaggctgaagtatgagaatgaggtagctctgcgccagagcgtggaggctgacatcaacggcctgcgtagggtgctggatgagctgaccctgaccaaggctgacctggagatgcaaattgagagcctgactgaagagctggcctatctgaagaagaaccacgaggaggaaatgaaagaccttcgaaatgtgtccactggtgatgtgaatgtggaaatgaatgctgccccgggtgttgatctgactcaacttctgaataacatgagaagccaatatgaacaacttgctgaacaaaaccgcaaagatgctgaagcctggttcaatgaaaagagcaaggaactgactacagaaattgataataacattgaacagatatccagctataaatctgagattactgaattgagacgtaatgtacaagctctggagatagaactacagtcccaactggccttgaaacaatccctggaagcctccttggcagaaacagaaggtcgctactgtgtgcagctctcacagattcaggcccagatatccgctctggaagaacagttgcaacagattcgagctgaaaccgagtgccagaatactgaataccaacaactcctggatattaagatccgactggagaatgaaattcaaacctaccgcagcctgctagaaggagagggaagttccggaggcggcggacgcggcggcggaagtttcggcggcggctacggcggcggaagctccggcggcggaagctccggcggcggctacggcggcggccacggcggcagttccggcggcggctacggaggcggaagctccggcggcggaagctccggcggcggatacggcggcggcagctccagcggaggccacaagtcctcctcttccgggtccgtgggcgagtcttcatctaagggaccaagaaggtcagcagaaactagctgggatactaacaaaaccagagtaatcaagacaattattgaagaggtggcgcccgacggtagagttctttcatctatggttgaatcagaaaccaagaaacactactattaaactgcatcaagaggaaagagtctcccttcacacagaccattatttacagatgcatggaaaacaaagtctccaagaaaacacttctgtcttgatggtctatggaaatagaccttgaaaataaggtgtctacaaggtgttttgtggtttctgtatttcttcttttcactttaccagaaagtgttctttaatggaaagaaaaacaactttctgttctcatttactaatgaatttcaataaactttcttactgatgcaaact

SEQ ID NO: 351882 - DNA, 1942 bp, Homo sapiens
gtagcagacactcgctgggctaaacagcatcaccatgtctgttcgatacagctcaagcaagcactactcttcctcccgcagtggaggaggaggaggaggaggaggatgtggaggaggaggaggagtgtcatccctaagaatttctagcagcaaaggctcccttggtggaggatttagctcaggggggttcagtggtggctcttttagccgtgggagctctggtgggggctgctttgggggctcatcaggtggctatggaggattaggaggttttggtggaggtagctttcgtggaagctatggaagtagcagctttggtgggagttatggaggcagctttggagggggcagtttcggaggtggcagctttggtgggggcagctttggtggaggcggctttggtggaggcggctttggaggaggctttggtggtggatttggaggagatggtggccttctctctggaaatgaaaaagtaaccatgcagaatctgaatgaccgcctggcttcctacttggacaaagttcgggctctggaagaatcaaactatgagctggaaggcaaaatcaaggagtggtatgaaaagcatggcaactcacatcagggggagcctcgtgactacagcaaatactacaaaaccatcgatgaccttaaaaatcagattctcaacctaacaactgataatgccaacatcctgcttcagatcgacaatgccaggctggcagctgatgacttcaggctgaagtatgagaatgaggtagctctgcgccagagcgtggaggctgacatcaacggcctgcgtagggtgctggatgagctgaccctgaccaaggctgacctggagatgcaaattgagagcctgactgaagagctggcctatctgaagaagaaccacgaggaggaaatgaaagaccttcgaaatgtgtccactggtgatgtgaatgtggaaatgaatgctgccccgggtgttgatctgactcaacttctgaataacatgagaagccaatatgaacaacttgctgaacaaaaccgcaaagatgctgaagcctggttcaatgaaaagagcaaggaactgactacagaaattgataataacattgaacagatatccagctataaatctgagattactgaattgagacgtaatgtacaagctctggagatagaactacagtcccaactggccttgaaacaatccctggaagcctccttggcagaaacagaaggtcgctactgtgtgcagctctcacagattcaggcccagatatccgctctggaagaacagttgcaacagattcgagctgaaaccgagtgccagaatactgaataccaacaactcctggatattaagatccgactggagaatgaaattcaaacctaccgcagcctgctagaaggagagggaagttccggaggcggcggacgcggcggcggaagtttcggcggcggggctacgggggcggcagctccggcggcggcagcagctccggcggcggatacggcggcggcagctccagcggaggccacaagtcctcctcttccgggtccgtgggcgagtcttcatctaagggaccaagatactaacaaaaccagagtaatcaagacaattattgaagaggtggcgcccgacggtagagttctttcatctatggttgaatcagaaaccaagaaacactactattaaactgcatcaagaggaaagagtctcccttcacacagaccattatttacagatgcatggaaaacaaagtctccaagaaaacacttctgtcttgatggtctatggaaatagaccttgaaaataaggtgtctacaaggtgttttgtggtttctgtatttcttcttttcactttaccagaaagtgttctttaatggaaagaaaaacaactttctgttctcatttactaatgaatttcaataaactttcttactgatgcaaact

SEQ ID NO: 351883 - DNA, 1768 bp, Homo sapiens
gtagcagacactcgctgggctaaacagcatcaccatgtctgttcgatacagctcaagcaagcactactcttcctcccgcagtggaggaggaggaggaggaggaggatgtggaggaggaggaggagtgtcatccctaagaatttctagcagcaaaggctcccttggtggaggatttagctcaggggggttcagtggtggctcttttagccgtgggagctctggtgggggctgctttgggggctcatcaggtggctatggaggattaggaggttttggtggaggtagctttcgtggaagctatggaagtagcagctttggtgggagttatggaggcagctttggagggggcagtttcggaggtggcagctttggtgggggcagctttggtggaggcggctttggtggaggcggctttggaggaggctttggtggtggatttggaggagatggtggccttctctctggaaatgaaaaagtaaccatgcagaatctgaatgaccgcctggcttcctacttggacaaagttcgggctctggaagaatcaaactatgagctggaaggcaaaatcaaggagtggtatgaaaagcatggcaactcacatcagggggagcctcgtgactacagcaaatactacaaaaccatcgatgaccttaaaaatcagattctcaacctaacaactgataatgccaacatcctgcttcagatcgacaatgccaggctggcagctgatgacttcaggctgaagtatgagaatgaggtagctctgcgccagagcgtggaggctgacatcaacggcctgcgtagggtgctggatgagctgaccctgaccaaggctgacctggagatgcaaattgagagcctgactgaagagctggcctatctgaagaagaaccacgaggaggaaatgaaagaccttcgaaatgtgtccactggtgatgtgaatgtggaaatgaatgctgccccgggtgttgatctgactcaacttctgaataacatgagaagccaatatgaacaacttgctgaacaaaaccgcaaagatgctgaagcctggttcaatgaaaagagcaaggaactgactacagaaattgataataacattgaacagatatccagctataaatctgagattactgaattgagacgtaatgtacaagctctggagatagaactacagtcccaactggccttgaaacaatccctggaagcctccttggcagaaacagaaggtcgctactgtgtgcagctctcacagattcaggcccagatatccgctctggaagaacagttgcaacagattcgagctgaaaccgagtgccagaatactgaataccaacaactcctggatattaagatccgactggagaatgaaattcaaacctaccgcagcctgctagaaggagagggaagttccggaggcggcggacgcggcggcggaagtttcggcggcggctacggcggcggaagctccggcggcggaagctccggcggctggccgctcctccttgctcttcctgctcctgccgctactcctcagtgtggacgacatccgatccatcactatggaatcacgtcgagcgaccaaatacacattatgtgagaggaacgcagagtgataccggaacgacgaacgaggtcagctgaccaacgactggacgggaacgccaggagagggcgacacggacacaggaactgaacagaatgaacgaaatgccaaaacgaaaggcggacgcaggtagcgacagccatcaagaaagaggaacaaatgaaa

SEQ ID NO: 351884 - DNA, 935 bp, Homo sapiens
cgtcaccatactcaactgaacaaggaagtcactaagccacaaaaaaatccgtttcagaaacaatccctggaagcctccttggcagaaacagaaggtcgctactgtgtgcagctctcacagattcaggcccagatatccgctctggaagaacagttgcaacagattcgagctgaaaccgagtgccagaatactgaataccaacaactcctggatattaagatccgactggagaatgaaattcaaacctaccgcagcctgctagaaggagagggaagttccggaggcggcggacgcggcggcggaagtttcggcggcggctacggcggcggaagctccggcggcggaagctccggcggcggctacggcggcggccacggcggcagttccggcggcggctacggaggcggaagctccggcggcggaagctccggcggcggatacggcggcggcagctccagcggaggccacaagtcctcctcttccgggtccgtgggcgagtcttcatctaagggaccaagatactaacaaaaccagagtaatcaagacaattattgaagaggtggcgcccgacggtagagttctttcatctatggttgaatcagaaaccaagaaacactactattaaactgcatcaagaggaaagagtctcccttcacacagaccattatttacagatgcatggaaaacaaagtctccaagaaaacacttctgtcttgatggtctatggaaatagaccttgaaaataaggtgtctacaaggtgttttgtggtttctgtatttcttcttttcactttaccagaaagtgttctttaatggaaagaaaaacaactttctgttctcatttactaatgaatttcaataaactttcttactgatgcaaactatcccaatttgtcagaatttatctttacttaagtacataatactctttaaaa

SEQ ID NO: 351885 - DNA, 1282 bp, Homo sapiens
gtagcagacactcgctgggctaaacagcatcaccatgtctgttcgatacagctcaagcaagcactactcttcctcccgcagtggaggaggaggaggaggaggaggatgtggaggaggaggaggagtgtcatccctaagaatttctagcagcaaaggctcccttggtggaggatttagctcaggggggttcagtggtggctcttttagccgtgggagctctggtgggggctgctttgggggctcatcaggtggctatggaggattaggaggttttggtggaggtagctttcgtggaagctatggaagtagcagctttggtgggagttatggaggcagctttggagggggcagtttcggaggtggcagctttggtgggggcagctttggtggaggcggctttggtggaggcggctttggaggaggctttggtggtggatttggaggagatggtggccttctctctggaaatgaaaaagtaaccatgcagaatctgaatgaccgcctggcttcctacttggacaaagttcgggctctggaagaatcaaactatgagctggaaggcaaaatcaaggagtggtatgaaaagcatggcaactcacatcagggggagcctcgtgactacagcaaatactacaaaaccatcgatgaccttaaaaatcagattctcaacctaacaactgataatgccaacatcctgcttcagatcgacaatgccaggctggcagctgatgacttcaggctgaagtatgagaatgaggtagctctgcgccagagcgtggaggctgacatcaacggcctgcgtagggtgctggatgagctgaccctgaccaaggctgacctggagatgcaaattgagagcctgactgaagagctggcctatctgaagaagaaccacgaggaggaaatgaaagaccttcgaaatgtgtccactggtgatgtgaatgtggaaatgaatgctgccccctagtgctgttgaggtactttggtggtatagaataaaaaacgctcatgagagtttgttctgaagaagagataagcttataggaatttttatcttaggttggaggaaatacctgaatttctttacaaagagtcattaggatgtggaggaactagataactacaaaatatatttgtttttgcccagagatctgtctctgtatatcgcgagggaatgtgcttaggactggtaaggcctacggttcagttgggacgtgcatgactatattacttattgagagttaataaggtggggtggagcagcaagtttgatgagattggt

SEQ ID NO: 351886 - DNA, 178 bp, Homo sapiens
gaagcctggttcaatgaaaaggtaaagtaatcttccttatagtgaaactcatggaggttttatcatttcagaatttcctcacccttttccttgtttttaatactctagagcaaggaactgactacagaaattgataataacattgaacagatatccagctataaatctgagattactg

SEQ ID NO: 351887 - DNA, 2198 bp, Homo sapiens
gtagcagacactcgctgggctaaacagcatcaccatgtctgttcgatacagctcaagcaagcactactcttcctcccgcagtggaggaggaggaggaggaggaggatgtggaggaggaggaggagtgtcatccctaagaatttctagcagcaaaggctcccttggtggaggatttagctcaggggggttcagtggtggctcttttagccgtgggagctctggtgggggctgctttgggggctcatcaggtggctatggaggattaggaggttttggtggaggtagctttcgtggaagctatggaagtagcagctttggtgggagttatggaggcagctttggagggggcagtttcggaggtggcagctttggtgggggcagctttggtggaggcggctttggtggaggcggctttggaggaggctttggtggtggatttggaggagatggtggccttctctctggaaatgaaaaagtaaccatgcagaatctgaatgaccgcctggcttcctacttggacaaagttcgggctctggaagaatcaaactatgagctggaaggcaaaatcaaggagtggtatgaaaagcatggcaactcacatcagggggagcctcgtgactacagcaaatactacaaaaccatcgatgaccttaaaaatcagattctcaacctaacaactgataatgccaacatcctgcttcagatcgacaatgccaggctggcagctgatgacttcaggctgaagtatgagaatgaggtagctctgcgccagagcgtggaggctgacatcaacggcctgcgtagggtgctggatgagctgaccctgaccaaggctgacctggagatgcaaattgagagcctgactgaagagctggcctatctgaagaagaaccacgaggaggaaatgaaagaccttcgaaatgtgtccactggtgatgtgaatgtggaaatgaatgctgccccgggtgttgatctgactcaacttctgaataacatgagaagccaatatgaacaacttgctgaacaaaaccgcaaagatgctgaagcctggttcaatgaaaagagcaaggaactgactacagaaattgataataacattgaacagatatccagctataaatctgagattactgaattgagacgtaatgtacaagctctggagatagaactacagtcccaactggccttgaaacaatccctggaagcctccttggcagaaacagaaggtcgctactgtgtgcagctctcacagattcaggcccagatatccgctctggaagaacagttgcaacagattcgagctgaaaccgagtgccagaatactgaataccaacaactcctggatattaagatccgactggagaatgaaattcaaacctaccgcagcctgctagaaggagagggaagttccggaggcggcggacgcggcggcggaagtttcggcggcggctacggcggcggaagctccggcggcggaagctccggcggcggctacggcggcggccacggcggcagttccggcggcggctacggaggcggaagctccggcggcggaagctccggcggcggctacgggggcggaagctccagcggcggccacggcggcagttccagcggcggctacggtggtggcagttccggcggcggcggcggcggctacgggggcggcagctccggcggcggcagcagctccggcggcggatacggcggcggcagctccagcggaggccacaagtcctcctcttccgggtccgtgggcgagtcttcatctaagggaccaagatactaacaaaaccagagtaatcaagacaattattgaagaggtggcgcccgacggtagagttctttcatctatggttgaatcagaaaccaagaaacactactattaaactgcatcaagaggaaagagtctcccttcacacagaccattatttacagatgcatggaaaacaaagtctccaagaaaacacttctgtcttgatggtctatggaaatagaccttgaaaataaggtgtctacaaggtgttttgtggtttctgtatttcttcttttcactttaccagaaagtgttctttaatggaaagaaaaacaactttctgttctcatttactaatgaatttcaataaactttcttactgatgcaaactgtctgagattactgaattgagacgtaatgtacaacgtctggagatagaact

SEQ ID NO: 351888 - DNA, 2199 bp, Homo sapiens
gtagcagacactcgctgggctaaacagcatcaccatgtctgttcgatacagctcaagcaagcactactcttcctcccgcagtggaggaggaggaggaggaggaggatgtggaggaggaggaggagtgtcatccctaagaatttctagcagcaaaggctcccttggtggaggatttagctcaggggggttcagtggtggctcttttagccgtgggagctctggtgggggctgctttgggggctcatcaggtggctatggaggattaggaggttttggtggaggtagctttcgtggaagctatggaagtagcagctttggtgggagttatggaggcagctttggagggggcagtttcggaggtggcagctttggtgggggcagctttggtggaggcggctttggtggaggcggctttggaggaggctttggtggtggatttggaggagatggtggccttctctctggaaatgaaaaagtaaccatgcagaatctgaatgaccgcctggcttcctacttggacaaagttcgggctctggaagaatcaaactatgagctggaaggcaaaatcaaggagtggtatgaaaagcatggcaactcacatcagggggagcctcgtgactacagcaaatactacaaaaccatcgatgaccttaaaaatcagattctcaacctaacaactgataatgccaacatcctgcttcagatcgacaatgccaggctggcagctgatgacttcaggctgaagtatgagaatgaggtagctctgcgccagagcgtggaggctgacatcaacggcctgcgtagggtgctggatgagctgaccctgaccaaggctgacctggagatgcaaattgagagcctgactgaagagctggcctatctgaagaagaaccacgaggaggaaatgaaagaccttcgaaatgtgtccactggtgatgtgaatgtggaaatgaatgctgccccgggtgttgatctgactcaacttctgaataacatgagaagccaatatgaacaacttgctgaacaaaaccgcaaagatgctgaagcctggttcaatgaaaagagcaaggaactgactacagaaattgataataacattgaacagatatccagctataaatctgagattactgaattgagacgtaatgtacaagctctggagatagaactacagtcccaactggccttgaaacaatccctggaagcctccttggcagaaacagaaggtcgctactgtgtgcagctctcacagattcaggcccagatatccgctctggaagaacagttgcaacagattcgagctgaaaccgagtgccagaatactgaataccaacaactcctggatattaagatccgactggagaatgaaattcaaacctaccgcagcctgctagaaggagagggaagttccggaggcggcggacgcggcggcggaagtttcggcggcggctacggcggcggaagctccggcggcggaagctccggcggcggctacggcggcggccacggcggcagttccggcggcggctacggaggcggaagctccggcggcggaagctccggcggcggctacgggggcggaagctccagcggcggccacggcggcagttccagcggcggctacggtggtggcagttccggcggcggcggcggcggctacgggggcggcagctccggcggcggcagcagctccggcggcggatacggcggcggcagctccagcggaggccacaagtcctcctcttccgggtccgtgggcgagtcttcatctaagggaccaagatactaacaaaaccagagtaatcaagacaattattgaagaggtggcgcccgacggtagagttctttcatctatggttgaatcagaaaccaagaaacactactattaaactgcatcaagaggaaagagtctcccttcacacagaccattatttacagatgcatggaaaacaaagtctccaagaaaacacttctgtcttgatggtctatggaaatagaccttgaaaataaggtgtctacaaggtgttttgtggtttctgtatttcttcttttcactttaccagaaagtgttctttaatggaaagaaaaacaactttctgttctcatttactaatgaatttcaataaactttcttactgatgcaaactatcccaatttgtcagaatttatctttacttaagtacataatactctttaaaa

SEQ ID NO: 351889 - DNA, 1592 bp, Homo sapiens
  misc_feature (18)..(19): n is a, c, g, or t
actggtacggtccggaannttgggatcaaaccatcgatgaccttaaataatcagattctcaacctaacaactgataatgccaacatcctgcttcagatcgacaatgccaggctggcagctgatgacttcaggctgaagtatgagaatgaggtagctctgcgccagagcgtggaggctgacatcaacggcctgcgtagggtgctggatgagctgaccctgaccaaggctgacctggagatgcaaattgagagcctgactgaagagctggcctatctgaagaagaaccacgaggaggaaatgaaagaccttcgaaatgtgtccactggtgatgtgaatgtggaaatgaatgctgccccgggtgttgatctgactcaacttctgaataacatgagaagccaatatgaacaacttgctgaacaaaaccgcaaagatgctgaagcctggttcaatgaaaagagcaaggaactgactacagaaattgataataacattgaacagatatccagctataaatctgagattactgaattgagacgtaatgtacaagctctggagatagaactacagtcccaactggccttgaaacaatccctggaagcctccttggcagaaacagaaggtcgctactgtgtgcagctctcacagattcaggcccagatatccgctctggaagaacagttgcaacagattcgagctgaaaccgagtgccagaatactgaataccaacaactcctggatattaagatccgactggagaatgaaattcaaacctaccgcagcctgctagaaggagagggaagttccggaggcggcggacgcggcggcggaagtttcggcggcggctacggcggcggaagctccggcggcggaagctccggcggcggctacggcggcggccacggcggcagttccggcggcggctacggaggcggaagctccggcggcggaagctccggcggcggctacgggggcggaagctccagcggcggccacggcggcagttccagcggcggctacggtggtggcagttccggcggcggcggcggcggctacgggggcggcagctccggcggcggcagcagctccggcggcggatacggcggcggcagctccagcggaggccacaagtcctcctcttccgggtccgtgggcgagtcttcatctaagggaccaagatactaacaaaaccagagtaatcaagacaattattgaagaggtggcgcccgacggtagagttctttcatctatggttgaatcagaaaccaagaaacactactattaaactgcatcaagaggaaagagtctcccttcacacagaccattatttacagatgcatggaaaacaaagtctccaagaaaacacttctgtcttgatggtctatggaaatagaccttgaaaataaggtgtctacaaggtgttttgtggtttctgtatttcttcttttcactttaccagaaagtgttctttaatggaaagaaaaacaactttctgttctcatttactaatgaatttcaataaactttcttactgatgcaaactatcccaatttgtcagaatttatctttacttaagtacataatactctttaaaa

SEQ ID NO: 351890 - DNA, 2170 bp, Homo sapiens
gtagcagacactcgctgggctaaacagcatcaccatgtctgttcgatacagctcaagcaagcactactcttcctcccgcagtggaggaggaggaggaggaggaggatgtggaggaggaggaggagtgtcatccctaagaatttctagcagcaaaggctcccttggtggaggatttagctcaggggggttcagtggtggctcttttagccgtgggagctctggtgggggctgctttgggggctcatcaggtggctatggaggattaggaggttttggtggaggtagctttcgtggaagctatggaagtagcagctttggtgggagttatggaggcagctttggagggggcagtttcggaggtggcagctttggtgggggcagctttggtggaggcggctttggtggaggcggctttggaggaggctttggtggtggatttggaggagatggtggccttctctctggaaatgaaaaagtaaccatgcagaatctgaatgaccgcctggcttcctacttggacaaagttcgggctctggaagaatcaaactatgagctggaaggcaaaatcaaggagtggtatgaaaagcatggcaactcacatcagggggagcctcgtgactacagcaaatactacaaaaccatcgatgaccttaaaaatcagattctcaacctaacaactgataatgccaacatcctgcttcagatcgacaatgccaggctggcagctgatgacttcaggctgaagtatgagaatgaggtagctctgcgccagagcgtggaggctgacatcaacggcctgcgtagggtgctggatgagctgaccctgaccaaggctgacctggagatgcaaattgagagcctgactgaagagctggcctatctgaagaagaaccacgaggaggaaatgaaagaccttcgaaatgtgtccactggtgatgtgaatgtggaaatgaatgctgccccgggtgttgatctgactcaacttctgaataacatgagaagccaatatgaacaacttgctgaacaaaaccgcaaagatgctgaagcctggttcaatgaaaagagcaaggaactgactacagaaattgataataacattgaacagatatccagctataaatctgagattactgaattgagacgtaatgtacaagctctggagatagaactacagtcccaactggccttgaaacaatccctggaagcctccttggcagaaacagaaggtcgctactgtgtgcagctctcacagattcaggcccagatatccgctctggaagaacagttgcaacagattcgagctgaaaccgagtgccagaatactgaataccaacaactcctggatattaagatccgactggagaatgaaattcaaacctaccgcagcctgctagaaggagagggaagttccggaggcggcggacgcggcggcggaagtttcggcggcggctacggcggcggaagctccggcggcggaagctccggcggcggctacggcggcggccacggcggcagttccggcggcggctacggaggcggaagctccggcggcggaagctccggcggcggctacgggggcggaagctccagcggcggccacggcggcagttccagcggcggctacggtggtggcagttccggcggcggcggcggcggctacgggggcggcagctccggcggcggcagcagctccggcggcggatacggcggcggcagctccagcggaggccacaagtcctcctcttccgggtccgtgggcgagtcttcatctaagggaccaagaaggtcagcagaaactagctgggatactaacaaaaccagagtaatcaagacaattattgaagaggtggcgcccgacggtagagttctttcatctatggttgaatcagaaaccaagaaacactactattaaactgcatcaagaggaaagagtctcccttcacacagaccattatttacagatgcatggaaaacaaagtctccaagaaaacacttctgtcttgatggtctatggaaatagaccttgaaaataaggtgtctacaaggtgttttgtggtttctgtatttcttcttttcactttaccagaaagtgttctttaatggaaagaaaaacaactttctgttctcatttactaatgaatttcaataaactttcttactgatgcaaact

SEQ ID NO: 351891 - DNA, 2067 bp, Homo sapiens
gtagcagacactcgctgggctaaacagcatcaccatgtctgttcgatacagctcaagcaagcactactcttcctcccgcagtggaggaggaggaggaggaggaggatgtggaggaggaggaggagtgtcatccctaagaatttctagcagcaaaggctcccttggtggaggatttagctcaggggggttcagtggtggctcttttagccgtgggagctctggtgggggctgctttgggggctcatcaggtggctatggaggattaggaggttttggtggaggtagctttcgtggaagctatggaagtagcagctttggtgggagttatggaggcagctttggagggggcagtttcggaggtggcagctttggtgggggcagctttggtggaggcggctttggtggaggcggctttggaggaggctttggtggtggatttggaggagatggtggccttctctctggaaatgaaaaagtaaccatgcagaatctgaatgaccgcctggcttcctacttggacaaagttcgggctctggaagaatcaaactatgagctggaaggcaaaatcaaggagtggtatgaaaagcatggcaactcacatcagggggagcctcgtgactacagcaaatactacaaaaccatcgatgaccttaaaaatcagattctcaacctaacaactgataatgccaacatcctgcttcagatcgacaatgccaggctggcagctgatgacttcaggctgaagtatgagaatgaggtagctctgcgccagagcgtggaggctgacatcaacggcctgcgtagggtgctggatgagctgaccctgaccaaggctgacctggagatgcaaattgagagcctgactgaagagctggcctatctgaagaagaaccacgaggaggaaatgaaagaccttcgaaatgtgtccactggtgatgtgaatgtggaaatgaatgctgccccgggtgttgatctgactcaacttctgaataacatgagaagccaatatgaacaacttgctgaacaaaaccgcaaagatgctgaagcctggttcaatgaaaagagcaaggaactgactacagaaattgataataacattgaacagatatccagctataaatctgagattactgaattgagacgtaatgtacaagctctggagatagaactacagtcccaactggccttgaaacaatccctggaagcctccttggcagaaacagaaggtcgctactgtgtgcagctctcacagattcaggcccagatatccgctctggaagaacagttgcaacagattcgagctgaaaccgagtgccagaatactgaataccaacaactcctggatattaagatccgactggagaatgaaattcaaacctaccgcagcctgctagaaggagagggaagttccggaggcggcggacgcggcggcggaagtttcggcggcggctacggcggcggaagctccggcggcggaagctccggcggcggctacggcggcggccacggcggcagttccggcggcggctacggaggcggaagctccggcggcggaagctccggcggcggatacggcggcggcagctccagcggaggccacaagtcctcctcttccgggtccgtgggcgagtcttcatctaagggaccaagatactaacaaaaccagagtaatcaagacaattattgaagaggtggcgcccgacggtagagttctttcatctatggttgaatcagaaaccaagaaacactactattaaactgcatcaagaggaaagagtctcccttcacacagaccattatttacagatgcatggaaaacaaagtctccaagaaaacacttctgtcttgatggtctatggaaatagaccttgaaaataaggtgtctacaaggtgttttgtggtttctgtatttcttcttttcactttaccagaaagtgttctttaatggaaagaaaaacaactttctgttctcatttactaatgaatttcaataaactttcttactgatgcaaactatcccaatttgtcagaatttatctttacttaagtacataatactctttaaaa

SEQ ID NO: 351892 - DNA, 1994 bp, Homo sapiens
gtagcagacactcgctgggctaaacagcatcaccatgtctgttcgatacagctcaagcaagcactactcttcctcccgcagtggaggaggaggaggaggaggaggatgtggaggaggaggaggagtgtcatccctaagaatttctagcagcaaaggctcccttggtggaggatttagctcaggggggttcagtggtggctcttttagccgtgggagctctggtgggggctgctttgggggctcatcaggtggctatggaggattaggaggttttggtggaggtagctttcgtggaagctatggaagtagcagctttggtgggagttatggaggcagctttggagggggcagtttcggaggtggcagctttggtgggggcagctttggtggaggcggctttggtggaggcggctttggaggaggctttggtggtggatttggaggagatggtggccttctctctggaaatgaaaaagtaaccatgcagaatctgaatgaccgcctggcttcctacttggacaaagttcgggctctggaagaatcaaactatgagctggaaggcaaaatcaaggagtggtatgaaaagcatggcaactcacatcagggggagcctcgtgactacagcaaatactacaaaaccatcgatgaccttaaaaatcagattctcaacctaacaactgataatgccaacatcctgcttcagatcgacaatgccaggctggcagctgatgacttcaggctgaagtatgagaatgaggtagctctgcgccagagcgtggaggctgacatcaacggcctgcgtagggtgctggatgagctgaccctgaccaaggctgacctggagatgcaaattgagagcctgactgaagagctggcctatctgaagaagaaccacgaggaggaaatgaaagaccttcgaaatgtgtccactggtgatgtgaatgtggaaatgaatgctgccccgggtgttgatctgactcaacttctgaataacatgagaagccaatatgaacaacttgctgaacaaaaccgcaaagatgctgaagcctggttcaatgaaaagagcaaggaactgactacagaaattgataataacattgaacagatatccagctataaatctgagattactgaattgagacgtaatgtacaagctctggagatagaactacagtcccaactggccttgaaacaatccctggaagcctccttggcagaaacagaaggtcgctactgtgtgcagctctcacagattcaggcccagatatccgctctggaagaacagttgcaacagattcgagctgaaaccgagtgccagaatactgaataccaacaactcctggatattaagatccgactggagaatgaaattcaaacctaccgcagcctgctagaaggagagggaagttccggaggcggcggacgcggcggcggaagtttcggcggcggggctacgggggcggcagctccggcggcggcagcagctccggcggcggatacggcggcggcagctccagcggaggccacaagtcctcctcttccgggtccgtgggcgagtcttcatctaagggaccaagatactaacaaaaccagagtaatcaagacaattattgaagaggtggcgcccgacggtagagttctttcatctatggttgaatcagaaaccaagaaacactactattaaactgcatcaagaggaaagagtctcccttcacacagaccattatttacagatgcatggaaaacaaagtctccaagaaaacacttctgtcttgatggtctatggaaatagaccttgaaaataaggtgtctacaaggtgttttgtggtttctgtatttcttcttttcactttaccagaaagtgttctttaatggaaagaaaaacaactttctgttctcatttactaatgaatttcaataaactttcttactgatgcaaactatcccaatttgtcagaatttatctttacttaagtacataatactctttaaaa

SEQ ID NO: 351893 - DNA, 2092 bp, Homo sapiens
  misc_feature (1738)..(1738): n is a, c, g, or t
  misc_feature (1746)..(1746): n is a, c, g, or t
  misc_feature (1753)..(1753): n is a, c, g, or t
  misc_feature (1775)..(1775): n is a, c, g, or t
  misc_feature (1806)..(1806): n is a, c, g, or t
  misc_feature (1846)..(1846): n is a, c, g, or t
  misc_feature (1882)..(1883): n is a, c, g, or t
  misc_feature (1905)..(1905): n is a, c, g, or t
  misc_feature (1912)..(1913): n is a, c, g, or t
  misc_feature (1920)..(1920): n is a, c, g, or t
gtagcagacactcgctgggctaaacagcatcaccatgtctgttcgatacagctcaagcaagcactactcttcctcccgcagtggaggaggaggaggaggaggaggatgtggaggaggaggaggagtgtcatccctaagaatttctagcagcaaaggctcccttggtggaggatttagctcaggggggttcagtggtggctcttttagccgtgggagctctggtgggggctgctttgggggctcatcaggtggctatggaggattaggaggttttggtggaggtagctttcgtggaagctatggaagtagcagctttggtgggagttatggaggcagctttggagggggcagtttcggaggtggcagctttggtgggggcagctttggtggaggcggctttggtggaggcggctttggaggaggctttggtggtggatttggaggagatggtggccttctctctggaaatgaaaaagtaaccatgcagaatctgaatgaccgcctggcttcctacttggacaaagttcgggctctggaagaatcaaactatgagctggaaggcaaaatcaaggagtggtatgaaaagcatggcaactcacatcagggggagcctcgtgactacagcaaatactacaaaaccatcgatgaccttaaaaatcagattctcaacctaacaactgataatgccaacatcctgcttcagatcgacaatgccaggctggcagctgatgacttcaggctgaagtatgagaatgaggtagctctgcgccagagcgtggaggctgacatcaacggcctgcgtagggtgctggatgagctgaccctgaccaaggctgacctggagatgcaaattgagagcctgactgaagagctggcctatctgaagaagaaccacgaggaggaaatgaaagaccttcgaaatgtgtccactggtgatgtgaatgtggaaatgaatgctgccccgggtgttgatctgactcaacttctgaataacatgagaagccaatatgaacaacttgctgaacaaaaccgcaaagatgctgaagcctggttcaatgaaaagagcaaggaactgactacagaaattgataataacattgaacagatatccagctataaatctgagattactgaattgagacgtaatgtacaagctctggagatagaactacagtcccaactggccttgaaacaatccctggaagcctccttggcagaaacagaaggtcgctactgtgtgcagctctcacagattcaggcccagatatccgctctggaagaacagttgcaacagattcgagctgaaaccgagtgccagaatactgaataccaacaactcctggatattaagatccgactggagaatgaaattcaaacctaccgcagcctgctagaaggagagggaagttccggaggcggcggacgcggcggcggaagtttcggcggcggctacggcggcggaagctccggcggcggaagctccggcggcctccggcggcggcagcagctccggcggcggatacggcggcggcagctccagcggaggccacaagtcctcctcttccgggtccgtgggcgagtcttcatctaagggaccaagataattgtcttgattaccggctggcgcgcactacacgcttgggaacaaggaaaacatccgccggaggcccggccgggcggcgctccagcctcggggcaggtgcgcggagaggaagtgagagcattccggccgcgcgancggaagcncggacgntggccctctggtgagtcacagncgaccccgacgcggagggagaggggagctgngggccagagccccggagggtctggaggagccaggagggtnctgggagcagagggtcacttagtgggctactgtcgnnggtgtcgctacgggcgcgaaanggacaanngaacaanagctgactgtatggacggccagggggaggagggcatcccaatggaaagaacttgcacggggccgagagccaaaccccagggcacggagagagcccccgaagggggaaacacgggagtcgggcagggggcggtacccagaaagggacggaacgcggaaaggatgaagagagag

SEQ ID NO: 351894 - DNA, 1868 bp, Homo sapiens
gtagcagacactcgctgggctaaacagcatcaccatgtctgttcgatacagctcaagcaagcactactcttcctcccgcagtggaggaggaggaggaggaggaggatgtggaggaggaggaggagtgtcatccctaagaatttctagcagcaaaggctcccttggtggaggatttagctcaggggggttcagtggtggctcttttagccgtgggagctctggtgggggctgctttgggggctcatcaggtggctatggaggattaggaggttttggtggaggtagctttcgtggaagctatggaagtagcagctttggtgggagttatggaggcagctttggagggggcagtttcggaggtggcagctttggtgggggcagctttggtggaggcggctttggtggaggcggctttggaggaggctttggtggtggatttggaggagatggtggccttctctctggaaatgaaaaagtaaccatgcagaatctgaatgaccgcctggcttcctacttggacaaagttcgggctctggaagaatcaaactatgagctggaaggcaaaatcaaggagtggtatgaaaagcatggcaactcacatcagggggagcctcgtgactacagcaaatactacaaaaccatcgatgaccttaaaaatcagattctcaacctaacaactgataatgccaacatcctgcttcagatcgacaatgccaggctggcagctgatgacttcaggctgaagtatgagaatgaggtagctctgcgccagagcgtggaggctgacatcaacggcctgcgtagggtgctggatgagctgaccctgaccaaggctgacctggagatgcaaattgagagcctgactgaagagctggcctatctgaagaagaaccacgaggaggaaatgaaagaccttcgaaatgtgtccactggtgatgtgaatgtggaaatgaatgctgccccgggtgttgatctgactcaacttctgaataacatgagaagccaatatgaacaacttgctgaacaaaaccgcaaagatgctgaagcctggttcaatgaaaagagcaaggaactgactacagaaattgataataacattgaacagatatccagctataaatctgagattactgaattgagacgtaatgtacaagctctggagatagaactacagtcccaactggccttgaaacaatccctggaagcctccttggcagaaacagaaggtcgctactgtgtgcagctctcacagattcaggcccagatatccgctctggaagaacagttgcaacagattcgagctgaaaccgagtgccagaatactgaataccaacaactcctggatattaagatccgactggagaatgaaattcaaacctaccgcagcctgctagaaggagagggaagttccggaggcggcggacgcggcggcggaagtttcggcggcggctacggcggcggaagctccggcggcggaagctccggcggcggctatcctcatcttgcgatcatcctcctcttactcttctgggacatccactcttattgaggacgtggttatcgacgaaaagaagtcggtcgagacgatgattgaagcagaggtcccacgaaagagaagatgaagcagcatccatgaggagaatctgattcttcatgaatgcattcagtaataggatgcttcatgaggaaagaaaaaatcttcatgaaaagccatgcatgtaaaagaagatcgatggaaaaaagagctggcaggaaaaaagtgatgacgagaggaaatgatggagacaagagagtagtctaaagtaaatgaggttgaccaagaaagggtggtggaaaagtgaaggaaataaaaataatgaaagaaaaaa

SEQ ID NO: 351895 - DNA, 6835 bp, Homo sapiens
gccccggcccctcctgcccatggcggtggccgagctgtacacgcagtacaacagggtctggattcccgatcctgaagaagtttggaagtctgctgaaatagccaaggactacagagttggtgacaaggtcctgcgactcctgctggaggatggaacggagctggattattctgtcaatccagaatctctgcctccacttcggaatcctgacatcctcgtgggcgagaatgacctcacggctctcagctatcttcacgagcccgcggtgctccacaacctcagaatccgctttgcagaatccaaactcatttacacctacagtggaatcattttggtggccatgaatccttacaagcagttgccaatatacggagatgccatcatccacgcctacagcgggcagaacatgggcgatatggacccacacatatttgccgtggcagaagaggcatacaagcagatggccagaaacaacagaaaccagtccataattgtaagtggggagtcaggtgctggaaagacagtgtcggctcgctatgccatgaggtactttgccaccgtcagcaaatcgggcagcaacgctcacgtggaagacaaggtcctggcatccaatcccatcaccgaggccgttggaaatgccaagaccacccgcaatgacaatagtagtcggtttgggaaatacacagaaatcagttttgatgaacaaaatcaaattataggagccaacatgagcacttacctcctggagaaatccagagttgtctttcaatcggaaaatgaacgaaattaccacattttctatcagctttgtgcatctgcacagcagtcggaatttaaacatcttaaattggggagtgccgaagaatttaattatacaagaatgggaggcaatactgtcattgagggtgtgaatgatcgagctgaaatggtagagactcaaaagaccttcacgcttctgggtttcaaggaggattttcagatggacgtttttaaaatcctggcagccatcctacatctgggcaacgtgcagatcaccgcggtgggcaacgagaggtcctcagttagtgaggatgacagtcacctgaaggtgttctgtgagctcctgggcctggagagtggcagagttgctcagtggctgtgcaatcgcaaaatcgtcacaagctctgagacggtggtaaaacccatgaccaggcctcaggctgtcaacgccagggatgcactggccaaaaagatctatgctcacctgttcgacttcattgtggagagaattaaccaagcgttgcagttttcaggcaagcagcacacttttattggtgttttggacatttatggttttgaaacctttgatgtgaacagctttgaacaattttgcatcaattacgctaatgaaaaactgcaacaacagtttaacatgcatgtcttcaaactggaacaagaagaatacatgaaggaagatataccttggacgctgatagatttttatgacaatcaaccagttattgacctgattgaagcaaaaatgggaattctggagttactggatgaagaatgtttgttaccacatggaactgatgaaaactggcctcaaaagctgtataataattttgtcaacaggaaccctttgtttgaaaagcctagaatgtcaaacacatcctttgtcatccagcactttgctgataaggtagagtataaatgtgaaggtttcctggagaaaaacagagacaccgtctatgacatgctggttgaaatcctgagagcaagcaagtttcatctctgtgccaacttttttcaagaaaatccaactcctccttctccttttggttcaatgattacagttaaatctgcaaagcaagtcatcaagccaaacagcaagcatttccgaaccacagttgggagcaagttccgcagctctctgtacttgctcatggagaccctcaatgcgacgacgccccactacgttcgatgcatcaagccaaatgatgagaagttaccctttgaatttgactccaaaagaattgttcagcagctgcgagcctgcggcgttttagaaacgattcgcattagtgcacagagctacccttccaggtggacatacatcgagttctacagtcgctacggcattctcatgaccaagcaagagctttccttcagcgataaaaaggaggtgtgcaaggtggttttacacagactcatccaggattctaatcagtaccagtttggtaaaaccaaaattttcttcagagcaggacaagtggcttatttagagaaacttcgattggataaactgaggcagagttgtgttatggtacaaaagcacatgcgtggctggctccagaggaaaaaattcctccgagagagacgagccgccctgataatccagcagtacttccggggtcagcaaactgtgaggaaagctattactgcagtggccttaaaagaagcttgggcagccataatcattcagaagcactgccgtgggtatcttgttcgcagcctgtatcagttgattcgcatggccaccatcacaatgcaggcctacagccgaggattcctggcaaggaggaggtatcgaaagatgctggaggaacataaggctgtgatcctacagaaatacgcacgggcgtggctggccagacgcagattccagagtatccgacgattcgtgcttaatattcagcttacttacagggtccagcgtttgcagaaaaagctggaagatcagaacaaagaaaaccatgggctggtggagaagctgactagcctggctgctcttcgagctggggatgtggaaaagattcagaagctggaagcagaactagaaaaagcagccactcacaggcgaaattacgaggagaaggggaagagatacagggatgctgtggaagagaaattggcaaagcttcagaagcataattcagaactggaaacacagaaagaacaaatacagctgaagcttcaagagaagactgaagagttaaaagaaaaaatggacaacctcaccaagcagctctttgatgatgtacaaaaggaagaacggcaaagaatgcttcttgaaaaaagttttgaactgaaaacacaagactatgagaagcagattcagtctttgaaagaagaaattaaagctctcaaggatgagaagatgcaactccaacacctggtggagggggagcacgtcacttctgatggcttgaaggcggaagtggcccgcctgagcaagcaggtcaagacaatctctgagttcgaaaaagagatagaactacttcaggcacagaagatagatgtggagaaacatgtgcagtcacaaaaacgggaaatgagagaaaagatgtcagagatcaccaaacaacttctcgaaagctatgacattgaagatgtaagaagcaggctctctgtggaagatctggaacatttaaatgaggatggagaactttggtttgcttatgaaggactaaagaaagcaacacgtgttttggagagccatttccagtctcagaaggattgctatgaaaaggagattgaagctttgaacttcaaagtggtgcatctcagtcaagaaatcaaccacctgcagaagttattcagagaagaaaatgacatcaatgaaagcatccgtcatgaagttaccaggctaacatcagagaacatgatgatcccagactttaaacagcaaatttcagaattggagaaacagaagcaagatcttgaaatccgcctgaatgaacaagctgagaaaatgaaaggaaaactagaagaattgtctaatcagttacatcgcagtcaagaggaggaaggaacacaaagaaaggccttggaagcccaaaatgaaatacataccaaagagaaggagaagctgattgataagattcaagaaatgcaggaggccagtgaccacttgaagaaacaatttgaaactgaaagtgaagtcaagtgtaacttccggcaggaagcatcccggctcactttggaaaacagggatcttgaagaagaattagacatgaaagacagagtgattaaaaagctacaagatcaagtcaagacactaagcaagacaattggaaaagccaatgatgtgcactcgtcctcaggacccaaggagtaccttggaatgctgcaatacaagagagaagacgaggccaagctcattcagaacctcattcttgacttgaagccccgtggcgtggtggtgaacatgatccccgggctgccggctcatatcctgttcatgtgtgtgcgctacgcagactctctgaatgatgccaacatgctgaagtccctcatgaacagcaccattaatggcatcaagcaggtggttaaggaacatttagaagactttgaaatgctgtccttttggctttccaacacttgtcattttctcaattgcctgaagcagtacagcggagaagaggaattcatgaagcataatagtccacagcagaataagaattgcttgaacaattttgacctttcagaatacagacagattctcagtgatgtggctatacgaatatatcatcaatttattatcataatggaaaagaatatccaaccgataatagttccgggaatgctggagtatgagagcctgcagggcatttccggcctgaagcccacaggcttccggaagcgctcctctagcatagacgacacggacggctacaccatgacctccgtcctgcaacagctgagctacttttacaccaccatgtgccagaacggcctggaccccgagcttgtgaggcaggcggtgaagcagctcttcttcttgatcggggcggtcacgctgaacagcctcttcctgcgcaaggacatgtgctcctgcagaaaagggatgcagatcaggtgcaatatcagctacttagaagaatggcttaaagataagaacttgcagaacagcttagcaaaggaaactttggagcccctctctcaggcagcctggttgcttcaggtcaagaagaccacagacagtgatgccaaggagatctacgaacgctgcacctcactgtctgctgtgcagatcataaagatccttaattcatacacacctatagatgactttgagaagagagtgactccatcctttgttcgcaaagtacaggctctcctaaatagccgggaggattcatcacagctgatgttggataccaaatatctctttcaagtcacatttccttttaccccctctccacatgctctggaaatgattcagatccccagcagtttcaagctaggctttctgaataggttatagcaggagaaaaagtcaatgcactttttcttcaaaagctaagtgaaggttcaatatgagggatgtgttttattaattggcagtggaaattgggaatgtgatttaaggaagaaaacagacttttgctcaaatggaccacatcatctctcactcacagtgacaatgctgctcctgtaattttgtaagaattcacacacaccagctgtatttggaaaagccatgtctcactctcgaatctcagctggttttcactgaaattcctggagggctcatattttcttccacgtgcctcttgatctgttctgtcttgtggcagggctctaccaggagggagtgagatctggggacacagtggcttccaagttttctaaggttcatgtgaaacctgagtacatttacaaagctgcaagtggattctagtgctgagtcttccaggaaaaaatcccgtttggccaccgtgacctgccaaaagttctcttgccccatgcctgctggggacagaaggttttcatgaactctttttactgaaaatgccctgcatttaaaaatgtttattttagacccttctaaatttttttttttttttgagactccggagtctcgctctatcgccaggctggagtgtagtggcatgatctcggcttattgcaacctccgcttcctgggttcaaacaattctcctgcctcagcctcctgagtagctgggactacaggcacctgccaccacgcccagctaatttttgtatttttagtggagacaggtttcaccatgttggccaggatggcctcgatctcttgacctcgtgatccgcccacctcagcctcccaaagtgctaggattacaggcgtgtgccaccgcgcccggctgacccttttaatttttaagagtgttcaatccgagatgaatcatttgaagtatttttatatgtatatctatttaaaactaatatattattaaagcttaattgccatgccgtttatcttctctgaaagaacttcaaatcttacctgccaacatattcaccataatttttttattttttaatacctttcatacaataacttttttaaaaaaacctcagattgaaaaagcaacctaaattactttcgctctctaatcagcatttcaatgtatttatttttaaatgttctcaaaaagtaactaaaaaattgtgtcggaccctacttttgagaaatctacgtttcccaagttttatgggaactggctattccttgtcccggcacaccttctcattccttcctttcagagcctaaaacctcatttgataagcactcctagtctctggcctgtggatccagtgctattctgtcaccaacctaagaatcccaattgcaccttctgtttctgacagtcacaggtgacagctgtgattctataatacagactggtgtcttagaggtaggaataatacatgattatgaagcatcaccctgctaatacataataatgtctttttatattataagtgattgagtttagttcattttaatacattgtacatgaaaaaatgaaaagtagaactttgtaatactttaatcaataaaattaattaccaaaaaaaaaaatca

SEQ ID NO: 351896 - DNA, 6972 bp, Homo sapiens
gccccggcccctcctgcccatggcggtggccgagctgtacacgcagtacaacagggtctggattcccgatcctgaagaagtttggaagtctgctgaaatagccaaggactacagagttggtgacaaggtcctgcgactcctgctggaggatggaacggagctggattattctgtcaatccagaatctctgcctccacttcggaatcctgacatcctcgtgggcgagaatgacctcacggctctcagctatcttcacgagcccgcggtgctccacaacctcagaatccgctttgcagaatccaaactcatttacacctacagtggaatcattttggtggccatgaatccttacaagcagttgccaatatacggagatgccatcatccacgcctacagcgggcagaacatgggcgatatggacccacacatatttgccgtggcagaagaggcatacaagcagatggccagaaacaacagaaaccagtccataattgtaagtggggagtcaggtgctggaaagacagtgtcggctcgctatgccatgaggtactttgccaccgtcagcaaatcgggcagcaacgctcacgtggaagacaaggtcctggcatccaatcccatcaccgaggccgttggaaatgccaagaccacccgcaatgacaatagtagtcggtttgggaaatacacagaaatcagttttgatgaacaaaatcaaattataggagccaacatgagcacttacctcctggagaaatccagagttgtctttcaatcggaaaatgaacgaaattaccacattttctatcagctttgtgcatctgcacagcagtcggaatttaaacatcttaaattggggagtgccgaagaatttaattatacaagaatgggaggcaatactgtcattgagggtgtgaatgatcgagctgaaatggtagagactcaaaagaccttcacgcttctgggtttcaaggaggattttcagatggacgtttttaaaatcctggcagccatcctacatctgggcaacgtgcagatcaccgcggtgggcaacgagaggtcctcagttagtgaggatgacagtcacctgaaggtgttctgtgagctcctgggcctggagagtggcagagttgctcagtggctgtgcaatcgcaaaatcgtcacaagctctgagacggtggtaaaacccatgaccaggcctcaggctgtcaacgccagggatgcactggccaaaaagatctatgctcacctgttcgacttcattgtggagagaattaaccaagcgttgcagttttcaggcaagcagcacacttttattggtgttttggacatttatggttttgaaacctttgatgtgaacagctttgaacaattttgcatcaattacgctaatgaaaaactgcaacaacagtttaacatgcatgtcttcaaactggaacaagaagaatacatgaaggaagatataccttggacgctgatagatttttatgacaatcaaccagttattgacctgattgaagcaaaaatgggaattctggagttactggatgaagaatgtttgttaccacatggaactgatgaaaactggcctcaaaagctgtataataattttgtcaacaggaaccctttgtttgaaaagcctagaatgtcaaacacatcctttgtcatccagcactttgctgataaggtagagtataaatgtgaaggtttcctggagaaaaacagagacaccgtctatgacatgctggttgaaatcctgagagcaagcaagtttcatctctgtgccaacttttttcaagaaaatccaactcctccttctccttttggttcaatgattacagttaaatctgcaaagcaagtcatcaagccaaacagcaagcatttccgaaccacagttgggagcaagttccgcagctctctgtacttgctcatggagaccctcaatgcgacgacgccccactacgttcgatgcatcaagccaaatgatgagaagttaccctttgaatttgactccaaaagaattgttcagcagctgcgagcctgcggcgttttagaaacgattcgcattagtgcacagagctacccttccaggtggacatacatcgagttctacagtcgctacggcattctcatgaccaagcaagagctttccttcagcgataaaaaggaggtgtgcaaggtggttttacacagactcatccaggattctaatcagtaccagtttggtaaaaccaaaattttcttcagagcaggacaagtggcttatttagagaaacttcgattggataaactgaggcagagttgtgttatggtacaaaagcacatgcgtggctggctccagaggaaaaaattcctccgagagagacgagccgccctgataatccagcagtacttccggggtcagcaaactgtgaggaaagctattactgcagtggccttaaaagaagcttgggcagccataatcattcagaagcactgccgtgggtatcttgttcgcagcctgtatcagttgattcgcatggccaccatcacaatgcaggcctacagccgaggattcctggcaaggaggaggtatcgaaagatgctggaggaacataaggctgtgatcctacagaaatacgcacgggcgtggctggccagacgcagattccagagtatccgacgattcgtgcttaatattcagcttacttacagggtccagcgtttgcagaaaaagctggaagatcagaacaaagaaaaccatgggctggtggagaagctgactagcctggctgctcttcgagctggggatgtggaaaagattcagaagctggaagcagaactagaaaaagcagccactcacaggcgaaattacgaggagaaggggaagagatacagggatgctgtggaagagaaattggcaaagcttcagaagcataattcagaactggaaacacagaaagaacaaatacagctgaagcttcaagagaagactgaagagttaaaagaaaaaatggacaacctcaccaagcagctctttgatgatgtacaaaaggaagaacggcaaagaatgcttcttgaaaaaagttttgaactgaaaacacaagactatgagaagcagattcagtctttgaaagaagaaattaaagctctcaaggatgagaagatgcaactccaacacctggtggagggggagcacgtcacttctgatggcttgaaggcggaagtggcccgcctgagcaagcaggtcaagacaatctctgagttcgaaaaagagatagaactacttcaggcacagaagatagatgtggagaaacatgtgcagtcacaaaaacgggaaatgagagaaaagatgtcagagatcaccaaacaacttctcgaaagctatgacattgaagatgtaagaagcaggctctctgtggaagatctggaacatttaaatgaggatggagaactttggtttgcttatgaaggactaaagaaagcaacacgtgttttggagagccatttccagtctcagaaggattgctatgaaaaggagattgaagctttgaacttcaaagtggtgcatctcagtcaagaaatcaaccacctgcagaagttattcagagaagaaaatgacatcaatgaaagcatccgtcatgaagttaccaggctaacatcagagaacatgatgaagtctcactctgttgcccaggctggagtgcaatggcatgatctcagctcactgcaacctccgcctcccaggttcaagcaattctcctgcctcagcctcccgagtagctgggattacaggcgcccaccatcacgatgatcccagactttaaacagcaaatttcagaattggagaaacagaagcaagatcttgaaatccgcctgaatgaacaagctgagaaaatgaaaggaaaactagaagaattgtctaatcagttacatcgcagtcaagaggaggaaggaacacaaagaaaggccttggaagcccaaaatgaaatacataccaaagagaaggagaagctgattgataagattcaagaaatgcaggaggccagtgaccacttgaagaaacaatttgaaactgaaagtgaagtcaagtgtaacttccggcaggaagcatcccggctcactttggaaaacagggatcttgaagaagaattagacatgaaagacagagtgattaaaaagctacaagatcaagtcaagacactaagcaagacaattggaaaagccaatgatgtgcactcgtcctcaggacccaaggagtaccttggaatgctgcaatacaagagagaagacgaggccaagctcattcagaacctcattcttgacttgaagccccgtggcgtggtggtgaacatgatccccgggctgccggctcatatcctgttcatgtgtgtgcgctacgcagactctctgaatgatgccaacatgctgaagtccctcatgaacagcaccattaatggcatcaagcaggtggttaaggaacatttagaagactttgaaatgctgtccttttggctttccaacacttgtcattttctcaattgcctgaagcagtacagcggagaagaggaattcatgaagcataatagtccacagcagaataagaattgcttgaacaattttgacctttcagaatacagacagattctcagtgatgtggctatacgaatatatcatcaatttattatcataatggaaaagaatatccaaccgataatagttccgggaatgctggagtatgagagcctgcagggcatttccggcctgaagcccacaggcttccggaagcgctcctctagcatagacgacacggacggctacaccatgacctccgtcctgcaacagctgagctacttttacaccaccatgtgccagaacggcctggaccccgagcttgtgaggcaggcggtgaagcagctcttcttcttgatcggggcggtcacgctgaacagcctcttcctgcgcaaggacatgtgctcctgcagaaaagggatgcagatcaggtgcaatatcagctacttagaagaatggcttaaagataagaacttgcagaacagcttagcaaaggaaactttggagcccctctctcaggcagcctggttgcttcaggtcaagaagaccacagacagtgatgccaaggagatctacgaacgctgcacctcactgtctgctgtgcagatcataaagatccttaattcatacacacctatagatgactttgagaagagagtgactccatcctttgttcgcaaagtacaggctctcctaaatagccgggaggattcatcacagctgatgttggataccaaatatctctttcaagtcacatttccttttaccccctctccacatgctctggaaatgattcagatccccagcagtttcaagctaggctttctgaataggttatagcaggagaaaaagtcaatgcactttttcttcaaaagctaagtgaaggttcaatatgagggatgtgttttattaattggcagtggaaattgggaatgtgatttaaggaagaaaacagacttttgctcaaatggaccacatcatctctcactcacagtgacaatgctgctcctgtaattttgtaagaattcacacacaccagctgtatttggaaaagccatgtctcactctcgaatctcagctggttttcactgaaattcctggagggctcatattttcttccacgtgcctcttgatctgttctgtcttgtggcagggctctaccaggagggagtgagatctggggacacagtggcttccaagttttctaaggttcatgtgaaacctgagtacatttacaaagctgcaagtggattctagtgctgagtcttccaggaaaaaatcccgtttggccaccgtgacctgccaaaagttctcttgccccatgcctgctggggacagaaggttttcatgaactctttttactgaaaatgccctgcatttaaaaatgtttattttagacccttctaaatttttttttttttttgagactccggagtctcgctctatcgccaggctggagtgtagtggcatgatctcggcttattgcaacctccgcttcctgggttcaaacaattctcctgcctcagcctcctgagtagctgggactacaggcacctgccaccacgcccagctaatttttgtatttttagtggagacaggtttcaccatgttggccaggatggcctcgatctcttgacctcgtgatccgcccacctcagcctcccaaagtgctaggattacaggcgtgtgccaccgcgcccggctgacccttttaatttttaagagtgttcaatccgagatgaatcatttgaagtatttttatatgtatatctatttaaaactaatatattattaaagcttaattgccatgccgtttatcttctctgaaagaacttcaaatcttacctgccaacatattcaccataatttttttattttttaatacctttcatacaataacttttttaaaaaaacctcagattgaaaaagcaacctaaattactttcgctctctaatcagcatttcaatgtatttatttttaaatgttctcaaaaagtaactaaaaaattgtgtcggaccctacttttgagaaatctacgtttcccaagttttatgggaactggctattccttgtcccggcacaccttctcattccttcctttcagagcctaaaacctcatttgataagcactcctagtctctggcctgtggatccagtgctattctgtcaccaacctaagaatcccaattgcaccttctgtttctgacagtcacaggtgacagctgtgattctataatacagactggtgtcttagaggtaggaataatacatgattatgaagcatcaccctgctaatacataataatgtctttttatattataagtgattgagtttagttcattttaatacattgtacatgaaaaaatgaaaagtagaactttgtaatactttaatcaataaaattaattaccaaaaaaaaaaatca

SEQ ID NO: 351897 - DNA, 5259 bp, Homo sapiens
gccccggcccctcctgcccatggcggtggccgagctgtacacgcagtacaacagggtctggattcccgatcctgaagaagtttggaagtctgctgaaatagccaaggactacagagttggtgacaaggtcctgcgactcctgctggaggatggaacggagctggattattctgtcaatccagaatctctgcctccacttcggaatcctgacatcctcgtgggcgagaatgacctcacggctctcagctatcttcacgagcccgcggtgctccacaacctcagaatccgctttgcagaatccaaactcatttacacctacagtggaatcattttggtggccatgaatccttacaagcagttgccaatatacggagatgccatcatccacgcctacagcgggcagaacatgggcgatatggacccacacatatttgccgtggcagaagaggcatacaagcagatggccagaaacaacagaaaccagtccataattgtaagtggggagtcaggtgctggaaagacagtgtcggctcgctatgccatgaggtactttgccaccgtcagcaaatcgggcagcaacgctcacgtggaagacaaggtcctggcatccaatcccatcaccgaggccgttggaaatgccaagaccacccgcaatgacaatagtagtcggtttgggaaatacacagaaatcagttttgatgaacaaaatcaaattataggagccaacatgagcacttacctcctggagaaatccagagttgtctttcaatcggaaaatgaacgaaattaccacattttctatcagctttgtgcatctgcacagcagtcggaatttaaacatcttaaattggggagtgccgaagaatttaattatacaagaatgggaggcaatactgtcattgagggtgtgaatgatcgagctgaaatggtagagactcaaaagaccttcacgcttctgggtttcaaggaggattttcagatggacgtttttaaaatcctggcagccatcctacatctgggcaacgtgcagatcaccgcggtgggcaacgagaggtcctcagttagtgaggatgacagtcacctgaaggtgttctgtgagctcctgggcctggagagtggcagagttgctcagtggctgtgcaatcgcaaaatcgtcacaagctctgagacggtggtaaaacccatgaccaggcctcaggctgtcaacgccagggatgcactggccaaaaagatctatgctcacctgttcgacttcattgtggagagaattaaccaagcgttgcagttttcaggcaagcagcacacttttattggtgttttggacatttatggttttgaaacctttgatgtgaacagctttgaacaattttgcatcaattacgctaatgaaaaactgcaacaacagtttaacatgcatgtcttcaaactggaacaagaagaatacatgaaggaagatataccttggacgctgatagatttttatgacaatcaaccagttattgacctgattgaagcaaaaatgggaattctggagttactggatgaagaatgtttgttaccacatggaactgatgaaaactggcctcaaaagctgtataataattttgtcaacaggaaccctttgtttgaaaagcctagaatgtcaaacacatcctttgtcatccagcactttgctgataaggtagagtataaatgtgaaggtttcctggagaaaaacagagacaccgtctatgacatgctggttgaaatcctgagagcaagcaagtttcatctctgtgccaacttttttcaagaaaatccaactcctccttctccttttggttcaatgattacagttaaatctgcaaagcaagtcatcaagccaaacagcaagcatttccgaaccacagttgggagcaagttccgcagctctctgtacttgctcatggagaccctcaatgcgacgacgccccactacgttcgatgcatcaagccaaatgatgagaagttaccctttgaatttgactccaaaagaattgttcagcagctgcgagcctgcggcgttttagaaacgattcgcattagtgcacagagctacccttccaggtggacatacatcgagttctacagtcgctacggcattctcatgaccaagcaagagctttccttcagcgataaaaaggaggtgtgcaaggtggttttacacagactcatccaggattctaatcagtaccagtttggtaaaaccaaaattttcttcagagcaggacaagtggcttatttagagaaacttcgattggataaactgaggcagagttgtgttatggtacaaaagcacatgcgtggctggctccagaggaaaaaattcctccgagagagacgagccgccctgataatccagcagtacttccggggtcagcaaactgtgaggaaagctattactgcagtggccttaaaagaagcttgggcagccataatcattcagaagcactgccgtgggtatcttgttcgcagcctgtatcagttgattcgcatggccaccatcacaatgcaggcctacagccgaggattcctggcaaggaggaggtatcgaaagatgctggaggaacataaggctgtgatcctacagaaatacgcacgggcgtggctggccagacgcagattccagagtatccgacgattcgtgcttaatattcagcttacttacagggtccagcgtttgcagaaaaagctggaagatcagaacaaagaaaaccatgggctggtggagaagctgactagcctggctgctcttcgagctggggatgtggaaaagattcagaagctggaagcagaactagaaaaagcagccactcacaggcgaaattacgaggagaaggggaagagatacagggatgctgtggaagagaaattggcaaagcttcagaagcataattcagaactggaaacacagaaagaacaaatacagctgaagcttcaagagaagactgaagagttaaaagaaaaaatggacaacctcaccaagcagctctttgatgatgtacaaaaggaagaacggcaaagaatgcttcttgaaaaaagttttgaactgaaaacacaagactatgagaagcagattcagtctttgaaagaagaaattaaagctctcaaggatgagaagatgcaactccaacacctggtggagggggagcacgtcacttctgatggcttgaaggcggaagtggcccgcctgagcaagcaggtcaagacaatctctgagttcgaaaaagagatagaactacttcaggcacagaagatagatgtggagaaacatgtgcagtcacaaaaacgggaaatgagagaaaagatgtcagagatcaccaaacaacttctcgaaagctatgacattgaagatgtaagaagcaggctctctgtggaagatctggaacatttaaatgaggatggagaactttggtttgcttatgaaggactaaagaaagcaacacgtgttttggagagccatttccagtctcagaaggattgctatgaaaaggagattgaagctttgaacttcaaagtggtgcatctcagtcaagaaatcaaccacctgcagaagttattcagagaagaaaatgacatcaatgaaagcatccgtcatgaagttaccaggctaacatcagagaacatgatgatcccagactttaaacagcaaatttcagaattggagaaacagaagcaagatcttgaaatccgcctgaatgaacaagctgagaaaatgaaaggaaaactagaagaattgtctaatcagttacatcgcagtcaagaggaggaaggaacacaaagaaaggccttggaagcccaaaatgaaatacataccaaagagaaggagaagctgattgataagattcaagaaatgcaggaggccagtgaccacttgaagaaacaatttgaaactgaaagtgaagtcaagtgtaacttccggcaggaagcatcccggctcactttggaaaacagggatcttgaagaagaattagacatgaaagacagagtgattaaaaagctacaagatcaagtcaagacactaagcaagacaattggaaaagccaatgatgtgcactcgtcctcaggacccaaggagtaccttggaatgctgcaatacaagagagaagacgaggccaagctcattcagaacctcattcttgacttgaagccccgtggcgtggtggtgaacatgatccccgggctgccggctcatatcctgttcatgtgtgtgcgctacgcagactctctgaatgatgccaacatgctgaagtccctcatgaacagcaccattaatggcatcaagcaggtggttaaggaacatttagaagactttgaaatgctgtccttttggctttccaacacttgtcattttctcaattgcctgaagcagtacagcggagaagaggaattcatgaagcataatagtccacagcagaataagaattgcttgaacaattttgacctttcagaatacagacagattctcagtgatgtggctatacgaatatatcatcaatttattatcataatggaaaagaatatccaaccgataatagttccgggaatgctggagtatgagagcctgcagggcatttccggcctgaagcccacaggcttccggaagcgctcctctagcatagacgacacggacggctacaccatgacctccgtcctgcaacagctgagctacttttacaccaccatgtgccagaacggcctggaccccgagcttgtgaggcaggcggtgaagcagctcttcttcttgatcggggcggtcacgctgaacagcctcttcctgcgcaaggacatgtgctcctgcagaaaagggatgcagatcaggtaaaacccagaaacctccgctcacgcggagaggcctgcagaaaggatgctcttgaagtccgaggccccacgcgcctgaccctccctgctgtggcgtcaaacccctgtttaggccctactgctgtaggaatattcgagtcaccctaggagccccgggatgctggcgcccagggcctactcccctcacgccacaccctgccaactagatgggactggcctagccgctttaacccagaaccagtagatgttcatcttaaattctggccctctagggtggtcatgcactcaaccagtagtgactaccttctctgaatagcactgccagggggagaacacaggaaacaaggaaaagtcgatatgatccctgcctttgagaagctcagaatagctaaataataatgaaaggcaactatgattaaa

SEQ ID NO: 351898 - DNA, 3145 bp, Homo sapiens
gccccggcccctcctgcccatggcggtggccgagctgtacacgcagtacaacagggtctggattcccgatcctgaagaagtttggaagtctgctgaaatagccaaggactacagagttggtgacaaggtcctgcgactcctgctggaggatggaacggagctggattattctgtcaatccagaatctctgcctccacttcggaatcctgacatcctcgtgggcgagaatgacctcacggctctcagctatcttcacgagcccgcggtgctccacaacctcagaatccgctttgcagaatccaaactcatttacacctacagtggaatcattttggtggccatgaatccttacaagcagttgccaatatacggagatgccatcatccacgcctacagcgggcagaacatgggcgatatggacccacacatatttgccgtggcagaagaggcatacaagcagatggccagaaacaacagaaaccagtccataattgtaagtggggagtcaggtgctggaaagacagtgtcggctcgctatgccatgaggtactttgccaccgtcagcaaatcgggcagcaacgctcacgtggaagacaaggtcctggcatccaatcccatcaccgaggccgttggaaatgccaagaccacccgcaatgacaatagtagtcggtttgggaaatacacagaaatcagttttgatgaacaaaatcaaattataggagccaacatgagcacttacctcctggagaaatccagagttgtctttcaatcggaaaatgaacgaaattaccacattttctatcagctttgtgcatctgcacagcagtcggaatttaaacatcttaaattggggagtgccgaagaatttaattatacaagaatgggaggcaatactgtcattgagggtgtgaatgatcgagctgaaatggtagagactcaaaagaccttcacgcttctgggtttcaaggaggattttcagatggacgtttttaaaatcctggcagccatcctacatctgggcaacgtgcagatcaccgcggtgggcaacgagaggtcctcagttagtgaggatgacagtcacctgaaggtgttctgtgagctcctgggcctggagagtggcagagttgctcagtggctgtgcaatcgcaaaatcgtcacaagctctgagacggtggtaaaacccatgaccaggcctcaggctgtcaacgccagggatgcactggccaaaaagatctatgctcacctgttcgacttcattgtggagagaattaaccaagcgttgcagttttcaggcaagcagcacacttttattggtgttttggacatttatggttttgaaacctttgatgtgaacagctttgaacaattttgcatcaattacgctaatgaaaaactgcaacaacagtttaacatgcatgtcttcaaactggaacaagaagaatacatgaaggaagatataccttggacgctgatagatttttatgacaatcaaccagttattgacctgattgaagcaaaaatgggaattctggagttactggatgaagaatgtttgttaccacatggaactgatgaaaactggcctcaaaagctgtataataattttgtcaacaggaaccctttgtttgaaaagcctagaatgtcaaacacatcctttgtcatccagcactttgctgataaggtagagtataaatgtgaaggtttcctggagaaaaacagagacaccgtctatgacatgctggttgaaatcctgagagcaagcaagtttcatctctgtgccaacttttttcaagaaaatccaactcctccttctccttttggttcaatgattacagttaaatctgcaaagcaagtcatcaagccaaacagcaagcatttccgaaccacagttgggagcaagttccgcagctctctgtacttgctcatggagaccctcaatgcgacgacgccccactacgttcgatgcatcaagccaaatgatgagaagttaccctttgaatttgactccaaaagaattgttcagcagctgcgagcctgcggcgttttagaaacgattcgcattagtgcacagagctacccttccaggtggacatacatcgagttctacagtcgctacggcattctcatgaccaagcaagagctttccttcagcgataaaaaggaggtgtgcaaggtggttttacacagactcatccaggattctaatcagtaccagtttggtaaaaccaaaattttcttcagagcaggacaagtggcttatttagagaaacttcgattggataaactgaggcagagttgtgttatggtacaaaagcacatgcgtggctggctccagaggaaaaaattcctccgagagagacgagccgccctgataatccagcagtacttccggggtcagcaaactgtgaggaaagctattactgcagtggccttaaaagaagcttgggcagccataatcattcagaagcactgccgtgggtatcttgttcgcagcctgtatcagttgattcgcatggccaccatcacaatgcaggcctacagccgaggattcctggcaaggaggaggtatcgaaaggtgaggccaacctctgtctagaggaagggagggtgtacgggccttccttactgagaacaaaacagggcccagggaaagacttcactatgggcaacctcactttgtacaaagtgtcagccaagccagaaaggagattcttccaggtgctgtggctcatgcctgtagtcccagctactcagggagctgaaatgggagggttccttgagcccaggagttcgaggctgcagtgagctatgatcatgccagtacactccagcctgcgtgggtgacagagggagaccctgtctctctctctcacacacacacacacacacacaccagttgcactgttggtttctctttctcccagttggccccaaagagaccacaccaaaggaaagtacattttaagccaataatgtgcacctaacagacaggatatacacctaacagacctcacctaaagcagagactgggttggggaaagaaattttaaaagatcagcacactggctggccataggcctggccctagtgcaactgttttgatgttgaatatgacaagtatctttttgaaataactagtctctcc

SEQ ID NO: 351899 - DNA, 452 bp, Homo sapiens
ggctatacgaatatatcatcaatttattatcataatggaaaagaatatccaaccgataataggtaagaagagaatggatgaccaaaaaatatttatagtaacattaagactttttaaaacataaacttggtatgtgtaatgtgtgattatgtgtaacattgtttaaaaagccaaggaaatataatcatgtagatatctgccttttaattctttgcttgcttataatgattccataaataatagtacgctgttggtagttttctttatataaggatgatttatcctgaaggaaaaaacttggggaaacttctactactgctatttatgtggtacttctacttcttggcgtagccaagtatttttgaaatcctaaagccccattcgaattcttgtatactttccttaatttcctgaaatttaaatactttaggctttaatgcccaggccatgat

SEQ ID NO: 351900 - DNA, 314 bp, Homo sapiens
tgtagagaatgagtctctatattgccaaggctggtcttgagctcctagactaaagggatcctcatgcctcagcctcctgagtagctaggactacaggtacgtgccaccacacctggctaatttttaaaatttttttgtagagatgaggtattgctatgttgcctaggctggtcttgaactcctggcctcaagcgatcttccctcctgggcctcccaaagcactgggattacggtgtgagccataggcctggccctagtgcaactgttttgatgttgaatatgacaagtatctttttgaaataactagtctctcc

SEQ ID NO: 351901 - DNA, 423 bp, Homo sapiens
tgcagatgagtaactgctgagctgtggtcttaaggatctcagcgaactctggtaccctctcgggacacacaggagtatctggcacccttccctaaagtattctctgttcttctgcctttccctccaggtgcaatatcagctacttagaagaatggcttaaagataagaacttgcagaacagcttagcaaaggaaactttggagcccctctctcaggcagcctggttgcttcaggtcaagaagaccacagacagtgatgccaaggagatctacgaacgctgcacctcactgtctgctgtgcaggtgaccaggcttgcttagtgtctccctggctcttccctgacacatcagtgcagtgggcattgcctttcttggtttagccagctgtgggcaccctgattctgtgtgtactctcgggagcata

SEQ ID NO: 351902 - DNA, 5584 bp, Homo sapiens
ttaagtgtcaaaaaatatctataaacaaatgcatatgtcttgcttcaggttatattttaacttgtttaaattgtatttcagttttgaaacctttgatgtgaacagctttgaacaattttgcatcaattacgctaatgaaaaactgcaacaacagtttaacatgcatgtcttcaaactggaacaagaagaatacatgaaggaagatataccttggacgctgatagatttttatgacaatcaaccagttattgacctgattgaagcaaaaatgggaattctggagttactggatgaagaatgtttgttaccacatggaactgatgaaaactggcctcaaaagctgtataataattttgtcaacaggaaccctttgtttgaaaagcctagaatgtcaaacacatcctttgtcatccagcactttgctgataaggtagagtataaatgtgaaggtttcctggagaaaaacagagacaccgtctatgacatgctggttgaaatcctgagagcaagcaagtttcatctctgtgccaacttttttcaagaaaatccaactcctccttctccttttggttcaatgattacagttaaatctgcaaagcaagtcatcaagccaaacagcaagcatttccgaaccacagttgggagcaagttccgcagctctctgtacttgctcatggagaccctcaatgcgacgacgccccactacgttcgatgcatcaagccaaatgatgagaagttaccctttgaatttgactccaaaagaattgttcagcagctgcgagcctgcggcgttttagaaacgattcgcattagtgcacagagctacccttccaggtggacatacatcgagttctacagtcgctacggcattctcatgaccaagcaagagctttccttcagcgataaaaaggaggtgtgcaaggtggttttacacagactcatccaggattctaatcagtaccagtttggtaaaaccaaaattttcttcagagcaggacaagtggcttatttagagaaacttcgattggataaactgaggcagagttgtgttatggtacaaaagcacatgcgtggctggctccagaggaaaaaattcctccgagagagacgagccgccctgataatccagcagtacttccggggtcagcaaactgtgaggaaagctattactgcagtggccttaaaagaagcttgggcagccataatcattcagaagcactgccgtgggtatcttgttcgcagcctgtatcagttgattcgcatggccaccatcacaatgcaggcctacagccgaggattcctggcaaggaggaggtatcgaaagatgctggaggaacataaggctgtgatcctacagaaatacgcacgggcgtggctggccagacgcagattccagagtatccgacgattcgtgcttaatattcagcttacttacagggtccagcgtttgcagaaaaagctggaagatcagaacaaagaaaaccatgggctggtggagaagctgactagcctggctgctcttcgagctggggatgtggaaaagattcagaagctggaagcagaactagaaaaagcagccactcacaggcgaaattacgaggagaaggggaagagatacagggatgctgtggaagagaaattggcaaagcttcagaagcataattcagaactggaaacacagaaagaacaaatacagctgaagcttcaagagaagactgaagagttaaaagaaaaaatggacaacctcaccaagcagctctttgatgatgtacaaaaggaagaacggcaaagaatgcttcttgaaaaaagttttgaactgaaaacacaagactatgagaagcagattcagtctttgaaagaagaaattaaagctctcaaggatgagaagatgcaactccaacacctggtggagggggagcacgtcacttctgatggcttgaaggcggaagtggcccgcctgagcaagcaggtcaagacaatctctgagttcgaaaaagagatagaactacttcaggcacagaagatagatgtggagaaacatgtgcagtcacaaaaacgggaaatgagagaaaagatgtcagagatcaccaaacaacttctcgaaagctatgacattgaagatgtaagaagcaggctctctgtggaagatctggaacatttaaatgaggatggagaactttggtttgcttatgaaggactaaagaaagcaacacgtgttttggagagccatttccagtctcagaaggattgctatgaaaaggagattgaagctttgaacttcaaagtggtgcatctcagtcaagaaatcaaccacctgcagaagttattcagagaagaaaatgacatcaatgaaagcatccgtcatgaagttaccaggctaacatcagagaacatgatgatcccagactttaaacagcaaatttcagaattggagaaacagaagcaagatcttgaaatccgcctgaatgaacaagctgagaaaatgaaaggaaaactagaagaattgtctaatcagttacatcgcagtcaagaggaggaaggaacacaaagaaaggccttggaagcccaaaatgaaatacataccaaagagaaggagaagctgattgataagattcaagaaatgcaggaggccagtgaccacttgaagaaacaatttgaaactgaaagtgaagtcaagtgtaacttccggcaggaagcatcccggctcactttggaaaacagggatcttgaagaagaattagacatgaaagacagagtgattaaaaagctacaagatcaagtcaagacactaagcaagacaattggaaaagccaatgatgtgcactcgtcctcaggacccaaggagtaccttggaatgctgcaatacaagagagaagacgaggccaagctcattcagaacctcattcttgacttgaagccccgtggcgtggtggtgaacatgatccccgggctgccggctcatatcctgttcatgtgtgtgcgctacgcagactctctgaatgatgccaacatgctgaagtccctcatgaacagcaccattaatggcatcaagcaggtggttaaggaacatttagaagactttgaaatgctgtccttttggctttccaacacttgtcattttctcaattgcctgaagcagtacagcggagaagaggaattcatgaagcataatagtccacagcagaataagaattgcttgaacaattttgacctttcagaatacagacagattctcagtgatgtggctatacgaatatatcatcaatttattatcataatggaaaagaatatccaaccgataatagttccgggaatgctggagtatgagagcctgcagggcatttccggcctgaagcccacaggcttccggaagcgctcctctagcatagacgacacggacggctacaccatgacctccgtcctgcaacagctgagctacttttacaccaccatgtgccagaacggcctggaccccgagcttgtgaggcaggcggtgaagcagctcttcttcttgatcggggcggtcacgctgaacagcctcttcctgcgcaaggacatgtgctcctgcagaaaagggatgcagatcaggtgcaatatcagctacttagaagaatggcttaaagataagaacttgcagaacagcttagcaaaggaaactttggagcccctctctcaggcagcctggttgcttcaggtcaagaagaccacagacagtgatgccaaggagatctacgaacgctgcacctcactgtctgctgtgcagatcataaagatccttaattcatacacacctatagatgactttgagaagagagtgactccatcctttgttcgcaaagtacaggctctcctaaatagccgggaggattcatcacagctgatgttggataccaaatatctctttcaagtcacatttccttttaccccctctccacatgctctggaaatgattcagatccccagcagtttcaagctaggctttctgaataggttatagcaggagaaaaagtcaatgcactttttcttcaaaagctaagtgaaggttcaatatgagggatgtgttttattaattggcagtggaaattgggaatgtgatttaaggaagaaaacagacttttgctcaaatggaccacatcatctctcactcacagtgacaatgctgctcctgtaattttgtaagaattcacacacaccagctgtatttggaaaagccatgtctcactctcgaatctcagctggttttcactgaaattcctggagggctcatattttcttccacgtgcctcttgatctgttctgtcttgtggcagggctctaccaggagggagtgagatctggggacacagtggcttccaagttttctaaggttcatgtgaaacctgagtacatttacaaagctgcaagtggattctagtgctgagtcttccaggaaaaaatcccgtttggccaccgtgacctgccaaaagttctcttgccccatgcctgctggggacagaaggttttcatgaactctttttactgaaaatgccctgcatttaaaaatgtttattttagacccttctaaatttttttttttttttgagactccggagtctcgctctatcgccaggctggagtgtagtggcatgatctcggcttattgcaacctccgcttcctgggttcaaacaattctcctgcctcagcctcctgagtagctgggactacaggcacctgccaccacgcccagctaatttttgtatttttagtggagacaggtttcaccatgttggccaggatggcctcgatctcttgacctcgtgatccgcccacctcagcctcccaaagtgctaggattacaggcgtgtgccaccgcgcccggctgacccttttaatttttaagagtgttcaatccgagatgaatcatttgaagtatttttatatgtatatctatttaaaactaatatattattaaagcttaattgccatgccgtttatcttctctgaaagaacttcaaatcttacctgccaacatattcaccataatttttttattttttaatacctttcatacaataacttttttaaaaaaacctcagattgaaaaagcaacctaaattactttcgctctctaatcagcatttcaatgtatttatttttaaatgttctcaaaaagtaactaaaaaattgtgtcggaccctacttttgagaaatctacgtttcccaagttttatgggaactggctattccttgtcccggcacaccttctcattccttcctttcagagcctaaaacctcatttgataagcactcctagtctctggcctgtggatccagtgctattctgtcaccaacctaagaatcccaattgcaccttctgtttctgacagtcacaggtgacagctgtgattctataatacagactggtgtcttagaggtaggaataatacatgattatgaagcatcaccctgctaatacataataatgtctttttatattataagtgattgagtttagttcattttaatacattgtacatgaaaaaatgaaaagtagaactttgtaatactttaatcaataaaattaattaccaaaaaaaaaaatca

SEQ ID NO: 351903 - DNA, 3422 bp, Homo sapiens
  misc_feature (34)..(34): n is a, c, g, or t
agctgattcctgagtaaccttgtgatccgcaatngcagttcatgacgtctaagaatgctgtgtgaggagtccgtggtgatcttccagaaggatgcgtcgtcatgtggttagaagcccagtatcctgatttaggtcagtctgacgtagcccaactgcagaagttattcagagaagaaaatgacatcaatgaaagcatccgtcatgaagttaccaggctaacatcagagaacatgatgatcccagactttaaacagcaaatttcagaattggagaaacagaagcaagatcttgaaatccgcctgaatgaacaagctgagaaaatgaaaggaaaactagaagaattgtctaatcagttacatcgcagtcaagaggaggaaggaacacaaagaaaggccttggaagcccaaaatgaaatacataccaaagagaaggagaagctgattgataagattcaagaaatgcaggaggccagtgaccacttgaagaaacaatttgaaactgaaagtgaagtcaagtgtaacttccggcaggaagcatcccggctcactttggaaaacagggatcttgaagaagaattagacatgaaagacagagtgattaaaaagctacaagatcaagtcaagacactaagcaagacaattggaaaagccaatgatgtgcactcgtcctcaggacccaaggagtaccttggaatgctgcaatacaagagagaagacgaggccaagctcattcagaacctcattcttgacttgaagccccgtggcgtggtggtgaacatgatccccgggctgccggctcatatcctgttcatgtgtgtgcgctacgcagactctctgaatgatgccaacatgctgaagtccctcatgaacagcaccattaatggcatcaagcaggtggttaaggaacatttagaagactttgaaatgctgtccttttggctttccaacacttgtcattttctcaattgcctgaagcagtacagcggagaagaggaattcatgaagcataatagtccacagcagaataagaattgcttgaacaattttgacctttcagaatacagacagattctcagtgatgtggctatacgaatatatcatcaatttattatcataatggaaaagaatatccaaccgataatagttccgggaatgctggagtatgagagcctgcagggcatttccggcctgaagcccacaggcttccggaagcgctcctctagcatagacgacacggacggctacaccatgacctccgtcctgcaacagctgagctacttttacaccaccatgtgccagaacggcctggaccccgagcttgtgaggcaggcggtgaagcagctcttcttcttgatcggggcggtcacgctgaacagcctcttcctgcgcaaggacatgtgctcctgcagaaaagggatgcagatcaggtgcaatatcagctacttagaagaatggcttaaagataagaacttgcagaacagcttagcaaaggaaactttggagcccctctctcaggcagcctggttgcttcaggtcaagaagaccacagacagtgatgccaaggagatctacgaacgctgcacctcactgtctgctgtgcagatcataaagatccttaattcatacacacctatagatgactttgagaagagagtgactccatcctttgttcgcaaagtacaggctctcctaaatagccgggaggattcatcacagctgatgttggataccaaatatctctttcaagtcacatttccttttaccccctctccacatgctctggaaatgattcagatccccagcagtttcaagctaggctttctgaataggttatagcaggagaaaaagtcaatgcactttttcttcaaaagctaagtgaaggttcaatatgagggatgtgttttattaattggcagtggaaattgggaatgtgatttaaggaagaaaacagacttttgctcaaatggaccacatcatctctcactcacagtgacaatgctgctcctgtaattttgtaagaattcacacacaccagctgtatttggaaaagccatgtctcactctcgaatctcagctggttttcactgaaattcctggagggctcatattttcttccacgtgcctcttgatctgttctgtcttgtggcagggctctaccaggagggagtgagatctggggacacagtggcttccaagttttctaaggttcatgtgaaacctgagtacatttacaaagctgcaagtggattctagtgctgagtcttccaggaaaaaatcccgtttggccaccgtgacctgccaaaagttctcttgccccatgcctgctggggacagaaggttttcatgaactctttttactgaaaatgccctgcatttaaaaatgtttattttagacccttctaaatttttttttttttttgagactccggagtctcgctctatcgccaggctggagtgtagtggcatgatctcggcttattgcaacctccgcttcctgggttcaaacaattctcctgcctcagcctcctgagtagctgggactacaggcacctgccaccacgcccagctaatttttgtatttttagtggagacaggtttcaccatgttggccaggatggcctcgatctcttgacctcgtgatccgcccacctcagcctcccaaagtgctaggattacaggcgtgtgccaccgcgcccggctgacccttttaatttttaagagtgttcaatccgagatgaatcatttgaagtatttttatatgtatatctatttaaaactaatatattattaaagcttaattgccatgccgtttatcttctctgaaagaacttcaaatcttacctgccaacatattcaccataatttttttattttttaatacctttcatacaataacttttttaaaaaaacctcagattgaaaaagcaacctaaattactttcgctctctaatcagcatttcaatgtatttatttttaaatgttctcaaaaagtaactaaaaaattgtgtcggaccctacttttgagaaatctacgtttcccaagttttatgggaactggctattccttgtcccggcacaccttctcattccttcctttcagagcctaaaacctcatttgataagcactcctagtctctggcctgtggatccagtgctattctgtcaccaacctaagaatcccaattgcaccttctgtttctgacagtcacaggtgacagctgtgattctataatacagactggtgtcttagaggtaggaataatacatgattatgaagcatcaccctgctaatacataataatgtctttttatattataagtgattgagtttagttcattttaatacattgtacatgaaaaaatgaaaagtagaactttgtaatactttaatcaataaaattaattaccaaaaaaaaaaatca

SEQ ID NO: 351904 - DNA, 4092 bp, Homo sapiens
ggccaccggagcggcccggcgacgatcgctgacagcttcccctgcccttcccgtcggtcgggccgccagccgccgcagccctcggcctgcacgcagccaccggccccgctcccggagcccagcgccgccgaggccgcagccgcccggccagtaaggcggcgccgccgcgcggccaccgcgggccctgccgcttccctccgcccgcgctgcggccatggcgcggcgctgactggcctggcccggccccgccgcgctcccgctcgccccgacccgcactcgggcccgcccgggctccggcctgccgccgcctcttccttctccagccggcaggcccgcgccgcttaggagggagagcccacccgcgccaggaggccgaacgcggactcgccacccggcttcagaatggcagaagatgatccatatttgggaaggcctgaacaaatgtttcatttggatccttctttgactcatacaatatttaatccagaagtatttcaaccacagatggcactgccaacagcagatggcccataccttcaaatattagagcaacctaaacagagaggatttcgtttccgttatgtatgtgaaggcccatcccatggtggactacctggtgcctctagtgaaaagaacaagaagtcttaccctcaggtcaaaatctgcaactatgtgggaccagcaaaggttattgttcagttggtcacaaatggaaaaaatatccacctgcatgcccacagcctggtgggaaaacactgtgaggatgggatctgcactgtaactgctggacccaaggacatggtggtcggcttcgcaaacctgggtatacttcatgtgacaaagaaaaaagtatttgaaacactggaagcacgaatgacagaggcgtgtataaggggctataatcctggactcttggtgcaccctgaccttgcctatttgcaagcagaaggtggaggggaccggcagctgggagatcgggaaaaagagctaatccgccaagcagctctgcagcagaccaaggagatggacctcagcgtggtgcggctcatgtttacagcttttcttccggatagcactggcagcttcacaaggcgcctggaacccgtggtatcagacgccatctatgacagtaaagcccccaatgcatccaacttgaaaattgtaagaatggacaggacagctggatgtgtgactggaggggaggaaatttatcttctttgtgacaaagttcagaaagatgacatccagattcgattttatgaagaggaagaaaatggtggagtctgggaaggatttggagatttttcccccacagatgttcatagacaatttgccattgtcttcaaaactccaaagtataaagatattaatattacaaaaccagcctctgtgtttgtccagcttcggaggaaatctgacttggaaactagtgaaccaaaacctttcctctactatcctgaaatcaaagataaagaagaagtgcagaggaaacgtcagaagctcatgcccaatttttcggatagtttcggcggtggtagtggtgccggagctggaggcggaggcatgtttggtagtggcggtggaggagggggcactggaagtacaggtccagggtatagcttcccacactatggatttcctacttatggtgggattactttccatcctggaactactaaatctaatgctgggatgaagcatggaaccatggacactgaatctaaaaaggaccctgaaggttgtgacaaaagtgatgacaaaaacactgtaaacctctttgggaaagttattgaaaccacagagcaagatcaggagcccagcgaggccaccgttgggaatggtgaggtcactctaacgtatgcaacaggaacaaaagaagagagtgctggagttcaggataacctctttctagagaaggctatgcagcttgcaaagaggcatgccaatgcccttttcgactacgcggtgacaggagacgtgaagatgctgctggccgtccagcgccatctcactgctgtgcaggatgagaatggggacagtgtcttacacttagcaatcatccaccttcattctcaacttgtgagggatctactagaagtcacatctggtttgatttctgatgacattatcaacatgagaaatgatctgtaccagacgcccttgcacttggcagtgatcactaagcaggaagatgtggtggaggatttgctgagggctggggccgacctgagccttctggaccgcttgggtaactctgttttgcacctagctgccaaagaaggacatgataaagttctcagtatcttactcaagcacaaaaaggcagcactacttcttgaccaccccaacggggacggtctgaatgccattcatctagccatgatgagcaatagcctgccatgtttgctgctgctggtggccgctggggctgacgtcaatgctcaggagcagaagtccgggcgcacagcactgcacctggctgtggagcacgacaacatctcattggcaggctgcctgctcctggagggtgatgcccatgtggacagtactacctacgatggaaccacacccctgcatatagcagctgggagagggtccaccaggctggcagctcttctcaaagcagcaggagcagatcccctggtggagaactttgagcctctctatgacctggatgactcttgggaaaatgcaggagaggatgaaggagttgtgcctggaaccacgcctctagatatggccaccagctggcaggtatttgacatattaaatgggaaaccatatgagccagagtttacatctgatgatttactagcacaaggagacatgaaacagctggctgaagatgtgaagctgcagctgtataagttactagaaattcctgatccagacaaaaactgggctactctggcgcagaaattaggtctggggatacttaataatgccttccggctgagtcctgctccttccaaaacacttatggacaactatgaggtctctgggggtacagtcagagagctggtggaggccctgagacaaatgggctacaccgaagcaattgaagtgatccaggcagcctccagcccagtgaagaccacctctcaggcccactcgctgcctctctcgcctgcctccacaaggcagcaaatagacgagctccgagacagtgacagtgtctgcgacagcggcgtggagacatccttccgcaaactcagctttaccgagtctctgaccagtggtgcctcactgctaactctcaacaaaatgccccatgattatgggcaggaaggacctctagaaggcaaaatttagcctgctgacaatttcccacaccgtgtaaaccaaagccctaaaattccactgcgttgtccacaagacagaagctgaagtgcatccaaaggtgctcagagagccggcccgcctgaatcattctcgatttaactcgagaccttttcaacttggcttcctttcttggttcataaatgaattttagtttggttcacttacagatagtatctagcaatcacaacactggctgagcggatgcatctggggatgaggttgcttactaagctttgccagctgctgctggatcacagctgctttctgttgtcattgctgttgtccctctgctacgttcctattgtcattaaaggtatcacggtcgccacctggcattccttctgaccacagcatcattttgcattcaaattaagggttaagaaaagagatattttaaaatgagagtcacttgatgtgccattttaaaaaaaaaggcatattgctttttctaatgtggttatttctctgatttgcaaaaaaaaaaaaaaaaaaatacttgtcaatatttaaacatggttacaatcattgctgaaaatggtattttcccccttttctgcattttgctattgtaaatatgttttttagatcaaatactttaaaggaaaaaatgttggatttataaatgctattttttattttacttttataataaaaggaaaagcaaattgaaaaaaaaaacaactcactaaaaaaacatgttgcccggggagagattcatggcctcaagccttaagagacaacttctgggtt

SEQ ID NO: 351905 - DNA, 4051 bp, Homo sapiens
ggccaccggagcggcccggcgacgatcgctgacagcttcccctgcccttcccgtcggtcgggccgccagccgccgcagccctcggcctgcacgcagccaccggccccgctcccggagcccagcgccgccgaggccgcagccgcccggccagtaaggcggcgccgccgcgcggccaccgcgggccctgccgcttccctccgcccgcgctgcggccatggcgcggcgctgactggcctggcccggccccgccgcgctcccgctcgccccgacccgcactcgggcccgcccgggctccggcctgccgccgcctcttccttctccagccggcaggcccgcgccgcttaggagggagagcccacccgcgccaggaggccgaacgcggactcgccacccggcttcagaatggcagaagatgatccatatttgggaaggcctgaacaaatgtttcatttggatccttctttgactcatacaatatttaatccagaagtatttcaaccacagatggcactgccaacagcagatggcccataccttcaaatattagagcaacctaaacagagaggatttcgtttccgttatgtatgtgaaggcccatcccatggtggactacctggtgcctctagtgaaaagaacaagaagtcttaccctcaggtcaaaatctgcaactatgtgggaccagcaaaggttattgttcagttggtcacaaatggaaaaaatatccacctgcatgcccacagcctggtgggaaaacactgtgaggatgggatctgcactgtaactgctggacccaaggacatggtggtcggcttcgcaaacctgggtatacttcatgtgacaaagaaaaaagtatttgaaacactggaagcacgaatgacagaggcgtgtataaggggctataatcctggactcttggtgcaccctgaccttgcctatttgcaagcagaaggtggaggggaccggcagctgggagatcgggaaaaagagctaatccgccaagcagctctgcagcagaccaaggagatggacctcagcgtggtgcggctcatgtttacagcttttcttccggatagcactggcagcttcacaaggcgcctggaacccgtggtatcagacgccatctatgacagtaaagcccccaatgcatccaacttgaaaattgtaagaatggacaggacagctggatgtgtgactggaggggaggaaatttatcttctttgtgacaaagttcagaaagatgacatccagattcgattttatgaagaggaagaaaatggtggagtctgggaaggatttggagatttttcccccacagatgttcatagacaatttgccattgtcttcaaaactccaaagtataaagatattaatattacaaaaccagcctctgtgtttgtccagcttcggaggaaatctgacttggaaactagtgaaccaaaacctttcctctactatcctgaaatcaaagataaagaagaagtgcagaggaaacgtcagaagctcatgcccaatttttcggatagtttcggcggtggtagtggtgccggagctggaggcggaggcatgtttggtagtggcggtggaggagggggcactggaagtacaggtccagggtatagcttcccacactatggatttcctacttatggtgggattactttccatcctggaactactaaatctaatgctgggatgaagcatggaaccatggacactgaatctaaaaaggaccctgaaggttgtgacaaaagtgatgacaaaaacactgtaaacctctttgggaaagttattgaaaccacagagcaagatcaggagcccagcgaggccaccgttgggaatggtgaggtcactctaacgtatgcaacaggaacaaaagaagagagtgctggagttcaggataacctctttctagagaaggctatgcagcttgcaaagaggcatgccaatgcccttttcgactacgcggtgacaggagacgtgaagatgctgctggccgtccagcgccatctcactgctgtgcaggatgagaatggggacagtgtcttacacttagcaatcatccaccttcattctcaacttgtgagggatctactagaagtcacatctggtttgatttctgatgacattatcaacatgagaaatgatctgtaccagacgcccttgcacttggcagtgatcactaagcaggaagatgtggtggaggatttgctgagggctggggccgacctgagccttctggaccgcttgggtaactctgttttgcacctagctgccaaagaaggacatgataaagttctcagtatcttactcaagcacaaaaaggcagcactacttcttgaccaccccaacggggacggtctgaatgccattcatctagccatgatgagcaatagcctgccatgtttgctgctgctggtggccgctggggctgacgtcaatgctcaggagcagaagtccgggcgcacagcactgcacctggctgtggagcacgacaacatctcattggcaggctgcctgctcctggagggtgatgcccatgtggacagtactacctacgatggaaccacacccctgcatatagcagctgggagagggtccaccaggctggcagctcttctcaaagcagcaggagcagatcccctggtggagaactttgagcctctctatgacctggatgactcttgggaaaatgcaggagaggatgaaggagttgtgcctggaaccacgcctctagatatggccaccagctggcaggtatttgacatattaaatgggaaaccatatgagccagagtttacatctgatgatttactagcacaaggagacatgaaacagctggctgaagatgtgaagctgcagctgtataagttactagaaattcctgatccagacaaaaactgggctactctggcgcagaaattaggtctggggatacttaataatgccttccggctgagtcctgctccttccaaaacacttatggacaactatgaggtctctgggggtacagtcagagagctggtggaggccctgagacaaatgggctacaccgaagcaattgaagtgatccaggcagcctccagcccagtgaagaccacctctcaggcccactcgctgcctctctcgcctgcctccacaaggcagcaaatagacgagctccgagacagtgacagtgtctgcgacagcggcgtggagacatccttccgcaaactcagctttaccgagtctctgaccagtggtgcctcactgctaactctcaacaaaatgccccatgattatgggcaggaaggacctctagaaggcaaaatttagcctgctgacaatttcccacaccgtgtaaaccaaagccctaaaattccactgcgttgtccacaagacagaagctgaagtgcatccaaaggtgctcagagagccggcccgcctgaatcattctcgatttaactcgagaccttttcaacttggcttcctttcttggttcataaatgaattttagtttggttcacttacagatagtatctagcaatcacaacactggctgagcggatgcatctggggatgaggttgcttactaagctttgccagctgctgctggatcacagctgctttctgttgtcattgctgttgtccctctgctacgttcctattgtcattaaaggtatcacggtcgccacctggcattccttctgaccacagcatcattttgcattcaaattaagggttaagaaaagagatattttaaaatgagagtcacttgatgtgccattttaaaaaaaaaggcatattgctttttctaatgtggttatttctctgatttgcaaaaaaaaaaaaaaaaaaaaattcttgtgttccattttttaacctgtggtttccaatcttggttgaaaaatgtggttttttccccccttttttggcttttggctttggtaaatttgttttttagaatcaaatctttaagggaaacaaacgtgtgggtttcaataaagtggcatatttttcattttaacgcttttcattaatctaaagggggacaggcaatttttggtggcccctc

SEQ ID NO: 351906 - DNA, 3236 bp, Homo sapiens
agcgggtctctccccacttctaatcaagtttacatcttgtagccagatagatattactgaagttctgtatcttgttgctgctccgtgtctccgttttgcctacaaaatccaaattctatcgggaaaaagagctaatccgccaagcagctctgcagcagaccaaggagatggacctcagcgtggtgcggctcatgtttacagcttttcttccggatagcactggcagcttcacaaggcgcctggaacccgtggtatcagacgccatctatgacagtaaagcccccaatgcatccaacttgaaaattgtaagaatggacaggacagctggatgtgtgactggaggggaggaaatttatcttctttgtgacaaagttcagaaagatgacatccagattcgattttatgaagaggaagaaaatggtggagtctgggaaggatttggagatttttcccccacagatgttcatagacaatttgccattgtcttcaaaactccaaagtataaagatattaatattacaaaaccagcctctgtgtttgtccagcttcggaggaaatctgacttggaaactagtgaaccaaaacctttcctctactatcctgaaatcaaagataaagaagaagtgcagaggaaacgtcagaagctcatgcccaatttttcggatagtttcggcggtggtagtggtgccggagctggaggcggaggcatgtttggtagtggcggtggaggagggggcactggaagtacaggtccagggtatagcttcccacactatggatttcctacttatggtgggattactttccatcctggaactactaaatctaatgctgggatgaagcatggaaccatggacactgaatctaaaaaggaccctgaaggttgtgacaaaagtgatgacaaaaacactgtaaacctctttgggaaagttattgaaaccacagagcaagatcaggagcccagcgaggccaccgttgggaatggtgaggtcactctaacgtatgcaacaggaacaaaagaagagagtgctggagttcaggataacctctttctagagaaggctatgcagcttgcaaagaggcatgccaatgcccttttcgactacgcggtgacaggagacgtgaagatgctgctggccgtccagcgccatctcactgctgtgcaggatgagaatggggacagtgtcttacacttagcaatcatccaccttcattctcaacttgtgagggatctactagaagtcacatctggtttgatttctgatgacattatcaacatgagaaatgatctgtaccagacgcccttgcacttggcagtgatcactaagcaggaagatgtggtggaggatttgctgagggctggggccgacctgagccttctggaccgcttgggtaactctgttttgcacctagctgccaaagaaggacatgataaagttctcagtatcttactcaagcacaaaaaggcagcactacttcttgaccaccccaacggggacggtctgaatgccattcatctagccatgatgagcaatagcctgccatgtttgctgctgctggtggccgctggggctgacgtcaatgctcaggagcagaagtccgggcgcacagcactgcacctggctgtggagcacgacaacatctcattggcaggctgcctgctcctggagggtgatgcccatgtggacagtactacctacgatggaaccacacccctgcatatagcagctgggagagggtccaccaggctggcagctcttctcaaagcagcaggagcagatcccctggtggagaactttgagcctctctatgacctggatgactcttgggaaaatgcaggagaggatgaaggagttgtgcctggaaccacgcctctagatatggccaccagctggcaggtatttgacatattaaatgggaaaccatatgagccagagtttacatctgatgatttactagcacaaggagacatgaaacagctggctgaagatgtgaagctgcagctgtataagttactagaaattcctgatccagacaaaaactgggctactctggcgcagaaattaggtctggggatacttaataatgccttccggctgagtcctgctccttccaaaacacttatggacaactatgaggtctctgggggtacagtcagagagctggtggaggccctgagacaaatgggctacaccgaagcaattgaagtgatccaggcagcctccagcccagtgaagaccacctctcaggcccactcgctgcctctctcgcctgcctccacaaggcagcaaatagacgagctccgagacagtgacagtgtctgcgacagcggcgtggagacatccttccgcaaactcagctttaccgagtctctgaccagtggtgcctcactgctaactctcaacaaaatgccccatgattatgggcaggaaggacctctagaaggcaaaatttagcctgctgacaatttcccacaccgtgtaaaccaaagccctaaaattccactgcgttgtccacaagacagaagctgaagtgcatccaaaggtgctcagagagccggcccgcctgaatcattctcgatttaactcgagaccttttcaacttggcttcctttcttggttcataaatgaattttagtttggttcacttacagatagtatctagcaatcacaacactggctgagcggatgcatctggggatgaggttgcttactaagctttgccagctgctgctggatcacagctgctttctgttgtcattgctgttgtccctctgctacgttcctattgtcattaaaggtatcacggtcgccacctggcattccttctgaccacagcatcattttgcattcaaattaagggttaagaaaagagatattttaaaatgagagtcacttgatgtgccattttaaaaaaaaaggcatattgctttttctaatgtggttatttctctgatttgcaaaaaaaaaaaaaaaaaaatacttgtcaatatttaaacatggttacaatcattgctgaaaatggtattttcccccttttctgcattttgctattgtaaatatgttttttagatcaaatactttaaaggaaaaaatgttggatttataaatgctattttttattttacttttataataaaaggaaaagcaaattgaaaaaaaaaacaactcactaaaaaaacatgttgcccggggagagattcatggcctcaagccttaagagacaacttctgggtt

SEQ ID NO: 351907 - DNA, 3351 bp, Homo sapiens
ggaagagagtttttactgtaatccggagaaaatgcaggtcttctttgatgcctttcatattggatgacataaatgagactgtttttaacactttattagcaatatgaagagtttcaaaagaggaaaaatgggtttttattgtaagtttacattatttgggctttataaaagcatggtcttttaaatgttcacacttccctgggcatgaatggactgtgctgtatggccctagatcgggaaaaagagctaatccgccaagcagctctgcagcagaccaaggagatggacctcagcgtggtgcggctcatgtttacagcttttcttccggatagcactggcagcttcacaaggcgcctggaacccgtggtatcagacgccatctatgacagtaaagcccccaatgcatccaacttgaaaattgtaagaatggacaggacagctggatgtgtgactggaggggaggaaatttatcttctttgtgacaaagttcagaaagatgacatccagattcgattttatgaagaggaagaaaatggtggagtctgggaaggatttggagatttttcccccacagatgttcatagacaatttgccattgtcttcaaaactccaaagtataaagatattaatattacaaaaccagcctctgtgtttgtccagcttcggaggaaatctgacttggaaactagtgaaccaaaacctttcctctactatcctgaaatcaaagataaagaagaagtgcagaggaaacgtcagaagctcatgcccaatttttcggatagtttcggcggtggtagtggtgccggagctggaggcggaggcatgtttggtagtggcggtggaggagggggcactggaagtacaggtccagggtatagcttcccacactatggatttcctacttatggtgggattactttccatcctggaactactaaatctaatgctgggatgaagcatggaaccatggacactgaatctaaaaaggaccctgaaggttgtgacaaaagtgatgacaaaaacactgtaaacctctttgggaaagttattgaaaccacagagcaagatcaggagcccagcgaggccaccgttgggaatggtgaggtcactctaacgtatgcaacaggaacaaaagaagagagtgctggagttcaggataacctctttctagagaaggctatgcagcttgcaaagaggcatgccaatgcccttttcgactacgcggtgacaggagacgtgaagatgctgctggccgtccagcgccatctcactgctgtgcaggatgagaatggggacagtgtcttacacttagcaatcatccaccttcattctcaacttgtgagggatctactagaagtcacatctggtttgatttctgatgacattatcaacatgagaaatgatctgtaccagacgcccttgcacttggcagtgatcactaagcaggaagatgtggtggaggatttgctgagggctggggccgacctgagccttctggaccgcttgggtaactctgttttgcacctagctgccaaagaaggacatgataaagttctcagtatcttactcaagcacaaaaaggcagcactacttcttgaccaccccaacggggacggtctgaatgccattcatctagccatgatgagcaatagcctgccatgtttgctgctgctggtggccgctggggctgacgtcaatgctcaggagcagaagtccgggcgcacagcactgcacctggctgtggagcacgacaacatctcattggcaggctgcctgctcctggagggtgatgcccatgtggacagtactacctacgatggaaccacacccctgcatatagcagctgggagagggtccaccaggctggcagctcttctcaaagcagcaggagcagatcccctggtggagaactttgagcctctctatgacctggatgactcttgggaaaatgcaggagaggatgaaggagttgtgcctggaaccacgcctctagatatggccaccagctggcaggtatttgacatattaaatgggaaaccatatgagccagagtttacatctgatgatttactagcacaaggagacatgaaacagctggctgaagatgtgaagctgcagctgtataagttactagaaattcctgatccagacaaaaactgggctactctggcgcagaaattaggtctggggatacttaataatgccttccggctgagtcctgctccttccaaaacacttatggacaactatgaggtctctgggggtacagtcagagagctggtggaggccctgagacaaatgggctacaccgaagcaattgaagtgatccaggcagcctccagcccagtgaagaccacctctcaggcccactcgctgcctctctcgcctgcctccacaaggcagcaaatagacgagctccgagacagtgacagtgtctgcgacagcggcgtggagacatccttccgcaaactcagctttaccgagtctctgaccagtggtgcctcactgctaactctcaacaaaatgccccatgattatgggcaggaaggacctctagaaggcaaaatttagcctgctgacaatttcccacaccgtgtaaaccaaagccctaaaattccactgcgttgtccacaagacagaagctgaagtgcatccaaaggtgctcagagagccggcccgcctgaatcattctcgatttaactcgagaccttttcaacttggcttcctttcttggttcataaatgaattttagtttggttcacttacagatagtatctagcaatcacaacactggctgagcggatgcatctggggatgaggttgcttactaagctttgccagctgctgctggatcacagctgctttctgttgtcattgctgttgtccctctgctacgttcctattgtcattaaaggtatcacggtcgccacctggcattccttctgaccacagcatcattttgcattcaaattaagggttaagaaaagagatattttaaaatgagagtcacttgatgtgccattttaaaaaaaaaggcatattgctttttctaatgtggttatttctctgatttgcaaaaaaaaaaaaaaaaaaatacttgtcaatatttaaacatggttacaatcattgctgaaaatggtattttcccccttttctgcattttgctattgtaaatatgttttttagatcaaatactttaaaggaaaaaatgttggatttataaatgctattttttattttacttttataataaaaggaaaagcaaattgaaaaaaaaaacaactcactaaaaaaacatgttgcccggggagagattcatggcctcaagccttaagagacaacttctgggtt

SEQ ID NO: 351908 - DNA, 1173 bp, Homo sapiens
ggaagatgtgaaagcatttggctaattctgacatttggctaataacatcctcacagtatgtcccaagtatcttctgcccttcccaccacggtgagcagtcatgacagtgagggtggcataggtgggatgtgtggctggcagaagccagtgggcaagagttgtccacagaatagtccatgagctttttagagcccggccattcccccagtgaatttgtgctttctcccctcagacgagctccgagacagtgacagtgtctgcgacagcggcgtggagacatccttccgcaaactcagctttaccgagtctctgaccagtggtgcctcactgctaactctcaacaaaatgccccatgattatgggcaggaaggacctctagaaggcaaaatttagcctgctgacaatttcccacaccgtgtaaaccaaagccctaaaattccactgcgttgtccacaagacagaagctgaagtgcatccaaaggtgctcagagagccggcccgcctgaatcattctcgatttaactcgagaccttttcaacttggcttcctttcttggttcataaatgaattttagtttggttcacttacagatagtatctagcaatcacaacactggctgagcggatgcatctggggatgaggttgcttactaagctttgccagctgctgctggatcacagctgctttctgttgtcattgctgttgtccctctgctacgttcctattgtcattaaaggtatcacggtcgccacctggcattccttctgaccacagcatcattttgcattcaaattaagggttaagaaaagagatattttaaaatgagagtcacttgatgtgccattttaaaaaaaaaggcatattgctttttctaatgtggttatttctctgatttgcaaaaaaaaaaaaaaaaaaatacttgtcaatatttaaacatggttacaatcattgctgaaaatggtattttcccccttttctgcattttgctattgtaaatatgttttttagatcaaatactttaaaggaaaaaatgttggatttataaatgctattttttattttacttttataataaaaggaaaagcaaattgaaaaaaaaaacaactcactaaaaaaacatgttgcccggggagagattcatggcctcaagccttaagagacaacttctgggtt

SEQ ID NO: 351909 - DNA, 4033 bp, Homo sapiens
ggccaccggagcggcccggcgacgatcgctgacagcttcccctgcccttcccgtcggtcgggccgccagccgccgcagccctcggcctgcacgcagccaccggccccgctcccggagcccagcgccgccgaggccgcagccgcccggccagtaaggcggcgccgccgcgcggccaccgcgggccctgccgcttccctccgcccgcgctgcggccatggcgcggcgctgactggcctggcccggccccgccgcgctcccgctcgccccgacccgcactcgggcccgcccgggctccggcctgccgccgcctcttccttctccagccggcaggcccgcgccgcttaggagggagagcccacccgcgccaggaggccgaacgcggactcgccacccggcttcagaatggcagaagatgatccatatttgggaaggcctgaacaaatgtttcatttggatccttctttgactcatacaatatttaatccagaagtatttcaaccacagatggcactgccaacagcagatggcccataccttcaaatattagagcaacctaaacagagaggatttcgtttccgttatgtatgtgaaggcccatcccatggtggactacctggtgcctctagtgaaaagaacaagaagtcttaccctcaggtcaaaatctgcaactatgtgggaccagcaaaggttattgttcagttggtcacaaatggaaaaaatatccacctgcatgcccacagcctggtgggaaaacactgtgaggatgggatctgcactgtaactgctggacccaaggacatggtggtcggcttcgcaaacctgggtatacttcatgtgacaaagaaaaaagtatttgaaacactggaagcacgaatgacagaggcgtgtataaggggctataatcctggactcttggtgcaccctgaccttgcctatttgcaagcagaaggtggaggggaccggcagctgggagatcgggaaaaagagctaatccgccaagcagctctgcagcagaccaaggagatggacctcagcgtggtgcggctcatgtttacagcttttcttccggatagcactggcagcttcacaaggcgcctggaacccgtggtatcagacgccatctatgacagtaaagcccccaatgcatccaacttgaaaattgtaagaatggacaggacagctggatgtgtgactggaggggaggaaatttatcttctttgtgacaaagttcagaaagatgacatccagattcgattttatgaagaggaagaaaatggtggagtctgggaaggatttggagatttttcccccacagatgttcatagacaatttgccattgtcttcaaaactccaaagtataaagatattaatattacaaaaccagcctctgtgtttgtccagcttcggaggaaatctgacttggaaactagtgaaccaaaacctttcctctactatcctgaaatcaaagataaagaagaagtgcagaggaaacgtcagaagctcatgcccaatttttcggatagtttcggcggtggtagtggtgccggagctggaggcggaggcatgtttggtagtggcggtggaggagggggcactggaagtacaggtccagggtatagcttcccacactatggatttcctacttatggtgggattactttccatcctggaactactaaatctaatgctgggatgaagcatggaaccatggacactgaatctaaaaaggaccctgaaggttgtgacaaaagtgatgacaaaaacactgtaaacctctttgggaaagttattgaaaccacagagcaagatcaggagcccagcgaggccaccgttgggaatggtgaggtcactctaacgtatgcaacaggaacaaaagaagagagtgctggagttcaggataacctctttctagagaaggctatgcagcttgcaaagaggcatgccaatgcccttttcgactacgcggtgacaggagacgtgaagatgctgctggccgtccagcgccatctcactgctgtgcaggatgagaatggggacagtgtcttacacttagcaatcatccaccttcattctcaacttgtgagggatctactagaagtcacatctggtttgatttctgatgacattatcaacatgagaaatgatctgtaccagacgcccttgcacttggcagtgatcactaagcaggaagatgtggtggaggatttgctgagggctggggccgacctgagccttctggaccgcttgggtaactctgttttgcacctagctgccaaagaaggacatgataaagttctcagtatcttactcaagcacaaaaaggcagcactacttcttgaccaccccaacggggacggtctgaatgccattcatctagccatgatgagcaatagcctgccatgtttgctgctgctggtggccgctggggctgacgtcaatgctcaggagcagaagtccgggcgcacagcactgcacctggctgtggagcacgacaacatctcattggcaggctgcctgctcctggagggtgatgcccatgtggacagtactacctacgatggaaccacacccctgcatatagcagctgggagagggtccaccaggctggcagctcttctcaaagcagcaggagcagatcccctggtggagaactttgagcctctctatgacctggatgactcttgggaaaatgcaggagaggatgaaggagttgtgcctggaaccacgcctctagatatggccaccagctggcaggtatttgacatattaaatgggaaaccatatgagccagagtttacatctgatgatttactagcacaaggagacatgaaacagctggctgaagatgtgaagctgcagctgtataagttactagaaattcctgatccagacaaaaactgggctactctggcgcagaaattaggtctggggatacttaataatgccttccggctgagtcctgctccttccaaaacacttatggacaactatgaggtctctgggggtacagtcagagagctggtggaggccctgagacaaatgggctacaccgaagcaattgaagtgatccaggcagcctccagcccagtgaagaccacctctcaggcccactcgctgcctctctcgcctgcctccacaaggcagcaaatagacgagctccgagacagtgacagtgtctgcgacagcggcgtggagacatccttccgcaaactcagctttaccgagtctctgaccagtggtgcctcactgctaactctcaacaaaatgccccatgattatgggcaggaaggacctctagaaggcaaaatttagcctgctgacaatttcccacaccgtgtaaaccaaagccagagccggcccgcctgaatcattctcgatttaactcgagaccttttcaacttggcttcctttcttggttcataaatgaattttagtttggttcacttacagatagtatctagcaatcacaacactggctgagcggatgcatctggggatgaggttgcttactaagctttgccagctgctgctggatcacagctgctttctgttgtcattgctgttgtccctctgctacgttcctattgtcattaaaggtatcacggtcgccacctggcattccttctgaccacagcatcattttgcattcaaattaagggttaagaaaagagatattttaaaatgagagtcacttgatgtgccattttaaaaaaaaaggcatattgctttttctaatgtggttatttctctgatttgcaaaaaaaaaaaaaaaaaaatacttgtcaatatttaaacatggttacaatcattgctgaaaatggtattttcccccttttctgcattttgctattgtaaatatgttttttagatcaaatactttaaaggaaaaaatgttggatttataaatgctattttttattttacttttataataaaaggaaaagcaaattgaaaaaaaaaacaactcactaaaaaaacatgttgcccggggagagattcatggcctcaagccttaagagacaacttctgggtt

SEQ ID NO: 351910 - DNA, 847 bp, Homo sapiens
gtacatgcagaaggttttaacatcttttaccgtttatagatattaacatgtgcttacatctaatatttaaatataaaaattctacctatattgcaagaatcatatctagaatttataatttcatctcatatttatatttctttaaacggatttaaagaaatattgaattctgaacgggtcttgatcttactattattctagtgtatttaaaatgtggatacatagcgaggccgtacgacttttttgttcatataaatgcataccatttgaagttaatctttgttttttggttcatcaattaatattatcctggttcattacaaatagagtataccaatggcaaccctgcatagctgaaagattctgggtagaagttaatttaataagatttttcagtagttgatggaacaacaaaaactttctgttgtcattgctgttgtccctctgctacgttcctattgtcattaaaggtatcacggtcgccacctggcattccttctgaccacagcatcattttgcattcaaattaagggttaagaaaagagatattttaaaatgagagtcacttgatgtgccattttaaaaaaaaaggcatattgctttttctaatgtggttatttctctgatttgcaaaaaaaaaaaaaaaaaaatacttgtcaatatttaaacatggttacaatcattgctgaaaatggtattttcccccttttctgcattttgctattgtaaatatgttttttagatcaaatactttaaaggaaaaaatgttggatttataaatgctattttttattttacttttataataaaaggaaaagcaaattgatgacctcaaaaaaatttgatc

SEQ ID NO: 351911 - DNA, 1661 bp, Homo sapiens
ggccaccggagcggcccggcgacgatcgctgacagcttcccctgcccttcccgtcggtcgggccgccagccgccgcagccctcggcctgcacgcagccaccggccccgctcccggagcccagcgccgccgaggccgcagccgcccggccagtaaggcggcgccgccgcgcggccaccgcgggccctgccgcttccctccgcccgcgctgcggccatggcgcggcgctgactggcctggcccggccccgccgcgctcccgctcgccccgacccgcactcgggcccgcccgggctccggcctgccgccgcctcttccttctccagccggcaggcccgcgccgcttaggagggagagcccacccgcgccaggaggccgaacgcggactcgccacccggcttcagaatggcagaagatgatccatatttgggaaggcctgaacaaatgtttcatttggatccttctttgactcatacaatatttaatccagaagtatttcaaccacagatggcactgccaacagcagatggcccataccttcaaatattagagcaacctaaacagagaggatttcgtttccgttatgtatgtgaaggcccatcccatggtggactacctggtgcctctagtgaaaagaacaagaagtcttaccctcaggtcaaaatctgcaactatgtgggaccagcaaaggttattgttcagttggtcacaaatggaaaaaatatccacctgcatgcccacagcctggtgggaaaacactgtgaggatgggatctgcactgtaactgctggacccaaggacatggtggtcggcttcgcaaacctgggtatacttcatgtgacaaagaaaaaagtatttgaaacactggaagcacgaatgacagaggcgtgtataaggggctataatcctggactcttggtgcaccctgaccttgcctatttgcaagcagaaggtggaggggaccggcagctgggagatcgggaaaaagagctaatccgccaagcagctctgcagcagaccaaggagatggacctcagcgtggtgcggctcatgtttacagcttttcttccggatagcactggcagcttcacaaggcgcctggaacccgtggtatcagacgccatctatgacagtaaagcccccaatgcatccaacttgaaaattgtaagaatggacaggacagctggatgtgtgactggaggggaggaaatttatcttctttgtgacaaagttcagaaagatgacatccagattcgattttatgaagaggaagaaaatggtggagtctgggaaggatttggagatttttcccccacagatgttcatagacaagctttgcctttgttttgaacttcctttcccacttggtagaaagagcccagaagcagccctggccctgtaagatggactctttcatccttcagttgtatttagctttgagtttctctgcatctgtccaccccatgtgtatataacccagcccctggctctggggtggtcacctcgtcagtgccttttgttctggaggagaggacccccccgcctgccgagaggtctcttcctgttctgcacccctctccccatgggaccttggagaaaaactgactggttcaaacccctgcacagtgcctgtcaaacagatgcaaaccttcctgaataaagcc

SEQ ID NO: 351912 - DNA, 745 bp, Homo sapiens
  misc_feature (56)..(56): n is a, c, g, or t
ggcaagatccttccagactcatctgtcagagccccaagccctttagacccagagcncaaggaccatgcctttgggacattaggactgcagcctttgcttctgtgtattttggagttttggtgacttttgtcacctggacacactcatttgttagccatagtgggttcccttggtcagcaacagtgcatgtacctctggatgtcatctgaggtgagaccaccgaggccttttctctctgtgtacagaggggagttaggagttgctggactggatgcattacgaggactggggcagggtagagggacatccagggatcagggcatgagtgggggcaaccccccggcctctgccctggcatggtctccgcatgggctgaggttagctgattggctgccacatttcggccatgctggctggcgtgcccatgttggttaagaaaagagatattttaaaatgagagtcacttgatgtgccattttaaaaaaaaaggcatattgctttttctaatgtggttatttctctgatttgcaaaaaaaaaaaaaaaaaaatacttgtcaatatttaaacatggttacaatcattgctgaaaatggtattttcccccttttctgcattttgctattgtaaatatgttttttagatcaaatactttaaaggaaaaaatgttggatttataaatgctattttttattttacttttataataaaaggaaaagcaaattgatgacctcaaaaaaatttgatc

SEQ ID NO: 351913 - DNA, 617 bp, Homo sapiens
ggccaccggagcggcccggcgacgatcgctgacagcttcccctgcccttcccgtcggtcgggccgccagccgccgcagccctcggcctgcacgcagccaccggccccgctcccggagcccagcgccgccgaggccgcagccgcccggccagtaaggcggcgccgccgcgcggccaccgcgggccctgccgcttccctccgcccgcgctgcggccatggcgcggcgctgactggcctggcccggccccgccgcgctcccgctcgccccgacccgcactcgggcccgcccgggctccggcctgccgccgcctcttccttctccagccggcaggcccgcgccgcttaggagggagagcccacccgcgccaggaggccgaacgcggactcgccacccggcttcagaatggcagaagatgatccatatttgggaaggcctgaacaaatgtttcatttggatccttctttgactcatacaatatttaatccagaagtatttcaaccacagatggcactgccaacaggtaagaaaactcatccctgttaccctgttgttctgctttcagtcttagtaaaatgcaggatttgttaatagtctgtcctagaaactcagttgtgtac

SEQ ID NO: 351914 - DNA, 4032 bp, Homo sapiens
ggccaccggagcggcccggcgacgatcgctgacagcttcccctgcccttcccgtcggtcgggccgccagccgccgcagccctcggcctgcacgcagccaccggccccgctcccggagcccagcgccgccgaggccgcagccgcccggccagtaaggcggcgccgccgcgcggccaccgcgggccctgccgcttccctccgcccgcgctgcggccatggcgcggcgctgactggcctggcccggccccgccgcgctcccgctcgccccgacccgcactcgggcccgcccgggctccggcctgccgccgcctcttccttctccagccggcaggcccgcgccgcttaggagggagagcccacccgcgccaggaggccgaacgcggactcgccacccggcttcagaatggcagaagatgatccatatttgggaaggcctgaacaaatgtttcatttggatccttctttgactcatacaatatttaatccagaagtatttcaaccacagatggcactgccaacagcagatggcccataccttcaaatattagagcaacctaaacagagaggatttcgtttccgttatgtatgtgaaggcccatcccatggtggactacctggtgcctctagtgaaaagaacaagaagtcttaccctcaggtcaaaatctgcaactatgtgggaccagcaaaggttattgttcagttggtcacaaatggaaaaaatatccacctgcatgcccacagcctggtgggaaaacactgtgaggatgggatctgcactgtaactgctggacccaaggacatggtggtcggcttcgcaaacctgggtatacttcatgtgacaaagaaaaaagtatttgaaacactggaagcacgaatgacagaggcgtgtataaggggctataatcctggactcttggtgcaccctgaccttgcctatttgcaagcagaaggtggaggggaccggcagctgggagatcgggaaaaagagctaatccgccaagcagctctgcagcagaccaaggagatggacctcagcgtggtgcggctcatgtttacagcttttcttccggatagcactggcagcttcacaaggcgcctggaacccgtggtatcagacgccatctatgacagtaaagcccccaatgcatccaacttgaaaattgtaagaatggacaggacagctggatgtgtgactggaggggaggaaatttatcttctttgtgacaaagttcagaaagatgacatccagattcgattttatgaagaggaagaaaatggtggagtctgggaaggatttggagatttttcccccacagatgttcatagacaatttgccattgtcttcaaaactccaaagtataaagatattaatattacaaaaccagcctctgtgtttgtccagcttcggaggaaatctgacttggaaactagtgaaccaaaacctttcctctactatcctgaaatcaaagataaagaagaagtgcagaggaaacgtcagaagctcatgcccaatttttcggatagtttcggcggtggtagtggtgccggagctggaggcggaggcatgtttggtagtggcggtggaggagggggcactggaagtacaggtccagggtatagcttcccacactatggatttcctacttatggtgggattactttccatcctggaactactaaatctaatgctgggatgaagcatggaaccatggacactgaatctaaaaaggaccctgaaggttgtgacaaaagtgatgacaaaaacactgtaaacctctttgggaaagttattgaaaccacagagcaagatcaggagcccagcgaggccaccgttgggaatggtgaggtcactctaacgtatgcaacaggaacaaaagaagagagtgctggagttcaggataacctctttctagagaaggctatgcagcttgcaaagaggcatgccaatgcccttttcgactacgcggtgacaggagacgtgaagatgctgctggccgtccagcgccatctcactgctgtgcaggatgagaatggggacagtgtcttacacttagcaatcatccaccttcattctcaacttgtgagggatctactagaagtcacatctggtttgatttctgatgacattatcaacatgagaaatgatctgtaccagacgcccttgcacttggcagtgatcactaagcaggaagatgtggtggaggatttgctgagggctggggccgacctgagccttctggaccgcttgggtaactctgttttgcacctagctgccaaagaaggacatgataaagttctcagtatcttactcaagcacaaaaaggcagcactacttcttgaccaccccaacggggacggtctgaatgccattcatctagccatgatgagcaatagcctgccatgtttgctgctgctggtggccgctggggctgacgtcaatgctcaggagcagaagtccgggcgcacagcactgcacctggctgtggagcacgacaacatctcattggcaggctgcctgctcctggagggtgatgcccatgtggacagtactacctacgatggaaccacacccctgcatatagcagctgggagagggtccaccaggctggcagctcttctcaaagcagcaggagcagatcccctggtggagaactttgagcctctctatgacctggatgactcttgggaaaatgcaggagaggatgaaggagttgtgcctggaaccacgcctctagatatggccaccagctggcaggtatttgacatattaaatgggaaaccatatgagccagagtttacatctgatgatttactagcacaaggagacatgaaacagctggctgaagatgtgaagctgcagctgtataagttactagaaattcctgatccagacaaaaactgggctactctggcgcagaaattaggtctggggatacttaataatgccttccggctgagtcctgctccttccaaaacacttatggacaactatgaggtctctgggggtacagtcagagagctggtggaggccctgagacaaatgggctacaccgaagcaattgaagtgatccaggcagcctccagcccagtgaagaccacctctcaggcccactcgctgcctctctcgcctgcctccacaaggcagcaaatagacgagctccgagacagtgacagtgtctgcgacagcggcgtggagacatccttccgcaaactcagctttaccgagtctctgaccagtggtgcctcactgctaactctcaacaaaatgccccatgattatgggcaggaaggacctctagaaggcaaaatttagcctgctgacaatttcccacaccgtgtaaaccaaagccctaaaattccactgcgttgtccacaagacagaagctgaagtgcatccaaaggtgctcagagagccggcccgcctgaatcattctcgatttaactcgagaccttttcaacttggcttcctttcttggttcataaatgaattttagtttggttcacttacagatagtatctagcaatcacaacactggctgagcggatgcatctggggatgaggttgcttactaagctttgccagctgctgctggatcacagctgctttctgttgtcattgctgttgtccctctgctacgttcctattgtcattaaaggtatcacggtcgccacctggcattccttctgaccacagcatcattttgcattcaaattaagggttaagaaaagagatattttaaaatgagagtcacttgatgtgccattttaaaaaaaaaggcatattgctttttctaatgtggttatttctctgatttgcaaaaaaaaaaaaaaaaaaatacttgtcaatatttaaacatggttacaatcattgctgaaaatggtattttcccccttttctgcattttgctattgtaaatatgttttttagatcaaatactttaaaggaaaaaatgttggatttataaatgctattttttattttacttttataataaaaggaaaagcaaattgatgacctcaaaaaaatttgatc

SEQ ID NO: 351915 - DNA, 3819 bp, Homo sapiens
ccctccgcggggcgggaacgcgaaccggaggggaactcttacaaacttttaaaatccccaaccccagccccacctgggggatggtgagaaggttggagtgcgctgcggcgcggaggagagagcttcagaatggcagaagatgatccatatttgggaaggcctgaacaaatgtttcatttggatccttctttgactcatacaatatttaatccagaagtatttcaaccacagatggcactgccaacagcagatggcccataccttcaaatattagagcaacctaaacagagaggatttcgtttccgttatgtatgtgaaggcccatcccatggtggactacctggtgcctctagtgaaaagaacaagaagtcttaccctcaggtcaaaatctgcaactatgtgggaccagcaaaggttattgttcagttggtcacaaatggaaaaaatatccacctgcatgcccacagcctggtgggaaaacactgtgaggatgggatctgcactgtaactgctggacccaaggacatggtggtcggcttcgcaaacctgggtatacttcatgtgacaaagaaaaaagtatttgaaacactggaagcacgaatgacagaggcgtgtataaggggctataatcctggactcttggtgcaccctgaccttgcctatttgcaagcagaaggtggaggggaccggcagctgggagatcgggaaaaagagctaatccgccaagcagctctgcagcagaccaaggagatggacctcagcgtggtgcggctcatgtttacagcttttcttccggatagcactggcagcttcacaaggcgcctggaacccgtggtatcagacgccatctatgacagtaaagcccccaatgcatccaacttgaaaattgtaagaatggacaggacagctggatgtgtgactggaggggaggaaatttatcttctttgtgacaaagttcagaaagatgacatccagattcgattttatgaagaggaagaaaatggtggagtctgggaaggatttggagatttttcccccacagatgttcatagacaatttgccattgtcttcaaaactccaaagtataaagatattaatattacaaaaccagcctctgtgtttgtccagcttcggaggaaatctgacttggaaactagtgaaccaaaacctttcctctactatcctgaaatcaaagataaagaagaagtgcagaggaaacgtcagaagctcatgcccaatttttcggatagtttcggcggtggtagtggtgccggagctggaggcggaggcatgtttggtagtggcggtggaggagggggcactggaagtacaggtccagggtatagcttcccacactatggatttcctacttatggtgggattactttccatcctggaactactaaatctaatgctgggatgaagcatggaaccatggacactgaatctaaaaaggaccctgaaggttgtgacaaaagtgatgacaaaaacactgtaaacctctttgggaaagttattgaaaccacagagcaagatcaggagcccagcgaggccaccgttgggaatggtgaggtcactctaacgtatgcaacaggaacaaaagaagagagtgctggagttcaggataacctctttctagagaaggctatgcagcttgcaaagaggcatgccaatgcccttttcgactacgcggtgacaggagacgtgaagatgctgctggccgtccagcgccatctcactgctgtgcaggatgagaatggggacagtgtcttacacttagcaatcatccaccttcattctcaacttgtgagggatctactagaagtcacatctggtttgatttctgatgacattatcaacatgagaaatgatctgtaccagacgcccttgcacttggcagtgatcactaagcaggaagatgtggtggaggatttgctgagggctggggccgacctgagccttctggaccgcttgggtaactctgttttgcacctagctgccaaagaaggacatgataaagttctcagtatcttactcaagcacaaaaaggcagcactacttcttgaccaccccaacggggacggtctgaatgccattcatctagccatgatgagcaatagcctgccatgtttgctgctgctggtggccgctggggctgacgtcaatgctcaggagcagaagtccgggcgcacagcactgcacctggctgtggagcacgacaacatctcattggcaggctgcctgctcctggagggtgatgcccatgtggacagtactacctacgatggaaccacacccctgcatatagcagctgggagagggtccaccaggctggcagctcttctcaaagcagcaggagcagatcccctggtggagaactttgagcctctctatgacctggatgactcttgggaaaatgcaggagaggatgaaggagttgtgcctggaaccacgcctctagatatggccaccagctggcaggtatttgacatattaaatgggaaaccatatgagccagagtttacatctgatgatttactagcacaaggagacatgaaacagctggctgaagatgtgaagctgcagctgtataagttactagaaattcctgatccagacaaaaactgggctactctggcgcagaaattaggtctggggatacttaataatgccttccggctgagtcctgctccttccaaaacacttatggacaactatgaggtctctgggggtacagtcagagagctggtggaggccctgagacaaatgggctacaccgaagcaattgaagtgatccaggcagcctccagcccagtgaagaccacctctcaggcccactcgctgcctctctcgcctgcctccacaaggcagcaaatagacgagctccgagacagtgacagtgtctgcgacagcggcgtggagacatccttccgcaaactcagctttaccgagtctctgaccagtggtgcctcactgctaactctcaacaaaatgccccatgattatgggcaggaaggacctctagaaggcaaaatttagcctgctgacaatttcccacaccgtgtaaaccaaagccctaaaattccactgcgttgtccacaagacagaagctgaagtgcatccaaaggtgctcagagagccggcccgcctgaatcattctcgatttaactcgagaccttttcaacttggcttcctttcttggttcataaatgaattttagtttggttcacttacagatagtatctagcaatcacaacactggctgagcggatgcatctggggatgaggttgcttactaagctttgccagctgctgctggatcacagctgctttctgttgtcattgctgttgtccctctgctacgttcctattgtcattaaaggtatcacggtcgccacctggcattccttctgaccacagcatcattttgcattcaaattaagggttaagaaaagagatattttaaaatgagagtcacttgatgtgccattttaaaaaaaaaggcatattgctttttctaatgtggttatttctctgatttgcaaaaaaaaaaaaaaaaaaatacttgtcaatatttaaacatggttacaatcattgctgaaaatggtattttcccccttttctgcattttgctattgtaaatatgttttttagatcaaatactttaaaggaaaaaatgttggatttataaatgctattttttattttacttttataataaaaggaaaagcaaattgaaaaaaaaaacaactcactaaaaaaacatgttgcccggggagagattcatggcctcaagccttaagagacaacttctgggtt

SEQ ID NO: 351916 - DNA, 1936 bp, Homo sapiens
attcagagaatgtttatttatgttcatgtctcctgagaacataataggagactgtgggtcttcaaagcagaacaatagacttatagtatctttactgtccctccccatgattcagtttttgccatttccttcagcttcacaagggccatcttgtgagttagccatcccatcctgtgactgtccctttgcttggactctaggtctgaatgccattcatctagccatgatgagcaatagcctgccatgtttgctgctgctggtggccgctggggctgacgtcaatgctcaggagcagaagtccgggcgcacagcactgcacctggctgtggagcacgacaacatctcattggcaggctgcctgctcctggagggtgatgcccatgtggacagtactacctacgatggaaccacacccctgcatatagcagctgggagagggtccaccaggctggcagctcttctcaaagcagcaggagcagatcccctggtggagaactttgagcctctctatgacctggatgactcttgggaaaatgcaggagaggatgaaggagttgtgcctggaaccacgcctctagatatggccaccagctggcaggtatttgacatattaaatgggaaaccatatgagccagagtttacatctgatgatttactagcacaaggagacatgaaacagctggctgaagatgtgaagctgcagctgtataagttactagaaattcctgatccagacaaaaactgggctactctggcgcagaaattaggtctggggatacttaataatgccttccggctgagtcctgctccttccaaaacacttatggacaactatgaggtctctgggggtacagtcagagagctggtggaggccctgagacaaatgggctacaccgaagcaattgaagtgatccaggcagcctccagcccagtgaagaccacctctcaggcccactcgctgcctctctcgcctgcctccacaaggcagcaaatagacgagctccgagacagtgacagtgtctgcgacagcggcgtggagacatccttccgcaaactcagctttaccgagtctctgaccagtggtgcctcactgctaactctcaacaaaatgccccatgattatgggcaggaaggacctctagaaggcaaaatttagcctgctgacaatttcccacaccgtgtaaaccaaagccctaaaattccactgcgttgtccacaagacagaagctgaagtgcatccaaaggtgctcagagagccggcccgcctgaatcattctcgatttaactcgagaccttttcaacttggcttcctttcttggttcataaatgaattttagtttggttcacttacagatagtatctagcaatcacaacactggctgagcggatgcatctggggatgaggttgcttactaagctttgccagctgctgctggatcacagctgctttctgttgtcattgctgttgtccctctgctacgttcctattgtcattaaaggtatcacggtcgccacctggcattccttctgaccacagcatcattttgcattcaaattaagggttaagaaaagagatattttaaaatgagagtcacttgatgtgccattttaaaaaaaaaggcatattgctttttctaatgtggttatttctctgatttgcaaaaaaaaaaaaaaaaaaatacttgtcaatatttaaacatggttacaatcattgctgaaaatggtattttcccccttttctgcattttgctattgtaaatatgttttttagatcaaatactttaaaggaaaaaatgttggatttataaatgctattttttattttacttttataataaaaggaaaagcaaattgaaaaaaaaaacaactcactaaaaaaacatgttgcccggggagagattcatggcctcaagccttaagagacaacttctgggtt

SEQ ID NO: 351917 - DNA, 3395 bp, Homo sapiens
ggccaccggagcggcccggcgacgatcgctgacagcttcccctgcccttcccgtcggtcgggccgccagccgccgcagccctcggcctgcacgcagccaccggccccgctcccggagcccagcgccgccgaggccgcagccgcccggccagtaaggcggcgccgccgcgcggccaccgcgggccctgccgcttccctccgcccgcgctgcggccatggcgcggcgctgactggcctggcccggccccgccgcgctcccgctcgccccgacccgcactcgggcccgcccgggctccggcctgccgccgcctcttccttctccagccggcaggcccgcgccgcttaggagggagagcccacccgcgccaggaggccgaacgcggactcgccacccggcttcagaatggcagaagatgatccatatttgggaaggcctgaacaaatgtttcatttggatccttctttgactcatacaatatttaatccagaagtatttcaaccacagatggcactgccaacagcagatggcccataccttcaaatattagagcaacctaaacagagaggatttcgtttccgttatgtatgtgaaggcccatcccatggtggactacctggtgcctctagtgaaaagaacaagaagtcttaccctcaggtcaaaatctgcaactatgtgggaccagcaaaggttattgttcagttggtcacaaatggaaaaaatatccacctgcatgcccacagcctggtgggaaaacactgtgaggatgggatctgcactgtaactgctggacccaaggacatggtggtcggcttcgcaaacctgggtatacttcatgtgacaaagaaaaaagtatttgaaacactggaagcacgaatgacagaggcgtgtataaggggctataatcctggactcttggtgcaccctgaccttgcctatttgcaagcagaaggtggaggggaccggcagctgggagatcgggaaaaagagctaatccgccaagcagctctgcagcagaccaaggagatggacctcagcgtggtgcggctcatgtttacagcttttcttccggatagcactggcagcttcacaaggcgcctggaacccgtggtatcagacgccatctatgacagtaaagcccccaatgcatccaacttgaaaattgtaagaatggacaggacagctggatgtgtgactggaggggaggaaatttatcttctttgtgacaaagttcagaaagatgacatccagattcgattttatgaagaggaagaaaatggtggagtctgggaaggatttggagatttttcccccacagatgttcatagacaatttgccattgtcttcaaaactccaaagtataaagatattaatattacaaaaccagcctctgtgtttgtccagcttcggaggaaatctgacttggaaactagtgaaccaaaacctttcctctactatcctgaaatcaaagataaagaagaagtgcagaggaaacgtcagaagctcatgcccaatttttcggatagtttcggcggtggtagtggtgccggagctggaggcggaggcatgtttggtagtggcggtggaggagggggcactggaagtacaggtccagggtatagcttcccacactatggatttcctacttatggtgggattactttccatcctggaactactaaatctaatgctgggatgaagcatggaaccatggacactgaatctaaaaaggaccctgaaggttgtgacaaaagtgatgacaaaaacactgtaaacctctttgggaaagttattgaaaccacagagcaagatcaggagcccagcgaggccaccgttgggaatggtgaggtcactctaacgtatgcaacaggaacaaaagaagagagtgctggagttcaggataacctctttctagagaaggctatgcagcttgcaaagaggcatgccaatgcccttttcgactacgcggtgacaggagacgtgaagatgctgctggccgtccagcgccatctcactgctgtgcaggatgagaatggggacagtgtcttacacttagcaatcatccaccttcattctcaacttgtgagggatctactagaagtcacatctggtttgatttctgatgacattatcaacatgagaaatgatctgtaccagacgcccttgcacttggcagtgatcactaagcaggaagatgtggtggaggatttgctgagggctggggccgacctgagccttctggaccgcttgggtaactctgttttgcacctagctgccaaagaaggacatgataaagttctcagtatcttactcaagcacaaaaaggcagcactacttcttgaccaccccaacggggacggtctgaatgccattcatctagccatgatgagcaatagcctgccatgtttgctgctgctggtggccgctggggctgacgtcaatgctcaggagcagaagtccgggcgcacagcactgcacctggctgtggagcacgacaacatctcattggcaggctgcctgctcctggagggtgatgcccatgtggacagtactacctacgatggaaccacacccctgcatatagcagctgggagagggtccaccaggctggcagctcttctcaaagcagcaggagcagatcccctggtggagaactttgagcctctctatgacctggatgactcttgggaaaatgcaggagaggatgaaggagttgtgcctggaaccacgcctctagatatggccaccagctggcaggtatttgacatattaaatgggaaaccatatgagccagagtttacatctgatgatttactagcacaaggagacatgaaacagctggctgaagatgtgaagctgcagctgtataagttactagaaattcctgatccagacaaaaactgggctactctggcgcagaaattaggtctggggatacttaataatgccttccggctgagtcctgctccttccaaaacacttatggacaactatgaggtctctgggggtacagtcagagagctggtggaggccctgagacaaatgggctacaccgaagcaattgaagtgatccaggcagcctccagcccagtgaagaccacctctcaggcccactcgctgcctctctcgcctgcctccacaaggcagcaaataggtaaaaaaaaagacaaaagacagtggagatattttccagctcccccaggctggtgtcttcagctctttttggatatggtgtggcagttttctttctcgttttctggatacacttccctgtgtgtctctctaccccctgggctcaccctctgcctctcttgatagtaccattcagatgagggggtcgtacccttggaaaatcacattgacacatgaactacttagtaaacactaaataatacaat

SEQ ID NO: 351918 - DNA, 299 bp, Homo sapiens
agtttttgccatttccttcagcttcacaagggccatcttgtgagttagccatcccatcctgtgactgtccctttgcttggactctaggtctgaatgccattcatctagccatgatgagcaatagcctgccatgtttgctgctgctggtggccgctggggctgacgtcaatgctcaggagcagaagtccgggcgcacagcactgcacctggctgtggagcacgacaacatctcattggcaggctgcctgctcctggaggtgaagggcacacttatttgcttttgcattaaatttctgagg

SEQ ID NO: 351919 - DNA, 1438 bp, Homo sapiens
taccacttgcctaatgttcatttaggaatttgctatcacaaataaaacacgtatctcctctgagttactagaacagaaaaggaaacaatctggtatcattatcaggccagctgcagcctcttgccttgacctgcattcctagaatttctttgttgctgtaattcttgattaagtgaccttgactttcattttgtaattttgctaatcatcagcaaattcacttgcatgacgttactgccaaatatgaaggcagttgaattattatgagtgattgtggcagaggtttgtgccatggtgaaaactttgatgtttgtctgtgttcattggatccatctttttaaatgacattaccatgagtctgttgtcaaacctaaatatctttgtttgaatttaaaatgggactctatattgttgtagttcaggtcttcattgactaagagattgagagaaatctgacataagaaaatattgttttcactgcaggaataaagaggaagtaacagtgaatccaatatagttcatattgttattgtccaatcatcaagttaactaagcattatcagattacgtttatttctcatacatatggatattaacttaaggtaaaaaagctggatgtgaaggatctgaaaaggcattaatttatgtactaattctataaacatgtattaataattgcagtattattaaatacagatggactcaatgtacctttgaaaagaccactaatttagaaaacaaagctaagtgcagtcattacaagaagcaaagaaatacttaagttagaaaaaaattaaaatgaagggatggtctaagttttcttcatgctggaacaaatgttaaagaagcagtgattgcttacaatgtatgtgataaaataatacctttcacaatcaaaattttaatagtaaatataagataaaatttatattaaataatgaaaacgtatttgtactgaatttagtcactagagaacatcgtaacaaaatacatgaaacaaaagtagccagaaatgttagaacaggtggaaatgtatacattatttgatggtttgtttttttatggaaataaacaacatacatagaattaaatggtgatcaaaaacatggaaaaaatacttcactaaataacgtctaagttgtagaggttgtgccggaagataatatttttaaaataacaaatgttcaaatgccataaaagaaaatttgtgtgataataccaaagcagtactataagaaaataagcatgctttaaatccctgtattagggatagagtggaaatatttttgttttttttaaggggtatatagttagaatttagaaagaatggaaatggaaataataaaactaaacaaattagaaaaaaataacaaattagaaaaaataaaaagtattaagtagttcttgtagattaaatgggtaaagtgtcagctcagcc

SEQ ID NO: 351920 - DNA, 1409 bp, Homo sapiens
tgagccggcacctattgatggcactatttgattggccacttgtatgtctcttttgaaaagtgtctgttcatgtctttgcacattttttaattgggtttttcttctgcttgtctaattgtttaagtacttgtagattctggatattgaccttgactttcattttgtaattttgctaatcatcagcaaattcacttgcatgacgttactgccaaatatgaaggcagttgaattattatgagtgattgtggcagaggtttgtgccatggtgaaaactttgatgtttgtctgtgttcattggatccatctttttaaatgacattaccatgagtctgttgtcaaacctaaatatctttgtttgaatttaaaatgggactctatattgttgtagttcaggtcttcattgactaagagattgagagaaatctgacataagaaaatattgttttcactgcaggaataaagaggaagtaacagtgaatccaatatagttcatattgttattgtccaatcatcaagttaactaagcattatcagattacgtttatttctcatacatatggatattaacttaaggtaaaaaagctggatgtgaaggatctgaaaaggcattaatttatgtactaattctataaacatgtattaataattgcagtattattaaatacagatggactcaatgtacctttgaaaagaccactaatttagaaaacaaagctaagtgcagtcattacaagaagcaaagaaatacttaagttagaaaaaaattaaaatgaagggatggtctaagttttcttcatgctggaacaaatgttaaagaagcagtgattgcttacaatgtatgtgataaaataatacctttcacaatcaaaattttaatagtaaatataagataaaatttatattaaataatgaaaacgtatttgtactgaatttagtcactagagaacatcgtaacaaaatacatgaaacaaaagtagccagaaatgttagaacaggtggaaatgtatacattatttgatggtttgtttttttatggaaataaacaacatacatagaattaaatggtgatcaaaaacatggaaaaaatacttcactaaataacgtctaagttgtagaggttgtgccggaagataatatttttaaaataacaaatgttcaaatgccataaaagaaaatttgtgtgataataccaaagcagtactataagaaaataagcatgctttaaatccctgtattagggatagagtggaaatatttttgttttttttaaggggtatatagttagaatttagaaagaatggaaatggaaataataaaactaaacaaattagaaaaaaataacaaattagaaaaaataaaaagtattaagtagttcttgtagattaaatgggtaaagtgtcagctcagcc

SEQ ID NO: 351921 - DNA, 1243 bp, Homo sapiens
taatccgggccttctgattctttttaattatttgtattaattttaattttattttatttttaaagagatggagtttcgctatgttgcccagggtggtctggaactctcaggctcaggtgatcctcctgcctgggtctcccaaagggctgggatttcaggcgtgcgccgccatgccctgccgcaggctttccgattctgaaccatagagtcaatgaaactgtcctccatcccctccagagatgtttgcctggaccctgttttcctcaggatatcaatgaatagttcatgagtttagtgagcaaaggtcaacctccatcaggcgcatgcgtcccttccttttcccatggaggaagagacgcctcttttccttccgctttgcttgtcttttggccccggcgactcaccatcgtcagtgcgcaaccgttcgctaactgaaatgatggcgactggaacgccagagtctcaagcgcggttcggtcagtccgtgaaggggcttctcacggagaaggtgaccacctgtggtactgacgtaatcgcgctcaccaagcaggtgctgaaaggctcccggagctccgagctgctaggtcaggcagctcgaaacatggtactccaggaagatgccatcttgcactcagaagatagtttaaggaagatggcaataataacaacacatcttcaataccagcaagaagctattcagaagaatgttgaacagtcatcggatctacaggaccagttgaatcatctgttgaaatagaatgacattaactcagaggagatacgtgttttatttgtgatagcaaattcctaaatgaacattaggcaagtggtatcattatcaggccagctgcagcctcttgccttgacctgcattcctagaatttctttgttgctgtaattcttgattaagtgaccttgactttcattttgtaattttgctaatcatcagcaaattcacttgcatgacgttactgccaaatatgaaggcagttgaattattatgagtgattgtggcagaggtttgtgccatggtgaaaactttgatgtttgtctgtgttcattggatccatctttttaaatgacattaccatgagtctgttgtcaaacctaaatatctttgtttgaatttaaaatgggactctatattgttgtagttcaggtcttcattgactaagagattgagagaaatctgacataagaaaatattgttttcactgcaggaataaagaggaagtaacagtga

SEQ ID NO: 351922 - DNA, 857 bp, Homo sapiens
gtactccagcctgggcaacagagcaagactctgtctcaaaagcaaaaaaaaaaaaaaaaaaaagaaagaaaaagaaaacaacaaatggcagagagccaccatattccaaatcactgaaaaaaataaatgaattatttttatttatttatttatttttttgagatggagtctcggtctgttgcccaggctgaagtgcagtggccccatctcaactcactgcaggctccacctcctgggttcacgccattctcctgcctcagactcccaagtagctgggactgcgggcacctaccaccatgcccagctaattttttgtatttttagtagagacggggtttcaccatgttagccaggatggtcttgatctcctgacctcgtgatccgcccgcctcggcctcccaaagtgctgggattgcaagcatggccactgcgcccggccataaatgaattatttttaagaggcattgattaaagattcacagcaaatcactagttaagcagattttttttctatttcctacttcaaagttctggtgccacatagtggtcagaaatggaacagagaagctgtcttaagccttgttcaagaagcaggaaaggcatcagaagaagtaacagttggcagagggtctcaggaaaaacatcttccttctgatcttttgcatagcaccttttggaattttcatcatgtttgcttattaaacaaagctcctactgccatcatactaatcatgcaaaaagattgccaaatcatgtttggtaggaggacttttgaggtagcttttgaacaaatgtttttttcttttttctttttttttgcaataaagaaaacaaattaatcataaaaaaaaatgaat

SEQ ID NO: 351923 - DNA, 430 bp, Homo sapiens
gggctcaggaattcggtacgagggctcccggagctccgagctgctaggtcaggcagctcgaaacatggtactccaggaagatgccatcttgcactcagaagatagtttaaggaagatggcaataataacaacacatcttcaataccagtgagtatgccccctccagcaactatttgctgcagaatcattatccctggtctgctttcatggactttgtgcttcagcactttcctgtggaggccagagtgggagtaaaggtgggggtggccaaggatgactttctcgatggcaaagatgcctgagactacagaagaagtgggggtaaaggatgagaatcaggagcagagtccaccctttatgaacctccccatgttaaattgagggctcctcagagagagactataccctgtggcgggcccgtgccaggacc

SEQ ID NO: 351924 - DNA, 362 bp, Homo sapiens
gtactccagcctgggcaacagagcaagactctgtctcaaaagcaaaaaaaaaaaaaaaaaaaagaaagaaaaagaaaacaacaaatggcagagagccaccatattccaaatcactgaaaaaaataaatgaattatttttatttatttatttatttttttgagatggagtctcggtctgttgcccaggctgaagtgcagtggccccatctcaactcactgcaggctccacctcctgggttcacgccattctcctgcctcagactcccaagtagctgggactgcgggcacctaccaccatgcccagctaattttttgtatttttggtgaagccctatcgctactagagattcaaggcacgagaa

SEQ ID NO: 351925 - DNA, 2919 bp, Homo sapiens
taatccgggccttctgattctttttaattatttgtattaattttaattttattttatttttaaagagatggagtttcgctatgttgcccagggtggtctggaactctcaggctcaggtgatcctcctgcctgggtctcccaaagggctgggatttcaggcgtgcgccgccatgccctgccgcaggctttccgattctgaaccatagagtcaatgaaactgtcctccatcccctccagagatgtttgcctggaccctgttttcctcaggatatcaatgaatagttcatgagtttagtgagcaaaggtcaacctccatcaggcgcatgcgtcccttccttttcccatggaggaagagacgcctcttttccttccgctttgcttgtcttttggccccggcgactcaccatcgtcagtgcgcaaccgttcgctaactgaaatgatggcgactggaacgccagagtctcaagcgcggttcggtcagtccgtgaaggggcttctcacggagaaggtgaccacctgtggtactgacgtaatcgcgctcaccaagcaggtgctgaaaggctcccggagctccgagctgctaggtcaggcagctcgaaacatggtactccaggaagatgccatcttgcactcagaagatagtttaaggaagatggcaataataacaacacatcttcaataccagcaagaagctattcagaagaatgttgaacagtcatcggatctacaggaccagttgaatcatctgttgaaatagaatgacatgtaagagtgctgtaggactcctttgcctaatgctgaggagtaaataccttacacagctgtcctctgggtttggttttctattttcttctccaaaagttaagttagaaaagttctgtgttagggccgggcgcggtagctcacgcctgtaatcccagcactttgggaggccgaggcgggtggatcacgaggtcaggagttcgagaccagcctggccaagatggtgaaaccccgtctctactaaaaatacaaagaattagctgggcgtggtggcgggcgcctgtaatcccagctactcgggaagctgaggcaagagaatcgcttgaacccaggaggtggaggttgcagtgagccaagatcgcgccactgcactccagcctgggcgacagagtgagattccatctccaaaaaaaaaaaaaagaaaaaaaaaagaaaagttctgtgttgatgtacagtttctcctaagaagaagcgaggtggttgaattttggaagcacttcttgaatcggattaacccatgctcttattgaattttttcatctgctctgtttagtttgatattaaagcaaaattaagaggtcttagtttttcctatagaacttttaatatgtcaattcagaaatagagcttctattatgaacacatgagaatgatttttttctcttaatcattattaaggaaatattttaatttcatggtcatataatggtgataagtaatacctgattgtttccttttctgttctagtaactcagaggagatacgtgttttatttgtgatagcaaattcctaaatgaacattaggcaagtggtatcattatcaggccagctgcagcctcttgccttgacctgcattcctagaatttctttgttgctgtaattcttgattaagtgaccttgactttcattttgtaattttgctaatcatcagcaaattcacttgcatgacgttactgccaaatatgaaggcagttgaattattatgagtgattgtggcagaggtttgtgccatggtgaaaactttgatgtttgtctgtgttcattggatccatctttttaaatgacattaccatgagtctgttgtcaaacctaaatatctttgtttgaatttaaaatgggactctatattgttgtagttcaggtcttcattgactaagagattgagagaaatctgacataagaaaatattgttttcactgcaggaataaagaggaagtaacagtgaatccaatatagttcatattgttattgtccaatcatcaagttaactaagcattatcagattacgtttatttctcatacatatggatattaacttaaggtaaaaaagctggatgtgaaggatctgaaaaggcattaatttatgtactaattctataaacatgtattaataattgcagtattattaaatacagatggactcaatgtacctttgaaaagaccactaatttagaaaacaaagctaagtgcagtcattacaagaagcaaagaaatacttaagttagaaaaaaattaaaatgaagggatggtctaagttttcttcatgctggaacaaatgttaaagaagcagtgattgcttacaatgtatgtgataaaataatacctttcacaatcaaaattttaatagtaaatataagataaaatttatattaaataatgaaaacgtatttgtactgaatttagtcactagagaacatcgtaacaaaatacatgaaacaaaagtagccagaaatgttagaacaggtggaaatgtatacattatttgatggtttgtttttttatggaaataaacaacatacatagaattaaatggtgatcaaaaacatggaaaaaatacttcactaaataacgtctaagttgtagaggttgtgccggaagataatatttttaaaataacaaatgttcaaatgccataaaagaaaatttgtgtgataataccaaagcagtactataagaaaataagcatgctttaaatccctgtattagggatagagtggaaatatttttgttttttttaaggggtatatagttagaatttagaaagaatggaaatggaaataataaaactaaacaaattagaaaaaaataacaaattagaaaaaataaaaagtattaagtagttcttgtagattaaatgggtaaagtgtcagctcagcc

SEQ ID NO: 351926 - DNA, 2041 bp, Homo sapiens
taatccgggccttctgattctttttaattatttgtattaattttaattttattttatttttaaagagatggagtttcgctatgttgcccagggtggtctggaactctcaggctcaggtgatcctcctgcctgggtctcccaaagggctgggatttcaggcgtgcgccgccatgccctgccgcaggctttccgattctgaaccatagagtcaatgaaactgtcctccatcccctccagagatgtttgcctggaccctgttttcctcaggatatcaatgaatagttcatgagtttagtgagcaaaggtcaacctccatcaggcgcatgcgtcccttccttttcccatggaggaagagacgcctcttttccttccgctttgcttgtcttttggccccggcgactcaccatcgtcagtgcgcaaccgttcgctaactgaaatgatggcgactggaacgccagagtctcaagcgcggttcggtcagtccgtgaaggggcttctcacggagaaggtgaccacctgtggtactgacgtaatcgcgctcaccaagcaggtgctgaaaggctcccggagctccgagctgctaggtcaggcagctcgaaacatggtactccaggaagatgccatcttgcactcagaagatagtttaaggaagatggcaataataacaacacatcttcaataccagcaagaagctattcagaagaatgttgaacagtcatcggatctacaggaccagttgaatcatctgttgaaatagaatgacatgtaagagtgctgtaggactcctttgcctaatgctgaggagtaaataccttacacagctgtcctctgggtttggttttctattttcttctccaaaagttaagttagaaaagttctgtgttagggccgggcgcggtagctcacgcctgtaatcccagcactttgggaggccgaggcgggtggatcacgaggtcaggagttcgagaccagcctggccaagatggtgaaaccccgtctctactaaaaatacaaagaattagctgggcgtggtggcgggcgcctgtaatcccagctactcgggaagctgaggcaagagaatcgcttgaacccaggaggtggaggttgcagtgagccaagatcgcgccactgcactccagcctgggcgacagagtgagattccatctccaaaaaaaaaaaaaagaaaaaaaaaagaaaagttctgtgttgatgtacagtttctcctaagaagaagcgaggtggttgaattttggaagcacttcttgaatcggattaacccatgctcttattgaattttttcatctgctctgtttagtttgatattaaagcaaaattaagaggtcttagtttttcctatagaacttttaatatgtcaaaagctatattgtctaaatttcagtacttaagcaaatactgagtagtgttttaaattcagaaatagagcttctattatgaacacatgagaatgatttttttctcttaatcattattaaggaaatattttaatttcatggtcatataatggtgataagtaatacctgattgtttccttttctgttctagtaactcagaggagatacgtgttttatttgtgatagcaaattcctaaatgaacattaggcaagtggtatcattatcaggccagctgcagcctcttgccttgacctgcattcctagaatttctttgttgctgtaattcttgattaagtgaccttgactttcattttgtaattttgctaatcatcagcaaattcacttgcatgacgttactgccaaatatgaaggcagttgaattattatgagtgattgtggcagaggtttgtgccatggtgaaaactttgatgtttgtctgtgttcattggatccatctttttaaatgacattaccatgagtctgttgtcaaacctaaatatctttgtttgaatttaaaatgggactctatattgttgtagttcaggtcttcattgactaagagattgagagaaatctgacataagaaaatattgttttcactgcaggaataaagaggaagtaacagtga

SEQ ID NO: 351927 - DNA, 2919 bp, Homo sapiens
taatccgggccttctgattctttttaattatttgtattaattttaattttattttatttttaaagagatggagtttcgctatgttgcccagggtggtctggaactctcaggctcaggtgatcctcctgcctgggtctcccaaagggctgggatttcaggcgtgcgccgccatgccctgccgcaggctttccgattctgaaccatagagtcaatgaaactgtcctccatcccctccagagatgtttgcctggaccctgttttcctcaggatatcaatgaatagttcatgagtttagtgagcaaaggtcaacctccatcaggcgcatgcgtcccttccttttcccatggaggaagagacgcctcttttccttccgctttgcttgtcttttggccccggcgactcaccatcgtcagtgcgcaaccgttcgctaactgaaatgatggcgactggaacgccagagtctcaagcgcggttcggtcagtccgtgaaggggcttctcacggagaaggtgaccacctgtggtactgacgtaatcgcgctcaccaagcaggtgctgaaaggctcccggagctccgagctgctaggtcaggcagctcgaaacatggtactccaggaagatgccatcttgcactcagaagatagtttaaggaagatggcaataataacaacacatcttcaataccagcaagaagctattcagaagaatgttgaacagtcatcggatctacaggaccagttgaatcatctgttgaaatagaatgacatgtaagagtgctgtaggactcctttgcctaatgctgaggagtaaataccttacacagctgtcctctgggtttggttttctattttcttctccaaaagttaagttagaaaagttctgtgttagggccgggcgcggtagctcacgcctgtaatcccagcactttgggaggccgaggcgggtggatcacgaggtcaggagttcgagaccagcctggccaagatggtgaaaccccgtctctacttcgggaagctgaggcaagagaatcgcttgaacccaggaggtggaggttgcagtgagccaagatcgcgccactgcactccagcctgggcgacagagtgagattccatctccaaaaaaaaaaaaaagaaaaaaaaaagaaaagttctgtgttgatgtacagtttctcctaagaagaagcgaggtggttgaattttggaagcacttcttgaatcggattaacccatgctcttattgaattttttcatctgctctgtttagtttgatattaaagcaaaattaagaggtcttagtttttcctatagaacttttaatatgtcaaaagctatattgtctaaatttcagtacttaagcaaatactgagtagtgttttaaattcagaaatagagcttctattatgaacacatgagaatgatttttttctcttaatcattattaaggaaatattttaatttcatggtcatataatggtgataagtaatacctgattgtttccttttctgttctagtaactcagaggagatacgtgttttatttgtgatagcaaattcctaaatgaacattaggcaagtggtatcattatcaggccagctgcagcctcttgccttgacctgcattcctagaatttctttgttgctgtaattcttgattaagtgaccttgactttcattttgtaattttgctaatcatcagcaaattcacttgcatgacgttactgccaaatatgaaggcagttgaattattatgagtgattgtggcagaggtttgtgccatggtgaaaactttgatgtttgtctgtgttcattggatccatctttttaaatgacattaccatgagtctgttgtcaaacctaaatatctttgtttgaatttaaaatgggactctatattgttgtagttcaggtcttcattgactaagagattgagagaaatctgacataagaaaatattgttttcactgcaggaataaagaggaagtaacagtgaatccaatatagttcatattgttattgtccaatcatcaagttaactaagcattatcagattacgtttatttctcatacatatggatattaacttaaggtaaaaaagctggatgtgaaggatctgaaaaggcattaatttatgtactaattctataaacatgtattaataattgcagtattattaaatacagatggactcaatgtacctttgaaaagaccactaatttagaaaacaaagctaagtgcagtcattacaagaagcaaagaaatacttaagttagaaaaaaattaaaatgaagggatggtctaagttttcttcatgctggaacaaatgttaaagaagcagtgattgcttacaatgtatgtgataaaataatacctttcacaatcaaaattttaatagtaaatataagataaaatttatattaaataatgaaaacgtatttgtactgaatttagtcactagagaacatcgtaacaaaatacatgaaacaaaagtagccagaaatgttagaacaggtggaaatgtatacattatttgatggtttgtttttttatggaaataaacaacatacatagaattaaatggtgatcaaaaacatggaaaaaatacttcactaaataacgtctaagttgtagaggttgtgccggaagataatatttttaaaataacaaatgttcaaatgccataaaagaaaatttgtgtgataataccaaagcagtactataagaaaataagcatgctttaaatccctgtattagggatagagtggaaatatttttgttttttttaaggggtatatagttagaatttagaaagaatggaaatggaaataataaaactaaacaaattagaaaaaaataacaaattagaaaaaataaaaagtattaagtagttcttgtagattaaatgggtaaagtgtcagctcagcc

SEQ ID NO: 351928 - DNA, 2374 bp, Homo sapiens
taatccgggccttctgattctttttaattatttgtattaattttaattttattttatttttaaagagatggagtttcgctatgttgcccagggtggtctggaactctcaggctcaggtgatcctcctgcctgggtctcccaaagggctgggatttcaggcgtgcgccgccatgccctgccgcaggctttccgattctgaaccatagagtcaatgaaactgtcctccatcccctccagagatgtttgcctggaccctgttttcctcaggatatcaatgaatagttcatgagtttagtgagcaaaggtcaacctccatcaggcgcatgcgtcccttccttttcccatggaggaagagacgcctcttttccttccgctttgcttgtcttttggccccggcgactcaccatcgtcagtgcgcaaccgttcgctaactgaaatgatggcgactggaacgccagagtctcaagcgcggttcggtcagtccgtgaaggggcttctcacggagaaggtgaccacctgtggtactgacgtaatcgcgctcaccaagcaggtgctgaaaggctcccggagctccgagctgctaggtcaggcagctcgaaacatggtactccaggaagatgccatcttgcactcagaagatagtttaaggaagatggcaataataacaacacatcttcaataccagcaagaagctattcagaagaatgttgaacagtcatcggatctacaggaccagttgaatcatctgttgaaatagaatgacattggctgcacttcgtgacgctgagatacagaaggacgtgcagacctactacgggcaggtgctgaagagatcggcagacctccagaccaacggctgtgtcaccacagccaggccggtccccaagcacatccgggaagccttgcaaaatgtacacgaagaagtagccctaagatattatggctgtggtctggtgatccctgagcatctagaaaactgctggattttggatctgggtagtggaagtggcagagattgctatgtacttagccagctggttggtgaaaaaggacacgtgactggaatagacatgaccaaaggccaggtggaagtggctgaaaagtatcttgactatcacatggaaaaatatggcttccaggcatctaatgtgacttttattcatggctacattgagaagttgggagaggctggaatcaagaatgagagccatgatattgttgtatcaaactgtgttattaaccttgtgcctgataaacaacaagtgcttcaggaggcatatcgggtgctgaagcatggtggggagttatatttcagtgacgtctatacgagccttgaactgccagaagaaatcaggacacacaaagttttatggggtgagtgtctgggtggtgctttatactggaaggaacttgctgtccttgctcaaaaaattgggttctgccctccacgtttggtcactgccaatctcattacaattcaaaacaaggaactggaaagagttatcggtgactgtcgttttgtttctgcaacatttcgcctcttcaaacactctaagacaggaccaaccaagagatgccaagttatttacaatggaggaattacaggacatgaaatggatgaagaaacagcagctatcttgaagaattcaagatttgctcaagattttctgatcagaccaattggagagaagttgccaacatctggaggctgttctgctttggagttaaaggatataatcacagatccatttaagcttgcagaagagtctgacagtatgaagtccagatgtgtccctgatgctgctggaggctgctgtggcacaaagaaaagctgctaaatctatagccaaccaggggaccacagtagtgggcaagagtgatctgcatgttttttaacctgcttttccccatagcacagaccataagaaacaacaaatgaggccactgcgcccggccataaatgaattatttttaagaggcattgattaaagattcacagcaaatcactagttaagcagattttttttctatttcctacttcaaagttctggtgccacatagtggtcagaaatggaacagagaagctgtcttaagccttgttcaagaagcaggaaaggcatcagaagaagtaacagttggcagagggtctcaggaaaaacatcttccttctgatcttttgcatagcaccttttggaattttcatcatgtttgcttattaaacaaagctcctactgccatcatactaatcatgcaaaaagattgccaaatcatgtttggtaggaggacttttgaggtagcttttgaacaaatgtttttttcttttttctttttttttgcaataaagaaaacaaattaatcataaaaaaaaatgaat

SEQ ID NO: 351929 - DNA, 811 bp, Homo sapiens
  misc_feature (4)..(4): n is a, c, g, or t
  misc_feature (11)..(12): n is a, c, g, or t
  misc_feature (17)..(17): n is a, c, g, or t
  misc_feature (22)..(22): n is a, c, g, or t
taantgctctnnggaantcgcncctagaggattttgagtggtgttgccgggtggatgaagaaacagcagctatcttgaagaattcaagatttgctcaagattttctgatcagaccaattggagagaagttgccaacatctggaggctgttctgctttggagttaaaggatataatcacagatccatttaagcttgcagaagagtctgacagtatgaagtccagatgtgtccctgatgctgctggaggctgctgtggcacaaagaaaagctgctaaatctatagccaaccaggggaccacagtagtgggcaagagtgatctgcatgttttttaacctgcttttccccatagcacagaccataagaaacaacaaatgaggccactgcgcccggccataaatgaattatttttaagaggcattgattaaagattcacagcaaatcactagttaagcagattttttttctatttcctacttcaaagttctggtgccacatagtggtcagaaatggaacagagaagctgtcttaagccttgttcaagaagcaggaaaggcatcagaagaagtaacagttggcagagggtctcaggaaaaacatcttccttctgatcttttgcatagcaccttttggaattttcatcatgtttgcttattaaacaaagctcctactgccatcatactaatcatgcaaaaagattgccaaatcatgtttggtaggaggacttttgaggtagcttttgaacaaatgtttttttcttttttctttttttttgcaataaagaaaacaaattaatcataaaaaaaaatgaat

SEQ ID NO: 351930 - DNA, 1477 bp, Homo sapiens
gagacagtgagtgcgcgccctgagtcgcaggccgaggagacagtgagtgcgcgccctgagtcgcaggccgaggagacatggctgcacttcgtgacgctgagatacagaaggacgtgcagacctactacgggcaggtgctgaagagatcggcagacctccagaccaacggctgtgtcaccacagccaggccggtccccaagcacatccgggaagccttgcaaaatgtacacgaagaagtagccctaagatattatggctgtggtctggtgatccctgagcatctagaaaactgctggattttggatctgggtagtggaagtggcagagattgctatgtacttagccagctggttggtgaaaaaggacacgtgactggaatagacatgaccaaaggccaggtggaagtggctgaaaagtatcttgactatcacatggaaaaatatggcttccaggcatctaatgtgacttttattcatggctacattgagaagttgggagaggctggaatcaagaatgagagccatgatattgttgtatcaaactgtgttattaaccttgtgcctgataaacaacaagtgcttcaggaggcatatcgggtgctgaagcatggtggggagttatatttcagtgacgtctatacgagccttgaactgccagaagaaatcaggacacacaaagttttatggggtgagtgtctgggtggtgctttatactggaaggaacttgctgtccttgctcaaaaaattgggttctgccctccacgtttggtcactgccaatctcattacaattcaaaacaaggaactggaaagagttatcggtgactgtcgttttgtttctgcaacatttcgcctcttcaaacactctaagacaggaccaaccaagagatgccaagttatttacaatggaggaattacaggacatgaaaaagaactaatgtttgatgccaattttacatttaaggaaggtgaaattgttgaagtggatgaagaaacagcagctatcttgaagaattcaagatttgctcaagattttctgatcagaccaattggagagaagttgccaacatctggaggctgttctgctttggagttaaaggatataatcacagatccatttaagcttgcagaagagtctgacagtatgaagtccagatgtgtccctgatgctgctggaggctgctgtggcacaaagtctgcatgttttttaacctgcttttccccatagcacagaccataagaaacaacaaatgagtttacagttgtttgttttttcatagtgttggttttgcatgcatgtgccatttggctcctccttaccttgacgcctactgtcctagtctcctctccatcgttcctattcctttacctccttaacgcccatgtcctctctctctaccctcctatatctttctcccttctccacgtcatctacttcatccttctcttctctcttcttctcttcctagtccctcgtcc

SEQ ID NO: 351931 - DNA, 1741 bp, Homo sapiens
gagacagtgagtgcgcgccctgagtcgcaggccgaggagacagtgagtgcgcgccctgagtcgcaggccgaggagacatggctgcacttcgtgacgctgagatacagaaggacgtgcagacctactacgggcaggtgctgaagagatcggcagacctccagaccaacggctgtgtcaccacagccaggccggtccccaagcacatccgggaagccttgcaaaatgtacacgaagaagtagccctaagatattatggctgtggtctggtgatccctgagcatctagaaaactgctggattttggatctgggtagtggaagtggcagagattgctatgtacttagccagctggttggtgaaaaaggacacgtgactggaatagacatgaccaaaggccaggtggaagtggctgaaaagtatcttgactatcacatggaaaaatatggcttccaggcatctaatgtgacttttattcatggctacattgagaagttgggagaggctggaatcaagaatgagagccatgatattgttgtatcaaactgtgttattaaccttgtgcctgataaacaacaagtgcttcaggaggcatatcgggtgctgaagcatggtggggagttatatttcagtgacgtctatacgagccttgaactgccagaagaaatcaggacacacaaagttttatggggtgagtgtctgggtggtgctttatactggaaggaacttgctgtccttgctcaaaaaattgggttctgccctccacgtttggtcactgccaatctcattacaattcaaaacaaggaactggaaagagttatcggtgactgtcgttttgtttctgcaacatttcgcctcttcaaacactctaagacaggaccaaccaagagatgccaagttatttacaatggaggaattacaggacatgaaaaagaactaatgtttgatgccaattttacatttaaggaaggtgaaattgttgaagtggatgaagaaacagcagctatcttgaagaattcaagatttgctcaagattttctgatcagaccaattggagagaagttgccaacatctggaggctgttctgctttggagttaaaggatataatcacagatccatttaagcttgcagaagagtctgacagtatgaagtccagatgtgtccctgatgctgctggaggctgctgtggcacaaagaaaagctgctaaatctatagccaaccaggggaccacagtagtgggcaagagtgatctgcatgttttttaacctgcttttccccatagcacagaccataagaaacaacaaatgaggccactgcgcccggccataaatgaattatttttaagaggcattgattaaagattcacagcaaatcactagttaagcagattttttttctatttcctacttcaaagttctggtgccacatagtggtcagaaatggaacagagaagctgtcttaagccttgttcaagaagcaggaaaggcatcagaagaagtaacagttggcagagggtctcaggaaaaacatcttccttctgatcttttgcatagcaccttttggaattttcatcatgtttgcttattaaacaaagctcctactgccatcatactaatcatgcaaaaagattgccaaatcatgtttggtaggaggacttttgaggtagcttttgaacaaatgtttttttcttttttctttttttttgcaataaagaaaacaaattaatcataaaaaaaaatgaat

SEQ ID NO: 351932 - DNA, 2973 bp, Homo sapiens
taatccgggccttctgattctttttaattatttgtattaattttaattttattttatttttaaagagatggagtttcgctatgttgcccagggtggtctggaactctcaggctcaggtgatcctcctgcctgggtctcccaaagggctgggatttcaggcgtgcgccgccatgccctgccgcaggctttccgattctgaaccatagagtcaatgaaactgtcctccatcccctccagagatgtttgcctggaccctgttttcctcaggatatcaatgaatagttcatgagtttagtgagcaaaggtcaacctccatcaggcgcatgcgtcccttccttttcccatggaggaagagacgcctcttttccttccgctttgcttgtcttttggccccggcgactcaccatcgtcagtgcgcaaccgttcgctaactgaaatgatggcgactggaacgccagagtctcaagcgcggttcggtcagtccgtgaaggggcttctcacggagaaggtgaccacctgtggtactgacgtaatcgcgctcaccaagcaggtgctgaaaggctcccggagctccgagctgctaggtcaggcagctcgaaacatggtactccaggaagatgccatcttgcactcagaagatagtttaaggaagatggcaataataacaacacatcttcaataccagcaagaagctattcagaagaatgttgaacagtcatcggatctacaggaccagttgaatcatctgttgaaatagaatgacatgtaagagtgctgtaggactcctttgcctaatgctgaggagtaaataccttacacagctgtcctctgggtttggttttctattttcttctccaaaagttaagttagaaaagttctgtgttagggccgggcgcggtagctcacgcctgtaatcccagcactttgggaggccgaggcgggtggatcacgaggtcaggagttcgagaccagcctggccaagatggtgaaaccccgtctctactaaaaatacaaagaattagctgggcgtggtggcgggcgcctgtaatcccagctactcgggaagctgaggcaagagaatcgcttgaacccaggaggtggaggttgcagtgagccaagatcgcgccactgcactccagcctgggcgacagagtgagattccatctccaaaaaaaaaaaaaagaaaaaaaaaagaaaagttctgtgttgatgtacagtttctcctaagaagaagcgaggtggttgaattttggaagcacttcttgaatcggattaacccatgctcttattgaattttttcatctgctctgtttagtttgatattaaagcaaaattaagaggtcttagtttttcctatagaacttttaatatgtcaaaagctatattgtctaaatttcagtacttaagcaaatactgagtagtgttttaaattcagaaatagagcttctattatgaacacatgagaatgatttttttctcttaatcattattaaggaaatattttaatttcatggtcatataatggtgataagtaatacctgattgtttccttttctgttctagtaactcagaggagatacgtgttttatttgtgatagcaaattcctaaatgaacattaggcaagtggtatcattatcaggccagctgcagcctcttgccttgacctgcattcctagaatttctttgttgctgtaattcttgattaagtgaccttgactttcattttgtaattttgctaatcatcagcaaattcacttgcatgacgttactgccaaatatgaaggcagttgaattattatgagtgattgtggcagaggtttgtgccatggtgaaaactttgatgtttgtctgtgttcattggatccatctttttaaatgacattaccatgagtctgttgtcaaacctaaatatctttgtttgaatttaaaatgggactctatattgttgtagttcaggtcttcattgactaagagattgagagaaatctgacataagaaaatattgttttcactgcaggaataaagaggaagtaacagtgaatccaatatagttcatattgttattgtccaatcatcaagttaactaagcattatcagattacgtttatttctcatacatatggatattaacttaaggtaaaaaagctggatgtgaaggatctgaaaaggcattaatttatgtactaattctataaacatgtattaataattgcagtattattaaatacagatggactcaatgtacctttgaaaagaccactaatttagaaaacaaagctaagtgcagtcattacaagaagcaaagaaatacttaagttagaaaaaaattaaaatgaagggatggtctaagttttcttcatgctggaacaaatgttaaagaagcagtgattgcttacaatgtatgtgataaaataatacctttcacaatcaaaattttaatagtaaatataagataaaatttatattaaataatgaaaacgtatttgtactgaatttagtcactagagaacatcgtaacaaaatacatgaaacaaaagtagccagaaatgttagaacaggtggaaatgtatacattatttgatggtttgtttttttatggaaataaacaacatacatagaattaaatggtgatcaaaaacatggaaaaaatacttcactaaataacgtctaagttgtagaggttgtgccggaagataatatttttaaaataacaaatgttcaaatgccataaaagaaaatttgtgtgataataccaaagcagtactataagaaaataagcatgctttaaatccctgtattagggatagagtggaaatatttttgttttttttaaggggtatatagttagaatttagaaagaatggaaatggaaataataaaactaaacaaattagaaaaaaataacaaattagaaaaaataaaaagtattaagtagttcttgtagattaaatgggtaaagtgtcagctcagcc

SEQ ID NO: 351933 - DNA, 2175 bp, Homo sapiens
taatccgggccttctgattctttttaattatttgtattaattttaattttattttatttttaaagagatggagtttcgctatgttgcccagggtggtctggaactctcaggctcaggtgatcctcctgcctgggtctcccaaagggctgggatttcaggcgtgcgccgccatgccctgccgcaggctttccgattctgaaccatagagtcaatgaaactgtcctccatcccctccagagatgtttgcctggaccctgttttcctcaggatatcaatgaatagttcatgagtttagtgagcaaaggtcaacctccatcaggcgcatgcgtcccttccttttcccatggaggaagagacgcctcttttccttccgctttgcttgtcttttggccccggcgactcaccatcgtcagtgcgcaaccgttcgctaactgaaatgatggcgactggaacgccagagtctcaagcgcggttcggtcagtccgtgaaggggcttctcacggagaaggtgaccacctgtggtactgacgtaatcgcgctcaccaagcaggtgctgaaaggctcccggagctccgagctgctaggtcaggcagctcgaaacatggtactccaggaagatgccatcttgcactcagaagatagtttaaggaagatggcaataataacaacacatcttcaataccagcaagaagctattcagaagaatgttgaacagtcatcggatctacaggaccagttgaatcatctgttgaaatagaatgacattaactcagaggagatacgtgttttatttgtgatagcaaattcctaaatgaacattaggcaagtggtatcattatcaggccagctgcagcctcttgccttgacctgcattcctagaatttctttgttgctgtaattcttgattaagtgaccttgactttcattttgtaattttgctaatcatcagcaaattcacttgcatgacgttactgccaaatatgaaggcagttgaattattatgagtgattgtggcagaggtttgtgccatggtgaaaactttgatgtttgtctgtgttcattggatccatctttttaaatgacattaccatgagtctgttgtcaaacctaaatatctttgtttgaatttaaaatgggactctatattgttgtagttcaggtcttcattgactaagagattgagagaaatctgacataagaaaatattgttttcactgcaggaataaagaggaagtaacagtgaatccaatatagttcatattgttattgtccaatcatcaagttaactaagcattatcagattacgtttatttctcatacatatggatattaacttaaggtaaaaaagctggatgtgaaggatctgaaaaggcattaatttatgtactaattctataaacatgtattaataattgcagtattattaaatacagatggactcaatgtacctttgaaaagaccactaatttagaaaacaaagctaagtgcagtcattacaagaagcaaagaaatacttaagttagaaaaaaattaaaatgaagggatggtctaagttttcttcatgctggaacaaatgttaaagaagcagtgattgcttacaatgtatgtgataaaataatacctttcacaatcaaaattttaatagtaaatataagataaaatttatattaaataatgaaaacgtatttgtactgaatttagtcactagagaacatcgtaacaaaatacatgaaacaaaagtagccagaaatgttagaacaggtggaaatgtatacattatttgatggtttgtttttttatggaaataaacaacatacatagaattaaatggtgatcaaaaacatggaaaaaatacttcactaaataacgtctaagttgtagaggttgtgccggaagataatatttttaaaataacaaatgttcaaatgccataaaagaaaatttgtgtgataataccaaagcagtactataagaaaataagcatgctttaaatccctgtattagggatagagtggaaatatttttgttttttttaaggggtatatagttagaatttagaaagaatggaaatggaaataataaaactaaacaaattagaaaaaaataacaaattagaaaaaataaaaagtattaagtagttcttgtagattaaatgggtaaagtgtcagctcagcc

SEQ ID NO: 351934 - DNA, 1708 bp, Homo sapiens
gagacagtgagtgcgcgccctgagtcgcaggccgaggagacagtgagtgcgcgccctgagtcgcaggccgaggagacatggctgcacttcgtgacgctgagatacagaaggacgtgcagacctactacgggcaggtgctgaagagatcggcagacctccagaccaacggctgtgtcaccacagccaggccggtccccaagcacatccgggaagccttgcaaaatgtacacgaagaagtagccctaagatattatggctgtggtctggtgatccctgagcatctagaaaactgctggattttggatctgggtagtggaagtggcagagattgctatgtacttagccagctggttggtgaaaaaggacacgtgactggaatagacatgaccaaaggccaggtggaagtggctgaaaagtatcttgactatcacatggaaaaatatggcttccaggcatctaatgtgacttttattcatggctacattgagaagttgggagaggctggaatcaagaatgagagccatgatattgttgtatcaaactgtgttattaaccttgtgcctgataaacaacaagtgcttcaggaggcatatcgggtgctgaagcatggtggggagttatatttcagtgacgtctatacgagccttgaactgccagaagaaatcaggacacacaaagttttatggggtgagtgtctgggtggtgctttatactggaaggaacttgctgtccttgctcaaaaaattgggttctgccctccacgtttggtcactgccaatctcattacaattcaaaacaaggaactggaaagagttatcggtgactgtcgttttgtttctgcaacatttcgcctcttcaaacactctaagacaggaccaaccaagagatgccaagttatttacaatggaggaattacaggacatgaaaaagaactaatgtttgatgccaattttacatttaaggaaggtgaaattgttgaagtggatgaagaaacagcagctatcttgaagaattcaagatttgctcaagattttctgatcagaccaattggagagaagttgccaacatctggaggctgttctgctttggagttaaaggatataatcacagatccatttaagcttgcagaagagtctgacagtatgaagtccagatgtgtccctgatgctgctggaggctgctgtggcacaaagaaaagctgctaaatctatagccaaccaggggaccacagtagtgggcaagagtgatctgcatgttttttaacctgcttttccgccactgcgcccggccataaatgaattatttttaagaggcattgattaaagattcacagcaaatcactagttaagcagattttttttctatttcctacttcaaagttctggtgccacatagtggtcagaaatggaacagagaagctgtcttaagccttgttcaagaagcaggaaaggcatcagaagaagtaacagttggcagagggtctcaggaaaaacatcttccttctgatcttttgcatagcaccttttggaattttcatcatgtttgcttattaaacaaagctcctactgccatcatactaatcatgcaaaaagattgccaaatcatgtttggtaggaggacttttgaggtagcttttgaacaaatgtttttttcttttttctttttttttgcaataaagaaaacaaattaatcataaaaaaaaatgaat

SEQ ID NO: 351935 - DNA, 1518 bp, Homo sapiens
gagacagtgagtgcgcgccctgagtcgcaggccgaggagacagtgagtgcgcgccctgagtcgcaggccgaggagacaatattatggctgtggtctggtgatccctgagcatctagaaaactgctggattttggatctgggtagtggaagtggcagagattgctatgtacttagccagctggttggtgaaaaaggacacgtgactggaatagacatgaccaaaggccaggtggaagtggctgaaaagtatcttgactatcacatggaaaaatatggcttccaggcatctaatgtgacttttattcatggctacattgagaagttgggagaggctggaatcaagaatgagagccatgatattgttgtatcaaactgtgttattaaccttgtgcctgataaacaacaagtgcttcaggaggcatatcgggtgctgaagcatggtggggagttatatttcagtgacgtctatacgagccttgaactgccagaagaaatcaggacacacaaagttttatggggtgagtgtctgggtggtgctttatactggaaggaacttgctgtccttgctcaaaaaattgggttctgccctccacgtttggtcactgccaatctcattacaattcaaaacaaggaactggaaagagttatcggtgactgtcgttttgtttctgcaacatttcgcctcttcaaacactctaagacaggaccaaccaagagatgccaagttatttacaatggaggaattacaggacatgaaatggatgaagaaacagcagctatcttgaagaattcaagatttgctcaagattttctgatcagaccaattggagagaagttgccaacatctggaggctgttctgctttggagttaaaggatataatcacagatccatttaagcttgcagaagagtctgacagtatgaagtccagatgtgtccctgatgctgctggaggctgctgtggcacaaagaaaagctgctaaatctatagccaaccaggggaccacagtagtgggcaagagtgatctgcatgttttttaacctgcttttccccatagcacagaccataagaaacaacaaatgaggccactgcgcccggccataaatgaattatttttaagaggcattgattaaagattcacagcaaatcactagttaagcagattttttttctatttcctacttcaaagttctggtgccacatagtggtcagaaatggaacagagaagctgtcttaagccttgttcaagaagcaggaaaggcatcagaagaagtaacagttggcagagggtctcaggaaaaacatcttccttctgatcttttgcatagcaccttttggaattttcatcatgtttgcttattaaacaaagctcctactgccatcatactaatcatgcaaaaagattgccaaatcatgtttggtaggaggacttttgaggtagcttttgaacaaatgtttttttcttttttctttttttttgcaataaagaaaacaaattaatcataaaaaaaaatgaat

SEQ ID NO: 351936 - DNA, 383 bp, Homo sapiens
cagtggaacagcgggtcaggcggtgggcgcctgagcgaggggctagagcgggatgggcgggcggagcaagcctgccagcctgggcggggcctcggcacaggagctggctgcgggagcccgccgtcctgagtcgcaggccgaggagacagtgagtgcgcgccctgagtcgcaggccgaggagacagtgagtgcgcgccctgagtcgcaggccgaggagacagtgagtgcgcgccctgggcgccccgccccagcccccagccccttccctgggcccccgcaaggcgggaacgcgagcgcctcccccgagctgtgtctcgagacctttgtcctcccctcacccctcggcccgctgcctgccctttactggccccctccctcatgcc

SEQ ID NO: 351937 - DNA, 1022 bp, Homo sapiens
caccaacatggccgcctcagcaacagcccccctcctgtgcgtcacggacgcggcgactcctgacgtcataggaaggcgccggtttcggcgggggctgcacgtgcgcaggggtgtggaaacttaccggctgagccatggatacaccgttaaggcgcagccgacggctgggaggcctaaggcccgaatcccccgagagcctcacctcagtttcgcggacgagacgggcccttgtggagttcgagtcgaacccagaagaaacgagggagcccgggtctcctccgagtgtgcagcgggctggcctggggtcccccgaaaggccgccgaagacaagcccaggatcaccccgtctgcagcagggtgcaggcttggagtcaccccaagggcagccagagccaggcgcagcgtccccccagcgtcagcaagacctacacctggagtcgcctcaaagacagccagagtacagtcctgaatccccacgatgtcagccgaagccaagtgaggaggcaccaaagtgttctcaggaccagggagtactggcctcggagttggcccagaataaggaggagctgaccccgggggccccccagcatcagctaccgccggtcccaggatcaccagagccttaccccggtcagcaagctcccggtccggagccctctcagccactactggagctgacacccagggcacctggctccccccggggtcagcatgagccgagcaagccacctccagctggggagacggtgacaggcggcttcggggcaaagaagcgaaaaggttcttcatcccaggccccagcgtccaagaagttgaataaagaggagcttcctgtaatcccgaaggggaagcccaaatcggggcgagtgtggaaggaccgctccaagaaaagattctccagatgcttcaggaaagccctggcacatcgtgggcggagatgagacgacggagaggagctggcaggattgaacgcctggagaagaatgaagcaggcaggaacaaattcggtggaataagaagtg

SEQ ID NO: 351938 - DNA, 1888 bp, Homo sapiens
caccaacatggccgcctcagcaacagcccccctcctgtgcgtcacggacgcggcgactcctgacgtcataggaaggcgccggtttcggcgggggctgcacgtgcgcaggggtgtggaaacttaccggctgagccatggatacaccgttaaggcgcagccgacggctgggaggcctaaggcccgaatcccccgagagcctcacctcagtttcgcggacgagacgggcccttgtggagttcgagtcgaacccagaagaaacgagggagcccgggtctcctccgagtgtgcagcgggctggcctggggtcccccgaaaggccgccgaagacaagcccaggatcaccccgtctgcagcagggtgcaggcttggagtcaccccaagggcagccagagccaggcgcagcgtccccccagcgtcagcaagacctacacctggagtcgcctcaaagacagccagagtacagtcctgaatccccacgatgtcagccgaagccaagtgaggaggcaccaaagtgttctcaggaccagggagtactggcctcggagttggcccagaataaggaggagctgaccccgggggccccccagcatcagctaccgccggtcccaggatcaccagagccttaccccggtcagcaagctcccggtccggagccctctcagccactactggagctgacacccagggcacctggctccccccggggtcagcatgagccgagcaagccacctccagctggggagacggtgacaggcggcttcggggcaaagaagcgaaaaggttcttcatcccaggccccagcgtccaagaagttgaataaagaggagcttcctgtaatcccgaaggggaagcccaaatcggggcgagtgtggaaggaccgctccaagaaaagattctcccagatgcttcaggacaagcccctgcgcacatcgtggcagcggaagatgaaggaacgacaggagaggaagctggccaaggactttgcccgtcacctggaggaggagaaggagaggcgccgccaggagaagaaacagcgccgggctgagaacctgaaacgccgcctggagaatgagcggaaggcagaggtcgtccaagtgatccgaaaccccgccaagctcaagcgggcaaagaagaagcagctgcgctccattgagaagcgggacaccctggccctgctgcagaagcagccgccccagcagccggcagccaagatctgagctcaggacggcccgaggccttccatggccaacaaccatgtcagacacagcacctcaggccgctgctcagatgcctctgctggagctggcactccaaacccatggctccagaacagggacccccaccccgaccggggctcctcggcctttgaaggcttccaggcaggtctgtgtgggacagaagcccagagggggcctgggacctggcagagatgggggcgggaagagattcagctcccatccctccttcctctccttctccaagtgccttcaaaccaagaactgtacattcttctggttcctcagtgagctggtgactggcaggtgactccctcagcagtgtatgccctttctcagcatcctaggtccatcccaggcctggaggctgacagttgggaatccagcttcccccacaccttcccaaaggctgctctgagcacctccacaccccactgcctctgtccccagcaaactgaatccggttcctctccacttttcaatactgaaagattaaaatggggaggttgcagggagcagagcttttccctagcacccactttcccagcttgctcagacctgcagtgcctggtaaaaggctgttttgctactgtccgcctcgacttgtcccaaagtaaaatcccagctagctcagacggggatcctcataacag

SEQ ID NO: 351939 - DNA, 1398 bp, Homo sapiens
  misc_feature (1398)..(1398): n is a, c, g, or t
caccaacatggccgcctcagcaacagcccccctcctgtgcgtcacggacgcggcgactcctgacgtcataggaaggcgccggtttcggcgggggctgcacgtgcgcaggggtgtggaaacttaccggctgagccatggatacaccgttaaggcgcagccgacggctgggaggcctaaggcccgaatcccccgagagcctcacctcagtttcgcggacgagacgggcccttgtggagttcgagtcgaacccagaagaaacgagggagcccgggtctcctccgagtgtgcagcgggctggcctggggtcccccgaaaggccgccgaagacaagcccaggatcaccccgtctgcagcagggtgcaggcttggagtcaccccaagggcagccagagccaggcgcagcgtccccccagcgtcagcaagacctacacctggagtcgcctcaaagacagccagagtacagtcctgaatccccacgatgtcagccgaagccaagtgaggaggcaccaaagtgttctcaggaccagggagtactggcctcggagttggcccagaataaggaggagctgaccccgggggccccccagcatcagctaccgccggtcccaggatcaccagagccttaccccggtcagcaagctcccggtccggagccctctcagccactactggagctgacacccagggcacctggctccccccggggtcagcatgagccgagcaagccacctccagctggggagacggtgacaggcggcttcggggcaaagaagcgaaaaggttcttcatcccaggccccagcgtccaagaagttgaataaagaggagcttcctgtaatcccgaaggggaagcccaaatcggggcgagtgtggaaggaccgctccaagaaaagattctcccagatgcttcaggacaagcccctgcgcacatcgtggcagcggaagatgaaggaacgacaggagaggaagctggcaacaaacatgtcagacacagcaactcagggcgcccaagtgatccgaaacccggcaaactcaagcggggaagcacgagcacgtgggctccaattgacaaagcgggagaccctgggcctcgttgtaaaatagcgcccagaaggcgggagccagaatcggcacggagaggcagagggcgctcactggcaaacaaaaatgcccttgttggaagtaggactacaacatgggtccagcaaggagccacatccacggggccacagctaaaaggcaagcaggatattaggaaccacaggcgcgtcgcaaggtcggagaggaacgatagcacatagcgcgacaaatagcaacagaagagctgagcgagcagactacgcagcacatccaacaacatacggttccgcgcggacacaacggcgaaaagaagcagggn

SEQ ID NO: 351940 - DNA, 1991 bp, Homo sapiens
caccaacatggccgcctcagcaacagcccccctcctgtgcgtcacggacgcggcgactcctgacgtcataggaaggcgccggtttcggcgggggctgcacgtgcgcaggggtgtggaaacttaccggctgagccatggatacaccgttaaggcgcagccgacggctgggaggcctaaggcccgaatcccccgagagcctcacctcagtttcgcggacgagacgggcccttgtggagttcgagtcgaacccagaagaaacgagggagcccgggtctcctccgagtgtgcagcgggctggcctggggtcccccgaaaggccgccgaagacaagcccaggatcaccccgtctgcagcagggtgcaggcttggagtcaccccaagggcagccagagccaggcgcagcgtccccccagcgtcagcaagacctacacctggagtcgcctcaaagacagccagagtacagtcctgaatccccacgatgtcagccgaagccaagtgaggaggcaccaaagtgttctcaggaccagggagtactggcctcggagttggcccagaataaggaggagctgaccccgggggccccccagcatcagctaccgccggtcccaggatcaccagagccttaccccggtcagcaagctcccggtccggagccctctcagccactactggagctgacacccagggcacctggctccccccggggtcagcatgagccgagcaagccacctccagctggggagacggtgacaggcggcttcggggcaaagaagcgaaaaggttcttcatcccaggccccagcgtccaagaagttgaataaagaggagcttcctgtaatcccgaaggggaagcccaaatcggggcgagtgtggaaggaccgctccaagaaaagattctcccagatgcttcaggacaagcccctgcgcacatcgtggcagcggaagatgaaggaacgacaggagaggaagctggccaaggactttgcccgtcacctggaggaggagaaggagaggcgccgccaggagaagaaacagcgccgggctgagaacctgaaacgccgcctggagaatgagcggaaggcagaggtcgtccaagtgatccgaaaccccgccaagctcaagcgggcaaagaagaagcagctgcgctccattgagaagcgggacaccctggccctgctgcagaagcagccgccccagcagccggcagccaagatctgagctcaggacggcccgaggccttccatggccaacaaccatgtcagacacagcacctcaggccgctgctcagatgcctctgctggagctggcactccaaacccatggctccagaacagggacccccaccccgaccggggctcctcggcctttgaaggcttccaggcaggtctgtgtgggacagaagcccagagggggcctgggacctggcagagatgggggcgggaagagattcagctcccatccctccttcctctccttctccaagtgccttcaaaccaagaactgtacattcttctggttcctcagtgagctggtgactggcaggtgactccctcagcagtgtatgccctttctcagcatcctaggtccatcccaggcctggaggctgacagttgggaatccagcttcccccacaccttcccaaaggctgctctgagcacctccacaccccactgcctctgtccccagcaaactgaatccggttcctctccacttttcaatactgaaagattaaaatggggaggttgcagggagcagagcttttccctagcacccactttcccaaaccagtctctgcagaagccccagagaatctaactcatgcctgtccagtctacagcaaaaatatttattgagtgcctgttgcatacaggcacaatcctaggcaccggcaaatacagacaatagaccaaagtccctgccctcgaggagctttcattctgatggagagaaaacataataaacaagcaaaatgcaccacgtgaaaaaaaaaaa

SEQ ID NO: 351941 - DNA, 1778 bp, Homo sapiens
caccaacatggccgcctcagcaacagcccccctcctgtgcgtcacggacgcggcgactcctgacgtcataggaaggcgccggtttcggcgggggctgcacgtgcgcaggggtgtggaaacttaccggctgagccatggatacaccgttaaggcgcagccgacggctgggaggcctaaggcccgaatcccccgagagcctcacctcagtttcgcggacgagacgggcccttgtggagttcgagtcgaacccagaagaaacgagggagcccgggtctcctccgagtgtgcagcgggctggcctggggtcccccgaaaggccgccgaagacaagcccaggatcaccccgtctgcagcagggtgcaggcttggagtcaccccaagggcagccagagccaggcgcagcgtccccccagcgtcagcaagacctacacctggagtcgcctcaaagacagccagagtacagtcctgaatccccacgatgtcagccgaagccaagtgaggaggcaccaaagtgttctcaggaccagggagtactggcctcggagttggcccagaataaggaggagctgaccccgggggccccccagcatcagctaccgccggtcccaggatcaccagagccttaccccggtcagcaagctcccggtccggagccctctcagccactactggagctgacacccagggcacctggctccccccggggtcagcatgagccgagcaagccacctccagctggggagacggtgacaggcggcttcggggcaaagaagcgaaaaggttcttcatcccaggccccagcgtccaagaagttgaataaagaggagcttcctgtaatcccgaaggggaagcccaaatcggggcgagtgtggaaggaccgctccaagaaaagattctcccagatgcttcaggacaagcccctgcgcacatcgtggcagcggaagatgaaggaacgacaggagaggaagctggccaaggactttgcccgtcacctggaggaggagaaggagaggcgccgccaggagaagaaacagcgccgggctgagaacctgaaacgccgcctggagaatgagcggaaggcagaggtcgtccaagtgatccgaaaccccgccaagctcaagcgggcaaagaagaagcagctgcgctccattgagaagcgggacaccctggccctgctgcagaagcagccgccccagcagccggcagccaagatctgagctcaggacggcccgaggccttccatggccaacaaccatgtcagacacagcacctcaggccgctgctcagatgcctctgctggagctggcactccaaacccatggctccagaacagggacccccaccccgaccggggctcctcggcctttgaaggcttccaggcaggtctgtgtgggacagaagcccagagggggcctgggacctggcagagatgggggcgggaagagattcagctcccatccctccttcctctccttctccaagtgccttcaaaccaagaactgtacattcttctggttcctcagtgagctggtgactggcagagcttttccctagcacccactttcccaaaccagtctctgcagaagccccagagaatctaactcatgcctgtccagtctacagcaaaaatatttattgagtgcctgttgcatacaggcacaatcctaggcaccggcaaatacagacaatagaccaaagtccctgccctcgaggagctttcattctgatggagagaaaacataataaacaagcaaaatgcaccacgtgaaaaaaaaaaa

SEQ ID NO: 351942 - DNA, 439 bp, Homo sapiens
atgtttaaaaagtggtatcttgttttaatttgcgtgttcttgatgattagtgaagttgtgcatctcttcaaatgcttaaccatttctatttccttttctctgaattgtcttgtcatatattttgtgcattttctgtgcggttgtttatcatgtagatttgttgaagctttttgtatatgatagatatcaacaccgtgtcattttatatgttacaaatacatcctcccattaagttgcttttcattttgctttgtttctaggaacttacttagaaagatattccccacagcaagatgataacactgtccttctattttcttctgtatatggtttgtttgtttgtttgaagagatggggccccactctgccccaggctttagaggtgtgatcctagctcaccacagcctacaacttctgtgctcaagcggggaaccctccc

SEQ ID NO: 351943 - DNA, 1181 bp, Homo sapiens
tctgcctcccgggttcaagcaattctcttgccttggcctcccaagtagctgagattacaggcatgcaccacgacgcccagctaattttttgtatttttagtagagatagggtttcaccatgttggccaggctggtctcgaactcctgacctcaggtgatccacccactttggcctcccaaagtgctgggatcacagatgtgagccatcacgccaggcctgttcattattcttgatgatctcacatttgacttacagtgcacttttatgtcatgtgatgaggtgatacgtttgaagatgaaagagggcatttaaaagtagctgaggacagaatcagaactttagtagttacagtgaggaagtcaaaatctctccccacaaaacaacaataataccagacaaaattgttaaaagcaactgtttcagggctctagaaatggaataaatgcaagaaagaaatggagaagcatttatccaagagaaactgccaaacttcaggtaagaacaatgggagtctttgactccttgcctaaatggtagggggttactcccatcccttcctgccattggtgtggtaattctgttagggtacagcaggccgtgaaaactaacagcttggctgccagaggtaatgcgcttgatttggagcaggtgaaaagcccctgtccggtggcattgacagtgaaagtaatgaccctcagtagcaagagaacaaggaaggccaacagttctggtagtgagagagctatcccaagtgggtcaagcaacagactggcaaactagcccaaaacttaattaacagagatcctggaaatgagacagttacagaggggtctgaagggctgtccacacatttctggctgacttagaagcctctgcacacatgcaggtaaaactagagagatcccatggtacccatttgtccctggttggctgggaatctgcatgaacgtatgaaggaaatgtgacagggctgatccgaaaggaaaagtgggatagacctgaaaactgcttgaacttttgctccctaaccctgcacagacccatgggcagaggttggaagcctagtaggctcaagagatgcaaacacaacctgtaaccaatcattgcctgatcactaagctgtgtgtcagcaagtcaggcttaaaaataaaaacaagaatttgaaaagaaaaactggaaa

SEQ ID NO: 351944 - DNA, 397 bp, Homo sapiens
agcaagaccctgtctttaaaaaataaaaataaaaatctgaatacacatatccctggcatgtaaaagagaaaggacttaggagaagactgattagttgggaacacagggatacatattaaagaaactatgtcctataatagtttgatgcgtaaggatcttggatgagagcttgtgagttatgtgtctgtgtatctgagagtttgaagttaagggaaataactaaattgtatattctgttacattggcggtggttacatactaaagaaaatgaacagaggactaaaaatttaatcctaattttatctaattaccatacaacacactcatcattaaatgttaggttcattttaactttcattagataagattaaattctatttttaccttgaattctcag

SEQ ID NO: 351945 - DNA, 464 bp, Homo sapiens
ctcccaaagtcctgggattacaggtgtgagccaccacgccccgccgagactccgtcttaaaagaaaaattgcattaatgaggcatccagtatgcattaccctgcatgatgtattttttttcccacttgatgacagggacaatgaaagttttatcagggacctgaaggaagggtaggaattaactaggagaaggaaagggatggagacagcagtgagaaagggtgtgttttaggtgatgggaacagcagcatcaaggctgtgatactagacacaacgtggctgctggaaatacaatcattggtgacagtgtgaggggcagatttgcttaaaaactggcctactggccagacacagtggctcatgcctctaatcttagcactttgagaggccaaagcaggaggttcacttgaggccaggagtttgaaaccagcctagacaacatagcgagaccctgtctctacaaa

SEQ ID NO: 351946 - DNA, 2482 bp, Homo sapiens
agcgcggggctggggccccggcgtcggcgggactcaccaggtgccgcgccacctcggaggaggccatggtcgcgggcaggggcacggtgaagcggctgtatcagcccggccccgagcggctggtcccggcgacggcggcgggaaggccggagggcagaagcaacgggcggggcgcgaggctaggctgcctccgcgacggggaagggacaggggcggggccgagctggaggcctccgggggcggggttggggcggacgccctgtggtgcgcgctgagcgttttgcctgcgccaagcgagcccctcacaggagctaccctcgacgcctgaggactgagcgtcagcgttggggcgggctgaagtagagctgggactcccaggaagactgcgcgaggaatgcaggcgggaactgcggagcagtgattgcggccctcgcgaggccggaagtgggcgggccttgaggcgaggccgccctaggtaggtgtggccgagacagcggggagcggaagtgggcgtggcctggtggcgtgggcgcggggcgggggtgcggggggcgtgtccgcccgggcgcggcccagtgaggcggtggccgagtcctctggcctcagacgcgtaggctggcagcccgctgagcccgccagactccgccgccgtcgggagccggccgctgggagcccgtcgctatgggaccgcgctgagccgcccgctggcgggggagcagcgcggtcgaggatggaggggccggcagagtggggccccgaggcggcgctgggccccgaggcggtgctgcgcttcctggcggagcgcgggggccgggccctgcacgccgagctggtgcagcacttcaggggcgccctgggcggcgaaccggagcagcgcgcccgcgcccgcgcgcacttcaaggagctggtgaacgccgtggccactgtgcgcgtcgatcccgccgacggcgccaagtacgtgcacctcaagaagaggttctgtgaagggccgtccgagccctccggggacccgccgcgaatccaggtgaccgccgagcccgaggcccccgacggccctgccgggcccgaggcgcgcgatcggctccccgacgcggcggccccggagtcgctccctggacagggccgcgagctgggcgagggagagccccccgcccccgcgcactggccgcccctgagcgccggggctcgcaggaagaactcgcggcgcgacgtgcagcccctaccgcggactccagccccggggcccagcgaggacctggagctcccgccacatggctgcgaggaggcggacaggggcagctcccttgtgggggctaccgcacagaggccggcccgccagaacctccgtgacctggtgatgggcagctccccgcagctgaagaggagcgtgtgtcccgggggcagcagcccgggcagctcctccgggggaggacgcggcagaggcgggggcgactcagacagcgcatcggtggcctcgtcgtccgcggaggaggagagcagcggcggaggctccgtgacgctggaccccctggagcacgcgtggatgctctctgcctccgatggcaagtgggacagcctggagggcttgctcacctgcgagcccggcctgctggtcaagcgggacttcattaccggcttcacttgcctgcgctgggccgcaagcacggcaggcaggagcttgtggccatgctagtcaacttcgccaacaaacaccagctgccggtgaacatggacgccaggacgagcgggggttacaccgccctgcacttggcagccatgcacggccacgtggaggtggtgaagctgctggtgggggcctacgacgccgatgtggacatcagggactacagtgggaaaaaggcctcccagtacctgagtcggagcatcgccgaggagatcaagaacctggtgggagccctggacgagggtgacggggaaagcgccgcgggtagcggcggcgggcgctggaggctttcaaaggtgcttccctcgcatctcatcacctacaaactctcacacgccctagaagatggaggggaccatcaccaccatcaccactcggctgaggggtgggtcggaggcaaagccaaggatccagggcgcaaagcctcgggcagctctagtggacgtataaaacccagactcaacaaaatccgattcagaacccagatcgtccacaccacaccctctttcagggacccagagcagccgctggagggcaggggggaggagggagtgggggaggaacgacctgttaaaggccactcgcccttcacattgagaccaaagtccaatgtatttgggtaaaaattgcttcttttagaaaatgcaaaggtttatttgtcttaataaattgaatactaggtgttgtaaggaagtgagaccagaaggacaagctaaattatgcattcttacttgagggatactccgccgcgcggagtatcgcggagtattgctcagcgggtaccagctcggttcgtaa

SEQ ID NO: 351947 - DNA, 3751 bp, Homo sapiens
agcgcggggctggggccccggcgtcggcgggactcaccaggtgccgcgccacctcggaggaggccatggtcgcgggcaggggcacggtgaagcggctgtatcagcccggccccgagcggctggtcccggcgacggcggcgggaaggccggagggcagaagcaacgggcggggcgcgaggctaggctgcctccgcgacggggaagggacaggggcggggccgagctggaggcctccgggggcggggttggggcggacgccctgtggtgcgcgctgagcgttttgcctgcgccaagcgagcccctcacaggagctaccctcgacgcctgaggactgagcgtcagcgttggggcgggctgaagtagagctgggactcccaggaagactgcgcgaggaatgcaggcgggaactgcggagcagtgattgcggccctcgcgaggccggaagtgggcgggccttgaggcgaggccgccctaggtaggtgtggccgagacagcggggagcggaagtgggcgtggcctggtggcgtgggcgcggggcgggggtgcggggggcgtgtccgcccgggcgcggcccagtgaggcggtggccgagtcctctggcctcagacgcgtaggctggcagcccgctgagcccgccagactccgccgccgtcgggagccggccgctgggagcccgtcgctatgggaccgcgctgagccgcccgctggcgggggagcagcgcggtcgaggatggaggggccggcagagtggggccccgaggcggcgctgggccccgaggcggtgctgcgcttcctggcggagcgcgggggccgggccctgcacgccgagctggtgcagcacttcaggggcgccctgggcggcgaaccggagcagcgcgcccgcgcccgcgcgcacttcaaggagctggtgaacgccgtggccactgtgcgcgtcgatcccgccgacggcgccaagtacgtgcacctcaagaagaggttctgtgaagggccgtccgagccctccggggacccgccgcgaatccaggtgaccgccgagcccgaggcccccgacggccctgccgggcccgaggcgcgcgatcggctccccgacgcggcggccccggagtcgctccctggacagggccgcgagctgggcgagggagagccccccgcccccgcgcactggccgcccctgagcgccggggctcgcaggaagaactcgcggcgcgacgtgcagcccctaccgcggactccagccccggggcccagcgaggacctggagctcccgccacatggctgcgaggaggcggacaggggcagctcccttgtgggggctaccgcacagaggccggcccgccagaacctccgtgacctggtgatgggcagctccccgcagctgaagaggagcgtgtgtcccgggggcagcagcccgggcagctcctccgggggaggacgcggcagaggcgggggcgactcagacagcgcatcggtggcctcgtcgtccgcggaggaggagagcagcggcggaggctccgtgacgctggaccccctggagcacgcgtggatgctctctgcctccgatggcaagtgggacagcctggagggcttgctcacctgcgagcccggcctgctggtcaagcgggacttcattaccggcttcacttgcctgcgctgggccgcaagcacggcaggcaggagcttgtggccatgctagtcaacttcgccaacaaacaccagctgccggtgaacatggacgccaggacgagcgggggttacaccgccctgcacttggcagccatgcacggccacgtggaggtggtgaagctgctggtgggggcctacgacgccgatgtggacatcagggactacagtgggaaaaaggcctcccagtacctgagtcggagcatcgccgaggagatcaagaacctggtgggagccctggacgagggtgacggggaaagcgccgcgggtagcggcggcgggcgctggaggctttcaaaggtgcttccctcgcatctcatcacctacaaactctcacacgccctagaagatggaggggaccatcaccaccatcaccactcggctgaggggtgggtcggaggcaaagccaaggatccagggcgcaaagcctcgggcagctctagtggacgtataaaacccagactcaacaaaatccgattcagaacccagatcgtccacaccacaccctctttcagggacccagagcagccgctggagggcaggggggaggagggagtgggggaggaacgacctgttaaaggccactcgcccttcacattgagaccaaagtccaatgtatttgggtaaaaattgcttcttttagaaaatgcaaaggtttatttgtcttaataaattgaatactaggtgttgtaaggaagtgagaccagaaggacaagctaaattatgcattcttacttgagggatcggaatggatggggcggagttctcttcaggctagccttctgggaaaagtggatgtctttttcagagattcatcataccttgacctgtacctcttctctgccctccacttccctgccctggagtccgtttctggagactagaaatgtatctaaattgggggaacagaatgaatgaattaatgaatgagagttcctttgctttaaccattcctggatgcctgcaaagtaaggaataatgcagtttttatgtatctgattttataaggggttactctttcaagagtaacaaaaaaatgcaaactgtaatgaaactacattgtatttctaagtgtgaaaacgacaggctgccccgtttttactaattgcatttgcattttaaggtactactgaaggtcagatcaaagttgaaatgcaaaaatactaattagagaataatgtgaataaaatgggaatcttcttggtattttatgtgtattgtaagtagcagttaaattatttttttaaaagcaatttcagttttaatcactgaacaaaagaaacaggcaacattcacttctgtagtatggtttccacctatctctaacaccactattaaggtacaccagtgttaaggtacattaataactacacaaaattttatttaaagagaacacttagcagcctatgatagttttcaataaaatgttgcctctctttcggattctcactaacttttgttactattctaaaagtttgaatttgctggggtgtttattctgaggattatttaaccattgttctatttggcataaccctatttaatggtgcttagagctgaattacctacagaaactgtttctggtttaaataattagcacaaattggcctaagtattcatgagcccatgtttctgtgaagtaattattaaaccaacttaatgattcttatgtaaggtacactttttattttaatacattggtagtctctatgacttgtagcaatgttttacaaatgtttaaaatgctaaacttaattttccaagcttttcttgacaattagatacctatcctgtagttactgaaaatctgggtagtaaatctacccaattaaaatggcactttataaaagggaatagagaagagatgggactatttctatatttaaatgctgctggctattcctttgtatataaatgaaaaataccattcattaaaattaagtactcgtttaagtatggttcttaattacatttcattcatttatattagagtaaatggcttcataactactttaaaacttgacgccccttgcatcgtaatctggtataataagttcagattaacacgcca

SEQ ID NO: 351948 - DNA, 5379 bp, Homo sapiens
agcgcggggctggggccccggcgtcggcgggactcaccaggtgccgcgccacctcggaggaggccatggtcgcgggcaggggcacggtgaagcggctgtatcagcccggccccgagcggctggtcccggcgacggcggcgggaaggccggagggcagaagcaacgggcggggcgcgaggctaggctgcctccgcgacggggaagggacaggggcggggccgagctggaggcctccgggggcggggttggggcggacgccctgtggtgcgcgctgagcgttttgcctgcgccaagcgagcccctcacaggagctaccctcgacgcctgaggactgagcgtcagcgttggggcgggctgaagtagagctgggactcccaggaagactgcgcgaggaatgcaggcgggaactgcggagcagtgattgcggccctcgcgaggccggaagtgggcgggccttgaggcgaggccgccctaggtaggtgtggccgagacagcggggagcggaagtgggcgtggcctggtggcgtgggcgcggggcgggggtgcggggggcgtgtccgcccgggcgcggcccagtgaggcggtggccgagtcctctggcctcagacgcgtaggctggcagcccgctgagcccgccagactccgccgccgtcgggagccggccgctgggagcccgtcgctatgggaccgcgctgagccgcccgctggcgggggagcagcgcggtcgaggatggaggggccggcagagtggggccccgaggcggcgctgggccccgaggcggtgctgcgcttcctggcggagcgcgggggccgggccctgcacgccgagctggtgcagcacttcaggggcgccctgggcggcgaaccggagcagcgcgcccgcgcccgcgcgcacttcaaggagctggtgaacgccgtggccactgtgcgcgtcgatcccgccgacggcgccaagtacgtgcacctcaagaagaggttctgtgaagggccgtccgagccctccggggacccgccgcgaatccaggtgaccgccgagcccgaggcccccgacggccctgccgggcccgaggcgcgcgatcggctccccgacgcggcggccccggagtcgctccctggacagggccgcgagctgggcgagggagagccccccgcccccgcgcactggccgcccctgagcgccggggctcgcaggaagaactcgcggcgcgacgtgcagcccctaccgcggactccagccccggggcccagcgaggacctggagctcccgccacatggctgcgaggaggcggacaggggcagctcccttgtgggggctaccgcacagaggccggcccgccagaacctccgtgacctggtgatgggcagctccccgcagctgaagaggagcgtgtgtcccgggggcagcagcccgggcagctcctccgggggaggacgcggcagaggcgggggcgactcagacagcgcatcggtggcctcgtcgtccgcggaggaggagagcagcggcggaggctccgtgacgctggaccccctggagcacgcgtggatgctctctgcctccgatggcaagtgggacagcctggagggcttgctcacctgcgagcccggcctgctggtcaagcgggacttcattaccggcttcacttgcctgcgctgggccgcaagcacggcaggcaggagcttgtggccatgctagtcaacttcgccaacaaacaccagctgccggtgaacatggacgccaggacgagcgggggttacaccgccctgcacttggcagccatgcacggccacgtggaggtggtgaagctgctggtgggggcctacgacgccgatgtggacatcagggactacagtgggaaaaaggcctcccagtacctgagtcggagcatcgccgaggagatcaagaacctggtgggagccctggacgagggtgacggggaaagcgccgcgggtagcggcggcgggcgctggaggctttcaaaggtgcttccctcgcatctcatcacctacaaactctcacacgccctagaagatggaggggaccatcaccaccatcaccactcggctgaggggtgggtcggaggcaaagccaaggatccagggcgcaaagcctcgggcagctctagtggacgtataaaacccagactcaacaaaatccgattcagaacccagatcgtccacaccacaccctctttcagggacccagagcagccgctggagggcaggggggaggagggagtgggggaggaacgacctgttaaaggccactcgcccttcacattgagaccaaagtccaatgtatttgggtaaaaattgcttcttttagaaaatgcaaaggtttatttgtcttaataaattgaatactaggtgttgtaaggaagtgagaccagaaggacaagctaaattatgcattcttacttgagggatcggaatggatggggcggagttctcttcaggctagccttctgggaaaagtggatgtctttttcagagattcatcataccttgacctgtacctcttctctgccctccacttccctgccctggagtccgtttctggagactagaaatgtatctaaattgggggaacagaatgaatgaattaatgaatgagagttcctttgctttaaccattcctggatgcctgcaaagtaaggaataatgcagtttttatgtatctgattttataaggggttactctttcaagagtaacaaaaaaatgcaaactgtaatgaaactacattgtatttctaagtgtgaaaacgacaggctgccccgtttttactaattgcatttgcattttaaggtactactgaaggtcagatcaaagttgaaatgcaaaaatactaattagagaataatgtgaataaaatgggaatcttcttggtattttatgtgtattgtaagtagcagttaaattatttttttaaaagcaatttcagttttaatcactgaacaaaagaaacaggcaacattcacttctgtagtatggtttccacctatctctaacaccactattaaggtacaccagtgttaaggtacattaataactacacaaaattttatttaaagagaacacttagcagcctatgatagttttcaataaaatgttgcctctctttcggattctcactaacttttgttactattctaaaagtttgaatttgctggggtgtttattctgaggattatttaaccattgttctatttggcataaccctatttaatggtgcttagagctgaattacctacagaaactgtttctggtttaaataattagcacaaattggcctaagtattcatgagcccatgtttctgtgaagtaattattaaaccaacttaatgattcttatgtaaggtacactttttattttaatacattggtagtctctatgacttgtagcaatgttttacaaatgtttaaaatgctaaacttaattttccaagcttttcttgacaattagatacctatcctgtagttactgaaaatctgggtagtaaatctacccaattaaaatggcactttataaaagggaatagagaagagatgggactatttctatatttaaatgctgctggctattcctttgtatataaatgaaaaataccattcattaaaattaagtactcgtttaagtatggttcttaattacatttcattcatttatattagagtaaatggcttcataactactttaaaatttaacccacaagcatattaaatctgtttgttataagattggaaacaatttttgagagggactaatttaaacaagtcctcctttagtcttttgggtcgcgtagttgctgaaacctaagtacctgcagcctacaggataaggaagttcacagcctgcggggtgaatgaacccatgtgtgaactgcacagagcaattcatagaaaatgcatagaaatttgtaacactttggtcacatctgtctctagatggtcattgaatttgtttaaagatggatgaaaggccaggcatggtggctcatgcctgtaatcccagcactttgggaggccgaggcaggtggatcacttgaggccaggagtttgaaaccagcctggccaacatggtgaaaacctgtctctactaaaaatacaaaaattagccgagcgtggtggtgcgtgcctgtagtcccagctacttaggaggctgaggcatgagaatcacttaaacctgagaggtggaggttgcagttgagccaagatcacgacactgcactccagcctgggcaacggagactctgtctcaaaaaaaaaaaacaaaaaagatgaatgaaaatatgaaatatataaactagtatccatttatttgcatttattgtgggatttcagatatgaacggtgtaaatttgagaagcacttatgcatacatgtgggtgaaaaaccaatctaattttgtataaataaaaacaggctcctggaaggtgaaaagtagtcatttgttctaaatctatacatattacttgtatctagtgcagaataagctataacatcccattgaggaatcttaaatttcatagacatgtaaagctgaagtaactctaaagagcagatgcttcagaaccatcagaaggttctggtcaacagtcagtattatctcttaaatgtatatgttggtcactaattgcacaaaatctataatttgccagggctttagagattgagtcaatatgtcatttaccatggttttcccactgaaggctttaacttttctgataaaataatattttaaattttcaaaaacccattcctgaggagaactacttctagcattccttttcatgatgtgcttttgtgcagtaagtagcattttcggctacttaactttacattcctcttatttttcagtttccagtcaagattataaaaagcaaatgattgatataatttgatattcatagagttgtgcctacctttaatggaaaaatacatgtcagatacttagatgtttattgatatgagactatgtggttaaaaaacccaagtatgtccatgtgtttcttataaggtacacttgaaactagtgagtgtttgtcacatttcactttcatggtatataaaatgcagtttgcatatataacttgaatatctggtactagttttttcacgcctgcaatcttggagtctaggttgccttgtctctcctatttttaaataagtgaaatttgggagattgtaaaatctgtaaagtttgttttgtgaaaataaaatgttcacagtagaaaaacaccaacagcaaaaaagaaaccaaaccaaagggggaggcggacagaaatcaccaccgggggccacattaacggatcacacatttctgtataagggggccaaagacacgaaaaataacacacacggccccatcaaccgcgcgggga

SEQ ID NO: 351949 - DNA, 1259 bp, Homo sapiens
aacgcacccactgcaattctacgttcatttataagtgttacttgtttttaatgcctcccccagcatatccttagctccatggagatcaaggttgcatctgttttctttacctgtagatacttcatgcccagcctatagaagagactcaacaagtgctgatgaaaagacagaattatgtagagaaccaagatcgtgcttaagtcatagatgccaaagggaagaatcaggtagtcttagaatttccagtagaagggctccaagactatctagaaatctgacccactatgggcatggatactgaaactaatgcccagagaaacagcatggcttctccagtatcatacaaagtagctagtaacacagctgggaatagaatcctgcctttttgtctttgttaccttatccttttcttccagtgggagatagtggttttctaccagagggttgggaagaccaggaatagaacctaagagccattgacagatgggtgctggtgattttcaagaagggattggattggattgtgattggctaaggagtaaatgaacattgaagaggagaacctggggcatggggtggaggcacaatgcttactcttgggagtatatttgctttgtcatctgttttggtgacagcaaaagtggttaaatggaggagatggtagcgcaaagaaatggcaggttcagagtaaggattttgtttggcaggtgaaatatgaagagggcaatggacttgtgctgagactgaaaatgtgagagagacaagaggattgatgaggcagtgtcctgggaaggtgagaatagaaatgagactgcagtcagcctcagagttaaatatttaactgtgagagttttggcacttgctggtgactgccgtcactattttacagatatgaaaactgagacggagacagtattcgtgatttgcctaaggccctatagtgaaggcaaatgaagaagcaggtatttgagatagagaagaagaaagcagactatcctaaataataggcagccagatggatcttttaaaaacgtaaatcagattatgtggctgatagtttaaagccctctggtggcttctcattgcaagcagcagaaagtaaaataatttagggtctgtaagacactaaattaccaggcccctgattgctatatttagtatctgttcctccttgctcattccccacactgacctttctgtggtttccacaaaccaagcccccttccttttggggtcctctgtacttactggtgcctctg

SEQ ID NO: 351950 - DNA, 1007 bp, Homo sapiens
agcctgcttggcgggtaaacagacatggccggcgaaggagatcagcaggacgctgcgcacaacatgggcaaccacctgccgctcctgcctgcagagagtgaggaagaagatgaaatggaagttgaagaccaggatagtaaagaagccaaaaaaccaaacatcataaattttgacaccagtctgccgacatcacatacatacctaggtgctgatatggaagaatttcatggcaggactttgcacgatgacgacagctgtcaggtgattccagttcttccacaagtgatgatgatcctgattcccggacagacattacctcttcagctttttcaccctcaagaagtcagtatggtgcggaatttaattcagaaagatagaacctttgctgttcttgcatacagcaatgtacaggaaagggaagcacagtttggaacaacagcagagatatatgcctatcgagaagaacaggattttggaattgagatagtgaaagtgaaagcaattggaagacaaaggttcaaagtccttgagctaagaacacagtcagatggaatccagcaagctaaagtgcaaattcttcccgaatgtgtgttgccttcaaccatgtctgcagttcaattagaatccctcaataagtgccagatatttccttcaaaacctgtctcaagagaagaccaatgttcatataaatggtggcagaaataccagaaggtgagaaactaattttttatgcatcttcaaaaaatgaagacaggttgttttttttcctgttttaagaaagaaacacaactttcatgattcattacccagccaccttgtatggcaatattccagctacatttgatcctctaaaaattgcacaggcagctactttatgtaaaagcagtttacaaaagcaataaaatgtcacacagctgtaaggtatccttgttattatgcttatcagctatattaatcgcttttgatttttaattccatgggaaatgcttattaaactatgatcaaat

SEQ ID NO: 351951 - DNA, 2205 bp, Homo sapiens
agcctgcttggcgggtaaacagacatggccggcgaaggagatcagcaggacgctgcgcacaacatgggcaaccacctgccgctcctgcctgcagagagtgaggaagaagatgaaatggaagttgaagaccaggatagtaaagaagccaaaaaaccaaacatcataaattttgacaccagtctgccgacatcacatacatacctaggtgctgatatggaagaatttcatggcaggactttgcacgatgacgacagctgtcaggtgattccagttcttccacaagtgatgatgatcctgattcccggacagacattacctcttcagctttttcaccctcaagaagtcagtatggtgcggaatttaattcagaaagatagaacctttgctgttcttgcatacagcaatgtacaggaaagggaagcacagtttggaacaacagcagagatatatgcctatcgagaagaacaggattttggaattgagatagtgaaagtgaaagcaattggaagacaaaggttcaaagtccttgagctaagaacacagtcagatggaatccagcaagctaaagtgcaaattcttcccgaatgtgtgttgccttcaaccatgtctgcagttcaattagaatccctcaataagtgccagatatttccttcaaaacctgtctcaagagaagaccaatgttcatataaatggtggcagaaataccagaagagaaagtttcattgtgcaaatctaacttcatggcctcgctggctgtattccttatatgatgctgagaccttaatggacagaatcaagaaacagctacgtgaatgggatgaaaatctaaaagatgattctcttccttcaaatccaatagatttttcttacagagtagctgcttgtcttcctattgatgatgtattgagaattcagctccttaaaattggcagtgctatccagcgacttcgctgtgaattagacattatgaataaatgtacttccctttgctgtaaacaatgtcaagaaacagaaataacaaccaaaaatgaaatattcagtttatccttatgtgggccgatggcagcttatgtgaatcctcatggatatgtgcatgagacacttactgtgtataaggcttgcaacttgaatctgataggccggccttctacagaacacagctggtttcctgggtatgcctggactgttgcccagtgtaagatctgtgcaagccatattggatggaagtttacggccaccaaaaaagacatgtcacctcaaaaattttggggcttaacgcgatctgctctgttgcccacgatcccagacactgaagatgaaataagtccagacaaagtaatactttgcttgtaaacagatgtgatagagataaagttagttatctaacaaattggttatattctaagatctgctttggaaattattgcctctgatacatacctaagtaaacataacattaatacctaagtaaacataacattacttggagggttgcagtttctaagtgaaactgtatttgaaacttttaagtatactttaggaaacaagcatgaacggcagtctagaataccagaaacatctacttgggtagcttggtgccattatcctgtggaatctgatatgtctggtagcatgtcattgatgggacatgaagacatctttggaaatgatgagattatttcgttaaaaaaaaaaaaaatcttaaattcctacaatgtgaaactgaaactaataatttgatcctgatgtatgggacagcgtatctgtaccagtgctctaaataacaaaagctagggtgacaagtacatgttccttttggaaagaagcaaggcaatgtatattaattattctaaaagggctttgttcctttccattttctttaacttctctgagatactgatttgtaaattttgaaaattagttaaaatatgcagttttttgagcccacgaatagttgtcatttcctttatgtgcctgttagtaaaaagtagtattgtgtatttgctcagtatctgaactataagcccatttatactgttccatacaaaagctatttttcaaaaattaatttgaaccaaaactactactatagggaaaagatgccaaaacatgtcccctcacccaggctaaacttgatactgtattattttgttcaatgtaaattgaagaaaatctgtaagtaagtaaaccttaagtgtgaaacta

SEQ ID NO: 351952 - DNA, 3426 bp, Homo sapiens
agcctgcttggcgggtaaacagacatggccggcgaaggagatcagcaggacgctgcgcacaacatgggcaaccacctgccgctcctgcctgcagagagtgaggaagaagatgaaatggaagttgaagaccaggatagtaaagaagccaaaaaaccaaacatcataaattttgacaccagtctgccgacatcacatacatacctaggtgctgatatggaagaatttcatggcaggactttgcacgatgacgacagctgtcaggtgattccagttcttccacaagtgatgatgatcctgattcccggacagacattacctcttcagctttttcaccctcaagaagtcagtatggtgcggaatttaattcagaaagatagaacctttgctgttcttgcatacagcaatgtacaggaaagggaagcacagtttggaacaacagcagagatatatgcctatcgagaagaacaggattttggaattgagatagtgaaagtgaaagcaattggaagacaaaggttcaaagtccttgagctaagaacacagtcagatggaatccagcaagctaaagtgcaaattcttcccgaatgtgtgttgccttcaaccatgtctgcagttcaattagaatccctcaataagtgccagatatttccttcaaaacctgtctcaagagaagaccaatgttcatataaatggtggcagaaataccagaagagaaagtttcattgtgcaaatctaacttcatggcctcgctggctgtattccttatatgatgctgagaccttaatggacagaatcaagaaacagctacgtgaatgggatgaaaatctaaaagatgattctcttccttcaaatccaatagatttttcttacagagtagctgcttgtcttcctattgatgatgtattgagaattcagctccttaaaattggcagtgctatccagcgacttcgctgtgaattagacattatgaataaatgtacttccctttgctgtaaacaatgtcaagaaacagaaataacaaccaaaaatgaaatattcaggtaaggtctttattacgtttttaatatacttgccttatcagaattataatgaagactgtatttctgttttccataaactttcctccagtaccttaaagttacaaacatttagcaaatgaaatatagggaattagctcacttttgctaagaccatcttccagattgggtactcagagcaacaatgcatgtcagggattattcacaggtaatgagcatggtaaagtaaaacaactgagaaattcttttccccctaattcttgttgacaatctatatattagactgtcttcaattaggccctaacatagatgcttcagaaattacatttcagtcatcagttttgccatatagggccaaagtaggacatgcttctgaacacatactgatgctctgatataacagtgtttgaaaatcattttatgacaaatccatcagttgtaaatcaagaaggtaaggaaactgctttctgcaaaataatcaactgccccaaaatgaccacacaggaccttgtcattgcacttacactctcagactcctttagaagcatttgagttttatattctttacaatgtctgtcttgaggagggttttaaaaacaagtactatttcctttgggtcatcacagaaaacatttagacatttagacaaaacaggcctgtctgccagctgtacccccaccccattttcatactaagatcctggtattatataaaactgaaggattaaaaactgtatagctcatacctcatttcttggtgaacttcaataaaattctaagcatttaataaaattagacttctcgttttgacgtgttctccatgttgattctttgttttagtttatccttatgtgggccgatggcagcttatgtgaatcctcatggatatgtgcatgagacacttactgtgtataaggcttgcaacttgaatctgataggccggccttctacagaacacagctggtttcctgggtatgcctggactgttgcccagtgtaagatctgtgcaagccatattggatggaagtttacggccaccaaaaaagacatgtcacctcaaaaattttggggcttaacgcgatctgctctgttgcccacgatcccagacactgaagatgaaataagtccagacaaagtaatactttgcttgtaaacagatgtgatagagataaagttagttatctaacaaattggttatattctaagatctgctttggaaattattgcctctgatacatacctaagtaaacataacattaatacctaagtaaacataacattacttggagggttgcagtttctaagtgaaactgtatttgaaacttttaagtatactttaggaaacaagcatgaacggcagtctagaataccagaaacatctacttgggtagcttggtgccattatcctgtggaatctgatatgtctggtagcatgtcattgatgggacatgaagacatctttggaaatgatgagattatttcgttaaaaaaaaaaaaaatcttaaattcctacaatgtgaaactgaaactaataatttgatcctgatgtatgggacagcgtatctgtaccagtgctctaaataacaaaagctagggtgacaagtacatgttccttttggaaagaagcaaggcaatgtatattaattattctaaaagggctttgttcctttccattttctttaacttctctgagatactgatttgtaaattttgaaaattagttaaaatatgcagttttttgagcccacgaatagttgtcatttcctttatgtgcctgttagtaaaaagtagtattgtgtatttgctcagtatctgaactataagcccatttatactgttccatacaaaagctatttttcaaaaattaatttgaaccaaaactactactatagggaaaagatgccaaaacatgtcccctcacccaggctaaacttgatactgtattattttgttcaatgtaaattgaagaaaatctgtaagtaagtaaaccttaagtgtgaaactaaacatgttctttgttcaaataatgtaaaatatctactcataattttaaagttctaaaaaggctgctttgccacctacctctttgcttatattcaagggtttagtgggtccttccttccacatttgtatgataactttcgttttattggtagtcctttgctactttaaaactaatcaggttaaatgtttactcaaatgtagtaatagtatgaggccaaaatacatgccttgaaggtggagtgaaatcagttgagtgtcacactgcatatttatgtaaatagagtaaatgaaaattcaagaatacttccattcaggatatgcccctgccttattttttctaaggtctacttttactactttaataattttgggtttgtgtgacttca

SEQ ID NO: 351953 - DNA, 3373 bp, Homo sapiens
agcctgcttggcgggtaaacagacatggccggcgaaggagatcagcaggacgctgcgcacaacatgggcaaccacctgccgctcctgcctgcagagagtgaggaagaagatgaaatggaagttgaagaccaggatagtaaagaagccaaaaaaccaaacatcataaattttgacaccagtctgccgacatcacatacatacctaggtgctgatatggaagaatttcatggcaggactttgcacgatgacgacagctgtcaggtgattccagttcttccacaagtgatgatgatcctgattcccggacagacattacctcttcagctttttcaccctcaagaagtcagtatggtgcggaatttaattcagaaagatagaacctttgctgttcttgcatacagcaatgtacaggaaagggaagcacagtttggaacaacagcagagatatatgcctatcgagaagaacaggattttggaattgagatagtgaaagtgaaagcaattggaagacaaaggttcaaagtccttgagctaagaacacagtcagatggaatccagcaagctaaagtgcaaattcttcccgaatgtgtgttgccttcaaccatgtctgcagttcaattagaatccctcaataagtgccagatatttccttcaaaacctgtctcaagagaagaccaatgttcatataaatggtggcagaaataccagaagagaaagtttcattgtgcaaatctaacttcatggcctcgctggctgtattccttatatgatgctgagaccttaatggacagaatcaagaaacagctacgtgaatgggatgaaaatctaaaagatgattctcttccttcaaatccaatagatttttcttacagagtagctgcttgtcttcctattgatgatgtattgagaattcagctccttatgtacttccctttgctgtaaacaatgtcaagaaacagaaataacaaccaaaaatgaaatattcaggtaaggtctttattacgtttttaatatacttgccttatcagaattataatgaagactgtatttctgttttccataaactttcctccagtaccttaaagttacaaacatttagcaaatgaaatatagggaattagctcacttttgctaagaccatcttccagattgggtactcagagcaacaatgcatgtcagggattattcacaggtaatgagcatggtaaagtaaaacaactgagaaattcttttccccctaattcttgttgacaatctatatattagactgtcttcaattaggccctaacatagatgcttcagaaattacatttcagtcatcagttttgccatatagggccaaagtaggacatgcttctgaacacatactgatgctctgatataacagtgtttgaaaatcattttatgacaaatccatcagttgtaaatcaagaaggtaaggaaactgctttctgcaaaataatcaactgccccaaaatgaccacacaggaccttgtcattgcacttacactctcagactcctttagaagcatttgagttttatattctttacaatgtctgtcttgaggagggttttaaaaacaagtactatttcctttgggtcatcacagaaaacatttagacatttagacaaaacaggcctgtctgccagctgtacccccaccccattttcatactaagatcctggtattatataaaactgaaggattaaaaactgtatagctcatacctcatttcttggtgaacttcaataaaattctaagcatttaataaaattagacttctcgttttgacgtgttctccatgttgattctttgttttagtttatccttatgtgggccgatggcagcttatgtgaatcctcatggatatgtgcatgagacacttactgtgtataaggcttgcaacttgaatctgataggccggccttctacagaacacagctggtttcctgggtatgcctggactgttgcccagtgtaagatctgtgcaagccatattggatggaagtttacggccaccaaaaaagacatgtcacctcaaaaattttggggcttaacgcgatctgctctgttgcccacgatcccagacactgaagatgaaataagtccagacaaagtaatactttgcttgtaaacagatgtgatagagataaagttagttatctaacaaattggttatattctaagatctgctttggaaattattgcctctgatacatacctaagtaaacataacattaatacctaagtaaacataacattacttggagggttgcagtttctaagtgaaactgtatttgaaacttttaagtatactttaggaaacaagcatgaacggcagtctagaataccagaaacatctacttgggtagcttggtgccattatcctgtggaatctgatatgtctggtagcatgtcattgatgggacatgaagacatctttggaaatgatgagattatttcgttaaaaaaaaaaaaaatcttaaattcctacaatgtgaaactgaaactaataatttgatcctgatgtatgggacagcgtatctgtaccagtgctctaaataacaaaagctagggtgacaagtacatgttccttttggaaagaagcaaggcaatgtatattaattattctaaaagggctttgttcctttccattttctttaacttctctgagatactgatttgtaaattttgaaaattagttaaaatatgcagttttttgagcccacgaatagttgtcatttcctttatgtgcctgttagtaaaaagtagtattgtgtatttgctcagtatctgaactataagcccatttatactgttccatacaaaagctatttttcaaaaattaatttgaaccaaaactactactatagggaaaagatgccaaaacatgtcccctcacccaggctaaacttgatactgtattattttgttcaatgtaaattgaagaaaatctgtaagtaagtaaaccttaagtgtgaaactaaacatgttctttgttcaaataatgtaaaatatctactcataattttaaagttctaaaaaggctgctttgccacctacctctttgcttatattcaagggtttagtgggtccttccttccacatttgtatgataactttcgttttattggtagtcctttgctactttaaaactaatcaggttaaatgtttactcaaatgtagtaatagtatgaggccaaaatacatgccttgaaggtggagtgaaatcagttgagtgtcacactgcatatttatgtaaatagagtaaatgaaaattcaagaatacttccattcaggatatgcccctgccttattttttctaaggtctacttttactactttaataattttgggtttgtgtgacttca

SEQ ID NO: 351954 - DNA, 3259 bp, Homo sapiens
agcctgcttggcgggtaaacagacatggccggcgaaggagatcagcaggacgctgcgcacaacatgggcaaccacctgccgctcctgcctgcagagagtgaggaagaagatgaaatggaagttgaagaccaggatagtaaagaagccaaaaaaccaaacatcataaattttgacaccagtctgccgacatcacatacatacctaggtgctgatatggaagaatttcatggcaggactttgcacgatgacgacagctgtcaggtgattccagttcttccacaagtgatgatgatcctgattcccggacagacattacctcttcagctttttcaccctcaagaagtcagtatggtgcggaatttaattcagaaagatagaacctttgctgttcttgcatacagcaatgtacaggaaagggaagcacagtttggaacaacagcagagatatatgcctatcgagaagaacaggattttggaattgagatagtgaaagtgaaagcaattggaagacaaaggttcaaagtccttgagctaagaacacagtcagatggaatccagcaagctaaagtgcaaattcttcccgaatgtgtgttgccttcaaccatgtctgcagttcaattagaatccctcaataagtgccagatatttccttcaaaacctgtctcaagagaagaccaatgttcatataaatggtggcagaaataccagaagagaaagtttcattgtgcaaatctaacttcatggcctcgctggctgtattccttatatgatgctgagaccttaatggacagaatcaagaaacagctacgtgaatgggatgaaaatctaaaagatgattctcttccttcaaatccaataggtatgaaaagttagtttcctgcctggagcctgggatgtcttgctataaaaaatagctttttcatggatgcgatccaatcatatcttctaggttttaagactgattaaaacattttaattctgaaaagcataatttcctttgagcagttgaaaaaaatgagtattttaaaattaattgcaataaaatcctcatattctgtgagcactccaattttagacaagttttccataaaaagttcaaattgcaggaagtggctgtcatccaaaaacacttcctgtgtaaggactcctttccctgttcttcaaggtgcctttaaaagaagtgagtctagttccaggacttgccttaattatagatactctctttatctgtttataaggtatagtttagttatttttctagtctcttggcaaataacttctaacatggatttgagttcatgtttaacataaaaggattttaccaaaaaaagtataagaaaagcaattaaatttagagcttctgaaaagtgtatctttgacagctggtatattttgtattgtttatacttgtataaaatgtgtaaccttaaagagaagggtttatttcaaaaggatattatccgatttgtaagttctctgatgcttatctgactcctaagtttaaaacttgaaaaaccatgtcttgaagatttttcttacagagtagctgcttgtcttcctattgatgatgtattgagaattcagctccttaaaattggcagtgctatccagcgacttcgctgtgaattagacattatgaataaatgtacttccctttgctgtaaacaatgtcaagaaacagaaataacaaccaaaaatgaaatattcagtttatccttatgtgggccgatggcagcttatgtgaatcctcatggatatgtgcatgagacacttactgtgtataaggcttgcaacttgaatctgataggccggccttctacagaacacagctggtttcctgggtatgcctggactgttgcccagtgtaagatctgtgcaagccatattggatggaagtttacggccaccaaaaaagacatgtcacctcaaaaattttggggcttaacgcgatctgctctgttgcccacgatcccagacactgaagatgaaataagtccagacaaagtaatactttgcttgtaaacagatgtgatagagataaagttagttatctaacaaattggttatattctaagatctgctttggaaattattgcctctgatacatacctaagtaaacataacattaatacctaagtaaacataacattacttggagggttgcagtttctaagtgaaactgtatttgaaacttttaagtatactttaggaaacaagcatgaacggcagtctagaataccagaaacatctacttgggtagcttggtgccattatcctgtggaatctgatatgtctggtagcatgtcattgatgggacatgaagacatctttggaaatgatgagattatttcgttaaaaaaaaaaaaaatcttaaattcctacaatgtgaaactgaaactaataatttgatcctgatgtatgggacagcgtatctgtaccagtgctctaaataacaaaagctagggtgacaagtacatgttccttttggaaagaagcaaggcaatgtatattaattattctaaaagggctttgttcctttccattttctttaacttctctgagatactgatttgtaaattttgaaaattagttaaaatatgcagttttttgagcccacgaatagttgtcatttcctttatgtgcctgttagtaaaaagtagtattgtgtatttgctcagtatctgaactataagcccatttatactgttccatacaaaagctatttttcaaaaattaatttgaaccaaaactactactatagggaaaagatgccaaaacatgtcccctcacccaggctaaacttgatactgtattattttgttcaatgtaaattgaagaaaatctgtaagtaagtaaaccttaagtgtgaaactaaacatgttctttgttcaaataatgtaaaatatctactcataattttaaagttctaaaaaggctgctttgccacctacctctttgcttatattcaagggtttagtgggtccttccttccacatttgtatgataactttcgttttattggtagtcctttgctactttaaaactaatcaggttaaatgtttactcaaatgtagtaatagtatgaggccaaaatacatgccttgaaggtggagtgaaatcagttgagtgtcacactgcatatttatgtaaatagagtaaatgaaaattcaagaatacttccattcaggatatgcccctgccttattttttctaaggtctacttttactactttaataattttgggtttgtgtgacttca

SEQ ID NO: 351955 - DNA, 2537 bp, Homo sapiens
agcctgcttggcgggtaaacagacatggccggcgaaggagatcagcaggacgctgcgcacaacatgggcaaccacctgccgctcctgcctgcagagagtgaggaagaagatgaaatggaagttgaagaccaggatagtaaagaagccaaaaaaccaaacatcataaattttgacaccagtctgccgacatcacatacatacctaggtgctgatatggaagaatttcatggcaggactttgcacgatgacgacagctgtcaggtgattccagttcttccacaagtgatgatgatcctgattcccggacagacattacctcttcagctttttcaccctcaagaagtcagtatggtgcggaatttaattcagaaagatagaacctttgctgttcttgcatacagcaatgtacaggaaagggaagcacagtttggaacaacagcagagatatatgcctatcgagaagaacaggattttggaattgagatagtgaaagtgaaagcaattggaagacaaaggttcaaagtccttgagctaagaacacagtcagatggaatccagcaagctaaagtgcaaattcttcccgaatgtgtgttgccttcaaccatgtctgcagttcaattagaatccctcaataagtgccagatatttccttcaaaacctgtctcaagagaagaccaatgttcatataaatggtggcagaaataccagaagagaaagtttcattgtgcaaatctaacttcatggcctcgctggctgtattccttatatgatgctgagaccttaatggacagaatcaagaaacagctacgtgaatgggatgaaaatctaaaagatgattctcttccttcaaatccaatagatttttcttacagagtagctgcttgtcttcctattgatgatgtattgagaattcagctccttaaaattggcagtgctatccagcgacttcgctgtgaattagacattatgaataaatgtacttccctttgctgtaaacaatgtcaagaaacagaaataacaaccaaaaatgaaatattcagtttatccttatgtgggccgatggcagcttatgtgaatcctcatggatatgtgcatgagacacttactgtgtataaggcttgcaacttgaatctgataggccggccttctacagaacacagctggtttcctgggtatgcctggactgttgcccagtgtaagatctgtgcaagccatattggatggaagtttacggccaccaaaaaagacatgtcacactgaagatgaaataagtccagacaaagtaatactttgcttgtaaacagatgtgatagagataaagttagttatctaacaaattggttatattctaagatctgctttggaaattattgcctctgatacatacctaagtaaacataacattaatacctaagtaaacataacattacttggagggttgcagtttctaagtgaaactgtatttgaaacttttaagtatactttaggaaacaagcatgaacggcagtctagaataccagaaacatctacttgggtagcttggtgccattatcctgtggaatctgatatgtctggtagcatgtcattgatgggacatgaagacatctttggaaatgatgagattatttcgttaaaaaaaaaaaaaatcttaaattcctacaatgtgaaactgaaactaataatttgatcctgatgtatgggacagcgtatctgtaccagtgctctaaataacaaaagctagggtgacaagtacatgttccttttggaaagaagcaaggcaatgtatattaattattctaaaagggctttgttcctttccattttctttaacttctctgagatactgatttgtaaattttgaaaattagttaaaatatgcagttttttgagcccacgaatagttgtcatttcctttatgtgcctgttagtaaaaagtagtattgtgtatttgctcagtatctgaactataagcccatttatactgttccatacaaaagctatttttcaaaaattaatttgaaccaaaactactactatagggaaaagatgccaaaacatgtcccctcacccaggctaaacttgatactgtattattttgttcaatgtaaattgaagaaaatctgtaagtaagtaaaccttaagtgtgaaactaaacatgttctttgttcaaataatgtaaaatatctactcataattttaaagttctaaaaaggctgctttgccacctacctctttgcttatattcaagggtttagtgggtccttccttccacatttgtatgataactttcgttttattggtagtcctttgctactttaaaactaatcaggttaaatgtttactcaaatgtagtaatagtatgaggccaaaatacatgccttgaaggtggagtgaaatcagttgagtgtcacactgcatatttatgtaaatagagtaaatgaaaattcaagaatacttccattcaggatatgcccctgccttattttttctaaggtctacttttactactttaataattttgggtttgtgtgacttca

SEQ ID NO: 351956 - DNA, 2239 bp, Homo sapiens
agcctgcttggcgggtaaacagacatggccggcgaaggagatcagcaggacgctgcgcacaacatgggcaaccacctgccgctcctgcctgcagagagtgaggaagaagatgaaatggaagttgaagaccaggatagtaaagaagccaaaaaaccaaacatcataaattttgacaccagtctgccgacatcacatacatacctaggtgctgatatggaagaatttcatggcaggactttgcacgatgacgacagctgtcaggtgattccagttcttccacaagtgatgatgatcctgattcccggacagacattacctcttcagctttttcaccctcaagaagtcagtatggtgcggaatttaattcagaaagatagaacctttgctgttcttgcatacagcaatgtacaggaaagggaagcacagtttggaacaacagcagagatatatgcctatcgagaagaacaggattttggaattgagatagtgaaagtgaaagcaattggaagacaaaggttcaaagtccttgagctaagaacacagtcagatggaatccagcaagctaaagtgcaaattcttcccgaatgtgtgttgccttcaaccatgtctgcagttcaattagaatccctcaataagtgccagatatttccttcaaaacctgtctcaagagaagaccaatgttcatataaatggtggcagaaataccagaagagaaagtttcattgtgcaaatctaacttcatggcctcgctggctgtattccttatatgatgctgagaccttaatggacagaatcaagaaacagctacgtgaatgggatgaaaatctaaaagatgattctcttccttcaaatccaatagatttttcttacagagtagctgcttgtcttcctattgatgatgtattgagaattcagctccttaaaattggcagtgctatccagcgacttcgctgtgaattagacattatgaataaatgtacttccctttgctgtaaacaatgtcaagaaacagaaataacaaccaaaaatgaaatattcaggtaaggtctttattacgtttttaatatacttgccttatcagaattataatgaagactgtatttctgttttccataaactttcctccagtaccttaaagttacaaacatttagcaaatgaaatatagggaattagctcacttttgctaagaccatcttccagattgggtactcagagcaacaatgcatgtcagggattattcacaggtaatgagcatggtaaagtaaaacaactgagaaattcttttccccctaattcttgttgacaatctatatattagactgtcttcaattaggccctaacatagatgcttcagaaattacatttcagtcatcagttttgccatatagggccaaagtaggacatgcttctgaacacatactgatgctctgatataacagtgtttgaaaatcattttatgacaaatccatcagttgtaaatcaagaaggtaaggaaactgctttctgcaaaataatcaactgccccaaaatgaccacacaggaccttgtcattgcacttacactctcagactcctttagaagcatttgagttttatattctttacaatgtctgtcttgaggagggttttaaaaacaagtactatttcctttgggtcatcacagaaaacatttagacatttagacaaaacaggcctgtctgccagctgtacccccaccccattttcatactaagatcctggtattatataaaactgaaggattaaaaactgtatagctcatacctcatttcttggtgaacttcaataaaattctaagcatttaataaaattagacttctcgttttgacgtgttctccatgttgattctttgttttagtttatccttatgtgggccgatggcagcttatgtgaatcctcatggatatgtgcatgagacacttactgtgtataaggcttgcaacttgaatctgataggccggccttctacagaacacagctggtttcctgggtatgcctggactgttgcccagtgtaagatctgtgcaagccatattggatggaagtttacggccaccaaaaaagacatgtcacctcaaaaattttggggcttaacgcgatctgctctgttgcccacgatcccagacactgaagatgaaataagtccagacaaagtaatactttgcttgtaaacagatgtgatagagataaagttagttatctaacaaattggttatattct

SEQ ID NO: 351957 - DNA, 2396 bp, Homo sapiens
agcctgcttggcgggtaaacagacatggccggcgaaggagatcagcaggacgctgcgcacaacatgggcaaccacctgccgctcctgcctgcagagagtgaggaagaagatgaaatggaagttgaagaccaggatagtaaagaagccaaaaaaccaaacatcataaattttgacaccagtctgccgacatcacatacatacctaggtgctgatatggaagaatttcatggcaggactttgcacgatgacgacagctgtcaggtgattccagttcttccacaagtgatgatgatcctgattcccggacagacattacctcttcagctttttcaccctcaagaagtcagtatggtgcggaatttaattcagaaagatagaacctttgctgttcttgcatacagcaatgtacaggaaagggaagcacagtttggaacaacagcagagatatatgcctatcgagaagaacaggattttggaattgagatagtgaaagtgaaagcaattggaagacaaaggttcaaagtccttgagctaagaacacagtcagatggaatccagcaagctaaagtgcaaattcttcccgaatgtgtgttgccttcaaccatgtctgcagttcaattagaatccctcaataagtgccagatatttccttcaaaacctgtctcaagagaagaccaatgttcatataaatggtggcagaaataccagaagagaaagtttcattgtgcaaatctaacttcatggcctcgctggctgtattccttatatgatgctgagaccttaatggacagaatcaagaaacagctacgtgaatgggatgaaaatctaaaagatgattctcttccttcaaatccaatagatttttcttacagagtagctgcttgtcttcctattgatgatgtattgagaattcagctccttaaaattggcagtgctatccagcgacttcgctgtgaattagacattatgaataaatgtacttccctttgctgtaaacaatgtcaagaaacagaaataacaaccaaaaatgaaatattcaggtaaggtctttattacgtttttaatatacttgccttatcagaattataatgaagactgtatttctgttttccataaactttcctccagtaccttaaagttacaaacatttagcaaatgaaatatagggaattagctcacttttgctaagaccatcttccagattgggtactcagagcaacaatgcatgtcagggattattcacaggtaatgagcatggtaaagtaaaacaactgagaaattcttttccccctaattcttgttgacaatctatatattagactgtcttcaattaggccctaacatagatgcttcagaaattacatttcagtcatcagttttgccatatagggccaaagtaggacatgcttctgaacacatactgatgctctgatataacagtgtttgaaaatcattttatgacaaatccatcagttgtaaatcaagaaggtaaggaaactgctttctgcaaaataatcaactgccccaaaatgaccacacaggaccttgtcattgcacttacactctcagactcctttagaagcatttgagttttatattctttacaatgtctgtcttgaggagggttttaaaaacaagtactatttcctttgggtcatcacagaaaacatttagacatttagacaaaacaggcctgtctgccagctgtacccccaccccattttcatactaagatcctggtattatataaaactgaaggattaaaaactgtatagctcatacctcatttcttggtgaacttcaataaaattctaagcatttaataaaattagacttctcgttttgacgtgttctccatgttgattctttgttttagtttatccttatgtgggccgatggcagcttatgtgaatcctcatggatatgtgcatgagacacttactgtgtataaggcttgcaacttgaatctgataggccggccttctacagaacacagctggtttcctgggtaatattatggtggtggttgcttttttttttctttttttaccttaattgggcagaaaaatccagagtcctaagcagagttgccacaatctttataataaaaagtagacagacaaatgagtaatttgctacaaaaattagccgggtatgggggcaggggtctgtactcccagctgctcgggaggctgaggcacaagaatctcttgaacctggaaggcaagagtgttgcagtgagccaagattgtgcctcccgggttcccgccatcctcctgcctcagcctcccgagtagctcggactacaggcgcacaccgccatgcctggctaattttttgtatttttagtagaaatggggtttcaccatgttagccagcatggtctcatctcctga

SEQ ID NO: 351958 - DNA, 1403 bp, Homo sapiens
agcctgcttggcgggtaaacagacatggccggcgaaggagatcagcaggacgctgcgcacaacatgggcaaccacctgccgctcctgcctgcagagagtgaggaagaagatgaaatggaagttgaagaccaggatagtaaagaagccaaaaaaccaaacatcataaattttgacaccagtctgccgacatcacatacatacctaggtgctgatatggaagaatttcatggcaggactttgcacgatgacgacagctgtcaggtgattccagttcttccacaagtgatgatgatcctgattcccggacagacattacctcttcagctttttcaccctcaagaagtcagtatggtgcggaatttaattcagaaagatagaacctttgctgttcttgcatacagcaatgtacaggaaagggaagcacagtttggaacaacagcagagatatatgcctatcgagaagaacaggattttggaattgagatagtgaaagtgaaagcaattggaagacaaaggttcaaagtccttgagctaagaacacagtcagatggaatccagcaagctaaagtgcaaattcttcccgaatgtgtgttgccttcaaccatgtctgcagttcaattagaatccctcaataagtgccagatatttccttcaaaacctgtctcaagagaagaccaatgttcatataaatggtggcagaaataccagaagagaaagtttcattgtgcaaatctaacttcatggcctcgctggctgtattccttatatgatgctgagaccttaatggacagaatcaagaaacagctacgtgaatgggatgaaaatctaaaagatgattctcttccttcaaatccaatagatttttcttacagagtagctgcttgtcttcctattgatgatgtattgagaattcagctccttaaaattggcagtgctatccagcgacttcgctgtgaattagacattatgaataaatgtacttccctttgctgtaaacaatgtcaagaaacagaaataacaaccaaaaatgaaatattcagtttatccttatgtgggccgatggcagcttatgtgaatcctcatggatatgtgcatgagacacttactgtgtataaggcttgcaacttgaatctgataggccggccttctacagaacacagctggtttcctgggtatgcctggactgttgcccagtgtaagatctgtgcaagccatattggatggaagtttacggccaccaaaaaagacatgtcacctcaaaaattttggggcttaacgcgatctgctctgttgcccacgatcccagacactgaagatgaaataagtccagacaaagtaatactttgcttgtaaacagatgtgatagagataaagttagttatctaacaaattggttatattct

SEQ ID NO: 351959 - DNA, 2544 bp, Homo sapiens
agcctgcttggcgggtaaacagacatggccggcgaaggagatcagcaggacgctgcgcacaacatgggcaaccacctgccgctcctgcctgcagagagtgaggaagaagatgaaatggaagttgaagaccaggatagtaaagaagccaaaaatacctaggtgctgatatggaagaatttcatggcaggactttgcacgatgacgacagctgtcaggtgattccagttcttccacaagtgatgatgatcctgattcccggacagacattacctcttcagctttttcaccctcaagaagtcagtatggtgcggaatttaattcagaaagatagaacctttgctgttcttgcatacagcaatgtacaggaaagggaagcacagtttggaacaacagcagagatatatgcctatcgagaagaacaggattttggaattgagatagtgaaagtgaaagcaattggaagacaaaggttcaaagtccttgagctaagaacacagtcagatggaatccagcaagctaaagtgcaaattcttcccgaatgtgtgttgccttcaaccatgtctgcagttcaattagaatccctcaataagtgccagatatttccttcaaaacctgtctcaagagaagaccaatgttcatataaatggtggcagaaataccagaagagaaagtttcattgtgcaaatctaacttcatggcctcgctggctgtattccttatatgatgctgagaccttaatggacagaatcaagaaacagctacgtgaatgggatgaaaatctaaaagatgattctcttccttcaaatccaatagatttttcttacagagtagctgcttgtcttcctattgatgatgtattgagaattcagctccttaaaattggcagtgctatccagcgacttcgctgtgaattagacattatgaataaatgtacttccctttgctgtaaacaatgtcaagaaacagaaataacaaccaaaaatgaaatattcagtttatccttatgtgggccgatggcagcttatgtgaatcctcatggatatgtgcatgagacacttactgtgtataaggcttgcaacttgaatctgataggccggccttctacagaacacagctggtttcctgggtatgcctggactgttgcccagtgtaagatctgtgcaagccatattggatggaagtttacggccaccaaaaaagacatgtcacctcaaaaattttggggcttaacgcgatctgctctgttgcccacgatcccagacactgaagatgaaataagtccagacaaagtaatactttgcttgtaaacagatgtgatagagataaagttagttatctaacaaattggttatattctaagatctgctttggaaattattgcctctgatacatacctaagtaaacataacattaatacctaagtaaacataacattacttggagggttgcagtttctaagtgaaactgtatttgaaacttttaagtatactttaggaaacaagcatgaacggcagtctagaataccagaaacatctacttgggtagcttggtgccattatcctgtggaatctgatatgtctggtagcatgtcattgatgggacatgaagacatctttggaaatgatgagattatttcgttaaaaaaaaaaaaaatcttaaattcctacaatgtgaaactgaaactaataatttgatcctgatgtatgggacagcgtatctgtaccagtgctctaaataacaaaagctagggtgacaagtacatgttccttttggaaagaagcaaggcaatgtatattaattattctaaaagggctttgttcctttccattttctttaacttctctgagatactgatttgtaaattttgaaaattagttaaaatatgcagttttttgagcccacgaatagttgtcatttcctttatgtgcctgttagtaaaaagtagtattgtgtatttgctcagtatctgaactataagcccatttatactgttccatacaaaagctatttttcaaaaattaatttgaaccaaaactactactatagggaaaagatgccaaaacatgtcccctcacccaggctaaacttgatactgtattattttgttcaatgtaaattgaagaaaatctgtaagtaagtaaaccttaagtgtgaaactaaacatgttctttgttcaaataatgtaaaatatctactcataattttaaagttctaaaaaggctgctttgccacctacctctttgcttatattcaagggtttagtgggtccttccttccacatttgtatgataactttcgttttattggtagtcctttgctactttaaaactaatcaggttaaatgtttactcaaatgtagtaatagtatgaggccaaaatacatgccttgaaggtggagtgaaatcagttgagtgtcacactgcatatttatgtaaatagagtaaatgaaaattcaagaatacttccattcaggatatgcccctgccttattttttctaaggtctacttttactactttaataattttgggtttgtgtgacttca

SEQ ID NO: 351960 - DNA, 3461 bp, Homo sapiens
aaatggaggcatttaaactgggactgagatgggactgagtgattaaatgctaccagtgttagttttaagagttgaaaagcttaatagtaaattttaataagcccatgaacttgattatggctacctttattttaaacaaggagaccttaatggacagaatcaagaaacagctacgtgaatgggatgaaaatctaaaagatgattctcttccttcaaatccaataggtatgaaaagttagtttcctgcctggagcctgggatgtcttgctataaaaaatagctttttcatggatgcgatccaatcatatcttctaggttttaagactgattaaaacattttaattctgaaaagcataatttcctttgagcagttgaaaaaaatgagtattttaaaattaattgcaataaaatcctcatattctgtgagcactccaattttagacaagttttccataaaaagttcaaattgcaggaagtggctgtcatccaaaaacacttcctgtgtaaggactcctttccctgttcttcaaggtgcctttaaaagaagtgagtctagttccaggacttgccttaattatagatactctctttatctgtttataaggtatagtttagttatttttctagtctcttggcaaataacttctaacatggatttgagttcatgtttaacataaaaggattttaccaaaaaaagtataagaaaagcaattaaatttagagcttctgaaaagtgtatctttgacagctggtatattttgtattgtttatacttgtataaaatgtgtaaccttaaagagaagggtttatttcaaaaggatattatccgatttgtaagttctctgatgcttatctgactcctaagtttaaaacttgaaaaaccatgtcttgaagatttttcttacagagtagctgcttgtcttcctattgatgatgtattgagaattcagctccttaaaattggcagtgctatccagcgacttcgctgtgaattagacattatgaataaatgtacttccctttgctgtaaacaatgtcaagaaacagaaataacaaccaaaaatgaaatattcaggtaaggtctttattacgtttttaatatacttgccttatcagaattataatgaagactgtatttctgttttccataaactttcctccagtaccttaaagttacaaacatttagcaaatgaaatatagggaattagctcacttttgctaagaccatcttccagattgggtactcagagcaacaatgcatgtcagggattattcacaggtaatgagcatggtaaagtaaaacaactgagaaattcttttccccctaattcttgttgacaatctatatattagactgtcttcaattaggccctaacatagatgcttcagaaattacatttcagtcatcagttttgccatatagggccaaagtaggacatgcttctgaacacatactgatgctctgatataacagtgtttgaaaatcattttatgacaaatccatcagttgtaaatcaagaaggtaaggaaactgctttctgcaaaataatcaactgccccaaaatgaccacacaggaccttgtcattgcacttacactctcagactcctttagaagcatttgagttttatattctttacaatgtctgtcttgaggagggttttaaaaacaagtactatttcctttgggtcatcacagaaaacatttagacatttagacaaaacaggcctgtctgccagctgtacccccaccccattttcatactaagatcctggtattatataaaactgaaggattaaaaactgtatagctcatacctcatttcttggtgaacttcaataaaattctaagcatttaataaaattagacttctcgttttgacgtgttctccatgttgattctttgttttagtttatccttatgtgggccgatggcagcttatgtgaatcctcatggatatgtgcatgagacacttactgtgtataaggcttgcaacttgaatctgataggccggccttctacagaacacagctggtttcctgggtatgcctggactgttgcccagtgtaagatctgtgcaagccatattggatggaagtttacggccaccaaaaaagacatgtcacctcaaaaattttggggcttaacgcgatctgctctgttgcccacgatcccagacactgaagatgaaataagtccagacaaagtaatactttgcttgtaaacagatgtgatagagataaagttagttatctaacaaattggttatattctaagatctgctttggaaattattgcctctgatacatacctaagtaaacataacattaatacctaagtaaacataacattacttggagggttgcagtttctaagtgaaactgtatttgaaacttttaagtatactttaggaaacaagcatgaacggcagtctagaataccagaaacatctacttgggtagcttggtgccattatcctgtggaatctgatatgtctggtagcatgtcattgatgggacatgaagacatctttggaaatgatgagattatttcgttaaaaaaaaaaaaaatcttaaattcctacaatgtgaaactgaaactaataatttgatcctgatgtatgggacagcgtatctgtaccagtgctctaaataacaaaagctagggtgacaagtacatgttccttttggaaagaagcaaggcaatgtatattaattattctaaaagggctttgttcctttccattttctttaacttctctgagatactgatttgtaaattttgaaaattagttaaaatatgcagttttttgagcccacgaatagttgtcatttcctttatgtgcctgttagtaaaaagtagtattgtgtatttgctcagtatctgaactataagcccatttatactgttccatacaaaagctatttttcaaaaattaatttgaaccaaaactactactatagggaaaagatgccaaaacatgtcccctcacccaggctaaacttgatactgtattattttgttcaatgtaaattgaagaaaatctgtaagtaagtaaaccttaagtgtgaaactaaacatgttctttgttcaaataatgtaaaatatctactcataattttaaagttctaaaaaggctgctttgccacctacctctttgcttatattcaagggtttagtgggtccttccttccacatttgtatgataactttcgttttattggtagtcctttgctactttaaaactaatcaggttaaatgtttactcaaatgtagtaatagtatgaggccaaaatacatgccttgaaggtggagtgaaatcagttgagtgtcacactgcatatttatgtaaatagagtaaatgaaaattcaagaatacttccattcaggatatgcccctgccttattttttctaaggtctacttttactactttaataattttgggtttgtgtgacttca

SEQ ID NO: 351961 - DNA, 1956 bp, Homo sapiens
aaatggaggcatttaaactgggactgagatgggactgagtgattaaatgctaccagtgttagttttaagagttgaaaagcttaatagtaaattttaataagcccatgaacttgattatggctacctttattttaaacaaggagaccttaatggacagaatcaagaaacagctacgtgaatgggatgaaaatctaaaagatgattctcttccttcaaatccaatagatttttcttacagagtagctgcttgtcttcctattgatgatgtattgagaattcagctccttaaaattggcagtgctatccagcgacttcgctgtgaattagacattatgaataaatgtacttccctttgctgtaaacaatgtcaagaaacagaaataacaaccaaaaatgaaatattcagtttatccttatgtgggccgatggcagcttatgtgaatcctcatggatatgtgcatgagacacttactgtgtataaggcttgcaacttgaatctgataggccggccttctacagaacacagctggtttcctgggtatgcctggactgttgcccagtgtaagatctgtgcaagccatattggatggaagtttacggccaccaaaaaagacatgtcacctcaaaaattttggggcttaacgcgatctgctctgttgcccacgatcccagacactgaagatgaaataagtccagacaaagtaatactttgcttgtaaacagatgtgatagagataaagttagttatctaacaaattggttatattctaagatctgctttggaaattattgcctctgatacatacctaagtaaacataacattaatacctaagtaaacataacattacttggagggttgcagtttctaagtgaaactgtatttgaaacttttaagtatactttaggaaacaagcatgaacggcagtctagaataccagaaacatctacttgggtagcttggtgccattatcctgtggaatctgatatgtctggtagcatgtcattgatgggacatgaagacatctttggaaatgatgagattatttcgttaaaaaaaaaaaaaatcttaaattcctacaatgtgaaactgaaactaataatttgatcctgatgtatgggacagcgtatctgtaccagtgctctaaataacaaaagctagggtgacaagtacatgttccttttggaaagaagcaaggcaatgtatattaattattctaaaagggctttgttcctttccattttctttaacttctctgagatactgatttgtaaattttgaaaattagttaaaatatgcagttttttgagcccacgaatagttgtcatttcctttatgtgcctgttagtaaaaagtagtattgtgtatttgctcagtatctgaactataagcccatttatactgttccatacaaaagctatttttcaaaaattaatttgaaccaaaactactactatagggaaaagatgccaaaacatgtcccctcacccaggctaaacttgatactgtattattttgttcaatgtaaattgaagaaaatctgtaagtaagtaaaccttaagtgtgaaactaaacatgttctttgttcaaataatgtaaaatatctactcataattttaaagttctaaaaaggctgctttgccacctacctctttgcttatattcaagggtttagtgggtccttccttccacatttgtatgataactttcgttttattggtagtcctttgctactttaaaactaatcaggttaaatgtttactcaaatgtagtaatagtatgaggccaaaatacatgccttgaaggtggagtgaaatcagttgagtgtcacactgcatatttatgtaaatagagtaaatgaaaattcaagaatacttccattcaggatatgcccctgccttattttttctaaggtctacttttactactttaataattttgggtttgtgtgacttca

SEQ ID NO: 351962 - DNA, 1862 bp, Homo sapiens
aaggttatatatcactattcctttactctagagaaggtcatttagttttatgtaaatatgtggcagatctcagtttcagtgactttcgtgctccatctttaaaagtgtttttgaatgcttggaaggaaaatgtgatattcagagagagcaatatctttataagtaagtttcttgatgatctatgtgattacatgataaagtgaatgccagtttttcctaccaataatttttctctcaaatcttttagtgtacttccctttgctgtaaacaatgtcaagaaacagaaataacaaccaaaaatgaaatattcagtttatccttatgtgggccgatggcagcttatgtgaatcctcatggatatgtgcatgagacacttactgtgtataaggcttgcaacttgaatctgataggccggccttctacagaacacagctggtttcctgggtatgcctggactgttgcccagtgtaagatctgtgcaagccatattggatggaagtttacggccaccaaaaaagacatgtcacctcaaaaattttggggcttaacgcgatctgctctgttgcccacgatcccagacactgaagatgaaataagtccagacaaagtaatactttgcttgtaaacagatgtgatagagataaagttagttatctaacaaattggttatattctaagatctgctttggaaattattgcctctgatacatacctaagtaaacataacattaatacctaagtaaacataacattacttggagggttgcagtttctaagtgaaactgtatttgaaacttttaagtatactttaggaaacaagcatgaacggcagtctagaataccagaaacatctacttgggtagcttggtgccattatcctgtggaatctgatatgtctggtagcatgtcattgatgggacatgaagacatctttggaaatgatgagattatttcgttaaaaaaaaaaaaaatcttaaattcctacaatgtgaaactgaaactaataatttgatcctgatgtatgggacagcgtatctgtaccagtgctctaaataacaaaagctagggtgacaagtacatgttccttttggaaagaagcaaggcaatgtatattaattattctaaaagggctttgttcctttccattttctttaacttctctgagatactgatttgtaaattttgaaaattagttaaaatatgcagttttttgagcccacgaatagttgtcatttcctttatgtgcctgttagtaaaaagtagtattgtgtatttgctcagtatctgaactataagcccatttatactgttccatacaaaagctatttttcaaaaattaatttgaaccaaaactactactatagggaaaagatgccaaaacatgtcccctcacccaggctaaacttgatactgtattattttgttcaatgtaaattgaagaaaatctgtaagtaagtaaaccttaagtgtgaaactaaacatgttctttgttcaaataatgtaaaatatctactcataattttaaagttctaaaaaggctgctttgccacctacctctttgcttatattcaagggtttagtgggtccttccttccacatttgtatgataactttcgttttattggtagtcctttgctactttaaaactaatcaggttaaatgtttactcaaatgtagtaatagtatgaggccaaaatacatgccttgaaggtggagtgaaatcagttgagtgtcacactgcatatttatgtaaatagagtaaatgaaaattcaagaatacttccattcaggatatgcccctgccttattttttctaaggtctacttttactactttaataattttgggtttgtgtgacttca

SEQ ID NO: 351963 - DNA, 2242 bp, Homo sapiens
cttctagtttgccttttgtttgtttgtttgtttgcttcagcttaatgattctctatgatcctgggaacctgttcagttccctcagctgtactatcttcagttttcaaagagggatgctaagaagggattacatgctactctggggttaggactatgtatcttggattgccctatcttacttggcaccctatgtgaggactaaaactagaatacatttgttactataaataaatgtggcatggtatacctagggaaaaaaataaggaaacagttgcaattacatggtttatcttaagaacaaaataccatggtttgtatttctggttgcattatctgacaatcgttcttattttagaatagtagtttttaaatatttattttttgagacgtgtccttcctggcccatccagtttaactcagacagaagtgcattatttctgcaggtaattgctgttttctaacttgactgcaatacaacaaaggaaaagccagtacaagttagaatgtggtgccagtacaagttagaatgtggtcttggcaaccagcaatttctataaagaaattcataagattactctttatttctatgcagtagaagaaaaatgtaaacatggcttaagagcataaaagtcatacatattacaaaattagaaaatgtttttagaaatgtttttaggtttcagggaactgtatggatcaaatctcaacttagaatctctaatccttagaatttgcctctaaagtctgtcttcatgataggtttatatgataggcttggagtacagaaatgtttccttagctgatatctttccttaatttcttaggtatgcctggactgttgcccagtgtaagatctgtgcaagccatattggatggaagtttacggccaccaaaaaagacatgtcacctcaaaaattttggggcttaacgcgatctgctctgttgcccacgatcccagacactgaagatgaaataagtccagacaaagtaatactttgcttgtaaacagatgtgatagagataaagttagttatctaacaaattggttatattctaagatctgctttggaaattattgcctctgatacatacctaagtaaacataacattaatacctaagtaaacataacattacttggagggttgcagtttctaagtgaaactgtatttgaaacttttaagtatactttaggaaacaagcatgaacggcagtctagaataccagaaacatctacttgggtagcttggtgccattatcctgtggaatctgatatgtctggtagcatgtcattgatgggacatgaagacatctttggaaatgatgagattatttcgttaaaaaaaaaaaaaatcttaaattcctacaatgtgaaactgaaactaataatttgatcctgatgtatgggacagcgtatctgtaccagtgctctaaataacaaaagctagggtgacaagtacatgttccttttggaaagaagcaaggcaatgtatattaattattctaaaagggctttgttcctttccattttctttaacttctctgagatactgatttgtaaattttgaaaattagttaaaatatgcagttttttgagcccacgaatagttgtcatttcctttatgtgcctgttagtaaaaagtagtattgtgtatttgctcagtatctgaactataagcccatttatactgttccatacaaaagctatttttcaaaaattaatttgaaccaaaactactactatagggaaaagatgccaaaacatgtcccctcacccaggctaaacttgatactgtattattttgttcaatgtaaattgaagaaaatctgtaagtaagtaaaccttaagtgtgaaactaaacatgttctttgttcaaataatgtaaaatatctactcataattttaaagttctaaaaaggctgctttgccacctacctctttgcttatattcaagggtttagtgggtccttccttccacatttgtatgataactttcgttttattggtagtcctttgctactttaaaactaatcaggttaaatgtttactcaaatgtagtaatagtatgaggccaaaatacatgccttgaaggtggagtgaaatcagttgagtgtcacactgcatatttatgtaaatagagtaaatgaaaattcaagaatacttccattcaggatatgcccctgccttattttttctaaggtctacttttactactttaataattttgggtttgtgtgacttca

SEQ ID NO: 351964 - DNA, 1022 bp, Homo sapiens
agcctgcttggcgggtaaacagacatggccggcgaaggagatcagcaggacgctgcgcacaacatgggcaaccacctgccgctcctgcctgcagagagtgaggaagaagatgaaatggaagttgaagaccaggatagtaaagaagccaaaaaaccaaacatcataaattttgacaccagtctgccgacatcacatacatacctaggtgctgatatggaagaatttcatggcaggactttgcacgatgacgacagctgtcaggtgattccagttcttccacaagtgatgatgatcctgattcccggacagacattacctcttcagctttttcaccctcaagaagtcagtatggtgcggaatttaattcagaaagatagaacctttgctgttcttgcatacagcaatgtacaggaaagggaagcacagtttggaacaacagcagagatatatgcctatcgagaagaacaggattttggaattgagatagtgaaagtgaaagcaattggaagacaaaggttcaaagtccttgagctaagaacacagtcagatgggtatagcccagtggtttccaaccttgctatgcatcagaatcacctgggaagcttttaaaactatagaagcttgagttccaacctcatctcccatctccagagagtgatgaggctgcagcatcttttaaaaatgattttcaggtgattctaatgtctctccaggtttgagaacaatcatgtaaatccaaagggaagtgttgtttgggatttggcttctttaggattgaaggcctctcggagcataagaggatagggagaccagaggcttgtgagctgttcgtgtgctcaccaggacagctgtggtttttgtagcattgctatgatgtttgaaagccacactggttacatctgcctactgctccagctgagctataaaagccatttatatttcgtgtccctctccagtgtgaattttatatcacccagaaatgctatttacataataaatgatcaataaaatacttgtagtct

SEQ ID NO: 351965 - DNA, 2590 bp, Homo sapiens
agcctgcttggcgggtaaacagacatggccggcgaaggagatcagcaggacgctgcgcacaacatgggcaaccacctgccgctcctgcctgcagagagtgaggaagaagatgaaatggaagttgaagaccaggatagtaaagaagccaaaaaaccaaacatcataaattttgacaccagtctgccgacatcacatacatacctaggtgctgatatggaagaatttcatggcaggactttgcacgatgacgacagctgtcaggtgattccagttcttccacaagtgatgatgatcctgattcccggacagacattacctcttcagctttttcaccctcaagaagtcagtatggtgcggaatttaattcagaaagatagaacctttgctgttcttgcatacagcaatgtacaggaaagggaagcacagtttggaacaacagcagagatatatgcctatcgagaagaacaggattttggaattgagatagtgaaagtgaaagcaattggaagacaaaggttcaaagtccttgagctaagaacacagtcagatggaatccagcaagctaaagtgcaaattcttcccgaatgtgtgttgccttcaaccatgtctgcagttcaattagaatccctcaataagtgccagatatttccttcaaaacctgtctcaagagaagaccaatgttcatataaatggtggcagaaataccagaagagaaagtttcattgtgcaaatctaacttcatggcctcgctggctgtattccttatatgatgctgagaccttaatggacagaatcaagaaacagctacgtgaatgggatgaaaatctaaaagatgattctcttccttcaaatccaatagatttttcttacagagtagctgcttgtcttcctattgatgatgtattgagaattcagctccttaaaattggcagtgctatccagcgacttcgctgtgaattagacattatgaataaatgtacttccctttgctgtaaacaatgtcaagaaacagaaataacaaccaaaaatgaaatattcagtttatccttatgtgggccgatggcagcttatgtgaatcctcatggatatgtgcatgagacacttactgtgtataaggcttgcaacttgaatctgataggccggccttctacagaacacagctggtttcctgggtatgcctggactgttgcccagtgtaagatctgtgcaagccatattggatggaagtttacggccaccaaaaaagacatgtcacctcaaaaattttggggcttaacgcgatctgctctgttgcccacgatcccagacactgaagatgaaataagtccagacaaagtaatactttgcttgtaaacagatgtgatagagataaagttagttatctaacaaattggttatattctaagatctgctttggaaattattgcctctgatacatacctaagtaaacataacattaatacctaagtaaacataacattacttggagggttgcagtttctaagtgaaactgtatttgaaacttttaagtatactttaggaaacaagcatgaacggcagtctagaataccagaaacatctacttgggtagcttggtgccattatcctgtggaatctgatatgtctggtagcatgtcattgatgggacatgaagacatctttggaaatgatgagattatttcgttaaaaaaaaaaaaaatcttaaattcctacaatgtgaaactgaaactaataatttgatcctgatgtatgggacagcgtatctgtaccagtgctctaaataacaaaagctagggtgacaagtacatgttccttttggaaagaagcaaggcaatgtatattaattattctaaaagggctttgttcctttccattttctttaacttctctgagatactgatttgtaaattttgaaaattagttaaaatatgcagttttttgagcccacgaatagttgtcatttcctttatgtgcctgttagtaaaaagtagtattgtgtatttgctcagtatctgaactataagcccatttatactgttccatacaaaagctatttttcaaaaattaatttgaaccaaaactactactatagggaaaagatgccaaaacatgtcccctcacccaggctaaacttgatactgtattattttgttcaatgtaaattgaagaaaatctgtaagtaagtaaaccttaagtgtgaaactaaacatgttctttgttcaaataatgtaaaatatctactcataattttaaagttctaaaaaggctgctttgccacctacctctttgcttatattcaagggtttagtgggtccttccttccacatttgtatgataactttcgttttattggtagtcctttgctactttaaaactaatcaggttaaatgtttactcaaatgtagtaatagtatgaggccaaaatacatgccttgaaggtggagtgaaatcagttgagtgtcacactgcatatttatgtaaatagagtaaatgaaaattcaagaatacttccattcaggatatgcccctgccttattttttctaaggtctacttttactactttaataattttgggtttgtgtgacttca

SEQ ID NO: 351966 - DNA, 1794 bp, Homo sapiens
agcctgcttggcgggtaaacagacatggccggcgaaggagatcagcaggacgctgcgcacaacatgggcaaccacctgccgctcctgcctgcagagagtgaggaagaagatgaaatggaagttgaagaccaggatagtaaagaagccaaaaaaccaaacatcataaattttgacaccagtctgccgacatcacatacatacctaggtgctgatatggaagaatttcatggcaggactttgcacgatgacgacagctgtcaggtgattccagttcttccacaagtgatgatgatcctgattcccggacagacattacctcttcagctttttcaccctcaagaagtcagtatggtgcggaatttaattcagaaagatagaacctttgctgttcttgcatacagcaatgtacaggaaagggaagcacagtttggaacaacagcagagatatatgcctatcgagaagaacaggattttggaattgagatagtgaaagtgaaagcaattggaagacaaaggttcaaagtccttgagctaagaacacagtcagatggaatccagcaagctaaagtgcaaattcttcccgaatgtgtgttgccttcaaccatgtctgcagttcaattagaatccctcaataagtgccagatatttccttcaaaacctgtctcaagagaagaccaatgttcatataaatggtggcagaaataccagaagagaaagtttcattgtgcaaatctaacttcatggcctcgctggctgtattccttatatgatgctgagaccttaatggacagaatcaagaaacagctacgtgaatgggatgaaaatctaaaagatgattctcttccttcaaatccaatagatttttcttacagagtagctgcttgtcttcctattgatgatgtattgagaattcagctccttaaaattggcagtgctatccagcgacttcgctgtgaattagacattatgaataaatgtacttccctttgctgtaaacaatgtcaagaaacagaaataacaaccaaaaatgaaatattcagtttatccttatgtgggccgatggcagcttatgtgaatcctcatggatatgtgcatgagacacttactgtgtataaggcttgcaacttgaatctgataggccggccttctacagaacacagctggtttcctgggtatgcctggactgttgcccagtgtaagatctgtgcaagccatattggatggaagtttacggccaccaaaaaagacatgtcacctcaaaaattttggggcttaacgcgatctgctctgttgcccacgatcccagacactgaagatgaaataagtccagacaaagtaatactttgcttgtaaacagatgtgatagagataaagttagttatctaacaaattggttatattctaagatctgctttggaaattattgcctctgatacatacctaagtaaacataacattaatacctaagtaaacataacattacttggagggttgcagtttctaagtgaaactgtatttgaaacttttaagtatactttaggaaacaagcatgaacggcagtctagaataccagaaacatctacttgggtagcttggtgccattatcctgtggaatctgatatgtctggtagcatgtcattgatgggacatgaagacatctttggaaatgatgagattatttcctgtatgcagtcatttctgaggctttcttgcatcatagcccctgtgacatttcctcttagaaatattacactctacaaaattgttttatcaaggtccaacaattactatttg

SEQ ID NO: 351967 - DNA, 4095 bp, Homo sapiens
agcctgcttggcgggtaaacagacatggccggcgaaggagatcagcaggacgctgcgcacaacatgggcaaccacctgccgctcctgcctgcagagagtgaggaagaagatgaaatggaagttgaagaccaggatagtaaagaagccaaaaaaccaaacatcataaattttgacaccagtctgccgacatcacatacatacctaggtgctgatatggaagaatttcatggcaggactttgcacgatgacgacagctgtcaggtgattccagttcttccacaagtgatgatgatcctgattcccggacagacattacctcttcagctttttcaccctcaagaagtcagtatggtgcggaatttaattcagaaagatagaacctttgctgttcttgcatacagcaatgtacaggaaagggaagcacagtttggaacaacagcagagatatatgcctatcgagaagaacaggattttggaattgagatagtgaaagtgaaagcaattggaagacaaaggttcaaagtccttgagctaagaacacagtcagatggaatccagcaagctaaagtgcaaattcttcccgaatgtgtgttgccttcaaccatgtctgcagttcaattagaatccctcaataagtgccagatatttccttcaaaacctgtctcaagagaagaccaatgttcatataaatggtggcagaaataccagaagagaaagtttcattgtgcaaatctaacttcatggcctcgctggctgtattccttatatgatgctgagaccttaatggacagaatcaagaaacagctacgtgaatgggatgaaaatctaaaagatgattctcttccttcaaatccaataggtatgaaaagttagtttcctgcctggagcctgggatgtcttgctataaaaaatagctttttcatggatgcgatccaatcatatcttctaggttttaagactgattaaaacattttaattctgaaaagcataatttcctttgagcagttgaaaaaaatgagtattttaaaattaattgcaataaaatcctcatattctgtgagcactccaattttagacaagttttccataaaaagttcaaattgcaggaagtggctgtcatccaaaaacacttcctgtgtaaggactcctttccctgttcttcaaggtgcctttaaaagaagtgagtctagttccaggacttgccttaattatagatactctctttatctgtttataaggtatagtttagttatttttctagtctcttggcaaataacttctaacatggatttgagttcatgtttaacataaaaggattttaccaaaaaaagtataagaaaagcaattaaatttagagcttctgaaaagtgtatctttgacagctggtatattttgtattgtttatacttgtataaaatgtgtaaccttaaagagaagggtttatttcaaaaggatattatccgatttgtaagttctctgatgcttatctgactcctaagtttaaaacttgaaaaaccatgtcttgaagatttttcttacagagtagctgcttgtcttcctattgatgatgtattgagaattcagctccttaaaattggcagtgctatccagcgacttcgctgtgaattagacattatgaataaatgtacttccctttgctgtaaacaatgtcaagaaacagaaataacaaccaaaaatgaaatattcaggtaaggtctttattacgtttttaatatacttgccttatcagaattataatgaagactgtatttctgttttccataaactttcctccagtaccttaaagttacaaacatttagcaaatgaaatatagggaattagctcacttttgctaagaccatcttccagattgggtactcagagcaacaatgcatgtcagggattattcacaggtaatgagcatggtaaagtaaaacaactgagaaattcttttccccctaattcttgttgacaatctatatattagactgtcttcaattaggccctaacatagatgcttcagaaattacatttcagtcatcagttttgccatatagggccaaagtaggacatgcttctgaacacatactgatgctctgatataacagtgtttgaaaatcattttatgacaaatccatcagttgtaaatcaagaaggtaaggaaactgctttctgcaaaataatcaactgccccaaaatgaccacacaggaccttgtcattgcacttacactctcagactcctttagaagcatttgagttttatattctttacaatgtctgtcttgaggagggttttaaaaacaagtactatttcctttgggtcatcacagaaaacatttagacatttagacaaaacaggcctgtctgccagctgtacccccaccccattttcatactaagatcctggtattatataaaactgaaggattaaaaactgtatagctcatacctcatttcttggtgaacttcaataaaattctaagcatttaataaaattagacttctcgttttgacgtgttctccatgttgattctttgttttagtttatccttatgtgggccgatggcagcttatgtgaatcctcatggatatgtgcatgagacacttactgtgtataaggcttgcaacttgaatctgataggccggccttctacagaacacagctggtttcctgggtatgcctggactgttgcccagtgtaagatctgtgcaagccatattggatggaagtttacggccaccaaaaaagacatgtcacctcaaaaattttggggcttaacgcgatctgctctgttgcccacgatcccagacactgaagatgaaataagtccagacaaagtaatactttgcttgtaaacagatgtgatagagataaagttagttatctaacaaattggttatattctaagatctgctttggaaattattgcctctgatacatacctaagtaaacataacattaatacctaagtaaacataacattacttggagggttgcagtttctaagtgaaactgtatttgaaacttttaagtatactttaggaaacaagcatgaacggcagtctagaataccagaaacatctacttgggtagcttggtgccattatcctgtggaatctgatatgtctggtagcatgtcattgatgggacatgaagacatctttggaaatgatgagattatttcgttaaaaaaaaaaaaaatcttaaattcctacaatgtgaaactgaaactaataatttgatcctgatgtatgggacagcgtatctgtaccagtgctctaaataacaaaagctagggtgacaagtacatgttccttttggaaagaagcaaggcaatgtatattaattattctaaaagggctttgttcctttccattttctttaacttctctgagatactgatttgtaaattttgaaaattagttaaaatatgcagttttttgagcccacgaatagttgtcatttcctttatgtgcctgttagtaaaaagtagtattgtgtatttgctcagtatctgaactataagcccatttatactgttccatacaaaagctatttttcaaaaattaatttgaaccaaaactactactatagggaaaagatgccaaaacatgtcccctcacccaggctaaacttgatactgtattattttgttcaatgtaaattgaagaaaatctgtaagtaagtaaaccttaagtgtgaaactaaacatgttctttgttcaaataatgtaaaatatctactcataattttaaagttctaaaaaggctgctttgccacctacctctttgcttatattcaagggtttagtgggtccttccttccacatttgtatgataactttcgttttattggtagtcctttgctactttaaaactaatcaggttaaatgtttactcaaatgtagtaatagtatgaggccaaaatacatgccttgaaggtggagtgaaatcagttgagtgtcacactgcatatttatgtaaatagagtaaatgaaaattcaagaatacttccattcaggatatgcccctgccttattttttctaaggtctacttttactactttaataattttgggtttgtgtgacttca

SEQ ID NO: 351968 - DNA, 2524 bp, Homo sapiens
agcctgcttggcgggtaaacagacatggccggcgaaggagatcagcaggacgctgcgcacaacatgggcaaccacctgccgctcctgcctgcagagagtgaggaagaagatgaaatggaagttgaagaccaggatagtaaagaagccaaaaaaccaaacatcataaattttgacaccagtctgccgacatcacatacatacctaggtgctgatatggaagaatttcatggcaggactttgcacgatgacgacagctgtcaggtgattccagttcttccacaagtgatgatgatcctgattcccggacagacattacctcttcagctttttcaccctcaagaagtcagtatggtgcggaatttaattcagaaagatagaacctttgctgttcttgcatacagcaatgtacaggaaagggaagcacagtttggaacaacagcagagatatatgcctatcgagaagaacaggattttggaattgagatagtgaaagtgaaagcaattggaagacaaaggttcaaagtccttgagctaagaacacagtcagatggaatccagcaagctaaagtgcaaattcttcccgaatgtgtgttgccttcaaccatgtctgcagttcaattagaatccctcaataagtgccagatatttccttcaaaacctgtctcaagagaagaccaatgttcatataaatggtggcagaaataccagaagagaaagtttcattgtgcaaatctaacttcatggcctcgctggctgtattccttatatgatgctgagaccttaatggacagaatcaagaaacagctacgtgaatgggatgaaaatctaaaagatgattctcttccttcaaatccaatagatttttcttacagagtagctgcttgtcttcctattgatgatgtattgagaattcagctccttaaaattggcagtgctatccagcgacttcgctgtgaattagacattatgaataaatgtacttccctttgctgtaaacaatgtcaagaaacagaaataacaaccaaaaatgaaatattcagtttatccttatgtgggccgatggcagcttatgtgaatcctcatggatatgtgcatgagacacttactgtgtataaggcttgcaacttgaatctgataggccggccttctacagaacacagctggtttcctgggtatgcctggactgttgcccagtgtaagatctgtgcaagccatattggatggaagtttacggccaccaaaaaagacatgtcacctcaaaaattttggggcttaacgcgatctgctctgttgcccacgatcccagacactgaagatgaaataagtccagacaaagtaatactttgcttgtaaacagatgtgatagagataaagttagttatctaacaaattggttatattctaagatctgctttggaaattattgcctctgatacatacctaagtaaacataacattaatacctaagtaaacataacattacttggagggttgcagtttctaagtgaaactgtatttgaaacttttaagtatactttaggaaacaagcatgaacggcagtctagaataccagaaacatctacttgggtagcttggtgccattatcctgtggaatctgatatgtctggtagcatgtcattgatgggacatgaagacatctttggaaatgatgagattatttctatgggacagcgtatctgtaccagtgctctaaataacaaaagctagggtgacaagtacatgttccttttggaaagaagcaaggcaatgtatattaattattctaaaagggctttgttcctttccattttctttaacttctctgagatactgatttgtaaattttgaaaattagttaaaatatgcagttttttgagcccacgaatagttgtcatttcctttatgtgcctgttagtaaaaagtagtattgtgtatttgctcagtatctgaactataagcccatttatactgttccatacaaaagctatttttcaaaaattaatttgaaccaaaactactactatagggaaaagatgccaaaacatgtcccctcacccaggctaaacttgatactgtattattttgttcaatgtaaattgaagaaaatctgtaagtaagtaaaccttaagtgtgaaactaaacatgttctttgttcaaataatgtaaaatatctactcataattttaaagttctaaaaaggctgctttgccacctacctctttgcttatattcaagggtttagtgggtccttccttccacatttgtatgataactttcgttttattggtagtcctttgctactttaaaactaatcaggttaaatgtttactcaaatgtagtaatagtatgaggccaaaatacatgccttgaaggtggagtgaaatcagttgagtgtcacactgcatatttatgtaaatagagtaaatgaaaattcaagaatacttccattcaggatatgcccctgccttattttttctaaggtctacttttactactttaataattttgggtttgtgtgacttca

SEQ ID NO: 351969 - DNA, 3206 bp, Homo sapiens
agcctgcttggcgggtaaacagacatggccggcgaaggagatcagcaggacgctgcgcacaacatgggcaaccacctgccgctcctgcctgcagagagtgaggaagaagatgaaatggaagttgaagaccaggatagtaaagaagccaaaaaaccaaacatcataaattttgacaccagtctgccgacatcacatacatacctaggtgctgatatggaagaatttcatggcaggactttgcacgatgacgacagctgtcaggtgattccagttcttccacaagtgatgatgatcctgattcccggacagacattacctcttcagctttttcaccctcaagaagtcagtatggtgcggaatttaattcagaaagatagaacctttgctgttcttgcatacagcaatgtacaggaaagggaagcacagtttggaacaacagcagagatatatgcctatcgagaagaacaggattttggaattgagatagtgaaagtgaaagcaattggaagacaaaggttcaaagtccttgagctaagaacacagtcagatggaatccagcaagctaaagtgcaaattcttcccgaatgtgtgttgccttcaaccatgtctgcagttcaattagaatccctcaataagtgccagatatttccttcaaaacctgtctcaagagaagaccaatgttcatataaatggtggcagaaataccagaagagaaagtttcattgtgcaaatctaacttcatggcctcgctggctgtattccttatatgatgctgagaccttaatggacagaatcaagaaacagctacgtgaatgggatgaaaatctaaaagatgattctcttccttcaaatccaataggtatgaaaagttagtttcctgcctggagcctgggatgtcttgctataaaaaatagctttttcatggatgcgatccaatcatatcttctaggttttaagactgattaaaacattttaattctgaaaagcataatttcctttgagcagttgaaaaaaatgagtattttaaaattaattgcaataaaatcctcatattctgtgagcactccaattttagacaagttttccataaaaagttcaaattgcaggaagtggctgtcatccaaaaacacttcctgtgtaaggactcctttccctgttcttcaaggtgcctttaaaagaagtgagtctagttccaggacttgccttaattatagatactctctttatctgtttataaggtatagtttagttatttttctagtctcttggcaaataacttctaacatggatttgagttcatgtttaacataaaaggattttaccaaaaaaagtataagaaaagcaattaaatttagagcttctgaaaagtgtatctttgacagctggtatattttgtattgtttatacttgtataaaatgtgtaaccttaaagagaagggtttatttcaaaaggatattatccgatttgtaagttctctgatgcttatctgactcctaagtttaaaacttgaaaaaccatgtcttgaagatttttcttacagagtagctgcttgtcttcctattgatgatgtattgagaattcagctccttaaaattggcagtgctatccagcgacttcgctgtgaattagacattatgaataaatgtacttccctttgctgtaaacaatgtcaagaaacagaaataacaaccaaaaatgaaatattcagtttatccttatgtgggccgatggcagcttatgtgaatcctcatggatatgtgcatgagacacttactgtgtataaggcttgcaacttgaatctgataggccggccttctacagaacacagctggtttcctgggtatgcctggactgttgcccagtgtaagatctgtgcaagccatattggatggaagtttacggccaccaaaaaagacatgtcacactgaagatgaaataagtccagacaaagtaatactttgcttgtaaacagatgtgatagagataaagttagttatctaacaaattggttatattctaagatctgctttggaaattattgcctctgatacatacctaagtaaacataacattaatacctaagtaaacataacattacttggagggttgcagtttctaagtgaaactgtatttgaaacttttaagtatactttaggaaacaagcatgaacggcagtctagaataccagaaacatctacttgggtagcttggtgccattatcctgtggaatctgatatgtctggtagcatgtcattgatgggacatgaagacatctttggaaatgatgagattatttcgttaaaaaaaaaaaaaatcttaaattcctacaatgtgaaactgaaactaataatttgatcctgatgtatgggacagcgtatctgtaccagtgctctaaataacaaaagctagggtgacaagtacatgttccttttggaaagaagcaaggcaatgtatattaattattctaaaagggctttgttcctttccattttctttaacttctctgagatactgatttgtaaattttgaaaattagttaaaatatgcagttttttgagcccacgaatagttgtcatttcctttatgtgcctgttagtaaaaagtagtattgtgtatttgctcagtatctgaactataagcccatttatactgttccatacaaaagctatttttcaaaaattaatttgaaccaaaactactactatagggaaaagatgccaaaacatgtcccctcacccaggctaaacttgatactgtattattttgttcaatgtaaattgaagaaaatctgtaagtaagtaaaccttaagtgtgaaactaaacatgttctttgttcaaataatgtaaaatatctactcataattttaaagttctaaaaaggctgctttgccacctacctctttgcttatattcaagggtttagtgggtccttccttccacatttgtatgataactttcgttttattggtagtcctttgctactttaaaactaatcaggttaaatgtttactcaaatgtagtaatagtatgaggccaaaatacatgccttgaaggtggagtgaaatcagttgagtgtcacactgcatatttatgtaaatagagtaaatgaaaattcaagaatacttccattcaggatatgcccctgccttattttttctaaggtctacttttactactttaataattttgggtttgtgtgacttca

SEQ ID NO: 351970 - DNA, 2452 bp, Homo sapiens
agcctgcttggcgggtaaacagacatggccggcgaaggagatcagcaggacgctgcgcacaacatgggcaaccacctgccgctcctgcctgcagagagtgaggaagaagatgaaatggaagttgaagaccaggatagtaaagaagccaaaaaaccaaacatcataaattttgacaccagtctgccgacatcacatacatacctaggtgctgatatggaagaatttcatggcaggactttgcacgatgacgacagctgtcaggtgattccagttcttccacaagtgatgatgatcctgattcccggacagacattacctcttcagctttttcaccctcaagaagtcagtatggtgcggaatttaattcagaaagatagaacctttgctgttcttgcatacagcaatgtacaggaaagggaagcacagtttggaacaacagcagagatatatgcctatcgagaagaacaggattttggaattgagatagtgaaagtgaaagcaattggaagacaaaggttcaaagtccttgagctaagaacacagtcagatggaatccagcaagctaaagtgcaaattcttcccgaatgtgtgttgccttcaaccatgtctgcagttcaattagaatccctcaataagtgccagatatttccttcaaaacctgtctcaagagaagaccaatgttcatataaatggtggcagaaataccagaagagaaagtttcattgtgcaaatctaacttcatggcctcgctggctgtattccttatatgatgctgagaccttaatggacagaatcaagaaacagctacgtgaatgggatgaaaatctaaaagatgattctcttccttcaaatccaatagatttttcttacagagtagctgcttgtcttcctattgatgatgtattgagaattcagctccttaaaattggcagtgctatccagcgacttcgctgtgaattagacattatgaataaatgtacttccctttgctgtaaacaatgtcaagaaacagaaataacaaccaaaaatgaaatattcaggtaaggtctttattacgtttttaatatacttgccttatcagaattataatgaagactgtatttctgttttccataaactttcctccagtaccttaaagttacaaacatttagcaaatgaaatatagggaattagctcacttttgctaagaccatcttccagattgggtactcagagcaacaatgcatgtcagggattattcacaggtaatgagcatggtaaagtaaaacaactgagaaattcttttccccctaattcttgttgacaatctatatattagactgtcttcaattaggccctaacatagatgcttcagaaattacatttcagtcatcagttttgccatatagggccaaagtaggacatgcttctgaacacatactgatgctctgatataacagtgtttgaaaatcattttatgacaaatccatcagttgtaaatcaagaaggtaaggaaactgctttctgcaaaataatcaactgccccaaaatgaccacacaggaccttgtcattgcacttacactctcagactcctttagaagcatttgagttttatattctttacaatgtctgtcttgaggagggttttaaaaacaagtactatttcctttgggtcatcacagaaaacatttagacatttagacaaaacaggcctgtctgccagctgtacccccaccccattttcatactaagatcctggtattatataaaactgaaggattaaaaactgtatagctcatacctcatttcttggtgaacttcaataaaattctaagcatttaataaaattagacttctcgttttgacgtgttctccatgttgattctttgttttagtttatccttatgtgggccgatggcagcttatgtgaatcctcatggatatgtgcatgagacacttactgtgtataaggcttgcaacttgaatctgataggccggccttctacagaacacagctggtttcctgggtaatattatggtggtggttgcttttttttttctttttttaccttaattgggcagaaaaatccagagtcctaagcagagttgccacaatctttataataaaaagtagacagacaaatgagtaatttgctacaaaaattagccgggtatgggggcaggggtctgtactcccagctgctcgggaggctgaggcacaagaatctcttgaacctggaaggcaagagtgttgcagtgagccaagattgtgccactgcagtccagcctgggtgacagagtgagaatctgtctatttaaaaaaaaaaaaaaatttatttaaatgtccttcattccacaaatagctagaaacatctgttgcactttttgtatcttttatcattgaatgaaaggaagaaaaggttgacaactgcagttgtcctcagattactgtatccagttaaatccaaaat

SEQ ID NO: 351971 - DNA, 2483 bp, Homo sapiens
agcctgcttggcgggtaaacagacatggccggcgaaggagatcagcaggacgctgcgcacaacatgggcaaccacctgccgctcctgcctgtacctaggtgctgatatggaagaatttcatggcaggactttgcacgatgacgacagctgtcaggtgattccagttcttccacaagtgatgatgatcctgattcccggacagacattacctcttcagctttttcaccctcaagaagtcagtatggtgcggaatttaattcagaaagatagaacctttgctgttcttgcatacagcaatgtacaggaaagggaagcacagtttggaacaacagcagagatatatgcctatcgagaagaacaggattttggaattgagatagtgaaagtgaaagcaattggaagacaaaggttcaaagtccttgagctaagaacacagtcagatggaatccagcaagctaaagtgcaaattcttcccgaatgtgtgttgccttcaaccatgtctgcagttcaattagaatccctcaataagtgccagatatttccttcaaaacctgtctcaagagaagaccaatgttcatataaatggtggcagaaataccagaagagaaagtttcattgtgcaaatctaacttcatggcctcgctggctgtattccttatatgatgctgagaccttaatggacagaatcaagaaacagctacgtgaatgggatgaaaatctaaaagatgattctcttccttcaaatccaatagatttttcttacagagtagctgcttgtcttcctattgatgatgtattgagaattcagctccttaaaattggcagtgctatccagcgacttcgctgtgaattagacattatgaataaatgtacttccctttgctgtaaacaatgtcaagaaacagaaataacaaccaaaaatgaaatattcagtttatccttatgtgggccgatggcagcttatgtgaatcctcatggatatgtgcatgagacacttactgtgtataaggcttgcaacttgaatctgataggccggccttctacagaacacagctggtttcctgggtatgcctggactgttgcccagtgtaagatctgtgcaagccatattggatggaagtttacggccaccaaaaaagacatgtcacctcaaaaattttggggcttaacgcgatctgctctgttgcccacgatcccagacactgaagatgaaataagtccagacaaagtaatactttgcttgtaaacagatgtgatagagataaagttagttatctaacaaattggttatattctaagatctgctttggaaattattgcctctgatacatacctaagtaaacataacattaatacctaagtaaacataacattacttggagggttgcagtttctaagtgaaactgtatttgaaacttttaagtatactttaggaaacaagcatgaacggcagtctagaataccagaaacatctacttgggtagcttggtgccattatcctgtggaatctgatatgtctggtagcatgtcattgatgggacatgaagacatctttggaaatgatgagattatttcgttaaaaaaaaaaaaaatcttaaattcctacaatgtgaaactgaaactaataatttgatcctgatgtatgggacagcgtatctgtaccagtgctctaaataacaaaagctagggtgacaagtacatgttccttttggaaagaagcaaggcaatgtatattaattattctaaaagggctttgttcctttccattttctttaacttctctgagatactgatttgtaaattttgaaaattagttaaaatatgcagttttttgagcccacgaatagttgtcatttcctttatgtgcctgttagtaaaaagtagtattgtgtatttgctcagtatctgaactataagcccatttatactgttccatacaaaagctatttttcaaaaattaatttgaaccaaaactactactatagggaaaagatgccaaaacatgtcccctcacccaggctaaacttgatactgtattattttgttcaatgtaaattgaagaaaatctgtaagtaagtaaaccttaagtgtgaaactaaacatgttctttgttcaaataatgtaaaatatctactcataattttaaagttctaaaaaggctgctttgccacctacctctttgcttatattcaagggtttagtgggtccttccttccacatttgtatgataactttcgttttattggtagtcctttgctactttaaaactaatcaggttaaatgtttactcaaatgtagtaatagtatgaggccaaaatacatgccttgaaggtggagtgaaatcagttgagtgtcacactgcatatttatgtaaatagagtaaatgaaaattcaagaatacttccattcaggatatgcccctgccttattttttctaaggtctacttttactactttaataattttgggtttgtgtgacttca

SEQ ID NO: 351972 - DNA, 2441 bp, Homo sapiens
agcctgcttggcgggtaaacagacatggccggcgaaggagatcagcaggacgctgcgcacaacatgggcaaccacctgccgctcctgcctgcagagagtgaggaagaagatgaaatggaagttgaagaccaggatagtaaagaagccaaaaaaccaaacatcataaattttgacaccagtctgccgacatcacatacatatggtgcggaatttaattcagaaagatagaacctttgctgttcttgcatacagcaatgtacaggaaagggaagcacagtttggaacaacagcagagatatatgcctatcgagaagaacaggattttggaattgagatagtgaaagtgaaagcaattggaagacaaaggttcaaagtccttgagctaagaacacagtcagatggaatccagcaagctaaagtgcaaattcttcccgaatgtgtgttgccttcaaccatgtctgcagttcaattagaatccctcaataagtgccagatatttccttcaaaacctgtctcaagagaagaccaatgttcatataaatggtggcagaaataccagaagagaaagtttcattgtgcaaatctaacttcatggcctcgctggctgtattccttatatgatgctgagaccttaatggacagaatcaagaaacagctacgtgaatgggatgaaaatctaaaagatgattctcttccttcaaatccaatagatttttcttacagagtagctgcttgtcttcctattgatgatgtattgagaattcagctccttaaaattggcagtgctatccagcgacttcgctgtgaattagacattatgaataaatgtacttccctttgctgtaaacaatgtcaagaaacagaaataacaaccaaaaatgaaatattcagtttatccttatgtgggccgatggcagcttatgtgaatcctcatggatatgtgcatgagacacttactgtgtataaggcttgcaacttgaatctgataggccggccttctacagaacacagctggtttcctgggtatgcctggactgttgcccagtgtaagatctgtgcaagccatattggatggaagtttacggccaccaaaaaagacatgtcacctcaaaaattttggggcttaacgcgatctgctctgttgcccacgatcccagacactgaagatgaaataagtccagacaaagtaatactttgcttgtaaacagatgtgatagagataaagttagttatctaacaaattggttatattctaagatctgctttggaaattattgcctctgatacatacctaagtaaacataacattaatacctaagtaaacataacattacttggagggttgcagtttctaagtgaaactgtatttgaaacttttaagtatactttaggaaacaagcatgaacggcagtctagaataccagaaacatctacttgggtagcttggtgccattatcctgtggaatctgatatgtctggtagcatgtcattgatgggacatgaagacatctttggaaatgatgagattatttcgttaaaaaaaaaaaaaatcttaaattcctacaatgtgaaactgaaactaataatttgatcctgatgtatgggacagcgtatctgtaccagtgctctaaataacaaaagctagggtgacaagtacatgttccttttggaaagaagcaaggcaatgtatattaattattctaaaagggctttgttcctttccattttctttaacttctctgagatactgatttgtaaattttgaaaattagttaaaatatgcagttttttgagcccacgaatagttgtcatttcctttatgtgcctgttagtaaaaagtagtattgtgtatttgctcagtatctgaactataagcccatttatactgttccatacaaaagctatttttcaaaaattaatttgaaccaaaactactactatagggaaaagatgccaaaacatgtcccctcacccaggctaaacttgatactgtattattttgttcaatgtaaattgaagaaaatctgtaagtaagtaaaccttaagtgtgaaactaaacatgttctttgttcaaataatgtaaaatatctactcataattttaaagttctaaaaaggctgctttgccacctacctctttgcttatattcaagggtttagtgggtccttccttccacatttgtatgataactttcgttttattggtagtcctttgctactttaaaactaatcaggttaaatgtttactcaaatgtagtaatagtatgaggccaaaatacatgccttgaaggtggagtgaaatcagttgagtgtcacactgcatatttatgtaaatagagtaaatgaaaattcaagaatacttccattcaggatatgcccctgccttattttttctaaggtctacttttactactttaataattttgggtttgtgtgacttca

SEQ ID NO: 351973 - DNA, 1931 bp, Homo sapiens
caactggactcaatgacaacagcgaaatgtcagctaacaattgagtatgaactacgatcagcatcaagttacatggttgcgaatcgaacatcatggcactcattgagggattccatatatacagctaacaccgtcaagggtaatctcctgaagctacgatctgcagagtgtgcaggctttcgactggccgatctctctaaatttttcttacagagtagctgcttgtcttcctattgatgatgtattgagaattcagctccttaaaattggcagtgctatccagcgacttcgctgtgaattagacattatgaataaatgtacttccctttgctgtaaacaatgtcaagaaacagaaataacaaccaaaaatgaaatattcagtttatccttatgtgggccgatggcagcttatgtgaatcctcatggatatgtgcatgagacacttactgtgtataaggcttgcaacttgaatctgataggccggccttctacagaacacagctggtttcctgggtatgcctggactgttgcccagtgtaagatctgtgcaagccatattggatggaagtttacggccaccaaaaaagacatgtcacctcaaaaattttggggcttaacgcgatctgctctgttgcccacgatcccagacactgaagatgaaataagtccagacaaagtaatactttgcttgtaaacagatgtgatagagataaagttagttatctaacaaattggttatattctaagatctgctttggaaattattgcctctgatacatacctaagtaaacataacattaatacctaagtaaacataacattacttggagggttgcagtttctaagtgaaactgtatttgaaacttttaagtatactttaggaaacaagcatgaacggcagtctagaataccagaaacatctacttgggtagcttggtgccattatcctgtggaatctgatatgtctggtagcatgtcattgatgggacatgaagacatctttggaaatgatgagattatttcgttaaaaaaaaaaaaaatcttaaattcctacaatgtgaaactgaaactaataatttgatcctgatgtatgggacagcgtatctgtaccagtgctctaaataacaaaagctagggtgacaagtacatgttccttttggaaagaagcaaggcaatgtatattaattattctaaaagggctttgttcctttccattttctttaacttctctgagatactgatttgtaaattttgaaaattagttaaaatatgcagttttttgagcccacgaatagttgtcatttcctttatgtgcctgttagtaaaaagtagtattgtgtatttgctcagtatctgaactataagcccatttatactgttccatacaaaagctatttttcaaaaattaatttgaaccaaaactactactatagggaaaagatgccaaaacatgtcccctcacccaggctaaacttgatactgtattattttgttcaatgtaaattgaagaaaatctgtaagtaagtaaaccttaagtgtgaaactaaacatgttctttgttcaaataatgtaaaatatctactcataattttaaagttctaaaaaggctgctttgccacctacctctttgcttatattcaagggtttagtgggtccttccttccacatttgtatgataactttcgttttattggtagtcctttgctactttaaaactaatcaggttaaatgtttactcaaatgtagtaatagtatgaggccaaaatacatgccttgaaggtggagtgaaatcagttgagtgtcacactgcatatttatgtaaatagagtaaatgaaaattcaagaatacttccattcaggatatgcccctgccttattttttctaaggtctacttttactactttaataattttgggtttgtgtgacttca

SEQ ID NO: 351974 - DNA, 1151 bp, Homo sapiens
agcctgcttggcgggtaaacagacatggccggcgaaggagatcagcaggacgctgcgcacaacatgggcaaccacctgccgctcctgcctgcagagagtgaggaagaagatgaaatggaagttgaagaccaggatagtaaagaagccaaaaaaccaaacatcataaattttgacaccagtctgccgacatcacatacatacctaggtgctgatatggaagaatttcatggcaggactttgcacgatgacgacagctgtcaggtgattccagttcttccacaagtgatgatgatcctgattcccggacagacattacctcttcagctttttcaccctcaagaagtcagtatggtgcggaatttaattcagaaagatagaacctttgctgttcttgcatacagcaatgtacaggaaagggaagcacagtttggaacaacagcagagatatatgcctatcgagaagaacaggattttggaattgagatagtgaaagtgaaagcaattggaagacaaaggttcaaagtccttgagctaagaacacagtcagatgggtaagaaataacatataccttaatgctctttgaatgtttcctaatgaaatagttttcttgtactttttctgttctactgagccttcatattttgtaacttttaactagttgttctctttcccttctaaggtatagcccagtggtttccaaccttgctatgcatcagaatcacctgggaagcttttaaaactatagaagcttgagttccaacctcatctcccatctccagagagtgatgaggctgcagcatcttttaaaaatgattttcaggtgattctaatgtctctccaggtttgagaacaatcatgtaaatccaaagggaagtgttgtttgggatttggcttctttaggattgaaggcctctcggagcataagaggatagggagaccagaggcttgtgagctgttcgtgtgctcaccaggacagctgtggtttttgtagcattgctatgatgtttgaaagccacactggttacatctgcctactgctccagctgagctataaaagccatttatatttcgtgtccctctccagtgtgaattttatatcacccagaaatgctatttacataataaatgatcaataaaatacttgtagtct

SEQ ID NO: 351975 - DNA, 807 bp, Homo sapiens
agcgggcggggggactgatggcctggttggcggtgctgagaactgtcgggagcttcttgagaccgaggaccgaaatcccggctccaggcctcggggactgcggactgtggggaggctggccggagagagagggaaggacggggcctggcccccgggactccctgtgccttgcttggagctgacgccgacggtttattgcagggaactgacaagatcacattttgagaagaagttggaaagaatcccaagtggatgaactgaatatctggatgaggacaagatctgtggggagagactgtaagatagaatgagtccatttaagtcccaggacggtggaaactagctagtagattgcagccatgttgtggaagctgctgctgagatcccagtcctgcaggctgtgttctttcagaaagatgcgatcacctccaaaatacagacctttcttagcatgcttcacctatacaactgataaacagtcgagcaaagaaaatacaagaacagtggaaaagctctataaatgttcagttgacattaggaaaattcgtagattaaaaggatgggtacttttagaggatgaaacctatgttgaagaaattgcgaatattttacaagaactaggtgccgatgagactgctgtagccagtattttggaacgctgcccggaagcaattgtctgtagtccaaccgctgttaacacccagagaaaactctggcagttggtctgcaaaaatgaggaagagttaatcaagttaatagagcagtttccagaatctttctttactattaaagaccaagagaaccaga

SEQ ID NO: 351976 - DNA, 683 bp, Homo sapiens
agcgggcggggggactgatggcctggttggcggtgctgagaactgtcgggagcttcttgagaccgaggaccgaaatcccggctccaggcctcggggactgcggactgtggggaggctggccggagagagagggaaggacggggcctggcccccgggactccctgtgccttgcttggagctgacgccgacgggtgagtcgcccccttcctctgctcagctcagcctgccgggtttctctggaaaagcggaggccccacagtgtatgtgcggccttttgatcggtcctggagatcttccgtggaccctcgtttttccttgcttataaacgttggtcaatttgaaactggcagcagggcatatgtgttacgaaagaagaactttattgaaaccagtggtggtgtagagaagaccatactaaccataactgtgtattacagaagtgaatttcactccccaaaaatgcttaagaaacaagcatcctagaacagcccacattgtgatttaacaaacatttaccaaaagcattgctatatgtgggggcacagggctaagagcaggcaggactctggagccaacctgtggggtttgagtccaaattctgccggtttttagtctacggtttttttttttagctgagtaaccttgggcaagttcctttacctgcgtctggtttcctcatttta

SEQ ID NO: 351977 - DNA, 1325 bp, Homo sapiens
tctaatttaaatccactttatttccagacttcaacagctcaaatttgtaagtgtatgtgttctgaaagtcaacacccttatactaaaaacctttattttctttttttcagatagaatgagtccatttaagtcccaggacggtggaaactagctagtagattgcagccatgttgtggaagctgctgctgagatcccagtcctgcaggctgtgttctttcagaaagatgcgatcacctccaaaatacagacctttcttagcatgcttcacctatacaactgataaacagtcgagcaaagaaaatacaagaacagtggaaaagctctataaatgttcagttgacattaggaaaattcgtagattaaaaggatgggtacttttagaggatgaaacctatgttgaagaaattgcgaatattttacaagaactaggtgccgatgagactgctgtagccagtattttggaacgctgcccggaagcaattgtctgtagtccaaccgctgttaacacccagagaaaactctggcagttggtctgcaaaaatgaggaagagttaatcaagttaatagagcagtttccagaatctttctttactattaaagaccaagagaaccagaagctgaatgttcagttctttcaagagttgggactaaaaaatgtggtcattagcagacttttgacagctgcacctaatgtttttcataatcctgttgagaagaataagcaaatggtaagaattctccaagagagttatctagatgtaggtggctctgaggccaacatgaaagtttggctactaaaattgttaagccaaaacccatttattttgttaaattctcccacagctataaaggaaacactagaatttctccaggagcaaggtttcaccagctttgaaattctccagcttctatccaaactcaaaggatttctttttcaactttgcccaagaagtatacagaatagtatttccttctctaaaaatgcttttaaatgcacagatcatgacctgaagcaattagttttgaaatgtcctgcccttttatattattctgttccagttttagaagagagaatgcaaggattattgagagaaggaatttccatagctcagataagagagacgccaatggttcttgaattaacaccacagatagtacagtacaggataaggaaactgaattcctcaggctacagaataaaggatggacatctagcaaatctaaatggatcaaaaaaagagtttgaagctaattttggcaaaattcaggccaaaaaagtaaggccattatttaaccctgtggcaccattaaatgttgaagaatga

SEQ ID NO: 351978 - DNA, 1187 bp, Homo sapiens
ggtggaaacataggtattaaaaatcccccccttttttgaaatagcttaagttaacaccccaatccgcaagggttgtttttttaaaaaaggggtcacccccctaaaaaagacctttcttagcatgcttcacctatacaactgataaacagtcgagcaaagaaaatacaagaacagtggaaaagctctataaatgttcagttgacattaggaaaattcgtagattaaaaggatgggtacttttagaggatgaaacctatgttgaagaaattgcgaatattttacaagaactaggtgccgatgagactgctgtagccagtattttggaacgctgcccggaagcaattgtctgtagtccaaccgctgttaacacccagagaaaactctggcagttggtctgcaaaaatgaggaagagttaatcaagttaatagagcagtttccagaatctttctttactattaaagaccaagagaaccagaagctgaatgttcagttctttcaagagttgggactaaaaaatgtggtcattagcagacttttgacagctgcacctaatgtttttcataatcctgttgagaagaataagcaaatggtaagaattctccaagagagttatctagatgtaggtggctctgaggccaacatgaaagtttggctactaaaattgttaagccaaaacccatttattttgttaaattctcccacagctataaaggaaacactagaatttctccaggagcaaggtttcaccagctttgaaattctccagcttctatccaaactcaaaggatttctttttcaactttgcccaagaagtatacagaatagtatttccttctctaaaaatgcttttaaatgcacagatcatgacctgaagcaattagttttgaaatgtcctgcccttttatattattctgttccagttttagaagagagaatgcaaggattattgagagaaggaatttccatagctcagataagagagacgccaatggttcttgaattaacaccacagatagtacagtacaggataaggaaactgaattcctcaggctacagaataaaggatggacatctagcaaatctaaatggatcaaaaaaagagtttgaagctaattttggcaaaattcaggccaaaaaagtaaggccattatttaaccctgtggcaccattaaatgttgaagaatga

SEQ ID NO: 351979 - DNA, 1681 bp, Homo sapiens
agcgggcggggggactgatggcctggttggcggtgctgagaactgtcgggagcttcttgagaccgaggaccgaaatcccggctccaggcctcggggactgcggactgtggggaggctggccggagagagagggaaggacggggcctggcccccgggactccctgtgccttgcttggagctgacgccgacggtttattgcagggaactgacaagatcacattttgagaagaagttggaaagaatcccaagtggatgaactgaatatctggatgaggacaagatctgtggggagagactgtaagatagaatgagtccatttaagtcccaggacggtggaaactagctagtagattgcagccatgttgtggaagctgctgctgagatcccagtcctgcaggctgtgttctttcagaaagatgcgatcacctccaaaatacagacctttcttagcatgcttcacctatacaactgataaacagtcgagcaaagaaaatacaagaacagtggaaaagctctataaatgttcagttgacattaggaaaattcgtagattaaaaggatgggtacttttagaggatgaaacctatgttgaagaaattgcgaatattttacaagaactaggtgccgatgagactgctgtagccagtattttggaacgctgcccggaagcaattgtctgtagtccaaccgctgttaacacccagagaaaactctggcagttggtctgcaaaaatgaggaagagttaatcaagttaatagagcagtttccagaatctttctttactattaaagaccaagagaaccagaagctgaatgttcagttctttcaagagttgggactaaaaaatgtggtcattagcagacttttgacagctgcacctaatgtttttcataatcctgttgagaagaataagcaaatggtaagaattctccaagagagttatctagatgtaggtggctctgaggccaacatgaaagtttggctactaaaattgttaagccaaaacccatttattttgttaaattctcccacagctataaaggaaacactagaatttctccaggagcaaggtttcaccagctttgaaattctccagcttctatccaaactcaaaggatttctttttcaactttgcccaagaagtatacagaatagtatttccttctctaaaaatgcttttaaatgcacagatcatgacctgaagcaattagttttgaaatgtcctgcccttttatattattctgttccagttttagaagagagaatgcaaggattattgagagaaggaatttccatagctcagataagagagacgccaatggttcttgaattaacaccacagatagtacagtacaggataaggaaactgaattcctcaggctacagaataaaggatggacatctagcaaatctaaatggatcaaaaaaagagtttgaagctaattttggcaaaattcaggccaaaaaagtaaggccattatttaaccctgtggcaccattaaatgttgaagaatgacatactgactgttgttgcttctttctagcagtgcagggtgaaactaactagcaaagacaaaaattcaggcagtttgtagacaccagtaattttaagaacctgcttagcttctgtgttgtatttaagttatctctaaatagataaattctgactcatgtgccata

SEQ ID NO: 351980 - DNA, 1517 bp, Homo sapiens
agcgggcggggggactgatggcctggttggcggtgctgagaactgtcgggagcttcttgagaccgaggaccgaaatcccggctccaggcctcggggactgcggactgtggggaggctggccggagagagagggaaggacggggcctggcccccgggactccctgtgccttgcttggagctgacgccgacggtttattgcagggaactgacaagatcacattttgagaagaagttggaaagaatcccaagtggatgaactgaatatctggatgaggacaagatctgtggggagagactgtaagatagaatgagtccatttaagtcccaggacggtggaaactagctagtagattgcagccatgttgtggaagctgctgctgagatcccagtcctgcaggctgtgttctttcagaaagatgcgatcacctccaaaatacagacctttcttagcatgcttcacctatacaactgataaacagtcgagcaaagaaaatacaagaacagtggaaaagctctataaatgttcagttgacattaggaaaattcgtagattaaaaggatgggtacttttagaggatgaaacctatgttgaagaaattgcgaatattttacaagaactaggtgccgatgagactgctgtagccagtattttggaacgctgcccggaagcaattgtctgtagtccaaccgctgttaacacccagagaaaactctggcagttggtctgcaaaaatgaggaagagttaatcaagttaatagagcagtttccagaatctttctttactattaaagaccaagagaaccagaagctgaatgttcagttctttcaagagttgggactaaaaaatgtggtcattagcagacttttgacagctgcacctaatgtttttcataatcctgttgagaagaataagcaaatggtaagaattctccaagagagttatctagatgtaggtggctctgaggccaacatgaaagtttggctactaaaattgttaagccaaaacccatttattttgttaaattctcccacagctataaaggaaacactagaatttctccaggagcaaggtttcaccagctttgaaattctccagcttctatccaaactcaaaggatttctttttcaactttgcccaagaagtatacagaatagtatttccttctctaaaaatgcttttaaatgcacagatcatgacctgaagcaattagttttgaaatgtcctgcccttttatattattctgttccagttttagaagagagaatgcaaggattattgagagaaggaatttccatagctcagataagagagacgccaatggttcttgaattaacaccacagatagtacagtacaggataaggaaactgaattcctcaggctacagaataaaggatggacatctagcaaatctaaatggatcaaaaaaagagtttgaagctaattttggcaaaattcaggccaaaaaagtaaggccattatttaaccctgtggcaccattaaatgttgaagaatga

SEQ ID NO: 351981 - DNA, 1923 bp, Homo sapiens
agcgggcggggggactgatggcctggttggcggtgctgagaactgtcgggagcttcttgagaccgaggaccgaaatcccggctccaggcctcggggactgcggactgtggggaggctggccggagagagagggaaggacggggcctggcccccgggactccctgtgccttgcttggagctgacgccgacggtttattgcagggaactgacaagatcacattttgagaagaagttggaaagaatcccaagtggatgaactgaatatctggatgaggacaagatctgtggggagagactgtaagatagaatgagtccatttaagtcccaggacggtggaaactagctagtagattgcagccatgttgtggaagctgctgctgagatcccagtcctgcaggctgtgttctttcagaaagatgcgatcacctccaaaatacagacctttcttagcatgcttcacctatacaactgataaacagtcgagcaaagaaaatacaagaacagtggaaaagctctataaatgttcagttgacattaggaaaattcgtagattaaaaggatgggtacttttagaggatgaaacctatgttgaagaaattgcgaatattttacaagaactaggtgccgatgagactgctgtagccagtattttggaacgctgcccggaagcaattgtctgtagtccaaccgctgttaacacccagagaaaactctggcagttggtctgcaaaaatgaggaagagttaatcaagttaatagagcagtttccagaatctttctttactattaaagaccaagagaaccagaagctgaatgttcagttctttcaagagttgggactaaaaaatgtggtcattagcagacttttgacagctgcacctaatgtttttcataatcctgttgagaagaataagcaaatggtaagaattctccaagagagttatctagatgtaggtggctctgaggccaacatgaaagtttggctactaaaattgttaagccaaaacccatttattttgttaaattctcccacagctataaaggaaacactagaatttctccaggagcaaggtttcaccagctttgaaattctccagcttctatccaaactcaaaggatttctttttcaactttgcccaagaagtatacagaatagtatttccttctctaaaaatgcttttaaatgcacagatcatgacctgaagcaattagttttgaaatgtcctgcccttttatattattctgttccagttttagaagagagaatgcaaggattattgagagaaggaatttccatagctcagataagagagacgccaatggttcttgaattaacaccacagatagtacagtacaggataaggaaactgaattcctcaggctacagaataaaggatggacatctagcaaatctaaatggatcaaaaaaagagtttgaagctaattttggcaaaattcaggccaaaaaagtaaggccattatttaaccctgtggcaccattaaatgttgaagaatgaaaaaaaaaaaaaaaaaaaaaaaaaaaaaaaaaaaaaaaaaaaaaaaaaaaaaaaaaaaaaaggggggggggggggaaaaaattcggggggggggcatggacttttttggaagggggggcaaggaggggtcttattaaaagcgagaggaaggggggcgtttaataaaaaacacggtgggggagaggggaggaaaaaactggggtctatgtgtagaatgtgtgaggaagaagaacgcacatctggggggggggggagaacaatgaggggggacccacatgcagctagagatattataaccgcccggagaggtataataaaacagtggggagcgggtatgggggcgcacacaagcgctgtatatgcgggggtcaaaagaattttgccaagaattttgttagaaaattgc

SEQ ID NO: 351982 - DNA, 911 bp, Homo sapiens
tgaggtgtaataatagagatgagacactgaacatacttaactggactagttgaattacatttatttacgtatttttttcttagctgaaaatactccttgatcaagttgaagaagcagtggcagattttgatgaatgtattaggttaagacctgagtctgctctggcacaagcacagaaatgttttgcattgtaccgccaggcatatacgggaaacaactcttcacaaatccaagcagctatgaaaggttttgaagaggtcataaagaaatttccaaggtgtgccgaaggctatgcactatacgcccaggtaaatgttttttcaggttttttaaaaataactgcatacatatgccaaatctcagtatggaaatcagaaaacagtgctatcatggttgcagcttctttggaagcaggtggctttgttcctgattgattctcatggcccctggttggtcccgaatcacctcagaagaggctcctttgttacacaatttggaaatcatggccctaaactcaatatggggaagcttaaggcgagaatttccctcctgtcttcatttggattggttttgcaaaaagtaattaccttaggaaaatttaccgtatgcaattggtggagaaaatatccacggaaaggcttttctttctatctggtcactgcctttttatatggctaggttgttgtaacggtttattttaatttatctttgctttatctaaaattcctgaaactctcttggtttaggattgaagctatggaaagcaggatttaaatctgaatttttttattgtagtctgaaattcttgaaaacttcttagttttaaatcatccatttaaatgaaaatgattagcttcttgtagtgacggtcatacattttcccctcaaataaaagatctctgaatgactca

SEQ ID NO: 351983 - DNA, 928 bp, Homo sapiens
  misc_feature (883)..(883): n is a, c, g, or t
acagaggttcaagaggtgccaacgtggctataactggaaaactggatccgaaatcgaccagtaaactgggtagctcggtctacgccccgcccaccacccttgctagccaatagccttcacaactcttctgccactcccgcccattccagtgctgtgccgctgctttttcttccactcggatctcttgagcgcccttagcccgctgtatacgcgcccctcctcggcttcagtaggcaagagggccatctgcccttctttcctgaaggtagaggggacaacaccagctacgacggggactccagaagtccatctcccgaacagcagcggggcgaaaagaaagaaaaagggtttccgaagactcctactcacacccacgctttcccttaacccggaagtgatttccgcccctcctctccctcttcggttgatactggaggagaaggacggccaggtctggcccggcatgccctgggcttccggtgacctctggcccttttctgtcgtccgctctctctgcctagcgtgctcgctcgctcattgctttccttccctccctcggtcttccttcgcacgctgtttggtgattgtggcgctcgcgacagacagggaggcggtggcagaggacacttgtcatggccgcctctaaacctgtggaggcacggacaccctgaaggtcccggtgctcacttggacatgaactctcttgatagagcccaagcagccaagaataaaggcaataaatattttaaagcaggaaaatatgaacaagctattcagtgctatactgaggctattagcttgtgccctacagagaagaatgttgacctttctacattttatcaaaacagagctgctgcctttgaacagttgcaaaaatgggaangaagttggcaccaagacttttacaaaaagctttttgaaccttaat

SEQ ID NO: 351984 - DNA, 3528 bp, Homo sapiens
ggacgcgtgggtcgacccacgcgtcggcttgtgccctacagagaagaatgttgacctttctacattttatcaaaacagagctgctgcctttgaacagttgcaaaaatggaaagaagtggcacaagactgtacaaaagctgttgaacttaatcccaaatatgtgaaagctctctttagacgtgcaaaagcccatgagaagctagacaataagaaggaatgtttagaagatgtcactgctgtgtgtatattagaagggttccaaaatcaacaaagcatgctgttagccgataaagttcttaaactccttggaaaagagaaagccaaagaaaaatataagaatcgtgaacctctgatgccatctccacagtttatcaaatcttacttcagttctttcacggatgatatcatttcccagcccatgcttaaaggagagaaatctgatgaagataaagacaaggaaggggaggctttagaagtgaaagaaaattctggatacttaaaggccaaacagtatatggaagaagaaaactacgataaaatcataagtgaatgctcaaaagaaatagatgctgaaggcaaatacatggcagaagcattgctactacgagctaccttctacctgcttattggcaatgccaatgcagccaaaccagatttagataaagtcatcagtttgaaagaagctaatgtgaagcttcgagcaaatgctctcatcaaaagaggcagcatgtacatgcaacagcagcagcctttgctgtccactcaagattttaacatggctgctgacatcgatcctcagaatgcagatgtttatcaccaccgaggacagctgaaaatactccttgatcaagttgaagaagcagtggcagattttgatgaatgtattaggttaagacctgagtctgctctggcacaagcacagaaatgttttgcattgtaccgccaggcatatacgggaaacaactcttcacaaatccaagcagctatgaaaggttttgaagaggtcataaagaaatttccaaggtgtgccgaaggctatgcactatacgcccaggcattaacagatcaacaacagtttggtaaagctgatgaaatgtatgataaatgtattgatttggaaccagataatgctacaacatatgttcataaaggtttacttcaacttcagtggaagcaagatctggatagaggtttggaacttatcagcaaggctattgaaattgacaataaatgtgattttgcctatgaaaccatgggaactattgaagtacaaagaggaaacatggagaaagccattgacatgttcaacaaagctattaacctggccaaatcggaaatggagatggcccatctgtattcactttgcgatgccgcccatgcccagacagaagttgcaaagaaatacggattaaaaccaccaacattataaaacagggggaaagcagactgaccctctttttaaaagtttaccccctcttcaactgaaccctaaagacactgtcatgaactgtgttgaatggtggaaatcagtatttctgtttgtggtgttgttatttgttacatctgtttcatgtctaggtgttgtgggtgtggctgttgaaggaagtttgcagtcttgcagcttttattccctgtgcaacaaaagattagaacatgttaaagggatttttaaataaagttgcaaagagtacaaatgataattggccatgcaaataaaaactgatttgttgattttttttttaaggggggttggcagttgattatgttctggatgattccgtctatatatgtgtgaataatgtaagtattttacagcatgttgatttttaaattaacgtagtaaatgctgtaaaatagatttatattcagttaaccgctttcagttgattttttgaaagaaacaaaggttaaatgggggattaaagtaaaattgagagaccctttaaaccattgtcagcatgcacaatgcctctgattctgcagttttagaaacttggtggcacttattaatcctcttggcccctttccactctaatggatagtgtacattcttcttaaagtccacaacagcagattttcttgcagtaaattatgcagatgcaaaatattctaattgatatatgtgttggaagactgagtattgatgggggagtggaccagacaaagaggtaagatgaaacagtagtgtgtttataattgtctgtgactattttctataataattagtactatttaatggtgagcttttaaaaatgtaggatagagggtacagtggcactgtatatactatttatagtctcagctactagggaggctgaggcaagaggcttgagaccaggagctcgaggctgtaatgtgccatgatgattgcacctgcgaatagccactgcactccagcctgggcaatatagcaagaccccatcctttaaaaaattttagaacttttttaaaatcaaagtgcagattgcttgtatgtaaaacccaaataaaggtagagtaagtgtgatatatgggagtattaaaatagcttaaaatttctcgtgaaggacatgtggctaaagggtcaaaaaggatgtaagacttggagccagagcatagtatttcctgaaataacaagtttagtgctttaactatggctacatgtgcttaaggaattttgagccacttatttttgaagatgctgaggacatgtagagtgctttttgtagtgagctaaccttgatctctaaggactaactacccaggtccaggtcttcactaggggtactgacagtgtttaagctttactccacctccttacttagaaatcactttacgatttatttccattttccacttttatagaccatccttttgcttatatgctagatttttctggtgagggaagggttgtgttcttcaggggtcttttgttttgaaatactcaggatggggagaggtttatttaagaacgaattataattatggtttacactgttgggagtaaaggagcatttttacaccccttaagggtgcttaattctgttgaaaccaaaaagatttgtctacaaatgctatcttttttagaaactattagaaatgactccctttcaaagtcaatctttggaaaatattgaggaggtcactaattagttggtgcagttaatataattcaagatgatttggatgatgggaagtttgagaccgctgcattttgtttttaaattatgcaccttctgataacccccaaatacagaaatgttctacatctctgaatgacctctgactttaaaaaagtttttatttgcatggctgtatttacattaacactgacattttcttctactcttctcccttctttcatcttggggttgggtagagaaacacaaaggaaactgaagcatgtgccattctatactgtcattccaaattctcatggactattgcctgttgtgaaaatgtttgaaactgcactgaaagctgcatctgtctgtatctttcttttgtaaatgacctcacatgtaaattcaccaaataaatattacattc

SEQ ID NO: 351985 - DNA, 3664 bp, Homo sapiens
ttactgtggtctgagtctgtgaatgttgattagtgtttgataattgtttcctctcatttcagaactctcttgatagagcccaagcagccaagaataaaggcaataaatattttaaagcaggaaaatatgaacaagctattcagtgctatactgaggctattagcttgtgccctacagagaagaatgttgacctttctacattttatcaaaacagagctgctgcctttgaacagttgcaaaaatggaaagaagtggcacaagactgtacaaaagctgttgaacttaatcccaaatatgtgaaagctctctttagacgtgcaaaagcccatgagaagctagacaataagaaggaatgtttagaagatgtcactgctgtgtgtatattagaagggttccaaaatcaacaaagcatgctgttagccgataaagttcttaaactccttggaaaagagaaagccaaagaaaaatataagaatcgtgaacctctgatgccatctccacagtttatcaaatcttacttcagttctttcacggatgatatcatttcccagcccatgcttaaaggagagaaatctgatgaagataaagacaaggaaggggaggctttagaagtgaaagaaaattctggatacttaaaggccaaacagtatatggaagaagaaaactacgataaaatcataagtgaatgctcaaaagaaatagatgctgaaggcaaatacatggcagaagcattgctactacgagctaccttctacctgcttattggcaatgccaatgcagccaaaccagatttagataaagtcatcagtttgaaagaagctaatgtgaagcttcgagcaaatgctctcatcaaaagaggcagcatgtacatgcaacagcagcagcctttgctgtccactcaagattttaacatggctgctgacatcgatcctcagaatgcagatgtttatcaccaccgaggacagctgaaaatactccttgatcaagttgaagaagcagtggcagattttgatgaatgtattaggttaagacctgagtctgctctggcacaagcacagaaatgttttgcattgtaccgccaggcatatacgggaaacaactcttcacaaatccaagcagctatgaaaggttttgaagaggtcataaagaaatttccaaggtgtgccgaaggctatgcactatacgcccaggcattaacagatcaacaacagtttggtaaagctgatgaaatgtatgataaatgtattgatttggaaccagataatgctacaacatatgttcataaaggtttacttcaacttcagtggaagcaagatctggatagaggtttggaacttatcagcaaggctattgaaattgacaataaatgtgattttgcctatgaaaccatgggaactattgaagtacaaagaggaaacatggagaaagccattgacatgttcaacaaagctattaacctggccaaatcggaaatggagatggcccatctgtattcactttgcgatgccgcccatgcccagacagaagttgcaaagaaatacggattaaaaccaccaacattataaaacagggggaaagcagactgaccctctttttaaaagtttaccccctcttcaactgaaccctaaagacactgtcatgaactgtgttgaatggtggaaatcagtatttctgtttgtggtgttgttatttgttacatctgtttcatgtctaggtgttgtgggtgtggctgttgaaggaagtttgcagtcttgcagcttttattccctgtgcaacaaaagattagaacatgttaaagggatttttaaataaagttgcaaagagtacaaatgataattggccatgcaaataaaaactgatttgttgattttttttttaaggggggttggcagttgattatgttctggatgattccgtctatatatgtgtgaataatgtaagtattttacagcatgttgatttttaaattaacgtagtaaatgctgtaaaatagatttatattcagttaaccgctttcagttgattttttgaaagaaacaaaggttaaatgggggattaaagtaaaattgagagaccctttaaaccattgtcagcatgcacaatgcctctgattctgcagttttagaaacttggtggcacttattaatcctcttggcccctttccactctaatggatagtgtacattcttcttaaagtccacaacagcagattttcttgcagtaaattatgcagatgcaaaatattctaattgatatatgtgttggaagactgagtattgatgggggagtggaccagacaaagaggtaagatgaaacagtagtgtgtttataattgtctgtgactattttctataataattagtactatttaatggtgagcttttaaaaatgtaggatagagggtacagtggcactgtatatactatttatagtctcagctactagggaggctgaggcaagaggcttgagaccaggagctcgaggctgtaatgtgccatgatgattgcacctgcgaatagccactgcactccagcctgggcaatatagcaagaccccatcctttaaaaaattttagaacttttttaaaatcaaagtgcagattgcttgtatgtaaaacccaaataaaggtagagtaagtgtgatatatgggagtattaaaatagcttaaaatttctcgtgaaggacatgtggctaaagggtcaaaaaggatgtaagacttggagccagagcatagtatttcctgaaataacaagtttagtgctttaactatggctacatgtgcttaaggaattttgagccacttatttttgaagatgctgaggacatgtagagtgctttttgtagtgagctaaccttgatctctaaggactaactacccaggtccaggtcttcactaggggtactgacagtgtttaagctttactccacctccttacttagaaatcactttacgatttatttccattttccacttttatagaccatccttttgcttatatgctagatttttctggtgagggaagggttgtgttcttcaggggtcttttgttttgaaatactcaggatggggagaggtttatttaagaacgaattataattatggtttacactgttgggagtaaaggagcatttttacaccccttaagggtgcttaattctgttgaaaccaaaaagatttgtctacaaatgctatcttttttagaaactattagaaatgactccctttcaaagtcaatctttggaaaatattgaggaggtcactaattagttggtgcagttaatataattcaagatgatttggatgatgggaagtttgagaccgctgcattttgtttttaaattatgcaccttctgataacccccaaatacagaaatgttctacatctctgaatgacctctgactttaaaaaagtttttatttgcatggctgtatttacattaacactgacattttcttctactcttctcccttctttcatcttggggttgggtagagaaacacaaaggaaactgaagcatgtgccattctatactgtcattccaaattctcatggactattgcctgttgtgaaaatgtttgaaactgcactgaaagctgcatctgtctgtatctttcttttgtaaatgacctcacatgtaaattcaccaaataaatattacattc

SEQ ID NO: 351986 - DNA, 2896 bp, Homo sapiens
gcggccgcctactactactaaattcgcggccgcgtcgacgtttgaaagaagctaatgtgaagcttcgagcaaatgctctcatcaaaagaggcagcatgtacatgcaacagcagcagcctttgctgtccactcaagattttaacatggctgctgacatcgatcctcagaatgcagatgtttatcaccaccgaggacagctgaaaatactccttgatcaagttgaagaagcagtggcagattttgatgaatgtattaggttaagacctgagtctgctctggcacaagcacagaaatgttttgcattgtaccgccaggcatatacgggaaacaactcttcacaaatccaagcagctatgaaaggttttgaagaggtcataaagaaatttccaaggtgtgccgaaggctatgcactatacgcccaggcattaacagatcaacaacagtttggtaaagctgatgaaatgtatgataaatgtattgatttggaaccagataatgctacaacatatgttcataaaggtttacttcaacttcagtggaagcaagatctggatagaggtttggaacttatcagcaaggctattgaaattgacaataaatgtgattttgcctatgaaaccatgggaactattgaagtacaaagaggaaacatggagaaagccattgacatgttcaacaaagctattaacctggccaaatcggaaatggagatggcccatctgtattcactttgcgatgccgcccatgcccagacagaagttgcaaagaaatacggattaaaaccaccaacattataaaacagggggaaagcagactgaccctctttttaaaagtttaccccctcttcaactgaaccctaaagacactgtcatgaactgtgttgaatggtggaaatcagtatttctgtttgtggtgttgttatttgttacatctgtttcatgtctaggtgttgtgggtgtggctgttgaaggaagtttgcagtcttgcagcttttattccctgtgcaacaaaagattagaacatgttaaagggatttttaaataaagttgcaaagagtacaaatgataattggccatgcaaataaaaactgatttgttgattttttttttaaggggggttggcagttgattatgttctggatgattccgtctatatatgtgtgaataatgtaagtattttacagcatgttgatttttaaattaacgtagtaaatgctgtaaaatagatttatattcagttaaccgctttcagttgattttttgaaagaaacaaaggttaaatgggggattaaagtaaaattgagagaccctttaaaccattgtcagcatgcacaatgcctctgattctgcagttttagaaacttggtggcacttattaatcctcttggcccctttccactctaatggatagtgtacattcttcttaaagtccacaacagcagattttcttgcagtaaattatgcagatgcaaaatattctaattgatatatgtgttggaagactgagtattgatgggggagtggaccagacaaagaggtaagatgaaacagtagtgtgtttataattgtctgtgactattttctataataattagtactatttaatggtgagcttttaaaaatgtaggatagagggtacagtggcactgtatatactatttatagtctcagctactagggaggctgaggcaagaggcttgagaccaggagctcgaggctgtaatgtgccatgatgattgcacctgcgaatagccactgcactccagcctgggcaatatagcaagaccccatcctttaaaaaattttagaacttttttaaaatcaaagtgcagattgcttgtatgtaaaacccaaataaaggtagagtaagtgtgatatatgggagtattaaaatagcttaaaatttctcgtgaaggacatgtggctaaagggtcaaaaaggatgtaagacttggagccagagcatagtatttcctgaaataacaagtttagtgctttaactatggctacatgtgcttaaggaattttgagccacttatttttgaagatgctgaggacatgtagagtgctttttgtagtgagctaaccttgatctctaaggactaactacccaggtccaggtcttcactaggggtactgacagtgtttaagctttactccacctccttacttagaaatcactttacgatttatttccattttccacttttatagaccatccttttgcttatatgctagatttttctggtgagggaagggttgtgttcttcaggggtcttttgttttgaaatactcaggatggggagaggtttatttaagaacgaattataattatggtttacactgttgggagtaaaggagcatttttacaccccttaagggtgcttaattctgttgaaaccaaaaagatttgtctacaaatgctatcttttttagaaactattagaaatgactccctttcaaagtcaatctttggaaaatattgaggaggtcactaattagttggtgcagttaatataattcaagatgatttggatgatgggaagtttgagaccgctgcattttgtttttaaattatgcaccttctgataacccccaaatacagaaatgttctacatctctgaatgacctctgactttaaaaaagtttttatttgcatggctgtatttacattaacactgacattttcttctactcttctcccttctttcatcttggggttgggtagagaaacacaaaggaaactgaagcatgtgccattctatactgtcattccaaattctcatggactattgcctgttgtgaaaatgtttgaaactgcactgaaagctgcatctgtctgtatctttcttttgtaaatgacctcacatgtaaattcaccaaataaatattacattc

SEQ ID NO: 351987 - DNA, 4504 bp, Homo sapiens
acagaggttcaagaggtgccaacgtggctataactggaaaactggatccgaaatcgaccagtaaactgggtagctcggtctacgccccgcccaccacccttgctagccaatagccttcacaactcttctgccactcccgcccattccagtgctgtgccgctgctttttcttccactcggatctcttgagcgcccttagcccgctgtatacgcgcccctcctcggcttcagtaggcaagagggccatctgcccttctttcctgaaggtagaggggacaacaccagctacgacggggactccagaagtccatctcccgaacagcagcggggcgaaaagaaagaaaaagggtttccgaagactcctactcacacccacgctttcccttaacccggaagtgatttccgcccctcctctccctcttcggttgatactggaggagaaggacggccaggtctggcccggcatgccctgggcttccggtgacctctggcccttttctgtcgtccgctctctctgcctagcgtgctcgctcgctcattgctttccttccctccctcggtcttccttcgcacgctgtttggtgattgtggcgctcgcgacagacagggaggcggtggcagaggacacttgtcatggccgcctctaaacctgtggaggcagcggtggtcgcagccgctgtaccgagctccgggagtggggtgggcggcggcgggactgcgggcccgggcacgggggggctgccgcgatggcagctggctctggcggtcggggcacccctgctgctgggcgcgggtgccatatacctgtggagtcggcagcaacggcgccgggaggccagaggccggggcgacgccagcggcctgaagcgcaacagcgaacggaagaccccggagggcagggccagtccggccccgggcagcggacaccctgaaggtcccggtgctcacttggacatgaactctcttgatagagcccaagcagccaagaataaaggcaataaatattttaaagcaggaaaatatgaacaagctattcagtgctatactgaggctattagcttgtgccctacagagaagaatgttgacctttctacattttatcaaaacagagctgctgcctttgaacagttgcaaaaatggaaagaagtggcacaagactgtacaaaagctgttgaacttaatcccaaatatgtgaaagctctctttagacgtgcaaaagcccatgagaagctagacaataagaaggaatgtttagaagatgtcactgctgtgtgtatattagaagggttccaaaatcaacaaagcatgctgttagccgataaagttcttaaactccttggaaaagagaaagccaaagaaaaatataagaatcgtgaacctctgatgccatctccacagtttatcaaatcttacttcagttctttcacggatgatatcatttcccagcccatgcttaaaggagagaaatctgatgaagataaagacaaggaaggggaggctttagaagtgaaagaaaattctggatacttaaaggccaaacagtatatggaagaagaaaactacgataaaatcataagtgaatgctcaaaagaaatagatgctgaaggcaaatacatggcagaagcattgctactacgagctaccttctacctgcttattggcaatgccaatgcagccaaaccagatttagataaagtcatcagtttgaaagaagctaatgtgaagcttcgagcaaatgctctcatcaaaagaggcagcatgtacatgcaacagcagcagcctttgctgtccactcaagattttaacatggctgctgacatcgatcctcagaatgcagatgtttatcaccaccgaggacagctgaaaatactccttgatcaagttgaagaagcagtggcagattttgatgaatgtattaggttaagacctgagtctgctctggcacaagcacagaaatgttttgcattgtaccgccaggcatatacgggaaacaactcttcacaaatccaagcagctatgaaaggttttgaagaggtcataaagaaatttccaaggtgtgccgaaggctatgcactatacgcccaggcattaacagatcaacaacagtttggtaaagctgatgaaatgtatgataaatgtattgatttggaaccagataatgctacaacatatgttcataaaggtttacttcaacttcagtggaagcaagatctggatagaggtttggaacttatcagcaaggctattgaaattgacaataaatgtgattttgcctatgaaaccatgggaactattgaagtacaaagaggaaacatggagaaagccattgacatgttcaacaaagctattaacctggccaaatcggaaatggagatggcccatctgtattcactttgcgatgccgcccatgcccagacagaagttgcaaagaaatacggattaaaaccaccaacattataaaacagggggaaagcagactgaccctctttttaaaagtttaccccctcttcaactgaaccctaaagacactgtcatgaactgtgttgaatggtggaaatcagtatttctgtttgtggtgttgttatttgttacatctgtttcatgtctaggtgttgtgggtgtggctgttgaaggaagtttgcagtcttgcagcttttattccctgtgcaacaaaagattagaacatgttaaagggatttttaaataaagttgcaaagagtacaaatgataattggccatgcaaataaaaactgatttgttgattttttttttaaggggggttggcagttgattatgttctggatgattccgtctatatatgtgtgaataatgtaagtattttacagcatgttgatttttaaattaacgtagtaaatgctgtaaaatagatttatattcagttaaccgctttcagttgattttttgaaagaaacaaaggttaaatgggggattaaagtaaaattgagagaccctttaaaccattgtcagcatgcacaatgcctctgattctgcagttttagaaacttggtggcacttattaatcctcttggcccctttccactctaatggatagtgtacattcttcttaaagtccacaacagcagattttcttgcagtaaattatgcagatgcaaaatattctaattgatatatgtgttggaagactgagtattgatgggggagtggaccagacaaagaggtaagatgaaacagtagtgtgtttataattgtctgtgactattttctataataattagtactatttaatggtgagcttttaaaaatgtaggatagagggtacagtggcactgtatatactatttatagtctcagctactagggaggctgaggcaagaggcttgagaccaggagctcgaggctgtaatgtgccatgatgattgcacctgcgaatagccactgcactccagcctgggcaatatagcaagaccccatcctttaaaaaattttagaacttttttaaaatcaaagtgcagattgcttgtatgtaaaacccaaataaaggtagagtaagtgtgatatatgggagtattaaaatagcttaaaatttctcgtgaaggacatgtggctaaagggtcaaatgctttaactatggctacatgtgcttaaggaattttgagccacttatttttgaagatgctgaggacatgtagagtgctttttgtagtgagctaaccttgatctctaaggactaactacccaggtccaggtcttcactaggggtactgacagtgtttaagctttactccacctccttacttagaaatcactttacgatttatttccattttccacttttatagaccatccttttgcttatatgctagatttttctggtgagggaagggttgtgttcttcaggggtcttttgttttgaaatactcaggatggggagaggtttatttaagaacgaattataattatggtttacactgttgggagtaaaggagcatttttacaccccttaagggtgcttaattctgttgaaaccaaaaagatttgtctacaaatgctatcttttttagaaactattagaaatgactccctttcaaagtcaatctttggaaaatattgaggaggtcactaattagttggtgcagttaatataattcaagatgatttggatgatgggaagtttgagaccgctgcattttgtttttaaattatgcaccttctgataacccccaaatacagaaatgttctacatctctgaatgacctctgactttaaaaaagtttttatttgcatggctgtatttacattaacactgacattttcttctactcttctcccttctttcatcttggggttgggtagagaaacacaaaggaaactgaagcatgtgccattctatactgtcattccaaattctcatggactattgcctgttgtgaaaatgtttgaaactgcactgaaagctgcatctgtctgtatctttcttttgtaaatgacctcacatgtaaattcaccaaataaatattacattc

SEQ ID NO: 351988 - DNA, 2875 bp, Homo sapiens
tggttcttagatagctgtggatttgaccagaatcaggcagaggcaataaatctgagtatttattgagtaggtgtgaggaactcaatagactgcctgaagagtagagatgcatggggttggggatgtgctggtaagagatgaaacagaaagaggtgggcccacatcagtctgtgaaggtaaggcccttgcatgtcattagtgtcccgatattatgtcactgctttctaaaggagtctcatgttaacagtagaaacatgtaaaatttaggaaccagacggaattgtgattttaaataagccaatcaatttccctagtctgactgttcttatcagtaaacacagaatacaagggatataatgtaagcacatagtatttgtaatagtagttgacattcattgagtgctttcaatgtggtaggtactcttgtttattttaaaagaagcattttactagaatcatagtagaaacttagtggtcagacttcatgtagcatcacttacaaccttcattgaatattgtgaagaaacttagtggtcagacttcatgtaccatcacttacaaccttcattgaatattgtgaagtgcttgttgaatctgagacttaaaaattttgttcttttagaggaaacatggagaaagccattgacatgttcaacaaagctattaacctggccaaatcggaaatggagatggcccatctgtattcactttgcgatgccgcccatgcccagacagaagttgcaaagaaatacggattaaaaccaccaacattataaaacagggggaaagcagactgaccctctttttaaaagtttaccccctcttcaactgaaccctaaagacactgtcatgaactgtgttgaatggtggaaatcagtatttctgtttgtggtgttgttatttgttacatctgtttcatgtctaggtgttgtgggtgtggctgttgaaggaagtttgcagtcttgcagcttttattccctgtgcaacaaaagattagaacatgttaaagggatttttaaataaagttgcaaagagtacaaatgataattggccatgcaaataaaaactgatttgttgattttttttttaaggggggttggcagttgattatgttctggatgattccgtctatatatgtgtgaataatgtaagtattttacagcatgttgatttttaaattaacgtagtaaatgctgtaaaatagatttatattcagttaaccgctttcagttgattttttgaaagaaacaaaggttaaatgggggattaaagtaaaattgagagaccctttaaaccattgtcagcatgcacaatgcctctgattctgcagttttagaaacttggtggcacttattaatcctcttggcccctttccactctaatggatagtgtacattcttcttaaagtccacaacagcagattttcttgcagtaaattatgcagatgcaaaatattctaattgatatatgtgttggaagactgagtattgatgggggagtggaccagacaaagaggtaagatgaaacagtagtgtgtttataattgtctgtgactattttctataataattagtactatttaatggtgagcttttaaaaatgtaggatagagggtacagtggcactgtatatactatttatagtctcagctactagggaggctgaggcaagaggcttgagaccaggagctcgaggctgtaatgtgccatgatgattgcacctgcgaatagccactgcactccagcctgggcaatatagcaagaccccatcctttaaaaaattttagaacttttttaaaatcaaagtgcagattgcttgtatgtaaaacccaaataaaggtagagtaagtgtgatatatgggagtattaaaatagcttaaaatttctcgtgaaggacatgtggctaaagggtcaaaaaggatgtaagacttggagccagagcatagtatttcctgaaataacaagtttagtgctttaactatggctacatgtgcttaaggaattttgagccacttatttttgaagatgctgaggacatgtagagtgctttttgtagtgagctaaccttgatctctaaggactaactacccaggtccaggtcttcactaggggtactgacagtgtttaagctttactccacctccttacttagaaatcactttacgatttatttccattttccacttttatagaccatccttttgcttatatgctagatttttctggtgagggaagggttgtgttcttcaggggtcttttgttttgaaatactcaggatggggagaggtttatttaagaacgaattataattatggtttacactgttgggagtaaaggagcatttttacaccccttaagggtgcttaattctgttgaaaccaaaaagatttgtctacaaatgctatcttttttagaaactattagaaatgactccctttcaaagtcaatctttggaaaatattgaggaggtcactaattagttggtgcagttaatataattcaagatgatttggatgatgggaagtttgagaccgctgcattttgtttttaaattatgcaccttctgataacccccaaatacagaaatgttctacatctctgaatgacctctgactttaaaaaagtttttatttgcatggctgtatttacattaacactgacattttcttctactcttctcccttctttcatcttggggttgggtagagaaacacaaaggaaactgaagcatgtgccattctatactgtcattccaaattctcatggactattgcctgttgtgaaaatgtttgaaactgcactgaaagctgcatctgtctgtatctttcttttgtaaatgacctcacatgtaaattcaccaaataaatattacattc

SEQ ID NO: 351989 - DNA, 4225 bp, Homo sapiens
acagaggttcaagaggtgccaacgtggctataactggaaaactggatccgaaatcgaccagtaaactgggtagctcggtctacgccccgcccaccacccttgctagccaatagccttcacaactcttctgccactcccgcccattccagtgctgtgccgctgctttttcttccactcggatctcttgagcgcccttagcccgctgtatacgcgcccctcctcggcttcagtaggcaagagggccatctgcccttctttcctgaaggtagaggggacaacaccagctacgacggggactccagaagtccatctcccgaacagcagcggggcgaaaagaaagaaaaagggtttccgaagactcctactcacacccacgctttcccttaacccggaagtgatttccgcccctcctctccctcttcggttgatactggaggagaaggacggccaggtctggcccggcatgccctgggcttccggtgacctctggcccttttctgtcgtccgctctctctgcctagcgtgctcgctcgctcattgctttccttccctccctcggtcttccttcgcacgctgtttggtgattgtggcgctcgcgacagacagggaggcggtggcagaggacacttgtcatggccgcctctaaacctgtggaggcagcggtggtcgcagccgctgtaccgagctccgggagtggggtgggcggcggcgggactgcgggcccgggcacgggggggctgccgcgatggcagctggctctggcggtcggggcacccctgctgctgggcgcgggtgccatatacctgtggagtcggcagcaacggcgccgggaggccagaggccggggcgacgccagcggcctgaagcgcaacagcgaacggaagaccccggagggcagggccagtccggccccgggcagcggacaccctgaaggtcccggtgctcacttggacatgaactctcttgatagagcccaagcagccaagaataaaggcaataaatattttaaagcaggaaaatatgaacaagctattcagtgctatactgaggctattagcttgtgccctacagagaagaatgttgacctttctacattttatcaaaacagagctgctgcctttgaacagttgcaaaaatggaaagaagtggcacaagactgtacaaaagctgttgaacttaatcccaaatatgtgaaagctctctttagacgtgcaaaagcccatgagaagctagacaataagaaggaatgtttagaagatgtcactgctgtgtgtatattagaagggttccaaaatcaacaaagcatgctgttagccgataaagttcttaaactccttggaaaagagaaagccaaagaaaaatataagaatcgtgaacctctgatgccatctccacagtttatcaaatcttacttcagttctttcacggatgatatcatttcccagcccatgcttaaaggagagaaatctgatgaagataaagacaaggaaggggaggctttagaagtgaaagaaaattctggatacttaaaggccaaacagtatatggaagaagaaaactacgataaaatcataagtgaatgctcaaaagaaatagatgctgaaggcaaatacatggcagaagcattgctactacgagctaccttctacctgcttattggcaatgccaatgcagccaaaccagatttagataaagtcatcagtttgaaagaagctaatgtgaagcttcgagcaaatgctctcatcaaaagaggcagcatgtacatgcaacagcagcagcctttgctgtccactcaagattttaacatggctgctgacatcgatcctcagaatgcagatgtttatcaccaccgaggacagctgaaaatactccttgatcaagttgaagaagcagtggcagattttgatgaatgtattaggttaagacctgagtctgctctggcacaagcacagaaatgttttgcattgtaccgccaggcatatacgggaaacaactcttcacaaatccaagcagctatgaaaggttttgaagaggtcataaagaaatttccaaggtgtgccgaaggctatgcactatacgcccaggcattaacagatcaacaacagtttggtaaagctgatgaaatgtatgataaatgtattgatttggaaccagataatgctacaacatatgttcataaaggtttacttcaacttcagtggaagcaagatctggatagaggtttggaacttatcagcaaggctattgaaattgacaataaatgtgattttgcctatgaaaccatgggaactattgaagtacaaagaggaaacatggagaaagccattgacatgttcaacaaagctattaacctggccaaatcggaaatggagatggcccatctgtattcactttgcgatgccgcccatgcccagacagaagttgcaaagaaatacggattaaaaccaccaacattataaaacagggggaaagcagactgaccctctttttaaaagtttaccccctcttcaactgaaccctaaagacactgtcatgaactgtgttgaatggtggaaatcagtatttctgtttgtggtgttgttatttgttacatctgtttcatgtctaggtgttgtgggtgtggctgttgaaggaagtttgcagtcttgcagcttttattccctgtgcaacaaaagattagaacatgttaaagggatttttaaataaagttgcaaagagtacaaatgataattggccatgcaaataaaaactgatttgttgattttttttttaaggggggttggcagttgattatgttctggatgattccgtctatatatgtgtgaataatgtaagtattttacagcatgttgatttttaaattaacgtagtaaatgctgtaaaatagatttatattcagttaaccgctttcagttgattttttgaaagaaacaaaggttaaatgggggattaaagtaaaattgagagaccctttaaaccattgtcagcatgcacaatgcctctgattctgcagttttagaaacttggtggcacttattaatcctcttggcccctttccactctaatggatagtgtacattcttcttaaagtccacaacagcagattttcttgcagtaaattatgcagatgcaaaatattctaattgatatatgtgttggaagactgagtattgatgggggagtggaccagacaaagaggtaagatgaaacagtagtgtgtttataattgtctgtgactattttctataataattagtactatttaatggtgagcttttaaaaatgtaggatagagggtacagtggcactgtatatactatttatagtctcagctactagggaggctgaggcaagaggcttgagaccaggagctcgaggctgtaatgtgccatgatgattgcacctgcgaatagccactgcactccagcctgggcaatatagcaagaccccatcctttaaaaaattttagaacttttttaaaatcaaagtgcagattgcttgtatgtaaaacccaaataaaggtagagtaagtgtgatatatgggagtattaaaatagcttaaaatttctcgtgaaggacatgtggctaaagggtcaaaaaggatgtaagacttggagccagagcatagtatttcctgaaataacaagtttagtgctttaactatggctacatgtgcttaaggaattttgagccacttatttttgaagatgctgaggacatgtagagtgctttttgtagtgagctaaccttgatctctaaggactaactacccaggtccaggtcttcactaggggtactgacagtgtttaagctttactccacctccttacttagaaatcactttacgatttatttccattttccacttttatagaccatccttttgcttatatgctagatttttctggtgagggaagggttgtgttcttcaggggtcttttgttttgaaatactcaggatggggagaggtttatttaagaacgaattataattatggtttacactgttgggagtaaaggagcatttttacaccccttaagggtcttaatcgtgaaccaaagatgctcatgcttcttttgaatattgaatgatccttcagcactgcaatttgggggcaatactgggaaatcacagatgggggggacgggggttaagccgtcccaagttttcgcgcgaattggggtaactccctgggaaaaaaggctggggggaggaaattaacaca

SEQ ID NO: 351990 - DNA, 629 bp, Homo sapiens
gggtgatctagaggatcctacagaggctgatggggagaggtttatttaagaacgaattataattatggtttacactgttgggagtaaaggagcatttttacaccccttaagggtgcttaattctgttgaaaccaaaaagatttgtctacaaatgctatcttttttagaaactattagaaatgactccctttcaaagtcaatctttggaaaatattgaggaggtcactaattagttggtgcagttaatataattcaagatgatttggatgatgggaagtttgagaccgctgcattttgtttttaaattatgcaccttctgataacccccaaatacagaaatgttctacatctctgaatgacctctgactttaaaaaagtttttatttgcatggctgtatttacattaacactgacattttcttctactcttctcccttctttcatcttggggttgggtagagaaacacaaaggaaactgaagcatgtgccattctatactgtcattccaaattctcatggactattgcctgttgtgaaaatgtttgaaactgcactgaaagctgcatctgtctgtatctttcttttgtaaatgacctcacatgtaaattcaccaaataaatattacattc

SEQ ID NO: 351991 - DNA, 777 bp, Homo sapiens
gccaaggccacctttgatgccatttctaagacctacaggctacctgacccccgacctctggaaggagactgtattcaccaagtctccctatcaggagttcactgaccacctcgtcaagacccacaccagagtctccgtgcagcggactcaggctccagctgtggctacaacatagggtttttatacaagaaaaataaagtgaattaagcacccttaaggggtgtaaaaatgctcctttactcgcaacagtgtaaaccataatgcttaattctgttgaaaccaaaaagatttgtctacaaatgctatcttttttagaaactattagaaatgactccctttcaaagtcaatctttggaaaatattgaggaggtcactaattagttggtgcagttaatataattcaagatgatttggatgatgggaagtttgagaccgctgcattttgtttttaaattatgcaccttctgataacccccaaatacagaaatgttctacatctctgaatgacctctgactttaaaaaagtttttatttgcatggctgtatttacattaacactgacattttcttctactcttctcccttctttcatcttggggttgggtagagaaacacaaaggaaactgaagcatgtgccattctatactgtcattccaaattctcatggactattgcctgttgtgaaaatgtttgaaactgcactgaaagctgcatctgtctgtatctttcttttgtaaatgacctcacatgtaaattcaccaaataaatattacattc

SEQ ID NO: 351992 - DNA, 2523 bp, Homo sapiens
acagaggttcaagaggtgccaacgtggctataactggaaaactggatccgaaatcgaccagtaaactgggtagctcggtctacgccccgcccaccacccttgctagccaatagccttcacaactcttctgccactcccgcccattccagtgctgtgccgctgctttttcttccactcggatctcttgagcgcccttagcccgctgtatacgcgcccctcctcggcttcagtaggcaagagggccatctgcccttctttcctgaaggtagaggggacaacaccagctacgacggggactccagaagtccatctcccgaacagcagcggggcgaaaagaaagaaaaagggtttccgaagactcctactcacacccacgctttcccttaacccggaagtgatttccgcccctcctctccctcttcggttgatactggaggagaaggacggccaggtctggcccggcatgccctgggcttccggtgacctctggcccttttctgtcgtccgctctctctgcctagcgtgctcgctcgctcattgctttccttccctccctcggtcttccttcgcacgctgtttggtgattgtggcgctcgcgacagacagggaggcggtggcagaggacacttgtcatggccgcctctaaacctgtggaggcagcggtggtcgcagccgctgtaccgagctccgggagtggggtgggcggcggcgggactgcgggcccgggcacgggggggctgccgcgatggcagctggctctggcggtcggggcacccctgctgctgggcgcgggtgccatatacctgtggagtcggcagcaacggcgccgggaggccagaggccggggcgacgccagcggcctgaagcgcaacagcgaacggaagaccccggagggcagggccagtccggccccgggcagcggacaccctgaaggtcccggtgctcacttggacatgaactctcttgatagagcccaagcagccaagaataaaggcaataaatattttaaagcaggaaaatatgaacaagctattcagtgctatactgaggctattagcttgtgccctacagagaagaatgttgacctttctacattttatcaaaacagagctgctgcctttgaacagttgcaaaaatggaaagaagtggcacaagactgtacaaaagctgttgaacttaatcccaaatatgtgaaagctctctttagacgtgcaaaagcccatgagaagctagacaataagaaggaatgtttagaagatgtcactgctgtgtgtatattagaagggttccaaaatcaacaaagcatgctgttagccgataaagttcttaaactccttggaaaagagaaagccaaagaaaaatataagaatcgtgaacctctgatgccatctccacagtttatcaaatcttacttcagttctttcacggatgatatcatttcccagcccatgcttaaaggagagaaatctgatgaagataaagacaaggaaggggaggctttagaagtgaaagaaaattctggatacttaaaggccaaacagtatatggaagaagaaaactacgataaaatcataagtgaatgctcaaaagaaatagatgctgaaggcaaatacatggcagaagcattgctactacgagctaccttctacctgcttattggcaatgccaatgcagccaaaccagatttagataaagtcatcagtttgaaagaagctaatgtgaagcttcgagcaaatgctctcatcaaaagaggcagcatgtacatgcaacagcagcagcctttgctgtccactcaagattttaacatggctgctgacatcgatcctcagaatgcagatgtttatcaccaccgaggacagctgaaaatactccttgatcaagttgaagaagcagtggcagattttgatgaatgtattaggttaagacctgagtctgctctggcacaagcacagaaatgttttgcattgtaccgccaggcatatacgggaaacaactcttcacaaatccaagcagctatgaaaggttttgaagaggtcataaagaaatttccaaggtgtgccgaaggctatgcactatacgcccaggcattaacagatcaacaacagtttggtaaagctgatgaaatgtatgataaatgtattgatttggaaccagataatgctacaacatatgttcataaaggtttacttcaacttcagtggaagcaagatctggatagaggtttggaacttatcagcaaggctattgaaattgacaataaatgtgattttgcctatgaaaccatgggaactattgaagtacaaaggtaacttctggagtctgttaggaaatatatggtagctccatagatatttagctttttgttcttattacgtacatgttaaagtctgttatgttctttcctcttttcacctgtattattcacgttggaaaaaaaaatgtgctaaggcagtgacataaggattggtagccaagttgccagaaaatctggaccctcctccaaagaagcatccagccaaatgg

SEQ ID NO: 351993 - DNA, 2092 bp, Homo sapiens
acagaggttcaagaggtgccaacgtggctataactggaaaactggatccgaaatcgaccagtaaactgggtagctcggtctacgccccgcccaccacccttgctagccaatagccttcacaactcttctgccactcccgcccattccagtgctgtgccgctgctttttcttccactcggatctcttgagcgcccttagcccgctgtatacgcgcccctcctcggcttcagtaggcaagagggccatctgcccttctttcctgaaggtagaggggacaacaccagctacgacggggactccagaagtccatctcccgaacagcagcggggcgaaaagaaagaaaaagggtttccgaagactcctactcacacccacgctttcccttaacccggaagtgatttccgcccctcctctccctcttcggttgatactggaggagaaggacggccaggtctggcccggcatgccctgggcttccggtgacctctggcccttttctgtcgtccgctctctctgcctagcgtgctcgctcgctcattgctttccttccctccctcggtcttccttcgcacgctgtttggtgattgtggcgctcgcgacagacagggaggcggtggcagaggacacttgtcatggccgcctctaaacctgtggaggcagcggtggtcgcagccgctgtaccgagctccgggagtggggtgggcggcggcgggactgcgggcccgggcacgggggggctgccgcgatggcagctggctctggcggtcggggcacccctgctgctgggcgcgggtgccatatacctgtggagtcggcagcaacggcgccgggaggccagaggccggggcgacgccagcggcctgaagcgcaacagcgaacggaagaccccggagggcagggccagtccggccccgggcagcggacaccctgaaggtcccggtgctcacttggacatgaactctcttgatagagcccaagcagccaagaataaaggcaataaatattttaaagcaggaaaatatgaacaagctattcagtgctatactgaggctattagcttgtgccctacagagaagaatgttgacctttctacattttatcaaaacagagctgctgcctttgaacagttgcaaaaatggaaagaagtggcacaagactgtacaaaagctgttgaacttaatcccaaatatgtgaaagctctctttagacgtgcaaaagcccatgagaagctagacaataagaaggaatgtttagaagatgtcactgctgtgtgtatattagaagggttccaaaatcaacaaagcatgctgttagccgataaagttcttaaactccttggaaaagagaaagccaaagaaaaatataagaatcgtgaacctctgatgccatctccacagtttatcaaatcttacttcagttctttcacggatgatatcatttcccagcccatgcttaaaggagagaaatctgatgaagataaagacaaggaaggggaggctttagaagtgaaagaaaattctggatacttaaaggccaaacagtatatggaagaagaaaactacgataaaatcataagtgaatgctcaaaagaaatagatgctgaaggcaaatacatggcagaagcattgctactacgagctaccttctacctgcttattggcaatgccaatgcagccaaaccagatttagataaagtcatcagtttgaaagaagctaatgtgaagcttcgagcaaatgctctcatcaaaagaggcagcatgtacatgcaacagcagcagcctttgctgtccactcaagattttaacatggctgctgacatcgatcctcagaatgcagatgtttatcaccaccgaggacagtgaaaatactccttgatcaagttgaaagaagcagttaacaagtgccaccggtggttcaactgttaaattgatcaggcacatgaaaagaactgtggttacgaagaaaatatctaatcggaaacttaatttatggaaaaaatggggattaataatacaaggaggaattgactttggacgaaagaggttgaaataggggctaatttgggtaaaaaaaaaaaagggggtaaaacagg

SEQ ID NO: 351994 - DNA, 460 bp, Homo sapiens
aggatccccccgtccgatgagccatgcaaataaaaactttttaaagtcagaggtcactaattagttggtgcagttaatataattcaagatgatttggatgatgggaagtttgagaccgctgcattttgtttttaaattatgcaccttctgataacccccaaatacagaaatgttctacatctctgaatgacctctgactttaaaaaagtttttatttgcatggctgtatttacattaacactgacattttcttctactcttctcccttctttcatcttggggttgggtagagaaacacaaaggaaactgaagcatgtgccattctatactgtcattccaaattctcatggactattgcctgttgtgaaaatgtttgaaactgcactgaaagctgcatctgtctgtatctttcttttgtaaatgacctcacatgtaaattcaccaaataaatattacattc

SEQ ID NO: 351995 - DNA, 4558 bp, Homo sapiens
acagaggttcaagaggtgccaacgtggctataactggaaaactggatccgaaatcgaccagtaaactgggtagctcggtctacgccccgcccaccacccttgctagccaatagccttcacaactcttctgccactcccgcccattccagtgctgtgccgctgctttttcttccactcggatctcttgagcgcccttagcccgctgtatacgcgcccctcctcggcttcagtaggcaagagggccatctgcccttctttcctgaaggtagaggggacaacaccagctacgacggggactccagaagtccatctcccgaacagcagcggggcgaaaagaaagaaaaagggtttccgaagactcctactcacacccacgctttcccttaacccggaagtgatttccgcccctcctctccctcttcggttgatactggaggagaaggacggccaggtctggcccggcatgccctgggcttccggtgacctctggcccttttctgtcgtccgctctctctgcctagcgtgctcgctcgctcattgctttccttccctccctcggtcttccttcgcacgctgtttggtgattgtggcgctcgcgacagacagggaggcggtggcagaggacacttgtcatggccgcctctaaacctgtggaggcagcggtggtcgcagccgctgtaccgagctccgggagtggggtgggcggcggcgggactgcgggcccgggcacgggggggctgccgcgatggcagctggctctggcggtcggggcacccctgctgctgggcgcgggtgccatatacctgtggagtcggcagcaacggcgccgggaggccagaggccggggcgacgccagcggcctgaagcgcaacagcgaacggaagaccccggagggcagggccagtccggccccgggcagcggacaccctgaaggtcccggtgctcacttggacatgaactctcttgatagagcccaagcagccaagaataaaggcaataaatattttaaagcaggaaaatatgaacaagctattcagtgctatactgaggctattagcttgtgccctacagagaagaatgttgacctttctacattttatcaaaacagagctgctgcctttgaacagttgcaaaaatggaaagaagtggcacaagactgtacaaaagctgttgaacttaatcccaaatatgtgaaagctctctttagacgtgcaaaagcccatgagaagctagacaataagaaggaatgtttagaagatgtcactgctgtgtgtatattagaagggttccaaaatcaacaaagcatgctgttagccgataaagttcttaaactccttggaaaagagaaagccaaagaaaaatataagaatcgtgaacctctgatgccatctccacagtttatcaaatcttacttcagttctttcacggatgatatcatttcccagcccatgcttaaaggagagaaatctgatgaagataaagacaaggaaggggaggctttagaagtgaaagaaaattctggatacttaaaggccaaacagtatatggaagaagaaaactacgataaaatcataagtgaatgctcaaaagaaatagatgctgaaggcaaatacatggcagaagcattgctactacgagctaccttctacctgcttattggcaatgccaatgcagccaaaccagatttagataaagtcatcagtttgaaagaagctaatgtgaagcttcgagcaaatgctctcatcaaaagaggcagcatgtacatgcaacagcagcagcctttgctgtccactcaagattttaacatggctgctgacatcgatcctcagaatgcagatgtttatcaccaccgaggacagctgaaaatactccttgatcaagttgaagaagcagtggcagattttgatgaatgtattaggttaagacctgagtctgctctggcacaagcacagaaatgttttgcattgtaccgccaggcatatacgggaaacaactcttcacaaatccaagcagctatgaaaggttttgaagaggtcataaagaaatttccaaggtgtgccgaaggctatgcactatacgcccaggcattaacagatcaacaacagtttggtaaagctgatgaaatgtatgataaatgtattgatttggaaccagataatgctacaacatatgttcataaaggtttacttcaacttcagtggaagcaagatctggatagaggtttggaacttatcagcaaggctattgaaattgacaataaatgtgattttgcctatgaaaccatgggaactattgaagtacaaagaggaaacatggagaaagccattgacatgttcaacaaagctattaacctggccaaatcggaaatggagatggcccatctgtattcactttgcgatgccgcccatgcccagacagaagttgcaaagaaatacggattaaaaccaccaacattataaaacagggggaaagcagactgaccctctttttaaaagtttaccccctcttcaactgaaccctaaagacactgtcatgaactgtgttgaatggtggaaatcagtatttctgtttgtggtgttgttatttgttacatctgtttcatgtctaggtgttgtgggtgtggctgttgaaggaagtttgcagtcttgcagcttttattccctgtgcaacaaaagattagaacatgttaaagggatttttaaataaagttgcaaagagtacaaatgataattggccatgcaaataaaaactgatttgttgattttttttttaaggggggttggcagttgattatgttctggatgattccgtctatatatgtgtgaataatgtaagtattttacagcatgttgatttttaaattaacgtagtaaatgctgtaaaatagatttatattcagttaaccgctttcagttgattttttgaaagaaacaaaggttaaatgggggattaaagtaaaattgagagaccctttaaaccattgtcagcatgcacaatgcctctgattctgcagttttagaaacttggtggcacttattaatcctcttggcccctttccactctaatggatagtgtacattcttcttaaagtccacaacagcagattttcttgcagtaaattatgcagatgcaaaatattctaattgatatatgtgttggaagactgagtattgatgggggagtggaccagacaaagaggtaagatgaaacagtagtgtgtttataattgtctgtgactattttctataataattagtactatttaatggtgagcttttaaaaatgtaggatagagggtacagtggcactgtatatactatttatagtctcagctactagggaggctgaggcaagaggcttgagaccaggagctcgaggctgtaatgtgccatgatgattgcacctgcgaatagccactgcactccagcctgggcaatatagcaagaccccatcctttaaaaaattttagaacttttttaaaatcaaagtgcagattgcttgtatgtaaaacccaaataaaggtagagtaagtgtgatatatgggagtattaaaatagcttaaaatttctcgtgaaggacatgtggctaaagggtcaaaaaggatgtaagacttggagccagagcatagtatttcctgaaataacaagtttagtgctttaactatggctacatgtgcttaaggaattttgagccacttatttttgaagatgctgaggacatgtagagtgctttttgtagtgagctaaccttgatctctaaggactaactacccaggtccaggtcttcactaggggtactgacagtgtttaagctttactccacctccttacttagaaatcactttacgatttatttccattttccacttttatagaccatccttttgcttatatgctagatttttctggtgagggaagggttgtgttcttcaggggtcttttgttttgaaatactcaggatggggagaggtttatttaagaacgaattataattatggtttacactgttgggagtaaaggagcatttttacaccccttaagggtgcttaattctgttgaaaccaaaaagatttgtctacaaatgctatcttttttagaaactattagaaatgactccctttcaaagtcaatctttggaaaatattgaggaggtcactaattagttggtgcagttaatataattcaagatgatttggatgatgggaagtttgagaccgctgcattttgtttttaaattatgcaccttctgataacccccaaatacagaaatgttctacatctctgaatgacctctgactttaaaaaagtttttatttgcatggctgtatttacattaacactgacattttcttctactcttctcccttctttcatcttggggttgggtagagaaacacaaaggaaactgaagcatgtgccattctatactgtcattccaaattctcatggactattgcctgttgtgaaaatgtttgaaactgcactgaaagctgcatctgtctgtatctttcttttgtaaatgacctcacatgtaaattcaccaaataaatattacattc

SEQ ID NO: 351996 - DNA, 2728 bp, Homo sapiens
acagaggttcaagaggtgccaacgtggctataactggaaaactggatccgaaatcgaccagtaaactgggtagctcggtctacgccccgcccaccacccttgctagccaatagccttcacaactcttctgccactcccgcccattccagtgctgtgccgctgctttttcttccactcggatctcttgagcgcccttagcccgctgtatacgcgcccctcctcggcttcagtaggcaagagggccatctgcccttctttcctgaaggtagaggggacaacaccagctacgacggggactccagaagtccatctcccgaacagcagcggggcgaaaagaaagaaaaagggtttccgaagactcctactcacacccacgctttcccttaacccggaagtgatttccgcccctcctctccctcttcggttgatactggaggagaaggacggccaggtctggcccggcatgccctgggcttccggtgacctctggcccttttctgtcgtccgctctctctgcctagcgtgctcgctcgctcattgctttccttccctccctcggtcttccttcgcacgctgtttggtgattgtggcgctcgcgacagacagggaggcggtggcagaggacacttgtcatggccgcctctaaacctgtggaggcagcggtggtcgcagccgctgtaccgagctccgggagtggggtgggcggcggcgggactgcgggcccgggcacgggggggctgccgcgatggcagctggctctggcggtcggggcacccctgctgctgggcgcgggtgccatatacctgtggagtcggcagcaacggcgccgggaggccagaggccggggcgacgccagcggcctgaagcgcaacagcgaacggaagaccccggagggcagggccagtccggccccgggcagcggacaccctgaaggtcccggtgctcacttggacatgaactctcttgatagagcccaagcagccaagaataaaggcaataaatattttaaagcaggaaaatatgaacaagctattcagtgctatactgaggctattagcttgtgccctacagagaagaatgttgacctttctacattttatcaaaacagagctgctgcctttgaacagttgcaaaaatggaaagaagtggcacaagactgtacaaaagctgttgaacttaatcccaaatatgtgaaagctctctttagacgtgcaaaagcccatgagaagctagacaataagaaggaatgtttagaagatgtcactgctgtgtgtatattagaagggttccaaaatcaacaaagcatgctgttagccgataaagttcttaaactccttggaaaagagaaagccaaagaaaaatataagaatcgtgaacctctgatgccatctccacagtttatcaaatcttacttcagttctttcacggatgatatcatttcccagcccatgcttaaaggagagaaatctgatgaagataaagacaaggaaggggaggctttagaagtgaaagaaaattctggatacttaaaggccaaacagtatatggaagaagaaaactacgataaaatcataagtgaatgctcaaaagaaatagatgctgaaggcaaatacatggcagaagcattgctactacgagctaccttctacctgcttattggcaatgccaatgcagccaaaccagatttagataaagtcatcagtttgaaagaagctaatgtgaagcttcgagcaaatgctctcatcaaaagaggcagcatgtacatgcaacagcagcagcctttgctgtccactcaagattttaacatggctgctgacatcgatcctcagaatgcagatgtttatcaccaccgaggacagctgaaaatactccttgatcaagttgaagaagcagtggcagattttgatgaatgtattaggttaagacctgagtctgctctggcacaagcacagaaatgttttgcattgtaccgccaggcatatacgggaaacaactcttcacaaatccaagcagctatgaaaggttttgaagaggtcataaagaaatttccaaggtgtgccgaaggctatgcactatacgcccaggcattaacagatcaacaacagtttggtaaagctgatgaaatgtatgataaatgtattgatttggaaccagataatgctacaacatatgttcataaaggtttacttcaacttcagtggaagcaagatctggatagaggtttggaacttatcagcaaggctattgaaattgacaataaatgtgattttgcctatgaaaccatgggaactattgaagtacaaagaggaaacatggagaaagccattgacatgttcaacaaagctattaacctggccaaatcggaaatggagatggcccatctgtattcactttgcgatgccgcccatgcccagacagaagttgcaaagaaatacggattaaaaccaccaacattataaaacagggggaaagcagactgaccctctttttaaaagtttaccccctcttcaactgaaccctaaagacactgtcatgaactgtgttgaatggtggaaatcagtatttctgtttgtggtgttgttatttgttacatctgtttcatgtctaggtgttgtgggtgtggctgttgaaggaagtttgcagtcttgcagcttttattccctgtgcaacaaaagattagaacatgttaaagggatttttaaataaagttgcaaagagtacaaatgat

SEQ ID NO: 351997 - DNA, 4058 bp, Homo sapiens
  misc_feature (124)..(124): n is a, c, g, or t
ttcgcgcttacgctacgaggacctgcggttttaagtctggcactgagtggtgcacgccgactgttcctgatgctaccgtgtgagcttggtgtgtgtgctggctgtgctgtggacgtgctgtgtngccctggcgcagcgtggggtgtgctgcctgctgagtgtgcatgcatgtgctcatgtgcgtgtctgtgtgtgcagccaccgtgtcttgcattgtgtggctgctgtgtgctgtccagtagttaccgttgttgtgtatgtctgtgcagtgcacactgtgctgcctgtgtgatgtgccatgatgtgcctgtgtgtgctgaactgccatgctgtgcctagaatgctgcaacatgctgaactgtgaagacccctgtgatgtgtgcatgtggccatgtcctgtgcccctgtgtgcagcgtgacatccctgaatgtgtccctggtgctcacttggacatgaactctcttgatagagcccaagcagccaagaataaaggcaataaatattttaaagcaggaaaatatgaacaagctattcagtgctatactgaggctattagcttgtgccctacagagaagaatgttgacctttctacattttatcaaaacagagctgctgcctttgaacagttgcaaaaatggaaagaagtggcacaagactgtacaaaagctgttgaacttaatcccaaatatgtgaaagctctctttagacgtgcaaaagcccatgagaagctagacaataagaaggaatgtttagaagatgtcactgctgtgtgtatattagaagggttccaaaatcaacaaagcatgctgttagccgataaagttcttaaactccttggaaaagagaaagccaaagaaaaatataagaatcgtgaacctctgatgccatctccacagtttatcaaatcttacttcagttctttcacggatgatatcatttcccagcccatgcttaaaggagagaaatctgatgaagataaagacaaggaaggggaggctttagaagtgaaagaaaattctggatacttaaaggccaaacagtatatggaagaagaaaactacgataaaatcataagtgaatgctcaaaagaaatagatgctgaaggcaaatacatggcagaagcattgctactacgagctaccttctacctgcttattggcaatgccaatgcagccaaaccagatttagataaagtcatcagtttgaaagaagctaatgtgaagcttcgagcaaatgctctcatcaaaagaggcagcatgtacatgcaacagcagcagcctttgctgtccactcaagattttaacatggctgctgacatcgatcctcagaatgcagatgtttatcaccaccgaggacagctgaaaatactccttgatcaagttgaagaagcagtggcagattttgatgaatgtattaggttaagacctgagtctgctctggcacaagcacagaaatgttttgcattgtaccgccaggcatatacgggaaacaactcttcacaaatccaagcagctatgaaaggttttgaagaggtcataaagaaatttccaaggtgtgccgaaggctatgcactatacgcccaggcattaacagatcaacaacagtttggtaaagctgatgaaatgtatgataaatgtattgatttggaaccagataatgctacaacatatgttcataaaggtttacttcaacttcagtggaagcaagatctggatagaggtttggaacttatcagcaaggctattgaaattgacaataaatgtgattttgcctatgaaaccatgggaactattgaagtacaaagaggaaacatggagaaagccattgacatgttcaacaaagctattaacctggccaaatcggaaatggagatggcccatctgtattcactttgcgatgccgcccatgcccagacagaagttgcaaagaaatacggattaaaaccaccaacattataaaacagggggaaagcagactgaccctctttttaaaagtttaccccctcttcaactgaaccctaaagacactgtcatgaactgtgttgaatggtggaaatcagtatttctgtttgtggtgttgttatttgttacatctgtttcatgtctaggtgttgtgggtgtggctgttgaaggaagtttgcagtcttgcagcttttattccctgtgcaacaaaagattagaacatgttaaagggatttttaaataaagttgcaaagagtacaaatgataattggccatgcaaataaaaactgatttgttgattttttttttaaggggggttggcagttgattatgttctggatgattccgtctatatatgtgtgaataatgtaagtattttacagcatgttgatttttaaattaacgtagtaaatgctgtaaaatagatttatattcagttaaccgctttcagttgattttttgaaagaaacaaaggttaaatgggggattaaagtaaaattgagagaccctttaaaccattgtcagcatgcacaatgcctctgattctgcagttttagaaacttggtggcacttattaatcctcttggcccctttccactctaatggatagtgtacattcttcttaaagtccacaacagcagattttcttgcagtaaattatgcagatgcaaaatattctaattgatatatgtgttggaagactgagtattgatgggggagtggaccagacaaagaggtaagatgaaacagtagtgtgtttataattgtctgtgactattttctataataattagtactatttaatggtgagcttttaaaaatgtaggatagagggtacagtggcactgtatatactatttatagtctcagctactagggaggctgaggcaagaggcttgagaccaggagctcgaggctgtaatgtgccatgatgattgcacctgcgaatagccactgcactccagcctgggcaatatagcaagaccccatcctttaaaaaattttagaacttttttaaaatcaaagtgcagattgcttgtatgtaaaacccaaataaaggtagagtaagtgtgatatatgggagtattaaaatagcttaaaatttctcgtgaaggacatgtggctaaagggtcaaaaaggatgtaagacttggagccagagcatagtatttcctgaaataacaagtttagtgctttaactatggctacatgtgcttaaggaattttgagccacttatttttgaagatgctgaggacatgtagagtgctttttgtagtgagctaaccttgatctctaaggactaactacccaggtccaggtcttcactaggggtactgacagtgtttaagctttactccacctccttacttagaaatcactttacgatttatttccattttccacttttatagaccatccttttgcttatatgctagatttttctggtgagggaagggttgtgttcttcaggggtcttttgttttgaaatactcaggatggggagaggtttatttaagaacgaattataattatggtttacactgttgggagtaaaggagcatttttacaccccttaagggtgcttaattctgttgaaaccaaaaagatttgtctacaaatgctatcttttttagaaactattagaaatgactccctttcaaagtcaatctttggaaaatattgaggaggtcactaattagttggtgcagttaatataattcaagatgatttggatgatgggaagtttgagaccgctgcattttgtttttaaattatgcaccttctgataacccccaaatacagaaatgttctacatctctgaatgacctctgactttaaaaaagtttttatttgcatggctgtatttacattaacactgacattttcttctactcttctcccttctttcatcttggggttgggtagagaaacacaaaggaaactgaagcatgtgccattctatactgtcattccaaattctcatggactattgcctgttgtgaaaatgtttgaaactgcactgaaagctgcatctgtctgtatctttcttttgtaaatgacctcacatgtaaattcaccaaataaatattacattc

SEQ ID NO: 351998 - DNA, 4646 bp, Homo sapiens
acagaggttcaagaggtgccaacgtggctataactggaaaactggatccgaaatcgaccagtaaactgggtagctcggtctacgccccgcccaccacccttgctagccaatagccttcacaactcttctgccactcccgcccattccagtgctgtgccgctgctttttcttccactcggatctcttgagcgcccttagcccgctgtatacgcgcccctcctcggcttcagtaggcaagagggccatctgcccttctttcctgaaggtagaggggacaacaccagctacgacggggactccagaagtccatctcccgaacagcagcggggcgaaaagaaagaaaaagggtttccgaagactcctactcacacccacgctttcccttaacccggaagtgatttccgcccctcctctccctcttcggttgatactggaggagaaggacggccaggtctggcccggcatgccctgggcttccggtgacctctggcccttttctgtcgtccgctctctctgcctagcgtgctcgctcgctcattgctttccttccctccctcggtcttccttcgcacgctgtttggtgattgtggcgctcgcgacagacagggaggcggtggcagaggacacttgtcatggccgcctctaaacctgtggaggcagcggtggtcgcagccgctgtaccgagctccgggagtggggtgggcggcggcgggactgcgggcccgggcacgggggggctgccgcgatggcagctggctctggcggtcggggcacccctgctgctgggcgcgggtgccatatacctgtggagtcggcagcaacggcgccgggaggccagaggccggggcgacgccagcggcctgaagcgcaacagcgaacggaagaccccggagggcagggccagtccggccccgggcagcggacaccctgaaggtcccggtgctcacttggacatgaactctcttgatagagcccaagcagccaagaataaaggcaataaatattttaaagcaggaaaatatgaacaagctattcagtgctatactgaggctattagcttgtgccctacagagaagaatgttgacctttctacattttatcaaaacagagctgctgcctttgaacagttgcaaaaatggaaagaagtggcacaagactgtacaaaagctgttgaacttaatcccaaatatgtgaaagctctctttagacgtgcaaaagcccatgagaagctagacaataagaaggaatgtttagaagatgtcactgctgtgtgtatattagaagggttccaaaatcaacaaagcatgctgttagccgataaagttcttaaactccttggaaaagagaaagccaaagaaaaatataagaatcgtgaacctctgatgccatctccacagtttatcaaatcttacttcagttctttcacggatgatatcatttcccagcccatgcttaaaggagagaaatctgatgaagataaagacaaggaaggggaggctttagaagtgaaagaaaattctggatacttaaaggccaaacagtatatggaagaagaaaactacgataaaatcataagtgaatgctcaaaagaaatagatgctgaaggcaaatacatggcagaagcattgctactacgagctaccttctacctgcttattggcaatgccaatgcagccaaaccagatttagataaagtcatcagtttgaaagaagctaatgtgaagcttcgagcaaatgctctcatcaaaagaggcagcatgtacatgcaacagcagcagcctttgctgtccactcaagattttaacatggctgctgacatcgatcctcagaatgcagatgtttatcaccaccgaggacagctgaaaatactccttgatcaagttgaagaagcagtggcagattttgatgaatgtattaggttaagacctgagtctgctctggcacaagcacagaaatgttttgcattgtaccgccaggcatatacgggaaacaactcttcacaaatccaagcagctatgaaaggttttgaagaggtcataaagaaatttccaaggtgtgccgaaggctatgcactatacgcccaggcattaacagatcaacaacagtttggtaaagctgatgaaatgtatgataaatgtattgatttggaaccagataatgctacaacatatgttcataaaggtttacttcaacttcagtggaagcaagatctggatagaggtttggaacttatcagcaaggctattgaaattgacaataaatgtgattttgcctatgaaaccatgggaactattgaagtacaaagaggaaacatggagaaagccattgacatgttcaacaaagctattaacctggccaaatcggaaatggagatggcccatctgtattcactttgcgatgccgcccatgcccagacagaagttgcaaagaaatacggattaaaaccaccaacattataaaacagggggaaagcagactgaccctctttttaaaagtttaccccctcttcaactgaaccctaaagacactgtcatgaactgtgttgaatggtggaaatcagtatttctgtttgtggtgttgttatttgttacatctgtttcatgtctaggtgttgtgggtgtggctgttgaaggaagtttgcagtcttgcagcttttattccctgtgcaacaaaagattagaacatgttaaagggatttttaaataaagttgcaaagagtacaaatgataattggccatgcaaataaaaactgatttgttgattttttttttaaggggggttggcagttgattatgttctggatgattccgtctatatatgtgtgaataatgtaagtattttacagcatgttgatttttaaattaacgtagtaaatgctgtaaaatagatttatattcagttaaccgctttcagttgattttttgaaagaaacaaaggttaaatgggggattaaagtaaaattgagagaccctttaaaccattgtcagcatgcacaatgcctctgattctgcagttttagaaacttggtggcacttattaatcctcttggcccctttccactctaatggatagtgtacattcttcttaaagtccacaacagcagattttcttgcagtaaattatgcagatgcaaaatattctaattgatatatgtgttggaagactgagtattgatgggggagtggaccagacaaagaggtaagatgaaacagtagtgtgtttataattgtctgtgactattttctataataattagtactatttaatggtgagcttttaaaaatgtaggatagagggtacagtggcactgtatatactatttatagtctcagctactagggaggctgaggcaagaggcttgagaccaggagctcgaggctgtaatgtgccatgatgattgcacctgcgaatagccactgcactccagcctgggcaatatagcaagaccccatcctttaaaaaattttagaacttttttaaaatcaaagtgcagattgcttgtatgtaaaacccaaataaaggtagagtaagtgtgatatatgggagtattaaaatagcttaaaatttctcgtgaaggacatgtggctaaagggtcaaaaaggatgtaagacttggagccagagcatagtatttcctgaaataacaagtttagtgctttaactatggctacatgtgcttaaggaattttgagccacttatttttgaagatgctgaggacatgtagagtgctttttgtagtgagctaaccttgatctctaaggactaactacccaggtccaggtcttcactaggggtactgacagtgtttaagctttactccacctccttacttagaaatcactttacgatttatttccattttccacttttatagaccatccttttgcttatatgctagatttttctggtgagggaagggttgtgttcttcaggggtcttttgttttgaaatactcaggatggggagaggtttatttaagaacgaattataattatggtttacactgttgggagtaaaggagcatttttacaccccttaagggtgcttaattctgttgaaaccaaaaagatttgtctacaaatgctatcttttttagaaactattagaaatgactccctttcaaagtcaatctttggaaaatattgaggaggtcactaattagttggtgcagttaatataattcaagatgatttggatgatgggaagtttgagaccgctgcattttgtttttaaattatgcaccttctgataacccccaaatacagaaatgttctacatctctgaatgacctctgactttaaaaaagtttttatttgcatggctgtatttacattaacactgacattttcttctactcttctcccttctttcatcttggggttgggtagagaaacacaaaggaaactgaagcatgtgccattctatactgtcattccaaattctcatggactattgcctgttgtgaaaatgtttgaaactgcactgaaagctgcatctgtctgtatctttcttttgtaaatgacctcacatgtaaattcaccaaataaatattacattccaaaaaaaaaacacaagaccaccccgaaagagagaagaggggcgaagtgacaggggccgagcacccacgcccaagagaaagcgattac

SEQ ID NO: 351999 - DNA, 5246 bp, Homo sapiens
acagaggttcaagaggtgccaacgtggctataactggaaaactggatccgaaatcgaccagtaaactgggtagctcggtctacgccccgcccaccacccttgctagccaatagccttcacaactcttctgccactcccgcccattccagtgctgtgccgctgctttttcttccactcggatctcttgagcgcccttagcccgctgtatacgcgcccctcctcggcttcagtaggcaagagggccatctgcccttctttcctgaaggtagaggggacaacaccagctacgacggggactccagaagtccatctcccgaacagcagcggggcgaaaagaaagaaaaagggtttccgaagactcctactcacacccacgctttcccttaacccggaagtgatttccgcccctcctctccctcttcggttgatactggaggagaaggacggccaggtctggcccggcatgccctgggcttccggtgacctctggcccttttctgtcgtccgctctctctgcctagcgtgctcgctcgctcattgctttccttccctccctcggtcttccttcgcacgctgtttggtgattgtggcgctcgcgacagacagggaggcggtggcagaggacacttgtcatggccgcctctaaacctgtggaggcagcggtggtcgcagccgctgtaccgagctccgggagtggggtgggcggcggcgggactgcgggcccgggcacgggggggctgccgcgatggcagctggctctggcggtcggggcacccctgctgctgggcgcgggtgccatatacctgtggagtcggcagcaacggcgccgggaggccagaggccggggcgacgccagcggcctgaagcgcaacagcgaacggaagaccccggagggcagggccagtccggccccgggcagcggacaccctgaaggtcccggtgctcacttggacatgaactctcttgatagagcccaagcagccaagaataaaggcaataaatattttaaagcaggaaaatatgaacaagctattcagtgctatactgaggctattagcttgtgccctacagagaagaatgttgacctttctacattttatcaaaacagagctgctgcctttgaacagttgcaaaaatggaaagaagtggcacaagactgtacaaaagctgttgaacttaatcccaaatatgtgaaagctctctttagacgtgcaaaagcccatgagaagctagacaataagaaggaatgtttagaagatgtcactgctgtgtgtatattagaagggttccaaaatcaacaaagcatgctgttagccgataaagttcttaaactccttggaaaagagaaagccaaagaaaaatataagaatcgtgaacctctgatgccatctccacagtttatcaaatcttacttcagttctttcacggatgatatcatttcccagcccatgcttaaaggagagaaatctgatgaagataaagacaaggaaggggaggctttagaagtgaaagaaaattctggatacttaaaggccaaacagtatatggaagaagaaaactacgataaaatcataagtgaatgctcaaaagaaatagatgctgaaggcaaatacatggcagaagcattgctactacgagctaccttctacctgcttattggcaatgccaatgcagccaaaccagatttagataaagtcatcagtttgaaagaagctaatgtgaagcttcgagcaaatgctctcatcaaaagaggcagcatgtacatgcaacagcagcagcctttgctgtccactcaagattttaacatggctgctgacatcgatcctcagaatgcagatgtttatcaccaccgaggacagctgaaaatactccttgatcaagttgaagaagcagtggcagattttgatgaatgtattaggttaagacctgagtctgctctggcacaagcacagaaatgttttgcattgtaccgccaggcatatacgggaaacaactcttcacaaatccaagcagctatgaaaggttttgaagaggtcataaagaaatttccaaggtgtgccgaaggctatgcactatacgcccaggcattaacagatcaacaacagtttggtaaagctgatgaaatgtatgataaatgtattgatttggaaccagataatgctacaacatatgttcataaaggtttacttcaacttcagtggaagcaagatctggatagaggtttggaacttatcagcaaggctattgaaattgacaataaatgtgattttgcctatgaaaccatgggaactattgaagtacaaagaggaaacatggagaaagccattgacatgttcaacaaagctattaacctggccaaatcggaaatggagatggcccatctgtattcactttgcgatgccgcccatgcccagacagaagttgcaaagaaatacggattaaaaccaccaacattataaaacagggggaaagcagactgaccctctttttaaaagtttaccccctcttcaactgaaccctaaagacactgtcatgaactgtgttgaatggtggaaatcagtatttctgtttgtggtgttgttatttgttacatctgtttcatgtctaggtgttgtgggtgtggctgttgaaggaagtttgcagtcttgcagcttttattccctgtgcaacaaaagattagaacatgttaaagggatttttaaataaagttgcaaagagtacaaatgataattggccatgcaaataaaaactgatttgttgattttttttttaaggggggttggcagttgattatgttctggatgattccgtctatatatgtgtgaataatgtaagtattttacagcatgttgatttttaaattaacgtagtaaatgctgtaaaatagatttatattcagttaaccgctttcagttgattttttgaaagaaacaaaggttaaatgggggattaaagtaaaattgagagaccctttaaaccattgtcagcatgcacaatgcctctgattctgcagttttagaaacttggtggcacttattaatcctcttggcccctttccactctaatggatagtgtacattcttcttaaagtccacaacagcagattttcttgcagtaaattatgcagatgcaaaatattctaattgatatatgtgttggaagactgagtattgatgggggagtggaccagacaaagaggtaagatgaaacagtagtgtgtttataattgtctgtgactattttctataataattagtactatttaatggtgagcttttaaaaatgtaggatagagggtacagtggcactgtatatactatttatagtctcagctactagggaggctgaggcaagaggcttgagaccaggagctcgaggctgtaatgtgccatgatgattgcacctgcgaatagccactgcactccagcctgggcaatatagcaagaccccatcctttaaaaaattttagaacttttttaaaatcaaagtgcagattgcttgtatgtaaaacccaaataaaggtagagtaagtgtgatatatgggagtattaaaatagcttaaaatttctcgtgaaggacatgtggctaaagggtcaaaaaggatgtaagacttggagccagagcatagtatttcctgaaataacaagtttagtgctttaactatggctacatgtgcttaaggaattttgagccacttatttttgaagatgctgaggacatgtagagtgctttttgtagtgagctaaccttgatctctaaggactaactacccaggtccaggtcttcactaggggtactgacagtgtttaagctttactccacctccttacttagaaatcactttacgatttatttccattttccacttttatagaccatccttttgcttatatgctagatttttctggtgagggaagggttgtgttcttcaggggtcttttgttttgaaatactcaggatggggagaggtttatttaagaacgaattataattatggtttacactgttgggagtaaaggagcatttttacaccccttaagggtgcttaattctgttgaaaccaaaaagatttgtctacaaatgctatcttttttagaaactattagaaatgactccctttcaaagtcaatctttggaaaatattgaggaggtcactaattagttggtgcagttaatataattcaagatgatttggatgatgggaagtttgagaccgctgcattttgtttttaaattatgcaccttctgataacccccaaatacagaaatgttctacatctctgaatgacctctgactttaaaaaagtttttatttgcatggctgtatttacattaacactgacattttcttctactcttctcccttctttcatcttggggttgggtagagaaacacaaaggaaactgaagcatgtgccattctatactgtcattccaaattctcatggactattgcctgttgtgaaaatgtttgaaactgcactgaaagctgcatctgtctgtatctttcttttgtaaatgacctcacatgtaaattcaccaaataaatattacattcaaaaaaagacaacagcaagacaccaaacaaacacagtgtggtgcggcgcgacccggccccaggcggagaaacttcccaaaaacaccactggtttgggggcgccgggccaccaaatagtgtaacgacgacacacacgggcacaacgcggcgtcctcaaaaggcgaaatctcgggcacacgaaccaggcggccgtggactccccacaccaacataaaaaacacagcccggggcgggccacacggaggcttctggccaccaatctcacacgacgcctccggcgggggacccctaaggagggatattccaaccaacaggggggattccccaaggacgactcgccataacaaatataaaggcccgccgggtagggaaaaccataccaacacaccgacacagcccaccccaacaaaagaccacaccgcagccacagccagacgacaggacaatgctcgtcagaacagcaaaagaccaacgagcgacgacctcccgaacgcaacaacacacacaacgacgccaacagacctcggacgagccagcgcgaagccacccacaaacagcaagccagcaccaccaccagcaacgaagcacggacaagccgaagcaccaacacacaaacgaacacacacacgaactcacaccacacactcaacagaacaacataatcacaaaactcaaccaaaacagaaca

SEQ ID NO: 352000 - DNA, 3513 bp, Homo sapiens
acagaggttcaagaggtgccaacgtggctataactggaaaactggatccgaaatcgaccagtaaactgggtagctcggtctacgccccgcccaccacccttgctagccaatagccttcacaactcttctgccactcccgcccattccagtgctgtgccgctgctttttcttccactcggatctcttgagcgcccttagcccgctgtatacgcgcccctcctcggcttcagtaggcaagagggccatctgcccttctttcctgaaggtagaggggacaacaccagctacgacggggactccagaagtccatctcccgaacagcagcggggcgaaaagaaagaaaaagggtttccgaagactcctactcacacccacgctttcccttaacccggaagtgatttccgcccctcctctccctcttcggttgatactggaggagaaggacggccaggtctggcccggcatgccctgggcttccggtgacctctggcccttttctgtcgtccgctctctctgcctagcgtgctcgctcgctcattgctttccttccctccctcggtcttccttcgcacgctgtttggtgattgtggcgctcgcgacagacagggaggcggtggcagaggacacttgtcatggccgcctctaaacctgtggaggcagcggtggtcgcagccgctgtaccgagctccgggagtggggtgggcggcggcgggactgcgggcccgggcacgggggggctgccgcgatggcagctggctctggcggtcggggcacccctgctgctgggcgcgggtgccatatacctgtggagtcggcagcaacggcgccgggaggccagaggccggggcgacgccagcggcctgaagcgcaacagcgaacggaagaccccggagggcagggccagtccggccccgggcagcggacaccctgaaggtcccggtgctcacttggacatgaactctcttgatagagcccaagcagccaagaataaaggcaataaatattttaaagcaggaaaatatgaacaagctattcagtgctatactgaggctattagcttgtgccctacagagaagaatgttgacctttctacattttatcaaaacagagctgctgcctttgaacagttgcaaaaatggaaagaagtggcacaagactgtacaaaagctgttgaacttaatcccaaatatgtgaaagctctctttagacgtgcaaaagcccatgagaagctagacaataagaaggaatgtttagaagatgtcactgctgtgtgtatattagaagggttccaaaatcaacaaagcatgctgttagccgataaagttcttaaactccttggaaaagagaaagccaaagaaaaatataagaatcgtgaacctctgatgccatctccacagtttatcaaatcttacttcagttctttcacggatgatatcatttcccagcccatgcttaaaggagagaaatctgatgaagataaagacaaggaaggggaggctttagaagtgaaagaaaattctggatacttaaaggccaaacagtatatggaagaagaaaactacgataaaatcataagtgaatgctcaaaagaaatagatgctgaaggcaaatacatggcagaagcattgctactacgagctaccttctacctgcttattggcaatgccaatgcagccaaaccagatttagataaagtcatcagtttgaaagaagctaatgtgaagcttcgagcaaatgctctcatcaaaagaggcagcatgtacatgcaacagcagcagcctttgctgtccactcaagattttaacatggctgctgacatcgatcctcagaatgcagatgtttatcaccaccgaggacagctgaaaatactccttgatcaagttgaagaagcagtggcagattttgatgaatgtattaggttaagacctgagtctgctctggcacaagcacagaaatgttttgcattgtaccgccaggcatatacgggaaacaactcttcacaaatccaagcagctatgaaaggttttgaagaggtcataaagaaatttccaaggtgtgccgaaggctatgcactatacgcccaggcattaacagatcaacaacagtttggtaaagctgatgaaatgtatgataaatgtattgatttggaaccagataatgctacaacatatgttcataaaggtttacttcaacttcagtggaagcaagatctggatagaggtttggaacttatcagcaaggctattgaaattgacaataaatgtgattttgcctatgaaaccatgggaactattgaagtacaaagaggaaacatggagaaagccattgacatgttcaacaaagctattaacctggccaaatcggaaatggagatggcccatctgtattcactttgcgatgccgcccatgcccagacagaagttgcaaagaaatacggattaaaaccaccaacattataaaacagggggaaagcagactgaccctctttttaaaagtttaccccctcttcaactgaaccctaaagacactgtcatgaactgtgttgaatggtggaaatcagtatttctgtttgtggtgttgttatttgttacatctgtttcatgtctaggtgttgtgggtgtggctgttgaaggaagtttgcagtcttgcagcttttattccctgtgcaacaaaagattagaacatgttaaagggatttttaaataaagttgcaaagagtacaaatgataattggccatgcaaataaaaactgatttgttgattttttttttaaggggggttggcagttgattatgttctggatgattccgtctatatatgtgtgaataatgtaagtattttacagcatgttgatttttaaattaacgtagtaaatgctgtaaaatagatttatattcagttaaccgctttcagttgattttttgaaagaaacaaaggttaaatgggggattaaagtaaaattgagagaccctttaaaccattgtcagcatgcacaatgcctctgattctgcagttttagaaacttggtggcacttattaatcctcttggcccctttccactctaatggatagtgtacattcttcttaaagtccacaacagcagattttcttgcagtaaattatgcagatgcaaaatattctaattgatatatgtgttggaagactgagtattgatgggggagtggaccagacaaagaggtaagatgaaacagtagtgtgtttataattgtctgtgactattttctataataattagtactatttaatggtgagcttttaaaaatgtaggatagagggtacagtggcactgtatatactatttatagtctcagctactagggaggctgaggcaagaggcttgagaccaggagctcgaggctgtaatgtgccatgatgattgcacctgcgaatagccactgcactccagcctgggcaatatagcaagaccccatcctttaaaaaattttagaacttttttaaaatcaaataataaatctattctgctaagagatc

SEQ ID NO: 352001 - DNA, 2687 bp, Homo sapiens
acagaggttcaagaggtgccaacgtggctataactggaaaactggatccgaaatcgaccagtaaactgggtagctcggtctacgccccgcccaccacccttgctagccaatagccttcacaactcttctgccactcccgcccattccagtgctgtgccgctgctttttcttccactcggatctcttgagcgcccttagcccgctgtatacgcgcccctcctcggcttcagtaggcaagagggccatctgcccttctttcctgaaggtagaggggacaacaccagctacgacggggactccagaagtccatctcccgaacagcagcggggcgaaaagaaagaaaaagggtttccgaagactcctactcacacccacgctttcccttaacccggaagtgatttccgcccctcctctccctcttcggttgatactggaggagaaggacggccaggtctggcccggcatgccctgggcttccggtgacctctggcccttttctgtcgtccgctctctctgcctagcgtgctcgctcgctcattgctttccttccctccctcggtcttccttcgcacgctgtttggtgattgtggcgctcgcgacagacagggaggcggtggcagaggacacttgtcatggccgcctctaaacctgtggaggcagcggtggtcgcagccgctgtaccgagctccgggagtggggtgggcggcggcgggactgcgggcccgggcacgggggggctgccgcgatggcagctggctctggcggtcggggcacccctgctgctgggcgcgggtgccatatacctgtggagtcggcagcaacggcgccgggaggccagaggccggggcgacgccagcggcctgaagcgcaacagcgaacggaagaccccggagggcagggccagtccggccccgggcagcggacaccctgaaggtcccggtgctcacttggacatgaactctcttgatagagcccaagcagccaagaataaaggcaataaatattttaaagcaggaaaatatgaacaagctattcagtgctatactgaggctattagcttgtgccctacagagaagaatgttgacctttctacattttatcaaaacagagctgctgcctttgaacagttgcaaaaatggaaagaagtggcacaagactgtacaaaagctgttgaacttaatcccaaatatgtgaaagctctctttagacgtgcaaaagcccatgagaagctagacaataagaaggaatgtttagaagatgtcactgctgtgtgtatattagaagggttccaaaatcaacaaagcatgctgttagccgataaagttcttaaactccttggaaaagagaaagccaaagaaaaatataagaatcgtgaacctctgatgccatctccacagtttatcaaatcttacttcagttctttcacggatgatatcatttcccagcccatgcttaaaggagagaaatctgatgaagataaagacaaggaaggggaggctttagaagtgaaagaaaattctggatacttaaaggccaaacagtatatggaagaagaaaactacgataaaatcataagtgaatgctcaaaagaaatagatgctgaaggcaaatacatggcagaagcattgctactacgagctaccttctacctgcttattggcaatgccaatgcagccaaaccagatttagataaagtcatcagtttgaaagaagctaatgtgaagcttcgagcaaatgctctcatcaaaagaggcagcatgtacatgcaacagcagcagcctttgctgtccactcaagattttaacatggctgctgacatcgatcctcagaatgcagatgtttatcaccaccgaggacagctgaaaatactccttgatcaagttgaagaagcagtggcagattttgatgaatgtattaggttaagacctgagtctgctctggcacaagcacagaaatgttttgcattgtaccgccaggcatatacgggaaacaactcttcacaaatccaagcagctatgaaaggttttgaagaggtcataaagaaatttccaaggtgtgccgaaggctatgcactatacgcccaggtaaatgttttttcaggttttttaaaaataactgcatacatatgccaaatctcagtatggaaatcagaaaacagtgctatcatggttgcagcttctttggaagcaggtggctttgttcctgattgattctcatggcccctggttggtcccgaatcacctcagaagaggctcctttgttacacaatttggaaatcatggccctaaactcaatatggggaagcttaaggcgagaatttccctcctgtcttcatttggattggttttgcaaaaagtaattaccttaggaaaatttaccgtatgcaattggtggagaaaatatccacggaaaggcttttctttctatctggtcactgcctttttatatggctaggttgttgtaacggtttattttaatttatctttgctttatctaaaattcctgaaactctcttggtttaggattgaagctatggaaagcaggatttaaatctgaatttttttattgtagtctgaaattcttgaaaacttcttagttttaaatcatccatttaaatgaaaatgattagcttcttgtagtgacggtcatacattttcccctcaaataaaagatctctgaatgactca

SEQ ID NO: 352002 - DNA, 662 bp, Homo sapiens
gggggtggtttccggaacttcgcccgcgtctctgggcttttgctctgtcaggctggtggcgttttggtgtcttcgtttgttatggccgctgctgtcgctatggagacagatgatgctggaaatcgacttcggtttcagttggagttggaatttgtgcaatgtttagccaacccaaattaccttaattttcttgcccaaagaggttacttcaaagacaaagcttttgttaattatcttaaatacttgctttactggaaagacccagaatatgccaagtatctaaagtaccctcagtgtttacacatgttagagctgctccaatatgaacacttccgaaaggagctggtgaatgctcagtgtgcgaaatttattgatgaacagcagattctacattggcagcactattcccggaagcggatgcgccttcagcaagccttggcagagcagcaacagcaaaataacacatcgggaaaatgaaaaactggatacaaacgaggcacttaatacatgtatataatgtatttcttttgtacagtgaagacaaaaaaaatgaaaactcttcctatctacctttattatggtagcccctagaacctttagtgtgctttttcatccaactttttattgttaatagactatttctgttaaacctgaattgttct

SEQ ID NO: 352003 - DNA, 788 bp, Homo sapiens
gggggtggtttccggaacttcgcccgcgtctctgggcttttgctctgtcaggctggtggcgttttggtgtcttcgtttgttatggccgctgctgtcgctatggagacagatgatgctggaaatcgacttcggtttcagttggagttggaatttgtgcaatgtttagccaacccaaattaccttaattttcttgcccaaagaggttacttcaaagacaaagcttttgttaattatcttaaatacttgctttactggaaagacccagaatatgccaagtatctaaagtaccctcagtgtttacacatgttagagctgctccaatatgaacacttccgaaaggagctggtgaatgctcagtgtgcgaaatttattgatgaacagcagattctacattggcagcactattcccggaagcggatgcgccttcagcaagccttggcagagcagcaacagcaaaataacacatcgggaaaatgaaaaactggatacaaacgaggcacttaatacatgtatataatgtatttcttttgtacagtgaagacaaaaaaaatgaaaactcttcctatctacctttattatggtagcccctagaacctttagtgtgctttttcatccaactttttattgttaatagactatttctgttaaacctgaattgttctaaaaaaaaaaaaaaaaaaaaaaatttggggcgggcgagagttaaacacttggggggcaatataaagggaaggcaaagcgggaggggttccaaaacggggggggaacaggtggtggtagggaccggt

SEQ ID NO: 352004 - DNA, 1250 bp, Homo sapiens
gggggtggtttccggaacttcgcccgcgtctctgggcttttgctctgtcaggctggtggcgttttggtgtcttcgtttgttatggccgctgctgtcgctatggagacagatgatgctggaaatcgacttcggtttcagttggagttggaatttgtgcaatgtttagccaacccaaattaccttaattttcttgcccaaagaggttacttcaaagacaaagcttttgttaattatcttaaatacttgctttactggaaagacccagaatatgccaagtatctaaagtaccctcagtgtttacacatgttagagctgctccaatatgaacacttccgaaaggagctggtgaatgctcagtgtgcgaaatttattgatgaacagcagattctacattggcagcactattcccggaagcggatgcgccttcagcaagccttggcagagcagcaacagcaaaataacacatcgggaaaatgaaaaactggatacaaacgaggcacttaatacatgtatataatgtatttcttttgtacagtgaagacaaaaaaaatgaaaactcttcctatctacctttattatggtagcccctagaacctttagtgtgctttttcatccaactttttattgttaatagactatttctgttaaacctgaattgttctaaaaaaaaaaaaaaaaaaaaaaatgcgcccgaattcgggctaatttggcacattggccttatagggggcggatccaattactggcccgcgttacaaacgggggactggaaaacctgtgtgtaccaatttaacgctttggacaaaccccttttcccaattggcgaaaaaacaaggccccacggccgctttcaaaaatggccaccctaaggcgaggggaaattcgggaaaatttggaaaactcgggaaatttttaaaacgcccttttaaccaaggcgaaacggaaactctataactaaaaaaaccccccaaacttctgggtctcgttacaaggccttttaaacgggtccccccagggggaaactctttttggggggccactggaacccccccacaatttttggcggcgccaacataacgcccacgtggccctctatttgtgggaacacccccttcaaaaaagcaccgagactcctttcccacggccgctgtatacacccccgtatgcccaacgcgctggcgtctcctcacaccacccatcgacgtcatatagctttccccatctctcccgtctcgcccctcgtccccgcc

SEQ ID NO: 352005 - DNA, 565 bp, Homo sapiens
gggggtggtttccggaacttcgcccgcgtctctgggcttttgctctgtcaggctggtggcgttttggtgtcttcgtttgttatggccgctgctgtcgctatggagacagatgatgctggaaatcgacttcggtttcagttggagttggaatttgtgcaatgtttagccaacccaaattaccttaattgtaccctcagtgtttacacatgttagagctgctccaatatgaacacttccgaaaggagctggtgaatgctcagtgtgcgaaatttattgatgaacagcagattctacattggcagcactattcccggaagcggatgcgccttcagcaagccttggcagagcagcaacagcaaaataacacatcgggaaaatgaaaaactggatacaaacgaggcacttaatacatgtatataatgtatttcttttgtacagtgaagacaaaaaaaatgaaaactcttcctatctacctttattatggtagcccctagaacctttagtgtgctttttcatccaactttttattgttaatagactatttctgttaaacctgaattgttct

SEQ ID NO: 352006 - DNA, 533 bp, Homo sapiens
tctcgacatgtcgagaaggtggtgcttcctcagaggcccaccattgaagaggttgattaagccaaccatgaccatgtacggattagaacctttcaatggctttccattccatgcagaataaaatccagtcttttttcttggactaaagccttatacgatctggccctgccttttctgaccttgtcttttaccacccttcccatctcaccaggtttctggtccctaagaactcacaatctgtaaatgtagtagcataagccatgggctgaaattaaaagagggtatctgtaaggaaggtgtttctggggttatttgaaggaggtgatcttacctgagtcttagagttgctgtcttttatttaaggcctcttatttgccaggaacagtgctaaatgcttcatatgcattaactcatttatatatatatatttaccattcaggtcgttcagcagacactttcatgttaaggcttactaagttgcaagaaacatattataaccacaaagcaattcccttttaatggttaaaaaaaaa

SEQ ID NO: 352007 - DNA, 1679 bp, Homo sapiens
gatagccagaaatttggctgtccttatccacagtatatttgcttgtccaatcctagagtatatctaatttcagaattggtatatccctgtggacaacaagagtacaatgtatgcgcatagtcctctttcacactcacttttaaatgaaagttgtctttttatccctattgaaggaaaaatgagtaactatcaattaaacacataattactaaaatatgttcatgttcttcacgttggaaaccgctagaagggaatagcatggtttgtccctaaattttcactctgcttaccagttacttgtgttgtgtggtcttgagcaagttaatttaatctttctgaacttaaaccttctcattttcgaaaatattgaacactgacctttgatgactaatcggggaaaaaaccctatgctaccagagtgtactaagttactgttatagaaatggtaggctacaagatcgtttttaagagaataactgaattataccttggcattatttacctaaattatgttgttcattcacttacaaacttaaacccaggtaccctcagtgtttacacatgttagagctgctccaatatgaacacttccgaaaggagctggtgaatgctcagtgtgcgaaatttattgatgaacagcagattctacattggcagcactattcccggaagcggatgcgccttcagcaagccttggcagagcagcaacagcaaaataacacatcgggaaaatgaaaaactggatacaaacgaggcacttaatacatgtatataatgtatttcttttgtacagtgaagacaaaaaaaatgaaaactcttcctatctacctttattatggtagcccctagaacctttagtgtgctttttcatccaactttttattgttaatagactatttctgttaaacctgaattgttctttgatttccctgtggatttgtaaggtgtttttcttttttacgcatttagcataatcagctgattaagaatggaaaagttaggtgctttagaccaaataaggcactggggcatggggtaggggtgggccaccaagtatactgaattctaaggctagctgttcctgacatatagtagggcaagaccatctcctggaaccttactgtctcagatcaactactctaccactctactctaagatgtagtgagagtagcggagtcactgacctctttaaatcataggacaggaactgcataaaggttcttgaattctgcaggacaggaaataactgtattacctgctttgcaaggtggctttaagaatcactgaatcactgtggcctcacttgacctagtcatggcaggacaactagtggttagttactaactggactcttgactttagaacaaacatgaggagcctcaaatacttgtgttcatttgggaaagctaccattgatttgggaggtaccacaaaccaggtgctatgttaagtgcttccttgaattctcattttattctaagaaccttgtttatagaagagaaaactgaggtttggacggggtgagtaacttgcctgtggttacacagctagtaagtggtagagtcagtgtgactgactcccagcttggagttcttcccagaactgggttatagagtctttccggccgctctccgccacctgcctcatcccaagtaaagcacattgagacagctgcaaa

SEQ ID NO: 352008 - DNA, 1324 bp, Homo sapiens
gggggtggtttccggaacttcgcccgcgtctctgggcttttgctctgtcaggctggtggcgttttggtgtcttcgtttgttatggccgctgctgtcgctatggagacagatgatgctggaaatcgacttcggtttcagttggagttggaatttgtgcaatgtttagccaacccaaattaccttaattgtaccctcagtgtttacacatgttagagctgctccaatatgaacacttccgaaaggagctggtgaatgctcagtgtgcgaaatttattgatgaacagcagattctacattggcagcactattcccggaagcggatgcgccttcagcaagccttggcagagcagcaacagcaaaataacacatcgggaaaatgaaaaactggatacaaacgaggcacttaatacatgtatataatgtatttcttttgtacagtgaagacaaaaaaaatgaaaactcttcctatctacctttattatggtagcccctagaacctttagtgtgctttttcatccaactttttattgttaatagactatttctgttaaacctgaattgttctttgatttccctgtggatttgtaaggtgtttttcttttttacgcatttagcataatcagctgattaagaatggaaaagttaggtgctttagaccaaataaggcactggggcatggggtaggggtgggccaccaagtatactgaattctaaggctagctgttcctgacatatagtagggcaagaccatctcctggaaccttactgtctcagatcaactactctaccactctactctaagatgtagtgagagtagcggagtcactgacctctttaaatcataggacaggaactgcataaaggttcttgaattctgcaggacaggaaataactgtattacctgctttgcaaggtggctttaagaatcactgaatcactgtggcctcacttgacctagtcatggcaggacaactagtggttagttactaactggactcttgactttagaacaaacatgaggagcctcaaatacttgtgttcatttgggaaagctaccattgatttgggaggtaccacaaaccaggtgctatgttaagtgcttccttgaattctcattttattctaagaaccttgtttatagaagagaaaactgaggtttggacggggtgagtaacttgcctgtggttacacagctagtaagtggtagagtcagtgtgactgactcccagcttggagttcttcccagaactgggttatagagtctttccggccgctctccgccacctgcctcatcccaagtaaagcacattgagacagctgcaaa

SEQ ID NO: 352009 - DNA, 1148 bp, Homo sapiens
gggggtggtttccggaacttcgcccgcgtctctgggcttttgctctgtcaggctggtggcgttttggtgtcttcgtttgttatggccgctgctgtcgctatggagacagatgatgctggaaatcgacttcggtttcagttggagttggaatttgtgcaatgtttagccaacccaaattaccttaattttcttgcccaaagaggttacttcaaagacaaagcttttgttaattatcttaaatacttgctttactggaaagacccagaatatgccaagtatctaaagtaccctcagtgtttacacatgttagagctgctccaatatgaacacttccgaaaggagctggtgaatgctcagtgtgcgaaatttattgatgaacagcagattctacattggcagcactattcccggaagcggatgcgccttcagcaagccttggcagagcagcaacagcaaaataacacatcgggaaaatgaaaaactggatacaaacgaggcacttaatacatgtatataatgtatttcttttgtacagtgaagacaaaaaaaatgaaaactcttcctatctacctttattatggtagcccctagaacctttagtgtgctttttcatccaactttttattgttaatagactatttctgttaaacctgaattgttctaaaaaaaaaaaaaaaaaaaaaaaaaaaaaaaaaaaaaaaaaaaaaaaaaaaaaaaataaagggggggccaaaaaaccaaataaaaccaatagagagaaaaattacaatatattggcctatgtcttataactgcgtaattgtaaaaaccttggcgtaacccaacaaaattgctttgtgaacatcccccttttgccagaatgtgtaaaagtaaaaaggcctgcactaaacgccctttccaacaattgccaactttgaatggccaatggcaatattgtacgccttaatatttctgtaaacattcctgttaaaatttttgttaaaaaaacttaattatttaacccataggtcctaaattcgtcaaacaccctttattaatacaaaaaaatcctaccgcttataaggtttctttgttgattacatttttgaaacaacatctcacttttaaagaacttggctcttcaccgttaaagagtgtaggttttttgg

SEQ ID NO: 352010 - DNA, 1421 bp, Homo sapiens
gggggtggtttccggaacttcgcccgcgtctctgggcttttgctctgtcaggctggtggcgttttggtgtcttcgtttgttatggccgctgctgtcgctatggagacagatgatgctggaaatcgacttcggtttcagttggagttggaatttgtgcaatgtttagccaacccaaattaccttaattttcttgcccaaagaggttacttcaaagacaaagcttttgttaattatcttaaatacttgctttactggaaagacccagaatatgccaagtatctaaagtaccctcagtgtttacacatgttagagctgctccaatatgaacacttccgaaaggagctggtgaatgctcagtgtgcgaaatttattgatgaacagcagattctacattggcagcactattcccggaagcggatgcgccttcagcaagccttggcagagcagcaacagcaaaataacacatcgggaaaatgaaaaactggatacaaacgaggcacttaatacatgtatataatgtatttcttttgtacagtgaagacaaaaaaaatgaaaactcttcctatctacctttattatggtagcccctagaacctttagtgtgctttttcatccaactttttattgttaatagactatttctgttaaacctgaattgttctttgatttccctgtggatttgtaaggtgtttttcttttttacgcatttagcataatcagctgattaagaatggaaaagttaggtgctttagaccaaataaggcactggggcatggggtaggggtgggccaccaagtatactgaattctaaggctagctgttcctgacatatagtagggcaagaccatctcctggaaccttactgtctcagatcaactactctaccactctactctaagatgtagtgagagtagcggagtcactgacctctttaaatcataggacaggaactgcataaaggttcttgaattctgcaggacaggaaataactgtattacctgctttgcaaggtggctttaagaatcactgaatcactgtggcctcacttgacctagtcatggcaggacaactagtggttagttactaactggactcttgactttagaacaaacatgaggagcctcaaatacttgtgttcatttgggaaagctaccattgatttgggaggtaccacaaaccaggtgctatgttaagtgcttccttgaattctcattttattctaagaaccttgtttatagaagagaaaactgaggtttggacggggtgagtaacttgcctgtggttacacagctagtaagtggtagagtcagtgtgactgactcccagcttggagttcttcccagaactgggttatagagtctttccggccgctctccgccacctgcctcatcccaagtaaagcacattgagacagctgcaaa

SEQ ID NO: 352011 - DNA, 1038 bp, Homo sapiens
gggggtggtttccggaacttcgcccgcgtctctgggcttttgctctgtcaggctggtggcgttttggtgtcttcgtttgttatggccgctgctgtcgctatggagacagatgatgctggaaatcgacttcggtttcagttggagttggaatttgtgcaatgtttagccaacccaaattaccttaattttcttgcccaaagaggttacttcaaagacaaagcttttgttaattatcttaaatacttgctttactggaaagacccagaatatgccaagtatctaaagtaagtttaatttttataatcctaagcatgtgtatactttattatataatagatttcttagtttcacattggcaaaaatgtatttggaatctctccacttctttttgttatcaccgtcttaatacaagacaccctcatctctaacttgtaacactgcagtaatctactccctggttatctgtgcttccacttttaccttcctgcccccatctccaccccaacccaaaccaagcaaaacagctttctacacagaaaccagcttaatcttttaaaaatataaatcagaacactttactttcttgcttagaacctttcaatggctttccattccatgcagaataaaatccagtcttttttcttggactaaagccttatacgatctggccctgccttttctgaccttgtcttttaccacccttcccatctcaccaggtttctggtccctaagaactcacaatctgtaaatgtagtagcataagccatgggctgaaattaaaagagggtatctgtaaggaaggtgtttctggggttatttgaaggaggtgatcttacctgagtcttagagttgctgtcttttatttaaggcctcttatttgccaggaacagtgctaaatgcttcatatgcattaactcatttatatatatatatttaccattcaggtcgttcagcagacactttcatgttaaggcttactaagttgcaagaaacatattataaccacaaagcaattcccttttaatggttaaaaaaaaa

SEQ ID NO: 352012 - DNA, 2884 bp, Homo sapiens
acgaaaggagcggggcatcccaacggcgccacctttaagcgtcacgggtggggctgcagcttctggacctaggactttgaacatgtcgcgcctgaagcggatagcggggcaggatctccgcgctggtttcaaagcaggtggaagagactgcggtacctcggtaccccaagggctgttgaaggcagcgaggaagagcggccagttaaacctgtcgggtagaaacctcagtgaagtgccgcagtgtgtctggagaataaatgtggatatccctgaggaagctaatcagaatctttcgtttggtgctactgaaagatggtgggagcagacagatttgaccaaactaataatatcaaacaataaacttcagtcacttacagatgacctgcgactcttgcctgcactgactgttcttgatatacatgataatcagttgacatcccttccttctgctataagagagctagaaaatcttcagaaacttaatgtcagccataataaactgaaaatactccctgaagaaattacaaacctaagaaacctgaagtgcctgtatctccagcataatgaattaacctgcatatcagagggatttgaacaactttccaatttagaagatttagatctttcaaacaatcatcttacaactgttcctgctagtttttcttctctgtccagtctggtgcgactcaatctttctagtaatgaactgaagagtttgccagcagaaataaatagaatgaaaaggttgaagcatttggattgtaattcaaatctcttggaaactatacctcctgaattggctggcatggaatcactagaattgctttatttgcggaggaataaattacgttttctaccagaatttccttcttgtagtctattgaaggaattgcacgtaggtgaaaaccagattgaaatgttagaggcagaacatcttaaacatctgaattcaattcttgtgctagacctgagggataacaagttaaaatctgttccagatgaaattatactactacggtccttggaaaggcttgacctaagcaacaatgatattagtagtcttccctattcattggggaaccttcatttgaaatttttggcattagaaggaaatcctttgagaacaattcgaagagaaattataagtaaaggaacacaagaagtcctaaaatatctacgaagcaagatcaaagatgatggacctagccaaagtgagtctgctactgagactgccatgacactaccaagtgaatccagagtcaatatacatgccatcattacattaaaaatattagactatagtgataaacaagcaactttgattcctgatgaggtgtttgatgcagtaaaaagcaacatcgtcacttctattaacttcagtaagaatcaactatgtgaaattccaaaaaggatggtagaactgaaggaaatggtttctgatgtcgatctcagttttaataaactttcctttatatccttggagttatgtgtgcttcagaaattgacttttttagatctcaggaacaattttttaaattctttgccagaagaaatggaatcactggtaagactgcaaacgatcaatctttcctttaataggtttaaaatgctacctgaagttctatatcgtatcttcacacttgaaacaattctgattagtaataatcaggttggatctgtggaccctcagaaaatgaagatgatggaaaatctgaccacgttggaccttcaaaataatgacctcttacaaattccaccagagctcggtaattgtgtaaacttaagaacattactactggatggaaatccattccgagttcctcgagcagccatattaatgaaaggaacagctgctatacttgaatatttgagagaccgaattcctacttaacatggagttgctttataacccttgtcatgtattattaaccctggttaattctaaggaggatgtaacatttgttttagtatcatcttaaaaggtgattattgtaattgatcttgtagtttcccagtatcacctacccgttggtataattagcctgggccatattcactgccagtaaatatttttacatttttatttaagatttttgtaaggtgttgtatacatttgtaatggtgataaccacaatgtgttcatacatttgttctaaatgttttgcttatgatttatcctgctaactttcattttcttatagcaagcagttttttcaaaaatgaatttttatttaatgtggttcagtattataataacaaagcatttttgtagaactggttttttttctcatttatttttgtattccatacaatgtgaccaattgacttgaatatgactagccagtttctatgtttttgttagatataaaattaaatcgaattttgttgaatactgttctttggcatttaaaaaataagaccttcttatcttgggccacatgtcaaaagaaaaaggaaacaaaaatatattaaaaataagacttttcattacccatgataggacttttgtgatatggctaatctcagtacacatttcaacttaaaacctttttatttacagcaccataattttaaaatttacttgcaatcttggtaagactaaacttgcagtgtttttctaaaagggaatttgataggtaaacttgatttaataaaaattaaatatcatttttgtttacaccaaaattatcagaagtaggttgattagtcattataacacttaccatatgattctattaagaagtcaattcagtagcatgtatatcaatttatatagataggtagatagcttttggatgattgaggcatgcttatattatgaaaaaaattgctaataaagataaatactacatgttcagaataaaagttacatttttcaaatatt

SEQ ID NO: 352013 - DNA, 2814 bp, Homo sapiens
acgaaaggagcggggcatcccaacggcgccacctttaagcgtcacgggtggggctgcagcttctggacctaggactttgaacatgtcgcgcctgaagcggatagcggggcaggatctccgcgctggtttcaaagcaggtggaagagactgcggtacctcggtaccccaagggctgttgaaggcagcgaggaagagcggccagttaaacctgtcgggtagaaacctcagtgaagtgccgcagtgtgtctggagaataaatgtggatatccctgaggaagctaatcagaatctttcgtttggtgctactgaaagatggtgggagcagacagatttgaccaaactaataatatcaaacaataaacttcagtcacttacagatgacctgcgactcttgcctgcactgactgttcttgatatacatgataatcagttgacatcccttccttctgctataagagagctagaaaatcttcagaaacttaatgtcagcataatgaattaacctgcatatcagagggatttgaacaactttccaatttagaagatttagatctttcaaacaatcatcttacaactgttcctgctagtttttcttctctgtccagtctggtgcgactcaatctttctagtaatgaactgaagagtttgccagcagaaataaatagaatgaaaaggttgaagcatttggattgtaattcaaatctcttggaaactatacctcctgaattggctggcatggaatcactagaattgctttatttgcggaggaataaattacgttttctaccagaatttccttcttgtagtctattgaaggaattgcacgtaggtgaaaaccagattgaaatgttagaggcagaacatcttaaacatctgaattcaattcttgtgctagacctgagggataacaagttaaaatctgttccagatgaaattatactactacggtccttggaaaggcttgacctaagcaacaatgatattagtagtcttccctattcattggggaaccttcatttgaaatttttggcattagaaggaaatcctttgagaacaattcgaagagaaattataagtaaaggaacacaagaagtcctaaaatatctacgaagcaagatcaaagatgatggacctagccaaagtgagtctgctactgagactgccatgacactaccaagtgaatccagagtcaatatacatgccatcattacattaaaaatattagactatagtgataaacaagcaactttgattcctgatgaggtgtttgatgcagtaaaaagcaacatcgtcacttctattaacttcagtaagaatcaactatgtgaaattccaaaaaggatggtagaactgaaggaaatggtttctgatgtcgatctcagttttaataaactttcctttatatccttggagttatgtgtgcttcagaaattgacttttttagatctcaggaacaattttttaaattctttgccagaagaaatggaatcactggtaagactgcaaacgatcaatctttcctttaataggtttaaaatgctacctgaagttctatatcgtatcttcacacttgaaacaattctgattagtaataatcaggttggatctgtggaccctcagaaaatgaagatgatggaaaatctgaccacgttggaccttcaaaataatgacctcttacaaattccaccagagctcggtaattgtgtaaacttaagaacattactactggatggaaatccattccgagttcctcgagcagccatattaatgaaaggaacagctgctatacttgaatatttgagagaccgaattcctacttaacatggagttgctttataacccttgtcatgtattattaaccctggttaattctaaggaggatgtaacatttgttttagtatcatcttaaaaggtgattattgtaattgatcttgtagtttcccagtatcacctacccgttggtataattagcctgggccatattcactgccagtaaatatttttacatttttatttaagatttttgtaaggtgttgtatacatttgtaatggtgataaccacaatgtgttcatacatttgttctaaatgttttgcttatgatttatcctgctaactttcattttcttatagcaagcagttttttcaaaaatgaatttttatttaatgtggttcagtattataataacaaagcatttttgtagaactggttttttttctcatttatttttgtattccatacaatgtgaccaattgacttgaatatgactagccagtttctatgtttttgttagatataaaattaaatcgaattttgttgaatactgttctttggcatttaaaaaataagaccttcttatcttgggccacatgtcaaaagaaaaaggaaacaaaaatatattaaaaataagacttttcattacccatgataggacttttgtgatatggctaatctcagtacacatttcaacttaaaacctttttatttacagcaccataattttaaaatttacttgcaatcttggtaagactaaacttgcagtgtttttctaaaagggaatttgataggtaaacttgatttaataaaaattaaatatcatttttgtttacaccaaaattatcagaagtaggttgattagtcattataacacttaccatatgattctattaagaagtcaattcagtagcatgtatatcaatttatatagataggtagatagcttttggatgattgaggcatgcttatattatgaaaaaaattgctaataaagataaatactacatgttcagaataaaagttacatttttcaaatatt

SEQ ID NO: 352014 - DNA, 5974 bp, Homo sapiens
  misc_feature (2681)..(2681): n is a, c, g, or t
atagacatttgccagccattcaggtagagagcattctagttagagctaatagcatatgccaaggcacaaagatgtgagaacatatggggtgtctgggaaacttcaagaagttcaatgtgctttggacaataaagcaaacaggtagaggagtagaaggaacagataaagtctggcaagtaagcagtagccagaccttgagctttttgtgctcaacgaaacttagattttgttctgcaaacactatcaagatactgcagataattaagagcaactaatatttattgggagcttattattctgctggtgctgtactaagtactttacatgtaatagctcaggcttacaagaaccctacatggtaggttctgttactgtgttcatttaaaaatcaaggattagaagctaaataactcatctaaggtatgcataaatagtaaattatacagctgagatttgagtccaggtggtttggctccagaagttgggctcttaacaactatgtcacattgtttcttatgatgaaaatggattctaaaaacaatttaattaaaatatgaataactggccaggtgcagtgactgacacctgtaatcccagcactttggaaggccgaggtgggcggatcacctgaggtcaggagtttgagaccagcctggccgatatggtgaaactccatctctactaaaaatacaaaaattagccaggcgtggtggtggcctgtaaacccagctactcaggaggctgaggcaggagaatcgcttgaaccccaggaggcagaggttgcagtgatccaggattgcgtcactgcactccagcctaggcgacagagcaagactctgtctcaaaaaataaataaaatttaaaaaataaaatattagcagctaatgtttaatgcaacctagataatgtcctaaggtcttcaaatacattcatttaatccttataacaagtgtatatgtttagtactattattattcctcatttatagatgaggaagctaatgcatagtgatgttaaaatattgctcattttaatttttcttctgtctgctccattacttgtcctttctagtatatagattgcaccattattgtcattattttaaaatatgtgcacttctcacatctctcctaatttttacttgtgaattgagctatcagttttatattgtgttgtcaattgagctaacaattgccttgcaagtaatgtctttggggaagtgccaaaagctagcctaaacttccgtgttatcaggtgattatcttgttcatgggttgcagggagggaagagaagagcctattaaggggtcatttggtccatctgtactcttggctattgcttctctagtcttactggaacttcagcactgccttgagtttacacttcactattgctttttttcatcaaggcagcaaaggaagggggcagtatgcggaaatgaaaaggccaaagctctcgttcctgcccattcttctattttctagtcaaggctgcagttcacctcatgctaaaactgtgctagcctttgtgccctgcggggtcctcagccattttacgttaattgcaagtattgctttgagagctattagccttcccatatcttgtggcatcttcagggttgcttggacaagaaagccagcagtctatgctaatttgttatctttttaagaacccaaagtgtactcattttagaagcctcagtcaaagcaaaatataaatcttgaattttacttaatatattgggagtgattatgtttcataagaagtaaaagtgaaaggaagaatacctacatggatacatttagagaagatttcctcttgaatgtgaacagaaaaatttactgggagaatttactctgaagttttgctgattttatacaataaatagcaactgttacaagtctgtctgtttaacatgtatttcaaggttttcaaaattagccctttctctttattttttgtaaaattcaaatacaggacttaatgccaattacagaataacatacactaaagaaaaaactgtcatgtcaaatttaagataatatgttttaaggaatgattttggtctgattccagtatatttaggtgttctgttcatgtattaataggtttaaaatgctacctgaagttctatatcgtatcttcacacttgaaacaattctgattagtaataatcaggttggatctgtggaccctcagaaaatgaagatgatggaaaatctgaccacgttggaccttcaaaataatgacctcttacaaattccaccagagctcggtaattgtgtaaacttaaggtaactacaccattctactgcattgtttcatttattttattgatttgttgaagtgatttgtttttctttttcagataaatttgcaagaagttaaagtaacagatttaatatcctgttaaaaataacaagtaacaaaacccagagtcccaattctgtttttcaaattttaccaaatgtatatttttagttttgcttatatggtatatgtgtgaatataataactaattatttctagtggcttttcgctatcactgtgtatgtttataacctgaatctctactgcataaaaatgtcggggaaatattaactccttagctttgaatacagggttttttttttttttttttttgaaattgattgcagattaccaccattctattttgagnccagtacagtctttctcactctttacatctgctgttccctcagcatcaggtacttttaccctgttttcatcaataattggcctattgaatgtcacctttgaaagccttccctgtcctccaagcagaattagtccctgatttcccatcatgcttcatttggacttatttgtacgatttttgggtctttctttggaaaagagttgtcccagtgcctaaaacatagtaaacacccagtaagtgcttattaagtgaatataaaggaggtttgaggtatcgacagaaagccaagtggttaagcagaatgtgtcagaagtaatttaattgctgaaaactgcatatgaatgatttggtatattttacttcactggagcaacactggtatctgctctagtacctcatgttagtaagttataggagactataaatacagttgattcttattctttgtggcagttatgttctatagacactctgaacacccagttagtgaatactgacctattgcttctgggggaaatacaggggttaggttcttgcaagagtctagtcacaacattttcagcaaccagtcaatatataactttgttatatgtgtgtttctgtagtaagatacttcatttaatattactgttgtgtcattaacattgaaatcatggccaacagcactataattcatgcctgaacaaagcttacctgacacatgtatttttttcgtaatccacatttgtccttaggaagactagacagtactttagcattatacttggtgaccatttaacacagtgaaatcaccaacaaaggtatgaaaatttgaaaagcgtggcactaaatgaaccaccaaaatgacccgtttacagtataagagctgaaacaagaagacaaagcatcaccttgttcagtctcacctgggaacatgcccgtggggtgactccaattttttgctcctctgtgcctgtttatgaatgacctcggaagtgccacacattgatttgggggtataaactttagtgagtaggcaagtttgcaaatatagcacccatgaataatgaggatcaactgtaatcaactttttttctagaaattaagaaaataagtctttaaaagaattcccaagaaacagaaatatttgaagatataatttagatcaacaatatggttgagtcctttgatttttgtttacataaacacttaactgttaaaaataataaaaaagcctctcttaattgaagatattttattatataatgaaacaaaacaagctcttaaatcttaagttgaactctcagaacatgtaaatagatttatatatgtgtatctgctcaaaggagggagagggcagaatgtgttaatgttttgggaggcagggggtggagcagtggtggtgatacattgattacattacagtccttggcttggatgactcatgctgatatttgtttaaatcttacttgaccatttagtatacagtcacttaataaggttgagaaggctggataaaagggtggttcaaatcacagctccatcatttagtagctgtttgatcttagacaatatttcttacccccctaaatttgtatttcctcatctattaaaacagaactattaatggtacttacatcataggattgttgagaaaataggattgttaagagtgactgaatataaattacttggctcagtacctttcacaaagtaagtattcaattaatatgttttgggttattaattagttataattctaatgtttaaatgttcagatatgaaaaggggcaaatagctcaagcatggtggttcactcctgtaatcccagtactttgggaggctgaggcgggcagattacttgaggccaggagtttgagaccagcctggccaaaatggcaaaaccccctcactactgaaaatacaaaaattagccgggtgtggtggaacacacctgtaatcccagctacccgggaggctgaggcatgagaattacttgaacctgggaggtggaggttgcaataagctgagattgcacctctgcacttcaggctgggcaacagagtgagactctgtctcaaaaaaagaaataaaaataaaaaggggcaaatagaaaaaaaatacagaaattttatttataaaattgcaaatgaaattagatgaaaaaccttgttaatggaaaatgtttacattctcaatttctctctttgtttagaacattactactggatggaaatccattccgagttcctcgagcagccatattaatgaaaggaacagctgctatacttgaatatttgagagaccgaattcctacttaacatggagttgctttataacccttgtcatgtattattaaccctggttaattctaaggaggatgtaacatttgttttagtatcatcttaaaaggtgattattgtaattgatcttgtagtttcccagtatcacctacccgttggtataattagcctgggccatattcactgccagtaaatatttttacatttttatttaagatttttgtaaggtgttgtatacatttgtaatggtgataaccacaatgtgttcatacatttgttctaaatgttttgcttatgatttatcctgctaactttcattttcttatagcaagcagttttttcaaaaatgaatttttatttaatgtggttcagtattataataacaaagcatttttgtagaactggttttttttctcatttatttttgtattccatacaatgtgaccaattgacttgaatatgactagccagtttctatgtttttgttagatataaaattaaatcgaattttgttgaatactgttctttggcatttaaaaaataagaccttcttatcttgggccacatgtcaaaagaaaaaggaaacaaaaatatattaaaaataagacttttcattacccatgataggacttttgtgatatggctaatctcagtacacatttcaacttaaaacctttttatttacagcaccataattttaaaatttacttgcaatcttggtaagactaaacttgcagtgtttttctaaaagggaatttgataggtaaacttgatttaataaaaattaaatatcatttttgtttacaccaaaattatcagaagtaggttgattagtcattataacacttaccatatgattctattaagaagtcaattcagtagcatgtatatcaatttatatagataggtagatagcttttggatgattgaggcatgcttatattatgaaaaaaattgctaataaagataaatactacatgttcagaataaaagttacatttttcaaatatt

SEQ ID NO: 352015 - DNA, 6877 bp, Homo sapiens
  misc_feature (2681)..(2681): n is a, c, g, or t
atagacatttgccagccattcaggtagagagcattctagttagagctaatagcatatgccaaggcacaaagatgtgagaacatatggggtgtctgggaaacttcaagaagttcaatgtgctttggacaataaagcaaacaggtagaggagtagaaggaacagataaagtctggcaagtaagcagtagccagaccttgagctttttgtgctcaacgaaacttagattttgttctgcaaacactatcaagatactgcagataattaagagcaactaatatttattgggagcttattattctgctggtgctgtactaagtactttacatgtaatagctcaggcttacaagaaccctacatggtaggttctgttactgtgttcatttaaaaatcaaggattagaagctaaataactcatctaaggtatgcataaatagtaaattatacagctgagatttgagtccaggtggtttggctccagaagttgggctcttaacaactatgtcacattgtttcttatgatgaaaatggattctaaaaacaatttaattaaaatatgaataactggccaggtgcagtgactgacacctgtaatcccagcactttggaaggccgaggtgggcggatcacctgaggtcaggagtttgagaccagcctggccgatatggtgaaactccatctctactaaaaatacaaaaattagccaggcgtggtggtggcctgtaaacccagctactcaggaggctgaggcaggagaatcgcttgaaccccaggaggcagaggttgcagtgatccaggattgcgtcactgcactccagcctaggcgacagagcaagactctgtctcaaaaaataaataaaatttaaaaaataaaatattagcagctaatgtttaatgcaacctagataatgtcctaaggtcttcaaatacattcatttaatccttataacaagtgtatatgtttagtactattattattcctcatttatagatgaggaagctaatgcatagtgatgttaaaatattgctcattttaatttttcttctgtctgctccattacttgtcctttctagtatatagattgcaccattattgtcattattttaaaatatgtgcacttctcacatctctcctaatttttacttgtgaattgagctatcagttttatattgtgttgtcaattgagctaacaattgccttgcaagtaatgtctttggggaagtgccaaaagctagcctaaacttccgtgttatcaggtgattatcttgttcatgggttgcagggagggaagagaagagcctattaaggggtcatttggtccatctgtactcttggctattgcttctctagtcttactggaacttcagcactgccttgagtttacacttcactattgctttttttcatcaaggcagcaaaggaagggggcagtatgcggaaatgaaaaggccaaagctctcgttcctgcccattcttctattttctagtcaaggctgcagttcacctcatgctaaaactgtgctagcctttgtgccctgcggggtcctcagccattttacgttaattgcaagtattgctttgagagctattagccttcccatatcttgtggcatcttcagggttgcttggacaagaaagccagcagtctatgctaatttgttatctttttaagaacccaaagtgtactcattttagaagcctcagtcaaagcaaaatataaatcttgaattttacttaatatattgggagtgattatgtttcataagaagtaaaagtgaaaggaagaatacctacatggatacatttagagaagatttcctcttgaatgtgaacagaaaaatttactgggagaatttactctgaagttttgctgattttatacaataaatagcaactgttacaagtctgtctgtttaacatgtatttcaaggttttcaaaattagccctttctctttattttttgtaaaattcaaatacaggacttaatgccaattacagaataacatacactaaagaaaaaactgtcatgtcaaatttaagataatatgttttaaggaatgattttggtctgattccagtatatttaggtgttctgttcatgtattaataggtttaaaatgctacctgaagttctatatcgtatcttcacacttgaaacaattctgattagtaataatcaggttggatctgtggaccctcagaaaatgaagatgatggaaaatctgaccacgttggaccttcaaaataatgacctcttacaaattccaccagagctcggtaattgtgtaaacttaaggtaactacaccattctactgcattgtttcatttattttattgatttgttgaagtgatttgtttttctttttcagataaatttgcaagaagttaaagtaacagatttaatatcctgttaaaaataacaagtaacaaaacccagagtcccaattctgtttttcaaattttaccaaatgtatatttttagttttgcttatatggtatatgtgtgaatataataactaattatttctagtggcttttcgctatcactgtgtatgtttataacctgaatctctactgcataaaaatgtcggggaaatattaactccttagctttgaatacagggttttttttttttttttttttgaaattgattgcagattaccaccattctattttgagnccagtacagtctttctcactctttacatctgctgttccctcagcatcaggtacttttaccctgttttcatcaataattggcctattgaatgtcacctttgaaagccttccctgtcctccaagcagaattagtccctgatttcccatcatgcttcatttggacttatttgtacgatttttgggtctttctttggaaaagagttgtcccagtgcctaaaacatagtaaacacccagtaagtgcttattaagtgaatataaaggaggtttgaggtatcgacagaaagccaagtggttaagcagaatgtgtcagaagtaatttaattgctgaaaactgcatatgaatgatttggtatattttacttcactggagcaacactggtatctgctctagtacctcatgttagtaagttataggagactataaatacagttgattcttattctttgtggcagttatgttctatagacactctgaacacccagttagtgaatactgacctattgcttctgggggaaatacaggggttaggttcttgcaagagtctagtcacaacattttcagcaaccagtcaatatataactttgttatatgtgtgtttctgtagtaagatacttcatttaatattactgttgtgtcattaacattgaaatcatggccaacagcactataattcatgcctgaacaaagcttacctgacacatgtatttttttcgtaatccacatttgtccttaggaagactagacagtactttagcattatacttggtgaccatttaacacagtgaaatcaccaacaaaggtatgaaaatttgaaaagcgtggcactaaatgaaccaccaaaatgacccgtttacagtataagagctgaaacaagaagacaaagcatcaccttgttcagtctcacctgggaacatgcccgtggggtgactccaattttttgctcctctgtgcctgtttatgaatgacctcggaagtgccacacattgatttgggggtataaactttagtgagtaggcaagtttgcaaatatagcacccatgaataatgaggatcaactgtaatcaactttttttctagaaattaagaaaataagtctttaaaagaattcccaagaaacagaaatatttgaagatataatttagatcaacaatatggttgagtcctttgatttttgtttacataaacacttaactgttaaaaataataaaaaagcctctcttaattgaagatattttattatataatgaaacaaaacaagctcttaaatcttaagttgaactctcagaacatgtaaatagatttatatatgtgtatctgctcaaaggagggagagggcagaatgtgttaatgttttgggaggcagggggtggagcagtggtggtgatacattgattacattacagtccttggcttggatgactcatgctgatatttgtttaaatcttacttgaccatttagtatacagtcacttaataaggttgagaaggctggataaaagggtggttcaaatcacagctccatcatttagtagctgtttgatcttagacaatatttcttacccccctaaatttgtatttcctcatctattaaaacagaactattaatggtacttacatcataggattgttgagaaaataggattgttaagagtgactgaatataaattacttggctcagtacctttcacaaagtaagtattcaattaatatgttttgggttattaattagttataattctaatgtttaaatgttcagatatgaaaaggggcaaatagctcaagcatggtggttcactcctgtaatcccagtactttgggaggctgaggcgggcagattacttgaggccaggagtttgagaccagcctggccaaaatggcaaaaccccctcactactgaaaatacaaaaattagccgggtgtggtggaacacacctgtaatcccagctacccgggaggctgaggcatgagaattacttgaacctgggaggtggaggttgcaataagctgagattgcacctctgcacttcaggctgggcaacagagtgagactctgtctcaaaaaaagaaataaaaataaaaaggggcaaatagaaaaaaaatacagaaattttatttataaaattgcaaatgaaattagatgaaaaaccttgttaatggaaaatgtttacattctcaatttctctctttgtttagaacattactactggatggaaatccattccgagttcctcgagcagccatattaatgaaaggaacagctgctatacttgaatatttgagagaccgaattcctacttaacatggagttgctttataacccttgtcatgtattattaaccctggttaattctaaggaggatgtaacatttgttttagtatcatcttaaaaggtgattattgtaattgatcttgtagtttcccagtatcacctacccgttggtataattagcctgggccatattcactgccagtaaatatttttacatttttatttaagatttttgtaaggtgttgtatacatttgtaatggtgataaccacaatgtgttcatacatttgttctaaatgttttgcttatgatttatcctgctaactttcattttcttatagcaagcagttttttcaaaaatgaatttttatttaatgtggttcagtattataataacaaagcatttttgtagaactggttttttttctcatttatttttgtattccatacaatgtgaccaattgacttgaatatgactagccagtttctatgtttttgttagatataaaattaaatcgaattttgttgaatactgttctttggcatttaaaaaataagaccttcttatcttgggccacatgtcaaaagaaaaaggaaacaaaaatatattaaaaataagacttttcattacccatgataggacttttgtgatatggctaatctcagtacacatttcaacttaaaacctttttatttacagcaccataattttaaaatttacttgcaatcttggtaagactaaacttgcagtgtttttctaaaagggaatttgataggtaaacttgatttaataaaaattaaatatcatttttgtttacaccaaaattatcagaagtaggttgattagtcattataacacttaccatatgattctattaagaagtcaattcagtagcatgtatatcaatttatatagataggtagatagcttttggatgattgaggcatgcttatattatgaaaaaaattgctaataaagataaatactacatgttcagaataaaagttacatttttcaaatattaaaaaaaaaaaaaaaaaaaaggggggccgcccttttttttttttttatttgttattttgttttttggggcacgcgctgtgtttttttcgatctgtgaaggagtatacgcggcgggtttaaagattctttttgcgaaaaaatttccacctggcgagatatcaaattttttgtgtctccgtctctctcccccacgacatgcccaaactttgttggggtctccttgcggccgaggaggttttaattgcgctgttgtgctgtgaagccttctcgtgagagaggcattgacgacagcggggtgttatcaccccacttggagaggggaacagaggtatgtagctgggtgccgacgtgtgagtggaatggagtgcccatgggagatgccaccgcatgcagagttgtttcgcttgaacccctcaacgaagcagacgggtgtgtgggcccgcgcttcctcagctaccttgagaaaggcggggggggccctataaaagcccccacggggggggtgtgaaaagtgcgacactatctgcaggcgggtgatttaaataggcggagggcagggttgactgggcgagttattctccgcgcaagattgggttcctccccctatctatatcccggggaaagagaggtttacagaatgagtgccccgtatgccgcattggggaggaagagttgctcctcgtgaacaaggggaaatgttgcctgcggcgatataaggggcagatgaggatgtatttatgtcccccagggaagtgtgtgatgggcgacaacgattacagtagtctagtgggacggtgttgtttgggtgccccattgtaggtgcgtggtatgatgtgaacacacccttgcgggggttcttggttttctgcaaaaacatcgcggtcggtatacgctttgtgttga

SEQ ID NO: 352016 - DNA, 6536 bp, Homo sapiens
agcggagcccgggactccggcgagagcgacgcaaggtcggctgcggcggcggcccgagggcgcccgtgtgcccagtgcgcggcggggacggccgcgagctcgctggagggctccccagaataatccagaagtcgattccatcatggcagaactcaaggtggaggcgccggccagcgtagactggcagaaacgctgcctgaccctggaaactcagcttttccggttccgcctacaggccagcaagataagggagctgctggctgacaagatgcaggagctggagcagaggctgctggaggcagagcagagagcagagaacgctgagacccaggtgggtgtcatggaagagaaggtaaaactatccaatctgaagaatgtggactctgaggggagcctgcaccggaaataccaagaattgctgaaagccataaagggcaaagatgagctcatcagccagctagaggctcagctggagaagcagaagcagatgagggcagaggaagcaaaaactgttcaagaaaaagctgcaaagatcaaggaatgggtgacactcaagttggcaaagcttgagatggagaatcagcatctgaaaagccataatcagcgcctggtggagcaggtgggatcccttcaagatgcgctagaagctattcagatagctccttcacggaagctgctggtgcccccctacggagctgcagagcaggattctgtcccttcagagccgggaatccagcctatgggccaggacagtggctcccaggcccagggtctgaaggcagctgtgcttgcaccttccccaggtgccctgcagagcaaggactctgtttctgaagcagcaagccccttggaggattctagttccagcacggtccattctggggaaacagtagaggccaagccccttcaacctcatctgggaagagagagccctccccaccagccatgcatgaagcttcttaccttcagatgtagttcagcttcctggggtgagggtctggttactgctcagagagggatgctccctgggacaaagacctctgccagggaaggtggtcctggcagcagtctgaccctaccaaaggtgcgggctcctggcaccccgcgggacagcatccagttggccaaaaggcaccacagccagccccaggtgggccatgggcactttggccgtgtggtgaacattgagactgaggccttctcagccctccacccctctggccttcctgagctggagtcccgagctaggtcccgggaggaaccagagaagatggagatggaggagccacccccagcagggaagaatgaggaaagagagagcccaaaggcccttggagctgagctggaggaagtggagctgggtaacaagccacctacacccccgctgcaccagttttcatcctgggagagccggatctatgctgtggccacatcgggcatgcggctctcagatatgtctcccagaagtaatactgcatgctgcgcttcaagccctcctgcccttgtttcccctgggtctttctctggcctggtctacaagaatgtcactgtgcctgtctacacagcactgaaggggagagctacacagatcagcaacatgccctttatggacgagtcctctgggtctgacgatgactgcagctctcaggcgagtttccgaatctcggtcccctcctctgagtccaggaagaccagcggactaggcagcccccgggccatcaagagaggcgtctccatgtcctcactgagctccgagggtgactacgccatccccccggacgcctgctcactggacagtgactactcagagcctgagcacaaactgcagcgcacctcatcctactccaccgacgggctgggcctgggcggggagtcactggagaagtcgggctacctgctgaaaatggggagccaggtgaagacgtggaagaggcgctggtttgtcctgagacagggacagattatgtactacaagtccccgagtgatgtcatccggaaacctcaaggccaagtggatctgaactcccgctgccaaattgttcgaggggagggttcacagacgtttcagctcatctctgagaagaaaacctactacctgacggccgattcacccagcctgctggaggagtggatccgagtactccagagcctgctgaaggtgcaggccaccgggcctccagctctgcttcggggtggcaccaagcccaccgtgaagggctggctgaccaaggtaaagcatggccactccaaggtggtctggtgcgctcttgttgggaaaatcttctactactatcggagccatgaggacaagcgacccctgggctgcctgcctgtgcgggatgcgcacatagaggaagtagatcgatcctgtgactcagacgaggactatgaggctggaggaaccagacggttgctttcctcccactgcaccctggtgatccaccccacagagcacagccccacctacctcctcattggcaccaagcatgaaaaggatacgtggctctaccacctcacagtggctgcaggtggcagcagtgccaaggtgggcactgcctatgagcagctcattggaaaactgatggatggtgaaggagatccagattcgccgctctggaggcaccccatgctgtgctacagcaaagacggcctatacgcctccctcaccaccctgccctctgaggccttgcagacggaggccctcaagctcttcaagtcctgccagctcttcatcaacgtgccggtggaagctgcctcggtggactaccatgtgtccctggcccagaccgcactgcaggtctgcctggttcaccccgagctgcagagtgagatctactgccaactcatgaagcagaccagctgccgcccacctcagaagtactccctcatgcagtgctggcagctcctcgctctgtgtgctccacttttcctgcctcagcatcacttcctctggtatgtcaagcagcagctccaacgccatgcagatcccagaagtgaaactggccagtatgccacctactgccagcgggcagtggagcggaccctgcggaccggggagcgggaagccaggccatcacgcatggaagtggtgtccatcctgctgcgtaaccccttccaccactccttgcccttcagcatccccgtgcactttaccaacgggacttaccatgtggttggttttgacggctcttccacggttgatgagttcctccagcggctgaaccaggagataggcatgagaaagccatcccactctggctttgccctcttcacggacgatccctcgggcagggacctggagcactgcctgcagggaagtgtcaagatctgtgatgccatctccaagtgggaacaagccatgaaggagctgcaccccggaaagtctgagggtgggacacgcgtcgtgaagctgatgtacaagaacaggctgtactttcgcagtcaagtcaaaggggagacggaccgagaacggctgctccttgcctctcaaaccagtagagagatagtggcagggaggtttcctatcaacaaggaattggctcttgagatggctgccctgatggcccaggtagaatatggggacttggagaagcctgccctgccaggccctggaggcacatcccctgccaaggctcagcatcttctccagcaggtcctagacaggttccaccccaggcgctatagacatggggcccccgctgaacagctgaggcacctggcagatatgttgaccacaaaatgggcaacattgcaaggatgctcccctcctgagtgcatccgcatctacctgaccgtggccaggaaatggcctttctttggtgctaaactttttgctgctcagcctgcccagctgtcttccaaggagaacgctctggtgtggattgctgtgaatgaggatggcgtcagcatcctggaccacaacactatgcaagtgcacatcacttacccctactcttcagtgacaacgtttggtggctgcagggatgacttcatgcttgtgattagatctatcccagacaagagctctggaaaaagccacattgagaagttgatcttccggatggctgctcccaagattgcagaagccaccttcatcatggccagctatatgaaccattgcactacaactgtgaacccccccaccaacccacccggagcctgccagctgtgggaactggatggacgacagttcttttcttctgtttcctgtgctaccaaggggccaacgttgctgtgaatatttctcctacccgattccccaccaccactagtgcctctggatttagagatatatatcctagggtatgatactactgtgacgggtctaacagcccccggctactcttgttctgtgaaatgtgtattttagtctctgtgaagcctttactctctaggtgccttataatgtttcagggctcaactttttaaaatccagacccagtgttaaaaccatttattccttttttcataagaataatgactccagatgctacctgattctagacatagacagggatgatccactgttactgagggcatcagtgctataagttaaggctttctgcactggtactctcaaggaagctaattttctttctggggggggcgggggacacagtgtcactatgtcacccagtccacagggttcaagcaattctcctgcctcagccttcggagtagctgggattacaggtgtgcgccaccatgcccggctaatttttgtatttttagtagagacggggtttcaccatgttggccaggctggtctcgaactcctgacctcaggtgatctgcccactttggcctcccaaagtgctgggattacaggcatgagccatcgcccagcccagaagctaattttttaatattgtatatggtcttatttatacttgaagttttgtgaacgtcgctaaacaggataggactaaaatttccaattctcctacactctgtcagaagcctagaactcactaaactgggctgcctttcccaaatgggaaaggtgctgacagagttggagaaaaaagaatagactcatttttccccattattggtatgtaggcattggtacagccccttctggggcagtctttgcaggataacatgctatacctgctaagattcaagctgttttcctcacactggactttaggccaaacccagtaccacgcaatgtgcaagcaagggcaggaggtaggtccaatctgacccctccctgtctcattttaatgactggacagcgctcggtgaaggctgtgttcactgtagtgggccatcatttgtttccttcttcttgtaaaagaccaagcaaatgcactctgctttttgctgctgtaagaccaccaaaaatgagtcagaaacacagaagactatttcaggcatgtgggcctggatatgctccttgagacttctggcaaacttctgctgggaattagtttgagggtgagggtacatatgtgacatttgccctagcctaagagtagcaggtaaaaaaaagtttctttcatcttttgccttactgataataccataatccccctcaattcagaccttctgattgagtgcagaggagactagacagtctcctctagacaggttgtagacacaccctcccctaacaaaaacaaaacgaaagagttcatactctgattttccaacatctaggaaactgagttttatttcctagctctaaggcagccttactatatgtcagtaaagtgctgaaaactgtatatttagcagtagcacccaaaaccaagcctttaaccccaacaatgtgtgtatcttttgcacagcaaaaactgcgaggccagaactagtttatctgaacacctcagctgctgtaagcttctcctctctcaccccgtaaactgacaagcatgatgaaaaaagaagcagatccaagtttctgcctcttttaaatgtacttgactttgcaaggcaagtagttttacagccatttctgttcacacttttcaccccacaacttggggatctagctgagacatttctacctcgaacaagtcacatgtaccacaggttcctgaataattcctgcagggctggtgacagacataacagctctggttttataatatcttgggtatctctaaggccaataaggataacattatctacccagagagtttagaagaaaagtaggagtccaaaggaagagtaaacaagaatggagctgtgttcacactgaatttggggtcaatctatttcccccaccctctctcctccccaacccttcaggaaccctttagtttattaatcttatacagaagaaactaacttagaaacaaaggattcaatatttgcttatttattctttgttaacatgagagtcccatgtctgaaaaccaaagtccaatttctgtctggccttttgtctcatccttcttggcaaaagtagcttttgaactgatataaaaaaaaatgctgagtaacagaaaagtattaatgtgcttgacaccatgactgaaatactatgatcttgtttgtcaataaaaagcagctatctgtgaaccagg

SEQ ID NO: 352017 - DNA, 656 bp, Homo sapiens
aggcgtaccagccgatctgggtgaaacccaggatcaggtcgctgagcttgctgccccgttcgccgaagcagaagcgccccatcagcaccgtgttcagcccgctcttgaaggcgatgtagcccaggctgcagagaaccccccccgctgcaccagttttcatcctgggtaagaggcaacctccgggctgggcagaggagcagagctaatggcaagaacactgctggctgagcacagccatgcactgagcaggagaggaggctgctggcatcctcatggtggccctggcaggcaggtaccatggagcctgtgcagaccacacaaccagtgagggtcagcgccagaattcagaatgatgtgaatggcggttggctgtcatttcctgagtgctcaccgtgcaccatacattgagctgggtgccctgcataccttttctcatttaatctttgtgagtctttcaggtggtctggtatgatggtcaagagcataggccccagaagcaaaccactagggttgaactgttaactacgtgaccttggacatgttactgaacctctgtgcctcagcttccctgtctataaaatggggataatagtacctactttatagggttgttgtgaaagtacttacagtagtggttcacagtaggtggtaggtaa

SEQ ID NO: 352018 - DNA, 780 bp, Homo sapiens
gtgccagggccgtgggtgggaggagccacaagtgtcctgatttacatgaaccccactcactggctcctctccagccagccaccaaatctccacaacgagggctgtggggtggtcccatagccgtatgatttgtaactcacatctgcaacagtggaacactgtgcaagcctcatggaggaaaaaatggttaaagcttcaagccctcctgcccttgtttcccctgggtctttctctggcctggtctacaagaatgtcactgtgcctgtctacacagcactgaagggggtaagaaactgctgcacaaagagggggtgtctcatcaggaaaggcccctggcctcatcatccaatgactggggcggggctctagggccaggcttctgcacatggtgaccctgcccagggagctgagcccagcacgtgtcattttgttttattgtttattaggttattataaaaattccacatttacaaaaatgtgaatcagtatgaacgtggacaaggtaagaaggttaagcctatgcccgctttacagctctccccaccttttctcatgtctgcctcactcctcaggtcccagagggcagtggggctccttctagaattactgaggtatattccaacttatattcccgtaacgtcactacattttaaaaacaaaaatcagatagaattgcaatattttcatacacatttttgtctctgttactggtttttgaataatagtaatacttgataaaattttttatagaagaataaaaaaccaaaagtgaaatttcct

SEQ ID NO: 352019 - DNA, 5543 bp, Homo sapiens
aattccggctcttggggggttagatcttgagacccaagggtctctaaaacgggtaggattcagagcaacagtttactgacccatcttctcttgaacctcctttgccccaaaggtgaagggtggaggcaagagagggaactgttgggcactgattatattccaggtgttaaatgcttatgttaagtatttcattgattctcacagcagcctgaaaggtaagtattattacctccatttagagcagaggaaaatgagtctcagaaatgaagtaacttgcccaagatttgttagccagtcactgccccccacaggtctgcccacccccaaagccatgctttttcctgcacatgcctggagggggtgggatgggcatcatgccgggccctgagcttcctgagacctcttgtttcaggagagccggatctatgctgtggccacatcgggcatgcggctctcagatatgtctcccagaagtaatactgcatgctgcgcttcaagccctcctgcccttgtttcccctgggtctttctctggcctggtctacaagaatgtcactgtgcctgtctacacagcactgaaggggagagctacacagatcagcaacatgccctttatggacgagtcctctgggtctgacgatgactgcagctctcaggcgagtttccgaatctcggtcccctcctctgagtccaggaagaccagcggactaggcagcccccgggccatcaagagaggcgtctccatgtcctcactgagctccgagggtgactacgccatccccccggacgcctgctcactggacagtgactactcagagcctgagcacaaactgcagcgcacctcatcctactccaccgacgggctgggcctgggcggggagtcactggagaagtcgggctacctgctgaaaatggggagccaggtgaagacgtggaagaggcgctggtttgtcctgagacagggacagattatgtactacaagtccccgagtgatgtcatccggaaacctcaaggccaagtggatctgaactcccgctgccaaattgttcgaggggagggttcacagacgtttcagctcatctctgagaagaaaacctactacctgacggccgattcacccagcctgctggaggagtggatccgagtactccagagcctgctgaaggtgcaggccaccgggcctccagctctgcttcggggtggcaccaagcccaccgtgaagggctggctgaccaaggtaaagcatggccactccaaggtggtctggtgcgctcttgttgggaaaatcttctactactatcggagccatgaggacaagcgacccctgggctgcctgcctgtgcgggatgcgcacatagaggaagtagatcgatcctgtgactcagacgaggactatgaggctggaggaaccagacggttgctttcctcccactgcaccctggtgatccaccccacagagcacagccccacctacctcctcattggcaccaagcatgaaaaggatacgtggctctaccacctcacagtggctgcaggtggcagcagtgccaaggtgggcactgcctatgagcagctcattggaaaactgatggatggtgaaggagatccagattcgccgctctggaggcaccccatgctgtgctacagcaaagacggcctatacgcctccctcaccaccctgccctctgaggccttgcagacggaggccctcaagctcttcaagtcctgccagctcttcatcaacgtgccggtggaagctgcctcggtggactaccatgtgtccctggcccagaccgcactgcaggtctgcctggttcaccccgagctgcagagtgagatctactgccaactcatgaagcagaccagctgccgcccacctcagaagtactccctcatgcagtgctggcagctcctcgctctgtgtgctccacttttcctgcctcagcatcacttcctctggtatgtcaagcagcagctccaacgccatgcagatcccagaagtgaaactggccagtatgccacctactgccagcgggcagtggagcggaccctgcggaccggggagcgggaagccaggccatcacgcatggaagtggtgtccatcctgctgcgtaaccccttccaccactccttgcccttcagcatccccgtgcactttaccaacgggacttaccatgtggttggttttgacggctcttccacggttgatgagttcctccagcggctgaaccaggagataggcatgagaaagccatcccactctggctttgccctcttcacggacgatccctcgggcagggacctggagcactgcctgcagggaagtgtcaagatctgtgatgccatctccaagtgggaacaagccatgaaggagctgcaccccggaaagtctgagggtgggacacgcgtcgtgaagctgatgtacaagaacaggctgtactttcgcagtcaagtcaaaggggagacggaccgagaacggctgctccttgcctctcaaaccagtagagagatagtggcagggaggtttcctatcaacaaggaattggctcttgagatggctgccctgatggcccaggtagaatatggggacttggagaagcctgccctgccaggccctggaggcacatcccctgccaaggctcagcatcttctccagcaggtcctagacaggttccaccccaggcgctatagacatggggcccccgctgaacagctgaggcacctggcagatatgttgaccacaaaatgggcaacattgcaaggatgctcccctcctgagtgcatccgcatctacctgaccgtggccaggaaatggcctttctttggtgctaaactttttgctgctcagcctgcccagctgtcttccaaggagaacgctctggtgtggattgctgtgaatgaggatggcgtcagcatcctggaccacaacactatgcaagtgcacatcacttacccctactcttcagtgacaacgtttggtggctgcagggatgacttcatgcttgtgattagatctatcccagacaagagctctggaaaaagccacattgagaagttgatcttccggatggctgctcccaagattgcagaagccaccttcatcatggccagctatatgaaccattgcactacaactgtgaacccccccaccaacccacccggagcctgccagctgtgggaactggatggacgacagttcttttcttctgtttcctgtgctaccaaggggccaacgttgctgtgaatatttctcctacccgattccccaccaccactagtgcctctggatttagagatatatatcctagggtatgatactactgtgacgggtctaacagcccccggctactcttgttctgtgaaatgtgtattttagtctctgtgaagcctttactctctaggtgccttataatgtttcagggctcaactttttaaaatccagacccagtgttaaaaccatttattccttttttcataagaataatgactccagatgctacctgattctagacatagacagggatgatccactgttactgagggcatcagtgctataagttaaggctttctgcactggtactctcaaggaagctaattttctttctggggggggcgggggacacagtgtcactatgtcacccagtccacagggttcaagcaattctcctgcctcagccttcggagtagctgggattacaggtgtgcgccaccatgcccggctaatttttgtatttttagtagagacggggtttcaccatgttggccaggctggtctcgaactcctgacctcaggtgatctgcccactttggcctcccaaagtgctgggattacaggcatgagccatcgcccagcccagaagctaattttttaatattgtatatggtcttatttatacttgaagttttgtgaacgtcgctaaacaggataggactaaaatttccaattctcctacactctgtcagaagcctagaactcactaaactgggctgcctttcccaaatgggaaaggtgctgacagagttggagaaaaaagaatagactcatttttccccattattggtatgtaggcattggtacagccccttctggggcagtctttgcaggataacatgctatacctgctaagattcaagctgttttcctcacactggactttaggccaaacccagtaccacgcaatgtgcaagcaagggcaggaggtaggtccaatctgacccctccctgtctcattttaatgactggacagcgctcggtgaaggctgtgttcactgtagtgggccatcatttgtttccttcttcttgtaaaagaccaagcaaatgcactctgctttttgctgctgtaagaccaccaaaaatgagtcagaaacacagaagactatttcaggcatgtgggcctggatatgctccttgagacttctggcaaacttctgctgggaattagtttgagggtgagggtacatatgtgacatttgccctagcctaagagtagcaggtaaaaaaaagtttctttcatcttttgccttactgataataccataatccccctcaattcagaccttctgattgagtgcagaggagactagacagtctcctctagacaggttgtagacacaccctcccctaacaaaaacaaaacgaaagagttcatactctgattttccaacatctaggaaactgagttttatttcctagctctaaggcagccttactatatgtcagtaaagtgctgaaaactgtatatttagcagtagcacccaaaaccaagcctttaaccccaacaatgtgtgtatcttttgcacagcaaaaactgcgaggccagaactagtttatctgaacacctcagctgctgtaagcttctcctctctcaccccgtaaactgacaagcatgatgaaaaaagaagcagatccaagtttctgcctcttttaaatgtacttgactttgcaaggcaagtagttttacagccatttctgttcacacttttcaccccacaacttggggatctagctgagacatttctacctcgaacaagtcacatgtaccacaggttcctgaataattcctgcagggctggtgacagacataacagctctggttttataatatcttgggtatctctaaggccaataaggataacattatctacccagagagtttagaagaaaagtaggagtccaaaggaagagtaaacaagaatggagctgtgttcacactgaatttggggtcaatctatttcccccaccctctctcctccccaacccttcaggaaccctttagtttattaatcttatacagaagaaactaacttagaaacaaaggattcaatatttgcttatttattctttgttaacatgagagtcccatgtctgaaaaccaaagtccaatttctgtctggccttttgtctcatccttcttggcaaaagtagcttttgaactgatataaaaaaaaatgctgagtaacagaaaagtattaatgtgcttgacaccatgactgaaatactatgatcttgtttgtcaataaaaagcagctatctgtgaaccagg

SEQ ID NO: 352020 - DNA, 7153 bp, Homo sapiens
agcggagcccgggactccggcgagagcgacgcaaggtcggctgcggcggcggcccgagggcgcccgtgtgcccagtgcgcggcggggacggccgcgagctcgctggagggctccccagaataatccagaagtcgattccatcatggcagaactcaaggtggaggcgccggccagcgtagactggcagaaacgctgcctgaccctggaaactcagcttttccggttccgcctacaggccagcaagataagggagctgctggctgacaagatgcaggagctggagcagaggctgctggaggcagagcagagagcagagaacgctgagacccaggtgggtgtcatggaagagaaggtaaaactatccaatctgaagaatgtggactctgaggggagcctgcaccggaaataccaagaattgctgaaagccataaagggcaaagatgagctcatcagccagctagaggctcagctggagaagcagaagcagatgagggcagaggaagcaaaaactgttcaagaaaaagctgcaaagatcaaggaatgggtgacactcaagttggcaaagcttgagatggagaatcagcatctgaaaagccataatcagcgcctggtggagcaggtgggatcccttcaagatgcgctagaagctattcagatagctccttcacggaagctgctggtgcccccctacggagctgcagagcaggattctgtcccttcagagccgggaatccagcctatgggccaggacagtggctcccaggcccagggtctgaaggcagctgtgcttgcaccttccccaggtgccctgcagagcaaggactctgtttctgaagcagcaagccccttggaggattctagttccagcacggtccattctggggaaacagtagaggccaagccccttcaacctcatctgggaagagagagccctccccaccagccatgcatgaagcttcttaccttcagatgtagttcagcttcctggggtgagggtctggttactgctcagagagggatgctccctgggacaaagacctctgccagggaaggtggtcctggcagcagtctgaccctaccaaaggtgcgggctcctggcaccccgcgggacagcatccagttggccaaaaggcaccacagccagccccaggtgggccatgggcactttggccgtgtggtgaacattgagactgaggccttctcagccctccacccctctggccttcctgagctggagtcccgagctaggtcccgggaggaaccagagaagatggagatggaggagccacccccagcagggaagaatgaggaaagagagagcccaaaggcccttggagctgagctggaggaagtggagctgggtaacaagccacctacacccccgctgcaccagttttcatcctgggagagccggatctatgctgtggccacatcgggcatgcggctctcagatatgtctcccagaagtaatactgcatgctgcgcttcaagccctcctgcccttgtttcccctgggtctttctctggcctggtctacaagaatgtcactgtgcctgtctacacagcactgaaggggagagctacacagatcagcaacatgccctttatggacgagtcctctgggtctgacgatgactgcagctctcaggcgagtttccgaatctcggtcccctcctctgagtccaggaagaccagcggactaggcagcccccgggccatcaagagaggcgtctccatgtcctcactgagctccgagggtgactacgccatccccccggacgcctgctcactggacagtgactactcagagcctgagcacaaactgcagcgcacctcatcctactccaccgacgggctgggcctgggcggggagtcactggagaagtcgggctacctgctgaaaatggggagccaggtgaagacgtggaagaggcgctggtttgtcctgagacagggacagattatgtactacaagtccccgagtgatgtcatccggaaacctcaaggccaagtggatctgaactcccgctgccaaattgttcgaggggagggttcacagacgtttcagctcatctctgagaagaaaacctactacctgacggccgattcacccagcctgctggaggagtggatccgagtactccagagcctgctgaaggtgcaggccaccgggcctccagctctgcttcggggtggcaccaagcccaccgtgaagggctggctgaccaaggtaaagcatggccactccaaggtggtctggtgcgctcttgttgggaaaatcttctactactatcggagccatgaggacaagcgacccctgggctgcctgcctgtgcgggatgcgcacatagaggaagtagatcgatcctgtgactcagacgaggactatgaggctggaggaaccagacggttgctttcctcccactgcaccctggtgatccaccccacagagcacagccccacctacctcctcattggcaccaagcatgaaaaggatacgtggctctaccacctcacagtggctgcaggtggcagcagtgccaaggtgggcactgcctatgagcagctcattggaaaactgatggatggtgaaggagatccagattcgccgctctggaggcaccccatgctgtgctacagcaaagacggcctatacgcctccctcaccaccctgccctctgaggccttgcagacggaggccctcaagctcttcaagtcctgccagctcttcatcaacgtgccggtggaagctgcctcggtggactaccatgtgtccctggcccagaccgcactgcaggtctgcctggttcaccccgagctgcagagtgagatctactgccaactcatgaagcagaccagctgccgcccacctcagaagtactccctcatgcagtgctggcagctcctcgctctgtgtgctccacttttcctgcctcagcatcacttcctctggtatgtcaagcagcagctccaacgccatgcagatcccagaagtgaaactggccagtatgccacctactgccagcgggcagtggagcggaccctgcggaccggggagcgggaagccaggccatcacgcatggaagtggtgtccatcctgctgcgtaaccccttccaccactccttgcccttcagcatccccgtgcactttaccaacgggacttaccatgtggttggttttgacggctcttccacggttgatgagttcctccagcggctgaaccaggagataggcatgagaaagccatcccactctggctttgccctcttcacggacgatccctcgggcagggacctggagcactgcctgcagggaagtgtcaagatctgtgatgccatctccaagtgggaacaagccatgaaggagctgcaccccggaaagtctgagggtgggacacgcgtcgtgaagctgatgtacaagaacaggctgtactttcgcagtcaagtcaaaggggagacggaccgagaacggctgctccttgcctctcaaaccagtagagagatagtggcagggaggtttcctatcaacaaggaattggctcttgagatggctgccctgatggcccaggtagaatatggggacttggagaagcctgccctgccaggccctggaggcacatcccctgccaaggctcagcatcttctccagcaggtcctagacaggttccaccccaggcgctatagacatggggcccccgctgaacagctgaggcacctggcagatatgttgaccacaaaatgggcaacattgcaaggatgctcccctcctgagtgcatccgcatctacctgaccgtggccaggaaatggcctttctttggtgctaaactttttgctgctcagcctgcccagctgtcttccaaggagaacgctctggtgtggattgctgtgaatgaggatggcgtcagcatcctggaccacaacactatgcaagtgcacatcacttacccctactcttcagtgacaacgtttggtggctgcagggatgacttcatgcttgtgattagatctatcccagacaagagctctggaaaaagccacattgagaagttgatcttccggatggctgctcccaagattgcagaagccaccttcatcatggccagctatatgaaccattgcactacaactgtgaacccccccaccaacccacccggagcctgccagctgtgggaactggatggacgacagttcttttcttctgtttcctgtgctaccaaggggccaacgttgctgtgaatatttctcctacccgattccccaccaccactagtgcctctggatttagagatatatatcctagggtatgatactactgtgacgggtctaacagcccccggctactcttgttctgtgaaatgtgtattttagtctctgtgaagcctttactctctaggtgccttataatgtttcagggctcaactttttaaaatccagacccagtgttaaaaccatttattccttttttcataagaataatgactccagatgctacctgattctagacatagacagggatgatccactgttactgagggcatcagtgctataagttaaggctttctgcactggtactctcaaggaagctaattttctttctggggggggcgggggacacagtgtcactatgtcacccagtccacagggttcaagcaattctcctgcctcagccttcggagtagctgggattacaggtgtgcgccaccatgcccggctaatttttgtatttttagtagagacggggtttcaccatgttggccaggctggtctcgaactcctgacctcaggtgatctgcccactttggcctcccaaagtgctgggattacaggcatgagccatcgcccagcccagaagctaattttttaatattgtatatggtcttatttatacttgaagttttgtgaacgtcgctaaacaggataggactaaaatttccaattctcctacactctgtcagaagcctagaactcactaaactgggctgcctttcccaaatgggaaaggtgctgacagagttggagaaaaaagaatagactcatttttccccattattggtatgtaggcattggtacagccccttctggggcagtctttgcaggataacatgctatacctgctaagattcaagctgttttcctcacactggactttaggccaaacccagtaccacgcaatgtgcaagcaagggcaggaggtaggtccaatctgacccctccctgtctcattttaatgactggacagcgctcggtgaaggctgtgttcactgtagtgggccatcatttgtttccttcttcttgtaaaagaccaagcaaatgcactctgctttttgctgctgtaagaccaccaaaaatgagtcagaaacacagaagactatttcaggcatgtgggcctggatatgctccttgagacttctggcaaacttctgctgggaattagtttgagggtgagggtacatatgtgacatttgccctagcctaagagtagcaggtaaaaaaaagtttctttcatcttttgccttactgataataccataatccccctcaattcagaccttctgattgagtgcagaggagactagacagtctcctctagacaggttgtagacacaccctcccctaacaaaaacaaaacgaaagagttcatactctgattttccaacatctaggaaactgagttttatttcctagctctaaggcagccttactatatgtcagtaaagtgctgaaaactgtatatttagcagtagcacccaaaaccaagcctttaaccccaacaatgtgtgtatcttttgcacagcaaaaactgcgaggccagaactagtttatctgaacacctcagctgctgtaagcttctcctctctcaccccgtaaactgacaagcatgatgaaaaaagaagcagatccaagtttctgcctcttttaaatgtacttgactttgcaaggcaagtagttttacagccatttctgttcacacttttcaccccacaacttggggatctagctgagacatttctacctcgaacaagtcacatgtaccacaggttcctgaataattcctgcagggctggtgacagacataacagctctggttttataatatcttgggtatctctaaggccaataaggataacattatctacccagagagtttagaagaaaagtaggagtccaaaggaagagtaaacaagaatggagctgtgttcacactgaatttggggtcaatctatttcccccaccctctctcctccccaacccttcaggaaccctttagtttattaatcttatacagaagaaactaacttagaaacaaaggattcaatatttgcttatttattctttgttaacatgagagtcccatgtctgaaaaccaaagtccaatttctgtctggccttttgtctcatccttcttggcaaaagtagcttttgaactgatataaaaaaaaatgctgagtaacagaaaagtattaatgtgcttgacaccatgactgaaatactatgatcttgtttgtcaataaaaagcagctatctgtgaaccaggtaactgtgtgttttggaagatctgtttattaacagtaaataaataagccctgtacagaacacaggcactaggttgacagactcgtcttttgtaggacatttcttcctgctaaccagtactgaagggcttgtttttttcgtaactttacacaaggggtactattggaaaatatagctttctcaagacatctgatgtcagtttcccattgttttgcttcacaaacatcaacaaagtaaacctgaacatgcttagcaatttccgaaagtgttctttgctgacattacttttgacatactgtgtcaaaattcttaaggtctcccctcctttggtaaagtaggcaaaaccttacaaggaaaacactataatacacggaaatatactgagttagatttccagtcacctgctctatggctctaagatgcactacatccataatggttcctaggactgtgtccacctgatggtttggagtacggaaaaccagcccctatggcttaagagtcatctcccatggaagacaatgctggccttctgaacgctggggctcatgggcttgttgatgtggctttctggtgtgccaggatctcctggcagctcctgtatacttcaatcaagca

SEQ ID NO: 352021 - DNA, 5660 bp, Homo sapiens
agcggagcccgggactccggcgagagcgacgcaaggtcggctgcggcggcggcccgagggcgcccgtgtgcccagtgcgcggcggggacggccgcgagctcgctggagggctccccagaataatccagaagtcgattccatcatggcagaactcaaggtggaggcgccggccagcgtagactggcagaaacgctgcctgaccctggaaactcagcttttccggttccgcctacaggccagcaagataagggagctgctggctgacaagatgcaggagctggagcagaggctgctggaggcagagcagagagcagagaacgctgagacccaggtgggtgtcatggaagagaaggtaaaactatccaatctgaagaatgtggactctgaggggagcctgcaccggaaataccaagaattgctgaaagccataaagggcaaagatgagctcatcagccagctagaggctcagctggagaagcagaagcagatgagggcagaggaagcaaaaactgttcaagaaaaagctgcaaagatcaaggaatgggtgacactcaagttggcaaagcttgagatggagaatcagcatctgaaaagccataatcagcgcctggtggagcaggtgggatcccttcaagatgcgctagaagctattcagatagctccttcacggaagctgctggtgcccccctacggagctgcagagcaggattctgtcccttcagagccgggaatccagcctatgggccaggacagtggctcccaggcccagggtctgaaggcagctgtgcttgcaccttccccaggtgccctgcagagcaaggactctgtttctgaagcagcaagccccttggaggattctagttccagcacggtccattctggggaaacagtagaggccaagccccttcaacctcatctgggaagagagagccctccccaccagccatgcatgaagcttcttaccttcagatgtagttcagcttcctggggtgagggtctggttactgctcagagagggatgctccctgggacaaagacctctgccagggaaggtggtcctggcagcagtctgaccctaccaaaggtgcgggctcctggcaccccgcgggacagcatccagttggccaaaaggcaccacagccagccccaggtgggccatgggcactttggccgtgtggtgaacattgagactgaggccttctcagccctccacccctctggccttcctgagctggagtcccgagctaggtcccgggaggaaccagagaagatggagatggaggagccacccccagcagggaagaatgaggaaagagagagcccaaaggcccttggagctgagctggaggaagtggagctgggtaacaagccacctacacccccgctgcaccagttttcatcctgggagagccggatctatgctgtggccacatcgggcatgcggctctcagatatgtctcccagaagtaatactgcatgctgcgcttcaagccctcctgcccttgtttcccctgggtctttctctggcctggtctacaagaatgtcactgtgcctgtctacacagcactgaaggggagagctacacagatcagcaacatgccctttatggacgagtcctctgggtctgacgatgactgcagctctcaggcgagtttccgaatctcggtcccctcctctgagtccaggaagaccagcggactaggcagcccccgggccatcaagagaggcgtctccatgtcctcactgagctccgagggtgactacgccatccccccggacgcctgctcactggacagtgactactcagagcctgagcacaaactgcagcgcacctcatcctactccaccgacgggctgggcctgggcggggagtcactggagaagtcgggctacctgctgaaaatggggagccaggtgaagacgtggaagaggcgctggtttgtcctgagacagggacagattatgtactacaagtccccgagtgatgtcatccggaaacctcaaggccaagtggatctgaactcccgctgccaaattgttcgaggggagggttcacagacgtttcagctcatctctgagaagaaaacctactacctgacggccgattcacccagcctgctggaggagtggatccgagtactccagagcctgctgaaggtgcaggccaccgggcctccagctctgcttcggggtggcaccaagcccaccgtgaagggctggctgaccaaggtaaagcatggccactccaaggtggtctggtgcgctcttgttgggaaaatcttctactactatcggagccatgaggacaagcgacccctgggctgcctgcctgtgcgggatgcgcacatagaggaagtagatcgatcctgtgactcagacgaggactatgaggctggaggaaccagacggttgctttcctcccactgcaccctggtgatccaccccacagagcacagccccacctacctcctcattggcaccaagcatgaaaaggatacgtggctctaccacctcacagtggctgcaggtggcagcagtgccaaggtgggcactgcctatgagcagctcattggaaaactgatggatggtgaaggagatccagattcgccgctctggaggcaccccatgctgtgctacagcaaagacggcctatacgcctccctcaccaccctgccctctgaggccttgcagacggaggccctcaagctcttcaagtcctgccagctcttcatcaacgtgccggtggaagctgcctcggtggactaccatgtgtccctggcccagaccgcactgcaggtctgcctggttcaccccgagctgcagagtgagatctactgccaactcatgaagcagaccagctgccgcccacctcagaagtactccctcatgcagtgctggcagctcctcgctctgtgtgctccacttttcctgcctcagcatcacttcctctggtatgtcaagcagcagctccaacgccatgcagatcccagaagtgaaactggccagtatgccacctactgccagcgggcagtggagcggaccctgcggaccggggagcgggaagccaggccatcacgcatggaagtggtgtccatcctgctgcgtaaccccttccaccactccttgcccttcagcatccccgtgcactttaccaacgggacttaccatgtggttggttttgacggctcttccacggttgatgagttcctccagcggctgaaccaggagataggcatgagaaagccatcccactctggctttgccctcttcacggacgatccctcgggcagggacctggagcactgcctgcagggaagtgtcaagatctgtgatgccatctccaagtgggaacaagccatgaaggagctgcaccccggaaagtctgagggtgggacacgcgtcgtgaagctgatgtacaagaacaggctgtactttcgcagtcaagtcaaaggggagacggaccgagaacggctgctccttgcctctcaaaccagtagagagatagtggcagggaggtttcctatcaacaaggaattggctcttgagatggctgccctgatggcccaggtagaatatggggacttggagaagcctgccctgccaggccctggaggcacatcccctgccaaggctcagcatcttctccagcaggtcctagacaggttccaccccaggcgctatagacatggggcccccgctgaacagctgaggcacctggcagatatgttgaccacaaaatgggcaacattgcaaggatgctcccctcctgagtgcatccgcatctacctgaccgtggccaggaaatggcctttctttggtgctaaactttttgctgctcagcctgcccagctgtcttccaaggagaacgctctggtgtggattgctgtgaatgaggatggcgtcagcatcctggaccacaacactatgcaagtgcacatcacttacccctactcttcagtgacaacgtttggtggctgcagggatgacttcatgcttgtgattagatctatcccagacaagagctctggaaaaagccacattgagaagttgatcttccggatggctgctcccaagattgcagaagccaccttcatcatggccagctatatgaaccattgcactacaactgtgaacccccccaccaacccacccggagcctgccagctgtgggaactggatggacgacagttcttttcttctgtttcctgtgctaccaaggggccaacgttgctgtgaatatttctcctacccgattccccaccaccactagtgcctctggatttagagatatatatcctaggcaaaaactgcgaggccagaactagtttatctgaacacctcagctgctgtaagcttctcctctctcaccccgtaaactgacaagcatgatgaaaaaagaagcagatccaagtttctgcctcttttaaatgtacttgactttgcaaggcaagtagttttacagccatttctgttcacacttttcaccccacaacttggggatctagctgagacatttctacctcgaacaagtcacatgtaccacaggttcctgaataattcctgcagggctggtgacagacataacagctctggttttataatatcttgggtatctctaaggccaataaggataacattatctacccagagagtttagaagaaaagtaggagtccaaaggaagagtaaacaagaatggagctgtgttcacactgaatttggggtcaatctatttcccccaccctctctcctccccaacccttcaggaaccctttagtttattaatcttatacagaagaaactaacttagaaacaaaggattcaatatttgcttatttattctttgttaacatgagagtcccatgtctgaaaaccaaagtccaatttctgtctggccttttgtctcatccttcttggcaaaagtagcttttgaactgatataaaaaaaaatgctgagtaacagaaaagtattaatgtgcttgacaccatgactgaaatactatgatcttgtttgtcaataaaaagcagctatctgtgaaccaggtaactgtgtgttttggaagatctgtttattaacagtaaataaataagccctgtacagaacacaggcactaggttgacagactcgtcttttgtaggacatttcttcctgctaaccagtactgaagggcttgtttttttcgtaactttacacaaggggtactattggaaaatatagctttctcaagacatctgatgtcagtttcccattgttttgcttcacaaacatcaacaaagtaaacctgaacatgcttagcaatttccgaaagtgttctttgctgacattacttttgacatactgtgtcaaaattcttaaggtctcccctcctttggtaaagtaggcaaaaccttacaaggaaaacactataatacacggaaatatactgagttagatttccagtcacctgctctatggctctaagatgcactacatccataatggttcctaggactgtgtccacctgatggtttggagtacggaaaaccagcccctatggcttaagagtcatctcccatggaagacaatgctggccttctgaacgctggggctcatgggcttgttgatgtggctttctggtgtgccaggatctcctggcagctcctgtatacttcaatcaagca

SEQ ID NO: 352022 - DNA, 1633 bp, Homo sapiens
cagggtatcagtttcagtttgaccacacatctggtcatttaacgcatggtgcactgggccgcagcatctagcaagggcggctatagacttaggccactggacatcaagttgcctgaccttatactcctatcctagaccttcttggggacggaagagaggtggctagctctaaggcagccttactatatgtcagtaaagtgctgaaaactgtatatttagcagtagcacccaaaaccaagcctttaaccccaacaatgtgtgtatcttttgcacagcaaaaactgcgaggccagaactagtttatctgaacacctcagctgctgtaagcttctcctctctcaccccgtaaactgacaagcatgatgaaaaaagaagcagatccaagtttctgcctcttttaaatgtacttgactttgcaaggcaagtagttttacagccatttctgttcacacttttcaccccacaacttggggatctagctgagacatttctacctcgaacaagtcacatgtaccacaggttcctgaataattcctgcagggctggtgacagacataacagctctggttttataatatcttgggtatctctaaggccaataaggataacattatctacccagagagtttagaagaaaagtaggagtccaaaggaagagtaaacaagaatggagctgtgttcacactgaatttggggtcaatctatttcccccaccctctctcctccccaacccttcaggaaccctttagtttattaatcttatacagaagaaactaacttagaaacaaaggattcaatatttgcttatttattctttgttaacatgagagtcccatgtctgaaaaccaaagtccaatttctgtctggccttttgtctcatccttcttggcaaaagtagcttttgaactgatataaaaaaaaatgctgagtaacagaaaagtattaatgtgcttgacaccatgactgaaatactatgatcttgtttgtcaataaaaagcagctatctgtgaaccaggtaactgtgtgttttggaagatctgtttattaacagtaaataaataagccctgtacagaacacaggcactaggttgacagactcgtcttttgtaggacatttcttcctgctaaccagtactgaagggcttgtttttttcgtaactttacacaaggggtactattggaaaatatagctttctcaagacatctgatgtcagtttcccattgttttgcttcacaaacatcaacaaagtaaacctgaacatgcttagcaatttccgaaagtgttctttgctgacattacttttgacatactgtgtcaaaattcttaaggtctcccctcctttggtaaagtaggcaaaaccttacaaggaaaacactataatacacggaaatatactgagttagatttccagtcacctgctctatggctctaagatgcactacatccataatggttcctaggactgtgtccacctgatggtttggagtacggaaaaccagcccctatggcttaagagtcatctcccatggaagacaatgctggccttctgaacgctggggctcatgggcttgttgatgtggctttctggtgtgccaggatctcctggcagctcctgtatacttcaatcaagca

SEQ ID NO: 352023 - DNA, 5779 bp, Homo sapiens
  misc_feature (5742)..(5742): n is a, c, g, or t
  misc_feature (5747)..(5747): n is a, c, g, or t
  misc_feature (5751)..(5751): n is a, c, g, or t
agcggagcccgggactccggcgagagcgacgcaaggtcggctgcggcggcggcccgagggcgcccgtgtgcccagtgcgcggcggggacggccgcgagctcgctggagggctccccagaataatccagaagtcgattccatcatggcagaactcaaggtggaggcgccggccagcgtagactggcagaaacgctgcctgaccctggaaactcagcttttccggttccgcctacaggccagcaagataagggagctgctggctgacaagatgcaggagctggagcagaggctgctggaggcagagcagagagcagagaacgctgagacccaggtgggtgtcatggaagagaaggtaaaactatccaatctgaagaatgtggactctgaggggagcctgcaccggaaataccaagaattgctgaaagccataaagggcaaagatgagctcatcagccagctagaggctcagctggagaagcagaagcagatgagggcagaggaagcaaaaactgttcaagaaaaagctgcaaagatcaaggaatgggtgacactcaagttggcaaagcttgagatggagaatcagcatctgaaaagccataatcagcgcctggtggagcaggtgggatcccttcaagatgcgctagaagctattcagatagctccttcacggaagctgctggtgcccccctacggagctgcagagcaggattctgtcccttcagagccgggaatccagcctatgggccaggacagtggctcccaggcccagggtctgaaggcagctgtgcttgcaccttccccaggtgccctgcagagcaaggactctgtttctgaagcagcaagccccttggaggattctagttccagcacggtccattctggggaaacagtagaggccaagccccttcaacctcatctgggaagagagagccctccccaccagccatgcatgaagcttcttaccttcagatgtagttcagcttcctggggtgagggtctggttactgctcagagagggatgctccctgggacaaagacctctgccagggaaggtggtcctggcagcagtctgaccctaccaaaggtgcgggctcctggcaccccgcgggacagcatccagttggccaaaaggcaccacagccagccccaggtgggccatgggcactttggccgtgtggtgaacattgagactgaggccttctcagccctccacccctctggccttcctgagctggagtcccgagctaggtcccgggaggaaccagagaagatggagatggaggagccacccccagcagggaagaatgaggaaagagagagcccaaaggcccttggagctgagctggaggaagtggagctgggtaacaagccacctacacccccgctgcaccagttttcatcctgggagagccggatctatgctgtggccacatcgggcatgcggctctcagatatgtctcccagaagtaatactgcatgctgcgcttcaagccctcctgcccttgtttcccctgggtctttctctggcctggtctacaagaatgtcactgtgcctgtctacacagcactgaaggggagagctacacagatcagcaacatgccctttatggacgagtcctctgggtctgacgatgactgcagctctcaggcgagtttccgaatctcggtcccctcctctgagtccaggaagaccagcggactaggcagcccccgggccatcaagagaggcgtctccatgtcctcactgagctccgagggtgactacgccatccccccggacgcctgctcactggacagtgactactcagagcctgagcacaaactgcagcgcacctcatcctactccaccgacgggctgggcctgggcggggagtcactggagaagtcgggctacctgctgaaaatggggagccaggtgaagacgtggaagaggcgctggtttgtcctgagacagggacagattatgtactacaagtccccgagtgatgtcatccggaaacctcaaggccaagtggatctgaactcccgctgccaaattgttcgaggggagggttcacagacgtttcagctcatctctgagaagaaaacctactacctgacggccgattcacccagcctgctggaggagtggatccgagtactccagagcctgctgaaggtgcaggccaccgggcctccagctctgcttcggggtggcaccaagcccaccgtgaagggctggctgaccaaggtaaagcatggccactccaaggtggtctggtgcgctcttgttgggaaaatcttctactactatcggagccatgaggacaagcgacccctgggctgcctgcctgtgcgggatgcgcacatagaggaagtagatcgatcctgtgactcagacgaggactatgaggctggaggaaccagacggttgctttcctcccactgcaccctggtgatccaccccacagagcacagccccacctacctcctcattggcaccaagcatgaaaaggatacgtggctctaccacctcacagtggctgcaggtggcagcagtgccaaggtgggcactgcctatgagcagctcattggaaaactgatggatggtgaaggagatccagattcgccgctctggaggcaccccatgctgtgctacagcaaagacggcctatacgcctccctcaccaccctgccctctgaggccttgcagacggaggccctcaagctcttcaagtcctgccagctcttcatcaacgtgccggtggaagctgcctcggtggactaccatgtgtccctggcccagaccgcactgcaggtctgcctggttcaccccgagctgcagagtgagatctactgccaactcatgaagcagaccagctgccgcccacctcagaagtactccctcatgcagtgctggcagctcctcgctctgtgtgctccacttttcctgcctcagcatcacttcctctggtatgtcaagcagcagctccaacgccatgcagatcccagaagtgaaactggccagtatgccacctactgccagcgggcagtggagcggaccctgcggaccggggagcgggaagccaggccatcacgcatggaagtggtgtccatcctgctgcgtaaccccttccaccactccttgcccttcagcatccccgtgcactttaccaacgggacttaccatgtggttggttttgacggctcttccacggttgatgagttcctccagcggctgaaccaggagataggcatgagaaagccatcccactctggctttgccctcttcacggacgatccctcgggcagggacctggagcactgcctgcagggaagtgtcaagatctgtgatgccatctccaagtgggaacaagccatgaaggagctgcaccccggaaagtctgagggtgggacacgcgtcgtgaagctgatgtacaagaacaggctgtactttcgcagtcaagtcaaaggggagacggaccgagaacggctgctccttgcctctcaaaccagtagagagatagtggcagggaggtttcctatcaacaaggaattggctcttgagatggctgccctgatggcccaggtagaatatggggacttggagaagcctgccctgccaggccctggaggcacatcccctgccaaggctcagcatcttctccagcaggtcctagacaggttccaccccaggcgctatagacatggggcccccgctgaacagctgaggcacctggcagatatgttgaccacaaaatgggcaacattgcaaggatgctcccctcctgagtgcatccgcatctacctgaccgtggccaggaaatggcctttctttggtgctaaactttttgctgctcagcctgcccagctgtcttccaaggagaacgctctggtgtggattgctgtgaatgaggatggcgtcagcatcctggaccacaacactatgcaagtgcacatcacttacccctactcttcagtgacaacgtttggtggctgcagggatgacttcatgcttgtgattagatctatcccagacaagagctctggaaaaagccacattgagaagttgatcttccggatggctgctcccaagattgcagaagccaccttcatcatggccagctatatgaaccattgcactacaactgtgaacccccccaccaacccacccggagcctgccagctgtgggaactggatggacgacagttcttttcttctgtttcctgtgctaccaaggggccaacgttgctgtgaatatttctcctacccgattccccaccaccactagtgcctctggatttagagatatatatcctagggtatgatactactgtgacgggtctaacagcccccggctactcttgttctgtgaaatgtgtattttagtctctgtgaagcctttactctctaggtgccttataatgtttcagggctcaactttttaaaatccagacccagtgttaaaaccatttattccttttttcataagaataatgactccagatgctacctgattctagacatagacagggatgatccactgttactgagggcatcagtgctataagttaaggctttctgcactggtactctcaaggaagctaattttctttctggggggggcgggggacacagtgtcactatgtcacccagtccacagggttcaagcaattctcctgcctcagccttcggagtagctgggattacaggtgtgcgccaccatgcccggctaatttttgtatttttagtagagacggggtttcaccatgttggccaggctggtctcgaactcctgacctcaggtgatctgcccactttggcctcccaaagtgctgggattacaggcatgagccatcgcccagcccagaagctaattttttaatattgtatatggtcttatttatacttgaagttttgtgaacgtcgctaaacaggataggactaaaatttccaattctcctacactctgtcagaagcctagaactcactaaactgggctgcctttcccaaatgggaaaggtgctgacagagttggagaaaaaagaatagactcatttttccccattattggtatgtaggcattggtacagccccttctggggcagtctttgcaggataacatgctatacctgctaagattcaagctgttttcctcacactggactttaggccaaacccagtaccacgcaatgtgcaagcaagggcaggaggtaggtccaatctgacccctccctgtctcattttaatgactggacagcgctcggtgaaggctgtgttcactgtagtgggccatcatttgtttccttcttcttgtaaaagaccaagcaaatgcactctgctttttgctgctgtaagaccaccaaaaatgagtcagaaacacagaagactatttcaggcatgtgggcctggatatgctccttgagacttctggcaaacttctgctgggaattagtttgagggtgagggtacatatgtgacatttgccctagcctaagagtagcaggtaaaaaaaagtttctttcatcttttgccttactgataataccataatccccctcaattcagaccttctgattgagtgcagaggagactagacagtctcctctagacaggttgtagacacaccctcccctaacaaaaacaaaacgaaagagttcatactctgattttccaacatctaggaaactgagttttatttcctagctctaaggcagccttactatatgtcagtaaagtgctgaaaactgtatatttagcanagacnccanaagagggatcctctatagtctcccggtg

SEQ ID NO: 352024 - DNA, 3508 bp, Homo sapiens
agcggagcccgggactccggcgagagcgacgcaaggtcggctgcggcggcggcccgagggcgcccgtgtgcccagtgcgcggcggggacggccgcgagctcgctggagggctccccagaataatccagaagtcgattccatcatggcagaactcaaggtggaggcgccggccagcgtagactggcagaaacgctgcctgaccctggaaactcagcttttccggttccgcctacaggccagcaagataagggagctgctggctgacaagatgcaggagctggagcagaggctgctggaggcagagcagagagcagagaacgctgagacccaggtgggtgtcatggaagagaaggtaaaactatccaatctgaagaatgtggactctgaggggagcctgcaccggaaataccaagaattgctgaaagccataaagggcaaagatgagctcatcagccagctagaggctcagctggagaagcagaagcagatgagggcagaggaagcaaaaactgttcaagaaaaagctgcaaagatcaaggaatgggtgacactcaagttggcaaagcttgagatggagaatcagcatctgaaaagccataatcagcgcctggtggagcaggtgggatcccttcaagatgcgctagaagctattcagatagctccttcacggaagctgctggtgcccccctacggagctgcagagcaggattctgtcccttcagagccgggaatccagcctatgggccaggacagtggctcccaggcccagggtctgaaggcagctgtgcttgcaccttccccaggtgccctgcagagcaaggactctgtttctgaagcagcaagccccttggaggattctagttccagcacggtccattctggggaaacagtagaggccaagccccttcaacctcatctgggaagagagagccctccccaccagccatgcatgaagcttcttaccttcagatgtagttcagcttcctggggtgagggtctggttactgctcagagagggatgctccctgggacaaagacctctgccagggaaggtggtcctggcagcagtctgaccctaccaaaggtgcgggctcctggcaccccgcgggacagcatccagttggccaaaaggcaccacagccagccccaggtgggccatgggcactttggccgtgtggtgaacattgagactgaggccttctcagccctccacccctctggccttcctgagctggagtcccgagctaggtcccgggaggaaccagagaagatggagatggaggagccacccccagcagggaagaatgaggaaagagagagcccaaaggcccttggagctgagctggaggaagtggagctgggtaacaagccacctacacccccgctgcaccagttttcatcctgggagagccggatctatgctgtggccacatcgggcatgcggctctcagatatgtctcccagaagtaatactgcatgctgcgcttcaagccctcctgcccttgtttcccctgggtctttctctggcctggtctacaagaatgtcactgtgcctgtctacacagcactgaaggggagagctacacagatcagcaacatgccctttatggacgagtcctctgggtctgacgatgactgcagctctcaggcgagtttccgaatctcggtcccctcctctgagtccaggaagaccagcggactaggcagcccccgggccatcaagagaggcgtctccatgtcctcactgagctccgagggtgactacgccatccccccggacgcctgctcactggacagtgactactcagagcctgagcacaaactgcagcgcacctcatcctactccaccgacgggctgggcctgggcggggagtcactggagaagtcgggctacctgctgaaaatggggagccaggtgaagacgtggaagaggcgctggtttgtcctgagacagggacagattatgtactacaagtccccgagtgatgtcatccggaaacctcaaggccaagtggatctgaactcccgctgccaaattgttcgaggggagggttcacagacgtttcagctcatctctgagaagaaaacctactacctgacggccgattcacccagcctgctggaggagtggatccgagtactccagagcctgctgaaggtgcaggccaccgggcctccagctctgcttcggggtggcaccaagcccaccgtgaagggctggctgaccaaggtaaagcatggccactccaaggtggtctggtgcgctcttgttgggaaaatcttctactactatcggagccatgaggacaagcgacccctgggctgcctgcctgtgcgggatgcgcacatagaggaagtagatcgatcctgtgactcagacgaggactatgaggctggaggaaccagacggttgctttcctcccactgcaccctggtgatccaccccacagagcacagccccacctacctcctcattggcaccaagcatgaaaaggatacgtggctctaccacctcacagtggctgcaggtggcagcagtgccaaggtgggcactgcctatgagcagctcattggaaaactgatggatggtgaaggagatccagattcgccgctctggaggcaccccatgctgtgctacagcaaagacggcctatacgcctccctcaccaccctgccctctgaggccttgcagacggaggccctcaagctcttcaagtcctgccagctcttcatcaacgtgccggtggaagctgcctcggtggactaccatgtgtccctggcccagaccgcactgcaggtctgcctggttcaccccgagctgcagagtgagatctactgccaactcatgaagcagaccagctgccgcccacctcagaagtactccctcatgcagtgctggcagctcctcgctctgtgtgctccacttttcctgcctcagcatcacttcctctggtatgtcaagcagcagctccaacgccatgcagatcccagaagtgaaactggccagtatgccacctactgccagcgggcagtggagcggaccctgcggaccggggagcgggaagccaggccatcacgcatggaagtggtgtccatcctgctgcgtaaccccttccaccactccttgcccttcagcatccccgtgcactttaccaacgggacttaccatgtgaggagctgggcgtgctctttgccccgagtcttctcacgtcaccatccagagaatacccctgggccttaggctcaggcttggcagattgttcactgttgccccagaagtagatattatgaactcactgcatgaacagggaagctgagatgctgaccaagaaataagaaagggcctccaaaagattgttggtaaaggagggacccaggtatgcccagttcatttacagtggataagctcacatccttcatgcactggccctttgccctgtgaacacagaaaccaacttgctttgccttttgtatttgcccttgctcctttccacatgcatgcacagac

SEQ ID NO: 352025 - DNA, 2071 bp, Homo sapiens
agcggagcccgggactccggcgagagcgacgcaaggtcggctgcggcggcggcccgagggcgcccgtgtgcccagtgcgcggcggggacggccgcgagctcgctggagggctccccagaataatccagaagtcgattccatcatggcagaactcaaggtggaggcgccggccagcgtagactggcagaaacgctgcctgaccctggaaactcagcttttccggttccgcctacaggccagcaagataagggagctgctggctgacaagatgcaggagctggagcagaggctgctggaggcagagcagagagcagagaacgctgagacccaggtgggtgtcatggaagagaaggtaaaactatccaatctgaagaatgtggactctgaggggagcctgcaccggaaataccaagaattgctgaaagccataaagggcaaagatgagctcatcagccagctagaggctcagctggagaagcagaagcagatgagggcagaggaagcaaaaactgttcaagaaaaagctgcaaagatcaaggaatgggtgacactcaagttggcaaagcttgagatggagaatcagcatctgaaaagccataatcagcgcctggtggagcaggtgggatcccttcaagatgcgctagaagctattcagatagctccttcacggaagctgctggtgcccccctacggagctgcagagcaggattctgtcccttcagagccgggaatccagcctatgggccaggacagtggctcccaggcccagggtctgaaggcagctgtgcttgcaccttccccaggtgccctgcagagcaaggactctgtttctgaagcagcaagccccttggaggattctagttccagcacggtccattctggggaaacagtagaggccaagccccttcaacctcatctgggaagagagagccctccccaccagccatgcatgaagcttcttaccttcagatgtagttcagcttcctggggtgagggtctggttactgctcagagagggatgctccctgggacaaagacctctgccagggaaggtggtcctggcagcagtctgaccctaccaaaggtgcgggctcctggcaccccgcgggacagcatccagttggccaaaaggcaccacagccagccccaggtgggccatgggcactttggccgtgtggtgaacattgagactgaggccttctcagccctccacccctctggccttcctgagctggagtcccgagctaggtcccgggaggaaccagagaagatggagatggaggagccacccccagcagggaagaatgaggaaagagagagcccaaaggcccttggagctgagctggaggaagtggagctgggtaacaagccacctacacccccgctgcaccagttttcatcctgggagagccggatctatgctgtggccacatcgggcatgcggctctcagatatgtctcccagaagtaatactgcatgctgcgcttcaagccctcctgcccttgtttcccctgggtctttctctggcctggtctacaagaatgtcactgtgcctgtctacacagcactgaagggggtaagaaactgctgcacaaagagggggtgtctcatcaggaaaggcccctggcctcatcatccaatgactggggcggggctctagggccaggcttctgcacatggtgaccctgcccagggagctgagcccagcacgtgtcattttgttttattgtttattaggttattataaaaattccacatttacaaaaatgtgaatcagtatgaacgtggacaaggtaagaaggttaagcctatgcccgctttacagctctccccaccttttctcatgtctgcctcactcctcaggtcccagagggcagtggggctccttctagaattactgaggtatattccaacttatattcccgtaacgtcactacattttaaaaacaaaaatcagatagaattgcaatattttcatacacatttttgtctctgttactggtttttgaataatagtaatacttgataaaattttttatagaagaataaaaaaccaaaagtgaaatttcct

SEQ ID NO: 352026 - DNA, 716 bp, Homo sapiens
agcggagcccgggactccggcgagagcgacgcaaggtcggctgcggcggcggcccgagggcgcccgtgtgcccagtgcgcggcggggacggccgcgagctcgctggagggctccccagaataatccagaagtcgattccatcatggcagaactcaaggtggaggcgccggccagcgtagactggcagaaacgctgcctgaccctggaaactcagcttttccggttccgcctacaggccagcaagataagggagctgctggctgacaagatgcaggagctggagcagaggctgctggaggcagagcagagagcagagaacgctgagacccaggtgggtgtcatggaagagaaggtaaaactatccaatctgaagaatgtggactctgaggggagcctgcaccggaaataccaagaattgctgaaagccataaagggcaaagatgagctcatcagccagctagaggctcagctggagaagcagaagcagatgagggcagaggaagcaaaaactgttcaagaaaaagctgcaaagatcaaggaatgggtgacactcaagttggcaaagcttgagatggagaatcagcatctgaaaagccataatcagcgcctggtggagcaggtgggatcccttcaagatgcgctagaaggtaggcaggccagggtgtgcaggtgtgcagtacgtgtgtttggtgggtatggggctgagctacggagct

SEQ ID NO: 352027 - DNA, 333 bp, Homo sapiens
tttcttaagaaggccccttccctggttgtagagctaaccagagcagaacactgggcctccttttctcagaagggcactgtgcatctgagaggatctccagaccaacaggagcccacaccactgggcctctgaacagcacagttatgattccctttggatattttctcccaggtgggtattttaagagattaaataaactgaggcccaggaactcagcataagagctaataagtaagaaagccaggattcaagccaaggctagttcaattccttcacatctctgacctcctcttagattgcagaagccaccttcatcatggccagctatatgaa

SEQ ID NO: 352028 - DNA, 232 bp, Homo sapiens
tcctgatttacatgaaccccactcactggctcctctccagccagccaccaaatctccacaacgagggctgtggggtggtcccatagccgtatgatttgtaactcacatctgcaacagtggaacactgtgcaagcctcatggaggaaaaaatggttaaaggtaaggcttttggattcttttgtgagggatcctttaccacatggagatcatggtccccaaagggagtcaaggg

SEQ ID NO: 352029 - DNA, 5170 bp, Homo sapiens
atggtgtgtgggaagggaggcctgagaagcatggaggtcatgacacaggagtgaggccaggagggaccttacactggacagttgtctgttcagagtcccggctgggggttggccacaccatgggcacttggaccaggagtgcaagctgcagggttgggagaggactgttttgcagcctgagctgcagtgagggaggggcctgtcttgcagagagctacacagatcagcaacatgccctttatggacgagtcctctgggtctgacgatgactgcagctctcaggcgagtttccgaatctcggtcccctcctctgagtccaggaagaccagcggactaggcagcccccgggccatcaagagaggcgtctccatgtcctcactgagctccgagggtgactacgccatccccccggacgcctgctcactggacagtgactactcagagcctgagcacaaactgcagcgcacctcatcctactccaccgacgggctgggcctgggcggggagtcactggagaagtcgggctacctgctgaaaatggggagccaggtgaagacgtggaagaggcgctggtttgtcctgagacagggacagattatgtactacaagtccccgagtgatgtcatccggaaacctcaaggccaagtggatctgaactcccgctgccaaattgttcgaggggagggttcacagacgtttcagctcatctctgagaagaaaacctactacctgacggccgattcacccagcctgctggaggagtggatccgagtactccagagcctgctgaaggtgcaggccaccgggcctccagctctgcttcggggtggcaccaagcccaccgtgaagggctggctgaccaaggtaaagcatggccactccaaggtggtctggtgcgctcttgttgggaaaatcttctactactatcggagccatgaggacaagcgacccctgggctgcctgcctgtgcgggatgcgcacatagaggaagtagatcgatcctgtgactcagacgaggactatgaggctggaggaaccagacggttgctttcctcccactgcaccctggtgatccaccccacagagcacagccccacctacctcctcattggcaccaagcatgaaaaggatacgtggctctaccacctcacagtggctgcaggtggcagcagtgccaaggtgggcactgcctatgagcagctcattggaaaactgatggatggtgaaggagatccagattcgccgctctggaggcaccccatgctgtgctacagcaaagacggcctatacgcctccctcaccaccctgccctctgaggccttgcagacggaggccctcaagctcttcaagtcctgccagctcttcatcaacgtgccggtggaagctgcctcggtggactaccatgtgtccctggcccagaccgcactgcaggtctgcctggttcaccccgagctgcagagtgagatctactgccaactcatgaagcagaccagctgccgcccacctcagaagtactccctcatgcagtgctggcagctcctcgctctgtgtgctccacttttcctgcctcagcatcacttcctctggtatgtcaagcagcagctccaacgccatgcagatcccagaagtgaaactggccagtatgccacctactgccagcgggcagtggagcggaccctgcggaccggggagcgggaagccaggccatcacgcatggaagtggtgtccatcctgctgcgtaaccccttccaccactccttgcccttcagcatccccgtgcactttaccaacgggacttaccatgtggttggttttgacggctcttccacggttgatgagttcctccagcggctgaaccaggagataggcatgagaaagccatcccactctggctttgccctcttcacggacgatccctcgggcagggacctggagcactgcctgcagggaagtgtcaagatctgtgatgccatctccaagtgggaacaagccatgaaggagctgcaccccggaaagtctgagggtgggacacgcgtcgtgaagctgatgtacaagaacaggctgtactttcgcagtcaagtcaaaggggagacggaccgagaacggctgctccttgcctctcaaaccagtagagagatagtggcagggaggtttcctatcaacaaggaattggctcttgagatggctgccctgatggcccaggtagaatatggggacttggagaagcctgccctgccaggccctggaggcacatcccctgccaaggctcagcatcttctccagcaggtcctagacaggttccaccccaggcgctatagacatggggcccccgctgaacagctgaggcacctggcagatatgttgaccacaaaatgggcaacattgcaaggatgctcccctcctgagtgcatccgcatctacctgaccgtggccaggaaatggcctttctttggtgctaaactttttgctgctcagcctgcccagctgtcttccaaggagaacgctctggtgtggattgctgtgaatgaggatggcgtcagcatcctggaccacaacactatgcaagtgcacatcacttacccctactcttcagtgacaacgtttggtggctgcagggatgacttcatgcttgtgattagatctatcccagacaagagctctggaaaaagccacattgagaagttgatcttccggatggctgctcccaagattgcagaagccaccttcatcatggccagctatatgaaccattgcactacaactgtgaacccccccaccaacccacccggagcctgccagctgtgggaactggatggacgacagttcttttcttctgtttcctgtgctaccaaggggccaacgttgctgtgaatatttctcctacccgattccccaccaccactagtgcctctggatttagagatatatatcctagggtatgatactactgtgacgggtctaacagcccccggctactcttgttctgtgaaatgtgtattttagtctctgtgaagcctttactctctaggtgccttataatgtttcagggctcaactttttaaaatccagacccagtgttaaaaccatttattccttttttcataagaataatgactccagatgctacctgattctagacatagacagggatgatccactgttactgagggcatcagtgctataagttaaggctttctgcactggtactctcaaggaagctaattttctttctggggggggcgggggacacagtgtcactatgtcacccagtccacagggttcaagcaattctcctgcctcagccttcggagtagctgggattacaggtgtgcgccaccatgcccggctaatttttgtatttttagtagagacggggtttcaccatgttggccaggctggtctcgaactcctgacctcaggtgatctgcccactttggcctcccaaagtgctgggattacaggcatgagccatcgcccagcccagaagctaattttttaatattgtatatggtcttatttatacttgaagttttgtgaacgtcgctaaacaggataggactaaaatttccaattctcctacactctgtcagaagcctagaactcactaaactgggctgcctttcccaaatgggaaaggtgctgacagagttggagaaaaaagaatagactcatttttccccattattggtatgtaggcattggtacagccccttctggggcagtctttgcaggataacatgctatacctgctaagattcaagctgttttcctcacactggactttaggccaaacccagtaccacgcaatgtgcaagcaagggcaggaggtaggtccaatctgacccctccctgtctcattttaatgactggacagcgctcggtgaaggctgtgttcactgtagtgggccatcatttgtttccttcttcttgtaaaagaccaagcaaatgcactctgctttttgctgctgtaagaccaccaaaaatgagtcagaaacacagaagactatttcaggcatgtgggcctggatatgctccttgagacttctggcaaacttctgctgggaattagtttgagggtgagggtacatatgtgacatttgccctagcctaagagtagcaggtaaaaaaaagtttctttcatcttttgccttactgataataccataatccccctcaattcagaccttctgattgagtgcagaggagactagacagtctcctctagacaggttgtagacacaccctcccctaacaaaaacaaaacgaaagagttcatactctgattttccaacatctaggaaactgagttttatttcctagctctaaggcagccttactatatgtcagtaaagtgctgaaaactgtatatttagcagtagcacccaaaaccaagcctttaaccccaacaatgtgtgtatcttttgcacagcaaaaactgcgaggccagaactagtttatctgaacacctcagctgctgtaagcttctcctctctcaccccgtaaactgacaagcatgatgaaaaaagaagcagatccaagtttctgcctcttttaaatgtacttgactttgcaaggcaagtagttttacagccatttctgttcacacttttcaccccacaacttggggatctagctgagacatttctacctcgaacaagtcacatgtaccacaggttcctgaataattcctgcagggctggtgacagacataacagctctggttttataatatcttgggtatctctaaggccaataaggataacattatctacccagagagtttagaagaaaagtaggagtccaaaggaagagtaaacaagaatggagctgtgttcacactgaatttggggtcaatctatttcccccaccctctctcctccccaacccttcaggaaccctttagtttattaatcttatacagaagaaactaacttagaaacaaaggattcaatatttgcttatttattctttgttaacatgagagtcccatgtctgaaaaccaaagtccaatttctgtctggccttttgtctcatccttcttggcaaaagtagcttttgaactgatataaaaaaaaatgctgagtaacagaaaagtattaatgtgcttgacaccatgactgaaatactatgatcttgtttgtcaataaaaagcagctatctgtgaaccagg

SEQ ID NO: 352030 - DNA, 4057 bp, Homo sapiens
ctctatgtatttaatatatatttataagccatcacaaatgctatgaagatgtacagaggtgttataaaggcatataacagggacccacttggtctgggagcttaggaaaagcttctgaaaaaggtggcatgtccaatgtctatctgcctccctttgggttaagagagagattttctggattaccatactgtagtcctggcagtgaaaattagtcattacaggaatgtccactaaatagtcactttcttactgatagggcctaaagccacaggactgcattcttgctttcctatttcttttacagcacctaggagattggctgaagtcagaagcacttcggcttggagactataggtggaatgccgtgtttccaagactaggagaaaaccagctgttccccattcccctaacagagcagctagggctggcctctattctgtagcacagagctttccatccagtgtgctgtggcagcatgggttctagggacatcaaaagaatgatcgcctctgcctttgagatggttagtaggtggccagagccccaaggccaagggtctcctgtcacaagcagccttgtctatttcctgcatacactgtacaaatatcatctttgttttccaagatgaggtggctggaaatcactgcttagcagatccctggatgtgccttctttctcagaaagttattatagttcaaaatctctaactatggatatatctgatgggttgtttctgtttccccagcctgcccagctgtcttccaaggagaacgctctggtgtggattgctgtgaatgaggatggcgtcagcatcctggaccacaacactatgcaagtgcacatcacttacccctactcttcagtgacaacgtttggtggctgcagggatgacttcatgcttgtgattagatctatcccagacaagagctctggaaaaagccacattgagaagttgatcttccggatggctgctcccaagattgcagaagccaccttcatcatggccagctatatgaaccattgcactacaactgtgaacccccccaccaacccacccggagcctgccagctgtgggaactggatggacgacagttcttttcttctgtttcctgtgctaccaaggggccaacgttgctgtgaatatttctcctacccgattccccaccaccactagtgcctctggatttagagatatatatcctagggtatgatactactgtgacgggtctaacagcccccggctactcttgttctgtgaaatgtgtattttagtctctgtgaagcctttactctctaggtgccttataatgtttcagggctcaactttttaaaatccagacccagtgttaaaaccatttattccttttttcataagaataatgactccagatgctacctgattctagacatagacagggatgatccactgttactgagggcatcagtgctataagttaaggctttctgcactggtactctcaaggaagctaattttctttctggggggggcgggggacacagtgtcactatgtcacccagtccacagggttcaagcaattctcctgcctcagccttcggagtagctgggattacaggtgtgcgccaccatgcccggctaatttttgtatttttagtagagacggggtttcaccatgttggccaggctggtctcgaactcctgacctcaggtgatctgcccactttggcctcccaaagtgctgggattacaggcatgagccatcgcccagcccagaagctaattttttaatattgtatatggtcttatttatacttgaagttttgtgaacgtcgctaaacaggataggactaaaatttccaattctcctacactctgtcagaagcctagaactcactaaactgggctgcctttcccaaatgggaaaggtgctgacagagttggagaaaaaagaatagactcatttttccccattattggtatgtaggcattggtacagccccttctggggcagtctttgcaggataacatgctatacctgctaagattcaagctgttttcctcacactggactttaggccaaacccagtaccacgcaatgtgcaagcaagggcaggaggtaggtccaatctgacccctccctgtctcattttaatgactggacagcgctcggtgaaggctgtgttcactgtagtgggccatcatttgtttccttcttcttgtaaaagaccaagcaaatgcactctgctttttgctgctgtaagaccaccaaaaatgagtcagaaacacagaagactatttcaggcatgtgggcctggatatgctccttgagacttctggcaaacttctgctgggaattagtttgagggtgagggtacatatgtgacatttgccctagcctaagagtagcaggtaaaaaaaagtttctttcatcttttgccttactgataataccataatccccctcaattcagaccttctgattgagtgcagaggagactagacagtctcctctagacaggttgtagacacaccctcccctaacaaaaacaaaacgaaagagttcatactctgattttccaacatctaggaaactgagttttatttcctagctctaaggcagccttactatatgtcagtaaagtgctgaaaactgtatatttagcagtagcacccaaaaccaagcctttaaccccaacaatgtgtgtatcttttgcacagcaaaaactgcgaggccagaactagtttatctgaacacctcagctgctgtaagcttctcctctctcaccccgtaaactgacaagcatgatgaaaaaagaagcagatccaagtttctgcctcttttaaatgtacttgactttgcaaggcaagtagttttacagccatttctgttcacacttttcaccccacaacttggggatctagctgagacatttctacctcgaacaagtcacatgtaccacaggttcctgaataattcctgcagggctggtgacagacataacagctctggttttataatatcttgggtatctctaaggccaataaggataacattatctacccagagagtttagaagaaaagtaggagtccaaaggaagagtaaacaagaatggagctgtgttcacactgaatttggggtcaatctatttcccccaccctctctcctccccaacccttcaggaaccctttagtttattaatcttatacagaagaaactaacttagaaacaaaggattcaatatttgcttatttattctttgttaacatgagagtcccatgtctgaaaaccaaagtccaatttctgtctggccttttgtctcatccttcttggcaaaagtagcttttgaactgatataaaaaaaaatgctgagtaacagaaaagtattaatgtgcttgacaccatgactgaaatactatgatcttgtttgtcaataaaaagcagctatctgtgaaccaggtaactgtgtgttttggaagatctgtttattaacagtaaataaataagccctgtacagaacacaggcactaggttgacagactcgtcttttgtaggacatttcttcctgctaaccagtactgaagggcttgtttttttcgtaactttacacaaggggtactattggaaaatatagctttctcaagacatctgatgtcagtttcccattgttttgcttcacaaacatcaacaaagtaaacctgaacatgcttagcaatttccgaaagtgttctttgctgacattacttttgacatactgtgtcaaaattcttaaggtctcccctcctttggtaaagtaggcaaaaccttacaaggaaaacactataatacacggaaatatactgagttagatttccagtcacctgctctatggctctaagatgcactacatccataatggttcctaggactgtgtccacctgatggtttggagtacggaaaaccagcccctatggcttaagagtcatctcccatggaagacaatgctggccttctgaacgctggggctcatgggcttgttgatgtggctttctggtgtgccaggatctcctggcagctcctgtatacttcaatcaagca

SEQ ID NO: 352031 - DNA, 6710 bp, Homo sapiens
agcggagcccgggactccggcgagagcgacgcaaggtcggctgcggcggcggcccgagggcgcccgtgtgcccagtgcgcggcggggacggccgcgagctcgctggagggctccccagaataatccagaagtcgattccatcatggcagaactcaaggtggaggcgccggccagcgtagactggcagaaacgctgcctgaccctggaaactcagcttttccggttccgcctacaggccagcaagataagggagctgctggctgacaagatgcaggagctggagcagaggctgctggaggcagagcagagagcagagaacgctgagacccaggtgggtgtcatggaagagaaggtaaaactatccaatctgaagaatgtggactctgaggggagcctgcaccggaaataccaagaattgctgaaagccataaagggcaaagatgagctcatcagccagctagaggctcagctggagaagcagaagcagatgagggcagaggaagcaaaaactgttcaagaaaaagctgcaaagatcaaggaatgggtgacactcaagttggcaaagcttgagatggagaatcagcatctgaaaagccataatcagcgcctggtggagcaggtgggatcccttcaagatgcgctagaagctattcagatagctccttcacggaagctgctggtgcccccctacggagctgcagagcaggattctgtcccttcagagccgggaatccagcctatgggccaggacagtggctcccaggcccagggtctgaaggcagctgtgcttgcaccttccccaggtgccctgcagagcaaggactctgtttctgaagcagcaagccccttggaggattctagttccagcacggtccattctggggaaacagtagaggccaagccccttcaacctcatctgggaagagagagccctccccaccagccatgcatgaagcttcttaccttcagatgtagttcagcttcctggggtgagggtctggttactgctcagagagggatgctccctgggacaaagacctctgccagggaaggtggtcctggcagcagtctgaccctaccaaaggtgcgggctcctggcaccccgcgggacagcatccagttggccaaaaggcaccacagccagccccaggtgggccatgggcactttggccgtgtggtgaacattgagactgaggccttctcagccctccacccctctggccttcctgagctggagtcccgagctaggtcccgggaggaaccagagaagatggagatggaggagccacccccagcagggaagaatgaggaaagagagagcccaaaggcccttggagctgagctggaggaagtggagctgggtaacaagccacctacacccccgctgcaccagttttcatcctgggagagccggatctatgctgtggccacatcgggcatgcggctctcagatatgtctcccagaagtaatactgcatgctgcgcttcaagccctcctgcccttgtttcccctgggtctttctctggcctggtctacaagaatgtcactgtgcctgtctacacagcactgaaggggagagctacacagatcagcaacatgccctttatggacgagtcctctgggtctgacgatgactgcagctctcaggcgagtttccgaatctcggtcccctcctctgagtccaggaagaccagcggactaggcagcccccgggccatcaagagaggcgtctccatgtcctcactgagctccgagggtgactacgccatccccccggacgcctgctcactggacagtgactactcagagcctgagcacaaactgcagcgcacctcatcctactccaccgacgggctgggcctgggcggggagtcactggagaagtcgggctacctgctgaaaatggggagccaggtgaagacgtggaagaggcgctggtttgtcctgagacagggacagattatgtactacaagtccccgagtgatgtcatccggaaacctcaaggccaagtggatctgaactcccgctgccaaattgttcgaggggagggttcacagacgtttcagctcatctctgagaagaaaacctactacctgacggccgattcacccagcctgctggaggagtggatccgagtactccagagcctgctgaaggtgcaggccaccgggcctccagctctgcttcggggtggcaccaagcccaccgtgaagggctggctgaccaaggtaaagcatggccactccaaggtggtctggtgcgctcttgttgggaaaatcttctactactatcggagccatgaggacaagcgacccctgggctgcctgcctgtgcgggatgcgcacatagaggaagtagatcgatcctgtgactcagacgaggactatgaggctggaggaaccagacggttgctttcctcccactgcaccctggtgatccaccccacagagcacagccccacctacctcctcattggcaccaagcatgaaaaggatacgtggctctaccacctcacagtggctgcaggtggcagcagtgccaaggtgggcactgcctatgagcagctcattggaaaactgatggatggtgaaggagatccagattcgccgctctggaggcaccccatgctgtgctacagcaaagacggcctatacgcctccctcaccaccctgccctctgaggccttgcagacggaggccctcaagctcttcaagtcctgccagctcttcatcaacgtgccggtggaagctgcctcggtggactaccatgtgtccctggcccagaccgcactgcaggtctgcctggttcaccccgagctgcagagtgagatctactgccaactcatgaagcagaccagctgccgcccacctcagaagtactccctcatgcagtgctggcagctcctcgctctgtgtgctccacttttcctgcctcagcatcacttcctctggtatgtcaagcagcagctccaacgccatgcagatcccagaagtgaaactggccagtatgccacctactgccagcgggcagtggagcggaccctgcggaccggggagcgggaagccaggccatcacgcatggaagtggtgtccatcctgctgcgtaaccccttccaccactccttgcccttcagcatccccgtgcactttaccaacgggacttaccatgtggttggttttgacggctcttccacggttgatgagttcctccagcggctgaaccaggagataggcatgagaaagccatcccactctggctttgccctcttcacggacgatccctcgggcagggacctggagcactgcctgcagggaagtgtcaagatctgtgatgccatctccaagtgggaacaagccatgaaggagctgcaccccggaaagtctgagggtgggacacgcgtcgtgaagctgatgtacaagaacaggctgtactttcgcagtcaagtcaaaggggagacggaccgagaacggctgctccttgcctctcaaaccagtagagagatagtggcagggaggtttcctatcaacaaggaattggctcttgagatggctgccctgatggcccaggtagaatatggggacttggagaagcctgccctgccaggccctggaggcacatcccctgccaaggctcagcatcttctccagcaggtcctagacaggttccaccccaggcgctatagacatggggcccccgctgaacagctgaggcacctggcagatatgttgaccacaaaatgggcaacattgcaaggatgctcccctcctgagtgcatccgcatctacctgaccgtggccaggaaatggcctttctttggtgctaaactttttgctgctcagcctgcccagctgtcttccaaggagaacgctctggtgtggattgctgtgaatgaggatggcgtcagcatcctggaccacaacactatgcaagtgcacatcacttacccctactcttcagtgacaacgtttggtggctgcagggatgacttcatgcttgtgattagatctatcccagacaagagctctggaaaaagccacattgagaagttgatcttccggatggctgctcccaagattgcagaagccaccttcatcatggccagctatatgaaccattgcactacaactgtgaacccccccaccaacccacccggagcctgccagctgtgggaactggatggacgacagttcttttcttctgtttcctgtgctaccaaggggccaacgttgctgtgaatatttctcctacccgattccccaccaccactagtgcctctggatttagagatatatatcctagggtatgatactactgtgacgggtctaacagcccccggctactcttgttctgtgaaatgtgtattttagtctctgtgaagcctttactctctaggtgccttataatgtttcagggctcaactttttaaaatccagacccagtgttaaaaccatttattccttttttcataagaataatgactccagatgctacctgattctagacatagacagggatgatccactgttactgagggcatcagtgctataagttaaggctttctgcactggtactctcaaggaagctaattttctttctggggggggcgggggacacagtgtcactatgtcacccagtccacagggttcaagcaattctcctgcctcagccttcggagtagctgggattacaggtgtgcgccaccatgcccggctaatttttgtatttttagtagagacggggtttcaccatgttggccaggctggtctcgaactcctgacctcaggtgatctgcccactttggcctcccaaagtgctgggattacaggcatgagccatcgcccagcccagaagctaattttttaatattgtatatggtcttatttatacttgaagttttgtgaacgtcgctaaacaggataggactaaaatttccaattctcctacactctgtcagaagcctagaactcactaaactgggctgcctttcccaaatgggaaaggtgctgacagagttggagaaaaaagaatagactcatttttccccattattggtatgtaggcattggtacagccccttctggggcagtctttgcaggataacatgctatacctgctaagattcaagctgttttcctcacactggactttaggccaaacccagtaccacgcaatgtgcaagcaagggcaggaggtaggtccaatctgacccctccctgtctcattttaatgactggacagcgctcggtgaaggctgtgttcactgtagtgggccatcatttgtttccttcttcttgtaaaagaccaagcaaatgcactctgctttttgctgctgtaagaccaccaaaaatgagtcagaaacacagaagactatttcaggcatgtgggcctggatatgctccttgagacttctggcaaacttctgctgggaattagtttgagggtgagggtacatatgtgacatttgccctagcctaagagtagcaggtaaaaaaaagtttctttcatcttttgccttactgataataccataatccccctcaattcagaccttctgattgagtgcagaggagactagacagtctcctctagacaggttgtagacacaccctcccctaacaaaaacaaaacgaaagagttcatactctgattttccaacatctaggaaactgagttttatttcctagctctaaggcagccttactatatgtcagtaaagtgctgaaaactgtatatttagcagtagcacccaaaaccaagcctttaaccccaacaatgtgtgtatcttttgcacagcaaaaactgcgaggccagaactagtttatctgaacacctcagctgctgtaagcttctcctctctcaccccgtaaactgacaagcatgatgaaaaaagaagcagatccaagtttctgcctcttttaaatgtacttgactttgcaaggcaagtagttttacagccatttctgttcacacttttcaccccacaacttggggatctagctgagacatttctacctcgaacaagtcacatgtaccacaggttcctgaataattcctgcagggctggtgacagacataacagctctggttttataatatcttgggtatctctaaggccaataaggataacattatctacccagagagtttagaagaaaagtaggagtccaaaggaagagtaaacaagaatggagctgtgttcacactgaatttggggtcaatctatttcccccaccctctctcctccccaacccttcaggaaccctttagtttattaatcttatacagaagaaactaacttagaaacaaaggattcaatatttgcttatttattctttgttaacatgagagtcccatgtctgaaaaccaaagtccaatttctgtctggccttttgtctcatccttcttggcaaaagtagcttttgaactgatatatatgatcttgtttgtcaataaaaagcagctatctgtgaaccaggtaactgtgtgttttggaagatctgtttattaacagtaaataaataagccctgtacagaacacaggcactaggttgacaagataagccacatagctggccctgcttaatgctaaacaattaactgcttgagggggggcccgttacccatttcaccctatagggattcgaattacattgaaatggccgacgatttacaaagtagtaactgggtctctgccatgaccccttttcg

SEQ ID NO: 352032 - DNA, 4139 bp, Homo sapiens
agcggagcccgggactccggcgagagcgacgcaaggtcggctgcggcggcggcccgagggcgcccgtgtgcccagtgcgcggcggggacggccgcgagctcgctggagggctccccagaataatccagaagtcgattccatcatggcagaactcaaggtggaggcgccggccagcgtagactggcagaaacgctgcctgaccctggaaactcagcttttccggttccgcctacaggccagcaagataagggagctgctggctgacaagatgcaggagctggagcagaggctgctggaggcagagcagagagcagagaacgctgagacccaggtgggtgtcatggaagagaaggtaaaactatccaatctgaagaatgtggactctgaggggagcctgcaccggaaataccaagaattgctgaaagccataaagggcaaagatgagctcatcagccagctagaggctcagctggagaagcagaagcagatgagggcagaggaagcaaaaactgttcaagaaaaagctgcaaagatcaaggaatgggtgacactcaagttggcaaagcttgagatggagaatcagcatctgaaaagccataatcagcgcctggtggagcaggtgggatcccttcaagatgcgctagaagctattcagatagctccttcacggaagctgctggtgcccccctacggagctgcagagcaggattctgtcccttcagagccgggaatccagcctatgggccaggacagtggctcccaggcccagggtctgaaggcagctgtgcttgcaccttccccaggtgccctgcagagcaaggactctgtttctgaagcagcaagccccttggaggattctagttccagcacggtccattctggggaaacagtagaggccaagccccttcaacctcatctgggaagagagagccctccccaccagccatgcatgaagcttcttaccttcagatgtagttcagcttcctggggtgagggtctggttactgctcagagagggatgctccctgggacaaagacctctgccagggaaggtggtcctggcagcagtctgaccctaccaaaggtgcgggctcctggcaccccgcgggacagcatccagttggccaaaaggcaccacagccagccccaggtgggccatgggcactttggccgtgtggtgaacattgagactgaggccttctcagccctccacccctctggccttcctgagctggagtcccgagctaggtcccgggaggaaccagagaagatggagatggaggagccacccccagcagggaagaatgaggaaagagagagcccaaaggcccttggagctgagctggaggaagtggagctgggtaacaagccacctacacccccgctgcaccagttttcatcctgggagagccggatctatgctgtggccacatcgggcatgcggctctcagatatgtctcccagaagtaatactgcatgctgcgcttcaagccctcctgcccttgtttcccctgggtctttctctggcctggtctacaagaatgtcactgtgcctgtctacacagcactgaaggggagagctacacagatcagcaacatgccctttatggacgagtcctctgggtctgacgatgactgcagctctcaggcgagtttccgaatctcggtcccctcctctgagtccaggaagaccagcggactaggcagcccccgggccatcaagagaggcgtctccatgtcctcactgagctccgagggtgactacgccatccccccggacgcctgctcactggacagtgactactcagagcctgagcacaaactgcagcgcacctcatcctactccaccgacgggctgggcctgggcggggagtcactggagaagtcgggctacctgctgaaaatggggagccaggtgaagacgtggaagaggcgctggtttgtcctgagacagggacagattatgtactacaagtccccgagtgatgtcatccggaaacctcaaggccaagtggatctgaactcccgctgccaaattgttcgaggggagggttcacagacgtttcagctcatctctgagaagaaaacctactacctgacggccgattcacccagcctgctggaggagtggatccgagtactccagagcctgctgaaggtgcaggccaccgggcctccagctctgcttcggggtggcaccaagcccaccgtgaagggctggctgaccaaggtaaagcatggccactccaaggtggtctggtgcgctcttgttgggaaaatcttctactactatcggagccatgaggacaagcgacccctgggctgcctgcctgtgcgggatgcgcacatagaggaagtagatcgatcctgtgactcagacgaggactatgaggctggaggaaccagacggttgctttcctcccactgcaccctggtgatccaccccacagagcacagccccacctacctcctcattggcaccaagcatgaaaaggatacgtggctctaccacctcacagtggctgcaggtggcagcagtgccaaggtgggcactgcctatgagcagctcattggaaaactgatggatggtgaaggagatccagattcgccgctctggaggcaccccatgctgtgctacagcaaagacggcctatacgcctccctcaccaccctgccctctgaggccttgcagacggaggccctcaagctcttcaagtcctgccagctcttcatcaacgtgccggtggaagctgcctcggtggactaccatgtgtccctggcccagaccgcactgcaggtctgcctggttcaccccgagctgcagagtgagatctactgccaactcatgaagcagaccagctgccgcccacctcagaagtactccctcatgcagtgctggcagctcctcgctctgtgtgctccacttttcctgcctcagcatcacttcctctggtatgtcaagcagcagctccaacgccatgcagatcccagaagtgaaactggccagtatgccacctactgccagcgggcagtggagcggaccctgcggaccggggagcgggaagccaggccatcacgcatggaagtggtgtccatcctgctgcgtaaccccttccaccactccttgcccttcagcatccccgtgcactttaccaacgggacttaccatgtggttggttttgacggctcttccacggttgatgagttcctccagcggctgaaccaggagataggcatgagaaagccatcccactctggctttgccctcttcacggacgatccctcgggcagggacctggagcactgcctgcagggaagtgtcaagatctgtgatgccatctccaagtgggaacaagccatgaaggagctgcaccccggaaagtctgagggtgggacacgcgtcgtgaagctgatgtacaagaacaggctgtactttcgcagtcaagtcaaaggggagacggaccgagaacggctgctccttgcctctcaaaccagtagagagatagtggcagggaggtttcctatcaacaaggaattggctcttgagatggctgccctgatggcccaggtagaatatggggacttggagaagcctgccctgccaggccctggaggcacatcccctgccaaggctcagcatcttctccagcaggtcctagacaggttccaccccaggcgctatagacatggggcccccgctgaacagctgaggcacctggcagatatgttgaccacaaaatgggcaacattgcaaggatgctcccctcctgagtgcatccgcatctacctgaccgtggccaggaaatggcctttctttggtgctaaactttttgctgctcagcctgcccagctgtcttccaaggagaacgctctggtgtggattgctgtgaatgaggatggcgtcagcatcctggaccacaacactatgcaagtgcacatcacttacccctactcttcagtgacaacgtttggtggctgcagggatgacttcatgcttgtgattagatctatcccagacaagagctctggaaaaagccacattgagaagttgatcttccggatggctgctcccaagaagggcactgtgcatctgagaggatctccagaccaacaggagcccacaccactgggcctctgaa

SEQ ID NO: 352033 - DNA, 1896 bp, Homo sapiens
agcggagcccgggactccggcgagagcgacgcaaggtcggctgcggcggcggcccgagggcgcccgtgtgcccagtgcgcggcggggacggccgcgagctcgctggagggctccccagaataatccagaagtcgattccatcatggcagaactcaaggtggaggcgccggccagcgtagactggcagaaacgctgcctgaccctggaaactcagcttttccggttccgcctacaggccagcaagataagggagctgctggctgacaagatgcaggagctggagcagaggctgctggaggcagagcagagagcagagaacgctgagacccaggtgggtgtcatggaagagaaggtaaaactatccaatctgaagaatgtggactctgaggggagcctgcaccggaaataccaagaattgctgaaagccataaagggcaaagatgagctcatcagccagctagaggctcagctggagaagcagaagcagatgagggcagaggaagcaaaaactgttcaagaaaaagctgcaaagatcaaggaatgggtgacactcaagttggcaaagcttgagatggagaatcagcatctgaaaagccataatcagcgcctggtggagcaggtgggatcccttcaagatgcgctagaagctattcagatagctccttcacggaagctgctggtgcccccctacggagctgcagagcaggattctgtcccttcagagccgggaatccagcctatgggccaggacagtggctcccaggcccagggtctgaaggcagctgtgcttgcaccttccccaggtgccctgcagagcaaggactctgtttctgaagcagcaagccccttggaggattctagttccagcacggtccattctggggaaacagtagaggccaagccccttcaacctcatctgggaagagagagccctccccaccagccatgcatgaagcttcttaccttcagatgtagttcagcttcctggggtgagggtctggttactgctcagagagggatgctccctgggacaaagacctctgccagggaaggtggtcctggcagcagtctgaccctaccaaaggtgcgggctcctggcaccccgcgggacagcatccagttggccaaaaggcaccacagccagccccaggtgggccatgggcactttggccgtgtggtgaacattgagactgaggccttctcagccctccacccctctggccttcctgagctggagtcccgagctaggtcccgggaggaaccagagaagatggagatggaggagccacccccagcagggaagaatgaggaaagagagagcccaaaggcccttggagctgagctggaggaagtggagctgggtaacaagccacctacacccccgctgcaccagttttcatcctgggtaagaggcaacctccgggctgggcagaggagcagagctaatggcaagaacactgctggctgagcacagccatgcactgagcaggagaggaggctgctggcatcctcatggtggccctggcaggcaggtaccatggagcctgtgcagaccacacaaccagtgagggtcagcgccagaattcagaatgatgtgaatggcggttggctgtcatttcctgagtgctcaccgtgcaccatacattgagctgggtgccctgcataccttttctcatttaatctttgtgagtctttcaggtggtctggtatgatggtcaagagcataggccccagaagcaaaccactagggttgaactgttaactacgtgaccttggacatgttactgaacctctgtgcctcagcttccctgtctataaaatggggataatagtacctactttatagggttgttgtgaaagtacttacagtagtggttcacagtaggtggtaggtaa

SEQ ID NO: 352034 - DNA, 380 bp, Homo sapiens
caggtgggatcccttcaagatgcgctagaaggtaggcaggccagggtgtgcaggtgtgcagtacgtgtgtttggtgggtatggggctgagctacggagctctcaatgtgactgtttttacccgaatcacagctattcagatagctccttcacggaagctgctggtgcccccctacggagctgcagagcaggattctgtcccttcagagccgggaatccagcctatgggccaggacagtggctcccaggcccagggtctgaaggcagctgtgcttgcaccttccccaggtgccctgcagagcaaggactctgtttctgaagcagcaagccccttggaggattctagttccagcacggtccattctggggaaacagtagagg

SEQ ID NO: 352035 - DNA, 706 bp, Homo sapiens
tcaatgtgagcgctaggccctgttctaaatgggtcccatgtggagattcatttaatcctgacttaataatcctaggagatgaataatattttatctctttttgcagatgaggaaactgagaccaagaaaatttgagtagctgctgaaggacattcagctagttacatacagtatttaaacccagcaagttatctcagccccgtgttgtgttgccctctgatgaagggcagcaagggagatggtcttcgctggaatcagaccactagaattcccgagtgctttggggtcaccagtcctctctattggaaagttgttttttttttttttcttaattagtagttggatcactgtaaattctaggcaaatcgactttcctcagaatatgtgactcatcttgactaacaatcttttccaaaatatttcattgctcatcggcttgtacccacccccatgccccaccctggccaatttcttaaagactactttcctggctcaattttccttttctttagaatgacaaaaagtaattcctcttccatatagtttgtttaactaaagaatactattaatacaccatcttccccagacaacgaattctatacacagcacaggtggacgtgagcacacacgtgcagagacatacatacaaacacacacacactagtcaaaagcggagcctgggcaacaagagcaaaactctgtctca

SEQ ID NO: 352036 - DNA, 876 bp, Homo sapiens
atggtcctcagttctccgggcgtgctcccttgacccccagccatctcctgggccagctgcacgctggatgcttcagtaccgagccgatcggagcccatgtctcccctctgtagggtgcacatggccaatgatgatgccatgagctgatctttggctgtgatcaagcttatgtgcctctgtgttaggccattatggacgcacctgaactgacctatgcatttgcagctccacggctgtcccagtgtttgaagcatgaagaccgattggagttataaggggatgcactgccgctgatttaagaattctctcatagtcacaagacgtatggttgcctctgtgtaggtccgcttattcttattagtgagttgatgaattaatctatcaataaatggagacatgaatgaagaaaaagagctccagggttgatgttcatgggtgattgatcatcctgtagcgacggtggtattgactgttccccagaggacaaggagtgtgttcttacaatggacatcatgattgggattgtctttattaaactttgtcaggagagtaaagatcaatgtggccacatgttgtggctcatgcctgtaatcccaacactgtaatcccagcactgtaatcccagcctgtaatcccaggctgaggtgggcggatcacctgaggttgggagttcgagaccagcctgaccaacatggagaaaccccgtctctactaaaaatacaaaattagccgggcatggtggcgcatgtctttaattccagctactcaggaggctgaggcaggagaaacgcttgaacccgagaggcggaggttgcagtgagctgagattgcgccattgcactccagcctgggcaacaagagtgaaactccatctca

SEQ ID NO: 352037 - DNA, 904 bp, Homo sapiens
atggtcctcagttctccgggcgtgctcccttgacccccagccatctcctgggccagctgcacgctggatgcttcagtaccgagccgatcggagcccatgtctcccctctgtagggtgcacatggccaatgatgatgccatgagctgatctttggctgtgatcaagcttatgtgcctctgtgttaggccattatggacgcacctgaactgacctatgcatttgcagctccacggctgtcccagtgtttgaagcatgaagaccgattggagttataaggggatgcactgccgctgatttaagaattctctcatagtcacaagacgtatggttgcctctgtgtaggtccgcttattcttattagtgagttgatgaattaatctatcaataaatggagacatgaatgaagaaaaagagctccaggtctggaccaaagacgaagtttggtgatggttgatgttcatgggtgattgatcatcctgtagcgacggtggtattgactgttccccagaggacaaggagtgtgttcttacaatggacatcatgattgggattgtctttattaaactttgtcaggagagtaaagatcaatgtggccacatgttgtggctcatgcctgtaatcccaacactgtaatcccagcactgtaatcccagcctgtaatcccaggctgaggtgggcggatcacctgaggttgggagttcgagaccagcctgaccaacatggagaaaccccgtctctactaaaaatacaaaattagccgggcatggtggcgcatgtctttaattccagctactcaggaggctgaggcaggagaaacgcttgaacccgagaggcggaggttgcagtgagctgagattgcgccattgcactccagcctgggcaacaagagtgaaactccatctca

SEQ ID NO: 352038 - DNA, 448 bp, Homo sapiens
aagggatgtttgcactatgagtcgttcaatttcattcactaaattaatgttttgagtgatcactatggcattgtatgtgtatgatatcacaagatggaaaattatttaaccactaaatgatattagtgagcctatacaattatatatatatagcttacaaaagaaaatactgtggaaaaggtagaaaattatttgcacactaagattagatacttataaaatatgcatagaaatattcatatacataatgattatagctagagcctggtttaacatcaacaggaaaaatactggctcagaaaacacaaaaatactaatactgttaatgtcaggctataatgattgtgaatgattttcccctctcttctctatgttctagggtgctgcaatattattgtgttattctataatgggaaacttaatgaataataaaaattacaaagaccta

SEQ ID NO: 352039 - DNA, 610 bp, Homo sapiens
atggtagtgttacgtaaactgtcttcagcctggtacatctttcactgggattttacctgtacagagagctttggtaacctagtttaccattagaccataattaaaagctggttgtcatatataagcctcttacatacagttaataagagggatgggatcacaggcatgtgaaagatcatagggggaaaatgaaacagctttgtggtttggaagaaggcaattcagcaaaagtactcaaattattactttgtcaaaatgtttaggtagtatttagagtcttcatgaggaaagatgtcattaaatatttggttgttcccagcagattctgacttactgtttattttttaagttaacctatcatttgttgacactttttattgaaaaattgaaaggcaaaacaatatttgctatgtatgacatctaccagtatgtgaaattgtatattcaggtgcttaatattctgatgttgtatacttgtgggtgggggtagtcctgaagtgcccactttgtattgaaacttgaaattactgtttttcagtctcattcattgttctgcacaagagcataatcagaattcagatttctgattatggctttccagtgccaaatg

SEQ ID NO: 352040 - DNA, 365 bp, Homo sapiens
caacttttttgtaaggtggggtctaactatgttggccaggttggtctcaaactcctgagctcaagcaatccttccacctctgcctctgaaagtgctgggattacagttgtgagccactgcacccagcctgaaaaatcttatagcttgtgactgtcagagagagaattagaacccaggtagtctgactttagaacctagcttttaattatgttctgttcctttcctgtgacagtagctccttcataggctggctgagagaattaaacatccacaaaaaatgtttatttatttattgagatggaatctcactctgtcacccaggctggagtgcagtggcatgatctcggctcactgcaacctctgcc

SEQ ID NO: 352041 - DNA, 2953 bp, Homo sapiens
ccaagtggctgacatgactttgtttaactttatttgtatttctggctggtgtgtttacagccaataggtcaaactatcagtcagtgtagggccctgagaagtcgggtatttaagagcatctaataggcacagaattgtgctccatactgcttaaactgttccctaagtgtccaatttggagaaaacacccacacgcaggataaccggcgagtgacgcggagtggctgcgagtccaagttatcactaacggatggggagcttgggctgggcacagtccagcgtactgaacccttcccccaccgtttcacctgcatacagaggtgtgtactgtcaaaaagcagcgcctccaagtctcttctggcactgtctggacttggatccgaggcagacgaggaagctgagaaaaccctggcgttgaccccgtggacctgggcgccccgggaaggccagcgcttggtccaggcaggcggggcctgtgcggtgaccaccctggtcctgaaaagtcccagccccgagcgccctccctcctagacctggaggcctggaacagccagccgcccacggacgccagagccgggaaccctgacggcacttagctgctgacaaacaacctgctccgtggagcgcctgaaacaccagtctttggggccagtgcctcagtttcaatccaggtaacctttaaatgaaacttgcctaaaatcttaggtcatacacagaagagactccaatcgacaagaagctggaaaagaatgatgttgtccttaaacaacctacagaatatcatctataacccggtaatcccgtatgttggcaccattcccgatcagctggatcctggaactttgattgtgatatgtgggcatgttcctagtgacgcagacagattccaggtggatctgcagaatggcagcagtgtgaaacctcgagccgatgtggcctttcatttcaatcctcgtttcaaaagggccggctgcattgtttgcaatactttgataaatgaaaaatggggacgggaagagatcacctatgacacgcctttcaaaagagaaaagtcttttgagatcgtgattatggtgctaaaggacaaattccaggtggctgtaaatggaaaacatactctgctctatggccacaggatcggcccagagaaaatagacactctgggcatttatggcaaagtgaatattcactcaattggttttagcttcagctcggacttacaaagtacccaagcatctagtctggaactgacagagataagtagagaaaatgttccaaagtctggcacgccccagcttcctagtaatagaggaggagacatttctaaaatcgcacccagaactgtctacaccaagagcaaagattcgactgtcaatcacactttgacttgcaccaaaataccacctatgaactatgtgtcaaagagcctgccattcgctgcaaggttgaacacccccatgggccctggacgaactgtcgtcgttaaaggagaagtgaatgcaaatgccaaaagctttaatgttgacctactagcaggaaaatcaaaggatattgctctacacttgaacccacgcctgaatattaaagcatttgtaagaaattcttttcttcaggagtcctggggagaagaagagagaaatattacctctttcccatttagtcctgggatgtactttgagatgataatttactgtgatgttagagaattcaaggttgcagtaaatggcgtacacagcctggagtacaaacacagatttaaagagctcagcagtattgacacgctggaaattaatggagacatccacttactggaagtaaggagctggtagcctacctacacagctgctacaaaaaccaaaatacagaatggcttctgtgatactggccttgctgaaacgcatctcactgtcattctattgtttatattgttaaaatgagcttgtgcaccattaggtcctgctgggtgttctcagtccttgccatgaagtatggtggtgtctagcactgaatggggaaactgggggcagcaacacttatagccagttaaagccactctgccctctctcctactttggctgactcttcaagaatgccattcaacaagtatttatggagtacctactataatacagtagctaacatgtattgagcacagattttttttggtaaaactgtgaggagctaggatatatacttggtgaaacaaaccagtatgttccctgttctcttgagcttcgactcttctgtgcgctactgctgcgcactgctttttctacaggcattacatcaactcctaaggggtcctctgggattagttaagcagctattaaatcacccgaagacactaatttacagaagacacaactccttccccagtgatcactgtcataaccagtgctctaccgtatcccatcactgaggactgatgttgactgacatcattttatcgtaataaacatgtggctctattagctgcaagctttaccaagtaattggcatgacatctgagcacagaaattaaggcaaaaaaccaaagcaaaacaaatacatggtgctgaaattaacttgatgccaagcccaaggcagctgatttctgtgtatttgaacttagggcaaatcagagtctacacagacgcctacagaaagtttcaggaagaggcaagatgcattcaatttgaaagatatttatgggcaacaaagtaaggtcaggattagacttcaggcattcataaggcaggcactatcagaaagtgtacgccaactaagggacccacaaagcaggcagaggtaatgcagaaatctgttttgttcccatgaaatcaccaatcaaggcctccgttcttctaaagattagtccatcatcattagcaactgagatcaaagcactcttccactttacgtgattaaaatcaaacctgtatcagcaagttaaatggttccatttctgtgattt

SEQ ID NO: 352042 - DNA, 1439 bp, Homo sapiens
  misc_feature (1432)..(1432): n is a, c, g, or t
  misc_feature (1435)..(1435): n is a, c, g, or t
ccaagtggctgacatgactttgtttaactttatttgtatttctggctggtgtgtttacagccaataggtcaaactatcagtcagtgtagggccctgagaagtcgggtatttaagagcatctaataggcacagaattgtgctccatactgcttaaactgttccctaagtgtccaatttggagaaaacacccacacgcaggataaccggcgagtgacgcggagtggctgcgagtccaagttatcactaacggatggggagcttgggctgggcacagtccagcgtactgaacccttcccccaccgtttcacctgcatacagaggtgtgtactgtcaaaaagcagcgcctccaagtctcttctggcactgtctggacttggatccgaggcagacgaggaagctgagaaaaccctggcgttgaccccgtggacctgggcgccccgggaaggccagcgcttggtccaggcaggcggggcctgtgcggtgaccaccctggtcctgaaaagtcccagccccgagcgccctccctcctagacctggaggcctggaacagccaggtggacgtcggcccacctttcttttctttccttcccattttcctaccacctcccaccccactccgccttccgggcaaaggcagccagatccacccaggacacattctttgtccttatccctctgtgctcgtcccacagcaagccagtcgcggtccaaggctccagaggctgtgcaggaggccgagctgggtggcgatcagcggcgggtccctgtccaaaatccagcagagccgccagggacgccccagacacagaaggcggggcgcggggagggtggggagaccacagcagtgaggcgcgcgagccgggaagtgaacgaggactgactcctgtcgcttcccgtagccgcccacggacgccagagccgggaaccctgacggcacttagctgctgacaaacaacctgctccgtggagcgcctgaaacaccagtctttgggtgagtcgcgcgacccccggcctcgggtggcggggcagtcgctagaggcgtggctgctctgagggtctcgccagtggaggatggcattcggatgtcacggctcctaaatcaccatttgatgggtgggacagtgtccagtccaccccgacccgccggtcctcaccgcggcagagccggggctgggtggcggggacgctgcctctgcaggcgaggcgctccggggcataagggattatcaggagtcgcggcctttcttggacatccctggctggggtcaggctgtttgccctggggtgtctcctcgctgcaaacccaccccacctgggctgctttctcacctgttccctcctagcctgaggccgagcgccacctccaagtggaggaatctggggaagtttccttcccggaatttgtagtgacagtggagtgacctccattgcntcntgcc

SEQ ID NO: 352043 - DNA, 540 bp, Homo sapiens
gcggtggcggccggtttaggaattagtggaattccccggggtgcaggggattcggcagggaggcaactttaccaagtaattggcatgacatctgagcacagaaattaaggcaaaaaaccaaagcaaaacaaatacatggtgctgaaattaacttgatgccaagcccaaggcagctgatttctgtgtatttgaacttagggcaaatcagagtctacacagacgcctacagaaagtttcaggaagaggcaagatgcattcaatttgaaagatatttatgggcaacaaagtaaggtcaggattagacttcaggcattcataaggcaggcactatcagaaagtgtacgccaactaagggacccacaaagcaggcagaggtaatgcagaaatctgttttgttcccatgaaatcaccaatcaaggcctccgttcttctaaagattagtccatcatcattagcaactgagatcaaagcactcttccactttacgtgattaaaatcaaacctgtatcagcaagttaaatggttccatttctgtgattt

SEQ ID NO: 352044 - DNA, 715 bp, Homo sapiens
tcaagtgtatttttggatcatagttttcaagcatatttttagtaccatttataatttttttatatgtcaatataaaatatttagaaaatattttctactggatgttacaaattaatctttattatcttttctcaggacttacaaagtacccaagcatctagtctggaactgacagagataagtagagaaaataaatgtaaatattaaatcttttaatgagccactggtttaaaaatgttgttttagctgccatgttaatgaaatggcaagaaggctgggtttttgaaaattatgcttttagaacgcaagtaatcacttgaaaattgagatacatacttgtggtgccaggcacgcagtaagtttttgctgatgattcacctgtcagtttctgtaactgccactcactgttcttatgtaaaaagcactctctcactcttaactgctgaatagtactgttctggggtatttccaaatattgaacatcagccagtgcactggcaaatgaacttccatgtgtatcttcaacccctgggagaataactgcaatttaaaaatgcgctgttattaatggagaaagtgaggtcttaccgactggcacgttcacacctcacagacagaacagaatcttagcattctgggggcaccctggaaaggacaactaagacacgtttgaagttcatgtagtgctgggtgaaggtggtggctcaggcctgta

SEQ ID NO: 352045 - DNA, 358 bp, Homo sapiens
  misc_feature (1)..(1): n is a, c, g, or t
ngctttcgagttgccgcttggggctttcgagttgcgcttggggctttcgagttgccacccagtgtttctgggccctctgtgtgagcagccaggtatgagctgttttagaagcagcgtgttgccttcatctctcccgtttcccaaaagaacaaaggataaaggtgacagtcacactcctgggttaaaaaaagcattccagaaccacttctctttatgggcacaacaaagaaacgaaggctgaagttcgcctacccaaaatgaaaagtaggctttacagtcaaaagtacttctgttgattgctaaataacttcattttcttgaaatagagcaaccgaaagccccaaggggtaccgagctc

SEQ ID NO: 352046 - DNA, 5745 bp, Homo sapiens
agaggattcaaagcggtagaacttcggagattggggaagataatcggaagaggtagaagacaccgtccatgacacttcctggggaagcagatgtatgtataaggatccgcccacggacgccagagccgggaaccctgacggcacttagctgctgacaaacaacctgctccgtggagcgcctgaaacaccagtctttggggccagtgcctcagtttcaatccaggtaacctttaaatgaaacttgcctaaaatcttaggtcatacacagaagagactccaatcgacaagaagctggaaaagaatgatgttgtccttaaacaacctacagaatatcatctataacccggtaatcccgtatgttggcaccattcccgatcagctggatcctggaactttgattgtgatatgtgggcatgttcctagtgacgcagacagattccaggtggatctgcagaatggcagcagtgtgaaacctcgagccgatgtggcctttcatttcaatcctcgtttcaaaagggccggctgcattgtttgcaatactttgataaatgaaaaatggggacgggaagagatcacctatgacacgcctttcaaaagagaaaagtcttttgagatcgtgattatggtgctaaaggacaaattccaggtggctgtaaatggaaaacatactctgctctatggccacaggatcggcccagagaaaatagacactctgggcatttatggcaaagtgaatattcactcaattggttttagcttcagctcggacttacaaagtacccaagcatctagtctggaactgacagagataagtagagaaaatgttccaaagtctggcacgccccagcttagcctgccattcgctgcaaggttgaacacccccatgggccctggacgaactgtcgtcgttaaaggagaagtgaatgcaaatgccaaaagctttaatgttgacctactagcaggaaaatcaaaggatattgctctacacttgaacccacgcctgaatattaaagcatttgtaagaaattcttttcttcaggagtcctggggagaagaagagagaaatattacctctttcccatttagtcctgggatgtactttgagatgataatttactgtgatgttagagaattcaaggttgcagtaaatggcgtacacagcctggagtacaaacacagatttaaagagctcagcagtattgacacgctggaaattaatggagacatccacttactggaagtaaggagctggtagcctacctacacagctgctacaaaaaccaaaatacagaatggcttctgtgatactggccttgctgaaacgcatctcactgtcattctattgtttatattgttaaaatgagcttgtgcaccattaggtcctgctgggtgttctcagtccttgccatgaagtatggtggtgtctagcactgaatggggaaactgggggcagcaacacttatagccagttaaagccactctgccctctctcctactttggctgactcttcaagaatgccattcaacaagtatttatggagtacctactataatacagtagctaacatgtattgagcacagattttttttggtaaaactgtgaggagctaggatatatacttggtgaaacaaaccagtatgttccctgttctcttgagcttcgactcttctgtgcgctactgctgcgcactgctttttctacaggcattacatcaactcctaaggggtcctctgggattagttaagcagctattaaatcacccgaagacactaatttacagaagacacaactccttccccagtgatcactgtcataaccagtgctctaccgtatcccatcactgaggactgatgttgactgacatcattttatcgtaataaacatgtggctctattagctgcaagctttaccaagtaattggcatgacatctgagcacagaaattaaggcaaaaaaccaaagcaaaacaaatacatggtgctgaaattaacttgatgccaagcccaaggcagctgatttctgtgtatttgaacttagggcaaatcagagtctacacagacgcctacagaaagtttcaggaagaggcaagatgcattcaatttgaaagatatttatgggcaacaaagtaaggtcaggattagacttcaggcattcataaggcaggcactatcagaaagtgtacgccaactaagggacccacaaagcaggcagaggtaatgcagaaatctgttttgttcccatgaaatcaccaatcaaggcctccgttcttctaaagattagtccatcatcattagcaactgagatcaaagcactcttccactttacgtgattaaaatcaaacctgtatcagcaagttaaatggttccatttctgtgatttttctattatttgaggggagttggcagaagttccatgtatatgggatctttacaggtcagatcttgttacaggaaatttcaaaggtttgggagtggggagggaaaaaagctcagtcagtgaggatcattttatcacattagactggggcagaactctgccaggatttaggaatattttcagaacagattttagatattatttctatccatatattgaaaagaataccattgtcaatcttatttttttaaaagtactcagtgtagaaatcgctagcccttaattcttttccagcttttcatattaatgtatgcagagtctcaccaagctcaaagacactggttgggggtggagggtgccacagggaaagctgtagaaggcaagaagactcgagaatcccccagagttatttttctccataaagaccatcagagtgcttaactgagctgttggagactgtgaggcatttaggaaaaaaatagcccactcacatcattccttgtaagtcttaagttcattttcattttacgtggaggaaaaaaatttaaaaagctattagtatttattaatgaattttactgagacatttcttagaaatatgcacttctatactagcaagctctgtctctaaaatgcaagttggccttttgcttgccacatttctgcattaaacttctatattagcttcaaaggcttttaaactcaatgcgaacattctacgggatgttcttagatgcctttaaaaagggggcagatctaattttatttgaaccctcactttccaacttcaccatgacccagtactagagattagggcacttcaaagcattgaaaaaaatctactgatacttactttcttagacaagtagttcttagttaaccaccaatggaactgggttcattctgaatcctggaggagcttcctcgtgccacccagtgtttctgggccctctgtgtgagcagccaggtatgagctgttttagaagcagcgtgttgccttcatctctcccgtttcccaaaagaacaaaggataaaggtgacagtcacactcctgggttaaaaaaagcattccagaaccacttctctttatgggcacaacaaagaaacgaaggctgaagttcgcctacccaaaatgaaaagtaggctttacagtcaaaagtacttctgttgattgctaaataacttcattttcttgaaatagagcaactttgagtgaaatctgcaacatggataccatgtatataagatactgctgtacagaagagttaaggcttacagtgcaaatgaggcgtcagctttgggtgctaaaattaacaagtctaatattattaccatcaatcaggaagagaataataaatgtttaaacaaacacagcagtctgtataaaaataccgtgtatcatttactctttctgcagctctatacgataggcaggagaggcttatgtggcagcacaagccaggtggggattttgtaacgaagtgataaaacatttgtaagtaatccaagtaggtgtattaaggcaccaaaagtaacatggcacccaacacccaaaaataaaaatatgaaatatgagtgtgaactctgagtagagtatgaaacaccacagaaagtcttagaaatagctctggagtggctctcccaggacagtttccagttgctgaatagtcttttggcactgatgttctacttcttcacattcatctaaaaaaaaaaaaaaaaaaaatcaaaattaaaatctgagtcagtccgcctgcctcggttctcattagtttaattcttaatgccttgcactttccggcaatcattcaatcaaaagagtgaaatgaagcacattaacaaagcaggaggcgccacggaccgcctccctccacaccgctccttccgccttcattccttgcccacaggcttgcactggaagctgaataagaatccccaaaactcaaacttcctagggatgccacccctttagtagctcacacctcccccctccaagagctaagaaacaaaggagaatgtacttttgtagcttagataagcaatgaatcagtaaaggactgatctacttgctccaccacccctcccttaataataacatttactgttatttcctgggcctaagacttatgttccagaactgtcacagctccccatgtcacactcactagcttgtgatctttgtcaaataactgaaatcttttaagcctctagtttcttcctttgtaaaacagagataaaatgttgtggtttttaagtgagataatccaagtaaagcacctaacatggagtagtgaatgaacatcggttgctactaaaagtggacatcctaccgcatccttaatgccactaggcatttccatacaatctggggaccaaaacttcaatcatataaatgtatgaggttaattaaaaacactactgtaatctgcttgtatgatcacaaaccaccacaaaagaaaagatcgtgaagattacactgtaaacggactctcaaatgatcaggaggtggtcacttcgcaacttgctccctccacccaactcaaaacaggagctcgagcctgcctgtatttgagactggagctgcctgtatgaggactggatcaactgctagtcacgttatatccaaatctgcattatcattgggcacattttcacagaattttactgaattattccttaattgtttaatggttgggaatagtttgggaattaccttccatcaactctgctaagaaaggaatggattctggtagcaagacaatataattctcctttagtttttcagccagtgctaacacagtaatcaaagcagcaaatcgaacctgaaagggataaaagagcaaagaaataaaaagtagtgttactgtatttattatcttaagagctgtactgacttgagacaagctctaactttttaaacattagttcacacgcgtttattcacttcattatgttcattaagctttcatcttagaataccagtttcaccatttgggagctgtttgtaatatgtgcaaccttataaatagtgttttccaaactgtgtcccaggactgcaaatctttaatgtgaaatgtctttttataatctcttcctttaaaaaaaaccaataaaataaaatgccacatgcaaactcaaaaacacaacacacaaacacacatcactctccaatacacacatacattctacccactcccccaaccacatgatgggcaggacaggtggctgtagagagaagcttataccgcacaaccatagagcagacgagccgacacaaggcgataagggagcaagaaggaatcgatcagagcaagacagaccaccgctgcgcacgcgcagtggcgcaggtgcgctacaacacagaagatg

SEQ ID NO: 352047 - DNA, 6538 bp, Homo sapiens
ccaagtggctgacatgactttgtttaactttatttgtatttctggctggtgtgtttacagccaataggtcaaactatcagtcagtgtagggccctgagaagtcgggtatttaagagcatctaataggcacagaattgtgctccatactgcttaaactgttccctaagtgtccaatttggagaaaacacccacacgcaggataaccggcgagtgacgcggagtggctgcgagtccaagttatcactaacggatggggagcttgggctgggcacagtccagcgtactgaacccttcccccaccgtttcacctgcatacagaggtgtgtactgtcaaaaagcagcgcctccaagtctcttctggcactgtctggacttggatccgaggcagacgaggaagctgagaaaaccctggcgttgaccccgtggacctgggcgccccgggaaggccagcgcttggtccaggcaggcggggcctgtgcggtgaccaccctggtcctgaaaagtcccagccccgagcgccctccctcctagacctggaggcctggaacagccaggtggacgtcggcccacctttcttttctttccttcccattttcctaccacctcccaccccactccgccttccgggcaaaggcagccagatccacccaggacacattctttgtccttatccctctgtgctcgtcccacagcaagccagtcgcggtccaaggctccagaggctgtgcaggaggccgagctgggtggcgatcagcggcgggtccctgtccaaaatccagcagagccgccagggacgccccagacacagaaggcggggcgcggggagggtggggagaccacagcagtgaggcgcgcgagccgggaagtgaacgaggactgactcctgtcgcttcccgtagccgcccacggacgccagagccgggaaccctgacggcacttagctgctgacaaacaacctgctccgtggagcgcctgaaacaccagtctttggggccagtgcctcagtttcaatccaggtaacctttaaatgaaacttgcctaaaatcttaggtcatacacagaagagactccaatcgacaagaagctggaaaagaatgatgttgtccttaaacaacctacagaatatcatctataacccggtaatcccgtatgttggcaccattcccgatcagctggatcctggaactttgattgtgatatgtgggcatgttcctagtgacgcagacagattccaggtggatctgcagaatggcagcagtgtgaaacctcgagccgatgtggcctttcatttcaatcctcgtttcaaaagggccggctgcattgtttgcaatactttgataaatgaaaaatggggacgggaagagatcacctatgacacgcctttcaaaagagaaaagtcttttgagatcgtgattatggtgctaaaggacaaattccaggtggctgtaaatggaaaacatactctgctctatggccacaggatcggcccagagaaaatagacactctgggcatttatggcaaagtgaatattcactcaattggttttagcttcagctcggacttacaaagtacccaagcatctagtctggaactgacagagataagtagagaaaatgttccaaagtctggcacgccccagcttagcctgccattcgctgcaaggttgaacacccccatgggccctggacgaactgtcgtcgttaaaggagaagtgaatgcaaatgccaaaagctttaatgttgacctactagcaggaaaatcaaaggatattgctctacacttgaacccacgcctgaatattaaagcatttgtaagaaattcttttcttcaggagtcctggggagaagaagagagaaatattacctctttcccatttagtcctgggatgtactttgagatgataatttactgtgatgttagagaattcaaggttgcagtaaatggcgtacacagcctggagtacaaacacagatttaaagagctcagcagtattgacacgctggaaattaatggagacatccacttactggaagtaaggagctggtagcctacctacacagctgctacaaaaaccaaaatacagaatggcttctgtgatactggccttgctgaaacgcatctcactgtcattctattgtttatattgttaaaatgagcttgtgcaccattaggtcctgctgggtgttctcagtccttgccatgaagtatggtggtgtctagcactgaatggggaaactgggggcagcaacacttatagccagttaaagccactctgccctctctcctactttggctgactcttcaagaatgccattcaacaagtatttatggagtacctactataatacagtagctaacatgtattgagcacagattttttttggtaaaactgtgaggagctaggatatatacttggtgaaacaaaccagtatgttccctgttctcttgagcttcgactcttctgtgcgctactgctgcgcactgctttttctacaggcattacatcaactcctaaggggtcctctgggattagttaagcagctattaaatcacccgaagacactaatttacagaagacacaactccttccccagtgatcactgtcataaccagtgctctaccgtatcccatcactgaggactgatgttgactgacatcattttatcgtaataaacatgtggctctattagctgcaagctttaccaagtaattggcatgacatctgagcacagaaattaaggcaaaaaaccaaagcaaaacaaatacatggtgctgaaattaacttgatgccaagcccaaggcagctgatttctgtgtatttgaacttagggcaaatcagagtctacacagacgcctacagaaagtttcaggaagaggcaagatgcattcaatttgaaagatatttatgggcaacaaagtaaggtcaggattagacttcaggcattcataaggcaggcactatcagaaagtgtacgccaactaagggacccacaaagcaggcagaggtaatgcagaaatctgttttgttcccatgaaatcaccaatcaaggcctccgttcttctaaagattagtccatcatcattagcaactgagatcaaagcactcttccactttacgtgattaaaatcaaacctgtatcagcaagttaaatggttccatttctgtgatttttctattatttgaggggagttggcagaagttccatgtatatgggatctttacaggtcagatcttgttacaggaaatttcaaaggtttgggagtggggagggaaaaaagctcagtcagtgaggatcattttatcacattagactggggcagaactctgccaggatttaggaatattttcagaacagattttagatattatttctatccatatattgaaaagaataccattgtcaatcttatttttttaaaagtactcagtgtagaaatcgctagcccttaattcttttccagcttttcatattaatgtatgcagagtctcaccaagctcaaagacactggttgggggtggagggtgccacagggaaagctgtagaaggcaagaagactcgagaatcccccagagttatttttctccataaagaccatcagagtgcttaactgagctgttggagactgtgaggcatttaggaaaaaaatagcccactcacatcattccttgtaagtcttaagttcattttcattttacgtggaggaaaaaaatttaaaaagctattagtatttattaatgaattttactgagacatttcttagaaatatgcacttctatactagcaagctctgtctctaaaatgcaagttggccttttgcttgccacatttctgcattaaacttctatattagcttcaaaggcttttaaactcaatgcgaacattctacgggatgttcttagatgcctttaaaaagggggcagatctaattttatttgaaccctcactttccaacttcaccatgacccagtactagagattagggcacttcaaagcattgaaaaaaatctactgatacttactttcttagacaagtagttcttagttaaccaccaatggaactgggttcattctgaatcctggaggagcttcctcgtgccacccagtgtttctgggccctctgtgtgagcagccaggtatgagctgttttagaagcagcgtgttgccttcatctctcccgtttcccaaaagaacaaaggataaaggtgacagtcacactcctgggttaaaaaaagcattccagaaccacttctctttatgggcacaacaaagaaacgaaggctgaagttcgcctacccaaaatgaaaagtaggctttacagtcaaaagtacttctgttgattgctaaataacttcattttcttgaaatagagcaactttgagtgaaatctgcaacatggataccatgtatataagatactgctgtacagaagagttaaggcttacagtgcaaatgaggcgtcagctttgggtgctaaaattaacaagtctaatattattaccatcaatcaggaagagaataataaatgtttaaacaaacacagcagtctgtataaaaataccgtgtatcatttactctttctgcagctctatacgataggcaggagaggcttatgtggcagcacaagccaggtggggattttgtaacgaagtgataaaacatttgtaagtaatccaagtaggtgtattaaggcaccaaaagtaacatggcacccaacacccaaaaataaaaatatgaaatatgagtgtgaactctgagtagagtatgaaacaccacagaaagtcttagaaatagctctggagtggctctcccaggacagtttccagttgctgaatagtcttttggcactgatgttctacttcttcacattcatctaaaaaaaaaaaaaaaaaaaatcaaaattaaaatctgagtcagtccgcctgcctcggttctcattagtttaattcttaatgccttgcactttccggcaatcattcaatcaaaagagtgaaatgaagcacattaacaaagcaggaggcgccacggaccgcctccctccacaccgctccttccgccttcattccttgcccacaggcttgcactggaagctgaataagaatccccaaaactcaaacttcctagggatgccacccctttagtagctcacacctcccccctccaagagctaagaaacaaaggagaatgtacttttgtagcttagataagcaatgaatcagtaaaggactgatctacttgctccaccacccctcccttaataataacatttactgttatttcctgggcctaagacttatgttccagaactgtcacagctccccatgtcacactcactagcttgtgatctttgtcaaataactgaaatcttttaagcctctagtttcttcctttgtaaaacagagataaaatgttgtggtttttaagtgagataatccaagtaaagcacctaacatggagtagtgaatgaacatcggttgctactaaaagtggacatcctaccgcatccttaatgccactaggcatttccatacaatctggggaccaaaacttcaatcatataaatgtatgaggttaattaaaaacactactgtaatctgcttgtatgatcacaaaccaccacaaaagaaaagatcgtgaagattacactgtaaacggactctcaaatgatcaggaggtggtcacttcgcaacttgctccctccacccaactcaaaacaggagctcgagcctgcctgtatttgagactggagctgcctgtatgaggactggatcaactgctagtcacgttatatccaaatctgcattatcattgggcacattttcacagaattttactgaattattccttaattgtttaatggttgggaatagtttgggaattaccttccatcaactctgctaagaaaggaatggattctggtagcaagacaatataattctcctttagtttttcagccagtgctaacacagtaatcaaagcagcaaatcgaacctgaaagggataaaagagcaaagaaataaaaagtagtgttactgtatttattatcttaagagctgtactgacttgagacaagctctaactttttaaacattagttcacacgcgtttattcacttcattatgttcattaagctttcatcttagaataccagtttcaccatttgggagctgtttgtaatatgtgcaaccttataaatagtgttttccaaactgtgtcccaggactgcaaatctttaatgtgaaatgtctttttataatctcttcctttaaaaaaaaccaataaaataaaatgccacatgcaaactcaaaaacacaacacacaaacacacatcactctccaatacacacatacattctacccactcccccaaccacatgatgggcaggacaggtggctgtagagagaagcttataccgcacaaccatagagcagacgagccgacacaaggcgataagggagcaagaaggaatcgatcagagcaagacagaccaccgctgcgcacgcgcagtggcgcaggtgcgctacaacacagaagatg

SEQ ID NO: 352048 - DNA, 5653 bp, Homo sapiens
agaggattcaaagcggtagaacttcggagattggggaagataatcggaagaggtagaagacaccgtccatgacacttcctggggaagcagatgtatgtataaggatggccagtgcctcagtttcaatccaggtaacctttaaatgaaacttgcctaaaatcttaggtcatacacagaagagactccaatcgacaagaagctggaaaagaatgatgttgtccttaaacaacctacagaatatcatctataacccggtaatcccgtatgttggcaccattcccgatcagctggatcctggaactttgattgtgatatgtgggcatgttcctagtgacgcagacagattccaggtggatctgcagaatggcagcagtgtgaaacctcgagccgatgtggcctttcatttcaatcctcgtttcaaaagggccggctgcattgtttgcaatactttgataaatgaaaaatggggacgggaagagatcacctatgacacgcctttcaaaagagaaaagtcttttgagatcgtgattatggtgctaaaggacaaattccaggtggctgtaaatggaaaacatactctgctctatggccacaggatcggcccagagaaaatagacactctgggcatttatggcaaagtgaatattcactcaattggttttagcttcagctcggacttacaaagtacccaagcatctagtctggaactgacagagataagtagagaaaatgttccaaagtctggcacgccccagcttagcctgccattcgctgcaaggttgaacacccccatgggccctggacgaactgtcgtcgttaaaggagaagtgaatgcaaatgccaaaagctttaatgttgacctactagcaggaaaatcaaaggatattgctctacacttgaacccacgcctgaatattaaagcatttgtaagaaattcttttcttcaggagtcctggggagaagaagagagaaatattacctctttcccatttagtcctgggatgtactttgagatgataatttactgtgatgttagagaattcaaggttgcagtaaatggcgtacacagcctggagtacaaacacagatttaaagagctcagcagtattgacacgctggaaattaatggagacatccacttactggaagtaaggagctggtagcctacctacacagctgctacaaaaaccaaaatacagaatggcttctgtgatactggccttgctgaaacgcatctcactgtcattctattgtttatattgttaaaatgagcttgtgcaccattaggtcctgctgggtgttctcagtccttgccatgaagtatggtggtgtctagcactgaatggggaaactgggggcagcaacacttatagccagttaaagccactctgccctctctcctactttggctgactcttcaagaatgccattcaacaagtatttatggagtacctactataatacagtagctaacatgtattgagcacagattttttttggtaaaactgtgaggagctaggatatatacttggtgaaacaaaccagtatgttccctgttctcttgagcttcgactcttctgtgcgctactgctgcgcactgctttttctacaggcattacatcaactcctaaggggtcctctgggattagttaagcagctattaaatcacccgaagacactaatttacagaagacacaactccttccccagtgatcactgtcataaccagtgctctaccgtatcccatcactgaggactgatgttgactgacatcattttatcgtaataaacatgtggctctattagctgcaagctttaccaagtaattggcatgacatctgagcacagaaattaaggcaaaaaaccaaagcaaaacaaatacatggtgctgaaattaacttgatgccaagcccaaggcagctgatttctgtgtatttgaacttagggcaaatcagagtctacacagacgcctacagaaagtttcaggaagaggcaagatgcattcaatttgaaagatatttatgggcaacaaagtaaggtcaggattagacttcaggcattcataaggcaggcactatcagaaagtgtacgccaactaagggacccacaaagcaggcagaggtaatgcagaaatctgttttgttcccatgaaatcaccaatcaaggcctccgttcttctaaagattagtccatcatcattagcaactgagatcaaagcactcttccactttacgtgattaaaatcaaacctgtatcagcaagttaaatggttccatttctgtgatttttctattatttgaggggagttggcagaagttccatgtatatgggatctttacaggtcagatcttgttacaggaaatttcaaaggtttgggagtggggagggaaaaaagctcagtcagtgaggatcattttatcacattagactggggcagaactctgccaggatttaggaatattttcagaacagattttagatattatttctatccatatattgaaaagaataccattgtcaatcttatttttttaaaagtactcagtgtagaaatcgctagcccttaattcttttccagcttttcatattaatgtatgcagagtctcaccaagctcaaagacactggttgggggtggagggtgccacagggaaagctgtagaaggcaagaagactcgagaatcccccagagttatttttctccataaagaccatcagagtgcttaactgagctgttggagactgtgaggcatttaggaaaaaaatagcccactcacatcattccttgtaagtcttaagttcattttcattttacgtggaggaaaaaaatttaaaaagctattagtatttattaatgaattttactgagacatttcttagaaatatgcacttctatactagcaagctctgtctctaaaatgcaagttggccttttgcttgccacatttctgcattaaacttctatattagcttcaaaggcttttaaactcaatgcgaacattctacgggatgttcttagatgcctttaaaaagggggcagatctaattttatttgaaccctcactttccaacttcaccatgacccagtactagagattagggcacttcaaagcattgaaaaaaatctactgatacttactttcttagacaagtagttcttagttaaccaccaatggaactgggttcattctgaatcctggaggagcttcctcgtgccacccagtgtttctgggccctctgtgtgagcagccaggtatgagctgttttagaagcagcgtgttgccttcatctctcccgtttcccaaaagaacaaaggataaaggtgacagtcacactcctgggttaaaaaaagcattccagaaccacttctctttatgggcacaacaaagaaacgaaggctgaagttcgcctacccaaaatgaaaagtaggctttacagtcaaaagtacttctgttgattgctaaataacttcattttcttgaaatagagcaactttgagtgaaatctgcaacatggataccatgtatataagatactgctgtacagaagagttaaggcttacagtgcaaatgaggcgtcagctttgggtgctaaaattaacaagtctaatattattaccatcaatcaggaagagaataataaatgtttaaacaaacacagcagtctgtataaaaataccgtgtatcatttactctttctgcagctctatacgataggcaggagaggcttatgtggcagcacaagccaggtggggattttgtaacgaagtgataaaacatttgtaagtaatccaagtaggtgtattaaggcaccaaaagtaacatggcacccaacacccaaaaataaaaatatgaaatatgagtgtgaactctgagtagagtatgaaacaccacagaaagtcttagaaatagctctggagtggctctcccaggacagtttccagttgctgaatagtcttttggcactgatgttctacttcttcacattcatctaaaaaaaaaaaaaaaaaaaatcaaaattaaaatctgagtcagtccgcctgcctcggttctcattagtttaattcttaatgccttgcactttccggcaatcattcaatcaaaagagtgaaatgaagcacattaacaaagcaggaggcgccacggaccgcctccctccacaccgctccttccgccttcattccttgcccacaggcttgcactggaagctgaataagaatccccaaaactcaaacttcctagggatgccacccctttagtagctcacacctcccccctccaagagctaagaaacaaaggagaatgtacttttgtagcttagataagcaatgaatcagtaaaggactgatctacttgctccaccacccctcccttaataataacatttactgttatttcctgggcctaagacttatgttccagaactgtcacagctccccatgtcacactcactagcttgtgatctttgtcaaataactgaaatcttttaagcctctagtttcttcctttgtaaaacagagataaaatgttgtggtttttaagtgagataatccaagtaaagcacctaacatggagtagtgaatgaacatcggttgctactaaaagtggacatcctaccgcatccttaatgccactaggcatttccatacaatctggggaccaaaacttcaatcatataaatgtatgaggttaattaaaaacactactgtaatctgcttgtatgatcacaaaccaccacaaaagaaaagatcgtgaagattacactgtaaacggactctcaaatgatcaggaggtggtcacttcgcaacttgctccctccacccaactcaaaacaggagctcgagcctgcctgtatttgagactggagctgcctgtatgaggactggatcaactgctagtcacgttatatccaaatctgcattatcattgggcacattttcacagaattttactgaattattccttaattgtttaatggttgggaatagtttgggaattaccttccatcaactctgctaagaaaggaatggattctggtagcaagacaatataattctcctttagtttttcagccagtgctaacacagtaatcaaagcagcaaatcgaacctgaaagggataaaagagcaaagaaataaaaagtagtgttactgtatttattatcttaagagctgtactgacttgagacaagctctaactttttaaacattagttcacacgcgtttattcacttcattatgttcattaagctttcatcttagaataccagtttcaccatttgggagctgtttgtaatatgtgcaaccttataaatagtgttttccaaactgtgtcccaggactgcaaatctttaatgtgaaatgtctttttataatctcttcctttaaaaaaaaccaataaaataaaatgccacatgcaaactcaaaaacacaacacacaaacacacatcactctccaatacacacatacattctacccactcccccaaccacatgatgggcaggacaggtggctgtagagagaagcttataccgcacaaccatagagcagacgagccgacacaaggcgataagggagcaagaaggaatcgatcagagcaagacagaccaccgctgcgcacgcgcagtggcgcaggtgcgctacaacacagaagatg

SEQ ID NO: 352049 - DNA, 4321 bp, Homo sapiens
agaggattcaaagcggtagaacttcggagattggggaagataatcggaagaggtagaagacaccgtccatgacacttcctggggaagcagatgtatgtataaggatccgcccacggacgccagagccgggaaccctgacggcacttagctgctgacaaacaacctgctccgtggagcgcctgaaacaccagtctttggggccagtgcctcagtttcaatccaggtaacctttaaatgaaacttgcctaaaatcttaggtcatacacagaagagactccaatcgacaagaagctggaaaagaatgatgttgtccttaaacaacctacagaatatcatctataacccggtaatcccgtatgttggcaccattcccgatcagctggatcctggaactttgattgtgatatgtgggcatgttcctagtgacgcagacagattccaggtggatctgcagaatggcagcagtgtgaaacctcgagccgatgtggcctttcatttcaatcctcgtttcaaaagggccggctgcattgtttgcaatactttgataaatgaaaaatggggacgggaagagatcacctatgacacgcctttcaaaagagaaaagtcttttgagatcgtgattatggtgctaaaggacaaattccaggtggctgtaaatggaaaacatactctgctctatggccacaggatcggcccagagaaaatagacactctgggcatttatggcaaagtgaatattcactcaattggttttagcttcagctcggacttacaaagtacccaagcatctagtctggaactgacagagataagtagagaaaatgttccaaagtctggcacgccccagcttagcctgccattcgctgcaaggttgaacacccccatgggccctggacgaactgtcgtcgttaaaggagaagtgaatgcaaatgccaaaagctttaatgttgacctactagcaggaaaatcaaaggatattgctctacacttgaacccacgcctgaatattaaagcatttgtaagaaattcttttcttcaggagtcctggggagaagaagagagaaatattacctctttcccatttagtcctgggatgtactttgagatgataatttactgtgatgttagagaattcaaggttgcagtaaatggcgtacacagcctggagtacaaacacagatttaaagagctcagcagtattgacacgctggaaattaatggagacatccacttactggaagtaaggagctggtagcctacctacacagctgctacaaaaaccaaaatacagaatggcttctgtgatactggccttgctgaaacgcatctcactgtcattctattgtttatattgttaaaatgagcttgtgcaccattaggtcctgctgggtgttctcagtccttgccatgaagtatggtggtgtctagcactgaatggggaaactgggggcagcaacacttatagccagttaaagccactctgccctctctcctactttggctgactcttcaagaatgccattcaacaagtatttatggagtacctactataatacagtagctaacatgtattgagcacagattttttttggtaaaactgtgaggagctaggatatatacttggtgaaacaaaccagtatgttccctgttctcttgagcttcgactcttctgtgcgctactgctgcgcactgctttttctacaggcattacatcaactcctaaggggtcctctgggattagttaagcagctattaaatcacccgaagacactaatttacagaagacacaactccttccccagtgatcactgtcataaccagtgctctaccgtatcccatcactgaggactgatgttgactgacatcattttatcgtaataaacatgtggctctattagctgcaagctttaccaagtaattggcatgacatctgagcacagaaattaaggcaaaaaaccaaagcaaaacaaatacatggtgctgaaattaacttgatgccaagcccaaggcagctgatttctgtgtatttgaacttagggcaaatcagagtctacacagacgcctacagaaagtttcaggaagaggcaagatgcattcaatttgaaagatatttatgggcaacaaagtaaggtcaggattagacttcaggcattcataaggcaggcactatcagaaagtgtacgccaactaagggacccacaaagcaggcagaggtaatgcagaaatctgttttgttcccatgaaatcaccaatcaaggcctccgttcttctaaagattagtccatcatcattagcaactgagatcaaagcactcttccactttacgtgattaaaatcaaacctgtatcagcaagttaaatggttccatttctgtgatttttctattatttgaggggagttggcagaagttccatgtatatgggatctttacaggtcagatcttgttacaggaaatttcaaaggtttgggagtggggagggaaaaaagctcagtcagtgaggatcattttatcacattagactggggcagaactctgccaggatttaggaatattttcagaacagattttagatattatttctatccatatattgaaaagaataccattgtcaatcttatttttttaaaagtactcagtgtagaaatcgctagcccttaattcttttccagcttttcatattaatgtatgcagagtctcaccaagctcaaagacactggttgggggtggagggtgccacagggaaagctgtagaaggcaagaagactcgagaatcccccagagttatttttctccataaagaccatcagagtgcttaactgagctgttggagactgtgaggcatttaggaaaaaaatagcccactcacatcattccttgtaagtcttaagttcattttcattttacgtggaggaaaaaaatttaaaaagctattagtatttattaatgaattttactgagacatttcttagaaatatgcacttctatactagcaagctctgtctctaaaatgcaagttggccttttgcttgccacatttctgcattaaacttctatattagcttcaaaggcttttaaactcaatgcgaacattctacgggatgttcttagatgcctttaaaaagggggcagatctaattttatttgaaccctcactttccaacttcaccatgacccagtactagagattagggcacttcaaagcattgaaaaaaatctactgatacttactttcttagacaagtagttcttagttaaccaccaatggaactgggttcattctgaatcctggaggagcttcctcgtgccacccagtgtttctgggccctctgtgtgagcagccaggtatgagctgttttagaagcagcgtgttgccttcatctctcccgtttcccaaaagaacaaaggataaaggtgacagtcacactcctgggttaaaaaaagcattccagaaccacttctctttatgggcacaacaaagaaacgaaggctgaagttcgcctacccaaaatgaaaagtaggctttacagtcaaaagtacttctgttgattgctaaataacttcattttcttgaaatagagcaactttgagtgaaatctgcaacatggataccatgtatataagatactgctgtacagaagagttaaggcttacagtgcaaatgaggcgtcagctttgggtgctaaaattaacaagtctaatattattaccatcaatcaggaagagaataataaatgtttaaacaaacacagcagtctgtataaaaataccgtgtatcatttactctttctgcagctctatacgataggcaggagaggcttatgtggcagcacaagccaggtggggattttgtaacgaagtgataaaacatttgtaagtaatccaagtaggtgtattaaggcaccaaaagtaacatggcacccaacacccaaaaataaaaatatgaaatatgagtgtgaactctgagtagagtatgaaacaccacagaaagtcttagaaatagctctggagtggctctcccaggacagtttccagttgctgaatagtcttttggcactgatgttctacttcttcacattcatcttccatcaactctggcgtattgagaaaacagtaatactaggaatattgtcctgaggagagaaagaaaacaaactaggtcaaaagctgttatgtctctgttataaaataacactcgaagcttctatggcaaaattgacatagtgttcaattcatttacctagaaagctgctagtcctctgaactaccatttgagaaatagtatatctattggaatgtacatcttttggaaatactactgtg

SEQ ID NO: 352050 - DNA, 5692 bp, Homo sapiens
agaggattcaaagcggtagaacttcggagattggggaagataatcggaagaggtagaagacaccgtccatgacacttcctggggaagcagatgtatgtataaggatccgcccacggacgccagagccgggaaccctgacggcacttagctgctgacaaacaacctgctccgtggagcgcctgaaacaccagtctttggggccagtgcctcagtttcaatccaggtaacctttaaatgaaacttgcctaaaatcttaggtcatacacagaagagactccaatcgacaagaagctggaaaagaatgatgttgtccttaaacaacctacagaatatcatctataacccggtaatcccgtatgttggcaccattcccgatcagctggatcctggaactttgattgtgatatgtgggcatgttcctagtgacgcagacagattccaggtggatctgcagaatggcagcagtgtgaaacctcgagccgatgtggcctttcatttcaatcctcgtttcaaaagggccggctgcattgtttgcaatactttgataaatgaaaaatggggacgggaagagatcacctatgacacgcctttcaaaagagaaaagtcttttgagatcgtgattatggtgctaaaggacaaattccaggtggctgtaaatggaaaacatactctgctctatggccacaggatcggcccagagaaaatagacactctgggcatttatggcaaagtgaatattcactcaattggttttagcttcagctcggacttacaaagtacccaagcatctagtctggaactgacagagataagtagagaaaatgttccaaagtctggcacgccccagcttagcctgccattcgctgcaaggttgaacacccccatgggccctggacgaactgtcgtcgttaaaggagaagtgaatgcaaatgccaaaagctttaatgttgacctactagcaggaaaatcaaaggatattgctctacacttgaacccacgcctgaatattaaagcatttgtaagaaattcttttcttcaggagtcctggggagaagaagagagaaatattacctctttcccatttagtcctgggatgtactttgagatgataatttactgtgatgttagagaattcaaggttgcagtaaatggcgtacacagcctggagtacaaacacagatttaaagagctcagcagtattgacacgctggaaattaatggagacatccacttactggaagtaaggagctggtagcctacctacacagctgctacaaaaaccaaaatacagaatggcttctgtgatactggccttgctgaaacgcatctcactgtcattctattgtttatattgttaaaatgagcttgtgcaccattaggtcctgctgggtgttctcagtccttgccatgaagtatggtggtgtctagcactgaatggggaaactgggggcagcaacacttatagccagttaaagccactctgccctctctcctactttggctgactcttcaagaatgccattcaacaagtatttatggagtacctactataatacagtagctaacatgtattgagcacagattttttttggtaaaactgtgaggagctaggatatatacttggtgaaacaaaccagtatgttccctgttctcttgagcttcgactcttctgtgcgctactgctgcgcactgctttttctacaggcattacatcaactcctaaggggtcctctgggattagttaagcagctattaaatcacccgaagacactaatttacagaagacacaactccttccccagtgatcactgtcataaccagtgctctaccgtatcccatcactgaggactgatgttgactgacatcattttatcgtaataaacatgtggctctattagctgcaagctttaccaagtaattggcatgacatctgagcacagaaattaaggcaaaaaaccaaagcaaaacaaatacatggtgctgaaattaacttgatgccaagcccaaggcagctgatttctgtgtatttgaacttagggcaaatcagagtctacacagacgcctacagaaagtttcaggaagaggcaagatgcattcaatttgaaagatatttatgggcaacaaagtaaggtcaggattagacttcaggcattcataaggcaggcactatcagaaagtgtacgccaactaagggacccacaaagcaggcagaggtaatgcagaaatctgttttgttcccatgaaatcaccaatcaaggcctccgttcttctaaagattagtccatcatcattagcaactgagatcaaagcactcttccactttacgttctattatttgaggggagttggcagaagttccatgtatatgggatctttacaggtcagatcttgttacaggaaatttcaaaggtttgggagtggggagggaaaaaagctcagtcagtgaggatcattttatcacattagactggggcagaactctgccaggatttaggaatattttcagaacagattttagatattatttctatccatatattgaaaagaataccattgtcaatcttatttttttaaaagtactcagtgtagaaatcgctagcccttaattcttttccagcttttcatattaatgtatgcagagtctcaccaagctcaaagacactggttgggggtggagggtgccacagggaaagctgtagaaggcaagaagactcgagaatcccccagagttatttttctccataaagaccatcagagtgcttaactgagctgttggagactgtgaggcatttaggaaaaaaatagcccactcacatcattccttgtaagtcttaagttcattttcattttacgtggaggaaaaaaatttaaaaagctattagtatttattaatgaattttactgagacatttcttagaaatatgcacttctatactagcaagctctgtctctaaaatgcaagttggccttttgcttgccacatttctgcattaaacttctatattagcttcaaaggcttttaaactcaatgcgaacattctacgggatgttcttagatgcctttaaaaagggggcagatctaattttatttgaaccctcactttccaacttcaccatgacccagtactagagattagggcacttcaaagcattgaaaaaaatctactgatacttactttcttagacaagtagttcttagttaaccaccaatggaactgggttcattctgaatcctggaggagcttcctcgtgccacccagtgtttctgggccctctgtgtgagcagccaggtatgagctgttttagaagcagcgtgttgccttcatctctcccgtttcccaaaagaacaaaggataaaggtgacagtcacactcctgggttaaaaaaagcattccagaaccacttctctttatgggcacaacaaagaaacgaaggctgaagttcgcctacccaaaatgaaaagtaggctttacagtcaaaagtacttctgttgattgctaaataacttcattttcttgaaatagagcaactttgagtgaaatctgcaacatggataccatgtatataagatactgctgtacagaagagttaaggcttacagtgcaaatgaggcgtcagctttgggtgctaaaattaacaagtctaatattattaccatcaatcaggaagagaataataaatgtttaaacaaacacagcagtctgtataaaaataccgtgtatcatttactctttctgcagctctatacgataggcaggagaggcttatgtggcagcacaagccaggtggggattttgtaacgaagtgataaaacatttgtaagtaatccaagtaggtgtattaaggcaccaaaagtaacatggcacccaacacccaaaaataaaaatatgaaatatgagtgtgaactctgagtagagtatgaaacaccacagaaagtcttagaaatagctctggagtggctctcccaggacagtttccagttgctgaatagtcttttggcactgatgttctacttcttcacattcatctaaaaaaaaaaaaaaaaaaaatcaaaattaaaatctgagtcagtccgcctgcctcggttctcattagtttaattcttaatgccttgcactttccggcaatcattcaatcaaaagagtgaaatgaagcacattaacaaagcaggaggcgccacggaccgcctccctccacaccgctccttccgccttcattccttgcccacaggcttgcactggaagctgaataagaatccccaaaactcaaacttcctagggatgccacccctttagtagctcacacctcccccctccaagagctaagaaacaaaggagaatgtacttttgtagcttagataagcaatgaatcagtaaaggactgatctacttgctccaccacccctcccttaataataacatttactgttatttcctgggcctaagacttatgttccagaactgtcacagctccccatgtcacactcactagcttgtgatctttgtcaaataactgaaatcttttaagcctctagtttcttcctttgtaaaacagagataaaatgttgtggtttttaagtgagataatccaagtaaagcacctaacatggagtagtgaatgaacatcggttgctactaaaagtggacatcctaccgcatccttaatgccactaggcatttccatacaatctggggaccaaaacttcaatcatataaatgtatgaggttaattaaaaacactactgtaatctgcttgtatgatcacaaaccaccacaaaagaaaagatcgtgaagattacactgtaaacggactctcaaatgatcaggaggtggtcacttcgcaacttgctccctccacccaactcaaaacaggagctcgagcctgcctgtatttgagactggagctgcctgtatgaggactggatcaactgctagtcacgttatatccaaatctgcattatcattgggcacattttcacagaattttactgaattattccttaattgtttaatggttgggaatagtttgggaattaccttccatcaactctgctaagaaaggaatggattctggtagcaagacaatataattctcctttagtttttcagccagtgctaacacagtaatcaaagcagcaaatcgaacctgaaagggataaaagagcaaagaaataaaaagtagtgttactgtatttattatcttaagagctgtactgacttgagacaagctctaactttttaaacattagttcacacgcgtttattcacttcattatgttcattaagctttcatcttagaataccagtttcaccatttgggagctgtttgtaatatgtgcaaccttataaatagtgttttccaaactgtgtcccaggactgcaaatctttaatgtgaaatgtctttttataatctcttcctttaaaaaaaaccaataaaataaaatgccacatgcaaactcaaaaacacaacacacaaacacacatcactctccaatacacacatacattctacccactcccccaaccacatgatgggcaggacaggtggctgtagagagaagcttataccgcacaaccatagagcagacgagccgacacaaggcgataagggagcaagaaggaatcgatcagagcaagacagaccaccgctgcgcacgcgcagtggcgcaggtgcgctacaacacagaagatg

SEQ ID NO: 352051 - DNA, 6518 bp, Homo sapiens
agaggattcaaagcggtagaacttcggagattggggaagataatcggaagaggtagaagacaccgtccatgacacttcctggggaagcagatgtatgtataaggatccgcccacggacgccagagccgggaaccctgacggcacttagctgctgacaaacaacctgctccgtggagcgcctgaaacaccagtctttggggccagtgcctcagtttcaatccaggtaacctttaaatgaaacttgcctaaaatcttaggtcatacacagaagagactccaatcgacaagaagctggaaaagaatgatgttgtccttaaacaacctacagaatatcatctataacccggtaatcccgtatgttggcaccattcccgatcagctggatcctggaactttgattgtgatatgtgggcatgttcctagtgacgcagacagattccaggtggatctgcagaatggcagcagtgtgaaacctcgagccgatgtggcctttcatttcaatcctcgtttcaaaagggccggctgcattgtttgcaatactttgataaatgaaaaatggggacgggaagagatcacctatgacacgcctttcaaaagagaaaagtcttttgagatcgtgattatggtgctaaaggacaaattccaggtggctgtaaatggaaaacatactctgctctatggccacaggatcggcccagagaaaatagacactctgggcatttatggcaaagtgaatattcactcaattggttttagcttcagctcggacttacaaagtacccaagcatctagtctggaactgacagagataagtagagaaaatgttccaaagtctggcacgccccagcttgtgagtatttttgcctgggttatttcatgtggaatattttataaagttgcatagaaaatgaacagtttaaaccgtggagggcagcttcattcattccattccttactgtagaactgtttccctacagcctagtaatagaggaggagacatttctaaaatcgcacccagaactgtctacaccaagagcaaagattcgactgtcaatcacactttgacttgcaccaaaataccacctatgaactatgtgtcaaaggtttgaagagccccaaattttcttaactctgtataaaaattaagttgtaatgagctgttacgagtaacctgtatccacaatagaagcccaaagcagccccctctgcatttgtgtgccgtccctggatggattcgagagtcaaccaggcctgcctctgagccattcctgtgtatttcctcagcacctccctgcttggctgcttccccttcaggcagaacacagtactgcctcagaccccagggcacagggggccttcctggcgtgtttcactcatacagagggcatcgggtcccaccctgtcactcatttcatcgtctaaaatgtaatcatgagtgtttgcttcgagccagggacagtgctgctgcaggggacccagctgggaccaaggcagactgtctctcccctcctgggatttacagggtcatggctctgaaacattctgtagtgttctttggacacgagttttccctggagatcgctttctgcaggcctcttggtcctgactgtggcttcttttcagagcctgccattcgctgcaaggttgaacacccccatgggccctggacgaactgtcgtcgttaaaggagaagtgaatgcaaatgccaaaagctttaatgttgacctactagcaggaaaatcaaaggatattgctctacacttgaacccacgcctgaatattaaagcatttgtaagaaattcttttcttcaggagtcctggggagaagaagagagaaatattacctctttcccatttagtcctgggatgtactttgagatgataatttactgtgatgttagagaattcaaggttgcagtaaatggcgtacacagcctggagtacaaacacagatttaaagagctcagcagtattgacacgctggaaattaatggagacatccacttactggaagtaaggagctggtagcctacctacacagctgctacaaaaaccaaaatacagaatggcttctgtgatactggccttgctgaaacgcatctcactgtcattctattgtttatattgttaaaatgagcttgtgcaccattaggtcctgctgggtgttctcagtccttgccatgaagtatggtggtgtctagcactgaatggggaaactgggggcagcaacacttatagccagttaaagccactctgccctctctcctactttggctgactcttcaagaatgccattcaacaagtatttatggagtacctactataatacagtagctaacatgtattgagcacagattttttttggtaaaactgtgaggagctaggatatatacttggtgaaacaaaccagtatgttccctgttctcttgagcttcgactcttctgtgcgctactgctgcgcactgctttttctacaggcattacatcaactcctaaggggtcctctgggattagttaagcagctattaaatcacccgaagacactaatttacagaagacacaactccttccccagtgatcactgtcataaccagtgctctaccgtatcccatcactgaggactgatgttgactgacatcattttatcgtaataaacatgtggctctattagctgcaagctttaccaagtaattggcatgacatctgagcacagaaattaaggcaaaaaaccaaagcaaaacaaatacatggtgctgaaattaacttgatgccaagcccaaggcagctgatttctgtgtatttgaacttagggcaaatcagagtctacacagacgcctacagaaagtttcaggaagaggcaagatgcattcaatttgaaagatatttatgggcaacaaagtaaggtcaggattagacttcaggcattcataaggcaggcactatcagaaagtgtacgccaactaagggacccacaaagcaggcagaggtaatgcagaaatctgttttgttcccatgaaatcaccaatcaaggcctccgttcttctaaagattagtccatcatcattagcaactgagatcaaagcactcttccactttacgtgattaaaatcaaacctgtatcagcaagttaaatggttccatttctgtgatttttctattatttgaggggagttggcagaagttccatgtatatgggatctttacaggtcagatcttgttacaggaaatttcaaaggtttgggagtggggagggaaaaaagctcagtcagtgaggatcattttatcacattagactggggcagaactctgccaggatttaggaatattttcagaacagattttagatattatttctatccatatattgaaaagaataccattgtcaatcttatttttttaaaagtactcagtgtagaaatcgctagcccttaattcttttccagcttttcatattaatgtatgcagagtctcaccaagctcaaagacactggttgggggtggagggtgccacagggaaagctgtagaaggcaagaagactcgagaatcccccagagttatttttctccataaagaccatcagagtgcttaactgagctgttggagactgtgaggcatttaggaaaaaaatagcccactcacatcattccttgtaagtcttaagttcattttcattttacgtggaggaaaaaaatttaaaaagctattagtatttattaatgaattttactgagacatttcttagaaatatgcacttctatactagcaagctctgtctctaaaatgcaagttggccttttgcttgccacatttctgcattaaacttctatattagcttcaaaggcttttaaactcaatgcgaacattctacgggatgttcttagatgcctttaaaaagggggcagatctaattttatttgaaccctcactttccaacttcaccatgacccagtactagagattagggcacttcaaagcattgaaaaaaatctactgatacttactttcttagacaagtagttcttagttaaccaccaatggaactgggttcattctgaatcctggaggagcttcctcgtgccacccagtgtttctgggccctctgtgtgagcagccaggtatgagctgttttagaagcagcgtgttgccttcatctctcccgtttcccaaaagaacaaaggataaaggtgacagtcacactcctgggttaaaaaaagcattccagaaccacttctctttatgggcacaacaaagaaacgaaggctgaagttcgcctacccaaaatgaaaagtaggctttacagtcaaaagtacttctgttgattgctaaataacttcattttcttgaaatagagcaactttgagtgaaatctgcaacatggataccatgtatataagatactgctgtacagaagagttaaggcttacagtgcaaatgaggcgtcagctttgggtgctaaaattaacaagtctaatattattaccatcaatcaggaagagaataataaatgtttaaacaaacacagcagtctgtataaaaataccgtgtatcatttactctttctgcagctctatacgataggcaggagaggcttatgtggcagcacaagccaggtggggattttgtaacgaagtgataaaacatttgtaagtaatccaagtaggtgtattaaggcaccaaaagtaacatggcacccaacacccaaaaataaaaatatgaaatatgagtgtgaactctgagtagagtatgaaacaccacagaaagtcttagaaatagctctggagtggctctcccaggacagtttccagttgctgaatagtcttttggcactgatgttctacttcttcacattcatctaaaaaaaaaaaaaaaaaaaatcaaaattaaaatctgagtcagtccgcctgcctcggttctcattagtttaattcttaatgccttgcactttccggcaatcattcaatcaaaagagtgaaatgaagcacattaacaaagcaggaggcgccacggaccgcctccctccacaccgctccttccgccttcattccttgcccacaggcttgcactggaagctgaataagaatccccaaaactcaaacttcctagggatgccacccctttagtagctcacacctcccccctccaagagctaagaaacaaaggagaatgtacttttgtagcttagataagcaatgaatcagtaaaggactgatctacttgctccaccacccctcccttaataataacatttactgttatttcctgggcctaagacttatgttccagaactgtcacagctccccatgtcacactcactagcttgtgatctttgtcaaataactgaaatcttttaagcctctagtttcttcctttgtaaaacagagataaaatgttgtggtttttaagtgagataatccaagtaaagcacctaacatggagtagtgaatgaacatcggttgctactaaaagtggacatcctaccgcatccttaatgccactaggcatttccatacaatctggggaccaaaacttcaatcatataaatgtatgaggttaattaaaaacactactgtaatctgcttgtatgatcacaaaccaccacaaaagaaaagatcgtgaagattacactgtaaacggactctcaaatgatcaggaggtggtcacttcgcaacttgctccctccacccaactcaaaacaggagctcgagcctgcctgtatttgagactggagctgcctgtatgaggactggatcaactgctagtcacgttatatccaaatctgcattatcattgggcacattttcacagaattttactgaattattccttaattgtttaatggttgggaatagtttgggaattaccttccatcaactctgctaagaaaggaatggattctggtagcaagacaatataattctcctttagtttttcagccagtgctaacacagtaatcaaagcagcaaatcgaacctgaaagggataaaagagcaaagaaataaaaagtagtgttactgtatttattatcttaagagctgtactgacttgagacaagctctaactttttaaacattagttcacacgcgtttattcacttcattatgttcattaagctttcatcttagaataccagtttcaccatttgggagctgtttgtaatatgtgcaaccttataaatagtgttttccaaactgtgtcccaggactgcaaatctttaatgtgaaatgtctttttataatctcttcctttaaaaaaaaccaataaaataaaatgccacatgcaaactcaaaaacacaacacacaaacacacatcactctccaatacacacatacattctacccactcccccaaccacatgatgggcaggacaggtggctgtagagagaagcttataccgcacaaccatagagcagacgagccgacacaaggcgataagggagcaagaaggaatcgatcagagcaagacagaccaccgctgcgcacgcgcagtggcgcaggtgcgctacaacacagaagatg

SEQ ID NO: 352052 - DNA, 5871 bp, Homo sapiens
agaggattcaaagcggtagaacttcggagattggggaagataatcggaagaggtagaagacaccgtccatgacacttcctggggaagcagatgtatgtataaggatccgcccacggacgccagagccgggaaccctgacggcacttagctgctgacaaacaacctgctccgtggagcgcctgaaacaccagtctttggggccagtgcctcagtttcaatccaggtaacctttaaatgaaacttgcctaaaatcttaggtcatacacagaagagactccaatcgacaagaagctggaaaagaatgatgttgtccttaaacaacctacagaatatcatctataacccggtaatcccgtatgttggcaccattcccgatcagctggatcctggaactttgattgtgatatgtgggcatgttcctagtgacgcagacagattccaggtggatctgcagaatggcagcagtgtgaaacctcgagccgatgtggcctttcatttcaatcctcgtttcaaaagggccggctgcattgtttgcaatactttgataaatgaaaaatggggacgggaagagatcacctatgacacgcctttcaaaagagaaaagtcttttgagatcgtgattatggtgctaaaggacaaattccaggtggctgtaaatggaaaacatactctgctctatggccacaggatcggcccagagaaaatagacactctgggcatttatggcaaagtgaatattcactcaattggttttagcttcagctcggacttacaaagtacccaagcatctagtctggaactgacagagataagtagagaaaatgttccaaagtctggcacgccccagcttcctagtaatagaggaggagacatttctaaaatcgcacccagaactgtctacaccaagagcaaagattcgactgtcaatcacactttgacttgcaccaaaataccacctatgaactatgtgtcaaagagcctgccattcgctgcaaggttgaacacccccatgggccctggacgaactgtcgtcgttaaaggagaagtgaatgcaaatgccaaaagctttaatgttgacctactagcaggaaaatcaaaggatattgctctacacttgaacccacgcctgaatattaaagcatttgtaagaaattcttttcttcaggagtcctggggagaagaagagagaaatattacctctttcccatttagtcctgggatgtactttgagatgataatttactgtgatgttagagaattcaaggttgcagtaaatggcgtacacagcctggagtacaaacacagatttaaagagctcagcagtattgacacgctggaaattaatggagacatccacttactggaagtaaggagctggtagcctacctacacagctgctacaaaaaccaaaatacagaatggcttctgtgatactggccttgctgaaacgcatctcactgtcattctattgtttatattgttaaaatgagcttgtgcaccattaggtcctgctgggtgttctcagtccttgccatgaagtatggtggtgtctagcactgaatggggaaactgggggcagcaacacttatagccagttaaagccactctgccctctctcctactttggctgactcttcaagaatgccattcaacaagtatttatggagtacctactataatacagtagctaacatgtattgagcacagattttttttggtaaaactgtgaggagctaggatatatacttggtgaaacaaaccagtatgttccctgttctcttgagcttcgactcttctgtgcgctactgctgcgcactgctttttctacaggcattacatcaactcctaaggggtcctctgggattagttaagcagctattaaatcacccgaagacactaatttacagaagacacaactccttccccagtgatcactgtcataaccagtgctctaccgtatcccatcactgaggactgatgttgactgacatcattttatcgtaataaacatgtggctctattagctgcaagctttaccaagtaattggcatgacatctgagcacagaaattaaggcaaaaaaccaaagcaaaacaaatacatggtgctgaaattaacttgatgccaagcccaaggcagctgatttctgtgtatttgaacttagggcaaatcagagtctacacagacgcctacagaaagtttcaggaagaggcaagatgcattcaatttgaaagatatttatgggcaacaaagtaaggtcaggattagacttcaggcattcataaggcaggcactatcagaaagtgtacgccaactaagggacccacaaagcaggcagaggtaatgcagaaatctgttttgttcccatgaaatcaccaatcaaggcctccgttcttctaaagattagtccatcatcattagcaactgagatcaaagcactcttccactttacgtgattaaaatcaaacctgtatcagcaagttaaatggttccatttctgtgatttttctattatttgaggggagttggcagaagttccatgtatatgggatctttacaggtcagatcttgttacaggaaatttcaaaggtttgggagtggggagggaaaaaagctcagtcagtgaggatcattttatcacattagactggggcagaactctgccaggatttaggaatattttcagaacagattttagatattatttctatccatatattgaaaagaataccattgtcaatcttatttttttaaaagtactcagtgtagaaatcgctagcccttaattcttttccagcttttcatattaatgtatgcagagtctcaccaagctcaaagacactggttgggggtggagggtgccacagggaaagctgtagaaggcaagaagactcgagaatcccccagagttatttttctccataaagaccatcagagtgcttaactgagctgttggagactgtgaggcatttaggaaaaaaatagcccactcacatcattccttgtaagtcttaagttcattttcattttacgtggaggaaaaaaatttaaaaagctattagtatttattaatgaattttactgagacatttcttagaaatatgcacttctatactagcaagctctgtctctaaaatgcaagttggccttttgcttgccacatttctgcattaaacttctatattagcttcaaaggcttttaaactcaatgcgaacattctacgggatgttcttagatgcctttaaaaagggggcagatctaattttatttgaaccctcactttccaacttcaccatgacccagtactagagattagggcacttcaaagcattgaaaaaaatctactgatacttactttcttagacaagtagttcttagttaaccaccaatggaactgggttcattctgaatcctggaggagcttcctcgtgccacccagtgtttctgggccctctgtgtgagcagccaggtatgagctgttttagaagcagcgtgttgccttcatctctcccgtttcccaaaagaacaaaggataaaggtgacagtcacactcctgggttaaaaaaagcattccagaaccacttctctttatgggcacaacaaagaaacgaaggctgaagttcgcctacccaaaatgaaaagtaggctttacagtcaaaagtacttctgttgattgctaaataacttcattttcttgaaatagagcaactttgagtgaaatctgcaacatggataccatgtatataagatactgctgtacagaagagttaaggcttacagtgcaaatgaggcgtcagctttgggtgctaaaattaacaagtctaatattattaccatcaatcaggaagagaataataaatgtttaaacaaacacagcagtctgtataaaaataccgtgtatcatttactctttctgcagctctatacgataggcaggagaggcttatgtggcagcacaagccaggtggggattttgtaacgaagtgataaaacatttgtaagtaatccaagtaggtgtattaaggcaccaaaagtaacatggcacccaacacccaaaaataaaaatatgaaatatgagtgtgaactctgagtagagtatgaaacaccacagaaagtcttagaaatagctctggagtggctctcccaggacagtttccagttgctgaatagtcttttggcactgatgttctacttcttcacattcatctaaaaaaaaaaaaaaaaaaaatcaaaattaaaatctgagtcagtccgcctgcctcggttctcattagtttaattcttaatgccttgcactttccggcaatcattcaatcaaaagagtgaaatgaagcacattaacaaagcaggaggcgccacggaccgcctccctccacaccgctccttccgccttcattccttgcccacaggcttgcactggaagctgaataagaatccccaaaactcaaacttcctagggatgccacccctttagtagctcacacctcccccctccaagagctaagaaacaaaggagaatgtacttttgtagcttagataagcaatgaatcagtaaaggactgatctacttgctccaccacccctcccttaataataacatttactgttatttcctgggcctaagacttatgttccagaactgtcacagctccccatgtcacactcactagcttgtgatctttgtcaaataactgaaatcttttaagcctctagtttcttcctttgtaaaacagagataaaatgttgtggtttttaagtgagataatccaagtaaagcacctaacatggagtagtgaatgaacatcggttgctactaaaagtggacatcctaccgcatccttaatgccactaggcatttccatacaatctggggaccaaaacttcaatcatataaatgtatgaggttaattaaaaacactactgtaatctgcttgtatgatcacaaaccaccacaaaagaaaagatcgtgaagattacactgtaaacggactctcaaatgatcaggaggtggtcacttcgcaacttgctccctccacccaactcaaaacaggagctcgagcctgcctgtatttgagactggagctgcctgtatgaggactggatcaactgctagtcacgttatatccaaatctgcattatcattgggcacattttcacagaattttactgaattattccttaattgtttaatggttgggaatagtttgggaattaccttccatcaactctgctaagaaaggaatggattctggtagcaagacaatataattctcctttagtttttcagccagtgctaacacagtaatcaaagcagcaaatcgaacctgaaagggataaaagagcaaagaaataaaaagtagtgttactgtatttattatcttaagagctgtactgacttgagacaagctctaactttttaaacattagttcacacgcgtttattcacttcattatgttcattaagctttcatcttagaataccagtttcaccatttgggagctgtttgtaatatgtgcaaccttataaatagtgttttccaaactgtgtcccaggactgcaaatctttaatgtgaaatgtctttttataatctcttcctttaaaaaaaaccaataaaataaaatgccacatgcaaactcaaaaacacaacacacaaacacacatcactctccaatacacacatacattctacccactcccccaaccacatgatgggcaggacaggtggctgtagagagaagcttataccgcacaaccatagagcagacgagccgacacaaggcgataagggagcaagaaggaatcgatcagagcaagacagaccaccgctgcgcacgcgcagtggcgcaggtgcgctacaacacagaagatg

SEQ ID NO: 352053 - DNA, 5873 bp, Homo sapiens
attttgtctttacattttacataatttcagatacattttcctcatatcaaataattcagcattttttagtactaacatcatagtctgtaagccattcaaaaaatgtatttcacaaaataggctatctcatcctttgagctattgagatgaattaatttatactcctcctaagatccctctcgtcactaagattcttttattttatgacaaaaccatagttctagaagcttgtttctcccacctgaaaagactggatttgggacatgatcctgtagaacttcggagccgcccacggacgccagagccgggaaccctgacggcacttagctgctgacaaacaacctgctccgtggagcgcctgaaacaccagtctttggggccagtgcctcagtttcaatccaggtaacctttaaatgaaacttgcctaaaatcttaggtcatacacagaagagactccaatcgacaagaagctggaaaagaatgatgttgtccttaaacaacctacagaatatcatctataacccggtaatcccgtatgttggcaccattcccgatcagctggatcctggaactttgattgtgatatgtgggcatgttcctagtgacgcagacagattccaggtggatctgcagaatggcagcagtgtgaaacctcgagccgatgtggcctttcatttcaatcctcgtttcaaaagggccggctgcattgtttgcaatactttgataaatgaaaaatggggacgggaagagatcacctatgacacgcctttcaaaagagaaaagtcttttgagatcgtgattatggtgctaaaggacaaattccaggttccaaagtctggcacgccccagcttcctagtaatagaggaggagacatttctaaaatcgcacccagaactgtctacaccaagagcaaagattcgactgtcaatcacactttgacttgcaccaaaataccacctatgaactatgtgtcaaagagcctgccattcgctgcaaggttgaacacccccatgggccctggacgaactgtcgtcgttaaaggagaagtgaatgcaaatgccaaaagctttaatgttgacctactagcaggaaaatcaaaggatattgctctacacttgaacccacgcctgaatattaaagcatttgtaagaaattcttttcttcaggagtcctggggagaagaagagagaaatattacctctttcccatttagtcctgggatgtactttgagatgataatttactgtgatgttagagaattcaaggttgcagtaaatggcgtacacagcctggagtacaaacacagatttaaagagctcagcagtattgacacgctggaaattaatggagacatccacttactggaagtaaggagctggtagcctacctacacagctgctacaaaaaccaaaatacagaatggcttctgtgatactggccttgctgaaacgcatctcactgtcattctattgtttatattgttaaaatgagcttgtgcaccattaggtcctgctgggtgttctcagtccttgccatgaagtatggtggtgtctagcactgaatggggaaactgggggcagcaacacttatagccagttaaagccactctgccctctctcctactttggctgactcttcaagaatgccattcaacaagtatttatggagtacctactataatacagtagctaacatgtattgagcacagattttttttggtaaaactgtgaggagctaggatatatacttggtgaaacaaaccagtatgttccctgttctcttgagcttcgactcttctgtgcgctactgctgcgcactgctttttctacaggcattacatcaactcctaaggggtcctctgggattagttaagcagctattaaatcacccgaagacactaatttacagaagacacaactccttccccagtgatcactgtcataaccagtgctctaccgtatcccatcactgaggactgatgttgactgacatcattttatcgtaataaacatgtggctctattagctgcaagctttaccaagtaattggcatgacatctgagcacagaaattaaggcaaaaaaccaaagcaaaacaaatacatggtgctgaaattaacttgatgccaagcccaaggcagctgatttctgtgtatttgaacttagggcaaatcagagtctacacagacgcctacagaaagtttcaggaagaggcaagatgcattcaatttgaaagatatttatgggcaacaaagtaaggtcaggattagacttcaggcattcataaggcaggcactatcagaaagtgtacgccaactaagggacccacaaagcaggcagaggtaatgcagaaatctgttttgttcccatgaaatcaccaatcaaggcctccgttcttctaaagattagtccatcatcattagcaactgagatcaaagcactcttccactttacgtgattaaaatcaaacctgtatcagcaagttaaatggttccatttctgtgatttttctattatttgaggggagttggcagaagttccatgtatatgggatctttacaggtcagatcttgttacaggaaatttcaaaggtttgggagtggggagggaaaaaagctcagtcagtgaggatcattttatcacattagactggggcagaactctgccaggatttaggaatattttcagaacagattttagatattatttctatccatatattgaaaagaataccattgtcaatcttatttttttaaaagtactcagtgtagaaatcgctagcccttaattcttttccagcttttcatattaatgtatgcagagtctcaccaagctcaaagacactggttgggggtggagggtgccacagggaaagctgtagaaggcaagaagactcgagaatcccccagagttatttttctccataaagaccatcagagtgcttaactgagctgttggagactgtgaggcatttaggaaaaaaatagcccactcacatcattccttgtaagtcttaagttcattttcattttacgtggaggaaaaaaatttaaaaagctattagtatttattaatgaattttactgagacatttcttagaaatatgcacttctatactagcaagctctgtctctaaaatgcaagttggccttttgcttgccacatttctgcattaaacttctatattagcttcaaaggcttttaaactcaatgcgaacattctacgggatgttcttagatgcctttaaaaagggggcagatctaattttatttgaaccctcactttccaacttcaccatgacccagtactagagattagggcacttcaaagcattgaaaaaaatctactgatacttactttcttagacaagtagttcttagttaaccaccaatggaactgggttcattctgaatcctggaggagcttcctcgtgccacccagtgtttctgggccctctgtgtgagcagccaggtatgagctgttttagaagcagcgtgttgccttcatctctcccgtttcccaaaagaacaaaggataaaggtgacagtcacactcctgggttaaaaaaagcattccagaaccacttctctttatgggcacaacaaagaaacgaaggctgaagttcgcctacccaaaatgaaaagtaggctttacagtcaaaagtacttctgttgattgctaaataacttcattttcttgaaatagagcaactttgagtgaaatctgcaacatggataccatgtatataagatactgctgtacagaagagttaaggcttacagtgcaaatgaggcgtcagctttgggtgctaaaattaacaagtctaatattattaccatcaatcaggaagagaataataaatgtttaaacaaacacagcagtctgtataaaaataccgtgtatcatttactctttctgcagctctatacgataggcaggagaggcttatgtggcagcacaagccaggtggggattttgtaacgaagtgataaaacatttgtaagtaatccaagtaggtgtattaaggcaccaaaagtaacatggcacccaacacccaaaaataaaaatatgaaatatgagtgtgaactctgagtagagtatgaaacaccacagaaagtcttagaaatagctctggagtggctctcccaggacagtttccagttgctgaatagtcttttggcactgatgttctacttcttcacattcatctaaaaaaaaaaaaaaaaaaaatcaaaattaaaatctgagtcagtccgcctgcctcggttctcattagtttaattcttaatgccttgcactttccggcaatcattcaatcaaaagagtgaaatgaagcacattaacaaagcaggaggcgccacggaccgcctccctccacaccgctccttccgccttcattccttgcccacaggcttgcactggaagctgaataagaatccccaaaactcaaacttcctagggatgccacccctttagtagctcacacctcccccctccaagagctaagaaacaaaggagaatgtacttttgtagcttagataagcaatgaatcagtaaaggactgatctacttgctccaccacccctcccttaataataacatttactgttatttcctgggcctaagacttatgttccagaactgtcacagctccccatgtcacactcactagcttgtgatctttgtcaaataactgaaatcttttaagcctctagtttcttcctttgtaaaacagagataaaatgttgtggtttttaagtgagataatccaagtaaagcacctaacatggagtagtgaatgaacatcggttgctactaaaagtggacatcctaccgcatccttaatgccactaggcatttccatacaatctggggaccaaaacttcaatcatataaatgtatgaggttaattaaaaacactactgtaatctgcttgtatgatcacaaaccaccacaaaagaaaagatcgtgaagattacactgtaaacggactctcaaatgatcaggaggtggtcacttcgcaacttgctccctccacccaactcaaaacaggagctcgagcctgcctgtatttgagactggagctgcctgtatgaggactggatcaactgctagtcacgttatatccaaatctgcattatcattgggcacattttcacagaattttactgaattattccttaattgtttaatggttgggaatagtttgggaattaccttccatcaactctgctaagaaaggaatggattctggtagcaagacaatataattctcctttagtttttcagccagtgctaacacagtaatcaaagcagcaaatcgaacctgaaagggataaaagagcaaagaaataaaaagtagtgttactgtatttattatcttaagagctgtactgacttgagacaagctctaactttttaaacattagttcacacgcgtttattcacttcattatgttcattaagctttcatcttagaataccagtttcaccatttgggagctgtttgtaatatgtgcaaccttataaatagtgttttccaaactgtgtcccaggactgcaaatctttaatgtgaaatgtctttttataatctcttcctttaaaaaaaaccaataaaataaaatgccacatgcaaactcaaaaacacaacacacaaacacacatcactctccaatacacacatacattctacccactcccccaaccacatgatgggcaggacaggtggctgtagagagaagcttataccgcacaaccatagagcagacgagccgacacaaggcgataagggagcaagaaggaatcgatcagagcaagacagaccaccgctgcgcacgcgcagtggcgcaggtgcgctacaacacagaagatg

SEQ ID NO: 352054 - DNA, 6390 bp, Homo sapiens
tgctgggattacaggcgtgagccaccgcgcccggccgcagttcctttttctagctgtttgaataggaaagatgacttggaaaatgctggattctgagcagatttatgtgcagccttaaaaagtgtagtttttctctatcaataatgagtgtgggttgtaattgcttagtaagtaattttgtttatgtaaacgtacatttgttaaattttttttcttaggtaatcccgtatgttggcaccattcccgatcagctggatcctggaactttgattgtgatatgtgggcatgttcctagtgacgcagacagattccaggtggatctgcagaatggcagcagtgtgaaacctcgagccgatgtggcctttcatttcaatcctcgtttcaaaagggccggctgcattgtttgcaatactttgataaatgaaaaatggggacgggaagagatcacctatgacacgcctttcaaaagagaaaagtcttttgagatcgtgattatggtgctaaaggacaaattccaggtggctgtaaatggaaaacatactctgctctatggccacaggatcggcccagagaaaatagacactctgggcatttatggcaaagtgaatattcactcaattggttttagcttcagctcggacttacaaagtacccaagcatctagtctggaactgacagagataagtagagaaaatgttccaaagtctggcacgccccagcttgtgagtatttttgcctgggttatttcatgtggaatattttataaagttgcatagaaaatgaacagtttaaaccgtggagggcagcttcattcattccattccttactgtagaactgtttccctacagcctagtaatagaggaggagacatttctaaaatcgcacccagaactgtctacaccaagagcaaagattcgactgtcaatcacactttgacttgcaccaaaataccacctatgaactatgtgtcaaaggtttgaagagccccaaattttcttaactctgtataaaaattaagttgtaatgagctgttacgagtaacctgtatccacaatagaagcccaaagcagccccctctgcatttgtgtgccgtccctggatggattcgagagtcaaccaggcctgcctctgagccattcctgtgtatttcctcagcacctccctgcttggctgcttccccttcaggcagaacacagtactgcctcagaccccagggcacagggggccttcctggcgtgtttcactcatacagagggcatcgggtcccaccctgtcactcatttcatcgtctaaaatgtaatcatgagtgtttgcttcgagccagggacagtgctgctgcaggggacccagctgggaccaaggcagactgtctctcccctcctgggatttacagggtcatggctctgaaacattctgtagtgttctttggacacgagttttccctggagatcgctttctgcaggcctcttggtcctgactgtggcttcttttcagagcctgccattcgctgcaaggttgaacacccccatgggccctggacgaactgtcgtcgttaaaggagaagtgaatgcaaatgccaaaagctttaatgttgacctactagcaggaaaatcaaaggatattgctctacacttgaacccacgcctgaatattaaagcatttgtaagaaattcttttcttcaggagtcctggggagaagaagagagaaatattacctctttcccatttagtcctgggatgtactttgagatgataatttactgtgatgttagagaattcaaggttgcagtaaatggcgtacacagcctggagtacaaacacagatttaaagagctcagcagtattgacacgctggaaattaatggagacatccacttactggaagtaaggagctggtagcctacctacacagctgctacaaaaaccaaaatacagaatggcttctgtgatactggccttgctgaaacgcatctcactgtcattctattgtttatattgttaaaatgagcttgtgcaccattaggtcctgctgggtgttctcagtccttgccatgaagtatggtggtgtctagcactgaatggggaaactgggggcagcaacacttatagccagttaaagccactctgccctctctcctactttggctgactcttcaagaatgccattcaacaagtatttatggagtacctactataatacagtagctaacatgtattgagcacagattttttttggtaaaactgtgaggagctaggatatatacttggtgaaacaaaccagtatgttccctgttctcttgagcttcgactcttctgtgcgctactgctgcgcactgctttttctacaggcattacatcaactcctaaggggtcctctgggattagttaagcagctattaaatcacccgaagacactaatttacagaagacacaactccttccccagtgatcactgtcataaccagtgctctaccgtatcccatcactgaggactgatgttgactgacatcattttatcgtaataaacatgtggctctattagctgcaagctttaccaagtaattggcatgacatctgagcacagaaattaaggcaaaaaaccaaagcaaaacaaatacatggtgctgaaattaacttgatgccaagcccaaggcagctgatttctgtgtatttgaacttagggcaaatcagagtctacacagacgcctacagaaagtttcaggaagaggcaagatgcattcaatttgaaagatatttatgggcaacaaagtaaggtcaggattagacttcaggcattcataaggcaggcactatcagaaagtgtacgccaactaagggacccacaaagcaggcagaggtaatgcagaaatctgttttgttcccatgaaatcaccaatcaaggcctccgttcttctaaagattagtccatcatcattagcaactgagatcaaagcactcttccactttacgtgattaaaatcaaacctgtatcagcaagttaaatggttccatttctgtgatttttctattatttgaggggagttggcagaagttccatgtatatgggatctttacaggtcagatcttgttacaggaaatttcaaaggtttgggagtggggagggaaaaaagctcagtcagtgaggatcattttatcacattagactggggcagaactctgccaggatttaggaatattttcagaacagattttagatattatttctatccatatattgaaaagaataccattgtcaatcttatttttttaaaagtactcagtgtagaaatcgctagcccttaattcttttccagcttttcatattaatgtatgcagagtctcaccaagctcaaagacactggttgggggtggagggtgccacagggaaagctgtagaaggcaagaagactcgagaatcccccagagttatttttctccataaagaccatcagagtgcttaactgagctgttggagactgtgaggcatttaggaaaaaaatagcccactcacatcattccttgtaagtcttaagttcattttcattttacgtggaggaaaaaaatttaaaaagctattagtatttattaatgaattttactgagacatttcttagaaatatgcacttctatactagcaagctctgtctctaaaatgcaagttggccttttgcttgccacatttctgcattaaacttctatattagcttcaaaggcttttaaactcaatgcgaacattctacgggatgttcttagatgcctttaaaaagggggcagatctaattttatttgaaccctcactttccaacttcaccatgacccagtactagagattagggcacttcaaagcattgaaaaaaatctactgatacttactttcttagacaagtagttcttagttaaccaccaatggaactgggttcattctgaatcctggaggagcttcctcgtgccacccagtgtttctgggccctctgtgtgagcagccaggtatgagctgttttagaagcagcgtgttgccttcatctctcccgtttcccaaaagaacaaaggataaaggtgacagtcacactcctgggttaaaaaaagcattccagaaccacttctctttatgggcacaacaaagaaacgaaggctgaagttcgcctacccaaaatgaaaagtaggctttacagtcaaaagtacttctgttgattgctaaataacttcattttcttgaaatagagcaactttgagtgaaatctgcaacatggataccatgtatataagatactgctgtacagaagagttaaggcttacagtgcaaatgaggcgtcagctttgggtgctaaaattaacaagtctaatattattaccatcaatcaggaagagaataataaatgtttaaacaaacacagcagtctgtataaaaataccgtgtatcatttactctttctgcagctctatacgataggcaggagaggcttatgtggcagcacaagccaggtggggattttgtaacgaagtgataaaacatttgtaagtaatccaagtaggtgtattaaggcaccaaaagtaacatggcacccaacacccaaaaataaaaatatgaaatatgagtgtgaactctgagtagagtatgaaacaccacagaaagtcttagaaatagctctggagtggctctcccaggacagtttccagttgctgaatagtcttttggcactgatgttctacttcttcacattcatctaaaaaaaaaaaaaaaaaaaatcaaaattaaaatctgagtcagtccgcctgcctcggttctcattagtttaattcttaatgccttgcactttccggcaatcattcaatcaaaagagtgaaatgaagcacattaacaaagcaggaggcgccacggaccgcctccctccacaccgctccttccgccttcattccttgcccacaggcttgcactggaagctgaataagaatccccaaaactcaaacttcctagggatgccacccctttagtagctcacacctcccccctccaagagctaagaaacaaaggagaatgtacttttgtagcttagataagcaatgaatcagtaaaggactgatctacttgctccaccacccctcccttaataataacatttactgttatttcctgggcctaagacttatgttccagaactgtcacagctccccatgtcacactcactagcttgtgatctttgtcaaataactgaaatcttttaagcctctagtttcttcctttgtaaaacagagataaaatgttgtggtttttaagtgagataatccaagtaaagcacctaacatggagtagtgaatgaacatcggttgctactaaaagtggacatcctaccgcatccttaatgccactaggcatttccatacaatctggggaccaaaacttcaatcatataaatgtatgaggttaattaaaaacactactgtaatctgcttgtatgatcacaaaccaccacaaaagaaaagatcgtgaagattacactgtaaacggactctcaaatgatcaggaggtggtcacttcgcaacttgctccctccacccaactcaaaacaggagctcgagcctgcctgtatttgagactggagctgcctgtatgaggactggatcaactgctagtcacgttatatccaaatctgcattatcattgggcacattttcacagaattttactgaattattccttaattgtttaatggttgggaatagtttgggaattaccttccatcaactctgctaagaaaggaatggattctggtagcaagacaatataattctcctttagtttttcagccagtgctaacacagtaatcaaagcagcaaatcgaacctgaaagggataaaagagcaaagaaataaaaagtagtgttactgtatttattatcttaagagctgtactgacttgagacaagctctaactttttaaacattagttcacacgcgtttattcacttcattatgttcattaagctttcatcttagaataccagtttcaccatttgggagctgtttgtaatatgtgcaaccttataaatagtgttttccaaactgtgtcccaggactgcaaatctttaatgtgaaatgtctttttataatctcttcctttaaaaaaaaccaataaaataaaatgccacatgcaaactcaaaaacacaacacacaaacacacatcactctccaatacacacatacattctacccactcccccaaccacatgatgggcaggacaggtggctgtagagagaagcttataccgcacaaccatagagcagacgagccgacacaaggcgataagggagcaagaaggaatcgatcagagcaagacagaccaccgctgcgcacgcgcagtggcgcaggtgcgctacaacacagaagatg

SEQ ID NO: 352055 - DNA, 5965 bp, Homo sapiens
catatagtttctatgaaaaattattaatttatggtggaggataaaggactcagatgaacagggatatcagactctcttctcaacccgtgtagcccttcacaacaccataccattccgtcataaagcaccagctgcctggaggtcacaccagagtggagcaggaacatcccaggctccggccaggctcagctcagcacaaccaagacttcagattataaactataattcttccccttctaacattgttgtgttttgtttcttttccaataggttccaaagtctggcacgccccagcttgtgagtatttttgcctgggttatttcatgtggaatattttataaagttgcatagaaaatgaacagtttaaaccgtggagggcagcttcattcattccattccttactgtagaactgtttccctacagcctagtaatagaggaggagacatttctaaaatcgcacccagaactgtctacaccaagagcaaagattcgactgtcaatcacactttgacttgcaccaaaataccacctatgaactatgtgtcaaaggtttgaagagccccaaattttcttaactctgtataaaaattaagttgtaatgagctgttacgagtaacctgtatccacaatagaagcccaaagcagccccctctgcatttgtgtgccgtccctggatggattcgagagtcaaccaggcctgcctctgagccattcctgtgtatttcctcagcacctccctgcttggctgcttccccttcaggcagaacacagtactgcctcagaccccagggcacagggggccttcctggcgtgtttcactcatacagagggcatcgggtcccaccctgtcactcatttcatcgtctaaaatgtaatcatgagtgtttgcttcgagccagggacagtgctgctgcaggggacccagctgggaccaaggcagactgtctctcccctcctgggatttacagggtcatggctctgaaacattctgtagtgttctttggacacgagttttccctggagatcgctttctgcaggcctcttggtcctgactgtggcttcttttcagagcctgccattcgctgcaaggttgaacacccccatgggccctggacgaactgtcgtcgttaaaggagaagtgaatgcaaatgccaaaagctttaatgttgacctactagcaggaaaatcaaaggatattgctctacacttgaacccacgcctgaatattaaagcatttgtaagaaattcttttcttcaggagtcctggggagaagaagagagaaatattacctctttcccatttagtcctgggatgtactttgagatgataatttactgtgatgttagagaattcaaggttgcagtaaatggcgtacacagcctggagtacaaacacagatttaaagagctcagcagtattgacacgctggaaattaatggagacatccacttactggaagtaaggagctggtagcctacctacacagctgctacaaaaaccaaaatacagaatggcttctgtgatactggccttgctgaaacgcatctcactgtcattctattgtttatattgttaaaatgagcttgtgcaccattaggtcctgctgggtgttctcagtccttgccatgaagtatggtggtgtctagcactgaatggggaaactgggggcagcaacacttatagccagttaaagccactctgccctctctcctactttggctgactcttcaagaatgccattcaacaagtatttatggagtacctactataatacagtagctaacatgtattgagcacagattttttttggtaaaactgtgaggagctaggatatatacttggtgaaacaaaccagtatgttccctgttctcttgagcttcgactcttctgtgcgctactgctgcgcactgctttttctacaggcattacatcaactcctaaggggtcctctgggattagttaagcagctattaaatcacccgaagacactaatttacagaagacacaactccttccccagtgatcactgtcataaccagtgctctaccgtatcccatcactgaggactgatgttgactgacatcattttatcgtaataaacatgtggctctattagctgcaagctttaccaagtaattggcatgacatctgagcacagaaattaaggcaaaaaaccaaagcaaaacaaatacatggtgctgaaattaacttgatgccaagcccaaggcagctgatttctgtgtatttgaacttagggcaaatcagagtctacacagacgcctacagaaagtttcaggaagaggcaagatgcattcaatttgaaagatatttatgggcaacaaagtaaggtcaggattagacttcaggcattcataaggcaggcactatcagaaagtgtacgccaactaagggacccacaaagcaggcagaggtaatgcagaaatctgttttgttcccatgaaatcaccaatcaaggcctccgttcttctaaagattagtccatcatcattagcaactgagatcaaagcactcttccactttacgtgattaaaatcaaacctgtatcagcaagttaaatggttccatttctgtgatttttctattatttgaggggagttggcagaagttccatgtatatgggatctttacaggtcagatcttgttacaggaaatttcaaaggtttgggagtggggagggaaaaaagctcagtcagtgaggatcattttatcacattagactggggcagaactctgccaggatttaggaatattttcagaacagattttagatattatttctatccatatattgaaaagaataccattgtcaatcttatttttttaaaagtactcagtgtagaaatcgctagcccttaattcttttccagcttttcatattaatgtatgcagagtctcaccaagctcaaagacactggttgggggtggagggtgccacagggaaagctgtagaaggcaagaagactcgagaatcccccagagttatttttctccataaagaccatcagagtgcttaactgagctgttggagactgtgaggcatttaggaaaaaaatagcccactcacatcattccttgtaagtcttaagttcattttcattttacgtggaggaaaaaaatttaaaaagctattagtatttattaatgaattttactgagacatttcttagaaatatgcacttctatactagcaagctctgtctctaaaatgcaagttggccttttgcttgccacatttctgcattaaacttctatattagcttcaaaggcttttaaactcaatgcgaacattctacgggatgttcttagatgcctttaaaaagggggcagatctaattttatttgaaccctcactttccaacttcaccatgacccagtactagagattagggcacttcaaagcattgaaaaaaatctactgatacttactttcttagacaagtagttcttagttaaccaccaatggaactgggttcattctgaatcctggaggagcttcctcgtgccacccagtgtttctgggccctctgtgtgagcagccaggtatgagctgttttagaagcagcgtgttgccttcatctctcccgtttcccaaaagaacaaaggataaaggtgacagtcacactcctgggttaaaaaaagcattccagaaccacttctctttatgggcacaacaaagaaacgaaggctgaagttcgcctacccaaaatgaaaagtaggctttacagtcaaaagtacttctgttgattgctaaataacttcattttcttgaaatagagcaactttgagtgaaatctgcaacatggataccatgtatataagatactgctgtacagaagagttaaggcttacagtgcaaatgaggcgtcagctttgggtgctaaaattaacaagtctaatattattaccatcaatcaggaagagaataataaatgtttaaacaaacacagcagtctgtataaaaataccgtgtatcatttactctttctgcagctctatacgataggcaggagaggcttatgtggcagcacaagccaggtggggattttgtaacgaagtgataaaacatttgtaagtaatccaagtaggtgtattaaggcaccaaaagtaacatggcacccaacacccaaaaataaaaatatgaaatatgagtgtgaactctgagtagagtatgaaacaccacagaaagtcttagaaatagctctggagtggctctcccaggacagtttccagttgctgaatagtcttttggcactgatgttctacttcttcacattcatctaaaaaaaaaaaaaaaaaaaatcaaaattaaaatctgagtcagtccgcctgcctcggttctcattagtttaattcttaatgccttgcactttccggcaatcattcaatcaaaagagtgaaatgaagcacattaacaaagcaggaggcgccacggaccgcctccctccacaccgctccttccgccttcattccttgcccacaggcttgcactggaagctgaataagaatccccaaaactcaaacttcctagggatgccacccctttagtagctcacacctcccccctccaagagctaagaaacaaaggagaatgtacttttgtagcttagataagcaatgaatcagtaaaggactgatctacttgctccaccacccctcccttaataataacatttactgttatttcctgggcctaagacttatgttccagaactgtcacagctccccatgtcacactcactagcttgtgatctttgtcaaataactgaaatcttttaagcctctagtttcttcctttgtaaaacagagataaaatgttgtggtttttaagtgagataatccaagtaaagcacctaacatggagtagtgaatgaacatcggttgctactaaaagtggacatcctaccgcatccttaatgccactaggcatttccatacaatctggggaccaaaacttcaatcatataaatgtatgaggttaattaaaaacactactgtaatctgcttgtatgatcacaaaccaccacaaaagaaaagatcgtgaagattacactgtaaacggactctcaaatgatcaggaggtggtcacttcgcaacttgctccctccacccaactcaaaacaggagctcgagcctgcctgtatttgagactggagctgcctgtatgaggactggatcaactgctagtcacgttatatccaaatctgcattatcattgggcacattttcacagaattttactgaattattccttaattgtttaatggttgggaatagtttgggaattaccttccatcaactctgctaagaaaggaatggattctggtagcaagacaatataattctcctttagtttttcagccagtgctaacacagtaatcaaagcagcaaatcgaacctgaaagggataaaagagcaaagaaataaaaagtagtgttactgtatttattatcttaagagctgtactgacttgagacaagctctaactttttaaacattagttcacacgcgtttattcacttcattatgttcattaagctttcatcttagaataccagtttcaccatttgggagctgtttgtaatatgtgcaaccttataaatagtgttttccaaactgtgtcccaggactgcaaatctttaatgtgaaatgtctttttataatctcttcctttaaaaaaaaccaataaaataaaatgccacatgcaaactcaaaaacacaacacacaaacacacatcactctccaatacacacatacattctacccactcccccaaccacatgatgggcaggacaggtggctgtagagagaagcttataccgcacaaccatagagcagacgagccgacacaaggcgataagggagcaagaaggaatcgatcagagcaagacagaccaccgctgcgcacgcgcagtggcgcaggtgcgctacaacacagaagatg

SEQ ID NO: 352056 - DNA, 4617 bp, Homo sapiens
  misc_feature (77)..(77): n is a, c, g, or t
cccagcactgatttcggtattgaactagggcaaatcagagtcaacacagacgcctacagaaagtttcaggaagaggnaagatgcattcaattggaaagatatttatgggcaacaaagtaaggtcaggattagacttcaggcattcataaggcaggcactatcagaaagtgtacgccaactaagggacccacaaagcaggcagaggtaatgcagaaatctgttttgttcccatgaaatcaccaatcaaggcctccgttcttctaaagatcagtccttgccatgaagtatggtggtgtctagcactgaatggggaaactgggggcagcaacacttatagccagttaaagccactctgccctctctcctactttggctgactcttcaagaatgccattcaacaagtatttatggagtacctactataatacagtagctaacatgtattgagcacagattttttttggtaaaactgtgaggagctaggatatatacttggtgaaacaaaccagtatgttccctgttctcttgagcttcgactcttctgtgcgctactgctgcgcactgctttttctacaggcattacatcaactcctaaggggtcctctgggattagttaagcagctattaaatcacccgaagacactaatttacagaagacacaactccttccccagtgatcactgtcataaccagtgctctaccgtatcccatcactgaggactgatgttgactgacatcattttatcgtaataaacatgtggctctattagctgcaagctttaccaagtaattggcatgacatctgagcacagaaattaaggcaaaaaaccaaagcaaaacaaatacatggtgctgaaattaacttgatgccaagcccaaggcagctgatttctgtgtatttgaacttagggcaaatcagagtctacacagacgcctacagaaagtttcaggaagaggcaagatgcattcaatttgaaagatatttatgggcaacaaagtaaggtcaggattagacttcaggcattcataaggcaggcactatcagaaagtgtacgccaactaagggacccacaaagcaggcagaggtaatgcagaaatctgttttgttcccatgaaatcaccaatcaaggcctccgttcttctaaagattagtccatcatcattagcaactgagatcaaagcactcttccactttacgtgattaaaatcaaacctgtatcagcaagttaaatggttccatttctgtgatttttctattatttgaggggagttggcagaagttccatgtatatgggatctttacaggtcagatcttgttacaggaaatttcaaaggtttgggagtggggagggaaaaaagctcagtcagtgaggatcattttatcacattagactggggcagaactctgccaggatttaggaatattttcagaacagattttagatattatttctatccatatattgaaaagaataccattgtcaatcttatttttttaaaagtactcagtgtagaaatcgctagcccttaattcttttccagcttttcatattaatgtatgcagagtctcaccaagctcaaagacactggttgggggtggagggtgccacagggaaagctgtagaaggcaagaagactcgagaatcccccagagttatttttctccataaagaccatcagagtgcttaactgagctgttggagactgtgaggcatttaggaaaaaaatagcccactcacatcattccttgtaagtcttaagttcattttcattttacgtggaggaaaaaaatttaaaaagctattagtatttattaatgaattttactgagacatttcttagaaatatgcacttctatactagcaagctctgtctctaaaatgcaagttggccttttgcttgccacatttctgcattaaacttctatattagcttcaaaggcttttaaactcaatgcgaacattctacgggatgttcttagatgcctttaaaaagggggcagatctaattttatttgaaccctcactttccaacttcaccatgacccagtactagagattagggcacttcaaagcattgaaaaaaatctactgatacttactttcttagacaagtagttcttagttaaccaccaatggaactgggttcattctgaatcctggaggagcttcctcgtgccacccagtgtttctgggccctctgtgtgagcagccaggtatgagctgttttagaagcagcgtgttgccttcatctctcccgtttcccaaaagaacaaaggataaaggtgacagtcacactcctgggttaaaaaaagcattccagaaccacttctctttatgggcacaacaaagaaacgaaggctgaagttcgcctacccaaaatgaaaagtaggctttacagtcaaaagtacttctgttgattgctaaataacttcattttcttgaaatagagcaactttgagtgaaatctgcaacatggataccatgtatataagatactgctgtacagaagagttaaggcttacagtgcaaatgaggcgtcagctttgggtgctaaaattaacaagtctaatattattaccatcaatcaggaagagaataataaatgtttaaacaaacacagcagtctgtataaaaataccgtgtatcatttactctttctgcagctctatacgataggcaggagaggcttatgtggcagcacaagccaggtggggattttgtaacgaagtgataaaacatttgtaagtaatccaagtaggtgtattaaggcaccaaaagtaacatggcacccaacacccaaaaataaaaatatgaaatatgagtgtgaactctgagtagagtatgaaacaccacagaaagtcttagaaatagctctggagtggctctcccaggacagtttccagttgctgaatagtcttttggcactgatgttctacttcttcacattcatctaaaaaaaaaaaaaaaaaaaatcaaaattaaaatctgagtcagtccgcctgcctcggttctcattagtttaattcttaatgccttgcactttccggcaatcattcaatcaaaagagtgaaatgaagcacattaacaaagcaggaggcgccacggaccgcctccctccacaccgctccttccgccttcattccttgcccacaggcttgcactggaagctgaataagaatccccaaaactcaaacttcctagggatgccacccctttagtagctcacacctcccccctccaagagctaagaaacaaaggagaatgtacttttgtagcttagataagcaatgaatcagtaaaggactgatctacttgctccaccacccctcccttaataataacatttactgttatttcctgggcctaagacttatgttccagaactgtcacagctccccatgtcacactcactagcttgtgatctttgtcaaataactgaaatcttttaagcctctagtttcttcctttgtaaaacagagataaaatgttgtggtttttaagtgagataatccaagtaaagcacctaacatggagtagtgaatgaacatcggttgctactaaaagtggacatcctaccgcatccttaatgccactaggcatttccatacaatctggggaccaaaacttcaatcatataaatgtatgaggttaattaaaaacactactgtaatctgcttgtatgatcacaaaccaccacaaaagaaaagatcgtgaagattacactgtaaacggactctcaaatgatcaggaggtggtcacttcgcaacttgctccctccacccaactcaaaacaggagctcgagcctgcctgtatttgagactggagctgcctgtatgaggactggatcaactgctagtcacgttatatccaaatctgcattatcattgggcacattttcacagaattttactgaattattccttaattgtttaatggttgggaatagtttgggaattaccttccatcaactctgctaagaaaggaatggattctggtagcaagacaatataattctcctttagtttttcagccagtgctaacacagtaatcaaagcagcaaatcgaacctgaaagggataaaagagcaaagaaataaaaagtagtgttactgtatttattatcttaagagctgtactgacttgagacaagctctaactttttaaacattagttcacacgcgtttattcacttcattatgttcattaagctttcatcttagaataccagtttcaccatttgggagctgtttgtaatatgtgcaaccttataaatagtgttttccaaactgtgtcccaggactgcaaatctttaatgtgaaatgtctttttataatctcttcctttaaaaaaaaccaataaaataaaatgccacatgcaaactcaaaaacacaacacacaaacacacatcactctccaatacacacatacattctacccactcccccaaccacatgatgggcaggacaggtggctgtagagagaagcttataccgcacaaccatagagcagacgagccgacacaaggcgataagggagcaagaaggaatcgatcagagcaagacagaccaccgctgcgcacgcgcagtggcgcaggtgcgctacaacacagaagatg

SEQ ID NO: 352057 - DNA, 3622 bp, Homo sapiens
attttgtctttacattttacataatttcagatacattttcctcatatcaaataattcagcattttttagtactaacatcatagtctgtaagccattcaaaaaatgtatttcacaaaataggctatctcatcctttgagctattgagatgaattaatttatactcctcctaagatccctctcgtcactaagattcttttattttatgacaaaaccatagttctagaagcttgtttctcccacctgaaaagactggatttgggacatgatcctgtagaacttcggagccgcccacggacgccagagccgggaaccctgacggcacttagctgctgacaaacaacctgctccgtggagcgcctgaaacaccagtctttggggccagtgcctcagtttcaatccaggtaacctttaaatgaaacttgcctaaaatcttaggtcatacacagaagagactccaatcgacaagaagctggaaaagaatgatgttgtccttaaacaacctacagaatatcatctataacccggtaatcccgtatgttggcaccattcccgatcagctggatcctggaactttgattgtgatatgtgggcatgttcctagtgacgcagacaggtaaaatcactgtgctaaaggaaggagcatgaataggctgtctttttgtgattgtggaatgataacagagtaaggcgggagagaccatttgatactttgaggcccaattagctttcatcagcagccctggccaaggtgctgaggagattggaatgaatgactaaataaaggttattgggatttatttcattgctgtaagtctgatttcagtataaaaaattagaactatcagctggatgtggtgacttacacatacttttccagcactttgggaggccaaggcaggaggattgtttgaggccaggagtttgagaccagcctgggcaacatagtgagaccccccatctgtaaaaaaaaaaaaaatttaaaaattaactggcttggtggtgtgcgcctgtagttgtagctactcagggggctgaggtaggaggattccttgagcccaggagtttgaggttgcagtgagctgtgatcgagccactgcactatagctttcttagacaagtagttcttagttaaccaccaatggaactgggttcattctgaatcctggaggagcttcctcgtgccacccagtgtttctgggccctctgtgtgagcagccaggtatgagctgttttagaagcagcgtgttgccttcatctctcccgtttcccaaaagaacaaaggataaaggtgacagtcacactcctgggttaaaaaaagcattccagaaccacttctctttatgggcacaacaaagaaacgaaggctgaagttcgcctacccaaaatgaaaagtaggctttacagtcaaaagtacttctgttgattgctaaataacttcattttcttgaaatagagcaactttgagtgaaatctgcaacatggataccatgtatataagatactgctgtacagaagagttaaggcttacagtgcaaatgaggcgtcagctttgggtgctaaaattaacaagtctaatattattaccatcaatcaggaagagaataataaatgtttaaacaaacacagcagtctgtataaaaataccgtgtatcatttactctttctgcagctctatacgataggcaggagaggcttatgtggcagcacaagccaggtggggattttgtaacgaagtgataaaacatttgtaagtaatccaagtaggtgtattaaggcaccaaaagtaacatggcacccaacacccaaaaataaaaatatgaaatatgagtgtgaactctgagtagagtatgaaacaccacagaaagtcttagaaatagctctggagtggctctcccaggacagtttccagttgctgaatagtcttttggcactgatgttctacttcttcacattcatctaaaaaaaaaaaaaaaaaaaatcaaaattaaaatctgagtcagtccgcctgcctcggttctcattagtttaattcttaatgccttgcactttccggcaatcattcaatcaaaagagtgaaatgaagcacattaacaaagcaggaggcgccacggaccgcctccctccacaccgctccttccgccttcattccttgcccacaggcttgcactggaagctgaataagaatccccaaaactcaaacttcctagggatgccacccctttagtagctcacacctcccccctccaagagctaagaaacaaaggagaatgtacttttgtagcttagataagcaatgaatcagtaaaggactgatctacttgctccaccacccctcccttaataataacatttactgttatttcctgggcctaagacttatgttccagaactgtcacagctccccatgtcacactcactagcttgtgatctttgtcaaataactgaaatcttttaagcctctagtttcttcctttgtaaaacagagataaaatgttgtggtttttaagtgagataatccaagtaaagcacctaacatggagtagtgaatgaacatcggttgctactaaaagtggacatcctaccgcatccttaatgccactaggcatttccatacaatctggggaccaaaacttcaatcatataaatgtatgaggttaattaaaaacactactgtaatctgcttgtatgatcacaaaccaccacaaaagaaaagatcgtgaagattacactgtaaacggactctcaaatgatcaggaggtggtcacttcgcaacttgctccctccacccaactcaaaacaggagctcgagcctgcctgtatttgagactggagctgcctgtatgaggactggatcaactgctagtcacgttatatccaaatctgcattatcattgggcacattttcacagaattttactgaattattccttaattgtttaatggttgggaatagtttgggaattaccttccatcaactctgctaagaaaggaatggattctggtagcaagacaatataattctcctttagtttttcagccagtgctaacacagtaatcaaagcagcaaatcgaacctgaaagggataaaagagcaaagaaataaaaagtagtgttactgtatttattatcttaagagctgtactgacttgagacaagctctaactttttaaacattagttcacacgcgtttattcacttcattatgttcattaagctttcatcttagaataccagtttcaccatttgggagctgtttgtaatatgtgcaaccttataaatagtgttttccaaactgtgtcccaggactgcaaatctttaatgtgaaatgtctttttataatctcttcctttaaaaaaaaccaataaaataaaatgccacatgcaaactcaaaaacacaacacacaaacacacatcactctccaatacacacatacattctacccactcccccaaccacatgatgggcaggacaggtggctgtagagagaagcttataccgcacaaccatagagcagacgagccgacacaaggcgataagggagcaagaaggaatcgatcagagcaagacagaccaccgctgcgcacgcgcagtggcgcaggtgcgctacaacacagaagatg

SEQ ID NO: 352058 - DNA, 3315 bp, Homo sapiens
tgctgggattacaggcgtgagccaccgcgcccggccgcagttcctttttctagctgtttgaataggaaagatgacttggaaaatgctggattctgagcagatttatgtgcagccttaaaaagtgtagtttttctctatcaataatgagtgtgggttgtaattgcttagtaagtaattttgtttatgtaaacgtacatttgttaaattttttttcttaggtaatcccgtatgttggcaccattcccgatcagctggatcctggaactttgattgtgatatgtgggcatgttcctagtgacgcagacaggtaaaatcactgtgctaaaggaaggagcatgaataggctgtctttttgtgattgtggaatgataacagagtaaggcgggagagaccatttgatactttgaggcccaattagctttcatcagcagccctggccaaggtgctgaggagattggaatgaatgactaaataaaggttattgggatttatttcattgctgtaagtctgatttcagtataaaaaattagaactatcagctggatgtggtgacttacacatacttttccagcactttgggaggccaaggcaggaggattgtttgaggccaggagtttgagaccagcctgggcaacatagtgagaccccccatctgtaaaaaaaaaaaaaatttaaaaattaactggcttggtggtgtgcgcctgtagttgtagctactcagggggctgaggtaggaggattccttgagcccaggagtttgaggttgcagtgagctgtgatcgagccactgcactatagctttcttagacaagtagttcttagttaaccaccaatggaactgggttcattctgaatcctggaggagcttcctcgtgccacccagtgtttctgggccctctgtgtgagcagccaggtatgagctgttttagaagcagcgtgttgccttcatctctcccgtttcccaaaagaacaaaggataaaggtgacagtcacactcctgggttaaaaaaagcattccagaaccacttctctttatgggcacaacaaagaaacgaaggctgaagttcgcctacccaaaatgaaaagtaggctttacagtcaaaagtacttctgttgattgctaaataacttcattttcttgaaatagagcaactttgagtgaaatctgcaacatggataccatgtatataagatactgctgtacagaagagttaaggcttacagtgcaaatgaggcgtcagctttgggtgctaaaattaacaagtctaatattattaccatcaatcaggaagagaataataaatgtttaaacaaacacagcagtctgtataaaaataccgtgtatcatttactctttctgcagctctatacgataggcaggagaggcttatgtggcagcacaagccaggtggggattttgtaacgaagtgataaaacatttgtaagtaatccaagtaggtgtattaaggcaccaaaagtaacatggcacccaacacccaaaaataaaaatatgaaatatgagtgtgaactctgagtagagtatgaaacaccacagaaagtcttagaaatagctctggagtggctctcccaggacagtttccagttgctgaatagtcttttggcactgatgttctacttcttcacattcatctaaaaaaaaaaaaaaaaaaaatcaaaattaaaatctgagtcagtccgcctgcctcggttctcattagtttaattcttaatgccttgcactttccggcaatcattcaatcaaaagagtgaaatgaagcacattaacaaagcaggaggcgccacggaccgcctccctccacaccgctccttccgccttcattccttgcccacaggcttgcactggaagctgaataagaatccccaaaactcaaacttcctagggatgccacccctttagtagctcacacctcccccctccaagagctaagaaacaaaggagaatgtacttttgtagcttagataagcaatgaatcagtaaaggactgatctacttgctccaccacccctcccttaataataacatttactgttatttcctgggcctaagacttatgttccagaactgtcacagctccccatgtcacactcactagcttgtgatctttgtcaaataactgaaatcttttaagcctctagtttcttcctttgtaaaacagagataaaatgttgtggtttttaagtgagataatccaagtaaagcacctaacatggagtagtgaatgaacatcggttgctactaaaagtggacatcctaccgcatccttaatgccactaggcatttccatacaatctggggaccaaaacttcaatcatataaatgtatgaggttaattaaaaacactactgtaatctgcttgtatgatcacaaaccaccacaaaagaaaagatcgtgaagattacactgtaaacggactctcaaatgatcaggaggtggtcacttcgcaacttgctccctccacccaactcaaaacaggagctcgagcctgcctgtatttgagactggagctgcctgtatgaggactggatcaactgctagtcacgttatatccaaatctgcattatcattgggcacattttcacagaattttactgaattattccttaattgtttaatggttgggaatagtttgggaattaccttccatcaactctgctaagaaaggaatggattctggtagcaagacaatataattctcctttagtttttcagccagtgctaacacagtaatcaaagcagcaaatcgaacctgaaagggataaaagagcaaagaaataaaaagtagtgttactgtatttattatcttaagagctgtactgacttgagacaagctctaactttttaaacattagttcacacgcgtttattcacttcattatgttcattaagctttcatcttagaataccagtttcaccatttgggagctgtttgtaatatgtgcaaccttataaatagtgttttccaaactgtgtcccaggactgcaaatctttaatgtgaaatgtctttttataatctcttcctttaaaaaaaaccaataaaataaaatgccacatgcaaactcaaaaacacaacacacaaacacacatcactctccaatacacacatacattctacccactcccccaaccacatgatgggcaggacaggtggctgtagagagaagcttataccgcacaaccatagagcagacgagccgacacaaggcgataagggagcaagaaggaatcgatcagagcaagacagaccaccgctgcgcacgcgcagtggcgcaggtgcgctacaacacagaagatg

SEQ ID NO: 352059 - DNA, 2213 bp, Homo sapiens
  misc_feature (26)..(26): n is a, c, g, or t
tgtacaaaaaaaagcaaggctgggtnccggccgcggaatcgcgccgggatctttgagtgaaatctgcaacatggataccatgtatataagatactgctgtacagaagagttaaggcttacagtgcaaatgaggcgtcagctttgggtgctaaaattaacaagtctaatattattaccatcaatcaggaagagaataataaatgtttaaacaaacacagcagtctgtataaaaataccgtgtatcatttactctttctgcagctctatacgataggcaggagaggcttatgtggcagcacaagccaggtggggattttgtaacgaagtgataaaacatttgtaagtaatccaagtaggtgtattaaggcaccaaaagtaacatggcacccaacacccaaaaataaaaatatgaaatatgagtgtgaactctgagtagagtatgaaacaccacagaaagtcttagaaatagctctggagtggctctcccaggacagtttccagttgctgaatagtcttttggcactgatgttctacttcttcacattcatctaaaaaaaaaaaaaaaaaaaatcaaaattaaaatctgagtcagtccgcctgcctcggttctcattagtttaattcttaatgccttgcactttccggcaatcattcaatcaaaagagtgaaatgaagcacattaacaaagcaggaggcgccacggaccgcctccctccacaccgctccttccgccttcattccttgcccacaggcttgcactggaagctgaataagaatccccaaaactcaaacttcctagggatgccacccctttagtagctcacacctcccccctccaagagctaagaaacaaaggagaatgtacttttgtagcttagataagcaatgaatcagtaaaggactgatctacttgctccaccacccctcccttaataataacatttactgttatttcctgggcctaagacttatgttccagaactgtcacagctccccatgtcacactcactagcttgtgatctttgtcaaataactgaaatcttttaagcctctagtttcttcctttgtaaaacagagataaaatgttgtggtttttaagtgagataatccaagtaaagcacctaacatggagtagtgaatgaacatcggttgctactaaaagtggacatcctaccgcatccttaatgccactaggcatttccatacaatctggggaccaaaacttcaatcatataaatgtatgaggttaattaaaaacactactgtaatctgcttgtatgatcacaaaccaccacaaaagaaaagatcgtgaagattacactgtaaacggactctcaaatgatcaggaggtggtcacttcgcaacttgctccctccacccaactcaaaacaggagctcgagcctgcctgtatttgagactggagctgcctgtatgaggactggatcaactgctagtcacgttatatccaaatctgcattatcattgggcacattttcacagaattttactgaattattccttaattgtttaatggttgggaatagtttgggaattaccttccatcaactctgctaagaaaggaatggattctggtagcaagacaatataattctcctttagtttttcagccagtgctaacacagtaatcaaagcagcaaatcgaacctgaaagggataaaagagcaaagaaataaaaagtagtgttactgtatttattatcttaagagctgtactgacttgagacaagctctaactttttaaacattagttcacacgcgtttattcacttcattatgttcattaagctttcatcttagaataccagtttcaccatttgggagctgtttgtaatatgtgcaaccttataaatagtgttttccaaactgtgtcccaggactgcaaatctttaatgtgaaatgtctttttataatctcttcctttaaaaaaaaccaataaaataaaatgccacatgcaaactcaaaaacacaacacacaaacacacatcactctccaatacacacatacattctacccactcccccaaccacatgatgggcaggacaggtggctgtagagagaagcttataccgcacaaccatagagcagacgagccgacacaaggcgataagggagcaagaaggaatcgatcagagcaagacagaccaccgctgcgcacgcgcagtggcgcaggtgcgctacaacacagaagatg

SEQ ID NO: 352060 - DNA, 1320 bp, Homo sapiens
agaggattcaaagcggtagaacttcggagattggggaagataatcggaagaggtagaagacaccgtccatgacacttcctggggaagcagatgtatgtataaggatccgcccacggacgccagagccgggaaccctgacggcacttagctgctgacaaacaacctgctccgtggagcgcctgaaacaccagtctttggggccagtgcctcagtttcaatccaggtaacctttaaatgaaacttgcctaaaatcttaggtcatacacagaagagactccaatcgacaagaagctggaaaagaatgatgttgtccttaaacaacctacagaatatcatctataacccggtaatcccgtatgttggcaccattcccgatcagctggatcctggaactttgattgtgatatgtgggcatgttcctagtgacgcagacagattccaggtggatctgcagaatggcagcagtgtgaaacctcgagccgatgtggcctttcatttcaatcctcgtttcaaaagggccggctgcattgtttgcaatactttgataaatgaaaaatggggacgggaagagatcacctatgacacgcctttcaaaagagaaaagtcttttgagatcgtgattatggtgctaaaggacaaattccaggtggctgtaaatggaaaacatactctgctctatggccacaggatcggcccagagaaaatagacactctgggcatttatggcaaagtgaatattcactcaattggttttagcttcagctcggacttacaaagtacccaagcatctagtctggaactgacagagataagtagagaaaatgttccaaagtctggcacgccccagcttagcctgccattcgctgcaaggttgaacacccccatgggccctggacgaactgtcgtcgttaaaggagaagtgaatgcaaatgccaaaagctttaatgttgacctactagcaggaaaatcaaaggatattgctctacacttgaacccacgcctgaatattaaagcatttgtaagaaattcttttcttcaggagtcctggggagaagaagagagaaatattacctctttcccatttagtcctgggatgtactttgagatgataatttactgtgatgttagagaattcaaggttgcagtaaatggcgtacacagcctggagtacaaacacagatttaaagagctcagcagtattgacacgctggaaattaatggagacatccacttactggaagtaaggagctggtagcctacctacacagctgctacaaaaaccaaaatacagaatggcttctgtgatactggccttgctga

SEQ ID NO: 352061 - DNA, 1743 bp, Homo sapiens
gaagttgagagaggagttaacgaaaccagtacgcaaactctcaacatactcatcaagttacacacagtaggtatgaataatagcagttcgtaccgtacaacctaaataaccattctcaattataacaatatatataatcctaactactaccgcatacctactactcaacttaaactccagcaccacggacccgactactatctcgcacattaacaaagcaggaggcgccacggaccgcctccctccacaccgctccttccgccttcattccttgcccacaggcttgcactggaagctgaataagaatccccaaaactcaaacttcctagggatgccacccctttagtagctcacacctcccccctccaagagctaagaaacaaaggagaatgtacttttgtagcttagataagcaatgaatcagtaaaggactgatctacttgctccaccacccctcccttaataataacatttactgttatttcctgggcctaagacttatgttccagaactgtcacagctccccatgtcacactcactagcttgtgatctttgtcaaataactgaaatcttttaagcctctagtttcttcctttgtaaaacagagataaaatgttgtggtttttaagtgagataatccaagtaaagcacctaacatggagtagtgaatgaacatcggttgctactaaaagtggacatcctaccgcatccttaatgccactaggcatttccatacaatctggggaccaaaacttcaatcatataaatgtatgaggttaattaaaaacactactgtaatctgcttgtatgatcacaaaccaccacaaaagaaaagatcgtgaagattacactgtaaacggactctcaaatgatcaggaggtggtcacttcgcaacttgctccctccacccaactcaaaacaggagctcgagcctgcctgtatttgagactggagctgcctgtatgaggactggatcaactgctagtcacgttatatccaaatctgcattatcattgggcacattttcacagaattttactgaattattccttaattgtttaatggttgggaatagtttgggaattaccttccatcaactctgctaagaaaggaatggattctggtagcaagacaatataattctcctttagtttttcagccagtgctaacacagtaatcaaagcagcaaatcgaacctgaaagggataaaagagcaaagaaataaaaagtagtgttactgtatttattatcttaagagctgtactgacttgagacaagctctaactttttaaacattagttcacacgcgtttattcacttcattatgttcattaagctttcatcttagaataccagtttcaccatttgggagctgtttgtaatatgtgcaaccttataaatagtgttttccaaactgtgtcccaggactgcaaatctttaatgtgaaatgtctttttataatctcttcctttaaaaaaaaccaataaaataaaatgccacatgcaaactcaaaaacacaacacacaaacacacatcactctccaatacacacatacattctacccactcccccaaccacatgatgggcaggacaggtggctgtagagagaagcttataccgcacaaccatagagcagacgagccgacacaaggcgataagggagcaagaaggaatcgatcagagcaagacagaccaccgctgcgcacgcgcagtggcgcaggtgcgctacaacacagaagatg

SEQ ID NO: 352062 - DNA, 1346 bp, Homo sapiens
agaggattcaaagcggtagaacttcggagattggggaagataatcggaagaggtagaagacaccgtccatgacacttcctggggaagcagatgtatgtataaggatccgcccacggacgccagagccgggaaccctgacggcacttagctgctgacaaacaacctgctccgtggagcgcctgaaacaccagtctttggggccagtgcctcagtttcaatccaggtaacctttaaatgaaacttgcctaaaatcttaggtcatacacagaagagactccaatcgacaagaagctggaaaagaatgatgttgtccttaaacaacctacagaatatcatctataacccggtaatcccgtatgttggcaccattcccgatcagctggatcctggaactttgattgtgatatgtgggcatgttcctagtgacgcagacagattccaggtggatctgcagaatggcagcagtgtgaaacctcgagccgatgtggcctttcatttcaatcctcgtttcaaaagggccggctgcattgtttgcaatactttgataaatgaaaaatggggacgggaagagatcacctatgacacgcctttcaaaagagaaaagtcttttgagatcgtgattatggtgctaaaggacaaattccaggtggctgtaaatggaaaacatactctgctctatggccacaggatcggcccagagaaaatagacactctgggcatttatggcaaagtgaatattcactcaattggttttagcttcagctcggacttacaaagtacccaagcatctagtctggaactgacagagataagtagagaaaataaatgtaaatattaaatcttttaatgagccactggtttaaaaatgttgttttagctgccatgttaatgaaatggcaagaaggctgggtttttgaaaattatgcttttagaacgcaagtaatcacttgaaaattgagatacatacttgtggtgccaggcacgcagtaagtttttgctgatgattcacctgtcagtttctgtaactgccactcactgttcttatgtaaaaagcactctctcactcttaactgctgaatagtactgttctggggtatttccaaatattgaacatcagccagtgcactggcaaatgaacttccatgtgtatcttcaacccctgggagaataactgcaatttaaaaatgcgctgttattaatggagaaagtgaggtcttaccgactggcacgttcacacctcacagacagaacagaatcttagcattctgggggcaccctggaaaggacaactaagacacgtttgaagttcatgtagtgctgggtgaaggtggtggctcaggcctgta

SEQ ID NO: 352063 - DNA, 1552 bp, Homo sapiens
aatatcagatattggcaaggatgtggagaaatgggaacacttatacagtgttggtgggaatgtaaagtaatacaacctttatagaaaacactatggagatttctgaaggaactaaaaatagaactaccattcaatccagcaatcccactactgggtatataaccaaaggaaaatgacacctgcacttgtatatttaaggcagcattattcacaataagaaagatatagaaccaacttaaatgtccatcaacagaggatgaaatacagaaaatacacacacacacacacacatatatatacacacacacacctatatataaacatacacctatatatatacacactcactagcttgtgatctttgtcaaataactgaaatcttttaagcctctagtttcttcctttgtaaaacagagataaaatgttgtggtttttaagtgagataatccaagtaaagcacctaacatggagtagtgaatgaacatcggttgctactaaaagtggacatcctaccgcatccttaatgccactaggcatttccatacaatctggggaccaaaacttcaatcatataaatgtatgaggttaattaaaaacactactgtaatctgcttgtatgatcacaaaccaccacaaaagaaaagatcgtgaagattacactgtaaacggactctcaaatgatcaggaggtggtcacttcgcaacttgctccctccacccaactcaaaacaggagctcgagcctgcctgtatttgagactggagctgcctgtatgaggactggatcaactgctagtcacgttatatccaaatctgcattatcattgggcacattttcacagaattttactgaattattccttaattgtttaatggttgggaatagtttgggaattaccttccatcaactctgctaagaaaggaatggattctggtagcaagacaatataattctcctttagtttttcagccagtgctaacacagtaatcaaagcagcaaatcgaacctgaaagggataaaagagcaaagaaataaaaagtagtgttactgtatttattatcttaagagctgtactgacttgagacaagctctaactttttaaacattagttcacacgcgtttattcacttcattatgttcattaagctttcatcttagaataccagtttcaccatttgggagctgtttgtaatatgtgcaaccttataaatagtgttttccaaactgtgtcccaggactgcaaatctttaatgtgaaatgtctttttataatctcttcctttaaaaaaaaccaataaaataaaatgccacatgcaaactcaaaaacacaacacacaaacacacatcactctccaatacacacatacattctacccactcccccaaccacatgatgggcaggacaggtggctgtagagagaagcttataccgcacaaccatagagcagacgagccgacacaaggcgataagggagcaagaaggaatcgatcagagcaagacagaccaccgctgcgcacgcgcagtggcgcaggtgcgctacaacacagaagatg

SEQ ID NO: 352064 - DNA, 1128 bp, Homo sapiens
attttgtctttacattttacataatttcagatacattttcctcatatcaaataattcagcattttttagtactaacatcatagtctgtaagccattcaaaaaatgtatttcacaaaataggctatctcatcctttgagctattgagatgaattaatttatactcctcctaagatccctctcgtcactaagattcttttattttatgacaaaaccatagttctagaagcttgtttctcccacctgaaaagactggatttgggacatgatcctgtagaacttcggagccgcccacggacgccagagccgggaaccctgacggcacttagctgctgacaaacaacctgctccgtggagcgcctgaaacaccagtctttggggccagtgcctcagtttcaatccaggtaacctttaaatgaaacttgcctaaaatcttaggtcatacacagaagagactccaatcgacaagaagctggaaaagaatgatgttgtccttaaacaacctacagaatatcatctataacccggtaactgatttctataagataactttttacctatgccaggacagatccaatagaatattaattatccattgggagacagggcaagaataaaagccagtgaacatatttaaagcacctactatgtaatagagatggtggtgggtgctgattacaaaacagctcttgtcctctagtggaggaagaagtcacaatgataatatgacgtgatgaaacagtgttatgaacagggaacgtctgggtagagtggagggaatgccaacttttggtgatgggaggaggctcagctaatcataaattgtagtttttaaaggaaaatggatttcttactctacaagtttttcattttcttttttaattagagctgtccatgagaagttaatgtctcgatctttccctcagcctttcaaatactgcttggcccttgagcagggaaaatgtcaaaagccaatggggagatggagagtgtgaagtagtaagggtctcgtgcagttcaggcaggtcctagaatccctgaatgactgtaattgctggaaattgccctgtaatcctgagcagtaaagagcttgttttagttttatgtggtggtgagaatctttaggaatg

SEQ ID NO: 352065 - DNA, 453 bp, Homo sapiens
cttggtcctgactgtggcttcttttcagagcctgccattcgctgcaaggttgaacacccccatgggccctggacgaactgtcgtcgttaaaggagaagtgaatgcaaatgccaaaaggtcagtatccttcggtaccagtcacagtgcagatacttccgtgcctgttaccgccttccacccgtgaacggtcctgtgagctggaagaagggctagcgtcagaatcttcatttccaaagtgagatgattcaagcaggaggtggttagattgtgaacagccagtgggcagcagagccgactaaggccgtgttctgacctcggctttttctggccagacaagagagtagcatttttgtccacgaggcctatccttgccttgtagaactccagagcagccccgtaagatcaggcaacatcttttcttttttttttttgagatggagcctcactgtgtca

SEQ ID NO: 352066 - DNA, 2827 bp, Homo sapiens
ccaagtggctgacatgactttgtttaactttatttgtatttctggctggtgtgtttacagccaataggtcaaactatcagtcagtgtagggccctgagaagtcgggtatttaagagcatctaataggcacagaattgtgctccatactgcttaaactgttccctaagtgtccaatttggagaaaacacccacacgcaggataaccggcgagtgacgcggagtggctgcgagtccaagttatcactaacggatggggagcttgggctgggcacagtccagcgtactgaacccttcccccaccgtttcacctgcatacagaggtgtgtactgtcaaaaagcagcgcctccaagtctcttctggcactgtctggacttggatccgaggcagacgaggaagctgagaaaaccctggcgttgaccccgtggacctgggcgccccgggaaggccagcgcttggtccaggcaggcggggcctgtgcggtgaccaccctggtcctgaaaagtcccagccccgagcgccctccctcctagacctggaggcctggaacagccagccgcccacggacgccagagccgggaaccctgacggcacttagctgctgacaaacaacctgctccgtggagcgcctgaaacaccagtctttggggccagtgcctcagtttcaatccaggtaacctttaaatgaaacttgcctaaaatcttaggtcatacacagaagagactccaatcgacaagaagctggaaaagaatgatgttgtccttaaacaacctacagaatatcatctataacccggtaatcccgtatgttggcaccattcccgatcagctggatcctggaactttgattgtgatatgtgggcatgttcctagtgacgcagacagattccaggtggatctgcagaatggcagcagtgtgaaacctcgagccgatgtggcctttcatttcaatcctcgtttcaaaagggccggctgcattgtttgcaatactttgataaatgaaaaatggggacgggaagagatcacctatgacacgcctttcaaaagagaaaagtcttttgagatcgtgattatggtgctaaaggacaaattccaggtggctgtaaatggaaaacatactctgctctatggccacaggatcggcccagagaaaatagacactctgggcatttatggcaaagtgaatattcactcaattggttttagcttcagctcggacttacaaagtacccaagcatctagtctggaactgacagagataagtagagaaaatgttccaaagtctggcacgccccagcttagcctgccattcgctgcaaggttgaacacccccatgggccctggacgaactgtcgtcgttaaaggagaagtgaatgcaaatgccaaaagctttaatgttgacctactagcaggaaaatcaaaggatattgctctacacttgaacccacgcctgaatattaaagcatttgtaagaaattcttttcttcaggagtcctggggagaagaagagagaaatattacctctttcccatttagtcctgggatgtactttgagatgataatttactgtgatgttagagaattcaaggttgcagtaaatggcgtacacagcctggagtacaaacacagatttaaagagctcagcagtattgacacgctggaaattaatggagacatccacttactggaagtaaggagctggtagcctacctacacagctgctacaaaaaccaaaatacagaatggcttctgtgatactggccttgctgaaacgcatctcactgtcattctattgtttatattgttaaaatgagcttgtgcaccattaggtcctgctgggtgttctcagtccttgccatgaagtatggtggtgtctagcactgaatggggaaactgggggcagcaacacttatagccagttaaagccactctgccctctctcctactttggctgactcttcaagaatgccattcaacaagtatttatggagtacctactataatacagtagctaacatgtattgagcacagattttttttggtaaaactgtgaggagctaggatatatacttggtgaaacaaaccagtatgttccctgttctcttgagcttcgactcttctgtgcgctactgctgcgcactgctttttctacaggcattacatcaactcctaaggggtcctctgggattagttaagcagctattaaatcacccgaagacactaatttacagaagacacaactccttccccagtgatcactgtcataaccagtgctctaccgtatcccatcactgaggactgatgttgactgacatcattttatcgtaataaacatgtggctctattagctgcaagctttaccaagtaattggcatgacatctgagcacagaaattaaggcaaaaaaccaaagcaaaacaaatacatggtgctgaaattaacttgatgccaagcccaaggcagctgatttctgtgtatttgaacttagggcaaatcagagtctacacagacgcctacagaaagtttcaggaagaggcaagatgcattcaatttgaaagatatttatgggcaacaaagtaaggtcaggattagacttcaggcattcataaggcaggcactatcagaaagtgtacgccaactaagggacccacaaagcaggcagaggtaatgcagaaatctgttttgttcccatgaaatcaccaatcaaggcctccgttcttctaaagattagtccatcatcattagcaactgagatcaaagcactcttccactttacgtgattaaaatcaaacctgtatcagcaagttaaatggttccatttctgtgattt

SEQ ID NO: 352067 - DNA, 3101 bp, Homo sapiens
ccaagtggctgacatgactttgtttaactttatttgtatttctggctggtgtgtttacagccaataggtcaaactatcagtcagtgtagggccctgagaagtcgggtatttaagagcatctaataggcacagaattgtgctccatactgcttaaactgttccctaagtgtccaatttggagaaaacacccacacgcaggataaccggcgagtgacgcggagtggctgcgagtccaagttatcactaacggatggggagcttgggctgggcacagtccagcgtactgaacccttcccccaccgtttcacctgcatacagaggtgtgtactgtcaaaaagcagcgcctccaagtctcttctggcactgtctggacttggatccgaggcagacgaggaagctgagaaaaccctggcgttgaccccgtggacctgggcgccccgggaaggccagcgcttggtccaggcaggcggggcctgtgcggtgaccaccctggtcctgaaaagtcccagccccgagcgccctccctcctagacctggaggcctggaacagccagccgcccacggacgccagagccgggaaccctgacggcacttagctgctgacaaacaacctgctccgtggagcgcctgaaacaccagtctttggggccagtgcctcagtttcaatccaggtaacctttaaatgaaacttgcctaaaatcttaggtcatacacagaagagactccaatcgacaagaagctggaaaagaatgatgttgtccttaaacaacctacagaatatcatctataacccggtaatcccgtatgttggcaccattcccgatcagctggatcctggaactttgattgtgatatgtgggcatgttcctagtgacgcagacagattccaggtggatctgcagaatggcagcagtgtgaaacctcgagccgatgtggcctttcatttcaatcctcgtttcaaaagggccggctgcattgtttgcaatactttgataaatgaaaaatggggacgggaagagatcacctatgacacgcctttcaaaagagaaaagtcttttgagatcgtgattatggtgctaaaggacaaattccaggtggctgtaaatggaaaacatactctgctctatggccacaggatcggcccagagaaaatagacactctgggcatttatggcaaagtgaatattcactcaattggttttagcttcagctcggacttacaaagtacccaagcatctagtctggaactgacagagataagtagagaaaatgttccaaagtctggcacgccccagcttgcagactgtctctcccctcctgggatttacagggtcatggctctgaaacattctgtagtgttctttggacacgagttttccctggagatcgctttctgcaggcctcttggtcctgactgtggcttcttttcagagcctgccattcgctgcaaggttgaacacccccatgggccctggacgaactgtcgtcgttaaaggagaagtgaatgcaaatgccaaaagctttaatgttgacctactagcaggaaaatcaaaggatattgctctacacttgaacccacgcctgaatattaaagcatttgtaagaaattcttttcttcaggagtcctggggagaagaagagagaaatattacctctttcccatttagtcctgggatgtactttgagatgataatttactgtgatgttagagaattcaaggttgcagtaaatggcgtacacagcctggagtacaaacacagatttaaagagctcagcagtattgacacgctggaaattaatggagacatccacttactggaagtaaggagctggtagcctacctacacagctgctacaaaaaccaaaatacagaatggcttctgtgatactggccttgctgaaacgcatctcactgtcattctattgtttatattgttaaaatgagcttgtgcaccattaggtcctgctgggtgttctcagtccttgccatgaagtatggtggtgtctagcactgaatggggaaactgggggcagcaacacttatagccagttaaagccactctgccctctctcctactttggctgactcttcaagaatgccattcaacaagtatttatggagtacctactataatacagtagctaacatgtattgagcacagattttttttggtaaaactgtgaggagctaggatatatacttggtgaaacaaaccagtatgttccctgttctcttgagcttcgactcttctgtgcgctactgctgcgcactgctttttctacaggcattacatcaactcctaaggggtcctctgggattagttaagcagctattaaatcacccgaagacactaatttacagaagacacaactccttccccagtgatcactgtcataaccagtgctctaccgtatcccatcactgaggactgatgttgactgacatcattttatcgtaataaacatgtggctctattagctgcaagctttaccaagtaattggcatgacatctgagcacagaaattaaggcaaaaaaccaaagcaaaacaaatacatggtgctgaaattaacttgatgccaagcccaaggcagctgatttctgtgtatttgaacttagggcaaatcagagtctacacagacgcctacagaaagtttcaggaagaggcaagatgcattcaatttgaaagatatttatgggcaacaaagtaaggtcaggattagacttcaggcattcataaggcaggcactatcagaaagtgtacgccaactaagggacccacaaagcaggcagaggtaatgcagaaatctgttttgttcccatgaaatcaccaatcaaggcctccgttcttctaaagattagtccatcatcattagcaactgagatcaaagcactcttccactttacgtgattaaaatcaaactgtgttcaaaaaaaaaaaaaatctaaaataaatatataaacaaaaaaacaaaaaaaaaagggggctctacatcgcggggcacacactctcctataagagcccaagatataaacgcgcgacatgaaacgtttaggcctggttgacccaacacaatatatttagtgttcaaaaaaacatat

SEQ ID NO: 352068 - DNA, 5924 bp, Homo sapiens
attttgtctttacattttacataatttcagatacattttcctcatatcaaataattcagcattttttagtactaacatcatagtctgtaagccattcaaaaaatgtatttcacaaaataggctatctcatcctttgagctattgagatgaattaatttatactcctcctaagatccctctcgtcactaagattcttttattttatgacaaaaccatagttctagaagcttgtttctcccacctgaaaagactggatttgggacatgatcctgtagaacttcggagccgcccacggacgccagagccgggaaccctgacggcacttagctgctgacaaacaacctgctccgtggagcgcctgaaacaccagtctttggggccagtgcctcagtttcaatccaggtaacctttaaatgaaacttgcctaaaatcttaggtcatacacagaagagactccaatcgacaagaagctggaaaagaatgatgttgtccttaaacaacctacagaatatcatctataacccggtaatcccgtatgttggcaccattcccgatcagctggatcctggaactttgattgtgatatgtgggcatgttcctagtgacgcagacagattccaggtggatctgcagaatggcagcagtgtgaaacctcgagccgatgtggcctttcatttcaatcctcgtttcaaaagggccggctgcattgtttgcaatactttgataaatgaaaaatggggacgggaagagatcacctatgacacgcctttcaaaagagaaaagtcttttgagatcgtgattatggtgctaaaggacaaattccaggtggctgtaaatggaaaacatactctgctctatggccacaggatcggcccagagaaaatagacactctgggcatttatggcaaagtgaatattcactcaattggttttagcttcagctcggacttacaaagtacccaagcatctagtctggaactgacagagataagtagagaaaatgttccaaagtctggcacgccccagcttagcctgccattcgctgcaaggttgaacacccccatgggccctggacgaactgtcgtcgttaaaggagaagtgaatgcaaatgccaaaagctttaatgttgacctactagcaggaaaatcaaaggatattgctctacacttgaacccacgcctgaatattaaagcatttgtaagaaattcttttcttcaggagtcctggggagaagaagagagaaatattacctctttcccatttagtcctgggatgtactttgagatgataatttactgtgatgttagagaattcaaggttgcagtaaatggcgtacacagcctggagtacaaacacagatttaaagagctcagcagtattgacacgctggaaattaatggagacatccacttactggaagtaaggagctggtagcctacctacacagctgctacaaaaaccaaaatacagaatggcttctgtgatactggccttgctgaaacgcatctcactgtcattctattgtttatattgttaaaatgagcttgtgcaccattaggtcctgctgggtgttctcagtccttgccatgaagtatggtggtgtctagcactgaatggggaaactgggggcagcaacacttatagccagttaaagccactctgccctctctcctactttggctgactcttcaagaatgccattcaacaagtatttatggagtacctactataatacagtagctaacatgtattgagcacagattttttttggtaaaactgtgaggagctaggatatatacttggtgaaacaaaccagtatgttccctgttctcttgagcttcgactcttctgtgcgctactgctgcgcactgctttttctacaggcattacatcaactcctaaggggtcctctgggattagttaagcagctattaaatcacccgaagacactaatttacagaagacacaactccttccccagtgatcactgtcataaccagtgctctaccgtatcccatcactgaggactgatgttgactgacatcattttatcgtaataaacatgtggctctattagctgcaagctttaccaagtaattggcatgacatctgagcacagaaattaaggcaaaaaaccaaagcaaaacaaatacatggtgctgaaattaacttgatgccaagcccaaggcagctgatttctgtgtatttgaacttagggcaaatcagagtctacacagacgcctacagaaagtttcaggaagaggcaagatgcattcaatttgaaagatatttatgggcaacaaagtaaggtcaggattagacttcaggcattcataaggcaggcactatcagaaagtgtacgccaactaagggacccacaaagcaggcagaggtaatgcagaaatctgttttgttcccatgaaatcaccaatcaaggcctccgttcttctaaagattagtccatcatcattagcaactgagatcaaagcactcttccactttacgtgattaaaatcaaacctgtatcagcaagttaaatggttccatttctgtgatttttctattatttgaggggagttggcagaagttccatgtatatgggatctttacaggtcagatcttgttacaggaaatttcaaaggtttgggagtggggagggaaaaaagctcagtcagtgaggatcattttatcacattagactggggcagaactctgccaggatttaggaatattttcagaacagattttagatattatttctatccatatattgaaaagaataccattgtcaatcttatttttttaaaagtactcagtgtagaaatcgctagcccttaattcttttccagcttttcatattaatgtatgcagagtctcaccaagctcaaagacactggttgggggtggagggtgccacagggaaagctgtagaaggcaagaagactcgagaatcccccagagttatttttctccataaagaccatcagagtgcttaactgagctgttggagactgtgaggcatttaggaaaaaaatagcccactcacatcattccttgtaagtcttaagttcattttcattttacgtggaggaaaaaaatttaaaaagctattagtatttattaatgaattttactgagacatttcttagaaatatgcacttctatactagcaagctctgtctctaaaatgcaagttggccttttgcttgccacatttctgcattaaacttctatattagcttcaaaggcttttaaactcaatgcgaacattctacgggatgttcttagatgcctttaaaaagggggcagatctaattttatttgaaccctcactttccaacttcaccatgacccagtactagagattagggcacttcaaagcattgaaaaaaatctactgatacttactttcttagacaagtagttcttagttaaccaccaatggaactgggttcattctgaatcctggaggagcttcctcgtgccacccagtgtttctgggccctctgtgtgagcagccaggtatgagctgttttagaagcagcgtgttgccttcatctctcccgtttcccaaaagaacaaaggataaaggtgacagtcacactcctgggttaaaaaaagcattccagaaccacttctctttatgggcacaacaaagaaacgaaggctgaagttcgcctacccaaaatgaaaagtaggctttacagtcaaaagtacttctgttgattgctaaataacttcattttcttgaaatagagcaactttgagtgaaatctgcaacatggataccatgtatataagatactgctgtacagaagagttaaggcttacagtgcaaatgaggcgtcagctttgggtgctaaaattaacaagtctaatattattaccatcaatcaggaagagaataataaatgtttaaacaaacacagcagtctgtataaaaataccgtgtatcatttactctttctgcagctctatacgataggcaggagaggcttatgtggcagcacaagccaggtggggattttgtaacgaagtgataaaacatttgtaagtaatccaagtaggtgtattaaggcaccaaaagtaacatggcacccaacacccaaaaataaaaatatgaaatatgagtgtgaactctgagtagagtatgaaacaccacagaaagtcttagaaatagctctggagtggctctcccaggacagtttccagttgctgaatagtcttttggcactgatgttctacttcttcacattcatctaaaaaaaaaaaaaaaaaaaatcaaaattaaaatctgagtcagtccgcctgcctcggttctcattagtttaattcttaatgccttgcactttccggcaatcattcaatcaaaagagtgaaatgaagcacattaacaaagcaggaggcgccacggaccgcctccctccacaccgctccttccgccttcattccttgcccacaggcttgcactggaagctgaataagaatccccaaaactcaaacttcctagggatgccacccctttagtagctcacacctcccccctccaagagctaagaaacaaaggagaatgtacttttgtagcttagataagcaatgaatcagtaaaggactgatctacttgctccaccacccctcccttaataataacatttactgttatttcctgggcctaagacttatgttccagaactgtcacagctccccatgtcacactcactagcttgtgatctttgtcaaataactgaaatcttttaagcctctagtttcttcctttgtaaaacagagataaaatgttgtggtttttaagtgagataatccaagtaaagcacctaacatggagtagtgaatgaacatcggttgctactaaaagtggacatcctaccgcatccttaatgccactaggcatttccatacaatctggggaccaaaacttcaatcatataaatgtatgaggttaattaaaaacactactgtaatctgcttgtatgatcacaaaccaccacaaaagaaaagatcgtgaagattacactgtaaacggactctcaaatgatcaggaggtggtcacttcgcaacttgctccctccacccaactcaaaacaggagctcgagcctgcctgtatttgagactggagctgcctgtatgaggactggatcaactgctagtcacgttatatccaaatctgcattatcattgggcacattttcacagaattttactgaattattccttaattgtttaatggttgggaatagtttgggaattaccttccatcaactctgctaagaaaggaatggattctggtagcaagacaatataattctcctttagtttttcagccagtgctaacacagtaatcaaagcagcaaatcgaacctgaaagggataaaagagcaaagaaataaaaagtagtgttactgtatttattatcttaagagctgtactgacttgagacaagctctaactttttaaacattagttcacacgcgtttattcacttcattatgttcattaagctttcatcttagaataccagtttcaccatttgggagctgtttgtaatatgtgcaaccttataaatagtgttttccaaactgtgtcccaggactgcaaatctttaatgtgaaatgtctttttataatctcttcctttaaaaaaaaccaataaaataaaatgccacatgcaaactcaaaaacacaacacacaaacacacatcactctccaatacacacatacattctacccactcccccaaccacatgatgggcaggacaggtggctgtagagagaagcttataccgcacaaccatagagcagacgagccgacacaaggcgataagggagcaagaaggaatcgatcagagcaagacagaccaccgctgcgcacgcgcagtggcgcaggtgcgctacaacacagaagatg

SEQ ID NO: 352069 - DNA, 4495 bp, Homo sapiens
agaggattcaaagcggtagaacttcggagattggggaagataatcggaagaggtagaagacaccgtccatgacacttcctggggaagcagatgtatgtataaggatccgcccacggacgccagagccgggaaccctgacggcacttagctgctgacaaacaacctgctccgtggagcgcctgaaacaccagtctttggggccagtgcctcagtttcaatccaggtaacctttaaatgaaacttgcctaaaatcttaggtcatacacagaagagactccaatcgacaagaagctggaaaagaatgatgttgtccttaaacaacctacagaatatcatctataacccggtaatcccgtatgttggcaccattcccgatcagctggatcctggaactttgattgtgatatgtgggcatgttcctagtgacgcagacagattccaggtggatctgcagaatggcagcagtgtgaaacctcgagccgatgtggcctttcatttcaatcctcgtttcaaaagggccggctgcattgtttgcaatactttgataaatgaaaaatggggacgggaagagatcacctatgacacgcctttcaaaagagaaaagtcttttgagatcgtgattatggtgctaaaggacaaattccaggtggctgtaaatggaaaacatactctgctctatggccacaggatcggcccagagaaaatagacactctgggcatttatggcaaagtgaatattcactcaattggttttagcttcagctcggacttacaaagtacccaagcatctagtctggaactgacagagataagtagagaaaatgttccaaagtctggcacgccccagcttagcctgccattcgctgcaaggttgaacacccccatgggccctggacgaactgtcgtcgttaaaggagaagtgaatgcaaatgccaaaagctttaatgttgacctactagcaggaaaatcaaaggatattgctctacacttgaacccacgcctgaatattaaagcatttgtaagaaattcttttcttcaggagtcctggggagaagaagagagaaatattacctctttcccatttagtcctgggatgtactttgagatgataatttactgtgatgttagagaattcaaggttgcagtaaatggcgtacacagcctggagtacaaacacagatttaaagagctcagcagtattgacacgctggaaattaatggagacatccacttactggaagtaaggagctggtagcctacctacacagctgctacaaaaaccaaaatacagaatggcttctgtgatactggccttgctgaaacgcatctcactgtcattctattgtttatattgttaaaatgagcttgtgcaccattaggtcctgctgggtgttctcagtccttgccatgaagtatggtggtgtctagcactgaatggggaaactgggggcagcaacacttatagccagttaaagccactctgccctctctcctactttggctgactcttcaagaatgccattcaacaagtatttatggagtacctactataatacagtagctaacatgtattgagcacagattttttttggtaaaactgtgaggagctaggatatatacttggtgaaacaaaccagtatgttccctgttctcttgagcttcgactcttctgtgcgctactgctgcgcactgctttttctacaggcattacatcaactcctaaggggtcctctgggattagttaagcagctattaaatcacccgaagacactaatttacagaagacacaactccttccccagtgatcactgtcataaccagtgctctaccgtatcccatcactgaggactgatgttgactgacatcattttatcgtaataaacatgtggctctattagctgcaagctttaccaagtaattggcatgacatctgagcacagaaattaaggcaaaaaaccaaagcaaaacaaatacatggtgctgaaattaacttgatgccaagcccaaggcagctgatttctgtgtatttgaacttagggcaaatcagagtctacacagacgcctacagaaagtttcaggaagaggcaagatgcattcaatttgaaagatatttatgggcaacaaagtaaggtcaggattagacttcaggcattcataaggcaggcactatcagaaagtgtacgccaactaagggacccacaaagcaggcagaggtaatgcagaaatctgttttgttcccatgaaatcaccaatcaaggcctccgttcttctaaagattagtccatcatcattagcaactgagatcaaagcactcttccactttacgtgattaaaatcaaacctgtatcagcaagttaaatggttccatttctgtgatttttctattatttgaggggagttggcagaagttccatgtatatgggatctttacaggtcagatcttgttacaggaaatttcaaaggtttgggagtggggagggaaaaaagctcagtcagtgaggatcattttatcacattagactggggcagaactctgccaggatttaggaatattttcagaacagattttagatattatttctatccatatattgaaaagaataccattgtcaatcttatttttttaaaagtactcagtgtagaaatcgctagcccttaattcttttccagcttttcatattaatgtatgcagagtctcaccaagctcaaagacactggttgggggtggagggtgccacagggaaagctgtagaaggcaagaagactcgagaatcccccagagttatttttctccataaagaccatcagagtgcttaactgagctgttggagactgtgaggcatttaggaaaaaaatagcccactcacatcattccttgtaagtcttaagttcattttcattttacgtggaggaaaaaaatttaaaaagctattagtatttattaatgaattttactgagacatttcttagaaatatgcacttctatactagcaagctctgtctctaaaatgcaagttggccttttgcttgccacatttctgcattaaacttctatattagcttcaaaggcttttaaactcaatgcgaacattctacgggatgttcttagatgcctttaaaaagggggcagatctaattttatttgaaccctcactttccaacttcaccatgacccagtactagagattagggcacttcaaagcattgaaaaaaatctactgatacttactttcttagacaagtagttcttagttaaccaccaatggaactgggttcattctgaatcctggaggagcttcctcgtgccacccagtgtttctgggccctctgtgtgagcagccaggtatgagctgttttagaagcagcgtgttgccttcatctctcccgtttcccaaaagaacaaaggataaaggtgacagtcacactcctgggttaaaaaaagcattccagaaccacttctctttatgggcacaacaaagaaacgaaggctgaagttcgcctacccaaaatgaaaagtaggctttacagtcaaaagtacttctgttgattgctaaataacttcattttcttgaaatagagcaactttgagtgaaatctgcaacatggataccatgtatataagatactgctgtacagaagagttaaggcttacagtgcaaatgaggcgtcagctttgggtgctaaaattaacaagtctaatattattaccatcaatcaggaagagaataataaatgtttaaacaaacacagcagtctgtataaaaataccgtgtatcatttactctttctgcagctctatacgataggcaggagaggcttatgtggcagcacaagccaggtggggattttgtaacgaagtgataaaacatttgtaagtaatccaagtaggtgtattaaggcaccaaaagtaacatggcacccaacacccaaaaataaaaatatgaaatatgagtgtgaactctgagtagagtatgaaacaccacagaaagtcttagaaatagctctggagtggctctcccaggacagtttccagttgctgaatagtcttttggcactgatgttctacttcttcacattcatctaaaaaaaaaaaaaaaaaaaaaaaaaaaaaaacctattgtccgggcccgcctcggcccagtcgactctagactttgaccagtttaattcatgccggcccaaatttggagctaactttggccacattcgcccttttggggggggggtattaaaatttacttgggcccgggtttttaacaacggggggattgggaaaacccctgggggtacccaactttaaaaggctttggagaaaaaacccccttttttggcggttggggaaaaaagaaaaaaggcgcccacaaataggccctttttcaaaaaatgggccccctttagggggagaagggaatttttgggccggtaatttttttttaaaaaaaaccggggaaaaatttttttaaaaaaaaacctttttttttaccaagcggcgcgg

SEQ ID NO: 352070 - DNA, 5691 bp, Homo sapiens
agaggattcaaagcggtagaacttcggagattggggaagataatcggaagaggtagaagacaccgtccatgacacttcctggggaagcagatgtatgtataaggatccgcccacggacgccagagccgggaaccctgacggcacttagctgctgacaaacaacctgctccgtggagcgcctgaaacaccagtctttggggccagtgcctcagtttcaatccaggtaacctttaaatgaaacttgcctaaaatcttaggtcatacacagaagagactccaatcgacaagaagctggaaaagaatgatgttgtccttaaacaacctacagaatatcatctataacccggtaatcccgtatgttggcaccattcccgatcagctggatcctggaactttgattgtgatatgtgggcatgttcctagtgacgcagacagattccaggtggatctgcagaatggcagcagtgtgaaacctcgagccgatgtggcctttcatttcaatcctcgtttcaaaagggccggctgcattgtttgcaatactttgataaatgaaaaatggggacgggaagagatcacctatgacacgcctttcaaaagagaaaagtcttttgagatcgtgattatggtgctaaaggacaaattccaggtggctgtaaatggaaaacatactctgctctatggccacaggatcggcccagagaaaatagacactctgggcatttatggcaaagtgaatattcactcaattggttttagcttcagctcggacttacaaagtacccaagcatctagtctggaactgacagagataagtagagaaaatgttccaaagtctggcacgccccagcttagcctgccattcgctgcaaggttgaacacccccatgggccctggacgaactgtcgtcgttaaaggagaagtgaatgcaaatgccaaaagctttaatgttgacctactagcaggaaaatcaaaggatattgctctacacttgaacccacgcctgaatattaaagcatttgtaagaaattcttttcttcaggagtcctggggagaagaagagagaaatattacctctttcccatttagtcctgggatgtactttgagatgataatttactgtgatgttagagaattcaaggttgcagtaaatggcgtacacagcctggagtacaaacacagatttaaagagctcagcagtattgacacgctggaaattaatggagacatccacttactggaagtaaggagctggtagcctacctacacagctgctacaaaaaccaaaatacagaatggcttctgtgatactggccttgctgaaacgcatctcactgtcattctattgtttatattgttaaaatgagcttgtgcaccattaggtcctgctgggtgttctcagtccttgccatgaagtatggtggtgtctagcactgaatggggaaactgggggcagcaacacttatagccagttaaagccactctgccctctctcctactttggctgactcttcaagaatgccattcaacaagtatttatggagtacctactataatacagtagctaacatgtattgagcacagattttttttggtaaaactgtgaggagctaggatatatacttggtgaaacaaaccagtatgttccctgttctcttgagcttcgactcttctgtgcgctactgctgcgcactgctttttctacaggcattacatcaactcctaaggggtcctctgggattagttaagcagctattaaatcacccgaagacactaatttacagaagacacaactccttccccagtgatcactgtcataaccagtgctctaccgtatcccatcactgaggactgatgttgactgacatcattttatcgtaataaacatgtggctctattagctgcaagctttaccaagtaattggcatgacatctgagcacagaaattaaggcaaaaaaccaaagcaaaacaaatacatggtgctgggcaaatcagagtctacacagacgcctacagaaagtttcaggaagaggcaagatgcattcaatttgaaagatatttatgggcaacaaagtaaggtcaggattagacttcaggcattcataaggcaggcactatcagaaagtgtacgccaactaagggacccacaaagcaggcagaggtaatgcagaaatctgttttgttcccatgaaatcaccaatcaaggcctccgttcttctaaagattagtccatcatcattagcaactgagatcaaagcactcttccactttacgtgattaaaatcaaacctgtatcagcaagttaaatggttccatttctgtgatttttctattatttgaggggagttggcagaagttccatgtatatgggatctttacaggtcagatcttgttacaggaaatttcaaaggtttgggagtggggagggaaaaaagctcagtcagtgaggatcattttatcacattagactggggcagaactctgccaggatttaggaatattttcagaacagattttagatattatttctatccatatattgaaaagaataccattgtcaatcttatttttttaaaagtactcagtgtagaaatcgctagcccttaattcttttccagcttttcatattaatgtatgcagagtctcaccaagctcaaagacactggttgggggtggagggtgccacagggaaagctgtagaaggcaagaagactcgagaatcccccagagttatttttctccataaagaccatcagagtgcttaactgagctgttggagactgtgaggcatttaggaaaaaaatagcccactcacatcattccttgtaagtcttaagttcattttcattttacgtggaggaaaaaaatttaaaaagctattagtatttattaatgaattttactgagacatttcttagaaatatgcacttctatactagcaagctctgtctctaaaatgcaagttggccttttgcttgccacatttctgcattaaacttctatattagcttcaaaggcttttaaactcaatgcgaacattctacgggatgttcttagatgcctttaaaaagggggcagatctaattttatttgaaccctcactttccaacttcaccatgacccagtactagagattagggcacttcaaagcattgaaaaaaatctactgatacttactttcttagacaagtagttcttagttaaccaccaatggaactgggttcattctgaatcctggaggagcttcctcgtgccacccagtgtttctgggccctctgtgtgagcagccaggtatgagctgttttagaagcagcgtgttgccttcatctctcccgtttcccaaaagaacaaaggataaaggtgacagtcacactcctgggttaaaaaaagcattccagaaccacttctctttatgggcacaacaaagaaacgaaggctgaagttcgcctacccaaaatgaaaagtaggctttacagtcaaaagtacttctgttgattgctaaataacttcattttcttgaaatagagcaactttgagtgaaatctgcaacatggataccatgtatataagatactgctgtacagaagagttaaggcttacagtgcaaatgaggcgtcagctttgggtgctaaaattaacaagtctaatattattaccatcaatcaggaagagaataataaatgtttaaacaaacacagcagtctgtataaaaataccgtgtatcatttactctttctgcagctctatacgataggcaggagaggcttatgtggcagcacaagccaggtggggattttgtaacgaagtgataaaacatttgtaagtaatccaagtaggtgtattaaggcaccaaaagtaacatggcacccaacacccaaaaataaaaatatgaaatatgagtgtgaactctgagtagagtatgaaacaccacagaaagtcttagaaatagctctggagtggctctcccaggacagtttccagttgctgaatagtcttttggcactgatgttctacttcttcacattcatctaaaaaaaaaaaaaaaaaaaatcaaaattaaaatctgagtcagtccgcctgcctcggttctcattagtttaattcttaatgccttgcactttccggcaatcattcaatcaaaagagtgaaatgaagcacattaacaaagcaggaggcgccacggaccgcctccctccacaccgctccttccgccttcattccttgcccacaggcttgcactggaagctgaataagaatccccaaaactcaaacttcctagggatgccacccctttagtagctcacacctcccccctccaagagctaagaaacaaaggagaatgtacttttgtagcttagataagcaatgaatcagtaaaggactgatctacttgctccaccacccctcccttaataataacatttactgttatttcctgggcctaagacttatgttccagaactgtcacagctccccatgtcacactcactagcttgtgatctttgtcaaataactgaaatcttttaagcctctagtttcttcctttgtaaaacagagataaaatgttgtggtttttaagtgagataatccaagtaaagcacctaacatggagtagtgaatgaacatcggttgctactaaaagtggacatcctaccgcatccttaatgccactaggcatttccatacaatctggggaccaaaacttcaatcatataaatgtatgaggttaattaaaaacactactgtaatctgcttgtatgatcacaaaccaccacaaaagaaaagatcgtgaagattacactgtaaacggactctcaaatgatcaggaggtggtcacttcgcaacttgctccctccacccaactcaaaacaggagctcgagcctgcctgtatttgagactggagctgcctgtatgaggactggatcaactgctagtcacgttatatccaaatctgcattatcattgggcacattttcacagaattttactgaattattccttaattgtttaatggttgggaatagtttgggaattaccttccatcaactctgctaagaaaggaatggattctggtagcaagacaatataattctcctttagtttttcagccagtgctaacacagtaatcaaagcagcaaatcgaacctgaaagggataaaagagcaaagaaataaaaagtagtgttactgtatttattatcttaagagctgtactgacttgagacaagctctaactttttaaacattagttcacacgcgtttattcacttcattatgttcattaagctttcatcttagaataccagtttcaccatttgggagctgtttgtaatatgtgcaaccttataaatagtgttttccaaactgtgtcccaggactgcaaatctttaatgtgaaatgtctttttataatctcttcctttaaaaaaaaccaataaaataaaatgccacatgcaaactcaaaaacacaacacacaaacacacatcactctccaatacacacatacattctacccactcccccaaccacatgatgggcaggacaggtggctgtagagagaagcttataccgcacaaccatagagcagacgagccgacacaaggcgataagggagcaagaaggaatcgatcagagcaagacagaccaccgctgcgcacgcgcagtggcgcaggtgcgctacaacacagaagatg

SEQ ID NO: 352071 - DNA, 5691 bp, Homo sapiens
agaggattcaaagcggtagaacttcggagattggggaagataatcggaagaggtagaagacaccgtccatgacacttcctggggaagcagatgtatgtataaggatccgcccacggacgccagagccgggaaccctgacggcacttagctgctgacaaacaacctgctccgtggagcgcctgaaacaccagtctttggggccagtgcctcagtttcaatccaggtaacctttaaatgaaacttgcctaaaatcttaggtcatacacagaagagactccaatcgacaagaagctggaaaagaatgatgttgtccttaaacaacctacagaatatcatctataacccggtaatcccgtatgttggcaccattcccgatcagctggatcctggaactttgattgtgatatgtgggcatgttcctagtgacgcagacagattccaggtggatctgcagaatggcagcagtgtgaaacctcgagccgatgtggcctttcatttcaatcctcgtttcaaaagggccggctgcattgtttgcaatactttgataaatgaaaaatggggacgggaagagatcacctatgacacgcctttcaaaagagaaaagtcttttgagatcgtgattatggtgctaaaggacaaattccaggtggctgtaaatggaaaacatactctgctctatggccacaggatcggcccagagaaaatagacactctgggcatttatggcaaagtgaatattcactcaattggttttagcttcagctcggacttacaaagtacccaagcatctagtctggaactgacagagataagtagagaaaatgttccaaagtctggcacgccccagcttagcctgccattcgctgcaaggttgaacacccccatgggccctggacgaactgtcgtcgttaaaggagaagtgaatgcaaatgccaaaagctttaatgttgacctactagcaggaaaatcaaaggatattgctctacacttgaacccacgcctgaatattaaagcatttgtaagaaattcttttcttcaggagtcctggggagaagaagagagaaatattacctctttcccatttagtcctgggatgtactttgagatgataatttactgtgatgttagagaattcaaggttgcagtaaatggcgtacacagcctggagtacaaacacagatttaaagagctcagcagtattgacacgctggaaattaatggagacatccacttactggaagtaaggagctggtagcctacctacacagctgctacaaaaaccaaaatacagaatggcttctgtgatactggccttgctgaaacgcatctcactgtcattctattgtttatattgttaaaatgagcttgtgcaccattaggtcctgctgggtgttctcagtccttgccatgaagtatggtggtgtctagcactgaatggggaaactgggggcagcaacacttatagccagttaaagccactctgccctctctcctactttggctgactcttcaagaatgccattcaacaagtatttatggagtacctactataatacagtagctaacatgtattgagcacagattttttttggtaaaactgtgaggagctaggatatatacttggtgaaacaaaccagtatgttccctgttctcttgagcttcgactcttctgtgcgctactgctgcgcactgctttttctacaggcattacatcaactcctaaggggtcctctgggattagttaagcagctattaaatcacccgaagacactaatttacagaagacacaactccttccccagtgatcactgtcataaccagtgctctaccgtatcccatcactgaggactgatgttgactgacatcattttatcgtaataaacatgtggctctattagctgcaagctttaccaagtaattggcatgacatctgagcacagaaattaaggcaaaaaaccaaagcaaaacaaatacatggtgctgaaattaacttgatgccaagcccaaggcagctgatttctgtgtatttgaacttagggcaaatcagagtctacacagacgcctacagaaagtttcaggaagaggcaagatgcattcaatttgaaagatatttatgggcaacaaagtaaggtcaggattagacttcaggcattcataaggcaggcactatcagaaagtgtacgccaactaagggacccacaaagcaggcagaggtaatgcagaaatctgttttgttcccatgaaatcaccaatcaaggcctccgttcttctaaagattagtccatcatcattagcaactgagatcaaagcactcttccactttacgtgattaaaatcaaacctgtatcagcaagttaaatggttccatttctgtgatttttctattatttgaggggagttggcagaagttccatgtatatgggatctttacaggtcagatcttgttacaggaaatttcaaaggtttgggagtggggagggaaaaaagctcagtcagtgaggatcattttatcacattagactggggcagaactctgccaggatttaggaatattttcagaacagattttagatattatttctatccatatattgaaaagaataccattgtcaatcttatttttttaaaagtactcagtgtagaaatcgctagcccttaattcttttccagcttttcatattaatgtatgcagagtctcaccaagctcaaagacactggttgggggtggagggtgccacagggaaagctgtagaaggcaagaagactcgagaatcccccagagttatttttctccataaagaccatcagagtgcttaactgagctgttggagactgtgaggcatttaggaaaaaaatagcccactcacatcattccttgtaagtcttaagttcattttcattttacgtggaggaaaaaaatttaaaaagctattagtatttattaatgaattttactgagacatttcttagaaatatgcacttctatactagcaagctctgtctctaaaatgcaagttggccttttgcttgccacatttctgcattaaacttctatattagcttcaaaggcttttaaactcaatgcgaacattctacgggatgttcttagatgccatgacccagtactagagattagggcacttcaaagcattgaaaaaaatctactgatacttactttcttagacaagtagttcttagttaaccaccaatggaactgggttcattctgaatcctggaggagcttcctcgtgccacccagtgtttctgggccctctgtgtgagcagccaggtatgagctgttttagaagcagcgtgttgccttcatctctcccgtttcccaaaagaacaaaggataaaggtgacagtcacactcctgggttaaaaaaagcattccagaaccacttctctttatgggcacaacaaagaaacgaaggctgaagttcgcctacccaaaatgaaaagtaggctttacagtcaaaagtacttctgttgattgctaaataacttcattttcttgaaatagagcaactttgagtgaaatctgcaacatggataccatgtatataagatactgctgtacagaagagttaaggcttacagtgcaaatgaggcgtcagctttgggtgctaaaattaacaagtctaatattattaccatcaatcaggaagagaataataaatgtttaaacaaacacagcagtctgtataaaaataccgtgtatcatttactctttctgcagctctatacgataggcaggagaggcttatgtggcagcacaagccaggtggggattttgtaacgaagtgataaaacatttgtaagtaatccaagtaggtgtattaaggcaccaaaagtaacatggcacccaacacccaaaaataaaaatatgaaatatgagtgtgaactctgagtagagtatgaaacaccacagaaagtcttagaaatagctctggagtggctctcccaggacagtttccagttgctgaatagtcttttggcactgatgttctacttcttcacattcatctaaaaaaaaaaaaaaaaaaaatcaaaattaaaatctgagtcagtccgcctgcctcggttctcattagtttaattcttaatgccttgcactttccggcaatcattcaatcaaaagagtgaaatgaagcacattaacaaagcaggaggcgccacggaccgcctccctccacaccgctccttccgccttcattccttgcccacaggcttgcactggaagctgaataagaatccccaaaactcaaacttcctagggatgccacccctttagtagctcacacctcccccctccaagagctaagaaacaaaggagaatgtacttttgtagcttagataagcaatgaatcagtaaaggactgatctacttgctccaccacccctcccttaataataacatttactgttatttcctgggcctaagacttatgttccagaactgtcacagctccccatgtcacactcactagcttgtgatctttgtcaaataactgaaatcttttaagcctctagtttcttcctttgtaaaacagagataaaatgttgtggtttttaagtgagataatccaagtaaagcacctaacatggagtagtgaatgaacatcggttgctactaaaagtggacatcctaccgcatccttaatgccactaggcatttccatacaatctggggaccaaaacttcaatcatataaatgtatgaggttaattaaaaacactactgtaatctgcttgtatgatcacaaaccaccacaaaagaaaagatcgtgaagattacactgtaaacggactctcaaatgatcaggaggtggtcacttcgcaacttgctccctccacccaactcaaaacaggagctcgagcctgcctgtatttgagactggagctgcctgtatgaggactggatcaactgctagtcacgttatatccaaatctgcattatcattgggcacattttcacagaattttactgaattattccttaattgtttaatggttgggaatagtttgggaattaccttccatcaactctgctaagaaaggaatggattctggtagcaagacaatataattctcctttagtttttcagccagtgctaacacagtaatcaaagcagcaaatcgaacctgaaagggataaaagagcaaagaaataaaaagtagtgttactgtatttattatcttaagagctgtactgacttgagacaagctctaactttttaaacattagttcacacgcgtttattcacttcattatgttcattaagctttcatcttagaataccagtttcaccatttgggagctgtttgtaatatgtgcaaccttataaatagtgttttccaaactgtgtcccaggactgcaaatctttaatgtgaaatgtctttttataatctcttcctttaaaaaaaaccaataaaataaaatgccacatgcaaactcaaaaacacaacacacaaacacacatcactctccaatacacacatacattctacccactcccccaaccacatgatgggcaggacaggtggctgtagagagaagcttataccgcacaaccatagagcagacgagccgacacaaggcgataagggagcaagaaggaatcgatcagagcaagacagaccaccgctgcgcacgcgcagtggcgcaggtgcgctacaacacagaagatg

SEQ ID NO: 352072 - DNA, 5684 bp, Homo sapiens
agaggattcaaagcggtagaacttcggagattggggaagataatcggaagaggtagaagacaccgtccatgacacttcctggggaagcagatgtatgtataaggatccgcccacggacgccagagccgggaaccctgacggcacttagctgctgacaaacaacctgctccgtggagcgcctgaaacaccagtctttggggccagtgcctcagtttcaatccaggtaacctttaaatgaaacttgcctaaaatcttaggtcatacacagaagagactccaatcgacaagaagctggaaaagaatgatgttgtccttaaacaacctacagaatatcatctataacccggtaatcccgtatgttggcaccattcccgatcagctggatcctggaactttgattgtgatatgtgggcatgttcctagtgacgcagacagattccaggtggatctgcagaatggcagcagtgtgaaacctcgagccgatgtggcctttcatttcaatcctcgtttcaaaagggccggctgcattgtttgcaatactttgataaatgaaaaatggggacgggaagagatcacctatgacacgcctttcaaaagagaaaagtcttttgagatcgtgattatggtgctaaaggacaaattccaggtggctgtaaatggaaaacatactctgctctatggccacaggatcggcccagagaaaatagacactctgggcatttatggcaaagtgaatattcactcaattggttttagcttcagctcggacttacaaagtacccaagcatctagtctggaactgacagagataagtagagaaaatgttccaaagtctggcacgccccagcttagcctgccattcgctgcaaggttgaacacccccatgggccctggacgaactgtcgtcgttaaaggagaagtgaatgcaaatgccaaaagctgaatattaaagcatttgtaagaaattcttttcttcaggagtcctggggagaagaagagagaaatattacctctttcccatttagtcctgggatgtactttgagatgataatttactgtgatgttagagaattcaaggttgcagtaaatggcgtacacagcctggagtacaaacacagatttaaagagctcagcagtattgacacgctggaaattaatggagacatccacttactggaagtaaggagctggtagcctacctacacagctgctacaaaaaccaaaatacagaatggcttctgtgatactggccttgctgaaacgcatctcactgtcattctattgtttatattgttaaaatgagcttgtgcaccattaggtcctgctgggtgttctcagtccttgccatgaagtatggtggtgtctagcactgaatggggaaactgggggcagcaacacttatagccagttaaagccactctgccctctctcctactttggctgactcttcaagaatgccattcaacaagtatttatggagtacctactataatacagtagctaacatgtattgagcacagattttttttggtaaaactgtgaggagctaggatatatacttggtgaaacaaaccagtatgttccctgttctcttgagcttcgactcttctgtgcgctactgctgcgcactgctttttctacaggcattacatcaactcctaaggggtcctctgggattagttaagcagctattaaatcacccgaagacactaatttacagaagacacaactccttccccagtgatcactgtcataaccagtgctctaccgtatcccatcactgaggactgatgttgactgacatcattttatcgtaataaacatgtggctctattagctgcaagctttaccaagtaattggcatgacatctgagcacagaaattaaggcaaaaaaccaaagcaaaacaaatacatggtgctgaaattaacttgatgccaagcccaaggcagctgatttctgtgtatttgaacttagggcaaatcagagtctacacagacgcctacagaaagtttcaggaagaggcaagatgcattcaatttgaaagatatttatgggcaacaaagtaaggtcaggattagacttcaggcattcataaggcaggcactatcagaaagtgtacgccaactaagggacccacaaagcaggcagaggtaatgcagaaatctgttttgttcccatgaaatcaccaatcaaggcctccgttcttctaaagattagtccatcatcattagcaactgagatcaaagcactcttccactttacgtgattaaaatcaaacctgtatcagcaagttaaatggttccatttctgtgatttttctattatttgaggggagttggcagaagttccatgtatatgggatctttacaggtcagatcttgttacaggaaatttcaaaggtttgggagtggggagggaaaaaagctcagtcagtgaggatcattttatcacattagactggggcagaactctgccaggatttaggaatattttcagaacagattttagatattatttctatccatatattgaaaagaataccattgtcaatcttatttttttaaaagtactcagtgtagaaatcgctagcccttaattcttttccagcttttcatattaatgtatgcagagtctcaccaagctcaaagacactggttgggggtggagggtgccacagggaaagctgtagaaggcaagaagactcgagaatcccccagagttatttttctccataaagaccatcagagtgcttaactgagctgttggagactgtgaggcatttaggaaaaaaatagcccactcacatcattccttgtaagtcttaagttcattttcattttacgtggaggaaaaaaatttaaaaagctattagtatttattaatgaattttactgagacatttcttagaaatatgcacttctatactagcaagctctgtctctaaaatgcaagttggccttttgcttgccacatttctgcattaaacttctatattagcttcaaaggcttttaaactcaatgcgaacattctacgggatgttcttagatgcctttaaaaagggggcagatctaattttatttgaaccctcactttccaacttcaccatgacccagtactagagattagggcacttcaaagcattgaaaaaaatctactgatacttactttcttagacaagtagttcttagttaaccaccaatggaactgggttcattctgaatcctggaggagcttcctcgtgccacccagtgtttctgggccctctgtgtgagcagccaggtatgagctgttttagaagcagcgtgttgccttcatctctcccgtttcccaaaagaacaaaggataaaggtgacagtcacactcctgggttaaaaaaagcattccagaaccacttctctttatgggcacaacaaagaaacgaaggctgaagttcgcctacccaaaatgaaaagtaggctttacagtcaaaagtacttctgttgattgctaaataacttcattttcttgaaatagagcaactttgagtgaaatctgcaacatggataccatgtatataagatactgctgtacagaagagttaaggcttacagtgcaaatgaggcgtcagctttgggtgctaaaattaacaagtctaatattattaccatcaatcaggaagagaataataaatgtttaaacaaacacagcagtctgtataaaaataccgtgtatcatttactctttctgcagctctatacgataggcaggagaggcttatgtggcagcacaagccaggtggggattttgtaacgaagtgataaaacatttgtaagtaatccaagtaggtgtattaaggcaccaaaagtaacatggcacccaacacccaaaaataaaaatatgaaatatgagtgtgaactctgagtagagtatgaaacaccacagaaagtcttagaaatagctctggagtggctctcccaggacagtttccagttgctgaatagtcttttggcactgatgttctacttcttcacattcatctaaaaaaaaaaaaaaaaaaaatcaaaattaaaatctgagtcagtccgcctgcctcggttctcattagtttaattcttaatgccttgcactttccggcaatcattcaatcaaaagagtgaaatgaagcacattaacaaagcaggaggcgccacggaccgcctccctccacaccgctccttccgccttcattccttgcccacaggcttgcactggaagctgaataagaatccccaaaactcaaacttcctagggatgccacccctttagtagctcacacctcccccctccaagagctaagaaacaaaggagaatgtacttttgtagcttagataagcaatgaatcagtaaaggactgatctacttgctccaccacccctcccttaataataacatttactgttatttcctgggcctaagacttatgttccagaactgtcacagctccccatgtcacactcactagcttgtgatctttgtcaaataactgaaatcttttaagcctctagtttcttcctttgtaaaacagagataaaatgttgtggtttttaagtgagataatccaagtaaagcacctaacatggagtagtgaatgaacatcggttgctactaaaagtggacatcctaccgcatccttaatgccactaggcatttccatacaatctggggaccaaaacttcaatcatataaatgtatgaggttaattaaaaacactactgtaatctgcttgtatgatcacaaaccaccacaaaagaaaagatcgtgaagattacactgtaaacggactctcaaatgatcaggaggtggtcacttcgcaacttgctccctccacccaactcaaaacaggagctcgagcctgcctgtatttgagactggagctgcctgtatgaggactggatcaactgctagtcacgttatatccaaatctgcattatcattgggcacattttcacagaattttactgaattattccttaattgtttaatggttgggaatagtttgggaattaccttccatcaactctgctaagaaaggaatggattctggtagcaagacaatataattctcctttagtttttcagccagtgctaacacagtaatcaaagcagcaaatcgaacctgaaagggataaaagagcaaagaaataaaaagtagtgttactgtatttattatcttaagagctgtactgacttgagacaagctctaactttttaaacattagttcacacgcgtttattcacttcattatgttcattaagctttcatcttagaataccagtttcaccatttgggagctgtttgtaatatgtgcaaccttataaatagtgttttccaaactgtgtcccaggactgcaaatctttaatgtgaaatgtctttttataatctcttcctttaaaaaaaaccaataaaataaaatgccacatgcaaactcaaaaacacaacacacaaacacacatcactctccaatacacacatacattctacccactcccccaaccacatgatgggcaggacaggtggctgtagagagaagcttataccgcacaaccatagagcagacgagccgacacaaggcgataagggagcaagaaggaatcgatcagagcaagacagaccaccgctgcgcacgcgcagtggcgcaggtgcgctacaacacagaagatg

SEQ ID NO: 352073 - DNA, 5691 bp, Homo sapiens
agaggattcaaagcggtagaacttcggagattggggaagataatcggaagaggtagaagacaccgtccatgacacttcctggggaagcagatgtatgtataaggatccgcccacggacgccagagccgggaaccctgacggcacttagctgctgacaaacaacctgctccgtggagcgcctgaaacaccagtctttggggccagtgcctcagtttcaatccaggtaacctttaaatgaaacttgcctaaaatcttaggtcatacacagaagagactccaatcgacaagaagctggaaaagaatgatgttgtccttaaacaacctacagaatatcatctataacccggtaatcccgtatgttggcaccattcccgatcagctggatcctggaactttgattgtgatatgtgggcatgttcctagtgacgcagacagattccaggtggatctgcagaatggcagcagtgtgaaacctcgagccgatgtggcctttcatttcaatcctcgtttcaaaagggccggctgcattgtttgcaatactttgataaatgaaaaatggggacgggaagagatcacctatgacacgcctttcaaaagagaaaagtcttttgagatcgtgattatggtgctaaaggacaaattccaggtggctgtaaatggaaaacatactctgctctatggccacaggatcggcccagagaaaatagacactctgggcatttatggcaaagtgaatattcactcaattggttttagcttcagctcggacttacaaagtacccaagcatctagtctggaactgacagagataagtagagaaaatgttccaaagtctggcacgccccagcttagcctgccattcgctgcaaggttgaacacccccatgggccctggacgaactgtcgtcgttaaaggagaagtgaatgcaaatgccaaaagctttaatgttgacctactagcaggaaaatcaaaggatattgctctacacttgaacccacgcctgaatattaaagcatttgtaagaaattcttttcttcaggagtcctggggagaagaagagagaaatattacctctttcccatttagtcctgggatgtactttgagatgataatttactgtgatgttagagaattcaaggttgcagtaaatggcgtacacagcctggagtacaaacacagatttaaagagctcagcagtattgacacgctggaaattaatggagacatccacttactggaagtaaggagctggtagcctacctacacagctgctacaaaaaccaaaatacagaatggcttctgtgatactggccttgctgaaacgcatctcactgtcattctattgtttatattgttaaaatgagcttgtgcaccattaggtcctgctgggtgttctcagtccttgccatgaagtatggtggtgtctagcactgaatggggaaactgggggcagcaacacttatagccagttaaagccactctgccctctctcctactttggctgactcttcaagaatgccattcaacaagtatttatggagtacctactataatacagtagctaacatgtattgagcacagattttttttggtaaaactgtgaggagctaggatatatacttggtgaaacaaaccagtatgttccctgttctcttgagcttcgactcttctgtgcgctactgctgcgcactgctttttctacaggcattacatcaactcctaaggggtcctctgggattagttaagcagctattaaatcacccgaagacactaatttacagaagacacaactccttccccagtgatcactgtcataaccagtgctctaccgtatcccatcactgaggactgatgttgactgacatcattttatcgtaataaacatgtggctctattagctgcaagctttaccaagtaattggcatgacatctgagcacagaaattaaggcaaaaaaccaaagcaaaacaaatacatggtgctgaaattaacttgatgccaagcccaaggcagctgatttctgtgtatttgaacttagggcaaatcagagtctacacagacgcctacagaaagtttcaggaagaggcaagatgcattcaatttgaaagatatttatgggcaacaaagtaaggtcaggattagacttcaggcattcataaggcaggcactatcagaaagtgtacgccaactaagggacccacaaagcaggcagaggtaatgcagaaatctgttttgttcccatgaaatcaccaatcaaggcctccgttcttctaaagattagtccatcatcattagcaactgagatcaaagcactcttccactttacgtgattaaaatcaaacctgtatcagcaagttaaatggttccatttctgtgatttttctattatttgaggggagttggcagaagttccatgtatatgggatctttacaggtcagatcttgttacaggaaatttcaaaggtttgggagtggggagggaaaaaagctcagtcagtgaggatcattttatcacattagactggggcagaactctgccaggatttaggaatattttcagaacagattttagatattatttctatccatatattgaaaagaataccattgtcaatcttatttttttaaaagtactcagtgtagaaatcgctagcccttaattcttttccagcttttcatattaatgtatgcagagtctcaccaagctcaaagacactggttgggggtggagggtgccacagggaaagctgtagaaggcaagaagactcgagaatcccccagagttatttttctccataaagaccatcagagtgcttaactgagctgttggagactgtgaggcatttaggaaaaaaatagcccactcacatcattccttgtaagtcttaagttcattttcattttacgtggaggaaaaaaatttaaaaagctattagtatttattaatgaattttactgagacatttcttagaaatatgcacttctatactagcaagctctgtctctaaaatgcaagttggccttttgcttgccacatttctgcattaaacttctatattagcttcaaaggcttttaaactcaatgcgaacattctacgggatgttcttagatgcctttaaaaagggggcagatctaattttatttgaaccctcactttccaacttcaccatgacccagtactagagattagggcacttcaaagcattgaaaaaaatctactgatacttactttcttagacaagtagttcttagttaaccaccaatggaactgggttcattctgaatcctggaggagcttcctcgtgccacccagtgtttctgggccctctgtgtgagcagccaggtatgagctgttttagaagcagcgtgttgccttcatctctcccgtttcccaaaagaacaaaggataaaggtgacagtcacactcctgggttaaaaaaagcattccagaaccacttctctttatgggcacaacaaagaaacgaaggctgaagttcgcctacccaaaatgaaaagtaggctttacagtcaaaagtacttctgttgattgctaaataacttcattttcttgaaatagagcaactttgagtgaaatctgcaacatggataccatgtatataagatactgctgtacagaagagttaaggcttacagtgcaaatgaggcgtcagctttgggtgctaaaattaacaagtctaatattattaccatcaatcaggaagagaataataaatgtttaaacaaacacagcagtctgtataaaaataccgtgtatcatttactctttctgcagctgtaacgaagtgataaaacatttgtaagtaatccaagtaggtgtattaaggcaccaaaagtaacatggcacccaacacccaaaaataaaaatatgaaatatgagtgtgaactctgagtagagtatgaaacaccacagaaagtcttagaaatagctctggagtggctctcccaggacagtttccagttgctgaatagtcttttggcactgatgttctacttcttcacattcatctaaaaaaaaaaaaaaaaaaaatcaaaattaaaatctgagtcagtccgcctgcctcggttctcattagtttaattcttaatgccttgcactttccggcaatcattcaatcaaaagagtgaaatgaagcacattaacaaagcaggaggcgccacggaccgcctccctccacaccgctccttccgccttcattccttgcccacaggcttgcactggaagctgaataagaatccccaaaactcaaacttcctagggatgccacccctttagtagctcacacctcccccctccaagagctaagaaacaaaggagaatgtacttttgtagcttagataagcaatgaatcagtaaaggactgatctacttgctccaccacccctcccttaataataacatttactgttatttcctgggcctaagacttatgttccagaactgtcacagctccccatgtcacactcactagcttgtgatctttgtcaaataactgaaatcttttaagcctctagtttcttcctttgtaaaacagagataaaatgttgtggtttttaagtgagataatccaagtaaagcacctaacatggagtagtgaatgaacatcggttgctactaaaagtggacatcctaccgcatccttaatgccactaggcatttccatacaatctggggaccaaaacttcaatcatataaatgtatgaggttaattaaaaacactactgtaatctgcttgtatgatcacaaaccaccacaaaagaaaagatcgtgaagattacactgtaaacggactctcaaatgatcaggaggtggtcacttcgcaacttgctccctccacccaactcaaaacaggagctcgagcctgcctgtatttgagactggagctgcctgtatgaggactggatcaactgctagtcacgttatatccaaatctgcattatcattgggcacattttcacagaattttactgaattattccttaattgtttaatggttgggaatagtttgggaattaccttccatcaactctgctaagaaaggaatggattctggtagcaagacaatataattctcctttagtttttcagccagtgctaacacagtaatcaaagcagcaaatcgaacctgaaagggataaaagagcaaagaaataaaaagtagtgttactgtatttattatcttaagagctgtactgacttgagacaagctctaactttttaaacattagttcacacgcgtttattcacttcattatgttcattaagctttcatcttagaataccagtttcaccatttgggagctgtttgtaatatgtgcaaccttataaatagtgttttccaaactgtgtcccaggactgcaaatctttaatgtgaaatgtctttttataatctcttcctttaaaaaaaaccaataaaataaaatgccacatgcaaactcaaaaacacaacacacaaacacacatcactctccaatacacacatacattctacccactcccccaaccacatgatgggcaggacaggtggctgtagagagaagcttataccgcacaaccatagagcagacgagccgacacaaggcgataagggagcaagaaggaatcgatcagagcaagacagaccaccgctgcgcacgcgcagtggcgcaggtgcgctacaacacagaagatg

SEQ ID NO: 352074 - DNA, 2520 bp, Homo sapiens
agaggattcaaagcggtagaacttcggagattggggaagataatcggaagaggtagaagacaccgtccatgacacttcctggggaagcagatgtatgtataaggatccgcccacggacgccagagccgggaaccctgacggcacttagctgctgacaaacaacctgctccgtggagcgcctgaaacaccagtctttggggccagtgcctcagtttcaatccaggtaacctttaaatgaaacttgcctaaaatcttaggtcatacacagaagagactccaatcgacaagaagctggaaaagaatgatgttgtccttaaacaacctacagaatatcatctataacccggtaatcccgtatgttggcaccattcccgatcagctggatcctggaactttgattgtgatatgtgggcatgttcctagtgacgcagacagattccaggtggatctgcagaatggcagcagtgtgaaacctcgagccgatgtggcctttcatttcaatcctcgtttcaaaagggccggctgcattgtttgcaatactttgataaatgaaaaatggggacgggaagagatcacctatgacacgcctttcaaaagagaaaagtcttttgagatcgtgattatggtgctaaaggacaaattccaggtggctgtaaatggaaaacatactctgctctatggccacaggatcggcccagagaaaatagacactctgggcatttatggcaaagtgaatattcactcaattggttttagcttcagctcggacttacaaagtacccaagcatctagtctggaactgacagagataagtagagaaaatgttccaaagtctggcacgccccagcttagcctgccattcgctgcaaggttgaacacccccatgggccctggacgaactgtcgtcgttaaaggagaagtgaatgcaaatgccaaaagctttaatgttgacctactagcaggaaaatcaaaggatattgctctacacttgaacccacgcctgaatattaaagcatttgtaagaaattcttttcttcaggagtcctggggagaagaagagagaaatattacctctttcccatttagtcctgggatgtactttgagatgataatttactgtgatgttagagaattcaaggttgcagtaaatggcgtacacagcctggagtacaaacacagatttaaagagctcagcagtattgacacgctggaaattaatggagacatccacttactggaagtaaggagctggtagcctacctacacagctgctacaaaaaccaaaatacagaatggcttctgtgatactggccttgctgaaacgcatctcactgtcattctattgtttatattgttaaaatgagcttgtgcaccattaggtcctgctgggtgttctcagtccttgccatgaagtatggtggtgtctagcactgaatggggaaactgggggcagcaacacttatagccagttaaagccactctgccctctctcctactttggctgactcttcaagaatgccattcaacaagtatttatggagtacctactataatacagtagctaacatgtattgagcacagattttttttggtaaaactgtgaggagctaggatatatacttggtgaaacaaaccagtatgttccctgttctcttgagcttcgactcttctgtgcgctactgctgcgcactgctttttctacaggcattacatcaactcctaaggggtcctctgggattagttaagcagctattaaatcacccgaagacactaatttacagaagacacaactccttccccagtgatcactgtcataaccagtgctctaccgtatcccatcactgaggactgatgttgactgacatcattttatcgtaataaacatgtggctctattagctgcaagctttaccaagtaattggcatgacatctgagcacagaaattaaggcaaaaaaccaaagcaaaacaaatacatggtgctgaaattaacttgatgccaagcccaaggcagctgatttctgtgtatttgaacttagggcaaatcagagtctacacagacgcctacagaaagtttcaggaagaggcaagatgcattcaatttgaaagatatttatgggcaacaaagtaaggtcaggattagacttcaggcattcataaggcaggcactatcagaaagtgtacgccaactaagggacccacaaagcaggcagaggtaatgcagaaatctgttttgttcccatgaaatcaccaatcaaggcctccgttcttctaaagattagtccatcatcattagcaactgagatcaaagcactcttccactttacgtgattaaaatcaaactgtgttcaaaaaaaaaaaaaatctaaaataaatatataaacaaaaaaacaaaaaaaaaagggggctctacatcgcggggcacacactctcctataagagcccaagatataaacgcgcgacatgaaacgtttaggcctggttgacccaacacaatatatttagtgttcaaaaaaacatat

SEQ ID NO: 352075 - DNA, 1446 bp, Homo sapiens
agaggattcaaagcggtagaacttcggagattggggaagataatcggaagaggtagaagacaccgtccatgacacttcctggggaagcagatgtatgtataaggatccgcccacggacgccagagccgggaaccctgacggcacttagctgctgacaaacaacctgctccgtggagcgcctgaaacaccagtctttggggccagtgcctcagtttcaatccaggtaacctttaaatgaaacttgcctaaaatcttaggtcatacacagaagagactccaatcgacaagaagctggaaaagaatgatgttgtccttaaacaacctacagaatatcatctataacccggtaatcccgtatgttggcaccattcccgatcagctggatcctggaactttgattgtgatatgtgggcatgttcctagtgacgcagacagattccaggtggatctgcagaatggcagcagtgtgaaacctcgagccgatgtggcctttcatttcaatcctcgtttcaaaagggccggctgcattgtttgcaatactttgataaatgaaaaatggggacgggaagagatcacctatgacacgcctttcaaaagagaaaagtcttttgagatcgtgattatggtgctaaaggacaaattccaggtggctgtaaatggaaaacatactctgctctatggccacaggatcggcccagagaaaatagacactctgggcatttatggcaaagtgaatattcactcaattggttttagcttcagctcggacttacaaagtacccaagcatctagtctggaactgacagagataagtagagaaaatgttccaaagtctggcacgccccagcttcctagtaatagaggaggagacatttctaaaatcgcacccagaactgtctacaccaagagcaaagattcgactgtcaatcacactttgacttgcaccaaaataccacctatgaactatgtgtcaaagagcctgccattcgctgcaaggttgaacacccccatgggccctggacgaactgtcgtcgttaaaggagaagtgaatgcaaatgccaaaagctttaatgttgacctactagcaggaaaatcaaaggatattgctctacacttgaacccacgcctgaatattaaagcatttgtaagaaattcttttcttcaggagtcctggggagaagaagagagaaatattacctctttcccatttagtcctgggatgtactttgagatgataatttactgtgatgttagagaattcaaggttgcagtaaatggcgtacacagcctggagtacaaacacagatttaaagagctcagcagtattgacacgctggaaattaatggagacatccacttactggaagtaaggagctggtagcctacctacacagctgctacaaaaaccaaaatacagaatggcttctgtgatactggccttgctga

SEQ ID NO: 352076 - DNA, 1676 bp, Homo sapiens
agaggattcaaagcggtagaacttcggagattggggaagataatcggaagaggtagaagacaccgtccatgacacttcctggggaagcagatgtatgtataaggatccgcccacggacgccagagccgggaaccctgacggcacttagctgctgacaaacaacctgctccgtggagcgcctgaaacaccagtctttggggccagtgcctcagtttcaatccaggtaacctttaaatgaaacttgcctaaaatcttaggtcatacacagaagagactccaatcgacaagaagctggaaaagaatgatgttgtccttaaacaacctacagaatatcatctataacccggtaatcccgtatgttggcaccattcccgatcagctggatcctggaactttgattgtgatatgtgggcatgttcctagtgacgcagacagattccaggtggatctgcagaatggcagcagtgtgaaacctcgagccgatgtggcctttcatttcaatcctcgtttcaaaagggccggctgcattgtttgcaatactttgataaatgaaaaatggggacgggaagagatcacctatgacacgcctttcaaaagagaaaagtcttttgagatcgtgattatggtgctaaaggacaaattccaggtggctgtaaatggaaaacatactctgctctatggccacaggatcggcccagagaaaatagacactctgggcatttatggcaaagtgaatattcactcaattggttttagcttcagctcggacttacaaagtacccaagcatctagtctggaactgacagagataagtagagaaaatgttccaaagtctggcacgccccagcttagcctgccattcgctgcaaggttgaacacccccatgggccctggacgaactgtcgtcgttaaaggagaagtgaatgcaaatgccaaaagctttaatgttgacctactagcaggaaaatcaaaggatattgctctacacttgaacccacgcctgaatattaaagcatttgtaagaaattcttttcttcaggagtcctggggagaagaagagagaaatattacctctttcccatttagtcctgggatgtactttgaggtgaggttacagtttttgaaaatgggacagcaataagaatcctgggagcaggggtgggataagtggtccatttaaatcaagtcctaactcagtatgtggaagttgtgtatgttttttgtttacttggagattgtaatttgcccctttttataacgtgggcaatcagtataaatggcaaagccagtagagtgtcaaattatgcacattggaattgacatttgtcatcatattaaaattcctgtgtagccccatattgataggaatttaaccaggaagcttgtctcaggactggagtcacacatttaatcatataagcagacttgaggactggagaccctaaaactgcttgcttgcactggccatcatctcccatcagggtaggtggcagtcctttctcctaaggagttagtcttgtttatatgtattcaaggaaaaatacatcagtcccttggaactaaaaggcatgcagtcctgagtccccagataggtgaatattgtaacacatacctttcccgaaatatgtttctgggatgctgagcagagaatagtctccttgtgatgtggatgccgg

SEQ ID NO: 352077 - DNA, 953 bp, Homo sapiens
agaggattcaaagcggtagaacttcggagattggggaagataatcggaagaggtagaagacaccgtccatgacacttcctggggaagcagatgtatgtataaggatccgcccacggacgccagagccgggaaccctgacggcacttagctgctgacaaacaacctgctccgtggagcgcctgaaacaccagtctttggggccagtgcctcagtttcaatccaggtaacctttaaatgaaacttgcctaaaatcttaggtcatacacagaagagactccaatcgacaagaagctggaaaagaatgatgttgtccttaaacaacctacagaatatcatctataacccggtaatcccgtatgttggcaccattcccgatcagctggatcctggaactttgattgtgatatgtgggcatgttcctagtgacgcagacagattccaggtggatctgcagaatggcagcagtgtgaaacctcgagccgatgtggcctttcatttcaatcctcgtttcaaaagggccggctgcattgtttgcaatactttgataaatgaaaaatggggacgggaagagatcacctatgacacgcctttcaaaagagaaaagtcttttgagatcgtgattatggtgctaaaggacaaattccaggtggctgtaaatggaaaacatactctgctctatggccacaggatcggcccagagaaaatagacactctgggcatttatggcaaagtgaatattcactcaattggttttagcttcagctcggacttacaaagtacccaagcatctagtctggaactgacagagataagtagagaaaatggacacccccattggcccttgacgaactgtctttgtttaagagaagtggattccaagcgcaaagcttttaaggttaccttcttgccgggaaatttaaggttattggtcttcacttggaccccccccttaa

SEQ ID NO: 352078 - DNA, 954 bp, Homo sapiens
attttgtctttacattttacataatttcagatacattttcctcatatcaaataattcagcattttttagtactaacatcatagtctgtaagccattcaaaaaatgtatttcacaaaataggctatctcatcctttgagctattgagatgaattaatttatactcctcctaagatccctctcgtcactaagattcttttattttatgacaaaaccatagttctagaagcttgtttctcccacctgaaaagactggatttgggacatgatcctgtagaacttcggagccgcccacggacgccagagccgggaaccctgacggcacttagctgctgacaaacaacctgctccgtggagcgcctgaaacaccagtctttggggccagtgcctcagtttcaatccaggtaacctttaaatgaaacttgcctaaaatcttaggtcatacacagaagagactccaatcgacaagaagctggaaaagaatgatgttgtccttaaacaacctacagaatatcatctataacccggtaatcccgtatgttggcaccattcccgatcagctggatcctggaactttgattgtgatatgtgggcatgttcctagtgacgcagacagattccaggtggatctgcagaatggcagcagtgtgaaacctcgagccgatgtggcctttcatttcaatcctcgtttcaaaagggccggctgcattgtttgcaatactttgataaatgaaaaatggggacgggaagagatcacctatgacacgcctttcaaaagagaaaagtcttttgagatcgtgattatggtgctaaaggacaaattccaggtaggttttggagagggacaggttgagtcctcattagtgagcaggagtgcacaggggggcctttcacatttgtgagcccagccttgtatttcctacacctgagatatagtttggctttgtagtttttct

SEQ ID NO: 352079 - DNA, 952 bp, Homo sapiens
tgggaggctgaggcaggagaatggcatgaacccgggaggtggaacttgcagtgagctgtgattgtaccactgcactccagcctgggcaacagagtgagactctatctccaaaaaaaaaaaaaaaaagaattctttaccataagaggagactgaaataatgagaaattgactcctaggaagaaaactctaaataacagcagatatagatctgctgtatctataataagaaatataataatatgattgatgtgtgacaaaatagaattagtataatagcagctaagcagctaccccgggaccgagatatcatacccaaagagccgtctccctcaataccaccaaacacttcctggccgagagactgaaatctgaggggctttggtggagaaggcatgactttgactctcagaatggcagagaagtaagtccctatggacttataccagcagaacttgctggaaatctgtccttttgaagttgccaaaaactaccctctaggatacttgggaaagctcttcacaaggagttgtctcaccagaggcactttgctgccatatgacaacatgaaaaggtttactgagggaagctactagctgctggctgctgtccattgtaggagctaggatggagggaaactgcttatcctgtaagaacctgctaggcaagcacaatgagacctggaagcgaaatgctttcctcctacagtgtatctcctgtgtcctctatgggtaaagcttgacatcatgcatgctttgcaaaggaaaagtatttaaagggcccaggttcattttcacacagccggcaaaaaaggtaaatttggagctgataatcaattaattgataaccagtatatagatggaatggatgtttaattctaaatcctcagaaaacaggaagaagatggcaaatggagagagatctaaggaacctcaaaaataagtaagacacatgc

SEQ ID NO: 352080 - DNA, 317 bp, Homo sapiens
aagagaagtagaaaaactacttctaaatcaacaaatacctgataccttatttaactccttgaaatttttaggttttcctgatggttactttaagtgaaaaatgagcattagatttattaaagttacatgatactatgtttgtttcttactctataagaaatgttgataaatttttagttcctgaactcaataaataaagattgaataccttctccatcagaggcacccttagcagtatatgggcgacaaacttacataggttagtaactgtcataggagcttacaatctagtagaagactgaaacagaatgaataat

SEQ ID NO: 352081 - DNA, 1007 bp, Homo sapiens
ttttgccaaacatgacaaatttatttgaaagtgggcattgcaatgtagaatatggtgtcatagtaaactataggtgtattcagggaggtaaaggaagataaggggtttaaaaggaaaaacgaggaggattacgtaagttgttttgaaacaattatccttggctacaaagatcagtaacaaaggggatggccagtccaaggttggacaggcagttgctgcgcaaatgtccttgaagcatttttttgtgtagttttgtggcctttgtgcaagattcagacaagaagtgcggcggaagcttacacctgcacgtggtgggacagaggcaagaacggatggtctggctgaggctgagagaaccaagctggattaggatcggcttgagggcccggcgtcgtcagtggtgacctctctgacctgaggcaactataatgaatggaaaggaaaccggattgtactttaaatccgagaacattctctactctccagaacaagtcatctgcaggcgcaggcagtggaatccgtgaggccagctgtacggcgggccgccccggacccaggcttggctcctcactttccgctgtttttagtgcggtcctacaagtgccctggtgcagcccgagatcagtaataaatgcagctgaaatacaccggctcccacgttctcgcgggggtacctgccaggccggcgtccacgctcctccccggctcccggccgaccgcgttctcggcggaggcatcaaccacgcgggcacgcaaagccacgagggccgaatctcagcgacttcttcccgctgtgcctcccgcacgctccggggcgggcgccgacagcccccgggtgcagctgcggatgctcggggaagcgtggcctgggcaggtggctccgctgctctctcggagcgccaccagcgagaggggcgacccgagaacaaaggcgggagaggagcggcgaccgcgagcgcgtagaggcggaggccgcgcagtctccgcgcgactgctccgggcagggc

SEQ ID NO: 352082 - DNA, 1367 bp, Homo sapiens
ttttgccaaacatgacaaatttatttgaaagtgggcattgcaatgtagaatatggtgtcatagtaaactataggtgtattcagggaggtaaaggaagataaggggtttaaaaggaaaaacgaggaggattacgtaagttgttttgaaacaattatccttggctacaaagatcagtaacaaaggggatggccagtccaaggttggacaggcagttgctgcgcaaatgtccttgaagcatttttttgtgtagttttgtggcctttgtgcaaggttgtggttttggcagtcttttgtgctaattctttatatcaggcaattattagtgagaactttcccatcacggctttccctgactccattctctgacagctttcacaatctagagacagaatcccggagggagaggagtaccaaatagcttaagagtttttttttgtttttgttttttttcttaaaaaaaaaccgctaaactctaccctgatcagtgaaaagaatttagctgaaagatgcagtttcttcttggcagattcagacaagaagtgcggcggaagcttacacctgcacgtggtgggacagaggcaagaacggatggtctggctgaggctgagagaaccaagctggattaggatcggcttgagggcccggcgtcgtcagtggtgacctctctgacctgaggcaagtgagtcaggctggactgagcgtgttaacgtcggtgtttgtcaatgtgacgcgctagaataatccctttatctttcccaacttttgtttgttgagtgtaggcaactataatgaatggaaaggaaaccggattgtactttaaatccgagaacattctctactctccagaacaagtcatctgcaggcgcaggcagtggaatccgtgaggccagctgtacggcgggccgccccggacccaggcttggctcctcactttccgctgtttttagtgcggtcctacaagtgccctggtgcagcccgagatcagtaataaatgcagctgaaatacaccggctcccacgttctcgcgggggtacctgccaggccggcgtccacgctcctccccggctcccggccgaccgcgttctcggcggaggcatcaaccacgcgggcacgcaaagccacgagggccgaatctcagcgacttcttcccgctgtgcctcccgcacgctccggggcgggcgccgacagcccccgggtgcagctgcggatgctcggggaagcgtggcctgggcaggtggctccgctgctctctcggagcgccaccagcgagaggggcgacccgagaacaaaggcgggagaggagcggcgaccgcgagcgcgtagaggcggaggccgcgcagtctccgcgcgactgctccgggcagggc

SEQ ID NO: 352083 - DNA, 1585 bp, Homo sapiens
cacagatggagggtaggctggtgggtgggggtggttcgttctctagccggggcagacacccagctggctgggtccttcctcagccttgcctcctcctgtccccaaccctttcctttcctcctgcttgcggactgctggtcccctctccttccctccttccagctgtttctagttaccacctacccctggccgtggactgatcagaccagcattcaaaataaaagtttgttccaagttgacagtgtggtgctccctgcccagcccctccaggtggaggtgctgccacgggaacgcagttgctctgcctgccctggggcccctggcgacagctgggagcagggcagtgctgtgaggagcccagctttcccagtcaggcaggcatggcttccgtgttcaggctccctcaccagctggtgacacgggacaagcttacaaaccttctctgaacctcagttttctcatttacaagaggcaaagccatccatcaccttgtgtggattcagagaatgtgaggccctggggtgtcctacacaagggaaaggcttgctcagtgagcggtctgcacaccgttagccaccctgccacctctgtgccctgggcaggctccaaaggaaagctctggctgggactgccaggagtctcacacgctcctgttgacattcccagcagccgcccctgaggtcgatgtttgttctgtttttctttttcttttttgagacggagtctcgctgtgttgccaggctggagtgcagtggtgtgatctctgctcactgcaacctccgcctgccagtttcaagtgattctctgcctcagccttctgagtagctgggactacaggtgcacgccaccacgcccagctaactttttgtattttagtagagacagggtttcgccatgtcggccagggtggtcttgatctcctgacctcatgatccacccgcctcagcctcccaaagtgctgggattacaggtatgagccaccgcaccgggcctgttctatttttctagttaagggaactgaagctcagagaggtgtcaccagcaggtgttcattcccatgccagccttgccccccggcttttcccaggcaggctcctgcgtgcccactggctccagcctggtcctctgtctcttggctgcttcactcctgctctttgtcccgactctggccctgcttacaggggccactacctgctggtgcctccataacaagcgtctggcgttgagacccctggcatggcaggggctttggggtctggtttccacaaggcttagccatggcagaacctcgttttattttaactctttgcccctacaaacaaacagcagtacttgccagaaccattcttgggattcaggagctcgggcgactgccttggcctctggccgcacccaggagggtggggttggatctgtgtagttgccaggcccacacctgccagcagggggctgactggatccatgctttactgtgtttaatgggggtaacaggggtccctacagccctcccagctaaacatttggaacaaaacaccagcccttttgtagtggatgcagaataaaattgttaatccaatcacctcca

SEQ ID NO: 352084 - DNA, 1490 bp, Homo sapiens
gctcgggccctgaccctgacccttgccaccaacccaaagacagctggtgggtttccccttggagacaatcctgcgtttgcctgggccggccctggcgtggactgatcagaccagcattcaaaataaaagtttgttccaagttgacagtgtggtgctccctgcccagcccctccaggtggaggtgctgccacgggaacgcagttgctctgcctgccctggggcccctggcgacagctgggagcagggcagtgctgtgaggagcccagctttcccagtcaggcaggcatggcttccgtgttcaggctccctcaccagctggtgacacgggacaagcttacaaaccttctctgaacctcagttttctcatttacaagaggcaaagccatccatcaccttgtgtggattcagagaatgtgaggccctggggtgtcctacacaagggaaaggcttgctcagtgagcggtctgcacaccgttagccaccctgccacctctgtgccctgggcaggctccaaaggaaagctctggctgggactgccaggagtctcacacgctcctgttgacattcccagcagccgcccctgaggtcgatgtttgttctgtttttctttttcttttttgagacggagtctcgctgtgttgccaggctggagtgcagtggtgtgatctctgctcactgcaacctccgcctgccagtttcaagtgattctctgcctcagccttctgagtagctgggactacaggtgcacgccaccacgcccagctaactttttgtattttagtagagacagggtttcgccatgtcggccagggtggtcttgatctcctgacctcatgatccacccgcctcagcctcccaaagtgctgggattacaggtatgagccaccgcaccgggcctgttctatttttctagttaagggaactgaagctcagagaggtgtcaccagcaggtgttcattcccatgccagccttgccccccggcttttcccaggcaggctcctgcgtgcccactggctccagcctggtcctctgtctcttggctgcttcactcctgctctttgtcccgactctggccctgcttacaggggccactacctgctggtgcctccataacaagcgtctggcgttgagacccctggcatggcaggggctttggggtctggtttccacaaggcttagccatggcagaacctcgttttattttaactctttgcccctacaaacaaacagcagtacttgccagaaccattcttgggattcaggagctcgggcgactgccttggcctctggccgcacccaggagggtggggttggatctgtgtagttgccaggcccacacctgccagcagggggctgactggatccatgctttactgtgtttaatgggggtaacaggggtccctacagccctcccagctaaacatttggaacaaaacaccagcccttttgtagtggatgcagaataaaattgttaatccaatcacctcca

SEQ ID NO: 352085 - DNA, 1164 bp, Homo sapiens
cacagatggagggtaggctggtgggtgggggtggttcgttctctagccggggcagacacccagctggctgggtccttcctcagccttgcctcctcctgtccccaaccctttcctttcctcctgcttgcggactgctggtcccctctccttccctccttccagctgtttctagttaccacctacccctggccgtggactgatcagaccagcattcaaaataaaagtttgttccaagttgacagtgtggtgctccctgcccagcccctccaggtggaggtgctgccacgggaacgcagttgctctgcctgccctggggcccctggcgacagctgggagcagggcagtgctgtgaggagcccagctttcccagtcaggcaggcatggcttccgtgttcaggctccctcaccagctggtgacacgggacaagcttacaaaccttctctgaacctcagttttctcatttacaagaggcaaagccatccatcaccttgtgtggattcagagaatgtgaggccctggggtgtcctacacaagggaaaggcttgctcagtgagcggtctgcacaccgttagccaccctgccacctctgtgccctgggcaggctccaaaggaaagctctggctgggactgccaggagtctcacacgctcctgttgacattcccagcagccgcccctgaggtcgatgtttgttctgtttttctttttcttttttgagacggagtctcgctgtgttgccaggctggagtgcagtggtgtgatctctgctcactgcaacctccgcctgccagtttcaagtgattctctgcctcagccttctgagtagctgggactacaggtgcacgccaccacgcccagctaactttttgtattttagtagagacagggtttcgccatgtcggccagggtggtcttgatctcctgacctcatgatccacccgcctcagcctcccaaagtgctgggattacaggtatgagccaccgcaccgggcctgttctatttttctagttaagggaactgaagctcagagaggtgtcaccagcaggtgttcattcccatgcagctgccccggttccccgcggccgcgcactggcagcggccgccaggggcccccgctcggccgccgccgaacagggcaccggggccaaagtgcgggcccgcgcg

SEQ ID NO: 352086 - DNA, 1692 bp, Homo sapiens
  misc_feature (1605)..(1605): n is a, c, g, or t
  misc_feature (1613)..(1614): n is a, c, g, or t
cacagatggagggtaggctggtgggtgggggtggttcgttctctagccggggcagacacccagctggctgggtccttcctcagccttgcctcctcctgtccccaaccctttcctttcctcctgcttgcggactgctggtcccctctccttccctccttccagctgtttctagttaccacctacccctggccgtggactgatcagaccagcattcaaaataaaagtttgttccaagttgacagtgtggtgctccctgcccagcccctccaggtggaggtgctgccacgggaacgcagttgctctgcctgccctggggcccctggcgacagctgggagcagggcagtgctgtgaggagcccagctttcccagtcaggcaggcatggcttccgtgttcaggctccctcaccagctggtgacacgggacaagcttacaaaccttctctgaacctcagttttctcatttacaagaggcaaagccatccatcaccttgtgtggattcagagaatgtgaggccctggggtgtcctacacaagggaaaggcttgctcagtgagcggtctgcacaccgttagccaccctgccacctctgtgccctgggcaggctccaaaggaaagctctggctgggactgccaggagtctcacacgctcctgttgacattcccagcagccgcccctgaggtcgatgtttgttctgtttttctttttcttttttgagacggagtctcgctgtgttgccaggctggagtgcagtggtgtgatctctgctcactgcaacctccgcctgccagtttcaagtgattctctgcctcagccttctgagtagctgggactacaggtgcacgccaccacgcccagctaactttttgtattttagtagagacagggtttcgccatgtcggccagggtggtcttgatctcctgacctcatgatccacccgcctcagcctcccaaagtgctgggattacaggtatgagccaccgcaccgggcctgttctatttttctagttaagggaactgaagctcagagaggtgtcaccagcaggtgttcattcccatgccagccttgccccccggcttttcccaggcaggctcctgcgtgcccactggctccagcctggtcctctgtctcttggctgcttcactcctgctctttgtcccgactctggccctgcttacaggggccactacctgctggtgcctccataacaagcgtctggcgttgagacccctggcatggcaggggctttggggtctggtttccacaaggcttagccatggcagaacctcgttttattttaactctttgcccctacaaacaaacagcagtacttgccagaaccattcttgggattcaggagctcgggcgactgccttggcctctggccgcacccaggagggtggggttggatctgtgtagttgccaggcccacacctgccagcagggggctgactggatccatgctttactgtgtttaatgggggtaacaggggtccctacagccctcccagctaaacatttggaacaaaacaccagcccttttgtagtggatgcagaataaaattgttaatccaatcacctccacacaagtccaatgccatcanatgcaaannacacgaggggattgccgcgccgggggaaaccagtgggtgaaaaccgccaggtgcaacagaggttcctcgcgccgtttc

SEQ ID NO: 352087 - DNA, 2488 bp, Homo sapiens
agcgggcgctgcgcggcttcgcgtcctggctgagatggcggcgcccgggatcctgtgtagcggctgcagagggtgccgccgccctaggcgaagtagggccgtcctgagcgaaagaaccgcccccagcaggagcaccaccacggcttagcaaagaatcccagaccccgcccgggaaggcagccgcaccatggagtcttccagttcatctaactcttatttctccgttggcccaaccagtcccagcgctgtcgtgctcctctactcgaaggagctcaaaaagtgggatgagtttgaagatattttagaagagaggaggcatgtcagtgacttgaaatttgcaatgaaatgctacacacctcttgtctataagggaattactccatgtaaaccaattgatattaaatgtagtgttctcaattctgaggagattcattatgtcattaaacagctttccaaggaatcccttcaatctgtggatgtcctccgagaggaagtgagtgagatcttagatgaaatgagtcacaaactgcgtcttggagccattcggttttgtgccttcaccctgagcaaagtatttaaacaaattttctcgaaggtgtgtgtaaatgaagaaggtattcagaaactacaaagagccatccaggagcatcctgttgttctgctgcctagtcatcgaagttacattgacttcctcatgttgtcttttcttctatacaattatgatttgcctgtgccagttatagcagcaggaatggacttcctgggaatgaaaatggttggtgagctgctacgaatgtcgggtgcctttttcatgcggcgtacctttggtggcaataaactctactgggctgtattctctgaatatgtaaaaactatgttacggaatggttatgctcctgttgaatttttcctcgaagggacaagaagccgctctgccaagacattgactcctaaatttggtcttctgaatattgtgatggagccattttttaaaagagaagtttttgatacctaccttgtcccaattagtatcagttatgataagatcttggaagaaactctttatgtgtatgagcttctaggggttcctaaaccaaaagaatctacaactgggttgctgaaagccagaaagattctctctgaaaattttggaagcatccatgtgtactttggagatcctgtgtcacttcgatctttggcagctgggaggatgagtcggagctcatataacttggttccaagatacattcctcagaaacagtctgaggacatgcatgcctttgtcactgaagttgcctacaaaatggagcttctgcaaattgaaaacatggttttgagcccctggaccctaatagttgctgttctgcttcagaaccggccatccatggactttgatgctctggtggaaaagactttatggctaaaaggcttaacccaggcatttggagggtttctcatttggcctgataataaacctgctgaagaagttgtcccggccagcattcttctgcattccaacattgccagccttgtcaaagaccaggtgattctgaaagtggactccggagactcggaagtggtcgatgggcttatgctccagcacatcactctcctcatgtgctcagcttataggaaccagctgctcaacatttttgtgcgcccatccttagtagcagtagcattgcagatgacaccagggttcaggaaagaggatgtctacagttgctttcgcttcctacgtgatgtttttgcagatgagttcatcttccttccaggaaacacactaaaggactttgaagaaggctgttacctgctttgtaaaagtgaagccatacaagtgactacgaaagacatcctagttacagagaaaggaaatactgtgttagaatttttagtaggactctttaaaccttttgtggaaagctatcagataatttgcaagtaccttttgagtgaagaagaggaccacttcagtgaggaacagtacttggctgcagtcagaaaattcacaagtcagcttctcgatcaaggtacctctcaatgttatgatgtattatcttctgatgtgcagaaaaacgccttagcagcctgtgtgaggctcggagtagtggagaagaagaagataaataataactgtatatttaatgtgaatgaacctgccacaaccaaattagaagaaatgcttggttgtaagacaccaataggaaaaccagccactgcaaaactttaataatcaacaaatagttatggaaaattcggtcacgtaattactctcatcgaaggactcattacaacaaacagggaagtaaaggaagagacacatcctctcatactccctgagactctgagaacagtggacgcagagggaagagatgatcattggaagcaatcagtttactcttccccaccacagtggttaaaaggcgtttgtatctgacactatgtgtgtgttttaaaataaacttttggaaacatgtttggaaaagca

SEQ ID NO: 352088 - DNA, 2834 bp, Homo sapiens
gtaaagacaaaaaactatatgtatggttttgtggattatgtgtgttttgctaaaggaaaaaaccatccaggtcacggggcaccaaatttgagacaaatagtcggattagaaataaagcatctcattttgagtagagagcaagggaagtggttcttagatggtgatctgggattaggccctcaagacccttataaaaataagccaggtgtggcggtgggtgcctgtaatcccagctactcaggaggctgaggcaggagaattgctggaacccaggaggcagaggttgcagtgagccgagactgtgccactgcactccagcctgggagacaagagcgagactccctctcaaaaaaaaaaaaaaaaaaagcaaatactctattcccacatctctcagtgtccattttgattcttttaaatgcatttcatttccatctataagaagcaactatattctcttcaggggaaaaaactcaagtgtgtgatgctttgtggcttactaaatatggtggcagatagttgcagaatttgtccaaatataaattgttaatgactacttccccccccgccctcaatctgtggtcagatttttcttattagtcctaggggacaagcatgggtgtttgatttcagaaatcagtacctggcgagatttttgtctcaaaacgactatttgaatttcaagaactgtgctgcgaagacactctgagaacatttgcaagtcaggggcattttccttgacccttgactgatgctatgcggagactgatacattttcttaatggacaatgttcaagccaggtacccatgcttgatctgtcttcacaccagacctcctcatattaaaaggaaaaataagaaaaaaaatgtaagcttctatacaattatgatttgcctgtgccagttatagcagcaggaatggacttcctgggaatgaaaatggttggtgagctgctacgaatgtcgggtgcctttttcatgcggcgtacctttggtggcaataaactctactgggctgtattctctgaatatgtaaaaactatgttacggaatggttatgctcctgttgaatttttcctcgaagggacaagaagccgctctgccaagacattgactcctaaatttggtcttctgaatattgtgatggagccattttttaaaagagaagtttttgatacctaccttgtcccaattagtatcagttatgataagatcttggaagaaactctttatgtgtatgagcttctaggggttcctaaaccaaaagaatctacaactgggttgctgaaagccagaaagattctctctgaaaattttggaagcatccatgtgtactttggagatcctgtgtcacttcgatctttggcagctgggaggatgagtcggagctcatataacttggttccaagatacattcctcagaaacagtctgaggacatgcatgcctttgtcactgaagttgcctacaaaatggagcttctgcaaattgaaaacatggttttgagcccctggaccctaatagttgctgttctgcttcagaaccggccatccatggactttgatgctctggtggaaaagactttatggctaaaaggcttaacccaggcatttggagggtttctcatttggcctgataataaacctgctgaagaagttgtcccggccagcattcttctgcattccaacattgccagccttgtcaaagaccaggtgattctgaaagtggactccggagactcggaagtggtcgatgggcttatgctccagcacatcactctcctcatgtgctcagcttataggaaccagctgctcaacatttttgtgcgcccatccttagtagcagtagcattgcagatgacaccagggttcaggaaagaggatgtctacagttgctttcgcttcctacgtgatgtttttgcagatgagttcatcttccttccaggaaacacactaaaggactttgaagaaggctgttacctgctttgtaaaagtgaagccatacaagtgactacgaaagacatcctagttacagagaaaggaaatactgtgttagaatttttagtaggactctttaaaccttttgtggaaagctatcagataatttgcaagtaccttttgagtgaagaagaggaccacttcagtgaggaacagtacttggctgcagtcagaaaattcacaagtcagcttctcgatcaaggtacctctcaatgttatgatgtattatcttctgatgtgcagaaaaacgccttagcagcctgtgtgaggctcggagtagtggagaagaagaagataaataataactgtatatttaatgtgaatgaacctgccacaaccaaattagaagaaatgcttggttgtaagacaccaataggaaaaccagccactgcaaaactttaataatcaacaaatagttatggaaaattcggtcacgtaattactctcatcgaaggactcattacaacaaacagggaagtaaaggaagagacacatcctctcatactccctgagactctgagaacagtggacgcagagggaagagatgatcattggaagcaatcagtttactcttccccaccacagtggttaaaaggcgtttgtatctgacactatgtgtgtgttttaaaataaacttttggaaacatgtttggaaaagcaaagctcagctcatttcactaacacttttcagcttactatatgtattaaacttttatgttgacttttgaattaaagtatgacaacactgaaagctctggatattaaaagaaaatgaaaagggcatatctacgttacttgtagcttgctttaattaaagttgcctcaaacaagtaaaaaaaaaa

SEQ ID NO: 352089 - DNA, 464 bp, Homo sapiens
  misc_feature (8)..(8): n is a, c, g, or t
  misc_feature (16)..(16): n is a, c, g, or t
  misc_feature (456)..(456): n is a, c, g, or t
cgctagantaccccgnataacataacttggttccaagatacattcctcagaaacagtctgaggacatgcatgcctttgtcactgaagttgcctacaaaatggagcttctgcaaattgaaaacatggttttgagcccctggaccctaatagttgctgttctgcttcagaaccggccatccatggactttgatgctctggtggaaaagactttatggctaaaaggcttaacccaggcatttggagggtttctcatttggcctgataataaacctgctgaagaagttgtcccggccagcattcttctgcattccaacattgccagccttgtcaaagaccaggtgattctgaaagtggactccggagactcggaagtggtcgatgggcttatgctccagcacatcactctcctcatgtgctcagcttataggaaccaagttatgttataccgggatcctntaggcacc

SEQ ID NO: 352090 - DNA, 366 bp, Homo sapiens
tactactactaaattcgcggccgcgtcgactatgaaacgaaacaccccccgtgttaataacttggtctgaaatctgtttttatgagccgggccccctgtgcctctagtatacttgtattgactctcatagttacccttttagttttactgtgttctgtgaaaatttgtaattggttgagaatcactgtgggcgtccattcttattcaactaaatctccacaggttttttgagctggtgtggattagtttaactcttgtattcaaccattagtgctaccaccttctcacattacaatacaattactggaagcaagtactgcatttcctatgcaacaaaaaaggaaaaataaaaaattgctaatgcta

SEQ ID NO: 352091 - DNA, 504 bp, Homo sapiens
ctaagtaacagaactgtaatttgttgctctgtgctcttccttttagatacattcctcagaaacagtctgaggacatgcatgcctttgtcactgaagttgcctacaaaatggagcttctgcaaattgaaaacatggttttgagcccctggaccctaatagttgctgttctgcttcagaaccggccatccatggactttgatgctctggtggaaaagactttatggctaaaaggcttaacccaggcatttggagggtttctcatttggcctggtatgtaggtaggacatatgtgttgagaatgcttgcttaatttggaagagttaaaacctggacctgaaaaatctatagaggacttgagcaaaggattgctcagaaagagaaaggacaggccgggcgcggtggttcacacctgtaatcccagcactttgggaggccaaggcaggtggatcacgaggtcaggagattgagaccatcctggctaacgcggtgaaaccccgtctctac

SEQ ID NO: 352092 - DNA, 4390 bp, Homo sapiens
ttttttttgtaagtatttaaatacaattatttttttctctcaatggtatagcatattcctatgcttgagaagtataggtctactgaaaaaccattgtaaatggacgttacaggtatgctgtatttttgaaggtattttgttgtattaagtttgatgaagctaaaattagggaactctgaacagatttgcaggaaaaaatgttttaaaggctttaaaacattagggaggcagtctagggtgataacgaacaggggttaagtattaaatacacgaagttacatttttgttcatgtttcattgtccagaaagcagcaggaaactattcagttgtgatcaagcaggaaaaaagaaacaccaacagttgccagtgtttttgctttttagcttaaaagcatagtgaagatgcttgaggaagactttgctacctggggtgtgtagacagacagactgagagctatcagcatttgaaggcccagcccttgactctgagacacatttgaattttttctttcccatcaaatggcattaacaagattgggcaaagatgagtccctcaaatttctgtgttttttgtttgtttgtttgtttgttttttctttgggaactgaagtcagaggcacgaacactaactcttagcatttttctgtagactttttcttctggcccttgtccctgccagcaaaacgccccttttctgatcattcgtgcgcagagggcctcccagtaatgccacgctctccatgctagagagccttctctttcctctgaggtttgaactgatgttctgtgtcttcacaccctggcatgacagttacgtgtggtcagcccgctccccaggcccgtccctgccgccgccaggtgtgggctctaggcaggccgacaaggttacacctcccagagcttgtgatcttcattttctgacagtcaaagtgtgaaggaacccagacttccccgagccacggtgttcagtcagcccacaggaatatgcaagacccatctccaaaagtttgtctttgattttttccaagcccttagccccataagctttgaatcctgtagttacagtggcataaaggactgacaaaacctggataaggaaaaaccttttttttctatgaattttttttgttttttaggggaaagggattctaagaatgtcatttaatgtactttgcatcatgtctctagaaatatctttgtccatagtggtggtggagtctctctctctctctctctttttgtttgcttctgttttctttcttgtcttcattctttcttttcttttttatttctggtagcaggcctccatagaacaaatctaaaacacaaccaccatagtaatgtaaggagagcttcagtggcacctcaaaacccacccttcgagatctgtccaaagacagtctcagaaagctgcactgcccaccggctcagctttcattcaaaaaggcttccaaggccaattctgtcttgaagtcaatgcatgtatttactgtttgacagtaaacccgctctgccttctccacgtccaaggctgtgcattcgtctaattagcgtcgtgtatgttttccttttattttttccaataaaaaagcagtgggatgaaaattgctttgatatatagcaggtaacattgaagctattccatagcacttaactgtagtgaatactgtgtcaccaattttgaaatcaatttaatgtttaatgcaaatccattacatggtgctattataggctgacaaaatgatttacacaaatgtgacaacttgggctcaattcactctgctttccaacagtgtaaatgcatagcagtgtttatctgcatgagaactatgcactaatctatctgaagaaaaaaactatatcaactttggtatctactttccgtttacttcaatccttgcctttttggtcattgttataatgccagctttaggacagaaagaattataagaaaaccagcataatacctgatatattaaaatgtagtgcctgtgaaatctgtattatattgctcttctgaagtaagatttttctacaccggtagccttcgctgtctgtcagtcaggaccttctggtataggtgatgtaaaataaccgtacaatattaatgcatgcgattccataatgcttagtgaactgtatgaatattactcaaagttatgttagtctttttttccgacttggttcttgtcagctaggtttaaaggtatttcactgagaacgcaaattctgtcttttcttgatttcggctgttttcagtattttggaggtatacatttacttaaattcagtattactcgtgttttgtttttgtttttgttttttgttttctttttcctaggggacaagcatgggtgtttgatttcagaaatcagtacctggcgagatttttgtctcaaaacgactatttgaatttcaagaactgtgctgcgaagacactctgagaacatttgcaagtcaggggcattttccttgacccttgactgatgctatgcggagactgatacattttcttaatggacaatgttcaagccaggtacccatgcttgatctgtcttcacaccagacctcctcatattaaaaggaaaaataagaaaaaaaatgtaagcttctatacaattatgatttgcctgtgccagttatagcagcaggaatggacttcctgggaatgaaaatggttggtgagctgctacgaatgtcgggtgcctttttcatgcggcgtacctttggtggcaataaactctactgggctgtattctctgaatatgtaaaaactatgttacggaatggttatgctcctgttgaatttttcctcgaagggacaagaagccgctctgccaagacattgactcctaaatttggtcttctgaatattgtgatggagccattttttaaaagagaagtttttgatacctaccttgtcccaattagtatcagttatgataagatcttggaagaaactctttatgtgtatgagcttctaggggttcctaaaccaaaagaatctacaactgggttgctgaaagccagaaagattctctctgaaaattttggaagcatccatgtgtactttggagatcctgtgtcacttcgatctttggcagctgggaggatgagtcggagctcatataacttggttccaagatacattcctcagaaacagtctgaggacatgcatgcctttgtcactgaagttgcctacaaaatggagcttctgcaaattgaaaacatggttttgagcccctggaccctaatagttgctgttctgcttcagaaccggccatccatggactttgatgctctggtggaaaagactttatggctaaaaggcttaacccaggcatttggagggtttctcatttggcctgataataaacctgctgaagaagttgtcccggccagcattcttctgcattccaacattgccagccttgtcaaagaccaggtgattctgaaagtggactccggagactcggaagtggtcgatgggcttatgctccagcacatcactctcctcatgtgctcagcttataggaaccagctgctcaacatttttgtgcgcccatccttagtagcagtagcattgcagatgacaccagggttcaggaaagaggatgtctacagttgctttcgcttcctacgtgatgtttttgcagatgagttcatcttccttccaggaaacacactaaaggactttgaagaaggctgttacctgctttgtaaaagtgaagccatacaagtgactacgaaagacatcctagttacagagaaaggaaatactgtgttagaatttttagtaggactctttaaaccttttgtggaaagctatcagataatttgcaagtaccttttgagtgaagaagaggaccacttcagtgaggaacagtacttggctgcagtcagaaaattcacaagtcagcttctcgatcaaggtacctctcaatgttatgatgtattatcttctgatgtgcagaaaaacgccttagcagcctgtgtgaggctcggagtagtggagaagaagaagataaataataactgtatatttaatgtgaatgaacctgccacaaccaaattagaagaaatgcttggttgtaagacaccaataggaaaaccagccactgcaaaactttaataatcaacaaatagttatggaaaattcggtcacgtaattactctcatcgaaggactcattacaacaaacagggaagtaaaggaagagacacatcctctcatactccctgagactctgagaacagtggacgcagagggaagagatgatcattggaagcaatcagtttactcttccccaccacagtggttaaaaggcgtttgtatctgacactatgtgtgtgttttaaaataaacttttggaaacatgtttggaaaagca

SEQ ID NO: 352093 - DNA, 4072 bp, Homo sapiens
gggccggctactactaccagcaggaaaaaagaaacaccaacagttgccagtgtttttgctttttagcttaaaagcatagtgaagatgcttgaggaagactttgctacctggggtgtgtagacagacagactgagagctatcagcatttgaaggcccagcccttgactctgagacacatttgaattttttctttcccatcaaatggcattaacaagattgggcaaagatgagtccctcaaatttctgtgttttttgtttgtttgtttgtttgttttttctttgggaactgaagtcagaggcacgaacactaactcttagcatttttctgtagactttttcttctggcccttgtccctgccagcaaaacgccccttttctgatcattcgtgcgcagagggcctcccagtaatgccacgctctccatgctagagagccttctctttcctctgaggtttgaactgatgttctgtgtcttcacaccctggcatgacagttacgtgtggtcagcccgctccccaggcccgtccctgccgccgccaggtgtgggctctaggcaggccgacaaggttacacctcccagagcttgtgatcttcattttctgacagtcaaagtgtgaaggaacccagacttccccgagccacggtgttcagtcagcccacaggaatatgcaagacccatctccaaaagtttgtctttgattttttccaagcccttagccccataagctttgaatcctgtagttacagtggcataaaggactgacaaaacctggataaggaaaaaccttttttttctatgaattttttttgttttttaggggaaagggattctaagaatgtcatttaatgtactttgcatcatgtctctagaaatatctttgtccatagtggtggtggagtctctctctctctctctctttttgtttgcttctgttttctttcttgtcttcattctttcttttcttttttatttctggtagcaggcctccatagaacaaatctaaaacacaaccaccatagtaatgtaaggagagcttcagtggcacctcaaaacccacccttcgagatctgtccaaagacagtctcagaaagctgcactgcccaccggctcagctttcattcaaaaaggcttccaaggccaattctgtcttgaagtcaatgcatgtatttactgtttgacagtaaacccgctctgccttctccacgtccaaggctgtgcattcgtctaattagcgtcgtgtatgttttccttttattttttccaataaaaaagcagtgggatgaaaattgctttgatatatagcaggtaacattgaagctattccatagcacttaactgtagtgaatactgtgtcaccaattttgaaatcaatttaatgtttaatgcaaatccattacatggtgctattataggctgacaaaatgatttacacaaatgtgacaacttgggctcaattcactctgctttccaacagtgtaaatgcatagcagtgtttatctgcatgagaactatgcactaatctatctgaagaaaaaaactatatcaactttggtatctactttccgtttacttcaatccttgcctttttggtcattgttataatgccagctttaggacagaaagaattataagaaaaccagcataatacctgatatattaaaatgtagtgcctgtgaaatctgtattatattgctcttctgaagtaagatttttctacaccggtagccttcgctgtctgtcagtcaggaccttctggtataggtgatgtaaaataaccgtacaatattaatgcatgcgattccataatgcttagtgaactgtatgaatattactcaaagttatgttagtctttttttccgacttggttcttgtcagctaggtttaaaggtatttcactgagaacgcaaattctgtcttttcttgatttcggctgttttcagtattttggaggtatacatttacttaaattcagtattactcgtgttttgtttttgtttttgttttttgttttctttttcctaggggacaagcatgggtgtttgatttcagaaatcagtacctggcgagatttttgtctcaaaacgactatttgaatttcaagaactgtgctgcgaagacactctgagaacatttgcaagtcaggggcattttccttgacccttgactgatgctatgcggagactgatacattttcttaatggacaatgttcaagccaggtacccatgcttgatctgtcttcacaccagacctcctcatattaaaaggaaaaataagaaaaaaaatgtaagcttctatacaattatgatttgcctgtgccagttatagcagcaggaatggacttcctgggaatgaaaatggttggtgagctgctacgaatgtcgggtgcctttttcatgcggcgtacctttggtggcaataaactctactgggctgtattctctgaatatgtaaaaactatgttacggaatggttatgctcctgttgaatttttcctcgaagggacaagaagccgctctgccaagacattgactcctaaatttggtcttctgaatattgtgatggagccattttttaaaagagaagtttttgatacctaccttgtcccaattagtatcagttatgataagatcttggaagaaactctttatgtgtatgagcttctaggggttcctaaaccaaaagaatctacaactgggttgctgaaagccagaaagattctctctgaaaattttggaagcatccatgtgtactttggagatcctgtgtcacttcgatctttggcagctgggaggatgagtcggagctcatataacttggttccaagatacattcctcagaaacagtctgaggacatgcatgcctttgtcactgaagttgcctacaaaatggagcttctgcaaattgaaaacatggttttgagcccctggaccctaatagttgctgttctgcttcagaaccggccatccatggactttgatgctctggtggaaaagactttatggctaaaaggcttaacccaggcatttggagggtttctcatttggcctgataataaacctgctgaagaagttgtcccggccagcattcttctgcattccaacattgccagccttgtcaaagaccaggtgattctgaaagtggactccggagactcggaagtggtcgatgggcttatgctccagcacatcactctcctcatgtgctcagcttataggaaccagctgctcaacatttttgtgcgcccatccttagtagcagtagcattgcagatgacaccagggttcaggaaagaggatgtctacagttgctttcgcttcctacgtgatgtttttgcagatgagttcatcttccttccaggaaacacactaaaggactttgaagaaggctgttacctgctttgtaaaagtgaagccatacaagtgactacgaaagacatcctagttacagagaaaggaaatactgtgttagaatttttagtaggactctttaaaccttttgtggaaagctatcagataatttgcaagtaccttttgagtgaagaagaggaccacttcagtgaggaacagtacttggctgcagtcagaaaattcacaagtcagcttctcgatcaaggtacctctcaatgttatgatgtattatcttctgatgtgcagaaaaacgccttagcagcctgtgtgaggctcggagtagtggagaagaagaagataaataataactgtatatttaatgtgaatgaacctgccacaaccaaattagaagaaatgcttggttgtaagacaccaataggaaaaccagccactgcaaaactttaataatcaacaaatagttatggaaaattcggtcacgtaattactctcatcgaaggactcattacaacaaacagggaagtaaaggaagagacacatcctctcatactccctgagactctgagaacagtggacgcagagggaagagatgatcattggaagcaatcagtttactcttccccaccacagtggttaaaaggcgtttgtatctgacactatgtgtgtgttttaaaataaacttttggaaacatgtttggaaaagca

SEQ ID NO: 352094 - DNA, 1669 bp, Homo sapiens
  misc_feature (1661)..(1661): n is a, c, g, or t
agcgggcgctgcgcggcttcgcgtcctggctgagatggcggcgcccgggatcctgtgtagcggctgcagagggtgccgccgccctaggcgaagtagggccgtcctgagcgaaagaaccgcccccagcaggagcaccaccacggcttagcaaagaatcccagaccccgcccgggaaggcagccgcaccatggagtcttccagttcatctaactcttatttctccgttggcccaaccagtcccagcgctgtcgtgctcctctactcgaaggagctcaaaaagtgggatgagtttgaagatattttagaagagaggaggcatgtcagtgacttgaaatttgcaatgaaatgctacacacctcttgtctataagggaattactccatgtaaaccaattgatattaaatgtagtgttctcaattctgaggagattcattatgtcattaaacagctttccaaggaatcccttcaatctgtggatgtcctccgagaggaagtgagtgagatcttagatgaaatgagtcacaaactgcgtcttggagccattcggttttgtgccttcaccctgagcaaagtatttaaacaaattttctcgaaggtgtgtgtaaatgaagaaggtattcagaaactacaaagagccatccaggagcatcctgttgttctgctgcctagtcatcgaagttacattgacttcctcatgttgtcttttcttctatacaattatgatttgcctgtgccagttatagcagcaggaatggacttcctgggaatgaaaatggttggtgagctgctacgaatgtcgggtgcctttttcatgcggcgtacctttggtggcaataaactctactgggctgtattctctgaatatgtaaaaactatgttacggaatggttatgctcctgttgaatttttcctcgaagggacaagaagccgctctgccaagacattgactcctaaatttggtcttctgaatattgtgatggagccattttttaaaagagaagtttttgatacctaccttgtcccaattagtatcagttatgataagatcttggaagaaactctttatgtgtatgagcttctaggggttcctaaaccaaaagaatctacaactgggttgctgaaagccagaaagattctctctgaaaattttggaagcatccatgtgtactttggagatcctgtgtcacttcgatctttggcagctgggaggatgagtcggagctcatataacttggttccaagatacattcctcagaaacagtctgaggacatgcatgcctttgtcactgaagttgcctacaaaatggagcttctgcaaattgaaaacatggttttgagcccctggaccctaatagttgctgttctgcttcagaaccggccatccatggactttgatgctctggtggaaaagactttatggctaaaaggcttaacccaggcatttggagggtttctcatttggcctgataataaacctgctgaagaagttgtcccggccagcattcttctgcattccaacattgccagccttgtcaaagaccaggtgattctgaaagtggactccggagactcggaagtggtcgatgggcttatgctccagcacatcactctcctcatgtgctcagcttataggaaccaagttatgttataccgggatcctntaggcacc

SEQ ID NO: 352095 - DNA, 1542 bp, Homo sapiens
aggctacaggttgtatagtcgtcctggtgtatttcagtacgagggcttagatgtgggctacgtgatctgtctgtagcggctgcagagggtgccgccgccctaggcgaagtagggccgtcctgagcgaaagaaccgcccccagcaggagcaccaccacggcttagcaaagaatcccagaccccgcccgggaaggcagccgcaccatggagtcttccagttcatctaactcttatttctccgttggcccaaccagtcccagcgctgtcgtgctcctctactcgctttccaaggaatcccttcaatctgtggatgtcctccgagaggaagtgagtgagatcttagatgaaatgagtcacaaactgcgtcttggagccattcggttttgtgccttcaccctggaccctaatagttgctgttctgcttcagaaccggccatccatggactttgatgctctggtggaaaagactttatggctaaaaggcttaacccaggcatttggagggtttctcatttggcctgataataaacctgctgaagaagttgtcccggccagcattcttctgcattccaacattgccagccttgtcaaagaccaggtgattctgaaagtggactccggagactcggaagtggtcgatgggcttatgctccagcacatcactctcctcatgtgctcagcttataggaaccagctgctcaacatttttgtgcgcccatccttagtagcagtagcattgcagatgacaccagggttcaggaaagaggatgtctacagttgctttcgcttcctacgtgatgtttttgcagatgagttcatcttccttccaggaaacacactaaaggactttgaagaaggctgttacctgctttgtaaaagtgaagccatacaagtgactacgaaagacatcctagttacagagaaaggaaatactgtgttagaatttttagtaggactctttaaaccttttgtggaaagctatcagataatttgcaagtaccttttgagtgaagaagaggaccacttcagtgaggaacagtacttggctgcagtcagaaaattcacaagtcagcttctcgatcaaggtacctctcaatgttatgatgtattatcttctgatgtgcagaaaaacgccttagcagcctgtgtgaggctcggagtagtggagaagaagaagataaataataactgtatatttaatgtgaatgaacctgccacaaccaaattagaagaaatgcttggttgtaagacaccaataggaaaaccagccactgcaaaactttaataatcaacaaatagttatggaaaattcggtcacgtaattactctcatcgaaggactcattacaacaaacagggaagtaaaggaagagacacatcctctcatactccctgagactctgagaacagtggacgcagagggaagagatgatcattggaagcaatcagtttactcttccccaccacagtggttaaaaggcgtttgtatctgacactatgtgtgtgttttaaaataaacttttggaaacatgtttggaaaagca

SEQ ID NO: 352096 - DNA, 1866 bp, Homo sapiens
tcacataaaatattattcaattgagcaagctgagacaaggcaagttgttcaagaatgaatgtgatcaagtccaggaggaagccatacctctcacttgtccctgccttgaagcagtagcagaacttgccacccaacttgagcagtgtgccactgccagccagctctttggctcaggttaactgcagaataattttccgtgctgagaatatttgttaaatatcaccatctcttcattatgcttctgtaattctacctgcctggcagctgtctgcaggccaatatgtcaggtgataagctaccaactgccatggagctgcccctttagttatctttgatttggggaaaactgcaaagtgatatttttaccattttagtatgggtctaagcaaggggtgtgtgtgcatgtgtgtgtgtgttgtatgttttaatgtattcatacactaatcatgggcctttttcttagtattcttacattcccgtgcatgtgactttccagttatgtaacttgctgttagaaaactttagattcccttggttcctgaagtacacagaagtggtgttcattttcagagtagaaactgatgtgcctttcagaatggctgacaaattttgggggtaagaaagtatgttacatgtccttagagagagagaaagaattgatttatgaaatagtacttttaaatttttcttcagatttggtatcattaccgtaattggtagacagtaaaacctgtcacttgaaaatgagcatctgtcacgttaccattaataacgttaacgtacgctaggcctaagactccctgcagtgacccatcttgtttgaatgaattgtctttgtgtgtagataataaacctgctgaagaagttgtcccggccagcattcttctgcattccaacattgccagccttgtcaaagaccaggtgattctgaaagtggactccggagactcggaagtggtcgatgggcttatgctccagcacatcactctcctcatgtgctcagcttataggaaccagctgctcaacatttttgtgcgcccatccttagtagcagtagcattgcagatgacaccagggttcaggaaagaggatgtctacagttgctttcgcttcctacgtgatgtttttgcagatgagttcatcttccttccaggaaacacactaaaggactttgaagaaggctgttacctgctttgtaaaagtgaagccatacaagtgactacgaaagacatcctagttacagagaaaggaaatactgtgttagaatttttagtaggactctttaaaccttttgtggaaagctatcagataatttgcaagtaccttttgagtgaagaagaggaccacttcagtgaggaacagtacttggctgcagtcagaaaattcacaagtcagcttctcgatcaaggtacctctcaatgttatgatgtattatcttctgatgtgcagaaaaacgccttagcagcctgtgtgaggctcggagtagtggagaagaagaagataaataataactgtatatttaatgtgaatgaacctgccacaaccaaattagaagaaatgcttggttgtaagacaccaataggaaaaccagccactgcaaaactttaataatcaacaaatagttatggaaaattcggtcacgtaattactctcatcgaaggactcattacaacaaacagggaagtaaaggaagagacacatcctctcatactccctgagactctgagaacagtggacgcagagggaagagatgatcattggaagcaatcagtttactcttccccaccacagtggttaaaaggcgtttgtatctgacactatgtgtgtgttttaaaataaacttttggaaacatgtttggaaaagca

SEQ ID NO: 352097 - DNA, 4092 bp, Homo sapiens
ttttttttgtaagtatttaaatacaattatttttttctctcaatggtatagcatattcctatgcttgagaagtataggtctactgaaaaaccattgtaaatggacgttacaggtatgctgtatttttgaaggtattttgttgtattaagtttgatgaagctaaaattagggaactctgaacagatttgcaggaaaaaatgttttaaaggctttaaaacattagggaggcagtctagggtgataacgaacaggggttaagtattaaatacacgaagttacatttttgttcatgtttcattgtccagaaagcagcaggaaactattcagttgtgatcaagcaggaaaaaagaaacaccaacagttgccagtgtttttgctttttagcttaaaagcatagtgaagatgcttgaggaagactttgctacctggggtgtgtagacagacagactgagagctatcagcatttgaaggcccagcccttgactctgagacacatttgaattttttctttcccatcaaatggcattaacaagattgggcaaagatgagtccctcaaatttctgtgttttttgtttgtttgtttgtttgttttttctttgggaactgaagtcagaggcacgaacactaactcttagcatttttctgtagactttttcttctggcccttgtccctgccagcaaaacgccccttttctgatcattcgtgcgcagagggcctcccagtaatgccacgctctccatgctagagagccttctctttcctctgaggtttgaactgatgttctgtgtcttcacaccctggcatgacagttacgtgtggtcagcccgctccccaggcccgtccctgccgccgccaggtgtgggctctaggcaggccgacaaggttacacctcccagagcttgtgatcttcattttctgacagtcaaagtgtgaaggaacccagacttccccgagccacggtgttcagtcagcccacaggaatatgcaagacccatctccaaaagtttgtctttgattttttccaagcccttagccccataagctttgaatcctgtagttacagtggcataaaggactgacaaaacctggataaggaaaaaccttttttttctatgaattttttttgttttttaggggaaagggattctaagaatgtcatttaatgtactttgcatcatgtctctagaaatatctttgtccatagtggtggtggagtctctctctctctctctctttttgtttgcttctgttttctttcttgtcttcattctttcttttcttttttatttctggtagcaggcctccatagaacaaatctaaaacacaaccaccatagtaatgtaaggagagcttcagtggcacctcaaaacccacccttcgagatctgtccaaagacagtctcagaaagctgcactgcccaccggctcagctttcattcaaaaaggcttccaaggccaattctgtcttgaagtcaatgcatgtatttactgtttgacagtaaacccgctctgccttctccacgtccaaggctgtgcattcgtctaattagcgtcgtgtatgttttccttttattttttccaataaaaaagcagtgggatgaaaattgctttgatatatagcaggtaacattgaagctattccatagcacttaactgtagtgaatactgtgtcaccaattttgaaatcaatttaatgtttaatgcaaatccattacatggtgctattataggctgacaaaatgatttacacaaatgtgacaacttgggctcaattcactctgctttccaacagtgtaaatgcatagcagtgtttatctgcatgagaactatgcactaatctatctgaagaaaaaaactatatcaactttggtatctactttccgtttacttcaatccttgcctttttggtcattgttataatgccagctttaggacagaaagaattataagaaaaccagcataatacctgatatattaaaatgtagtgcctgtgaaatctgtattatattgctcttctgaagtaagatttttctacaccggtagccttcgctgtctgtcagtcaggaccttctggtataggtgatgtaaaataaccgtacaatattaatgcatgcgattccataatgcttagtgaactgtatgaatattactcaaagttatgttagtctttttttccgacttggttcttgtcagctaggtttaaaggtatttcactgagaacgcaaattctgtcttttcttgatttcggctgttttcagtattttggaggtatacatttacttaaattcagtattactcgtgttttgtttttgtttttgttttttgttttctttttcctaggggacaagcatgggtgtttgatttcagaaatcagtacctggcgagatttttgtctcaaaacgactatttgaatttcaagaactgtgctgcgaagacactctgagaacatttgcaagtcaggggcattttccttgacccttgactgatgctatgcggagactgatacattttcttaatggacaatgttcaagccaggtacccatgcttgatctgtcttcacaccagacctcctcatattaaaaggaaaaataagaaaaaaaatgtaagaaatcacatggctatttagtttcatgcacagttgcaatattttcttcaaaaataaaaccctgtacaaactttgggcccgattcataagaaaaagaagtttgctattaacacgggatttttttaatatactttttttggtctaaatttgaaattacttgcttcccaaattaaataaatttcatctcatttttttccctaaaccagcacccatctgccttttattccccaaagagttacctttcccagattagggggatggtatgtggggagcagatagcggaaatgcttagaaagataagggggaccacccacagctggtcgtgagaacagggagacagtgtgtgggggtgggacctcatctgtgtgcctggtatcctgagttttacatgtagatgcattcgcctatttgattcagaaaaataaactttcccaaaatgtgtctgaaccacaagagcatacagtggaagtgctacctctaatctaaccagagcaccttcatggtggaagacacccaccaggtcatacaatgtgaacttttgtatctctgcagtggtttcaaggacaaatagtgtccaatgtattgggccatttttcctgctgtttttatactcaacttctcaaaatgaaaaaagcttttatttttcctttgacttatttgtgttgttcttattttttaaatttttattttttgataatagtctgtaagttagcctttttgggttttttttttttttttttggcttttttttttgtttgtttttttttcttttgacattgcaaccgaaggtcataaggccgctagctccgctgggacagaggcttgagagaactaacggctcggtgccttctccctggtctcagaccatcgtctctgcactgcgaaggcatttggtagcctcaccactgagatactaactagacctagactaggagctttatcaggttctaggaggtcctttaggaagactctcaaaggcaaatccctgatcccccgccccacccttagccctgccctctcaccagagcaaaattcactggggacttttcccaccacacatggaaatctgtccactcggaatacctctgttttccatttcaaattgtagggggaggggatggaacacttccagtgatggtaagagatctgttatgaaacgaaacaccccccgtgttaataacttggtctgaaatctgtttttatgagccgggccccctgtgcctctagtatacttgtattgactctcatagttacccttttagttttactgtgttctgtgaaaatttgtaattggttgagaatcactgtgggcgtccattcttattcaactaaatctccacaggttttttgagctggtgtggattagtttaactcttgtattcaaccattagtgctaccaccttctcacattacaatacaattactggaagcaagtactgcatttcctatgcaacaaaaaaggaaaaataaaaaattgctaatgcta

SEQ ID NO: 352098 - DNA, 4792 bp, Homo sapiens
ttttttttgtaagtatttaaatacaattatttttttctctcaatggtatagcatattcctatgcttgagaagtataggtctactgaaaaaccattgtaaatggacgttacaggtatgctgtatttttgaaggtattttgttgtattaagtttgatgaagctaaaattagggaactctgaacagatttgcaggaaaaaatgttttaaaggctttaaaacattagggaggcagtctagggtgataacgaacaggggttaagtattaaatacacgaagttacatttttgttcatgtttcattgtccagaaagcagcaggaaactattcagttgtgatcaagcaggaaaaaagaaacaccaacagttgccagtgtttttgctttttagcttaaaagcatagtgaagatgcttgaggaagactttgctacctggggtgtgtagacagacagactgagagctatcagcatttgaaggcccagcccttgactctgagacacatttgaattttttctttcccatcaaatggcattaacaagattgggcaaagatgagtccctcaaatttctgtgttttttgtttgtttgtttgtttgttttttctttgggaactgaagtcagaggcacgaacactaactcttagcatttttctgtagactttttcttctggcccttgtccctgccagcaaaacgccccttttctgatcattcgtgcgcagagggcctcccagtaatgccacgctctccatgctagagagccttctctttcctctgaggtttgaactgatgttctgtgtcttcacaccctggcatgacagttacgtgtggtcagcccgctccccaggcccgtccctgccgccgccaggtgtgggctctaggcaggccgacaaggttacacctcccagagcttgtgatcttcattttctgacagtcaaagtgtgaaggaacccagacttccccgagccacggtgttcagtcagcccacaggaatatgcaagacccatctccaaaagtttgtctttgattttttccaagcccttagccccataagctttgaatcctgtagttacagtggcataaaggactgacaaaacctggataaggaaaaaccttttttttctatgaattttttttgttttttaggggaaagggattctaagaatgtcatttaatgtactttgcatcatgtctctagaaatatctttgtccatagtggtggtggagtctctctctctctctctctttttgtttgcttctgttttctttcttgtcttcattctttcttttcttttttatttctggtagcaggcctccatagaacaaatctaaaacacaaccaccatagtaatgtaaggagagcttcagtggcacctcaaaacccacccttcgagatctgtccaaagacagtctcagaaagctgcactgcccaccggctcagctttcattcaaaaaggcttccaaggccaattctgtcttgaagtcaatgcatgtatttactgtttgacagtaaacccgctctgccttctccacgtccaaggctgtgcattcgtctaattagcgtcgtgtatgttttccttttattttttccaataaaaaagcagtgggatgaaaattgctttgatatatagcaggtaacattgaagctattccatagcacttaactgtagtgaatactgtgtcaccaattttgaaatcaatttaatgtttaatgcaaatccattacatggtgctattataggctgacaaaatgatttacacaaatgtgacaacttgggctcaattcactctgctttccaacagtgtaaatgcatagcagtgtttatctgcatgagaactatgcactaatctatctgaagaaaaaaactatatcaactttggtatctactttccgtttacttcaatccttgcctttttggtcattgttataatgccagctttaggacagaaagaattataagaaaaccagcataatacctgatatattaaaatgtagtgcctgtgaaatctgtattatattgctcttctgaagtaagatttttctacaccggtagccttcgctgtctgtcagtcaggaccttctggtataggtgatgtaaaataaccgtacaatattaatgcatgcgattccataatgcttagtgaactgtatgaatattactcaaagttatgttagtctttttttccgacttggttcttgtcagctaggtttaaaggtatttcactgagaacgcaaattctgtcttttcttgatttcggctgttttcagtattttggaggtatacatttacttaaattcagtattactcgtgttttgtttttgtttttgttttttgttttctttttcctaggggacaagcatgggtgtttgatttcagaaatcagtacctggcgagatttttgtctcaaaacgactatttgaatttcaagaactgtgctgcgaagacactctgagaacatttgcaagtcaggggcattttccttgacccttgactgatgctatgcggagactgatacattttcttaatggacaatgttcaagccaggtacccatgcttgatctgtcttcacaccagacctcctcatattaaaaggaaaaataagaaaaaaaatgtaagaaatcacatggctatttagtttcatgcacagttgcaatattttcttcaaaaataaaaccctgtacaaactttgggcccgattcataagaaaaagaagtttgctattaacacgggatttttttaatatactttttttggtctaaatttgaaattacttgcttcccaaattaaataaatttcatctcatttttttccctaaaccagcacccatctgccttttattccccaaagagttacctttcccagattagggggatggtatgtggggagcagatagcggaaatgcttagaaagataagggggaccacccacagctggtcgtgagaacagggagacagtgtgtgggggtgggacctcatctgtgtgcctggtatcctgagttttacatgtagatgcattcgcctatttgattcagaaaaataaactttcccaaaatgtgtctgaaccacaagagcatacagtggaagtgctacctctaatctaaccagagcaccttcatggtggaagacacccaccaggtcatacaatgtgaacttttgtatctctgcagtggtttcaaggacaaatagtgtccaatgtattgggccatttttcctgctgtttttatactcaacttctcaaaatgaaaaaagcttttatttttcctttgacttatttgtgttgttcttattttttaaatttttattttttgataatagtctgtaagttagcctttttgggttttttttttttttttttggcttttttttttgtttgtttttttttcttttgacattgcaaccgaaggtcataaggccgctagctccgctgggacagaggcttgagagaactaacggctcggtgccttctccctggtctcagaccatcgtctctgcactgcgaaggcatttggtagcctcaccactgagatactaactagacctagactaggagctttatcaggttctaggaggtcctttaggaagactctcaaaggcaaatccctgatcccccgccccacccttagccctgccctctcaccagagcaaaattcactggggacttttcccaccacacatggaaatctgtccactcggaatacctctgttttccatttcaaattgtagggggaggggatggaacacttccagtgatggtaagagatctgttatgaaacgaaacaccccccgtgttaataacttggtctgaaatctgtttttatgagccgggccccctgtgcctctagtatacttgtattgactctcatagttacccttttagttttactgtgttctgtgaaaatttgtaattggttgagaatcactgtgggcgtccattcttattcaactaaatctccacaggttttttgagctggtgtggattagtttaactcttgtattcaaccattagtgctaccaccttctcacattacaatacaattactggaagcaagtactgcatttcctatgcaacaaaaaaggaaaaataaaaaattgctaatgctaaaaacaaaaaaaaaaaaaaaaaaaaaaaaaaaaacaaaaaaaacaaaaaaaaaaaaaaaaaaaaaaaaacaaaaaaaaaaaaaaaacaaaaacaaacaaaaaaaaaaaaaaaaaaaaaaaacgagacgggggggcgacgcagcgagcacaagacaagacaaatatacaaccagctagtgggtcgggtgctgagcaacacacctagaaaaaagaaagagaaagaagggagaacagtagcgagagacgcagacacaaagaataaaaagaggagagagagcacacaacaaaaaaaaaccagcggggagggcacgccagagcagccaaacaacccacagggagaggtagggagacaacgaatgagagtgagtaactaaccaaccgaggcacgacgacgagaacgctgtaagaaaaaaaacaccccgcgggggagagagaaaggaggaaaaaaaagaggagaggagggacaagaggagacgacagaaggaaagcgagagaaccaaaaggaggcaggagaatacacgaagaaaaacaagagaagagagacacgccacgccgaaagataaagcggcaaagacaaggacaaaactaaacagagaagaataaagacagacagaggagagaacacggaaaagaagaaaaaagagcagaaccgaaagagagacgccgcaagagaaggagagaggacaagaaataagcacac

SEQ ID NO: 352099 - DNA, 2944 bp, Homo sapiens
ttttttttgtaagtatttaaatacaattatttttttctctcaatggtatagcatattcctatgcttgagaagtataggtctactgaaaaaccattgtaaatggacgttacaggtatgctgtatttttgaaggtattttgttgtattaagtttgatgaagctaaaattagggaactctgaacagatttgcaggaaaaaatgttttaaaggctttaaaacattagggaggcagtctagggtgataacgaacaggggttaagtattaaatacacgaagttacatttttgttcatgtttcattgtccagaaagcagcaggaaactattcagttgtgatcaagcaggaaaaaagaaacaccaacagttgccagtgtttttgctttttagcttaaaagcatagtgaagatgcttgaggaagactttgctacctggggtgtgtagacagacagactgagagctatcagcatttgaaggcccagcccttgactctgagacacatttgaattttttctttcccatcaaatggcattaacaagattgggcaaagatgagtccctcaaatttctgtgttttttgtttgtttgtttgtttgttttttctttgggaactgaagtcagaggcacgaacactaactcttagcatttttctgtagactttttcttctggcccttgtccctgccagcaaaacgccccttttctgatcattcgtgcgcagagggcctcccagtaatgccacgctctccatgctagagagccttctctttcctctgaggtttgaactgatgttctgtgtcttcacaccctggcatgacagttacgtgtggtcagcccgctccccaggcccgtccctgccgccgccaggtgtgggctctaggcaggccgacaaggttacacctcccagagcttgtgatcttcattttctgacagtcaaagtgtgaaggaacccagacttccccgagccacggtgttcagtcagcccacaggaatatgcaagacccatctccaaaagtttgtctttgattttttccaagcccttagccccataagctttgaatcctgtagttacagtggcataaaggactgacaaaacctggataaggaaaaaccttttttttctatgaattttttttgttttttaggggaaagggattctaagaatgtcatttaatgtactttgcatcatgtctctagaaatatctttgtccatagtggtggtggagtctctctctctctctctctttttgtttgcttctgttttctttcttgtcttcattctttcttttcttttttatttctggtagcaggcctccatagaacaaatctaaaacacaaccaccatagtaatgtaaggagagcttcagtggcacctcaaaacccacccttcgagatctgtccaaagacagtctcagaaagctgcactgcccaccggctcagctttcattcaaaaaggcttccaaggccaattctgtcttgaagtcaatgcatgtatttactgtttgacagtaaacccgctctgccttctccacgtccaaggctgtgcattcgtctaattagcgtcgtgtatgttttccttttattttttccaataaaaaagcagtgggatgaaaattgctttgatatatagcaggtaacattgaagctattccatagcacttaactgtagtgaatactgtgtcaccaattttgaaatcaatttaatgtttaatgcaaatccattacatggtgctattataggctgacaaaatgatttacacaaatgtgacaacttgggctcaattcactctgctttccaacagtgtaaatgcatagcagtgtttatctgcatgagaactatgcactaatctatctgaagaaaaaaactatatcaactttggtatctactttccgtttacttcaatccttgcctttttggtcattgttataatgccagctttaggacagaaagaattataagaaaaccagcataatacctgatatattaaaatgtagtgcctgtgaaatctgtattatattgctcttctgaagtaagatttttctacaccggtagccttcgctgtctgtcagtcaggaccttctggtataggtgatgtaaaataaccgtacaatattaatgcatgcgattccataatgcttagtgaactgtatgaatattactcaaagttatgttagtctttttttccgacttggttcttgtcagctaggtttaaaggtatttcactgagaacgcaaattctgtcttttcttgatttcggctgttttcagtattttggaggtatacatttacttaaattcagtattactcgtgttttgtttttgtttttgttttttgttttctttttcctaggggacaagcatgggtgtttgatttcagaaatcagtacctggcgagatttttgtctcaaaacgactatttgaatttcaagaactgtgctgcgaagacactctgagaacatttgcaagtcaggggcattttccttgacccttgactgatgctatgcggagactgatacattttcttaatggacaatgttcaagccaggtacccatgcttgatctgtcttcacaccagacctcctcatattaaaaggaaaaataagaaaaaaaatgtaagaaatcacatggctatttagtttcatgcacagttgcaatattttcttcaaaaataaaaccctccccctgtgcctctagtatacttgtattgactctcatagttacccttttagttttactgtgttctgtgaaaatttgtaattggttgagaatcactgtgggcgtccattcttattcaactaaatctccacaggttttttgagctggtgtggattagtttaactcttgtattcaaccattagtgctaccaccttctcacattacaatacaattactggaagcaagtactgcatttcctatgcaacaaaaaaggaaaaataaaaaattgctaatgcta

SEQ ID NO: 352100 - DNA, 331 bp, Homo sapiens
atactggtttgagtaaagctttctgacttttctgttattgttgttagaaattattcctgcttttcctttccttttagctttccaaggaatcccttcaatctgtggatgtcctccgagaggaagtgagtgagatcttagatgaaatgagtcacaaactgcgtcttggagccattcggttttgtgccttcaccctgagcaaagtatttaaacaaattttctcgaaggtgtgtgtaaatgaagaaggtattcagaaagtgagtattgattattaaaaaaataaagaaataaaagtctcatcttaaaattaaacaaaaaaaaaaacagtctcttt

SEQ ID NO: 352101 - DNA, 547 bp, Homo sapiens
gaggtgcatatacctaaaacaaccacaaacacctcgccctgtgagggtgacggaatcaattacttaatcacggaaagcagatgtgatgtgagcgtgaacatactggactggagttcagaaaacatgacggggttcaactcctggccctggccctgtggctctggccatgctgtcacctcttggagcatctaccgcttcccttgtggagggggctggcgtccccatgggtactggccagcctgtgaagctctgcacaagtctccagcttctcccctggacagtcgcccaaggaacagctgtatgaggaagggcaaaatcagcatcatttcatgagctgcttctcttttttcatcttaggttgtaagacaccaataggaaaaccagccactgcaaaactttaataatcaacaaatagttatggaaaattcggtcacgtaattactctcatcgaaggactcattacaacaaacagggaagtaaaggaagagacacatcctctcatactccctgagactctgagaacagtggacgcagagggaagagatga

SEQ ID NO: 352102 - DNA, 2504 bp, Homo sapiens
aggctacaggttgtatagtcgtcctggtgtatttcagtacgagggcttagatgtgggctacgtgatctgtctgtagcggctgcagagggtgccgccgccctaggcgaagtagggccgtcctgagcgaaagaaccgcccccagcaggagcaccaccacggcttagcaaagaatcccagaccccgcccgggaaggcagccgcaccatggagtcttccagttcatctaactcttatttctccgttggcccaaccagtcccagcgctgtcgtgctcctctactcgaaggagctcaaaaagtgggatgagtttgaagatattttagaagagaggaggcatgtcagtgacttgaaatttgcaatgaaatgctacacacctcttgtctataagggaattactccatgtaaaccaattgatattaaatgtagtgttctcaattctgaggagattcattatgtcattaaacagctttccaaggaatcccttcaatctgtggatgtcctccgagaggaagtgagtgagatcttagatgaaatgagtcacaaactgcgtcttggagccattcggttttgtgccttcaccctgagcaaagtatttaaacaaattttctcgaaggtgtgtgtaaatgaagaaggtattcagaaactacaaagagccatccaggagcatcctgttgttctgctgcctagtcatcgaagttacattgacttcctcatgttgtcttttcttctatacaattatgatttgcctgtgccagttatagcagcaggaatggacttcctgggaatgaaaatggttggtgagctgctacgaatgtcgggtgcctttttcatgcggcgtacctttggtggcaataaactctactgggctgtattctctgaatatgtaaaaactatgttacggaatggttatgctcctgttgaatttttcctcgaagggacaagaagccgctctgccaagacattgactcctaaatttggtcttctgaatattgtgatggagccattttttaaaagagaagtttttgatacctaccttgtcccaattagtatcagttatgataagatcttggaagaaactctttatgtgtatgagcttctaggggttcctaaaccaaaagaatctacaactgggttgctgaaagccagaaagattctctctgaaaattttggaagcatccatgtgtactttggagatcctgtgtcacttcgatctttggcagctgggaggatgagtcggagctcatataacttggttccaagatacattcctcagaaacagtctgaggacatgcatgcctttgtcactgaagttgcctacaaaatggagcttctgcaaattgaaaacatggttttgagcccctggaccctaatagttgctgttctgcttcagaaccggccatccatggactttgatgctctggtggaaaagactttatggctaaaaggcttaacccaggcatttggagggtttctcatttggcctgataataaacctgctgaagaagttgtcccggccagcattcttctgcattccaacattgccagccttgtcaaagaccaggtgattctgaaagtggactccggagactcggaagtggtcgatgggcttatgctccagcacatcactctcctcatgtgctcagcttataggaaccagctgctcaacatttttgtgcgcccatccttagtagcagtagcattgcagatgacaccagggttcaggaaagaggatgtctacagttgctttcgcttcctacgtgatgtttttgcagatgagttcatcttccttccaggaaacacactaaaggactttgaagaaggctgttacctgctttgtaaaagtgaagccatacaagtgactacgaaagacatcctagttacagagaaaggaaatactgtgttagaatttttagtaggactctttaaaccttttgtggaaagctatcagataatttgcaagtaccttttgagtgaagaagaggaccacttcagtgaggaacagtacttggctgcagtcagaaaattcacaagtcagcttctcgatcaaggtacctctcaatgttatgatgtattatcttctgatgtgcagaaaaacgccttagcagcctgtgtgaggctcggagtagtggagaagaagaagataaataataactgtatatttaatgtgaatgaacctgccacaaccaaattagaagaaatgcttggttgtaagacaccaataggaaaaccagccactgcaaaactttaataatcaacaaatagttatggaaaattcggtcacgtaattactctcatcgaaggactcattacaacaaacagggaagtaaaggaagagacacatcctctcatactccctgagactctgagaacagtggacgcagagggaagagatgatcattggaagcaatcagtttactcttccccaccacagtggttaaaaggcgtttgtatctgacactatgtgtgtgttttaaaataaacttttggaaacatgtttggaaaagca

SEQ ID NO: 352103 - DNA, 2670 bp, Homo sapiens
agcgggcgctgcgcggcttcgcgtcctggctgagatggcggcgcccgggatcctgtgtagcggctgcagagggtgccgccgccctaggcgaagtagggccgtcctgagcgaaagaaccgcccccagcaggagcaccaccacggcttagcaaagaatcccagaccccgcccgggaaggcagccgcaccatggagtcttccagttcatctaactcttatttctccgttggcccaaccagtcccagcgctgtcgtgctcctctactcgaaggagctcaaaaagtgggatgagtttgaagatattttagaagagaggaggcatgtcagtgacttgaaatttgcaatgaaatgctacacacctcttgtctataagggaattactccatgtaaaccaattgatattaaatgtagtgttctcaattctgaggagattcattatgtcattaaacagctttccaaggaatcccttcaatctgtggatgtcctccgagaggaagtgagtgagatcttagatgaaatgagtcacaaactgcgtcttggagccattcggttttgtgccttcaccctgagcaaagtatttaaacaaattttctcgaaggtgtgtgtaaatgaagaaggtattcagaaactacaaagagccatccaggagcatcctgttgttctgctgcctagtcatcgaagttacattgacttcctcatgttgtcttttcttctatacaattatgatttgcctgtgccagttatagcagcaggaatggacttcctgggaatgaaaatggttggtgagctgctacgaatgtcgggtgcctttttcatgcggcgtacctttggtggcaataaactctactgggctgtattctctgaatatgtaaaaactatgttacggaatggttatgctcctgttgaatttttcctcgaagggacaagaagccgctctgccaagacattgactcctaaatttggtcttctgaatattgtgatggagccattttttaaaagagaagtttttgatacctaccttgtcccaattagtatcagttatgataagatcttggaagaaactctttatgtgtatgagcttctaggggttcctaaaccaaaagaatctacaactgggttgctgaaagccagaaagattctctctgaaaattttggaagcatccatgtgtactttggagatcctgtgtcacttcgatctttggcagctgggaggatgagtcggagctcatataacttggttccaagatacattcctcagaaacagtctgaggacatgcatgcctttgtcactgaagttgcctacaaaatggagcttctgcaaattgaaaacatggttttgagcccctggaccctaatagttgctgttctgcttcagaaccggccatccatggactttgatgctctggtggaaaagactttatggctaaaaggcttaacccaggcatttggagggtttctcatttggcctgataataaacctgctgaagaagttgtcccggccagcattcttctgcattccaacattgccagccttgtcaaagaccaggtgattctgaaagtggactccggagactcggaagtggtcgatgggcttatgctccagcacatcactctcctcatgtgctcagcttataggaaccagctgctcaacatttttgtgcgcccatccttagtagcagtagcattgcagatgacaccagggttcaggaaagaggatgtctacagttgctttcgcttcctacgtgatgtttttgcagatgagttcatcttccttccaggaaacacactaaaggactttgaagaaggctgttacctgctttgtaaaagtgaagccatacaagtgactacgaaagacatcctagttacagagaaaggaaatactgtgttagaatttttagtaggactctttaaaccttttgtggaaagctatcagataatttgcaagtaccttttgagtgaagaagaggaccacttcagtgaggaacagtacttggctgcagtcagaaaattcacaagtcagcttctcgatcaaggtacctctcaatgttatgatgtattatcttctgatgtgcagaaaaacgccttagcagcctgtgtgaggctcggagtagtggagaagaagaagataaataataactgtatatttaatgtgaatgaacctgccacaaccaaattagaagaaatgcttggttgtaagacaccaataggaaaaccagccactgcaaaactttaataatcaacaaatagttatggaaaattcggtcacgtaattactctcatcgaaggactcattacaacaaacagggaagtaaaggaagagacacatcctctcatactccctgagactctgagaacagtggacgcagagggaagagatgatcattggaagcaatcagtttactcttccccaccacagtggttaaaaggcgtttgtatctgacactatgtgtgtgttttaaaataaacttttggaaacatgtttggaaaagcaaagctcagctcatttcactaacacttttcagcttactatatgtattaaacttttatgttgacttttgaattaaagtatgacaacactgaaagctctggatattaaaagaaaatgaaaagggcatatctacgttacttgtagcttgctttaattaaagttgcctcaaacaagtaaaaaaaaaa

SEQ ID NO: 352104 - DNA, 2572 bp, Homo sapiens
agcgggcgctgcgcggcttcgcgtcctggctgagatggcggcgcccgggatcctgtgtagcggctgcagagggtgccgccgccctaggcgaagtagggccgtcctgagcgaaagaaccgcccccagcaggagcaccaccacggcttagcaaagaatcccagaccccgcccgggaaggcagccgcaccatggagtcttccagttcatctaactcttatttctccgttggcccaaccagtcccagcgctgtcgtgctcctctactcgaaggagctcaaaaagtgggatgagtttgaagatattttagaagagaggaggcatgtcagtgacttgaaatttgcaatgaaatgctacacacctcttgtctataagggaattactccatgtaaaccaattgatattaaatgtagtgttctcaattctgaggagattcattatgtcattaaacagctttccaaggaatcccttcaatctgtggatgtcctccgagaggaagtgagtgagatcttagatgaaatgagtcacaaactgcgtcttggagccattcggttttgtgccttcaccctgagcaaagtatttaaacaaattttctcgaaggtgtgtgtaaatgaagaaggtattcagaaactacaaagagccatccaggagcatcctgttgttctgctgcctagtcatcgaagttacattgacttcctcatgttgtcttttcttctatacaattatgatttgcctgtgccagttatagcagcaggaatggacttcctgggaatgaaaatggttggtgagctgctacgaatgtcgggtgcctttttcatgcggcgtacctttggtggcaataaactctactgggctgtattctctgaatatgtaaaaactatgttacggaatggttatgctcctgttgaatttttcctcgaagggacaagaagccgctctgccaagacattgactcctaaatttggtcttctgaatattgtgatggagccattttttaaaagagaagtttttgatacctaccttgtcccaattagtatcagttatgataagatcttggaagaaactctttatgtgtatgagcttctaggggttcctaaaccaaaagaatctacaactgggttgctgaaagccagaaagattctctctgaaaattttggaagcatccatgtgtactttggagatcctgtgtcacttcgatctttggcagctgggaggatgagtcggagctcatataacttggttccaagatacattcctcagaaacagtctgaggacatgcatgcctttgtcactgaagttgcctacaaaatggagcttctgcaaattgaaaacatggttttgagcccctggaccctaatagttgctgttctgcttcagaaccggccatccatggactttgatgctctggtggaaaagactttatggctaaaaggcttaacccaggcatttggagggtttctcatttggcctgataataaacctgctgaagaagttgtcccggccagcattcttctgcattccaacattgccagccttgtcaaagaccaggtgattctgaaagtggactccggagactcggaagtggtcgatgggcttatgctccagcacatcactctcctcatgtgctcagcttataggaaccagctgctcaacatttttgtgcgcccatccttagtagcagtagcattgcagatgacaccagggttcaggaaagaggatgtctacagttgctttcgcttcctacgtgatgtttttgcagatgagttcatcttccttccaggaaacacactaaaggactttgaagaaggctgttacctgctttgtaaaagtgaagccatacaagtgactacgaaagacatcctagttacagagaaaggaaatactgtgttagaatttttagtaggactctttaaaccttttgtggaaagctatcagataatttgcaagtaccttttgagtgaagaagaggaccacttcagtgaggaacagtacttggctgcagtcagaaaattcacaagtcagcttctcgatcaaggtcagtcactgctctgtgggtgctgatttcttttagttgagaatagaaactggtcaactaactcttcctcacccccaattttaggtacctctcaatgttatgatgtattatcttctgatgtgcagaaaaacgccttagcagcctgtgtgaggctcggagtagtggagaagaagaagataaataataactgtatatttaatgtgaatgaacctgccacaaccaaattagaagaaatgcttggttgtaagacaccaataggaaaaccagccactgcaaaactttaataatcaacaaatagttatggaaaattcggtcacgtaattactctcatcgaaggactcattacaacaaacagggaagtaaaggaagagacacatcctctcatactccctgagactctgagaacagtggacgcagagggaagagatgatcattggaagcaatcagtttactcttccccaccacagtggttaaaaggcgtttgtatctgacactatgtgtgtgttttaaaataaacttttggaaacatgtttggaaaagca

SEQ ID NO: 352105 - DNA, 2305 bp, Homo sapiens
agcgggcgctgcgcggcttcgcgtcctggctgagatggcggcgcccgggatcctgtgtagcggctgcagagggtgccgccgccctaggcgaagtagggccgtcctgagcgaaagaaccgcccccagcaggagcaccaccacggcttagcaaagaatcccagaccccgcccgggaaggcagccgcaccatggagtcttccagttcatctaactcttatttctccgttggcccaaccagtcccagcgctgtcgtgctcctctactcgctttccaaggaatcccttcaatctgtggatgtcctccgagaggaagtgagtgagatcttagatgaaatgagtcacaaactgcgtcttggagccattcggttttgtgccttcaccctgagcaaagtatttaaacaaattttctcgaaggtgtgtgtaaatgaagaaggtattcagaaactacaaagagccatccaggagcatcctgttgttctgctgcctagtcatcgaagttacattgacttcctcatgttgtcttttcttctatacaattatgatttgcctgtgccagttatagcagcaggaatggacttcctgggaatgaaaatggttggtgagctgctacgaatgtcgggtgcctttttcatgcggcgtacctttggtggcaataaactctactgggctgtattctctgaatatgtaaaaactatgttacggaatggttatgctcctgttgaatttttcctcgaagggacaagaagccgctctgccaagacattgactcctaaatttggtcttctgaatattgtgatggagccattttttaaaagagaagtttttgatacctaccttgtcccaattagtatcagttatgataagatcttggaagaaactctttatgtgtatgagcttctaggggttcctaaaccaaaagaatctacaactgggttgctgaaagccagaaagattctctctgaaaattttggaagcatccatgtgtactttggagatcctgtgtcacttcgatctttggcagctgggaggatgagtcggagctcatataacttggttccaagatacattcctcagaaacagtctgaggacatgcatgcctttgtcactgaagttgcctacaaaatggagcttctgcaaattgaaaacatggttttgagcccctggaccctaatagttgctgttctgcttcagaaccggccatccatggactttgatgctctggtggaaaagactttatggctaaaaggcttaacccaggcatttggagggtttctcatttggcctgataataaacctgctgaagaagttgtcccggccagcattcttctgcattccaacattgccagccttgtcaaagaccaggtgattctgaaagtggactccggagactcggaagtggtcgatgggcttatgctccagcacatcactctcctcatgtgctcagcttataggaaccagctgctcaacatttttgtgcgcccatccttagtagcagtagcattgcagatgacaccagggttcaggaaagaggatgtctacagttgctttcgcttcctacgtgatgtttttgcagatgagttcatcttccttccaggaaacacactaaaggactttgaagaaggctgttacctgctttgtaaaagtgaagccatacaagtgactacgaaagacatcctagttacagagaaaggaaatactgtgttagaatttttagtaggactctttaaaccttttgtggaaagctatcagataatttgcaagtaccttttgagtgaagaagaggaccacttcagtgaggaacagtacttggctgcagtcagaaaattcacaagtcagcttctcgatcaaggtacctctcaatgttatgatgtattatcttctgatgtgcagaaaaacgccttagcagcctgtgtgaggctcggagtagtggagaagaagaagataaataataactgtatatttaatgtgaatgaacctgccacaaccaaattagaagaaatgcttggttgtaagacaccaataggaaaaccagccactgcaaaactttaataatcaacaaatagttatggaaaattcggtcacgtaattactctcatcgaaggactcattacaacaaacagggaagtaaaggaagagacacatcctctcatactccctgagactctgagaacagtggacgcagagggaagagatgatcattggaagcaatcagtttactcttccccaccacagtggttaaaaggcgtttgtatctgacactatgtgtgtgttttaaaataaacttttggaaacatgtttggaaaagca

SEQ ID NO: 352106 - DNA, 2410 bp, Homo sapiens
agcgggcgctgcgcggcttcgcgtcctggctgagatggcggcgcccgggatcctgtgtagcggctgcagagggtgccgccgccctaggcgaagtagggccgtcctgagcgaaagaaccgcccccagcaggagcaccaccacggcttagcaaagaatcccagaccccgcccgggaaggcagccgcaccatggagtcttccagttcatctaactcttatttctccgttggcccaaccagtcccagcgctgtcgtgctcctctactcgaaggagctcaaaaagtgggatgagtttgaagatattttagaagagaggaggcatgtcagtgacttgaaatttgcaatgaaatgctacacacctcttgtctataagggaattactccatgtaaaccaattgatattaaatgtagtgttctcaattctgaggagattcattatgtcattaaacagctttccaaggaatcccttcaatctgtggatgtcctccgagaggaagtgagtgagatcttagatgaaatgagtcacaaactgcgtcttggagccattcggttttgtgccttcaccctgagcaaagtatttaaacaaattttctcgaaggtgtgtgtaaatgaagaaggtattcagaaactacaaagagccatccaggagcatcctgttgttctgctgcctagtcatcgaagttacattgacttcctcatgttgtcttttcttctatacaattatgatttgcctgtgccagttatagcagcaggaatggacttcctgggaatgaaaatggttggtgagctgctacgaatgtcgggtgcctttttcatgcggcgtacctttggtggcaataaactctactgggctgtattctctgaatatgtaaaaactatgttacggaatggttatgctcctgttgaatttttcctcgaagggacaagaagccgctctgccaagacattgactcctaaatttggtcttctgaatattgtgatggagccattttttaaaagagaagtttttgatacctaccttgtcccaattagtatcagttatgataagatcttggaagaaactctttatgtgtatgagcttctaggggttcctaaaccaaaagaatctacaactgggttgctgaaagccagaaagattctctctgaaaattttggaagcatccatgtgtactttggagatcctgtgtcacttcgatctttggcagctgggaggatgagtcggagctcatataacttggttccaagatacattcctcagaaacagtctgaggacatgcatgcctttgtcactgaagttgcctacaaaatggagcttctgcaaattgaaaacatggttttgagcccctggaccctaatagttgctgttctgcttcagaaccggccatccatggactttgatgctctggtggaaaagactttatggctaaaaggcttaacccaggcatttggagggtttctcatttggcctgataataaacctgctgaagaagttgtcccggccagcattcttctgcattccaacattgccagccttgtcaaagaccaggtgattctgaaagtggactccggagactcggaagtggtcgatgggcttatgctccagcacatcactctcctcatgtgctcagcttataggaaccagctgctcaacatttttgtgcgcccatccttagtagcagtagcattgcagatgacaccagggttcaggaaagaggatgtctacagttgctttcgcttcctacgtgatgtttttgcagatgagttcatcttccttccaggaaacacactaaaggactttgaagaaggctgttacctgctttgtaaaagtgaagccatacaagtgactacgaaagacatcctagttacagagaaaggaaatactgtgttagaatttttagtaggactctttaaaccttttgtggaaagctatcagataatttgcaagtaccttttgagtgaagaagaggaccacttcagtgaggaacagtacttggctgcagtcagaaaattcacaagtcagcttctcgatcaaggtacctctcaatgttatgatgtattatcttctgatgtgcagaaaaacgccttagcagcctgtgtgaggctcggagtagtggagaagaagaagatgtaagtactgtacaagatcccatgagtgctcaaggaacaaggaaatgaatgacatttgagctcaaaatccagagagacatagaaatggatgatctaggaaatgctatattctactttccttatccatcctctaattagttaagtcagtgtgagttatcctgaaaattgtatgtggttatgaatagaaatgcaactgaagcaaagaaaggaagaaataactttaggccaatatttttgctttgacttaatgttgaaatttataattacaagaaagattttcgggagt

SEQ ID NO: 352107 - DNA, 2652 bp, Homo sapiens
gtaaagacaaaaaactatatgtatggttttgtggattatgtgtgttttgctaaaggaaaaaaccatccaggtcacggggcaccaaatttgagacaaatagtcggattagaaataaagcatctcattttgagtagagagcaagggaagtggttcttagatggtgatctgggattaggccctcaagacccttataaaaataagccaggtgtggcggtgggtgcctgtaatcccagctactcaggaggctgaggcaggagaattgctggaacccaggaggcagaggttgcagtgagccgagactgtgccactgcactccagcctgggagacaagagcgagactccctctcaaaaaaaaaaaaaaaaaaagcaaatactctattcccacatctctcagtgtccattttgattcttttaaatgcatttcatttccatctataagaagcaactatattctcttcaggggaaaaaactcaagtgtgtgatgctttgtggcttactaaatatggtggcagatagttgcagaatttgtccaaatataaattgttaatgactacttccccccccgccctcaatctgtggtcagatttttcttattagtcctaggggacaagcatgggtgtttgatttcagaaatcagtacctggcgagatttttgtctcaaaacgactatttgaatttcaagaactgtgctgcgaagacactctgagaacatttgcaagtcaggggcattttccttgacccttgactgatgctatgcggagactgatacattttcttaatggacaatgttcaagccaggtacccatgcttgatctgtcttcacaccagacctcctcatattaaaaggaaaaataagaaaaaaaatgtaagcttctatacaattatgatttgcctgtgccagttatagcagcaggaatggacttcctgggaatgaaaatggttggtgagctgctacgaatgtcgggtgcctttttcatgcggcgtacctttggtggcaataaactctactgggctgtattctctgaatatgtaaaaactatgttacggaatggttatgctcctgttgaatttttcctcgaagggacaagaagccgctctgccaagacattgactcctaaatttggtcttctgaatattgtgatggagccattttttaaaagagaagtttttgatacctaccttgtcccaattagtatcagttatgataagatcttggaagaaactctttatgtgtatgagcttctaggggttcctaaaccaaaagaatctacaactgggttgctgaaagccagaaagattctctctgaaaattttggaagcatccatgtgtactttggagatcctgtgtcacttcgatctttggcagctgggaggatgagtcggagctcatataacttggttccaagatacattcctcagaaacagtctgaggacatgcatgcctttgtcactgaagttgcctacaaaatggagcttctgcaaattgaaaacatggttttgagcccctggaccctaatagttgctgttctgcttcagaaccggccatccatggactttgatgctctggtggaaaagactttatggctaaaaggcttaacccaggcatttggagggtttctcatttggcctgataataaacctgctgaagaagttgtcccggccagcattcttctgcattccaacattgccagccttgtcaaagaccaggtgattctgaaagtggactccggagactcggaagtggtcgatgggcttatgctccagcacatcactctcctcatgtgctcagcttataggaaccagctgctcaacatttttgtgcgcccatccttagtagcagtagcattgcagatgacaccagggttcaggaaagaggatgtctacagttgctttcgcttcctacgtgatgtttttgcagatgagttcatcttccttccaggaaacacactaaaggactttgaagaaggctgttacctgctttgtaaaagtgaagccatacaagtgactacgaaagacatcctagttacagagaaaggaaatactgtgttagaatttttagtaggactctttaaaccttttgtggaaagctatcagataatttgcaagtaccttttgagtgaagaagaggaccacttcagtgaggaacagtacttggctgcagtcagaaaattcacaagtcagcttctcgatcaaggtacctctcaatgttatgatgtattatcttctgatgtgcagaaaaacgccttagcagcctgtgtgaggctcggagtagtggagaagaagaagataaataataactgtatatttaatgtgaatgaacctgccacaaccaaattagaagaaatgcttggttgtaagacaccaataggaaaaccagccactgcaaaactttaataatcaacaaatagttatggaaaattcggtcacgtaattactctcatcgaaggactcattacaacaaacagggaagtaaaggaagagacacatcctctcatactccctgagactctgagaacagtggacgcagagggaagagatgatcattggaagcaatcagtttactcttccccaccacagtggttaaaaggcgtttgtatctgacactatgtgtgtgttttaaaataaacttttggaaacatgtttggaaaagca

SEQ ID NO: 352108 - DNA, 2494 bp, Homo sapiens
agcgggcgctgcgcggcttcgcgtcctggctgagatggcggcgcccgggatcctgtgtagcggctgcagagggtgccgccgccctaggcgaagtagggccgtcctgagcgaaagaaccgcccccagcaggagcaccaccacggcttagcaaagaatcccagaccccgcccgggaaggcagccgcaccatggagtcttccagttcatctaactcttatttctccgttggcccaaccagtcccagcgctgtcgtgctcctctactcgaaggagctcaaaaagtgggatgagtttgaagatattttagaagagaggaggcatgtcagtgacttgaaatttgcaatgaaatgctacacacctcttgtctataagggaattactccatgtaaaccaattgatattaaatgtagtgttctcaattctgaggagattcattatgtcattaaacagctttccaaggaatcccttcaatctgtggatgtcctccgagaggaagtgagtgagatcttagatgaaatgagtcacaaactgcgtcttggagccattcggttttgtgccttcaccctgagcaaagtatttaaacaaattttctcgaaggtgtgtgtaaatgaagaaggtattcagaaactacaaagagccatccaggagcatcctgttgttctgctgcctagtcatcgaagttacattgacttcctcatgttgtcttttcttctatacaattatgatttgcctgtgccagttatagcagcaggaatggacttcctgggaatgaaaatggttggtgagctgctacgaatgtcgggtgcctttttcatgcggcgtacctttggtggcaataaactctactgggctgtattctctgaatatgtaaaaactatgttacggaatggttatgctcctgttgaatttttcctcgaagggacaagaagccgctctgccaagacattgactcctaaatttggtcttctgaatattgtgatggagccattttttaaaagagaagtttttgatacctaccttgtcccaattagtatcagttatgataagatcttggaagaaactctttatgtgtatgagcttctaggggttcctaaaccaaaagaatctacaactgggttgctgaaagccagaaagattctctctgaaaattttggaagcatccatgtgtactttggagatcctgtgtcacttcgatctttggcagctgggaggatgagtcggagctcatataacttggttccaagatacattcctcagaaacagtctgaggacatgcatgcctttgtcactgaagttgcctacaaaatggagcttctgcaaattgaaaacatggttttgagcccctggaccctaatagttgctgttctgcttcagaaccggccatccatggactttgatgctctggtggaaaagactttatggctaaaaggcttaacccaggcatttggagggtttctcatttggcctgataataaacctgctgaagaagttgtcccggccagcattcttctgcattccaacattgccagccttgtcaaagaccaggtgattctgaaagtggactccggagactcggaagtggtcgatgggcttatgctccagcacatcactctcctcatgtgctcagcttataggaaccagctgctcaacatttttgtgcgcccatccttagtagcagtagcattgcagatgacaccagggttcaggaaagaggatgtctacagttgctttcgcttcctacgtgatgtttttgcagatgagttcatcttccttccaggaaacacactaaaggactttgaagaaggctgttacctgctttgtaaaagtgaagccatacaagtgactacgaaagacatcctagttacagagaaaggaaatactgtgttagaatttttagtaggactctttaaaccttttgtggaaagctatcagataatttgcaagtaccttttgagtgaagaagaggaccacttcagtgaggaacagtacttggctgcagtcagaaaattcacaagtcagcttctcgatcaaggtcagtcactgctctgtgggtgctgatttcttttagttgagaatagaaactggtcaactaactcttcctcacccccaattttaggtacctctcaatgttatgatgtattatcttctgatgtgcagaaaaacgccttagcagcctgtgtgaggctcggagtagtggagaagaagaagatgtaagtactgtacaagatcccatgagtgctcaaggaacaaggaaatgaatgacatttgagctcaaaatccagagagacatagaaatggatgatctaggaaatgctatattctactttccttatccatcctctaattagttaagtcagtgtgagttatcctgaaaattgtatgtggttatgaatagaaatgcaactgaagcaaagaaaggaagaaataactttaggccaatatttttgctttgacttaatgttgaaatttataattacaagaaagattttcgggagt

SEQ ID NO: 352109 - DNA, 1283 bp, Homo sapiens
  misc_feature (8)..(8): n is a, c, g, or t
  misc_feature (16)..(16): n is a, c, g, or t
cgctagantaccccgnataacataacttggttccaagatacattcctcagaaacagtctgaggacatgcatgcctttgtcactgaagttgcctacaaaatggagcttctgcaaattgaaaacatggttttgagcccctggaccctaatagttgctgttctgcttcagaaccggccatccatggactttgatgctctggtggaaaagactttatggctaaaaggcttaacccaggcatttggagggtttctcatttggcctgataataaacctgctgaagaagttgtcccggccagcattcttctgcattccaacattgccagccttgtcaaagaccaggtgattctgaaagtggactccggagactcggaagtggtcgatgggcttatgctccagcacatcactctcctcatgtgctcagcttataggaaccagctgctcaacatttttgtgcgcccatccttagtagcagtagcattgcagatgacaccagggttcaggaaagaggatgtctacagttgctttcgcttcctacgtgatgtttttgcagatgagttcatcttccttccaggaaacacactaaaggactttgaagaaggctgttacctgctttgtaaaagtgaagccatacaagtgactacgaaagacatcctagttacagagaaaggaaatactgtgttagaatttttagtaggactctttaaaccttttgtggaaagctatcagataatttgcaagtaccttttgagtgaagaagaggaccacttcagtgaggaacagtacttggctgcagtcagaaaattcacaagtcagcttctcgatcaaggtacctctcaatgttatgatgtattatcttctgatgtgcagaaaaacgccttagcagcctgtgtgaggctcggagtagtggagaagaagaagataaataataactgtatatttaatgtgaatgaacctgccacaaccaaattagaagaaatgcttggttgtaagacaccaataggaaaaccagccactgcaaaactttaataatcaacaaatagttatggaaaattcggtcacgtaattactctcatcgaaggactcattacaacaaacagggaagtaaaggaagagacacatcctctcatactccctgagactctgagaacagtggacgcagagggaagagatgatcattggaagcaatcagtttactcttccccaccacagtggttaaaaggcgtttgtatctgacactatgtgtgtgttttaaaataaacttttggaaacatgtttggaaaagca

SEQ ID NO: 352110 - DNA, 1999 bp, Homo sapiens
  misc_feature (919)..(919): n is a, c, g, or t
taaaaataccaaaaaatggaaagaattaaaaatgtgtacagatggtgaacaagactttccttctccttccaggcttcattgggaaagtaacccttcagattcccttttatcgcccccatgtggacccttgggtgatctccatctccagccttcacttaattggagccccagagaaaatacaggatttcaatgatgaaaaggagaagctgttggaaagggaacgtaagaaagcactacttcaagccctggaggagaaatggaaggcaaggcagagatcttctgggccataagagcagttgtggtgacacgtgtaagatgagcaagaacactagattgagctaatgctgactcttgtctttgtagaatgaccgccagcagaaaggggagtcctattggtattcagttaccgcctccgtagttacaaggattgtggagaatattgaagtaagtcctgctgacttttataaaagtatcaacgtgaaagggatttctcaggtttaaacgtgtttctcctcttagtttctcatttctcgtgggctcagctgatctagggtgtagatggggctggctgctcaggtctgcccttttgtaggctgtgccaagaggaaaacctgacaagcaagtcctaggctctgtggcagacacagagttttcttgtttctgctggcatgaggaggagttttcacatctcttccatttcacttcccgcactttctttttgaatgttggaatcccacttgctcaaggatttatggcctaagaatccaggttacttgaccttgatgactgtatggtttcagggtaaatcacttcacctctctggtctcagtttcttcatctgtaaaagagagaggttggatgcctggtctctagttggttacatagtgagttgtgaaattgcgaacagctcactaagatncctaacctcttgctggtgtatctggtggcaatttgacgagttacaggactggggctgttgaccttgcccatgttttctacttcaattatacttttgtttcatcctcaaaaacttgatcagggtcccactaattttcgtgaatgttttaagagtttgtccatacttactacctctagaagtttcttgcagtgccaatgtgacagaggccaaatgtgttcaatgtatgtcatgttcccaaaaattacagtctgaggtttttgatttcgtaactttcctttgacaaacaaatttataaaatattagtcattattttcattttatcttagtttaagtagttttattgagatatagttcttatgccagaaagttcagtcttttaaagtgtacaatttaatgttttttagtatatttacaaggttgtgcgttggtcaccactaaataattccagaacatttttatcatcccaacaggtagtcactgccaaagctgggcttcgtggcatgtacctgtaatcccagctacttgggaggctggggcaagaggatgacttgagccgaggagttgggctgcaaggctgtagtgagctataatagtgcccctgcaccccattctgggcaacagaccaaaaccctgtatcttaaaaaaaaaataataatttaaaaaagtagtcattgccaattcccctctgccttcagcccctgtcaatcactaatctactttctttctagatttgcctattgtagacatttcatctaaatggaatcatgtaatatatagcctggccattttcacttgacataatgttttcaagggtcatctgtgtagtagcatgtgtcagcactttgggaggccaaggcaggcggattgcttgaggtcaggagatcgagaccagcctggtgaaaccccgtctctgctaaaaatacaaaattagctagacatggtggcatgtgcgtgtcgtcccagctacttggtggggaggctgaggcaggaaagtcgcttgaacccgggagacggaggttgcagtgagccaagatcacaccattgcactccagcctgggcgacaaagcgagactccatctc

SEQ ID NO: 352111 - DNA, 680 bp, Homo sapiens
tgttgaatgaatgacattcacgaataaagacagtcatcctattttcttctttgtcttttttacctcaggtacagaaactaatgcggaacaagcaattagacgtagcagaatttagcatctattgggatgtcgattgcactttactgggggatttgcctcagatggagttacaggtacgatttcggcagggagatttgttgcaagacagcatggaagggaagcggcgtagggtcactgccacgggggcttttgtctcttgcctctctgattccagttcccacccactgttcctctaaagccattcactctcaagtgtgtttgcttgaggtacttgctatgtatgtgacttcgaacaatatatagtgctttgttttatgtatgttttaaatttatactagactatagttttctttggtttattttattcagtgaaagctatgtttttaagatgttgctgtttgtacttccaattcattgctctgaccactgcatagtattccaccgtttgcttgttcacgtaacatacttacacatcgagatgttttccatcatttatttatttatttttgtagagatggggtctcactctgttgtccatgctggtctcaaactcttgtgctcaagcaatcctcctgctttggcctcccaaagtgctgggattataggcatgagcccccaca

SEQ ID NO: 352112 - DNA, 10841 bp, Homo sapiens
ggaggaaacgccgcgcagcgccgggctggggcgggcggcccgggacaccgacagatttttctgtgaccatgaaagagagaaataaagaatgatccatgatttctaaacaccttttcctgaggatatagtcatgttggaaggccttgtagcctgggttctcaatacctatttgggaaaatatgtcaataacctgaacactgaccagctctcagttgcacttctcaaaggtgctgttgaattagaaaacttgccattaaagaaagatgccttgaaagaattggaattaccatttgaagtcaaagctggcttcattgggaaagtaacccttcagattcccttttatcgcccccatgtggacccttgggtgatctccatctccagccttcacttaattggagccccagagaaaatacaggatttcaatgatgaaaaggagaagctgttggaaagggaacgtaagaaagcactacttcaagccctggaggagaaatggaagaatgaccgccagcagaaaggggagtcctattggtattcagttaccgcctccgtagttacaaggattgtggagaatattgaattaaaaattcaagatgtccatttacgctttgaagatggtgtcaccaatccctcccatccttttgcttttggcatctgcattaagaatgtgtccatgcaaaatgctgtgaatgagcctgtacagaaactaatgcggaacaagcaattagacgtagcagaatttagcatctattgggatgtcgattgcactttactgggggatttgcctcagatggagttacaggaggccatggccaggagcatggagagtcgcagccatcactacgtcctggagcctgtgtttgcatctgctcttttgaagagaaactgctccaagaagcccctgcggtctcggcacagtccccgtattgattgtgatattcagctggagaccattcccttgaaactctctcagctgcaataccggcaaatcatggaattcctcaaggagctggaacgaaaggagaggcaggtgaagttccgaaggtggaaacccaaggtggcgatatctaagaactgccgagaatggtggtattttgctttgaatgctaacttgtatgagatcagagagcagaggaaacgttgcacctgggactttatgttgcaccgcgctcgtgatgctgtatcttacactgacaaatatttcaacaagttaaaaggaggcctgctgtccacagatgacaaggaggaaatgtgtcggattgaagaggaacagagctttgaggaattgaagattttgcgtgaactggttcatgatcgatttcacaaacaggaagaactagcagagagtctgcgggagcctcagtttgattctccaggagcctgtccgggagccccagaacccggtggaggcagtgggatgctgcagtatctccagtcctggtttcctggatggggtggctggtacgggcagcagaccccagaagggaatgtggttgagggactgtcagcagagcaacaggagcagtggattcctgaagagatcctgggcactgaggagttttttgaccccactgcagatgcctcgtgtatgaacacgtatacaaagcgagatcatgtctttgccaaactgaatttgcagttgcagcgaggtacagtgactctgttacacaaggagcaaggaactcctcaaatgaatgaaagtgctttcatgcagctcgagttttcagatgtaaaacttctagcagagtctcttcctcgaagaaattcctcgttgctttcagtccggttgggtggactgtttcttcgagacctggctacagaaggaactatgtttcctcttctagtcttccctaatccacaaaaagaagttggcagagtctcacaatcttttggtctacaaactacatctgcagacagaagtgatcattacccagctgcagatccagatggccccgtttttgagatgctgtatgagagaaatccggcgcacagccactttgagaggcggctcaatgtcagcacaaggcccttgaacatcatatacaatccgcaggccattaaaaaagtagcagactttttctacaagggaaaggttcatacctcaggttttggttatcagtctgaacttgagctgagagtggctgaagctgcccgaagacaatataacaagctgaagatgcagaccaaggcagaaatccggcaaactcttgatcgtttgctagtgggtgatttcattgaggagagtaaacgatggaccgtgcggctggatatttctgcccctcaggtgatatttcctgatgatttcaaattcaagaatcctgtgttagttgtcgtggatctaggaagaatgcttttgacgaacacccaagataactccaggaggaaaagtagggatgggtcagcatctgaagagacccagtttagtgatgatgaatataagacccccctggccacacctcctaacaccccacctcccgagtcaagcagcagcaacggagagaaaacacctcccttttctggagttgagttcagtgaagaacagcttcaagcacatttaatgagcacaaagatgtatgagaggtactcgctgtcatttatggacctccagatcatggttggacgagtgaaagacaattggaagcatgtccaggatattgacgtgggaccaacacatgtggtagagaagttcaacgttcacctacagttagagcgtcgattgatttatacttcagatcccaaatatccaggagccgtgctctcaggcaacttaccagacttaaaaatccacattaatgaagataaaatatctgcactaaagaattgctttgctctcctcaccaccccagaaatgaaaacttctgacactcagattaaagaaaagatttttccccaggaggagcagcggggaagtttgcaagactccgtaatgaatttaacccagagcattgtgttgttggagcagcatacccgcgaggttctggtggagtcgcagctcctcctggcggaatttaaagtgaactgtatgcagcttggtgttgagagcaatggccggtacatttctgtgctcaaggtgtttggtaccaatgctcactttgtgaagaggccttatgatgctgaagtctccctaactgttcatggtttgctcctggtggataccatgcagacatatggtgctgattttgaccttttgatggcttcacataagaacttgagctttgatattccaacgggaagccttcgggatagcagggcccagtctcctgtctctggaccgaatgtggcccacttaactgatggagctacactgaacgaccgatcagctactagtgtttcacttgacaaaattcttaccaaagagcaagagtcccttattaagttggaatatcagtttgtgagttcagagtgcccatcgatgaatttagacagtactcttcaggtgatttccctacaggtgaataatttagatattatcctcaatccagagacgattgtggagctaattggttttcttcaaaaatcctttcccaaggaaaaagatgatttaagtcctcaacctttaatgactgattttgaaagaagcttcagagaacaaggaacttaccagtctacatatgaacaaaacactgaggttgcagtggaaatccataggctgaacttactgcttcttcggacagtgggcatggcaaatagagagaaatatggcagaaaaattgcaactgcaagtataggtggcaccaaagttaatgtctcaatgggtagcacgtttgacatgaatggttctcttggctgtttacagcttatggatttgacacaagataacgttaaaaaccagtatgttgtcagcattgggaattctgtaggctatgaaaatatcatcagtgatattggctactttgaatctgtgtttgtcagaatggaagatgcagccctcactgaagctttgagtttcacgtttgttgagagatctaaacaggagtgttttctcaacctgaagatggcttctttacattataaccactctgctaagtttttgaaggagttgacgttatccatggatgaactggaagaaaattttcgaggtatgctgaaaagcgcagccaccaaagtcaccacagtactagctaccaagactgccgagtatagcgagatggtatcgctctttgaaactccaaggaagactcgggaaccctttatcttagaggaaaatgaaatatatgggtttgacctagcttcgtctcatttggacactgtaaagctaatcttgaacataaacattgaatcaccagttgtttctatccctcggaagccggggagtcctgagttgttggtgggacacttgggacagatattcatccagaattttgtggcgggagatgatgaatccagaagtgaccgtctgcaggtggaaatcaaggacattaaactgtattctttgaattgcacccagttggcaggtagagaagctgttgggtctgaaggaagccggatgttttgcccaccttccgggtctggcagtgccaacagtcaggaggaagctcatttcacacgacatgatttctttgaatctttgcatagaggtcaagcttttcacatcctgaacaacaccaccattcagtttaaactggagaagatccctatagagagagtatctgaattgactttttctcttagcccagatgacctgggaacttctagcatcatgaagattgaaggaaaatttgtcaatccagttcaggtggtgttagcaaagcatgtatatgagcaggttttacaaaccctggacaatctcgtgtacagtgaagatctgaataagtatccagccagtgctacctcctccccttgccctgattctcctctgcctcccctcagtacctgtggagaatcttctgttgaaaggaaggagaatggattgttcagccactccagcctttctaacacctctcagaagtcattgtcagtgaaggaagtcaaatcctttactcagattcaagccaccttttgtatatcagagcttcaggttcagctaagtggagatctgactttgggggcccaaggtcttgtgagcttaaagtttcaggactttgaggtggaattcagtaaagaccatccccagactttatctattcagattgccctgcattctctgctgatggaggacttattggagaagaatccagattctaaatataagaacctgatggtgtctcgaggagcccctaagccatctagtttagcacaaaaagaatacctttctcagtcttgcccctcagtgtccaatgtggaatatcctgatatgcctcggtctctcccttcccacatggaagaagctcctaatgtcttccagttgtatcaaaggcccacctctgcgtcccggaaaaagcaaaaggaagtccaagacaaggactatcccttgaccccacctccttctccaacagtggatgagcccaagatacttgttggaaagagtaaatttgatgattccttagtccacatcaacatattcttggtagataagaaacatccagaattctcttccagttacaatcgagttaaccggagcattgatgttgattttaattgcttggatgtgctgatcacactgcaaacctgggttgtgatattagacttttttggaatcggctccactgcagacaaccacgcaatgaggctgcctcctgagggcattctgcacaacgtgaagttggagccacatgcctccatggagtctggacttcaggatccagtgaacaccaaactggatctcaaggttcattcactttctctagtgctgaataagaccaccagtgagcttgccaaagcaaatgtgtccaaattagtagcacacctggaaatgattgagggagacctggccttacagggcagcattgggagtctgtctctaagtgacctcacatgccatggagagttctacagagaacggttcactaccagtggtgaagaagcactcatcttccagacttttaaatacggacggcctgaccctctgctccggagagaacacgacattcgcgtgagcctccggatggcctctgtgcagtatgtgcatactcagcgtttccaggcagaggtggtggccttcattcagcatttcactcagctgcaggatgtcttagggcgccagcgagctgctattgaggggcagacggtgagagatcaagcccagcgctgttcacgggttctcctggatattgaggctggtgctcccgttctcttgatcccagaaagttccagatcaaataatctgattgtagcaaatttggggaagttgaaagtcaaaaataagtttctgtttgctggttttcctggcaccttttccctacaagataaggaatctgtgccttcagcttccccaacgggtattcccaaacacagtctgaggaaaacgacaagcacggaggagcccaggggaacccattcccaggggcagttcacgatgcctcttgctggaatgagcctaggaagcctgaagagtgagtttgtgcccagtacctccaccaagcagcaagggccgcaacccacactgtctgttggccaagagtccagtagtccagaagaccatgtctgcctgctggattgcgttgtcgtggatctccaggacatggacatctttgctgcagagagacatccgagagaatactcgaaggcaccagaggatagtagtggagatctgatcttcccttcctattttgtgcgacagacaggaggaagcctcttaaccgagccttgtaggctgaaattgcaggtggaaaggaatttggacaaagaaataagtcatactgtgccagacatatctatccatggcaatctctcctcagtccactgctctctggatctgtataaatacaagctgatccgcggcttattagagaacaacctgggagaacccatagaggaatttatgcggccttatgatttacaagatccaagaattcatactgtcctgagtggagaagtgtacacctgtatgtgcttcctcattgatatggtgaatgtaagtctggagcttaaagatccaaaaagaaaagaaggtgctgggtccctagccagatttgacttcaagaaatgcaaactgctctatgaaagtttttccaaccaaaccaagtccattaacttggtttcccattccatgatggcttttgacacccgttatgctgggcagaagaccagccctggcatgacgaatgtgttcagctgtatctttcagcccgctaagaacagcagcaccacccaagggtccattcagattgaactacatttcagatctaccaaggattcctcctgctttacagtagttctcaacaatctccgtgtgtttctcatatttgactggctactgttagtccatgattttctccacactcccagtgatattaagaaacaaaatcatgttactccttctcgccaccgtaactctagcagcgaatctgctatagttcccaaaactgtgaagagtggagtagttaccaagcggtcttcccttcctgtgtccaatgaaaggcacctggaggtcaaggtcaatgtaacaggtacggagtttgtggtcattgaagatgtgtcctgcttcgacaccaatgccattattctgaaaggcaccacagtgctcacctataagccccggtttgttgatcgccccttttcaggaagtttgtttggcattgaggtgttttcatgccgactagggaatgagcatgatacagctctttcaattgtggatcccgtacaaattcaaatggagttggtggggaattcttcttatcaaaatagttcaggattgatggatgcattcaatagtgaagatttcccacctgtcctggagattcagttacaagccctggatatcagactctcctataatgatgttcagctgtttcttgccattgcaaaatccatcccagagcaagctaatgctgcagtgccagactcagtggccctggagtcagactccgttggcacttaccttccaggtgcatctcgcgttggagaggaaatcagagaagggacaagacacaccttagatcctgtcttggagttacagctggctaggctgcaggagctgggattcagcatggatgattgtcgcaaagctcttttggcgtgtcaaggccaattgaaaaaggcagcaagttggttgtttaagaatgcggaacctctgaagtctctttccttggcctccaccagccgagatagcccaggggctgtggcagcgccattgatctctggcgtggagatcaaagctgagagtgtgtgcatctgtttcatcgatgactgcatggattgtgatgttcctctcgctgaactcaccttttcccgtctgaattttcttcagcgtgtaagaactagccctgaaggctatgcccacttcaccctttctggagattattataaccgtgctctttcaggctgggagccatttattgagccttggccatgctctgtatcctggcaacagcaggcagctggtcgtctccatcctcctcgactgaagctagaagccaaggccaaacctcgtttggatatcaatatcacttctgtgctaattgaccagtatgtaagtaccaaggaatcgtggatggcagattactgtaaagatgacaaggacatagagtcagctaaatcagaagactggatgggctcttcggtggatcctccatgttttggacaaagtaagagttttcactacatgtgtttaactaaatcacttttgacctacaaagcaatgcttcactgagaaattcaaatggaaccatcattctgcgtggaaaaacctacaggaaattctgactatcttctgtagttctgttttagtctttgcaggagacagttttctggcatgaactactgaacttataaatgtgggctgtaattccacctttgcgggggagaaaagatctgcaacacgtaattcctaaatcctggtaataatgcatatgaactggtgcacctgagaatgcatcaggatcagctgtggtttgtgttttactctgcaaaacattggttttctaattgatcggatttttttggccagatttttaaaagcatctaaaatggtcttctaaatctagagatagagggtttggacatattcttgaaaagagggcgagcaggagcccatgtggaaaaagttgttaaaaagggagccctgtgctgttcatagagtataaaagaattgaatgccctgcctcttgaagaaagaggagtcagcttgctctctattgatgatgctttctttccttatttaatgcctcgccggctctgttttcctcagagctggggagatggtgatggacaactgcatggtcttagttgttccacaagccattgtcatccaaattcaactcagctccaactcttacaatgtggtttctttggggagtcttggctggacttcacatagctcatgaatacttaaatattccatctggtctgcaaacgtgtcatgggaagattgggtgttcttagtgtgtgaagtaattgtactggttcatctctcctcagggtgaataagtggactttctgtctgccttgtacttctagaaagagacacaaagaaatgtcagctgtgcttgttctctgttttcccaggctgttgcttctgagtctcaaggtcattacttaggagccagggcttttcagatattgtcagctttgattttagctcctcctccaaccttcccaatttgtgtgtcaagaaaatgtaacatagtctacccagaagactctagataatctttgtaatatgtccaagagagtgtgtttctaaaacattattcatgcaggggcatcttcaattcagagtcaaactctagcaaggcctggtctgcaagattctgatgaaagattttcttgtccctctctttcttctttccttcttccctccctgcctccctttcttccttcctttttaaaattttgtccctctctctttctctatagttaaaaggcttcctcatctatattaaatgctggtgctgagttaaagcttgatttttatttatttaaagatttttatgattacttaggcttataaaagtgtaatctatctttttaataagacataacttgaatatgcataaatttccaaacctcttttcttattggaaattcctggatggtagtacagtacattccaggattgtattcttttagcaggcctactaaaatgatcattgggaatttattttgaaagtgagtagggttcaaccttgttgaactaatcataaactttcaggtcttattcaagaatagtaagtcatattcctacaaaagttatgcttcttattcagactggccttaaaacaagctcttgggaatagcccttaacatgaaatttagcctaagggacctgctgctttctcactgtttctttatcaggggaaagaaaataccagcctccttttgacaaaattgttggctttgttcagtcagggctgagattttgcaggtaaacctgggcggtgtggcacttcattgaatttattagttttgtattccaaggacattttatgaaaatatcaaatattctgaaaacttccatgcttgatttagaatttaaataaacactatgaggcaactccttggtagagattgtttaaatttggaacacatactgactcttcccctgaatttttgagatcccctgagactggcattttacttctgtgttttaccagttggaatggagcaaccttcactaaaatctgtactgatggattttcgtaactttttaatgccatttaagaacataacacctttaaattaaaaatcttcaaaaggctcgtcattctgttcaagagaaggttcaatacatattcttctaattcagg

SEQ ID NO: 352113 - DNA, 10091 bp, Homo sapiens
ccagaaggaaagccattcggagcagagcaggtgttcttgtgacacacaggaggccatggccaggagcatggagagtcgcagccatcactacgtcctggagcctgtgtttgcatctgctcttttgaagagaaactgctccaagaagcccctgcggtctcggcacagtccccgtattgattgtgatattcagctggagaccattcccttgaaactctctcagctgcaataccggcaaatcatggaattcctcaaggagctggaacgaaaggagaggcaggtgaagttccgaaggtggaaacccaaggtggcgatatctaagaactgccgagaatggtggtattttgctttgaatgctaacttgtatgagatcagagagcagaggaaacgttgcacctgggactttatgttgcaccgcgctcgtgatgctgtatcttacactgacaaatatttcaacaagttaaaaggaggcctgctgtccacagatgacaaggaggaaatgtgtcggattgaagaggaacagagctttgaggaattgaagattttgcgtgaactggttcatgatcgatttcacaaacaggaagaactagcagagagtctgcgggagcctcagtttgattctccaggagcctgtccgggagccccagaacccggtggaggcagtgggatgctgcagtatctccagtcctggtttcctggatggggtggctggtacgggcagcagaccccagaagggaatgtggttgagggactgtcagcagagcaacaggagcagtggattcctgaagagatcctgggcactgaggagttttttgaccccactgcagatgcctcgtgtatgaacacgtatacaaagcgagatcatgtctttgccaaactgaatttgcagttgcagcgaggtacagtgactctgttacacaaggagcaaggaactcctcaaatgaatgaaagtgctttcatgcagctcgagttttcagatgtaaaacttctagcagagtctcttcctcgaagaaattcctcgttgctttcagtccggttgggtggactgtttcttcgagacctggctacagaaggaactatgtttcctcttctagtcttccctaatccacaaaaagaagttggcagagtctcacaatcttttggtctacaaactacatctgcagacagaagtgatcattacccagctgcagatccagatggccccgtttttgagatgctgtatgagagaaatccggcgcacagccactttgagaggcggctcaatgtcagcacaaggcccttgaacatcatatacaatccgcaggccattaaaaaagtagcagactttttctacaagggaaaggttcatacctcaggttttggttatcagtctgaacttgagctgagagtggctgaagctgcccgaagacaatataacaagctgaagatgcagaccaaggcagaaatccggcaaactcttgatcgtttgctagtgggtgatttcattgaggagagtaaacgatggaccgtgcggctggatatttctgcccctcaggtgatatttcctgatgatttcaaattcaagaatcctgtgttagttgtcgtggatctaggaagaatgcttttgacgaacacccaagataactccaggaggaaaagtagggatgggtcagcatctgaagagacccagtttagtgatgatgaatataagacccccctggccacacctcctaacaccccacctcccgagtcaagcagcagcaacggagagaaaacacctcccttttctggagttgagttcagtgaagaacagcttcaagcacatttaatgagcacaaagatgtatgagaggtactcgctgtcatttatggacctccagatcatggttggacgagtgaaagacaattggaagcatgtccaggatattgacgtgggaccaacacatgtggtagagaagttcaacgttcacctacagttagagcgtcgattgatttatacttcagatcccaaatatccaggagccgtgctctcaggcaacttaccagacttaaaaatccacattaatgaagataaaatatctgcactaaagaattgctttgctctcctcaccaccccagaaatgaaaacttctgacactcagattaaagaaaagatttttccccaggaggagcagcggggaagtttgcaagactccgtaatgaatttaacccagagcattgtgttgttggagcagcatacccgcgaggttctggtggagtcgcagctcctcctggcggaatttaaagtgaactgtatgcagcttggtgttgagagcaatggccggtacatttctgtgctcaaggtgtttggtaccaatgctcactttgtgaagaggccttatgatgctgaagtctccctaactgttcatggtttgctcctggtggataccatgcagacatatggtgctgattttgaccttttgatggcttcacataagaacttgagctttgatattccaacgggaagccttcgggatagcagggcccagtctcctgtctctggaccgaatgtggcccacttaactgatggagctacactgaacgaccgatcagctactagtgtttcacttgacaaaattcttaccaaagagcaagagtcccttattaagttggaatatcagtttgtgagttcagagtgcccatcgatgaatttagacagtactcttcaggtgatttccctacaggtgaataatttagatattatcctcaatccagagacgattgtggagctaattggttttcttcaaaaatcctttcccaaggaaaaagatgatttaagtcctcaacctttaatgactgattttgaaagaagcttcagagaacaaggaacttaccagtctacatatgaacaaaacactgaggttgcagtggaaatccataggctgaacttactgcttcttcggacagtgggcatggcaaatagagagaaatatggcagaaaaattgcaactgcaagtataggtggcaccaaagttaatgtctcaatgggtagcacgtttgacatgaatggttctcttggctgtttacagcttatggatttgacacaagataacgttaaaaaccagtatgttgtcagcattgggaattctgtaggctatgaaaatatcatcagtgatattggctactttgaatctgtgtttgtcagaatggaagatgcagccctcactgaagctttgagtttcacgtttgttgagagatctaaacaggagtgttttctcaacctgaagatggcttctttacattataaccactctgctaagtttttgaaggagttgacgttatccatggatgaactggaagaaaattttcgaggtatgctgaaaagcgcagccaccaaagtcaccacagtactagctaccaagactgccgagtatagcgagatggtatcgctctttgaaactccaaggaagactcgggaaccctttatcttagaggaaaatgaaatatatgggtttgacctagcttcgtctcatttggacactgtaaagctaatcttgaacataaacattgaatcaccagttgtttctatccctcggaagccggggagtcctgagttgttggtgggacacttgggacagatattcatccagaattttgtggcgggagatgatgaatccagaagtgaccgtctgcaggtggaaatcaaggacattaaactgtattctttgaattgcacccagttggcaggtagagaagctgttgggtctgaaggaagccggatgttttgcccaccttccgggtctggcagtgccaacagtcaggaggaagctcatttcacacgacatgatttctttgaatctttgcatagaggtcaagcttttcacatcctgaacaacaccaccattcagtttaaactggagaagatccctatagagagagtatctgaattgactttttctcttagcccagatgacctgggaacttctagcatcatgaagattgaaggaaaatttgtcaatccagttcaggtggtgttagcaaagcatgtatatgagcaggttttacaaaccctggacaatctcgtgtacagtgaagatctgaataagtatccagccagtgctacctcctccccttgccctgattctcctctgcctcccctcagtacctgtggagaatcttctgttgaaaggaaggagaatggattgttcagccactccagcctttctaacacctctcagaagtcattgtcagtgaaggaagtcaaatcctttactcagattcaagccaccttttgtatatcagagcttcaggttcagctaagtggagatctgactttgggggcccaaggtcttgtgagcttaaagtttcaggactttgaggtggaattcagtaaagaccatccccagactttatctattcagattgccctgcattctctgctgatggaggacttattggagaagaatccagattctaaatataagaacctgatggtgtctcgaggagcccctaagccatctagtttagcacaaaaagaatacctttctcagtcttgcccctcagtgtccaatgtggaatatcctgatatgcctcggtctctcccttcccacatggaagaagctcctaatgtcttccagttgtatcaaaggcccacctctgcgtcccggaaaaagcaaaaggaagtccaagacaaggactatcccttgaccccacctccttctccaacagtggatgagcccaagatacttgttggaaagagtaaatttgatgattccttagtccacatcaacatattcttggtagataagaaacatccagaattctcttccagttacaatcgagttaaccggagcattgatgttgattttaattgcttggatgtgctgatcacactgcaaacctgggttgtgatattagacttttttggaatcggctccactgcagacaaccacgcaatgaggctgcctcctgagggcattctgcacaacgtgaagttggagccacatgcctccatggagtctggacttcaggatccagtgaacaccaaactggatctcaaggttcattcactttctctagtgctgaataagaccaccagtgagcttgccaaagcaaatgtgtccaaattagtagcacacctggaaatgattgagggagacctggccttacagggcagcattgggagtctgtctctaagtgacctcacatgccatggagagttctacagagaacggttcactaccagtggtgaagaagcactcatcttccagacttttaaatacggacggcctgaccctctgctccggagagaacacgacattcgcgtgagcctccggatggcctctgtgcagtatgtgcatactcagcgtttccaggcagaggtggtggccttcattcagcatttcactcagctgcaggatgtcttagggcgccagcgagctgctattgaggggcagacggtgagagatcaagcccagcgctgttcacgggttctcctggatattgaggctggtgctcccgttctcttgatcccagaaagttccagatcaaataatctgattgtagcaaatttggggaagttgaaagtcaaaaataagtttctgtttgctggttttcctggcaccttttccctacaagataaggaatctgtgccttcagcttccccaacgggtattcccaaacacagtctgaggaaaacgacaagcacggaggagcccaggggaacccattcccaggggcagttcacgatgcctcttgctggaatgagcctaggaagcctgaagagtgagtttgtgcccagtacctccaccaagcagcaagggccgcaacccacactgtctgttggccaagagtccagtagtccagaagaccatgtctgcctgctggattgcgttgtcgtggatctccaggacatggacatctttgctgcagagagacatccgagagaatactcgaaggcaccagaggatagtagtggagatctgatcttcccttcctattttgtgcgacagacaggaggaagcctcttaaccgagccttgtaggctgaaattgcaggtggaaaggaatttggacaaagaaataagtcatactgtgccagacatatctatccatggcaatctctcctcagtccactgctctctggatctgtataaatacaagctgatccgcggcttattagagaacaacctgggagaacccatagaggaatttatgcggccttatgatttacaagatccaagaattcatactgtcctgagtggagaagtgtacacctgtatgtgcttcctcattgatatggtgaatgtaagtctggagcttaaagatccaaaaagaaaagaaggtgctgggtccctagccagatttgacttcaagaaatgcaaactgctctatgaaagtttttccaaccaaaccaagtccattaacttggtttcccattccatgatggcttttgacacccgttatgctgggcagaagaccagccctggcatgacgaatgtgttcagctgtatctttcagcccgctaagaacagcagcaccacccaagggtccattcagattgaactacatttcagatctaccaaggattcctcctgctttacagtagttctcaacaatctccgtgtgtttctcatatttgactggctactgttagtccatgattttctccacactcccagtgatattaagaaacaaaatcatgttactccttctcgccaccgtaactctagcagcgaatctgctatagttcccaaaactgtgaagagtggagtagttaccaagcggtcttcccttcctgtgtccaatgaaaggcacctggaggtcaaggtcaatgtaacaggtacggagtttgtggtcattgaagatgtgtcctgcttcgacaccaatgccattattctgaaaggcaccacagtgctcacctataagccccggtttgttgatcgccccttttcaggaagtttgtttggcattgaggtgttttcatgccgactagggaatgagcatgatacagctctttcaattgtggatcccgtacaaattcaaatggagttggtggggaattcttcttatcaaaatagttcaggattgatggatgcattcaatagtgaagatttcccacctgtcctggagattcagttacaagccctggatatcagactctcctataatgatgttcagctgtttcttgccattgcaaaatccatcccagagcaagctaatgctgcagtgccagactcagtggccctggagtcagactccgttggcacttaccttccaggtgcatctcgcgttggagaggaaatcagagaagggacaagacacaccttagatcctgtcttggagttacagctggctaggctgcaggagctgggattcagcatggatgattgtcgcaaagctcttttggcgtgtcaaggccaattgaaaaaggcagcaagttggttgtttaagaatgcggaacctctgaagtctctttccttggcctccaccagccgagatagcccaggggctgtggcagcgccattgatctctggcgtggagatcaaagctgagagtgtgtgcatctgtttcatcgatgactgcatggattgtgatgttcctctcgctgaactcaccttttcccgtctgaattttcttcagcgtgtaagaactagccctgaaggctatgcccacttcaccctttctggagattattataaccgtgctctttcaggctgggagccatttattgagccttggccatgctctgtatcctggcaacagcaggcagctggtcgtctccatcctcctcgactgaagctagaagccaaggccaaacctcgtttggatatcaatatcacttctgtgctaattgaccagtatgtaagtaccaaggaatcgtggatggcagattactgtaaagatgacaaggacatagagtcagctaaatcagaagactggatgggctcttcggtggatcctccatgttttggacaaagtaagagttttcactacatgtgtttaactaaatcacttttgacctacaaagcaatgcttcactgagaaattcaaatggaaccatcattctgcgtggaaaaacctacaggaaattctgactatcttctgtagttctgttttagtctttgcaggagacagttttctggcatgaactactgaacttataaatgtgggctgtaattccacctttgcgggggagaaaagatctgcaacacgtaattcctaaatcctggtaataatgcatatgaactggtgcacctgagaatgcatcaggatcagctgtggtttgtgttttactctgcaaaacattggttttctaattgatcggatttttttggccagatttttaaaagcatctaaaatggtcttctaaatctagagatagagggtttggacatattcttgaaaagagggcgagcaggagcccatgtggaaaaagttgttaaaaagggagccctgtgctgttcatagagtataaaagaattgaatgccctgcctcttgaagaaagaggagtcagcttgctctctattgatgatgctttctttccttatttaatgcctcgccggctctgttttcctcagagctggggagatggtgatggacaactgcatggtcttagttgttccacaagccattgtcatccaaattcaactcagctccaactcttacaatgtggtttctttggggagtcttggctggacttcacatagctcatgaatacttaaatattccatctggtctgcaaacgtgtcatgggaagattgggtgttcttagtgtgtgaagtaattgtactggttcatctctcctcagggtgaataagtggactttctgtctgccttgtacttctagaaagagacacaaagaaatgtcagctgtgcttgttctctgttttcccaggctgttgcttctgagtctcaaggtcattacttaggagccagggcttttcagatattgtcagctttgattttagctcctcctccaaccttcccaatttgtgtgtcaagaaaatgtaacatagtctacccagaagactctagataatctttgtaatatgtccaagagagtgtgtttctaaaacattattcatgcaggggcatcttcaattcagagtcaaactctagcaaggcctggtctgcaagattctgatgaaagattttcttgtccctctctttcttctttccttcttccctccctgcctccctttcttccttcctttttaaaattttgtccctctctctttctctatagttaaaaggcttcctcatctatattaaatgctggtgctgagttaaagcttgatttttatttatttaaagatttttatgattacttaggcttataaaagtgtaatctatctttttaataagacataacttgaatatgcataaatttccaaacctcttttcttattggaaattcctggatggtagtacagtacattccaggattgtattcttttagcaggcctactaaaatgatcattgggaatttattttgaaagtgagtagggttcaaccttgttgaactaatcataaactttcaggtcttattcaagaatagtaagtcatattcctacaaaagttatgcttcttattcagactggccttaaaacaagctcttgggaatagcccttaacatgaaatttagcctaagggacctgctgctttctcactgtttctttatcaggggaaagaaaataccagcctccttttgacaaaattgttggctttgttcagtcagggctgagattttgcaggtaaacctgggcggtgtggcacttcattgaatttattagttttgtattccaaggacattttatgaaaatatcaaatattctgaaaacttccatgcttgatttagaatttaaataaacactatgaggcaactccttggtagagattgtttaaatttggaacacatactgactcttcccctgaatttttgagatcccctgagactggcattttacttctgtgttttaccagttggaatggagcaaccttcactaaaatctgtactgatggattttcgtaactttttaatgccatttaagaacataacacctttaaattaaaaatcttcaaaaggctcgtcattctgttcaagagaaggttcaatacatattcttctaattcagg

SEQ ID NO: 352114 - DNA, 710 bp, Homo sapiens
ttatagatctagtataaatttaacacatacatatacacaaagcactatatatgtacgaagtcacatacatagcaagtacctcaagcaaacacacttgagtacagaaactaatgcggaacaagcaattagacgtagcagaatttagcatctattgggatgtcgattgcactttactgggggatttgcctcagatggagttacaggtacgatttcggcagggagatttgttgcaagacagcatggaagggaagcggcgtagggtcactgccacgggggcttttgtctcttgcctctctgattccagttcccacccactgttcctctaaagccattcactctcaagtgtgtttgcttgaggtacttgctatgtatgtgacttcgaacaatatatagtgctttgttttatgtatgttttaaatttatactagactatagttttctttggtttattttattcagtgaaagctatgtttttaagatgttgctgtttgtacttccaattcattgctctgaccactgcatagtattccaccgtttgcttgttcacgtaacatacttacacatcgagatgttttccatcatttatttatttatttttgtagagatggggtctcactctgttgtccatgctggtctcaaactcttgtgctcaagcaatcctcctgctttggcctcccaaagtgctgggattataggcatgagcccccaca

SEQ ID NO: 352115 - DNA, 1223 bp, Homo sapiens
ggaggaaacgccgcgcagcgccgggctggggcgggcggcccgggacaccgacagatttttctgtgaccatgaaagagagaaataaagaatgatccatgatttctaaacaccttttcctgaggatatagtcatgttggaaggccttgtagcctgggttctcaatacctatttgggaaaatatgtcaataacctgaacactgaccagctctcagttgcacttctcaaaggtgctgttgaattagaaaacttgccattaaagaaagatgccttgaaagaattggaattaccatttgaagtcaaagctggcttcattgggaaagtaacccttcagattcccttttatcgcccccatgtggacccttgggtgatctccatctccagccttcacttaattggagccccagagaaaatacaggatttcaatgatgaaaaggagaagctgttggaaagggaacgtaagaaagcactacttcaagccctggaggagaaatggaaggcaaggcagagatcttctgggccataagagcagttgtggtgacacgtgtaagatgagcaagaacactagattgagctaatgctgactcttgtctttgtagaatgaccgccagcagaaaggggagtcctattggtattcagttaccgcctccgtagttacaaggattgtggagaatattgaattaaaaattcaagatgtccatttacgctttgaagatggtgtcaccaatccctcccatccttttgcttttggcatctgcattaagaatgtgtccatgcaaaatgctgtgaatgagcctgtacagaaactaatgcggaacaagcaattagacgtagcagaatttagcatctattgggatgtcgattgcactttactgggggatttgcctcagatggagttacaggaggccatggccaggagcatggagagtcgcagccatcactacgtcctggagcctgtgtttgcatctgctcttttgaagagaaactgctccaagaagcccctgcggtctcggcacagtccccgtattgattgtgatattcagctggagaccattcccttgaaactctctcagctgcaataccggcaaatcatggaattcctcaaggagctggaacgaaaggagaggcaggtgaagttccgaaggtggaaacccaaggtggcgatatctaagaatgccgagaatggtgcgtattttgctgttccgctgggtaccgaagctcgatcc

SEQ ID NO: 352116 - DNA, 3394 bp, Homo sapiens
cctgaacagatacagctgaacacattcgtcatgcagggctgctcttctgcccagcataacgggtgtcaaaagccatcatggaattgggaaaccaagttaatggacttggtttcccattccatggtggcatcgataaacaccaatgccattattctgaaaggcaccacagtgctcacctataagccccggtttgttgatcgccccttttcaggaagtttgtttggcattgaggtgttttcatgccgactagggaatgagcatgatacagctctttcaattgtggatcccgtacaaattcaaatggagttggtggggaattcttcttatcaaaatagttcaggattgatggatgcattcaatagtgaagatttcccacctgtcctggagattcagttacaagccctggatatcagactctcctataatgatgttcagctgtttcttgccattgcaaaatccatcccagagcaagctaatgctgcagtgccagactcagtggccctggagtcagactccgttggcacttaccttccaggtgcatctcgcgttggagaggaaatcagagaagggacaagacacaccttagatcctgtcttggagttacagctggctaggctgcaggagctgggattcagcatggatgattgtcgcaaagctcttttggcgtgtcaaggccaattgaaaaaggcagcaagttggttgtttaagaatgcggaacctctgaagtctctttccttggcctccaccagccgagatagcccaggggctgtggcagcgccattgatctctggcgtggagatcaaagctgagagtgtgtgcatctgtttcatcgatgactgcatggattgtgatgttcctctcgctgaactcaccttttcccgtctgaattttcttcagcgtgtaagaactagccctgaaggctatgcccacttcaccctttctggagattattataaccgtgctctttcaggctgggagccatttattgagccttggccatgctctgtatcctggcaacagcaggcagctggtcgtctccatcctcctcgactgaagctagaagccaaggccaaacctcgtttggatatcaatatcacttctgtgctaattgaccagtatgtaagtaccaaggaatcgtggatggcagattactgtaaagatgacaaggacatagagtcagctaaatcagaagactggatgggctcttcggtggatcctccatgttttggacaaagtaagagttttcactacatgtgtttaactaaatcacttttgacctacaaagcaatgcttcactgagaaattcaaatggaaccatcattctgcgtggaaaaacctacaggaaattctgactatcttctgtagttctgttttagtctttgcaggagacagttttctggcatgaactactgaacttataaatgtgggctgtaattccacctttgcgggggagaaaagatctgcaacacgtaattcctaaatcctggtaataatgcatatgaactggtgcacctgagaatgcatcaggatcagctgtggtttgtgttttactctgcaaaacattggttttctaattgatcggatttttttggccagatttttaaaagcatctaaaatggtcttctaaatctagagatagagggtttggacatattcttgaaaagagggcgagcaggagcccatgtggaaaaagttgttaaaaagggagccctgtgctgttcatagagtataaaagaattgaatgccctgcctcttgaagaaagaggagtcagcttgctctctattgatgatgctttctttccttatttaatgcctcgccggctctgttttcctcagagctggggagatggtgatggacaactgcatggtcttagttgttccacaagccattgtcatccaaattcaactcagctccaactcttacaatgtggtttctttggggagtcttggctggacttcacatagctcatgaatacttaaatattccatctggtctgcaaacgtgtcatgggaagattgggtgttcttagtgtgtgaagtaattgtactggttcatctctcctcagggtgaataagtggactttctgtctgccttgtacttctagaaagagacacaaagaaatgtcagctgtgcttgttctctgttttcccaggctgttgcttctgagtctcaaggtcattacttaggagccagggcttttcagatattgtcagctttgattttagctcctcctccaaccttcccaatttgtgtgtcaagaaaatgtaacatagtctacccagaagactctagataatctttgtaatatgtccaagagagtgtgtttctaaaacattattcatgcaggggcatcttcaattcagagtcaaactctagcaaggcctggtctgcaagattctgatgaaagattttcttgtccctctctttcttctttccttcttccctccctgcctccctttcttccttcctttttaaaattttgtccctctctctttctctatagttaaaaggcttcctcatctatattaaatgctggtgctgagttaaagcttgatttttatttatttaaagatttttatgattacttaggcttataaaagtgtaatctatctttttaataagacataacttgaatatgcataaatttccaaacctcttttcttattggaaattcctggatggtagtacagtacattccaggattgtattcttttagcaggcctactaaaatgatcattgggaatttattttgaaagtgagtagggttcaaccttgttgaactaatcataaactttcaggtcttattcaagaatagtaagtcatattcctacaaaagttatgcttcttattcagactggccttaaaacaagctcttgggaatagcccttaacatgaaatttagcctaagggacctgctgctttctcactgtttctttatcaggggaaagaaaataccagcctccttttgacaaaattgttggctttgttcagtcagggctgagattttgcaggtaaacctgggcggtgtggcacttcattgaatttattagttttgtattccaaggacattttatgaaaatatcaaatattctgaaaacttccatgcttgatttagaatttaaataaacactatgaggcaactccttggtagagattgtttaaatttggaacacatactgactcttcccctgaatttttgagatcccctgagactggcattttacttctgtgttttaccagttggaatggagcaaccttcactaaaatctgtactgatggattttcgtaactttttaatgccatttaagaacataacacctttaaattaaaaatcttcaaaaggctcgtcattctgttcaagagaaggttcaatacatattcttctaattcagg

SEQ ID NO: 352117 - DNA, 202 bp, Homo sapiens
agggagacctggccttacagggcagcattgggagtctgtctctaagtgacctcacatgccatggagagttctacagagaacggttcactaccagtggtgaagaagcactcatcttccagacttttaagtaaaaatgtcaatctttttctgacttgatattttatcataatacttgctgtttcagattcttgttggctagaca

SEQ ID NO: 352118 - DNA, 502 bp, Homo sapiens
cagcagcattagatattaccgataatttgtctcccaaacaggttaacagtcctctgagatcaggtactatagaggtggaataacaagacgggcatggtggctcatgcccattatcccagtactttaggaggccatggccaggagcatggagagtcgcagccatcactacgtcctggagcctgtgtttgcatctgctcttttgaagagaaactgctccaagaagcccctgcggtctcggcacagtccccgtattgattgtgatattcagctggagaccattcccttgaaactctctcaggtatgccctttcttctcagtggcatctacttactgtcaaactggtgactgcagtgaaagtcttgatattaacgtatcctcagcaggaaagaaagttcatgtgagaccatttccctccagactaaagttgtgttaggtataaaactcaccgtctgttacatagttaaattgggttgatctcaggttagttttttttttttttttt

SEQ ID NO: 352119 - DNA, 10116 bp, Homo sapiens
cgtagggatgtaagcttcgattgggcggtcgtttgcaaccgtcgtgaggggtgaagacccagagggagttacaggaggccatggccaggagcatggagagtcgcagccatcactacgtcctggagcctgtgtttgcatctgctcttttgaagagaaactgctccaagaagcccctgcggtctcggcacagtccccgtattgattgtgatattcagctggagaccattcccttgaaactctctcagctgcaataccggcaaatcatggaattcctcaaggagctggaacgaaaggagaggcaggtgaagttccgaaggtggaaacccaaggtggcgatatctaagaactgccgagaatggtggtattttgctttgaatgctaacttgtatgagatcagagagcagaggaaacgttgcacctgggactttatgttgcaccgcgctcgtgatgctgtatcttacactgacaaatatttcaacaagttaaaaggaggcctgctgtccacagatgacaaggaggaaatgtgtcggattgaagaggaacagagctttgaggaattgaagattttgcgtgaactggttcatgatcgatttcacaaacaggaagaactagcagagagtctgcgggagcctcagtttgattctccaggagcctgtccgggagccccagaacccggtggaggcagtgggatgctgcagtatctccagtcctggtttcctggatggggtggctggtacgggcagcagaccccagaagggaatgtggttgagggactgtcagcagagcaacaggagcagtggattcctgaagagatcctgggcactgaggagttttttgaccccactgcagatgcctcgtgtatgaacacgtatacaaagcgagatcatgtctttgccaaactgaatttgcagttgcagcgaggtacagtgactctgttacacaaggagcaaggaactcctcaaatgaatgaaagtgctttcatgcagctcgagttttcagatgtaaaacttctagcagagtctcttcctcgaagaaattcctcgttgctttcagtccggttgggtggactgtttcttcgagacctggctacagaaggaactatgtttcctcttctagtcttccctaatccacaaaaagaagttggcagagtctcacaatcttttggtctacaaactacatctgcagacagaagtgatcattacccagctgcagatccagatggccccgtttttgagatgctgtatgagagaaatccggcgcacagccactttgagaggcggctcaatgtcagcacaaggcccttgaacatcatatacaatccgcaggccattaaaaaagtagcagactttttctacaagggaaaggttcatacctcaggttttggttatcagtctgaacttgagctgagagtggctgaagctgcccgaagacaatataacaagctgaagatgcagaccaaggcagaaatccggcaaactcttgatcgtttgctagtgggtgatttcattgaggagagtaaacgatggaccgtgcggctggatatttctgcccctcaggtgatatttcctgatgatttcaaattcaagaatcctgtgttagttgtcgtggatctaggaagaatgcttttgacgaacacccaagataactccaggaggaaaagtagggatgggtcagcatctgaagagacccagtttagtgatgatgaatataagacccccctggccacacctcctaacaccccacctcccgagtcaagcagcagcaacggagagaaaacacctcccttttctggagttgagttcagtgaagaacagcttcaagcacatttaatgagcacaaagatgtatgagaggtactcgctgtcatttatggacctccagatcatggttggacgagtgaaagacaattggaagcatgtccaggatattgacgtgggaccaacacatgtggtagagaagttcaacgttcacctacagttagagcgtcgattgatttatacttcagatcccaaatatccaggagccgtgctctcaggcaacttaccagacttaaaaatccacattaatgaagataaaatatctgcactaaagaattgctttgctctcctcaccaccccagaaatgaaaacttctgacactcagattaaagaaaagatttttccccaggaggagcagcggggaagtttgcaagactccgtaatgaatttaacccagagcattgtgttgttggagcagcatacccgcgaggttctggtggagtcgcagctcctcctggcggaatttaaagtgaactgtatgcagcttggtgttgagagcaatggccggtacatttctgtgctcaaggtgtttggtaccaatgctcactttgtgaagaggccttatgatgctgaagtctccctaactgttcatggtttgctcctggtggataccatgcagacatatggtgctgattttgaccttttgatggcttcacataagaacttgagctttgatattccaacgggaagccttcgggatagcagggcccagtctcctgtctctggaccgaatgtggcccacttaactgatggagctacactgaacgaccgatcagctactagtgtttcacttgacaaaattcttaccaaagagcaagagtcccttattaagttggaatatcagtttgtgagttcagagtgcccatcgatgaatttagacagtactcttcaggtgatttccctacaggtgaataatttagatattatcctcaatccagagacgattgtggagctaattggttttcttcaaaaatcctttcccaaggaaaaagatgatttaagtcctcaacctttaatgactgattttgaaagaagcttcagagaacaaggaacttaccagtctacatatgaacaaaacactgaggttgcagtggaaatccataggctgaacttactgcttcttcggacagtgggcatggcaaatagagagaaatatggcagaaaaattgcaactgcaagtataggtggcaccaaagttaatgtctcaatgggtagcacgtttgacatgaatggttctcttggctgtttacagcttatggatttgacacaagataacgttaaaaaccagtatgttgtcagcattgggaattctgtaggctatgaaaatatcatcagtgatattggctactttgaatctgtgtttgtcagaatggaagatgcagccctcactgaagctttgagtttcacgtttgttgagagatctaaacaggagtgttttctcaacctgaagatggcttctttacattataaccactctgctaagtttttgaaggagttgacgttatccatggatgaactggaagaaaattttcgaggtatgctgaaaagcgcagccaccaaagtcaccacagtactagctaccaagactgccgagtatagcgagatggtatcgctctttgaaactccaaggaagactcgggaaccctttatcttagaggaaaatgaaatatatgggtttgacctagcttcgtctcatttggacactgtaaagctaatcttgaacataaacattgaatcaccagttgtttctatccctcggaagccggggagtcctgagttgttggtgggacacttgggacagatattcatccagaattttgtggcgggagatgatgaatccagaagtgaccgtctgcaggtggaaatcaaggacattaaactgtattctttgaattgcacccagttggcaggtagagaagctgttgggtctgaaggaagccggatgttttgcccaccttccgggtctggcagtgccaacagtcaggaggaagctcatttcacacgacatgatttctttgaatctttgcatagaggtcaagcttttcacatcctgaacaacaccaccattcagtttaaactggagaagatccctatagagagagtatctgaattgactttttctcttagcccagatgacctgggaacttctagcatcatgaagattgaaggaaaatttgtcaatccagttcaggtggtgttagcaaagcatgtatatgagcaggttttacaaaccctggacaatctcgtgtacagtgaagatctgaataagtatccagccagtgctacctcctccccttgccctgattctcctctgcctcccctcagtacctgtggagaatcttctgttgaaaggaaggagaatggattgttcagccactccagcctttctaacacctctcagaagtcattgtcagtgaaggaagtcaaatcctttactcagattcaagccaccttttgtatatcagagcttcaggttcagctaagtggagatctgactttgggggcccaaggtcttgtgagcttaaagtttcaggactttgaggtggaattcagtaaagaccatccccagactttatctattcagattgccctgcattctctgctgatggaggacttattggagaagaatccagattctaaatataagaacctgatggtgtctcgaggagcccctaagccatctagtttagcacaaaaagaatacctttctcagtcttgcccctcagtgtccaatgtggaatatcctgatatgcctcggtctctcccttcccacatggaagaagctcctaatgtcttccagttgtatcaaaggcccacctctgcgtcccggaaaaagcaaaaggaagtccaagacaaggactatcccttgaccccacctccttctccaacagtggatgagcccaagatacttgttggaaagagtaaatttgatgattccttagtccacatcaacatattcttggtagataagaaacatccagaattctcttccagttacaatcgagttaaccggagcattgatgttgattttaattgcttggatgtgctgatcacactgcaaacctgggttgtgatattagacttttttggaatcggctccactgcagacaaccacgcaatgaggctgcctcctgagggcattctgcacaacgtgaagttggagccacatgcctccatggagtctggacttcaggatccagtgaacaccaaactggatctcaaggttcattcactttctctagtgctgaataagaccaccagtgagcttgccaaagcaaatgtgtccaaattagtagcacacctggaaatgattgagggagacctggccttacagggcagcattgggagtctgtctctaagtgacctcacatgccatggagagttctacagagaacggttcactaccagtggtgaagaagcactcatcttccagacttttaaatacggacggcctgaccctctgctccggagagaacacgacattcgcgtgagcctccggatggcctctgtgcagtatgtgcatactcagcgtttccaggcagaggtggtggccttcattcagcatttcactcagctgcaggatgtcttagggcgccagcgagctgctattgaggggcagacggtgagagatcaagcccagcgctgttcacgggttctcctggatattgaggctggtgctcccgttctcttgatcccagaaagttccagatcaaataatctgattgtagcaaatttggggaagttgaaagtcaaaaataagtttctgtttgctggttttcctggcaccttttccctacaagataaggaatctgtgccttcagcttccccaacgggtattcccaaacacagtctgaggaaaacgacaagcacggaggagcccaggggaacccattcccaggggcagttcacgatgcctcttgctggaatgagcctaggaagcctgaagagtgagtttgtgcccagtacctccaccaagcagcaagggccgcaacccacactgtctgttggccaagagtccagtagtccagaagaccatgtctgcctgctggattgcgttgtcgtggatctccaggacatggacatctttgctgcagagagacatccgagagaatactcgaaggcaccagaggatagtagtggagatctgatcttcccttcctattttgtgcgacagacaggaggaagcctcttaaccgagccttgtaggctgaaattgcaggtggaaaggaatttggacaaagaaataagtcatactgtgccagacatatctatccatggcaatctctcctcagtccactgctctctggatctgtataaatacaagctgatccgcggcttattagagaacaacctgggagaacccatagaggaatttatgcggccttatgatttacaagatccaagaattcatactgtcctgagtggagaagtgtacacctgtatgtgcttcctcattgatatggtgaatgtaagtctggagcttaaagatccaaaaagaaaagaaggtgctgggtccctagccagatttgacttcaagaaatgcaaactgctctatgaaagtttttccaaccaaaccaagtccattaacttggtttcccattccatgatggcttttgacacccgttatgctgggcagaagaccagccctggcatgacgaatgtgttcagctgtatctttcagcccgctaagaacagcagcaccacccaagggtccattcagattgaactacatttcagatctaccaaggattcctcctgctttacagtagttctcaacaatctccgtgtgtttctcatatttgactggctactgttagtccatgattttctccacactcccagtgatattaagaaacaaaatcatgttactccttctcgccaccgtaactctagcagcgaatctgctatagttcccaaaactgtgaagagtggagtagttaccaagcggtcttcccttcctgtgtccaatgaaaggcacctggaggtcaaggtcaatgtaacaggtacggagtttgtggtcattgaagatgtgtcctgcttcgacaccaatgccattattctgaaaggcaccacagtgctcacctataagccccggtttgttgatcgccccttttcaggaagtttgtttggcattgaggtgttttcatgccgactagggaatgagcatgatacagctctttcaattgtggatcccgtacaaattcaaatggagttggtggggaattcttcttatcaaaatagttcaggattgatggatgcattcaatagtgaagatttcccacctgtcctggagattcagttacaagccctggatatcagactctcctataatgatgttcagctgtttcttgccattgcaaaatccatcccagagcaagctaatgctgcagtgccagactcagtggccctggagtcagactccgttggcacttaccttccaggtgcatctcgcgttggagaggaaatcagagaagggacaagacacaccttagatcctgtcttggagttacagctggctaggctgcaggagctgggattcagcatggatgattgtcgcaaagctcttttggcgtgtcaaggccaattgaaaaaggcagcaagttggttgtttaagaatgcggaacctctgaagtctctttccttggcctccaccagccgagatagcccaggggctgtggcagcgccattgatctctggcgtggagatcaaagctgagagtgtgtgcatctgtttcatcgatgactgcatggattgtgatgttcctctcgctgaactcaccttttcccgtctgaattttcttcagcgtgtaagaactagccctgaaggctatgcccacttcaccctttctggagattattataaccgtgctctttcaggctgggagccatttattgagccttggccatgctctgtatcctggcaacagcaggcagctggtcgtctccatcctcctcgactgaagctagaagccaaggccaaacctcgtttggatatcaatatcacttctgtgctaattgaccagtatgtaagtaccaaggaatcgtggatggcagattactgtaaagatgacaaggacatagagtcagctaaatcagaagactggatgggctcttcggtggatcctccatgttttggacaaagtaagagttttcactacatgtgtttaactaaatcacttttgacctacaaagcaatgcttcactgagaaattcaaatggaaccatcattctgcgtggaaaaacctacaggaaattctgactatcttctgtagttctgttttagtctttgcaggagacagttttctggcatgaactactgaacttataaatgtgggctgtaattccacctttgcgggggagaaaagatctgcaacacgtaattcctaaatcctggtaataatgcatatgaactggtgcacctgagaatgcatcaggatcagctgtggtttgtgttttactctgcaaaacattggttttctaattgatcggatttttttggccagatttttaaaagcatctaaaatggtcttctaaatctagagatagagggtttggacatattcttgaaaagagggcgagcaggagcccatgtggaaaaagttgttaaaaagggagccctgtgctgttcatagagtataaaagaattgaatgccctgcctcttgaagaaagaggagtcagcttgctctctattgatgatgctttctttccttatttaatgcctcgccggctctgttttcctcagagctggggagatggtgatggacaactgcatggtcttagttgttccacaagccattgtcatccaaattcaactcagctccaactcttacaatgtggtttctttggggagtcttggctggacttcacatagctcatgaatacttaaatattccatctggtctgcaaacgtgtcatgggaagattgggtgttcttagtgtgtgaagtaattgtactggttcatctctcctcagggtgaataagtggactttctgtctgccttgtacttctagaaagagacacaaagaaatgtcagctgtgcttgttctctgttttcccaggctgttgcttctgagtctcaaggtcattacttaggagccagggcttttcagatattgtcagctttgattttagctcctcctccaaccttcccaatttgtgtgtcaagaaaatgtaacatagtctacccagaagactctagataatctttgtaatatgtccaagagagtgtgtttctaaaacattattcatgcaggggcatcttcaattcagagtcaaactctagcaaggcctggtctgcaagattctgatgaaagattttcttgtccctctctttcttctttccttcttccctccctgcctccctttcttccttcctttttaaaattttgtccctctctctttctctatagttaaaaggcttcctcatctatattaaatgctggtgctgagttaaagcttgatttttatttatttaaagatttttatgattacttaggcttataaaagtgtaatctatctttttaataagacataacttgaatatgcataaatttccaaacctcttttcttattggaaattcctggatggtagtacagtacattccaggattgtattcttttagcaggcctactaaaatgatcattgggaatttattttgaaagtgagtagggttcaaccttgttgaactaatcataaactttcaggtcttattcaagaatagtaagtcatattcctacaaaagttatgcttcttattcagactggccttaaaacaagctcttgggaatagcccttaacatgaaatttagcctaagggacctgctgctttctcactgtttctttatcaggggaaagaaaataccagcctccttttgacaaaattgttggctttgttcagtcagggctgagattttgcaggtaaacctgggcggtgtggcacttcattgaatttattagttttgtattccaaggacattttatgaaaatatcaaatattctgaaaacttccatgcttgatttagaatttaaataaacactatgaggcaactccttggtagagattgtttaaatttggaacacatactgactcttcccctgaatttttgagatcccctgagactggcattttacttctgtgttttaccagttggaatggagcaaccttcactaaaatctgtactgatggattttcgtaactttttaatgccatttaagaacataacacctttaaattaaaaatcttcaaaaggctcgtcattctgttcaagagaaggttcaatacatattcttctaattcagg

SEQ ID NO: 352120 - DNA, 1058 bp, Homo sapiens
ggaggaaacgccgcgcagcgccgggctggggcgggcggcccgggacaccgacagatttttctgtgaccatgaaagagagaaataaagaatgatccatgatttctaaacaccttttcctgaggatatagtcatgttggaaggccttgtagcctgggttctcaatacctatttgggaaaatatgtcaataacctgaacactgaccagctctcagttgcacttctcaaaggtgctgttgaattagaaaacttgccattaaagaaagatgccttgaaagaattggaattaccatttgaagtcaaagctggcttcattgggaaagtaacccttcagattcccttttatcgcccccatgtggacccttgggtgatctccatctccagccttcacttaattggagccccagagaaaatacaggatttcaatgatgaaaaggagaagctgttggaaagggaacgtaagaaagcactacttcaagccctggaggagaaatggaaggcaaggcagagatcttctgggccataagagcagttgtggtgacacgtgtaagatgagcaagaacactagattgagctaatgctgactcttgtctttgtagaatgaccgccagcagaaaggggagtcctattggtattcagttaccgcctccgtagttacaaggattgtggagaatattgaattaaaaattcaagatgtccatttacgctttgaagatggtgtcaccaatccctcccatccttttgcttttggcatctgcattaagaatgtgtccatgcaaaatgctgtgaatgagcctgtgagtatgaaatgtgatgacaaagcaggaagaaagccatgctctaggaatctggggctctgccttttgccattttgtgttatgtaaatgaatcacattcttttccattgccttctgtgataggcatgggtgtctcttgtgtatttgcaacaaatcaaatttgctgaaatagggaaacaggtaattttctctgacctttggttatatcactttcattttatacatgaagaaactgaggggcagaaaggattttatttttgattt

SEQ ID NO: 352121 - DNA, 467 bp, Homo sapiens
atttgacttcaagaaatgcaaactgctctatgaaagtttttccaaccaaaccaagtccattaacttggtttcccattccatgatggcttttgacacccgttatgctgggcagaagaccagccctggcatgacgaatgtgttcagctgtatctttcagcccgctaagaacagcagcaccacccaagggtccattcagattgaactacatttcaggtagcaggtccagacccttctctgcctttctttgtggagacattcccttttgggtcacgtctttgttggctttagaacatcaaaaaaccaaggaatcactagacagataaatagataatggcttaatcagtgcagtgtactgtatattaatgcattattcctataatcttgcagtttcatttattggccaaaagatgtctctgttgcctttaaaaataaagtagttaagaattgagccttaaaatcaatctcct

SEQ ID NO: 352122 - DNA, 189 bp, Homo sapiens
acggtccaccaaacaggcaaagacttcatactacatgtttaaaagaagaaaatgctgaccgggcgtggtggctcacgcctgtaatcccaccactttgggaggccaaggcaggcggatcacctgaggtcaggagttcgagaccagcgtgcccaacatgaggaaaccacgtctctactgaaaatacaaaaa

SEQ ID NO: 352123 - DNA, 645 bp, Homo sapiens
tgaagggaaattgcgtatgttttatatataaaaatagcaaggatcaagaaagtccaaaaatccaaagttaattctttgcaaaggcgaacaacattcctgcacctctgccgggactgaggaaaaggagagaagcagcaacaagcagggatttcagcaaagggctcctccgtggtctggaaggagccacctggaactgccacagcttcacccttggagagggtggagggaccctcaagtcagggccaagacacagctgcctgcccaccctgggaggaggcagaggagagatgggaagggcaggacgctgggaggaaagaagcgcgttgctcttttctcagcacgtctcccacgtaagccccacaagtggatctgcaggtgaactctcaggatgagtaagtcaatgtaccgaagtcaccagatggaagggcagtctagaaaaaccaccaccgagtcctgcttgcggaccgggaggcccaggccccgcacgtccgagacaatgaaagtgatgatggtcttgacgatggtggcaaagaacgtgttgaccccgaagaccagggcacagagctctttagacagagaagatgcaatctgaaaggtggcgatgggcacgaggtttcgcaccgcccccggtcgtcgcggttgaag

SEQ ID NO: 352124 - DNA, 436 bp, Homo sapiens
caccctgctgtggacctgggagggccgggtgctgggcagggagcgtaccctggcacaggcttggaggggcaggtgctgggcagggagggcaccctcctgtgggctgggagggccaggtgctggggcgggagagtcgggtgctgggcagggagggcaccctggctcaggcccagccgcaggtcctgggtgaccctgctgctttcttcctggaggcccggacaccactcccacgagggacgggagccttttttctgttgagactggtgggtggtcaggacatgagggggtatgtgctgtcccctgtttgaggaacaacacgtggtcctttggagtcctggagctgaacatgtggctcaccatcagcccctgctgcagaaactggtgcaggacaccccactacctctgtctcagcgctggccccccagtacctccgtct

SEQ ID NO: 352125 - DNA, 6349 bp, Homo sapiens
  misc_feature (18)..(19): n is a, c, g, or t
agaggccctccgcgcccnnagctccagccgcactgccccgatggctccctacccctgtggctgccacatcctgctgctgctcttctgctgcctggcggctgcccgggccaacctgctgaacctgaactggctttggttcaataatgaggacaccagccacgcagctaccacgatccctgagccccaggggcccctgcctgtgcagcccacagcagataccaccacacacgtgaccccccggaatggttccacagagccagcgacagcccctggcagccctgagccaccctcagagctgctggaagatggccaggacacccccacttctgccgagagcccggacgcgccagaggagaacattgccggtgtcggagccgagatcctgaacgtggccaaaggcatccggagcttcgtccagctgtggaatgacactgtccccactgagagcttggccagggcggaaaccctggtcctggagactcctgtgggcccccttgccctcgctgggccttccagcaccccccaggagaatgggaccactctctggcccagccgtggcattcctagctctccgggcgcccacacaaccgaggctggcaccttgcctgcacccaccccatcgcctccgtccctgggcaggccctgggcaccactcacggggccctcagtgccaccaccatcttcagagcgcatcagcgaggaggtggggctgctgcagctccttggggaccccccgccccagcaggtcacccagacggatgaccccgacgtcgggctggcctacgtctttgggccagatgccaacagtggccaagtggcccggtaccacttccccagcctcttcttccgtgacttctcactgctgttccacatccggccagccacagagggcccaggggtgctgttcgccatcacggactcggcgcaggccatggtcttgctgggcgtgaagctctctggggtgcaggacgggcaccaggacatctccctgctctacacagaacctggtgcaggccagacccacacagccgccagcttccggctccccgccttcgtcggccagtggacacacttagccctcagtgtggcaggtggctttgtggccctctacgtggactgtgaggagttccagagaatgccgcttgctcggtcctcacggggcctggagctggagcctggcgccgggctcttcgtggctcaggcggggggagcggaccctgacaagttccagggggtgatcgctgagctgaaggtgcgcagggacccccaggtgagccccatgcactgcctggacgaggaaggcgatgactcagatggggcattcggagactctggcagcgggctcggggacgcccgggagcttctcagggaggagacgggcgcggccctaaaacccaggctccccgcgccaccccccgtcaccacgccacccttggctggaggcagcagcacggaagattccagaagtgaagaagtcgaggagcagaccacggtggcttcgttaggagctcagacacttcctggctcagattctgtctccacgtgggacgggagtgtccggacccctgggggccgcgtgaaagagggcggcctgaaggggcagaaaggggagccaggtgttccgggcccacctggccgggcaggccccccaggatccccatgcctacctggtcccccgggtctcccgtgcccagtgagtcccctgggtcctgcaggcccagcgttgcaaactgtccccggaccacaaggacccccagggcctccggggagggacggcacccctggaagggacggcgagccgggcgaccccggtgaagacggaaagccgggcgacaccgggccacaaggcttccccgggactccaggggacgtaggtcccaagggcgacaagggagaccctggggttggagagagagggcccccaggaccccaagggcctccagggcccccaggaccctccttcagacacgacaagctgaccttcattgacatggagggatctggcttcgggggcgatctggaggccctgcggggtcctcgaggcttccctggacctcccggaccccccggtgtcccaggcctgcccggcgagccaggccgctttggggtgaacagctccgacgtcccaggacccgccggccttcctggtgtgcctgggcgcgagggtccccccgggtttcctggcctcccgggacccccaggccctccgggaagagaggggcccccaggaaggactgggcagaaaggcagcctgggtgaagcaggcgccccaggacataaggggagcaagggagcccccggtcctgctggtgctcgtggggagagcggcctggcaggagcccccggacctgctggaccaccaggcccccctgggccccctgggcccccaggaccaggactccccgctggatttgatgacatggaaggctccggggggcccttctggtcaacagcccgaagcgctgatgggccacagggacctcccggcctgccgggacttaagggggatcctggcgtgcctgggctgccgggggcgaagggagaagttggagcagatggagtccccgggttccccggcctccctggcagagagggcattgctgggccccaggggccaaagggagacagaggcagccggggagaaaagggagatccagggaaggacggagtcgggcagccgggcctccctggcccccccggacccccgggacctgtggtctacgtgtcggagcaggacggatccgtcctgagcgtgccgggacctgagggccggccgggtttcgcaggctttcccggacctgcaggacccaagggcaacctgggctctaagggcgaacgaggctccccgggacccaagggtgagaagggtgaaccgggcagcatcttcagccccgacggcggtgccctgggccctgcccagaaaggagccaagggagagccgggcttccgaggacccccgggtccatacggacggccggggtacaagggagagattggctttcctggacggccgggtcgccccgggatgaacggattgaaaggagagaaaggggagccgggagatgccagccttggatttggcatgaggggaatgcccggccccccaggacctccagggcccccaggccctccagggactcctgtttacgacagcaatgtgtttgctgagtccagccgccccgggcctccaggattgccagggaatcagggccctccaggacccaagggcgccaaaggagaagtgggcccccccggaccaccagggcagtttccgtttgactttcttcagttggaggctgaaatgaagggggagaagggagaccgaggtgatgcaggacagaaaggcgaaaggggggagcccgggggcggcggtttcttcggctccagcctgcccggcccccccggccccccaggcccacgtggctaccctgggattccaggtcccaagggagagagcatccggggccagcccggcccacctggacctcagggaccccccggcatcggctacgaggggcgccagggccctcccggccccccaggccccccagggcccccttcatttcctggccctcacaggcagactatcagcgttcccggccctccgggcccccctgggccccctgggccccctggaaccatgggcgcctcctcaggggtgaggctctgggctacacgccaggccatgctgggccaggtgcacgaggttcccgagggctggctcatcttcgtggccgagcaggaggagctctacgtccgcgtgcagaacgggttccggaaggtccagctggaggcccggacaccactcccacgagggacggacaatgaagtggccgccttgcagccccccgtggtgcagctgcacgacagcaacccctacccgcggcgggagcacccccaccccaccgcgcggccctggcgggcagatgacatcctggccagcccccctcgcctgcccgagccccagccctaccccggagccccgcaccacagctcctacgtgcacctgcggccggcgcgacccacaagcccacccgcccacagccaccgcgacttccagccggtgctccacctggttgcgctcaacagccccctgtcaggcggcatgcggggcatccgcggggccgacttccagtgcttccagcaggcgcgggccgtggggctggcgggcaccttccgcgccttcctgtcctcgcgcctgcaggacctgtacagcatcgtgcgccgtgccgaccgcgcagccgtgcccatcgtcaacctcaaggacgagctgctgtttcccagctgggaggctctgttctcaggctctgagggtccgctgaagcccggggcacgcatcttctcctttgacggcaaggacgtcctgaggcaccccacctggccccagaagagcgtgtggcatggctcggaccccaacgggcgcaggctgaccgagagctactgtgagacgtggcggacggaggctccctcggccacgggccaggcctcctcgctgctggggggcaggctcctggggcagagtgccgcgagctgccatcacgcctacatcgtgctctgcattgagaacagcttcatgactgcctccaagtagccaccgcctggatgcggatggccggagaggaccggcggctcggaggaagcccccaccgtgggcagggagcggccggccagcccctggccccaggacctggctgccatactttcctgtatagttcacgtttcatgtaatcctcaagaaataaaaggaagccaaagagtgtatttttttaaaagtttaaaacagaagcctgatgctgacattcacctgccccaactctcccctgacctgtgagcccagctgggtcaggcagggtgcagtatcatgccctgtgcaacctcttggcctgatcagaccacggctcgatttctccaggatttcctgctttgggaagccgtgctcgccccagcaggtgctgacttcatctcccacctagcagcaccgttctgtgcacaaaacccagacctgttagcagacaggccccgtgaggcaatgggagctgaggccacactcagcacaaggccatctgggctcctccagggtgtgtgctcgccctgcggtagatgggagggaggctcaggtccctggggctagggggagccccttctgctcagctctgggccattctccacagcaaccccaggctgaagcaggttcccaagctcagaggcgcactgtgacccccagctccggcctgtcctccaacaccaagcacagcagcctggggctggcctcccaaatgagccatgagatgatacatccaaagcagacagctccaccctggccgagtccaagctgggagattcaagggacccatgagttggggtctggcagcctcccatccagggcccccatctcatgcccctggctgggacgtggctcagccagcacttgtccagctgagcgccaggatggaacacggccacatcaaagaggctgaggctggcacaggacatgcggtagccagcacacagggcagtgagggagggctgtcatctgtgcactgcccatggacaggctggctccagatgcagggcagtcattggctgtctcctaggaaacccatatccttaccctccttgggactgaaggggaaccccggggtgcccacaggccgccctgcgggtgaacaaagcagccacgaggtgcaacaaggtcctctgtcagtcacagccacccctgagatccggcaacatcaaccccgagtcattcgttctgtggagggacaagtggactcagggcagcgccaggctgaccacagcacagccaacacgcacctgcctcaggactgcgacgaaaccggtggggctggttctgtaattgtgtgtgatgtgaagccaattcagacaggcaaataaaagtgaccttttacactgaaaaaaaaaaaaaaaaaaaaaaaaaaaaaaaaaaaaaaacaaaaaaacaaaaaaaaaaaaaaaagagaacaaaaaccacaacagaaaccaaaacaacaaacaaagcaaacaagaagcaaagggcgcgcgggcggcggcgagccgcgcgcgaagatatcttagaaacagcagtgtggatcgcggggcccgaaaggaaggaagaagaacgcgcgcgcagatgttagagcacactgcgcgagaacaagatgtgggggtaggtcgcagccacaacgacaagaagaggagagcggcgcggggataacagaagcacgtggtgtgcaaacaaacactccgtacaggggggtgtcggagcgaggcacaacaagccagggtgataccgaagaggagcgacgaagagcgaggacgtcatgagtaagaaccccgcgccgcgtgggga

SEQ ID NO: 352126 - DNA, 6323 bp, Homo sapiens
  misc_feature (18)..(19): n is a, c, g, or t
agaggccctccgcgcccnnagctccagccgcactgccccgatggctccctacccctgtggctgccacatcctgctgctgctcttctgctgcctggcggctgcccgggccaacctgctgaacctgaactggctttggttcaataatgaggacaccagccacgcagctaccacgatccctgagccccaggggcccctgcctgtgcagcccacagcagataccaccacacacgtgaccccccggaatggttccacagagccagcgacagcccctggcagccctgagccaccctcagagctgctggaagatggccaggacacccccacttctgccgagagcccggacgcgccagaggagaacattgccggtgtcggagccgagatcctgaacgtggccaaaggcatccggagcttcgtccagctgtggaatgacactgtccccactgagagcttggccagggcggaaaccctggtcctggagactcctgtgggcccccttgccctcgctgggccttccagcaccccccaggagaatgggaccactctctggcccagccgtggcattcctagctctccgggcgcccacacaaccgaggctggcaccttgcctgcacccaccccatcgcctccgtccctgggcaggccctgggcaccactcacggggccctcagtgccaccaccatcttcagagcgcatcagcgaggaggtggggctgctgcagctccttggggaccccccgccccagcaggtcacccagacggatgaccccgacgtcgggctggcctacgtctttgggccagatgccaacagtggccaagtggcccggtaccacttccccagcctcttcttccgtgacttctcactgctgttccacatccggccagccacagagggcccaggggtgctgttcgccatcacggactcggcgcaggccatggtcttgctgggcgtgaagctctctggggtgcaggacgggcaccaggacatctccctgctctacacagaacctggtgcaggccagacccacacagccgccagcttccggctccccgccttcgtcggccagtggacacacttagccctcagtgtggcaggtggctttgtggccctctacgtggactgtgaggagttccagagaatgccgcttgctcggtcctcacggggcctggagctggagcctggcgccgggctcttcgtggctcaggcggggggagcggaccctgacaagttccagggggtgatcgctgagctgaaggtgcgcagggacccccaggtgagccccatgcactgcctggacgaggaaggcgatgactcagatggggcattcggagactctggcagcgggctcggggacgcccgggagcttctcagggaggagacgggcgcggccctaaaacccaggctccccgcgccaccccccgtcaccacgccacccttggctggaggcagcagcacggaagattccagaagtgaagaagtcgaggagcagaccacggtggcttcgttaggagctcagacacttcctggctcagattctgtctccacgtgggacgggagtgtccggacccctgggggccgcgtgaaagagggcggcctgaaggggcagaaaggggagccaggtgttccgggcccacctggccgggcaggccccccaggatccccatgcctacctggtcccccgggtctcccgtgcccagtgagtcccctgggtcctgcaggcccagcgttgcaaactgtccccggaccacaaggacccccagggcctccggggagggacggcacccctggaagggacggcgagccgggcgaccccggtgaagacggaaagccgggcgacaccgggccacaaggcttccccgggactccaggggacgtaggtcccaagggcgacaagggagaccctggggttggagagagagggcccccaggaccccaagggcctccagggcccccaggaccctccttcagacacgacaagctgaccttcattgacatggagggatctggcttcgggggcgatctggaggccctgcggggtcctcgaggcttccctggacctcccggaccccccggtgtcccaggcctgcccggcgagccaggccgctttggggtgaacagctccgacgtcccaggacccgccggccttcctggtgtgcctgggcgcgagggtccccccgggtttcctggcctcccgggacccccaggccctccgggaagagaggggcccccaggaaggactgggcagaaaggcagcctgggtgaagcaggcgccccaggacataaggggagcaagggagcccccggtcctgctggtgctcgtggggagagcggcctggcaggagcccccggacctgctggaccaccaggcccccctgggccccctgggcccccaggaccaggactccccgctggatttgatgacatggaaggctccggggggcccttctggtcaacagcccgaagcgctgatgggccacagggacctcccggcctgccgggacttaagggggatcctggcgtgcctgggctgccgggggcgaagggagaagttggagcagatggagtccccgggttccccggcctccctggcagagagggcattgctgggccccaggggccaaagggagacagaggcagccggggagaaaagggagatccagggaaggacggagtcgggcagccgggcctccctggcccccccggacccccgggacctgtggtctacgtgtcggagcaggacggatccgtcctgagcgtgccgggacctgagggccggccgggtttcgcaggctttcccggacctgcaggacccaagggcaacctgggctctaagggcgaacgaggctccccgggacccaagggtgagaagggtgaaccgggcagcatcttcagccccgacggcggtgccctgggccctgcccagaaaggagccaagggagagccgggcttccgaggacccccgggtccatacggacggccggggtacaagggagagattggctttcctggacggccgggtcgccccgggatgaacggattgaaaggagagaaaggggagccgggagatgccagccttggatttggcatgaggggaatgcccggccccccaggacctccagggcccccaggccctccagggactcctgtttacgacagcaatgtgtttgctgagtccagccgccccgggcctccaggattgccagggaatcagggccctccaggacccaagggcgccaaaggagaagtgggcccccccggaccaccagggcagtttccgtttgactttcttcagttggaggctgaaatgaagggggagaagggagaccgaggtgatgcaggacagaaaggcgaaaggggggagcccgggggcggcggtttcttcggctccagcctgcccggcccccccggccccccaggcccacgtggctaccctgggattccaggtcccaagggagagagcatccggggccagcccggcccacctggacctcagggaccccccggcatcggctacgaggggcgccagggccctcccggccccccaggccccccagggcccccttcatttcctggccctcacaggcagactatcagcgttcccggccctccgggcccccctgggccccctgggccccctggaaccatgggcgcctcctcaggggtgaggctctgggctacacgccaggccatgctgggccaggtgcacgaggttcccgagggctggctcatcttcgtggccgagcaggaggagctctacgtccgcgtgcagaacgggttccggaaggtccagctggaggcccggacaccactcccacgagggacggacaatgaagtggccgccttgcagccccccgtggtgcagctgcacgacagcaacccctacccgcggcgggagcacccccaccccaccgcgcggccctggcgggcagatgacatcctggccagcccccctcgcctgcccgagccccagccctaccccggagccccgcaccacagctcctacgtgcacctgcggccggcgcgacccacaagcccacccgcccacagccaccgcgacttccagccggtgctccacctggttgcgctcaacagccccctgtcaggcggcatgcggggcatccgcggggccgacttccagtgcttccagcaggcgcgggccgtggggctggcgggcaccttccgcgccttcctgtcctcgcgcctgcaggacctgtacagcatcgtgcgccgtgccgaccgcgcagccgtgcccatcgtcaacctcaaggacgagctgctgtttcccagctgggaggctctgttctcaggctctgagggtccgctgaagcccggggcacgcatcttctcctttgacggcaaggacgtcctgaggcaccccacctggccccagaagagcgtgtggcatggctcggaccccaacgggcgcaggctgaccgagagctactgtgagacgtggcggacggaggctccctcggccacgggccaggcctcctcgctgctggggggcaggctcctggggcagagtgccgcgagctgccatcacgcctacatcgtgctctgcattgagaacagcttcatgactgcctccaagtagccaccgcctggatgcggatggccggagaggaccggcggctcggaggaagcccccaccgtgggcagggagcggccggccagcccctggccccaggacctggctgccatactttcctgtatagttcacgtttcatgtaatcctcaagaaataaaaggaagccaaagagtgtatttttttaaaagtttaaaacagaagcctgatgctgacattcacctgccccaactctcccctgacctgtgagcccagctgggtcaggcagggtgcagtatcatgccctgtgcaacctcttggcctgatcagaccacggctcgatttctccaggatttcctgctttgggaagccgtgctcgccccagcaggtgctgacttcatctcccacctagcagcaccgttctgtgcacaaaacccagacctgttagcagacaggccccgtgaggcaatgggagctgaggccacactcagcacaaggccatctgggctcctccagggtgtgtgctcgccctgcggtagatgggagggaggctcaggtccctggggctagggggagccccttctgctcagctctgggccattctccacagcaaccccaggctgaagcaggttcccaagctcagaggcgcactgtgacccccagctccggcctgtcctccaacaccaagcacagcagcctggggctggcctcccaaatgagccatgagatgatacatccaaagcagacagctccaccctggccgagtccaagctgggagattcaagggacccatgagttggggtctggcagcctcccatccagggcccccatctcatgcccctggctgggacgtggctcagccagcacttgtccagctgagcgccaggatggaacacggccacatcaaagaggctgaggctggcacaggacatgcggtagccagcacacagggcagtgagggagggctgtcatctgtgcactgcccatggacaggctggctccagatgcagggcagtcattggctgtctcctaggaaacccatatccttaccctccttgggactgaaggggaaccccggggtgcccacaggccgccctgcgggtgaacaaagcagccacgaggtgcaacaaggtcctctgtcagtcacagccacccctgagatccggcaacatcaaccccgagtcattcgttctgtggagggacaagtggactcagggcagcgccaggctgaccacagcacagccaacacgcacctgcctcaggactgcgacgaaaccggtggggctggttctgtaattgtgtgtgatgtgaagccaattcagacaggcaaataaaagtgaccttttacactgactcttggtttgcaagcagccttcactgtcacaggaaggacacaattctccaaaaggagttctcaggagtcttttatccctggactgccccactggcagatcccgagtgtgcacaggcacgcacggttacatggggtatgcatgcatggccatacacaggcgtgcagttgtacacaggtgtgcaggagcatccatagtgtgcacaggtacacaggcatgcacgggtgtgtggacacacaccaacactcttaggtctctcctcacagcaggacctgacttgctcccagcaacactacatcctgacagccatccctgtcctggtggacgggtgagtgcaggactcagaggcaggcaggcagtgggtgcagtgagcaggctgcggagggagcaggccctcaggttggggaggc

SEQ ID NO: 352127 - DNA, 5860 bp, Homo sapiens
  misc_feature (18)..(19): n is a, c, g, or t
agaggccctccgcgcccnnagctccagccgcactgccccgatggctccctacccctgtggctgccacatcctgctgctgctcttctgctgcctggcggctgcccgggccaacctgctgaacctgaactggctttggttcaataatgaggacaccagccacgcagctaccacgatccctgagccccaggggcccctgcctgtgcagcccacagcagataccaccacacacgtgaccccccggaatggttccacagagccagcgacagcccctggcagccctgagccaccctcagagctgctggaagatggccaggacacccccacttctgccgagagcccggacgcgccagaggagaacattgccggtgtcggagccgagatcctgaacgtggccaaaggcatccggagcttcgtccagctgtggaatgacactgtccccactgagagcttggccagggcggaaaccctggtcctggagactcctgtgggcccccttgccctcgctgggccttccagcaccccccaggagaatgggaccactctctggcccagccgtggcattcctagctctccgggcgcccacacaaccgaggctggcaccttgcctgcacccaccccatcgcctccgtccctgggcaggccctgggcaccactcacggggccctcagtgccaccaccatcttcagagcgcatcagcgaggaggtggggctgctgcagctccttggggaccccccgccccagcaggtcacccagacggatgaccccgacgtcgggctggcctacgtctttgggccagatgccaacagtggccaagtggcccggtaccacttccccagcctcttcttccgtgacttctcactgctgttccacatccggccagccacagagggcccaggggtgctgttcgccatcacggactcggcgcaggccatggtcttgctgggcgtgaagctctctggggtgcaggacgggcaccaggacatctccctgctctacacagaacctggtgcaggccagacccacacagccgccagcttccggctccccgccttcgtcggccagtggacacacttagccctcagtgtggcaggtggctttgtggccctctacgtggactgtgaggagttccagagaatgccgcttgctcggtcctcacggggcctggagctggagcctggcgccgggctcttcgtggctcaggcggggggagcggaccctgacaagttccagggggtgatcgctgagctgaaggtgcgcagggacccccaggtgagccccatgcactgcctggacgaggaaggcgatgactcagatggggcattcggagactctggcagcgggctcggggacgcccgggagcttctcagggaggagacgggcgcggccctaaaacccaggctccccgcgccaccccccgtcaccacgccacccttggctggaggcagcagcacggaagattccagaagtgaagaagtcgaggagcagaccacggtggcttcgttaggagctcagacacttcctggctcagattctgtctccacgtgggacgggagtgtccggacccctgggggccgcgtgaaagagggcggcctgaaggggcagaaaggggagccaggtgttccgggcccacctggccgggcaggccccccaggatccccatgcctacctggtcccccgggtctcccgtgcccagtgagtcccctgggtcctgcaggcccagcgttgcaaactgtccccggaccacaaggacccccagggcctccggggagggacggcacccctggaagggacggcgagccgggcgaccccggtgaagacggaaagccgggcgacaccgggccacaaggcttccccgggactccaggggacgtaggtcccaagggcgacaagggagaccctggggttggagagagagggcccccaggaccccaagggcctccagggcccccaggaccctccttcagacacgacaagctgaccttcattgacatggagggatctggcttcgggggcgatctggaggccctgcggggtcctcgaggcttccctggacctcccggaccccccggtgtcccaggcctgcccggcgagccaggccgctttggggtgaacagctccgacgtcccaggacccgccggccttcctggtgtgcctgggcgcgagggtccccccgggtttcctggcctcccgggacccccaggccctccgggaagagaggggcccccaggaaggactgggcagaaaggcagcctgggtgaagcaggcgccccaggacataaggggagcaagggagcccccggtcctgctggtgctcgtggggagagcggcctggcaggagcccccggacctgctggaccaccaggcccccctgggccccctgggcccccaggaccaggactccccgctggatttgatgacatggaaggctccggggggcccttctggtcaacagcccgaagcgctgatgggccacagggacctcccggcctgccgggacttaagggggatcctggcgtgcctgggctgccgggggcgaagggagaagttggagcagatggagtccccgggttccccggcctccctggcagagagggcattgctgggccccaggggccaaagggagacagaggcagccggggagaaaagggagatccagggaaggacggagtcgggcagccgggcctccctggcccccccggacccccgggacctgtggtctacgtgtcggagcaggacggatccgtcctgagcgtgccgggacctgagggccggccgggtttcgcaggctttcccggacctgcaggacccaagggcaacctgggctctaagggcgaacgaggctccccgggacccaagggtgagaagggtgaaccgggcagcatcttcagccccgacggcggtgccctgggccctgcccagaaaggagccaagggagagccgggcttccgaggacccccgggtccatacggacggccggggtacaagggagagattggctttcctggacggccgggtcgccccgggatgaacggattgaaaggagagaaaggggagccgggagatgccagccttggatttggcatgaggggaatgcccggccccccaggacctccagggcccccaggccctccagggactcctgtttacgacagcaatgtgtttgctgagtccagccgccccgggcctccaggattgccagggaatcagggccctccaggacccaagggcgccaaaggagaagtgggcccccccggaccaccagggcagtttccgtttgactttcttcagttggaggctgaaatgaagggggagaagggagaccgaggtgatgcaggacagaaaggcgaaaggggggagcccgggggcggcggtttcttcggctccagcctgcccggcccccccggccccccaggcccacgtggctaccctgggattccaggtcccaagggagagagcatccggggccagcccggcccacctggacctcagggaccccccggcatcggctacgaggggcgccagggccctcccggccccccaggccccccagggcccccttcatttcctggccctcacaggcagactatcagcgttcccggccctccgggcccccctgggccccctgggccccctggaaccatgggcgcctcctcaggggtgaggctctgggctacacgccaggccatgctgggccaggtgcacgaggttcccgagggctggctcatcttcgtggccgagcaggaggagctctacgtccgcgtgcagaacgggttccggaaggtccagctggaggcccggacaccactcccacgagggacggacaatgaagtggccgccttgcagccccccgtggtgcagctgcacgacagcaacccctacccgcggcgggagcacccccaccccaccgcgcggccctggcgggcagatgacatcctggccagcccccctcgcctgcccgagccccagccctaccccggagccccgcaccacagctcctacgtgcacctgcggccggcgcgacccacaagcccacccgcccacagccaccgcgacttccagccggtgctccacctggttgcgctcaacagccccctgtcaggcggcatgcggggcatccgcggggccgacttccagtgcttccagcaggcgcgggccgtggggctggcgggcaccttccgcgccttcctgtcctcgcgcctgcaggacctgtacagcatcgtgcgccgtgccgaccgcgcagccgtgcccatcgtcaacctcaaggacgagctgctgtttcccagctgggaggctctgttctcaggctctgagggtccgctgaagcccggggcacgcatcttctcctttgacggcaaggacgtcctgaggcaccccacctggccccagaagagcgtgtggcatggctcggaccccaacgggcgcaggctgaccgagagctactgtgagacgtggcggacggaggctccctcggccacgggccaggcctcctcgctgctggggggcaggctcctggggcagagtgccgcgagctgccatcacgcctacatcgtgctctgcattgagaacagcttcatgactgcctccaagtagccaccgcctggatgcggatggccggagaggaccggcggctcggaggaagcccccaccgtgggcagggagcggccggccagcccctggccccaggacctggctgccatactttcctgtatagttcacgtttcatgtaatcctcaagaaataaaaggaagccaaagagtgtatttttttaaaagtttaaaacagaagcctgatgctgacattcacctgccccaactctcccctgacctgtgagcccagctgggtcaggcagggtgcagtatcatgccctgtgcaacctcttggcctgatcagaccacggctcgatttctccaggatttcctgctttgggaagccgtgctcgccccagcaggtgctgacttcatctcccacctagcagcaccgttctgtgcacaactcagcacaaggccatctgggctcctccagggtgtgtgctcgccctgcggtagatgggagggaggctcaggtccctggggctagggggagccccttctgctcagctctgggccattctccacagcaaccccaggctgaagcaggttcccaagctcagaggcgcactgtgacccccagctccggcctgtcctccaacaccaagcacagcagcctggggctggcctcccaaatgagccatgagatgatacatccaaagcagacagctccaccctggccgagtccaagctgggagattcaagggacccatgagttggggtctggcagcctcccatccagggcccccatctcatgcccctggctgggacgtggctcagccagcacttgtccagctgagcgccaggatggaacacggccacatcaaagaggctgaggctggcacaggacatgcggtagccagcacacagggcagtgagggagggctgtcatctgtgcactgcccatggacaggctggctccagatgcagggcagtcattggctgtctcctaggaaacccatatccttaccctccttgggactgaaggggaaccccggggtgcccacaggccgccctgcgggtgaacaaagcagccacgaggtgcaacaaggtcctctgtcagtcacagccacccctgagatccggcaacatcaaccccgagtcattcgttctgtggagggacaagtggactcagggcagcgccaggctgaccacagcacagccaacacgcacctgcctcaggactgcgacgaaaccggtggggctggttctgtaattgtgtgtgatgtgaagccaattcagacaggcaaataaaagtgaccttttacactga

SEQ ID NO: 352128 - DNA, 6021 bp, Homo sapiens
  misc_feature (18)..(19): n is a, c, g, or t
  misc_feature (5928)..(5928): n is a, c, g, or t
agaggccctccgcgcccnnagctccagccgcactgccccgatggctccctacccctgtggctgccacatcctgctgctgctcttctgctgcctggcggctgcccgggccaacctgctgaacctgaactggctttggttcaataatgaggacaccagccacgcagctaccacgatccctgagccccaggggcccctgcctgtgcagcccacagcagataccaccacacacgtgaccccccggaatggttccacagagccagcgacagcccctggcagccctgagccaccctcagagctgctggaagatggccaggacacccccacttctgccgagagcccggacgcgccagaggagaacattgccggtgtcggagccgagatcctgaacgtggccaaaggcatccggagcttcgtccagctgtggaatgacactgtccccactgagagcttggccagggcggaaaccctggtcctggagactcctgtgggcccccttgccctcgctgggccttccagcaccccccaggagaatgggaccactctctggcccagccgtggcattcctagctctccgggcgcccacacaaccgaggctggcaccttgcctgcacccaccccatcgcctccgtccctgggcaggccctgggcaccactcacggggccctcagtgccaccaccatcttcagagcgcatcagcgaggaggtggggctgctgcagctccttggggaccccccgccccagcaggtcacccagacggatgaccccgacgtcgggctggcctacgtctttgggccagatgccaacagtggccaagtggcccggtaccacttccccagcctcttcttccgtgacttctcactgctgttccacatccggccagccacagagggcccaggggtgctgttcgccatcacggactcggcgcaggccatggtcttgctgggcgtgaagctctctggggtgcaggacgggcaccaggacatctccctgctctacacagaacctggtgcaggccagacccacacagccgccagcttccggctccccgccttcgtcggccagtggacacacttagccctcagtgtggcaggtggctttgtggccctctacgtggactgtgaggagttccagagaatgccgcttgctcggtcctcacggggcctggagctggagcctggcgccgggctcttcgtggctcaggcggggggagcggaccctgacaagttccagggggtgatcgctgagctgaaggtgcgcagggacccccaggtgagccccatgcactgcctggacgaggaaggcgatgactcagatggggcattcggagactctggcagcgggctcggggacgcccgggagcttctcagggaggagacgggcgcggccctaaaacccaggctccccgcgccaccccccgtcaccacgccacccttggctggaggcagcagcacggaagattccagaagtgaagaagtcgaggagcagaccacggtggcttcgttaggagctcagacacttcctggctcagattctgtctccacgtgggacgggagtgtccggacccctgggggccgcgtgaaagagggcggcctgaaggggcagaaaggggagccaggtgttccgggcccacctggccgggcaggccccccaggatccccatgcctacctggtcccccgggtctcccgtgcccagtgagtcccctgggtcctgcaggcccagcgttgcaaactgtccccggaccacaaggacccccagggcctccggggagggacggcacccctggaagggacggcgagccgggcgaccccggtgaagacggaaagccgggcgacaccgggccacaaggcttccccgggactccaggggacgtaggtcccaagggcgacaagggagaccctggggttggagagagagggcccccaggaccccaagggcctccagggcccccaggaccctccttcagacacgacaagctgaccttcattgacatggagggatctggcttcgggggcgatctggaggccctgcggggtcctcgaggcttccctggacctcccggaccccccggtgtcccaggcctgcccggcgagccaggccgctttggggtgaacagctccgacgtcccaggacccgccggccttcctggtgtgcctgggcgcgagggtccccccgggtttcctggcctcccgggacccccaggccctccgggaagagaggggcccccaggaaggactgggcagaaaggcagcctgggtgaagcaggcgccccaggacataaggggagcaagggagcccccggtcctgctggtgctcgtggggagagcggcctggcaggagcccccggacctgctggaccaccaggcccccctgggccccctgggcccccaggaccaggactccccgctggatttgatgacatggaaggctccggggggcccttctggtcaacagcccgaagcgctgatgggccacagggacctcccggcctgccgggacttaagggggatcctggcgtgcctgggctgccgggggcgaagggagaagttggagcagatggagtccccgggttccccggcctccctggcagagagggcattgctgggccccaggggccaaagggagacagaggcagccggggagaaaagggagatccagggaaggacggagtcgggcagccgggcctccctggcccccccggacccccgggacctgtggtctacgtgtcggagcaggacggatccgtcctgagcgtgccgggacctgagggccggccgggtttcgcaggctttcccggacctgcaggacccaagggcaacctgggctctaagggcgaacgaggctccccgggacccaagggtgagaagggtgaaccgggcagcatcttcagccccgacggcggtgccctgggccctgcccagaaaggagccaagggagagccgggcttccgaggacccccgggtccatacggacggccggggtacaagggagagattggctttcctggacggccgggtcgccccgggatgaacggattgaaaggagagaaaggggagccgggagatgccagccttggatttggcatgaggggaatgcccggccccccaggacctccagggcccccaggccctccagggactcctgtttacgacagcaatgtgtttgctgagtccagccgccccgggcctccaggattgccagggaatcagggccctccaggacccaagggcgccaaaggagaagtgggcccccccggaccaccagggcagtttccgtttgactttcttcagttggaggctgaaatgaagggggagaagggagaccgaggtgatgcaggacagaaaggcgaaaggggggagcccgggggcggcggtttcttcggctccagcctgcccggcccccccggccccccaggcccacgtggctaccctgggattccaggtcccaagggagagagcatccggggccagcccggcccacctggacctcagggaccccccggcatcggctacgaggggcgccagggccctcccggccccccaggccccccagggcccccttcatttcctggccctcacaggcagactatcagcgttcccggccctccgggcccccctgggccccctgggccccctggaaccatgggcgcctcctcaggggtgaggctctgggctacacgccaggccatgctgggccaggtgcacgaggttcccgagggctggctcatcttcgtggccgagcaggaggagctctacgtccgcgtgcagaacgggttccggaaggtccagctggaggcccggacaccactcccacgagggacggacaatgaagtggccgccttgcagccccccgtggtgcagctgcacgacagcaacccctacccgcggcgggagcacccccaccccaccgcgcggccctggcgggcagatgacatcctggccagcccccctcgcctgcccgagccccagccctaccccggagccccgcaccacagctcctacgtgcacctgcggccggcgcgacccacaagcccacccgcccacagccaccgcgacttccagccggtgctccacctggttgcgctcaacagccccctgtcaggcggcatgcggggcatccgcggggccgacttccagtgcttccagcaggcgcgggccgtggggctggcgggcaccttccgcgccttcctgtcctcgcgcctgcaggacctgtacagcatcgtgcgccgtgccgaccgcgcagccgtgcccatcgtcaacctcaaggacgagctgctgtttcccagctgggaggctctgttctcaggctctgagggtccgctgaagcccggggcacgcatcttctcctttgacggcaaggacgtcctgaggcaccccacctggccccagaagagcgtgtggcatggctcggaccccaacgggcgcaggctgaccgagagctactgtgagacgtggcggacggaggctccctcggccacgggccaggcctcctcgctgctggggggcaggctcctggggcagagtgccgcgagctgccatcacgcctacatcgtgctctgcattgagaacagcttcatgactgcctccaagtagccaccgcctggatgcggatggccggagaggaccggcggctcggaggaagcccccaccgtgggcagggagcggccggccagcccctggccccaggacctggctgccatactttcctgtatagttcacgtttcatgtaatcctcaagaaataaaaggaagccaaagagtgtatttttttaaaagtttaaaacagaagcctgatgctgacattcacctgccccaactctcccctgacctgtgagcccagctgggtcaggcagggtgcagtatcatgccctgtgcaacctcttggcctgatcagaccacggctcgatttctccaggatttcctgctttgggaagccgtgctcgccccagcaggtgctgacttcatctcccacctagcagcaccgttctgtgcacaaaacccagacctgttagcagacaggccccgtgaggcaatgggagctgaggccacactcagcacaaggccatctgggctcctccagggtgtgtgctcgccctgcggtagatgggagggaggctcaggtccctggggctagggggagccccttctgctcagctctgggccattctccacagcaaccccaggctgaagcaggttcccaagctcagaggcgcactgtgacccccagctccggcctgtcctccaacaccaagcacagcagcctggggctggcctcccaaatgagccatgagatgatacatccaaagcagacagctccaccctggccgagtccaagctgggagattcaagggacccatgagttggggtctggcagcctcccatccagggcccccatctcatgcccctggctgggacgtggctcagccagcacttgtccagctgagcgccaggatggaacacggccacatcaaagaggctgaggctggcacaggacatgcggtagccagcacacagggcagtgagggagggctgtcatctgtgcactgcccatggacaggctggctccagatgcagggcagtcattggctgtctcctaggaaacccatatccttaccctccttgggactgaaggggcccccctggccatcgggccactcggaaccatgggcgcctcctcaggggtgaggctctggctacacgccaggccatgctgggccaggtgcacgaggttcccgagggctggctcatcttcgtggccgagcaggaggagctctacgtccgcgtgcagaacgggttccggaaggtccagctggaggcccggacaccactcccacgagggacggacaatgaagtggccgccttgcagccccccgtggtgcagctgcacgacagcaacccctacccgcggcgggagcacccccaccccaccgncgccgctggcgggcagatgacatcctggttctgtaattgtgtgtgatgtgaagccaattcagacaggcaaataaaagtgaccttttacactga

SEQ ID NO: 352129 - DNA, 3182 bp, Homo sapiens
tgaagggaaattgcgtatgttttatatataaaaatagcaaggatcaagaaagtccaaaaatccaaagttaattctttgcaaaggcgaacaacattcctgcacctctgccgggactgaggaaaaggagagaagcagcaacaagcagggatttcagcaaagggctcctccgtggtctggaaggagccacctggaactgccacagcttcacccttggagagggtggagggaccctcaagtcagggccaagacacagctgcctgcccaccctgggaggaggcagaggagagatgggaagggcaggacgctgggaggaaagaagcgcgttgctcttttctcagcacgtctcccacgtaagccccacaagtggatctgcaggtgaactctcaggatgagtaagtcaatgtaccgaagtcaccagatggaagggcagtctagaaaaaccaccaccgagtccagtgctgggggctgcagagggaacccggcgctgtcagacaccacctcagcgagaccccgcctgtctctctcttgcagggcagtttccgtttgactttcttcagttggaggctgaaatgaagggggagaagggagaccgaggtgatgcaggacagaaaggcgaaaggggggagcccgggggcggcggtttcttcggctccagcctgcccggcccccccggccccccaggcccacgtggctaccctgggattccaggtcccaagggagagagcatccggggccagcccggcccacctggacctcagggaccccccggcatcggctacgaggggcgccagggccctcccggccccccaggccccccagggcccccttcatttcctggccctcacaggcagactatcagcgttcccggccctccgggcccccctgggccccctgggccccctggaaccatgggcgcctcctcaggggtgaggctctgggctacacgccaggccatgctgggccaggtgcacgaggttcccgagggctggctcatcttcgtggccgagcaggaggagctctacgtccgcgtgcagaacgggttccggaaggtccagctggaggcccggacaccactcccacgagggacggacaatgaagtggccgccttgcagccccccgtggtgcagctgcacgacagcaacccctacccgcggcgggagcacccccaccccaccgcgcggccctggcgggcagatgacatcctggccagcccccctcgcctgcccgagccccagccctaccccggagccccgcaccacagctcctacgtgcacctgcggccggcgcgacccacaagcccacccgcccacagccaccgcgacttccagccggtgctccacctggttgcgctcaacagccccctgtcaggcggcatgcggggcatccgcggggccgacttccagtgcttccagcaggcgcgggccgtggggctggcgggcaccttccgcgccttcctgtcctcgcgcctgcaggacctgtacagcatcgtgcgccgtgccgaccgcgcagccgtgcccatcgtcaacctcaaggacgagctgctgtttcccagctgggaggctctgttctcaggctctgagggtccgctgaagcccggggcacgcatcttctcctttgacggcaaggacgtcctgaggcaccccacctggccccagaagagcgtgtggcatggctcggaccccaacgggcgcaggctgaccgagagctactgtgagacgtggcggacggaggctccctcggccacgggccaggcctcctcgctgctggggggcaggctcctggggcagagtgccgcgagctgccatcacgcctacatcgtgctctgcattgagaacagcttcatgactgcctccaagtagccaccgcctggatgcggatggccggagaggaccggcggctcggaggaagcccccaccgtgggcagggagcggccggccagcccctggccccaggacctggctgccatactttcctgtatagttcacgtttcatgtaatcctcaagaaataaaaggaagccaaagagtgtatttttttaaaagtttaaaacagaagcctgatgctgacattcacctgccccaactctcccctgacctgtgagcccagctgggtcaggcagggtgcagtatcatgccctgtgcaacctcttggcctgatcagaccacggctcgatttctccaggatttcctgctttgggaagccgtgctcgccccagcaggtgctgacttcatctcccacctagcagcaccgttctgtgcacaaaacccagacctgttagcagacaggccccgtgaggcaatgggagctgaggccacactcagcacaaggccatctgggctcctccagggtgtgtgctcgccctgcggtagatgggagggaggctcaggtccctggggctagggggagccccttctgctcagctctgggccattctccacagcaaccccaggctgaagcaggttcccaagctcagaggcgcactgtgacccccagctccggcctgtcctccaacaccaagcacagcagcctggggctggcctcccaaatgagccatgagatgatacatccaaagcagacagctccaccctggccgagtccaagctgggagattcaagggacccatgagttggggtctggcagcctcccatccagggcccccatctcatgcccctggctgggacgtggctcagccagcacttgtccagctgagcgccaggatggaacacggccacatcaaagaggctgaggctggcacaggacatgcggtagccagcacacagggcagtgagggagggctgtcatctgtgcactgcccatggacaggctggctccagatgcagggcagtcattggctgtctcctaggaaacccatatccttaccctccttgggactgaaggggaaccccggggtgcccacaggccgccctgcgggtgaacaaagcagccacgaggtgcaacaaggtcctctgtcagtcacagccacccctgagatccggcaacatcaaccccgagtcattcgttctgtggagggacaagtggactcagggcagcgccaggctgaccacagcacagccaacacgcacctgcctcaggactgcgacgaaaccggtggggctggttctgtaattgtgtgtgatgtgaagccaattcagacaggcaaataaaagtgaccttttacactga

SEQ ID NO: 352130 - DNA, 2852 bp, Homo sapiens
tgaagggaaattgcgtatgttttatatataaaaatagcaaggatcaagaaagtccaaaaatccaaagttaattctttgcaaaggcgaacaacattcctgcacctctgccgggactgaggaaaaggagagaagcagcaacaagcagggatttcagcaaagggctcctccgtggtctggaaggagccacctggaactgccacagcttcacccttggagagggtggagggaccctcaagtcagggccaagacacagctgcctgcccaccctgggaggaggcagaggagagatgggaagggcaggacgctgggaggaaagaagcgcgttgctcttttctcagcacgtctcccacgtaagccccacaagtggatctgcaggtgaactctcaggatgagtaagtcaatgtaccgaagtcaccagatggaagggcagtctagaaaaaccaccaccgagtccagtgctgggggctgcagagggaacccggcgctgtcagacaccacctcagcgagaccccgcctgtctctctcttgcagggcagtttccgtttgactttcttcagttggaggctgaaatgaagctctgcatttggtcccagcaggtgaggctctgggctacacgccaggccatgctgggccaggtgcacgaggttcccgagggctggctcatcttcgtggccgagcaggaggagctctacgtccgcgtgcagaacgggttccggaaggtccagctggaggcccggacaccactcccacgagggacggacaatgaagtggccgccttgcagccccccgtggtgcagctgcacgacagcaacccctacccgcggcgggagcacccccaccccaccgcgcggccctggcgggcagatgacatcctggccagcccccctcgcctgcccgagccccagccctaccccggagccccgcaccacagctcctacgtgcacctgcggccggcgcgacccacaagcccacccgcccacagccaccgcgacttccagccggtgctccacctggttgcgctcaacagccccctgtcaggcggcatgcggggcatccgcggggccgacttccagtgcttccagcaggcgcgggccgtggggctggcgggcaccttccgcgccttcctgtcctcgcgcctgcaggacctgtacagcatcgtgcgccgtgccgaccgcgcagccgtgcccatcgtcaacctcaaggacgagctgctgtttcccagctgggaggctctgttctcaggctctgagggtccgctgaagcccggggcacgcatcttctcctttgacggcaaggacgtcctgaggcaccccacctggccccagaagagcgtgtggcatggctcggaccccaacgggcgcaggctgaccgagagctactgtgagacgtggcggacggaggctccctcggccacgggccaggcctcctcgctgctggggggcaggctcctggggcagagtgccgcgagctgccatcacgcctacatcgtgctctgcattgagaacagcttcatgactgcctccaagtagccaccgcctggatgcggatggccggagaggaccggcggctcggaggaagcccccaccgtgggcagggagcggccggccagcccctggccccaggacctggctgccatactttcctgtatagttcacgtttcatgtaatcctcaagaaataaaaggaagccaaagagtgtatttttttaaaagtttaaaacagaagcctgatgctgacattcacctgccccaactctcccctgacctgtgagcccagctgggtcaggcagggtgcagtatcatgccctgtgcaacctcttggcctgatcagaccacggctcgatttctccaggatttcctgctttgggaagccgtgctcgccccagcaggtgctgacttcatctcccacctagcagcaccgttctgtgcacaaaacccagacctgttagcagacaggccccgtgaggcaatgggagctgaggccacactcagcacaaggccatctgggctcctccagggtgtgtgctcgccctgcggtagatgggagggaggctcaggtccctggggctagggggagccccttctgctcagctctgggccattctccacagcaaccccaggctgaagcaggttcccaagctcagaggcgcactgtgacccccagctccggcctgtcctccaacaccaagcacagcagcctggggctggcctcccaaatgagccatgagatgatacatccaaagcagacagctccaccctggccgagtccaagctgggagattcaagggacccatgagttggggtctggcagcctcccatccagggcccccatctcatgcccctggctgggacgtggctcagccagcacttgtccagctgagcgccaggatggaacacggccacatcaaagaggctgaggctggcacaggacatgcggtagccagcacacagggcagtgagggagggctgtcatctgtgcactgcccatggacaggctggctccagatgcagggcagtcattggctgtctcctaggaaacccatatccttaccctccttgggactgaaggggaaccccggggtgcccacaggccgccctgcgggtgaacaaagcagccacgaggtgcaacaaggtcctctgtcagtcacagccacccctgagatccggcaacatcaaccccgagtcattcgttctgtggagggacaagtggactcagggcagcgccaggctgaccacagcacagccaacacgcacctgcctcaggactgcgacgaaaccggtggggctggttctgtaattgtgtgtgatgtgaagccaattcagacaggcaaataaaagtgaccttttacactga

SEQ ID NO: 352131 - DNA, 2548 bp, Homo sapiens
gaaaggtgcagaatcaataggggcatccggactggggtgcaggcctgggggctgggatttctagggtggaggtcacctctgagggagacagagcaaggccctgggagattagaaggtcgaaggtcgccgtgttgaggtcaggggccctgaattggagccgcggcaaaggagagggcaggtcagggcacgtggtgagtgattgctgcggcttctgagcacggctgggtctgtggggcctgagcagaggtgacccgcgatccggcgccacggcaggcaggactccccacccttgctgctgcctacacccccagggcagccccagagtcgggggcgcagctccctgcttgccagttcagagcccagcccctctcacccagcccagaggaggacacagatggaggaggggcacccggagggtccccccgccgacaggccccacgtctcccacctgcaggacaatgaagtggccgccttgcagccccccgtggtgcagctgcacgacagcaacccctacccgcggcgggagcacccccaccccaccgcgcggccctggcgggcagatgacatcctggccagcccccctcgcctgcccgagccccagccctaccccggagccccgcaccacagctcctacgtgcacctgcggccggcgcgacccacaagcccacccgcccacagccaccgcgacttccagccggtgctccacctggttgcgctcaacagccccctgtcaggcggcatgcggggcatccgcggggccgacttccagtgcttccagcaggcgcgggccgtggggctggcgggcaccttccgcgccttcctgtcctcgcgcctgcaggacctgtacagcatcgtgcgccgtgccgaccgcgcagccgtgcccatcgtcaacctcaaggacgagctgctgtttcccagctgggaggctctgttctcaggctctgagggtccgctgaagcccggggcacgcatcttctcctttgacggcaaggacgtcctgaggcaccccacctggccccagaagagcgtgtggcatggctcggaccccaacgggcgcaggctgaccgagagctactgtgagacgtggcggacggaggctccctcggccacgggccaggcctcctcgctgctggggggcaggctcctggggcagagtgccgcgagctgccatcacgcctacatcgtgctctgcattgagaacagcttcatgactgcctccaagtagccaccgcctggatgcggatggccggagaggaccggcggctcggaggaagcccccaccgtgggcagggagcggccggccagcccctggccccaggacctggctgccatactttcctgtatagttcacgtttcatgtaatcctcaagaaataaaaggaagccaaagagtgtatttttttaaaagtttaaaacagaagcctgatgctgacattcacctgccccaactctcccctgacctgtgagcccagctgggtcaggcagggtgcagtatcatgccctgtgcaacctcttggcctgatcagaccacggctcgatttctccaggatttcctgctttgggaagccgtgctcgccccagcaggtgctgacttcatctcccacctagcagcaccgttctgtgcacaaaacccagacctgttagcagacaggccccgtgaggcaatgggagctgaggccacactcagcacaaggccatctgggctcctccagggtgtgtgctcgccctgcggtagatgggagggaggctcaggtccctggggctagggggagccccttctgctcagctctgggccattctccacagcaaccccaggctgaagcaggttcccaagctcagaggcgcactgtgacccccagctccggcctgtcctccaacaccaagcacagcagcctggggctggcctcccaaatgagccatgagatgatacatccaaagcagacagctccaccctggccgagtccaagctgggagattcaagggacccatgagttggggtctggcagcctcccatccagggcccccatctcatgcccctggctgggacgtggctcagccagcacttgtccagctgagcgccaggatggaacacggccacatcaaagaggctgaggctggcacaggacatgcggtagccagcacacagggcagtgagggagggctgtcatctgtgcactgcccatggacaggctggctccagatgcagggcagtcattggctgtctcctaggaaacccatatccttaccctccttgggactgaaggggaaccccggggtgcccacaggccgccctgcgggtgaacaaagcagccacgaggtgcaacaaggtcctctgtcagtcacagccacccctgagatccggcaacatcaaccccgagtcattcgttctgtggagggacaagtggactcagggcagcgccaggctgaccacagcacagccaacacgcacctgcctcaggactgcgacgaaaccggtggggctggttctgtaattgtgtgtgatgtgaagccaattcagacaggcaaataaaagtgaccttttacactga

SEQ ID NO: 352132 - DNA, 4759 bp, Homo sapiens
  misc_feature (18)..(19): n is a, c, g, or t
agaggccctccgcgcccnnagctccagccgcactgccccgatggctccctacccctgtggctgccacatcctgctgctgctcttctgctgcctggcggctgcccgggccaacctgctgaacctgaactggctttggttcaataatgaggacaccagccacgcagctaccacgatccctgagccccaggggcccctgcctgtgcagcccacagcagataccaccacacacgtgaccccccggaatggttccacagagccagcgacagcccctggcagccctgagccaccctcagagctgctggaagatggccaggacacccccacttctgccgagagcccggacgcgccagaggagaacattgccggtgtcggagccgagatcctgaacgtggccaaaggcatccggagcttcgtccagctgtggaatgacactgtccccactgagagcttggccagggcggaaaccctggtcctggagactcctgtgggcccccttgccctcgctgggccttccagcaccccccaggagaatgggaccactctctggcccagccgtggcattcctagctctccgggcgcccacacaaccgaggctggcaccttgcctgcacccaccccatcgcctccgtccctgggcaggccctgggcaccactcacggggccctcagtgccaccaccatcttcagagcgcatcagcgaggaggtggggctgctgcagctccttggggaccccccgccccagcaggtcacccagacggatgaccccgacgtcgggctggcctacgtctttgggccagatgccaacagtggccaagtggcccggtaccacttccccagcctcttcttccgtgacttctcactgctgttccacatccggccagccacagagggcccaggggtgctgttcgccatcacggactcggcgcaggccatggtcttgctgggcgtgaagctctctggggtgcaggacgggcaccaggacatctccctgctctacacagaacctggtgcaggccagacccacacagccgccagcttccggctccccgccttcgtcggccagtggacacacttagccctcagtgtggcaggtggctttgtggccctctacgtggactgtgaggagttccagagaatgccgcttgctcggtcctcacggggcctggagctggagcctggcgccgggctcttcgtggctcaggcggggggagcggaccctgacaagttccagggggtgatcgctgagctgaaggtgcgcagggacccccaggtgagccccatgcactgcctggacgaggaaggcgatgactcagatggggcattcggagactctggcagcgggctcggggacgcccgggagcttctcagggaggagacgggcgcggccctaaaacccaggctccccgcgccaccccccgtcaccacgccacccttggctggaggcagcagcacggaagattccagaagtgaagaagtcgaggagcagaccacggtggcttcgttaggagctcagacacttcctggctcagattctgtctccacgtgggacgggagtgtccggacccctgggggccgcgtgaaagagggcggcctgaaggggcagaaaggggagccaggtgttccgggcccacctggccgggcaggccccccaggatccccatgcctacctggtcccccgggtctcccgtgcccagtgagtcccctgggtcctgcaggcccagcgttgcaaactgtccccggaccacaaggacccccagggcctccggggagggacggcacccctggaagggacggcgagccgggcgaccccggtgaagacggaaagccgggcgacaccgggccacaaggcttccccgggactccaggggacgtaggtcccaagggcgacaagggagaccctggggttggagagagagggcccccaggaccccaagggcctccagggcccccaggaccctccttcagacacgacaagctgaccttcattgacatggagggatctggcttcgggggcgatctggaggccctgcggggtcctcgaggcttccctggacctcccggaccccccggtgtcccaggcctgcccggcgagccaggccgctttggggtgaacagctccgacgtcccaggacccgccggccttcctggtgtgcctgggcgcgagggtccccccgggtttcctggcctcccgggacccccaggccctccgggaagagaggggcccccaggaaggactgggcagaaaggcagcctgggtgaagcaggcgccccaggacataaggggagcaagggagcccccggtcctgctggtgctcgtggggagagcggcctggcaggagcccccggacctgctggaccaccaggcccccctgggccccctgggcccccaggaccaggactccccgctggatttgatgacatggaaggctccggggggcccttctggtcaacagcccgaagcgctgatgggccacagggacctcccggcctgccgggacttaagggggatcctggcgtgcctgggctgccgggggcgaagggagaagttggagcagatggagtccccgggttccccggcctccctggcagagagggcattgctgggccccaggggccaaagggagacagaggcagccggggagaaaagggagatccagggaaggacggagtcgggcagccgggcctccctggcccccccggacccccgggacctgtggtctacgtgtcggagcaggacggatccgtcctgagcgtgccgggacctgagggccggccgggtttcgcaggctttcccggacctgcaggacccaagggcaacctgggctctaagggcgaacgaggctccccgggacccaagggtgagaagggtgaaccgggcagcatcttcagccccgacggcggtgccctgggccctgcccagaaaggagccaagggagagccgggcttccgaggacccccgggtccatacggacggccggggtacaagggagagattggctttcctggacggccgggtcgccccgggatgaacggattgaaaggagagaaaggggagccgggagatgccagccttggatttggcatgaggggaatgcccggccccccaggacctccagggcccccaggccctccagggactcctgtttacgacagcaatgtgtttgctgagtccagccgccccgggcctccaggattgccagggaatcagggccctccaggacccaagggcgccaaaggagaagtgggcccccccggaccaccagggcagtttccgtttgactttcttcagttggaggctgaaatgaagggggagaagggagaccgaggtgatgcaggacagaaaggcgaaaggggggagcccgggggcggcggtttcttcggctccagcctgcccggcccccccggccccccaggcccacgtggctaccctgggattccaggtcccaagggagagagcatccggggccagcccggcccacctggacctcagggaccccccggcatcggctacgaggggcgccagggccctcccggccccccaggccccccagggcccccttcatttcctggccctcacaggcagactatcagcgttcccggccctccgggcccccctgggccccctgggccccctggaaccatgggcgcctcctcaggggtgaggctctgggctacacgccaggccatgctgggccaggtgcacgaggttcccgagggctggctcatcttcgtggccgagcaggaggagctctacgtccgcgtgcagaacgggttccggaaggtccagctggaggcccggacaccactcccacgagggacggacaatgaagtggccgccttgcagccccccgtggtgcagctgcacgacagcaacccctacccgcggcgggagcacccccaccccaccgcgcggccctggcgggcagatgacatcctggccagcccccctcgcctgcccgagccccagccctaccccggagccccgcaccacagctcctacgtgcacctgcggccggcgcgacccacaagcccacccgcccacagccaccgcgacttccagccggtgctccacctggttgcgctcaacagccccctgtcaggcggcatgcggggcatccgcggggccgacttccagtgcttccagcaggcgcgggccgtggggctggcgggcaccttccgcgccttcctgtcctcgcgcctgcaggacctgtacagcatcgtgcgccgtgccgaccgcgcagccgtgcccatcgtcaacctcaaggacgagctgctgtttcccagctgggaggctctgttctcaggctctgagggtccgctgaagcccggggcacgcatcttctcctttgacggcaaggacgtcctgaggcaccccacctggccccagaagagcgtgtggcatggctcggaccccaacgggcgcaggctgaccgagagctactgtgagacgtggcggacggaggctccctcggccacgggccaggcctcctcgctgctggggggcaggctcctggggcagagtgccgcgagctgccatcacgcctacatcgtgctctgcattgagaacagcttcatgactgcctccaagtagccaccgcctggatgcggatggccggagaggaccggcggctcggaggaagcccccaccgtgggcagggagcggccggccagcccctggccccaggacctggctgccatactttcctgtatagttcacgtttcatgtaatcctcaagaaataaaaggaagccaaagagtg

SEQ ID NO: 352133 - DNA, 4894 bp, Homo sapiens
  misc_feature (18)..(19): n is a, c, g, or t
agaggccctccgcgcccnnagctccagccgcactgccccgatggctccctacccctgtggctgccacatcctgctgctgctcttctgctgcctggcggctgcccgggccaacctgctgaacctgaactggctttggttcaataatgaggacaccagccacgcagctaccacgatccctgagccccaggggcccctgcctgtgcagcccacagcagataccaccacacacgtgaccccccggaatggttccacagagccagcgacagcccctggcagccctgagccaccctcagagctgctggaagatggccaggacacccccacttctgccgagagcccggacgcgccagaggagaacattgccggtgtcggagccgagatcctgaacgtggccaaaggcatccggagcttcgtccagctgtggaatgacactgtccccactgagagcttggccagggcggaaaccctggtcctggagactcctgtgggcccccttgccctcgctgggccttccagcaccccccaggagaatgggaccactctctggcccagccgtggcattcctagctctccgggcgcccacacaaccgaggctggcaccttgcctgcacccaccccatcgcctccgtccctgggcaggccctgggcaccactcacggggccctcagtgccaccaccatcttcagagcgcatcagcgaggaggtggggctgctgcagctccttggggaccccccgccccagcaggtcacccagacggatgaccccgacgtcgggctggcctacgtctttgggccagatgccaacagtggccaagtggcccggtaccacttccccagcctcttcttccgtgacttctcactgctgttccacatccggccagccacagagggcccaggggtgctgttcgccatcacggactcggcgcaggccatggtcttgctgggcgtgaagctctctggggtgcaggacgggcaccaggacatctccctgctctacacagaacctggtgcaggccagacccacacagccgccagcttccggctccccgccttcgtcggccagtggacacacttagccctcagtgtggcaggtggctttgtggccctctacgtggactgtgaggagttccagagaatgccgcttgctcggtcctcacggggcctggagctggagcctggcgccgggctcttcgtggctcaggcggggggagcggaccctgacaagttccagggggtgatcgctgagctgaaggtgcgcagggacccccaggtgagccccatgcactgcctggacgaggaaggcgatgactcagatggggcattcggagactctggcagcgggctcggggacgcccgggagcttctcagggaggagacgggcgcggccctaaaacccaggctccccgcgccaccccccgtcaccacgccacccttggctggaggcagcagcacggaagattccagaagtgaagaagtcgaggagcagaccacggtggcttcgttaggagctcagacacttcctggctcagattctgtctccacgtgggacgggagtgtccggacccctgggggccgcgtgaaagagggcggcctgaaggggcagaaaggggagccaggtgttccgggcccacctggccgggcaggccccccaggatccccatgcctacctggtcccccgggtctcccgtgcccagtgagtcccctgggtcctgcaggcccagcgttgcaaactgtccccggaccacaaggacccccagggcctccggggagggacggcacccctggaagggacggcgagccgggcgaccccggtgaagacggaaagccgggcgacaccgggccacaaggcttccccgggactccaggggacgtaggtcccaagggcgacaagggagaccctggggttggagagagagggcccccaggaccccaagggcctccagggcccccaggaccctccttcagacacgacaagctgaccttcattgacatggagggatctggcttcgggggcgatctggaggccctgcggggtcctcgaggcttccctggacctcccggaccccccggtgtcccaggcctgcccggcgagccaggccgctttggggtgaacagctccgacgtcccaggacccgccggccttcctggtgtgcctgggcgcgagggtccccccgggtttcctggcctcccgggacccccaggccctccgggaagagaggggcccccaggaaggactgggcagaaaggcagcctgggtgaagcaggcgccccaggacataaggggagcaagggagcccccggtcctgctggtgctcgtggggagagcggcctggcaggagcccccggacctgctggaccaccaggcccccctgggccccctgggcccccaggaccaggactccccgctggatttgatgacatggaaggctccggggggcccttctggtcaacagcccgaagcgctgatgggccacagggacctcccggcctgccgggacttaagggggatcctggcgtgcctgggctgccgggggcgaagggagaagttggagcagatggagtccccgggttccccggcctccctggcagagagggcattgctgggccccaggggccaaagggagacagaggcagccggggagaaaagggagatccagggaaggacggagtcgggcagccgggcctccctggcccccccggacccccgggacctgtggtctacgtgtcggagcaggacggatccgtcctgagcgtgccgggacctgagggccggccgggtttcgcaggctttcccggacctgcaggacccaagggcaacctgggctctaagggcgaacgaggctccccgggacccaagggtgagaagggtgaaccgggcagcatcttcagccccgacggcggtgccctgggccctgcccagaaaggagccaagggagagccgggcttccgaggacccccgggtccatacggacggccggggtacaagggagagattggctttcctggacggccgggtcgccccgggatgaacggattgaaaggagagaaaggggagccgggagatgccagccttggatttggcatgaggggaatgcccggccccccaggacctccagggcccccaggccctccagggactcctgtttacgacagcaatgtgtttgctgagtccagccgccccgggcctccaggattgccagggaatcagggccctccaggacccaagggcgccaaaggagaagtgggcccccccggaccaccagggcagtttccgtttgactttcttcagttggaggctgaaatgaagggggagaagggagaccgaggtgatgcaggacagaaaggcgaaaggggggagcccgggggcggcggtttcttcggctccagcctgcccggcccccccggccccccaggcccacgtggctaccctgggattccaggtcccaagggagagagcatccggggccagcccggcccacctggacctcagggaccccccggcatcggctacgaggggcgccagggccctcccggccccccaggccccccagggcccccttcatttcctggccctcacaggcagactatcagcgttcccggccctccgggcccccctgggccccctgggccccctggaaccatgggcgcctcctcaggggtgaggctctgggctacacgccaggccatgctgggccaggtgcacgaggttcccgagggctggctcatcttcgtggccgagcaggaggagctctacgtccgcgtgcagaacgggttccggaaggtccagctggaggcccggacaccactcccacgagggacggacaatgaagtggccgccttgcagccccccgtggtgcagctgcacgacagcaacccctacccgcggcgggagcacccccaccccaccgcgcggccctggcgggcagatgacatcctggccagcccccctcgcctgcccgagccccagccctaccccggagccccgcaccacagctcctacgtgcacctgcggccggcgcgacccacaagcccacccgcccacagccaccgcgacttccagccggtgctccacctggttgcgctcaacagccccctgtcaggcggcatgcggggcatccgcggggccgacttccagtgcttccagcaggcgcgggccgtggggctggcgggcaccttccgcgccttcctgtcctcgcgcctgcaggacctgtacagcatcgtgcgccgtgccgaccgcgcagccgtgcccatcgtcaacctcaaggacgagctgctgtttcccagctgggaggctctgttctcaggctctgagggtccgctgaagcccggggcacgcatcttctcctttgacggcaaggacgtcctgaggcaccccacctggccccagaagagcgtgtggcatggctcggaccccaacgggcgcaggctgaccgagagctactgtgagacgtggcggacggaggctccctcggccacgggccaggcctcctcgctgctggggggcaggctcctggggcagagtgccgcgagctgccatcacgcctacatcgtgctcttcattggctgtctcctaggaaacccatatccttaccctccttgggactgaaggggaaccccggggtgcccacaggccgccctgcgggtgaacaaagcagccacgaggtgcaacaaggtcctctgtcagtcacagccacccctgagatccggcaacatcaaccccgagtcattcgttctgtggagggacaagtggactcagggcagcgccaggctgaccacagcacagccaacacgcacctgcctcaggactgcgacgaaaccggtggggctggttctgtaattgtgtgtgatgtgaagccaattcagacaggcaaataaaagtgaccttttacactga

SEQ ID NO: 352134 - DNA, 5410 bp, Homo sapiens
  misc_feature (18)..(19): n is a, c, g, or t
  misc_feature (4908)..(4908): n is a, c, g, or t
agaggccctccgcgcccnnagctccagccgcactgccccgatggctccctacccctgtggctgccacatcctgctgctgctcttctgctgcctggcggctgcccgggccaacctgctgaacctgaactggctttggttcaataatgaggacaccagccacgcagctaccacgatccctgagccccaggggcccctgcctgtgcagcccacagcagataccaccacacacgtgaccccccggaatggttccacagagccagcgacagcccctggcagccctgagccaccctcagagctgctggaagatggccaggacacccccacttctgccgagagcccggacgcgccagaggagaacattgccggtgtcggagccgagatcctgaacgtggccaaaggcatccggagcttcgtccagctgtggaatgacactgtccccactgagagcttggccagggcggaaaccctggtcctggagactcctgtgggcccccttgccctcgctgggccttccagcaccccccaggagaatgggaccactctctggcccagccgtggcattcctagctctccgggcgcccacacaaccgaggctggcaccttgcctgcacccaccccatcgcctccgtccctgggcaggccctgggcaccactcacggggccctcagtgccaccaccatcttcagagcgcatcagcgaggaggtggggctgctgcagctccttggggaccccccgccccagcaggtcacccagacggatgaccccgacgtcgggctggcctacgtctttgggccagatgccaacagtggccaagtggcccggtaccacttccccagcctcttcttccgtgacttctcactgctgttccacatccggccagccacagagggcccaggggtgctgttcgccatcacggactcggcgcaggccatggtcttgctgggcgtgaagctctctggggtgcaggacgggcaccaggacatctccctgctctacacagaacctggtgcaggccagacccacacagccgccagcttccggctccccgccttcgtcggccagtggacacacttagccctcagtgtggcaggtggctttgtggccctctacgtggactgtgaggagttccagagaatgccgcttgctcggtcctcacggggcctggagctggagcctggcgccgggctcttcgtggctcaggcggggggagcggaccctgacaagttccagggggtgatcgctgagctgaaggtgcgcagggacccccaggtgagccccatgcactgcctggacgaggaaggcgatgactcagatggggcattcggagactctggcagcgggctcggggacgcccgggagcttctcagggaggagacgggcgcggccctaaaacccaggctccccgcgccaccccccgtcaccacgccacccttggctggaggcagcagcacggaagattccagaagtgaagaagtcgaggagcagaccacggtggcttcgttaggagctcagacacttcctggctcagattctgtctccacgtgggacgggagtgtccggacccctgggggccgcgtgaaagagggcggcctgaaggggcagaaaggggagccaggtgttccgggcccacctggccgggcaggccccccaggatccccatgcctacctggtcccccgggtctcccgtgcccagtgagtcccctgggtcctgcaggcccagcgttgcaaactgtccccggaccacaaggacccccagggcctccggggagggacggcacccctggaagggacggcgagccgggcgaccccggtgaagacggaaagccgggcgacaccgggccacaaggcttccccgggactccaggggacgtaggtcccaagggcgacaagggagaccctggggttggagagagagggcccccaggaccccaagggcctccagggcccccaggaccctccttcagacacgacaagctgaccttcattgacatggagggatctggcttcgggggcgatctggaggccctgcggggtcctcgaggcttccctggacctcccggaccccccggtgtcccaggcctgcccggcgagccaggccgctttggggtgaacagctccgacgtcccaggacccgccggccttcctggtgtgcctgggcgcgagggtccccccgggtttcctggcctcccgggacccccaggccctccgggaagagaggggcccccaggaaggactgggcagaaaggcagcctgggtgaagcaggcgccccaggacataaggggagcaagggagcccccggtcctgctggtgctcgtggggagagcggcctggcaggagcccccggacctgctggaccaccaggcccccctgggccccctgggcccccaggaccaggactccccgctggatttgatgacatggaaggctccggggggcccttctggtcaacagcccgaagcgctgatgggccacagggacctcccggcctgccgggacttaagggggatcctggcgtgcctgggctgccgggggcgaagggagaagttggagcagatggagtccccgggttccccggcctccctggcagagagggcattgctgggccccaggggccaaagggagacagaggcagccggggagaaaagggagatccagggaaggacggagtcgggcagccgggcctccctggcccccccggacccccgggacctgtggtctacgtgtcggagcaggacggatccgtcctgagcgtgccgggacctgagggccggccgggtttcgcaggctttcccggacctgcaggacccaagggcaacctgggctctaagggcgaacgaggctccccgggacccaagggtgagaagggtgaaccgggcagcatcttcagccccgacggcggtgccctgggccctgcccagaaaggagccaagggagagccgggcttccgaggacccccgggtccatacggacggccggggtacaagggagagattggctttcctggacggccgggtcgccccgggatgaacggattgaaaggagagaaaggggagccgggagatgccagccttggatttggcatgaggggaatgcccggccccccaggacctccagggcccccaggccctccagggactcctgtttacgacagcaatgtgtttgctgagtccagccgccccgggcctccaggattgccagggaatcagggccctccaggacccaagggcgccaaaggagaagtgggcccccccggaccaccagggcagtttccgtttgactttcttcagttggaggctgaaatgaagggggagaagggagaccgaggtgatgcaggacagaaaggcgaaaggggggagcccgggggcggcggtttcttcggctccagcctgcccggcccccccggccccccaggcccacgtggctaccctgggattccaggtcccaagggagagagcatccggggccagcccggcccacctggacctcagggaccccccggcatcggctacgaggggcgccagggccctcccggccccccaggccccccagggcccccttcatttcctggccctcacaggcagactatcagcgttcccggccctccgggcccccctgggccccctgggccccctggaaccatgggcgcctcctcaggggtgaggctctgggctacacgccaggccatgctgggccaggtgcacgaggttcccgagggctggctcatcttcgtggccgagcaggaggagctctacgtccgcgtgcagaacgggttccggaaggtccagctggaggcccggacaccactcccacgagggacggacaatgaagtggccgccttgcagccccccgtggtgcagctgcacgacagcaacccctacccgcggcgggagcacccccaccccaccgcgcggccctggcgggcagatgacatcctggccagcccccctcgcctgcccgagccccagccctaccccggagccccgcaccacagctcctacgtgcacctgcggccggcgcgacccacaagcccacccgcccacagccaccgcgacttccagccggtgctccacctggttgcgctcaacagccccctgtcaggcggcatgcggggcatccgcggggccgacttccagtgcttccagcaggcgcgggccgtggggctggcgggcaccttccgcgccttcctgtcctcgcgcctgcaggacctgtacagcatcgtgcgccgtgccgaccgcgcagccgtgcccatcgtcaacctcaaggacgagctgctgtttcccagctgggaggctctgttctcaggctctgagggtccgctgaagcccggggcacgcatcttctcctttgacggcaaggacgtcctgaggcaccccacctggccccagaagagcgtgtggcatggctcggaccccaacgggcgcaggctgaccgagagctactgtgagacgtggcggacggaggctccctcggccacgggccaggcctcctcgctgctggggggcaggctcctggggcagagtgccgcgagctgccatcacgcctacatcgtgctcttcattggctgtctcctaggaaacccatatccttaccctccttgggactgaaggggcccccctggccatcgggccactcggaaccatgggcgcctcctcaggggtgaggctctggctacacgccaggccatgctgggccaggtgcacgaggttcccgagggctggctcatcttcgtggccgagcaggaggagctctacgtccgcgtgcagaacgggttccggaaggtccagctggaggcccggacaccactcccacgagggacggacaatgaagtggccgccttgcagccccccgtggtgcagctgcacgacagcaacccctacccgcggcgggagcacccccaccccaccgncgccgctggcgggcagatgacatcctggttctgtaattgtgtgtgatgtgaagccaattcagacaggcaaataaaagtgaccttttacactgactcttggtttgcaagcagccttcactgtcacaggaaggacacaattctccaaaaggagttctcaggagtcttttatccctggactgccccactggcagatcccgagtgtgcacaggcacgcacggttacatggggtatgcatgcatggccatacacaggcgtgcagttgtacacaggtgtgcaggagcatccatagtgtgcacaggtacacaggcatgcacgggtgtgtggacacacaccaacactcttaggtctctcctcacagcaggacctgacttgctcccagcaacactacatcctgacagccatccctgtcctggtggacgggtgagtgcaggactcagaggcaggcaggcagtgggtgcagtgagcaggctgcggagggagcaggccctcaggttggggaggc

SEQ ID NO: 352135 - DNA, 1740 bp, Homo sapiens
  misc_feature (18)..(19): n is a, c, g, or t
agaggccctccgcgcccnnagctccagccgcactgccccgatggctccctacccctgtggctgccacatcctgctgctgctcttctgctgcctggcggctgcccgggccaacctgctgaacctgaactggctttggttcaataatgaggacaccagccacgcagctaccacgatccctgagccccaggggcccctgcctgtgcagcccacagcagataccaccacacacgtgaccccccggaatggttccacagagccagcgacagcccctggcagccctgagccaccctcagagctgctggaagatggccaggacacccccacttctgccgagagcccggacgcgccagaggagaacattgccggtgtcggagccgagatcctgaacgtggccaaaggcatccggagcttcgtccagctgtggaatgacactgtccccactgagagcttggccagggcggaaaccctggtcctggagactcctgtgggcccccttgccctcgctgggccttccagcaccccccaggagaatgggaccactctctggcccagccgtggcattcctagctctccgggcgcccacacaaccgaggctggcaccttgcctgcacccaccccatcgcctccgtccctgggcaggccctgggcaccactcacggggccctcagtgccaccaccatcttcagagcgcatcagcgaggaggtggggctgctgcagctccttggggaccccccgccccagcaggtcacccagacggatgaccccgacgtcgggctggcctacgtctttgggccagatgccaacagtggccaagtggcccggtaccacttccccagcctcttcttccgtgacttctcactgctgttccacatccggccagccacagagggcccaggggtgctgttcgccatcacggactcggcgcaggccatggtcttgctgggcgtgaagctctctggggtgcaggacgggcaccaggacatctccctgctctacacagaacctggtgcaggccagacccacacagccgccagcttccggctccccgccttcgtcggccagtggacacacttagccctcagtgtggcaggtggctttgtggccctctacgtggactgtgaggagttccagagaatgccgcttgctcggtcctcacggggcctggagctggagcctggcgccgggctcttcgtggctcaggcggggggagcggaccctgacaagttccagggggtgatcgctgagctgaaggtgcgcagggacccccaggtgagccccatgcactgcctggacgaggaaggcgatgactcagatggggcattcggagactctggcagcgggctcggggacgcccgggagcttctcagggaggagacgggcgcggccctaaaacccaggctccccgcgccaccccccgtcaccacgccacccttggctggaggcagcagcacggaagattccagaagtgaagaagtcgaggagcagaccacggtggcttcgttaggagctcagacacttcctggctcagattctgtctccacgtgggacgggagtgtccggacccctgggggccgcgtgaaagaggtaaggccacctccctgtgctcctgaaccattctgaaccagagcacctgtggccttttgggccactcactggtgagccctgatgaagcccctctgtgcccgtgcctcctttgtgcccagcactcggtgccagcatgcgtccaccctgcgtgtcca

SEQ ID NO: 352136 - DNA, 5914 bp, Homo sapiens
  misc_feature (18)..(19): n is a, c, g, or t
agaggccctccgcgcccnnagctccagccgcactgccccgatggctccctacccctgtggctgccacatcctgctgctgctcttctgctgcctggcggctgcccgggccaacctgctgaacctgaactggctttggttcaataatgaggacaccagccacgcagctaccacgatccctgagccccaggggcccctgcctgtgcagcccacagcagataccaccacacacgtgaccccccggaatggttccacagagccagcgacagcccctggcagccctgagccaccctcagagctgctggaagatggccaggacacccccacttctgccgagagcccggacgcgccagaggagaacattgccggtgtcggagccgagatcctgaacgtggccaaaggcatccggagcttcgtccagctgtggaatgacactgtccccactgagagcttggccagggcggaaaccctggtcctggagactcctgtgggcccccttgccctcgctgggccttccagcaccccccaggagaatgggaccactctctggcccagccgtggcattcctagctctccgggcgcccacacaaccgaggctggcaccttgcctgcacccaccccatcgcctccgtccctgggcaggccctgggcaccactcacggggccctcagtgccaccaccatcttcagagcgcatcagcgaggaggtggggctgctgcagctccttggggaccccccgccccagcaggtcacccagacggatgaccccgacgtcgggctggcctacgtctttgggccagatgccaacagtggccaagtggcccggtaccacttccccagcctcttcttccgtgacttctcactgctgttccacatccggccagccacagagggcccaggggtgctgttcgccatcacggactcggcgcaggccatggtcttgctgggcgtgaagctctctggggtgcaggacgggcaccaggacatctccctgctctacacagaacctggtgcaggccagacccacacagccgccagcttccggctccccgccttcgtcggccagtggacacacttagccctcagtgtggcaggtggctttgtggccctctacgtggactgtgaggagttccagagaatgccgcttgctcggtcctcacggggcctggagctggagcctggcgccgggctcttcgtggctcaggcggggggagcggaccctgacaagttccagggggtgatcgctgagctgaaggtgcgcagggacccccaggtgagccccatgcactgcctggacgaggaaggcgatgactcagatggggcattcggagactctggcagcgggctcggggacgcccgggagcttctcagggaggagacgggcgcggccctaaaacccaggctccccgcgccaccccccgtcaccacgccacccttggctggaggcagcagcacggaagattccagaagtgaagaagtcgaggagcagaccacggtggcttcgttaggagctcagacacttcctggctcagattctgtctccacgtgggacgggagtgtccggacccctgggggccgcgtgaaagagggcggcctgaaggggcagaaaggggagccaggtgttccgggcccacctggccgggcaggccccccaggatccccatgcctacctggtcccccgggtctcccgtgcccagtgagtcccctgggtcctgcaggcccagcgttgcaaactgtccccggaccacaaggacccccagggcctccggggagggacggcacccctggaagggacggcgagccgggcgaccccggtgaagacggaaagccgggcgacaccgggccacaaggcttccccgggactccaggggacgtaggtcccaagggcgacaagggagaccctggggttggagagagagggcccccaggaccccaagggcctccagggcccccaggaccctccttcagacacgacaagctgaccttcattgacatggagggatctggcttcgggggcgatctggaggccctgcggggtcctcgaggcttccctggacctcccggaccccccggtgtcccaggcctgcccggcgagccaggccgctttggggtgaacagctccgacgtcccaggacccgccggccttcctggtgtgcctgggcgcgagggtccccccgggtttcctggcctcccgggacccccaggccctccgggaagagaggggcccccaggaaggactgggcagaaaggcagcctgggtgaagcaggcgccccaggacataaggggagcaagggagcccccggtcctgctggtgctcgtggggagagcggcctggcaggagcccccggacctgctggaccaccaggcccccctgggccccctgggcccccaggaccaggactccccgctggatttgatgacatggaaggctccggggggcccttctggtcaacagcccgaagcgctgatgggccacagggacctcccggcctgccgggacttaagggggatcctggcgtgcctgggctgccgggggcgaagggagaagttggagcagatggagtccccgggttccccggcctccctggcagagagggcattgctgggccccaggggccaaagggagacagaggcagccggggagaaaagggagatccagggaaggacggagtcgggcagccgggcctccctggcccccccggacccccgggacctgtggtctacgtgtcggagcaggacggatccgtcctgagcgtgccgggacctgagggccggccgggtttcgcaggctttcccggacctgcaggacccaagggcaacctgggctctaagggcgaacgaggctccccgggacccaagggtgagaagggtgaaccgggcagcatcttcagccccgacggcggtgccctgggccctgcccagaaaggagccaagggagagccgggcttccgaggacccccgggtccatacggacggccggggtacaagggagagattggctttcctggacggccgggtcgccccgggatgaacggattgaaaggagagaaaggggagccgggagatgccagccttggatttggcatgaggggaatgcccggccccccaggacctccagggcccccaggccctccagggactcctgtttacgacagcaatgtgtttgctgagtccagccgccccgggcctccaggattgccagggaatcagggccctccaggacccaagggcgccaaaggagaagtgggcccccccggaccaccagggcagtttccgtttgactttcttcagttggaggctgaaatgaagggggagaagggagaccgaggtgatgcaggacagaaaggcgaaaggggggagcccgggggcggcggtttcttcggctccagcctgcccggcccccccggccccccaggcccacgtggctaccctgggattccaggtcccaagggagagagcatccggggccagcccggcccacctggacctcagggaccccccggcatcggctacgaggggcgccagggccctcccggccccccaggccccccagggcccccttcatttcctggccctcacaggcagactatcagcgttcccggccctccgggcccccctgggccccctgggccccctggaaccatgggcgcctcctcaggggtgaggctctgggctacacgccaggccatgctgggccaggtgcacgaggttcccgagggctggctcatcttcgtggccgagcaggaggagctctacgtccgcgtgcagaacgggttccggaaggtccagctggaggcccggacaccactcccacgagggacggacaatgaagtggccgccttgcagccccccgtggtgcagctgcacgacagcaacccctacccgcggcgggagcacccccaccccaccgcgcggccctggcgggcagatgacatcctggccagcccccctcgcctgcccgagccccagccctaccccggagccccgcaccacagctcctacgtgcacctgcggccggcgcgacccacaagcccacccgcccacagccaccgcgacttccagccggtgctccacctggttgcgctcaacagccccctgtcaggcggcatgcggggcatccgcggggccgacttccagtgcttccagcaggcgcgggccgtggggctggcgggcaccttccgcgccttcctgtcctcgcgcctgcaggacctgtacagcatcgtgcgccgtgccgaccgcgcagccgtgcccatcgtcaacctcaaggacgagctgctgtttcccagctgggaggctctgttctcaggctctgagggtccgctgaagcccggggcacgcatcttctcctttgacggcaaggacgtcctgaggcaccccacctggccccagaagagcgtgtggcatggctcggaccccaacgggcgcaggctgaccgagagctactgtgagacgtggcggacggaggctccctcggccacgggccaggcctcctcgctgctggggggcaggctcctggggcagagtgccgcgagctgccatcacgcctacatcgtgctctgcattgagaacagcttcatgactgcctccaagtagccaccgcctggatgcggatggccggagaggaccggcggctcggaggaagcccccaccgtgggcagggagcggccggccagcccctggccccaggacctggctgccatactttcctgtatagttcacgtttcatgtaatcctcaagaaataaaaggaagccaaagagtgtatttttttaaaagtttaaaacagaagcctgatgctgacattcacctgccccaactctcccctgacctgtgagcccagctgggtcaggcagggtgcagtatcatgccctgtgcaacctcttggcctgatcagaccacggctcgatttctccaggatttcctgctttgggaagccgtgctcgccccagcaggtgctgacttcatctcccacctagcagcaccgttctgtgcacaaaacccagacctgttagcagacaggccccgtgaggcaatgggagctgaggccacactcagcacaaggccatctgggctcctccagggtgtgtgctcgccctgcggtagatgggagggaggctcaggtccctggggctagggggagccccttctgctcagctctgggccattctccacagcaaccccaggctgaagcaggttcccaagctcagaggcgcactgtgacccccagctccggcctgtcctccaacaccaagcacagcagcctggggctggcctcccaaatgagccatgagatgatacatccaaagcagacagctccaccctggccgagtccaagctgggagattcaagggacccatgagttggggtctggcagcctcccatccagggcccccatctcatgcccctggctgggacgtggctcagccagcacttgtccagctgagcgccaggatggaacacggccacatcaaagaggctgaggctggcacaggacatgcggtagccagcacacagggcagtgagggagggctgtcatctgtgcactgcccatggacaggctggctccagatgcagggcagtcattggctgtctcctaggaaacccatatccttaccctccttgggactgaaggggaaccccggggtgcccacaggccgccctgcgggtgaacaaagcagccacgaggtgcaacaaggtcctctgtcagtcacagccacccctgagatccggcaacatcaaccccgagtcattcgttctgtggagggacaagtggactcagggcagcgccaggctgaccacagcacagccaacacgcacctgcctcaggactgcgacgaaaccggtggggctggttctgtaattgtgtgtgatgtgaagccaattcagacaggcaaataaaagtgaccttttacactga

SEQ ID NO: 352137 - DNA, 5392 bp, Homo sapiens
  misc_feature (4)..(4): n is a, c, g, or t
  misc_feature (8)..(9): n is a, c, g, or t
gcgngtcnncgcggcggaggaggcagcatcccgcggcgctgacggtcctggggagagcatggcgccgaggtgcccctggccatggccgcggcggcggcgcctcctggacgtgctcgcgcccctggtcctgctgctcggggtccgcgcggcctccgcggagccagagcgcatcagcgaggaggtggggctgctgcagctccttggggaccccccgccccagcaggtcacccagacggatgaccccgacgtcgggctggcctacgtctttgggccagatgccaacagtggccaagtggcccggtaccacttccccagcctcttcttccgtgacttctcactgctgttccacatccggccagccacagagggcccaggggtgctgttcgccatcacggactcggcgcaggccatggtcttgctgggcgtgaagctctctggggtgcaggacgggcaccaggacatctccctgctctacacagaacctggtgcaggccagacccacacagccgccagcttccggctccccgccttcgtcggccagtggacacacttagccctcagtgtggcaggtggctttgtggccctctacgtggactgtgaggagttccagagaatgccgcttgctcggtcctcacggggcctggagctggagcctggcgccgggctcttcgtggctcaggcggggggagcggaccctgacaagttccagggggtgatcgctgagctgaaggtgcgcagggacccccaggtgagccccatgcactgcctggacgaggaaggcgatgactcagatggggcattcggagactctggcagcgggctcggggacgcccgggagcttctcagggaggagacgggcgcggccctaaaacccaggctccccgcgccaccccccgtcaccacgccacccttggctggaggcagcagcacggaagattccagaagtgaagaagtcgaggagcagaccacggtggcttcgttaggagctcagacacttcctggctcagattctgtctccacgtgggacgggagtgtccggacccctgggggccgcgtgaaagagggcggcctgaaggggcagaaaggggagccaggtgttccgggcccacctggccgggcaggccccccaggatccccatgcctacctggtcccccgggtctcccgtgcccagtgagtcccctgggtcctgcaggcccagcgttgcaaactgtccccggaccacaaggacccccagggcctccggggagggacggcacccctggaagggacggcgagccgggcgaccccggtgaagacggaaagccgggcgacaccgggccacaaggcttccccgggactccaggggacgtaggtcccaagggcgacaagggagaccctggggttggagagagagggcccccaggaccccaagggcctccagggcccccaggaccctccttcagacacgacaagctgaccttcattgacatggagggatctggcttcgggggcgatctggaggccctgcggggtcctcgaggcttccctggacctcccggaccccccggtgtcccaggcctgcccggcgagccaggccgctttggggtgaacagctccgacgtcccaggacccgccggccttcctggtgtgcctgggcgcgagggtccccccgggtttcctggcctcccgggacccccaggccctccgggaagagaggggcccccaggaaggactgggcagaaaggcagcctgggtgaagcaggcgccccaggacataaggggagcaagggagcccccggtcctgctggtgctcgtggggagagcggcctggcaggagcccccggacctgctggaccaccaggcccccctgggccccctgggcccccaggaccaggactccccgctggatttgatgacatggaaggctccggggggcccttctggtcaacagcccgaagcgctgatgggccacagggacctcccggcctgccgggacttaagggggatcctggcgtgcctgggctgccgggggcgaagggagaagttggagcagatggagtccccgggttccccggcctccctggcagagagggcattgctgggccccaggggccaaagggagacagaggcagccggggagaaaagggagatccagggaaggacggagtcgggcagccgggcctccctggcccccccggacccccgggacctgtggtctacgtgtcggagcaggacggatccgtcctgagcgtgccgggacctgagggccggccgggtttcgcaggctttcccggacctgcaggacccaagggcaacctgggctctaagggcgaacgaggctccccgggacccaagggtgagaagggtgaaccgggcagcatcttcagccccgacggcggtgccctgggccctgcccagaaaggagccaagggagagccgggcttccgaggacccccgggtccatacggacggccggggtacaagggagagattggctttcctggacggccgggtcgccccgggatgaacggattgaaaggagagaaaggggagccgggagatgccagccttggatttggcatgaggggaatgcccggccccccaggacctccagggcccccaggccctccagggactcctgtttacgacagcaatgtgtttgctgagtccagccgccccgggcctccaggattgccagggaatcagggccctccaggacccaagggcgccaaaggagaagtgggcccccccggaccaccagggcagtttccgtttgactttcttcagttggaggctgaaatgaagggggagaagggagaccgaggtgatgcaggacagaaaggcgaaaggggggagcccgggggcggcggtttcttcggctccagcctgcccggcccccccggccccccaggcccacgtggctaccctgggattccaggtcccaagggagagagcatccggggccagcccggcccacctggacctcagggaccccccggcatcggctacgaggggcgccagggccctcccggccccccaggccccccagggcccccttcatttcctggccctcacaggcagactatcagcgttcccggccctccgggcccccctgggccccctgggccccctggaaccatgggcgcctcctcaggggtgaggctctgggctacacgccaggccatgctgggccaggtgcacgaggttcccgagggctggctcatcttcgtggccgagcaggaggagctctacgtccgcgtgcagaacgggttccggaaggtccagctggaggcccggacaccactcccacgagggacggacaatgaagtggccgccttgcagccccccgtggtgcagctgcacgacagcaacccctacccgcggcgggagcacccccaccccaccgcgcggccctggcgggcagatgacatcctggccagcccccctcgcctgcccgagccccagccctaccccggagccccgcaccacagctcctacgtgcacctgcggccggcgcgacccacaagcccacccgcccacagccaccgcgacttccagccggtgctccacctggttgcgctcaacagccccctgtcaggcggcatgcggggcatccgcggggccgacttccagtgcttccagcaggcgcgggccgtggggctggcgggcaccttccgcgccttcctgtcctcgcgcctgcaggacctgtacagcatcgtgcgccgtgccgaccgcgcagccgtgcccatcgtcaacctcaaggacgagctgctgtttcccagctgggaggctctgttctcaggctctgagggtccgctgaagcccggggcacgcatcttctcctttgacggcaaggacgtcctgaggcaccccacctggccccagaagagcgtgtggcatggctcggaccccaacgggcgcaggctgaccgagagctactgtgagacgtggcggacggaggctccctcggccacgggccaggcctcctcgctgctggggggcaggctcctggggcagagtgccgcgagctgccatcacgcctacatcgtgctctgcattgagaacagcttcatgactgcctccaagtagccaccgcctggatgcggatggccggagaggaccggcggctcggaggaagcccccaccgtgggcagggagcggccggccagcccctggccccaggacctggctgccatactttcctgtatagttcacgtttcatgtaatcctcaagaaataaaaggaagccaaagagtgtatttttttaaaagtttaaaacagaagcctgatgctgacattcacctgccccaactctcccctgacctgtgagcccagctgggtcaggcagggtgcagtatcatgccctgtgcaacctcttggcctgatcagaccacggctcgatttctccaggatttcctgctttgggaagccgtgctcgccccagcaggtgctgacttcatctcccacctagcagcaccgttctgtgcacaaaacccagacctgttagcagacaggccccgtgaggcaatgggagctgaggccacactcagcacaaggccatctgggctcctccagggtgtgtgctcgccctgcggtagatgggagggaggctcaggtccctggggctagggggagccccttctgctcagctctgggccattctccacagcaaccccaggctgaagcaggttcccaagctcagaggcgcactgtgacccccagctccggcctgtcctccaacaccaagcacagcagcctggggctggcctcccaaatgagccatgagatgatacatccaaagcagacagctccaccctggccgagtccaagctgggagattcaagggacccatgagttggggtctggcagcctcccatccagggcccccatctcatgcccctggctgggacgtggctcagccagcacttgtccagctgagcgccaggatggaacacggccacatcaaagaggctgaggctggcacaggacatgcggtagccagcacacagggcagtgagggagggctgtcatctgtgcactgcccatggacaggctggctccagatgcagggcagtcattggctgtctcctaggaaacccatatccttaccctccttgggactgaaggggaaccccggggtgcccacaggccgccctgcgggtgaacaaagcagccacgaggtgcaacaaggtcctctgtcagtcacagccacccctgagatccggcaacatcaaccccgagtcattcgttctgtggagggacaagtggactcagggcagcgccaggctgaccacagcacagccaacacgcacctgcctcaggactgcgacgaaaccggtggggctggttctgtaattgtgtgtgatgtgaagccaattcagacaggcaaataaaagtgaccttttacactga

SEQ ID NO: 352138 - DNA, 403 bp, Homo sapiens
caccctgctgtggacctgggagggccgggtgctgggcagggagcgtaccctggcacaggcttggaggggcaggtgctgggcagggagggcaccctcctgtgggctgggagggccaggtgctggggcgggagagtcgggtgctgggcagggagggcaccctggctcaggcccagccgcaggtcctgggtgaccctgctgctttcttcggagccttttttctgttgagactggtgggtggtcaggacatgagggggtatgtgctgtcccctgtttgaggaacaacacgtggtcctttggagtcctggagctgaacatgtggctcaccatcagcccctgctgcagaaactggtgcaggacaccccactacctctgtctcagcgctggccccccagtacctccgtct

SEQ ID NO: 352139 - DNA, 4133 bp, Homo sapiens
ggcttctcttgcacacccagggcgaccccggtgaagacggaaagccgggcgacaccgggccacaaggcttccccgggactccaggggacgtaggtcccaagggcgacaagggagaccctggggttggagagagagggcccccaggaccccaagggcctccagggcccccaggaccctccttcagacacgacaagctgaccttcattgacatggagggatctggcttcgggggcgatctggaggccctgcggggtcctcgaggcttccctggacctcccggaccccccggtgtcccaggcctgcccggcgagccaggccgctttggggtgaacagctccgacgtcccaggacccgccggccttcctggtgtgcctgggcgcgagggtccccccgggtttcctggcctcccgggacccccaggccctccgggaagagaggggcccccaggaaggactgggcagaaaggcagcctgggtgaagcaggcgccccaggacataaggggagcaagggagcccccggtcctgctggtgctcgtggggagagcggcctggcaggagcccccggacctgctggaccaccaggcccccctgggccccctgggcccccaggaccaggactccccgctggatttgatgacatggaaggctccggggggcccttctggtcaacagcccgaagcgctgatgggccacagggacctcccggcctgccgggacttaagggggatcctggcgtgcctgggctgccgggggcgaagggagaagttggagcagatggagtccccgggttccccggcctccctggcagagagggcattgctgggccccaggggccaaagggagacagaggcagccggggagaaaagggagatccagggaaggacggagtcgggcagccgggcctccctggcccccccggacccccgggacctgtggtctacgtgtcggagcaggacggatccgtcctgagcgtgccgggacctgagggccggccgggtttcgcaggctttcccggacctgcaggacccaagggcaacctgggctctaagggcgaacgaggctccccgggacccaagggtgagaagggtgaaccgggcagcatcttcagccccgacggcggtgccctgggccctgcccagaaaggagccaagggagagccgggcttccgaggacccccgggtccatacggacggccggggtacaagggagagattggctttcctggacggccgggtcgccccgggatgaacggattgaaaggagagaaaggggagccgggagatgccagccttggatttggcatgaggggaatgcccggccccccaggacctccagggcccccaggccctccagggactcctgtttacgacagcaatgtgtttgctgagtccagccgccccgggcctccaggattgccagggaatcagggccctccaggacccaagggcgccaaaggagaagtgggcccccccggaccaccagggcagtttccgtttgactttcttcagttggaggctgaaatgaagggggagaagggagaccgaggtgatgcaggacagaaaggcgaaaggggggagcccgggggcggcggtttcttcggctccagcctgcccggcccccccggccccccaggcccacgtggctaccctgggattccaggtcccaagggagagagcatccggggccagcccggcccacctggacctcagggaccccccggcatcggctacgaggggcgccagggccctcccggccccccaggccccccagggcccccttcatttcctggccctcacaggcagactatcagcgttcccggccctccgggcccccctgggccccctgggccccctggaaccatgggcgcctcctcaggggtgaggctctgggctacacgccaggccatgctgggccaggtgcacgaggttcccgagggctggctcatcttcgtggccgagcaggaggagctctacgtccgcgtgcagaacgggttccggaaggtccagctggaggcccggacaccactcccacgagggacggacaatgaagtggccgccttgcagccccccgtggtgcagctgcacgacagcaacccctacccgcggcgggagcacccccaccccaccgcgcggccctggcgggcagatgacatcctggccagcccccctcgcctgcccgagccccagccctaccccggagccccgcaccacagctcctacgtgcacctgcggccggcgcgacccacaagcccacccgcccacagccaccgcgacttccagccggtgctccacctggttgcgctcaacagccccctgtcaggcggcatgcggggcatccgcggggccgacttccagtgcttccagcaggcgcgggccgtggggctggcgggcaccttccgcgccttcctgtcctcgcgcctgcaggacctgtacagcatcgtgcgccgtgccgaccgcgcagccgtgcccatcgtcaacctcaaggacgagctgctgtttcccagctgggaggctctgttctcaggctctgagggtccgctgaagcccggggcacgcatcttctcctttgacggcaaggacgtcctgaggcaccccacctggccccagaagagcgtgtggcatggctcggaccccaacgggcgcaggctgaccgagagctactgtgagacgtggcggacggaggctccctcggccacgggccaggcctcctcgctgctggggggcaggctcctggggcagagtgccgcgagctgccatcacgcctacatcgtgctctgcattgagaacagcttcatgactgcctccaagtagccaccgcctggatgcggatggccggagaggaccggcggctcggaggaagcccccaccgtgggcagggagcggccggccagcccctggccccaggacctggctgccatactttcctgtatagttcacgtttcatgtaatcctcaagaaataaaaggaagccaaagagtgtatttttttaaaagtttaaaacagaagcctgatgctgacattcacctgccccaactctcccctgacctgtgagcccagctgggtcaggcagggtgcagtatcatgccctgtgcaacctcttggcctgatcagaccacggctcgatttctccaggatttcctgctttgggaagccgtgctcgccccagcaggtgctgacttcatctcccacctagcagcaccgttctgtgcacaaaacccagacctgttagcagacaggccccgtgaggcaatgggagctgaggccacactcagcacaaggccatctgggctcctccagggtgtgtgctcgccctgcggtagatgggagggaggctcaggtccctggggctagggggagccccttctgctcagctctgggccattctccacagcaaccccaggctgaagcaggttcccaagctcagaggcgcactgtgacccccagctccggcctgtcctccaacaccaagcacagcagcctggggctggcctcccaaatgagccatgagatgatacatccaaagcagacagctccaccctggccgagtccaagctgggagattcaagggacccatgagttggggtctggcagcctcccatccagggcccccatctcatgcccctggctgggacgtggctcagccagcacttgtccagctgagcgccaggatggaacacggccacatcaaagaggctgaggctggcacaggacatgcggtagccagcacacagggcagtgagggagggctgtcatctgtgcactgcccatggacaggctggctccagatgcagggcagtcattggctgtctcctaggaaacccatatccttaccctccttgggactgaaggggaaccccggggtgcccacaggccgccctgcgggtgaacaaagcagccacgaggtgcaacaaggtcctctgtcagtcacagccacccctgagatccggcaacatcaaccccgagtcattcgttctgtggagggacaagtggactcagggcagcgccaggctgaccacagcacagccaacacgcacctgcctcaggactgcgacgaaaccggtggggctggttctgtaattgtgtgtgatgtgaagccaattcagacaggcaaataaaagtgaccttttacactga

SEQ ID NO: 352140 - DNA, 3420 bp, Homo sapiens
tgagaggagctggggcaatcggacaggggatctgcgtgctggctgcggggggaacgagaaggttgagcagatgagtcccgtgtcgcggctccctggcagagagggcattgctggcccagggccaaagggagacagaggcagccggggagaaaaggagatccagggaaggacggagtcgggcagccgggcctccctggcccccccggacccccgggacctgtggtctacgtgtcggagcaggacggatccgtcctgagcgtgccgggacctgagggccggccgggtttcgcaggctttcccggacctgcaggacccaagggcaacctgggctctaagggcgaacgaggctccccgggacccaagggtgagaagggtgaaccgggcagcatcttcagccccgacggcggtgccctgggccctgcccagaaaggagccaagggagagccgggcttccgaggacccccgggtccatacggacggccggggtacaagggagagattggctttcctggacggccgggtcgccccgggatgaacggattgaaaggagagaaaggggagccgggagatgccagccttggatttggcatgaggggaatgcccggccccccaggacctccagggcccccaggccctccagggactcctgtttacgacagcaatgtgtttgctgagtccagccgccccgggcctccaggattgccagggaatcagggccctccaggacccaagggcgccaaaggagaagtgggcccccccggaccaccagggcagtttccgtttgactttcttcagttggaggctgaaatgaagggggagaagggagaccgaggtgatgcaggacagaaaggcgaaaggggggagcccgggggcggcggtttcttcggctccagcctgcccggcccccccggccccccaggcccacgtggctaccctgggattccaggtcccaagggagagagcatccggggccagcccggcccacctggacctcagggaccccccggcatcggctacgaggggcgccagggccctcccggccccccaggccccccagggcccccttcatttcctggccctcacaggcagactatcagcgttcccggccctccgggcccccctgggccccctgggccccctggaaccatgggcgcctcctcaggggtgaggctctgggctacacgccaggccatgctgggccaggtgcacgaggttcccgagggctggctcatcttcgtggccgagcaggaggagctctacgtccgcgtgcagaacgggttccggaaggtccagctggaggcccggacaccactcccacgagggacggacaatgaagtggccgccttgcagccccccgtggtgcagctgcacgacagcaacccctacccgcggcgggagcacccccaccccaccgcgcggccctggcgggcagatgacatcctggccagcccccctcgcctgcccgagccccagccctaccccggagccccgcaccacagctcctacgtgcacctgcggccggcgcgacccacaagcccacccgcccacagccaccgcgacttccagccggtgctccacctggttgcgctcaacagccccctgtcaggcggcatgcggggcatccgcggggccgacttccagtgcttccagcaggcgcgggccgtggggctggcgggcaccttccgcgccttcctgtcctcgcgcctgcaggacctgtacagcatcgtgcgccgtgccgaccgcgcagccgtgcccatcgtcaacctcaaggacgagctgctgtttcccagctgggaggctctgttctcaggctctgagggtccgctgaagcccggggcacgcatcttctcctttgacggcaaggacgtcctgaggcaccccacctggccccagaagagcgtgtggcatggctcggaccccaacgggcgcaggctgaccgagagctactgtgagacgtggcggacggaggctccctcggccacgggccaggcctcctcgctgctggggggcaggctcctggggcagagtgccgcgagctgccatcacgcctacatcgtgctctgcattgagaacagcttcatgactgcctccaagtagccaccgcctggatgcggatggccggagaggaccggcggctcggaggaagcccccaccgtgggcagggagcggccggccagcccctggccccaggacctggctgccatactttcctgtatagttcacgtttcatgtaatcctcaagaaataaaaggaagccaaagagtgtatttttttaaaagtttaaaacagaagcctgatgctgacattcacctgccccaactctcccctgacctgtgagcccagctgggtcaggcagggtgcagtatcatgccctgtgcaacctcttggcctgatcagaccacggctcgatttctccaggatttcctgctttgggaagccgtgctcgccccagcaggtgctgacttcatctcccacctagcagcaccgttctgtgcacaaaacccagacctgttagcagacaggccccgtgaggcaatgggagctgaggccacactcagcacaaggccatctgggctcctccagggtgtgtgctcgccctgcggtagatgggagggaggctcaggtccctggggctagggggagccccttctgctcagctctgggccattctccacagcaaccccaggctgaagcaggttcccaagctcagaggcgcactgtgacccccagctccggcctgtcctccaacaccaagcacagcagcctggggctggcctcccaaatgagccatgagatgatacatccaaagcagacagctccaccctggccgagtccaagctgggagattcaagggacccatgagttggggtctggcagcctcccatccagggcccccatctcatgcccctggctgggacgtggctcagccagcacttgtccagctgagcgccaggatggaacacggccacatcaaagaggctgaggctggcacaggacatgcggtagccagcacacagggcagtgagggagggctgtcatctgtgcactgcccatggacaggctggctccagatgcagggcagtcattggctgtctcctaggaaacccatatccttaccctccttgggactgaaggggaaccccggggtgcccacaggccgccctgcgggtgaacaaagcagccacgaggtgcaacaaggtcctctgtcagtcacagccacccctgagatccggcaacatcaaccccgagtcattcgttctgtggagggacaagtggactcagggcagcgccaggctgaccacagcacagccaacacgcacctgcctcaggactgcgacgaaaccggtggggctggttctgtaattgtgtgtgatgtgaagccaattcagacaggcaaataaaagtgaccttttacactga

SEQ ID NO: 352141 - DNA, 3430 bp, Homo sapiens
  misc_feature (18)..(19): n is a, c, g, or t
agaggccctccgcgcccnnagctccagccgcactgccccgatggctccctacccctgtggctgccacatcctgctgctgctcttctgctgcctggcggctgcccgggccaacctgctgaacctgaactggctttggttcaataatgaggacaccagccacgcagctaccacgatccctgagccccaggggcccctgcctgtgcagcccacagcagataccaccacacacgtgaccccccggaatggttccacagagccagcgacagcccctggcagccctgagccaccctcagagctgctggaagatggccaggacacccccacttctgccgagagcccggacgcgccagaggagaacattgccggtgtcggagccgagatcctgaacgtggccaaaggcatccggagcttcgtccagctgtggaatgacactgtccccactgagagcttggccagggcggaaaccctggtcctggagactcctgtgggcccccttgccctcgctgggccttccagcaccccccaggagaatgggaccactctctggcccagccgtggcattcctagctctccgggcgcccacacaaccgaggctggcaccttgcctgcacccaccccatcgcctccgtccctgggcaggccctgggcaccactcacggggccctcagtgccaccaccatcttcagagcgcatcagcgaggaggtggggctgctgcagctccttggggaccccccgccccagcaggtcacccagacggatgaccccgacgtcgggctggcctacgtctttgggccagatgccaacagtggccaagtggcccggtaccacttccccagcctcttcttccgtgacttctcactgctgttccacatccggccagccacagagggcccaggggtgctgttcgccatcacggactcggcgcaggccatggtcttgctgggcgtgaagctctctggggtgcaggacgggcaccaggacatctccctgctctacacagaacctggtgcaggccagacccacacagccgccagcttccggctccccgccttcgtcggccagtggacacacttagccctcagtgtggcaggtggctttgtggccctctacgtggactgtgaggagttccagagaatgccgcttgctcggtcctcacggggcctggagctggagcctggcgccgggctcttcgtggctcaggcggggggagcggaccctgacaagttccagggggtgatcgctgagctgaaggtgcgcagggacccccaggtgagccccatgcactgcctggacgaggaaggcgatgactcagatggggcattcggagactctggcagcgggctcggggacgcccgggagcttctcagggaggagacgggcgcggccctaaaacccaggctccccgcgccaccccccgtcaccacgccacccttggctggaggcagcagcacggaagattccagaagtgaagaagtcgaggagcagaccacggtggcttcgttaggagctcagacacttcctggctcagattctgtctccacgtgggacgggagtgtccggacccctgggggccgcgtgaaagagggcggcctgaaggggcagaaaggggagccaggtgttccgggcccacctggccgggcaggccccccaggatccccatgcctacctggtcccccgggtctcccgtgcccagtgagtcccctgggtcctgcaggcccagcgttgcaaactgtccccggaccacaaggacccccagggcctccggggagggacggcacccctggaagggacggcgagccgggcgaccccggtgaagacggaaagccgggcgacaccgggccacaaggcttccccgggactccaggggacgtaggtcccaagggcgacaagggagaccctggggttggagagagagggcccccaggaccccaagggcctccagggcccccaggaccctccttcagacacgacaagctgaccttcattgacatggagggatctggcttcgggggcgatctggaggccctgcggggtcctcgaggcttccctggacctcccggaccccccggtgtcccaggcctgcccggcgagccaggccgctttggggtgaacagctccgacgtcccaggacccgccggccttcctggtgtgcctgggcgcgagggtccccccgggtttcctggcctcccgggacccccaggccctccgggaagagaggggcccccaggaaggactgggcagaaaggcagcctgggtgaagcaggcgccccaggacataaggggagcaagggagcccccggtcctgctggtgctcgtggggagagcggcctggcaggagcccccggacctgctggaccaccaggcccccctgggccccctgggcccccaggaccaggactccccgctggatttgatgacatggaaggctccggggggcccttctggtcaacagcccgaagcgctgatgggccacagggacctcccggcctgccgggacttaagggggatcctggcgtgcctgggctgccgggggcgaagggagaagttggagcagatggagtccccgggttccccggcctccctggcagagagggcattgctgggccccaggggccaaagggagacagaggcagccggggagaaaagggagatccagggaaggacggagtcgggcagccgggcctccctggcccccccggacccccgggacctgtggtctacgtgtcggagcaggacggatccgtcctgagcgtgccgggacctgagggccggccgggtttcgcaggctttcccggacctgcaggacccaagggcaacctgggctctaagggcgaacgaggctccccgggacccaagggtgagaagggtgaaccgggcagcatcttcagccccgacggcggtgccctgggccctgcccagaaaggagccaagggagagccgggcttccgaggacccccgggtccatacggacggccggggtacaagggagagattggctttcctggacggccgggtcgccccgggatgaacggattgaaaggagagaaaggggagccgggagatgccagccttggatttggcatgaggggaatgcccggccccccaggacctccagggcccccaggccctccagggactcctgtttacgacagcaatgtgtttgctgagtccagccgccccgggcctccaggattgccagggaatcagggccctccaggacccaagggcgccaaaggagaagtgggcccccccggaccaccagtttgtattatcctgaaaagaaattccactaaagatgaatagcagagaactgtgttcagaatacaagttccacaaaggtagagatcttgtccctctggctacctgttgactctcctgtgcctaatacagtgcctgattcatactactcaataaatacttatggaatga

SEQ ID NO: 352142 - DNA, 420 bp, Homo sapiens
  misc_feature (4)..(4): n is a, c, g, or t
  misc_feature (8)..(9): n is a, c, g, or t
gcgngtcnncgcggcggaggaggcagcatcccgcggcgctgacggtcctggggagagcatggcgccgaggtgcccctggccatggccgcggcggcggcgcctcctggacgtgctcgcgcccctggtcctgctgctcggggtccgcgcggcctccgcggagccagccttcagggtcgaggtgtgggagacccgcggagaggcagcccagagccacccgccacgggctgaggcctagggtggccagaagcaggagggacgcctctgacgattgaacagcccggagcctcaaagctacggttggggccttcagcccggaaatgagcccccctctttgccccctgatgaaccagtttcccctgttcacgtgtggatgtttgtacctttttaaaaaaagaaaataaaagaccacactatttagga

SEQ ID NO: 352143 - DNA, 2215 bp, Homo sapiens
gagcgtgcttggcgcctgcgctggacgactcggccggtagtggagatgtccggccggtctaagcgggagtctcgcggttccactcgcgggaagcgagagtctgagtcgcggggcagctccggtcgcgtcaagcgggagcgagatcgggagcgggagcctgaggcggcgagctcccggggcagccctgtgcgcgtgaagcgggagttcgagccggcgagcgcgcgcgaggccccggcttctgttgtcccgtttgtgcgggtgaagcgggagcgcgaggtcgatgaggactcggagcctgagcgggaggtgcgagcaaagaatggccgagtggattctgaggaccggaggagccgccactgcccgtacctggacaccattaacaggagtgtgctggactttgactttgagaaactgtgttctatctccctctcacacatcaatgcttatgcctgtctggtgtgtggcaagtactttcaaggccggggtttgaagtctcacgcctacattcacagtgtccagtttagccaccatgttttcctcaacctccacaccctcaagttttactgccttccagacaactatgagatcatcgattcctcattggaggatatcacgtatgtgttgaagcccactttcacaaagcagcaaattgcaaacttggacaagcaagccaaattgtcccgggcatatgatggtaccacttacctgccgggtattgtgggactgaataacataaaggccaatgattatgccaacgctgtccttcaggctctatctaatgttcctcctctccggaactactttctggaagaagacaattataagaacatcaaacgtcctccaggggatatcatgttcttgttggtccagcgttttggagagctgatgagaaagctctggaaccctcgaaatttcaaggcacatgtgtctccccatgagatgcttcaggcagttgtactttgcagtaagaagacttttcagatcaccaaacaaggagatggcgttgactttctgtcttggtttctgaatgctctgcactcagctctggggggcacaaagaagaaaaagaagactattgtgactgatgttttccaggggtccatgaggatcttcactaaaaagcttccccatcctgatctgccagcagaagaaaaagagcagttgctccataatgacgagtaccaggagacaatggtggagtccacttttatgtacctgacgctggaccttcctactgcccccctctacaaggacgagaaggagcagctcatcattccccaagtgccactcttcaacatcctggctaagttcaatggcatcactgagaaggaatataagacttacaaggagaactttctgaagcgcttccagcttaccaagttgcctccatatctaatcttttgtatcaagagattcactaagaacaacttctttgttgagaagaatccaactattgtcaatttccctattacaaatgtggatctgagagaatacttgtctgaagaagtacaagcagtacacaagaataccacctatgacctcattgccaacatcgtgcatgacggcaagccctccgagggctcctaccggatccacgtgcttcatcatgggacaggcaaatggtatgaattacaagacctccaggtgactgacatccttccccagatgatcacactgtcagaggcttacattcagatttggaagaggcgagataatgatgaaaccaaccagcagggggcttgaaggaggcgtctagggctttgctcccaagggctgtggctgatgatggtaaataagaacacagaagctgtagctgaacacaggctggctggtgggcttcctaggccagcccagcttgtatgggttctggctacaccagagcaccaagagcccacttgcctgggatggccccacactgtcactcagctgttctttgatcatttttttctagattgatgctcctttctcccatgcattgagctcccatctagcttcagcagggcagaacccttctccagatgtgtgtaacttatgtcttgagtatctgggagtagttgaagaacagataattccttccaaacatcaagccttgggattcttggagcaagcagaaagccagtaacttcgctctgttagaggtggaggattttcctatggttccccccatttcctgatttgtatttttagatggattaaatagtctcctgtttttaaa

SEQ ID NO: 352144 - DNA, 2079 bp, Homo sapiens
gagcgtgcttggcgcctgcgctggacgactcggccggtagtggagatgtccggccggtctaagcgggagtctcgcggttccactcgcgggaagcgagagtctgagtcgcggggcagctccggtcgcgtcaagcgggagcgagatcgggagcgggagcctgaggcggcgagctcccggggcagccctgtgcgcgtgaagcgggagttcgagccggcgagcgcgcgcgaggccccggcttctgttgtcccgtttgtgcgggtgaagcgggagcgcgaggtcgatgaggactcggagcctgagcgggaggtgcgagcaaagaatggccgagtggattctgaggaccggaggagccgccactgcccgtacctggacaccattaacaggagtgtgctggactttgactttgagaaactgtgttctatctccctctcacacatcaatgcttatgcctgtctggtgtgtggcaagtactttcaaggccggggtttgaagtctcacgcctacattcacagtgtccagtttagccaccatgttttcctcaacctccacaccctcaagttttactgccttccagacaactatgagatcatcgattcctcattggaggatatcacgtatgtgttgaagcccactttcacaaagcagcaaattgcaaacttggacaagcaagccaaattgtcccgggcatatgatggtaccacttacctgccgggtattgtgggactgaataacataaaggccaatgattatgccaacgctgtccttcaggctctatctaatgttcctcctctccggaactactttctggaagaagacaattataagaacatcaaacgtcctccaggggatatcatgttcttgttggtccagcgttttggagagctgatgagaaagctctggaaccctcgaaatttcaaggcacatgtgtctccccatgagatgcttcaggcagttgtactttgcagtaagaagacttttcagatcaccaaacaaggagatggcgttgactttctgtcttggtttctgaatgctctgcactcagctctggggggcacaaagaagaaaaagaagactattgtgactgatgttttccaggggtccatgaggatcttcactaaaaagcttccccatcctgatctgccagcagaagaaaaagagcagttgctccataatgacgagtaccaggagacaatggtggagtccacttttatgtacctgacgctggaccttcctactgcccccctctacaaggacgagaaggagcagctcatcattccccaagtgccactcttcaacatcctggctaagttcaatggcatcactgagaaggaatataagacttacaaggagaactttctgaagcgcttccagcttaccaagttgcctccatatctaatcttttgtatcaagagattcactaagaacaacttctttgttgagaagaatccaactattgtcaatttccctattacgggacaggcaaatggtatgaattacaagacctccaggtgactgacatccttccccagatgatcacactgtcagaggcttacattcagatttggaagaggcgagataatgatgaaaccaaccagcagggggcttgaaggaggcgtctagggctttgctcccaagggctgtggctgatgatggtaaataagaacacagaagctgtagctgaacacaggctggctggtgggcttcctaggccagcccagcttgtatgggttctggctacaccagagcaccaagagcccacttgcctgggatggccccacactgtcactcagctgttctttgatcatttttttctagattgatgctcctttctcccatgcattgagctcccatctagcttcagcagggcagaacccttctccagatgtgtgtaacttatgtcttgagtatctgggagtagttgaagaacagataattccttccaaacatcaagccttgggattcttggagcaagcagaaagccagtaacttcgctctgttagaggtggaggattttcctatggttccccccatttcctgatttgtatttttagatggattaaatagtctcctgtttttaaa

SEQ ID NO: 352145 - DNA, 2054 bp, Homo sapiens
gagcgtgcttggcgcctgcgctggacgactcggccggtagtggagatgtccggccggtctaagcgggagtctcgcggttccactcgcgggaagcgagagtctgagtcgcggggcagctccggtcgcgtcaagcgggagcgagatcgggagcgggagcctgaggcggcgagctcccggggcagccctgtgcgcgtgaagcgggagttcgagccggcgagcgcgcgcgaggccccggcttctgttgtcccgtttgtgcgggtgaagcgggagcgcgaggtcgatgaggactcggagcctgagcgggaggtgcgagcaaagaatggccgagtggattctgaggaccggaggagccgccactgcccgtacctggacaccattaacaggagtgtgctggactttgactttgagaaactgtgttctatctccctctcacacatcaatgcttatgcctgtctggtgtgtggcaagtactttcaaggccggggtttgaagtctcacgcctacattcacagtgtccagtttagccaccatgttttcctcaacctccacaccctcaagttttactgccttccagacaactatgagatcatcgattcctcattggaggatatcacgtatgtgttgaagcccactttcacaaagcagcaaattgcaaacttggacaagcaagccaaattgtcccgggcatatgatggtaccacttacctgccgggtattgtgggactgaataacataaaggccaatgattatgccaacgctgtccttcaggctctatctaatgttcctcctctccggaactactttctggaagaagacaattataagaacatcaaacgtcctccaggggatatcatgttcttgttggtccagcgttttggagagctgatgagaaagctctggaaccctcgaaatttcaaggcacatgtgtctccccatgagatgcttcaggcagttgtactttgcagtaagaagacttttcagatcaccaaacaaggagatggcgttgactttctgtcttggtttctgaatgctctgcactcagctctggggggcacaaagaagaaaaagaagactattgtgactgatgttttccaggggtccatgaggatcttcactaaaaagcttccccatcctgatctgccagcagaagaaaaagagcagttgctccataatgacgagtaccaggagacaatggtggagtccacttttatgtacctgacgctggaccttcctactgcccccctctacaaggacgagaaggagcagctcatcattccccaagtgccactcttcaacatcctggctaagttcaatggcatcactgagaaggaatataagacttacaaggagaactttctgaagcgcttccagcttaccaagttgcctccatatctaatcttttgtatcaagagattcactaagaacaacttctttgttgagaagaatccaactattgtcaatttccctattacaaatgtggatctgagagaatacttgtctgaagaagtacaagcagtacacaagaataccacctatgacctcattgccaacatcgtgcatgacggcaagccctccgagggctcctaccggatccacgtgcttcatcatgggacaggcaaatggtatgaattacaagacctccaggtgactgacatccttccccagatgatcacactgtcagaggcttacattcagatttggaagaggcgagataatgatgaaaccaaccagcagggggcttgaaggaggcgtctagggctttgctcccaagggctgtggctgatgatgagattgatgctcctttctcccatgcattgagctcccatctagcttcagcagggcagaacccttctccagatgtgtgtaacttatgtcttgagtatctgggagtagttgaagaacagataattccttccaaacatcaagccttgggattcttggagcaagcagaaagccagtaacttcgctctgttagaggtggaggattttcctatggttccccccatttcctgatttgtatttttagatggattaaatagtctcctgtttttaaa

SEQ ID NO: 352146 - DNA, 479 bp, Homo sapiens
ccgcctcagcttctgaaactgctgggattacaggggacaggcaaatggtatgaattacaagacctccaggtgactgacatccttccccagatgatcacactgtcagaggcttacattcagatttggaagaggcgagataatgatgaaaccaaccagcagggggcttgaaggaggcgtctagggctttgctcccaagggctgtggctgatgatgagattgatgctcctttctcccatgcattgagctcccatctagcttcagcagggcagaacccttctccagatgtgtgtaacttatgtcttgagtatctgggagtagttgaagaacagataattccttccaaacatcaagccttgggattcttggagcaagcagaaagccagtaacttcgctctgttagaggtggaggattttcctatggttccccccatttcctgatttgtatttttagatggattaaatagtctcctgtttttaaa

SEQ ID NO: 352147 - DNA, 499 bp, Homo sapiens
ggacctgggcgcggagggctgtggcgtgaagaccgctctaaaaccgagatgactagaggttccgtttaaccgattcctgccggggaagcgtcagcaggtggggatctcggggcagcctgcattccagctctacctgggattgtcgccgtgcacatggctggaggagcgtctctccgccactgcgcacattttgcagcctgcaccggccaacggtgagtcctctaggaagctctctcaacgtggcgccccatgcctgcctctggccagggctgcggtgggtccagagaagcagacacaaagacttggctgtttcttaagaaatccaagcgcctgggatttggcttatggttcctgtggctcagcaaactccggaggagggctgctttcattaaatactttttgctttcctgcatacaagtacccaatgtactagccagaaatcagtgtccaaaacgtgtttcccgactgatcaacacttatttgaaataaaaaaaagaga

SEQ ID NO: 352148 - DNA, 2055 bp, Homo sapiens
agggacatagctcaagcggcacgcgtgtccgcctactgagtacgtttaagccggcgagcgcgcgcgaggccccggcttctgttgtcccgtttgtgcgggtgaagcgggagcgcgaggtcgatgaggactcggagcctgagcgggaggtgcgagcaaagaatggccgagtggattctgaggaccggaggagccgccactgcccgtacctggacaccattaacaggagtgtgctggactttgactttgagaaactgtgttctatctccctctcacacatcaatgcttatgcctgtctggtgtgtggcaagtactttcaaggccggggtttgaagtctcacgcctacattcacagtgtccagtttagccaccatgttttcctcaacctccacaccctcaagttttactgccttccagacaactatgagatcatcgattcctcattggaggatatcacgtatgtgttgaagcccactttcacaaagcagcaaattgcaaacttggacaagcaagccaaattgtcccgggcatatgatggtaccacttacctgccgggtattgtgggactgaataacataaaggccaatgattatgccaacgctgtccttcaggctctatctaatgttcctcctctccggaactactttctggaagaagacaattataagaacatcaaacgtcctccaggggatatcatgttcttgttggtccagcgttttggagagctgatgagaaagctctggaaccctcgaaatttcaaggcacatgtgtctccccatgagatgcttcaggcagttgtactttgcagtaagaagacttttcagatcaccaaacaaggagatggcgttgactttctgtcttggtttctgaatgctctgcactcagctctggggggcacaaagaagaaaaagaagactattgtgactgatgttttccaggggtccatgaggatcttcactaaaaagcttccccatcctgatctgccagcagaagaaaaagagcagttgctccataatgacgagtaccaggagacaatggtggagtccacttttatgtacctgacgctggaccttcctactgcccccctctacaaggacgagaaggagcagctcatcattccccaagtgccactcttcaacatcctggctaagttcaatggcatcactgagaaggaatataagacttacaaggagaactttctgaagcgcttccagcttaccaagttgcctccatatctaatcttttgtatcaagagattcactaagaacaacttctttgttgagaagaatccaactattgtcaatttccctattacaaatgtggatctgagagaatacttgtctgaagaagtacaagcagtacacaagaataccacctatgacctcattgccaacatcgtgcatgacggcaagccctccgagggctcctaccggatccacgtgcttcatcatgggacaggcaaatggtatgaattacaagacctccaggtgactgacatccttccccagatgatcacactgtcagaggcttacattcagatttggaagaggcgagataatgatgaaaccaaccagcagggggcttgaaggaggcgtctagggctttgctcccaagggctgtggctgatgatggtaaataagaacacagaagctgtagctgaacacaggctggctggtgggcttcctaggccagcccagcttgtatgggttctggctacaccagagcaccaagagcccacttgcctgggatggccccacactgtcactcagctgttctttgatcatttttttctagattgatgctcctttctcccatgcattgagctcccatctagcttcagcagggcagaacccttctccagatgtgtgtaacttatgtcttgagtatctgggagtagttgaagaacagataattccttccaaacatcaagccttgggattcttggagcaagcagaaagccagtaacttcgctctgttagaggtggaggattttcctatggttccccccatttcctgatttgtatttttagatggattaaatagtctcctgtttttaaa

SEQ ID NO: 352149 - DNA, 2235 bp, Homo sapiens
gagcgtgcttggcgcctgcgctggacgactcggccggtagtggagatgtccggccggtctaagcgggagtctcgcggttccactcgcgggaagcgagagtctgagtcgcggggcagctccggtcgcgtcaagcgggagcgagatcgggagcgggagcctgaggcggcgagctcccggggcagccctgtgcgcgtgaagcgggagttcgagccggcgagcgcgcgcgaggccccggcttctgttgtcccgtttgtgcgggtgaagcgggagcgcgaggtcgatgaggactcggagcctgagcgggaggtgcgagcaaagaatggccgagtggattctgaggaccggaggagccgccactgcccgtacctggacaccattaacaggagtgtgctggactttgactttgagaaactgtgttctatctccctctcacacatcaatgcttatgcctgtctggtgtgtggcaagtactttcaagcttttcacccttccctacaggccggggtttgaagtctcacgcctacattcacagtgtccagtttagccaccatgttttcctcaacctccacaccctcaagttttactgccttccagacaactatgagatcatcgattcctcattggaggatatcacgtatgtgttgaagcccactttcacaaagcagcaaattgcaaacttggacaagcaagccaaattgtcccgggcatatgatggtaccacttacctgccgggtattgtgggactgaataacataaaggccaatgattatgccaacgctgtccttcaggctctatctaatgttcctcctctccggaactactttctggaagaagacaattataagaacatcaaacgtcctccaggggatatcatgttcttgttggtccagcgttttggagagctgatgagaaagctctggaaccctcgaaatttcaaggcacatgtgtctccccatgagatgcttcaggcagttgtactttgcagtaagaagacttttcagatcaccaaacaaggagatggcgttgactttctgtcttggtttctgaatgctctgcactcagctctggggggcacaaagaagaaaaagaagactattgtgactgatgttttccaggggtccatgaggatcttcactaaaaagcttccccatcctgatctgccagcagaagaaaaagagcagttgctccataatgacgagtaccaggagacaatggtggagtccacttttatgtacctgacgctggaccttcctactgcccccctctacaaggacgagaaggagcagctcatcattccccaagtgccactcttcaacatcctggctaagttcaatggcatcactgagaaggaatataagacttacaaggagaactttctgaagcgcttccagcttaccaagttgcctccatatctaatcttttgtatcaagagattcactaagaacaacttctttgttgagaagaatccaactattgtcaatttccctattacaaatgtggatctgagagaatacttgtctgaagaagtacaagcagtacacaagaataccacctatgacctcattgccaacatcgtgcatgacggcaagccctccgagggctcctaccggatccacgtgcttcatcatgggacaggcaaatggtatgaattacaagacctccaggtgactgacatccttccccagatgatcacactgtcagaggcttacattcagatttggaagaggcgagataatgatgaaaccaaccagcagggggcttgaaggaggcgtctagggctttgctcccaagggctgtggctgatgatggtaaataagaacacagaagctgtagctgaacacaggctggctggtgggcttcctaggccagcccagcttgtatgggttctggctacaccagagcaccaagagcccacttgcctgggatggccccacactgtcactcagctgttctttgatcatttttttctagattgatgctcctttctcccatgcattgagctcccatctagcttcagcagggcagaacccttctccagatgtgtgtaacttatgtcttgagtatctgggagtagttgaagaacagataattccttccaaacatcaagccttgggattcttggagcaagcagaaagccagtaacttcgctctgttagaggtggaggattttcctatggttccccccatttcctgatttgtatttttagatggattaaatagtctcctgtttttaaa

SEQ ID NO: 352150 - DNA, 2133 bp, Homo sapiens
ggacctgggcgcggagggctgtggcgtgaagaccgctctaaaaccgagatgactagaggttccgtttaaccgattcctgccggggaagcgtcagcaggtggggatctcggggcagcctgcattccagctctacctgggattgtcgccgtgcacatggctggaggagcgtctctccgccactgcgcacattttgcagcctgcaccggccaacgcaaagaatggccgagtggattctgaggaccggagagccgccactgcccgtacctggacaccattaacaggagtgtgctggactttgactttgagaaactgtgttctatctccctctcacacatcaatgcttatgcctgtctggtgtgtggcaagtactttcaagcttttcacccttccctacaggccggggtttgaagtctcacgcctacattcacagtgtccagtttagccaccatgttttcctcaacctccacaccctcaagttttactgccttccagacaactatgagatcatcgattcctcattggaggatatcacgtatgtgttgaagcccactttcacaaagcagcaaattgcaaacttggacaagcaagccaaattgtcccgggcatatgatggtaccacttacctgccgggtattgtgggactgaataacataaaggccaatgattatgccaacgctgtccttcaggctctatctaatgttcctcctctccggaactactttctggaagaagacaattataagaacatcaaacgtcctccaggggatatcatgttcttgttggtccagcgttttggagagctgatgagaaagctctggaaccctcgaaatttcaaggcacatgtgtctccccatgagatgcttcaggcagttgtactttgcagtaagaagacttttcagatcaccaaacaaggagatggcgttgactttctgtcttggtttctgaatgctctgcactcagctctggggggcacaaagaagaaaaagaagactattgtgactgatgttttccaggggtccatgaggatcttcactaaaaagcttccccatcctgatctgccagcagaagaaaaagagcagttgctccataatgacgagtaccaggagacaatggtggagtccacttttatgtacctgacgctggaccttcctactgcccccctctacaaggacgagaaggagcagctcatcattccccaagtgccactcttcaacatcctggctaagttcaatggcatcactgagaaggaatataagacttacaaggagaactttctgaagcgcttccagcttaccaagttgcctccatatctaatcttttgtatcaagagattcactaagaacaacttctttgttgagaagaatccaactattgtcaatttccctattacaaatgtggatctgagagaatacttgtctgaagaagtacaagcagtacacaagaataccacctatgacctcattgccaacatcgtgcatgacggcaagccctccgagggctcctaccggatccacgtgcttcatcatgggacaggcaaatggtatgaattacaagacctccaggtgactgacatccttccccagatgatcacactgtcagaggcttacattcagatttggaagaggcgagataatgatgaaaccaaccagcagggggcttgaaggaggcgtctagggctttgctcccaagggctgtggctgatgatggtaaataagaacacagaagctgtagctgaacacaggctggctggtgggcttcctaggccagcccagcttgtatgggttctggctacaccagagcaccaagagcccacttgcctgggatggccccacactgtcactcagctgttctttgatcatttttttctagattgatgctcctttctcccatgcattgagctcccatctagcttcagcagggcagaacccttctccagatgtgtgtaacttatgtcttgagtatctgggagtagttgaagaacagataattccttccaaacatcaagccttgggattcttggagcaagcagaaagccagtaacttcgctctgttagaggtggaggattttcctatggttccccccatttcctgatttgtatttttagatggattaaatagtctcctgtttttaaa

SEQ ID NO: 352151 - DNA, 2113 bp, Homo sapiens
ggacctgggcgcggagggctgtggcgtgaagaccgctctaaaaccgagatgactagaggttccgtttaaccgattcctgccggggaagcgtcagcaggtggggatctcggggcagcctgcattccagctctacctgggattgtcgccgtgcacatggctggaggagcgtctctccgccactgcgcacattttgcagcctgcaccggccaacgcaaagaatggccgagtggattctgaggaccggagagccgccactgcccgtacctggacaccattaacaggagtgtgctggactttgactttgagaaactgtgttctatctccctctcacacatcaatgcttatgcctgtctggtgtgtggcaagtactttcaaggccggggtttgaagtctcacgcctacattcacagtgtccagtttagccaccatgttttcctcaacctccacaccctcaagttttactgccttccagacaactatgagatcatcgattcctcattggaggatatcacgtatgtgttgaagcccactttcacaaagcagcaaattgcaaacttggacaagcaagccaaattgtcccgggcatatgatggtaccacttacctgccgggtattgtgggactgaataacataaaggccaatgattatgccaacgctgtccttcaggctctatctaatgttcctcctctccggaactactttctggaagaagacaattataagaacatcaaacgtcctccaggggatatcatgttcttgttggtccagcgttttggagagctgatgagaaagctctggaaccctcgaaatttcaaggcacatgtgtctccccatgagatgcttcaggcagttgtactttgcagtaagaagacttttcagatcaccaaacaaggagatggcgttgactttctgtcttggtttctgaatgctctgcactcagctctggggggcacaaagaagaaaaagaagactattgtgactgatgttttccaggggtccatgaggatcttcactaaaaagcttccccatcctgatctgccagcagaagaaaaagagcagttgctccataatgacgagtaccaggagacaatggtggagtccacttttatgtacctgacgctggaccttcctactgcccccctctacaaggacgagaaggagcagctcatcattccccaagtgccactcttcaacatcctggctaagttcaatggcatcactgagaaggaatataagacttacaaggagaactttctgaagcgcttccagcttaccaagttgcctccatatctaatcttttgtatcaagagattcactaagaacaacttctttgttgagaagaatccaactattgtcaatttccctattacaaatgtggatctgagagaatacttgtctgaagaagtacaagcagtacacaagaataccacctatgacctcattgccaacatcgtgcatgacggcaagccctccgagggctcctaccggatccacgtgcttcatcatgggacaggcaaatggtatgaattacaagacctccaggtgactgacatccttccccagatgatcacactgtcagaggcttacattcagatttggaagaggcgagataatgatgaaaccaaccagcagggggcttgaaggaggcgtctagggctttgctcccaagggctgtggctgatgatggtaaataagaacacagaagctgtagctgaacacaggctggctggtgggcttcctaggccagcccagcttgtatgggttctggctacaccagagcaccaagagcccacttgcctgggatggccccacactgtcactcagctgttctttgatcatttttttctagattgatgctcctttctcccatgcattgagctcccatctagcttcagcagggcagaacccttctccagatgtgtgtaacttatgtcttgagtatctgggagtagttgaagaacagataattccttccaaacatcaagccttgggattcttggagcaagcagaaagccagtaacttcgctctgttagaggtggaggattttcctatggttccccccatttcctgatttgtatttttagatggattaaatagtctcctgtttttaaa

SEQ ID NO: 352152 - DNA, 2233 bp, Homo sapiens
ggacctgggcgcggagggctgtggcgtgaagaccgctctaaaaccgagatgactagaggttccgtttaaccgattcctgccggggaagcgtcagcaggtggggatctcggggcagcctgcattccagctctacctgggattgtcgccgtgcacatggctggaggagcgtctctccgccactgcgcacattttgcagcctgcaccggccaacgcaaagaatggccgagtggattctgaggaccggagagccgccactgcccgtacctggacaccattaacagagaaagtgactgcaatggaaagtcctgaactggttacaaacactaatgagaaagaggctcgtgggtattatgtgtctggtggagacacctcaacagtgctttggagcatggcgggtggaggagtgtgctggactttgactttgagaaactgtgttctatctccctctcacacatcaatgcttatgcctgtctggtgtgtggcaagtactttcaaggccggggtttgaagtctcacgcctacattcacagtgtccagtttagccaccatgttttcctcaacctccacaccctcaagttttactgccttccagacaactatgagatcatcgattcctcattggaggatatcacgtatgtgttgaagcccactttcacaaagcagcaaattgcaaacttggacaagcaagccaaattgtcccgggcatatgatggtaccacttacctgccgggtattgtgggactgaataacataaaggccaatgattatgccaacgctgtccttcaggctctatctaatgttcctcctctccggaactactttctggaagaagacaattataagaacatcaaacgtcctccaggggatatcatgttcttgttggtccagcgttttggagagctgatgagaaagctctggaaccctcgaaatttcaaggcacatgtgtctccccatgagatgcttcaggcagttgtactttgcagtaagaagacttttcagatcaccaaacaaggagatggcgttgactttctgtcttggtttctgaatgctctgcactcagctctggggggcacaaagaagaaaaagaagactattgtgactgatgttttccaggggtccatgaggatcttcactaaaaagcttccccatcctgatctgccagcagaagaaaaagagcagttgctccataatgacgagtaccaggagacaatggtggagtccacttttatgtacctgacgctggaccttcctactgcccccctctacaaggacgagaaggagcagctcatcattccccaagtgccactcttcaacatcctggctaagttcaatggcatcactgagaaggaatataagacttacaaggagaactttctgaagcgcttccagcttaccaagttgcctccatatctaatcttttgtatcaagagattcactaagaacaacttctttgttgagaagaatccaactattgtcaatttccctattacaaatgtggatctgagagaatacttgtctgaagaagtacaagcagtacacaagaataccacctatgacctcattgccaacatcgtgcatgacggcaagccctccgagggctcctaccggatccacgtgcttcatcatgggacaggcaaatggtatgaattacaagacctccaggtgactgacatccttccccagatgatcacactgtcagaggcttacattcagatttggaagaggcgagataatgatgaaaccaaccagcagggggcttgaaggaggcgtctagggctttgctcccaagggctgtggctgatgatggtaaataagaacacagaagctgtagctgaacacaggctggctggtgggcttcctaggccagcccagcttgtatgggttctggctacaccagagcaccaagagcccacttgcctgggatggccccacactgtcactcagctgttctttgatcatttttttctagattgatgctcctttctcccatgcattgagctcccatctagcttcagcagggcagaacccttctccagatgtgtgtaacttatgtcttgagtatctgggagtagttgaagaacagataattccttccaaacatcaagccttgggattcttggagcaagcagaaagccagtaacttcgctctgttagaggtggaggattttcctatggttccccccatttcctgatttgtatttttagatggattaaatagtctcctgtttttaaa

SEQ ID NO: 352153 - DNA, 2263 bp, Homo sapiens
  misc_feature (1840)..(1840): n is a, c, g, or t
  misc_feature (1849)..(1849): n is a, c, g, or t
  misc_feature (1851)..(1851): n is a, c, g, or t
gagcgtgcttggcgcctgcgctggacgactcggccggtagtggagatgtccggccggtctaagcgggagtctcgcggttccactcgcgggaagcgagagtctgagtcgcggggcagctccggtcgcgtcaagcgggagcgagatcgggagcgggagcctgaggcggcgagctcccggggcagccctgtgcgcgtgaagcgggagttcgagccggcgagcgcgcgcgaggccccggcttctgttgtcccgtttgtgcgggtgaagcgggagcgcgaggtcgatgaggactcggagcctgagcgggaggtgcgagcaaagaatggccgagtggattctgaggaccggaggagccgccactgcccgtacctggacaccattaacaggagtgtgctggactttgactttgagaaactgtgttctatctccctctcacacatcaatgcttatgcctgtctggtgtgtggcaagtactttcaaggccggggtttgaagtctcacgcctacattcacagtgtccagtttagccaccatgttttcctcaacctccacaccctcaagttttactgccttccagacaactatgagatcatcgattcctcattggaggatatcacgtatgtgttgaagcccactttcacaaagcagcaaattgcaaacttggacaagcaagccaaattgtcccgggcatatgatggtaccacttacctgccgggtattgtgggactgaataacataaaggccaatgattatgccaacgctgtccttcaggctctatctaatgttcctcctctccggaactactttctggaagaagacaattataagaacatcaaacgtcctccaggggatatcatgttcttgttggtccagcgttttggagagctgatgagaaagctctggaaccctcgaaatttcaaggcacatgtgtctccccatgagatgcttcaggcagttgtactttgcagtaagaagacttttcagatcaccaaacaaggagatggcgttgactttctgtcttggtttctgaatgctctgcactcagctctggggggcacaaagaagaaaaagaagactattgtgactgatgttttccaggggtccatgaggatcttcactaaaaagcttccccatcctgatctgccagcagaagaaaaagagcagttgctccataatgacgagtaccaggagacaatggtggagtccacttttatgtacctgacgctggaccttcctactgcccccctctacaaggacgagaaggagcagctcatcattccccaagtgccactcttcaacatcctggctaagttcaatggcatcactgagaaggaatataagacttacaaggagaactttctgaagcgcttccagcttaccaagttgcctccatatctaatcttttgtatcaagagattcactaagaacaacttctttgttgagaagaatccaactattgtcaatttccctattacaaatgtggatctgagagaatacttgtctgaagaagtacaagcagtacacaagaataccacctatgacctcattgccaacatcgtgcatgacggcaagccctccgagggctcctaccggatccacgtgcttcatcatgggacaggcaaatggtatgaattacaagacctccaggtgactgacatccttccccagatgatcacactgtcagaggcttacattcagatttggaagaggcgagataatgatgaaaccaaccagcagggggcttgaaggaggcgtctagggctttgctcccaagggctgtggctgatgatgcgctaaagtcatatgcaacacgccaaacccccaaaggggggaaaaaaaatgnctcgctaangncttggaaaacccatccacaggctggctggtgggcttcctaggccagcccagcttgtatgggttctggctacaccagagcaccaagagcccacttgcctgggatggccccacactgtcactcagctgttctttgatcatttttttctagattgatgctcctttctcccatgcattgagctcccatctagcttcagcagggcagaacccttctccagatgtgtgtaacttatgtcttgagtatctgggagtagttgaagaacagataattccttccaaacatcaagccttgggattcttggagcaagcagaaagccagtaacttcgctctgttagaggtggaggattttcctatggttccccccatttcctgatttgtatttttagatggattaaatagtctcctgtttttaaa

SEQ ID NO: 352154 - DNA, 2120 bp, Homo sapiens
gagcgtgcttggcgcctgcgctggacgactcggccggtagtggagatgtccggccggtctaagcgggagtctcgcggttccactcgcgggaagcgagagtctgagtcgcggggcagctccggtcgcgtcaagcgggagcgagatcgggagcgggagcctgaggcggcgagctcccggggcagccctgtgcgcgtgaagcgggagttcgagccggcgagcgcgcgcgaggccccggcttctgttgtcccgtttgtgcgggtgaagcgggagcgcgaggtcgatgaggactcggagcctgagcgggaggtgcgagcaaagaatggccgagtggattctgaggaccggaggagccgccactgcccgtacctggacaccattaacaggccggggtttgaagtctcacgcctacattcacagtgtccagtttagccaccatgttttcctcaacctccacaccctcaagttttactgccttccagacaactatgagatcatcgattcctcattggaggatatcacgtatgtgttgaagcccactttcacaaagcagcaaattgcaaacttggacaagcaagccaaattgtcccgggcatatgatggtaccacttacctgccgggtattgtgggactgaataacataaaggccaatgattatgccaacgctgtccttcaggctctatctaatgttcctcctctccggaactactttctggaagaagacaattataagaacatcaaacgtcctccaggggatatcatgttcttgttggtccagcgttttggagagctgatgagaaagctctggaaccctcgaaatttcaaggcacatgtgtctccccatgagatgcttcaggcagttgtactttgcagtaagaagacttttcagatcaccaaacaaggagatggcgttgactttctgtcttggtttctgaatgctctgcactcagctctggggggcacaaagaagaaaaagaagactattgtgactgatgttttccaggggtccatgaggatcttcactaaaaagcttccccatcctgatctgccagcagaagaaaaagagcagttgctccataatgacgagtaccaggagacaatggtggagtccacttttatgtacctgacgctggaccttcctactgcccccctctacaaggacgagaaggagcagctcatcattccccaagtgccactcttcaacatcctggctaagttcaatggcatcactgagaaggaatataagacttacaaggagaactttctgaagcgcttccagcttaccaagttgcctccatatctaatcttttgtatcaagagattcactaagaacaacttctttgttgagaagaatccaactattgtcaatttccctattacaaatgtggatctgagagaatacttgtctgaagaagtacaagcagtacacaagaataccacctatgacctcattgccaacatcgtgcatgacggcaagccctccgagggctcctaccggatccacgtgcttcatcatgggacaggcaaatggtatgaattacaagacctccaggtgactgacatccttccccagatgatcacactgtcagaggcttacattcagatttggaagaggcgagataatgatgaaaccaaccagcagggggcttgaaggaggcgtctagggctttgctcccaagggctgtggctgatgatggtaaataagaacacagaagctgtagctgaacacaggctggctggtgggcttcctaggccagcccagcttgtatgggttctggctacaccagagcaccaagagcccacttgcctgggatggccccacactgtcactcagctgttctttgatcatttttttctagattgatgctcctttctcccatgcattgagctcccatctagcttcagcagggcagaacccttctccagatgtgtgtaacttatgtcttgagtatctgggagtagttgaagaacagataattccttccaaacatcaagccttgggattcttggagcaagcagaaagccagtaacttcgctctgttagaggtggaggattttcctatggttccccccatttcctgatttgtatttttagatggattaaatagtctcctgtttttaaa

SEQ ID NO: 352155 - DNA, 1967 bp, Homo sapiens
gagcgtgcttggcgcctgcgctggacgactcggccggtagtggagatgtccggccggtctaagcgggagtctcgcggttccactcgcgggaagcgagagtctgagtcgcggggcagctccggtcgcgtcaagcgggagcgagatcgggagcgggagcctgaggcggcgagctcccggggcagccctgtgcgcgtgaagcgggagttcgagccggcgagcgcgcgcgaggccccggcttctgttgtcccgtttgtgcgggtgaagcgggagcgcgaggtcgatgaggactcggagcctgagcgggaggtgcgagcaaagaatggccgagtggattctgaggaccggaggagccgccactgcccgtacctggacaccattaacaggagtgtgctggactttgactttgagaaactgtgttctatctccctctcacacatcaatgcttatgcctgtctggtgtgtggcaagtactttcaaggccggggtttgaagtctcacgcctacattcacagtgtccagtttagccaccatgttttcctcaacctccacaccctcaagttttactgccttccagacaactatgagatcatcgattcctcattggaggatatcacgtatgtgttgaagcccactttcacaaagcagcaaattgcaaacttggacaagcaagccaaattgtcccgggcatatgatggtaccacttacctgccgggtattgtgggactgaataacataaaggccaatgattatgccaacgctgtccttcaggctctatctaatgttcctcctctccggaactactttctggaagaagacaattataagaacatcaaacgtcctccaggggatatcatgttcttgttggtccagcgttttggagagctgatgagaaagctctggaaccctcgaaatttcaaggcacatgtgtctccccatgagatgcttcaggcagttgtactttgcagtaagaagacttttcagatcaccaaacaaggagatggcgttgactttctgtcttggtttctgaatgctctgcactcagctctggggggcacaaagaagaaaaagaagactattgtgactgatgttttccaggggtccatgaggatcttcactaaaaagcttccccatcctgatctgccagcagaagaaaaagagcagttgctccataatgacgagtaccaggagacaatggtggagtccacttttatgtacctgacgctggaccttcctactgcccccctctacaaggacgagaaggagcagctcatcattccccaagtgccactcttcaacatcctggctaagttcaatggcatcactgagaaggaatataagacttacaaggagaactttctgaagcgcttccagcttaccaagttgcctccatatctaatcttttgtatcaagagattcactaagaacaacttctttgttgagaagaatccaactattgtcaatttccctattacaaatgtggatctgagagaatacttgtctgaagaagtacaagcagtacacaagaataccacctatgacctcattgccaacatcgtgcatgacggcaagccctccgagggctcctaccggatccacgtgcttcatcatatttggaagaggcgagataatgatgaaaccaaccagcagggggcttgaaggaggcgtctagggctttgctcccaagggctgtggctgatgatgagattgatgctcctttctcccatgcattgagctcccatctagcttcagcagggcagaacccttctccagatgtgtgtaacttatgtcttgagtatctgggagtagttgaagaacagataattccttccaaacatcaagccttgggattcttggagcaagcagaaagccagtaacttcgctctgttagaggtggaggattttcctatggttccccccatttcctgatttgtatttttagatggattaaatagtctcctgtttttaaa

SEQ ID NO: 352156 - DNA, 1963 bp, Homo sapiens
gagcgtgcttggcgcctgcgctggacgactcggccggtagtggagatgtccggccggtctaagcgggagtctcgcggttccactcgcgggaagcgagagtctgagtcgcggggcagctccggtcgcgtcaagcgggagcgagatcgggagcgggagcctgaggcggcgagctcccggggcagccctgtgcgcgtgaagcgggagttcgagccggcgagcgcgcgcgaggccccggcttctgttgtcccgtttgtgcgggtgaagcgggagcgcgaggtcgatgaggactcggagcctgagcgggaggtgcgagcaaagaatggccgagtggattctgaggaccggaggagccgccactgcccgtacctggacaccattaacaggagtgtgctggactttgactttgagaaactgtgttctatctccctctcacacatcaatgcttatgcctgtctggtgtgtggcaagtactttcaaggccggggtttgaagtctcacgcctacattcacagtgtccagtttagccaccatgttttcctcaacctccacaccctcaagttttactgccttccagacaactatgagatcatcgattcctcattggaggatatcacgtatgtgttgaagcccactttcacaaagcagcaaattgcaaacttggacaagcaagccaaattgtcccgggcatatgatggtaccacttacctgccgggtattgtgggactgaataacataaaggccaatgattatgccaacgctgtccttcaggctctatctaatgttcctcctctccggaactactttctggaagaagacaattataagaacatcaaacgtcctccaggggatatcatgttcttgttggtccagcgttttggagagctgatgagaaagctctggaaccctcgaaatttcaaggcacatgtgtctccccatgagatgcttcaggcagttgtactttgcagtaagaagacttttcagatcaccaaacaaggagatggcgttgactttctgtcttggtttctgaatgctctgcactcagctctggggggcacaaagaagaaaaagaagactattgtgactgatgttttccaggggtccatgaggatcttcactaaaaagcttccccatcctgatctgccagcagaagaaaaagagcagttgctccataatgacgagtaccaggagacaatggtggagtccacttttatgtacctgacgctggaccttcctactgcccccctctacaaggacgagaaggagcagctcatcattccccaagtgccactcttcaacatcctggctaagttcaatggcatcactgagaaggaatataagacttacaaggagaactttctgaagcgcttccagcttaccaagttgcctccatatctaatcttttgtatcaagagattcactaagaacaacttctttgttgagaagaatccaactattgtcaatttccctattacaaatgtggatctgagagaatacttgtctgaagaagtacaagcagtacacaagaataccacctatgacctcattgccaacatcgtgcatgacggcaagccctccgagggctcctaccggatccacgtgcttcatcatgggacaggcaaatggtatgaattacaagacctccaggtgactgacatccttccccagatgatcacactgtcagaggcttacattcagatttggaagaggcgagataatgatgaaaccaaccagcagggggcttgaaggaggcgtctagggctttgctcccaagggctgtggctgatgatggtaaataagaacacagaagctgtagctgaacacaggctggctggtgggcttcctaggccagcccagcttgtatgggttctggctacaccagagcaccaagagcccacttgcctgggatggacaccacgatgctatagggtgtttcgtgggggaacatctagaatcgctatacgaa

SEQ ID NO: 352157 - DNA, 1772 bp, Homo sapiens
  misc_feature (1772)..(1772): n is a, c, g, or t
gagcgtgcttggcgcctgcgctggacgactcggccggtagtggagatgtccggccggtctaagcgggagtctcgcggttccactcgcgggaagcgagagtctgagtcgcggggcagctccggtcgcgtcaagcgggagcgagatcgggagcgggagcctgaggcggcgagctcccggggcagccctgtgcgcgtgaagcgggagttcgagccggcgagcgcgcgcgaggccccggcttctgttgtcccgtttgtgcgggtgaagcgggagcgcgaggtcgatgaggactcggagcctgagcgggaggtgcgagcaaagaatggccgagtggattctgaggaccggaggagccgccactgcccgtacctggacaccattaacaggagtgtgctggactttgactttgagaaactgtgttctatctccctctcacacatcaatgcttatgcctgtctggtgtgtggcaagtactttcaaggccggggtttgaagtctcacgcctacattcacagtgtccagtttagccaccatgttttcctcaacctccacaccctcaagttttactgccttccagacaactatgagatcatcgattcctcattggaggatatcacgtatgtgttgaagcccactttcacaaagcagcaaattgcaaacttggacaagcaagccaaattgtcccgggcatatgatggtaccacttacctgccgggtattgtgggactgaataacataaaggccaatgattatgccaacgctgtccttcaggctctatctaatgttcctcctctccggaactactttctggaagaagacaattataagaacatcaaacgtcctccaggggatatcatgttcttgttggtccagcgttttggagagctgatgagaaagctctggaaccctcgaaatttcaaggcacatgtgtctccccatgagatgcttcaggcagttgtactttgcagtaagaagacttttcagatcaccaaacaaggagatggcgttgactttctgtcttggtttctgaatgctctgcactcagctctggggggcacaaagaagaaaaagaagactattgtgactgatgttttccaggggtccatgaggatcttcactaaaaagcttccccatcctgatctgccagcagaagaaaaagagcagttgctccataatgacgagtaccaggagacaatggtggagtccacttttatgtacctgacgctggaccttcctactgcccccctctacaaggacgagaaggagcagctcatcattccccaagtgccactcttcaacatcctggctaagttcaatggcatcactgagaaggaatataagacttacaaggagaactttctgaagcgcttccagcttaccaagttgcctccatatctaatcttttgtatcaagagattcactaagaacaacttctttgttgagaagaatccaactattgtcaatttccctattacaaatgtggatctgagagaatacttgtctgaagaagtacaagcagtacacaagaataccacctatgacctcattgccaacatcgtgcatgacggcaagccctccgagggctcctaccggatccacgtgcttcatcatgggacaggcaaatggtatgaattacaagacctccaggtgactgacatccttccccagatgatcacactgtcagaggcttacattcagaatttaaaacacccaaaataataataaaaccaaccaccacgccgcttaaaccaaccctctagccctttcctcccaan

SEQ ID NO: 352158 - DNA, 1412 bp, Homo sapiens
gagcgtgcttggcgcctgcgctggacgactcggccggtagtggagatgtccggccggtctaagcgggagtctcgcggttccactcgcgggaagcgagagtctgagtcgcggggcagctccggtcgcgtcaagcgggagcgagatcgggagcgggagcctgaggcggcgagctcccggggcagccctgtgcgcgtgaagcgggagttcgagccggcgagcgcgcgcgaggccccggcttctgttgtcccgtttgtgcgggtgaagcgggagcgcgaggtcgatgaggactcggagcctgagcgggaggtgcgagcaaagaatggccgagtggattctgaggaccggaggagccgccactgcccgtacctggacaccattaacaggagtgtgctggactttgactttgagaaactgtgttctatctccctctcacacatcaatgcttatgcctgtctggtgtgtggcaagtactttcaaggccggggtttgaagtctcacgcctacattcacagtgtccagtttagccaccatgttttcctcaacctccacaccctcaagttttactgccttccagacaactatgagatcatcgattcctcattggaggatatcacgtatgtgttgaagcccactttcacaaagcagcaaattgcaaacttggacaagcaagccaaattgtcccgggcatatgatggtaccacttacctgccgggtattgtgggactgaataacataaaggccaatgattatgccaacgctgtccttcaggctctatctaatgttcctcctctccggaactactttctggaagaagacaattataagaacatcaaacgtcctccaggggatatcatgttcttgttggtccagcgttttggagagctgatgagaaagctctggaaccctcgaaatttcaaggcacatgtgtctccccatgagatgcttcaggcagttgtactttgcagtaagaagacttttcagatcaccaaacaaggagatggcgttgactttctgtcttggtttctgaatgctctgcactcagctctggggggcacaaagaagaaaaagaagactattgtgactgatgttttccaggggtccatgaggatcttcactaaaaagcttccccatcctgatctggcagcagagaaaagagccagcgctcataatgacgagtaccgggacatgggggggtcacttttatgtaccgggagcgacttctatggcccttaaagagagaagagggcatattccagtgccttcaactgggaagcaggcccggaggggaagacaaggggacttgaggggcacgaacaagccccaaactgggagggagccaaaactggggacccacgggccaagggggacagaggaaacccacaaacaccggggcgcccccaaaaggccgcgag

SEQ ID NO: 352159 - DNA, 737 bp, Homo sapiens
acactgtgtacctcataagtgagaatgtctagtctgtcatttctgagcaggaaggagacatcataggtgatgattagatggcttcctcttttctcatctttagtgtccactaaattccttttaaaaagatgtacagaagtgtttcagactccattgtacttcaaggggccaggcgcagtggctcatacccataatcctagcactttaggaggctgaggcgggaggatcttttgagaccaggagttagcctgggcaacacagtgggaccccattgctattaaaaaaaaaattagccagttttagtggcacacacctgtagttccagctacctgggaggctgaggggaggatcgcttgaatccagagggtcaaggctgcagtgagctgtgattacaccactgtagtccagcctgggtgacagagtgagaccctgtctcaaaaaaaaaaaaaaacaaaaaaacaacaaacaaaaaacagtgctttaaaaaaattcccaacaggaattgagtttgccatgattgacacaccaaaagtcctattaattgaatcatggccagaagaagtcatgtaccctcttctttatgactgttgctggatgatgtctagtggctgttcttctaatttttctagtcttggctatgatcctttccttctacacccttttggttttagagagcagactaacccagctcttcatactttctgcaggggacaggcaaatggtatgaattacaagac

SEQ ID NO: 352160 - DNA, 2160 bp, Homo sapiens
gagcgtgcttggcgcctgcgctggacgactcggccggtagtggagatgtccggccggtctaagcgggagtctcgcggttccactcgcgggaagcgagagtctgagtcgcggggcagctccggtcgcgtcaagcgggagcgagatcgggagcgggagcctgaggcggcgagctcccggggcagccctgtgcgcgtgaagcgggagttcgagccggcgagcgcgcgcgaggccccggcttctgttgtcccgtttgtgcgggtgaagcgggagcgcgaggtcgatgaggactcggagcctgagcgggaggtgcgagcaaagaatggccgagtggattctgaggaccggaggagccgccactgcccgtacctggacaccattaacaggagtgtgctggactttgactttgagaaactgtgttctatctccctctcacacatcaatgcttatgcctgtctggtgtgtggcaagtactttcaaggccggggtttgaagtctcacgcctacattcacagtgtccagtttagccaccatgttttcctcaacctccacaccctcaagttttactgccttccagacaactatgagatcatcgattcctcattggaggatatcacgtatgtgttgaagcccactttcacaaagcagcaaattgcaaacttggacaagcaagccaaattgtcccgggcatatgatggtaccacttacctgccgggtattgtgggactgaataacataaaggccaatgattatgccaacgctgtccttcaggctctatctaatgttcctcctctccggaactactttctggaagaagacaattataagaacatcaaacgtcctccaggggatatcatgttcttgttggtccagcgttttggagagctgatgagaaagctctggaaccctcgaaatttcaaggcacatgtgtctccccatgagatgcttcaggcagttgtactttgcagtaagaagacttttcagatcaccaaacaaggagatggcgttgactttctgtcttggtttctgaatgctctgcactcagctctggggggcacaaagaagaaaaagaagactattgtgactgatgttttccaggggtccatgaggatcttcactaaaaagcttccccatcctgatctgccagcagaagaaaaagagcagttgctccataatgacgagtaccaggagacaatggtggagtccacttttatgtacctgacgctggaccttcctactgcccccctctacaaggacgagaaggagcagctcatcattccccaagtgccactcttcaacatcctggctaagttcaatggcatcactgagaaggaatataagacttacaaggagaactttctgaagcgcttccagcttaccaagttgcctccatatctaatcttttgtatcaagagattcactaagaacaacttctttgttgagaagaatccaactattgtcaatttccctattacaaatgtggatctgagagaatacttgtctgaagaagtacaagcagtacacaagaataccacctatgacctcattgccaacatcgtgcatgacggcaagccctccgagggctcctaccggatccacgtgcttcatcatgggacaggcaaatggtatgaattacaagacctccaggtgactgacatccttccccagatgatcacactgtcagaggcttacattcagatttggaagaggcgagataatgatgaaaccaaccagcagggggcttgaaggaggcgtctagggctttgctcccaagggctgtggctgatgatggtaaataagaacacagaagctgtagctgaacaccagagcaccaagagcccacttgcctgggatggccccacactgtcactcagctgttctttgatcatttttttctagattgatgctcctttctcccatgcattgagctcccatctagcttcagcagggcagaacccttctccagatgtgtgtaacttatgtcttgagtatctgggagtagttgaagaacagataattccttccaaacatcaagccttgggattcttggagcaagcagaaagccagtaacttcgctctgttagaggtggaggattttcctatggttccccccatttcctgatttgtatttttagatggattaaatagtctcctgtttttaaa

SEQ ID NO: 352161 - DNA, 2049 bp, Homo sapiens
  misc_feature (1953)..(1953): n is a, c, g, or t
gagcgtgcttggcgcctgcgctggacgactcggccggtagtggagatgtccggccggtctaagcgggagtctcgcggttccactcgcgggaagcgagagtctgagtcgcggggcagctccggtcgcgtcaagcgggagcgagatcgggagcgggagcctgaggcggcgagctcccggggcagccctgtgcgcgtgaagcgggagttcgagccggcgagcgcgcgcgaggccccggcttctgttgtcccgtttgtgcgggtgaagcgggagcgcgaggtcgatgaggactcggagcctgagcgggaggtgcgagcaaagaatggccgagtggattctgaggaccggaggagccgccactgcccgtacctggacaccattaacaggagtgtgctggactttgactttgagaaactgtgttctatctccctctcacacatcaatgcttatgcctgtctggtgtgtggcaagtactttcaaggccggggtttgaagtctcacgcctacattcacagtgtccagtttagccaccatgttttcctcaacctccacaccctcaagttttactgccttccagacaactatgagatcatcgattcctcattggaggatatcacgtatgtgttgaagcccactttcacaaagcagcaaattgcaaacttggacaagcaagccaaattgtcccgggcatatgatggtaccacttacctgccgggtattgtgggactgaataacataaaggccaatgattatgccaacgctgtccttcaggctctatctaatgttcctcctctccggaactactttctggaagaagacaattataagaacatcaaacgtcctccaggggatatcatgttcttgttggtccagcgttttggagagctgatgagaaagctctggaaccctcgaaatttcaaggcacatgtgtctccccatgagatgcttcaggcagttgtactttgcagtaagaagacttttcagatcaccaaacaaggagatggcgttgactttctgtcttggtttctgaatgctctgcactcagctctggggggcacaaagaagaaaaagaagactattgtgactgatgttttccaggggtccatgaggatcttcactaaaaagcttccccatcctgatctgccagcagaagaaaaagagcagttgctccataatgacgagtaccaggagacaatggtggagtccacttttatgtacctgacgctggaccttcctactgcccccctctacaaggacgagaaggagcagctcatcattccccaagtgccactcttcaacatcctggctaagttcaatggcatcactgagaaggaatataagacttacaaggagaactttctgaagcgcttccagcttaccaagttgcctccatatctaatcttttgtatcaagagattcactaagaacaacttctttgttgagaagaatccaactattgtcaatttccctattacaaatgtggatctgagagaatacttgtctgaagaagtacaagcagtacacaagaataccacctatgacctcattgccaacatcgtgcatgacggcaagccctccgagggctcctaccggatccacgtgcttcatcatgggacaggcaaatggtatgaattacaagacctccaggtgactgacatccttccccagatgatcacactgtcagaggcttacattcagatttggaagaggcgagataatgatgaaaccaaccagcagggggcttgaaggaggcgtctagggctttgctcccaagggctgtggctgatgatggtaaataagaacacagaagctgtagctgaacacaggctggctggtgggcttcctaggccagcccagcttgtatgggttctggctacaccagagcaccaagagcccacttgcctgggatggccccacactgtcactcagctgttctttgatcatttttttctctanatggtcttctccaagatgggtccataatacgaggaacttcattgggttagtggatggagatgaaaaactcaaaatggttggaaaaaatggagggaa

SEQ ID NO: 352162 - DNA, 1791 bp, Homo sapiens
gagcgtgcttggcgcctgcgctggacgactcggccggtagtggagatgtccggccggtctaagcgggagtctcgcggttccactcgcgggaagcgagagtctgagtcgcggggcagctccggtcgcgtcaagcgggagcgagatcgggagcgggagcctgaggcggcgagctcccggggcagccctgtgcgcgtgaagcgggagttcgagccggcgagcgcgcgcgaggccccggcttctgttgtcccgtttgtgcgggtgaagcgggagcgcgaggtcgatgaggactcggagcctgagcgggaggtgcgagcaaagaatggccgagtggattctgaggaccggaggagccgccactgcccgtacctggacaccattaacaggagtgtgctggactttgactttgagaaactgtgttctatctccctctcacacatcaatgcttatgcctgtctggtgtgtggcaagtactttcaaggccggggtttgaagtctcacgcctacattcacagtgtccagtttagccaccatgttttcctcaacctccacaccctcaagttttactgccttccagacaactatgagatcatcgattcctcattggaggatatcacgtatgtgttgaagcccactttcacaaagcagcaaattgcaaacttggacaagcaagccaaattgtcccgggcatatgatggtaccacttacctgccgggtattgtgggactgaataacataaaggccaatgattatgccaacgctgtccttcaggctctatctaatgttcctcctctccggaactactttctggaagaagacaattataagaacatcaaacgtcctccaggggatatcatgttcttgttggtccagcgttttggagagctgatgagaaagctctggaaccctcgaaatttcaaggcacatgtgtctccccatgagatgcttcaggcagttgtactttgcagtaagaagacttttcagatcaccaaacaaggagatggcgttgactttctgtcttggtttctgaatgctctgcactcagctctggggggcacaaagaagaaaaagaagactattgtgactgatgttttccaggggtccatgaggatcttcactaaaaagcttccccatcctgatctgccagcagaagaaaaagagcagttgctccataatgacgagtaccaggagacaatggtggagtccacttttatgtacctgacgctggaccttcctactgcccccctctacaaggacgagaaggagcagctcatcattccccaagtgccactcttcaacatcctggctaagttcaatggcatcactgagaaggaatataagacttacaaggagaactttctgaagcgcttccagcttaccaagttgcctccatatctaatcttttgtatcaagagattcactaagaacaacttctttgttgagaagaatccaactattgtcaatttccctattacaaatgtggatctgagagaatacttgtctgaagaagtacaagcagtacacaagaataccacctatgacctcattgccaacatcgtgcatgacggcaagccctccgagggctcctaccggatccacgtgcttcatcatgtgagtggctgctgaccgtctcatggcacagagtggcaaaaacaggtgtttctttggcatctcagagggcagctcccttcagtgtgtccttgcttggccttggctttgggactctgcaagtaatagtgctgtcagtagttagtttaaggcagtggttctcaattttggctacacattggactc

SEQ ID NO: 352163 - DNA, 1084 bp, Homo sapiens
cgcttaaagaggcactcagggagcagaagagatggctgctggcagcatgacgtagagacaatggtggagtccacttttatgtacctgacgctggaccttcctactgcccccctctacaaggacgagaaggagcagctcatcattccccaagtgccactcttcaacatcctggctaagttcaatggcatcactgagaaggaatataagacttacaaggagaactttctgaagcgcttccagcttaccaagttgcctccatatctaatcttttgtatcaagagattcactaagaacaacttctttgttgagaagaatccaactattgtcaatttccctattacaaatgtggatctgagagaatacttgtctgaagaagtacaagcagtacacaagaataccacctatgacctcattgccaacatcgtgcatgacggcaagccctccgagggctcctaccggatccacgtgcttcatcatgggacaggcaaatggtatgaattacaagacctccaggtgactgacatccttccccagatgatcacactgtcagaggcttacattcagatttggaagaggcgagataatgatgaaaccaaccagcagggggcttgaaggaggcgtctagggctttgctcccaagggctgtggctgatgatggtaaataagaacacagaagctgtagctgaacacaggctggctggtgggcttcctaggccagcccagcttgtatgggttctggctacaccagagcaccaagagcccacttgcctgggatggccccacactgtcactcagctgttctttgatcatttttttctagattgatgctcctttctcccatgcattgagctcccatctagcttcagcagggcagaacccttctccagatgtgtgtaacttatgtcttgagtatctgggagtagttgaagaacagataattccttccaaacatcaagccttgggattcttggagcaagcagaaagccagtaacttcgctctgttagaggtggaggattttcctatggttccccccatttcctgatttgtatttttagatggattaaatagtctcctgtttttaaa

SEQ ID NO: 352164 - DNA, 4891 bp, Homo sapiens
cgctccgcccgcccggccgccccgagccccgagccccgagccccccgcgccgggcccgggcggcagcggcggcggcggcggcggcggcgcgcccggccccctcccccggcgccggccacgggaggcggtgatgcgggcgcgggcggcctcggctgcgccgagagcggagacacaggctcaagatggcagattccgactgaggctgggggggccgagctcgcgcgccgctttcccgtccccgttgccatgaaccgcggacaccccggccccgatggcccccgtgtacgaaggtatggcctcacatgtgcaagttttctcccctcacacccttcaatcaagtgccttctgtagtgtgaagaaactgaaaatagagccgagttccaactgggacatgactgggtacggctcccacagcaaagtgtatagccagagcaagaacatccccctgtcgcagccagccaccacaaccgtcagcacctccttgccggtcccaaacccaagcctaccttacgagcagaccatcgtcttcccaggaagcaccgggcacatcgtggtcacctcagcaagcagcacttctgtcaccgggcaagtcctcggcggaccacacaacctaatgcgtcgaagcactgtgagcctccttgatacctaccaaaaatgtggactcaagcgtaagagcgaggagatcgagaacacaagcagcgtgcagatcatcgaggagcatccacccatgattcagaataatgcaagcggggccactgtcgccactgccaccacgtctactgccacctccaaaaacagcggctccaacagcgagggcgactatcagctggtgcagcatgaggtgctgtgctccatgaccaacacctacgaggtcttagagttcttgggccgagggacgtttggacaagtggtcaagtgctggaaacggggcaccaatgagatcgtagccatcaagatcctgaagaaccgcccatcctatgcccgacaaggtcagattgaagtgagcatcctggcccggttgagcacggagagtgccgatgactataacttcgtccgggcctacgaatgcttccagcacaagaaccacacgtgcttggtcttcgagatgttggagcagaacctctatgactttctgaagcaaaacaagtttagccccttgcccctcaaatacattcgcccagttctccagcaggtagccacagccctgatgaaactcaaaagcctaggtcttatccacgctgacctcaaaccagaaaacatcatgctggtggatccatctagacaaccatacagagtcaaggtcatcgactttggttcagccagccacgtctccaaggctgtgtgctccacctacttgcagtccagatattacagggcccctgagatcatccttggtttaccattttgtgaggcaattgacatgtggtccctgggctgtgttattgcagaattgttcctgggttggccgttatatccaggagcttcggagtatgatcagattcggtatatttcacaaacacagggtttgcctgctgaatatttattaagcgccgggacaaagacaactaggtttttcaaccgtgacacggactcaccatatcctttgtggagactgaagacaccagatgaccatgaagcagagacagggattaagtcaaaagaagcaagaaagtacattttcaactgtttagatgatatggcccaggtgaacatgacgacagatttggaagggagcgacatgttggtagaaaaggctgaccggcgggagttcattgacctgttgaagaagatgctgaccattgatgctgacaagagaatcactccaatcgaaaccctgaaccatccctttgtcaccatgacacacttactcgattttccccacagcacacacgtcaaatcatgtttccagaacatggagatctgcaagcgtcgggtgaatatgtatgacacggtgaaccagagcaaaacccctttcatcacgcacgtggcccccagcacgtccaccaacctgaccatgacctttaacaaccagctgaccactgtccacaaccaggctccctcctctaccagtgccactatttccttagccaatcccgaagtctccatactaaactacccatctacactctaccagccctcagcggcatccatggctgcagtggcccagcggagcatgcccctgcagacaggaacagcccagatttgtgcccggcctgacccgttccagcaagctctcatcgtgtgtccccccggcttccaaggcttgcaggcctctccctctaagcacgctggctactcggtgcgaatggaaaatgcagttcccatcgtcactcaagccccaggagctcagcctcttcagatccaaccaggtctgcttgcccagcaggcttggccaagtgggacccagcagatcctgcttcccccagcatggcagcaactgactggagtggccacccacacatcagtgcagcatgccaccgtgattcccgagaccatggcaggcacccagcagctggcggactggagaaatacgcatgctcacggaagccattataatcccatcatgcagcagcctgcactattgaccggtcatgtgacccttccagcagcacagcccttaaatgtgggtgtggcccacgtgatgcggcagcagccaaccagcaccacctcctcccggaagagtaagcagcaccagtcatctgtgagaaatgtctccacctgtgaggtgtcctcctctcaggccatcagctccccacagcgatccaagcgtgtcaaggagaacacacctccccgctgtgccatggtgcacagtagcccggcctgcagcacctcggtcacctgtgggtggggcgacgtggcctccagcaccacccgggaacggcagcggcagacaattgtcattcccgacactcccagccccacggtcagcgtcatcaccatcagcagtgacacggacgaggaggaggaacagaaacacgcccccaccagcactgtctccaagcaaagaaaaaacgtcatcagctgtgtcacagtccacgactccccctactccgactcctccagcaacaccagcccctactccgtgcagcagcgtgctgggcacaacaatgccaatgcctttgacaccaaggggagcctggagaatcactgcacggggaacccccgaaccatcatcgtgccacccctgaaaacccaggccagcgaagtattggtggagtgtgatagcctggtgccagtcaacaccagtcaccactcgtcctcctacaagtccaagtcctccagcaacgtgacctccaccagcggtcactcttcagggagctcatctggagccatcacctaccggcagcagcggccgggcccccacttccagcagcagcagccactcaatctcagccaggctcagcagcacatcaccacggaccgcactgggagccaccgaaggcagcaggcctacatcactcccaccatggcccaggctccgtactccttcccgcacaacagccccagccacggcactgtgcacccgcatctggctgcagccgctgccgctgcccacctccccacccagccccacctctacacctacactgcgccggcggccctgggctccaccggcaccgtggcccacctggtggcctcgcaaggctctgcgcgccacaccgtgcagcacactgcctacccagccagcatcgtccaccaggtccccgtgagcatgggcccccgggtcctgccctcgcccaccatccacccgagtcagtatccagcccaatttgcccaccagacctacatcagcgcctcgccagcctccaccgtctacactggatacccactgagccccgccaaggtcaaccagtacccttacatataaacactggaggggagggagggagggagggagggagagaatggcccgagggaggagggagagaaggagggaggcgctcctgggaccgtgggcgctggccttttatactgaagatgccgcacacaaacaatgcaaacggggcaggggcggggggggggggggcagagggcagggggacgggtcgggacaccagtgaaacttgaaccgggaagtgggaggacgtagagcagagaagagaacatttttaaaaggaagggattaaagagggtgggaaatctatggtttttattttaaaaaagaaaaaggaaaaaaaaaaagtcaataacaaaaaacccagctcaagaacccattctacgccaaactggaaaggagaagagagcaacaggaagattccagaaacggggggccccagtttttgaagaactttatgaacttttcaaagattattttcatatggcagcaagtgatacggaagactgctgtcagggacacctgatatggaaatcaaatagatttttaattaattgaacataagatttagggatttttccagaactcgaaagggtcaacagccctccagaatgtcgggctgcagcctgaggaggctgatgtttggagctggtgtgggattggcgaagcccagtccgggctccctagtcaggaaagacgggggacggccaggctgctggaaggcccccgggggcgcggggcgagttttctttttctgagcactctggataaatccctaagcaacgttgtttctcaaatgtcattaataatgtgtgttgcaaactttaggtttttttcttttctgaaaatgtattttctctttgaatccacccctagtcgcgtagcgtagggctagcggtcgtcacagacaccctagtagaatgtagcactcagcacccttgtctcctaccttgtgttcaactccaatgataccaatagaatattcctcaatgtaattgcacaaaaaaaagcgatataacataggcatgtaaccaatgtggcggtgcaggtgtgcgg

SEQ ID NO: 352165 - DNA, 437 bp, Homo sapiens
acccgctgatccgcttaagcacgtgtgcataggaaggaggagggatgggttggtgtggatgaagagagaagggaattgcaggtgtgcaggtcattgaagaatccaaatctcttccgaaatgtgggaaagagaccctctgtgagacacaggagttccaaggcttgagtcccagtgatgaggagctaagtcacgctaccaattggcttttgcctctcttgacagacaccagatgaccatgaagcagagacagggattaagtcaaaagaagcaagaaagtacattttcaactgtttagatgatatggcccaggtaagcttcatgggtgagtatgcaacgtaagccctttaaaaccaagggcagcaagacttctgcaatagtaatagaagataatgggttgaaatccacattattcaactgcagtggttgaccttgactta

SEQ ID NO: 352166 - DNA, 4144 bp, Homo sapiens
aaaaaaaaagaagtagaggtggaagaaagacaagacttagaggaacaaaagaatgttttcttttgagatactcttctcaaagaaatagcaacaattgtataaacaggaaaaccagccagctttcatgataaaaggaaggcgtgtctcttgccctggtatgagattaacagaaatacagatgcatttttattttgattgaaagatggtgagaatgtagaaatgcttaggactagatttttaattttttaaaataactattatcatttattatgaaatatttgttcagttgttttgagtgggtttcttgttccttttttcatttaaaaccttctttgttgactggctccaggcttgtttgcctaaattcttaggtagtttacacaagttctagaatcttttagaactttaactccattggaagcaaacctaactaatcggagtttgagatcctggttggtttcaataggtattctggaattctggcagaacacctaaagatttttttttttttagaaggttttagatacattatcttacacaaactgtgacctaatggcaataattacctcaaatgtgggcattcatcctggttttagccttttttgaaatcatgtagccagcttgatcttggaatttaaagactatgaattctctggtgggctgaaaataatgattacttcatacccccggtcatcgttgcttaagtgaattctgaaaatagctcatctttacaacaaaaattaaaccaaggaagagattattctttgtgtgttgtactcaaatgcgatgttcaaatgcacatgttaagtatatatgtttttagctactgtaaaatgctgttagccttctaagctatcaaaacagtcacattttaaatgagtaaactaaacaattgactgtggatacttaagcatatttctggctacgttttatagttaaagtgttttatagtttacatttagactggtactttttaaagaaaagttctgtttataactgacatccgcaaaccccagtgaatgcctcttagttggaggttgtgtctcccccaaggcaagtgtgttgtcccagactcttctgtagtccagcatgcgcacttccctctggattattactttccacgtgaactcaagagaacatgaaaggcaatccagatggagggaaaaggtgtgagtccgcagcccgggccagatgcgaaggtctcatgcgtgtcgtctaaacacttgtcttcaaggccttctctctgacatcttggaagagtcattgagaacagataacctggttcattgatttttgtcttgatttgaatatttaacttattaatagatccactgatttccaggcaccaggcagtagaagagactgggattcaggtgaccatgaaggcacagctgctacttctgggccgggggtgatattttgatcagcgttttgtaggggaggaccatatacccctattcccatggtcgctggctgggttttccatatatctgctgtcatttattcgttttccccttaaaagcaaaatcaatgtaaaaggctatgtttacgttttactcattgtccagcttagactcaaagtctagttcggtgggagggggaccttagcatcctctcagagatggtcagggctgagcaggaggaggcagagacagaggggcagctcagcctggtccattgagacccactctaaacagacatcatatttggaacaagaagatgcttcgagacaggaatgggccccactgtcatgcagaaacagactgggggaatggcagtttccctgagtcttggtttcttttatgttttctcttgtgccaccaccaaactgcagaggacctgctgtgacctaaagggcattcctttagcagataagaccttgaaaactgcaaaacacctgggaccagggagcttttaaaaaatacaaaaaaataccacatttgctttttccctgtgaactgtattgacagcgtgttcttaggacagtcttttggtggaaatgttactgtaaaatagttttcatctcacccctcctaatcatactcccactttcctgtttgtgtggtggtgttgctgttttttcctttacatgaattaaccaaatgaattttgtgtcattgtttttggggcttatatttttaaaacatagaaattgccttttgttcatttgaaaagtaagtatgttgtatctgaaaaagggctctgcctctgctctccctcgcttccttgtaaccaatctccaaacgaatctctcctggcaccgcccccttccttatatagggtcactgtccccggggccacctctgcctccaccctgctgtcaccactgccctgggccaaggcacccaggactcccagaaagcgcgagagccagcaagaaggccccactcagccttgagactggtggtcacacctccctgtcagagtcgcctgctgggctgaaggggcaatggattgtcattgttgaaattgtttggctcaggttataaggaggaacttgggaagtagaaagtgacttgaccatgtgcatccttggtagcttcctgtaactaacaaatggaacagagagcacacccccgccccgccccaccccaagcagatgttcccgtcagcgctgccctgagtcagtcggtcccccgtttctgctctcctcccttttgtgttcctgctcacttcaagcttcttccatggactttccagggcacagtcatctctagcccccaaatcatctcttcatcctctgtgtgtgcatttttttaaccaaatgaaatagacaagaaagtcatactttggggcagcagaatttctaatttagtagaatcactgtatagagatagatgttgatatatatgtttgtgtatatatatcaaaccaaattggataggagaagtatagctttacagatgaggagaaggagctctttagaggtcggagtcaagactggtgtcttggacgtgcatgggctgtgtcccaggccactccgcacacatggggctgaggcgtggcgccgggcccttgtcatccacctcaccacggcagagccagcaggccctgtagggtgctgctgctgtctcactgggtcccagcttcaagcgcatcagtgggtgacgggggcaacaaatcagagtgactggaagtttccatcccgttttgctttgaccacgtgtactgagctgcagcctctgatactctgtcacgtttccaaaaatggtatccattaggatagaaagagaatggatctgcagaaatgtttacctttcaactgctcatgaattcaggacactggatagaaagactcactccccaaaatgagaacagggaagaggagacccggcgacactaagtcaccaggtccaaggaacgtggctccctccccagggtcatctcacctagatctttctctcccaggtcatctcagctcaatctcaataaccctatgaaagccctggtctgttgtgttccttcaccgtacggtttctgtaataaaaagtgttaatccatgttaatctgtgtgaaaattattgcgtgcaacagtattttctcgtgtacctctttttcctatgtgaattgtccctcttttttatttataaatgtctacttttgtttttttaaagacaaaccaatgtgttgtagacctatatgtaacctattccttagtctcatattataggtatgttataagaatggatattttacttggctttagaatgttttacaagaaaactaattcttaactgatcaagtccttgctactaaaatgcttgtgtttttcatcatgacgtcgtgtgcttctaaattaatcattttcgttgtagaaaaatggagtgaatttatattagtcttggaaactaataatagcattgtaaatttatgagatgattttaacagaaaaaatatagaagaatatagttattttaattgtaatattactaactgtagggtgagaaaaaggggggggggtcccattgtggtgaactatgttatagcttgttactcatagtttctttttgatcattttttcggtctccgaggtgaaatgacttattaattaaaatttgtaaactcacatatgcatattgtatatgtgtagaaatgtaatcacactttgtcttggaattacattaaactgtttgaaatcactgta

SEQ ID NO: 352167 - DNA, 3898 bp, Homo sapiens
aaaaaaaaagaagtagaggtggaagaaagacaagacttagaggaacaaaagaatgttttcttttgagatactcttctcaaagaaatagcaacaattgtataaacaggaaaaccagccagctttcatgataaaaggaaggcgtgtctcttgccctggtatgagattaacagaaatacagatgcatttttattttgattgaaagatggtgagaatgtagaaatgcttaggactagatttttaattttttaaaataactattatcatttattatgaaatatttgttcagttgttttgagtgggtttcttgttccttttttcatttaaaaccttctttgttgactggctccaggcttgtttgcctaaattcttaggtagtttacacaagttctagaatcttttagaactttaactccattggaagcaaacctaactaatcggagtttgagatcctggttggtttcaataggtattctggaattctggcagaacacctaaagatttttttttttttagaaggttttagatacattatcttacacaaactgtgacctaatggcaataattacctcaaatgtgggcattcatcctggttttagccttttttgaaatcatgtagccagcttgatcttggaatttaaagactatgaattctctggtgggctgaaaataatgattacttcatacccccggtcatcgttgcttaagtgaattctgaaaatagctcatctttacaacaaaaattaaaccaaggaagagattattctttgtgtgttgtactcaaatgcgatgttcaaatgcacatgttaagtatatatgtttttagctactgtaaaatgctgttagccttctaagctatcaaaacagtcacattttaaatgagtaaactaaacaattgactgtggatacttaagcatatttctggctacgttttatagttaaagtgttttatagtttacatttagactggtactttttaaagaaaagttctgtttataactgacatccgcaaaccccagtgaatgcctcttagttggaggttgtgtctcccccaaggcaagtgtgttgtcccagactcttctgtagtccagcatgcgcacttccctctggattattactttccacgtgaactcaagagaacatgaaaggcaatccagatggagggaaaaggtgtgagtccgcagcccgggccagatgcgaaggtctcatgcgtgtcgtctaaacacttgtcttcaaggccttctctctgacatcttggaagagtcattgagaacagataacctggttcattgatttttgtcttgatttgaatatttaacttattaatagatccactgatttccaggcaccaggcagtagaagagactgggattcaggtgaccatgaaggcacagctgctacttctgggccgggggtgatattttgatcagcgttttgtaggggaggaccatatacccctattcccatggtcgctggctgggttttccatatatctgctgtcatttattcgttttccccttaaaagcaaaatcaatgtaaaaggctatgtttacgttttactcattgtccagcttagactcaaagtctagttcggtgggagggggaccttagcatcctctcagagatggtcagggctgagcaggaggaggcagagacagaggggcagctcagcctggtccattgagacccactctaaacagacatcatatttggaacaagaagatgcttcgagacaggaatgggccccactgtcatgcagaaacagactgggggaatggcagtttccctgagtcttggtttcttttatgttttctcttgtgccaccaccaaactgcagaggacctgctgtgacctaaagggcattcctttagcagataagaccttgaaaactgcaaaacacctgggaccagggagcttttaaaaaatacaaaaaaataccacatttgctttttccctgtgaactgtattgacagcgtgttcttaggacagtcttttggtggaaatgttactgtaaaatagttttcatctcacccctcctaatcatactcccactttcctgtttgtgtggtggtgttgctgttttttcctttacatgaattaaccaaatgaattttgtgtcattgtttttggggcttatatttttaaaacatagaaattgccttttgttcatttgaaaagtaagtatgttgtatctgaaaaaggggcaatggattgtcattgttgaaattgtttggctcaggttataaggaggaacttgggaagtagaaagtgacttgaccatgtgcatccttggtagcttcctgtaactaacaaatggaacagagagcacacccccgccccgccccaccccaagcagatgttcccgtcagcgctgccctgagtcagtcggtcccccgtttctgctctcctcccttttgtgttcctgctcacttcaagcttcttccatggactttccagggcacagtcatctctagcccccaaatcatctcttcatcctctgtgtgtgcatttttttaaccaaatgaaatagacaagaaagtcatactttggggcagcagaatttctaatttagtagaatcactgtatagagatagatgttgatatatatgtttgtgtatatatatcaaaccaaattggataggagaagtatagctttacagatgaggagaaggagctctttagaggtcggagtcaagactggtgtcttggacgtgcatgggctgtgtcccaggccactccgcacacatggggctgaggcgtggcgccgggcccttgtcatccacctcaccacggcagagccagcaggccctgtagggtgctgctgctgtctcactgggtcccagcttcaagcgcatcagtgggtgacgggggcaacaaatcagagtgactggaagtttccatcccgttttgctttgaccacgtgtactgagctgcagcctctgatactctgtcacgtttccaaaaatggtatccattaggatagaaagagaatggatctgcagaaatgtttacctttcaactgctcatgaattcaggacactggatagaaagactcactccccaaaatgagaacagggaagaggagacccggcgacactaagtcaccaggtccaaggaacgtggctccctccccagggtcatctcacctagatctttctctcccaggtcatctcagctcaatctcaataaccctatgaaagccctggtctgttgtgttccttcaccgtacggtttctgtaataaaaagtgttaatccatgttaatctgtgtgaaaattattgcgtgcaacagtattttctcgtgtacctctttttcctatgtgaattgtccctcttttttatttataaatgtctacttttgtttttttaaagacaaaccaatgtgttgtagacctatatgtaacctattccttagtctcatattataggtatgttataagaatggatattttacttggctttagaatgttttacaagaaaactaattcttaactgatcaagtccttgctactaaaatgcttgtgtttttcatcatgacgtcgtgtgcttctaaattaatcattttcgttgtagaaaaatggagtgaatttatattagtcttggaaactaataatagcattgtaaatttatgagatgattttaacagaaaaaatatagaagaatatagttattttaattgtaatattactaactgtagggtgagaaaaaggggggggggtcccattgtggtgaactatgttatagcttgttactcatagtttctttttgatcattttttcggtctccgaggtgaaatgacttattaattaaaatttgtaaactcacatatgcatattgtatatgtgtagaaatgtaatcacactttgtcttggaattacattaaactgtttgaaatcactgta

SEQ ID NO: 352168 - DNA, 4832 bp, Homo sapiens
  misc_feature (4155)..(4155): n is a, c, g, or t
  misc_feature (4165)..(4166): n is a, c, g, or t
  misc_feature (4169)..(4169): n is a, c, g, or t
aaaaaaaaagaagtagaggtggaagaaagacaagacttagaggaacaaaagaatgttttcttttgagatactcttctcaaagaaatagcaacaattgtataaacaggaaaaccagccagctttcatgataaaaggaaggcgtgtctcttgccctggtatgagattaacagaaatacagatgcatttttattttgattgaaagatggtgagaatgtagaaatgcttaggactagatttttaattttttaaaataactattatcatttattatgaaatatttgttcagttgttttgagtgggtttcttgttccttttttcatttaaaaccttctttgttgactggctccaggcttgtttgcctaaattcttaggtagtttacacaagttctagaatcttttagaactttaactccattggaagcaaacctaactaatcggagtttgagatcctggttggtttcaataggtattctggaattctggcagaacacctaaagatttttttttttttagaaggttttagatacattatcttacacaaactgtgacctaatggcaataattacctcaaatgtgggcattcatcctggttttagccttttttgaaatcatgtagccagcttgatcttggaatttaaagactatgaattctctggtgggctgaaaataatgattacttcatacccccggtcatcgttgcttaagtgaattctgaaaatagctcatctttacaacaaaaattaaaccaaggaagagattattctttgtgtgttgtactcaaatgcgatgttcaaatgcacatgttaagtatatatgtttttagctactgtaaaatgctgttagccttctaagctatcaaaacagtcacattttaaatgagtaaactaaacaattgactgtggatacttaagcatatttctggctacgttttatagttaaagtgttttatagtttacatttagactggtactttttaaagaaaagttctgtttataactgacatccgcaaaccccagtgaatgcctcttagttggaggttgtgtctcccccaaggcaagtgtgttgtcccagactcttctgtagtccagcatgcgcacttccctctggattattactttccacgtgaactcaagagaacatgaaaggcaatccagatggagggaaaaggtgtgagtccgcagcccgggccagatgcgaaggtctcatgcgtgtcgtctaaacacttgtcttcaaggccttctctctgacatcttggaagagtcattgagaacagataacctggttcattgatttttgtcttgatttgaatatttaacttattaatagatccactgatttccaggcaccaggcagtagaagagactgggattcaggtgaccatgaaggcacagctgctacttctgggccgggggtgatattttgatcagcgttttgtaggggaggaccatatacccctattcccatggtcgctggctgggttttccatatatctgctgtcatttattcgttttccccttaaaagcaaaatcaatgtaaaaggctatgtttacgttttactcattgtccagcttagactcaaagtctagttcggtgggagggggaccttagcatcctctcagagatggtcagggctgagcaggaggaggcagagacagaggggcagctcagcctggtccattgagacccactctaaacagacatcatatttggaacaagaagatgcttcgagacaggaatgggccccactgtcatgcagaaacagactgggggaatggcagtttccctgagtcttggtttcttttatgttttctcttgtgccaccaccaaactgcagaggacctgctgtgacctaaagggcattcctttagcagataagaccttgaaaactgcaaaacacctgggaccagggagcttttaaaaaatacaaaaaaataccacatttgctttttccctgtgaactgtattgacagcgtgttcttaggacagtcttttggtggaaatgttactgtaaaatagttttcatctcacccctcctaatcatactcccactttcctgtttgtgtggtggtgttgctgttttttcctttacatgaattaaccaaatgaattttgtgtcattgtttttggggcttatatttttaaaacatagaaattgccttttgttcatttgaaaagtaagtatgttgtatctgaaaaagggctctgcctctgctctccctcgcttccttgtaaccaatctccaaacgaatctctcctggcaccgcccccttccttatatagggtcactgtccccggggccacctctgcctccaccctgctgtcaccactgccctgggccaaggcacccaggactcccagaaagcgcgagagccagcaagaaggccccactcagccttgagactggtggtcacacctccctgtcagagtcgcctgctgggctgaaggggcaatggattgtcattgttgaaattgtttggctcaggttataaggaggaacttgggaagtagaaagtgacttgaccatgtgcatccttggtagcttcctgtaactaacaaatggaacagagagcacacccccgccccgccccaccccaagcagatgttcccgtcagcgctgccctgagtcagtcggtcccccgtttctgctctcctcccttttgtgttcctgctcacttcaagcttcttccatggactttccagggcacagtcatctctagcccccaaatcatctcttcatcctctgtgtgtgcatttttttaaccaaatgaaatagacaagaaagtcatactttggggcagcagaatttctaatttagtagaatcactgtatagagatagatgttgatatatatgtttgtgtatatatatcaaaccaaattggataggagaagtatagctttacagatgaggagaaggagctctttagaggtcggagtcaagactggtgtcttggacgtgcatgggctgtgtcccaggccactccgcacacatggggctgaggcgtggcgccgggcccttgtcatccacctcaccacggcagagccagcaggccctgtagggtgctgctgctgtctcactgggtcccagcttcaagcgcatcagtgggtgacgggggcaacaaatcagagtgactggaagtttccatcccgttttgctttgaccacgtgtactgagctgcagcctctgatactctgtcacgtttccaaaaatggtatccattaggatagaaagagaatggatctgcagaaatgtttacctttcaactgctcatgaattcaggacactggatagaaagactcactccccaaaatgagaacagggaagaggagacccggcgacactaagtcaccaggtccaaggaacgtggctccctccccagggtcatctcacctagatctttctctcccaggtcatctcagctcaatctcaataaccctatgaaagccctggtctgttgtgttccttcaccgtacggtttctgtaataaaaagtgttaatccatgttaatctgtgtgaaaattattgcgtgcaacagtattttctcgtgtacctctttttcctatgtgaattgtccctcttttttatttataaatgtctacttttgtttttttaaagacaaaccaatgtgttgtagacctatatgtaacctattccttagtctcatattataggtatgttataagaatggatattttacttggctttagaatgttttacaagaaaactaattcttaactgatcaagtccttgctactaaaatgcttgtgtttttcatcatgacgtcgtgtgcttctaaattaatcattttcgttgtagaaaaatggagtgaatttatattagtcttggaaactaataatagcattgtaaatttatgagatgattttaacagaaaaaatatagaagaatatagttattttaattgtaatattactaactgtagggtgagaaaaaggggggggggtcccattgtggtgaactatgttatagcttgttactcatagtttctttttgatcattttttcggtctccgaggtgaaatgacttattaattaaaatttgtaaactcacatatgcatattgtatatgtgtagaaatgtaatcacactttgtcttggaattacattaaactgtttgaaatcactgtaaaaaaaaaacnaaaaacacannaancaaaacaacaacaacaccaaaccacaccaaaacactgtcgggggcggccgcctcgcggcccccccggagagaaaaggctctttcgtcaacccccccccgccggggggggcggaggccagcccaaactagtaatgacagcgtggaaacactgctggccacagcgggtggggtccacaagaagaacacctcgggggcaatacaacaactgcggggggaggcgttctccaccccagataaaaaaaccggccgggaggggacacgcagcaccgtcctctgaacacacacaccccaaagggggcggggtcatgggggagcaaccacgaaggggcgcatacaacaaaaggggggtccccagcgggcccgcgctataaaaaaatatgacccccgcgggggcggggggacccacccaagacaaagcccggagcaagggcgccgacgccaaagacgccaggacatggacggaacgtgaacgaagcgggacgccggccgggcgacgcgcgacagaggagaaggccggtcgaggaggcaagcggcgggcgcgctacgcgagcccgagaccgagcaccggaagcccagacgccgagccgaccgacgcgcacgacgcgacgcggacaaccgaagacgaagcacacggcaacgaccacaaacgcccgccgacacaca

SEQ ID NO: 352169 - DNA, 5458 bp, Homo sapiens
cgctccgcccgcccggccgccccgagccccgagccccgagccccccgcgccgggcccgggcggcagcggcggcggcggcggcggcggcgcgcccggccccctcccccggcgccggccacgggaggcggtgatgcgggcgcgggcggcctcggctgcgccgagagcggagacacaggctcaagatggcagattccgactgaggctgggggggccgagctcgcgcgccgctttcccgtccccgttgccatgaaccgcggacaccccggccccgatggcccccgtgtacgaaggtatggcctcacatgtgcaagttttctcccctcacacccttcaatcaagtgccttctgtagtgtgaagaaactgaaaatagagccgagttccaactgggacatgactgggtacggctcccacagcaaagtgtatagccagagcaagaacatccccctgtcgcagccagccaccacaaccgtcagcacctccttgccggtcccaaacccaagcctaccttacgagcagaccatcgtcttcccaggaagcaccgggcacatcgtggtcacctcagcaagcagcacttctgtcaccgggcaagtcctcggcggaccacacaacctaatgcgtcgaagcactgtgagcctccttgatacctaccaaaaatgtggactcaagcgtaagagcgaggagatcgagaacacaagcagcgtgcagatcatcgaggagcatccacccatgattcagaataatgcaagcggggccactgtcgccactgccaccacgtctactgccacctccaaaaacagcggctccaacagcgagggcgactatcagctggtgcagcatgaggtgctgtgctccatgaccaacacctacgaggtcttagagttcttgggccgagggacgtttggacaagtggtcaagtgctggaaacggggcaccaatgagatcgtagccatcaagatcctgaagaaccgcccatcctatgcccgacaaggtcagattgaagtgagcatcctggcccggttgagcacggagagtgccgatgactataacttcgtccgggcctacgaatgcttccagcacaagaaccacacgtgcttggtcttcgagatgttggagcagaacctctatgactttctgaagcaaaacaagtttagccccttgcccctcaaatacattcgcccagttctccagcaggtagccacagccctgatgaaactcaaaagcctaggtcttatccacgctgacctcaaaccagaaaacatcatgctggtggatccatctagacaaccatacagagtcaaggtcatcgactttggttcagccagccacgtctccaaggctgtgtgctccacctacttgcagtccagatattacagggcccctgagatcatccttggtttaccattttgtgaggcaattgacatgtggtccctgggctgtgttattgcagaattgttcctgggttggccgttatatccaggagcttcggagtatgatcagattcggtatatttcacaaacacagggtttgcctgctgaatatttattaagcgccgggacaaagacaactaggtttttcaaccgtgacacggactcaccatatcctttgtggagactgaagacaccagatgaccatgaagcagagacagggattaagtcaaaagaagcaagaaagtacattttcaactgtttagatgatatggcccaggtgaacatgacgacagatttggaagggagcgacatgttggtagaaaaggctgaccggcgggagttcattgacctgttgaagaagatgctgaccattgatgctgacaagagaatcactccaatcgaaaccctgaaccatccctttgtcaccatgacacacttactcgattttccccacagcacacacgtcaaatcatgtttccagaacatggagatctgcaagcgtcgggtgaatatgtatgacacggtgaaccagagcaaaacccctttcatcacgcacgtggcccccagcacgtccaccaacctgaccatgacctttaacaaccagctgaccactgtccacaaccagccctcagcggcatccatggctgcagtggcccagcggagcatgcccctgcagacaggaacagcccagatttgtgcccggcctgacccgttccagcaagctctcatcgtgtgtccccccggcttccaaggcttgcaggcctctccctctaagcacgctggctactcggtgcgaatggaaaatgcagttcccatcgtcactcaagccccaggagctcagcctcttcagatccaaccaggtctgcttgcccagcaggcttggccaagtgggacccagcagatcctgcttcccccagcatggcagcaactgactggagtggccacccacacatcagtgcagcatgccaccgtgattcccgagaccatggcaggcacccagcagctggcggactggagaaatacgcatgctcacggaagccattataatcccatcatgcagcagcctgcactattgaccggtcatgtgacccttccagcagcacagcccttaaatgtgggtgtggcccacgtgatgcggcagcagccaaccagcaccacctcctcccggaagagtaagcagcaccagtcatctgtgagaaatgtctccacctgtgaggtgtcctcctctcaggccatcagctccccacagcgatccaagcgtgtcaaggagaacacacctccccgctgtgccatggtgcacagtagcccggcctgcagcacctcggtcacctgtgggtggggcgacgtggcctccagcaccacccgggaacggcagcggcagacaattgtcattcccgacactcccagccccacggtcagcgtcatcaccatcagcagtgacacggacgaggaggaggaacagaaacacgcccccaccagcactgtctccaagcaaagaaaaaacgtcatcagctgtgtcacagtccacgactccccctactccgactcctccagcaacaccagcccctactccgtgcagcagcgtgctgggcacaacaatgccaatgcctttgacaccaaggggagcctggagaatcactgcacggggaacccccgaaccatcatcgtgccacccctgaaaacccaggccagcgaagtattggtggagtgtgatagcctggtgccagtcaacaccagtcaccactcgtcctcctacaagtccaagtcctccagcaacgtgacctccaccagcggtcactcttcagggagctcatctggagccatcacctaccggcagcagcggccgggcccccacttccagcagcagcagccactcaatctcagccaggctcagcagcacatcaccacggaccgcactgggagccaccgaaggcagcaggcctacatcactcccaccatggcccaggctccgtactccttcccgcacaacagccccagccacggcactgtgcacccgcatctggctgcagccgctgccgctgcccacctccccacccagccccacctctacacctacactgcgccggcggccctgggctccaccggcaccgtggcccacctggtggcctcgcaaggctctgcgcgccacaccgtgcagcacactgcctacccagccagcatcgtccaccaggtccccgtgagcatgggcccccgggtcctgccctcgcccaccatccacccgagtcagtatccagcccaatttgcccaccagacctacatcagcgcctcgccagcctccaccgtctacactggatacccactgagccccgccaaggtcaaccagtacccttacatataaacactggaggggagggagggagggagggagggagagaatggcccgagggaggagggagagaaggagggaggcgctcctgggaccgtgggcgctggccttttatactgaagatgccaccccaagcagatgttcccgtcagcgctgccctgagtcagtcggtcccccgtttctgctctcctcccttttgtgttcctgctcacttcaagcttcttccatggactttccagggcacagtcatctctagcccccaaatcatctcttcatcctctgtgtgtgcatttttttaaccaaatgaaatagacaagaaagtcatactttggggcagcagaatttctaatttagtagaatcactgtatagagatagatgttgatatatatgtttgtgtatatatatcaaaccaaattggataggagaagtatagctttacagatgaggagaaggagctctttagaggtcggagtcaagactggtgtcttggacgtgcatgggctgtgtcccaggccactccgcacacatggggctgaggcgtggcgccgggcccttgtcatccacctcaccacggcagagccagcaggccctgtagggtgctgctgctgtctcactgggtcccagcttcaagcgcatcagtgggtgacgggggcaacaaatcagagtgactggaagtttccatcccgttttgctttgaccacgtgtactgagctgcagcctctgatactctgtcacgtttccaaaaatggtatccattaggatagaaagagaatggatctgcagaaatgtttacctttcaactgctcatgaattcaggacactggatagaaagactcactccccaaaatgagaacagggaagaggagacccggcgacactaagtcaccaggtccaaggaacgtggctccctccccagggtcatctcacctagatctttctctcccaggtcatctcagctcaatctcaataaccctatgaaagccctggtctgttgtgttccttcaccgtacggtttctgtaataaaaagtgttaatccatgttaatctgtgtgaaaattattgcgtgcaacagtattttctcgtgtacctctttttcctatgtgaattgtccctcttttttatttataaatgtctacttttgtttttttaaagacaaaccaatgtgttgtagacctatatgtaacctattccttagtctcatattataggtatgttataagaatggatattttacttggctttagaatgttttacaagaaaactaattcttaactgatcaagtccttgctactaaaatgcttgtgtttttcatcatgacgtcgtgtgcttctaaattaatcattttcgttgtagaaaaatggagtgaatttatattagtcttggaaactaataatagcattgtaaatttatgagatgattttaacagaaaaaatatagaagaatatagttattttaattgtaatattactaactgtagggtgagaaaaaggggggggggtcccattgtggtgaactatgttatagcttgttactcatagtttctttttgatcattttttcggtctccgaggtgaaatgacttattaattaaaatttgtaaactcacatatgcatattgtatatgtgtagaaatgtaatcacactttgtcttggaattacattaaactgtttgaaatcactgta

SEQ ID NO: 352170 - DNA, 2776 bp, Homo sapiens
taagggaaggttagtattgctagggtggcgcttccaattacggtgcatagtaggtgcctgcagcacctcggtcacctgtgggtggggcgacgtggcctccagcaccacccgggaacggcagcggcagacaattgtcattcccgacactcccagccccacggtcagcgtcatcaccatcagcagtgacacggacgaggaggaggaacagaaacacgcccccaccagcactgtctccaagcaaagaaaaaacgtcatcagctgtgtcacagtccacgactccccctactccgactcctccagcaacaccagcccctactccgtgcagcagcgtgctgggcacaacaatgccaatgcctttgacaccaaggggagcctggagaatcactgcacggggaacccccgaaccatcatcgtgccacccctgaaaacccaggccagcgaagtattggtggagtgtgatagcctggtgccagtcaacaccagtcaccactcgtcctcctacaagtccaagtcctccagcaacgtgacctccaccagcggtcactcttcagggagctcatctggagccatcacctaccggcagcagcggccgggcccccacttccagcagcagcagccactcaatctcagccaggctcagcagcacatcaccacggaccgcactgggagccaccgaaggcagcaggcctacatcactcccaccatggcccaggctccgtactccttcccgcacaacagccccagccacggcactgtgcacccgcatctggctgcagccgctgccgctgcccacctccccacccagccccacctctacacctacactgcgccggcggccctgggctccaccggcaccgtggcccacctggtggcctcgcaaggctctgcgcgccacaccgtgcagcacactgcctacccagccagcatcgtccaccaggtccccgtgagcatgggcccccgggtcctgccctcgcccaccatccacccgagtcagtatccagcccaatttgcccaccagacctacatcagcgcctcgccagcctccaccgtctacactggatacccactgagccccgccaaggtcaaccagtacccttacatataaacactggaggggagggagggagggagggagggagagaatggcccgagggaggagggagagaaggagggaggcgctcctgggaccgtgggcgctggccttttatactgaagatgccaccccaagcagatgttcccgtcagcgctgccctgagtcagtcggtcccccgtttctgctctcctcccttttgtgttcctgctcacttcaagcttcttccatggactttccagggcacagtcatctctagcccccaaatcatctcttcatcctctgtgtgtgcatttttttaaccaaatgaaatagacaagaaagtcatactttggggcagcagaatttctaatttagtagaatcactgtatagagatagatgttgatatatatgtttgtgtatatatatcaaaccaaattggataggagaagtatagctttacagatgaggagaaggagctctttagaggtcggagtcaagactggtgtcttggacgtgcatgggctgtgtcccaggccactccgcacacatggggctgaggcgtggcgccgggcccttgtcatccacctcaccacggcagagccagcaggccctgtagggtgctgctgctgtctcactgggtcccagcttcaagcgcatcagtgggtgacgggggcaacaaatcagagtgactggaagtttccatcccgttttgctttgaccacgtgtactgagctgcagcctctgatactctgtcacgtttccaaaaatggtatccattaggatagaaagagaatggatctgcagaaatgtttacctttcaactgctcatgaattcaggacactggatagaaagactcactccccaaaatgagaacagggaagaggagacccggcgacactaagtcaccaggtccaaggaacgtggctccctccccagggtcatctcacctagatctttctctcccaggtcatctcagctcaatctcaataaccctatgaaagccctggtctgttgtgttccttcaccgtacggtttctgtaataaaaagtgttaatccatgttaatctgtgtgaaaattattgcgtgcaacagtattttctcgtgtacctctttttcctatgtgaattgtccctcttttttatttataaatgtctacttttgtttttttaaagacaaaccaatgtgttgtagacctatatgtaacctattccttagtctcatattataggtatgttataagaatggatattttacttggctttagaatgttttacaagaaaactaattcttaactgatcaagtccttgctactaaaatgcttgtgtttttcatcatgacgtcgtgtgcttctaaattaatcattttcgttgtagaaaaatggagtgaatttatattagtcttggaaactaataatagcattgtaaatttatgagatgattttaacagaaaaaatatagaagaatatagttattttaattgtaatattactaactgtagggtgagaaaaaggggggggggtcccattgtggtgaactatgttatagcttgttactcatagtttctttttgatcattttttcggtctccgaggtgaaatgacttattaattaaaatttgtaaactcacatatgcatattgtatatgtgtagaaatgtaatcacactttgtcttggaattacattaaactgtttgaaatcactgta

SEQ ID NO: 352171 - DNA, 2614 bp, Homo sapiens
ccgctcttgggacccctctcatgtaggccggacgggaggaggacagaaacacgcccccactagcactgtctccaagcaaagaaaaaacgtcatcagctgtgtcacagtccacgactccccctactccgactcctccagcaacaccagcccctactccgtgcagcagcgtgctgggcacaacaatgccaatgcctttgacaccaaggggagcctggagaatcactgcacggggaacccccgaaccatcatcgtgccacccctgaaaacccaggccagcgaagtattggtggagtgtgatagcctggtgccagtcaacaccagtcaccactcgtcctcctacaagtccaagtcctccagcaacgtgacctccaccagcggtcactcttcagggagctcatctggagccatcacctaccggcagcagcggccgggcccccacttccagcagcagcagccactcaatctcagccaggctcagcagcacatcaccacggaccgcactgggagccaccgaaggcagcaggcctacatcactcccaccatggcccaggctccgtactccttcccgcacaacagccccagccacggcactgtgcacccgcatctggctgcagccgctgccgctgcccacctccccacccagccccacctctacacctacactgcgccggcggccctgggctccaccggcaccgtggcccacctggtggcctcgcaaggctctgcgcgccacaccgtgcagcacactgcctacccagccagcatcgtccaccaggtccccgtgagcatgggcccccgggtcctgccctcgcccaccatccacccgagtcagtatccagcccaatttgcccaccagacctacatcagcgcctcgccagcctccaccgtctacactggatacccactgagccccgccaaggtcaaccagtacccttacatataaacactggaggggagggagggagggagggagggagagaatggcccgagggaggagggagagaaggagggaggcgctcctgggaccgtgggcgctggccttttatactgaagatgccaccccaagcagatgttcccgtcagcgctgccctgagtcagtcggtcccccgtttctgctctcctcccttttgtgttcctgctcacttcaagcttcttccatggactttccagggcacagtcatctctagcccccaaatcatctcttcatcctctgtgtgtgcatttttttaaccaaatgaaatagacaagaaagtcatactttggggcagcagaatttctaatttagtagaatcactgtatagagatagatgttgatatatatgtttgtgtatatatatcaaaccaaattggataggagaagtatagctttacagatgaggagaaggagctctttagaggtcggagtcaagactggtgtcttggacgtgcatgggctgtgtcccaggccactccgcacacatggggctgaggcgtggcgccgggcccttgtcatccacctcaccacggcagagccagcaggccctgtagggtgctgctgctgtctcactgggtcccagcttcaagcgcatcagtgggtgacgggggcaacaaatcagagtgactggaagtttccatcccgttttgctttgaccacgtgtactgagctgcagcctctgatactctgtcacgtttccaaaaatggtatccattaggatagaaagagaatggatctgcagaaatgtttacctttcaactgctcatgaattcaggacactggatagaaagactcactccccaaaatgagaacagggaagaggagacccggcgacactaagtcaccaggtccaaggaacgtggctccctccccagggtcatctcacctagatctttctctcccaggtcatctcagctcaatctcaataaccctatgaaagccctggtctgttgtgttccttcaccgtacggtttctgtaataaaaagtgttaatccatgttaatctgtgtgaaaattattgcgtgcaacagtattttctcgtgtacctctttttcctatgtgaattgtccctcttttttatttataaatgtctacttttgtttttttaaagacaaaccaatgtgttgtagacctatatgtaacctattccttagtctcatattataggtatgttataagaatggatattttacttggctttagaatgttttacaagaaaactaattcttaactgatcaagtccttgctactaaaatgcttgtgtttttcatcatgacgtcgtgtgcttctaaattaatcattttcgttgtagaaaaatggagtgaatttatattagtcttggaaactaataatagcattgtaaatttatgagatgattttaacagaaaaaatatagaagaatatagttattttaattgtaatattactaactgtagggtgagaaaaaggggggggggtcccattgtggtgaactatgttatagcttgttactcatagtttctttttgatcattttttcggtctccgaggtgaaatgacttattaattaaaatttgtaaactcacatatgcatattgtatatgtgtagaaatgtaatcacactttgtcttggaattacattaaactgtttgaaatcactgta

SEQ ID NO: 352172 - DNA, 3500 bp, Homo sapiens
aaaaaaaaagaagtagaggtggaagaaagacaagacttagaggaacaaaagaatgttttcttttgagatactcttctcaaagaaatagcaacaattgtataaacaggaaaaccagccagctttcatgataaaaggaaggcgtgtctcttgccctggtatgagattaacagaaatacagatgcatttttattttgattgaaagatggtgagaatgtagaaatgcttaggactagatttttaattttttaaaataactattatcatttattatgaaatatttgttcagttgttttgagtgggtttcttgttccttttttcatttaaaaccttctttgttgactggctccaggcttgtttgcctaaattcttaggtagtttacacaagttctagaatcttttagaactttaactccattggaagcaaacctaactaatcggagtttgagatcctggttggtttcaataggtattctggaattctggcagaacacctaaagatttttttttttttagaaggttttagatacattatcttacacaaactgtgacctaatggcaataattacctcaaatgtgggcattcatcctggttttagccttttttgaaatcatgtagccagcttgatcttggaatttaaagactatgaattctctggtgggctgaaaataatgattacttcatacccccggtcatcgttgcttaagtgaattctgaaaatagctcatctttacaacaaaaattaaaccaaggaagagattattctttgtgtgttgtactcaaatgcgatgttcaaatgcacatgttaagtatatatgtttttagctactgtaaaatgctgttagccttctaagctatcaaaacagtcacattttaaatgagtaaactaaacaattgactgtggatacttaagcatatttctggctacgttttatagttaaagtgttttatagtttacatttagactggtactttttaaagaaaagttctgtttataactgacatccgcaaaccccagtgaatgcctcttagttggaggttgtgtctcccccaaggcaagtgtgttgtcccagactcttctgtagtccagcatgcgcacttccctctggattattactttccacgtgaactcaagagaacatgaaaggcaatccagatggagggaaaaggtgtgagtccgcagcccgggccagatgcgaaggtctcatgcgtgtcgtctaaacacttgtcttcaaggccttctctctgacatcttggaagagtcattgagaacagataacctggttcattgatttttgtcttgatttgaatatttaacttattaatagatccactgatttccaggcaccaggcagtagaagagactgggattcaggtgaccatgaaggcacagctgctacttctgggccgggggtgatattttgatcagcgttttgtaggggaggaccatatacccctattcccatggtcgctggctgggttttccatatatctgctgtcatttattcgttttccccttaaaagcaaaatcaatgtaaaaggctatgtttacgttttactcattgtccagcttagactcaaagtctagttcggtgggagggggaccttagcatcctctcagagatggtcagggctgagcaggaggaggcagagacagaggggcagctcagcctggtccattgagacccactctaaacagacatcatatttggaacaagaagatgcttcgagacaggaatgggccccactgtcatgcagaaacagactgggggaatggcagtttccctgagtcttggtttcttttatgttttctcttgtgccaccaccaaactgcagaggacctgctgtgacctaaagggcattcctttagcagataagaccttgaaaactgcaaaacacctgggaccagggagcttttaaaaaatacaaaaaaataccacatttgctttttccctgtgaactgtattgacagcgtgttcttaggacagtcttttggtggaaatgttactgtaaaatagttttcatctcacccctcctaatcatactcccactttcctgtttgtgtggtggtgttgctgttttttcctttacatgaattaaccaaatgaattttgtgtcattgtttttggggcttatatttttaaaacatagaaattgccttttgttcatttgaaaagtaagtatgttgtatctgaaaaagggctctgcctctgctctccctcgcttccttgtaaccaatctccaaacgaatctctcctggcaccgcccccttccttatatagggtcactgtccccggggccacctctgcctccaccctgctgtcaccactgccctgggccaaggcacccaggactcccagaaagcgcgagagccagcaagaaggccccactcagccttgagactggtggtcacacctccctgtcagagtcgcctgctgggctgaaggggcaatggattgtcattgttgaaattgtttggctcaggttataaggaggaacttgggaagtagaaagtgacttgaccatgtgcatccttggtagcttcctgtaactaacaaatggaacagagagcacacccccgccccgccccaccccaagcagatgttcccgtcagcgctgccctgagtcagtcggtcccccgtttctgctctcctcccttttgtgttcctgctcacttcaagcttcttccatggactttccagggcacagtcatctctagcccccaaatcatctcttcatcctctgtgtgtgcatttttttaaccaaatgaaatagacaagaaagtcatactttggggcagcagaatttctaatttagtagaatcactgtatagagatagatgttgatatatatgtttgtgtatatatatcaaaccaaattggataggagaagtatagctttacagatgaggagaaggagctctttagaggtcggagtcaagactggtgtcttggacgtgcatgggctgtgtcccaggccactccgcacacatggggctgaggcgtggcgccgggcccttgtcatccacctcaccacggcagagccagcaggccctgtagggtgctgctgctgtctcactgggtcccagcttcaagcgcatcagtgggtgacgggggcaacaaatcagagtgactggaagtttccatcccgttttgctttgaccacgtgtactgagctgcagcctctgatactctgtcacgtttccaaaaatggtatccattaggatagaaagagaatggatctgcagaaatgtttacctttcaactgctcatgaattcaggacactggatagaaagactcactccccaaaatgagaacagggaagaggagacccggcgacactaagtcaccaggtccaaggaacgtggctccctccccagggtcatctcacctagatctttctctcccaggtcatctcaagtcaaatcttaaaaaaccccaaaaaaaaccccctgggtctggttggggtttcctttaaccggtaccgggtttatcttgtaaa

SEQ ID NO: 352173 - DNA, 3779 bp, Homo sapiens
cgctccgcccgcccggccgccccgagccccgagccccgagccccccgcgccgggcccgggcggcagcggcggcggcggcggcggcggcgcgcccggccccctcccccggcgccggccacgggaggcggtgatgcgggcgcgggcggcctcggctgcgccgagagcggagacacaggctcaagatggcagattccgactgaggctgggggggccgagctcgcgcgccgctttcccgtccccgttgccatgaaccgcggacaccccggccccgatggcccccgtgtacgaaggtatggcctcacatgtgcaagttttctcccctcacacccttcaatcaagtgccttctgtagtgtgaagaaactgaaaatagagccgagttccaactgggacatgactgggtacggctcccacagcaaagtgtatagccagagcaagaacatccccctgtcgcagccagccaccacaaccgtcagcacctccttgccggtcccaaacccaagcctaccttacgagcagaccatcgtcttcccaggaagcaccgggcacatcgtggtcacctcagcaagcagcacttctgtcaccgggcaagtcctcggcggaccacacaacctaatgcgtcgaagcactgtgagcctccttgatacctaccaaaaatgtggactcaagcgtaagagcgaggagatcgagaacacaagcagcgtgcagatcatcgaggagcatccacccatgattcagaataatgcaagcggggccactgtcgccactgccaccacgtctactgccacctccaaaaacagcggctccaacagcgagggcgactatcagctggtgcagcatgaggtgctgtgctccatgaccaacacctacgaggtcttagagttcttgggccgagggacgtttggacaagtggtcaagtgctggaaacggggcaccaatgagatcgtagccatcaagatcctgaagaaccgcccatcctatgcccgacaaggtcagattgaagtgagcatcctggcccggttgagcacggagagtgccgatgactataacttcgtccgggcctacgaatgcttccagcacaagaaccacacgtgcttggtcttcgagatgttggagcagaacctctatgactttctgaagcaaaacaagtttagccccttgcccctcaaatacattcgcccagttctccagcaggtagccacagccctgatgaaactcaaaagcctaggtcttatccacgctgacctcaaaccagaaaacatcatgctggtggatccatctagacaaccatacagagtcaaggtcatcgactttggttcagccagccacgtctccaaggctgtgtgctccacctacttgcagtccagatattacagggcccctgagatcatccttggtttaccattttgtgaggcaattgacatgtggtccctgggctgtgttattgcagaattgttcctgggttggccgttatatccaggagcttcggagtatgatcagattcggtatatttcacaaacacagggtttgcctgctgaatatttattaagcgccgggacaaagacaactaggtttttcaaccgtgacacggactcaccatatcctttgtggagactgaagacaccagatgaccatgaagcagagacagggattaagtcaaaagaagcaagaaagtacattttcaactgtttagatgatatggcccaggtgaacatgacgacagatttggaagggagcgacatgttggtagaaaaggctgaccggcgggagttcattgacctgttgaagaagatgctgaccattgatgctgacaagagaatcactccaatcgaaaccctgaaccatccctttgtcaccatgacacacttactcgattttccccacagcacacacgtcaaatcatgtttccagaacatggagatctgcaagcgtcgggtgaatatgtatgacacggtgaaccagagcaaaacccctttcatcacgcacgtggcccccagcacgtccaccaacctgaccatgacctttaacaaccagctgaccactgtccacaaccagccctcagcggcatccatggctgcagtggcccagcggagcatgcccctgcagacaggaacagcccagatttgtgcccggcctgacccgttccagcaagctctcatcgtgtgtccccccggcttccaaggcttgcaggcctctccctctaagcacgctggctactcggtgcgaatggaaaatgcagttcccatcgtcactcaagccccaggagctcagcctcttcagatccaaccaggtctgcttgcccagcaggcttggccaagtgggacccagcagatcctgcttcccccagcatggcagcaactgactggagtggccacccacacatcagtgcagcatgccaccgtgattcccgagaccatggcaggcacccagcagctggcggactggagaaatacgcatgctcacggaagccattataatcccatcatgcagcagcctgcactattgaccggtcatgtgacccttccagcagcacagcccttaaatgtgggtgtggcccacgtgatgcggcagcagccaaccagcaccacctcctcccggaagagtaagcagcaccagtcatctgtgagaaatgtctccacctgtgaggtgtcctcctctcaggccatcagctccccacagcgatccaagcgtgtcaaggagaacacacctccccgctgtgccatggtgcacagtagcccggcctgcagcacctcggtcacctgtgggtggggcgacgtggcctccagcaccacccgggaacggcagcggcagacaattgtcattcccgacactcccagccccacggtcagcgtcatcaccatcagcagtgacacggacgaggaggaggaacagaaacacgcccccaccagcactgtctccaagcaaagaaaaaacgtcatcagctgtgtcacagtccacgactccccctactccgactcctccagcaacaccagcccctactccgtgcagcagcgtgctgggcacaacaatgccaatgcctttgacaccaaggggagcctggagaatcactgcacggggaacccccgaaccatcatcgtgccacccctgaaaacccaggccagcgaagtattggtggagtgtgatagcctggtgccagtaatttggggccaggacagggcaggaacctctccctggagagtggttttcctgcttttctgctgctagaaatgttgctgtatgggagctagtacaatagaaagtgcccagtgactgcaggcgacccttaccgaggattttattcaagtatccaggggaggcttctgctgaacagcacattgtataagcagcgttttccttctttaatcctgtaatcaatacctctctgcctttacaatggctctgcttccaactaggttgattaatagaaaataaaagcctcctggttctttatgcctgagcctggaagaatacctggtctggggagttcctggctgacatctagcaccactctctgccaggaagccctggtggtcagatgggcttcttgtgtaggaagaacctcctccgagtcttgctagggaagggtgaaattggcccctctcagcccctcctcggaatcagctgctgggcggcgagaccaagccatgtgtgtttctctgctcatgcactgctatcttcagaggactcctcctgtcccgcgaaggcttgtcttgaaaattgggccctggaataaaggctgagaacgtaaccttctgaataaactcagtggctcactgtagat

SEQ ID NO: 352174 - DNA, 2880 bp, Homo sapiens
cgctccgcccgcccggccgccccgagccccgagccccgagccccccgcgccgggcccgggcggcagcggcggcggcggcggcggcggcgcgcccggccccctcccccggcgccggccacgggaggcggtgatgcgggcgcgggcggcctcggctgcgccgagagcggagacacaggctcaagatggcagattccgactgaggctgggggggccgagctcgcgcgccgctttcccgtccccgttgccatgaaccgcggacaccccggccccgatggcccccgtgtacgaaggtatggcctcacatgtgcaagttttctcccctcacacccttcaatcaagtgccttctgtagtgtgaagaaactgaaaatagagccgagttccaactgggacatgactgggtacggctcccacagcaaagtgtatagccagagcaagaacatccccctgtcgcagccagccaccacaaccgtcagcacctccttgccggtcccaaacccaagcctaccttacgagcagaccatcgtcttcccaggaagcaccgggcacatcgtggtcacctcagcaagcagcacttctgtcaccgggcaagtcctcggcggaccacacaacctaatgcgtcgaagcactgtgagcctccttgatacctaccaaaaatgtggactcaagcgtaagagcgaggagatcgagaacacaagcagcgtgcagatcatcgaggagcatccacccatgattcagaataatgcaagcggggccactgtcgccactgccaccacgtctactgccacctccaaaaacagcggctccaacagcgagggcgactatcagctggtgcagcatgaggtgctgtgctccatgaccaacacctacgaggtcttagagttcttgggccgagggacgtttggacaagtggtcaagtgctggaaacggggcaccaatgagatcgtagccatcaagatcctgaagaaccgcccatcctatgcccgacaaggtcagattgaagtgagcatcctggcccggttgagcacggagagtgccgatgactataacttcgtccgggcctacgaatgcttccagcacaagaaccacacgtgcttggtcttcgagatgttggagcagaacctctatgactttctgaagcaaaacaagtttagccccttgcccctcaaatacattcgcccagttctccagcaggtagccacagccctgatgaaactcaaaagcctaggtcttatccacgctgacctcaaaccagaaaacatcatgctggtggatccatctagacaaccatacagagtcaaggtcatcgactttggttcagccagccacgtctccaaggctgtgtgctccacctacttgcagtccagatattacagggcccctgagatcatccttggtttaccattttgtgaggcaattgacatgtggtccctgggctgtgttattgcagaattgttcctgggttggccgttatatccaggagcttcggagtatgatcagattcggtatatttcacaaacacagggtttgcctgctgaatatttattaagcgccgggacaaagacaactaggtttttcaaccgtgacacggactcaccatatcctttgtggagactgaagacaccagatgaccatgaagcagagacagggattaagtcaaaagaagcaagaaagtacattttcaactgtttagatgatatggcccaggtgaacatgacgacagatttggaagggagcgacatgttggtagaaaaggctgaccggcgggagttcattgacctgttgaagaagatgctgaccattgatgctgacaagagaatcactccaatcgaaaccctgaaccatccctttgtcaccatgacacacttactcgattttccccacagcacacacgtcaaatcatgtttccagaacatggagatctgcaagcgtcgggtgaatatgtatgacacggtgaaccagagcaaaacccctttcatcacgcacgtggcccccagcacgtccaccaacctgaccatgacctttaacaaccagctgaccactgtccacaaccagccctcagcggcatccatggctgcagtggcccagcggagcatgcccctgcagacaggaacagcccagatttgtgcccggcctgacccgttccagcaagctctcatcgtgtgtccccccggcttccaaggcttgcaggcctctccctctaagcacgctggctactcggtgcgaatggaaaatgcagttcccatcgtcactcaagccccaggagctcagcctcttcagatccaaccaggtctgcttgcccagcaggcttggccaagtgggacccagcagatcctgcttcccccagcatggcagcaactgactggagtggccacccacacatcagtgcagcatgccaccgtgattcccgagaccatggcaggcacccagcagctggcggactggagaaatacgcatgctcacggaagccattataatcccatcatgcagcagcctgcactattgaccggtcatgtgacccttccagcagcacagcccttaaatgtgggtgtggcccacgtgatgcggcagcagccaaccagcaccacctcctcccggaagagtaagcagcaccagtcatctgtgagaaatgtctccacctgtgaggtgtcctcctctcaggccatcagctccccacagcgatccaagcgtgtcaaggagaacacacctccccgctgtgccatggtgcacagtagcccggcctgcagcacctcggtcacctgtgggtggggcgacgtggcctccagcaccacccgggaacggcagcggcagacaattgtcattcccgacactcccagccccacggtcaacttgtctggagtagggatcctctagatcacctt

SEQ ID NO: 352175 - DNA, 2363 bp, Homo sapiens
cgctccgcccgcccggccgccccgagccccgagccccgagccccccgcgccgggcccgggcggcagcggcggcggcggcggcggcggcgcgcccggccccctcccccggcgccggccacgggaggcggtgatgcgggcgcgggcggcctcggctgcgccgagagcggagacacaggctcaagatggcagattccgactgaggctgggggggccgagctcgcgcgccgctttcccgtccccgttgccatgaaccgcggacaccccggccccgatggcccccgtgtacgaaggtatggcctcacatgtgcaagttttctcccctcacacccttcaatcaagtgccttctgtagtgtgaagaaactgaaaatagagccgagttccaactgggacatgactgggtacggctcccacagcaaagtgtatagccagagcaagaacatccccctgtcgcagccagccaccacaaccgtcagcacctccttgccggtcccaaacccaagcctaccttacgagcagaccatcgtcttcccaggaagcaccgggcacatcgtggtcacctcagcaagcagcacttctgtcaccgggcaagtcctcggcggaccacacaacctaatgcgtcgaagcactgtgagcctccttgatacctaccaaaaatgtggactcaagcgtaagagcgaggagatcgagaacacaagcagcgtgcagatcatcgaggagcatccacccatgattcagaataatgcaagcggggccactgtcgccactgccaccacgtctactgccacctccaaaaacagcggctccaacagcgagggcgactatcagctggtgcagcatgaggtgctgtgctccatgaccaacacctacgaggtcttagagttcttgggccgagggacgtttggacaagtggtcaagtgctggaaacggggcaccaatgagatcgtagccatcaagatcctgaagaaccgcccatcctatgcccgacaaggtcagattgaagtgagcatcctggcccggttgagcacggagagtgccgatgactataacttcgtccgggcctacgaatgcttccagcacaagaaccacacgtgcttggtcttcgagatgttggagcagaacctctatgactttctgaagcaaaacaagtttagccccttgcccctcaaatacattcgcccagttctccagcaggtagccacagccctgatgaaactcaaaagcctaggtcttatccacgctgacctcaaaccagaaaacatcatgctggtggatccatctagacaaccatacagagtcaaggtcatcgactttggttcagccagccacgtctccaaggctgtgtgctccacctacttgcagtccagatattacagggcccctgagatcatccttggtttaccattttgtgaggcaattgacatgtggtccctgggctgtgttattgcagaattgttcctgggttggccgttatatccaggagcttcggagtatgatcagattcggtatatttcacaaacacagggtttgcctgctgaatatttattaagcgccgggacaaagacaactaggtttttcaaccgtgacacggactcaccatatcctttgtggagactgaagacaccagatgaccatgaagcagagacagggattaagtcaaaagaagcaagaaagtacattttcaactgtttagatgatatggcccaggtgaacatgacgacagatttggaagggagcgacatgttggtagaaaaggctgaccggcgggagttcattgacctgttgaagaagatgctgaccattgatgctgacaagagaatcactccaatcgaaaccctgaaccatccctttgtcaccatgacacacttactcgattttccccacagcacacacgtcaaatcatgtttccagaacatggagatctgcaagcgtcgggtgaatatgtatgacacggtgaaccagagcaaaacccctttcatcacgcacgtggcccccagcacgtccaccaacctgaccatgacctttaacaaccagctgaccactgtccacaaccagccctcagcggcatccatggctgcagtggcccagcggagcatgcccctgcagacaggaacagcccagatttgtgcccggcctgacccgttccagcaagctctcatcgtgtgtccccccggcttccaaggcttgcaggcctctccctctaagcacgctggctactcggtgcgaatggaaaatgcagttcccatcgtcactcaagccccaggagctcagcctcttcagatccaaccaggtctgcttgcccagcaggcttggcccaaaaaacccctccggggatcctctaaaatccgccctcaagcaagccagc

SEQ ID NO: 352176 - DNA, 2245 bp, Homo sapiens
cgctccgcccgcccggccgccccgagccccgagccccgagccccccgcgccgggcccgggcggcagcggcggcggcggcggcggcggcgcgcccggccccctcccccggcgccggccacgggaggcggtgatgcgggcgcgggcggcctcggctgcgccgagagcggagacacaggctcaagatggcagattccgactgaggctgggggggccgagctcgcgcgccgctttcccgtccccgttgccatgaaccgcggacaccccggccccgatggcccccgtgtacgaaggtatggcctcacatgtgcaagttttctcccctcacacccttcaatcaagtgccttctgtagtgtgaagaaactgaaaatagagccgagttccaactgggacatgactgggtacggctcccacagcaaagtgtatagccagagcaagaacatccccctgtcgcagccagccaccacaaccgtcagcacctccttgccggtcccaaacccaagcctaccttacgagcagaccatcgtcttcccaggaagcaccgggcacatcgtggtcacctcagcaagcagcacttctgtcaccgggcaagtcctcggcggaccacacaacctaatgcgtcgaagcactgtgagcctccttgatacctaccaaaaatgtggactcaagcgtaagagcgaggagatcgagaacacaagcagcgtgcagatcatcgaggagcatccacccatgattcagaataatgcaagcggggccactgtcgccactgccaccacgtctactgccacctccaaaaacagcggctccaacagcgagggcgactatcagctggtgcagcatgaggtgctgtgctccatgaccaacacctacgaggtcttagagttcttgggccgagggacgtttggacaagtggtcaagtgctggaaacggggcaccaatgagatcgtagccatcaagatcctgaagaaccgcccatcctatgcccgacaaggtcagattgaagtgagcatcctggcccggttgagcacggagagtgccgatgactataacttcgtccgggcctacgaatgcttccagcacaagaaccacacgtgcttggtcttcgagatgttggagcagaacctctatgactttctgaagcaaaacaagtttagccccttgcccctcaaatacattcgcccagttctccagcaggtagccacagccctgatgaaactcaaaagcctaggtcttatccacgctgacctcaaaccagaaaacatcatgctggtggatccatctagacaaccatacagagtcaaggtcatcgactttggttcagccagccacgtctccaaggctgtgtgctccacctacttgcagtccagatattacagggcccctgagatcatccttggtttaccattttgtgaggcaattgacatgtggtccctgggctgtgttattgcagaattgttcctgggttggccgttatatccaggagcttcggagtatgatcagattcggtatatttcacaaacacagggtttgcctgctgaatatttattaagcgccgggacaaagacaactaggtttttcaaccgtgacacggactcaccatatcctttgtggagactgaagacaccagatgaccatgaagcagagacagggattaagtcaaaagaagcaagaaagtacattttcaactgtttagatgatatggcccaggtgaacatgacgacagatttggaagggagcgacatgttggtagaaaaggctgaccggcgggagttcattgacctgttgaagaagatgctgaccattgatgctgacaagagaatcactccaatcgaaaccctgaaccatccctttgtcaccatgacacacttactcgattttccccacagcacacacgtcaaatcatgtttccagaacatggagatctgcaagcgtcgggtgaatatgtatgacacggtgaaccagagcaaaacccctttcatcacgcacgtggcccccagcacgtccaccaacctgaccatgacctttaacaaccagctgaccactgtccacaaccagccctcagcggcatccatggctgcagtggcccagcggagcatgcccctgcagacaggaacagcccagatttgtgcccggcctgacccgttccagcaagctctcatcgtgtgtccccccggcttccaaggcttgcaggcctctccctctccccacagcacacacgtcaaatcatgtttccagaacatggagatc

SEQ ID NO: 352177 - DNA, 2154 bp, Homo sapiens
cgctccgcccgcccggccgccccgagccccgagccccgagccccccgcgccgggcccgggcggcagcggcggcggcggcggcggcggcgcgcccggccccctcccccggcgccggccacgggaggcggtgatgcgggcgcgggcggcctcggctgcgccgagagcggagacacaggctcaagatggcagattccgactgaggctgggggggccgagctcgcgcgccgctttcccgtccccgttgccatgaaccgcggacaccccggccccgatggcccccgtgtacgaaggtatggcctcacatgtgcaagttttctcccctcacacccttcaatcaagtgccttctgtagtgtgaagaaactgaaaatagagccgagttccaactgggacatgactgggtacggctcccacagcaaagtgtatagccagagcaagaacatccccctgtcgcagccagccaccacaaccgtcagcacctccttgccggtcccaaacccaagcctaccttacgagcagaccatcgtcttcccaggaagcaccgggcacatcgtggtcacctcagcaagcagcacttctgtcaccgggcaagtcctcggcggaccacacaacctaatgcgtcgaagcactgtgagcctccttgatacctaccaaaaatgtggactcaagcgtaagagcgaggagatcgagaacacaagcagcgtgcagatcatcgaggagcatccacccatgattcagaataatgcaagcggggccactgtcgccactgccaccacgtctactgccacctccaaaaacagcggctccaacagcgagggcgactatcagctggtgcagcatgaggtgctgtgctccatgaccaacacctacgaggtcttagagttcttgggccgagggacgtttggacaagtggtcaagtgctggaaacggggcaccaatgagatcgtagccatcaagatcctgaagaaccgcccatcctatgcccgacaaggtcagattgaagtgagcatcctggcccggttgagcacggagagtgccgatgactataacttcgtccgggcctacgaatgcttccagcacaagaaccacacgtgcttggtcttcgagatgttggagcagaacctctatgactttctgaagcaaaacaagtttagccccttgcccctcaaatacattcgcccagttctccagcaggtagccacagccctgatgaaactcaaaagcctaggtcttatccacgctgacctcaaaccagaaaacatcatgctggtggatccatctagacaaccatacagagtcaaggtcatcgactttggttcagccagccacgtctccaaggctgtgtgctccacctacttgcagtccagatattacagggcccctgagatcatccttggtttaccattttgtgaggcaattgacatgtggtccctgggctgtgttattgcagaattgttcctgggttggccgttatatccaggagcttcggagtatgatcagattcggtatatttcacaaacacagggtttgcctgctgaatatttattaagcgccgggacaaagacaactaggtttttcaaccgtgacacggactcaccatatcctttgtggagactgaagacaccagatgaccatgaagcagagacagggattaagtcaaaagaagcaagaaagtacattttcaactgtttagatgatatggcccaggtgaacatgacgacagatttggaagggagcgacatgttggtagaaaaggctgaccggcgggagttcattgacctgttgaagaagatgctgaccattgatgctgacaagagaatcactccaatcgaaaccctgaaccatccctttgtcaccatgacacacttactcgattttccccacagcacacacgtcaaatcatgtttccagaacatggagatctgcaagcgtcgggtgaatatgtatgacacggtgaaccagagcaaaacccctttcatcacgcacgtggcccccagcacgtccaccaacctgaccatgacctttaacaaccagctgaccactgtccacaaccaggtaagtgggaaacagaagggaaggagaggcggggctgcacagtgtgagcctcaggacttgtattttccatcatacctagtcaggaggcaaaattcctgctg

SEQ ID NO: 352178 - DNA, 1959 bp, Homo sapiens
cgctccgcccgcccggccgccccgagccccgagccccgagccccccgcgccgggcccgggcggcagcggcggcggcggcggcggcggcgcgcccggccccctcccccggcgccggccacgggaggcggtgatgcgggcgcgggcggcctcggctgcgccgagagcggagacacaggctcaagatggcagattccgactgaggctgggggggccgagctcgcgcgccgctttcccgtccccgttgccatgaaccgcggacaccccggccccgatggcccccgtgtacgaaggtatggcctcacatgtgcaagttttctcccctcacacccttcaatcaagtgccttctgtagtgtgaagaaactgaaaatagagccgagttccaactgggacatgactgggtacggctcccacagcaaagtgtatagccagagcaagaacatccccctgtcgcagccagccaccacaaccgtcagcacctccttgccggtcccaaacccaagcctaccttacgagcagaccatcgtcttcccaggaagcaccgggcacatcgtggtcacctcagcaagcagcacttctgtcaccgggcaagtcctcggcggaccacacaacctaatgcgtcgaagcactgtgagcctccttgatacctaccaaaaatgtggactcaagcgtaagagcgaggagatcgagaacacaagcagcgtgcagatcatcgaggagcatccacccatgattcagaataatgcaagcggggccactgtcgccactgccaccacgtctactgccacctccaaaaacagcggctccaacagcgagggcgactatcagctggtgcagcatgaggtgctgtgctccatgaccaacacctacgaggtcttagagttcttgggccgagggacgtttggacaagtggtcaagtgctggaaacggggcaccaatgagatcgtagccatcaagatcctgaagaaccgcccatcctatgcccgacaaggtcagattgaagtgagcatcctggcccggttgagcacggagagtgccgatgactataacttcgtccgggcctacgaatgcttccagcacaagaaccacacgtgcttggtcttcgagatgttggagcagaacctctatgactttctgaagcaaaacaagtttagccccttgcccctcaaatacattcgcccagttctccagcaggtagccacagccctgatgaaactcaaaagcctaggtcttatccacgctgacctcaaaccagaaaacatcatgctggtggatccatctagacaaccatacagagtcaaggtcatcgactttggttcagccagccacgtctccaaggctgtgtgctccacctacttgcagtccagatattacagggcccctgagatcatccttggtttaccattttgtgaggcaattgacatgtggtccctgggctgtgttattgcagaattgttcctgggttggccgttatatccaggagcttcggagtatgatcagattcggtatatttcacaaacacagggtttgcctgctgaatatttattaagcgccgggacaaagacaactaggtttttcaaccgtgacacggactcaccatatcctttgtggagactgaagacaccagatgaccatgaagcagagacagggattaagtcaaaagaagcaagaaagtacattttcaactgtttagatgatatggcccaggtgaacatgacgacagatttggaagggagcgacatgttggtagaaaaggctgaccggcgggagttcattgacctgttgaagaagatgctgaccattgatgctgacaagagaatcactccaatcgaaaccctgaaccatccctttgtcaccatgacacacttactcgattttccccacagcacacacgtcaaatcatgtttccagaacatggagatctgcaagcgtcgggctgccctcctgcgcttcgatcttac

SEQ ID NO: 352179 - DNA, 3246 bp, Homo sapiens
cgctccgcccgcccggccgccccgagccccgagccccgagccccccgcgccgggcccgggcggcagcggcggcggcggcggcggcggcgcgcccggccccctcccccggcgccggccacgggaggcggtgatgcgggcgcgggcggcctcggctgcgccgagagcggagacacaggctcaagatggcagattccgactgaggctgggggggccgagctcgcgcgccgctttcccgtccccgttgccatgaaccgcggacaccccggccccgatggcccccgtgtacgaaggtatggcctcacatgtgcaagttttctcccctcacacccttcaatcaagtgccttctgtagtgtgaagaaactgaaaatagagccgagttccaactgggacatgactgggtacggctcccacagcaaagtgtatagccagagcaagaacatccccctgtcgcagccagccaccacaaccgtcagcacctccttgccggtcccaaacccaagcctaccttacgagcagaccatcgtcttcccaggaagcaccgggcacatcgtggtcacctcagcaagcagcacttctgtcaccgggcaagtcctcggcggaccacacaacctaatgcgtcgaagcactgtgagcctccttgatacctaccaaaaatgtggactcaagcgtaagagcgaggagatcgagaacacaagcagcgtgcagatcatcgaggagcatccacccatgattcagaataatgcaagcggggccactgtcgccactgccaccacgtctactgccacctccaaaaacagcggctccaacagcgagggcgactatcagctggtgcagcatgaggtgctgtgctccatgaccaacacctacgaggtcttagagttcttgggccgagggacgtttggacaagtggtcaagtgctggaaacggggcaccaatgagatcgtagccatcaagatcctgaagaaccgcccatcctatgcccgacaaggtcagattgaagtgagcatcctggcccggttgagcacggagagtgccgatgactataacttcgtccgggcctacgaatgcttccagcacaagaaccacacgtgcttggtcttcgagatgttggagcagaacctctatgactttctgaagcaaaacaagtttagccccttgcccctcaaatacattcgcccagttctccagcaggtagccacagccctgatgaaactcaaaagcctaggtcttatccacgctgacctcaaaccagaaaacatcatgctggtggatccatctagacaaccatacagagtcaaggtcatcgactttggttcagccagccacgtctccaaggctgtgtgctccacctacttgcagtccagatattacagggcccctgagatcatccttggtttaccattttgtgaggcaattgacatgtggtccctgggctgtgttattgcagaattgttcctgggttggccgttatatccaggagcttcggagtatgatcagattcggtatatttcacaaacacagggtttgcctgctgaatatttattaagcgccgggacaaagacaactaggtttttcaaccgtgacacggactcaccatatcctttgtggagactgaagacaccagatgaccatgaagcagagacagggattaagtcaaaagaagcaagaaagtacattttcaactgtttagatgatatggcccaggtgaacatgacgacagatttggaagggagcgacatgttggtagaaaaggctgaccggcgggagttcattgacctgttgaagaagatgctgaccattgatgctgacaagagaatcactccaatcgaaaccctgaaccatccctttgtcaccatgacacacttactcgattttccccacagcacacacgtcaaatcatgtttccagaacatggagatctgcaagcgtcgggtgaatatgtatgacacggtgaaccagagcaaaacccctttcatcacgcacgtggcccccagcacgtccaccaacctgaccatgacctttaacaaccagctgaccactgtccacaaccaggctccctcctctaccagtgccactatttccttagccaatcccgaagtctccatactaaactacccatctacactctaccagccctcagcggcatccatggctgcagtggcccagcggagcatgcccctgcagacaggaacagcccagatttgtgcccggcctgacccgttccagcaagctctcatcgtgtgtccccccggcttccaaggcttgcaggcctctccctctaagcacgctggctactcggtgcgaatggaaaatgcagttcccatcgtcactcaagccccaggagctcagcctcttcagatccaaccaggtctgcttgcccagcaggcttggccaagtgggacccagcagatcctgcttcccccagcatggcagcaactgactggagtggccacccacacatcagtgcagcatgccaccgtgattcccgagaccatggcaggcacccagcagctggcggactggagaaatacgcatgctcacggaagccattataatcccatcatgcagcagcctgcactattgaccggtcatgtgacccttccagcagcacagcccttaaatgtgggtgtggcccacgtgatgcggcagcagccaaccagcaccacctcctcccggaagagtaagcagcaccagtcatctgtgagcactgtctccaagcaaagaaaaaacgtcatcagctgtgtcacagtccacgactccccctactccgactcctccagcaacaccagcccctactccgtgcagcagcgtgctgggcacaacaatgccaatgcctttgacaccaaggggagcctggagaatcactgcacggggaacccccgaaccatcatcgtgccacccctgaaaacccaggccagcgaagtattggtggagtgtgatagcctggtgccagtaatttggggccaggacagggcaggaacctctccctggagagtggttttcctgcttttctgctgctagaaatgttgctgtatgggagctagtacaatagaaagtgcccagtgactgcaggcgacccttaccgaggattttattcaagtatccaggggaggcttctgctgaacagcacattgtataagcagcgttttccttctttaatcctgtaatcaatacctctctgcctttacaatggctctgcttccaactaggttgattaatagaaaataaaagcctcctggttcttt

SEQ ID NO: 352180 - DNA, 4062 bp, Homo sapiens
acccgctgatccgcttaagcacgtgtgcataggaaggaggagggatgggttggtgtggatgaagagagaagggaattgcaggtgtgcaggtcattgaagaatccaaatctcttccgaaatgtgggaaagagaccctctgtgagacacaggagttccaaggcttgagtcccagtgatgaggagctaagtcacgctaccaattggcttttgcctctcttgacagacaccagatgaccatgaagcagagacagggattaagtcaaaagaagcaagaaagtacattttcaactgtttagatgatatggcccaggtgaacatgacgacagatttggaagggagcgacatgttggtagaaaaggctgaccggcgggagttcattgacctgttgaagaagatgctgaccattgatgctgacaagagaatcactccaatcgaaaccctgaaccatccctttgtcaccatgacacacttactcgattttccccacagcacacacgtcaaatcatgtttccagaacatggagatctgcaagcgtcgggtgaatatgtatgacacggtgaaccagagcaaaacccctttcatcacgcacgtggcccccagcacgtccaccaacctgaccatgacctttaacaaccagctgaccactgtccacaaccagccctcagcggcatccatggctgcagtggcccagcggagcatgcccctgcagacaggaacagcccagatttgtgcccggcctgacccgttccagcaagctctcatcgtgtgtccccccggcttccaaggcttgcaggcctctccctctaagcacgctggctactcggtgcgaatggaaaatgcagttcccatcgtcactcaagccccaggagctcagcctcttcagatccaaccaggtctgcttgcccagcaggcttggccaagtgggacccagcagatcctgcttcccccagcatggcagcaactgactggagtggccacccacacatcagtgcagcatgccaccgtgattcccgagaccatggcaggcacccagcagctggcggactggagaaatacgcatgctcacggaagccattataatcccatcatgcagcagcctgcactattgaccggtcatgtgacccttccagcagcacagcccttaaatgtgggtgtggcccacgtgatgcggcagcagccaaccagcaccacctcctcccggaagagtaagcagcaccagtcatctgtgagaaatgtctccacctgtgaggtgtcctcctctcaggccatcagctccccacagcgatccaagcgtgtcaaggagaacacacctccccgctgtgccatggtgcacagtagcccggcctgcagcacctcggtcacctgtgggtggggcgacgtggcctccagcaccacccgggaacggcagcggcagacaattgtcattcccgacactcccagccccacggtcagcgtcatcaccatcagcagtgacacggacgaggaggaggaacagaaacacgcccccaccagcactgtctccaagcaaagaaaaaacgtcatcagctgtgtcacagtccacgactccccctactccgactcctccagcaacaccagcccctactccgtgcagcagcgtgctgggcacaacaatgccaatgcctttgacaccaaggggagcctggagaatcactgcacggggaacccccgaaccatcatcgtgccacccctgaaaacccaggccagcgaagtattggtggagtgtgatagcctggtgccagtcaacaccagtcaccactcgtcctcctacaagtccaagtcctccagcaacgtgacctccaccagcggtcactcttcagggagctcatctggagccatcacctaccggcagcagcggccgggcccccacttccagcagcagcagccactcaatctcagccaggctcagcagcacatcaccacggaccgcactgggagccaccgaaggcagcaggcctacatcactcccaccatggcccaggctccgtactccttcccgcacaacagccccagccacggcactgtgcacccgcatctggctgcagccgctgccgctgcccacctccccacccagccccacctctacacctacactgcgccggcggccctgggctccaccggcaccgtggcccacctggtggcctcgcaaggctctgcgcgccacaccgtgcagcacactgcctacccagccagcatcgtccaccaggtccccgtgagcatgggcccccgggtcctgccctcgcccaccatccacccgagtcagtatccagcccaatttgcccaccagacctacatcagcgcctcgccagcctccaccgtctacactggatacccactgagccccgccaaggtcaaccagtacccttacatataaacactggaggggagggagggagggagggagggagagaatggcccgagggaggagggagagaaggagggaggcgctcctgggaccgtgggcgctggccttttatactgaagatgccaccccaagcagatgttcccgtcagcgctgccctgagtcagtcggtcccccgtttctgctctcctcccttttgtgttcctgctcacttcaagcttcttccatggactttccagggcacagtcatctctagcccccaaatcatctcttcatcctctgtgtgtgcatttttttaaccaaatgaaatagacaagaaagtcatactttggggcagcagaatttctaatttagtagaatcactgtatagagatagatgttgatatatatgtttgtgtatatatatcaaaccaaattggataggagaagtatagctttacagatgaggagaaggagctctttagaggtcggagtcaagactggtgtcttggacgtgcatgggctgtgtcccaggccactccgcacacatggggctgaggcgtggcgccgggcccttgtcatccacctcaccacggcagagccagcaggccctgtagggtgctgctgctgtctcactgggtcccagcttcaagcgcatcagtgggtgacgggggcaacaaatcagagtgactggaagtttccatcccgttttgctttgaccacgtgtactgagctgcagcctctgatactctgtcacgtttccaaaaatggtatccattaggatagaaagagaatggatctgcagaaatgtttacctttcaactgctcatgaattcaggacactggatagaaagactcactccccaaaatgagaacagggaagaggagacccggcgacactaagtcaccaggtccaaggaacgtggctccctccccagggtcatctcacctagatctttctctcccaggtcatctcagctcaatctcaataaccctatgaaagccctggtctgttgtgttccttcaccgtacggtttctgtaataaaaagtgttaatccatgttaatctgtgtgaaaattattgcgtgcaacagtattttctcgtgtacctctttttcctatgtgaattgtccctcttttttatttataaatgtctacttttgtttttttaaagacaaaccaatgtgttgtagacctatatgtaacctattccttagtctcatattataggtatgttataagaatggatattttacttggctttagaatgttttacaagaaaactaattcttaactgatcaagtccttgctactaaaatgcttgtgtttttcatcatgacgtcgtgtgcttctaaattaatcattttcgttgtagaaaaatggagtgaatttatattagtcttggaaactaataatagcattgtaaatttatgagatgattttaacagaaaaaatatagaagaatatagttattttaattgtaatattactaactgtagggtgagaaaaaggggggggggtcccattgtggtgaactatgttatagcttgttactcatagtttctttttgatcattttttcggtctccgaggtgaaatgacttattaattaaaatttgtaaactcacatatgcatattgtatatgtgtagaaatgtaatcacactttgtcttggaattacattaaactgtttgaaatcactgta

SEQ ID NO: 352181 - DNA, 3507 bp, Homo sapiens
taatccccatcactcctttaggctccctcctctaccagtgccactatttccttagccaatcccgaagtctccatactaaactacccatctacactctaccagccctcagcggcatccatggctgcagtggcccagcggagcatgcccctgcagacaggaacagcccagatttgtgcccggcctgacccgttccagcaagctctcatcgtgtgtccccccggcttccaaggcttgcaggcctctccctctaagcacgctggctactcggtgcgaatggaaaatgcagttcccatcgtcactcaagccccaggagctcagcctcttcagatccaaccaggtctgcttgcccagcaggcttggccaagtgggacccagcagatcctgcttcccccagcatggcagcaactgactggagtggccacccacacatcagtgcagcatgccaccgtgattcccgagaccatggcaggcacccagcagctggcggactggagaaatacgcatgctcacggaagccattataatcccatcatgcagcagcctgcactattgaccggtcatgtgacccttccagcagcacagcccttaaatgtgggtgtggcccacgtgatgcggcagcagccaaccagcaccacctcctcccggaagagtaagcagcaccagtcatctgtgagaaatgtctccacctgtgaggtgtcctcctctcaggccatcagctccccacagcgatccaagcgtgtcaaggagaacacacctccccgctgtgccatggtgcacagtagcccggcctgcagcacctcggtcacctgtgggtggggcgacgtggcctccagcaccacccgggaacggcagcggcagacaattgtcattcccgacactcccagccccacggtcagcgtcatcaccatcagcagtgacacggacgaggaggaggaacagaaacacgcccccaccagcactgtctccaagcaaagaaaaaacgtcatcagctgtgtcacagtccacgactccccctactccgactcctccagcaacaccagcccctactccgtgcagcagcgtgctgggcacaacaatgccaatgcctttgacaccaaggggagcctggagaatcactgcacggggaacccccgaaccatcatcgtgccacccctgaaaacccaggccagcgaagtattggtggagtgtgatagcctggtgccagtcaacaccagtcaccactcgtcctcctacaagtccaagtcctccagcaacgtgacctccaccagcggtcactcttcagggagctcatctggagccatcacctaccggcagcagcggccgggcccccacttccagcagcagcagccactcaatctcagccaggctcagcagcacatcaccacggaccgcactgggagccaccgaaggcagcaggcctacatcactcccaccatggcccaggctccgtactccttcccgcacaacagccccagccacggcactgtgcacccgcatctggctgcagccgctgccgctgcccacctccccacccagccccacctctacacctacactgcgccggcggccctgggctccaccggcaccgtggcccacctggtggcctcgcaaggctctgcgcgccacaccgtgcagcacactgcctacccagccagcatcgtccaccaggtccccgtgagcatgggcccccgggtcctgccctcgcccaccatccacccgagtcagtatccagcccaatttgcccaccagacctacatcagcgcctcgccagcctccaccgtctacactggatacccactgagccccgccaaggtcaaccagtacccttacatataaacactggaggggagggagggagggagggagggagagaatggcccgagggaggagggagagaaggagggaggcgctcctgggaccgtgggcgctggccttttatactgaagatgccaccccaagcagatgttcccgtcagcgctgccctgagtcagtcggtcccccgtttctgctctcctcccttttgtgttcctgctcacttcaagcttcttccatggactttccagggcacagtcatctctagcccccaaatcatctcttcatcctctgtgtgtgcatttttttaaccaaatgaaatagacaagaaagtcatactttggggcagcagaatttctaatttagtagaatcactgtatagagatagatgttgatatatatgtttgtgtatatatatcaaaccaaattggataggagaagtatagctttacagatgaggagaaggagctctttagaggtcggagtcaagactggtgtcttggacgtgcatgggctgtgtcccaggccactccgcacacatggggctgaggcgtggcgccgggcccttgtcatccacctcaccacggcagagccagcaggccctgtagggtgctgctgctgtctcactgggtcccagcttcaagcgcatcagtgggtgacgggggcaacaaatcagagtgactggaagtttccatcccgttttgctttgaccacgtgtactgagctgcagcctctgatactctgtcacgtttccaaaaatggtatccattaggatagaaagagaatggatctgcagaaatgtttacctttcaactgctcatgaattcaggacactggatagaaagactcactccccaaaatgagaacagggaagaggagacccggcgacactaagtcaccaggtccaaggaacgtggctccctccccagggtcatctcacctagatctttctctcccaggtcatctcagctcaatctcaataaccctatgaaagccctggtctgttgtgttccttcaccgtacggtttctgtaataaaaagtgttaatccatgttaatctgtgtgaaaattattgcgtgcaacagtattttctcgtgtacctctttttcctatgtgaattgtccctcttttttatttataaatgtctacttttgtttttttaaagacaaaccaatgtgttgtagacctatatgtaacctattccttagtctcatattataggtatgttataagaatggatattttacttggctttagaatgttttacaagaaaactaattcttaactgatcaagtccttgctactaaaatgcttgtgtttttcatcatgacgtcgtgtgcttctaaattaatcattttcgttgtagaaaaatggagtgaatttatattagtcttggaaactaataatagcattgtaaatttatgagatgattttaacagaaaaaatatagaagaatatagttattttaattgtaatattactaactgtagggtgagaaaaaggggggggggtcccattgtggtgaactatgttatagcttgttactcatagtttctttttgatcattttttcggtctccgaggtgaaatgacttattaattaaaatttgtaaactcacatatgcatattgtatatgtgtagaaatgtaatcacactttgtcttggaattacattaaactgtttgaaatcactgta

SEQ ID NO: 352182 - DNA, 2438 bp, Homo sapiens
agatgaggctgatttgttactgcccggcctcaggcacatgtttcttcctggaagaccactgttctctggtggggtagcatcttctgggcagctgggaccctgccactgatctgacctctttctcctcccgccacatcaacaccagtcaccactcgtcctcctacaagtccaagtcctccagcaacgtgacctccaccagcggtcactcttcagggagctcatctggagccatcacctaccggcagcagcggccgggcccccacttccagcagcagcagccactcaatctcagccaggctcagcagcacatcaccacggaccgcactgggagccaccgaaggcagcaggcctacatcactcccaccatggcccaggctccgtactccttcccgcacaacagccccagccacggcactgtgcacccgcatctggctgcagccgctgccgctgcccacctccccacccagccccacctctacacctacactgcgccggcggccctgggctccaccggcaccgtggcccacctggtggcctcgcaaggctctgcgcgccacaccgtgcagcacactgcctacccagccagcatcgtccaccaggtccccgtgagcatgggcccccgggtcctgccctcgcccaccatccacccgagtcagtatccagcccaatttgcccaccagacctacatcagcgcctcgccagcctccaccgtctacactggatacccactgagccccgccaaggtcaaccagtacccttacatataaacactggaggggagggagggagggagggagggagagaatggcccgagggaggagggagagaaggagggaggcgctcctgggaccgtgggcgctggccttttatactgaagatgccaccccaagcagatgttcccgtcagcgctgccctgagtcagtcggtcccccgtttctgctctcctcccttttgtgttcctgctcacttcaagcttcttccatggactttccagggcacagtcatctctagcccccaaatcatctcttcatcctctgtgtgtgcatttttttaaccaaatgaaatagacaagaaagtcatactttggggcagcagaatttctaatttagtagaatcactgtatagagatagatgttgatatatatgtttgtgtatatatatcaaaccaaattggataggagaagtatagctttacagatgaggagaaggagctctttagaggtcggagtcaagactggtgtcttggacgtgcatgggctgtgtcccaggccactccgcacacatggggctgaggcgtggcgccgggcccttgtcatccacctcaccacggcagagccagcaggccctgtagggtgctgctgctgtctcactgggtcccagcttcaagcgcatcagtgggtgacgggggcaacaaatcagagtgactggaagtttccatcccgttttgctttgaccacgtgtactgagctgcagcctctgatactctgtcacgtttccaaaaatggtatccattaggatagaaagagaatggatctgcagaaatgtttacctttcaactgctcatgaattcaggacactggatagaaagactcactccccaaaatgagaacagggaagaggagacccggcgacactaagtcaccaggtccaaggaacgtggctccctccccagggtcatctcacctagatctttctctcccaggtcatctcagctcaatctcaataaccctatgaaagccctggtctgttgtgttccttcaccgtacggtttctgtaataaaaagtgttaatccatgttaatctgtgtgaaaattattgcgtgcaacagtattttctcgtgtacctctttttcctatgtgaattgtccctcttttttatttataaatgtctacttttgtttttttaaagacaaaccaatgtgttgtagacctatatgtaacctattccttagtctcatattataggtatgttataagaatggatattttacttggctttagaatgttttacaagaaaactaattcttaactgatcaagtccttgctactaaaatgcttgtgtttttcatcatgacgtcgtgtgcttctaaattaatcattttcgttgtagaaaaatggagtgaatttatattagtcttggaaactaataatagcattgtaaatttatgagatgattttaacagaaaaaatatagaagaatatagttattttaattgtaatattactaactgtagggtgagaaaaaggggggggggtcccattgtggtgaactatgttatagcttgttactcatagtttctttttgatcattttttcggtctccgaggtgaaatgacttattaattaaaatttgtaaactcacatatgcatattgtatatgtgtagaaatgtaatcacactttgtcttggaattacattaaactgtttgaaatcactgta

SEQ ID NO: 352183 - DNA, 2385 bp, Homo sapiens
agtcgtggacctgtgacacagctgatgactgttttttctttgcttggagacagtgctggtgggggcgtgatagcctggtgcctcaacaccagtcaccactcgtcctcctacaagtccaagtcctccagcaacgtgacctccaccagcggtcactcttcagggagctcatctggagccatcacctaccggcagcagcggccgggcccccacttccagcagcagcagccactcaatctcagccaggctcagcagcacatcaccacggaccgcactgggagccaccgaaggcagcaggcctacatcactcccaccatggcccaggctccgtactccttcccgcacaacagccccagccacggcactgtgcacccgcatctggctgcagccgctgccgctgcccacctccccacccagccccacctctacacctacactgcgccggcggccctgggctccaccggcaccgtggcccacctggtggcctcgcaaggctctgcgcgccacaccgtgcagcacactgcctacccagccagcatcgtccaccaggtccccgtgagcatgggcccccgggtcctgccctcgcccaccatccacccgagtcagtatccagcccaatttgcccaccagacctacatcagcgcctcgccagcctccaccgtctacactggatacccactgagccccgccaaggtcaaccagtacccttacatataaacactggaggggagggagggagggagggagggagagaatggcccgagggaggagggagagaaggagggaggcgctcctgggaccgtgggcgctggccttttatactgaagatgccaccccaagcagatgttcccgtcagcgctgccctgagtcagtcggtcccccgtttctgctctcctcccttttgtgttcctgctcacttcaagcttcttccatggactttccagggcacagtcatctctagcccccaaatcatctcttcatcctctgtgtgtgcatttttttaaccaaatgaaatagacaagaaagtcatactttggggcagcagaatttctaatttagtagaatcactgtatagagatagatgttgatatatatgtttgtgtatatatatcaaaccaaattggataggagaagtatagctttacagatgaggagaaggagctctttagaggtcggagtcaagactggtgtcttggacgtgcatgggctgtgtcccaggccactccgcacacatggggctgaggcgtggcgccgggcccttgtcatccacctcaccacggcagagccagcaggccctgtagggtgctgctgctgtctcactgggtcccagcttcaagcgcatcagtgggtgacgggggcaacaaatcagagtgactggaagtttccatcccgttttgctttgaccacgtgtactgagctgcagcctctgatactctgtcacgtttccaaaaatggtatccattaggatagaaagagaatggatctgcagaaatgtttacctttcaactgctcatgaattcaggacactggatagaaagactcactccccaaaatgagaacagggaagaggagacccggcgacactaagtcaccaggtccaaggaacgtggctccctccccagggtcatctcacctagatctttctctcccaggtcatctcagctcaatctcaataaccctatgaaagccctggtctgttgtgttccttcaccgtacggtttctgtaataaaaagtgttaatccatgttaatctgtgtgaaaattattgcgtgcaacagtattttctcgtgtacctctttttcctatgtgaattgtccctcttttttatttataaatgtctacttttgtttttttaaagacaaaccaatgtgttgtagacctatatgtaacctattccttagtctcatattataggtatgttataagaatggatattttacttggctttagaatgttttacaagaaaactaattcttaactgatcaagtccttgctactaaaatgcttgtgtttttcatcatgacgtcgtgtgcttctaaattaatcattttcgttgtagaaaaatggagtgaatttatattagtcttggaaactaataatagcattgtaaatttatgagatgattttaacagaaaaaatatagaagaatatagttattttaattgtaatattactaactgtagggtgagaaaaaggggggggggtcccattgtggtgaactatgttatagcttgttactcatagtttctttttgatcattttttcggtctccgaggtgaaatgacttattaattaaaatttgtaaactcacatatgcatattgtatatgtgtagaaatgtaatcacactttgtcttggaattacattaaactgtttgaaatcactgta

SEQ ID NO: 352184 - DNA, 3730 bp, Homo sapiens
cgctccgcccgcccggccgccccgagccccgagccccgagccccccgcgccgggcccgggcggcagcggcggcggcggcggcggcggcgcgcccggccccctcccccggcgccggccacgggaggcggtgatgcgggcgcgggcggcctcggctgcgccgagagcggagacacaggctcaagatggcagattccgactgaggctgggggggccgagctcgcgcgccgctttcccgtccccgttgccatgaaccgcggacaccccggccccgatggcccccgtgtacgaaggtatggcctcacatgtgcaagttttctcccctcacacccttcaatcaagtgccttctgtagtgtgaagaaactgaaaatagagccgagttccaactgggacatgactgggtacggctcccacagcaaagtgtatagccagagcaagaacatccccctgtcgcagccagccaccacaaccgtcagcacctccttgccggtcccaaacccaagcctaccttacgagcagaccatcgtcttcccaggaagcaccgggcacatcgtggtcacctcagcaagcagcacttctgtcaccgggcaagtcctcggcggaccacacaacctaatgcgtcgaagcactgtgagcctccttgatacctaccaaaaatgtggactcaagcgtaagagcgaggagatcgagaacacaagcagcgtgcagatcatcgaggagcatccacccatgattcagaataatgcaagcggggccactgtcgccactgccaccacgtctactgccacctccaaaaacagcggctccaacagcgagggcgactatcagctggtgcagcatgaggtgctgtgctccatgaccaacacctacgaggtcttagagttcttgggccgagggacgtttggacaagtggtcaagtgctggaaacggggcaccaatgagatcgtagccatcaagatcctgaagaaccgcccatcctatgcccgacaaggtcagattgaagtgagcatcctggcccggttgagcacggagagtgccgatgactataacttcgtccgggcctacgaatgcttccagcacaagaaccacacgtgcttggtcttcgagatgttggagcagaacctctatgactttctgaagcaaaacaagtttagccccttgcccctcaaatacattcgcccagttctccagcaggtagccacagccctgatgaaactcaaaagcctaggtcttatccacgctgacctcaaaccagaaaacatcatgctggtggatccatctagacaaccatacagagtcaaggtcatcgactttggttcagccagccacgtctccaaggctgtgtgctccacctacttgcagtccagatattacagggcccctgagatcatccttggtttaccattttgtgaggcaattgacatgtggtccctgggctgtgttattgcagaattgttcctgggttggccgttatatccaggagcttcggagtatgatcagattcggtatatttcacaaacacagggtttgcctgctgaatatttattaagcgccgggacaaagacaactaggtttttcaaccgtgacacggactcaccatatcctttgtggagactgaagacaccagatgaccatgaagcagagacagggattaagtcaaaagaagcaagaaagtacattttcaactgtttagatgatatggcccaggtgaacatgacgacagatttggaagggagcgacatgttggtagaaaaggctgaccggcgggagttcattgacctgttgaagaagatgctgaccattgatgctgacaagagaatcactccaatcgaaaccctgaaccatccctttgtcaccatgacacacttactcgattttccccacagcacacacgtcaaatcatgtttccagaacatggagatctgcaagcgtcgggtgaatatgtatgacacggtgaaccagagcaaaacccctttcatcacgcacgtggcccccagcacgtccaccaacctgaccatgacctttaacaaccagctgaccactgtccacaaccagccctcagcggcatccatggctgcagtggcccagcggagcatgcccctgcagacaggaacagcccagatttgtgcccggcctgacccgttccagcaagctctcatcgtgtgtccccccggcttccaaggcttgcaggcctctccctctaagcacgctggctactcggtgcgaatggaaaatgcagttcccatcgtcactcaagccccaggagctcagcctcttcagatccaaccaggtctgcttgcccagcaggcttggccaagtgggacccagcagatcctgcttcccccagcatggcagcaactgactggagtggccacccacacatcagtgcagcatgccaccgtgattcccgagaccatggcaggcacccagcagctggcggactggagaaatacgcatgctcacggaagccattataatcccatcatgcagcagcctgcactattgaccggtcatgtgacccttccagcagcacagcccttaaatgtgggtgtggcccacgtgatgcggcagcagccaaccagcaccacctcctcccggaagagtaagcagcaccagtcatctgtgagaaatgtctccacctgtgaggtgtcctcctctcaggccatcagctccccacagcgatccaagcgtgtcaaggagaacacacctccccgctgtgccatggtgcacagtagcccggcctgcagcacctcggtcacctgtgggtggggcgacgtggcctccagcaccacccgggaacggcagcggcagacaattgtcattcccgacactcccagccccacggtcagcgtcatcaccatcagcagtgacacggacgaggaggaggaacagaaacacgcccccaccagcactgtctccaagcaaagaaaaaacgtcatcagctgtgtcacagtccacgactccccctactccgactcctccagcaacaccagcccctactccgtgcagcagcgtgctgggcacaacaatgccaatgcctttgacaccaaggggagcctggagaatcactgcacggggaacccccgaaccatcatcgtgccacccctgtaatttggggccaggacagggcaggaacctctccctggagagtggttttcctgcttttctgctgctagaaatgttgctgtatgggagctagtacaatagaaagtgcccagtgactgcaggcgacccttaccgaggattttattcaagtatccaggggaggcttctgctgaacagcacattgtataagcagcgttttccttctttaatcctgtaatcaatacctctctgcctttacaatggctctgcttccaactaggttgattaatagaaaataaaagcctcctggttctttatgcctgagcctggaagaatacctggtctggggagttcctggctgacatctagcaccactctctgccaggaagccctggtggtcagatgggcttcttgtgtaggaagaacctcctccgagtcttgctagggaagggtgaaattggcccctctcagcccctcctcggaatcagctgctgggcggcgagaccaagccatgtgtgtttctctgctcatgcactgctatcttcagaggactcctcctgtcccgcgaaggcttgtcttgaaaattgggccctggaataaaggctgagaacgtaaccttctgaataaactcagtggctcactgtagat

SEQ ID NO: 352185 - DNA, 2078 bp, Homo sapiens
cgctccgcccgcccggccgccccgagccccgagccccgagccccccgcgccgggcccgggcggcagcggcggcggcggcggcggcggcgcgcccggccccctcccccggcgccggccacgggaggcggtgatgcgggcgcgggcggcctcggctgcgccgagagcggagacacaggctcaagatggcagattccgactgaggctgggggggccgagctcgcgcgccgctttcccgtccccgttgccatgaaccgcggacaccccggccccgatggcccccgtgtacgaaggtatggcctcacatgtgcaagttttctcccctcacacccttcaatcaagtgccttctgtagtgtgaagaaactgaaaatagagccgagttccaactgggacatgactgggtacggctcccacagcaaagtgtatagccagagcaagaacatccccctgtcgcagccagccaccacaaccgtcagcacctccttgccggtcccaaacccaagcctaccttacgagcagaccatcgtcttcccaggaagcaccgggcacatcgtggtcacctcagcaagcagcacttctgtcaccgggcaagtcctcggcggaccacacaacctaatgcgtcgaagcactgtgagcctccttgatacctaccaaaaatgtggactcaagcgtaagagcgaggagatcgagaacacaagcagcgtgcagatcatcgaggagcatccacccatgattcagaataatgcaagcggggccactgtcgccactgccaccacgtctactgccacctccaaaaacagcggctccaacagcgagggcgactatcagctggtgcagcatgaggtgctgtgctccatgaccaacacctacgaggtcttagagttcttgggccgagggacgtttggacaagtggtcaagtgctggaaacggggcaccaatgagatcgtagccatcaagatcctgaagaaccgcccatcctatgcccgacaaggtcagattgaagtgagcatcctggcccggttgagcacggagagtgccgatgactataacttcgtccgggcctacgaatgcttccagcacaagaaccacacgtgcttggtcttcgagatgttggagcagaacctctatgactttctgaagcaaaacaagtttagccccttgcccctcaaatacattcgcccagttctccagcaggtagccacagccctgatgaaactcaaaagcctaggtcttatccacgctgacctcaaaccagaaaacatcatgctggtggatccatctagacaaccatacagagtcaaggtcatcgactttggttcagccagccacgtctccaaggctgtgtgctccacctacttgcagtccagatattacagggcccctgagatcatccttggtttaccattttgtgaggcaattgacatgtggtccctgggctgtgttattgcagaattgttcctgggttggccgttatatccaggagcttcggagtatgatcagattcggtatatttcacaaacacagggtttgcctgctgaatatttattaagcgccgggacaaagacaactaggtttttcaaccgtgacacggactcaccatatcctttgtggagactgaaggtaggaagagcgtctcctccactcctcacagtggcccagcgcttagggaagagggccgtagacccattagtggggagcttttgattcagtcagcaaaatgagggcactgggggtgctgttgttaatacatggtatggctgaatctgaatgctcagaagcccctctttcccttggcctatcgccgcctgtgagagtccaaccttatgattgctgaactcccaggatttaatccgataagccttgatgactgtctgatttgtgctagggagagaaacgaaccccactctgcccttgagagctggcagtccagagggagacaggaccatgtgccacaagctcccgcccactgtagtaagggccctgttcctggtcaagaatgggtgtgggtgccaagaggaaggagcatttaattctgcctgcagcagaggggcaaggaggagcatttgaactgggccctaaa

SEQ ID NO: 352186 - DNA, 665 bp, Homo sapiens
aaaaataaaggattataactggaggaaaaaggaaaaccttattttgtaaatgaccatggacattgtgaaatggatggtcatacagaggaaaatcaaataaactacctctttcagtaggaagtgctctgaagaagaagcatctcaaactcttctctgaccaacctccttgatgagataaagtttgtggttgggtttagttgaaagagtgagtaagctggtttcctttacaggaatttcctgtaaagaatattaactttcaactcaatttctcaactgtgggttttggttttcttcttgtaaaactaatctctaaaagtgtgacctttgagataaacactaaagcctattttgtgattaactttctaattttgaaaaagaaaaattatgtctccaacaccaattttataaagcaataatttattaatacataaaggaaaatacatttaaagtctaaagttacttgagtttttatgttcctattgagagatagtctcagaatataacatataattgaaaactccattgttcctttgatagagcaactgaaaccatttaatacttcaaaaactctgagaccacaatagttgtaatgagttttgtctagaaaccatcttggtgaagtctagataacatcctccgtcaagagtctagtattctaataaagg

SEQ ID NO: 352187 - DNA, 1392 bp, Homo sapiens
actgaaagacagagagagagagtgggtgtgcctgtgtgtgtgtgtttgtgtgtgtgtatgtatatatatatatattttagagacagggtcttactctgttgccgaggttggtctcaactcctggcttcaagtgatcttcctgcctccatctcccaaagcgctgggattacaggcatgagctactttgcccagcctactgtgtatatttttaagacctttttttttttgaagacacagtcacgctctgttgcccagactggagtgtagtggcatgatcatagttcactgtaaccttgaactcctggcctcaagcaatcctcagctcccttggagttgggactacaggtgtgcactaccacacccagctaattttttaaattttttgtagagacagtctcactatgttgctcagactggtctcgaactcctgggctcaagtgatccttctgccttgggctcccaaagtgctgggactgcagatgtgaacccccatgtgcagccaagactttattcttctagagcagttttaagttcacaacaaaattgagagaaaggtacagagaattcccgtatctccctgtccccacatgtgcacagcctcccccgtgatcaacatgagttaatatttttcaggagcttaagatagtgccatgtaagtgtaggtcagtaactgctttttggtcacgactgtatgacacaatccacaggcatgccagcctgggctggtgggtaggctcggtcttgaagagggaggggttgttctctggaggtgggctgaccctggcacctggctggctggtccccacaggctggcaaaggaggaggtgagccggcaggagctgaggcagcgggtgcgcatggctgacaacgaggtcatggacgcctttcgcaagatcatggctgcccggcagaagaagcggactcccaccaagaaagaaaaggaccaggcctggaagactctgaaggagcgtgagagcatcctgaagctgctggatgggtagccctcacccctgcctcaggctgattatctggcctaggggaggggaagggaggcccacttccttctttgggcacaggaaacattggcctgtggctgtccctcaaatggcggcagtctctagagggccgtggcccttcccctgaggtcttttggcctagctctgtacaaccaggacacaggaagccctgctgggctagcctgaggcctagtctctgcttggtccccgagatggggttggaggggacttcgtttctgggtcttcctcttcccctctttaccatcccccactccctaatcccctacccctgtctccccttcaaggacttctcccttgtggttttgtaaagtgcaaacttaagaataaagtgactgctgtggtttttcaaaaaaag

SEQ ID NO: 352188 - DNA, 1109 bp, Homo sapiens
ccccatcctttctctcgcccctcctacccgcagctcctggcgctcggcggggctaactgcagcgcggagatctcggccgccaagctccgcctcccgccccgggctgtgccccggggctcgcctgaggcctgagcaaaccagagaacctcatcatctagcggcattagcgtcgaggacccaacgcttgttcctcatgcaccggtggaaattaccagtataggcatcgactcgcgtcagtctgcactccaccgggcgcacgcagtactggcatgaagagtgtggccacgcacatcattcatatcaccggaacggctgggctgctgcgacacatcggacgcgtaggacacatcgaccctgcgctcgcgttcacgcggacggcccccctgggtgagcccgctacagcaaggcgccggcaagacagaaggcactgagtcgacactcgagcgacctcgactggtatccgaccacccacttgcgatagcatcaccccctcagcgaccaaactggatcaacgcacagtgcctcaacatcacgaggaggccacgggcgtcatagcttacgcccatacatacccgcagccttcaatgagcggccatgcagcacacaaactctgagacccaatcgcggcccaaccatggtgaacccatcactggcgcagcaaacagaggcggatatacaaactcacagaccactcgcgtaaggaacaccgaggtgccgttaccgcaacacgtgacactgaacccagtcacgacctgttccagaacacacaagctggccccgaaggtgcgtaatcgtcagtattacatggaggcgctcagttgggcgccccaggggaacctcgggctcaagccccgtcgaaatccccagaccataaagccaatcacagtagagaaaacaaagtcccatacgattgtttccagcccggaacggaccgacaaccattaacatattactaccaccgctcccaaactgagcaccccgttcgtacagccgcacacacgttcggtctgacgggcccaatccacttcgcacaggccggcaatcaggcatcgctgtacttcatcgagtacgaaccgatctcgagcgcttccggaagcacgtcgatgaac

SEQ ID NO: 352189 - DNA, 2234 bp, Homo sapiens
ccccatcctttctctcgcccctcctacccgcagctcctggcgctcggcggggctaactgcagcgcggagatctcggccgccaagctccgcctcccgccccgggctgtgccccggggctcgcctgaggccgaccacccgcaccccacctctagcggctttgctcgaggcccaccttcttcccacccccggcaaactccagtaggctcgccctcgctgactccccgcccccgcgtcaactgcaaggggcccgcccatagccagttccggggcggttgctcacatcgaccggaactccccgccccctcccgcggcccctggggccgtaggaggccgcagcgaggaggtagagggggcgggggtcgcactagggtgtccctagagaacgaggactctgaaggcgggacatttgggcgacccccgggcggggccagccattaaacagtcccacttctgtgccagacactgaactgggctcttgacgggcatcatctcttaatcctcagaacatcccagggagctccacaggatccccatatcctgggccatgagtgagttgaaagactgccccttgcagttccacgacttcaagtctgtggatcacctgaaggtctgtccccgctacacggcagtgctggcacgctctgaggatgatggcatcggcatcgaggagctggacaccctgcagctggagctggagaccctgctgtcttctgccagccggcgcctgcgtgtgcttgaggccgaaacccagatcctcaccgactggcaggataagaaaggtgacagacgattcctgaagctgggtcgagaccatgaacttggagctccccccaaacatgggaagcccaagaagcagaaactggaagggaaggcaggacatgggccgggccctggcccaggacggcccaaatccaaaaaccttcagcccaagatccaggaatatgaattcactgatgaccctatcgacgtgccacggatccccaaaaatgatgcccccaacaggttctgggcttcagtggagccctactgtgctgacatcaccagcgaggaggtccgcacacttgaggagttactgaagcccccagaagatgaggctgagcattacaagatcccacccctggggaagcactactcccagcgctgggcccaggaggacctgctggaggagcagaaggatggggcccgggcagcggctgtggctgacaagaagaaaggcctcatggggccactgaccgaactggacactaaagatgtggatgccctgctgaagaagtctgaggcccagcatgaacagccggaagatggatgcccctttggtgccctgacgcagcgcctcctgcaggccctggtggaggaaaatattatttcccctatggaggattctcctattcctgacatgtctgggaaagaatcaggggctgacggggcaagcacctcccctcgcaatcagaacaagcccttcagtgtgccgcatactaagtccctggagagccgcatcaaggaggagctaattgcccagggccttttggagtctgaggaccgccccgcagaggactccgaggatgaggtccttgctgagcttcgcaaacggcaggctgagctgaaggcacttagtgcccacaaccgcaccaagaagcacgacctgctgaggctggcaaaggaggaggtgagccggcaggagctgaggcagcgggtgcgcatggctgacaacgaggtcatggacgcctttcgcaagatcatggctgcccggcagaagaagcggactcccaccaagaaagaaaaggaccaggcctggaagactctgaaggagcgtgagagcatcctgaagctgctggatgggtagccctcacccctgcctcaggctgattatctggcctaggggaggggaagggaggcccacttccttctttgggcacaggaaacattggcctgtggctgtccctcaaatggcggcagtctctagagggccgtggcccttcccctgaggtcttttggcctagctctgtacaaccaggacacaggaagccctgctgggctagcctgaggcctagtctctgcttggtccccgagatggggttggaggggacttcgtttctgggtcttcctcttcccctctttaccatcccccactccctaatcccctacccctgtctccccttcaaggacttctcccttgtggttttgtaaagtgcaaacttaagaataaagtgactgctgtggtttttcaaaaaaag

SEQ ID NO: 352190 - DNA, 2692 bp, Homo sapiens
  misc_feature (2251)..(2251): n is a, c, g, or t
ccccatcctttctctcgcccctcctacccgcagctcctggcgctcggcggggctaactgcagcgcggagatctcggccgccaagctccgcctcccgccccgggctgtgccccggggctcgcctgaggccgaccacccgcaccccacctctagcggctttgctcgaggcccaccttcttcccacccccggcaaactccagtaggctcgccctcgctgactccccgcccccgcgtcaactgcaaggggcccgcccatagccagttccggggcggttgctcacatcgaccggaactccccgccccctcccgcggcccctggggccgtaggaggccgcagcgaggaggtagagggggcgggggtcgcactagggtgtccctagagaacgaggactctgaaggcgggacatttgggcgacccccgggcggggccagccattaaacagtcccacttctgtgccagacactgaactgggctcttgacgggcatcatctcttaatcctcagaacatcccagggagctccacaggatccccatatcctgggccatgagtgagttgaaagactgccccttgcagttccacgacttcaagtctgtggatcacctgaaggtctgtccccgctacacggcagtgctggcacgctctgaggatgatggcatcggcatcgaggagctggacaccctgcagctggagctggagaccctgctgtcttctgccagccggcgcctgcgtgtgcttgaggccgaaacccagatcctcaccgactggcaggataagaaaggtgacagacgattcctgaagctgggtcgagaccatgaacttggagctccccccaaacatgggaagcccaagaagcagaaactggaagggaaggcaggacatgggccgggccctggcccaggacggcccaaatccaaaaaccttcagcccaagatccaggaatatgaattcactgatgaccctatcgacgtgccacggatccccaaaaatgatgcccccaacaggttctgggcttcagtggagccctactgtgctgacatcaccagcgaggaggtccgcacacttgaggagttactgaagcccccagaagatgaggctgagcattacaagatcccacccctggggaagcactactcccagcgctgggcccaggaggacctgctggaggagcagaaggatggggcccgggcagcggctgtggctgacaagaagaaaggcctcatggggccactgaccgaactggacactaaagatgtggatgccctgctgaagaagtctgaggcccagcatgaacagccggaagatggatgcccctttggtgccctgacgcagcgcctcctgcaggccctggtggaggaaaatattatttcccctatggaggattctcctattcctgacatgtctgggaaagaatcaggggctgacggggcaagcacctcccctcgcaatcagaacaagcccttcagtgtgccgcatactaagtccctggagagccgcatcaaggaggagctaattgcccagggccttttggagtctgaggaccgccccgcagaggactccgaggatgaggtccttgctgagcttcgcaaacggcaggctgagctgaaggcacttagtgcccacaaccgcaccaagaagcacgacctgctgaggctggcaaaggaggaggtgagccggcaggagctgaggcagcgggtgcgcatggctgacaacgaggtcatggacgcctttcgcaagatcatggctgcccggcagaagaagcggactcccaccaagaaagaaaaggaccaggcctggaagactctgaaggagcgtgagagcatcctgaagctgctggatgggtagccctcacccctgcctcaggctgattatctggcctaggggaggggaagggaggcccacttccttctttgggcacaggaaacattggcctgtggctgtccctcaaatggcggcagtctctagagggccgtggcccttcccctgaggtcttttggcctagctctgtacaaccaggacacaggaagccctgctgggctagcctgaggcctagtctctgcttggtccccgagatggggttggaggggacttcgtttctgggtcttcctcttcccctctttaccatcccccactccctaatcccctacccctgtctccccttcaaggacttctcccttgtggttttgtaaagtgcaaacttaagaataaagtgactgctgtggtttttcaaaaaaagaaaaaaaaaaaaaaganaaaaggttacagtatcctacaagcacagagtttaagtttcaagacgttaaaaaaaatctgtcccggcccaggggactgaacatcagaagccagcctgaccaggcacgtgtggccttggggcaggtccactgctgctttcttgcccagctagcaagcacaccacccacctcccgcatcaaatgcccaccccaacccaactccctgccgccgccgcgctgctcggggagtgactccaggacgccttcgtggagacatgggtagtctgagggaggagaagttctccaggcagaggcagcctgcaatgtgcccgcacggcactcaggtaggggcggagagtgcagtcatcgcggcgctgactgggccgaaagcctcggccgaatttaaaccagcctcgacctagctagttttcccccggggtgggggggaggagggggggggggg

SEQ ID NO: 352191 - DNA, 2057 bp, Homo sapiens
ccccatcctttctctcgcccctcctacccgcagctcctggcgctcggcggggctaactgcagcgcggagatctcggccgccaagctccgcctcccgccccgggctgtgccccggggctcgcctgaggccgaccacccgcaccccacctctagcggctttgctcgaggcccaccttcttcccacccccggcaaactccagtaggctcgccctcgctgactccccgcccccgcgtcaactgcaaggggcccgcccatagccagttccggggcggttgctcacatcgaccggaactccccgccccctcccgcggcccctggggccgtaggaggccgcagcgaggaggtagagggggcgggggtcgcactagggtgtccctagagaacgaggactctgaaggcgggacatttgggcgacccccgggcggggccagccattaaacagtcccacttctgtgccagacactgaactgggctcttgacgggcatcatctcttaatcctcagaacatcccagggagctccacaggatccccatatcctgggccatgagtgagttgaaagactgccccttgcagttccacgacttcaagtctgtggatcacctgaaggtctgtccccgctacacggcagtgctggcacgctctgaggatgatggcatcggcatcgaggagctggacaccctgcagctggagctggagaccctgctgtcttctgccagccggcgcctgcgtgtgcttgaggccgaaacccagatcctcaccgactggcaggataagaaaggtgacagacgattcctgaagctgggtcgagaccatgaacttggagctccccccaaacatgggaagcccaagaagcagaaactggaagggaaggcaggacatgggccgggccctggcccaggacggcccaaatccaaaaaccttcagcccaagatccaggaatatgaattcactgatgaccctatcgacgtgccacggatccccaaaaatgatgcccccaacaggttctgggcttcagtggagccctactgtgctgacatcaccagcgaggaggtccgcacacttgaggagttactgaagcccccagaagatgaggctgagcattacaagcatgaacagccggaagatggatgcccctttggtgccctgacgcagcgcctcctgcaggccctggtggaggaaaatattatttcccctatggaggattctcctattcctgacatgtctgggaaagaatcaggggctgacggggcaagcacctcccctcgcaatcagaacaagcccttcagtgtgccgcatactaagtccctggagagccgcatcaaggaggagctaattgcccagggccttttggagtctgaggaccgccccgcagaggactccgaggatgaggtccttgctgagcttcgcaaacggcaggctgagctgaaggcacttagtgcccacaaccgcaccaagaagcacgacctgctgaggctggcaaaggaggaggtgagccggcaggagctgaggcagcgggtgcgcatggctgacaacgaggtcatggacgcctttcgcaagatcatggctgcccggcagaagaagcggactcccaccaagaaagaaaaggaccaggcctggaagactctgaaggagcgtgagagcatcctgaagctgctggatgggtagccctcacccctgcctcaggctgattatctggcctaggggaggggaagggaggcccacttccttctttgggcacaggaaacattggcctgtggctgtccctcaaatggcggcagtctctagagggccgtggcccttcccctgaggtcttttggcctagctctgtacaaccaggacacaggaagccctgctgggctagcctgaggcctagtctctgcttggtccccgagatggggttggaggggacttcgtttctgggtcttcctcttcccctctttaccatcccccactccctaatcccctacccctgtctccccttcaaggacttctcccttgtggttttgtaaagtgcaaacttaagaataaagtgactgctgtggtttttcaaaaaaag

SEQ ID NO: 352192 - DNA, 1879 bp, Homo sapiens
ccccatcctttctctcgcccctcctacccgcagctcctggcgctcggcggggctaactgcagcgcggagatctcggccgccaagctccgcctcccgccccgggctgtgccccggggctcgcctgaggccgaccacccgcaccccacctctagcggctttgctcgaggcccaccttcttcccacccccggcaaactccagtaggctcgccctcgctgactccccgcccccgcgtcaactgcaaggggcccgcccatagccagttccggggcggttgctcacatcgaccggaactccccgccccctcccgcggcccctggggccgtaggaggccgcagcgaggaggtagagggggcgggggtcgcactagggtgtccctagagaacgaggactctgaaggcgggacatttgggcgacccccgggcggggccagccattaaacagtcccacttctgtgccagacactgaactgggctcttgacgggcatcatctcttaatcctcagaacatcccagggagctccacaggatccccatatcctgggccatgagtgagttgaaagactgccccttgcagttccacgacttcaagtctgtggatcacctgaaggtctgtccccgctacacggcagtgctggcacgctctgaggatgatggcatcggcatcgaggagctggacaccctgcagctggagctggagaccctgctgtcttctgccagccggcgcctgcgtgtgcttgaggccgaaacccagatcctcaccgactggcaggataagaaaggtgacagacgattcctgaagctgggtcgagaccatgaacttggagctccccccaaacatgggaagcccaagaagcagaaactggaagggaaggcaggacatgggccgggccctggcccaggacggcccaaatccaaaaaccttcagcccaagatccaggaatatgaattcactgatgaccctatcgacgtgccacggatccccaaaaatgatgcccccaacaggttctgggcttcagtggagccctactgtgctgacatcaccagcgaggaggtccgcacacttgaggagttactgaagcccccagaagatgaggctgagcattacaagatcccacccctggggaagcactactcccagcgctgggcccaggaggacctgctggaggagcagaaggatggggcccgggcagcggctgtggctgacaagaagaaaggcctcatggggccactgaccgaactggacactaaagatgtggatgccctgctgaagaagtctgaggcccagcatgaacagccggaagatggatgcccctttggtgccctgacgcagcgcctcctgcaggccctggtggaggtgagcagcctaacccaaaagaggaaccatatttactttgtgttttaatgtgttatgcttattttttatcggaatttatcatacatttattaggttggtgcaaaaataggttggtgcaaaagtaaaaacctggactaatatatagcaaaagattgggaataatatataacttgtgcacctaatagaaaagtgcacagatcataaatgtacagttttcacaaatgagcttgtattaccagcctggagattacaaaatgaaacattactatatcctagaagcccctctcatgcccctgtttttctccaactttccccaaaggtagccttactccacaattacttttgctaagcatctgttggaggggctttatacacatcctcccactggaggccaggacagtggttaacgctgtgttacagataagaagattgaggctcagaaaagggaactgttcacttgaggtctcacacaccaggattcaaaccctagcttcaggggccccgtctttatacctgctggttgac

SEQ ID NO: 352193 - DNA, 1650 bp, Homo sapiens
ccccatcctttctctcgcccctcctacccgcagctcctggcgctcggcggggctaactgcagcgcggagatctcggccgccaagctccgcctcccgccccgggctgtgccccggggctcgcctgaggccgaccacccgcaccccacctctagcggctttgctcgaggcccaccttcttcccacccccggcaaactccagtaggctcgccctcgctgactccccgcccccgcgtcaactgcaaggggcccgcccatagccagttccggggcggttgctcacatcgaccggaactccccgccccctcccgcggcccctggggccgtaggaggccgcagcgaggaggtagagggggcgggggtcgcactagggtgtccctagagaacgaggactctgaaggcgggacatttgggcgacccccgggcggggccagccattaaacagtcccacttctgtgccagacactgaactgggctcttgacgggcatcatctcttaatcctcagaacatcccagggagttacaagatcccacccctggggaagcactactcccagcgctgggcccaggaggacctgctggaggagcagaaggatggggcccgggcagcggctgtggctgacaagaagaaaggcctcatggggccactgaccgaactggacactaaagatgtggatgccctgctgaagaagtctgaggcccagcatgaacagccggaagatggatgcccctttggtgccctgacgcagcgcctcctgcaggccctggtggaggaaaatattatttcccctatggaggattctcctattcctgacatgtctgggaaagaatcaggggctgacggggcaagcacctcccctcgcaatcagaacaagcccttcagtgtgccgcatactaagtccctggagagccgcatcaaggaggagctaattgcccagggccttttggagtctgaggaccgccccgcagaggactccgaggatgaggtccttgctgagcttcgcaaacggcaggctgagctgaaggcacttagtgcccacaaccgcaccaagaagcacgacctgctgaggctggcaaaggaggaggtgagccggcaggagctgaggcagcgggtgcgcatggctgacaacgaggtcatggacgcctttcgcaagatcatggctgcccggcagaagaagcggactcccaccaagaaagaaaaggaccaggcctggaagactctgaaggagcgtgagagcatcctgaagctgctggatgggtagccctcacccctgcctcaggctgattatctggcctaggggaggggaagggaggcccacttccttctttgggcacaggaaacattggcctgtggctgtccctcaaatggcggcagtctctagagggccgtggcccttcccctgaggtcttttggcctagctctgtacaaccaggacacaggaagccctgctgggctagcctgaggcctagtctctgcttggtccccgagatggggttggaggggacttcgtttctgggtcttcctcttcccctctttaccatcccccactccctaatcccctacccctgtctccccttcaaggacttctcccttgtggttttgtaaagtgcaaacttaagaataaagtgactgctgtggtttttcaaaaaaag

SEQ ID NO: 352194 - DNA, 1491 bp, Homo sapiens
tgagacaatctgtgtacgtattctgcaccttctatcttgggaattatttcagattggcttctgtgtgtgtgtctgagttctttttggacctgtctcccttactagagtgtgaagtacaggttttatcttcgttgtactttcttacctacacctgacactgggcttggccttggactagggacttgagagagatataagataggtaagtgaatgaatgaatgaagcatggctggccagtgcttacccactcagggttgggtgccatcttttccacagatcccacccctggggaagcactactcccagcgctgggcccaggaggacctgctggaggagcagaaggatggggcccgggcagcggctgtggctgacaagaagaaaggcctcatggggccactgaccgaactggacactaaaggtaggcctctcacctccctgccaaccccaggtcaggacttgaattccagaacttcagcccacctcccctcctttcctgtgcccgcttagatgtggatgccctgctgaagaagtctgaggcccagcatgaacagccggaagatggatgcccctttggtgccctgacgcagcgcctcctgcaggccctggtggaggaaaatattatttcccctatggaggattctcctattcctgacatgtctgggaaagaatcaggggctgacggggcaagcacctcccctcgcaatcagaacaagcccttcagtgtgccgcatactaagtccctggagagccgcatcaaggaggagctaattgcccagggccttttggagtctgaggaccgccccgcagaggactccgaggatgaggtccttgctgagcttcgcaaacggcaggctgagctgaaggcacttagtgcccacaaccgcaccaagaagcacgacctgctgaggctggcaaaggaggaggtgagccggcaggagctgaggcagcgggtgcgcatggctgacaacgaggtcatggacgcctttcgcaagatcatggctgcccggcagaagaagcggactcccaccaagaaagaaaaggaccaggcctggaagactctgaaggagcgtgagagcatcctgaagctgctggatgggtagccctcacccctgcctcaggctgattatctggcctaggggaggggaagggaggcccacttccttctttgggcacaggaaacattggcctgtggctgtccctcaaatggcggcagtctctagagggccgtggcccttcccctgaggtcttttggcctagctctgtacaaccaggacacaggaagccctgctgggctagcctgaggcctagtctctgcttggtccccgagatggggttggaggggacttcgtttctgggtcttcctcttcccctctttaccatcccccactccctaatcccctacccctgtctccccttcaaggacttctcccttgtggttttgtaaagtgcaaacttaagaataaagtgactgctgtggtttttcaaaaaaag

SEQ ID NO: 352195 - DNA, 1345 bp, Homo sapiens
ccccatcctttctctcgcccctcctacccgcagctcctggcgctcggcggggctaactgcagcgcggagatctcggccgccaagctccgcctcccgccccgggctgtgccccggggctcgcctgaggccgaccacccgcaccccacctctagcggctttgctcgaggcccaccttcttcccacccccggcaaactccagtaggctcgccctcgctgactccccgcccccgcgtcaactgcaaggggcccgcccatagccagttccggggcggttgctcacatcgaccggaactccccgccccctcccgcggcccctggggccgtaggaggccgcagcgaggaggtagagggggcgggggtcgcactagggtgtccctagagaacgaggactctgaaggcgggacatttgggcgacccccgggcggggccagccattaaacagtcccacttctgtgccagacactgaactgggctcttgacgggcatcatctcttaatcctcagaacatcccagggagctccacaggatccccatatcctgggccatgagtgagttgaaagactgccccttgcagttccacgacttcaagtctgtggatcacctgaaggtctgtccccgctacacggcagtgctggcacgctctgaggatgatggcatcggcatcgaggagctggacaccctgcagctggagctggagaccctgctgtcttctgccagccggcgcctgcgtgtgcttgaggccgaaacccagatcctcaccgactggcaggataagaaaggtgacagacgattcctgaagctgggtcgagaccatgaacttggagctccccccaaacatgggaagcccaagaagcagaaactggaagggaaggcaggacatgggccgggccctggcccaggacggcccaaatccaaaaaccttcagcccaagatccaggaatatgaattcactgatgaccctatcgacgtgccacggatccccaaaaatgatgcccccaacaggttctgggctagagaacatagaagggggcctcaaggttctggtggtggaggcactggtggggcaggggcgcccactcaggatctgcttctccctgcaggttctgggcttcagtggagccctactgtgctgacatcaccagcgaggaggtccgcacacttgaggagttactgaagcccccagaagatgaggctgagcattacaagttacaaggtagaaactctgggccttgatagacatgatgcggaacaagagagttcagaggtgcctgagaagtaaagctaccaaagccatgcatcatcttccttccccaaccctgcccagtctgctgtctgctccatcagt

SEQ ID NO: 352196 - DNA, 658 bp, Homo sapiens
ccccatcctttctctcgcccctcctacccgcagctcctggcgctcggcggggctaactgcagcgcggagatctcggccgccaagctccgcctcccgccccgggctgtgccccggggctcgcctgaggccgaccacccgcaccccacctctagcggctttgctcgaggcccaccttcttcccacccccggcaaactccagtaggctcgccctcgctgactccccgcccccgcgtcaactgcaaggggcccgcccatagccagttccggggcggttgctcacatcgaccggaactccacctgaaccacctccacgcaggacacctgagggaccgtacagagtgactgccagacgaggaaggtagacgagggagcgggagagagtcgcaactaaaggtgatcacctaagatgaacagatggacttcatgaaaaggcgggaccatacagaggcgaaccacaccagatgccggaatgcacagcggacccaaataacaaagcaggacccccaaattacatatggtgaccaaacgaagactactggaaaaccatgagagcaaccttttggcagacgggaagcaatacatcctcagataaagaacctacaaaaaaacaatcacacaaaagggaagactcacaccgaggggactcccacaataaatc

SEQ ID NO: 352197 - DNA, 439 bp, Homo sapiens
gaatagtagatacatacgttgcttgttttaaaaaccagaccagatgtgtctgtccctccctttgtatctggatagatacagagggggtgcccaaagggaaaggcaggttttcactgaccttgggaagccctgggaacctccaaggtgggcccttctccaagctggctcttgagtctgacgggcctgcctcccgctgcagtgtgccgcatactaagtccctggagagccgcatcaaggaggagctaattgcccagggccttttggagtctgaggaccgccccgcagaggactccgaggatgaggtccttgctgagcttcgcaaacggcaggctgagctgaaggcacttagtgcccacaaccgcaccaagaagcacgacctgctgaggtgagcgttagcaggatgcacagtcccgggggtggccttggaggctgtggccac

SEQ ID NO: 352198 - DNA, 2552 bp, Homo sapiens
ccccatcctttctctcgcccctcctacccgcagctcctggcgctcggcggggctaactgcagcgcggagatctcggccgccaagctccgcctcccgccccgggctgtgccccggggctcgcctgaggccgaccacccgcaccccacctctagcggctttgctcgaggcccaccttcttcccacccccggcaaactccagtaggctcgccctcgctgactccccgcccccgcgtcaactgcaaggggcccgcccatagccagttccggggcggttgctcacatcgaccggaactccccgccccctcccgcggcccctggggccgtaggaggccgcagcgaggaggtagagggggcgggggtcgcactagggtgtccctagagaacgaggactctgaaggcgggacatttgggcgacccccgggcggggccagccattaaacagtcccacttctgtgccagacactgaactgggctcttgacgggcatcatctcttaatcctcagaacatcccagggagctccacaggatccccatatcctgggccatgagtgagttgaaagactgccccttgcagttccacgacttcaagtctgtggatcacctgaaggtctgtccccgctacacggcagtgctggcacgctctgaggatgatggcatcggcatcgaggagctggacaccctgcagctggagctggagaccctgctgtcttctgccagccggcgcctgcgtgtgcttgaggccgaaacccagatcctcaccgactggcaggataagaaaggtgacagacgattcctgaagctgggtcgagaccatgaacttggagctccccccaaacatgggaagcccaagaagcagaaactggaagggaaggcaggacatgggccgggccctggcccaggacggcccaaatccaaaaaccttcagcccaagatccaggaatatgaattcactgatgaccctatcgacgtgccacggatccccaaaaatgatgcccccaacaggttctgggcttcagtggagccctactgtgctgacatcaccagcgaggaggtccgcacacttgaggagttactgaagcccccagaagatgaggctgagcattacaagatcccacccctggggaagcactactcccagcgctgggcccaggaggacctgctggaggagcagaaggatggggcccgggcagcggctgtggctgacaagaagaaaggcctcatggggccactgaccgaactggacactaaagatgtggatgccctgctgaagaagtctgaggcccagcatgaacagccggaagatggatgcccctttggtgccctgacgcagcgcctcctgcaggccctggtggaggaaaatattatttcccctatggaggattctcctattcctgacatgtctgggaaagaatcaggggctgacggggcaagcacctcccctcgcaatcagaacaagcccttcagtgtgccgcatactaagtccctggagagccgcatcaaggaggagctaattgcccagggccttttggagtctgaggaccgccccgcagaggactccgaggatgaggtccttgctgagcttcgcaaacggcaggctgagctgaaggcacttagtgcccacaaccgcaccaagaagcacgacctgctgaggtgagcgttagcaggatgcacagtcccgggggtggccttggaggctgtggccacggctagtcacctttcaggggttttacaacaggctttccaatcctggctggcctctaaatcacctggagagcctcgaaaaaaacagcagtggccagtccaccgggtatgtcccaaacaaattctgattccacagagtggggctcaggcatctgtgactgaccgattgatttgatttgtttttgttttgtttttttttgagagggagtctcgcactgtcacccaggctggagtgcagtggcatgatctcggctcactgcaagctccgcctcccaggttcatgccattctcctgcctcagcctcctgagtagctgatactacaggcacccaccaccacgcccagctaatttttttgtatttttagtagagacggggtttcaccgtgttagccaggatggtctcgatctcctgacctcgtgatccacccgcctcggcctcccaaagtgccgggattacaggcgtgagccactgcgcctggcctagtttggttttttaattatggtaaaggcataatataaaatgtatctccatgggaggctgaggcaggagaatcagttgaacctgggaggcggaggttgcagtgagctgagactgcaccattgcattccagcctgggcaacaagagtgaaactgcatctcaaaaaaaaaaagaaaaaaaatttacgcttcttaaccatttttaagtgtacagtttagtagtgttacccatattcacattgttgtgtgatttattttttgtcttttcatgcttcttttctttttatccccaaagttttgttattaaaaatttgatacacacagaaaatctgaaagaatcatacaataaacatcagtatattctccacctaga

SEQ ID NO: 352199 - DNA, 2326 bp, Homo sapiens
ccccatcctttctctcgcccctcctacccgcagctcctggcgctcggcggggctaactgcagcgcggagatctcggccgccaagctccgcctcccgccccgggctgtgccccggggctcgcctgaggccgaccacccgcaccccacctctagcggctttgctcgaggcccaccttcttcccacccccggcaaactccagtaggctcgccctcgctgactccccgcccccgcgtcaactgcaaggggcccgcccatagccagttccggggcggttgctcacatcgaccggaactccccgccccctcccgcggcccctggggccgtaggaggccgcagcgaggaggtagagggggcgggggtcgcactagggtgtccctagagaacgaggactctgaaggcgggacatttgggcgacccccgggcggggccagccattaaacagtcccacttctgtgccagacactgaactgggctcttgacgggcatcatctcttaatcctcagaacatcccagggagctccacaggatccccatatcctgggccatgagtgagttgaaagactgccccttgcagttccacgacttcaagtctgtggatcacctgaaggtctgtccccgctacacggcagtgctggcacgctctgaggatgatggcatcggcatcgaggagctggacaccctgcagctggagctggagaccctgctgtcttctgccagccggcgcctgcgtgtgcttgaggccgaaacccagatcctcaccgactggcaggataagaaaggtgacagacgattcctgaagctgggtcgagaccatgaacttggagctccccccaaacatgggaagcccaagaagcagaaactggaagggaaggcaggacatgggccgggccctggcccaggacggcccaaatccaaaaaccttcagcccaagatccaggaatatgaattcactgatgaccctatcgacgtgccacggatccccaaaaatgatgcccccaacaggttctgggcttcagtggagccctactgtgctgacatcaccagcgaggaggtccgcacacttgaggagttactgaagcccccagaagatgaggctgagcattacaagatcccacccctggggaagcactactcccagcgctgggcccaggaggacctgctggaggagcagaaggatggggcccgggcagcggctgtggctgacaagaagaaaggcctcatggggccactgaccgaactggacactaaagatgtggatgccctgctgaagaagtctgaggcccagcatgaacagccggaagatggatgcccctttggtgccctgacgcagcgcctcctgcaggccctggtggaggaaaatattatttcccctatggaggattctcctattcctgacatgtctgggaaagaatcaggggctgacggggcaagcacctcccctcgcaatcagaacaagcccttcagtgtgccgcatactaagtccctggagagccgcatcaaggaggagctaattgcccagggccttttggagtctgaggaccgccccgcagaggactccgaggatgaggtccttgctgagcttcgcaaacggcaggctgagctgaaggcacttagtgcccacaaccgcaccaagaagcacgacctgctgaggctggcaaaggaggaggtgagccggcaggagctgaggcagcgggtgcgcatggctgacaacgaggtcatggacgcctttcgcaagatcatggctgcccggcagaagaagcggactcccaccaagaaagaaaaggaccaggcctggaagactctgaaggagcgtgagagcatcctgaagctgctggatgggtagccctcacccctgcctcaggctgattatctggcctaggggaggggaagggaggcccacttccttctttgggcacaggaaacattggcctgtggctgtccctcaaatggcggcagtctctagagggccgtggcccttcccctgaggtcttttggcctagctctgtacaaccaggacacaggaagccctgctgggctagcctgaggcctagtctctgcttggtccccgagatggggttggaggggacttcgtttctgggtcttcctcttcccctctttaccatcccccactccctaatcccctacccctgtctccccttcaaggacttctcccttgtggttttgtaaagtgcaaacttaagaataaagtgactgctgtggtttttcaaaaaaagaacaaaaacaaaaagggggggcgataaaattcccgcggggggcacagctgcgggatcccggttttggcaaaggggcccataggggcgctaca

SEQ ID NO: 352200 - DNA, 2241 bp, Homo sapiens
ccccatcctttctctcgcccctcctacccgcagctcctggcgctcggcggggctaactgcagcgcggagatctcggccgccaagctccgcctcccgccccgggctgtgccccggggctcgcctgaggccgaccacccgcaccccacctctagcggctttgctcgaggcccaccttcttcccacccccggcaaactccagtaggctcgccctcgctgactccccgcccccgcgtcaactgcaaggggcccgcccatagccagttccggggcggttgctcacatcgaccggaactccccgccccctcccgcggcccctggggccgtaggaggccgcagcgaggaggtagagggggcgggggtcgcactagggtgtccctagagaacgaggactctgaaggcgggacatttgggcgacccccgggcggggccagccattaaacagtcccacttctgtgccagacactgaactgggctcttgacgggcatcatctcttaatcctcagaacatcccagggagctccacaggatccccatatcctgggccatgagtgagttgaaagactgccccttgcagttccacgacttcaagtctgtggatcacctgaaggtctgtccccgctacacggcagtgctggcacgctctgaggatgatggcatcggcatcgaggagctggacaccctgcagctggagctggagaccctgctgtcttctgccagccggcgcctgcgtgtgcttgaggccgaaacccagatcctcaccgactggcaggataagaaaggtgacagacgattcctgaagctgggtcgagaccatgaacttggagctccccccaaacatgggaagcccaagaagcagaaactggaagggaaggcaggacatgggccgggccctggcccaggacggcccaaatccaaaaaccttcagcccaagatccaggaatatgaattcactgatgaccctatcgacgtgccacggatccccaaaaatgatgcccccaacaggttctgggcttcagtggagccctactgtgctgacatcaccagcgaggaggtccgcacacttgaggagttactgaagcccccagaagatgaggctgagcattacaagttacaagatcccacccctggggaagcactactcccagcgctgggcccaggaggacctgctggaggagcagaaggatggggcccgggcagcggctgtggctgacaagaagaaaggcctcatggggccactgaccgaactggacactaaagatgtggatgccctgctgaagaagtctgaggcccagcatgaacagccggaagatggatgcccctttggtgccctgacgcagcgcctcctgcaggccctggtggaggaaaatattatttcccctatggaggattctcctattcctgacatgtctgggaaagaatcaggggctgacggggcaagcacctcccctcgcaatcagaacaagcccttcagtgtgccgcatactaagtccctggagagccgcatcaaggaggagctaattgcccagggccttttggagtctgaggaccgccccgcagaggactccgaggatgaggtccttgctgagcttcgcaaacggcaggctgagctgaaggcacttagtgcccacaaccgcaccaagaagcacgacctgctgaggctggcaaaggaggaggtgagccggcaggagctgaggcagcgggtgcgcatggctgacaacgaggtcatggacgcctttcgcaagatcatggctgcccggcagaagaagcggactcccaccaagaaagaaaaggaccaggcctggaagactctgaaggagcgtgagagcatcctgaagctgctggatgggtagccctcacccctgcctcaggctgattatctggcctaggggaggggaagggaggcccacttccttctttgggcacaggaaacattggcctgtggctgtccctcaaatggcggcagtctctagagggccgtggcccttcccctgaggtcttttggcctagctctgtacaaccaggacacaggaagccctgctgggctagcctgaggcctagtctctgcttggtccccgagatggggttggaggggacttcgtttctgggtcttcctcttcccctctttaccatcccccactccctaatcccctacccctgtctccccttcaaggacttctcccttgtggttttgtaaagtgcaaacttaagaataaagtgactgctgtggtttttcaaaaaaag

SEQ ID NO: 352201 - DNA, 2339 bp, Homo sapiens
ccccatcctttctctcgcccctcctacccgcagctcctggcgctcggcggggctaactgcagcgcggagatctcggccgccaagctccgcctcccgccccgggctgtgccccggggctcgcctgaggccgaccacccgcaccccacctctagcggctttgctcgaggcccaccttcttcccacccccggcaaactccagtaggctcgccctcgctgactccccgcccccgcgtcaactgcaaggggcccgcccatagccagttccggggcggttgctcacatcgaccggaactccccgccccctcccgcggcccctggggccgtaggaggccgcagcgaggaggtagagggggcgggggtcgcactagggtgtccctagagaacgaggactctgaaggcgggacatttgggcgacccccgggcggggccagccattaaacagtcccacttctgtgccagacactgaactgggctcttgacgggcatcatctcttaatcctcagaacatcccagggagctccacaggatccccatatcctgggccatgagtgagttgaaagactgccccttgcagttccacgacttcaagtctgtggatcacctgaaggtctgtccccgctacacggcagtgctggcacgctctgaggatgatggcatcggcatcgaggagctggacaccctgcagctggagctggagaccctgctgtcttctgccagccggcgcctgcgtgtgcttgaggccgaaacccagatcctcaccgactggcaggataagaaaggtgacagacgattcctgaagctgggtcgagaccatgaacttggagctccccccaaacatgggaagcccaagaagcagaaactggaagggaaggcaggacatgggccgggccctggcccaggacggcccaaatccaaaaaccttcagcccaagatccaggaatatgaattcactgatgaccctatcgacgtgccacggatccccaaaaatgatgcccccaacaggttctgggctagagaacatagaagggggcctcaaggttctggtggtggaggcactggtggggcaggggcgcccactcaggatctgcttctccctgcaggttctgggcttcagtggagccctactgtgctgacatcaccagcgaggaggtccgcacacttgaggagttactgaagcccccagaagatgaggctgagcattacaagttacaagatcccacccctggggaagcactactcccagcgctgggcccaggaggacctgctggaggagcagaaggatggggcccgggcagcggctgtggctgacaagaagaaaggcctcatggggccactgaccgaactggacactaaagatgtggatgccctgctgaagaagtctgaggcccagcatgaacagccggaagatggatgcccctttggtgccctgacgcagcgcctcctgcaggccctggtggaggaaaatattatttcccctatggaggattctcctattcctgacatgtctgggaaagaatcaggggctgacggggcaagcacctcccctcgcaatcagaacaagcccttcagtgtgccgcatactaagtccctggagagccgcatcaaggaggagctaattgcccagggccttttggagtctgaggaccgccccgcagaggactccgaggatgaggtccttgctgagcttcgcaaacggcaggctgagctgaaggcacttagtgcccacaaccgcaccaagaagcacgacctgctgaggctggcaaaggaggaggtgagccggcaggagctgaggcagcgggtgcgcatggctgacaacgaggtcatggacgcctttcgcaagatcatggctgcccggcagaagaagcggactcccaccaagaaagaaaaggaccaggcctggaagactctgaaggagcgtgagagcatcctgaagctgctggatgggtagccctcacccctgcctcaggctgattatctggcctaggggaggggaagggaggcccacttccttctttgggcacaggaaacattggcctgtggctgtccctcaaatggcggcagtctctagagggccgtggcccttcccctgaggtcttttggcctagctctgtacaaccaggacacaggaagccctgctgggctagcctgaggcctagtctctgcttggtccccgagatggggttggaggggacttcgtttctgggtcttcctcttcccctctttaccatcccccactccctaatcccctacccctgtctccccttcaaggacttctcccttgtggttttgtaaagtgcaaacttaagaataaagtgactgctgtggtttttcaaaaaaag

SEQ ID NO: 352202 - DNA, 1968 bp, Homo sapiens
ccccatcctttctctcgcccctcctacccgcagctcctggcgctcggcggggctaactgcagcgcggagatctcggccgccaagctccgcctcccgccccgggctgtgccccggggctcgcctgaggccgaccacccgcaccccacctctagcggctttgctcgaggcccaccttcttcccacccccggcaaactccagtaggctcgccctcgctgactccccgcccccgcgtcaactgcaaggggcccgcccatagccagttccggggcggttgctcacatcgaccggaactccccgccccctcccgcggcccctggggccgtaggaggccgcagcgaggaggtagagggggcgggggtcgcactagggtgtccctagagaacgaggactctgaaggcgggacatttgggcgacccccgggcggggccagccattaaacagtcccacttctgtgccagacactgaactgggctcttgacgggcatcatctcttaatcctcagaacatcccagggagctccacaggatccccatatcctgggccatgagtgagttgaaagactgccccttgcagttccacgacttcaagtctgtggatcacctgaaggtctgtccccgctacacggcagtgctggcacgctctgaggatgatggcatcggcatcgaggagctggacaccctgcagctggagctggagaccctgctgtcttctgccagccggcgcctgcgtgtgcttgaggccgaaacccagatcctcaccgactggcaggataagaaaggtgacagacgattcctgaagctgggtcgagaccatgaacttggagctccccccaaacatgggaagcccaagaagcagaaactggaagggaaggcaggacatgggccgggccctggcccaggacggcccaaatccaaaaaccttcagcccaagatccaggaatatgaattcactgatgaccctatcgacgtgccacggatccccaaaaatgatgcccccaacaggttctgggcttcagtggagccctactgtgctgacatcaccagcgaggaggtccgcacacttgaggagttactgaagcccccagaagatgaggctgagcattacaagatcccacccctggggaagcactactcccagcgctgggcccaggaggacctgctggaggagcagaaggatggggcccgggcagcggctgtggctgacaagaagaaaggcctcatggggccactgaccgaactggacactaaaggtaggcctctcacctccctgccaaccccaggtcaggacttgaattccagaacttcagcccacctcccctcctttcctgtgcccgcttagatgtggatgccctgctgaagaagtctgaggcccagcatgaacagccggaagatggatgcccctttggtgccctgacgcagcgcctcctgcaggccctggtggaggtgagcagcctaacccaaaagaggaaccatatttactttgtgttttaatgtgttatgcttattttttatcggaatttatcatacatttattaggttggtgcaaaaataggttggtgcaaaagtaaaaacctggactaatatatagcaaaagattgggaataatatataacttgtgcacctaatagaaaagtgcacagatcataaatgtacagttttcacaaatgagcttgtattaccagcctggagattacaaaatgaaacattactatatcctagaagcccctctcatgcccctgtttttctccaactttccccaaaggtagccttactccacaattacttttgctaagcatctgttggaggggctttatacacatcctcccactggaggccaggacagtggttaacgctgtgttacagataagaagattgaggctcagaaaagggaactgttcacttgaggtctcacacaccaggattcaaaccctagcttcaggggccccgtctttatacctgctggttgac

SEQ ID NO: 352203 - DNA, 1247 bp, Homo sapiens
ccccatcctttctctcgcccctcctacccgcagctcctggcgctcggcggggctaactgcagcgcggagatctcggccgccaagctccgcctcccgccccgggctgtgccccggggctcgcctgaggccgaccacccgcaccccacctctagcggctttgctcgaggcccaccttcttcccacccccggcaaactccagtaggctcgccctcgctgactccccgcccccgcgtcaactgcaaggggcccgcccatagccagttccggggcggttgctcacatcgaccggaactccccgccccctcccgcggcccctggggccgtaggaggccgcagcgaggaggtagagggggcgggggtcgcactagggtgtccctagagaacgaggactctgaaggcgggacatttgggcgacccccgggcggggccagccattaaacagtcccacttctgtgccagacactgaactgggctcttgacgggcatcatctcttaatcctcagaacatcccagggagctccacaggatccccatatcctgggccatgagtgagttgaaagactgccccttgcagttccacgacttcaagtctgtggatcacctgaaggtctgtccccgctacacggcagtgctggcacgctctgaggatgatggcatcggcatcgaggagctggacaccctgcagctggagctggagaccctgctgtcttctgccagccggcgcctgcgtgtgcttgaggccgaaacccagatcctcaccgactggcaggataagaaaggtgacagacgattcctgaagctgggtcgagaccatgaacttggagctccccccaaacatgggaagcccaagaagcagaaactggaagggaaggcaggacatgggccgggccctggcccaggacggcccaaatccaaaaaccttcagcccaagatccaggaatatgaattcactgatgaccctatcgacgtgccacggatccccaaaaatgatgcccccaacaggttctgggcttcagtggagccctactgtgctgacatcaccagcgaggaggtccgcacacttgaggagttactgaagcccccagaagatgaggctgagcattacaagttacaaggtagaaactctgggccttgatagacatgatgcggaacaagagagttcagaggtgcctgagaagtaaagctaccaaagccatgcatcatcttccttccccaaccctgcccagtctgctgtctgctccatcagt

SEQ ID NO: 352204 - DNA, 632 bp, Homo sapiens
gcctactactactaaattcgcggccgcgtcgacaacagatgatatcaatctattagttattattcaaggacacatttgtcatgcaaattacttttgcccagaaaatgcttcgtctgctattttagtataggtggaactggcagagccttagtctgcctgtagttgagagagatacccaatctaaacagcactatccagtagaattttatgcaatacagaaaacagtctatatctccactctccaatacagcggccactagtcacttttgattatttggagtgtggctaatacgactgagaaactcaatttttaatttaatttaactttaattttaagctaaatagccacttgtggcctgtggctcctgtattagacagcatgcctctagaagacaaccaattgtaatgcaagccctccctgaaataaaacatggaaatagcagggctgggcacagtggcgcacacctataatcccaaagtgctaagattacaggcacgtgcttgtagtttcagctacttgggaggctgaggtgggagatctcttgaacccgggaggttaagagtgcagtaagtcatgatcacacacactgcactccagcatgggcaacaaggtgaaaccctgtctcaagaga

SEQ ID NO: 352205 - DNA, 708 bp, Homo sapiens
gcctactactactaaattcgcggccgcgtcgacaacagatgatatcaatctattagttattattcaaggacacatttgtcatgcaaattacttttgcccagaaaatgcttcgtctgctattttagtataggtggaactggcagagccttagtctgcctgtagttgagagagatacccaatctaaacagcactatccagtagaattttatgcaatacagaaaacagtctatatctccactctccaatacagcggccactagtcacttttgattatttggagtgtggctaatacgactgagaaactcaatttttaatttaatttaactttaattttaagctaaatagccacttgtggcctgtggctcctgtattagacagcatgcctctagaagacaaccaattgtaatgcaagccctccctgaaataaaacatggaaatagcagggctgggcacagtggcaaagatttcaagctcacgtgcaacctccagctcccgggttcaagcagttctcctgcctcacccttgctgagtagctgggattacaggcacacgccaagcatacccagctaattttcatattctaacgtagagacagggtttcacccatattgggcaggctggtctcgaactcctggacctagtgatttggcccgacttggactcccaaagtgctaggattacaggtgtgacgcaacagtggcccagctg

SEQ ID NO: 352206 - DNA, 420 bp, Homo sapiens
gagtgtggctaatacgactgagaaactcaatttttaatttaatttaactttaattttaagctaaatagccacttgtggcctgtggctcctgtattagacagcatgcctctagaagacaaccaattgtaatgcaagccctccctgaaataaaacatggaaatagcagggctgggcacagtggcgcacacctataatcccaacactttgggaggccgaggcaggaagactgatcgtcaatatagggagacctcatctctacagaaaaatttttaaaattagctgagtgtggtggcatatccctatagtcccagcagcctgggaggctgaggtgggaggctgcagtgagccatggtcatgccactgtactccagcctgggtaacagagtgagaccctgtctcaaaacaaacaaggaaatattg

SEQ ID NO: 352207 - DNA, 740 bp, Homo sapiens
atccatggcctagaggaggcgggtgcagagcctccggtgtttgccttcctattcccctttgggcaccaaagtaggctgagctgagaccaggatccggaacttcaacctgtgaatttagagatggggtttcaccgtggtctcgatcttctgacctcgtgatccgcctgcctcagcctcccagagtgctgggattacaagcgtgagccactgcgcccggcctcctctgggcaaacattaagaacggctctaagtagctacgagaatgatgggaaacaattacgtggttcatggaactatgaagggagatcctgtaatcttcagcaaaggctccttggagctgggaaggaatgagatttgcaccactgtaaaccctacagtatttccagcccaagaataaggagggagaagctgagctgagggctacagacaacaccgtgtacaaaccacagcaaatttattactcaagatccagtgccacattatagcaccacccgaagccctcaccttccccctcccaacctggcccctagagtacacccaaaacagaaaaaaaaaaggaaacccagatccctgctcctcctctggaagagggggccttggccaggaagccccttccataggtcccagcaggcaggagagtggacccctctgtgcccagagagcaaggctccaggctccaacaacagagagaacatgcaggcaggagcaggagcagaggcctgtggctatgggggaggaaa

SEQ ID NO: 352208 - DNA, 3309 bp, Homo sapiens
  misc_feature (5)..(5): n is a, c, g, or t
ggtgntctagaggatcccgttgtcagtggggatgggccatttgcaggtggggaggtggacaaaagactgcaccagctgaagactcagttggctactttgaccagttctttggctacagtcactcaggagaagtcccgcatggaggcttcttacttggctgacaagaaaaagatgaaacaggacttagaggatgccagtaacaaggcggaggaggagagggcccgcctggagggagaattgaaggggctgcaggagcaaatagcagaaaccaaagcccggcttatcacgcagcagcatgatcgggcccaagagcagagtgaccatgccttgatgctgcgtgagctccagaagctgctgcaggaggagaggacccagcgccaggacttggagcttaggttagaagagacccgagaagccttggcaggacgagcatatgcagctgaacagatggaaggatttgaactgcagaccaagcagctgacccgtgaggtggaggagctgaaaagtgaactgcaggccattcgagatgagaagaatcagccagatccccggctgcaagaacttcaggaagaggctgcccgccttaagagccatttccaggctcagttacagcaggaaatgagaaagacagctcttgcagaggatcaactccgtcagcaatctcaggtagaagaacagagggtggcagccctggagaatcaaatatccgaggtgtctgagctgctaggcacctacgagaaagccaagcagaaggaccagctggccattcagaagctgaaggagcgcattctgcagctggacctggagaacaagacactggctctagcagcctccagcaggtcccctttagacagccatggagaggagtccagtctggatgtcaatgtcctgaaagataagatggagaagctgaagaggctgctgcaggttgcggccaggaaaagccaggtgaccctggatgtggagaagctctgtgacctggagataatgcccagctcggaggctgctgatggggagaaggctactgcactctattaccaacaggagctgaaacagctgaaggaagagtttgagaggtacaagatgagagcccaggttgtcctcaaaagcaagaataccaaagatggtaacctgggaaaggagctggaggcagcccaggaacagcttgcagagctgaaggagaagtatatttccctgcggctctcctgcgaggagctggagcaccaacaccagcaggaggctgatgactggaagcaggagctggcccggctgcagcagctccaccggcaggagctggagcggtgccagctggacttcagggaccgcacactgaaactggaggaggagctgcacaagcagcgggatcgtgccctagctgtgctcaccgagaaggacttggaactggagcaactgcgttctgtggccttggcctctgggctgccaggacgcagaagtcctgtgggtggtggcggtcctggggacccagctgacacatcatcctctgatagcctgacccaagcattacaacttgcagcggccaatgagcccactttctttctgtacgctgagcaactggcccgcaaggaggtggagatcacatcactgaggaagcagaagcacaggctggaggtcgaggtgcatcagctgcaggatcggctgctggaggagggcgaacggcatcgtgaggaggttgcagccctgcagagccacatcgaaaagaacatcagggaccagagcagggagggagccaatctggagtacctcaaaaacatcatctaccgcttcctgaccttacctgactccctgggccgccagcagactctcacagccatactgactatcttgcacttcagtccagaggagaaacaagtgataatgcgactcccaaccagtgccagctggtggccttctggcaagagatgatgccattttcatgaattcctggaatttctgtgcctcttttatgtgggaaagggcaggctctggtttctgctgcctcttctcttacattgtcatttatttcttcactgtgttgagctgggaggagtcttcaatgtgggaagggattttctgccaaatgccattaatgctgctttatccttaggccctagagatactgaaagtcctggggcagtatcttctgatggtgtgcatgtgaggagaagatgaggttaggactgagaagtgcagaagttggaacagtggtaaggctgttttaaaataagatgttttgttttaataatatgctcctggcacaaagctaggagtaaatgtgactccaaagggagttcagttaatctctgaaatgcacaaaacctagctattttctccctctcatcacagtctgagtctggtccattgctaccccaattctctggggacataaaaccaggctggaaagggaccaggaagtttgaaatagtgacatatcatccactagtcccaagggctaaggaatagtgagtttattctggaaggaactgggaagcttagtctaattagtgcctggggatgacctatgcaatcacaccgcttatgaccatcctagagagggccctgagcaccagcttgatcttagggatttccaaagtaacctgctttttgcctggatagggttaaaatagacctttcttgcctatccttgccttaacctatctgcctgaggttggcctgagattgtgagtcaacgactttgctatcttttcctcagtgttgaactttcattaagaaataaagtcctagcttcttacagagaggggtccaaatggtgaatgctcatcctgcctggattcaaggaattagctcagagattggcccctagcttttctgcctttgtagggacagcaaaaggggaaaatttgctgcagaaaattccaaaagattgctgtagctctcacagggaagtggtaaagatcagctaaacctgggttggggtgctttctgcccagtgggtcttggcataagtagattaatcctgctcttttaagaaaaggcaacttattcaggcagtctggaaagggggttctcagaaaactcagtttctttattccttcttttctcccaactactgttactggttatagaggtctttggactctaaagaccaatgtttggccactaactggactaatatgtatctttctgtgatttcatcatagaggtctgttttgtgagggtttggggtgcagaaaactttgattaaatcttaatgggaggctgggtgacctggattatctacagtgagcagacttaaatggaacagaagtttatgtgtccaaatgatggaatcattaaacctgagtgacttga

SEQ ID NO: 352209 - DNA, 4190 bp, Homo sapiens
cgccgttgtcggcaggcagctttagttaggatgtcgtgatgggaccgagctcagcgtaaccctctggccgacgtgggccgagggggccggcccgggctgctgtggcccagacgagcggagagtgcggagcggcttctgggccagcgctaacgagccctggcagtgcgcacctctggtgccagtgtcgccccgcctccggggtagaatccgccccagccctccgggcctgggaccgggcggccgctttcgccagtccgtccggccgttccgcattaggtccgggataactaggtggagtaggtgtgcggcccgccgccggacagcccgctcgctgtttctttaagcccccgcctgcgtcttcacggccctctcccgttctgctggaaagctgacgtggggcaatccgttcagaccctccatggagaagtttgggatgaatttcgggggcggcccgagcaagaaggacttgctggagactatagagacccagaagaagcagcttctccagtaccaggcacggctcaaggatgtggtccgtgcctataaaagcctgctgaaggagaaagaggcattagaggccagcatcaaggtgctgtcggtatcccacgaggcagatgtgggcctcgcaggtgtccagcttccaggcctcacctttcctgactctgtggatgaccggtgctccactcacagcgaggatagcactgggaccgccactagcttggatactgcggccagtctcaccagcaccaagggtgagtttggggtagaagatgacagaccggcccgtggaccaccacctccaaagtccgaagaggccagttggtccgagagtggcgttagcagtagcagtggggatgggccatttgcaggtggggaggtggacaaaagactgcaccagctgaagactcagttggctactttgaccagttctttggctacagtcactcaggagaagtcccgcatggaggcttcttacttggctgacaagaaaaagatgaaacaggacttagaggatgccagtaacaaggcggaggaggagagggcccgcctggagggagaattgaaggggctgcaggagcaaatagcagaaaccaaagcccggcttatcacgcagcagcatgatcgggcccaagagcagagtgaccatgccttgatgctgcgtgagctccagaagctgctgcaggaggagaggacccagcgccaggacttggagcttaggttagaagagacccgagaagccttggcaggacgagcatatgcagctgaacagatggaaggatttgaactgcagaccaagcagctgacccgtgaggtggaggagctgaaaagtgaactgcaggccattcgagatgagaagaatcagccagatccccggctgcaagaacttcaggaagaggctgcccgccttaagagccatttccaggctcagttacagcaggaaatgagaaagacagctcttgcagaggatcaactccgtcagcaatctcaggtagaagaacagagggtggcagccctggagaatcaaatatccgaggtgtctgagctgctaggcacctacgagaaagccaagcagaaggaccagctggccattcagaagctgaaggagcgcattctgcagctggacctggagaacaagacactggctctagcagcctccagcaggtcccctttagacagccatggagaggagtccagtctggatgtcaatgtcctgaaagataagatggagaagctgaagaggctgctgcaggttgcggccaggaaaagccaggtgaccctggatgtggagaagctctgtgacctggagataatgcccagctcggaggctgctgatggggagaaggctactgcactctattaccaacaggagctgaaacagctgaaggaagagtttgagaggtacaagatgagagcccaggttgtcctcaaaagcaagaataccaaagatggtaacctgggaaaggagctggaggcagcccaggaacagcttgcagagctgaaggagaagtatatttccctgcggctctcctgcgaggagctggagcaccaacaccagcaggaggctgatgactggaagcaggagctggcccggctgcagcagctccaccggcaggagctggagcggtgccagctggacttcagggaccgcacactgaaactggaggaggagctgcacaagcagcgggatcgtgccctagctgtgctcaccgagaaggacttggaactggagcaactgcgttctgtggccttggcctctgggctgccaggacgcagaagtcctgtgggtggtggcggtcctggggacccagctgacacatcatcctctgatagcctgacccaagcattacaacttgcagcggccaatgagcccactttctttctgtacgctgagcaactggcccgcaaggaggtggagatcacatcactgaggaagcagaagcacaggctggaggtcgaggtgcatcagctgcaggatcggctgctggaggagggcgaacggcatcgtgaggaggttgcagccctgcagagccacatcgaaaagaacatcagggaccagagcagggagggagccaatctggagtacctcaaaaacatcatctaccgcttcctgaccttacctgactccctgggccgccagcagactctcacagccatactgactatcttgcacttcagtccagaggagaaacaagtgataatgcgactcccaaccagtgccagctggtggccttctggcaagagatgatgccattttcatgaattcctggaatttctgtgcctcttttatgtgggaaagggcaggctctggtttctgctgcctcttctcttacattgtcatttatttcttcactgtgttgagctgggaggagtcttcaatgtgggaagggattttctgccaaatgccattaatgctgctttatccttaggccctagagatactgaaagtcctggggcagtatcttctgatggtgtgcatgtgaggagaagatgaggttaggactgagaagtgcagaagttggaacagtggtaaggctgttttaaaataagatgttttgttttaataatatgctcctggcacaaagctaggagtaaatgtgactccaaagggagttcagttaatctctgaaatgcacaaaacctagctattttctccctctcatcacagtctgagtctggtccattgctaccccaattctctggggacataaaaccaggctggaaagggaccaggaagtttgaaatagtgacatatcatccactagtcccaagggctaaggaatagtgagtttattctggaaggaactgggaagcttagtctaattagtgcctggggatgacctatgcaatcacaccgcttatgaccatcctagagagggccctgagcaccagcttgatcttagggatttccaaagtaacctgctttttgcctggatagggttaaaatagacctttcttgcctatccttgccttaacctatctgcctgaggttggcctgagattgtgagtcaacgactttgctatcttttcctcagtgttgaactttcattaagaaataaagtcctagcttcttacagagaggggtccaaatggtgaatgctcatcctgcctggattcaaggaattagctcagagattggcccctagcttttctgcctttgtagggacagcaaaaggggaaaatttgctgcagaaaattccaaaagattgctgtagctctcacagggaagtggtaaagatcagctaaacctgggttggggtgctttctgcccagtgggtcttggcataagtagattaatcctgctcttttaagaaaaggcaacttattcaggcagtctggaaagggggttctcagaaaactcagtttctttattccttcttttctcccaactactgttactggttatagaggtctttggactctaaagaccaatgtttggccactaactggactaatatgtatctttctgtgatttcatcatagaggtctgttttgtgagggtttggggtgcagaaaactttgattaaatcttaatgggaggctgggtgacctggattatctacagtgagcagacttaaatggaacagaagtttatgtgtccaaatgatggaatcattaaacctgagtgacttgacctgtgtggttccttaatagtatctatatatctagacaaaaatagattgtgaatgtaa

SEQ ID NO: 352210 - DNA, 1261 bp, Homo sapiens
  misc_feature (15)..(15): n is a, c, g, or t
  misc_feature (37)..(37): n is a, c, g, or t
gctcgcactggagcnttcaagtccggttatgtgagancagactaggactctcttgctgcctctaattgcatttcactgtcaccctccctcttctgatggtgtgcatgtgaggagaagatgaggttaggactgagaagtgcagaagttggaacagtggtaaggctgttttaaaataagatgttttgttttaataatatgctcctggcacaaagctaggagtaaatgtgactccaaagggagttcagttaatctctgaaatgcacaaaacctagctattttctccctctcatcacagtctgagtctggtccattgctaccccaattctctggggacataaaaccaggctggaaagggaccaggaagtttgaaatagtgacatatcatccactagtcccaagggctaaggaatagtgagtttattctggaaggaactgggaagcttagtctaattagtgcctggggatgacctatgcaatcacaccgcttatgaccatcctagagagggccctgagcaccagcttgatcttagggatttccaaagtaacctgctttttgcctggatagggttaaaatagacctttcttgcctatccttgccttaacctatctgcctgaggttggcctgagattgtgagtcaacgactttgctatcttttcctcagtgttgaactttcattaagaaataaagtcctagcttcttacagagaggggtccaaatggtgaatgctcatcctgcctggattcaaggaattagctcagagattggcccctagcttttctgcctttgtagggacagcaaaaggggaaaatttgctgcagaaaattccaaaagattgctgtagctctcacagggaagtggtaaagatcagctaaacctgggttggggtgctttctgcccagtgggtcttggcataagtagattaatcctgctcttttaagaaaaggcaacttattcaggcagtctggaaagggggttctcagaaaactcagtttctttattccttcttttctcccaactactgttactggttatagaggtctttggactctaaagaccaatgtttggccactaactggactaatatgtatctttctgtgatttcatcatagaggtctgttttgtgagggtttggggtgcagaaaactttgattaaatcttaatgggaggctgggtgacctggattatctacagtgagcagacttaaatggaacagaagtttatgtgtccaaatgatggaatcattaaacctgagtgacttga

SEQ ID NO: 352211 - DNA, 4132 bp, Homo sapiens
cgccgttgtcggcaggcagctttagttaggatgtcgtgatgggaccgagctcagcgtaaccctctggccgacgtgggccgagggggccggcccgggctgctgtggcccagacgagcggagagtgcggagcggcttctgggccagcgctaacgagccctggcagtgcgcacctctggtgccagtgtcgccccgcctccggggtagaatccgccccagccctccgggcctgggaccgggcggccgctttcgccagtccgtccggccgttccgcattaggtccgggataactaggtggagtaggtgtgcggcccgccgccggacagcccgctcgctgtttctttaagcccccgcctgcgtcttcacggccctctcccgttctgctggaaagctgacgtggggcaatccgttcagaccctccatggagaagtttgggatgaatttcgggggcggcccgagcaagaaggacttgctggagactatagagacccagaagaagcagcttctccagtaccaggcacggctcaaggatgtggtccgtgcctataaaagcctgctgaaggagaaagaggcattagaggccagcatcaaggtgctgtcggtatcccacgaggcagatgtgggcctcgcaggtgtccagcttccaggcctcacctttcctgactctgtggatgaccggtgctccactcacagcgaggatagcactgggaccgccactagcttggatactgcggccagtctcaccagcaccaagggtgagtttggggtagaagatgacagaccggcccgtggaccaccacctccaaagtccgaagaggccagttggtccgagagtggcgttagcagtagcagtggggatgggccatttgcaggtggggaggtggacaaaagactgcaccagctgaagactcagttggctactttgaccagttctttggctacagtcactcaggagaagtcccgcatggaggcttcttacttggctgacaagaaaaagatgaaacaggacttagaggatgccagtaacaaggcggaggaggagagggcccgcctggagggagaattgaaggggctgcaggagcaaatagcagaaaccaaagcccggcttatcacgcagcagcatgatcgggcccaagagcagagtgaccatgccttgatgctgcgtgagctccagaagctgctgcaggaggagaggacccagcgccaggacttggagcttaggttagaagagacccgagaagccttggcaggacgagcatatgcagctgaacagatggaaggatttgaactgcagaccaagcagctgacccgtgaggtggaggagctgaaaagtgaactgcaggccattcgagatgagaagaatcagccagatccccggctgcaagaacttcaggaagaggctgcccgccttaagagccatttccaggctcagttacagcaggaaatgagaaagacagctcttgcagaggatcaactccgtcagcaatctcaggtagaagaacagagggtggcagccctggagaatcaaatatccgaggtgtctgagctgctaggcacctacgagaaagccaagcagaaggaccagctggccattcagaagctgaaggagcgcattctgcagctggacctggagaacaagacactggctctagcagcctccagcaggtcccctttagacagccatggagaggagtccagtctggatgtcaatgtcctgaaagataagatggagaagctgaagaggctgctgcaggttgcggccaggaaaagccaggtgaccctggatgtggagaagctctgtgacctggagataatgcccagctcggaggctgctgatggggagaaggctactgcactctattaccaacaggagctgaaacagctgaaggaagagtttgagaggtacaagatgagagcccaggttgtcctcaaaagcaagaataccaaagatggtaacctgggaaaggagctggaggcagcccaggaacagcttgcagagctgaaggagaagtatatttccctgcggctctcctgcgaggagctggagcaccaacaccagcaggaggctgatgactggaagcaggagctggcccggctgcagcagctccaccggcaggagctggagcggtgccagctggacttcagggaccgcacactgaaactggaggaggagctgcacaagcagcgggatcgtgccctagctgtgctcaccgagaaggacttggaactggagcaactgcgttctgtggccttggcctctgggctgccaggacgcagaagtcctgtgggtggtggcggtcctggggacccagctgacacatcatcctctgatagcctgacccaagcattacaacttgcagcggccaatgagcccactttctttctgtacgctgagcaactggcccgcaaggaggtggagatcacatcactgaggaagcagaagcacaggctggaggtcgaggtgcatcagctgcaggatcggctgctggaggagggcgaacggcatcgtgaggaggttgcagccctgcagagccacatcgaaaagaacatcagggaccagagcagggagggagccaatctggagtacctcaaaaacatcatctaccgcttcctgaccttacctgactccctgggccgccagcagactctcacagccatactgactatcttgcacttcagtccagaggagaaacaagtgataatgcgactcccaaccagtgccagctggtggccttctggcaagagatgatgccattttcatgaattcctggaatttctgtgcctcttttatgtgggaaagggcaggctctggtttctgctgcctcttctcttacattgtcatttatttcttcactgtgttgagctgggaggagtcttcaatgtgggaagggattttctgccaaatgccattaatgctgctttatccttaggccctagagatactgaaagtcctggggcagtatcttctgatggtgtgcatgtgaggagaagatgaggttaggactgagaagtgcagaagttggaacagtggtaaggctgttttaaaataagatgttttgttttaataatatgctcctggcacaaagctaggagtaaatgtgactccaaagggagttcagttaatctctgaaatgcacaaaacctagctattttctccctctcatcacagtctgagtctggtccattgctaccccaattctctggggacataaaaccaggctggaaagggaccaggaagtttgaaatagtgacatatcatccactagtcccaagggctaaggaatagtgagtttattctggaaggaactgggaagcttagtctaattagtgcctggggatgacctatgcaatcacaccgcttatgaccatcctagagagggccctgagcaccagcttgatcttagggatttccaaagtaacctgctttttgcctggatagggttaaaatagacctttcttgcctatccttgccttaacctatctgcctgaggttggcctgagattgtgagtcaacgactttgctatcttttcctcagtgttgaactttcattaagaaataaagtcctagcttcttacagagaggggtccaaatggtgaatgctcatcctgcctggattcaaggaattagctcagagattggcccctagcttttctgcctttgtagggacagcaaaaggggaaaatttgctgcagaaaattccaaaagattgctgtagctctcacagggaagtggtaaagatcagctaaacctgggttggggtgctttctgcccagtgggtcttggcataagtagattaatcctgctcttttaagaaaaggcaacttattcaggcagtctggaaagggggttctcagaaaactcagtttctttattccttcttttctcccaactactgttactggttatagaggtctttggactctaaagaccaatgtttggccactaactggactaatatgtatctttctgtgatttcatcatagaggtctgttttgtgagggtttggggtgcagaaaactttgattaaatcttaatgggaggctgggtgacctggattatctacagtgagcagacttaaatggaacagaagtttatgtgtccaaatgatggaatcattaaacctgagtgacttga

SEQ ID NO: 352212 - DNA, 2996 bp, Homo sapiens
atccatggcctagaggaggcgggtgcagagcctccggtgtttgccttcctattcccctttgggcaccaaagtaggctgagctgagaccaggatccggaacttcaacctgtgaatttagtaaactctacagaagtttacagaactctatagaagctctacaggagtcatggcacaaactagagaccccactgcaaagaggaagtagtttatccaaagatgtgcaaggaaataaagacatgttatgagggctaaatcaggcagcctggtcccagaatcctgcttctaaagagaagtccaagctggggaagactaagacagctcttgcagaggatcaactccgtcagcaatctcaggtagaagaacagagggtggcagccctggagaatcaaatatccgaggtgtctgagctgctaggcacctacgagaaagccaagcagaaggaccagctggccattcagaagctgaaggagcgcattctgcagctggacctggagaacaagacactggctctagcagcctccagcaggtcccctttagacagccatggagaggagtccagtctggatgtcaatgtcctgaaagataagatggagaagctgaagaggctgctgcaggttgcggccaggaaaagccaggtgaccctggatgtggagaagctctgtgacctggagataatgcccagctcggaggctgctgatggggagaaggctactgcactctattaccaacaggagctgaaacagctgaaggaagagtttgagaggtacaagatgagagcccaggttgtcctcaaaagcaagaataccaaagatggtaacctgggaaaggagctggaggcagcccaggaacagcttgcagagctgaaggagaagtatatttccctgcggctctcctgcgaggagctggagcaccaacaccagcaggaggctgatgactggaagcaggagctggcccggctgcagcagctccaccggcaggagctggagcggtgccagctggacttcagggaccgcacactgaaactggaggaggagctgcacaagcagcgggatcgtgccctagctgtgctcaccgagaaggacttggaactggagcaactgcgttctgtggccttggcctctgggctgccaggacgcagaagtcctgtgggtggtggcggtcctggggacccagctgacacatcatcctctgatagcctgacccaagcattacaacttgcagcggccaatgagcccactttctttctgtacgctgagcaactggcccgcaaggaggtggagatcacatcactgaggaagcagaagcacaggctggaggtcgaggtgcatcagctgcaggatcggctgctggaggagggcgaacggcatcgtgaggaggttgcagccctgcagagccacatcgaaaagaacatcagggaccagagcagggagggagccaatctggagtacctcaaaaacatcatctaccgcttcctgaccttacctgactccctgggccgccagcagactctcacagccatactgactatcttgcacttcagtccagaggagaaacaagtgataatgcgactcccaaccagtgccagctggtggccttctggcaagagatgatgccattttcatgaattcctggaatttctgtgcctcttttatgtgggaaagggcaggctctggtttctgctgcctcttctcttacattgtcatttatttcttcactgtgttgagctgggaggagtcttcaatgtgggaagggattttctgccaaatgccattaatgctgctttatccttaggccctagagatactgaaagtcctggggcagtatcttctgatggtgtgcatgtgaggagaagatgaggttaggactgagaagtgcagaagttggaacagtggtaaggctgttttaaaataagatgttttgttttaataatatgctcctggcacaaagctaggagtaaatgtgactccaaagggagttcagttaatctctgaaatgcacaaaacctagctattttctccctctcatcacagtctgagtctggtccattgctaccccaattctctggggacataaaaccaggctggaaagggaccaggaagtttgaaatagtgacatatcatccactagtcccaagggctaaggaatagtgagtttattctggaaggaactgggaagcttagtctaattagtgcctggggatgacctatgcaatcacaccgcttatgaccatcctagagagggccctgagcaccagcttgatcttagggatttccaaagtaacctgctttttgcctggatagggttaaaatagacctttcttgcctatccttgccttaacctatctgcctgaggttggcctgagattgtgagtcaacgactttgctatcttttcctcagtgttgaactttcattaagaaataaagtcctagcttcttacagagaggggtccaaatggtgaatgctcatcctgcctggattcaaggaattagctcagagattggcccctagcttttctgcctttgtagggacagcaaaaggggaaaatttgctgcagaaaattccaaaagattgctgtagctctcacagggaagtggtaaagatcagctaaacctgggttggggtgctttctgcccagtgggtcttggcataagtagattaatcctgctcttttaagaaaaggcaacttattcaggcagtctggaaagggggttctcagaaaactcagtttctttattccttcttttctcccaactactgttactggttatagaggtctttggactctaaagaccaatgtttggccactaactggactaatatgtatctttctgtgatttcatcatagaggtctgttttgtgagggtttggggtgcagaaaactttgattaaatcttaatgggaggctgggtgacctggattatctacagtgagcagacttaaatggaacagaagtttatgtgtccaaatgatggaatcattaaacctgagtgacttga

SEQ ID NO: 352213 - DNA, 2989 bp, Homo sapiens
cgccgttgtcggcaggcagctttagttaggatgtcgtgatgggaccgagctcagcgtaaccctctggccgacgtgggccgagggggccggcccgggctgctgtggcccagacgagcggagagtgcggagcggcttctgggccagcgctaacgagccctggcagtgcgcacctctggtgccagtgtcgccccgcctccggggtagaatccgccccagccctccgggcctgggaccgggcggccgctttcgccagtccgtccggccgttccgcattaggtccgggataactaggtggagtaggtgtgcggcccgccgccggacagcccgctcgctgtttctttaagcccccgcctgcgtcttcacggccctctcccgttctgctggaaagctgacgtggggcaatccgttcagaccctccatggagaagtttgggatgaatttcgggggcggcccgagcaagaaggacttgctggagactatagagacccagaagaagcagcttctccagtaccaggcacggctcaaggatgtggtccgtgcctataaaagcctgctgaaggagaaagaggcattagaggccagcatcaaggtgctgtcggtatcccacgaggcagatgtgggcctcgcaggtgtccagcttccaggcctcacctttcctgactctgtggatgaccggtgctccactcacagcgaggatagcactgggaccgccactagcttggatactgcggccagtctcaccagcaccaagggtgagtttggggtagaagatgacagaccggcccgtggaccaccacctccaaagtccgaagaggccagttggtccgagagtggcgttagcagtagcagtggggatgggccatttgcaggtggggaggtggacaaaagactgcaccagctgaagactcagttggctactttgaccagttctttggctacagtcactcaggagaagtcccgcatggaggcttcttacttggctgacaagaaaaagatgaaacaggacttagaggatgccagtaacaaggcggaggaggagagggcccgcctggagggagaattgaaggggctgcaggagcaaatagcagaaaccaaagcccggcttatcacgcagcagcatgatcgggcccaagagcagagtgaccatgccttgatgctgcgtgagctccagaagctgctgcaggaggagaggacccagcgccaggacttggagcttaggttagaagagacccgagaagccttggcaggacgagcatatgcagctgaacagatggaaggatttgaactgcagaccaagcagctgacccgtgaggtggaggagctgaaaagtgaactgcaggccattcgagatgagaagaatcagccagatccccggctgcaagaacttcaggaagaggctgcccgccttaagagccatttccaggctcagttacagcaggaaatgagaaagacagctcttgcagaggatcaactccgtcagcaatctcaggtagaagaacagagggtggcagccctggagaatcaaatatccgaggtgtctgagctgctaggcacctacgagaaagccaagcagaaggaccagctggccattcagaagctgaaggagcgcattctgcagctggacctggagaacaagacactggctctagcagcctccagcaggtcccctttagacagccatggagaggagtccagtctggatgtcaatgtcctgaaagataagatggagaagctgaagaggctgctgcaggttgcggccaggaaaagccaggtgaccctggatgtggagaagctctgtgacctggagataatgcccagctcggaggctgctgatggggagaaggctactgcactctattaccaacaggagctgaaacagctgaaggaagagtttgagaggtacaagatgagagcccaggttgtcctcaaaagcaagaataccaaagatggtaacctgggaaaggagctggaggcagcccaggaacagcttgcagagctgaaggagaagtatatttccctgcggctctcctgcgaggagctggagcaccaacaccagcaggaggctgatgactggaagcaggagctggcccggctgcagcagctccaccggcaggagctggagcggtgccagctggacttcagggaccgcacactgaaactggaggaggagctgcacaagcagcgggatcgtgccctagctgtgctcaccgagaaggacttggaactggagcaactgcgttctgtggccttggcctctgggctgccaggacgcagaagtcctgtgggtggtggcggtcctggggacccagctgacacatcatcctctgatagcctgacccaagcattacaacttgcagcggccaatgagcccactttctttctgtacgctgagcaactggcccgcaaggaggtggagatcacatcactgaggaagcagaagcacaggctggaggtcgaggtgcatcagctgcaggatcggctgctggaggagggcgaacggcatcgtgaggaggttgcagccctgcagagccacatcgaaaagaacatcagggaccagagcagggagggagccaatctggagtacctcaaaaacatcatctaccgcttcctgaccttacctgactccctgggccgccagcagactctcacagccatactgactatcttgcacttcagtccagaggagaaacaagtgataatgcgactcccaaccagtgccagctggtggccttctggcaagagatgatgccattttcatgaattcctggaatttctgtgcctcttttatgtgggaaagggcaggctctggtttctgctgcctcttctcttacattgtcatttatttcttcactgtgttgagctgggaggagtcttcaatgtgggaagggattttctgccaaatgccattaatgctgctttatccttaggccctagagatactgaaagtcctggggcagtacctcacatgcacaccatcagaaggtcgacg

SEQ ID NO: 352214 - DNA, 1137 bp, Homo sapiens
ctgccacttctgggccatatgtggagacccgtaaagttgtctaaggccttggctatgcagacacaccttgaagctgtttctgctctgggttttgacagacaaggcatgagttgctgcatctgttaaaactgcaaatctatcttggcctggggtgtggagctcagggactcttccttttgggaccctctgtgtcagtattctcactacatcctctcctcctctctcttctttccccctttcgttaatattggaggtgaggaagccttacttaatgttttctcctgaatctttttttttttgagacggagttttgctcttgttgcccaggctggaatgcaatggtgcgatctcagctcactgcaacctctgcctcccgggttcaagtgattctcctgtctcagcctcccgagtagctgggattagaggtgtgcaccaccaagcccagctaatttttgtatttttagtagagatggggtttctccatgttggtcaggctgctctcaaactcccggcctcaggtgatccacccgcctcggcctcccaaagtgctgggattacagttgtgagccaccgcgcctggcctctcctgaatcttttatctatgccttaagccttttctgttcccttcaggacctaggcttttgaaacccaaaagccaggaaaacatgcctttgttatctgctttctgcaatcacgtctcttccatggggcactgagcagagaatggtgtggccaagtgagtagtgagaagcagtgaggaggtgtgagctaggtgtctgttcccattttagaaaatactgttcctacatcagaaataccacattaagacgtatagagccaggtcactgggatgcttgaacccaaatagctgggattctggacagagtcagcagagtacagaaggctctgaagtgggagacggagctggggtgcatccctcccagtgaggaggggtcatgaggggcgtctgggaagagggacatttgaactaggattagctgagttgccatgatgctaagataatgggagagtgttctttgtggtcaccagtgtccacatggcatcccttccctgagattttcatcactccctgtggtcttcagtcagtaaagctcttagaacacttgtaaaaaaaaa

SEQ ID NO: 352215 - DNA, 1504 bp, Homo sapiens
aggcagggggttccccacacctacctgtttatcccaaggtttgagacatcagcgctctggaaatgttgaagtcatggacgagagagaaaggaagctggggaaaatgagagtgtaggcagtgagctctttataggcccctttgcagagctggtctcagctcagcgttgcttcaggaacatggaaataaatgtgttacatggaactcggctggcttgctgatgggagttgcctgggacatttagagatgtgaaaactctggaaaaagaaaaaggaggaggaaattattttcatgcccatagtttttaggaaaatcaaatgtctttaggggaaaaaagagagagagggggagaaagaaaccccttttcctttggtggggaggagccttaaggctgtgttccgatcagccacgcacacatccgtgtcccctggccctaccctgggatgacagagccatcccttcacgttccaaggttgctcctgcctcaaatcccagattttccatgacccagcctggactcagtcccacttacaaccgcttggctccctctctcagcctggagaagcattctggaagcaaagctcctgctccgagcccagctcccttcaaattcattgtcctgatttcctaggtgccttttaaactttccttgtttttctattttcactcctttttttcaccccttcactcctctcttggacattaaaaaaaaaaaaaaaaaaaaaagtcctgtggttccccaaataccaggatgttgtacaggattttccaaattggaaaaaccaaagtaagttgaaaaaaaattttttttttaattctgacttttgttctactaaggaagttcttttgttaggtcatggccttagccatgtgtgggttttctaaggttttccatttttcctgggtttttctccccattcttcctcctgctcccagggatgtaaatgttttcggaatcctggggctgacagagtgtcagtaatgtccaacgtggagggctggatagagtgaggccagggctgtgtgaggtggtttcggccctaaggggaagcagctcccaatctggactgcctgttcagaatatggctaaaaacagggagggagcagaagaggcctccagcagccagaatcagtgtcacgaagcctgtgcagtacatcgtgttagaagacaaacacccagacttaagtcaagaccaatttacttgctgtttacacatagtctcaacaagccaggaaatctgatttcccatgctatagctgattaaaatagttaattagaagtagaccggccaggcacagtggctcacgcctgtaatcccagcacgaggcgggcagatcatctgagttcaggagttcaagaccagcttgggcaacatggcgaaaccccatctttactaaaaatacaaaaaaaaaaaaaaaaattagctgggcgtggtggcacgcgcctgtagtcccagctactggggaggctgaggtgagagaatcacctgagtccgggaggtcaaa

SEQ ID NO: 352216 - DNA, 405 bp, Homo sapiens
gataaataaataaataaaaaattcagcagggttccaaggggtggggaaagtcaggggaagacatgctggaggccaggatgctactttgataactagtaactattaattttagagttacttcattatattttcacatttaatttggccttcacaatcctggaagtcactatttgaaagaaggttgggggaaatacagccttggagacatggcttcgcttggccaatgccaagtagctacaagtggcagggctgggcctcaactttcagacttctgattccagctgcagtgttttagccaggaaaatagtgtagccattaagagtttactcaagaggagagcttgcagtgagccgagatggcaacactgcactccagcctgggcgacagagagagactccgtcccaa

SEQ ID NO: 352217 - DNA, 650 bp, Homo sapiens
gctggattcaacatcatagtcacgagcttaacagttcttgtttcttacaccttcattctctccagcatcctcggcatcagcaccacagaggggagatccaaagccttcagcacctgcagctcccaccttgcagccgtgggaatgttctatggatcaactgcattcatgtacttaaaaccctccacaatcagttccttgacccaggagaatgtggcctctgtgttctacaccacggtaatccccatgttgaatcccctaatctacagcctgaggaacaaggaagtaaaggctgccgtgcagaaaacgctgaggggtaaactgttttgatgcaaatgttattgttccttttcaatttagtggtaattgttataaataccagagtgacagcttctgaatgctggccagctgtggatggaaaataatcacttctccacatggctgggtgaatgggcatttttccttctttcctcttccttccctcttcctttcctcttccttcctcttccttccttcctcttctttcctcttccttccctccctcttttttcacttctctttgaagccagccaacttcaggttcaggttttctttcacttgagatccatccctctaccccaagccctttaataaatgtttcctatcttaattgt

SEQ ID NO: 352218 - DNA, 554 bp, Homo sapiens
gctggattcaacatcatagtcacgagcttaacagttcttgtttcttacaccttcattctctccagcatcctcggcatcagcaccacagaggggagatccaaagccttcagcacctgcagctcccaccttgcagccgtgggaatgttctatggatcaactgcattcatgtacttaaaaccctccacaatcagttccttgacccaggagaatgtggcctctgtgttctacaccacggtaatccccatgttgaatcccctaatctacagcctgaggaacaaggaagtaaaggctgccgtgcagaaaacgctgaggggttgtctctgcactgccatgctcatcagaatcttgttgcttgtgcacatggctgcagaccctatgatctcagaagccctgctgccaacaaaatgggcaagttcatagctgtgggcttgccgctgctgctgatgtccctggcccaggagttttccagtgtgttgctgccactacccggtgcagcaggggtagactacactaccttattcctctcattgcatgggatctggagtaagacagct

SEQ ID NO: 352219 - DNA, 381 bp, Homo sapiens
tttacagaaaagcctgtagtaggaggaggccatctataggtaatgtaatgttggggaccatccagagggcaggaggaagacagccgcttccaggtttgaactcaggacagatcaaccacctgagtgtcgtctgcactctcagaacagccccagagtcttggactccaccagggtttcacaaactcctgccggaattctgagactcccacagagaggcttttgactgtggatggatgcagaattattcttgtggatgttgggatatgagtgggtcaccttccattttgacatcttggtctatcacaatttcccaaacattcttcttgatgttgagtaatgtgtttcaacttcaaggaaataacattttgattaaaaaaaaaa

SEQ ID NO: 352220 - DNA, 651 bp, Homo sapiens
agagtagatgagagagatgtggcaaaagaagaggcagaagagaagaggcaagagaaggattctcccacccattgctgtctttagagatgcaggctatgagccaaaaagcacagatagctccggaagctgaggacaagccacactgcccacactcccgcaactgcccagaactgaattttgccaattacctgcataaatcagaaaatggatgctcactagagtctccagaagggagcctggcttgctgacacctagatttttgtcttgtgagactgatcagaggaattatcccagcacacttgacttctgaaattgtgatatatctatgcctgcagaaacccatgacatgcagaaactatgagttaataaatgaatgttgttttaagccatcaagtgtgtggtaatttgtcacagcagccctagaaaacgaatagactctctaactaacattggtgtttcaaatttaccataggcactgtgtatataatctccctcatacacatgtttccattgatattcaacaaagaagaaaaagaaaagggagggggagaaagtgaagggtcgtggaaagcagtagctcaagaaaaggaagaaggagaactaacaagaggaagaataagaggagaaaggaagaaaaaaataccattttac

SEQ ID NO: 352221 - DNA, 404 bp, Homo sapiens
cagcttggtggcttgagggtatgtaaaagcaatatctgagccttctgcctgcttccaatatgactaagcttaaaaggagataacccaaaaactgcaggatcatcctgattttctgatctccaaaacaataaaaccttgaatatttccctggactcccttaaacagtttaatccctaatatttaccttgctaatctctgacctttgtgacattaatttgtctgacctttgtgagtataataaccatgtgagaaagttactgtttttccaccatgaacagactactgtcaaccggtaatcctggtaattttaggggatttttttttccctttaagtactggttggcaaactagtccttccgtctaactcctcgcatcttttgcaagtaaaccccttttctaagtga

SEQ ID NO: 352222 - DNA, 312 bp, Homo sapiens
gccatgcagttacagaatagggcaggtggcatgtttatatatgcctttgatttcacagaagttggtgagctttcctaagtggagaattttagagctagataggattgttgtgggagagggggcagggaatggagagttgattcttcactcttctgtggtgcagttgaatttacatgtagctggaactgattttccaagggattatgatggcaatgagcttagaagattggttgggttttagcacttcagaattggatcccttgccggaacccttgctaagagggagtggacttgtatttggtacagagacca

SEQ ID NO: 352223 - DNA, 578 bp, Homo sapiens
ccaaggcacacactgtccccacatggccaaaatctactgttcccctgggagggcctctatcccctgcatgcaatcaaactattccagcagggtggaaatcgcagttacacaagtggttcgacagccacatcccccggtgggcctgtacccctcctggctatgtatttttatgtgggccacaaaaaaataaactgccctttgatggaagtcctaagataacttattcaaccccccctgtggcaaacctctacacttgcattaataacatccaacatacgggagaatgtgctgtgggacttttgggaccacgggggataggtgtgaccatttataacaccacccaacccagacagaaaagagctctgggtctaatactggcagggatgggtgcggccataggaatgatcgccccatggggagggttcacttatcatgatgtcaccctcagaaatctctccagacaaatagacaacatagctaagagtaccagagatagcatctctaaactcaaggcctccatagattctctagcaaatgtagtcatgaacaacagattggccttagattacctcttagca

SEQ ID NO: 352224 - DNA, 785 bp, Homo sapiens
gggagaggggcggggccggctttccttgggtgcgcgcgcagctttctgtgcgccagttcacactccgggtcagagttcctggcccggtgcacctgagaggtcgctctccgactcccgcgctggaccctcttgcgccattgaaccccctgatccgggggcctcggaccccagggctcaggaggactgaaccaagacttacccgaagttgccgcggggccttccgatcccctaggccattgcccaagtctggccaggctgatgggaccagcgaggagtctctgcaccttgacattcagaaactgaaggagaagagggacatgctggacaaggagatctcccagttcgtatctgaaggctacagtgtggatgaactggaggaccacattacccagcttcacgagtacaatgacatcaaggatgtggggcagatgctgatgggcaaactagctgtgatccgaggtgtcaccaccaaagagttgtatccagagtttgggctggacatgaatgactgagcaggctcatcgccccttgtccacagctcccagggacagaagggtgtggacatgataaacactgagagcccaaccagcacacctacagagtttccagcgagacaatgccagaagcacttttctagagagcccaagcccaatcaggaggaggctagagaagaggcgggcagggaggaaggggcgttcccagctccaaggttcctgaaatgtcgcagtgatacttgtgtaggggtacatgtactttatttgtcaataaacgtatctgtacactga

SEQ ID NO: 352225 - DNA, 1572 bp, Homo sapiens
  misc_feature (26)..(26): n is a, c, g, or t
ccacgcgtcgcggacggtgggtcganccacgcgtccggctgtggagaaggaaatagggcccggcgctgagtgagcgtggttgcgtgtcctttgcagacactttctggggcgaggtgacatggcgagagtcttggatcggtggacgtagacggtagacagttcgcgtgcgtttccttcgcctacttggcctacatgccttctgcccgtgaagcgatgtttcccctcgaaaggccgtaggctacgccgtcagaatcggtttttcagtgagttttgacccctccgacgctccgtcgcctgacagaatcgcggcgttcttcgtacccgcccatcctccgcggacgcccgctgccatggcgactctgctgcgccctgtcctccgtcggctctgcgggctcccgggcctacagcggcctgcggcagaaatgcccctccgggctaggagcgacggcgccggcccgctatactcgcaccacctccccacctccccgctgcagaaagcgctgttggccgccggctccgcggcgatggcgctctataacccctaccgccacgacatggtcgcagttctaggggagaccacaggacaccgcaccctgaaggtcctcagggaccagatgaggagggatccagagggtgcccagatcctgcaggagcgtccccggatttcgacatccaccctcgacctgggcaagctccagagcctgccggaaggctccctcggtcgcgagtatctccgtttcctggatgtgaacagggtctccccagacacccgagcacccacccgcttcgtggatgatgaggagctagcgtatgtgattcagcggtaccgggaggtgcacgacatgcttcacaccctgctggggatgcccaccaacatcctgggggagatcgtggtgaaatggtttgaggctgtccagactggcctgcccatgtgcatcctgggtgcattctttggaccgatccgacttggcgctcagagcctgcaagtgctggtctcggagttgatcccatgggccgttcagaacgggcgcagagccccatgtgtcctcaacctgtactatgagcggcgctgggagcagtccctgagggctctgcgggaggagctgggcattacagcaccacccatgcacgtccagggcttggcctgagctcctgagccagcggggcctggcctacctcccccatcccctgcttcccttggaggcagagggctcccttgactacctttgttcctcttctttgaacactgacccttggacaacatttatcataatttgtcataaccactgctgagtggccttgaggacgaaccccgcagggagcaagcagtacagtggcattcccagggggaccagcagctacccaaggagaaccatgcatgaacagtatcagtcgtctgggctcatgctgggatgtcgcagtgctcctgttgcaactcctcccagccagccaggtttgctgggggccaggctgggtgtcctcacaggagtgagggctacacccaattccaaaagcctgagaagagagaagtggagggggaggcgagtgtgtgaataaaggctcccatcaggt

SEQ ID NO: 352226 - DNA, 908 bp, Homo sapiens
gggagaggggcggggccggctttccttgggtgcgcgcgcagctttctgtgcgccagttcacactccgggtcagagttcctggcccggtgcacctgagaggtcgctctccgactcccgcgctggaccctcttgcgccattgaaccccctgatccgggggcctcggaccccagggctcaggaggactgaaccaagacttacccgaagttgccgcggggccttccgatcccctaggccattgcccaagtctggccaggctgatgggaccagcgaggagtctctgcaccttgacattcagaaactgaaggagaagagggacatgctggacaaggagatctcccagttcgtatctgaaggctacagtgtggatgaactggaggaccacattacccagcttcacgagtacaatgacatcaaggatgtggggcagatgctgatgggcaaactagctgtgatccgaggtgtcaccaccaaagagttgtatccagagtttgggctggacatgaatgactgagcaggctcatcgccccttgtccacagctcccagggacagaagggtgtggacatgataaacactgagagcccaaccagcacacctacagagtttccagcgagacaatgccagaagcacttttctagagagcccaagcccaatcaggaggaggctagagaagaggcgggcagggaggaaggggcgttcccagctccaaggttcctgaaatgtcgcagtgatacttgtgtaggggtacatgtactttatttgtcaataaacgtatctgtacactgaaaaaaccagaacaacacacatcgacacacaaaagacgccagacaagcgagcggcaacgaacaccctagaggaaggcggggccaccaagagtcaccccctggtgggcgccaaatcggcggccgc

SEQ ID NO: 352227 - DNA, 485 bp, Homo sapiens
cagttaggcaaggcacaagtgtggggactggcttgaagccagaggtggtcctgggtgggtcagggcagtgacactggctcggggcattggctgtactccctcccacctctccccactgcacattcagcctgccttccttcctttcagctgtgatccgaggtgtcaccaccaaagagttgtatccagagtttgggctggacatgaatgactgagcaggctcatcgccccttgtccacagctcccagggacagaagggtgtggacatgataaacactgagagcccaaccagcacacctacagagtttccagcgagacaatgccagaagcacttttctagagagcccaagcccaatcaggaggaggctagagaagaggcgggcagggaggaaggggcgttcccagctccaaggttcctgaaatgtcgcagtgatacttgtgtaggggtacatgtactttatttgtcaataaacgtatctgtacactga

SEQ ID NO: 352228 - DNA, 815 bp, Homo sapiens
taggtgagagttgtgacggtgtcagagacagactggcaaatcgggccctgggaaccatcaggaagggttctaggggaggctcatggttgtcagagggtctccccagacacccgagcacccacccgcttcgtggatgatgaggagctagcgtatgtgattcagcggtaccgggaggtgcacgacatgcttcacaccctgctggggatgcccaccaacatcctgggtgagtgcccccaaccctgatggcctgtctccctggggtggcttcagggccagggcagggcttgcctatctccaccaccctctgcatcacctggcttggtgcctcaatttctgctttacctgaacatcttagtagcatctttgccacatgtcccccttctttctcccactgcccctcagggctcctgcactaatggagcagcagagcccatcttcaaggctcctggtgtctttttaggctttagctgcctccctgctctgaaacctcagtagctccctaaggcctgcaggaaccatcctggagtgtttagcctggcttatggggtcatggggtcctctgcgccctgaccccaggcttcctttccatcccctactcccttctgttcactcttgggctctctcctgtactccaagccaagtgccccagggcccagcacaggccaggactgggcacagctgaccccgtagagattagggaggaacagtgcctctctttaccctgctgtgaccccgtgggcttcttagtgggaccccaaccacctccccagggcattgggaaggtggggtccaccggcccaggacacgggcttgcg

SEQ ID NO: 352229 - DNA, 481 bp, Homo sapiens
gggagaggggcggggccggctttccttgggtgcgcgcgcagctttctgtgcgccagttcacactccgggtcagagttcctggcccggtgcacctgagaggtcgctctccgactcccgcgctggaccctcttgcgccattgaaccccctgatccgggggcctcggaccccagggctcaggaggactgaaccaagacttacccgaagttgccgcggggccttccgatcccctaggccattgcccaagtctggccaggctgatgggaccagcgaggagtctctgcaccttgacattcagaaactgaaggagaagagggacatgctggacaaggagatctcccagttcgtatctgaaggctacagtgtggatgaactggaggaccacattacccagcttcacgagtacaatgacatcaaggatgtggggcagatgctgatgggcaaactaggtgagtagttgggactccagagccacaagcaggc

SEQ ID NO: 352230 - DNA, 1659 bp, Homo sapiens
  misc_feature (26)..(26): n is a, c, g, or t
ccacgcgtcgcggacggtgggtcganccacgcgtccggctgtggagaaggaaatagggcccggcgctgagtgagcgtggttgcgtgtcctttgcagacactttctggggcgaggtgacatggcgagagtcttggatcggtggacgtagacggtagacagttcgcgtgcgtttccttcgcctacttggcctacatgccttctgcccgtgaagcgatgtttcccctcgaaaggccgtaggctacgccgtcagaatcggtttttcagtgagttttgacccctccgacgctccgtcgcctgacagaatcgcggcgttcttcgtacccgcccatcctccgcggacgcccgctgccatggcgactctgctgcgccctgtcctccgtcggctctgcgggctcccgggcctacagcggcctgcggcaggcaagtggcgccgggttctgggcgcaggcgggaaggagcctgagggcgcccggctcctctgacctcggcctttttcttgccccgcagaaatgcccctccgggctaggagcgacggcgccggcccgctatactcgcaccacctccccacctccccgctgcagaaagcgctgttggccgccggctccgcggcgatggcgctctataacccctaccgccacgacatggtcgcagttctaggggagaccacaggacaccgcaccctgaaggtcctcagggaccagatgaggagggatccagagggtgcccagatcctgcaggagcgtccccggatttcgacatccaccctcgacctgggcaagctccagagcctgccggaaggctccctcggtcgcgagtatctccgtttcctggatgtgaacagggtctccccagacacccgagcacccacccgcttcgtggatgatgaggagctagcgtatgtgattcagcggtaccgggaggtgcacgacatgcttcacaccctgctggggatgcccaccaacatcctgggggagatcgtggtgaaatggtttgaggctgtccagactggcctgcccatgtgcatcctgggtgcattctttggaccgatccgacttggcgctcagagcctgcaagtgctggtctcggagttgatcccatgggccgttcagaacgggcgcagagccccatgtgtcctcaacctgtactatgagcggcgctgggagcagtccctgagggctctgcgggaggagctgggcattacagcaccacccatgcacgtccagggcttggcctgagctcctgagccagcggggcctggcctacctcccccatcccctgcttcccttggaggcagagggctcccttgactacctttgttcctcttctttgaacactgacccttggacaacatttatcataatttgtcataaccactgctgagtggccttgaggacgaaccccgcagggagcaagcagtacagtggcattcccagggggaccagcagctacccaaggagaaccatgcatgaacagtatcagtcgtctgggctcatgctgggatgtcgcagtgctcctgttgcaactcctcccagccagccaggtttgctgggggccaggctgggtgtcctcacaggagtgagggctacacccaattccaaaagcctgagaagagagaagtggagggggaggcgagtgtgtgaataaaggctcccatcaggt

SEQ ID NO: 352231 - DNA, 1523 bp, Homo sapiens
gcgcggaaccggggctattccccggatgaagtgagggccttcaccccaacgcacccttagcttcctcggaaggaccgagcacttggcggcacttgtgttccacagccggaagaggttcgcattttatagtcttcggggaaaaccggctgtggagaaggaaatagggcccggcgctgagtgagcgtggttgcgtgtcctttgcagacactttctggggcgaggtgacatggcgagagtcttggatcggtggacgtagacggtagacagttcgcgtgcgtttccttcgcctacttggcctacatgccttctgcccgtgaagcgatgtttcccctcgaaaggccgtaggctacgccgtcagaatcggtttttcaaaatgcccctccgggctaggagcgacggcgccggcccgctatactcgcaccacctccccacctccccgctgcagaaagcgctgttggccgccggctccgcggcgatggcgctctataacccctaccgccacgacatggtcgcagttctaggggagaccacaggacaccgcaccctgaaggtcctcagggaccagatgaggagggatccagagggtgcccagatcctgcaggagcgtccccggatttcgacatccaccctcgacctgggcaagctccagagcctgccggaaggctccctcggtcgcgagtatctccgtttcctggatgtgaacagggtctccccagacacccgagcacccacccgcttcgtggatgatgaggagctagcgtatgtgattcagcggtaccgggaggtgcacgacatgcttcacaccctgctggggatgcccaccaacatcctgggggagatcgtggtgaaatggtttgaggctgtccagactggcctgcccatgtgcatcctgggtgcattctttggaccgatccgacttggcgctcagagcctgcaagtgctggtctcggagttgatcccatgggccgttcagaacgggcgcagagccccatgtgtcctcaacctgtactatgagcggcgctgggagcagtccctgagggctctgcgggaggagctgggcattacagcaccacccatgcacgtccagggcttggcctgagctcctgagccagcggggcctggcctacctcccccatcccctgcttcccttggaggcagagggctcccttgactacctttgttcctcttctttgaacactgacccttggacaacatttatcataatttgtcataaccactgctgagtggccttgaggacgaaccccgcagggagcaagcagtacagtggcattcccagggggaccagcagctacccaaggagaaccatgcatgaacagtatcagtcgtctgggctcatgctgggatgtcgcagtgctcctgttgcaactcctcccagccagccaggtttgctgggggccaggctgggtgtcctcacaggagtgagggctacacccaattccaaaagcctgagaagagagaagtggagggggaggcgagtgtgtgaataaaggctcccatcaggt

SEQ ID NO: 352232 - DNA, 2139 bp, Homo sapiens
  misc_feature (26)..(26): n is a, c, g, or t
ccacgcgtcgcggacggtgggtcganccacgcgtccggctgtggagaaggaaatagggcccggcgctgagtgagcgtggttgcgtgtcctttgcagacactttctggggcgaggtgacatggcgagagtcttggatcggtggacgtagacggtagacagttcgcgtgcgtttccttcgcctacttggcctacatgccttctgcccgtgaagcgatgtttcccctcgaaaggccgtaggctacgccgtcagaatcggtttttcagtgagttttgacccctccgacgctccgtcgcctgacagaatcgcggcgttcttcgtacccgcccatcctccgcggacgcccgctgccatggcgactctgctgcgccctgtcctccgtcggctctgcgggctcccgggcctacagcggcctgcggcagaaatgcccctccgggctaggagcgacggcgccggcccgctatactcgcaccacctccccacctccccgctgcagaaagcgctgttggccgccggctccgcggcgatggcgctctataacccctaccgccacgacatggtcgcagttctaggggagaccacaggacaccgcaccctgaaggtcctcagggaccagatgaggagggatccagagggtgcccagatcctgcaggagcgtccccggatttcgacatccaccctcgacctgggcaagctccagagcctgccggaaggctccctcggtcgcgagtatctccgtttcctggatgtgaacagggtctccccagacacccgagcacccacccgcttcgtggatgatgaggagctagcgtatgtgattcagcggtaccgggaggtgcacgacatgcttcacaccctgctggggatgcccaccaacatcctgggtgagtgcccccaaccctgatggcctgtctccctggggtggcttcagggccagggcagggcttgcctatctccaccaccctctgcatcacctggcttggtgcctcaatttctgctttacctgaacatcttagtagcatctttgccacatgtcccccttctttctcccactgcccctcagggctcctgcactaatggagcagcagagcccatcttcaaggctcctggtgtctttttaggctttagctgcctccctgctctgaaacctcagtagctccctaaggcctgcaggaaccatcctggagtgtttagcctggcttatggggtcatggggtcctctgcgccctgaccccaggcttcctttccatcccctactcccttctgttcactcttgggctctctcctgtactccaagccaagtgccccagggcccagcacaggccaggactgggcacagctgaccccgtagagattagggaggaacagtgcctctctttaccctgctgtgagcaccactggcctttccttcagatagcttgttcacctcccaacacatccctcacccacaggggagatcgtggtgaaatggtttgaggctgtccagactggcctgcccatgtgcatcctgggtgcattctttggaccgatccgacttggcgctcagagcctgcaagtgctggtctcggagttgatcccatgggccgttcagaacgggcgcagagccccatgtgtcctcaacctgtactatgagcggcgctgggagcagtccctgagggctctgcgggaggagctgggcattacagcaccacccatgcacgtccagggcttggcctgagctcctgagccagcggggcctggcctacctcccccatcccctgcttcccttggaggcagagggctcccttgactacctttgttcctcttctttgaacactgacccttggacaacatttatcataatttgtcataaccactgctgagtggccttgaggacgaaccccgcagggagcaagcagtacagtggcattcccagggggaccagcagctacccaaggagaaccatgcatgaacagtatcagtcgtctgggctcatgctgggatgtcgcagtgctcctgttgcaactcctcccagccagccaggtttgctgggggccaggctgggtgtcctcacaggagtgagggctacacccaattccaaaagcctgagaagagagaagtggagggggaggcgagtgtgtgaataaaggctcccatcaggt

SEQ ID NO: 352233 - DNA, 1475 bp, Homo sapiens
  misc_feature (26)..(26): n is a, c, g, or t
ccacgcgtcgcggacggtgggtcganccacgcgtccggctgtggagaaggaaatagggcccggcgctgagtgagcgtggttgcgtgtcctttgcagacactttctggggcgaggtgacatggcgagagtcttggatcggtggacgtagacggtagacagttcgcgtgcgtttccttcgcctacttggcctacatgccttctgcccgtgaagcgatgtttcccctcgaaaggccgtaggctacgccgtcagaatcggtttttcagtgagttttgacccctccgacgctccgtcgcctgacagaatcgcggcgttcttcgtacccgcccatcctccgcggacgcccgctgccatggcgactctgctgcgccctgtcctccgtcggctctgcgggctcccgggcctacagcggcctgcggcagaaatgcccctccgggctaggagcgacggcgccggcccgctatactcgcaccacctccccacctccccgctgcagaaagcgctgttggccgccggctccgcggcgatggcgctctataacccctaccgccacgggagcgtccccggatttcgacatccaccctcgacctgggcaagctccagagcctgccggaaggctccctcggtcgcgagtatctccgtttcctggatgtgaacagggtctccccagacacccgagcacccacccgcttcgtggatgatgaggagctagcgtatgtgattcagcggtaccgggaggtgcacgacatgcttcacaccctgctggggatgcccaccaacatcctgggggagatcgtggtgaaatggtttgaggctgtccagactggcctgcccatgtgcatcctgggtgcattctttggaccgatccgacttggcgctcagagcctgcaagtgctggtctcggagttgatcccatgggccgttcagaacgggcgcagagccccatgtgtcctcaacctgtactatgagcggcgctgggagcagtccctgagggctctgcgggaggagctgggcattacagcaccacccatgcacgtccagggcttggcctgagctcctgagccagcggggcctggcctacctcccccatcccctgcttcccttggaggcagagggctcccttgactacctttgttcctcttctttgaacactgacccttggacaacatttatcataatttgtcataaccactgctgagtggccttgaggacgaaccccgcagggagcaagcagtacagtggcattcccagggggaccagcagctacccaaggagaaccatgcatgaacagtatcagtcgtctgggctcatgctgggatgtcgcagtgctcctgttgcaactcctcccagccagccaggtttgctgggggccaggctgggtgtcctcacaggagtgagggctacacccaattccaaaagcctgagaagagagaagtggagggggaggcgagtgtgtgaataaaggctcccatcaggt

SEQ ID NO: 352234 - DNA, 913 bp, Homo sapiens
taggtgagagttgtgacggtgtcagagacagactggcaaatcgggccctgggaaccatcaggaagggttctaggggaggctcatggttgtcagagggtctccccagacacccgagcacccacccgcttcgtggatgatgaggagctagcgtatgtgattcagcggtaccgggaggtgcacgacatgcttcacaccctgctggggatgcccaccaacatcctgggggagatcgtggtgaaatggtttgaggctgtccagactggcctgcccatgtgcatcctgggtgcattctttggaccgatccgacttggcgctcagagcctgcaagtgctggtctcggagttgatcccatgggccgttcagaacgggcgcagagccccatgtgtcctcaacctgtactatgagcggcgctgggagcagtccctgagggctctgcgggaggagctgggcattacagcaccacccatgcacgtccagggcttggcctgagctcctgagccagcggggcctggcctacctcccccatcccctgcttcccttggaggcagagggctcccttgactacctttgttcctcttctttgaacactgacccttggacaacatttatcataatttgtcataaccactgctgagtggccttgaggacgaaccccgcagggagcaagcagtacagtggcattcccagggggaccagcagctacccaaggagaaccatgcatgaacagtatcagtcgtctgggctcatgctgggatgtcgcagtgctcctgttgcaactcctcccagccagccaggtttgctgggggccaggctgggtgtcctcacaggagtgagggctacacccaattccaaaagcctgagaagagagaagtggagggggaggcgagtgtgtgaataaaggctcccatcaggt

SEQ ID NO: 352235 - DNA, 1364 bp, Homo sapiens
  misc_feature (26)..(26): n is a, c, g, or t
ccacgcgtcgcggacggtgggtcganccacgcgtccggctgtggagaaggaaatagggcccggcgctgagtgagcgtggttgcgtgtcctttgcagacactttctggggcgaggtgacatggcgagagtcttggatcggtggacgtagacggtagacagttcgcgtgcgtttccttcgcctacttggcctacatgccttctgcccgtgaagcgatgtttcccctcgaaaggccgtaggctacgccgtcagaatcggtttttcagtgagttttgacccctccgacgctccgtcgcctgacagaatcgcggcgttcttcgtacccgcccatcctccgcggacgcccgctgccatggcgactctgctgcgccctgtcctccgtcggctctgcgggctcccgggcctacagcggcctgcggcagaaatgcccctccgggctaggagcgacggcgccggcccgctatactcgcaccacctccccacctccccgctgcagaaagcgctgttggccgccggctccgcggcgatggcgctctataacccctaccgccacgacatggtcgcagttctaggggagaccacaggacaccgcaccctgaaggtcctcagggaccagatgaggagggatccagagggtgcccagatcctgcaggagcgtccccggatttcgacatccaccctcgacctgggcaagctccagagcctgccggaaggctccctcggtcgcgagtatctccgtttcctggatgtgaacagggtctccccagacacccgagcacccacccgcttcgtggatgatgaggagctagcgtatgtgattcagcggtaccgggaggtgcacgacatgcttcacaccctgctggggatgcccaccaacatcctgggtgagtgcccccaaccctgatggcctgtctccccatgcacgtccagggcttggcctgagctcctgagccagcggggcctggcctacctcccccatcccctgcttcccttggaggcagagggctcccttgactacctttgttcctcttctttgaacactgacccttggacaacatttatcataatttgtcataaccactgctgagtggccttgaggacgaaccccgcagggagcaagcagtacagtggcattcccagggggaccagcagctacccaaggagaaccatgcatgaacagtatcagtcgtctgggctcatgctgggatgtcgcagtgctcctgttgcaactcctcccagccagccaggtttgctgggggccaggctgggtgtcctcacaggagtgagggctacacccaattccaaaagcctgagaagagagaagtggagggggaggcgagtgtgtgaataaaggctcccatcaggt

SEQ ID NO: 352236 - DNA, 990 bp, Homo sapiens
  misc_feature (26)..(26): n is a, c, g, or t
ccacgcgtcgcggacggtgggtcganccacgcgtccggctgtggagaaggaaatagggcccggcgctgagtgagcgtggttgcgtgtcctttgcagacactttctggggcgaggtgacatggcgagagtcttggatcggtggacgtagacggtagacagttcgcgtgcgtttccttcgcctacttggcctacatgccttctgcccgtgaagcgatgtttcccctcgaaaggccgtaggctacgccgtcagaatcggtttttcagtgagttttgacccctccgacgctccgtcgcctgacagaatcgcggcgttcttcgtacccgcccatcctccgcggacgcccgctgccatggcgactctgctgcgccctgtcctccgtcggctctgcgggctcccgggcctacagcggcctgcggcagaaatgcccctccgggctaggagcgacggcgccggcccgctatactcgcaccacctccccacctccccgctgcagaaagcgctgttggccgccggctccgcggcgatggcgctctataacccctaccgccacggtaaggccgcccgcgcctcgcccccgtgggggcggcttggagccgtttcctgtgggtaactggaacatagcctaggtcggggtacccaaacctggttgcagctcgtaaccactcggaacgtttatgaaaatgcagattcctggatcccacctaaacgcactgaatctgaatctgaatctgcagtggagggagaaatgggcgtgaaaccgaaagtctgtctttaaactacttgggagaatctgtcatgcagccatattgagaacatctagactaaatagatgattcataagtaccgatcagtttataatatcctactagaaagtcaactccgaggtcgaggaccatgtctgcctcgttccactgcatctgcagccttctggatagtgcctggcacatagtaaatgctcaataaatgtttgctggatgtgtgactagaaa

SEQ ID NO: 352237 - DNA, 1239 bp, Homo sapiens
  misc_feature (26)..(26): n is a, c, g, or t
ccacgcgtcgcggacggtgggtcganccacgcgtccggctgtggagaaggaaatagggcccggcgctgagtgagcgtggttgcgtgtcctttgcagacactttctggggcgaggtgacatggcgagagtcttggatcggtggacgtagacggtagacagttcgcgtgcgtttccttcgcctacttggcctacatgccttctgcccgtgaagcgatgtttcccctcgaaaggccgtaggctacgccgtcagaatcggtttttcagtgagttttgacccctccgacgctccgtcgcctgacagaatcgcggcgttcttcgtacccgcccatcctccgcggacgcccgctgccatggcgactctgctgcgccctgtcctccgtcggctctgcgggctcccgggcctacagcggcctgcggcagaaatgcccctccgggctaggagcgacggcgccggcccgctatactcgcaccacctccccacctccccgctgcagaaagcgctgttggccgccggctccgcggcgatggcgctctataacccctaccgccacgacatggtcgcagttctaggggagaccacaggacaccgcaccctgaaggtcctcagggaccagatgaggagggatccagagggtgcccagatcctgcaggagcgtccccggatttcgacatccaccctcgacctgggcaagctccagagcctgccggaaggctccctcggtcgcgagtatctccgtttcctggatgtgaacagggtctccccagacacccgagcacccacccgcttcgtggatgatgaggagctagcgtatgtgattcagcggtaccgggaggtgcacgacatgcttcacacccctgcttcccttggaggcagagggctcccttgactacctttgttcctcttctttgaacactgacccttggacaacatttatcataatttgtcataaccactgctgagtggccttgaggacgaaccccgcagggagcaagcagtacagtggcattcccagggggaccagcagctacccaaggagaaccatgcatgaacagtatcagtcgtctgggctcatgctgggatgtcgcagtgctcctgttgcaactcctcccagccagccaggtttgctgggggccaggctgggtgtcctcacaggagtgagggctacacccaattccaaaagcctgagaagagagaagtggagggggaggcgagtgtgtgaataaaggctcccatcaggt

SEQ ID NO: 352238 - DNA, 938 bp, Homo sapiens
  misc_feature (932)..(932): n is a, c, g, or t
gggagaggggcggggccggctttccttgggtgcgcgcgcagctttctgtgcgccagttcacactccgggtcagagttcctggcccggtgcacctgagaggtcgctctccgactcccgcgctggaccctcttgcgccattgaaccccctgatccgggggcctcggaccccagggctcaggagatggatccagtccctggcgctcctacttcccaactgctcctcctcccgcatccccacagtaccccgtcctcacagcgggctgtgggtccaatcagactttcccctcggattcctctctaggactgaaccaagacttacccgaagttgccgcggggccttccgatcccctaggccattgcccaagtctggccaggctgatgggaccagcgaggagtctctgcaccttgacattcagaaactgaaggagaagagggacatgctggacaaggagatctcccagttcgtatctgaaggctacagtgtggatgaactggaggaccacattacccagcttcacgagtacaatgacatcaaggatgtggggcagatgctgatgggcaaactagctgtgatccgaggtgtcaccaccaaagagttgtatccagagtttgggctggacatgaatgactgagcaggctcatcgccccttgtccacagctcccagggacagaagggtgtggacatgataaacactgagagcccaaccagcacacctacagagtttccagcgagacaatgccagaagcacttttctagagagcccaagcccaatcaggaggaggctagagaagaggcgggcagggaggaaggggcgttcccagctccaaggttcctgaaatgtcgcagtgatacttgtgtaggggtacatgtactttatttgtcaataaacgtatctgtacactgaaaaaaaaacaccaaaaaaaaaaaaaanaaaaaa

SEQ ID NO: 352239 - DNA, 463 bp, Homo sapiens
  misc_feature (13)..(13): n is a, c, g, or t
  misc_feature (15)..(15): n is a, c, g, or t
  misc_feature (19)..(19): n is a, c, g, or t
  misc_feature (21)..(21): n is a, c, g, or t
tctttccaaagcngnagtntngtccccctgggaatgccactgtactgcttgctccctgcggggttcgtcctcaaggcccctgcttcccttggaggcagagggctcccttgactacctttgttcctcttctttgaacactgacccttggacaacatttatcataatttgtcataaccactgctgagtggccttgaggacgaaccccgcagggagcaagcagtacagtggcattcccagggggaccagcagctacccaaggagaaccatgcatgaacagtatcagtcgtctgggctcatgctgggatgtcgcagtgctcctgttgcaactcctcccagccagccaggtttgctgggggccaggctgggtgtcctcacaggagtgagggctacacccaattccaaaagcctgagaagagagaagtggagggggaggcgagtgtgtgaataaaggctcccatcaggt

SEQ ID NO: 352240 - DNA, 1077 bp, Homo sapiens
  misc_feature (26)..(26): n is a, c, g, or t
ccacgcgtcgcggacggtgggtcganccacgcgtccggctgtggagaaggaaatagggcccggcgctgagtgagcgtggttgcgtgtcctttgcagacactttctggggcgaggtgacatggcgagagtcttggatcggtggacgtagacggtagacagttcgcgtgcgtttccttcgcctacttggcctacatgccttctgcccgtgaagcgatgtttcccctcgaaaggccgtaggctacgccgtcagaatcggtttttcagtgagttttgacccctccgacgctccgtcgcctgacagaatcgcggcgttcttcgtacccgcccatcctccgcggacgcccgctgccatggcgactctgctgcgccctgtcctccgtcggctctgcgggctcccgggcctacagcggcctgcggcagaaatgcccctccgggctaggagcgacggcgccggcccgctatactcgcaccacctccccacctccccgctgcagaaagcgctgttggccgccggctccgcggcgatggcgctctataacccctaccgccacggtaaggccgcccgcgcctcgcccccgtgggggcggcttggagccgtttcctgtgggtaactggaacatagcctaggtcggggtacccaaacctggttgcagctcgtaaccactcggaacgtttatgaaaatgcagattcctggatcccacctaaacgcactgaatctgaatctgaatctgcagtggagggagaaatgggcgtgaaaccgaaagtctgtctttaaactacttgggagaatctgtcatgcagccatattgagaacatctagactaaatagatgattcataagtaccgatcagtttataatatcctactagaaagtcaactccgaggtcgaggaccatgtctgcctcgttccactgcatctgcagccttctggatagtgcctgggcaacatagcaagacctcatctctacagaaaatttaaaaaactagctgcatgcctgtagtcctagcagtgagctatgatcacaccacttcactccagcctgggcaacagagcaagaccctgtctcaaaaaaaca

SEQ ID NO: 352241 - DNA, 855 bp, Homo sapiens
  misc_feature (26)..(26): n is a, c, g, or t
ccacgcgtcgcggacggtgggtcganccacgcgtccggctgtggagaaggaaatagggcccggcgctgagtgagcgtggttgcgtgtcctttgcagacactttctggggcgaggtgacatggcgagagtcttggatcggtggacgtagacggtagacagttcgcgtgcgtttccttcgcctacttggcctacatgccttctgcccgtgaagcgatgtttcccctcgaaaggccgtaggctacgccgtcagaatcggtttttcagtgagttttgacccctccgacgctccgtcgcctgacagaatcgcggcgttcttcgtacccgcccatcctccgcggacgcccgctgccatggcgactctgctgcgccctgtcctccgtcggctctgcgggctcccgggcctacagcggcctgcggcagaaatgcccctccgggctaggagcgacggcgccggcccgctatactcgcaccacctccccacctccccgctgcagaaagcgctgttggccgccggctccgcggcgatggcgctctataacccctaccgccacgattcctggatcccacctaaacgcactgaatctgaatctgaatctgcagtggagggagaaatgggcgtgaaaccgaaagtctgtctttaaactacttgggagaatctgtcatgcagccatattgagaacatctagactaaatagatgattcataagtaccgatcagtttataatatcctactagaaagtcaactccgaggtcgaggaccatgtctgcctcgttccactgcatctgcagccttctggatagtgcctggcacatagtaaatgctcaataaatgtttgctggatgtgtgactagaaa

SEQ ID NO: 352242 - DNA, 963 bp, Homo sapiens
gcgcggaaccggggctattccccggatgaagtgagggccttcaccccaacgcacccttagcttcctcggaaggaccgagcacttggcggcacttgtgttccacagccggaagaggttcgcattttatagtcttcggggaaaaccggctgtggagaaggaaatagggcccggcgctgagtgagcgtggttgcgtgtcctttgcagacactttctggggcgaggtgacatggcgagagtcttggatcggtggacgtagacggtagacagttcgcgtgcgtttccttcgcctacttggcctacatgccttctgcccgtgaagcgatgtttcccctcgaaaggccgtaggctacgccgtcagaatcggtttttcagtgagttttgacccctccgacgctccgtcgcctgacagaatcgcggcgttcttcgtacccgcccatcctccgcggacgcccgctgccatggcgactctgctgcgccctgtcctccgtcggctctgcgggctcccgggcctacagcggcctgcggcagaaatgcccctccgggctaggagcgacggcgccggcccgctatactcgcaccacctccccacctccccgctgcagaaagcgctgttggccgccggctccgcggcgatggcgctctataacccctaccgccacgattcctggatcccacctaaacgcactgaatctgaatctgaatctgcagtggagggagaaatgggcgtgaaaccgaaagtctgtctttaaactacttgggagaatctgtcatgcagccatattgagaacatctagactaaatagatgattcataagtaccgatcagtttataatatcctactagaaagtcaactccgaggtcgaggaccatgtctgcctcgttccactgcatctgcagccttctggatagtgcctggcacatagtaaatgctcaataaatgtttgctggatgtgtgactagaaa

SEQ ID NO: 352243 - DNA, 629 bp, Homo sapiens
  misc_feature (26)..(26): n is a, c, g, or t
ccacgcgtcgcggacggtgggtcganccacgcgtccggctgtggagaaggaaatagggcccggcgctgagtgagcgtggttgcgtgtcctttgcagacactttctggggcgaggtgacatggcgagagtcttggatcggtggacgtagacggtagacagttcgcgtgcgtttccttcgcctacttggcctacatgccttctgcccgtgaagcgatgtttcccctcgaaaggccgtaggctacgccgtcagaatcggtttttcagtgagttttgacccctccgacgctccgtcgcctgacagaatcgcggcgttcttcgtacccgcccatcctccgcggacgcccgctgccatggcgactctgctgcgccctgtcctccgtcggctctgcgggctcccgggcctacagcggcctgcggcagaaatgcccctccgggctaggagcgacggcgccggcccgctatactcgcaccacctccccactcctgttgcaactcctcccagccagccaggtttgctgggggccaggctgggtgtcctcacaggagtgagggctacacccaattccaaaagcctgagaagagagaagtggagggggaggcgagtgtgtgaataaaggctcccatcaggt

SEQ ID NO: 352244 - DNA, 1083 bp, Homo sapiens
  misc_feature (845)..(845): n is a, c, g, or t
  misc_feature (901)..(901): n is a, c, g, or t
  misc_feature (916)..(916): n is a, c, g, or t
  misc_feature (928)..(928): n is a, c, g, or t
gggagaggggcggggccggctttccttgggtgcgcgcgcagctttctgtgcgccagttcacactccgggtcagagttcctggcccggtgcacctgagaggtcgctctccgactcccgcgctggaccctcttgcgccattgaaccccctgatccgggggcctcggaccccagggctcaggagatggatccagtccctggcgctcctacttcccaactgctcctcctcccgcatccccacagtaccccgtcctcacagcgggctgtgggtccaatcagactttcccctcggattcctctctaggactgaaccaagacttacccgaagttgccgcggggccttccgatcccctaggccattgcccaagtctggccaggctgatgggaccagcgaggagtctctgcaccttgacattcagaaactgaaggagaagagggacatgctggacaaggagatctcccagttcgtatctgaaggctacagtgtggatgaactggaggaccacattacccagcttcacgagtacaatgacatcaaggatgtggggcagatgctgatgggcaaactagctgtgatccgaggtgtcaccaccaaagagttgtatccagagtttgggccagacgcctcaaccgccttttcatcaatcgcccacatcactcgagacgtaaattatggctgaatcatccgctaccttcacgccaatggcgcctcaatattctttatctgcctcttcctacacatcgggcgaggcctatattacggatcatttctctactcagaaacctgaaacatcggcattatcctcctgcttgcaactatagcaacagccttcataggctatgtcctnccgtgaggccaaatatcattctgaggggccacagtaattacaaacttactatccgncattccatacatggngacagacctagntcaatgaatctgaggaggctactcagtagacagtctcaccttacacgatctttacctttcacttcatcttgccttcaatattgagccctaggaggactcaacttctaatttgcacgaaacggatcaacaaacccttagattacctccaatccgat

SEQ ID NO: 352245 - DNA, 537 bp, Homo sapiens
ggggactggcttgaagccagaggtggtcctgggtgggtcagggcagtgacactggctcggggcattggctgtactccctcccacctctccccactgcacattcagcctgccttccttcctttcagctgtgatccgaggtgtcaccaccaaagagttgtatccagagtttgggctggacatgaatgactgagcaggctcatcgccccttgtccacagctcccagggacagaagggtgtggacatgataaacactgagagcccaaccagcacacctacagagtttccagcgagacaatgccagaagcacttttctagagagcccaagcccaatcaggaggaggctagagaagaggcgggcagggaggaaggggcgttcccagctccaaggttcctgaaatgtcgcagtgatacttgtgtaggggtacatgtactttatttgtcaataaacgtatctgtacactgattccctcttctccaatagcccccgatagtacctgggataaagagagcgtgcctttgattagaacaggcttacat

SEQ ID NO: 352246 - DNA, 818 bp, Homo sapiens
  misc_feature (812)..(812): n is a, c, g, or t
gggagaggggcggggccggctttccttgggtgcgcgcgcagctttctgtgcgccagttcacactccgggtcagagttcctggcccggtgcacctgagaggtcgctctccgactcccgcgctggaccctcttgcgccattgaaccccctgatccgggggcctcggaccccagggctcaggaggactgaaccaagacttacccgaagttgccgcggggccttccgatcccctaggccattgcccaagtctggccaggctgatgggaccagcgaggagtctctgcaccttgacattcagaaactgaaggagaagagggacatgctggacaaggagatctcccagttcgtatctgaaggctacagtgtggatgaactggaggaccacattacccagcttcacgagtacaatgacatcaaggatgtggggcagatgctgatgggcaaactagctgtgatccgaggtgtcaccaccaaagagttgtatccagagtttgggctggacatgaatgactgagcaggctcatcgccccttgtccacagctcccagggacagaagggtgtggacatgataaacactgagagcccaaccagcacacctacagagtttccagcgagacaatgccagaagcacttttctagagagcccaagcccaatcaggaggaggctagagaagaggcgggcagggaggaaggggcgttcccagctccaaggttcctgaaatgtcgcagtgatacttgtgtaggggtacatgtactttatttgtcaataaacgtatctgtacactgaaaaaaaaacaccaaaaaaaaaaaaaanaaaaaa

SEQ ID NO: 352247 - DNA, 710 bp, Homo sapiens
ggtccttggagacccgagaccaaagaaccccgggaggtccggtttggggcggcaggaggactgaaccaagacttacccgaagttgccgcggggccttccgatcccctttccttccagcaacctttgagaagacgctttactgtccccatgttgagaggccattgcccaagtctggccaggctgatgggaccagcgaggagtctctgcaccttgacattcagaaactgaaggagaagagggacatgctggacaaggagatctcccagttcgtatctgaaggctacagtgtggatgaactggaggaccacattacccagcttcacgagtacaatgacatcaaggatgtggggcagatgctgatgggcaaactagctgtgatccgaggtgtcaccaccaaagagttgtatccagagtttgggctggacatgaatgactgagcaggctcatcgccccttgtccacagctcccagggacagaagggtgtggacatgataaacactgagagcccaaccagcacacctacagagtttccagcgagacaatgccagaagcacttttctagagagcccaagcccaatcaggaggaggctagagaagaggcgggcagggaggaaggggcgttcccagctccaaggttcctgaaatgtcgcagtgatacttgtgtaggggtacatgtactttatttgtcaataaacgtatctgtacactga

SEQ ID NO: 352248 - DNA, 789 bp, Homo sapiens
gggagaggggcggggccggctttccttgggtgcgcgcgcagctttctgtgcgccagttcacactccgggtcagagttcctggcccggtgcacctgagaggtcgctctccgactcccgcgctggaccctcttgcgccattgaaccccctgatccgggggcctcggaccccagggctcaggaggactgaaccaagacttacccgaagttgccgcggggccttccgatcccctaggccattgcccaagtctggccaggctgatgggaccagcgaggagtctctgcaccttgacattcagaaactgaaggagaagagggacatgctggacaaggagatctcccagttcgtatctgaaggctacagtgtggatgaactggaggaccacattacccagcttcacgagtacaatgacatcaaggatgtggggcagatgctgatgggcaaactagcctcccgtcctcacggaagtcatctgtagctttgcccaggaggccacgcactgtgtaatccttcaaggacagggagcccctgcacagcacacgatcatcaaaaaaatgcttgcttatggcttgggtgttcccccacggaatcctctaagcttcagaatcctgctggtgacccccaggaaaggaccaagggagaagcaggctgtccccagaccctcgtaccttggtaagatgagcattgtacatatcggtgaggagcctgcatccatgtcccacgccgagcactgaaaagcagccagcgtcatctcacacctgggacccccttcccattcccctaagtatccc

SEQ ID NO: 352249 - DNA, 1605 bp, Homo sapiens
  misc_feature (26)..(26): n is a, c, g, or t
  misc_feature (1599)..(1599): n is a, c, g, or t
ccacgcgtcgcggacggtgggtcganccacgcgtccggctgtggagaaggaaatagggcccggcgctgagtgagcgtggttgcgtgtcctttgcagacactttctggggcgaggtgacatggcgagagtcttggatcggtggacgtagacggtagacagttcgcgtgcgtttccttcgcctacttggcctacatgccttctgcccgtgaagcgatgtttcccctcgaaaggccgtaggctacgccgtcagaatcggtttttcagtgagttttgacccctccgacgctccgtcgcctgacagaatcgcggcgttcttcgtacccgcccatcctccgcggacgcccgctgccatggcgactctgctgcgccctgtcctccgtcggctctgcgggctcccgggcctacagcggcctgcggcagaaatgcccctccgggctaggagcgacggcgccggcccgctatactcgcaccacctccccacctccccgctgcagaaagcgctgttggccgccggctccgcggcgatggcgctctataacccctaccgccacgacatggtcgcagttctaggggagaccacaggacaccgcaccctgaaggtcctcagggaccagatgaggagggatccagagggtgcccagatcctgcaggagcgtccccggatttcgacatccaccctcgacctgggcaagctccagagcctgccggaaggctccctcggtcgcgagtatctccgtttcctggatgtgaacagggtctccccagacacccgagcacccacccgcttcgtggatgatgaggagctagcgtatgtgattcagcggtaccgggaggtgcacgacatgcttcacaccctgctggggatgcccaccaacatcctgggggagatcgtggtgaaatggtttgaggctgtccagactggcctgcccatgtgcatcctgggtgcattctttggaccgatccgacttggcgctcagagcctgcaagtgctggtctcggagttgatcccatgggccgttcagaacgggcgcagagccccatgtgtcctcaacctgtactatgagcggcgctgggagcagtccctgagggctctgcgggaggagctgggcattacagcaccacccatgcacgtccagggcttggcctgagctcctgagccagcggggcctggcctacctcccccatcccctgcttcccttggaggcagagggctcccttgactacctttgttcctcttctttgaacactgacccttggacaacatttatcataatttgtcataaccactgctgagtggccttgaggacgaaccccgcagggagcaagcagtacagtggcattcccagggggaccagcagctacccaaggagaaccatgcatgaacagtatcagtcgtctgggctcatgctgggatgtcgcagtgctcctgttgcaactcctcccagccagccaggtttgctgggggccaggctgggtgtcctcacaggagtgagggctacacccaattccaaaagcctgagaagagagaagtggagggggaggcgagtgtgtgaataaaggctcccatcaggtaaaaaaaacaccaaaaaaaaaaaaaanaaaaaa

SEQ ID NO: 352250 - DNA, 1797 bp, Homo sapiens
  misc_feature (26)..(26): n is a, c, g, or t
ccacgcgtcgcggacggtgggtcganccacgcgtccggctgtggagaaggaaatagggcccggcgctgagtgagcgtggttgcgtgtcctttgcagacactttctggggcgaggtgacatggcgagagtcttggatcggtggacgtagacggtagacagttcgcgtgcgtttccttcgcctacttggcctacatgccttctgcccgtgaagcgatgtttcccctcgaaaggccgtaggctacgccgtcagaatcggtttttcagtgagttttgacccctccgacgctccgtcgcctgacagaatcgcggcgttcttcgtacccgcccatcctccgcggacgcccgctgccatggcgactctgctgcgccctgtcctccgtcggctctgcgggctcccgggcctacagcggcctgcggcagaaatgcccctccgggctaggagcgacggcgccggcccgctatactcgcaccacctccccacctccccgctgcagaaagcgctgttggccgccggctccgcggcgatggcgctctataacccctaccgccacgacatggtcgcagttctaggggagaccacaggacaccgcaccctgaaggtcctcagggaccagatgaggagggatccagagggtgcccagatcctgcaggagcgtccccggatttcgacatccaccctcgacctgggcaagctccagagcctgccggaaggctccctcggtcgcgagtatctccgtttcctggatgtgaacagggtctccccagacacccgagcacccacccgcttcgtggatgatgaggagctagcgtatgtgattcagcggtaccgggaggtgcacgacatgcttcacaccctgctggggatgcccaccaacatcctgggggagatcgtggtgaaatggtttgaggctgtccagactggcctgcccatgtgcatcctgggtgcattctttggaccgatccgacttggcgctcagagcctgcaagtgctggtctcggagttgatcccatgggccgttcagaacgggcgcagagccccatgtgtcctcaacctgtactatgagcggcgctgggagcagtccctgagggctctgcgggaggagctgggcattacagcaccacccatgcacgtccagggcttggcctgagctcctgagccagcggggcctggcctacctcccccatcccctgcttcccttggaggcagagggctcccttgactacctttgttcctcttctttgaacactgacccttggacaacatttatcataatttgtcataaccactgctgagtggccttgaggacgaaccccgcagggagcaagcagtacagtggcattcccagggggaccagcagctacccaaggagaaccatgcatgaacagtatcagtcgtctgggctcatgctgggatgtcgcagtgctcctgttgcaactcctcccagccagccaggtttgctgggggccaggctgggtgtcctcacaggagtgagggctacacccaattccaaaagcctgagaagagagaagtggagggggaggcgagtgtgtgaataaaggctcccatcaggttaaccacaacccaaaccacaccaccccccaaacaacacgaaacaaaacgggggcggccttcttgggggggggcggaagacgggacagacggggcgccggtctttgttccgcacccttttttcacaggggtgaaagcggggcctctgggtctcttttttcagctttctctcttcttctcttcatctaccgccccgaactcacacaggctgcaaccacccaccaacc

SEQ ID NO: 352251 - DNA, 1263 bp, Homo sapiens
  misc_feature (13)..(13): n is a, c, g, or t
  misc_feature (15)..(15): n is a, c, g, or t
  misc_feature (34)..(34): n is a, c, g, or t
  misc_feature (36)..(36): n is a, c, g, or t
agaagcatcaggntntggatcacaaaccgcagcngngttatttaaataacgagcatactatacgtcctagttgcggagctggtgcgaatcgacgatgcgcctgtctcgtcggtctcgggtccggctacaggctgcgaaaatgcctcggctaggcgagggcggccgtatactcgcacactcccacctccccgtgcaaaagcgctgttggcgcggtcgggcgatgggctctataccctacgcagaacatggtcgcagttctaggggagaccacaggacaccgcaccctgaaggtcctcagggaccagatgaggagggatccagagggtgcccagatcctgcaggagcgtccccggatttcgacatccaccctcgacctgggcaagctccagagcctgccggaaggctccctcggtcgcgagtatctccgtttcctggatgtgaacagggtctccccagacacccgagcacccacccgcttcgtggatgatgaggagctagcgtatgtgattcagcggtaccgggaggtgcacgacatgcttcacaccctgctggggatgcccaccaacatcctgggggagatcgtggtgaaatggtttgaggctgtccagactggcctgcccatgtgcatcctgggtgcattctttggaccgatccgacttggcgctcagagcctgcaagtgctggtctcggagttgatcccatgggccgttcagaacgggcgcagagccccatgtgtcctcaacctgtactatgagcggcgctgggagcagtccctgagggctctgcgggaggagctgggcattacagcaccacccatgcacgtccagggcttggcctgagctcctgagccagcggggcctggcctacctcccccatcccctgcttcccttggaggcagagggctcccttgactacctttgttcctcttctttgaacactgacccttggacaacatttatcataatttgtcataaccactgctgagtggccttgaggacgaaccccgcagggagcaagcagtacagtggcattcccagggggaccagcagctacccaaggagaaccatgcatgaacagtatcagtcgtctgggctcatgctgggatgtcgcagtgctcctgttgcaactcctcccagccagccaggtttgctgggggccaggctgggtgtcctcacaggagtgagggctacacccaattccaaaagcctgagaagagagaagtggagggggaggcgagtgtgtgaataaaggctcccatcaggt

SEQ ID NO: 352252 - DNA, 1345 bp, Homo sapiens
  misc_feature (26)..(26): n is a, c, g, or t
ccacgcgtcgcggacggtgggtcganccacgcgtccggctgtggagaaggaaatagggcccggcgctgagtgagcgtggttgcgtgtcctttgcagacactttctggggcgaggtgacatggcgagagtcttggatcggtggacgtagacggtagacagttcgcgtgcgtttccttcgcctacttggcctacatgccttctgcccgtgaagcgatgtttcccctcgaaaggccgtaggctacgccgtcagaatcggtttttcagtgagttttgacccctccgacgctccgtcgcctgacagaatcgcggcgttcttcgtacccgcccatcctccgcggacgcccgctgccatggcgactctgctgcgccctgtcctccgtcggctctgcgggctcccgggcctacagcggcctgcggcagaaatgcccctccgggctaggagcgacggcgccggcccgctatactcgcaccacctccccacctccccgctgcagaaagcgctgttggccgccggctccgcggcgatggcgctctataacccctaccgccacgacatggtcgcagttctaggggagaccacaggacaccgcaccctgaaggtcctcagggaccagatgaggagggatccagagggtgcccagatcctgcaggagcgtccccggatttcgacatccaccctcgacctgggcaagctccagagcctgccggaaggctccctcggtcgcgagtatctccgtttcctggatgtgaacagggtctccccagacacccgagcacccacccgcttcgtggatgatgaggagctagcgtatgtgattcagcggtaccgggaggtgcacgacatgcttcacaccctgctggggatgcccaccaacatcctgggggagatcgtggtgaaatggtttgaggctgtccagactggcctgcccatgtgcatcctgggtgcattctttggaccgatccgacttggcgctcagagcctgcaagtgctggtctcggagttgatcccatgggccgttcagaacgggcgcagagccccatgtgtcctcaacctgtactatgagcggcgctgggagcagtccctgaggaaccgtggaccttgaatttaccttcgcccagttccagaccttctgcttcctgtgccgttcctttcctctcctgcccattttcctgttcttctgtgccttcaatacttctgtagcttcccattgatgttgctctgctcccagcaggcctcatgcggtgcagaaactgtggtggggctggccgccgtgcctgccctgtgtcctcctcctgcggctgttaggatgttgggaatgacctggtgagaggcggagatgctcca

SEQ ID NO: 352253 - DNA, 1185 bp, Homo sapiens
gcgcggaaccggggctattccccggatgaagtgagggccttcaccccaacgcacccttagcttcctcggaaggaccgagcacttggcggcacttgtgttccacagccggaagaggttcgcattttatagtcttcggggaaaaccggctgtggagaaggaaatagggcccggcgctgagtgagcgtggttgcgtgtcctttgcagacactttctggggcgaggtgacatggcgagagtcttggatcggtggacgtagacggtagacagttcgcgtgcgtttccttcgcctacttggcctacatgccttctgcccgtgaagcgatgtttcccctcgaaaggccgtaggctacgccgtcagaatcggtttttcagtgagttttgacccctccgacgctccgtcgcctgacagaatcgcggcgttcttcgtacccgcccatcctccgcggacgcccgctgccatggcgactctgctgcgccctgtcctccgtcggctctgcgggctcccgggcctacagcggcctgcggcaggcaagtggcgccgggttctgggcgcaggcgggaaggagcctgagggcgcccggctcctctgacctcggcctttttcttgccccgcagaaatgcccctccgggctaggagcgacggcgccggcccgctatactcgcaccacctccccacctccccgctgcagaaagcgctgttggccgccggctccgcggcgatggcgctctataacccctaccgccacggtaaggccgcccgcgcctcgcccccgtgggggcggcttggagccgtttcctgtgggtaactggaacatagcctaggtcggggtacccaaacctggttgcagctcgtaaccactcggaacgtttatgaaaatgcagattcctggatcccacctaaacgcactgaatctgaatctgaatctgcagtggagggagaaatgggcgtgaaaccgaaagtctgtctttaaactacttgggagaatctgtcatgcagccatattgagaacatctagactaaatagatgattcataagtaccgatcagtttataatatcctactagaaagtcaactccgaggtcgaggaccatgtctgcctcgttccactgcatctgcagccttctggatagtgcctggcacatagtaaatgctcaataaatgtttgctggatgtgtgactagaaa

SEQ ID NO: 352254 - DNA, 1034 bp, Homo sapiens
  misc_feature (26)..(26): n is a, c, g, or t
ccacgcgtcgcggacggtgggtcganccacgcgtccggctgtggagaaggaaatagggcccggcgctgagtgagcgtggttgcgtgtcctttgcagacactttctggggcgaggtgacatggcgagagtcttggatcggtggacgtagacggtagacagttcgcgtgcgtttccttcgcctacttggcctacatgccttctgcccgtgaagcgatgtttcccctcgaaaggccgtaggctacgccgtcagaatcggtttttcagtgagttttgacccctccgacgctccgtcgcctgacagaatcgcggcgttcttcgtacccgcccatcctccgcggacgcccgctgccatggcgactctgctgcgccctgtcctccgtcggctctgcgggctcccgggcctacagcggcctgcggcagaaatgcccctccgggctaggagcgacggcgccggcccgctatactcgcaccacctccccacctccccgctgcagaaagcgctgttggccgccggctccgcggcgatggcgctctataacccctaccgccacggtaaggccgcccgcgcctcgcccccgtgggggcggcttggagccgtttcctgtgggtaactggaacatagcctaggtcggggtacccaaacctggttgcagctcgtaaccactcggaacgtttatgaaaatgcagattcctggatcccacctaaacgcactgaatctgaatctgaatctgcagtggagggagaaatgggcgtgaaaccgaaagtctgtctttaaactacttgggagaatctgtcatgcagccatattgagaacatctagactaaatagatgattcataagtaccgatcagtttataatatcctactagaaagtcaactccgaggtcgaggaccatgtctgcctcgttccactgcatctgcagccttctggatagtgcctggcacatagttcagcgtctgacgtcagacgctgaactatgtggtgagaccaagagacaagcagatgctgctggagacaagccatccatgcctg

SEQ ID NO: 352255 - DNA, 1535 bp, Homo sapiens
tattgacgccatattggggccggcggcgggtgggagagttctacgagggaggggaagcggttggacgtgttcgcttgggttcctgctgcggcagccacctcgcaatctctctgcatcgatcgccgctcgcaagctactgaccgtactcgggcgtattaggagccgcgttccagcctcacaccccacggtgctgttttcgacttcagaaaggatctagtctcagcacagaagcgcctcaggcgcggcgcaaagctcgagcggacggcgggggcggccggagcctctctcgggggagccgcgcctgaggaggcggaagaacccccctgacgcgactggcgtgtgcttctgcccgccaccgcccctcccgctctcacccgggccgtccctggccactgcccctgccgcggaggcagcggcggcagcggctctcctttccacagccggcgctccgcgacccgcttggctcctgagcccgtcgggtaggctctcctcgagttcccgctcttcaccccttccctcaccctcttctttcgtcacccgtccccgaccccacccgagcccggcgcctcagctgcccccggccatggcgtgcggagccactctgaaaaggactctggatttcgacccgctgttgagcccggcgtccccgaagcgcaggcgatgtgcgccattgtcggcgcccacctcggccgctgcctccccgttgtcggcggccgcggccaccgccgcctccttctccgctgcggccgcctcgccgcagaagtatctccgaatggagccatcccccttcggcgacgtctcctcccgcctcaccacagaacaaattctgtacaacataaaacaagagtataaacgaatgcagaagagaagacatttagaaacgagtttccaacagacagatccgtgttgtacttctgatgcacagccacatgcatttctcctcagtggaccagcttcaccagggacttcatctgcagcatcctcaccattaaaaaaagaacagcccttatttactctacggcaggttgggatgatctgtgaacgtttgttgaaagaacgtgaagagaaagttcgagaagaatatgaagaaatattgaacacaaaacttgcagaacaatatgatgcgtttgtgaagtttacgcatgatcaaataatgcgacgatatggagaacagcctgctagctatgtttcatgaatcacgtatcctgcatttgtgggctgccttgttccttgttgagttgttgcaagaggtcccaattatgacatgcagcaatgccaataccccttctgtgaatacaggttatttcaagctttcgtcagtggcaaccactcttaggcagcagcaactggttttggaaatttccctgatgtcagtaccacctggatgtggacctttgctacctgtattaataccagtggcctcattttgctgtatcattacaatttggcttcttatattaatgtttgaaaaggattaaagctggtattctagaacatgcccttcactggttgtgtaaataaaactgtagaatgac

SEQ ID NO: 352256 - DNA, 3265 bp, Homo sapiens
tattgacgccatattggggccggcggcgggtgggagagttctacgagggaggggaagcggttggacgtgttcgcttgggttcctgctgcggcagccacctcgcaatctctctgcatcgatcgccgctcgcaagctactgaccgtactcgggcgtattaggagccgcgttccagcctcacaccccacggtgctgttttcgacttcagaaaggatctagtctcagcacagaagcgcctcaggcgcggcgcaaagctcgagcggacggcgggggcggccggagcctctctcgggggagccgcgcctgaggaggcggaagaacccccctgacgcgactggcgtgtgcttctgcccgccaccgcccctcccgctctcacccgggccgtccctggccactgcccctgccgcggaggcagcggcggcagcggctctcctttccacagccggcgctccgcgacccgcttggctcctgagcccgtcgggtaggctctcctcgagttcccgctcttcaccccttccctcaccctcttctttcgtcacccgtccccgaccccacccgagcccggcgcctcagctgcccccggccatggcgtgcggagccactctgaaaaggactctggatttcgacccgctgttgagcccggcgtccccgaagcgcaggcgatgtgcgccattgtcggcgcccacctcggccgctgcctccccgttgtcggcggccgcggccaccgccgcctccttctccgctgcggccgcctcgccgcagaagtatctccgaatggagccatcccccttcggcgacgtctcctcccgcctcaccacagcagggtcaacaacaaagaaaatgctcttcccgagtactgtaatatgatcacactataagtctagaccttgagaaatgttgaacttttaataagcatattgcattgaaaattggggctgaggagttgcttttatttggaaatgttttatttttgcccaacaaagtatgctgggggaaaacaacctagccttgagaataatgaagaaatcaacccaagattccaagggacttcagacttttgcttttcatcttgaaacatttcctgagagagactggggaatgtcttttggctgctttgtagggcatgtgtatgcccagttttttctgtactttgaaatccttgtgtgcccctggcacaatcctaggataggcttttgtggactagaagtgtaaatgtttcctttgtgtgtagcatgcaaagatttctgtgtgagcctttagtaataatatcaccctttagacaaagcctttccatagcttgatttaaatgtctcgttatcagtagcttaaaaaaccgaagtatatacctctgtatttggtgacttccatttgaaactgactttagtgtttttttttttttggtcacttttaaaaatattttctaaatccatggagtgaccctcgaatatgcaagctaccatttttgctattaaatatttggtctaatttaaggacatactgttttagagttgtagtgagtttttacggaaattcttagataaatttatttaatgaccttactaaactgtgttttaattagattgaaaaggcatttgttgattaattgttaggctttactttgggaaaaaaaaaaggaaacagccaatgtcaagaatgagctactggtggttgacatttttggaatttgtcttttagtgaaatggtatcattggaaattgaaatggattctgtacttaactaataaagccatttcaaaataaggtcattaaggagctaaccagcaatacatttcagtcgagggagtgaattaatacagtgctaggtttgggaattaaagtactatatctcaatgtcaaaataatcttgggcatgtatgtgaacaattggggactataccatgttcctcccctttaaagcacacttattcagaattgtgatcctttgtaaacgacttttcattggcatatctgtagcgttggttaatacagttggctccacattatctcaagtttaaattaattggactgttgtagtaaaacgactggaattattggaattgtttaagccagctgattgagattcacattcactttccaaaatactgctattttcttcaaggtgttttttttttgacatctactttggaagtttgattatatcctgaaacctaaaatcacatccttattgattctgagtctgctaaaagttatttcaactaatttgaatattatcgcaaaaagtttacttgagaaaacaagttgaaattgaaattttgacttgctaaaattacattttttaaacggtagttttgaatgacattctaaatgtaatttagtttgactttgtgtttatatggccaatttggggtatggtcctgtatgttttttgtaatgtcataatgggagctgcagtgttgtgcaggtatcaaagagcttcccagttttcatgttagtaaacttggaaataattttctcatgcacctgatttttagcttcctattttaacaccgattattcttaaactttatgggagtaaatacccatctgtcattaactaaaatgagtagttaggtttggaagtagacagtggcttaccaaattgagattggcaaacttgtgggaactctttgttttcctttcacatctgtgagttcaaatataatacaaattaatgtagaactagagtactaaagtgactttttttcagagcatgtatacactttattttatcattgttctcctctagatactttcagtttctgatggcatagctgaagtcatgttgtggctttattagtttcaggaacttggatgtctgttttaaaccttagctatcattttagtcatcccaggaagtttgacttgactattcttatttaaatatttttcaaactgttgcaacttaatactaggaaaaaggaaggactagctgagctgacggaagttaagcttgctttcttaaccgcaaggcttagagcctttattatgctaattggcattatgaattttttagggactccttaacacacagctatcccaaacctgttttttaggacacctaagtgttactaattcagaaatgctgttcagggtctagggatggttgacaaagtatagccatatttttgtgtagcctgagagctaagaatgttctttacattttttaaatggttggaaaagaatcaaaagaattattttgtgacacgtgagaattatgtgaaattcaaatttcagtgtccataaataaaattttattggaacacaaaag

SEQ ID NO: 352257 - DNA, 1235 bp, Homo sapiens
tattgacgccatattggggccggcggcgggtgggagagttctacgagggaggggaagcggttggacgtgttcgcttgggttcctgctgcggcagccacctcgcaatctctctgcatcgatcgccgctcgcaagctactgaccgtactcgggcgtattaggagccgcgttccagcctcacaccccacggtgctgttttcgacttcagaaaggatctagtctcagcacagaagcgcctcaggcgcggcgcaaagctcgagcggacggcgggggcggccggagcctctctcgggggagccgcgcctgaggaggcggaagaacccccctgacgcgactggcgtgtgcttctgcccgccaccgcccctcccgctctcacccgggccgtccctggccactgcccctgccgcggaggcagcggcggcagcggctctcctttccacagccggcgctccgcgacccgcttggctcctgagcccgtcgggtaggctctcctcgagttcccgctcttcaccccttccctcaccctcttctttcgtcacccgtccccgaccccacccgagcccggcgcctcagctgcccccggccatggcgtgcggagccactctgaaaaggactctggatttcgacccgctgttgagcccggcgtccccgaagcgcaggcgatgtgcgccattgtcggcgcccacctcggccgctgcctccccgttgtcggcggccgcggccaccgccgcctccttctccgctgcggccgcctcgccgcagaagtatctccgaatggagccatcccccttcggcgacgtctcctcccgcctcaccacagaacaaattctgtacaacataaaacaagagtataaacgaatgcagaagagaagacatttagaaacgagtttccaacagacagatccgtgttgtacttctgatgcacagccacatgcatttctcctcagtggaccagcttcaccagggacttcatctgcagcatcctcaccattaaaaaaagaacagcccttatttactctacggcaggttgggatgatctgtgaacgtttgttgaaagaacgtgaagagaaagttcgagaagaatatgaagaaatattgaacacaaaacttgcagaacaatatgatgcgtttgtgaagtttacgcatgatcaaataatgcgacgatatggagaacagcctgctagctacaacctgccggtggagtacaacctgccggtggagtacaacctgccggtgg

SEQ ID NO: 352258 - DNA, 3211 bp, Homo sapiens
tattgacgccatattggggccggcggcgggtgggagagttctacgagggaggggaagcggttggacgtgttcgcttgggttcctgctgcggcagccacctcgcaatctctctgcatcgatcgccgctcgcaagctactgaccgtactcgggcgtattaggagccgcgttccagcctcacaccccacggtgctgttttcgacttcagaaaggatctagtctcagcacagaagcgcctcaggcgcggcgcaaagctcgagcggacggcgggggcggccggagcctctctcgggggagccgcgcctgaggaggcggaagaacccccctgacgcgactggcgtgtgcttctgcccgccaccgcccctcccgctctcacccgggccgtccctggccactgcccctgccgcggaggcagcggcggcagcggctctcctttccacagccggcgctccgcgacccgcttggctcctgagcccgtcgggtaggctctcctcgagttcccgctcttcaccccttccctcaccctcttctttcgtcacccgtccccgaccccacccgagcccggcgcctcagctgcccccggccatggcgtgcggagccactctgaaaaggactctggatttcgacccgctgttgagcccggcgtccccgaagcgcaggcgatgtgcgccattgtcggcgcccacctcggccgctgcctccccgttgtcggcggccgcggccaccgccgcctccttctccgctgcggccgcctcgccgcagaagtatctccgaatggagccatcccccttcggcgacgtctcctcccgcctcaccacagcagggtcaacaacaaagaaaatgctcttcccgagtactgtaatatgatcacactataagtctagaccttgagaaatgttgaacttttaataagcatattgcattgaaaattggggctgaggagttgcttttatttggaaatgttttatttttgcccaacaaagtatgctgggggaaaacaacctagccttgagaataatgaagaaatcaacccaagattccaagggacttcagacttttgcttttcatcttgaaacatttcctgagagagactggggaatgtcttttggctgctttgtagggcatgtgtatgcccagttttttctgtactttgaaatccttgtgtgcccctggcacaatcctaggataggcttttgtggactagaagtgtaaatgtttcctttgtgtgtagcatgcaaagatttctgtgtgagcctttagtaataatatcaccctttagacaaagcctttccatagcttgatttaaatgtctcgttatcagtagcttaaaaaaccgaagtatatacctctgtatttggtgacttccatttgaaactgactttagtgtttttttttttttggtcacttttaaaaatattttctaaatccatggagtgaccctcgaatatgcaagctaccatttttgctattaaatatttggtctaatttaaggacatactgttttagagttgtagtgagtttttacggaaattcttagataaatttatttaatgaccttactaaactgtgttttaattagattgaaaaggcatttgttgattaattgttaggctttactttgggaaaaaaaaaaggaaacagccaatgtcaagaatgagctactggtggttgacatttttggaatttgtcttttagtgaaatggtatcattggaaattgaaatggattctgtacttaactaataaagccatttcaaaataaggtcattaaggagctaaccagcaatacatttcagtcgagggagtgaattaatacagtgctaggtttgggaattaaagtactatatctcaatgtcaaaataatcttgggcatgtatgtgaacaattggggactataccatgttcctcccctttaaagcacacttattcagaattgtgatcctttgtaaacgacttttcattggcatatctgtagcgttggttaatacagttggctccacattatctcaagtttaaattaattggactgttgtagtaaaacgactggaattattggaattgtttaagccagctgattgagattcacattcactttccaaaatactgctattttcttcaaggtgttttttttttgacatctactttggaagtttgattatatcctgaaacctaaaatcacatccttattgattctgagtctgctaaaagttatttcaactaatttgaatattatcgcaaaaagtttacttgagaaaacaagttgaaattgaaattttgacttggtttgactttgtgtttatatggccaatttggggtatggtcctgtatgttttttgtaatgtcataatgggagctgcagtgttgtgcaggtatcaaagagcttcccagttttcatgttagtaaacttggaaataattttctcatgcacctgatttttagcttcctattttaacaccgattattcttaaactttatgggagtaaatacccatctgtcattaactaaaatgagtagttaggtttggaagtagacagtggcttaccaaattgagattggcaaacttgtgggaactctttgttttcctttcacatctgtgagttcaaatataatacaaattaatgtagaactagagtactaaagtgactttttttcagagcatgtatacactttattttatcattgttctcctctagatactttcagtttctgatggcatagctgaagtcatgttgtggctttattagtttcaggaacttggatgtctgttttaaaccttagctatcattttagtcatcccaggaagtttgacttgactattcttatttaaatatttttcaaactgttgcaacttaatactaggaaaaaggaaggactagctgagctgacggaagttaagcttgctttcttaaccgcaaggcttagagcctttattatgctaattggcattatgaattttttagggactccttaacacacagctatcccaaacctgttttttaggacacctaagtgttactaattcagaaatgctgttcagggtctagggatggttgacaaagtatagccatatttttgtgtagcctgagagctaagaatgttctttacattttttaaatggttggaaaagaatcaaaagaattattttgtgacacgtgagaattatgtgaaattcaaatttcagtgtccataaataaaattttattggaacacaaaag

SEQ ID NO: 352259 - DNA, 2059 bp, Homo sapiens
tattgacgccatattggggccggcggcgggtgggagagttctacgagggaggggaagcggttggacgtgttcgcttgggttcctgctgcggcagccacctcgcaatctctctgcatcgatcgccgctcgcaagctactgaccgtactcgggcgtattaggagccgcgttccagcctcacaccccacggtgctgttttcgacttcagaaaggatctagtctcagcacagaagcgcctcaggcgcggcgcaaagctcgagcggacggcgggggcggccggagcctctctcgggggagccgcgcctgaggaggcggaagaacccccctgacgcgactggcgtgtgcttctgcccgccaccgcccctcccgctctcacccgggccgtccctggccactgcccctgccgcggaggcagcggcggcagcggctctcctttccacagccggcgctccgcgacccgcttggctcctgagcccgtcgggtaggctctcctcgagttcccgctcttcaccccttccctcaccctcttctttcgtcacccgtccccgaccccacccgagcccggcgcctcagctgcccccggccatggcgtgcggagccactctgaaaaggactctggatttcgacccgctgttgagcccggcgtccccgaagcgcaggcgatgtgcgccattgtcggcgcccacctcggccgctgccgcctcgccgcagaagtatctccgaatggagccatcccccttcggcgacgtctcctcccgcctcaccacagaacaaattctgtacaacataaaacaagagtataaacgaatgcagaagagaagacatttagaaacgagtttccaacagacagatccgtgttgtacttctgatgcacagccacatgcatttctcctcagtggaccagcttcaccagggacttcatctgcagcatcctcaccattaaaaaaagaacagcccttatttactctacggcaggttgggatgatctgtgaacgtttgttgaaagaacgtgaagagaaagttcgagaagaatatgaagaaatattgaacacaaaacttgcagaacaatatgatgcgtttgtgaagtttacgcatgatcaaataatgcgacgatatggagaacagcctgctagctatgtttcatgaatcacgtatcctgcatttgtgggctgccttgttccttgttgagttgttgcaagaggtcccaattatgacatgcagcaatgccaataccccttctgtgaatacaggttatttcaagctttcgtcagtggcaaccactcttaggcagcagcaactggttttggaaatttccctgatgtcagtaccacctggatgtggacctttgctacctgtattaataccagtggcctcattttgctgtatcattacaatttggcttcttatattaatgtttgaaaaggattaaagctggtattctagaacatgcccttcactggttgtgtaaataaaactgtagaatgacacttcagatgaagttagtgtgattttaattgtgcactacaaccgagctgtaaccagttactaattttagaatgtaatcccaggacaatattaagcaaatagcctgcagtgcttcctgtgaaatagtgaaggaggagggcatttctgtattccaggacttcttggggtttcagaatgggtttgtatgattttttttttttttgtagttttatttattctatcagtctttttaacaaatgtttattgctgcatttttttttttccagtgtatcattgttttactgcccttgtagtactggaatttagttggaagaataaaacatttacttctattttgcttgtttcttaatgtacagatggggttagtatttgaataaagttggtgttttaaaacgtaagcattttccaggaatcagtgaagttaattttctaagatttgagtgctgtttcaaaacactgagttctgattctaaatgccttcttctgctgggcgcggtggctcatgcctgtaatcccagcactttgggaggccgaggcgggaggatcacgaggtcaggagatcgagactatcctggc

SEQ ID NO: 352260 - DNA, 3167 bp, Homo sapiens
tattgacgccatattggggccggcggcgggtgggagagttctacgagggaggggaagcggttggacgtgttcgcttgggttcctgctgcggcagccacctcgcaatctctctgcatcgatcgccgctcgcaagctactgaccgtactcgggcgtattaggagccgcgttccagcctcacaccccacggtgctgttttcgacttcagaaaggatctagtctcagcacagaagcgcctcaggcgcggcgcaaagctcgagcggacggcgggggcggccggagcctctctcgggggagccgcgcctgaggaggcggaagaacccccctgacgcgactggcgtgtgcttctgcccgccaccgcccctcccgctctcacccgggccgtccctggccactgcccctgccgcggaggcagcggcggcagcggctctcctttccacagccggcgctccgcgacccgcttggctcctgagcccgtcgggtaggctctcctcgagttcccgctcttcaccccttccctcaccctcttctttcgtcacccgtccccgaccccacccgagcccggcgcctcagctgcccccggccatggcgtgcggagccactctgaaaaggactctggatttcgacccgctgttgagcccggcgtccccgaagcgcaggcgatgtgcgccattgtcggcgcccacctcggccgctgcctccccgttgtcggcggccgcggccaccgccgcctccttctccgctgcggccgcctcgccgcagaagtatctccgaatggagccatcccccttcggcgacgtctcctcccgcctcaccacagcagggtcaacaacaaagaaaatgctcttcccgagtactgtaatatgatcacactataagtctagaccttgagaaatgttgaacttttaataagcatattgcattgaaaattggggctgaggagttgcttttatttggaaatgttttatttttgcccaacaaagtatgctgggggaaaacaacctagccttgagaataatgaagaaatcaacccaagattccaagggacttcagacttttgcttttcatcttgaaacatttcctgagagagactggggaatgtcttttggctgctttgtagggcatgtgtatgcccagttttttctgtactttgaaatccttgtgtgcccctggcacaatcctaggataggcttttgtggactagaagtgtaaatgtttcctttgtgtgtagcatgcaaagatttctgtgtgagcctttagtaataatatcaccctttagacaaagcctttccatagcttgatttaaatgtctcgttatcagtagcttaaaaaaccgaagtatatacctctgtatttggtgacttccatttgaaactgactttagtgtttttttttttttggtcacttttaaaaatattttctaaatccatggagtgaccctcgaatatgcaagctaccatttttgctattaaatatttggtctaatttaaggacatactgttttagagttgtagtgagtttttacggaaattcttagataaatttatttaatgaccttactaaactgtgttttaattagattgaaaaggcatttgttgattaattgttaggctttactttgggaaaaaaaaaaggaaacagccaatgtcaagaatgagctactggtggttgacatttttggaatttgtcttttagtgaaatggtatcattggaaattgaaatggattctgtacttaactaataaagccatttcaaaataaggtcattaaggagctaaccagcaatacatttcagtcgagggagtgaattaatacagtgctaggtttgggaattaaagtactatatctcaatgtcaaaataatcttgggcatgtatgtgaacaattggggactataccatgttcctcccctttaaagcacacttattcagaattgtgatcctttgtaaacgacttttcattggcatatctgtagcgttggttaatacagttggctccacattatctcaagtttaaattaattggactgttgtagtaaaacgactggaattattggaattgtttaagccagctgattgagattcacattcactttccaaaatactgctattttcttcaaggtgttttttttttgacatctactttggaagtttgattatatcctgaaacctaaaatcacatccttattgattctgagtctgctaaaagttatttcaactaatttgaatattatcgcaaaaagtttacttgagaaaacaagttgaaattgaaattttgacttgctaaaattacattttttaaacggtagttttgaatgacattctaaatgtaatttagtttgactttgtgtttatatggccaatttggggtatggtcctgtatgttttttgtaatgtcataatgggagctgcagtgttgtgcaggtatcaaagagcttcccagttttcatgttagtaaacttggaaataattttctcatgcacctgatttttagcttcctattttaacaccgattattcttaaactttatgggagtaaatacccatctgtcattaactaaaatgagtagttaggtttggaagtagacagtggcttaccaaattgagattggcaaacttgtgggaactctttgttttcctttcacatctgtgagttcaaatataatacaaattaatgtagaactagagtactaaagtgactttttttcagagcatgtatacactttattttatcattgttctcctctagatactttcagtttctgatggcatagctgaagtcatgttgtggctttattagtttcaggaacttggatgtctgttttaaaccttagctatcattttagtcatcccaggaagtttgacttgactattcttatttaaatatttttcaaactgtcaatcataatattatgattgacagattgagtggttggatggcaagcatgtggtgttaggcaaagtgaaagaaggcatgaatattgtggaggccatggagcgctttgggtccaggaatggcaagaccagcaagaagatcaccattgctgactgtggacaactcgaataagtttgacttgtgttttatcttaaccaccagatcattccttctgtagctcaggagagcacccctccaccccatttgctcgcagtatcctagaatctttgtgctctcg

SEQ ID NO: 352261 - DNA, 1015 bp, Homo sapiens
  misc_feature (1006)..(1006): n is a, c, g, or t
tattgacgccatattggggccggcggcgggtgggagagttctacgagggaggggaagcggttggacgtgttcgcttgggttcctgctgcggcagccacctcgcaatctctctgcatcgatcgccgctcgcaagctactgaccgtactcgggcgtattaggagccgcgttccagcctcacaccccacggtgctgttttcgacttcagaaaggatctagtctcagcacagaagcgcctcaggcgcggcgcaaagctcgagcggacggcgggggcggccggagcctctctcgggggagccgcgcctgaggaggcggaagaacccccctgacgcgactggcgtgtgcttctgcccgccaccgcccctcccgctctcacccgggccgtccctggccactgcccctgccgcggaggcagcggcggcagcggctctcctttccacagccggcgctccgcgacccgcttggctcctgagcccgtcgggtaggctctcctcgagttcccgctcttcaccccttccctcaccctcttctttcgtcacccgtccccgaccccacccgagcccggcgcctcagctgcccccggccatggcgtgcggagccactctgaaaaggactctggatttcgacccgctgttgagcccggcgtccccgaagcgcaggcgatgtgcgccattgtcggcgcccacctcggccgctgcctccccgttgtcggcggccgcggccaccgccgcctccttctccgctgcggccgcctcgccgcagaagtatctccgaatggagccatcccccttcggcgacgtctcctcccgcctcaccacagaacaaattctgtacaacataaaacaagagtataaacgaatgcagaagagaagacatttagaaacgagtttccaacagacagatccgtgttgtacttctgatgcacagccacatggtaatattattaatgttgcaggggctttcctatcaacagtcctctgcatccctactattaacctgcaggtgtgnggcagtaga

SEQ ID NO: 352262 - DNA, 1943 bp, Homo sapiens
tattgacgccatattggggccggcggcgggtgggagagttctacgagggaggggaagcggttggacgtgttcgcttgggttcctgctgcggcagccacctcgcaatctctctgcatcgatcgccgctcgcaagctactgaccgtactcgggcgtattaggagccgcgttccagcctcacaccccacggtgctgttttcgacttcagaaaggatctagtctcagcacagaagcgcctcaggcgcggcgcaaagctcgagcggacggcgggggcggccggagcctctctcgggggagccgcgcctgaggaggcggaagaacccccctgacgcgactggcgtgtgcttctgcccgccaccgcccctcccgctctcacccgggccgtccctggccactgcccctgccgcggaggcagcggcggcagcggctctccactctgaaaaggactctggatttcgacccgctgttgagcccggcgtccccgaagcgcaggcgatgtgcgccattgtcggcgcccacctcggccgctgcctccccgttgtcggcggccgcggccaccgccgcctccttctccgctgcggccgcctcgccgcagaagtatctccgaatggagccatcccccttcggcgacgtctcctcccgcctcaccacagaacaaattctgtacaacataaaacaagagtataaacgaatgcagaagagaagacatttagaaacgagtttccaacagacagatccgtgttgtacttctgatgcacagccacatgcatttctcctcagtggaccagcttcaccagggacttcatctgcagcatcctcaccattaaaaaaagaacagcccttatttactctacggcaggttgggatgatctgtgaacgtttgttgaaagaacgtgaagagaaagttcgagaagaatatgaagaaatattgaacacaaaacttgcagaacaatatgatgcgtttgtgaagtttacgcatgatcaaataatgcgacgatatggagaacagcctgctagctatgtttcatgaatcacgtatcctgcatttgtgggctgccttgttccttgttgagttgttgcaagaggtcccaattatgacatgcagcaatgccaataccccttctgtgaatacaggttatttcaagctttcgtcagtggcaaccactcttaggcagcagcaactggttttggaaatttccctgatgtcagtaccacctggatgtggacctttgctacctgtattaataccagtggcctcattttgctgtatcattacaatttggcttcttatattaatgtttgaaaaggattaaagctggtattctagaacatgcccttcactggttgtgtaaataaaactgtagaatgacacttcagatgaagttagtgtgattttaattgtgcactacaaccgagctgtaaccagttactaattttagaatgtaatcccaggacaatattaagcaaatagcctgcagtgcttcctgtgaaatagtgaaggaggagggcatttctgtattccaggacttcttggggtttcagaatgggtttgtatgattttttttttttttgtagttttatttattctatcagtctttttaacaaatgtttattgctgcatttttttttttccagtgtatcattgttttactgcccttgtagtactggaatttagttggaagaataaaacatttacttctattttgcttgtttcttaatgtacagatggggttagtatttgaataaagttggtgttttaaaacgtaagcattttccaggaatcagtgaagttaattttctaagatttgagtgctgtttcaaaacactgagttctgattctaaatgccttcttctgctgggcgcggtggctcatgcctgtaatcccagcactttgggaggccgaggcgggaggatcacgaggtcaggagatcgagactatcctggc

SEQ ID NO: 352263 - DNA, 1246 bp, Homo sapiens
ctactccagaggctgaggcaggagaatggcgtgaacccgggaggcagagcttgcagtgagccgagatggtgccactgcactccagcctgggtgacagagcaagactccgtctcaaaaaaagaaaaattaaaaagaacagcccttatttactctacggcaggttgggatgatctgtgaacgtttgttgaaagaacgtgaagagaaagttcgagaagaatatgaagaaatattgaacacaaaacttgcagaacaatatgatgcgtttgtgaagtttacgcatgatcaaataatgcgacgatatggagaacagcctgctagctatgtttcatgaatcacgtatcctgcatttgtgggctgccttgttccttgttgagttgttgcaagaggtcccaattatgacatgcagcaatgccaataccccttctgtgaatacaggttatttcaagctttcgtcagtggcaaccactcttaggcagcagcaactggttttggaaatttccctgatgtcagtaccacctggatgtggacctttgctacctgtattaataccagtggcctcattttgctgtatcattacaatttggcttcttatattaatgtttgaaaaggattaaagctggtattctagaacatgcccttcactggttgtgtaaataaaactgtagaatgacacttcagatgaagttagtgtgattttaattgtgcactacaaccgagctgtaaccagttactaattttagaatgtaatcccaggacaatattaagcaaatagcctgcagtgcttcctgtgaaatagtgaaggaggagggcatttctgtattccaggacttcttggggtttcagaatgggtttgtatgattttttttttttttgtagttttatttattctatcagtctttttaacaaatgtttattgctgcatttttttttttccagtgtatcattgttttactgcccttgtagtactggaatttagttggaagaataaaacatttacttctattttgcttgtttcttaatgtacagatggggttagtatttgaataaagttggtgttttaaaacgtaagcattttccaggaatcagtgaagttaattttctaagatttgagtgctgtttcaaaacactgagttctgattctaaatgccttcttctgctgggcgcggtggctcatgcctgtaatcccagcactttgggaggccgaggcgggaggatcacgaggtcaggagatcgagactatcctggc

SEQ ID NO: 352264 - DNA, 417 bp, Homo sapiens
tagtattcgtttggattttgacctgtattttgcactaattttctttttctcaccctttagatgtttcatgaatcacgtatcctgcatttgtgggctgccttgttccttgttgagttgttgcaagaggtcccaattatgacatgcagcaatgccaataccccttctgtgaatacaggttatttcaagctttcgtcagtggcaaccactcttaggcagcagcaactggttttggaaatttccctgatgtcagtaccacctggatgtggacctttgctacctgtattaataccagtggcctcattttgctgtatcattacaatttggcttcttatattaatgtttgaaaaggattaaagctggtattctagaacatgcccttcactggttgtgtaaataaaactgtagaatgacacttca

SEQ ID NO: 352265 - DNA, 2110 bp, Homo sapiens
tattgacgccatattggggccggcggcgggtgggagagttctacgagggaggggaagcggttggacgtgttcgcttgggttcctgctgcggcagccacctcgcaatctctctgcatcgatcgccgctcgcaagctactgaccgtactcgggcgtattaggagccgcgttccagcctcacaccccacggtgctgttttcgacttcagaaaggatctagtctcagcacagaagcgcctcaggcgcggcgcaaagctcgagcggacggcgggggcggccggagcctctctcgggggagccgcgcctgaggaggcggaagaacccccctgacgcgactggcgtgtgcttctgcccgccaccgcccctcccgctctcacccgggccgtccctggccactgcccctgccgcggaggcagcggcggcagcggctctcctttccacagccggcgctccgcgacccgcttggctcctgagcccgtcgggtaggctctcctcgagttcccgctcttcaccccttccctcaccctcttctttcgtcacccgtccccgaccccacccgagcccggcgcctcagctgcccccggccatggcgtgcggagccactctgaaaaggactctggatttcgacccgctgttgagcccggcgtccccgaagcgcaggcgatgtgcgccattgtcggcgcccacctcggccgctgcctccccgttgtcggcggccgcggccaccgccgcctccttctccgctgcggccgcctcgccgcagaagtatctccgaatggagccatcccccttcggcgacgtctcctcccgcctcaccacagaacaaattctgtacaacataaaacaagagtataaacgaatgcagaagagaagacatttagaaacgagtttccaacagacagatccgtgttgtacttctgatgcacagccacatgcatttctcctcagtggaccagcttcaccagggacttcatctgcagcatcctcaccattaaaaaaagaacagcccttatttactctacggcaggttgggatgatctgtgaacgtttgttgaaagaacgtgaagagaaagttcgagaagaatatgaagaaatattgaacacaaaacttgcagaacaatatgatgcgtttgtgaagtttacgcatgatcaaataatgcgacgatatggagaacagcctgctagctatgtttcatgaatcacgtatcctgcatttgtgggctgccttgttccttgttgagttgttgcaagaggtcccaattatgacatgcagcaatgccaataccccttctgtgaatacaggttatttcaagctttcgtcagtggcaaccactcttaggcagcagcaactggttttggaaatttccctgatgtcagtaccacctggatgtggacctttgctacctgtattaataccagtggcctcattttgctgtatcattacaatttggcttcttatattaatgtttgaaaaggattaaagctggtattctagaacatgcccttcactggttgtgtaaataaaactgtagaatgacacttcagatgaagttagtgtgattttaattgtgcactacaaccgagctgtaaccagttactaattttagaatgtaatcccaggacaatattaagcaaatagcctgcagtgcttcctgtgaaatagtgaaggaggagggcatttctgtattccaggacttcttggggtttcagaatgggtttgtatgattttttttttttttgtagttttatttattctatcagtctttttaacaaatgtttattgctgcatttttttttttccagtgtatcattgttttactgcccttgtagtactggaatttagttggaagaataaaacatttacttctattttgcttgtttcttaatgtacagatggggttagtatttgaataaagttggtgttttaaaacgtaagcattttccaggaatcagtgaagttaattttctaagatttgagtgctgtttcaaaacactgagttctgattctaaatgccttcttctgctgggcgcggtggctcatgcctgtaatcccagcactttgggaggccgaggcgggaggatcacgaggtcaggagatcgagactatcctggc

SEQ ID NO: 352266 - DNA, 1990 bp, Homo sapiens
tattgacgccatattggggccggcggcgggtgggagagttctacgagggaggggaagcggttggacgtgttcgcttgggttcctgctgcggcagccacctcgcaatctctctgcatcgatcgccgctcgcaagctactgaccgtactcgggcgtattaggagccgcgttccagcctcacaccccacggtgctgttttcgacttcagaaaggatctagtctcagcacagaagcgcctcaggcgcggcgcaaagctcgagcggacggcgggggcggccggagcctctctcgggggagccgcgcctgaggaggcggaagaacccccctgacgcgactggcgtgtgcttctgcccgccaccgcccctcccgctctcacccgggccgtccctggccactgcccctgccgcggaggcagcggcggcagcggctctcctttccacagccggcgctccgcgacccgcttggctcctgagcccgtcgggtaggctctcctcgagttcccgctcttcaccccttccctcaccctcttctttcgtcacccgtccccgaccccacccgagcccggcgcctcagctgcccccggccatggcgtgcggagccactctgaaaaggactctggatttcgacccgctgttgagcccggcgtccccgaagcgcaggcgatgtgcgccattgtcggcgcccacctcggccgctgcctccccgttgtcggcggccgcggccaccgccgcctccttctccgctgcggccgcctcgccgcagaagtatctccgaatggagccatcccccttcggcgacgtctcctcccgcctcaccacagaacaaattctgtacaacataaaacaagagtataaacgaatgcagaagagaagacatttagaaacgagtttccaacagacagatccgtgttgtacttctgatgcacagccacatgcatttctcctcagtggaccagcttcaccagggacttcatctgcagcatcctcaccattaaaacaatatgatgcgtttgtgaagtttacgcatgatcaaataatgcgacgatatggagaacagcctgctagctatgtttcatgaatcacgtatcctgcatttgtgggctgccttgttccttgttgagttgttgcaagaggtcccaattatgacatgcagcaatgccaataccccttctgtgaatacaggttatttcaagctttcgtcagtggcaaccactcttaggcagcagcaactggttttggaaatttccctgatgtcagtaccacctggatgtggacctttgctacctgtattaataccagtggcctcattttgctgtatcattacaatttggcttcttatattaatgtttgaaaaggattaaagctggtattctagaacatgcccttcactggttgtgtaaataaaactgtagaatgacacttcagatgaagttagtgtgattttaattgtgcactacaaccgagctgtaaccagttactaattttagaatgtaatcccaggacaatattaagcaaatagcctgcagtgcttcctgtgaaatagtgaaggaggagggcatttctgtattccaggacttcttggggtttcagaatgggtttgtatgattttttttttttttgtagttttatttattctatcagtctttttaacaaatgtttattgctgcatttttttttttccagtgtatcattgttttactgcccttgtagtactggaatttagttggaagaataaaacatttacttctattttgcttgtttcttaatgtacagatggggttagtatttgaataaagttggtgttttaaaacgtaagcattttccaggaatcagtgaagttaattttctaagatttgagtgctgtttcaaaacactgagttctgattctaaatgccttcttctgctgggcgcggtggctcatgcctgtaatcccagcactttgggaggccgaggcgggaggatcacgaggtcaggagatcgagactatcctggc

SEQ ID NO: 352267 - DNA, 1966 bp, Homo sapiens
tattgacgccatattggggccggcggcgggtgggagagttctacgagggaggggaagcggttggacgtgttcgcttgggttcctgctgcggcagccacctcgcaatctctctgcatcgatcgccgctcgcaagctactgaccgtactcgggcgtattaggagccgcgttccagcctcacaccccacggtgctgttttcgacttcagaaaggatctagtctcagcacagaagcgcctcaggcgcggcgcaaagctcgagcggacggcgggggcggccggagcctctctcgggggagccgcgcctgaggaggcggaagaacccccctgacgcgactggcgtgtgcttctgcccgccaccgcccctcccgctctcacccgggccgtccctggccactgcccctgccgcggaggcagcggcggcagcggctctcctttccacagccggcgctccgcgacccgcttggctcctgagcccgtcgggtaggctctcctcgagttcccgctcttcaccccttccctcaccctcttctttcgtcacccgtccccgaccccacccgagcccggcgcctcagctgcccccggccatggcgtgcggagccactctgaaaaggactctggatttcgacccgctgttgagcccggcgtccccgaagcgcaggcgatgtgcgccattgtcggcgcccacctcggccgctgcctccccgttgtcggcggccgcggccaccgccgcctccttctccgctgcggccgcctcgccgcagaagtatctccgaatggagccatcccccttcggcgacgtctcctcccgcctcaccacagggacttcatctgcagcatcctcaccattaaaaaaagaacagcccttatttactctacggcaggttgggatgatctgtgaacgtttgttgaaagaacgtgaagagaaagttcgagaagaatatgaagaaatattgaacacaaaacttgcagaacaatatgatgcgtttgtgaagtttacgcatgatcaaataatgcgacgatatggagaacagcctgctagctatgtttcatgaatcacgtatcctgcatttgtgggctgccttgttccttgttgagttgttgcaagaggtcccaattatgacatgcagcaatgccaataccccttctgtgaatacaggttatttcaagctttcgtcagtggcaaccactcttaggcagcagcaactggttttggaaatttccctgatgtcagtaccacctggatgtggacctttgctacctgtattaataccagtggcctcattttgctgtatcattacaatttggcttcttatattaatgtttgaaaaggattaaagctggtattctagaacatgcccttcactggttgtgtaaataaaactgtagaatgacacttcagatgaagttagtgtgattttaattgtgcactacaaccgagctgtaaccagttactaattttagaatgtaatcccaggacaatattaagcaaatagcctgcagtgcttcctgtgaaatagtgaaggaggagggcatttctgtattccaggacttcttggggtttcagaatgggtttgtatgattttttttttttttgtagttttatttattctatcagtctttttaacaaatgtttattgctgcatttttttttttccagtgtatcattgttttactgcccttgtagtactggaatttagttggaagaataaaacatttacttctattttgcttgtttcttaatgtacagatggggttagtatttgaataaagttggtgttttaaaacgtaagcattttccaggaatcagtgaagttaattttctaagatttgagtgctgtttcaaaacactgagttctgattctaaatgccttcttctgctgggcgcggtggctcatgcctgtaatcccagcactttgggaggccgaggcgggaggatcacgaggtcaggagatcgagactatcctggc

SEQ ID NO: 352268 - DNA, 1962 bp, Homo sapiens
tattgacgccatattggggccggcggcgggtgggagagttctacgagggaggggaagcggttggacgtgttcgcttgggttcctgctgcggcagccacctcgcaatctctctgcatcgatcgccgctcgcaagctactgaccgtactcgggcgtattaggagccgcgttccagcctcacaccccacggtgctgttttcgacttcagaaaggatctagtctcagcacagaagcgcctcaggcgcggcgcaaagctcgagcggacggcgggggcggccggagccctttccacagccggcgctccgcgacccgcttggctcctgagcccgtcgggtaggctctcctcgagttcccgctcttcaccccttccctcaccctcttctttcgtcacccgtccccgaccccacccgagcccggcgcctcagctgcccccggccatggcgtgcggagccactctgaaaaggactctggatttcgacccgctgttgagcccggcgtccccgaagcgcaggcgatgtgcgccattgtcggcgcccacctcggccgctgcctccccgttgtcggcggccgcggccaccgccgcctccttctccgctgcggccgcctcgccgcagaagtatctccgaatggagccatcccccttcggcgacgtctcctcccgcctcaccacagaacaaattctgtacaacataaaacaagagtataaacgaatgcagaagagaagacatttagaaacgagtttccaacagacagatccgtgttgtacttctgatgcacagccacatgcatttctcctcagtggaccagcttcaccagggacttcatctgcagcatcctcaccattaaaaaaagaacagcccttatttactctacggcaggttgggatgatctgtgaacgtttgttgaaagaacgtgaagagaaagttcgagaagaatatgaagaaatattgaacacaaaacttgcagaacaatatgatgcgtttgtgaagtttacgcatgatcaaataatgcgacgatatggagaacagcctgctagctatgtttcatgaatcacgtatcctgcatttgtgggctgccttgttccttgttgagttgttgcaagaggtcccaattatgacatgcagcaatgccaataccccttctgtgaatacaggttatttcaagctttcgtcagtggcaaccactcttaggcagcagcaactggttttggaaatttccctgatgtcagtaccacctggatgtggacctttgctacctgtattaataccagtggcctcattttgctgtatcattacaatttggcttcttatattaatgtttgaaaaggattaaagctggtattctagaacatgcccttcactggttgtgtaaataaaactgtagaatgacacttcagatgaagttagtgtgattttaattgtgcactacaaccgagctgtaaccagttactaattttagaatgtaatcccaggacaatattaagcaaatagcctgcagtgcttcctgtgaaatagtgaaggaggagggcatttctgtattccaggacttcttggggtttcagaatgggtttgtatgattttttttttttttgtagttttatttattctatcagtctttttaacaaatgtttattgctgcatttttttttttccagtgtatcattgttttactgcccttgtagtactggaatttagttggaagaataaaacatttacttctattttgcttgtttcttaatgtacagatggggttagtatttgaataaagttggtgttttaaaacgtaagcattttccaggaatcagtgaagttaattttctaagatttgagtgctgtttcaaaacactgagttctgattctaaatgccttcttctgctgggcgcggtggctcatgcctgtaatcccagcactttgggaggccgaggcgggaggatcacgaggtcaggagatcgagactatcctggc

SEQ ID NO: 352269 - DNA, 3036 bp, Homo sapiens
tgcggccgccggggtagtggagagaactgggaacaggggtcctggggtgtgggatgcggcccctggggtgggggtgccggactgtgtggttcttgttcttagcaaagtagtagggcagccacgtttttcactaggtcctcgtagcccgaggacctaataagacacaatagaaatgggctgatgtcaaggggatagtgtttggaggtgggtaggggctttgccttgcccgtattgggtagaacagggacatctttttctttgggccgaatgattggaattgtttccgtagtcgctggagccccagcggaaatgatcagagaggacgatattattcgtaaatttaggcgaaagggtcacatttcaccccaatctggatgtgtgcttgccgtaatcgattggttgcagctattaactctgggactgggtggtttgaggcgaggctacagcccctccttcagttcagacacggctgattttagtatagtgggggtggggggtgggggatggatgtcactagggcgagatctaggcctgtcattaatcacccacaagaacgccactttggctgagtcaagacctgtttccctagcagggtcaacaacaaagaaaatgctcttcccgagtactgtaatatgatcacactataagtctagaccttgagaaatgttgaacttttaataagcatattgcattgaaaattggggctgaggagttgcttttatttggaaatgttttatttttgcccaacaaagtatgctgggggaaaacaacctagccttgagaataatgaagaaatcaacccaagattccaagggacttcagacttttgcttttcatcttgaaacatttcctgagagagactggggaatgtcttttggctgctttgtagggcatgtgtatgcccagttttttctgtactttgaaatccttgtgtgcccctggcacaatcctaggataggcttttgtggactagaagtgtaaatgtttcctttgtgtgtagcatgcaaagatttctgtgtgagcctttagtaataatatcaccctttagacaaagcctttccatagcttgatttaaatgtctcgttatcagtagcttaaaaaaccgaagtatatacctctgtatttggtgacttccatttgaaactgactttagtgtttttttttttttggtcacttttaaaaatattttctaaatccatggagtgaccctcgaatatgcaagctaccatttttgctattaaatatttggtctaatttaaggacatactgttttagagttgtagtgagtttttacggaaattcttagataaatttatttaatgaccttactaaactgtgttttaattagattgaaaaggcatttgttgattaattgttaggctttactttgggaaaaaaaaaaggaaacagccaatgtcaagaatgagctactggtggttgacatttttggaatttgtcttttagtgaaatggtatcattggaaattgaaatggattctgtacttaactaataaagccatttcaaaataaggtcattaaggagctaaccagcaatacatttcagtcgagggagtgaattaatacagtgctaggtttgggaattaaagtactatatctcaatgtcaaaataatcttgggcatgtatgtgaacaattggggactataccatgttcctcccctttaaagcacacttattcagaattgtgatcctttgtaaacgacttttcattggcatatctgtagcgttggttaatacagttggctccacattatctcaagtttaaattaattggactgttgtagtaaaacgactggaattattggaattgtttaagccagctgattgagattcacattcactttccaaaatactgctattttcttcaaggtgttttttttttgacatctactttggaagtttgattatatcctgaaacctaaaatcacatccttattgattctgagtctgctaaaagttatttcaactaatttgaatattatcgcaaaaagtttacttgagaaaacaagttgaaattgaaattttgacttgctaaaattacattttttaaacggtagttttgaatgacattctaaatgtaatttagtttgactttgtgtttatatggccaatttggggtatggtcctgtatgttttttgtaatgtcataatgggagctgcagtgttgtgcaggtatcaaagagcttcccagttttcatgttagtaaacttggaaataattttctcatgcacctgatttttagcttcctattttaacaccgattattcttaaactttatgggagtaaatacccatctgtcattaactaaaatgagtagttaggtttggaagtagacagtggcttaccaaattgagattggcaaacttgtgggaactctttgttttcctttcacatctgtgagttcaaatataatacaaattaatgtagaactagagtactaaagtgactttttttcagagcatgtatacactttattttatcattgttctcctctagatactttcagtttctgatggcatagctgaagtcatgttgtggctttattagtttcaggaacttggatgtctgttttaaaccttagctatcattttagtcatcccaggaagtttgacttgactattcttatttaaatatttttcaaactgttgcaacttaatactaggaaaaaggaaggactagctgagctgacggaagttaagcttgctttcttaaccgcaaggcttagagcctttattatgctaattggcattatgaattttttagggactccttaacacacagctatcccaaacctgttttttaggacacctaagtgttactaattcagaaatgctgttcagggtctagggatggttgacaaagtatagccatatttttgtgtagcctgagagctaagaatgttctttacattttttaaatggttggaaaagaatcaaaagaattattttgtgacacgtgagaattatgtgaaattcaaatttcagtgtccataaataaaattttattggaacacaaaag

SEQ ID NO: 352270 - DNA, 7042 bp, Homo sapiens
tcgcacatgcgcgccacctccgcactgccctcgcttcctgcgcctcttcaggtcaccgcttgctctagttcccaggctttggcctctagtggatgagaatcaccgagtctgcggggctggacgctgaccgcccgggccagcacctaggcgggcgggagctgtgcggcccagggttcgcgcgggccgggtagaggctcgagccgggacccccgagcgtgaaccccggagccagcggcgctggggccagaggggccgggcgggaggtggtggcggaggcgaaggggcgacgggacctgggcctggcccgtgtgtgtcctcggcggcctggcgccggccgtcgctgtacggtgagccccagggaggcggatctgggccccgagaaggacacccgcctggatttgccccgtaggcccggcccgggcccctcgggagcagaacagccttggtgaggtggacaggaggggacttcgcgagcagacgcgcgcgccagcgacagcagcccgccccggcctctcgggagccgtggggcagaggctgcagagccccaggagggggccagtgtcattcaaagatgtggctgtggatttcacccaggaggagtggtggcaactggaccctgatgagaagataacatacggggatgtgatgttggagaactacagccatctagtttccctggcttatgaggtggcaacatcttgtacttcggagatctgaagccgagcaacttgcccaagtccttcttcttttcccattaacaagatatgatatcaccaagccaaacgtcatcattaagttggagcagggagaggagctgtggataacgggaggtgaatttccatgtcaacatagtccagcccttcacatcctcagccgaagatctcacttcctcccagaggcctttgctgactgacccctcagggattgtgggactttaccaaatcggtttgtaataacacctagaagacgctatccgatccatcaggcccagtattcctgtctgggggtacttcccaccgtgtgctggaatggttatcacaagaaggctgtgctgtcccctcgcaactccaggatggtgtgtagcccagtgactgtgaggatcgcccctcctgacagaagattttcgcgttctgcgataccagagcagataatcagctcaacactgtcctcaccatcaagtaacgccccagacccatgtgcaaaggagacagtactgagtgccctcaaagagaaggagaagaaaaggacagtggaggaagaagaccaaatattccttgatggccaggaaaataaaagaaggcgccatgatagcagtggcagtggacattcagcatttgagcccctggtggccaatggagtccccgcttcttttgtgcctaagcctgggtctctgaagagaggcctcaattctcagagctcagatgaccacttgaataagagatcccgaagctcttccatgagctccttgacaggcgcttacgcaagtggcatccctagctccagccgcaatgccattaccagttcctacagctccactcgaggcatctcacagctctggaagagaaatggccccagttcatcacccttctctagcccagcctcctcccgctcccagacaccggagaggccagcaaagaaaataagagaagaggagctgtgtcatcattccagttcttcaactccattggcagcagacagggagtcccagggagaaaaggctgcagatacaaccccaaggaagaaacaaaactcgaattctcagtctacacctggcagctctgggcagcgtaagcggaaagttcagctgctgccttctcggcgaggggaacagctgaccttgcctccacctccccagcttggctattcgatcactgccgaggacctagacttagagaagaaggcttcattacagtggttcaaccaggccttggaggacaagagcgatgctgcctcgaactctgtcactgagaccccacctatcactcagccttcatttacctttaccctgcctgctgctgcacctgcctccccacccacctccctcctggccccaagcaccaacccactgttagagagcttgaagaagatgcagactcccccgagcctgccaccctgcccagaatctgctggagcagcaaccactgaggccctctcacctccaaagacacccagcctcctacccccgctgggtttatcacagtcagggccgccagggctgctccccagcccctcctttgactccaaacccccgaccactttgctggggctgatccctgctccatccatggtaccagccactgacaccaaggcacctccaacccttcaggcagagacggctaccaaaccccaagccacatctgccccgtcccccgcccccaagcaaagcttcctgtttggaacacagaacacctcaccttccagccctgccgcccctgctgcatcttcagcacctcccatgttcaagcccattttcacggctccacccaagagtgagaaggaaggccccacaccgcctggcccttcagtcacagccacagcgccctccagctcctccctccccacgaccaccagcaccacagccccgaccttccagcctgtctttagcagcatggggccacctgcatctgtgcccttgcctgctcccttcttcaagcagacaactactcccgccactgctcccaccacaactgccccgctcttcactggcctggccagcgccacctctgctgtggctcccatcacctctgccagtccatccacagactctgcttcgaagcctgcgtttggctttggcataaacagtgtgagcagcagcagtgtgagtaccacgaccagcaccgccactgccgcctcacagcctttcctcttcggggcgccccaggcctctgctgccagcttcaccccggccatgggctccatattccagtttggcaaacctcctgccttgcccacaaccaccacagtcaccaccttcagccagtccctgcacactgccgtgccaacggccaccagcagcagcgctgccgactttagtggttttggcagcaccctcgccacctccgccccggccaccagcagccagcccactctgacgttcagtaacacgagcacccccacgttcaacattccctttggctcaagcgccaagtccccgctcccatcatatccgggagccaacccccagcccgcatttggggccgctgaggggcagccaccgggggccgccaagccggcccttgcccccagctttggcagctctttcacttttggaaactctgcagccccggctgctgcacccacacctgcacctccgtccatgatcaaggtcgtgcctgcgtacgtgcctacgcccatccatcctatctttggcggtgccacgcactcggcgtttgggttgaaagccacggcttcggccttcggcgctcccgccagctcacagcccgcctttggcggctccactgctgtcttcttcggtgcagccaccagctccggctttggagccaccacccagaccgccagcagcgggagcagcagctcggtgtttggcagcacaacaccatcacccttcacgtttgggggttcggcagcccccgctggcagtgggagctttgggatcaatgtggccaccccaggctccagcaccaccaccggagctttcagctttggagcaggacagagtgggagcacagccacctccacccccttcgcagggggcttaggtcagaacgccctgggcaccaccggccagagcacaccgtttgccttcaacgtgagcagcacaactgagagcaaacctgtgtttggaggcaccgccacccccacctttggtctgaacacccctgcgcctggagtgggcacatcaggcagcagcctctcctttggggcatcctcagcacccgcccaaggctttgttggtgttgcacctttcggcaacacttttgctcaccagcaagaacacagcccgaggaagggacccaataacctttcaaaacgcaaactgctgcctgcggtgagggcccagggtcttccacggagaggacaggcatcttcctttcccaccaggaaggagtgagcccggagcctctgctatgtgcaaggcggtgtgcaagcaccggctgcagctttttgctctcttctttctctttggggctgggctgggtgtgcgttctggtgctgatgctttggcctgtgaggctgagctagagaaatgtagatgttagatgtgccagtaccatcctgcgcctcccaagcatgcccccactcactcacgtcggcatctcgacccgttcaattacagcaacgaagaagccaccgctaagcgtggtcttgggggaagcccggaggcagtgctcggcacccgggaacgtgctcaggcctcggtggggccgggcaggcagggcgggagctagcctgcaagagaaacagccccaatgctgggtaagagagcagttcaccccatccccccctccacgaccctggcgcacgccctgtacctgaaggcgcccgggttctgctgcagcgcatcttgtaccatgtcttcattctcctcctggcagagggagcacatggagtagacgagccgctgcagggaagggaaagtgagcgcgtggcacagggctcgctgctggaaccctgccagggcatgcagacgcaccgggctaggtgtccctgccccgggctcctccagctgtctgctcggcatacctaaggaaaagcgtgtctcggttacacagcttcacaggctgcctcagtcctgaaatcctcgctcctgaaatcctcgcttcacagaggagaacttttgctccagggtcccaagcccattaaagtgtcagaactaagaccaaaacagatgactccaggtctaagctgctgtggacctctgagtccctcagccacgccttctcaccatctcacccgagccactgcaggaaggatccagcaggacatagtggacctcacgatagcgcggatctaagggggagaccgccaggaagtcctcctcagccagctcacagcaggagacgccagcccaggccagcagcgtggccatggatgccagccgcctggcatccaggtcaaaggcaaagatcttcctagggcagagggcagagcaggggtgagctgagcatgcatggagcagctaagggcctgtcacagctgacacagacaaccagaacatgcaggttaagccaggacacacaatattgaaacagcctatatttaaagggcccagggtcagaggtaactggcctggggtctctgccccaagggctaagggatccacatctcacacctgcagtggggaaagcttagcttggggcaaataccgtgaactactttggtgcagcaggaaagagttaagcgaaagtcatcctttcagccttcattacccactgaaaggcacaaaatcaaaccccatgtcctcctcctcctcctgtggcactcacccttggttcttcagaagagcagccaagtgactggtctttattgcctggggtggcacaggcatccatgacatgggagcctggcgggggtccagcagcatggctgggagacagctggcctggcaggcagaacacaggggccgggtaaacagagaccccaggctaggcccttcccgtgcctacacattcttcccttttctattcctcttgcctaccctgtcctgcagaatgaggtgtccggcccggtacagtgggtgttcatgcagatctgtctgggcgggaaacaccagcagctccggcatcaaggggtccaggagaaaatgcttccccttgagggctcgtaagtcatcgaggctgccagggaagaaccattcattcatcatttcctgaatttctccctgccaggccctatttcaacggtccattcatgcaacaaatgttaccacagctatggagaaatcaacagggtgataagggaatccgggatccgcagttgagggaatgggttgtcaagccagacttatgggtcaggagccccctctactgtttaccagcagtgggagcctgggcaagtgattcaatctcaagccccactggcatctctgtaaaatagtaggtgtgaggattcaatgagccaatatatccaagatacttacgtgccacaatttaataaatgttagctattcctgttgaagcataaccttggagaaaggttactttacaggggggtgaggagtggggaagtgagagctgagctcattcttgatggatgaggagttagtcatgtgaggcgcttaggttaaaactacattcactataactcagtaaagcagtcccgcccactctccgacccatgcagaaataggcctagagagtcacatgtctcagttcagaaatctatcgaagtggcagagctggaattcaaacacaagcagccgttctctgctattccaccctggtgtccaagcaacatggtagggcagaaggaagaggatcttacaaagagtaagggaaagggagaggggcagaggctgcttctcagagccaccaaaggacaaaataagacaggtgtgagcccagtggaggaggcacggggcagagaccagccactgttgctggcacgctggtgcacgtagcactgtggcagatggacctggagaggaagcaggagggacagcacaatggagccaagaaaggacttagcatggccgggcgcggtggttcatgcctgtaatcccagcattttgggaggccaaggtgggcagatcacctgaggtcaggagtttgagaccagcctggccaacatggagaaatcccgtctctactaaaaatacaaaattagccaggcatggtgctgcatgcctgcaatcctgtagggaaaagaaagagagatcagactgttactgtgtctgtgtagaaagggaagacataagaaattccattttgacctgtaccttgaacaattggttggctgagatgctgttaatttgtgactttgccccaaatttgagctcacaaaaacatgtgttgtatggaatcaaggtttaaaggatctagggctgtgcaggacatgccttgttaataaaacgtttacaagc

SEQ ID NO: 352271 - DNA, 662 bp, Homo sapiens
gcatatgtgaaaagctgcagggacctctgccctggaaagccaggtattgtccaaggttctccccatgtgatagtctgaaatatagcctcatgggatgagaggctgtgccccagcccgacacccgtaaagggtctgtgctgaggtggattagtaaaagaggaaagccttgcagttgagatagaggaagggcactgtctcctgcctgcccctgggaactgaatgtctcggtataaaacccgattgtacatttgttcaattctgagataggagaaaaaccaccctatggcgggaggcgagacatgttggcagcaatgctgccttgttatgctttactccacagatgtttgggcggagggaaacataaatctggcctacgtgcacatccaggcatagtacctccctttgaacttaattatgacatagattcctttgctcacatgtttttttgctgaccttctccttattatcaccctgctctcctaccgcattccttgtgctgagataatgaaaataataatcaataaaaactgagggaactcggagaccagtgctggtgcaggtccttggtatgctaagtgccagtctcctgggcccactgttgtttctctatactttgtctctgtgtcttatttcttttctcagtctcttgtcccacctgatga

SEQ ID NO: 352272 - DNA, 1430 bp, Homo sapiens
cgcgcagacttgtatagccagagctgatctatgagtatccccgtgtatgtcctgacagaaatgaggtgtccggcccggtacagtgggtgttcatgcagatctgtctgggcgggaaacaccagcagctccggcatcaaggggtccaggagaaaatgcttccccttgagggctcgtaagtcatcgaggctgccagggaagaaccattcattcatcatttcctgaatttctccctgccaggccctatttcaacggtccattcatgcaacaaatgttaccacagctatggagaaatcaacagggtgataagggaatccgggatccgcagttgagggaatgggttgtcaagccagacttatgggtcaggagccccctctactgtttaccagcagtgggagcctgggcaagtgattcaatctcaagccccactggcatctctgtaaaatagtaggtgtgaggattcaatgagccaatatatccaagatacttacgtgccacaatttaataaatgttagctattcctgttgaagcataaccttggagaaaggttactttacaggggggtgaggagtggggaagtgagagctgagctcattcttgatggatgaggagttagtcatgtgaggcgcttaggttaaaactacattcactataactcagtaaagcagtcccgcccactctccgacccatgcagaaataggcctagagagtcacatgtctcagttcagaaatctatcgaagtggcagagctggaattcaaacacaagcagccgttctctgctattccaccctggtgtccaagcaacatggtagggcagaaggaagaggatcttacaaagagtaagggaaagggagaggggcagaggctgcttctcagagccaccaaaggacaaaataagacaggtgtgagcccagtggaggaggcacggggcagagaccagccactgttgctggcacgctggtgcacgtagcactgtggcagatggacctggagaggaagcaggagggacagcacaatggagccaagaaaggacttagcatggccgggcgcggtggttcatgcctgtaatcccagcattttgggaggccaaggtgggcagatcacctgaggtcaggagtttgagaccagcctggccaacatggagaaatcccgtctctactaaaaatacaaaattagccaggcatggtgctgcatgcctgcaatcctgtagggaaaagaaagagagatcagactgttactgtgtctgtgtagaaagggaagacataagaaattccattttgacctgtaccttgaacaattggttggctgagatgctgttaatttgtgactttgccccaaatttgagctcacaaaaacatgtgttgtatggaatcaaggtttaaaggatctagggctgtgcaggacatgccttgttaataaaacgtttacaagc

SEQ ID NO: 352273 - DNA, 610 bp, Homo sapiens
tcgcacatgcgcgccacctccgcactgccctcgcttcctgcgcctcttcaggtcaccgcttgctctagttcccaggctttggcctctagtggatgagaatcaccgagtctgcggggctggacgctgaccgcccgggccagcacctaggcgggcgggagctgtgcggcccagggttcgcgcgggccgggtagaggctcgagccgggacccccgagcgtgaaccccggagccagcggcgctggggccagaggggccgggcgggaggtggtggcggaggcgaaggggcgacgggacctgggcctggcccgtgtgtgtcctcggcggcctggcgccggccgtcgctgtacggtgagccccagggaggcggatctgggccccgagaaggacacccgcctggatttgccccgtaggcccggcccgggcccctcgggagcagaacagccttggtgaggtggacaggaggggacttcgcgagcagacgcgcgcgccagcgacagcagcccgccccggcctctcgggagccgtggggcagaggctgcagagccccaggaggatttcgaccgcctctaaacgtccgtcagcacttctattctctcacttaagtgtctgct

SEQ ID NO: 352274 - DNA, 6029 bp, Homo sapiens
tcgcacatgcgcgccacctccgcactgccctcgcttcctgcgcctcttcaggtcaccgcttgctctagttcccaggctttggcctctagtggatgagaatcaccgagtctgcggggctggacgctgaccgcccgggccagcacctaggcgggcgggagctgtgcggcccagggttcgcgcgggccgggtagaggctcgagccgggacccccgagcgtgaaccccggagccagcggcgctggggccagaggggccgggcgggaggtggtggcggaggcgaaggggcgacgggacctgggcctggcccgtgtgtgtcctcggcggcctggcgccggccgtcgctgtacggtgagccccagggaggcggatctgggccccgagaaggacacccgcctggatttgccccgtaggcccggcccgggcccctcgggagcagaacagccttggtgaggtggacaggaggggacttcgcgagcagacgcgcgcgccagcgacagcagcccgccccggcctctcgggagccgtggggcagaggctgcagagccccaggagggggccagtgtcattcaaagatgtggctgtggatttcacccaggaggagtggtggcaactggaccctgatgagaagataacatacggggatgtgatgttggagaactacagccatctagtttccctggcttatgaggtggcaacatcttgtacttcggagatctgaagccgagcaacttgcccaagtccttcttcttttcccattaacaagatatgatatcaccaagccaaacgtcatcattaagttggagcagggagaggagctgtggataacgggaggtgaatttccatgtcaacatagtccagggattgtgggactttaccaaatcggtttgtaataacacctagaagacgctatccgatccatcaggcccagtattcctgtctgggggtacttcccaccgtgtgctggaatggttatcacaagaaggctgtgctgtcccctcgcaactccaggatggtgtgtagcccagtgactgtgaggatcgcccctcctgacagaagattttcgcgttctgcgataccagagcagataatcagctcaacactgtcctcaccatcaagtaacgccccagacccatgtgcaaaggagacagtactgagtgccctcaaagagaaggagaagaaaaggacagtggaggaagaagaccaaatattccttgatggccaggaaaataaaagaaggcgccatgatagcagtggcagtggacattcagcatttgagcccctggtggccaatggagtccccgcttcttttgtgcctaagcctgggtctctgaagagaggcctcaattctcagagctcagatgaccacttgaataagagatcccgaagctcttccatgagctccttgacaggcgcttacgcaagtggcatccctagctccagccgcaatgccattaccagttcctacagctccactcgaggcatctcacagctctggaagagaaatggccccagttcatcacccttctctagcccagcctcctcccgctcccagacaccggagaggccagcaaagaaaataagagaagaggagctgtgtcatcattccagttcttcaactccattggcagcagacagggagtcccagggagaaaaggctgcagatacaaccccaaggaagaaacaaaactcgaattctcagtctacacctggcagctctgggcagcgtaagcggaaagttcagctgctgccttctcggcgaggggaacagctgaccttgcctccacctccccagcttggctattcgatcactgccgaggacctagacttagagaagaaggcttcattacagtggttcaaccaggccttggaggacaagagcgatgctgcctcgaactctgtcactgagaccccacctatcactcagccttcatttacctttaccctgcctgctgctgcacctgcctccccacccacctccctcctggccccaagcaccaacccactgttagagagcttgaagaagatgcagactcccccgagcctgccaccctgcccagaatctgctggagcagcaaccactgaggccctctcacctccaaagacacccagcctcctacccccgctgggtttatcacagtcagggccgccagggctgctccccagcccctcctttgactccaaacccccgaccactttgctggggctgatccctgctccatccatggtaccagccactgacaccaaggcacctccaacccttcaggcagagacggctaccaaaccccaagccacatctgccccgtcccccgcccccaagcaaagcttcctgtttggaacacagaacacctcaccttccagccctgccgcccctgctgcatcttcagcacctcccatgttcaagcccattttcacggctccacccaagagtgagaaggaaggccccacaccgcctggcccttcagtcacagccacagcgccctccagctcctccctccccacgaccaccagcaccacagccccgaccttccagcctgtctttagcagcatggggccacctgcatctgtgcccttgcctgctcccttcttcaagcagacaactactcccgccactgctcccaccacaactgccccgctcttcactggcctggccagcgccacctctgctgtggctcccatcacctctgccagtccatccacagactctgcttcgaagcctgcgtttggctttggcataaacagtgtgagcagcagcagtgtgagtaccacgaccagcaccgccactgccgcctcacagcctttcctcttcggggcgccccaggcctctgctgccagcttcaccccggccatgggctccatattccagtttggcaaacctcctgccttgcccacaaccaccacagtcaccaccttcagccagtccctgcacactgccgtgccaacggccaccagcagcagcgctgccgactttagtggttttggcagcaccctcgccacctccgccccggccaccagcagccagcccactctgacgttcagtaacacgagcacccccacgttcaacattccctttggctcaagcgccaagtccccgctcccatcatatccgggagccaacccccagcccgcatttggggccgctgaggggcagccaccgggggccgccaagccggcccttgcccccagctttggcagctctttcacttttggaaactctgcagccccggctgctgcacccacacctgcacctccgtccatgatcaaggtcgtgcctgcgtacgtgcctacgcccatccatcctatctttggcggtgccacgcactcggcgtttgggttgaaagccacggcttcggccttcggcgctcccgccagctcacagcccgcctttggcggctccactgctgtcttcttcggtgcagccaccagctccggctttggagccaccacccagaccgccagcagcgggagcagcagctcggtgtttggcagcacaacaccatcacccttcacgtttgggggttcggcagcccccgctggcagtgggagctttgggatcaatgtggccaccccaggctccagcaccaccaccggagctttcagctttggagcaggacagagtgggagcacagccacctccacccccttcgcagggggcttaggtcagaacgccctgggcaccaccggccagagcacaccgtttgccttcaacgtgagcagcacaactgagagcaaacctgtgtttggaggcaccgccacccccacctttggtctgaacacccctgcgcctggagtgggcacatcaggcagcagcctctcctttggggcatcctcagcacccgcccaaggctttgttggtgttgcacctttcggatcggcggccctttcattttccattggtgcgggatccaagaccccaggggctcgacagcgactgcaggcccgaaggcagcacacccgcaaaaagtagcctttgtcccctgtccctgttccccccaccccttccctaaatctggaccttggcacctgctaggaagagccttggacccttccagttgcgtaaagcaaacctaccccggatctctggcttcagccgccagggggcagtggcagccctggggccctttcccttctggaggaagcacaagcctcagggaaggggaagcaggatgcggagggccaaagcccgggacctctacttgaacagttctactggggaggctggagaactaaggaaacacctgtacatagtgtccgctgccctgactcccgcttagcacacccttaggcaggcgccccttccacctttccccgagaccgtcgtcgctggagggggcagggtccagcccgcctggatcggtggtgtgcacctgatgggatttgggaaatgggctatccgtaaagctttatcttgcttggcttagctgtgagaagtggttctcttcctctggtcccttctggggactctgtttccccatttcttgctgctgtgtccctcaccagttccttgcaggattccttcgtttttaaatgcccttgaatctagctttgccttggagaccccagtgggtgctgctcctgccgttttcttcctgccaagcctgaatcaatgtttcatctccaaccctctgccagtttggcccctcagagcttggtggctcaagactgttagcctggcagagccaggggtgaagggagaagctcttggagcaggcaggatgcccaccgctgcttcagctgcctcctcgcccagctaccctttggccccattgggccctcgtctgcctctccaggattgtatgtttcaagccttgtcctgtgttcctttgtctgacgctctgtgtattgctctttgaatcgagtttggaggaagagttgagttgtatgagtggcggcatgttggtagtgccggacttcctgtttcaagttttctggggcctcgctaattgaatgtggaaagtagcaccacttgacggctacaagtgccgactcctgaattttcccatggtgttctgacttcaagggctggcagccagggagaatgggcccaggggaagcaaagacctcttccctctgccgtttctgtcccacttaactgacctcactggaggctacatcacccaaagtagatgttagaaaacctaaattaatgaaccatatttttaaaatcctatttttcccaaacagggccctctgcagcccatcctttccttccgtccttctgaaaccacataccccaggcccaagcgccttgctgccacgcccaacctctttgggagaagtatgaatgcgtgtgtctaaattaaaagaaaaaaatatttaaacgttttttaacaaaaatttatttttgtatttaagctaaattgccttttaaattccttcaagcttggttcattgaggtggttaagtataaatgctattaactaggaattagctgtatagttaagttatgcctgtgcaaagaagaggctcaaatgctgtccccggcagctttcctgggggactagagctccttctggccatgttatatgaaatgtaattcttattttataaataatgtgatgtaaatgtaactggtgccccctccccgatgtgactgagggtgagtgagtggtggcggggctgctccttcccacccctcagaacagctctgatcctcgttaatacctggctgcgtgtgcagctgaggagggagtgaacctcaagcctaaatacctgttaggattggagggtctgggtgggcctgggcctagcaatcaagcttctacctgtaccttatgtaaggtagaccctcctagtgtcagtacctgagctagtttacctcagttccgcaggcaggacagccggtccgggaaccctgagtgagaatgagtgtggatgtgtacagtacacgcactggacggcagcgggaggctgggactttccattacaaatagagacttcattcctgttgagtctagttggaatttttagtatgaatgtgagatttttctcctgcttgtgacattaagaataaaaaactgtgatctatcgtag

SEQ ID NO: 352275 - DNA, 6937 bp, Homo sapiens
tcgcacatgcgcgccacctccgcactgccctcgcttcctgcgcctcttcaggtcaccgcttgctctagttcccaggctttggcctctagtggatgagaatcaccgagtctgcggggctggacgctgaccgcccgggccagcacctaggcgggcgggagctgtgcggcccagggttcgcgcgggccgggtagaggctcgagccgggacccccgagcgtgaaccccggagccagcggcgctggggccagaggggccgggcgggaggtggtggcggaggcgaaggggcgacgggacctgggcctggcccgtgtgtgtcctcggcggcctggcgccggccgtcgctgtacggtgagccccagggaggcggatctgggccccgagaaggacacccgcctggatttgccccgtaggcccggcccgggcccctcgggagcagaacagccttggtgaggtggacaggaggggacttcgcgagcagacgcgcgcgccagcgacagcagcccgccccggcctctcgggagccgtggggcagaggctgcagagccccaggagggtctatcagccacagtctctgcaagtttccaagagcagcagaaaatgaacacattgcaggggccagtgtcattcaaagatgtggctgtggatttcacccaggaggagtggtggcaactggaccctgatgagaagataacatacggggatgtgatgttggagaactacagccatctagtttccctggcttatgaggtggcaacatcttgtacttcggagatctgaagccgagcaacttgcccaagtccttcttcttttcccattaacaagatatgatatcaccaagccaaacgtcatcattaagttggagcagggagaggagctgtggataacgggaggtgaatttccatgtcaacatagtccaggtcagactgcagtggtgtaatcatagctcattgaagcctcaaactcctgagctccaggaatcctcccaccacagtctctcaaatacttgggactacagcatttatttgaaagataaacctcttggatgtgactctggagacaagaccagcagctcgagaccattcaatccaaggtataaaatgggagaaaatcagctccatcatggtctgaattgaggatgaggcagaagagcagagaatagcggatgcccaggtggcagcaacttaactcttttcctgtggacttgcggggtctccccacctccactgcgtcgggacatgccgtgtgccgtctctttatccatagctgcctccggcatcagcagagaaagtcatgggcagatggagccgtggattagttcttttttccagtcttcctttactttatctggataagattgggcagattgaatttgatcttctatactggggccagggagcagggtggatctagaccatgcagcttttccccactgtcaccagtttgggagcagggattggctgccattgtcctgtctagcctccgtgttcctgggacaccgctgactggaggctgctcctcttctaagggagtctggcatagaagacacgacccagagcacatggcaccttctctcttctcctgcaccagtctccttgcccctctgtattgtcatcatactgaagcaaaccatccaactcaccagcgtctctggactcgtttcattgattcctctccctgaaactcttcctcattctccttttagcccttcacatcctcagccgaagatctcacttcctcccagaggcctttgctgactgacccctcagggattgtgggactttaccaaatcggtttgtaataacacctagaagacgctatccgatccatcaggcccagtattcctgtctgggggtacttcccaccgtgtgctggaatggttatcacaagaaggctgtgctgtcccctcgcaactccaggatggtgtgtagcccagtgactgtgaggatcgcccctcctgacagaagattttcgcgttctgcgataccagagcagataatcagctcaacactgtcctcaccatcaagtaacgccccagacccatgtgcaaaggagacagtactgagtgccctcaaagagaaggagaagaaaaggacagtggaggaagaagaccaaatattccttgatggccaggaaaataaaagaaggcgccatgatagcagtggcagtggacattcagcatttgagcccctggtggccaatggagtccccgcttcttttgtgcctaagcctgggtctctgaagagaggcctcaattctcagagctcagatgaccacttgaataagagatcccgaagctcttccatgagctccttgacaggcgcttacgcaagtggcatccctagctccagccgcaatgccattaccagttcctacagctccactcgaggcatctcacagctctggaagagaaatggccccagttcatcacccttctctagcccagcctcctcccgctcccagacaccggagaggccagcaaagaaaataagagaagaggagctgtgtcatcattccagttcttcaactccattggcagcagacagggagtcccagggagaaaaggctgcagatacaaccccaaggaagaaacaaaactcgaattctcagtctacacctggcagctctgggcagcgtaagcggaaagttcagctgctgccttctcggcgaggggaacagctgaccttgcctccacctccccagcttggctattcgatcactgccgaggacctagacttagagaagaaggcttcattacagtggttcaaccaggccttggaggacaagagcgatgctgcctcgaactctgtcactgagaccccacctatcactcagccttcatttacctttaccctgcctgctgctgcacctgcctccccacccacctccctcctggccccaagcaccaacccactgttagagagcttgaagaagatgcagactcccccgagcctgccaccctgcccagaatctgctggagcagcaaccactgaggccctctcacctccaaagacacccagcctcctacccccgctgggtttatcacagtcagggccgccagggctgctccccagcccctcctttgactccaaacccccgaccactttgctggggctgatccctgctccatccatggtaccagccactgacaccaaggcacctccaacccttcaggcagagacggctaccaaaccccaagccacatctgccccgtcccccgcccccaagcaaagcttcctgtttggaacacagaacacctcaccttccagccctgccgcccctgctgcatcttcagcacctcccatgttcaagcccattttcacggctccacccaagagtgagaaggaaggccccacaccgcctggcccttcagtcacagccacagcgccctccagctcctccctccccacgaccaccagcaccacagccccgaccttccagcctgtctttagcagcatggggccacctgcatctgtgcccttgcctgctcccttcttcaagcagacaactactcccgccactgctcccaccacaactgccccgctcttcactggcctggccagcgccacctctgctgtggctcccatcacctctgccagtccatccacagactctgcttcgaagcctgcgtttggctttggcataaacagtgtgagcagcagcagtgtgagtaccacgaccagcaccgccactgccgcctcacagcctttcctcttcggggcgccccaggcctctgctgccagcttcaccccggccatgggctccatattccagtttggcaaacctcctgccttgcccacaaccaccacagtcaccaccttcagccagtccctgcacactgccgtgccaacggccaccagcagcagcgctgccgactttagtggttttggcagcaccctcgccacctccgccccggccaccagcagccagcccactctgacgttcagtaacacgagcacccccacgttcaacattccctttggctcaagcgccaagtccccgctcccatcatatccgggagccaacccccagcccgcatttggggccgctgaggggcagccaccgggggccgccaagccggcccttgcccccagctttggcagctctttcacttttggaaactctgcagccccggctgctgcacccacacctgcacctccgtccatgatcaaggtcgtgcctgcgtacgtgcctacgcccatccatcctatctttggcggtgccacgcactcggcgtttgggttgaaagccacggcttcggccttcggcgctcccgccagctcacagcccgcctttggcggctccactgctgtcttcttcggtgcagccaccagctccggctttggagccaccacccagaccgccagcagcgggagcagcagctcggtgtttggcagcacaacaccatcacccttcacgtttgggggttcggcagcccccgctggcagtgggagctttgggatcaatgtggccaccccaggctccagcaccaccaccggagctttcagctttggagcaggacagagtgggagcacagccacctccacccccttcgcagggggcttaggtcagaacgccctgggcaccaccggccagagcacaccgtttgccttcaacgtgagcagcacaactgagagcaaacctgtgtttggaggcaccgccacccccacctttggtctgaacacccctgcgcctggagtgggcacatcaggcagcagcctctcctttggggcatcctcagcacccgcccaaggctttgttggtgttgcacctttcggatcggcggccctttcattttccattggtgcgggatccaagaccccaggggctcgacagcgactgcaggcccgaaggcagcacacccgcaaaaagtagcctttgtcccctgtccctgttccccccaccccttccctaaatctggaccttggcacctgctaggaagagccttggacccttccagttgcgtaaagcaaacctaccccggatctctggcttcagccgccagggggcagtggcagccctggggccctttcccttctggaggaagcacaagcctcagggaaggggaagcaggatgcggagggccaaagcccgggacctctacttgaacagttctactggggaggctggagaactaaggaaacacctgtacatagtgtccgctgccctgactcccgcttagcacacccttaggcaggcgccccttccacctttccccgagaccgtcgtcgctggagggggcagggtccagcccgcctggatcggtggtgtgcacctgatgggatttgggaaatgggctatccgtaaagctttatcttgcttggcttagctgtgagaagtggttctcttcctctggtcccttctggggactctgtttccccatttcttgctgctgtgtccctcaccagttccttgcaggattccttcgtttttaaatgcccttgaatctagctttgccttggagaccccagtgggtgctgctcctgccgttttcttcctgccaagcctgaatcaatgtttcatctccaaccctctgccagtttggcccctcagagcttggtggctcaagactgttagcctggcagagccaggggtgaagggagaagctcttggagcaggcaggatgcccaccgctgcttcagctgcctcctcgcccagctaccctttggccccattgggccctcgtctgcctctccaggattgtatgtttcaagccttgtcctgtgttcctttgtctgacgctctgtgtattgctctttgaatcgagtttggaggaagagttgagttgtatgagtggcggcatgttggtagtgccggacttcctgtttcaagttttctggggcctcgctaattgaatgtggaaagtagcaccacttgacggctacaagtgccgactcctgaattttcccatggtgttctgacttcaagggctggcagccagggagaatgggcccaggggaagcaaagacctcttccctctgccgtttctgtcccacttaactgacctcactggaggctacatcacccaaagtagatgttagaaaacctaaattaatgaaccatatttttaaaatcctatttttcccaaacagggccctctgcagcccatcctttccttccgtccttctgaaaccacataccccaggcccaagcgccttgctgccacgcccaacctctttgggagaagtatgaatgcgtgtgtctaaattaaaagaaaaaaatatttaaacgttttttaacaaaaatttatttttgtatttaagctaaattgccttttaaattccttcaagcttggttcattgaggtggttaagtataaatgctattaactaggaattagctgtatagttaagttatgcctgtgcaaagaagaggctcaaatgctgtccccggcagctttcctgggggactagagctccttctggccatgttatatgaaatgtaattcttattttataaataatgtgatgtaaatgtaactggtgccccctccccgatgtgactgagggtgagtgagtggtggcggggctgctccttcccacccctcagaacagctctgatcctcgttaatacctggctgcgtgtgcagctgaggagggagtgaacctcaagcctaaatacctgttaggattggagggtctgggtgggcctgggcctagcaatcaagcttctacctgtaccttatgtaaggtagaccctcctagtgtcagtacctgagctagtttacctcagttccgcaggcaggacagccggtccgggaaccctgagtgagaatgagtgtggatgtgtacagtacacgcactggacggcagcgggaggctgggactttccattacaaatagagacttcattcctgttgagtctagttggaatttttagtatgaatgtgagatttttctcctgcttgtgacattaagaataaaaaactgtgatctatcgtag

SEQ ID NO: 352276 - DNA, 9228 bp, Homo sapiens
tcgcacatgcgcgccacctccgcactgccctcgcttcctgcgcctcttcaggtcaccgcttgctctagttcccaggctttggcctctagtggatgagaatcaccgagtctgcggggctggacgctgaccgcccgggccagcacctaggcgggcgggagctgtgcggcccagggttcgcgcgggccgggtagaggctcgagccgggacccccgagcgtgaaccccggagccagcggcgctggggccagaggggccgggcgggaggtggtggcggaggcgaaggggcgacgggacctgggcctggcccgtgtgtgtcctcggcggcctggcgccggccgtcgctgtacggtgagccccagggaggcggatctgggccccgagaaggacacccgcctggatttgccccgtaggcccggcccgggcccctcgggagcagaacagccttggtgaggtggacaggaggggacttcgcgagcagacgcgcgcgccagcgacagcagcccgccccggcctctcgggagccgtggggcagaggctgcagagccccaggagggtctatcagccacagtctctgcaagtttccaagagcagcagaaaatgaacacattgcaggggccagtgtcattcaaagatgtggctgtggatttcacccaggaggagtggtggcaactggaccctgatgagaagataacatacggggatgtgatgttggagaactacagccatctagtttccctggcttatgaggtggcaacatcttgtacttcggagatctgaagccgagcaacttgcccaagtccttcttcttttcccattaacaagatatgatatcaccaagccaaacgtcatcattaagttggagcagggagaggagctgtggataacgggaggtgaatttccatgtcaacatagtccagggattgtgggactttaccaaatcggtttgtaataacacctagaagacgctatccgatccatcaggcccagtattcctgtctgggggtacttcccaccgtgtgctggaatggttatcacaagaaggctgtgctgtcccctcgcaactccaggatggtgtgtagcccagtgactgtgaggatcgcccctcctgacagaagattttcgcgttctgcgataccagagcagataatcagctcaacactgtcctcaccatcaagtaacgccccagacccatgtgcaaaggagacagtactgagtgccctcaaagagaaggagaagaaaaggacagtggaggaagaagaccaaatattccttgatggccaggaaaataaaagaaggcgccatgatagcagtggcagtggacattcagcatttgagcccctggtggccaatggagtccccgcttcttttgtgcctaagcctgggtctctgaagagaggcctcaattctcagagctcagatgaccacttgaataagagatcccgaagctcttccatgagctccttgacaggcgcttacgcaagtggcatccctagctccagccgcaatgccattaccagttcctacagctccactcgaggcatctcacagctctggaagagaaatggccccagttcatcacccttctctagcccagcctcctcccgctcccagacaccggagaggccagcaaagaaaataagagaagaggagctgtgtcatcattccagttcttcaactccattggcagcagacagggagtcccagggagaaaaggctgcagatacaaccccaaggaagaaacaaaactcgaattctcagtctacacctggcagctctgggcagcgtaagcggaaagttcagctgctgccttctcggcgaggggaacagctgaccttgcctccacctccccagcttggctattcgatcactgccgaggacctagacttagagaagaaggcttcattacagtggttcaaccaggccttggaggacaagagcgatgctgcctcgaactctgtcactgagaccccacctatcactcagccttcatttacctttaccctgcctgctgctgcacctgcctccccacccacctccctcctggccccaagcaccaacccactgttagagagcttgaagaagatgcagactcccccgagcctgccaccctgcccagaatctgctggagcagcaaccactgaggccctctcacctccaaagacacccagcctcctacccccgctgggtttatcacagtcagggccgccagggctgctccccagcccctcctttgactccaaacccccgaccactttgctggggctgatccctgctccatccatggtaccagccactgacaccaaggcacctccaacccttcaggcagagacggctaccaaaccccaagccacatctgccccgtcccccgcccccaagcaaagcttcctgtttggaacacagaacacctcaccttccagccctgccgcccctgctgcatcttcagcacctcccatgttcaagcccattttcacggctccacccaagagtgagaaggaaggccccacaccgcctggcccttcagtcacagccacagcgccctccagctcctccctccccacgaccaccagcaccacagccccgaccttccagcctgtctttagcagcatggggccacctgcatctgtgcccttgcctgctcccttcttcaagcagacaactactcccgccactgctcccaccacaactgccccgctcttcactggcctggccagcgccacctctgctgtggctcccatcacctctgccagtccatccacagactctgcttcgaagcctgcgtttggctttggcataaacagtgtgagcagcagcagtgtgagtaccacgaccagcaccgccactgccgcctcacagcctttcctcttcggggcgccccaggcctctgctgccagcttcaccccggccatgggctccatattccagtttggcaaacctcctgccttgcccacaaccaccacagtcaccaccttcagccagtccctgcacactgccgtgccaacggccaccagcagcagcgctgccgactttagtggttttggcagcaccctcgccacctccgccccggccaccagcagccagcccactctgacgttcagtaacacgagcacccccacgttcaacattccctttggctcaagcgccaagtccccgctcccatcatatccgggagccaacccccagcccgcatttggggccgctgaggggcagccaccgggggccgccaagccggcccttgcccccagctttggcagctctttcacttttggaaactctgcagccccggctgctgcacccacacctgcacctccgtccatgatcaaggtcgtgcctgcgtacgtgcctacgcccatccatcctatctttggcggtgccacgcactcggcgtttgggttgaaagccacggcttcggccttcggcgctcccgccagctcacagcccgcctttggcggctccactgctgtcttcttcggtgcagccaccagctccggctttggagccaccacccagaccgccagcagcgggagcagcagctcggtgtttggcagcacaacaccatcacccttcacgtttgggggttcggcagcccccgctggcagtgggagctttgggatcaatgtggccaccccaggctccagcaccaccaccggagctttcagctttggagcaggacagagtgggagcacagccacctccacccccttcgcagggggcttaggtcagaacgccctgggcaccaccggccagagcacaccgtttgccttcaacgtgagcagcacaactgagagcaaacctgtgtttggaggcaccgccacccccacctttggtctgaacacccctgcgcctggagtgggcacatcaggcagcagcctctcctttggggcatcctcagcacccgcccaaggctttgttggtgttgcacctttcggatcggcggccctttcattttccattggtgcgggatccaagaccccaggggctcgacagcgactgcaggcccgaaggcagcacacccgcaaaaagtagcctttgtcccctgtccctgttccccccaccccttccctaaatctggaccttggcacctgctaggaagagccttggacccttccagttgcgtaaagcaaacctaccccggatctctggcttcagccgccagggggcagtggcagccctggggccctttcccttctggaggaagcacaagcctcagggaaggggaagcaggatgcggagggccaaagcccgggacctctacttgaacagttctactggggaggctggagaactaaggaaacacctgtacatagtgtccgctgccctgactcccgcttagcacacccttaggcaggcgccccttccacctttccccgagaccgtcgtcgctggagggggcagggtccagcccgcctggatcggtggtgtgcacctgatgggatttgggaaatgggctatccgtaaagctttatcttgcttggcttagctgtgagaagtggttctcttcctctggtcccttctggggactctgtttccccatttcttgctgctgtgtccctcaccagttccttgcaggattccttcgtttttaaatgcccttgaatctagctttgccttggagaccccagtgggtgctgctcctgccgttttcttcctgccaagcctgaatcaatgtttcatctccaaccctctgccagtttggcccctcagagcttggtggctcaagactgttagcctggcagagccaggggtgaagggagaagctcttggagcaggcaggatgcccaccgctgcttcagctgcctcctcgcccagctaccctttggccccattgggccctcgtctgcctctccaggattgtatgtttcaagccttgtcctgtgttcctttgtctgacgctctgtgtattgctctttgaatcgagtttggaggaagagttgagttgtatgagtggcggcatgttggtagtgccggacttcctgtttcaagttttctggggcctcgctaattgaatgtggaaagtagcaccacttgacggctacaagtgccgactcctgaattttcccatggtgttctgacttcaagggctggcagccagggagaatgggcccaggggaagcaaagacctcttccctctgccgtttctgtcccacttaactgacctcactggaggctacatcacccaaagtagatgttagaaaacctaaattaatgaaccatatttttaaaatcctatttttcccaaacagggccctctgcagcccatcctttccttccgtccttctgaaaccacataccccaggcccaagcgccttgctgccacgcccaacctctttgggagaagtatgaatgcgtgtgtctaaattaaaagaaaaaaatatttaaacgttttttaacaaaaatttatttttgtatttaagctaaattgccttttaaattccttcaagcttggttcattgaggtggttaagtataaatgctattaactaggaattagctgtatagttaagttatgcctgtgcaaagaagaggctcaaatgctgtccccggcagctttcctgggggactagagctccttctggccatgttatatgaaatgtaattcttattttataaataatgtgatgtaaatgtaactggtgccccctccccgatgtgactgagggtgagtgagtggtggcggggctgctccttcccacccctcagaacagctctgatcctcgttaatacctggctgcgtgtgcagctgaggagggagtgaacctcaagcctaaatacctgttaggattggagggtctgggtgggcctgggcctagcaatcaagcttctacctgtaccttatgtaaggtagaccctcctagtgtcagtacctgagctagtttacctcagttccgcaggcaggacagccggtccgggaaccctgagtgagaatgagtgtggatgtgtacagtacacgcactggacggcagcgggaggctgggactttccattacaaatagagacttcattcctgttgagtctagttggaatttttagtatgaatgtgagatttttctcctgcttgtgacattaagaataaaaaactgtgatctatcgtagagtacgttctgcattttatttctgcaggcaacacttttgctcaccagcaagaacacagcccgaggaagggacccaataacctttcaaaacgcaaactgctgcctgcggtgagggcccagggtcttccacggagaggacaggcatcttcctttcccaccaggaaggagtgagcccggagcctctgctatgtgcaaggcggtgtgcaagcaccggctgcagctttttgctctcttctttctctttggggctgggctgggtgtgcgttctggtgctgatgctttggcctgtgaggctgagctagagaaatgtagatgttagatgtgccagtaccatcctgcgcctcccaagcatgcccccactcactcacgtcggcatctcgacccgttcaattacagcaacgaagaagccaccgctaagcgtggtcttgggggaagcccggaggcagtgctcggcacccgggaacgtgctcaggcctcggtggggccgggcaggcagggcgggagctagcctgcaagagaaacagccccaatgctgggtaagagagcagttcaccccatccccccctccacgaccctggcgcacgccctgtacctgaaggcgcccgggttctgctgcagcgcatcttgtaccatgtcttcattctcctcctggcagagggagcacatggagtagacgagccgctgcagggaagggaaagtgagcgcgtggcacagggctcgctgctggaaccctgccagggcatgcagacgcaccgggctaggtgtccctgccccgggctcctccagctgtctgctcggcatacctaaggaaaagcgtgtctcggttacacagcttcacaggctgcctcagtcctgaaatcctcgctcctgaaatcctcgcttcacagaggagaacttttgctccagggtcccaagcccattaaagtgtcagaactaagaccaaaacagatgactccaggtctaagctgctgtggacctctgagtccctcagccacgccttctcaccatctcacccgagccactgcaggaaggatccagcaggacatagtggacctcacgatagcgcggatctaagggggagaccgccaggaagtcctcctcagccagctcacagcaggagacgccagcccaggccagcagcgtggccatggatgccagccgcctggcatccaggtcaaaggcaaagatcttcctagggcagagggcagagcaggggtgagctgagcatgcatggagcagctaagggcctgtcacagctgacacagacaaccagaacatgcaggttaagccaggacacacaatattgaaacagcctatatttaaagggcccagggtcagaggtaactggcctggggtctctgccccaagggctaagggatccacatctcacacctgcagtggggaaagcttagcttggggcaaataccgtgaactactttggtgcagcaggaaagagttaagcgaaagtcatcctttcagccttcattacccactgaaaggcacaaaatcaaaccccatgtcctcctcctcctcctgtggcactcacccttggttcttcagaagagcagccaagtgactggtctttattgcctggggtggcacaggcatccatgacatgggagcctggcgggggtccagcagcatggctgggagacagctggcctggcaggcagaacacaggggccgggtaaacagagaccccaggctaggcccttcccgtgcctacacattcttcccttttctattcctcttgcctaccctgtcctgcagaatgaggtgtccggcccggtacagtgggtgttcatgcagatctgtctgggcgggaaacaccagcagctccggcatcaaggggtccaggagaaaatgcttccccttgagggctcgtaagtcatcgaggctgccagggaagaaccattcattcatcatttcctgaatttctccctgccaggccctatttcaacggtccattcatgcaacaaatgttaccacagctatggagaaatcaacagggtgataagggaatccgggatccgcagttgagggaatgggttgtcaagccagacttatgggtcaggagccccctctactgtttaccagcagtgggagcctgggcaagtgattcaatctcaagccccactggcatctctgtaaaatagtaggtgtgaggattcaatgagccaatatatccaagatacttacgtgccacaatttaataaatgttagctattcctgttgaagcataaccttggagaaaggttactttacaggggggtgaggagtggggaagtgagagctgagctcattcttgatggatgaggagttagtcatgtgaggcgcttaggttaaaactacattcactataactcagtaaagcagtcccgcccactctccgacccatgcagaaataggcctagagagtcacatgtctcagttcagaaatctatcgaagtggcagagctggaattcaaacacaagcagccgttctctgctattccaccctggtgtccaagcaacatggtagggcagaaggaagaggatcttacaaagagtaagggaaagggagaggggcagaggctgcttctcagagccaccaaaggacaaaataagacaggtgtgagcccagtggaggaggcacggggcagagaccagccactgttgctggcacgctggtgcacgtagcactgtggcagatggacctggagaggaagcaggagggacagcacaatggagccaagaaaggacttagcatggccgggcgcggtggttcatgcctgtaatcccagcattttgggaggccaaggtgggcagatcacctgaggtcaggagtttgagaccagcctggccaacatggagaaatcccgtctctactaaaaatacaaaattagccaggcatggtgctgcatgcctgcaatcctgtagggaaaagaaagagagatcagactgttactgtgtctgtgtagaaagggaagacataagaaattccattttgacctgtaccttgaacaattggttggctgagatgctgttaatttgtgactttgccccaaatttgagctcacaaaaacatgtgttgtatggaatcaaggtttaaaggatctagggctgtgcaggacatgccttgttaataaaacgtttacaagc

SEQ ID NO: 352277 - DNA, 5351 bp, Homo sapiens
aatggcaggatcaggctggtgtgttcggtgcgggaagatgtatcgatggaacatgccattgctgttcctgacccatctatcttgatatgatgtggccaatctgcgtctcctatagtgagtcgtagttagattgcgcatgtggccaggttaagcgtgcattactgagtcagcatagtccaggattgtgggactttaccaaatcggtttgtaataacacctagaagacgctatccgatccatcaggcccagtattcctgtctgggggtacttcccaccgtgtgctggaatggttatcacaagaaggctgtgctgtcccctcgcaactccaggatggtgtgtagcccagtgactgtgaggatcgcccctcctgacagaagattttcgcgttctgcgataccagagcagataatcagctcaacactgtcctcaccatcaagtaacgccccagacccatgtgcaaaggagacagtactgagtgccctcaaagagaaggagaagaaaaggacagtggaggaagaagaccaaatattccttgatggccaggaaaataaaagaaggcgccatgatagcagtggcagtggacattcagcatttgagcccctggtggccaatggagtccccgcttcttttgtgcctaagcctgggtctctgaagagaggcctcaattctcagagctcagatgaccacttgaataagagatcccgaagctcttccatgagctccttgacaggcgcttacgcaagtggcatccctagctccagccgcaatgccattaccagttcctacagctccactcgaggcatctcacagctctggaagagaaatggccccagttcatcacccttctctagcccagcctcctcccgctcccagacaccggagaggccagcaaagaaaataagagaagaggagctgtgtcatcattccagttcttcaactccattggcagcagacagggagtcccagggagaaaaggctgcagatacaaccccaaggaagaaacaaaactcgaattctcagtctacacctggcagctctgggcagcgtaagcggaaagttcagctgctgccttctcggcgaggggaacagctgaccttgcctccacctccccagcttggctattcgatcactgccgaggacctagacttagagaagaaggcttcattacagtggttcaaccaggccttggaggacaagagcgatgctgcctcgaactctgtcactgagaccccacctatcactcagccttcatttacctttaccctgcctgctgctgcacctgcctccccacccacctccctcctggccccaagcaccaacccactgttagagagcttgaagaagatgcagactcccccgagcctgccaccctgcccagaatctgctggagcagcaaccactgaggccctctcacctccaaagacacccagcctcctacccccgctgggtttatcacagtcagggccgccagggctgctccccagcccctcctttgactccaaacccccgaccactttgctggggctgatccctgctccatccatggtaccagccactgacaccaaggcacctccaacccttcaggcagagacggctaccaaaccccaagccacatctgccccgtcccccgcccccaagcaaagcttcctgtttggaacacagaacacctcaccttccagccctgccgcccctgctgcatcttcagcacctcccatgttcaagcccattttcacggctccacccaagagtgagaaggaaggccccacaccgcctggcccttcagtcacagccacagcgccctccagctcctccctccccacgaccaccagcaccacagccccgaccttccagcctgtctttagcagcatggggccacctgcatctgtgcccttgcctgctcccttcttcaagcagacaactactcccgccactgctcccaccacaactgccccgctcttcactggcctggccagcgccacctctgctgtggctcccatcacctctgccagtccatccacagactctgcttcgaagcctgcgtttggctttggcataaacagtgtgagcagcagcagtgtgagtaccacgaccagcaccgccactgccgcctcacagcctttcctcttcggggcgccccaggcctctgctgccagcttcaccccggccatgggctccatattccagtttggcaaacctcctgccttgcccacaaccaccacagtcaccaccttcagccagtccctgcacactgccgtgccaacggccaccagcagcagcgctgccgactttagtggttttggcagcaccctcgccacctccgccccggccaccagcagccagcccactctgacgttcagtaacacgagcacccccacgttcaacattccctttggctcaagcgccaagtccccgctcccatcatatccgggagccaacccccagcccgcatttggggccgctgaggggcagccaccgggggccgccaagccggcccttgcccccagctttggcagctctttcacttttggaaactctgcagccccggctgctgcacccacacctgcacctccgtccatgatcaaggtcgtgcctgcgtacgtgcctacgcccatccatcctatctttggcggtgccacgcactcggcgtttgggttgaaagccacggcttcggccttcggcgctcccgccagctcacagcccgcctttggcggctccactgctgtcttcttcggtgcagccaccagctccggctttggagccaccacccagaccgccagcagcgggagcagcagctcggtgtttggcagcacaacaccatcacccttcacgtttgggggttcggcagcccccgctggcagtgggagctttgggatcaatgtggccaccccaggctccagcaccaccaccggagctttcagctttggagcaggacagagtgggagcacagccacctccacccccttcgcagggggcttaggtcagaacgccctgggcaccaccggccagagcacaccgtttgccttcaacgtgagcagcacaactgagagcaaacctgtgtttggaggcaccgccacccccacctttggtctgaacacccctgcgcctggagtgggcacatcaggcagcagcctctcctttggggcatcctcagcacccgcccaaggctttgttggtgttgcacctttcggatcggcggccctttcattttccattggtgcgggatccaagaccccaggggctcgacagcgactgcaggcccgaaggcagcacacccgcaaaaagtagcctttgtcccctgtccctgttccccccaccccttccctaaatctggaccttggcacctgctaggaagagccttggacccttccagttgcgtaaagcaaacctaccccggatctctggcttcagccgccagggggcagtggcagccctggggccctttcccttctggaggaagcacaagcctcagggaaggggaagcaggatgcggagggccaaagcccgggacctctacttgaacagttctactggggaggctggagaactaaggaaacacctgtacatagtgtccgctgccctgactcccgcttagcacacccttaggcaggcgccccttccacctttccccgagaccgtcgtcgctggagggggcagggtccagcccgcctggatcggtggtgtgcacctgatgggatttgggaaatgggctatccgtaaagctttatcttgcttggcttagctgtgagaagtggttctcttcctctggtcccttctggggactctgtttccccatttcttgctgctgtgtccctcaccagttccttgcaggattccttcgtttttaaatgcccttgaatctagctttgccttggagaccccagtgggtgctgctcctgccgttttcttcctgccaagcctgaatcaatgtttcatctccaaccctctgccagtttggcccctcagagcttggtggctcaagactgttagcctggcagagccaggggtgaagggagaagctcttggagcaggcaggatgcccaccgctgcttcagctgcctcctcgcccagctaccctttggccccattgggccctcgtctgcctctccaggattgtatgtttcaagccttgtcctgtgttcctttgtctgacgctctgtgtattgctctttgaatcgagtttggaggaagagttgagttgtatgagtggcggcatgttggtagtgccggacttcctgtttcaagttttctggggcctcgctaattgaatgtggaaagtagcaccacttgacggctacaagtgccgactcctgaattttcccatggtgttctgacttcaagggctggcagccagggagaatgggcccaggggaagcaaagacctcttccctctgccgtttctgtcccacttaactgacctcactggaggctacatcacccaaagtagatgttagaaaacctaaattaatgaaccatatttttaaaatcctatttttcccaaacagggccctctgcagcccatcctttccttccgtccttctgaaaccacataccccaggcccaagcgccttgctgccacgcccaacctctttgggagaagtatgaatgcgtgtgtctaaattaaaagaaaaaaatatttaaacgttttttaacaaaaatttatttttgtatttaagctaaattgccttttaaattccttcaagcttggttcattgaggtggttaagtataaatgctattaactaggaattagctgtatagttaagttatgcctgtgcaaagaagaggctcaaatgctgtccccggcagctttcctgggggactagagctccttctggccatgttatatgaaatgtaattcttattttataaataatgtgatgtaaatgtaactggtgccccctccccgatgtgactgagggtgagtgagtggtggcggggctgctccttcccacccctcagaacagctctgatcctcgttaatacctggctgcgtgtgcagctgaggagggagtgaacctcaagcctaaatacctgttaggattggagggtctgggtgggcctgggcctagcaatcaagcttctacctgtaccttatgtaaggtagaccctcctagtgtcagtacctgagctagtttacctcagttccgcaggcaggacagccggtccgggaaccctgagtgagaatgagtgtggatgtgtacagtacacgcactggacggcagcgggaggctgggactttccattacaaatagagacttcattcctgttgagtctagttggaatttttagtatgaatgtgagatttttctcctgcttgtgacattaagaataaaaaactgtgatctatcgtag

SEQ ID NO: 352278 - DNA, 5092 bp, Homo sapiens
ctgggctacacaccatcctggagttgcgaggggacagcacagccttcttgtgataaccattccagcacacggtgggaagtaccccagtgactgtgaggatcgcccctcctgacagaagattttcgcgttctgcgataccagagcagataatcagctcaacactgtcctcaccatcaagtaacgccccagacccatgtgcaaaggagacagtactgagtgccctcaaagagaaggagaagaaaaggacagtggaggaagaagaccaaatattccttgatggccaggaaaataaaagaaggcgccatgatagcagtggcagtggacattcagcatttgagcccctggtggccaatggagtccccgcttcttttgtgcctaagcctgggtctctgaagagaggcctcaattctcagagctcagatgaccacttgaataagagatcccgaagctcttccatgagctccttgacaggcgcttacgcaagtggcatccctagctccagccgcaatgccattaccagttcctacagctccactcgaggcatctcacagctctggaagagaaatggccccagttcatcacccttctctagcccagcctcctcccgctcccagacaccggagaggccagcaaagaaaataagagaagaggagctgtgtcatcattccagttcttcaactccattggcagcagacagggagtcccagggagaaaaggctgcagatacaaccccaaggaagaaacaaaactcgaattctcagtctacacctggcagctctgggcagcgtaagcggaaagttcagctgctgccttctcggcgaggggaacagctgaccttgcctccacctccccagcttggctattcgatcactgccgaggacctagacttagagaagaaggcttcattacagtggttcaaccaggccttggaggacaagagcgatgctgcctcgaactctgtcactgagaccccacctatcactcagccttcatttacctttaccctgcctgctgctgcacctgcctccccacccacctccctcctggccccaagcaccaacccactgttagagagcttgaagaagatgcagactcccccgagcctgccaccctgcccagaatctgctggagcagcaaccactgaggccctctcacctccaaagacacccagcctcctacccccgctgggtttatcacagtcagggccgccagggctgctccccagcccctcctttgactccaaacccccgaccactttgctggggctgatccctgctccatccatggtaccagccactgacaccaaggcacctccaacccttcaggcagagacggctaccaaaccccaagccacatctgccccgtcccccgcccccaagcaaagcttcctgtttggaacacagaacacctcaccttccagccctgccgcccctgctgcatcttcagcacctcccatgttcaagcccattttcacggctccacccaagagtgagaaggaaggccccacaccgcctggcccttcagtcacagccacagcgccctccagctcctccctccccacgaccaccagcaccacagccccgaccttccagcctgtctttagcagcatggggccacctgcatctgtgcccttgcctgctcccttcttcaagcagacaactactcccgccactgctcccaccacaactgccccgctcttcactggcctggccagcgccacctctgctgtggctcccatcacctctgccagtccatccacagactctgcttcgaagcctgcgtttggctttggcataaacagtgtgagcagcagcagtgtgagtaccacgaccagcaccgccactgccgcctcacagcctttcctcttcggggcgccccaggcctctgctgccagcttcaccccggccatgggctccatattccagtttggcaaacctcctgccttgcccacaaccaccacagtcaccaccttcagccagtccctgcacactgccgtgccaacggccaccagcagcagcgctgccgactttagtggttttggcagcaccctcgccacctccgccccggccaccagcagccagcccactctgacgttcagtaacacgagcacccccacgttcaacattccctttggctcaagcgccaagtccccgctcccatcatatccgggagccaacccccagcccgcatttggggccgctgaggggcagccaccgggggccgccaagccggcccttgcccccagctttggcagctctttcacttttggaaactctgcagccccggctgctgcacccacacctgcacctccgtccatgatcaaggtcgtgcctgcgtacgtgcctacgcccatccatcctatctttggcggtgccacgcactcggcgtttgggttgaaagccacggcttcggccttcggcgctcccgccagctcacagcccgcctttggcggctccactgctgtcttcttcggtgcagccaccagctccggctttggagccaccacccagaccgccagcagcgggagcagcagctcggtgtttggcagcacaacaccatcacccttcacgtttgggggttcggcagcccccgctggcagtgggagctttgggatcaatgtggccaccccaggctccagcaccaccaccggagctttcagctttggagcaggacagagtgggagcacagccacctccacccccttcgcagggggcttaggtcagaacgccctgggcaccaccggccagagcacaccgtttgccttcaacgtgagcagcacaactgagagcaaacctgtgtttggaggcaccgccacccccacctttggtctgaacacccctgcgcctggagtgggcacatcaggcagcagcctctcctttggggcatcctcagcacccgcccaaggctttgttggtgttgcacctttcggatcggcggccctttcattttccattggtgcgggatccaagaccccaggggctcgacagcgactgcaggcccgaaggcagcacacccgcaaaaagtagcctttgtcccctgtccctgttccccccaccccttccctaaatctggaccttggcacctgctaggaagagccttggacccttccagttgcgtaaagcaaacctaccccggatctctggcttcagccgccagggggcagtggcagccctggggccctttcccttctggaggaagcacaagcctcagggaaggggaagcaggatgcggagggccaaagcccgggacctctacttgaacagttctactggggaggctggagaactaaggaaacacctgtacatagtgtccgctgccctgactcccgcttagcacacccttaggcaggcgccccttccacctttccccgagaccgtcgtcgctggagggggcagggtccagcccgcctggatcggtggtgtgcacctgatgggatttgggaaatgggctatccgtaaagctttatcttgcttggcttagctgtgagaagtggttctcttcctctggtcccttctggggactctgtttccccatttcttgctgctgtgtccctcaccagttccttgcaggattccttcgtttttaaatgcccttgaatctagctttgccttggagaccccagtgggtgctgctcctgccgttttcttcctgccaagcctgaatcaatgtttcatctccaaccctctgccagtttggcccctcagagcttggtggctcaagactgttagcctggcagagccaggggtgaagggagaagctcttggagcaggcaggatgcccaccgctgcttcagctgcctcctcgcccagctaccctttggccccattgggccctcgtctgcctctccaggattgtatgtttcaagccttgtcctgtgttcctttgtctgacgctctgtgtattgctctttgaatcgagtttggaggaagagttgagttgtatgagtggcggcatgttggtagtgccggacttcctgtttcaagttttctggggcctcgctaattgaatgtggaaagtagcaccacttgacggctacaagtgccgactcctgaattttcccatggtgttctgacttcaagggctggcagccagggagaatgggcccaggggaagcaaagacctcttccctctgccgtttctgtcccacttaactgacctcactggaggctacatcacccaaagtagatgttagaaaacctaaattaatgaaccatatttttaaaatcctatttttcccaaacagggccctctgcagcccatcctttccttccgtccttctgaaaccacataccccaggcccaagcgccttgctgccacgcccaacctctttgggagaagtatgaatgcgtgtgtctaaattaaaagaaaaaaatatttaaacgttttttaacaaaaatttatttttgtatttaagctaaattgccttttaaattccttcaagcttggttcattgaggtggttaagtataaatgctattaactaggaattagctgtatagttaagttatgcctgtgcaaagaagaggctcaaatgctgtccccggcagctttcctgggggactagagctccttctggccatgttatatgaaatgtaattcttattttataaataatgtgatgtaaatgtaactggtgccccctccccgatgtgactgagggtgagtgagtggtggcggggctgctccttcccacccctcagaacagctctgatcctcgttaatacctggctgcgtgtgcagctgaggagggagtgaacctcaagcctaaatacctgttaggattggagggtctgggtgggcctgggcctagcaatcaagcttctacctgtaccttatgtaaggtagaccctcctagtgtcagtacctgagctagtttacctcagttccgcaggcaggacagccggtccgggaaccctgagtgagaatgagtgtggatgtgtacagtacacgcactggacggcagcgggaggctgggactttccattacaaatagagacttcattcctgttgagtctagttggaatttttagtatgaatgtgagatttttctcctgcttgtgacattaagaataaaaaactgtgatctatcgtag

SEQ ID NO: 352279 - DNA, 4272 bp, Homo sapiens
ggaccactgcaattgagggcaggcattcctccatgagctgtgctgagagcctgctctccgacaggcatgtggaaagaagtcccagacaagccaggactgcttcacctttctttctttcttagatgctgcctcgaactctgtcactgagaccccacctatcactcagccttcatttacctttaccctgcctgctgctgcacctgcctccccacccacctccctcctggccccaagcaccaacccactgttagagagcttgaagaagatgcagactcccccgagcctgccaccctgcccagaatctgctggagcagcaaccactgaggccctctcacctccaaagacacccagcctcctacccccgctgggtttatcacagtcagggccgccagggctgctccccagcccctcctttgactccaaacccccgaccactttgctggggctgatccctgctccatccatggtaccagccactgacaccaaggcacctccaacccttcaggcagagacggctaccaaaccccaagccacatctgccccgtcccccgcccccaagcaaagcttcctgtttggaacacagaacacctcaccttccagccctgccgcccctgctgcatcttcagcacctcccatgttcaagcccattttcacggctccacccaagagtgagaaggaaggccccacaccgcctggcccttcagtcacagccacagcgccctccagctcctccctccccacgaccaccagcaccacagccccgaccttccagcctgtctttagcagcatggggccacctgcatctgtgcccttgcctgctcccttcttcaagcagacaactactcccgccactgctcccaccacaactgccccgctcttcactggcctggccagcgccacctctgctgtggctcccatcacctctgccagtccatccacagactctgcttcgaagcctgcgtttggctttggcataaacagtgtgagcagcagcagtgtgagtaccacgaccagcaccgccactgccgcctcacagcctttcctcttcggggcgccccaggcctctgctgccagcttcaccccggccatgggctccatattccagtttggcaaacctcctgccttgcccacaaccaccacagtcaccaccttcagccagtccctgcacactgccgtgccaacggccaccagcagcagcgctgccgactttagtggttttggcagcaccctcgccacctccgccccggccaccagcagccagcccactctgacgttcagtaacacgagcacccccacgttcaacattccctttggctcaagcgccaagtccccgctcccatcatatccgggagccaacccccagcccgcatttggggccgctgaggggcagccaccgggggccgccaagccggcccttgcccccagctttggcagctctttcacttttggaaactctgcagccccggctgctgcacccacacctgcacctccgtccatgatcaaggtcgtgcctgcgtacgtgcctacgcccatccatcctatctttggcggtgccacgcactcggcgtttgggttgaaagccacggcttcggccttcggcgctcccgccagctcacagcccgcctttggcggctccactgctgtcttcttcggtgcagccaccagctccggctttggagccaccacccagaccgccagcagcgggagcagcagctcggtgtttggcagcacaacaccatcacccttcacgtttgggggttcggcagcccccgctggcagtgggagctttgggatcaatgtggccaccccaggctccagcaccaccaccggagctttcagctttggagcaggacagagtgggagcacagccacctccacccccttcgcagggggcttaggtcagaacgccctgggcaccaccggccagagcacaccgtttgccttcaacgtgagcagcacaactgagagcaaacctgtgtttggaggcaccgccacccccacctttggtctgaacacccctgcgcctggagtgggcacatcaggcagcagcctctcctttggggcatcctcagcacccgcccaaggctttgttggtgttgcacctttcggatcggcggccctttcattttccattggtgcgggatccaagaccccaggggctcgacagcgactgcaggcccgaaggcagcacacccgcaaaaagtagcctttgtcccctgtccctgttccccccaccccttccctaaatctggaccttggcacctgctaggaagagccttggacccttccagttgcgtaaagcaaacctaccccggatctctggcttcagccgccagggggcagtggcagccctggggccctttcccttctggaggaagcacaagcctcagggaaggggaagcaggatgcggagggccaaagcccgggacctctacttgaacagttctactggggaggctggagaactaaggaaacacctgtacatagtgtccgctgccctgactcccgcttagcacacccttaggcaggcgccccttccacctttccccgagaccgtcgtcgctggagggggcagggtccagcccgcctggatcggtggtgtgcacctgatgggatttgggaaatgggctatccgtaaagctttatcttgcttggcttagctgtgagaagtggttctcttcctctggtcccttctggggactctgtttccccatttcttgctgctgtgtccctcaccagttccttgcaggattccttcgtttttaaatgcccttgaatctagctttgccttggagaccccagtgggtgctgctcctgccgttttcttcctgccaagcctgaatcaatgtttcatctccaaccctctgccagtttggcccctcagagcttggtggctcaagactgttagcctggcagagccaggggtgaagggagaagctcttggagcaggcaggatgcccaccgctgcttcagctgcctcctcgcccagctaccctttggccccattgggccctcgtctgcctctccaggattgtatgtttcaagccttgtcctgtgttcctttgtctgacgctctgtgtattgctctttgaatcgagtttggaggaagagttgagttgtatgagtggcggcatgttggtagtgccggacttcctgtttcaagttttctggggcctcgctaattgaatgtggaaagtagcaccacttgacggctacaagtgccgactcctgaattttcccatggtgttctgacttcaagggctggcagccagggagaatgggcccaggggaagcaaagacctcttccctctgccgtttctgtcccacttaactgacctcactggaggctacatcacccaaagtagatgttagaaaacctaaattaatgaaccatatttttaaaatcctatttttcccaaacagggccctctgcagcccatcctttccttccgtccttctgaaaccacataccccaggcccaagcgccttgctgccacgcccaacctctttgggagaagtatgaatgcgtgtgtctaaattaaaagaaaaaaatatttaaacgttttttaacaaaaatttatttttgtatttaagctaaattgccttttaaattccttcaagcttggttcattgaggtggttaagtataaatgctattaactaggaattagctgtatagttaagttatgcctgtgcaaagaagaggctcaaatgctgtccccggcagctttcctgggggactagagctccttctggccatgttatatgaaatgtaattcttattttataaataatgtgatgtaaatgtaactggtgccccctccccgatgtgactgagggtgagtgagtggtggcggggctgctccttcccacccctcagaacagctctgatcctcgttaatacctggctgcgtgtgcagctgaggagggagtgaacctcaagcctaaatacctgttaggattggagggtctgggtgggcctgggcctagcaatcaagcttctacctgtaccttatgtaaggtagaccctcctagtgtcagtacctgagctagtttacctcagttccgcaggcaggacagccggtccgggaaccctgagtgagaatgagtgtggatgtgtacagtacacgcactggacggcagcgggaggctgggactttccattacaaatagagacttcattcctgttgagtctagttggaatttttagtatgaatgtgagatttttctcctgcttgtgacattaagaataaaaaactgtgatctatcgtag

SEQ ID NO: 352280 - DNA, 6037 bp, Homo sapiens
tcgcacatgcgcgccacctccgcactgccctcgcttcctgcgcctcttcaggtcaccgcttgctctagttcccaggctttggcctctagtggatgagaatcaccgagtctgcggggctggacgctgaccgcccgggccagcacctaggcgggcgggagctgtgcggcccagggttcgcgcgggccgggtagaggctcgagccgggacccccgagcgtgaaccccggagccagcggcgctggggccagaggggccgggcgggaggtggtggcggaggcgaaggggcgacgggacctgggcctggcccgtgtgtgtcctcggcggcctggcgccggccgtcgctgtacggtgagccccagggaggcggatctgggccccgagaaggacacccgcctggatttgccccgtaggcccggcccgggcccctcgggagcagaacagccttggtgaggtggacaggaggggacttcgcgagcagacgcgcgcgccagcgacagcagcccgccccggcctctcgggagccgtggggcagaggctgcagagccccaggagggtctatcagccacagtctctgcaagtttccaagagcagcagaaaatgaacacattgcaggggccagtgtcattcaaagatgtggctgtggatttcacccaggaggagtggtggcaactggaccctgatgagaagataacatacggggatgtgatgttggagaactacagccatctagtttccctggcttatgaggtggcaacatcttgtacttcggagatctgaagccgagcaacttgcccaagtccttcttcttttcccattaacaagatatgatatcaccaagccaaacgtcatcattaagttggagcagggagaggagctgtggataacgggaggtgaatttccatgtcaacatagtccagggattgtgggactttaccaaatcggtttgtaataacacctagaagacgctatccgatccatcaggcccagtattcctgtctgggggtacttcccaccgtgtgctggaatggttatcacaagaaggctgtgctgtcccctcgcaactccaggatggtgtgtagcccagtgactgtgaggatcgcccctcctgacagaagattttcgcgttctgcgataccagagcagataatcagctcaacactgtcctcaccatcaagtaacgccccagacccatgtgcaaaggagacagtactgagtgccctcaaagagaaggagaagaaaaggacagtggaggaagaagaccaaatattccttgatggccaggaaaataaaagaaggcgccatgatagcagtggcagtggacattcagcatttgagcccctggtggccaatggagtccccgcttcttttgtgcctaagcctgggtctctgaagagaggcctcaattctcagagctcagatgaccacttgaataagagatcccgaagctcttccatgagctccttgacaggcgcttacgcaagtggcatccctagctccagccgcaatgccattaccagttcctacagctccactcgaggcatctcacagctctggaagagaaatggccccagttcatcacccttctctagcccagcctcctcccgctcccagacaccggagaggccagcaaagaaaataagagaagaggagctgtgtcatcattccagttcttcaactccattggcagcagacagggagtcccagggagaaaaggctgcagatacaaccccaaggaagaaacaaaactcgaattctcagtctacacctggcagctctgggcagcgtaagcggaaagttcagctgctgccttctcggcgaggggaacagctgaccttgcctccacctccccagcttggctattcgatcactgccgaggacctagacttagagaagaaggcttcattacagtggttcaaccaggccttggaggacaagagcgatgctgcctcgaactctgtcactgagaccccacctatcactcagccttcatttacctttaccctgcctgctgctgcacctgcctccccacccacctccctcctggccccaagcaccaacccactgttagagagcttgaagaagatgcagactcccccgagcctgccaccctgcccagaatctgctggagcagcaaccactgaggccctctcacctccaaagacacccagcctcctacccccgctgggtttatcacagtcagggccgccagggctgctccccagcccctcctttgactccaaacccccgaccactttgctggggctgatccctgctccatccatggtaccagccactgacaccaaggcacctccaacccttcaggcagagacggctaccaaaccccaagccacatctgccccgtcccccgcccccaagcaaagcttcctgtttggaacacagaacacctcaccttccagccctgccgcccctgctgcatcttcagcacctcccatgttcaagcccattttcacggctccacccaagagtgagaaggaaggccccacaccgcctggcccttcagtcacagccacagcgccctccagctcctccctccccacgaccaccagcaccacagccccgaccttccagcctgtctttagcagcatggggccacctgcatctgtgcccttgcctgctcccttcttcaagcagacaactactcccgccactgctcccaccacaactgccccgctcttcactggcctggccagcgccacctctgctgtggctcccatcacctctgccagtccatccacagactctgcttcgaagcctgcgtttggctttggcataaacagtgtgagcagcagcagtgtgagtaccacgaccagcaccgccactgccgcctcacagcctttcctcttcggggcgccccaggcctctgctgccagcttcaccccggccatgggctccatattccagtttggcaaacctcctgccttgcccacaaccaccacagtcaccaccttcagccagtccctgcacactgccgtgccaacggccaccagcagcagcgctgccgactttagtggttttggcagcaccctcgccacctccgccccggccaccagcagccagcccactctgacgttcagtaacacgagcacccccacgttcaacattccctttggctcaagcgccaagtccccgctcccatcatatccgggagccaacccccagcccgcatttggggccgctgaggggcagccaccgggggccgccaagccggcccttgcccccagctttggcagctctttcacttttggaaactctgcagccccggctgctgcacccacacctgcacctccgtccatgatcaaggtcgtgcctgcgtacgtgcctacgcccatccatcctatctttggcggtgccacgcactcggcgtttgggttgaaagccacggcttcggccttcggcgctcccgccagctcacagcccgcctttggcggctccactgctgtcttcttcggtgcagccaccagctccggctttggagccaccacccagaccgccagcagcgggagcagcagctcggtgtttggcagcacaacaccatcacccttcacgtttgggggttcggcagcccccgctggcagtgggagctttgggatcaatgtggccaccccaggctccagcaccaccaccggagctttcagctttggagcaggacagagtgggagcacagccacctccacccccttcgcagggggcttaggtcagaacgccctgggcaccaccggccagagcacaccgtttgccttcaacgtgagcagcacaactgagagcaaacctgtgtttggaggcaccgccacccccacctttggtctgaacacccctgcgcctggagtgggcacatcaggcagcagcctctcctttggggcatcctcagcacccgcccaaggctttgttggtgttgcacctttcggatcggcggccctttcattttccattggtgcgggatccaagaccccaggggctcgacagcgactgcaggcccgaaggcagcacacccgcaaaaagtagcctttgtcccctgtccctgttccccccaccccttccctaaatctggaccttggcacctgctaggaagagccttggacccttccagttgcgtaaagcaaacctaccccggatctctggcttcagccgccagggggcagtggcagccctggggccctttcccttctggaggaagcacaagcctcagggaaggggaagcaggatgcggagggccaaagcccgggacctctacttgaacagttctactggggaggctggagaactaaggaaacacctgtacatagtgtccgctgccctgactcccgcttagcacacccttaggcaggcgccccttccacctttccccgagaccgtcgtcgctggagggggcagggtccagcccgcctggatcggtggtgtgcacctgatgggatttgggaaatgggctatccgtaaagctttatcttgcttggcttagctgtgagaagtggttctcttcctctggtcccttctggggactctgtttccccatttcttgctgctgtgtccctcaccagttccttgcaggattccttcgtttttaaatgcccttgaatctagctttgccttggagaccccagtgggtgctgctcctgccgttttcttcctgccaagcctgaatcaatgtttcatctccaaccctctgccagtttggcccctcagagcttggtggctcaagactgttagcctggcagagccaggggtgaagggagaagctcttggagcaggcaggatgcccaccgctgcttcagctgcctcctcgcccagctaccctttggccccattgggccctcgtctgcctctccaggattgtatgtttcaagccttgtcctgtgttcctttgtctgacgctctgtgtattgctctttgaatcgagtttggaggaagagttgagttgtatgagtggcggcatgttggtagtgccggacttcctgtttcaagttttctggggcctcgctaattgaatgtggaaagtagcaccacttgacggctacaagtgccgactcctgaattttcccatggtgttctgacttcaagggctggcagccagggagaatgggcccaggggaagcaaagacctcttccctctgccgtttctgtcccacttaactgacctcactggaggctacatcacccaaagtagatgttagaaaacctaaattaatgaaccatatttttaaaatcctatttttcccaaacagggccctctgcagcccatcctttccttccgtccttctgaaaccacataccccaggcccaagcgccttgctgccacgcccaacctctttgggagaagtatgaatgcgtgtgtctaaattaaaagaaaaaaatatttaaacgttttttaacaaaaatttatttttgtatttaagctaaattgccttttaaattccttcaagcttggttcattgaggtggttaagtataaatgctattaactaggaattagctgtatagttaagttatgcctgtgcaaagaagaggctcaaatgctgtccccggcagctttcctgggggactagagctccttctggccatgttatatgaaatgtaattcttattttataaataatgtgatgtaaatgtaactggtgccccctccccgatgtgactgagggtgagtgttaatacctggctgcgtgtgcagctgaggagggagtgaacctcaagcctaaatacctgttaggattggagggtctgggtgggcctgggcctagcaatcaagcttctacctgtaccttatgtaaggtagaccctcctagtgtcagtacctgagctagtttacctcagttccgcaggcaggacagccggtccgggaaccctgagtgagaatgagtgtggatgtgtacagtacacgcactggacggcagcgggaggctgggactttccattacaaatagagacttcattcctgttgagtctagttggaatttttagtatgaatgtgagatttttctcctgcttgtgacattaagaataaaaaactgtgatctatcgtag

SEQ ID NO: 352281 - DNA, 6290 bp, Homo sapiens
tcgcacatgcgcgccacctccgcactgccctcgcttcctgcgcctcttcaggtcaccgcttgctctagttcccaggctttggcctctagtggatgagaatcaccgagtctgcggggctggacgctgaccgcccgggccagcacctaggcgggcgggagctgtgcggcccagggttcgcgcgggccgggtagaggctcgagccgggacccccgagcgtgaaccccggagccagcggcgctggggccagaggggccgggcgggaggtggtggcggaggcgaaggggcgacgggacctgggcctggcccgtgtgtgtcctcggcggcctggcgccggccgtcgctgtacggtgagccccagggaggcggatctgggccccgagaaggacacccgcctggatttgccccgtaggcccggcccgggcccctcgggagcagaacagccttggtgaggtggacaggaggggacttcgcgagcagacgcgcgcgccagcgacagcagcccgccccggcctctcgggagccgtggggcagaggctgcagagccccaggagggtctatcagccacagtctctgcaagtttccaagagcagcagaaaatgaacacattgcaggggccagtgtcattcaaagatgtggctgtggatttcacccaggaggagtggtggcaactggaccctgatgagaagataacatacggggatgtgatgttggagaactacagccatctagtttccctggcttatgaggtggcaacatcttgtacttcggagatctgaagccgagcaacttgcccaagtccttcttcttttcccattaacaagatatgatatcaccaagccaaacgtcatcattaagttggagcagggagaggagctgtggataacgggaggtgaatttccatgtcaacatagtccagggattgtgggactttaccaaatcggtttgtaataacacctagaagacgctatccgatccatcaggcccagtattcctgtctgggggtacttcccaccgtgtgctggaatggttatcacaagaaggctgtgctgtcccctcgcaactccaggatggtgtgtagcccagtgactgtgaggatcgcccctcctgacagaagattttcgcgttctgcgataccagagcagataatcagctcaacactgtcctcaccatcaagtaacgccccagacccatgtgcaaaggagacagtactgagtgccctcaaagagaaggagaagaaaaggacagtggaggaagaagaccaaatattccttgatggccaggaaaataaaagaaggcgccatgatagcagtggcagtggacattcagcatttgagcccctggtggccaatggagtccccgcttcttttgtgcctaagcctgggtctctgaagagaggcctcaattctcagagctcagatgaccacttgaataagagatcccgaagctcttccatgagctccttgacaggcgcttacgcaagtggcatccctagctccagccgcaatgccattaccagttcctacagctccactcgaggcatctcacagctctggaagagaaatggccccagttcatcacccttctctagcccagcctcctcccgctcccagacaccggagaggccagcaaagaaaataagagaagaggagctgtgtcatcattccagttcttcaactccattggcagcagacagggagtcccagggagaaaaggctgcagatacaaccccaaggaagaaacaaaactcgaattctcagtctacacctggcagctctgggcagcgtaagcggaaagttcagctgctgccttctcggcgaggggaacagctgaccttgcctccacctccccagcttggctattcgatcactgccgaggacctagacttagagaagaaggcttcattacagtggttcaaccaggccttggaggacaagagcgatgctgcctcgaactctgtcactgagaccccacctatcactcagccttcatttacctttaccctgcctgctgctgcacctgcctccccacccacctccctcctggccccaagcaccaacccactgttagagagcttgaagaagatgcagactcccccgagcctgccaccctgcccagaatctgctggagcagcaaccactgaggccctctcacctccaaagacacccagcctcctacccccgctgggtttatcacagtcagggccgccagggctgctccccagcccctcctttgactccaaacccccgaccactttgctggggctgatccctgctccatccatggtaccagccactgacaccaaggcacctccaacccttcaggcagagacggctaccaaaccccaagccacatctgccccgtcccccgcccccaagcaaagcttcctgtttggaacacagaacacctcaccttccagccctgccgcccctgctgcatcttcagcacctcccatgttcaagcccattttcacggctccacccaagagtgagaaggaaggccccacaccgcctggcccttcagtcacagccacagcgccctccagctcctccctccccacgaccaccagcaccacagccccgaccttccagcctgtctttagcagcatggggccacctgcatctgtgcccttgcctgctcccttcttcaagcagacaactactcccgccactgctcccaccacaactgccccgctcttcactggcctggccagcgccacctctgctgtggctcccatcacctctgccagtccatccacagactctgcttcgaagcctgcgtttggctttggcataaacagtgtgagcagcagcagtgtgagtaccacgaccagcaccgccactgccgcctcacagcctttcctcttcggggcgccccaggcctctgctgccagcttcaccccggccatgggctccatattccagtttggcaaacctcctgccttgcccacaaccaccacagtcaccaccttcagccagtccctgcacactgccgtgccaacggccaccagcagcagcgctgccgactttagtggttttggcagcaccctcgccacctccgccccggccaccagcagccagcccactctgacgttcagtaacacgagcacccccacgttcaacattccctttggctcaagcgccaagtccccgctcccatcatatccgggagccaacccccagcccgcatttggggccgctgaggggcagccaccgggggccgccaagccggcccttgcccccagctttggcagctctttcacttttggaaactctgcagccccggctgctgcacccacacctgcacctccgtccatgatcaaggtcgtgcctgcgtacgtgcctacgcccatccatcctatctttggcggtgccacgcactcggcgtttgggttgaaagccacggcttcggccttcggcgctcccgccagctcacagcccgcctttggcggctccactgctgtcttcttcggtgcagccaccagctccggctttggagccaccacccagaccgccagcagcgggagcagcagctcggtgtttggcagcacaacaccatcacccttcacgtttgggggttcggcagcccccgctggcagtgggagctttgggatcaatgtggccaccccaggctccagcaccaccaccggagctttcagctttggagcaggacagagtgggagcacagccacctccacccccttcgcagggggcttaggtcagaacgccctgggcaccaccggccagagcacaccgtttgccttcaacgtgagcagcacaactgagagcaaacctgtgtttggaggcaccgccacccccacctttggtctgaacacccctgcgcctggagtgggcacatcaggcagcagcctctcctttggggcatcctcagcacccgcccaaggctttgttggtgttgcacctttcggatcggcggccctttcattttccattggtgcgggatccaagaccccaggggctcgacagcgactgcaggcccgaaggcagcacacccgcaaaaagtagcctttgtcccctgtccctgttccccccaccccttccctaaatctggaccttggcacctgctaggaagagccttggacccttccagttgcgtaaagcaaacctaccccggatctctggcttcagccgccagggggcagtggcagccctggggccctttcccttctggaggaagcacaagcctcagggaaggggaagcaggatgcggagggccaaagcccgggacctctacttgaacagttctactggggaggctggagaactaaggaaacacctgtacatagtgtccgctgccctgactcccgcttagcacacccttaggcaggcgccccttccacctttccccgagaccgtcgtcgctggagggggcagggtccagcccgcctggatcggtggtgtgcacctgatgggatttgggaaatgggctatccgtaaagctttatcttgcttggcttagctgtgagaagtggttctcttcctctggtcccttctggggactctgtttccccatttcttgctgctgtgtccctcaccagttccttgcaggattccttcgtttttaaatgcccttgaatctagctttgccttggagaccccagtgggtgctgctcctgccgttttcttcctgccaagcctgaatcaatgtttcatctccaaccctctgccagtttggcccctcagagcttggtggctcaagactgttagcctggcagagccaggggtgaagggagaagctcttggagcaggcaggatgcccaccgctgcttcagctgcctcctcgcccagctaccctttggccccattgggccctcgtctgcctctccaggattgtatgtttcaagccttgtcctgtgttcctttgtctgacgctctgtgtattgctctttgaatcgagtttggaggaagagttgagttgtatgagtggcggcatgttggtagtgccggacttcctgtttcaagttttctggggcctcgctaattgaatgtggaaagtagcaccacttgacggctacaagtgccgactcctgaattttcccatggtgttctgacttcaagggctggcagccagggagaatgggcccaggggaagcaaagacctcttccctctgccgtttctgtcccacttaactgacctcactggaggctacatcacccaaagtagatgttagaaaacctaaattaatgaaccatatttttaaaatcctatttttcccaaacagggccctctgcagcccatcctttccttccgtccttctgaaaccacataccccaggcccaagcgccttgctgccacgcccaacctctttgggagaagtatgaatgcgtgtgtctaaattaaaagaaaaaaatatttaaacgttttttaacaaaaatttatttttgtatttaagctaaattgccttttaaattccttcaagcttggttcattgaggtggttaagtataaatgctattaactaggaattagctgtatagttaagttatgcctgtgcaaagaagaggctcaaatgctgtccccggcagctttcctgggggactagagctccttctggccatgttatatgaaatgtaattcttattttataaataatgtgatgtaaatgtaactggtgccccctccccgatgtgactgagggtgagtgagtggtggcggggctgctccttcccacccctcagaacagctctgatcctcgttaatacctggctgcgtgtgcagctgaggagggagtgaacctcaagcctaaatacctgttaggattggagggtctgggtgggcctgggcctagcaatcaagcttctacctgtaccttatgtaaggtagaccctcctagtgtcagtacctgagctagtttacctcagttccgcaggcaggacagccggtccgggaaccctgagtgagaatgagtgtggatgtgtacagtacacgcactggacggcagcgggaggctgggactttccattacaaatagagacttcattcctgttgagtctagttggaatttttagtatgaatgtgagatttttctcctgcttgtgacattaagaataaaaaactgtgatctatcgtagagtacgttctgcattttatttctgcaggcaacacttttgctcaccagcaagaacacagcccgaggaagggacccaataacctttcaaaacgcaaactgctgcctgcgatcatgacccttggccataatatgatttatctccacactagcagagaccaaccgaacccccttcgaccttgccgaaggagtccgaactagccagg

SEQ ID NO: 352282 - DNA, 6013 bp, Homo sapiens
tcgcacatgcgcgccacctccgcactgccctcgcttcctgcgcctcttcaggtcaccgcttgctctagttcccaggctttggcctctagtggatgagaatcaccgagtctgcggggctggacgctgaccgcccgggccagcacctaggcgggcgggagctgtgcggcccagggttcgcgcgggccgggtagaggctcgagccgggacccccgagcgtgaaccccggagccagcggcgctggggccagaggggccgggcgggaggtggtggcggaggcgaaggggcgacgggacctgggcctggcccgtgtgtgtcctcggcggcctggcgccggccgtcgctgtacggtgagccccagggaggcggatctgggccccgagaaggacacccgcctggatttgccccgtaggcccggcccgggcccctcgggagcagaacagccttggtgaggtggacaggaggggacttcgcgagcagacgcgcgcgccagcgacagcagcccgccccggcctctcgggagccgtggggcagaggctgcagagccccaggagggtctatcagccacagtctctgcaagtttccaagagcagcagaaaatgaacacattgcaggggccagtgtcattcaaagatgtggctgtggatttcacccaggaggagtggtggcaactggaccctgatgagaagataacatacggggatgtgatgttggagaactacagccatctagtttccctggcttatgaggtggcaacatcttgtacttcggagatctgaagccgagcaacttgcccaagtccttcttcttttcccattaacaagatatgatatcaccaagccaaacgtcatcattaagttggagcagggagaggagctgtggataacgggaggtgaatttccatgtcaacatagtccagggattgtgggactttaccaaatcggtttgtaataacacctagaagacgctatccgatccatcaggcccagtattcctgtctgggggtacttcccaccgtgtgctggaatggttatcacaagaaggctgtgctgtcccctcgcaactccaggatggtgtgtagcccagtgactgtgaggatcgcccctcctgacagaagattttcgcgttctgcgataccagagcagataatcagctcaacactgtcctcaccatcaagtaacgccccagacccatgtgcaaaggagacagtactgagtgccctcaaagagaaggagaagaaaaggacagtggaggaagaagaccaaatattccttgatggccaggaaaataaaagaaggcgccatgatagcagtggcagtggacattcagcatttgagcccctggtggccaatggagtccccgcttcttttgtgcctaagcctgggtctctgaagagaggcctcaattctcagagctcagatgaccacttgaataagagatcccgaagctcttccatgagctccttgacaggcgcttacgcaagtggcatccctagctccagccgcaatgccattaccagttcctacagctccactcgaggcatctcacagctctggaagagaaatggccccagttcatcacccttctctagcccagcctcctcccgctcccagacaccggagaggccagcaaagaaaataagagaagaggagctgtgtcatcattccagttcttcaactccattggcagcagacagggagtcccagggagaaaaggctgcagatacaaccccaaggaagaaacaaaactcgaattctcagtctacacctggcagctctgggcagcgtaagcggaaagttcagctgctgccttctcggcgaggggaacagctgaccttgcctccacctccccagcttggctattcgatcactgccgaggacctagacttagagaagaaggcttcattacagtggttcaaccaggccttggaggacaagagcgatgctgcctcgaactctgtcactgagaccccacctatcactcagccttcatttacctttaccctgcctgctgctgcacctgcctccccacccacctccctcctggccccaagcaccaacccactgttagagagcttgaagaagatgcagactcccccgagcctgccaccctgcccagaatctgctggagcagcaaccactgaggccctctcacctccaaagacacccagcctcctacccccgctgggtttatcacagtcagggccgccagggctgctccccagcccctcctttgactccaaacccccgaccactttgctggggctgatccctgctccatccatggtaccagccactgacaccaaggcacctccaacccttcaggcagagacggctaccaaaccccaagccacatctgccccgtcccccgcccccaagcaaagcttcctgtttggaacacagaacacctcaccttccagccctgccgcccctgctgcatcttcagcacctcccatgttcaagcccattttcacggctccacccaagagtgagaaggaaggccccacaccgcctggcccttcagtcacagccacagcgccctccagctcctccctccccacgaccaccagcaccacagccccgaccttccagcctgtctttagcagcatggggccacctgcatctgtgcccttgcctgctcccttcttcaagcagacaactactcccgccactgctcccaccacaactgccccgctcttcactggcctggccagcgccacctctgctgtggctcccatcacctctgccagtccatccacagactctgcttcgaagcctgcgtttggctttggcataaacagtgtgagcagcagcagtgtgagtaccacgaccagcaccgccactgccgcctcacagcctttcctcttcggggcgccccaggcctctgctgccagcttcaccccggccatgggctccatattccagtttggcaaacctcctgccttgcccacaaccaccacagtcaccaccttcagccagtccctgcacactgccgtgccaacggccaccagcagcagcgctgccgactttagtggttttggcagcaccctcgccacctccgccccggccaccagcagccagcccactctgacgttcagtaacacgagcacccccacgttcaacattccctttggctcaagcgccaagtccccgctcccatcatatccgggagccaacccccagcccgcatttggggccgctgaggggcagccaccgggggccgccaagccggcccttgcccccagctttggcagctctttcacttttggaaactctgcagccccggctgctgcacccacacctgcacctccgtccatgatcaaggtcgtgcctgcgtacgtgcctacgcccatccatcctatctttggcggtgccacgcactcggcgtttgggttgaaagccacggcttcggccttcggcgctcccgccagctcacagcccgcctttggcggctccactgctgtcttcttcggtgcagccaccagctccggctttggagccaccacccagaccgccagcagcgggagcagcagctcggtgtttggcagcacaacaccatcacccttcacgtttgggggttcggcagcccccgctggcagtgggagctttgggatcaatgtggccaccccaggctccagcaccaccaccggagctttcagctttggagcaggacagagtgggagcacagccacctccacccccttcgcagggggcttaggtcagaacgccctgggcaccaccggccagagcacaccgtttgccttcaacgtgagcagcacaactgagagcaaacctgtgtttggaggcaccgccacccccacctttggtctgaacacccctgcgcctggagtgggcacatcaggcagcagcctctcctttggggcatcctcagcacccgcccaaggctttgttggtgttgcacctttcggatcggcggccctttcattttccattggtgcgggatccaagaccccaggggctcgacagcgactgcaggcccgaaggcagcacacccgcaaaaagtagcctttgtcccctgtccctgttccccccaccccttccctaaatctggaccttggcacctgctaggaagagccttggacccttccagttgcgtaaagcaaacctaccccggatctctggcttcagccgccagggggcagtggcagccctggggccctttcccttctggaggaagcacaagcctcagggaaggggaagcaggatgcggagggccaaagcccgggacctctacttgaacagttctactggggaggctggagaactaaggaaacacctgtacatagtgtccgctgccctgactcccgcttagcacacccttaggcaggcgccccttccacctttccccgagaccgtcgtcgctggagggggcagggtccagcccgcctggatcggtggtgtgcacctgatgggatttgggaaatgggctatccgtaaagctttatcttgcttggcttagctgtgagaagtggttctcttcctctggtcccttctggggactctgtttccccatttcttgctgctgtgtccctcaccagttccttgcaggattccttcgtttttaaatgcccttgaatctagctttgccttggagaccccagtgggtgctgctcctgccgttttcttcctgccaagcctgaatcaatgtttcatctccaaccctctgccagtttggcccctcagagcttggtggctcaagactgttagcctggcagagccaggggtgaagggagaagctcttggagcaggcaggatgcccaccgctgcttcagctgcctcctcgcccagctaccctttggccccattgggccctcgtctgcctctccaggattgtatgtttcaagccttgtcctgtgttcctttgtctgacgctctgtgtattgctctttgaatcgagtttggaggaagagttgagttgtatgagtggcggcatgttggtagtgccggacttcctgaattttcccatggtgttctgacttcaagggctggcagccagggagaatgggcccaggggaagcaaagacctcttccctctgccgtttctgtcccacttaactgacctcactggaggctacatcacccaaagtagatgttagaaaacctaaattaatgaaccatatttttaaaatcctatttttcccaaacagggccctctgcagcccatcctttccttccgtccttctgaaaccacataccccaggcccaagcgccttgctgccacgcccaacctctttgggagaagtatgaatgcgtgtgtctaaattaaaagaaaaaaatatttaaacgttttttaacaaaaatttatttttgtatttaagctaaattgccttttaaattccttcaagcttggttcattgaggtggttaagtataaatgctattaactaggaattagctgtatagttaagttatgcctgtgcaaagaagaggctcaaatgctgtccccggcagctttcctgggggactagagctccttctggccatgttatatgaaatgtaattcttattttataaataatgtgatgtaaatgtaactggtgccccctccccgatgtgactgagggtgagtgagtggtggcggggctgctccttcccacccctcagaacagctctgatcctcgttaatacctggctgcgtgtgcagctgaggagggagtgaacctcaagcctaaatacctgttaggattggagggtctgggtgggcctgggcctagcaatcaagcttctacctgtaccttatgtaaggtagaccctcctagtgtcagtacctgagctagtttacctcagttccgcaggcaggacagccggtccgggaaccctgagtgagaatgagtgtggatgtgtacagtacacgcactggacggcagcgggaggctgggactttccattacaaatagagacttcattcctgttgagtctagttggaatttttagtatgaatgtgagatttttctcctgcttgtgacattaagaataaaaaactgtgatctatcgtag

SEQ ID NO: 352283 - DNA, 8676 bp, Homo sapiens
tcgcacatgcgcgccacctccgcactgccctcgcttcctgcgcctcttcaggtcaccgcttgctctagttcccaggctttggcctctagtggatgagaatcaccgagtctgcggggctggacgctgaccgcccgggccagcacctaggcgggcgggagctgtgcggcccagggttcgcgcgggccgggtagaggctcgagccgggacccccgagcgtgaaccccggagccagcggcgctggggccagaggggccgggcgggaggtggtggcggaggcgaaggggcgacgggacctgggcctggcccgtgtgtgtcctcggcggcctggcgccggccgtcgctgtacggtgagccccagggaggcggatctgggccccgagaaggacacccgcctggatttgccccgtaggcccggcccgggcccctcgggagcagaacagccttggtgaggtggacaggaggggacttcgcgagcagacgcgcgcgccagcgacagcagcccgccccggcctctcgggagccgtggggcagaggctgcagagccccaggagggtctatcagccacagtctctgcaagtttccaagagcagcagaaaatgaacacattgcaggggccagtgtcattcaaagatgtggctgtggatttcacccaggaggagtggtggcaactggaccctgatgagaagataacatacggggatgtgatgttggagaactacagccatctagtttccctggcttatgaggtggcaacatcttgtacttcggagatctgaagccgagcaacttgcccaagtccttcttcttttcccattaacaagatatgatatcaccaagccaaacgtcatcattaagttggagcagggagaggagctgtggataacgggaggtgaatttccatgtcaacatagtccagggattgtgggactttaccaaatcggtttgtaataacacctagaagacgctatccgatccatcaggcccagtattcctgtctgggggtacttcccaccgtgtgctggaatggttatcacaagaaggctgtgctgtcccctcgcaactccaggatggtgtgtagcccagtgactgtgaggatcgcccctcctgacagaagattttcgcgttctgcgataccagagcagataatcagctcaacactgtcctcaccatcaagtaacgccccagacccatgtgcaaaggagacagtactgagtgccctcaaagagaaggagaagaaaaggacagtggaggaagaagaccaaatattccttgatggccaggaaaataaaagaaggcgccatgatagcagtggcagtggacattcagcatttgagcccctggtggccaatggagtccccgcttcttttgtgcctaagcctgggtctctgaagagaggcctcaattctcagagctcagatgaccacttgaataagagatcccgaagctcttccatgagctccttgacaggcgcttacgcaagtggcatccctagctccagccgcaatgccattaccagttcctacagctccactcgaggcatctcacagctctggaagagaaatggccccagttcatcacccttctctagcccagcctcctcccgctcccagacaccggagaggccagcaaagaaaataagagaagaggagctgtgtcatcattccagttcttcaactccattggcagcagacagggagtcccagggagaaaaggctgcagatacaaccccaaggaagaaacaaaactcgaattctcagtctacacctggcagctctgggcagcgtaagcggaaagttcagctgctgccttctcggcgaggggaacagctgaccttgcctccacctccccagcttggctattcgatcactgccgaggacctagacttagagaagaaggcttcattacagtggttcaaccaggccttggaggacaagagcgatgctgcctcgaactctgtcactgagaccccacctatcactcagccttcatttacctttaccctgcctgctgctgcacctgcctccccacccacctccctcctggccccaagcaccaacccactgttagagagcttgaagaagatgcagactcccccgagcctgccaccctgcccagaatctgctggagcagcaaccactgaggccctctcacctccaaagacacccagcctcctacccccgctgggtttatcacagtcagggccgccagggctgctccccagcccctcctttgactccaaacccccgaccactttgctggggctgatccctgctccatccatggtaccagccactgacaccaaggcacctccaacccttcaggcagagacggctaccaaaccccaagccacatctgccccgtcccccgcccccaagcaaagcttcctgtttggaacacagaacacctcaccttccagccctgccgcccctgctgcatcttcagcacctcccatgttcaagcccattttcacggctccacccaagagtgagaaggaaggccccacaccgcctggcccttcagtcacagccacagcgccctccagctcctccctccccacgaccaccagcaccacagccccgaccttccagcctgtctttagcagcatggggccacctgcatctgtgcccttgcctgctcccttcttcaagcagacaactactcccgccactgctcccaccacaactgccccgctcttcactggcctggccagcgccacctctgctgtggctcccatcacctctgccagtccatccacagactctgcttcgaagcctgcgtttggctttggcataaacagtgtgagcagcagcagtgtgagtaccacgaccagcaccgccactgccgcctcacagcctttcctcttcggggcgccccaggcctctgctgccagcttcaccccggccatgggctccatattccagtttggcaaacctcctgccttgcccacaaccaccacagtcaccaccttcagccagtccctgcacactgccgtgccaacggccaccagcagcagcgctgccgactttagtggttttggcagcaccctcgccacctccgccccggccaccagcagccagcccactctgacgttcagtaacacgagcacccccacgttcaacattccctttggctcaagcgccaagtccccgctcccatcatatccgggagccaacccccagcccgcatttggggccgctgaggggcagccaccgggggccgccaagccggcccttgcccccagctttggcagctctttcacttttggaaactctgcagccccggctgctgcacccacacctgcacctccgtccatgatcaaggtcgtgcctgcgtacgtgcctacgcccatccatcctatctttggcggtgccacgcactcggcgtttgggttgaaagccacggcttcggccttcggcgctcccgccagctcacagcccgcctttggcggctccactgctgtcttcttcggtgcagccaccagctccggctttggagccaccacccagaccgccagcagcgggagcagcagctcggtgtttggcagcacaacaccatcacccttcacgtttgggggttcggcagcccccgctggcagtgggagctttgggatcaatgtggccaccccaggctccagcaccaccaccggagctttcagctttggagcaggacagagtgggagcacagccacctccacccccttcgcagggggcttaggtcagaacgccctgggcaccaccggccagagcacaccgtttgccttcaacgtgagcagcacaactgagagcaaacctgtgtttggaggcaccgccacccccacctttggtctgaacacccctgcgcctggagtgggcacatcaggcagcagcctctcctttggggcatcctcagcacccgcccaaggctttgttggtgttgcacctttcggatcggcggccctttcattttccattggtgcgggatccaagaccccaggggctcgacagcgactgcaggcccgaaggcagcacacccgcaaaaagtagcctttgtcccctgtccctgttccccccaccccttccctaaatctggaccttggcacctgctaggaagagccttggacccttccagttgcgtaaagcaaacctaccccggatctctggcttcagccgccagggggcagtggcagccctggggccctttcccttctggaggaagcacaagcctcagggaaggggaagcaggatgcggagggccaaagcccgggacctctacttgaacagttctactggggaggctggagaactaaggaaacacctgtacatagtgtccgctgccctgactcccgcttagcacacccttaggcaggcgccccttccacctttccccgagaccgtcgtcgctggagggggcagggtccagcccgcctggatcggtggtgtgcacctgatgggatttgggaaatgggctatccgtaaagctttatcttgcttggcttagctgtgagaagtggttctcttcctctggtcccttctggggactctgtttccccatttcttgctgctgtgtccctcaccagttccttgcaggattccttcgtttttaaatgcccttgaatctagctttgccttggagaccccagtgggtgctgctcctgccgttttcttcctgccaagcctgaatcaatgtttcatctccaaccctctgccagtttggcccctcagagcttggtggctcaagactgttagcctggcagagccaggggtgaagggagaagctcttggagcaggcaggatgcccaccgctgcttcagctgcctcctcgcccagctaccctttggccccattgggccctcgtctgcctctccaggattgtatgtttcaagccttgtcctgtgttcctttgtctgacgctctgtgtattgctctttgaatcgagtttggaggaagagttgagttgtatgagtggcggcatgttggtagtgccggacttcctgtttcaagttttctggggcctcgctaattgaatgtggaaagtagcaccacttgacggctacaagtgccgactcctgaattttcccatggtgttctgacttcaagggctggcagccagggagaatgggcccaggggaagcaaagacctcttccctctgccgtttctgtcccacttaactgacctcactggaggctacatcacccaaagtagatgttagaaaacctaaattaatgaaccatatttttaaaatcctatttttcccaaacagggccctgggcctagcaatcaagcttctacctgtaccttatgtaaggtagaccctcctagtgtcagtacctgagctagtttacctcagttccgcaggcaggacagccggtccgggaaccctgagtgagaatgagtgtggatgtgtacagtacacgcactggacggcagcgggaggctgggactttccattacaaatagagacttcattcctgttgagtctagttggaatttttagtatgaatgtgagatttttctcctgcttgtgacattaagaataaaaaactgtgatctatcgtagagtacgttctgcattttatttctgcaggcaacacttttgctcaccagcaagaacacagcccgaggaagggacccaataacctttcaaaacgcaaactgctgcctgcggtgagggcccagggtcttccacggagaggacaggcatcttcctttcccaccaggaaggagtgagcccggagcctctgctatgtgcaaggcggtgtgcaagcaccggctgcagctttttgctctcttctttctctttggggctgggctgggtgtgcgttctggtgctgatgctttggcctgtgaggctgagctagagaaatgtagatgttagatgtgccagtaccatcctgcgcctcccaagcatgcccccactcactcacgtcggcatctcgacccgttcaattacagcaacgaagaagccaccgctaagcgtggtcttgggggaagcccggaggcagtgctcggcacccgggaacgtgctcaggcctcggtggggccgggcaggcagggcgggagctagcctgcaagagaaacagccccaatgctgggtaagagagcagttcaccccatccccccctccacgaccctggcgcacgccctgtacctgaaggcgcccgggttctgctgcagcgcatcttgtaccatgtcttcattctcctcctggcagagggagcacatggagtagacgagccgctgcagggaagggaaagtgagcgcgtggcacagggctcgctgctggaaccctgccagggcatgcagacgcaccgggctaggtgtccctgccccgggctcctccagctgtctgctcggcatacctaaggaaaagcgtgtctcggttacacagcttcacaggctgcctcagtcctgaaatcctcgctcctgaaatcctcgcttcacagaggagaacttttgctccagggtcccaagcccattaaagtgtcagaactaagaccaaaacagatgactccaggtctaagctgctgtggacctctgagtccctcagccacgccttctcaccatctcacccgagccactgcaggaaggatccagcaggacatagtggacctcacgatagcgcggatctaagggggagaccgccaggaagtcctcctcagccagctcacagcaggagacgccagcccaggccagcagcgtggccatggatgccagccgcctggcatccaggtcaaaggcaaagatcttcctagggcagagggcagagcaggggtgagctgagcatgcatggagcagctaagggcctgtcacagctgacacagacaaccagaacatgcaggttaagccaggacacacaatattgaaacagcctatatttaaagggcccagggtcagaggtaactggcctggggtctctgccccaagggctaagggatccacatctcacacctgcagtggggaaagcttagcttggggcaaataccgtgaactactttggtgcagcaggaaagagttaagcgaaagtcatcctttcagccttcattacccactgaaaggcacaaaatcaaaccccatgtcctcctcctcctcctgtggcactcacccttggttcttcagaagagcagccaagtgactggtctttattgcctggggtggcacaggcatccatgacatgggagcctggcgggggtccagcagcatggctgggagacagctggcctggcaggcagaacacaggggccgggtaaacagagaccccaggctaggcccttcccgtgcctacacattcttcccttttctattcctcttgcctaccctgtcctgcagaatgaggtgtccggcccggtacagtgggtgttcatgcagatctgtctgggcgggaaacaccagcagctccggcatcaaggggtccaggagaaaatgcttccccttgagggctcgtaagtcatcgaggctgccagggaagaaccattcattcatcatttcctgaatttctccctgccaggccctatttcaacggtccattcatgcaacaaatgttaccacagctatggagaaatcaacagggtgataagggaatccgggatccgcagttgagggaatgggttgtcaagccagacttatgggtcaggagccccctctactgtttaccagcagtgggagcctgggcaagtgattcaatctcaagccccactggcatctctgtaaaatagtaggtgtgaggattcaatgagccaatatatccaagatacttacgtgccacaatttaataaatgttagctattcctgttgaagcataaccttggagaaaggttactttacaggggggtgaggagtggggaagtgagagctgagctcattcttgatggatgaggagttagtcatgtgaggcgcttaggttaaaactacattcactataactcagtaaagcagtcccgcccactctccgacccatgcagaaataggcctagagagtcacatgtctcagttcagaaatctatcgaagtggcagagctggaattcaaacacaagcagccgttctctgctattccaccctggtgtccaagcaacatggtagggcagaaggaagaggatcttacaaagagtaagggaaagggagaggggcagaggctgcttctcagagccaccaaaggacaaaataagacaggtgtgagcccagtggaggaggcacggggcagagaccagccactgttgctggcacgctggtgcacgtagcactgtggcagatggacctggagaggaagcaggagggacagcacaatggagccaagaaaggacttagcatggccgggcgcggtggttcatgcctgtaatcccagcattttgggaggccaaggtgggcagatcacctgaggtcaggagtttgagaccagcctggccaacatggagaaatcccgtctctactaaaaatacaaaattagccaggcatggtgctgcatgcctgcaatcctgtagggaaaagaaagagagatcagactgttactgtgtctgtgtagaaagggaagacataagaaattccattttgacctgtaccttgaacaattggttggctgagatgctgttaatttgtgactttgccccaaatttgagctcacaaaaacatgtgttgtatggaatcaaggtttaaaggatctagggctgtgcaggacatgccttgttaataaaacgtttacaagc

SEQ ID NO: 352284 - DNA, 5536 bp, Homo sapiens
tcgcacatgcgcgccacctccgcactgccctcgcttcctgcgcctcttcaggtcaccgcttgctctagttcccaggctttggcctctagtggatgagaatcaccgagtctgcggggctggacgctgaccgcccgggccagcacctaggcgggcgggagctgtgcggcccagggttcgcgcgggccgggtagaggctcgagccgggacccccgagcgtgaaccccggagccagcggcgctggggccagaggggccgggcgggaggtggtggcggaggcgaaggggcgacgggacctgggcctggcccgtgtgtgtcctcggcggcctggcgccggccgtcgctgtacggtgagccccagggaggcggatctgggccccgagaaggacacccgcctggatttgccccgtaggcccggcccgggcccctcgggagcagaacagccttggtgaggtggacaggaggggacttcgcgagcagacgcgcgcgccagcgacagcagcccgccccggcctctcgggagccgtggggcagaggctgcagagccccaggagggtctatcagccacagtctctgcaagtttccaagagcagcagaaaatgaacacattgcaggggccagtgtcattcaaagatgtggctgtggatttcacccaggaggagtggtggcaactggaccctgatgagaagataacatacggggatgtgatgttggagaactacagccatctagtttccctggcttatgaggtggcaacatcttgtacttcggagatctgaagccgagcaacttgcccaagtccttcttcttttcccattaacaagatatgatatcaccaagccaaacgtcatcattaagttggagcagggagaggagctgtggataacgggaggtgaatttccatgtcaacatagtccagggattgtgggactttaccaaatcggtttgtaataacacctagaagacgctatccgatccatcaggcccagtattcctgtctgggggtacttcccaccgtgtgctggaatggttatcacaagaaggctgtgctgtcccctcgcaactccaggatggtgtgtagcccagtgactgtgaggatcgcccctcctgacagaagattttcgcgttctgcgataccagagcagataatcagctcaacactgtcctcaccatcaagtaacgccccagacccatgtgcaaaggagacagtactgagtgccctcaaagagaaggagaagaaaaggacagtggaggaagaagaccaaatattccttgatggccaggaaaataaaagaaggcgccatgatagcagtggcagtggacattcagcatttgagcccctggtggccaatggagtccccgcttcttttgtgcctaagcctgggtctctgaagagaggcctcaattctcagagctcagatgaccacttgaataagagatcccgaagctcttccatgagctccttgacaggcgcttacgcaagtggcatccctagctccagccgcaatgccattaccagttcctacagctccactcgaggcatctcacagctctggaagagaaatggccccagttcatcacccttctctagcccagcctcctcccgctcccagacaccggagaggccagcaaagaaaataagagaagaggagctgtgtcatcattccagttcttcaactccattggcagcagacagggagtcccagggagaaaaggctgcagatacaaccccaaggaagaaacaaaactcgaattctcagtctacacctggcagctctgggcagcgtaagcggaaagttcagctgctgccttctcggcgaggggaacagctgaccttgcctccacctccccagcttggctattcgatcactgccgaggacctagacttagagaagaaggcttcattacagtggttcaaccaggccttggaggacaagagcgatgctgcctcgaactctgtcactgagaccccacctatcactcagccttcatttacctttaccctgcctgctgctgcacctgcctccccacccacctccctcctggccccaagcaccaacccactgttagagagcttgaagaagatgcagactcccccgagcctgccaccctgcccagaatctgctggagcagcaaccactgaggccctctcacctccaaagacacccagcctcctacccccgctgggtttatcacagtcagggccgccagggctgctccccagcccctcctttgactccaaacccccgaccactttgctggggctgatccctgctccatccatggtaccagccactgacaccaaggcacctccaacccttcaggcagagacggctaccaaaccccaagccacatctgccccgtcccccgcccccaagcaaagcttcctgtttggaacacagaacacctcaccttccagccctgccgcccctgctgcatcttcagcacctcccatgttcaagcccattttcacggctccacccaagagtgagaaggaaggccccacaccgcctggcccttcagtcacagccacagcgccctccagctcctccctccccacgaccaccagcaccacagccccgaccttccagcctgtctttagcagcatggggccacctgcatctgtgcccttgcctgctcccttcttcaagcagacaactactcccgccactgctcccaccacaactgccccgctcttcactggcctggccagcgccacctctgctgtggctcccatcacctctgccagtccatccacagactctgcttcgaagcctgcgtttggctttggcataaacagtgtgagcagcagcagtgtgagtaccacgaccagcaccgccactgccgcctcacagcctttcctcttcggggcgccccaggcctctgctgccagcttcaccccggccatgggctccatattccagtttggcaaacctcctgccttgcccacaaccaccacagtcaccaccttcagccagtccctgcacactgccgtgccaacggccaccagcagcagcgctgccgactttagtggttttggcagcaccctcgccacctccgccccggccaccagcagccagcccactctgacgttcagtaacacgagcacccccacgttcaacattccctttggctcaagcgccaagtccccgctcccatcatatccgggagccaacccccagcccgcatttggggccgctgaggggcagccaccgggggccgccaagccggcccttgcccccagctttggcagctctttcacttttggaaactctgcagccccggctgctgcacccacacctgcacctccgtccatgatcaaggtcgtgcctgcgtacgtgcctacgcccatccatcctatctttggcggtgccacgcactcggcgtttgggttgaaagccacggcttcggccttcggcgctcccgccagctcacagcccgcctttggcggctccactgctgtcttcttcggtgcagccaccagctccggctttggagccaccacccagaccgccagcagcgggagcagcagctcggtgtttggcagcacaacaccatcacccttcacgtttgggggttcggcagcccccgctggcagtgggagctttgggatcaatgtggccaccccaggctccagcaccaccaccggagctttcagctttggagcaggacagagtgggagcacagccacctccacccccttcgcagggggcttaggtcagaacgccctgggcaccaccggccagagcacaccgtttgccttcaacgtgagcagcacaactgagagcaaacctgtgtttggaggcaccgccacccccacctttggtctgaacacccctgcgcctggagtgggcacatcaggcagcagcctctcctttggggcatcctcagcacccgcccaaggctttgttggtgttgcacctttcggatcggcggccctttcattttccattggtgcgggatccaagaccccaggggctcgacagcgactgcaggcccgaaggcagcacacccgcaaaaagtagcctttgtcccctgtccctgttccccccaccccttccctaaatctggaccttggcacctgctaggaagagccttggacccttccagttgcgtaaagcaaacctaccccggatctctggcttcagccgccagggggcagtggcagccctggggccctttcccttctggaggaagcacaagcctcagggaaggggaagcaggatgcggagggccaaagcccgggacctctacttgaacagttctactggggaggctggagaactaaggaaacacctgtacatagtgtccgctgccctgactcccgcttagcacacccttaggcaggcgccccttccacctttccccgagaccgtcgtcgctggagggggcagggtccagcccgcctggatcggtggtgtgcacctgatgggatttgggaaatgggctatccgtaaagctttatcttgcttggcttagctgtgagaagtggttctcttcctctggtcccttctggggactctgtttccccatttcttgctgctgtgtccctcaccagttccttgcaggattccttcgtttttaaatgcccttgaatctagctttgccttggagaccccagtgggtgctgctcctgccgttttcttcctgccaagcctgaatcaatgtttcatctccaaccctctgccagtttggcccctcagagcttggtggctcaagactgttagcctggcagagccaggggtgaagggagaagctcttggagcaggcaggatgcccaccgctgcttcagctgcctcctcgcccagctaccctttggccccattgggccctcgtctgcctctccaggattgtatgtttcaagccttgtcctgtgttcctttgtctgacgctctgtgtattgctctttgaatcgagtttggaggaagagttgagttgtatgagtggcggcatgttggtagtgccggacttcctgtttcaagttttctggggcctcgctaattgaatgtggaaagtagcaccacttgacggctacaagtgccgactcctgaattttcccatggtgttctgacttcaagggctggcagccagggagaatgggcccaggggaagcaaagacctcttccctctgccgtttctgtcccacttaactgacctcactggaggctacatcacccaaagtagatgttagaaaacctaaattaatgaaccatatttttaaaatcctatttttcccaaacagggccctgggcctagcaatcaagcttctacctgtaccttatgtaaggtagaccctcctagtgtcagtacctgagctagtttacctcagttccgcaggcaggacagccggtccgggaaccctgagtgagaatgagtgtggatgtgtacagtacacgcactggacggcagcgggaggctgggactttccattacaaatagagacttcattcctgttgagtctagttggaatttttagtatgaatgtgagatttttctcctgcttgtgacattaagaataaaaaactgtgatctatcgtag

SEQ ID NO: 352285 - DNA, 3481 bp, Homo sapiens
acctcgcgtgtgggtgtgttcgcccccgtttttgttgcctctccctctacgatgggtgatggtctgctcgtgccagcggatgcttctcctgctgtgcgcgccgttgtttcttcccctctcgtcggcgcctggtgtttgtgttgctgctgcggcgcgcttcgtgtcgctgcgcgctgtgtatagataggtcgcgcctcgtttggaggggcgcgccctgttgttccccctacgtcgtgggtgatgtccgttccagtggcgtgtcggccctccggtggagggacatttgtgtgggcgccctgcccccctcgtcttcttttttcttctttttttgtttttctttttctgtttttttttttttttttttttttttttttgttttttttttttttttttttttgtttttttttttagagtacgttctgcattttatttctgcaggcaacacttttgctcaccagcaagaacacagcccgaggaagggacccaataacctttcaaaacgcaaactgctgcctgcggtgagggcccagggtcttccacggagaggacaggcatcttcctttcccaccaggaaggagtgagcccggagcctctgctatgtgcaaggcggtgtgcaagcaccggctgcagctttttgctctcttctttctctttggggctgggctgggtgtgcgttctggtgctgatgctttggcctgtgaggctgaggtcggcatctcgacccgttcaattacagcaacgaagaagccaccgctaagcgtggtcttgggggaagcccggaggcagtgctcggcacccgggaacgtgctcaggcctcggtggggccgggcaggcagggcgggagctagcctgcaagagaaacagccccaatgctgggtaagagagcagttcaccccatccccccctccacgaccctggcgcacgccctgtacctgaaggcgcccgggttctgctgcagcgcatcttgtaccatgtcttcattctcctcctggcagagggagcacatggagtagacgagccgctgcagggaagggaaagtgagcgcgtggcacagggctcgctgctggaaccctgccagggcatgcagacgcaccgggctaggtgtccctgccccgggctcctccagctgtctgctcggcatacctaaggaaaagcgtgtctcggttacacagcttcacaggctgcctcagtcctgaaatcctcgctcctgaaatcctcgcttcacagaggagaacttttgctccagggtcccaagcccattaaagtgtcagaactaagaccaaaacagatgactccaggtctaagctgctgtggacctctgagtccctcagccacgccttctcaccatctcacccgagccactgcaggaaggatccagcaggacatagtggacctcacgatagcgcggatctaagggggagaccgccaggaagtcctcctcagccagctcacagcaggagacgccagcccaggccagcagcgtggccatggatgccagccgcctggcatccaggtcaaaggcaaagatcttcctagggcagagggcagagcaggggtgagctgagcatgcatggagcagctaagggcctgtcacagctgacacagacaaccagaacatgcaggttaagccaggacacacaatattgaaacagcctatatttaaagggcccagggtcagaggtaactggcctggggtctctgccccaagggctaagggatccacatctcacacctgcagtggggaaagcttagcttggggcaaataccgtgaactactttggtgcagcaggaaagagttaagcgaaagtcatcctttcagccttcattacccactgaaaggcacaaaatcaaaccccatgtcctcctcctcctcctgtggcactcacccttggttcttcagaagagcagccaagtgactggtctttattgcctggggtggcacaggcatccatgacatgggagcctggcgggggtccagcagcatggctgggagacagctggcctggcaggcagaacacaggggccgggtaaacagagaccccaggctaggcccttcccgtgcctacacattcttcccttttctattcctcttgcctaccctgtcctgcagaatgaggtgtccggcccggtacagtgggtgttcatgcagatctgtctgggcgggaaacaccagcagctccggcatcaaggggtccaggagaaaatgcttccccttgagggctcgtaagtcatcgaggctgccagggaagaaccattcattcatcatttcctgaatttctccctgccaggccctatttcaacggtccattcatgcaacaaatgttaccacagctatggagaaatcaacagggtgataagggaatccgggatccgcagttgagggaatgggttgtcaagccagacttatgggtcaggagccccctctactgtttaccagcagtgggagcctgggcaagtgattcaatctcaagccccactggcatctctgtaaaatagtaggtgtgaggattcaatgagccaatatatccaagatacttacgtgccacaatttaataaatgttagctattcctgttgaagcataaccttggagaaaggttactttacaggggggtgaggagtggggaagtgagagctgagctcattcttgatggatgaggagttagtcatgtgaggcgcttaggttaaaactacattcactataactcagtaaagcagtcccgcccactctccgacccatgcagaaataggcctagagagtcacatgtctcagttcagaaatctatcgaagtggcagagctggaattcaaacacaagcagccgttctctgctattccaccctggtgtccaagcaacatggtagggcagaaggaagaggatcttacaaagagtaagggaaagggagaggggcagaggctgcttctcagagccaccaaaggacaaaataagacaggtgtgagcccagtggaggaggcacggggcagagaccagccactgttgctggcacgctggtgcacgtagcactgtggcagatggacctggagaggaagcaggagggacagcacaatggagccaagaaaggacttagcatggccgggcgcggtggttcatgcctgtaatcccagcattttgggaggccaaggtgggcagatcacctgaggtcaggagtttgagaccagcctggccaacatggagaaatcccgtctctactaaaaatacaaaattagccaggcatggtgctgcatgcctgcaatcctgtagggaaaagaaagagagatcagactgttactgtgtctgtgtagaaagggaagacataagaaattccattttgacctgtaccttgaacaattggttggctgagatgctgttaatttgtgactttgccccaaatttgagctcacaaaaacatgtgttgtatggaatcaaggtttaaaggatctagggctgtgcaggacatgccttgttaataaaacgtttacaagc

SEQ ID NO: 352286 - DNA, 1388 bp, Homo sapiens
tcgcacatgcgcgccacctccgcactgccctcgcttcctgcgcctcttcaggtcaccgcttgctctagttcccaggctttggcctctagtggatgagaatcaccgagtctgcggggctggacgctgaccgcccgggccagcacctaggcgggcgggagctgtgcggcccagggttcgcgcgggccgggtagaggctcgagccgggacccccgagcgtgaaccccggagccagcggcgctggggccagaggggccgggcgggaggtggtggcggaggcgaaggggcgacgggacctgggcctggcccgtgtgtgtcctcggcggcctggcgccggccgtcgctgtacggtgagccccagggaggcggatctgggccccgagaaggacacccgcctggatttgccccgtaggcccggcccgggcccctcgggagcagaacagccttggtgaggtggacaggaggggacttcgcgagcagacgcgcgcgccagcgacagcagcccgccccggcctctcgggagccgtggggcagaggctgcagagccccaggagggtctatcagccacagtctctgcaagtttccaagagcagcagaaaatgaacacattgcaggggccagtgtcattcaaagatgtggctgtggatttcacccaggaggagtggtggcaactggaccctgatgagaagataacatacggggatgtgatgttggagaactacagccatctagtttccctggcttatgaggtggcaacatcttgtacttcggagatctgaagccgagcaacttgcccaagtccttcttcttttcccattaacaagatatgatatcaccaagccaaacgtcatcattaagttggagcagggagaggagctgtggataacgggaggtgaatttccatgtcaacatagtccaggtcagactgcagtggtgtaatcatagctcattgaagcctcaaactcctgagctccaggaatcctcccaccacagtctctcaaatacttgggactacagctctggaagagaaatggccccagttcatcacccttctctagcccagcctcctcccgctcccagacaccggagaggccagcaaagaaaataagagaagaggagctgtgtcatcattccagttcttcaactccattggcagcagacagggagtcccagggagaaaaggctgcagatacaaccccaaggaagaaacaaaactcgaattctcagtctacacctggcagctctgggcagcgtaagcggaaagttcagctgctgccttctcggcgaggggaacagctgaccttgcttccactcccagctggtattcgatcaggccgggcctcgactgaaaacgctcacccggggtcaccagcctggggccaaccatttgc

SEQ ID NO: 352287 - DNA, 1982 bp, Homo sapiens
tcgcacatgcgcgccacctccgcactgccctcgcttcctgcgcctcttcaggtcaccgcttgctctagttcccaggctttggcctctagtggatgagaatcaccgagtctgcggggctggacgctgaccgcccgggccagcacctaggcgggcgggagctgtgcggcccagggttcgcgcgggccgggtagaggctcgagccgggacccccgagcgtgaaccccggagccagcggcgctggggccagaggggccgggcgggaggtggtggcggaggcgaaggggcgacgggacctgggcctggcccgtgtgtgtcctcggcggcctggcgccggccgtcgctgtacggtgagccccagggaggcggatctgggccccgagaaggacacccgcctggatttgccccgtaggcccggcccgggcccctcgggagcagaacagccttggtgaggtggacaggaggggacttcgcgagcagacgcgcgcgccagcgacagcagcccgccccggcctctcgggagccgtggggcagaggctgcagagccccaggagggtctatcagccacagtctctgcaagtttccaagagcagcagaaaatgaacacattgcaggggccagtgtcattcaaagatgtggctgtggatttcacccaggaggagtggtggcaactggaccctgatgagaagataacatacggggatgtgatgttggagaactacagccatctagtttccctggcttatgaggtggcaacatcttgtacttcggagatctgaagccgagcaacttgcccaagtccttcttcttttcccattaacaagatatgatatcaccaagccaaacgtcatcattaagttggagcagggagaggagctgtggataacgggaggtgaatttccatgtcaacatagtccaggtcagactgcagtggtgtaatcatagctcattgaagcctcaaactcctgagctccaggaatcctcccaccacagtctctcaaatacttgggactacagcatttatttgaaagataaacctcttggatgtgactctggagacaagaccagcagctcgagaccattcaatccaaggtataaaatgggagaaaatcagctccatcatggtctgaattgaggatgaggcagaagagcagagaatagcggatgcccaggtggcagcaacttaactcttttcctgtggacttgcggggtctccccacctccactgcgtcgggacatgccgtgtgccgtctctttatccatagctgcctccggcatcagcagagaaagtcatgggcagatggagccgtggattagttcttttttccagtcttcctttactttatctggataagattgggcagattgaatttgatcttctatactggggccagggagcagggtggatctagaccatgcagcttttccccactgtcaccagtttgggagcagggattggctgccattgtcctgtctagcctccgtgttcctgggacaccgctgactggaggctgctcctcttctaagggagtctggcatagaagacacgacccagagcacatggcaccttctctcttctcctgcaccagtctccttgcccctctgtattgtcatcatactgaagcaaaccatccaactcaccagcgtctctggactcgtttcattgattcctctccctgaaactcttcctcattctccttttagcccttcacatcctcagccgaagatctcacttcctcccagaggcctttgctgactgacccctcaggtaggctaaatccccatcctgcgcttccatgacagcctgtagcagatgctgttttctgcaggtggccacagccctatctcccatcccacacactcctctcataacatgaccgtgtcacttcttccatcgcgtggtcggggttatgtctcttttctttgagcctatgcacatctttgtgattgccctgaccaataaataaagtaggacagaagcgacg

SEQ ID NO: 352288 - DNA, 1082 bp, Homo sapiens
tcgcacatgcgcgccacctccgcactgccctcgcttcctgcgcctcttcaggtcaccgcttgctctagttcccaggctttggcctctagtggatgagaatcaccgagtctgcggggctggacgctgaccgcccgggccagcacctaggcgggcgggagctgtgcggcccagggttcgcgcgggccgggtagaggctcgagccgggacccccgagcgtgaaccccggagccagcggcgctggggccagaggggccgggcgggaggtggtggcggaggcgaaggggcgacgggacctgggcctggcccgtgtgtgtcctcggcggcctggcgccggccgtcgctgtacggtgagccccagggaggcggatctgggccccgagaaggacacccgcctggatttgccccgtaggcccggcccgggcccctcgggagcagaacagccttggtgaggtggacaggaggggacttcgcgagcagacgcgcgcgccagcgacagcagcccgccccggcctctcgggagccgtggggcagaggctgcagagccccaggagggtctatcagccacagtctctgcaagtttccaagagcagcagaaaatgaacacattgcaggggccagtgtcattcaaagatgtggctgtggatttcacccaggaggagtggtggcaactggaccctgatgagaagataacatacggggatgtgatgttggagaactacagccatctagtttccctggcttatgaggtggcaacatcttgtacttcggagatctgaagccgagcaacttgcccaagtccttcttcttttcccattaacaagatatgatatcaccaagccaaacgtcatcattaagttggagcagggagaggagctgtggataacgggaggtgaatttccatgtcaacatagtccaggtaagttagtagagtatcaaatgttaaaaaatgctcatcccagacctttgggagtgactaaagagttgtttatatgtattcggtaccctcagtaacacctcccaacccccaaatatcactttccttcctgcacacatacatgaactcttttgtttattttatattt

SEQ ID NO: 352289 - DNA, 728 bp, Homo sapiens
caagcggatggaccgagcggagcacaagggtgagcttcagacagacaagatgatgagggcagctgccaaggatgtgcacaggctccgaggccagagctgtaaggaacccccagaagttcagtctttcagggagaagatggcatttttcacccggcctcggatgaatatcccagctctctctgcagatgacgtctaatcgccagaaaagtatttcctttgttccactgaccaggctgtgaaccttgactgtggctaaagttatttatgtggtgttatatgaaggtactgagtcacaagtcctctctctctttctttctctctctctctgtgtttctccccgctgacccctggccatctccctctctctttcctttcctctctgtttctcgtctctggactcgtttcattgattcctctccctgaaactcttcctcattctccttttagcccttcacatcctcagccgaagatctcacttcctcccagaggcctttgctgactgacccctcaggtaggctaaatccccatcctgcgcttccatgacagcctgtagcagatgctgttttctgcaggtggccacagccctatctcccatcccacacactcctctcataacatgaccgtgtcacttcttccatcgcgtggtcggggttatgtctcttttctttgagcctatgcacatctttgtgattgccctgaccaataaataaagtaggacagaagcgacg

SEQ ID NO: 352290 - DNA, 297 bp, Homo sapiens
gaaaaaatgggtttctctgggaaaatcccaagtagggttccatgttttcttgtggtctttctcacctgagatatccgtgttggtcttcacgggaactggacagcagggaccactgcaattgagggcaggcattcctccatgagctgtgctgagagcctgctctccgacaggcatgtggaaagaagtcccagacaagccaggactgcttcacctttctttctttcttagatgctgcctcgaactctgtcactgagaccccacctatcactcagccttcatttacctttaccctgcctg

SEQ ID NO: 352291 - DNA, 565 bp, Homo sapiens
ttggtctgaacacccctgcgcctggagtgggcacatcaggcagcagcctctcctttggggcatcctcagcacccgcccaaggctttgttggtgttgcacctttcggtaagcagcaagccaccctgtggccctgctcatctgtctgaggaggggttgggcggggtggcaggttcctggtcctctgaggccccgtgaagatcaggttcagcacaggaaagacatttcgggttaggagtccagcacaacccagggatgggagttggatggcagagatcagagaggagctgtccggggtggaagtttgcctcccatgggaagccaggtaaaaatggattcttgggcctcgctctgagactctctgggagtttgcatttcaggaggcttctcccgtacagtgtttctgatgcagcggggaaagccctattgaggcaccctgtgttttattactggcctggccttccagagatttgggcacccagagtcagagtctcaggtagcagctgccctgatgaggtcttgttgaatctttccaggatcggcggccctttcattttccattggtgcg

SEQ ID NO: 352292 - DNA, 6088 bp, Homo sapiens
tcgcacatgcgcgccacctccgcactgccctcgcttcctgcgcctcttcaggtcaccgcttgctctagttcccaggctttggcctctagtggatgagaatcaccgagtctgcggggctggacgctgaccgcccgggccagcacctaggcgggcgggagctgtgcggcccagggttcgcgcgggccgggtagaggctcgagccgggacccccgagcgtgaaccccggagccagcggcgctggggccagaggggccgggcgggaggtggtggcggaggcgaaggggcgacgggacctgggcctggcccgtgtgtgtcctcggcggcctggcgccggccgtcgctgtacggtgagccccagggaggcggatctgggccccgagaaggacacccgcctggatttgccccgtaggcccggcccgggcccctcgggagcagaacagccttggtgaggtggacaggaggggacttcgcgagcagacgcgcgcgccagcgacagcagcccgccccggcctctcgggagccgtggggcagaggctgcagagccccaggagggtctatcagccacagtctctgcaagtttccaagagcagcagaaaatgaacacattgcaggggccagtgtcattcaaagatgtggctgtggatttcacccaggaggagtggtggcaactggaccctgatgagaagataacatacggggatgtgatgttggagaactacagccatctagtttccctggcttatgaggtggcaacatcttgtacttcggagatctgaagccgagcaacttgcccaagtccttcttcttttcccattaacaagatatgatatcaccaagccaaacgtcatcattaagttggagcagggagaggagctgtggataacgggaggtgaatttccatgtcaacatagtccagggattgtgggactttaccaaatcggtttgtaataacacctagaagacgctatccgatccatcaggcccagtattcctgtctgggggtacttcccaccgtgtgctggaatggttatcacaagaaggctgtgctgtcccctcgcaactccaggatggtgtgtagcccagtgactgtgaggatcgcccctcctgacagaagattttcgcgttctgcgataccagagcagataatcagctcaacactgtcctcaccatcaagtaacgccccagacccatgtgcaaaggagacagtactgagtgccctcaaagagaaggagaagaaaaggacagtggaggaagaagaccaaatattccttgatggccaggaaaataaaagaaggcgccatgatagcagtggcagtggacattcagcatttgagcccctggtggccaatggagtccccgcttcttttgtgcctaagcctgggtctctgaagagaggcctcaattctcagagctcagatgaccacttgaataagagatcccgaagctcttccatgagctccttgacaggcgcttacgcaagtggcatccctagctccagccgcaatgccattaccagttcctacagctccactcgaggcatctcacagctctggaagagaaatggccccagttcatcacccttctctagcccagcctcctcccgctcccagacaccggagaggccagcaaagaaaataagagaagaggagctgtgtcatcattccagttcttcaactccattggcagcagacagggagtcccagggagaaaaggctgcagatacaaccccaaggaagaaacaaaactcgaattctcagtctacacctggcagctctgggcagcgtaagcggaaagttcagctgctgccttctcggcgaggggaacagctgaccttgcctccacctccccagcttggctattcgatcactgccgaggacctagacttagagaagaaggcttcattacagtggttcaaccaggccttggaggacaagagcgatgctgcctcgaactctgtcactgagaccccacctatcactcagccttcatttacctttaccctgcctgctgctgcacctgcctccccacccacctccctcctggccccaagcaccaacccactgttagagagcttgaagaagatgcagactcccccgagcctgccaccctgcccagaatctgctggagcagcaaccactgaggccctctcacctccaaagacacccagcctcctacccccgctgggtttatcacagtcagggccgccagggctgctccccagcccctcctttgactccaaacccccgaccactttgctggggctgatccctgctccatccatggtaccagccactgacaccaaggcacctccaacccttcaggcagagacggctaccaaaccccaagccacatctgccccgtcccccgcccccaagcaaagcttcctgtttggaacacagaacacctcaccttccagccctgccgcccctgctgcatcttcagcacctcccatgttcaagcccattttcacggctccacccaagagtgagaaggaaggccccacaccgcctggcccttcagtcacagccacagcgccctccagctcctccctccccacgaccaccagcaccacagccccgaccttccagcctgtctttagcagcatggggccacctgcatctgtgcccttgcctgctcccttcttcaagcagacaactactcccgccactgctcccaccacaactgccccgctcttcactggcctggccagcgccacctctgctgtggctcccatcacctctgccagtccatccacagactctgcttcgaagcctgcgtttggctttggcataaacagtgtgagcagcagcagtgtgagtaccacgaccagcaccgccactgccgcctcacagcctttcctcttcggggcgccccaggcctctgctgccagcttcaccccggccatgggctccatattccagtttggcaaacctcctgccttgcccacaaccaccacagtcaccaccttcagccagtccctgcacactgccgtgccaacggccaccagcagcagcgctgccgactttagtggttttggcagcaccctcgccacctccgccccggccaccagcagccagcccactctgacgttcagtaacacgagcacccccacgttcaacattccctttggctcaagcgccaagtccccgctcccatcatatccgggagccaacccccagcccgcatttggggccgctgaggggcagccaccgggggccgccaagccggcccttgcccccagctttggcagctctttcacttttggaaactctgcagccccggctgctgcacccacacctgcacctccgtccatgatcaaggtcgtgcctgcgtacgtgcctacgcccatccatcctatctttggcggtgccacgcactcggcgtttgggttgaaagccacggcttcggccttcggcgctcccgccagctcacagcccgcctttggcggctccactgctgtcttcttcggtgcagccaccagctccggctttggagccaccacccagaccgccagcagcgggagcagcagctcggtgtttggcagcacaacaccatcacccttcacgtttgggggttcggcagcccccgctggcagtgggagctttgggatcaatgtggccaccccaggctccagcaccaccaccggagctttcagctttggagcaggacagagtgggagcacagccacctccacccccttcgcagggggcttaggtcagaacgccctgggcaccaccggccagagcacaccgtttgccttcaacgtgagcagcacaactgagagcaaacctgtgtttggaggcaccgccacccccacctttggtctgaacacccctgcgcctggagtgggcacatcaggcagcagcctctcctttggggcatcctcagcacccgcccaaggctttgttggtgttgcacctttcggatcggcggccctttcattttccattggtgcgggatccaagaccccaggggctcgacagcgactgcaggcccgaaggcagcacacccgcaaaaagtagcctttgtcccctgtccctgttccccccaccccttccctaaatctggaccttggcacctgctaggaagagccttggacccttccagttgcgtaaagcaaacctaccccggatctctggcttcagccgccagggggcagtggcagccctggggccctttcccttctggaggaagcacaagcctcagggaaggggaagcaggatgcggagggccaaagcccgggacctctacttgaacagttctactggggaggctggagaactaaggaaacacctgtacatagtgtccgctgccctgactcccgcttagcacacccttaggcaggcgccccttccacctttccccgagaccgtcgtcgctggagggggcagggtccagcccgcctggatcggtggtgtgcacctgatgggatttgggaaatgggctatccgtaaagctttatcttgcttggcttagctgtgagaagtggttctcttcctctggtcccttctggggactctgtttccccatttcttgctgctgtgtccctcaccagttccttgcaggattccttcgtttttaaatgcccttgaatctagctttgccttggagaccccagtgggtgctgctcctgccgttttcttcctgccaagcctgaatcaatgtttcatctccaaccctctgccagtttggcccctcagagcttggtggctcaagactgttagcctggcagagccaggggtgaagggagaagctcttggagcaggcaggatgcccaccgctgcttcagctgcctcctcgcccagctaccctttggccccattgggccctcgtctgcctctccaggattgtatgtttcaagccttgtcctgtgttcctttgtctgacgctctgtgtattgctctttgaatcgagtttggaggaagagttgagttgtatgagtggcggcatgttggtagtgccggacttcctgtttcaagttttctggggcctcgctaattgaatgtggaaagtagcaccacttgacggctacaagtgccgactcctgaattttcccatggtgttctgacttcaagggctggcagccagggagaatgggcccaggggaagcaaagacctcttccctctgccgtttctgtcccacttaactgacctcactggaggctacatcacccaaagtagatgttagaaaacctaaattaatgaaccatatttttaaaatcctatttttcccaaacagggccctctgcagcccatcctttccttccgtccttctgaaaccacataccccaggcccaagcgccttgctgccacgcccaacctctttgggagaagtatgaatgcgtgtgtctaaattaaaagaaaaaaatatttaaacgttttttaacaaaaatttatttttgtatttaagctaaattgccttttaaattccttcaagcttggttcattgaggtggttaagtataaatgctattaactaggaattagctgtatagttaagttatgcctgtgcaaagaagaggctcaaatgctgtccccggcagctttcctgggggactagagctccttctggccatgttatatgaaatgtaattcttattttataaataatgtgatgtaaatgtaactggtgccccctccccgatgtgactgagggtgagtgagtggtggcggggctgctccttcccacccctcagaacagctctgatcctcgttaatacctggctgcgtgtgcagctgaggagggagtgaacctcaagcctaaatacctgttaggattggagggtctgggtgggcctgggcctagcaatcaagcttctacctgtaccttatgtaaggtagaccctcctagtgtcagtacctgagctagtttacctcagttccgcaggcaggacagccggtccgggaaccctgagtgagaatgagtgtggatgtgtacagtacacgcactggacggcagcgggaggctgggactttccattacaaatagagacttcattcctgttgagtctagttggaatttttagtatgaatgtgagatttttctcctgcttgtgacattaagaataaaaaactgtgatctatcgtag

SEQ ID NO: 352293 - DNA, 5883 bp, Homo sapiens
tcgcacatgcgcgccacctccgcactgccctcgcttcctgcgcctcttcaggtcaccgcttgctctagttcccaggctttggcctctagtggatgagaatcaccgagtctgcggggctggacgctgaccgcccgggccagcacctaggcgggcgggagctgtgcggcccagggttcgcgcgggccgggtagaggctcgagccgggacccccgagcgtgaaccccggagccagcggcgctggggccagaggggccgggcgggaggtggtggcggaggcgaaggggcgacgggacctgggcctggcccgtgtgtgtcctcggcggcctggcgccggccgtcgctgtacggtctatcagccacagtctctgcaagtttccaagagcagcagaaaatgaacacattgcaggggccagtgtcattcaaagatgtggctgtggatttcacccaggaggagtggtggcaactggaccctgatgagaagataacatacggggatgtgatgttggagaactacagccatctagtttccctggcttatgaggtggcaacatcttgtacttcggagatctgaagccgagcaacttgcccaagtccttcttcttttcccattaacaagatatgatatcaccaagccaaacgtcatcattaagttggagcagggagaggagctgtggataacgggaggtgaatttccatgtcaacatagtccagggattgtgggactttaccaaatcggtttgtaataacacctagaagacgctatccgatccatcaggcccagtattcctgtctgggggtacttcccaccgtgtgctggaatggttatcacaagaaggctgtgctgtcccctcgcaactccaggatggtgtgtagcccagtgactgtgaggatcgcccctcctgacagaagattttcgcgttctgcgataccagagcagataatcagctcaacactgtcctcaccatcaagtaacgccccagacccatgtgcaaaggagacagtactgagtgccctcaaagagaaggagaagaaaaggacagtggaggaagaagaccaaatattccttgatggccaggaaaataaaagaaggcgccatgatagcagtggcagtggacattcagcatttgagcccctggtggccaatggagtccccgcttcttttgtgcctaagcctgggtctctgaagagaggcctcaattctcagagctcagatgaccacttgaataagagatcccgaagctcttccatgagctccttgacaggcgcttacgcaagtggcatccctagctccagccgcaatgccattaccagttcctacagctccactcgaggcatctcacagctctggaagagaaatggccccagttcatcacccttctctagcccagcctcctcccgctcccagacaccggagaggccagcaaagaaaataagagaagaggagctgtgtcatcattccagttcttcaactccattggcagcagacagggagtcccagggagaaaaggctgcagatacaaccccaaggaagaaacaaaactcgaattctcagtctacacctggcagctctgggcagcgtaagcggaaagttcagctgctgccttctcggcgaggggaacagctgaccttgcctccacctccccagcttggctattcgatcactgccgaggacctagacttagagaagaaggcttcattacagtggttcaaccaggccttggaggacaagagcgatgctgcctcgaactctgtcactgagaccccacctatcactcagccttcatttacctttaccctgcctgctgctgcacctgcctccccacccacctccctcctggccccaagcaccaacccactgttagagagcttgaagaagatgcagactcccccgagcctgccaccctgcccagaatctgctggagcagcaaccactgaggccctctcacctccaaagacacccagcctcctacccccgctgggtttatcacagtcagggccgccagggctgctccccagcccctcctttgactccaaacccccgaccactttgctggggctgatccctgctccatccatggtaccagccactgacaccaaggcacctccaacccttcaggcagagacggctaccaaaccccaagccacatctgccccgtcccccgcccccaagcaaagcttcctgtttggaacacagaacacctcaccttccagccctgccgcccctgctgcatcttcagcacctcccatgttcaagcccattttcacggctccacccaagagtgagaaggaaggccccacaccgcctggcccttcagtcacagccacagcgccctccagctcctccctccccacgaccaccagcaccacagccccgaccttccagcctgtctttagcagcatggggccacctgcatctgtgcccttgcctgctcccttcttcaagcagacaactactcccgccactgctcccaccacaactgccccgctcttcactggcctggccagcgccacctctgctgtggctcccatcacctctgccagtccatccacagactctgcttcgaagcctgcgtttggctttggcataaacagtgtgagcagcagcagtgtgagtaccacgaccagcaccgccactgccgcctcacagcctttcctcttcggggcgccccaggcctctgctgccagcttcaccccggccatgggctccatattccagtttggcaaacctcctgccttgcccacaaccaccacagtcaccaccttcagccagtccctgcacactgccgtgccaacggccaccagcagcagcgctgccgactttagtggttttggcagcaccctcgccacctccgccccggccaccagcagccagcccactctgacgttcagtaacacgagcacccccacgttcaacattccctttggctcaagcgccaagtccccgctcccatcatatccgggagccaacccccagcccgcatttggggccgctgaggggcagccaccgggggccgccaagccggcccttgcccccagctttggcagctctttcacttttggaaactctgcagccccggctgctgcacccacacctgcacctccgtccatgatcaaggtcgtgcctgcgtacgtgcctacgcccatccatcctatctttggcggtgccacgcactcggcgtttgggttgaaagccacggcttcggccttcggcgctcccgccagctcacagcccgcctttggcggctccactgctgtcttcttcggtgcagccaccagctccggctttggagccaccacccagaccgccagcagcgggagcagcagctcggtgtttggcagcacaacaccatcacccttcacgtttgggggttcggcagcccccgctggcagtgggagctttgggatcaatgtggccaccccaggctccagcaccaccaccggagctttcagctttggagcaggacagagtgggagcacagccacctccacccccttcgcagggggcttaggtcagaacgccctgggcaccaccggccagagcacaccgtttgccttcaacgtgagcagcacaactgagagcaaacctgtgtttggaggcaccgccacccccacctttggtctgaacacccctgcgcctggagtgggcacatcaggcagcagcctctcctttggggcatcctcagcacccgcccaaggctttgttggtgttgcacctttcggatcggcggccctttcattttccattggtgcgggatccaagaccccaggggctcgacagcgactgcaggcccgaaggcagcacacccgcaaaaagtagcctttgtcccctgtccctgttccccccaccccttccctaaatctggaccttggcacctgctaggaagagccttggacccttccagttgcgtaaagcaaacctaccccggatctctggcttcagccgccagggggcagtggcagccctggggccctttcccttctggaggaagcacaagcctcagggaaggggaagcaggatgcggagggccaaagcccgggacctctacttgaacagttctactggggaggctggagaactaaggaaacacctgtacatagtgtccgctgccctgactcccgcttagcacacccttaggcaggcgccccttccacctttccccgagaccgtcgtcgctggagggggcagggtccagcccgcctggatcggtggtgtgcacctgatgggatttgggaaatgggctatccgtaaagctttatcttgcttggcttagctgtgagaagtggttctcttcctctggtcccttctggggactctgtttccccatttcttgctgctgtgtccctcaccagttccttgcaggattccttcgtttttaaatgcccttgaatctagctttgccttggagaccccagtgggtgctgctcctgccgttttcttcctgccaagcctgaatcaatgtttcatctccaaccctctgccagtttggcccctcagagcttggtggctcaagactgttagcctggcagagccaggggtgaagggagaagctcttggagcaggcaggatgcccaccgctgcttcagctgcctcctcgcccagctaccctttggccccattgggccctcgtctgcctctccaggattgtatgtttcaagccttgtcctgtgttcctttgtctgacgctctgtgtattgctctttgaatcgagtttggaggaagagttgagttgtatgagtggcggcatgttggtagtgccggacttcctgtttcaagttttctggggcctcgctaattgaatgtggaaagtagcaccacttgacggctacaagtgccgactcctgaattttcccatggtgttctgacttcaagggctggcagccagggagaatgggcccaggggaagcaaagacctcttccctctgccgtttctgtcccacttaactgacctcactggaggctacatcacccaaagtagatgttagaaaacctaaattaatgaaccatatttttaaaatcctatttttcccaaacagggccctctgcagcccatcctttccttccgtccttctgaaaccacataccccaggcccaagcgccttgctgccacgcccaacctctttgggagaagtatgaatgcgtgtgtctaaattaaaagaaaaaaatatttaaacgttttttaacaaaaatttatttttgtatttaagctaaattgccttttaaattccttcaagcttggttcattgaggtggttaagtataaatgctattaactaggaattagctgtatagttaagttatgcctgtgcaaagaagaggctcaaatgctgtccccggcagctttcctgggggactagagctccttctggccatgttatatgaaatgtaattcttattttataaataatgtgatgtaaatgtaactggtgccccctccccgatgtgactgagggtgagtgagtggtggcggggctgctccttcccacccctcagaacagctctgatcctcgttaatacctggctgcgtgtgcagctgaggagggagtgaacctcaagcctaaatacctgttaggattggagggtctgggtgggcctgggcctagcaatcaagcttctacctgtaccttatgtaaggtagaccctcctagtgtcagtacctgagctagtttacctcagttccgcaggcaggacagccggtccgggaaccctgagtgagaatgagtgtggatgtgtacagtacacgcactggacggcagcgggaggctgggactttccattacaaatagagacttcattcctgttgagtctagttggaatttttagtatgaatgtgagatttttctcctgcttgtgacattaagaataaaaaactgtgatctatcgtag

SEQ ID NO: 352294 - DNA, 6308 bp, Homo sapiens
cgcttgaacccgggaggcagaggttgcagtgagccgagatcgcgccactgtactccagcctggcaacagagcaagactccgtttcaaaacaagatctaagtgggttttcccaagttgagtcagggcatttcccgcagaagcagaatgagcaaaacttgagagccacagaccagcacggcgggtaattcagtgtccgcgtcatcagtggtacatgcctacagccatgtcgaaattgtgtctggagaagcacatgacgcagactctccctgatttacaaggctcttcatcatcaggtccctacttaactctaatttcatctcttgtcttatctattatttagtctgatatcatgcattaattatatatactgtacattgatacacagcatttatttgaaagataaacctcttggatgtgactctggagacaagaccagcagctcgagaccattcaatccaaggtataaaatgggagaaaatcagctccatcatggtctgaattgaggatgaggcagaagagcagagaatagcggatgcccaggtggcagcaacttaactcttttcctgtggacttgcggggtctccccacctccactgcgtcgggacatgccgtgtgccgtctctttatccatagctgcctccggcatcagcagagaaagtcatgggcagatggagccgtggattagttcttttttccagtcttcctttactttatctggataagattgggcagattgaatttgatcttctatactggggccagggagcagggtggatctagaccatgcagcttttccccactgtcaccagtttgggagcagggattggctgccattgtcctgtctagcctccgtgttcctgggacaccgctgactggaggctgctcctcttctaagggagtctggcatagaagacacgacccagagcacatggcaccttctctcttctcctgcaccagtctccttgcccctctgtattgtcatcatactgaagcaaaccatccaactcaccagcgtctctggactcgtttcattgattcctctccctgaaactcttcctcattctccttttagcccttcacatcctcagccgaagatctcacttcctcccagaggcctttgctgactgacccctcagggattgtgggactttaccaaatcggtttgtaataacacctagaagacgctatccgatccatcaggcccagtattcctgtctgggggtacttcccaccgtgtgctggaatggttatcacaagaaggctgtgctgtcccctcgcaactccaggatggtgtgtagcccagtgactgtgaggatcgcccctcctgacagaagattttcgcgttctgcgataccagagcagataatcagctcaacactgtcctcaccatcaagtaacgccccagacccatgtgcaaaggagacagtactgagtgccctcaaagagaaggagaagaaaaggacagtggaggaagaagaccaaatattccttgatggccaggaaaataaaagaaggcgccatgatagcagtggcagtggacattcagcatttgagcccctggtggccaatggagtccccgcttcttttgtgcctaagcctgggtctctgaagagaggcctcaattctcagagctcagatgaccacttgaataagagatcccgaagctcttccatgagctccttgacaggcgcttacgcaagtggcatccctagctccagccgcaatgccattaccagttcctacagctccactcgaggcatctcacagctctggaagagaaatggccccagttcatcacccttctctagcccagcctcctcccgctcccagacaccggagaggccagcaaagaaaataagagaagaggagctgtgtcatcattccagttcttcaactccattggcagcagacagggagtcccagggagaaaaggctgcagatacaaccccaaggaagaaacaaaactcgaattctcagtctacacctggcagctctgggcagcgtaagcggaaagttcagctgctgccttctcggcgaggggaacagctgaccttgcctccacctccccagcttggctattcgatcactgccgaggacctagacttagagaagaaggcttcattacagtggttcaaccaggccttggaggacaagagcgatgctgcctcgaactctgtcactgagaccccacctatcactcagccttcatttacctttaccctgcctgctgctgcacctgcctccccacccacctccctcctggccccaagcaccaacccactgttagagagcttgaagaagatgcagactcccccgagcctgccaccctgcccagaatctgctggagcagcaaccactgaggccctctcacctccaaagacacccagcctcctacccccgctgggtttatcacagtcagggccgccagggctgctccccagcccctcctttgactccaaacccccgaccactttgctggggctgatccctgctccatccatggtaccagccactgacaccaaggcacctccaacccttcaggcagagacggctaccaaaccccaagccacatctgccccgtcccccgcccccaagcaaagcttcctgtttggaacacagaacacctcaccttccagccctgccgcccctgctgcatcttcagcacctcccatgttcaagcccattttcacggctccacccaagagtgagaaggaaggccccacaccgcctggcccttcagtcacagccacagcgccctccagctcctccctccccacgaccaccagcaccacagccccgaccttccagcctgtctttagcagcatggggccacctgcatctgtgcccttgcctgctcccttcttcaagcagacaactactcccgccactgctcccaccacaactgccccgctcttcactggcctggccagcgccacctctgctgtggctcccatcacctctgccagtccatccacagactctgcttcgaagcctgcgtttggctttggcataaacagtgtgagcagcagcagtgtgagtaccacgaccagcaccgccactgccgcctcacagcctttcctcttcggggcgccccaggcctctgctgccagcttcaccccggccatgggctccatattccagtttggcaaacctcctgccttgcccacaaccaccacagtcaccaccttcagccagtccctgcacactgccgtgccaacggccaccagcagcagcgctgccgactttagtggttttggcagcaccctcgccacctccgccccggccaccagcagccagcccactctgacgttcagtaacacgagcacccccacgttcaacattccctttggctcaagcgccaagtccccgctcccatcatatccgggagccaacccccagcccgcatttggggccgctgaggggcagccaccgggggccgccaagccggcccttgcccccagctttggcagctctttcacttttggaaactctgcagccccggctgctgcacccacacctgcacctccgtccatgatcaaggtcgtgcctgcgtacgtgcctacgcccatccatcctatctttggcggtgccacgcactcggcgtttgggttgaaagccacggcttcggccttcggcgctcccgccagctcacagcccgcctttggcggctccactgctgtcttcttcggtgcagccaccagctccggctttggagccaccacccagaccgccagcagcgggagcagcagctcggtgtttggcagcacaacaccatcacccttcacgtttgggggttcggcagcccccgctggcagtgggagctttgggatcaatgtggccaccccaggctccagcaccaccaccggagctttcagctttggagcaggacagagtgggagcacagccacctccacccccttcgcagggggcttaggtcagaacgccctgggcaccaccggccagagcacaccgtttgccttcaacgtgagcagcacaactgagagcaaacctgtgtttggaggcaccgccacccccacctttggtctgaacacccctgcgcctggagtgggcacatcaggcagcagcctctcctttggggcatcctcagcacccgcccaaggctttgttggtgttgcacctttcggatcggcggccctttcattttccattggtgcgggatccaagaccccaggggctcgacagcgactgcaggcccgaaggcagcacacccgcaaaaagtagcctttgtcccctgtccctgttccccccaccccttccctaaatctggaccttggcacctgctaggaagagccttggacccttccagttgcgtaaagcaaacctaccccggatctctggcttcagccgccagggggcagtggcagccctggggccctttcccttctggaggaagcacaagcctcagggaaggggaagcaggatgcggagggccaaagcccgggacctctacttgaacagttctactggggaggctggagaactaaggaaacacctgtacatagtgtccgctgccctgactcccgcttagcacacccttaggcaggcgccccttccacctttccccgagaccgtcgtcgctggagggggcagggtccagcccgcctggatcggtggtgtgcacctgatgggatttgggaaatgggctatccgtaaagctttatcttgcttggcttagctgtgagaagtggttctcttcctctggtcccttctggggactctgtttccccatttcttgctgctgtgtccctcaccagttccttgcaggattccttcgtttttaaatgcccttgaatctagctttgccttggagaccccagtgggtgctgctcctgccgttttcttcctgccaagcctgaatcaatgtttcatctccaaccctctgccagtttggcccctcagagcttggtggctcaagactgttagcctggcagagccaggggtgaagggagaagctcttggagcaggcaggatgcccaccgctgcttcagctgcctcctcgcccagctaccctttggccccattgggccctcgtctgcctctccaggattgtatgtttcaagccttgtcctgtgttcctttgtctgacgctctgtgtattgctctttgaatcgagtttggaggaagagttgagttgtatgagtggcggcatgttggtagtgccggacttcctgtttcaagttttctggggcctcgctaattgaatgtggaaagtagcaccacttgacggctacaagtgccgactcctgaattttcccatggtgttctgacttcaagggctggcagccagggagaatgggcccaggggaagcaaagacctcttccctctgccgtttctgtcccacttaactgacctcactggaggctacatcacccaaagtagatgttagaaaacctaaattaatgaaccatatttttaaaatcctatttttcccaaacagggccctctgcagcccatcctttccttccgtccttctgaaaccacataccccaggcccaagcgccttgctgccacgcccaacctctttgggagaagtatgaatgcgtgtgtctaaattaaaagaaaaaaatatttaaacgttttttaacaaaaatttatttttgtatttaagctaaattgccttttaaattccttcaagcttggttcattgaggtggttaagtataaatgctattaactaggaattagctgtatagttaagttatgcctgtgcaaagaagaggctcaaatgctgtccccggcagctttcctgggggactagagctccttctggccatgttatatgaaatgtaattcttattttataaataatgtgatgtaaatgtaactggtgccccctccccgatgtgactgagggtgagtgagtggtggcggggctgctccttcccacccctcagaacagctctgatcctcgttaatacctggctgcgtgtgcagctgaggagggagtgaacctcaagcctaaatacctgttaggattggagggtctgggtgggcctgggcctagcaatcaagcttctacctgtaccttatgtaaggtagaccctcctagtgtcagtacctgagctagtttacctcagttccgcaggcaggacagccggtccgggaaccctgagtgagaatgagtgtggatgtgtacagtacacgcactggacggcagcgggaggctgggactttccattacaaatagagacttcattcctgttgagtctagttggaatttttagtatgaatgtgagatttttctcctgcttgtgacattaagaataaaaaactgtgatctatcgtag

SEQ ID NO: 352295 - DNA, 5555 bp, Homo sapiens
tcgcacatgcgcgccacctccgcactgccctcgcttcctgcgcctcttcaggtcaccgcttgctctagttcccaggctttggcctctagtggatgagaatcaccgagtctgcggggctggacgctgaccgcccgggccagcacctaggcgggcgggagctgtgcggcccagggttcgcgcgggccgggtagaggctcgagccgggacccccgagcgtgaaccccggagccagcggcgctggggccagaggggccgggcgggaggtggtggcggaggcgaaggggcgacgggacctgggcctggcccgtgtgtgtcctcggcggcctggcgccggccgtcgctgtacggtgagccccagggaggcggatctgggccccgagaaggacacccgcctggatttgccccgtaggcccggcccgggcccctcgggagcagaacagccttggtgaggtggacaggaggggacttcgcgagcagacgcgcgcgccagcgacagcagcccgccccggcctctcgggagccgtggggcagaggctgcagagccccaggagggtctatcagccacagtctctgcaagtttccaagagcagcagaaaatgaacacattgcaggggccagtgtcattcaaagatgtggctgtggatttcacccaggaggagtggtggcaactggaccctgatgagaagataacatacggggatgtgatgttggagaactacagccatctagtttccctggcttatgaggtggcaacatcttgtacttcggagatctgaagccgagcaacttgcccaagtccttcttcttttcccattaacaagatatgatatcaccaagccaaacgtcatcattaagttggagcagggagaggagctgtggataacgggaggtgaatttccatgtcaacatagtccaggtcagactgcagtggtgtaatcatagctcattgaagcctcaaactcctgagctccaggaatcctcccaccacagtctctcaaatacttgggactacagctctggaagagaaatggccccagttcatcacccttctctagcccagcctcctcccgctcccagacaccggagaggccagcaaagaaaataagagaagaggagctgtgtcatcattccagttcttcaactccattggcagcagacagggagtcccagggagaaaaggctgcagatacaaccccaaggaagaaacaaaactcgaattctcagtctacacctggcagctctgggcagcgtaagcggaaagttcagctgctgccttctcggcgaggggaacagctgaccttgcctccacctccccagcttggctattcgatcactgccgaggacctagacttagagaagaaggcttcattacagtggttcaaccaggccttggaggacaagagcgatgctgcctcgaactctgtcactgagaccccacctatcactcagccttcatttacctttaccctgcctgctgctgcacctgcctccccacccacctccctcctggccccaagcaccaacccactgttagagagcttgaagaagatgcagactcccccgagcctgccaccctgcccagaatctgctggagcagcaaccactgaggccctctcacctccaaagacacccagcctcctacccccgctgggtttatcacagtcagggccgccagggctgctccccagcccctcctttgactccaaacccccgaccactttgctggggctgatccctgctccatccatggtaccagccactgacaccaaggcacctccaacccttcaggcagagacggctaccaaaccccaagccacatctgccccgtcccccgcccccaagcaaagcttcctgtttggaacacagaacacctcaccttccagccctgccgcccctgctgcatcttcagcacctcccatgttcaagcccattttcacggctccacccaagagtgagaaggaaggccccacaccgcctggcccttcagtcacagccacagcgccctccagctcctccctccccacgaccaccagcaccacagccccgaccttccagcctgtctttagcagcatggggccacctgcatctgtgcccttgcctgctcccttcttcaagcagacaactactcccgccactgctcccaccacaactgccccgctcttcactggcctggccagcgccacctctgctgtggctcccatcacctctgccagtccatccacagactctgcttcgaagcctgcgtttggctttggcataaacagtgtgagcagcagcagtgtgagtaccacgaccagcaccgccactgccgcctcacagcctttcctcttcggggcgccccaggcctctgctgccagcttcaccccggccatgggctccatattccagtttggcaaacctcctgccttgcccacaaccaccacagtcaccaccttcagccagtccctgcacactgccgtgccaacggccaccagcagcagcgctgccgactttagtggttttggcagcaccctcgccacctccgccccggccaccagcagccagcccactctgacgttcagtaacacgagcacccccacgttcaacattccctttggctcaagcgccaagtccccgctcccatcatatccgggagccaacccccagcccgcatttggggccgctgaggggcagccaccgggggccgccaagccggcccttgcccccagctttggcagctctttcacttttggaaactctgcagccccggctgctgcacccacacctgcacctccgtccatgatcaaggtcgtgcctgcgtacgtgcctacgcccatccatcctatctttggcggtgccacgcactcggcgtttgggttgaaagccacggcttcggccttcggcgctcccgccagctcacagcccgcctttggcggctccactgctgtcttcttcggtgcagccaccagctccggctttggagccaccacccagaccgccagcagcgggagcagcagctcggtgtttggcagcacaacaccatcacccttcacgtttgggggttcggcagcccccgctggcagtgggagctttgggatcaatgtggccaccccaggctccagcaccaccaccggagctttcagctttggagcaggacagagtgggagcacagccacctccacccccttcgcagggggcttaggtcagaacgccctgggcaccaccggccagagcacaccgtttgccttcaacgtgagcagcacaactgagagcaaacctgtgtttggaggcaccgccacccccacctttggtctgaacacccctgcgcctggagtgggcacatcaggcagcagcctctcctttggggcatcctcagcacccgcccaaggctttgttggtgttgcacctttcggatcggcggccctttcattttccattggtgcgggatccaagaccccaggggctcgacagcgactgcaggcccgaaggcagcacacccgcaaaaagtagcctttgtcccctgtccctgttccccccaccccttccctaaatctggaccttggcacctgctaggaagagccttggacccttccagttgcgtaaagcaaacctaccccggatctctggcttcagccgccagggggcagtggcagccctggggccctttcccttctggaggaagcacaagcctcagggaaggggaagcaggatgcggagggccaaagcccgggacctctacttgaacagttctactggggaggctggagaactaaggaaacacctgtacatagtgtccgctgccctgactcccgcttagcacacccttaggcaggcgccccttccacctttccccgagaccgtcgtcgctggagggggcagggtccagcccgcctggatcggtggtgtgcacctgatgggatttgggaaatgggctatccgtaaagctttatcttgcttggcttagctgtgagaagtggttctcttcctctggtcccttctggggactctgtttccccatttcttgctgctgtgtccctcaccagttccttgcaggattccttcgtttttaaatgcccttgaatctagctttgccttggagaccccagtgggtgctgctcctgccgttttcttcctgccaagcctgaatcaatgtttcatctccaaccctctgccagtttggcccctcagagcttggtggctcaagactgttagcctggcagagccaggggtgaagggagaagctcttggagcaggcaggatgcccaccgctgcttcagctgcctcctcgcccagctaccctttggccccattgggccctcgtctgcctctccaggattgtatgtttcaagccttgtcctgtgttcctttgtctgacgctctgtgtattgctctttgaatcgagtttggaggaagagttgagttgtatgagtggcggcatgttggtagtgccggacttcctgtttcaagttttctggggcctcgctaattgaatgtggaaagtagcaccacttgacggctacaagtgccgactcctgaattttcccatggtgttctgacttcaagggctggcagccagggagaatgggcccaggggaagcaaagacctcttccctctgccgtttctgtcccacttaactgacctcactggaggctacatcacccaaagtagatgttagaaaacctaaattaatgaaccatatttttaaaatcctatttttcccaaacagggccctctgcagcccatcctttccttccgtccttctgaaaccacataccccaggcccaagcgccttgctgccacgcccaacctctttgggagaagtatgaatgcgtgtgtctaaattaaaagaaaaaaatatttaaacgttttttaacaaaaatttatttttgtatttaagctaaattgccttttaaattccttcaagcttggttcattgaggtggttaagtataaatgctattaactaggaattagctgtatagttaagttatgcctgtgcaaagaagaggctcaaatgctgtccccggcagctttcctgggggactagagctccttctggccatgttatatgaaatgtaattcttattttataaataatgtgatgtaaatgtaactggtgccccctccccgatgtgactgagggtgagtgagtggtggcggggctgctccttcccacccctcagaacagctctgatcctcgttaatacctggctgcgtgtgcagctgaggagggagtgaacctcaagcctaaatacctgttaggattggagggtctgggtgggcctgggcctagcaatcaagcttctacctgtaccttatgtaaggtagaccctcctagtgtcagtacctgagctagtttacctcagttccgcaggcaggacagccggtccgggaaccctgagtgagaatgagtgtggatgtgtacagtacacgcactggacggcagcgggaggctgggactttccattacaaatagagacttcattcctgttgagtctagttggaatttttagtatgaatgtgagatttttctcctgcttgtgacattaagaataaaaaactgtgatctatcgtag

SEQ ID NO: 352296 - DNA, 9177 bp, Homo sapiens
tcgcacatgcgcgccacctccgcactgccctcgcttcctgcgcctcttcaggtcaccgcttgctctagttcccaggctttggcctctagtggatgagaatcaccgagtctgcggggctggacgctgaccgcccgggccagcacctaggcgggcgggagctgtgcggcccagggttcgcgcgggccgggtagaggctcgagccgggacccccgagcgtgaaccccggagccagcggcgctggggccagaggggccgggcgggaggtggtggcggaggcgaaggggcgacgggacctgggcctggcccgtgtgtgtcctcggcggcctggcgccggccgtcgctgtacggtgagccccagggaggcggatctgggccccgagaaggacacccgcctggatttgccccgtaggcccggcccgggcccctcgggagcagaacagccttggtgaggtggacaggaggggacttcgcgagcagacgcgcgcgccagcgacagcagcccgccccggcctctcgggagccgtggggcagaggctgcagagccccaggagggtctatcagccacagtctctgcaagtttccaagagcagcagaaaatgaacacattgcaggggccagtgtcattcaaagatgtggctgtggatttcacccaggaggagtggtggcaactggaccctgatgagaagataacatacggggatgtgatgttggagaactacagccatctagtttccctggcttatgaggtggcaacatcttgtacttcggagatctgaagccgagcaacttgcccaagtccttcttcttttcccattaacaagatatgatatcaccaagccaaacgtcatcattaagttggagcagggagaggagctgtggataacgggaggtgaatttccatgtcaacatagtccagggattgtgggactttaccaaatcggtttgtaataacacctagaagacgctatccgatccatcaggcccagtattcctgtctgggggtacttcccaccgtgtgctggaatggttatcacaagaaggctgtgctgtcccctcgcaactccaggatggtgtgtagcccagtgactgtgaggatcgcccctcctgacagaagattttcgcgttctgcgataccagagcagataatcagctcaacactgtcctcaccatcaagtaacgccccagacccatgtgcaaaggagacagtactgagtgccctcaaagagaaggagaagaaaaggacagtggaggaagaagaccaaatattccttgatggccaggaaaataaaagaaggcgccatgatagcagtggcagtggacattcagcatttgagcccctggtggccaatggagtccccgcttcttttgtgcctaagcctgggtctctgaagagaggcctcaattctcagagctcagatgaccacttgaataagagatcccgaagctcttccatgagctccttgacaggcgcttacgcaagtggcatccctagctccagccgcaatgccattaccagttcctacagctccactcgaggcatctcacagctctggaagagaaatggccccagttcatcacccttctctagcccagcctcctcccgctcccagacaccggagaggccagcaaagaaaataagagaagaggagctgtgtcatcattccagttcttcaactccattggcagcagacagggagtcccagggagaaaaggctgcagatacaaccccaaggaagaaacaaaactcgaattctcagtctacacctggcagctctgggcagcgtaagcggaaagttcagctgctgccttctcggcgaggggaacagctgaccttgcctccacctccccagcttggctattcgatcactgccgaggacctagacttagagaagaaggcttcattacagtggttcaaccaggccttggaggacaagagcgatgctgcctcgaactctgtcactgagaccccacctatcactcagccttcatttacctttaccctgcctgctgctgcacctgcctccccacccacctccctcctggccccaagcaccaacccactgttagagagcttgaagaagatgcagactcccccgagcctgccaccctgcccagaatctgctggagcagcaaccactgaggccctctcacctccaaagacacccagcctcctacccccgctgggtttatcacagtcagggccgccagggctgctccccagcccctcctttgactccaaacccccgaccactttgctggggctgatccctgctccatccatggtaccagccactgacaccaaggcacctccaacccttcaggcagagacggctaccaaaccccaagccacatctgccccgtcccccgcccccaagcaaagcttcctgtttggaacacagaacacctcaccttccagccctgccgcccctgctgcatcttcagcacctcccatgttcaagcccattttcacggctccacccaagagtgagaaggaaggccccacaccgcctggcccttcagtcacagccacagcgccctccagctcctccctccccacgaccaccagcaccacagccccgaccttccagcctgtctttagcagcatggggccacctgcatctgtgcccttgcctgctcccttcttcaagcagacaactactcccgccactgctcccaccacaactgccccgctcttcactggcctggccagcgccacctctgctgtggctcccatcacctctgccagtccatccacagactctgcttcgaagcctgcgtttggctttggcataaacagtgtgagcagcagcagtgtgagtaccacgaccagcaccgccactgccgcctcacagcctttcctcttcggggcgccccaggcctctgctgccagcttcaccccggccatgggctccatattccagtttggcaaacctcctgccttgcccacaaccaccacagtcaccaccttcagccagtccctgcacactgccgtgccaacggccaccagcagcagcgctgccgactttagtggttttggcagcaccctcgccacctccgccccggccaccagcagccagcccactctgacgttcagtaacacgagcacccccacgttcaacattccctttggctcaagcgccaagtccccgctcccatcatatccgggagccaacccccagcccgcatttggggccgctgaggggcagccaccgggggccgccaagccggcccttgcccccagctttggcagctctttcacttttggaaactctgcagccccggctgctgcacccacacctgcacctccgtccatgatcaaggtcgtgcctgcgtacgtgcctacgcccatccatcctatctttggcggtgccacgcactcggcgtttgggttgaaagccacggcttcggccttcggcgctcccgccagctcacagcccgcctttggcggctccactgctgtcttcttcggtgcagccaccagctccggctttggagccaccacccagaccgccagcagcgggagcagcagctcggtgtttggcagcacaacaccatcacccttcacgtttgggggttcggcagcccccgctggcagtgggagctttgggatcaatgtggccaccccaggctccagcaccaccaccggagctttcagctttggagcaggacagagtgggagcacagccacctccacccccttcgcagggggcttaggtcagaacgccctgggcaccaccggccagagcacaccgtttgccttcaacgtgagcagcacaactgagagcaaacctgtgtttggaggcaccgccacccccacctttggtctgaacacccctgcgcctggagtgggcacatcaggcagcagcctctcctttggggcatcctcagcacccgcccaaggctttgttggtgttgcacctttcggatcggcggccctttcattttccattggtgcgggatccaagaccccaggggctcgacagcgactgcaggcccgaaggcagcacacccgcaaaaagtagcctttgtcccctgtccctgttccccccaccccttccctaaatctggaccttggcacctgctaggaagagccttggacccttccagttgcgtaaagcaaacctaccccggatctctggcttcagccgccagggggcagtggcagccctggggccctttcccttctggaggaagcacaagcctcagggaaggggaagcaggatgcggagggccaaagcccgggacctctacttgaacagttctactggggaggctggagaactaaggaaacacctgtacatagtgtccgctgccctgactcccgcttagcacacccttaggcaggcgccccttccacctttccccgagaccgtcgtcgctggagggggcagggtccagcccgcctggatcggtggtgtgcacctgatgggatttgggaaatgggctatccgtaaagctttatcttgcttggcttagctgtgagaagtggttctcttcctctggtcccttctggggactctgtttccccatttcttgctgctgtgtccctcaccagttccttgcaggattccttcgtttttaaatgcccttgaatctagctttgccttggagaccccagtgggtgctgctcctgccgttttcttcctgccaagcctgaatcaatgtttcatctccaaccctctgccagtttggcccctcagagcttggtggctcaagactgttagcctggcagagccaggggtgaagggagaagctcttggagcaggcaggatgcccaccgctgcttcagctgcctcctcgcccagctaccctttggccccattgggccctcgtctgcctctccaggattgtatgtttcaagccttgtcctgtgttcctttgtctgacgctctgtgtattgctctttgaatcgagtttggaggaagagttgagttgtatgagtggcggcatgttggtagtgccggacttcctgtttcaagttttctggggcctcgctaattgaatgtggaaagtagcaccacttgacggctacaagtgccgactcctgaattttcccatggtgttctgacttcaagggctggcagccagggagaatgggcccaggggaagcaaagacctcttccctctgccgtttctgtcccacttaactgacctcactggaggctacatcacccaaagtagatgttagaaaacctaaattaatgaaccatatttttaaaatcctatttttcccaaacagggccctctgcagcccatcctttccttccgtccttctgaaaccacataccccaggcccaagcgccttgctgccacgcccaacctctttgggagaagtatgaatgcgtgtgtctaaattaaaagaaaaaaatatttaaacgttttttaacaaaaatttatttttgtatttaagctaaattgccttttaaattccttcaagcttggttcattgaggtggttaagtataaatgctattaactaggaattagctgtatagttaagttatgcctgtgcaaagaagaggctcaaatgctgtccccggcagctttcctgggggactagagctccttctggccatgttatatgaaatgtaattcttattttataaataatgtgatgtaaatgtaactggtgccccctccccgatgtgactgagggtgagtgttaatacctggctgcgtgtgcagctgaggagggagtgaacctcaagcctaaatacctgttaggattggagggtctgggtgggcctgggcctagcaatcaagcttctacctgtaccttatgtaaggtagaccctcctagtgtcagtacctgagctagtttacctcagttccgcaggcaggacagccggtccgggaaccctgagtgagaatgagtgtggatgtgtacagtacacgcactggacggcagcgggaggctgggactttccattacaaatagagacttcattcctgttgagtctagttggaatttttagtatgaatgtgagatttttctcctgcttgtgacattaagaataaaaaactgtgatctatcgtagagtacgttctgcattttatttctgcaggcaacacttttgctcaccagcaagaacacagcccgaggaagggacccaataacctttcaaaacgcaaactgctgcctgcggtgagggcccagggtcttccacggagaggacaggcatcttcctttcccaccaggaaggagtgagcccggagcctctgctatgtgcaaggcggtgtgcaagcaccggctgcagctttttgctctcttctttctctttggggctgggctgggtgtgcgttctggtgctgatgctttggcctgtgaggctgagctagagaaatgtagatgttagatgtgccagtaccatcctgcgcctcccaagcatgcccccactcactcacgtcggcatctcgacccgttcaattacagcaacgaagaagccaccgctaagcgtggtcttgggggaagcccggaggcagtgctcggcacccgggaacgtgctcaggcctcggtggggccgggcaggcagggcgggagctagcctgcaagagaaacagccccaatgctgggtaagagagcagttcaccccatccccccctccacgaccctggcgcacgccctgtacctgaaggcgcccgggttctgctgcagcgcatcttgtaccatgtcttcattctcctcctggcagagggagcacatggagtagacgagccgctgcagggaagggaaagtgagcgcgtggcacagggctcgctgctggaaccctgccagggcatgcagacgcaccgggctaggtgtccctgccccgggctcctccagctgtctgctcggcatacctaaggaaaagcgtgtctcggttacacagcttcacaggctgcctcagtcctgaaatcctcgctcctgaaatcctcgcttcacagaggagaacttttgctccagggtcccaagcccattaaagtgtcagaactaagaccaaaacagatgactccaggtctaagctgctgtggacctctgagtccctcagccacgccttctcaccatctcacccgagccactgcaggaaggatccagcaggacatagtggacctcacgatagcgcggatctaagggggagaccgccaggaagtcctcctcagccagctcacagcaggagacgccagcccaggccagcagcgtggccatggatgccagccgcctggcatccaggtcaaaggcaaagatcttcctagggcagagggcagagcaggggtgagctgagcatgcatggagcagctaagggcctgtcacagctgacacagacaaccagaacatgcaggttaagccaggacacacaatattgaaacagcctatatttaaagggcccagggtcagaggtaactggcctggggtctctgccccaagggctaagggatccacatctcacacctgcagtggggaaagcttagcttggggcaaataccgtgaactactttggtgcagcaggaaagagttaagcgaaagtcatcctttcagccttcattacccactgaaaggcacaaaatcaaaccccatgtcctcctcctcctcctgtggcactcacccttggttcttcagaagagcagccaagtgactggtctttattgcctggggtggcacaggcatccatgacatgggagcctggcgggggtccagcagcatggctgggagacagctggcctggcaggcagaacacaggggccgggtaaacagagaccccaggctaggcccttcccgtgcctacacattcttcccttttctattcctcttgcctaccctgtcctgcagaatgaggtgtccggcccggtacagtgggtgttcatgcagatctgtctgggcgggaaacaccagcagctccggcatcaaggggtccaggagaaaatgcttccccttgagggctcgtaagtcatcgaggctgccagggaagaaccattcattcatcatttcctgaatttctccctgccaggccctatttcaacggtccattcatgcaacaaatgttaccacagctatggagaaatcaacagggtgataagggaatccgggatccgcagttgagggaatgggttgtcaagccagacttatgggtcaggagccccctctactgtttaccagcagtgggagcctgggcaagtgattcaatctcaagccccactggcatctctgtaaaatagtaggtgtgaggattcaatgagccaatatatccaagatacttacgtgccacaatttaataaatgttagctattcctgttgaagcataaccttggagaaaggttactttacaggggggtgaggagtggggaagtgagagctgagctcattcttgatggatgaggagttagtcatgtgaggcgcttaggttaaaactacattcactataactcagtaaagcagtcccgcccactctccgacccatgcagaaataggcctagagagtcacatgtctcagttcagaaatctatcgaagtggcagagctggaattcaaacacaagcagccgttctctgctattccaccctggtgtccaagcaacatggtagggcagaaggaagaggatcttacaaagagtaagggaaagggagaggggcagaggctgcttctcagagccaccaaaggacaaaataagacaggtgtgagcccagtggaggaggcacggggcagagaccagccactgttgctggcacgctggtgcacgtagcactgtggcagatggacctggagaggaagcaggagggacagcacaatggagccaagaaaggacttagcatggccgggcgcggtggttcatgcctgtaatcccagcattttgggaggccaaggtgggcagatcacctgaggtcaggagtttgagaccagcctggccaacatggagaaatcccgtctctactaaaaatacaaaattagccaggcatggtgctgcatgcctgcaatcctgtagggaaaagaaagagagatcagactgttactgtgtctgtgtagaaagggaagacataagaaattccattttgacctgtaccttgaacaattggttggctgagatgctgttaatttgtgactttgccccaaatttgagctcacaaaaacatgtgttgtatggaatcaaggtttaaaggatctagggctgtgcaggacatgccttgttaataaaacgtttacaagc

SEQ ID NO: 352297 - DNA, 9158 bp, Homo sapiens
tcgcacatgcgcgccacctccgcactgccctcgcttcctgcgcctcttcaggtcaccgcttgctctagttcccaggctttggcctctagtggatgagaatcaccgagtctgcggggctggacgctgaccgcccgggccagcacctaggcgggcgggagctgtgcggcccagggttcgcgcgggccgggtagaggctcgagccgggacccccgagcgtgaaccccggagccagcggcgctggggccagaggggccgggcgggaggtggtggcggaggcgaaggggcgacgggacctgggcctggcccgtgtgtgtcctcggcggcctggcgccggccgtcgctgtacggtgagccccagggaggcggatctgggccccgagaaggacacccgcctggatttgccccgtaggcccggcccgggcccctcgggagcagaacagccttggtgaggtggacaggaggggacttcgcgagcagacgcgcgcgccagcgacagcagcccgccccggcctctcgggagccgtggggcagaggctgcagagccccaggagggtctatcagccacagtctctgcaagtttccaagagcagcagaaaatgaacacattgcaggggccagtgtcattcaaagatgtggctgtggatttcacccaggaggagtggtggcaactggaccctgatgagaagataacatacggggatgtgatgttggagaactacagccatctagtttccctggcttatgaggtggcaacatcttgtacttcggagatctgaagccgagcaacttgcccaagtccttcttcttttcccattaacaagatatgatatcaccaagccaaacgtcatcattaagttggagcagggagaggagctgtggataacgggaggtgaatttccatgtcaacatagtccagggattgtgggactttaccaaatcggtttgtaataacacctagaagacgctatccgatccatcaggcccagtattcctgtctgggggtacttcccaccgtgtgctggaatggttatcacaagaaggctgtgctgtcccctcgcaactccaggatggtgtgtagcccagtgactgtgaggatcgcccctcctgacagaagattttcgcgttctgcgataccagagcagataatcagctcaacactgtcctcaccatcaagtaacgccccagacccatgtgcaaaggagacagtactgagtgccctcaaagagaaggagaagaaaaggacagtggaggaagaagaccaaatattccttgatggccaggaaaataaaagaaggcgccatgatagcagtggcagtggacattcagcatttgagcccctggtggccaatggagtccccgcttcttttgtgcctaagcctgggtctctgaagagaggcctcaattctcagagctcagatgaccacttgaataagagatcccgaagctcttccatgagctccttgacaggcgcttacgcaagtggcatccctagctccagccgcaatgccattaccagttcctacagctccactcgaggcatctcacagctctggaagagaaatggccccagttcatcacccttctctagcccagcctcctcccgctcccagacaccggagaggccagcaaagaaaataagagaagaggagctgtgtcatcattccagttcttcaactccattggcagcagacagggagtcccagggagaaaaggctgcagatacaaccccaaggaagaaacaaaactcgaattctcagtctacacctggcagctctgggcagcgtaagcggaaagttcagctgctgccttctcggcgaggggaacagctgaccttgcctccacctccccagcttggctattcgatcactgccgaggacctagacttagagaagaaggcttcattacagtggttcaaccaggccttggaggacaagagcgatgctgcctcgaactctgtcactgagaccccacctatcactcagccttcatttacctttaccctgcctgctgctgcacctgcctccccacccacctccctcctggccccaagcaccaacccactgttagagagcttgaagaagatgcagactcccccgagcctgccaccctgcccagaatctgctggagcagcaaccactgaggccctctcacctccaaagacacccagcctcctacccccgctgggtttatcacagtcagggccgccagggctgctccccagcccctcctttgactccaaacccccgaccactttgctggggctgatccctgctccatccatggtaccagccactgacaccaaggcacctccaacccttcaggcagagacggctaccaaaccccaagccacatctgccccgtcccccgcccccaagcaaagcttcctgtttggaacacagaacacctcaccttccagccctgccgcccctgctgcatcttcagcacctcccatgttcaagcccattttcacggctccacccaagagtgagaaggaaggccccacaccgcctggcccttcagtcacagccacagcgccctccagctcctccctccccacgaccaccagcaccacagccccgaccttccagcctgtctttagcagcatggggccacctgcatctgtgcccttgcctgctcccttcttcaagcagacaactactcccgccactgctcccaccacaactgccccgctcttcactggcctggccagcgccacctctgctgtggctcccatcacctctgccagtccatccacagactctgcttcgaagcctgcgtttggctttggcataaacagtgtgagcagcagcagtgtgagtaccacgaccagcaccgccactgccgcctcacagcctttcctcttcggggcgccccaggcctctgctgccagcttcaccccggccatgggctccatattccagtttggcaaacctcctgccttgcccacaaccaccacagtcaccaccttcagccagtccctgcacactgccgtgccaacggccaccagcagcagcgctgccgactttagtggttttggcagcaccctcgccacctccgccccggccaccagcagccagcccactctgacgttcagtaacacgagcacccccacgttcaacattccctttggctcaagcgccaagtccccgctcccatcatatccgggagccaacccccagcccgcatttggggccgctgaggggcagccaccgggggccgccaagccggcccttgcccccagctttggcagctctttcacttttggaaactctgcagccccggctgctgcacccacacctgcacctccgtccatgatcaaggtcgtgcctgcgtacgtgcctacgcccatccatcctatctttggcggtgccacgcactcggcgtttgggttgaaagccacggcttcggccttcggcgctcccgccagctcacagcccgcctttggcggctccactgctgtcttcttcggtgcagccaccagctccggctttggagccaccacccagaccgccagcagcgggagcagcagctcggtgtttggcagcacaacaccatcacccttcacgtttgggggttcggcagcccccgctggcagtgggagctttgggatcaatgtggccaccccaggctccagcaccaccaccggagctttcagctttggagcaggacagagtgggagcacagccacctccacccccttcgcagggggcttaggtcagaacgccctgggcaccaccggccagagcacaccgtttgccttcaacgtgagcagcacaactgagagcaaacctgtgtttggaggcaccgccacccccacctttggtctgaacacccctgcgcctggagtgggcacatcaggcagcagcctctcctttggggcatcctcagcacccgcccaaggctttgttggtgttgcacctttcggatcggcggccctttcattttccattggtgcgggatccaagaccccaggggctcgacagcgactgcaggcccgaaggcagcacacccgcaaaaagtagcctttgtcccctgtccctgttccccccaccccttccctaaatctggaccttggcacctgctaggaagagccttggacccttccagttgcgtaaagcaaacctaccccggatctctggcttcagccgccagggggcagtggcagccctggggccctttcccttctggaggaagcacaagcctcagggaaggggaagcaggatgcggagggccaaagcccgggacctctacttgaacagttctactggggaggctggagaactaaggaaacacctgtacatagtgtccgctgccctgactcccgcttagcacacccttaggcaggcgccccttccacctttccccgagaccgtcgtcgctggagggggcagggtccagcccgcctggatcggtggtgtgcacctgatgggatttgggaaatgggctatccgtaaagctttatcttgcttggcttagctgtgagaagtggttctcttcctctggtcccttctggggactctgtttccccatttcttgctgctgtgtccctcaccagttccttgcaggattccttcgtttttaaatgcccttgaatctagctttgccttggagaccccagtgggtgctgctcctgccgttttcttcctgccaagcctgaatcaatgtttcatctccaaccctctgccagtttggcccctcagagcttggtggctcaagactgttagcctggcagagccaggggtgaagggagaagctcttggagcaggcaggatgcccaccgctgcttcagctgcctcctcgcccagctaccctttggccccattgggccctcgtctgcctctccaggattgtatgtttcaagccttgtcctgtgttcctttgtctgacgctctgtgtattgctctttgaatcgagtttggaggaagagttgagttgtatgagtggcggcatgttggtagtgccggacttcctgtttcaagttttctggggcctcgctaattgaatgtggaaagtagcaccacttgacggctacaagtgccgactcctgaattttcccatggtgttctgacttcaagggctggcagccagggagaatgggcccaggggaagcaaagacctcttccctctgccgtttctgtcccacttaactgacctcactggaggctacatcacccaaagtagatgttagaaaacctaaattaatgaaccatatttttaaaatcctatttttcccaaacagggccctctgcagcccatcctttccttccgtccttctgaaaccacataccccaggcccaagcgccttgctgccacgcccaacctctttgggagaagtatgaatgcgtgtgtctaaattaaaagaaaaaaatatttaaacgttttttaacaaaaatttatttttgtatttaagctaaattgccttttaaattccttcaagcttggttcattgaggtggttaagtataaatgctattaactaggaattagctgtatagttaagttatgcctgtgcaaagaagaggctcaaatgctgtccccggcagctttcctgggggactagagctccttctggccatgttatatgaaatgtaattcttattttataaataatgtgatgtaaatgtaactggtgccccctccccgatgtgactgagggtgagtgagtggtggcggggctgctccttcccacccctcagaacagctctgatcctcgttaatacctggctgcgtgtgcagctgaggagggagtgaacctcaagcctaaatacctgttaggattggagggtctgggtgggcctgggcctagcaatcaagcttctacctgtaccttatgtaaggtagaccctcctagtgtcagtacctgagctagtttacctcagttccgcaggcaggacagccggtccgggaaccctgagtgagaatgagtgtggatgtgtacagtacacgcactggacggcagcgggaggctgggactttccattacaaatagagacttcattcctgttgagtctagttggaatttttagtatgaatgtgagatttttctcctgcttgtgacattaagaataaaaaactgtgatctatcgtagagtacgttctgcattttatttctgcaggcaacacttttgctcaccagcaagaacacagcccgaggaagggacccaataacctttcaaaacgcaaactgctgcctgcggtgagggcccagggtcttccacggagaggacaggcatcttcctttcccaccaggaaggagtgagcccggagcctctgctatgtgcaaggcggtgtgcaagcaccggctgcagctttttgctctcttctttctctttggggctgggctgggtgtgcgttctggtgctgatgctttggcctgtgaggctgaggtcggcatctcgacccgttcaattacagcaacgaagaagccaccgctaagcgtggtcttgggggaagcccggaggcagtgctcggcacccgggaacgtgctcaggcctcggtggggccgggcaggcagggcgggagctagcctgcaagagaaacagccccaatgctgggtaagagagcagttcaccccatccccccctccacgaccctggcgcacgccctgtacctgaaggcgcccgggttctgctgcagcgcatcttgtaccatgtcttcattctcctcctggcagagggagcacatggagtagacgagccgctgcagggaagggaaagtgagcgcgtggcacagggctcgctgctggaaccctgccagggcatgcagacgcaccgggctaggtgtccctgccccgggctcctccagctgtctgctcggcatacctaaggaaaagcgtgtctcggttacacagcttcacaggctgcctcagtcctgaaatcctcgctcctgaaatcctcgcttcacagaggagaacttttgctccagggtcccaagcccattaaagtgtcagaactaagaccaaaacagatgactccaggtctaagctgctgtggacctctgagtccctcagccacgccttctcaccatctcacccgagccactgcaggaaggatccagcaggacatagtggacctcacgatagcgcggatctaagggggagaccgccaggaagtcctcctcagccagctcacagcaggagacgccagcccaggccagcagcgtggccatggatgccagccgcctggcatccaggtcaaaggcaaagatcttcctagggcagagggcagagcaggggtgagctgagcatgcatggagcagctaagggcctgtcacagctgacacagacaaccagaacatgcaggttaagccaggacacacaatattgaaacagcctatatttaaagggcccagggtcagaggtaactggcctggggtctctgccccaagggctaagggatccacatctcacacctgcagtggggaaagcttagcttggggcaaataccgtgaactactttggtgcagcaggaaagagttaagcgaaagtcatcctttcagccttcattacccactgaaaggcacaaaatcaaaccccatgtcctcctcctcctcctgtggcactcacccttggttcttcagaagagcagccaagtgactggtctttattgcctggggtggcacaggcatccatgacatgggagcctggcgggggtccagcagcatggctgggagacagctggcctggcaggcagaacacaggggccgggtaaacagagaccccaggctaggcccttcccgtgcctacacattcttcccttttctattcctcttgcctaccctgtcctgcagaatgaggtgtccggcccggtacagtgggtgttcatgcagatctgtctgggcgggaaacaccagcagctccggcatcaaggggtccaggagaaaatgcttccccttgagggctcgtaagtcatcgaggctgccagggaagaaccattcattcatcatttcctgaatttctccctgccaggccctatttcaacggtccattcatgcaacaaatgttaccacagctatggagaaatcaacagggtgataagggaatccgggatccgcagttgagggaatgggttgtcaagccagacttatgggtcaggagccccctctactgtttaccagcagtgggagcctgggcaagtgattcaatctcaagccccactggcatctctgtaaaatagtaggtgtgaggattcaatgagccaatatatccaagatacttacgtgccacaatttaataaatgttagctattcctgttgaagcataaccttggagaaaggttactttacaggggggtgaggagtggggaagtgagagctgagctcattcttgatggatgaggagttagtcatgtgaggcgcttaggttaaaactacattcactataactcagtaaagcagtcccgcccactctccgacccatgcagaaataggcctagagagtcacatgtctcagttcagaaatctatcgaagtggcagagctggaattcaaacacaagcagccgttctctgctattccaccctggtgtccaagcaacatggtagggcagaaggaagaggatcttacaaagagtaagggaaagggagaggggcagaggctgcttctcagagccaccaaaggacaaaataagacaggtgtgagcccagtggaggaggcacggggcagagaccagccactgttgctggcacgctggtgcacgtagcactgtggcagatggacctggagaggaagcaggagggacagcacaatggagccaagaaaggacttagcatggccgggcgcggtggttcatgcctgtaatcccagcattttgggaggccaaggtgggcagatcacctgaggtcaggagtttgagaccagcctggccaacatggagaaatcccgtctctactaaaaatacaaaattagccaggcatggtgctgcatgcctgcaatcctgtagggaaaagaaagagagatcagactgttactgtgtctgtgtagaaagggaagacataagaaattccattttgacctgtaccttgaacaattggttggctgagatgctgttaatttgtgactttgccccaaatttgagctcacaaaaacatgtgttgtatggaatcaaggtttaaaggatctagggctgtgcaggacatgccttgttaataaaacgtttacaagc

SEQ ID NO: 352298 - DNA, 5713 bp, Homo sapiens
tcgcacatgcgcgccacctccgcactgccctcgcttcctgcgcctcttcaggtcaccgcttgctctagttcccaggctttggcctctagtggatgagaatcaccgagtctgcggggctggacgctgaccgcccgggccagcacctaggcgggcgggagctgtgcggcccagggttcgcgcgggccgggtagaggctcgagccgggacccccgagcgtgaaccccggagccagcggcgctggggccagaggggccgggcgggaggtggtggcggaggcgaaggggcgacgggacctgggcctggcccgtgtgtgtcctcggcggcctggcgccggccgtcgctgtacggtgagccccagggaggcggatctgggccccgagaaggacacccgcctggatttgccccgtaggcccggcccgggcccctcgggagcagaacagccttggtgaggtggacaggaggggacttcgcgagcagacgcgcgcgccagcgacagcagcccgccccggcctctcgggagccgtggggcagaggctgcagagccccaggagggtctatcagccacagtctctgcaagtttccaagagcagcagaaaatgaacacattgcaggggccagtgtcattcaaagatgtggctgtggatttcacccaggaggagtggtggcaactggaccctgatgagaagataacatacggggatgtgatgttggagaactacagccatctagtttccctggcttatgaggtggcaacatcttgtacttcggagatctgaagccgagcaacttgcccaagtccttcttcttttcccattaacaagatatgatatcaccaagccaaacgtcatcattaagttggagcagggagaggagctgtggataacgggaggtgaatttccatgtcaacatagtccagggattgtgggactttaccaaatcggtttgtaataacacctagaagacgctatccgatccatcaggcccagtattcctgtctgggggtacttcccaccgtgtgctggaatggttatcacaagaaggctgtgctgtcccctcgcaactccaggatggtgtgtagcccagtgactgtgaggatcgcccctcctgacagaagattttcgcgttctgcgataccagagcagataatcagctcaacactgtcctcaccatcaagtaacgccccagacccatgtgcaaaggagacagtactgagtgccctcaaagagaaggagaagaaaaggacagtggaggaagaagaccaaatattccttgatggccaggaaaataaaagaaggcgccatgatagcagtggcagtggacattcagcatttgagcccctggtggccaatggagtccccgcttcttttgtgcctaagcctgggtctctgaagagaggcctcaattctcagagctcagatgaccacttgaataagagatcccgaagctcttccatgagctccttgacaggcgcttacgcaagtggcatccctagctccagccgcaatgccattaccagttcctacagctccactcgaggcatctcacagctctggaagagaaatggccccagttcatcacccttctctagcccagcctcctcccgctcccagacaccggagaggccagcaaagaaaataagagaagaggagctgtgtcatcattccagttcttcaactccattggcagcagacagggagtcccagggagaaaaggctgcagatacaaccccaaggaagaaacaaaactcgaattctcagtctacacctggcagctctgggcagcgtaagcggaaagttcagctgctgccttctcggcgaggggaacagctgaccttgcctccacctccccagcttggctattcgatcactgccgaggacctagacttagagaagaaggcttcattacagtggttcaaccaggccttggaggacaagagcgatgctgcctcgaactctgtcactgagaccccacctatcactcagccttcatttacctttaccctgcctgctgctgcacctgcctccccacccacctccctcctggccccaagcaccaacccactgttagagagcttgaagaagatgcagactcccccgagcctgccaccctgcccagaatctgctggagcagcaaccactgaggccctctcacctccaaagacacccagcctcctacccccgctgggtttatcacagtcagggccgccagggctgctccccagcccctcctttgactccaaacccccgaccactttgctggggctgatccctgctccatccatggtaccagccactgacaccaaggcacctccaacccttcaggcagagacggctaccaaaccccaagccacatctgccccgtcccccgcccccaagcaaagcttcctgtttggaacacagaacacctcaccttccagccctgccgcccctgctgcatcttcagcacctcccatgttcaagcccattttcacggctccacccaagagtgagaaggaaggccccacaccgcctggcccttcagtcacagccacagcgccctccagctcctccctccccacgaccaccagcaccacagccccgaccttccagcctgtctttagcagcatggggccacctgcatctgtgcccttgcctgctcccttcttcaagcagacaactactcccgccactgctcccaccacaactgccccgctcttcactggcctggccagcgccacctctgctgtggctcccatcacctctgccagtccatccacagactctgcttcgaagcctgcgtttggctttggcataaacagtgtgagcagcagcagtgtgagtaccacgaccagcaccgccactgccgcctcacagcctttcctcttcggggcgccccaggcctctgctgccagcttcaccccggccatgggctccatattccagtttggcaaacctcctgccttgcccacaaccaccacagtcaccaccttcagccagtccctgcacactgccgtgccaacggccaccagcagcagcgctgccgactttagtggttttggcagcaccctcgccacctccgccccggccaccagcagccagcccactctgacgttcagtaacacgagcacccccacgttcaacattccctttggctcaagcgccaagtccccgctcccatcatatccgggagccaacccccagcccgcatttggggccgctgaggggcagccaccgggggccgccaagccggcccttgcccccagctttggcagctctttcacttttggaaactctgcagccccggctgctgcacccacacctgcacctccgtccatgatcaaggtcgtgcctgcgtacgtgcctacgcccatccatcctatctttggcggtgccacgcactcggcgtttgggttgaaagccacggcttcggccttcggcgctcccgccagctcacagcccgcctttggcggctccactgctgtcttcttcggtgcagccaccagctccggctttggagccaccacccagaccgccagcagcgggagcagcagctcggtgtttggcagcacaacaccatcacccttcacgtttgggggttcggcagcccccgctggcagtgggagctttgggatcaatgtggccaccccaggctccagcaccaccaccggagctttcagctttggagcaggacagagtgggagcacagccacctccacccccttcgcagggggcttaggtcagaacgccctgggcaccaccggccagagcacaccgtttgccttcaacgtgagcagcacaactgagagcaaacctgtgtttggaggcaccgccacccccacctttggtctgaacacccctgcgcctggagtgggcacatcaggcagcagcctctcctttggggcatcctcagcacccgcccaaggctttgttggtgttgcacctttcggatcggcggccctttcattttccattggtgcgggatccaagaccccaggggctcgacagcgactgcaggcccgaaggcagcacacccgcaaaaagtagcctttgtcccctgtccctgttccccccaccccttccctaaatctggaccttggcacctgctaggaagagccttggacccttccagttgcgtaaagcaaacctaccccggatctctggcttcagccgccagggggcagtggcagccctggggccctttcccttctggaggaagcacaagcctcagggaaggggaagcaggatgcggagggccaaagcccgggacctctacttgaacagttctactggggaggctggagaactaaggaaacacctgtacatagtgtccgctgccctgactcccgcttagcacacccttaggcaggcgccccttccacctttccccgagaccgtcgtcgctggagggggcagggtccagcccgcctggatcggtggtgtgcacctgatgggatttgggaaatgggctatccgtaaagctttatcttgcttggcttagctgtgagaagtggttctcttcctctggtcccttctggggactctgtttccccatttcttgctgctgtgtccctcaccagttccttgcaggattccttcgtttttaaatgcccttgaatctagctttgccttggagaccccagtgggtgctgctcctgccgttttcttcctgccaagcctgaatcaatgtttcatctccaaccctctgccagtttggcccctcagagcttggtggctcaagactgttagcctggcagagccaggggtgaagggagaagctcttggagcaggcaggatgcccaccgctgcttcagctgcctcctcgcccagctaccctttggccccattgggccctcgtctgcctctccaggattgtatgtttcaagccttgtcctgtgttcctttgtctgacgctctgtgtattgctctttgaatcgagtttggaggaagagttgagttgtatgagtggcggcatgttggtagtgccggacttcctgtttcaagttttctggggcctcgctaattgaatgtggaaagtagcaccacttgacggctacaagtgccgactcctgaattttcccatggtgttctgacttcaagggctggcagccagggagaatgggcccaggggaagcaaagacctcttccctctgccgtttctgtcccacttaactgacctcactggaggctacatcacccaaagtagatgttagaaaacctaaattaatgaaccatatttttaaaatcctatttttcccaaacagggccctctgcagcccatcctttccttccgtccttctgaaaccacataccccaggcccaagcgccttgctgccacgcccaacctctttgggagaagtatgaatgcgtgtgtctaaattaaaagaaaaaaatatttaaacgttttttaacaaaaatttatttttgtatttaagctaaattgccttttaaattccttcaagcttggttcattgaggtggttaagtataaatgctattaactaggaattagctgtatagttaagttatgcctgtgcaaagaagaggctcaaatgctgtccccggcagctttcctgggggactagagctccttctggccatgttatatgaaatgtaattcttattttataaataatgtgatgtaaatgtaactggtgccccctccccgatgtgactgagggtgagtgttatacttggcagaattgcagctttggagggaaagtactttcagccttaata

SEQ ID NO: 352299 - DNA, 6041 bp, Homo sapiens
tcgcacatgcgcgccacctccgcactgccctcgcttcctgcgcctcttcaggtcaccgcttgctctagttcccaggctttggcctctagtggatgagaatcaccgagtctgcggggctggacgctgaccgcccgggccagcacctaggcgggcgggagctgtgcggcccagggttcgcgcgggccgggtagaggctcgagccgggacccccgagcgtgaaccccggagccagcggcgctggggccagaggggccgggcgggaggtggtggcggaggcgaaggggcgacgggacctgggcctggcccgtgtgtgtcctcggcggcctggcgccggccgtcgctgtacggtgagccccagggaggcggatctgggccccgagaaggacacccgcctggatttgccccgtaggcccggcccgggcccctcgggagcagaacagccttggtgaggtggacaggaggggacttcgcgagcagacgcgcgcgccagcgacagcagcccgccccggcctctcgggagccgtggggcagaggctgcagagccccaggagggtctatcagccacagtctctgcaagtttccaagagcagcagaaaatgaacacattgcaggggccagtgtcattcaaagatgtggctgtggatttcacccaggaggagtggtggcaactggaccctgatgagaagataacatacggggatgtgatgttggagaactacagccatctagtttccctggcttatgaggtggcaacatcttgtacttcggagatctgaagccgagcaacttgcccaagtccttcttcttttcccattaacaagatatgatatcaccaagccaaacgtcatcattaagttggagcagggagaggagctgtggataacgggaggtgaatttccatgtcaacatagtccagggattgtgggactttaccaaatcggtttgtaataacacctagaagacgctatccgatccatcaggcccagtattcctgtctgggggtacttcccaccgtgtgctggaatggttatcacaagaaggctgtgctgtcccctcgcaactccaggatggtgtgtagcccagtgactgtgaggatcgcccctcctgacagaagattttcgcgttctgcgataccagagcagataatcagctcaacactgtcctcaccatcaagtaacgccccagacccatgtgcaaaggagacagtactgagtgccctcaaagagaaggagaagaaaaggacagtggaggaagaagaccaaatattccttgatggccaggaaaataaaagaaggcgccatgatagcagtggcagtggacattcagcatttgagcccctggtggccaatggagtccccgcttcttttgtgcctaagcctgggtctctgaagagaggcctcaattctcagagctcagatgaccacttgaataagagatcccgaagctcttccatgagctccttgacaggcgcttacgcaagtggcatccctagctccagccgcaatgccattaccagttcctacagctccactcgaggcatctcacagctctggaagagaaatggccccagttcatcacccttctctagcccagcctcctcccgctcccagacaccggagaggccagcaaagaaaataagagaagaggagctgtgtcatcattccagttcttcaactccattggcagcagacagggagtcccagggagaaaaggctgcagatacaaccccaaggaagaaacaaaactcgaattctcagtctacacctggcagctctgggcagcgtaagcggaaagttcagctgctgccttctcggcgaggggaacagctgaccttgcctccacctccccagcttggctattcgatcactgccgaggacctagacttagagaagaaggcttcattacagtggttcaaccaggccttggaggacaagagcgatgctgcctcgaactctgtcactgagaccccacctatcactcagccttcatttacctttaccctgcctgctgctgcacctgcctccccacccacctccctcctggccccaagcaccaacccactgttagagagcttgaagaagatgcagactcccccgagcctgccaccctgcccagaatctgctggagcagcaaccactgaggccctctcacctccaaagacacccagcctcctacccccgctgggtttatcacagtcagggccgccagggctgctccccagcccctcctttgactccaaacccccgaccactttgctggggctgatccctgctccatccatggtaccagccactgacaccaaggcacctccaacccttcaggcagagacggctaccaaaccccaagccacatctgccccgtcccccgcccccaagcaaagcttcctgtttggaacacagaacacctcaccttccagccctgccgcccctgctgcatcttcagcacctcccatgttcaagcccattttcacggctccacccaagagtgagaaggaaggccccacaccgcctggcccttcagtcacagccacagcgccctccagctcctccctccccacgaccaccagcaccacagccccgaccttccagcctgtctttagcagcatggggccacctgcatctgtgcccttgcctgctcccttcttcaagcagacaactactcccgccactgctcccaccacaactgccccgctcttcactggcctggccagcgccacctctgctgtggctcccatcacctctgccagtccatccacagactctgcttcgaagcctgcgtttggctttggcataaacagtgtgagcagcagcagtgtgagtaccacgaccagcaccgccactgccgcctcacagcctttcctcttcggggcgccccaggcctctgctgccagcttcaccccggccatgggctccatattccagtttggcaaacctcctgccttgcccacaaccaccacagtcaccaccttcagccagtccctgcacactgccgtgccaacggccaccagcagcagcgctgccgactttagtggttttggcagcaccctcgccacctccgccccggccaccagcagccagcccactctgacgttcagtaacacgagcacccccacgttcaacattccctttggctcaagcgccaagtccccgctcccatcatatccgggagccaacccccagcccgcatttggggccgctgaggggcagccaccgggggccgccaagccggcccttgcccccagctttggcagctctttcacttttggaaactctgcagccccggctgctgcacccacacctgcacctccgtccatgatcaaggtcgtgcctgcgtacgtgcctacgcccatccatcctatctttggcggtgccacgcactcggcgtttgggttgaaagccacggcttcggccttcggcgctcccgccagctcacagcccgcctttggcggctccactgctgtcttcttcggtgcagccaccagctccggctttggagccaccacccagaccgccagcagcgggagcagcagctcggtgtttggcagcacaacaccatcacccttcacgtttgggggttcggcagcccccgctggcagtgggagctttgggatcaatgtggccaccccaggctccagcaccaccaccggagctttcagctttggagcaggacagagtgggagcacagccacctccacccccttcgcagggggcttaggtcagaacgccctgggcaccaccggccagagcacaccgtttgccttcaacgtgagcagcacaactgagagcaaacctgtgtttggaggcaccgccacccccacctttggtctgaacacccctgcgcctggagtgggcacatcaggcagcagcctctcctttggggcatcctcagcacccgcccaaggctttgttggtgttgcacctttcggatcggcggccctttcattttccattggtgcgggatccaagaccccaggggctcgacagcgactgcaggcccgaaggcagcacacccgcaaaaagtagcctttgtcccctgtccctgttccccccaccccttccctaaatctggaccttggcacctgctaggaagagccttggacccttccagttgcgtaaagcaaacctaccccggatctctggcttcagccgccagggggcagtggcagccctggggccctttcccttctggaggaagcacaagcctcagggaaggggaagcaggatgcggagggccaaagcccgggacctctacttgaacagttctactggggaggctggagaactaaggaaacacctgtacatagtgtccgctgccctgactcccgcttagcacacccttaggcagggtccagcccgcctggatcggtggtgtgcacctgatgggatttgggaaatgggctatccgtaaagctttatcttgcttggcttagctgtgagaagtggttctcttcctctggtcccttctggggactctgtttccccatttcttgctgctgtgtccctcaccagttccttgcaggattccttcgtttttaaatgcccttgaatctagctttgccttggagaccccagtgggtgctgctcctgccgttttcttcctgccaagcctgaatcaatgtttcatctccaaccctctgccagtttggcccctcagagcttggtggctcaagactgttagcctggcagagccaggggtgaagggagaagctcttggagcaggcaggatgcccaccgctgcttcagctgcctcctcgcccagctaccctttggccccattgggccctcgtctgcctctccaggattgtatgtttcaagccttgtcctgtgttcctttgtctgacgctctgtgtattgctctttgaatcgagtttggaggaagagttgagttgtatgagtggcggcatgttggtagtgccggacttcctgtttcaagttttctggggcctcgctaattgaatgtggaaagtagcaccacttgacggctacaagtgccgactcctgaattttcccatggtgttctgacttcaagggctggcagccagggagaatgggcccaggggaagcaaagacctcttccctctgccgtttctgtcccacttaactgacctcactggaggctacatcacccaaagtagatgttagaaaacctaaattaatgaaccatatttttaaaatcctatttttcccaaacagggccctctgcagcccatcctttccttccgtccttctgaaaccacataccccaggcccaagcgccttgctgccacgcccaacctctttgggagaagtatgaatgcgtgtgtctaaattaaaagaaaaaaatatttaaacgttttttaacaaaaatttatttttgtatttaagctaaattgccttttaaattccttcaagcttggttcattgaggtggttaagtataaatgctattaactaggaattagctgtatagttaagttatgcctgtgcaaagaagaggctcaaatgctgtccccggcagctttcctgggggactagagctccttctggccatgttatatgaaatgtaattcttattttataaataatgtgatgtaaatgtaactggtgccccctccccgatgtgactgagggtgagtgagtggtggcggggctgctccttcccacccctcagaacagctctgatcctcgttaatacctggctgcgtgtgcagctgaggagggagtgaacctcaagcctaaatacctgttaggattggagggtctgggtgggcctgggcctagcaatcaagcttctacctgtaccttatgtaaggtagaccctcctagtgtcagtacctgagctagtttacctcagttccgcaggcaggacagccggtccgggaaccctgagtgagaatgagtgtggatgtgtacagtacacgcactggacggcagcgggaggctgggactttccattacaaatagagacttcattcctgttgagtctagttggaatttttagtatgaatgtgagatttttctcctgcttgtgacattaagaataaaaaactgtgatctatcgtag

SEQ ID NO: 352300 - DNA, 3551 bp, Homo sapiens
acctcgcgtgtgggtgtgttcgcccccgtttttgttgcctctccctctacgatgggtgatggtctgctcgtgccagcggatgcttctcctgctgtgcgcgccgttgtttcttcccctctcgtcggcgcctggtgtttgtgttgctgctgcggcgcgcttcgtgtcgctgcgcgctgtgtatagataggtcgcgcctcgtttggaggggcgcgccctgttgttccccctacgtcgtgggtgatgtccgttccagtggcgtgtcggccctccggtggagggacatttgtgtgggcgccctgcccccctcgtcttcttttttcttctttttttgtttttctttttctgtttttttttttttttttttttttttttttgttttttttttttttttttttttgtttttttttttagagtacgttctgcattttatttctgcaggcaacacttttgctcaccagcaagaacacagcccgaggaagggacccaataacctttcaaaacgcaaactgctgcctgcggtgagggcccagggtcttccacggagaggacaggcatcttcctttcccaccaggaaggagtgagcccggagcctctgctatgtgcaaggcggtgtgcaagcaccggctgcagctttttgctctcttctttctctttggggctgggctgggtgtgcgttctggtgctgatgctttggcctgtgaggctgagctagagaaatgtagatgttagatgtgccagtaccatcctgcgcctcccaagcatgcccccactcactcacgtcggcatctcgacccgttcaattacagcaacgaagaagccaccgctaagcgtggtcttgggggaagcccggaggcagtgctcggcacccgggaacgtgctcaggcctcggtggggccgggcaggcagggcgggagctagcctgcaagagaaacagccccaatgctgggtaagagagcagttcaccccatccccccctccacgaccctggcgcacgccctgtacctgaaggcgcccgggttctgctgcagcgcatcttgtaccatgtcttcattctcctcctggcagagggagcacatggagtagacgagccgctgcagggaagggaaagtgagcgcgtggcacagggctcgctgctggaaccctgccagggcatgcagacgcaccgggctaggtgtccctgccccgggctcctccagctgtctgctcggcatacctaaggaaaagcgtgtctcggttacacagcttcacaggctgcctcagtcctgaaatcctcgctcctgaaatcctcgcttcacagaggagaacttttgctccagggtcccaagcccattaaagtgtcagaactaagaccaaaacagatgactccaggtctaagctgctgtggacctctgagtccctcagccacgccttctcaccatctcacccgagccactgcaggaaggatccagcaggacatagtggacctcacgatagcgcggatctaagggggagaccgccaggaagtcctcctcagccagctcacagcaggagacgccagcccaggccagcagcgtggccatggatgccagccgcctggcatccaggtcaaaggcaaagatcttcctagggcagagggcagagcaggggtgagctgagcatgcatggagcagctaagggcctgtcacagctgacacagacaaccagaacatgcaggttaagccaggacacacaatattgaaacagcctatatttaaagggcccagggtcagaggtaactggcctggggtctctgccccaagggctaagggatccacatctcacacctgcagtggggaaagcttagcttggggcaaataccgtgaactactttggtgcagcaggaaagagttaagcgaaagtcatcctttcagccttcattacccactgaaaggcacaaaatcaaaccccatgtcctcctcctcctcctgtggcactcacccttggttcttcagaagagcagccaagtgactggtctttattgcctggggtggcacaggcatccatgacatgggagcctggcgggggtccagcagcatggctgggagacagctggcctggcaggcagaacacaggggccgggtaaacagagaccccaggctaggcccttcccgtgcctacacattcttcccttttctattcctcttgcctaccctgtcctgcagaatgaggtgtccggcccggtacagtgggtgttcatgcagatctgtctgggcgggaaacaccagcagctccggcatcaaggggtccaggagaaaatgcttccccttgagggctcgtaagtcatcgaggctgccagggaagaaccattcattcatcatttcctgaatttctccctgccaggccctatttcaacggtccattcatgcaacaaatgttaccacagctatggagaaatcaacagggtgataagggaatccgggatccgcagttgagggaatgggttgtcaagccagacttatgggtcaggagccccctctactgtttaccagcagtgggagcctgggcaagtgattcaatctcaagccccactggcatctctgtaaaatagtaggtgtgaggattcaatgagccaatatatccaagatacttacgtgccacaatttaataaatgttagctattcctgttgaagcataaccttggagaaaggttactttacaggggggtgaggagtggggaagtgagagctgagctcattcttgatggatgaggagttagtcatgtgaggcgcttaggttaaaactacattcactataactcagtaaagcagtcccgcccactctccgacccatgcagaaataggcctagagagtcacatgtctcagttcagaaatctatcgaagtggcagagctggaattcaaacacaagcagccgttctctgctattccaccctggtgtccaagcaacatggtagggcagaaggaagaggatcttacaaagagtaagggaaagggagaggggcagaggctgcttctcagagccaccaaaggacaaaataagacaggtgtgagcccagtggaggaggcacggggcagagaccagccactgttgctggcacgctggtgcacgtagcactgtggcagatggacctggagaggaagcaggagggacagcacaatggagccaagaaaggacttagcatggccgggcgcggtggttcatgcctgtaatcccagcattttgggaggccaaggtgggcagatcacctgaggtcaggagtttgagaccagcctggccaacatggagaaatcccgtctctactaaaaatacaaaattagccaggcatggtgctgcatgcctgcaatcctgtagggaaaagaaagagagatcagactgttactgtgtctgtgtagaaagggaagacataagaaattccattttgacctgtaccttgaacaattggttggctgagatgctgttaatttgtgactttgccccaaatttgagctcacaaaaacatgtgttgtatggaatcaaggtttaaaggatctagggctgtgcaggacatgccttgttaataaaacgtttacaagc

SEQ ID NO: 352301 - DNA, 1197 bp, Homo sapiens
tcgcacatgcgcgccacctccgcactgccctcgcttcctgcgcctcttcaggtcaccgcttgctctagttcccaggctttggcctctagtggatgagaatcaccgagtctgcggggctggacgctgaccgcccgggccagcacctaggcgggcgggagctgtgcggcccagggttcgcgcgggccgggtagaggctcgagccgggacccccgagcgtgaaccccggagccagcggcgctggggccagaggggccgggcgggaggtggtggcggaggcgaaggggcgacgggacctgggcctggcccgtgtgtgtcctcggcggcctggcgccggccgtcgctgtacggtgagccccagggaggcggatctgggccccgagaaggacacccgcctggatttgccccgtaggcccggcccgggcccctcgggagcagaacagccttggtgaggtggacaggaggggacttcgcgagcagacgcgcgcgccagcgacagcagcccgccccggcctctcgggagccgtggggcagaggctgcagagccccaggagggtctatcagccacagtctctgcaagtttccaagagcagcagaaaatgaacacattgcaggggccagtgtcattcaaagatgtggctgtggatttcacccaggaggagtggtggcaactggaccctgatgagaagataacatacggggatgtgatgttggagaactacagccatctagtttccctggcttatgaggtggcaacatcttgtacttcggagatctgaagccgagcaacttgcccaagtccttcttcttttcccattaacaagatatgatatcaccaagccaaacgtcatcattaagttggagcagggagaggagctgtggataacgggaggtgaatttccatgtcaacatagtccagggattgtgggactttaccaaatcggtttgtaataacacctagaagacgctatccgatccatcaggcccagtattcctgtctgggggtacttcccaccgtgtgctgggattgggctatcaatcccaggagaaggaaaacgatacgaaccagacggatgaggaagtgttccatctcctgggattgggctatcttgatagcccaatccctggagatactgcagaaaacaaagccagcaaactccctgtacccttggggtttacgtcctgggattgggctatcaa

SEQ ID NO: 352302 - DNA, 204 bp, Homo sapiens
aggagggtgtgagaaattatttaatacttcagccaagaagcctttctagactaaattgttccttttttcctgacagagaagaggagctgtgtcatcattccagttcttcaactccattggcagcagacagggagtcccagggagaaaagggtaggttgctgagccaggaggaggggctgctgttggtggtggaggtgtttgtgg

SEQ ID NO: 352303 - DNA, 715 bp, Homo sapiens
ttttttttaattgagacaagatcttgctctgtcacccaggctggagtgcagtggcgagatcacaattcactgtagcctccaccttccgggttcaatcaatctgcatgccttggcctcctgagtagctgggactacaggcatataccatcatgcctggctactttttagtagagacgaggttttgccttgttgcctaggctgctctcgaacttctgggctcaagcaatcctccctccttggcctcccgatgtgctgggattacaggcatgaaccacctcacctggcacaggttacatcttttgatgaacacgtggatgcatttcttttgcctgtatgcccaggagtggaaatgcttggtcagagggcagggtgtgttcaacacaattaaaccttacggatgctttcgtggtggttatactaatttagattcccatcagcaatgtcctgagagttctggttgctccatatcctcatcagcacttggtattgccagtctttttcacttaaacttctctggtgtctgaagcggtagctcactgtggttttgtattctccttgctattgtccgaatgtttgagtttctcccaaaaactcatacgttaagacttaatccgctgggtgcagtggctcatgcctgtaatcccagcattttgggaggacgaagtgggcggatcatgaggtcaggagttcgagaccagcctgaccaacatggtga

SEQ ID NO: 352304 - DNA, 819 bp, Homo sapiens
ctcactgctcagtgggcccaggcaattagctcagagacttcacggggcttgccaaggccttgctgagggagcggaaacaggcgcaccgccgtgccagcaggctcaccagccagacgcaagccacgctccaacaggcgtcccagcaggtgctggcgtctgaagcacgcagacaggagctggaggaagctgagcgggtgggtgctgggctgagcgagatggagcagcagatccgggaatcgcgtatctcactggagaaggacatcgagaccttgtcagagctgcttgccaggctggggtcgctggacacccatcaagccccagcccaggccctgaacgagactcagtgggcactagaacgcctgaggctgcagctgggctccccggggtccttgcagaggaaactcagtctgctggagcaggaatcccagcagcaggagctgcagatccagggcttcgagagtgacctcgccgagatccgcgccgacaaacagaacctggaggccattctgcacagcctgcccgagaactgtgccagctggcagtgagggctgcccagatccccggcacacactcccccacctgctgtttacatgacccagggggtgcacactaccccacaggtgtgcccatacagacattccccggagccggctgctgtgaactcgaccccgtgtggatagtcacactccctgccgattctgtctgtggcttcttccctgccagcaggactgagtgtgcgtacccagttcacctggacatgagtgcacactctcacccctgcacatgcataaacgggcacaccccagtgtcaataacata

SEQ ID NO: 352305 - DNA, 606 bp, Homo sapiens
gaggtcaggagttcaagaccagcctggccaacatagtgaaaccccatctctactaaaaatacaaaagaaattcaagtttacatagcatgccaagaaaaataaattgtcatgacttaacattaaacagctatgcaaatttggatcaacacaaaatcaagctagatcataattagaactcgatctgttctttctttaaaatactacaaactactatttaaaaaaaaacacaacaactttacattcagaaatcagacaatctggagataggccactgaatgcgagaaacccaaggcttttgctctgatgctagagttgccctggaatccacacacataggacaaaaggtccagggctcaagttttaaaatccttttgctaagaaaagacatatgcacagtgattgcagtggttgcataccactgaaagaagggggtggggggaggacgtaacattaagaatggttgaaattttgtgtttttctgttaaattacaactaccaaaaagatcacaccaatccaattttagcagcactctccgaattttcacgaataagaaaaccataatttaaagaaaaattctaacctatttcacgacaatttagcaattc

SEQ ID NO: 352306 - DNA, 6604 bp, Homo sapiens
ccccgcaggggaaggcgggtcctggcggccagcgcgcggtccgcgcccaccctagccgacggggccggcagagcgcgcggcgtcggtgcccttgaccatggcggcggctgcgcttctgctggggctggcgctgctggcaccgcgggcggccggcgcgggcatgggcgcgtgctatgacggcgcagggcgcccgcagcgctgcctgccggtgttcgagaacgcggcgtttgggcggctcgcccaggcctcgcacacgtgcggcagcccgcccgaggacttctgtccccacgtgggcgccgcgggcgcgggggctcattgccagcgctgcgacgccgccgacccccagcgccaccacaacgcctcctacctcaccgacttccacagccaggacgagagcacctggtggcagagcccgtccatggccttcggcgtgcagtaccccacctcggtcaacatcaccctccgcctagggaaggcttatgagatcacgtatgtgaggctgaagttccacaccagtcgccctgagagctttgccatctacaagcgcagccgcgccgacggcccatgggagccctaccagttctacagcgcctcctgccagaagacctacggccggcccgagggccagtacctgcgccccggcgaggacgagcgcgtggccttctgcacctctgagttcagcgacatctccccgctgagtggcggcaacgtggccttctccaccctggagggccggcccagcgcctacaacttcgaggagagccctgggctgcaggagtgggtcaccagcaccgaactcctcatctctctagaccggctcaacacgtttggggacgacatcttcaaggaccccaaggtgctccagtcctactattatgccgtgtccgacttctctgtgggcggcaggtgcaagtgcaacgggcatgccagcgagtgcggccccgacgtggcaggccagttggcctgccggtgccagcacaacaccaccggcacagactgtgagcgctgcctgcccttcttccaggaccgcccgtgggcccggggcaccgccgaggctgcccacgagtgtctgccctgcaactgcagtggccgctccgaggaatgcacgtttgatcgggagctcttccgcagcacaggccacggcgggcgctgtcaccactgccgtgaccacacagctgggccacactgtgagcgctgtcaggagaatttctatcactgggacccgcggatgccatgccagccctgtgactgccagtcggcaggctccctacacctccagtgcgatgacacaggcacctgcgcctgcaagcccacagtgactggctggaagtgtgaccgctgtctgcccgggttccactcgctcagtgagggaggctgcagaccctgcacttgcaatcccgctggcagcctggacacctgtgacccccgcagtgggcgctgcccctgcaaagagaatgtggaaggcaacctatgtgacagatgtcgcccggggacctttaacctgcagccccacaatccagctggctgcagcagctgtttctgctatggccactccaaggtgtgcgcgtccactgcccagttccaggtgcatcacatcctcagcgatttccaccagggagccgaaggctggtgggccagaagtgtggggggctctgagcactccccacaatggagcccaaatggggtcctcctgagcccagaagacgaggaggagctcacagcaccagggaagttcctgggagaccagcggttcagctatgggcagcccctcatactgaccttccgggtgccccccggggactccccactccctgtacagctgaggctggaagggacaggcttggccctgtccctgaggcactctagcctgtctggcccccaggatgccagggcatcccagggaggtagagctcaggttccacctgcaggagacctccgaggacgtggcccctccactgccccccttccacttccagcggctcctcgccaacctgaccagcctccgcctccgcgtcagtcccggccccagccctgccggtccagtgttcctgactgaggtccggctcacatccgcccggccagggctttccccgccagcctcctgggtggagatttgttcatgtcccactggctacacgggccagttctgtgaatcctgtgctccgggatacaagagggagatgccacaggggggtccctatgccagctgtgtcccctgcacctgtaaccagcatggcacctgtgaccccaacacagggatctgtgtctgcagccaccataccgagggcccatcctgtgaacgctgtttgccaggtttctatggcaaccctttcgcgggccaagccgacgactgccagccctgtccctgccctggccagtcggcctgtacgaccatcccagagagcggggaggtggtgtgtacccactgccccccgggccagagagggcggcgctgtgaggtctgtgatgatggcttttttggggacccgctggggctctttgggcacccccagccctgccaccagtgccagtgtagcgggaacgtggaccccaatgccgtgggcaactgtgaccccctgtctggccactgcctgcgctgcctgcacaacaccacgggtgaccactgtgagcactgtcaggaaggcttctacgggagcgccctggcccctcgacccgcagacaaatgcatgccttgcagctgtcacccacagggctcggtcagtgagcagatgccctgcgacccagtgacaggccaatgctcctgcctgcctcatgtgactgcacgggactgcagccgctgctaccctggcttcttcgacctccagcctgggaggggctgccggagctgcaagtgtcacccactgggctcccaggaggaccagtgccatcccaagactggacagtgcacctgccgcccaggtgtcacaggccaggcctgtgacaggtgccagctgggtttcttcggcttctccatcaagggctgccgggcctgcaggtgctccccactgggcgctgcctcggcccagtgccacgagaacggcacatgcgtgtgcaggcctggcttcgagggctacaaatgtgaccgctgccacgacaacttcttcctcacggcagacggcacacactgccagcaatgtccgtcctgctacgccctggtgaaggaggaggcagccaagctgaaggccagactgactttgacggaggggtggctccaagggtccgactgtggcagtccctggggaccactagacattctgctgggagaggccccaaggggggacgtctaccagggccatcacctgcttccaggggctcgggaagccttcctggagcagatgatgggcctcgagggtgctgtcaaggccgcccgggagcagctgcagaggctgaacaagggtgcccgctgtgcccaggccggatcccagaagacctgcacccagctggcagacctggaggcagtgctggagtcctcggaagaggagattctgcatgcagctgccattctcgcgtctctggagattcctcaggaaggtcccagtcagccgaccaaatggagccacctggccacagaggcccgtgccctcgccaggagccacagagacaccgccaccaagatcgcagccactgcttggagggccctgctcgcctccaacaccagctacgcgcttctctggaatctgctggagggaagggtggccctagagacccagcgggacctggaggacaggtaccaggaggtccaggcggcccagaaagcactgaggacggctgtggcagaggtgctgcctgaagcggaaagcgtgttggccaccgtgcagcaagttggcgcagatacagccccgtacctggccttgctggcttccccgggagctctgcctcagaagtcccgggctgaagacctgggcctgaaggcgaaggccctggagaagacagttgcatcatggcagcacatggccactgaggctgcccgaaccctccagactgctgcccaggcgacgctacggcaaacagaacccctcacaaaggcgcgatctcggctcactgcaacctttgcctcccagctgcaccaggaggccagagccgccctgacccaggcttcctcatctgtccaggctgcgacagtgactgtcatgggagccaggactctgctggctgatctggaaggaatgaagctgcagtttccccggcccaaggaccaggcggcattgcagaggaaggcagactccgtcagtgacagactccttgcagacacgagaaagaagaccaagcaggcggagaggatgctgggaaacgcggcccctctttcctccagtgccaagaagaagggcagagaagcagaggtgttggccaaggacagtgccaagcttgccaaggccttgctgagggagcggaaacaggcgcaccgccgtgccagcaggctcaccagccagacgcaagccacgctccaacaggcgtcccagcaggtgctggcgtctgaagcacgcagacaggagctggaggaagctgagcgggtgggtgctgggctgagcgagatggagcagcagatccgggaatcgcgtatctcactggagaaggacatcgagaccttgtcagagctgcttgccaggctggggtcgctggacacccatcaagccccagcccaggccctgaacgagactcagtgggcactagaacgcctgaggctgcagctgggctccccggggtccttgcagaggaaactcagtctgctggagcaggaatcccagcagcaggagctgcagatccagggcttcgagagtgacctcgccgagatccgcgccgacaaacagaacctggaggccattctgcacagcctgcccgagaactgtgccagctggcagtgagggctgcccagatccccggcacacactcccccacctgctgtttacatgacccagggggtgcacactaccccacaggtgtgcccatacagacattccccggagccggctgctgtgaactcgaccccgtgtggatagtcacactccctgccgattctgtctgtggcttcttccctgccagcaggactgagtgtgcgtacccagttcacctggacatgagtgcacactctcacccctgcacatgcataaacgggcacaccccagtgtcaataacatacacacgtgagggtgcatgtctgtgtgtatgacccacacgtgttcaagtctaatccatccagtcagcagcttacggtccacacacattacagtccacagctgttgtgagagccacctgtgtgctggacaccctctggatgttgggcaagttgttacatgagatgccctggggtgctacatccactcactccagatagcagggaggtctcagcagatctgcagagatcaagggggtcagcaacagccaaagcccctagtcccagagctggctgccctctgtttcacagcagctccctgacctgtgttgctgcgtgcactccctacagctcgacacagccaggggaccaacaggccaagaaatgcaagatcccgggagggttcttagcagcagaatctgaggcccagagaccctgaggccgtggccaggcctgctagtctggctagagcaaggcccattcctggcgggggtgtcattgccttcaccggacgcttccctctcagggtcctgggactgcaccagatgccctgagggaatggcccaccctggcctgtacccacttcagcctgtgatctatccaaagagccaggcccaaaagcgcctaggtcagggtgctcaggctaccaggagcacgcctctgtgcccccggcaacccagttgacctttaattgacgctttccagacccagccctgcggcaccacttgccatgcgggaggccaccagggtgtgcaagcctggctgccattccagtctgtcctgtctgggaatcgccctgtggccaggcccgcatgctggcctctgcccaggactcctcagcatttcctcttggcatccctcccctctcccagaccctcttccagcagatggcaaggcctcggcattgggaagtcaggcacctctgcgggcccagccccctcccgtggctcccctgacaggggcaggggtagggcagcagcacagaccaattccgttgaacgtggaaataaaggaccctttcactgggaaaaaaaaaaaaaaaaaaaaacaaaaaaaaaaaaaaaaaaaaaaaaaaaaaaaagaaaccacaaacctctttctatatctagaagataataaataaaacaacacaattctttagataaaacaagagatatagcgagcagaaagaaataaaaagtacatcaaacaaacacagagagcaaaaagaaacaaataactaagcagaagaacaaaaacacaaaactagagaataaaaactacaccgaccaatagaaagacagcatacaaaaaagaagaaaaaagacaagaaaggaaatcactatgagcaagaaacaggaatgaagaggcagactgagaggagaggcaacaaaagtgacgacacacacagtaaagaaagctagaacaacacataatgagcacccactaacaaaagaaaaagaacatggagaaaaaaaacacacagaggaaaaaaatagataaacacaaaagaaa

SEQ ID NO: 352307 - DNA, 7427 bp, Homo sapiens
  misc_feature (6180)..(6180): n is a, c, g, or t
  misc_feature (6666)..(6666): n is a, c, g, or t
  misc_feature (7278)..(7278): n is a, c, g, or t
ccccgcaggggaaggcgggtcctggcggccagcgcgcggtccgcgcccaccctagccgacggggccggcagagcgcgcggcgtcggtgcccttgaccatggcggcggctgcgcttctgctggggctggcgctgctggcaccgcgggcggccggcgcgggcatgggcgcgtgctatgacggcgcagggcgcccgcagcgctgcctgccggtgttcgagaacgcggcgtttgggcggctcgcccaggcctcgcacacgtgcggcagcccgcccgaggacttctgtccccacgtgggcgccgcgggcgcgggggctcattgccagcgctgcgacgccgccgacccccagcgccaccacaacgcctcctacctcaccgacttccacagccaggacgagagcacctggtggcagagcccgtccatggccttcggcgtgcagtaccccacctcggtcaacatcaccctccgcctagggaaggcttatgagatcacgtatgtgaggctgaagttccacaccagtcgccctgagagctttgccatctacaagcgcagccgcgccgacggcccatgggagccctaccagttctacagcgcctcctgccagaagacctacggccggcccgagggccagtacctgcgccccggcgaggacgagcgcgtggccttctgcacctctgagttcagcgacatctccccgctgagtggcggcaacgtggccttctccaccctggagggccggcccagcgcctacaacttcgaggagagccctgggctgcaggagtgggtcaccagcaccgaactcctcatctctctagaccggctcaacacgtttggggacgacatcttcaaggaccccaaggtgctccagtcctactattatgccgtgtccgacttctctgtgggcggcaggtgcaagtgcaacgggcatgccagcgagtgcggccccgacgtggcaggccagttggcctgccggtgccagcacaacaccaccggcacagactgtgagcgctgcctgcccttcttccaggaccgcccgtgggcccggggcaccgccgaggctgcccacgagtgtctgccctgcaactgcagtggccgctccgaggaatgcacgtttgatcgggagctcttccgcagcacaggccacggcgggcgctgtcaccactgccgtgaccacacagctgggccacactgtgagcgctgtcaggagaatttctatcactgggacccgcggatgccatgccagccctgtgactgccagtcggcaggctccctacacctccagtgcgatgacacaggcacctgcgcctgcaagcccacagtgactggctggaagtgtgaccgctgtctgcccgggttccactcgctcagtgagggaggctgcagaccctgcacttgcaatcccgctggcagcctggacacctgtgacccccgcagtgggcgctgcccctgcaaagagaatgtggaaggcaacctatgtgacagatgtcgcccggggacctttaacctgcagccccacaatccagctggctgcagcagctgtttctgctatggccactccaaggtgtgcgcgtccactgcccagttccaggtgcatcacatcctcagcgatttccaccagggagccgaaggctggtgggccagaagtgtggggggctctgagcactccccacaatggagcccaaatggggtcctcctgagcccagaagacgaggaggagctcacagcaccagggaagttcctgggagaccagcggttcagctatgggcagcccctcatactgaccttccgggtgccccccggggactccccactccctgtacagctgaggctggaagggacaggcttggccctgtccctgaggcactctagcctgtctggcccccaggatgccagggcatcccagggaggtagagctcaggttccacctgcaggagacctccgaggacgtggcccctccactgccccccttccacttccagcggctcctcgccaacctgaccagcctccgcctccgcgtcagtcccggccccagccctgccggtccagtgttcctgactgaggtccggctcacatccgcccggccagggctttccccgccagcctcctgggtggagatttgttcatgtcccactggctacacgggccagttctgtgaatcctgtgctccgggatacaagagggagatgccacaggggggtccctatgccagctgtgtcccctgcacctgtaaccagcatggcacctgtgaccccaacacagggatctgtgtctgcagccaccataccgagggcccatcctgtgaacgctgtttgccaggtttctatggcaaccctttcgcgggccaagccgacgactgccagccctgtccctgccctggccagtcggcctgtacgaccatcccagagagcggggaggtggtgtgtacccactgccccccgggccagagagggcggcgctgtgaggtctgtgatgatggcttttttggggacccgctggggctctttgggcacccccagccctgccaccagtgccagtgtagcgggaacgtggaccccaatgccgtgggcaactgtgaccccctgtctggccactgcctgcgctgcctgcacaacaccacgggtgaccactgtgagcactgtcaggaaggcttctacgggagcgccctggcccctcgacccgcagacaaatgcatgccttgcagctgtcacccacagggctcggtcagtgagcagatgccctgcgacccagtgacaggccaatgctcctgcctgcctcatgtgactgcacgggactgcagccgctgctaccctggcttcttcgacctccagcctgggaggggctgccggagctgcaagtgtcacccactgggctcccaggaggaccagtgccatcccaagactggacagtgcacctgccgcccaggtgtcacaggccaggcctgtgacaggtgccagctgggtttcttcggcttctccatcaagggctgccgggcctgcaggtgctccccactgggcgctgcctcggcccagtgccacgagaacggcacatgcgtgtgcaggcctggcttcgagggctacaaatgtgaccgctgccacgacaacttcttcctcacggcagacggcacacactgccagcaatgtccgtcctgctacgccctggtgaaggaggaggcagccaagctgaaggccagactgactttgacggaggggtggctccaagggtccgactgtggcagtccctggggaccactagacattctgctgggagaggccccaaggggggacgtctaccagggccatcacctgcttccaggggctcgggaagccttcctggagcagatgatgggcctcgagggtgctgtcaaggccgcccgggagcagctgcagaggctgaacaagggtgcccgctgtgcccaggccggatcccagaagacctgcacccagctggcagacctggaggcagtgctggagtcctcggaagaggagattctgcatgcagctgccattctcgcgtctctggagattcctcaggaaggtcccagtcagccgaccaaatggagccacctggccacagaggcccgtgccctcgccaggagccacagagacaccgccaccaagatcgcagccactgcttggagggccctgctcgcctccaacaccagctacgcgcttctctggaatctgctggagggaagggtggccctagagacccagcgggacctggaggacaggtaccaggaggtccaggcggcccagaaagcactgaggacggctgtggcagaggtgctgcctgaagcggaaagcgtgttggccaccgtgcagcaagttggcgcagatacagccccgtacctggccttgctggcttccccgggagctctgcctcagaagtcccgggctgaagacctgggcctgaaggcgaaggccctggagaagacagttgcatcatggcagcacatggccactgaggctgcccgaaccctccagactgctgcccaggcgacgctacggcaaacagaacccctcacaaagctgcaccaggaggccagagccgccctgacccaggcttcctcatctgtccaggctgcgacagtgactgtcatgggagccaggactctgctggctgatctggaagcgagaaagaagaccaagcaggcggagaggatgctgggaaacgcggcccctctttcctccagtgccaagaagaagggcagagaagcagaggtgttggccaaggacagtgccaagcttgccaaggccttgctgagggagcggaaacaggcgcaccgccgtgccagcaggctcaccagccagacgcaagccacgctccaacaggcgtcccagcaggtgctggcgtctgaagcacgcagacaggagctggaggaagctgagcgggtgggtgctgggctgagcgagatggagcagcagatccgggaatcgcgtatctcactggagaaggacatcgagaccttgtcagagctgcttgccaggctggggtcgctggacacccatcaagccccagcccaggccctgaacgagactcagtgggcactagaacgcctgaggctgcagctgggctccccggggtccttgcagaggaaactcagtctgctggagcaggaatcccagcagcaggagctgcagatccagggcttcgagagtgacctcgccgagatccgcgccgacaaacagaacctggaggccattctgcacagcctgcccgagaactgtgccagctggcagtgagggctgcccagatccccggcacacactcccccacctgctgtttacatgacccagggggtgcacactaccccacaggtgtgcccatacagacattccccggagccggctgctgtgaactcgaccccgtgtggatagtcacactccctgccgattctgtctgtggcttcttccctgccagcaggactgagtgtgcgtacccagttcacctggacatgagtgcacactctcacccctgcacatgcataaacgggcacaccccagtgtcaataacatacacacgtgagggtgcatgtctgtgtgtatgacccacacgtgttcaagtctaatccatccagtcagcagcttacggtccacacacattacagtccacagctgttgtgagagccacctgtgtgctggacaccctctggatgttgggcaagttgttacatgagatgccctggggtgctacatccactcactccagatagcagggaggtctcagcagatctgcagagatcaagggggtcagcaacagccaaagcccctagtcccagagctggctgccctctgtttcacagcagctccctgacctgtgttgctgcgtgcactccctacagctcgacacagccaggggaccaacaggccaagaaatgcaagatcccgggagggttcttagcagcagaatctgaggcccagagaccctgaggccgtggccaggcctgctagtctggctagagcaaggcccattcctggcgggggtgtcattgccttcaccggacgcttccctctcagggtcctgggactgcaccagatgccctgagggaatggcccaccctggcctgtacccacttcagcctgtgatctatccaaagagccaggcccaaaagcgcctaggtcagggtgctcaggctaccaggagcacgcctctgtgcccccggcaacccagttgacctttaattgacgctttccagacccagccctgcggcaccacttgccatgcgggaggccaccagggtgtgcaagcctggctgccattccagtctgtcctgtctgggaatcgccctgtggccaggcccgcatgctggcctctgcccaggactcctcagcatttcctcttggcatccctcccctctcccagaccctcttccagcagatggcaaggcctcggcattgggaagtcaggcacctctgcgggcccagccccctcccgtggctcccctgacaggggcaggggtagggcagcagcacagaccaattccgttgaacgtggaaataaaggaccctttcactgggcagggtggtgtgcctcaccctccccggctggtgggcagccagggccctggctgtgggtgtgcatatgacacacctagtaggtggccagcatgtggaccggacgttggtaggaaggtggcaaaagccgagctcgtggctgggccagtacctcccattagagggcttngctggggttgtgtgatcacaggtacctaccctgtcctctcaggcacttaccacgtaaagcctaggagctggtgagttggaggggtggggtgcggagaggccctcagctgacctctggttcaggctcgagacgaactcacagccaagtgtccgaggatggtgaggagcagggaggggcgccatccaggagggggatggtgtgggtggggccttgaagggtggggaggcagagaaggaagcattccaggcaagagggtggacaacagtccggggcccgcagggttggggctcggccagcttgcatcactccaggaccccaggttgaatggggtgggatgttggagctgctcagtcagggctcttggccgcaggcctcaaacccctcctgaggtggtttcagcagaaaaggggtgttgggagggtcgcttggaaccctggagtaaaaacggctgccacgtgttggagatagcctagggaggggagcctnaggcttccgggataggttggcttccctcttcccccctcccgcctctcttcttggtctgtgtctctgctctcctctcctgtatctgcttcgttcttttctctttatttattgattttttttgagatggagtctcgctctgttgcccaggctggagtgcagtggcatgatctctgcccactgcatcctccacctcccaggtttaagcaattctcctgcctcagcctcccgagtagctaggactacaggtgcttgccaccatgcccagctaattttggtatttttagtagagacagggtttcaccacgttggtcaggctggtctcaaactcctgacctcagatgatatacctgcattggcctcttaaagttctgggatttcaggcatgagccactgcaaccggcccattcttttctctttgcagagtggctttctttgtttttcttgtgcctgataggagaggacacccacccctaccgccatcccccataatggccccaggtgtacatgtcatcaggtccagtgcttgcaagagacaagctggtgactctgtcctgattccagcttctcagcttaggtgaagtcccaccaacccccgttcaggataatgagganctctggatctaaggccaataatggatgaccggtgccaccccccaacctaatgggagatggtgttcagagaagaggtgtgctcctccacagaaaactgtaaaatcaaggctacggtgggggattgacatgattaaactgagctaggagtg

SEQ ID NO: 352308 - DNA, 6568 bp, Homo sapiens
ccccgcaggggaaggcgggtcctggcggccagcgcgcggtccgcgcccaccctagccgacggggccggcagagcgcgcggcgtcggtgcccttgaccatggcggcggctgcgcttctgctggggctggcgctgctggcaccgcgggcggccggcgcgggcatgggcgcgtgctatgacggcgcagggcgcccgcagcgctgcctgccggtgttcgagaacgcggcgtttgggcggctcgcccaggcctcgcacacgtgcggcagcccgcccgaggacttctgtccccacgtgggcgccgcgggcgcgggggctcattgccagcgctgcgacgccgccgacccccagcgccaccacaacgcctcctacctcaccgacttccacagccaggacgagagcacctggtggcagagcccgtccatggccttcggcgtgcagtaccccacctcggtcaacatcaccctccgcctagggaaggcttatgagatcacgtatgtgaggctgaagttccacaccagtcgccctgagagctttgccatctacaagcgcagccgcgccgacggcccatgggagccctaccagttctacagcgcctcctgccagaagacctacggccggcccgagggccagtacctgcgccccggcgaggacgagcgcgtggccttctgcacctctgagttcagcgacatctccccgctgagtggcggcaacgtggccttctccaccctggagggccggcccagcgcctacaacttcgaggagagccctgggctgcaggagtgggtcaccagcaccgaactcctcatctctctagaccggctcaacacgtttggggacgacatcttcaaggaccccaaggtgctccagtcctactattatgccgtgtccgacttctctgtgggcggcaggtgcaagtgcaacgggcatgccagcgagtgcggccccgacgtggcaggccagttggcctgccggtgccagcacaacaccaccggcacagactgtgagcgctgcctgcccttcttccaggaccgcccgtgggcccggggcaccgccgaggctgcccacgagtgtctgccctgcaactgcagtggccgctccgaggaatgcacgtttgatcgggagctcttccgcagcacaggccacggcgggcgctgtcaccactgccgtgaccacacagctgggccacactgtgagcgctgtcaggagaatttctatcactgggacccgcggatgccatgccagccctgtgactgccagtcggcaggctccctacacctccagtgcgatgacacaggcacctgcgcctgcaagcccacagtgactggctggaagtgtgaccgctgtctgcccgggttccactcgctcagtgagggaggctgcagaccctgcacttgcaatcccgctggcagcctggacacctgtgacccccgcagtgggcgctgcccctgcaaagagaatgtggaaggcaacctatgtgacagatgtcgcccggggacctttaacctgcagccccacaatccagctggctgcagcagctgtttctgctatggccactccaaggtgtgcgcgtccactgcccagttccaggtgcatcacatcctcagcgatttccaccagggagccgaaggctggtgggccagaagtgtggggggctctgagcactccccacaatggagcccaaatggggtcctcctgagcccagaagacgaggaggagctcacagcaccagggaagttcctgggagaccagcggttcagctatgggcagcccctcatactgaccttccgggtgccccccggggactccccactccctgtacagctgaggctggaagggacaggcttggccctgtccctgaggcactctagcctgtctggcccccaggatgccagggcatcccagggaggtagagctcaggttccacctgcaggagacctccgaggacgtggcccctccactgccccccttccacttccagcggctcctcgccaacctgaccagcctccgcctccgcgtcagtcccggccccagccctgccggtccagtgttcctgactgaggtccggctcacatccgcccggccagggctttccccgccagcctcctgggtggagatttgttcatgtcccactggctacacgggccagttctgtgaatcctgtgctccgggatacaagagggagatgccacaggggggtccctatgccagctgtgtcccctgcacctgtaaccagcatggcacctgtgaccccaacacagggatctgtgtctgcagccaccataccgagggcccatcctgtgaacgctgtttgccaggtttctatggcaaccctttcgcgggccaagccgacgactgccagccctgtccctgccctggccagtcggcctgtacgaccatcccagagagcggggaggtggtgtgtacccactgccccccgggccagagagggcggcgctgtgaggtctgtgatgatggcttttttggggacccgctggggctctttgggcacccccagccctgccaccagtgccagtgtagcgggaacgtggaccccaatgccgtgggcaactgtgaccccctgtctggccactgcctgcgctgcctgcacaacaccacgggtgaccactgtgagcactgtcaggaaggcttctacgggagcgccctggcccctcgacccgcagacaaatgcatgccttgcagctgtcacccacagggctcggtcagtgagcagatgccctgcgacccagtgacaggccaatgctcctgcctgcctcatgtgactgcacgggactgcagccgctgctaccctggcttcttcgacctccagcctgggaggggctgccggagctgcaagtgtcacccactgggctcccaggaggaccagtgccatcccaagactggacagtgcacctgccgcccaggtgtcacaggccaggcctgtgacaggtgccagctgggtttcttcggcttctccatcaagggctgccgggcctgcaggtgctccccactgggcgctgcctcggcccagtgccacgagaacggcacatgcgtgtgcaggcctggcttcgagggctacaaatgtgaccgctgccacgacaacttcttcctcacggcagacggcacacactgccagcaatgtccgtcctgctacgccctggtgaaggaggaggcagccaagctgaaggccagactgactttgacggaggggtggctccaagggtccgactgtggcagtccctggggaccactagacattctgctgggagaggccccaaggggggacgtctaccagggccatcacctgcttccaggggctcgggaagccttcctggagcagatgatgggcctcgagggtgctgtcaaggccgcccgggagcagctgcagaggctgaacaagggtgcccgctgtgcccaggccggatcccagaagacctgcacccagctggcagacctggaggcagtgctggagtcctcggaagaggagattctgcatgcagctgccattctcgcgtctctggagattcctcaggaaggtcccagtcagccgaccaaatggagccacctggccacagaggcccgtgccctcgccaggagccacagagacaccgccaccaagatcgcagccactgcttggagggccctgctcgcctccaacaccagctacgcgcttctctggaatctgctggagggaagggtggccctagagacccagcgggacctggaggacaggtaccaggaggtccaggcggcccagaaagcactgaggacggctgtggcagaggtgctgcctgaagcggaaagcgtgttggccaccgtgcagcaagttggcgcagatacagccccgtacctggccttgctggcttccccgggagctctgcctcagaagtcccgggctgaagacctgggcctgaaggcgaaggccctggagaagacagttgcatcatggcagcacatggccactgaggctgcccgaaccctccagactgctgcccaggcgacgctacggcaaacagaacccctcacaaagctgcaccaggaggccagagccgccctgacccaggcttcctcatctgtccaggctgcgacagtgactgtcatgggagccaggactctgctggctgatctggaaggaatgaagctgcagtttccccggcccaaggaccaggcggcattgcagaggaaggcagactccgtcagtgacagactccttgcagacacgagaaagaagaccaagcaggcggagaggatgctgggaaacgcggcccctctttcctccagtgccaagaagaagggcagagaagcagaggtgttggccaaggacagtgccaagcttgccaaggccttgctgagggagcggaaacaggcgcaccgccgtgccagcaggctcaccagccagacgcaagccacgctccaacaggcgtcccagcaggtgctggcgtctgaagcacgcagacaggagctggaggaagctgagcgggtgggtgctgggctgagcgagatggagcagcagatccgggaatcgcgtatctcactggagaaggacatcgagaccttgtcagagctgcttgccaggctggggtcgctggacacccatcaagccccagcccaggccctgaacgagactcagtgggcactagaacgcctgaggctgcagctgggctccccggggtccttgcagaggaaactcagtctgctggagcaggaatcccagcagcaggagctgcagatccagggcttcgagagtgacctcgccgagatccgcgccgacaaacagaacctggaggccattctgcacagcctgcccgagaactgtgccagctggcagtgagggctgcccagatccccggcacacactcccccacctgctgtttacatgacccagggggtgcacactaccccacaggtgtgcccatacagacattccccggagccggctgctgtgaactcgaccccgtgtggatagtcacactccctgccgattctgtctgtggcttcttccctgccagcaggactgagtgtgcgtacccagttcacctggacatgagtgcacactctcacccctgcacatgcataaacgggcacaccccagtgtcaataacatacacacgtgagggtgcatgtctgtgtgtatgacccacacgtgttcaagtctaatccatccagtcagcagcttacggtccacacacattacagtccacagctgttgtgagagccacctgtgtgctggacaccctctggatgttgggcaagttgttacatgagatgccctggggtgctacatccactcactccagatagcagggaggtctcagcagatctgcagagatcaagggggtcagcaacagccaaagcccctagtcccagagctggctgccctctgtttcacagcagctccctgacctgtgttgctgcgtgcactccctacagctcgacacagccaggggaccaacaggccaagaaatgcaagatcccgggagggttcttagcagcagaatctgaggcccagagaccctgaggccgtggccaggcctgctagtctggctagagcaaggcccattcctggcgggggtgtcattgccttcaccggacgcttccctctcagggtcctgggactgcaccagatgccctgagggaatggcccaccctggcctgtacccacttcagcctgtgatctatccaaagagccaggcccaaaagcgcctaggtcagggtgctcaggctaccaggagcacgcctctgtgcccccggcaacccagttgacctttaattgacgctttccagacccagccctgcggcaccacttgccatgcgggaggccaccagggtgtgcaagcctggctgccattccagtctgtcctgtctgggaatcgccctgtggccaggcccgcatgctggcctctgcccaggactcctcagcatttcctcttggcatccctcccctctcccagaccctcttccagcagatggcaaggcctcggcattgggaagtcaggcacctctgcgggcccagccccctcccgtggctcccctgacaggggcaggggtagggcagcagcacagaccaattccgttgaacgtggaaataaaggaccctttcactgggaaaaaaaaaaaaaaaaaaaaacaaaaaaaaaaaaaaaaaaaaaaaaaaaaaaaagaaaccacaaacctctttctatatctagaagataataaataaaacaacacaattctttagataaaacaagagatatagcgagcagaaagaaataaaaagtacatcaaacaaacacagagagcaaaaagaaacaaataactaagcagaagaacaaaaacacaaaactagagaataaaaactacaccgaccaatagaaagacagcatacaaaaaagaagaaaaaagacaagaaaggaaatcactatgagcaagaaacaggaatgaagaggcagactgagaggagaggcaacaaaagtgacgacacacacagtaaagaaagctagaacaacacataatgagcacccactaacaaaagaaaaagaacatggagaaaaaaaacacacagaggaaaaaaatagataaacacaaaagaaa

SEQ ID NO: 352309 - DNA, 5100 bp, Homo sapiens
ccccgcaggggaaggcgggtcctggcggccagcgcgcggtccgcgcccaccctagccgacggggccggcagagcgcgcggcgtcggtgcccttgaccatggcggcggctgcgcttctgctggggctggcgctgctggcaccgcgggcggccggcgcgggcatgggcgcgtgctatgacggcgcagggcgcccgcagcgctgcctgccggtgttcgagaacgcggcgtttgggcggctcgcccaggcctcgcacacgtgcggcagcccgcccgaggacttctgtccccacgtgggcgccgcgggcgcgggggctcattgccagcgctgcgacgccgccgacccccagcgccaccacaacgcctcctacctcaccgacttccacagccaggacgagagcacctggtggcagagcccgtccatggccttcggcgtgcagtaccccacctcggtcaacatcaccctccgcctagggaaggcttatgagatcacgtatgtgaggctgaagttccacaccagtcgccctgagagctttgccatctacaagcgcagccgcgccgacggcccatgggagccctaccagttctacagcgcctcctgccagaagacctacggccggcccgagggccagtacctgcgccccggcgaggacgagcgcgtggccttctgcacctctgagttcagcgacatctccccgctgagtggcggcaacgtggccttctccaccctggagggccggcccagcgcctacaacttcgaggagagccctgggctgcaggagtgggtcaccagcaccgaactcctcatctctctagaccggctcaacacgtttggggacgacatcttcaaggaccccaaggtgctccagtcctactattatgccgtgtccgacttctctgtgggcggcaggtgcaagtgcaacgggcatgccagcgagtgcggccccgacgtggcaggccagttggcctgccggtgccagcacaacaccaccggcacagactgtgagcgctgcctgcccttcttccaggaccgcccgtgggcccggggcaccgccgaggctgcccacgagtgtctgccctgcaactgcagtggccgctccgaggaatgcacgtttgatcgggagctcttccgcagcacaggccacggcgggcgctgtcaccactgccgtgaccacacagctgggccacactgtgagcgctgtcaggagaatttctatcactgggacccgcggatgccatgccagccctgtgactgccagtcggcaggctccctacacctccagtgcgatgacacaggcacctgcgcctgcaagcccacagtgactggctggaagtgtgaccgctgtctgcccgggttccactcgctcagtgagggaggctgcagaccctgcacttgcaatcccgctggcagcctggacacctgtgacccccgcagtgggcgctgcccctgcaaagagaatgtggaaggcaacctatgtgacagatgtcgcccggggacctttaacctgcagccccacaatccagctggctgcagcagctgtttctgctatggccactccaaggtgtgcgcgtccactgcccagttccaggtgcatcacatcctcagcgatttccaccagggagccgaaggctggtgggccagaagtgtggggggctctgagcactccccacaatggagcccaaatggggtcctcctgagcccagaagacgaggaggagctcacagcaccagggaagttcctgggagaccagcggttcagctatgggcagcccctcatactgaccttccgggtgccccccggggactccccactccctgtacagctgaggctggaagggacaggcttggccctgtccctgaggcactctagcctgtctggcccccaggatgccagggcatcccagggaggtagagctcaggttccacctgcaggagacctccgaggacgtggcccctccactgccccccttccacttccagcggctcctcgccaacctgaccagcctccgcctccgcgtcagtcccggccccagccctgccggtccagtgttcctgactgaggtccggctcacatccgcccggccagggctttccccgccagcctcctgggtggagatttgttcatgtcccactggctacacgggccagttctgtgaatcctgtgctccgggatacaagagggagatgccacaggggggtccctatgccagctgtgtcccctgcacctgtaaccagcatggcacctgtgaccccaacacagggatctgtgtctgcagccaccataccgagggcccatcctgtgaacgctgtttgccaggtttctatggcaaccctttcgcgggccaagccgacgactgccagccctgtccctgccctggccagtcggcctgtacgaccatcccagagagcggggaggtggtgtgtacccactgccccccgggccagagagggcggcgctgtgaggtctgtgatgatggcttttttggggacccgctggggctctttgggcacccccagccctgccaccagtgccagtgtagcgggaacgtggaccccaatgccgtgggcaactgtgaccccctgtctggccactgcctgcgctgcctgcacaacaccacgggtgaccactgtgagcactgtcaggaaggcttctacgggagcgccctggcccctcgacccgcagacaaatgcatgccttgcagctgtcacccacagggctcggtcagtgagcagatgccctgcgacccagtgacaggccaatgctcctgcctgcctcatgtgactgcacgggactgcagccgctgctaccctggcttcttcgacctccagcctgggaggggctgccggagctgcaagtgtcacccactgggctcccaggaggaccagtgccatcccaagactggacagtgcacctgccgcccaggtgtcacaggccaggcctgtgacaggtgccagctgggtttcttcggcttctccatcaagggctgccgggcctgcaggtgctccccactgggcgctgcctcggcccagtgccacgagaacggcacatgcgtgtgcaggcctggcttcgagggctacaaatgtgaccgctgccacgacaacttcttcctcacggcagacggcacacactgccagcaatgtccgtcctgctacgccctggtgaaggaggaggcagccaagctgaaggccagactgactttgacggaggggtggctccaagggtccgactgtggcagtccctggggaccactagacattctgctgggagaggccccaaggggggacgtctaccagggccatcacctgcttccaggggctcgggaagccttcctggagcagatgatgggcctcgagggtgctgtcaaggccgcccgggagcagctgcagaggctgaacaagggtgcccgctgtgcccaggccggatcccagaagacctgcacccagctggcagacctggaggcagtgctggagtcctcggaagaggagattctgcatgcagctgccattctcgcgtctctggagattcctcaggaaggtcccagtcagccgaccaaatggagccacctggccacagaggcccgtgccctcgccaggagccacagagacaccgccaccaagatcgcagccactgcttggagggccctgctcgcctccaacaccagctacgcgcttctctggaatctgctggagggaagggtggccctagagacccagcgggacctggaggacaggtaccaggaggtccaggcggcccagaaagcactgaggacggctgtggcagaggtgctgcctgaagcggaaagcgtgttggccaccgtgcagcaagttggcgcagatacagccccgtacctggccttgctggcttccccgggagctctgcctcagaagtcccgggctgaagacctgggcctgaaggcgaaggccctggagaagacagttgcatcatggcagcacatggccactgaggctgcccgaaccctccagactgctgcccaggcgacgctacggcaaacagaacccctcacaaagctgcaccaggaggccagagccgccctgacccaggcttcctcatctgtccaggctgcgacagtgactgtcatgggagccaggactctgctggctgatctggaaggaatgaagctgcagtttccccggcccaaggaccaggcggcattgcagaggaaggcagactccgtcagtgacagactccttgcagacacgagaaagaagaccaagcaggcggagaggatgctgggaaacgcggcccctctttcctccagtgccaagaagaagggcagagaagcagaggtgttggccaaggacagtgccaagcttgccaaggccttgctgagggagcggaaacaggcgcaccgccgtgccagcaggctcaccagccagacgcaagccacgctccaacaggcgtcccagcaggtgctggcgtctgaagcacgcagacaggagctggaggaagctgagcgggtgggtgctgggctgagcgagatggagcagcagatccgggaatcgcgtatctcactggagaaggacatcgagaccttgtcagagctgcttgccaggctggggtcgctggacacccatcaagccccagcccaggccctgaacgagactcagtgggcactagaacgcctgaggctgcagctgggctccccggggtccttgcagaggaaactcagtctgctggagcaggaatcccagcagcaggagctgcagatccagggcttcgagagtgacctcgccgagatccgcgccgacaaacagaacctggaggccattctgcacagcctgcccgagaactgtgccagctggcagtgagggctgcccagatccccggcacacactcccccacctgctgtttacatgacccagggggtgcacactaccccacaggtgtgcccatacagacattccccggagccggctgctgtgaactcgaccccgtgtggatagtcacactccctgccgattctgtctgtggcttcttccctgccagcaggactgagtgtgcgtacccagttcacctggacatgagtgcacactctcacccctgcacatgcataaacgggcacaccccagtgtcaataacata

SEQ ID NO: 352310 - DNA, 1086 bp, Homo sapiens
ttttttggttaccttctcattcatgtcaagtatgtggttcattcttagaaccaaagggaaaagaggaaggaggaagaactggtaacaaagggtgggccacggagtgtggctagcagagcctctgagggaggtggcccccaccagaacagaggctccctctgcctggggaggtgcaaagggctggtaaacaacctgactgctgttatttacaaccccccagcctaggggcctgaggggtcagtctaaggaggctgaggctccctccgccctgcccacctggggagggttggggaagtggagagttctgcacagtaggtgcagaggcttctgtctcccaggtatcctccccgaggtctggcaggataatgctgaccgggaggccttacctgccaaggggccagagggtgattttgctcttgagaaaacctggcctgccagctaaatcataggcctatttgtggccactacagcatatatttatttttctccctaaaaaatgctcaatacccctccccatatttaaaacaccacaataaaaatacataggaaattcaagtttacatagcatgccaagaaaaataaattgtcatgacttaacattaaacagctatgcaaatttggatcaacacaaaatcaagctagatcataattagaactcgatctgttctttctttaaaatactacaaactactatttaaaaaaaaacacaacaactttacattcagaaatcagacaatctggagataggccactgaatgcgagaaacccaaggcttttgctctgatgctagagttgccctggaatccacacacataggacaaaaggtccagggctcaagttttaaaatccttttgctaagaaaagacatatgcacagtgattgcagtggttgcataccactgaaagaagggggtggggggaggacgtaacattaagaatggttgaaattttgtgtttttctgttaaattacaactaccaaaaagatcacaccaatccaattttagcagcactctccgaattttcacgaataagaaaaccataatttaaagaaaaattctaacctatttcacgacaatttagcaattc

SEQ ID NO: 352311 - DNA, 1190 bp, Homo sapiens
ttttctgagagcaacagagtatttgccaataaatgatctctcattaatccacctcaactgcctgctatgatggataagattgagagagtaaggcaaaaggcaaaggaacaaaaagggagacgaaggaaggaatgagaaaggcaggggaaaagaggaagggggaaaagaggaaggaggaagaactggtaacaaagggtgggccacggagtgtggctagcagagcctctgagggaggtggcccccaccagaacagaggctccctctgcctggggaggtgcaaagggctggtaaacaacctgactgctgttatttacaaccccccagcctaggggcctgaggggtcagtctaaggaggctgaggctccctccgccctgcccacctggggagggttggggaagtggagagttctgcacagtaggtgcagaggcttctgtctcccaggtatcctccccgaggtctggcaggataatgctgaccgggaggccttacctgccaaggggccagagggtgattttgctcttgagaaaacctggcctgccagctaaatcataggcctatttgtggccactacagcatatatttatttttctccctaaaaaatgctcaatacccctccccatatttaaaacaccacaataaaaatacataggaaattcaagtttacatagcatgccaagaaaaataaattgtcatgacttaacattaaacagctatgcaaatttggatcaacacaaaatcaagctagatcataattagaactcgatctgttctttctttaaaatactacaaactactatttaaaaaaaaacacaacaactttacattcagaaatcagacaatctggagataggccactgaatgcgagaaacccaaggcttttgctctgatgctagagttgccctggaatccacacacataggacaaaaggtccagggctcaagttttaaaatccttttgctaagaaaagacatatgcacagtgattgcagtggttgcataccactgaaagaagggggtggggggaggacgtaacattaagaatggttgaaattttgtgtttttctgttaaattacaactaccaaaaagatcacaccaatccaattttagcagcactctccgaattttcacgaataagaaaaccataatttaaagaaaaattctaacctatttcacgacaatttagcaattc

SEQ ID NO: 352312 - DNA, 7550 bp, Homo sapiens
  misc_feature (6303)..(6303): n is a, c, g, or t
  misc_feature (6789)..(6789): n is a, c, g, or t
  misc_feature (7401)..(7401): n is a, c, g, or t
ccccgcaggggaaggcgggtcctggcggccagcgcgcggtccgcgcccaccctagccgacggggccggcagagcgcgcggcgtcggtgcccttgaccatggcggcggctgcgcttctgctggggctggcgctgctggcaccgcgggcggccggcgcgggcatgggcgcgtgctatgacggcgcagggcgcccgcagcgctgcctgccggtgttcgagaacgcggcgtttgggcggctcgcccaggcctcgcacacgtgcggcagcccgcccgaggacttctgtccccacgtgggcgccgcgggcgcgggggctcattgccagcgctgcgacgccgccgacccccagcgccaccacaacgcctcctacctcaccgacttccacagccaggacgagagcacctggtggcagagcccgtccatggccttcggcgtgcagtaccccacctcggtcaacatcaccctccgcctagggaaggcttatgagatcacgtatgtgaggctgaagttccacaccagtcgccctgagagctttgccatctacaagcgcagccgcgccgacggcccatgggagccctaccagttctacagcgcctcctgccagaagacctacggccggcccgagggccagtacctgcgccccggcgaggacgagcgcgtggccttctgcacctctgagttcagcgacatctccccgctgagtggcggcaacgtggccttctccaccctggagggccggcccagcgcctacaacttcgaggagagccctgggctgcaggagtgggtcaccagcaccgaactcctcatctctctagaccggctcaacacgtttggggacgacatcttcaaggaccccaaggtgctccagtcctactattatgccgtgtccgacttctctgtgggcggcaggtgcaagtgcaacgggcatgccagcgagtgcggccccgacgtggcaggccagttggcctgccggtgccagcacaacaccaccggcacagactgtgagcgctgcctgcccttcttccaggaccgcccgtgggcccggggcaccgccgaggctgcccacgagtgtctgccctgcaactgcagtggccgctccgaggaatgcacgtttgatcgggagctcttccgcagcacaggccacggcgggcgctgtcaccactgccgtgaccacacagctgggccacactgtgagcgctgtcaggagaatttctatcactgggacccgcggatgccatgccagccctgtgactgccagtcggcaggctccctacacctccagtgcgatgacacaggcacctgcgcctgcaagcccacagtgactggctggaagtgtgaccgctgtctgcccgggttccactcgctcagtgagggaggctgcagaccctgcacttgcaatcccgctggcagcctggacacctgtgacccccgcagtgggcgctgcccctgcaaagagaatgtggaaggcaacctatgtgacagatgtcgcccggggacctttaacctgcagccccacaatccagctggctgcagcagctgtttctgctatggccactccaaggtgtgcgcgtccactgcccagttccaggtgcatcacatcctcagcgatttccaccagggagccgaaggctggtgggccagaagtgtggggggctctgagcactccccacaatggagcccaaatggggtcctcctgagcccagaagacgaggaggagctcacagcaccagggaagttcctgggagaccagcggttcagctatgggcagcccctcatactgaccttccgggtgccccccggggactccccactccctgtacagctgaggctggaagggacaggcttggccctgtccctgaggcactctagcctgtctggcccccaggatgccagggcatcccagggaggtagagctcaggttccacctgcaggagacctccgaggacgtggcccctccactgccccccttccacttccagcggctcctcgccaacctgaccagcctccgcctccgcgtcagtcccggccccagccctgccggtccagtgttcctgactgaggtccggctcacatccgcccggccagggctttccccgccagcctcctgggtggagatttgttcatgtcccactggctacacgggccagttctgtgaatcctgtgctccgggatacaagagggagatgccacaggggggtccctatgccagctgtgtcccctgcacctgtaaccagcatggcacctgtgaccccaacacagggatctgtgtctgcagccaccataccgagggcccatcctgtgaacgctgtttgccaggtttctatggcaaccctttcgcgggccaagccgacgactgccagccctgtccctgccctggccagtcggcctgtacgaccatcccagagagcggggaggtggtgtgtacccactgccccccgggccagagagggcggcgctgtgaggtctgtgatgatggcttttttggggacccgctggggctctttgggcacccccagccctgccaccagtgccagtgtagcgggaacgtggaccccaatgccgtgggcaactgtgaccccctgtctggccactgcctgcgctgcctgcacaacaccacgggtgaccactgtgagcactgtcaggaaggcttctacgggagcgccctggcccctcgacccgcagacaaatgcatgccttgcagctgtcacccacagggctcggtcagtgagcagatgccctgcgacccagtgacaggccaatgctcctgcctgcctcatgtgactgcacgggactgcagccgctgctaccctggcttcttcgacctccagcctgggaggggctgccggagctgcaagtgtcacccactgggctcccaggaggaccagtgccatcccaagactggacagtgcacctgccgcccaggtgtcacaggccaggcctgtgacaggtgccagctgggtttcttcggcttctccatcaagggctgccgggcctgcaggtgctccccactgggcgctgcctcggcccagtgccacgagaacggcacatgcgtgtgcaggcctggcttcgagggctacaaatgtgaccgctgccacgacaacttcttcctcacggcagacggcacacactgccagcaatgtccgtcctgctacgccctggtgaaggaggaggcagccaagctgaaggccagactgactttgacggaggggtggctccaagggtccgactgtggcagtccctggggaccactagacattctgctgggagaggccccaaggggggacgtctaccagggccatcacctgcttccaggggctcgggaagccttcctggagcagatgatgggcctcgagggtgctgtcaaggccgcccgggagcagctgcagaggctgaacaagggtgcccgctgtgcccaggccggatcccagaagacctgcacccagctggcagacctggaggcagtgctggagtcctcggaagaggagattctgcatgcagctgccattctcgcgtctctggagattcctcaggaaggtcccagtcagccgaccaaatggagccacctggccacagaggcccgtgccctcgccaggagccacagagacaccgccaccaagatcgcagccactgcttggagggccctgctcgcctccaacaccagctacgcgcttctctggaatctgctggagggaagggtggccctagagacccagcgggacctggaggacaggtaccaggaggtccaggcggcccagaaagcactgaggacggctgtggcagaggtgctgcctgaagcggaaagcgtgttggccaccgtgcagcaagttggcgcagatacagccccgtacctggccttgctggcttccccgggagctctgcctcagaagtcccgggctgaagacctgggcctgaaggcgaaggccctggagaagacagttgcatcatggcagcacatggccactgaggctgcccgaaccctccagactgctgcccaggcgacgctacggcaaacagaacccctcacaaaggcgcgatctcggctcactgcaacctttgcctcccagctgcaccaggaggccagagccgccctgacccaggcttcctcatctgtccaggctgcgacagtgactgtcatgggagccaggactctgctggctgatctggaaggaatgaagctgcagtttccccggcccaaggaccaggcggcattgcagaggaaggcagactccgtcagtgacagactccttgcagacacgagaaagaagaccaagcaggcggagaggatgctgggaaacgcggcccctctttcctccagtgccaagaagaagggcagagaagcagaggtgttggccaaggacagtgccaagcttgccaaggccttgctgagggagcggaaacaggcgcaccgccgtgccagcaggctcaccagccagacgcaagccacgctccaacaggcgtcccagcaggtgctggcgtctgaagcacgcagacaggagctggaggaagctgagcgggtgggtgctgggctgagcgagatggagcagcagatccgggaatcgcgtatctcactggagaaggacatcgagaccttgtcagagctgcttgccaggctggggtcgctggacacccatcaagccccagcccaggccctgaacgagactcagtgggcactagaacgcctgaggctgcagctgggctccccggggtccttgcagaggaaactcagtctgctggagcaggaatcccagcagcaggagctgcagatccagggcttcgagagtgacctcgccgagatccgcgccgacaaacagaacctggaggccattctgcacagcctgcccgagaactgtgccagctggcagtgagggctgcccagatccccggcacacactcccccacctgctgtttacatgacccagggggtgcacactaccccacaggtgtgcccatacagacattccccggagccggctgctgtgaactcgaccccgtgtggatagtcacactccctgccgattctgtctgtggcttcttccctgccagcaggactgagtgtgcgtacccagttcacctggacatgagtgcacactctcacccctgcacatgcataaacgggcacaccccagtgtcaataacatacacacgtgagggtgcatgtctgtgtgtatgacccacacgtgttcaagtctaatccatccagtcagcagcttacggtccacacacattacagtccacagctgttgtgagagccacctgtgtgctggacaccctctggatgttgggcaagttgttacatgagatgccctggggtgctacatccactcactccagatagcagggaggtctcagcagatctgcagagatcaagggggtcagcaacagccaaagcccctagtcccagagctggctgccctctgtttcacagcagctccctgacctgtgttgctgcgtgcactccctacagctcgacacagccaggggaccaacaggccaagaaatgcaagatcccgggagggttcttagcagcagaatctgaggcccagagaccctgaggccgtggccaggcctgctagtctggctagagcaaggcccattcctggcgggggtgtcattgccttcaccggacgcttccctctcagggtcctgggactgcaccagatgccctgagggaatggcccaccctggcctgtacccacttcagcctgtgatctatccaaagagccaggcccaaaagcgcctaggtcagggtgctcaggctaccaggagcacgcctctgtgcccccggcaacccagttgacctttaattgacgctttccagacccagccctgcggcaccacttgccatgcgggaggccaccagggtgtgcaagcctggctgccattccagtctgtcctgtctgggaatcgccctgtggccaggcccgcatgctggcctctgcccaggactcctcagcatttcctcttggcatccctcccctctcccagaccctcttccagcagatggcaaggcctcggcattgggaagtcaggcacctctgcgggcccagccccctcccgtggctcccctgacaggggcaggggtagggcagcagcacagaccaattccgttgaacgtggaaataaaggaccctttcactgggcagggtggtgtgcctcaccctccccggctggtgggcagccagggccctggctgtgggtgtgcatatgacacacctagtaggtggccagcatgtggaccggacgttggtaggaaggtggcaaaagccgagctcgtggctgggccagtacctcccattagagggcttngctggggttgtgtgatcacaggtacctaccctgtcctctcaggcacttaccacgtaaagcctaggagctggtgagttggaggggtggggtgcggagaggccctcagctgacctctggttcaggctcgagacgaactcacagccaagtgtccgaggatggtgaggagcagggaggggcgccatccaggagggggatggtgtgggtggggccttgaagggtggggaggcagagaaggaagcattccaggcaagagggtggacaacagtccggggcccgcagggttggggctcggccagcttgcatcactccaggaccccaggttgaatggggtgggatgttggagctgctcagtcagggctcttggccgcaggcctcaaacccctcctgaggtggtttcagcagaaaaggggtgttgggagggtcgcttggaaccctggagtaaaaacggctgccacgtgttggagatagcctagggaggggagcctnaggcttccgggataggttggcttccctcttcccccctcccgcctctcttcttggtctgtgtctctgctctcctctcctgtatctgcttcgttcttttctctttatttattgattttttttgagatggagtctcgctctgttgcccaggctggagtgcagtggcatgatctctgcccactgcatcctccacctcccaggtttaagcaattctcctgcctcagcctcccgagtagctaggactacaggtgcttgccaccatgcccagctaattttggtatttttagtagagacagggtttcaccacgttggtcaggctggtctcaaactcctgacctcagatgatatacctgcattggcctcttaaagttctgggatttcaggcatgagccactgcaaccggcccattcttttctctttgcagagtggctttctttgtttttcttgtgcctgataggagaggacacccacccctaccgccatcccccataatggccccaggtgtacatgtcatcaggtccagtgcttgcaagagacaagctggtgactctgtcctgattccagcttctcagcttaggtgaagtcccaccaacccccgttcaggataatgagganctctggatctaaggccaataatggatgaccggtgccaccccccaacctaatgggagatggtgttcagagaagaggtgtgctcctccacagaaaactgtaaaatcaaggctacggtgggggattgacatgattaaactgagctaggagtg

SEQ ID NO: 352313 - DNA, 4071 bp, Homo sapiens
  misc_feature (2824)..(2824): n is a, c, g, or t
  misc_feature (3310)..(3310): n is a, c, g, or t
  misc_feature (3922)..(3922): n is a, c, g, or t
ttttctgagagcaacagagtatttgccaataaatgatctctcattaatccacctcaactgcctgctatgatggataagattgagagagtaaggcaaaaggcaaaggaacaaaaagggagacgaaggaaggaatgagaaaggcaggggaaaagaggaagggagattcctcaggaaggtcccagtcagccgaccaaatggagccacctggccacagaggcccgtgccctcgccaggagccacagagacaccgccaccaagatcgcagccactgcttggagggccctgctcgcctccaacaccagctacgcgcttctctggaatctgctggagggaagggtggccctagagacccagcgggacctggaggacaggtaccaggaggtccaggcggcccagaaagcactgaggacggctgtggcagaggtgctgcctgaagcggaaagcgtgttggccaccgtgcagcaagttggcgcagatacagccccgtacctggccttgctggcttccccgggagctctgcctcagaagtcccgggctgaagacctgggcctgaaggcgaaggccctggagaagacagttgcatcatggcagcacatggccactgaggctgcccgaaccctccagactgctgcccaggcgacgctacggcaaacagaacccctcacaaagctgcaccaggaggccagagccgccctgacccaggcttcctcatctgtccaggctgcgacagtgactgtcatgggagccaggactctgctggctgatctggaagcgagaaagaagaccaagcaggcggagaggatgctgggaaacgcggcccctctttcctccagtgccaagaagaagggcagagaagcagaggtgttggccaaggacagtgccaagcttgccaaggccttgctgagggagcggaaacaggcgcaccgccgtgccagcaggctcaccagccagacgcaagccacgctccaacaggcgtcccagcaggtgctggcgtctgaagcacgcagacaggagctggaggaagctgagcgggtgggtgctgggctgagcgagatggagcagcagatccgggaatcgcgtatctcactggagaaggacatcgagaccttgtcagagctgcttgccaggctggggtcgctggacacccatcaagccccagcccaggccctgaacgagactcagtgggcactagaacgcctgaggctgcagctgggctccccggggtccttgcagaggaaactcagtctgctggagcaggaatcccagcagcaggagctgcagatccagggcttcgagagtgacctcgccgagatccgcgccgacaaacagaacctggaggccattctgcacagcctgcccgagaactgtgccagctggcagtgagggctgcccagatccccggcacacactcccccacctgctgtttacatgacccagggggtgcacactaccccacaggtgtgcccatacagacattccccggagccggctgctgtgaactcgaccccgtgtggatagtcacactccctgccgattctgtctgtggcttcttccctgccagcaggactgagtgtgcgtacccagttcacctggacatgagtgcacactctcacccctgcacatgcataaacgggcacaccccagtgtcaataacatacacacgtgagggtgcatgtctgtgtgtatgacccacacgtgttcaagtctaatccatccagtcagcagcttacggtccacacacattacagtccacagctgttgtgagagccacctgtgtgctggacaccctctggatgttgggcaagttgttacatgagatgccctggggtgctacatccactcactccagatagcagggaggtctcagcagatctgcagagatcaagggggtcagcaacagccaaagcccctagtcccagagctggctgccctctgtttcacagcagctccctgacctgtgttgctgcgtgcactccctacagctcgacacagccaggggaccaacaggccaagaaatgcaagatcccgggagggttcttagcagcagaatctgaggcccagagaccctgaggccgtggccaggcctgctagtctggctagagcaaggcccattcctggcgggggtgtcattgccttcaccggacgcttccctctcagggtcctgggactgcaccagatgccctgagggaatggcccaccctggcctgtacccacttcagcctgtgatctatccaaagagccaggcccaaaagcgcctaggtcagggtgctcaggctaccaggagcacgcctctgtgcccccggcaacccagttgacctttaattgacgctttccagacccagccctgcggcaccacttgccatgcgggaggccaccagggtgtgcaagcctggctgccattccagtctgtcctgtctgggaatcgccctgtggccaggcccgcatgctggcctctgcccaggactcctcagcatttcctcttggcatccctcccctctcccagaccctcttccagcagatggcaaggcctcggcattgggaagtcaggcacctctgcgggcccagccccctcccgtggctcccctgacaggggcaggggtagggcagcagcacagaccaattccgttgaacgtggaaataaaggaccctttcactgggcagggtggtgtgcctcaccctccccggctggtgggcagccagggccctggctgtgggtgtgcatatgacacacctagtaggtggccagcatgtggaccggacgttggtaggaaggtggcaaaagccgagctcgtggctgggccagtacctcccattagagggcttngctggggttgtgtgatcacaggtacctaccctgtcctctcaggcacttaccacgtaaagcctaggagctggtgagttggaggggtggggtgcggagaggccctcagctgacctctggttcaggctcgagacgaactcacagccaagtgtccgaggatggtgaggagcagggaggggcgccatccaggagggggatggtgtgggtggggccttgaagggtggggaggcagagaaggaagcattccaggcaagagggtggacaacagtccggggcccgcagggttggggctcggccagcttgcatcactccaggaccccaggttgaatggggtgggatgttggagctgctcagtcagggctcttggccgcaggcctcaaacccctcctgaggtggtttcagcagaaaaggggtgttgggagggtcgcttggaaccctggagtaaaaacggctgccacgtgttggagatagcctagggaggggagcctnaggcttccgggataggttggcttccctcttcccccctcccgcctctcttcttggtctgtgtctctgctctcctctcctgtatctgcttcgttcttttctctttatttattgattttttttgagatggagtctcgctctgttgcccaggctggagtgcagtggcatgatctctgcccactgcatcctccacctcccaggtttaagcaattctcctgcctcagcctcccgagtagctaggactacaggtgcttgccaccatgcccagctaattttggtatttttagtagagacagggtttcaccacgttggtcaggctggtctcaaactcctgacctcagatgatatacctgcattggcctcttaaagttctgggatttcaggcatgagccactgcaaccggcccattcttttctctttgcagagtggctttctttgtttttcttgtgcctgataggagaggacacccacccctaccgccatcccccataatggccccaggtgtacatgtcatcaggtccagtgcttgcaagagacaagctggtgactctgtcctgattccagcttctcagcttaggtgaagtcccaccaacccccgttcaggataatgagganctctggatctaaggccaataatggatgaccggtgccaccccccaacctaatgggagatggtgttcagagaagaggtgtgctcctccacagaaaactgtaaaatcaaggctacggtgggggattgacatgattaaactgagctaggagtg

SEQ ID NO: 352314 - DNA, 5978 bp, Homo sapiens
ccccgcaggggaaggcgggtcctggcggccagcgcgcggtccgcgcccaccctagccgacggggccggcagagcgcgcggcgtcggtgcccttgaccatggcggcggctgcgcttctgctggggctggcgctgctggcaccgcgggcggccggcgcgggcatgggcgcgtgctatgacggcgcagggcgcccgcagcgctgcctgccggtgttcgagaacgcggcgtttgggcggctcgcccaggcctcgcacacgtgcggcagcccgcccgaggacttctgtccccacgtgggcgccgcgggcgcgggggctcattgccagcgctgcgacgccgccgacccccagcgccaccacaacgcctcctacctcaccgacttccacagccaggacgagagcacctggtggcagagcccgtccatggccttcggcgtgcagtaccccacctcggtcaacatcaccctccgcctagggaaggcttatgagatcacgtatgtgaggctgaagttccacaccagtcgccctgagagctttgccatctacaagcgcagccgcgccgacggcccatgggagccctaccagttctacagcgcctcctgccagaagacctacggccggcccgagggccagtacctgcgccccggcgaggacgagcgcgtggccttctgcacctctgagttcagcgacatctccccgctgagtggcggcaacgtggccttctccaccctggagggccggcccagcgcctacaacttcgaggagagccctgggctgcaggagtgggtcaccagcaccgaactcctcatctctctagaccggctcaacacgtttggggacgacatcttcaaggaccccaaggtgctccagtcctactattatgccgtgtccgacttctctgtgggcggcaggtgcaagtgcaacgggcatgccagcgagtgcggccccgacgtggcaggccagttggcctgccggtgccagcacaacaccaccggcacagactgtgagcgctgcctgcccttcttccaggaccgcccgtgggcccggggcaccgccgaggctgcccacgagtgtctgccctgcaactgcagtggccgctccgaggaatgcacgtttgatcgggagctcttccgcagcacaggccacggcgggcgctgtcaccactgccgtgaccacacagctgggccacactgtgagcgctgtcaggagaatttctatcactgggacccgcggatgccatgccagccctgtgactgccagtcggcaggctccctacacctccagtgcgatgacacaggcacctgcgcctgcaagcccacagtgactggctggaagtgtgaccgctgtctgcccgggttccactcgctcagtgagggaggctgcagaccctgcacttgcaatcccgctggcagcctggacacctgtgacccccgcagtgggcgctgcccctgcaaagagaatgtggaaggcaacctatgtgacagatgtcgcccggggacctttaacctgcagccccacaatccagctggctgcagcagctgtttctgctatggccactccaaggtgtgcgcgtccactgcccagttccaggtgcatcacatcctcagcgatttccaccagggagccgaaggctggtgggccagaagtgtggggggctctgagcactccccacaatggagcccaaatggggtcctcctgagcccagaagacgaggaggagctcacagcaccagggaagttcctgggagaccagcggttcagctatgggcagcccctcatactgaccttccgggtgccccccggggactccccactccctgtacagctgaggctggaagggacaggcttggccctgtccctgaggcactctagcctgtctggcccccaggatgccagggcatcccagggaggtagagctcaggttccacctgcaggagacctccgaggacgtggcccctccactgccccccttccacttccagcggctcctcgccaacctgaccagcctccgcctccgcgtcagtcccggccccagccctgccggtccagtgttcctgactgaggtccggctcacatccgcccggccagggctttccccgccagcctcctgggtggagatttgttcatgtcccactggctacacgggccagttctgtgaatcctgtgctccgggatacaagagggagatgccacaggggggtccctatgccagctgtgtcccctgcacctgtaaccagcatggcacctgtgaccccaacacagggatctgtgtctgcagccaccataccgagggcccatcctgtgaacgctgtttgccaggtttctatggcaaccctttcgcgggccaagccgacgactgccagccctgtccctgccctggccagtcggcctgtacgaccatcccagagagcggggaggtggtgtgtacccactgccccccgggccagagagggcggcgctgtgaggtctgtgatgatggcttttttggggacccgctggggctctttgggcacccccagccctgccaccagtgccagtgtagcgggaacgtggaccccaatgccgtgggcaactgtgaccccctgtctggccactgcctgcgctgcctgcacaacaccacgggtgaccactgtgagcactgtcaggaaggcttctacgggagcgccctggcccctcgacccgcagacaaatgcatgccttgcagctgtcacccacagggctcggtcagtgagcagatgccctgcgacccagtgacaggccaatgctcctgcctgcctcatgtgactgcacgggactgcagccgctgctaccctggcttcttcgacctccagcctgggaggggctgccggagctgcaagtgtcacccactgggctcccaggaggaccagtgccatcccaagactggacagtgcacctgccgcccaggtgtcacaggccaggcctgtgacaggtgccagctgggtttcttcggcttctccatcaagggctgccgggcctgcaggtgctccccactgggcgctgcctcggcccagtgccacgagaacggcacatgcgtgtgcaggcctggcttcgagggctacaaatgtgaccgctgccacgacaacttcttcctcacggcagacggcacacactgccagcaatgtccgtcctgctacgccctggtgaaggaggaggcagccaagctgaaggccagactgactttgacggaggggtggctccaagggtccgactgtggcagtccctggggaccactagacattctgctgggagaggccccaaggggggacgtctaccagggccatcacctgcttccaggggctcgggaagccttcctggagcagatgatgggcctcgagggtgctgtcaaggccgcccgggagcagctgcagaggctgaacaagggtgcccgctgtgcccaggccggatcccagaagacctgcacccagctggcagacctggaggcagtgctggagtcctcggaagaggagattctgcatgcagctgccattctcgcgtctctggagattcctcaggaaggtcccagtcagccgaccaaatggagccacctggccacagaggcccgtgccctcgccaggagccacagagacaccgccaccaagatcgcagccactgcttggagggccctgctcgcctccaacaccagctacgcgcttctctggaatctgctggagggaagggtggccctagagacccagcgggacctggaggacaggtaccaggaggtccaggcggcccagaaagcactgaggacggctgtggcagaggtgctgcctgaagcggaaagcgtgttggccaccgtgcagcaagttggcgcagatacagccccgtacctggccttgctggcttccccgggagctctgcctcagaagtcccgggctgaagacctgggcctgaaggcgaaggccctggagaagacagttgcatcatggcagcacatggccactgaggctgcccgaaccctccagactgctgcccaggcgacgctacggcaaacagaacccctcacaaagctgcaccaggaggccagagccgccctgacccaggcttcctcatctgtccaggctgcgacagtgactgtcatgggagccaggactctgctggctgatctggaaggaatgaagctgcagtttccccggcccaaggaccaggcggcattgcagaggaaggcagactccgtcagtgacagactccttgcagacaaactgtgccagctggcagtgagggctgcccagatccccggcacacactcccccacctgctgtttacatgacccagggggtgcacactaccccacaggtgtgcccatacagacattccccggagccggctgctgtgaactcgaccccgtgtggatagtcacactccctgccgattctgtctgtggcttcttccctgccagcaggactgagtgtgcgtacccagttcacctggacatgagtgcacactctcacccctgcacatgcataaacgggcacaccccagtgtcaataacatacacacgtgagggtgcatgtctgtgtgtatgacccacacgtgttcaagtctaatccatccagtcagcagcttacggtccacacacattacagtccacagctgttgtgagagccacctgtgtgctggacaccctctggatgttgggcaagttgttacatgagatgccctggggtgctacatccactcactccagatagcagggaggtctcagcagatctgcagagatcaagggggtcagcaacagccaaagcccctagtcccagagctggctgccctctgtttcacagcagctccctgacctgtgttgctgcgtgcactccctacagctcgacacagccaggggaccaacaggccaagaaatgcaagatcccgggagggttcttagcagcagaatctgaggcccagagaccctgaggccgtggccaggcctgctagtctggctagagcaaggcccattcctggcgggggtgtcattgccttcaccggacgcttccctctcagggtcctgggactgcaccagatgccctgagggaatggcccaccctggcctgtacccacttcagcctgtgatctatccaaagagccaggcccaaaagcgcctaggtcagggtgctcaggctaccaggagcacgcctctgtgcccccggcaacccagttgacctttaattgacgctttccagacccagccctgcggcaccacttgccatgcgggaggccaccagggtgtgcaagcctggctgccattccagtctgtcctgtctgggaatcgccctgtggccaggcccgcatgctggcctctgcccaggactcctcagcatttcctcttggcatccctcccctctcccagaccctcttccagcagatggcaaggcctcggcattgggaagtcaggcacctctgcgggcccagccccctcccgtggctcccctgacaggggcaggggtagggcagcagcacagaccaattccgttgaacgtggaaataaaggaccctttcactgggaaaaaaaaaaaaaaaaaaaaacaaaaaaaaaaaaaaaaaaaaaaaaaaaaaaaagaaaccacaaacctctttctatatctagaagataataaataaaacaacacaattctttagataaaacaagagatatagcgagcagaaagaaataaaaagtacatcaaacaaacacagagagcaaaaagaaacaaataactaagcagaagaacaaaaacacaaaactagagaataaaaactacaccgaccaatagaaagacagcatacaaaaaagaagaaaaaagacaagaaaggaaatcactatgagcaagaaacaggaatgaagaggcagactgagaggagaggcaacaaaagtgacgacacacacagtaaagaaagctagaacaacacataatgagcacccactaacaaaagaaaaagaacatggagaaaaaaaacacacagaggaaaaaaatagataaacacaaaagaaa

SEQ ID NO: 352315 - DNA, 388 bp, Homo sapiens
ggcacacagacatgattgatcgaggatggctatatgagaaacttaaaactgaactatgaagtgacacactccttttctccatgatcgactttattacctcaatggcatagagtgtgcagcaagtgccatggagatgagtgccattgcagcccacaacgctgcactccttgcctatcaccgctggaacgggcacacagacatgattgatcaggatggcttatatgagaaacttaaaactgaactatgaagtgacacactcctttttcccctcctagttccaaatgactatcagtggcaaaaaagaacaaaatctgagcagagatgattttgaaccagatattttgccattatcattgtttaataaaagtaatccctgctggtcatagga

SEQ ID NO: 352316 - DNA, 2302 bp, Homo sapiens
cttagtcagtagccatattgctttcatttactgagatattgtttaacatcttcaagttacattactaagacttctaaattgtagagcattttaaggtgagtacctgagggagaacttaaagacatcttagttggggagtagtccttttgaattttacagctagatataatcttcagtcagataaaatttatgggagctggtgtcttatgcctgactcttagtaatttcataccggtttgaagtacgtgtgcccatgcctaaagccttgactttcagaatgttgtcttttgattcttctgtcttgatttgattaggggtgaaatttagaagtcttagtaatgtaacttgaagatgttaaacaaaaatctcaagtaaaatgaaaagcaaatatgggctactgaattaagaaactggcattctagtattaaatcctcacttcaggagcttttaaaaatactgagacccccccataaccagagattcagattcaaagactgaggataggaccttagcattgtagctatttaaagtttctaatgtgcacccagggttgggaatcaccaatgtgggtgtgaaaatgcctacaaagggttttagtgccttagaagtcctaagaagcccaatctgtatcaaagcagatccattttgcaaggatctttcttttagaactttctcagttctcttagtaagaactttagaagtaatcttgataataagcacagacagcctaacagcagaggcaacttaaataactcctgagcagttggcactagaacagaatacttggaatgacaccaaagttaaccaagtccagcatatgtccaaagagttaagtgtttcatttactgtagcattctgggtgagaaattggttgctgaaatcttaagacagtggtctcaaccttggctgcacattggaatcacctgtagggttttaaagcatccaaatggtaattaacaggcagcaaaacttcagaactagttctgcatctactgtgcaaagatcatgattaactgtcaagacactggtagaacagaacaagcaaaagattaagagttcaaaagtaaatgcaaccaatttaacatgtagtgttattaaaaaattacaaaggcctagaccagcctgggcaacatggtgaaaccccatctctacaaaaaatttttaaaaagttggccaggcatggtaatgcgcgcctgtggtcccagctgctcgggaggctgaggtgggaggatcacttgagccttggaggtcaaggctgcagtgaatcatgatcatgccactgtactccagcctgggcaacagagaccatcttaaaaaaaaaaaatccttccattgaatagaaacttcaaagtccttcatcagatcatggcattagctactttagcaaaatagtgtaaactttggttctgagtaaaaatgacttccctaccacagttgtgaatgttaatatgctgataaaactgccaagatatatttgataggtaggggattaaactcatggtttgtcaaaagagtgtttttttctagttttattcttaacagatatgttgaggtattcatatttgtttccttttgtggttttaatgaagacaatttgtaaagtaatactgttatgtatatgctaaatgttggtaaatactaattaatttccatcatttgtagacttgttttgcaatgggatatatttttacttataataccaatttaggctgggcgcagtggctcacgcctgtaatcccagcactttgggaggccaaggcaaacggatcacgaggtcaggagatcaagaccatcctggccaacatggtgaaaccccatctctactgaatacacaaaaattggctggacatggtggcgcatgtctgtaatcccagctactgtaatctcagctactcgggaggctgaggcaggagaattgcctcaaccgggaggcggaggttgcagtgagccaagatcgcaccactgcactccagcctggcaacagagcgagactctgtctcagaaaaaaaaaaacaaaaaccagtttaggctgggtatggtggctcaccagcactttgggaggctgaggcaggtggatctcttgaggtcgggagtttgagaccagcctggccaacatggtgaaaccctgtctttactaaaaatacaaaaattagccaggcatggtggcgtgtgccagtaatcccagctacttgggaggctgaggcgcgagaatcgcttgaaccctggagatggaggttgcagtgagcagagatcgcaccactgcactccagcctgggcaagagtgagactgtgtctcaaaagg

SEQ ID NO: 352317 - DNA, 1477 bp, Homo sapiens
gagcggtgggaggactgcggggctcttgaggccagctgcagagcttgtggaggccatggggcgcgtcgtcgcggagctcgtctcctcgctgctggggttgtggctgttgctgtgcagctgcggatgccccgagggcgccgagctgcgtgctccgccagataaaatcgcgattattggagccggaattggtggcacttcagcagcctattacctgcggcagaaatttgggaaagatgtgaagatagacctgtttgaaagagaagaggtcgggggccgcctggctaccatgatggtgcaggggcaagaatacgaggcaggaggttctgtcatccatcctttaaatctgcacatgaaacgttttgtcaaagacctgggtctctctgctgttcaggcctctggtggcctactggggatatataatggagagactctggtatttgaggagagcaactggttcataattaacgtgattaaattagtttggcgctatggatttcaatccctccgtatgcacatgtgggtagaggacgtgttagacaagttcatgaggatctaccgctaccagtctcatgactatgccttcagtagtgtcgaaaaattacttcatgctctaggaggagatgacttccttggaatgcttaatcgaacacttcttgaaaccttgcaaaaggccggcttttctgagaagttcctcaatgaaatgattgctcctgttatgagggtcaattatggccaaagcacggacatcaatgcctttgtgggggcggtgtcactgtcctgttctgattctggcctttgggcagtagaaggtggcaataaacttgtttgctcagggcttctgcaggcatccaaaagcaatcttatatctggctcagtaatgtacatcgaggagaaaacaaagaccaagtacacaggaaatccaacaaagatgtatgaagtggtctaccaaattggaactgagactcgttcagacttctatgacatcgtcttggtggccactccgttgaatcgaaaaatgtcgaatattacttttctcaactttgatcctccaattgaggaattccatcaatattatcaacatatagtgacaactttagttaagggggaattgaatacatctatctttagctctagacccatagataaatttggccttaatacagttttaaccactgataattcagatttgttcattaacagtattgggattgtgccctctgtgagagaaaaggaagatcctgagccatcaacagatggaacatatgtttggaagatcttttcccaagaaactcttactaaagcacaaattttaaagctctttctgtcctatgattatgctgtgaagaagccatggcttgcatatcctcactataagcccccggagaaatgcccctctatcatttctggctaagagcggcttactggctcacaagcggtattcgtggttatagcgagttcctggtaaaagcgtgttgcc

SEQ ID NO: 352318 - DNA, 402 bp, Homo sapiens
tcctgcctcagcctcccaagtagctgggaccacaggcatacaccactatgcctggttaatttttgtatttttagtaaagctggggttttgccatgttggccaggctggtcttgaactcctgacctcaggtgacctgcccacctctgcctcccaaagtgtggggattataggcgtgagccactgcacctagatgtcagtttgattcttatgacgccacttcccttctttatacatccccttccccacatcttgtttggtatttaatggatttctcttcttttccaaaggatctaccgctaccagtctcatgactatgccttcagtagtgtcgaaaaattacttcatgctctaggaggagatgacttccttggaatgcttaatcgaacacttcttgaaaccttg

SEQ ID NO: 352319 - DNA, 4262 bp, Homo sapiens
gagcggtgggaggactgcggggctcttgaggccagctgcagagcttgtggaggccatggggcgcgtcgtcgcggagctcgtctcctcgctgctggggttgtggctgttgctgtgcagctgcggatgccccgagggcgccgagctgcgtgctccgccagataaaatcgcgattattggagccggaattggtggcacttcagcagcctattacctgcggcagaaatttgggaaagatgtgaagatagacctgtttgaaagagaagaggtcgggggccgcctggctaccatgatggtgcaggggcaagaatacgaggcaggaggttctgtcatccatcctttaaatctgcacatgaaacgttttgtcaaagacctgggtctctctgctgttcaggcctctggtggcctactggggatatataatggagagactctggtatttgaggagagcaactggttcataattaacgtgattaaattagtttggcgctatggatttcaatccctccgtatgcacatgtgggtagaggacgtgttagacaagttcatgaggatctaccgctaccagtctcatgactatgccttcagtagtgtcgaaaaattacttcatgctctaggaggagatgacttccttggaatgcttaatcgaacacttcttgaaaccttgcaaaaggccggcttttctgagaagttcctcaatgaaatgattgctcctgttatgagggtcaattatggccaaagcacggacatcaatgcctttgtgggggcggtgtcactgtcctgttctgattctggcctttgggcagtagaaggtggcaataaacttgtttgctcagggcttctgcaggcatccaaaagcaatcttatatctggctcagtaatgtacatcgaggagaaaacaaagaccaagtacacaggaaatccaacaaagatgtatgaagtggtctaccaaattggaactgagactcgttcagacttctatgacatcgtcttggtggccactccgttgaatcgaaaaatgtcgaatattacttttctcaactttgatcctccaattgaggaattccatcaatattatcaacatatagtgacaactttagttaagggggaattgaatacatctatctttagctctagacccatagataaatttggccttaatacagttttaaccactgataattcagatttgttcattaacagtattgggattgtgccctctgtgagagaaaaggaagatcctgagccatcaacagatggaacatatgtttggaagatcttttcccaagaaactcttactaaagcacaaattttaaagctctttctgtcctatgattatgctgtgaagaagccatggcttgcatatcctcactataagcccccggagaaatgcccctctatcattctccatgatcgactttattacctcaatggcatagagtgtgcagcaagtgccatggagatgagtgccattgcagcccacaacgctgcactccttgcctatcaccgctggaacgggcacacagacatgattgatcaggatggcttatatgagaaacttaaaactgaactatgaagtgacacactcctttttcccctcctagttccaaatgactatcagtggcaaaaaagaacaaaatctgagcagagatgattttgaaccagatattttgccattatcattgtttaataaaagtaatccctgctggtcataggaaaacacacggttctaattaagtgtgaaggtatagctattgcacttatgccatctccaaaatttcttaagtattctttcactatccattaggagtttttcttaaacttgtctgataataagaatcacctggagttaggaggtggtggttgcagtgagccaatctcaccattgcacttcagcctgagcaacacgagcaaaactccgtctcaaaagtaaataaaaataatcacctggagtttgttaaaccatatggattctcaggctcctctcttgaagattctgattcagtaggtctgggagtggcgccctggattttgatcaaaattgtagagcattttaaggtgagtacctgagggagaacttaaagacatcttagttggggagtagtccttttgaattttacagctagatataatcttcagtcagataaaatttatgggagctggtgtcttatgcctgactcttagtaatttcataccggtttgaagtacgtgtgcccatgcctaaagccttgactttcagaatgttgtcttttgattcttctgtcttgatttgattaggggtgaaatttagaagtcttagtaatgtaacttgaagatgttaaacaaaaatctcaagtaaaatgaaaagcaaatatgggctactgaattaagaaactggcattctagtattaaatcctcacttcaggagcttttaaaaatactgagacccccccataaccagagattcagattcaaagactgaggataggaccttagcattgtagctatttaaagtttctaatgtgcacccagggttgggaatcaccaatgtgggtgtgaaaatgcctacaaagggttttagtgccttagaagtcctaagaagcccaatctgtatcaaagcagatccattttgcaaggatctttcttttagaactttctcagttctcttagtaagaactttagaagtaatcttgataataagcacagacagcctaacagcagaggcaacttaaataactcctgagcagttggcactagaacagaatacttggaatgacaccaaagttaaccaagtccagcatatgtccaaagagttaagtgtttcatttactgtagcattctgggtgagaaattggttgctgaaatcttaagacagtggtctcaaccttggctgcacattggaatcacctgtagggttttaaagcatccaaatggtaattaacaggcagcaaaacttcagaactagttctgcatctactgtgcaaagatcatgattaactgtcaagacactggtagaacagaacaagcaaaagattaagagttcaaaagtaaatgcaaccaatttaacatgtagtgttattaaaaaattacaaaggcctagaccagcctgggcaacatggtgaaaccccatctctacaaaaaatttttaaaaagttggccaggcatggtaatgcgcgcctgtggtcccagctgctcgggaggctgaggtgggaggatcacttgagccttggaggtcaaggctgcagtgaatcatgatcatgccactgtactccagcctgggcaacagagaccatcttaaaaaaaaaaaatccttccattgaatagaaacttcaaagtccttcatcagatcatggcattagctactttagcaaaatagtgtaaactttggttctgagtaaaaatgacttccctaccacagttgtgaatgttaatatgctgataaaactgccaagatatatttgataggtaggggattaaactcatggtttgtcaaaagagtgtttttttctagttttattcttaacagatatgttgaggtattcatatttgtttccttttgtggttttaatgaagacaatttgtaaagtaatactgttatgtatatgctaaatgttggtaaatactaattaatttccatcatttgtagacttgttttgcaatgggatatatttttacttataataccaatttaggctgggcgcagtggctcacgcctgtaatcccagcactttgggaggccaaggcaaacggatcacgaggtcaggagatcaagaccatcctggccaacatggtgaaaccccatctctactgaatacacaaaaattggctggacatggtggcgcatgtctgtaatcccagctactgtaatctcagctactcgggaggctgaggcaggagaattgcctcaaccgggaggcggaggttgcagtgagccaagatcgcaccactgcactccagcctggcaacagagcgagactctgtctcagaaaaaaaaaaacaaaaaccagtttaggctgggtatggtggctcaccagcactttgggaggctgaggcaggtggatctcttgaggtcgggagtttgagaccagcctggccaacatggtgaaaccctgtctttactaaaaatacaaaaattagccaggcatggtggcgtgtgccagtaatcccagctacttgggaggctgaggcgcgagaatcgcttgaaccctggagatggaggttgcagtgagcagagatcgcaccactgcactccagcctgggcaagagtgagactgtgtctcaaaagg

SEQ ID NO: 352320 - DNA, 1714 bp, Homo sapiens
gagcggtgggaggactgcggggctcttgaggccagctgcagagcttgtggaggccatggggcgcgtcgtcgcggagctcgtctcctcgctgctggggttgtggctgttgctgtgcagctgcggatgccccgagggcgccgagctgcgtgctccgccagataaaatcgcgattattggagccggaattggtggcacttcagcagcctattacctgcggcagaaatttgggaaagatgtgaagatagacctgtttgaaagagaagaggtcgggggccgcctggctaccatgatggtgcaggggcaagaatacgaggcaggaggttctgtcatccatcctttaaatctgcacatgaaacgttttgtcaaagacctgggtctctctgctgttcaggcctctggtggcctactggggatatataatggagagactctggtatttgaggagagcaactggttcataattaacgtgattaaattagtttggcgctatggatttcaatccctccgtatgcacatgtgggtagaggacgtgttagacaagttcatgaggatctaccgctaccagtctcatgactatgccttcagtagtgtcgaaaaattacttcatgctctaggaggagatgacttccttggaatgcttaatcgaacacttcttgaaaccttgcaaaaggccggcttttctgagaagttcctcaatgaaatgattgctcctgttatgagggtcaattatggccaaagcacggacatcaatgcctttgtgggggcggtgtcactgtcctgttctgattctggcctttgggcagtagaaggtggcaataaacttgtttgctcagggcttctgcaggcatccaaaagcaatcttatatctggctcagtaatgtacatcgaggagaaaacaaagaccaagtacacaggaaatccaacaaagatgtatgaagtggtctaccaaattggaactgagactcgttcagacttctatgacatcgtcttggtggccactccgttgaatcgaaaaatgtcgaatattacttttctcaactttgatcctccaattgaggaattccatcaatattatcaacatatagtgacaactttagttaagggggaattgaatacatctatctttagctctagacccatagataaatttggccttaatacagttttaaccactgataattcagatttgttcattaacagtattgggattgtgccctctgtgagagaaaaggaagatcctgagccatcaacagatggaacatatgtttggaagatcttttcccaagaaactcttactaaagcacaaattttaaagctctttctgtcctatgattatgctgtgaagaagccatggcttgcatatcctcactataagcccccggagaaatgcccctctatcattctccatgatcgactttattacctcaatggcatagagtgtgcagcaagtgccatggagatgagtgccattgcagcccacaacgctgcactccttgcctatcaccgctggaacgggcacacagacatgattgatcaggatggcttatatgagaaacttaaaactgaactatgaagtgacacactcctttttcccctcctagttccaaatgactatcagtggcaaaaaagaacaaaatctgagcagagatgattttgaaccagatattttgccattatcattgtttaataaaagtaatccctgctggtcatagga

SEQ ID NO: 352321 - DNA, 1385 bp, Homo sapiens
atgcgcgatctcccggagcatgcgcagcagcggcgccgacgcggggcggtgcctggtgaccgcgcgcgctcccggaagtgtgccggcgccgcgcgaaggttcagcagggagccgtgggccgggcgcgccggttcccggcacgtgtctcggcacgtggcagcgcgcctggccctgggcttggaggcgccggcgccctggatccgccggccgtggtcgccgagtcggtgtcgtccttgaccatcgccgacgcgttcattgcagccggcgagagctcagctccgaccccgccgcgccccgcgcttcccaggaggttcatctgctccttccctgactgcagcgccaattacagcaaagcctggaagcttgacgcgcacctgtgcaagcacacgggggagagaccatttgtttgtgactatgaagggtgtggcaaggccttcatcagggactaccatctgagccgccacattctgactcacacaggagaaaagccgtttgtttgtgcagccaatggctgtgatcaaaaattcaacacaaaatcaaacttgaagaaacattttgaacgcaaacatgaaaatcaacaaaaacaatatatatgcagttttgaagactgtaagaagacctttaagaaacatcagcagctgaaaatccatcagtgccagcataccaatgaacctctattcaagtgtacccaggaaggatgtgggaaacactttgcatcacccagcaagctgaaacgacatgccaaggcccacgagggctatgtatgtcaaaaaggatgttcctttgtggcaaaaacatggacggaacttctgaaacatgtgagagaaacccataaagaggaaatactatgtgaagtatgccggaaaacatttaaacgcaaagattaccttaagcaacacatgaaaactcatgccccagaaagggatgtatgtcgctgtccaagagaaggctgtggaagaacctatacaactgtgtttaatctccaaagccatatcctctccttccatgaggaaagccgcccttttgtgtgtgaacatgctggctgtggcaaaacatttgcaatgaaacaaagtctcactaggcatgctgttgtacatgatcctgacaagaagaaaatgaagctcaaagtcaaaaaatctcgtgaaaaacggagtttggcctctcatctcagtggatatatccctcccaaaaggaaacaagggcaaggcttatctttgtgtcaaaacggagagtcacccaactgtgtggaagacaagatgctctcgacagttgcagtacttacccttggctaagaactgcactgctttgtttaaaggactgcagaccaaggagcgagctttctctcagagcatgcttttctttattaaaattactgatgcagaaca

SEQ ID NO: 352322 - DNA, 840 bp, Homo sapiens
aaaactggggttgtttccttgggaatttctgatttgtatatagtgatcaggtttcaggcactgaatgttacttatatattaggtattaattttttctaaatggtaatatctggggaaatttgtgaaatttgtctgtctgtcccaccagaggaaatactatgtgaagtatgccggaaaacatttaaacgcaaagattaccttaagcaacacatgaaaactcatgccccagaaagggatgtatgtcgctgtccaagagaaggctgtggaagaacctatacaactgtgtttaatctccaaagccatatcctctccttccatgaggaaagccgcccttttgtgtgtgaacatgctggctgtggcaaaacatttgcaatgaaacaaagtctcactaggcatgctgttgtacatgatcctgacaagaagaaaatgaagctcaaagtcaaaaaatctcgtgaaaaacggagtttggcctctcatctcagtggatatatccctcccaaaaggaaacaagggcaaggcttatctttgtgtcaaaacggagagtcacccaactgtgtggaagacaagatgctctcgacagttgcagtacttacccttggctaagaactgcactgctttgtttaaaggactgcagaccaaggagcgagctttctctcagagcatgcttttctttattaaaattactgatgcagaacagaaaacaaaaatcaaaaaaaaaatatttggcggcggggcataaaaattttaaaattttcggggggccaggtaagaatatgcaagtgtctcaagaatgggtgattggtgttccaaaagcgggggggtctgaaaagggtcgcatga

SEQ ID NO: 352323 - DNA, 171 bp, Homo sapiens
gtccgatcaaagccatggctggagcatcagcacattcgtcagtgtaatgtgtaacctcttctattaatatttactgcctgtgccattcttttccttgttggccattcacaaggcttggataatcgtgtgacattttgagagccatcagatgttacgtttctcaaaaaaaaa

SEQ ID NO: 352324 - DNA, 1305 bp, Homo sapiens
  misc_feature (1)..(1): n is a, c, g, or t
ncggctaggtgcgaggctgggtgttggggagccgtgggccgggcgcgccggttcccggcacgtgtctcggcacgtggcagcgcgcctggccctgggcttggaggcgccggcgccctggatccgccggccgtggtcgccgagtcggtgtcgtccttgaccatcgccgacgcgttcattgcagccggcgagagctcagctccgaccccgccgcgccccgcgcttcccaggaggttcatctgctccttccctgactgcagcgccaattacagcaaagcctggaagcttgacgcgcacctgtgcaagcacacgggggagagaccatttgtttgtgactatgaagggtgtggcaaggccttcatcagggactaccatctgagccgccacattctgactcacacaggagaaaagccgtttgtttgtgcagccaatggctgtgatcaaaaattcaacacaaaatcaaacttgaagaaacattttgaacgcaaacatgaaaatcaacaaaaacaatatatatgcagttttgaagactgtaagaagacctttaagaaacatcagcagctgaaaatccatcagtgccagcataccaatgaacctctattcaagtgtacccaggaaggatgtgggaaacactttgcatcacccagcaagctgaaacgacatgccaaggcccacgagggctatgtatgtcaaaaaggatgttcctttgtggcaaaaacatggacggaacttctgaaacatgtgagagaaacccataaagaggaaatactatgtgaagtatgccggaaaacatttaaacgcaaagattaccttaagcaacacatgaaaactcatgccccagaaagggatgtatgtcgctgtccaagagaaggctgtggaagaacctatacaactgtgtttaatctccaaagccatatcctctccttccatgaggaaagccgcccttttgtgtgtgaacatgctggctgtggcaaaacatttgcaatgaaacaaagtctcactaggcatgctgttgtacatgatcctgacaagaagaaaatgaagctcaaagtcaaaaaatctcgtgaaaaacggagtttggcctctcatctcagtggatatatccctcccaaaaggaaacaagggcaaggcttatctttgtgtcaaaacggagagtcacccaactgtgtggaagacaagatgctctcgacagttgcagtacttacccttggctaagaactgcactgctttgtttaaaggactgcagaccaaggagcgagctttctctcagagcatgcttttctttattaaaattactgatgcagaaca

SEQ ID NO: 352325 - DNA, 2038 bp, Homo sapiens
atgcgcgatctcccggagcatgcgcagcagcggcgccgacgcggggcggtgcctggtgaccgcgcgcgctcccggaagtgtgccggcgccgcgcgaaggttcagcagggagccgtgggccgggcgcgccggttcccggcacgtgtctcggcacgtggcagcgcgcctggccctgggcttggaggcgccggcgccctggatccgccggccgtggtcgccgagtcggtgtcgtccttgaccatcgccgacgcgttcattgcagccggcgagagctcagctccgaccccgccgcgccccgcgcttcccaggaggttcatctgctccttccctgactgcagcgccaattacagcaaagcctggaagcttgacgcgcacctgtgcaagcacacgggggagagaccatttgtttgtgactatgaagggtgtggcaaggccttcatcagggactaccatctgagccgccacattctgactcacacaggagaaaagccgtttgtttgtgcagccaatggctgtgatcaaaaattcaacacaaaatcaaacttgaagaaacattttgaacgcaaacatgaaaatcaacaaaaacaatatatatgcagttttgaagactgtaagaagacctttaagaaacatcagcagctgaaaatccatcagtgccagcataccaatgaacctctattcaagtgtacccaggaaggatgtgggaaacactttgcatcacccagcaagctgaaacgacatgccaaggcccacgagggctatgtatgtcaaaaaggatgttcctttgtggcaaaaacatggacggaacttctgaaacatgtgagagaaacccataaagaggaaatactatgtgaagtatgccggaaaacatttaaacgcaaagattaccttaagcaacacatgaaaactcatgccccagaaagggatgtatgtcgctgtccaagagaaggctgtggaagaacctatacaactgtgtttaatctccaaagccatatcctctccttccatgaggaaagccgcccttttgtgtgtgaacatgctggctgtggcaaaacatttgcaatgaaacaaagtctcactaggcatgctgttgtacatgatcctgacaagaagaaaatgaagctcaaagtcaaaaaatctcgtgaaaaacggagtttggcctctcatctcagtggatatatccctcccaaaaggaaacaagggcaaggcttatctttgtgtcaaaacggagagtcacccaactgtgtggaagacaagatgctctcgacagttgcagtacttacccttggctaagaactgcactgctttgtttaaaggactgcagaccaaggagcgagctttctctcagagcatgcttttctttattaaaattactgatgcagaacaacatttgattccttatcatttccatggtctttgttcaaagtgtctctttcctgggtctcttgagtttctttatatgccttctcctcatttttgctcaaagcacgaagaacacacattaaagcttttcctccttgaacagcttgtggcctagatgagaatgtagctattccaggcatagtctggagtatttgatgaaatatctcctccatttcattttctgacacgtctacattttttcctttctttatggtaatctggactaggtgttttttcttaatccactgctgaatctgtttagtctttgtgtccaaatcatgttgtccaatatttgaagacaaaatcagttcctttctcagggttggtccagttttggggttcgccttctccatctccctcagcctctgccgctcctggaggatctgcaatcctgtcatgagctgatactctgcaggttctgtgctggtgttcctttgaaccagtcgcaggtctcgctcatccataagtctaatcacatttgctcggtgcatgtttcccaaatcattgcccttctcatcaaataagtgaataactcgctgactaatttttcttccaacgttactaaaagctgttttattcttttttgtcttttttccttcattctgggtgtcttcagc

SEQ ID NO: 352326 - DNA, 2107 bp, Homo sapiens
atgcgcgatctcccggagcatgcgcagcagcggcgccgacgcggggcggtgcctggtgaccgcgcgcgctcccggaagtgtgccggcgccgcgcgaaggttcagcagggagccgtgggccgggcgcgccggttcccggcacgtgtctcggcacgtggcagcgcgcctggccctgggcttggaggcgccggcgccctggatccgccggccgtggtcgccgagtcggtgtcgtccttgaccatcgccgacgcgttcattgcagccggcgagagctcagctccgaccccgccgcgccccgcgcttcccaggaggttcatctgctccttccctgactgcagcgccaattacagcaaagcctggaagcttgacgcgcacctgtgcaagcacacgggggagagaccatttgtttgtgactatgaagggtgtggcaaggccttcatcagggactaccatctgagccgccacattctgactcacacaggagaaaagccgtttgtttgtgcagccaatggctgtgatcaaaaattcaacacaaaatcaaacttgaagaaacattttgaacgcaaacatgaaaatcaacaaaaacaatatatatgcagttttgaagactgtaagaagacctttaagaaacatcagcagctgaaaatccatcagtgccagcataccaatgaacctctattcaagtgtacccaggaaggatgtgggaaacactttgcatcacccagcaagctgaaacgacatgccaaggcccacgagggctatgtatgtcaaaaaggatgttcctttgtggcaaaaacatggacggaacttctgaaacatgtgagagaaacccataaagaggaaatactatgtgaagtatgccggaaaacatttaaacgcaaagattaccttaagcaacacatgaaaactcatgccccagaaagggatgtatgtcgctgtccaagagaaggctgtggaagaacctatacaactgtgtttaatctccaaagccatatcctctccttccatgaggaaagccgcccttttgtgtgtgaacatgctggctgtggcaaaacatttgcaatgaaacaaagtctcactaggcatgctgttgtacatgatcctgacaagaagaaaatgaagctcaaagtcaaaaaatctcgtgaaaaacggagtttggcctctcatctcagtggatatatccctcccaaaaggaaacaagggcaaggcttatctttgtgtcaaaacggagagtcacccaactgtgtggaagacaagatgctctcgacagttgcagtacttacccttggctaagaactgcactgctttgtttaaaggactgcagaccaaggagcgagctttctctcagagcatgcttttctttattaaaattactgatgcagaacaacatttgattccttatcatttccatggtctttgttcaaagtgtctctttcctgggtctcttgagtttctttatatgccttctcctcatttttgctcaaagcacgaagaacacacattaaagcttttcctccttgaacagcttgtggcctagatgagaatgtagctattccaggcatagtctggagtatttgatgaaatatctcctcctaaaaaagggaaacagccaaagattaatttaaaatcagaggctttggtgctttctaatgttctgcttgaacattcacaaaaactggcacccttgaattgctgctgtcggttaagtgattagctaatcagttcatacgtatctggttaagttgactgaaatctgtacaataacaccatgtaactaaactgacatgctgaatgcttcctaattttaaatctccacttcgtcatggcacgaagaggctacgtttggctcagcattaccctctcccacaaacagaaagcactgggtttgggcattggcaaaatacctcctcatccccaaggtgtcagccgagcagttctcagcactctctattgcccctaacagagtctctctcagtgactgaaacaaatggatacctgggctcaagaaattctgcatcagctgggttgcgacctatgcttaagtgactctactgtggagctggattactaaggatacccttagtggatgataaagttatctaactttt

SEQ ID NO: 352327 - DNA, 1472 bp, Homo sapiens
atgcgcgatctcccggagcatgcgcagcagcggcgccgacgcggggcggtgcctggtgaccgcgcgcgctcccggaagtgtgccggcgccgcgcgaaggttcagcagggagccgtgggccgggcgcgccggttcccggcacgtgtctcggcacgtggcagcgcgcctggccctgggcttggaggcgccggcgccctggatccgccggccgtggtcgccgagtcggtgtcgtccttgaccatcgccgacgcgttcattgcagccggcgagagctcagctccgaccccgccgcgccccgcgcttcccaggaggttcatctgctccttccctgactgcagcgccaattacagcaaagcctggaagcttgacgcgcacctgtgcaagcacacgggggagagaccatttgtttgtgactatgaagggtgtggcaaggccttcatcagggactaccatctgagccgccacattctgactcacacaggagaaaagccgtttgtttgtgcagccaatggctgtgatcaaaaattcaacacaaaatcaaacttgaagaaacattttgaacgcaaacatgaaaatcaacaaaaacaatatatatgcagttttgaagactgtaagaagacctttaagaaacatcagcagctgaaaatccatcagtgccagcataccaatgaacctctattcaagtgtacccaggaaggatgtgggaaacactttgcatcacccagcaagctgaaacgacatgccaaggcccacgagggctatgtatgtcaaaaaggatgttcctttgtggcaaaaacatggacggaacttctgaaacatgtgagagaaacccataaagaggaaatactatgtgaagtatgccggaaaacatttaaacgcaaagattaccttaagcaacacatgaaaactcatgccccagaaagggatgtatgtcgctgtccaagagaaggctgtggaagaacctatacaactgtgtttaatctccaaagccatatcctctccttccatgaggaaagccgcccttttgtgtgtgaacatgctggctgtggcaaaacatttgcaatgaaacaaagtctcactaggcatgctgttgtacatgatcctgacaagaagaaaatgaagctcaaagtcaaaaaatctcgtgaaaaacggagtttggcctctcatctcagtggatatatccctcccaaaaggaaacaagggcaaggcttatctttgtgtcaaaacggagagtcacccaactgtgtggaagacaagatgctctcgacagttgcagtacttacccttggctaagaactgcactgctttgtttaaaggactgcagaccaaggagcgagctttctctcagagcatgcttttctttattaaaattactgatgcagaacaaaaaaaaaggggggcggtaaatctcgggggcagtaggtccagtttgaaagggcaagagggtaagaggggggttaaaggtggacgcgg

SEQ ID NO: 352328 - DNA, 2380 bp, Homo sapiens
atgcgcgatctcccggagcatgcgcagcagcggcgccgacgcggggcggtgcctggtgaccgcgcgcgctcccggaagtgtgccggcgccgcgcgaaggttcagcagggagccgtgggccgggcgcgccggttcccggcacgtgtctcggcacgtggcagcgcgcctggccctgggcttggaggcgccggcgccctggatccgccggccgtggtcgccgagtcggtgtcgtccttgaccatcgccgacgcgttcattgcagccggcgagagctcagctccgaccccgccgcgccccgcgcttcccaggaggttcatctgctccttccctgactgcagcgccaattacagcaaagcctggaagcttgacgcgcacctgtgcaagcacacgggggagagaccatttgtttgtgactatgaagggtgtggcaaggccttcatcagggactaccatctgagccgccacattctgactcacacaggagaaaagccgtttgtttgtgcagccaatggctgtgatcaaaaattcaacacaaaatcaaacttgaagaaacattttgaacgcaaacatgaaaatcaacaaaaacaatatatatgcagttttgaagactgtaagaagacctttaagaaacatcagcagctgaaaatccatcagtgccagcataccaatgaacctctattcaagtgtacccaggaaggatgtgggaaacactttgcatcacccagcaagctgaaacgacatgccaaggcccacgagggctatgtatgtcaaaaaggatgttcctttgtggcaaaaacatggacggaacttctgaaacatgtgagagaaacccataaagaggaaatactatgtgaagtatgccggaaaacatttaaacgcaaagattaccttaagcaacacatgaaaactcatgccccagaaagggatgtatgtcgctgtccaagagaaggctgtggaagaacctatacaactgtgtttaatctccaaagccatatcctctccttccatgaggaaagccgcccttttgtgtgtgaacatgctggctgtggcaaaacatttgcaatgaaagtaagcactcaccctcatactcatggtcctatagtctatgctttcacaacatggttttcatattaatatttcattaataactttctctttcattgtagcaaagtctcactaggcatgctgttgtacatgatcctgacaagaagaaaatgaagctcaaagtaagttgaaactacttaggcaagcttagttttcaagtggaaattgtttaaggccagaaggagtctgtttggaattcttttcacctgctttactgtttgagtctgcactactgttgaagactttacttcctcataaagccaatgttgtacactatatctgctgggtacatatgactatcgtaaaattaactcagacagttttgattttgaattcctaatcgtgtgtcttcccttattcccaaaggtcaaaaaatctcgtgaaaaacggagtttggcctctcatctcagtggatatatccctcccaaaaggaaacaagggcaaggcttatctttgtgtcaaaacggagagtcacccaactgtgtggaagacaagatgctctcgacagttgcagtacttacccttggctaagaactgcactgctttgtttaaaggactgcagaccaaggagcgagctttctctcagagcatgcttttctttattaaaattactgatgcagaacaacatttgattccttatcatttccatggtctttgttcaaagtgtctctttcctgggtctcttgagtttctttatatgccttctcctcatttttgctcaaagcacgaagaacacacattaaagcttttcctccttgaacagcttgtggcctagatgagaatgtagctattccaggcatagtctggagtatttgatgaaatatctcctccatttcattttctgacacgtctacattttttcctttctttatggtaatctggactaggtgttttttcttaatccactgctgaatctgtttagtctttgtgtccaaatcatgttgtccaatatttgaagacaaaatcagttcctttctcagggttggtccagttttggggttcgccttctccatctccctcagcctctgccgctcctggaggatctgcaatcctgtcatgagctgatactctgcaggttctgtgctggtgttcctttgaaccagtcgcaggtctcgctcatccataagtctaatcacatttgctcggtgcatgtttcccaaatcattgcccttctcatcaaataagtgaataactcgctgactaatttttcttccaacgttactaaaagctgttttattcttttttgtcttttttccttcattctgggtgtcttcagc

SEQ ID NO: 352329 - DNA, 1727 bp, Homo sapiens
atgcgcgatctcccggagcatgcgcagcagcggcgccgacgcggggcggtgcctggtgaccgcgcgcgctcccggaagtgtgccggcgccgcgcgaaggttcagcagggagccgtgggccgggcgcgccggttcccggcacgtgtctcggcacgtggcagcgcgcctggccctgggcttggaggcgccggcgccctggatccgccggccgtggtcgccgagtcggtgtcgtccttgaccatcgccgacgcgttcattgcagccggcgagagctcagctccgaccccgccgcgccccgcgcttcccaggaggttcatctgctccttccctgactgcagcgccaattacagcaaagcctggaagcttgacgcgcacctgtgcaagcacacgggggagagaccatttgtttgtgactatgaagggtgtggcaaggccttcatcagggactaccatctgagccgccacattctgactcacacaggagaaaagccgtttgtttgtgcagccaatggctgtgatcaaaaattcaacacaaaatcaaacttgaagaaacattttgaacgcaaacatgaaaatcaacaaaaacaatatatatgcagttttgaagactgtaagaagacctttaagaaacatcagcagctgaaaatccatcagtgccagcataccaatgaacctctattcaagtgtacccaggaaggatgtgggaaacactttgcatcacccagcaagctgaaacgacatgccaaggcccacgagggctatgtatgtcaaaaaggatgttcctttgtggcaaaaacatggacggaacttctgaaacatgtgagagaaacccataaagaggaaatactatgtgaagtatgccggaaaacatttaaacgcaaagattaccttaagcaacacatgaaaactcatgccccagaaagggatgtatgtcgctgtccaagagaaggctgtggaagaacctatacaactgtgtttaatctccaaagccatatcctctccttccatgaggaaagccgcccttttgtgtgtgaacatgctggctgtggcaaaacatttgcaatgaaagtaagcactcaccctcatactcatggtcctatagtctatgctttcacaacatggttttcatattaatatttcattaataactttctctttcattgtagcaaagtctcactaggcatgctgttgtacatgatcctgacaagaagaaaatgaagctcaaagtaagttgaaactacttaggcaagcttagttttcaagtggaaattgtttaaggccagaaggagtctgtttggaattcttttcacctgctttactgtttgagtctgcactactgttgaagactttacttcctcataaagccaatgttgtacactatatctgctgggtacatatgactatcgtaaaattaactcagacagttttgattttgaattcctaatcgtgtgtcttcccttattcccaaaggtcaaaaaatctcgtgaaaaacggagtttggcctctcatctcagtggatatatccctcccaaaaggaaacaagggcaaggcttatctttgtgtcaaaacggagagtcacccaactgtgtggaagacaagatgctctcgacagttgcagtacttacccttggctaagaactgcactgctttgtttaaaggactgcagaccaaggagcgagctttctctcagagcatgcttttctttattaaaattactgatgcagaaca

SEQ ID NO: 352330 - DNA, 1612 bp, Homo sapiens
atgcgcgatctcccggagcatgcgcagcagcggcgccgacgcggggcggtgcctggtgaccgcgcgcgctcccggaagtgtgccggcgccgcgcgaaggttcagcagggagccgtgggccgggcgcgccggttcccggcacgtgtctcggcacgtggcagcgcgcctggccctgggcttggaggcgccggcgccctggatccgccggccgtggtcgccgagtcggtgtcgtccttgaccatcgccgacgcgttcattgcagccggcgagagctcagctccgaccccgccgcgccccgcgcttcccaggaggttcatctgctccttccctgactgcagcgccaattacagcaaagcctggaagcttgacgcgcacctgtgcaagcacacgggggaggtgaggggggcgaggctgccaaccctgggcctagggatggcgcgtggccccggggtagccactgcagtcgtggccagggccgcaggccccgctgtgcagcgcgttcagctttgacatccaggacttggggaaggagctgaggaagtagacaggaagttgtaggaccttcgttctgcgaccttgatatccatggcaggggctcgggatttactaagcagtcattgatcagaccatttgtttgtgactatgaagggtgtggcaaggccttcatcagggactaccatctgagccgccacattctgactcacacaggagaaaagccgtttgtttgtgcagccaatggctgtgatcaaaaattcaacacaaaatcaaacttgaagaaacattttgaacgcaaacatgaaaatcaacaaaaacaatatatatgcagttttgaagactgtaagaagacctttaagaaacatcagcagctgaaaatccatcagtgccagcataccaatgaacctctattcaagtgtacccaggaaggatgtgggaaacactttgcatcacccagcaagctgaaacgacatgccaaggcccacgagggctatgtatgtcaaaaaggatgttcctttgtggcaaaaacatggacggaacttctgaaacatgtgagagaaacccataaagaggaaatactatgtgaagtatgccggaaaacatttaaacgcaaagattaccttaagcaacacatgaaaactcatgccccagaaagggatgtatgtcgctgtccaagagaaggctgtggaagaacctatacaactgtgtttaatctccaaagccatatcctctccttccatgaggaaagccgcccttttgtgtgtgaacatgctggctgtggcaaaacatttgcaatgaaacaaagtctcactaggcatgctgttgtacatgatcctgacaagaagaaaatgaagctcaaagtcaaaaaatctcgtgaaaaacggagtttggcctctcatctcagtggatatatccctcccaaaaggaaacaagggcaaggcttatctttgtgtcaaaacggagagtcacccaactgtgtggaagacaagatgctctcgacagttgcagtacttacccttggctaagaactgcactgctttgtttaaaggactgcagaccaaggagcgagctttctctcagagcatgcttttctttattaaaattactgatgcagaaca

SEQ ID NO: 352331 - DNA, 1494 bp, Homo sapiens
gcaggagctctggagcctcttctgactggtctctgccatcctcatcttgggctttaacctcactgtgatgcctgtttgggcccatctgtcacataaagcatgccactggcaggaaggaggaaagggcataagaggcatgcccccttatttagagactttgtgggggttgagcaggatgggctggactcagccatgagccgccctaattgcaggggaggccggagagtgcgctttctgtcggccacctgcccagctaacactcagcattctgtccctgcagttaggggggcttctagggtctctgccacagcgcccctcccatttgtgggcctctgtgctgtgcctcccatggtcactgctggcttgtttgtctctgcttggccctaggaatgggacagtgcctgcctcagggttatcagtgagtgatggctaagattgagcctgggaaaggaagtcctgcttcatccctcaagcttacgaaggctcatcacaagaggcacaaattttcttttgggaaaaaaaaaaaaaaaaaaggaaaaggctttgcagaggatttagatcattcaaagccaagatgccaagataaggggaaccagaatggcttgttgtgcagccaatggctgtgatcaaaaattcaacacaaaatcaaacttgaagaaacattttgaacgcaaacatgaaaatcaacaaaaacaatatatatgcagttttgaagactgtaagaagacctttaagaaacatcagcagctgaaaatccatcagtgccagcataccaatgaacctctattcaagtgtacccaggaaggatgtgggaaacactttgcatcacccagcaagctgaaacgacatgccaaggcccacgagggctatgtatgtcaaaaaggatgttcctttgtggcaaaaacatggacggaacttctgaaacatgtgagagaaacccataaagaggaaatactatgtgaagtatgccggaaaacatttaaacgcaaagattaccttaagcaacacatgaaaactcatgccccagaaagggatgtatgtcgctgtccaagagaaggctgtggaagaacctatacaactgtgtttaatctccaaagccatatcctctccttccatgaggaaagccgcccttttgtgtgtgaacatgctggctgtggcaaaacatttgcaatgaaacaaagtctcactaggcatgctgttgtacatgatcctgacaagaagaaaatgaagctcaaagtcaaaaaatctcgtgaaaaacggagtttggcctctcatctcagtggatatatccctcccaaaaggaaacaagggcaaggcttatctttgtgtcaaaacggagagtcacccaactgtgtggaagacaagatgctctcgacagttgcagtacttacccttggctaagaactgcactgctttgtttaaaggactgcagaccaaggagcgagctttctctcagagcatgcttttctttattaaaattactgatgcagaaca

SEQ ID NO: 352332 - DNA, 1564 bp, Homo sapiens
atgcgcgatctcccggagcatgcgcagcagcggcgccgacgcggggcggtgcctggtgaccgcgcgcgctcccggaagtgtgccggcgccgcgcgaaggttcagcagggagccgtgggccgggcgcgccggttcccggcacgtgtctcggcacgtggcagcgcgcctggccctgggcttggaggcgccggcgccctggatccgccggccgtggtcgccgagtcggtgtcgtccttgaccatcgccgacgcgttcattgcagccggcgagagctcagctccgaccccgccgcgccccgcgcttcccaggaggttcatctgctccttccctgactgcagcgccaattacagcaaagcctggaagcttgacgcgcacctgtgcaagcacacgggggagagaccatttgtttgtgactatgaagggtgtggcaaggccttcatcagggactaccatctgagccgccacattctgactcacacaggagaaaagccgtttgtttgtgcagccaatggctgtgatcaaaaattcaacacaaaatcaaacttgaagaaacattttgaacgcaaacatgaaaatcaacaaaaacaatatatacaaagtctcactaggcatgctgttgtacatgatcctgacaagaagaaaatgaagctcaaagtcaaaaaatctcgtgaaaaacggagtttggcctctcatctcagtggatatatccctcccaaaaggaaacaagggcaaggcttatctttgtgtcaaaacggagagtcacccaactgtgtggaagacaagatgctctcgacagttgcagtacttacccttggctaagaactgcactgctttgtttaaaggactgcagaccaaggagcgagctttctctcagagcatgcttttctttattaaaattactgatgcagaacaacatttgattccttatcatttccatggtctttgttcaaagtgtctctttcctgggtctcttgagtttctttatatgccttctcctcatttttgctcaaagcacgaagaacacacattaaagcttttcctccttgaacagcttgtggcctagatgagaatgtagctattccaggcatagtctggagtatttgatgaaatatctcctccatttcattttctgacacgtctacattttttcctttctttatggtaatctggactaggtgttttttcttaatccactgctgaatctgtttagtctttgtgtccaaatcatgttgtccaatatttgaagacaaaatcagttcctttctcagggttggtccagttttggggttcgccttctccatctccctcagcctctgccgctcctggaggatctgcaatcctgtcatgagctgatactctgcaggttctgtgctggtgttcctttgaaccagtcgcaggtctcgctcatccataagtctaatcacatttgctcggtgcatgtttcccaaatcattgcccttctcatcaaataagtgaataactcgctgactaatttttcttccaacgttactaaaagctgttttattcttttttgtcttttttccttcattctgggtgtcttcagc

SEQ ID NO: 352333 - DNA, 1691 bp, Homo sapiens
aaaactggggttgtttccttgggaatttctgatttgtatatagtgatcaggtttcaggcactgaatgttacttatatattaggtattaattttttctaaatggtaatatctggggaaatttgtgaaatttgtctgtctgtcccaccagaggaaatactatgtgaagtatgccggaaaacatttaaacgcaaagattaccttaagcaacacatgaaaactcatgccccagaaagggatgtatgtcgctgtccaagagaaggctgtggaagaacctatacaactgtgtttaatctccaaagccatatcctctccttccatgaggaaagccgcccttttgtgtgtgaacatgctggctgtggcaaaacatttgcaatgaaagtaagcactcaccctcatactcatggtcctatagtctatgctttcacaacatggttttcatattaatatttcattaataactttctctttcattgtagcaaagtctcactaggcatgctgttgtacatgatcctgacaagaagaaaatgaagctcaaagtaagttgaaactacttaggcaagcttagttttcaagtggaaattgtttaaggccagaaggagtctgtttggaattcttttcacctgctttactgtttgagtctgcactactgttgaagactttacttcctcataaagccaatgttgtacactatatctgctgggtacatatgactatcgtaaaattaactcagacagttttgattttgaattcctaatcgtgtgtcttcccttattcccaaaggtcaaaaaatctcgtgaaaaacggagtttggcctctcatctcagtggatatatccctcccaaaaggaaacaagggcaaggcttatctttgtgtcaaaacggagagtcacccaactgtgtggaagacaagatgctctcgacagttgcagtacttacccttggctaagaactgcactgctttgtttaaaggactgcagaccaaggagcgagctttctctcagagcatgcttttctttattaaaattactgatgcagaacaacatttgattccttatcatttccatggtctttgttcaaagtgtctctttcctgggtctcttgagtttctttatatgccttctcctcatttttgctcaaagcacgaagaacacacattaaagcttttcctccttgaacagcttgtggcctagatgagaatgtagctattccaggcatagtctggagtatttgatgaaatatctcctccatttcattttctgacacgtctacattttttcctttctttatggtaatctggactaggtgttttttcttaatccactgctgaatctgtttagtctttgtgtccaaatcatgttgtccaatatttgaagacaaaatcagttcctttctcagggttggtccagttttggggttcgccttctccatctccctcagcctctgccgctcctggaggatctgcaatcctgtcatgagctgatactctgcaggttctgtgctggtgttcctttgaaccagtcgcaggtctcgctcatccataagtctaatcacatttgctcggtgcatgtttcccaaatcattgcccttctcatcaaataagtgaataactcgctgactaatttttcttccaacgttactaaaagctgttttattcttttttgtcttttttccttcattctgggtgtcttcagc

SEQ ID NO: 352334 - DNA, 248 bp, Homo sapiens
tgtcttaaaacttcttctcccttggtttattaatattttggtttatataacttcttacagttgtgcagccaatggctgtgatcaaaaattcaacacaaaatcaaacttgaagaaacattttgaacgcaaacatgaaaatcaacaaaaacaatatatatagtaagtatgattttatatgcttaaattttttgagtatttttacacttactgcctatgtttctgacattttcagccaggtgcggtggctc

SEQ ID NO: 352335 - DNA, 743 bp, Homo sapiens
cgacgcggggcggtgcctggtgaccgcgcgcgctcccggaagtgtgccggcgccgcgcgaaggttcagcagggagccgtgggccgggcgcgccggttcccggcacgtgtctcggcacgtggcagcgcgcctggccctgggcttggaggcgccggcgccctggatccgccggccgtggtcgccgagtcggtgtcgtccttgaccatcgccgacgcgttcattgcagccggcgagagctcagctccgaccccgccgcgccccgcgcttcccaggaggttcatctgctccttccctgactgcagcgccaattacagcaaagcctggaagcttgacgcgcacctgtgcaagcacacgggggaggtgaggggggcgaggctgccaaccctgggcctagggatggcgcgtggccccggggtagccactgcagtcgtggccagggccgcaggccccgctgtgcagcgcgttcagctttgacatccaggacttggggaaggagctgaggaagtagacaggaagttgtaggaccttcgttctgcgaccttgatatccatggcaggggctcgggatttactaagcagtcattgatcgtgagtctcggccagccaagtgcctcccgtaatctgcaaataagtgtgaggtttgagggggcccaccgctactagacacctgccaaacactggcccctggagctggtacagaagatgggttacatgtaccaggggtcgtgaaagcagcatgtgctca

SEQ ID NO: 352336 - DNA, 938 bp, Homo sapiens
  misc_feature (859)..(859): n is a, c, g, or t
  misc_feature (863)..(863): n is a, c, g, or t
atgcgcgatctcccggagcatgcgcagcagcggcgccgacgcggggcggtgcctggtgaccgcgcgcgctcccggaagtgtgccggcgccgcgcgaaggttcagcagggagccgtgggccgggcgcgccggttcccggcacgtgtctcggcacgtggcagcgcgcctggccctgggcttggaggcgccggcgccctggatccgccggccgtggtcgccgagtcggtgtcgtccttgaccatcgccgacgcgttcattgcagccggcgagagctcagctccgaccccgccgcgccccgcgcttcccaggaggttcatctgctccttccctgactgcagcgccaattacagcaaagcctggaagcttgacgcgcacctgtgcaagcacacgggggagagaccatttgtttgtgactatgaagggtgtggcaaggccttcatcagggactaccatctgagccgccacattctgactcacacaggagaaaagccgtttgtttgtgcagccaatggctgtgatcaaaaattcaacacaaaatcaaacttgaagaaacattttgaacgcaaacatgaaaatcaacaaaaacaatatatatgcagttttgaagactgtaagaagacctttaagaaacatcagcagctgaaaatccatcagtgccagcataccaatgaacctctattcaagtgtacccaggaaggatgtgggaaacactttgcatcacccagcaagctgaaacgacatgccaaggcccacgagggctatgtatgtcaaaaaggatgttcctttgtggcaaaaacatggacggaacttctgaaacatgtgagagaaacccataaagcaatactatgtgaagtatgcgnaaanttaacgcaagatacttaagacctgacaactcttgccaaaggtgttgccgccaaacagggtggaacttactggtta

SEQ ID NO: 352337 - DNA, 782 bp, Homo sapiens
aggcggcccggccccttggaggacaccaccttggcgggggcccttttggtgcaggcgccggcgccctggatccgccggccgtggtcgccgagtcggtgtcgtccttgaccatcgccgacgcgttcattgcagccggcgagagctcagctccgaccccgccgcgccccgcgcttcccaggaggttcatctgctccttccctgactgcagcgccaattacagcaaagcctggaagcttgacgcgcacctgtgcaagcacacgggggagagaccatttgtttgtgactatgaagggtgtggcaaggccttcatcagggactaccatctgagccgccacattctgactcacacaggagaaaagccgtttgtttgtgcagccaatggctgtgatcaaaaattcaacacaaaatcaaacttgaagaaacattttgaacgcaaacatgaaaatcaacaaaaacaatatatacaaagtctcactaggcatgctgttgtacatgatcctgacaagaagaaaatgaagctcaaagtcaaaaaatctcgtgaaaaacggagtttggcctctcatctcagtggatatatccctcccaaaaggaaacaagggcaaggcttatctttgtgtcaaaacggagagtcacccaactgtgtggaagacaagatgctctcgacagttgcagtacttacccttggctaagaactgcactgctttgtttaaaggactgcagaccaaggagcgagctttctctcagagcatgcttttctttattaaaattactgatgcagaaca

SEQ ID NO: 352338 - DNA, 1695 bp, Homo sapiens
atgcgcgatctcccggagcatgcgcagcagcggcgccgacgcggggcggtgcctggtgaccgcgcgcgctcccggaagtgtgccggcgccgcgcgaaggttcagcagggagccgtgggccgggcgcgccggttcccggcacgtgtctcggcacgtggcagcgcgcctggccctgggcttggaggcgccggcgccctggatccgccggccgtggtcgccgagtcggtgtcgtccttgaccatcgccgacgcgttcattgcagccggcgagagctcagctccgaccccgccgcgccccgcgcttcccaggaggttcatctgctccttccctgactgcagcgccaattacagcaaagcctggaagcttgacgcgcacctgtgcaagcacacgggggagagaccatttgtttgtgactatgaagggtgtggcaaggccttcatcagggactaccatctgagccgccacattctgactcacacaggagaaaagccgtttgtttgtgcagccaatggctgtgatcaaaaattcaacacaaaatcaaacttgaagaaacattttgaacgcaaacatgaaaatcaacaaaaacaatatatatgcagttttgaagactgtaagaagacctttaagaaacatcagcagctgaaaatccatcagtgccagcataccaatgaacctctattcaagtgtacccaggaaggatgtgggaaacactttgcatcacccagcaagctgaaacgacatgccaaggcccacgagggctatgtatgtcaaaaaggatgttcctttgtggcaaaaacatggacggaacttctgaaacatgtgagagaaacccataaagaggaaatactatgtgaagtatgccggaaaacatttaaacgcaaagattaccttaagcaacacatgaaaactcatgccccagaaagggatgtatgtcgctgtccaagagaaggctgtggaagaacctatacaactgtgtttaatctccaaagccatatcctctccttccatgaggaaagccgcccttttgtgtgtgaacatgctggctgtggcaaaacatttgcaatgaaacaaagtctcactaggcatgctgttgtacatgatcctgacaagaagaaaatgaagctcaaagtcaaaaaatctcgtgaaaaacggagtttggcctctcatctcagtggatatatccctcccaaaaggaaacaagggcaaggcttatctttgtgtcaaaacggagagtcacccaactgtgtggaagacaagatgctctcgacagttgcagtacttacccttggctaagaactgcactgctttgtttaaaggactgcagaccaaggagcgagctttctctcagagcatgcttttctttattaaaattactgatgcagaacaaaaaaaaaaaaacaaaaaaaaaaaaaacaattttggagcgcgactgaggcactaagaaaaagtttatagaacgattagcttagagacagcgggagccaaaagagggaaggagtgccacgtgcgaaaacagcgtgataccacagagaaaaacccggggacaaaaaacaaggggcgtgaggatcctacaacaaaataataaaacaccgcggaggacaaacaggacgtctcgaggaaaaaaaccagaaggagagccagggggacacaaagggggatataaagcagggcccacgagagaggacataaaatacgg

SEQ ID NO: 352339 - DNA, 2410 bp, Homo sapiens
atgcgcgatctcccggagcatgcgcagcagcggcgccgacgcggggcggtgcctggtgaccgcgcgcgctcccggaagtgtgccggcgccgcgcgaaggttcagcagggagccgtgggccgggcgcgccggttcccggcacgtgtctcggcacgtggcagcgcgcctggccctgggcttggaggcgccggcgccctggatccgccggccgtggtcgccgagtcggtgtcgtccttgaccatcgccgacgcgttcattgcagccggcgagagctcagctccgaccccgccgcgccccgcgcttcccaggaggttcatctgctccttccctgactgcagcgccaattacagcaaagcctggaagcttgacgcgcacctgtgcaagcacacgggggagagaccatttgtttgtgactatgaagggtgtggcaaggccttcatcagggactaccatctgagccgccacattctgactcacacaggagaaaagccgtttgtttgtgcagccaatggctgtgatcaaaaattcaacacaaaatcaaacttgaagaaacattttgaacgcaaacatgaaaatcaacaaaaacaatatatatgcagttttgaagactgtaagaagacctttaagaaacatcagcagctgaaaatccatcagtgccagcataccaatgaacctctattcaagtgtacccaggaaggatgtgggaaacactttgcatcacccagcaagctgaaacgacatgccaaggcccacgagggctatgtatgtcaaaaaggatgttcctttgtggcaaaaacatggacggaacttctgaaacatgtgagagaaacccataaagaggaaatactatgtgaagtatgccggaaaacatttaaacgcaaagattaccttaagcaacacatgaaaactcatgccccagaaagggatgtatgtcgctgtccaagagaaggctgtggaagaacctatacaactgtgtttaatctccaaagccatatcctctccttccatgaggaaagccgcccttttgtgtgtgaacatgctggctgtggcaaaacatttgcaatgaaacaaagtctcactaggcatgctgttgtacatgatcctgacaagaagaaaatgaagctcaaagtcaaaaaatctcgtgaaaaacggagtttggcctctcatctcagtggatatatccctcccaaaaggaaacaagggcaaggcttatctttgtgtcaaaacggagagtcacccaactgtgtggaagacaagatgctctcgacagttgcagtacttacccttggctaagaactgcactgctttgtttaaaggactgcagaccaaggagcgagctttctctcagagcatgcttttctttattaaaattactgatgcagaacaacatttgattccttatcatttccatggtctttgttcaaagtgtctctttcctgggtctcttgagtttctttatatgccttctcctcatttttgctcaaagcacgaagaacacacattaaagcttttcctccttgaacagcttgtggcctagatgagaatgtagctattccaggcatagtctggagtatttgatgaaatatctcctccatttcattttctgacacgtctacattttttcctttctttatggtaatctggactaggtgttttttcttaatccactgctgaatctgtttagtctttgtgtccaaatcatgttgtccaatatttgaagacaaaatcagttcctttctcagggttggtcctggtttgaaacagatagggtgcaaggactactgactagtccactgtgaaccctgaacttcccaacatgcccatcataaaatcctaggttgccacctgacaatcttctcatctggctttcagtttcacagaccagtaaatgtcttttcaaatggggaagatacacataaaggtaccaattttttacctgccctggaagggtacttaaaatctgaaatgcttccatttattgttaaccatcgtttgttgaaagaacaccaaaagatagtcgtttaaaggatcaagtttggcttcatggtgcacttaacatccttatctatcagctgtgggttggcatctgggagtgcactacccactccttttgagatgctctccttgctataaggggtcagccagactgttggacaggtaagggtccctacatcctgtgttcatgccctctgtctccagaaatcctgcctactggaaaattatagagaaggaaccggccactcaataaaggtgttgggacaattgagaagtttatagatgacaaaaagttaggtctccccaggtatactaatgttctacaggtgaaaaatacaactttaaaacaaacagaagaaaagacagaatggtttgtgatctcaggataggggatggaactcattaagaaaaaaagg

SEQ ID NO: 352340 - DNA, 2697 bp, Homo sapiens
atgcgcgatctcccggagcatgcgcagcagcggcgccgacgcggggcggtgcctggtgaccgcgcgcgctcccggaagtgtgccggcgccgcgcgaaggttcagcagggagccgtgggccgggcgcgccggttcccggcacgtgtctcggcacgtggcagcgcgcctggccctgggcttggaggcgccggcgccctggatccgccggccgtggtcgccgagtcggtgtcgtccttgaccatcgccgacgcgttcattgcagccggcgagagctcagctccgaccccgccgcgccccgcgcttcccaggaggttcatctgctccttccctgactgcagcgccaattacagcaaagcctggaagcttgacgcgcacctgtgcaagcacacgggggagagaccatttgtttgtgactatgaagggtgtggcaaggccttcatcagggactaccatctgagccgccacattctgactcacacaggagaaaagccgtttgtttgtgcagccaatggctgtgatcaaaaattcaacacaaaatcaaacttgaagaaacattttgaacgcaaacatgaaaatcaacaaaaacaatatatatgcagttttgaagactgtaagaagacctttaagaaacatcagcagctgaaaatccatcagtgccagcataccaatgaacctctattcaagtgtacccaggaaggatgtgggaaacactttgcatcacccagcaagctgaaacgacatgccaaggcccacgagggctatgtatgtcaaaaaggatgttcctttgtggcaaaaacatggacggaacttctgaaacatgtgagagaaacccataaagaggaaatactatgtgaagtatgccggaaaacatttaaacgcaaagattaccttaagcaacacatgaaaactcatgccccagaaagggatgtatgtcgctgtccaagagaaggctgtggaagaacctatacaactgtgtttaatctccaaagccatatcctctccttccatgaggaaagccgcccttttgtgtgtgaacatgctggctgtggcaaaacatttgcaatgaaacaaagtctcactaggcatgctgttgtacatgatcctgacaagaagaaaatgaagctcaaagtcaaaaaatctcgtgaaaaacggagtttggcctctcatctcagtggatatatccctcccaaaaggaaacaagggcaaggcttatctttgtgtcaaaacggagagtcacccaactgtgtggaagacaagatgctctcgacagttgcagtacttacccttggctaagaactgcactgctttgtttaaaggactgcagaccaaggagcgagctttctctcagagcatgcttttctttattaaaattactgatgcagaacaaaaaaaaaaaaagaaaaaaaaaaaaaaaaaaaaaaaaaaaaaaaaaaaaacacaacaaaaaaaaaccaaaaaaaaacaaaaaaaaaaaaaaaaaggggggggagggagggaagaagagcacccaacaagcggagccgagaaccacacaaccaacagcccacagaagaagaaagtgagagaagaagggagcaaccacgagacagagaaggaaaaaaaaaaaacgaaaacagacccacgccgacgacgccaccaaaacaacacaaaggacaagagcgggagaaaaccacagagacacagaagaaagagaaaaagctgcgacacgaaagaacaaaaatgaagagaggtagagaagaaagagaaggaggaaaaaaaaaaaaagaacaaaaaacaaagagaacagacagagaacaaacacacaacactacgcgaagaaggaagaagacggacgaaacacaagaacaacaaaaagagaacaggaacaggaagcaacagaaaacagaagaaaacagacagaggaagcgaagaagaaaagagacaacacgacaaaaaaaaacggacagagacgagaacaagataaagagaaaaacaacggagggacggacgaaagtagccggacaagagcagcacatagagacacacaacaccgcacggagaagcgaaaggaaagcgacaaagaaaggggaaaggaaaagagcggtagcgcacggaatgccgaggaggagagagggagaggcaaggcggcagcggccgcaggggaggaggaagcagggagtggaatcggaaagaagagaaaacccacagagaggagaagacggagtagagcgaacgcgacagaagagaagaaacaaccacggaacacggcgggccagagaagagatggaaaagaagagagaaaaacaaaagaagaacgaacgaagagtgagcgagagaaaacagagggaaaaaaaagaagaagaaagaaagaaaatgaggacacgaacagcagcacaacagccaaagcagaaaaaaaaaaaacaaaaaaaaaaaaaacaattttggagcgcgactgaggcactaagaaaaagtttatagaacgattagcttagagacagcgggagccaaaagagggaaggagtgccacgtgcgaaaacagcgtgataccacagagaaaaacccggggacaaaaaacaaggggcgtgaggatcctacaacaaaataataaaacaccgcggaggacaaacaggacgtctcgaggaaaaaaaccagaaggagagccagggggacacaaagggggatataaagcagggcccacgagagaggacataaaatacgg

SEQ ID NO: 352341 - DNA, 1529 bp, Homo sapiens
atgcgcgatctcccggagcatgcgcagcagcggcgccgacgcggggcggtgcctggtgaccgcgcgcgctcccggaagtgtgccggcgccgcgcgaaggttcagcagggagccgtgggccgggcgcgccggttcccggcacgtgtctcggcacgtggcagcgcgcctggccctgggcttggaggcgccggcgccctggatccgccggccgtggtcgccgagtcggtgtcgtccttgaccatcgccgacgcgttcattgcagccggcgagagctcagctccgaccccgccgcgccccgcgcttcccaggaggttcatctgctccttccctgactgcagcgccaattacagcaaagcctggaagcttgacgcgcacctgtgcaagcacacgggggagagaccatttgtttgtgactatgaagggtgtggcaaggccttcatcagggactaccatctgagccgccacattctgactcacacaggagaaaagccgtttgtttgtgcagccaatggctgtgatcaaaaattcaacacaaaatcaaacttgaagaaacattttgaacgcaaacatgaaaatcaacaaaaacaatatatatgcagttttgaagactgtaagaagacctttaagaaacatcagcagctgaaaatccatcagtgccagcataccaatgaacctctattcaagtgtacccaggaaggatgtgggaaacactttgcatcacccagcaagctgaaacgacatgccaaggcccacgagggctatgtatgtcaaaaaggatgttcctttgtggcaaaaacatggacggaacttctgaaacatgtgagagaaacccataaagaggaaatactatgtgaagtatgccggaaaacatttaaacgcaaagattaccttaagcaacacatgaaaactcatgccccagaaagggatgtatgtcgctgtccaagagaaggctgtggaagaacctatacaactgtgtttaatctccaaagccatatcctctccttccatgaggaaagccgcccttttgtgtgtgaacatgctggctgtggcaaaacatttgcaatgaaacaaagtctcactaggcatgctgttgtacatgatcctgacaagaagaaaatgaagctcaaagtcaaaaaatctcgtgaaaaacggagtttggcctctcatctcagtggatatatccctcccaaaaggaaacaagggcaaggcttatctttgtgtcaaaacggagagtcacccaactgtgtggaagacaagatgctctcgacagttgcagtacttacccttggctaagaactgcactgctttgtttaaaggactgcagaccaaggagcgagctttctctcagagcatgcttttctttattaaaattactgatgcagaacagaaaacaaaaatcaaaaaaaaaatatttggcggcggggcataaaaattttaaaattttcggggggccaggtaagaatatgcaagtgtctcaagaatgggtgattggtgttccaaaagcgggggggtctgaaaagggtcgcatga

SEQ ID NO: 352342 - DNA, 1490 bp, Homo sapiens
atgcgcgatctcccggagcatgcgcagcagcggcgccgacgcggggcggtgcctggtgaccgcgcgcgctcccggaagtgtgccggcgccgcgcgaaggttcagcagggagccgtgggccgggcgcgccggttcccggcacgtgtctcggcacgtggcagcgcgcctggccctgggcttggaggcgccggcgccctggatccgccggccgtggtcgccgagtcggtgtcgtccttgaccatcgccgacgcgttcattgcagccggcgagagctcagctccgaccccgccgcgccccgcgcttcccaggaggttcatctgctccttccctgactgcagcgccaattacagcaaagcctggaagcttgacgcgcacctgtgcaagcacacgggggagagaccatttgtttgtgactatgaagggtgtggcaaggccttcatcagggactaccatctgagccgccacattctgactcacacaggagaaaagccgtttgtttgtgcagccaatggctgtgatcaaaaattcaacacaaaatcaaacttgaagaaacattttgaacgcaaacatgaaaatcaacaaaaacaatatatatgcagttttgaagactgtaagaagacctttaagaaacatcagcagctgaaaatccatcagtgccagcataccaatgaacctctattcaagtgtacccaggaaggatgtgggaaacactttgcatcacccagcaagctgaaacgacatgccaaggcccacgagggctatgtatgtcaaaaaggatgttcctttgtggcaaaaacatggacggaacttctgaaacatgtgagagaaacccataaagaggaaatactatgtgaagtatgccggaaaacatttaaacgcaaagattaccttaagcaacacatgaaaactcatgccccagaaagggatgtatgtcgctgtccaagagaaggctgtggaagaacctatacaactgtgtttaatctccaaagccatatcctctccttccatgaggaaagccgcccttttgtgtgtgaacatgctggctgtggcaaaacatttgcaatgaaacaaagtctcactaggcatgctgttgtacatgatcctgacaagaagaaaatgaagctcaaagtcaaaaaatctcgtgaaaaacggagtttggcctctcatctcagtggatatatccctcccaaaaggaaacaagggcaaggcttatctttgtgtcaaaacggagagtcacccaactgtgtggaagacaagatgctctcgacagttgcagtacttacccttggctaagaactgcactgctttgtttaaaggactgcagaccaaggagcgagctttctctcagagcatgcttttctttattaaaattactgatgcagaacagttctgcatcagtaattttaataaagaaaagcatgctctgagagaaagcttgtctttattaaaattactgatgcagaacatttgagaaaaaaaaaaaagaagaac

SEQ ID NO: 352343 - DNA, 1256 bp, Homo sapiens
aggcggcccggccccttggaggacaccaccttggcgggggcccttttggtgcaggcgccggcgccctggatccgccggccgtggtcgccgagtcggtgtcgtccttgaccatcgccgacgcgttcattgcagccggcgagagctcagctccgaccccgccgcgccccgcgcttcccaggaggttcatctgctccttccctgactgcagcgccaattacagcaaagcctggaagcttgacgcgcacctgtgcaagcacacgggggagagaccatttgtttgtgactatgaagggtgtggcaaggccttcatcagggactaccatctgagccgccacattctgactcacacaggagaaaagccgtttgtttgtgcagccaatggctgtgatcaaaaattcaacacaaaatcaaacttgaagaaacattttgaacgcaaacatgaaaatcaacaaaaacaatatatatgcagttttgaagactgtaagaagacctttaagaaacatcagcagctgaaaatccatcagtgccagcataccaatgaacctctattcaagtgtacccaggaaggatgtgggaaacactttgcatcacccagcaagctgaaacgacatgccaaggcccacgagggctatgtatgtcaaaaaggatgttcctttgtggcaaaaacatggacggaacttctgaaacatgtgagagaaacccataaagaggaaatactatgtgaagtatgccggaaaacatttaaacgcaaagattaccttaagcaacacatgaaaactcatgccccagaaagggatgtatgtcgctgtccaagagaaggctgtggaagaacctatacaactgtgtttaatctccaaagccatatcctctccttccatgaggaaagccgcccttttgtgtgtgaacatgctggctgtggcaaaacatttgcaatgaaacaaagtctcactaggcatgctgttgtacatgatcctgacaagaagaaaatgaagctcaaagtcaaaaaatctcgtgaaaaacggagtttggcctctcatctcagtggatatatccctcccaaaaggaaacaagggcaaggcttatctttgtgtcaaaacggagagtcacccaactgtgtggaagacaagatgctctcgacagttgcagtacttacccttggctaagaactgcactgctttgtttaaaggactgcagaccaaggagcgagctttctctcagagcatgcttttctttattaaaattactgatgcagaaca

SEQ ID NO: 352344 - DNA, 2449 bp, Homo sapiens
atgcgcgatctcccggagcatgcgcagcagcggcgccgacgcggggcggtgcctggtgaccgcgcgcgctcccggaagtgtgccggcgccgcgcgaaggttcagcagggagccgtgggccgggcgcgccggttcccggcacgtgtctcggcacgtggcagcgcgcctggccctgggcttggaggcgccggcgccctggatccgccggccgtggtcgccgagtcggtgtcgtccttgaccatcgccgacgcgttcattgcagccggcgagagctcagctccgaccccgccgcgccccgcgcttcccaggaggttcatctgctccttccctgactgcagcgccaattacagcaaagcctggaagcttgacgcgcacctgtgcaagcacacgggggagagaccatttgtttgtgactatgaagggtgtggcaaggccttcatcagggactaccatctgagccgccacattctgactcacacaggagaaaagccgtttgtttgtgcagccaatggctgtgatcaaaaattcaacacaaaatcaaacttgaagaaacattttgaacgcaaacatgaaaatcaacaaaaacaatatatatgcagttttgaagactgtaagaagacctttaagaaacatcagcagctgaaaatccatcagtgccagcataccaatgaacctctattcaagtgtacccaggaaggatgtgggaaacactttgcatcacccagcaagctgaaacgacatgccaaggcccacgagggctatgtatgtcaaaaaggatgttcctttgtggcaaaaacatggacggaacttctgaaacatgtgagagaaacccataaagaggaaatactatgtgaagtatgccggaaaacatttaaacgcaaagattaccttaagcaacacatgaaaactcatgccccagaaagggatgtatgtcgctgtccaagagaaggctgtggaagaacctatacaactgtgtttaatctccaaagccatatcctctccttccatgaggaaagccgcccttttgtgtgtgaacatgctggctgtggcaaaacatttgcaatgaaagtaagcactcaccctcatactcatggtcctatagtctatgctttcacaacatggttttcatattaatatttcattaataactttctctttcattgtagcaaagtctcactaggcatgctgttgtacatgatcctgacaagaagaaaatgaagctcaaagtaagttgaaactacttaggcaagcttagttttcaagtggaaattgtttaaggccagaaggagtctgtttggaattcttttcacctgctttactgtttgagtctgcactactgttgaagactttacttcctcataaagccaatgttgtacactatatctgctgggtacatatgactatcgtaaaattaactcagacagttttgattttgaattcctaatcgtgtgtcttcccttattcccaaaggtcaaaaaatctcgtgaaaaacggagtttggcctctcatctcagtggatatatccctcccaaaaggaaacaagggcaaggcttatctttgtgtcaaaacggagagtcacccaactgtgtggaagacaagatgctctcgacagttgcagtacttacccttggctaagaactgcactgctttgtttaaaggactgcagaccaaggagcgagctttctctcagagcatgcttttctttattaaaattactgatgcagaacaacatttgattccttatcatttccatggtctttgttcaaagtgtctctttcctgggtctcttgagtttctttatatgccttctcctcatttttgctcaaagcacgaagaacacacattaaagcttttcctccttgaacagcttgtggcctagatgagaatgtagctattccaggcatagtctggagtatttgatgaaatatctcctcctaaaaaagggaaacagccaaagattaatttaaaatcagaggctttggtgctttctaatgttctgcttgaacattcacaaaaactggcacccttgaattgctgctgtcggttaagtgattagctaatcagttcatacgtatctggttaagttgactgaaatctgtacaataacaccatgtaactaaactgacatgctgaatgcttcctaattttaaatctccacttcgtcatggcacgaagaggctacgtttggctcagcattaccctctcccacaaacagaaagcactgggtttgggcattggcaaaatacctcctcatccccaaggtgtcagccgagcagttctcagcactctctattgcccctaacagagtctctctcagtgactgaaacaaatggatacctgggctcaagaaattctgcatcagctgggttgcgacctatgcttaagtgactctactgtggagctggattactaaggatacccttagtggatgataaagttatctaactttt

SEQ ID NO: 352345 - DNA, 1311 bp, Homo sapiens
atgcgcgatctcccggagcatgcgcagcagcggcgccgacgcggggcggtgcctggtgaccgcgcgcgctcccggaagtgtgccggcgccgcgcgaaggttcagcagggagccgtgggccgggcgcgccggttcccggcacgtgtctcggcacgtggcagcgcgcctggccctgggcttggaggcgccggcgccctggatccgccggccgtggtcgccgagtcggtgtcgtccttgaccatcgccgacgcgttcattgcagccggcgagagctcagctccgaccccgccgcgccccgcgcttcccaggaggttcatctgctccttccctgactgcagcgccaattacagcaaagcctggaagcttgacgcgcacctgtgcaagcacacgggggagagaccatttgtttgtgactatgaagggtgtggcaaggccttcatcagggactaccatctgagccgccacattctgactcacacaggagaaaagccgtttgtttgtgcagccaatggctgtgatcaaaaattcaacacaaaatcaaacttgaagaaacattttgaacgcaaacatgaaaatcaacaaaaacaatatatatgcagttttgaagactgtaagaagacctttaagaaacatcagcagctgaaaatccatcagtgccagcataccaatgaacctctattcaagctatgtatgtcaaaaaggatgttcctttgtggcaaaaacatggacggaacttctgaaacatgtgagagaaacccataaagaggaaatactatgtgaagtatgccggaaaacatttaaacgcaaagattaccttaagcaacacatgaaaactcatgccccagaaagggatgtatgtcgctgtccaagagaaggctgtggaagaacctatacaactgtgtttaatctccaaagccatatcctctccttccatgaggaaagccgcccttttgtgtgtgaacatgctggctgtggcaaaacatttgcaatgaaacaaagtctcactaggcatgctgttgtacatgatcctgacaagaagaaaatgaagctcaaagtcaaaaaatctcgtgaaaaacggagtttggcctctcatctcagtggatatatccctcccaaaaggaaacaagggcaaggcttatctttgtgtcaaaacggagagtcacccaactgtgtggaagacaagatgctctcgacagttgcagtacttacccttggctaagaactgcactgctttgtttaaaggactgcagaccaaggagcgagctttctctcagagcatgcttttctttattaaaattactgatgcagaaca

SEQ ID NO: 352346 - DNA, 1170 bp, Homo sapiens
atgcgcgatctcccggagcatgcgcagcagcggcgccgacgcggggcggtgcctggtgaccgcgcgcgctcccggaagtgtgccggcgccgcgcgaaggttcagcagggagccgtgggccgggcgcgccggttcccggcacgtgtctcggcacgtggcagcgcgcctggccctgggcttggaggcgccggcgccctggatccgccggccgtggtcgccgagtcggtgtcgtccttgaccatcgccgacgcgttcattgcagccggcgagagctcagctccgaccccgccgcgccccgcgcttcccaggaggttcatctgctccttccctgactgcagcgccaattacagcaaagcctggaagcttgacgcgcacctgtgcaagcacacgggggagagaccatttgtttgtgactatgaagggtgtggcaaggccttcatcagggactaccatctgagccgccacattctgactcacacaggagaaaagccgtttgtttgtgcagccaatggctgtgatcaaaaattcaacacaaaatcaaacttgaagaaacattttgaacgcaaacatgaaaatcaacaaaaacaatatatatgcagttttgaagactgtaagaagacctttaagaaacatcagcagctgaaaatccatcagtgccagcataccaatgaacctctattcaagtgtacccaggaaggatgtgggaaacactttgcatcacccagcaagctgaaacgacatgccaaggcccacgagggtgtgtacggatagcctgggtgtgctccgagggggatgccaaatcctgggcgcctttgaatctgttctgtgatcacgctgaaaagatgggaaccctgtgaacaggggacaccatcctgcttatttgggtcttacactcttgtccaaagaggcactgtatatgtctgtttttccactaccgtatcattgctgttcacatgtaatgtgttgtttgttcacaacaagcgcctggttacacattacactgacgaatgtgctgatgctccagccatggctttgatgcttctgtcatttttaacctcttctattaatatttactgcctgtgccattcttttccttgttggccattcacaaggcttggataatcgtgtgacattttgagagccatcagatgttacgtttctcaaaaaaaaa

SEQ ID NO: 352347 - DNA, 470 bp, Homo sapiens
tttgtctgccaaatgtctgaatttacttaatgccatcataatgataaaggttttaatttggaagcagacattgtgcaaattagtgtattgggagactattccaactgaaacagttttgctttttcaaatgttatatgattcttcaaacctttttgagataaagcagaattttacagtaacaaaatgggtgaaagcagaaattttatacagtctccaaaattgttttatcttgaggattctgttacgaactgttcattttgttttgactttccataagactaacgagcctttacaatttaacagtgcagttttgaagactgtaagaagacctttaagaaacatcagcagctgaaaatccatcagtgccagcataccaatgaacctctattcaagtaggtacttcatgtggctgaaaatgcctggattctaggtgtgaataagattggaaatgcaagggtggtgttgagcat

SEQ ID NO: 352348 - DNA, 718 bp, Homo sapiens
aaaagtgaaacttcaggtggtattaagtagtttgccaaatttatataactatttgatggtggaagagtccaatttggcacacaatcattgctcaactcataaatgctgaagggaagaaaattatttcagagcttggatatttctgaaagactaaaatttttgcttactttggattgtgtagatgacactttaatagttctggctgaagagcatggttgtttggacattataaaggagcttcctgaaactgtgatagatcttttgaataagtgccttaccttccatccttctaagaggttgatattatttagagattgggattacattgagatcctttacgcataagcaattggtttttttcttgttttaatataatggattaaagataatgtacatatggagtagtatataattgacatcagtatcataactgtgaatgatgtaagctttcattttttgtgaattaatgaaaaagtaattaaagttaaactacggtcagaaaactgacatacactaaagaagttactagttcattttcaagcttttaaatagaatattaactaaactatggaatgtaggtattcctagacccaataataacatcagtgaaatgagaataaaagtttgttgtcaatatgtattatagcaatgaacttggatcagtggtgtgataaactaacaattgttgacaataaaaaaggatttcttagaagtttca

SEQ ID NO: 352349 - DNA, 885 bp, Homo sapiens
gtatcaacgcagagtgcccattacgggccggggagctgagtaatcatctcaatgagattggtttcattccagatctctatgccatcccttggtttcttaccatgtttactcatgtatttccactacacaaaattttccacctctgggataccttactacttgggaattcctctttcccattctgtattggagtagcaattcttcagcagctgcgggaccggcttttggctaatggctttaatgagtgtattcttctcttctccgatttaccagaaattgacattgaacgctgtgtgagagaatctatcaacctgttttgttggactcctaaaagtgctacttacagacagcatgctcaacctccaaagccatcttctgacagcagtggaggcagaagttcggcaccttatttctctgctgagtgtccagatcctccaaagacagatctgtcaagagaatccatcccattaaatgacctgaagtcagaagtatcaccacggatttcagcagaggacctgattgacttgtgtgagctcacagtgacaggccacttcaaaacacccagcaagaaaacaaagtccagtaaaccaaagctcctggtggttgacatccggaatagtgaagagacttattcgtggccattccggagcatcacattcatcaatgctgctacgcaaaggagctacccagggcctaatgtagttccgaaatcaaggagctggccacggcggtgcaaccacggctgggcctgtggagaaatccaactggttaaggggaaaaaacaggcccacaccataaaaaagggcgctgtggcacgctcccacacaattgtacctcactcctattcttgatatcttctaacaaaatactttaccgccagccccg

SEQ ID NO: 352350 - DNA, 3880 bp, Homo sapiens
gctagtcaggctgggttcaaatcggccgagggccaggctgaggggagggtagagggtgaaaagctcggatctgtgtttggggaaggccaggcttgcgctcctcgccgggttccgcgaaggttaaccttggctgacttggctcgcgagcaaagggcagcgtctgagctcccggcgttccaggagtggcctcttttgtaggagcacctgaaatgcagcgtctggtgcactaagccgtagcggcagcagcagccacagcgacagcgctggggccctgtgtagaagctccatcccccttgtctttgtgcttgcctgcgtccccagactcagagattatcttagaagacctaggactccaaaaatgtttcccctgaaggacgctgaaatgggagcctttaccttctttgcctcggctctgccacatgatgtttgtggaagcaatggacttcctctcacaccaaattccatcaaaattttagggcgctttcaaatccttaaaaccatcacccatcccagactctgccagtatgtggatatttctaggggaaagcatgaacgactagtggtcgtggctgaacattgtgaacgtagtctggaagacttgcttcgagaaaggaaacctgtgaggtatccctcgtacttggcccctgaggtaattgcacagggaattttcaaaaccactgatcacatgccaagtaaaaaaccattgccttctggccccaaatcagatgtatggtctcttggaatcattttatttgagctttgtgtgggaagaaaattatttcagagcttggatatttctgaaagactaaaatttttgcttactttggattgtgtagatgacactttaatagttctggctgaagagcatggttgtttggacattataaaggagcttcctgaaactgtgatagatcttttgaataagtgccttaccttccatccttctaagaggccaaccccagatgaattaatgaaggacaaagtattcagtgaggtatcacctttatataccccctttaccaaacctgccagtctgttttcatcttctctgagatgtgctgatttaactctgcctgaggatatcagtcagttgtgtaaagatataaataatgattacctggcagaaagatctattgaagaagtgtattacctttggtgtttggctggaggtgacttggagaaagagcttgtcaacaaggaaatcattcgatccaaaccacctatctgcacactccccaattttctctttgaggatggtgaaagctttggacaaggtcgagatagaagctcgcttttagatgataccactgtgacattgtcgttatgccagctaagaaatagattgaaagatgttggtggagaagcattttacccattacttgaagatgaccagtctaatttacctcattcaaacagcaataatgagttgtctgcagctgccacgctccctttaatcatcagagagaaggatacagagtaccaactaaatagaattattctcttcgacaggctgctaaaggcttatccatataaaaaaaaccaaatctggaaagaagcaagagttgacattcctcctcttatgagaggtttaacctgggctgctcttctgggagttgagggagctattcatgccaagtacgatgcaattgataaagacactccaattcctacagatagacaaattgaagtggatattcctcgctgtcatcagtacgatgaactgttatcatcaccagaaggtcatgcaaaatttaggcgtgtattaaaagcctgggtagtgtctcatcctgatcttgtgtattggcaaggtcttgactcactttgtgctccattcctatatctaaacttcaataatgaagccttggcttatgcatgtatgtctgcttttattcccaaatacctgtataacttcttcttaaaagacaactcacatgtaatacaagagtatctgactgtcttctctcagatgattgcatttcatgatccagagctgagtaatcatctcaatgagattggtttcattccagatctctatgccatcccttggtttcttaccatgtttactcatgtatttccactacacaaaattttccacctctgggataccttactacttgggaattcctctttcccattctgtattggagtagcaattcttcagcagctgcgggaccggcttttggctaatggctttaatgagtgtattcttctcttctccgatttaccagaaattgacattgaacgctgtgtgagagaatctatcaacctgttttgttggactcctaaaagtgctacttacagacagcatgctcaacctccaaagccatcttctgacagcagtggaggcagaagttcggcaccttatttctctgctgagtgtccagatcctccaaagacagatctgtcaagagaatccatcccattaaatgacctgaagtcagaagtatcaccacggatttcagcagaggacctgattgacttgtgtgagctcacagtgacaggccacttcaaaacacccagcaagaaaacaaagtccagtaaaccaaagctcctggtggttgacatccggaatagtgaagactttattcgtggtcacatttcaggaagcatcaacattccattcagtgctgccttcactgcagaaggggagcttacccagggcccttacactgctatgctccagaacttcaaagggaaggtcattgtcatcgtggggcatgtggcaaaacacacagctgagtttgcagctcaccttgtgaagatgaaatatccaagaatctgtattctagatggtggcattaataaaataaagccaacaggcctcctcaccatcccatctcctcaaatatgaagaaccaagagtgtgactgccaaaacttagtgtggcatcagcaccaacagcacagttcttcatatccacgccactctcagacaaaactagatgtccagattgttgcatttccgtaaagtttgtcacgagacattttttaaaatctcataacccacatgttcagttatccatgcaagaaacttgactctacatgtattgctgaaagaattttcttaacagtgaaatctgatcatatatttttaccacactgccacataaagcccaagaaattcagctgacaagacagatttagcattatcaagaaatcccatttgccctgaaaaagctgtcctccattgtactgaacagacagtcctgtcgattgtgttatttagaaacatacactgaatgtgggctgaaatcatcatctttccataatgaaaactgagaaactattcacaatgcattccttataaataaatgctacatttagtaactcatttcacccaaacaagggggatgtgtgtgtgtgtgtgtataggaagtggagtttatccccattgcagaaagtggtaatacttactcccagaaaaatgaaatttagaaaccatttatatttgatagaatatttggtcagttcctgtagcaaagacgaatggcttaaacaaattttctagtttctttatcacatgaaagtctgtacagtcagtccagggctagtctactggtttcctgatcattaagaactcattaccttctctcattgctttacaaacctcaatatgtggcatccatctcatggatgaaaatggctcctcagcttctaccatcacatctgctatctagaaggaagagaatgagggaaggagggaggggatgaagagaaaagaaggaacaaaagaaggagggaggaaagaagaaaagaaaggaaaagaagcgaagcacactccttccctttaaggtcataaaccagaagttgcgcacactacctctgcttacatatcattggccagaacttgggtgcatggccacacctagctttaaggaaaa

SEQ ID NO: 352351 - DNA, 2147 bp, Homo sapiens
agaggaagaatgatgccttctaagctgtttatattttgtataagaaagtggaagtcctagcctttttatttttaaccattcatagccaaagctgaaataggagcagacattctgccttcaagttggaagttgaacagcagagcagcagagattgaaagatgttggtggagaagcattttacccattacttgaagatgaccagtctaatttacctcattcaaacagcaataatgagttgtctgcagctgccacgctccctttaatcatcagagagaaggatacagagtaccaactaaatagaattattctcttcgacaggctgctaaaggcttatccatataaaaaaaaccaaatctggaaagaagcaagagttgacattcctcctcttatgagaggtttaacctgggctgctcttctgggagttgagggagctattcatgccaagtacgatgcaattgataaagacactccaattcctacagatagacaaattgaagtggatattcctcgctgtcatcagtacgatgaactgttatcatcaccagaaggtcatgcaaaatttaggcgtgtattaaaagcctgggtagtgtctcatcctgatcttgtgtattggcaaggtcttgactcactttgtgctccattcctatatctaaacttcaataatgaagccttggcttatgcatgtatgtctgcttttattcccaaatacctgtataacttcttcttaaaagacaactcacatgtaatacaagagtatctgactgtcttctctcagatgattgcatttcatgatccagagctgagtaatcatctcaatgagattggtttcattccagatctctatgccatcccttggtttcttaccatgtttactcatgtatttccactacacaaaattttccacctctgggataccttactacttgggaattcctctttcccattctgtattggagtagcaattcttcagcagctgcgggaccggcttttggctaatggctttaatgagtgtattcttctcttctccgatttaccagaaattgacattgaacgctgtgtgagagaatctatcaacctgttttgttggactcctaaaagtgctacttacagacagcatgctcaacctccaaagccatcttctgacagcagtggaggcagaagttcggcaccttatttctctgctgagtgtccagatcctccaaagacagatctgtcaagagaatccatcccattaaatgacctgaagtcagaagtatcaccacggatttcagcagaggacctgattgacttgtgtgagctcacagtgacaggccacttcaaaacacccagcaagaaaacaaagtccagtaaaccaaagctcctggtggttgacatccggaatagtgaagactttattcgtggtcacatttcaggaagcatcaacattccattcagtgctgccttcactgcagaaggggagcttacccagggcccttacactgctatgctccagaacttcaaagggaaggtcattgtcatcgtggggcatgtggcaaaacacacagctgagtttgcagctcaccttgtgaagatgaaatatccaagaatctgtattctagatggtggcattaataaaataaagccaacaggcctcctcaccatcccatctcctcaaatatgaagaaccaagagtgtgactgccaaaacttagtgtggcatcagcaccaacagcacagttcttcatatccacgccactctcagacaaaactagatgtccagattgttgcatttccgtaaagtttgtcacgagacattttttaaaatctcataacccacatgttcagttatccatgcaagaaacttgactctacatgtattgctgaaagaattttcttaacagtgaaatctgatcatatatttttaccacactgccacataaagcccaagaaattcagctgacaagacagatttagcattatcaagaaatcccatttgccctgaaaaagctgtcctccattgtactgaacagacagtcctgtcgattgtgttatttagaaacatacactgaatgtgggctgaaatcatcatctttccataatgaaaactgagaaactattcacaatgcattccttataaataaatgctacatttagtaactcatttcaccc

SEQ ID NO: 352352 - DNA, 1461 bp, Homo sapiens
taggaccctctgagccaggtgcaggatataatctcgtggtgtgccgttttttaagcccgtcggaaaagcgcagtattcgggtgggagtgacccgattgtccagagtatctgactgtcttctctcagatgattgcatttcatgatccagagctgagtaatcatctcaatgagattggtttcattccagatatgtatttccactacacaaaattttccacctctgggataccttactacttgggaattcctctttcccattctgtattggagtagcaattcttcagcagctgcgggaccggcttttggctaatggctttaatgagtgtattcttctcttctccgatttaccagaaattgacattgaacgctgtgtgagagaatctatcaacctgttttgttggactcctaaaagtgctacttacagacagcatgctcaacctccaaagccatcttctgacagcagtggaggcagaagttcggcaccttatttctctgctgagtgtccagatcctccaaagacagatctgtcaagagaatccatcccattaaatgacctgaagtcagaagtatcaccacggatttcagcagaggacctgattgacttgtgtgagctcacagtgacaggccacttcaaaacacccagcaagaaaacaaagtccagtaaaccaaagctcctggtggttgacatccggaatagtgaagactttattcgtggtcacatttcaggaagcatcaacattccattcagtgctgccttcactgcagaaggggagcttacccagggcccttacactgctatgctccagaacttcaaagggaaggtcattgtcatcgtggggcatgtggcaaaacacacagctgagtttgcagctcaccttgtgaagatgaaatatccaagaatctgtattctagatggtggcattaataaaataaagccaacaggcctcctcaccatcccatctcctcaaatatgaagaaccaagagtgtgactgccaaaacttagtgtggcatcagcaccaacagcacagttcttcatatccacgccactctcagacaaaactagatgtccagattgttgcatttccgtaaagtttgtcacgagacattttttaaaatctcataacccacatgttcagttatccatgcaagaaacttgactctacatgtattgctgaaagaattttcttaacagtgaaatctgatcatatatttttaccacactgccacataaagcccaagaaattcagctgacaagacagatttagcattatcaagaaatcccatttgccctgaaaaagctgtcctccattgtactgaacagacagtcctgtcgattgtgttatttagaaacatacactgaatgtgggctgaaatcatcatctttccataatgaaaactgagaaactattcacaatgcattccttataaataaatgctacatttagtaactcatttcaccc

SEQ ID NO: 352353 - DNA, 1448 bp, Homo sapiens
gcttttggctaatggctttaatgagtgtattcttctcttctccgatttaccagagtatctgactgtcttctctcagatgattgcatttcatgatccagagctgagtaatcatctcaatgagattggtttcattccagatctctatgccatcccttggtttcttaccatgtttactcatgtatttccactacacaaaattttccacctctgggataccttactacttgggaattcctctttcccattctgtattggagtagcaattcttcagcagctgcgggaccggcttttggctaatggctttaatgagtgtattcttctcttctccgatttaccagaaattgacattgaacgctgtgtgagagaatctatcaacctgttttgttggactcctaaaagtgctacttacagacagcatgctcaacctccaaagccatcttctgacagcagtggaggcagaagttcggcaccttatttctctgctgagtgtccagatcctccaaagacagatctgtcaagagaatccatcccattaaatgacctgaagtcagaagtatcaccacggatttcagcagaggacctgattgacttgtgtgagctcacagtgacaggccacttcaaaacacccagcaagaaaacaaagtccagtaaaccaaagctcctggtggttgacatccggaatagtgaagactttattcgtggtcacatttcaggaagcatcaacattccattcagtgctgccttcactgcagaaggggagcttacccagggcccttacactgctatgctccagaacttcaaagggaaggtcattgtcatcgtggggcatgtggcaaaacacacagctgagtttgcagctcaccttgtgaagatgaaatatccaagaatctgtattctagatggtggcattaataaaataaagccaacaggcctcctcaccatcccatctcctcaaatatgaagaaccaagagtgtgactgccaaaacttagtgtggcatcagcaccaacagcacagttcttcatatccacgccactctcagacaaaactagatgtccagattgttgcatttccgtaaagtttgtcacgagacattttttaaaatctcataacccacatgttcagttatccatgcaagaaacttgactctacatgtattgctgaaagaattttcttaacagtgaaatctgatcatatatttttaccacactgccacataaagcccaagaaattcagctgacaagacagatttagcattatcaagaaatcccatttgccctgaaaaagctgtcctccattgtactgaacagacagtcctgtcgattgtgttatttagaaacatacactgaatgtgggctgaaatcatcatctttccataatgaaaactgagaaactattcacaatgcattccttataaataaatgctacatttagtaactcatttcaccc

SEQ ID NO: 352354 - DNA, 655 bp, Homo sapiens
gcaccaccacaactagccggcgtccagcctcactcaacacactaacaacactttcagtttgcagctcaccttgtgaagatgaaatatccaagaatctgtattctagatggtggcattaataaaataaagccaacaggcctcctcaccatcccatctcctcaaatatgaagaaccaagagtgtgactgccaaaacttagtgtggcatcagcaccaacagcacagttcttcatatccacgccactctcagacaaaactagatgtccagattgttgcatttccgtaaagtttgtcacgagacattttttaaaatctcataacccacatgttcagttatccatgcaagaaacttgactctacatgtattgctgaaagaattttcttaacagtgaaatctgatcatatatttttaccacactgccacataaagcccaagaaattcagctgacaagacagatttagcattatcaagaaatcccatttgccctgaaaaagctgtcctccattgtactgaacagacagtcctgtcgattgtgttatttagaaacatacactgaatgtgggctgaaatcatcatctttccataatgaaaactgagaaactattcacaatgcattccttataaataaatgctacatttagtaactcatttcaccc

SEQ ID NO: 352355 - DNA, 2721 bp, Homo sapiens
gctagtcaggctgggttcaaatcggccgagggccaggctgaggggagggtagagggtgaaaagctcggatctgtgtttggggaaggccaggcttgcgctcctcgccgggttccgcgaaggttaaccttggctgacttggctcgcgagcaaagggcagcgtctgagctcccggcgttccaggagtggcctcttttgtaggagcacctgaaatgcagcgtctggtgcactaagccgtagcggcagcagcagccacagcgacagcgctggggccctgtgtagaagctccatcccccttgtctttgtgcttgcctgcgtccccagactcagagattatcttagaagacctaggactccaaaaatgtttcccctgaaggacgctgaaatgggagcctttaccttctttgcctcggctctgccacatgatgtttgtggaagcaatggacttcctctcacaccaaattccatcaaaattttagggcgctttcaaatccttaaaaccatcacccatcccagactctgccagtatgtggatatttctaggggaaagcatgaacgactagtggtcgtggctgaacattgtgaacgtagtctggaagacttgcttcgagaaaggaaacctgtgaggtatccctcgtacttggcccctgaggtaattgcacagggaattttcaaaaccactgatcacatgccaagtaaaaaaccattgccttctggccccaaatcagatgtatggtctcttggaatcattttatttgagctttgtgtgggaagaaaattatttcagagcttggatatttctgaaagactaaaatttttgcttactttggattgtgtagatgacactttaatagttctggctgaagagcatggttgtttggacattataaaggagcttcctgaaactgtgatagatcttttgaataagtgccttaccttccatccttctaagaggccaaccccagatgaattaatgaaggacaaagtattcagtgaggtatcacctttatataccccctttaccaaacctgccagtctgttttcatcttctctgagatgtgctgatttaactctgcctgaggatatcagtcagttgtgtaaagatataaataatgattacctggcagaaagatctattgaagaagtgtattacctttggtgtttggctggaggtgacttggagaaagagcttgtcaacaaggaaatcattcgatccaaaccacctatctgcacactccccaattttctctttgaggatggtgaaagctttggacaaggtcgagatagaagctcgcttttagatgataccactgtgacattgtcgttatgccagctaagaaatagattgaaagatgttggtggagaagcattttacccattacttgaagatgaccagtctaatttacctcattcaaacagcaataatgagttgtctgcagctgccacgctccctttaatcatcagagagaaggatacagagtaccaactaaatagaattattctcttcgacaggctgctaaaggcttatccatataaaaaaaaccaaatctggaaagaagcaagagttgacattcctcctcttatgagaggtttaacctgggctgctcttctgggagttgagggagctattcatgccaagtacgatgcaattgataaagacactccaattcctacagatagacaaattgaagtggatattcctcgctgtcatcagtacgatgaactgttatcatcaccagaaggtcatgcaaaatttaggcgtgtattaaaagcctgggtagtgtctcatcctgatcttgtgtattggcaaggtcttgactcactttgtgctccattcctatatctaaacttcaataatgaagccttggcttatgcatgtatgtctgcttttattcccaaatacctgtataacttcttcttaaaagacaactcacatgtaatacaagagtatctgactgtcttctctcagatgattgcatttcatgatccagagctgagtaatcatctcaatgagattggtttcattccagatctctatgccatcccttggtttcttaccatgtttactcatgtatttccactacacaaaattttccacctctgggataccttactacttgggaattcctctttcccattctgtattggagtagcaattcttcagcagctgcgggaccggcttttggctaatggctttaatgagtgtattcttctcttctccgatttaccagaaattgacattgaacgctgtgtgagagaatctatcaacctgttttgttggactcctaaaagtgctacttacagacagcatgctcaacctccaaagccatcttctgacagcagtggaggcagaagttcggcaccttatttctctgctgagtgtccagatcctccaaagacagatctgtcaagagaatccatcccattaaatgacctgaagtcagaagtatcaccacggatttcagcagaggacctgattgacttgtgtgagctcacagtgacaggccacttcaaaacacccagcaagaaaacaaagtccagtaaaccaaagctcctggtggttgacatccggaatagtgaagaatcatatatttttaccacactgccacataaagcccaagaaattcagctgacaagacagatttagcattatcaagaaatcccatttgcctgataccttcctgctacatggggtcctctataacgcggcgcacattgctgccc

SEQ ID NO: 352356 - DNA, 1373 bp, Homo sapiens
gctagtcaggctgggttcaaatcggccgagggccaggctgaggggagggtagagggtgaaaagctcggatctgtgtttggggaaggccaggcttgcgctcctcgccgggttccgcgaaggttaaccttggctgacttggctcgcgagcaaagggcagcgtctgagctcccggcgttccaggagtggcctcttttgtaggagcacctgaaatgcagcgtctggtgcactaagccgtagcggcagcagcagccacagcgacagcgctggggccctgtgtagaagctccatcccccttgtctttgtgcttgcctgcgtccccagactcagagattatcttagaagacctaggactccaaaaatgtttcccctgaaggacgctgaaatgggagcctttaccttctttgcctcggctctgccacatgatgtttgtggaagcaatggacttcctctcacaccaaattccatcaaaattttagggcgctttcaaatccttaaaaccatcacccatcccagactctgccagtatgtggatatttctaggggaaagcatgaacgactagtggtcgtggctgaacattgtgaacgtagtctggaagacttgcttcgagaaaggaaacctgtgaggtatccctcgtacttggcccctgaggtaattgcacagggaattttcaaaaccactgatcacatgccaagtaaaaaaccattgccttctggccccaaatcagatgtatggtctcttggaatcattttatttgagctttgtgtgggaagaaaattatttcagagcttggatatttctgaaagactaaaatttttgcttactttggattgtgtagatgacactttaatagttctggctgaagagcatggttgtttggacattataaaggagcttcctgaaactgtgatagatcttttgaataagtgccttaccttccatccttctaagaggttgatattatttagagattgggattacattgagatcctttacgcataagcaattggtttttttcttgttttaatataatggattaaagataatgtacatatggagtagtatataattgacatcagtatcataactgtgaatgatgtaagctttcattttttgtgaattaatgaaaaagtaattaaagttaaactacggtcagaaaactgacatacactaaagaagttactagttcattttcaagcttttaaatagaatattaactaaactatggaatgtaggtattcctagacccaataataacatcagtgaaatgagaataaaagtttgttgtcaatatgtattatagcaatgaacttggatcagtggtgtgataaactaacaattgttgacaataaaaaaggatttcttagaagtttca

SEQ ID NO: 352357 - DNA, 1719 bp, Homo sapiens
gctagtcaggctgggttcaaatcggccgagggccaggctgaggggagggtagagggtgaaaagctcggatctgtgtttggggaaggccaggcttgcgctcctcgccgggttccgcgaaggttaaccttggctgacttggctcgcgagcaaagggcagcgtctgagctcccggcgttccaggagtggcctcttttgtaggagcacctgaaatgcagcgtctggtgcactaagccgtagcggcagcagcagccacagcgacagcgctggggccctgtgtagaagctccatcccccttgtctttgtgcttgcctgcgtccccagactcagagattatcttagaagacctaggactccaaaaatgtttcccctgaaggacgctgaaatgggagcctttaccttctttgcctcggctctgccacatgatgtttgtggaagcaatggacttcctctcacaccaaattccatcaaaattttagggcgctttcaaatccttaaaaccatcacccatcccagactctgccagtatgtggatatttctaggggaaagcatgaacgactagtggtcgtggctgaacattgtgaacgtagtctggaagacttgcttcgagaaaggaaacctgtgaggtatccctcgtacttggcccctgaggtaattgcacagggaattttcaaaaccactgatcacatgccaagtaaaaaaccattgccttctggccccaaatcagatgtatggtctcttggaatcattttatttgagctttgtgtgggaagaaaattatttcagagcttggatatttctgaaagactaaaatttttgcttactttggattgtgtagatgacactttaatagttctggctgaagagcatggttgtttggacattataaaggagcttcctgaaactgtgatagatcttttgaataagtgccttaccttccatccttctaagaggttgatattatttagagattgggattacattgagatcctttacgcataagcaattggtttttttcttgttttaatataatggattaaagataatgtacatatggagtagtatataattgacatcagtatcataactgtgaatgatgtaagctttcattttttgtgaattaatgaaaaagtaattaaagttaaactacggtcagaaaactgacatacactaaagaagttactagttcattttcaagcttttaaatagaatattaactaaactatggaatgtaggtattcctagacccaataataacatcagtgaaatgagaataaaagtttgttgtcaatatgtattatagcaatgaacttggatcagtggtgtgataaactaacaattgttgacaataaaaaaggatttcttagaagtttcattaattgactttgacttgatgatgtcactactagtcatacagctatccctaaattcctttactatgtaatgtttgaaaataatgtatacaaatttgcctttagaaaaacaactttatcaagacatgttagagagaaatagttttgtgtcaatgtaccacattaaaggacaggaagaaaagccaaatggtattattataatagtttgcataaatattatttaattatttaagatattcagtaaagcaggtgaatgctagtcagggtaaaagtaaacaatgcagaagcttttatggaatgatatttttgatacatcatgaggtaaagtacaacataagtaaaaaaaat

SEQ ID NO: 352358 - DNA, 969 bp, Homo sapiens
gctagtcaggctgggttcaaatcggccgagggccaggctgaggggagggtagagggtgaaaagctcggatctgtgtttggggaaggccaggcttgcgctcctcgccgggttccgcgaaggttaaccttggctgacttggctcgcgagcaaagggcagcgtctgagctcccggcgttccaggagtggcctcttttgtaggagcacctgaaatgcagcgtctggtgcactaagccgtagcggcagcagcagccacagcgacagcgctggggccctgtgtagaagctccatcccccttgtctttgtgcttgcctgcgtccccagactcagaggcaggtatttgggtaatccagttttccgtgtcgtagtgggtggggtctgtgggaggtagaggactatcaggagcagtgagtggccccgcatgtcttcagaatagatagagaaccgagctgtggagccgcttgctgataggtactgtctccatccctagctacagcccgcctttcctgtaaatcaggttcacctgagtcgtttgggaaccgtaggcttagtaatcgctctgtcactgcctcaaaggaaggctaaaggaggttagagaatctagaatccgccctccattactcaccttggaggcagaattttgctttggtttgtttctggccctcgaggtttagtcagtcgtcaaagtgtaacacccccttgagcagtaggagaaagtgaagcagaggaaggaagttacttgaggattgtcagtggctgcttttcaaggatccctgtcctggtttctatctatttgagacaaaaataacctcttgagagaatgtatattacaaataaatgaattagtatcattttcctgttgaaaacaaaaaaaaaattcgcgcctctatgtggggggacaaggtttgaatggttgggtatgtctgacccttttgtacaagggtaatggggcctaaggggtaataagcgtag

SEQ ID NO: 352359 - DNA, 820 bp, Homo sapiens
gctagtcaggctgggttcaaatcggccgagggccaggctgaggggagggtagagggtgaaaagctcggatctgtgtttggggaaggccaggcttgcgctcctcgccgggttccgcgaaggttaaccttggctgacttggctcgcgagcaaagggcagcgtctgagctcccggcgttccaggagtggcctcttttgtaggagcacctgaaatgcagcgtctggtgcactaagccgtagcggcagcagcagccacagcgacagcgctggggccctgtgtagaagctccatcccccttgtctttgtgcttgcctgcgtccccagactcagagattatcttagaagacctaggactccaaaaatgtttcccctgaaggacgctgaaatgggagcctttaccttctttgcctcggctctgccacatgatgtttgtggaagcaatggacttcctctcacaccaaattccatcaaaattttagggcgctttcaaatccttaaaaccatcacccatcccagactctgccagtatgtggatatttctaggggaaagcatgaacgactagtggtcgtggctgaacattgtgaacgtagtctggaagacttgcttcgagaaaggaaacctgtgagctgttcaacggttttgtgtatagcatttgaggttcttcagggcttgcagtatatgaacaaacatggtatagtacacagggcattgtctcctcataatatcctgttggaccgaaagggacatattaaattggctaaatttggactttatcacatgacagctcatggtgatgatgttgatttcccaatagggtaagga

SEQ ID NO: 352360 - DNA, 759 bp, Homo sapiens
gctagtcaggctgggttcaaatcggccgagggccaggctgaggggagggtagagggtgaaaagctcggatctgtgtttggggaaggccaggcttgcgctcctcgccgggttccgcgaaggttaaccttggctgacttggctcgcgagcaaagggcagcgtctgagctcccggcgttccaggagtggcctcttttgtaggagcacctgaaatgcagcgtctggtgcactaagccgtagcggcagcagcagccacagcgacagcgctggggccctgtgtagaagctccatcccccttgtctttgtgcttgcctgcgtccccagactcagagattatcttagaagacctaggactccaaaaatgtttcccctgaaggacgctgaaatgggagcctttaccttctttgcctcggctctgccacatgatgtttgtggaagcaatggacttcctctcacaccaaattccatcaaaattttagggcgctttcaaatcaacgactagtggtcgtggctgaacattgtgaacgtagtctggaagacttgcttcgagaaaggaaacctgtgagctgttcaacggttttgtgtatagcatttgaggttcttcagggcttgcagtatatgaacaaacatggtatagtacacagggcattgtctcctcataatatcctgttggaccgaaagggacatattaaattggctaaatttggactttatcacatgacagctcatggtgatgatgttgatttcccaatagggtaagga

SEQ ID NO: 352361 - DNA, 491 bp, Homo sapiens
attgacattgaacgctgtgtgagagaatctatcaacctgttttgttggactcctaaaagtgctacttacagacagcatgctcaacctccaaagccatcttctgacagcagtggaggcagaagttcggcaccttatttctctgctgagtgtccagatcctccaaagacagatctggtatgtatttgcggatttagtttacaaactctaaaaggagatggatgttaaaattaatataccctagtatctttattgttcttaatggtgtcatttatgtccttttaatgtagatattttctaacacatgatttgattcatagaaatattccagaaaaccattatatctatttggttatagagttaggaagattattttgacgtactcctccaggtagcaagttttgctttttttgtatgcatttgtagtatctgtttatatatcaattggttatatagtgagagattacagaagcaaagaaagaattaaaaaaata

SEQ ID NO: 352362 - DNA, 800 bp, Homo sapiens
tgaatttctttctctatagttatgattcagatcatttctactttttttcaagtttctgaatgcaatttcaaaggtctgtgtttaaaaccagagtgtcaagcaatctgtacctagctccttttcccttctttcaaaattctttatatattcatctaatcttttacttctttctttcaatgtgtgtcagaagaagggtgagttatttttttccccaaggacagtctttccacctatttttcctgacgtatgtaagaaaaactctagaggaagaaaaatacaagagaaaaaaatagttattgttttattagatgtttattatcctatatacttggtaataatgtagttaatatagagtttgaaaggctcttttaaaatattgttatgggtgttatatattaatatcatcagtggagagtattattttgtttttaacatgttgtattgataaaatataacatgggtttgctttgtttttctcaacgactagtggtcgtggctgaacattgtgaacgtagtctggaagacttgcttcgagaaaggaaacctgtgaggtactgtatagtatcagaacaattaaatgaaaagcagaacttggcaaacaaaaaggcattttgtttaaactgcaggggtttggtttcttttgttacttgtttaatgataaaggtaggtgcaaattttcacttgagaaaatttaatttacagattacatatgaattcaacattaacatagtccagtgttcatcttttgtgaggtaggcattctctgaaatatttcacaaaaaattcttcaaaaggggata

SEQ ID NO: 352363 - DNA, 3338 bp, Homo sapiens
gctagtcaggctgggttcaaatcggccgagggccaggctgaggggagggtagagggtgaaaagctcggatctgtgtttggggaaggccaggcttgcgctcctcgccgggttccgcgaaggttaaccttggctgacttggctcgcgagcaaagggcagcgtctgagctcccggcgttccaggagtggcctcttttgtaggagcacctgaaatgcagcgtctggtgcactaagccgtagcggcagcagcagccacagcgacagcgctggggccctgtgtagaagctccatcccccttgtctttgtgcttgcctgcgtccccagactcagagattatcttagaagacctaggactccaaaaatgtttcccctgaaggacgctgaaatgggagcctttaccttctttgcctcggctctgccacatgatgtttgtggaagcaatggacttcctctcacaccaaattccatcaaaattttagggcgctttcaaatccttaaaaccatcacccatcccagactctgccagtatgtggatatttctaggggaaagcatgaacgactagtggtcgtggctgaacattgtgaacgtagtctggaagacttgcttcgagaaaggaaacctgtgaggtatccctcgtacttggcccctgaggtaattgcacagggaattttcaaaaccactgatcacatgccaagtaaaaaaccattgccttctggccccaaatcagatgtatggtctcttggaatcattttatttgagctttgtgtgggaagaaaattatttcagagcttggatatttctgaaagactaaaatttttgcttactttggattgtgtagatgacactttaatagttctggctgaagagcatggttgtttggacattataaaggagcttcctgaaactgtgatagatcttttgaataagtgccttaccttccatccttctaagaggccaaccccagatgaattaatgaaggacaaagtattcagtgaggtatcacctttatataccccctttaccaaacctgccagtctgttttcatcttctctgagatgtgctgatttaactctgcctgaggatatcagtcagttgtgtaaagatataaataatgattacctggcagaaagatctattgaagaagtgtattacctttggtgtttggctggaggtgacttggagaaagagcttgtcaacaaggaaatcattcgatccaaaccacctatctgcacactccccaattttctctttgaggatggtgaaagctttggacaaggtcgagatagaagctcgcttttagatgataccactgtgacattgtcgttatgccagctaagaaatagattgaaagatgttggtggagaagcattttacccattacttgaagatgaccagtctaatttacctcattcaaacagcaataatgagttgtctgcagctgccacgctccctttaatcatcagagagaaggatacagagtaccaactaaatagaattattctcttcgacaggctgctaaaggcttatccatataaaaaaaaccaaatctggaaagaagcaagagttgacattcctcctcttatgagaggtttaacctgggctgctcttctgggagttgagggagctattcatgccaagtacgatgcaattgataaagacactccaattcctacagatagacaaattgaagtggatattcctcgctgtcatcagtacgatgaactgttatcatcaccagaaggtcatgcaaaatttaggcgtgtattaaaagcctgggtagtgtctcatcctgatcttgtgtattggcaaggtcttgactcactttgtgctccattcctatatctaaacttcaataatgaagccttggcttatgcatgtatgtctgcttttattcccaaatacctgtataacttcttcttaaaagacaactcacatgtaatacaagagtatctgactgtcttctctcagatgattgcatttcatgatccagagctgagtaatcatctcaatgagattggtttcattccagatctctatgccatcccttggtttcttaccatgtttactcatgtatttccactacacaaaattttccacctctgggataccttactacttgggaattcctctttcccattctgtattggagtagcaattcttcagcagctgcgggaccggcttttggctaatggctttaatgagtgtattcttctcttctccgatttaccagaaattgacattgaacgctgtgtgagagaatctatcaacctgttttgttggactcctaaaagtgctacttacagacagcatgctcaacctccaaagccatcttctgacagcagtggaggcagaagttcggcaccttatttctctgctgagtgtccagatcctccaaagacagatctgtcaagagaatccatcccattaaatgacctgaagtcagaagtatcaccacggatttcagcagaggacctgattgacttgtgtgagctcacagtgacaggccacttcaaaacacccagcaagaaaacaaagtccagtaaaccaaagctcctggtggttgacatccggaatagtgaagactttattcgtggtcacatttcaggaagcatcaacattccattcagtgctgccttcactgcagaaggggagcttacccagggcccttacactgctatgctccagaacttcaaagggaaggtcattgtcatcgtggggcatgtggcaaaacacacagctgagtttgcagctcaccttgtgaagatgaaatatccaagaatctgtattctagatggtggcattaataaaataaagccaacaggcctcctcaccatcccatctcctcaaatatgaagaaccaagagtgtgactgccaaaacttagtgtggcatcagcaccaacagcacagttcttcatatccacgccactctcagacaaaactagatgtccagattgttgcatttccgtaaagtttgtcacgagacattttttaaaatctcataacccacatgttcagttatccatgcaagaaacttgactctacatgtattgctgaaagaattttcttaacagtgaaatctgatcatatatttttaccacactgccacataaagcccaagaaattcagctgacaagacagatttagcattatcaagaaatcccatttgccctgaaaaagctgtcctccattgtactgaacagacagtcctgtcgattgtgttatttagaaacatacactgaatgtgggctgaaatcatcatctttccataatgaaaactgagaaactattcacaatgcattccttataaataaatgctacatttagtaactcatttcaccc

SEQ ID NO: 352364 - DNA, 3247 bp, Homo sapiens
gctagtcaggctgggttcaaatcggccgagggccaggctgaggggagggtagagggtgaaaagctcggatctgtgtttggggaaggccaggcttgcgctcctcgccgggttccgcgaaggttaaccttggctgacttggctcgcgagcaaagggcagcgtctgagctcccggcgttccaggagtggcctcttttgtaggagcacctgaaatgcagcgtctggtgcactaagccgtagcggcagcagcagccacagcgacagcgctggggccctgtgtagaagctccatcccccttgtctttgtgcttgcctgcgtccccagactcagagattatcttagaagacctaggactccaaaaatgtttcccctgaaggacgctgaaatgggagcctttaccttctttgcctcggctctgccacatgatgtttgtggaagcaatggacttcctctcacaccaaattccatcaaaattttagggcgctttcaaatccttaaaaccatcacccatcccagactctgccagtatgtggatatttctaggggaaagcatgaacgactagtggtcgtggctgaacattgtgaacgtagtctggaagacttgcttcgagaaaggaaacctgtgaggtatccctcgtacttggcccctgaggtaattgcacagggaattttcaaaaccactgatcacatgccaagtaaaaaaccattgccttctggccccaaatcagatgtatggtctcttggaatcattttatttgagctttgtgtgggaagaaaattatttcagagcttggatatttctgaaagactaaaatttttgcttactttggattgtgtagatgacactttaatagttctggctgaagagcatggttgtttggacattataaaggagcttcctgaaactgtgatagatcttttgaataagtgccttaccttccatccttctaagaggccaaccccagatgaattaatgaaggacaaagtattcagtgaggtatcacctttatataccccctttaccaaacctgccagtctgttttcatcttctctgagatgtgctgatttaactctgcctgaggatatcagtcagttgtgtaaagatataaataatgattacctggcagaaagatctattgaagaagtgtattacctttggtgtttggctggaggtgacttggagaaagagcttgtcaacaaggaaatcattcgatccaaaccacctatctgcacactccccaattttctctttgaggatggtgaaagctttggacaaggtcgagatagaagctcgcttttagatgataccactgtgacattgtcgttatgccagctaagaaatagattgaaagatgttggtggagaagcattttacccattacttgaagatgaccagtctaatttacctcattcaaacagcaataatgagttgtctgcagctgccacgctccctttaatcatcagagagaaggatacagagtaccaactaaatagaattattctcttcgacaggctgctaaaggcttatccatataaaaaaaaccaaatctggaaagaagcaagagttgacattcctcctcttatgagaggtttaacctgggctgctcttctgggagttgagggagctattcatgccaagtacgatgcaattgataaagacactccaattcctacagatagacaaattgaagtggatattcctcgctgtcatcagtacgatgaactgttatcatcaccagaaggtcatgcaaaatttaggcgtgtattaaaagcctgggtagtgtctcatcctgatcttgtgtattggcaaggtcttgactcactttgtgctccattcctatatctaaacttcaataatgaagccttggcttatgcatgtatgtctgcttttattcccaaatacctgtataacttcttcttaaaagacaactcacatgtaatacaagagtatctgactgtcttctctcagatgattgcatttcatgatccagagctgagtaatcatctcaatgagattggtttcattccagatatgtatttccactacacaaaattttccacctctgggataccttactacttgggaattcctctttcccattctgtattggagtagcaattcttcagcagctgcgggaccggcttttggctaatggctttaatgagtgtattcttctcttctccgatttaccagaaattgacattgaacgctgtgtgagagaatctatcaacctgttttgttggactcctaaaagtgctacttacagacagcatgctcaacctccaaagccatcttctgacagcagtggaggcagaagttcggcaccttatttctctgctgagtgtccagatcctccaaagacagatctgtcaagagaatccatcccattaaatgacctgaagtcagaagtatcaccacggatttcagcagaggacctgattgacttgtgtgagctcacagtgacaggccacttcaaaacacccagcaagaactttattcgtggtcacatttcaggaagcatcaacattccattcagtgctgccttcactgcagaaggggagcttacccagggcccttacactgctatgctccagaacttcaaagggaaggtcattgtcatcgtggggcatgtggcaaaacacacagctgagtttgcagctcaccttgtgaagatgaaatatccaagaatctgtattctagatggtggcattaataaaataaagccaacaggcctcctcaccatcccatctcctcaaatatgaagaaccaagagtgtgactgccaaaacttagtgtggcatcagcaccaacagcacagttcttcatatccacgccactctcagacaaaactagatgtccagattgttgcatttccgtaaagtttgtcacgagacattttttaaaatctcataacccacatgttcagttatccatgcaagaaacttgactctacatgtattgctgaaagaattttcttaacagtgaaatctgatcatatatttttaccacactgccacataaagcccaagaaattcagctgacaagacagatttagcattatcaagaaatcccatttgccctgaaaaagctgtcctccattgtactgaacagacagtcctgtcgattgtgttatttagaaacatacactgaatgtgggctgaaatcatcatctttccataatgaaaactgagaaactattcacaatgcattccttataaataaatgctacatttagtaactcatttcaccc

SEQ ID NO: 352365 - DNA, 2455 bp, Homo sapiens
gctagtcaggctgggttcaaatcggccgagggccaggctgaggggagggtagagggtgaaaagctcggatctgtgtttggggaaggccaggcttgcgctcctcgccgggttccgcgaaggttaaccttggctgacttggctcgcgagcaaagggcagcgtctgagctcccggcgttccaggagtggcctcttttgtaggagcacctgaaatgcagcgtctggtgcactaagccgtagcggcagcagcagccacagcgacagcgctggggccctgtgtagaagctccatcccccttgtctttgtgcttgcctgcgtccccagactcagagattatcttagaagacctaggactccaaaaatgtttcccctgaaggacgctgaaatgggagcctttaccttctttgcctcggctctgccacatgatgtttgtggaagcaatggacttcctctcacaccaaattccatcaaaattttagggcgctttcaaatccttaaaaccatcacccatcccagactctgccagtatgtggatatttctaggggaaagcatgaacgactagtggtcgtggctgaacattgtgaacgtagtctggaagacttgcttcgagaaaggaaacctgtgaggtatccctcgtacttggcccctgaggtaattgcacagggaattttcaaaaccactgatcacatgccaagtaaaaaaccattgccttctggccccaaatcagatgtatggtctcttggaatcattttatttgagctttgtgtgggaagaaaattatttcagagcttggatatttctgaaagactaaaatttttgcttactttggattgtgtagatgacactttaatagttctggctgaagagcatggttgtttggacattataaaggagcttcctgaaactgtgatagatcttttgaataagtgccttaccttccatccttctaagaggccaaccccagatgaattaatgaaggacaaagtattcagtgaggtatcacctttatataccccctttaccaaacctgccagtctgttttcatcttctctgagatgtgctgatttaactctgcctgaggatatcagtcagttgtgtaaagatataaataatgattacctggcagaaagatctattgaagaagtgtattacctttggtgtttggctggaggtgacttggagaaagagcttgtcaacaaggaaatcattcgatccaaaccacctatctgcacactccccaattttctctttgaggatggtgaaagctttggacaaggtcgagatagaagctcgcttttagatgataccactgtgacattgtcgttatgccagctaagaaatagattgaaagatgttggtggagaagcattttacccattacttgaagatgaccagtctaatttacctcattcaaacagcaataatgagttgtctgcagctgccacgctccctttaatcatcagagagaaggatacagagtaccaactaaatagaattattctcttcgacaggctgctaaaggcttatccatataaaaaaaaccaaatctggaaagaagcaagagttgacattcctcctcttatgagaggtttaacctgggctgctcttctgggagttgagggagctattcatgccaagtacgatgcaattgataaagacactccaattcctacagatagacaaattgaagtggatattcctcgctgtcatcagtacgatgaactgttatcatcaccagaaggtcatgcaaaatttaggcgtgtattaaaagcctgggtagtgtctcatcctgatcttgtgtattggcaaggtcttgactcactttgtgctccattcctatatctaaacttcaataatgaagccttggcttatgcatgtatgtctgcttttattcccaaatacctgtataacttcttcttaaaagacaactcacatgtaatacaagagtatctgactgtcttctctcagatgattgcatttcatgatccagagctgagtaatcatctcaatgagattggtttcattccagatatgtatttccactacacaaaattttccacctctgggataccttactacttgggaattcctctttcccattctgtattggagtagcaattcttcagcagctgcgggaccggcttttggctaatggctttaatgagtgtattcttctcttctccgatttaccagatgcagaaaaggccttcaacaaaattcaacagcctttcatgctaaaaactctcaataaactaggtactgatggaatgtatctcaacataataagagctatttgtgacggacccacagccaatatcatactgaacgggcaaaaactggaaggattccctttgaaaactggcacaggacaaggatgccctctctcaccactcctattcaacatagttttggactttctggccagggcagtcaggcaagagaaagaaataaagggta

SEQ ID NO: 352366 - DNA, 894 bp, Homo sapiens
  misc_feature (1)..(1): n is a, c, g, or t
ngattgtgtatactgtgtgttctttgctgtacacgttctcgtctaaatctccccttacgcttcacgtgttcatcgatcatatcgatcattatctcatcgttctgttctagacccttttgtcggtccgctttacttaatatctacggctttatacctggtggcttcttttgctgatattatatatatgcagtctgcactatatggggtgttgtcgcccctctagatttatccaccttttgtcctacgataatcttgggtctaaggaatcatattttgcgacattgcccttgtcattataagtcctttgtcgtagtcatcccgatcatatattccccttaatttatactgtttctttcttatggtgtcaagatatatatatatatatatattcagaattaggcagctggactcagtttagatgatcccaattttgttggcaacatccaaagcatcgtaatcaggagccagtcgaacatatgccttcttctctccatcaggccgaatcagggtgttgaccttggccacatcaatgtcatacagcttcttcacagcctgtttaatctggtgcttgttggctttaacatccacaatgaacacaagtgtgttgttgtcttctatcttcttcatggcagactcagtggtcagcggaaacttgatgatagcatagtggtcaagcttgtttctcctgggagcgctcttccgaggatatttgggctgtctccggagtcgcagtgtcttcggccgccggaaggtgggtgacgtgcggatcttcttctttttgtggctgtggacacctttcaacactgccttcttggcctttaaagccttcgctttggcttcagctttaggaggggcaggagcttccttcttcgctttcggcgccatcttgtgaaa

SEQ ID NO: 352367 - DNA, 1177 bp, Homo sapiens
  misc_feature (1)..(1): n is a, c, g, or t
ngattgtgtatactgtgtgttctttgctgtacacgttctcgtctaaatctccccttacgcttcacgtgttcatcgatcatatcgatcattatctcatcgttctgttctagacccttttgtcggtccgctttacttaatatctacggctttatacctggtggcttcttttgctgatattatatatatgcagtctgcactatatggggtgttgtcgcccctctagatttatccaccttttgtcctacgataatcttgggtctaaggaatcatattttgcgacattgcccttgtcattataagtcctttgtcgtagtcatcccgatcatatattccccttaatttatactgtttctttcttatggtgtcaagatatatatatatatatatattcagaattaggcagctggactcagtttagatgatcccaattttgttggcaacatccaaagcatcgtaatcaggagccagtcgaacatatgccttcttctctccatcaggccgaatcagggtgttgaccttggccacatcaatgtcatacagcttcttcacagcctgtttaatctggtgcttgttggctttaacatccacaatgaacacaagtgtgttgttgtcttctatcttcttcatggcagactcagtggtcagcggaaacttgatgatagcatagtggtcaagcttgtttctcctgggagcgctcttccgaggatatttgggctgtctccggagtcgcagtgtcttcggccgccggaaggtaaggaacctgctgcgcgtgagatcccattaccaagtaaagggtcactgaaaggcgataacaagagaaagggctcatgtctgactgccagtgttagcataaaggagagccattttgccaagaacaatacagcctgtggaactcaccagagaagtgccccagtaacaacccgacctgcattatttgcaaaccatgacctggatgttccgaagatagcagccacacaaaattctccgcccatcgatttgctgggtgaaatttgtggaggaggtttaactttgcttaaaaaataaaataagagtaaaaaacaattatcatgatgaaatgatactcctttaggtaatgacagtttttcctttaaattccacccctattcaaatcctccagtatgaacatgcattttgccttaagtaataaatggcgatg

SEQ ID NO: 352368 - DNA, 508 bp, Homo sapiens
tgattttaagagcattcacttaggcttcagcctattaggtgacatcttggttttcagacagccctttggagctctatggaaggggaagctagagtgttcagtgactccttacagctctcttgtcttttttaattttagacaactagtaacacactacattatattcacatagagcaacttgacaaggtaagaggaatctttgactcttggctcgtttcttaatgtttggttcactttttgttcctaactatatctttttttttaatgtagatttcagaaagcccttctgaaatcatggaatctcttaccaaaatgtacagcattcctaaggataagcagatgctgttatttacacacatacgactggcccatggcttttctaatcacaggaagcgattgcaggcagttcaggccagactgcatgcaatatctatattaggtaagagaagaatactttaattaccaggccgtattagacagtttgggcctgatttcctttgaacttcat

SEQ ID NO: 352369 - DNA, 2081 bp, Homo sapiens
ggaggctttcgactgagggctagcgaggggagcagggctggagcagggctggagcagggctggagcagggctggagcagggctgaagcagggccgcggaccccgcacgctcctgcgggccccgcggagccattgcggccgaggcctcggcaggcgccagcggagagctagccgcatcttcgggggcagcccggcagctgccggcggcgcggcgagagagcggctgacagaggggatgcgaggtcctccagcagcctgacctgagtgggttagtgatccagagaaaccagcaggccaacttggtcaggaaggttcgggaagctgttggagcagtgtggggaatttcccaccaggatgagtatgattggctgtgattttagatcgtaaagctgaaaattgaaatcatgaaagtagacaggactaaactgaagaagacacctactgaggctcctgcagactgcagagccttaatagacaaactcaaagtttgtaatgatgagcaacttctcttggaactgcagcagatcaaaacatggaacattggaaagtgcgagttatatcactgggtggacctgttggaccgcttcgatggaatactggcagatgctggacagacagtggagaatatgtcatggatgctcgtatgtgataggccagaaagagagcaactgaaaatgcttctcttggctgtgttgaacttcacagccttgctcattgagtacagcttttcccggcatctgtacagttccatagagcatttgacaactttattggcttcctctgatatgcaagtggtgctggcagtcctcaatctcctatatgtatttagcaaaagatcaaactacatcactcgtctgggatctgacaagaggaccccgctgctaactcggctacaacatttggcagagagctggggtggaaaggagaatggctttggacttgcagaatgttgcagagacttgcatatgatgaaatatccacccagtgcaactacactacactttgaattctatgcagatcctggggccgaggtcaaaattgagaaaaggacaactagtaacacactacattatattcacatagagcaacttgacaagatttcagaaagcccttctgaaatcatggaatctcttaccaaaatgtacagcattcctaaggataagcagatgctgttatttacacacatacgactggcccatggcttttctaatcacaggaagcgattgcaggcagttcaggccagactgcatgcaatatctatattagtgtattccaatgccttgcaggaatcagcaaacagtatcttgtataatggcttgatagaggagttggtagatgtccttcagataacggataagcagcttatggagattaaagcagcttctttacgaacattaacatcaattgtccacttggagagaactcccaaactcagcagtattattgactgtactggaactgcctcctaccatggatttttgccagtgcttgtaaggaactgtatccaggccatgattgatccttccatggatccataccctcaccagtttgccactgctctcttctcttttttataccatctggccagctacgatgctggtggtgaagccttggtctcctgtggaatgatggaagccttattgaaggtcataaagtttcttggcgatgaacagagaccagaaagagtaaaaccttttatgacaggggctgcagaacaaatcaagcacatccttgctaatttcaaaaactaccagttctttattggtgaaaacatgaatccagatggcatggttgctctattggactaccgtgaggatggtgtgaccccatatatgattttctttaaggatggtttagaaatggaaaaatgttaacaaatgtggcaattattttggatctatcacctgtcatcataactggcttctgcttgtcatccacacaacaccaggacttaagacaaacgggactgatgtcatcttgagctcttcatttattttgactgtgatttatttggagtggaggcattgtttttaagaaaaacatgtcatgtaggttgtctaaaaataaaatgcatttaaactc

SEQ ID NO: 352370 - DNA, 1412 bp, Homo sapiens
ggaggctttcgactgagggctagcgaggggagcagggctggagcagggctggagcagggctggagcagggctggagcagggctgaagcagggccgcggaccccgcacgctcctgcgggccccgcggagccattgcggccgaggcctcggcaggcgccagcggagagctagccgcatcttcgggggcagcccggcagctgccggcggcgcggcgagagagcggctgacagaggggatgcgaggtcctccagcagcctgacctgagtgggttagtgatccagagaaaccagcaggccaacttggtcaggaaggttcgggaagctgttggagcagtgtggggaatttcccaccaggatgagtatgattggctgtgattttagatcgtaaagctgaaaattgaaatcatgaaagtagacaggactaaactgaagaagacacctactgaggctcctgcagactgcagagccttaatagacaaactcaaagtttgtaatgatgagcaacttctcttggaactgcagcagatcaaaacatggaacattggaaagtgcgagttatatcactgggtggacctgttggaccgcttcgatggaatactggcagatgctggacagacagtggagaatatgtcatggatgctcgtatgtgataggccagaaagagagcaactgaaaatgcttctcttggctgtgttgaacttcacagccttgctcattgagtacagcttttcccggcatctgtacagttccatagagcatttgacaactttattggcttcctctgatatgcaagtggtgctggcagtcctcaatctcctatatgtatttagcaaaagatcaaactacatcactcgtctgggatctgacaagaggaccccgctgctaactcggctacaacatttggcagaggtgagtcttgggtgaagagttggaggggtgcaaaaattggagcatatggttcctttcaacaggtgtttcttggagtgttaaaatatattagaatccctaagttaacttcactggcctaattgagttagaactattggtgccctgttttaaaacctaagtattctcagttattaagtaattttgaaggaattctttaatctctgctcaccaaacaaaatctctctgttcaaaagtggcaatttcacttctgaaaggaaagttcaaaattagattcaattctgtgtgagaaggaagtataatgcaataataagatctagatttgagtcctggccctgcttactagcgccgacactggtttcctcttctgggaatttaacatatctacttcagggttgatttagaatgaaatgaattgtggggtactcagtgctgtgatcagtaagtcgtagtgattgtaattgaagccagaagctctcatataaaagttcagctctaccaaactatt

SEQ ID NO: 352371 - DNA, 327 bp, Homo sapiens
cctccagcagcctgacctgagtgggttagtgatccagagaaaccagcaggccaacttggtcaggaaggttcgggaagctgttggagcagtgtggggaatttcccaccaggatgagtatgattggctgtgattttaggttagtttttgtaaatcttgtgggaagtatttgtattttacttcctggaatggagatagtaggggtggatgtattcccattctgtaatggagctactttggtttcttccattctctggatctgatgtggtactggttgcttctttttttaaagtggagctcattactgaattaaagggaattgtttaaatg

SEQ ID NO: 352372 - DNA, 413 bp, Homo sapiens
gggtagctcaggcgcggtcccctgcaagggacccgacttcaccgcggagggagctccctcccgaggggcaggggcggggcttcgcttgcggtgggtggagccccaaatcgagtttgagctgagccgaagcgaggaggctttcgactgagggctagcgaggggagcagggctggagcagggctggagcagggctggagcagggctggagcagggctgaagcagggccgcggaccccgcacgctcctgcgggccccgcggagccattgcggccgaggtgagcgtctatccctgggctggagggcgagctctgtacgcgcggccgttctcggtttctcgcgggtggcagtggcgaggttggggggggagttcccacgggaccctgcgcggaggcgcggaggtggcggccttgggga

SEQ ID NO: 352373 - DNA, 206 bp, Homo sapiens
tctccccacctcccttgtagatccttccatggatccataccctcaccagtttgccactgctctcttctcttttttataccatctggccagctacgatgctggtggtgaagccacacccctctgcacttatcccagggcctttgcacgtgctgtttccggctgcctgagtatgctcttccctgtctcgcgtggctcctctgatgccg

SEQ ID NO: 352374 - DNA, 1997 bp, Homo sapiens
ggttctcgcgggatcgcgcggaggcggcggtggctcggttactgactgcagtagccgcggaggcggcggcaaggtcttcggctcgtgccgttctaagccggagaattctcgcgggagcagggttacgtcctcgtgggattcgttggcggtggctgaggtcctccagcagcctgacctgagtgggttagtgatccagagaaaccagcaggccaacttggtcaggaaggttcgggaagctgttggagcagtgtggggaatttcccaccaggatgagtatgattggctgtgattttagatcgtaaagctgaaaattgaaatcatgaaagtagacaggactaaactgaagaagacacctactgaggctcctgcagactgcagagccttaatagacaaactcaaagtttgtaatgatgagcaacttctcttggaactgcagcagatcaaaacatggaacattggaaagtgcgagttatatcactgggtggacctgttggaccgcttcgatggaatactggcagatgctggacagacagtggagaatatgtcatggatgctcgtatgtgataggccagaaagagagcaactgaaaatgcttctcttggctgtgttgaacttcacagccttgctcattgagtacagcttttcccggcatctgtacagttccatagagcatttgacaactttattggcttcctctgatatgcaagtggtgctggcagtcctcaatctcctatatgtatttagcaaaagatcaaactacatcactcgtctgggatctgacaagaggaccccgctgctaactcggctacaacatttggcagagagctggggtggaaaggagaatggctttggacttgcagaatgttgcagagacttgcatatgatgaaatatccacccagtgcaactacactacactttgaattctatgcagatcctggggccgaggtcaaaattgagaaaaggacaactagtaacacactacattatattcacatagagcaacttgacaagatttcagaaagcccttctgaaatcatggaatctcttaccaaaatgtacagcattcctaaggataagcagatgctgttatttacacacatacgactggcccatggcttttctaatcacaggaagcgattgcaggcagttcaggccagactgcatgcaatatctatattagtgtattccaatgccttgcaggaatcagcaaacagtatcttgtataatggcttgatagaggagttggtagatgtccttcagataacggataagcagcttatggagattaaagcagcttctttacgaacattaacatcaattgtccacttggagagaactcccaaactcagcagtattattgactgtactggaactgcctcctaccatggatttttgccagtgcttgtaaggaactgtatccaggccatgattgatccttccatggatccataccctcaccagtttgccactgctctcttctcttttttataccatctggccagctacgatgctggtggtgaagccttggtctcctgtggaatgatggaagccttattgaaggtcataaagtttcttggcgatgaacagagaccagaaagagtaaaaccttttatgacaggggctgcagaacaaatcaagcacatccttgctaatttcaaaaactaccagttctttattggtgaaaacatgaatccagatggcatggttgctctattggactaccgtgaggatggtgtgaccccatatatgattttctttaaggatggtttagaaatggaaaaatgttaacaaatgtggcaattattttggatctatcacctgtcatcataactggcttctgcttgtcatccacacaacaccaggacttaagacaaacgggactgatgtcatcttgagctcttcatttattttgactgtgatttatttggagtggaggcattgtttttaagaaaaacatgtcatgtaggttgtctaaaaataaaatgcatttaaactc

SEQ ID NO: 352375 - DNA, 613 bp, Homo sapiens
  misc_feature (610)..(610): n is a, c, g, or t
aaaattccagagtacacttgagagaatgtgggtggaaaaggcaagcagtgctctagtggtgtcattgaagtagttgtaacctggtggaacccctgcagtgcccttaagcctgtgtggtcactgggtcgcacttggaggactgttggtgtggccagtggagcactgctgtgcctccgatgacttgatactttttttgcagtggaactctgagacgaatcctgcataacattaattcatcttcttgtccctgttatttagatgaatggattaagtttgatgatgacaaagtcagcatcgtaacaccagaagatatcttacggctttctggtggtggagactggcatatcgcttacgttctactctatgggcctcgcagagttgaaataatggaagaggaaagtgaacagtaatcttcattttagtatttatgcttagatgtgaaaataaatgttatttgttgatcatttctataatccagagctttagaggaagacacataggtgggtttatgtttcacctcatttggaacaaaagaggacagaagcagaccactctgtgcaccaacctaaaaaattacagagaagagatgttggagaaatgagatgttggnagg

SEQ ID NO: 352376 - DNA, 4010 bp, Homo sapiens
agcggtgtctcctcgctgcagtcgctccggagctgcacgggtgttttgcgtgttgctgcgtcatcgccagtggccggtttgaatgagactcgtcgcaccgaagccgccgccaccaccgcgcctccgcctcggccgccgccgcagctgctcctggtccccgtccctttgccgccctcgtcaggcccagctctcctgcgccgccgcctcccgccgcgccccgccatgccgctctactccgttactgtaaaatggggaaaggagaaatttgaaggtgtagaattgaatacagatgaacctccaatggtattcaaggctcagctgtttgcgttgactggagtccagcctgccagacagaaagttatggtgaaaggaggaacgctaaaggatgatgattggggaaacatcaaaataaaaaatggaatgactctactaatgatggggtcagcagatgctcttccagaagaaccctcagccaaaactgtcttcgtagaagacatgacagaagaacagttagcatctgctatggagttaccatgtggattgacaaaccttggtaacacttgttacatgaatgccacagttcagtgtattcgttctgtgcctgaactcaaagatgcccttaaaaggtatgcaggtgccttgagagcttcaggggaaatggcttcagcgcagtatattactgcagcccttagagatttgtttgattccatggataaaacttcttccagtattccacctattattctactgcagtttttgcacatggctttcccacagtttgccgagaaaggtgaacaaggacagtatcttcaacaggatgctaatgaatgttggatacaaatgatgcgagtattgcaacagaaattggaagcaatagaggatgattctgttaaagagacagactcctcatctgcatcggcagcgacaccttctaaaaagaaaagtttaatcgatcagttcttcggtgttgagtttgaaactaccatgaaatgtacagaatctgaagaagaagaagtcaccaaaggaaaggaaaatcaacttcagcttagctgttttatcaatcaggaagtcaagtatctttttacaggacttaaattgcgacttcaggaagaaatcaccaaacagtctccaacgttgcaaagaaatgccttgtatatcaaatcttccaagatcagccggctgcctgcttacttgaccattcagatggttcgatttttttataaagagaaggaatctgtgaatgccaaagttcttaaggatgttaaatttcctcttatgttggatatgtatgaactgtgtacaccagaacttcaagagaaaatggtgtcttttcgatccaaattcaaggatctagaagataaaaaagtgaatcagcagccaaatacaagtgacaaaaagagtagtccccagaaagaagttaagtatgaacccttttcttttgctgatgatattggctccaataattgtggatactatgacttacaagcagtactaacacaccagggaaggtctagttcttcaggtcattatgtatcatgggtgaaaaggaaacaagatgaatggattaagtttgatgatgacaaagtcagcatcgtaacaccagaagatatcttacggctttctggtggtggagactggcatatcgcttacgttctactctatgggcctcgcagagttgaaataatggaagaggaaagtgaacagtaatcttcattttagtatttatgcttagatgtgaaaataaatgttatttgttgatcatttctataatccagagctttagaggaagacacataggtgggtttatgtttcacctcatttggaacaaaagaggacagaagcagaccactctgtgcaccaacctaaaaaattacagagaagagaaaattatctttggattgtgctgccctatataaaggtggcagaaagacatttttaaaaagcttattatttcttgcattattttaaaaagttcagagttgaaatgcctttcaaccatttccttctgtggtcatttttcttgctgcctttttcacccaagattcagcagtcagatgtttactgcacacctattacctattatttgctgttcttgcatggttcaaaccaccattctgtagccacccatcctttgccttatctaacaaacatttttccaggaaggtggaaaaggaagtgttgctctcattgtgtgactcagtgctgctgtccatcccatggaaacatgggcacaatcaagtatttgtccagcctattgcaggcttttcctgactttaaaataaattgtgatcaataatagtacctttgattatacatttattattgtgtctctctctgatgtactgtggattgtacatttaactttggaatggctttgtaataatcagtcttaagaaaatgttgacaagctctggttgcttatttttagaaaatgaggacatttaataataataaaaaaaaagggattaatagcttttgacctcaagtcttttgtcttctgagtgttggagcttggctgaagacatgtttaatactgtacaatttctgaagatggttattaacactgtgctgttaagcatccatttaaaaatatttgttatcttctttgcctgcctgtattttaaaaagaaatacaaagttgtaaaagtaatggatttctttggatgctgaatgcagtgatgttatcagtcagattctttccttggctcagttgtgtttgtatttcctttcttaattccccaaatcttggctgggcacggtggctcacgcctgtaatcccagcactttgggaggctgaggcaggtggttcactggaggttgagttcgagaccagcctggccacatggtgaaaccctgtctctactaaagatataaaaattagctggatgtggtggtgcacacctgtgatcccagctacttgggaggctgaggtgggagaattgcttgaacctggaaggcagaagttgcagtgagctgagatcacaccactgcactccagcctgggtgacagagagactctgtctcaaaaaaaaaaagaaaaaattcccaaatcttaatgtctgtttcagaattttagtgattttaaagtgatagtagaaaataccaagcatatgaggtatttcaatatgataggcttcttacattttaatagttactcatctttgttccaggacccttgactgatgctagggaaaggataaagcatagaataccagccagtttggctctgattttgagttatttataataaagtttggggattatcataacatctcatatctttgtgtatgttgttttaatgctcggcagagcacaacactgatgataactattaaaaatagaaaataacagccattttactttcaaatctgatgtgatgcaatctgtgaacactaggaggggataaaataagcattgcagggaaacttatttgtaaatagcttcctcacctaaactttgacttggcaatcaatactttctactttgtggaggggattaagaatagaatgggcaggatgagaccatgaaaattataatgattcatgtatatttgtatgatgcttgtaactttgcaaagtcttttttattcattgtctcatttggtcagaacaattttattgaggacatgaatttaacaattagaatttagattttctgactgtagctactaaatgttgtagctactagaccaggtgagctaggtttagagcaaagtatataagccttgtatggactatattagaattttaaaaattgtaattaattccttatcatcattataaaaagcttgatttttttatttgatctaaaaaagcattattccaaagaattttttcacagtagaaatgggagttagttataccagtgttgtttttaactaataaggctattttagaattcagccttgcctgtaaggtctttgagaagggagaggagtaggccaaaaaaaaaaaagtcttgattcctgaatgtgccttatatgctgtgccactcacaccgaggccatcatc

SEQ ID NO: 352377 - DNA, 3919 bp, Homo sapiens
agctaggtggagggcctggggtgtgaattcggcgaggcgctccgccgccgcagctgctcctggtccccgtccctttgccgccctcgtcaggcccagctctcctgcgccgccgcctcccgccgcgccccgccatgccgctctactccgttactgtaaaatggggaaaggagaaatttgaaggtgtagaattgaatacagatgaacctccaatggtattcaaggctcagctgtttgcgttgactggagtccagcctgccagacagaaagttatggtgaaaggaggaacgctaaaggatgatgattggggaaacatcaaaataaaaaatggaatgactctactaatgatggggtcagcagatgctcttccagaagaaccctcagccaaaactgtcttcgtagaagacatgacagaagaacagttagcatctgctatggagttaccatgtggattgacaaaccttggtaacacttgttacatgaatgccacagttcagtgtattcgttctgtgcctgaactcaaagatgcccttaaaaggtatgcaggtgccttgagagcttcaggggaaatggcttcagcgcagtatattactgcagcccttagagatttgtttgattccatggataaaacttcttccagtattccacctattattctactgcagtttttgcacatggctttcccacagtttgccgagaaaggtgaacaaggacagtatcttcaacaggatgctaatgaatgttggatacaaatgatgcgagtattgcaacagaaattggaagcaatagaggatgattctgttaaagagacagactcctcatctgcatcggcagcgacaccttctaaaaagaaaagtttaatcgatcagttcttcggtgttgagtttgaaactaccatgaaatgtacagaatctgaagaagaagaagtcaccaaaggaaaggaaaatcaacttcagcttagctgttttatcaatcaggaagtcaagtatctttttacaggacttaaattgcgacttcaggaagaaatcaccaaacagtctccaacgttgcaaagaaatgccttgtatatcaaatcttccaagatcagccggctgcctgcttacttgaccattcagatggttcgatttttttataaagagaaggaatctgtgaatgccaaagttcttaaggatgttaaatttcctcttatgttggatatgtatgaactgtgtacaccagaacttcaagagaaaatggtgtcttttcgatccaaattcaaggatctagaagataaaaaagtgaatcagcagccaaatacaagtgacaaaaagagtagtccccagaaagaagttaagtatgaacccttttcttttgctgatgatattggctccaataattgtggatactatgacttacaagcagtactaacacaccagggaaggtctagttcttcaggtcattatgtatcatgggtgaaaaggaaacaagatgaatggattaagtttgatgatgacaaagtcagcatcgtaacaccagaagatatcttacggctttctggtggtggagactggcatatcgcttacgttctactctatgggcctcgcagagttgaaataatggaagaggaaagtgaacagtaatcttcattttagtatttatgcttagatgtgaaaataaatgttatttgttgatcatttctataatccagagctttagaggaagacacataggtgggtttatgtttcacctcatttggaacaaaagaggacagaagcagaccactctgtgcaccaacctaaaaaattacagagaagagaaaattatctttggattgtgctgccctatataaaggtggcagaaagacatttttaaaaagcttattatttcttgcattattttaaaaagttcagagttgaaatgcctttcaaccatttccttctgtggtcatttttcttgctgcctttttcacccaagattcagcagtcagatgtttactgcacacctattacctattatttgctgttcttgcatggttcaaaccaccattctgtagccacccatcctttgccttatctaacaaacatttttccaggaaggtggaaaaggaagtgttgctctcattgtgtgactcagtgctgctgtccatcccatggaaacatgggcacaatcaagtatttgtccagcctattgcaggcttttcctgactttaaaataaattgtgatcaataatagtacctttgattatacatttattattgtgtctctctctgatgtactgtggattgtacatttaactttggaatggctttgtaataatcagtcttaagaaaatgttgacaagctctggttgcttatttttagaaaatgaggacatttaataataataaaaaaaaagggattaatagcttttgacctcaagtcttttgtcttctgagtgttggagcttggctgaagacatgtttaatactgtacaatttctgaagatggttattaacactgtgctgttaagcatccatttaaaaatatttgttatcttctttgcctgcctgtattttaaaaagaaatacaaagttgtaaaagtaatggatttctttggatgctgaatgcagtgatgttatcagtcagattctttccttggctcagttgtgtttgtatttcctttcttaattccccaaatcttggctgggcacggtggctcacgcctgtaatcccagcactttgggaggctgaggcaggtggttcactggaggttgagttcgagaccagcctggccacatggtgaaaccctgtctctactaaagatataaaaattagctggatgtggtggtgcacacctgtgatcccagctacttgggaggctgaggtgggagaattgcttgaacctggaaggcagaagttgcagtgagctgagatcacaccactgcactccagcctgggtgacagagagactctgtctcaaaaaaaaaaagaaaaaattcccaaatcttaatgtctgtttcagaattttagtgattttaaagtgatagtagaaaataccaagcatatgaggtatttcaatatgataggcttcttacattttaatagttactcatctttgttccaggacccttgactgatgctagggaaaggataaagcatagaataccagccagtttggctctgattttgagttatttataataaagtttggggattatcataacatctcatatctttgtgtatgttgttttaatgctcggcagagcacaacactgatgataactattaaaaatagaaaataacagccattttactttcaaatctgatgtgatgcaatctgtgaacactaggaggggataaaataagcattgcagggaaacttatttgtaaatagcttcctcacctaaactttgacttggcaatcaatactttctactttgtggaggggattaagaatagaatgggcaggatgagaccatgaaaattataatgattcatgtatatttgtatgatgcttgtaactttgcaaagtcttttttattcattgtctcatttggtcagaacaattttattgaggacatgaatttaacaattagaatttagattttctgactgtagctactaaatgttgtagctactagaccaggtgagctaggtttagagcaaagtatataagccttgtatggactatattagaattttaaaaattgtaattaattccttatcatcattataaaaagcttgatttttttatttgatctaaaaaagcattattccaaagaattttttcacagtagaaatgggagttagttataccagtgttgtttttaactaataaggctattttagaattcagccttgcctgtaaggtctttgagaagggagaggagtaggccaaaaaaaaaaaagtcttgattcctgaatgtgccttatatgctgtgccactcacaccgaggccatcatc

SEQ ID NO: 352378 - DNA, 3919 bp, Homo sapiens
  misc_feature (18)..(21): n is a, c, g, or t
  misc_feature (23)..(23): n is a, c, g, or t
  misc_feature (26)..(26): n is a, c, g, or t
  misc_feature (30)..(30): n is a, c, g, or t
acagctagtgtataggtnnnngnctnggtngtaatcggccgagggtttgaatgagactcgtcgcaccgaagccgccgccaccaccgcgcctccgcctcggccgccgccgcagctgctcctggtccccgtccctttgccgccctcgtcaggcccagctctcctgcgccgccgcctcccgccgcgccccgccatgccgctctactccgttactgtaaaatggggaaaggagaaatttgaaggtgtagaattgaatacagatgaacctccaatggtattcaaggctcagctgtttgcgttgactggagtccagcctgccagacagaaagttatggtgaaaggaggaacgctaaaggatgatgattggggaaacatcaaaataaaaaatggaatgactctactaatgatggggtcagcagatgctcttccagaagaaccctcagccaaaactgtcttcgtagaagacatgacagaagaacagttagcatctgctatggagttaccatgtggattgacaaaccttggtaacacttgttacatgaatgccacagttcagtgtattcgttctgtgcctgaactcaaagatgcccttaaaagcccttagagatttgtttgattccatggataaaacttcttccagtattccacctattattctactgcagtttttgcacatggctttcccacagtttgccgagaaaggtgaacaaggacagtatcttcaacaggatgctaatgaatgttggatacaaatgatgcgagtattgcaacagaaattggaagcaatagaggatgattctgttaaagagacagactcctcatctgcatcggcagcgacaccttctaaaaagaaaagtttaatcgatcagttcttcggtgttgagtttgaaactaccatgaaatgtacagaatctgaagaagaagaagtcaccaaaggaaaggaaaatcaacttcagcttagctgttttatcaatcaggaagtcaagtatctttttacaggacttaaattgcgacttcaggaagaaatcaccaaacagtctccaacgttgcaaagaaatgccttgtatatcaaatcttccaagatcagccggctgcctgcttacttgaccattcagatggttcgatttttttataaagagaaggaatctgtgaatgccaaagttcttaaggatgttaaatttcctcttatgttggatatgtatgaactgtgtacaccagaacttcaagagaaaatggtgtcttttcgatccaaattcaaggatctagaagataaaaaagtgaatcagcagccaaatacaagtgacaaaaagagtagtccccagaaagaagttaagtatgaacccttttcttttgctgatgatattggctccaataattgtggatactatgacttacaagcagtactaacacaccagggaaggtctagttcttcaggtcattatgtatcatgggtgaaaaggaaacaagatgaatggattaagtttgatgatgacaaagtcagcatcgtaacaccagaagatatcttacggctttctggtggtggagactggcatatcgcttacgttctactctatgggcctcgcagagttgaaataatggaagaggaaagtgaacagtaatcttcattttagtatttatgcttagatgtgaaaataaatgttatttgttgatcatttctataatccagagctttagaggaagacacataggtgggtttatgtttcacctcatttggaacaaaagaggacagaagcagaccactctgtgcaccaacctaaaaaattacagagaagagaaaattatctttggattgtgctgccctatataaaggtggcagaaagacatttttaaaaagcttattatttcttgcattattttaaaaagttcagagttgaaatgcctttcaaccatttccttctgtggtcatttttcttgctgcctttttcacccaagattcagcagtcagatgtttactgcacacctattacctattatttgctgttcttgcatggttcaaaccaccattctgtagccacccatcctttgccttatctaacaaacatttttccaggaaggtggaaaaggaagtgttgctctcattgtgtgactcagtgctgctgtccatcccatggaaacatgggcacaatcaagtatttgtccagcctattgcaggcttttcctgactttaaaataaattgtgatcaataatagtacctttgattatacatttattattgtgtctctctctgatgtactgtggattgtacatttaactttggaatggctttgtaataatcagtcttaagaaaatgttgacaagctctggttgcttatttttagaaaatgaggacatttaataataataaaaaaaaagggattaatagcttttgacctcaagtcttttgtcttctgagtgttggagcttggctgaagacatgtttaatactgtacaatttctgaagatggttattaacactgtgctgttaagcatccatttaaaaatatttgttatcttctttgcctgcctgtattttaaaaagaaatacaaagttgtaaaagtaatggatttctttggatgctgaatgcagtgatgttatcagtcagattctttccttggctcagttgtgtttgtatttcctttcttaattccccaaatcttggctgggcacggtggctcacgcctgtaatcccagcactttgggaggctgaggcaggtggttcactggaggttgagttcgagaccagcctggccacatggtgaaaccctgtctctactaaagatataaaaattagctggatgtggtggtgcacacctgtgatcccagctacttgggaggctgaggtgggagaattgcttgaacctggaaggcagaagttgcagtgagctgagatcacaccactgcactccagcctgggtgacagagagactctgtctcaaaaaaaaaaagaaaaaattcccaaatcttaatgtctgtttcagaattttagtgattttaaagtgatagtagaaaataccaagcatatgaggtatttcaatatgataggcttcttacattttaatagttactcatctttgttccaggacccttgactgatgctagggaaaggataaagcatagaataccagccagtttggctctgattttgagttatttataataaagtttggggattatcataacatctcatatctttgtgtatgttgttttaatgctcggcagagcacaacactgatgataactattaaaaatagaaaataacagccattttactttcaaatctgatgtgatgcaatctgtgaacactaggaggggataaaataagcattgcagggaaacttatttgtaaatagcttcctcacctaaactttgacttggcaatcaatactttctactttgtggaggggattaagaatagaatgggcaggatgagaccatgaaaattataatgattcatgtatatttgtatgatgcttgtaactttgcaaagtcttttttattcattgtctcatttggtcagaacaattttattgaggacatgaatttaacaattagaatttagattttctgactgtagctactaaatgttgtagctactagaccaggtgagctaggtttagagcaaagtatataagccttgtatggactatattagaattttaaaaattgtaattaattccttatcatcattataaaaagcttgatttttttatttgatctaaaaaagcattattccaaagaattttttcacagtagaaatgggagttagttataccagtgttgtttttaactaataaggctattttagaattcagccttgcctgtaaggtctttgagaagggagaggagtaggccaaaaaaaaaaaagtcttgattcctgaatgtgccttatatgctgtgccactcacaccgaggccatcatc

SEQ ID NO: 352379 - DNA, 3432 bp, Homo sapiens
aaaaaaaaattaagtaagtttttgtttgtattaattaaaattaatttacagtcgcgtgtattaaatatgtgactgttttactaaggcaatgtttgctttgtctttaacccttagagatttgtttgattccatggataaaacttcttccagtattccacctattattctactgcagtttttgcacatggctttcccacagtttgccgagaaaggtgaacaaggacagtatcttcaacaggatgctaatgaatgttggatacaaatgatgcgagtattgcaacagaaattggaagcaatagaggatgattctgttaaagagacagactcctcatctgcatcggcagcgacaccttctaaaaagaaaagtttaatcgatcagttcttcggtgttgagtttgaaactaccatgaaatgtacagaatctgaagaagaagaagtcaccaaaggaaaggaaaatcaacttcagcttagctgttttatcaatcaggaagtcaagtatctttttacaggacttaaattgcgacttcaggaagaaatcaccaaacagtctccaacgttgcaaagaaatgccttgtatatcaaatcttccaagatcagccggctgcctgcttacttgaccattcagatggttcgatttttttataaagagaaggaatctgtgaatgccaaagttcttaaggatgttaaatttcctcttatgttggatatgtatgaactgtgtacaccagaacttcaagagaaaatggtgtcttttcgatccaaattcaaggatctagaagataaaaaagtgaatcagcagccaaatacaagtgacaaaaagagtagtccccagaaagaagttaagtatgaacccttttcttttgctgatgatattggctccaataattgtggatactatgacttacaagcagtactaacacaccagggaaggtctagttcttcaggtcattatgtatcatgggtgaaaaggaaacaagatgaatggattaagtttgatgatgacaaagtcagcatcgtaacaccagaagatatcttacggctttctggtggtggagactggcatatcgcttacgttctactctatgggcctcgcagagttgaaataatggaagaggaaagtgaacagtaatcttcattttagtatttatgcttagatgtgaaaataaatgttatttgttgatcatttctataatccagagctttagaggaagacacataggtgggtttatgtttcacctcatttggaacaaaagaggacagaagcagaccactctgtgcaccaacctaaaaaattacagagaagagaaaattatctttggattgtgctgccctatataaaggtggcagaaagacatttttaaaaagcttattatttcttgcattattttaaaaagttcagagttgaaatgcctttcaaccatttccttctgtggtcatttttcttgctgcctttttcacccaagattcagcagtcagatgtttactgcacacctattacctattatttgctgttcttgcatggttcaaaccaccattctgtagccacccatcctttgccttatctaacaaacatttttccaggaaggtggaaaaggaagtgttgctctcattgtgtgactcagtgctgctgtccatcccatggaaacatgggcacaatcaagtatttgtccagcctattgcaggcttttcctgactttaaaataaattgtgatcaataatagtacctttgattatacatttattattgtgtctctctctgatgtactgtggattgtacatttaactttggaatggctttgtaataatcagtcttaagaaaatgttgacaagctctggttgcttatttttagaaaatgaggacatttaataataataaaaaaaaagggattaatagcttttgacctcaagtcttttgtcttctgagtgttggagcttggctgaagacatgtttaatactgtacaatttctgaagatggttattaacactgtgctgttaagcatccatttaaaaatatttgttatcttctttgcctgcctgtattttaaaaagaaatacaaagttgtaaaagtaatggatttctttggatgctgaatgcagtgatgttatcagtcagattctttccttggctcagttgtgtttgtatttcctttcttaattccccaaatcttggctgggcacggtggctcacgcctgtaatcccagcactttgggaggctgaggcaggtggttcactggaggttgagttcgagaccagcctggccacatggtgaaaccctgtctctactaaagatataaaaattagctggatgtggtggtgcacacctgtgatcccagctacttgggaggctgaggtgggagaattgcttgaacctggaaggcagaagttgcagtgagctgagatcacaccactgcactccagcctgggtgacagagagactctgtctcaaaaaaaaaaagaaaaaattcccaaatcttaatgtctgtttcagaattttagtgattttaaagtgatagtagaaaataccaagcatatgaggtatttcaatatgataggcttcttacattttaatagttactcatctttgttccaggacccttgactgatgctagggaaaggataaagcatagaataccagccagtttggctctgattttgagttatttataataaagtttggggattatcataacatctcatatctttgtgtatgttgttttaatgctcggcagagcacaacactgatgataactattaaaaatagaaaataacagccattttactttcaaatctgatgtgatgcaatctgtgaacactaggaggggataaaataagcattgcagggaaacttatttgtaaatagcttcctcacctaaactttgacttggcaatcaatactttctactttgtggaggggattaagaatagaatgggcaggatgagaccatgaaaattataatgattcatgtatatttgtatgatgcttgtaactttgcaaagtcttttttattcattgtctcatttggtcagaacaattttattgaggacatgaatttaacaattagaatttagattttctgactgtagctactaaatgttgtagctactagaccaggtgagctaggtttagagcaaagtatataagccttgtatggactatattagaattttaaaaattgtaattaattccttatcatcattataaaaagcttgatttttttatttgatctaaaaaagcattattccaaagaattttttcacagtagaaatgggagttagttataccagtgttgtttttaactaataaggctattttagaattcagccttgcctgtaaggtctttgagaagggagaggagtaggccaaaaaaaaaaaagtcttgattcctgaatgtgccttatatgctgtgccactcacaccgaggccatcatc

SEQ ID NO: 352380 - DNA, 3542 bp, Homo sapiens
aggttaacagaggtttctgtgttatgacttttttcaaatttaacaataattcattggtgctgattggcttttatgcataaaacgtaaagaacaggagtttcttgggctctcttaattttcctctagagtgaatattctgataataaacaggaatgacagctttgttatataaaatacaatataaaattctctgaatctaagcatcatttggggcatagctaaaaaagagcaaacagtatttacactcggaggaatccacaacaacgtaaattatttgatgccttgtaagaattgaacagtatctaaaagtcttcccatattgtcatcaaattgtgtctcagtggtataaacccattgatgtactgtatattgcctcttaggtagtgctagtttttaaaaggcttactggtgtgattctatattgcagaaataaaatttttaaaactaatgtttggtcttctgttatgttctttcttagcgacttcaggaagaaatcaccaaacagtctccaacgttgcaaagaaatgccttgtatatcaaatctgtaagttatgcagtcctttcgaagccaaattccgcttcactgaaatatttccagttaattaattttatccagtcttaatttttaccaccaaataattaaaacttgtatggtattttgatgtaatgggatttctttccattttgtctcctcagtccaagatcagccggctgcctgcttacttgaccattcagatggttcgatttttttataaagagaaggaatctgtgaatgccaaagttcttaaggatgttaaatttcctcttatgttggatatgtatgaactgtgtacaccagaacttcaagagaaaatggtgtcttttcgatccaaattcaaggatctagaagataaaaaagtgaatcagcagccaaatacaagtgacaaaaagagtagtccccagaaagaagttaagtatgaacccttttcttttgctgatgatattggctccaataattgtggatactatgacttacaagcagtactaacacaccagggaaggtctagttcttcaggtcattatgtatcatgggtgaaaaggaaacaagatgaatggattaagtttgatgatgacaaagtcagcatcgtaacaccagaagatatcttacggctttctggtggtggagactggcatatcgcttacgttctactctatgggcctcgcagagttgaaataatggaagaggaaagtgaacagtaatcttcattttagtatttatgcttagatgtgaaaataaatgttatttgttgatcatttctataatccagagctttagaggaagacacataggtgggtttatgtttcacctcatttggaacaaaagaggacagaagcagaccactctgtgcaccaacctaaaaaattacagagaagagaaaattatctttggattgtgctgccctatataaaggtggcagaaagacatttttaaaaagcttattatttcttgcattattttaaaaagttcagagttgaaatgcctttcaaccatttccttctgtggtcatttttcttgctgcctttttcacccaagattcagcagtcagatgtttactgcacacctattacctattatttgctgttcttgcatggttcaaaccaccattctgtagccacccatcctttgccttatctaacaaacatttttccaggaaggtggaaaaggaagtgttgctctcattgtgtgactcagtgctgctgtccatcccatggaaacatgggcacaatcaagtatttgtccagcctattgcaggcttttcctgactttaaaataaattgtgatcaataatagtacctttgattatacatttattattgtgtctctctctgatgtactgtggattgtacatttaactttggaatggctttgtaataatcagtcttaagaaaatgttgacaagctctggttgcttatttttagaaaatgaggacatttaataataataaaaaaaaagggattaatagcttttgacctcaagtcttttgtcttctgagtgttggagcttggctgaagacatgtttaatactgtacaatttctgaagatggttattaacactgtgctgttaagcatccatttaaaaatatttgttatcttctttgcctgcctgtattttaaaaagaaatacaaagttgtaaaagtaatggatttctttggatgctgaatgcagtgatgttatcagtcagattctttccttggctcagttgtgtttgtatttcctttcttaattccccaaatcttggctgggcacggtggctcacgcctgtaatcccagcactttgggaggctgaggcaggtggttcactggaggttgagttcgagaccagcctggccacatggtgaaaccctgtctctactaaagatataaaaattagctggatgtggtggtgcacacctgtgatcccagctacttgggaggctgaggtgggagaattgcttgaacctggaaggcagaagttgcagtgagctgagatcacaccactgcactccagcctgggtgacagagagactctgtctcaaaaaaaaaaagaaaaaattcccaaatcttaatgtctgtttcagaattttagtgattttaaagtgatagtagaaaataccaagcatatgaggtatttcaatatgataggcttcttacattttaatagttactcatctttgttccaggacccttgactgatgctagggaaaggataaagcatagaataccagccagtttggctctgattttgagttatttataataaagtttggggattatcataacatctcatatctttgtgtatgttgttttaatgctcggcagagcacaacactgatgataactattaaaaatagaaaataacagccattttactttcaaatctgatgtgatgcaatctgtgaacactaggaggggataaaataagcattgcagggaaacttatttgtaaatagcttcctcacctaaactttgacttggcaatcaatactttctactttgtggaggggattaagaatagaatgggcaggatgagaccatgaaaattataatgattcatgtatatttgtatgatgcttgtaactttgcaaagtcttttttattcattgtctcatttggtcagaacaattttattgaggacatgaatttaacaattagaatttagattttctgactgtagctactaaatgttgtagctactagaccaggtgagctaggtttagagcaaagtatataagccttgtatggactatattagaattttaaaaattgtaattaattccttatcatcattataaaaagcttgatttttttatttgatctaaaaaagcattattccaaagaattttttcacagtagaaatgggagttagttataccagtgttgtttttaactaataaggctattttagaattcagccttgcctgtaaggtctttgagaagggagaggagtaggccaaaaaaaaaaaagtcttgattcctgaatgtgccttatatgctgtgccactcacaccgaggccatcatc

SEQ ID NO: 352381 - DNA, 2893 bp, Homo sapiens
agcggtgtctcctcgctgcagtcgctccggagctgcacgggtgttttgcgtgttgctgcgtcatcgccagtggccggtttgaatgagactcgtcgcaccgaagccgccgccaccaccgcgcctccgcctcggccgccgccgcagctgctcctggtccccgtccctttgccgccctcgtcaggcccagctctcctgcgccgccgcctcccgccgcgccccgccatgccgctctactccgttactgtaaaatggggaaaggagaaatttgaaggtgtagaattgaatacagatgaacctccaatggtattcaaggctcagctgtttgcgttgactggagtccagcctgccagacagaaagttatggtgaaaggaggaacgctaaaggatgatgattggggaaacatcaaaataaaaaatggaatgactctactaatgatggggtcagcagatgctcttccagaagaaccctcagccaaaactgtcttcgtagaagacatgacagaagaacagttagcatctgctatggagttaccatgtggattgacaaaccttggtaacacttgttacatgaatgccacagttcagtgtattcgttctgtgcctgaactcaaagatgcccttaaaaggtatgcaggtgccttgagagcttcaggggaaatggcttcagcgcagtatattactgcagcccttagagatttgtttgattccatggataaaacttcttccagtattccacctattattctactgcagtttttgcacatggctttcccacagtttgccgagaaaggtgaacaaggacagtatcttcaacaggatgctaatgaatgttggatacaaatgatgcgagtattgcaacagaaattggaagcaatagaggatgattctgttaaagagacagactcctcatctgcatcggcagcgacaccttctaaaaagaaaagtttaatcgatcagttcttcggtgttgagtttgaaactaccatgaaatgtacagaatctgaagaagaagaagtcaccaaaggaaaggaaaatcaacttcagcttagctgttttatcaatcaggaagtcaagtatctttttacaggacttaaattgcgacttcaggaagaaatcaccaaacagtctccaacgttgcaaagaaatgccttgtatatcaaatcttccaagatcagccggctgcctgcttacttgaccattcagatggttcgatttttttataaagagaaggaatctgtgaatgccaaagttcttaaggatgttaaatttcctcttatgttggatatgtatgaactgtgtacaccagaacttcaagagaaaatggtgtcttttcgatccaaattcaaggatctagaagataaaaaagtgaatcagcagccaaatacaagtgacaaaaagagtagtccccagaaagaagttaagtatgaacccttttcttttgctgatgatattggctccaataattgtggatactatgacttacaagcagtactaacacaccagggaaggtctagttcttcaggtcattatgtatcatgggtgaaaaggaaacaagatgaatggattaagtttgatgatgacaaagtcagcatcgtaacaccagaagatatcttacggctttctggtggtggagactggcatatcgcttacgttctactctatgggcctcgcagagttgaaataatggaagaggaaagtgaacagtaatcttcattttagtatttatgcttagatgtgaaaataaatgttatttgttgatcatttctataatccagagctttagaggaagacacataggtgggtttatgtttcacctcatttggaacaaaagaggacagaagcagaccactctgtgcaccaacctaaaaaattacagagaagagaaaattatctttggattgtgctgccctatataaaggtggcagaaagacatttttaaaaagcttattatttcttgcattattttaaaaagttcagagttgaaatgcctttcaaccatttccttctgtggtcatttttcttgctgcctttttcacccaagattcagcagtcagatgtttactgcacacctattacctattatttgctgttcttgcatggttcaaaccaccattctgtagccacccatcctttgccttatctaacaaacatttttccaggaaggtggaaaaggaagtgttgctctcattgtgtgactcagtgctgctgtccatcccatggaaacatgggcacaatcaagtatttgtccagcctattgcaggcttttcctgactttaaaataaattgtgatcaataatagtacctttgattatacatttattattgtgtctctctctgatgtactgtggattgtacatttaactttggaatggctttgtaataatcagtcttaagaaaatgttgacaagctctggttgcttatttttagaaaatgaggacatttaataataataacaaccacaagggaaacaaaaaaaaaaaaaaaaaaaaaaaaaacttttgggggggctacgggccccggcgagaaagttttgtaaaacccattgggtgggggccccggggaccccagagggtaagtcgacacggggccacagcggggtcaccaaggaaacacggggcgcagaaacagagggcggggtattctcaaccaaataaaaaaagcgccgggggaaacacagagagtggtctagagaacaagtcacaagagagggggagtcctccgaggggaccaacaagggggacctcataccacaggggaggtccccaaagggaggctccgaattacaaataagcccggcgcggtgggagagaacagaacgaaaaacaagagaagacaaacaaagaacagaacgcgaaaacagcgcaaacaagagaaagaagaaaaagaagaaca

SEQ ID NO: 352382 - DNA, 2713 bp, Homo sapiens
aaaattccagagtacacttgagagaatgtgggtggaaaaggcaagcagtgctctagtggtgtcattgaagtagttgtaacctggtggaacccctgcagtgcccttaagcctgtgtggtcactgggtcgcacttggaggactgttggtgtggccagtggagcactgctgtgcctccgatgacttgatactttttttgcagtggaactctgagacgaatcctgcataacattaattcatcttcttgtccctgttatttagatgaatggattaagtttgatgatgacaaagtcagcatcgtaacaccagaagatatcttacggctttctggtggtggagactggcatatcgcttacgttctactctatgggcctcgcagagttgaaataatggaagaggaaagtgaacagtaatcttcattttagtatttatgcttagatgtgaaaataaatgttatttgttgatcatttctataatccagagctttagaggaagacacataggtgggtttatgtttcacctcatttggaacaaaagaggacagaagcagaccactctgtgcaccaacctaaaaaattacagagaagagaaaattatctttggattgtgctgccctatataaaggtggcagaaagacatttttaaaaagcttattatttcttgcattattttaaaaagttcagagttgaaatgcctttcaaccatttccttctgtggtcatttttcttgctgcctttttcacccaagattcagcagtcagatgtttactgcacacctattacctattatttgctgttcttgcatggttcaaaccaccattctgtagccacccatcctttgccttatctaacaaacatttttccaggaaggtggaaaaggaagtgttgctctcattgtgtgactcagtgctgctgtccatcccatggaaacatgggcacaatcaagtatttgtccagcctattgcaggcttttcctgactttaaaataaattgtgatcaataatagtacctttgattatacatttattattgtgtctctctctgatgtactgtggattgtacatttaactttggaatggctttgtaataatcagtcttaagaaaatgttgacaagctctggttgcttatttttagaaaatgaggacatttaataataataaaaaaaaagggattaatagcttttgacctcaagtcttttgtcttctgagtgttggagcttggctgaagacatgtttaatactgtacaatttctgaagatggttattaacactgtgctgttaagcatccatttaaaaatatttgttatcttctttgcctgcctgtattttaaaaagaaatacaaagttgtaaaagtaatggatttctttggatgctgaatgcagtgatgttatcagtcagattctttccttggctcagttgtgtttgtatttcctttcttaattccccaaatcttggctgggcacggtggctcacgcctgtaatcccagcactttgggaggctgaggcaggtggttcactggaggttgagttcgagaccagcctggccacatggtgaaaccctgtctctactaaagatataaaaattagctggatgtggtggtgcacacctgtgatcccagctacttgggaggctgaggtgggagaattgcttgaacctggaaggcagaagttgcagtgagctgagatcacaccactgcactccagcctgggtgacagagagactctgtctcaaaaaaaaaaagaaaaaattcccaaatcttaatgtctgtttcagaattttagtgattttaaagtgatagtagaaaataccaagcatatgaggtatttcaatatgataggcttcttacattttaatagttactcatctttgttccaggacccttgactgatgctagggaaaggataaagcatagaataccagccagtttggctctgattttgagttatttataataaagtttggggattatcataacatctcatatctttgtgtatgttgttttaatgctcggcagagcacaacactgatgataactattaaaaatagaaaataacagccattttactttcaaatctgatgtgatgcaatctgtgaacactaggaggggataaaataagcattgcagggaaacttatttgtaaatagcttcctcacctaaactttgacttggcaatcaatactttctactttgtggaggggattaagaatagaatgggcaggatgagaccatgaaaattataatgattcatgtatatttgtatgatgcttgtaactttgcaaagtcttttttattcattgtctcatttggtcagaacaattttattgaggacatgaatttaacaattagaatttagattttctgactgtagctactaaatgttgtagctactagaccaggtgagctaggtttagagcaaagtatataagccttgtatggactatattagaattttaaaaattgtaattaattccttatcatcattataaaaagcttgatttttttatttgatctaaaaaagcattattccaaagaattttttcacagtagaaatgggagttagttataccagtgttgtttttaactaataaggctattttagaattcagccttgcctgtaaggtctttgagaagggagaggagtaggccaaaaaaaaaaaagtcttgattcctgaatgtgccttatatgctgtgccactcacaccgaggccatcatc

SEQ ID NO: 352383 - DNA, 1599 bp, Homo sapiens
agcggtgtctcctcgctgcagtcgctccggagctgcacgggtgttttgcgtgttgctgcgtcatcgccagtggccggtttgaatgagactcgtcgcaccgaagccgccgccaccaccgcgcctccgcctcggccgccgccgcagctgctcctggtccccgtccctttgccgccctcgtcaggcccagctctcctgcgccgccgcctcccgccgcgccccgccatgccgctctactccgttactgtaaaatggggaaaggagaaatttgaaggtgtagaattgaatacagatgaacctccaatggtattcaaggctcagctgtttgcgttgactggagtccagcctgccagacagaaagttatggtgaaaggaggaacgctaaaggatgatgattggggaaacatcaaaataaaaaatggaatgactctactaatgatggggtcagcagatgctcttccagaagaaccctcagccaaaactgtcttcgtagaagacatgacagaagaacagttagcatctgctatggagttaccatgtggattgacaaaccttggtaacacttgttacatgaatgccacagttcagtgtattcgttctgtgcctgaactcaaagatgcccttaaaaggtatgcaggtgccttgagagcttcaggggaaatggcttcagcgcagtatattactgcagcccttagagatttgtttgattccatggataaaacttcttccagtattccacctattattctactgcagtttttgcacatggctttcccacagtttgccgagaaaggtgaacaaggacagtatcttcaacaggatgctaatgaatgttggatacaaatgatgcgagtattgcaacagaaattggaagcaatagaggatgattctgttaaagagacagactcctcatctgcatcggcagcgacaccttctaaaaagaaaagtttaatcgatcagttcttcggtgttgagtttgaaactaccatgaaatgtacagaatctgaagaagaagaagtcaccaaaggaaaggaaaatcaacttcagcttagctgttttatcaatcaggaagtcaagtatctttttacaggacttaaattgcgacttcaggaagaaatcaccaaacagtctccaacgttgcaaagaaatgccttgtatatcaaatcttccaagatcagccggctgcctgcttacttgaccattcagatggttcgatttttttataaagagaaggaatctgtgaatgccaaagttcttaaggatgttaaatttcctcttatgttggatatgtatgaactgtgtacaccagaacttcaagagaaaatggtgtcttttcgatccaaattcaaggatctagaagataaaaaagtgaatcagcagccaaatacaagtgacaaaaagagtagtccccagaaagaagttaagtatgaacccttttcttttgctgatgatatgggtccaataatggtggtaattagacttcaagcgtactaacaaccaggaaggtctaagtctcaggctatgtatcaggggtgaaggacccgatgatggtagttggtgtgaccagtcggtggtacgaagaattaggtggggggaaggaac

SEQ ID NO: 352384 - DNA, 717 bp, Homo sapiens
  misc_feature (18)..(21): n is a, c, g, or t
  misc_feature (23)..(23): n is a, c, g, or t
  misc_feature (26)..(26): n is a, c, g, or t
  misc_feature (30)..(30): n is a, c, g, or t
acagctagtgtataggtnnnngnctnggtngtaatcggccgagggtttgaatgagactcgtcgcaccgaagccgccgccaccaccgcgcctccgcctcggccgccgccgcagctgctcctggtccccgtccctttgccgccctcgtcaggcccagctctcctgcgccgccgcctcccgccgcgccccgccatgccgctctactccgttactgtaaaatggggaaaggagaaatttgaaggtgtagaattgaatacagatgaacctccaatggtattcaaggctcagctgtttgcgttgactggagtccagcctgccagacagaaagttatggtgaaaggaggaacgctaaaggatgatgattggggaaacatcaaaataaaaaatggaatgactctactaatgatggggtcagcagatgctcttccagaagaaccctcagccaaaactgtcttcgtagaagacatgacagaagaacagttagcatctgctatggagttaccatgtggattgacaaaccttggtaacacttgttacatgaatgccacagttcagtgtattcgttctgtgcctgaactcaaagatgcccttaaaaggtatgcaggtgccttgagagcttcaggggaaatggcttcagcgcagtatattactgcagcccttagagatttgtttgattccatggatttcccacagtttgccgagggtgaacggacagttct

SEQ ID NO: 352385 - DNA, 1006 bp, Homo sapiens
  misc_feature (18)..(21): n is a, c, g, or t
  misc_feature (23)..(23): n is a, c, g, or t
  misc_feature (26)..(26): n is a, c, g, or t
  misc_feature (30)..(30): n is a, c, g, or t
acagctagtgtataggtnnnngnctnggtngtaatcggccgagggtttgaatgagactcgtcgcaccgaagccgccgccaccaccgcgcctccgcctcggccgccgccgcagctgctcctggtccccgtccctttgccgccctcgtcaggcccagctctcctgcgccgccgcctcccgccgcgccccgccatgccgctctactccgttactgtaaaatggggaaaggagaaatttgaaggtgtagaattgaatacagatgaacctccaatggtattcaaggctcagctgtttgcgttgactggagtccagcctgccagacagaaagttatggtgaaaggaggaacgctaaaggatgatgattggggaaacatcaaaataaaaaatatggagttaccatgtggattgacaaaccttggtaacacttgttacatgaatgccacagttcagtgtattcgttctgtgcctgaactcaaagatgcccttaaaaggtatgcaggtgccttgagagcttcaggggaaatggcttcagcgcagtatattactgcagcccttagagatttgtttgattccatggataaaacttcttccagtattccacctattattctactgcagtttttgcacatggctttcccacagtttgccgagaaaggtgaacaaggacagtatcttcaacaggatgctaatgaatgttggatacaaatgatgcgagtattgcaacagaaattggaagcaatagaggatgattctgttaaagagacagaactctcatctgcattggaggaacttcttaaaagaaagttatcgacagagcttggggtggttggactctgagagtgtcgatgtgagaggagtccgggaggaacactcggttgcggtttcacagaacagcatttaagggaatggggttgagacccagttgcggtgggaagggtgatcgcatgggtgtgagcaggggtttaaagaggggagacgaatcttgtgtggggaaggcgttcgcaaaaa

SEQ ID NO: 352386 - DNA, 834 bp, Homo sapiens
  misc_feature (18)..(21): n is a, c, g, or t
  misc_feature (23)..(23): n is a, c, g, or t
  misc_feature (26)..(26): n is a, c, g, or t
  misc_feature (30)..(30): n is a, c, g, or t
acagctagtgtataggtnnnngnctnggtngtaatcggccgagggtttgaatgagactcgtcgcaccgaagccgccgccaccaccgcgcctccgcctcggccgccgccgcagctgctcctggtccccgtccctttgccgccctcgtcaggcccagctctcctgcgccgccgcctcccgccgcgccccgccatgccgctctactccgttactgtaaaatggggaaaggagaaatttgaaggtgtagaattgaatacagatgaacctccaatggtattcaaggctcagctgtttgcgttgactggagtccagcctgccagacagaaagttatggtgaaaggaggaacgctaaaggatgatgattggggtaacatcaaaataatggaatgactctactaatgatggggttaatttatgctctttcataataacccttattctttctatgtggatcgacaaacctggctaacactgtgtccgaggaatgtgcgaatttatgtgtatgtttttgggggtgtgttgtattgatgttttaagaggtttcgcggtgtcgtggtgtagtttattgtgtaagtttttttgtttgtttattatgcgcttattttgatcgttttttgtattcatggtttttgttattttggtttttagagtgtatatttgcatgattttcattataggttttctcctaattcttcttcattagtgaaagatcgtggctttttttacttttctcattataaattgctttcttgctatttcccattttttttattaataatgtttgaatcttatctggaggatcgatccttttctcttatattttttttcttcttatt

SEQ ID NO: 352387 - DNA, 594 bp, Homo sapiens
tgtttgttttagctgggtacagtggctcatgcctgtaatcccagcactttgggaggccgatgtgggtggatcacctgaggtcaggagtttgagaccagcctgcccaacatggtgaaaccctgtctctactagaaatacaaaaattagctgggcatgatggtggacgcctgtaatcccagctgcttgggaggctgaggcaggagaaattgcttgaacccaggaggtagaggttgcagtgagtcaagatcatgccattgcactccaacctgggcgacaagagcaaaactctgtctcagaaaataaaaaataaaataaaatgttcgttttatatgagtttgacaaagggaaagagcttaaagtaggctccatctaaattcccttttcagcattcctttttttctccatatttctggtcatgcaagaccagaagagaagaaaaggaaaggtgggaacaactctgagaaacttgcagttgagggtgtcataagaactccttttaactggtttcttcccatttgagtgttagaatgaattgaattctattgtttaactcggctttaatgttcctaggtatgcaggtgccttgagagcttc

SEQ ID NO: 352388 - DNA, 3978 bp, Homo sapiens
  misc_feature (18)..(21): n is a, c, g, or t
  misc_feature (23)..(23): n is a, c, g, or t
  misc_feature (26)..(26): n is a, c, g, or t
  misc_feature (30)..(30): n is a, c, g, or t
acagctagtgtataggtnnnngnctnggtngtaatcggccgagggtttgaatgagactcgtcgcaccgaagccgccgccaccaccgcgcctccgcctcggccgccgccgcagctgctcctggtccccgtccctttgccgccctcgtcaggcccagctctcctgcgccgccgcctcccgccgcgccccgccatgccgctctactccgttactgtaaaatggggaaaggagaaatttgaaggtgtagaattgaatacagatgaacctccaatggtattcaaggctcagctgtttgcgttgactggagtccagcctgccagacagaaagttatggtgaaaggaggaacgctaaaggatgatgattggggaaacatcaaaataaaaaatggaatgactctactaatgatggggtcagcagatgctcttccagaagaaccctcagccaaaactgtcttcgtagaagacatgacagaagaacagttagcatctgctatggagttaccatgtggattgacaaaccttggtaacacttgttacatgaatgccacagttcagtgtattcgttctgtgcctgaactcaaagatgcccttaaaaggtatgcaggtgccttgagagcttcaggggaaatggcttcagcgcagtatattactgcagcccttagagatttgtttgattccatggataaaacttcttccagtattccacctattattctactgcagtttttgcacatggctttcccacagtttgccgagaaaggtgaacaaggacagtatcttcaacaggatgctaatgaatgttggatacaaatgatgcgagtattgcaacagaaattggaagcaatagaggatgattctgttaaagagacagactcctcatctgcatcggcagcgacaccttctaaaaagaaaagtttaatcgatcagttcttcggtgttgagtttgaaactaccatgaaatgtacagaatctgaagaagaagaagtcaccaaaggaaaggaaaatcaacttcagcttagctgttttatcaatcaggaagtcaagtatctttttacaggacttaaattgcgacttcaggaagaaatcaccaaacagtctccaacgttgcaaagaaatgccttgtatatcaaatcttccaagatcagccggctgcctgcttacttgaccattcagatggttcgatttttttataaagagaaggaatctgtgaatgccaaagttcttaaggatgttaaatttcctcttatgttggatatgtatgaactgtgtacaccagaacttcaagagaaaatggtgtcttttcgatccaaattcaaggatctagaagataaaaaagtgaatcagcagccaaatacaagtgacaaaaagagtagtccccagaaagaagttaagtatgaacccttttcttttgctgatgatattggctccaataattgtggatactatgacttacaagcagtactaacacaccagggaaggtctagttcttcaggtcattatgtatcatgggtgaaaaggaaacaagatgaatggattaagtttgatgatgacaaagtcagcatcgtaacaccagaagatatcttacggctttctggtggtggagactggcatatcgcttacgttctactctatgggcctcgcagagttgaaataatggaagaggaaagtgaacagtaatcttcattttagtatttatgcttagatgtgaaaataaatgttatttgttgatcatttctataatccagagctttagaggaagacacataggtgggtttatgtttcacctcatttggaacaaaagaggacagaagcagaccactctgtgcaccaacctaaaaaattacagagaagagaaaattatctttggattgtgctgccctatataaaggtggcagaaagacatttttaaaaagcttattatttcttgcattattttaaaaagttcagagttgaaatgcctttcaaccatttccttctgtggtcatttttcttgctgcctttttcacccaagattcagcagtcagatgtttactgcacacctattacctattatttgctgttcttgcatggttcaaaccaccattctgtagccacccatcctttgccttatctaacaaacatttttccaggaaggtggaaaaggaagtgttgctctcattgtgtgactcagtgctgctgtccatcccatggaaacatgggcacaatcaagtatttgtccagcctattgcaggcttttcctgactttaaaataaattgtgatcaataatagtacctttgattatacatttattattgtgtctctctctgatgtactgtggattgtacatttaactttggaatggctttgtaataatcagtcttaagaaaatgttgacaagctctggttgcttatttttagaaaatgaggacatttaataataataaaaaaaaagggattaatagcttttgacctcaagtcttttgtcttctgagtgttggagcttggctgaagacatgtttaatactgtacaatttctgaagatggttattaacactgtgctgttaagcatccatttaaaaatatttgttatcttctttgcctgcctgtattttaaaaagaaatacaaagttgtaaaagtaatggatttctttggatgctgaatgcagtgatgttatcagtcagattctttccttggctcagttgtgtttgtatttcctttcttaattccccaaatcttggctgggcacggtggctcacgcctgtaatcccagcactttgggaggctgaggcaggtggttcactggaggttgagttcgagaccagcctggccacatggtgaaaccctgtctctactaaagatataaaaattagctggatgtggtggtgcacacctgtgatcccagctacttgggaggctgaggtgggagaattgcttgaacctggaaggcagaagttgcagtgagctgagatcacaccactgcactccagcctgggtgacagagagactctgtctcaaaaaaaaaaagaaaaaattcccaaatcttaatgtctgtttcagaattttagtgattttaaagtgatagtagaaaataccaagcatatgaggtatttcaatatgataggcttcttacattttaatagttactcatctttgttccaggacccttgactgatgctagggaaaggataaagcatagaataccagccagtttggctctgattttgagttatttataataaagtttggggattatcataacatctcatatctttgtgtatgttgttttaatgctcggcagagcacaacactgatgataactattaaaaatagaaaataacagccattttactttcaaatctgatgtgatgcaatctgtgaacactaggaggggataaaataagcattgcagggaaacttatttgtaaatagcttcctcacctaaactttgacttggcaatcaatactttctactttgtggaggggattaagaatagaatgggcaggatgagaccatgaaaattataatgattcatgtatatttgtatgatgcttgtaactttgcaaagtcttttttattcattgtctcatttggtcagaacaattttattgaggacatgaatttaacaattagaatttagattttctgactgtagctactaaatgttgtagctactagaccaggtgagctaggtttagagcaaagtatataagccttgtatggactatattagaattttaaaaattgtaattaattccttatcatcattataaaaagcttgatttttttatttgatctaaaaaagcattattccaaagaattttttcacagtagaaatgggagttagttataccagtgttgtttttaactaataaggctattttagaattcagccttgcctgtaaggtctttgagaagggagaggagtaggccaaaaaaaaaaaagtcttgattcctgaatgtgccttatatgctgtgccactcacaccgaggccatcatc

SEQ ID NO: 352389 - DNA, 3910 bp, Homo sapiens
caggaagcccgataatcgggaggacggctcgtccgccgccgcagctgctcctggtccccgtccctttgccgccctcgtcaggcccagctctcctgcgccgccgcctcccgccgcgccccgccatgccgctctactccgttactgtaaaatggggaaaggagaaatttgaaggtgtagaattgaatacagatgaacctccaatggtattcaaggctcagctgtttgcgttgactggagtccagcctgccagacagaaagttatggtgaaaggaggaacgctaaaggatgatgattggggaaacatcaaaataaaaaatggaatgactctactaatgatggggtcagcagatgctcttccagaagaaccctcagccaaaactgtcttcgtagaagacatgacagaagaacagttagcatctgctatggagttaccatgtggattgacaaaccttggtaacacttgttacatgaatgccacagttcagtgtattcgttctgtgcctgaactcaaagatgcccttaaaaggtatgcaggtgccttgagagcttcaggggaaatggcttcagcgcagtatattactgcagcccttagagatttgtttgattccatggataaaacttcttccagtattccacctattattctactgcagtttttgcacatggctttcccacagtttgccgagaaaggtgaacaaggacagtatcttcaacaggatgctaatgaatgttggatacaaatgatgcgagtattgcaacagaaattggaagcaatagaggatgattctgttaaagagacagactcctcatctgcatcggcagcgacaccttctaaaaagaaaagtttaatcgatcagttcttcggtgttgagtttgaaactaccatgaaatgtacagaatctgaagaagaagaagtcaccaaaggaaaggaaaatcaacttcagcttagctgttttatcaatcaggaagtcaagtatctttttacaggacttaaattgcgacttcaggaagaaatcaccaaacagtctccaacgttgcaaagaaatgccttgtatatcaaatcttccaagatcagccggctgcctgcttacttgaccattcagatggttcgatttttttataaagagaaggaatctgtgaatgccaaagttcttaaggatgttaaatttcctcttatgttggatatgtatgaactgtgtacaccagaacttcaagagaaaatggtgtcttttcgatccaaattcaaggatctagaagataaaaaagtgaatcagcagccaaatacaagtgacaaaaagagtagtccccagaaagaagttaagtatgaacccttttcttttgctgatgatattggctccaataattgtggatactatgacttacaagcagtactaacacaccagggaaggtctagttcttcaggtcattatgtatcatgggtgaaaaggaaacaagatgaatggattaagtttgatgatgacaaagtcagcatcgtaacaccagaagatatcttacggctttctggtggtggagactggcatatcgcttacgttctactctatgggcctcgcagagttgaaataatggaagaggaaagtgaacagtaatcttcattttagtatttatgcttagatgtgaaaataaatgttatttgttgatcatttctataatccagagctttagaggaagacacataggtgggtttatgtttcacctcatttggaacaaaagaggacagaagcagaccactctgtgcaccaacctaaaaaattacagagaagagaaaattatctttggattgtgctgccctatataaaggtggcagaaagacatttttaaaaagcttattatttcttgcattattttaaaaagttcagagttgaaatgcctttcaaccatttccttctgtggtcatttttcttgctgcctttttcacccaagattcagcagtcagatgtttactgcacacctattacctattatttgctgttcttgcatggttcaaaccaccattctgtagccacccatcctttgccttatctaacaaacatttttccaggaaggtggaaaaggaagtgttgctctcattgtgtgactcagtgctgctgtccatcccatggaaacatgggcacaatcaagtatttgtccagcctattgcaggcttttcctgactttaaaataaattgtgatcaataatagtacctttgattatacatttattattgtgtctctctctgatgtactgtggattgtacatttaactttggaatggctttgtaataatcagtcttaagaaaatgttgacaagctctggttgcttatttttagaaaatgaggacatttaataataataaaaaaaaagggattaatagcttttgacctcaagtcttttgtcttctgagtgttggagcttggctgaagacatgtttaatactgtacaatttctgaagatggttattaacactgtgctgttaagcatccatttaaaaatatttgttatcttctttgcctgcctgtattttaaaaagaaatacaaagttgtaaaagtaatggatttctttggatgctgaatgcagtgatgttatcagtcagattctttccttggctcagttgtgtttgtatttcctttcttaattccccaaatcttggctgggcacggtggctcacgcctgtaatcccagcactttgggaggctgaggcaggtggttcactggaggttgagttcgagaccagcctggccacatggtgaaaccctgtctctactaaagatataaaaattagctggatgtggtggtgcacacctgtgatcccagctacttgggaggctgaggtgggagaattgcttgaacctggaaggcagaagttgcagtgagctgagatcacaccactgcactccagcctgggtgacagagagactctgtctcaaaaaaaaaaagaaaaaattcccaaatcttaatgtctgtttcagaattttagtgattttaaagtgatagtagaaaataccaagcatatgaggtatttcaatatgataggcttcttacattttaatagttactcatctttgttccaggacccttgactgatgctagggaaaggataaagcatagaataccagccagtttggctctgattttgagttatttataataaagtttggggattatcataacatctcatatctttgtgtatgttgttttaatgctcggcagagcacaacactgatgataactattaaaaatagaaaataacagccattttactttcaaatctgatgtgatgcaatctgtgaacactaggaggggataaaataagcattgcagggaaacttatttgtaaatagcttcctcacctaaactttgacttggcaatcaatactttctactttgtggaggggattaagaatagaatgggcaggatgagaccatgaaaattataatgattcatgtatatttgtatgatgcttgtaactttgcaaagtcttttttattcattgtctcatttggtcagaacaattttattgaggacatgaatttaacaattagaatttagattttctgactgtagctactaaatgttgtagctactagaccaggtgagctaggtttagagcaaagtatataagccttgtatggactatattagaattttaaaaattgtaattaattccttatcatcattataaaaagcttgatttttttatttgatctaaaaaagcattattccaaagaattttttcacagtagaaatgggagttagttataccagtgttgtttttaactaataaggctattttagaattcagccttgcctgtaaggtctttgagaagggagaggagtaggccaaaaaaaaaaaagtcttgattcctgaatgtgccttatatgctgtgccactcacaccgaggccatcatc

SEQ ID NO: 352390 - DNA, 3873 bp, Homo sapiens
  misc_feature (18)..(21): n is a, c, g, or t
  misc_feature (23)..(23): n is a, c, g, or t
  misc_feature (26)..(26): n is a, c, g, or t
  misc_feature (30)..(30): n is a, c, g, or t
acagctagtgtataggtnnnngnctnggtngtaatcggccgagggtttgaatgagactcgtcgcaccgaagccgccgccaccaccgcgcctccgcctcggccgccgccgcagctgctcctggtccccgtccctttgccgccctcgtcaggcccagctctcctgcgccgccgcctcccgccgcgccccgccatgccgctctactccgttactgtaaaatggggaaaggagaaatttgaaggtgtagaattgaatacagatgaacctccaatggtattcaaggctcagctgtttgcgttgactggagtccagcctgccagacagaaagttatggtgaaaggaggaacgctaaaggatgatgattggggaaacatcaaaataaaaaatatggagttaccatgtggattgacaaaccttggtaacacttgttacatgaatgccacagttcagtgtattcgttctgtgcctgaactcaaagatgcccttaaaaggtatgcaggtgccttgagagcttcaggggaaatggcttcagcgcagtatattactgcagcccttagagatttgtttgattccatggataaaacttcttccagtattccacctattattctactgcagtttttgcacatggctttcccacagtttgccgagaaaggtgaacaaggacagtatcttcaacaggatgctaatgaatgttggatacaaatgatgcgagtattgcaacagaaattggaagcaatagaggatgattctgttaaagagacagactcctcatctgcatcggcagcgacaccttctaaaaagaaaagtttaatcgatcagttcttcggtgttgagtttgaaactaccatgaaatgtacagaatctgaagaagaagaagtcaccaaaggaaaggaaaatcaacttcagcttagctgttttatcaatcaggaagtcaagtatctttttacaggacttaaattgcgacttcaggaagaaatcaccaaacagtctccaacgttgcaaagaaatgccttgtatatcaaatcttccaagatcagccggctgcctgcttacttgaccattcagatggttcgatttttttataaagagaaggaatctgtgaatgccaaagttcttaaggatgttaaatttcctcttatgttggatatgtatgaactgtgtacaccagaacttcaagagaaaatggtgtcttttcgatccaaattcaaggatctagaagataaaaaagtgaatcagcagccaaatacaagtgacaaaaagagtagtccccagaaagaagttaagtatgaacccttttcttttgctgatgatattggctccaataattgtggatactatgacttacaagcagtactaacacaccagggaaggtctagttcttcaggtcattatgtatcatgggtgaaaaggaaacaagatgaatggattaagtttgatgatgacaaagtcagcatcgtaacaccagaagatatcttacggctttctggtggtggagactggcatatcgcttacgttctactctatgggcctcgcagagttgaaataatggaagaggaaagtgaacagtaatcttcattttagtatttatgcttagatgtgaaaataaatgttatttgttgatcatttctataatccagagctttagaggaagacacataggtgggtttatgtttcacctcatttggaacaaaagaggacagaagcagaccactctgtgcaccaacctaaaaaattacagagaagagaaaattatctttggattgtgctgccctatataaaggtggcagaaagacatttttaaaaagcttattatttcttgcattattttaaaaagttcagagttgaaatgcctttcaaccatttccttctgtggtcatttttcttgctgcctttttcacccaagattcagcagtcagatgtttactgcacacctattacctattatttgctgttcttgcatggttcaaaccaccattctgtagccacccatcctttgccttatctaacaaacatttttccaggaaggtggaaaaggaagtgttgctctcattgtgtgactcagtgctgctgtccatcccatggaaacatgggcacaatcaagtatttgtccagcctattgcaggcttttcctgactttaaaataaattgtgatcaataatagtacctttgattatacatttattattgtgtctctctctgatgtactgtggattgtacatttaactttggaatggctttgtaataatcagtcttaagaaaatgttgacaagctctggttgcttatttttagaaaatgaggacatttaataataataaaaaaaaagggattaatagcttttgacctcaagtcttttgtcttctgagtgttggagcttggctgaagacatgtttaatactgtacaatttctgaagatggttattaacactgtgctgttaagcatccatttaaaaatatttgttatcttctttgcctgcctgtattttaaaaagaaatacaaagttgtaaaagtaatggatttctttggatgctgaatgcagtgatgttatcagtcagattctttccttggctcagttgtgtttgtatttcctttcttaattccccaaatcttggctgggcacggtggctcacgcctgtaatcccagcactttgggaggctgaggcaggtggttcactggaggttgagttcgagaccagcctggccacatggtgaaaccctgtctctactaaagatataaaaattagctggatgtggtggtgcacacctgtgatcccagctacttgggaggctgaggtgggagaattgcttgaacctggaaggcagaagttgcagtgagctgagatcacaccactgcactccagcctgggtgacagagagactctgtctcaaaaaaaaaaagaaaaaattcccaaatcttaatgtctgtttcagaattttagtgattttaaagtgatagtagaaaataccaagcatatgaggtatttcaatatgataggcttcttacattttaatagttactcatctttgttccaggacccttgactgatgctagggaaaggataaagcatagaataccagccagtttggctctgattttgagttatttataataaagtttggggattatcataacatctcatatctttgtgtatgttgttttaatgctcggcagagcacaacactgatgataactattaaaaatagaaaataacagccattttactttcaaatctgatgtgatgcaatctgtgaacactaggaggggataaaataagcattgcagggaaacttatttgtaaatagcttcctcacctaaactttgacttggcaatcaatactttctactttgtggaggggattaagaatagaatgggcaggatgagaccatgaaaattataatgattcatgtatatttgtatgatgcttgtaactttgcaaagtcttttttattcattgtctcatttggtcagaacaattttattgaggacatgaatttaacaattagaatttagattttctgactgtagctactaaatgttgtagctactagaccaggtgagctaggtttagagcaaagtatataagccttgtatggactatattagaattttaaaaattgtaattaattccttatcatcattataaaaagcttgatttttttatttgatctaaaaaagcattattccaaagaattttttcacagtagaaatgggagttagttataccagtgttgtttttaactaataaggctattttagaattcagccttgcctgtaaggtctttgagaagggagaggagtaggccaaaaaaaaaaaagtcttgattcctgaatgtgccttatatgctgtgccactcacaccgaggccatcatc

SEQ ID NO: 352391 - DNA, 1910 bp, Homo sapiens
  misc_feature (1907)..(1907): n is a, c, g, or t
agcggtgtctcctcgctgcagtcgctccggagctgcacgggtgttttgcgtgttgctgcgtcatcgccagtggccggtttgaatgagactcgtcgcaccgaagccgccgccaccaccgcgcctccgcctcggccgccgccgcagctgctcctggtccccgtccctttgccgccctcgtcaggcccagctctcctgcgccgccgcctcccgccgcgccccgccatgccgctctactccgttactgtaaaatggggaaaggagaaatttgaaggtgtagaattgaatacagatgaacctccaatggtattcaaggctcagctgtttgcgttgactggagtccagcctgccagacagaaagttatggtgaaaggaggaacgctaaaggatgatgattggggaaacatcaaaataaaaaatggaatgactctactaatgatggggtcagcagatgctcttccagaagaaccctcagccaaaactgtcttcgtagaagacatgacagaagaacagttagcatctgctatggagttaccatgtggattgacaaaccttggtaacacttgttacatgaatgccacagttcagtgtattcgttctgtgcctgaactcaaagatgcccttaaaaggtatgcaggtgccttgagagcttcaggggaaatggcttcagcgcagtatattactgcagcccttagagatttgtttgattccatggataaaacttcttccagtattccacctattattctactgcagtttttgcacatggctttcccacagtttgccgagaaaggtgaacaaggacagtatcttcaacaggatgctaatgaatgttggatacaaatgatgcgagtattgcaacagaaattggaagcaatagaggatgattctgttaaagagacagactcctcatctgcatcggcagcgacaccttctaaaaagaaaagtttaatcgatcagttcttcggtgttgagtttgaaactaccatgaaatgtacagaatctgaagaagaagaagtcaccaaaggaaaggaaaatcaacttcagcttagctgttttatcaatcaggaagtcaagtatctttttacaggacttaaattgcgacttcaggaagaaatcaccaaacagtctccaacgttgcaaagaaatgccttgtatatcaaatcttccaagatcagccggctgcctgcttacttgaccattcagatggttcgatttttttataaagagaaggaatctgtgaatgccaaagttcttaaggatgttaaatttcctcttatgttggatatgtatgaactgtgtacaccagaacttcaagagaaaatggtgtcttttcgatccaaattcaaggatctagaagataaaaaagtgaatcagcagccaaatacaagtgacaaaaagagtagtccccagaaagaagttaagtatgaacccttttcttttgctgatgatattggctccaataattgtggatactatgacttacaagcagtactaacacaccagggaaggtctagttcttcaggtcattatgtatcatgggtgaaaaggaaacaagatgaatggattaagtttgatgatgacaaagtcagcatcgtaacaccagaagatatcttacggctttctggtggtggagactggcatatcgcttacgttctactctatgggcctcgcagagttgaaataatggaagaggaaagtgaacagtaatcttcattttagtatttatgcttagatgtgaaaataaatgttatttgttgatcatttctataatccagagctttagaggaagacacataggtgggtttatgtttcacctcatttggaacaaaagaggacagaagcagaccactctgtgcaccaacctaaaaaattacagagaagagatgttggagaaatgagatgttggnagg

SEQ ID NO: 352392 - DNA, 1095 bp, Homo sapiens
agcggtgtctcctcgctgcagtcgctccggagctgcacgggtgttttgcgtgttgctgcgtcatcgccagtggccggtttgaatgagactcgtcgcaccgaagccgccgccaccaccgcgcctccgcctcggccgccgccgcagctgctcctggtccccgtccctttgccgccctcgtcaggcccagctctcctgcgccgccgcctcccgccgcgccccgccatgccgctctactccgttactgtaaaatggggaaaggagaaatttgaaggtgtagaattgaatacagatgaacctccaatggtattcaaggctcagctgtttgcgttgactggagtccagcctgccagacagaaagttatggtgaaaggaggaacgctaaaggatgatgattggggaaacatcaaaataaaaaatggaatgactctactaatgatggggtcagcagatgctcttccagaagaaccctcagccaaaactgtcttcgtagaagacatgacagaagaacagttagcatctgctatggagttaccatgtggattgacaaaccttggtaacacttgttacatgaatgccacagttcagtgtattcgttctgtgcctgaactcaaagatgcccttaaaaggtatgcaggtgccttgagagcttcaggggaaatggcttcagcgcagtatattactgcagcccttagagatttgtttgattccatggataaaacttcttccagtattccacctattattctactgcagtttttgcacatggctttcccacagtttgccgagaaaggtgaacaaggacagtatcttcaacaggatgctaatgaatgttggatacaaatgatgcgagtattgcaacagaaattggaagcaatagaggatgattctgttaaagagacagactcctcatctgcatcggcagcgacaccttctaaaaagaaaagtttaatcgatcagttcttcggtgttgagtttgaaactaccatgaaatgtacagaatctgaagaagaagaagtcaccaaaggttttacaggacttaaattgcgactccaggaagaatcaccaaacaaggctcacgttgcaagaaatgccttg

SEQ ID NO: 352393 - DNA, 738 bp, Homo sapiens
  misc_feature (18)..(21): n is a, c, g, or t
  misc_feature (23)..(23): n is a, c, g, or t
  misc_feature (26)..(26): n is a, c, g, or t
  misc_feature (30)..(30): n is a, c, g, or t
acagctagtgtataggtnnnngnctnggtngtaatcggccgagggtttgaatgagactcgtcgcaccgaagccgccgccaccaccgcgcctccgcctcggccgccgccgcagctgctcctggtccccgtccctttgccgccctcgtcaggcccagctctcctgcgccgccgcctcccgccgcgccccgccatgccgctctactccgttactgtaaaatggggaaaggagaaatttgaaggtgtagaattgaatacagatgaacctccaatggtattcaaggctcagctgtttgcgttgactggagtccagcctgccagacagaaagttatggtgaaaggaggaacgctaaaggatgatgattggggaaacatcaaaataaaaaatggaatgactctactaatgatggggtcagcagatgctcttccagaagaaccctcagccaaaactgtcttcgtagaagacatgacagaagaacagttagcatctgctatggagttaccatgtggattgacaaaccttggtaacacttgttacatgaatgccacagttcagtgtattcgttctgtgcctgaactcaaagatgcccttaaaaggtatgcaggtgccttgagagcttcaggggaaatggcttcagcgcagtatattactgcagatttgcctactctggacttttactctaaatggaattaaataatatgtagtctcttgcgaaaaaaaaacaaaaactctccagcgct

SEQ ID NO: 352394 - DNA, 398 bp, Homo sapiens
cccctccctgagtgtttcttatatacattcccacaatgatccatgacattgtcattattaccaacattctgcagagtaggacaaggcagcaagaaaaagggagaagtgaggacttgaatgtgtatctctctgtccccaattctcacatccctcctactgtgcgctgccatctccatcacagaaacctgctatcctgtactctcctaccaccatagatactcagccaagagcaatcaggaaaggagggacaagatttcatgcatttggtagaaagttgtttagaaaactttaaagtctttttattctttgtgactcttctgtcttcttaaaatgtgacgctacttcctcagcagatgctctgtgctattcaattatactttggttctgaaaaaaaaaaa

SEQ ID NO: 352395 - DNA, 786 bp, Homo sapiens
ctcggggcccgcgggccgagtgtcgctaggacgttttccgcaggcctagcaggcggaccccgcggctcggagcaagcggtgcaggtgtggaccgcacaacggggtgcacaggattagttaagcaaagcaggaacccagctggaaaattaaacgagccctggatctgcaaagcaggtcccttcgcgagaccaaagccgtgatcccaaccttagcaacataattctactggaggtgttgatatatatactaatccagaacaaccatgtagcaagaggaataaaatgaagttcagaagtctgtttcgggaaattttgaagccctttagaaagaaagatttctacattttgttacatgaaattcatgcaaatatatgtcaggtgccagtgctatggagttgttgaagaataagcacaataccatttattaccacttctcagttgtaaagaggctgtaactctggttgtcgaaataaaataaaatgaaatctcctagatgtgacactgtgacccctgccagttatttacaaacaagttatctgcacattttgggctgtaaacataaaagtaaactctctgaaagactgcaaatcatctttagggttttcttaaagtaaatacaactagtggcccaggaaccaaaagtttgcttgtttccagttaatgtcactggtcaccataactcaccctttttcctatgaggaaatgtacagcatattttaaagaaatgcagtattgttatcttcgtcatattacctgaagaattctaataaaggaaaaatgtttcgga

SEQ ID NO: 352396 - DNA, 879 bp, Homo sapiens
ctcggggcccgcgggccgagtgtcgctaggacgttttccgcaggcctagcaggcggaccccgcggctcggagcaagcggtgcaggggcaggagcgattcccattcgaggagtttgacctctcattttaatacaacacccgcctcttagaggcagcagaccagtccagccaggtcaaggtgtggaccgcacaacggggtgcacaggattagttaagcaaagcaggaacccagctggaaaattaaacgagccctggatctgcaaagcaggtcccttcgcgagaccaaagccgtgatcccaaccttagcaacataattctactggaggtgttgatatatatactaatccagaacaaccatgtagcaagaggaataaaatgaagttcagaagtctgtttcgggaaattttgaagccctttagaaagaaagatttctacattttgttacatgaaattcatgcaaatatatgtcaggtgccagtgctatggagttgttgaagaataagcacaataccatttattaccacttctcagttgtaaagaggctgtaactctggttgtcgaaataaaataaaatgaaatctcctagatgtgacactgtgacccctgccagttatttacaaacaagttatctgcacattttgggctgtaaacataaaagtaaactctctgaaagactgcaaatcatctttagggttttcttaaagtaaatacaactagtggcccaggaaccaaaagtttgcttgtttccagttaatgtcactggtcaccataactcaccctttttcctatgaggaaatgtacagcatattttaaagaaatgcagtattgttatcttcgtcatattacctgaagaattctaataaaggaaaaatgtttcgga

SEQ ID NO: 352397 - DNA, 608 bp, Homo sapiens
  misc_feature (53)..(53): n is a, c, g, or t
tatgttatcattcatattagcctacatagtctacgcacaaaacgcgcgtgtgngtgttgatatatatactaatccagaacaaccatgtagcaagaggaataaaatgaagttcagaagtctgtttcgggaaattttgaagccctttagaaagaaagatttctacattttgttacatgaaattcatgcaaatatatgtcaggtgccagtgctatggagttgttgaagaataagcacaataccatttattaccacttctcagttgtaaagaggctgtaactctggttgtcgaaataaaataaaatgaaatctcctagatgtgacactgtgacccctgccagttatttacaaacaagttatctgcacattttgggctgtaaacataaaagtaaactctctgaaagactgcaaatcatctttagggttttcttaaagtaaatacaactagtggcccaggaaccaaaagtttgcttgtttccagttaatgtcactggtcaccataactcaccctttttcctatgaggaaatgtacagcatattttaaagaaatgcagtattgttatcttcgtcatattacctgaagaattctaataaaggaaaaatgtttcgga

SEQ ID NO: 352398 - DNA, 435 bp, Homo sapiens
gtgtggaccgcacaacggggtgcacaggattagttaagcaaagcaggaacccagctggaaaattaaacgagccctggatctgcaaagcaggtcccttcgcgagaccaaagccgtgatcccaaccttagcaacataattctactggaggtgatgtactctaaataaatagaaataaatccagctccgctttaatatttatttcctttccttagttccaagtttgaacagttatagttttgttttttggttgtcttaaaggaaaggcctaaaaattagttaggatgggtgtgaggacttgaaaatttgaacacaaaaatatcatattcaatatctgattagtgactcttccattgggcagcctgggtattttccaggggttatgtcacagacctactgaatgcagccacccttgagacatgcagtgcttcaatcaaa

SEQ ID NO: 352399 - DNA, 599 bp, Homo sapiens
gaagtttcgccatgttgcccaggctggtctcggactcccaagctcaagcaatccgcccaccccagcctctcaaagtgctgggattacaggcatgagccaccgcactcagccaatatatttttaagtgtacgatacattattgttgaccataggtattattctttcctttttgaagctaaaatattactgctatccaccttgtagtcatagaataggggaatgaaggggttattatatgcttcctctttgagtccaatttcagaaggtccacaggaattgcattcccattctaacgtcccgacggccctccaatttccacttcttgactactacgctgcacagcacgtccccatttagcccaacccgcccttaccagtctcccttccacctttctttcacttctcagcccgctctcaatctcttcctccgatcttctccccctactatcatctgcctccgctttatcgcctctgcccactcctgccctatgtcccgcccctccccccttcacggtcttcctcctcctctcctgcctcttccctccacccccacccacttcccccccccacggctccttcccacacccccctcccccccct

SEQ ID NO: 352400 - DNA, 244 bp, Homo sapiens
gttgacagtataggatcgatactggcacattaatgtaacacatgctaatgggagatgtcagtaacgggaaactgggtgggggcaaatttaaaactattctaaaagattaagtctatttaaataaaattccatcctcctgcagggagggttgcacatggcccttgtgtgcccagggcagaggtgctggggagaagccaccagctctggaattgatctccccaggtccatcacccagaagccctgc

SEQ ID NO: 352401 - DNA, 898 bp, Homo sapiens
taaaaaaaaaaaaagatcaggggaatttttttttttttttaatgtgactggctgtatttgagtttggaggtgttcagtccaatacttgtttccctttggtaagtgcaggtattgcttaaaaagaatttaataccctatcttccagacattctagaagaccagtaatctatatgtaggacccattgttacaaaatgcattatattttaacaagagttacggcgctctaacttaaggaaaaaaaattaaaacagtagaccccctctcttgaaaaaaaaatgttttttttctttgagacaggatctggttctgttgctgaggctggagtaagagagaccggggcttgctctgtcacctaggctgggtgcagtggtatgatcgtagctcactgcagcctctaactcctggctcaagcggtcctcccttcagcctcctgagcagctgggattacagatgtgcaccaccacgcctggctaatatttttattcttaaatattttgtagagatgggctcttgctctgttgaccaggttggtcttgaactcttggtctaaagcgatcctcctaagcctcccaaagtgctgggattacaggcatgagccaccacacctggcctctttttgaaatcttaaacagaagccagatatatattatagataaaaatggagtgtctctattttcaggggcatggaagaaactgcctactcatcctttaattttcacttcctccctcattcagttcattttaactttaaaagtctatggaaaacaagatgcagagcagtgctctaggcagagtttatgcatatatccaagtaggttttttgtgtcttattagcgactgatttatcattttcttaagatggaaattaagcaattctagtggtaaggtgttaataat

SEQ ID NO: 352402 - DNA, 434 bp, Homo sapiens
gtggcaagtgctatagtgaaaatacagtgaaggataatagagatgaagcaagtcttgcaattttaaatgaggtggttaggataggcctcaagaaggagatggttttacttttatttgtacttttttagagaaagggtctcgccgtcacccagactgaaatgcagtggtgtaatgctagttcactgcagcctctaactctttggctcaagttatcttcccgcttcatctccccaaagtgctaggattacaggtgtgtgacatggcgccccaacaaagagataatttatgaatgaagatttgcaggagctaagggagcaaatcgtggatatctagggaagagactgcaaagggaatcgtaaatgaaaacaccttcagggaggagcaagcatgactggcacatatgaaatagaggaaggaaatcagtgtggttgaaa

SEQ ID NO: 352403 - DNA, 328 bp, Homo sapiens
taatggtgactctgcagaatgggcacacccttgcagagcagccatcttgtagctaaccgggaccaggaaaaggacacgtcagctagaagaagacaggaggtggccagaggctctgagtggctgctgagatgggggcccccatctcacttgtccctctccaccccctgttatcaccctgctgagcactgtgctggctccttgggttcccaggtgatgaggctcttcagcagccctttgtcctcgatgggcgagggacactctgcctgaagtacacatctagctggggggtgctggatgttgctcccagagctgagaccccactttgctt

SEQ ID NO: 352404 - DNA, 8611 bp, Homo sapiens
gactgcttgcattaaaggacttcctcatcctttttttcatgaaactgagcttgcttaatcagagatggagcaaactgactgcaaaccctaccagcctctaccaaaagtcaagcatgaaatggatctagcttacaccagttcttctgatgagagtgaagatggaagaaaaccaagacagtcatacaactccagggagaccctgcacgagtataaccaggagctgaggatgaattacaatagccagagtagaaagaggaaagaagtagaaaaatctactcaagagatggaattctgtgaaacctctcacactctgtgctctggctaccaaacagacatgcacagcgtttctcggcatggctaccagctagagatgggatctgatgtggacacagagacagaaggtgctgcctcacctgaccatgcactaagaatgtggataaggggaatgaaatcagagcatagttcctgtttgtccagccgggccaactctgcattatccttgactgacactgaccatgaaaggaagtctgatggggaaaatggtttcaaattctctcctgtttgttgtgacatggaggctcaagctgggtctactcaagatgtgcagagcagcccacacaaccagttcaccttcagacccctcccaccgccacctccgcctcctcatgcctgcacctgtgccaggaagccaccccctgcagcggactctcttcagaggagatcaatgactacccgcagccagcccagcccagctgctccagctcccccaaccagcacgcaggattcagtccatctgcataacagctgggtcctgaacagcaacataccattggagaccaggcattccctgttcaaacatggatctggttcctctgcgatcttcagtgcagccagtcagaactaccctctgacatccaataccgtgtactcgccccctcccaggcctcttcctcgaagcaccttttcccgacctgcctttacctttaacaaaccttacaggtgctgcaactggaagtgcacagcattgagcgccactgcaatcacagtgactttggccttgttactagcctatgtgattgcagtgcatttgttcggcctgacttggcagttgcaaccagttgaaggagagctgtatgcaaatggagttagcaaagggaacagggggaccgagtccatggacactacttactctccaattggaggaaaagtttctgataaatcagagaaaaaagtgtttcagaagggacgggcgatagacactggagaagttgacattggtgcacaggtcatgcagaccattccacctggtttattctggcgtttccagattactatccaccatccaatatatctgaagttcaatatttctttagccaaggactctctgctgggaatttatggcagaagaaacattccacctacacatactcagtttgattttgtaaaactaatggatggcaaacagctggtcaagcaggactccaagggctctgatgatacacagcactcccctcggaacctgatcttaacttcgcttcaggagacaggtttcatagagtatatggatcaaggaccttggtatctggcgttttacaatgatggaaaaaagatggagcaagtattcgtgttaactacagcaattgaaataatggatgactgttcaaccaattgcaatggaaatggagagtgtatctctggccattgtcattgtttcccaggattccttggacctgactgtgctagagattcctgccctgtgctgtgtggtgggaatggagaatacgagaaaggacactgtgtctgccggcatggctggaaggggccagagtgtgacgttccggaagaacaatgcattgatccaacatgctttggccacggcacctgcatcatgggagtctgcatctgtgtgccaggatacaaaggagaaatatgcgaggaagaggactgcctagacccaatgtgttccaaccatggcatctgtgtaaaaggagaatgtcactgttctactggctggggaggagttaactgtgaaacaccacttcctgtatgtcaagagcagtgctcaggacacggaacttttcttctggacgctggagtatgcagctgtgatcccaagtggacaggatctgactgctcaacagagctgtgtaccatggagtgtggtagccatggagtctgctcaagaggaatttgccagtgtgaagaaggctgggtaggaccaacatgtgaggaacgctcctgtcattctcattgtactgagcatggccaatgcaaagatggaaaatgtgagtgtagccctggatgggagggcgaccactgcacaattgctcactacttagatgctgtccgagatggctgcccagggctctgctttggaaatggacgatgtaccctggatcaaaatggttggcactgtgtgtgtcaggtgggttggagtgggacaggctgcaatgttgtcatggaaatgctttgtggagataacttggacaatgatggagatggtttaaccgactgtgtggatcctgactgttgtcaacaaagcaactgttatataagtcctctctgccagggctcaccagatcctcttgacctcattcagcaaagccaaactctcttctctcagcacacttcaagacttttttatgatcgaatcaaattcctcattggcaaggacagtactcatgtcattcctcctgaggtgtcatttgacagcaggcgtgcctgtgtgattcgaggccaagtggtggccatagatggaactcctctagtgggagtgaatgtcagtttcttgcaccacagtgattatgggtttaccatcagccggcaagatggaagctttgacctcgtggccatcggtggcatctctgtcatcttaatcttcgaccgatcccctttcctgcctgagaagagaacactctggttgccttggaatcagtttattgtggtagagaaagtcaccatgcagagagttgtatcagacccgccatcctgcgatatctccaactttatcagcccaaaccctattgtgcttccttcaccgctcacatcatttggagggtcctgtccagagaggggaactattgttcctgagctgcaggttgtacaggaggaaattcccattccctccagctttgtgaggctgagttacctgagcagccgcacccctgggtataaaaccctgctacggatccttctgacacattcaacgattcccgtaggcatgataaaagtacacctcacagtagctgtggaagggcgactcacacagaagtggtttcccgccgcaattaatcttgtctacacatttgcttggaacaagaccgatatctatggacagaaggtttggggcctggcagaggctttggtatctgtgggatatgaatatgaaacgtgccctgactttattctctgggagcaaaggacagtcgttttacaaggttttgagatggatgcttctaacctaggagactggtctttgaataagcatcacattttgaatcctcaaagtggaatcatacataaagggaatggagaaaatatgttcatttcccagcagcccccagtcatatcaaccataatgggtaatggacaccaaaggagtgtagcctgcaccaactgcaatggcccagcccacaacaacaaactctttgctcctgtcgccttagcttctggccctgatggcagtgtgtatgttggcgacttcaattttgtaaggagaatatttccctcgggaaactccgttagtattttggaattaagcacaagtcctgctcacaaatactatctggctatggaccctgtgtctgaatcactctatctatcagacaccaatactcgcaaagtctacaagttgaaatctcttgtggagacgaaagatctgtccaagaattttgaagtggtggcaggaactggtgatcagtgccttccctttgaccagagtcattgtggagatggtgggagagcatcggaagcttcactgaatagccctcgaggcatcacagttgataggcatggatttatttactttgtggatgggactatgattcgcaaaattgatgagaatgctgtgatcacaactgtaatcggctcaaatggtctgacttccacacaaccactgagctgtgactcaggaatggacatcactcaggtgcgattagagtggccaacagaccttgcagtaaatcctatggacaattcattgtatgtcttggataacaacattgtgctgcaaatttctgagaacaggcgtgttcggatcatcgcaggacgccccattcactgccaggtgccaggcatcgatcatttcctggtcagcaaggtagcaattcactccactctagagtcagcgagggccatcagtgtctcccacagcgggctgctcttcatagctgaaacagacgagaggaaagtaaaccgcattcagcaagtaaccaccaatggggagatctacatcatcgctggtgcccccactgactgtgactgcaaaattgatccaaactgtgactgtttttcaggtgatggtggctatgccaaagatgcaaagatgaaagccccttcctccttagcagtgtcgcctgatggaaccctctatgtggcagacctcggaaatgttcgaattcgtaccatcagcaggaaccaagcccacctgaatgacatgaacatttatgagattgcttcacccgctgatcaggaactgtaccagttcactgtaaatggaacccacctacacaccctgaacttgataacaagggactatgtttataacttcacctacaattctgaaggtgacttgggcgcgattaccagcagcaatggcaattcagtgcacattcgccgtgatgcaggcggaatgccgctatggcttgtggtgcctggcggacaagtatactggctgactataagcagcaatggagtcctgaaaagagtgtcagcccaaggctataatccggccttaatgacctatccaggaaacacagggcttctggctaccaaaagtaacgaaaatggatggacaaccgtttatgagtatgaccccgagggacacctgaccaatgcaacgtttcccactggagaggtcagcagcttccacagtgacctggagaagctgacaaaagtggagctagatacttccaaccgtgaaaatgtcctcatgtcaaccaacttgacggcaactagtaccatatatattttaaaacaagaaaatactcaaagtacctatcgggtgaatccagatggttccctgcgtgtcacttttgccagcgggatggagatcggcctcagctcagagccccacatcctggcaggggcagtcaaccctaccctgggcaaatgcaacatctcattgcccggagagcacaatgcaaacctcatcgagtggcggcagaggaaggagcaaaacaaaggcaatgtttcggcttttgaaaggaggctgagggcccacaacagaaacctactctccatagattttgatcatataacccgcacaggaaagatctatgatgaccatcgaaaattcacccttcgaattctttatgaccagactgggcgacccattctgtggtctcctgtaagcagatataatgaagtgaacatcacatattcaccttcgggattggtgacgtttattcaaagaggaacgtggaatgaaaaaatggaatatgaccagagtgggaaaattatttcaagaacttgggctgatgggaaaatttggagctatacctacttagaaaaatctgtgatgcttctcctacacagccagcggcgttacatctttgagtatgaccaatcagattgcctgctgtcagttaccatgcctagcatggtgcgccacagcttacaaaccatgctttcagtgggctactaccgtaatatctacaccccaccggacagtagcacttcttttatccaagactatagtcgagatggccgattgctacagaccctgcatctggggacagggcgcagagtcttatacaagtacaccaagcaagcaaggctttctgaggttctctatgataccactcaggtcacattaacatatgaagagtcttctggagtgattaagacaatacacctgatgcatgacggattcatctgcacaatcagatacaggcaaacaggacctcttattggacgccagattttcagattcagtgaagaaggccttgtgaatgcacggttcgactacagctacaacaatttccgagtcacaagcatgcaagctgtaatcaatgaaacccctttgcctatagatctttaccgatatgttgatgtctctggcagaacagagcagtttggaaaattcagtgtaattaattacgatttaaatcaggtcataactactacagtgatgaaacacaccaaaatcttcagtgccaatggacaagtcattgaagtccaatatgaaatcctaaaggcaattgcctactggatgaccattcaatatgataatgtgggccgcatggtaatatgtgacataagggtaggagtagatgccaatataacaaggtacttctatgaatacgatgctgatgggcaacttcagactgtttctgtaaatgacaaaacccagtggcgttatagttacgatctgaatggaaacatcaacctcttaagccatgggaagagtgctcgtcttactcctctccgatatgacctccgagaccgcatcaccagattaggagaaattcagtataaaatggatgaagatggctttctgaggcagaggggaaatgatatttttgaatataattctaatggcctgctgcagaaagcctacaataaggcttctggctggactgtgcagtattactatgatgggcttgggcgacgtgtcgcgagtaagtccagcctagggcagcaccttcagttcttttatgcagaccttaccaaccccataagagttactcatttgtacaaccacacaagctcggagattacatctctgtattatgatctccaaggtcaccttattgccatggagttaagcagtggtgaagaatattatgtagcctgtgataatacaggtaccccactagctgtgttcagcagccgaggtcaggtcataaaggagatactatacacaccttatggcgatatctatcatgacacttaccctgactttcaggtcattattggttttcatggaggactctatgatttccttactaaattagtgcacctggggcaaagggattatgatgttgttgctggcagatggacaacgcctaatcatcacatatggaaacagttgaacctccttcctaaaccattcaacctctactcctttgaaaataactacccagttggcaaaattcaagatgttgcaaagtataccacagacatcagaagttggttggagctatttggtttccaattacacaatgtactacctggatttcccaaacctgaattagaaaatttagaattaacttacgagcttctacggcttcagacaaaaactcaagagtgggatcctggaaagactatcctgggcattcagtgtgaactccagaaacagctcaggaatttcatttccttggaccaactacctatgactccccgatacaatgatggacggtgccttgaaggagggaagcaaccaaggtttgctgctgtcccttctgtttttgggaaaggtataaaatttgccatcaaggatggcatagtaacagctgatattataggagtagccaatgaagatagcaggcggcttgctgccattctcaataatgcccattacctggaaaacctacattttaccatagaggggagggacactcactacttcattaagcttgggtctctggaggaagacctggtgctcatcggtaacactggggggaggcggattctggagaatggtgtcaatgtcactgtgtcccagatgacttctctgttgaatgggaggactagacggtttgcagatattcagctccagcatggagccctgtgcttcaacatccggtatgggacaactgtcgaagaggaaaagaatcacgtgttggagattgccagacagcgcgcagtggcccaggcctggactaaggaacaaagaaggctgcaagagggggaagaggggattagggcatggacagaaggggaaaagcagcagcttttgagcactgggcgggtacaaggttacgatgggtattttgttttgtctgttgagcagtatttagaactttctgacagtgccaataatattcactttatgagacagagcgaaataggcaggaggtaacaaaaatatctctgcctttgcgtcaccaaagactgcctgtttttaaaacataaaatggtttattgtattggttttctagatcagaactctgtatatgtaaatatggaggaaaaacatatccaactgcctttcaatgtgacggaagatggtattttaatattgtttgtttaaactctttaagaaatgacagagatttttagttcttgtgtggcagtattcaaaataacacaagtagaactcaaacagctaaaaacagttttcagaaagcaccactttcaatttgccgagccatgcatatgttccaatatccagaaagaacccaaggttctctatctctattgtgagaagcagtttcatccttaactgttg

SEQ ID NO: 352405 - DNA, 2459 bp, Homo sapiens
gactgcttgcattaaaggacttcctcatcctttttttcatgaaactgagcttgcttaatcagagatggagcaaactgactgcaaaccctaccagcctctaccaaaagtcaagcatgaaatggatctagcttacaccagttcttctgatgagagtgaagatggaagaaaaccaagacagtcatacaactccagggagaccctgcacgagtataaccaggagctgaggatgaattacaatagccagagtagaaagaggaaagaagtagaaaaatctactcaagagatggaattctgtgaaacctctcacactctgtgctctggctaccaaacagacatgcacagcgtttctcggcatggctaccagctagagatgggatctgatgtggacacagagacagaaggtgctgcctcacctgaccatgcactaagaatgtggataaggggaatgaaatcagagcatagttcctgtttgtccagccgggccaactctgcattatccttgactgacactgaccatgaaaggaagtctgatggggaaaatggtttcaaattctctcctgtttgttgtgacatggaggctcaagctgggtctactcaagatgtgcagagcagcccacacaaccagttcaccttcagacccctcccaccgccacctccgcctcctcatgcctgcacctgtgccaggaagccaccccctgcagcggactctcttcagaggagatcaatgactacccgcagccagcccagcccagctgctccagctcccccaaccagcacgcaggattcagtccatctgcataacagctgggtcctgaacagcaacataccattggagaccaggcattccctgttcaaacatggatctggttcctctgcgatcttcagtgcagccagtcagaactaccctctgacatccaataccgtgtactcgccccctcccaggcctcttcctcgaagcaccttttcccgacctgcctttacctttaacaaaccttacaggtgctgcaactggaagtgcacagcattgagcgccactgcaatcacagtgactttggccttgttactagcctatgtgattgcagtgcatttgttcggcctgacttggcagttgcaaccagttgaaggagagctgtatgcaaatggagttagcaaagggaacagggggaccgagtccatggacactacttactctccaattggaggaaaagtttctgataaatcagagaaaaaagtgtttcagaagggacgggcgatagacactggagaagttgacattggtgcacaggtcatgcagaccattccacctggtttattctggcgtttccagattactatccaccatccaatatatctgaagttcaatatttctttagccaaggactctctgctgggaatttatggcagaagaaacattccacctacacatactcagtttgattttgtaaaactaatggatggcaaacagctggtcaagcaggactccaagggctctgatgatacacagcactcccctcggaacctgatcttaacttcgcttcaggagacaggtttcatagagtatatggatcaaggaccttggtatctggcgttttacaatgatggaaaaaagatggagcaagtattcgtgttaactacagcaattgaaataatggatgactgttcaaccaattgcaatggaaatggagagtgtatctctggccattgtcattgtttcccaggattccttggacctgactgtgctagagattcctgccctgtgctgtgtggtgggaatggagaatacgagaaaggacactgtgtctgccggcatggctggaaggggccagagtgtgacgttccggaagaacaatgcattgatccaacatgctttggccacggcacctgcatcatgggagtctgcatctgtgtgccaggatacaaaggagaaatatgcgaggaagaggactgcctagacccaatgtgttccaaccatggcatctgtgtaaaaggagaatgtcactgttctactggctggggaggagttaactgtgaaacaccacttcctgtatgtcaagagcagtgctcaggacacggaacttttcttctggacgctggagtatgcagctgtgatcccaagtggacaggatctgactgctcaacagagctgtgtaccatggagtgtggtagccatggagtctgctcaagaggaatttgccagtgtgaagaaggctgggtaggaccaacatgtgaggaacgctcctgtcattctcattgtactgagcatggccaatgcaaagatggaaaatgtgagtgtagccctggatgggagggcgaccactgcacaattgctcactacttagatgccatcggctcagaactccaagcgggcctagcgcagactcccaaatctcagcagctcacgctctcaccaagacgagtacgtccttgactcacttccttttccttgtgagcagcgttgg

SEQ ID NO: 352406 - DNA, 8632 bp, Homo sapiens
gactgcttgcattaaaggacttcctcatcctttttttcatgaaactgagcttgcttaatcagagatggagcaaactgactgcaaaccctaccagcctctaccaaaagtcaagcatgaaatggatctagcttacaccagttcttctgatgagagtgaagatggaagaaaaccaagacagtcatacaactccagggagaccctgcacgagtataaccaggagctgaggatgaattacaatagccagagtagaaagaggaaagaagtagaaaaatctactcaagagatggaattctgtgaaacctctcacactctgtgctctggctaccaaacagacatgcacagcgtttctcggcatggctaccagctagagatgggatctgatgtggacacagagacagaaggtgctgcctcacctgaccatgcactaagaatgtggataaggggaatgaaatcagagcatagttcctgtttgtccagccgggccaactctgcattatccttgactgacactgaccatgaaaggaagtctgatggggaaaatggtttcaaattctctcctgtttgttgtgacatggaggctcaagctgggtctactcaagatgtgcagagcagcccacacaaccagttcaccttcagacccctcccaccgccacctccgcctcctcatgcctgcacctgtgccaggaagccaccccctgcagcggactctcttcagaggagatcaatgactacccgcagccagcccagcccagctgctccagctcccccaaccagcacgcaggattcagtccatctgcataacagctgggtcctgaacagcaacataccattggagaccaggcattccctgttcaaacatggatctggttcctctgcgatcttcagtgcagccagtcagaactaccctctgacatccaataccgtgtactcgccccctcccaggcctcttcctcgaagcaccttttcccgacctgcctttacctttaacaaaccttacaggtgctgcaactggaagtgcacagcattgagcgccactgcaatcacagtgactttggccttgttactagcctatgtgattgcagtgcatttgttcggcctgacttggcagttgcaaccagttgaaggagagctgtatgcaaatggagttagcaaagggaacagggggaccgagtccatggacactacttactctccaattggaggaaaagtttctgataaatcagagaaaaaagtgtttcagaagggacgggcgatagacactggagaagttgacattggtgcacaggtcatgcagaccattccacctggtttattctggcgtttccagattactatccaccatccaatatatctgaagttcaatatttctttagccaaggactctctgctgggaatttatggcagaagaaacattccacctacacatactcagtttgattttgtaaaactaatggatggcaaacagctggtcaagcaggactccaagggctctgatgatacacagcactcccctcggaacctgatcttaacttcgcttcaggagacaggtttcatagagtatatggatcaaggaccttggtatctggcgttttacaatgatggaaaaaagatggagcaagtattcgtgttaactacagcaattgaaataatggatgactgttcaaccaattgcaatggaaatggagagtgtatctctggccattgtcattgtttcccaggattccttggacctgactgtgctagagattcctgccctgtgctgtgtggtgggaatggagaatacgagaaaggacactgtgtctgccggcatggctggaaggggccagagtgtgacgttccggaagaacaatgcattgatccaacatgctttggccacggcacctgcatcatgggagtctgcatctgtgtgccaggatacaaaggagaaatatgcgaggaagaggactgcctagacccaatgtgttccaaccatggcatctgtgtaaaaggagaatgtcactgttctactggctggggaggagttaactgtgaaacaccacttcctgtatgtcaagagcagtgctcaggacacggaacttttcttctggacgctggagtatgcagctgtgatcccaagtggacaggatctgactgctcaacagagctgtgtaccatggagtgtggtagccatggagtctgctcaagaggaatttgccagtgtgaagaaggctgggtaggaccaacatgtgaggaacgctcctgtcattctcattgtactgagcatggccaatgcaaagatggaaaatgtgagtgtagccctggatgggagggcgaccactgcacaattgctcactacttagatgctgtccgagatggctgcccagggctctgctttggaaatggacgatgtaccctggatcaaaatggttggcactgtgtgtgtcaggtgggttggagtgggacaggctgcaatgttgtcatggaaatgctttgtggagataacttggacaatgatggagatggtttaaccgactgtgtggatcctgactgttgtcaacaaagcaactgttatataagtcctctctgccagggctcaccagatcctcttgacctcattcagcaaagccaaactctcttctctcagcacacttcaagacttttttatgatcgaatcaaattcctcattggcaaggacagtactcatgtcattcctcctgaggtgtcatttgacagcaggcgtgcctgtgtgattcgaggccaagtggtggccatagatggaactcctctagtgggagtgaatgtcagtttcttgcaccacagtgattatgggtttaccatcagccggcaagatggaagctttgacctcgtggccatcggtggcatctctgtcatcttaatcttcgaccgatcccctttcctgcctgagaagagaacactctggttgccttggaatcagtttattgtggtagagaaagtcaccatgcagagagttgtatcagacccgccatcctgcgatatctccaactttatcagcccaaaccctattgtgcttccttcaccgctcacatcatttggagggtcctgtccagagaggggaactattgttcctgagctgcaggttgtacaggaggaaattcccattccctccagctttgtgaggctgagttacctgagcagccgcacccctgggtataaaaccctgctacggatccttctgacacattcaacgattcccgtaggcatgataaaagtacacctcacagtagctgtggaagggcgactcacacagaagtggtttcccgccgcaattaatcttgtctacacatttgcttggaacaagaccgatatctatggacagaaggtttggggcctggcagaggctttggtatctgtgggatatgaatatgaaacgtgccctgactttattctctgggagcaaaggacagtcgttttacaaggttttgagatggatgcttctaacctaggagactggtctttgaataagcatcacattttgaatcctcaaagtggaatcatacataaagggaatggagaaaatatgttcatttcccagcagcccccagtcatatcaaccataatgggtaatggacaccaaaggagtgtagcctgcaccaactgcaatggcccagcccacaacaacaaactctttgctcctgtcgccttagcttctggccctgatggcagtgtgtatgttggcgacttcaattttgtaaggagaatatttccctcgggaaactccgttagtattttggaattaagaaacagagataccagacatagcacaagtcctgctcacaaatactatctggctatggaccctgtgtctgaatcactctatctatcagacaccaatactcgcaaagtctacaagttgaaatctcttgtggagacgaaagatctgtccaagaattttgaagtggtggcaggaactggtgatcagtgccttccctttgaccagagtcattgtggagatggtgggagagcatcggaagcttcactgaatagccctcgaggcatcacagttgataggcatggatttatttactttgtggatgggactatgattcgcaaaattgatgagaatgctgtgatcacaactgtaatcggctcaaatggtctgacttccacacaaccactgagctgtgactcaggaatggacatcactcaggtgcgattagagtggccaacagaccttgcagtaaatcctatggacaattcattgtatgtcttggataacaacattgtgctgcaaatttctgagaacaggcgtgttcggatcatcgcaggacgccccattcactgccaggtgccaggcatcgatcatttcctggtcagcaaggtagcaattcactccactctagagtcagcgagggccatcagtgtctcccacagcgggctgctcttcatagctgaaacagacgagaggaaagtaaaccgcattcagcaagtaaccaccaatggggagatctacatcatcgctggtgcccccactgactgtgactgcaaaattgatccaaactgtgactgtttttcaggtgatggtggctatgccaaagatgcaaagatgaaagccccttcctccttagcagtgtcgcctgatggaaccctctatgtggcagacctcggaaatgttcgaattcgtaccatcagcaggaaccaagcccacctgaatgacatgaacatttatgagattgcttcacccgctgatcaggaactgtaccagttcactgtaaatggaacccacctacacaccctgaacttgataacaagggactatgtttataacttcacctacaattctgaaggtgacttgggcgcgattaccagcagcaatggcaattcagtgcacattcgccgtgatgcaggcggaatgccgctatggcttgtggtgcctggcggacaagtatactggctgactataagcagcaatggagtcctgaaaagagtgtcagcccaaggctataatccggccttaatgacctatccaggaaacacagggcttctggctaccaaaagtaacgaaaatggatggacaaccgtttatgagtatgaccccgagggacacctgaccaatgcaacgtttcccactggagaggtcagcagcttccacagtgacctggagaagctgacaaaagtggagctagatacttccaaccgtgaaaatgtcctcatgtcaaccaacttgacggcaactagtaccatatatattttaaaacaagaaaatactcaaagtacctatcgggtgaatccagatggttccctgcgtgtcacttttgccagcgggatggagatcggcctcagctcagagccccacatcctggcaggggcagtcaaccctaccctgggcaaatgcaacatctcattgcccggagagcacaatgcaaacctcatcgagtggcggcagaggaaggagcaaaacaaaggcaatgtttcggcttttgaaaggaggctgagggcccacaacagaaacctactctccatagattttgatcatataacccgcacaggaaagatctatgatgaccatcgaaaattcacccttcgaattctttatgaccagactgggcgacccattctgtggtctcctgtaagcagatataatgaagtgaacatcacatattcaccttcgggattggtgacgtttattcaaagaggaacgtggaatgaaaaaatggaatatgaccagagtgggaaaattatttcaagaacttgggctgatgggaaaatttggagctatacctacttagaaaaatctgtgatgcttctcctacacagccagcggcgttacatctttgagtatgaccaatcagattgcctgctgtcagttaccatgcctagcatggtgcgccacagcttacaaaccatgctttcagtgggctactaccgtaatatctacaccccaccggacagtagcacttcttttatccaagactatagtcgagatggccgattgctacagaccctgcatctggggacagggcgcagagtcttatacaagtacaccaagcaagcaaggctttctgaggttctctatgataccactcaggtcacattaacatatgaagagtcttctggagtgattaagacaatacacctgatgcatgacggattcatctgcacaatcagatacaggcaaacaggacctcttattggacgccagattttcagattcagtgaagaaggccttgtgaatgcacggttcgactacagctacaacaatttccgagtcacaagcatgcaagctgtaatcaatgaaacccctttgcctatagatctttaccgatatgttgatgtctctggcagaacagagcagtttggaaaattcagtgtaattaattacgatttaaatcaggtcataactactacagtgatgaaacacaccaaaatcttcagtgccaatggacaagtcattgaagtccaatatgaaatcctaaaggcaattgcctactggatgaccattcaatatgataatgtgggccgcatggtaatatgtgacataagggtaggagtagatgccaatataacaaggtacttctatgaatacgatgctgatgggcaacttcagactgtttctgtaaatgacaaaacccagtggcgttatagttacgatctgaatggaaacatcaacctcttaagccatgggaagagtgctcgtcttactcctctccgatatgacctccgagaccgcatcaccagattaggagaaattcagtataaaatggatgaagatggctttctgaggcagaggggaaatgatatttttgaatataattctaatggcctgctgcagaaagcctacaataaggcttctggctggactgtgcagtattactatgatgggcttgggcgacgtgtcgcgagtaagtccagcctagggcagcaccttcagttcttttatgcagaccttaccaaccccataagagttactcatttgtacaaccacacaagctcggagattacatctctgtattatgatctccaaggtcaccttattgccatggagttaagcagtggtgaagaatattatgtagcctgtgataatacaggtaccccactagctgtgttcagcagccgaggtcaggtcataaaggagatactatacacaccttatggcgatatctatcatgacacttaccctgactttcaggtcattattggttttcatggaggactctatgatttccttactaaattagtgcacctggggcaaagggattatgatgttgttgctggcagatggacaacgcctaatcatcacatatggaaacagttgaacctccttcctaaaccattcaacctctactcctttgaaaataactacccagttggcaaaattcaagatgttgcaaagtataccacagacatcagaagttggttggagctatttggtttccaattacacaatgtactacctggatttcccaaacctgaattagaaaatttagaattaacttacgagcttctacggcttcagacaaaaactcaagagtgggatcctggaaagactatcctgggcattcagtgtgaactccagaaacagctcaggaatttcatttccttggaccaactacctatgactccccgatacaatgatggacggtgccttgaaggagggaagcaaccaaggtttgctgctgtcccttctgtttttgggaaaggtataaaatttgccatcaaggatggcatagtaacagctgatattataggagtagccaatgaagatagcaggcggcttgctgccattctcaataatgcccattacctggaaaacctacattttaccatagaggggagggacactcactacttcattaagcttgggtctctggaggaagacctggtgctcatcggtaacactggggggaggcggattctggagaatggtgtcaatgtcactgtgtcccagatgacttctctgttgaatgggaggactagacggtttgcagatattcagctccagcatggagccctgtgcttcaacatccggtatgggacaactgtcgaagaggaaaagaatcacgtgttggagattgccagacagcgcgcagtggcccaggcctggactaaggaacaaagaaggctgcaagagggggaagaggggattagggcatggacagaaggggaaaagcagcagcttttgagcactgggcgggtacaaggttacgatgggtattttgttttgtctgttgagcagtatttagaactttctgacagtgccaataatattcactttatgagacagagcgaaataggcaggaggtaacaaaaatatctctgcctttgcgtcaccaaagactgcctgtttttaaaacataaaatggtttattgtattggttttctagatcagaactctgtatatgtaaatatggaggaaaaacatatccaactgcctttcaatgtgacggaagatggtattttaatattgtttgtttaaactctttaagaaatgacagagatttttagttcttgtgtggcagtattcaaaataacacaagtagaactcaaacagctaaaaacagttttcagaaagcaccactttcaatttgccgagccatgcatatgttccaatatccagaaagaacccaaggttctctatctctattgtgagaagcagtttcatccttaactgttg

SEQ ID NO: 352407 - DNA, 717 bp, Homo sapiens
tgcaaaacagttagatgtgtttctgccatagaacaggtgacttctggttctgacttacgtattagtctctttttttttcctccctaatctttcttttttctaacttaaaatcaaccccaggggcctcagagagcaattcatgcttaggccatgacacatgcttaagatctgtttttgtcacttaatgttgtttccatattgcaggctaggaactctgaagccagggatagctcagcaccatcattttcttttctaggttctagcaagaggagaagaaaggaggaaaccacagggaaaaatgttaagaagacacagcatgaattagatcacaatggtctcgttcccttacccgtcaaagtctgcttcacgtgtaacaggtattttctttcatactaaggggctctttctcattatttagcagatgatactttttctctcatcacctcttccagaccatgtatgttaaatgtgaacagcccatattctgatagtatgagtacatggagactaactaatggactgacgagagccttgaatgtgtatgtgttaacaaattttctgaagaatcacagtacaggagtactgtgaactgtgttgaggccgagcacggtggcttatgcctgtaatcgcagcaatctgggaggccgaggcggtcagattgtttgaacctgggagcttgagaccaacctgggcaacacagtgaaaccttgtctctac

SEQ ID NO: 352408 - DNA, 555 bp, Homo sapiens
agtgagcaatacttaatataaaaagcacacatagaataagttacatacagcaaaatctatacaatatcattgttttatttaatataaagatcgctacccaccttccttccatggttcccaccctccacgttattttccctttctgcagcggttgcactacaggtagctactgtgtattatggacaaatgagaaatgaattctttttctggctgtccatctattttatttcaaataaggaaaagtgtatttggattttgtgtaaatacatctagtgatgacattttttcaatgtttttaaaaaccgtgtacagtactacatgtggtagagcgttttctcaaattgtctattgtagcaaaaatgtttttgtcgtaaacctgttttgtctcctttttttgttctcttgccacttctctcctcttcctcctgcccctggttccctcctctcctcccacccccacaaccagtaccaatgtacatagtaattgtaatgttttagactttacagaaactttcctgtattctgtatataaaaaacaaaaatacttcaaaaaat

SEQ ID NO: 352409 - DNA, 4763 bp, Homo sapiens
  misc_feature (96)..(96): n is a, c, g, or t
cttagtttgcacacaaacaccaatggatgaacagtccctagcttcctgcggctgcgccttgacccctacaagctttctcaagcgcctgcgcgaganctcaggtcccgcccttttgtctcagtgcgctggcgcagggcagaaaggtggggcttcggtcctccagacgaatgccagcgcggctgcgcgctggggggtactccctcaccgcggctgcgcgggagccaggccgccggctgtcactgcggttgcgcgcggcgagcgccgatcccggggcgcctgcgcgggtggctttgcgggcgctcgcggtaagtttgcgccaagtgcgcggcagccgggacgcagacggcggcggcggcgagaggcggagcccggggaccaccccccatcaccctccccccagtcacctcacgtaccacaacctcacgtaacctctcaccccccctccgatacccccagccccgggatggcagcgcccgccagccttcccggccggaccggctgtcgccagtgccggctttagcctgtgggactaggccccgccgaggcctgacccccggagccgggacccactgtgcagccagcagccgggccgggactgaggggccgctcccccctcgcggcccgtcgggaggacgctgtcgtcccggggactgggggccggggggtgggggggagccagggcgaggaagtcgggacccgtattgggaaaaaagcggggccggggtcaggagcgccccctcccctcacctcccccctccccccggggttgggggggccggagcagagagcacccagcccgggaggtggatgaatgtgggagaaaatggagaccaagacgatcgtgtacgacttggacacatcaggggggctgatggagcaaatccaagctctgctggctccccccaagacggacgaggcagaaaagcgcagtcggaagcctgagaaggagccccggagaagcggcagggccaccaaccacgacagctgcgatagctgcaaggaaggtggagatctcctgtgctgcgaccactgcccggctgccttccacctccagtgctgtaaccctccactgagtgaagaaatgttgcctcctggagagtggatgtgtcaccggtgcactgttcgccgaaagaaacgagagcagaaaaaggagctgggtcatgtcaatggactggtggacaaatctggcaaacggactacatcccccagcagtgacactgacttgttggacagatcggccagcaaaactgaactaaaggccattgcccatgcccggatcctggaaaggagagccagcaggcctggcacacccacatccagcgccagcacagagactcccacctctgagcagaatgatgtcgacgaagacatcattgacgtggatgaggaaccagtagcagcggagccagactatgtgcagccccagctgaggcggccctttgagctgctgattgctgccgccatggagcggaaccccacccaatttcagttgcccaatgaactgacttgtaccactgcactaccaggttctagcaagaggagaagaaaggaggaaaccacagggaaaaatgttaagaagacacagcatgaattagatcacaatggtctcgttcccttacccgtcaaagtctgcttcacgtgtaacaggagttgccgtgtggctcctctcatccagtgtgactattgccctctcctgtttcacatggattgcctcgagccgccgctcactgccatgcccctgggcagatggatgtgtccgaatcacatcgaacatgtggtgctgaaccagaagaatatgacactgagcaatcggtgccaggtgtttgatcgtttccaggacaccgtttcgcagcatgtcgtcaaagtggacttcctgaaccgaatccacaagaagcacccccctaaccggcgtgtgctccagtcggtcaaaagaagaagcttgaaggttcctgatgctataaaatctcagtaccagtttccaccccctctcattgcacccgcggccattcgggacggggagctgatctgcaatgggatccctgaggaatcacagatgcaccttttgaactctgagcacttagccacccaagcagagcagcaagagtggctctgtagtgttgttgcgctccagtgcagcatattgaaacatttatctgctaagcagatgccttcgcattgggactctgaacagacagagaaggctgatattaagcctgttattgtgactgacagctcagtcaccacctccctgcaaacagctgacaagacacctacaccttcccactaccccttgtcctgcccctcagggattagcacccagaattccctgagctgctctccaccccaccagtccccagccctagaggacatcggctgcagttcttgtgcggaaaaatccaagaaaaccccttgtgggactgccaatgggccagtgaacacagaggtgaaagctaatggcccacacctctacagcagccctactgattccacggacccccggcgacttccaggcgctaacaccccactaccaggcctctcacaccggcaaggctggccccggcccctcacgccaccagcggctgggggccttcagaaccacaccgtcggcatcattgtgaagacagagaatgccactggccccagctcttgcccccagaggagtttggttcctgtcccaagcctgcccccttccattcccagctcttgtgccagcatcgagaacaccagcactttgcaaagaaagactgtccaatcacagataggacctccgttgacagattcaaggccactgggctcacccccaaacgccacccgggtgctcactcccccgcaagcagcaggagatggtatcttggccacaacagccaaccaacgattcagctcaccagcgccatcgtcagatggcaaggtcagccccggcacgttatccataggaagcgctttaaccgtaccctctttcccagccaactctactgccatggtggacctcaccaactcacttcgagcatttatggatgtcaatggagaaatcgagataaatatgctggacgagaagctgatcaagtttctggccttgcagagaatacatcagcttttcccctcccgggtccaaccttcaccgggcagtgtcgggacacatcagctggcttctggagggcaccacatagaagtgcaaagaaaggaggtacaggcccgagctgtgttctaccccctcttagggttgggaggagctgtgaacatgtgctatcgaaccctctacatcgggacaggagctgacatggatgtgtgccttacaaactatggtcactgtaactacgtgtccgggaaacatgcctgcatattctacgatgagaataccaaacattatgagctgttaaactacagtgagcatgggacaacggtggacaatgtgctgtattcatgtgacttctcggagaagaccccgccaacccccccaagcagtattgttgccaaagtgcagagtgtcatcaggcgccgccggcaccagaaacaggacgaagagccaagtgaggaggcagccatgatgagttcccaggcccaggggccgcagcggagaccctgcaattgcaaagccagcagctcgagcttgattgggggcagtggggccggctgggagggcacagccttactgcaccatggcagctacatcaagctgggctgcctgcagtttgtcttcagcatcactgagtttgcgaccaaacagcccaaaggcgatgccagcctgctgcaggatggggtcttggccgagaagctctctctcaagccccaccagggccctgtgctgcgctccaactctgttccttaggactggcggctaccccgccactggcctgtacacccacccaagactcctgcaatgcaaaaatgtacacaaaccaagcccgggtgttttctatactctaccagaaacccttcaactacaatctttgcatgaaatgaagaaaaccttttgactgttttttaaaaatcctttttcttttctcaagttctagggggcatttgcacatatatttgtactcaacatttcatgggaaagcggcagacctgagctgaggaacagcgtgggcagggagggaaagacccagggtctggacacttcctccaacacaaaacccttccccacccacctcctgctccctccccctcgcccaccattgtaaaataatcagaaacttgttctattttgtggcagtgacaatagttttatattaaaagaaaaaatacagttttcatacagcaaaatctatacaatatcattgttttatttaatataaagatcgctacccaccttccttccatggttcccaccctccacgttattttccctttctgcagcggttgcactacaggtagctactgtgtattatggacaaatgagaaatgaattctttttctggctgtccatctattttatttcaaataaggaaaagtgtatttggattttgtgtaaatacatctagtgatgacattttttcaatgtttttaaaaaccgtgtacagtactacatgtggtagagcgttttctcaaattgtctattgtagcaaaaatgtttttgtcgtaaacctgttttgtctcctttttttgttctcttgccacttctctcctcttcctcctgcccctggttccctcctctcctcccacccccacaaccagtaccaatgtacatagtaattgtaatgttttagactttacagaaactttcctgtattctgtatataaaaaacaaaaatacttcaaaaaat

SEQ ID NO: 352410 - DNA, 3998 bp, Homo sapiens
gatcagtggggctgatggagcaaatccaagctctgctggctccccccaagacggacgaggcagaaaagcgcagtcggaagcctgagaaggagccccggagaagcggcagggccaccaaccacgacagctgcgatagctgcaaggaaggtggagatctcctgtgctgcgaccactgcccggctgccttccacctccagtgctgtaaccctccactgagtgaagaaatgttgcctcctggagagtggatgtgtcaccggtgcactgttcgccgaaagccctggaatcaccccactcttcccatggtgactgtttggaatccagtagggcctaaaaatccaaacatgggctgctgaaatgggcagaagagaaacgagagcagaaaaaggagctgggtcatgtcaatggactggtggacaaatctggcaaacggactacatcccccagcagtgacactgacttgttggacagatcggccagcaaaactgaactaaaggccattgcccatgcccggatcctggaaaggagagccagcaggcctggcacacccacatccagcgccagcacagagactcccacctctgagcagaatgatgtcgacgaagacatcattgacgtggatgaggaaccagtagcagcggagccagactatgtgcagccccagctgaggcggccctttgagctgctgattgctgccgccatggagcggaaccccacccaatttcagttgcccaatgaactgacttgtaccactgcactaccaggttctagcaagaggagaagaaaggaggaaaccacagggaaaaatgttaagaagacacagcatgaattagatcacaatggtctcgttcccttacccgtcaaagtctgcttcacgtgtaacaggagttgccgtgtggctcctctcatccagtgtgactattgccctctcctgtttcacatggattgcctcgagccgccgctcactgccatgcccctgggcagatggatgtgtccgaatcacatcgaacatgtggtgctgaaccagaagaatatgacactgagcaatcggtgccaggtgtttgatcgtttccaggacaccgtttcgcagcatgtcgtcaaagtggacttcctgaaccgaatccacaagaagcacccccctaaccggcgtgtgctccagtcggtcaaaagaagaagcttgaaggttcctgatgctataaaatctcagtaccagtttccaccccctctcattgcacccgcggccattcgggacggggagctgatctgcaatgggatccctgaggaatcacagatgcaccttttgaactctgagcacttagccacccaagcagagcagcaagagtggctctgtagtgttgttgcgctccagtgcagcatattgaaacatttatctgctaagcagatgccttcgcattgggactctgaacagacagagaaggctgatattaagcctgttattgtgactgacagctcagtcaccacctccctgcaaacagctgacaagacacctacaccttcccactaccccttgtcctgcccctcagggattagcacccagaattccctgagctgctctccaccccaccagtccccagccctagaggacatcggctgcagttcttgtgcggaaaaatccaagaaaaccccttgtgggactgccaatgggccagtgaacacagaggtgaaagctaatggcccacacctctacagcagccctactgattccacggacccccggcgacttccaggcgctaacaccccactaccaggcctctcacaccggcaaggctggccccggcccctcacgccaccagcggctgggggccttcagaaccacaccgtcggcatcattgtgaagacagagaatgccactggccccagctcttgcccccagaggagtttggttcctgtcccaagcctgcccccttccattcccagctcttgtgccagcatcgagaacaccagcactttgcaaagaaagactgtccaatcacagataggacctccgttgacagattcaaggccactgggctcacccccaaacgccacccgggtgctcactcccccgcaagcagcaggagatggtatcttggccacaacagccaaccaacgattcagctcaccagcgccatcgtcagatggcaaggtcagccccggcacgttatccataggaagcgctttaaccgtaccctctttcccagccaactctactgccatggtggacctcaccaactcacttcgagcatttatggatgtcaatggagaaatcgagataaatatgctggacgagaagctgatcaagtttctggccttgcagagaatacatcagcttttcccctcccgggtccaaccttcaccgggcagtgtcgggacacatcagctggcttctggagggcaccacatagaagtgcaaagaaaggaggtacaggcccgagctgtgttctaccccctcttagggttgggaggagctgtgaacatgtgctatcgaaccctctacatcgggacaggagctgacatggatgtgtgccttacaaactatggtcactgtaactacgtgtccgggaaacatgcctgcatattctacgatgagaataccaaacattatgagctgttaaactacagtgagcatgggacaacggtggacaatgtgctgtattcatgtgacttctcggagaagaccccgccaacccccccaagcagtattgttgccaaagtgcagagtgtcatcaggcgccgccggcaccagaaacaggacgaagagccaagtgaggaggcagccatgatgagttcccaggcccaggggccgcagcggagaccctgcaattgcaaagccagcagctcgagcttgattgggggcagtggggccggctgggagggcacagccttactgcaccatggcagctacatcaagctgggctgcctgcagtttgtcttcagcatcactgagtttgcgaccaaacagcccaaaggcgatgccagcctgctgcaggatggggtcttggccgagaagctctctctcaagccccaccagggccctgtgctgcgctccaactctgttccttaggactggcggctaccccgccactggcctgtacacccacccaagactcctgcaatgcaaaaatgtacacaaaccaagcccgggtgttttctatactctaccagaaacccttcaactacaatctttgcatgaaatgaagaaaaccttttgactgttttttaaaaatcctttttcttttctcaagttctagggggcatttgcacatatatttgtactcaacatttcatgggaaagcggcagacctgagctgaggaacagcgtgggcagggagggaaagacccagggtctggacacttcctccaacacaaaacccttccccacccacctcctgctccctccccctcgcccaccattgtaaaataatcagaaacttgttctattttgtggcagtgacaatagttttatattaaaagaaaaaatacagttttcatacagcaaaatctatacaatatcattgttttatttaatataaagatcgctacccaccttccttccatggttcccaccctccacgttattttccctttctgcagcggttgcactacaggtagctactgtgtattatggacaaatgagaaatgaattctttttctggctgtccatctattttatttcaaataaggaaaagtgtatttggattttgtgtaaatacatctagtgatgacattttttcaatgtttttaaaaaccgtgtacagtactacatgtggtagagcgttttctcaaattgtctattgtagcaaaaatgtttttgtcgtaaacctgttttgtctcctttttttgttctcttgccacttctctcctcttcctcctgcccctggttccctcctctcctcccacccccacaaccagtaccaatgtacatagtaattgtaatgttttagactttacagaaactttcctgtattctgtatataaaaaacaaaaatacttcaaaaaat

SEQ ID NO: 352411 - DNA, 3493 bp, Homo sapiens
tgcaaaacagttagatgtgtttctgccatagaacaggtgacttctggttctgacttacgtattagtctctttttttttcctccctaatctttcttttttctaacttaaaatcaaccccaggggcctcagagagcaattcatgcttaggccatgacacatgcttaagatctgtttttgtcacttaatgttgtttccatattgcaggctaggaactctgaagccagggatagctcagcaccatcattttcttttctaggttctagcaagaggagaagaaaggaggaaaccacagggaaaaatgttaagaagacacagcatgaattagatcacaatggtctcgttcccttacccgtcaaagtctgcttcacgtgtaacaggagttgccgtgtggctcctctcatccagtgtgactattgccctctcctgtttcacatggattgcctcgagccgccgctcactgccatgcccctgggcagatggatgtgtccgaatcacatcgaacatgtggtgctgaaccagaagaatatgacactgagcaatcggtgccaggtgtttgatcgtttccaggacaccgtttcgcagcatgtcgtcaaagtggacttcctgaaccgaatccacaagaagcacccccctaaccggcgtgtgctccagtcggtcaaaagaagaagcttgaaggttcctgatgctataaaatctcagtaccagtttccaccccctctcattgcacccgcggccattcgggacggggagctgatctgcaatgggatccctgaggaatcacagatgcaccttttgaactctgagcacttagccacccaagcagagcagcaagagtggctctgtagtgttgttgcgctccagtgcagcatattgaaacatttatctgctaagcagatgccttcgcattgggactctgaacagacagagaaggctgatattaagcctgttattgtgactgacagctcagtcaccacctccctgcaaacagctgacaagacacctacaccttcccactaccccttgtcctgcccctcagggattagcacccagaattccctgagctgctctccaccccaccagtccccagccctagaggacatcggctgcagttcttgtgcggaaaaatccaagaaaaccccttgtgggactgccaatgggccagtgaacacagaggtgaaagctaatggcccacacctctacagcagccctactgattccacggacccccggcgacttccaggcgctaacaccccactaccaggcctctcacaccggcaaggctggccccggcccctcacgccaccagcggctgggggccttcagaaccacaccgtcggcatcattgtgaagacagagaatgccactggccccagctcttgcccccagaggagtttggttcctgtcccaagcctgcccccttccattcccagctcttgtgccagcatcgagaacaccagcactttgcaaagaaagactgtccaatcacagataggacctccgttgacagattcaaggccactgggctcacccccaaacgccacccgggtgctcactcccccgcaagcagcaggagatggtatcttggccacaacagccaaccaacgattcagctcaccagcgccatcgtcagatggcaaggtcagccccggcacgttatccataggaagcgctttaaccgtaccctctttcccagccaactctactgccatggtggacctcaccaactcacttcgagcatttatggatgtcaatggagaaatcgagataaatatgctggacgagaagctgatcaagtttctggccttgcagagaatacatcagcttttcccctcccgggtccaaccttcaccgggcagtgtcgggacacatcagctggcttctggagggcaccacatagaagtgcaaagaaaggaggtacaggcccgagctgtgttctaccccctcttagggttgggaggagctgtgaacatgtgctatcgaaccctctacatcgggacaggagctgacatggatgtgtgccttacaaactatggtcactgtaactacgtgtccgggaaacatgcctgcatattctacgatgagaataccaaacattatgagctgttaaactacagtgagcatgggacaacggtggacaatgtgctgtattcatgtgacttctcggagaagaccccgccaacccccccaagcagtattgttgccaaagtgcagagtgtcatcaggcgccgccggcaccagaaacaggacgaagagccaagtgaggaggcagccatgatgagttcccaggcccaggggccgcagcggagaccctgcaattgcaaagccagcagctcgagcttgattgggggcagtggggccggctgggagggcacagccttactgcaccatggcagctacatcaagctgggctgcctgcagtttgtcttcagcatcactgagtttgcgaccaaacagcccaaaggcgatgccagcctgctgcaggatggggtcttggccgagaagctctctctcaagccccaccagggccctgtgctgcgctccaactctgttccttaggactggcggctaccccgccactggcctgtacacccacccaagactcctgcaatgcaaaaatgtacacaaaccaagcccgggtgttttctatactctaccagaaacccttcaactacaatctttgcatgaaatgaagaaaaccttttgactgttttttaaaaatcctttttcttttctcaagttctagggggcatttgcacatatatttgtactcaacatttcatgggaaagcggcagacctgagctgaggaacagcgtgggcagggagggaaagacccagggtctggacacttcctccaacacaaaacccttccccacccacctcctgctccctccccctcgcccaccattgtaaaataatcagaaacttgttctattttgtggcagtgacaatagttttatattaaaagaaaaaatacagttttcatacagcaaaatctatacaatatcattgttttatttaatataaagatcgctacccaccttccttccatggttcccaccctccacgttattttccctttctgcagcggttgcactacaggtagctactgtgtattatggacaaatgagaaatgaattctttttctggctgtccatctattttatttcaaataaggaaaagtgtatttggattttgtgtaaatacatctagtgatgacattttttcaatgtttttaaaaaccgtgtacagtactacatgtggtagagcgttttctcaaattgtctattgtagcaaaaatgtttttgtcgtaaacctgttttgtctcctttttttgttctcttgccacttctctcctcttcctcctgcccctggttccctcctctcctcccacccccacaaccagtaccaatgtacatagtaattgtaatgttttagactttacagaaactttcctgtattctgtatataaaaaacaaaaatacttcaaaaaat

SEQ ID NO: 352412 - DNA, 3065 bp, Homo sapiens
aagggaattcgtgctggtgctaagggaattcgtgctggtgctaagggaattcgtgctggtgctaagggaattcgtgctggtgctgaaccagaagaatatgacactgagcaatcggtgccaggtgtttgatcgtttccaggacaccgtttcgcagcatgtcgtcaaagtggacttcctgaaccgaatccacaagaagcacccccctaaccggcgtgtgctccagtcggtcaaaagaagaagcttgaaggttcctgatgctataaaatctcagtaccagtttccaccccctctcattgcacccgcggccattcgggacggggagctgatctgcaatgggatccctgaggaatcacagatgcaccttttgaactctgagcacttagccacccaagcagagcagcaagagtggctctgtagtgttgttgcgctccagtgcagcatattgaaacatttatctgctaagcagatgccttcgcattgggactctgaacagacagagaaggctgatattaagcctgttattgtgactgacagctcagtcaccacctccctgcaaacagctgacaagacacctacaccttcccactaccccttgtcctgcccctcagggattagcacccagaattccctgagctgctctccaccccaccagtccccagccctagaggacatcggctgcagttcttgtgcggaaaaatccaagaaaaccccttgtgggactgccaatgggccagtgaacacagaggtgaaagctaatggcccacacctctacagcagccctactgattccacggacccccggcgacttccaggcgctaacaccccactaccaggcctctcacaccggcaaggctggccccggcccctcacgccaccagcggctgggggccttcagaaccacaccgtcggcatcattgtgaagacagagaatgccactggccccagctcttgcccccagaggagtttggttcctgtcccaagcctgcccccttccattcccagctcttgtgccagcatcgagaacaccagcactttgcaaagaaagactgtccaatcacagataggacctccgttgacagattcaaggccactgggctcacccccaaacgccacccgggtgctcactcccccgcaagcagcaggagatggtatcttggccacaacagccaaccaacgattcagctcaccagcgccatcgtcagatggcaaggtcagccccggcacgttatccataggaagcgctttaaccgtaccctctttcccagccaactctactgccatggtggacctcaccaactcacttcgagcatttatggatgtcaatggagaaatcgagataaatatgctggacgagaagctgatcaagtttctggccttgcagagaatacatcagcttttcccctcccgggtccaaccttcaccgggcagtgtcgggacacatcagctggcttctggagggcaccacatagaagtgcaaagaaaggaggtacaggcccgagctgtgttctaccccctcttagggttgggaggagctgtgaacatgtgctatcgaaccctctacatcgggacaggagctgacatggatgtgtgccttacaaactatggtcactgtaactacgtgtccgggaaacatgcctgcatattctacgatgagaataccaaacattatgagctgttaaactacagtgagcatgggacaacggtggacaatgtgctgtattcatgtgacttctcggagaagaccccgccaacccccccaagcagtattgttgccaaagtgcagagtgtcatcaggcgccgccggcaccagaaacaggacgaagagccaagtgaggaggcagccatgatgagttcccaggcccaggggccgcagcggagaccctgcaattgcaaagccagcagctcgagcttgattgggggcagtggggccggctgggagggcacagccttactgcaccatggcagctacatcaagctgggctgcctgcagtttgtcttcagcatcactgagtttgcgaccaaacagcccaaaggcgatgccagcctgctgcaggatggggtcttggccgagaagctctctctcaagccccaccagggccctgtgctgcgctccaactctgttccttaggactggcggctaccccgccactggcctgtacacccacccaagactcctgcaatgcaaaaatgtacacaaaccaagcccgggtgttttctatactctaccagaaacccttcaactacaatctttgcatgaaatgaagaaaaccttttgactgttttttaaaaatcctttttcttttctcaagttctagggggcatttgcacatatatttgtactcaacatttcatgggaaagcggcagacctgagctgaggaacagcgtgggcagggagggaaagacccagggtctggacacttcctccaacacaaaacccttccccacccacctcctgctccctccccctcgcccaccattgtaaaataatcagaaacttgttctattttgtggcagtgacaatagttttatattaaaagaaaaaatacagttttcatacagcaaaatctatacaatatcattgttttatttaatataaagatcgctacccaccttccttccatggttcccaccctccacgttattttccctttctgcagcggttgcactacaggtagctactgtgtattatggacaaatgagaaatgaattctttttctggctgtccatctattttatttcaaataaggaaaagtgtatttggattttgtgtaaatacatctagtgatgacattttttcaatgtttttaaaaaccgtgtacagtactacatgtggtagagcgttttctcaaattgtctattgtagcaaaaatgtttttgtcgtaaacctgttttgtctcctttttttgttctcttgccacttctctcctcttcctcctgcccctggttccctcctctcctcccacccccacaaccagtaccaatgtacatagtaattgtaatgttttagactttacagaaactttcctgtattctgtatataaaaaacaaaaatacttcaaaaaat

SEQ ID NO: 352413 - DNA, 4666 bp, Homo sapiens
  misc_feature (96)..(96): n is a, c, g, or t
cttagtttgcacacaaacaccaatggatgaacagtccctagcttcctgcggctgcgccttgacccctacaagctttctcaagcgcctgcgcgaganctcaggtcccgcccttttgtctcagtgcgctggcgcagggcagaaaggtggggcttcggtcctccagacgaatgccagcgcggctgcgcgctggggggtactccctcaccgcggctgcgcgggagccaggccgccggctgtcactgcggttgcgcgcggcgagcgccgatcccggggcgcctgcgcgggtggctttgcgggcgctcgcggtaagtttgcgccaagtgcgcggcagccgggacgcagacggcggcggcggcgagaggcggagcccggggaccaccccccatcaccctccccccagtcacctcacgtaccacaacctcacgtaacctctcaccccccctccgatacccccagccccgggatggcagcgcccgccagccttcccggccggaccggctgtcgccagtgccggctttagcctgtgggactaggccccgccgaggcctgacccccggagccgggacccactgtgcagccagcagccgggccgggactgaggggccgctcccccctcgcggcccgtcgggaggacgctgtcgtcccggggactgggggccggggggtgggggggagccagggcgaggaagtcgggacccgtattgggaaaaaagcggggccggggtcaggagcgccccctcccctcacctcccccctccccccggggttgggggggccggagcagagagcacccagcccgggaggtggatgaatgtgggagaaaatggagaccaagacgatcgtgtacgacttggacacatcaggggggctgatggagcaaatccaagctctgctggctccccccaagacggacgaggcagaaaagcgcagtcggaagcctgagaaggagccccggagaagcggcagggccaccaaccacgacagctgcgatagctgcaaggaaggtggagatctcctgtgctgcgaccactgcccggctgccttccacctccagtgctgtaaccctccactgagtgaagaaatgttgcctcctggagagtggatgtgtcaccggtgcactgttcgccgaaagaaacgagagcagaaaaaggagctgggtcatgtcaatggactggtggacaaatctggcaaacggactacatcccccagcagtgacactgacttgttggacagatcggccagcaaaactgaactaaaggccattgcccatgcccggatcctggaaaggagagccagcaggcctggcacacccacatccagcgccagcacagagactcccacctctgagcagaatgatgtcgacgaagacatcattgacgtggatgaggaaccagtagcagcggagccagactatgtgcagccccagctgaggcggccctttgagctgctgattgctgccgccatggagcggaaccccacccaatttcagttgcccaatgaactgacttgtaccactgcactaccaggttctagcaagaggagaagaaaggaggaaaccacagggaaaaatgttaagaagacacagcatgaattagatcacaatggtctcgttcccttacccgtcaaagtctgcttcacgtgtaacaggagttgccgtgtggctcctctcatccagtgtgactattgccctctcctgtttcacatggattgcctcgagccgccgctcactgccatgcccctgggcagatggatgtgtccgaatcacatcgaacatgtggtgctgaaccagaagaatatgacactgagcaatcggtgccaggtgtttgatcgtttccaggacaccgtttcgcagcatgtcgtcaaagtggacttcctgaaccgaatccacaagaagcacccccctaaccggcgtgtgctccagtcggtcaaaagaagaagcttgaaggttcctgatgctataaaatctcagtaccagtttccaccccctctcattgcacccgcggccattcgggacggggagctgatctgcaatgggatccctgaggaatcacagatgcaccttttgaactctgagcacttagccacccaagcagagcagcaagagtggctctgtagtgttgttgcgctccagtgcagcatattgaaacatttatctgctaagcagatgccttcgcattgggactctgaacagacagagaaggctgatattaagcctgttattgtgactgacagctcagtcaccacctccctgcaaacagctgacaagacacctacaccttcccactaccccttgtcctgcccctcagggattagcacccagaattccctgagctgctctccaccccaccagtccccagccctagaggacatcggctgcagttcttgtgcggaaaaatccaagaaaaccccttgtgggactgccaatgggccagtgaacacagaggtgaaagctaatggcccacacctctacagcagccctactgattccacggacccccggcgacttccaggcgctaacaccccactaccaggcctctcacaccggcaaggctggccccggcccctcacgccaccagcggctgggggccttcagaaccacaccgtcggcatcattgtgaagacagagaatgccactggccccagctcttgcccccagaggagtttggttcctgtcccaagcctgcccccttccattcccagctcttgtgccagcatcgagaacaccagcactttgcaaagaaagactgtccaatcacagataggacctccgttgacagattcaaggccactgggctcacccccaaacgccacccgggtgctcactcccccgcaagcagcaggagatggtatcttggccacaacagccaaccaacgattcagctcaccagcgccatcgtcagccaactctactgccatggtggacctcaccaactcacttcgagcatttatggatgtcaatggagaaatcgagataaatatgctggacgagaagctgatcaagtttctggccttgcagagaatacatcagcttttcccctcccgggtccaaccttcaccgggcagtgtcgggacacatcagctggcttctggagggcaccacatagaagtgcaaagaaaggaggtacaggcccgagctgtgttctaccccctcttagggttgggaggagctgtgaacatgtgctatcgaaccctctacatcgggacagtcactgtaactacgtgtccgggaaacatgcctgcatattctacgatgagaataccaaacattatgagctgttaaactacagtgagcatgggacaacggtggacaatgtgctgtattcatgtgacttctcggagaagaccccgccaacccccccaagcagtattgttgccaaagtgcagagtgtcatcaggcgccgccggcaccagaaacaggacgaagagccaagtgaggaggcagccatgatgagttcccaggcccaggggccgcagcggagaccctgcaattgcaaagccagcagctcgagcttgattgggggcagtggggccggctgggagggcacagccttactgcaccatggcagctacatcaagctgggctgcctgcagtttgtcttcagcatcactgagtttgcgaccaaacagcccaaaggcgatgccagcctgctgcaggatggggtcttggccgagaagctctctctcaagccccaccagggccctgtgctgcgctccaactctgttccttaggactggcggctaccccgccactggcctgtacacccacccaagactcctgcaatgcaaaaatgtacacaaaccaagcccgggtgttttctatactctaccagaaacccttcaactacaatctttgcatgaaatgaagaaaaccttttgactgttttttaaaaatcctttttcttttctcaagttctagggggcatttgcacatatatttgtactcaacatttcatgggaaagcggcagacctgagctgaggaacagcgtgggcagggagggaaagacccagggtctggacacttcctccaacacaaaacccttccccacccacctcctgctccctccccctcgcccaccattgtaaaataatcagaaacttgttctattttgtggcagtgacaatagttttatattaaaagaaaaaatacagttttcatacagcaaaatctatacaatatcattgttttatttaatataaagatcgctacccaccttccttccatggttcccaccctccacgttattttccctttctgcagcggttgcactacaggtagctactgtgtattatggacaaatgagaaatgaattctttttctggctgtccatctattttatttcaaataaggaaaagtgtatttggattttgtgtaaatacatctagtgatgacattttttcaatgtttttaaaaaccgtgtacagtactacatgtggtagagcgttttctcaaattgtctattgtagcaaaaatgtttttgtcgtaaacctgttttgtctcctttttttgttctcttgccacttctctcctcttcctcctgcccctggttccctcctctcctcccacccccacaaccagtaccaatgtacatagtaattgtaatgttttagactttacagaaactttcctgtattctgtatataaaaaacaaaaatacttcaaaaaat

SEQ ID NO: 352414 - DNA, 2710 bp, Homo sapiens
gtaaggctgtcttgacgatcatcatccagctgagggagtagagctctgccccggttatctgctcgtccaggtgtcttgaatatatcattctgcctggattcctctaatagtctacgctgtcggcatgctaagctatgacagagaaccgtcgatatacacctgctgtgtgaatgaaacctgcgagtcaccacctccctgcaaacagctgacaagacacctacaccttcccactaccccttgtcctgcccctcagggattagcacccagaattccctgagctgctctccaccccaccagtccccagccctagaggacatcggctgcagttcttgtgcggaaaaatccaagaaaaccccttgtgggactgccaatgggccagtgaacacagaggtgaaagctaatggcccacacctctacagcagccctactgattccacggacccccggcgacttccaggcgctaacaccccactaccaggcctctcacaccggcaaggctggccccggcccctcacgccaccagcggctgggggccttcagaaccacaccgtcggcatcattgtgaagacagagaatgccactggccccagctcttgcccccagaggagtttggttcctgtcccaagcctgcccccttccattcccagctcttgtgccagcatcgagaacaccagcactttgcaaagaaagactgtccaatcacagataggacctccgttgacagattcaaggccactgggctcacccccaaacgccacccgggtgctcactcccccgcaagcagcaggagatggtatcttggccacaacagccaaccaacgattcagctcaccagcgccatcgtcagatggcaaggtcagccccggcacgttatccataggaagcgctttaaccgtaccctctttcccagccaactctactgccatggtggacctcaccaactcacttcgagcatttatggatgtcaatggagaaatcgagataaatatgctggacgagaagctgatcaagtttctggccttgcagagaatacatcagcttttcccctcccgggtccaaccttcaccgggcagtgtcgggacacatcagctggcttctggagggcaccacatagaagtgcaaagaaaggaggtacaggcccgagctgtgttctaccccctcttagggttgggaggagctgtgaacatgtgctatcgaaccctctacatcgggacaggagctgacatggatgtgtgccttacaaactatggtcactgtaactacgtgtccgggaaacatgcctgcatattctacgatgagaataccaaacattatgagctgttaaactacagtgagcatgggacaacggtggacaatgtgctgtattcatgtgacttctcggagaagaccccgccaacccccccaagcagtattgttgccaaagtgcagagtgtcatcaggcgccgccggcaccagaaacaggacgaagagccaagtgaggaggcagccatgatgagttcccaggcccaggggccgcagcggagaccctgcaattgcaaagccagcagctcgagcttgattgggggcagtggggccggctgggagggcacagccttactgcaccatggcagctacatcaagctgggctgcctgcagtttgtcttcagcatcactgagtttgcgaccaaacagcccaaaggcgatgccagcctgctgcaggatggggtcttggccgagaagctctctctcaagccccaccagggccctgtgctgcgctccaactctgttccttaggactggcggctaccccgccactggcctgtacacccacccaagactcctgcaatgcaaaaatgtacacaaaccaagcccgggtgttttctatactctaccagaaacccttcaactacaatctttgcatgaaatgaagaaaaccttttgactgttttttaaaaatcctttttcttttctcaagttctagggggcatttgcacatatatttgtactcaacatttcatgggaaagcggcagacctgagctgaggaacagcgtgggcagggagggaaagacccagggtctggacacttcctccaacacaaaacccttccccacccacctcctgctccctccccctcgcccaccattgtaaaataatcagaaacttgttctattttgtggcagtgacaatagttttatattaaaagaaaaaatacagttttcatacagcaaaatctatacaatatcattgttttatttaatataaagatcgctacccaccttccttccatggttcccaccctccacgttattttccctttctgcagcggttgcactacaggtagctactgtgtattatggacaaatgagaaatgaattctttttctggctgtccatctattttatttcaaataaggaaaagtgtatttggattttgtgtaaatacatctagtgatgacattttttcaatgtttttaaaaaccgtgtacagtactacatgtggtagagcgttttctcaaattgtctattgtagcaaaaatgtttttgtcgtaaacctgttttgtctcctttttttgttctcttgccacttctctcctcttcctcctgcccctggttccctcctctcctcccacccccacaaccagtaccaatgtacatagtaattgtaatgttttagactttacagaaactttcctgtattctgtatataaaaaacaaaaatacttcaaaaaat

SEQ ID NO: 352415 - DNA, 2541 bp, Homo sapiens
gtacggaatcagtagggctgctgtagaggtgtgggccattagctttcacctctgtgatcactggcccattgggagtcccacaagggattagcacccagaattccctgagctgctctccaccccaccagtccccagccctagaggacatcggctgcagttcttgtgcggaaaaatccaagaaaaccccttgtgggactgccaatgggccagtgaacacagaggtgaaagctaatggcccacacctctacagcagccctactgattccacggacccccggcgacttccaggcgctaacaccccactaccaggcctctcacaccggcaaggctggccccggcccctcacgccaccagcggctgggggccttcagaaccacaccgtcggcatcattgtgaagacagagaatgccactggccccagctcttgcccccagaggagtttggttcctgtcccaagcctgcccccttccattcccagctcttgtgccagcatcgagaacaccagcactttgcaaagaaagactgtccaatcacagataggacctccgttgacagattcaaggccactgggctcacccccaaacgccacccgggtgctcactcccccgcaagcagcaggagatggtatcttggccacaacagccaaccaacgattcagctcaccagcgccatcgtcagatggcaaggtcagccccggcacgttatccataggaagcgctttaaccgtaccctctttcccagccaactctactgccatggtggacctcaccaactcacttcgagcatttatggatgtcaatggagaaatcgagataaatatgctggacgagaagctgatcaagtttctggccttgcagagaatacatcagcttttcccctcccgggtccaaccttcaccgggcagtgtcgggacacatcagctggcttctggagggcaccacatagaagtgcaaagaaaggaggtacaggcccgagctgtgttctaccccctcttagggttgggaggagctgtgaacatgtgctatcgaaccctctacatcgggacaggagctgacatggatgtgtgccttacaaactatggtcactgtaactacgtgtccgggaaacatgcctgcatattctacgatgagaataccaaacattatgagctgttaaactacagtgagcatgggacaacggtggacaatgtgctgtattcatgtgacttctcggagaagaccccgccaacccccccaagcagtattgttgccaaagtgcagagtgtcatcaggcgccgccggcaccagaaacaggacgaagagccaagtgaggaggcagccatgatgagttcccaggcccaggggccgcagcggagaccctgcaattgcaaagccagcagctcgagcttgattgggggcagtggggccggctgggagggcacagccttactgcaccatggcagctacatcaagctgggctgcctgcagtttgtcttcagcatcactgagtttgcgaccaaacagcccaaaggcgatgccagcctgctgcaggatggggtcttggccgagaagctctctctcaagccccaccagggccctgtgctgcgctccaactctgttccttaggactggcggctaccccgccactggcctgtacacccacccaagactcctgcaatgcaaaaatgtacacaaaccaagcccgggtgttttctatactctaccagaaacccttcaactacaatctttgcatgaaatgaagaaaaccttttgactgttttttaaaaatcctttttcttttctcaagttctagggggcatttgcacatatatttgtactcaacatttcatgggaaagcggcagacctgagctgaggaacagcgtgggcagggagggaaagacccagggtctggacacttcctccaacacaaaacccttccccacccacctcctgctccctccccctcgcccaccattgtaaaataatcagaaacttgttctattttgtggcagtgacaatagttttatattaaaagaaaaaatacagttttcatacagcaaaatctatacaatatcattgttttatttaatataaagatcgctacccaccttccttccatggttcccaccctccacgttattttccctttctgcagcggttgcactacaggtagctactgtgtattatggacaaatgagaaatgaattctttttctggctgtccatctattttatttcaaataaggaaaagtgtatttggattttgtgtaaatacatctagtgatgacattttttcaatgtttttaaaaaccgtgtacagtactacatgtggtagagcgttttctcaaattgtctattgtagcaaaaatgtttttgtcgtaaacctgttttgtctcctttttttgttctcttgccacttctctcctcttcctcctgcccctggttccctcctctcctcccacccccacaaccagtaccaatgtacatagtaattgtaatgttttagactttacagaaactttcctgtattctgtatataaaaaacaaaaatacttcaaaaaat

SEQ ID NO: 352416 - DNA, 1500 bp, Homo sapiens
ggctggcgccgcgcggtgggtggctgcgattggggggggagggagtcgaataagaggcgggacatcttatctcccctcctcctcctcagaataccaaacattatgagctgttaaactacagtgagcatgggacaacggtggacaatgtgctgtattcatgtgacttctcggagaagaccccgccaacccccccaagcagtattgttgccaaagtgcagagtgtcatcaggcgccgccggcaccagaaacaggacgaagagccaagtgaggaggcagccatgatgagttcccaggcccaggggccgcagcggagaccctgcaattgcaaagccagcagctcgagcttgattgggggcagtggggccggctgggagggcacagccttactgcaccatggcagctacatcaagctgggctgcctgcagtttgtcttcagcatcactgagtttgcgaccaaacagcccaaaggcgatgccagcctgctgcaggatggggtcttggccgagaagctctctctcaagccccaccagggccctgtgctgcgctccaactctgttccttaggactggcggctaccccgccactggcctgtacacccacccaagactcctgcaatgcaaaaatgtacacaaaccaagcccgggtgttttctatactctaccagaaacccttcaactacaatctttgcatgaaatgaagaaaaccttttgactgttttttaaaaatcctttttcttttctcaagttctagggggcatttgcacatatatttgtactcaacatttcatgggaaagcggcagacctgagctgaggaacagcgtgggcagggagggaaagacccagggtctggacacttcctccaacacaaaacccttccccacccacctcctgctccctccccctcgcccaccattgtaaaataatcagaaacttgttctattttgtggcagtgacaatagttttatattaaaagaaaaaatacagttttcatacagcaaaatctatacaatatcattgttttatttaatataaagatcgctacccaccttccttccatggttcccaccctccacgttattttccctttctgcagcggttgcactacaggtagctactgtgtattatggacaaatgagaaatgaattctttttctggctgtccatctattttatttcaaataaggaaaagtgtatttggattttgtgtaaatacatctagtgatgacattttttcaatgtttttaaaaaccgtgtacagtactacatgtggtagagcgttttctcaaattgtctattgtagcaaaaatgtttttgtcgtaaacctgttttgtctcctttttttgttctcttgccacttctctcctcttcctcctgcccctggttccctcctctcctcccacccccacaaccagtaccaatgtacatagtaattgtaatgttttagactttacagaaactttcctgtattctgtatataaaaaacaaaaatacttcaaaaaat

SEQ ID NO: 352417 - DNA, 965 bp, Homo sapiens
gatcagtggggctgatggagcaaatccaagctctgctggctccccccaagacggacgaggcagaaaagcgcagtcggaagcctgagaaggagccccggagaagcggcagggccaccaaccacgacagctgcgatagctgcaaggaaggtggagatctcctgtgctgcgaccactgcccggctgccttccacctccagtgctgtaaccctccactgagtgaagaaatgttgcctcctggagagtggatgtgtcaccggtgcactgttcgccgaaagccctggaatcaccccactcttcccatggtgactgtttggaatccagtagggcctaaaaatccaaacatgggctgctgaaatgggcagaagagaaacgagagcagaaaaaggagctgggtcatgtcaatggactggtggacaaatctggcaaacggactacatcccccagcagtgacactgacttgttggacagatcggccagcaaaactgaactaaaggccattgcccatgcccggatcctggaaaggagagccagcaggcctggcacacccacatccagcgccagcacagagactcccacctctgagcagaatgatgtcgacgaagacatcattgacgtggatgaggaaccagtagcagcggagccagactatgtgcagccccagctgaggcggccctttgagctgctgattgctgccgccatggagcggaaccccacccaatttcagttgcccaatgaactgacttgtaccactgcactaccaggtcagccaaaccatcatcatatcccttcccaaccccagtttccccaaaggaccagcacaagagcagtgctgcctgtggagtcactgttcatgtagctactgtcttgggttcctgttcctagttctgcttggagagatctttgaaggtcttagccattacagagcttactcagttttccattttctcagtttctgaacttctttc

SEQ ID NO: 352418 - DNA, 470 bp, Homo sapiens
ttgcctcctggagagtggatgtgtcaccggtgcactgttcgccgaaaggtaataatgctgctttctgaagactgtccagaaagcctgatccagagcactgatatgctagagctaagacggcctagccctgaaggcattcttgtcccttcttcttgtctcttccagccctggaatcaccccactcttcccatggtgactgtttggaatccagtagggcctaaaaatccaaacatgggctgctgaaatgggcagaagaggtgtgttaacttactgagccatgtttagtcactagtgacaggagtagtcttaccttcttgttgtcctcctaataagtggccttatccatggctgaaaaacaaaggctgcttctccagcttgatggaaaatggagttttctctcaccccagggcaaataagtcactggtatccagagacttggcatactgacggagaggattttgaacgcattt

SEQ ID NO: 352419 - DNA, 3238 bp, Homo sapiens
  misc_feature (96)..(96): n is a, c, g, or t
cttagtttgcacacaaacaccaatggatgaacagtccctagcttcctgcggctgcgccttgacccctacaagctttctcaagcgcctgcgcgaganctcaggtcccgcccttttgtctcagtgcgctggcgcagggcagaaaggtggggcttcggtcctccagacgaatgccagcgcggctgcgcgctggggggtactccctcaccgcggctgcgcgggagccaggccgccggctgtcactgcggttgcgcgcggcgagcgccgatcccggggcgcctgcgcgggtggctttgcgggcgctcgcggtaagtttgcgccaagtgcgcggcagccgggacgcagacggcggcggcggcgagaggcggagcccggggaccaccccccatcaccctccccccagtcacctcacgtaccacaacctcacgtaacctctcaccccccctccgatacccccagccccgggatggcagcgcccgccagccttcccggccggaccggctgtcgccagtgccggctttagcctgtgggactaggccccgccgaggcctgacccccggagccgggacccactgtgcagccagcagccgggccgggactgaggggccgctcccccctcgcggcccgtcgggaggacgctgtcgtcccggggactgggggccggggggtgggggggagccagggcgaggaagtcgggacccgtattgggaaaaaagcggggccggggtcaggagcgccccctcccctcacctcccccctccccccggggttgggggggccggagcagagagcacccagcccgggaggtggatgaatgtgggagaaaatggagaccaagacgatcgtgtacgacttggacacatcaggggggctgatggagcaaatccaagctctgctggctccccccaagacggacgaggcagaaaagcgcagtcggaagcctgagaaggagccccggagaagcggcagggccaccaaccacgacagctgcgatagctgcaaggaaggtggagatctcctgtgctgcgaccactgcccggctgccttccacctccagtgctgtaaccctccactgagtgaagaaatgttgcctcctggagagtggatgtgtcaccggtgcactgttcgccgaaagaaacgagagcagaaaaaggagctgggtcatgtcaatggactggtggacaaatctggcaaacggactacatcccccagcagtgacactgacttgttggacagatcggccagcaaaactgaactaaaggccattgcccatgcccggatcctggaaaggagagccagcaggcctggcacacccacatccagcgccagcacagagactcccacctctgagcagaatgatgtcgacgaagacatcattgacgtggatgaggaaccagtagcagcggagccagactatgtgcagccccagctgaggcggccctttgagctgctgattgctgccgccatggagcggaaccccacccaatttcagttgcccaatgaactgacttgtaccactgcactaccaggttctagcaagaggagaagaaaggaggaaaccacagggaaaaatgttaagaagacacagcatgaattagatcacaatggtctcgttcccttacccgtcaaagtctgcttcacgtgtaacaggagttgccgtgtggctcctctcatccagtgtgactattgccctctcctgtttcacatggattgcctcgagccgccgctcactgccatgcccctgggcagatggatgtgtccgaatcacatcgaacatgtggtgctgaaccagaagaatatgacactgagcaatcggtgccaggtgtttgatcgtttccaggacaccgtttcgcagcatgtcgtcaaagtggacttcctgaaccgaatccacaagaagcacccccctaaccggcgtgtgctccagtcggtcaaaagaagaagcttgaaggttcctgatgctataaaatctcagtaccagtttccaccccctctcattgcacccgcggccattcgggacggggagctgatctgcaatgggatccctgaggaatcacagatgcaccttttgaactctgagcacttagccacccaagcagagcagcaagagtggctctgtagtgttgttgcgctccagtgcagcatattgaaacatttatctgctaagcagatgccttcgcattgggactctgaacagacagagaaggctgatattaagcctgttattgtgactgacagctcagtcaccacctccctgcaaacagctgacaagacacctacaccttcccactaccccttgtcctgcccctcagggattagcacccagaattccctgagctgctctccaccccaccagtccccagccctagaggacatcggctgcagttcttgtgcggaaaaatccaagaaaaccccttgtgggactgccaatgggccagtgaacacagaggtgaaagctaatggcccacacctctacagcagccctactgattccacggacccccggcgacttccaggcgctaacaccccactaccaggcctctcacaccggcaaggctggccccggcccctcacgccaccagcggctgggggccttcagaaccacaccgtcggcatcattgtgaagacagagaatgccactggccccagctcttgcccccagaggagtttggttcctgtcccaagcctgcccccttccattcccagctcttgtgccagcatcgagaacaccagcactttgcaaagaaagactgtccaatcacagataggacctccgttgacagattcaaggccactgggctcacccccaaacgccacccgggtgctcactcccccgcaagcagcaggagatggtatcttggccacaacagccaaccaacgattcagctcaccagcgccatcgtcaggtgagtgctgctcagccttgggttgatttggaataattttatgctctttctggcaaataagattctaaaagcacttatatccctgtgaatacttcagaggactttggcctttgtattgtttgtcttactctcatttccgtaatagaagaggaagcacatgttaacttgtcccgtttataaatgggactgcttaggctctgaaagcttcagtgatttccttaaaatgacctactgagtcagtggcaggattggaaccacagcccaggtctcctgactccatcccataccttccaggcctaggcctctgcctgttttgttctgtcaccttaaaagaaggc

SEQ ID NO: 352420 - DNA, 4369 bp, Homo sapiens
  misc_feature (96)..(96): n is a, c, g, or t
cttagtttgcacacaaacaccaatggatgaacagtccctagcttcctgcggctgcgccttgacccctacaagctttctcaagcgcctgcgcgaganctcaggtcccgcccttttgtctcagtgcgctggcgcagggcagaaaggtggggcttcggtcctccagacgaatgccagcgcggctgcgcgctggggggtactccctcaccgcggctgcgcgggagccaggccgccggctgtcactgcggttgcgcgcggcgagcgccgatcccggggcgcctgcgcgggtggctttgcgggcgctcgcggtaagtttgcgccaagtgcgcggcagccgggacgcagacggcggcggcggcgagaggcggagcccggggaccaccccccatcaccctccccccagtcacctcacgtaccacaacctcacgtaacctctcaccccccctccgatacccccagccccgggatggcagcgcccgccagccttcccggccggaccggctgtcgccagtgccggctttagcctgtgggactaggccccgccgaggcctgacccccggagccgggacccactgtgcagccagcagccgggccgggactgaggggccgctcccccctcgcggcccgtcgggaggacgctgtcgtcccggggactgggggccggggggtgggggggagccagggcgaggaagtcgggacccgtattgggaaaaaagcggggccggggtcaggagcgccccctcccctcacctcccccctccccccggggttgggggggccggagcagagagcacccagcccgggaggtggatgaatgtgggagaaaatggagaccaagacgatcgtgtacgacttggacacatcaggggggctgatggagcaaatccaagctctgctggctccccccaagacggacgaggcagaaaagcgcagtcggaagcctgagaaggagccccggagaagcggcagggccaccaaccacgacagctgcgatagctgcaaggaaggtggagatctcctgtgctgcgaccactgcccggctgccttccacctccagtgctgtaaccctccactgagtgaagaaatgttgcctcctggagagtggatgtgtcaccggtgcactgttcgccgaaaggttctagcaagaggagaagaaaggaggaaaccacagggaaaaatgttaagaagacacagcatgaattagatcacaatggtctcgttcccttacccgtcaaagtctgcttcacgtgtaacaggagttgccgtgtggctcctctcatccagtgtgactattgccctctcctgtttcacatggattgcctcgagccgccgctcactgccatgcccctgggcagatggatgtgtccgaatcacatcgaacatgtggtgctgaaccagaagaatatgacactgagcaatcggtgccaggtgtttgatcgtttccaggacaccgtttcgcagcatgtcgtcaaagtggacttcctgaaccgaatccacaagaagcacccccctaaccggcgtgtgctccagtcggtcaaaagaagaagcttgaaggttcctgatgctataaaatctcagtaccagtttccaccccctctcattgcacccgcggccattcgggacggggagctgatctgcaatgggatccctgaggaatcacagatgcaccttttgaactctgagcacttagccacccaagcagagcagcaagagtggctctgtagtgttgttgcgctccagtgcagcatattgaaacatttatctgctaagcagatgccttcgcattgggactctgaacagacagagaaggctgatattaagcctgttattgtgactgacagctcagtcaccacctccctgcaaacagctgacaagacacctacaccttcccactaccccttgtcctgcccctcagggattagcacccagaattccctgagctgctctccaccccaccagtccccagccctagaggacatcggctgcagttcttgtgcggaaaaatccaagaaaaccccttgtgggactgccaatgggccagtgaacacagaggtgaaagctaatggcccacacctctacagcagccctactgattccacggacccccggcgacttccaggcgctaacaccccactaccaggcctctcacaccggcaaggctggccccggcccctcacgccaccagcggctgggggccttcagaaccacaccgtcggcatcattgtgaagacagagaatgccactggccccagctcttgcccccagaggagtttggttcctgtcccaagcctgcccccttccattcccagctcttgtgccagcatcgagaacaccagcactttgcaaagaaagactgtccaatcacagataggacctccgttgacagattcaaggccactgggctcacccccaaacgccacccgggtgctcactcccccgcaagcagcaggagatggtatcttggccacaacagccaaccaacgattcagctcaccagcgccatcgtcagatggcaaggtcagccccggcacgttatccataggaagcgctttaaccgtaccctctttcccagccaactctactgccatggtggacctcaccaactcacttcgagcatttatggatgtcaatggagaaatcgagataaatatgctggacgagaagctgatcaagtttctggccttgcagagaatacatcagcttttcccctcccgggtccaaccttcaccgggcagtgtcgggacacatcagctggcttctggagggcaccacatagaagtgcaaagaaaggaggtacaggcccgagctgtgttctaccccctcttagggttgggaggagctgtgaacatgtgctatcgaaccctctacatcgggacaggagctgacatggatgtgtgccttacaaactatggtcactgtaactacgtgtccgggaaacatgcctgcatattctacgatgagaataccaaacattatgagctgttaaactacagtgagcatgggacaacggtggacaatgtgctgtattcatgtgacttctcggagaagaccccgccaacccccccaagcagtattgttgccaaagtgcagagtgtcatcaggcgccgccggcaccagaaacaggacgaagagccaagtgaggaggcagccatgatgagttcccaggcccaggggccgcagcggagaccctgcaattgcaaagccagcagctcgagcttgattgggggcagtggggccggctgggagggcacagccttactgcaccatggcagctacatcaagctgggctgcctgcagtttgtcttcagcatcactgagtttgcgaccaaacagcccaaaggcgatgccagcctgctgcaggatggggtcttggccgagaagctctctctcaagccccaccagggccctgtgctgcgctccaactctgttccttaggactggcggctaccccgccactggcctgtacacccacccaagactcctgcaatgcaaaaatgtacacaaaccaagcccgggtgttttctatactctaccagaaacccttcaactacaatctttgcatgaaatgaagaaaaccttttgactgttttttaaaaatcctttttcttttctcaagttctagggggcatttgcacatatatttgtactcaacatttcatgggaaagcggcagacctgagctgaggaacagcgtgggcagggagggaaagacccagggtctggacacttcctccaacacaaaacccttccccacccacctcctgctccctccccctcgcccaccattgtaaaataatcagaaacttgttctattttgtggcagtgacaatagttttatattaaaagaaaaaatacagttttcatacagcaaaatctatacaatatcattgttttatttaatataaagatcgctacccaccttccttccatggttcccaccctccacgttattttccctttctgcagcggttgcactacaggtagctactgtgtattatggacaaatgagaaatgaattctttttctggctgtccatctattttatttcaaataaggaaaagtgtatttggattttgtgtaaatacatctagtgatgacattttttcaatgtttttaaaaaccgtgtacagtactacatgtggtagagcgttttctcaaattgtctattgtagcaaaaatgtttttgtcgtaaacctgttttgtctcctttttttgttctcttgccacttctctcctcttcctcctgcccctggttccctcctctcctcccacccccacaaccagtaccaatgtacatagtaattgtaatgttttagactttacagaaactttcctgtattctgtatataaaaaacaaaaatacttcaaaaaat

SEQ ID NO: 352421 - DNA, 3042 bp, Homo sapiens
taaagtgcgcacttctatgacatgatatacatccacatttttgcgcagccatgaccaccatccatctcttaaactttttctttcccatctgaagtctctgtactcatagagcgctgattccgtactccccacccctgcagcagacaacagcataccagggcagaatcaactagacatgttggaactatctccctctccttcctccttctatctatcctgaacaggttcctgatgctataaaatctcagtaccagtttccaccccctctcattgcacccgcggccattcgggacggggagctgatctgcaatgggatccctgaggaatcacagatgcaccttttgaactctgagcacttagccacccaagcagagcagcaagagtggctctgtagtgttgttgcgctccagtgcagcatattgaaacatttatctgctaagcagatgccttcgcattgggactctgaacagacagagaaggctgatattaagcctgttattgtgactgacagctcagtcaccacctccctgcaaacagctgacaagacacctacaccttcccactaccccttgtcctgcccctcagggattagcacccagaattccctgagctgctctccaccccaccagtccccagccctagaggacatcggctgcagttcttgtgcggaaaaatccaagaaaaccccttgtgggactgccaatgggccagtgaacacagaggtgaaagctaatggcccacacctctacagcagccctactgattccacggacccccggcgacttccaggcgctaacaccccactaccaggcctctcacaccggcaaggctggccccggcccctcacgccaccagcggctgggggccttcagaaccacaccgtcggcatcattgtgaagacagagaatgccactggccccagctcttgcccccagaggagtttggttcctgtcccaagcctgcccccttccattcccagctcttgtgccagcatcgagaacaccagcactttgcaaagaaagactgtccaatcacagataggacctccgttgacagattcaaggccactgggctcacccccaaacgccacccgggtgctcactcccccgcaagcagcaggagatggtatcttggccacaacagccaaccaacgattcagctcaccagcgccatcgtcagatggcaaggtcagccccggcacgttatccataggaagcgctttaaccgtaccctctttcccagccaactctactgccatggtggacctcaccaactcacttcgagcatttatggatgtcaatggagaaatcgagataaatatgctggacgagaagctgatcaagtttctggccttgcagagaatacatcagcttttcccctcccgggtccaaccttcaccgggcagtgtcgggacacatcagctggcttctggagggcaccacatagaagtgcaaagaaaggaggtacaggcccgagctgtgttctaccccctcttagggttgggaggagctgtgaacatgtgctatcgaaccctctacatcgggacaggagctgacatggatgtgtgccttacaaactatggtcactgtaactacgtgtccgggaaacatgcctgcatattctacgatgagaataccaaacattatgagctgttaaactacagtgagcatgggacaacggtggacaatgtgctgtattcatgtgacttctcggagaagaccccgccaacccccccaagcagtattgttgccaaagtgcagagtgtcatcaggcgccgccggcaccagaaacaggacgaagagccaagtgaggaggcagccatgatgagttcccaggcccaggggccgcagcggagaccctgcaattgcaaagccagcagctcgagcttgattgggggcagtggggccggctgggagggcacagccttactgcaccatggcagctacatcaagctgggctgcctgcagtttgtcttcagcatcactgagtttgcgaccaaacagcccaaaggcgatgccagcctgctgcaggatggggtcttggccgagaagctctctctcaagccccaccagggccctgtgctgcgctccaactctgttccttaggactggcggctaccccgccactggcctgtacacccacccaagactcctgcaatgcaaaaatgtacacaaaccaagcccgggtgttttctatactctaccagaaacccttcaactacaatctttgcatgaaatgaagaaaaccttttgactgttttttaaaaatcctttttcttttctcaagttctagggggcatttgcacatatatttgtactcaacatttcatgggaaagcggcagacctgagctgaggaacagcgtgggcagggagggaaagacccagggtctggacacttcctccaacacaaaacccttccccacccacctcctgctccctccccctcgcccaccattgtaaaataatcagaaacttgttctattttgtggcagtgacaatagttttatattaaaagaaaaaatacagttttcatacagcaaaatctatacaatatcattgttttatttaatataaagatcgctacccaccttccttccatggttcccaccctccacgttattttccctttctgcagcggttgcactacaggtagctactgtgtattatggacaaatgagaaatgaattctttttctggctgtccatctattttatttcaaataaggaaaagtgtatttggattttgtgtaaatacatctagtgatgacattttttcaatgtttttaaaaaccgtgtacagtactacatgtggtagagcgttttctcaaattgtctattgtagcaaaaatgtttttgtcgtaaacctgttttgtctcctttttttgttctcttgccacttctctcctcttcctcctgcccctggttccctcctctcctcccacccccacaaccagtaccaatgtacatagtaattgtaatgttttagactttacagaaactttcctgtattctgtatataaaaaacaaaaatacttcaaaaaat

SEQ ID NO: 352422 - DNA, 4729 bp, Homo sapiens
  misc_feature (96)..(96): n is a, c, g, or t
cttagtttgcacacaaacaccaatggatgaacagtccctagcttcctgcggctgcgccttgacccctacaagctttctcaagcgcctgcgcgaganctcaggtcccgcccttttgtctcagtgcgctggcgcagggcagaaaggtggggcttcggtcctccagacgaatgccagcgcggctgcgcgctggggggtactccctcaccgcggctgcgcgggagccaggccgccggctgtcactgcggttgcgcgcggcgagcgccgatcccggggcgcctgcgcgggtggctttgcgggcgctcgcggtaagtttgcgccaagtgcgcggcagccgggacgcagacggcggcggcggcgagaggcggagcccggggaccaccccccatcaccctccccccagtcacctcacgtaccacaacctcacgtaacctctcaccccccctccgatacccccagccccgggatggcagcgcccgccagccttcccggccggaccggctgtcgccagtgccggctttagcctgtgggactaggccccgccgaggcctgacccccggagccgggacccactgtgcagccagcagccgggccgggactgaggggccgctcccccctcgcggcccgtcgggaggacgctgtcgtcccggggactgggggccggggggtgggggggagccagggcgaggaagtcgggacccgtattgggaaaaaagcggggccggggtcaggagcgccccctcccctcacctcccccctccccccggggttgggggggccggagcagagagcacccagcccgggaggtggatgaatgtgggagaaaatggagaccaagacgatcgtgtacgacttggacacatcaggggggctgatggagcaaatccaagctctgctggctccccccaagacggacgaggcagaaaagcgcagtcggaagcctgagaaggagccccggagaagcggcagggccaccaaccacgacagctgcgatagctgcaaggaaggtggagatctcctgtgctgcgaccactgcccggctgccttccacctccagtgctgtaaccctccactgagtgaagaaatgttgcctcctggagagtggatgtgtcaccggtgcactgttcgccgaaagaaacgagagcagaaaaaggagctgggtcatgtcaatggactggtggacaaatctggcaaacggactacatcccccagcagtgacactgacttgttggacagatcggccagcaaaactgaactaaaggccattgcccatgcccggatcctggaaaggagagccagcaggcctggcacacccacatccagcgccagcacagagactcccacctctgagcagaatgatgtcgacgaagacatcattgacgtggatgaggaaccagtagcagcggagccagactatgtgcagccccagctgaggcggccctttgagctgctgattgctgccgccatggagcggaaccccacccaatttcagttgcccaatgaactgacttgtaccactgcactaccaggttctagcaagaggagaagaaaggaggaaaccacagggaaaaatgttaagaagacacagcatgaattagatcacaatggtctcgttcccttacccgtcaaagtctgcttcacgtgtaacaggagttgccgtgtggctcctctcatccagtgtgactattgccctctcctgtttcacatggattgcctcgagccgccgctcactgccatgcccctgggcagatggatgtgtccgaatcacatcgaacatgtggtgctgaaccagaagaatatgacactgagcaatcggtgccaggtgtttgatcgtttccaggacaccgtttcgcagcatgtcgtcaaagtggacttcctgaaccgaatccacaagaagcacccccctaaccggcgtgtgctccagtcggtcaaaagaagaagcttgaaggttcctgatgctataaaatctcagtaccagtttccaccccctctcattgcacccgcggccattcgggacggggagctgatctgcaatgggatccctgaggaatcacagatgcaccttttgaactctgagcacttagccacccaagcagagcagcaagagtggctctgtagtgttgttgcgctccagtgcagcatattgaaacatttatctgctaagcagatgccttcgcattgggactctgaacagacagagaaggctgatattaagcctgttattgtgactgacagctcagtcaccacctccctgcaaacagctgacaagacacctacaccttcccactaccccttgtcctgcccctcagggattagcacccagaattccctgagctgctctccaccccaccagtccccagccctagaggacatcggctgcagttcttgtgcggaaaaatccaagaaaaccccttgtgggactgccaatgggccagtgaacacagaggtgaaagctaatggcccacacctctacagcagccctactgattccacggacccccggcgacttccaggcgctaacaccccactaccaggcctctcacaccggcaaggctggccccggcccctcacgccaccagcggctgggggccttcagaaccacaccgtcggcatcattgtgaagacagagaatgccactggccccagctcttgcccccagaggagtttggttcctgtcccaagcctgcccccttccattcccagctcttgtgccagcatcgagaacaccagcactttgcaaagaaagactgtccaatcacagataggacctccgttgacagattcaaggccactgggctcacccccaaacgccacccgggtgctcactcccccgcaagcagcaggagatggtatcttggccacaacagccaaccaacgattcagctcaccagcgccatcgtcagatggcaaggtcagccccggcacgttatccataggaagcgctttaaccgtaccctctttcccagccaactctactgccatggtggacctcaccaactcacttcgagcatttatggatgtcaatggagaaatcgagataaatatgctggacgagaagctgatcaagtttctggccttgcagagaatacatcagcttttcccctcccgggtccaaccttcaccgggcagtgtcgggacacatcagctggcttctggagggcaccacatagaagtgcaaagaaaggaggtacaggcccgagctgtgttctaccccctcttagggttgggaggagctgtgaacatgtgctatcgaaccctctacatcgggacagtcactgtaactacgtgtccgggaaacatgcctgcatattctacgatgagaataccaaacattatgagctgttaaactacagtgagcatgggacaacggtggacaatgtgctgtattcatgtgacttctcggagaagaccccgccaacccccccaagcagtattgttgccaaagtgcagagtgtcatcaggcgccgccggcaccagaaacaggacgaagagccaagtgaggaggcagccatgatgagttcccaggcccaggggccgcagcggagaccctgcaattgcaaagccagcagctcgagcttgattgggggcagtggggccggctgggagggcacagccttactgcaccatggcagctacatcaagctgggctgcctgcagtttgtcttcagcatcactgagtttgcgaccaaacagcccaaaggcgatgccagcctgctgcaggatggggtcttggccgagaagctctctctcaagccccaccagggccctgtgctgcgctccaactctgttccttaggactggcggctaccccgccactggcctgtacacccacccaagactcctgcaatgcaaaaatgtacacaaaccaagcccgggtgttttctatactctaccagaaacccttcaactacaatctttgcatgaaatgaagaaaaccttttgactgttttttaaaaatcctttttcttttctcaagttctagggggcatttgcacatatatttgtactcaacatttcatgggaaagcggcagacctgagctgaggaacagcgtgggcagggagggaaagacccagggtctggacacttcctccaacacaaaacccttccccacccacctcctgctccctccccctcgcccaccattgtaaaataatcagaaacttgttctattttgtggcagtgacaatagttttatattaaaagaaaaaatacagttttcatacagcaaaatctatacaatatcattgttttatttaatataaagatcgctacccaccttccttccatggttcccaccctccacgttattttccctttctgcagcggttgcactacaggtagctactgtgtattatggacaaatgagaaatgaattctttttctggctgtccatctattttatttcaaataaggaaaagtgtatttggattttgtgtaaatacatctagtgatgacattttttcaatgtttttaaaaaccgtgtacagtactacatgtggtagagcgttttctcaaattgtctattgtagcaaaaatgtttttgtcgtaaacctgttttgtctcctttttttgttctcttgccacttctctcctcttcctcctgcccctggttccctcctctcctcccacccccacaaccagtaccaatgtacatagtaattgtaatgttttagactttacagaaactttcctgtattctgtatataaaaaacaaaaatacttcaaaaaat

SEQ ID NO: 352423 - DNA, 2778 bp, Homo sapiens
gaacaaaagctggtctgggccgccctcgaggcacaggcccttatggccggatccctgaggaatcacagatgcaccttttgaactctgagcacttagccacccaagcagagcagcaagagtggctctgtagtgttgttgcgctccagtgcagcatattgaaacatttatctgctaagcagatgccttcgcattgggactctgaacagacagagaaggctgatattaagcctgttattgtgactgacagctcagtcaccacctccctgcaaacagctgacaagacacctacaccttcccactaccccttgtcctgcccctcagggattagcacccagaattccctgagctgctctccaccccaccagtccccagccctagaggacatcggctgcagttcttgtgcggaaaaatccaagaaaaccccttgtgggactgccaatgggccagtgaacacagaggtgaaagctaatggcccacacctctacagcagccctactgattccacggacccccggcgacttccaggcgctaacaccccactaccaggcctctcacaccggcaaggctggccccggcccctcacgccaccagcggctgggggccttcagaaccacaccgtcggcatcattgtgaagacagagaatgccactggccccagctcttgcccccagaggagtttggttcctgtcccaagcctgcccccttccattcccagctcttgtgccagcatcgagaacaccagcactttgcaaagaaagactgtccaatcacagataggacctccgttgacagattcaaggccactgggctcacccccaaacgccacccgggtgctcactcccccgcaagcagcaggagatggtatcttggccacaacagccaaccaacgattcagctcaccagcgccatcgtcagatggcaaggtcagccccggcacgttatccataggaagcgctttaaccgtaccctctttcccagccaactctactgccatggtggacctcaccaactcacttcgagcatttatggatgtcaatggagaaatcgagataaatatgctggacgagaagctgatcaagtttctggccttgcagagaatacatcagcttttcccctcccgggtccaaccttcaccgggcagtgtcgggacacatcagctggcttctggagggcaccacatagaagtgcaaagaaaggaggtacaggcccgagctgtgttctaccccctcttagggttgggaggagctgtgaacatgtgctatcgaaccctctacatcgggacaggagctgacatggatgtgtgccttacaaactatggtcactgtaactacgtgtccgggaaacatgcctgcatattctacgatgagaataccaaacattatgagctgttaaactacagtgagcatgggacaacggtggacaatgtgctgtattcatgtgacttctcggagaagaccccgccaacccccccaagcagtattgttgccaaagtgcagagtgtcatcaggcgccgccggcaccagaaacaggacgaagagccaagtgaggaggcagccatgatgagttcccaggcccaggggccgcagcggagaccctgcaattgcaaagccagcagctcgagcttgattgggggcagtggggccggctgggagggcacagccttactgcaccatggcagctacatcaagctgggctgcctgcagtttgtcttcagcatcactgagtttgcgaccaaacagcccaaaggcgatgccagcctgctgcaggatggggtcttggccgagaagctctctctcaagccccaccagggccctgtgctgcgctccaactctgttccttaggactggcggctaccccgccactggcctgtacacccacccaagactcctgcaatgcaaaaatgtacacaaaccaagcccgggtgttttctatactctaccagaaacccttcaactacaatctttgcatgaaatgaagaaaaccttttgactgttttttaaaaatcctttttcttttctcaagttctagggggcatttgcacatatatttgtactcaacatttcatgggaaagcggcagacctgagctgaggaacagcgtgggcagggagggaaagacccagggtctggacacttcctccaacacaaaacccttccccacccacctcctgctccctccccctcgcccaccattgtaaaataatcagaaacttgttctattttgtggcagtgacaatagttttatattaaaagaaaaaatacagttttcatacagcaaaatctatacaatatcattgttttatttaatataaagatcgctacccaccttccttccatggttcccaccctccacgttattttccctttctgcagcggttgcactacaggtagctactgtgtattatggacaaatgagaaatgaattctttttctggctgtccatctattttatttcaaataaggaaaagtgtatttggattttgtgtaaatacatctagtgatgacattttttcaatgtttttaaaaaccgtgtacagtactacatgtggtagagcgttttctcaaattgtctattgtagcaaaaatgtttttgtcgtaaacctgttttgtctcctttttttgttctcttgccacttctctcctcttcctcctgcccctggttccctcctctcctcccacccccacaaccagtaccaatgtacatagtaattgtaatgttttagactttacagaaactttcctgtattctgtatataaaaaacaaaaatacttcaaaaaat

SEQ ID NO: 352424 - DNA, 2255 bp, Homo sapiens
tgggaagatcacctgaggctgggaggtccaggcagtgatcctttttgtgcctctgcactccagcccaggcaacagagtgagaccctgtctcaaaaataaaagagacaatcagttccttgtcttcccttgttcaggcccttttgctttgtctttgcccagtgttgcaacagcagagatgaaagtcagctctgactactgcccagggaggcactttaaacactgcagggaagaacctaaggagaaggcagatgctttgtccctggtggtctttgaaagagtgatagactcacacatacccaatcttcagttagccctgtatctgttttttgttttgttttgttttccctaaaagtcctagagaccgatagctctgtatctggtacagaaggacagacagattagcccttaccctagaaacttccctttctttaaggtgataagattttctaggctctgcaccccgatgttgtattttcatagaaatatcccatcctcttcagtagctcactcttcccttctgggtagcagccacatgttctaaagcagatcagctggcagggacagctgttctttatcaggagcttggaaaagacaacagtttttgttcaaaaataaaaggggagggccctgagctactcacccttgaagtctctgctagtgccaacccagaagctaactctctccctgtcttacctccccgacacatgcaccttacaatctgttctctgccttccttttcctctactcctgccaccttgcaggagctgacatggatgtgtgccttacaaactatggtcactgtaactacgtgtccgggaaacatgcctgcatattctacgatgagaataccaaacattatgagctgttaaactacagtgagcatgggacaacggtggacaatgtgctgtattcatgtgacttctcggagaagaccccgccaacccccccaagcagtattgttgccaaagtgcagagtgtcatcaggcgccgccggcaccagaaacaggacgaagagccaagtgaggaggcagccatgatgagttcccaggcccaggggccgcagcggagaccctgcaattgcaaagccagcagctcgagcttgattgggggcagtggggccggctgggagggcacagccttactgcaccatggcagctacatcaagctgggctgcctgcagtttgtcttcagcatcactgagtttgcgaccaaacagcccaaaggcgatgccagcctgctgcaggatggggtcttggccgagaagctctctctcaagccccaccagggccctgtgctgcgctccaactctgttccttaggactggcggctaccccgccactggcctgtacacccacccaagactcctgcaatgcaaaaatgtacacaaaccaagcccgggtgttttctatactctaccagaaacccttcaactacaatctttgcatgaaatgaagaaaaccttttgactgttttttaaaaatcctttttcttttctcaagttctagggggcatttgcacatatatttgtactcaacatttcatgggaaagcggcagacctgagctgaggaacagcgtgggcagggagggaaagacccagggtctggacacttcctccaacacaaaacccttccccacccacctcctgctccctccccctcgcccaccattgtaaaataatcagaaacttgttctattttgtggcagtgacaatagttttatattaaaagaaaaaatacagttttcatacagcaaaatctatacaatatcattgttttatttaatataaagatcgctacccaccttccttccatggttcccaccctccacgttattttccctttctgcagcggttgcactacaggtagctactgtgtattatggacaaatgagaaatgaattctttttctggctgtccatctattttatttcaaataaggaaaagtgtatttggattttgtgtaaatacatctagtgatgacattttttcaatgtttttaaaaaccgtgtacagtactacatgtggtagagcgttttctcaaattgtctattgtagcaaaaatgtttttgtcgtaaacctgttttgtctcctttttttgttctcttgccacttctctcctcttcctcctgcccctggttccctcctctcctcccacccccacaaccagtaccaatgtacatagtaattgtaatgttttagactttacagaaactttcctgtattctgtatataaaaaacaaaaatacttcaaaaaat

SEQ ID NO: 352425 - DNA, 1222 bp, Homo sapiens
gatcagtggggctgatggagcaaatccaagctctgctggctccccccaagacggacgaggcagaaaagcgcagtcggaagcctgagaaggagccccggagaagcggcagggccaccaaccacgacagctgcgatagctgcaaggaaggtggagatctcctgtgctgcgaccactgcccggctgccttccacctccagtgctgtaaccctccactgagtgaagaaatgttgcctcctggagagtggatgtgtcaccggtgcactgttcgccgaaagccctggaatcaccccactcttcccatggtgactgtttggaatccagtagggcctaaaaatccaaacatgggctgctgaaatgggcagaagagaaacgagagcagaaaaaggagctgggtcatgtcaatggactggtggacaaatctggcaaacggactacatcccccagcagtgacactgacttgttggacagatcggccagcaaaactgaactaaaggccattgcccatgcccggatcctggaaaggagagccagcaggcctggcacacccacatccagcgccagcacagagactcccacctctgagcagaatgatgtcgacgaagacatcattgacgtggatgaggaaccagtagcagcggagccagactatgtgcagccccagctgaggcggccctttgagctgctgattgctgccgccatggagcggaaccccacccaatttcagttgcccaatgaactgacttgtaccactgcactaccaggttctagcaagaggagaagaaaggaggaaaccacagggaaaaatgttaagaagacacagcatgaattagatcacaatggtctcgttcccttacccgtcaaagtctgcttcacgtgtaacaggtattttctttcatactaaggggctctttctcattatttagcagatgatactttttctctcatcacctcttccagaccatgtatgttaaatgtgaacagcccatattctgatagtatgagtacatggagactaactaatggactgacgagagccttgaatgtgtatgtgttaacaaattttctgaagaatcacagtacaggagtactgtgaactgtgttgaggccgagcacggtggcttatgcctgtaatcgcagcaatctgggaggccgaggcggtcagattgtttgaacctgggagcttgagaccaacctgggcaacacagtgaaaccttgtctctac

SEQ ID NO: 352426 - DNA, 306 bp, Homo sapiens
caccactgcactccagcctgggcaacaagagtgagactctgtctcaaaaaaaaaaaaaaaaaaggaaaagaaaaagaaaaaaaaaaaaagaaatctgcagatctttatccttttcctggatatgtaatgcgtctctttttctatggctgattgtcaagttttctatcactggttttcaacagtgtgattatgatgtgccttgatgtggttttctttgtgtttatgctgcttggtgttcattggatttcttggatctgtaggtttacaatttttatcaaaatatatcaaattaaaaatttttcaccc

SEQ ID NO: 352427 - DNA, 449 bp, Homo sapiens
ctctcttaaaatatatggagcagaacacatgagagaaagcaaaagaacaagtgcacacagcagagctgcgagttgcatactctgtgcatgctaataccatcgcaacaacatcactaaggcttctgggtaacgtttgccacatcatattgtgacgtgcatttgtttttatattttaccctaaaaggcaaaataactctccatgtgatgaaagaaggagcacacacaaaaaaaaccctctcagaaatattaaaatggttgcaggtaattcaaatggtatactgttttaaaaggtacttgtctaacactttaagttggaaaagcatcttggaagtcattagattcatatttacattacttgaattgtgaccctagcttgacatttccatggtgggagacatattttatttaggaggcagcagtctatttagtttttgagagcttaatcgata

SEQ ID NO: 352428 - DNA, 436 bp, Homo sapiens
gctcgacagtagactcaaaaatgaggtaggtacaggtcccagtcagcctctgtctggggggaaaccccttaacttatctcagtctcagttgcctaattacataaaatggaatactgatatctactattaccaatggctgggatttttccatgtttctttacatctgcaaagtgattttatctctaaaatcagtcgttgtataccttaaatttttaattcacttgtacattagagaactgtagaaagctgcaggacatcctaggatgtatttttggaatccaaacttttacttttcttctctccttgtgttccctctctattttgtcctagtgttatcatttgtacttcttgcactatggcaaatccttttctagaatcaaagaagccatcagaaaaataccaaatagacaccaagtcatggataatgaaatccatg

SEQ ID NO: 352429 - DNA, 271 bp, Homo sapiens
tggaagcggaaggacttaaagataccagatcattgtgcttttctgatgactaggtagtggatgatagttaacatttattgagtgtttatctgcaggaatctgtgctaggtgctgcatagacattacctcatttattcctcacaacaacattcaaggtagaacttatcatccccagttttacggatgacaaggttttgtgaggtcctaggtcaagggagtgatagtgagtgacaaagccttgactgaaagcagggctgggttcaatcctggg

SEQ ID NO: 352430 - DNA, 360 bp, Homo sapiens
tcaagtttgaaaaaaaattaaaaaaaaaaataaggttgaagagatcaaacggctaatagccctgcttcaaatctcacttgagtcagtctttctttaaactaactgtatctctaatatttagatgtgcaaaatcaggaatgaaaatcatgacctccagggctgctaagaaaagacttaatcaagatcacgtagataaaagctcagcataataagaggggctcaataaatattatcgcctcctgttttccccagatgccaagagcctggataagacagaaaaacattttaatgtgaagttggcattcagatagcctccctcggtgacctgaacaaactgtttccacctagagtgtgatgatg

SEQ ID NO: 352431 - DNA, 2793 bp, Homo sapiens
cctactttttatattttgcgtttcagtgacacgtctctggcaactgtacgaaagatattatcatctaacatttgttgagtacttaacaatgtgctgggacccgtgctaagaattttgcctatgtcatctgatctcgccccaacaataatgctgtgaaatgggtactattattttcatactatttttactgatgaggaaattaaggtttagaaagggcatgagcctggagtcaggaagaaagtctacggttacatgttactgtaatcatggaatttctagaattacaagcaacacaggcaataatgatcattgactagaaggacatttggaaaagaaaacccagcgtttgaaaaagagtgaggcagtttgattctgtttctctgagtgaatagtgagactaagtggggtgtaaggatgtttcatcctcaaaatttattttttctttcattactatgtcagtttgaaaaagaaaataaaaaatggttgttgatcctgaagaaactaatcctagaatgtgctacatctttgagagtttggaaagagacagttaacatacaacccttcaaaacagtggaatttggtaaaccctggaacactgttcttgctgatctaattcatgacattaaggccttcctcggccttatgaggaagcagatgaaaataatccttttgcgatgactattttcccccttttctgatttaactcttccattgcctaagactcaccaattctcaaacttctaaattctccacactgccttatctctgccatcccatggcaagtcctaaagctgctaacattttgtaacaactatgtgacaaattgttgtgcttttattcaggtcggacatctttgccaggcttgcttgttgtgttttctgtttggctgtgtcatgggaccaaaggtgcctgcctttgtacagcatgtcaaatctggttaacatgcagccatttatctttaaaaccactcctgcacaatggcagaggtgggccaagccacagggctctaagcacaacccaatttttcagaccatcttttctgcacatagggagcaccgttggacagcagacaagacattttgtgatttggggaatctcttagagacaaattgtagagtgcaagtgcagtgtaactggactgctgggtgcccagtgaagtgaggaaaatcagatacagcacaggctgaaagaatgaagcaagaattcatatctctgtgcagaacatgcacagtactttgctcacacagagagttcacacatagacaaaagcatgtttgcttgtgggttattttcaggggattctatagccacagtctaggcgtatatatttgcacgtaagctttctttctgcattttgtacctggtaggtgtgtctacatgtgaacatgtaaacatgcttatatgagaagacaatttgctgttgctgatttaagacacgggaaaggcctcctagttcactgaggcgtttccctcctaatgtagtagaagcagaatctttttgttttctacaattgttttaataaaggactctgtgtgtgtttaaggaagactcagagccagagtgtcaagtgctgcagtgaaaaatactgaagatttttctttccataagacagctgcaaactttataacccagttcactctgggttttcatttctcaattgtttcaaggtgtcttgggaatgatttgcccttaaataactagttatcaacaaaggagaaaaaatagcaataaaaaatgtgataaacctgcatagactagtttaactaaaatgaagaatttccttgcttggagcagttcaaggaccgaacatagcaaaactgtgtgatttaaatgaaatattcagagtggtcaacataaatacacatgtagacaagagatagtatatgtgtgtgtgtgtacactgaggttacttcttgaagaaataggcattttttcctttctttttgctttttctttcttttctttttctgagtaaaggaccccagagattgtctttcactttgaaaacaatctctaatatcaggaaaatgcgctgtttgtttatgcgtacataatccaagtttgtccgcctgggaactgcagcaaatgggagaagtatgcatggatttcacaggtaacaggattacgtgggcacataattgatccatttggagaaaaaaaatgacagtgctctaaagatgcctaggctttggagatggagtttatgaaacaggcatttgtaaattcaaaggaatcaatatgtcaattttattacatctcagaaccagctgggcattaaaggaacagtagccttaaaaaaaattacagctgcatattcctacgttgtctacctttcttaaaggccctagaatttaaggaaatgaacttagagatgtgtaccttttcagaaatgaatttacattgtccaaagagaacaacaatttaacattatgtcagttatcaacctaaaaatttgattgaaatgtctgccttatcattacaattgaagtctattaatagatacagataataagcagaatagtgattttcacataggttgcactgtcaaggattcattggaattcatatttgcattgtgcttttcaacagtctagattttacctcttcactgatgataggacataacagacttggaagcagatgatacagacttctttttttcataatcaggttagtgtaagaaattgccatttgaaacaatccattttgtaactgaaccttatgaaatatatgtatttcatggtacgtattctctagcacagtctgagcaattaaatagattcataagcata

SEQ ID NO: 352432 - DNA, 1457 bp, Homo sapiens
  misc_feature (1448)..(1448): n is a, c, g, or t
  misc_feature (1457)..(1457): n is a, c, g, or t
tcagacttcaaccacagttgtgattgtttttagtttgttagctgcctggagtgttattttaagaaagcagaagcaccatcatttgcacactccttatagatcacacaccttaaccctgactttttttgctccagtttttcagaagaagtgaagtcaagatgaagaaccatttgcttttctggggagtcctggcggtttttattaaggctgttcatgtgaaagcccaagaagatgaaaggattgttcttgttgacaacaaatgtaagtgtgcccggattacttccaggatcatccgttcttccgaagatcctaatgaggacattgtggagagaaacatccgaattattgttcctctgaacaacagggagaatatctctgatcccacctcaccattgagaaccagatttgtgtaccatttgtctgacctctgtaaaaaatgtgatcctacagaagtggagctggataatcagatagttactgctacccagagcaatatctgtgatgaagacagtgctacagagacctgctacacttatgacagaaacaagtgctacacagctgtggtcccactcgtatatggtggtgagaccaaaatggtggaaacagccttaaccccagatgcctgctatcctgactaatttaagtcattgctgactgcatagctctttttcttgagaggctctccattttgattcagaaagttagcatatttattaccaatgaatttgaaaccagggctttttttttttttggggtgatgtaaaaccaactccctgccaccaaaataattaaaatagtcacattgttatctttattaggtaatcacttcttaattatatgttcatactctaagtatcaaaatcttccaattatcatgctcacctgaaagaggtatgctctcttaggaatacagtttctagcattaaacaaataaacaaggggagaaaataaaactcaaggagtgaaaatcaggaggtgtaataaaatgttcctcgcattcccccccgctttttttttttttttgactttgccttggagagccagagcttccgcattttctttactattctttttaaaaaaagtttcactgtgtagagaacatatatgcataaacataggtcaattatatgtctccattagaaaaataataattggaaaacatgttctagaactagttacaaaaataatttaaggtgaaatctctaatatttataaaagtagcaaaataaatgcataattaaaatatatttggacataacagacttggaagcagatgatacagacttctttttttcataatcaggttagtgtaagaaattgccatttgaaacaatccattttgtaactgaaccttatgaaatatatgtatttcatggtacgtattctctaggcccctgtttgaaaaaattctcccctggtttcttttggcctttgtaaaaaaaattacnaaaaaaaan

SEQ ID NO: 352433 - DNA, 997 bp, Homo sapiens
tcagacttcaaccacagttgtgattgtttttagtttgttagctgcctggagtgttattttaagaaagcagaagcaccatcatttgcacactccttatagatcacacaccttaaccctgactttttttgctccagtttttcagaagaagtgaagtcaagatgaagaaccatttgcttttctggggagtcctggcggtttttattaaggctgttcatgtgaaagcccaagaagatgaaaggattgttcttgttgacaacaaatgtaagtgtgcccggattacttccaggatcatccgttcttccgaagatcctaatgaggacattgtggagagaaacatccgaattattgttcctctgaacaacagggagaatatctctgatcccacctcaccattgagaaccagatttgtgtaccatttgtctgacctctgtaaaaaatgtgatcctacagaagtggagctggataatcagatagttactgctacccagagcaatatctgtgatgaagacagtgctacagagacctgctacacttatgacagaaacaagtgctacacagctgtggtcccactcgtatatggtggtgagaccaaaatggtggaaacagccttaaccccagatgcctgctatcctgactaatttaagtcattgctgactgcatagctctttttcttgagaggctctccattttgattcagaaagttagcatatttattaccaatgaatttgaaaccagggctttttttttttttggggtgatgtaaaaccaactccctgccaccaaaataattaaaatagtcacattgttatctttattaggtaatcacttcttaattatatgttcatactctaagtatcaaaatcttccaattatcatgctcacctgaaagaggtatgctctcttaggaatacagtttctagcattaaacaaataaacagggatacagaaacgtctttcctcctctttttaacgcaacccaaatatacatcatatcact

SEQ ID NO: 352434 - DNA, 1320 bp, Homo sapiens
ggtttctcaaacaaactgaagtcgacgatgaagaacctatgtgctgtgactcggtggagctcctggtgggtcctaataagaagtgctggtcatgtgataaggcctaaggaatgatcacacggattgtcattgtcgacagagcaaatgtaacgtgtgcgcacggattaccttcctagggatcctccggtcttccgaggatccttatctgaggacgtcgtggacgagaatccatcctgaattatgttcctctgaacaacagggagaatatctctgatcccacctcaccattgagaaccagatttgtgtaccatttgtctgacctctgtaaaaaatgtgatcctacagaagtggagctggataatcagatagttactgctacccagagcaatatctgtgatgaagacagtgctacagagacctgctacacttatgacagaaacaagtgctacacagctgtggtcccactcgtatatggtggtgagaccaaaatggtggaaacagccttaaccccagatgcctgctatcctgactaatttaagtcattgctgactgcatagctctttttcttgagaggctctccattttgattcagaaagttagcatatttattaccaatgaatttgaaaccagggctttttttttttttggggtgatgtaaaaccaactccctgccaccaaaataattaaaatagtcacattgttatctttattaggtaatcacttcttaattatatgttcatactctaagtatcaaaatcttccaattatcatgctcacctgaaagaggtatgctctcttaggaatacagtttctagcattaaacaaataaacaaggggagaaaataaaactcaaggagtgaaaatcaggaggtgtaataaaatgttcctcgcattcccccccgctttttttttttttttgactttgccttggagagccagagcttccgcattttctttactattctttttaaaaaaagtttcactgtgtagagaacatatatgcataaacataggtcaattatatgtctccattagaaaaataataattggaaaacatgttctagaactagttacaaaaataatttaaggtgaaatctctaatatttataaaagtagcaaaataaatgcataattaaaatatatttggacataacagacttggaagcagatgatacagacttctttttttcataatcaggttagtgtaagaaattgccatttgaaacaatccattttgtaactgaaccttatgaaatatatgtatttcatggtacgtattctctagcacagtctgagcaattaaatagattcataagcata

SEQ ID NO: 352435 - DNA, 1153 bp, Homo sapiens
  misc_feature (143)..(143): n is a, c, g, or t
gacgggaatagtggagagaagcgtgcgaactaataggtcctctgaacatggacgtagaagatctctgaatcaccatcctgattcatggacgtaatcgacgaggtgtgctacacactaatgatacatgaacccgtctggagganaatggtgatcgcttactcggaaagatggtcgcctgatgtaatcactatagtcattgctggcactactattcaatatgtagtgcctgaagagcgcgctatacgaggatactgctacacttatgacagaaacaagtgctacacagctgtggtcccactcgtatatggtggtgagaccaaaatggtggaaacagccttaaccccagatgcctgctatcctgactaatttaagtcattgctgactgcatagctctttttcttgagaggctctccattttgattcagaaagttagcatatttattaccaatgaatttgaaaccagggctttttttttttttggggtgatgtaaaaccaactccctgccaccaaaataattaaaatagtcacattgttatctttattaggtaatcacttcttaattatatgttcatactctaagtatcaaaatcttccaattatcatgctcacctgaaagaggtatgctctcttaggaatacagtttctagcattaaacaaataaacaaggggagaaaataaaactcaaggagtgaaaatcaggaggtgtaataaaatgttcctcgcattcccccccgctttttttttttttttgactttgccttggagagccagagcttccgcattttctttactattctttttaaaaaaagtttcactgtgtagagaacatatatgcataaacataggtcaattatatgtctccattagaaaaataataattggaaaacatgttctagaactagttacaaaaataatttaaggtgaaatctctaatatttataaaagtagcaaaataaatgcataattaaaatatatttggacataacagacttggaagcagatgatacagacttctttttttcataatcaggttagtgtaagaaattgccatttgaaacaatccattttgtaactgaaccttatgaaatatatgtatttcatggtacgtattctctagcacagtctgagcaattaaatagattcataagcata

SEQ ID NO: 352436 - DNA, 963 bp, Homo sapiens
tctctgtagcactgtcttcatcacagatattgctctgggtagcagtaactatctgattatcctgctacacttatgacagaaacaagtgctacacagctgtggtcccactcgtatatggtggtgagaccaaaatggtggaaacagccttaaccccagatgcctgctatcctgactaatttaagtcattgctgactgcatagctctttttcttgagaggctctccattttgattcagaaagttagcatatttattaccaatgaatttgaaaccagggctttttttttttttggggtgatgtaaaaccaactccctgccaccaaaataattaaaatagtcacattgttatctttattaggtaatcacttcttaattatatgttcatactctaagtatcaaaatcttccaattatcatgctcacctgaaagaggtatgctctcttaggaatacagtttctagcattaaacaaataaacaaggggagaaaataaaactcaaggagtgaaaatcaggaggtgtaataaaatgttcctcgcattcccccccgctttttttttttttttgactttgccttggagagccagagcttccgcattttctttactattctttttaaaaaaagtttcactgtgtagagaacatatatgcataaacataggtcaattatatgtctccattagaaaaataataattggaaaacatgttctagaactagttacaaaaataatttaaggtgaaatctctaatatttataaaagtagcaaaataaatgcataattaaaatatatttggacataacagacttggaagcagatgatacagacttctttttttcataatcaggttagtgtaagaaattgccatttgaaacaatccattttgtaactgaaccttatgaaatatatgtatttcatggtacgtattctctagcacagtctgagcaattaaatagattcataagcata

SEQ ID NO: 352437 - DNA, 1425 bp, Homo sapiens
tcagacttcaaccacagttgtgattgtttttagtttgttagctgcctggagtgttattttaagaaagcagaagcaccatcatttgcacactccttatagatcacacaccttaaccctgactttttttgctccagtttttcagaagaagtgaagtcaagatgaagaaccatttgcttttctggggagtcctggcggtttttattaaggctgttcatgtgaaagcccaagaagatgaaaggattgttcttgttgacaacaaatgtaagtgtgcccggattacttccaggatcatccgttcttccgaagatcctaatgaggacattgtggagagaaacatccgaattattgttcctctgaacaacagggagaatatctctgatcccacctcaccattgagaaccagatttgtgtaccatttgtctgacctctgtaaaaaatgtgatcctacagaagtggagctggataatcagatagttactgctacccagagcaatatctgtgatgaagacagtgctacagagacctgctacacttatgacagaaacaagtgctacacagctgtggtcccactcgtatatggtggtgagaccaaaatggtggaaacagccttaaccccagatgcctgctatcctgactaatttaagtcattgctgactgcatagctctttttcttgagaggctctccattttgattcagaaagttagcatatttattaccaatgaatttgaaaccagggctttttttttttttggggtgatgtaaaaccaactccctgccaccaaaataattaaaatagtcacattgttatctttattaggtaatcacttcttaattatatgttcatactctaagtatcaaaatcttccaattatcatgctcacctgaaagaggtatgctctcttaggaatacagtttctagcattaaacaaataaacaaggggagaaaataaaactcaaggagtgaaaatcaggaggtgtaataaaatgttcctcgcattcccccccgctttttttttttttttgactttgccttggagagccagagcttccgcattttctttactattctttttaaaaaaagtttcactgtgtagagaacatatatgcataaacataggtcaattatatgtctccattagaaaaataataattggaaaacatgttctagaactagttacaaaaataatttaaggtgaaatctctaatatttataaaagtagcaaaataaatgcataattaaaatatatttggacataacagacttggaagcagatgatacagacttctttttttcataatcaggttagtgtaagaaattgccatttgaaacaatccattttgtaactgaaccttatgaaatatatgtatttcatggtacgtattctctagcacagtctgagcaattaaatagattcataagcata

SEQ ID NO: 352438 - DNA, 822 bp, Homo sapiens
tcagacttcaaccacagttgtgattgtttttagtttgttagctgcctggagtgttattttaagaaagcagaagcaccatcatttgcacactccttatagatcacacaccttaaccctgactttttttgctccagtttttcagaagaagtgaagtcaagatgaagaaccatttgcttttctggggagtcctggcggtttttattaaggctgttcatgtgaaagcccaagaagatgaaaggattgttcttgttgacaacaaatgtaagtgtgcccggattacttccaggatcatccgttcttccgaagatcctaatgaggacattgtggagagaaacatccgaattattgttcctctgaacaacagggagaatatctctgatcccacctcaccattgagaaccagatttgtgtaccatttgtctgacctctgtaaaaaatgtgatcctacagaagtggagctggataatcagatagttactgctacccagagcaatatctgtgatgaagacagtgctacagagacctgctacacttatgacagaaacaagtgctacacagctgtggtcccactcgtatatggtggtgagaccaaaatggtggaaacagccttaaccccagatgcctgctatcctgactaatttaagtcattgctgactgcatagctctttttcttgagaggctctccattttgattcagaaagttagcatatttattaccaatgaatttgaaaccagggctttttggggatgtacttctaatatatgtcataccctagatctgttcaatatcatgctactggaggttgccttttagatcgtttt

SEQ ID NO: 352439 - DNA, 1364 bp, Homo sapiens
tcagacttcaaccacagttgtgattgtttttagtttgttagctgcctggagtgttattttaagaaagcagaagcaccatcatttgcacactccttatagatcacacaccttaaccctgactttttttgctccagtttttcagaagaagtgaagtcaagatgaagaaccatttgcttttctggggagtcctggcggtttttattaaggctgttcatgtgaaagcccaagaagatgaaaggattgttcttgttgacaacaaatgtaagtgtgcccggattacttccaggatcatccgttcttccgaagatcctaatgaggacattgtggagagaaacatccgaattattgttcctctgaacaacagggagaatatctctgatcccacctcaccattgagaaccagatttgtgtaccatttgtctgacctagcaatatctgtgatgaagacagtgctacagagacctgctacacttatgacagaaacaagtgctacacagctgtggtcccactcgtatatggtggtgagaccaaaatggtggaaacagccttaaccccagatgcctgctatcctgactaatttaagtcattgctgactgcatagctctttttcttgagaggctctccattttgattcagaaagttagcatatttattaccaatgaatttgaaaccagggctttttttttttttggggtgatgtaaaaccaactccctgccaccaaaataattaaaatagtcacattgttatctttattaggtaatcacttcttaattatatgttcatactctaagtatcaaaatcttccaattatcatgctcacctgaaagaggtatgctctcttaggaatacagtttctagcattaaacaaataaacaaggggagaaaataaaactcaaggagtgaaaatcaggaggtgtaataaaatgttcctcgcattcccccccgctttttttttttttttgactttgccttggagagccagagcttccgcattttctttactattctttttaaaaaaagtttcactgtgtagagaacatatatgcataaacataggtcaattatatgtctccattagaaaaataataattggaaaacatgttctagaactagttacaaaaataatttaaggtgaaatctctaatatttataaaagtagcaaaataaatgcataattaaaatatatttggacataacagacttggaagcagatgatacagacttctttttttcataatcaggttagtgtaagaaattgccatttgaaacaatccattttgtaactgaaccttatgaaatatatgtatttcatggtacgtattctctagcacagtctgagcaattaaatagattcataagcata

SEQ ID NO: 352440 - DNA, 367 bp, Homo sapiens
tcagacttcaaccacagttgtgattgtttttagtttgttagctgcctggagtgttattttaagaaagcagaagcaccatcatttgcacactccttatagatcacacaccttaaccctgactttttttgctccagtttttcagaagaagtgaagtcaagatgaagaaccatttgcttttctggggagtcctggcggtttttattaaggctgttcatgtgaaagcccaagaagatgaaaggattgttcttgttgacaacaaatgtaagtgtgcccggattacttccaggatcatccgttcttccgaagatcctaatgaggacattgtggagagaaacatccgaattatgtatgtggcattccatattcc

SEQ ID NO: 352441 - DNA, 422 bp, Homo sapiens
ggtgctttccttctgccttgcttgtctctgctgccggcatccgtgtgagcctcttccctggaccttctgactcggcttggttttcttctggggtggaaggatgtcagaatttgttttggttactgccaagctgctgctctggccagggcaggtagacaggctgtctcctctttgttgaagatggttccttcttcagaaaggcaaatgttggcaactcctcagagtcactatcaccagaatccagtgagggtgatgacttctttagagccatcagtatgtgctatcaaataattccctaaaaggaaaagagacatatgacacagactggagcattcaattcagtccactagctgtgttccatagccaggctttatgacataaatataagatatagagaatacagaaacagagaaatatgacat

SEQ ID NO: 352442 - DNA, 826 bp, Homo sapiens
ggtgctttccttctgccttgcttgtctctgctgccggcatccgtgtgagcctcttccctggaccttctgactcggcttggttttcttctggggtggaaggatgtcagaatttgttttggttactgccaagctgctgctctggccagggcaggtagacaggtaggctggaagctgacagcatggatctaagatcaggtccttgttatctgctgcactcctctctggggtatcatggaggggaacttcagggatctttggaaagggctttttccagtcacatgatgcaccttcattattttgatgatccaaaacacttttaactggggagctagagtcctcagggctcagttgcttgtgggtcagaaacttacatgtaagcctttgagccagaggaataaattcttcttcatcttcactttcactgcttagcaacctgactggctgtgtttgtgtgacagtttcagctatttctgggacaggtggtgaaaataactctggtgctggaggacaggaggcttcacaatctgagatgtcaaccactacaatcttctcttccctttcaggctgtctcctctttgttgaagatggttccttcttcagaaaggcaaatgttggcaactcctcagagtcactatcaccagaatccagtgagggtgatgacttctttagagccatcagtatgtgctatcaaataattccctaaaaggaaaagagacatatgacacagactggagcattcaattcagtccactagctgtgttccatagccaggctttatgacataaatataagatatagagaatacagaaacagagaaatatgacat

SEQ ID NO: 352443 - DNA, 1758 bp, Homo sapiens
ggcacgagtgccgcgagaacagagtggacggagcgtaggagagaccgaaaaggctgggggtgggagtagcggatttgaagcacttgttggcctacagaggtgtggcaagcagagcacctcagaactcaggcgtactgcccgccgcccgagccctgcgagggccgatagcgagggtgtggcccttatctgcacccagcagagcgccggcggggtacggtcttaggacctcgatctccttctccctcattttctctcatccctacctattgtgggtttccgcatgggccggaccgtggtcgtgctgggcggaggcatcagcggcttggccgccagttaccacctgagccgggccccctgcccccctaaggtggtcctagtggagagcagtgagcgtctgggaggctggattcgctccgttcgaggccctaatggtgctatctttgagcttggacctcggggaattaggccagcgggagccctaggggcccggaccttgctcctggtttctgagcttggcttggattcagaagtgctgcctgtccggggagaccacccagctgcccagaacaggttcctctacgtgggcggtgccctgcatgccctacccactggcctcagggggctactccgcccttcaccccccttctccaaacctctgttttgggctgggctgagggagctgaccaagccccggggcaaagagcctgatgagactgtgcacagttttgcccagcgccgccttggacctgaggtggcgtctctagccatggacagtctctgccgtggagtgtttgcaggcaacagccgtgagctcagcatcaggtcctgctttcccagtctcttccaagctgagcaaacccatcgttccatattactgggcctgctgctgggggcagggcggaccccacagccagactcagcactcattcgccaggccttggctgagcgctggagccagtggtcacttcgtggaggtctagagatgttgcctcaggcccttgaaacccacctgactagtaggggggtcagtgttctcagaggccagccggtctgtgggctcagcctccaggcagaagggcgctggaaggtatctctaagggacagcagtctggaggctgaccacgttattagtgccattccagcttcagtgctcagtgagctgctccctgctgaggctgcccctctggctcgtgccctgagtgccatcactgcagtgtctgtagctgtggtgaatctgcagtaccaaggagcccatctgcctgtccagggatttggacatttggtgccatcttcagaagatccaggagtcctgggaatcgtgtatgactcagttgctttccctgagcaggacgggagcccccctggcctcagagtgactgtgatgctgggaggttcctggttacagacactggaggctagtggctgtgtcttatctcaggagctgtttcaacagcgggcccaggaagcagctgctacacaattaggactgaaggagatgccgagccactgcttggtccatctacacaagaactgcattccccagtatacactaggtcactggcaaaaactagagtcagctaggcaattcctgactgctcacaggttgcccctgactctggctggagcctcctatgagggagttgctgttaatgactgtatagagagtgggcgccaggcagcagtcagtgtcctgggcacagaacctaacagctgatccccaactctcattcatgaaaataaaaattgctggagcttggc

SEQ ID NO: 352444 - DNA, 1697 bp, Homo sapiens
ggcacgagtgccgcgagaacagagtggacggagcgtaggagagaccgaaaaggctgggggtgggagtagcggatttgaagcacttgttggcctacagaggtgtggcaagcagagcacctcagaactcaggcgtactgcccgccgcccgagccctgcgagggccgatagcgagggtgtggcccttatctgcacccagcagagcgccggcggggtttccgcatgggccggaccgtggtcgtgctgggcggaggcatcagcggcttggccgccagttaccacctgagccgggccccctgcccccctaaggtggtcctagtggagagcagtgagcgtctgggaggctggattcgctccgttcgaggccctaatggtgctatctttgagcttggacctcggggaattaggccagcgggagccctaggggcccggaccttgctcctggtttctgagcttggcttggattcagaagtgctgcctgtccggggagaccacccagctgcccagaacaggttcctctacgtgggcggtgccctgcatgccctacccactggcctcagggggctactccgcccttcaccccccttctccaaacctctgttttgggctgggctgagggagctgaccaagccccggggcaaagagcctgatgagactgtgcacagttttgcccagcgccgccttggacctgaggtggcgtctctagccatggacagtctctgccgtggagtgtttgcaggcaacagccgtgagctcagcatcaggtcctgctttcccagtctcttccaagctgagcaaacccatcgttccatattactgggcctgctgctgggggcagggcggaccccacagccagactcagcactcattcgccaggccttggctgagcgctggagccagtggtcacttcgtggaggtctagagatgttgcctcaggcccttgaaacccacctgactagtaggggggtcagtgttctcagaggccagccggtctgtgggctcagcctccaggcagaagggcgctggaaggtatctctaagggacagcagtctggaggctgaccacgttattagtgccattccagcttcagtgctcagtgagctgctccctgctgaggctgcccctctggctcgtgccctgagtgccatcactgcagtgtctgtagctgtggtgaatctgcagtaccaaggagcccatctgcctgtccagggatttggacatttggtgccatcttcagaagatccaggagtcctgggaatcgtgtatgactcagttgctttccctgagcaggacgggagcccccctggcctcagagtgactgtgatgctgggaggttcctggttacagacactggaggctagtggctgtgtcttatctcaggagctgtttcaacagcgggcccaggaagcagctgctacacaattaggactgaaggagatgccgagccactgcttggtccatctacacaagaactgcattccccagtatacactaggtcactggcaaaaactagagtcagctaggcaattcctgactgctcacaggttgcccctgactctggctggagcctcctatgagggagttgctgttaatgactgtatagagagtgggcgccaggcagcagtcagtgtcctgggcacagaacctaacagctgatccccaactctcattcatgaaaataaaaattgctggagcttggc

SEQ ID NO: 352445 - DNA, 1074 bp, Homo sapiens
gaagagatagactcacctaggttcaagctgtcttcttagggatcatgggggctccagggggtcccggggggacagagatgtgaggcattatctaaaattggaaatgtcacagagggcagagaaaggctccatccagcactccagcagcgaatctgggaccagctggaacagaagtggtaaaggataactagctacctgcaccgccagagatcaggatcagggtgaagctggtttcccagcaggcgaagtgaaggaaagtggttggaaaggaagaggaggagcaggagatgaccaagaaccagttgaagtggcgacagagtcatgacaggaccgtggagtggcctaaggagtacccagggcgaagtaggaaacaggctccttctattcttcatgtgcctgggtgccaactcctcaggtgcagggaccgtgaccacctgggggctgcctccgtgtcgacgcattcccagcgcacatacctggtcttttgctgcctgtcgtcaccgccaccccaacagccgggcaggcatcgctgccgccatcttggaagcgggcgctgcgggggcggggtctcgcgtcatggggcggggcctcggggcggagccacccgggctgactaggcacccggtcccagacaccgcgtggccgggggcttgtgagggagcagcgcctgagcctgcccacctggaacgcgttgtaggcgaccccctggggagcgggtgctagggttcaactccactacgcagactgctagtgggatttcatttcctgcccctcagatttgtaaaagcagaagctcaagcccttcattttcctctgggccgagactgatcaggaggctagtgagccggtttctggtgctccgctgacctcgttatcaccttgtggttggctgagccctctcccagtgtgtcagtggcaccccctgcagcctagtgccacttagtatcaattgttccttacgcaggctacagcgttgcggaccgctctagcgcatttttgtattcccgttgtatcccgcaggcctggaaataaaaagcgattagttaataaaacaatgaaacattgaaaaaaaaa

SEQ ID NO: 352446 - DNA, 651 bp, Homo sapiens
tgcccaaacctttatcccaggcctccgtgtcgacgcattcccagcgcacatacctggtcttttgctgcctgtcgtcaccgccaccccaacagccgggcaggcatcgctgccgccatcttggaagcgggcgctgcgggggcggggtctcgcgtcatggggcggggcctcggggcggagccacccgggctgactaggcacccggtcccagacaccgcgtggccgggggcttgtgagggagcagcgcctgagcctgcccacctggaacgcgttgtaggcgaccccctggggagcgggtgctagggttcaactccactacgcagactgctagtgggatttcatttcctgcccctcagatttgtaaaagcagaagctcaagcccttcattttcctctgggccgagactgatcaggaggctagtgagccggtttctggtgctccgctgacctcgttatcaccttgtggttggctgagccctctcccagtgtgtcagtggcaccccctgcagcctagtgccacttagtatcaattgttccttacgcaggctacagcgttgcggaccgctctagcgcatttttgtattcccgttgtatcccgcaggcctggaaataaaaagcgattagttaataaaacaatgaaacattgaaaaaaaaa

SEQ ID NO: 352447 - DNA, 846 bp, Homo sapiens
ggcacgagtgccgcgagaacagagtggacggagcgtaggagagaccgaaaaggctgggggtgggagtagcggatttgaagcacttgttggcctacagaggtgtggcaagcagagcacctcagaactcaggcgtactgcccgccgcccgagccctgcgagggccgatagcgagggtgtggcccttatctgcacccagcagagcgccggcggggtacggtcttaggacctcgatctccttctccctcattttctctcatccctacctattgtgggtttccgcatgggccggaccgtggtcgtgctgggcggaggcatcagcggcttggccgccagttaccacctgagccgggccccctgcccccctaaggtggtcctagtggagagcagtgagcgtctgggaggctggattcgctccgttcgaggccctaatggtgctatctttgagcttggacctcggggaattaggccagcgggagccctaggggcccggaccttgctcctggtgatgctgggaggttcctggttacagacactggaggctagtggctgtgtcttatctcaggagctgtttcaacagcgggcccaggaagcagctgctacacaattaggactgaaggagatgccgagccactgcttggtccatctacacaagaccaagaaccagttgaagtggcgacagagtcatgacaggaccgtggagtggcctaaggagtacccagggcgaagtaggaaacaggctccttctattcttcatgtgcctgggtgccaactcctcaggtgcagggaccgtgaccacctgggggctgtaagcgaacagccccggagctcggcggagagtagggtggg

SEQ ID NO: 352448 - DNA, 1885 bp, Homo sapiens
ggcacgagtgccgcgagaacagagtggacggagcgtaggagagaccgaaaaggctgggggtgggagtagcggatttgaagcacttgttggcctacagaggtgtggcaagcagagcacctcagaactcaggcgtactgcccgccgcccgagccctgcgagggccgatagcgagggtgtggcccttatctgcacccagcagagcgccggcggggtacggtcttaggacctcgatctccttctccctcattttctctcatccctacctattgtgggtttccgcatgggccggaccgtggtcgtgctgggcggaggcatcagcggcttggccgccagttaccacctgagccgggccccctgcccccctaaggtggtcctagtggagagcagtgagcgtctgggaggctggattcgctccgttcgaggccctaatggtgctatctttgagcttggacctcggggaattaggccagcgggagccctaggggcccggaccttgctcctggtgagaggcttgtgggatgtctaggagaggttgtggagggggcttccattggggaatagagtttaggggaggaagtatgtttggtgggtcagatcttcccttagtttctcctcttctgagggcatgtgtttctgagcttggcttggattcagaagtgctgcctgtccggggagaccacccagctgcccagaacaggttcctctacgtgggcggtgccctgcatgccctacccactggcctcagggggctactccgcccttcaccccccttctccaaacctctgttttgggctgggctgagggagctgaccaagccccggggcaaagagcctgatgagactgtgcacagttttgcccagcgccgccttggacctgaggtggcgtctctagccatggacagtctctgccgtggagtgtttgcaggcaacagccgtgagctcagcatcaggtcctgctttcccagtctcttccaagctgagcaaacccatcgttccatattactgggcctgctgctgggggcagggcggaccccacagccagactcagcactcattcgccaggccttggctgagcgctggagccagtggtcacttcgtggaggtctagagatgttgcctcaggcccttgaaacccacctgactagtaggggggtcagtgttctcagaggccagccggtctgtgggctcagcctccaggcagaagggcgctggaaggtatctctaagggacagcagtctggaggctgaccacgttattagtgccattccagcttcagtgctcagtgagctgctccctgctgaggctgcccctctggctcgtgccctgagtgccatcactgcagtgtctgtagctgtggtgaatctgcagtaccaaggagcccatctgcctgtccagggatttggacatttggtgccatcttcagaagatccaggagtcctgggaatcgtgtatgactcagttgctttccctgagcaggacgggagcccccctggcctcagagtgactgtgatgctgggaggttcctggttacagacactggaggctagtggctgtgtcttatctcaggagctgtttcaacagcgggcccaggaagcagctgctacacaattaggactgaaggagatgccgagccactgcttggtccatctacacaagaactgcattccccagtatacactaggtcactggcaaaaactagagtcagctaggcaattcctgactgctcacaggttgcccctgactctggctggagcctcctatgagggagttgctgttaatgactgtatagagagtgggcgccaggcagcagtcagtgtcctgggcacagaacctaacagctgatccccaactctcattcatgaaaataaaaattgctggagcttggc

SEQ ID NO: 352449 - DNA, 1560 bp, Homo sapiens
ggcacgagtgccgcgagaacagagtggacggagcgtaggagagaccgaaaaggctgggggtgggagtagcggatttgaagcacttgttggcctacagaggtgtggcaagcagagcacctcagaactcaggcgtactgcccgccgcccgagccctgcgagggccgatagcgagggtgtggcccttatctgcacccagcagagcgccggcggggtacggtcttaggacctcgatctccttctccctcattttctctcatccctacctattgtgggtgagtcctggcccctggacggggacctcgctgtttctgagcttggcttggattcagaagtgctgcctgtccggggagaccacccagctgcccagaacaggttcctctacgtgggcggtgccctgcatgccctacccactggcctcagggggctactccgcccttcaccccccttctccaaacctctgttttgggctgggctgagggagctgaccaagccccggggcaaagagcctgatgagactgtgcacagttttgcccagcgccgccttggacctgaggtggcgtctctagccatggacagtctctgccgtggagtgtttgcaggcaacagccgtgagctcagcatcaggtcctgctttcccagtctcttccaagctgagcaaacccatcgttccatattactgggcctgctgctgggggcagggcggaccccacagccagactcagcactcattcgccaggccttggctgagcgctggagccagtggtcacttcgtggaggtctagagatgttgcctcaggcccttgaaacccacctgactagtaggggggtcagtgttctcagaggccagccggtctgtgggctcagcctccaggcagaagggcgctggaaggtatctctaagggacagcagtctggaggctgaccacgttattagtgccattccagcttcagtgctcagtgagctgctccctgctgaggctgcccctctggctcgtgccctgagtgccatcactgcagtgtctgtagctgtggtgaatctgcagtaccaaggagcccatctgcctgtccagggatttggacatttggtgccatcttcagaagatccaggagtcctgggaatcgtgtatgactcagttgctttccctgagcaggacgggagcccccctggcctcagagtgactgtgatgctgggaggttcctggttacagacactggaggctagtggctgtgtcttatctcaggagctgtttcaacagcgggcccaggaagcagctgctacacaattaggactgaaggagatgccgagccactgcttggtccatctacacaagaactgcattccccagtatacactaggtcactggcaaaaactagagtcagctaggcaattcctgactgctcacaggttgcccctgactctggctggagcctcctatgagggagttgctgttaatgactgtatagagagtgggcgccaggcagcagtcagtgtcctgggcacagaacctaacagctgatccccaactctcattcatgaaaataaaaattgctggagcttggc

SEQ ID NO: 352450 - DNA, 1528 bp, Homo sapiens
ggcacgagtgccgcgagaacagagtggacggagcgtaggagagaccgaaaaggctgggggtgggagtagcggatttgaagcacttgttggcctacagaggtgtggcaagcagagcacctcagaactcaggcgtactgcccgccgcccgagccctgcgagggccgatagcgagggtgtggcccttatctgcacccagcagagcgccggcggggtacggtcttaggacctcgatctccttctccctcattttctctcatccctacctattgtgggtttccgcatgggccggaccgtggtcgtgctgggcggaggcatcagcggcttggccgccagttaccacctgagccgggccccctgcccccctaaggtggtcctagtggagagcagtgagcgtctgggaggctggattcgctccgttcgaggccctaatggtgctatctttgagcttggacctcggggaattaggccagcgggagccctaggggcccggaccttgctcctgtcctagtctcacccttaaggtggcgtctctagccatggacagtctctgccgtggagtgtttgcaggcaacagccgtgagctcagcatcaggtcctgctttcccagtctcttccaagctgagcaaacccatcgttccatattactgggcctgctgctgggggcagggcggaccccacagccagactcagcactcattcgccaggccttggctgagcgctggagccagtggtcacttcgtggaggtctagagatgttgcctcaggcccttgaaacccacctgactagtaggggggtcagtgttctcagaggccagccggtctgtgggctcagcctccaggcagaagggcgctggaaggtatctctaagggacagcagtctggaggctgaccacgttattagtgccattccagcttcagtgctcagtgagctgctccctgctgaggctgcccctctggctcgtgccctgagtgccatcactgcagtgtctgtagctgtggtgaatctgcagtaccaaggagcccatctgcctgtccagggatttggacatttggtgccatcttcagaagatccaggagtcctgggaatcgtgtatgactcagttgctttccctgagcaggacgggagcccccctggcctcagagtgactgtgatgctgggaggttcctggttacagacactggaggctagtggctgtgtcttatctcaggagctgtttcaacagcgggcccaggaagcagctgctacacaattaggactgaaggagatgccgagccactgcttggtccatctacacaagaactgcattccccagtatacactaggtcactggcaaaaactagagtcagctaggcaattcctgactgctcacaggttgcccctgactctggctggagcctcctatgagggagttgctgttaatgactgtatagagagtgggcgccaggcagcagtcagtgtcctgggcacagaacctaacagctgatccccaactctcattcatgaaaataaaaattgctggagcttggc

SEQ ID NO: 352451 - DNA, 1596 bp, Homo sapiens
ggcacgagtgccgcgagaacagagtggacggagcgtaggagagaccgaaaaggctgggggtgggagtagcggatttgaagcacttgttggcctacagaggtgtggcaagcagagcacctcagaactcaggcgtactgcccgccgcccgagccctgcgagggccgatagcgagggtgtggcccttatctgcacccagcagagcgccggcggggtacggtcttaggacctcgatctccttctccctcattttctctcatccctacctattgtgggtttccgcatgggccggaccgtggtcgtgctgggcggaggcatcagcggcttggccgccagttaccacctgagccgggccccctgcccccctaaggtggtcctagtggagagcagtgagcgtctgggaggctggattcgctccgttcgaggccctaatggtgctatctttgagcttggacctcggggaattaggccagcgggagccctaggggcccggaccttgctcctggtttctgagcttggcttggattcagaagtgctgcctgtccggggagaccacccagctgcccagaacaggttcctctacgtgggcggtgccctgcatgccctacccactggcctcagggggctactccgcccttcaccccccttctccaaacctctgttttgggctgggctgagggagctgaccaagccccggggcaaagagcctgatgagactgtgcacagttttgcccagcgccgccttggacctgaggtggcgtctctagccatggacagtctctgccgtggagtgtttgcaggcaacagccgtgagctcagcatcaggtcctgctttcccagtctcttccaagctgagcaaacccatcgttccatattactgggcctgctgctgggggcagggcggaccccacagccagactcagcactcattcgccaggccttggctgagcgctggagccagtggtcacttcgtggaggtctagagatgttgcctcaggcccttgaaacccacctgactagtaggggggtcagtgttctcagaggccagccggtctgtgggctcagcctccaggcagaagggcgctggaaggtatctctaagggacagcagtctggaggctgaccacgttattagtgccattccagcttcagggatttggacatttggtgccatcttcagaagatccaggagtcctgggaatcgtgtatgactcagttgctttccctgagcaggacgggagcccccctggcctcagagtgactgtgatgctgggaggttcctggttacagacactggaggctagtggctgtgtcttatctcaggagctgtttcaacagcgggcccaggaagcagctgctacacaattaggactgaaggagatgccgagccactgcttggtccatctacacaagaactgcattccccagtatacactaggtcactggcaaaaactagtctggctggagcctcctatgagggagttgctgttaatgactgtatagagagtgggcgccaggcagcagtcagtgtcctgggcacagaacctaacagctgatccccaactctcattcatgaaaataaaaattgctggagcttggc

SEQ ID NO: 352452 - DNA, 1853 bp, Homo sapiens
ggcacgagtgccgcgagaacagagtggacggagcgtaggagagaccgaaaaggctgggggtgggagtagcggatttgaagcacttgttggcctacagaggtgtggcaagcagagcacctcagaactcaggcgtactgcccgccgcccgagccctgcgagggccgatagcgagggtgtggcccttatctgcacccagcagagcgccggcggggtacggtcttaggacctcgatctccttctccctcattttctctcatccctacctattgtgggtttccgcatgggccggaccgtggtcgtgctgggcggaggcatcagcggcttggccgccagttaccacctgagccgggccccctgcccccctaaggtggtcctagtggagagcagtgagcgtctgggaggctggattcgctccgttcgaggccctaatggtgctatctttgagcttggacctcggggaattaggccagcgggagccctaggggcccggaccttgctcctggtttctgagcttggcttggattcagaagtgctgcctgtccggggagaccacccagctgcccagaacaggttcctctacgtgggcggtgccctgcatgccctacccactggcctcagggggctactccgcccttcaccccccttctccaaacctctgttttgggctgggctgagggagctgaccaagccccggggcaaagagcctgatgagactgtgcacagttttgcccagcgccgccttggacctgaggtggcgtctctagccatggacagtctctgccgtggagtgtttgcaggcaacagccgtgagctcagcatcaggtcctgctttcccagtctcttccaagctgagcaaacccatcgttccatattactgggcctgctgctgggggcaggtgaggggggattgattcagagggtgaaaatattaagtactgccaaagtgagggagtggggacaaggggtgctattcaatgattctttttttcttttttgagacggagtcttgctctgctgcctaggtggaggttgcagtgagctgagatctcgccattacactccagcctgggtgacagagtgagactctgtcccccccacccccccaaaaaaatgggaaggagagacagcctcagctagagccctttccttctgacgcatgaatgtccttctctccagggatttggacatttggtgccatcttcagaagatccaggagtcctgggaatcgtgtatgactcagttgctttccctgagcaggacgggagcccccctggcctcagagtgactgtgaggaggaggaaactttgcctagtggcatttccagagggctcctctgtgctccattgtaggcaaggccagactgatcagtgctatattccctccttaggtgatgctgggaggttcctggttacagacactggaggctagtggctgtgtcttatctcaggagctgtttcaacagcgggcccaggaagcagctgctacacaattaggactgaaggagatgccgagccactgcttggtccatctacacaagaactgcattccccagtatacactaggtcactggcaaaaactagaggtaagttgggaaaacagctgggctgaggagggccaaggacatcagacccccagctaaaacattcctttcatcctttccttccagagtcagctaggcaattcctgactgctcacaggttgcccctgactctggctggagcctcctatgagggagttgctgttaatgactgtatagagagtgggcgccaggcagcagtcagtgtcctgggcacagaacctaacagctgatccccaactctcattcatgaaaataaaaattgctggagcttggc

SEQ ID NO: 352453 - DNA, 914 bp, Homo sapiens
ggcacgagtgccgcgagaacagagtggacggagcgtaggagagaccgaaaaggctgggggtgggagtagcggatttgaagcacttgttggcctacagaggtgtggcaagcagagcacctcagaactcaggcgtactgcccgccgcccgagccctgcgagggccgatagcgagggtgtggcccttatctgcacccagcagagcgccggcggggtacggtcttaggacctcgatctccttctccctcattttctctcatccctacctattgtgggtgagtcctggcccctggacggggacctcgctgttccaccagcccatccgtgcacacttagtttcccctaaagcagtgagtggccgggatagaactcaaaaccggcggggcttctggagcgcaggttgtccccggtctgcctgtccatatcgccccctttcccccaggtttccgcatgggccggaccgtggtcgtgctgggcggaggcatcagcggcttggccgccagttaccacctgagccgggccccctgcccccctaaggtgatgctgggaggttcctggttacagacactggaggctagtggctgtgtcttatctcaggagctgtttcaacagcgggcccaggaagcagctgctacacaattaggactgaaggagatgccgagccactgcttggtccatctacacaagaactgcattccccagtatacactaggtcactggcaaaaactagagtcagctaggcaattcctgactgctcacaggttgcccctgactctggctggagcctcctatgagggagttgctgttaatgactgtatagagagtgggcgccaggcagcagtcagtgtcctgggcacagaacctaacagctgatccccaactctcattcatgaaaataaaaattgctggagcttggc

SEQ ID NO: 352454 - DNA, 699 bp, Homo sapiens
tggtaccggtcgggagttgttagggatggtatctctaagggacagcagtctggaggctgaccacgttattagtgccattccagcttcagtgctcagtgagctgctccctgctgaggctgcccctctggctcgtgccctgagtgccatcactgcagtgtctgtagctgtggtgaatctgcagtaccaaggagcccatctgcctgtccagggatttggacatttggtgccatcttcagaagatccaggagtcctgggaatcgtgtatgactcagttgctttccctgagcaggacgggagcccccctggcctcagagtgactgtgatgctgggaggttcctggttacagacactggaggctagtggctgtgtcttatctcaggagctgtttcaacagcgggcccaggaagcagctgctacacaattaggactgaaggagatgccgagccactgcttggtccatctacacaagaactgcattccccagtatacactaggtcactggcaaaaactagagtcagctaggcaattcctgactgctcacaggttgcccctgactctggctggagcctcctatgagggagttgctgttaatgactgtatagagagtgggcgccaggcagcagtcagtgtcctgggcacagaacctaacagctgatccccaactctcattcatgaaaataaaaattgctggagcttggc

SEQ ID NO: 352455 - DNA, 970 bp, Homo sapiens
ggcacgagtgccgcgagaacagagtggacggagcgtaggagagaccgaaaaggctgggggtgggagtagcggatttgaagcacttgttggcctacagaggtgtggcaagcagagcacctcagaactcaggcgtactgcccgccgcccgagccctgcgagggccgatagcgagggtgtggcccttatctgcacccagcagagcgccggcggggtacggtcttaggacctcgatctccttctccctcattttctctcatccctacctattgtgggtttccgcatgggccggaccgtggtcgtgctgggcggaggcatcagcggcttggccgccagttaccacctgagccgggccccctgcccccctaaggtggtcctagtggagagcagtgagcgtctgggaggctggattcgctccgttcgaggccctaatggtgctatctttgagcttggacctcggggaattaggccagcgggagccctaggggcccggaccttgctcctggtttctgagcttggcttggattcagaagtgctgcctgtccggggagaccacccagctgcccagaacaggttcctctacgtgggcggtgccctgcatgccctacccactggcctcagggggctactccgcccttcaccccccttctccaaacctctgttttgggctgggctgagggagctgaccaagccccggggcaaagagcctgatgagactgtgcacagttttgcccagcgccgccttggacctgaggtgacacttgcccagaggccccaaacctcttccctcctaaaccagctgcagagctccctgttcaaatctaccacctaggggctcttctgtatcatttggggatgccctcttctcttcataccccaccccctcataattcccaaaactcattattgggagtgaaggccttcatttccatccgtcacagtgggaatgtcccccaacccaaaccctatccca

SEQ ID NO: 352456 - DNA, 1925 bp, Homo sapiens
ggcacgagtgccgcgagaacagagtggacggagcgtaggagagaccgaaaaggctgggggtgggagtagcggatttgaagcacttgttggcctacagaggtgtggcaagcagagcacctcagaactcaggcgtactgcccgccgcccgagccctgcgagggccgatagcgagggtgtggcccttatctgcacccagcagagcgccggcggggtacggtcttaggacctcgatctccttctccctcattttctctcatccctacctattgtgggtgagtcctggcccctggacggggacctcgctgttccaccagcccatccgtgcacacttagtttcccctaaagcagtgagtggccgggatagaactcaaaaccggcggggcttctggagcgcaggttgtccccggtctgcctgtccatatcgccccctttcccccaggtttccgcatgggccggaccgtggtcgtgctgggcggaggcatcagcggcttggccgccagttaccacctgagccgggccccctgcccccctaaggtggtcctagtggagagcagtgagcgtctgggaggctggattcgctccgttcgaggccctaatggtgctatctttgagcttggacctcggggaattaggccagcgggagccctaggggcccggaccttgctcctggtttctgagcttggcttggattcagaagtgctgcctgtccggggagaccacccagctgcccagaacaggttcctctacgtgggcggtgccctgcatgccctacccactggcctcagggggctactccgcccttcaccccccttctccaaacctctgttttgggctgggctgagggagctgaccaagccccggggcaaagagcctgatgagactgtgcacagttttgcccagcgccgccttggacctgaggtggcgtctctagccatggacagtctctgccgtggagtgtttgcaggcaacagccgtgagctcagcatcaggtcctgctttcccagtctcttccaagctgagcaaacccatcgttccatattactgggcctgctgctgggggcagggcggaccccacagccagactcagcactcattcgccaggccttggctgagcgctggagccagtggtcacttcgtggaggtctagagatgttgcctcaggcccttgaaacccacctgactagtaggggggtcagtgttctcagaggccagccggtctgtgggctcagcctccaggcagaagggcgctggaaggtatctctaagggacagcagtctggaggctgaccacgttattagtgccattccagcttcagtgctcagtgagctgctccctgctgaggctgcccctctggctcgtgccctgagtgccatcactgcagtgtctgtagctgtggtgaatctgcagtaccaaggagcccatctgcctgtccagggatttggacatttggtgccatcttcagaagatccaggagtcctgggaatcgtgtatgactcagttgctttccctgagcaggacgggagcccccctggcctcagagtgactgtgatgctgggaggttcctggttacagacactggaggctagtggctgtgtcttatctcaggagctgtttcaacagcgggcccaggaagcagctgctacacaattaggactgaaggagatgccgagccactgcttggtccatctacacaagaactgcattccccagtatacactaggtcactggcaaaaactagagtcagctaggcaattcctgactgctcacaggttgcccctgactctggctggagcctcctatgagggagttgctgttaatgactgtatagagagtgggcgccaggcagcagtcagtgtcctgggcacagaacctaacagctgatccccaactctcattcatgaaaataaaaattgctggagcttggc

SEQ ID NO: 352457 - DNA, 2412 bp, Homo sapiens
ggcacgagtgccgcgagaacagagtggacggagcgtaggagagaccgaaaaggctgggggtgggagtagcggatttgaagcacttgttggcctacagaggtgtggcaagcagagcacctcagaactcaggcgtactgcccgccgcccgagccctgcgagggccgatagcgagggtgtggcccttatctgcacccagcagagcgccggcggggtacggtcttaggacctcgatctccttctccctcattttctctcatccctacctattgtgggtttccgcatgggccggaccgtggtcgtgctgggcggaggcatcagcggcttggccgccagttaccacctgagccgggccccctgcccccctaaggtggtcctagtggagagcagtgagcgtctgggaggctggattcgctccgttcgaggccctaatggtgctatctttgagcttggacctcggggaattaggccagcgggagccctaggggcccggaccttgctcctggtttctgagcttggcttggattcagaagtgctgcctgtccggggagaccacccagctgcccagaacaggttcctctacgtgggcggtgccctgcatgccctacccactggcctcagggggctactccgcccttcaccccccttctccaaacctctgttttgggctgggctgagggagctgaccaagccccggggcaaagagcctgatgagactgtgcacagttttgcccagcgccgccttggacctgaggtggcgtctctagccatggacagtctctgccgtggagtgtttgcaggcaacagccgtgagctcagcatcaggtcctgctttcccagtctcttccaagctgagcaaacccatcgttccatattactgggcctgctgctgggggcagggcggaccccacagccagactcagcactcattcgccaggccttggctgagcgctggagccagtggtcacttcgtggaggtctagagatgttgcctcaggcccttgaaacccacctgactagtaggggggtcagtgttctcagaggccagccggtctgtgggctcagcctccaggcagaagggcgctggaaggtatctctaagggacagcagtctggaggctgaccacgttattagtgccattccagcttcagtgctcagtgagctgctccctgctgaggctgcccctctggctcgtgccctgagtgccatcactgcagtgtctgtagctgtggtgaatctgcagtaccaaggagcccatctgcctgtccagggatttggacatttggtgccatcttcagaagatccaggagtcctgggaatcgtgtatgactcagttgctttccctgagcaggacgggagcccccctggcctcagagtgactgtgaggaggaggaaactttgcctagtggcatttccagagggctcctctgtgctccattgtaggcaaggccagactgatcagtgctatattccctccttaggtgatgctgggaggttcctggttacagacactggaggctagtggctgtgtcttatctcaggagctgtttcaacagcgggcccaggaagcagctgctacacaattaggactgaaggagatgccgagccactgcttggtccatctacacaagaccaagaaccagttgaagtggcgacagagtcatgacaggaccgtggagtggcctaaggagtacccagggcgaagtaggaaacaggctccttctattcttcatgtgcctgggtgccaactcctcaggtgcagggaccgtgaccacctgggggctgcctccgtgtcgacgcattcccagcgcacatacctggtcttttgctgcctgtcgtcaccgccaccccaacagccgggcaggcatcgctgccgccatcttggaagcgggcgctgcgggggcggggtctcgcgtcatggggcggggcctcggggcggagccacccgggctgactaggcacccggtcccagacaccgcgtggccgggggcttgtgagggagcagcgcctgagcctgcccacctggaacgcgttgtaggcgaccccctggggagcgggtgctagggttcaactccactacgcagactgctagtgggatttcatttcctgcccctcagatttgtaaaagcagaagctcaagcccttcattttcctctgggccgagactgatcaggaggctagtgagccggtttctggtgctccgctgacctcgttatcaccttgtggttggctgagccctctcccagtgtgtcagtggcaccccctgcagcctagtgccacttagtatcaattgttccttacgcaggctacagcgttgcggaccgctctagcgcatttttgtattcccgttgtatcccgcaggcctggaaataaaaagcgattagttaataaaacaatgaaacattgaaaaaaaaa

SEQ ID NO: 352458 - DNA, 1844 bp, Homo sapiens
ggcacgagtgccgcgagaacagagtggacggagcgtaggagagaccgaaaaggctgggggtgggagtagcggatttgaagcacttgttggcctacagaggtgtggcaagcagagcacctcagaactcaggcgtactgcccgccgcccgagccctgcgagggccgatagcgagggtgtggcccttatctgcacccagcagagcgccggcggggtacggtcttaggacctcgatctccttctccctcattttctctcatccctacctattgtgggtttccgcatgggccggaccgtggtcgtgctgggcggaggcatcagcggcttggccgccagttaccacctgagccgggccccctgcccccctaaggtggtcctagtggagagcagtgagcgtctgggaggctggattcgctccgttcgaggccctaatggtgctatctttgagcttggacctcggggaattaggccagcgggagccctaggggcccggaccttgctcctggtttctgagcttggcttggattcagaagtgctgcctgtccggggagaccacccagctgcccagaacaggttcctctacgtgggcggtgccctgcatgccctacccactggcctcagggggctactccgcccttcaccccccttctccaaacctctgttttgggctgggctgagggagctgaccaagccccggggcaaagagcctgatgagactgtgcacagttttgcccagcgccgccttggacctgaggtggcgtctctagccatggacagtctctgccgtggagtgtttgcaggcaacagccgtgagctcagcatcaggtcctgctttcccagtctcttccaagctgagcaaacccatcgttccatattactgggcctgctgctgggggcagggcggaccccacagccagactcagcactcattcgccaggccttggctgagcgctggagccagtggtcacttcgtggaggtctagagatgttgcctcaggcccttgaaacccacctgactagtaggggggtcagtgttctcagaggccagccggtctgtgggctcagcctccaggcagaagggcgctggaaggtatctctaagggacagcagtctggaggctgaccacgttattagtgccattccagcttcagtgctcagtgagctgctccctgctgaggctgcccctctggctcgtgccctgagtgccatcactgcagtgtctgtagctgtggtgaatctgcagtaccaaggagcccatctgcctgtccagggatttggacatttggtgccatcttcagaagatccaggagtcctgggaatcgtgtatgactcagttgctttccctgagcaggacgggagcccccctggcctcagagtgactgtgatgctgggaggttcctggttacagacactggaggctagtggctgtgtcttatctcaggagctgtttcaacagcgggcccaggaagcagctgctacacaattaggactgaaggagatgccgagccactgcttggtccatctacacaagaactgcattccccagtatacactaggtcactggcaaaaactagaggtaagttgggaaaacagctgggctgaggagggccaaggacatcagacccccagctaaaacattcctttcatcctttccttccagagtcagctaggcaattcctgactgctcacaggttgcccctgactctggctggagcctcctatgagggagttgctgttaatgactgtatagagagtgggcgccaggcagcagtcagtgtcctgggcacagaacctaacagctgatccccaactctcattcatgaaaataaaaattgctggagcttggc

SEQ ID NO: 352459 - DNA, 1054 bp, Homo sapiens
ggcacgagtgccgcgagaacagagtggacggagcgtaggagagaccgaaaaggctgggggtgggagtagcggatttgaagcacttgttggcctacagaggtgtggcaagcagagcacctcagaactcaggcgtactgcccgccgcccgagccctgcgagggccgatagcgagggtgtggcccttatctgcacccagcagagcgccggcggggtacggtcttaggacctcgatctccttctccctcattttctctcatccctacctattgtgggtttccgcatgggccggaccgtggtcgtgctgggcggaggcatcagcggcttggccgccagttaccacctgagccgggccccctgcccccctaaggtggtcctagtggagagcagtgagcgtctgggaggctggattcgctccgttcgaggccctaatggtgctatctttgagcttggacctcggggaattaggccagcgggagccctaggggcccggaccttgctcctggtatctctaagggacagcagtctggaggctgaccacgttattagtgccattccagcttcagggatttggacatttggtgccatcttcagaagatccaggagtcctgggaatcgtgtatgactcagttgctttccctgagcaggacgggagcccccctggcctcagagtgactgtgatgctgggaggttcctggttacagacactggaggctagtggctgtgtcttatctcaggagctgtttcaacagcgggcccaggaagcagctgctacacaattaggactgaaggagatgccgagccactgcttggtccatctacacaagaactgcattccccagtatacactaggtcactggcaaaaactagagtcagctaggcaattcctgactgctcacaggttgcccctgactctggctggagcctcctatgagggagttgctgttaatgactgtatagagagtgggcgccaggcagcagtcagtgtcctgggcacagaacctaacagctgatccccaactctcattcatgaaaataaaaattgctggagcttggc

SEQ ID NO: 352460 - DNA, 821 bp, Homo sapiens
ggcacgagtgccgcgagaacagagtggacggagcgtaggagagaccgaaaaggctgggggtgggagtagcggatttgaagcacttgttggcctacagaggtgtggcaagcagagcacctcagaactcaggcgtactgcccgccgcccgagccctgcgagggccgatagcgagggtgtggcccttatctgcacccagcagagcgccggcggggtttccgcatgggccggaccgtggtcgtgctgggcggaggcatcagcggcttggccgccagttaccacctgagccgggccccctgcccccctaaggtggtcctagtggagagcagtgagcgtctgggaggctggattcgctccgttcgaggccctaatggtgctatctttgagcttggacctcggggaattaggccagcgggagccctaggggcccggaccttgctcctggtgatgctgggaggttcctggttacagacactggaggctagtggctgtgtcttatctcaggagctgtttcaacagcgggcccaggaagcagctgctacacaattaggactgaaggagatgccgagccactgcttggtccatctacacaagaactgcattccccagtatacactaggtcactggcaaaaactagagtcagctaggcaattcctgactgctcacaggttgcccctgactctggctggagcctcctatgagggagttgctgttaatgactgtatagagagtgggcgccaggcagcagtcagtgtcctgggcacagaacctaacagctgatccccaactctcattcatgaaaataaaaattgctggagcttggc

SEQ ID NO: 352461 - DNA, 1264 bp, Homo sapiens
ggcacgagtgccgcgagaacagagtggacggagcgtaggagagaccgaaaaggctgggggtgggagtagcggatttgaagcacttgttggcctacagaggtgtggcaagcagagcacctcagaactcaggcgtactgcccgccgcccgagccctgcgagggccgatagcgagggtgtggcccttatctgcacccagcagagcgccggcggggtacggtcttaggacctcgatctccttctccctcattttctctcatccctacctattgtgggtgagtcctggcccctggacggggacctcgctgttccaccagcccatccgtgcacacttagtttcccctaaagcagtgagtggccgggatagaactcaaaaccggcggggcttctggagcgcaggttgtccccggtctgcctgtccatatcgccccctttcccccaggtttccgcatgggccggaccgtggtcgtgctgggcggaggcatcagcggcttggccgccagttaccacctgagccgggccccctgcccccctaaggtggtcctagtggagagcagtgagcgtctgggaggctggattcgctccgttcgaggccctaatggtgctatctttgagcttggacctcggggaattaggccagcgggagccctaggggcccggaccttgctcctggtgagaggcttgtgggatgtctaggagaggttgtggagggggcttccattggggaatagagtttaggggaggaagtatgtttggtgggtcagatcttcccttagtttctcctcttctgagggcatgtgtttctgagcttggcttggattcagaagtgctgcctgtccggggagaccacccagctgcccagaacaggttcctctacgtgggcggtgccctgcatgccctacccactggcctcagggggctactccgcccttcaccccccttctccaaacctctgttttgggctgggctgagggagctgaccaagccccggggcaaagagcctgatgagactgtgcacagttttgcccagcgccgccttggacctgaggtgacacttgcccagaggccccaaacctcttccctcctaaaccagctgcagagctccctgttcaaatctaccacctaggggctcttctgtatcatttggggatgccctcttctcttcataccccaccccctcataattcccaaaactcattattgggagtgaaggccttcatttccatccgtcacagtgggaatgtcccccaacccaaaccctatccca

SEQ ID NO: 352462 - DNA, 1151 bp, Homo sapiens
tcagggctaagtattttattccagtttgttctaacagccacgccatagcagacgtgtgaccacctccaccagccctacgaggggtagaactgaagccaaggccccagtcacgggccgggcttcaaaatccaggcttccctgcggccagcgccgctggctccctgctccccgagatcgcctccccagtagctgagaatacgctgagtttttatggtttcacattcagactaagccgcccgcgaccttgtaggtaaagatgaatccgaatgggtcggcgcgcctgtttcctagggtactgctttcgggcgctttctcctgaagttgacacttcccagccgaggagccttaaagccccacgcagcggaaggaacgcggcccggcggcggcgagacaggcctgctccggccgggaaaggcgcacgagaaccaggacgcgtccacgccactcggggcgggcgttcgccccgagcacgcccacctcagacgccaaggaggctgaccgcagtccggtcgacgatgggcatggtctctacttactttccgcccaggctaacctctagcgcattttgctaatttgggtctgaatcgccatcaccgcgggcagcgcagccttagccgccagccctacagccgggagggaatgtaatgtaaggtttgtgcctcggggcggatccggcttgcacagtcagttaaggaaccagagtatcgcgagatccggggtaaaggggcgggaggacgtgcacgcgcccagagccgttagggtggaactccactcgggcggggcgggcggagtgatacagctggacgccagttggtggagcccccgcgggaaacgactgagcgcgaggagcgtgcgcgctcccgtcgtggcgacggtggcggcgagcggcgtcagagcttgagggggggttgacggcttctggcgggtggcggctccctttccgcacgcctcgaggcggcggcggccaccgagacagcagcgcaccttcccccattcctggcctctgatgccccatcgccggctatgaggaccctccatatgatcaggtgacgtagatgggcgacaggaagatgccactcttcactaaggagagagtcgaaagactactgtatatggaaaggcaagagtacgcatatggagccatgatataa

SEQ ID NO: 352463 - DNA, 3517 bp, Homo sapiens
  misc_feature (1151)..(1151): n is a, c, g, or t
  misc_feature (1158)..(1158): n is a, c, g, or t
  misc_feature (1182)..(1182): n is a, c, g, or t
  misc_feature (1199)..(1201): n is a, c, g, or t
  misc_feature (1204)..(1205): n is a, c, g, or t
  misc_feature (1208)..(1208): n is a, c, g, or t
  misc_feature (1212)..(1212): n is a, c, g, or t
  misc_feature (1216)..(1216): n is a, c, g, or t
  misc_feature (1227)..(1227): n is a, c, g, or t
  misc_feature (1255)..(1255): n is a, c, g, or t
  misc_feature (1262)..(1262): n is a, c, g, or t
tcagggctaagtattttattccagtttgttctaacagccacgccatagcagacgtgtgaccacctccaccagccctacgaggggtagaactgaagccaaggccccagtcacgggccgggcttcaaaatccaggcttccctgcggccagcgccgctggctccctgctccccgagatcgcctccccagtagctgagaatacgctgagtttttatggtttcacattcagactaagccgcccgcgaccttgtaggtaaagatgaatccgaatgggtcggcgcgcctgtttcctagggtactgctttcgggcgctttctcctgaagttgacacttcccagccgaggagccttaaagccccacgcagcggaaggaacgcggcccggcggcggcgagacaggcctgctccggccgggaaaggcgcacgagaaccaggacgcgtccacgccactcggggcgggcgttcgccccgagcacgcccacctcagacgccaaggaggctgaccgcagtccggtcgacgatgggcatggtctctacttactttccgcccaggctaacctctagcgcattttgctaatttgggtctgaatcgccatcaccgcgggcagcgcagccttagccgccagccctacagccgggagggaatgtaatgtaaggtttgtgcctcggggcggatccggcttgcacagtcagttaaggaaccagagtatcgcgagatccggggtaaaggggcgggaggacgtgcacgcgcccagagccgttagggtggaactccactcgggcggggcgggcggagtgatacagctggacgccagttggtggagcccccgcgggaaacgactgagcgcgaggagcgtgcgcgctcccgtcgtggcgacggtggcggcgagcggcgtcagagcttgagggggggttgacggcttctggcgggtggcggtgttgaaggcgagagcttgcttggcccgtgtcgcttctgtcccaagaaccggacggagagtgagggcacgagggtcgctgtcgggggctgtcgtcttccacgtacacgtcgtcgtgaggagcgcagtccggactcttcccgcaacccctccggctccctttccgcacgcctcgaggcggcggcggccaccgagacagcagcgcaccttcccccatcccnccaaaanaaaaaaaaaaaaaaaaaaaaaggnctgcaaaaaaaaaaagnnngtnngcncgcnaagnagccgccaagncggcgcaggcccagaagcgcgcgaagcnggaccanatgaagggcacctcccgggacgggagatacaactcgtcaacgaatcaaattcagtgatgacagagtatgcaagagtcaccttctcaactgttgtcctcatgatgtcctttctggaactagaatggatcttggagaatgtctgaaagtccatgacctggctttaagagcggattatgaaattgcatccaaagaacaagattttttctttgaacttgatgccatggatcatctgcagtcattcattgcagattgtgatcgtagaacagaagtggccaagaaaagattagcagaaactcaagaagagattagtgctgaagtagcagcaaaggcagaacgtgttcatgagttaaatgaagaaattggtaaattgttagccaaggtggaacaactaggagctgaagggaatgtggaggaatcccagaaagtaatggatgaagtagagaaagcacgggcaaagaaaagagaagcagaggaagtttatcggaattctatgccagcttccagttttcagcagcagaaacttcgagtctgtgaagtctgctctgcctatttaggacttcatgataatgacagacgactggctgatcattttgggggtaaactgcacctgggatttattgaaataagagagaagcttgaagaattaaagagagtcgtagctgagaagcaggagaaaagaaaccaggaacggctgaaacgaagagaagagagagagagagaagaaagggagaagctgaggaggtcccgatcacacagcaagaatccaaaaagatccaggtccagagagcatcgcagacatcgatctcgctccatgtcacgtgaacgcaagaggagaactcgatccaaatctcgggagaaacgccatcgccacaggtcccgctccagcagccgtagccgcagccgtagccaccagagaagtcggcacagttctagagataggagcagagaacgatccaagaggagatcctcaaaagaaagattcagagaccaagacttagcatcatgtgacagagacaggagttcaagagacagatcacctcgtgacagagatcggaaagataagaagcggtcctatgagagtgctaatggcagatcagaagacaggaggagctctgaagagcgcgaagcaggggagatctaactagctgtgtacatttcttcagtccttaagcttcctacggagttacgtactattgtttagttcacagctgttcagggtgacagtgagcagatccagacaccagatccagctaggctagatgtacagtatctaacttgatctgaactgaacctgttttccttgatgatgcctaaaactacatccatagtttctggtgaacctgtaatacagttctgaaagtacagttttatataataagatgctgatctctttattctttcaagtaagagtgctagtgaacaaattgtgttacttgccttgggattttttgaacgtttgtaaaatgctgtcttcctagtccaaacagctgcagctttgggcatttttctttttaattattcttcctctgactttgtatcccttaatacctacactctccaattgtaagagaaagggggcagggaagcaatatagcttccattctaaggctgtattcccgttatgaattactagctgattacagttcagagcattgatcctggaatgtgtgctggagaaatttaaaatactggggttttttgtttaatggtgcctatttagagttggaagttgaacagctgttgcattacatacttttgcttttttattgaaattttgaaatcaaacgtcttgatttttctgttctgttgaattgctatgttcaggatgttctagggggtgggggcagggactcttttcgtaataagcacttgttttattttgtgtgtgtggagtataaaggctacacccttattgtaaaaaaataataataataaaatgaaagaaacaatcaccaccaccattattaaactgtaacttgtctagtaaattgtcactagaactatttgctgtgggcatttcctctattctgttacgtcattaacagtgccttactgtgcaaggcaccaaaggacataaatacgtacttgcaaagattccagatgagctgttcatgtgggccccttgctgactatattccagccacttcagggttgtttgtaatgaccgttatagagaagggctcgacctgcagaagaaactggggtgtttttattctcattcaacaaacccaaataaaaacagtatatgtaaccaa

SEQ ID NO: 352464 - DNA, 2286 bp, Homo sapiens
tgcctacctcaatctgcaagggagtgtcagaaaggccccgcattcgccaagccggagatacaactcgtcaacgaatcaaattcagtgatgacagagtatgcaagagtcaccttctcaactgttgtcctcatgatgtcctttctggaactagaatggatcttggagaatgtctgaaagtccatgacctggctttaagagcggattatgaaattgcatccaaagaacaagattttttctttgaacttgatgccatggatcatctgcagtcattcattgcagattgtgatcgtagaacagaagtggccaagaaaagattagcagaaactcaagaagagattagtgctgaagtagcagcaaaggcagaacgtgttcatgagttaaatgaagaaattggtaaattgttagccaaggtggaacaactaggagctgaagggaatgtggaggaatcccagaaagtaatggatgaagtagagaaagcacgggcaaagaaaagagaagcagaggaagtttatcggaattctatgccagcttccagttttcagcagcagaaacttcgagtctgtgaagtctgctctgcctatttaggacttcatgataatgacagacgactggctgatcattttgggggtaaactgcacctgggatttattgaaataagagagaagcttgaagaattaaagagagtcgtagctgagaagcaggagaaaagaaaccaggaacggctgaaacgaagagaagagagagagagagaagaaagggagaagctgaggaggtcccgatcacacagcaagaatccaaaaagatccaggtccagagagcatcgcagacatcgatctcgctccatgtcacgtgaacgcaagaggagaactcgatccaaatctcgggagaaacgccatcgccacaggtcccgctccagcagccgtagccgcagccgtagccaccagagaagtcggcacagttctagagataggagcagagaacgatccaagaggagatcctcaaaagaaagattcagagaccaagacttagcatcatgtgacagagacaggagttcaagagacagatcacctcgtgacagagatcggaaagataagaagcggtcctatgagagtgctaatggcagatcagaagacaggaggagctctgaagagcgcgaagcaggggagatctaactagctgtgtacatttcttcagtccttaagcttcctacggagttacgtactattgtttagttcacagctgttcagggtgacagtgagcagatccagacaccagatccagctaggctagatgtacagtatctaacttgatctgaactgaacctgttttccttgatgatgcctaaaactacatccatagtttctggtgaacctgtaatacagttctgaaagtacagttttatataataagatgctgatctctttattctttcaagtaagagtgctagtgaacaaattgtgttacttgccttgggattttttgaacgtttgtaaaatgctgtcttcctagtccaaacagctgcagctttgggcatttttctttttaattattcttcctctgactttgtatcccttaatacctacactctccaattgtaagagaaagggggcagggaagcaatatagcttccattctaaggctgtattcccgttatgaattactagctgattacagttcagagcattgatcctggaatgtgtgctggagaaatttaaaatactggggttttttgtttaatggtgcctatttagagttggaagttgaacagctgttgcattacatacttttgcttttttattgaaattttgaaatcaaacgtcttgatttttctgttctgttgaattgctatgttcaggatgttctagggggtgggggcagggactcttttcgtaataagcacttgttttattttgtgtgtgtggagtataaaggctacacccttattgtaaaaaaataataataataaaatgaaagaaacaatcaccaccaccattattaaactgtaacttgtctagtaaattgtcactagaactatttgctgtgggcatttcctctattctgttacgtcattaacagtgccttactgtgcaaggcaccaaaggacataaatacgtacttgcaaagattccagatgagctgttcatgtgggccccttgctgactatattccagccacttcagggttgtttgtaatgaccgttatagagaagggctcgacctgcagaagaaactggggtgtttttattctcattcaacaaacccaaataaaaacagtatatgtaaccaa

SEQ ID NO: 352465 - DNA, 2223 bp, Homo sapiens
acgtagcccacctgactagcccacctgacagagtatgcaagagtcaccttctcaactgttgtcctcatgatgtcctttctggaactagaatggatcttggagaatgtctgaaagtccatgacctggctttaagagcggattatgaaattgcatccaaagaacaagattttttctttgaacttgatgccatggatcatctgcagtcattcattgcagattgtgatcgtagaacagaagtggccaagaaaagattagcagaaactcaagaagagattagtgctgaagtagcagcaaaggcagaacgtgttcatgagttaaatgaagaaattggtaaattgttagccaaggtggaacaactaggagctgaagggaatgtggaggaatcccagaaagtaatggatgaagtagagaaagcacgggcaaagaaaagagaagcagaggaagtttatcggaattctatgccagcttccagttttcagcagcagaaacttcgagtctgtgaagtctgctctgcctatttaggacttcatgataatgacagacgactggctgatcattttgggggtaaactgcacctgggatttattgaaataagagagaagcttgaagaattaaagagagtcgtagctgagaagcaggagaaaagaaaccaggaacggctgaaacgaagagaagagagagagagagaagaaagggagaagctgaggaggtcccgatcacacagcaagaatccaaaaagatccaggtccagagagcatcgcagacatcgatctcgctccatgtcacgtgaacgcaagaggagaactcgatccaaatctcgggagaaacgccatcgccacaggtcccgctccagcagccgtagccgcagccgtagccaccagagaagtcggcacagttctagagataggagcagagaacgatccaagaggagatcctcaaaagaaagattcagagaccaagacttagcatcatgtgacagagacaggagttcaagagacagatcacctcgtgacagagatcggaaagataagaagcggtcctatgagagtgctaatggcagatcagaagacaggaggagctctgaagagcgcgaagcaggggagatctaactagctgtgtacatttcttcagtccttaagcttcctacggagttacgtactattgtttagttcacagctgttcagggtgacagtgagcagatccagacaccagatccagctaggctagatgtacagtatctaacttgatctgaactgaacctgttttccttgatgatgcctaaaactacatccatagtttctggtgaacctgtaatacagttctgaaagtacagttttatataataagatgctgatctctttattctttcaagtaagagtgctagtgaacaaattgtgttacttgccttgggattttttgaacgtttgtaaaatgctgtcttcctagtccaaacagctgcagctttgggcatttttctttttaattattcttcctctgactttgtatcccttaatacctacactctccaattgtaagagaaagggggcagggaagcaatatagcttccattctaaggctgtattcccgttatgaattactagctgattacagttcagagcattgatcctggaatgtgtgctggagaaatttaaaatactggggttttttgtttaatggtgcctatttagagttggaagttgaacagctgttgcattacatacttttgcttttttattgaaattttgaaatcaaacgtcttgatttttctgttctgttgaattgctatgttcaggatgttctagggggtgggggcagggactcttttcgtaataagcacttgttttattttgtgtgtgtggagtataaaggctacacccttattgtaaaaaaataataataataaaatgaaagaaacaatcaccaccaccattattaaactgtaacttgtctagtaaattgtcactagaactatttgctgtgggcatttcctctattctgttacgtcattaacagtgccttactgtgcaaggcaccaaaggacataaatacgtacttgcaaagattccagatgagctgttcatgtgggccccttgctgactatattccagccacttcagggttgtttgtaatgaccgttatagagaagggctcgacctgcagaagaaactggggtgtttttattctcattcaacaaacccaaataaaaacagtatatgtaaccaa

SEQ ID NO: 352466 - DNA, 3403 bp, Homo sapiens
tcagggctaagtattttattccagtttgttctaacagccacgccatagcagacgtgtgaccacctccaccagccctacgaggggtagaactgaagccaaggccccagtcacgggccgggcttcaaaatccaggcttccctgcggccagcgccgctggctccctgctccccgagatcgcctccccagtagctgagaatacgctgagtttttatggtttcacattcagactaagccgcccgcgaccttgtaggtaaagatgaatccgaatgggtcggcgcgcctgtttcctagggtactgctttcgggcgctttctcctgaagttgacacttcccagccgaggagccttaaagccccacgcagcggaaggaacgcggcccggcggcggcgagacaggcctgctccggccgggaaaggcgcacgagaaccaggacgcgtccacgccactcggggcgggcgttcgccccgagcacgcccacctcagacgccaaggaggctgaccgcagtccggtcgacgatgggcatggtctctacttactttccgcccaggctaacctctagcgcattttgctaatttgggtctgaatcgccatcaccgcgggcagcgcagccttagccgccagccctacagccgggagggaatgtaatgtaaggtttgtgcctcggggcggatccggcttgcacagtcagttaaggaaccagagtatcgcgagatccggggtaaaggggcgggaggacgtgcacgcgcccagagccgttagggtggaactccactcgggcggggcgggcggagtgatacagctggacgccagttggtggagcccccgcgggaaacgactgagcgcgaggagcgtgcgcgctcccgtcgtggcgacggtggcggcgagcggcgtcagagcttgagggggggttgacggcttctggcgggtggcggtgttgaaggcgagagcttgcttggcccgtgtcgcttctgtcccaagaaccggacggagagtgagggcacgagggtcgctgtcgggggctgtcgtcttccacgtacacgtcgtcgtgaggagcgcagtccggactcttcccgcaacccctccggctccctttccgcacgcctcgaggcggcggcggccaccgagacagcagcgcaccttcccccatcccttccccttatcccccagcccaaaagggcccggtctgcgccccacccccgcccgtccgcccgctacgccgccgccatgtcggcgcaggcccagatgcgcgcgatgctggaccagttgatgggcacctcccgggacggagatacaactcgtcaacgaatcaaattcagtgatgacagagtatgcaagagtcaccttctcaactgttgtcctcatgatgtcctttctggaactagaatggatcttggagaatgtctgaaagtccatgacctggctttaagagcggattatgaaattgcatccaaagaacaagattttttctttgaacttgatgccatggatcatctgcagtcattcattgcagattgtgatcgtagaacagaagtggccaagaaaagattagcagaaactcaagaagagattagtgctgaagtagcagcaaaggcagaacgtgttcatgagttaaatgaagaaattggtaaattgttagccaaggtggaacaactaggagctgaagggaatgtggaggaatcccagaaagtaatggatgaagtagagaaagcacgggcaaagaaaagagaagcagaggaagtttatcggaattctatgccagcttccagttttcagcagcagaaacttcgagtctgtgaagtctgctctgcctatttaggacttcatgataatgacagacgactggctgatcattttgggggtaaactgcacctgggatttattgaaataagagagaagcttgaagaattaaagagagtcgtagctgagaagcaggagaaaagaaaccaggaacggctgaaacgaagagaagagagagagagagaagaaagggagaagctgaggaggtcccgatcacacagcaagaatccaaaaagatccaggtccagagagcatcgcagacatcgatctcgctccatgtcacgtgaacgcaagaggagaactcgatccaaatctcgggagaaacgccatcgccacaggtcccgctccagcagccgtagccgcagccgtagccaccagagaagtcggcacagttctagagataggagcagagaacgatccaagaggagatcctcaaaagaaagattcagagaccaagacttagcatcatgtgacagagacaggagttcaagagacagatcacctcgtgacagagatcggaaagataagaagcggtcctatgagagtgctaatggcagatcagaagacaggaggagctctgaagagcgcgaagcaggggagatctaactagctgtgtacatttcttcagtccttaagcttcctacggagttacgtactattgtttagttcacagctgttcagggtgacagtgagcagatccagacaccagatccagctaggctagatgtacagtatctaacttgatctgaactgaacctgttttccttgatgatgcctaaaactacatccatagtttctggtgaacctgtaatacagttctgaaagtacagttttatataataagatgctgatctctttattctttcaagtaagagtgctagtgaacaaattgtgttacttgccttgggattttttgaacgtttgtaaaatgctgtcttcctagtccaaacagctgcagctttgggcatttttctttttaattattcttcctctgactttgtatcccttaatacctacactctccaattgtaagagaaagggggcagggaagcaatatagcttccattctaaggctgtattcccgttatgaattactagctgattacagttcagagcattgatcctggaatgtgtgctggagaaatttaaaatactggggttttttgtttaatggtgcctatttagagttggaagttgaacagctgttgcattacatacttttgcttttttattgaaattttgaaatcaaacgtcttgatttttctgttctgttgaattgctatgttcaggatgttctagggggtgggggcagggactcttttcgtaataagcacttgttttattttgtgtgtgtggagtataaaggctacacccttattgtaaaaaaataataataataaaatgaaagaaacaaaaaaaaaaaaaaaaaaaaaaaaaaaaaaaaaaaaaaaaaaaaaaaaaaaaaaaaaaaaaaaaaaaaccttttgggccccttgggcccattgaattttctgggccaagtttatgcttgcggccgaatttggggctaatttggccaattcgccctatggggggccgttttacaattaattggccggggtttacc

SEQ ID NO: 352467 - DNA, 2528 bp, Homo sapiens
tgttcattgctgtgttcacattctgttccatagggaaagatttattgccagtgagctgcttaccacacactgcagacctaatgctcgaatgaatgagggaggtgctaatggggccaggctttaaaatgcagacctttatgctgggattacaggcgtgagtcaccgtgcccagtctttttatatcattttaagtttattaaaacattaagtagaatgttcaaagtggacattattttagaaccattttttgtttaaccctccttaactatatttctaaaactgaacagtcatattttttattttcctgaaagtattacttattcaggttcttggtagtgcctcagatcctaattttgaatatgggttgagtgagataattatgtaaaagtgctgtgtcacctgtaaagaaccaaataaatgtaatttgttgaattttagatgttggaagtatggaagattccatgtttattctgattccataatatgtttggttttccgattgatttattatttacctttcttataatgaagttgggtatgggaatggagaaggtagtaaacagttatggctaatcaagatttattagtgtgagcatctttgtctttttttatttccccttgttggttgaataagctaactcagtatgagtagatttttagaagtggttatttaaattcatattaataattgagtagttctcttatctaagtcaggtgttggcaaactgttgccgataggccaaatctggccggtagcctgtacaaccagcaagctatggatggtttttacattctaaaaagaaaagaactgccacaaagattgcatggacctgcagtaccccagatagtcaccatctggcccctattctaagccatttaaaatttagataatacatttctttcactttttaaagctgttatctatgtattattttttatattaaaataccttttatgaattggagaaactctgtgttgtctctgagatgagagtagcctgtaagaaattattttagccttctgaccctctgctatttgtttttcacccatcttcttgttttaatgcccttatcaactatggtagtgctctgtaatttgtcagaaaactgactcctctgtcatgggtatattcgtctatatatcttcagctatcaagagcttaatatttatcctattctttaatttgggtttttgggtttcccaacatattttgctcctcaaattaatatttttcagatcctcaaaagaaagattcagagaccaagacttagcatcatgtgacagagacaggagttcaagagacagatcacctcgtgacagagatcggaaagataagaagcggtcctatgagagtgctaatggcagatcagaagacaggaggagctctgaagagcgcgaagcaggggagatctaactagctgtgtacatttcttcagtccttaagcttcctacggagttacgtactattgtttagttcacagctgttcagggtgacagtgagcagatccagacaccagatccagctaggctagatgtacagtatctaacttgatctgaactgaacctgttttccttgatgatgcctaaaactacatccatagtttctggtgaacctgtaatacagttctgaaagtacagttttatataataagatgctgatctctttattctttcaagtaagagtgctagtgaacaaattgtgttacttgccttgggattttttgaacgtttgtaaaatgctgtcttcctagtccaaacagctgcagctttgggcatttttctttttaattattcttcctctgactttgtatcccttaatacctacactctccaattgtaagagaaagggggcagggaagcaatatagcttccattctaaggctgtattcccgttatgaattactagctgattacagttcagagcattgatcctggaatgtgtgctggagaaatttaaaatactggggttttttgtttaatggtgcctatttagagttggaagttgaacagctgttgcattacatacttttgcttttttattgaaattttgaaatcaaacgtcttgatttttctgttctgttgaattgctatgttcaggatgttctagggggtgggggcagggactcttttcgtaataagcacttgttttattttgtgtgtgtggagtataaaggctacacccttattgtaaaaaaataataataataaaatgaaagaaacaatcaccaccaccattattaaactgtaacttgtctagtaaattgtcactagaactatttgctgtgggcatttcctctattctgttacgtcattaacagtgccttactgtgcaaggcaccaaaggacataaatacgtacttgcaaagattccagatgagctgttcatgtgggccccttgctgactatattccagccacttcagggttgtttgtaatgaccgttatagagaagggctcgacctgcagaagaaactggggtgtttttattctcattcaacaaacccaaataaaaacagtatatgtaaccaa

SEQ ID NO: 352468 - DNA, 4678 bp, Homo sapiens
tcagggctaagtattttattccagtttgttctaacagccacgccatagcagacgtgtgaccacctccaccagccctacgaggggtagaactgaagccaaggccccagtcacgggccgggcttcaaaatccaggcttccctgcggccagcgccgctggctccctgctccccgagatcgcctccccagtagctgagaatacgctgagtttttatggtttcacattcagactaagccgcccgcgaccttgtaggtaaagatgaatccgaatgggtcggcgcgcctgtttcctagggtactgctttcgggcgctttctcctgaagttgacacttcccagccgaggagccttaaagccccacgcagcggaaggaacgcggcccggcggcggcgagacaggcctgctccggccgggaaaggcgcacgagaaccaggacgcgtccacgccactcggggcgggcgttcgccccgagcacgcccacctcagacgccaaggaggctgaccgcagtccggtcgacgatgggcatggtctctacttactttccgcccaggctaacctctagcgcattttgctaatttgggtctgaatcgccatcaccgcgggcagcgcagccttagccgccagccctacagccgggagggaatgtaatgtaaggtttgtgcctcggggcggatccggcttgcacagtcagttaaggaaccagagtatcgcgagatccggggtaaaggggcgggaggacgtgcacgcgcccagagccgttagggtggaactccactcgggcggggcgggcggagtgatacagctggacgccagttggtggagcccccgcgggaaacgactgagcgcgaggagcgtgcgcgctcccgtcgtggcgacggtggcggcgagcggcgtcagagcttgagggggggttgacggcttctggcgggtggcggtgttgaaggcgagagcttgcttggcccgtgtcgcttctgtcccaagaaccggacggagagtgagggcacgagggtcgctgtcgggggctgtcgtcttccacgtacacgtcgtcgtgaggagcgcagtccggactcttcccgcaacccctccggctccctttccgcacgcctcgaggcggcggcggccaccgagacagcagcgcaccttcccccatcccttccccttatcccccagcccaaaagggcccggtctgcgccccacccccgcccgtccgcccgctacgccgccgccatgtcggcgcaggcccagatgcgcgcgatgctggaccagttgatgggcacctcccgggacggagatacaactcgtcaacgaatcaaattcagtgatgacagagtatgcaagagtcaccttctcaactgttgtcctcatgatgtcctttctggaactagaatggatcttggagaatgtctgaaagtccatgacctggctttaagagcggattatgaaattgcatccaaagaacaagattttttctttgaacttgatgccatggatcatctgcagtcattcattgcagattgtgatcgtagaacagaagtggccaagaaaagattagcagaaactcaagaagagattagtgctgaagtagcagcaaaggcagaacgtgttcatgagttaaatgaagaaattggtaaattgttagccaaggtggaacaactaggagctgaagggaatgtggaggaatcccagaaagtaatggatgaagtagagaaagcacgggcaaagaaaagagaagcagaggaagtttatcggaattctatgccagcttccagttttcagcagcagaaacttcgagtctgtgaagtctgctctgcctatttaggacttcatgataatgacagacgactggctgatcattttgggggtaaactgcacctgggatttattgaaataagagagaagcttgaagaattaaagagagtcgtagctgagaagcaggagaaaagaaaccaggaacggctgaaacgaagagaagagagagagagagaagaaagggagaagctgaggaggtcccgatcacacagcaagaatccaaaaagatccaggtccagagagcatcgcagacatcgatctcgctccatgtcacgtgaacgcaagaggagaactcgatccaaatctcgggagaaacgccatcgccacaggtcccgctccagcagccgtagccgcagccgtagccaccagagaagtcggcacagttctagagataggagcagagaacgatccaagaggaggtattgatgtgtcaatcagaggatatggagctaccttaatgttttagagttgtttatgtttacttatgttacttatgtttagagttcagattattggtttgaaacttttgcatctggtaatatgtacacatttatgtgtgggtgtacaacatttttctgtgattatatgggtagttttgaaagaatatacttatgagccagagcaagaaattggaaccaatatgtgtagaggttattgcttttctctgcttagtgtgtcttggaaaaaagttctttacaggtaaataattttaaataccaatacccttagtatggatcagcaaattaggggctctgagaagtcctttcattacaagagttgtttagctttgatttattgttttctaaacttatttgagctgggatgctttttcagagcagacacattctagtatattcttgttttatctgcactatagatatgtattgttacataccttcagcttggcaaggcagactaataaggaggttccaagacttcccttggtttaatgagaacattcaaaaggtgcaggcatagggtaaggtatgtttgaggacttgaatatctattaaggatagacaaaggattataatgtggtagaagagtttagcattcatagtctgtatagatcaaactgtcaaaacttctcaggtcacatgatggcccttaaaccaggtaatttctgtgtaacgtaagccatgtttaaaattgcttttttcttgacaactattcagaagtatatgtatgataaacattttttgagtgcctagtacctactagtcttacatattctgtggattactccacataaaatctataataaaatccacagaaagctgttaaaatctttcctatttttttttgactcaactttccattccctgaaatcactcacaagctgagtttgttaataggctctcaatattttatttcttatattctggccttgtttttagtatttcttaaggtgattttaataataattaattgtatatgttttactgtactagacttagtaaaacataagaaagacgtataacatagttgaacaactttaagttgctctaagaagtttcctatgtgaggctgggtgccatggctcacgcttataatcccagcactttgggagaccgagatgggcgtatcacttgagatcaggagttcaagaccagcctggccaaccaaccccatctctactaaaatacaaacattagccgggcatggtggcacatgcctgtaatcccagctactcaggaggctgaggaaggagaattgcttgaacacaaaggtggaggttgcagtgagccaagatcgcaccactgcactccagcctgggtgacagagcgagactccagctctcaaaacaaaaaaaaaacaaacaaaaaaaaaaacaaaaagtctcctatgtgagttagaacaaaggattgacatctttgacaataattagactggcataagactaccacatgttataaagtgctaaactgcatatcatagaataaatgatccgagagtttagatgaggcaaataacagagtaatcaaaaatggcttcaggtagtcggtaaaatttgaacaggtagaatcagctaggaaaaagatattccatatagagtgaatatcctaggcaaatgcagagaatgaggagggagtttgtaaaggacagagtgatttgtaggcctcttatctcacactcttgaaactgattttgggggtctaccctcagtgcagtgttcagaaataagcattttttaaaagttacctgtcttatctgcacaatgaattttcagaattatcctgctaggtgatggaaggtttagacattttcctgtgtcaaatctgcccaactgtcattgttgttgctgaactcctaaatgtctttattggtgatgggtatgggaaggatgggcgtgaagtcccctaatctgagattgtgttattttagtccctgatgcttcctgcgttgatgaagttgtataggaatttttccaccatacatgatacatgatcatatctaagatgtcagcatgttcataaagaggattatttttgtaaaactattaaaagttttgcttttctcgagcactttctcatctttgaattcaaattattctcttttaaagcatcattctttgttttatactaaaaattaccagataattgctgttaaaacctacttggtatttcatacaacatcaagttattgctacatatttgggtttaatttttcaaggtaaaagttcttattgaaagccttttatgttttgctgttctcctttccctactgtgaaatacttgtctctgatacaagtagattctttgtgacctcttcctggcaatagtgccctgcgtaaatgaggaccatttgcatctatctatctttttgctctgttcaaacatgtttagtgcagactccaaagtcagattacttg

SEQ ID NO: 352469 - DNA, 3077 bp, Homo sapiens
tcagggctaagtattttattccagtttgttctaacagccacgccatagcagacgtgtgaccacctccaccagccctacgaggggtagaactgaagccaaggccccagtcacgggccgggcttcaaaatccaggcttccctgcggccagcgccgctggctccctgctccccgagatcgcctccccagtagctgagaatacgctgagtttttatggtttcacattcagactaagccgcccgcgaccttgtaggtaaagatgaatccgaatgggtcggcgcgcctgtttcctagggtactgctttcgggcgctttctcctgaagttgacacttcccagccgaggagccttaaagccccacgcagcggaaggaacgcggcccggcggcggcgagacaggcctgctccggccgggaaaggcgcacgagaaccaggacgcgtccacgccactcggggcgggcgttcgccccgagcacgcccacctcagacgccaaggaggctgaccgcagtccggtcgacgatgggcatggtctctacttactttccgcccaggctaacctctagcgcattttgctaatttgggtctgaatcgccatcaccgcgggcagcgcagccttagccgccagccctacagccgggagggaatgtaatgtaaggtttgtgcctcggggcggatccggcttgcacagtcagttaaggaaccagagtatcgcgagatccggggtaaaggggcgggaggacgtgcacgcgcccagagccgttagggtggaactccactcgggcggggcgggcggagtgatacagctggacgccagttggtggagcccccgcgggaaacgactgagcgcgaggagcgtgcgcgctcccgtcgtggcgacggtggcggcgagcggcgtcagagcttgagggggggttgacggcttctggcgggtggcggtgttgaaggcgagagcttgcttggcccgtgtcgcttctgtcccaagaaccggacggagagtgagggcacgagggtcgctgtcgggggctgtcgtcttccacgtacacgtcgtcgtgaggagcgcagtccggactcttcccgcaacccctccggctccctttccgcacgcctcgaggcggcggcggccaccgagacagcagcgcaccttcccccatcccttccccttatcccccagcccaaaagggcccggtctgcgccccacccccgcccgtccgcccgctacgccgccgccatgtcggcgcaggcccagatgcgcgcgatgctggaccagttgatgggcacctcccgggacggagatacaactcgtcaacgaatcaaattcagtgatgacagagtatgcaagagtcaccttctcaactgttgtcctcatgatgtcctttctggaactagaatggatcttggagaatgtctgaaagtccatgacctggctttaagagcggattatgaaattgcatccaaagaacaagattttttctttgaacttgatgccatggatcatctgcagtcattcattgcagattgtgatcgtagaacagaagtggccaagaaaagattagcagaaactcaagaagagattagtgctgaagtagcagcaaaggcagaacgtgttcatgagttaaatgaagaaattggtaaattgttagccaaggtggaacaactaggagctgaagggaatgtggaggaatcccagaaagtaatggatgaagtagagaaagcacgggcaaagaaaagagaagcagaggaagtttatcggaattctatgccagcttccagttttcagcagcagaaacttcgagtctgtgaagtctgctctgcctatttaggacttcatgataatgacagacgactggctgatcattttgggggtaaactgcacctgggatttattgaaataagagagaagcttgaagaattaaagagagtcgtagctgagaagcaggagaaaagaaaccaggaacggctgaaacgaagagaagagagagagagagaagaaagggagaagctgaggaggtcccgatcacacagcaagaatccaaaaagatccaggtccagagagcatcgcagacatcgatctcgctccatgtcacgtgaacgcaagaggagaactcgatccaaatctcgggagaaacgccatcgccacaggtcccgctccagcagccgtagccgcagccgtagccaccagagaagtcggcacagttctagagataggagcagagaacgatccaagaggagatcctcaaaagaaagattcagagaccaagacttagcatcatgtgacagagacaggagttcaagagacagatcacctcgtgacagagatcggaaagataagaagcggtcctatgagagtgctaatggcagatcagaagacaggaggagctctgaagagcgcgaagcaggggagatctaactagctgtgtacatttcttcagtccttaagcttcctacggagttacgtactattgtttagttcacagctgttcagggtgacagtgagcagatccagacaccagatccagctaggctagatgtacagtatctaacttgatctgaactgaacctgttttccttgatgatgcctaaaactacatccatagtttctggtgaacctgtaatacagttctgaaagtacagttttatataataagatgctgatctctttattctttcaagtaagagtgctagtgaacaaattgtgttacttgccttgggattttttgaacgtttgtaaaatgctgtcttcctagtccaaacagctgcagctttgggcatttttctttttaattattcttcctctgactttgtatcccttaatacctacactctccaattgtaagagaaagggggcagggaagcaatatagcttccattctaaggctgtattcccgttatgaattactagctgattacagttcagagcattgatcctggaatgtgtgctggagaaatttaaaatactggggttttttgtttaatggtgcctatttagagttggaagttatattgcttccctgccccctttctcttacaattggagagtgtaggtattaagggatacaaagtcagaggaagaataattaaaaa

SEQ ID NO: 352470 - DNA, 4091 bp, Homo sapiens
tcagggctaagtattttattccagtttgttctaacagccacgccatagcagacgtgtgaccacctccaccagccctacgaggggtagaactgaagccaaggccccagtcacgggccgggcttcaaaatccaggcttccctgcggccagcgccgctggctccctgctccccgagatcgcctccccagtagctgagaatacgctgagtttttatggtttcacattcagactaagccgcccgcgaccttgtaggtaaagatgaatccgaatgggtcggcgcgcctgtttcctagggtactgctttcgggcgctttctcctgaagttgacacttcccagccgaggagccttaaagccccacgcagcggaaggaacgcggcccggcggcggcgagacaggcctgctccggccgggaaaggcgcacgagaaccaggacgcgtccacgccactcggggcgggcgttcgccccgagcacgcccacctcagacgccaaggaggctgaccgcagtccggtcgacgatgggcatggtctctacttactttccgcccaggctaacctctagcgcattttgctaatttgggtctgaatcgccatcaccgcgggcagcgcagccttagccgccagccctacagccgggagggaatgtaatgtaaggtttgtgcctcggggcggatccggcttgcacagtcagttaaggaaccagagtatcgcgagatccggggtaaaggggcgggaggacgtgcacgcgcccagagccgttagggtggaactccactcgggcggggcgggcggagtgatacagctggacgccagttggtggagcccccgcgggaaacgactgagcgcgaggagcgtgcgcgctcccgtcgtggcgacggtggcggcgagcggcgtcagagcttgagggggggttgacggcttctggcgggtggcggtgttgaaggcgagagcttgcttggcccgtgtcgcttctgtcccaagaaccggacggagagtgagggcacgagggtcgctgtcgggggctgtcgtcttccacgtacacgtcgtcgtgaggagcgcagtccggactcttcccgcaacccctccggctccctttccgcacgcctcgaggcggcggcggccaccgagacagcagcgcaccttcccccatcccttccccttatcccccagcccaaaagggcccggtctgcgccccacccccgcccgtccgcccgctacgccgccgccatgtcggcgcaggcccagatgcgcgcgatgctggaccagttgatgggcacctcccgggacggagatacaactcgtcaacgaatcaaattcagtgatgacagagtatgcaagagtcaccttctcaactgttgtcctcatgatgtcctttctggaactagaatggatcttggagaatgtctgaaagtccatgacctggctttaagagcggattatgaaattgcatccaaagaacaagattttttctttgaacttgatgccatggatcatctgcagtcattcattgcagattgtgatcgtagaacagaagtggccaagaaaagattagcagaaactcaagaagagattagtgctgaagtagcagcaaaggcagaacgtgttcatgagttaaatgaagaaattggtaaattgttagccaaggtggaacaactaggagctgaagggaatgtggaggaatcccagaaagtaatggatgaagtagagaaagcacgggcaaagaaaagagaagcagaggaagtttatcggaattctatgccagcttccagttttcagcagcagaaacttcgagtctgtgaagtctgctctgcctatttaggacttcatgataatgacagacgactggctgatcattttgggggtaaactgcacctgggatttattgaaataagagagaagcttgaagaattaaagagagtcgtagctgagaagcaggagaaaagaaaccaggaacggctgaaacgaagagaagagagagagagagaagaaagggagaagctgaggaggtcccgatcacacagcaagaatccaaaaagatccaggtccagagagcatcgcagacatcgatctcgctccatgtcacgtgaacgcaagaggagaactcgatccaaatctcgggagaaacgccatcgccacaggtcccgctccagcagccgtagccgcagccgtagccaccagagaagtcggcacagttctagagataggagcagagaacgatccaagaggaggtattgatgtgtcaatcagaggatatggagctaccttaatgttttagagttgtttatgtttacttatgttacttatgtttagagttcagattattggtttgaaacttttgcatctggtaatatgtacacatttatgtgtgggtgtacaacatttttctgtgattatatgggtagttttgaaagaatatacttatgagccagagcaagaaattggaaccaatatgtgtagaggttattgcttttctctgcttagtgtgtcttggaaaaaagttctttacaggtaaataattttaaataccaatacccttagtatggatcagcaaattaggggctctgagaagtcctttcattacaagagttgtttagctttgatttattgttttctaaacttatttgagctgggatgctttttcagagcagacacattctagtatattcttgttttatctgcactatagatatgtattgttacataccttcagcttggcaaggcagactaataaggaggttccaagacttcccttggtttaatgagaacattcaaaaggtgcaggcatagggtaaggtatgtttgaggacttgaatatctattaaggatagacaaaggattataatgtggtagaagagtttagcattcatagtctgtatagatcaaactgtcaaaacttctcaggtcacatgatggcccttaaaccaggtaatttctgtgtaacgtaagccatgtttaaaattgcttttttcttgacaactattcagaagtatatgtatgataaacattttttgagtgcctagtacctactagtcttacatattctgtggattactccacataaaatctataataaaatccacagaaagctgttaaaatctttcctatttttttttgactcaactttccattccctgaaatcactcacaagctgagtttgttaataggctctcaatattttatttcttatattctggccttgtttttagtatttcttaaggtgattttaataataattaattgtatatgttttactgtactagacttagtaaaacataagaaagacgtataacatagttgaacaactttaagttgctctaagaagtttcctatgtgaggctgggtgccatggctcacgcttataatcccagcactttgggagaccgagatgggcgtatcacttgagatcaggagttcaagaccagcctggccaaccaaccccatctctactaaaatacaaacattagccgggcatggtggcacatgcctgtaatcccagctactcaggaggctgaggaaggagaattgcttgaacacaaaggtggaggttgcagtgagccaagatcgcaccactgcactccagcctgggtgacagagcgagactccagctctcaaaacaaaaaaaaaacaaacaaaaaaaaaaacaaaaagtctcctatgtgagttagaacaaaggattgacatctttgacaataattagactggcataagactaccacatgttataaagtgctaaactgcatatcatagaataaatgatccgagagtttagatgaggcaaataacagagtaatcaaaaatggcttcaggtagtcggtaaaatttgaacaggtagaatcagctaggaaaaagatattccatatagagtgaatatcctaggcaaatgcagagaatgaggagggagtttgtaaaggacagagtgatttgtaggcctcttatctcacactcttgaaactgattttgggggtctaccctcagtgcagtgttcagaaataagcattttttaaaagttacctgtcttatctgcacaatgaattttcagaattatcctgctaggtgacagagcgagactccatctcaaaaaaaaaaaaaaaaag

SEQ ID NO: 352471 - DNA, 2208 bp, Homo sapiens
tcagggctaagtattttattccagtttgttctaacagccacgccatagcagacgtgtgaccacctccaccagccctacgaggggtagaactgaagccaaggccccagtcacgggccgggcttcaaaatccaggcttccctgcggccagcgccgctggctccctgctccccgagatcgcctccccagtagctgagaatacgctgagtttttatggtttcacattcagactaagccgcccgcgaccttgtaggtaaagatgaatccgaatgggtcggcgcgcctgtttcctagggtactgctttcgggcgctttctcctgaagttgacacttcccagccgaggagccttaaagccccacgcagcggaaggaacgcggcccggcggcggcgagacaggcctgctccggccgggaaaggcgcacgagaaccaggacgcgtccacgccactcggggcgggcgttcgccccgagcacgcccacctcagacgccaaggaggctgaccgcagtccggtcgacgatgggcatggtctctacttactttccgcccaggctaacctctagcgcattttgctaatttgggtctgaatcgccatcaccgcgggcagcgcagccttagccgccagccctacagccgggagggaatgtaatgtaaggtttgtgcctcggggcggatccggcttgcacagtcagttaaggaaccagagtatcgcgagatccggggtaaaggggcgggaggacgtgcacgcgcccagagccgttagggtggaactccactcgggcggggcgggcggagtgatacagctggacgccagttggtggagcccccgcgggaaacgactgagcgcgaggagcgtgcgcgctcccgtcgtggcgacggtggcggcgagcggcgtcagagcttgagggggggttgacggcttctggcgggtggcggtgttgaaggcgagagcttgcttggcccgtgtcgcttctgtcccaagaaccggacggagagtgagggcacgagggtcgctgtcgggggctgtcgtcttccacgtacacgtcgtcgtgaggagcgcagtccggactcttcccgcaacccctccggctccctttccgcacgcctcgaggcggcggcggccaccgagactccagctctcaaaacaaaaaaaaaacaaacaaaaaaaaaaacaaaaagtctcctatgtgagttagaacaaaggattgacatctttgacaataattagactggcataagactaccacatgttataaagtgctaaactgcatatcatagaataaatgatccgagagtttagatgaggcaaataacagagtaatcaaaaatggcttcaggtagtcggtaaaatttgaacaggtagaatcagctaggaaaaagatattccatatagagtgaatatcctaggcaaatgcagagaatgaggagggagtttgtaaaggacagagtgatttgtaggcctcttatctcacactcttgaaactgattttgggggtctaccctcagtgcagtgttcagaaataagcattttttaaaagttacctgtcttatctgcacaatgaattttcagaattatcctgctaggtgatggaaggtttagacattttcctgtgtcaaatctgcccaactgtcattgttgttgctgaactcctaaatgtctttattggtgatgggtatgggaaggatgggcgtgaagtcccctaatctgagattgtgttattttagtccctgatgcttcctgcgttgatgaagttgtataggaatttttccaccatacatgatacatgatcatatctaagatgtcagcatgttcataaagaggattatttttgtaaaactattaaaagttttgcttttctcgagcactttctcatctttgaattcaaattattctcttttaaagcatcattctttgttttatactaaaaattaccagataattgctgttaaaacctacttggtatttcatacaacatcaagttattgctacatatttgggtttaatttttcaaggtaaaagttcttattgaaagccttttatgttttgctgttctcctttccctactgtgaaatacttgtctctgatacaagtagattctttgtgacctcttcctggcaatagtgccctgcgtaaatgaggaccatttgcatctatctatctttttgctctgttcaaacatgtttagtgcagactccaaagtcagattacttg

SEQ ID NO: 352472 - DNA, 2289 bp, Homo sapiens
tcagggctaagtattttattccagtttgttctaacagccacgccatagcagacgtgtgaccacctccaccagccctacgaggggtagaactgaagccaaggccccagtcacgggccgggcttcaaaatccaggcttccctgcggccagcgccgctggctccctgctccccgagatcgcctccccagtagctgagaatacgctgagtttttatggtttcacattcagactaagccgcccgcgaccttgtaggtaaagatgaatccgaatgggtcggcgcgcctgtttcctagggtactgctttcgggcgctttctcctgaagttgacacttcccagccgaggagccttaaagccccacgcagcggaaggaacgcggcccggcggcggcgagacaggcctgctccggccgggaaaggcgcacgagaaccaggacgcgtccacgccactcggggcgggcgttcgccccgagcacgcccacctcagacgccaaggaggctgaccgcagtccggtcgacgatgggcatggtctctacttactttccgcccaggctaacctctagcgcattttgctaatttgggtctgaatcgccatcaccgcgggcagcgcagccttagccgccagccctacagccgggagggaatgtaatgtaaggtttgtgcctcggggcggatccggcttgcacagtcagttaaggaaccagagtatcgcgagatccggggtaaaggggcgggaggacgtgcacgcgcccagagccgttagggtggaactccactcgggcggggcgggcggagtgatacagctggacgccagttggtggagcccccgcgggaaacgactgagcgcgaggagcgtgcgcgctcccgtcgtggcgacggtggcggcgagcggcgtcagagcttgagggggggttgacggcttctggcgggtggcggtgttgaaggcgagagcttgcttggcccgtgtcgcttctgtcccaagaaccggacggagagtgagggcacgagggtcgctgtcgggggctgtcgtcttccacgtacacgtcgtcgtgaggagcgcagtccggactcttcccgcaacccctccggctccctttccgcacgcctcgaggcggcggcggccaccgagacagcagcgcaccttcccccatcccttccccttatcccccagcccaaaagggcccggtctgcgccccacccccgcccgtccgcccgctacgccgccgccatgtcggcgcaggcccagatgcgcgcgatgctggaccagttgatgggcacctcccgggacggagatacaactcgtcaacgaatcaaattcagtgatgacagagtatgcaagagtcaccttctcaactgttgtcctcatgatgtcctttctggaactagaatggatcttggagaatgtctgaaagtccatgacctggctttaagagcggattatgaaattgcatccaaagaacaagattttttctttgaacttgatgccatggatcatctgcagtcattcattgcagattgtgatcgtagaacagaagtggccaagaaaagattagcagaaactcaagaagagattagtgctgaagtagcagcaaaggcagaacgtgttcatgagttaaatgaagaaattggtaaattgttagccaaggtggaacaactaggagctgaagggaatgtggaggaatcccagaaagtaatggatgaagtagagaaagcacgggcaaagaaaagagaagcagaggaagtttatcggaattctatgccagcttccagttttcagcagcagaaacttcgagtctgtgaagtctgctctgcctatttaggacttcatgataatgacagacgactggctgatcattttgggggtaaactgcacctgggatttattgaaataagagagaagcttgaagaattaaagagagtcgtagctgagaagcaggagaaaagaaaccaggaacggctgaaacgaagagaagagagagagagagaagaaagggagaagctgaggaggtcccgatcacacagcaagaatccaaaaaggtaggtgtattacataagacaggtataagtagtgaagttgtctttttcaaaggtagtttttatagattgattaaatggtcctttaaaaattttcttttttggctgggcacggtgatgcatgcttgtaatcccagctactcaagaggctgaggcagaattgcttgaagccgggaggcagaggttgcagtgagccaagatagcaccactgcactccagcctgggcaacagaataggactctgtctttaaaaaaaaaaa

SEQ ID NO: 352473 - DNA, 1878 bp, Homo sapiens
tcagggctaagtattttattccagtttgttctaacagccacgccatagcagacgtgtgaccacctccaccagccctacgaggggtagaactgaagccaaggccccagtcacgggccgggcttcaaaatccaggcttccctgcggccagcgccgctggctccctgctccccgagatcgcctccccagtagctgagaatacgctgagtttttatggtttcacattcagactaagccgcccgcgaccttgtaggtaaagatgaatccgaatgggtcggcgcgcctgtttcctagggtactgctttcgggcgctttctcctgaagttgacacttcccagccgaggagccttaaagccccacgcagcggaaggaacgcggcccggcggcggcgagacaggcctgctccggccgggaaaggcgcacgagaaccaggacgcgtccacgccactcggggcgggcgttcgccccgagcacgcccacctcagacgccaaggaggctgaccgcagtccggtcgacgatgggcatggtctctacttactttccgcccaggctaacctctagcgcattttgctaatttgggtctgaatcgccatcaccgcgggcagcgcagccttagccgccagccctacagccgggagggaatgtaatgtaaggtttgtgcctcggggcggatccggcttgcacagtcagttaaggaaccagagtatcgcgagatccggggtaaaggggcgggaggacgtgcacgcgcccagagccgttagggtggaactccactcgggcggggcgggcggagtgatacagctggacgccagttggtggagcccccgcgggaaacgactgagcgcgaggagcgtgcgcgctcccgtcgtggcgacggtggcggcgagcggcgtcagagcttgagggggggttgacggcttctggcgggtggcggtgttgaaggcgagagcttgcttggcccgtgtcgcttctgtcccaagaaccggacggagagtgagggcacgagggtcgctgtcgggggctgtcgtcttccacgtacacgtcgtcgtgaggagcgcagtccggactcttcccgcaacccctccggctccctttccgcacgcctcgaggcggcggcggccaccgagacagcagcgcaccttcccccatcccttccccttatcccccagcccaaaagggcccggtctgcgccccacccccgcccgtccgcccgctacgccgccgccatgtcggcgcaggcccagatgcgcgcgatgctggaccagttgatgggcacctcccgggacggagatacaactcgtcaacgaatcaaattcagtgatgacagagtatgcaagagtcaccttctcaactgttgtcctcatgatgtcctttctggaactagaatggatcttggagaatgtctgaaagtccatgacctggctttaagagcggattatgaaattgcatccaaagaacaagattttttctttgaacttgatgccatggatcatctgcagtcattcattgcagattgtgatcgtagaacagaagtggccaagaaaagattagcagaaactcaagaagagattagtgctgaagtagcagcaaaggcagccccagcgaggagaagtcaaagctccgtgccccttccagcacaaaagcaagtccattgaaccggtggctttttctgtcatctagctcctaaaaacaaaaacaaaggtaaattcctggagttcaacctaagtgttttgggtcaaaggtggggtcaaaggtgggctgtacaagtgttcatgaattgggaggccggagaaaagacactgagggtttgcagagagggtcttctgttctggagtctagttctattcagtctctctgagaggtgggtcagaacataaggt

SEQ ID NO: 352474 - DNA, 1325 bp, Homo sapiens
  misc_feature (1325)..(1325): n is a, c, g, or t
tgttcattgctgtgttcacattctgttccatagggaaagatttattgccagtgagctgcttaccacacactgcagacctaatgctcgaatgaatgagggaggtgctaatggggccaggctttaaaatgcagacctttatgctgggattacaggcgtgagtcaccgtgcccagtctttttatatcattttaagtttattaaaacattaagtagaatgttcaaagtggacattattttagaaccattttttgtttaaccctccttaactatatttctaaaactgaacagtcatattttttattttcctgaaagtattacttattcaggttcttggtagtgcctcagatcctaattttgaatatgggttgagtgagataattatgtaaaagtgctgtgtcacctgtaaagaaccaaataaatgtaatttgttgaattttagatgttggaagtatggaagattccatgtttattctgattccataatatgtttggttttccgattgatttattatttacctttcttataatgaagttgggtatgggaatggagaaggtagtaaacagttatggctaatcaagatttattagtgtgagcatctttgtctttttttatttccccttgttggttgaataagctaactcagtatgagtagatttttagaagtggttatttaaattcatattaataattgagtagttctcttatctaagtcaggtgttggcaaactgttgccgataggccaaatctggccggtagcctgtacaaccagcaagctatggatggtttttacattctaaaaagaaaagaactgccacaaagattgcatggacctgcagtaccccagatagtcaccatctggcccctattctaagccatttaaaatttagataatacatttctttcactttttaaagctgttatctatgtattattttttatattaaaataccttttatgaattggagaaactctgtgttgtctctgagatgagagtagcctgtaagaaattattttagccttctgaccctctgctatttgtttttcacccatcttcttgttttaatgcccttatcaactatggtagtgctctgtaatttgtcagaaaactgactcctctgtcatgggtatattcgtctatatatcttcagctatcaagagcttaatattttattccttaatttcctttttacaatttttgggggggttttattaaggggggggttttttttcccccccaaaaaaaccaaatttataattttttttttgggggccttttccccccctttccccaaaaaaattttttcaaaaacctttcaaattttttn

SEQ ID NO: 352475 - DNA, 147 bp, Homo sapiens
tactgccttagataacaagttttttctcagcagttctgaaatactttgaaatttaaaattcattctcttgtttattcatgatcttcttttttatttctttttaggcagaacgtgttcatgagttaaatgaagaaattggtaaattgt

SEQ ID NO: 352476 - DNA, 3517 bp, Homo sapiens
tcagggctaagtattttattccagtttgttctaacagccacgccatagcagacgtgtgaccacctccaccagccctacgaggggtagaactgaagccaaggccccagtcacgggccgggcttcaaaatccaggcttccctgcggccagcgccgctggctccctgctccccgagatcgcctccccagtagctgagaatacgctgagtttttatggtttcacattcagactaagccgcccgcgaccttgtaggtaaagatgaatccgaatgggtcggcgcgcctgtttcctagggtactgctttcgggcgctttctcctgaagttgacacttcccagccgaggagccttaaagccccacgcagcggaaggaacgcggcccggcggcggcgagacaggcctgctccggccgggaaaggcgcacgagaaccaggacgcgtccacgccactcggggcgggcgttcgccccgagcacgcccacctcagacgccaaggaggctgaccgcagtccggtcgacgatgggcatggtctctacttactttccgcccaggctaacctctagcgcattttgctaatttgggtctgaatcgccatcaccgcgggcagcgcagccttagccgccagccctacagccgggagggaatgtaatgtaaggtttgtgcctcggggcggatccggcttgcacagtcagttaaggaaccagagtatcgcgagatccggggtaaaggggcgggaggacgtgcacgcgcccagagccgttagggtggaactccactcgggcggggcgggcggagtgatacagctggacgccagttggtggagcccccgcgggaaacgactgagcgcgaggagcgtgcgcgctcccgtcgtggcgacggtggcggcgagcggcgtcagagcttgagggggggttgacggcttctggcgggtggcggtgttgaaggcgagagcttgcttggcccgtgtcgcttctgtcccaagaaccggacggagagtgagggcacgagggtcgctgtcgggggctgtcgtcttccacgtacacgtcgtcgtgaggagcgcagtccggactcttcccgcaacccctccggctccctttccgcacgcctcgaggcggcggcggccaccgagacagcagcgcaccttcccccatcccttccccttatcccccagcccaaaagggcccggtctgcgccccacccccgcccgtccgcccgctacgccgccgccatgtcggcgcaggcccagatgcgcgcgatgctggaccagttgatgggcacctcccgggacggagatacaactcgtcaacgaatcaaattcagtgatgacagagtatgcaagagtcaccttctcaactgttgtcctcatgatgtcctttctggaactagaatggatcttggagaatgtctgaaagtccatgacctggctttaagagcggattatgaaattgcatccaaagaacaagattttttctttgaacttgatgccatggatcatctgcagtcattcattgcagattgtgatcgtagaacagaagtggccaagaaaagattagcagaaactcaagaagagattagtgctgaagtagcagcaaaggcagaacgtgttcatgagttaaatgaagaaattggtaaattgttagccaaggtggaacaactaggagctgaagggaatgtggaggaatcccagaaagtaatggatgaagtagagaaagcacgggcaaagaaaagagaagcagaggaagtttatcggaattctatgccagcttccagttttcagcagcagaaacttcgagtctgtgaagtctgctctgcctatttaggacttcatgataatgacagacgactggctgatcattttgggggtaaactgcacctgggatttattgaaataagagagaagcttgaagaattaaagagagtcgtagctgagaagcaggagaaaagaaaccaggaacggctgaaacgaagagaagagagagagagagaagaaagggagaagctgaggaggtcccgatcacacagcaagaatccaaaaagatccaggtccagagagcatcgcagacatcgatctcgctccatgtcacgtgaacgcaagaggagaactcgatccaaatctcgggagaaacgccatcgccacaggtcccgctccagcagccgtagccgcagccgtagccaccagagaagtcggcacagttctagagataggagcagagaacgatccaagaggagatcctcaaaagaaagattcagagaccaagacttagcatcatgtgacagagacaggagttcaagagacagatcacctcgtgacagagatcggaaagataagaagcggtcctatgagagtgctaatggcagatcagaagacaggaggagctctgaagagcgcgaagcaggggagatctaactagctgtgtacatttcttcagtccttaagcttcctacggagttacgtactattgtttagttcacagctgttcagggtgacagtgagcagatccagacaccagatccagctaggctagatgtacagtatctaacttgatctgaactgaacctgttttccttgatgatgcctaaaactacatccatagtttctggtgaacctgtaatacagttctgaaagtacagttttatataataagatgctgatctctttattctttcaagtaagagtgctagtgaacaaattgtgttacttgccttgggattttttgaacgtttgtaaaatgctgtcttcctagtccaaacagctgcagctttgggcatttttctttttaattattcttcctctgactttgtatcccttaatacctacactctccaattgtaagagaaagggggcagggaagcaatatagcttccattctaaggctgtattcccgttatgaattactagctgattacagttcagagcattgatcctggaatgtgtgctggagaaatttaaaatactggggttttttgtttaatggtgcctatttagagttggaagttgaacagctgttgcattacatacttttgcttttttattgaaattttgaaatcaaacgtcttgatttttctgttctgttgaattgctatgttcaggatgttctagggggtgggggcagggactcttttcgtaataagcacttgttttattttgtgtgtgtggagtataaaggctacacccttattgtaaaaaaataataataataaaatgaaagaaacaatcaccaccaccattattaaactgtaacttgtctagtaaattgtcactagaactatttgctgtgggcatttcctctattctgttacgtcattaacagtgccttactgtgcaaggcaccaaaggacataaatacgtacttgcaaagattccagatgagctgttcatgtgggccccttgctgactatattccagccacttcagggttgtttgtaatgaccgttatagagaagggctcgacctgcagaagaaactggggtgtttttattctcattcaacaaacccaaataaaaacagtatatgtaaccaa

SEQ ID NO: 352477 - DNA, 4049 bp, Homo sapiens
  misc_feature (3824)..(3824): n is a, c, g, or t
tcagggctaagtattttattccagtttgttctaacagccacgccatagcagacgtgtgaccacctccaccagccctacgaggggtagaactgaagccaaggccccagtcacgggccgggcttcaaaatccaggcttccctgcggccagcgccgctggctccctgctccccgagatcgcctccccagtagctgagaatacgctgagtttttatggtttcacattcagactaagccgcccgcgaccttgtaggtaaagatgaatccgaatgggtcggcgcgcctgtttcctagggtactgctttcgggcgctttctcctgaagttgacacttcccagccgaggagccttaaagccccacgcagcggaaggaacgcggcccggcggcggcgagacaggcctgctccggccgggaaaggcgcacgagaaccaggacgcgtccacgccactcggggcgggcgttcgccccgagcacgcccacctcagacgccaaggaggctgaccgcagtccggtcgacgatgggcatggtctctacttactttccgcccaggctaacctctagcgcattttgctaatttgggtctgaatcgccatcaccgcgggcagcgcagccttagccgccagccctacagccgggagggaatgtaatgtaaggtttgtgcctcggggcggatccggcttgcacagtcagttaaggaaccagagtatcgcgagatccggggtaaaggggcgggaggacgtgcacgcgcccagagccgttagggtggaactccactcgggcggggcgggcggagtgatacagctggacgccagttggtggagcccccgcgggaaacgactgagcgcgaggagcgtgcgcgctcccgtcgtggcgacggtggcggcgagcggcgtcagagcttgagggggggttgacggcttctggcgggtggcggtgttgaaggcgagagcttgcttggcccgtgtcgcttctgtcccaagaaccggacggagagtgagggcacgagggtcgctgtcgggggctgtcgtcttccacgtacacgtcgtcgtgaggagcgcagtccggactcttcccgcaacccctccggctccctttccgcacgcctcgaggcggcggcggccaccgagacagcagcgcaccttcccccatcccttccccttatcccccagcccaaaagggcccggtctgcgccccacccccgcccgtccgcccgctacgccgccgccatgtcggcgcaggcccagatgcgcgcgatgctggaccagttgatgggcacctcccgggacggagatacaactcgtcaacgaatcaaattcagtgatgacagagtatgcaagagtcaccttctcaactgttgtcctcatgatgtcctttctggaactagaatggatcttggagaatgtctgaaagtccatgacctggctttaagagcggattatgaaattgcatccaaagaacaagattttttctttgaacttgatgccatggatcatctgcagtcattcattgcagattgtgatcgtagaacagaagtggccaagaaaagattagcagaaactcaagaagagattagtgctgaagtagcagcaaaggcagaacgtgttcatgagttaaatgaagaaattggtaaattgttagccaaggtggaacaactaggagctgaagggaatgtggaggaatcccagaaagtaatggatgaagtagagaaagcacgggcaaagaaaagagaagcagaggaagtttatcggaattctatgccagcttccagttttcagcagcagaaacttcgagtctgtgaagtctgctctgcctatttaggacttcatgataatgacagacgactggctgatcattttgggggtaaactgcacctgggatttattgaaataagagagaagcttgaagaattaaagagagtcgtagctgagaagcaggagaaaagaaaccaggaacggctgaaacgaagagaagagagagagagagaagaaagggagaagctgaggaggtcccgatcacacagcaagaatccaaaaagatccaggtccagagagcatcgcagacatcgatctcgctccatgtcacgtgaacgcaagaggagaactcgatccaaatctcgggagaaacgccatcgccacaggtcccgctccagcagccgtagccgcagccgtagccaccagagaagtcggcacagttctagagataggagcagagaacgatccaagaggagatcctcaaaagaaagattcagagaccaagacttagcatcatgtgacagagacaggagttcaagagacagatcacctcgtgacagagatcggaaagataagaagcggtcctatgagagtgctaatggcagatcagaagacaggaggagctctgaagagcgcgaagcaggggagatctaactagctgtgtacatttcttcagtccttaagcttcctacggagttacgtactattgtttagttcacagctgttcagggtgacagtgagcagatccagacaccagatccagctaggctagatgtacagtatctaacttgatctgaactgaacctgttttccttgatgatgcctaaaactacatccatagtttctggtgaacctgtaatacagttctgaaagtacagttttatataataagatgctgatctctttattctttcaagtaagagtgctagtgaacaaattgtgttacttgccttgggattttttgaacgtttgtaaaatgctgtcttcctagtccaaacagctgcagctttgggcatttttctttttaattattcttcctctgactttgtatcccttaatacctacactctccaattgtaagagaaagggggcagggaagcaatatagcttccattctaaggctgtattcccgttatgaattactagctgattacagttcagagcattgatcctggaatgtgtgctggagaaatttaaaatactggggttttttgtttaatggtgcctatttagagttggaagttgaacagctgttgcattacatacttttgcttttttattgaaattttgaaatcaaacgtcttgatttttctgttctgttgaattgctatgttcaggatgttctagggggtgggggcagggactcttttcgtaataagcacttgttttattttgtgtgtgtggagtataaaggctacacccttattgtaaaaaaataataataataaaatgaaagaaacaatcaccaccaccattattaaactgtaacttgtctagtaaattgtcactagaactatttgctgtgggcatttcctctattctgttacgtcattaacagtgccttactgtgcaaggcaccaaaggacataaatacgtacttgcaaagattccagatgagctgttcatgtgggccccttgctgactatattccagccacttcagggttgtttgtaatgaccgttatagagaagggctcgacctgcagaagaaactggggtgtttttattctcattcaacaaacccaaataaaaacagtatatgtaaccaaaaaaaaaaaaaaaaaaaaaaaaaaaaaaaaaaaaaaaggggggggcgccgcttctctaaaattttccctctccggggggccccattttggcggcgttaccccgttttttttgttaacaagggggccccctttatgggggagtccgtttttattaaatgaggccggggccgcgtttttacaaacgttctgtggcgcgtggggaaacacacggtcccctagcctgtggagaaacttcttggtggagaagggaaccccttttctctcgcggggggggggtgcaacaatcatgtgggcaccacatatctcnccctcaccgagaatattttgaacaaccctcctagagagtaacatatttacacaatatcttgcaagcggtgttctacaggtggcgttccaacatcaaacgcggacatattatgcctggggcggctttgaacaagtttttcgcttctacccgggaatatttctgactttttctgtgaaaacaatttttttttccccccgaggaacctcgtcgttgtataaaagatgg

SEQ ID NO: 352478 - DNA, 3264 bp, Homo sapiens
tcgataatatatcagtttaaggctaaaataaaacacctacatttcttagggcttatcattctatatagaaagaggaaacatcctaatgagttttttcttttgtttttccaaagagattctaagcaaaaaaattttaactaacatctatattttgttattggagctagttacctttctttttcttagattctttaacgttttgagtagatagccatatttgataagcaggttggatgcttctgttgcttaggaggtaggtgtattgtgttatatgaagacagaatgaatttaaatatacccagtttggcagtatgaaaaagctcagactacataaaacttggaggtatggaacctttggacgcattaaagttaacgtttcattaggcaatgtgcctttgtttgactggtgtgtaagtccttcttccaggtttgtacgctcttaaacgcgttattctaccctctctaactcctcccagcagcaaaagggagacacttcagctggaacaaaatagtggaagaaatggcgtctggggttcagtggggattcgcagtgtgtatgcaatgtttgcaagattattttttatgtttttcaattactgtaaataaaaatatatcaatgcttagtgtcaagaagggaacattgtataccagtataaactctcttagtgggtctgcaagttgcttaacctctcggggcctcagttttctcatctgcaatatgaaggagttggactcgataatctttaaagtccattcctgctctaaaatcctatgcttttctgaagtactctatttaacagaatgcattgctttctcactttgactatttgaattatgtatgcagtacacttactgcaactgcatgttgtctaaaatagtttttctataggatgtatataaaaactaatccctcttgagctgatttataatgtgtgtatatagccacacataaaaagctagtaatagtagggctctcagaaaatactttccagttgtctaaccttgaatgttattaactcttctatattacaggagatacaactcgtcaacgaatcaaattcagtgatgacagagtatgcaagagtcaccttctcaactgttgtcctcatgatgtcctttctggaactagaatggatcttggagaatgtctgaaagtccatgacctggctttaagagcggattatgaaattgcatccaaagaacaagattttttctttgaacttgatgccatggatcatctgcagtcattcattgcagattgtgatcgtagaacagaagtggccaagaaaagattagcagaaactcaagaagagattagtgctgaagtagcagcaaaggcagaacgtgttcatgagttaaatgaagaaattggtaaattgttagccaaggtggaacaactaggagctgaagggaatgtggaggaatcccagaaagtaatggatgaagtagagaaagcacgggcaaagaaaagagaagcagaggaagtttatcggaattctatgccagcttccagttttcagcagcagaaacttcgagtctgtgaagtctgctctgcctatttaggacttcatgataatgacagacgactggctgatcattttgggggtaaactgcacctgggatttattgaaataagagagaagcttgaagaattaaagagagtcgtagctgagaagcaggagaaaagaaaccaggaacggctgaaacgaagagaagagagagagagagaagaaagggagaagctgaggaggtcccgatcacacagcaagaatccaaaaagatccaggtccagagagcatcgcagacatcgatctcgctccatgtcacgtgaacgcaagaggagaactcgatccaaatctcgggagaaacgccatcgccacaggtcccgctccagcagccgtagccgcagccgtagccaccagagaagtcggcacagttctagagataggagcagagaacgatccaagaggagatcctcaaaagaaagattcagagaccaagacttagcatcatgtgacagagacaggagttcaagagacagatcacctcgtgacagagatcggaaagataagaagcggtcctatgagagtgctaatggcagatcagaagacaggaggagctctgaagagcgcgaagcaggggagatctaactagctgtgtacatttcttcagtccttaagcttcctacggagttacgtactattgtttagttcacagctgttcagggtgacagtgagcagatccagacaccagatccagctaggctagatgtacagtatctaacttgatctgaactgaacctgttttccttgatgatgcctaaaactacatccatagtttctggtgaacctgtaatacagttctgaaagtacagttttatataataagatgctgatctctttattctttcaagtaagagtgctagtgaacaaattgtgttacttgccttgggattttttgaacgtttgtaaaatgctgtcttcctagtccaaacagctgcagctttgggcatttttctttttaattattcttcctctgactttgtatcccttaatacctacactctccaattgtaagagaaagggggcagggaagcaatatagcttccattctaaggctgtattcccgttatgaattactagctgattacagttcagagcattgatcctggaatgtgtgctggagaaatttaaaatactggggttttttgtttaatggtgcctatttagagttggaagttgaacagctgttgcattacatacttttgcttttttattgaaattttgaaatcaaacgtcttgatttttctgttctgttgaattgctatgttcaggatgttctagggggtgggggcagggactcttttcgtaataagcacttgttttattttgtgtgtgtggagtataaaggctacacccttattgtaaaaaaataataataataaaatgaaagaaacaatcaccaccaccattattaaactgtaacttgtctagtaaattgtcactagaactatttgctgtgggcatttcctctattctgttacgtcattaacagtgccttactgtgcaaggcaccaaaggacataaatacgtacttgcaaagattccagatgagctgttcatgtgggccccttgctgactatattccagccacttcagggttgtttgtaatgaccgttatagagaagggctcgacctgcagaagaaactggggtgtttttattctcattcaacaaacccaaataaaaacagtatatgtaaccaa

SEQ ID NO: 352479 - DNA, 2093 bp, Homo sapiens
atttctgaataaaattgactttctgacagtaattgtctttaattaaactttgtaggccatggatcatctgcagtcattcattgcagattgtgatcgtagaacagaagtggccaagaaaagattagcagaaactcaagaagagattagtgctgaagtagcagcaaaggcagaacgtgttcatgagttaaatgaagaaattggtaaattgttagccaaggtggaacaactaggagctgaagggaatgtggaggaatcccagaaagtaatggatgaagtagagaaagcacgggcaaagaaaagagaagcagaggaagtttatcggaattctatgccagcttccagttttcagcagcagaaacttcgagtctgtgaagtctgctctgcctatttaggacttcatgataatgacagacgactggctgatcattttgggggtaaactgcacctgggatttattgaaataagagagaagcttgaagaattaaagagagtcgtagctgagaagcaggagaaaagaaaccaggaacggctgaaacgaagagaagagagagagagagaagaaagggagaagctgaggaggtcccgatcacacagcaagaatccaaaaagatccaggtccagagagcatcgcagacatcgatctcgctccatgtcacgtgaacgcaagaggagaactcgatccaaatctcgggagaaacgccatcgccacaggtcccgctccagcagccgtagccgcagccgtagccaccagagaagtcggcacagttctagagataggagcagagaacgatccaagaggagatcctcaaaagaaagattcagagaccaagacttagcatcatgtgacagagacaggagttcaagagacagatcacctcgtgacagagatcggaaagataagaagcggtcctatgagagtgctaatggcagatcagaagacaggaggagctctgaagagcgcgaagcaggggagatctaactagctgtgtacatttcttcagtccttaagcttcctacggagttacgtactattgtttagttcacagctgttcagggtgacagtgagcagatccagacaccagatccagctaggctagatgtacagtatctaacttgatctgaactgaacctgttttccttgatgatgcctaaaactacatccatagtttctggtgaacctgtaatacagttctgaaagtacagttttatataataagatgctgatctctttattctttcaagtaagagtgctagtgaacaaattgtgttacttgccttgggattttttgaacgtttgtaaaatgctgtcttcctagtccaaacagctgcagctttgggcatttttctttttaattattcttcctctgactttgtatcccttaatacctacactctccaattgtaagagaaagggggcagggaagcaatatagcttccattctaaggctgtattcccgttatgaattactagctgattacagttcagagcattgatcctggaatgtgtgctggagaaatttaaaatactggggttttttgtttaatggtgcctatttagagttggaagttgaacagctgttgcattacatacttttgcttttttattgaaattttgaaatcaaacgtcttgatttttctgttctgttgaattgctatgttcaggatgttctagggggtgggggcagggactcttttcgtaataagcacttgttttattttgtgtgtgtggagtataaaggctacacccttattgtaaaaaaataataataataaaatgaaagaaacaatcaccaccaccattattaaactgtaacttgtctagtaaattgtcactagaactatttgctgtgggcatttcctctattctgttacgtcattaacagtgccttactgtgcaaggcaccaaaggacataaatacgtacttgcaaagattccagatgagctgttcatgtgggccccttgctgactatattccagccacttcagggttgtttgtaatgaccgttatagagaagggctcgacctgcagaagaaactggggtgtttttattctcattcaacaaacccaaataaaaacagtatatgtaaccaa

SEQ ID NO: 352480 - DNA, 1616 bp, Homo sapiens
tgatcttagcagtgatcaccctgccaaagcgtagtacccaaaccaggaacggctgaaacgaagagaagagagagagagagaagaaagggagaagctgaggaggtcccgatcacacagcaagaatccaaaaagatccaggtccagagagcatcgcagacatcgatctcgctccatgtcacgtgaacgcaagaggagaactcgatccaaatctcgggagaaacgccatcgccacaggtcccgctccagcagccgtagccgcagccgtagccaccagagaagtcggcacagttctagagataggagcagagaacgatccaagaggagatcctcaaaagaaagattcagagaccaagacttagcatcatgtgacagagacaggagttcaagagacagatcacctcgtgacagagatcggaaagataagaagcggtcctatgagagtgctaatggcagatcagaagacaggaggagctctgaagagcgcgaagcaggggagatctaactagctgtgtacatttcttcagtccttaagcttcctacggagttacgtactattgtttagttcacagctgttcagggtgacagtgagcagatccagacaccagatccagctaggctagatgtacagtatctaacttgatctgaactgaacctgttttccttgatgatgcctaaaactacatccatagtttctggtgaacctgtaatacagttctgaaagtacagttttatataataagatgctgatctctttattctttcaagtaagagtgctagtgaacaaattgtgttacttgccttgggattttttgaacgtttgtaaaatgctgtcttcctagtccaaacagctgcagctttgggcatttttctttttaattattcttcctctgactttgtatcccttaatacctacactctccaattgtaagagaaagggggcagggaagcaatatagcttccattctaaggctgtattcccgttatgaattactagctgattacagttcagagcattgatcctggaatgtgtgctggagaaatttaaaatactggggttttttgtttaatggtgcctatttagagttggaagttgaacagctgttgcattacatacttttgcttttttattgaaattttgaaatcaaacgtcttgatttttctgttctgttgaattgctatgttcaggatgttctagggggtgggggcagggactcttttcgtaataagcacttgttttattttgtgtgtgtggagtataaaggctacacccttattgtaaaaaaataataataataaaatgaaagaaacaatcaccaccaccattattaaactgtaacttgtctagtaaattgtcactagaactatttgctgtgggcatttcctctattctgttacgtcattaacagtgccttactgtgcaaggcaccaaaggacataaatacgtacttgcaaagattccagatgagctgttcatgtgggccccttgctgactatattccagccacttcagggttgtttgtaatgaccgttatagagaagggctcgacctgcagaagaaactggggtgtttttattctcattcaacaaacccaaataaaaacagtatatgtaaccaa

SEQ ID NO: 352481 - DNA, 4624 bp, Homo sapiens
tcagggctaagtattttattccagtttgttctaacagccacgccatagcagacgtgtgaccacctccaccagccctacgaggggtagaactgaagccaaggccccagtcacgggccgggcttcaaaatccaggcttccctgcggccagcgccgctggctccctgctccccgagatcgcctccccagtagctgagaatacgctgagtttttatggtttcacattcagactaagccgcccgcgaccttgtaggtaaagatgaatccgaatgggtcggcgcgcctgtttcctagggtactgctttcgggcgctttctcctgaagttgacacttcccagccgaggagccttaaagccccacgcagcggaaggaacgcggcccggcggcggcgagacaggcctgctccggccgggaaaggcgcacgagaaccaggacgcgtccacgccactcggggcgggcgttcgccccgagcacgcccacctcagacgccaaggaggctgaccgcagtccggtcgacgatgggcatggtctctacttactttccgcccaggctaacctctagcgcattttgctaatttgggtctgaatcgccatcaccgcgggcagcgcagccttagccgccagccctacagccgggagggaatgtaatgtaaggtttgtgcctcggggcggatccggcttgcacagtcagttaaggaaccagagtatcgcgagatccggggtaaaggggcgggaggacgtgcacgcgcccagagccgttagggtggaactccactcgggcggggcgggcggagtgatacagctggacgccagttggtggagcccccgcgggaaacgactgagcgcgaggagcgtgcgcgctcccgtcgtggcgacggtggcggcgagcggcgtcagagcttgagggggggttgacggcttctggcgggtggcggtgttgaaggcgagagcttgcttggcccgtgtcgcttctgtcccaagaaccggacggagagtgagggcacgagggtcgctgtcgggggctgtcgtcttccacgtacacgtcgtcgtgaggagcgcagtccggactcttcccgcaacccctccggctccctttccgcacgcctcgaggcggcggcggccaccgagacagcagcgcaccttcccccatcccttccccttatcccccagcccaaaagggcccggtctgcgccccacccccgcccgtccgcccgctacgccgccgccatgtcggcgcaggcccagatgcgcgcgatgctggaccagttgatgggcacctcccgggacggagatacaactcgtcaacgaatcaaattcagtgatgacagagtatgcaagagtcaccttctcaactgttgtcctcatgatgtcctttctggaactagaatggatcttggagaatgtctgaaagtccatgacctggctttaagagcggattatgaaattgcatccaaagaacaagattttttctttgaacttgatgccatggatcatctgcagtcattcattgcagattgtgatcgtagaacagaagtggccaagaaaagattagcagaaactcaagaagagattagtgctgaagtagcagcaaaggcagaacgtgttcatgagttaaatgaagaaattggtaaattgttagccaaggtggaacaactaggagctgaagggaatgtggaggaatcccagaaagtaatggatgaagtagagaaagcacgggcaaagaaaagagaagcagaggaagtttatcggaattctatgccagcttccagttttcagcagcagaaacttcgagtctgtgaagtctgctctgcctatttaggacttcatgataatgacagacgactggctgatcattttgggggtaaactgcacctgggatttattgaaataagagagaagcttgaagaattaaagagagtcgtagctgagaagcaggagaaaagaaaccaggaacggctgaaacgaagagaagagagagagagagaagaaagggagaagctgaggaggtcccgatcacacagcaagaatccaaaaagatccaggtccagagagcatcgcagacatcgatctcgctccatgtcacgtgaacgcaagaggagaactcgatccaaatctcgggagaaacgccatcgccacaggtcccgctccagcagccgtagccgcagccgtagccaccagagaagtcggcacagttctagagataggagcagagaacgatccaagaggaggtattgatgtgtcaatcagaggatatggagctaccttaatgttttagagttgtttatgtttacttatgttacttatgtttagagttcagattattggtttgaaacttttgcatctggtaatatgtacacatttatgtgtgggtgtacaacatttttctgtgattatatgggtagttttgaaagaatatacttatgagccagagcaagaaattggaaccaatatgtgtagaggttattgcttttctctgcttagtgtgtcttggaaaaaagttctttacaggtaaataattttaaataccaatacccttagtatggatcagcaaattaggggctctgagaagtcctttcattacaagagttgtttagctttgatttattgttttctaaacttatttgagctgggatgctttttcagagcagacacattctagtatattcttgttttatctgcactatagatatgtattgttacataccttcagcttggcaaggcagactaataaggaggttccaagacttcccttggtttaatgagaacattcaaaaggtgcaggcatagggtaaggtatgtttgaggacttgaatatctattaaggatagacaaaggattataatgtggtagaagagtttagcattcatagtctgtatagatcaaactgtcaaaacttctcaggtcacatgatggcccttaaaccaggtaatttctgtgtaacgtaagccatgtttaaaattgcttttttcttgacaactattcagaagtatatgtatgataaacattttttgagtgcctagtacctactagtcttacatattctgtggattactccacataaaatctataataaaatccacagaaagctgttaaaatctttcctatttttttttgactcaactttccattccctgaaatcactcacaagctgagtttgttaataggctctcaatattttatttcttatattctggccttgtttttagtatttcttaaggtgattttaataataattaattgtatatgttttactgtactagacttaaagtttcctatgtgaggctgggtgccatggctcacgcttataatcccagcactttgggagaccgagatgggcgtatcacttgagatcaggagttcaagaccagcctggccaaccaaccccatctctactaaaatacaaacattagccgggcatggtggcacatgcctgtaatcccagctactcaggaggctgaggaaggagaattgcttgaacacaaaggtggaggttgcagtgagccaagatcgcaccactgcactccagcctgggtgacagagcgagactccagctctcaaaacaaaaaaaaaacaaacaaaaaaaaaaacaaaaagtctcctatgtgagttagaacaaaggattgacatctttgacaataattagactggcataagactaccacatgttataaagtgctaaactgcatatcatagaataaatgatccgagagtttagatgaggcaaataacagagtaatcaaaaatggcttcaggtagtcggtaaaatttgaacaggtagaatcagctaggaaaaagatattccatatagagtgaatatcctaggcaaatgcagagaatgaggagggagtttgtaaaggacagagtgatttgtaggcctcttatctcacactcttgaaactgattttgggggtctaccctcagtgcagtgttcagaaataagcattttttaaaagttacctgtcttatctgcacaatgaattttcagaattatcctgctaggtgatggaaggtttagacattttcctgtgtcaaatctgcccaactgtcattgttgttgctgaactcctaaatgtctttattggtgatgggtatgggaaggatgggcgtgaagtcccctaatctgagattgtgttattttagtccctgatgcttcctgcgttgatgaagttgtataggaatttttccaccatacatgatacatgatcatatctaagatgtcagcatgttcataaagaggattatttttgtaaaactattaaaagttttgcttttctcgagcactttctcatctttgaattcaaattattctcttttaaagcatcattctttgttttatactaaaaattaccagataattgctgttaaaacctacttggtatttcatacaacatcaagttattgctacatatttgggtttaatttttcaaggtaaaagttcttattgaaagccttttatgttttgctgttctcctttccctactgtgaaatacttgtctctgatacaagtagattctttgtgacctcttcctggcaatagtgccctgcgtaaatgaggaccatttgcatctatctatctttttgctctgttcaaacatgtttagtgcagactccaaagtcagattacttg

SEQ ID NO: 352482 - DNA, 2389 bp, Homo sapiens
tcagggctaagtattttattccagtttgttctaacagccacgccatagcagacgtgtgaccacctccaccagccctacgaggggtagaactgaagccaaggccccagtcacgggccgggcttcaaaatccaggcttccctgcggccagcgccgctggctccctgctccccgagatcgcctccccagtagctgagaatacgctgagtttttatggtttcacattcagactaagccgcccgcgaccttgtaggtaaagatgaatccgaatgggtcggcgcgcctgtttcctagggtactgctttcgggcgctttctcctgaagttgacacttcccagccgaggagccttaaagccccacgcagcggaaggaacgcggcccggcggcggcgagacaggcctgctccggccgggaaaggcgcacgagaaccaggacgcgtccacgccactcggggcgggcgttcgccccgagcacgcccacctcagacgccaaggaggctgaccgcagtccggtcgacgatgggcatggtctctacttactttccgcccaggctaacctctagcgcattttgctaatttgggtctgaatcgccatcaccgcgggcagcgcagccttagccgccagccctacagccgggagggaatgtaatgtaaggtttgtgcctcggggcggatccggcttgcacagtcagttaaggaaccagagtatcgcgagatccggggtaaaggggcgggaggacgtgcacgcgcccagagccgttagggtggaactccactcgggcggggcgggcggagtgatacagctggacgccagttggtggagcccccgcgggaaacgactgagcgcgaggagcgtgcgcgctcccgtcgtggcgacggtggcggcgagcggcgtcagagcttgagggggggttgacggcttctggcgggtggcggtgttgaaggcgagagcttgcttggcccgtgtcgcttctgtcccaagaaccggacggagagtgagggcacgagggtcgctgtcgggggctgtcgtcttccacgtacacgtcgtcgtgaggagcgcagtccggactcttcccgcaacccctccggctccctttccgcacgcctcgaggcggcggcggccaccgagacagcagcgcaccttcccccatcccttccccttatcccccagcccaaaagggcccggtctgcgccccacccccgcccgtccgcccgctacgccgccgccatgtcggcgcaggcccagatgcgcgcgatgctggaccagttgatgggcacctcccgggacggagatacaactcgtcaacgaatcaaattcagtgatgacagagtatgcaagagtcaccttctcaactgttgtcctcatgatgtcctttctggaactagaatggatcttggagaatgtctgaaagtccatgacctggctttaagagcggattatgaaattgcatccaaagaacaagattttttctttgaacttgatgccatggatcatctgcagtcattcattgcagattgtgatcgtagaacagaagtggccaagaaaagattagcagaaactcaagaagagattagtgctgaagtagcagcaaaggcagaacgtgttcatgagttaaatgaagaaattggtaaattgttagccaaggtggaacaactaggagctgaagggaatgtggaggaatcccagaaagtaatggatgaagtagagaaagcacgggcaaagaaaagagaagcagaggaagtttatcggaattctatgccagcttccagttttcagcagcagaaacttcgagtctgtgaagtctgctctgcctatttaggacttcatgataatgacagacgactggctgatcattttgggggtaaactgcacctgggatttattgaaataagagagaagcttgaagaattaaagagagtcgtagctgagaagcaggagaaaagaaaccaggaacggctgaaacgaagagaagagagagagagagaagaaagggagaagctgaggaggtcccgatcacacagcaagaatccaaaaagatccaggtccagagagcatcgcagacatcgatctcgctccatgtcacgtgaacgcaagaggagaactcgatccaaatctcgggagaaacgccatcgccacaggtcccgctccagcagccgtagccgcagccgtagccaccagagaagtcggcacagttctagagataggagcagagaacgatccaagaggagatcctcaaaagaaagattcagagaccaagacttagcatcatgtgacagagacaggagttcaagagacagatcacctcgtgacagagatcggaaagataagaagcggtcctatgagagtgtattctcattcaacaaacccaaataaaaacagtatatgtaaccaa

SEQ ID NO: 352483 - DNA, 1809 bp, Homo sapiens
tcagggctaagtattttattccagtttgttctaacagccacgccatagcagacgtgtgaccacctccaccagccctacgaggggtagaactgaagccaaggccccagtcacgggccgggcttcaaaatccaggcttccctgcggccagcgccgctggctccctgctccccgagatcgcctccccagtagctgagaatacgctgagtttttatggtttcacattcagactaagccgcccgcgaccttgtaggtaaagatgaatccgaatgggtcggcgcgcctgtttcctagggtactgctttcgggcgctttctcctgaagttgacacttcccagccgaggagccttaaagccccacgcagcggaaggaacgcggcccggcggcggcgagacaggcctgctccggccgggaaaggcgcacgagaaccaggacgcgtccacgccactcggggcgggcgttcgccccgagcacgcccacctcagacgccaaggaggctgaccgcagtccggtcgacgatgggcatggtctctacttactttccgcccaggctaacctctagcgcattttgctaatttgggtctgaatcgccatcaccgcgggcagcgcagccttagccgccagccctacagccgggagggaatgtaatgtaaggtttgtgcctcggggcggatccggcttgcacagtcagttaaggaaccagagtatcgcgagatccggggtaaaggggcgggaggacgtgcacgcgcccagagccgttagggtggaactccactcgggcggggcgggcggagtgatacagctggacgccagttggtggagcccccgcgggaaacgactgagcgcgaggagcgtgcgcgctcccgtcgtggcgacggtggcggcgagcggcgtcagagcttgagggggggttgacggcttctggcgggtggcggtgttgaaggcgagagcttgcttggcccgtgtcgcttctgtcccaagaaccggacggagagtgagggcacgagggtcgctgtcgggggctgtcgtcttccacgtacacgtcgtcgtgaggagcgcagtccggactcttcccgcaacccctccggctccctttccgcacgcctcgaggcggcggcggccaccgagacagcagcgcaccttcccccatcccttccccttatcccccagcccaaaagggcccggtctgcgccccacccccgcccgtccgcccgctacgccgccgccatgtcggcgcaggcccagatgcgcgcgatgctggaccagttgatgggcacctcccgggacggagatacaactcgtcaacgaatcaaattcagtgatgacagagtatgcaagagtcaccttctcaactgttgtcctcatgatgtcctttctggaactagaatggatcttggagaatgtctgaaagtccatgacctggctttaagagcggattatgaaattgcatccaaagaacaagattttttctttgaacttgatgccatggatcatctgcagtcattcattgcagattgtgatcgtagaacagaagtggccaagaaaagattagcagaaactcaagaagagattagtgctgaagtagcagcaaaggcagaacgtgttcatgagttaaatgaagaaattggtaaattgttagccaaggtggaacaactaggagctgaagggaatgtggaggaatcccagaaagtaatggatgaagtagagaaagcacgggcaaagaaaagagaagcagaggaggttatcggaatctatgccagtttcagttttaaccgccgaaacctttagttttggaaagctggttggccattt

SEQ ID NO: 352484 - DNA, 4288 bp, Homo sapiens
  misc_feature (4213)..(4213): n is a, c, g, or t
  misc_feature (4220)..(4220): n is a, c, g, or t
  misc_feature (4243)..(4243): n is a, c, g, or t
  misc_feature (4287)..(4287): n is a, c, g, or t
aggtagggctggggcggggcgggaggctggcgcgcaggcgcggaagtggggcctcgcccctgccgacgtcgcaggctggagctcacctgggagactccaagtggaagccgagcctcggttctgcctctccaggcaacgcgggaggcccagcgggaaggcaggaggcggcggcggaggaggagctctactgagccgcaactgtggcgacagcaaccggagtcgcagccgccgccacctgcacctggcgcctagcccacgtccagcgcctgcccggccgccgcttcccgccaccctgccctgcccacccgccaggtactaccattaaagataccttcttctcagcaaatctatgataaaaaatataagtaacagaagaagaaataactgttatttgtcaagtgacaagcttttaatgtcagaatggctcacctaaagcgactagtaaaattacacattaaaagacattaccataaaaagttctggaagcttggtgcagtaatttttttctttataatagttttggttttaatgcaaagagaagtaagtgttcaatattccaaagaggaatcaaggatggaaaggaacatgaaaaacaaaaacaagatgttggatttaatgctagaagctgtaaacaatattaaggatgccatgccaaaaatgcaaataggagcacctgtcaggcaaaacattgatgctggtgagagaccttgtttgcaaggatattatacagcagcagaattgaagcctgtccttgaccgtccacctcaggattcaaatgcacctggtgcttctggtaaagcattcaagacaaccaatttaagtgttgaagagcaaaaggaaaaggaacgtggggaagctaaacactgctttaatgctttcgcaagtgacaggatttctttgcaccgagatcttggaccagacactcgacctcctgaatgtattgaacaaaaatttaagcgctgccctcccctgcccaccaccagtgtcataatagtttttcataatgaagcgtggtccacgttgcttagaactgtccacagtgtgctctattcttcacctgcaatactgctgaaggaaatcattttggtggatgatgctagtgtagatgagtacttacatgataaactagatgaatatgtaaaacaattttctatagtaaaaatagtcagacaaagagaaagaaaaggtctgatcactgctcggttgctaggagcaacagtcgcaacagctgaaacgctcacatttttagatgctcactgtgagtgtttctatggttggctagaacctctgttggccagaatagctgagaactacacggctgtcgtaagtccagatattgcatccatagatctgaacacgtttgaattcaacaaaccttctccttatggaagtaaccataaccgtggaaattttgactggagtctttcatttggctgggagtcgcttcctgatcatgagaagcaaagaaggaaagatgaaacctacccaattaaaacacccacttttgcaggaggacttttttccatatcaaaagaatattttgagtatattggaagctatgatgaagaaatggaaatctggggaggtgaaaatatagaaatgtctttcagagtatggcaatgtggtgggcagttggagattatgccttgctctgttgttggacatgtttttcgcagcaaaagccctcatagctttccaaaaggcactcaggtgattgctagaaaccaagttcgccttgcagaagtctggatggatgaatacaaggaaatattttataggagaaatacagatgcagcaaaaattgttaaacaaaaagcatttggtgatctttcaaaaagatttgaaataaaacaccgccttcagtgtaaaaattttacatggtatctgaacaacatttatccagaggtgtatgtgccagaccttaatcctgttatatctggatacattaaaagcgttggtcagcctctatgtctggatgttggagaaaacaatcaaggaggcaaaccattaattatgtatacatgtcatggacttgggggaaaccagtactttgaatactctgctcaacatgaaattcggcacaacatccagaaggaattatgtcttcatgctgctcaaggtctcgttcagctgaaggcatgtacctacaaaggtcacaagacagttgtcactggagagcagatatgggagatccagaaggatcaacttctatacaatccattcttaaaaatgtgcctttcagcaaatggagagcatccaagtttagtgtcatgcaacccatcagatccactccaaaaatggatacttagccaaaatgattaagtgttccttaaaattaagttgaaaaaggaaatattctttctcataaaactgtgactaggcatacactgtagtttttgaaaattatgcaaaagcagctaaatgtaacttattccaagtgcatttttcttatttatatctttatgtagcactactacagaaattctgcaagtttctgtttcaaagcacaataactagtaataccaaagactatttcaaaatgtccagatgtaggggaagagatgtttacagtatgatgaaaataattttccaagtaaagtgatgtttgtgtgttttgtacacttagggatatatatatatagctacattcacacactcacaatttaaaatatttcccctagttttttggggggataggaagaaagatttgttactgtatttttttaactacataaaaatagatcaataaatgtcagcattggcctctgtgtacaaaccaagagcttttacagatccagaatttattagtttaaaatgcaggtgaacttttttttgcgtttggtttacttgtctgtcaaatgtttccttaaacatgaaactgaataaggagaagagtatttttaacacttaaatttcttggcaaattttaaaacattttttagtctgtaatacactccacttgaagcacttaagtcttccttaaatgacttttcttaagtaatgatactgtgtgttttcccaaagcacttttaaaaaaatttttataaattactatctgttgaaaaggtgtccttttcctttcttctagtatttttttcttaccaaaattcactaatcttgaatgtttgtgatattaaatttcaaatgcagaatacttgactcatttaaagctaaattttgttactgattcaattataattgtaatggatttttgactttgtaatggattcttttcatcaaaaagccttatttttttatctatgtggaaaacacaataaaaaatcctcaacactattgtaatcatttggttaagtttttttcctcttttgggtaaaatctgtaattgataataggtgggggaaaatgaattttgtatgctgaatttctaagcgcctattgtttgtaaaaccatcagatatttcttatggcacaaaaaatgaggaatagcaaaattcctgtgttcaatatttagaaaattttgtattaatttctgataaagttccttaagcatctgatagaatgatgttttaaaaaaatttgacgcttgcttaggagatttaccactttttttttttgtttttcgtcattttatatttagatctcctgtattcttgttcccgaagtaaaatacgatcggtttcatattttaaatctggcagagcctcagctgtacgaaaaagagcatatactggttattgaccctatcttctcattgtttgtttgtaagtttgaatttgtattaaaaagcctgcattctgagctggacatggtggctcagcttctaatcccagcactttggtaggcaaaggtgggaggatcatttgagctcaggagttccagaccagcctgggcaacatagcaaaatctcatctctacaaaaagtaaaaattaaaaaatgaaattaaaaataaaattacctaggtgtggtggcacgcatctgtagttccagctatacaggaaggtgaggcagaagcattgcttgagcttgggagatcgaggctacagtgagctatgattacaccactgcacttcagtctgtgtgactgagcaagactctttcaaaaaaaaaaaaaagcctacattctccagttgattatttcaactaatgtgtattatgtgcctaattttctatcagaagttgtattagcccgttttcacactgctgttaaagacatacctgagactgggtaatttataaagaaaaataggttcnatggacncacaggtccgcgtggctggggangcttcacaatcatggcggaaggtgaaagcatgtcttacgtggang

SEQ ID NO: 352485 - DNA, 4249 bp, Homo sapiens
  misc_feature (4174)..(4174): n is a, c, g, or t
  misc_feature (4181)..(4181): n is a, c, g, or t
  misc_feature (4204)..(4204): n is a, c, g, or t
  misc_feature (4248)..(4248): n is a, c, g, or t
ctgcgctgaagtgagtcaagtgatgaaatcaagactacacgggaaggaagctcacgaaacctaactggtgacagaagctgctgaaccctgcccgaagaaaccacatgagccagcagttgctgccctcccgaagtggtcctcggaggcagcgcaccccttcattttggcgaaccgaggaggaagggaggaaccgtgtgggggaaatctagaacttctggttccccaaggacccagcagactgtgttctggctacaaggtgatcactgccaccaggtactaccattaaagataccttcttctcagcaaatctatgataaaaaatataagtaacagaagaagaaataactgttatttgtcaagtgacaagcttttaatgtcagaatggctcacctaaagcgactagtaaaattacacattaaaagacattaccataaaaagttctggaagcttggtgcagtaatttttttctttataatagttttggttttaatgcaaagagaagtaagtgttcaatattccaaagaggaatcaaggatggaaaggaacatgaaaaacaaaaacaagatgttggatttaatgctagaagctgtaaacaatattaaggatgccatgccaaaaatgcaaataggagcacctgtcaggcaaaacattgatgctggtgagagaccttgtttgcaaggatattatacagcagcagaattgaagcctgtccttgaccgtccacctcaggattcaaatgcacctggtgcttctggtaaagcattcaagacaaccaatttaagtgttgaagagcaaaaggaaaaggaacgtggggaagctaaacactgctttaatgctttcgcaagtgacaggatttctttgcaccgagatcttggaccagacactcgacctcctgaatgtattgaacaaaaatttaagcgctgccctcccctgcccaccaccagtgtcataatagtttttcataatgaagcgtggtccacgttgcttagaactgtccacagtgtgctctattcttcacctgcaatactgctgaaggaaatcattttggtggatgatgctagtgtagatgagtacttacatgataaactagatgaatatgtaaaacaattttctatagtaaaaatagtcagacaaagagaaagaaaaggtctgatcactgctcggttgctaggagcaacagtcgcaacagctgaaacgctcacatttttagatgctcactgtgagtgtttctatggttggctagaacctctgttggccagaatagctgagaactacacggctgtcgtaagtccagatattgcatccatagatctgaacacgtttgaattcaacaaaccttctccttatggaagtaaccataaccgtggaaattttgactggagtctttcatttggctgggagtcgcttcctgatcatgagaagcaaagaaggaaagatgaaacctacccaattaaaacacccacttttgcaggaggacttttttccatatcaaaagaatattttgagtatattggaagctatgatgaagaaatggaaatctggggaggtgaaaatatagaaatgtctttcagagtatggcaatgtggtgggcagttggagattatgccttgctctgttgttggacatgtttttcgcagcaaaagccctcatagctttccaaaaggcactcaggtgattgctagaaaccaagttcgccttgcagaagtctggatggatgaatacaaggaaatattttataggagaaatacagatgcagcaaaaattgttaaacaaaaagcatttggtgatctttcaaaaagatttgaaataaaacaccgccttcagtgtaaaaattttacatggtatctgaacaacatttatccagaggtgtatgtgccagaccttaatcctgttatatctggatacattaaaagcgttggtcagcctctatgtctggatgttggagaaaacaatcaaggaggcaaaccattaattatgtatacatgtcatggacttgggggaaaccagtactttgaatactctgctcaacatgaaattcggcacaacatccagaaggaattatgtcttcatgctgctcaaggtctcgttcagctgaaggcatgtacctacaaaggtcacaagacagttgtcactggagagcagatatgggagatccagaaggatcaacttctatacaatccattcttaaaaatgtgcctttcagcaaatggagagcatccaagtttagtgtcatgcaacccatcagatccactccaaaaatggatacttagccaaaatgattaagtgttccttaaaattaagttgaaaaaggaaatattctttctcataaaactgtgactaggcatacactgtagtttttgaaaattatgcaaaagcagctaaatgtaacttattccaagtgcatttttcttatttatatctttatgtagcactactacagaaattctgcaagtttctgtttcaaagcacaataactagtaataccaaagactatttcaaaatgtccagatgtaggggaagagatgtttacagtatgatgaaaataattttccaagtaaagtgatgtttgtgtgttttgtacacttagggatatatatatatagctacattcacacactcacaatttaaaatatttcccctagttttttggggggataggaagaaagatttgttactgtatttttttaactacataaaaatagatcaataaatgtcagcattggcctctgtgtacaaaccaagagcttttacagatccagaatttattagtttaaaatgcaggtgaacttttttttgcgtttggtttacttgtctgtcaaatgtttccttaaacatgaaactgaataaggagaagagtatttttaacacttaaatttcttggcaaattttaaaacattttttagtctgtaatacactccacttgaagcacttaagtcttccttaaatgacttttcttaagtaatgatactgtgtgttttcccaaagcacttttaaaaaaatttttataaattactatctgttgaaaaggtgtccttttcctttcttctagtatttttttcttaccaaaattcactaatcttgaatgtttgtgatattaaatttcaaatgcagaatacttgactcatttaaagctaaattttgttactgattcaattataattgtaatggatttttgactttgtaatggattcttttcatcaaaaagccttatttttttatctatgtggaaaacacaataaaaaatcctcaacactattgtaatcatttggttaagtttttttcctcttttgggtaaaatctgtaattgataataggtgggggaaaatgaattttgtatgctgaatttctaagcgcctattgtttgtaaaaccatcagatatttcttatggcacaaaaaatgaggaatagcaaaattcctgtgttcaatatttagaaaattttgtattaatttctgataaagttccttaagcatctgatagaatgatgttttaaaaaaatttgacgcttgcttaggagatttaccactttttttttttgtttttcgtcattttatatttagatctcctgtattcttgttcccgaagtaaaatacgatcggtttcatattttaaatctggcagagcctcagctgtacgaaaaagagcatatactggttattgaccctatcttctcattgtttgtttgtaagtttgaatttgtattaaaaagcctgcattctgagctggacatggtggctcagcttctaatcccagcactttggtaggcaaaggtgggaggatcatttgagctcaggagttccagaccagcctgggcaacatagcaaaatctcatctctacaaaaagtaaaaattaaaaaatgaaattaaaaataaaattacctaggtgtggtggcacgcatctgtagttccagctatacaggaaggtgaggcagaagcattgcttgagcttgggagatcgaggctacagtgagctatgattacaccactgcacttcagtctgtgtgactgagcaagactctttcaaaaaaaaaaaaaagcctacattctccagttgattatttcaactaatgtgtattatgtgcctaattttctatcagaagttgtattagcccgttttcacactgctgttaaagacatacctgagactgggtaatttataaagaaaaataggttcnatggacncacaggtccgcgtggctggggangcttcacaatcatggcggaaggtgaaagcatgtcttacgtggang

SEQ ID NO: 352486 - DNA, 3339 bp, Homo sapiens
aggtagggctggggcggggcgggaggctggcgcgcaggcgcggaagtggggcctcgcccctgccgacgtcgcaggctggagctcacctgggagactccaagtggaagccgagcctcggttctgcctctccaggcaacgcgggaggcccagcgggaaggcaggaggcggcggcggaggaggagctctactgagccgcaactgtggcgacagcaaccggagtcgcagccgccgccacctgcacctggcgcctagcccacgtccagcgcctgcccggccgccgcttcccgccaccctgccctgcccacccgccaggtactaccattaaagataccttcttctcagcaaatctatgataaaaaatataagtaacagaagaagaaataactgttatttgtcaagtgacaagcttttaatgtcagaatggctcacctaaagcgactagtaaaattacacattaaaagacattaccataaaaagttctggaagcttggtgcagtaatttttttctttataatagttttggttttaatgcaaagagaagtaagtgttcaatattccaaagaggaatcaaggatggaaaggaacatgaaaaacaaaaacaagatgttggatttaatgctagaagctgtaaacaatattaaggatgccatgccaaaaatgcaaataggagcacctgtcaggcaaaacattgatgctggtgagagaccttgtttgcaaggatattatacagcagcagaattgaagcctgtccttgaccgtccacctcaggattcaaatgcacctggtgcttctggtaaagcattcaagacaaccaatttaagtgttgaagagcaaaaggaaaaggaacgtggggaagctaaacactgctttaatgctttcgcaagtgacaggatttctttgcaccgagatcttggaccagacactcgacctcctgaatgtattgaacaaaaatttaagcgctgccctcccctgcccaccaccagtgtcataatagtttttcataatgaagcgtggtccacgttgcttagaactgtccacagtgtgctctattcttcacctgcaatactgctgaaggaaatcattttggtggatgatgctagtgtagatgagtacttacatgataaactagatgaatatgtaaaacaattttctatagtaaaaatagtcagacaaagagaaagaaaaggtctgatcactgctcggttgctaggagcaacagtcgcaacagctgaaacgctcacatttttagatgctcactcgttttcaactggcgattatagcaatgacagcccaagcaggtgagtgtttctatggttggctagaacctctgttggccagaatagctgagaactacacggctgtcgtaagtccagatattgcatccatagatctgaacacgtttgaattcaacaaaccttctccttatggaagtaaccataaccgtggaaattttgactggagtctttcatttggctgggagtcgcttcctgatcatgagaagcaaagaaggaaagatgaaacctacccaattaaaacacccacttttgcaggaggacttttttccatatcaaaagaatattttgagtatattggaagctatgatgaagaaatggaaatctggggaggtgaaaatatagaaatgtctttcagagtatggcaatgtggtgggcagttggagattatgccttgctctgttgttggacatgtttttcgcagcaaaagccctcatagctttccaaaaggcactcaggtgattgctagaaaccaagttcgccttgcagaagtctggatggatgaatacaaggaaatattttataggagaaatacagatgcagcaaaaattgttaaacaaaaagcatttggtgatctttcaaaaagatttgaaataaaacaccgccttcagtgtaaaaattttacatggtatctgaacaacatttatccagaggtgtatgtgccagaccttaatcctgttatatctggatacattaaaagcgttggtcagcctctatgtctggatgttggagaaaacaatcaaggaggcaaaccattaattatgtatacatgtcatggacttgggggaaaccagtactttgaatactctgctcaacatgaaattcggcacaacatccagaaggaattatgtcttcatgctgctcaaggtctcgttcagctgaaggcatgtacctacaaaggtcacaagacagttgtcactggagagcagatatgggagatccagaaggatcaacttctatacaatccattcttaaaaatgtgcctttcagcaaatggagagcatccaagtttagtgtcatgcaacccatcagatccactccaaaaatggatacttagccaaaatgattaagtgttccttaaaattaagttgaaaaaggaaatattctttctcataaaactgtgactaggcatacactgtagtttttgaaaattatgcaaaagcagctaaatgtaacttattccaagtgcatttttcttatttatatctttatgtagcactactacagaaattctgcaagtttctgtttcaaagcacaataactagtaataccaaagactatttcaaaatgtccagatgtaggggaagagatgtttacagtatgatgaaaataattttccaagtaaagtgatgtttgtgtgttttgtacacttagggatatatatatatagctacattcacacactcacaatttaaaatatttcccctagttttttggggggataggaagaaagatttgttactgtatttttttaactacataaaaatagatcaataaatgtcagcattggcctctgtgtacaaaccaagagcttttacagatccagaatttattagtttaaaatgcaggtgaacttttttttgcgtttggtttacttgtctgtcaaatgtttccttaaacatgaaactgaataaggagaagagtatttttaacacttaaatttcttggcaaattttaaaacattttttagtctgtaatacactccacttgaagcacttaagtcttccttaaatgacttttcttaagtaatgatactgtgtgttttcccaaagcacttttaaaaaaatttttataaattactatctgttgaaaaggtgtccttttcctttcttctagtatttttttcttaccaaaattcactaatcttgaatgtttgtgatattaaatttcaaatgcagaatacttgactcatttaaagctaaattttgttactgattcaattataattgtaatggatttttgactttgtaatggattcttttcatcaaaaagccttatttttttatctatgtggaaaacacaataaaaaatcctcaacactattgta

SEQ ID NO: 352487 - DNA, 3206 bp, Homo sapiens
ctgcgctgaagtgagtcaagtgatgaaatcaagactacacgggaaggaagctcacgaaacctaactggtgacagaagctgctgaaccctgcccgaagaaaccacatgagccagcagttgctgccctcccgaagtggtcctcggaggcagcgcaccccttcattttggcgaaccgaggaggaagggaggaaccgtgtgggggaaatctagaacttctggttccccaaggacccagcagactgtgttctggctacaaggtgatcactgccaccaggtactaccattaaagataccttcttctcagcaaatctatgataaaaaatataagtaacagaagaagaaataactgttatttgtcaagtgacaagcttttaatgtcagaatggctcacctaaagcgactagtaaaattacacattaaaagacattaccataaaaagttctggaagcttggtgcagtaatttttttctttataatagttttggttttaatgcaaagagaagtaagtgttcaatattccaaagaggaatcaaggatggaaaggaacatgaaaaacaaaaacaagatgttggatttaatgctagaagctgtaaacaatattaaggatgccatgccttgtttgcaaggatattatacagcagcagaattgaagcctgtccttgaccgtccacctcaggattcaaatgcacctggtgcttctggtaaagcattcaagacaaccaatttaagtgttgaagagcaaaaggaaaaggaacgtggggaagctaaacactgctttaatgctttcgcaagtgacaggatttctttgcaccgagatcttggaccagacactcgacctcctgaatgtattgaacaaaaatttaagcgctgccctcccctgcccaccaccagtgtcataatagtttttcataatgaagcgtggtccacgttgcttagaactgtccacagtgtgctctattcttcacctgcaatactgctgaaggaaatcattttggtggatgatgctagtgtagatgagtacttacatgataaactagatgaatatgtaaaacaattttctatagtaaaaatagtcagacaaagagaaagaaaaggtctgatcactgctcggttgctaggagcaacagtcgcaacagctgaaacgctcacatttttagatgctcactgtgagtgtttctatggttggctagaacctctgttggccagaatagctgagaactacacggctgtcgtaagtccagatattgcatccatagatctgaacacgtttgaattcaacaaaccttctccttatggaagtaaccataaccgtggaaattttgactggagtctttcatttggctgggagtcgcttcctgatcatgagaagcaaagaaggaaagatgaaacctacccaattaaaacacccacttttgcaggaggacttttttccatatcaaaagaatattttgagtatattggaagctatgatgaagaaatggaaatctggggaggtgaaaatatagaaatgtctttcagagtatggcaatgtggtgggcagttggagattatgccttgctctgttgttggacatgtttttcgcagcaaaagccctcatagctttccaaaaggcactcaggtgattgctagaaaccaagttcgccttgcagaagtctggatggatgaatacaaggaaatattttataggagaaatacagatgcagcaaaaattgttaaacaaaaagcatttggtgatctttcaaaaagatttgaaataaaacaccgccttcagtgtaaaaattttacatggtatctgaacaacatttatccagaggtgtatgtgccagaccttaatcctgttatatctggatacattaaaagcgttggtcagcctctatgtctggatgttggagaaaacaatcaaggaggcaaaccattaattatgtatacatgtcatggacttgggggaaaccagtactttgaatactctgctcaacatgaaattcggcacaacatccagaaggaattatgtcttcatgctgctcaaggtctcgttcagctgaaggcatgtacctacaaaggtcacaagacagttgtcactggagagcagatatgggagatccagaaggatcaacttctatacaatccattcttaaaaatgtgcctttcagcaaatggagagcatccaagtttagtgtcatgcaacccatcagatccactccaaaaatggatacttagccaaaatgattaagtgttccttaaaattaagttgaaaaaggaaatattctttctcataaaactgtgactaggcatacactgtagtttttgaaaattatgcaaaagcagctaaatgtaacttattccaagtgcatttttcttatttatatctttatgtagcactactacagaaattctgcaagtttctgtttcaaagcacaataactagtaataccaaagactatttcaaaatgtccagatgtaggggaagagatgtttacagtatgatgaaaataattttccaagtaaagtgatgtttgtgtgttttgtacacttagggatatatatatatagctacattcacacactcacaatttaaaatatttcccctagttttttggggggataggaagaaagatttgttactgtatttttttaactacataaaaatagatcaataaatgtcagcattggcctctgtgtacaaaccaagagcttttacagatccagaatttattagtttaaaatgcaggtgaacttttttttgcgtttggtttacttgtctgtcaaatgtttccttaaacatgaaactgaataaggagaagagtatttttaacacttaaatttcttggcaaattttaaaacattttttagtctgtaatacactccacttgaagcacttaagtcttccttaaatgacttttcttaagtaatgatactgtgtgttttcccaaagcacttttaaaaaaatttttataaattactatctgttgaaaaggtgtccttttcctttcttctagtatttttttcttaccaaaattcactaatcttgaatgtttgtgatattaaatttcaaatgcagaatacttgactcatttaaagctaaattttgttactgattcaattataattgtaatggatttttgactttgtaatggattcttttcatcaaaaagccttatttttttatctatgtggaaaacacaataaaaaatcctcaacactattgta

SEQ ID NO: 352488 - DNA, 1179 bp, Homo sapiens
ctcctagaagatgcataggtgtcagaacataatcttcaattgaataatatagtctgattatgtcgggttctttatctaggatcaacttctatacaatccattcttaaaaatgtgcctttcagcaaatggagagcatccaagtttagtgtcatgcaacccatcagatccactccaaaaatggatacttagccaaaatgattaagtgttccttaaaattaagttgaaaaaggaaatattctttctcataaaactgtgactaggcatacactgtagtttttgaaaattatgcaaaagcagctaaatgtaacttattccaagtgcatttttcttatttatatctttatgtagcactactacagaaattctgcaagtttctgtttcaaagcacaataactagtaataccaaagactatttcaaaatgtccagatgtaggggaagagatgtttacagtatgatgaaaataattttccaagtaaagtgatgtttgtgtgttttgtacacttagggatatatatatatagctacattcacacactcacaatttaaaatatttcccctagttttttggggggataggaagaaagatttgttactgtatttttttaactacataaaaatagatcaataaatgtcagcattggcctctgtgtacaaaccaagagcttttacagatccagaatttattagtttaaaatgcaggtgaacttttttttgcgtttggtttacttgtctgtcaaatgtttccttaaacatgaaactgaataaggagaagagtatttttaacacttaaatttcttggcaaattttaaaacattttttagtctgtaatacactccacttgaagcacttaagtcttccttaaatgacttttcttaagtaatgatactgtgtgttttcccaaagcacttttaaaaaaatttttataaattactatctgttgaaaaggtgtccttttcctttcttctagtatttttttcttaccaaaattcactaatcttgaatgtttgtgatattaaatttcaaatgcagaatacttgactcatttaaagctaaattttgttactgattcaattataattgtaatggatttttgactttgtaatggattcttttcatcaaaaagccttatttttttatctatgtggaaaacacaataaaaaatcctcaacactattgta

SEQ ID NO: 352489 - DNA, 2578 bp, Homo sapiens
  misc_feature (2572)..(2572): n is a, c, g, or t
aggtagggctggggcggggcgggaggctggcgcgcaggcgcggaagtggggcctcgcccctgccgacgtcgcaggctggagctcacctgggagactccaagtggaagccgagcctcggttctgcctctccaggcaacgcgggaggcccagcgggaaggcaggaggcggcggcggaggaggagctctactgagccgcaactgtggcgacagcaaccggagtcgcagccgccgccacctgcacctggcgcctagcccacgtccagcgcctgcccggccgccgcttcccgccaccctgccctgcccacccgccaggtactaccattaaagataccttcttctcagcaaatctatgataaaaaatataagtaacagaagaagaaataactgttatttgtcaagtgacaagcttttaatgtcagaatggctcacctaaagcgactagtaaaattacacattaaaagacattaccataaaaagttctggaagcttggtgcagtaatttttttctttataatagttttggttttaatgcaaagagaagtaagtgttcaatattccaaagaggaatcaaggatggaaaggaacatgaaaaacaaaaacaagatgttggatttaatgctagaagctgtaaacaatattaaggatgccatgccaaaaatgcaaataggagcacctgtcaggcaaaacattgatgctggtgagagaccttgtttgcaaggatattatacagcagcagaattgaagcctgtccttgaccgtccacctcaggattcaaatgcacctggtgcttctggtaaagcattcaagacaaccaatttaagtgttgaagagcaaaaggaaaaggaacgtggggaagctaaacactgctttaatgctttcgcaagtgacaggatttctttgcaccgagatcttggaccagacactcgacctcctgaatgtattgaacaaaaatttaagcgctgccctcccctgcccaccaccagtgtcataatagtttttcataatgaagcgtggtccacgttgcttagaactgtccacagtgtgctctattcttcacctgcaatactgctgaaggaaatcattttggtggatgatgctagtgtagatgagtacttacatgataaactagatgaatatgtaaaacaattttctatagtaaaaatagtcagacaaagagaaagaaaaggtctgatcactgctcggttgctaggagcaacagtcgcaacagctgaaacgctcacatttttagatgctcactgtgagtgtttctatggttggctagaacctctgttggccagaatagctgagaactacacggctgtcgtaagtccagatattgcatccatagatctgaacacgtttgaattcaacaaaccttctccttatggaagtaaccataaccgtggaaattttgactggagtctttcatttggctgggagtcgcttcctgatcatgagaagcaaagaaggaaagatgaaacctacccaattaaaacacccacttttgcaggaggacttttttccatatcaaaagaatattttgagtatattggaagctatgatgaagaaatggaaatctggggaggtgaaaatatagaaatgtctttcagagtatggcaatgtggtgggcagttggagattatgccttgctctgttgttggacatgtttttcgcagcaaaagccctcatagctttccaaaaggcactcaggtgattgctagaaaccaagttcgccttgcagaagtctggatggatgaatacaaggaaatattttataggagaaatacagatgcagcaaaaattgttaaacaaaaagcatttggtgatctttcaaaaagatttgaaataaaacaccgccttcagtgtaaaaattttacatggtatctgaacaacatttatccagaggtgtatgtgccagaccttaatcctgttatatctggatacattaaaagcgttggtcagcctctatgtctggatgttggagaaaacaatcaaggaggcaaaccattaattatgtatacatgtcatggacttgggggaaaccagtactttgaatactctgctcaacatgaaattcggcacaacatccagaaggaattatgtcttcatgctgctcaaggtctcgttcagctgaaggcatgtacctacaaaggtcacaagacagttgtcactggagagcagatatgggagatccagaaggatcaacttctatacaatccattcttaaaaatgtgcctttcagcaaatggagagcatccaagtttagtgtcatgcaacccatcagatccactccaaaaatggatacttagccaaaatgattaagtgttccttaaaattaagttgaaaaaggaaatattctttctcataaaactgtgactaggcatacactgtagtttttgaaaattatgcaaaagcagctaaatgtaacttattccaagtgcatttttcttatttatatctttatgtagcactactacagaaattctgcaagtttctgtttcaaagcacaataactagtaataccaaagactatttcaaaatgtccagatgggacgaagatgcgggatcctcnagagcg

SEQ ID NO: 352490 - DNA, 2541 bp, Homo sapiens
aggtagggctggggcggggcgggaggctggcgcgcaggcgcggaagtggggcctcgcccctgccgacgtcgcaggctggagctcacctgggagactccaagtggaagccgagcctcggttctgcctctccaggcaacgcgggaggcccagcgggaaggcaggaggcggcggcggaggaggagctctactgagccgcaactgtggcgacagcaaccggagtcgcagccgccgccacctgcacctggcgcctagcccacgtccagcgcctgcccggccgccgcttcccgccaccctgccctgcccacccgccaggtactaccattaaagataccttcttctcagcaaatctatgataaaaaatataagtaacagaagaagaaataactgttatttgtcaagtgacaagcttttaatgtcagaatggctcacctaaagcgactagtaaaattacacattaaaagacattaccataaaaagttctggaagcttggtgcagtaatttttttctttataatagttttggttttaatgcaaagagaagtaagtgttcaatattccaaagaggaatcaaggatggaaaggaacatgaaaaacaaaaacaagatgttggatttaatgctagaagctgtaaacaatattaaggatgccatgccaaaaatgcaaataggagcacctgtcaggcaaaacattgatgctggtgagagaccttgtttgcaaggatattatacagcagcagaattgaagcctgtccttgaccgtccacctcaggattcaaatgcacctggtgcttctggtaaagcattcaagacaaccaatttaagtgttgaagagcaaaaggaaaaggaacgtggggaagctaaacactgctttaatgctttcgcaagtgacaggatttctttgcaccgagatcttggaccagacactcgacctcctgaatgtattgaacaaaaatttaagcgctgccctcccctgcccaccaccagtgtcataatagtttttcataatgaagcgtggtccacgttgcttagaactgtccacagtgtgctctattcttcacctgcaatactgctgaaggaaatcattttggtggatgatgctagtgtagatgagtacttacatgataaactagatgaatatgtaaaacaattttctatagtaaaaatagtcagacaaagagaaagaaaaggtctgatcactgctcggttgctaggagcaacagtcgcaacagctgaaacgctcacatttttagatgctcactgtgagtgtttctatggttggctagaacctctgttggccagaatagctgagaactacacggctgtcgtaagtccagatattgcatccatagatctgaacacgtttgaattcaacaaaccttctccttatggaagtaaccataaccgtggaaattttgactggagtctttcatttggctgggagtcgcttcctgatcatgagaagcaaagaaggaaagatgaaacctacccaattaaaacacccacttttgcaggaggacttttttccatatcaaaagaatattttgagtatattggaagctatgatgaagaaatggaaatctggggaggtgaaaatatagaaatgtctttcagagtatggcaatgtggtgggcagttggagattatgccttgctctgttgttggacatgtttttcgcagcaaaagccctcatagctttccaaaaggcactcaggtgattgctagaaaccaagttcgccttgcagaagtctggatggatgaatacaaggaaatattttataggagaaatacagatgcagcaaaaattgttaaacaaaaagcatttggtgatctttcaaaaagatttgaaataaaacaccgccttcagtgtaaaaattttacatggtatctgaacaacatttatccagaggtgtatgtgccagaccttaatcctgttatatctggatacattaaaagcgttggtcagcctctatgtctggatgttggagaaaacaatcaaggaggcaaaccattaattatgtatacatgtcatggacttgggggaaaccagtactttgaatactctgctcaacatgaaattcggcacaacatccagaaggaattatgtcttcatgctgctcaaggtctcgttcagctgaaggcatgtacctacaaaggtcacaagacagttgtcactggagagcagatatgggagatccagaaggatcaacttctatacaatccattcttaaaaatgtgcctttcagcaaatggagagcatccaagtttagtgtcatgcaacccatcagatccactccaaaaatggatacttagccaaaatgattaagtgttccttaaaattaagttgaaaaaggaaatattctttctcataaaactgtgactaggcatacactgtagtttttgaaaattatgcaaaagcagctaaatgtaacttatacctcatgcaacagtctataaccatagactacagtattcgactcatcgcacccaccatcagaggatctctatccaatgcacttcttcttggaatccaaacacgattaca

SEQ ID NO: 352491 - DNA, 1330 bp, Homo sapiens
aggtagggctggggcggggcgggaggctggcgcgcaggcgcggaagtggggcctcgcccctgccgacgtcgcaggctggagctcacctgggagactccaagtggaagccgagcctcggttctgcctctccaggcaacgcgggaggcccagcgggaaggcaggaggcggcggcggaggaggagctctactgagccgcaactgtggcgacagcaaccggagtcgcagccgccgccacctgcacctggcgcctagcccacgtccagcgcctgcccggccgccgcttcccgccaccctgccctgcccacccgccaggtactaccattaaagataccttcttctcagcaaatctatgataaaaaatataagtaacagaagaagaaataactgttatttgtcaagtgacaagcttttaatgtcagaatggctcacctaaagcgactagtaaaattacacattaaaagacattaccataaaaagttctggaagcttggtgcagtaatttttttctttataatagttttggttttaatgcaaagagaagtaagtgttcaatattccaaagaggaatcaaggatggaaaggaacatgaaaaacaaaaacaagatgttggatttaatgctagaagctgtaaacaatattaaggatgccatgccaaaaatgcaaataggagcacctgtcaggcaaaacattgatgctggtgagagaccttgtttgcaaggatattatacagcagcagaattgaagcctgtccttgaccgtccacctcaggattcaaatgcacctggtgcttctggtaaagcattcaagacaaccaatttaagtgttgaagagcaaaaggaaaaggaacgtggggaagctaaacactgctttaatgctttcgcaagtgacaggatttctttgcaccgagatcttggaccagacactcgacctcctgaatgtattgaacaaaaatttaagcgctgccctcccctgcccaccaccagtgtcataatagtttttcataatgaagcgtggtccacgttgcttagaactgtccacagtgtgctctattcttcacctgcaatactgctgaaggaaatcattttggtggatgatgctagtgtagatgagtacttacatgataaactagatgaatatgtaaaacaattttctatagtaaaaatagtcagacaaagagaaagaaaaggtctgatcactgctcggttgctaggagcaacagtcgcaacagctgaaacgctcacatttttagatgctcactcttgggatggttctatggttgcttgaaccttggtgggccaaatactgaaacttccaccgtggcggaggcaga

SEQ ID NO: 352492 - DNA, 661 bp, Homo sapiens
tctccggttcaattcattcaggaggtcgagtgtctggtccaagatctcggtgcaaagaaagcctgtccttgaccgtccacctcaggattcaaatgcacctggtgcttctggtaaagcattcaagacaaccaatttaagtgttgaagagcaaaaggaaaaggaacgtggggaagctaaacactgctttaatgctttcgcaagtgacaggatttctttgcaccgagatcttggaccagacactcgacctcctgagtatgttgaagaatatttattgtttattctttatcaccaggctttgcaggggagagaggggtgagctaaggaagttatctgttttttagctactctaaggcagaaaatcagcaaatactgtttatttaacctgttgtatttattttttgcttataatgattgaggctacatatccctatttatgcttggtgaggcagtgcagatatgaaaagttattagcttggaaattagaaaactgaattctagatctgactgctatccacaaggaaattctttattcctaaatactgtggttttctcatctatttagggggaattattggacaatttgtataggaagtagaaggtagaggaattgtttccatttctctgtatttctttagaataaaaatgtttaaaaacatgccaa

SEQ ID NO: 352493 - DNA, 3299 bp, Homo sapiens
aggtagggctggggcggggcgggaggctggcgcgcaggcgcggaagtggggcctcgcccctgccgacgtcgcaggctggagctcacctgggagactccaagtggaagccgagcctcggttctgcctctccaggcaacgcgggaggcccagcgggaaggcaggaggcggcggcggaggaggagctctactgagccgcaactgtggcgacagcaaccggagtcgcagccgccgccacctgcacctggcgcctagcccacgtccagcgcctgcccggccgccgcttcccgccaccctgccctgcccacccgccaggtactaccattaaagataccttcttctcagcaaatctatgataaaaaatataagtaacagaagaagaaataactgttatttgtcaagtgacaagcttttaatgtcagaatggctcacctaaagcgactagtaaaattacacattaaaagacattaccataaaaagttctggaagcttggtgcagtaatttttttctttataatagttttggttttaatgcaaagagaagtaagtgttcaatattccaaagaggaatcaaggatggaaaggaacatgaaaaacaaaaacaagatgttggatttaatgctagaagctgtaaacaatattaaggatgccatgccaaaaatgcaaataggagcacctgtcaggcaaaacattgatgctggtgagagaccttgtttgcaaggatattatacagcagcagaattgaagcctgtccttgaccgtccacctcaggattcaaatgcacctggtgcttctggtaaagcattcaagacaaccaatttaagtgttgaagagcaaaaggaaaaggaacgtggggaagctaaacactgctttaatgctttcgcaagtgacaggatttctttgcaccgagatcttggaccagacactcgacctcctgaatgtattgaacaaaaatttaagcgctgccctcccctgcccaccaccagtgtcataatagtttttcataatgaagcgtggtccacgttgcttagaactgtccacagtgtgctctattcttcacctgcaatactgctgaaggaaatcattttggtggatgatgctagtgtagatgagtacttacatgataaactagatgaatatgtaaaacaattttctatagtaaaaatagtcagacaaagagaaagaaaaggtctgatcactgctcggttgctaggagcaacagtcgcaacagctgaaacgctcacatttttagatgctcactgtgagtgtttctatggttggctagaacctctgttggccagaatagctgagaactacacggctgtcgtaagtccagatattgcatccatagatctgaacacgtttgaattcaacaaaccttctccttatggaagtaaccataaccgtggaaattttgactggagtctttcatttggctgggagtcgcttcctgatcatgagaagcaaagaaggaaagatgaaacctacccaattaaaacacccacttttgcaggaggacttttttccatatcaaaagaatattttgagtatattggaagctatgatgaagaaatggaaatctggggaggtgaaaatatagaaatgtctttcagagtatggcaatgtggtgggcagttggagattatgccttgctctgttgttggacatgtttttcgcagcaaaagccctcatagctttccaaaaggcactcaggtgattgctagaaaccaagttcgccttgcagaagtctggatggatgaatacaaggaaatattttataggagaaatacagatgcagcaaaaattgttaaacaaaaagcatttggtgatctttcaaaaagatttgaaataaaacaccgccttcagtgtaaaaattttacatggtatctgaacaacatttatccagaggtgtatgtgccagaccttaatcctgttatatctggatacattaaaagcgttggtcagcctctatgtctggatgttggagaaaacaatcaaggaggcaaaccattaattatgtatacatgtcatggacttgggggaaaccagtactttgaatactctgctcaacatgaaattcggcacaacatccagaaggaattatgtcttcatgctgctcaaggtctcgttcagctgaaggcatgtacctacaaaggtcacaagacagttgtcactggagagcagatatgggagatccagaaggatcaacttctatacaatccattcttaaaaatgtgcctttcagcaaatggagagcatccaagtttagtgtcatgcaacccatcagatccactccaaaaatggatacttagccaaaatgattaagtgttccttaaaattaagttgaaaaaggaaatattctttctcataaaactgtgactaggcatacactgtagtttttgaaaattatgcaaaagcagctaaatgtaacttattccaagtgcatttttcttatttatatctttatgtagcactactacagaaattctgcaagtttctgtttcaaagcacaataactagtaataccaaagactatttcaaaatgtccagatgtaggggaagagatgtttacagtatgatgaaaataattttccaagtaaagtgatgtttgtgtgttttgtacacttagggatatatatatatagctacattcacacactcacaatttaaaatatttcccctagttttttggggggataggaagaaagatttgttactgtatttttttaactacataaaaatagatcaataaatgtcagcattggcctctgtgtacaaaccaagagcttttacagatccagaatttattagtttaaaatgcaggtgaacttttttttgcgtttggtttacttgtctgtcaaatgtttccttaaacatgaaactgaataaggagaagagtatttttaacacttaaatttcttggcaaattttaaaacattttttagtctgtaatacactccacttgaagcacttaagtcttccttaaatgacttttcttaagtaatgatactgtgtgttttcccaaagcacttttaaaaaaatttttataaattactatctgttgaaaaggtgtccttttcctttcttctagtatttttttcttaccaaaattcactaatcttgaatgtttgtgatattaaatttcaaatgcagaatacttgactcatttaaagctaaattttgttactgattcaattataattgtaatggatttttgactttgtaatggattcttttcatcaaaaagccttatttttttatctatgtggaaaacacaataaaaaatcctcaacactattgta

SEQ ID NO: 352494 - DNA, 1203 bp, Homo sapiens
ccgcattcttcccatcagcgcatccactctggagagaaaccttatgatgtatgagtgcgggaaggcttcagccagagctcggacctcaccaagcatcagagaattcacacgggggagaaaccctatgaatgtagtgaatgtggaaaagctttcaaccgaaactcatacctccagtcttctcccatcagatccactccaaaaatggatacttagccaaaatgattaagtgttccttaaaattaagttgaaaaaggaaatattctttctcataaaactgtgactaggcatacactgtagtttttgaaaattatgcaaaagcagctaaatgtaacttattccaagtgcatttttcttatttatatctttatgtagcactactacagaaattctgcaagtttctgtttcaaagcacaataactagtaataccaaagactatttcaaaatgtccagatgtaggggaagagatgtttacagtatgatgaaaataattttccaagtaaagtgatgtttgtgtgttttgtacacttagggatatatatatatagctacattcacacactcacaatttaaaatatttcccctagttttttggggggataggaagaaagatttgttactgtatttttttaactacataaaaatagatcaataaatgtcagcattggcctctgtgtacaaaccaagagcttttacagatccagaatttattagtttaaaatgcaggtgaacttttttttgcgtttggtttacttgtctgtcaaatgtttccttaaacatgaaactgaataaggagaagagtatttttaacacttaaatttcttggcaaattttaaaacattttttagtctgtaatacactccacttgaagcacttaagtcttccttaaatgacttttcttaagtaatgatactgtgtgttttcccaaagcacttttaaaaaaatttttataaattactatctgttgaaaaggtgtccttttcctttcttctagtatttttttcttaccaaaattcactaatcttgaatgtttgtgatattaaatttcaaatgcagaatacttgactcatttaaagctaaattttgttactgattcaattataattgtaatggatttttgactttgtaatggattcttttcatcaaaaagccttatttttttatctatgtggaaaacacaataaaaaatcctcaacactattgta

SEQ ID NO: 352495 - DNA, 2892 bp, Homo sapiens
aggtagggctggggcggggcgggaggctggcgcgcaggcgcggaagtggggcctcgcccctgccgacgtcgcaggctggagctcacctgggagactccaagtggaagccgagcctcggttctgcctctccaggcaacgcgggaggcccagcgggaaggcaggaggcggcggcggaggaggagctctactgagccgcaactgtggcgacagcaaccggagtcgcagccgccgccacctgcacctggcgcctagcccacgtccagcgcctgcccggccgccgcttcccgccaccctgccctgcccacccgccaggtactaccattaaagataccttcttctcagcaaatctatgataaaaaatataagtaacagaagaagaaataactgttatttgtcaagtgacaagcttttaatgtcagaatggctcacctaaagcgactagtaaaattacacattaaaagacattaccataaaaagttctggaagcttggtgcagtaatttttttctttataatagttttggttttaatgcaaagagaagtaagtgttcaatattccaaagaggaatcaaggatggaaaggaacatgaaaaacaaaaacaagatgttggatttaatgctagaagctgtaaacaatattaaggatgccatgccaaaaatgcaaataggagcacctgtcaggcaaaacattgatgctggtgagagaccttgtttgcaaggatattatacagcagcagaattgaagcctgtccttgaccgtccacctcaggattcaaatgcacctggtgcttctggtaaagcattcaagacaaccaatttaagtgttgaagagcaaaaggaaaaggaacgtggggaagctaaacactgctttaatgctttcgcaagtgacaggatttctttgcaccgagatcttggaccagacactcgacctcctgaatgtattgaacaaaaatttaagcgctgccctcccctgcccaccaccagtgtcataatagtttttcataatgaagcgtggtccacgttgcttagaactgtccacagtgtgctctattcttcacctgcaatactgctgaaggaaatcattttggtggatgatgctagtgtagatgagtacttacatgataaactagatgaatatgtaaaacaattttctatagtaaaaatagtcagacaaagagaaagaaaaggtctgatcactgctcggttgctaggagcaacagtcgcaacagctgaaacgctcacatttttagatgctcactgtgagtgtttctatggttggctagaacctctgttggccagaatagctgagaactacacggctgtcgtaagtccagatattgcatccatagatctgaacacgtttgaattcaacaaaccttctccttatggaagtaaccataaccgtggaaattttgactggagtctttcatttggctgggagtcgcttcctgatcatgagaagcaaagaaggaaagatgaaacctacccaattaaaacacccacttttgcaggaggacttttttccatatcaaaagaatattttgagtatattggaagctatgatgaagaaatggaaatctggggaggtgaaaatatagaaatgtctttcagagtatggcaatgtggtgggcagttggagattatgccttgctctgttgttggacatgtttttcgcagcaaaagccctcatagctttccaaaaggcactcaggtgattgctagaaaccaagttcgccttgcagaagtctggatggatgaatacaaggaaatattttataggagaaatacagatgcagcaaaaattgttaaacaaaaagcatttggtgatctttcaaaaagatttgaaataaaacaccgccttcagtgtaaaaattttacatggtatctgaacaacatttatccagaggtgtatgtgccagaccttaatcctgttatatctggatacattaaaagcgttggtcagcctctatgtctggatgttggagaaaacaatcaaggaggcaaaccattaattatgtatacatgtcatggacttgggggaaaccagtactttgaatactctgctcaacatgaaattcggcacaacatccagaaggaattatgtcttcatgctgctcaaggtctcgttcagctgaaggcatgtacctacaaaggtcacaagacagttgtcactggagagcagatatgggagatccagaaggatcaacttctatacaatccattcttaaaaatgtgcctttcagcaaatggagagcatccaagtttagtgtcatgcaacccatcagatccactccaaaaatggatacttagccaaaatgattaagtgttccttaaaattaagttgaaaaaggaaatattctttctcataaaactgtgactaggcatacactgtagtttttgaaaattatgcaaaagcagctaaatgtaacttattccaagtgcatttttcttatttatatctttatgtagcactactacagaaattctgcaagtttctgtttcaaagcacaataactagtaataccaaagactatttcaaaatgtccagatgcccagtcttctcccatcaggagcttatctgcaagatggctgcctgcccagagaagctagacctgaacctggcggcagctgtgcataaggagatgttcatcatggtgcaagaagagcggcgtctacgaaaggccctgctggagaagggtatcacagaggctgagcgagaggctttcgagctgctcccagatgatgagcgccagtgtatcaagtgcaagactacgtgtttcctgtcagccctggcctgctacgactgcccagacggccttgtctgcctttcccacatcaatgatcttcagcagtgctccactagccggcagtatcctgatgggaacgcaagatg

SEQ ID NO: 352496 - DNA, 1344 bp, Homo sapiens
aggtagggctggggcggggcgggaggctggcgcgcaggcgcggaagtggggcctcgcccctgccgacgtcgcaggctggagctcacctgggagactccaagtggaagccgagcctcggttctgcctctccaggcaacgcgggaggcccagcgggaaggcaggaggcggcggcggaggaggagctctactgagccgcaactgtggcgacagcaaccggagtcgcagccgccgccacctgcacctggcgcctagcccacgtccagcgcctgcccggccgccgcttcccgccaccctgccctgcccacccgccaggtactaccattaaagataccttcttctcagcaaatctatgataaaaaatataagtaacagaagaagaaataactgttatttgtcaagtgacaagcttttaatgtcagaatggctcacctaaagcgactagtaaaattacacattaaaagacattaccataaaaagttctggaagcttggtgcagtaatttttttctttataatagttttggttttaatgcaaagagaagtaagtgttcaatattccaaagaggaatcaaggatggaaaggaacatgaaaaacaaaaacaagatgttggatttaatgctagaagctgtaaacaatattaaggatgccatgccaaaaatgcaaataggagcacctgtcaggcaaaacattgatgctggtgagagaccttgtttgcaaggatattatacagcagcagaattgaagcctgtccttgaccgtccacctcaggattcaaatgcacctggtgcttctggtaaagcattcaagacaaccaatttaagtgttgaagagcaaaaggaaaaggaacgtggggaagctaaacactgctttaatgctttcgcaagtgacaggatttctttgcaccgagatcttggaccagacactcgacctcctgagtatgttgaagaatatttattgtttattctttatcaccaggctttgcaggggagagaggggtgagctaaggaagttatctgttttttagctactctaaggcagaaaatcagcaaatactgtttatttaacctgttgtatttattttttgcttataatgattgaggctacatatccctatttatgcttggtgaggcagtgcagatatgaaaagttattagcttggaaattagaaaactgaattctagatctgactgctatccacaaggaaattctttattcctaaatactgtggttttctcatctatttagggggaattattggacaatttgtataggaagtagaaggtagaggaattgtttccatttctctgtatttctttagaataaaaatgtttaaaaacatgccaa

SEQ ID NO: 352497 - DNA, 3874 bp, Homo sapiens
caacgtccctaccgccgctgcttcccgggaacctggcgccgccggaactgatcgcggcctagtcccgacgcgtgtgtgctagtgagccggagccggcgacggcggcagtggcggcccggcctgcaggagcccgacggggtctctgccatgggggagtgacgcgcctgcacccgctgttccgcggcagcggcgagacatgaggagaccccgcgacaggggcagcggcggcggctcgtgagccccgggatggaggagaaatacggcggggacgtgctggccggccccggcggcggcggcggccttgggccggtggacgtacccagcgctcggactgcattttttatggttttgtttcaaaagccattttcttctgggaaaactattaccaaacaccagtggatcaaaatatttaaacatgcagttgctgggtgtattatttcactcttgtggttttttggcctcactctttgtggaccactaaggactttgctgctatttgagcacagtgatattgttgtcatttcactactcagtgttttgttcaccagttctggaggaggaccagcaaagacaaggggagctgcttttttcattattgctgtgatctgtttattgctttttgacaatgatgatctcatggctaaaatggctgaacaccctgaaggacatcatgacagtgctctaactcatatgctttacacagccattgccttcttaggtgtggcagatcacaagggtggagtattattgctagtactggctttgtgttgtaaagttggttttcatacagcttccagaaagctctctgtcgacgttggtggagctaaacgtcttcaagctttatctcatcttgtttctgtgcttctcttgtgcccatgggtcattgttctttctgtgacaactgagagtaaagtggagtcttggttttctctcattatgccttttgcaacggttatcttttttgtcatgatcctggatttctacgtggattccatttgttcagtcaaaatggaagtttccaaatgtgctcgttatggatcctttcccatttttattagtgctctcctttttggaaatttttggacacatccaataacagaccagcttcgggctatgaacaaagcagcacaccaggagagcactgaacacgtcctgtctggaggagtggtagtgagtgctatattcttcattttgtctgccaatatcttatcatctccctctaagagaggacaaaaaggtacccttattggatattctcctgaaggaacacctctttataacttcatgggtgatgcttttcagcatagctctcaatcgatccctaggtttattaaggaatcactaaaacaaattcttgaggagagtgactctaggcagatcttttacttcttgtgcttgaatctgctttttacctttgtggaattattctatggcgtgctgaccaatagtctgggcctgatctcggatggattccacatgctttttgactgctctgctttagtcatgggactttttgctgccctgatgagtaggtggaaagccactcggattttctcctatgggtacggccgaatagaaattctgtctggatttattaatggactttttctaatagtaatagcgtttttgtgtttatggagtcagtggctagattgattgatcctccagaattagacactcacatgttaacaccagtctcagttggagggctgatagtaaaccttattggtatctgtgcctttagccatgcccatagccatgcccatggagcttctcaaggaagctgtcactcatctgatcacagccattcacaccatatgcatggacacagtgaccatgggcatggtcacagccacggatctgcgggtggaggcatgaatgctaacatgaggggtgtatttctacatgttttggcagatacacttggcagcattggtgtgatcgtatccacagttcttatagagcagtttggatggttcatcgctgacccactctgttctctttttattgctatattaatatttctcagtgttgttccactgattaaagatgcctgccaggttctactcctgagattgccaccagaatatgaaaaagaactacatattgctttagaaaagatacagaaaattgaaggattaatatcataccgagaccctcatttttggcgtcattctgctagtattgtggcaggaacaattcatatacaggtgacatctgatgtgctagaacaaagaatagtacagcaggttacaggaatacttaaagatgctggagtaaacaatttaacaattcaagtggaaaaggaggcatactttcaacatatgtctggcctaagtactggatttcatgatgttctggctatgacaaaacaaatggaatccatgaaatactgcaaagatggtacttacatcatgtgagataactcaagaattacccctggagaataaacaatgaagattaaatgactcagtatttgtaatattgccagaaggataaaaattacacattaactgtacagaaacagagttccctactactggatcaaggaatctttcttgaaggaaatttaaatacagaatgaaacattaatggtaaaagtggagtaattatttaaattatgtgtataaaaggaatcaaattttgagtaaacatgatgtattacatcatcttcaaaaatagatatgatggattctagtgaagaccaaaattacttctgtttactttctatcaggaagcatctccattgtaaatatgtatttacatgtttattacaaagacccaaatgaaaaatttttagtccattttttgcatagcctaaagataaaataggaataaaagttctatatttatggattttctgtatataaaactggtttctaattataacttaagtccattaagtaaaatctgtattgccactttaaatgtaaactaaattatttgggagaaacttcaaccactgatatgagataagcaatgagaatagggaagtgtataacatcacagtttttgatgtattacaaaaatcaaccactctataaaataaattttttttacttttggtaatatttgcaaatgaataattaatttattagggtaaagaacttatactaagttgtgtccatgttattcatttacttaccatgttcctttaaagtagaatatttcctttcttgttatatatttgacattccaagctgcttatcaagctggtatccaagcagtggtaagctttcatcctttcttagctccataacgttgtgaaacagccagttaagagaatcgtaaataattgtcaactcacagttgaattctctgcctatgtaggtaacttttttctaatttctggaacatatagatatataagaaatatcaaagaataggtagttatttcaaagtttaataagtaaaacttgttcataaacatttgagcaccatgaaatcaaaataccctataactactttctatagtcatatctaatttatatttttttcatttccagttgtaactagatatgtagtaaagtctgaaaagactttaccatagacaataacatgcagttttatcagcaccaaagaatgttgtccaaaagaaactttttaatacctgtctttctatttataacatctgaatattttcattcttatattaagaattttgataagtagattgaatttagtatgagtactattttcttatatataccacaatggcaaacatgtattataaatcatatttttgtcttaccaattttaatatatgaggggttttagaaatttgttgtaagttatttttatattccttgtcttttgcatattttttggccaaaatcttcaatacatattaaaatttttgagtggtgggaaaata

SEQ ID NO: 352498 - DNA, 3997 bp, Homo sapiens
caacgtccctaccgccgctgcttcccgggaacctggcgccgccggaactgatcgcggcctagtcccgacgcgtgtgtgctagtgagccggagccggcgacggcggcagtggcggcccggcctgcaggagcccgacggggtctctgccatgggggagtgacgcgcctgcacccgctgttccgcggcagcggcgagacatgaggagaccccgcgacaggggcagcggcggcggctcgtgagccccgggatggaggagaaatacggcggggacgtgctggccggccccggcggcggcggcggccttgggccggtggacgtacccagcgctcgattaacaaaatatattgtgttactatgtttcactaaatttttgaaggctgtgggacttttcgaatcatatgatctcctaaaagctgttcacattgttcagttcatttttatattaaaacttgggactgcattttttatggttttgtttcaaaagccattttcttctgggaaaactattaccaaacaccagtggatcaaaatatttaaacatgcagttgctgggtgtattatttcactcttgtggttttttggcctcactctttgtggaccactaaggactttgctgctatttgagcacagtgatattgttgtcatttcactactcagtgttttgttcaccagttctggaggaggaccagcaaagacaaggggagctgcttttttcattattgctgtgatctgtttattgctttttgacaatgatgatctcatggctaaaatggctgaacaccctgaaggacatcatgacagtgctctaactcatatgctttacacagccattgccttcttaggtgtggcagatcacaagggtggagtattattgctagtactggctttgtgttgtaaagttggttttcatacagcttccagaaagctctctgtcgacgttggtggagctaaacgtcttcaagctttatctcatcttgtttctgtgcttctcttgtgcccatgggtcattgttctttctgtgacaactgagagtaaagtggagtcttggttttctctcattatgccttttgcaacggttatcttttttgtcatgatcctggatttctacgtggattccatttgttcagtcaaaatggaagtttccaaatgtgctcgttatggatcctttcccatttttattagtgctctcctttttggaaatttttggacacatccaataacagaccagcttcgggctatgaacaaagcagcacaccaggagagcactgaacacgtcctgtctggaggagtggtagtgagtgctatattcttcattttgtctgccaatatcttatcatctccctctaagagaggacaaaaaggtacccttattggatattctcctgaaggaacacctctttataacttcatgggtgatgcttttcagcatagctctcaatcgatccctaggtttattaaggaatcactaaaacaaattcttgaggagagtgactctaggcagatcttttacttcttgtgcttgaatctgctttttacctttgtggaattattctatggcgtgctgaccaatagtctgggcctgatctcggatggattccacatgctttttgactgctctgctttagtcatgggactttttgctgccctgatgagtaggtggaaagccactcggattttctcctatgggtacggccgaatagaaattctgtctggatttattaatggactttttctaatagtaatagcgtttttgtgtttatggagtcagtggctagattgattgatcctccagaattagacactcacatgttaacaccagtctcagttggagggctgatagtaaaccttattggtatctgtgcctttagccatgcccatagccatgcccatggagcttctcaaggaagctgtcactcatctgatcacagccattcacaccatatgcatggacacagtgaccatgggcatggtcacagccacggatctgcgggtggaggcatgaatgctaacatgaggggtgtatttctacatgttttggcagatacacttggcagcattggtgtgatcgtatccacagttcttatagagcagtttggatggttcatcgctgacccactctgttctctttttattgctatattaatatttctcagtgttgttccactgattaaagatgcctgccaggttctactcctgagattgccaccagaatatgaaaaagaactacatattgctttagaaaagatacagaaaattgaaggattaatatcataccgagaccctcatttttggcgtcattctgctagtattgtggcaggaacaattcatatacaggtgacatctgatgtgctagaacaaagaatagtacagcaggttacaggaatacttaaagatgctggagtaaacaatttaacaattcaagtggaaaaggaggcatactttcaacatatgtctggcctaagtactggatttcatgatgttctggctatgacaaaacaaatggaatccatgaaatactgcaaagatggtacttacatcatgtgagataactcaagaattacccctggagaataaacaatgaagattaaatgactcagtatttgtaatattgccagaaggataaaaattacacattaactgtacagaaacagagttccctactactggatcaaggaatctttcttgaaggaaatttaaatacagaatgaaacattaatggtaaaagtggagtaattatttaaattatgtgtataaaaggaatcaaattttgagtaaacatgatgtattacatcatcttcaaaaatagatatgatggattctagtgaagaccaaaattacttctgtttactttctatcaggaagcatctccattgtaaatatgtatttacatgtttattacaaagacccaaatgaaaaatttttagtccattttttgcatagcctaaagataaaataggaataaaagttctatatttatggattttctgtatataaaactggtttctaattataacttaagtccattaagtaaaatctgtattgccactttaaatgtaaactaaattatttgggagaaacttcaaccactgatatgagataagcaatgagaatagggaagtgtataacatcacagtttttgatgtattacaaaaatcaaccactctataaaataaattttttttacttttggtaatatttgcaaatgaataattaatttattagggtaaagaacttatactaagttgtgtccatgttattcatttacttaccatgttcctttaaagtagaatatttcctttcttgttatatatttgacattccaagctgcttatcaagctggtatccaagcagtggtaagctttcatcctttcttagctccataacgttgtgaaacagccagttaagagaatcgtaaataattgtcaactcacagttgaattctctgcctatgtaggtaacttttttctaatttctggaacatatagatatataagaaatatcaaagaataggtagttatttcaaagtttaataagtaaaacttgttcataaacatttgagcaccatgaaatcaaaataccctataactactttctatagtcatatctaatttatatttttttcatttccagttgtaactagatatgtagtaaagtctgaaaagactttaccatagacaataacatgcagttttatcagcaccaaagaatgttgtccaaaagaaactttttaatacctgtctttctatttataacatctgaatattttcattcttatattaagaattttgataagtagattgaatttagtatgagtactattttcttatatataccacaatggcaaacatgtattataaatcatatttttgtcttaccaattttaatatatgaggggttttagaaatttgttgtaagttatttttatattccttgtcttttgcatattttttggccaaaatcttcaatacatattaaaatttttgagtggtgggaaaata

SEQ ID NO: 352499 - DNA, 3068 bp, Homo sapiens
caacgtccctaccgccgctgcttcccgggaacctggcgccgccggaactgatcgcggcctagtcccgacgcgtgtgtgctagtgagccggagccggcgacggcggcagtggcggcccggcctgcaggagcccgacggggtctctgccatgggggagtgacgcgcctgcacccgctgttccgcggcagcggcgagacatgaggagaccccgcgacaggggcagcggcggcggctcgtgagccccgggatggaggagaaatacggcggggacgtgctggccggccccggcggcggcggcggccttgggccggtggacgtacccagcgctcggactgcattttttatggttttgtttcaaaagccattttcttctgggaaaactattaccaaacaccagtggatcaaaatatttaaacatgcagttgctgggtgtattatttcactcttgtggttttttggcctcactctttgtggaccactaaggactttgctgctatttgagcacagtgatattgttgtcatttcactactcagtgttttgttcaccagttctggaggaggaccagcaaagacaaggggagctgcttttttcattattgctgtgatctgtttattgctttttgacaatgatgatctcatggctaaaatggctgaacaccctgaaggacatcatgacagtgctctaactcatatgctttacacagccattgccttcttaggtgtggcagatcacaagggtggagtattattgctagtactggctttgtgttgtaaagttggttttcatacagcttccagaaagctctctgtcgacgttggtggagctaaacgtcttcaagctttatctcatcttgtttctgtgcttctcttgtgcccatgggtcattgttctttctgtgacaactgagagtaaagtggagtcttggttttctctcattatgccttttgcaacggttatcttttttgtcatgatcctggatttctacgtggattccatttgttcagtcaaaatggaagtttccaaatgtgctcgttatggatcctttcccatttttattagtgctctcctttttggaaatttttggacacatccaataacagaccagcttcgggctatgaacaaagcagcacaccaggagagcactgaacacgtcctgtctggaggagtggtagtgagtgctatattcttcattttgtctgccaatatcttatcatctccctctaagagaggacaaaaaggtacccttattggatattctcctgaaggaacacctctttataacttcatgggtgatgcttttcagcatagctctcaatcgatccctaggtttattaaggaatcactaaaacaaattcttgaggagagtgactctaggcagatcttttacttcttgtgcttgaatctgctttttacctttgtggaattattctatggcgtgctgaccaatagtctgggcctgatctcggatggattccacatgctttttgactgctctgctttagtcatgggactttttgctgccctgatgagtaggtggaaagccactcggattttctcctatgggtacggccgaatagaaattctgtctggatttattaatggactttttctaatagtaatagcgtttttgtgtttatggagtcagtggctagattgattgatcctccagaattagacactcacatgttaacaccagtctcagttggagggctgatagtaaaccttattggtatctgtgcctttagccatgcccatagccatgcccatggagcttctcaaggaagctgtcactcatctgatcacagccattcacaccatatgcatggacacagtgaccatgggcatggtcacagccacggatctgcgggtggaggcatgaatgctaacatgaggggtgtatttctacatgttttggcagatacacttggcagcattggtgtgatcgtatccacagttcttatagagcagtttggatggttcatcgctgacccactctgttctctttttattgctatattaatatttctcagtgttgttccactgattaaagatgcctgccaggttctactcctgagattgccaccagaatatgaaaaagaactacatattgctttagaaaagatacagaaaattgaaggattaatatcataccgagaccctcatttttggcgtcattctgctagtattgtggcaggaacaattcatatacaggtgacatctgatgtgctagaacaaagaatagtacagcaggttacaggaatacttaaagatgctggagtaaacaatttaacaattcaagtggaaaaggaggcatactttcaacatatgtctggcctaagtactggatttcatgatgttctggctatgacaaaacaaatggaatccatgaaatactgcaaagatggtacttacatcatgtgagataactcaagaattacccctggagaataaacaatgaagattaaatgactcagtatttgtaatattgccagaaggataaaaattacacattaactgtacagaaacagagttccctactactggatcaaggaatctttcttgaaggaaatttaaatacagaatgaaacattaatggtaaaagtggagtaattatttaaattatgtgtataaaaggaatcaaattttgagtaaacatgatgtattacatcatcttcaaaaatagatatgatggattctagtgaagaccaaaattacttctgtttactttctatcaggaagcatctccattgtaaatatgtatttacatgtttattacaaagacccaaatgaaaaatttttagtccattttttgcatagcctaaagataaaataggaataaaagttctatatttatggattttctgtatataaaactggtttctaattataacttaagtccattaagtaaaatctgtattgccactttaaatgtaaactaaattatttgggagaaacttcaaccactgatatgagataagcaatgagaatagggaagtgtataacatcacagtttttgatgtattacaaaaatcaaccactctataaaataaattttttttacttttggta

SEQ ID NO: 352500 - DNA, 2869 bp, Homo sapiens
caacgtccctaccgccgctgcttcccgggaacctggcgccgccggaactgatcgcggcctagtcccgacgcgtgtgtgctagtgagccggagccggcgacggcggcagtggcggcccggcctgcaggagcccgacggggtctctgccatgggggagtgacgcgcctgcacccgctgttccgcggcagcggcgagacatgaggagaccccgcgacaggggcagcggcggcggctcgtgagccccgggatggaggagaaatacggcggggacgtgctggccggccccggcggcggcggcggccttgggccggtggacgtacccagcgctcggactgcattttttatggttttgtttcaaaagccattttcttctgggaaaactattaccaaacaccagtggatcaaaatatttaaacatgcagttgctgggtgtattatttcactcttgtggttttttggcctcactctttgtggaccactaaggactttgctgctatttgagcacagtgatattgttgtcatttcactactcagtgttttgttcaccagttctggaggaggaccagcaaagacaaggggagctgcttttttcattattgctgtgatctgtttattgctttttgacaatgatgatctcatggctaaaatggctgaacaccctgaaggacatcatgacagtgctctaactcatatgctttacacagccattgccttcttaggtgtggcagatcacaagggtggagtattattgctagtactggctttgtgttgtaaagttggttttcatacagcttccagaaagctctctgtcgacgttggtggagctaaacgtcttcaagctttatctcatcttgtttctgtgcttctcttgtgcccatgggtcattgttctttctgtgacaactgagagtaaagtggagtcttggttttctctcattatgccttttgcaacggttatcttttttgtcatgatcctggatttctacgtggattccatttgttcagtcaaaatggaagtttccaaatgtgctcgttatggatcctttcccatttttattagtgctctcctttttggaaatttttggacacatccaataacagaccagcttcgggctatgaacaaagcagcacaccaggagagcactgaacacgtcctgtctggaggagtggtagtgagtgctatattcttcattttgtctgccaatatcttatcatctccctctaagagaggacaaaaaggtacccttattggatattctcctgaaggaacacctctttataacttcatgggtgatgcttttcagcatagctctcaatcgatccctaggtttattaaggaatcactaaaacaaattcttgaggagagtgactctaggcagatcttttacttcttgtgcttgaatctgctttttacctttgtggaattattctatggcgtgctgaccaatagtctgggcctgatctcggatggattccacatgctttttgactgctctgctttagtcatgggactttttgctgccctgatgagtaggtggaaagccactcggattttctcctatgggtacggccgaatagaaattctgtctggatttattaatggactttttctaatagtaatagcgtttttgtgtttatggagtcagtggctagattgattgatcctccagaattagacactcacatgttaacaccagtctcagttggagggctgatagtaaaccttattggtatctgtgcctttagccatgcccatagccatgcccatggagcttctcaaggaagctgtcactcatctgatcacagccattcacaccatatgcatggacacagtgaccatgggcatggtcacagccacggatctgcgggtggaggcatgaatgctaacatgaggggtgtatttctacatgttttggcagatacacttggcagcattggtgtgatcgtatccacagttcttatagagcagtttggatggttcatcgctgacccactctgttctctttttattgctatattaatatttctcagtgttgttccactgattaaagatgcctgccaggttctactcctgagattgccaccagaatatgaaaaagaactacatattgctttagaaaagatacagaaaattgaaggattaatatcataccgagaccctcatttttggcgtcattctgctagtattgtggcaggaacaattcatatacaggtgacatctgatgtgctagaacaaagaatagtacagcaggttacaggaatacttaaagatgctggagtaaacaatttaacaattcaagtggaaaaggaggcatactttcaacatatgtctggcctaagtactggatttcatgatgttctggctatgacaaaacaaatggaatccatgaaatactgcaaagatggtacttacatcatgtgagataactcaagaattacccctggagaataaacaatgaagattaaatgactcagtatttgtaatattgccagaaggataaaaattacacattaactgtacagaaacagagttccctactactggatcaaggaatctttcttgaaggaaatttaaatacagaatgaaacattaatggtaaaagtggagtaattatttaaattatgtgtataaaaggaatcaaattttgagtaaacatgatgtattacatcatcttcaaaaatagatatgatggattctagtgaagaccaaaattacttctgtttactttctatcaggaagcatctccattgtaaatatgtatttacatgtttattacaaagacccaaatgaaaaatttttagtccattttttgcatagcctaaagataaaataggaataaaagttctatatttatggattttctgtatata

SEQ ID NO: 352501 - DNA, 2816 bp, Homo sapiens
caacgtccctaccgccgctgcttcccgggaacctggcgccgccggaactgatcgcggcctagtcccgacgcgtgtgtgctagtgagccggagccggcgacggcggcagtggcggcccggcctgcaggagcccgacggggtctctgccatgggggagtgacgcgcctgcacccgctgttccgcggcagcggcgagacatgaggagaccccgcgacaggggcagcggcggcggctcgtgagccccgggatggaggagaaatacggcggggacgtgctggccggccccggcggcggcggcggccttgggccggtggacgtacccagcgctcggactgcattttttatggttttgtttcaaaagccattttcttctgggaaaactattaccaaacaccagtggatcaaaatatttaaacatgcagttgctgggtgtattatttcactcttgtggttttttggcctcactctttgtggaccactaaggactttgctgctatttgagcacagtgatattgttgtcatttcactactcagtgttttgttcaccagttctggaggaggaccagcaaagacaaggggagctgcttttttcattattgctgtgatctgtttattgctttttgacaatgatgatctcatggctaaaatggctgaacaccctgaaggacatcatgacagtgctctaactcatatgctttacacagccattgccttcttaggtgtggcagatcacaagggtggagtattattgctagtactggctttgtgttgtaaagttggttttcatacagcttccagaaagctctctgtcgacgttggtggagctaaacgtcttcaagctttatctcatcttgtttctgtgcttctcttgtgcccatgggtcattgttctttctgtgacaactgagagtaaagtggagtcttggttttctctcattatgccttttgcaacggttatcttttttgtcatgatcctggatttctacgtggattccatttgttcagtcaaaatggaagtttccaaatgtgctcgttatggatcctttcccatttttattagtgctctcctttttggaaatttttggacacatccaataacagaccagcttcgggctatgaacaaagcagcacaccaggagagcactgaacacgtcctgtctggaggagtggtagtgagtgctatattcttcattttgtctgccaatatcttatcatctccctctaagagaggacaaaaaggtacccttattggatattctcctgaaggaacacctctttataacttcatgggtgatgcttttcagcatagctctcaatcgatccctaggtttattaaggaatcactaaaacaaattcttgaggagagtgactctaggcagatcttttacttcttgtgcttgaatctgctttttacctttgtggaattattctatggcgtgctgaccaatagtctgggcctgatctcggatggattccacatgctttttgactgctctgctttagtcatgggactttttgctgccctgatgagtaggtggaaagccactcggattttctcctatgggtacggccgaatagaaattctgtctggatttattaatggactttttctaatagtaatagcgtttttgtgtttatggagtcagtggctagattgattgatcctccagaattagacactcacatgttaacaccatgcccatagccatgcccatggagcttctcaaggaagctgtcactcatctgatcacagccattcacaccatatgcatggacacagtgaccatgggcatggtcacagccacggatctgcgggtggaggcatgaatgctaacatgaggggtgtatttctacatgttttggcagatacacttggcagcattggtgtgatcgtatccacagttcttatagagcagtttggatggttcatcgctgacccactctgttctctttttattgctatattaatatttctcagtgttgttccactgattaaagatgcctgccaggttctactcctgagattgccaccagaatatgaaaaagaactacatattgctttagaaaagatacagaaaattgaaggattaatatcataccgagaccctcatttttggcgtcattctgctagtattgtggcaggaacaattcatatacaggtgacatctgatgtgctagaacaaagaatagtacagcaggttacaggaatacttaaagatgctggagtaaacaatttaacaattcaagtggaaaaggaggcatactttcaacatatgtctggcctaagtactggatttcatgatgttctggctatgacaaaacaaatggaatccatgaaatactgcaaagatggtacttacatcatgtgagataactcaagaattacccctggagaataaacaatgaagattaaatgactcagtatttgtaatattgccagaaggataaaaattacacattaactgtacagaaacagagttccctactactggatcaaggaatctttcttgaaggaaatttaaatacagaatgaaacattaatggtaaaagtggagtaattatttaaattatgtgtataaaaggaatcaaattttgagtaaacatgatgtattacatcatcttcaaaaatagatatgatggattctagtgaagaccaaaattacttctgtttactttctatcaggaagcatctccattgtaaatatgtatttacatgtttattacaaagacccaaatgaaaaatttttagtccattttttgcatagcctaaagataaaataggaataaaagttctatatttatggattttctgtatata

SEQ ID NO: 352502 - DNA, 3772 bp, Homo sapiens
caacgtccctaccgccgctgcttcccgggaacctggcgccgccggaactgatcgcggcctagtcccgacgcgtgtgtgctagtgagccggagccggcgacggcggcagtggcggcccggcctgcaggagcccgacggggtctctgccatgggggagtgacgcgcctgcacccgctgttccgcggcagcggcgagacatgaggagaccccgcgacaggggcagcggcggcggctcgtgagccccgggatggaggagaaatacggcggggacgtgctggccggccccggcggcggcggcggccttgggccggtggacgtacccagcgctcggactgcattttttatggttttgtttcaaaagccattttcttctgggaaaactattaccaaacaccagtggatcaaaatatttaaacatgcagttgctgggtgtattatttcactcttgtggttttttggcctcactctttgtggaccactaaggactttgctgctatttgagcacagtgatattgttgtcatttcactactcagtgttttgttcaccagttctggaggaggaccagcaaagacaaggggagctgcttttttcattattgctgtgatctgtttattgctttttgacaatgatgatctcatggctaaaatggctgaacaccctgaaggacatcatgacagtgctctaactcatatgctttacacagccattgccttcttaggtgtggcagatcacaagggtggagtattattgctagtactggctttgtgttgtaaagttggttttcatacagcttccagaaagctctctgtcgacgttggtggagctaaacgtcttcaagctttatctcatcttgtttctgtgcttctcttgtgcccatgggtcattgttctttctgtgacaactgagagtaaagtggagtcttggttttctctcattatgccttttgcaacggttatcttttttgtcatgatcctggatttctacgtggattccatttgttcagtcaaaatggaagtttccaaatgtgctcgttatggatcctttcccatttttattagtgctctcctttttggaaatttttggacacatccaataacagaccagcttcgggctatgaacaaagcagcacaccaggagagcactgaacacgtcctgtctggaggagtggtagtgagtgctatattcttcattttgtctgccaatatcttatcatctccctctaagagaggacaaaaaggtacccttattggatattctcctgaaggaacacctctttataacttcatgggtgatgcttttcagcatagctctcaatcgatccctaggtttattaaggaatcactaaaacaaattcttgaggagagtgactctaggcagatcttttacttcttgtgcttgaatctgctttttacctttgtggaattattctatggcgtgctgaccaatagtctgggcctgatctcggatggattccacatgctttttgactgctctgctttagtcatgggactttttgctgccctgatgagtaggtggaaagccactcggattttctcctatgggtacggccgaatagaaattctgtctggatttattaatggactttttctaatagtaatagcgtttttgtgtttatggagtcagtggctagattgattgatcctccagaattagacactcacatgttaacaccatgcccatagccatgcccatggagcttctcaaggaagctgtcactcatctgatcacagccattcacaccatatgcatggacacagtgaccatgggcatggtcacagccacggatctgcgggtggaggcatgaatgctaacatgaggggtgtatttctacatgttttggcagatacacttggcagcattggtgtgatcgtatccacagttcttatagagcagtttggatggttcatcgctgacccactctgttctctttttattgctatattaatatttctcagtgttgttccactgattaaagatgcctgccaggttctactcctgagattgccaccagaatatgaaaaagaactacatattgctttagaaaaggtcattctgctagtattgtggcaggaacaattcatatacaggtgacatctgatgtgctagaacaaagaatagtacagcaggttacaggaatacttaaagatgctggagtaaacaatttaacaattcaagtggaaaaggaggcatactttcaacatatgtctggcctaagtactggatttcatgatgttctggctatgacaaaacaaatggaatccatgaaatactgcaaagatggtacttacatcatgtgagataactcaagaattacccctggagaataaacaatgaagattaaatgactcagtatttgtaatattgccagaaggataaaaattacacattaactgtacagaaacagagttccctactactggatcaaggaatctttcttgaaggaaatttaaatacagaatgaaacattaatggtaaaagtggagtaattatttaaattatgtgtataaaaggaatcaaattttgagtaaacatgatgtattacatcatcttcaaaaatagatatgatggattctagtgaagaccaaaattacttctgtttactttctatcaggaagcatctccattgtaaatatgtatttacatgtttattacaaagacccaaatgaaaaatttttagtccattttttgcatagcctaaagataaaataggaataaaagttctatatttatggattttctgtatataaaactggtttctaattataacttaagtccattaagtaaaatctgtattgccactttaaatgtaaactaaattatttgggagaaacttcaaccactgatatgagataagcaatgagaatagggaagtgtataacatcacagtttttgatgtattacaaaaatcaaccactctataaaataaattttttttacttttggtaatatttgcaaatgaataattaatttattagggtaaagaacttatactaagttgtgtccatgttattcatttacttaccatgttcctttaaagtagaatatttcctttcttgttatatatttgacattccaagctgcttatcaagctggtatccaagcagtggtaagctttcatcctttcttagctccataacgttgtgaaacagccagttaagagaatcgtaaataattgtcaactcacagttgaattctctgcctatgtaggtaacttttttctaatttctggaacatatagatatataagaaatatcaaagaataggtagttatttcaaagtttaataagtaaaacttgttcataaacatttgagcaccatgaaatcaaaataccctataactactttctatagtcatatctaatttatatttttttcatttccagttgtaactagatatgtagtaaagtctgaaaagactttaccatagacaataacatgcagttttatcagcaccaaagaatgttgtccaaaagaaactttttaatacctgtctttctatttataacatctgaatattttcattcttatattaagaattttgataagtagattgaatttagtatgagtactattttcttatatataccacaatggcaaacatgtattataaatcatatttttgtcttaccaattttaatatatgaggggttttagaaatttgttgtaagttatttttatattccttgtcttttgcatattttttggccaaaatcttcaatacatattaaaatttttgagtggtgggaaaata

SEQ ID NO: 352503 - DNA, 3309 bp, Homo sapiens
tccttgatgttgttttctttattttcagacaaggggagctgcttttttcattattgctgtgatctgtttattgctttttgacaatgatgatctcatggctaaaatggctgaacaccgtatccttttggaatagatcagagttgtttcaagtcttgaggaaaactagaagcggtggagtattattgctagtactggctttgtgttgtaaagttggttttcatacagcttccagaaagctctctgtcgacgttggtggagctaaacgtcttcaagctttatctcatcttgtttctgtgcttctcttgtgcccatgggtcattgttctttctgtgacaactgagagtaaagtggagtcttggttttctctcattatgccttttgcaacggttatcttttttgtcatgatcctggatttctacgtggattccatttgttcagtcaaaatggaagtttccaaatgtgctcgttatggatcctttcccatttttattagtgctctcctttttggaaatttttggacacatccaataacagaccagcttcgggctatgaacaaagcagcacaccaggagagcactgaacacgtcctgtctggaggagtggtagtgagtgctatattcttcattttgtctgccaatatcttatcatctccctctaagagaggacaaaaaggtacccttattggatattctcctgaaggaacacctctttataacttcatgggtgatgcttttcagcatagctctcaatcgatccctaggtttattaaggaatcactaaaacaaattcttgaggagagtgactctaggcagatcttttacttcttgtgcttgaatctgctttttacctttgtggaattattctatggcgtgctgaccaatagtctgggcctgatctcggatggattccacatgctttttgactgctctgctttagtcatgggactttttgctgccctgatgagtaggtggaaagccactcggattttctcctatgggtacggccgaatagaaattctgtctggatttattaatggactttttctaatagtaatagcgtttttgtgtttatggagtcagtggctagattgattgatcctccagaattagacactcacatgttaacaccagtctcagttggagggctgatagtaaaccttattggtatctgtgcctttagccatgcccatagccatgcccatggagcttctcaaggaagctgtcactcatctgatcacagccattcacaccatatgcatggacacagtgaccatgggcatggtcacagccacggatctgcgggtggaggcatgaatgctaacatgaggggtgtatttctacatgttttggcagatacacttggcagcattggtgtgatcgtatccacagttcttatagagcagtttggatggttcatcgctgacccactctgttctctttttattgctatattaatatttctcagtgttgttccactgattaaagatgcctgccaggttctactcctgagattgccaccagaatatgaaaaagaactacatattgctttagaaaagatacagaaaattgaaggattaatatcataccgagaccctcatttttggcgtcattctgctagtattgtggcaggaacaattcatatacaggtgacatctgatgtgctagaacaaagaatagtacagcaggttacaggaatacttaaagatgctggagtaaacaatttaacaattcaagtggaaaaggaggcatactttcaacatatgtctggcctaagtactggatttcatgatgttctggctatgacaaaacaaatggaatccatgaaatactgcaaagatggtacttacatcatgtgagataactcaagaattacccctggagaataaacaatgaagattaaatgactcagtatttgtaatattgccagaaggataaaaattacacattaactgtacagaaacagagttccctactactggatcaaggaatctttcttgaaggaaatttaaatacagaatgaaacattaatggtaaaagtggagtaattatttaaattatgtgtataaaaggaatcaaattttgagtaaacatgatgtattacatcatcttcaaaaatagatatgatggattctagtgaagaccaaaattacttctgtttactttctatcaggaagcatctccattgtaaatatgtatttacatgtttattacaaagacccaaatgaaaaatttttagtccattttttgcatagcctaaagataaaataggaataaaagttctatatttatggattttctgtatataaaactggtttctaattataacttaagtccattaagtaaaatctgtattgccactttaaatgtaaactaaattatttgggagaaacttcaaccactgatatgagataagcaatgagaatagggaagtgtataacatcacagtttttgatgtattacaaaaatcaaccactctataaaataaattttttttacttttggtaatatttgcaaatgaataattaatttattagggtaaagaacttatactaagttgtgtccatgttattcatttacttaccatgttcctttaaagtagaatatttcctttcttgttatatatttgacattccaagctgcttatcaagctggtatccaagcagtggtaagctttcatcctttcttagctccataacgttgtgaaacagccagttaagagaatcgtaaataattgtcaactcacagttgaattctctgcctatgtaggtaacttttttctaatttctggaacatatagatatataagaaatatcaaagaataggtagttatttcaaagtttaataagtaaaacttgttcataaacatttgagcaccatgaaatcaaaataccctataactactttctatagtcatatctaatttatatttttttcatttccagttgtaactagatatgtagtaaagtctgaaaagactttaccatagacaataacatgcagttttatcagcaccaaagaatgttgtccaaaagaaactttttaatacctgtctttctatttataacatctgaatattttcattcttatattaagaattttgataagtagattgaatttagtatgagtactattttcttatatataccacaatggcaaacatgtattataaatcatatttttgtcttaccaattttaatatatgaggggttttagaaatttgttgtaagttatttttatattccttgtcttttgcatattttttggccaaaatcttcaatacatattaaaatttttgagtggtgggaaaata

SEQ ID NO: 352504 - DNA, 3811 bp, Homo sapiens
caacgtccctaccgccgctgcttcccgggaacctggcgccgccggaactgatcgcggcctagtcccgacgcgtgtgtgctagtgagccggagccggcgacggcggcagtggcggcccggcctgcaggagcccgacggggtctctgccatgggggagtgacgcgcctgcacccgctgttccgcggcagcggcgagacatgaggagaccccgcgacaggggcagcggcggcggctcgtgagccccgggatggaggagaaatacggcggggacgtgctggccggccccggcggcggcggcggccttgggccggtggacgtacccagcgctcggactgcattttttatggttttgtttcaaaagccattttcttctgggaaaactattaccaaacaccagtggatcaaaatatttaaacatgcagttgctgggtgtattatttcactcttgtggttttttggcctcactctttgtggaccactaaggactttgctgctatttgagcacagtgatattgttgtcatttcactactcagtgttttgttcaccagttctggaggaggaccagcaaagacaaggggagctgcttttttcattattgctgtgatctgtttattgctttttgacaatgatgatctcatggctaaaatggctgaacaccctgaaggacatcatgacagtgctctaactcatatgctttacacagccattgccttcttaggtgtggcagatcacaagggtggagtattattgctagtactggctttgtgttgtaaagttggttttcatacagcttccagaaagctctctgtcgacgttggtggagctaaacgtcttcaagctttatctcatcttgtttctgtgcttctcttgtgcccatgggtcattgttctttctgtgacaactgagagtaaagtggagtcttggttttctctcattatgccttttgcaacggttatcttttttgtcatgatcctggatttctacgtggattccatttgttcagtcaaaatggaagtttccaaatgtgctcgttatggatcctttcccatttttattagtgctctcctttttggaaatttttggacacatccaataacagaccagcttcgggctatgaacaaagcagcacaccaggagagcactgaacacgtcctgtctggaggagtggtagtgagtgctatattcttcattttgtctgccaatatcttatcatctccctctaagagaggacaaaaaggtacccttattggatattctcctgaaggaacacctctttataacttcatgggtgatgcttttcagcatagctctcaatcgatccctaggtttattaaggaatcactaaaacaaattcttgaggagagtgactctaggcagatcttttacttcttgtgcttgaatctgctttttacctttgtggaattattctatggcgtgctgaccaatagtctgggcctgatctcggatggattccacatgctttttgactgctctgctttagtcatgggactttttgctgccctgatgagtaggtggaaagccactcggattttctcctatgggtacggccgaatagaaattctgtctggatttattaatggactttttctaatagtaatagcgtttttgtgtttatggagtcagtggctagattgattgatcctccagaattagacactcacatgttaacaccagtctcagttggagggctgatagtaaaccttattggtatctgtgcctttagccatgcccatagccatgcccatggagcttctcaaggaagctgtcactcatctgatcacagccattcacaccatatgcatggacacagtgaccatgggcatggtcacagccacggatctgcgggtggaggcatgaatgctaacatgaggggtgtatttctacatgttttggcagatacacttggcagcattggtgtgatcgtatccacagttcttatagagcagtttggatggttcatcgctgacccactctgttctctttttattgctatattaatatttctcagtgttgttccactgattaaagatgcctgccaggttctactcctgagattgccaccagaatatgaaaaagaactacatattgctttagaaaaggccaggcgtggcggctcacacctgtaatcccagaactttgggaggccgaggcgggcggatcacaaggttacaggaatacttaaagatgctggagtaaacaatttaacaattcaagtggaaaaggaggcatactttcaacatatgtctggcctaagtactggatttcatgatgttctggctatgacaaaacaaatggaatccatgaaatactgcaaagatggtacttacatcatgtgagataactcaagaattacccctggagaataaacaatgaagattaaatgactcagtatttgtaatattgccagaaggataaaaattacacattaactgtacagaaacagagttccctactactggatcaaggaatctttcttgaaggaaatttaaatacagaatgaaacattaatggtaaaagtggagtaattatttaaattatgtgtataaaaggaatcaaattttgagtaaacatgatgtattacatcatcttcaaaaatagatatgatggattctagtgaagaccaaaattacttctgtttactttctatcaggaagcatctccattgtaaatatgtatttacatgtttattacaaagacccaaatgaaaaatttttagtccattttttgcatagcctaaagataaaataggaataaaagttctatatttatggattttctgtatataaaactggtttctaattataacttaagtccattaagtaaaatctgtattgccactttaaatgtaaactaaattatttgggagaaacttcaaccactgatatgagataagcaatgagaatagggaagtgtataacatcacagtttttgatgtattacaaaaatcaaccactctataaaataaattttttttacttttggtaatatttgcaaatgaataattaatttattagggtaaagaacttatactaagttgtgtccatgttattcatttacttaccatgttcctttaaagtagaatatttcctttcttgttatatatttgacattccaagctgcttatcaagctggtatccaagcagtggtaagctttcatcctttcttagctccataacgttgtgaaacagccagttaagagaatcgtaaataattgtcaactcacagttgaattctctgcctatgtaggtaacttttttctaatttctggaacatatagatatataagaaatatcaaagaataggtagttatttcaaagtttaataagtaaaacttgttcataaacatttgagcaccatgaaatcaaaataccctataactactttctatagtcatatctaatttatatttttttcatttccagttgtaactagatatgtagtaaagtctgaaaagactttaccatagacaataacatgcagttttatcagcaccaaagaatgttgtccaaaagaaactttttaatacctgtctttctatttataacatctgaatattttcattcttatattaagaattttgataagtagattgaatttagtatgagtactattttcttatatataccacaatggcaaacatgtattataaatcatatttttgtcttaccaattttaatatatgaggggttttagaaatttgttgtaagttatttttatattccttgtcttttgcatattttttggccaaaatcttcaatacatattaaaatttttgagtggtgggaaaata

SEQ ID NO: 352505 - DNA, 2577 bp, Homo sapiens
caacgtccctaccgccgctgcttcccgggaacctggcgccgccggaactgatcgcggcctagtcccgacgcgtgtgtgctagtgagccggagccggcgacggcggcagtggcggcccggcctgcaggagcccgacggggtctctgccatgggggagtgacgcgcctgcacccgctgttccgcggcagcggcgagacatgaggagaccccgcgacaggggcagcggcggcggctcgtgagccccgggatggaggagaaatacggcggggacgtgctggccggccccggcggcggcggcggccttgggccggtggacgtacccagcgctcggactgcattttttatggttttgtttcaaaagccattttcttctgggaaaactattaccaaacaccagtggatcaaaatatttaaacatgcagttgctgggtgtattatttcactcttgtggttttttggcctcactctttgtggaccactaaggactttgctgctatttgagcacagtgatattgttgtcatttcactactcagtgttttgttcaccagttctggaggaggaccagcaaagacaaggggagctgcttttttcattattgctgtgatctgtttattgctttttgacaatgatgatctcatggctaaaatggctgaacaccctgaaggacatcatgacagtgctctaactcatatgctttacacagccattgccttcttaggtgtggcagatcacaagggtggagtattattgctagtactggctttgtgttgtaaagttggttttcatacagcttccagaaagctctctgtcgacgttggtggagctaaacgtcttcaagctttatctcatcttgtttctgtgcttctcttgtgcccatgggtcattgttctttctgtgacaactgagagtaaagtggagtcttggttttctctcattatgccttttgcaacggttatcttttttgtcatgatcctggatttctacgtggattccatttgttcagtcaaaatggaagtttccaaatgtgctcgttatggatcctttcccatttttattagtgctctcctttttggaaatttttggacacatccaataacagaccagcttcgggctatgaacaaagcagcacaccaggagagcactgaacacgtcctgtctggaggagtggtagtgagtgctatattcttcattttgtctgccaatatcttatcatctccctctaagagaggacaaaaaggtacccttattggatattctcctgaaggaacacctctttataacttcatgggtgatgcttttcagcatagctctcaatcgatccctaggtttattaaggaatcactaaaacaaattcttgaggagagtgactctaggcagatcttttacttcttgtgcttgaatctgctttttacctttgtggaattattctatggcgtgctgaccaatagtctgggcctgatctcggatggattccacatgctttttgactgctctgctttagtcatgggactttttgctgccctgatgagtaggtggaaagccactcggattttctcctatgggtacggccgaatagaaattctgtctggatttattaatggactttttctaatagtaatagcgtttttgtgtttatggagtcagtggctagattgattgatcctccagaattagacactcacatgttaacaccagtctcagttggagggctgatagtaaaccttattggtatctgtgcctttagccatgcccatagccatgcccatggagcttctcaaggaagctgtcactcatctgatcacagccattcacaccatatgcatggacacagtgaccatgggcatggtcacagccacggatctgcgggtggaggcatgaatgctaacatgaggggtgtatttctacatgttttggcagatacacttggcagcattggtgtgatcgtatccacagttcttatagagcagtttggatggttcatcgctgacccactctgttctctttttattgctatattaatatttctcagtgttgttccactgattaaagatgcctgccaggttctactcctgagattgccaccagaatatgaaaaagaactacatattgctttagaaaagatacagaaaattgaaggattaatatcataccgagaccctcatttttggcgtcattctgctagtattgtggcaggaacaattcatatacaggtgacatctgatgtgctagaacaaagaatagtacagcaggttacaggaatacttaaagatgctggagtaaacaatttaacaattcaagtggaaaaggaggcatactttcaacatatgtctggcctaagtactggatttcatgatgttctggctatgacaaaacaaatggaatccatgaaatactgcaaagatggtacttacatcatgtgagataactcaagaattacccctggagaataaacaatgaagattaaatgactcagtatttgtaatattgccagaaggatatcccctttaattgtttcgaaaaaaaaggtcctaccttttgggttaagggaaattttcttgagaggagaagttaattcct

SEQ ID NO: 352506 - DNA, 477 bp, Homo sapiens
ctagggcgcaagaatcagtgacagttcaaacactggaatgttgcagctgcctgaatgcagagctcaaacacacaaactgggtaaaggtagtaggaaaaaggcttgggaagaggagagaaaggtggacacagggaaggggctgaactgtcactgattcttgcgccctagacaagctaaccaggtttaccatctcactcccagtaatacccagctcctatctaaagccccattctgcatgagaatttggtgtttggaatgttttctgactcttggggcgggattcctcgccttatcatcctcactgtggagtaatgagggggaggagaatctttatcagaaactggttttgtgtagtaaactttcttttgtggttttttgttttgttttctgggttttgttttttgtttttgtctgtgcaagacctgcagctgctgaaaatcagctttgcctttaattaaaccatgttctctccaacca

SEQ ID NO: 352507 - DNA, 362 bp, Homo sapiens
cccccttggcagagctccccttggcagagctccccttgccagagctccccttggcaagctaaccaggtttaccatctcactcccagtaatacccagctcctatctaaagccccattctgcatgagaatttggtgtttggaatgttttctgactcttggggcgggattcctcgccttatcatcctcactgtggagtaatgagggggaggagaatctttatcagaaactggttttgtgtagtaaactttcttttgtggttttttgttttgttttctgggttttgttttttgtttttgtctgtgcaagacctgcagctgctgaaaatcagctttgcctttaattaaaccatgttctctccaacca

SEQ ID NO: 352508 - DNA, 990 bp, Homo sapiens
atttagtaatgttttattagccagctattcagtgacagcattagagattcagctttgtttctcctaataactttgctagggccaataaatgtaagcttgacttttagcaactgttttactatatactgcaaatagagctgcttaaaaagcatattaacaaagccatttgtcaaatggatttgaaaggctttttaaaagtcaccaatgttaatgttttaaaaattgtggggtggagagaaacagtgttggaacagttcagcattttgttttgagattaagtgcaactattgacaaggggattcctgaggtccatgcctcataaacactcagagtgctgtttaccagggtctctggtccctgccagaatataatctctgactaggtttgatctaaaaggaggattctatgcacctgtggcaactggcacttaggcggtgtcttggtgttaacagatttgaattcacatcttctgagcctcaaattgtactcagtgggcgaatacaggcatgcttttgctttggttccatagtatggtaagattaatattaagaaaatagaaggtataacttaattacctttttttctgggactgtgaagaaatccttattggagaagccctcagagctcatgtcacattcatcctctttcctgtccctcaccggattctctctcaatcaggaaagatacccaaataatagtatgttcaatgaggtatatgggaaaaacctgacatccagctccaaagcagaactcagtccctcaatggccccccaggaaacatctctgtattccctttttgaagggactccgtggtctccatcacttcctgccagttcaggtattaactactctttaaattatagaccttacatttcctgtacactcagattgattaagggatagtgagattctgtaattacaaatatatcatttgttgggttatttttattttttgtttgtttgtttttgtaacttctgaaaggaaataga

SEQ ID NO: 352509 - DNA, 651 bp, Homo sapiens
agcgctacagagaggcggaaatcactgagggacaggcgctgctgaaatctcgcgagagggaccccctccctcgcccggtcgccgacttcctctgcttctcctctttcccccgcccctcctccctccccctcccccccgggtcggagtgtccctgcgccccacgggccagagcagcagcgagagcagctttccccactccctccccctcgcctcattcacccccacccccctgccgagcgaggaggagccggaggagaggaagatggcggcggccgccagcacccgcggtgccgcggggccgctccgaggagcctgagagacccacggaggcttcgcgggaagacgcggcggcggcggcggaggatgagcctgcagagcgcgcagtacctccggcaggcagaagtcctgaaggctgacatgacagattctaagctgggtccagctgaagtctggacatccaggcaggctctgcaggacctgtaccagaaaatgctagttaccgatttggaatacgctttagacaagaaagtagaacaggatctgtaagtattacctatcatttgagaagtccctgtaagatcaagaatttcaccgagactttaaaacagtttggttcgttatttatttttcaacctgttgcagaataaactt

SEQ ID NO: 352510 - DNA, 314 bp, Homo sapiens
gccgacttagaggatcccgtctgagcaagctgggaagatgggtacacgaaggcggggtggtgctgggctggactagcaggtagactgctgtaggatttcaaattacgtttttgattcctgtacattttacagtcgcacagcaagcagtctcacagaaggcaggctagtccattcacagcctgacacgttctaataggtagaagctttcagtgtggttattttttctttggttggtttttgtgcccccattctacttcccagcttgctcagacggggtccgcaggctcgaaattcggtaaatcatggtcaattag

SEQ ID NO: 352511 - DNA, 477 bp, Homo sapiens
acttccatctggacccagaaattttaagtatcatttaatcttgcttaggaacagtgagatttatttctcatatgtagccaaaatatgaaaggaaatatgttcttgattttttttttgactgacattactgaacagtatatggctcttttttgtttggttaactaaatgcagaaagagccctgatctaaattcaaagttggattcataaacagaatgagtaaaaatgaagaggattctatttataaacattgtcagagtgtcataaatgagtaaatatgaaaataactagaatcacataaaataaaatctgagaactcagcctgcatttcaaagaacatcattctatatgcttgtcagtgttcatattatattttactgtgggtggggagtataaaagatggaaagaaagatgtatgctatgaggctttttcccctctctttattacaccttaataaaacataaaaagatagtaaatt

SEQ ID NO: 352512 - DNA, 5961 bp, Homo sapiens
agcgctacagagaggcggaaatcactgagggacaggcgctgctgaaatctcgcgagagggaccccctccctcgcccggtcgccgacttcctctgcttctcctctttcccccgcccctcctccctccccctcccccccgggtcggagtgtccctgcgccccacgggccagagcagcagcgagagcagctttccccactccctccccctcgcctcattcacccccacccccctgccgagcgaggaggagccggaggagaggaagatggcggcggccgccagcacccgcggtgccgcggggccgctccgaggagcctgagagacccacggaggcttcgcgggaagacgcggcggcggcggcggaggatgagcctgcagagcgcgcagtacctccggcaggcagaagtcctgaaggctgacatgacagattctaagctgggtccagctgaagtctggacatccaggcaggctctgcaggacctgtaccagaaaatgctagttaccgatttggaatacgctttagacaagaaagtagaacaggatctctggaatcacgcctttaagaatcagatcacaacactacaaggccaggcaaagaatcgagcaaatccgaatcggagtgaagttcaggcaaacctttctctgttcctagaggcagctagtggcttctatactcagttattacaagaactgtgtacagtatttaatgtagatttaccatgccgtgtgaagtcttcccaattgggaattatcagcaataaacagacgcataccagcgccatagtgaagccacagtctagctcctgttcctatatctgccagcactgcctcgtccaccttggagacattgctcgatacagaaaccagaccagccaggcagagtcctactataggcatgcagctcagcttgtcccctccaatgaagcattgctgtgaagttccctttcccagctgcctccactaatctgcaaaaagcactttctaaagcactggaaagccgagatgaggtgaaaaccaagtggggtgtttctgacttcatcaaggcctttattaaattccacggtcatgtgtacctgagtaagagcttggaaaagttgagccctcttcgagagaaattggaagaacagtttaagaggctgctattccaaaaagctttcaactctcagcagttagttcatgtcactgtcattaacctgtttcaacttcatcaccttcgtgactttagcaatgaaaccgagcagcacacttatagccaagatgagcagctatgttggacacagttgctggccctctttatgtcttttcttggcatcctgtgcaagtgtcctctacagaatgagtctcaggaggagtcctacaatgcctatcctcttccagcagtcaaggtctccatggactggctaagactcagacccagggtctttcaggaggcagtggtggatgaaagacagtacatttggccctggttgatttctcttctgaatagtttccatccccatgaagaggacctctcaagtattagtgcgacaccacttccagaggagtttgaattacaaggatttttggcattgagaccttctttcaggaacttggatttttccaaaggtcaccagggtattacaggggacaaagaaggccagcaacgacgaatacgacagcaacgcttgatctctataggcaaatggattgctgataatcagccaaggctgattcagtgtgaaaatgaggtagggaaattgttgtttatcacagaaatcccagaattaatactggaagaccccagtgaagccaaagagaacctcattctgcaagaaacatctgtgatagagtcgctggctgcagatgggagcccagggctaaaatcagtgctatctacaagccgaaatttaagcaacaactgtgacacaggagagaagccagtggttaccttcaaagaaaacattaagacacgagaagtgaacagagaccaaggaagaagttttcctcccaaagaggtgagaagggactatagcaaaggaataactgtaactaagaatgatggaaagaaggacaacaacaagaggaaaactgaaaccaagaaatgcaccttagaaaagttacaggaaacaggaaagcagaatgtggcagtgcaggtaaaatcccagacagaactaagaaagactccagtgtctgaagccagaaaaacacctgtaactcaaaccccaactcaagcaagtaactcccagttcatccccattcatcaccctggagccttccctcctcttcccagcaggccagggtttccgcccccaacatatgttatccccccgcctgtggcattttctatgggctcaggttacaccttcccagctggtgtttctgtcccaggaacctttcttcagcctacagctcactctccagcaggaaaccaggtgcaagctgggaaacagtcccacattccttacagccagcaacggccctctggaccagggccaatgaaccagggacctcaacaatcacagccaccttcccagcaaccccttacatctttaccagctcagccaacagcacagtctacaagccagctgcaggttcaagctctaactcagcaacaacaatcccctacaaaagctgtgccggctttggggaaaagcccgcctcaccactctggattccagcagtatcaacaggcagatgcctccaaacagctgtggaatccccctcaggttcaaggcccattagggaaaattatgcctgtgaaacagccctactaccttcagacccaagaccccataaaactgtttgagccgtcattgcaacctcctgtaatgcagcagcagcctctagaaaaaaaaatgaagccttttcccatggagccatataaccataatccctcagaagtcaaggtcccagaattctactgggattcttcctacagcatggctgataacagatctgtaatggcacagcaagcaaacatagaccgcaggggcaaacggtcaccaggagtcttccgtccagagcaggatcctgtacccagaatgccgtttgagaaatccttattggagaagccctcagagctcatgtcacattcatcctctttcctgtccctcaccggattctctctcaatcaggaaagatacccaaataatagtatgttcaatgaggtatatgggaaaaacctgacatccagctccaaagcagaactcagtccctcaatggccccccaggaaacatctctgtattccctttttgaagggactccgtggtctccatcacttcctgccagttcagatcattcaacaccagccagccagtctcctcattcctctaacccaagcagcctacccagctctcctccaacacacaaccataattctgttccattctccaattttggacccattgggactccagataacagggatagaaggactgcagatcggtggaaaactgataagccagccatgggtgggtttggcattgattatctctcagcaacgtcatcctctgagagcagttggcatcaggccagcactccgagtggcacctggacaggccatggcccttccatggaggattcctctgctgtcctcatggaaagcctaaagtctatctggtccagttccatgatgcatcctggaccttctgctctggagcagctgttaatgcagcagaagcagaaacagcaacggggacaaggcaccatgaaccctccacactgaggccaaagtggcaacctgggaatgaaggctccataaaccatggcatgttgggtttgcaggactggcccacacagtcccctgcaggtggcagccctcttttctgtttctcgctgtcaagagggtgtaagtattccaccagcccgctgagtgtgcacgaaatgttcgcagtgcaacaaaaagaaaaatccatcaggaactctccgtccccccggggccctccggagggagagagagaggaactgctgtttatctcactcagttacttggtatcaccgcctctcaccttctccatcgtgcatgtccccagccacatgggaagtgaaagctgagaagggaaggcagatgggagaagccaatgggaacttctcagtccttttttcctctttggggaataaaataggaatccattaatgattgctttgctgactgagaatgtagttgaaattattcttaaacatcttttattattattactctcagtagtaaaatatcacactgaattcttccatacacaggtgtgcttctagtcagtgtgtagcaaggaaagccccgttcactgctcctgtgagaggttggtggtgacaggatggggaaccgacctcttcagccagtggaaatgttccataagggagagttcaaggcctgtcagaaggctctggtaggccttcctctggccaggagactccagcagggaatgcccttcactctgtaggtgctcgagccccaatcgaggatacagtgtgggtggtggtgctgggctggactagcaggtagactgctgtaggatttcaaattacgtttttgattcctgtacattttacagtcgcacagcaagcagtctcacagaaggcaggctagtccattcacagcctgacacgttctaataggtagaagctttcagtgtggttattttttctttggttggtttttgtgcccccattctacttcccaccctcctgccccatctccatcccttcttttacccaatgctgtatgctagtaattgtttttattcctaatgtgtgcaacatcacatctccccaagaagcaacagcatggggtccagcagttggggcccaaaagacagtctgaagaggaaggaagcagcagtatctgcgtagcccacagagggcccaggcccctgcccagctgcagtctcccagcctccactttcagagtgaaattcaaggcagcacggacatgtgcccatcaggcacagaagaaaacacgacgtcgtccattttggaagagacgaaagaaaggaaaataaactctttgtatgatatttattaggaggaaagaggactgaaaatgttcttgtgtagaaacagaaggacagcatttctgttagtcatttcctggaaaagtaatattttaaggggaaattatggaaacaatctaattgttcaattgctgtgctagtggtagggtttattttctgggaggtctctcctttgtgtgtctgtatgtttgtgtacacacacgtgcccatctgctgtcccagaggggaggggttgtgtgtgcgagtgtatggagttagtgtggaacttaagagctggaagacagctgtagagcaaagcacatccaggagccccagttgtcactgcagtctgggcaaccccagcaatgaaaaggggtgagataacgctcattgctcttcagagagagtggttggagccccccccgccccgtatgcttacattattgctcttttagtttgacatggtgtttgggttttgtttttttgaaaggtctgaaaaggtgaagccccctacccaatggcaatatgaaaccttttgtgcttctcttcagccccttccctgtgtccacctttctctcctcttcccaagcctttttcctactacctttacccagtttgtgtgtttgagctctgcattcaggcagctgcaacattccagtgtttgaactgtcactgattcttgcgccctagacaagctaaccaggtttaccatctcactcccagtaatacccagctcctatctaaagccccattctgcatgagaatttggtgtttggaatgttttctgactcttggggcgggattcctcgccttatcatcctcactgtggagtaatgagggggaggagaatctttatcagaaactggttttgtgtagtaaactttcttttgtggttttttgttttgttttctgggttttgttttttgtttttgtctgtgcaagacctgcagctgctgaaaatcagctttgcctttaattaaaccatgttctctccaacca

SEQ ID NO: 352513 - DNA, 6100 bp, Homo sapiens
agcgctacagagaggcggaaatcactgagggacaggcgctgctgaaatctcgcgagagggaccccctccctcgcccggtcgccgacttcctctgcttctcctctttcccccgcccctcctccctccccctcccccccgggtcggagtgtccctgcgccccacgggccagagcagcagcgagagcagctttccccactccctccccctcgcctcattcacccccacccccctgccgagcgaggaggagccggaggagaggaagatggcggcggccgccagcacccgcggtgccgcggggccgctccgaggagcctgagagacccacggaggcttcgcgggaagacgcggcggcggcggcggaggatgagcctgcagagcgcgcagtacctccgaatgtcttaaaccattctaccttatgagaaattggatgttcttgcagatagtcattgtgggagaaaacgtttcatttaagtcccagatgaggaccgaaaacttgaaatcagaggagcatctgaaatcaagtaatattaggcaggcagaagtcctgaaggctgacatgacagattctaagctgggtccagctgaagtctggacatccaggcaggctctgcaggacctgtaccagaaaatgctagttaccgatttggaatacgctttagacaagaaagtagaacaggatctctggaatcacgcctttaagaatcagatcacaacactacaaggccaggcaaagaatcgagcaaatccgaatcggagtgaagttcaggcaaacctttctctgttcctagaggcagctagtggcttctatactcagttattacaagaactgtgtacagtatttaatgtagatttaccatgccgtgtgaagtcttcccaattgggaattatcagcaataaacagacgcataccagcgccatagtgaagccacagtctagctcctgttcctatatctgccagcactgcctcgtccaccttggagacattgctcgatacagaaaccagaccagccaggcagagtcctactataggcatgcagctcagcttgtcccctccaatgaagcattgctgtgaagttccctttcccagctgcctccactaatctgcaaaaagcactttctaaagcactggaaagccgagatgaggtgaaaaccaagtggggtgtttctgacttcatcaaggcctttattaaattccacggtcatgtgtacctgagtaagagcttggaaaagttgagccctcttcgagagaaattggaagaacagtttaagaggctgctattccaaaaagctttcaactctcagcagttagttcatgtcactgtcattaacctgtttcaacttcatcaccttcgtgactttagcaatgaaaccgagcagcacacttatagccaagatgagcagctatgttggacacagttgctggccctctttatgtcttttcttggcatcctgtgcaagtgtcctctacagaatgagtctcaggaggagtcctacaatgcctatcctcttccagcagtcaaggtctccatggactggctaagactcagacccagggtctttcaggaggcagtggtggatgaaagacagtacatttggccctggttgatttctcttctgaatagtttccatccccatgaagaggacctctcaagtattagtgcgacaccacttccagaggagtttgaattacaaggatttttggcattgagaccttctttcaggaacttggatttttccaaaggtcaccagggtattacaggggacaaagaaggccagcaacgacgaatacgacagcaacgcttgatctctataggcaaatggattgctgataatcagccaaggctgattcagtgtgaaaatgaggtagggaaattgttgtttatcacagaaatcccagaattaatactggaagaccccagtgaagccaaagagaacctcattctgcaagaaacatctgtgatagagtcgctggctgcagatgggagcccagggctaaaatcagtgctatctacaagccgaaatttaagcaacaactgtgacacaggagagaagccagtggttaccttcaaagaaaacattaagacacgagaagtgaacagagaccaaggaagaagttttcctcccaaagaggtgagaagggactatagcaaaggaataactgtaactaagaatgatggaaagaaggacaacaacaagaggaaaactgaaaccaagaaatgcaccttagaaaagttacaggaaacaggaaagcagaatgtggcagtgcaggtaaaatcccagacagaactaagaaagactccagtgtctgaagccagaaaaacacctgtaactcaaaccccaactcaagcaagtaactcccagttcatccccattcatcaccctggagccttccctcctcttcccagcaggccagggtttccgcccccaacatatgttatccccccgcctgtggcattttctatgggctcaggttacaccttcccagctggtgtttctgtcccaggaacctttcttcagcctacagctcactctccagcaggaaaccaggtgcaagctgggaaacagtcccacattccttacagccagcaacggccctctggaccagggccaatgaaccagggacctcaacaatcacagccaccttcccagcaaccccttacatctttaccagctcagccaacagcacagtctacaagccagctgcaggttcaagctctaactcagcaacaacaatcccctacaaaagctgtgccggctttggggaaaagcccgcctcaccactctggattccagcagtatcaacaggcagatgcctccaaacagctgtggaatccccctcaggttcaaggcccattagggaaaattatgcctgtgaaacagccctactaccttcagacccaagaccccataaaactgtttgagccgtcattgcaacctcctgtaatgcagcagcagcctctagaaaaaaaaatgaagccttttcccatggagccatataaccataatccctcagaagtcaaggtcccagaattctactgggattcttcctacagcatggctgataacagatctgtaatggcacagcaagcaaacatagaccgcaggggcaaacggtcaccaggagtcttccgtccagagcaggatcctgtacccagaatgccgtttgagaaatccttattggagaagccctcagagctcatgtcacattcatcctctttcctgtccctcaccggattctctctcaatcaggaaagatacccaaataatagtatgttcaatgaggtatatgggaaaaacctgacatccagctccaaagcagaactcagtccctcaatggccccccaggaaacatctctgtattccctttttgaagggactccgtggtctccatcacttcctgccagttcagatcattcaacaccagccagccagtctcctcattcctctaacccaagcagcctacccagctctcctccaacacacaaccataattctgttccattctccaattttggacccattgggactccagataacagggatagaaggactgcagatcggtggaaaactgataagccagccatgggtgggtttggcattgattatctctcagcaacgtcatcctctgagagcagttggcatcaggccagcactccgagtggcacctggacaggccatggcccttccatggaggattcctctgctgtcctcatggaaagcctaaagtctatctggtccagttccatgatgcatcctggaccttctgctctggagcagctgttaatgcagcagaagcagaaacagcaacggggacaaggcaccatgaaccctccacactgaggccaaagtggcaacctgggaatgaaggctccataaaccatggcatgttgggtttgcaggactggcccacacagtcccctgcaggtggcagccctcttttctgtttctcgctgtcaagagggtgtaagtattccaccagcccgctgagtgtgcacgaaatgttcgcagtgcaacaaaaagaaaaatccatcaggaactctccgtccccccggggccctccggagggagagagagaggaactgctgtttatctcactcagttacttggtatcaccgcctctcaccttctccatcgtgcatgtccccagccacatgggaagtgaaagctgagaagggaaggcagatgggagaagccaatgggaacttctcagtccttttttcctctttggggaataaaataggaatccattaatgattgctttgctgactgagaatgtagttgaaattattcttaaacatcttttattattattactctcagtagtaaaatatcacactgaattcttccatacacaggtgtgcttctagtcagtgtgtagcaaggaaagccccgttcactgctcctgtgagaggttggtggtgacaggatggggaaccgacctcttcagccagtggaaatgttccataagggagagttcaaggcctgtcagaaggctctggtaggccttcctctggccaggagactccagcagggaatgcccttcactctgtaggtgctcgagccccaatcgaggatacagtgtgggtggtggtgctgggctggactagcaggtagactgctgtaggatttcaaattacgtttttgattcctgtacattttacagtcgcacagcaagcagtctcacagaaggcaggctagtccattcacagcctgacacgttctaataggtagaagctttcagtgtggttattttttctttggttggtttttgtgcccccattctacttcccaccctcctgccccatctccatcccttcttttacccaatgctgtatgctagtaattgtttttattcctaatgtgtgcaacatcacatctccccaagaagcaacagcatggggtccagcagttggggcccaaaagacagtctgaagaggaaggaagcagcagtatctgcgtagcccacagagggcccaggcccctgcccagctgcagtctcccagcctccactttcagagtgaaattcaaggcagcacggacatgtgcccatcaggcacagaagaaaacacgacgtcgtccattttggaagagacgaaagaaaggaaaataaactctttgtatgatatttattaggaggaaagaggactgaaaatgttcttgtgtagaaacagaaggacagcatttctgttagtcatttcctggaaaagtaatattttaaggggaaattatggaaacaatctaattgttcaattgctgtgctagtggtagggtttattttctgggaggtctctcctttgtgtgtctgtatgtttgtgtacacacacgtgcccatctgctgtcccagaggggaggggttgtgtgtgcgagtgtatggagttagtgtggaacttaagagctggaagacagctgtagagcaaagcacatccaggagccccagttgtcactgcagtctgggcaaccccagcaatgaaaaggggtgagataacgctcattgctcttcagagagagtggttggagccccccccgccccgtatgcttacattattgctcttttagtttgacatggtgtttgggttttgtttttttgaaaggtctgaaaaggtgaagccccctacccaatggcaatatgaaaccttttgtgcttctcttcagccccttccctgtgtccacctttctctcctcttcccaagcctttttcctactacctttacccagtttgtgtgtttgagctctgcattcaggcagctgcaacattccagtgtttgaactgtcactgattcttgcgccctagacaagctaaccaggtttaccatctcactcccagtaatacccagctcctatctaaagccccattctgcatgagaatttggtgtttggaatgttttctgactcttggggcgggattcctcgccttatcatcctcactgtggagtaatgagggggaggagaatctttatcagaaactggttttgtgtagtaaactttcttttgtggttttttgttttgttttctgggttttgttttttgtttttgtctgtgcaagacctgcagctgctgaaaatcagctttgcctttaattaaaccatgttctctccaacca

SEQ ID NO: 352514 - DNA, 6017 bp, Homo sapiens
agcgctacagagaggcggaaatcactgagggacaggcgctgctgaaatctcgcgagagggaccccctccctcgcccggtcgccgacttcctctgcttctcctctttcccccgcccctcctccctccccctcccccccgggtcggagtgtccctgcgccccacgggccagagcagcagcgagagcagctttccccactccctccccctcgcctcattcacccccacccccctgccgagcgaggaggagccggaggagaggaagatggcggcggccgccagcacccgcggtgccgcggggccgctccgaggagcctgagagacccacggaggcttcgcgggaagacgcggcggcggcggcggaggatgagcctgcagagcgcgcagtacctccgattctaagctgggtccagctgaagtctggacatccaggcaggctctgcaggacctgtaccagaaaatgctagttaccgatttggaatacgctttagacaagaaagtagaacaggatctctggaatcacgcctttaagaatcagatcacaacactacaaggccaggcaaagaatcgagcaaatccgaatcggagtgaagttcaggcaaacctttctctgttcctagaggcagctagtggcttctatactcagttattacaagaactgtgtacagtatttaatgtagatttaccatgccgtgtgaagtcttcccaattgggaattatcagcaataaacagacgcataccagcgccatagtgaagccacagtctagctcctgttcctatatctgccagcactgcctcgtccaccttggagacattgctcgatacagaaaccagaccagccaggcagagtcctactataggcatgcagctcagcttgtcccctccaatggtcagccttataatcagttggctatcttagcttcttccaaaggagaccatctgaccacaattttctactactgcagaagcattgctgtgaagttccctttcccagctgcctccactaatctgcaaaaagcactttctaaagcactggaaagccgagatgaggtgaaaaccaagtggggtgtttctgacttcatcaaggcctttattaaattccacggtcatgtgtacctgagtaagagcttggaaaagttgagccctcttcgagagaaattggaagaacagtttaagaggctgctattccaaaaagctttcaactctcagcagttagttcatgtcactgtcattaacctgtttcaacttcatcaccttcgtgactttagcaatgaaaccgagcagcacacttatagccaagatgagcagctatgttggacacagttgctggccctctttatgtcttttcttggcatcctgtgcaagtgtcctctacagaatgagtctcaggaggagtcctacaatgcctatcctcttccagcagtcaaggtctccatggactggctaagactcagacccagggtctttcaggaggcagtggtggatgaaagacagtacatttggccctggttgatttctcttctgaatagtttccatccccatgaagaggacctctcaagtattagtgcgacaccacttccagaggagtttgaattacaaggatttttggcattgagaccttctttcaggaacttggatttttccaaaggtcaccagggtattacaggggacaaagaaggccagcaacgacgaatacgacagcaacgcttgatctctataggcaaatggattgctgataatcagccaaggctgattcagtgtgaaaatgaggtagggaaattgttgtttatcacagaaatcccagaattaatactggaagaccccagtgaagccaaagagaacctcattctgcaagaaacatctgtgatagagtcgctggctgcagatgggagcccagggctaaaatcagtgctatctacaagccgaaatttaagcaacaactgtgacacaggagagaagccagtggttaccttcaaagaaaacattaagacacgagaagtgaacagagaccaaggaagaagttttcctcccaaagaggtaaaatcccagacagaactaagaaagactccagtgtctgaagccagaaaaacacctgtaactcaaaccccaactcaagcaagtaactcccagttcatccccattcatcaccctggagccttccctcctcttcccagcaggccagggtttccgcccccaacatatgttatccccccgcctgtggcattttctatgggctcaggttacaccttcccagctggtgtttctgtcccaggaacctttcttcagcctacagctcactctccagcaggaaaccaggtgcaagctgggaaacagtcccacattccttacagccagcaacggccctctggaccagggccaatgaaccagggacctcaacaatcacagccaccttcccagcaaccccttacatctttaccagctcagccaacagcacagtctacaagccagctgcaggttcaagctctaactcagcaacaacaatcccctacaaaagctgtgccggctttggggaaaagcccgcctcaccactctggattccagcagtatcaacaggcagatgcctccaaacagctgtggaatccccctcaggttcaaggcccattagggaaaattatgcctgtgaaacagccctactaccttcagacccaagaccccataaaactgtttgagccgtcattgcaacctcctgtaatgcagcagcagcctctagaaaaaaaaatgaagccttttcccatggagccatataaccataatccctcagaagtcaaggtcccagaattctactgggattcttcctacagcatggctgataacagatctgtaatggcacagcaagcaaacatagaccgcaggggcaaacggtcaccaggagtcttccgtccagagcaggatcctgtacccagaatgccgtttgaggaccccaagagctcccctctgcttcctccggacctgttaaagagtctggctgccttggaggaagaggaagagctgattttttctaaccctcctgatctttacccggctctgctggggcctctcgcctctcttcctggacgaagcctttttaaatccttattggagaagccctcagagctcatgtcacattcatcctctttcctgtccctcaccggattctctctcaatcaggaaagatacccaaataatagtatgttcaatgaggtatatgggaaaaacctgacatccagctccaaagcagaactcagtccctcaatggccccccaggaaacatctctgtattccctttttgaagggactccgtggtctccatcacttcctgccagttcagatcattcaacaccagccagccagtctcctcattcctctaacccaagcagcctacccagctctcctccaacacacaaccataattctgttccattctccaattttggacccattgggactccagataacagggatagaaggactgcagatcggtggaaaactgataagccagccatgggtgggtttggcattgattatctctcagcaacgtcatcctctgagagcagttggcatcaggccagcactccgagtggcacctggacaggccatggcccttccatggaggattcctctgctgtcctcatggaaagcctaaagtctatctggtccagttccatgatgcatcctggaccttctgctctggagcagctgttaatgcagcagaagcagaaacagcaacggggacaaggcaccatgaaccctccacactgaggccaaagtggcaacctgggaatgaaggctccataaaccatggcatgttgggtttgcaggactggcccacacagtcccctgcaggtggcagccctcttttctgtttctcgctgtcaagagggtgtaagtattccaccagcccgctgagtgtgcacgaaatgttcgcagtgcaacaaaaagaaaaatccatcaggaactctccgtccccccggggccctccggagggagagagagaggaactgctgtttatctcactcagttacttggtatcaccgcctctcaccttctccatcgtgcatgtccccagccacatgggaagtgaaagctgagaagggaaggcagatgggagaagccaatgggaacttctcagtccttttttcctctttggggaataaaataggaatccattaatgattgctttgctgactgagaatgtagttgaaattattcttaaacatcttttattattattactctcagtagtaaaatatcacactgaattcttccatacacaggtgtgcttctagtcagtgtgtagcaaggaaagccccgttcactgctcctgtgagaggttggtggtgacaggatggggaaccgacctcttcagccagtggaaatgttccataagggagagttcaaggcctgtcagaaggctctggtaggccttcctctggccaggagactccagcagggaatgcccttcactctgtaggtgctcgagccccaatcgaggatacagtgtgggtggtggtgctgggctggactagcaggtagactgctgtaggatttcaaattacgtttttgattcctgtacattttacagtcgcacagcaagcagtctcacagaaggcaggctagtccattcacagcctgacacgttctaataggtagaagctttcagtgtggttattttttctttggttggtttttgtgcccccattctacttcccaccctcctgccccatctccatcccttcttttacccaatgctgtatgctagtaattgtttttattcctaatgtgtgcaacatcacatctccccaagaagcaacagcatggggtccagcagttggggcccaaaagacagtctgaagaggaaggaagcagcagtatctgcgtagcccacagagggcccaggcccctgcccagctgcagtctcccagcctccactttcagagtgaaattcaaggcagcacggacatgtgcccatcaggcacagaagaaaacacgacgtcgtccattttggaagagacgaaagaaaggaaaataaactctttgtatgatatttattaggaggaaagaggactgaaaatgttcttgtgtagaaacagaaggacagcatttctgttagtcatttcctggaaaagtaatattttaaggggaaattatggaaacaatctaattgttcaattgctgtgctagtggtagggtttattttctgggaggtctctcctttgtgtgtctgtatgtttgtgtacacacacgtgcccatctgctgtcccagaggggaggggttgtgtgtgcgagtgtatggagttagtgtggaacttaagagctggaagacagctgtagagcaaagcacatccaggagccccagttgtcactgcagtctgggcaaccccagcaatgaaaaggggtgagataacgctcattgctcttcagagagagtggttggagccccccccgccccgtatgcttacattattgctcttttagtttgacatggtgtttgggttttgtttttttgaaaggtctgaaaaggtgaagccccctacccaatggcaatatgaaaccttttgtgcttctcttcagccccttccctgtgtccacctttctctcctcttcccaagcctttttcctactacctttacccagtttgtgtgtttgagctctgcattcaggcagctgcaacattccagtgtttgaactgtcactgattcttgcgccctagacaagctaaccaggtttaccatctcactcccagtaatacccagctcctatctaaagccccattctgcatgagaatttggtgtttggaatgttttctgactcttggggcgggattcctcgccttatcatcctcactgtggagtaatgagggggaggagaatctttatcagaaactggttttgtgtagtaaactttcttttgtggttttttgttttgttttctgggttttgttttttgtttttgtctgtgcaagacctgcagctgctgaaaatcagctttgcctttaattaaaccatgttctctccaacca

SEQ ID NO: 352515 - DNA, 5830 bp, Homo sapiens
agcgctacagagaggcggaaatcactgagggacaggcgctgctgaaatctcgcgagagggaccccctccctcgcccggtcgccgacttcctctgcttctcctctttcccccgcccctcctccctccccctcccccccgggtcggagtgtccctgcgccccacgggccagagcagcagcgagagcagctttccccactccctccccctcgcctcattcacccccacccccctgccgagcgaggaggagccggaggagaggaagatggcggcggccgccagcacccgcggtgccgcggggccgctccgaggagcctgagagacccacggaggcttcgcgggaagacgcggcggcggcggcggaggatgagcctgcagagcgcgcagtacctccgattctaagctgggtccagctgaagtctggacatccaggcaggctctgcaggacctgtaccagaaaatgctagttaccgatttggaatacgctttagacaagaaagtagaacaggatctctggaatcacgcctttaagaatcagatcacaacactacaaggccaggcaaagaatcgagcaaatccgaatcggagtgaagttcaggcaaacctttctctgttcctagaggcagctagtggcttctatactcagttattacaagaactgtgtacagtatttaatgtagatttaccatgccgtgtgaagtcttcccaattgggaattatcagcaataaacagacgcataccagcgccatagtgaagccacagtctagctcctgttcctatatctgccagcactgcctcgtccaccttggagacattgctcgatacagaaaccagaccagccaggcagagtcctactataggcatgcagctcagcttgtcccctccaatggtcagccttataatcagttggctatcttagcttcttccaaaggagaccatctgaccacaattttctactactgcagaagcattgctgtgaagttccctttcccagctgcctccactaatctgcaaaaagcactttctaaagcactggaaagccgagatgaggtgaaaaccaagtggggtgtttctgacttcatcaaggcctttattaaattccacggtcatgtgtacctgagtaagagcttggaaaagttgagccctcttcgagagaaattggaagaacagtttaagaggctgctattccaaaaagctttcaactctcagcagttagttcatgtcactgtcattaacctgtttcaacttcatcaccttcgtgactttagcaatgaaaccgagcagcacacttatagccaagatgagcagctatgttggacacagttgctggccctctttatgtcttttcttggcatcctgtgcaagtgtcctctacagaatgagtctcaggaggagtcctacaatgcctatcctcttccagcagtcaaggtctccatggactggctaagactcagacccagggtctttcaggaggcagtggtggatgaaagacagtacatttggccctggttgatttctcttctgaatagtttccatccccatgaagaggacctctcaagtattagtgcgacaccacttccagaggagtttgaattacaaggatttttggcattgagaccttctttcaggaacttggatttttccaaaggtcaccagggtattacaggggacaaagaaggccagcaacgacgaatacgacagcaacgcttgatctctataggcaaatggattgctgataatcagccaaggctgattcagtgtgaaaatgaggtagggaaattgttgtttatcacagaaatcccagaattaatactggaagaccccagtgaagccaaagagaacctcattctgcaagaaacatctgtgatagagtcgctggctgcagatgggagcccagggctaaaatcagtgctatctacaagccgaaatttaagcaacaactgtgacacaggagagaagccagtggttaccttcaaagaaaacattaagacacgagaagtgaacagagaccaaggaagaagttttcctcccaaagaggtaaaatcccagacagaactaagaaagactccagtgtctgaagccagaaaaacacctgtaactcaaaccccaactcaagcaagtaactcccagttcatccccattcatcaccctggagccttccctcctcttcccagcaggccagggtttccgcccccaacatatgttatccccccgcctgtggcattttctatgggctcaggttacaccttcccagctggtgtttctgtcccaggaacctttcttcagcctacagctcactctccagcaggaaaccaggtgcaagctgggaaacagtcccacattccttacagccagcaacggccctctggaccagggccaatgaaccagggacctcaacaatcacagccaccttcccagcaaccccttacatctttaccagctcagccaacagcacagtctacaagccagctgcaggttcaagctctaactcagcaacaacaatcccctacaaaagctgtgccggctttggggaaaagcccgcctcaccactctggattccagcagtatcaacaggcagatgcctccaaacagctgtggaatccccctcaggttcaaggcccattagggaaaattatgcctgtgaaacagccctactaccttcagacccaagaccccataaaactgtttgagccgtcattgcaacctcctgtaatgcagcagcagcctctagaaaaaaaaatgaagccttttcccatggagccatataaccataatccctcagaagtcaaggtcccagaattctactgggattcttcctacagcatggctgataacagatctgtaatggcacagcaagcaaacatagaccgcaggggcaaacggtcaccaggagtcttccgtccagagcaggatcctgtacccagaatgccgtttgagaaatccttattggagaagccctcagagctcatgtcacattcatcctctttcctgtccctcaccggattctctctcaatcaggaaagatacccaaataatagtatgttcaatgaggtatatgggaaaaacctgacatccagctccaaagcagaactcagtccctcaatggccccccaggaaacatctctgtattccctttttgaagggactccgtggtctccatcacttcctgccagttcagatcattcaacaccagccagccagtctcctcattcctctaacccaagcagcctacccagctctcctccaacacacaaccataattctgttccattctccaattttggacccattgggactccagataacagggatagaaggactgcagatcggtggaaaactgataagccaggtcatcctctgagagcagttggcatcaggccagcactccgagtggcacctggacaggccatggcccttccatggaggattcctctgctgtcctcatggaaagcctaaagtctatctggtccagttccatgatgcatcctggaccttctgctctggagcagctgttaatgcagcagaagcagaaacagcaacggggacaaggcaccatgaaccctccacactgaggccaaagtggcaacctgggaatgaaggctccataaaccatggcatgttgggtttgcaggactggcccacacagtcccctgcaggtggcagccctcttttctgtttctcgctgtcaagagggtgtaagtattccaccagcccgctgagtgtgcacgaaatgttcgcagtgcaacaaaaagaaaaatccatcaggaactctccgtccccccggggccctccggagggagagagagaggaactgctgtttatctcactcagttacttggtatcaccgcctctcaccttctccatcgtgcatgtccccagccacatgggaagtgaaagctgagaagggaaggcagatgggagaagccaatgggaacttctcagtccttttttcctctttggggaataaaataggaatccattaatgattgctttgctgactgagaatgtagttgaaattattcttaaacatcttttattattattactctcagtagtaaaatatcacactgaattcttccatacacaggtgtgcttctagtcagtgtgtagcaaggaaagccccgttcactgctcctgtgagaggttggtggtgacaggatggggaaccgacctcttcagccagtggaaatgttccataagggagagttcaaggcctgtcagaaggctctggtaggccttcctctggccaggagactccagcagggaatgcccttcactctgtaggtgctcgagccccaatcgaggatacagtgtgggtggtggtgctgggctggactagcaggtagactgctgtaggatttcaaattacgtttttgattcctgtacattttacagtcgcacagcaagcagtctcacagaaggcaggctagtccattcacagcctgacacgttctaataggtagaagctttcagtgtggttattttttctttggttggtttttgtgcccccattctacttcccaccctcctgccccatctccatcccttcttttacccaatgctgtatgctagtaattgtttttattcctaatgtgtgcaacatcacatctccccaagaagcaacagcatggggtccagcagttggggcccaaaagacagtctgaagaggaaggaagcagcagtatctgcgtagcccacagagggcccaggcccctgcccagctgcagtctcccagcctccactttcagagtgaaattcaaggcagcacggacatgtgcccatcaggcacagaagaaaacacgacgtcgtccattttggaagagacgaaagaaaggaaaataaactctttgtatgatatttattaggaggaaagaggactgaaaatgttcttgtgtagaaacagaaggacagcatttctgttagtcatttcctggaaaagtaatattttaaggggaaattatggaaacaatctaattgttcaattgctgtgctagtggtagggtttattttctgggaggtctctcctttgtgtgtctgtatgtttgtgtacacacacgtgcccatctgctgtcccagaggggaggggttgtgtgtgcgagtgtatggagttagtgtggaacttaagagctggaagacagctgtagagcaaagcacatccaggagccccagttgtcactgcagtctgggcaaccccagcaatgaaaaggggtgagataacgctcattgctcttcagagagagtggttggagccccccccgccccgtatgcttacattattgctcttttagtttgacatggtgtttgggttttgtttttttgaaaggtctgaaaaggtgaagccccctacccaatggcaatatgaaaccttttgtgcttctcttcagccccttccctgtgtccacctttctctcctcttcccaagcctttttcctactacctttacccagtttgtgtgtttgagctctgcattcaggcagctgcaacattccagtgtttgaactgtcactgattcttgcgccctagacaagctaaccaggtttaccatctcactcccagtaatacccagctcctatctaaagccccattctgcatgagaatttggtgtttggaatgttttctgactcttggggcgggattcctcgccttatcatcctcactgtggagtaatgagggggaggagaatctttatcagaaactggttttgtgtagtaaactttcttttgtggttttttgttttgttttctgggttttgttttttgtttttgtctgtgcaagacctgcagctgctgaaaatcagctttgcctttaattaaaccatgttctctccaacca

SEQ ID NO: 352516 - DNA, 3529 bp, Homo sapiens
atttagtaatgttttattagccagctattcagtgacagcattagagattcagctttgtttctcctaataactttgctagggccaataaatgtaagcttgacttttagcaactgttttactatatactgcaaatagagctgcttaaaaagcatattaacaaagccatttgtcaaatggatttgaaaggctttttaaaagtcaccaatgttaatgttttaaaaattgtggggtggagagaaacagtgttggaacagttcagcattttgttttgagattaagtgcaactattgacaaggggattcctgaggtccatgcctcataaacactcagagtgctgtttaccagggtctctggtccctgccagaatataatctctgactaggtttgatctaaaaggaggattctatgcacctgtggcaactggcacttaggcggtgtcttggtgttaacagatttgaattcacatcttctgagcctcaaattgtactcagtgggcgaatacaggcatgcttttgctttggttccatagtatggtaagattaatattaagaaaatagaaggtataacttaattacctttttttctgggactgtgaagaaatccttattggagaagccctcagagctcatgtcacattcatcctctttcctgtccctcaccggattctctctcaatcaggaaagatacccaaataatagtatgttcaatgaggtatatgggaaaaacctgacatccagctccaaagcagaactcagtccctcaatggccccccaggaaacatctctgtattccctttttgaagggactccgtggtctccatcacttcctgccagttcagatcattcaacaccagccagccagtctcctcattcctctaacccaagcagcctacccagctctcctccaacacacaaccataattctgttccattctccaattttggacccattgggactccagataacagggatagaaggactgcagatcggtggaaaactgataagccagccatgggtgggtttggcattgattatctctcagcaacgtcatcctctgagagcagttggcatcaggccagcactccgagtggcacctggacaggccatggcccttccatggaggattcctctgctgtcctcatggaaagcctaaagtctatctggtccagttccatgatgcatcctggaccttctgctctggagcagctgttaatgcagcagaagcagaaacagcaacggggacaaggcaccatgaaccctccacactgaggccaaagtggcaacctgggaatgaaggctccataaaccatggcatgttgggtttgcaggactggcccacacagtcccctgcaggtggcagccctcttttctgtttctcgctgtcaagagggtgtaagtattccaccagcccgctgagtgtgcacgaaatgttcgcagtgcaacaaaaagaaaaatccatcaggaactctccgtccccccggggccctccggagggagagagagaggaactgctgtttatctcactcagttacttggtatcaccgcctctcaccttctccatcgtgcatgtccccagccacatgggaagtgaaagctgagaagggaaggcagatgggagaagccaatgggaacttctcagtccttttttcctctttggggaataaaataggaatccattaatgattgctttgctgactgagaatgtagttgaaattattcttaaacatcttttattattattactctcagtagtaaaatatcacactgaattcttccatacacaggtgtgcttctagtcagtgtgtagcaaggaaagccccgttcactgctcctgtgagaggttggtggtgacaggatggggaaccgacctcttcagccagtggaaatgttccataagggagagttcaaggcctgtcagaaggctctggtaggccttcctctggccaggagactccagcagggaatgcccttcactctgtaggtgctcgagccccaatcgaggatacagtgtgggtggtggtgctgggctggactagcaggtagactgctgtaggatttcaaattacgtttttgattcctgtacattttacagtcgcacagcaagcagtctcacagaaggcaggctagtccattcacagcctgacacgttctaataggtagaagctttcagtgtggttattttttctttggttggtttttgtgcccccattctacttcccaccctcctgccccatctccatcccttcttttacccaatgctgtatgctagtaattgtttttattcctaatgtgtgcaacatcacatctccccaagaagcaacagcatggggtccagcagttggggcccaaaagacagtctgaagaggaaggaagcagcagtatctgcgtagcccacagagggcccaggcccctgcccagctgcagtctcccagcctccactttcagagtgaaattcaaggcagcacggacatgtgcccatcaggcacagaagaaaacacgacgtcgtccattttggaagagacgaaagaaaggaaaataaactctttgtatgatatttattaggaggaaagaggactgaaaatgttcttgtgtagaaacagaaggacagcatttctgttagtcatttcctggaaaagtaatattttaaggggaaattatggaaacaatctaattgttcaattgctgtgctagtggtagggtttattttctgggaggtctctcctttgtgtgtctgtatgtttgtgtacacacacgtgcccatctgctgtcccagaggggaggggttgtgtgtgcgagtgtatggagttagtgtggaacttaagagctggaagacagctgtagagcaaagcacatccaggagccccagttgtcactgcagtctgggcaaccccagcaatgaaaaggggtgagataacgctcattgctcttcagagagagtggttggagccccccccgccccgtatgcttacattattgctcttttagtttgacatggtgtttgggttttgtttttttgaaaggtctgaaaaggtgaagccccctacccaatggcaatatgaaaccttttgtgcttctcttcagccccttccctgtgtccacctttctctcctcttcccaagcctttttcctactacctttacccagtttgtgtgtttgagctctgcattcaggcagctgcaacattccagtgtttgaactgtcactgattcttgcgccctagacaagctaaccaggtttaccatctcactcccagtaatacccagctcctatctaaagccccattctgcatgagaatttggtgtttggaatgttttctgactcttggggcgggattcctcgccttatcatcctcactgtggagtaatgagggggaggagaatctttatcagaaactggttttgtgtagtaaactttcttttgtggttttttgttttgttttctgggttttgttttttgtttttgtctgtgcaagacctgcagctgctgaaaatcagctttgcctttaattaaaccatgttctctccaacca

SEQ ID NO: 352517 - DNA, 6016 bp, Homo sapiens
agcgctacagagaggcggaaatcactgagggacaggcgctgctgaaatctcgcgagagggaccccctccctcgcccggtcgccgacttcctctgcttctcctctttcccccgcccctcctccctccccctcccccccgggtcggagtgtccctgcgccccacgggccagagcagcagcgagagcagctttccccactccctccccctcgcctcattcacccccacccccctgccgagcgaggaggagccggaggagaggaagatggcggcggccgccagcacccgcggtgccgcggggccgctccgaggagcctgagagacccacggaggcttcgcgggaagacgcggcggcggcggcggaggatgagcctgcagagcgcgcagtacctccgattctaagctgggtccagctgaagtctggacatccaggcaggctctgcaggacctgtaccagaaaatgctagttaccgatttggaatacgctttagacaagaaagtagaacaggatctctggaatcacgcctttaagaatcagatcacaacactacaaggccaggcaaagaatcgagcaaatccgaatcggagtgaagttcaggcaaacctttctctgttcctagaggcagctagtggcttctatactcagttattacaagaactgtgtacagtatttaatgtagatttaccatgccgtgtgaagtcttcccaattgggaattatcagcaataaacagacgcataccagcgccatagtgaagccacagtctagctcctgttcctatatctgccagcactgcctcgtccaccttggagacattgctcgatacagaaaccagaccagccaggcagagtcctactataggcatgcagctcagcttgtcccctccaatggtcagccttataatcagttggctatcttagcttcttccaaaggagaccatctgaccacaattttctactactgcagaagcattgctgtgaagttccctttcccagctgcctccactaatctgcaaaaagcactttctaaagcactggaaagccgagatgaggtgaaaaccaagtggggtgtttctgacttcatcaaggcctttattaaattccacggtcatgtgtacctgagtaagagcttggaaaagttgagccctcttcgagagaaattggaagaacagtttaagaggctgctattccaaaaagctttcaactctcagcagttagttcatgtcactgtcattaacctgtttcaacttcatcaccttcgtgactttagcaatgaaaccgagcagcacacttatagccaagatgagcagctatgttggacacagttgctggccctctttatgtcttttcttggcatcctgtgcaagtgtcctctacagaatgagtctcaggaggagtcctacaatgcctatcctcttccagcagtcaaggtctccatggactggctaagactcagacccagggtctttcaggaggcagtggtggatgaaagacagtacatttggccctggttgatttctcttctgaatagtttccatccccatgaagaggacctctcaagtattagtgcgacaccacttccagaggagtttgaattacaaggatttttggcattgagaccttctttcaggaacttggatttttccaaaggtcaccagggtattacaggggacaaagaaggccagcaacgacgaatacgacagcaacgcttgatctctataggcaaatggattgctgataatcagccaaggctgattcagtgtgaaaatgaggtagggaaattgttgtttatcacagaaatcccagaattaatactggaagaccccagtgaagccaaagagaacctcattctgcaagaaacatctgtgatagagtcgctggctgcagatgggagcccagggctaaaatcagtgctatctacaagccgaaatttaagcaacaactgtgacacaggagagaagccagtggttaccttcaaagaaaacattaagacacgagaagtgaacagagaccaaggaagaagttttcctcccaaagaggtaaaatcccagacagaactaagaaagactccagtgtctgaagccagaaaaacacctgtaactcaaaccccaactcaagcaagtaactcccagttcatccccattcatcaccctggagccttccctcctcttcccagcaggccagggtttccgcccccaacatatgttatccccccgcctgtggcattttctatgggctcaggttacaccttcccagctggtgtttctgtcccaggaacctttcttcagcctacagctcactctccagcaggaaaccaggtgcaagctgggaaacagtcccacattccttacagccagcaacggccctctggaccagggccaatgaaccagggacctcaacaatcacagccaccttcccagcaaccccttacatctttaccagctcagccaacagcacagtctacaagccagctgcaggttcaagctctaactcagcaacaacaatcccctacaaaagctgtgccggctttggggaaaagcccgcctcaccactctggattccagcagtatcaacaggcagatgcctccaaacagctgtggaatccccctcaggttcaaggcccattagggaaaattatgcctgtgaaacagccctactaccttcagacccaagaccccataaaactgtttgagccgtcattgcaacctcctgtaatgcagcagcagcctctagaaaaaaaaatgaagccttttcccatggagccatataaccataatccctcagaagtcaaggtcccagaattctactgggattcttcctacagcatggctgataacagatctgtaatggcacagcaagcaaacatagaccgcaggggcaaacggtcaccaggagtcttccgtccagagcaggatcctgtacccagaatgccgtttgagaaatccttattggagaagccctcagagctcatgtcacattcatcctctttcctgtccctcaccggattctctctcaatcaggaaagatacccaaataatagtatgttcaatgaggtatatgggaaaaacctgacatccagctccaaagcagaactcagtccctcaatggccccccaggaaacatctctgtattccctttttgaagggactccgtggtctccatcacttcctgccagttcagatcattcaacaccagccagccagtctcctcattcctctaacccaagcagcctacccagctctcctccaacacacaaccataattctgttccattctccaattttggacccattgggactccagataacagggatagaaggactgcagatcggtggaaaactgataagccagccatgggtgggtttggcattgattatctctcagcaacgtcatcctctgagagcagttggcatcaggccagcactccgagtggcacctggacaggccatggcccttccatggaggattcctctgctgtcctcatggaaagcctaaagtctatctggtccagttccatgatgcatcctggaccttctgctctggagcagctgttaatgcagcagaagcagaaacagcaacggggacaaggcaccatgaaccctccacactgaggccaaagtggcaacctgggaatgaaggctccataaaccatggcatgttgggtttgcaggactggcccacacagtcccctgcaggtggcagccctcttttctgtttctcgctgtcaagagggtgtaagtattccaccagcccgctgagtgtgcacgaaatgttcgcagtgcaacaaaaagaaaaatccatcaggaactctccgtccccccggggccctccggagggagagagagaggaactgctgtttatctcactcagttacttggtatcaccgcctctcaccttctccatcgtgcatgtccccagccacatgggaagtgaaagctgagaagggaaggcagatgggagaagccaatgggaacttctcagtccttttttcctctttggggaataaaataggaatccattaatgattgctttgctgactgagaatgtagttgaaattattcttaaacatcttttattattattactctcagtagtaaaatatcacactgaattcttccatacacaggtgtgcttctagtcagtgtgtagcaaggaaagccccgttcactgctcctgtgagaggttggtggtgacaggatggggaaccgacctcttcagccagtggaaatgttccataagggagagttcaaggcctgtcagaaggctctggtaggccttcctctggccaggagactccagcagggaatgcccttcactctgtaggtgctcgagccccaatcgaggatacagtgtgggtggtggtgctgggctggactagcaggtagactgctgtaggatttcaaattacgtttttgattcctgtacattttacagtcgcacagcaagcagtctcacagaaggcaggctagtccattcacagcctgacacgttctaataggtagaagctttcagtgtggttattttttctttggttggtttttgtgcccccattctacttcccaccctcctgccccatctccatcccttcttttacccaatgctgtatgctagtaattgtttttattcctaatgtgtgcaacatcacatctccccaagaagcaacagcatggggtccagcagttggggcccaaaagacagtctgaagaggaaggaagcagcagtatctgcgtagcccacagagggcccaggcccctgcccagctgcagtctcccagcctccactttcagagtgaaattcaaggcagcacggacatgtgcccatcaggcacagaagaaaacacgacgtcgtccattttggaagagacgaaagaaaggaaaataaactctttgtatgatatttattaggaggaaagaggactgaaaatgttcttgtgtagaaacagaaggacagcatttctgttagtcatttcctggaaaagtaatattttaaggggaaattatggaaacaatctaattgttcaattgctgtgctagtggtagggtttattttctgggaggtctctcctttgtgtgtctgtatgtttgtgtacacacacgtgcccatctgctgtcccagaggggaggggttgtgtgtgcgagtgtatggagttagtgtggaacttaagagctggaagacagctgtagagcaaagcacatccaggagccccagttgtcactgcagtctgggcaaccccagcaatgaaaaggggtgagataacgctcattgctcttcagagagagtggttggagccccccccgccccgtatgcttacattattgctcttttagtttgacatggtgtttgggttttgtttttttgaaaggtctgaaaaggtgaagccccctacccaatggcaatatgaaaccttttgtgcttctcttcagccccttccctgtgtccacctttctctcctcttcccaagcctttttcctactacctttacccagtttgtgtgtttgagctctgcattcaggcagctgcaacattccagtgtttgaactgtcactgattcttgcgccctagacaagctaaccaggtttaccatctcactcccagtaatacccagctcctatctaaagccccattctgcatgagaatttggtgtttggaatgttttctgactcttggggcgggattcctcgccttatcatcctcactgtggagtaatgagggggaggagaatctttatcagaaactggttttgtgtagtaaactttcttttgtggttttttgttttgttttctgggttttgttttttgtttttgtctgtgcaagacctgcagctgctgaaaatcagctttgcctttaattaaaccatgttctctccaaccaaaaaaaggggggggggataaaataatgagggggtaagatcccgggggcattggaccctttgaagggccaggagataaagggggtaacggggaagttgttggaccttggatggcccaccggaatttttgtgttttataagaaaaaaaaag

SEQ ID NO: 352518 - DNA, 5023 bp, Homo sapiens
  misc_feature (5007)..(5007): n is a, c, g, or t
agcgctacagagaggcggaaatcactgagggacaggcgctgctgaaatctcgcgagagggaccccctccctcgcccggtcgccgacttcctctgcttctcctctttcccccgcccctcctccctccccctcccccccgggtcggagtgtccctgcgccccacgggccagagcagcagcgagagcagctttccccactccctccccctcgcctcattcacccccacccccctgccgagcgaggaggagccggaggagaggaagatggcggcggccgccagcacccgcggtgccgcggggccgctccgaggagcctgagagacccacggaggcttcgcgggaagacgcggcggcggcggcggaggatgagcctgcagagcgcgcagtacctccgattctaagctgggtccagctgaagtctggacatccaggcaggctctgcaggacctgtaccagaaaatgctagttaccgatttggaatacgctttagacaagaaagtagaacaggatctctggaatcacgcctttaagaatcagatcacaacactacaaggccaggcaaagaatcgagcaaatccgaatcggagtgaagttcaggcaaacctttctctgttcctagaggcagctagtggcttctatactcagttattacaagaactgtgtacagtatttaatgtagatttaccatgccgtgtgaagtcttcccaattgggaattatcagcaataaacagacgcataccagcgccatagtgaagccacagtctagctcctgttcctatatctgccagcactgcctcgtccaccttggagacattgctcgatacagaaaccagaccagccaggcagagtcctactataggcatgcagctcagcttgtcccctccaatggtcagccttataatcagttggctatcttagcttcttccaaaggagaccatctgaccacaattttctactactgcagaagcattgctgtgaagttccctttcccagctgcctccactaatctgcaaaaagcactttctaaagcactggaaagccgagatgaggtgaaaaccaagtggggtgtttctgacttcatcaaggcctttattaaattccacggtcatgtgtacctgagtaagagcttggaaaagttgagccctcttcgagagaaattggaagaacagtttaagaggctgctattccaaaaagctttcaactctcagcagttagttcatgtcactgtcattaacctgtttcaacttcatcaccttcgtgactttagcaatgaaaccgagcagcacacttatagccaagatgagcagctatgttggacacagttgctggccctctttatgtcttttcttggcatcctgtgcaagtgtcctctacagaatgagtctcaggaggagtcctacaatgcctatcctcttccagcagtcaaggtctccatggactggctaagactcagacccagggtctttcaggaggcagtggtggatgaaagacagtacatttggccctggttgatttctcttctgaatagtttccatccccatgaagaggacctctcaagtattagtgcgacaccacttccagaggagtttgaattacaaggatttttggcattgagaccttctttcaggaacttggatttttccaaaggtcaccagggtattacaggggacaaagaaggccagcaacgacgaatacgacagcaacgcttgatctctataggcaaatggattgctgataatcagccaaggctgattcagtgtgaaaatgaggtagggaaattgttgtttatcacagaaatcccagaattaatactggaagaccccagtgaagccaaagagaacctcattctgcaagaaacatctgtgatagagtcgctggctgcagatgggagcccagggctaaaatcagtgctatctacaagccgaaatttaagcaacaactgtgacacaggagagaagccagtggttaccttcaaagaaaacattaagacacgagaagtgaacagagaccaaggaagaagttttcctcccaaagaggtaaaatcccagacagaactaagaaagactccagtgtctgaagccagaaaaacacctgtaactcaaaccccaactcaagcaagtaactcccagttcatccccattcatcaccctggagccttccctcctcttcccagcaggccagggtttccgcccccaacatatgttatccccccgcctgtggcattttctatgggctcaggttacaccttcccagctggtgtttctgtcccaggaacctttcttcagcctacagctcactctccagcaggaaaccaggtgcaagctgggaaacagtcccacattccttacagccagcaacggccctctggaccagggccaatgaaccagggacctcaacaatcacagccaccttcccagcaaccccttacatctttaccagctcagccaacagcacagtctacaagccagctgcaggttcaagctctaactcagcaacaacaatcccctacaaaagctgtgccggctttggggaaaagcccgcctcaccactctggattccagcagtatcaacaggcagatgcctccaaacagctgtggaatccccctcaggttcaaggcccattagggaaaattatgcctgtgaaacagccctactaccttcagacccaagaccccataaaactgtttgagccgtcattgcaacctcctgtaatgcagcagcagcctctagaaaaaaaaatgaagccttttcccatggagccatataaccataatccctcagaagtcaaggtcccagaattctactgggattcttcctacagcatggctgataacagatctgtaatggcacagcaagcaaacatagaccgcaggggcaaacggtcaccaggagtcttccgtccagagcaggatcctgtacccagaatgccgtttgagaaatccttattggagaagccctcagagctcatgtcacattcatcctctttcctgtccctcaccggattctctctcaatcaggaaagatacccaaataatagtatgttcaatgaggtatatgggaaaaacctgacatccagctccaaagcagaactcagtccctcaatggccccccaggaaacatctctgtattccctttttgaagggactccgtggtctccatcacttcctgccagttcagatcattcaacaccagccagccagtctcctcattcctctaacccaagcagcctacccagctctcctccaacacacaaccataattctgttccattctccaattttggacccattgggactccagataacagggatagaaggactgcagatcggtggaaaactgataagccagccatgggtgggtttggcattgattatctctcagcaacgtcatcctctgagagcagttggcatcaggccagcactccgagtggcacctggacaggccatggcccttccatggaggattcctctgctgtcctcatggaaagcctaaagtctatctggtccagttccatgatgcatcctggaccttctgctctggagcagctgttaatgcagcagaagcagaaacagcaacggggacaaggcaccatgaaccctccacactgaggccaaagtggcaacctgggaatgaaggctccataaaccatggcatgttgggtttgcaggactggcccacacagtcccctgcaggtggcagccctcttttctgtttctcgctgtcaagagggtgtaagtattccaccagcccgctgagtgtgcacgaaatgttcgcagtgcaacaaaaagaaaaatccatcaggaactctccgtccccccggggccctccggagggagagagagaggaactgctgtttatctcactcagttacttggtatcaccgcctctcaccttctccatcgtgcatgtccccagccacatgggaagtgaaagctgagaagggaaggcagatgggagaagccaatgggaacttctcagtccttttttcctctttggggaataaaataggaatccattaatgattgctttgctgactgagaatgtagttgaaattattcttaaacatcttttattattattactctcagtagtaaaatatcacactgaattcttccatacacaggtgtgcttctagtcagtgtgtagcaaggaaagccccgttcactgctcctgtgagaggttggtggtgacaggatggggaaccgacctcttcagccagtggaaatgttccataagggagagttcaaggcctgtcagaaggctctggtaggccttcctctggccaggagactccagcagggaatgcccttcactctgtaggtgctcgagccccaatcgaggatacagtgtgggtggtggtgctgggctggactagcaggtagactgctgtaggatttcaaattacgtttttgattcctgtacattttacagtcgcacagcaagcagtctcacagaaggcaggctagtccattcacagcctgacacgttctaataggtagaagctttcagtgtggttattttttctttggttggtttttgtgcccccattctacttcccaccctcctgccccatctccatcccttcttttacccaatgctgtatgctagtaattgtttttattcctaatgtgtgcaacatcacatctccccaagaagcaacagcatggggtccagcagttggggcccaaaagacagtctgaagaggaaggaagcagcagtatctgcgtagcccacagagggcccaggcccctgcccagctgcagtctcccagcctccactttcagagtgaaattcaaggcagcacggacatgtgcccatcaggcacagaagaaaacacgacgtcgtccattttggaagagacgaaagaaaggaaaataaactctttgtatgatatttattaggaggaaagaggactgaaaatgttcttgtgtagaaacagaaggacagcatttctgttagtcattttcttataattgtaggtttattttcttggagtctctctttgcgngctgatgttgggacac

SEQ ID NO: 352519 - DNA, 3818 bp, Homo sapiens
agcgctacagagaggcggaaatcactgagggacaggcgctgctgaaatctcgcgagagggaccccctccctcgcccggtcgccgacttcctctgcttctcctctttcccccgcccctcctccctccccctcccccccgggtcggagtgtccctgcgccccacgggccagagcagcagcgagagcagctttccccactccctccccctcgcctcattcacccccacccccctgccgagcgaggaggagccggaggagaggaagatggcggcggccgccagcacccgcggtgccgcggggccgctccgaggagcctgagagacccacggaggcttcgcgggaagacgcggcggcggcggcggaggatgagcctgcagagcgcgcagtacctccgattctaagctgggtccagctgaagtctggacatccaggcaggctctgcaggacctgtaccagaaaatgctagttaccgatttggaatacgctttagacaagaaagtagaacaggatctctggaatcacgcctttaagaatcagatcacaacactacaaggccaggcaaagaatcgagcaaatccgaatcggagtgaagttcaggcaaacctttctctgttcctagaggcagctagtggcttctatactcagttattacaagaactgtgtacagtatttaatgtagatttaccatgccgtgtgaagtcttcccaattgggaattatcagcaataaacagacgcataccagcgccatagtgaagccacagtctagctcctgttcctatatctgccagcactgcctcgtccaccttggagacattgctcgatacagaaaccagaccagccaggcagagtcctactataggcatgcagctcagcttgtcccctccaatggtcagccttataatcagttggctatcttagcttcttccaaaggagaccatctgaccacaattttctactactgcagaagcattgctgtgaagttccctttcccagctgcctccactaatctgcaaaaagcactttctaaagcactggaaagccgagatgaggtgaaaaccaagtggggtgtttctgacttcatcaaggcctttattaaattccacggtcatgtgtacctgagtaagagcttggaaaagttgagccctcttcgagagaaattggaagaacagtttaagaggctgctattccaaaaagctttcaactctcagcagttagttcatgtcactgtcattaacctgtttcaacttcatcaccttcgtgactttagcaatgaaaccgagcagcacacttatagccaagatgagcagctatgttggacacagttgctggccctctttatgtcttttcttggcatcctgtgcaagtgtcctctacagaatgagtctcaggaggagtcctacaatgcctatcctcttccagcagtcaaggtctccatggactggctaagactcagacccagggtctttcaggaggcagtggtggatgaaagacagtacatttggccctggttgatttctcttctgaatagtttccatccccatgaagaggacctctcaagtattagtgcgacaccacttccagaggagtttgaattacaaggatttttggcattgagaccttctttcaggaacttggatttttccaaaggtcaccagggtattacaggggacaaagaaggccagcaacgacgaatacgacagcaacgcttgatctctataggcaaatggattgctgataatcagccaaggctgattcagtgtgaaaatgaggtagggaaattgttgtttatcacagaaatcccagaattaatactggaagaccccagtgaagccaaagagaacctcattctgcaagaaacatctgtgatagagtcgctggctgcagatgggagcccagggctaaaatcagtgctatctacaagccgaaatttaagcaacaactgtgacacaggagagaagccagtggttaccttcaaagaaaacattaagacacgagaagtgaacagagaccaaggaagaagttttcctcccaaagaggtaaaatcccagacagaactaagaaagactccagtgtctgaagccagaaaaacacctgtaactcaaaccccaactcaagcaagtaactcccagttcatccccattcatcaccctggagccttccctcctcttcccagcaggccagggtttccgcccccaacatatgttatccccccgcctgtggcattttctatgggctcaggttacaccttcccagctggtgtttctgtcccaggaacctttcttcagcctacagctcactctccagcaggaaaccaggtgcaagctgggaaacagtcccacattccttacagccagcaacggccctctggaccagggccaatgaaccagggacctcaacaatcacagccaccttcccagcaaccccttacatctttaccagctcagccaacagcacagtctacaagccagctgcaggttcaagctctaactcagcaacaacaatcccctacaaaagctgtgccggctttggggaaaagcccgcctcaccactctggattccagcagtatcaacaggcagatgcctccaaacagctgtggaatccccctcaggttcaaggcccattagggaaaattatgcctgtgaaacagccctactaccttcagacccaagaccccataaaactgtttgagccgtcattgcaacctcctgtaatgcagcagcagcctctagaaaaaaaaatgaagccttttcccatggagccatataaccataatccctcagaagtcaaggtcccagaattctactgggattcttcctacagcatggctgataacagatctgtaatggcacagcaagcaaacatagaccgcaggggcaaacggtcaccaggagtcttccgtccagagcaggatcctgtacccagaatgccgtttgagaaatccttattggagaagccctcagagctcatgtcacattcatcctctttcctgtccctcaccggattctctctcaatcaggaaagatacccaaataatagtatgttcaatgaggtatatgggaaaaacctgacatccagctccaaagcagaactcagtccctcaatggccccccaggaaacatctctgtattccctttttgaagggactccgtggtctccatcacttcctgccagttcagatcattcaacaccagccagccagtctcctcattcctctaacccaagcagcctacccagctctcctccaacacacaaccataattctgttccattctccaattttggacccattgggactccagataacagggatagaaggactgcagatcggtggaaaactgataagccagccatgggtgggtttggcattgattatctctcagcaacgtcatcctctgagagcagttggcatcaggccagcactccgagtggcacctggacaggccatggcccttccatggaggattcctctgctgtcctcatggaaagcctaaagtgtccctaacgaccgtgtctggacatacaataactatttgctgaatcactgaatgaatgaacaagtgaagagtggacatctgttagggatttaggactgagaggtgtataaacctaggagctgcagttctatcatgctgtgccctgaggccccggaaagcagaggaagccagactactcagagagaatggaacagatgcccagcgaggagcagagacaagagacacagaaacttttcagtctccggttccagcctttcctgagccccatccaaattcctgccccaagcttagacccttgcaataaatttcagtgtttgcttaagt

SEQ ID NO: 352520 - DNA, 2358 bp, Homo sapiens
agcgctacagagaggcggaaatcactgagggacaggcgctgctgaaatctcgcgagagggaccccctccctcgcccggtcgccgacttcctctgcttctcctctttcccccgcccctcctccctccccctcccccccgggtcggagtgtccctgcgccccacgggccagagcagcagcgagagcagctttccccactccctccccctcgcctcattcacccccacccccctgccgagcgaggaggagccggaggagaggaagatggcggcggccgccagcacccgcggtgccgcggggccgctccgaggagcctgagagacccacggaggcttcgcgggaagacgcggcggcggcggcggaggatgagcctgcagagcgcgcagtacctccgattctaagctgggtccagctgaagtctggacatccaggcaggctctgcaggacctgtaccagaaaatgctagttaccgatttggaatacgctttagacaagaaagtagaacaggatctctggaatcacgcctttaagaatcagatcacaacactacaaggccaggcaaagaatcgagcaaatccgaatcggagtgaagttcaggcaaacctttctctgttcctagaggcagctagtggcttctatactcagttattacaagaactgtgtacagtatttaatgtagatttaccatgccgtgtgaagtcttcccaattgggaattatcagcaataaacagacgcataccagcgccatagtgaagccacagtctagctcctgttcctatatctgccagcactgcctcgtccaccttggagacattgctcgatacagaaaccagaccagccaggcagagtcctactataggcatgcagctcagcttgtcccctccaatggtcagccttataatcagttggctatcttagcttcttccaaaggagaccatctgaccacaattttctactactgcagaagcattgctgtgaagttccctttcccagctgcctccactaatctgcaaaaagcactttctaaagcactggaaagccgagatgaggtgaaaaccaagtggggtgtttctgacttcatcaaggcctttattaaattccacggtcatgtgtacctgagtaagagcttggaaaagttgagccctcttcgagagaaattggaagaacagtttaagaggctgctattccaaaaagctttcaactctcagcagttagttcatgtcactgtcattaacctgtttcaacttcatcaccttcgtgactttagcaatgaaaccgagcagcacacttatagccaagatgagcagctatgttggacacagttgctggccctctttatgtcttttcttggcatcctgtgcaagtgtcctctacagaatgagtctcaggaggagtcctacaatgcctatcctcttccagcagtcaaggtctccatggactggctaagactcagacccagggtctttcaggaggcagtggtggatgaaagacagtacatttggccctggttgatttctcttctgaatagtttccatccccatgaagaggacctctcaagtattagtgcgacaccacttccagaggagtttgaattacaaggatttttggcattgagaccttctttcaggaacttggatttttccaaaggtcaccagggtattacaggggacaaagaaggccagcaacgacgaatacgacagcaacgcttgatctctataggcaaatggattgctgataatcagccaaggctgattcagtgtgaaaatgaggtagggaaattgttgtttatcacagaaatcccagaattaatactggaagaccccagtgaagccaaagagaacctcattctgcaagaaacatctgtgatagagtcgctggctgcagatgggagcccagggctaaaatcagtgctatctacaagccgaaatttaagcaacaactgtgacacaggagagaagccagtggttaccttcaaagaaaacattaagacacgagaagtgaacagagaccaaggaagaagttttcctcccaaagaggtgagaagggactatagcaaaggaataactgtaactaagaatgatggaaagaaggacaacaacaagaggaaaactgaaaccaagaaatgcaccttagaaaagttacaggaaacaggaaagcagaatgtggcagtgcaggtaaaatcccagacagaactaagaaagactccagtgtctgaagccagaaaaacacctgtaactcaaaccccaactcaagcaagtaactcccagttcatccccattcatcaccctggagccttccctcctcttcccagcaggccaggtaaatatgttttgtaatttcttctacttaatcttttctg

SEQ ID NO: 352521 - DNA, 1051 bp, Homo sapiens
agcgctacagagaggcggaaatcactgagggacaggcgctgctgaaatctcgcgagagggaccccctccctcgcccggtcgccgacttcctctgcttctcctctttcccccgcccctcctccctccccctcccccccgggtcggagtgtccctgcgccccacgggccagagcagcagcgagagcagctttccccactccctccccctcgcctcattcacccccacccccctgccgagcgaggaggagccggaggagaggaagatggcggcggccgccagcacccgcggtgccgcggggccgctccgaggagcctgagagacccacggaggcttcgcgggaagacgcggcggcggcggcggaggatgagcctgcagagcgcgcagtacctccgaatgtcttaaaccattctaccttatgagaaattggatgttcttgcagatagtcattgtgggagaaaacgtttcatttaagtcccagatgaggaccgaaaacttgaaatcagaggagcatctgaaatcaagtaatattaggcaggcagaagtcctgaaggctgacatgacaggtattggctggcttatttctttttcacaacatattttatatattaaattaatggaaggatatcctctttcttatattatgcacagcactaaatcccatcttagttgccaaaagggatgatcatttactatctgctttaaatatttattgtttatgtagtttgaattcttgcttaaataactgttgggaattgcatgtaatactaatatatggtatactgaattgaatgttacctaatttagtttatataatcacttaatttttatgaaactttttattaatgatttaagacatacagaaaaaataacataccccatataaaccaaaatatcttacagtgttaggctaatatctttctgggaaatttttttttctattaataattaaccaaactttagtaggtaaaccttcagaaaaaatatttatagaaaaattctattggaagtccttgaaattgagtgagctaccttgctgcctttcttttctccc

SEQ ID NO: 352522 - DNA, 391 bp, Homo sapiens
gcatcaggcatctcatttgtaaaacaaatgggctctaaggtcctttacatttttggatttttgtgatcatgggaaagcaaaataattagtaaaactaagatagtaaaattatcttttattggctattaaataatttgctttgattttccatttttaacttaggtgaatttaaatatcttcagcatgtactttttgatctaatgaggttttaaatactttcttaggagtagggtcttctttctagcacatttgagtttcaatttattatagatagttttgcttctattggttacaggtaaaatcccagacagaactaagaaagactccagtgtctgaagccagaaaaacacctgtaactcaaaccccaactcaagcaagtaactcccagttc

SEQ ID NO: 352523 - DNA, 409 bp, Homo sapiens
atatattcattcattcattaaacctcttaaatagttgaattaaaagaaaatatgagtgtggtgcccataatctgtttccaaaaagctctgagtattgaatagcccaaaaggtaaaggaaactgctgccttgcctagagttttgttggttggaaaacaccccaagttcattctgtgattctttagcattcattataagtaatattgcattttatcctcacctttatgacaggcgtctcttttttagtatcaacaggcagatgcctccaaacagctgtggaatccccctcaggttcaaggcccattagggaaaattatgcctgtgaaacagccctactaccttcagacccaagaccccataaaactgtttgagccgtcattgcaacctcctgtaatgcagcagcagcctct

SEQ ID NO: 352524 - DNA, 828 bp, Homo sapiens
ttgctccatagcattgttttactcactagccacattaaccttttgtgttctgctctgtcagtatttttgcttttctattgtcttgaactttctccattattgtccttgtgtcgctttgcctttgcatttcagagcgttttttctctttgcctaataccatctatctcactatccccttgactttagttgtcttcttccacctaattatgctactattcctttatgcttttgttatcccttattgcttctcactgtgatgctttctgtcactaggaccccaagagctcccctctgcttcctccggacctgttaaagagtctggctgccttggaggaagaggaagagctgattttttctaaccctcctgatctttacccggctctgctggggcctctcgcctctcttcctggacgaagcctttttgtatgtatttgacataattctgcttcttggtctaacccccagctgcttctctgagatactgtagtacacagattaggtgatttcttctcttcctggggctgtccttttcagaactgtaaaacatattttctaattgcctaaaccaaccttaagttggtagtaggatatagcaaaacatttctgcctttatagttctcccaaatcatggagacataccttggttttatgtgttatccagaaagcattctgcagagctggtcacacacacgatgtgatggtgacaaattaactcactttgcaggtgacacttccatctggacccagaaattttaagtatcatttaatcttgcttaggaacagtgagatttatttctcatatgtagccaaaatatgaaaggaaatatg

SEQ ID NO: 352525 - DNA, 872 bp, Homo sapiens
agcgctacagagaggcggaaatcactgagggacaggcgctgctgaaatctcgcgagagggaccccctccctcgcccggtcgccgacttcctctgcttctcctctttcccccgcccctcctccctccccctcccccccgggtcggagtgtccctgcgccccacgggccagagcagcagcgagagcagctttccccactccctccccctcgcctcattcacccccacccccctgccgagcgaggaggagccggaggagaggaagatggcggcggccgccagcacccgcggtgccgcggggccgctccgaggagcctgagagacccacggaggcttcgcgggaagacgcggcggcggcggcggaggatgagcctgcagagcgcgcagtacctccggcaggcagaagtcctgaaggctgacatgacagattctaagctgggtccagctgaagtctggacatccaggcaggctctgcaggacctgtaccagaaaatgctagttaccgatttggaatacgctttagacaagaaagtagaacaggatctctggaatcacgcctttaagaatcagatcacaacactacaaggccaggcaaagaatcgagcaaatccgaatcggagtgaagttcaggcaaacctttctctgttcctagaggcagctagtggcttctatactcagttattacaagaactgtgtacagtatttaatgtagatttaccatgccgtgtgaagtcttcccaattgggaattatcagcaataaacagacgcataccagcgccatagtgaagccacagtctagctcctgttcctatatctgccagcactgcctcgtccaccttggagacattgtgccatataactcaccccttcttgt

SEQ ID NO: 352526 - DNA, 5929 bp, Homo sapiens
agcgctacagagaggcggaaatcactgagggacaggcgctgctgaaatctcgcgagagggaccccctccctcgcccggtcgccgacttcctctgcttctcctctttcccccgcccctcctccctccccctcccccccgggtcggagtgtccctgcgccccacgggccagagcagcagcgagagcagctttccccactccctccccctcgcctcattcacccccacccccctgccgagcgaggaggagccggaggagaggaagatggcggcggccgccagcacccgcggtgccgcggggccgctccgaggagcctgagagacccacggaggcttcgcgggaagacgcggcggcggcggcggaggatgagcctgcagagcgcgcagtacctccgattctaagctgggtccagctgaagtctggacatccaggcaggctctgcaggacctgtaccagaaaatgctagttaccgatttggaatacgctttagacaagaaagtagaacaggatctctggaatcacgcctttaagaatcagatcacaacactacaaggccaggcaaagaatcgagcaaatccgaatcggagtgaagttcaggcaaacctttctctgttcctagaggcagctagtggcttctatactcagttattacaagaactgtgtacagtatttaatgtagatttaccatgccgtgtgaagtcttcccaattgggaattatcagcaataaacagacgcataccagcgccatagtgaagccacagtctagctcctgttcctatatctgccagcactgcctcgtccaccttggagacattgctcgatacagaaaccagaccagccaggcagagtcctactataggcatgcagctcagcttgtcccctccaatgaagcattgctgtgaagttccctttcccagctgcctccactaatctgcaaaaagcactttctaaagcactggaaagccgagatgaggtgaaaaccaagtggggtgtttctgacttcatcaaggcctttattaaattccacggtcatgtgtacctgagtaagagcttggaaaagttgagccctcttcgagagaaattggaagaacagtttaagaggctgctattccaaaaagctttcaactctcagcagttagttcatgtcactgtcattaacctgtttcaacttcatcaccttcgtgactttagcaatgaaaccgagcagcacacttatagccaagatgagcagctatgttggacacagttgctggccctctttatgtcttttcttggcatcctgtgcaagtgtcctctacagaatgagtctcaggaggagtcctacaatgcctatcctcttccagcagtcaaggtctccatggactggctaagactcagacccagggtctttcaggaggcagtggtggatgaaagacagtacatttggccctggttgatttctcttctgaatagtttccatccccatgaagaggacctctcaagtattagtgcgacaccacttccagaggagtttgaattacaaggatttttggcattgagaccttctttcaggaacttggatttttccaaaggtcaccagggtattacaggggacaaagaaggccagcaacgacgaatacgacagcaacgcttgatctctataggcaaatggattgctgataatcagccaaggctgattcagtgtgaaaatgaggtagggaaattgttgtttatcacagaaatcccagaattaatactggaagaccccagtgaagccaaagagaacctcattctgcaagaaacatctgtgatagagtcgctggctgcagatgggagcccagggctaaaatcagtgctatctacaagccgaaatttaagcaacaactgtgacacaggagagaagccagtggttaccttcaaagaaaacattaagacacgagaagtgaacagagaccaaggaagaagttttcctcccaaagaggtgagaagggactatagcaaaggaataactgtaactaagaatgatggaaagaaggacaacaacaagaggaaaactgaaaccaagaaatgcaccttagaaaagttacaggaaacaggaaagcagaatgtggcagtgcaggtaaaatcccagacagaactaagaaagactccagtgtctgaagccagaaaaacacctgtaactcaaaccccaactcaagcaagtaactcccagttcatccccattcatcaccctggagccttccctcctcttcccagcaggccagggtttccgcccccaacatatgttatccccccgcctgtggcattttctatgggctcaggttacaccttcccagctggtgtttctgtcccaggaacctttcttcagcctacagctcactctccagcaggaaaccaggtgcaagctgggaaacagtcccacattccttacagccagcaacggccctctggaccagggccaatgaaccagggacctcaacaatcacagccaccttcccagcaaccccttacatctttaccagctcagccaacagcacagtctacaagccagctgcaggttcaagctctaactcagcaacaacaatcccctacaaaagctgtgccggctttggggaaaagcccgcctcaccactctggattccagcagtatcaacaggcagatgcctccaaacagctgtggaatccccctcaggttcaaggcccattagggaaaattatgcctgtgaaacagccctactaccttcagacccaagaccccataaaactgtttgagccgtcattgcaacctcctgtaatgcagcagcagcctctagaaaaaaaaatgaagccttttcccatggagccatataaccataatccctcagaagtcaaggtcccagaattctactgggattcttcctacagcatggctgataacagatctgtaatggcacagcaagcaaacatagaccgcaggggcaaacggtcaccaggagtcttccgtccagagcaggatcctgtacccagaatgccgtttgagaaatccttattggagaagccctcagagctcatgtcacattcatcctctttcctgtccctcaccggattctctctcaatcaggaaagatacccaaataatagtatgttcaatgaggtatatgggaaaaacctgacatccagctccaaagcagaactcagtccctcaatggccccccaggaaacatctctgtattccctttttgaagggactccgtggtctccatcacttcctgccagttcagatcattcaacaccagccagccagtctcctcattcctctaacccaagcagcctacccagctctcctccaacacacaaccataattctgttccattctccaattttggacccattgggactccagataacagggatagaaggactgcagatcggtggaaaactgataagccagccatgggtgggtttggcattgattatctctcagcaacgtcatcctctgagagcagttggcatcaggccagcactccgagtggcacctggacaggccatggcccttccatggaggattcctctgctgtcctcatggaaagcctaaagtctatctggtccagttccatgatgcatcctggaccttctgctctggagcagctgttaatgcagcagaagcagaaacagcaacggggacaaggcaccatgaaccctccacactgaggccaaagtggcaacctgggaatgaaggctccataaaccatggcatgttgggtttgcaggactggcccacacagtcccctgcaggtggcagccctcttttctgtttctcgctgtcaagagggtgtaagtattccaccagcccgctgagtgtgcacgaaatgttcgcagtgcaacaaaaagaaaaatccatcaggaactctccgtccccccggggccctccggagggagagagagaggaactgctgtttatctcactcagttacttggtatcaccgcctctcaccttctccatcgtgcatgtccccagccacatgggaagtgaaagctgagaagggaaggcagatgggagaagccaatgggaacttctcagtccttttttcctctttggggaataaaataggaatccattaatgattgctttgctgactgagaatgtagttgaaattattcttaaacatcttttattattattactctcagtagtaaaatatcacactgaattcttccatacacaggtgtgcttctagtcagtgtgtagcaaggaaagccccgttcactgctcctgtgagaggttggtggtgacaggatggggaaccgacctcttcagccagtggaaatgttccataagggagagttcaaggcctgtcagaaggctctggtaggccttcctctggccaggagactccagcagggaatgcccttcactctgtaggtgctcgagccccaatcgaggatacagtgtgggtggtggtgctgggctggactagcaggtagactgctgtaggatttcaaattacgtttttgattcctgtacattttacagtcgcacagcaagcagtctcacagaaggcaggctagtccattcacagcctgacacgttctaataggtagaagctttcagtgtggttattttttctttggttggtttttgtgcccccattctacttcccaccctcctgccccatctccatcccttcttttacccaatgctgtatgctagtaattgtttttattcctaatgtgtgcaacatcacatctccccaagaagcaacagcatggggtccagcagttggggcccaaaagacagtctgaagaggaaggaagcagcagtatctgcgtagcccacagagggcccaggcccctgcccagctgcagtctcccagcctccactttcagagtgaaattcaaggcagcacggacatgtgcccatcaggcacagaagaaaacacgacgtcgtccattttggaagagacgaaagaaaggaaaataaactctttgtatgatatttattaggaggaaagaggactgaaaatgttcttgtgtagaaacagaaggacagcatttctgttagtcatttcctggaaaagtaatattttaaggggaaattatggaaacaatctaattgttcaattgctgtgctagtggtagggtttattttctgggaggtctctcctttgtgtgtctgtatgtttgtgtacacacacgtgcccatctgctgtcccagaggggaggggttgtgtgtgcgagtgtatggagttagtgtggaacttaagagctggaagacagctgtagagcaaagcacatccaggagccccagttgtcactgcagtctgggcaaccccagcaatgaaaaggggtgagataacgctcattgctcttcagagagagtggttggagccccccccgccccgtatgcttacattattgctcttttagtttgacatggtgtttgggttttgtttttttgaaaggtctgaaaaggtgaagccccctacccaatggcaatatgaaaccttttgtgcttctcttcagccccttccctgtgtccacctttctctcctcttcccaagcctttttcctactacctttacccagtttgtgtgtttgagctctgcattcaggcagctgcaacattccagtgtttgaactgtcactgattcttgcgccctagacaagctaaccaggtttaccatctcactcccagtaatacccagctcctatctaaagccccattctgcatgagaatttggtgtttggaatgttttctgactcttggggcgggattcctcgccttatcatcctcactgtggagtaatgagggggaggagaatctttatcagaaactggttttgtgtagtaaactttcttttgtggttttttgttttgttttctgggttttgttttttgtttttgtctgtgcaagacctgcagctgctgaaaatcagctttgcctttaattaaaccatgttctctccaacca

SEQ ID NO: 352527 - DNA, 6023 bp, Homo sapiens
agcgctacagagaggcggaaatcactgagggacaggcgctgctgaaatctcgcgagagggaccccctccctcgcccggtcgccgacttcctctgcttctcctctttcccccgcccctcctccctccccctcccccccgggtcggagtgtccctgcgccccacgggccagagcagcagcgagagcagctttccccactccctccccctcgcctcattcacccccacccccctgccgagcgaggaggagccggaggagaggaagatggcggcggccgccagcacccgcggtgccgcggggccgctccgaggagcctgagagacccacggaggcttcgcgggaagacgcggcggcggcggcggaggatgagcctgcagagcgcgcagtacctccggcaggcagaagtcctgaaggctgacatgacagattctaagctgggtccagctgaagtctggacatccaggcaggctctgcaggacctgtaccagaaaatgctagttaccgatttggaatacgctttagacaagaaagtagaacaggatctggggaccagtgtctgcccagtgagtcactgctataccaaatagaattacattttgttttcagctggaatcacgcctttaagaatcagatcacaacactacaaggccaggcaaagaatcgagcaaatccgaatcggagtgaagttcaggcaaacctttctctgttcctagaggcagctagtggcttctatactcagttattacaagaactgtgtacagtatttaatgtagatttaccatgccgtgtgaagtcttcccaattgggaattatcagcaataaacagacgcataccagcgccatagtgaagccacagtctagctcctgttcctatatctgccagcactgcctcgtccaccttggagacattgctcgatacagaaaccagaccagccaggcagagtcctactataggcatgcagctcagcttgtcccctccaatgaagcattgctgtgaagttccctttcccagctgcctccactaatctgcaaaaagcactttctaaagcactggaaagccgagatgaggtgaaaaccaagtggggtgtttctgacttcatcaaggcctttattaaattccacggtcatgtgtacctgagtaagagcttggaaaagttgagccctcttcgagagaaattggaagaacagtttaagaggctgctattccaaaaagctttcaactctcagcagttagttcatgtcactgtcattaacctgtttcaacttcatcaccttcgtgactttagcaatgaaaccgagcagcacacttatagccaagatgagcagctatgttggacacagttgctggccctctttatgtcttttcttggcatcctgtgcaagtgtcctctacagaatgagtctcaggaggagtcctacaatgcctatcctcttccagcagtcaaggtctccatggactggctaagactcagacccagggtctttcaggaggcagtggtggatgaaagacagtacatttggccctggttgatttctcttctgaatagtttccatccccatgaagaggacctctcaagtattagtgcgacaccacttccagaggagtttgaattacaaggatttttggcattgagaccttctttcaggaacttggatttttccaaaggtcaccagggtattacaggggacaaagaaggccagcaacgacgaatacgacagcaacgcttgatctctataggcaaatggattgctgataatcagccaaggctgattcagtgtgaaaatgaggtagggaaattgttgtttatcacagaaatcccagaattaatactggaagaccccagtgaagccaaagagaacctcattctgcaagaaacatctgtgatagagtcgctggctgcagatgggagcccagggctaaaatcagtgctatctacaagccgaaatttaagcaacaactgtgacacaggagagaagccagtggttaccttcaaagaaaacattaagacacgagaagtgaacagagaccaaggaagaagttttcctcccaaagaggtgagaagggactatagcaaaggaataactgtaactaagaatgatggaaagaaggacaacaacaagaggaaaactgaaaccaagaaatgcaccttagaaaagttacaggaaacaggaaagcagaatgtggcagtgcaggtaaaatcccagacagaactaagaaagactccagtgtctgaagccagaaaaacacctgtaactcaaaccccaactcaagcaagtaactcccagttcatccccattcatcaccctggagccttccctcctcttcccagcaggccagggtttccgcccccaacatatgttatccccccgcctgtggcattttctatgggctcaggttacaccttcccagctggtgtttctgtcccaggaacctttcttcagcctacagctcactctccagcaggaaaccaggtgcaagctgggaaacagtcccacattccttacagccagcaacggccctctggaccagggccaatgaaccagggacctcaacaatcacagccaccttcccagcaaccccttacatctttaccagctcagccaacagcacagtctacaagccagctgcaggttcaagctctaactcagcaacaacaatcccctacaaaagctgtgccggctttggggaaaagcccgcctcaccactctggattccagcagtatcaacaggcagatgcctccaaacagctgtggaatccccctcaggttcaaggcccattagggaaaattatgcctgtgaaacagccctactaccttcagacccaagaccccataaaactgtttgagccgtcattgcaacctcctgtaatgcagcagcagcctctagaaaaaaaaatgaagccttttcccatggagccatataaccataatccctcagaagtcaaggtcccagaattctactgggattcttcctacagcatggctgataacagatctgtaatggcacagcaagcaaacatagaccgcaggggcaaacggtcaccaggagtcttccgtccagagcaggatcctgtacccagaatgccgtttgagaaatccttattggagaagccctcagagctcatgtcacattcatcctctttcctgtccctcaccggattctctctcaatcaggaaagatacccaaataatagtatgttcaatgaggtatatgggaaaaacctgacatccagctccaaagcagaactcagtccctcaatggccccccaggaaacatctctgtattccctttttgaagggactccgtggtctccatcacttcctgccagttcagatcattcaacaccagccagccagtctcctcattcctctaacccaagcagcctacccagctctcctccaacacacaaccataattctgttccattctccaattttggacccattgggactccagataacagggatagaaggactgcagatcggtggaaaactgataagccagccatgggtgggtttggcattgattatctctcagcaacgtcatcctctgagagcagttggcatcaggccagcactccgagtggcacctggacaggccatggcccttccatggaggattcctctgctgtcctcatggaaagcctaaagtctatctggtccagttccatgatgcatcctggaccttctgctctggagcagctgttaatgcagcagaagcagaaacagcaacggggacaaggcaccatgaaccctccacactgaggccaaagtggcaacctgggaatgaaggctccataaaccatggcatgttgggtttgcaggactggcccacacagtcccctgcaggtggcagccctcttttctgtttctcgctgtcaagagggtgtaagtattccaccagcccgctgagtgtgcacgaaatgttcgcagtgcaacaaaaagaaaaatccatcaggaactctccgtccccccggggccctccggagggagagagagaggaactgctgtttatctcactcagttacttggtatcaccgcctctcaccttctccatcgtgcatgtccccagccacatgggaagtgaaagctgagaagggaaggcagatgggagaagccaatgggaacttctcagtccttttttcctctttggggaataaaataggaatccattaatgattgctttgctgactgagaatgtagttgaaattattcttaaacatcttttattattattactctcagtagtaaaatatcacactgaattcttccatacacaggtgtgcttctagtcagtgtgtagcaaggaaagccccgttcactgctcctgtgagaggttggtggtgacaggatggggaaccgacctcttcagccagtggaaatgttccataagggagagttcaaggcctgtcagaaggctctggtaggccttcctctggccaggagactccagcagggaatgcccttcactctgtaggtgctcgagccccaatcgaggatacagtgtgggtggtggtgctgggctggactagcaggtagactgctgtaggatttcaaattacgtttttgattcctgtacattttacagtcgcacagcaagcagtctcacagaaggcaggctagtccattcacagcctgacacgttctaataggtagaagctttcagtgtggttattttttctttggttggtttttgtgcccccattctacttcccaccctcctgccccatctccatcccttcttttacccaatgctgtatgctagtaattgtttttattcctaatgtgtgcaacatcacatctccccaagaagcaacagcatggggtccagcagttggggcccaaaagacagtctgaagaggaaggaagcagcagtatctgcgtagcccacagagggcccaggcccctgcccagctgcagtctcccagcctccactttcagagtgaaattcaaggcagcacggacatgtgcccatcaggcacagaagaaaacacgacgtcgtccattttggaagagacgaaagaaaggaaaataaactctttgtatgatatttattaggaggaaagaggactgaaaatgttcttgtgtagaaacagaaggacagcatttctgttagtcatttcctggaaaagtaatattttaaggggaaattatggaaacaatctaattgttcaattgctgtgctagtggtagggtttattttctgggaggtctctcctttgtgtgtctgtatgtttgtgtacacacacgtgcccatctgctgtcccagaggggaggggttgtgtgtgcgagtgtatggagttagtgtggaacttaagagctggaagacagctgtagagcaaagcacatccaggagccccagttgtcactgcagtctgggcaaccccagcaatgaaaaggggtgagataacgctcattgctcttcagagagagtggttggagccccccccgccccgtatgcttacattattgctcttttagtttgacatggtgtttgggttttgtttttttgaaaggtctgaaaaggtgaagccccctacccaatggcaatatgaaaccttttgtgcttctcttcagccccttccctgtgtccacctttctctcctcttcccaagcctttttcctactacctttacccagtttgtgtgtttgagctctgcattcaggcagctgcaacattccagtgtttgaactgtcactgattcttgcgccctagacaagctaaccaggtttaccatctcactcccagtaatacccagctcctatctaaagccccattctgcatgagaatttggtgtttggaatgttttctgactcttggggcgggattcctcgccttatcatcctcactgtggagtaatgagggggaggagaatctttatcagaaactggttttgtgtagtaaactttcttttgtggttttttgttttgttttctgggttttgttttttgtttttgtctgtgcaagacctgcagctgctgaaaatcagctttgcctttaattaaaccatgttctctccaacca

SEQ ID NO: 352528 - DNA, 5867 bp, Homo sapiens
agcgctacagagaggcggaaatcactgagggacaggcgctgctgaaatctcgcgagagggaccccctccctcgcccggtcgccgacttcctctgcttctcctctttcccccgcccctcctccctccccctcccccccgggtcggagtgtccctgcgccccacgggccagagcagcagcgagagcagctttccccactccctccccctcgcctcattcacccccacccccctgccgagcgaggaggagccggaggagaggaagatggcggcggccgccagcacccgcggtgccgcggggccgctccgaggagcctgagagacccacggaggcttcgcgggaagacgcggcggcggcggcggaggatgagcctgcagagcgcgcagtacctccgattctaagctgggtccagctgaagtctggacatccaggcaggctctgcaggacctgtaccagaaaatgctagttaccgatttggaatacgctttagacaagaaagtagaacaggatctctggaatcacgcctttaagaatcagatcacaacactacaaggccaggcaaagaatcgagcaaatccgaatcggagtgaagttcaggcaaacctttctctgttcctagaggcagctagtggcttctatactcagttattacaagaactgtgtacagtatttaatgtagatttaccatgccgtgtgaagtcttcccaattgggaattatcagcaataaacagacgcataccagcgccatagtgaagccacagtctagctcctgttcctatatctgccagcactgcctcgtccaccttggagacattgctcgatacagaaaccagaccagccaggcagagtcctactataggcatgcagctcagcttgtcccctccaatggtcagccttataatcagttggctatcttagcttcttccaaaggagaccatctgaccacaattttctactactgcagaagcattgctgtgaagttccctttcccagctgcctccactaatctgcaaaaagcactttctaaagcactggaaagccgagatgaggtgaaaaccaagtggggtgtttctgacttcatcaaggcctttattaaattccacggtcatgtgtacctgagtaagagcttggaaaagttgagccctcttcgagagaaattggaagaacagtttaagaggctgctattccaaaaagctttcaactctcagcagttagttcatgtcactgtcattaacctgtttcaacttcatcaccttcgtgactttagcaatgaaaccgagcagcacacttatagccaagatgagcagctatgttggacacagttgctggccctctttatgtcttttcttggcatcctgtgcaagtgtcctctacagaatgagtctcaggaggagtcctacaatgcctatcctcttccagcagtcaaggtctccatggactggctaagactcagacccagggtctttcaggaggcagtggtggatgaaagacagtacatttggccctggttgatttctcttctgaatagtttccatccccatgaagaggacctctcaagtattagtgcgacaccacttccagaggagtttgaattacaaggatttttggcattgagaccttctttcaggaacttggatttttccaaaggtcaccagggtattacaggggacaaagaaggccagcaacgacgaatacgacagcaacgcttgatctctataggcaaatggattgctgataatcagccaaggctgattcagtgtgaaaatgaggtagggaaattgttgtttatcacagaaatcccagaattaatactggaagaccccagtgaagccaaagagaacctcattctgcaagaaacatctgtgatagagtcgctggctgcagatgggagcccagggctaaaatcagtgctatctacaagccgaaatttaagcaacaactgtgacacaggagagaagccagtggttaccttcaaagaaaacattaagacacgagaagtgaacagagaccaaggaagaagttttcctcccaaagaggtaaaatcccagacagaactaagaaagactccagtgtctgaagccagaaaaacacctgtaactcaaaccccaactcaagcaagtaactcccagttcatccccattcatcaccctggagccttccctcctcttcccagcaggccagggtttccgcccccaacatatgttatccccccgcctgtggcattttctatgggctcaggttacaccttcccagctggtgtttctgtcccaggaacctttcttcagcctacagctcactctccagcaggaaaccaggtgcaagctgggaaacagtcccacattccttacagccagcaacggccctctggaccagggccaatgaaccagggacctcaacaatcacagccaccttcccagcaaccccttacatctttaccagctcagccaacagcacagtctacaagccagctgcaggttcaagctctaactcagcaacaacaatcccctacaaaagctgtgccggctttggggaaaagcccgcctcaccactctggattccagcagtatcaacaggcagatgcctccaaacagctgtggaatccccctcaggttcaaggcccattagggaaaattatgcctgtgaaacagccctactaccttcagacccaagaccccataaaactgtttgagccgtcattgcaacctcctgtaatgcagcagcagcctctagaaaaaaaaatgaagccttttcccatggagccatataaccataatccctcagaagtcaaggtcccagaattctactgggattcttcctacagcatggctgataacagatctgtaatggcacagcaagcaaacatagaccgcaggggcaaacggtcaccaggagtcttccgtccagagcaggatcctgtacccagaatgccgtttgagaaatccttattggagaagccctcagagctcatgtcacattcatcctctttcctgtccctcaccggattctctctcaatcaggaaagatacccaaataatagtatgttcaatgaggtatatgggaaaaacctgacatccagctccaaagcagaactcagtccctcaatggccccccaggaaacatctctgtattccctttttgaagggactccgtggtctccatcacttcctgccagttcagatcattcaacaccagccagccagtctcctcattcctctaacccaagcagcctacccagctctcctccaacacacaaccataattctgttccattctccaattttggacccattgggactccagataacagggatagaaggactgcagatcggtggaaaactgataagccagccatgggtgggtttggcattgattatctctcagcaacgtcatcctctgagagcagttggcatcaggccagcactccgagtggcacctggacaggccatggcccttccatggaggattcctctgctgtcctcatggaaagcctaaagtctatctggtccagttccatgatgcatcctggaccttctgctctggagcagctgttaatgcagcagaagcagaaacagcaacggggacaaggcaccatgaaccctccacactgaggccaaagtggcaacctgggaatgaaggctccataaaccatggcatgttgggtttgcaggactggcccacacagtcccctgcaggtggcagccctcttttctgtttctcgctgtcaagagggtgtaagtattccaccagcccgctgagtgtgcacgaaatgttcgcagtgcaacaaaaagaaaaatccatcaggaactctccgtccccccggggccctccggagggagagagagaggaactgctgtttatctcactcagttacttggtatcaccgcctctcaccttctccatcgtgcatgtccccagccacatgggaagtgaaagctgagaagggaaggcagatgggagaagccaatgggaacttctcagtccttttttcctctttggggaataaaataggaatccattaatgattgctttgctgactgagaatgtagttgaaattattcttaaacatcttttattattattactctcagtagtaaaatatcacactgaattcttccatacacaggtgtgcttctagtcagtgtgtagcaaggaaagccccgttcactgctcctgtgagaggttggtggtgacaggatggggaaccgacctcttcagccagtggaaatgttccataagggagagttcaaggcctgtcagaaggctctggtaggccttcctctggccaggagactccagcagggaatgcccttcactctgtaggtgctcgagccccaatcgaggatacagtgtgggtggtggtgctgggctggactagcaggtagactgctgtaggatttcaaattacgtttttgattcctgtacattttacagtcgcacagcaagcagtctcacagaaggcaggctagtccattcacagcctgacacgttctaataggtagaagctttcagtgtggttattttttctttggttggtttttgtgcccccattctacttcccaccctcctgccccatctccatcccttcttttacccaatgctgtatgctagtaattgtttttattcctaatgtgtgcaacatcacatctccccaagaagcaacagcatggggtccagcagttggggcccaaaagacagtctgaagaggaaggaagcagcagtatctgcgtagcccacagagggcccaggcccctgcccagctgcagtctcccagcctccactttcagagtgaaattcaaggcagcacggacatgtgcccatcaggcacagaagaaaacacgacgtcgtccattttggaagagacgaaagaaaggaaaataaactctttgtatgatatttattaggaggaaagaggactgaaaatgttcttgtgtagaaacagaaggacagcatttctgttagtcatttcctggaaaagtaatattttaaggggaaattatggaaacaatctaattgttcaattgctgtgctagtggtagggtttattttctgggaggtctctcctttgtgtgtctgtatgtttgtgtacacacacgtgcccatctgctgtcccagaggggaggggttgtgtgtgcgagtgtatggagttagtgtggaacttaagagctggaagacagctgtagagcaaagcacatccaggagccccagttgtcactgcagtctgggcaaccccagcaatgaaaaggggtgagataacgctcattgctcttcagagagagtggttggagccccccccgccccgtatgcttacattattgctcttttagtttgacatggtgtttgggttttgtttttttgaaaggtctgaaaaggtgaagccccctacccaatggcaatatgaaaccttttgtgcttctcttcagccccttccctgtgtccacctttctctcctcttcccaagcctttttcctactacctttacccagtttgtgtgtttgagctctgcattcaggcagctgcaacattccagtgtttgaactgtcactgattcttgcgccctagacaagctaaccaggtttaccatctcactcccagtaatacccagctcctatctaaagccccattctgcatgagaatttggtgtttggaatgttttctgactcttggggcgggattcctcgccttatcatcctcactgtggagtaatgagggggaggagaatctttatcagaaactggttttgtgtagtaaactttcttttgtggttttttgttttgttttctgggttttgttttttgtttttgtctgtgcaagacctgcagctgctgaaaatcagctttgcctttaattaaaccatgttctctccaacca

SEQ ID NO: 352529 - DNA, 3732 bp, Homo sapiens
tttgctgtttccttaaaactaaagctgtgttcttctgttttgaagggtttccgcccccaacatatgttatccccccgcctgtggcattttctatgggctcaggttacaccttcccagctggtgtttctgtcccaggaacctttcttcagcctacagctcactctccagcaggaaaccaggtgcaagctgggaaacagtcccacattccttacagccagcaacggccctctggaccagggccaatgaaccagggacctcaacaatcacagccaccttcccagcaaccccttacatctttaccagctcagccaacagcacagtctacaagccagctgcaggttcaagctctaactcagcaacaacaatcccctacaaaagctgtgccggctttggggaaaagcccgcctcaccactctggattccagcagtatcaacaggcagatgcctccaaacagctgtggaatccccctcaggttcaaggcccattagggaaaattatgcctgtgaaacagccctactaccttcagacccaagaccccataaaactgtttgagccgtcattgcaacctcctgtaatgcagcagcagcctctagaaaaaaaaatgaagccttttcccatggagccatataaccataatccctcagaagtcaaggtcccagaattctactgggattcttcctacagcatggctgataacagatctgtaatggcacagcaagcaaacatagaccgcaggggcaaacggtcaccaggagtcttccgtccagagcaggatcctgtacccagaatgccgtttgagaaatccttattggagaagccctcagagctcatgtcacattcatcctctttcctgtccctcaccggattctctctcaatcaggaaagatacccaaataatagtatgttcaatgaggtatatgggaaaaacctgacatccagctccaaagcagaactcagtccctcaatggccccccaggaaacatctctgtattccctttttgaagggactccgtggtctccatcacttcctgccagttcagatcattcaacaccagccagccagtctcctcattcctctaacccaagcagcctacccagctctcctccaacacacaaccataattctgttccattctccaattttggacccattgggactccagataacagggatagaaggactgcagatcggtggaaaactgataagccagccatgggtgggtttggcattgattatctctcagcaacgtcatcctctgagagcagttggcatcaggccagcactccgagtggcacctggacaggccatggcccttccatggaggattcctctgctgtcctcatggaaagcctaaagtctatctggtccagttccatgatgcatcctggaccttctgctctggagcagctgttaatgcagcagaagcagaaacagcaacggggacaaggcaccatgaaccctccacactgaggccaaagtggcaacctgggaatgaaggctccataaaccatggcatgttgggtttgcaggactggcccacacagtcccctgcaggtggcagccctcttttctgtttctcgctgtcaagagggtgtaagtattccaccagcccgctgagtgtgcacgaaatgttcgcagtgcaacaaaaagaaaaatccatcaggaactctccgtccccccggggccctccggagggagagagagaggaactgctgtttatctcactcagttacttggtatcaccgcctctcaccttctccatcgtgcatgtccccagccacatgggaagtgaaagctgagaagggaaggcagatgggagaagccaatgggaacttctcagtccttttttcctctttggggaataaaataggaatccattaatgattgctttgctgactgagaatgtagttgaaattattcttaaacatcttttattattattactctcagtagtaaaatatcacactgaattcttccatacacaggtgtgcttctagtcagtgtgtagcaaggaaagccccgttcactgctcctgtgagaggttggtggtgacaggatggggaaccgacctcttcagccagtggaaatgttccataagggagagttcaaggcctgtcagaaggctctggtaggccttcctctggccaggagactccagcagggaatgcccttcactctgtaggtgctcgagccccaatcgaggatacagtgtgggtggtggtgctgggctggactagcaggtagactgctgtaggatttcaaattacgtttttgattcctgtacattttacagtcgcacagcaagcagtctcacagaaggcaggctagtccattcacagcctgacacgttctaataggtagaagctttcagtgtggttattttttctttggttggtttttgtgcccccattctacttcccaccctcctgccccatctccatcccttcttttacccaatgctgtatgctagtaattgtttttattcctaatgtgtgcaacatcacatctccccaagaagcaacagcatggggtccagcagttggggcccaaaagacagtctgaagaggaaggaagcagcagtatctgcgtagcccacagagggcccaggcccctgcccagctgcagtctcccagcctccactttcagagtgaaattcaaggcagcacggacatgtgcccatcaggcacagaagaaaacacgacgtcgtccattttggaagagacgaaagaaaggaaaataaactctttgtatgatatttattaggaggaaagaggactgaaaatgttcttgtgtagaaacagaaggacagcatttctgttagtcatttcctggaaaagtaatattttaaggggaaattatggaaacaatctaattgttcaattgctgtgctagtggtagggtttattttctgggaggtctctcctttgtgtgtctgtatgtttgtgtacacacacgtgcccatctgctgtcccagaggggaggggttgtgtgtgcgagtgtatggagttagtgtggaacttaagagctggaagacagctgtagagcaaagcacatccaggagccccagttgtcactgcagtctgggcaaccccagcaatgaaaaggggtgagataacgctcattgctcttcagagagagtggttggagccccccccgccccgtatgcttacattattgctcttttagtttgacatggtgtttgggttttgtttttttgaaaggtctgaaaaggtgaagccccctacccaatggcaatatgaaaccttttgtgcttctcttcagccccttccctgtgtccacctttctctcctcttcccaagcctttttcctactacctttacccagtttgtgtgtttgagctctgcattcaggcagctgcaacattccagtgtttgaactgtcactgattcttgcgccctagacaagctaaccaggtttaccatctcactcccagtaatacccagctcctatctaaagccccattctgcatgagaatttggtgtttggaatgttttctgactcttggggcgggattcctcgccttatcatcctcactgtggagtaatgagggggaggagaatctttatcagaaactggttttgtgtagtaaactttcttttgtggttttttgttttgttttctgggttttgttttttgtttttgtctgtgcaagacctgcagctgctgaaaatcagctttgcctttaattaaaccatgttctctccaacca

SEQ ID NO: 352530 - DNA, 5930 bp, Homo sapiens
agcgctacagagaggcggaaatcactgagggacaggcgctgctgaaatctcgcgagagggaccccctccctcgcccggtcgccgacttcctctgcttctcctctttcccccgcccctcctccctccccctcccccccgggtcggagtgtccctgcgccccacgggccagagcagcagcgagagcagctttccccactccctccccctcgcctcattcacccccacccccctgccgagcgaggaggagccggaggagaggaagatggcggcggccgccagcacccgcggtgccgcggggccgctccgaggagcctgagagacccacggaggcttcgcgggaagacgcggcggcggcggcggaggatgagcctgcagagcgcgcagtacctccgattctaagctgggtccagctgaagtctggacatccaggcaggctctgcaggacctgtaccagaaaatgctagttaccgatttggaatacgctttagacaagaaagtagaacaggatctctggaatcacgcctttaagaatcagatcacaacactacaaggccaggcaaagaatcgagcaaatccgaatcggagtgaagttcaggcaaacctttctctgttcctagaggcagctagtggcttctatactcagttattacaagaactgtgtacagtatttaatgtagatttaccatgccgtgtgaagtcttcccaattgggaattatcagcaataaacagacgcataccagcgccatagtgaagccacagtctagctcctgttcctatatctgccagcactgcctcgtccaccttggagacattgctcgatacagaaaccagaccagccaggcagagtcctactataggcatgcagctcagcttgtcccctccaatggtcagccttataatcagttggctatcttagcttcttccaaaggagaccatctgaccacaattttctactactgcagaagcattgctgtgaagttccctttcccagctgcctccactaatctgcaaaaagcactttctaaagcactggaaagccgagatgaggtgaaaaccaagtggggtgtttctgacttcatcaaggcctttattaaattccacggtcatgtgtacctgagtaagagcttggaaaagttgagccctcttcgagagaaattggaagaacagtttaagaggctgctattccaaaaagctttcaactctcagcagttagttcatgtcactgtcattaacctgtttcaacttcatcaccttcgtgactttagcaatgaaaccgagcagcacacttatagccaagatgagcagctatgttggacacagttgctggccctctttatgtcttttcttggcatcctgtgcaagtgtcctctacagaatgagtctcaggaggagtcctacaatgcctatcctcttccagcagtcaaggtctccatggactggctaagactcagacccagggtctttcaggaggcagtggtggatgaaagacagtacatttggccctggttgatttctcttctgaatagtttccatccccatgaagaggacctctcaagtattagtgcgacaccacttccagaggagtttgaattacaaggatttttggcattgagaccttctttcaggaacttggatttttccaaaggtcaccagggtattacaggggacaaagaaggccagcaacgacgaatacgacagcaacgcttgatctctataggcaaatggattgctgataatcagccaaggctgattcagtgtgaaaatgaggtagggaaattgttgtttatcacagaaatcccagaattaatactggaagaccccagtgaagccaaagagaacctcattctgcaagaaacatctgtgatagagtcgctggctgcagatgggagcccagggctaaaatcagtgctatctacaagccgaaatttaagcaacaactgtgacacaggagagaagccagtggttaccttcaaagaaaacattaagacacgagaagtgaacagagaccaaggaagaagttttcctcccaaagaggtaaaatcccagacagaactaagaaagactccagtgtctgaagccagaaaaacacctgtaactcaaaccccaactcaagcaagtaactcccagttcatccccattcatcaccctggagccttccctcctcttcccagcaggccagggtttccgcccccaacatatgttatccccccgcctgtggcattttctatgggctcaggttacaccttcccagctggtgtttctgtcccaggaacctttcttcagcctacagctcactctccagcaggaaaccaggtgcaagctgggaaacagtcccacattccttacagccagcaacggccctctggaccagggccaatgaaccagggacctcaacaatcacagccaccttcccagcaaccccttacatctttaccagctcagccaacagcacagtctacaagccagctgcaggttcaagctctaactcagcaacaacaatcccctacaaaagctgtgccggctttggggaaaagcccgcctcaccactctggattccagcagtatcaacaggcagatgcctccaaacagctgtggaatccccctcaggttcaaggcccattagggaaaattatgcctgtgaaacagccctactaccttcagacccaagaccccataaaactgtttgagccgtcattgcaacctcctgtaatgcagcagcagcctctagaaaaaaaaatgaagccttttcccatggagccatataaccataatccctcagaagtcaaggtcccagaattctactgggattcttcctacagcatggctgataacagatctgtaatggcacagcaagcaaacatagaccgcaggggcaaacggtcaccaggagtcttccgtccagagcaggatcctgtacccagaatgccgtttgagaaatccttattggagaagccctcagagctcatgtcacattcatcctctttcctgtccctcaccggattctctctcaatcaggaaagatacccaaataatagtatgttcaatgaggtatatgggaaaaacctgacatccagctccaaagcagaactcagtccctcaatggccccccaggaaacatctctgtattccctttttgaagggactccgtggtctccatcacttcctgccagttcagatcattcaacaccagccagccagtctcctcattcctctaacccaagcagcctacccagctctcctccaacacacaaccataattctgttccattctccaattttggacccattgggactccagataacagggatagaaggactgcagatcggtggaaaactgataagccagccatgggtgggtttggcattgattatctctcagcaacgtcatcctctgagagcagttggcatcaggccagcactccgagtggcacctggacaggccatggcccttccatggaggattcctctgctgtcctcatggaaagcctaaagtctatctggtccagttccatgatgcatcctggaccttctgctctggagcagctgttaatgcagcagaagcagaaacagcaacggggacaaggcaccatgaaccctccacactgaggccaaagtggcaacctgggaatgaaggctccataaaccatggcatgttgggtttgcaggactggcccacacagtcccctgcaggtggcagccctcttttctgtttctcgctgtcaagagggtgtaagtattccaccagcccgctgagtgtgcacgaaatgttcgcagtgcaacaaaaagaaaaatccatcaggaactctccgtccccccggggccctccggagggagagagagaggaactgctgtttatctcactcagttacttggtatcaccgcctctcaccttctccatcgtgcatgtccccagccacatgggaagtgaaagctgagaagggaaggcagatgggagaagccaatgggaacttctcagtccttttttcctctttggggaataaaataggaatccattaatgattgctttgctgactgagaatgtagttgaaattattcttaaacatcttttattattattactctcagtagtaaaatatcacactgaattcttccatacacaggtgtgcttctagtcagtgtgtagcaaggaaagccccgttcactgctcctgtgagaggttggtggtgacaggatggggaaccgacctcttcagccagtggaaatgttccataagggagagttcaaggcctgtcagaaggctctggtaggccttcctctggccaggagactccagcagggaatgcccttcactctgtaggtgctcgagccccaatcgaggatacagtgtgggtggtggtgctgggctggactagcaggtagactgctgtaggatttcaaattacgtttttgattcctgtacattttacagtcgcacagcaagcagtctcacagaaggcaggctagtccattcacagcctgacacgttctaataggtagaagctttcagtgtggttattttttctttggttggtttttgtgcccccattctacttcccaccctcctgccccatctccatcccttcttttacccaatgctgtatgctagtaattgtttttattcctaatgtgtgcaacatcacatctccccaagaagcaacagcatggggtccagcagttggggcccaaaagacagtctgaagaggaaggaagcagcagtatctgcgtagcccacagagggcccaggcccctgcccagctgcagtctcccagcctccactttcagagtgaaattcaaggcagcacggacatgtgcccatcaggcacagaagaaaacacgacgtcgtccattttggaagagacgaaagaaaggaaaataaactctttgtatgatatttattaggaggaaagaggactgaaaatgttcttgtgtagaaacagaaggacagcatttctgttagtcatttcctggaaaagtaatattttaaggggaaattatggaaacaatctaattgttcaattgctgtgctagtggtagggtttattttctgggaggtctctcctttgtgtgtctgtatgtttgtgtacacacacgtgcccatctgctgtcccagaggggaggggttgtgtgtgcgagtgtatggagttagtgtggaacttaagagctggaagacagctgtagagcaaagcacatccaggagccccagttgtcactgcagtctgggcaaccccagcaatgaaaaggggtgagataacgctcattgctcttcagagagagtggttggagccccccccgccccgtatgcttacattattgctcttttagtttgacatggtgtttgggttttgtttttttgaaaggtctgaaaaggtgaagccccctacccaatggcaatatgaaaccttttgtgcttctcttcagccccttccctgtgtccacctttctctcctcttcccaagcctttttcctactacctttacccagtttgtgtgtttgagctctgcattcaggcagctgcaacattccagtgtttgaactgtcactgattcttgcgccctagacaagctaaccaggtttaccatctcactcccagtaatacccagctcctatctaaagccccattctgcatgagaatttggtgtttggaatgttttctgactcttggggcgggattcctcgccttatcatcctcactgtggagtaatgagggggaggagaatctttatcagaaactggttttgtgtagtaaactttcttttgtggttttttgttttgttttctgggttttgttttttgtttttgtctgtgcaagacctgcagctgctgaaaatcagctttgcctttaattaaaccatgttctctccaaccaccccgtacatcgttagaagcttgaattcgagcagtagtagtagtagtagtagtaggcggccgc

SEQ ID NO: 352531 - DNA, 4612 bp, Homo sapiens
agcgctacagagaggcggaaatcactgagggacaggcgctgctgaaatctcgcgagagggaccccctccctcgcccggtcgccgacttcctctgcttctcctctttcccccgcccctcctccctccccctcccccccgggtcggagtgtccctgcgccccacgggccagagcagcagcgagagcagctttccccactccctccccctcgcctcattcacccccacccccctgccgagcgaggaggagccggaggagaggaagatggcggcggccgccagcacccgcggtgccgcggggccgctccgaggagcctgagagacccacggaggcttcgcgggaagacgcggcggcggcggcggaggatgagcctgcagagcgcgcagtacctccgattctaagctgggtccagctgaagtctggacatccaggcaggctctgcaggacctgtaccagaaaatgctagttaccgatttggaatacgctttagacaagaaagtagaacaggatctctggaatcacgcctttaagaatcagatcacaacactacaaggccaggcaaagaatcgagcaaatccgaatcggagtgaagttcaggcaaacctttctctgttcctagaggcagctagtggcttctatactcagttattacaagaactgtgtacagtatttaatgtagatttaccatgccgtgtgaagtcttcccaattgggaattatcagcaataaacagacgcataccagcgccatagtgaagccacagtctagctcctgttcctatatctgccagcactgcctcgtccaccttggagacattgctcgatacagaaaccagaccagccaggcagagtcctactataggcatgcagctcagcttgtcccctccaatggtcagccttataatcagttggctatcttagcttcttccaaaggagaccatctgaccacaattttctactactgcagaagcattgctgtgaagttccctttcccagctgcctccactaatctgcaaaaagcactttctaaagcactggaaagccgagatgaggtgaaaaccaagtggggtgtttctgacttcatcaaggcctttattaaattccacggtcatgtgtacctgagtaagagcttggaaaagttgagccctcttcgagagaaattggaagaacagtttaagaggctgctattccaaaaagctttcaactctcagcagttagttcatgtcactgtcattaacctgtttcaacttcatcaccttcgtgactttagcaatgaaaccgagcagcacacttatagccaagatgagcagctatgttggacacagttgctggccctctttatgtcttttcttggcatcctgtgcaagtgtcctctacagaatgagtctcaggaggagtcctacaatgcctatcctcttccagcagtcaaggtctccatggactggctaagactcagacccagggtctttcaggaggcagtggtggatgaaagacagtacatttggccctggttgatttctcttctgaatagtttccatccccatgaagaggacctctcaagtattagtgcgacaccacttccagaggagtttgaattacaaggatttttggcattgagaccttctttcaggaacttggatttttccaaaggtcaccagggtattacaggggacaaagaaggccagcaacgacgaatacgacagcaacgcttgatctctataggcaaatggattgctgataatcagccaaggctgattcagtgtgaaaatgaggtagggaaattgttgtttatcacagaaatcccagaattaatactggaagaccccagtgaagccaaagagaacctcattctgcaagaaacatctgtgatagagtcgctggctgcagatgggagcccagggctaaaatcagtgctatctacaagccgaaatttaagcaacaactgtgacacaggagagaagccagtggttaccttcaaagaaaacattaagacacgagaagtgaacagagaccaaggaagaagttttcctcccaaagaggtaaaatcccagacagaactaagaaagactccagtgtctgaagccagaaaaacacctgtaactcaaaccccaactcaagcaagtaactcccagttcatccccattcatcaccctggagccttccctcctcttcccagcaggccagggtttccgcccccaacatatgttatccccccgcctgtggcattttctatgggctcaggttacaccttcccagctggtgtttctgtcccaggaacctttcttcagcctacagctcactctccagcaggaaaccaggtgcaagctgggaaacagtcccacattccttacagccagcaacggccctctggaccagggccaatgaaccagggacctcaacaatcacagccaccttcccagcaaccccttacatctttaccagctcagccaacagcacagtctacaagccagctgcaggttcaagctctaactcagcaacaacaatcccctacaaaagctgtgccggctttggggaaaagcccgcctcaccactctggattccagcagtatcaacaggcagatgcctccaaacagctgtggaatccccctcaggttcaaggcccattagggaaaattatgcctgtgaaacagccctactaccttcagacccaagaccccataaaactgtttgagccgtcattgcaacctcctgtaatgcagcagcagcctctagaaaaaaaaatgaagccttttcccatggagccatataaccataatccctcagaagtcaaggtcccagaattctactgggattcttcctacagcatggctgataacagatctgtaatggcacagcaagcaaacatagaccgcaggggcaaacggtcaccaggagtcttccgtccagagcaggatcctgtacccagaatgccgtttgagaaatccttattggagaagccctcagagctcatgtcacattcatcctctttcctgtccctcaccggattctctctcaatcaggaaagatacccaaataatagtatgttcaatgaggtatatgggaaaaacctgacatccagctccaaagcagaactcagtccctcaatggccccccaggaaacatctctgtattccctttttgaagggactccgtggtctccatcacttcctgccagttcagatcattcaacaccagccagccagtctcctcattcctctaacccaagcagcctacccagctctcctccaacacacaaccataattctgttccattctccaattttggacccattgggactccagataacagggatagaaggactgcagatcggtggaaaactgataagccagccatgggtgggtttggcattgattatctctcagcaacgtcatcctctgagagcagttggcatcaggccagcactccgagtggcacctggacaggccatggcccttccatggaggattcctctgctgtcctcatggaaagcctaaagtctatctggtccagttccatgatgcatcctggaccttctgctctggagcagctgttaatgcagcagaagcagaaacagcaacggggacaaggcaccatgaaccctccacactgaggccaaagtggcaacctgggaatgaaggctccataaaccatggcatgttgggtttgcaggactggcccacacagtcccctgcaggtggcagccctcttttctgtttctcgctgtcaagagggtgtaagtattccaccagcccgctgagtgtgcacgaaatgttcgcagtgcaacaaaaagaaaaatccatcaggaactctccgtccccccggggccctccggagggagagagagaggaactgctgtttatctcactcagttacttggtatcaccgcctctcaccttctccatcgtgcatgtccccagccacatgggaagtgaaagctgagaagggaaggcagatgggagaagccaatgggaacttctcagtccttttttcctctttggggaataaaataggaatccattaatgattgctttgctgactgagaatgtagttgaaattattcttaaacatcttttattattattactctcagtagtaaaatatcacactgaattcttccatacacaggtgtgcttctagtcagtgtgtagcaaggaaagccccgttcactgctcctgtgagaggttggtggtgacaggatggggaaccgacctcttcagccagtggaaatgttccataagggagagttcaaggcctgtcagaaggctctggtaggccttcctctggccaggagactccagcagggaatgcccttcactctgtaggtgctcgagccccaatcgaggatacagtgtgggtggtggtgctgggctggactagcaggtagactgctgtaggatttcaaattacgtttttgattcctgtacattttacagtcgcacagcaagcagtctcacagaaggcaggctagtccattcacagcctgacacgttctaataggtagaagctttcagtgtggttattttttctttggttggtttttgtgcccccattctacttcccagcttgctcagacggggtccgcaggctcgaaattcggtaaatcatggtcaattag

SEQ ID NO: 352532 - DNA, 1563 bp, Homo sapiens
agcgctacagagaggcggaaatcactgagggacaggcgctgctgaaatctcgcgagagggaccccctccctcgcccggtcgccgacttcctctgcttctcctctttcccccgcccctcctccctccccctcccccccgggtcggagtgtccctgcgccccacgggccagagcagcagcgagagcagctttccccactccctccccctcgcctcattcacccccacccccctgccgagcgaggaggagccggaggagaggaagatggcggcggccgccagcacccgcggtgccgcggggccgctccgaggagcctgagagacccacggaggcttcgcgggaagacgcggcggcggcggcggaggatgagcctgcagagcgcgcagtacctccgaatgtcttaaaccattctaccttatgagaaattggatgttcttgcagatagtcattgtgggagaaaacgtttcatttaagtcccagatgaggaccgaaaacttgaaatcagaggagcatctgaaatcaagtaatattaggtaggatgaaaattacaagggatttctacatgtttttattccttttggagatgtgtattattcatactctgtgaatactaataaaattagaaacttcctgaaacatttgattttggccaagatcgggatggggcatgctaaagttttattatttatgtgacttcttgagaaccttggcttatgtttatactttgtcttgagcatttttatcttgtggtccaaggaagcttttgaaaattttactgaagtaaatttttaaaaattttgttttatatgaggtctctgaatatttatgataaacgtagggacacatgatttatacctcatcctttagaatgaaagtttctgtggtttttttacatacttagtaaatcatgtgagtgcaggtaacatcagcttgcagttctgtatgtcagcgtggatgcaatcaagcctcccaagtgcctgtagaaataggtgtatgatagtatgctagagaagccctcttgtacatgtgaattagtaactattgctacagcagcttataatgacagaaaatgcaaagatgcttgatctcaaagatgcagcttttaactgaagagatgatagttgcctctgcgagagtgatacctctagcctggccatttcagaaggccttaaatatgtttatgagctctggggtttggaactagattgcaagggtggaacccaagctctgccatttcctagttatgtgaccttgggcaagttatttaaccactctgtgcatctattccctcatcatcaaaatgggcataatattgttacttacctgatagaattgttgtgagaatcaaagatttagtaatatatgaaagctaagacctggcaaataataagtgattaaactatattattgtttgactgctggttaattcttaacagatgagtttagtctgttatcagttagtgtggtatttctataatttataattgtcttgatatatcaggtccaattttaaaaatgtatttgttaaataacgtaatcagaactaatgtttggagaaaaaaaaa

SEQ ID NO: 352533 - DNA, 1270 bp, Homo sapiens
accatctattggcaggaagggctcctggtcacttttgatgggggctacctcagtgtggaatcttccgacgtgaactggaaaaagaagaaaagcggaggaatgaaaattgtttgccaatcagaagtgagggacttctcagccatggctttcatcacggaccacgtcaattccttgattgatcagtggtttcccgccctgacagccacagagagcgacgggacgccactcatggagcagtacgtgccctgcccggtctgcgagacagcctgggcccagcacacggaccccagtgagaaatcagaggatgtgcagtacttcgacatggaagactgtgtcctgacggccatcgagcgggacttcatctcctgccccagacacccggacctccccgtgccgctgcaggagctggtccctgaactgttcatgaccgacttcccggccaggctcttcctggagaacagcaagctggagcacagcgaggacgagggcagcgtcctgggccagggcggcagtggcaccgtcatctaccgggcccggtaccagggccagcctgtggccgtcaagcgcttccacatcaaaaaattcaagaactttgctaacgtaccggcagacaccatgctgaggcacctgcgggccaccgatgccatgaagaacttctccgagttccggcaggaggccagcatgctgcacgcgctgcagcacccctgcatcgtggcgctcatcggcatcagcatccacccgctctgcttcgccctggagctcgcgccgctcagcagcctcaacaccgtgctgtccgagaacgccagagattcttcctttatacccctgggacacatgctcacccaaaaaatagcctaccagatcgcctcgggcctggcctacctgcacaagaaaaacatcatcttctgtgacctgaagtcggacaacattctggtgtggtcccttgacgtcaaggagcacatcaacatcaagctatctgactacgggatttcgaggcagtcattccatgagggcgccctaggcgtggagggcactcctggctaccaggccccagagatcaggcctcgcattgtatatgatgagaaggtagatatgttctcctatggaatggtgctctacgagttgctgtcaggacagcgccctgcactgggccaccaccagctccagattgccaagaagctgtccaagggcatccgcccggttctggggcagccggaggaagtgcagttccggcgactgcaggcgctcatgatggagtgctgggacacta

SEQ ID NO: 352534 - DNA, 336 bp, Homo sapiens
tgctgttcccatggcagagattatgtatggtttgttaattactatatgcctaccacctagcacagtgtaggcactcagtaaatatgtgttgaatcacacggtattatagctagagacagtgaagatcatctagtccaagcccctgcctttacttagcacttcaaaacgatactgtcagtgttaggctgtgcttatatttataaaaattttcttcatatatctctcacaaatgtatcattgaatcacctttatagagcatgctgtaatgtataatcagttttaagagagaggatccacagcttttaaagtaaacatcagaaaaaacatagacaaaaa

SEQ ID NO: 352535 - DNA, 3308 bp, Homo sapiens
caaagcgcggagcggaggccgaggcgagagcctggcgctgtaggactagaacgaaaggagtgaggcgccgagagcccagataccattttggcgtgagagctggtggttggcaaggccgcgggagtgggaagcgtccgccatgttctgcgaaaaagccatggaactgatccgcgagctgcatcgcgcgcccgaagggcaactgcctgccttcaacgaggatggactcagacaagttctggaggagatgaaagctttgtatgaacaaaaccagtctgatgtgaatgaagcaaagtcaggtggacgaagtgatttgataccaactatcaaatttcgacactgttctctgttaagaaatcgacgctgcactgtagcatacctgtatgaccgcttgcttcggatcagagcactcagatgggaatatggtagcgtcttgccaaatgcattacgatttcacatggctgctgaagaaatggagtggtttaataattataaaagatctcttgctacttatatgaggtcactgggaggagatgaaggtttggacattacacaggatatgaaaccaccaaaaagcctatatattgaagtccggtgtctaaaagactatggagaatttgaagttgatgatggcacttcagtcctattaaaaaaaaatagccagcactttttacctcgatggaaatgtgagcagctgatcagacaaggagtcctggagcacatcctgtcatgaccatgcgccgaggcacttccaggcttcactcaactcatggactcctctgtactcactctctccaccactcccttcacctccctctttgattttagaagctatagacattgtttaagataactaagaatacttggctaagaagtataatttgctaactattaaggactttctttttttaatgttgtacactattcttcctactcttttttggttttggttttgttttgtagagactgtctcactatgttgcccaagctggtctcaaactcctggcctcaagcagtcctcccaccttagcttctcaaagtgttgagatcacaggcgtgagccactgcacccggcccctactcctttttctaataagctgtatctgtaatcacagcattcctacagttgttacagtgtgttttttaaatgaaagtaaacatggttacatttgaatctcttaaataagcagtcacttggctggacaggaagaaggtagatcctgtgtgtcttgttttctggtcatgtgtattgtacaagctagagagctgaatttctgagatacacattttcaaatcacatgcaagtgaagatgatggtctgtagaaattttcagtatatataatgtttaatgacatactaatttatcatctggctatttgggaaggaaggacacacatggattttgcacatttccaccatggtggctggtgtggcttgtggctatggggtgatcaccagtatcaccactttggaaggggacagtgaaattggggctagagaaggaactttgtacagttttccctgagattcagattgactgaaaagtcacatgaagagttgattgtcttttaatggtatgttttaaacagctgacattttaaattttgatgaaatccagtttattcgtttgttcttttatgctttgggtgttgcatccgagaaatcttttcccatcccaagatcacaattttttttcctttttacttctagaagtgttataattttaagctttatactttggtctatgacccgtttttttttttgttttgttttgttttttcgtttgtttctttgttttggagatggagtcttgttctgtcacccaggctggggtgcagtggcgtgatcttggctcactgcaatctctatcccctgggttcaagtgattctcttgtctcagcctcccaagtagctgggattacaggcacaggccgccacgcccggctaatttttgtatttttagtagagacagagttttaccatgttggccaggctggtttcaaactcctgacctcaagtgacccaccttggcctcccaaagttttgggattacaagtgtgggccaccgcggccagcctatgatccattttgaatgaattttttatatggtgcaaggtgtcaatccaccttcactttttcttgggaatatagatatccagctgtttcactaccattttttgaaaggactgccctttgctctatcacctttgcatttttgttaaaaagtagttgtcaatgtatatgtgggtttatttcaggactctgttttgttccattgacctgtttttctctcctgaatgccaataccatatttgtatgtagtgtatgtaattttctaataattcttgaaacagatagtattaatgtgtcatatttttgctgttgtttgtattttttgtggagatggggtttcaccgtgttggccaggctgtgttgaactcctgagctaaagcaatacacttgcctcgtcctccccatgtgctgggattacaggcgtgagccttggtgctggcccagtgtaccacatttctttttgagatttgttttggctatgttaagtcctttgcttttgatgtgaaatttgggaacaggcagggtgtggtggcttatgcctgtaatcctagaactttgggaggcctagatgggtggatcacttgagctcaggagttccagaccagcccgggcctatggcaaaactccgtctctacaaaaaatagaaaaaattagccaggtgtggtggtgcatgcctgtagtcacagttacacggcaggctgaggtgggaggatcacttgaaccccagaggtcaagactgcagtgagctgagatcacaccactgtactccagcctgggtgacaaagtgagactctatctcaaaaagaaattaggatcaacttgtcaatttctacaacaacaacaacaaaaacccctgttgggcaccttgattgagattgcattgaatttatataaaactgttgggagaattgacatcttaataatattgagtcttctggcctataaacaaggtctgtcttcctaggtattaatgttttgtcttctatttctcttaataatcttttgtagttttcagtgtacaggtctaccatgtcagcatttcatagttttgatgctaaatggtattttaaaatttcaaattctaaccacttgttgctagtaaatagaaatacaattgatgttgaacttgtatccttcagccttgctaaactgtgagttctcatggtgtttttgtaaattacatcaacagtcatgtgttctatgaataaagagttttactccttcctttctaatctga

SEQ ID NO: 352536 - DNA, 481 bp, Homo sapiens
tgaccctaaggatttggtgttcactttgttcatgccagggagcaaaagaatgtttcaggtcatgtggttcttgagcttattttcctaacaggcactttttacctcgatggaaatgtgagcagctgatcagacaaggagtcctggagcacatcctgtcatgaccatgcgccgaggcacttccaggcttcactcaactcatggactcctctgctttgttatctttccacggtgctgtgacatttttctcctgcagaaaggagaagacatgccagctttgggatggcggctgccccgggaagagggaggaggctgagaacagaacaggctcccgccctccacagtgctgtggcaggatattattcttactagatatgttgatgggcacatgggtgtttcttacataactattttcctctatgtttgaaatattttatagtttaaaaaattaaaaacaaacttagaagtcaattttaatagaaaa

SEQ ID NO: 352537 - DNA, 2976 bp, Homo sapiens
caaagcgcggagcggaggccgaggcgagagcctggcgctgtaggactagaacgaaaggagtgaggcgccgagagcccagataccattttggcgtgagagctggtggttggcaaggccgcgggagtgggaagcgtccgccatgttctgcgaaaaagccatggaactgatccgcgagctgcatcgcgcgcccgaagggcaactgcctgccttcaacgaggatggactcagacaagttctggaggagatgaaagctttgtatgaacaaaaccagtctgatgtgaatgaagcaaagtcaggtggacgaagtgatttgataccaactatcaaatttcgacactgttctctgttaagaaatcgacgctgcactgtagcatacctgtatgaccgcttgcttcggatcagagcactcagatgggaatatggtagcgtcttgccaaatgcattacgatttcacatggctgctgaagaaatggagtggtttaataattataaaagatctcttgctacttatatgaggtcactgggaggagatgaaggtttggacattacacaggatatgaaaccaccaaaaagcctatatattgaagtccggtgtctaaaagactatggagaatttgaagttgatgatggcacttcagtcctattaaaaaaaaatagccagcactttttacctcgatggaaatgtgagcagctgatcagacaaggagtcctggagcacatcctgtcatgaccatgcgccgaggcacttccaggcttcactcaactcatggactcctctgtactcactctctccaccactcccttcacctccctctttgattttagaagctatagacattgtttaagataactaagaatacttggctaagaagtataatttgctaactattaaggactttctttttttaatgttgtacactattcttcctactcttttttggttttggttttgttttgtagagactgtctcactatgttgcccaagctggtctcaaactcctggcctcaagcagtcctcccaccttagcttctcaaagtgttgagatcacaggcgtgagccactgcacccggcccctactcctttttctaataagctgtatctgtaatcacagcattcctacagttgttacagtgtgttttttaaatgaaagtaaacatggttacatttgaatctcttaaataagcagtcacttggctggacaggaagaaggtagatcctgtgtgtcttgttttctggtcatgtgtattgtacaagctagagagctgaatttctgagatacacattttcaaatcacatgcaagtgaagatgatggtctgtagaaattttcagtatatataatgtttaatgacatactaatttatcatctggctatttgggaaggaaggacacacatggattttgcacatttccaccatggtggctggtgtggcttgtggctatggggtgatcaccagtatcaccactttggaaggggacagtgaaattggggctagagaaggaactttgtacagttttccctgagattcagattgactgaaaagtcacatgaagagttgattgtcttttaatggtatgttttaaacagctgacattttaaattttgatgaaatccagtttattcgtttgttcttttatgctttgggtgttgcatccgagaaatcttttcccatcccaagatcacaattttttttcctttttacttctagaagtgttataattttaagctttatactttggtctatgacccgtttttttttttgttttgttttgttttttcgtttgtttctttgttttggagatggagtcttgttctgtcacccaggctggggtgcagtggcgtgatcttggctcactgcaatctctatcccctgggttcaagtgattctcttgtctcagcctcccaagtagctgggattacaggcacaggccgccacgcccggctaatttttgtatttttagtagagacagagttttaccatgttggccaggctggtttcaaactcctgacctcaagtgacccaccttggcctcccaaagttttgggattacaagtgtgggccaccgcggccagcctatgatccattttgaatgaattttttatatggtgcaaggtgtcaatccaccttcactttttcttgggaatatagatatccagctgtttcactaccattttttgaaaggactgccctttgctctatcacctttgcatttttgttaaaaagtagttgtcaatgtatatgtgggtttatttcaggactctgttttgttccattgacctgtttttctctcctgaatgccaataccatatttgtatgtagtgtatgtaattttctaataattcttgaaacagatagtattaattccgtctctacaaaaaatagaaaaaattagccaggtgtggtggtgcatgcctgtagtcacagttacacggcaggctgaggtgggaggatcacttgaaccccagaggtcaagactgcagtgagctgagatcacaccactgtactccagcctgggtgacaaagtgagactctatctcaaaaagaaattaggatcaacttgtcaatttctacaacaacaacaacaaaaacccctgttgggcaccttgattgagattgcattgaatttatataaaactgttgggagaattgacatcttaataatattgagtcttctggcctataaacaaggtctgtcttcctaggtattaatgttttgtcttctatttctcttaataatcttttgtagttttcagtgtacaggtctaccatgtcagcatttcatagttttgatgctaaatggtattttaaaatttcaaattctaaccacttgttgctagtaaatagaaatacaattgatgttgaacttgtatccttcagccttgctaaactgtgagttctcatggtgtttttgtaaattacatcaacagtcatgtgttctatgaataaagagttttactccttcctttctaatctga

SEQ ID NO: 352538 - DNA, 2995 bp, Homo sapiens
ttttcgaatggatgatattcagtgtgtgcaagttttcttagaattttgtcaaatgatcatctctatgtttgcagatggagtggtttaataattataaaagatctcttgctacttatatgaggtcactgggaggagatgaaggtttggacattacacaggatatgaaaccaccaaaaagcctatatattgaagctggatgcagtggcgcgatctcggctcaacctgcaacctccacctcccaggttcacctcaactgcaacctccacctcccaggtccggtgtctaaaagactatggagaatttgaagttgatgatggcacttcagtcctattaaaaaaaaatagccagcactttttacctcgatggaaatgtgagcagctgatcagacaaggagtcctggagcacatcctgtcatgaccatgcgccgaggcacttccaggcttcactcaactcatggactcctctgtactcactctctccaccactcccttcacctccctctttgattttagaagctatagacattgtttaagataactaagaatacttggctaagaagtataatttgctaactattaaggactttctttttttaatgttgtacactattcttcctactcttttttggttttggttttgttttgtagagactgtctcactatgttgcccaagctggtctcaaactcctggcctcaagcagtcctcccaccttagcttctcaaagtgttgagatcacaggcgtgagccactgcacccggcccctactcctttttctaataagctgtatctgtaatcacagcattcctacagttgttacagtgtgttttttaaatgaaagtaaacatggttacatttgaatctcttaaataagcagtcacttggctggacaggaagaaggtagatcctgtgtgtcttgttttctggtcatgtgtattgtacaagctagagagctgaatttctgagatacacattttcaaatcacatgcaagtgaagatgatggtctgtagaaattttcagtatatataatgtttaatgacatactaatttatcatctggctatttgggaaggaaggacacacatggattttgcacatttccaccatggtggctggtgtggcttgtggctatggggtgatcaccagtatcaccactttggaaggggacagtgaaattggggctagagaaggaactttgtacagttttccctgagattcagattgactgaaaagtcacatgaagagttgattgtcttttaatggtatgttttaaacagctgacattttaaattttgatgaaatccagtttattcgtttgttcttttatgctttgggtgttgcatccgagaaatcttttcccatcccaagatcacaattttttttcctttttacttctagaagtgttataattttaagctttatactttggtctatgacccgtttttttttttgttttgttttgttttttcgtttgtttctttgttttggagatggagtcttgttctgtcacccaggctggggtgcagtggcgtgatcttggctcactgcaatctctatcccctgggttcaagtgattctcttgtctcagcctcccaagtagctgggattacaggcacaggccgccacgcccggctaatttttgtatttttagtagagacagagttttaccatgttggccaggctggtttcaaactcctgacctcaagtgacccaccttggcctcccaaagttttgggattacaagtgtgggccaccgcggccagcctatgatccattttgaatgaattttttatatggtgcaaggtgtcaatccaccttcactttttcttgggaatatagatatccagctgtttcactaccattttttgaaaggactgccctttgctctatcacctttgcatttttgttaaaaagtagttgtcaatgtatatgtgggtttatttcaggactctgttttgttccattgacctgtttttctctcctgaatgccaataccatatttgtatgtagtgtatgtaattttctaataattcttgaaacagatagtattaatgtgtcatatttttgctgttgtttgtattttttgtggagatggggtttcaccgtgttggccaggctgtgttgaactcctgagctaaagcaatacacttgcctcgtcctccccatgtgctgggattacaggcgtgagccttggtgctggcccagtgtaccacatttctttttgagatttgttttggctatgttaagtcctttgcttttgatgtgaaatttgggaacaggcagggtgtggtggcttatgcctgtaatcctagaactttgggaggcctagatgggtggatcacttgagctcaggagttccagaccagcccgggcctatggcaaaactccgtctctacaaaaaatagaaaaaattagccaggtgtggtggtgcatgcctgtagtcacagttacacggcaggctgaggtgggaggatcacttgaaccccagaggtcaagactgcagtgagctgagatcacaccactgtactccagcctgggtgacaaagtgagactctatctcaaaaagaaattaggatcaacttgtcaatttctacaacaacaacaacaaaaacccctgttgggcaccttgattgagattgcattgaatttatataaaactgttgggagaattgacatcttaataatattgagtcttctggcctataaacaaggtctgtcttcctaggtattaatgttttgtcttctatttctcttaataatcttttgtagttttcagtgtacaggtctaccatgtcagcatttcatagttttgatgctaaatggtattttaaaatttcaaattctaaccacttgttgctagtaaatagaaatacaattgatgttgaacttgtatccttcagccttgctaaactgtgagttctcatggtgtttttgtaaattacatcaacagtcatgtgttctatgaataaagagttttactccttcctttctaatctga

SEQ ID NO: 352539 - DNA, 1050 bp, Homo sapiens
caaagcgcggagcggaggccgaggcgagagcctggcgctgtaggactagaacgaaaggagtgaggcgccgagagcccagataccattttggcgtgagagctggtggttggcaaggccgcgggagtgggaagcgtccgccatgttctgcgaaaaagccatggaactgatccgcgagctgcatcgcgcgcccgaagggcaactgcctgccttcaacgaggatggactcagacaagttctggaggagatgaaagctttgtatgaacaaaaccagtctgatgtgaatgaagcaaagtcaggtggacgaagtgatttgataccaactatcaaatttcgacactgttctctgttaagaaatcgacgctgcactgtagcatacctgtatgaccgcttgcttcggatcagagcactcagatgggaatatggtagcgtcttgccaaatgcattacgatttcacatggctgctgaagaaatggagtggtttaataattataaaagatctcttgctacttatatgaggtcactgggaggagatgaaggtttggacattacacaggatatgaaaccaccaaaaagcctatatattgaagtccggtgtctaaaagactatggagaatttgaagttgatgatggcacttcagtcctattaaaaaaaaatagccagcactttttacctcgatggaaatgtgagcagctgatcagacaaggagtcctggagcacatcctgtcatgaccatgcgccgaggcacttccaggcttcactcaactcatggactcctctgctttgttatctttccacggtgctgtgacatttttctcctgcagaaaggagaagacatgccagctttgggatggcggctgccccgggaagagggaggaggctgagaacagaacaggctcccgccctccacagtgctgtggcaggatattattcttactagatatgttgatgggcacatgggtgtttcttacataactattttcctctatgtttgaaatattttatagtttaaaaaattaaaaacaaacttagaagtcaattttaatagaaaa

SEQ ID NO: 352540 - DNA, 300 bp, Homo sapiens
gttcggcgccaaagcgcggagcggaggccgaggcgagagcctggcgctgtaggactagaacgaaaggagtgaggcgccgagagcccagataccattttggcgtgagagctggtggttggcaaggccgcgggagtgggaagcgtccgccatgttctgcgaaaaagccatggaactgatccgcgagctgcatcgcgcgcccgaagggcaactgcctgccttcaacgtgaggggcgggtagacttggacggggcatgccggcgttgggccctgggctctggggcggggcggctccccgtcagg

SEQ ID NO: 352541 - DNA, 1837 bp, Homo sapiens
caaagcgcggagcggaggccgaggcgagagcctggcgctgtaggactagaacgaaaggagtgaggcgccgagagcccagataccattttggcgtgagagctggtggttggcaaggccgcgggagtgggaagcgtccgccatgttctgcgaaaaagccatggaactgatccgcgagctgcatcgcgcgcccgaagggcaactgcctgccttcaacgaggatggactcagacaagttctggaggagatgaaagctttgtatgaacaaaaccagtctgatgtgaatgaagcaaagtcaggtggacgaagtgatttgataccaactatcaaatttcgacactgttctctgttaagaaatcgacgctgcactgtagcatacctgtatgaccgcttgcttcggatcagagcactcagatgggaatatggtagcgtcttgccaaatgcattacgatttcacatggctgctgaagaaatggagtggtttaataattataaaagatctcttgctacttatatgaggtcactgggaggagatgaaggtttggacattacacaggatatgaaaccaccaaaaagcctatatattgaagtccggtgtctaaaagactatggagaatttgaagttgatgatggcacttcagtcctattaaaaaaaaatagccagcactttttacctcgatggaaatgtgagcagctgatcagacaaggagtcctggagcacatcctgtcatgaccatgcgccgaggcacttccaggcttcactcaactcatggactcctctgtactcactctctccaccactcccttcacctccctctttgattttagaagctatagacattgtttaagataactaagaatacttggctaagaagtataatttgctaactattaaggactttctttttttaatgttgtacactattcttcctactcttttttggttttggttttgttttgtagagactgtctcactatgttgcccaagctggtctcaaactcctggcctcaagcagtcctcccaccttagcttctcaaagtgttgagatcacaggcgtgagccactgcacccggcccctactcctttttctaataagctgtatctgtaatcacagcattcctacagttgttacagtgtgttttttaaatgaaagtaaacatggttacatttgaatctcttaaataagcagtcacttggctggacaggaagaaggtagatcctgtgtgtcttgttttctggtcatgtgtattgtacaagctagagagctgaatttctgagatacacattttcaaatcacatgcaagtgaagatgatggtctgtagaaattttcagtatatataatgtttaatgacatactaatttatcatctggctatttgggaaggaaggacacacatggattttgcacatttccaccatggtggctggtgtggcttgtggctatggggtgatcaccagtatcaccactttggaaggggacagtgaaattggggctagagaaggaactttgtacagttttccctgagattcagattgactgaaaagtcacatgaagagttgattgtcttttaatggtatgttttaaacagctgacattttaaattttgatgaaatccagtttattcgtttgttcttttatgctttgggtgttgcatccgagaaatcttttcccatcccaagatcacaattttttttcctttttacttctagaagtgttataattttaagctttatactttggtctatgacccgtttttttttttgttttgttttgttttttcgtttgtttctttgttttggagatggagcctgggtgatagagtgagacactgtcttgcc

SEQ ID NO: 352542 - DNA, 3471 bp, Homo sapiens
caaagcgcggagcggaggccgaggcgagagcctggcgctgtaggactagaacgaaaggagtgaggcgccgagagcccagataccattttggcgtgagagctggtggttggcaaggccgcgggagtgggaagcgtccgccatgttctgcgaaaaagccatggaactgatccgcgagctgcatcgcgcgcccgaagggcaactgcctgccttcaacaattagctgggtgtggtggcacacacctgtagtcccagcaacttaggaggctgaagtgagaggattgcatggctccaggaagttgaaactgcagtgaactgtggtcacgctattacactccagcctgggtgacagactgaatccctgtctcaaaaaggaaaaggaggatggactcagacaagttctggaggagatgaaagctttgtatgaacaaaaccagtctgatgtgaatgaagcaaagtcaggtggacgaagtgatttgataccaactatcaaatttcgacactgttctctgttaagaaatcgacgctgcactgtagcatacctgtatgaccgcttgcttcggatcagagcactcagatgggaatatggtagcgtcttgccaaatgcattacgatttcacatggctgctgaagaaatggagtggtttaataattataaaagatctcttgctacttatatgaggtcactgggaggagatgaaggtttggacattacacaggatatgaaaccaccaaaaagcctatatattgaagtccggtgtctaaaagactatggagaatttgaagttgatgatggcacttcagtcctattaaaaaaaaatagccagcactttttacctcgatggaaatgtgagcagctgatcagacaaggagtcctggagcacatcctgtcatgaccatgcgccgaggcacttccaggcttcactcaactcatggactcctctgtactcactctctccaccactcccttcacctccctctttgattttagaagctatagacattgtttaagataactaagaatacttggctaagaagtataatttgctaactattaaggactttctttttttaatgttgtacactattcttcctactcttttttggttttggttttgttttgtagagactgtctcactatgttgcccaagctggtctcaaactcctggcctcaagcagtcctcccaccttagcttctcaaagtgttgagatcacaggcgtgagccactgcacccggcccctactcctttttctaataagctgtatctgtaatcacagcattcctacagttgttacagtgtgttttttaaatgaaagtaaacatggttacatttgaatctcttaaataagcagtcacttggctggacaggaagaaggtagatcctgtgtgtcttgttttctggtcatgtgtattgtacaagctagagagctgaatttctgagatacacattttcaaatcacatgcaagtgaagatgatggtctgtagaaattttcagtatatataatgtttaatgacatactaatttatcatctggctatttgggaaggaaggacacacatggattttgcacatttccaccatggtggctggtgtggcttgtggctatggggtgatcaccagtatcaccactttggaaggggacagtgaaattggggctagagaaggaactttgtacagttttccctgagattcagattgactgaaaagtcacatgaagagttgattgtcttttaatggtatgttttaaacagctgacattttaaattttgatgaaatccagtttattcgtttgttcttttatgctttgggtgttgcatccgagaaatcttttcccatcccaagatcacaattttttttcctttttacttctagaagtgttataattttaagctttatactttggtctatgacccgtttttttttttgttttgttttgttttttcgtttgtttctttgttttggagatggagtcttgttctgtcacccaggctggggtgcagtggcgtgatcttggctcactgcaatctctatcccctgggttcaagtgattctcttgtctcagcctcccaagtagctgggattacaggcacaggccgccacgcccggctaatttttgtatttttagtagagacagagttttaccatgttggccaggctggtttcaaactcctgacctcaagtgacccaccttggcctcccaaagttttgggattacaagtgtgggccaccgcggccagcctatgatccattttgaatgaattttttatatggtgcaaggtgtcaatccaccttcactttttcttgggaatatagatatccagctgtttcactaccattttttgaaaggactgccctttgctctatcacctttgcatttttgttaaaaagtagttgtcaatgtatatgtgggtttatttcaggactctgttttgttccattgacctgtttttctctcctgaatgccaataccatatttgtatgtagtgtatgtaattttctaataattcttgaaacagatagtattaatgtgtcatatttttgctgttgtttgtattttttgtggagatggggtttcaccgtgttggccaggctgtgttgaactcctgagctaaagcaatacacttgcctcgtcctccccatgtgctgggattacaggcgtgagccttggtgctggcccagtgtaccacatttctttttgagatttgttttggctatgttaagtcctttgcttttgatgtgaaatttgggaacaggcagggtgtggtggcttatgcctgtaatcctagaactttgggaggcctagatgggtggatcacttgagctcaggagttccagaccagcccgggcctatggcaaaactccgtctctacaaaaaatagaaaaaattagccaggtgtggtggtgcatgcctgtagtcacagttacacggcaggctgaggtgggaggatcacttgaaccccagaggtcaagactgcagtgagctgagatcacaccactgtactccagcctgggtgacaaagtgagactctatctcaaaaagaaattaggatcaacttgtcaatttctacaacaacaacaacaaaaacccctgttgggcaccttgattgagattgcattgaatttatataaaactgttgggagaattgacatcttaataatattgagtcttctggcctataaacaaggtctgtcttcctaggtattaatgttttgtcttctatttctcttaataatcttttgtagttttcagtgtacaggtctaccatgtcagcatttcatagttttgatgctaaatggtattttaaaatttcaaattctaaccacttgttgctagtaaatagaaatacaattgatgttgaacttgtatccttcagccttgctaaactgtgagttctcatggtgtttttgtaaattacatcaacagtcatgtgttctatgaataaagagttttactccttcctttctaatctga

SEQ ID NO: 352543 - DNA, 3354 bp, Homo sapiens
caaagcgcggagcggaggccgaggcgagagcctggcgctgtaggactagaacgaaaggagtgaggcgccgagagcccagataccattttggcgtgagagctggtggttggcaaggccgcgggagtgggaagcgtccgccatgttctgcgaaaaagccatggaactgatccgcgagctgcatcgcgcgcccgaagggcaactgcctgccttcaacaattagctgggtgtggtggcacacacctgtagtcccagcaacttaggaggctgaagtgagaggattgcatggctccaggaagttgaaactgcagtgaactgtggtcacgctattacactccagcctgggtgacagactgaatccctgtctcaaaaaggaaaaggaggatggactcagacaagttctggaggagatgaaagctttgtatgaacaaaaccagtctgatgtgaatgaagcaaagtcaggtggacgaagtgatttgataccaactatcaaatttcgacactgttctctgttaagaaatcgacgctgcactgtagcatacctgtatgaccgcttgcttcggatcagagcactcagatgggaatatggtagcgtcttgccaaatgcattacgatttcacatggctgctgaagaagtccggtgtctaaaagactatggagaatttgaagttgatgatggcacttcagtcctattaaaaaaaaatagccagcactttttacctcgatggaaatgtgagcagctgatcagacaaggagtcctggagcacatcctgtcatgaccatgcgccgaggcacttccaggcttcactcaactcatggactcctctgtactcactctctccaccactcccttcacctccctctttgattttagaagctatagacattgtttaagataactaagaatacttggctaagaagtataatttgctaactattaaggactttctttttttaatgttgtacactattcttcctactcttttttggttttggttttgttttgtagagactgtctcactatgttgcccaagctggtctcaaactcctggcctcaagcagtcctcccaccttagcttctcaaagtgttgagatcacaggcgtgagccactgcacccggcccctactcctttttctaataagctgtatctgtaatcacagcattcctacagttgttacagtgtgttttttaaatgaaagtaaacatggttacatttgaatctcttaaataagcagtcacttggctggacaggaagaaggtagatcctgtgtgtcttgttttctggtcatgtgtattgtacaagctagagagctgaatttctgagatacacattttcaaatcacatgcaagtgaagatgatggtctgtagaaattttcagtatatataatgtttaatgacatactaatttatcatctggctatttgggaaggaaggacacacatggattttgcacatttccaccatggtggctggtgtggcttgtggctatggggtgatcaccagtatcaccactttggaaggggacagtgaaattggggctagagaaggaactttgtacagttttccctgagattcagattgactgaaaagtcacatgaagagttgattgtcttttaatggtatgttttaaacagctgacattttaaattttgatgaaatccagtttattcgtttgttcttttatgctttgggtgttgcatccgagaaatcttttcccatcccaagatcacaattttttttcctttttacttctagaagtgttataattttaagctttatactttggtctatgacccgtttttttttttgttttgttttgttttttcgtttgtttctttgttttggagatggagtcttgttctgtcacccaggctggggtgcagtggcgtgatcttggctcactgcaatctctatcccctgggttcaagtgattctcttgtctcagcctcccaagtagctgggattacaggcacaggccgccacgcccggctaatttttgtatttttagtagagacagagttttaccatgttggccaggctggtttcaaactcctgacctcaagtgacccaccttggcctcccaaagttttgggattacaagtgtgggccaccgcggccagcctatgatccattttgaatgaattttttatatggtgcaaggtgtcaatccaccttcactttttcttgggaatatagatatccagctgtttcactaccattttttgaaaggactgccctttgctctatcacctttgcatttttgttaaaaagtagttgtcaatgtatatgtgggtttatttcaggactctgttttgttccattgacctgtttttctctcctgaatgccaataccatatttgtatgtagtgtatgtaattttctaataattcttgaaacagatagtattaatgtgtcatatttttgctgttgtttgtattttttgtggagatggggtttcaccgtgttggccaggctgtgttgaactcctgagctaaagcaatacacttgcctcgtcctccccatgtgctgggattacaggcgtgagccttggtgctggcccagtgtaccacatttctttttgagatttgttttggctatgttaagtcctttgcttttgatgtgaaatttgggaacaggcagggtgtggtggcttatgcctgtaatcctagaactttgggaggcctagatgggtggatcacttgagctcaggagttccagaccagcccgggcctatggcaaaactccgtctctacaaaaaatagaaaaaattagccaggtgtggtggtgcatgcctgtagtcacagttacacggcaggctgaggtgggaggatcacttgaaccccagaggtcaagactgcagtgagctgagatcacaccactgtactccagcctgggtgacaaagtgagactctatctcaaaaagaaattaggatcaacttgtcaatttctacaacaacaacaacaaaaacccctgttgggcaccttgattgagattgcattgaatttatataaaactgttgggagaattgacatcttaataatattgagtcttctggcctataaacaaggtctgtcttcctaggtattaatgttttgtcttctatttctcttaataatcttttgtagttttcagtgtacaggtctaccatgtcagcatttcatagttttgatgctaaatggtattttaaaatttcaaattctaaccacttgttgctagtaaatagaaatacaattgatgttgaacttgtatccttcagccttgctaaactgtgagttctcatggtgtttttgtaaattacatcaacagtcatgtgttctatgaataaagagttttactccttcctttctaatctga

SEQ ID NO: 352544 - DNA, 377 bp, Homo sapiens
ccgggaggcagaagttgcagtgagccaagatcacaccattgcactccagcctaggcaacaagaacgaaactatgtctcaaaaaaaagaaaaaagaaaagataaagaatatggaggaaaggcttcatgacattggattttgcagtggtttcttggcatgacatcaaaagtacaggcaacaaaagtaaaacaattaaacataaattactgtacatcataaattaaacataaattagaatacatcaaaattaaaaacttttgtgcatcaaacagtaacagaatgaaaggcagcctatggaatgggagaaaaatgtttgcaaatcttatatctgataagggattaatacccagaatacacaaacaactcctataactcaac

SEQ ID NO: 352545 - DNA, 467 bp, Homo sapiens
aacagaggtggacatttcaagttcaattgtgtttgatgactcattaggttaaagaagctgtcaggtggtaaagtcaccccagagaaatgaagggtattctccagaaagtgtggaaaccctgccactgcaggctaatcaggtgtgttgacacatcagtgaggagctggctcacaacacctggagaagcaagccatggaggtggagcagaatcaaatgagcctcccacaaggcacaaagattctcagcaagtcaggacatgttacacatggaaattcctactcacccaagacagatgcctattgctgtgtctctctcttcccatactttcacattgtcttgaaatataagcaagatgtgagagcccacagtgctatggtaggagccatctgcagtgccatggtcacctgtgtcagtggtggaacaaagagggaaagatggcttccacatccagtggtgacttgagtgga

SEQ ID NO: 352546 - DNA, 1857 bp, Homo sapiens
agcggatgctggggctgtaaggcgcgcgcggtcagctgttggcggtgcagggaggaggacgccggggctcgccttccctcctctgccgccgctgccgccatgattccggtgtcgctggtggtggtggtggtgggtggctggactgtcgtctacctgaccgacttggtgctgaagtcatctgtctattttaaacattcttatgaagactggctggaaaacaacggactgagcatctcccctttccacataagatggcaaactgctgttttcaatcgtgccttttacagttggggacggcggaaagcaaggatgctttaccaatggttcaattttggaatggtgtttggcgtaattgccatgtttagctcattttttctccttggaaaaacgctgatgcagactttggcacaaatgatggctgactctccctcttcttattcttcctcctcttcttcctcttcctcctcttcttcctcttcctcttcttcatcttcttcctcttcctcgcttcacaatgaacaggtgttacaagttgtggttcctggtataaatttacccgtcaatcaactgacctatttcttcacggcagttctcattagtggtgttgtacatgaaattggacatgggatagcagctattagggaacaagttcgatttaatggctttgggatttttctcttcattatttatcctggagcatttgttgatctgttcaccactcatttgcaacttatatcgccagtccagcagctaaggatattttgtgcagatttctccatcacacaagacctggagatcccggcagatattgtggagctccacgacatcaatgtggagccccttcctatggaggacattccgacggaaagcgtccagtacgaggatgtggatggcaattggatctacggtggccacaaccatccgccattgatggtgttgcagccgctcttcacgaacacgggctatggcgaccacgaccaggaaatgcttatgttgcagacacaagaggaagtggtgggctattgcgactcagacaaccagctaggcaacgacttggaggaccagttggccctcccggatagcattgaagacgagcacttccagatgaccctggcctctctgtcggcctcggcggcatcaacatcaacatcaacccagagccgcagcaaaaagcccagcaaaaagcccagcggcaagagtgccaccagcactgaggccaacccggcaggcagcagctccagcctgggcacgaggaagtgggagcagaagcaaatgcaggtcaaaacgctggagggtgagttttccgtgactatgtggtcccctaacgataacaatgaccaaggggcagtgggtgaaggccaggctgaaaacccacctgattattccgagtacttgaaagggaagaaacttcctcctggggggttaccaggcattgatctctcagatcctaaacagctggcagaatttactaaagtgaagcccaaaaggtccaaaggagaacctcccaaaacagtcccttgctcttatagcggctgcgaaaagatgttccgggattacgccgccatgagaaaacatctccacatccacgggcccagagtccacgtatgtgcagaatgtggcaaagcttttcttgagagctcaaagctgagacgacaccagctggtccacaccggcgagaagccctttcagtgcacattcgaaggctgcgggaaacgcttttcccttgatttcaatttgcgcacacacttgcgcatccacaccggcgataagcccttcgtgtgccccttcgatgtttgcaacaggaagttcgctcagtcaaccaacctgaaaacccacatattaacgcatgtgaagacc

SEQ ID NO: 352547 - DNA, 185 bp, Homo sapiens
ttacagttggggacggcggaaagcaaggatgctttaccaatggtattcttcatcttcttttgtttggtttaggttaatcattaagtgatcacgacagacagcttgttaaattaactatttccattactttgcagttttctgagttttaaaatattgacaatattaaaactttctggttttatata

SEQ ID NO: 352548 - DNA, 4549 bp, Homo sapiens
  misc_feature (4433)..(4433): n is a, c, g, or t
  misc_feature (4443)..(4443): n is a, c, g, or t
agcggatgctggggctgtaaggcgcgcgcggtcagctgttggcggtgcagggaggaggacgccggggctcgccttccctcctctgccgccgctgccgccatgattccggtgtcgctggtggtggtggtggtgggtggctggactgtcgtctacctgaccgacttggtgctgaagtcatctgtctattttaaacattcttatgaagactggctggaaaacaacggactgagcatctcccctttccacataagatggcaaactgctgttttcaatcgtgccttttacagttggggacggcggaaagcaaggatgctttaccaatggttcaattttggaatggtgtttggcgtaattgccatgtttagctcattttttctccttggaaaaacgctgatgcagactttggcacaaatgatggctgactctccctcttcttattcttcctcctcttcttcctcttcctcctcttcttcctcttcctcttcttcatcttcttcctcttcctcgcttcacaatgaacaggtgttacaagttgtggttcctggtataaatttacccgtcaatcaactgacctatttcttcacggcagttctcattagtggtgttgtacatgaaattggacatgggatagcagctattagggaacaagttcgatttaatggctttgggatttttctcttcattatttatcctggagcatttgttgatctgttcaccactcatttgcaacttatatcgccagtccagcagctaaggatattttgtgcaggtatctggcataattttgtccttgcactcttgggtattttagctcttgttctcctcccagtaattctcttgccattttactacactggagttggggtgctcatcactgaagttgctgaggactctcctgccattggacccagaggcctttttgtgggagaccttgtcacccatctacaggattgtcctgttactaatgtgcaagattggaatgaatgtttagataccatcgcctatgagccccaaattggttactgtataagtgcatcaactttacagcagttaagtttcccagttagagcatacaaacgactagatggttcaactgaatgctgtaacaatcacagcctcacagatgtgtgcttttcctacagaaataattttaataagcgtttgcatacatgtcttcctgcccggaaagcagttgaagcaactcaagtttgcagaaccaataaagactgtaaaaaaagctcaagttcaagtttctgtataataccttctttggaaactcacactcgcttaataaaagtaaaacacccacctcagattgatatgttatacgtaggacatcctctgcatcttcactacacagtgagcatcaccagttttatcccacgttttaactttctaagcatagatctgccagtggttgtggagacatttgtcaagtacctgatttccctctcaggagctctggctattgttaatgcagtaccctgctttgctttggatggacaatggattctaaactctttcttggatgccacccttacctcagtgattggagacaatgatgtcaaagatctaatagggtttttcatcttgctgggtggcagtgtacttttggctgccaatgtgaccctgggactctggatggttacagcacggtaatgtttgcactcatctgacagaatccctgagttacagtatacagctatgtggtaatattcattgccattgaaattcttacttggtatgaaatataaagtgtttccttaaaattacatcttagccaacaaccctgagctcctcccatatccagagtacccaaactctgtggtagaagataagcagaagaaatgaaaggcatagtccctgactatattctaatttaggactgaatgtacccagatgcttgtggaataatatctaagcaagtgcaaattcatgtaataccgttttgtctgattacatattgtgttgaaatagtataaaggagaacagaactgggtggaattaattgggaaaaacttcttacaaaagcatcattaatcaaaatttgaaggagaccagactttggccaagtggaaggatgaccattgtcttggcctgtatctcttgtcctttgtcttgtttgaaaagtattttaaaacttaatggtgtattattttgtgctctgaaagctgaggtctgattacaattagtaaaattctatagaaggaatctgctgacgtggaaagggaaaaatctttgtcaaatgataccaaataaatggaacaaaacaggaagtagggcctatgatatcgtgagacatgttttgccccacaagagttgcatcttttataaggtgtctctgccccctcataaagcagcactagctttgacatccacggtgagctgcaggaagcatcacacaccagcagcatgtgagcagagggaggcagttggggttgaacttcggaactaggccgggtctcctgacagatcacaagacaccccagaggatcttcagcagtcctacttcccattctctatagagctttgaagcttggaacccttccagggtaaacattttctcttgtgctgctcaggacatctggggcctagctcctgggttcctgtctccaagaagcaatgaccttaaactctgagccatactctgtcctcaccagcggctcccatgtttttctgtgtcaggttattaagtacctagtccttgttttctgtctctctcctaagctacctctctgggtccacagaagacttggtagtatagtgagaatggctatacgtgagtacaaacatggattttccagggcttgggaactgattcttgagcccagaagagccacgcctgctttgaggtcttttggagtggagatgcagccctgggaaatttggggagtcagcaggccagtgtgaagctattggtcctaggagtatatgagcttgctgtttctttgatggaaaatacatgcttctcttgtatactcagaagtgactaagggcaataactcattaatagccatctatccaacttctttactgagtgatgtattccatggggttacctttttcagattattgagttgctctgtaagcactaaaactttttaatcatttttaagaaactttttagattgtattacaaatttgccttaacagtaattagatgttgaatataattttaacattttattaatgacttgggtcatcagttaataccagtactaaaaccatacgaattattggtttattccagaaaatacagtatttgttctatttttaggtagacaatcatttgggatcagagtacattagcatagtaatgctcagtcagacctgttcaagtagtagagcttggagaatgccatgaaatacttatataattaatttgattgcatgaactaagcaattttactaatgaaaaggttgtatatgtgcaagtcacttttttaaaaaccaagaaaaaactttaatagaggaaatcttattcattaatttatttttctgagtaaaaaaacgaaacccaaatctcattttatttcaactgttaaacattttgatctgttgacccataggatcaggatttgggaaccactttactaggaaagagcagatcagtaccatttgtataaaaccggcctcattatgtaagaaagaaaatgttacgtgttttcttctttagcttggttgtgggcacttctacagcaaggaccatatcatattcatctttgcatccctggcacagtgcatgagacataagtacttaataaatgcagttgaatggataatgattagtgttatttatggattagaaaaagcatgtttctatttaagtaagctgtaaaaagtattattgaatatttactgtaaatatatgttcacataaaaaaataacttggagggtctttgtgtccctggcatattatcatcttcatggaaagaatccactgtggtttctgtagagtgattggaaaaatggattattttgaggattgaagaaagtgttctttctgcgttgtcactttgttcaacagtaaaactttattctcagtgttcctactctgcattgtttacatttttgacagttttttttaatcacctacaatctgtaaagaatgtatatattcttttcagcatctcagtttgaaaagacatgcagttaaacttgaccttttgataatcgctcttacaggtcattgtctgttctaacagcaaattgtaaacatgtgcttcatagatattgtggctctcagtcatcactttgtcctatggtatttattgaatgttcacatactaatggtgcacaggtgtttttttctataaatcttctgactgtcctgtaattcattcttaagctttaacttgaaggtatcgtaattgccggcatttgatgtttagcaataaaagaataaatgtgtaccagcattttatgtttaaanacaaacaacnacaacaattttggccccccccccctaaaaatctaaacacattggggggcgcccccggaaaacatatgcccacgtccaagaacccgggaccaccgtggggttcccca

SEQ ID NO: 352549 - DNA, 1626 bp, Homo sapiens
gacaccagtagccgcggacctcggtctggcggcttctctgttgacaactcagctggttccacaccctggcaattgtgaagagttggccaaatgtttgtccactgagctgatctcctctctggagcaccggggccaccaggagggagccaagacaatgcaaactccagtgaacattcccgtgcctgtgctccggctgccccggggccctgatggcttcagccgtggctttgcccctgatggacgcagagcccccttgaggccagaggttcctgaaatccaggagtgtcccatagctcaagaatccctggaatcccaggagcagcgggcacgagccgcccttcgggagcgttacctccgcagcctgctggccatggtgggtcatcaggtgagcttcacgttgcacgagggtgtgcgtgtggccgcccactttggagccaccgacctggatgtggccaacttctacgtgtcacagctgcagactcccataggtgtgcaagcagaggcgctgctccgatgtagtgacattatttcatataccttcaagccataaagatattgtgttcacttttctgcttgaggctaaggcactgtatcccaggcctcccaatgttcccgagccaggaactctgggccccatggagttatgagctcccttggaattttgagccaagctttaagcaagtctggactcctgagacctcctgggtctagtcagtaaaattctgcaactctaggaattctaagatcccattggaaggaatgctctacctcacagaactctgaaccctacagaaatatgggcctgctgccatttcctgaagaccggggcatcggggtggggtgataaaggatacaacctgcacagggggaagttattaaagaggctgcaaagtccagccaccctgaagatactccccagtgctcccctcctgctaaagaaccagttaccccaggaaaattcgactcctgtttttctttaattaactataccgacggggatggagtcatctttaggggctggtagggtggttatccaagggctgaatccagtggagctgggccaagtacgacaggagtccagataaaggtgtaggggctgcacggccgcaagtctcctggaaaggctggagtgaccggcatgccgggattgggagattaggatttgatttcattttggggcgggcggtggctcgtgctgggtcacgtggtcgtgcccaagcgctcctcctgttgccccacctgtggttgctgtggactgcacacgacagcagattcgctgtcccctcgttggaggcgaatggtcggaccccgagtggcggcgcccctgataaaaggccgaggattcgcgatcagggtgcaacttcactccctcctctcttctctccagccttgcagcgtggccgttcacatcacgcgcttcactaagcctcctatcactagtaaccttccagcgcattgtttaaaaagaaagcagtttctgtccctttctgtagttcctttaagttcaggatgtaagcgaagccttccattaagtaaaggtgtgtgtcgtttcgtctcagtcgcgaaagtgcggcggccgatgatgaaccgcgccaggagcagcctcagcggccatcagtccattcg

SEQ ID NO: 352550 - DNA, 1599 bp, Homo sapiens
gacaccagtagccgcggacctcggagtacaaggtggtggggggtcgccagcaggttccctctccccggccccagctctggacgctcaccccagtgcaacgccctgagtgacggaaagagccaagacaatgcaaactccagtgaacattcccgtgcctgtgctccggctgccccggggccctgatggcttcagccgtggctttgcccctgatggacgcagagcccccttgaggccagaggttcctgaaatccaggagtgtcccatagctcaagaatccctggaatcccaggagcagcgggcacgagccgcccttcgggagcgttacctccgcagcctgctggccatggtgggtcatcaggtgagcttcacgttgcacgagggtgtgcgtgtggccgcccactttggagccaccgacctggatgtggccaacttctacgtgtcacagctgcagactcccataggtgtgcaagcagaggcgctgctccgatgtagtgacattatttcatataccttcaagccataaagatattgtgttcacttttctgcttgaggctaaggcactgtatcccaggcctcccaatgttcccgagccaggaactctgggccccatggagttatgagctcccttggaattttgagccaagctttaagcaagtctggactcctgagacctcctgggtctagtcagtaaaattctgcaactctaggaattctaagatcccattggaaggaatgctctacctcacagaactctgaaccctacagaaatatgggcctgctgccatttcctgaagaccggggcatcggggtggggtgataaaggatacaacctgcacagggggaagttattaaagaggctgcaaagtccagccaccctgaagatactccccagtgctcccctcctgctaaagaaccagttaccccaggaaaattcgactcctgtttttctttaattaactataccgacggggatggagtcatctttaggggctggtagggtggttatccaagggctgaatccagtggagctgggccaagtacgacaggagtccagataaaggtgtaggggctgcacggccgcaagtctcctggaaaggctggagtgaccggcatgccgggattgggagattaggatttgatttcattttggggcgggcggtggctcgtgctgggtcacgtggtcgtgcccaagcgctcctcctgttgccccacctgtggttgctgtggactgcacacgacagcagattcgctgtcccctcgttggaggcgaatggtcggaccccgagtggcggcgcccctgataaaaggccgaggattcgcgatcagggtgcaacttcactccctcctctcttctctccagccttgcagcgtggccgttcacatcacgcgcttcactaagcctcctatcactagtaaccttccagcgcattgtttaaaaagaaagcagtttctgtccctttctgtagttcctttaagttcaggatgtaagcgaagccttccattaagtaaaggtgtgtgtcgtttcgtctcagtcgcgaaagtgcggcggccgatgatgaaccgcgccaggagcagcctcagcggccatcagtccattcg

SEQ ID NO: 352551 - DNA, 737 bp, Homo sapiens
gacaccagtagccgcggacctcggagtacaaggtggtggggggtcgccagcaggttccctctccccggccccagctctggacgctcaccccagtgcaacgccctgagtgacggaaagaggtctggcggcttctctgttgacaactcagctggttccacaccctggcaattgtgaagagttggccaaatgtttgtccactgagctgatctcctctctggagcaccggggccaccaggagggaggtctgtgaaacccctgcccctgccattgacctaagtgttgggctcttgaatctaacagactagtttttcaagtcgtgggggatgggcttgggcatttttccctgaaaccttcggaaatccttgccttggagactgaaaggataaaggcctctggggccaggtcaccagggacaatggataacgcctgcctctaccctcctgggcacaccctgtgtgatctttcttaaaccagtttcttatcaggtcacaccttggctccacagtctgcctttctacatggggcacgggtgaggacctgagtttgctccctcttcctccaccctccagcttgcaccaaggaaatgatttttttttttttgaaacagagtctcactctgtggcccaggctggggtgcagaggcgtgatctccgctcactgcaacctccgtctccctggttcaagggattctcctgcctcagcctcctgcgtagctgggattacagatgcgtgccacc

SEQ ID NO: 352552 - DNA, 355 bp, Homo sapiens
gagcggaatcgctcgctcagtctgagcctggaggtgggaagaaggtccagtccgaacgcccagggcggtgtggggagtggacgcctgggggccgggaggacctacttagtataagaaaaggagagcaatgggtggtcagggcggaattgaaaggaaactgaccggccccaggggagaaggggaggggagagattctgtgcttggggttctgaccctctcgggtggccccatttagctaatttgcatcaagattcagcagccgatgatgtctgtatgtgtgtgtgtgtctgtggacacgtcaacaccttggttaattaattaggtctggcggcttctctgttgacaactcagctgg

SEQ ID NO: 352553 - DNA, 1722 bp, Homo sapiens
gacaccagtagccgcggacctcggagtacaaggtggtggggggtcgccagcaggttccctctccccggccccagctctggacgctcaccccagtgcaacgccctgagtgacggaaagaggtctggcggcttctctgttgacaactcagctggttccacaccctggcaattgtgaagagttggccaaatgtttgtccactgagctgatctcctctctggagcaccggggccaccaggagggagccaagacaatgcaaactccagtgaacattcccgtgcctgtgctccggctgccccggggccctgatggcttcagccgtggctttgcccctgatggacgcagagcccccttgaggccagaggttcctgaaatccaggagtgtcccatagctcaagaatccctggaatcccaggagcagcgggcacgagccgcccttcgggagcgttacctccgcagcctgctggccatggtgggtcatcaggtgagcttcacgttgcacgagggtgtgcgtgtggccgcccactttggagccaccgacctggatgtggccaacttctacgtgtcacagctgcagactcccataggtgtgcaagcagaggcgctgctccgatgtagtgacattatttcatataccttcaagccataaagatattgtgttcacttttctgcttgaggctaaggcactgtatcccaggcctcccaatgttcccgagccaggaactctgggccccatggagttatgagctcccttggaattttgagccaagctttaagcaagtctggactcctgagacctcctgggtctagtcagtaaaattctgcaactctaggaattctaagatcccattggaaggaatgctctacctcacagaactctgaaccctacagaaatatgggcctgctgccatttcctgaagaccggggcatcggggtggggtgataaaggatacaacctgcacagggggaagttattaaagaggctgcaaagtccagccaccctgaagatactccccagtgctcccctcctgctaaagaaccagttaccccaggaaaattcgactcctgtttttctttaattaactataccgacggggatggagtcatctttaggggctggtagggtggttatccaagggctgaatccagtggagctgggccaagtacgacaggagtccagataaaggtgtaggggctgcacggccgcaagtctcctggaaaggctggagtgaccggcatgccgggattgggagattaggatttgatttcattttggggcgggcggtggctcgtgctgggtcacgtggtcgtgcccaagcgctcctcctgttgccccacctgtggttgctgtggactgcacacgacagcagattcgctgtcccctcgttggaggcgaatggtcggaccccgagtggcggcgcccctgataaaaggccgaggattcgcgatcagggtgcaacttcactccctcctctcttctctccagccttgcagcgtggccgttcacatcacgcgcttcactaagcctcctatcactagtaaccttccagcgcattgtttaaaaagaaagcagtttctgtccctttctgtagttcctttaagttcaggatgtaagcgaagccttccattaagtaaaggtgtgtgtcgtttcgtctcagtcgcgaaagtgcggcggccgatgatgaaccgcgccaggagcagcctcagcggccatcagtccattcg

SEQ ID NO: 352554 - DNA, 303 bp, Homo sapiens
ttgcccaggctggtcttgaactcctgagctcaagcaatccaaccaccttggcctccccaagtgctgggattacaggtgtgagccaccgtgcctagccagatctgtgatttaagatgattttccagatcaccaaggacatagaaataatgttaaattcaacattatgaaagatagatgtaaagggaagaacgtagctggttgagaatggtatgcaggtgggtttcaaacctcacttgttctctctcttagaccccctccctccaaacataaacctcagcttttgaatcacatgagatgacttga

SEQ ID NO: 352555 - DNA, 508 bp, Homo sapiens
caaaaggaggccccctaaattaaaaatgggtaagccgtgcaacaccctgcaaaaaatttaaaattttccccaaagaaacaaaaggtcgttcttgcccccaacagacacaagccacctcagcttgtggctcttggcccccagccccaccaacccacctgttcatttattcaacagacaatgacagctgatatttattggacatttgcaccatgccaagcattcggcttggattatcccatttgtttctcacagccggtatttattgtctgctcctctgtgccaggtgctgtgctctgggcaggggcactgcatgggctgcctgccctggtggagcttgtggtctgatgggtgaggctgacccaagcccaccccattgccaacagggccagggcaagagtacacacaggggcctcataccatatgtctaaatatttaaaagttatcaatcaagctaacaactgttaaataaaatatgttctattctcctactttgaaaaatgtgctgaaa

SEQ ID NO: 352556 - DNA, 4742 bp, Homo sapiens
gggccaggctgtaccggtcggaaggtgtacgatgcagcgcgggagccgcacagtcgaggagggagcgcgggacgccgagcccacgcgcgcctgccggggcaagtggaggcgaagccggcgagcggacgccccgagggtcggggaaggaaccgaggtccggtccccttcttatccagcccgagacatcgagctccggtgggcgtccctgcgctgggaatcccgctcggagtttttccaggcccggccgggctgctccgggaaaggccctgctcctgttccgcgcagcctctccggcctcgcccctggaaaccccgcccagggcgatggtaggggcctaacctgcagccaccgccggctccgcccacccagcccatgggctccctgaggcccgcccagccgacgaaaacgccgcggctgcgatggcggcggacgtggtgggggacgtgtacgtgctggtggagcaccccttcgagtacaccggcaaggacgggcgccgcgtggccatccggccgaatgagcgctaccggctgctgcggcgcagcaccgagcactggtggcacgtgcggcgtgagcccggcggccgccccttctacctgcctgcgcagtacgtgcgcgagctgcccgcgctgggcaaccctgccgccgccgcgccgccaggtccccacccgagccccgcggcccctgagccgctcgcctacgactaccggtttgtgagcgcggcggcgaccgcgggccccgacggcgcccccgaggagtccggaggccgagccagctccctgtgcggccctgcgcaacgcggcgccgcgacccagcgcagcagcctggcgcccggcctgccagcctgcctgtacctgcggcccgcggcgcccgtgcggcccgcgcagtccctgaacgacctggcctgcgccgccgtctcgcctcccgccggcctcctaggaagcagcggcagcttcaaggcctgcagcgtggcgggctcctgggtgtgcccgcggcctctggcgcgcagcgactcagagaacgtctacgaggtcatccaggacttgcacgtcccgccgcgggaggagagcgcagagcaggtggacgacccaccggagcccgtgtacgcgaacatagagaggcagccccgggccacttcaccgggcgccgctgcagccccccttcccagcccggtgtgggagacgcacacggacgcgggcaccgggcgcccctactactacaacccagacacgggagttaccacctgggagtcgccctttgaggctgccgagggtgccgccagcccagccacctcccctgcctcggtggacagccacgtgagccttgagaccgagtggggccagtactgggatgaggagagccgcagggtgttcttctacaacccgctgacgggcgagacggcctgggaggacgaggccgagaacgagcccgaggaggagttggagatgcagccgggcctgagccctggcagcccaggggacccgcgggtgaggggcagggccagagtgggcggttctacctctgagcgcctctgatcccgcctcctgctcccagaggcccagggacacacggccccccactcccgagacggactaccccgagtcgctgaccagttaccccgaggaggactattctcccgtgggctctttcggtgagcccggccctacctctcccttgaccacaccccccggctggtcttgtcatgtcagccaggacaagcagatgctctacaccaaccacttcactcaggagcagtgggtgaggctggaggacccccacgggaagccatacttctacaatccagaggactcctctgttcgatgggagctgccccaggtccctgtccctgcccctcgaagcatccataaatccagccaggatggtgacaccccagcccaggccagccctccagaggagaaggtcccagcagagctggatgaggttgggagctgggaggaagtctctcctgccacagctgctgtgaggaccaagaccttggacaaggcaggggtgctccatcgcaccaagacggcagacaagggaaagcggctccggaagaagcactggagtgcctcctggactgtgctggagggtggcgtcctgacattcttcaaggactcaaagacctcggctgcaggcggcctgaggcagccttccaagttttccacccctgagtacacagtggagctgaggggggccactctctcctgggcccccaaagacaaatccagtaggaagaatgtgctggagctacggagccgagatggctctgagtacctgatccagcacgactcggaggccatcatcagcacctggcataaggccattgctcagggcatccaggagctgtccgcagagctgcccccagaggagagcgagagcagcagagtggacttcgggtcgagcgagcgcttgggaagctggcaggagaaagaggaggacgcgcgaccgaatgcagccgcgcccgccctgggccccgtgggcctggagagcgacttgagcaaggtccggcacaagctccgcaagttcctccagagccggcccacactgcagtcgctgcgggagaagggctacatcaaagaccaggtgttcggctgcgcgctggccgcgctgtgtgagcgcgagaggagccgggtgccacgcttcgtgcagcagtgcatccgcgccgtcgaggcccgcgggctggacatcgacgggctgtaccgcatcagtggaaacctggccaccatccagaagctacgctataaggtggaccacgatgagcgccttgacctggatgacgggcgctgggaggacgtccacgttatcaccggagccctgaagctcttctttcgggagctgcccgagcccctcttccccttctcgcacttccgccagttcattgcggccatcaagttgcaggaccaggcccggcgcagccgctgtgtgcgtgacttggtgcgctcgctgcccgctcccaaccacgacactctgcggatgctcttccagcacctctgccgggtgatcgagcacggcgagcagaaccgcatgtcggtgcagagcgtggccattgtgttcgggcccacgctgctgcggcccgaggtggaagagaccagcatgcccatgaccatggtgttccagaaccaggtggtggagctcatcctgcagcagtgcgcggacatcttcccgccgcactgactgctggcctgtgactggggcggcggccgcggtcctgccacacaagctgggcggcggaggccacgcagccgggccttcttctctctgggaccctccgccagcgcatagccgcaggccggtgtgacttctgcaccctcggttctgagggtacggtgacccctagtgggcagtttgcaaaatgtgattccttcttcccaactccccatccccccttcccttcccgtcacgtcctgtttgggggttaattcggttttttctctgttgcatcgcgcctactgtgcgtgtgcgatagcgtgtgtgggggtgagagtttgttttctggaatggtaggtgctgggaggaggagtttgatggagggcttcctggctgcttctggccctcacctcgtggaggccttcacagagaccctgtgggccctggccctgtgctggcactgtgccagtcatgaggcagctctgatcacttccccactgtggaaacaggactgacccagccttcagtgtgggctgctgaagctatcctcctcaggcctcagggatgacctcctgcctgagcctctcacaggctggctgtgggccagtttcatctgctttcctgttgggggtcccgggcctctgctgtccttgacccactggtgttctgtgcaaggcttcttcccattcaccaagtgcacaccttgcatctgccgctcggcatgcaccagttccacacaccatcccattttacagacaaggacgctgaggcctgcagcagcagtgtgacttgctcaaggtccagtgagtgacctcattccccagaaaaggctcctcccacaccagagtacagcctgggtagggggaaaatcagttctttcagctaccacccatccaacctttgggcctatgtgaaaagaaaggaactaagctgggtgtgttctgtctggacctggggaggcccctgaaggcaaagagggaaactgtcccagctgttctgtcctaggggagggggacatagccctagcaggagctcccagcccctcttggcactctgacacacaagtacacccatctggggcccgctttgccacgaagagctgggcaggcctgcagggtgtggggaaggaggacacaacctcaagaaaggaagcgtgaaccccagggaacagcgggtcccttccctcctcagacacaagccacctcagcttgtggctcttggcccccagccccaccaacccacctgttcatttattcaacagacaatgacagctgatatttattggacatttgcaccatgccaagcattcggcttggattatcccatttgtttctcacagccggtatttattgtctgctcctctgtgccaggtgctgtgctctgggcaggggcactgcatgggctgcctgccctggtggagcttgtggtctgatgggtgaggctgacccaagcccaccccattgccaacagggccagggcaagagtacacacaggggcctcataccatatgtctaaatatttaaaagttatcaatcaagctaacaactgttaaataaaatatgttctattctcctactttgaaaaatgtgctgaaa

SEQ ID NO: 352557 - DNA, 4487 bp, Homo sapiens
gggccaggctgtaccggtcggaaggtgtacgatgcagcgcgggagccgcacagtcgaggagggagcgcgggacgccgagcccacgcgcgcctgccggggcaagtggaggcgaagccggcgagcggacgccccgagggtcggggaaggaaccgaggtccggtccccttcttatccagcccgagacatcgagctccggtgggcgtccctgcgctgggaatcccgctcggagtttttccaggcccggccgggctgctccgggaaaggccctgctcctgttccgcgcagcctctccggcctcgcccctggaaaccccgcccagggcgatggtaggggcctaacctgcagccaccgccggctccgcccacccagcccatgggctccctgaggcccgcccagccgacgaaaacgccgcggctgcgatggcggcggacgtggtgggggacgtgtacgtgctggtggagcaccccttcgagtacaccggcaaggacgggcgccgcgtggccatccggccgaatgagcgctaccggctgctgcggcgcagcaccgagcactggtggcacgtgcggcgtgagcccggcggccgccccttctacctgcctgcgcagtacgtgcgcgagctgcccgcgctgggcaaccctgccgccgccgcgccgccaggtccccacccgagccccgcggcccctgagccgctcgcctacgactaccggtttgtgagcgcggcggcgaccgcgggccccgacggcgcccccgaggagtccggaggccgagccagctccctgtgcggccctgcgcaacgcggcgccgcgacccagcgcagcagcctggcgcccggcctgccagcctgcctgtacctgcggcccgcggcgcccgtgcggcccgcgcagtccctgaacgacctggcctgcgccgccgtctcgcctcccgccggcctcctaggaagcagcggcagcttcaaggcctgcagcgtggcgggctcctgggtgtgcccgcggcctctggcgcgcagcgactcagagaacgtctacgaggtcatccaggacttgcacgtcccgccgcgggaggagagcgcagagcaggtggacgacccaccggagcccgtgtacgcgaacatagagaggcagccccgggccacttcaccgggcgccgctgcagccccccttcccagcccggtgtgggagacgcacacggacgcgggcaccgggcgcccctactactacaacccagacacgggagttaccacctgggagtcgccctttgaggctgccgagggtgccgccagcccagccacctcccctgcctcggtggacagccacgtgagccttgagaccgagtggggccagtactgggatgaggagagccgcagggtgttcttctacaacccgctgacgggcgagacggcctgggaggacgaggccgagaacgagcccgaggaggagttggagatgcagccgggcctgagccctggcagcccaggggacccgcggccccccactcccgagacggactaccccgagtcgctgaccagttaccccgaggaggactattctcccgtgggctctttcgtgggtgaggctggaggacccccacgggaagccatacttctacaatccagaggactcctctgttcgatgggagctgccccaggtccctgtccctgcccctcgaagcatccataaatccagccaggatggtgacaccccagcccaggccagccctccagaggagaagaccaagaccttggacaaggcaggggtgctccatcgcaccaagacggcagacaagggaaagcggctccggaagaagcactggagtgcctcctggactgtgctggagggtggcgtcctgacattcttcaaggactcaaagacctcggctgcaggcggcctgaggcagccttccaagttttccacccctgagtacacagtggagctgaggggggccactctctcctgggcccccaaagacaaatccagtaggaagaatgtgctggagctacggagccgagatggctctgagtacctgatccagcacgactcggaggccatcatcagcacctggcataaggccattgctcagggcatccaggagctgtccgcagagctgcccccagaggagagcgagagcagcagagtggacttcgggtcgagcgagcgcttgggaagctggcaggagaaagaggaggacgcgcgaccgaatgcagccgcgcccgccctgggccccgtgggcctggagagcgacttgagcaaggtccggcacaagctccgcaagttcctccagagccggcccacactgcagtcgctgcgggagaagggctacatcaaagaccaggtgttcggctgcgcgctggccgcgctgtgtgagcgcgagaggagccgggtgccacgcttcgtgcagcagtgcatccgcgccgtcgaggcccgcgggctggacatcgacgggctgtaccgcatcagtggaaacctggccaccatccagaagctacgctataaggtggaccacgatgagcgccttgacctggatgacgggcgctgggaggacgtccacgttatcaccggagccctgaagctcttctttcgggagctgcccgagcccctcttccccttctcgcacttccgccagttcattgcggccatcaagttgcaggaccaggcccggcgcagccgctgtgtgcgtgacttggtgcgctcgctgcccgctcccaaccacgacactctgcggatgctcttccagcacctctgccgggtgatcgagcacggcgagcagaaccgcatgtcggtgcagagcgtggccattgtgttcgggcccacgctgctgcggcccgaggtggaagagaccagcatgcccatgaccatggtgttccagaaccaggtggtggagctcatcctgcagcagtgcgcggacatcttcccgccgcactgactgctggcctgtgactggggcggcggccgcggtcctgccacacaagctgggcggcggaggccacgcagccgggccttcttctctctgggaccctccgccagcgcatagccgcaggccggtgtgacttctgcaccctcggttctgagggtacggtgacccctagtgggcagtttgcaaaatgtgattccttcttcccaactccccatccccccttcccttcccgtcacgtcctgtttgggggttaattcggttttttctctgttgcatcgcgcctactgtgcgtgtgcgatagcgtgtgtgggggtgagagtttgttttctggaatggtaggtgctgggaggaggagtttgatggagggcttcctggctgcttctggccctcacctcgtggaggccttcacagagaccctgtgggccctggccctgtgctggcactgtgccagtcatgaggcagctctgatcacttccccactgtggaaacaggactgacccagccttcagtgtgggctgctgaagctatcctcctcaggcctcagggatgacctcctgcctgagcctctcacaggctggctgtgggccagtttcatctgctttcctgttgggggtcccgggcctctgctgtccttgacccactggtgttctgtgcaaggcttcttcccattcaccaagtgcacaccttgcatctgccgctcggcatgcaccagttccacacaccatcccattttacagacaaggacgctgaggcctgcagcagcagtgtgacttgctcaaggtccagtgagtgacctcattccccagaaaaggctcctcccacaccagagtacagcctgggtagggggaaaatcagttctttcagctaccacccatccaacctttgggcctatgtgaaaagaaaggaactaagctgggtgtgttctgtctggacctggggaggcccctgaaggcaaagagggaaactgtcccagctgttctgtcctaggggagggggacatagccctagcaggagctcccagcccctcttggcactctgacacacaagtacacccatctggggcccgctttgccacgaagagctgggcaggcctgcagggtgtggggaaggaggacacaacctcaagaaaggaagcgtgaaccccagggaacagcgggtcccttccctcctcagacacaagccacctcagcttgtggctcttggcccccagccccaccaacccacctgttcatttattcaacagacaatgacagctgatatttattggacatttgcaccatgccaagcattcggcttggattatcccatttgtttctcacagccggtatttattgtctgctcctctgtgccaggtgctgtgctctgggcaggggcactgcatgggctgcctgccctggtggagcttgtggtctgatgggtgaggctgacccaagcccaccccattgccaacagggccagggcaagagtacacacaggggcctcataccatatgtctaaatatttaaaagttatcaatcaagctaacaactgttaaataaaatatgttctattctcctactttgaaaaatgtgctgaaa

SEQ ID NO: 352558 - DNA, 3716 bp, Homo sapiens
gggccaggctgtaccggtcggaaggtgtacgatgcagcgcgggagccgcacagtcgaggagggagcgcgggacgccgagcccacgcgcgcctgccggggcaagtggaggcgaagccggcgagcggacgccccgaggtggacgacccaccggagcccgtgtacgcgaacatagagaggcagccccgggccacttcaccgggcgccgctgcagccccccttcccagcccggtgtgggagacgcacacggacgcgggcaccgggcgcccctactactacaacccagacacgggagttaccacctgggagtcgccctttgaggctgccgagggtgccgccagcccagccacctcccctgcctcggtggacagccacgtgagccttgagaccgagtggggccagtactgggatgaggagagccgcagggtgttcttctacaacccgctgacgggcgagacggcctgggaggacgaggccgagaacgagcccgaggaggagttggagatgcagccgggcctgagccctggcagcccaggggacccgcggccccccactcccgagacggactaccccgagtcgctgaccagttaccccgaggaggactattctcccgtgggctctttcggtgagcccggccctacctctcccttgaccacaccccccggctggtcttgtcatgtcagccaggacaagcagatgctctacaccaaccacttcactcaggagcagtgggtgaggctggaggacccccacgggaagccatacttctacaatccagaggactcctctgttcgatgggagctgccccaggtccctgtccctgcccctcgaagcatccataaatccagccaggatggtgacaccccagcccaggccagccctccagaggagaaggtcccagcagagctggatgaggttgggagctgggaggaagtctctcctgccacagctgctgtgaggaccaagaccttggacaaggcaggggtgctccatcgcaccaagacggcagacaagggaaagcggctccggaagaagcactggagtgcctcctggactgtgctggagggtggcgtcctgacattcttcaaggactcaaagacctcggctgcaggcggcctgaggcagccttccaagttttccacccctgagtacacagtggagctgaggggggccactctctcctgggcccccaaagacaaatccagtaggaagaatgtgctggagctacggagccgagatggctctgagtacctgatccagcacgactcggaggccatcatcagcacctggcataaggccattgctcagggcatccaggagctgtccgcagagctgcccccagaggagagcgagagcagcagagtggacttcgggtcgagcgagcgcttgggaagctggcaggagaaagaggaggacgcgcgaccgaatgcagccgcgcccgccctgggccccgtgggcctggagagcgacttgagcaaggtccggcacaagctccgcaagttcctccagagccggcccacactgcagtcgctgcgggagaagggctacatcaaagaccaggtgttcggctgcgcgctggccgcgctgtgtgagcgcgagaggagccgggtgccacgcttcgtgcagcagtgcatccgcgccgtcgaggcccgcgggctggacatcgacgggctgtaccgcatcagtggaaacctggccaccatccagaagctacgctataaggtggaccacgatgagcgccttgacctggatgacgggcgctgggaggacgtccacgttatcaccggagccctgaagctcttctttcgggagctgcccgagcccctcttccccttctcgcacttccgccagttcattgcggccatcaagttgcaggaccaggcccggcgcagccgctgtgtgcgtgacttggtgcgctcgctgcccgctcccaaccacgacactctgcggatgctcttccagcacctctgccgggtgatcgagcacggcgagcagaaccgcatgtcggtgcagagcgtggccattgtgttcgggcccacgctgctgcggcccgaggtggaagagaccagcatgcccatgaccatggtgttccagaaccaggtggtggagctcatcctgcagcagtgcgcggacatcttcccgccgcactgactgctggcctgtgactggggcggcggccgcggtcctgccacacaagctgggcggcggaggccacgcagccgggccttcttctctctgggaccctccgccagcgcatagccgcaggccggtgtgacttctgcaccctcggttctgagggtacggtgacccctagtgggcagtttgcaaaatgtgattccttcttcccaactccccatccccccttcccttcccgtcacgtcctgtttgggggttaattcggttttttctctgttgcatcgcgcctactgtgcgtgtgcgatagcgtgtgtgggggtgagagtttgttttctggaatggtaggtgctgggaggaggagtttgatggagggcttcctggctgcttctggccctcacctcgtggaggccttcacagagaccctgtgggccctggccctgtgctggcactgtgccagtcatgaggcagctctgatcacttccccactgtggaaacaggactgacccagccttcagtgtgggctgctgaagctatcctcctcaggcctcagggatgacctcctgcctgagcctctcacaggctggctgtgggccagtttcatctgctttcctgttgggggtcccgggcctctgctgtccttgacccactggtgttctgtgcaaggcttcttcccattcaccaagtgcacaccttgcatctgccgctcggcatgcaccagttccacacaccatcccattttacagacaaggacgctgaggcctgcagcagcagtgtgacttgctcaaggtccagtgagtgacctcattccccagaaaaggctcctcccacaccagagtacagcctgggtagggggaaaatcagttctttcagctaccacccatccaacctttgggcctatgtgaaaagaaaggaactaagctgggtgtgttctgtctggacctggggaggcccctgaaggcaaagagggaaactgtcccagctgttctgtcctaggggagggggacatagccctagcaggagctcccagcccctcttggcactctgacacacaagtacacccatctggggcccgctttgccacgaagagctgggcaggcctgcagggtgtggggaaggaggacacaacctcaagaaaggaagcgtgaaccccagggaacagcgggtcccttccctcctcagacacaagccacctcagcttgtggctcttggcccccagccccaccaacccacctgttcatttattcaacagacaatgacagctgatatttattggacatttgcaccatgccaagcattcggcttggattatcccatttgtttctcacagccggtatttattgtctgctcctctgtgccaggtgctgtgctctgggcaggggcactgcatgggctgcctgccctggtggagcttgtggtctgatgggtgaggctgacccaagcccaccccattgccaacagggccagggcaagagtacacacaggggcctcataccatatgtctaaatatttaaaagttatcaatcaagctaacaactgttaaataaaatatgttctattctcctactttgaaaaatgtgctgaaa

SEQ ID NO: 352559 - DNA, 3718 bp, Homo sapiens
ccgactggaaggagcccggggccctcattccttctcctccactgggaactgagtggacgacccaccggagcccgtgtacgcgaacatagagaggcagccccgggccacttcaccgggcgccgctgcagccccccttcccagcccggtgtgggagacgcacacggacgcgggcaccgggcgcccctactactacaacccagacacgggagttaccacctgggagtcgccctttgaggctgccgagggtgccgccagcccagccacctcccctgcctcggtggacagccacgtgagccttgagaccgagtggggccagtactgggatgaggagagccgcagggtgttcttctacaacccgctgacgggcgagacggcctgggaggacgaggccgagaacgagcccgaggaggagttggagatgcagccgggcctgagccctggcagcccaggggacccgcgggtgaggggcagggccagagtgggcggttctacctctgagcgcctctgatcccgcctcctgctcccagaggcccagggacacacggccccccactcccgagacggactaccccgagtcgctgaccagttaccccgaggaggactattctcccgtgggctctttcggtgagcccggccctacctctcccttgaccacaccccccggctggtcttgtcatgtcagccaggacaagcagatgctctacaccaaccacttcactcaggagcagtgggtgaggctggaggacccccacgggaagccatacttctacaatccagaggactcctctgttcgatgggagctgccccaggtccctgtccctgcccctcgaagcatccataaatccagccaggatggtgacaccccagcccaggccagccctccagaggagaaggtcccagcagagctggatgaggttgggagctgggaggaagtctctcctgccacagctgctgtgaggaccaagaccttggacaaggcaggggtgctccatcgcaccaagacggcagacaagggaaagcggctccggaagaagcactggagtgcctcctggactgtgctggagggtggcgtcctgacattcttcaaggactcaaagacctcggctgcaggcggcctgaggcagccttccaagttttccacccctgagtacacagtggagctgaggggggccactctctcctgggcccccaaagacaaatccagtaggaagaatgtgctggagctacggagccgagatggctctgagtacctgatccagcacgactcggaggccatcatcagcacctggcataaggccattgctcagggcatccaggagctgtccgcagagctgcccccagaggagagcgagagcagcagagtggacttcgggtcgagcgagcgcttgggaagctggcaggagaaagaggaggacgcgcgaccgaatgcagccgcgcccgccctgggccccgtgggcctggagagcgacttgagcaaggtccggcacaagctccgcaagttcctccagagccggcccacactgcagtcgctgcgggagaagggctacatcaaagaccaggtgttcggctgcgcgctggccgcgctgtgtgagcgcgagaggagccgggtgccacgcttcgtgcagcagtgcatccgcgccgtcgaggcccgcgggctggacatcgacgggctgtaccgcatcagtggaaacctggccaccatccagaagctacgctataaggtggaccacgatgagcgccttgacctggatgacgggcgctgggaggacgtccacgttatcaccggagccctgaagctcttctttcgggagctgcccgagcccctcttccccttctcgcacttccgccagttcattgcggccatcaagttgcaggaccaggcccggcgcagccgctgtgtgcgtgacttggtgcgctcgctgcccgctcccaaccacgacactctgcggatgctcttccagcacctctgccgggtgatcgagcacggcgagcagaaccgcatgtcggtgcagagcgtggccattgtgttcgggcccacgctgctgcggcccgaggtggaagagaccagcatgcccatgaccatggtgttccagaaccaggtggtggagctcatcctgcagcagtgcgcggacatcttcccgccgcactgactgctggcctgtgactggggcggcggccgcggtcctgccacacaagctgggcggcggaggccacgcagccgggccttcttctctctgggaccctccgccagcgcatagccgcaggccggtgtgacttctgcaccctcggttctgagggtacggtgacccctagtgggcagtttgcaaaatgtgattccttcttcccaactccccatccccccttcccttcccgtcacgtcctgtttgggggttaattcggttttttctctgttgcatcgcgcctactgtgcgtgtgcgatagcgtgtgtgggggtgagagtttgttttctggaatggtaggtgctgggaggaggagtttgatggagggcttcctggctgcttctggccctcacctcgtggaggccttcacagagaccctgtgggccctggccctgtgctggcactgtgccagtcatgaggcagctctgatcacttccccactgtggaaacaggactgacccagccttcagtgtgggctgctgaagctatcctcctcaggcctcagggatgacctcctgcctgagcctctcacaggctggctgtgggccagtttcatctgctttcctgttgggggtcccgggcctctgctgtccttgacccactggtgttctgtgcaaggcttcttcccattcaccaagtgcacaccttgcatctgccgctcggcatgcaccagttccacacaccatcccattttacagacaaggacgctgaggcctgcagcagcagtgtgacttgctcaaggtccagtgagtgacctcattccccagaaaaggctcctcccacaccagagtacagcctgggtagggggaaaatcagttctttcagctaccacccatccaacctttgggcctatgtgaaaagaaaggaactaagctgggtgtgttctgtctggacctggggaggcccctgaaggcaaagagggaaactgtcccagctgttctgtcctaggggagggggacatagccctagcaggagctcccagcccctcttggcactctgacacacaagtacacccatctggggcccgctttgccacgaagagctgggcaggcctgcagggtgtggggaaggaggacacaacctcaagaaaggaagcgtgaaccccagggaacagcgggtcccttccctcctcagacacaagccacctcagcttgtggctcttggcccccagccccaccaacccacctgttcatttattcaacagacaatgacagctgatatttattggacatttgcaccatgccaagcattcggcttggattatcccatttgtttctcacagccggtatttattgtctgctcctctgtgccaggtgctgtgctctgggcaggggcactgcatgggctgcctgccctggtggagcttgtggtctgatgggtgaggctgacccaagcccaccccattgccaacagggccagggcaagagtacacacaggggcctcataccatatgtctaaatatttaaaagttatcaatcaagctaacaactgttaaataaaatatgttctattctcctactttgaaaaatgtgctgaaa

SEQ ID NO: 352560 - DNA, 4944 bp, Homo sapiens
gggccaggctgtaccggtcggaaggtgtacgatgcagcgcgggagccgcacagtcgaggagggagcgcgggacgccgagcccacgcgcgcctgccggggcaagtggaggcgaagccggcgagcggacgccccgagggtcggggaaggaaccgaggtccggtccccttcttatccagcccgagacatcgagctccggtgggcgtccctgcgctgggaatcccgctcggagtttttccaggcccggccgggctgctccgggaaaggccctgctcctgttccgcgcagcctctccggcctcgcccctggaaaccccgcccagggcgatggtaggggcctaacctgcagccaccgccggctccgcccacccagcccatgggctccctgaggcccgcccagccgacgaaaacgccgcggctgcgatggcggcggacgtggtgggggacgtgtacgtgctggtggagcaccccttcgagtacaccggcaaggacgggcgccgcgtggccatccggccgaatgagcgctaccggctgctgcggcgcagcaccgagcactggtggcacgtgcggcgtgagcccggcggccgccccttctacctgcctgcgcagtacgtgcgcgagctgcccgcgctgggcaaccctgccgccgccgcgccgccaggtccccacccgagccccgcggcccctgagccgctcgcctacgactaccggtttgtgagcgcggcggcgaccgcgggccccgacggcgcccccgaggagtccggaggccgagccagctccctgtgcggccctgcgcaacgcggcgccgcgacccagcgcagcagcctggcgcccggcctgccagcctgcctgtacctgcggcccgcggcgcccgtgcggcccgcgcagtccctgaacgacctggcctgcgccgccgtctcgcctcccgccggcctcctaggaagcagcggcagcttcaaggcctgcagcgtggcgggctcctgggtgtgcccgcggcctctggcgcgcagcgactcagagaacgtctacgaggtcatccaggacttgcacgtcccgccgcgggaggagagcgcagagcaggtggacgacccaccggagcccgtgtacgcgaacatagagaggcagccccgggccacttcaccgggcgccgctgcagccccccttcccagcccggtgtgggagacgcacacggacgcgggcaccgggcgcccctactactacaacccagacacgggagttaccacctgggagtcgccctttgaggctgccgagggtgccgccagcccagccacctcccctgcctcggtggacagccacgtgagccttgagaccgagtggggccagtactgggatgaggagagccgcagggtgttcttctacaacccgctgacgggcgagacggcctgggaggacgaggccgagaacgagcccgaggaggagttggagatgcagccgggcctgagccctggcagcccaggggacccgcgggtgaggggcagggccagagtgggcggttctacctctgagcgcctctgatcccgcctcctgctcccagaggcccagggacacacggccccccactcccgagacggactaccccgagtcgctgaccagttaccccgaggaggactattctcccgtgggctctttcggtgagcccggccctacctctcccttgaccacaccccccggctggtcttgtcatgtcagccaggacaagcagatgctctacaccaaccacttcactcaggagcagtgggtgaggctggaggacccccacgggaagccatacttctacaatccagaggactcctctgttcgatgggagctgccccaggtccctgtccctgcccctcgaagcatccataaatccagccaggatggtgacaccccagcccaggccagccctccagaggagaaggtcccagcagagctggatgaggttgggagctgggaggaagtctctcctgccacagctgctgtgaggaccaagaccttggacaaggcaggggtgctccatcgcaccaagacggcagacaagggaaagcggctccggaagaagcactggagtgcctcctggactgtgctggagggtggcgtcctgacattcttcaaggactcaaagacctcggctgcaggcggcctgaggcagccttccaagttttccacccctgagtacacagtggagctgaggggggccactctctcctgggcccccaaagacaaatccagtaggaagaatgtgctggagctacggagccgagatggctctgagtacctgatccagcacgactcggaggccatcatcagcacctggcataaggccattgctcagggcatccaggagctgtccgcagagctgcccccagaggagagcgagagcagcagagtggacttcgggtcgagcgagcgcttgggaagctggcaggagaaagaggaggacgcgcgaccgaatgcagccgcgcccgccctgggccccgtgggcctggagagcgacttgagcaaggtccggcacaagctccgcaagttcctccagagccggcccacactgcagtcgctgcgggagaagggctacatcaaagaccaggtgttcggctgcgcgctggccgcgctgtgtgagcgcgagaggagccgggtgccacgcttcgtgcagcagtgcatccgcgccgtcgaggcccgcggtacgtgcgctgcgggggtgagggcggcaggcattggggtgcccgcaggcctcctgccaggaccgcaggctggagacccctggatggacgcagggtccagggggaaagtacgggaggccccgagtgggagtcatagcagggacccgtagccccaccctatccccatccctgaacccgggatcagcgcctccctctggcccagggctggacatcgacgggctgtaccgcatcagtggaaacctggccaccatccagaagctacgctataaggtggaccacgatgagcgccttgacctggatgacgggcgctgggaggacgtccacgttatcaccggagccctgaagctcttctttcgggagctgcccgagcccctcttccccttctcgcacttccgccagttcattgcggccatcaagttgcaggaccaggcccggcgcagccgctgtgtgcgtgacttggtgcgctcgctgcccgctcccaaccacgacactctgcggatgctcttccagcacctctgccgggtgatcgagcacggcgagcagaaccgcatgtcggtgcagagcgtggccattgtgttcgggcccacgctgctgcggcccgaggtggaagagaccagcatgcccatgaccatggtgttccagaaccaggtggtggagctcatcctgcagcagtgcgcggacatcttcccgccgcactgactgctggcctgtgactggggcggcggccgcggtcctgccacacaagctgggcggcggaggccacgcagccgggccttcttctctctgggaccctccgccagcgcatagccgcaggccggtgtgacttctgcaccctcggttctgagggtacggtgacccctagtgggcagtttgcaaaatgtgattccttcttcccaactccccatccccccttcccttcccgtcacgtcctgtttgggggttaattcggttttttctctgttgcatcgcgcctactgtgcgtgtgcgatagcgtgtgtgggggtgagagtttgttttctggaatggtaggtgctgggaggaggagtttgatggagggcttcctggctgcttctggccctcacctcgtggaggccttcacagagaccctgtgggccctggccctgtgctggcactgtgccagtcatgaggcagctctgatcacttccccactgtggaaacaggactgacccagccttcagtgtgggctgctgaagctatcctcctcaggcctcagggatgacctcctgcctgagcctctcacaggctggctgtgggccagtttcatctgctttcctgttgggggtcccgggcctctgctgtccttgacccactggtgttctgtgcaaggcttcttcccattcaccaagtgcacaccttgcatctgccgctcggcatgcaccagttccacacaccatcccattttacagacaaggacgctgaggcctgcagcagcagtgtgacttgctcaaggtccagtgagtgacctcattccccagaaaaggctcctcccacaccagagtacagcctgggtagggggaaaatcagttctttcagctaccacccatccaacctttgggcctatgtgaaaagaaaggaactaagctgggtgtgttctgtctggacctggggaggcccctgaaggcaaagagggaaactgtcccagctgttctgtcctaggggagggggacatagccctagcaggagctcccagcccctcttggcactctgacacacaagtacacccatctggggcccgctttgccacgaagagctgggcaggcctgcagggtgtggggaaggaggacacaacctcaagaaaggaagcgtgaaccccagggaacagcgggtcccttccctcctcagacacaagccacctcagcttgtggctcttggcccccagccccaccaacccacctgttcatttattcaacagacaatgacagctgatatttattggacatttgcaccatgccaagcattcggcttggattatcccatttgtttctcacagccggtatttattgtctgctcctctgtgccaggtgctgtgctctgggcaggggcactgcatgggctgcctgccctggtggagcttgtggtctgatgggtgaggctgacccaagcccaccccattgccaacagggccagggcaagagtacacacaggggcctcataccatatgtctaaatatttaaaagttatcaatcaagctaacaactgttaaataaaatatgttctattctcctactttgaaaaatgtgctgaaa

SEQ ID NO: 352561 - DNA, 4707 bp, Homo sapiens
gggccaggctgtaccggtcggaaggtgtacgatgcagcgcgggagccgcacagtcgaggagggagcgcgggacgccgagcccacgcgcgcctgccggggcaagtggaggcgaagccggcgagcggacgccccgagggtcggggaaggaaccgaggtccggtccccttcttatccagcccgagacatcgagctccggtgggcgtccctgcgctgggaatcccgctcggagtttttccaggcccggccgggctgctccgggaaaggccctgctcctgttccgcgcagcctctccggcctcgcccctggaaaccccgcccagggcgatggtaggggcctaacctgcagccaccgccggctccgcccacccagcccatgggctccctgaggcccgcccagccgacgaaaacgccgcggctgcgatggcggcggacgtggtgggggacgtgtacgtgctggtggagcaccccttcgagtacaccggcaaggacgggcgccgcgtggccatccggccgaatgagcgctaccggctgctgcggcgcagcaccgagcactggtggcacgtgcggcgtgagcccggcggccgccccttctacctgcctgcgcagtacgtgcgcgagctgcccgcgctgggcaaccctgccgccgccgcgccgccaggtccccacccgagccccgcggcccctgagccgctcgcctacgactaccggtttgtgagcgcggcggcgaccgcgggccccgacggcgcccccgaggagtccggaggccgagccagctccctgtgcggccctgcgcaacgcggcgccgcgacccagcgcagcagcctggcgcccggcctgccagcctgcctgtacctgcggcccgcggcgcccgtgcggcccgcgcagtccctgaacgacctggcctgcgccgccgtctcgcctcccgccggcctcctaggaagcagcggcagcttcaaggcctgcagcgtggcgggctcctgggtgtgcccgcggcctctggcgcgcagcgactcagagaacgtctacgaggtcatccaggacttgcacgtcccgccgcgggaggagagcgcagagcaggtggacgacccaccggagcccgtgtacgcgaacatagagaggcagccccgggccacttcaccgggcgccgctgcagccccccttcccagcccggtgtgggagacgcacacggacgcgggcaccgggcgcccctactactacaacccagacacgggagttaccacctgggagtcgccctttgaggctgccgagggtgccgccagcccagccacctcccctgcctcggtggacagccacgtgagccttgagaccgagtggggccagtactgggatgaggagagccgcagggtgttcttctacaacccgctgacgggcgagacggcctgggaggacgaggccgagaacgagcccgaggaggagttggagatgcagccgggcctgagccctggcagcccaggggacccgcgggtgaggggcagggccagagtgggcggttctacctctgagcgcctctgatcccgcctcctgctcccagaggcccagggacacacggccccccactcccgagacggactaccccgagtcgctgaccagttaccccgaggaggactattctcccgtgggctctttcggtgagcccggccctacctctcccttgaccacaccccccggctggtcttgtcatgtcagccaggacaagcagatgctctacaccaaccacttcactcaggagcagtgggtgaggctggaggacccccacgggaagccatacttctacaatccagaggactcctctgttcgatgggagctgccccaggtccctgtccctgcccctcgaagcatccataaatccagccaggatggtgacaccccagcccaggccagccctccagaggagaaggtcccagcagagctggatgaggttgggagctgggaggaagtctctcctgccacagctgctgtgaggaccaagaccttggacaaggcaggggtgctccatcgcaccaagacggcagacaagggaaagcggctccggaagaagcactggagtgcctcctggactgtgctggagggtggcgtcctgacattcttcaaggactcaaagacctcggctgcaggcggcctgaggcagccttccaagttttccacccctgagtacacagtggagctgaggggggccactctctcctgggcccccaaagacaaatccagtaggaagaatgtgctggagctacggagccgagatggctctgagtacctgatccagcacgactcggaggccatcatcagcacctggcataaggccattgctcagggcatccaggagctgtccgcagagctgcccccagaggagagcgagagcagcagagtggacttcgggtcgagcgagcgcttgggaagctggcaggagaaagaggaggacgcgcgaccgaatgcagccgcgcccgccctgggccccgtgggcctggagagcgacttgagcaaggtccggcacaagctccgcaagttcctccagagccggcccacactgcagtcgctgcgggagaagggctacatcaaagaccaggtgttcggctgcgcgctggccgcgctgtgtgagcgcgagaggagccgggtgccacgcttcgtgcagcagtgcatccgcgccgtcgaggcccgcgggctggacatcgacgggctgtaccgcatcagtggaaacctggccaccatccagaagctacgctataaggtggaccacgatgagcgccttgacctggatgacgggcgctgggaggacgtccacgttatcaccggagccctgaagctcttctttcgggagctgcccgagcccctcttccccttctcgcacttccgccagttcattgcggccatcaagttgcaggaccaggcccggcgcagccgctgtgtgcgtgacttggtgcgctcgctgcccgctcccaaccacgacactctgcggatgctcttccagcacctctgccgggtgatcgagcacggcgagcagaaccgcatgtcggtgcagagcgtggccattgtgttcgggcccacgctgctgcggcccgaggtggaagagaccagcatgcccatgaccatggtgttccagaaccaggtggtggagctcatcctgcagcagtgcgcggacatcttcccgccgcactgactgctggcctgtgactggggcggcggccgcggtcctgccacacaagctgggcggcggaggccacgcagccgggccttcttctctctgggaccctccgccagcgcatagccgcaggccggtgtgacttctgcaccctcggttctgagggtacggtgacccctagtgggcagtttgcaaaatgtgattccttcttcccaactccccatccccccttcccttcccgtcacgtcctgtttgggggttaattcggttttttctctgttgcatcgcgcctactgtgcgtgtgcgatagcgtgtgtgggggtgagagtttgttttctggaatggtaggtgctgggaggaggagtttgatggagggccttcacagagaccctgtgggccctggccctgtgctggcactgtgccagtcatgaggcagctctgatcacttccccactgtggaaacaggactgacccagccttcagtgtgggctgctgaagctatcctcctcaggcctcagggatgacctcctgcctgagcctctcacaggctggctgtgggccagtttcatctgctttcctgttgggggtcccgggcctctgctgtccttgacccactggtgttctgtgcaaggcttcttcccattcaccaagtgcacaccttgcatctgccgctcggcatgcaccagttccacacaccatcccattttacagacaaggacgctgaggcctgcagcagcagtgtgacttgctcaaggtccagtgagtgacctcattccccagaaaaggctcctcccacaccagagtacagcctgggtagggggaaaatcagttctttcagctaccacccatccaacctttgggcctatgtgaaaagaaaggaactaagctgggtgtgttctgtctggacctggggaggcccctgaaggcaaagagggaaactgtcccagctgttctgtcctaggggagggggacatagccctagcaggagctcccagcccctcttggcactctgacacacaagtacacccatctggggcccgctttgccacgaagagctgggcaggcctgcagggtgtggggaaggaggacacaacctcaagaaaggaagcgtgaaccccagggaacagcgggtcccttccctcctcagacacaagccacctcagcttgtggctcttggcccccagccccaccaacccacctgttcatttattcaacagacaatgacagctgatatttattggacatttgcaccatgccaagcattcggcttggattatcccatttgtttctcacagccggtatttattgtctgctcctctgtgccaggtgctgtgctctgggcaggggcactgcatgggctgcctgccctggtggagcttgtggtctgatgggtgaggctgacccaagcccaccccattgccaacagggccagggcaagagtacacacaggggcctcataccatatgtctaaatatttaaaagttatcaatcaagctaacaactgttaaataaaatatgttctattctcctactttgaaaaatgtgctgaaa

SEQ ID NO: 352562 - DNA, 2033 bp, Homo sapiens
aggggtactgatttcccttccgtcctcctcccttcctccgccacagatgagcgccttgacctggatgacgggcgctgggaggacgtccacgttatcaccggagccctgaagctcttctttcgggagctgcccgagcccctcttccccttctcgcacttccgccagttcattgcggccatcaagttgcaggaccaggcccggcgcagccgctgtgtgcgtgacttggtgcgctcgctgcccgctcccaaccacgacactctgcggatgctcttccagcacctctgccgggtgatcgagcacggcgagcagaaccgcatgtcggtgcagagcgtggccattgtgttcgggcccacgctgctgcggcccgaggtggaagagaccagcatgcccatgaccatggtgttccagaaccaggtggtggagctcatcctgcagcagtgcgcggacatcttcccgccgcactgactgctggcctgtgactggggcggcggccgcggtcctgccacacaagctgggcggcggaggccacgcagccgggccttcttctctctgggaccctccgccagcgcatagccgcaggccggtgtgacttctgcaccctcggttctgagggtacggtgacccctagtgggcagtttgcaaaatgtgattccttcttcccaactccccatccccccttcccttcccgtcacgtcctgtttgggggttaattcggttttttctctgttgcatcgcgcctactgtgcgtgtgcgatagcgtgtgtgggggtgagagtttgttttctggaatggtaggtgctgggaggaggagtttgatggagggcttcctggctgcttctggccctcacctcgtggaggccttcacagagaccctgtgggccctggccctgtgctggcactgtgccagtcatgaggcagctctgatcacttccccactgtggaaacaggactgacccagccttcagtgtgggctgctgaagctatcctcctcaggcctcagggatgacctcctgcctgagcctctcacaggctggctgtgggccagtttcatctgctttcctgttgggggtcccgggcctctgctgtccttgacccactggtgttctgtgcaaggcttcttcccattcaccaagtgcacaccttgcatctgccgctcggcatgcaccagttccacacaccatcccattttacagacaaggacgctgaggcctgcagcagcagtgtgacttgctcaaggtccagtgagtgacctcattccccagaaaaggctcctcccacaccagagtacagcctgggtagggggaaaatcagttctttcagctaccacccatccaacctttgggcctatgtgaaaagaaaggaactaagctgggtgtgttctgtctggacctggggaggcccctgaaggcaaagagggaaactgtcccagctgttctgtcctaggggagggggacatagccctagcaggagctcccagcccctcttggcactctgacacacaagtacacccatctggggcccgctttgccacgaagagctgggcaggcctgcagggtgtggggaaggaggacacaacctcaagaaaggaagcgtgaaccccagggaacagcgggtcccttccctcctcagacacaagccacctcagcttgtggctcttggcccccagccccaccaacccacctgttcatttattcaacagacaatgacagctgatatttattggacatttgcaccatgccaagcattcggcttggattatcccatttgtttctcacagccggtatttattgtctgctcctctgtgccaggtgctgtgctctgggcaggggcactgcatgggctgcctgccctggtggagcttgtggtctgatgggtgaggctgacccaagcccaccccattgccaacagggccagggcaagagtacacacaggggcctcataccatatgtctaaatatttaaaagttatcaatcaagctaacaactgttaaataaaatatgttctattctcctactttgaaaaatgtgctgaaa

SEQ ID NO: 352563 - DNA, 4462 bp, Homo sapiens
gggccaggctgtaccggtcggaaggtgtacgatgcagcgcgggagccgcacagtcgaggagggagcgcgggacgccgagcccacgcgcgcctgccggggcaagtggaggcgaagccggcgagcggacgccccgagggtcggggaaggaaccgaggtccggtccccttcttatccagcccgagacatcgagctccggtgggcgtccctgcgctgggaatcccgctcggagtttttccaggcccggccgggctgctccgggaaaggccctgctcctgttccgcgcagcctctccggcctcgcccctggaaaccccgcccagggcgatggtaggggcctaacctgcagccaccgccggctccgcccacccagcccatgggctccctgaggcccgcccagccgacgaaaacgccgcggctgcgatggcggcggacgtggtgggggacgtgtacgtgctggtggagcaccccttcgagtacaccggcaaggacgggcgccgcgtggccatccggccgaatgagcgctaccggctgctgcggcgcagcaccgagcactggtggcacgtgcggcgtgagcccggcggccgccccttctacctgcctgcgcagtacgtgcgcgagctgcccgcgctgggcaaccctgccgccgccgcgccgccaggtccccacccgagccccgcggcccctgagccgctcgcctacgactaccggtttgtgagcgcggcggcgaccgcgggccccgacggcgcccccgaggagtccggaggccgagccagctccctgtgcggccctgcgcaacgcggcgccgcgacccagcgcagcagcctggcgcccggcctgccagcctgcctgtacctgcggcccgcggcgcccgtgcggcccgcgcagtccctgaacgacctggcctgcgccgccgtctcgcctcccgccggcctcctaggaagcagcggcagcttcaaggcctgcagcgtggcgggctcctgggtgtgcccgcggcctctggcgcgcagcgactcagagaacgtctacgaggtcatccaggacttgcacgtcccgccgcgggaggagagcgcagagcaggtggacgacccaccggagcccgtgtacgcgaacatagagaggcagccccgggccacttcaccgggcgccgctgcagccccccttcccagcccggtgtgggagacgcacacggacgcgggcaccgggcgcccctactactacaacccagacacgggagttaccacctgggagtcgccctttgaggctgccgagggtgccgccagcccagccacctcccctgcctcggtggacagccacgtgagccttgagaccgagtggggccagtactgggatgaggagagccgcagggtgttcttctacaacccgctgacgggcgagacggcctgggaggacgaggccgagaacgagcccgaggaggagttggagatgcagccgggcctgagccctggcagcccaggggacccgcgggtgaggggcagggccagagtgggcggttctacctctgagcgcctctgatcccgcctcctgctcccagaggcccagggacacacggccccccactcccgagacggactaccccgagtcgctgaccagttaccccgaggaggactattctcccgtgggctctttcggtgagcccggccctacctctcccttgaccacaccccccggctggtcttgtcatgtcagccaggacaagcagatgctctacaccaaccacttcactcaggagcagtgggtgaggctggaggacccccacgggaagccatacttctacaatccagaggactcctctgttcgatgggagctgccccaggtccctgtccctgcccctcgaagcatccataaatccagccaggatggtgacaccccagcccaggccagccctccagaggagaaggtcccagcagagctggatgaggttgggagctgggaggaagtctctcctgccacagctgctgtgaggaccaagaccttggacaaggcaggggtgctccatcgcaccaagacggcagacaagggaaagcggctccggaagaagcactggagtgcctcctggactgtgctggagggtggcgtcctgacattcttcaaggactcaaagacctcggctgcaggcggcctgaggcagccttccaagttttccacccctgagtacacagtggagctgaggggggccactctctcctgggcccccaaagacaaatccagtaggaagaatgtgctggagctacggagccgagatggctctgagtacctgatccagcacgactcggaggccatcatcagcacctggcataaggccattgctcagggcatccaggagctgtccgcagagctgcccccagaggagagcgagagcagcagagtggacttcgggtcgagcgagcgcttgggaagctggcaggagaaagaggaggacgcgcgaccgaatgcagccgcgcccgccctgggccccgtgggcctggagagcgacttgagcaaggtccggcacaagctccgcaagttcctccagagccggcccacactgcagtcgctgcgggagaagggctacatcaaagaccaggtgttcggctgcgcgctggccgcgctgtgtgagcgcgagaggagccgggtgccacgcttcgtgcagcagtgcatccgcgccgtcgaggcccgcgggctggacatcgacgggctgtaccgcatcagtggaaacctggccaccatccagaagctacgctataaggtggaccacgatgagcgccttgacctggatgacgggcgctgggaggacgtccacgttatcaccggagccctgaagctcttctttcgggagctgcccgagcccctcttccccttctcgcacttccgccagttcattgcggccatcaagttgcaggaccaggcccggcgcagccgctgtgtgcgtgacttggtgcgctcgctgcccgctcccaaccacgacactctgcggatgctcttccagcacctctgccgggtgatcgagcacggcgagcagaaccgcatgtcggtgcagagcgtggccattgtgttcgggcccacgctgctgcggcccgaggtggaagagaccagcatgcccatgaccatggtgttccagaaccaggtggtggagctcatcctgcagcagtgcgcggacatcttcccgccgcactgactgctggcctgtgactggggcggcggccgcggtcctgccacacaagctgggcggcggaggccacgcagccgggccttcttctctctgggaccctccgccagcgcatagccgcaggccggtgtgacttctgcaccctcggttctgagggtacggtgacccctagtgggcagtttgcaaaatgtgattccttcttcccaactccccatccccccttcccttcccgtcacgtcctgtttgggggttaattcggttttttctctgttgcatcgcgcctactgtgcgtgtgcgatagcgtgtgtgggggtgagagtttgttttctggaatggtaggtgctgggaggaggagtttgatggagggcttcctggctgcttctggccctcacctcgtggaggccttcacagagaccctgtgggccctggccctgtgctggcactgtgccagtcatgaggcagctctgatcacttccccactgtggaaacaggactgacccagccttcagtgtgggctgctgaagctatcctcctcaggcctcagggatgacctcctgcctgagcctctcacaggctggctgtgggccagtttcatctgctttcctgttgggggtcccgggcctctgctgtccttgacccactggtgttctgtgcaaggcttcttcccattcaccaagtgcacaccttgcatctgccgctcggcatgcaccagttccacacaccatcccattttacagacaaggacgctgaggcctgcagcagcagtgtgacttgctcaaggtccagtgagtgacctcattccccagaaaaggctcctcccacaccagagtacagcctgggtagggggaaaatcagttctttcagctaccacccatccaacctttgggcctatgtgaaaagaaaggaactaagctgggtgtgttctgtctggacctggggaggcccctgaaggcaaagagggaaactgtcccagctgttctgtcctaggggagggggacatagccctagcaggagctcccagcccctcttggcactctgacacacaagtacacccatctggggcccgctttgccacgaagagctgggcaggcctgcagggtgtggggaaggaggacacaacctcaagaaaggaagcgtgaaccccagggaacagcgggtcccttccctccttgctgtccttgacccactggtgttctgtcaaggcttcttcccattcaccaagtgcacaccttgcatctgccgctcagcatgcaccaagttccacacaccatcccattacaaaacaaggtagagccga

SEQ ID NO: 352564 - DNA, 1517 bp, Homo sapiens
gccaattgattttttttggtggctgttttttttaaagccaatttctgagcttttgaggcgtgtttctaaaaagccaattaactctaagagggttgttgacggggggggggaatgggcagtttgcaaaatgtgattccttcttcccaactccccatccccccttcccttcccgtcacgtcctgtttgggggttaattcggttttttctctgttgcatcgcgcctactgtgcgtgtgcgatagcgtgtgtgggggtgagagtttgttttctggaatggtaggtgctgggaggaggagtttgatggagggcttcctggctgcttctggccctcacctcgtggaggccttcacagagaccctgtgggccctggccctgtgctggcactgtgccagtcatgaggcagctctgatcacttccccactgtggaaacaggactgacccagccttcagtgtgggctgctgaagctatcctcctcaggcctcagggatgacctcctgcctgagcctctcacaggctggctgtgggccagtttcatctgctttcctgttgggggtcccgggcctctgctgtccttgacccactggtgttctgtgcaaggcttcttcccattcaccaagtgcacaccttgcatctgccgctcggcatgcaccagttccacacaccatcccattttacagacaaggacgctgaggcctgcagcagcagtgtgacttgctcaaggtccagtgagtgacctcattccccagaaaaggctcctcccacaccagagtacagcctgggtagggggaaaatcagttctttcagctaccacccatccaacctttgggcctatgtgaaaagaaaggaactaagctgggtgtgttctgtctggacctggggaggcccctgaaggcaaagagggaaactgtcccagctgttctgtcctaggggagggggacatagccctagcaggagctcccagcccctcttggcactctgacacacaagtacacccatctggggcccgctttgccacgaagagctgggcaggcctgcagggtgtggggaaggaggacacaacctcaagaaaggaagcgtgaaccccagggaacagcgggtcccttccctcctcagacacaagccacctcagcttgtggctcttggcccccagccccaccaacccacctgttcatttattcaacagacaatgacagctgatatttattggacatttgcaccatgccaagcattcggcttggattatcccatttgtttctcacagccggtatttattgtctgctcctctgtgccaggtgctgtgctctgggcaggggcactgcatgggctgcctgccctggtggagcttgtggtctgatgggtgaggctgacccaagcccaccccattgccaacagggccagggcaagagtacacacaggggcctcataccatatgtctaaatatttaaaagttatcaatcaagctaacaactgttaaataaaatatgttctattctcctactttgaaaaatgtgctgaaa

SEQ ID NO: 352565 - DNA, 1904 bp, Homo sapiens
gggccaggctgtaccggtcggaaggtgtacgatgcagcgcgggagccgcacagtcgaggagggagcgcgggacgccgagcccacgcgcgcctgccggggcaagtggaggcgaagccggcgagcggacgccccgagggtcggggaaggaaccgaggtccggtccccttcttatccagcccgagacatcgagctccggtgggcgtccctgcgctgggaatcccgctcggagtttttccaggcccggccgggctgctccgggaaaggccctgctcctgttccgcgcagcctctccggcctcgcccctggaaaccccgcccagggcgatggtaggggcctaacctgcagccaccgccggctccgcccacccagcccatgggctccctgaggcccgcccagccgacgaaaacgccgcggctgcgatggcggcggacgtggtgggggacgtgtacgtgctggtggagcaccccttcgagtacaccggcaaggacgggcgccgcgtggccatccggccgaatgagcgctaccggctgctgcggcgcagcaccgagcactggtggcacgtgcggcgtgagcccggcggccgccccttctacctgcctgcgcagtacgtgcgcgagctgcccgcgctgggcaaccctgccgccgccgcgccgccaggtccccacccgagccccgcggcccctgagccgctcgcctacgactaccggtttgtgagcgcggcggcgaccgcgggccccgacggcgcccccgaggagtccggaggccgagccagctccctgtgcggccctgcgcaacgcggcgccgcgacccagcgcagcagcctggcgcccggcctgccagcctgcctgtacctgcggcccgcggcgcccgtgcggcccgcgcagtccctgaacgacctggcctgcgccgccgtctcgcctcccgccggcctcctaggaagcagcggcagcttcaaggcctgcagcgtggcgggctcctgggtgtgcccgcggcctctggcgcgcagcgactcagagaacgtctacgaggtcatccaggacttgcacgtcccgccgcgggaggagagcgcagagcaggtggacgacccaccggagcccgtgtacgcgaacatagagaggcagccccgggccacttcaccgggcgccgctgcagccccccttcccagcccggtgtgggagacgcacacggacgcgggcaccgggcgcccctactactacaacccagacacgggagttaccacctgggagtcgccctttgaggctgccgagggtgccgccagcccagccacctcccctgcctcggtggacagccacgtgagccttgagaccgagtggggccagtactgggatgaggagagccgcagggtgttcttctacaacccgctgacgggcgagacggcctgggaggacgaggccgagaacgagcccgaggaggagttggagatgcagccgggcctgagccctggcagcccaggggacccgcgggtgaggggcagggccagagtgggcggttctacctctgagcgcctctgatcccgcctcctgctcccagaggcccagggacacacggccccccactcccgagacggactaccccgagtcgctgaccagttaccccgaggaggactattctcccgtgggctctttcggtgagcccggccctacctctcccttgaccacaccccccggctggtcttgtcatgtcagccaggacaagcagatgctctacaccaaccacttcactcaggagcaggtaggggcagggggcagatggacccggacagcctcagagtcctccccacaaccttcctcactaataggtcgcctcagtgctctaaaccgcagctcccacacagagcctaaaccagccaaacacagtcacctgcacctgcccctccagactcc

SEQ ID NO: 352566 - DNA, 473 bp, Homo sapiens
cacagccccagggaccagagggtgaggtgcggagctacctctgagcgcttctgaccccgcctcctgctcccacagcctcagggaccagaaggcaagggggtgggcctggtccaaaacggcagggccagcaggcagtactggcactcagagcctctgactccaccttctgttccccgcagccccccactcccgagacggactaccccgagtcgctgaccagttaccccgaggaggactattctcccgtgggctctttcggtgagcccggccctacctctcccttgaccacaccccccggctggtcttgtcatgtcagccaggacaagcagatgctctacaccaaccacttcactcaggagcaggtaggggcagggggcagatggacccggacagcctcagagtcctccccacaaccttcctcactaataggtcgcctcagtgctctaaaccgcagctcccacacagagcctaaa

SEQ ID NO: 352567 - DNA, 156 bp, Homo sapiens
tgggatctatctgtcttcccccataggtcccagcagagctggatgaggttgggagctgggaggaagtctctcctgccacagctgctgtgagggtaggcatcaccccctacccccagccaggtggtggtgctggcgaggagggttcagggctcccgg

SEQ ID NO: 352568 - DNA, 4699 bp, Homo sapiens
agcgtggtgtcgaccttagagcgggcaatcacccctcgttttaaagccaaggcttccctcgcagtcgatttggaccaagactacccacaatctccccaccgcaggactgaagcaagggtcaaatcttagaatcaaccccacagaacgaagggctgtcctaattccagcactgagtgtaagaatggaagccttacatgtgattttatgcaagttcccattttagagatgggaaaactgaggcccgaaggcgaacggcgagtgcaggatcgggactcgaacccaagtctgtccccgagtgcggggctattccaggctcggtggtcttgacctccgcggccctccttcttgttgcccgcaggaaaacgccgcggctgcgatggcggcggacgtggtgggggacgtgtacgtgctggtggagcaccccttcgagtacaccggcaaggacgggcgccgcgtggccatccggccgaatgagcgctaccggctgctgcggcgcagcaccgagcactggtggcacgtgcggcgtgagcccggcggccgccccttctacctgcctgcgcagtacgtgcgcgagctgcccgcgctgggcaaccctgccgccgccgcgccgccaggtccccacccgagccccgcggcccctgagccgctcgcctacgactaccggtttgtgagcgcggcggcgaccgcgggccccgacggcgcccccgaggagtccggaggccgagccagctccctgtgcggccctgcgcaacgcggcgccgcgacccagcgcagcagcctggcgcccggcctgccagcctgcctgtacctgcggcccgcggcgcccgtgcggcccgcgcagtccctgaacgacctggcctgcgccgccgtctcgcctcccgccggcctcctaggaagcagcggcagcttcaaggcctgcagcgtggcgggctcctgggtgtgcccgcggcctctggcgcgcagcgactcagagaacgtctacgaggtcatccaggacttgcacgtcccgccgcgggaggagagcgcagagcaggtggacgacccaccggagcccgtgtacgcgaacatagagaggcagccccgggccacttcaccgggcgccgctgcagccccccttcccagcccggtgtgggagacgcacacggacgcgggcaccgggcgcccctactactacaacccagacacgggagttaccacctgggagtcgccctttgaggctgccgagggtgccgccagcccagccacctcccctgcctcggtggacagccacgtgagccttgagaccgagtggggccagtactgggatgaggagagccgcagggtgttcttctacaacccgctgacgggcgagacggcctgggaggacgaggccgagaacgagcccgaggaggagttggagatgcagccgggcctgagccctggcagcccaggggacccgcgggtgaggggcagggccagagtgggcggttctacctctgagcgcctctgatcccgcctcctgctcccagaggcccagggacacacggccccccactcccgagacggactaccccgagtcgctgaccagttaccccgaggaggactattctcccgtgggctctttcggtgagcccggccctacctctcccttgaccacaccccccggctggtcttgtcatgtcagccaggacaagcagatgctctacaccaaccacttcactcaggagcagtgggtgaggctggaggacccccacgggaagccatacttctacaatccagaggactcctctgttcgatgggagctgccccaggtccctgtccctgcccctcgaagcatccataaatccagccaggatggtgacaccccagcccaggccagccctccagaggagaaggtcccagcagagctggatgaggttgggagctgggaggaagtctctcctgccacagctgctgtgaggaccaagaccttggacaaggcaggggtgctccatcgcaccaagacggcagacaagggaaagcggctccggaagaagcactggagtgcctcctggactgtgctggagggtggcgtcctgacattcttcaaggactcaaagacctcggctgcaggcggcctgaggcagccttccaagttttccacccctgagtacacagtggagctgaggggggccactctctcctgggcccccaaagacaaatccagtaggaagaatgtgctggagctacggagccgagatggctctgagtacctgatccagcacgactcggaggccatcatcagcacctggcataaggccattgctcagggcatccaggagctgtccgcagagctgcccccagaggagagcgagagcagcagagtggacttcgggtcgagcgagcgcttgggaagctggcaggagaaagaggaggacgcgcgaccgaatgcagccgcgcccgccctgggccccgtgggcctggagagcgacttgagcaaggtccggcacaagctccgcaagttcctccagagccggcccacactgcagtcgctgcgggagaagggctacatcaaagaccaggtgttcggctgcgcgctggccgcgctgtgtgagcgcgagaggagccgggtgccacgcttcgtgcagcagtgcatccgcgccgtcgaggcccgcgggctggacatcgacgggctgtaccgcatcagtggaaacctggccaccatccagaagctacgctataaggtggaccacgatgagcgccttgacctggatgacgggcgctgggaggacgtccacgttatcaccggagccctgaagctcttctttcgggagctgcccgagcccctcttccccttctcgcacttccgccagttcattgcggccatcaagttgcaggaccaggcccggcgcagccgctgtgtgcgtgacttggtgcgctcgctgcccgctcccaaccacgacactctgcggatgctcttccagcacctctgccgggtgatcgagcacggcgagcagaaccgcatgtcggtgcagagcgtggccattgtgttcgggcccacgctgctgcggcccgaggtggaagagaccagcatgcccatgaccatggtgttccagaaccaggtggtggagctcatcctgcagcagtgcgcggacatcttcccgccgcactgactgctggcctgtgactggggcggcggccgcggtcctgccacacaagctgggcggcggaggccacgcagccgggccttcttctctctgggaccctccgccagcgcatagccgcaggccggtgtgacttctgcaccctcggttctgagggtacggtgacccctagtgggcagtttgcaaaatgtgattccttcttcccaactccccatccccccttcccttcccgtcacgtcctgtttgggggttaattcggttttttctctgttgcatcgcgcctactgtgcgtgtgcgatagcgtgtgtgggggtgagagtttgttttctggaatggtaggtgctgggaggaggagtttgatggagggcttcctggctgcttctggccctcacctcgtggaggccttcacagagaccctgtgggccctggccctgtgctggcactgtgccagtcatgaggcagctctgatcacttccccactgtggaaacaggactgacccagccttcagtgtgggctgctgaagctatcctcctcaggcctcagggatgacctcctgcctgagcctctcacaggctggctgtgggccagtttcatctgctttcctgttgggggtcccgggcctctgctgtccttgacccactggtgttctgtgcaaggcttcttcccattcaccaagtgcacaccttgcatctgccgctcggcatgcaccagttccacacaccatcccattttacagacaaggacgctgaggcctgcagcagcagtgtgacttgctcaaggtccagtgagtgacctcattccccagaaaaggctcctcccacaccagagtacagcctgggtagggggaaaatcagttctttcagctaccacccatccaacctttgggcctatgtgaaaagaaaggaactaagctgggtgtgttctgtctggacctggggaggcccctgaaggcaaagagggaaactgtcccagctgttctgtcctaggggagggggacatagccctagcaggagctcccagcccctcttggcactctgacacacaagtacacccatctggggcccgctttgccacgaagagctgggcaggcctgcagggtgtggggaaggaggacacaacctcaagaaaggaagcgtgaaccccagggaacagcgggtcccttccctcctcagacacaagccacctcagcttgtggctcttggcccccagccccaccaacccacctgttcatttattcaacagacaatgacagctgatatttattggacatttgcaccatgccaagcattcggcttggattatcccatttgtttctcacagccggtatttattgtctgctcctctgtgccaggtgctgtgctctgggcaggggcactgcatgggctgcctgccctggtggagcttgtggtctgatgggtgaggctgacccaagcccaccccattgccaacagggccagggcaagagtacacacaggggcctcataccatatgtctaaatatttaaaagttatcaatcaagctaacaactgttaaataaaatatgttctattctcctactttgaaaaatgtgctgaaa

SEQ ID NO: 352569 - DNA, 3736 bp, Homo sapiens
gtttccctgttgccctgtgccagcactggggtagtgcccctgggctctacccccaaaaccttcccagggctctgtcccggcagttcagaggggccaggatggtggacataatcgccaaagtgaccaggaggcagagtcgagccttgccggcacaggtggacgacccaccggagcccgtgtacgcgaacatagagaggcagccccgggccacttcaccgggcgccgctgcagccccccttcccagcccggtgtgggagacgcacacggacgcgggcaccgggcgcccctactactacaacccagacacgggagttaccacctgggagtcgccctttgaggctgccgagggtgccgccagcccagccacctcccctgcctcggtggacagccacgtgagccttgagaccgagtggggccagtactgggatgaggagagccgcagggtgttcttctacaacccgctgacgggcgagacggcctgggaggacgaggccgagaacgagcccgaggaggagttggagatgcagccgggcctgagccctggcagcccaggggacccgcggccccccactcccgagacggactaccccgagtcgctgaccagttaccccgaggaggactattctcccgtgggctctttcggtgagcccggccctacctctcccttgaccacaccccccggctggtcttgtcatgtcagccaggacaagcagatgctctacaccaaccacttcactcaggagcagtgggtgaggctggaggacccccacgggaagccatacttctacaatccagaggactcctctgttcgatgggagctgccccaggtccctgtccctgcccctcgaagcatccataaatccagccaggatggtgacaccccagcccaggccagccctccagaggagaaggtcccagcagagctggatgaggttgggagctgggaggaagtctctcctgccacagctgctgtgaggaccaagaccttggacaaggcaggggtgctccatcgcaccaagacggcagacaagggaaagcggctccggaagaagcactggagtgcctcctggactgtgctggagggtggcgtcctgacattcttcaaggactcaaagacctcggctgcaggcggcctgaggcagccttccaagttttccacccctgagtacacagtggagctgaggggggccactctctcctgggcccccaaagacaaatccagtaggaagaatgtgctggagctacggagccgagatggctctgagtacctgatccagcacgactcggaggccatcatcagcacctggcataaggccattgctcagggcatccaggagctgtccgcagagctgcccccagaggagagcgagagcagcagagtggacttcgggtcgagcgagcgcttgggaagctggcaggagaaagaggaggacgcgcgaccgaatgcagccgcgcccgccctgggccccgtgggcctggagagcgacttgagcaaggtccggcacaagctccgcaagttcctccagagccggcccacactgcagtcgctgcgggagaagggctacatcaaagaccaggtgttcggctgcgcgctggccgcgctgtgtgagcgcgagaggagccgggtgccacgcttcgtgcagcagtgcatccgcgccgtcgaggcccgcgggctggacatcgacgggctgtaccgcatcagtggaaacctggccaccatccagaagctacgctataaggtggaccacgatgagcgccttgacctggatgacgggcgctgggaggacgtccacgttatcaccggagccctgaagctcttctttcgggagctgcccgagcccctcttccccttctcgcacttccgccagttcattgcggccatcaagttgcaggaccaggcccggcgcagccgctgtgtgcgtgacttggtgcgctcgctgcccgctcccaaccacgacactctgcggatgctcttccagcacctctgccgggtgatcgagcacggcgagcagaaccgcatgtcggtgcagagcgtggccattgtgttcgggcccacgctgctgcggcccgaggtggaagagaccagcatgcccatgaccatggtgttccagaaccaggtggtggagctcatcctgcagcagtgcgcggacatcttcccgccgcactgactgctggcctgtgactggggcggcggccgcggtcctgccacacaagctgggcggcggaggccacgcagccgggccttcttctctctgggaccctccgccagcgcatagccgcaggccggtgtgacttctgcaccctcggttctgagggtacggtgacccctagtgggcagtttgcaaaatgtgattccttcttcccaactccccatccccccttcccttcccgtcacgtcctgtttgggggttaattcggttttttctctgttgcatcgcgcctactgtgcgtgtgcgatagcgtgtgtgggggtgagagtttgttttctggaatggtaggtgctgggaggaggagtttgatggagggcttcctggctgcttctggccctcacctcgtggaggccttcacagagaccctgtgggccctggccctgtgctggcactgtgccagtcatgaggcagctctgatcacttccccactgtggaaacaggactgacccagccttcagtgtgggctgctgaagctatcctcctcaggcctcagggatgacctcctgcctgagcctctcacaggctggctgtgggccagtttcatctgctttcctgttgggggtcccgggcctctgctgtccttgacccactggtgttctgtgcaaggcttcttcccattcaccaagtgcacaccttgcatctgccgctcggcatgcaccagttccacacaccatcccattttacagacaaggacgctgaggcctgcagcagcagtgtgacttgctcaaggtccagtgagtgacctcattccccagaaaaggctcctcccacaccagagtacagcctgggtagggggaaaatcagttctttcagctaccacccatccaacctttgggcctatgtgaaaagaaaggaactaagctgggtgtgttctgtctggacctggggaggcccctgaaggcaaagagggaaactgtcccagctgttctgtcctaggggagggggacatagccctagcaggagctcccagcccctcttggcactctgacacacaagtacacccatctggggcccgctttgccacgaagagctgggcaggcctgcagggtgtggggaaggaggacacaacctcaagaaaggaagcgtgaaccccagggaacagcgggtcccttccctcctcagacacaagccacctcagcttgtggctcttggcccccagccccaccaacccacctgttcatttattcaacagacaatgacagctgatatttattggacatttgcaccatgccaagcattcggcttggattatcccatttgtttctcacagccggtatttattgtctgctcctctgtgccaggtgctgtgctctgggcaggggcactgcatgggctgcctgccctggtggagcttgtggtctgatgggtgaggctgacccaagcccaccccattgccaacagggccagggcaagagtacacacaggggcctcataccatatgtctaaatatttaaaagttatcaatcaagctaacaactgttaaataaaatatgttctattctcctactttgaaaaatgtgctgaaa

SEQ ID NO: 352570 - DNA, 3083 bp, Homo sapiens
tgaccattcctctccccacagtgggtgaggctggaggacccccacgggaagccatacttctacaatccagaggactcctctgttcgatgggagctgccccaggtaacaacctggggaaaggggggtgttggggagagaggaagagatcatatacgactgtgtctttctccccaggtccctgtccctgcccctcgaagcatccataaatccagccaggatggtgacaccccagcccaggccagccctccagaggagaaggtcccagcagagctggatgaggttgggagctgggaggaagtctctcctgccacagctgctgtgaggaccaagaccttggacaaggcaggggtgctccatcgcaccaagacggcagacaagggaaagcggctccggaagaagcactggagtgcctcctggactgtgctggagggtggcgtcctgacattcttcaaggactcaaagacctcggctgcaggcggcctgaggcagccttccaagttttccacccctgagtacacagtggagctgaggggggccactctctcctgggcccccaaagacaaatccagtaggaagaatgtgctggagctacggagccgagatggctctgagtacctgatccagcacgactcggaggccatcatcagcacctggcataaggccattgctcagggcatccaggagctgtccgcagagctgcccccagaggagagcgagagcagcagagtggacttcgggtcgagcgagcgcttgggaagctggcaggagaaagaggaggacgcgcgaccgaatgcagccgcgcccgccctgggccccgtgggcctggagagcgacttgagcaaggtccggcacaagctccgcaagttcctccagagccggcccacactgcagtcgctgcgggagaagggctacatcaaagaccaggtgttcggctgcgcgctggccgcgctgtgtgagcgcgagaggagccgggtgccacgcttcgtgcagcagtgcatccgcgccgtcgaggcccgcgggctggacatcgacgggctgtaccgcatcagtggaaacctggccaccatccagaagctacgctataaggtggaccacgatgagcgccttgacctggatgacgggcgctgggaggacgtccacgttatcaccggagccctgaagctcttctttcgggagctgcccgagcccctcttccccttctcgcacttccgccagttcattgcggccatcaagttgcaggaccaggcccggcgcagccgctgtgtgcgtgacttggtgcgctcgctgcccgctcccaaccacgacactctgcggatgctcttccagcacctctgccgggtgatcgagcacggcgagcagaaccgcatgtcggtgcagagcgtggccattgtgttcgggcccacgctgctgcggcccgaggtggaagagaccagcatgcccatgaccatggtgttccagaaccaggtggtggagctcatcctgcagcagtgcgcggacatcttcccgccgcactgactgctggcctgtgactggggcggcggccgcggtcctgccacacaagctgggcggcggaggccacgcagccgggccttcttctctctgggaccctccgccagcgcatagccgcaggccggtgtgacttctgcaccctcggttctgagggtacggtgacccctagtgggcagtttgcaaaatgtgattccttcttcccaactccccatccccccttcccttcccgtcacgtcctgtttgggggttaattcggttttttctctgttgcatcgcgcctactgtgcgtgtgcgatagcgtgtgtgggggtgagagtttgttttctggaatggtaggtgctgggaggaggagtttgatggagggcttcctggctgcttctggccctcacctcgtggaggccttcacagagaccctgtgggccctggccctgtgctggcactgtgccagtcatgaggcagctctgatcacttccccactgtggaaacaggactgacccagccttcagtgtgggctgctgaagctatcctcctcaggcctcagggatgacctcctgcctgagcctctcacaggctggctgtgggccagtttcatctgctttcctgttgggggtcccgggcctctgctgtccttgacccactggtgttctgtgcaaggcttcttcccattcaccaagtgcacaccttgcatctgccgctcggcatgcaccagttccacacaccatcccattttacagacaaggacgctgaggcctgcagcagcagtgtgacttgctcaaggtccagtgagtgacctcattccccagaaaaggctcctcccacaccagagtacagcctgggtagggggaaaatcagttctttcagctaccacccatccaacctttgggcctatgtgaaaagaaaggaactaagctgggtgtgttctgtctggacctggggaggcccctgaaggcaaagagggaaactgtcccagctgttctgtcctaggggagggggacatagccctagcaggagctcccagcccctcttggcactctgacacacaagtacacccatctggggcccgctttgccacgaagagctgggcaggcctgcagggtgtggggaaggaggacacaacctcaagaaaggaagcgtgaaccccagggaacagcgggtcccttccctcctcagacacaagccacctcagcttgtggctcttggcccccagccccaccaacccacctgttcatttattcaacagacaatgacagctgatatttattggacatttgcaccatgccaagcattcggcttggattatcccatttgtttctcacagccggtatttattgtctgctcctctgtgccaggtgctgtgctctgggcaggggcactgcatgggctgcctgccctggtggagcttgtggtctgatgggtgaggctgacccaagcccaccccattgccaacagggccagggcaagagtacacacaggggcctcataccatatgtctaaatatttaaaagttatcaatcaagctaacaactgttaaataaaatatgttctattctcctactttgaaaaatgtgctgaaa

SEQ ID NO: 352571 - DNA, 4688 bp, Homo sapiens
gggccaggctgtaccggtcggaaggtgtacgatgcagcgcgggagccgcacagtcgaggagggagcgcgggacgccgagcccacgcgcgcctgccggggcaagtggaggcgaagccggcgagcggacgccccgagggtcggggaaggaaccgaggtccggtccccttcttatccagcccgagacatcgagctccggtgggcgtccctgcgctgggaatcccgctcggagtttttccaggcccggccgggctgctccgggaaaggccctgctcctgttccgcgcagcctctccggcctcgcccctggaaaccccgcccagggcgatggtaggggcctaacctgcagccaccgccggctccgcccacccagcccatgggctccctgaggcccgcccagccgacgaaaacgccgcggctgcgatggcggcggacgtggtgggggacgtgtacgtgctggtggagcaccccttcgagtacaccggcaaggacgggcgccgcgtggccatccggccgaatgagcgctaccggctgctgcggcgcagcaccgagcactggtggcacgtgcggcgtgagcccggcggccgccccttctacctgcctgcgcagtacgtgcgcgagctgcccgcgctgggcaaccctgccgccgccgcgccgccaggtccccacccgagccccgcggcccctgagccgctcgcctacgactaccggtttgtgagcgcggcggcgaccgcgggccccgacggcgcccccgaggagtccggaggccgagccagctccctgtgcggccctgcgcaacgcggcgccgcgacccagcgcagcagcctggcgcccggcctgccagcctgcctgtacctgcggcccgcggcgcccgtgcggcccgcgcagtccctgaacgacctggcctgcgccgccgtctcgcctcccgccggcctcctaggaagcagcggcagcttcaaggcctgcagcgtggcgggctcctgggtgtgcccgcggcctctggcgcgcagcgactcagagaacgtctacgaggtcatccaggacttgcacgtcccgccgcgggaggagagcgcagagcaggtggacgacccaccggagcccgtgtacgcgaacatagagaggcagccccgggccacttcaccgggcgccgctgcagccccccttcccagcccggtgtgggagacgcacacggacgcgggcaccgggcgcccctactactacaacccagacacgggagttaccacctgggagtcgccctttgaggctgccgagggtgccgccagcccagccacctcccctgcctcggtggacagccacgtgagccttgagaccgagtggggccagtactgggatgaggagagccgcagggtgttcttctacaacccgctgacgggcgagacggcctgggaggacgaggccgagaacgagcccgaggaggagttggagatgcagccgggcctgagccctggcagcccaggggacccgcgggtgaggggcagggccagagtgggcggttctacctctgagcgcctctgatcccgcctcctgctcccagaggcccagggacacacggccccccactcccgagacggactaccccgagtcgctgaccagttaccccgaggaggactattctcccgtgggctctttcggtgagcccggccctacctctcccttgaccacaccccccggctggtcttgtcatgtcagccaggacaagcagatgctctacaccaaccacttcactcaggagcagtgggtgaggctggaggacccccacgggaagccatacttctacaatccagaggactcctctgttcgatgggagctgccccaggtccctgtccctgcccctcgaagcatccataaatccagccaggatggtgacaccccagcccaggccagccctccagaggagaaggtcccagcagagctggatgaggttgggagctgggaggaagtctctcctgccacagctgctgtgaggaccaagaccttggacaaggcaggggtgctccatcgcaccaagacggcagacaagggaaagcggctccggaagaagcactggagtgcctcctggactgtgctggagggtggcgtcctgacattcttcaaggactcaaagacctcggctgcaggcggcctgaggcagccttccaagttttccacccctgagtacacagtggagctgaggggggccactctctcctgggcccccaaagacaaatccagtaggaagaatgtgctggagctacggagccgagatggctctgagtacctgatccagcacgactcggaggccatcatcagcacctggcataaggccattgctcagggcatccaggagctgtccgcagagctgcccccagaggagagcgagagcagcagagtggacttcgggtcgagcgagcgcttgggaagctggcaggagaaagaggaggacgcgcgaccgaatgcagccgcgcccgccctgggccccgtgggcctggagagcgacttgagcaaggtccggcacaagctccgcaagttcctccagagccggcccacactgcagtcgctgcgggagaagggctacatcaaagaccaggtgttcggctgcgcgctggccgcgctgtgtgagcgcgagaggagccgggtgccacgcttcgtgcagcagtgcatccgcgccgtcgaggcccgcgggctggacatcgacgggctgtaccgcatcagtggaaacctggccaccatccagaagctacgctataaggtggaccacgatgagcgccttgacctggatgacgggcgctgggaggacgtccacgttatcaccggagccctgaagctcttctttcgggagctgcccgagcccctcttccccttctcgcacttccgccagttcattgcggccatcaagttgcaggaccaggcccggcgcagccgctgtgtgcgtgacttggtgcgctcgctgcccgctcccaaccacgacactctgcggatgctcttccagcacctctgccgggtgatcgagcacggcgagcagaaccgcatgtcggtgcagagcgtggccattgtgttcgggcccacgctgctgcggcccgaggtggaagagaccagcatgcccatgaccatggtgttccagaaccaggtggtggagctcatcctgcagcagtgcgcggacatcttcccgccgcactgactgctggcctgtgactggggcggcggccgcggtcctgccacacaagctgggcggcggaggccacgcagccgggccttcttctctctgggaccctccgccagcgcatagccgcaggccggtgtgacttctgcaccctcggttctgagggtacggtgacccctagtgggcagtttgcaaaatgtgattccttcttcccaactccccatccccccttcccttcccgtcacgtcctgtttgggggttaattcggttttttctctgttgcatcgcgcctactgtgcgtgtgcgatagcgtgtgtgggggtgagagtttgttttctggaatggtaggtgctgggaggaggagtttgatggagggcttcctggctgcttctggccctcacctcgtggaggccttcacagagaccctgtgggccctggccctgtgctggcactgtgccagtcatgaggcagctctgatcacttccccactgtggaaacaggactgacccagccttcagtgtgggctgctgaagctatcctcctcaggcctcagggatgacctcctgcctgagcctctcacaggctggctgtgggccagtttcatctgctttcctgttgggggtcccgggcctctgctgtccttgacccactggtgttctgtgcaaggcttcttcccattcaccaagtgcacaccttgcatctgccgctcggcatgcaccagttccacacaccatcccattttacagacaaggacgctgaggcctgcagcagcagtgtgacttgctcaaggtccagtgagtgacctcattccccagaaaaggctcctcccacaccagagtacagcctgggtagggggaaaatcagttctttcagctaccacccatccaacctttgggcctatgtgaagcaaagagggaaactgtcccagctgttctgtcctaggggagggggacatagccctagcaggagctcccagcccctcttggcactctgacacacaagtacacccatctggggcccgctttgccacgaagagctgggcaggcctgcagggtgtggggaaggaggacacaacctcaagaaaggaagcgtgaaccccagggaacagcgggtcccttccctcctcagacacaagccacctcagcttgtggctcttggcccccagccccaccaacccacctgttcatttattcaacagacaatgacagctgatatttattggacatttgcaccatgccaagcattcggcttggattatcccatttgtttctcacagccggtatttattgtctgctcctctgtgccaggtgctgtgctctgggcaggggcactgcatgggctgcctgccctggtggagcttgtggtctgatgggtgaggctgacccaagcccaccccattgccaacagggccagggcaagagtacacacaggggcctcataccatatgtctaaatatttaaaagttatcaatcaagctaacaactgttaaataaaatatgttctattctcctactttgaaaaatgtgctgaaa

SEQ ID NO: 352572 - DNA, 5077 bp, Homo sapiens
gggccaggctgtaccggtcggaaggtgtacgatgcagcgcgggagccgcacagtcgaggagggagcgcgggacgccgagcccacgcgcgcctgccggggcaagtggaggcgaagccggcgagcggacgccccgagggtcggggaaggaaccgaggtccggtccccttcttatccagcccgagacatcgagctccggtgggcgtccctgcgctgggaatcccgctcggagtttttccaggcccggccgggctgctccgggaaaggccctgctcctgttccgcgcagcctctccggcctcgcccctggaaaccccgcccagggcgatggtaggggcctaacctgcagccaccgccggctccgcccacccagcccatgggctccctgaggcccgcccagccgacgaaaacgccgcggctgcgatggcggcggacgtggtgggggacgtgtacgtgctggtggagcaccccttcgagtacaccggcaaggacgggcgccgcgtggccatccggccgaatgagcgctaccggctgctgcggcgcagcaccgagcactggtggcacgtgcggcgtgagcccggcggccgccccttctacctgcctgcgcagtacgtgcgcgagctgcccgcgctgggcaaccctgccgccgccgcgccgccaggtccccacccgagccccgcggcccctgagccgctcgcctacgactaccggtttgtgagcgcggcggcgaccgcgggccccgacggcgcccccgaggagtccggaggccgagccagctccctgtgcggccctgcgcaacgcggcgccgcgacccagcgcagcagcctggcgcccggcctgccagcctgcctgtacctgcggcccgcggcgcccgtgcggcccgcgcagtccctgaacgacctggcctgcgccgccgtctcgcctcccgccggcctcctaggaagcagcggcagcttcaaggcctgcagcgtggcgggctcctgggtgtgcccgcggcctctggcgcgcagcgactcagagaacgtctacgaggtcatccaggacttgcacgtcccgccgcgggaggagagcgcagagcaggtggacgacccaccggagcccgtgtacgcgaacatagagaggcagccccgggccacttcaccgggcgccgctgcagccccccttcccagcccggtgtgggagacgcacacggacgcgggcaccgggcgcccctactactacaacccagacacgggagttaccacctgggagtcgccctttgaggctgccgagggtgccgccagcccagccacctcccctgcctcggtggacagccacgtgagccttgagaccgagtggggccagtactgggatgaggagagccgcagggtgttcttctacaacccgctgacgggcgagacggcctgggaggacgaggccgagaacgagcccgaggaggagttggagatgcagccgggcctgagccctggcagcccaggggacccgcgggtgaggggcagggccagagtgggcggttctacctctgagcgcctctgatcccgcctcctgctcccagaggcccagggacacacggccccccactcccgagacggactaccccgagtcgctgaccagttaccccgaggaggactattctcccgtgggctctttcggtgagcccggccctacctctcccttgaccacaccccccggctggtcttgtcatgtcagccaggacaagcagatgctctacaccaaccacttcactcaggagcagtgggtgaggctggaggacccccacgggaagccatacttctacaatccagaggactcctctgttcgatgggagctgccccaggtccctgtccctgcccctcgaagcatccataaatccagccaggatggtgacaccccagcccaggccagccctccagaggagaaggtcccagcagagctggatgaggttgggagctgggaggaagtctctcctgccacagctgctgtgaggaccaagaccttggacaaggcaggggtgctccatcgcaccaagacggcagacaagggaaagcggctccggaagaagcactggagtgcctcctggactgtgctggagggtggcgtcctgacattcttcaaggactcaaagacctcggctgcaggcggcctgaggcagccttccaagttttccacccctgagtacacagtggagctgaggggggccactctctcctgggcccccaaagacaaatccagtaggaagaatgtgctggagctacggagccgagatggctctgagtacctgatccagcacgactcggaggccatcatcagcacctggcataaggccattgctcagggcatccaggagctgtccgcagagctgcccccagaggagagcgagagcagcagagtggacttcgggtcgagcgagcgcttgggaagctggcaggagaaagaggaggacgcgcgaccgaatgcagccgcgcccgccctgggccccgtgggcctggagagcgacttgagcaaggtccggcacaagctccgcaagttcctccagagccggcccacactgcagtcgctgcgggagaagggctacatcaaagaccaggtgttcggctgcgcgctggccgcgctgtgtgagcgcgagaggagccgggtgccacgcttcgtgcagcagtgcatccgcgccgtcgaggcccgcggtacgtgcgctgcgggggtgagggcggcaggcattggggtgcccgcaggcctcctgccaggaccgcaggctggagacccctggatggacgcagggtccagggggaaagtacgggaggccccgagtgggagtcatagcagggacccgtagccccaccctatccccatccctgaacccgggatcagcgcctccctctggcccagggctggacatcgacgggctgtaccgcatcagtggaaacctggccaccatccagaagctacgctataaggtggaccacgatgagcgccttgacctggatgacgggcgctgggaggacgtccacgttatcaccggagccctgaagctcttctttcgggagctgcccgagcccctcttccccttctcgcacttccgccagttcattgcggccatcagtgagcacctggggcaggtggggcggatggggtaggggcgtggcggggcacccctttagcaggctcccctcgcccagccgataccccctacctcccgttccgactccctccctctaaaccttccctcacccagagttgcaggaccaggcccggcgcagccgctgtgtgcgtgacttggtgcgctcgctgcccgctcccaaccacgacactctgcggatgctcttccagcacctctgccgggtgatcgagcacggcgagcagaaccgcatgtcggtgcagagcgtggccattgtgttcgggcccacgctgctgcggcccgaggtggaagagaccagcatgcccatgaccatggtgttccagaaccaggtggtggagctcatcctgcagcagtgcgcggacatcttcccgccgcactgactgctggcctgtgactggggcggcggccgcggtcctgccacacaagctgggcggcggaggccacgcagccgggccttcttctctctgggaccctccgccagcgcatagccgcaggccggtgtgacttctgcaccctcggttctgagggtacggtgacccctagtgggcagtttgcaaaatgtgattccttcttcccaactccccatccccccttcccttcccgtcacgtcctgtttgggggttaattcggttttttctctgttgcatcgcgcctactgtgcgtgtgcgatagcgtgtgtgggggtgagagtttgttttctggaatggtaggtgctgggaggaggagtttgatggagggcttcctggctgcttctggccctcacctcgtggaggccttcacagagaccctgtgggccctggccctgtgctggcactgtgccagtcatgaggcagctctgatcacttccccactgtggaaacaggactgacccagccttcagtgtgggctgctgaagctatcctcctcaggcctcagggatgacctcctgcctgagcctctcacaggctggctgtgggccagtttcatctgctttcctgttgggggtcccgggcctctgctgtccttgacccactggtgttctgtgcaaggcttcttcccattcaccaagtgcacaccttgcatctgccgctcggcatgcaccagttccacacaccatcccattttacagacaaggacgctgaggcctgcagcagcagtgtgacttgctcaaggtccagtgagtgacctcattccccagaaaaggctcctcccacaccagagtacagcctgggtagggggaaaatcagttctttcagctaccacccatccaacctttgggcctatgtgaaaagaaaggaactaagctgggtgtgttctgtctggacctggggaggcccctgaaggcaaagagggaaactgtcccagctgttctgtcctaggggagggggacatagccctagcaggagctcccagcccctcttggcactctgacacacaagtacacccatctggggcccgctttgccacgaagagctgggcaggcctgcagggtgtggggaaggaggacacaacctcaagaaaggaagcgtgaaccccagggaacagcgggtcccttccctcctcagacacaagccacctcagcttgtggctcttggcccccagccccaccaacccacctgttcatttattcaacagacaatgacagctgatatttattggacatttgcaccatgccaagcattcggcttggattatcccatttgtttctcacagccggtatttattgtctgctcctctgtgccaggtgctgtgctctgggcaggggcactgcatgggctgcctgccctggtggagcttgtggtctgatgggtgaggctgacccaagcccaccccattgccaacagggccagggcaagagtacacacaggggcctcataccatatgtctaaatatttaaaagttatcaatcaagctaacaactgttaaataaaatatgttctattctcctactttgaaaaatgtgctgaaa

SEQ ID NO: 352573 - DNA, 5187 bp, Homo sapiens
gggccaggctgtaccggtcggaaggtgtacgatgcagcgcgggagccgcacagtcgaggagggagcgcgggacgccgagcccacgcgcgcctgccggggcaagtggaggcgaagccggcgagcggacgccccgagggtcggggaaggaaccgaggtccggtccccttcttatccagcccgagacatcgagctccggtgggcgtccctgcgctgggaatcccgctcggagtttttccaggcccggccgggctgctccgggaaaggccctgctcctgttccgcgcagcctctccggcctcgcccctggaaaccccgcccagggcgatggtaggggcctaacctgcagccaccgccggctccgcccacccagcccatgggctccctgaggcccgcccagccgacgaaaacgccgcggctgcgatggcggcggacgtggtgggggacgtgtacgtgctggtggagcaccccttcgagtacaccggcaaggacgggcgccgcgtggccatccggccgaatgagcgctaccggctgctgcggcgcagcaccgagcactggtggcacgtgcggcgtgagcccggcggccgccccttctacctgcctgcgcagtacgtgcgcgagctgcccgcgctgggcaaccctgccgccgccgcgccgccaggtccccacccgagccccgcggcccctgagccgctcgcctacgactaccggtttgtgagcgcggcggcgaccgcgggccccgacggcgcccccgaggagtccggaggccgagccagctccctgtgcggccctgcgcaacgcggcgccgcgacccagcgcagcagcctggcgcccggcctgccagcctgcctgtacctgcggcccgcggcgcccgtgcggcccgcgcagtccctgaacgacctggcctgcgccgccgtctcgcctcccgccggcctcctaggaagcagcggcagcttcaaggcctgcagcgtggcgggctcctgggtgtgcccgcggcctctggcgcgcagcgactcagagaacgtctacgaggtcatccaggacttgcacgtcccgccgcgggaggagagcgcagagcaggtggacgacccaccggagcccgtgtacgcgaacatagagaggcagccccgggccacttcaccgggcgccgctgcagccccccttcccagcccggtgtgggagacgcacacggacgcgggcaccgggcgcccctactactacaacccagacacgggagttaccacctgggagtcgccctttgaggctgccgagggtgccgccagcccagccacctcccctgcctcggtggacagccacgtgagccttgagaccgagtggggccagtactgggatgaggagagccgcagggtgttcttctacaacccgctgacgggcgagacggcctgggaggacgaggccgagaacgagcccgaggaggagttggagatgcagccgggcctgagccctggcagcccaggggacccgcgggtgaggggcagggccagagtgggcggttctacctctgagcgcctctgatcccgcctcctgctcccagaggcccagggacacacggccccccactcccgagacggactaccccgagtcgctgaccagttaccccgaggaggactattctcccgtgggctctttcggtgagcccggccctacctctcccttgaccacaccccccggctggtcttgtcatgtcagccaggacaagcagatgctctacaccaaccacttcactcaggagcagtgggtgaggctggaggacccccacgggaagccatacttctacaatccagaggactcctctgttcgatgggagctgccccaggtccctgtccctgcccctcgaagcatccataaatccagccaggatggtgacaccccagcccaggccagccctccagaggagaaggtcccagcagagctggatgaggttgggagctgggaggaagtctctcctgccacagctgctgtgaggaccaagaccttggacaaggcaggggtgctccatcgcaccaagacggcagacaagggaaagcggctccggaagaagcactggagtgcctcctggactgtgctggagggtggcgtcctgacattcttcaaggactcaaagacctcggctgcaggcggcctgaggcagccttccaagttttccacccctgagtacacagtggagctgaggggggccactctctcctgggcccccaaagacaaatccagtaggaagaatgtgctggagctacggagccgagatggctctgagtacctgatccagcacgactcggaggccatcatcagcacctggcataaggccattgctcagggcatccaggagctgtccgcagagctgcccccagaggagagcgagagcagcagagtggacttcgggtcgagcgagcgcttgggaagctggcaggagaaagaggaggacgcgcgaccgaatgcagccgcgcccgccctgggccccgtgggcctggagagcgacttgagcaaggtccggcacaagctccgcaagttcctccagagccggcccacactgcagtcgctgcgggagaagggctacatcaaagaccaggtgttcggctgcgcgctggccgcgctgtgtgagcgcgagaggagccgggtgccacgcttcgtgcagcagtgcatccgcgccgtcgaggcccgcggtacgtgcgctgcgggggtgagggcggcaggcattggggtgcccgcaggcctcctgccaggaccgcaggctggagacccctggatggacgcagggtccagggggaaagtacgggaggccccgagtgggagtcatagcagggacccgtagccccaccctatccccatccctgaacccgggatcagcgcctccctctggcccagggctggacatcgacgggctgtaccgcatcagtggaaacctggccaccatccagaagctacgctataaggtggaccacgatgagcgccttgacctggatgacgggcgctgggaggacgtccacgttatcaccggagccctgaagctcttctttcgggagctgcccgagcccctcttccccttctcgcacttccgccagttcattgcggccatcagtgagcacctggggcaggtggggcggatggggtaggggcgtggcggggcacccctttagcaggctcccctcgcccagccgataccccctacctcccgttccgactccctccctctaaaccttccctcacccagagttgcaggaccaggcccggcgcagccgctgtgtgcgtgacttggtgcgctcgctgcccgctcccaaccacgacactctgcggatgctcttccagcacctctgccggtgagccgggcggcccgcgcgggaagggggaggcaggtcccggctgaagcccccagcgcctccccgcagttcgcagttcggagccctgaacccacccacccctgccacagggtgatcgagcacggcgagcagaaccgcatgtcggtgcagagcgtggccattgtgttcgggcccacgctgctgcggcccgaggtggaagagaccagcatgcccatgaccatggtgttccagaaccaggtggtggagctcatcctgcagcagtgcgcggacatcttcccgccgcactgactgctggcctgtgactggggcggcggccgcggtcctgccacacaagctgggcggcggaggccacgcagccgggccttcttctctctgggaccctccgccagcgcatagccgcaggccggtgtgacttctgcaccctcggttctgagggtacggtgacccctagtgggcagtttgcaaaatgtgattccttcttcccaactccccatccccccttcccttcccgtcacgtcctgtttgggggttaattcggttttttctctgttgcatcgcgcctactgtgcgtgtgcgatagcgtgtgtgggggtgagagtttgttttctggaatggtaggtgctgggaggaggagtttgatggagggcttcctggctgcttctggccctcacctcgtggaggccttcacagagaccctgtgggccctggccctgtgctggcactgtgccagtcatgaggcagctctgatcacttccccactgtggaaacaggactgacccagccttcagtgtgggctgctgaagctatcctcctcaggcctcagggatgacctcctgcctgagcctctcacaggctggctgtgggccagtttcatctgctttcctgttgggggtcccgggcctctgctgtccttgacccactggtgttctgtgcaaggcttcttcccattcaccaagtgcacaccttgcatctgccgctcggcatgcaccagttccacacaccatcccattttacagacaaggacgctgaggcctgcagcagcagtgtgacttgctcaaggtccagtgagtgacctcattccccagaaaaggctcctcccacaccagagtacagcctgggtagggggaaaatcagttctttcagctaccacccatccaacctttgggcctatgtgaaaagaaaggaactaagctgggtgtgttctgtctggacctggggaggcccctgaaggcaaagagggaaactgtcccagctgttctgtcctaggggagggggacatagccctagcaggagctcccagcccctcttggcactctgacacacaagtacacccatctggggcccgctttgccacgaagagctgggcaggcctgcagggtgtggggaaggaggacacaacctcaagaaaggaagcgtgaaccccagggaacagcgggtcccttccctcctcagacacaagccacctcagcttgtggctcttggcccccagccccaccaacccacctgttcatttattcaacagacaatgacagctgatatttattggacatttgcaccatgccaagcattcggcttggattatcccatttgtttctcacagccggtatttattgtctgctcctctgtgccaggtgctgtgctctgggcaggggcactgcatgggctgcctgccctggtggagcttgtggtctgatgggtgaggctgacccaagcccaccccattgccaacagggccagggcaagagtacacacaggggcctcataccatatgtctaaatatttaaaagttatcaatcaagctaacaactgttaaataaaatatgttctattctcctactttgaaaaatgtgctgaaa

SEQ ID NO: 352574 - DNA, 3833 bp, Homo sapiens
gggccaggctgtaccggtcggaaggtgtacgatgcagcgcgggagccgcacagtcgaggagggagcgcgggacgccgagcccacgcgcgcctgccggggcaagtggaggcgaagccggcgagcggacgccccgagggtcggggaaggaaccgaggtccggtccccttcttatccagcccgagacatcgagctccggtgggcgtccctgcgctgggaatcccgctcggagtttttccaggcccggccgggctgctccgggaaaggccctgctcctgttccgcgcagcctctccggcctcgcccctggaaaccccgcccagggcgatggtaggggcctaacctgcagccaccgccggctccgcccacccagcccatgggctccctgaggcccgcccagccgacgaaaacgccgcggctgcgatggcggcggacgtggtgggggacgtgtacgtgctggtggagcaccccttcgagtacaccggcaaggacgggcgccgcgtggccatccggccgaatgagcgctaccggctgctgcggcgcagcaccgagcactggtggcacgtgcggcgtgagcccggcggccgccccttctacctgcctgcgcagtacgtgcgcgagctgcccgcgctgggcaaccctgccgccgccgcgccgccaggtccccacccgagccccgcggcccctgagccgctcgcctacgactaccggtttgtgagcgcggcggcgaccgcgggccccgacggcgcccccgaggagtccggaggccgagccagctccctgtgcggccctgcgcaacgcggcgccgcgacccagcgcagcagcctggcgcccggcctgccagcctgcctgtacctgcggcccgcggcgcccgtgcggcccgcgcagtccctgaacgacctggcctgcgccgccgtctcgcctcccgccggcctcctaggaagcagcggcagcttcaaggcctgcagcgtggcgggctcctgggtgtgcccgcggcctctggcgcgcagcgactcagagaacgtctacgaggtcatccaggacttgcacgtcccgccgcgggaggagagcgcagagcaggtggacgacccaccggagcccgtgtacgcgaacatagagaggcagccccgggccacttcaccgggcgccgctgcagccccccttcccagcccggtgtgggagacgcacacggacgcgggcaccgggcgcccctactactacaacccagacacgggagttaccacctgggagtcgccctttgaggctgccgagggtgccgccagcccagccacctcccctgcctcggtggacagccacgtgagccttgagaccgagtggggccagtactgggatgaggagagccgcagggtgttcttctacaacccgctgacgggcgagacggcctgggaggacgaggccgagaacgagcccgaggaggagttggagatgcagccgggcctgagccctggcagcccaggggacccgcgggtgaggggcagggccagagtgggcggttctacctctgagcgcctctgatcccgcctcctgctcccagaggcccagggacacacggccccccactcccgagacggactaccccgagtcgctgaccagttaccccgaggaggactattctcccgtgggctctttcggtgagcccggccctacctctcccttgaccacaccccccggctggtcttgtcatgtcagccaggacaagcagatgctctacaccaaccacttcactcaggagcagtgggtgaggctggaggacccccacgggaagccatacttctacaatccagaggactcctctgttcgatgggagctgccccaggtccctgtccctgcccctcgaagcatccataaatccagccaggatggtgacaccccagcccaggccagccctccagaggagaaggtcccagcagagctggatgaggttgggagctgggaggaagtctctcctgccacagctgctgtgaggaccaagaccttggacaaggcaggggtgctccatcgcaccaagacggcagacaagggaaagcggctccggaagaagcactggagtgcctcctggactgtgctggagggtggcgtcctgacattcttcaaggactcaaagacctcggctgcaggcggcctgaggcagccttccaagttttccacccctgagtacacagtggagctgaggggggccactctctcctgggcccccaaagacaaatccagtaggaagaatgtgctggagctacggagccgagatggctctgagtacctgatccagcacgactcggaggccatcatcagcacctggcataaggccattgctcagggcatccaggagctgtccgcagagctgcccccagaggagagcgagagcagcagagtggacttcgggtcgagcgagcgcttgggaagctggcaggagaaagaggaggacgcgcgaccgaatgcagccgcgcccgccctgggccccgtgggcctggagagcgacttgagcaaggtccggcacaagctccgcaagttcctccagagccggcccacactgcagtcgctgcgggagaagggctacatcaaagaccaggtgttcggctgcgcgctggccgcgctgtgtgagcgcgagaggagccgggtgccacgcttcgtgcagcagtgcatccgcgccgtcgaggcccgcgggctggacatcgacgggctgtaccgcatcagtggaaacctggccaccatccagaagctacgctataaggtggaccacgatgagcgccttgacctggatgacgggcgctgggaggacgtccacgttatcaccggagccctgaagctcttctttcgggagctgcccgagcccctcttccccttctcgcacttccgccagttcattgcggccatcaagttgcaggaccaggcccggcgcagccgctgtgtgcgtgacttggtgcgctcgctgcccgctcccaaccacgacactctgcggatgctcttccagcacctctgccgggtgatcgagcacggcgagcagaaccgcatgtcggtgcagagcgtggccattgtgttcgggcccacgctgctgcggcccgaggtggaagagaccagcatgcccatgaccatggtgttccagaaccaggtggtggagctcatcctgcagcagtgcgcggacatcttcccgccgcactgactgctggcctgtgactggggcggcggccgcggtcctgccacacaagctgggcggcggaggccacgcagccgggccttcttctctctgggaccctccgccagcgcatagccgcaggccggtgtgacttctgcaccctcggttctgagggtacggtgacccctagtgggcagtttgcaaaatgtgattccttcttcccaactccccatccccccttcccttcccgtcacgtcctgtttgggggttaattcggttttttctctgttgcatcgcgcctactgtgcgtgtgcgatagcgtgtgtgggggtgagagtttgttttctggaatggtaggtgctgggaggaggagtttgatggagggcttcctggctgcttctggccctcacctcgtggaggccttcacagagaccctgtgggccctggccctgtgctggcactgtgccagtcatgaggcagctctgatcacttccccactgccctggtggagcttgtggtctgatgggtgaggctgacccaagcccaccccattgccaacagggccagggcaagagtacacacaggggcctcataccatatgtctaaatatttaaaagttatcaatcaagctaacaactgttaaataaaatatgttctattctcctactttgaaaaatgtgctgaaa

SEQ ID NO: 352575 - DNA, 633 bp, Homo sapiens
  misc_feature (12)..(12): n is a, c, g, or t
agggtttcttgntctcctgattttagcctctgtatgtatgcacttcgactctactgggtcacccaaccatgtgccgctccagcctgggcaacagagcgagactgtctcaaattaagaaaaagaaaaacaagtagttcctgatatttaatatctggctctctggcttctcttggaagcctggtgaatgtggcagcctgggccagcctccccttagtaggggtcagcgcagttacccagctgtgaccctagacaccggccttctcattggcctctgtgctcctcccctcccctgcccaagctggagtttgccctcctggctttaagtctccagagcagaagctgatgagggaagagcctcccgtcttcagtctacaggaagatgctggcttggtttgaaagtccccagaagcagaccccaggacaaggatgtgtgtgccgcagtgtatctgcccagcagacggcttttggggagagggggagtgaggcagggcagggggtgtcagagtgagccccgccccatgggtgcctggggtgccctgagaagcgataccgtctgtgcctctgcacctgcccctgaggggcgagggagctggcgtttgtctggcagtggtagcggggagcaccttgtggcgc

SEQ ID NO: 352576 - DNA, 4004 bp, Homo sapiens
cggagtttcccagcgacggccgtaagtggcgggcggaagcggccctagaagcccgccgtaaacggctccctcgcgccacttccggccggcttccgcagacggcgctggtggtcgatcgtgtggcgccggaggacgttccccgcggccggagccatggagatgccgctgccccccgatgaccaggagcttcgaaatgtcatcgacaagctcgcccagttcgtggctcgcaatgggcccgagtttgagaagatgactatggagaagcagaaggacaaccccaaattctcgtttcttttcggaggcgaattctacagttactacaagtgcaagctggcgctggagcagcagcagctcatctgcaagcagcagaccccggagctggagccagccgccaccatgccacccctgccacagcccccgctggcccccgccgcgcccatcccgccggcccagggcgcgccatccatggacgagctcatccagcagagccagtggaacctccagcagcaggagcagcacttgctggcgctcagacaggagcaagtgacagcggccgtggcccacgcggtggagcagcagatgcagaagcttctggaggagacccagctagacatgaacgagtttgacaacctcctgcagcccatcatcgacacgtgcaccaaggacgccatctcggccgggaagaactggatgttcagcaatgccaagtccccgccgcactgtgagctgatggccggccacctccggaaccgcatcacggctgatggggcacacttcgagctgcggctgcacctcatctacctgatcaatgacgtgctgcaccactgccagcgcaagcaggcccgggagctgctggccgccctgcagaaggtcgtggtgcccatctactgcaccagcttcttggccgtggaggaagacaagcagcagaagatcgcccggctcctgcagctctgggagaaaaacggctacttcgatgactccatcattcagcagctacagagcccagccctggggcttggtcagtaccaggccaccctcatcaacgagtactcctcagtggtccagccggtgcagctggccttccagcagcagatccagaccctcaagacgcagcacgaggagtttgtcaccagcctggcccagcagcagcagcagcagcaacagcagcagcagcagctccagatgccgcagatggaggctgaagtcaaggccacgcctccaccgcctgctccacccccggccccagcacctgcccctgccatcccgcccaccacccagcctgatgacagcaagcctcccatccagatgcctggctcttcagagtacgaagctccaggaggggtccaggatcctgcagctgccggcccccggggccccgggccacacgaccagatcccaccaaacaagcccccttggtttgaccagcctcaccccgtggctccttggggccagcagcagccgccagagcagccaccctacccgcaccaccagggcggcccaccccactgccccccctggaacaacagccatgagggcatgtggggcgagcagcgcggtgaccccggctggaacggccagcgcgacgcgccctggaacaaccagcccgacgccgcctggaacagccagttcgagggcccctggaacagccagcacgagcagccgccctggggcgggggccagcgcgagccacccttccgcatgcagcggcccccacacttccgggggcccttcccgccccaccagcagcacccgcagttcaaccagcctccgcacccccacaacttcaaccgcttcccgccccgcttcatgcaggacgacttcccgccacggcaccccttcgagcggccgccctatccccaccgcttcgactacccccagggggacttccctgccgaaatggggccccctcaccaccaccctggccaccgcatgcctcatcctggcatcaacgagcacccgccttgggctggaccccagcaccctgacttcggccctcccccccatggcttcaacgggcagcccccacacatgcggcgacagggcccgccccacatcaaccacgatgaccccagcctggtccccaatgtgccctacttcgatctccctgctgggctgatggcccccctcgtgaagctggaagatcacgagtacaagcctttggaccctaaagacatccgcctcccaccccccatgccgcccagcgagaggctgctggctgcagtggaggccttctacagccccccgtcccacgacaggcccaggaacagtgaaggctgggagcagaacggcctctatgagttcttccgagcaaaaatgcgggcccggcggaggaaaggccaggagaagaggaacagcggaccctcgaggtctcggagcagatccaagagtcgagggcgttcttcctcccgctccaactcaagatcctccaagtcttcaggctcgtactcaaggtcaaggtcgcgctcctgctcccgttcctactcccgctccagatctagaagtcggagcaggtcgcgctcctccagaagccgctcccggtcccagtcgcggtcccggtccaagtcgtactccccaggaagaagacgccggtcacggtccaggagccccaccccgccgtccgggataagtgggaccagtataaaggcgtgggcgtggctctggatgacccctatgagaactaccgcaggaacaagagctactccttcatcgcccgcatgaaggccagggacgagtgtaagtaggcgcccatgccgggagccgcgccggtggccagcggtgccggctgtgggaccttcctggctgactggcagaggaagattgcagtgacagctcagttcttacaccgtctccacttgtggagagccacaggaagagaaggaagaccagcgcatgcccagtgggaacgccgtgctccatggcgtggagggcacgggtgccacccacaaaccacaccaggaggcgctgcagccaccagggccccaggctcgttttcctttatagcgaagcaaaaaacacaagaccctccgcccgagtaaattcttcagccacgaagggatggatgtgcatctgccctaagtcagattgaagcctcctcctaggctccaggaggagcatgtgcaggaagggttggcctgagccagagccggcaccccagctccttcctccagctccccgcacccaccggccctgacctggcttcccctcggctgtgtagggacaaagccgaagcccagtgccatgactgcccgcggattgaaaaacagaaacacaaaactttgacttgacttgcgaagtgaagcagggttttcatttttactctccttggtttaggtctagaaagaagaatactgacctgagaggaggcccagtgagattctgaaacctaattcttcgaaggcgtactggcccttagttcagttattttagttgtataagttgatattttttttctggaatgtagccatttgctgttatctgggaaacaagattctaacaggaaaccagcctaagacacttcaggttgagcgctgcctcggagtctgtgcccgtcgcgtcccctgcttgagttttgcacttggaagaaccctgcaccggctggcgtgtgcgacggcccagtcccatccagagcatggagcccgaccccagccagcgccttccactccatcatttcatttcacacccccgaagggaggggaggccaggaggggagctgctcctgccagaagctggtgggtgaccgttgggaatcggccacacctggtgtccatgggcagcctggtgcaattccattcatttgtacagaaacatttttgaaaaattcttttcaataagatgcaaaatcttccaacttttcaacccaacgtgatgaatatttgattttgttctagatttcctgtagctgtgaattgttaaaatgtatgattcaggataaaacgtaaacacgtgctgttagtaatttcttgtggatttcattgttttgccttcaaataaagcctttttttaaa

SEQ ID NO: 352577 - DNA, 4340 bp, Homo sapiens
cggagtttcccagcgacggccgtaagtggcgggcggaagcggccctagaagcccgccgtaaacggctccctcgcgccacttccggccggcttccgcagacggcgctggtggtcgatcgtgtggcgccggaggacgttccccgcggccggagccatggagatgccgctgccccccgatgaccaggagcttcgaaatgtcatcgacaagctcgcccagttcgtggctcgcaatgggcccgagtttgagaagatgactatggagaagcagaaggacaaccccaaattctcgtttcttttcggaggcgaattctacagttactacaagtgcaagctggcgctggagcagcagcagctcatctgcaagcagcagaccccggagctggagccagccgccaccatgccacccctgccacagcccccgctggcccccgccgcgcccatcccgccggcccagggcgcgccatccatggacgagctcatccagcagagccagtggaacctccagcagcaggagcagcacttgctggcgctcagacaggagcaagtgacagcggccgtggcccacgcggtggagcagcagatgcagaagcttctggaggagacccagctagacatgaacgagtttgacaacctcctgcagcccatcatcgacacgtgcaccaaggacgccatctcggccgggaagaactggatgttcagcaatgccaagtccccgccgcactgtgagctgatggccggccacctccggaaccgcatcacggctgatggggcacacttcgagctgcggctgcacctcatctacctgatcaatgacgtgctgcaccactgccagcgcaagcaggcccgggagctgctggccgccctgcagaaggtcgtggtgcccatctactgcaccagcttcttggccgtggaggaagacaagcagcagaagatcgcccggctcctgcagctctgggagaaaaacggctacttcgatgactccatcattcagcagctacagagcccagccctggggcttggtcagtaccaggccaccctcatcaacgagtactcctcagtggtccagccggtgcagctggccttccagcagcagatccagaccctcaagacgcagcacgaggagtttgtcaccagcctggcccagcagcagcagcagcagcaacagcagcagcagcagctccagatgccgcagatggaggctgaagtcaaggccacgcctccaccgcctgctccacccccggccccagcacctgcccctgccatcccgcccaccacccagcctgatgacagcaagcctcccatccagatgcctggctcttcagagtacgaagctccaggaggggtccaggatcctgcagctgccggcccccggggccccgggccacacgaccagatcccaccaaacaagcccccttggtttgaccagcctcaccccgtggctccttggggccagcagcagccgccagagcagccaccctacccgcaccaccagggcggcccaccccactgccccccctggaacaacagccatgagggcatgtggggcgagcagcgcggtgaccccggctggaacggccagcgcgacgcgccctggaacaaccagcccgacgccgcctggaacagccagttcgagggcccctggaacagccagcacgagcagccgccctggggcgggggccagcgcgagccacccttccgcatgcagcggcccccacacttccgggggcccttcccgccccaccagcagcacccgcagttcaaccagcctccgcacccccacaacttcaaccgcttcccgccccgcttcatgcaggacgacttcccgccacggcaccccttcgagcggccgccctatccccaccgcttcgactacccccagggggacttccctgccgaaatggggccccctcaccaccaccctggccaccgcatgcctcatcctggcatcaacgagcacccgccttgggctggaccccagcaccctgacttcggccctcccccccatggcttcaacgggcagcccccacacatgcggcgacagggcccgccccacatcaaccacgatgaccccagcctggtccccaatgtgccctacttcgatctccctgctgggctgatggcccccctcgtgaagctggaagatcacgagtacaagcctttggaccctaaagacatccgcctcccaccccccatgccgcccagcgagaggctgctggctgcagtggaggccttctacagccccccgtcccacgacaggcccaggaacagtgaaggctgggagcagaacggcctctatgagttcttccgagcaaaaatgcgggcccggcggaggaaaggccaggagaagaggaacagcggaccctcgaggtctcggagcagatccaagagtcgagggcgttcttcctcccgctccaactcaagatcctccaagtcttcaggctcgtactcaaggtcaaggtcgcgctcctgctcccgttcctactcccgctccagatctagaagtcggagcaggtcgcgctcctccagaagccgctcccggtcccagtcgcggtcccggtccaagtcgtactccccaggaagaagacgccggtcacggtccaggagccccaccccgccttcctctgctggtctgggttctaattcggcgcctcccatccctgactcaaggctcggagaagagaacaaaggccatcagatgctggtgaagatgggctggagcggctcaggcggcctcggtgcgaaggagcaagggatccaggaccccatcaagggcggggacgtccgggataagtgggaccagtataaaggcgtgggcgtggctctggatgacccctatgagaactaccgcaggaacaagagctactccttcatcgcccgcatgaaggccagggacgagtgtaagtaggcgcccatgccgggagccgcgccggtggccagcggtgccggctgtgggaccttcctggctgactggcagaggaagattgcagtgacagctcagttcttacaccgtctccacttgtggagagccacaggaagagaaggaagaccagcgcatgcccagtgggaacgccgtgctccatggcgtggagggcacgggtgccacccacaaaccacaccaggaggcgctgcagccaccagggccccaggctcgttttcctttatagcgaagcaaaaaacacaagaccctccgcccgagtaaattcttcagccacgaagggatggatgtgcatctgccctaagtcagattgaagcctcctcctaggctccaggaggagcatgtgcaggaagggttggcctgagccagagccggcaccccagctccttcctccagctccccgcacccaccggccctgacctggcttcccctcggctgtgtagggacaaagccgaagcccagtgccatgactgcccgcggattgaaaaacagaaacacaaaactttgacttgacttgcgaagtgaagcagggttttcatttttactctccttggtttaggtctagaaagaagaatactgacctgagaggaggcccagtgagattctgaaacctaattcttcgaaggcgtactggcccttagttcagttattttagttgtataagttgatattttttttctggaatgtagccatttgctgttatctgggaaacaagattctaacaggaaaccagcctaagacacttcaggttgagcgctgcctcggagtctgtgcccgtcgcgtcccctgcttgagttttgcacttggaagaaccctgcaccggctggcgtgtgcgacggcccagtcccatccagagcatggagcccgaccccagccagcgccttccactccatcatttcatttcacacccccgaagggagcgttgggaatcggccacacctggtgtccatgggcagcctggtgcaattccattcatttgtacagaaacatttttgaaaaattcttttcaataagatgcaaaatcttccaacttttcaacccaacgtgatgaatatttgattttgttctagatttcctgtagctgtgaattgttaaaatgtatgattcaggataaaacgtaaacacgtgctgttagtaatttcttgtggatttcattgttttgccttcaaataaagcctttttttaaagacctttaaaaaacgcacatgtgtaagtcagaagtgtgcacgggctgagtgaggagacacatgtcctggtttgagctgtgcagcctggggtcagaggccgtgtccaggggctcacatggcgtccccagcgtgctgacctggtcccatgtccttaccctcgagcagggcttctcccatccaccctgtctccctctggctcactgggatgccaggacctgc

SEQ ID NO: 352578 - DNA, 4200 bp, Homo sapiens
cggagtttcccagcgacggccgtaagtggcgggcggaagcggccctagaagcccgccgtaaacggctccctcgcgccacttccggccggcttccgcagacggcgctggtggtcgatcgtgtggcgccggaggacgttccccgcggccggagccatggagatgccgctgccccccgatgaccaggagcttcgaaatgtcatcgacaagctcgcccagttcgtggctcgcaatgggcccgagtttgagaagatgactatggagaagcagaaggacaaccccaaattctcgtttcttttcggaggcgaattctacagttactacaagtgcaagctggcgctggagcagcagcagctcatctgcaagcagcagaccccggagctggagccagccgccaccatgccacccctgccacagcccccgctggcccccgccgcgcccatcccgccggcccagggcgcgccatccatggacgagctcatccagcagagccagtggaacctccagcagcaggagcagcacttgctggcgctcagacaggagcaagtgacagcggccgtggcccacgcggtggagcagcagatgcagaagcttctggaggagacccagctagacatgaacgagtttgacaacctcctgcagcccatcatcgacacgtgcaccaaggacgccatctcggccgggaagaactggatgttcagcaatgccaagtccccgccgcactgtgagctgatggccggccacctccggaaccgcatcacggctgatggggcacacttcgagctgcggctgcacctcatctacctgatcaatgacgtgctgcaccactgggccctgacgcgcggaaagtctctccctcacagccagcgcaagcaggcccgggagctgctggccgccctgcagaaggtcgtggtgcccatctactgcaccagcttcttggccgtggaggaagacaagcagcagaagatcgcccggctcctgcagctctgggagaaaaacggctacttcgatgactccatcattcagcagctacagagcccagccctggggcttggtcagtaccaggccaccctcatcaacgagtactcctcagtggtccagccggtgcagctggccttccagcagcagatccagaccctcaagacgcagcacgaggagtttgtcaccagcctggcccagcagcagcagcagcagcaacagcagcagcagcagctccagatgccgcagatggaggctgaagtcaaggccacgcctccaccgcctgctccacccccggccccagcacctgcccctgccatcccgcccaccacccagcctgatgacagcaagcctcccatccagatgcctggctcttcagagtacgaagctccaggaggggtccaggatcctgcagctgccggcccccggggccccgggccacacgaccagatcccaccaaacaagcccccttggtttgaccagcctcaccccgtggctccttggggccagcagcagccgccagagcagccaccctacccgcaccaccagggcggcccaccccactgccccccctggaacaacagccatgagggcatgtggggcgagcagcgcggtgaccccggctggaacggccagcgcgacgcgccctggaacaaccagcccgacgccgcctggaacagccagttcgagggcccctggaacagccagcacgagcagccgccctggggcgggggccagcgcgagccacccttccgcatgcagcggcccccacacttccgggggcccttcccgccccaccagcagcacccgcagttcaaccagcctccgcacccccacaacttcaaccgcttcccgccccgcttcatgcaggacgacttcccgccacggcaccccttcgagcggccgccctatccccaccgcttcgactacccccagggggacttccctgccgaaatggggccccctcaccaccaccctggccaccgcatgcctcatcctggcatcaacgagcacccgccttgggctggaccccagcaccctgacttcggccctcccccccatggcttcaacgggcagcccccacacatgcggcgacagggcccgccccacatcaaccacgatgaccccagcctggtccccaatgtgccctacttcgatctccctgctgggctgatggcccccctcgtgaagctggaagatcacgagtacaagcctttggaccctaaagacatccgcctcccaccccccatgccgcccagcgagaggctgctggctgcagtggaggccttctacagccccccgtcccacgacaggcccaggaacagtgaaggctgggagcagaacggcctctatgagttcttccgagcaaaaatgcgggcccggcggaggaaaggccaggagaagaggaacagcggaccctcgaggtctcggagcagatccaagagtcgagggcgttcttcctcccgctccaactcaagatcctccaagtcttcaggctcgtactcaaggtcaaggtcgcgctcctgctcccgttcctactcccgctccagatctagaagtcggagcaggtcgcgctcctccagaagccgctcccggtcccagtcgcggtcccggtccaagtcgtactccccaggaagaagacgccggtcacggtccaggagccccaccccgccttcctctgctggtctgggttctaattcggcgcctcccatccctgactcaaggctcggagaagagaacaaaggccatcagatgctggtgaagatgggctggagcggctcaggcggcctcggtgcgaaggagcaagggatccaggaccccatcaagggcggggacgtccgggataagtgggaccagtataaaggcgtgggcgtggctctggatgacccctatgagaactaccgcaggaacaagagctactccttcatcgcccgcatgaaggccagggacgagtgtaagtaggcgcccatgccgggagccgcgccggtggccagcggtgccggctgtgggaccttcctggctgactggcagaggaagattgcagtgacagctcagttcttacaccgtctccacttgtggagagccacaggaagagaaggaagaccagcgcatgcccagtgggaacgccgtgctccatggcgtggagggcacgggtgccacccacaaaccacaccaggaggcgctgcagccaccagggccccaggctcgttttcctttatagcgaagcaaaaaacacaagaccctccgcccgagtaaattcttcagccacgaagggatggatgtgcatctgccctaagtcagattgaagcctcctcctaggctccaggaggagcatgtgcaggaagggttggcctgagccagagccggcaccccagctccttcctccagctccccgcacccaccggccctgacctggcttcccctcggctgtgtagggacaaagccgaagcccagtgccatgactgcccgcggattgaaaaacagaaacacaaaactttgacttgacttgcgaagtgaagcagggttttcatttttactctccttggtttaggtctagaaagaagaatactgacctgagaggaggcccagtgagattctgaaacctaattcttcgaaggcgtactggcccttagttcagttattttagttgtataagttgatattttttttctggaatgtagccatttgctgttatctgggaaacaagattctaacaggaaaccagcctaagacacttcaggttgagcgctgcctcggagtctgtgcccgtcgcgtcccctgcttgagttttgcacttggaagaaccctgcaccggctggcgtgtgcgacggcccagtcccatccagagcatggagcccgaccccagccagcgccttccactccatcatttcatttcacacccccgaagggaggggaggccaggaggggagctgctcctgccagaagctggtgggtgaccgttgggaatcggccacacctggtgtccatgggcagcctggtgcaattccattcatttgtacagaaacatttttgaaaaattcttttcaataagatgcaaaatcttccaacttttcaacccaacgtgatgaatatttgattttgttctagatttcctgtagctgtgaattgttaaaatgtatgattcaggataaaacgtaaacacgtgctgttagtaatttcttgtggatttcattgttttgccttcaaataaagcctttttttaaa

SEQ ID NO: 352579 - DNA, 3704 bp, Homo sapiens
cggagtttcccagcgacggccgtaagtggcgggcggaagcggccctagaagcccgccgtaaacggctccctcgcgccacttccggccggcttccgcagacggcgctggtggtcgatcgtgtggcgccggaggacgttccccgcggccggagccatggagatgccgctgccccccgatgaccaggagcttcgaaatgtcatcgacaagctcgcccagttcgtggctcgcaatgggcccgagtttgagaagatgactatggagaagcagaaggacaaccccaaattctcgtttcttttcggaggcgaattctacagttactacaagtgcaagctggcgctggagcagcagcagctcatctgcaagcagcagaccccggagctggagccagccgccaccatgccacccctgccacagcccccgctggcccccgccgcgcccatcccgccggcccagggcgcgccatccatggacgagctcatccagcagagccagtggaacctccagcagcaggagcagcacttgctggcgctcagacaggagcaagtgacagcggccgtggcccacgcggtggagcagcagatgcagaagcttctggaggagacccagctagacatgaacgagtttgacaacctcctgcagcccatcatcgacacgtgcaccaaggacgccatctcggccgggaagaactggatgttcagcaatgccaagtccccgccgcactgtgagctgatggccggccacctccggaaccgcatcacggctgatggggcacacttcgagctgcggctgcacctcatctacctgatcaatgacgtgctgcaccactgccagcgcaagcaggcccgggagctgctggccgccctgcagaaggtcgtggtgcccatctactgcaccagcttcttggccgtggaggaagacaagcagcagaagatcgcccggctcctgcagctctgggagaaaaacggctacttcgatgactccatcattcagcagctacagagcccagccctggggcttggtcagtaccaggccaccctcatcaacgagtactcctcagtggtccagccggtgcagctggccttccagcagcagatccagaccctcaagacgcagcacgaggagtttgtcaccagcctggcccagcagcagcagcagcagcaacagcagcagcagcagctccagatgccgcagatggaggctgaagtcaaggccacgcctccaccgcctgctccacccccggccccagcacctgcccctgccatcccgcccaccacccagcctgatgacagcaagcctcccatccagatgcctggctcttcagagtacgaagctccaggaggggtccaggatcctgcagctgccggcccccggggccccgggccacacgaccagatcccaccaaacaagcccccttggtttgaccagcctcaccccgtggctccttggggccagcagcagccgccagagcagccaccctacccgcaccaccagggcggcccaccccactgccccccctggaacaacagccatgagggcatgtggggcgagcagcgcggtgaccccggctggaacggccagcgcgacgcgccctggaacaaccagcccgacgccgcctggaacagccagttcgagggcccctggaacagccagcacgagcagccgccctggggcgggggccagcgcgagccacccttccgcatgcagcggcccccacacttccgggggcccttcccgccccaccagcagcacccgcagttcaaccagcctccgcacccccacaacttcaaccgcttcccgccccgcttcatgcaggacgacttcccgccacggcaccccttcgagcggccgccctatccccaccgcttcgactacccccagggggacttccctgccgaaatggggccccctcaccaccaccctggccaccgcatgcctcatcctggcatcaacgagcacccgccttgggctggaccccagcaccctgacttcggccctcccccccatggcttcaacgggcagcccccacacatgcggcgacagggcccgccccacatcaaccacgatgaccccagcctggtccccaatgtgccctacttcgatctccctgctgggctgatggcccccctcgtgaagctggaagatcacgagtacaagcctttggaccctaaagacatccgcctcccaccccccatgccgcccagcgagaggctgctggctgcagtggaggccttctacagccccccgtcccacgacaggcccaggaacagtgaaggctgggagcagaacggcctctatgagttcttccgagcaaaaatgcgggcccggcggaggaaaggccaggagaagaggaacagcggaccctcgaggtctcggagcagatccaagagtcgagggcgttcttcctcccgctccaactcaagatcctccaagtcttcaggctcgtactcaaggtcaaggtcgcgctcctgctcccgttcctactcccgctccagatctagaagtcggagcaggtcgcgctcctccagaagccgctcccggtcccagtcgcggtcccggtccaagtcgtactccccaggaagaagacgccggtcacggtccaggagccccaccccgccttcctctgctggtctgggttctaattcggcgcctcccatccctgactcaaggctcggagaagagaacaaaggccatcagatgctggtgaagatgggctggagcggctcaggcggcctcggtgcgaaggagcaagggatccaggaccccatcaagggcggggacgtccgggataagtgggaccagtataaaggcgtgggcgtggctctggatgacccctatgagaactaccgcaggaacaagagctactccagctccccgcacccaccggccctgacctggcttcccctcggctgtgtagggacaaagccgaagcccagtgccatgactgcccgcggattgaaaaacagaaacacaaaactttgacttgacttgcgaagtgaagcagggttttcatttttactctccttggtttaggtctagaaagaagaatactgacctgagaggaggcccagtgagattctgaaacctaattcttcgaaggcgtactggcccttagttcagttattttagttgtataagttgatattttttttctggaatgtagccatttgctgttatctgggaaacaagattctaacaggaaaccagcctaagacacttcaggttgagcgctgcctcggagtctgtgcccgtcgcgtcccctgcttgagttttgcacttggaagaaccctgcaccggctggcgtgtgcgacggcccagtcccatccagagcatggagcccgaccccagccagcgccttccactccatcatttcatttcacacccccgaagggaggggaggccaggaggggagctgctcctgccagaagctggtgggtgaccgttgggaatcggccacacctggtgtccatgggcagcctggtgcaattccattcatttgtacagaaacatttttgaaaaattcttttcaataagatgcaaaatcttccaacttttcaacccaacgtgatgaatatttgattttgttctagatttcctgtagctgtgaattgttaaaatgtatgattcaggataaaacgtaaacacgtgctgttagtaatttcttgtggatttcattgttttgccttcaaataaagcctttttttaaa

SEQ ID NO: 352580 - DNA, 3982 bp, Homo sapiens
cggagtttcccagcgacggccgtaagtggcgggcggaagcggccctagaagcccgccgtaaacggctccctcgcgccacttccggccggcttccgcagacggcgctggtggtcgatcgtgtggcgccggaggacgttccccgcggccggagccatggagatgccgctgccccccgatgaccaggagcttcgaaatgtcatcgacaagctcgcccagttcgtggctcgcaatgggcccgagtttgagaagatgactatggagaagcagaaggacaaccccaaattctcgtttcttttcggaggcgaattctacagttactacaagtgcaagctggcgctggagcagcagcagcgagcaagtgacagcggccgtggcccacgcggtggagcagcagatgcagaagcttctggaggagacccagctagacatgaacgagtttgacaacctcctgcagcccatcatcgacacgtgcaccaaggacgccatctcggccgggaagaactggatgttcagcaatgccaagtccccgccgcactgtgagctgatggccggccacctccggaaccgcatcacggctgatggggcacacttcgagctgcggctgcacctcatctacctgatcaatgacgtgctgcaccactgccagcgcaagcaggcccgggagctgctggccgccctgcagaaggtcgtggtgcccatctactgcaccagcttcttggccgtggaggaagacaagcagcagaagatcgcccggctcctgcagctctgggagaaaaacggctacttcgatgactccatcattcagcagctacagagcccagccctggggcttggtcagtaccaggccaccctcatcaacgagtactcctcagtggtccagccggtgcagctggccttccagcagcagatccagaccctcaagacgcagcacgaggagtttgtcaccagcctggcccagcagcagcagcagcagcaacagcagcagcagcagctccagatgccgcagatggaggctgaagtcaaggccacgcctccaccgcctgctccacccccggccccagcacctgcccctgccatcccgcccaccacccagcctgatgacagcaagcctcccatccagatgcctggctcttcagagtacgaagctccaggaggggtccaggatcctgcagctgccggcccccggggccccgggccacacgaccagatcccaccaaacaagcccccttggtttgaccagcctcaccccgtggctccttggggccagcagcagccgccagagcagccaccctacccgcaccaccagggcggcccaccccactgccccccctggaacaacagccatgagggcatgtggggcgagcagcgcggtgaccccggctggaacggccagcgcgacgcgccctggaacaaccagcccgacgccgcctggaacagccagttcgagggcccctggaacagccagcacgagcagccgccctggggcgggggccagcgcgagccacccttccgcatgcagcggcccccacacttccgggggcccttcccgccccaccagcagcacccgcagttcaaccagcctccgcacccccacaacttcaaccgcttcccgccccgcttcatgcaggacgacttcccgccacggcaccccttcgagcggccgccctatccccaccgcttcgactacccccagggggacttccctgccgaaatggggccccctcaccaccaccctggccaccgcatgcctcatcctggcatcaacgagcacccgccttgggctggaccccagcaccctgacttcggccctcccccccatggcttcaacgggcagcccccacacatgcggcgacagggcccgccccacatcaaccacgatgaccccagcctggtccccaatgtgccctacttcgatctccctgctgggctgatggcccccctcgtgaagctggaagatcacgagtacaagcctttggaccctaaagacatccgcctcccaccccccatgccgcccagcgagaggctgctggctgcagtggaggccttctacagccccccgtcccacgacaggcccaggaacagtgaaggctgggagcagaacggcctctatgagttcttccgagcaaaaatgcgggcccggcggaggaaaggccaggagaagaggaacagcggaccctcgaggtctcggagcagatccaagagtcgagggcgttcttcctcccgctccaactcaagatcctccaagtcttcaggctcgtactcaaggtcaaggtcgcgctcctgctcccgttcctactcccgctccagatctagaagtcggagcaggtcgcgctcctccagaagccgctcccggtcccagtcgcggtcccggtccaagtcgtactccccaggaagaagacgccggtcacggtccaggagccccaccccgccttcctctgctggtctgggttctaattcggcgcctcccatccctgactcaaggctcggagaagagaacaaaggccatcagatgctggtgaagatgggctggagcggctcaggcggcctcggtgcgaaggagcaagggatccaggaccccatcaagggcggggacgtccgggataagtgggaccagtataaaggcgtgggcgtggctctggatgacccctatgagaactaccgcaggaacaagagctactccttcatcgcccgcatgaaggccagggacgagtgtaagtaggcgcccatgccgggagccgcgccggtggccagcggtgccggctgtgggaccttcctggctgactggcagaggaagattgcagtgacagctcagttcttacaccgtctccacttgtggagagccacaggaagagaaggaagaccagcgcatgcccagtgggaacgccgtgctccatggcgtggagggcacgggtgccacccacaaaccacaccaggaggcgctgcagccaccagggccccaggctcgttttcctttatagcgaagcaaaaaacacaagaccctccgcccgagtaaattcttcagccacgaagggatggatgtgcatctgccctaagtcagattgaagcctcctcctaggctccaggaggagcatgtgcaggaagggttggcctgagccagagccggcaccccagctccttcctccagctccccgcacccaccggccctgacctggcttcccctcggctgtgtagggacaaagccgaagcccagtgccatgactgcccgcggattgaaaaacagaaacacaaaactttgacttgacttgcgaagtgaagcagggttttcatttttactctccttggtttaggtctagaaagaagaatactgacctgagaggaggcccagtgagattctgaaacctaattcttcgaaggcgtactggcccttagttcagttattttagttgtataagttgatattttttttctggaatgtagccatttgctgttatctgggaaacaagattctaacaggaaaccagcctaagacacttcaggttgagcgctgcctcggagtctgtgcccgtcgcgtcccctgcttgagttttgcacttggaagaaccctgcaccggctggcgtgtgcgacggcccagtcccatccagagcatggagcccgaccccagccagcgccttccactccatcatttcatttcacacccccgaagggaggggaggccaggaggggagctgctcctgccagaagctggtgggtgaccgttgggaatcggccacacctggtgtccatgggcagcctggtgcaattccattcatttgtacagaaacatttttgaaaaattcttttcaataagatgcaaaatcttccaacttttcaacccaacgtgatgaatatttgattttgttctagatttcctgtagctgtgaattgttaaaatgtatgattcaggataaaacgtaaacacgtgctgttagtaatttcttgtggatttcattgttttgccttcaaataaagcctttttttaaa

SEQ ID NO: 352581 - DNA, 1662 bp, Homo sapiens
cctggtgacagtgagcatgcacgcaagctgcggctgtgaggtcctcatcactgtcattccaataaatgtctcagttacttcttaaaaagaataacctgtctcgattttagttcctctgctggtctgggttctaattcggcgcctcccatccctgactcaaggctcggagaagagaacaaaggccatcagatgctggtgaagatgggctggagcggctcaggcggcctcggtgcgaaggagcaagggatccaggaccccatcaagggcggggacgtccgggataagtgggaccagtataaaggcgtgggcgtggctctggatgacccctatgagaactaccgcaggaacaagagctactccttcatcgcccgcatgaaggccagggacgagtgtaagtaggcgcccatgccgggagccgcgccggtggccagcggtgccggctgtgggaccttcctggctgactggcagaggaagattgcagtgacagctcagttcttacaccgtctccacttgtggagagccacaggaagagaaggaagaccagcgcatgcccagtgggaacgccgtgctccatggcgtggagggcacgggtgccacccacaaaccacaccaggaggcgctgcagccaccagggccccaggctcgttttcctttatagcgaagcaaaaaacacaagaccctccgcccgagtaaattcttcagccacgaagggatggatgtgcatctgccctaagtcagattgaagcctcctcctaggctccaggaggagcatgtgcaggaagggttggcctgagccagagccggcaccccagctccttcctccagctccccgcacccaccggccctgacctggcttcccctcggctgtgtagggacaaagccgaagcccagtgccatgactgcccgcggattgaaaaacagaaacacaaaactttgacttgacttgcgaagtgaagcagggttttcatttttactctccttggtttaggtctagaaagaagaatactgacctgagaggaggcccagtgagattctgaaacctaattcttcgaaggcgtactggcccttagttcagttattttagttgtataagttgatattttttttctggaatgtagccatttgctgttatctgggaaacaagattctaacaggaaaccagcctaagacacttcaggttgagcgctgcctcggagtctgtgcccgtcgcgtcccctgcttgagttttgcacttggaagaaccctgcaccggctggcgtgtgcgacggcccagtcccatccagagcatggagcccgaccccagccagcgccttccactccatcatttcatttcacacccccgaagggaggggaggccaggaggggagctgctcctgccagaagctggtgggtgaccgttgggaatcggccacacctggtgtccatgggcagcctggtgcaattccattcatttgtacagaaacatttttgaaaaattcttttcaataagatgcaaaatcttccaacttttcaacccaacgtgatgaatatttgattttgttctagatttcctgtagctgtgaattgttaaaatgtatgattcaggataaaacgtaaacacgtgctgttagtaatttcttgtggatttcattgttttgccttcaaataaagcctttttttaaa

SEQ ID NO: 352582 - DNA, 2327 bp, Homo sapiens
cggagtttcccagcgacggccgtaagtggcgggcggaagcggccctagaagcccgccgtaaacggctccctcgcgccacttccggccggcttccgcagacggcgctggtggtcgatcgtgtggcgccggaggacgttccccgcggccggagccatggagatgccgctgccccccgatgaccaggagcttcgaaatgtcatcgacaagctcgcccagttcgtggctcgcaatgggcccgagtttgagaagatgactatggagaagcagaaggacaaccccaaattctcgtttcttttcggaggcgaattctacagttactacaagtgcaagctggcgctggagcagcagcagctcatctgcaagcagcagaccccggagctggagccagccgccaccatgccacccctgccacagcccccgctggcccccgccgcgcccatcccgccggcccagggcgcgccatccatggacgagctcatccagcagagccagtggaacctccagcagcaggagcagcacttgctggcgctcagacaggagcaagtgacagcggccgtggcccacgcggtggagcagcagatgcagaagcttctggaggagacccagctagacatgaacgagtttgacaacctcctgcagcccatcatcgacacgtgcaccaaggacgccatctcggccgggaagaactggatgttcagcaatgccaagtccccgccgcactgtgagctgatggccggccacctccggaaccgcatcacggctgatggggcacacttcgagctgcggctgcacctcatctacctgatcaatgacgtgctgcaccactgccagcgcaagcaggcccgggagctgctggccgccctgcagaaggtcgtggtgcccatctactgcaccagcttcttggccgtggaggaagacaagcagcagaagatcgcccggctcctgcagctctgggagaaaaacggctacttcgatgactccatcattcagcagctacagagcccagccctggggcttggtcagtaccaggccaccctcatcaacgagtactcctcagtggtccagccggtgcagctggccttccagcagcagatccagaccctcaagacgcagcacgaggagtttgtcaccagcctggcccagcagcagcagcagcagcaacagcagcagcagcagctccagatgccgcagatggaggctgaagtcaaggccacgcctccaccgcctgctccacccccggccccagcacctgcccctgccatcccgcccaccacccagcctgatgacagcaagcctcccatccagatgcctggctcttcagagtacgaagctccaggaggggtccaggatcctgcagctgccggcccccggggccccgggccacacgaccagatcccaccaaacaagcccccttggtttgaccagcctcaccccgtggctccttggggccagcagcagccgccagagcagccaccctacccgcaccaccagggcggcccaccccactgccccccctggaacaacagccatgagggcatgtggggcgagcagcgcggtgaccccggctggaacggccagcgcgacgcgccctggaacaaccagcccgacgccgcctggaacagccagttcgagggcccctggaacagccagcacgagcagccgccctggggcgggggccagcgcgagccacccttccgcatgcagcggcccccacacttccgggggcccttcccgccccaccagcagcacccgcagttcaaccagcctccgcacccccacaacttcaaccgcttcccgccccgcttcatgcaggacgacttcccgccacggcaccccttcgagcggccgccctatccccaccgcttcgactacccccagggggacttccctgccggtgagtgtacgggcgcctgggtagggcctggcggaggcatccacggctcgcctgccgagcaggctggtggcgctgcttgtggccctgccatgctcctgagtgcacagtgacagacacagggtcatgggacgtccgaggagcccggcctgggttctcaggaagtgggggcacagactcagttttgccgccctgatgaggcccggctggctgcagatgaggcagagccagtaggaaaaggttcctgccgtgggtgggcgtggcgagggcagggcggggcctcgttctttttactgctgctgcttgttttttgcatcagttttcccgttgtattagttcgtttaaaaaatcaatacttggcgtggtgtcgggcgcctatggtcctagctgctcagaaggctgaggttgcggtgagctgtgatcgcaccactgtact

SEQ ID NO: 352583 - DNA, 1509 bp, Homo sapiens
agaccaacgccaccaaacaaaacacaccaacaacaacacacacaacacacagacatcgctaggagctccggttaggcacgagggggagcagaccgcccgtttattcttccgagcaaaaatgcgggcccggcggaggaaaggccaggagaagaggaacagcggaccctcgaggtctcggagcagatccaagagtcgagggcgttcttcctcccgctccaactcaagatcctccaagtcttcaggctcgtactcaaggtcaaggtcgcgctcctgctcccgttcctactcccgctccagatctagaagtcggagcaggtcgcgctcctccagaagccgctcccggtcccagtcgcggtcccggtccaagtcgtactccccaggaagaagacgccggtcacggtccaggagccccaccccgccttcctctgctggtctgggttctaattcggcgcctcccatccctgactcaaggctcggagaagagaacaaaggccatcagatgctggtgaagatgggctggagcggctcaggcggcctcggtgcgaaggagcaagggatccaggaccccatcaagggcggggacgtccgggataagtgggaccagtataaaggcgtgggcgtggctctggatgacccctatgagaactaccgcaggaacaagagctactccagctccccgcacccaccggccctgacctggcttcccctcggctgtgtagggacaaagccgaagcccagtgccatgactgcccgcggattgaaaaacagaaacacaaaactttgacttgacttgcgaagtgaagcagggttttcatttttactctccttggtttaggtctagaaagaagaatactgacctgagaggaggcccagtgagattctgaaacctaattcttcgaaggcgtactggcccttagttcagttattttagttgtataagttgatattttttttctggaatgtagccatttgctgttatctgggaaacaagattctaacaggaaaccagcctaagacacttcaggttgagcgctgcctcggagtctgtgcccgtcgcgtcccctgcttgagttttgcacttggaagaaccctgcaccggctggcgtgtgcgacggcccagtcccatccagagcatggagcccgaccccagccagcgccttccactccatcatttcatttcacacccccgaagggaggggaggccaggaggggagctgctcctgccagaagctggtgggtgaccgttgggaatcggccacacctggtgtccatgggcagcctggtgcaattccattcatttgtacagaaacatttttgaaaaattcttttcaataagatgcaaaatcttccaacttttcaacccaacgtgatgaatatttgattttgttctagatttcctgtagctgtgaattgttaaaatgtatgattcaggataaaacgtaaacacgtgctgttagtaatttcttgtggatttcattgttttgccttcaaataaagcctttttttaaa

SEQ ID NO: 352584 - DNA, 908 bp, Homo sapiens
tttaagcttgcaccggatggcgtgtgcgacggcccagtccaatccaagagcatggagcccgacccctggccagcgcgttcaaatccatcattacatttcacacccctcggctgtgtagggacaaagccgaagcccagtgccatgactgcccgcggattgaaaaacagaaacacaaaactttgacttgacttgcgaagtgaagcagggttttcatttttactctccttggtttaggtctagaaagaagaatactgacctgagaggaggcccagtgagattctgaaacctaattcttcgaaggcgtactggcccttagttcagttattttagttgtataagttgatattttttttctggaatgtagccatttgctgttatctgggaaacaagattctaacaggaaaccagcctaagacacttcaggttgagcgctgcctcggagtctgtgcccgtcgcgtcccctgcttgagttttgcacttggaagaaccctgcaccggctggcgtgtgcgacggcccagtcccatccagagcatggagcccgaccccagccagcgccttccactccatcatttcatttcacacccccgaagggaggggaggccaggaggggagctgctcctgccagaagctggtgggtgaccgttgggaatcggccacacctggtgtccatgggcagcctggtgcaattccattcatttgtacagaaacatttttgaaaaattcttttcaataagatgcaaaatcttccaacttttcaacccaacgtgatgaatatttgattttgttctagatttcctgtagctgtgaattgttaaaatgtatgattcaggataaaacgtaaacacgtgctgttagtaatttcttgtggatttcattgttttgccttcaaataaagcctttttttaaa

SEQ ID NO: 352585 - DNA, 1921 bp, Homo sapiens
  misc_feature (1813)..(1813): n is a, c, g, or t
  misc_feature (1910)..(1910): n is a, c, g, or t
cggagtttcccagcgacggccgtaagtggcgggcggaagcggccctagaagcccgccgtaaacggctccctcgcgccacttccggccggcttccgcagacggcgctggtggtcgatcgtgtggcgccggaggacgttccccgcggccggagccatggagatgccgctgccccccgatgaccaggagcttcgaaatgtcatcgacaagctcgcccagttcgtggctcgcaatgggcccgagtttgagaagatgactatggagaagcagaaggacaaccccaaattctcgtttcttttcggaggcgaattctacagttactacaagtgcaagctggcgctggagcagcagcagctcatctgcaagcagcagaccccggagctggagccagccgccaccatgccacccctgccacagcccccgctggcccccgccgcgcccatcccgccggcccagggcgcgccatccatggacgagctcatccagcagagccagtggaacctccagcagcaggagcagcacttgctggcgctcagacaggagcaagtgacagcggccgtggcccacgcggtggagcagcagatgcagaagcttctggaggagacccagctagacatgaacgagtttgacaacctcctgcagcccatcatcgacacgtgcaccaaggacgccatctcggccgggaagaactggatgttcagcaatgccaagtccccgccgcactgtgagctgatggccggccacctccggaaccgcatcacggctgatggggcacacttcgagctgcggctgcacctcatctacctgatcaatgacgtgctgcaccactgccagcgcaagcaggcccgggagctgctggccgccctgcagaaggtcgtggtgcccatctactgcaccagcttcttggccgtggaggaagacaagcagcagaagatcgcccggctcctgcagctctgggagaaaaacggctacttcgatgactccatcattcagcagctacagagcccagccctggggcttggtcagtaccaggccaccctcatcaacgagtactcctcagtggtccagccggtgcagctggccttccagcagcagatccagaccctcaagacgcagcacgaggagtttgtcaccagcctggcccagcagcagcagcagcagcaacagcagcagcagcagctccagatgccgcagatggaggctgaagtcaaggccacgcctccaccgcctgctccacccccggccccagcacctgcccctgccatcccgcccaccacccagcctgatgacagcaagcctcccatccagatgcctggctcttcagagtacgaagctccaggaggggtccaggatcctgcagctgccggcccccggggccccgggccacacgaccagatcccaccaaacaagcccccttggtttgaccagcctcaccccgtggctccttggggccagcagcagccgccagagcagccaccctacccgcaccaccagggcggcccaccccactgccccccctggaacaacagccatgagggcatgtggggcgagcagcgcggtgaccccggctggaacggccagcgcgacgcgccctggaacaaccagcccgacgccgcctggaacagccagttcgagggcccctggaacagccagcacgagcagccgccgcgcccattccgccggcccagggcgcgccaaccatggacgagctcatccagcagagccagttgaacctccagcagcaggagcagcacttgctggcgctcagacaggagcaagttacagcggccgtggcccacgcggtggagcagcagangcagaagcttctggaggagacccagctagacatgaacgagtttgacaacctcctgcagcccatcatcgacacgtgcaccaaggacgccatctcggcngggaagaactg

SEQ ID NO: 352586 - DNA, 339 bp, Homo sapiens
caagatcctccaagtcttcaggctcgtactcaaggtcaaggtcgcgctcctgctcccgttcctactcccgctccagatctaggtaggcagaggctgcctcagggcagtgcctgaggcctcttcctgtggcctccccacgacgcctggctgctgctgacccttgggcacccttccctgcagaagtcggagcaggtcgcgctcctccagaagccgctcccggtcccagtcgcggtcccggtccaagtcgtactccccaggaagaagacgccggtcacggtccaggagccccaccccgccccgccgtaagatcctgtcttaagtgctgcgctggtaactctg

SEQ ID NO: 352587 - DNA, 683 bp, Homo sapiens
cccggggacagtggcacccctcacccttcaccacagtagccacttggcgaagcctgaggcagtaactggggtctgctttctaaccaccatctgggttggaggtgtcctgctctcaatgctgagcgtggggtgggggccagcgtctggagcccccttatctagctgagacaggataaacgggtagagacgcaaaatctgcatacggtgtcacctggtgacagtgagcatgcacgcaagctgcggctgtgaggtcctcatcactgtcattccaataaatgtctcagttacttcttaaaaagaataacctgtctcgattttagttcctctgctggtctgggttctaattcggcgcctcccatccctgactcaaggctcggagaagagaacaaaggccatcagatgctggtgaagatgggtaaggcgagggaatggggagggcgcgggatgggtcctcacgcgtgctgggcccgggagtcaccagcgctttctcttcctcagtgcatgtggggatggatggagtcaggccggttctgactccacccagaccctctagacagggccggcctgcgggttctctctacccatttcccatgtctacactgcctgtctggacattcagccccccacgtgcacccccatctgcctccgccttgttgtggttgtgactgcgtctctgtttccag

SEQ ID NO: 352588 - DNA, 4167 bp, Homo sapiens
cggagtttcccagcgacggccgtaagtggcgggcggaagcggccctagaagcccgccgtaaacggctccctcgcgccacttccggccggcttccgcagacggcgctggtggtcgatcgtgtggcgccggaggacgttccccgcggccggagccatggagatgccgctgccccccgatgaccaggagcttcgaaatgtcatcgacaagctcgcccagttcgtggctcgcaatgggcccgagtttgagaagatgactatggagaagcagaaggacaaccccaaattctcgtttcttttcggaggcgaattctacagttactacaagtgcaagctggcgctggagcagcagcagctcatctgcaagcagcagaccccggagctggagccagccgccaccatgccacccctgccacagcccccgctggcccccgccgcgcccatcccgccggcccagggcgcgccatccatggacgagctcatccagcagagccagtggaacctccagcagcaggagcagcacttgctggcgctcagacaggagcaagtgacagcggccgtggcccacgcggtggagcagcagatgcagaagcttctggaggagacccagctagacatgaacgagtttgacaacctcctgcagcccatcatcgacacgtgcaccaaggacgccatctcggccgggaagaactggatgttcagcaatgccaagtccccgccgcactgtgagctgatggccggccacctccggaaccgcatcacggctgatggggcacacttcgagctgcggctgcacctcatctacctgatcaatgacgtgctgcaccactgccagcgcaagcaggcccgggagctgctggccgccctgcagaaggtcgtggtgcccatctactgcaccagcttcttggccgtggaggaagacaagcagcagaagatcgcccggctcctgcagctctgggagaaaaacggctacttcgatgactccatcattcagcagctacagagcccagccctggggcttggtcagtaccaggccaccctcatcaacgagtactcctcagtggtccagccggtgcagctggccttccagcagcagatccagaccctcaagacgcagcacgaggagtttgtcaccagcctggcccagcagcagcagcagcagcaacagcagcagcagcagctccagatgccgcagatggaggctgaagtcaaggccacgcctccaccgcctgctccacccccggccccagcacctgcccctgccatcccgcccaccacccagcctgatgacagcaagcctcccatccagatgcctggctcttcagagtacgaagctccaggaggggtccaggatcctgcagctgccggcccccggggccccgggccacacgaccagatcccaccaaacaagcccccttggtttgaccagcctcaccccgtggctccttggggccagcagcagccgccagagcagccaccctacccgcaccaccagggcggcccaccccactgccccccctggaacaacagccatgagggcatgtggggcgagcagcgcggtgaccccggctggaacggccagcgcgacgcgccctggaacaaccagcccgacgccgcctggaacagccagttcgagggcccctggaacagccagcacgagcagccgccctggggcgggggccagcgcgagccacccttccgcatgcagcggcccccacacttccgggggcccttcccgccccaccagcagcacccgcagttcaaccagcctccgcacccccacaacttcaaccgcttcccgccccgcttcatgcaggacgacttcccgccacggcaccccttcgagcggccgccctatccccaccgcttcgactacccccagggggacttccctgccgaaatggggccccctcaccaccaccctggccaccgcatgcctcatcctggcatcaacgagcacccgccttgggctggaccccagcaccctgacttcggccctcccccccatggcttcaacgggcagcccccacacatgcggcgacagggcccgccccacatcaaccacgatgaccccagcctggtccccaatgtgccctacttcgatctccctgctgggctgatggcccccctcgtgaagctggaagatcacgagtacaagcctttggaccctaaagacatccgcctcccaccccccatgccgcccagcgagaggctgctggctgcagtggaggccttctacagccccccgtcccacgacaggcccaggaacagtgaaggctgggagcagaacggcctctatgagttcttccgagcaaaaatgcgggcccggcggaggaaaggccaggagaagaggaacagcggaccctcgaggtctcggagcagatccaagagtcgagggcgttcttcctcccgctccaactcaagatcctccaagtcttcaggctcgtactcaaggtcaaggtcgcgctcctgctcccgttcctactcccgctccagatctagaagtcggagcaggtcgcgctcctccagaagccgctcccggtcccagtcgcggtcccggtccaagtcgtactccccaggaagaagacgccggtcacggtccaggagccccaccccgccttcctctgctggtctgggttctaattcggcgcctcccatccctgactcaaggctcggagaagagaacaaaggccatcagatgctggtgaagatgggctggagcggctcaggcggcctcggtgcgaaggagcaagggatccaggaccccatcaagggcggggacgtccgggataagtgggaccagtataaaggcgtgggcgtggctctggatgacccctatgagaactaccgcaggaacaagagctactccttcatcgcccgcatgaaggccagggacgagtgtaagtaggcgcccatgccgggagccgcgccggtggccagcggtgccggctgtgggaccttcctggctgactggcagaggaagattgcagtgacagctcagttcttacaccgtctccacttgtggagagccacaggaagagaaggaagaccagcgcatgcccagtgggaacgccgtgctccatggcgtggagggcacgggtgccacccacaaaccacaccaggaggcgctgcagccaccagggccccaggctcgttttcctttatagcgaagcaaaaaacacaagaccctccgcccgagtaaattcttcagccacgaagggatggatgtgcatctgccctaagtcagattgaagcctcctcctaggctccaggaggagcatgtgcaggaagggttggcctgagccagagccggcaccccagctccttcctccagctccccgcacccaccggccctgacctggcttcccctcggctgtgtagggacaaagccgaagcccagtgccatgactgcccgcggattgaaaaacagaaacacaaaactttgacttgacttgcgaagtgaagcagggttttcatttttactctccttggtttaggtctagaaagaagaatactgacctgagaggaggcccagtgagattctgaaacctaattcttcgaaggcgtactggcccttagttcagttattttagttgtataagttgatattttttttctggaatgtagccatttgctgttatctgggaaacaagattctaacaggaaaccagcctaagacacttcaggttgagcgctgcctcggagtctgtgcccgtcgcgtcccctgcttgagttttgcacttggaagaaccctgcaccggctggcgtgtgcgacggcccagtcccatccagagcatggagcccgaccccagccagcgccttccactccatcatttcatttcacacccccgaagggaggggaggccaggaggggagctgctcctgccagaagctggtgggtgaccgttgggaatcggccacacctggtgtccatgggcagcctggtgcaattccattcatttgtacagaaacatttttgaaaaattcttttcaataagatgcaaaatcttccaacttttcaacccaacgtgatgaatatttgattttgttctagatttcctgtagctgtgaattgttaaaatgtatgattcaggataaaacgtaaacacgtgctgttagtaatttcttgtggatttcattgttttgccttcaaataaagcctttttttaaa

SEQ ID NO: 352589 - DNA, 4262 bp, Homo sapiens
cggagtttcccagcgacggccgtaagtggcgggcggaagcggccctagaagcccgccgtaaacggctccctcgcgccacttccggccggcttccgcagacggcgctggtggtcgatcgtgtggcgccggaggacgttccccgcggccggagccatggagatgccgctgccccccgatgaccaggagcttcgaaatgtcatcgacaagctcgcccagttcgtggctcgcaatgggcccgagtttgagaagatgactatggagaagcagaaggacaaccccaaattctcgtttcttttcggaggcgaattctacagttactacaagtgcaagctggcgctggagcagcagcagctcatctgcaagcagcagaccccggagctggagccagccgccaccatgccacccctgccacagcccccgctggcccccgccgcgcccatcccgccggcccagggcgcgccatccatggacgagctcatccagcagagccagtggaacctccagcagcaggagcagcacttgctggcgctcagacaggagcaagtgacagcggccgtggcccacgcggtggagcagcagatgcagaagcttctggaggagacccagctagacatgaacgagtttgacaacctcctgcagcccatcatcgacacgtgcaccaaggacgccatctcggccgggaagaactggatgttcagcaatgccaagtccccgccgcactgtgagctgatggccggccacctccggaaccgcatcacggctgatggggcacacttcgagctgcggctgcacctcatctacctgatcaatgacgtgctgcaccactgccagcgcaagcaggcccgggagctgctggccgccctgcagaaggtcgtggtgcccatctactgcaccagcttcttggccgtggaggaagacaagcagcagaagatcgcccggctcctgcagctctgggagaaaaacggctacttcgatgactccatcattcagcagctacagagcccagccctggggcttggtcagtaccaggccaccctcatcaacgagtactcctcagtggtccagccggtgcagctggccttccagcagcagatccagaccctcaagacgcagcacgaggagtttgtcaccagcctggcccagcagcagcagcagcagcaacagcagcagcagcagctccagatgccgcagatggaggctgaagtcaaggccacgcctccaccgcctgctccacccccggccccagcacctgcccctgccatcccgcccaccacccagcctgatgacagcaagcctcccatccagatgcctggctcttcagagtacgaagctccaggaggggtccaggatcctgcagctgccggcccccggggccccgggccacacgaccagatcccaccaaacaagcccccttggtttgaccagcctcaccccgtggctccttggggccagcagcagccgccagagcagccaccctacccgcaccaccagggcggcccaccccactgccccccctggaacaacagccatgagggcatgtggggcgagcagcgcggtgaccccggctggaacggccagcgcgacgcgccctggaacaaccagcccgacgccgcctggaacagccagttcgagggcccctggaacagccagcacgagcagccgccctggggcgggggccagcgcgagccacccttccgcatgcagcggcccccacacttccgggggcccttcccgccccaccagcagcacccgcagttcaaccagcctccgcacccccacaacttcaaccgcttcccgccccgcttcatgcaggacgacttcccgccacggcaccccttcgagcggccgccctatccccaccgcttcgactacccccagggggacttccctgccgaaatggggccccctcaccaccaccctggccaccgcatgcctcatcctggcatcaacgagcacccgccttgggctggaccccagcaccctgacttcggccctcccccccatggcttcaacgggcagcccccacacatgcggcgacagggcccgccccacatcaaccacgatgaccccagcctggtccccaatgtgccctacttcgatctccctgctgggctgatggcccccctcgtgaagctggaagatcacgagtacaagcctttggaccctaaagacatccgcctcccaccccccatgccgcccagcgagaggctgctggctgcagtggaggccttctacagccccccgtcccacgacaggcccaggaacagtgaaggctgggagcagaacggcctctatgagttcttccgagcaaaaatgcgggcccggcggaggaaaggccaggagaagaggaacagcggaccctcgaggtctcggagcagatccaagagtcgagggcgttcttcctcccgctccaactcaagatcctccaagtcttcaggctcgtactcaaggtcaaggtcgcgctcctgctcccgttcctactcccgctccagatctagaagtcggagcaggtcgcgctcctccagaagccgctcccggtcccagtcgcggtcccggtccaagtcgtactccccaggaagaagacgccggtcacggtccaggagccccaccccgccttcctctgctggtctgggttctaattcggcgcctcccatccctgactcaaggctcggagaagagaacaaaggccatcagatgctggtgaagatgggctggagcggctcaggcggcctcggtgcgaaggagcaagggatccaggaccccatcaagggcggggacgtccgggataagtgggaccagtataaaggcgtgggcgtggctctggatgacccctatgagaactaccgcaggaacaagagctactccttcatcgcccgcatgaaggccagggacgagtgtaagtaggcgcccatgccgggagccgcgccggtggccagcggtgccggctgtgggaccttcctggctgactggcagaggaagattgcagtgacagctcagttcttacaccgtctccacttgtggagagccacaggaagagaaggaagaccagcgcatgcccagtgggaacgccgtgctccatggcgtggagggcacgggtgccacccacaaaccacaccaggaggcgctgcagccaccagggccccaggctcgttttcctttatagcgaagcaaaaaacacaagaccctccgcccgagtaaattcttcagccacgaagggatggatgtgcatctgccctaagtcagattgaagcctcctcctaggctccaggaggagcatgtgcaggaagggttggcctgagccagagccggcaccccagctccttcctccagctccccgcacccaccggccctgacctggcttcccctcggctgtgtagggacaaagccgaagcccagtgccatgactgcccgcggattgaaaaacagaaacacaaaactttgacttgacttgcgaagtgaagcagggttttcatttttactctccttggtttaggtctagaaagaagaatactgacctgagaggaggcccagtgagattctgaaacctaattcttcgaaggcgtactggcccttagttcagttattttagttgtataagttgatattttttttctggaatgtagccatttgctgttatctgggaaacaagattctaacaggaaaccagcctaagacacttcaggttgagcgctgcctcggagtctgtgcccgtcgcgtcccctgcttgagttttgcacttggaagaaccctgcaccggctggcgtgtgcgacggcccagtcccatccagagcatggagcccgaccccagccagcgccttccactccatcatttcatttcacacccccgaagggaggggaggccaggaggggagctgctcctgccagaagctggtgggtgaccgttgggaatcggccacacctggtgtccatgggcagcctggtgcaattccattcatttgtacagaaacatttttgaaaaattcttttcaataagatgcaaaatcttccaacttttcaacccaacgtgatgaatatttgattttgttctagatttcctgtagctgtgaattgttaaaatgtatgattcaggataaaacgtaaacacgtgctgttagtaatttcttgtggatttcattgttttgccttcaaataaagcctttttttaaaaaaaacaggtttctgatccaatataaaactctcggggggtgcccgttactcgaatttaaccttatagtgagttgtttagctctcccttacttgtc

SEQ ID NO: 352590 - DNA, 4386 bp, Homo sapiens
cggagtttcccagcgacggccgtaagtggcgggcggaagcggccctagaagcccgccgtaaacggctccctcgcgccacttccggccggcttccgcagacggcgctggtggtcgatcgtgtggcgccggaggacgttccccgcggccggagccatggagatgccgctgccccccgatgaccaggagcttcgaaatgtcatcgacaagctcgcccagttcgtggctcgcaatgggcccgagtttgagaagatgactatggagaagcagaaggacaaccccaaattctcgtttcttttcggaggcgaattctacagttactacaagtgcaagctggcgctggagcagcagcagctcatctgcaagcagcagaccccggagctggagccagccgccaccatgccacccctgccacagcccccgctggcccccgccgcgcccatcccgccggcccagggcgcgccatccatggacgagctcatccagcagagccagtggaacctccagcagcaggagcagcacttgctggcgctcagacaggagcaagtgacagcggccgtggcccacgcggtggagcagcagatgcagaagcttctggaggagacccagctagacatgaacgagtttgacaacctcctgcagcccatcatcgacacgtgcaccaaggacgccatctcggccgggaagaactggatgttcagcaatgccaagtccccgccgcactgtgagctgatggccggccacctccggaaccgcatcacggctgatggggcacacttcgagctgcggctgcacctcatctacctgatcaatgacgtgctgcaccactgccagcgcaagcaggcccgggagctgctggccgccctgcagaaggtcgtggtgcccatctactgcaccagcttcttggccgtggaggaagacaagcagcagaagatcgcccggctcctgcagctctgggagaaaaacggctacttcgatgactccatcattcagcagctacagagcccagccctggggcttggtcagtaccaggccaccctcatcaacgagtactcctcagtggtccagccggtgcagctggccttccagcagcagatccagaccctcaagacgcagcacgaggagtttgtcaccagcctggcccagcagcagcagcagcagcaacagcagcagcagcagctccagatgccgcagatggaggctgaagtcaaggccacgcctccaccgcctgctccacccccggccccagcacctgcccctgccatcccgcccaccacccagcctgatgacagcaagcctcccatccagatgcctggctcttcagagtacgaagctccaggaggggtccaggatcctgcagctgccggcccccggggccccgggccacacgaccagatcccaccaaacaagcccccttggtttgaccagcctcaccccgtggctccttggggccagcagcagccgccagagcagccaccctacccgcaccaccagggcggcccaccccactgccccccctggaacaacagccatgagggcatgtggggcgagcagcgcggtgaccccggctggaacggccagcgcgacgcgccctggaacaaccagcccgacgccgcctggaacagccagttcgagggcccctggaacagccagcacgagcagccgccctggggcgggggccagcgcgagccacccttccgcatgcagcggcccccacacttccgggggcccttcccgccccaccagcagcacccgcagttcaaccagcctccgcacccccacaacttcaaccgcttcccgccccgcttcatgcaggacgacttcccgccacggcaccccttcgagcggccgccctatccccaccgcttcgactacccccagggggacttccctgccgaaatggggccccctcaccaccaccctggccaccgcatgcctcatcctggcatcaacgagcacccgccttgggctggaccccagcaccctgacttcggccctcccccccatggcttcaacgggcagcccccacacatgcggcgacagggcccgccccacatcaaccacgatgaccccagcctggtccccaatgtgccctacttcgatctccctgctgggctgatggcccccctcgtgaagctggaagatcacgagtacaagcctttggaccctaaagacatccgcctcccaccccccatgccgcccagcgagaggctgctggctgcagtggaggccttctacagccccccgtcccacgacaggcccaggaacagtgaaggctgggagcagaacggcctctatgagttcttccgagcaaaaatgcgggcccggcggaggaaaggccaggagaagaggaacagcggaccctcgaggtctcggagcagatccaagagtcgagggcgttcttcctcccgctccaactcaagatcctccaagtcttcaggctcgtactcaaggtcaaggtcgcgctcctgctcccgttcctactcccgctccagatctagaagtcggagcaggtcgcgctcctccagaagccgctcccggtcccagtcgcggtcccggtccaagtcgtactccccaggaagaagacgccggtcacggtccaggagccccaccccgccttcctctgctggtctgggttctaattcggcgcctcccatccctgactcaaggctcggagaagagaacaaaggccatcagatgctggtgaagatgggctggagcggctcaggcggcctcggtgcgaaggagcaagggatccaggaccccatcaagggcggggacgtccgggataagtgggaccagtataaaggcgtgggcgtggctctggatgacccctatgagaactaccgcaggaacaagagctactccttcatcgcccgcatgaaggccagggacgagtgtaagtaggcgcccatgccgggagccgcgccggtggccagcggtgccggctgtgggaccttcctggctgactggcagaggaagattgcagtgacagctcagttcttacaccgtctccacttgtggagagccacaggaagagaaggaagaccagcgcatgcccagtgggaacgccgtgctccatggcgtggagggcacgggtgccacccacaaaccacaccaggaggcgctgcagccaccagggccccaggctcgttttcctttatagcgaagcaaaaaacacaagaccctccgcccgagtaaattcttcagccacgaagggatggatgtgcatctgccctaagtcagattgaagcctcctcctaggctccaggaggagcatgtgcaggaagggttggcctgagccagagccggcaccccagctccttcctccagctccccgcacccaccggccctgacctggcttcccctcggctgtgtagggacaaagccgaagcccagtgccatgactgcccgcggattgaaaaacagaaacacaaaactttgacttgacttgcgaagtgaagcagggttttcatttttactctccttggtttaggtctagaaagaagaatactgacctgagaggaggcccagtgagattctgaaacctaattcttcgaaggcgtactggcccttagttcagttattttagttgtataagttgatattttttttctggaatgtagccatttgctgttatctgggaaacaagattctaacaggaaaccagcctaagacacttcaggttgagcgctgcctcggagtctgtgcccgtcgcgtcccctgcttgagttttgcacttggaagaaccctgcaccggctggcgtgtgcgacggcccagtcccatccagagcatggagcccgaccccagccagcgccttccactccatcatttcatttcacacccccgaagggaggggaggccaggaggggagctgctcctgccagaagctggtgggtgaccgttgggaatcggccacacctggtgtccatgggcagcctggtgcaattccattcatttgtacagaaacatttttgaaaaattcttttcaataagatgcaaaatcttccaacttttcaacccaacgtgatgaatatttgattttgttctagatttcctgtagctgtgaattgttaaaatgtatgattcaggataaaacgtaaacacgtgctgttagtaatttcttgtggatttcattgttttgccttcaaataaagcctttttttaaagacctttaaaaaacgcacatgtgtaagtcagaagtgtgcacgggctgagtgaggagacacatgtcctggtttgagctgtgcagcctggggtcagaggccgtgtccaggggctcacatggcgtccccagcgtgctgacctggtcccatgtccttaccctcgagcagggcttctcccatccaccctgtctccctctggctcactgggatgccaggacctgc

SEQ ID NO: 352591 - DNA, 3137 bp, Homo sapiens
  misc_feature (12)..(12): n is a, c, g, or t
agggtttcttgntctcctgattttagcctctgtatgtatgcacttcgactctactgggtcacccaaccatgtgccgctccagcctgggcaacagagcgagactgtctcaaattaagaaaaagaaaaacaagtagttcctgatatttaatatctggctctctggcttctcttggaagcctggtgaatgtggcagcctgggccagcctccccttagtaggggtcagcgcagttacccagctgtgaccctagacaccggccttctcattggcctctgtgctcctcccctcccctgcccaagctggagtttgccctcctggctttaagtctccagagcagaagctgatgagggaagagcctcccgtcttcagtctacaggaagatgctggcttggtttgaaagtccccagaagcagaccccaggacaaggatccgccagagcagccaccctacccgcaccaccagggcggcccaccccactgccccccctggaacaacagccatgagggcatgtggggcgagcagcgcggtgaccccggctggaacggccagcgcgacgcgccctggaacaaccagcccgacgccgcctggaacagccagttcgagggcccctggaacagccagcacgagcagccgccctggggcgggggccagcgcgagccacccttccgcatgcagcggcccccacacttccgggggcccttcccgccccaccagcagcacccgcagttcaaccagcctccgcacccccacaacttcaaccgcttcccgccccgcttcatgcaggacgacttcccgccacggcaccccttcgagcggccgccctatccccaccgcttcgactacccccagggggacttccctgccgaaatggggccccctcaccaccaccctggccaccgcatgcctcatcctggcatcaacgagcacccgccttgggctggaccccagcaccctgacttcggccctcccccccatggcttcaacgggcagcccccacacatgcggcgacagggcccgccccacatcaaccacgatgaccccagcctggtccccaatgtgccctacttcgatctccctgctgggctgatggcccccctcgtgaagctggaagatcacgagtacaagcctttggaccctaaagacatccgcctcccaccccccatgccgcccagcgagaggctgctggctgcagtggaggccttctacagccccccgtcccacgacaggcccaggaacagtgaaggctgggagcagaacggcctctatgagttcttccgagcaaaaatgcgggcccggcggaggaaaggccaggagaagaggaacagcggaccctcgaggtctcggagcagatccaagagtcgagggcgttcttcctcccgctccaactcaagatcctccaagtcttcaggctcgtactcaaggtcaaggtcgcgctcctgctcccgttcctactcccgctccagatctagaagtcggagcaggtcgcgctcctccagaagccgctcccggtcccagtcgcggtcccggtccaagtcgtactccccaggaagaagacgccggtcacggtccaggagccccaccccgccttcctctgctggtctgggttctaattcggcgcctcccatccctgactcaaggctcggagaagagaacaaaggccatcagatgctggtgaagatgggctggagcggctcaggcggcctcggtgcgaaggagcaagggatccaggaccccatcaagggcggggacgtccgggataagtgggaccagtataaaggcgtgggcgtggctctggatgacccctatgagaactaccgcaggaacaagagctactccttcatcgcccgcatgaaggccagggacgagtgtaagtaggcgcccatgccgggagccgcgccggtggccagcggtgccggctgtgggaccttcctggctgactggcagaggaagattgcagtgacagctcagttcttacaccgtctccacttgtggagagccacaggaagagaaggaagaccagcgcatgcccagtgggaacgccgtgctccatggcgtggagggcacgggtgccacccacaaaccacaccaggaggcgctgcagccaccagggccccaggctcgttttcctttatagcgaagcaaaaaacacaagaccctccgcccgagtaaattcttcagccacgaagggatggatgtgcatctgccctaagtcagattgaagcctcctcctaggctccaggaggagcatgtgcaggaagggttggcctgagccagagccggcaccccagctccttcctccagctccccgcacccaccggccctgacctggcttcccctcggctgtgtagggacaaagccgaagcccagtgccatgactgcccgcggattgaaaaacagaaacacaaaactttgacttgacttgcgaagtgaagcagggttttcatttttactctccttggtttaggtctagaaagaagaatactgacctgagaggaggcccagtgagattctgaaacctaattcttcgaaggcgtactggcccttagttcagttattttagttgtataagttgatattttttttctggaatgtagccatttgctgttatctgggaaacaagattctaacaggaaaccagcctaagacacttcaggttgagcgctgcctcggagtctgtgcccgtcgcgtcccctgcttgagttttgcacttggaagaaccctgcaccggctggcgtgtgcgacggcccagtcccatccagagcatggagcccgaccccagccagcgccttccactccatcatttcatttcacacccccgaagggaggggaggccaggaggggagctgctcctgccagaagctggtgggtgaccgttgggaatcggccacacctggtgtccatgggcagcctggtgcaattccattcatttgtacagaaacatttttgaaaaattcttttcaataagatgcaaaatcttccaacttttcaacccaacgtgatgaatatttgattttgttctagatttcctgtagctgtgaattgttaaaatgtatgattcaggataaaacgtaaacacgtgctgttagtaatttcttgtggatttcattgttttgccttcaaataaagcctttttttaaa

SEQ ID NO: 352592 - DNA, 2462 bp, Homo sapiens
cggagtttcccagcgacggccgtaagtggcgggcggaagcggccctagaagcccgccgtaaacggctccctcgcgccacttccggccggcttccgcagacggcgctggtggtcgatcgtgtggcgccggaggacgttccccgcggccggagccatggagatgccgctgccccccgatgaccaggagcttcgaaatgtcatcgacaagctcgcccagttcgtggctcgcaatgggcccgagtttgagaagatgactatggagaagcagaaggacaaccccaaattctcgtttcttttcggaggcgaattctacagttactacaagtgcaagctggcgctggagcagcagcagctcatctgcaagcagcagaccccggagctggagccagccgccaccatgccacccctgccacagcccccgctggcccccgccgcgcccatcccgccggcccagggcgcgccatccatggacgagctcatccagcagagccagtggaacctccagcagcaggagcagcacttgctggcgctcagacaggagcaagtgacagcggccgtggcccacgcggtggagcagcagatgcagaagcttctggaggagacccagctagacatgaacgagtttgacaacctcctgcagcccatcatcgacacgtgcaccaaggacgccatctcggccgggaagaactggatgttcagcaatgccaagtccccgccgcactgtgagctgatggccggccacctccggaaccgcatcacggctgatggggcacacttcgagctgcggctgcacctcatctacctgatcaatgacgtgctgcaccactgccagcgcaagcaggcccgggagctgctggccgccctgcagaaggtcgtggtgcccatctactgcaccagcttcttggccgtggaggaagacaagcagcagaagatcgcccggctcctgcagctctgggagaaaaacggctacttcgatgactccatcattcagcagctacagagcccagccctggggcttggtcagtaccaggccaccctcatcaacgagtactcctcagtggtccagccggtgcagctggccttccagcagcagatccagaccctcaagacgcagcacgaggagtttgtcaccagcctggcccagcagcagcagcagcagcaacagcagcagcagcagctccagatgccgcagatggaggctgaagtcaaggccacgcctccaccgcctgctccacccccggccccagcacctgcccctgccatcccgcccaccacccagcctgatgacagcaagcctcccatccagatgcctggctcttcagagtacgaagctccaggaggggtccaggatcctgcagctgccggcccccggggccccgggccacacgaccagatcccaccaaacaagcccccttggtttgaccagcctcaccccgtggctccttggggccagcagcagccgccagagcagccaccctacccgcaccaccagggcggcccaccccactgccccccctggaacaacagccatgagggcatgtggggcgagcagcgcggtgaccccggctggaacggccagcgcgacgcgccctggaacaaccagcccgacgccgcctggaacagccagttcgagggcccctggaacagccagcacgagcagccgccctggggcgggggccagcgcgagccacccttccgcatgcagcggcccccacacttccgggggcccttcccgccccaccagcagcacccgcagttcaaccagcctccgcacccccacaacttcaaccgcttcccgccccgcttcatgcaggacgacttcccgccacggcaccccttcgagcggccgccctatccccaccgcttcgactacccccagggggacttccctgccgaaatggggccccctcaccaccaccctggccaccgcatgcctcatcctggcatcaacgagcacccgccttgggctggaccccagcaccctgacttcggccctcccccccatggcttcaacgggcagcccccacacatgcggcgacagggcccgccccacatcaaccacgatgaccccagcctggtccccaatgtgccctacttcgatctccctgctgggctgatggcccccctcgtgaaggtaatgccccacagtgggctccaagctgagcacgcttaccatactggtccccgtttctccttgtgaaaagtgaatgcacgggaccgggtgccttccggggctccccttcatctcccactccctagggaccctgatccgtcagtgggaggtgccgaaccggagtagcacggtgtggctgtgagcgacaccatgtctgccctgccctgcccctcctatccctcccaccacagggagcttcagccatgtggggctagctaggctatgaggctcgagtcctctcttcgtccttcttggtccagggcctcagaaggaccttgtcccagggctgc

SEQ ID NO: 352593 - DNA, 1608 bp, Homo sapiens
cggagtttcccagcgacggccgtaagtggcgggcggaagcggccctagaagcccgccgtaaacggctccctcgcgccacttccggccggcttccgcagacggcgctggtggtcgatcgtgtggcgccggaggacgttccccgcggccggagccatggagatgccgctgccccccgatgaccaggagcttcgaaatgtcatcgacaagctcgcccagttcgtggctcgcaatgggcccgagtttgagaagatgactatggagaagcagaaggacaaccccaaattctcgtttcttttcggaggcgaattctacagttactacaagtgcaagctggcgctggagcagcagcagctcatctgcaagcagcagaccccggagctggagccagccgccaccatgccacccctgccacagcccccgctggcccccgccgcgcccatcccgccggcccagggcgcgccatccatggacgagctcatccagcagagccagtggaacctccagcagcaggagcagcacttgctggcgctcagacaggagcaagtgacagcggccgtggcccacgcggtggagcagcagatgcagaagcttctggaggagacccagctagacatgaacgagtttgacaacctcctgcagcccatcatcgacacgtgcaccaaggacgccatctcggccgggaagaactggatgttcagcaatgccaagtccccgccgcactgtgagctgatggccggccacctccggaaccgcatcacggctgatggggcacacttcgagctgcggctgcacctcatctacctgatcaatgacgtgctgcaccactgccagcgcaagcaggcccgggagctgctggccgccctgcagaaggtcgtggtgcccatctactgcaccagcttcttggccgtggaggaagacaagcagcagaagatcgcccggctcctgcagctctgggagaaaaacggctacttcgatgactccatcattcagcagctacagatcccatccagagcatggagcccgaccccagccagcgccttccactccatcatttcatttcacacccccgaagggaggggaggccaggaggggagctgctcctgccagaagctggtgggtgaccgttgggaatcggccacacctggtgtccatgggcagcctggtgcaattccattcatttgtacagaaacatttttgaaaaattcttttcaataagatgcaaaatcttccaacttttcaacccaacgtgatgaatatttgattttgttctagatttcctgtagctgtgaattgttaaaatgtatgattcaggataaaacgtaaacacgtgctgttagtaatttcttgtggatttcattgttttgccttcaaataaagcctttttttaaagacctttaaaaaacgcacatgtgtaagtcagaagtgtgcacgggctgagtgaggagacacatgtcctggtttgagctgtgcagcctggggtcagaggccgtgtccaggggctcacatggcgtccccagcgtgctgacctggtcccatgtccttaccctcgagcagggcttctcccatccaccctgtctccctctggctcactgggatgccaggacctgc

SEQ ID NO: 352594 - DNA, 564 bp, Homo sapiens
agcggcctttctctgttcgcgatgtgacgtaacgcgcctgcggactgggcccagcttgtcctctatgacttacccagaaggcaacgcttctctttctggtcaaaatggctggtaagcaggccgtttcagcatcaggcaagtggctggatggtattcgaaaatggtattacaatgctgcaggattcaataaactggggttaatgcgagatgatacaatatacgaggatgaagatgtaaaagaagccataagaagacttcctgagaacctttataatgacaggatgtttcgcattaagagggcactggacctgaacttgaagcatcagatcttgcctaaagagcagtggaccaaatatgaagaggaaaatttctaccttgaaccgtatctgaaagaggttattcgggaaagaaaagaaagagaagaatgggcaaagaagtaatcatgtagttgaagtctgtggatgcagctgttatgaagatggttaaacttgaaacaaacaattttaagaattatttggtctgaagatgttttactttaaataaatgtctattgtaatggctgga

SEQ ID NO: 352595 - DNA, 416 bp, Homo sapiens
cttctttctcttccctcctctccttttctttttcttccttccttccctcttaatgcgagatgatacaatatacgaggatgaagatgtaaaagaagccataagaagacttcctgagaacctttataatgacaggatgtttcgcattaagagggcactggacctgaacttgaagcatcagatcttgcctaaagagcagtggaccaaatatgaagaggaaaatttctaccttgaaccgtatctgaaagaggttattcgggaaagaaaagaaagagaagaatgggcaaagaagtaatcatgtagttgaagtctgtggatgcagctgttatgaagatggttaaacttgaaacaaacaattttaagaattatttggtctgaagatgttttactttaaataaatgtctattgtaatggctgga

SEQ ID NO: 352596 - DNA, 992 bp, Homo sapiens
agcggcctttctctgttcgcgatgtgacgtaacgcgcctgcggactgggcccagcttgtcctctatgacttacccagaaggcaacgcttctctttctggtcaaaatggctggtaagcaggccgtttcagcatcaggcaagtggctggatggtattcgaaaatggtattacaatgctgcaggattcaataaactggggttaatgcgagatgatacaatatacgaggatgaagatgtaaaagaagccataagaagacttcctgagaacctttataatgacaggatgtttcgcattaagagggcactggacctgaacttgaagcatcagatcttgcctaaagagcagtggaccaaatatgaagaggaaaatttctaccttgaaccgtatctgaaagaggttattcgggaaagaaaagaaagagaagaatgggcaaagaagtaatcatgtagttgaagtctgtggatgcagctgttatgaagatggttaaacttgaaacaaacaattttaagaattatttggtctgaagatgttttactttaaataaatgtctattgtaatggctggagtttttgaattccaaaccttatactgaataactactgaatccctttactgttaaatttttttccaaactttcaagatatatttagttgtgtttaactgctacttggagctcagaagccactttatcagttttcctcactggttggatagcctatcagtttatggaaggatataacttccgtaagttacatccttatggaagctactgaataaaagaagggggtatgcaccccctagtttgccaagattgagaaatagcctcttcactggtatgcaaacagatttgattttgcatcctatcatttaaaaagaaattatgtctgcaccccaacataggcatacttaagtaatatacatactcctgtgctaacatgtatactagaaaacaaaaagatgttagaaaaataaaagtataaagacaaatcatac

SEQ ID NO: 352597 - DNA, 815 bp, Homo sapiens
agcggcctttctctgttcgcgatgtgacgtaacgcgcctgcggactgggcccagcttgtcctctatgacttacccagaaggcaacgcttctctttctggtcaaaatggctggtaagcaggccgtttcagcatcaggcaagtggctggatggtattcgaaaatggtattacaatgctgcaggattcaataaactggggttaatgcgagatgatacaatatacgaggatgaagatgtaaaagaagccataagaagacttcctgagaacctttataatgacaggatgtttcgcattaagagggcactggacctgaacttgaagcatcagatcttgcctaaagagcagtggaccaaatatgaagaggaaaatttctaccttgaaccgtatctgaaagaggttattcgggaaagaaaagaaagagaagaatgggcaaagaagtaatcatgtagttgaagtctgtggatgcagctgttatgaagatggttaaacttgaaacaaacaattttaagaattatttggtctgaagatgttttactttaaataaatgtctattgtaatggctggaaaaaaaaaaaaaaaaaaaaaaaaaaaaaaaaaaaaaaaaaaaaaaaaaagaaaaaaaaaaattccccccagggggggaaccgcggcaaaagagaggggccgagaacacctcgagaggggggtgcgccgcggaaacacatttttggtgcccctgaggggaggggagaaaatcgcgcacgcggcggagagaacagggggccaaagggtgtgcccgggggcgaacatgtcgtttaccgcgcacaatcccccatg

SEQ ID NO: 352598 - DNA, 464 bp, Homo sapiens
gttcgctctagagtatccccacgttgacacttcaggcaagtggctggatggtattcgaaaatggtattacaatgctgcaggattcaataaactggggttaatgcgagatgatacaatatacgaggatgaagatgtaaaagaagccataagaagacttcctgagaacctttataatgacaggatgtttcgcattaagagggcactggacctgaacttgaagcatcagatcttgcctaaagagcagtggaccaaatatgaagaggaaaatttctaccttgaaccgtatctgaaagaggttattcgggaaagaaaagaaagagaagaatgggcaaagaagtaatcatgtagttgaagtctgtggatgcagctgttatgaagatggttaaacttgaaacaaacaattttaagaattatttggtctgaagatgttttactttaaataaatgtctattgtaatggctgga

SEQ ID NO: 352599 - DNA, 666 bp, Homo sapiens
  misc_feature (649)..(649): n is a, c, g, or t
  misc_feature (657)..(657): n is a, c, g, or t
  misc_feature (662)..(662): n is a, c, g, or t
agcggcctttctctgttcgcgatgtgacgtaacgcgcctgcggactgggcccagcttgtcctctatgacttacccagaaggcaacgcttctctttctggtcaaaatggctggtaagcaggccgtttcagcatcaggcaagtggctggatggtattcgaaaatggtattacaatgctgcaggattcaataaactggggttaatgcgagatgatacaatatacgaggatgaagatgtaaaagaagccataagaagacttcctgagaacctttataatgacaggatgtttcgcattaagagggcactggacctgaacttgaagcatcagatcttgcctaaagagcagtggaccaaatatgaagaggaaaatttctaccttgaaccgtatctgaaagaggttattcgggaaagaaaagaaagagaagaatgggcaaagaagtaatcatgtagttgaagtctgtggatgcagctgttatgaagatggttaaacttgaaacaaacaattttaagaattatttggtctgaagatgttttactttaaataaatgtctattgtaatggctggaaaaaaaaaaaaaaaaaaaaaaaaaaaaaaaaaaaaaaaaaaaaaaaaaagaaaaaaaaaaaaagaaaaaaaaaaaaagggggggngacaaaanaaaanacca

SEQ ID NO: 352600 - DNA, 539 bp, Homo sapiens
agactcatagacgtcataattgatcatacgagattagttctccttgccggcaacgcagcagcccacaaaagccaccaggggacacgaatgttcatgaacattcgtgtcaggcaagtggctggatggtattcgaaaatggtattacaatgctgcaggattcaataaactggggttaatgcgagatgatacaatatacgaggatgaagatgtaaaagaagccataagaagacttcctgagaacctttataatgacaggatgtttcgcattaagagggcactggacctgaacttgaagcatcagatcttgcctaaagagcagtggaccaaatatgaagaggaaaatttctaccttgaaccgtatctgaaagaggttattcgggaaagaaaagaaagagaagaatgggcaaagaagtaatcatgtagttgaagtctgtggatgcagctgttatgaagatggttaaacttgaaacaaacaattttaagaattatttggtctgaagatgttttactttaaataaatgtctattgtaatggctgga

SEQ ID NO: 352601 - DNA, 558 bp, Homo sapiens
agcggcctttctctgttcgcgatgtgacgtaacgcgcctgcggactgggcccagcttgtcctctatgacttacccagaaggcaacgcttctctttctggtcaaaatggctggtaagcaggccgtttcagcatcaggcaagtggctggatggtattcgaaaatggtattacaatgctgcaggattcaataaactggggttaatgcgagatgatacaatatacgaggatgaagatgtaaaagaagccataagaagacttcctgagaacctttataatgacaggatgtttcgcattaagagggcactggacctgaacttgaagcatcagatcttgcctaaagagcagtggaccaaatatgaagaggaaaatttctaccttgaaccgtatctgaaagaggttattcgggaaagaaaagaaagagaagaatgggcaaagaagtaatcatgtagttgaagtctgtggatgcagctgttatgaagatggttaaacttgaaacaaataattcaagcactgcttatcaatctctactgggccgataccacccaccatatataccgcg

SEQ ID NO: 352602 - DNA, 892 bp, Homo sapiens
ggagccccggggcggggagaattcgcaacgaggagagagaggctggaaggcatatcgaaaatggtattacaatgctgcaggattcaataaactggggttaatgcgagatgatacaatatacgaggatgaagatgtaaaagaagccataagaagacttcctgagaacctttataatgacaggatgtttcgcattaagagggcactggacctgaacttgaagcatcagatcttgcctaaagagcagtggaccaaatatgaagaggaaaatttctaccttgaaccgtatctgaaagaggttattcgggaaagaaaagaaagagaagaatgggcaaagaagtaatcatgtagttgaagtctgtggatgcagctgttatgaagatggttaaacttgaaacaaacaattttaagaattatttggtctgaagatgttttactttaaataaatgtctattgtaatggctggagtttttgaattccaaaccttatactgaataactactgaatccctttactgttaaatttttttccaaactttcaagatatatttagttgtgtttaactgctacttggagctcagaagccactttatcagttttcctcactggttggatagcctatcagtttatggaaggatataacttccgtaagttacatccttatggaagctactgaataaaagaagggggtatgcaccccctagtttgccaagattgagaaatagcctcttcactggtatgcaaacagatttgattttgcatcctatcatttaaaaagaaattatgtctgcaccccaacataggcatacttaagtaatatacatactcctgtgctaacatgtatactagaaaacaaaaagatgttagaaaaataaaagtataaagacaaatcatac

SEQ ID NO: 352603 - DNA, 1189 bp, Homo sapiens
agcggcctttctctgttcgcgatgtgacgtaacgcgcctgcggactgggcccagcttgtcctctatgacttacccagaaggcaacgcttctctttctggtcaaaatggctggtaagcaggccgtttcagcatcaggcaagtggctggatggtattcgaaaatggtattacaatgctgcaggattcaataaactggggttaatgcgagatgatacaatatacgaggatgaagatgtaaaagaagccataagaagacttcctgagaacctttataatgacaggatgtttcgcattaagagggcactggacctgaacttgaagcatcagatcttgcctaaagagcagtggaccaaatatgaagaggtagcacagctttatctacctgacagtgttgctcattaaggatggagttttagaaacaagagaaacatgttcatttgcatagtgttagagttctctgagtcatgtcaaataaatatgtgaggttaataaagcaaatgttatttccgttttagaagaaaaccacattgagtcttacgtgtgaaatgattcttctgaaattactaagcaagtctctaatatagagagccaggactaaaatccaggtctttgctgttccagctctgcactctgcttcctacttagatgaaaagatcagcccattgagtgtccctccagatcccaagaagagcttctgtgaagcaaactctcaccccttgaactgcattgaaactaggcaaaggcctgtggacattcatttctttttcttcccgaaaagacttccccctcataacctatcaaagcaacttatcacaccatcaccacagatttgacattttaaaaagcagatagttcttaggttgagaatatgttttctaaaattggaaattcaaaagtaattgcttttttcttgttattgaagacctgttgagtgtttgggatatatcagtacgtgatggtaacatataatatttcattcattctttaggaaaatttctaccttgaaccgtatctgaaagaggttattcgggaaagaaaagaaagagaagaatgggcaaagaagtaatcatgtagttgaagtctgtggatgcagctgttatgaagatggttaaacttgaaacaaacaattttaagaattatttggtctgaagatgttttactttaaataaatgtctattgtaatggctgga

SEQ ID NO: 352604 - DNA, 947 bp, Homo sapiens
agcggcctttctctgttcgcgatgtgacgtaacgcgcctgcggactgggcccagcttgtcctctatgacttacccagaaggcaacgcttctctttctggtcaaaatggctggtaagcaggccgtttcagcatcaggcaagtggctggatggtattcgaaaatggtattacaatgctgcaggattcaataaactggggttaatgcgagatgatacaatatacgaggatgaagatgtaaaagaagccataagaagacttcctgagaacctttataatgacaggatgtttcgcattaagagggcactggacctgaacttgaagcatcagatcttgcctaaagagcagtggaccaaatatgaagaggtctttgctgttccagctctgcactctgcttcctacttagatgaaaagatcagcccattgagtgtccctccagatcccaagaagagcttctgtgaagcaaactctcaccccttgaactgcattgaaactaggcaaaggcctgtggacattcatttctttttcttcccgaaaagacttccccctcataacctatcaaagcaacttatcacaccatcaccacagatttgacattttaaaaagcagatagttcttaggttgagaatatgttttctaaaattggaaattcaaaagtaattgcttttttcttgttattgaagacctgttgagtgtttgggatatatcagtacgtgatggtaacatataatatttcattcattctttaggaaaatttctaccttgaaccgtatctgaaagaggttattcgggaaagaaaagaaagagaagaatgggcaaagaagtaatcatgtagttgaagtctgtggatgcagctgttatgaagatggttaaacttgaaacaaacaattttaagaattatttggtctgaagatgttttactttaaataaatgtctattgtaatggctgga

SEQ ID NO: 352605 - DNA, 938 bp, Homo sapiens
agcggcctttctctgttcgcgatgtgacgtaacgcgcctgcggactgggcccagcttgtcctctatgacttacccagaaggcaacgcttctctttctggtcaaaatggctggtaagcaggccgtttcagcatcaggcaagtggctggatggtattcgaaaatggtattacaatgctgcaggattcaataaactggggttaatgcgagatgatacaatatacgaggatgaagatgtaaaagaagccataagaagacttcctgagaacctttataatgacaggatgtttcgcattaagagggcactggacctgaacttgaagcatcagatcttgcctaaagagcagtggaccaaatatgaagaggaaaatttctaccttgaaccgtatctgaaagaggttattcgggaaaggcagctgttatgaagatggttaaacttgaaacaaacaattttaagaattatttggtctgaagatgttttactttaaataaatgtctattgtaatggctggagtttttgaattccaaaccttatactgaataactactgaatccctttactgttaaatttttttccaaactttcaagatatatttagttgtgtttaactgctacttggagctcagaagccactttatcagttttcctcactggttggatagcctatcagtttatggaaggatataacttccgtaagttacatccttatggaagctactgaataaaagaagggggtatgcaccccctagtttgccaagattgagaaatagcctcttcactggtatgcaaacagatttgattttgcatcctatcatttaaaaagaaattatgtctgcaccccaacataggcatacttaagtaatatacatactcctgtgctaacatgtatactagaaaacaaaaagatgttagaaaaataaaagtataaagacaaatcatac

SEQ ID NO: 352606 - DNA, 510 bp, Homo sapiens
agcggcctttctctgttcgcgatgtgacgtaacgcgcctgcggactgggcccagcttgtcctctatgacttacccagaaggcaacgcttctctttctggtcaaaatggctggtaagcaggccgtttcagcatcaggcaagtggctggatggtattcgaaaatggtattacaatgctgcaggattcaataaactggggttaatgcgagatgatacaatatacgaggatgaagatgtaaaagaagccataagaagacttcctgagaacctttataatgacaggatgtttcgcattaagagggcactggacctgaacttgaagcatcagatcttgcctaaagagcagtggaccaaatatgaagaggaaaatttctaccttgaaccgtatctgaaagaggttattcgggaaaggcagctgttatgaagatggttaaacttgaaacaaacaattttaagaattatttggtctgaagatgttttactttaaataaatgtctattgtaatggctgga

SEQ ID NO: 352607 - DNA, 806 bp, Homo sapiens
  misc_feature (789)..(789): n is a, c, g, or t
  misc_feature (797)..(797): n is a, c, g, or t
  misc_feature (802)..(802): n is a, c, g, or t
agcggcctttctctgttcgcgatgtgacgtaacgcgcctgcggactgggcccagcttgtcctctatgacttacccagaaggcaacgcttctctttctggtcaaaatggctggtaagcaggccgtttcagcatcaggcaagtggctggatggtattcgaaaatggtattacaatgctgcaggattcaataaactggggttaatgcgagatgatacaatatacgaggatgaagatgtaaaagaagccataagaagacttcctgagaacctttataatgacaggatgtttcgcattaagagggcactggacctgaacttgaagcatcagatcttgcctaaagagcagtggaccaaatatgaagaggtctttgctgttccagctctgcactctgcttcctacttagatgaaaagatcagcccattgagtgtccctccagatcccaagaagagcttctgtgaagcaaactctcaccccttgaactgcattgaaactaggcaaaggaggaaaatttctaccttgaaccgtatctgaaagaggttattcgggaaagaaaagaaagagaagaatgggcaaagaagtaatcatgtagttgaagtctgtggatgcagctgttatgaagatggttaaacttgaaacaaacaattttaagaattatttggtctgaagatgttttactttaaataaatgtctattgtaatggctggaaaaaaaaaaaaaaaaaaaaaaaaaaaaaaaaaaaaaaaaaaaaaaaaaagaaaaaaaaaaaaagaaaaaaaaaaaaagggggggngacaaaanaaaanacca

SEQ ID NO: 352608 - DNA, 1087 bp, Homo sapiens
agcggcctttctctgttcgcgatgtgacgtaacgcgcctgcggactgggcccagcttgtcctctatgacttacccagaaggcaacgcttctctttctggtcaaaatggctggtaagcaggccgtttcagcatcaggcaagtggctggatggtattcgaaaatggtattacaatgctgcaggattcaataaactggggttaatgcgagatgatacaatatacgaggatgaagatgtaaaagaagccataagaagacttcctgagaacctttataatgacaggatgtttcgcattaagagggcactggacctgaacttgaagcatcagatcttgcctaaagagcagtggaccaaatatgaagaggtctttgctgttccagctctgcactctgcttcctacttagatgaaaagatcagcccattgagtgtccctccagatcccaagaagagcttctgtgaagcaaactctcaccccttgaactgcattgaaactaggcaaaggaggaaaatttctaccttgaaccgtatctgaaagaggttattcgggaaagaaaagaaagagaagaatgggcaaagaagtaatcatgtagttgaagtctgtggatgcagctgttatgaagatggttaaacttgaaacaaacaattttaagaattatttggtctgaagatgttttactttaaataaatgtctattgtaatggctggaaaaaaaaaaaaaaaaaaaaaaaccggggggccatgggggggggggaaacagggcatatggaaggggcacggggcacaatacgtgctctctgacccccagttttcggtgcacgaagggggggaaaatcgcggggccccccaaaaaaggagggagtcaacaatagataaagcggggttaccggttagtgtatcctgccgaaaaaatgaagcgatctaaccactactacacgacaaccatcatgacaataacgcacacagcgcaacacacaatgaagagagaacaagaaagactacgtaacaaccgtacaaacacagacaacaaacaacacaaacaccgaataacaacatagaagagaagcacaccacagtgacgaaaactaacaa

SEQ ID NO: 352609 - DNA, 1271 bp, Homo sapiens
  misc_feature (517)..(517): n is a, c, g, or t
  misc_feature (520)..(520): n is a, c, g, or t
  misc_feature (543)..(544): n is a, c, g, or t
acaaccttagccaaaccatttacccaaataaagtataggcgatagaaattgaaacctggcgcaatagatatagtaccgcaagggaaagatgaaaaattataaccaagcataatatagcaaggactaacccctataccttctgcataatgaattaactagaaataactttgcaaggagagccaaagctaagacccccgaaaccagacgagctacctaagaacagctaaaagagcacacccgtctatgtagcaaaatagtgggaagatttataggtagaggcgacaaacctaccgagcctggtgatagctggttgtccaagatagaatcttagttcaactttaaatttgcccacagaaccctctaaatccccttgtaaatttaactgttagtccaaagaggaacagctctttggacactaggaaaaaaccttgtagagagagtaaaaaatttaacacccatagtaggcctaaaagcagccaccaattaagaaagcgttcaagctcaacacccactaccnaanaaaaaaaaaaaaaaaaaaaaaanncccatgtcggccggggatgaagatgtcattaagagggcactggacctgaacttgaagcatcagatcttgcctaaagagcagtggaccaaatatgaagaggaattttctaccttgaccgtatctgaaagaggttattcgggaaagaaaagaaagagaagaatgggcaaagaagtaatcatgtagttgaagtctgtggatgcagctgttatgaagatggttaaacttgaaacaaacaattttaagaattatttggtctgaagatgttttactttaaataaatgtctattgtaatggctggagtttttgaattccaaaccttatactgaataactactgaatccctttactgttaaatttttttccaaactttcaagatatatttagttgtgtttaactgctacttggagctcagaagccactttatcagttttcctcactggttggatagcctatcagtttatggaaggatataacttccgtaagttacatccttatggaagctactgaataaaagaagggggtatgcaccccctagtttgccaagattgagaaatagcctcttcactggtatgcaaacagatttgattttgcatcctatcatttaaaaagaaattatgtctgcaccccaacataggcatacttaagtaatatacatactcctgtgctaacatgtatactagaaaacaaaaagatgttagaaaaataaaagtataaagacaaatcatac

SEQ ID NO: 352610 - DNA, 498 bp, Homo sapiens
gcggccgcctactactactaaattcgcggccgcgtcgactggctggtaagcaggccgtttcagcatcaggcaagtggctggatggtattcgaaaatggtattacaatgctgcaggattcaataaactggggttaatgcgagatgatacaatatacgaggatgaagatgtaaaagaagccataagaagacttcctgagaacctttataatgacaggatgtttcgcattaagagggcactggacctgaacttgaagcatcagatcttgcctaaagagcagtggaccaaatatgaagaggaaaatttctaccttgaaccgtatctgaaagaggttattcgggaaagaaaagaaagagaagaatgggcaaagaagtaatcatgtagttgaagtctgtggatgcagctgttatgaagatggttaaacttgaaacaaacaattttaagaattatttggtctgaagatgttttactttaaataaatgtctattgtaatggctgga

SEQ ID NO: 352611 - DNA, 677 bp, Homo sapiens
  misc_feature (631)..(631): n is a, c, g, or t
  misc_feature (635)..(635): n is a, c, g, or t
agcggcctttctctgttcgcgatgtgacgtaacgcgcctgcggactgggcccagcttgtcctctatgacttacccagaaggcaacgcttctctttctggtcaaaatggctggtaagcaggccgtttcagcatcaggcaagtggctggatggtattcgaaaatggtattacaatgctgcaggattcaataaactggggttaatgcgagatgatacaatatacgaggatgaagatgtaaaagaagccataagaagacttcctgagaacctttataatgacaggatgtttcgcattaagagggcactggacctgaacttgaagcatcagatcttgcctaaagagcagtggaccaaatatgaagaggaaaatttctaccttgaaccgtatctgaaagaggttattcgggaaagaaaagaaagagaagaatgggcaaagaagtaatcatgtagttgaagtctgtggatgcagctgttatgaagatggttaaacttgaaacaaacaattttaagaattatttggtctgaagatgttttactttaaataaatgtctattgtaatggctggaaaaaaaaaaaaaaaaaaaaaaaaaaaaaaaaaaaaaaaaaaaaaaaaaagaaaaaaaaaaaaaaaanaaanaaaaaaaaaaaaaaaaaaaaaaaaaaaaaaaaaaaaaaaaaa

SEQ ID NO: 352612 - DNA, 649 bp, Homo sapiens
gcggccgcctactactactaaattcgcggccgcgtcgactggctggtaagcaggccgtttcagcatcaggcaagtggctggatggtattcgaaaatggtattacaatgctgcaggattcaataaactggggttaatgcgagatgatacaatatacgaggatgaagatgtaaaagaagccataagaagacttcctgagaacctttataatgacaggatgtttcgcattaagagggcactggacctgaacttgaagcatcagatcttgcctaaagagcagtggaccaaatatgaagaggaaaatttctaccttgaaccgtatctgaaagaggttattcgggaaagaaaagaaagagaagaatgggcaaagaagtaatcatgtagttgaagtctgtggatgcagctgttatgaagatggttaaacttgaaacaaacaattttaagaattatttggtctgaagatgttttactttaaataaatgtctattgtaatggctggaaaaaaaattaaaaccccatcttttaaaaaataccattatctttctctctttgtttctccgccttacattccatcgtctccccttctttcttcacaccgcgcccttttctaaataaataaacaatttgacttctctttgcccagcggcgcgg

SEQ ID NO: 352613 - DNA, 433 bp, Homo sapiens
gctgactagagtacccctgattggtggtatcgaaaatggtattacaatgctgcaggattcaataaactggggttaatgcgagatgatacaatatacgaggatgaagatgtaaaagaagccataagaagacttcctgagaacctttataatgacaggatgtttcgcattaagagggcactggacctgaacttgaagcatcagatcttgcctaaagagcagtggaccaaatatgaagaggaaaatttctaccttgaaccgtatctgaaagaggttattcgggaaagaaaagaaagagaagaatgggcaaagaagtaatcatgtagttgaagtctgtggatgcagctgttatgaagatggttaaacttgaaacaaataattcaagcactgcttatcaatctctactgggccgataccacccaccatatataccgcg

SEQ ID NO: 352614 - DNA, 634 bp, Homo sapiens
  misc_feature (581)..(581): n is a, c, g, or t
  misc_feature (586)..(587): n is a, c, g, or t
  misc_feature (595)..(595): n is a, c, g, or t
  misc_feature (597)..(597): n is a, c, g, or t
agcggcctttctctgttcgcgatgtgacgtaacgcgcctgcggactgggcccagcttgtcctctatgacttacccagaaggcaacgcttctctttctggtcaaaatggctggtaagcaggccgtttcagcatcaggcaagtggctggatggtattcgaaaatggtattacaatgctgcaggattcaataaactggggttaatgcgagatgatacaatatacgaggatgaagatgtaaaagaagccataagaagacttcctgagaacctttataatgacaggatgtttcgcattaagagggcactggacctgaacttgaagcatcagatcttgcctaaagagcagtggaccaaatatgaagaggaaaatttctaccttgaaccgtatctgaaagaggttattcgggaaagaaaagaaagagaagaatgggcaaagaagtaatcatgtagttgaagtctgtggatgcagctgttatgaagatggttaaacttgaaacaaacaattttaagaattatttggtctgaagatgttttactttaaataaatgtctattgtaatggctggaaaaaaaaaagtcgacgngccgnnaatttagnantagtagtcgaccaaggaattcctgaccggtacctgca

SEQ ID NO: 352615 - DNA, 715 bp, Homo sapiens
agcggcctttctctgttcgcgatgtgacgtaacgcgcctgcggactgggcccagcttgtcctctatgacttacccagaaggcaacgcttctctttctggtcaaaatggctggtaagcaggccgtttcagcatcaggcaagtggctggatggtattcgaaaatggtattacaatgctgcaggattcaataaactggggttaatgcgagatgatacaatatacgaggatgaagatgtaaaagaagccataagaagacttcctgagaacctttataatgacaggatgtttcgcattaagagggcactggacctgaacttgaagcatcagatcttgcctaaagagcagtggaccaaatatgaagaggaaaatttctaccttgaaccgtatctgaaagaggttattcgggaaagaaaagaaagagaagaatgggcaaagaagtaatcatgtagttgaagtctgtggatgcagctgttatgaagatggttaaacttgaaacaaacaattttaagaattatttggtctgaagatgttttactttaaataaatgtctattgtaatggctggaaaaaaaattaaaaccccatcttttaaaaaataccattatctttctctctttgtttctccgccttacattccatcgtctccccttctttcttcacaccgcgcccttttctaaataaataaacaatttgacttctctttgcccagcggcgcgg

SEQ ID NO: 352616 - DNA, 551 bp, Homo sapiens
  misc_feature (472)..(472): n is a, c, g, or t
  misc_feature (482)..(482): n is a, c, g, or t
  misc_feature (490)..(490): n is a, c, g, or t
  misc_feature (495)..(495): n is a, c, g, or t
  misc_feature (498)..(499): n is a, c, g, or t
  misc_feature (504)..(504): n is a, c, g, or t
agcggcctttctctgttcgcgatgtgacgtaacgcgcctgcggactgggcccagcttgtcctctatgacttacccagaaggcaacgcttctctttctggtcaaaatggctggtaagcaggccgtttcagcatcaggcaagtggctggatggtattcgaaaatggtattacaatgctgcaggattcaataaactggggttaatgcgagatgatacaatatacgaggatgaagatgtaaaagaagccataagaagacttcctgagaacctttataatgacaggatgtttcgcattaagagggcactggacctgaacttgaagcatcagatcttgcctaaagagcagtggaccaaatatgaagaggaaaatttctaccttgaaccgtatctgaaagaggttattcgggaaagaaaagaaagagaagaatgggcaaagaagtaatcatgtagttgaagtctgtggatgcagctgtntgaagatggntaaactgnaacanatnnttcangcactgcgtatcaatcttactgggccggataccacctatcaggtgat

SEQ ID NO: 352617 - DNA, 1180 bp, Homo sapiens
acgttgacacttcaggaaaaaacaaaacaaaacagataaccattgttactattttgttgaacattttccagataccctgatagaagacagatctgtgcatgcacatacacaattttacataaatgggaccattccatataggccagtatctagtgagtactttttttactccacaatttgccatatatgtctttccaaatcaatcaacatagattaaatcatatcaactacacaggattccatcatctgtgtgtgctcttgaatcctacttttaaaatgttctcagaaaggttatcctgaaatatattcctatcagaagttttccacactctctctaaactgaagtgtcaacgttgttgacacttcaggcaagtggctggatggtattcgaaaatggtattacaatgctgcaggattcaataaactggggttaatgcgagatgatacaatatacgaggatgaagatgtaaaagaagccataagaagacttcctgagaacctttataatgacaggatgtttcgcattaagagggcactggacctgaacttgaagcatcagatcttgcctaaagagcagtggaccaaatatgaagaggtctttgctgttccagctctgcactctgcttcctacttagatgaaaagatcagcccattgagtgtccctccagatcccaagaagagcttctgtgaagcaaactctcaccccttgaactgcattgaaactaggcaaaggcctgtggacattcatttctttttcttcccgaaaagacttccccctcataacctatcaaagcaacttatcacaccatcaccacagatttgacattttaaaaagcagatagttcttaggttgagaatatgttttctaaaattggaaattcaaaagtaattgcttttttcttgttattgaagacctgttgagtgtttgggatatatcagtacgtgatggtaacatataatatttcattcattctttaggaaaatttctaccttgaaccgtatctgaaagaggttattcgggaaagaaaagaaagagaagaatgggcaaagaagtaatcatgtagttgaagtctgtggatgcagctgttatgaagatggttaaacttgaaacaaacaattttaagaattatttggtctgaagatgttttactttaaataaatgtctattgtaatggctgga

SEQ ID NO: 352618 - DNA, 654 bp, Homo sapiens
agcggcctttctctgttcgcgatgtgacgtaacgcgcctgcggactgggcccagcttgtcctctatgacttacccagaaggcaacgcttctctttctggtcaaaatggctggtaagcaggccgtttcagcatcaggcaagtggctggatggtattcgaaaatggtattacaatgctgcaggattcaataaactggggttaatgcgagatgatacaatatacgaggatgaagatgtaaaagaagccataagaagacttcctgagaacctttataatgacaggatgtttcgcattaagagggcactggacctgaacttgaagcatcagatcttgcctaaagagcagtggaccaaatatgaagagaagaaaaccacattgagtcttacgtgtgaaatgattcttctgaaattactaagcaagtctctaatatagagagccaggactaaaatccaggaaaatttctaccttgaaccgtatctgaaagaggttattcgggaaagaaaagaaagagaagaatgggcaaagaagtaatcatgtagttgaagtctgtggatgcagctgttatgaagatggttaaacttgaaacaaacaattttaagaattatttggtctgaagatgttttactttaaataaatgtctattgtaatggctgga

SEQ ID NO: 352619 - DNA, 704 bp, Homo sapiens
agcggcctttctctgttcgcgatgtgacgtaacgcgcctgcggactgggcccagcttgtcctctatgacttacccagaaggcaacgcttctctttctggtcaaaatggctggtaagcaggccgtttcagcatcaggcaagtggctggatggtattcgaaaatggtattacaatgctgcaggattcaataaactggggttaatgcgagatgatacaatatacgaggatgaagatgtaaaagaagccataagaagacttcctgagaacctttataatgacaggatgtttcgcattaagagggcactggacctgaacttgaagcatcagatcttgcctaaagagcagtggaccaaatatgaagaggtctttgctgttccagctctgcactctgcttcctacttagatgaaaagatcagcccattgagtgtccctccagatcccaagaagagcttctgtgaagcaaactctcaccccttgaactgcattgaaactaggcaaaggaggaaaatttctaccttgaaccgtatctgaaagaggttattcgggaaagaaaagaaagagaagaatgggcaaagaagtaatcatgtagttgaagtctgtggatgcagctgttatgaagatggttaaacttgaaacaaacaattttaagaattatttggtctgaagatgttttactttaaataaatgtctattgtaatggctgga

SEQ ID NO: 352620 - DNA, 416 bp, Homo sapiens
gaatgtctgtacatattagacatatatatacacaccatatgtattatatcccccccctagagaccatcacccctacatatatgcatgcctgtatatatatatagacacactcacatgtatcccttcttattgctggagagacaaggcaggtgaaacacttggcgacaacataagataatatacatatagttagatactacactgaatatactaaatattcaatagagaatcttatgatcagacaataaataccagtgggtatgatctgaaaggagagatctggaaacactttcataacttgaacacaataacatttatctttttgaattacaaacagaaagagctcatggtttttctgtgtttaaaatacctgtaagaaacataaaacaccagtgaaagtaatcttaaaaaaaaaa

SEQ ID NO: 352621 - DNA, 582 bp, Homo sapiens
tctgacactccctactcagaaactcctgcctgccacagcctctctctggctgcatgtttgcattttgggcctttcctctctgatgatagaacgtatggctttgtctcccattcccagcaaaggaattccaggctgtgggaagcatgctgggatcctttgatgcgggcggggacaatggcaataaagaacctgtgtgaaggagtgcggcgggcagggccagccaggtccacggagtacttgaggccaatgcctttcctgtgcacgcccacccgaggcctctgccacatctccgatgtgagagtccagagcccaccccaaggcctctgccacatccccgacgtgagtgtccagagccgttcccactaccgggctgtccccacgccacggcccgcgtgtggtgtggatccgcctcctcaagctccccatctccttggagtttgccagaaggctgggggatctgggatgggtctgagtccctgctgggtcccttcctatgctgtgtgaaaaacggtctttgagcctgtgttttgtccatgcagcacaaggagagcttaataaatgggtgcttctattgttattatc

SEQ ID NO: 352622 - DNA, 1743 bp, Homo sapiens
tatttgtgttgtctggtgtgttttattgtgcgtctattctctctcttacttttttggttctgttttgcatggagatatacgggatcacccgcgtttttcgatttattccccgtccctttgggggccccccagtagttttcacccgttgtagcaacaaaaacctgcgggctgagcggaacaacgtagtacaacactgtgccctttatatcaccgacttgtgtcttcctgcccgccctgaaaattgatgcgctcccgaagtttttctttattgctttcttattttttttttttttaaggcagagaggaaggtttaatgagccctgtccagggcccttcagtggggagcctccttcttcttgcccttctccttcttgcccttctccttcttcttcactttgggcttcttggccttgcccgggatgctctcgtgctgcttggagccagcagcgtgggactgtggggccgagggcagggatgggagagaagagatggttctgggctggaagcgagacagggggaccactccccgcaccctccccgccagccccagtgcggggacgcctctctggggtgcagggcacgtgcttggggacgctggcgagagccccttaccttcacatccgtgtccgaatcgctggagctgctgctggagtcggaagagctgtggtgtccttgctggatggaggtgcggcagtgaggcggcgccccttacccagccccctgaagttggaggcctaaggcaggaccctggggtcaggggcaaccccagccttcccgcccctccgcagccggtgatgaggcgacttacctttggacccggacctgcccctgcctccgaccggccctgaactttgtggggactgagcttgggatctcccccgtggcccgcccccacaccgggcttctgggaggtgggctccagggctgtggagagaagttgggtggttggtgcaggcagcttctgggcttgagtccggccccctgcacctccagtccacactccccaggagctcacctgctcccaggtcgaactccatggcggtaagagaagttgggtcctaaggccaagggcgcctgggccctgcagaggagcggagcagggggaggagcgctgagacctgcccgttggaggaatgctgagacgccccacccaacctctgtcctggtcctcagccctgactcattgcccggcaccacccaggatttcctctgtgagaagtgggggagatggacaggtgactgcttccgccagccttggtgcctcaggggaggccgactgaggggggctctgtggatggcattcggggagctacaggtttcccccaaaagctcagatgctcgttcttgaagagggaggtgctgcccctgccttcctgcgtaccgcgacaatacagcttcctccgcggcgctttaacacgcagggcgctgctgccaggggcgtcccgtgttctaactcgctcccacagcccctccggcttggtgagcagcgtctgaggggtgaggggcatagacttggagccagcctgctgcactagatgccagctgtgtcacttagcagcaaggtgacctcagcaaagttgttttacctctgtgcctcagtttcctcatctgtaaataacagctacccatgggattgatgtgaaagtcagaggagttaatttcctagaatggtgtctggcatgaagtactgataatgtgttggttttttaaaaaataaaaggtaggtgttttaggccagtcatg

SEQ ID NO: 352623 - DNA, 1420 bp, Homo sapiens
tatttgtgttgtctggtgtgttttattgtgcgtctattctctctcttacttttttggttctgttttgcatggagatatacgggatcacccgcgtttttcgatttattccccgtccctttgggggccccccagtagttttcacccgttgtagcaacaaaaacctgcgggctgagcggaacaacgtagtacaacactgtgccctttatatcaccgacttgtgtcttcctgcccgccctgaaaattgatgcgctcccgaagtttttctttattgctttcttattttttttttttttaaggcagagaggaaggtttaatgagccctgtccagggcccttcagtggggagcctccttcttcttgcccttctccttcttgcccttctccttcttcttcactttgggcttcttggccttgcccgggatgctctcgtgctgcttggagccagcagcgtgggacttcacatccgtgtccgaatcgctggagctgctgctggagtcggaagagctgtggtgtccttgctggatggaggtgcggcagtgaggcggcgccccttacccagccccctgaagttggaggcctttggacccggacctgcccctgcctccgaccggccctgaactttgtggggactgagcttgggatctcccccgtggcccgcccccacaccgggcttctgggaggtgggctccagggctgctcccaggtcgaactccatggcggtaagagaagttgggtcctaaggccaagggcgcctgggccctgcagaggagcggagcagggggaggagcgctgagacctgcccgttggaggaatgctgagacgccccacccaacctctgtcctggtcctcagccctgactcattgcccggcaccacccaggatttcctctgtgagaagtgggggagatggacaggtgactgcttccgccagccttggtgcctcaggggaggccgactgaggggggctctgtggatggcattcggggagctacaggtttcccccaaaagctcagatgctcgttcttgaagagggaggtgctgcccctgccttcctgcgtaccgcgacaatacagcttcctccgcggcgctttaacacgcagggcgctgctgccaggggcgtcccgtgttctaactcgctcccacagcccctccggcttggtgagcagcgtctgaggggtgaggggcatagacttggagccagcctgctgcactagatgccagctgtgtcacttagcagcaaggtgacctcagcaaagttgttttacctctgtgcctcagtttcctcatctgtaaataacagctacccatgggattgatgtgaaagtcagaggagttaatttcctagaatggtgtctggcatgaagtactgataatgtgttggttttttaaaaaataaaaggtaggtgttttaggccagtcatg

SEQ ID NO: 352624 - DNA, 1615 bp, Homo sapiens
ggtgcgggtgggtgggtggggtgggggggcggtggggggggggcgcgggcggtggggtggggggtgcgtggagcgggggtggagggagcgcgtcggggcagggggtgtgggctgggtggggggtggtggcggggggggttgtgacgggcgagcgttataaagcggaagccgcgcgtcggcgagtttatagtgcgccgcatcagtggggtggccccgcatgtgtgccctgtcggtgacaagaaaagggggggcgcgagggagaccggtggggaccgcgggcggctgggaagggcgcgggtgggcggcggcgggaaggtaggggggcggggggggggtgtgtggtggggtgggggtgggggtgtggtggtgtggggggggttggtgtgttttgtgtttgaaggcagagaggaaggtttaatgagccctgtccagggcccttcagtggggagcctccttcttcttgcccttctccttcttgcccttctccttcttcttcactttgggcttcttggccttgcccgggatgctctcgtgctgcttggagccagcagcgtgggacttcacatccgtgtccgaatcgctggagctgctgctggagtcggaagagctgtggtgtccttgctggatggaggtgcggcagtgaggcggcgccccttacccagccccctgaagttggaggcctttggacccggacctgcccctgcctccgaccggccctgaactttgtggggactgagcttgggatctcccccgtggcccgcccccacaccgggcttctgggaggtgggctccagggctgtggagagaagttgggtggttggtgcaggcagcttctgggcttgagtccggccccctgcacctccagtccacactccccaggagctcacctgctcccaggtcgaactccatggcggtaagagaagttgggtcctaaggccaagggcgcctgggccctgcagaggagcggagcagggggaggagcgctgagacctgcccgttggaggaatgctgagacgccccacccaacctctgtcctggtcctcagccctgactcattgcccggcaccacccaggatttcctctgtgagaagtgggggagatggacaggtgactgcttccgccagccttggtgcctcaggggaggccgactgaggggggctctgtggatggcattcggggagctacaggtttcccccaaaagctcagatgctcgttcttgaagagggaggtgctgcccctgccttcctgcgtaccgcgacaatacagcttcctccgcggcgctttaacacgcagggcgctgctgccaggggcgtcccgtgttctaactcgctcccacagcccctccggcttggtgagcagcgtctgaggggtgaggggcatagacttggagccagcctgctgcactagatgccagctgtgtcacttagcagcaaggtgacctcagcaaagttgttttacctctgtgcctcagtttcctcatctgtaaataacagctacccatgggattgatgtgaaagtcagaggagttaatttcctagaatggtgtctggcatgaagtactgataatgtgttggttttttaaaaaataaaaggtaggtgttttaggccagtcatg

SEQ ID NO: 352625 - DNA, 1585 bp, Homo sapiens
gcgccgctctcctcgcgcggcctcacagccacttgtccacctgtgcaccgcgcctgcgcccgcgtccctcccccctcggccctccgtgccgctcgcctcccctgtactccatcgagacgcctctctctgctcgctcgctccttccttgctgtggttggccggagctccggggtgttccctgcgttgttggcgcgggtccttgctcctctttcctctcgtctcttcgttgtgccccctttgttctcttctctttgttgtctgtcgttgttttcttctgcttcgcgggagccccatatatccgcgggttccccgggttttctgcggctttttgaccgcctcccttatgtgtggtctccccctgctgtgtcgccccgtgtgttcctagtatctgtgggcccgtggccctcggtttggccgcttgcccctttttttgcccctgtttttccccccccccgcaaaaagccccccgatttttttttttttttttttttttgttgtttttttttttttttttttgaaggcagagaggaaggtttaatgagccctgtccagggcccttcagtggggagcctccttcttcttgcccttctccttcttgcccttctccttcttcttcactttgggcttcttggccttgcccgggatgctctcgtgctgcttggagccagcagcgtgggacttcacatccgtgtccgaatcgctggagctgctgctggagtcggaagagctgtggtgtccttgctttggacccggacctgcccctgcctccgaccggccctgaactttgtggggactgagcttgggatctcccccgtggcccgcccccacaccgggcttctgggaggtgggctccagggctgctcccaggtcgaactccatggcggtaagagaagttgggtcctaaggccaagggcgcctgggccctgcagaggagcggagcagggggaggagcgctgagacctgcccgttggaggaatgctgagacgccccacccaacctctgtcctggtcctcagccctgactcattgcccggcaccacccaggatttcctctgtgagaagtgggggagatggacaggtgactgcttccgccagccttggtgcctcaggggaggccgactgaggggggctctgtggatggcattcggggagctacaggtttcccccaaaagctcagatgctcgttcttgaagagggaggtgctgcccctgccttcctgcgtaccgcgacaatacagcttcctccgcggcgctttaacacgcagggcgctgctgccaggggcgtcccgtgttctaactcgctcccacagcccctccggcttggtgagcagcgtctgaggggtgaggggcatagacttggagccagcctgctgcactagatgccagctgtgtcacttagcagcaaggtgacctcagcaaagttgttttacctctgtgcctcagtttcctcatctgtaaataacagctacccatgggattgatgtgaaagtcagaggagttaatttcctagaatggtgtctggcatgaagtactgataatgtgttggttttttaaaaaataaaaggtaggtgttttaggccagtcatg

SEQ ID NO: 352626 - DNA, 1452 bp, Homo sapiens
tatttgtgttgtctggtgtgttttattgtgcgtctattctctctcttacttttttggttctgttttgcatggagatatacgggatcacccgcgtttttcgatttattccccgtccctttgggggccccccagtagttttcacccgttgtagcaacaaaaacctgcgggctgagcggaacaacgtagtacaacactgtgccctttatatcaccgacttgtgtcttcctgcccgccctgaaaattgatgcgctcccgaagtttttctttattgctttcttattttttttttttttaaggcagagaggaaggtttaatgagccctgtccagggcccttcagtggggagcctccttcttcttgcccttctccttcttgcccttctccttcttcttcactttgggcttcttggccttgcccgggatgctctcgtgctgcttggagccagcagcgtgggacttcacatccgtgtccgaatcgctggagctgctgctggagtcggaagagctgtggtgtccttgctttggacccggacctgcccctgcctccgaccggccctgaactttgtggggactgagcttgggatctcccccgtggcccgcccccacaccgggcttctgggaggtgggctccagggctgtggagagaagttgggtggttggtgcaggcagcttctgggcttgagtccggccccctgcacctccagtccacactccccaggagctcacctgctcccaggtcgaactccatggcggtaagagaagttgggtcctaaggccaagggcgcctgggccctgcagaggagcggagcagggggaggagcgctgagacctgcccgttggaggaatgctgagacgccccacccaacctctgtcctggtcctcagccctgactcattgcccggcaccacccaggatttcctctgtgagaagtgggggagatggacaggtgactgcttccgccagccttggtgcctcaggggaggccgactgaggggggctctgtggatggcattcggggagctacaggtttcccccaaaagctcagatgctcgttcttgaagagggaggtgctgcccctgccttcctgcgtaccgcgacaatacagcttcctccgcggcgctttaacacgcagggcgctgctgccaggggcgtcccgtgttctaactcgctcccacagcccctccggcttggtgagcagcgtctgaggggtgaggggcatagacttggagccagcctgctgcactagatgccagctgtgtcacttagcagcaaggtgacctcagcaaagttgttttacctctgtgcctcagtttcctcatctgtaaataacagctacccatgggattgatgtgaaagtcagaggagttaatttcctagaatggtgtctggcatgaagtactgataatgtgttggttttttaaaaaataaaaggtaggtgttttaggccagtcatg

SEQ ID NO: 352627 - DNA, 1120 bp, Homo sapiens
agcggacttccgccggcgcgggcttggatggaggcggcgcggaggccgcggctggggttgagccgccggaggccgcccccggcgggcgggccttctggcggccgcccctggtttctcctggggggtgatgagcgggagcggctctgggccgagctactgcgcacggtgagcccggagctgatcctggatcacgaggtgccttcactgcccgccttcccaggacaggagcccaggtgcggcccggagcccactgaagtcttcactgtcggacccaagaccttttcctggacaccctttccgccggacctgtggggcccgggccgttcctaccggctgcttcacggggcaggagggcacctggaatcccccgccaggtccctgccccagcgcccggcacctgatccctgcagggcccccagggtggagcagcagccgtctgtggagggtgccgcggccctgcgcagctgccccatgtgccagaaggagttcgcccccaggtacttcaactcccgcccccacctgtgtcccgctggctcctaagctgcccccctacgtgtgggttgcgtctgagatgtggggcaggcgccactcacggaaaaaaggcatcagaggagcttccacatcatcggaacattttattcctcaggacgctacacgctcactttcctggcggagcaggtcagtgcatcgagttctgtttccgtggaaaatgtgcaccttggaaaccgcatgacagccccctcggcagggtccccgcggatccgccgcgacgcaggcacagcagcaagttcctccagcacgaagctggcctgcccgggcccaggtgtgagggactgttctgctcccagcagcgcccgctgacgcttccctctgcggtctcggcgcaagcgtctgtccctggccgccctcggagccgtgcccagcctggcatgcatatgcggtggttaaggatacagttaaagggtcaatcacgcgtgtccacgacagagacgcacgcggcctcacaccgactcctcggtggacagcaataatgggttgatatactcaaagccttcgaactctgactggtcgatcctctttatggcatccctgtgggcaaaggtggcaggggggagggggg

SEQ ID NO: 352628 - DNA, 855 bp, Homo sapiens
tggcacgaggtggcacgaggtggacaccctttccgccggacctgtggggcccgggccgttcctaccggctgcttcacggggcaggagggcacctggaatcccccgccaggtccctgccccagcgcccggcacctgatccctgcagggcccccagggtggagcagcagccgtctgtggagggtgccgcggccctgcgcagctgccccatgtgccagaaggagttcgcccccaggtacttcaactcccgcccccacctgtgtcccgctggctcctaagctgcccccctacgtgtgggttgcgtctgagatgtggggcaggcgccactcacggaaaaaaggcatcagaggagcttccacatcatcggaacattttattcctcaggacgctacacgctcactttcctggcggagcaggtcagtgcatcgagttctgtttccgtggaaaatgtgcaccttggaaaccgcatgacagccccctcggcagggtccccgcggatccgccgcgacgcaggcacagcagcaagttcctccagcacgaagctggcctgcccgggcccaggtgtgagggactgttctgctcccagcagcgcccgctgacgcttccctctgcggtctcggcgcaagcgtctgtccctggccgccctcggagccgtgcccagcctggcatgcatatgcggtggttaaggatacagttaaagggtcaatcacgcgtgtccacgacagagacgcacgcggcctcacaccgactcctcggtggacagcaataatgggttgatatactcaaagccttcgaactctgactggtcgatcctctttatggcatccctgtgggcaaaggtggcaggggggagggggg

SEQ ID NO: 352629 - DNA, 972 bp, Homo sapiens
agcggacttccgccggcgcgggcttggatggaggcggcgcggaggccgcggctggggttgagccgccggaggccgcccccggcgggcgggccttctggcggccgcccctggtttctcctggggggtgatgagcgggagcggctctgggccgagctactgcgcacggtgagcccggagctgatcctggatcacgaggtgccttcactgcccgccttcccaggacaggagcccaggtgcggcccggagcccactgaagtcttcactgtcggacccaagaccttttcctggacaccctttccgccggacctgtggggcccgggccgttcctaccggctgcttcacggggcaggagggcacctggaatcccccgccaggtccctgccccagcgcccggcacctgatccctgcagggcccccagggtggagcagcagccgtctgtggagggtgccgcggccctgcgcagctgccccatgtgccagaaggagttcgcccccaggctgacccagctggatgttgacagccacctggcccagtgcttggccgaaagcacagaagacgtgacgtggtgagcgccatccaagagccctgcgcagagtgcagcgcccggacacgctctcccccgccagcagccccgcctctcggctcccccgccagcagccccgcctctcggctcccccgcatgcgcattaaagcagggcgggctcctgtctgtctctgtgttgtgatgaaaaaaaaaaaaaaaaaaaaaacacagcaaccaaaaacaaccaaacaaaaaaaaacaacgacgaggaacaaaacgaccggccgcggaaaaaacagccacaaacacggaaacaagacacaaacagccacccggaacacagaacacgagagaaaaagagagaaaaatggccgcacacacaaagagaagaagaagaaaagacgaagaacgaggaacaaggagaaaaggagaggaagaaagacaaagg

SEQ ID NO: 352630 - DNA, 1865 bp, Homo sapiens
agcggacttccgccggcgcgggcttggatggaggcggcgcggaggccgcggctggggttgagccgccggaggccgcccccggcgggcgggccttctggcggccgcccctggtttctcctggggggtgatgagcgggagcggctctgggccgagctactgcgcacggtgagcccggagctgatcctggatcacgaggtgccttcactgcccgccttcccaggacaggagcccaggtgcggcccggagcccactgaagtcttcactgtcggacccaagaccttttcctggacaccctttccgccggacctgtggggcccgggccgttcctaccggctgcttcacggggcaggagggcacctggaatcccccgccaggtccctgccccagcgcccggcacctgatccctgcagggcccccagggtggagcagcagccgtctgtggagggtgccgcggccctgcgcagctgccccatgtgccagaaggagttcgcccccagaagcaaaaacagctcgggaatgcgaaggcaccggagtccaaagttggcagccaacaacaacaacaacaaaagaaaaggccgggcacggtggctcacgcctgtaatcccagccctttgagaggctgaggcaggtgggttgctggagcccaggagtttgagaccagcctgggcaacatggcaagatcccatctttacatgcctgggcgtggtggcgcgtgcctgtggtcctagctactctggaggctgaagtgggaggattcccttgagccaggaattggaggctgtagtgaagtatgattgcaccactgcactccagcctgggtgacagagtaagaccctgaatcacggacagagggtactgttgggagccctggggagaaatccatgctcttggctgaagctctgagatccttgttgctgtcagggtgctgccccccgccccccggggaggggcttttgtctttgcatcgcctgcttttccagatagtctaaaaaaagacttctgaagacaaggacgttcacgaggaaaaacttgccattttgagctttttaagcagttgctgaaagcttggcagactgcctcaatttttcctaagtaggcgtcaatgaagtcaggtccaggccttggtgtgtctggaatgcttcaagcacattcgaacacttgatcgtaagggagagccggtactttggaaccggaactcacccgaggctgtggccaccgcatgggcaggctagctgggggacaagccccatatctttgggaacaagggtttgcacagccaccctgggatgccctgggactcctgaccgcacaggaccccagcagggaggccgcctggattggagggtctggtctaacagccggacttggtcttgaaccgtcgccctgtcccgcacaggcgcctgctgagcctggagccctggcagaggcgggtctggggagtggagctgccaggaggcctcccatttctcacagccttggtgttctccgggtcacccagaggaccgtcaaatgctggatttgacaaactatgtagaatgttctttgtgtctttaaaaaaaacaacaagcaccaaacaaacaagaaaaaacaacaaagagaaacaacaaaaaaggggcgggccacaaaagaaactccagagggggagacaatataaagatacacaaattgtggaacaggagggccccaacaaggaagcgcactatatagaacgaaacagaggcaggagttacacaacggcaagaggggacacaacggcaaaaagggaccactgggaaacgcagcccacacgacgcggggggaccaagtgtgcaaaacaccacagagaggttaacgccgggcgcgaaaaacaaacagaggaacacagg

SEQ ID NO: 352631 - DNA, 2741 bp, Homo sapiens
gggggcggggcccccacccccagtacccctcatctccgcactgtctgccccagcagcccttcccccaaccctgccggccacctcccgcaccatcgaatttccctctagtaccccccatctccccgctctctctgccccaggccctcccgggtctccccaccatagcgtttccgctactgagtaccccctgtctgccctctctgtctgccccaggcgccttctggcggccgcccctggtttctcctggggggtgatgagcgggagcggctctgggccgagctactgcgcacggtgagcccggagctgatcctggatcacgaggtgccttcactgcccgccttcccaggacaggtgtgcccactgggcccatcttagcgatgaaggggtttccagggcgggagccatcgctgggcaaggcccaacaactctgtgttgcaggagcccaggtgcggcccggagcccactgaagtcttcactgtcggacccaagaccttttcctggacaccctttccgccggacctgtggggcccgggccgttcctaccggctgcttcacggggcaggagggcacctggaatcccccgccaggtccctgccccagcgcccggcacctgatccctgcagggcccccagggtggagcagcagccgtctgtggagggtgccgcggccctgcgcagctgccccatgtgccagaaggagttcgcccccaggtgagtaggccacccctgcgcccggcccggttatccatccgtgtttggaaaccacagccgttcagaaggtcaagaggtggccgagctcagcgctggcttttaaagccctgtttcacactggaaaggtggcccagtgctgtggcctggcatgtccaggtggctctctgtcacgggtctggggtccacctgcttgccgtgctctgtgggcagggcaggctgggggcccacagaacagcacagaaggaaggctgggagcactggccccgggtccacctggccatcctggaatctggtggcaccagcgtccccaggcccagagcacaggaacaccttcccgagagtgcgtcatgggttttaaaaatgaagatcgtcttttttgtctggagatgctttttcttatttttgaaacccaacgtatatttttatgtattttttaagtaaaggggaatggaacccagttttgctaacaagataacccaaactgcccagtgcctggccttgtgtctggcgacctctgggcccttggcctccggagcaggtcctggggctggggtggtgtgaatgatgctggttcgtaacttttggttgagttaatgggcggcaggtttcagagcttatggagaccaggtccttcagtcatgcctgatgcccctggtcttccagaagcaaaaacagctcgggaatgcgaaggcaccggagtccaaagttggcagccaacaacaacaacaacaaaagaaaaggccgggcacggtggctcacgcctgtaatcccagccctttgagaggctgaggcaggtgggttgctggagcccaggagtttgagaccagcctgggcaacatggcaagatcccatctttacatgcctgggcgtggtggcgcgtgcctgtggtcctagctactctggaggctgaagtgggaggattcccttgagccaggaattggaggctgtagtgaagtatgattgcaccactgcactccagcctgggtgacagagtaagaccctgaatcacggacagagggtactgttgggagccctggggagaaatccatgctcttggctgaagctctgagatccttgttgctgtcagggtgctgccccccgccccccggggaggggcttttgtctttgcatcgcctgcttttccagatagtctaaaaaaagacttctgaagacaaggacgttcacgaggaaaaacttgccattttgagctttttaagcagttgctgaaagcttggcagactgcctcaatttttcctaagtaggcgtcaatgaagtcaggtccaggccttggtgtgtctggaatgcttcaagcacattcgaacacttgatcgtaagggagagccggtactttggaaccggaactcacccgaggctgtggccaccgcatgggcaggctagctgggggacaagccccatatctttgggaacaagggtttgcacagccaccctgggatgccctgggactcctgaccgcacaggaccccagcagggaggccgcctggattggagggtctggtctaacagccggacttggtcttgaaccgtcgccctgtcccgcacaggcgcctgctgagcctggagccctggcagaggcgggtctggggagtggagctgccaggaggcctcccatttctcacagccttggtgttctccgggtcacccagaggaccgtcaaatgctggatttgacaaactatgtagaatgttctttgtgtctttaaaaaaaacaacaagcaccaaacaaacaagaaaaaacaacaaagagaaacaacaaaaaaggggcgggccacaaaagaaactccagagggggagacaatataaagatacacaaattgtggaacaggagggccccaacaaggaagcgcactatatagaacgaaacagaggcaggagttacacaacggcaagaggggacacaacggcaaaaagggaccactgggaaacgcagcccacacgacgcggggggaccaagtgtgcaaaacaccacagagaggttaacgccgggcgcgaaaaacaaacagaggaacacagg

SEQ ID NO: 352632 - DNA, 1159 bp, Homo sapiens
agcggacttccgccggcgcgggcttggatggaggcggcgcggaggccgcggctggggttgagccgccggaggccgcccccggcgggcgggccttctggcggccgcccctggtttctcctggggggtgatgagcgggagcggctctgggccgagctactgcgcacggtgagcccggagctgatcctggatcacgaggtgccttcactgcccgccttcccaggacaggagcccaggtgcggcccggagcccactgaagtcttcactgtcggacccaagaccttttcctggacaccctttccgccggacctgtggggcccgggccgttcctaccggctgcttcacggggcaggagggcacctggaatcccccgccaggtccctgccccagcgcccggcacctgatccctgcagggcccccagggtggagcagcagccgtctgtggagggtgccgcggccctgcgcagctgccccatgtgccagaaggagttcgcccccagaagcaaaaacagctcgggaatgcgaaggcaccggagtccaaagttggcagccaacaacaacaacaacaaaagaaaaggccgggcacggtggctcacgcctgtaatcccagccctttgagaggctgaggcaggctgacccagctggatgttgacagccacctggcccagtgcttggccgaaagcacagaagacgtgacgtggtgagcgccatccaagagccctgcgcagagtgcagcgcccggacacgctctcccccgccagcagccccgcctctcggctcccccgccagcagccccgcctctcggctcccccgcatgcgcattaaagcagggcgggctcctgtctgtctctgtgttgtgatgaaaaaaaaaaaaaaagcaggcgacaccacacagggacacgcaacacgggcaacacacccagagcaaagagaacaagcagacaggcgcgagcgagcgccgcggcggcacggacacaggagaggagagaaggggcggacaaaagaggggagaacagacgcagcgaagcagaacaggcggggagagcaggacgaggggcggagaagagagagaaagacacaggaagggaaagagagaggaaaaggcgagaggagagcgaagagagagaagagagcgagagaggagggaggcaaggagaggaac

SEQ ID NO: 352633 - DNA, 1319 bp, Homo sapiens
gggggcggggcccccacccccagtacccctcatctccgcactgtctgccccagcagcccttcccccaaccctgccggccacctcccgcaccatcgaatttccctctagtaccccccatctccccgctctctctgccccaggccctcccgggtctccccaccatagcgtttccgctactgagtaccccctgtctgccctctctgtctgccccaggcgccttctggcggccgcccctggtttctcctggggggtgatgagcgggagcggctctgggccgagctactgcgcacggtgagcccggagctgatcctggatcacgaggtgccttcactgcccgccttcccaggacaggagcccaggtgcggcccggagcccactgaagtcttcactgtcggacccaagaccttttcctggacaccctttccgccggacctgtggggcccgggccgttcctaccggctgcttcacggggcaggagggcacctggaatcccccgccaggtccctgccccagcgcccggcacctgatccctgcagggcccccagggtggagcagcagccgtctgtggagggtgccgcggccctgcgcagctgccccatgtgccagaaggagttcgcccccaggtgagtaggccacccctgcgcccggcccggttatccatccgtgtttggaaaccacagccgttcagaaggtcaagaggtggccgagctcagcgctggcttttaaagccctgtttcacactggaaaggtggcccagtgctgtggcctggcatgtccaggtggctctctgtcacgggtctggggtccacctgcttgccgtgctctgtgggcagggcaggctgggggcccacagaacagcacagaaggaaggctgggagcactggccccgggtccacctggccatcctggaatctggtggcaccagcgtccccaggcccagagcacaggaacaccttcccgagagtgcgtcatgggttttaaaaatgaagatcgtcttttttgtctggagatgctttttcttatttttgaaacccaacgtatatttttatgtattttttaagtaaaggggaatggaacccagttttgctaacaagataacccaaactgcccagtgcctggccttgtgtctggcgacctctgggcccttggcctccggagcaggtcctggggctggggtggtgtgaatgatgctggttcgtaacttttggttgagttaatgggcggcaggtttcagagcttatggagaccaggtccttcagtcatgtccccgtacatcgttagaagcttgaattcgagcagtagtagtagtaggcggccgc

SEQ ID NO: 352634 - DNA, 1130 bp, Homo sapiens
gggggcggggcccccacccccagtacccctcatctccgcactgtctgccccagcagcccttcccccaaccctgccggccacctcccgcaccatcgaatttccctctagtaccccccatctccccgctctctctgccccaggccctcccgggtctccccaccatagcgtttccgctactgagtaccccctgtctgccctctctgtctgccccaggcgccttctggcggccgcccctggtttctcctggggggtgatgagcgggagcggctctgggccgagctactgcgcacggtgagcccggagctgatcctggatcacgaggtgccttcactgcccgccttcccaggacaggagcccaggtgcggcccggagcccactgaagtcttcactgtcggacccaagaccttttcctggacaccctttccgccggacctgtggggcccgggccgttcctaccggctgcttcacggggcaggagggcacctggaatcccccgccaggtccctgccccagcgcccggcacctgatccctgcagggcccccagggtggagcagcagccgtctgtggagggtgccgcggccctgcgcagctgccccatgtgccagaaggagttcgcccccagccacctggcccagtgcttggccgaaagcacagaagacgtgacgtggtgagcgccatccaagagccctgcgcagagtgcagcgcccggacacgctctcccccgccagcagccccgcctctcggctcccccgccagcagccccgcctctcggctcccccgcatgcgcattaaagcagggcgggctcctgtctgtctctgtgttgtgatgaaaaaaaaaaaaaaagcaggcgacaccacacagggacacgcaacacgggcaacacacccagagcaaagagaacaagcagacaggcgcgagcgagcgccgcggcggcacggacacaggagaggagagaaggggcggacaaaagaggggagaacagacgcagcgaagcagaacaggcggggagagcaggacgaggggcggagaagagagagaaagacacaggaagggaaagagagaggaaaaggcgagaggagagcgaagagagagaagagagcgagagaggagggaggcaaggagaggaac

SEQ ID NO: 352635 - DNA, 1068 bp, Homo sapiens
gggggcggggcccccacccccagtacccctcatctccgcactgtctgccccagcagcccttcccccaaccctgccggccacctcccgcaccatcgaatttccctctagtaccccccatctccccgctctctctgccccaggccctcccgggtctccccaccatagcgtttccgctactgagtaccccctgtctgccctctctgtctgccccaggcgccttctggcggccgcccctggtttctcctggggggtgatgagcgggagcggctctgggccgagctactgcgcacggtgagcccggagctgatcctggatcacgaggagcccaggtgcggcccggagcccactgaagtcttcactgtcggacccaagaccttttcctggacaccctttccgccggacctgtggggcccgggccgttcctaccggctgcttcacggggcaggagggcacctggaatcccccgccaggtccctgccccagcgcccggcacctgatccctgcagggcccccagggtggagcagcagccgtctgtggagggtgccgcggccctgcgcagctgccccatgtgccagaaggagttcgcccccaggctgacccagctggatgttgacagccacctggcccagtgcttggccgaaagcacagaagacgtgacgtggtgagcgccatccaagagccctgcgcagagtgcagcgcccggacacgctctcccccgccagcagccccgcctctcggctcccccgccagcagccccgcctctcggctcccccgcatgcgcattaaagcagggcgggctcctgtctgtctctgtgttgtgatgaaaaaaaaaaaaaaaaaaaaaacacagcaaccaaaaacaaccaaacaaaaaaaaacaacgacgaggaacaaaacgaccggccgcggaaaaaacagccacaaacacggaaacaagacacaaacagccacccggaacacagaacacgagagaaaaagagagaaaaatggccgcacacacaaagagaagaagaagaaaagacgaagaacgaggaacaaggagaaaaggagaggaagaaagacaaagg

SEQ ID NO: 352636 - DNA, 938 bp, Homo sapiens
gggggcggggcccccacccccagtacccctcatctccgcactgtctgccccagcagcccttcccccaaccctgccggccacctcccgcaccatcgaatttccctctagtaccccccatctccccgctctctctgccccaggccctcccgggtctccccaccatagcgtttccgctactgagtaccccctgtctgccctctctgtctgccccaggcgccttctggcggccgcccctggtttctcctggggggtgatgagcgggagcggctctgggccgagctactgcgcacggtgagcccggagctgatcctggatcacgaggtgccttcactgcccgccttcccaggacaggagcccaggtgcggcccggagcccactgaagtcttcactgtcggacccaagaccttttcctggacaccctttccgccggacctgtggggcccgggccgttcctaccggctgcttcacggggcaggagggcacctggaatcccccgccaggtccctgccccagcgcccggcacctgatccctgcagggcccccagggtggagcagcagccgtctgtggagggtgccgcggccctgcgcagctgccccatgtgccagaaggagttcgcccccagaagcaaaaacagctcgggaatgcgaaggcaccggagtccaaagttggcagccaacaacaacaacaacaaaagaaaaggccgggcacggtggctcacgcctgtaatcccagccctttgagaggctgaggcaggcgcctgctgagcctggagccctggcagaggcgggtctggggagtggagctgccaggaggcctcccatttctcacagccttggtgttctccgggtcacccagaggaccgtcaaatgctggatttgacaaactatgtagaatgttctttgtgtctttaagatcttcttgtggtcctatttggaca

SEQ ID NO: 352637 - DNA, 1221 bp, Homo sapiens
agcggacttccgccggcgcgggcttggatggaggcggcgcggaggccgcggctggggttgagccgccggaggccgcccccggcgggcgggagcccaggtgcggcccggagcccactgaagtcttcactgtcggacccaagaccttttcctggacaccctttccgccggacctgtggggcccgggccgttcctaccggctgcttcacggggcaggagggcacctggaatcccccgccaggtccctgccccagcgcccggcacctgatccctgcagggcccccagggtggagcagcagccgtctgtggagggtgccgcggccctgcgcagctgccccatgtgccagaaggagttcgcccccagaagcaaaaacagctcgggaatgcgaaggcaccggagtccaaagttggcagccaacaacaacaacaacaaaagaaaaggccgggcacggtggctcacgcctgtaatcccagccctttgagaggctgaggcaggtgggttgctggagcccaggagtttgagaccagcctgggcaacatggcaagatcccatctttacatgcctgggcgtggtggcgcgtgcctgtggtcctagctactctggaggctgaagtgggaggattcccttgagccaggaattggaggctgtagtgaagtatgattgcaccactgcactccagcctgggtgacagagctgacccagctggatgttgacagccacctggcccagtgcttggccgaaagcacagaagacgtgacgtggtgagcgccatccaagagccctgcgcagagtgcagcgcccggacacgctctcccccgccagcagccccgcctctcggctcccccgccagcagccccgcctctcggctcccccgcatgcgcattaaagcagggcgggctcctgtctgtctctgtgttgtgatgaaaaaaaaaaaaaaagcaggcgacaccacacagggacacgcaacacgggcaacacacccagagcaaagagaacaagcagacaggcgcgagcgagcgccgcggcggcacggacacaggagaggagagaaggggcggacaaaagaggggagaacagacgcagcgaagcagaacaggcggggagagcaggacgaggggcggagaagagagagaaagacacaggaagggaaagagagaggaaaaggcgagaggagagcgaagagagagaagagagcgagagaggagggaggcaaggagaggaac

SEQ ID NO: 352638 - DNA, 1004 bp, Homo sapiens
agcggacttccgccggcgcgggcttggatggaggcggcgcggaggccgcggctggggttgagccgccggaggccgcccccggcgggcgggccttctggcggccgcccctggtttctcctggggggtgatgagcgggagcggctctgggccgagctactgcgcacggtgagcccggagctgatcctggatcacgaggtgccttcactgcccgccttcccaggacaggagcccaggtgcggcccggagcccactgaagtcttcactgtcggacccaagaccttttcctggacaccctttccgccggacctgtggggcccgggccgttcctaccggctgcttcacggggcaggagggcacctggaatcccccgccaggtccctgccccagcgcccggcacctgatccctgcagggcccccagggtggagcagcagccgtctgtggagggtgccgcggccctgcgcagctgccccatgtgccagaaggagttcgcccccaggctgacccagctggatgttgacagccacctggcccagtgcttggccgaaagcacagaagacgtgacgtggtgagcgccatccaagagccctgcgcagagtgcagcgcccggacacgcttcggctcccccgccagcagccccgcctctcggctcccccgcatgcgcattaaagcagggcgggctcctgtctgtctctgtgttgtgatgaaaaaaaaaaaaaaagcaggcgacaccacacagggacacgcaacacgggcaacacacccagagcaaagagaacaagcagacaggcgcgagcgagcgccgcggcggcacggacacaggagaggagagaaggggcggacaaaagaggggagaacagacgcagcgaagcagaacaggcggggagagcaggacgaggggcggagaagagagagaaagacacaggaagggaaagagagaggaaaaggcgagaggagagcgaagagagagaagagagcgagagaggagggaggcaaggagaggaac

SEQ ID NO: 352639 - DNA, 1066 bp, Homo sapiens
acgcgtccgcccacgcgtccgggaggcggcgcggagccttctggcggccgcccctggtttctcctggggggtgatgagcgggagcggctctgggccgagctactgcgcacggtgagcccggagctgatcctggatcacgaggtgccttcactgcccgccttcccaggacaggagcccaggtgcggcccggagcccactgaagtcttcactgtcggacccaagaccttttcctggacaccctttccgccggacctgtggggcccgggccgttcctaccggctgcttcacggggcaggagggcacctggaatcccccgccaggtccctgccccagcgcccggcacctgatccctgcagggcccccagggtggagcagcagccgtctgtggagggtgccgcggccctgcgcagctgccccatgtgccagaaggagttcgcccccaggtacttcaactcccgcccccacctgtgtcccgctggctcctaagctgcccccctacgtgtgggttgcgtctgagatgtggggcaggcgccactcacggaaaaaaggcatcagaggagcttccacatcatcggaacattttattcctcaggacgctacacgctcactttcctggcggagcaggtcagtgcatcgagttctgtttccgtggaaaatgtgcaccttggaaaccgcatgacagccccctcggcagggtccccgcggatccgccgcgacgcaggcacagcagcaagttcctccagcacgaagctggcctgcccgggcccaggtgtgagggactgttctgctcccagcagcgcccgctgacgcttccctctgcggtctcggcgcaagcgtctgtccctggccgccctcggagccgtgcccagcctggcatgcatatgcggtggttaaggatacagttaaagggtcaatcacgcgtgtccacgacagagacgcacgcggcctcacaccgactcctcggtggacagcaataatgggttgatatactcaaagccttcgaactctgactggtcgatcctctttatggcatccctgtgggcaaaggtggcaggggggagggggg

SEQ ID NO: 352640 - DNA, 1098 bp, Homo sapiens
gggggcggggcccccacccccagtacccctcatctccgcactgtctgccccagcagcccttcccccaaccctgccggccacctcccgcaccatcgaatttccctctagtaccccccatctccccgctctctctgccccaggccctcccgggtctccccaccatagcgtttccgctactgagtaccccctgtctgccctctctgtctgccccaggcgccttctggcggccgcccctggtttctcctggggggtgatgagcgggagcggctctgggccgagctactgcgcacggtgagcccggagctgatcctggatcacgaggtgccttcactgcccgccttcccaggacaggagcccaggtgcggcccggagcccactgaagtcttcactgtcggacccaagaccttttcctggacaccctttccgccggacctgtggggcccgggccgttcctaccggctgcttcacggggcaggagggcacctggaatcccccgccaggtccctgccccagcgcccggcacctgatccctgcagggcccccagggtggagcagcagccgtctgtggagggtgccgcggccctgcgcagctgccccatgtgccagaaggagttcgcccccaggctgacccagctggatgttgacagccacctggcccagtgcttggccgaaagcacagaagacgtgacgtggtgagcgccatccaagagccctgcgcagagtgcagcgcccggacacgctctcccccgccagcagccccgcctctcggctcccccgccagcagccccgcctctcggctcccccgcatgcgcattaaagcagggcgggctcctgtctgtctctgtgttgtgatgaaaaaaaaaaaaaaaaaaaaaacacagcaaccaaaaacaaccaaacaaaaaaaaacaacgacgaggaacaaaacgaccggccgcggaaaaaacagccacaaacacggaaacaagacacaaacagccacccggaacacagaacacgagagaaaaagagagaaaaatggccgcacacacaaagagaagaagaagaaaagacgaagaacgaggaacaaggagaaaaggagaggaagaaagacaaagg

SEQ ID NO: 352641 - DNA, 2654 bp, Homo sapiens
gggggcggggcccccacccccagtacccctcatctccgcactgtctgccccagcagcccttcccccaaccctgccggccacctcccgcaccatcgaatttccctctagtaccccccatctccccgctctctctgccccaggccctcccgggtctccccaccatagcgtttccgctactgagtaccccctgtctgccctctctgtctgccccaggcgccttctggcggccgcccctggtttctcctggggggtgatgagcgggagcggctctgggccgagctactgcgcacggtgagcccggagctgatcctggatcacgaggtgccttcactgcccgccttcccaggacaggagcccaggtgcggcccggagcccactgaagtcttcactgtcggacccaagaccttttcctggacaccctttccgccggacctgtggggcccgggccgttcctaccggctgcttcacggggcaggagggcacctggaatcccccgccaggtccctgccccagcgcccggcacctgatccctgcagggcccccagggtggagcagcagccgtctgtggagggtgccgcggccctgcgcagctgccccatgtgccagaaggagttcgcccccaggtgagtaggccacccctgcgcccggcccggttatccatccgtgtttggaaaccacagccgttcagaaggtcaagaggtggccgagctcagcgctggcttttaaagccctgtttcacactggaaaggtggcccagtgctgtggcctggcatgtccaggtggctctctgtcacgggtctggggtccacctgcttgccgtgctctgtgggcagggcaggctgggggcccacagaacagcacagaaggaaggctgggagcactggccccgggtccacctggccatcctggaatctggtggcaccagcgtccccaggcccagagcacaggaacaccttcccgagagtgcgtcatgggttttaaaaatgaagatcgtcttttttgtctggagatgctttttcttatttttgaaacccaacgtatatttttatgtattttttaagtaaaggggaatggaacccagttttgctaacaagataacccaaactgcccagtgcctggccttgtgtctggcgacctctgggcccttggcctccggagcaggtcctggggctggggtggtgtgaatgatgctggttcgtaacttttggttgagttaatgggcggcaggtttcagagcttatggagaccaggtccttcagtcatgcctgatgcccctggtcttccagaagcaaaaacagctcgggaatgcgaaggcaccggagtccaaagttggcagccaacaacaacaacaacaaaagaaaaggccgggcacggtggctcacgcctgtaatcccagccctttgagaggctgaggcaggtgggttgctggagcccaggagtttgagaccagcctgggcaacatggcaagatcccatctttacatgcctgggcgtggtggcgcgtgcctgtggtcctagctactctggaggctgaagtgggaggattcccttgagccaggaattggaggctgtagtgaagtatgattgcaccactgcactccagcctgggtgacagagtaagaccctgaatcacggacagagggtactgttgggagccctggggagaaatccatgctcttggctgaagctctgagatccttgttgctgtcagggtgctgccccccgccccccggggaggggcttttgtctttgcatcgcctgcttttccagatagtctaaaaaaagacttctgaagacaaggacgttcacgaggaaaaacttgccattttgagctttttaagcagttgctgaaagcttggcagactgcctcaatttttcctaagtaggcgtcaatgaagtcaggtccaggccttggtgtgtctggaatgcttcaagcacattcgaacacttgatcgtaagggagagccggtactttggaaccggaactcacccgaggctgtggccaccgcatgggcaggctagctgggggacaagccccatatctttgggaacaagggtttgcacagccaccctgggatgccctgggactcctgaccgcacaggaccccagcagggaggccgcctggattggagggtctggtctaacagccggacttggtcttgaaccgtcgccctgtcccgcacaggcgcctgctgagcctggagccctggcagaggcgggtctggggagtggagctgccaggaggcctcccatttctcacagccttggtgttctccgggtcacccagaggaccgtcaaatgctggatttgacaaactatgtagaatgttctttgtgtctttaaaaaaaacaacaagcaccaaacaaacaagaaaaaacaacaaagagaaacaacaaaaaaggggcgggccacaaaagaaactccagagggggagacaatataaagatacacaaattgtggaacaggagggccccaacaaggaagcgcactatatagaacgaaacagaggcaggagttacacaacggcaagaggggacacaacggcaaaaagggaccactgggaaacgcagcccacacgacgcggggggaccaagtgtgcaaaacaccacagagaggttaacgccgggcgcgaaaaacaaacagaggaacacagg

SEQ ID NO: 352642 - DNA, 1783 bp, Homo sapiens
gctctgccagagtgagaaggcagctgatggctgctggagccagccccgggagtgggggtccagctatggtctggagagggggacttgagggttgcagtggccacacagacggggcacaggagccaaaggaagggacacagcaaagcccaagggtaaaacggcgcgccgtggactggtctgagggcagaggctgtaggggagcgaggggcggtgtggctgacaggtggacacagggacacgtgtcctgtggacttggccgctcagtgggggtgtgtcccccagcagtggcgtgtgagggatggtcactctgatgggacactgaccacttggcctccagcaagatctaggcccaagtctaggctgaagccgcccactcagccccgggacatcgtccccggcagctctgctgagcacgccagctccggcactctccgggagtcatggccggaagtcaactgtcctggcttccagggccacaccttggccaggcctggtgatggtcatttccagccgctccagttgggctgatggggccacatgaggccggggatagaaggtggctgcgctcagacacccctcccggccccactggatgcccagggcgctgacctgcaggactcggatgggttttctcctgccacccctgccttggccggcaccatcccagcgccagcgccctcctgagaggtgcaggggccgcgtggggcctcccagagtggcaggttggcagccttgcacgccggtgacggcgtccttctccgtggtgaggcttggtccctcctcgccagaaacaccaattctctgacgtgagctgcacatccactgcccagccatgtttactcttctgcctcctgtagacgcagccgcgggcggctctccctggcaggccacccgccgtcctgccttttctccgggtcaggccgcctgtctgccgggctccacgatgagcgcgttctcaagctgagcaggcgccagaatcccatagagaggcttgttgagacacagcttccccacccccagctcggacgcaggggcctggcgtggcctcctcacgggcacggtgtggaaacaccactggcggttaccgtggtctgccgggtgcatgagcccctggggtggccccgtcccttgtttctgaccagccggatcctctccagcggcaggagcagagagggcccggaggtccagacggtgctctctgcggccagcatgccgcggaggtggccgagtgagtgtggcccctcccttgcaggctgacccagctggatgttgacagccacctggcccagtgcttggccgaaagcacagaagacgtgacgtggtgagcgccatccaagagccctgcgcagagtgcagcgcccggacacgctctcccccgccagcagccccgcctctcggctcccccgccagcagccccgcctctcggctcccccgcatgcgcattaaagcagggcgggctcctgtctgtctctgtgttgtgatgaaaaaaaaaaaaaaagcaggcgacaccacacagggacacgcaacacgggcaacacacccagagcaaagagaacaagcagacaggcgcgagcgagcgccgcggcggcacggacacaggagaggagagaaggggcggacaaaagaggggagaacagacgcagcgaagcagaacaggcggggagagcaggacgaggggcggagaagagagagaaagacacaggaagggaaagagagaggaaaaggcgagaggagagcgaagagagagaagagagcgagagaggagggaggcaaggagaggaac

SEQ ID NO: 352643 - DNA, 1134 bp, Homo sapiens
agcggacttccgccggcgcgggcttggatggaggcggcgcggaggccgcggctggggttgagccgccggaggccgcccccggcgggcgggccttctggcggccgcccctggtttctcctggggggtgatgagcgggagcggctctgggccgagctactgcgcacggtgagcccggagctgatcctggatcacgaggtgccttcactgcccgccttcccaggacaggagcccaggtgcggcccggagcccactgaagtcttcactgtcggacccaagaccttttcctggacaccctttccgccggacctgtggggcccgggccgttcctaccggctgcttcacggggcaggagggcacctggaatcccccgccaggtccctgccccagcgcccggcacctgatccctgcagggcccccagggtggagcagcagccgtctgtggagggtgccgcggccctgcgcagctgccccatgtgccagaaggagttcgcccccagaagcaaaaacagctcgggaatgcgaaggcaccggagtccaaagttggcagccaacaacaacaacaacaaaagaaaaggccgggcacggtggctcacgcctgtaatcccagccctttgagaggctgaggcaggctgacccagctggatgttgacagccacctggcccagtgcttggccgaaagcacagaagacgtgacgtggtgagcgccatccaagagccctgcgcagagtgcagcgcccggacacgctctcccccgccagcagccccgcctcctctcggctcccccgcatgcgcattaaagcagggcgggctcctgtctgtctctgtgttgtgatgaaaaaaaaaaaaaaagcaggcgacaccacacagggacacgcaacacgggcaacacacccagagcaaagagaacaagcagacaggcgcgagcgagcgccgcggcggcacggacacaggagaggagagaaggggcggacaaaagaggggagaacagacgcagcgaagcagaacaggcggggagagcaggacgaggggcggagaagagagagaaagacacaggaagggaaagagagaggaaaaggcgagaggagagcgaagagagagaagagagcgagagaggagggaggcaaggagaggaac

SEQ ID NO: 352644 - DNA, 836 bp, Homo sapiens
agcggacttccgccggcgcgggcttggatggaggcggcgcggaggccgcggctggggttgagccgccggaggccgcccccggcgggcgggagcccaggtgcggcccggagcccactgaagtcttcactgtcggacccaagaccttttcctggacaccctttccgccggacctgtggggcccgggccgttcctaccggctgcttcacggggcaggagggcacctggaatcccccgccaggtccctgccccagcgcccggcacctgatccctgcagggcccccagggtggagcagcagccgtctgtggagggtgccgcggccctgcgcagctgccccatgtgccagaaggagttcgcccccaggctgacccagctggatgttgacagccacctggcccagtgcttggccgaaagcacagaagacgtgacgtggtgagcgccatccaagagccctgcgcagagtgcagcgcccggacacgctctcccccgccagcagccccgcctctcggctcccccgccagcagccccgcctctcggctcccccgcatgcgcattaaagcagggcgggctcctgtctgtctctgtgttgtgatgaaaaaaaaaaaaaaaaaaaaaacacagcaaccaaaaacaaccaaacaaaaaaaaacaacgacgaggaacaaaacgaccggccgcggaaaaaacagccacaaacacggaaacaagacacaaacagccacccggaacacagaacacgagagaaaaagagagaaaaatggccgcacacacaaagagaagaagaagaaaagacgaagaacgaggaacaaggagaaaaggagaggaagaaagacaaagg

SEQ ID NO: 352645 - DNA, 2692 bp, Homo sapiens
cgcgcccgccgcgcccgccgttcccgccgtgcccgccgctcccgccgcgcccgccgcggccgcgaccgcggcagctcagcctcccgccgattgtatgttccaggcctcaatgaggagtccaaacatggagccattcaagcagcagaaggtggaggacttttatgacatcggagaggagctggggagtggccagtttgccatcgtgaagaagtgccgggagaagagcacggggcttgagtatgcagccaagttcatcaagaagcggcagagccgggcgagccggcgcggtgtgagccgggaggagatcgagcgggaggtgagcatcctgcggcaggtgctgcaccacaatgtcatcacgctgcacgacgtctatgagaaccgcaccgacgtggtgctcatccttgagctagtgtctggaggagagctcttcgatttcctggcccagaaggagtcactgagtgaggaggaggccaccagcttcattaagcagatcctggatggggtgaactaccttcacacaaagaaaattgctcactttgatctcaagccagaaaacattatgttgttagacaagaatattcccattccacacatcaagctgattgactttggtctggctcacgaaatagaagatggagttgaatttaagaatatttttgggacgccggaatttgttgctccagaaattgtgaactacgagcccctgggtctggaggctgacatgtggagcataggcgtcatcacctacatcctcttaagtggagcatcccctttcctgggagacacgaagcaggaaacactggcaaatatcacagcagtgagttacgactttgatgaggaattcttcagccagacgagcgagctggccaaggactttattcggaagcttctggttaaagagacccggaaacggctcacaatccaagaggctctcagacacccctggatcacgccggtggacaaccagcaagccatggtgcgcagggagtctgtggtcaatctggagaacttcaggaagcagtatgtccgcaggcggtggaagctttccttcagcatcgtgtccctgtgcaaccacctcacccgctcgctgatgaagaaggtgcacctgaggccggatgaggacctgaggaactgtgagagtgacactgaggaggacatcgccaggaggaaagccctccacccacggaggaggagcagcacctcctaactggcctgacctgcagtggccgccagggaggtctgggcccagcggggctcccttctgtgcagacttttggacccagctcagcaccagcacccgggcgtcctgagcactttgcaagagagatgggcccaaggaattcagaagagcttgcaggcaagccaggagaccctgggagctgtggctgtcttctgtggaggaggctccagcattcccaaagctcttaattctccataaaatgggctttcctctgtctgccatcctcagagtctggggtgggagtgtggacttaggaaaacaatataaaggacatcctcatcatcacggggtgaaggtcagactaaggcagccttcttcacaggctgagggggttcagaaccagcctggccaaaaattacaccagagagacagagtcctccccattgggaacagggtgattgaggaaagtgaaccttgggtgtgagggaccaatcctgtgacctcccagaaccatggaagccaggacgtcaggctgaccaacacctcagaccttctgaagcagcccattgctggcccgccatgttgtaattttgctcatttttattaaacttctggtttacctgatgcttggcttcttttagggctacccccatctcatttcctttagcccgtgtgcctgtaactctgagggggggcacccagtggggtgctgagtgggcagaatctcagaaggtcctcctgaaccgtccgcgcaggcctgcagtgggcctgcctcctccttgcttccctaacaggaaggtgtccagttcaagagaacccacccagagactgggagtggtggctcacgcctataatccctgcgctttggcagtccgaggcaggggaattgcttgaactcaggagttggagaccagcctgggcaacatggcaaaacgcagtctgtacaaaaaatacaaaaaattagccaggtgtaggggtaggcacctggcatcccagctactccaggggctgaggtgacagcattgcttaagcccagaaggtcgaggctgcagtgagctgagatcacgccactgcactccagtctgggtgacagagagagaccatatccaaaaaaaaaaaaagttgccagagacgagtatgcccatgctccctctacctcactgccaccactcctgctgttaggagctgagtgtgtctccctaaaatttctatgttgaagtcttaacccttggtaccacagaatatcactgtatttggagatggggtctttagaaaggcacttaaattaaaatgagctcactgatatgggccccgatgcaatataattggtgtccttataagaaggggaggttaggacacgcaggaaagaccacatgaaggcccaggagtgggagggggaatagccatcgacaaactaagggggcctcagaggaaaccaaccctgctgacacctcaatcttagactctggcctcaaaaattgtaagaaaataaacttctgtcttttaagccac

SEQ ID NO: 352646 - DNA, 400 bp, Homo sapiens
attctgtaggaatccagctgctatgtcacgagaactcaagccaccctgtggagaattccacacggagtgcagctgaggcctcccaacaacaaccagcaccaatttgcaaaccatgtaagaacactgaggccaggaaatgttgagtgacgtgtccatactcacatagcatggaagaatcagaggccatggggtcaggacctatgggcttaggatataccggaagaggcctgatttccagtcgagcatttgccaaaaatcagcagcgtgatttggagagggtctcgctatgttgcccaggctggtctcaaacttctgcctcaagcaatcctccagtgtccggaattggtgggttcttggtcactgacttcaagaattaagccatggaccctagcagtgagtg

SEQ ID NO: 352647 - DNA, 3089 bp, Homo sapiens
attctgtaggaatccagctgctatgtcacgagaactcaagccaccctgtggagaattccacacggagtgcagctgaggcctcccaacaacaaccagcaccaatttgcaaaccatgtgtctcctacagctactggtgtgttttttgcatattggccttccaacatttcttgttgaattatttcaggctcaccttggtcataatgagtggatctggctttacccagggcttcagcctttagcatttcacatgaggaatatccactgagctgggggtcaagaggcctgacctttaatcttggctctgccccaggcaagtgtgaacttgggtaagaacactgaggccaggaaatgttgagtgacgtgtccatactcacatagcatggaagaatcagaggccatggggtcaggacctatgggcttaggatataccggaagaggcctgatttccagtcgagcatttgccaaaaatcagcagcgtgatttgggattgtatgttccaggcctcaatgaggagtccaaacatggagccattcaagcagcagaaggtggaggacttttatgacatcggagaggagctggggagtggccagtttgccatcgtgaagaagtgccgggagaagagcacggggcttgagtatgcagccaagttcatcaagaagcggcagagccgggcgagccggcgcggtgtgagccgggaggagatcgagcgggaggtgagcatcctgcggcaggtgctgcaccacaatgtcatcacgctgcacgacgtctatgagaaccgcaccgacgtggtgctcatccttgagctagtgtctggaggagagctcttcgatttcctggcccagaaggagtcactgagtgaggaggaggccaccagcttcattaagcagatcctggatggggtgaactaccttcacacaaagaaaattgctcactttgatctcaagccagaaaacattatgttgttagacaagaatattcccattccacacatcaagctgattgactttggtctggctcacgaaatagaagatggagttgaatttaagaatatttttgggacgccggaatttgttgctccagaaattgtgaactacgagcccctgggtctggaggctgacatgtggagcataggcgtcatcacctacatcctcttaagtggagcatcccctttcctgggagacacgaagcaggaaacactggcaaatatcacagcagtgagttacgactttgatgaggaattcttcagccagacgagcgagctggccaaggactttattcggaagcttctggttaaagagacccggaaacggctcacaatccaagaggctctcagacacccctggatcacgccggtggacaaccagcaagccatggtgcgcagggagtctgtggtcaatctggagaacttcaggaagcagtatgtccgcaggcggtggaagctttccttcagcatcgtgtccctgtgcaaccacctcacccgctcgctgatgaagaaggtgcacctgaggccggatgaggacctgaggaactgtgagagtgacactgaggaggacatcgccaggaggaaagccctccacccacggaggaggagcagcacctcctaactggcctgacctgcagtggccgccagggaggtctgggcccagcggggctcccttctgtgcagacttttggacccagctcagcaccagcacccgggcgtcctgagcactttgcaagagagatgggcccaaggaattcagaagagcttgcaggcaagccaggagaccctgggagctgtggctgtcttctgtggaggaggctccagcattcccaaagctcttaattctccataaaatgggctttcctctgtctgccatcctcagagtctggggtgggagtgtggacttaggaaaacaatataaaggacatcctcatcatcacggggtgaaggtcagactaaggcagccttcttcacaggctgagggggttcagaaccagcctggccaaaaattacaccagagagacagagtcctccccattgggaacagggtgattgaggaaagtgaaccttgggtgtgagggaccaatcctgtgacctcccagaaccatggaagccaggacgtcaggctgaccaacacctcagaccttctgaagcagcccattgctggcccgccatgttgtaattttgctcatttttattaaacttctggtttacctgatgcttggcttcttttagggctacccccatctcatttcctttagcccgtgtgcctgtaactctgagggggggcacccagtggggtgctgagtgggcagaatctcagaaggtcctcctgaaccgtccgcgcaggcctgcagtgggcctgcctcctccttgcttccctaacaggaaggtgtccagttcaagagaacccacccagagactgggagtggtggctcacgcctataatccctgcgctttggcagtccgaggcaggggaattgcttgaactcaggagttggagaccagcctgggcaacatggcaaaacgcagtctgtacaaaaaatacaaaaaattagccaggtgtaggggtaggcacctggcatcccagctactccaggggctgaggtgacagcattgcttaagcccagaaggtcgaggctgcagtgagctgagatcacgccactgcactccagtctgggtgacagagagagaccatatccaaaaaaaaaaaaagttgccagagacgagtatgcccatgctccctctacctcactgccaccactcctgctgttaggagctgagtgtgtctccctaaaatttctatgttgaagtcttaacccttggtaccacagaatatcactgtatttggagatggggtctttagaaaggcacttaaattaaaatgagctcactgatatgggccccgatgcaatataattggtgtccttataagaaggggaggttaggacacgcaggaaagaccacatgaaggcccaggagtgggagggggaatagccatcgacaaactaagggggcctcagaggaaaccaaccctgctgacacctcaatcttagactctggcctcaaaaattgtaagaaaataaacttctgtcttttaagccac

SEQ ID NO: 352648 - DNA, 2782 bp, Homo sapiens
attctgtaggaatccagctgctatgtcacgagaactcaagccaccctgtggagaattccacacggagtgcagctgaggcctcccaacaacaaccagcaccaatttgcaaaccatgtgtctcctacagctactggtgtgttttttgcatattggccttccaacatttcttgttgaattatttcaggctcaccttggtcataatgagtggatctggctttacccagggcttcagcctttagcatttcacatgaggaatatccactgagctgggggtcaagaggcctgacctttaatcttggctctgccccaggcaagtgtgaacttgggtaagaacactgaggccaggaaatgttgagtgacgtgtccatactcacatagcatggaagaatcagaggccatggggtcaggacctatgggcttaggatataccggaagaggcctgatttccagtcgagcatttgccaaaaatcagcagcgtgatttgggattgtatgttccaggcctcaatgaggagtccaaacatggagccattcaagcagcagaaggtggaggacttttatgacatcggagaggagctggggagtggccagtttgccatcgtgaagaagtgccgggagaagagcacggggcttgagtatgcagccaagttcatcaagaagcggcagagccgggcgagccggcgcggtgtgagccgggaggagatcgagcgggaggtgagcatcctgcggcaggtgctgcaccacaatgtcatcacgctgcacgacgtctatgagaaccgcaccgacgtggtgctcatccttgagctagtgtctggaggagagctcttcgatttcctggcccagaaggagtcactgagtgaggaggaggccaccagcttcattaagcagatcctggatggggtgaactaccttcacacaaagaaaattgctcactttgatctcaagccagaaaacattatgttgttagacaagaatattcccattccacacatcaagctgattgactttggtctggctcacgaaatagaagatggagttgaatttaagaatatttttgggacgccggaatttgttgctccagaaattgtgaactacgagcccctgggtctggaggctgacatgtggagcataggcgtcatcacctacatcctcttaagtggagcatcccctttcctgggagacacgaagcaggaaacactggcaaatatcacagcagtgagttacgactttgatgaggaattcttcagccagacgagcgagctggccaaggactttattcggaagcttctggttaaagagacccggaaacggctcacaatccaagaggctctcagacacccctggatcacgccggtggacaaccagcaagccatggtgcgcagggagtctgtggtcaatctggagaacttcaggaagcagtatgtccgcaggcggtggaagctttccttcagcatcgtgtccctgtgcaaccacctcacccgctcgctgatgaagaaggtgcacctgaggccggatgaggacctgaggaactgtgagagtgacactgaggaggacatcgccaggaggaaagccctccacccacggaggaggagcagcacctcctaactggcctgacctgcagtggccgccagggaggtctgggcccagcggggctcccttctgtgcagaaaccagcctggccaaaaattacaccagagagacagagtcctccccattgggaacagggtgattgaggaaagtgaaccttgggtgtgagggaccaatcctgtgacctcccagaaccatggaagccaggacgtcaggctgaccaacacctcagaccttctgaagcagcccattgctggcccgccatgttgtaattttgctcatttttattaaacttctggtttacctgatgcttggcttcttttagggctacccccatctcatttcctttagcccgtgtgcctgtaactctgagggggggcacccagtggggtgctgagtgggcagaatctcagaaggtcctcctgaaccgtccgcgcaggcctgcagtgggcctgcctcctccttgcttccctaacaggaaggtgtccagttcaagagaacccacccagagactgggagtggtggctcacgcctataatccctgcgctttggcagtccgaggcaggggaattgcttgaactcaggagttggagaccagcctgggcaacatggcaaaacgcagtctgtacaaaaaatacaaaaaattagccaggtgtaggggtaggcacctggcatcccagctactccaggggctgaggtgacagcattgcttaagcccagaaggtcgaggctgcagtgagctgagatcacgccactgcactccagtctgggtgacagagagagaccatatccaaaaaaaaaaaaagttgccagagacgagtatgcccatgctccctctacctcactgccaccactcctgctgttaggagctgagtgtgtctccctaaaatttctatgttgaagtcttaacccttggtaccacagaatatcactgtatttggagatggggtctttagaaaggcacttaaattaaaatgagctcactgatatgggccccgatgcaatataattggtgtccttataagaaggggaggttaggacacgcaggaaagaccacatgaaggcccaggagtgggagggggaatagccatcgacaaactaagggggcctcagaggaaaccaaccctgctgacacctcaatcttagactctggcctcaaaaattgtaagaaaataaacttctgtcttttaagccac

SEQ ID NO: 352649 - DNA, 495 bp, Homo sapiens
cggccgcgaccgcggcagctcagcctcccgccgtgagtagcacccgtctgcgggctcgatgggcgggacggggcgcgcggcctgacggcagcagcgcccgggtctggggctggcggggcgaagagatccggggcactcgctcgcagatcccgggcccgccgccccaatgcctgacgccgtggcccggggcattgtggccggcacccgagcgcgggagctgcccgccgctgccctggggcgccctccggagcctggcactttgacctgggagacagggtagaggcggcgggcagagccaagcacccagcagggagatgggagacagacgtccatcgagttaggccccctggaacgggcagagcacgcccggctcccggccaagtcttctcagcttgggctgactctctcacctcttgctcccgcctggcacaaggatgtgatgcgaggagggtgctcagatgtctgagcttcctctggggctgaatgaagctgggg

SEQ ID NO: 352650 - DNA, 526 bp, Homo sapiens
aaggcagagaacggatccaggaggcaaacagaaaaacagaccagggatttagcaatggagagttggcttttggaagattctggaagctcattggagcatttatgactcttcttaggcctttcagctttgggactaatagtatgggtgtaggtaacaaggccactctattgaggggtctgtctggactgcttccttcccctggagtgcaggatttgcagccagctcccatccatctctgcatcctccattccactggtttgacggcagtggccaaataatgccaaaatataggtctaaaaagagtgagaacggagatggttgctcccaacttctgtcctcatggatcatcactgtttcccaatcctcattgcaggaaacggctcacaatccaagaggctctcagacacccctggatcacggtaagggcacagccatgagttccaatgggcaaagggtccctgctctgtcgccagggttggcctgggcagccagatgcagagggcccatggagaggcctttgctttaa

SEQ ID NO: 352651 - DNA, 2172 bp, Homo sapiens
gacttggatgaaaagacattatggcctcggggtggctgcctcagctctggtttgccatgtaggaactgacagacagtactttatactcatttcctgttttataaaaatggagctcagaagtcatttccctggaaacactggtcagcaaggcggctgaaggtgcagcccatcaaagaagaaggggcatgggatggtggctgtcaagcatggggagtaccttgtggctcacacccatcctccagtctctctaggctgagctcaggagacccagcagccacagaccacccagccaagtggccttgattatatggcagccacaaagggaactagatgtaattttctttattataatttggcctctcctgatgtctggtttcccttagatgccctgctgctttccttcctccaagcagttggtctggcctcgtttcagatccctcccatcccccagcccctggatggatcagcaggcttgctttcaccacccacctccctggcttgtagtcccgtggtccaggtgaatcaacccaggttgcccagcacagccccattcctggcgtctcatgatcctcctgccctggacctctttctcttttttttctccagaggaactgtgagagtgacactgaggaggacatcgccaggaggaaagccctccacccacggaggaggagcagcacctcctaactggcctgacctgcagtggccgccagggaggtctgggcccagcggggctcccttctgtgcagacttttggacccagctcagcaccagcacccgggcgtcctgagcactttgcaagagagatgggcccaaggaattcagaagagcttgcaggcaagccaggagaccctgggagctgtggctgtcttctgtggaggaggctccagcattcccaaagctcttaattctccataaaatgggctttcctctgtctgccatcctcagagtctggggtgggagtgtggacttaggaaaacaatataaaggacatcctcatcatcacggggtgaaggtcagactaaggcagccttcttcacaggctgagggggttcagaaccagcctggccaaaaattacaccagagagacagagtcctccccattgggaacagggtgattgaggaaagtgaaccttgggtgtgagggaccaatcctgtgacctcccagaaccatggaagccaggacgtcaggctgaccaacacctcagaccttctgaagcagcccattgctggcccgccatgttgtaattttgctcatttttattaaacttctggtttacctgatgcttggcttcttttagggctacccccatctcatttcctttagcccgtgtgcctgtaactctgagggggggcacccagtggggtgctgagtgggcagaatctcagaaggtcctcctgaaccgtccgcgcaggcctgcagtgggcctgcctcctccttgcttccctaacaggaaggtgtccagttcaagagaacccacccagagactgggagtggtggctcacgcctataatccctgcgctttggcagtccgaggcaggggaattgcttgaactcaggagttggagaccagcctgggcaacatggcaaaacgcagtctgtacaaaaaatacaaaaaattagccaggtgtaggggtaggcacctggcatcccagctactccaggggctgaggtgacagcattgcttaagcccagaaggtcgaggctgcagtgagctgagatcacgccactgcactccagtctgggtgacagagagagaccatatccaaaaaaaaaaaaagttgccagagacgagtatgcccatgctccctctacctcactgccaccactcctgctgttaggagctgagtgtgtctccctaaaatttctatgttgaagtcttaacccttggtaccacagaatatcactgtatttggagatggggtctttagaaaggcacttaaattaaaatgagctcactgatatgggccccgatgcaatataattggtgtccttataagaaggggaggttaggacacgcaggaaagaccacatgaaggcccaggagtgggagggggaatagccatcgacaaactaagggggcctcagaggaaaccaaccctgctgacacctcaatcttagactctggcctcaaaaattgtaagaaaataaacttctgtcttttaagccac

SEQ ID NO: 352652 - DNA, 2024 bp, Homo sapiens
tgtccacacctcaccggtgtccacacctcaccggtagtcccacacctcaccggtgtcccacacctcaccggtagtcccacacctgcaccggtagtcccacacctgcaccgggagacacgaagcaggaaacactggcaaatatcacagcagtgagttacgactttgatgaggaattcttcagccagacgagcgagctggccaaggactttattcggaagcttctggttaaagagacccggaaacggctcacaatccaagaggctctcagacacccctggatcacgccggtggacaaccagcaagccatggtgcgcagggagtctgtggtcaatctggagaacttcaggaagcagtatgtccgcaggcggtggaagctttccttcagcatcgtgtccctgtgcaaccacctcacccgctcgctgatgaagaaggtgcacctgaggccggatgaggacctgaggaactgtgagagtgacactgaggaggacatcgccaggaggaaagccctccacccacggaggaggagcagcacctcctaactggcctgacctgcagtggccgccagggaggtctgggcccagcggggctcccttctgtgcagacttttggacccagctcagcaccagcacccgggcgtcctgagcactttgcaagagagatgggcccaaggaattcagaagagcttgcaggcaagccaggagaccctgggagctgtggctgtcttctgtggaggaggctccagcattcccaaagctcttaattctccataaaatgggctttcctctgtctgccatcctcagagtctggggtgggagtgtggacttaggaaaacaatataaaggacatcctcatcatcacggggtgaaggtcagactaaggcagccttcttcacaggctgagggggttcagaaccagcctggccaaaaattacaccagagagacagagtcctccccattgggaacagggtgattgaggaaagtgaaccttgggtgtgagggaccaatcctgtgacctcccagaaccatggaagccaggacgtcaggctgaccaacacctcagaccttctgaagcagcccattgctggcccgccatgttgtaattttgctcatttttattaaacttctggtttacctgatgcttggcttcttttagggctacccccatctcatttcctttagcccgtgtgcctgtaactctgagggggggcacccagtggggtgctgagtgggcagaatctcagaaggtcctcctgaaccgtccgcgcaggcctgcagtgggcctgcctcctccttgcttccctaacaggaaggtgtccagttcaagagaacccacccagagactgggagtggtggctcacgcctataatccctgcgctttggcagtccgaggcaggggaattgcttgaactcaggagttggagaccagcctgggcaacatggcaaaacgcagtctgtacaaaaaatacaaaaaattagccaggtgtaggggtaggcacctggcatcccagctactccaggggctgaggtgacagcattgcttaagcccagaaggtcgaggctgcagtgagctgagatcacgccactgcactccagtctgggtgacagagagagaccatatccaaaaaaaaaaaaagttgccagagacgagtatgcccatgctccctctacctcactgccaccactcctgctgttaggagctgagtgtgtctccctaaaatttctatgttgaagtcttaacccttggtaccacagaatatcactgtatttggagatggggtctttagaaaggcacttaaattaaaatgagctcactgatatgggccccgatgcaatataattggtgtccttataagaaggggaggttaggacacgcaggaaagaccacatgaaggcccaggagtgggagggggaatagccatcgacaaactaagggggcctcagaggaaaccaaccctgctgacacctcaatcttagactctggcctcaaaaattgtaagaaaataaacttctgtcttttaagccac

SEQ ID NO: 352653 - DNA, 159 bp, Homo sapiens
aaaataagctgtttaaaagcccaaaaaaaacccttcagaaaactcttatatatgcattacatcatctctcagttttaatgaaatgacgacgacttaattccttattactcaacctgtcacaatccaataaaacaccaccctttagttttttttgttttt

SEQ ID NO: 352654 - DNA, 406 bp, Homo sapiens
  misc_feature (283)..(283): n is a, c, g, or t
  misc_feature (297)..(297): n is a, c, g, or t
  misc_feature (397)..(397): n is a, c, g, or t
tgaggtctggagagaatgatttgttacaggtcatttataatttaatgtcatggccaagaccagactcaagtctgtagctttgctagttcaatgatacttgtagtataccatggtctctctacagcagttctgtaatgaatccattctcccatgaaatcttctctgtaaaatatttttttttttttttgagatggactccagccggggcgaacaagcgagcactctgtctcaaaaataaataaattgtttaaaaggcatgccagagtccaatttcatttacagnttgactcgctaggnttttaagatgaccatttaattcccgctggctactaaagtaaggtttaaaggggaaaaaattttaaaaaatttaaaaattcccgctgggcaaatatatgcngggtttctt

SEQ ID NO: 352655 - DNA, 3170 bp, Homo sapiens
atgacccgcgccggcgggagggcgtggggaggcaggccaggaacgcacgctgcctggccgtatcgccgcccccaccgccgccgccgccgggactagaagtgagccgcccgggtcccaaacgccagccagccagtcagtgggtcccgcagtcgcccgcaaccggggcgaatcatggcggccgccaaggtggctttaaccaagagagcagatccagctgagcttagaacaatatttttgaagtatgcaagcattgagaaaaacggtgaatttttcatgtcccccaatgactttgtcactcgatacttgaacatttttggagaaagccagcctaatccaaagactgtggaacttttaagtggagtggtggatcagaccaaagatggattaatatcttttcaagaatttgttgcctttgaatctgtcctgtgtgcccctgatgctttgtttatggtagcctttcagctgtttgacaaagctggcaaaggagaagtaacttttgaggatgttaagcaagtttttggacagaccacaattcatcaacatattccatttaactgggattcagaatttgtgcaactacattttggaaaagaaagaaaaagacacctgacatatgcggaatttactcagtttttattggaaatacaactggagcacgcaaagcaagcctttgtgcaacgggacaatgctaggactgggagagtcacagccatcgacttccgagacatcatggtcaccatccgcccccatgtcttgactccttttgtagaagaatgtctagtagctgctgctggaggtaccacatcccatcaagttagtttctcctattttaatggatttaattcgctccttaacaacatggaactcattagaaagatctatagcactctggctggcaccaggaaagatgttgaagtgactaaggaggagtttgttctggcagctcagaaatttggtcaggttacacccatggaagttgacatcttgtttcagttagcagatttatatgagccaaggggacgtatgaccttagcagacattgaacggattgctcctctggaagagggaactctgccctttaacttggctgaggcccagaggcagaaggcctcaggtgattcagctcgaccagttcttctacaagttgcagagtcggcctacaggtttggtctgggttctgttgctggagctgttggagccactgctgtgtatcctatcgatcttgtaaaaactcgaatgcagaaccaacgatcaactggctcttttgtgggagaactcatgtataaaaacagctttgactgttttaagaaagtgctacgctatgaaggcttctttggactgtatagaggtctgttgccacagttattgggagttgccccagagaaggccataaaacttacagtgaacgattttgtgagggataaatttatgcacaaagatggttcggtcccacttgcagcagaaattcttgctggaggctgcgctggaggctcccaggtgattttcacaaatcctttagaaatcgtcaagatccgtttgcaagtggcaggagaaatcaccactggtcctcgagtcagtgctctgtctgtcgtgcgggacctggggttttttgggatctacaagggtgccaaagcatgctttctgcgggacattcctttctcggccatctactttccgtgctatgctcatgtgaaggcttcctttgcaaatgaagatgggcaggttagcccaggaagcctgctcttagctggtgccatagctggtatgcctgcagcatctttagtgacccctgctgatgttatcaagacgagattacaggtggctgcccgggctggccaaaccacttacagcggagtgatagactgctttagaaagatactgcgtgaagaaggaccaaaagctctgtggaagggagctggtgctcgtgtatttcgatcctcaccccagtttggtgtaactttgctgacttacgaattgctacagcgatggttctacattgattttggaggagtaaaacccatgggatcagagccagttcctaaatccaggatcaacctgcctgccccgaatcctgatcacgttgggggctacaaactggcagttgctacatttgcagggattgaaaacaaatttggactttacctacctctcttcaagccatcagtatctacctcaaaggctattggtggaggcccataggaagatcagccctgggatagtgctgtctttttgtgggtactgcagtaaagaacatccctcctgggaatgaagcaatgcttcatcccttttacgtccatctcttgtttaaattcaagtccaggcttttttatcatgtgaaatcattcattttctgggtgttttcttaaccagatcattgtgaaattattcataattattatttggccctctgcccagaaacctttgtttgcatctgaaaattgatgggatttggtcaacactaacatgatttggggaaaggagcaagtcagaatagaaattagtactcccctccttgaactaggattgtagtcccaaagaggctactgtaaggcaatcatggtgctcagagcagtgtttcgtgtgtgttttaaactggtaggaaactaggtgcatatttataaaaataaaaaacactgggagaaatgaaaaaatatatatcaaatatattcagcctggcttcaaattgtaagcatgcacaaattctgtctctggattatattatgaagcttttatgtgaaacatgtttctttgtaatgaaaaccacattggagatgtttagtaatcatattgttactggtaccaagactactagggaaatgcctttgtactttagggaagtacttttggcattttactgtacagacagaaaaaactgagatgtagcccctctcctggaagtgctaattttgaaaaactgctcatatgatgtacatgtactgattactgcctattttaataaacactcttgaaaaatgcatgttgccctgttgctgcctgccctattctcctcatctccccatcattggtacccacttgcttttaaaatccactttatcttgaataatgtaagacaaatatgttctgacataagtatttaattcatgttgccttgcataatggtcagaggcgcatgaatttgtgaaggtggaaataaactatttgtaaagtga

SEQ ID NO: 352656 - DNA, 2832 bp, Homo sapiens
atgacccgcgccggcgggagggcgtggggaggcaggccaggaacgcacgctgcctggccgtatcgccgcccccaccgccgccgccgccgggactagaagtgagccgcccgggtcccaaacgccagccagccagtcagtgggtcccgcagtcgcccgcaaccggggcgaatcatggcggccgccaaggtggctttaaccaagagagcagatccagctgagcttagaacaatatttttgaagattaatatcttttcaagaatttgttgcctttgaatctgtcctgtgtgcccctgatgctttgtttatggtagcctttcagctgtttgacaaagctggcaaaggagaagtaacttttgaggatgttaagcaagtttttggacagaccacaattcatcaacatattccatttaactgggattcagaatttgtgcaactacattttggaaaagaaagaaaaagacacctgacatatgcggaatttactcagtttttattggaaatacaactggagcacgcaaagcaagcctttgtgcaacgggacaatgctaggactgggagagtcacagccatcgacttccgagacatcatggtcaccatccgcccccatgtcttgactccttttgtagaagaatgtctagtagctgctgctggaggtaccacatcccatcaagttagtttctcctattttaatggatttaattcgctccttaacaacatggaactcattagaaagatctatagcactctggctggcaccaggaaagatgttgaagtgactaaggaggagtttgttctggcagctcagaaatttggtcaggttacacccatggaagttgacatcttgtttcagttagcagatttatatgagccaaggggacgtatgaccttagcagacattgaacggattgctcctctggaagagggaactctgccctttaacttggctgaggcccagaggcagaaggcctcaggtgattcagctcgaccagttcttctacaagttgcagagtcggcctacaggtttggtctgggttctgttgctggagctgttggagccactgctgtgtatcctatcgatcttgtaaaaactcgaatgcagaaccaacgatcaactggctcttttgtgggagaactcatgtataaaaacagctttgactgttttaagaaagtgctacgctatgaaggcttctttggactgtatagaggtctgttgccacagttattgggagttgccccagagaaggccataaaacttacagtgaacgattttgtgagggataaatttatgcacaaagatggttcggtcccacttgcagcagaaattcttgctggaggctgcgctggaggctcccaggtgattttcacaaatcctttagaaatcgtcaagatccgtttgcaagtggcaggagaaatcaccactggtcctcgagtcagtgctctgtctgtcgtgcgggacctggggttttttgggatctacaagggtgccaaagcatgctttctgcgggacattcctttctcggccatctactttccgtgctatgctcatgtgaaggcttcctttgcaaatgaagatgggcaggttagcccaggaagcctgctcttagctggtgccatagctggtatgcctgcagcatctttagtgacccctgctgatgttatcaagacgagattacaggtggctgcccgggctggccaaaccacttacagcggagtgatagactgctttagaaagatactgcgtgaagaaggaccaaaagctctgtggaagggagctggtgctcgtgtatttcgatcctcaccccagtttggtgtaactttgctgacttacgaattgctacagcgatggttctacattgattttggaggagtaaaacccatgggatcagagccagttcctaaatccaggatcaacctgcctgccccgaatcctgatcacgttgggggctacaaactggcagttgctacatttgcagggattgaaaacaaatttggactttacctacctctcttcaagccatcagtatctacctcaaaggctattggtggaggcccataggaagatcagccctgggatagtgctgtctttttgtgggtactgcagtaaagaacatccctcctgggaatgaagcaatgcttcatcccttttacgtccatctcttgtttaaattcaagtccaggcttttttatcatgtgaaatcattcattttctgggtgttttcttaaccagatcattgtgaaattattcataattattatttggccctctgcccagaaacctttgtttgcatctgaaaattgatgggatttggtcaacactaacatgatttggggaaaggagcaagtcagaatagaaattagtactcccctccttgaactaggattgtagtcccaaagaggctactgtaaggcaatcatggtgctcagagcagtgtttcgtgtgtgttttaaactggtaggaaactaggtgcatatttataaaaataaaaaacactgggagaaatgaaaaaatatatatcaaatatattcagcctggcttcaaattgtaagcatgcacaaattctgtctctggattatattatgaagcttttatgtgaaacatgtttctttgtaatgaaaaccacattggagatgtttagtaatcatattgttactggtaccaagactactagggaaatgcctttgtactttagggaagtacttttggcattttactgtacagacagaaaaaactgagatgtagcccctctcctggaagtgctaattttgaaaaactgctcatatgatgtacatgtactgattactgcctattttaataaacactcttgaaaaatg

SEQ ID NO: 352657 - DNA, 3029 bp, Homo sapiens
atgacccgcgccggcgggagggcgtggggaggcaggccaggaacgcacgctgcctggccgtatcgccgcccccaccgccgccgccgccgggactagaagtgagccgcccgggtcccaaacgccagccagccagtcagtgggtcccgcagtcgcccgcaaccggggcgaatcatggcggccgccaaggtggctttaaccaagagagcagatccagctgagcttagaacaatatttttgaagtatgcaagcattgagaaaaacggtgaatttttcatgtcccccaatgactttgtcactcgatacttgaacatttttggagaaagccagcctaatccaaagactgtggaacttttaagtggagtggtggatcagaccaaagatggattaatatcttttcaagaatttgttgcctttgaatctgtcctgtgtgcccctgatgctttgtttatggtagcctttcagctgtttgacaaagctggcaaaggagaagtaacttttgaggatgttaagcaagtttttggacagaccacaattcatcaacatattccatttaactgggattcagaatttgtgcaactacattttggaaaagaaagaaaaagacacctgacatatgcggaatttactcagtttttattggaaatacaactggagcacgcaaagcaagcctttgtgcaacgggacaatgctaggactgggagagtcacagccatcgacttccgagacatcatggtcaccatccgcccccatgtcttgactccttttgtagaagaatgtctagtagctgctgctggaggtaccacatcccatcaagttagtttctcctattttaatggatttaattcgctccttaacaacatggaactcattagaaagatctatagcactctggctggcaccaggaaagatgttgaagtgactaaggaggagtttgttctggcagctcagaaatttggtcaggttacacccatggaagttgacatcttgtttcagttagcagatttatatgagccaaggggacgtatgaccttagcagacattgaacggattgctcctctggaagagggaactctgccctttaacttggctgaggcccagaggcagaaggcctcaggtgattcagctcgaccagttcttctacaagttgcagagtcggcctacaggtttggtctgggttctgttgctggagctgttggagccactgctgtgtatcctatcgatcttgtaaaaactcgaatgcagaaccaacgatcaactggctcttttgtgggagaactcatgtataaaaacagctttgactgttttaagaaagtgctacgctatgaaggcttctttggactgtatagaggtctgttgccacagttattgggagttgccccagagaaggccataaaacttacagtgaacgattttgtgagggataaatttatgcacaaagatggttcggtcccacttgcagcagaaattcttgctggaggctgcggtgccaaagcatgctttctgcgggacattcctttctcggccatctactttccgtgctatgctcatgtgaaggcttcctttgcaaatgaagatgggcaggttagcccaggaagcctgctcttagctggtgccatagctggtatgcctgcagcatctttagtgacccctgctgatgttatcaagacgagattacaggtggctgcccgggctggccaaaccacttacagcggagtgatagactgctttagaaagatactgcgtgaagaaggaccaaaagctctgtggaagggagctggtgctcgtgtatttcgatcctcaccccagtttggtgtaactttgctgacttacgaattgctacagcgatggttctacattgattttggaggagtaaaacccatgggatcagagccagttcctaaatccaggatcaacctgcctgccccgaatcctgatcacgttgggggctacaaactggcagttgctacatttgcagggattgaaaacaaatttggactttacctacctctcttcaagccatcagtatctacctcaaaggctattggtggaggcccataggaagatcagccctgggatagtgctgtctttttgtgggtactgcagtaaagaacatccctcctgggaatgaagcaatgcttcatcccttttacgtccatctcttgtttaaattcaagtccaggcttttttatcatgtgaaatcattcattttctgggtgttttcttaaccagatcattgtgaaattattcataattattatttggccctctgcccagaaacctttgtttgcatctgaaaattgatgggatttggtcaacactaacatgatttggggaaaggagcaagtcagaatagaaattagtactcccctccttgaactaggattgtagtcccaaagaggctactgtaaggcaatcatggtgctcagagcagtgtttcgtgtgtgttttaaactggtaggaaactaggtgcatatttataaaaataaaaaacactgggagaaatgaaaaaatatatatcaaatatattcagcctggcttcaaattgtaagcatgcacaaattctgtctctggattatattatgaagcttttatgtgaaacatgtttctttgtaatgaaaaccacattggagatgtttagtaatcatattgttactggtaccaagactactagggaaatgcctttgtactttagggaagtacttttggcattttactgtacagacagaaaaaactgagatgtagcccctctcctggaagtgctaattttgaaaaactgctcatatgatgtacatgtactgattactgcctattttaataaacactcttgaaaaatgcatgttgccctgttgctgcctgccctattctcctcatctccccatcattggtacccacttgcttttaaaatccactttatcttgaataatgtaagacaaatatgttctgacataagtatttaattcatgttgccttgcataatggtcagaggcgcatgaatttgtgaaggtggaaataaactatttgtaaagtga

SEQ ID NO: 352658 - DNA, 1601 bp, Homo sapiens
atgacccgcgccggcgggagggcgtggggaggcaggccaggaacgcacgctgcctggccgtatcgccgcccccaccgccgccgccgccgggactagaagtgagccgcccgggtcccaaacgccagccagccagtcagtgggtcccgcagtcgcccgcaaccggggcgaatcatggcggccgccaaggtggctttaaccaagagagcagatccagctgagcttagaacaatatttttgaagtatgcaagcattgagaaaaacggtgaatttttcatgtcccccaatgactttgtcactcgatacttgaacatttttggagaaagccagcctaatccaaagactgtggaacttttaagtggagtggtggatcagaccaaagatggattaatatcttttcaagaatttgttgcctttgaatctgtcctgtgtgcccctgatgctttgtttatggtagcctttcagctgtttgacaaagctggcaaaggagaagtaacttttgaggatgttaagcaagtttttggacagaccacaattcatcaacatattccatttaactgggattcagaatttgtgcaactacattttggaaaagaaagaaaaagacacctgacatatgcggaatttactcagtttttattggaaatacaactggagcacgcaaagcaagcctttgtgcaacgggacaatgctaggactgggagagtcacagccatcgacttccgagacatcatggtcaccatccgcccccatgtcttgactccttttgtagaagaatgtctagtagctgctgctggaggtaccacatcccatcaagttagtttctcctattttaatggatttaattcgctccttaacaacatggaactcattagaaagatctatagcactctggctggcaccaggaaagatgttgaagtgactaaggaggagtttgttctggcagctcagaaatttggtcaggttacacccatggaagttgacatcttgtttcagttagcagatttatatgagccaaggggacgtatgaccttagcagacattgaacggattgctcctctggaagagggaactctgccctttaacttggctgaggcccagaggcagaaggcctcaggtgattcagctcgaccagttcttctacaagttgcagagtcggcctacaggtttggtctgggttctgttgctggagctgttggagccactgctgtgtatcctatcgatcttgtaaaaactcgaatgcagaaccaacgatcaactggctcttttgtgggagaactcatgtataaaaacagctttgactgttttaagaaagtgctacgctatgaaggcttctttggactgtatagaggttagtgccacatgctcaatacctgttaggtgaaataacactcaaaggtttggtttctcatcttagtgcctgacatgaattagcaagactgcgttaaaatggaaatacagcagattttcaattatccatgctaatgggagtaggctggaggcatctagggcttggctaatcaaaacagcccataatctgaaaattatttatagtgctctgttgtatgttttatttcttaaaataataaattatttttataagc

SEQ ID NO: 352659 - DNA, 1400 bp, Homo sapiens
atgacccgcgccggcgggagggcgtggggaggcaggccaggaacgcacgctgcctggccgtatcgccgcccccaccgccgccgccgccgggactagaagtgagccgcccgggtcccaaacgccagccagccagtcagtgggtcccgcagtcgcccgcaaccggggcgaatcatggcggccgccaaggtggctttaaccaagagagcagatccagctgagcttagaacaatatttttgaagtatgcaagcattgagaaaaacggtgaatttttcatgtcccccaatgactttgtcactcgatacttgaacatttttggagaaagccagcctaatccaaagactgtggaacttttaagtggagtggtggatcagaccaaagatggattaatatcttttcaagaatttgttgcctttgaatctgtcctgtgtgcccctgatgctttgtttatggtagcctttcagctgtttgacaaagctggcaaaggagaagtaacttttgaggatgttaagcaagtttttggacagaccacaattcatcaacatattccatttaactgggattcagaatttgtgcaactacattttggaaaagaaagaaaaagacacctgacatatgcggaatttactcagtttttattggaaatacaactggagcacgcaaagcaagcctttgtgcaacgggacaatgctaggactgggagagtcacagccatcgacttccgagacatcatggtcaccatccgcccccatgtcttgactccttttgtagaagaatgtctagtagctgctgctggaggtaccacatcccatcaagttagtttctcctattttaatggatttaattcgctccttaacaacatggaactcattagaaagatctatagcactctggctggcaccaggaaagatgttgaagtgactaaggaggagtttgttctggcagctcagaaatttggtcaggttacacccatggaagttgacatcttgtttcagttagcagatttatatgagccaaggggacgtatgaccttagcagacattgaacggattgctcctctggaagagggaactctgccctttaacttggctgaggcccagaggcagaaggcctcaggtgattcagctcgaccagttcttctacaagttgcagagtcggcctacaggtttggtctgggttctgttgctggagctgttggagccactgctgtgtatcctatcgatcttgtaaaaactcgaatgcagaaccaacgatcaactggctcttttgtgggagaactcatgtataaaaacagctttgactgttttaagaaagtgctacgctatgaaggcttctttggactgtatagaggtctgttgccacacgtcttcgcctgatcgaagactgtgggcaaatttaaagt

SEQ ID NO: 352660 - DNA, 544 bp, Homo sapiens
tccatgaaccccctgaaaagatataattttttatgtatgtgtaatttctttctgggaaacagtccaaacgtacaaaaagcaaaccccttttccccccacctgtataatttgtctacttcctagtgtgtaaacaaagaggcatcttgactgccgttacccgtctttggtgagaccagagaacagatcttccttgaaatgccagtggcttgccaccagtagggatttaaaaggatgtcacaggcagagttccaaaaaggttttaattgaagtcttagcattagaataaatgagaactgccctcctcccatcacagcacacaacaaaactagtttttgttttaaaaacaaagtttagatttattacttgcagaatttgggttatttttttctgttcccctttcaatgtgtgagtacaaatttggtcttctccaggaatattttgttctgaggtgagttccagagaagcttgatctcctcaatgggatatgtgtttcatgtggtttttcttcctttgcaaatgtgcagggtgccaaagcatgctttct

SEQ ID NO: 352661 - DNA, 2975 bp, Homo sapiens
atgacccgcgccggcgggagggcgtggggaggcaggccaggaacgcacgctgcctggccgtatcgccgcccccaccgccgccgccgccgggactagaagtgagccgcccgggtcccaaacgccagccagccagtcagtgggtcccgcagtcgcccgcaaccggggcgaatcatggcggccgccaaggtggctttaaccaagagagcagatccagctgagcttagaacaatatttttgaagtatgcaagcattgagaaaaacggtgaatttttcatgtcccccaatgactttgtcactcgatacttgaacatttttggagaaagccagcctaatccaaagactgtggaacttttaagtggagtggtggatcagaccaaagatggattaatatcttttcaagaatttgttgcctttgaatctgtcctgtgtgcccctgatgctttgtttatggtagcctttcagctgtttgacaaagctggcaaaggagaagtaacttttgaggatgttaagcaagtttttggacagaccacaattcatcaacatattccatttaactgggattcagaatttgtgcaactacattttggaaaagaaagaaaaagacacctgacatatgcggaatttactcagtttttattggaaatacaactggagcacgcaaagcaagcctttgtgcaacgggacaatgctaggactgggagagtcacagccatcgacttccgagacatcatggtcaccatccgcccccatgtcttgactccttttgtagaagaatgtctagtagctgctgctggaggtaccacatcccatcaagttagtttctcctattttaatggatttaattcgctccttaacaacatggaactcattagaaagatctatagcactctggctggcaccaggaaagatgttgaagtgactaaggaggagtttgttctggcagctcagaaatttggtcaggttacacccatggaagttgacatcttgtttcagttagcagatttatatgagccaaggggacgtatgaccttagcagacattgaacggattgctcctctggaagagggaactctgccctttaacttggctgaggcccagaggcagaaggcctcaggtgattcagctcgaccagttcttctacaagttgcagagtcggcctacaggtttggtctgggttctgttgctggagctgttggagccactgctgtgtatcctatcgatcttgtaaaaactcgaatgcagaaccaacgatcaactggctcttttgtgggagaactcatgtataaaaacagctttgactgttttaagaaagtgctacgctatgaaggcttctttggactgtatagaggtctgttgccacagttattgggagttgccccagagaaggccataaaacttacagtgaacgattttgtgagggataaatttatgcacaaagatggttcggtcccacttgcagcagaaattcttgctggaggctgcgctggaggctcccaggtgattttcacaaatcctttagaaatcgtcaagatccgtttgcaagtggcaggagaaatcaccactggtcctcgagtcagtgctctgtctgtcgtgcgggacctggggttttttgggatctacaagggtgccaaagcatgctttctgcgggacattcctttctcggccatctactttccgtgctatgctcatgtgaaggcttcctttgcaaatgaagatgggcaggttagcccaggaagcctgctcttagctggtgccatagctggtatgcctgcagcatctttagtgacccctgctgatgttatcaagacgagattacaggtggctgcccgggctggccaaaccacttacagcggagtgatagactgctttagaaagatactgcgtgaagaaggaccaaaagctctgtggaagggagctggtgctcgtgtatttcgatcctcaccccagtttggtgtaactttgctgacttacgaattgctacagcgatggttctacattgattttggaggagtaaaacccatgggatcagagccagttcctaaatccaggatcaacctgcctgccccgaatcctgatcacgttgggggctacaaactggcagttgctacatttgcagggattgaaaacaaatttggactttacctacctctcttcaagccatcagtatctacctcaaaggctattggtggaggcccataggaagatcagccctgggatagtgctgtctttttgtgggtactgcagtaaagaacatccctcctgggaatgaagcaatgcttcatcccttttacgtccatctcttgtttaaattcaagtccaggcttttttatcatgtgaaatcattcattttctgggtgttttcttaaccagatcattgtgaaattattcataattattatttggccctctgcccagaaacctttgtttgcatctgaaaattgatgggatttggtcaacactaacatgatttggggaaaggagcaagtcagaatagaaattagtactcccctccttgaactaggattgtagtcccaaagaggctactgtaaggcaatcatggtgctcagagcagtgtttcgtgtgtgttttaaactggtaggaaactaggtgcatatttataaaaataaaaaacactgggagaaatgaaaaaatatatatcaaatatattcagcctggcttcaaattgtaagcatgcacaaattctgtctctggattatattatgaagcttttatgtgaaacatgtttctttgtaatgaaaaccacattggagatgtttagtaatcatattgttactggtaccaagactactagggaaatgcctttgtactttagggaagtacttttggcattttactgtacagacagaaaaaactgagatgtagcccctctcctggaagtgctaattttgaaaaactgctcatatgatgtacatgtactgattactgcctattttaataaacactcttgaaaaatg

SEQ ID NO: 352662 - DNA, 2928 bp, Homo sapiens
ggggccacaagtatgtctaggtcgtgcgtgggtggtatttcagtgacgtggctagcctgtccgtgtccatactgtgagccagccagtcagtgggtcccgcagtcgcccgcaaccggggcgaatcatggcggccgccaaggtggctttaaccaagagagcagatccagctgagcttagaacaatatttttgaagtatgcaagcattgagaaaaacggtgaatttttcatgtcccccaatgactttgtcactcgatacttgaacatttttggagaaagccagcctaatccaaagactgtggaacttttaagtggagtggtggatcagaccaaagatggattaatatcttttcaagaatttgttgcctttgaatctgtcctgtgtgcccctgatgctttgtttatggtagcctttcagctgtttgacaaagctggcaaaggagaagtaacttttgaggatgttaagcaagtttttggacagaccacaattcatcaacatattccatttaactgggattcagaatttgtgcaactacattttggaaaagaaagaaaaagacacctgacatatgcggaatttactcagtttttattggaaatacaactggagcacgcaaagcaagcctttgtgcaacgggacaatgctaggactgggagagtcacagccatcgacttccgagacatcatggtcaccatccgcccccatgtcttgactccttttgtagaagaatgtctagtagctgctgctggaggtaccacatcccatcaagttagtttctcctattttaatggatttaattcgctccttaacaacatggaactcattagaaagatctatagcactctggctggcaccaggaaagatgttgaagtgactaaggaggagtttgttctggcagctcagaaatttggtcaggttacacccatggaagttgacatcttgtttcagttagcagatttatatgagccaaggggacgtatgaccttagcagacattgaacggattgctcctctggaagagggaactctgccctttaacttggctgaggcccagaggcagaaggcctcaggtgattcagctcgaccagttcttctacaagttgcagagtcggcctacaggtttggtctgggttctgttgctggagctgttggagccactgctgtgtatcctatcgatcttgtaaaaactcgaatgcagaaccaacgatcaactggctcttttgtgggagaactcatgtataaaaacagctttgactgttttaagaaagtgctacgctatgaaggcttctttggactgtatagaggtctgttgccacagttattgggagttgccccagagaaggccataaaacttacagtgaacgattttgtgagggataaatttatgcacaaagatggttcggtcccacttgcagcagaaattcttgctggaggctgcgctggaggctcccaggtgattttcacaaatcctttagaaatcgtcaagatccgtttgcaagtggcaggagaaatcaccactggtcctcgagtcagtgctctgtctgtcgtgcgggacctggggttttttgggatctacaagggtgccaaagcatgctttctgcgggacattcctttctcggccatctactttccgtgctatgctcatgtgaaggcttcctttgcaaatgaagatgggcaggttagcccaggaagcctgctcttagctggtgccatagctggtatgcctgcagcatctttagtgacccctgctgatgttatcaagacgagattacaggtggctgcccgggctggccaaaccacttacagcggagtgatagactgctttagaaagatactgcgtgaagaaggaccaaaagctctgtggaagggagctggtgctcgtgtatttcgatcctcaccccagtttggtgtaactttgctgacttacgaattgctacagcgatggttctacattgattttggaggagtaaaacccatgggatcagagccagttcctaaatccaggatcaacctgcctgccccgaatcctgatcacgttgggggctacaaactggcagttgctacatttgcagggattgaaaacaaatttggactttacctacctctcttcaagccatcagtatctacctcaaaggctattggtggaggcccataggaagatcagccctgggatagtgctgtctttttgtgggtactgcagtaaagaacatccctcctgggaatgaagcaatgcttcatcccttttacgtccatctcttgtttaaattcaagtccaggcttttttatcatgtgaaatcattcattttctgggtgttttcttaaccagatcattgtgaaattattcataattattatttggccctctgcccagaaacctttgtttgcatctgaaaattgatgggatttggtcaacactaacatgatttggggaaaggagcaagtcagaatagaaattagtactcccctccttgaactaggattgtagtcccaaagaggctactgtaaggcaatcatggtgctcagagcagtgtttcgtgtgtgttttaaactggtaggaaactaggtgcatatttataaaaataaaaaacactgggagaaatgaaaaaatatatatcaaatatattcagcctggcttcaaattgtaagcatgcacaaattctgtctctggattatattatgaagcttttatgtgaaacatgtttctttgtaatgaaaaccacattggagatgtttagtaatcatattgttactggtaccaagactactagggaaatgcctttgtactttagggaagtacttttggcattttactgtacagacagaaaaaactgagatgtagcccctctcctggaagtgctaattttgaaaaactgctcatatgatgtacatgtactgattactgcctattttaataaacactcttgaaaaatg

SEQ ID NO: 352663 - DNA, 3227 bp, Homo sapiens
atgacccgcgccggcgggagggcgtggggaggcaggccaggaacgcacgctgcctggccgtatcgccgcccccaccgccgccgccgccgggactagaagtgagccgcccgggtcccaaacgccagccagccagtcagtgggtcccgcagtcgcccgcaaccggggcgaatcatggcggccgccaaggtggctttaaccaagagagcagatccagctgagcttagaacaatatttttgaagtatgcaagcattgagaaaaacggtgaatttttcatgtcccccaatgactttgtcactcgatacttgaacatttttggagaaagccagcctaatccaaagactgtggaacttttaagtggagtggtggatcagaccaaagatggattaatatcttttcaagaatttgttgcctttgaatctgtcctgtgtgcccctgatgctttgtttatggtagcctttcagctgtttgacaaagctggcaaaggagaagtaacttttgaggatgttaagcaagtttttggacagaccacaattcatcaacatattccatttaactgggattcagaatttgtgcaactacattttggaaaagaaagaaaaagacacctgacatatgcggaatttactcagtttttattggaaatacaactggagcacgcaaagcaagcctttgtgcaacgggacaatgctaggactgggagagtcacagccatcgacttccgagacatcatggtcaccatccgcccccatgtcttgactccttttgtagaagaatgtctagtagctgctgctggaggtaccacatcccatcaagttagtttctcctattttaatggatttaattcgctccttaacaacatggaactcattagaaagatctatagcactctggctggcaccaggaaagatgttgaagtgactaaggaggagtttgttctggcagctcagaaatttggtcaggttacacccatggaagttgacatcttgtttcagttagcagatttatatgagccaaggggacgtatgaccttagcagacattgaacggattgctcctctggaagagggaactctgccctttaacttggctgaggcccagaggcagaaggcctcaggtgattcagctcgaccagttcttctacaagttgcagagtcggcctacaggtttggtctgggttctgttgctggagctgttggagccactgctgtgtatcctatcgatcttgtaaaaactcgaatgcagaaccaacgatcaactggctcttttgtgggagaactcatgtataaaaacagctttgactgttttaagaaagtgctacgctatgaaggcttctttggactgtatagaggtctgttgccacagttattgggagttgccccagagaaggccataaaacttacagtgaacgattttgtgagggataaatttatgcacaaagatggttcggtcccacttgcagcagaaattcttgctggaggctgcggttgtagttgtgggagttctgatggagacttggaccttcagtcttccctgcatgaggctggaggctcccaggtgattttcacaaatcctttagaaatcgtcaagatccgtttgcaagtggcaggagaaatcaccactggtcctcgagtcagtgctctgtctgtcgtgcgggacctggggttttttgggatctacaagggtgccaaagcatgctttctgcgggacattcctttctcggccatctactttccgtgctatgctcatgtgaaggcttcctttgcaaatgaagatgggcaggttagcccaggaagcctgctcttagctggtgccatagctggtatgcctgcagcatctttagtgacccctgctgatgttatcaagacgagattacaggtggctgcccgggctggccaaaccacttacagcggagtgatagactgctttagaaagatactgcgtgaagaaggaccaaaagctctgtggaagggagctggtgctcgtgtatttcgatcctcaccccagtttggtgtaactttgctgacttacgaattgctacagcgatggttctacattgattttggaggagtaaaacccatgggatcagagccagttcctaaatccaggatcaacctgcctgccccgaatcctgatcacgttgggggctacaaactggcagttgctacatttgcagggattgaaaacaaatttggactttacctacctctcttcaagccatcagtatctacctcaaaggctattggtggaggcccataggaagatcagccctgggatagtgctgtctttttgtgggtactgcagtaaagaacatccctcctgggaatgaagcaatgcttcatcccttttacgtccatctcttgtttaaattcaagtccaggcttttttatcatgtgaaatcattcattttctgggtgttttcttaaccagatcattgtgaaattattcataattattatttggccctctgcccagaaacctttgtttgcatctgaaaattgatgggatttggtcaacactaacatgatttggggaaaggagcaagtcagaatagaaattagtactcccctccttgaactaggattgtagtcccaaagaggctactgtaaggcaatcatggtgctcagagcagtgtttcgtgtgtgttttaaactggtaggaaactaggtgcatatttataaaaataaaaaacactgggagaaatgaaaaaatatatatcaaatatattcagcctggcttcaaattgtaagcatgcacaaattctgtctctggattatattatgaagcttttatgtgaaacatgtttctttgtaatgaaaaccacattggagatgtttagtaatcatattgttactggtaccaagactactagggaaatgcctttgtactttagggaagtacttttggcattttactgtacagacagaaaaaactgagatgtagcccctctcctggaagtgctaattttgaaaaactgctcatatgatgtacatgtactgattactgcctattttaataaacactcttgaaaaatgcatgttgccctgttgctgcctgccctattctcctcatctccccatcattggtacccacttgcttttaaaatccactttatcttgaataatgtaagacaaatatgttctgacataagtatttaattcatgttgccttgcataatggtcagaggcgcatgaatttgtgaaggtggaaataaactatttgtaaagtga

SEQ ID NO: 352664 - DNA, 3320 bp, Homo sapiens
atgacccgcgccggcgggagggcgtggggaggcaggccaggaacgcacgctgcctggccgtatcgccgcccccaccgccgccgccgccgggactagaagtgagccgcccgggtcccaaacgccagccagccagtcagtgggtcccgcagtcgcccgcaaccggggcgaatcatggcggccgccaaggtggctttaaccaagagagcagatccagctgagcttagaacaatatttttgaagtatgcaagcattgagaaaaacggtgaatttttcatgtcccccaatgactttgtcactcgatacttgaacatttttggagaaagccagcctaatccaaagactgtggaacttttaagtggagtggtggatcagaccaaagatggattaatatcttttcaagaatttgttgcctttgaatctgtcctgtgtgcccctgatgctttgtttatggtagcctttcagctgtttgacaaagctggcaaaggagaagtaacttttgaggatgttaagcaagtttttggacagaccacaattcatcaacatattccatttaactgggattcagaatttgtgcaactacattttggaaaagaaagaaaaagacacctgacatatgcggaatttactcagtttttattggaaatacaactggagcacgcaaagcaagcctttgtgcaacgggacaatgctaggactgggagagtcacagccatcgacttccgagacatcatggtcaccatccgcccccatgtcttgactccttttgtagaagaatgtctagtagctgctgctggaggtaccacatcccatcaagttagtttctcctattttaatggatttaattcgctccttaacaacatggaactcattagaaagatctatagcactctggctggcaccaggaaagatgttgaagtgactaaggaggagtttgttctggcagctcagaaatttggtcaggttacacccatggaagttgacatcttgtttcagttagcagatttatatgagccaaggggacgtatgaccttagcagacattgaacggattgctcctctggaagagggaactctgccctttaacttggctgaggcccagaggcagaaggcctcaggtgattcagctcgaccagttcttctacaagttgcagagtcggcctacaggtttggtctgggttctgttgctggagctgttggagccactgctgtgtatcctatcgatcttgtaaaaactcgaatgcagaaccaacgatcaactggctcttttgtgggagaactcatgtataaaaacagctttgactgttttaagaaagtgctacgctatgaaggcttctttggactgtatagaggtctgttgccacagttattgggagttgccccagagaaggccataaaacttacagtgaacgattttgtgagggataaatttatgcacaaagatggttcggtcccacttgcagcagaaattcttgctggaggctgcggttgtagttgtgggagttctgatggagacttggaccttcagtcttccctgcatgaggctggaggctcccaggtgattttcacaaatcctttagaaatcgtcaagatccgtttgcaagtggcaggagaaatcaccactggtcctcgagtcagtgctctgtctgtcgtgcgggacctggggttttttgggatctacaagggtgccaaagcatgctttctgcgggacattcctttctcggccatctactttccgtgctatgctcatgtgaaggcttcctttgcaaatgaagatgggcaggttagcccaggaagcctgctcttagctggtgccatagctggtatgcctgcagcatctttagtgacccctgctgatgttatcaagacgagattacaggtggctgcccgggctggccaaaccacttacagcggagtgatagactgctttagaaagatactgcgtgaagaaggaccaaaagctctgtggaagggagctggtggtatggaaataatgtgttcttaactaactctttggtatcaggtaaatttttaaaatatctaattatatctgtgatttctccatttttttaaagctcgtgtatttcgatcctcaccccagtttggtgtaactttgctgacttacgaattgctacagcgatggttctacattgattttggaggagtaaaacccatgggatcagagccagttcctaaatccaggatcaacctgcctgccccgaatcctgatcacgttgggggctacaaactggcagttgctacatttgcagggattgaaaacaaatttggactttacctacctctcttcaagccatcagtatctacctcaaaggctattggtggaggcccataggaagatcagccctgggatagtgctgtctttttgtgggtactgcagtaaagaacatccctcctgggaatgaagcaatgcttcatcccttttacgtccatctcttgtttaaattcaagtccaggcttttttatcatgtgaaatcattcattttctgggtgttttcttaaccagatcattgtgaaattattcataattattatttggccctctgcccagaaacctttgtttgcatctgaaaattgatgggatttggtcaacactaacatgatttggggaaaggagcaagtcagaatagaaattagtactcccctccttgaactaggattgtagtcccaaagaggctactgtaaggcaatcatggtgctcagagcagtgtttcgtgtgtgttttaaactggtaggaaactaggtgcatatttataaaaataaaaaacactgggagaaatgaaaaaatatatatcaaatatattcagcctggcttcaaattgtaagcatgcacaaattctgtctctggattatattatgaagcttttatgtgaaacatgtttctttgtaatgaaaaccacattggagatgtttagtaatcatattgttactggtaccaagactactagggaaatgcctttgtactttagggaagtacttttggcattttactgtacagacagaaaaaactgagatgtagcccctctcctggaagtgctaattttgaaaaactgctcatatgatgtacatgtactgattactgcctattttaataaacactcttgaaaaatgcatgttgccctgttgctgcctgccctattctcctcatctccccatcattggtacccacttgcttttaaaatccactttatcttgaataatgtaagacaaatatgttctgacataagtatttaattcatgttgccttgcataatggtcagaggcgcatgaatttgtgaaggtggaaataaactatttgtaaagtga

SEQ ID NO: 352665 - DNA, 274 bp, Homo sapiens
gtaggcaagtttagaggaagagctagttttagatgaaagattggaatttgtacaagttgaattttagatgaagtgtagtggttaaaattcaggactctgggccgggtgtggtggctcacgcctgtatccccagcgctttgggaggccgaggtgggcagctctcttgaggtcaggagtttgagagcagcctggccaacatggtgaaacctcgtctttactaaaaatacaaaaattagctggacgtggtggcgtgcacctgtaattccagctaccc

SEQ ID NO: 352666 - DNA, 474 bp, Homo sapiens
gcaggcaggtgtagatttatggtgtatctagtgacactcatgtccttcaaggcccttcttttgcccagatccctcccagtcctgtgggcagtttgcattagtaatttcatatcctttctcctaaagggggcttccagaatagaatgaatctaaggccccctgagacctggatcctccctgtgtgacatggactgtgtaaccattgcaggaacttcttagaatctctaaaagagagattttcctgagttctggctggcagggacacaacaggagctaaggagaaggaaaatggtctagaagagtttttgaaaaatgaactgaagacattagttacagaaactcggttaggtcccgccgatgatcatttccatgtggagaggagcattcgaaggccaccctcttatatcactgttgggatgctgatccacccagatctcctcctctagccatggtgggagttgaatgtgatggctc

SEQ ID NO: 352667 - DNA, 289 bp, Homo sapiens
gagacagaagtgaacctctgagtcgttgttcattagaagacccagaaccatcaggctggtgtccctgctttgcaaacacaagacagaagagatcaatgtcacttctgagtgatcacattggtgtttcagttaactgactcaaggcttggttggatagatattaacatattctgaccttatctgggagaatactggtctgcattctttgcaaacttctgccatttcctctaatttattaccagcatatctatgggtcctaataaatcttccatttgcaattagaatatcc

SEQ ID NO: 352668 - DNA, 424 bp, Homo sapiens
gctcagtatccagttagcagagtttattcaagtgcaaagtaaccatcaggagacagagggaaaccaaagaatggtgatcactgcccctggtgttgggagggggacagtgaatatcaaaacagaggcactgaataaatttacattttccatacaaaggctaacatactgatttaaaggccgagcacggtggctcacacctgtaatcccagcactttgggaacccaaggcaggtggatcacttgaggtcagcagttcgagaccagcctgcacaacatggtgaaaccctgtctccactaaaaatacaaaaattagctgggcatggtggcatgcaccagtagtcctagctgctcaggagactgaggcaggagaatcgcttgaacccgggaggcgaaggttgcagtgagccgaggtcgcactactgcac

SEQ ID NO: 352669 - DNA, 763 bp, Homo sapiens
agcggattgatccggcggcgcgggattggccagtcccgggccaacacgggtggcgggagttttcagatgtgttggctgcggccccgacttcagcggttgggctaggctgtgctgactgtttgggtggcggaccccgggagtaaaacctgttgtcgatccctcagcttccagcttgcggcttgctgagtggccaccttctttccggtccccggagctgcggggaaagatggaacggcaccagccgcggctgcaccacagcgggcgtggaccgtggagcagctgcgcagttgagcagctgcccaagagggaccattatcaagtttctgcaggaacacggttcagatccgtttctgtgcaagaacataaacttattaggaaaacattacaaattgtggccaagaccagtaaccaaggaccacttgtggtttacaggcctataacccatctttttgtgaaaactaagcgttaaagggtacctgaaaggttatacgtaaagtgtctgcgcacgtacaaacaatggtgaagcttagtgaagataaacccaaagaaaccaagtctgggaagagaccctggatgagggtccaccaaaatatactaaatctgttctgacaagggaagataaaaccaatttcccaaaaagggagatgtggtcactgtggtatcgggaacactacaagatgggactgtttggatactaatattcaaacagtgcaagaagagaagatgcagcttaagttaaggtcggagtggcaagtatcaaagg

SEQ ID NO: 352670 - DNA, 4108 bp, Homo sapiens
  misc_feature (4108)..(4108): n is a, c, g, or t
agcggattgatccggcggcgcgggattggccagtcccgggccaacacgggtggcgggagttttcagatgtgttggctgcggccccgacttcagcggttgggctaggctgtgctgactgtttgggtggcggaccccgggagtaaaacctgttgtcgatccctcagcttccagcttgcggcttgctgagtggccaccttctttccggtccccggagctgcggggaaagatggaacggcaccagccgcggctgcaccacccggcccaaggctcagccgctgggactccctacccttcctcagcctctctccgcggctgccgggaaagcaagatgccgcgcaggaagggcccccaacaccctccgccgcccagtggccccgaggagcctggggagaagcgccccaagtttcatttaaatattaggacactgacggatgatatgctggacaaatttgccagcataagaattccagggagcaagaaagagagacctccacttcccaacctgaagactgcatttgcaagcagtgattgctcagcagcacctttagagatgatggagaactttccaaagccactgtcagagaatgaactcttagaactttttgaaaaaatgatggaagatatgaatttaaatgaagataaaaaggcaccattgcgggaaaaggacttcagtatcaaaaaagaaatggtgatgcagtacattaatactgcttctaagacaggaagtcttaagagaagccgacagatctcacctcaggaattcattcatgagctgaaaatggggtctgcagatgagagacttgtcacatgcctggagtctctccgagtgtctttgaccagcaatcctgtgagttgggtggaaagctttggacatgaagggcttggattattattagacattttggaaaaactgattagtggaaaaatccaagaaaaagttgtaaagaaaaatcaacataaagtcatacagtgtctaaaagccctgatgaatacgcagtatggcttggaaagaattatgagtgaggagaggagcctttccttattggccaaagccgtggatcccagacaccccaatatgatgacagatgtggttaaacttctctctgcggtatgcattgtaggggaagaaagcatccttgaagaagttttagaagctttaacttcagctggtgaagaaaaaaaaattgacagatttttttgtattgtggaaggcctccggcacaattcagttcaactgcaagtagcttgtatgcagctcatcaatgccctggttacatctcctgatgatttggatttcaggcttcacatcagaaatgaatttatgcgttgtggattgaaagagatattgccaaatttaaaatgcattaagaatgatggcctggatatccaacttaaagtctttgatgagcataaagaagaagatttgtttgagttatcccatcgccttgaagatattagagctgaacttgatgaagcatatgatgtttacaacatggtgtggagcacagttaaagaaactagagcagagggatattttatttctattcttcagcatcttttgctgattcgaaatgattattttataaggcaacaatacttcaaattaattgatgagtgtgtatcccagattgtattgcatagagatggaatggatccagacttcacatatcgaaaaagactagatttagatttaacccagtttgtagacatttgcatagatcaagcaaaactagaagagtttgaagagaaagcatcagaactttacaagaaatttgaaaaagagtttaccgaccaccaagaaactcaggctgaattgcagaaaaaagaggcaaagattaatgagcttcaagcagagctacaagcttttaagtctcagtttggtgccttgccagctgattgtaatattcctttgcctccctctaaagaaggtggaactggccactcagcacttcctcctccgcctccactgccttctggtggaggggtgccgcctccacctcctcccccaccacctcctccacttccaggaatgcggatgccattcagtggtcctgtgcctccaccacctcccctgggattccttggaggacaaaattctcctcctctaccaatcctgccatttgggttgaaaccaaagaaagaatttaaacctgaaatcagcatgagaagattgaattggttaaagatcagacctcatgaaatgactgaaaactgtttctggataaaagtaaatgaaaataagtatgaaaacgtggatttgctttgtaaacttgagaatacattttgttgccaacaaaaagagagaagagaagaggaagatattgaagagaagaaatcgattaagaaaaaaattaaagaacttaagtttttagattctaaaattgcccagaacctttcaatcttcctgagctcttttcgggtgccatatgaggaaatcagaatgatgatattggaagtagatgaaacacggttggcagagtctatgattcagaacttaataaagcatcttcctgatcaagagcaattaaattcattgtctcagttcaagagtgaatatagcaacttatgtgaacctgagcagtttgtggttgtgaatagaaagtgcagttgtacagaagggtcacgttcacactacaatatcaattgcaactcaacaaggactccagtcgccaaggagcttaattataatctagacactcatacgtctactgggaggatcaaggcagctgagaagaaggaagcgtgtaatgtagaaagcaacagaaaaaaggaaacggaacttcttggctctttttctaaaaatgaatcagttcccgaagttgaagccctgctggcaagattacgagctttataagttaaactggtttttaaaaaaaatgattaagccaaatataaagccatgctctaaactataacacttgaaaaaattgcttttatgtaagtgactttatatagttttaaattatgatatatattagaaaaataaagctaaatatatgaatgcaatgctttttctatgtactggaggttttggtttattcaagattgtaccgggctttaatccttttttttttttttttgtctcctggtattcctcagttctttatttggtggttaaattatacatattgctttagagagcaggtaggtggccatgtgttcagcagtgtgtccttaagaaaataccatctttctaagccactggaatttttactttactatttttaacattaatggatgtcaggtcatcaacctcaagtctttacatatccatggtatattccatatatattgtttatataggcccaagtttctccttaattgggatctatatactaccagcacaacatcaaaaacatgtaattgaatacatcagagctatatatgtaaggaaatgactggtgaccccattatcatcattgttgaattcatgttaagtagaccctctaggggaccataaggcaattgagcacataacgaaaaatgatgcaataagaatgtatgcactctctttgccaaatgcatgtgcttttgtgtaacgtggatgtaaacagaattgcagtgctgccgaaattcttgatcttggctaagagagtatttttccccttgtaattatgactctgagataaaattgccattttgaaatttccaaagtaacaactttttttattttatgaataaacttgggattgcaatttctctgatctgacaatcaataactttaacaaagatctaaataagtgtttcaaggaaagttttcctaagcaaatgtaatattacctcatttgggcatcattactctgttaattctatatcaaaggaaataaacttgctacttgcactaaatgaaaaaacacgaacaaaaggaagaaccagaaaaaaacagaaaaaacaagaaaatacgaaaaaaggaaacagaaagcaacaaagaaagaacaaagccggagaagaagaaagacaaaaaaaaaagaggcccagatcataacccgagagaaaacgagactcgagattagagaaagaagtaaataaaccgcggggtaatgagagaaagaagcagaagcacgaggagagaaacaccaagagagaatagaaaacatcaacaataaan

SEQ ID NO: 352671 - DNA, 1411 bp, Homo sapiens
agtgctgacagtgccactatgtgggcagaagcacagcttgactcagaccctgacaactgttgatctgggagagggaaagagaagactgtttaaaacctgttgagaaggtactgatgacatggagattaatttgacaccagtccttcagagaatagaaagtgcagttgtacagaagggtcacgttcacactacaatatcaattgcaactcaacaaggactccagtcgccaaggagcttaattataatctagacactcatacgtctactgggaggatcaaggcagctgagaagaaggaagcgtgtaatgtagaaagcaacagaaaaaaggaaacggaacttcttggctctttttctaaaaatgaatcagttcccgaagttgaagccctgctggcaagattacgagctttataagttaaactggtttttaaaaaaaatgattaagccaaatataaagccatgctctaaactataacacttgaaaaaattgcttttatgtaagtgactttatatagttttaaattatgatatatattagaaaaataaagctaaatatatgaatgcaatgctttttctatgtactggaggttttggtttattcaagattgtaccgggctttaatccttttttttttttttttgtctcctggtattcctcagttctttatttggtggttaaattatacatattgctttagagagcaggtaggtggccatgtgttcagcagtgtgtccttaagaaaataccatctttctaagccactggaatttttactttactatttttaacattaatggatgtcaggtcatcaacctcaagtctttacatatccatggtatattccatatatattgtttatataggcccaagtttctccttaattgggatctatatactaccagcacaacatcaaaaacatgtaattgaatacatcagagctatatatgtaaggaaatgactggtgaccccattatcatcattgttgaattcatgttaagtagaccctctaggggaccataaggcaattgagcacataacgaaaaatgatgcaataagaatgtatgcactctctttgccaaatgcatgtgcttttgtgtaacgtggatgtaaacagaattgcagtgctgccgaaattcttgatcttggctaagagagtatttttccccttgtaattatgactctgagataaaattgccattttgaaatttccaaagtaacaactttttttattttatgaataaacttgggattgcaatttctctgatctgacaatcaataactttaacaaagatctaaataagtgtttcaaggaaagttttcctaagcaaatgtaatattacctcatttgggcatcattactctgttaattctatatcaaaggaaataaacttgctacttgcactaaatgaaaaaa

SEQ ID NO: 352672 - DNA, 1320 bp, Homo sapiens
agtctatatttcatgttttatattatgtgacacaagaccgacacgctcagggtaaccagaatagaaagtgcagttgtacagaagggtcacgttcacactacaatatcaattgcaactcaacaaggactccagtcgccaaggagcttaattataatctagacactcatacgtctactgggaggatcaaggcagctgagaagaaggaagcgtgtaatgtagaaagcaacagaaaaaaggaaacggaacttcttggctctttttctaaaaatgaatcagttcccgaagttgaagccctgctggcaagattacgagctttataagttaaactggtttttaaaaaaaatgattaagccaaatataaagccatgctctaaactataacacttgaaaaaattgcttttatgtaagtgactttatatagttttaaattatgatatatattagaaaaataaagctaaatatatgaatgcaatgctttttctatgtactggaggttttggtttattcaagattgtaccgggctttaatccttttttttttttttttgtctcctggtattcctcagttctttatttggtggttaaattatacatattgctttagagagcaggtaggtggccatgtgttcagcagtgtgtccttaagaaaataccatctttctaagccactggaatttttactttactatttttaacattaatggatgtcaggtcatcaacctcaagtctttacatatccatggtatattccatatatattgtttatataggcccaagtttctccttaattgggatctatatactaccagcacaacatcaaaaacatgtaattgaatacatcagagctatatatgtaaggaaatgactggtgaccccattatcatcattgttgaattcatgttaagtagaccctctaggggaccataaggcaattgagcacataacgaaaaatgatgcaataagaatgtatgcactctctttgccaaatgcatgtgcttttgtgtaacgtggatgtaaacagaattgcagtgctgccgaaattcttgatcttggctaagagagtatttttccccttgtaattatgactctgagataaaattgccattttgaaatttccaaagtaacaactttttttattttatgaataaacttgggattgcaatttctctgatctgacaatcaataactttaacaaagatctaaataagtgtttcaaggaaagttttcctaagcaaatgtaatattacctcatttgggcatcattactctgttaattctatatcaaaggaaataaacttgctacttgcactaaatgaaaaaa

SEQ ID NO: 352673 - DNA, 1312 bp, Homo sapiens
ctgcggtaaatatccggcacgaatctgtcgggggacaggagcttatgaaacaatagaaagtgcagttgtacagaagggtcacgttcacactacaatatcaattgcaactcaacaaggactccagtcgccaaggagcttaattataatctagacactcatacgtctactgggaggatcaaggcagctgagaagaaggaagcgtgtaatgtagaaagcaacagaaaaaaggaaacggaacttcttggctctttttctaaaaatgaatcagttcccgaagttgaagccctgctggcaagattacgagctttataagttaaactggtttttaaaaaaaatgattaagccaaatataaagccatgctctaaactataacacttgaaaaaattgcttttatgtaagtgactttatatagttttaaattatgatatatattagaaaaataaagctaaatatatgaatgcaatgctttttctatgtactggaggttttggtttattcaagattgtaccgggctttaatccttttttttttttttttgtctcctggtattcctcagttctttatttggtggttaaattatacatattgctttagagagcaggtaggtggccatgtgttcagcagtgtgtccttaagaaaataccatctttctaagccactggaatttttactttactatttttaacattaatggatgtcaggtcatcaacctcaagtctttacatatccatggtatattccatatatattgtttatataggcccaagtttctccttaattgggatctatatactaccagcacaacatcaaaaacatgtaattgaatacatcagagctatatatgtaaggaaatgactggtgaccccattatcatcattgttgaattcatgttaagtagaccctctaggggaccataaggcaattgagcacataacgaaaaatgatgcaataagaatgtatgcactctctttgccaaatgcatgtgcttttgtgtaacgtggatgtaaacagaattgcagtgctgccgaaattcttgatcttggctaagagagtatttttccccttgtaattatgactctgagataaaattgccattttgaaatttccaaagtaacaactttttttattttatgaataaacttgggattgcaatttctctgatctgacaatcaataactttaacaaagatctaaataagtgtttcaaggaaagttttcctaagcaaatgtaatattacctcatttgggcatcattactctgttaattctatatcaaaggaaataaacttgctacttgcactaaatgaaaaaa

SEQ ID NO: 352674 - DNA, 1321 bp, Homo sapiens
  misc_feature (28)..(31): n is a, c, g, or t
tcttatttgtttttgttctctaccttcnnnntgccattcatggtgagaattcataaaaccaatagaaagtgcagttgtacagaagggtcacgttcacactacaatatcaattgcaactcaacaaggactccagtcgccaaggagcttaattataatctagacactcatacgtctactgggaggatcaaggcagctgagaagaaggaagcgtgtaatgtagaaagcaacagaaaaaaggaaacggaacttcttggctctttttctaaaaatgaatcagttcccgaagttgaagccctgctggcaagattacgagctttataagttaaactggtttttaaaaaaaatgattaagccaaatataaagccatgctctaaactataacacttgaaaaaattgcttttatgtaagtgactttatatagttttaaattatgatatatattagaaaaataaagctaaatatatgaatgcaatgctttttctatgtactggaggttttggtttattcaagattgtaccgggctttaatccttttttttttttttttgtctcctggtattcctcagttctttatttggtggttaaattatacatattgctttagagagcaggtaggtggccatgtgttcagcagtgtgtccttaagaaaataccatctttctaagccactggaatttttactttactatttttaacattaatggatgtcaggtcatcaacctcaagtctttacatatccatggtatattccatatatattgtttatataggcccaagtttctccttaattgggatctatatactaccagcacaacatcaaaaacatgtaattgaatacatcagagctatatatgtaaggaaatgactggtgaccccattatcatcattgttgaattcatgttaagtagaccctctaggggaccataaggcaattgagcacataacgaaaaatgatgcaataagaatgtatgcactctctttgccaaatgcatgtgcttttgtgtaacgtggatgtaaacagaattgcagtgctgccgaaattcttgatcttggctaagagagtatttttccccttgtaattatgactctgagataaaattgccattttgaaatttccaaagtaacaactttttttattttatgaataaacttgggattgcaatttctctgatctgacaatcaataactttaacaaagatctaaataagtgtttcaaggaaagttttcctaagcaaatgtaatattacctcatttgggcatcattactctgttaattctatatcaaaggaaataaacttgctacttgcactaaatgaaaaaa

SEQ ID NO: 352675 - DNA, 3683 bp, Homo sapiens
agcggattgatccggcggcgcgggattggccagtcccgggccaacacgggtggcgggagttttcagatgtgttggctgcggccccgacttcagcggttgggctaggctgtgctgactgtttgggtggcggaccccgggagtaaaacctgttgtcgatccctcagcttccagcttgcggcttgctgagtggccaccttctttccggtccccggagctgcggggaaagatggaacggcaccagccgcggctgcaccacccggcccaaggctcagccgctgggactccctacccttcctcagcctctctccgcggctgccgggaaagcaagatgccgcgcaggaagggcccccaacaccctccgccgcccagtggccccgaggagcctggggagaagcgccccaagtttcatttaaatattaggacactgacggatgatatgctggacaaatttgccagcataagaattccagggagcaagaaagagagacctccacttcccaacctgaagactgcatttgcaagcagtgattgctcagcagcacctttagagatgatggagaactttccaaagccactgtcagagaatgaactcttagaactttttgaaaaaatgatggaagatatgaatttaaatgaagataaaaaggcaccattgcgggaaaaggacttcagtatcaaaaaagaaatggtgatgcagtacattaatactgcttctaagacaggaagtcttaagagaagccgacagatctcacctcaggaattcattcatgagctgaaaatggggtctgcagatgagagacttgtcacatgcctggagtctctccgagtgtctttgaccagcaatcctgtgagttgggtggaaagctttggacatgaagggcttggattattattagacattttggaaaaactgattagtggaaaaatccaagaaaaagttgtaaagaaaaatcaacataaagtcatacagtgtctaaaagccctgatgaatacgcagtatggcttggaaagaattatgagtgaggagaggagcctttccttattggccaaagccgtggatcccagacaccccaatatgatgacagatgtggttaaacttctctctgcggtatgcattgtaggggaagaaagcatccttgaagaagttttagaagctttaacttcagctggtgaagaaaaaaaaattgacagatttttttgtattgtggaaggcctccggcacaattcagttcaactgcaagtagcttgtatgcagctcatcaatgccctggttacatctcctgatgatttggatttcaggcttcacatcagaaatgaatttatgcgttgtggattgaaagagatattgccaaatttaaaatgcattaagaatgatggcctggatatccaacttaaagtctttgatgagcataaagaagaagatttgtttgagttatcccatcgccttgaagatattagagctgaacttgatgaagcatatgatgtttacaacatggtgtggagcacagttaaagaaactagagcagagggatattttatttctattcttcagcatcttttgctgattcgaaatgattattttataaggcaacaatacttcaaattaattgatgagtgtgtatcccagattgtattgcatagagatggaatggatccagacttcacatatcgaaaaagactagatttagatttaacccagtttgtagacatttgcatagatcaagcaaaactagaagagtttgaagagaaagcatcagaactttacaagaaatttgaaaaagagtttaccgaccaccaagaaactcaggctgaattgcagaaaaaagaggcaaagattaatgagcttcaagcagagctacaagcttttaagtctcagtttggtgccttgccagctgattgtaatattcctttgcctccctctaaagaaggtggaactggccactcagcacttcctcctccgcctccactgccttctggtggaggggtgccgcctccacctcctcccccaccacctcctccacttccaggaatgcggatgccattcagtggtcctgtgcctccaccacctcccctgggattccttggaggacaaaattctcctcctctaccaatcctgccatttgggttgaaaccaaagaaagaatttaaacctgaaatcagcatgagaagattgaattggttaaagatcagacctcatgaaatgactgaaaactgtttctggataaaagtaaatgaaaataagtatgaaaacgtggatttgctttgtaaacttgagaatacattttgttgccaacaaaaagagagaagagaagaggaagatattgaagagaagaaatcgattaagaaaaaaattaaagaacttaagtttttagattctaaaattgcccagaacctttcaatcttcctgagctcttttcgggtgccatatgaggaaatcagaatgatgatattggaagtagatgaaacacggttggcagagtctatgattcagaacttaataaagcatcttcctgatcaagagcaattaaattcattgtctcagttcaagagtgaatatagcaacttatgtgaacctgagcagtttgtggttgtgatgagcaatgtgaagagactacggccacggctcagtgctattctctttaagcttcagtttgaagagcaggtgaacaacatcaaacctgacatcatggctgtcagtactgcctgcgaagagataaagaagagcaaaagctttagcaagttgctggaacttgtattgctaatgggaaactacatgaatgctggctcccggaatgctcaaaccttcggatttaaccttagctctctctgtaaactaaaggacacaaaatcagcagatcagaaaacaacgctacttcatttcctggtagaaatatgtgaagagaagtaccctgatatactgaattttgtggatgatttggaacctttagacaaagctagtaaagtctctgtagaaacgctggaaaagaatttgaggcagatgggaaggcagcttcaacagcttgagaaggaattggaaacctttccccctcctgaggacttgcatgacaagtttgtgacaaagatgtccagatttgttatcagtgcaaaagaacaatatgagacactttcgaagttacacgaaaacatggaaaagttataccagagtataataggatactatgccattgatgtgaagaaggtgtctgtggaagactttcttactgacctgaataacttcagaaccacattcatgcaagcaataaaggagaatatcaaaaaaagagaagcagaggaaaaagaaaaacgtgtcagaatagctaaagaattagcagagcgagaaagactcgaacgccaacaaaagaaaaagcgtttattagaaatgaagactgagggtgatgagacaggagtgatggataatctgctggaggccttgcagtccggggctgccttccgcgacagaagaaaaaggacaccgatgccaaaagatgttcggcagagtctcagtccaatgtctcagaggcctgttctgaaagtttgtaaccatggtaataaaccgtatttataaattgcacattcttcttatctacttttatcctattgatctgtgattttagtagactgctgtgaaattctcaagttccaatataactaaaatagtaaaaatgtgtgcatgtacatatttg

SEQ ID NO: 352676 - DNA, 502 bp, Homo sapiens
accattgcgggaaaaggacttcagtatcaaaaaagaaatggtgatgcagtacattaatactgcttctaagacagtaagtaaaactgtcaagttgaaaaatactgccgaacatgttttaacatggaaaacagcacatttatctaatgaagtacttaagtttgtgggcaactgtaatcagagggcttctgaatgtataattaagggcacaagtatattatacatttgtttaaattaaaaatatttctcatcttaaaacttttaagctgcttctgttttttagctagttacattgctaagaaacactgggagggggtctactctgtcacctttccttgttagtgaattaatatagtcattgatttttaatgtcacttataaatcacagtgatatctgcattatagaaaagtgagaccgattttactctgtctacatcaaggtacataatagtggcttagaaatgtctttaatgtgagtctccctatgaataaaattatcttgtaa

SEQ ID NO: 352677 - DNA, 2283 bp, Homo sapiens
aggcggaacctggcattgatcctcagtttagaacaggccagttaccatattgtccggagtgggtccttgacattcaggaaagatacatccttagacctttcaaaatttgtcatgcctctctaacctaaaacagccctcattaaatgcactttaatccgagcactgtatggcttggaaagaattatgagtgaggagaggagcctttccttattggccaaagccgtggatcccagacaccccaatatgatgacagatgtggttaaacttctctctgcggtatgcattgtaggggaagaaagcatccttgaagaagttttagaagctttaacttcagctggtgaagaaaaaaaaattgacagatttttttgtattgtggaaggcctccggcacaattcagttcaactgcaagtagcttgtatgcagctcatcaatgccctggttacatctcctgatgatttggatttcaggcttcacatcagaaatgaatttatgcgttgtggattgaaagagatattgccaaatttaaaatgcattaagaatgatggcctggatatccaacttaaagtctttgatgagcataaagaagaagatttgtttgagttatcccatcgccttgaagatattagagctgaacttgatgaagcatatgatgtttacaacatggtgtggagcacagttaaagaaactagagcagagggatattttatttctattcttcagcatcttttgctgattcgaaatgattattttataaggcaacaatacttcaaattaattgatgagtgtgtatcccagattgtattgcatagagatggaatggatccagacttcacatatcgaaaaagactagatttagatttaacccagtttgtagacatttgcatagatcaagcaaaactagaagagtttgaagagaaagcatcagaactttacaagaaatttgaaaaagagtttaccgaccaccaagaaactcaggctgaattgcagaaaaaagaggcaaagattaatgagcttcaagcagagctacaagcttttaagtctcagtttggtgccttgccagctgattgtaatattcctttgcctccctctaaagaaggtggaactggccactcagcacttcctcctccgcctccactgccttctggtggaggggtgccgcctccacctcctcccccaccacctcctccacttccaggaatgcggatgccattcagtggtcctgtgcctccaccacctcccctgggattccttggaggacaaaattctcctcctctaccaatcctgccatttgggttgaaaccaaagaaagaatttaaacctgaaatcagcatgagaagattgaattggttaaagatcagacctcatgaaatgactgaaaactgtttctggataaaagtaaatgaaaataagtatgaaaacgtggatttgctttgtaaacttgagaatacattttgttgccaacaaaaagagagaagagaagaggaagatattgaagagaagaaatcgattaagaaaaaaattaaagaacttaagtttttagattctaaaattgcccagaacctttcaatcttcctgagctcttttcgggtgccatatgaggaaatcagaatgatgatattggaagtagatgaaacacggttggcagagtctatgattcagaacttaataaagcatcttcctgatcaagagcaattaaattcattgtctcagttcaagagtgaatatagcaacttatgtgaacctgagcagtttgtggttgtgatgagcaatgtgaagagactacggccacggctcagtgctattctctttaagcttcagtttgaagagcaggtgaacaacatcaaacctgacatcatggctgtcagtactgcctgcgaagagataaagaagagcaaaagctttagcaagttgctggaacttgtattgctaatgggaaactacatgaatgctggctcccggaatgctcaaaccttcggatttaaccttagctctctctgtaaactaaaggacacaaaatcagcagatcagaaaacaacgctacttcatttcctggtagaaatatgtgaagagaagtaccctgatatactgaattttgtggatgatttggaacctttagacaaagctagtaaaggtttgtgcctttttaagaaacatttcatggctctgatcttcagtgctaaaagactgaaaattataccttttatttgtatgtactttccactttctcacagtgttttcatacccaatatctcattttaaaaataaagagagttgtaggatatt

SEQ ID NO: 352678 - DNA, 3854 bp, Homo sapiens
agcggattgatccggcggcgcgggattggccagtcccgggccaacacgggtggcgggagttttcagatgtgttggctgcggccccgacttcagcggttgggctaggctgtgctgactgtttgggtggcggaccccgggagtaaaacctgttgtcgatccctcagcttccagcttgcggcttgctgagtggccaccttctttccggtccccggagctgcggggaaagatggaacggcaccagccgcggctgcaccacccggcccaaggctcagccgctgggactccctacccttcctcagcctctctccgcggctgccgggaaagcaagatgccgcgcaggaagggcccccaacaccctccgccgcccagtggccccgaggagcctggggagaagcgccccaagtttcatttaaatattaggacactgacggatgatatgctggacaaatttgccagcataagaattccagggagcaagaaagagagacctccacttcccaacctgaagactgcatttgcaagcagtgattgctcagcagcacctttagagatgatggagaactttccaaagccactgtcagagaatgaactcttagaactttttgaaaaaatgatggaagatatgaatttaaatgaagataaaaaggcaccattgcgggaaaaggacttcagtatcaaaaaagaaatggtgatgcagtacattaatactgcttctaagacaggaagtcttaagagaagccgacagatctcacctcaggaattcattcatgagctgaaaatggggtctgcagatgagagacttgtcacatgcctggagtctctccgagtgtctttgaccagcaatcctgtgagttgggtggaaagctttggacatgaagggcttggattattattagacattttggaaaaactgattagtggaaaaatccaagaaaaagttgtaaagaaaaatcaacataaagtcatacagtgtctaaaagccctgatgaatacgcagtatggcttggaaagaattatgagtgaggagaggagcctttccttattggccaaagccgtggatcccagacaccccaatatgatgacagatgtggttaaacttctctctgcggtatgcattgtaggggaagaaagcatccttgaagaagttttagaagctttaacttcagctggtgaagaaaaaaaaattgacagatttttttgtattgtggaaggcctccggcacaattcagttcaactgcaagtagcttgtatgcagctcatcaatgccctggttacatctcctgatgatttggatttcaggcttcacatcagaaatgaatttatgcgttgtggattgaaagagatattgccaaatttaaaatgcattaagaatgatggcctggatatccaacttaaagtctttgatgagcataaagaagaagatttgtttgagttatcccatcgccttgaagatattagagctgaacttgatgaagcatatgatgtttacaacatggtgtggagcacagttaaagaaactagagcagagggatattttatttctattcttcagcatcttttgctgattcgaaatgattattttataaggcaacaatacttcaaattaattgatgagtgtgtatcccagattgtattgcatagagatggaatggatccagacttcacatatcgaaaaagactagatttagatttaacccagtttgtagacatttgcatagatcaagcaaaactagaagagtttgaagagaaagcatcagaactttacaagaaatttgaaaaagagtttaccgaccaccaagaaactcaggctgaattgcagaaaaaagaggcaaagattaatgagcttcaagcagagctacaagcttttaagtctcagtttggtgccttgccagctgattgtaatattcctttgcctccctctaaagaaggtggaactggccactcagcacttcctcctccgcctccactgccttctggtggaggggtgccgcctccacctcctcccccaccacctcctccacttccaggaatgcggatgccattcagtggtcctgtgcctccaccacctcccctgggattccttggaggacaaaattctcctcctctaccaatcctgccatttgggttgaaaccaaagaaagaatttaaacctgaaatcagcatgagaagattgaattggttaaagatcagacctcatgaaatgactgaaaactgtttctggataaaagtaaatgaaaataagtatgaaaacgtggatttgctttgtaaacttgagaatacattttgttgccaacaaaaagagagaagagaagaggaagatattgaagagaagaaatcgattaagaaaaaaattaaagaacttaagtttttagattctaaaattgcccagaacctttcaatcttcctgagctcttttcgggtgccatatgaggaaatcagaatgatgatattggaagtagatgaaacacggttggcagagtctatgattcagaacttaataaagcatcttcctgatcaagagcaattaaattcattgtctcagttcaagagtgaatatagcaacttatgtgaacctgagcagtttgtggttgtgaatagaaagtgcagttgtacagaagggtcacgttcacactacaatatcaattgcaactcaacaaggactccagtcgccaaggagcttaattataatctagacactcatacgtctactgggaggatcaaggcagctgagaagaaggaagcgtgtaatgtagaaagcaacagaaaaaaggaaacggaacttcttggctctttttctaaaaatgaatcagttcccgaagttgaagccctgctggcaagattacgagctttataagttaaactggtttttaaaaaaaatgattaagccaaatataaagccatgctctaaactataacacttgaaaaaattgcttttatgtaagtgactttatatagttttaaattatgatatatattagaaaaataaagctaaatatatgaatgcaatgctttttctatgtactggaggttttggtttattcaagattgtaccgggctttaatccttttttttttttttttgtctcctggtattcctcagttctttatttggtggttaaattatacatattgctttagagagcaggtaggtggccatgtgttcagcagtgtgtccttaagaaaataccatctttctaagccactggaatttttactttactatttttaacattaatggatgtcaggtcatcaacctcaagtctttacatatccatggtatattccatatatattgtttatataggcccaagtttctccttaattgggatctatatactaccagcacaacatcaaaaacatgtaattgaatacatcagagctatatatgtaaggaaatgactggtgaccccattatcatcattgttgaattcatgttaagtagaccctctaggggaccataaggcaattgagcacataacgaaaaatgatgcaataagaatgtatgcactctctttgccaaatgcatgtgcttttgtgtaacgtggatgtaaacagaattgcagtgctgccgaaattcttgatcttggctaagagagtatttttccccttgtaattatgactctgagataaaattgccattttgaaatttccaaagtaacaactttttttattttatgaataaacttgggattgcaatttctctgatctgacaatcaataactttaacaaagatctaaataagtgtttcaaggaaagttttcctaagcaaatgtaatattacctcatttgggcatcattactctgttaattctatatcaaaggaaataaacttgctacttgcactaaatgaaaaaa

SEQ ID NO: 352679 - DNA, 1314 bp, Homo sapiens
  misc_feature (43)..(43): n is a, c, g, or t
atgtcctgcaggtggcgacgctagattagaaacgagaggacgnctagaagtacaatagaaagtgcagttgtacagaagggtcacgttcacactacaatatcaattgcaactcaacaaggactccagtcgccaaggagcttaattataatctagacactcatacgtctactgggaggatcaaggcagctgagaagaaggaagcgtgtaatgtagaaagcaacagaaaaaaggaaacggaacttcttggctctttttctaaaaatgaatcagttcccgaagttgaagccctgctggcaagattacgagctttataagttaaactggtttttaaaaaaaatgattaagccaaatataaagccatgctctaaactataacacttgaaaaaattgcttttatgtaagtgactttatatagttttaaattatgatatatattagaaaaataaagctaaatatatgaatgcaatgctttttctatgtactggaggttttggtttattcaagattgtaccgggctttaatccttttttttttttttttgtctcctggtattcctcagttctttatttggtggttaaattatacatattgctttagagagcaggtaggtggccatgtgttcagcagtgtgtccttaagaaaataccatctttctaagccactggaatttttactttactatttttaacattaatggatgtcaggtcatcaacctcaagtctttacatatccatggtatattccatatatattgtttatataggcccaagtttctccttaattgggatctatatactaccagcacaacatcaaaaacatgtaattgaatacatcagagctatatatgtaaggaaatgactggtgaccccattatcatcattgttgaattcatgttaagtagaccctctaggggaccataaggcaattgagcacataacgaaaaatgatgcaataagaatgtatgcactctctttgccaaatgcatgtgcttttgtgtaacgtggatgtaaacagaattgcagtgctgccgaaattcttgatcttggctaagagagtatttttccccttgtaattatgactctgagataaaattgccattttgaaatttccaaagtaacaactttttttattttatgaataaacttgggattgcaatttctctgatctgacaatcaataactttaacaaagatctaaataagtgtttcaaggaaagttttcctaagcaaatgtaatattacctcatttgggcatcattactctgttaattctatatcaaaggaaataaacttgctacttgcactaaatgaaaaaa

SEQ ID NO: 352680 - DNA, 3569 bp, Homo sapiens
agcggattgatccggcggcgcgggattggccagtcccgggccaacacgggtggcgggagttttcagatgtgttggctgcggccccgacttcagcggttgggctaggctgtgctgactgtttgggtggcggaccccgggagtaaaacctgttgtcgatccctcagcttccagcttgcggcttgctgagtggccaccttctttccggtccccggagctgcggggaaagatggaacggcaccagccgcggctgcaccacccggcccaaggctcagccgctgggactccctacccttcctcagcctctctccgcggctgccgggaaagcaagatgccgcgcaggaagggcccccaacaccctccgccgcccagtggccccgaggagcctggggagaagcgccccaagtttcatttaaatattaggacactgacggatgatatgctggacaaatttgccagcataagaattccagggagcaagaaagagagacctccacttcccaacctgaagactgcatttgcaagcagtgattgctcagcagcacctttagagatgatggagaactttccaaagccactgtcagagaatgaactcttagaactttttgaaaaaatgatggaagatatgaatttaaatgaagataaaaaggcaccattgcgggaaaaggacttcagtatcaaaaaagaaatggtgatgcagtacattaatactgcttctaagacaggaagtcttaagagaagccgacagatctcacctcaggaattcattcatgagctgaaaatggggtctgcagatgagagacttgtcacatgcctggagtctctccgagtgtctttgaccagcaatcctgtgagttgggtggaaagctttggacatgaagggcttggattattattagacattttggaaaaactgattagtggaaaaatccaagaaaaagttgtaaagaaaaatcaacataaagtcatacagtgtctaaaagccctgatgaatacgcagtatggcttggaaagaattatgagtgaggagaggagcctttccttattggccaaagccgtggatcccagacaccccaatatgatgacagatgtggttaaacttctctctgcggtatgcattgtaggggaagaaagcatccttgaagaagttttagaagctttaacttcagctggtgaagaaaaaaaaattgacagatttttttgtattgtggaaggcctccggcacaattcagttcaactgcaagtagcttgtatgcagctcatcaatgccctggttacatctcctgatgatttggatttcaggcttcacatcagaaatgaatttatgcgttgtggattgaaagagatattgccaaatttaaaatgcattaagaatgatggcctggatatccaacttaaagtctttgatgagcataaagaagaagatttgtttgagttatcccatcgccttgaagatattagagctgaacttgatgaagcatatgatgtttacaacatggtgtggagcacagttaaagaaactagagcagagggatattttatttctattcttcagcatcttttgctgattcgaaatgattattttataaggcaacaatacttcaaattaattgatgagtgtgtatcccagattgtattgcatagagatggaatggatccagacttcacatatcgaaaaagactagatttagatttaacccagtttgtagacatttgcatagatcaagcaaaactagaagagtttgaagagaaagcatcagaactttacaagaaatttgaaaaagagtttaccgaccaccaagaaactcaggctgaattgcagaaaaaagaggcaaagattaatgagcttcaagcagagctacaagcttttaagtctcagtttggtgccttgccagctgattgtaatattcctttgcctccctctaaagaaggtggaactggccactcagcacttcctcctccgcctccactgccttctggtggaggggtgccgcctccacctcctcccccaccacctcctccacttccaggaatgcggatgccattcagtggtcctgtgcctccaccacctcccctgggattccttggaggacaaaattctcctcctctaccaatcctgccatttgggttgaaaccaaagaaagaatttaaacctgaaatcagcatgagaagattgaattggttaaagatcagacctcatgaaatgactgaaaactgtttctggataaaagtaaatgaaaataagtatgaaaacgtggatttgctttgtaaacttgagaatacattttgttgccaacaaaaagagagaagagaagaggaagatattgaagagaagaaatcgattaagaaaaaaattaaagaacttaagtttttagattctaaaattgcccagaacctttcaatcttcctgagctcttttcgggtgccatatgaggaaatcagaatgatgatattggaagtagatgaaacacggttggcagagtctatgattcagaacttaataaagcatcttcctgatcaagagcaattaaattcattgtctcagttcaagagtgaatatagcaacttatgtgaacctgagcagtttgtggttgtgaatagaaagtgcagttgtacagaagggtcacgttcacactacaatatcaattgcaactcaacaaggactccagtcgccaaggagcttaattataatctagacactcatacgtctactgggaggatcaaggcagctgagaagaaggaagcgtgtaatgtagaaagcaacagaaaaaaggaaacggaacttcttggctctttttctaaaaatgaatcagttcccgaagttgaagccctgctggcaagattacgagctttataagttaaactggtttttaaaaaaaatgattaagccaaatataaagccatgctctaaactataacacttgaaaaaattgcttttatgtaagtgactttatatagttttaaattatgatatatattagaaaaataaagctaaatatatgaatgcaatgctttttctatgtactggaggttttggtttattcaagattgtaccgggctttaatccttttttttttttttttgtctcctggtattcctcagttctttatttggtggttaaattatacatattgctttagagagcaggtaggtggccatgtgttcagcagtgtgtccttaagaaaataccatctttctaagccactggaatttttactttactatttttaacattaatggatgtcaggtcatcaacctcaagtctttacatatccatggtatattccatatatattgtttatataggcccaagtttctccttaattgggatctatatactaccagcacaacatcaaaaacatgtaattgaatacatcagagctatatatgtaaggaaatgactggtgaccccattatcatcattgttgaattcatgttaagtagaccctctaggggaccataaggcaattctgtttacatccacgttacacaaaagcacatgcatttggcaaagagagtgcatacattcttattgttgcatttttcgttatgtgctcaattgccgtcgacgc

SEQ ID NO: 352681 - DNA, 518 bp, Homo sapiens
tttgtcttcttaagcatttactagtagtagcattccatattaatctgttgacacagctactccaggtaacatgttgaatattctgcaatctcttcctgtcagccagtatatgagggctatttctttaaaagcacttggtatggagagatggtgtggtgtaatacaggcagcacagacattctgctctcggtagtatgtctagccagcagctctggcatttgacacaatggtaatatcctaagagcatttcactttagatttgtgaagtacttggtcaagacattaactgtttggaattgttcacaggaaagtttttagcagacaacatcgttgggtctgtcctggttttctccttgatattttggattcctttcagcattcttgtccattgtgtggtaagtcatcaacttttaagtaattaaatgttttatttaaattttgatcaactccaaccatgtaatctctggaaaaggtaaaacttgttcttagcaaagtttggcctgatatttccaatagct

SEQ ID NO: 352682 - DNA, 442 bp, Homo sapiens
aacattgaatattggtactgaagaatttatgaattttggttttaaaatgttttttttctagaacgattcttttcttgaacagataaaataatgcagtattcaaagccttctgacttattttggaagtgttctaagtatatgatctctttaagtatagattcgcattctcaagtctccacaagaggtaaaacctggtgaaaagcactacaacatggcaaaaagttacccaaatgaagaaaaggatgcttgggatgtgaagatgttgctagaggtaggtcttagaatcctggttatggtgctaacaccactttgtcatttctgatatgtggattgtatgtgttttaatgaaggagcatgttagaaaagatggacacccagaagcagtctcctccagctgatccagcagtaaccccatcccgtgtagcagcaaagaccccaaaag

SEQ ID NO: 352683 - DNA, 297 bp, Homo sapiens
ataaggtacaagttcaagtattagtataacaagtatctgagtaacaaatggtatttgctatcatgactagttaaaagatagcaaataccataaggtacaagttcaagtattagtataacaagtatctgagtaacttatggtatttgctatcttttaactagtcatgatattcttatactttagttacacttttggaatttgatacaaggttgagtggggtgtgtgggtgtatgtatgagtgaaacagttctcaaaagaatgtaagaaaaaccatttttataaaattgtgacttttta

SEQ ID NO: 352684 - DNA, 4227 bp, Homo sapiens
tcgagcctggcggtagaatcttcccagtaggcggcgcgggagggaaaagaggattgaggggctaggccgggcggatcccgtcctcccccgatgtgagcagttttccgaaaccccgtcaggcgaaggctgcccagagaggtggagtcggtagcggggccgggaacatgaggcagtctctcctattcctgaccagcgtggttcctttcgtgctggcgccgcgacctccggatgacccgggcttcggcccccaccagagactcgagaagcttgattctttgctctcagactacgatattctctctttatctaatatccagcagcattcggtaagaaaaagagatctacagacttcaacacatgtagaaacactactaactttttcagctttgaaaaggcattttaaattatacctgacatcaagtactgaacgtttttcacaaaatttcaaggtcgtggtggtggatggtaaaaacgaaagcgagtacactgtaaaatggcaggacttcttcactggacacgtggttggtgagcctgactctagggttctagcccacataagagatgatgatgttataatcagaatcaacacagatggggccgaatataacatagagccactttggagatttgttaatgataccaaagacaaaagaatgttagtttataaatctgaagatatcaagaatgtttcacgtttgcagtctccaaaagtgtgtggttatttaaaagtggataatgaagagttgctcccaaaagggttagtagacagagaaccacctgaagagcttgttcatcgagtgaaaagaagagctgacccagatcccatgaagaacacgtgtaaattattggtggtagcagatcatcgcttctacagatacatgggcagaggggaagagagtacaactacaaattacttaatagagctaattgacagagttgatgacatctatcggaacacttcatgggataatgcaggttttaaaggctatggaatacagatagagcagattcgcattctcaagtctccacaagaggtaaaacctggtgaaaagcactacaacatggcaaaaagttacccaaatgaagaaaaggatgcttgggatgtgaagatgttgctagagcaatttagctttgatatagctgaggaagcatctaaagtttgcttggcacaccttttcacataccaagattttgatatgggaactcttggattagcttatgttggctctcccagagcaaacagccatggaggtgtttgtccaaaggcttattatagcccagttgggaagaaaaatatctatttgaatagtggtttgacgagcacaaagaattatggtaaaaccatccttacaaaggaagctgacctggttacaactcatgaattgggacataattttggagcagaacatgatccggatggtctagcagaatgtgccccgaatgaggaccagggagggaaatatgtcatgtatcccatagctgtgagtggcgatcacgagaacaataagatgttttcaaactgcagtaaacaatcaatctataagaccattgaaagtaaggcccaggagtgttttcaagaacgcagcaataaagtttgtgggaactcgagggtggatgaaggagaagagtgtgatcctggcatcatgtatctgaacaacgacacctgctgcaacagcgactgcacgttgaaggaaggtgtccagtgcagtgacaggaacagtccttgctgtaaaaactgtcagtttgagactgcccagaagaagtgccaggaggcgattaatgctacttgcaaaggcgtgtcctactgcacaggtaatagcagtgagtgcccgcctccaggaaatgctgaagatgacactgtttgcttggatcttggcaagtgtaaggatgggaaatgcatccctttctgcgagagggaacagcagctggagtcctgtgcatgtaatgaaactgacaactcctgcaaggtgtgctgcagggacctttctggccgctgtgtgccctatgtcgatgctgaacaaaagaacttatttttgaggaaaggaaagccctgtacagtaggattttgtgacatgaatggcaaatgtgagaaacgagtacaggatgtaattgaacgattttgggatttcattgaccagctgagcatcaatacttttggaaagtttttagcagacaacatcgttgggtctgtcctggttttctccttgatattttggattcctttcagcattcttgtccattgtgtggataagaaattggataaacagtatgaatctctgtctctgtttcaccccagtaacgtcgaaatgctgagcagcatggattctgcatcggttcgcattatcaaaccctttcctgcgccccagactccaggccgcctgcagcctgcccctgtgatcccttcggcgccagcagctccaaaactggaccaccagagaatggacaccatccaggaagaccccagcacagactcacatatggacgaggatgggtttgagaaggaccccttcccaaatagcagcacagctgccaagtcatttgaggatctcacggaccatccggtcaccagaagtgaaaaggctgcctcctttaaactgcagcgtcagaatcgtgttgacagcaaagaaacagagtgctaatttagttctcagctcttctgacttaagtgtgcaaaatatttttatagatttgacctacaatcaatcacagcttatattttgtgaagactgggaagtgacttagcagatgctggtcatgtgtttgaacttcctgcaggtaaacagttcttgtgtggtttggcccttctccttttgaaaaggtaaggtgaaggtgaatctagcttattttgaggctttcaggttttagtttttaaaatatcttttgacctgtggtgcaaaagcagaaaatacagctggattgggttatgaatatttacgtttttgtaaattaatcttttatattgataacagcactgactagggaaatgatcagtttttttttatacactgtaatgaaccgctgaatatgaagcatttggcatttatttgtgatgaaaagtggaatagttttttttttttttttttttttttgccttcaactaaaaacaaaggagataaatctagtatacattgtctctaaattgtgggtctatttctagttattacccagagtttttatgtagcagggaaaatatatatctaaatttagaaatcatttgggttaatatggctcttcataattctaagactaatgctctctagaaacctaaccacctaccttacagtgagggctatacatggtagccagttgaatttatggaatctaccaactgtttagggccctgatttgctgggcagtttttctgtattttataagtatcttcatgtatccctgttactgatagggatacatgctcttagaaaattcactattggctgggagtggtggctcatgcctgtaatcccagcacttggagaggctgaggttgcgccactacactccagcctgggtgacagagtgagactctgcctcaaaaaaaaaaaaaaaaaaaaaattcactatctacaaacctagaatatttaaaatacaaagattgcctgttttcaaacactattgaataagagggtgagatatttcttaacaacaacaacaacaaaaaaaaacaggttgttttgaatgtgatgagccagccaggagatagaatactacctgcccttagggttgggggctgtccccacaagacttgatacttcagaaaccctttttattgacccacaagcagatatttgaattacttcttactttattgctccaggattctggatgggctgcatttactgtgtgaaggataaaaatcattagcctggattctgatttctataaattgccattaaaagctttttttcccctaagaactgaaatgtgctcaccagccaaaacattttaacttgtaaattttgagggcagttaaccaaacctgtgactaatcatatctcctcctaccccccatttccaaggacatttgttactcagatacttgttatactaatacttgaacttgtaccttatggtatttgctatcttttaactagtcatgatattcttatactttagttacacttttggaatttgatacaaggttgagtggggtgtgtgggtgtatgtatgagtgaaacagttctcaaaagaatgtaagaaaaaccatttttataaaattgtgacttttta

SEQ ID NO: 352685 - DNA, 4679 bp, Homo sapiens
tcgagcctggcggtagaatcttcccagtaggcggcgcgggagggaaaagaggattgaggggctaggccgggcggatcccgtcctcccccgatgtgagcagttttccgaaaccccgtcaggcgaaggctgcccagagaggtggagtcggtagcggggccgggaacatgaggcagtctctcctattcctgaccagcgtggttcctttcgtgctggcgccgcgacctccggatgacccgggcttcggcccccaccagagactcgagaagcttgattctttgctctcagactacgatattctctctttatctaatatccagcagcattcggtaagaaaaagagatctacagacttcaacacatgtagaaacactactaactttttcagctttgaaaaggcattttaaattatacctgacatcaagtactgaacgtttttcacaaaatttcaaggtcgtggtggtggatggtaaaaacgaaagcgagtacactgtaaaatggcaggacttcttcactggacacgtggttggtgagcctgactctagggttctagcccacataagagatgatgatgttataatcagaatcaacacagatggggccgaatataacatagagccactttggagatttgttaatgataccaaagacaaaagaatgttagtttataaatctgaagatatcaagaatgtttcacgtttgcagtctccaaaagtgtgtggttatttaaaagtggataatgaagagttgctcccaaaagggttagtagacagagaaccacctgaagagcttgttcatcgagtgaaaagaagagctgacccagatcccatgaagaacacgtgtaaattattggtggtagcagatcatcgcttctacagatacatgggcagaggggaagagagtacaactacaaattacttaatagagctaattgacagagttgatgacatctatcggaacacttcatgggataatgcaggttttaaaggctatggaatacagatagagcagattcgcattctcaagtctccacaagaggtaaaacctggtgaaaagcactacaacatggcaaaaagttacccaaatgaagaaaaggatgcttgggatgtgaagatgttgctagagcaatttagctttgatatagctgaggaagcatctaaagtttgcttggcacaccttttcacataccaagattttgatatgggaactcttggattagcttatgttggctctcccagagcaaacagccatggaggtgtttgtccaaaggcttattatagcccagttgggaagaaaaatatctatttgaatagtggtttgacgagcacaaagaattatggtaaaaccatccttacaaaggaagctgacctggttacaactcatgaattgggacataattttggagcagaacatgatccggatggtctagcagaatgtgccccgaatgaggaccagggagggaaatatgtcatgtatcccatagctgtgagtggcgatcacgagaacaataagatgttttcaaactgcagtaaacaatcaatctataagaccattgaaagtaaggcccaggagtgttttcaagaacgcagcaataaagtttgtgggaactcgagggtggatgaaggagaagagtgtgatcctggcatcatgtatctgaacaacgacacctgctgcaacagcgactgcacgttgaaggaaggtgtccagtgcagtgacaggaacagtccttgctgtaaaaactgtcagtttgagactgcccagaagaagtgccaggaggcgattaatgctacttgcaaaggcgtgtcctactgcacaggtaatagcagtgagtgcccgcctccaggaaatgctgaagatgacactgtttgcttggatcttggcaagtgtaaggatgggaaatgcatccctttctgcgagagggaacagcagctggagtcctgtgcatgtaatgaaactgacaactcctgcaaggtgtgctgcagggacctttctggccgctgtgtgccctatgtcgatgctgaacaaaagaacttatttttgaggaaaggaaagccctgtacagtaggattttgtgacatgaatggcaaatgtgagaaacgagtacaggatgtaattgaacgattttgggatttcattgaccagctgagcatcaatacttttggaaagtttttagcagacaacatcgttgggtctgtcctggttttctccttgatattttggattcctttcagcattcttgtccattgtgtgaacgtcgaaatgctgagcagcatggattctgcatcggttcgcattatcaaaccctttcctgcgccccagactccaggccgcctgcagcctgcccctgtgatcccttcggcgccagcagctccaaaactggaccaccagagaatggacaccatccaggaagaccccagcacagactcacatatggacgaggatgggtttgagaaggaccccttcccaaatagcagcacagctgccaagtcatttgaggatctcacggaccatccggtcaccagaagtgaaaaggctgcctcctttaaactgcagcgtcagaatcgtgttgacagcaaagaaacagagtgctaatttagttctcagctcttctgacttaagtgtgcaaaatatttttatagatttgacctacaatcaatcacagcttatattttgtgaagactgggaagtgacttagcagatgctggtcatgtgtttgaacttcctgcaggtaaacagttcttgtgtggtttggcccttctccttttgaaaaggtaaggtgaaggtgaatctagcttattttgaggctttcaggttttagtttttaaaatatcttttgacctgtggtgcaaaagcagaaaatacagctggattgggttatgaatatttacgtttttgtaaattaatcttttatattgataacagcactgactagggaaatgatcagtttttttttatacactgtaatgaaccgctgaatatgaagcatttggcatttatttgtgatgaaaagtggaatagttttttttttttttttttttttttgccttcaactaaaaacaaaggagataaatctagtatacattgtctctaaattgtgggtctatttctagttattacccagagtttttatgtagcagggaaaatatatatctaaatttagaaatcatttgggttaatatggctcttcataattctaagactaatgctctctagaaacctaaccacctaccttacagtgagggctatacatggtagccagttgaatttatggaatctaccaactgtttagggccctgatttgctgggcagtttttctgtattttataagtatcttcatgtatccctgttactgatagggatacatgctcttagaaaattcactattggctgggagtggtggctcatgcctgtaatcccagcacttggagaggctgaggttgcgccactacactccagcctgggtgacagagtgagactctgcctcaaaaaaaaaaaaaaaaaaaaaattcactatctacaaacctagaatatttaaaatacaaagattgcctgttttcaaacactattgaataagagggtgagatatttcttaacaacaacaacaacaaaaaaaaacaggttgttttgaatgtgatgagccagccaggagatagaatactacctgcccttagggttgggggctgtccccacaagacttgatacttcagaaaccctttttattgacccacaagcagatatttgaattacttcttactttattgctccaggattctggatgggctgcatttactgtgtgaaggataaaaatcattagcctggattctgatttctataaattgccattaaaagctttttttcccctaagaactgaaatgtgctcaccagccaaaacattttaacttgtaaattttgagggcagttaaccaaacctgtgactaatcatatctcctcctaccccccatttccaaggacatttgttactcagatacttgttatactaatacttgaacttgtaccttatggtatttgctatcttttaactagtcatgatattcttatactttagttacacttttggaatttgatacaaggttgagtggggtgtgtgggtgtatgtatgagtgaaacagttctcaaaagaatgtaagaaaaaccatttttataaaattgtgactttttaaaaacatagtctttgtcatttatagaattaacaagctgctcagggtatattttatagctgtagcactgatatctgcattaataaatactgtcgaaacacaatggacctaagtataaaacttccctgaaaaatcatctaatacttttattattaatatcagtggcaaaggtttaagcctgaggaaaaaagcgtacctctacgtattgacaactttgagttctgtagataacaagcagatttgggtctcctgtgattggctaatggtctccatctcccagcagacttaattcaggttttgcttctgctacatcccgccagtaaggaagcagcaaaggtagagaagagacctttttctctatcaaaggccagagatgcgagaacaaaaattcattcccctttggagacaaatgtagtccatctgataaataagatgagaagtcctggctgtcctgcatcagggtccacaggtcaagtacgtcagtcccacagtcttgggccacttg

SEQ ID NO: 352686 - DNA, 3796 bp, Homo sapiens
tcgagcctggcggtagaatcttcccagtaggcggcgcgggagggaaaagaggattgaggggctaggccgggcggatcccgtcctcccccgatgtgagcagttttccgaaaccccgtcaggcgaaggctgcccagagaggtggagtcggtagcggggccgggaacatgaggcagtctctcctattcctgaccagcgtggttcctttcgtgctggcgccgcgacctccggatgacccgggcttcggcccccaccagagactcgagaagcttgattctttgctctcagactacgatattctctctttatctaatatccagcagcattcggtaagaaaaagagatctacagacttcaacacatgtagaaacactactaactttttcagctttgaaaaggcattttaaattatacctgacatcaagtactgaacgtttttcacaaaatttcaaggtcgtggtggtggatggtaaaaacgaaagcgagtacactgtaaaatggcaggacttcttcactggacacgtggttggtgagcctgactctagggttctagcccacataagagatgatgatgttataatcagaatcaacacagatggggccgaatataacatagagccactttggagatttgttaatgataccaaagacaaaagaatgttagtttataaatctgaagatatcaagaatgtttcacgtttgcagtctccaaaagtgtgtggttatttaaaagtggataatgaagagttgctcccaaaagggttagtagacagagaaccacctgaagagcttgttcatcgagtgaaaagaagagctgacccagatcccatgaagaacacgtgtaaattattggtggtagcagatcatcgcttctacagatacatgggcagaggggaagagagtacaactacaaattacttaatagagctaattgacagagttgatgacatctatcggaacacttcatgggataatgcaggttttaaaggctatggaatacagatagagcagattcgcattctcaagtctccacaagaggtaaaacctggtgaaaagcactacaacatggcaaaaagttacccaaatgaagaaaaggatgcttgggatgtgaagatgttgctagagcaatttagctttgatatagctgaggaagcatctaaagtttgcttggcacaccttttcacataccaagattttgatatgggaactcttggattagcttatgttggctctcccagagcaaacagccatggaggtgtttgtccaaaggcttattatagcccagttgggaagaaaaatatctatttgaatagtggtttgacgagcacaaagaattatggtaaaaccatccttacaaaggaagctgacctggttacaactcatgaattgggacataattttggagcagaacatgatccggatggtctagcagaatgtgccccgaatgaggaccagggagggaaatatgtcatgtatcccatagctgtgagtggcgatcacgagaacaataagatgttttcaaactgcagtaaacaatcaatctataagaccattgaaagtaaggcccaggagtgttttcaagaacgcagcaataaagtttgtgggaactcgagggtggatgaaggagaagagtgtgatcctggcatcatgtatctgaacaacgacacctgctgcaacagcgactgcacgttgaaggaaggtgtccagtgcagtgacaggaacagtccttgctgtaaaaactgtcagtttgagactgcccagaagaagtgccaggaggcgattaatgctacttgcaaaggcgtgtcctactgcacaggtaatagcagtgagtgcccgcctccaggaaatgctgaagatgacactgtttgcttggatcttggcaagtgtaaggatgggaaatgcatccctttctgcgagagggaacagcagctggagtcctgtgcatgtaatgaaactgacaactcctgcaaggtgtgctgcagggacctttctggccgctgtgtgccctatgtcgatgctgaacaaaagaacttatttttgaggaaaggaaagccctgtacagtaggattttgtgacatgaatggcaaatgtgagaaacgagtacaggatgtaattgaacgattttgggatttcattgaccagctgagcatcaatacttttggaaagtttttagcagacaacatcgttgggtctgtcctggttttctccttgatattttggattcctttcagcattcttgtccattgtgtggataagaaattggataaacagtatgaatctctgtctctgtttcaccccagtaacgtcgaaatgctgagcagcatggattctgcatcggttcgcattatcaaaccctttcctgcgccccagactccaggccgcctgcagcctgcccctgtgatcccttcggcgccagcagctccaaaactggaccaccagagaatggacaccatccaggaagaccccagcacagactcacatatggacgaggatgggtttgagaaggaccccttcccaaatagcagcacagctgccaagtcatttgaggatctcacggaccatccggtcaccagaagtgaaaaggctgcctcctttaaactgcagcgtcagaatcgtgttgacagcaaagaaacagagtgctaatttagttctcagctcttctgacttaagtgtgcaaaatatttttatagatttgacctacaatcaatcacagcttatattttgtgaagactgggaagtgacttagcagatgctggtcatgtgtttgaacttcctgcaggtaaacagttcttgtgtggtttggcccttctccttttgaaaaggtaaggtgaaggtgaatctagcttattttgaggctttcaggttttagtttttaaaatatcttttgacctgtggtgcaaaagcagaaaatacagctggattgggttatgaatatttacgtttttgtaaattaatcttttatattgataacagcactgactagggaaatgatcagtttttttttatacactgtaatgaaccgctgaatatgaagcatttggcatttatttgtgatgaaaagtggaatagttttttttttttttttttttttttgccttcaactaaaaacaaaggagataaatctagtatacattgtctctaaattgtgggtctatttctagttattacccagagtttttatgtagcagggaaaatatatatctaaatttagaaatcatttgggttaatatggctcttcataattctaagactaatgctctctagaaacctaaccacctaccttacagtgagggctatacatggtagccagttgaatttatggaatctaccaactgtttagggccctgatttgctgggcagtttttctgtattttataagtatcttcatgtatccctgttactgatagggatacatgctcttagaaaattcactattggctgggagtggtggctcatgcctgtaatcccagcacttggagaggctgaggttgcgccactacactccagcctctgtagtccagcctggtgacagagcaagactccatcttcgtaagagaattatagatccttaaccaagttcacatcagccatttagcattctatggagggaggttcccagttccatatcagtggcctttggaggagactgtggtggccttgccataactccagggtggctctgatggtggttttacattaagagtttgtctctagagaagacacaaacattgcatgggaatacatttttatgatattattttgggtccttattgccttttttctctcaagatgttttcaaa

SEQ ID NO: 352687 - DNA, 4459 bp, Homo sapiens
tgctgggattacaggtgtgagccatcatgccaggtccaggatttctttagggctgaataatatccagttgtgtatatgtaccacatttgttgatccatttatctgttgagagacacaagttaattacacgttttggctattgtagtgaatagtgctgcagtggacaagagtatgtaaatatctcttcgagatcctgttttcaatttttttagatatatactgagaagtgggatttctggatcatctggtattccattttaatattttttattatttttgtagagatagggtctccctgtgttacccaggctggcctcaaactcctagagtaaagtaatcctcccatctcagcctcctaaagtgctggtattataagcatgcagttcttattctcttgttgatctgattataaggctctatttaagacagcataggcccaactggcagaagtaggtgatggctggatattgagaaataatgttttctttgcatgatccttaaggaagctgacctggttacaactcatgaattgggacataattttggagcagaacatgatccggatggtctagcagaatgtgccccgaatgaggaccagggagggaaatatgtcatgtatcccatagctgtgagtggcgatcacgagaacaataagatgttttcaaactgcagtaaacaatcaatctataagaccattgaaagtaaggcccaggagtgttttcaagaacgcagcaataaagtttgtgggaactcgagggtggatgaaggagaagagtgtgatcctggcatcatgtatctgaacaacgacacctgctgcaacagcgactgcacgttgaaggaaggtgtccagtgcagtgacaggaacagtccttgctgtaaaaactgtcagtttgagactgcccagaagaagtgccaggaggcgattaatgctacttgcaaaggcgtgtcctactgcacaggtaatagcagtgagtgcccgcctccaggaaatgctgaagatgacactgtttgcttggatcttggcaagtgtaaggatgggaaatgcatccctttctgcgagagggaacagcagctggagtcctgtgcatgtaatgaaactgacaactcctgcaaggtgtgctgcagggacctttctggccgctgtgtgccctatgtcgatgctgaacaaaagaacttatttttgaggaaaggaaagccctgtacagtaggattttgtgacatgaatggcaaatgtgagaaacgagtacaggatgtaattgaacgattttgggatttcattgaccagctgagcatcaatacttttggaaagtttttagcagacaacatcgttgggtctgtcctggttttctccttgatattttggattcctttcagcattcttgtccattgtgtggataagaaattggataaacagtatgaatctctgtctctgtttcaccccagtgtaagtataccatatgaaagaaacataatcttcgcctggtctgaggccctgttaggcaaagaccttcacctgacccagcaagagctttcactggctgatggaaggtcatgttgcagcaggaagggtctaggttggaatgtttacccttctgacaacagtgatggtgaacttcgattagttgcatggatggacatttaaagagctgtgctgtccccttcccaagccataaggagtgatttagccattcaacacttagttaatattttgagttcaatttctctcttgggatcttaccttgagaggtttgaatcctcttttgggtcttcaaatggtaagtaagttttcaggatgcttgaaagctagtaattactgtttttgccattaaaagtaatggcattaattacttttgcaccaacctagtattttttagtcacttaggttgagtgagcctcacctagcacttttttcttagcatcacagtgccaacagaataagaggctgtttgatgggtaagggtggagctgtgaggacctccgattcatcttttattcctatcaatcaattgaacccatgtctttgcagaacgtcgaaatgctgagcagcatggattctgcatcggttcgcattatcaaaccctttcctgcgccccagactccaggccgcctgcagcctgcccctgtgatcccttcggcgccagcagctccaaaactggaccaccagagaatggacaccatccaggaagaccccagcacagactcacatatggacgaggatgggtttgagaaggaccccttcccaaatagcagcacagctgccaagtcatttgaggatctcacggaccatccggtcaccagaagtgaaaaggctgcctcctttaaactgcagcgtcagaatcgtgttgacagcaaagaaacagagtgctaatttagttctcagctcttctgacttaagtgtgcaaaatatttttatagatttgacctacaatcaatcacagcttatattttgtgaagactgggaagtgacttagcagatgctggtcatgtgtttgaacttcctgcaggtaaacagttcttgtgtggtttggcccttctccttttgaaaaggtaaggtgaaggtgaatctagcttattttgaggctttcaggttttagtttttaaaatatcttttgacctgtggtgcaaaagcagaaaatacagctggattgggttatgaatatttacgtttttgtaaattaatcttttatattgataacagcactgactagggaaatgatcagtttttttttatacactgtaatgaaccgctgaatatgaagcatttggcatttatttgtgatgaaaagtggaatagttttttttttttttttttttttttgccttcaactaaaaacaaaggagataaatctagtatacattgtctctaaattgtgggtctatttctagttattacccagagtttttatgtagcagggaaaatatatatctaaatttagaaatcatttgggttaatatggctcttcataattctaagactaatgctctctagaaacctaaccacctaccttacagtgagggctatacatggtagccagttgaatttatggaatctaccaactgtttagggccctgatttgctgggcagtttttctgtattttataagtatcttcatgtatccctgttactgatagggatacatgctcttagaaaattcactattggctgggagtggtggctcatgcctgtaatcccagcacttggagaggctgaggttgcgccactacactccagcctgggtgacagagtgagactctgcctcaaaaaaaaaaaaaaaaaaaaaattcactatctacaaacctagaatatttaaaatacaaagattgcctgttttcaaacactattgaataagagggtgagatatttcttaacaacaacaacaacaaaaaaaaacaggttgttttgaatgtgatgagccagccaggagatagaatactacctgcccttagggttgggggctgtccccacaagacttgatacttcagaaaccctttttattgacccacaagcagatatttgaattacttcttactttattgctccaggattctggatgggctgcatttactgtgtgaaggataaaaatcattagcctggattctgatttctataaattgccattaaaagctttttttcccctaagaactgaaatgtgctcaccagccaaaacattttaacttgtaaattttgagggcagttaaccaaacctgtgactaatcatatctcctcctaccccccatttccaaggacatttgttactcagatacttgttatactaatacttgaacttgtaccttatggtatttgctatcttttaactagtcatgatattcttatactttagttacacttttggaatttgatacaaggttgagtggggtgtgtgggtgtatgtatgagtgaaacagttctcaaaagaatgtaagaaaaaccatttttataaaattgtgactttttaaaaacatagtctttgtcatttatagaattaacaagctgctcagggtatattttatagctgtagcactgatatctgcattaataaatactgtcgaaacacaatggacctaagtataaaacttccctgaaaaatcatctaatacttttattattaatatcagtggcaaaggtttaagcctgaggaaaaaagcgtacctctacgtattgacaactttgagttctgtagataacaagcagatttgggtctcctgtgattggctaatggtctccatctcccagcagacttaattcaggttttgcttctgctacatcccgccagtaaggaagcagcaaaggtagagaagagacctttttctctatcaaaggccagagatgcgagaacaaaaattcattcccctttggagacaaatgtagtccatctgataaataagatgagaagtcctggctgtcctgcatcagggtccacaggtcaagtacgtcagtcccacagtcttgggccacttg

SEQ ID NO: 352688 - DNA, 3461 bp, Homo sapiens
tttgtcttcttaagcatttactagtagtagcattccatattaatctgttgacacagctactccaggtaacatgttgaatattctgcaatctcttcctgtcagccagtatatgagggctatttctttaaaagcacttggtatggagagatggtgtggtgtaatacaggcagcacagacattctgctctcggtagtatgtctagccagcagctctggcatttgacacaatggtaatatcctaagagcatttcactttagatttgtgaagtacttggtcaagacattaactgtttggaattgttcacaggaaagtttttagcagacaacatcgttgggtctgtcctggttttctccttgatattttggattcctttcagcattcttgtccattgtgtggataagaaattggataaacagtatgaatctctgtctctgtttcaccccagtgtaagtataccatatgaaagaaacataatcttcgcctggtctgaggccctgttaggcaaagaccttcacctgacccagcaagagctttcactggctgatggaaggtcatgttgcagcaggaagggtctaggttggaatgtttacccttctgacaacagtgatggtgaacttcgattagttgcatggatggacatttaaagagctgtgctgtccccttcccaagccataaggagtgatttagccattcaacacttagttaatattttgagttcaatttctctcttgggatcttaccttgagaggtttgaatcctcttttgggtcttcaaatggtaagtaagttttcaggatgcttgaaagctagtaattactgtttttgccattaaaagtaatggcattaattacttttgcaccaacctagtattttttagtcacttaggttgagtgagcctcacctagcacttttttcttagcatcacagtgccaacagaataagaggctgtttgatgggtaagggtggagctgtgaggacctccgattcatcttttattcctatcaatcaattgaacccatgtctttgcagaacgtcgaaatgctgagcagcatggattctgcatcggttcgcattatcaaaccctttcctgcgccccagactccaggccgcctgcagcctgcccctgtgatcccttcggcgccagcagctccaaaactggaccaccagagaatggacaccatccaggaagaccccagcacagactcacatatggacgaggatgggtttgagaaggaccccttcccaaatagcagcacagctgccaagtcatttgaggatctcacggaccatccggtcaccagaagtgaaaaggctgcctcctttaaactgcagcgtcagaatcgtgttgacagcaaagaaacagagtgctaatttagttctcagctcttctgacttaagtgtgcaaaatatttttatagatttgacctacaatcaatcacagcttatattttgtgaagactgggaagtgacttagcagatgctggtcatgtgtttgaacttcctgcaggtaaacagttcttgtgtggtttggcccttctccttttgaaaaggtaaggtgaaggtgaatctagcttattttgaggctttcaggttttagtttttaaaatatcttttgacctgtggtgcaaaagcagaaaatacagctggattgggttatgaatatttacgtttttgtaaattaatcttttatattgataacagcactgactagggaaatgatcagtttttttttatacactgtaatgaaccgctgaatatgaagcatttggcatttatttgtgatgaaaagtggaatagttttttttttttttttttttttttgccttcaactaaaaacaaaggagataaatctagtatacattgtctctaaattgtgggtctatttctagttattacccagagtttttatgtagcagggaaaatatatatctaaatttagaaatcatttgggttaatatggctcttcataattctaagactaatgctctctagaaacctaaccacctaccttacagtgagggctatacatggtagccagttgaatttatggaatctaccaactgtttagggccctgatttgctgggcagtttttctgtattttataagtatcttcatgtatccctgttactgatagggatacatgctcttagaaaattcactattggctgggagtggtggctcatgcctgtaatcccagcacttggagaggctgaggttgcgccactacactccagcctgggtgacagagtgagactctgcctcaaaaaaaaaaaaaaaaaaaaaattcactatctacaaacctagaatatttaaaatacaaagattgcctgttttcaaacactattgaataagagggtgagatatttcttaacaacaacaacaacaaaaaaaaacaggttgttttgaatgtgatgagccagccaggagatagaatactacctgcccttagggttgggggctgtccccacaagacttgatacttcagaaaccctttttattgacccacaagcagatatttgaattacttcttactttattgctccaggattctggatgggctgcatttactgtgtgaaggataaaaatcattagcctggattctgatttctataaattgccattaaaagctttttttcccctaagaactgaaatgtgctcaccagccaaaacattttaacttgtaaattttgagggcagttaaccaaacctgtgactaatcatatctcctcctaccccccatttccaaggacatttgttactcagatacttgttatactaatacttgaacttgtaccttatggtatttgctatcttttaactagtcatgatattcttatactttagttacacttttggaatttgatacaaggttgagtggggtgtgtgggtgtatgtatgagtgaaacagttctcaaaagaatgtaagaaaaaccatttttataaaattgtgactttttaaaaacatagtctttgtcatttatagaattaacaagctgctcagggtatattttatagctgtagcactgatatctgcattaataaatactgtcgaaacacaatggacctaagtataaaacttccctgaaaaatcatctaatacttttattattaatatcagtggcaaaggtttaagcctgaggaaaaaagcgtacctctacgtattgacaactttgagttctgtagataacaagcagatttgggtctcctgtgattggctaatggtctccatctcccagcagacttaattcaggttttgcttctgctacatcccgccagtaaggaagcagcaaaggtagagaagagacctttttctctatcaaaggccagagatgcgagaacaaaaattcattcccctttggagacaaatgtagtccatctgataaataagatgagaagtcctggctgtcctgcatcagggtccacaggtcaagtacgtcagtcccacagtcttgggccacttg

SEQ ID NO: 352689 - DNA, 1779 bp, Homo sapiens
  misc_feature (126)..(126): n is a, c, g, or t
acccacggcaaagggcccaagcatatttggtacccagtttttcccttccggttttaaaaccggcgccatttatttaatcccccccctaaaggcaattgccaaattacctaaattcggccgcattcnttttttttttttgccttcaactaaaaacaaaggagataaatctagtatacattgtctctaaattgtgggtctatttctagttattacccagagtttttatgtagcagggaaaatatatatctaaatttagaaatcatttgggttaatatggctcttcataattctaagactaatgctctctagaaacctaaccacctaccttacagtgagggctatacatggtagccagttgaatttatggaatctaccaactgtttagggccctgatttgctgggcagtttttctgtattttataagtatcttcatgtatccctgttactgatagggatacatgctcttagaaaattcactattggctgggagtggtggctcatgcctgtaatcccagcacttggagaggctgaggttgcgccactacactccagcctgggtgacagagtgagactctgcctcaaaaaaaaaaaaaaaaaaaaaattcactatctacaaacctagaatatttaaaatacaaagattgcctgttttcaaacactattgaataagagggtgagatatttcttaacaacaacaacaacaaaaaaaaacaggttgttttgaatgtgatgagccagccaggagatagaatactacctgcccttagggttgggggctgtccccacaagacttgatacttcagaaaccctttttattgacccacaagcagatatttgaattacttcttactttattgctccaggattctggatgggctgcatttactgtgtgaaggataaaaatcattagcctggattctgatttctataaattgccattaaaagctttttttcccctaagaactgaaatgtgctcaccagccaaaacattttaacttgtaaattttgagggcagttaaccaaacctgtgactaatcatatctcctcctaccccccatttccaaggacatttgttactcagatacttgttatactaatacttgaacttgtaccttatggtatttgctatcttttaactagtcatgatattcttatactttagttacacttttggaatttgatacaaggttgagtggggtgtgtgggtgtatgtatgagtgaaacagttctcaaaagaatgtaagaaaaaccatttttataaaattgtgactttttaaaaacatagtctttgtcatttatagaattaacaagctgctcagggtatattttatagctgtagcactgatatctgcattaataaatactgtcgaaacacaatggacctaagtataaaacttccctgaaaaatcatctaatacttttattattaatatcagtggcaaaggtttaagcctgaggaaaaaagcgtacctctacgtattgacaactttgagttctgtagataacaagcagatttgggtctcctgtgattggctaatggtctccatctcccagcagacttaattcaggttttgcttctgctacatcccgccagtaaggaagcagcaaaggtagagaagagacctttttctctatcaaaggccagagatgcgagaacaaaaattcattcccctttggagacaaatgtagtccatctgataaataagatgagaagtcctggctgtcctgcatcagggtccacaggtcaagtacgtcagtcccacagtcttgggccacttg

SEQ ID NO: 352690 - DNA, 2058 bp, Homo sapiens
tcgagcctggcggtagaatcttcccagtaggcggcgcgggagggaaaagaggattgaggggctaggccgggcggatcccgtcctcccccgatgtgagcagttttccgaaaccccgtcaggcgaaggctgcccagagaggtggagtcggtagcggggccgggaacatgaggcagtctctcctattcctgaccagcgtggttcctttcgtgctggcgccgcgacctccggatgacccgggcttcggcccccaccagagactcgagaagcttgattctttgctctcagactacgatattctctctttatctaatatccagcagcattcggtaagaaaaagagatctacagacttcaacacatgtagaaacactactaactttttcagctttgaaaaggcattttaaattatacctgacatcaagtactgaacgtttttcacaaaatttcaaggtcgtggtggtggatggtaaaaacgaaagcgagtacactgtaaaatggcaggacttcttcactggacacgtggttggtgagcctgactctagggttctagcccacataagagatgatgatgttataatcagaatcaacacagatggggccgaatataacatagagccactttggagatttgttaatgataccaaagacaaaagaatgttagtttataaatctgaagatatcaagaatgtttcacgtttgcagtctccaaaagtgtgtggttatttaaaagtggataatgaagagttgctcccaaaagggttagtagacagagaaccacctgaagagcttgttcatcgagtgaaaagaagagctgacccagatcccatgaagaacacgtgtaaattattggtggtagcagatcatcgcttctacagatacatgggcagaggggaagagagtacaactacaaattacttaatagagctaattgacagagttgatgacatctatcggaacacttcatgggataatgcaggttttaaaggctatggaatacagatagagcagattcgcattctcaagtctccacaagaggtaaaacctggtgaaaagcactacaacatggcaaaaagttacccaaatgaagaaaaggatgcttgggatgtgaagatgttgctagagcaatttagctttgatatagctgaggaagcatctaaagtttgcttggcacaccttttcacataccaagattttgatatgggaactcttggattagcttatgttggctctcccagagcaaacagccatggaggtgtttgtccaaaggcttattatagcccagttgggaagaaaaatatctatttgaatagtggtttgacgagcacaaagaattatggtaaaaccatccttacaaaggaagctgacctggttacaactcatgaattgggacataattttggagcagaacatgatccggatggtctagcagaatgtgccccgaatgaggaccagggagggaaatatgtcatgtatcccatagctgtgagtggcgatcacgagaacaataagatgttttcaaactgcagtaaacaatcaatctataagaccattgaaagtaaggcccaggagtgttttcaagaacgcagcaataaagtttgtgggaactcgagggtggatgaaggagaagagtgtgatcctggcatcatgtatctgaacaacgacacctgctgcaacagcgactgcacgttgaaggaaggtgtccagtgcagtgacaggaacagtccttgctgtaaaaactgtcagtttgagactgcccagaagaagtgccaggaggcgattaatgctacttgcaaaggcgtgtcctactgcacaggtaatagcagtgagtgcccgcctccaggaaatgctgaagatgacactgtttgcttggatcttggcaagtgtaaggatgggaaatgcatccctttctgcgagagggaacagcagctggagtcctgtgcatgtaatggtgagcagttttattcccagtccagcagcaggagaaaacatggcctttgtctgccaggctcccttcctccatttggaggttgtgcgaatgacagcagtggtgagatccaag

SEQ ID NO: 352691 - DNA, 487 bp, Homo sapiens
aataaatgtgatttcttacctctttgggagcatggtcagggaggaaagaggaggcaggaggagaggcaggtctcagaacaatccagctgtcaatgcgtgttctctgttccagaaactgacaactcctgcaaggtgtgctgcagggacctttctggccgctgtgtgccctatgtcgatgctctacgtattgacaactttgagttctgtagataacaagcagatttgggtctcctgtgattggctaatggtctccatctcccagcagacttaattcaggttttgcttctgctacatcccgccagtaaggaagcagcaaaggtagagaagagacctttttctctatcaaaggccagagatgcgagaacaaaaattcattcccctttggagacaaatgtagtccatctgataaataagatgagaagtcctggctgtcctgcatcagggtccacaggtcaagtacgtcagtcccacagtcttgggccacttg

SEQ ID NO: 352692 - DNA, 163 bp, Homo sapiens
tactaggcaaattccaccctgaaggatttaatttttattgagagtaatgcatagtttcttatttgatgtaagtatttttaaataataattttttttttctcttaaggtgagcctgactctagggttctagcccacataagagatgatgatgttataatcagaa

SEQ ID NO: 352693 - DNA, 470 bp, Homo sapiens
cagatgttctactttcttgggtactcattacgcggaagttattgccttgtgtcaaagatgggaaaacgtttgattttaatgaagccctttacatgtcagttatttttataaagctacattgcttctgaatacattgtgtttgggaatgatgctgtatgtatgttttttcttcatagggcaaatgtgagaaacgagtacaggatgtaattgaacgattttgggatttcattgaccagctgagcatcaatacttttggtaggtgatttccccagattacttactgagagctgagtcaatttctgtgatgacattagaaaagtgtgctttcagagtgatgtgctttaattctgcagtagaaggtggaactattcacagctttagttatgaaacaactttgttggctagaataaaatgaactcatagatagtctgtccccgtggagcttggatgcacagattttctgacaaggg

SEQ ID NO: 352694 - DNA, 4730 bp, Homo sapiens
tcgagcctggcggtagaatcttcccagtaggcggcgcgggagggaaaagaggattgaggggctaggccgggcggatcccgtcctcccccgatgtgagcagttttccgaaaccccgtcaggcgaaggctgcccagagaggtggagtcggtagcggggccgggaacatgaggcagtctctcctattcctgaccagcgtggttcctttcgtgctggcgccgcgacctccggatgacccgggcttcggcccccaccagagactcgagaagcttgattctttgctctcagactacgatattctctctttatctaatatccagcagcattcggtaagaaaaagagatctacagacttcaacacatgtagaaacactactaactttttcagctttgaaaaggcattttaaattatacctgacatcaagtactgaacgtttttcacaaaatttcaaggtcgtggtggtggatggtaaaaacgaaagcgagtacactgtaaaatggcaggacttcttcactggacacgtggttggtgagcctgactctagggttctagcccacataagagatgatgatgttataatcagaatcaacacagatggggccgaatataacatagagccactttggagatttgttaatgataccaaagacaaaagaatgttagtttataaatctgaagatatcaagaatgtttcacgtttgcagtctccaaaagtgtgtggttatttaaaagtggataatgaagagttgctcccaaaagggttagtagacagagaaccacctgaagagcttgttcatcgagtgaaaagaagagctgacccagatcccatgaagaacacgtgtaaattattggtggtagcagatcatcgcttctacagatacatgggcagaggggaagagagtacaactacaaattacttaatagagctaattgacagagttgatgacatctatcggaacacttcatgggataatgcaggttttaaaggctatggaatacagatagagcagattcgcattctcaagtctccacaagaggtaaaacctggtgaaaagcactacaacatggcaaaaagttacccaaatgaagaaaaggatgcttgggatgtgaagatgttgctagagcaatttagctttgatatagctgaggaagcatctaaagtttgcttggcacaccttttcacataccaagattttgatatgggaactcttggattagcttatgttggctctcccagagcaaacagccatggaggtgtttgtccaaaggcttattatagcccagttgggaagaaaaatatctatttgaatagtggtttgacgagcacaaagaattatggtaaaaccatccttacaaaggaagctgacctggttacaactcatgaattgggacataattttggagcagaacatgatccggatggtctagcagaatgtgccccgaatgaggaccagggagggaaatatgtcatgtatcccatagctgtgagtggcgatcacgagaacaataagatgttttcaaactgcagtaaacaatcaatctataagaccattgaaagtaaggcccaggagtgttttcaagaacgcagcaataaagtttgtgggaactcgagggtggatgaaggagaagagtgtgatcctggcatcatgtatctgaacaacgacacctgctgcaacagcgactgcacgttgaaggaaggtgtccagtgcagtgacaggaacagtccttgctgtaaaaactgtcagtttgagactgcccagaagaagtgccaggaggcgattaatgctacttgcaaaggcgtgtcctactgcacaggtaatagcagtgagtgcccgcctccaggaaatgctgaagatgacactgtttgcttggatcttggcaagtgtaaggatgggaaatgcatccctttctgcgagagggaacagcagctggagtcctgtgcatgtaatgaaactgacaactcctgcaaggtgtgctgcagggacctttctggccgctgtgtgccctatgtcgatgctgaacaaaagaacttatttttgaggaaaggaaagccctgtacagtaggattttgtgacatgaatggcaaatgtgagaaacgagtacaggatgtaattgaacgattttgggatttcattgaccagctgagcatcaatacttttggaaagtttttagcagacaacatcgttgggtctgtcctggttttctccttgatattttggattcctttcagcattcttgtccattgtgtggataagaaattggataaacagtatgaatctctgtctctgtttcaccccagtaacgtcgaaatgctgagcagcatggattctgcatcggttcgcattatcaaaccctttcctgcgccccagactccaggccgcctgcagcctgcccctgtgatcccttcggcgccagcagctccaaaactggaccaccagagaatggacaccatccaggaagaccccagcacagactcacatatggacgaggatgggtttgagaaggaccccttcccaaatagcagcacagctgccaagtcatttgaggatctcacggaccatccggtcaccagaagtgaaaaggctgcctcctttaaactgcagcgtcagaatcgtgttgacagcaaagaaacagagtgctaatttagttctcagctcttctgacttaagtgtgcaaaatatttttatagatttgacctacaatcaatcacagcttatattttgtgaagactgggaagtgacttagcagatgctggtcatgtgtttgaacttcctgcaggtaaacagttcttgtgtggtttggcccttctccttttgaaaaggtaaggtgaaggtgaatctagcttattttgaggctttcaggttttagtttttaaaatatcttttgacctgtggtgcaaaagcagaaaatacagctggattgggttatgaatatttacgtttttgtaaattaatcttttatattgataacagcactgactagggaaatgatcagtttttttttatacactgtaatgaaccgctgaatatgaagcatttggcatttatttgtgatgaaaagtggaatagttttttttttttttttttttttttgccttcaactaaaaacaaaggagataaatctagtatacattgtctctaaattgtgggtctatttctagttattacccagagtttttatgtagcagggaaaatatatatctaaatttagaaatcatttgggttaatatggctcttcataattctaagactaatgctctctagaaacctaaccacctaccttacagtgagggctatacatggtagccagttgaatttatggaatctaccaactgtttagggccctgatttgctgggcagtttttctgtattttataagtatcttcatgtatccctgttactgatagggatacatgctcttagaaaattcactattggctgggagtggtggctcatgcctgtaatcccagcacttggagaggctgaggttgcgccactacactccagcctgggtgacagagtgagactctgcctcaaaaaaaaaaaaaaaaaaaaaattcactatctacaaacctagaatatttaaaatacaaagattgcctgttttcaaacactattgaataagagggtgagatatttcttaacaacaacaacaacaaaaaaaaacaggttgttttgaatgtgatgagccagccaggagatagaatactacctgcccttagggttgggggctgtccccacaagacttgatacttcagaaaccctttttattgacccacaagcagatatttgaattacttcttactttattgctccaggattctggatgggctgcatttactgtgtgaaggataaaaatcattagcctggattctgatttctataaattgccattaaaagctttttttcccctaagaactgaaatgtgctcaccagccaaaacattttaacttgtaaattttgagggcagttaaccaaacctgtgactaatcatatctcctcctaccccccatttccaaggacatttgttactcagatacttgttatactaatacttgaacttgtaccttatggtatttgctatcttttaactagtcatgatattcttatactttagttacacttttggaatttgatacaaggttgagtggggtgtgtgggtgtatgtatgagtgaaacagttctcaaaagaatgtaagaaaaaccatttttataaaattgtgactttttaaaaacatagtctttgtcatttatagaattaacaagctgctcagggtatattttatagctgtagcactgatatctgcattaataaatactgtcgaaacacaatggacctaagtataaaacttccctgaaaaatcatctaatacttttattattaatatcagtggcaaaggtttaagcctgaggaaaaaagcgtacctctacgtattgacaactttgagttctgtagataacaagcagatttgggtctcctgtgattggctaatggtctccatctcccagcagacttaattcaggttttgcttctgctacatcccgccagtaaggaagcagcaaaggtagagaagagacctttttctctatcaaaggccagagatgcgagaacaaaaattcattcccctttggagacaaatgtagtccatctgataaataagatgagaagtcctggctgtcctgcatcagggtccacaggtcaagtacgtcagtcccacagtcttgggccacttg

SEQ ID NO: 352695 - DNA, 4277 bp, Homo sapiens
tcgagcctggcggtagaatcttcccagtaggcggcgcgggagggaaaagaggattgaggggctaggccgggcggatcccgtcctcccccgatgtgagcagttttccgaaaccccgtcaggcgaaggctgcccagagaggtggagtcggtagcggggccgggaacatgaggcagtctctcctattcctgaccagcgtggttcctttcgtgctggcgccgcgacctccggatgacccgggcttcggcccccaccagagactcgagaagcttgattctttgctctcagactacgatattctctctttatctaatatccagcagcattcggtaagaaaaagagatctacagacttcaacacatgtagaaacactactaactttttcagctttgaaaaggcattttaaattatacctgacatcaagtactgaacgtttttcacaaaatttcaaggtcgtggtggtggatggtaaaaacgaaagcgagtacactgtaaaatggcaggacttcttcactggacacgtggttggtgagcctgactctagggttctagcccacataagagatgatgatgttataatcagaatcaacacagatggggccgaatataacatagagccactttggagatttgttaatgataccaaagacaaaagaatgttagtttataaatctgaagatatcaagaatgtttcacgtttgcagtctccaaaagtgtgtggttatttaaaagtggataatgaagagttgctcccaaaagggttagtagacagagaaccacctgaagagcttgttcatcgagtgaaaagaagagctgacccagatcccatgaagaacacgtgtaaattattggtggtagcagatcatcgcttctacagatacatgggcagaggggaagagagtacaactacaaattacttaatagagctaattgacagagttgatgacatctatcggaacacttcatgggataatgcaggttttaaaggctatggaatacagatagagcagattcgcattctcaagtctccacaagaggtaaaacctggtgaaaagcactacaacatggcaaaaagttacccaaatgaagaaaaggatgcttgggatgtgaagatgttgctagagcaatttagctttgatatagctgaggaagcatctaaagtttgcttggcacaccttttcacataccaagattttgatatgggaactcttggattagcttatgttggctctcccagagcaaacagccatggaggtgtttgtccaaaggcttattatagcccagttgggaagaaaaatatctatttgaatagtggtttgacgagcacaaagaattatggtaaaaccatccttacaaaggaagctgacctggttacaactcatgaattgggacataattttggagcagaacatgatccggatggtctagcagaatgtgccccgaatgaggaccagggagggaaatatgtcatgtatcccatagctgtgagtggcgatcacgagaacaataagatgttttcaaactgcagtaaacaatcaatctataagaccattgaaagtaaggcccaggagtgttttcaagaacgcagcaataaagtttgtgggaactcgagggtggatgaaggagaagagtgtgatcctggcatcatgtatctgaacaacgacacctgctgcaacagcgactgcacgttgaaggaaggtgtccagtgcagtgacaggaacagtccttgctgtaaaaactgtcagtttgagactgcccagaagaagtgccaggaggcgattaatgctacttgcaaaggcgtgtcctactgcacaggtaatagcagtgagtgcccgcctccaggaaatgctgaagatgacactgtttgcttggatcttggcaagtgtaaggatgggaaatgcatccctttctgcgagagggaacagcagctggagtcctgtgcatgtaatgaaactgacaactcctgcaaggtgtgctgcagggacctttctggccgctgtgtgccctatgtcgatgctgaacaaaagaacttatttttgaggaaaggaaagccctgtacagtaggattttgtgacatgaatggcaaatgtgagaaacgagtacaggatgtaattgaacgattttgggatttcattgaccagctgagcatcaatacttttggaaagtttttagcagacaacatcgttgggtctgtcctggttttctccttgatattttggattcctttcagcattcttgtccattgtgtggataagaaattggataaacagtatgaatctctgtctctgtttcaccccagtaacgtcgaaatgctgagcagcatggattctgcatcggttcgcattatcaaaccctttcctgcgccccagactccaggccgcctgcagcctgcccctgtgatcccttcggcgccagcagctccaaaactggaccaccagagaatggacaccatccaggaagaccccagcacagactcacatatggacgaggatgggtttgagaaggaccccttcccaaatagcagcacagctgccaagtcatttgaggatctcacggaccatccggtcaccagaagtgaaaaggctgcctcctttaaactgcagcgtcagaatcgtgttgacagcaaagaaacagagtgctaatttagttctcagctcttctgacttaagtgtgcaaaatatttttatagatttgacctacaatcaatcacagcttatattttgtgaagactgggaagtgacttagcagatgctggtcatgtgtttgaacttcctgcaggtaaacagttcttgtgtggtttggcccttctccttttgaaaaggtaaggtgaaggtgaatctagcttattttgaggctttcaggttttagtttttaaaatatcttttgacctgtggtgcaaaagcagaaaatacagctggattgggttatgaatatttacgtttttgtaaattaatcttttatattgataacagcactgactagggaaatgatcagtttttttttatacactgtaatgaaccgctgaatatgaagcatttggcatttatttgtgatgaaaagtggaatagttttttttttttttttttttttttgccttcaactaaaaacaaaggagataaatctagtatacattgtctctaaattgtgggtctatttctagttattacccagagtttttatgtagcagggaaaatatatatctaaatttagaaatcatttgggttaatatggctcttcataattctaagactaatgctctctagaaacctaaccacctaccttacagtgagggctatacatggtagccagttgaatttatggaatctaccaactgtttagggccctgatttgctgggcagtttttctgtattttataagtatcttcatgtatccctgttactgatagggatacatgctcttagaaaattcactattggctgggagtggtggctcatgcctgtaatcccagcacttggagaggctgaggttgcgccactacactccagcctgggtgacagagtgagactctgcctcaaaaaaaaaaaaaaaaaaaattccactatattcttaaaagacctatagacttatttcacattccaaggatgtggccgtggttccaaacacttatgtggacttaagacagggggacactattctttaccaggaacaacaccaacaaaaaacaacgggttggttcggatgtgttgattgagcaagccagggagattacaaatactatacctgtgccccttaagggggctgggggcgcgtgccccaaaaggacctctggatctttcaaaaacccttttttattgccaacaagcagaattgcgaactaactcttaacttaatggccccaggattctggaggggctgaattaccggggcaaaggataacactcataagccgtgaatcgattctataatttggcattaaactttttccccttaaaacctgtcttgtgtgtcaccaagaaaaactttaaacgtgatttggaggggtgtacccaagtgtgcctattttttctctaacccaattcaggactgtgtctccccaacgtgttaatcactgcagtgccctgggaggggctctacaagaaagaattttaatttgtcgcctttggatagacaggacgaggggcgacttttgtacgagcccatagtggcgccttatgtggtgtctaaaaaaaaaaaaggcgcccgaaaatctggggaagatatctagtgcacgcactctgttttctctccttctttatacggctccccaaatagaaataatg

SEQ ID NO: 352696 - DNA, 5312 bp, Homo sapiens
tcgagcctggcggtagaatcttcccagtaggcggcgcgggagggaaaagaggattgaggggctaggccgggcggatcccgtcctcccccgatgtgagcagttttccgaaaccccgtcaggcgaaggctgcccagagaggtggagtcggtagcggggccgggaacatgaggcagtctctcctattcctgaccagcgtggttcctttcgtgctggcgccgcgacctccggatgacccgggcttcggcccccaccagagactcgagaagcttgattctttgctctcagactacgatattctctctttatctaatatccagcagcattcggtaagaaaaagagatctacagacttcaacacatgtagaaacactactaactttttcagctttgaaaaggcattttaaattatacctgacatcaagtactgaacgtttttcacaaaatttcaaggtcgtggtggtggatggtaaaaacgaaagcgagtacactgtaaaatggcaggacttcttcactggacacgtggttggtgagcctgactctagggttctagcccacataagagatgatgatgttataatcagaatcaacacagatggggccgaatataacatagagccactttggagatttgttaatgataccaaagacaaaagaatgttagtttataaatctgaagatatcaagaatgtttcacgtttgcagtctccaaaagtgtgtggttatttaaaagtggataatgaagagttgctcccaaaagggttagtagacagagaaccacctgaagagcttgttcatcgagtgaaaagaagagctgacccagatcccatgaagaacacgtgtaaattattggtggtagcagatcatcgcttctacagatacatgggcagaggggaagagagtacaactacaaattacttaatagagctaattgacagagttgatgacatctatcggaacacttcatgggataatgcaggttttaaaggctatggaatacagatagagcagattcgcattctcaagtctccacaagaggtaaaacctggtgaaaagcactacaacatggcaaaaagttacccaaatgaagaaaaggatgcttgggatgtgaagatgttgctagagcaatttagctttgatatagctgaggaagcatctaaagtttgcttggcacaccttttcacataccaagattttgatatgggaactcttggattagcttatgttggctctcccagagcaaacagccatggaggtgtttgtccaaaggcttattatagcccagttgggaagaaaaatatctatttgaatagtggtttgacgagcacaaagaattatggtaaaaccatccttacaaaggaagctgacctggttacaactcatgaattgggacataattttggagcagaacatgatccggatggtctagcagaatgtgccccgaatgaggaccagggagggaaatatgtcatgtatcccatagctgtgagtggcgatcacgagaacaataagatgttttcaaactgcagtaaacaatcaatctataagaccattgaaagtaaggcccaggagtgttttcaagaacgcagcaataaagtttgtgggaactcgagggtggatgaaggagaagagtgtgatcctggcatcatgtatctgaacaacgacacctgctgcaacagcgactgcacgttgaaggaaggtgtccagtgcagtgacaggaacagtccttgctgtaaaaactgtcagtttgagactgcccagaagaagtgccaggaggcgattaatgctacttgcaaaggcgtgtcctactgcacaggtaatagcagtgagtgcccgcctccaggaaatgctgaagatgacactgtttgcttggatcttggcaagtgtaaggatgggaaatgcatccctttctgcgagagggaacagcagctggagtcctgtgcatgtaatgaaactgacaactcctgcaaggtgtgctgcagggacctttctggccgctgtgtgccctatgtcgatgctgaacaaaagaacttatttttgaggaaaggaaagccctgtacagtaggattttgtgacatgaatggcaaatgtgagaaacgagtacaggatgtaattgaacgattttgggatttcattgaccagctgagcatcaatacttttggaaagtttttagcagacaacatcgttgggtctgtcctggttttctccttgatattttggattcctttcagcattcttgtccattgtgtggataagaaattggataaacagtatgaatctctgtctctgtttcaccccagtgtaagtataccatatgaaagaaacataatcttcgcctggtctgaggccctgttaggcaaagaccttcacctgacccagcaagagctttcactggctgatggaaggtcatgttgcagcaggaagggtctaggttggaatgtttacccttctgacaacagtgatggtgaacttcgattagttgcatggatggacatttaaagagctgtgctgtccccttcccaagccataaggagtgatttagccattcaacacttagttaatattttgagttcaatttctctcttgggatcttaccttgagaggtttgaatcctcttttgggtcttcaaatggtaagtaagttttcaggatgcttgaaagctagtaattactgtttttgccattaaaagtaatggcattaattacttttgcaccaacctagtattttttagtcacttaggttgagtgagcctcacctagcacttttttcttagcatcacagtgccaacagaataagaggctgtttgatgggtaagggtggagctgtgaggacctccgattcatcttttattcctatcaatcaattgaacccatgtctttgcagaacgtcgaaatgctgagcagcatggattctgcatcggttcgcattatcaaaccctttcctgcgccccagactccaggccgcctgcagcctgcccctgtgatcccttcggcgccagcagctccaaaactggaccaccagagaatggacaccatccaggaagaccccagcacagactcacatatggacgaggatgggtttgagaaggaccccttcccaaatagcagcacagctgccaagtcatttgaggatctcacggaccatccggtcaccagaagtgaaaaggctgcctcctttaaactgcagcgtcagaatcgtgttgacagcaaagaaacagagtgctaatttagttctcagctcttctgacttaagtgtgcaaaatatttttatagatttgacctacaatcaatcacagcttatattttgtgaagactgggaagtgacttagcagatgctggtcatgtgtttgaacttcctgcaggtaaacagttcttgtgtggtttggcccttctccttttgaaaaggtaaggtgaaggtgaatctagcttattttgaggctttcaggttttagtttttaaaatatcttttgacctgtggtgcaaaagcagaaaatacagctggattgggttatgaatatttacgtttttgtaaattaatcttttatattgataacagcactgactagggaaatgatcagtttttttttatacactgtaatgaaccgctgaatatgaagcatttggcatttatttgtgatgaaaagtggaatagttttttttttttttttttttttttgccttcaactaaaaacaaaggagataaatctagtatacattgtctctaaattgtgggtctatttctagttattacccagagtttttatgtagcagggaaaatatatatctaaatttagaaatcatttgggttaatatggctcttcataattctaagactaatgctctctagaaacctaaccacctaccttacagtgagggctatacatggtagccagttgaatttatggaatctaccaactgtttagggccctgatttgctgggcagtttttctgtattttataagtatcttcatgtatccctgttactgatagggatacatgctcttagaaaattcactattggctgggagtggtggctcatgcctgtaatcccagcacttggagaggctgaggttgcgccactacactccagcctgggtgacagagtgagactctgcctcaaaaaaaaaaaaaaaaaaaaaattcactatctacaaacctagaatatttaaaatacaaagattgcctgttttcaaacactattgaataagagggtgagatatttcttaacaacaacaacaacaaaaaaaaacaggttgttttgaatgtgatgagccagccaggagatagaatactacctgcccttagggttgggggctgtccccacaagacttgatacttcagaaaccctttttattgacccacaagcagatatttgaattacttcttactttattgctccaggattctggatgggctgcatttactgtgtgaaggataaaaatcattagcctggattctgatttctataaattgccattaaaagctttttttcccctaagaactgaaatgtgctcaccagccaaaacattttaacttgtaaattttgagggcagttaaccaaacctgtgactaatcatatctcctcctaccccccatttccaaggacatttgttactcagatacttgttatactaatacttgaacttgtaccttatggtatttgctatcttttaactagtcatgatattcttatactttagttacacttttggaatttgatacaaggttgagtggggtgtgtgggtgtatgtatgagtgaaacagttctcaaaagaatgtaagaaaaaccatttttataaaattgtgactttttaaaaacatagtctttgtcatttatagaattaacaagctgctcagggtatattttatagctgtagcactgatatctgcattaataaatactgtcgaaacacaatggacctaagtataaaacttccctgaaaaatcatctaatacttttattattaatatcagtggcaaaggtttaagcctgaggaaaaaagcgtacctctacgtattgacaactttgagttctgtagataacaagcagatttgggtctcctgtgattggctaatggtctccatctcccagcagacttaattcaggttttgcttctgctacatcccgccagtaaggaagcagcaaaggtagagaagagacctttttctctatcaaaggccagagatgcgagaacaaaaattcattcccctttggagacaaatgtagtccatctgataaataagatgagaagtcctggctgtcctgcatcagggtccacaggtcaagtacgtcagtcccacagtcttgggccacttg

SEQ ID NO: 352697 - DNA, 2879 bp, Homo sapiens
tttgtcttcttaagcatttactagtagtagcattccatattaatctgttgacacagctactccaggtaacatgttgaatattctgcaatctcttcctgtcagccagtatatgagggctatttctttaaaagcacttggtatggagagatggtgtggtgtaatacaggcagcacagacattctgctctcggtagtatgtctagccagcagctctggcatttgacacaatggtaatatcctaagagcatttcactttagatttgtgaagtacttggtcaagacattaactgtttggaattgttcacaggaaagtttttagcagacaacatcgttgggtctgtcctggttttctccttgatattttggattcctttcagcattcttgtccattgtgtggataagaaattggataaacagtatgaatctctgtctctgtttcaccccagtaacgtcgaaatgctgagcagcatggattctgcatcggttcgcattatcaaaccctttcctgcgccccagactccaggccgcctgcagcctgcccctgtgatcccttcggcgccagcagctccaaaactggaccaccagagaatggacaccatccaggaagaccccagcacagactcacatatggacgaggatgggtttgagaaggaccccttcccaaatagcagcacagctgccaagtcatttgaggatctcacggaccatccggtcaccagaagtgaaaaggctgcctcctttaaactgcagcgtcagaatcgtgttgacagcaaagaaacagagtgctaatttagttctcagctcttctgacttaagtgtgcaaaatatttttatagatttgacctacaatcaatcacagcttatattttgtgaagactgggaagtgacttagcagatgctggtcatgtgtttgaacttcctgcaggtaaacagttcttgtgtggtttggcccttctccttttgaaaaggtaaggtgaaggtgaatctagcttattttgaggctttcaggttttagtttttaaaatatcttttgacctgtggtgcaaaagcagaaaatacagctggattgggttatgaatatttacgtttttgtaaattaatcttttatattgataacagcactgactagggaaatgatcagtttttttttatacactgtaatgaaccgctgaatatgaagcatttggcatttatttgtgatgaaaagtggaatagttttttttttttttttttttttttgccttcaactaaaaacaaaggagataaatctagtatacattgtctctaaattgtgggtctatttctagttattacccagagtttttatgtagcagggaaaatatatatctaaatttagaaatcatttgggttaatatggctcttcataattctaagactaatgctctctagaaacctaaccacctaccttacagtgagggctatacatggtagccagttgaatttatggaatctaccaactgtttagggccctgatttgctgggcagtttttctgtattttataagtatcttcatgtatccctgttactgatagggatacatgctcttagaaaattcactattggctgggagtggtggctcatgcctgtaatcccagcacttggagaggctgaggttgcgccactacactccagcctgggtgacagagtgagactctgcctcaaaaaaaaaaaaaaaaaaaaaattcactatctacaaacctagaatatttaaaatacaaagattgcctgttttcaaacactattgaataagagggtgagatatttcttaacaacaacaacaacaaaaaaaaacaggttgttttgaatgtgatgagccagccaggagatagaatactacctgcccttagggttgggggctgtccccacaagacttgatacttcagaaaccctttttattgacccacaagcagatatttgaattacttcttactttattgctccaggattctggatgggctgcatttactgtgtgaaggataaaaatcattagcctggattctgatttctataaattgccattaaaagctttttttcccctaagaactgaaatgtgctcaccagccaaaacattttaacttgtaaattttgagggcagttaaccaaacctgtgactaatcatatctcctcctaccccccatttccaaggacatttgttactcagatacttgttatactaatacttgaacttgtaccttatggtatttgctatcttttaactagtcatgatattcttatactttagttacacttttggaatttgatacaaggttgagtggggtgtgtgggtgtatgtatgagtgaaacagttctcaaaagaatgtaagaaaaaccatttttataaaattgtgactttttaaaaacatagtctttgtcatttatagaattaacaagctgctcagggtatattttatagctgtagcactgatatctgcattaataaatactgtcgaaacacaatggacctaagtataaaacttccctgaaaaatcatctaatacttttattattaatatcagtggcaaaggtttaagcctgaggaaaaaagcgtacctctacgtattgacaactttgagttctgtagataacaagcagatttgggtctcctgtgattggctaatggtctccatctcccagcagacttaattcaggttttgcttctgctacatcccgccagtaaggaagcagcaaaggtagagaagagacctttttctctatcaaaggccagagatgcgagaacaaaaattcattcccctttggagacaaatgtagtccatctgataaataagatgagaagtcctggctgtcctgcatcagggtccacaggtcaagtacgtcagtcccacagtcttgggccacttg

SEQ ID NO: 352698 - DNA, 486 bp, Homo sapiens
gaggccgaggtgagtggatcacgaggtcaggaattcgaggccagcctggccaacatggtgaaacctctactaaaaatacaaaatttagtacaaaatttagcacaaaatacaaaaattagtcaggcatggtggtgggtgccagctacttgggaagctgagacaggagaatcatttgaacccgggaggcagacgttgcagtgagccaagatcatgccactgcactccagcctgggcaacaaagagcgaaatttcgtctcaaaaaaaaaaaaaaaaaaagaaaagaaaagtgaatatcgattattctggtcattattgtttggagctctgattcctggagattgaggaaatgtttaaagtatctgccaagtgagctaagcactcctaggctcttatctatattcagggggcagatggtactctactgtcttcaagaagcttacagactagaggtgctagtctgggctatagtcattggctgttgggaat

SEQ ID NO: 352699 - DNA, 1539 bp, Homo sapiens
ctttgcgctgcgcgcctgcgcccgcgccggcttccagcgggtgtcggacctgagagctggaggggcgtgcgcgcgccctcgctctgttgcgcgcgcggtgtcaccttgggcgcgagcggggccgcgcgcgcacgggacccggagccgagggccattgagtggcgatggcggcgacggcgagtgccggggccggcgggatagacgggaagccccgtacctcccctaagtccgtcaagttcctgtttgggggcctggccgggatgggagctacagtttttgtccagcccctggacctggtgaagaaccggatgcagttgagcggggaaggggccaagactcgagagtacaaaaccagcttccatgccctcaccagtatcctgaaggcagaaggcctgaggggcatttacactgggctgtcggctggcctgctgcgtcaggccacctacaccactacccgccttggcatctataccgtgctgtttgagcgcctgactggggctgatggtactccccctggctttctgctgaaggctgtgattggcatgaccgcaggtgccactggtgcctttgtgggaacaccagccgaagtggctcttatccgcatgactgccgatggccggcttccagctgaccagcgccgtggctacaaaaatgtgtttaacgccctgattcgaatcacccgggaagagggtgtcctcacactgtggcggggctgcatccctaccatggctcgggccgtcgtcgtcaatgctgcccagctcgcctcctactcccaatccaagcagttcttactggactcaggctacttctctgacaacatcttgtgccacttctgtgccagcatgatcagcggtcttgtcaccactgctgcctccatgcctgtggacattgccaagacccgaatccagaacatgcggatgattgatgggaagccggaatacaagaacgggctggacgtgctgttcaaagttgtccgctacgagggcttcttcagcctgtggaagggcttcacgccgtactatgcccgcctgggcccccacaccgtcctcaccttcatcttcttggagcagatgaacaaggcctacaagcgtctcttcctcagtggctgaagcggccgggggctcccactcgcctgctgcgcctatagccactgcgccctgggggcctgggctctgctgccctggacccctctatttatttcccttccacagtgtggtttcttcctctgcggtaaaggacttggtctgttctaccccctgctccagcttgccctgctcgtcctgatcctgtgatttctctgtccttggctattcttgcagggagctggaaaacttcctgaggatttctggcctccccctgggttttagtttcagggcacacaggacagcagaagatcccctttgtcagtggggaaaccaaggcagagctgaggggacagggaggagcagaagccatcaagatggtcaaagggcctgcagagggagatgtggcccttcctccccctcattgaggacttaataaattggattgatgacacca

SEQ ID NO: 352700 - DNA, 1701 bp, Homo sapiens
ctttgcgctgcgcgcctgcgcccgcgccggcttccagcgggtgtcggacctgagagctggaggggcgtgcgcgcgccctcgctctgttgcgcgcgcggtgtcaccttgggcgcgagcggggccgcgcgcgcacgggacccggagccgagggccattgagtggcgatggcggcgacggcgagtgccggggccggcgggatagacgggaagccccgtacctcccctaagtccgtcaagttcctgtttgggggcctggccgggatgggagctacagtttttgtccagcccctggacctggtgaagaaccggatgcagttgagcggggaaggggccaagactcgagagtacaaaaccagcttccatgccctcaccagtatcctgaaggcagaaggcctgaggggcatttacactgggctgtcggctggcctgctgcgtcaggccacctacaccactacccgccttggcatctataccgtgctgtttgagcgcctgactggggctgatggtactccccctggctttctgctgaaggctgtgattggcatgaccgcaggtgccactggtgcctttgtgggaacaccagccgaagtggctcttatccgcatgactgccgatggccggcttccagctgaccagcgccgtggctacaaaaatgtgtttaacgccctgattcgaatcacccgggaagagggtgtcctcacactgtggcggggctgcatccctaccatggctcgggccgtcgtcgtcaatgctgcccagctcgcctcctactcccaatccaagcagttcttactggactcaggctacttctctgacaacatcttgtgccacttctgtgccagcatgatcagcggtcttgtcaccactgctgcctccatgcctgtggacattgccaagacccgaatccagaacatgcggatgattgatgggaagccggaatacaagaacgggctggacgtgctgttcaaagttgtccgctacgagggcttcttcagcctgtggaagggcttcacgccgtactatgcccgcctgggcccccacaccgtcctcaccttcatcttcttggagcagatgaacaaggcctacaagcgtctcttcctcagtggctgaagcggccgggggctcccactcgcctgctgcgcctatagccactgcgccctgggggcctgggctctgctgccctggacccctctatttatttcccttccacagtgtggtttcttcctctgcggtaaaggacttggtctgttctaccccctgctccagcttgccctgctcgtcctgatcctgtgatttctctgtccttggctattcttgcagggagctggaaaacttcctgaggatttctggcctccccctgggttttagtttcagggcacacaggacagcagaagatcccctttgtcagtggggaaaccaaggcagagctgaggggacagggaggagcagaagccatcaagatggtcaaagggcctgcagagggagatgtggcccttcctccccctcattgaggacttaataaattggattgatgacaccaaaaaaaaaaagacaagaaaacaacgtgggggcgcgcccgcccgagaaatttaacaccctctgtgtgcgcgggccagagttatagaaatgccacacggtccgaagacccggccggtagcggggtcccaaaaaccggggcggggtgaaacacgggtgggccgca

SEQ ID NO: 352701 - DNA, 1551 bp, Homo sapiens
ctttgcgctgcgcgcctgcgcccgcgccggcttccagcgggtgtcggacctgagagctggaggggcgtgcgcgcgccctcgctctgttgcgcgcgcggtgtcaccttgggcgcgagcggggccgcgcgcgcacgggacccggagccgagggccattgagtggcgatggcggcgacggcgagtgccggggccggcgggatagacgggaagccccgtacctcccctaagtccgtcaagttcctgtttgggggcctggccgggatgggagctacagtttttgtccagcccctggacctggtgaagaaccggatgcagttgagcggggaaggggccaagactcgagagtacaaaaccagcttccatgccctcaccagtatcctgaaggcagaaggcctgaggggcatttacactgggctgtcggctggcctgctgcgtcaggccacctacaccactacccgccttggcatctataccgtgctgtttgagcgcctgactggggctgatggtactccccctggctttctgctgaaggctgtgattggcatgaccgcaggtgccactggtgcctttgtgggaacaccagccgaagtggctcttatccgcatgactgccgatggccggcttccagctgaccagcgccgtggctacaaaaatgtgtttaacgccctgattcgaatcacccgggaagagggtgtcctcacactgtggcggggctgcatccctaccatggctcgggccgtcgtcgtcaatgctgcccagctcgcctcctactcccaatccaagcagttcttactggactcaggctacttctctgacaacatcttgtgccacttctgtgccagcatgatcagcggtcttgtcaccactgctgcctccatgcctgtggacattgccaagacccgaatccagaacatgcggatgattgatgggaagccggaatacaagaacgggctggacgtgctgttcaaagttgtccgctacgagggcttcttcagcctgtggaagggcttcacgccgtactatgcccgcctgggcccccacaccgtcctcaccttcatcttcttggagcagatgaacaaggcctacaagcgtctcttcctcagtggctgaagcggccgggggctcccactcgcctgctgcgcctatagccactgcgccctgggggcctgggctctgctgccctggacccctctatttatttcccttccacagtgtggtttcttcctctgcggtaaaggacttggtctgttctaccccctgctccagcttgccctgctcgtcctgatcctgtgatttctctgtccttggctattcttgcagggagctggaaaacttcctgaggatttctggcctccccctgggttttagtttcagggcacacaggacagcagaagatcccctttgtcagtggggaaaccaaggcagagctgaggggacagggaggagcagaagccatcaagatggtcaaagggcctgcagacctccccacgccctcccctcccctgctgcaggggctttggagagtggcaataaagagattcacacacaagca

SEQ ID NO: 352702 - DNA, 1285 bp, Homo sapiens
ctttgcgctgcgcgcctgcgcccgcgccggcttccagcgggtgtcggacctgagagctggaggggcgtgcgcgcgccctcgctctgttgcgcgcgcggtgtcaccttgggcgcgagcggggccgcgcgcgcacgggacccggagccgagggccattgagtggcgatggcggcgacggcgagtgccggggccggcgggatagacgggaagccccgtacctcccctaagtccgtcaagttcctgtttgggggcctggccgggatgggagctacagtttttgtccagcccctggacctggtgaagaaccggatgcagttgagcggggaaggggccaagactcgagagtacaaaaccagcttccatgccctcaccagtatcctgaaggcagaaggcctgaggggcatttacactgggctgtcggctggcctgctgcgtcaggccacctacaccactacccgccttggcatctataccgtgctgtttgagcgcctgactggggctgatggtactccccctggctttctgctgaaggctgtgattggcatgaccgcaggtgccactggtgcctttgtgggaacaccagccgaagtggctcttatccgcatgactgccgatggccggcttccagctgaccagcgccgtggctacaaaaatgtgtttaacgccctgattcgaatcacccgggaagagggtgtcctcacactgtggcggggctgcatccctaccatggctcgggccgtcgtcgtcaatgctgcccagctcgcctcctactcccaatccaagcagttcttactggactcaggctacttctctgacaacatcttgtgccacttctgtgccagcatgatcagcggtcttgtcaccactgctgcctccatgcctgtggacattgccaagacccgaatccagaacatgcggatgattgatgggaagccggaatacaagaacgggctggacgtgctgttcaaagttgtccgctacgagggcttcttcagcctgtggaagggcttcacgccgtactatgcccgcctgggcccccacaccgtcctcaccttcatcttcttggagcagatgaacaaggcctacaagcgtctcttcctcagtggctgaagcgtttcagggcacacaggacagcagaagatcccctttgtcagtggggaaaccaaggcagagctgaggggacagggaggagcagaagccatcaagatggtcaaagggcctgcagagggagatgtggcccttcctccccctcattgaggacttaataaattggattgatgacacca

SEQ ID NO: 352703 - DNA, 2142 bp, Homo sapiens
ctttgcgctgcgcgcctgcgcccgcgccggcttccagcgggtgtcggacctgagagctggaggggcgtgcgcgcgccctcgctctgttgcgcgcgcggtgtcaccttgggcgcgagcggggccgcgcgcgcacgggacccggagccgagggccattgagtggcgatggcggcgacggcgagtgccggggccggcgggatagacgggaagccccgtacctcccctaagtccgtcaagttcctgtttgggggcctggccgggtaagctcaggccccagggatgggaaaagaggaggaagggaagggcaaaaggaaccgggcccggttcatctctgggtctgttgcagtgaactgtgccggcacggggtcagcgcgatctccagcgtattgcgagttccccgatgggctgctagggccccattgcaggacccttatggactgcatgcagggtcgttgcacaacccccgccgggccagctgagtttcccagcgcattgctaagctcggccgggcggcagggggttccaggccattaaatggctcctgcaggactacctggagtcctaaatcttggatgccccttcctcccctccctgtgtcggactgcgtgcagccccaggtcactgcttgactgtcatgaagctgcttggagcactttcattgcatggcccctactggacaactagacttttcagacccgttgcacttggtgtacatatagactcttatacacatgctcaccagcatcctgattcttgaatcgcatggcaggccctgacctttgtaacctcttgctgccaggctccagtgggcactggtagatctggaatgcctggcccttcactccacctctgtcttcccccaggatgggagctacagtttttgtccagcccctggacctggtgaagaaccggatgcagttgagcggggaaggggccaagactcgagagtacaaaaccagcttccatgccctcaccagtatcctgaaggcagaaggcctgaggggcatttacactgggctgtcggctggcctgctgcgtcaggccacctacaccactacccgccttggcatctataccgtgctgtttgagcgcctgactggggctgatggtactccccctggctttctgctgaaggctgtgattggcatgaccgcaggtgccactggtgcctttgtgggaacaccagccgaagtggctcttatccgcatgactgccgatggccggcttccagctgaccagcgccgtggctacaaaaatgtgtttaacgccctgattcgaatcacccgggaagagggtgtcctcacactgtggcggggctgcatccctaccatggctcgggccgtcgtcgtcaatgctgcccagctcgcctcctactcccaatccaagcagttcttactggactcaggctacttctctgacaacatcttgtgccacttctgtgccagcatgatcagcggtcttgtcaccactgctgcctccatgcctgtggacattgccaagacccgaatccagaacatgcggatgattgatgggaagccggaatacaagaacgggctggacgtgctgttcaaagttgtccgctacgagggcttcttcagcctgtggaagggcttcacgccgtactatgcccgcctgggcccccacaccgtcctcaccttcatcttcttggagcagatgaacaaggcctacaagcgtctcttcctcagtggctgaagcggccgggggctcccactcgcctgctgcgcctatagccactgcgccctgggggcctgggctctgctgccctggacccctctatttatttcccttccacagtgtggtttcttcctctgcggtaaaggacttggtctgttctaccccctgctccagcttgccctgctcgtcctgatcctgtgatttctctgtccttggctattcttgcagggagctggaaaacttcctgaggatttctggcctccccctgggttttagtttcagggcacacaggacagcagaagatcccctttgtcagtggggaaaccaaggcagagctgaggggacagggaggagcagaagccatcaagatggtcaaagggcctgcagagggagatgtggcccttcctccccctcattgaggacttaataaattggattgatgacacca

SEQ ID NO: 352704 - DNA, 1623 bp, Homo sapiens
ctttgcgctgcgcgcctgcgcccgcgccggcttccagcgggtgtcggacctgagagctggaggggcgtgcgcgcgccctcgctctgttgcgcgcgcggtgtcaccttgggcgcgagcggggccgcgcgcgcacgggacccggagccgagggccattgagtggcgatggcggcgacggcgagtgccggggccggcgggatagacgggaagccccgtacctcccctaagtccgtcaagttcctgtttgggggcctggccgggatgggagctacagtttttgtccagcccctggacctggtgaagaaccggatgcagttgagcggggaaggggccaagactcgagagtacaaaaccagcttccatgccctcaccagtatcctgaaggcagaaggcctgaggggcatttacactgggtattggggcctcaggatggagggtagactgtgggttggcagctctagaccttggcctgatatgctgacccctctgctcctcaggctgtcggctggcctgctgcgtcaggccacctacaccactacccgccttggcatctataccgtgctgtttgagcgcctgactggggctgatggtactccccctggctttctgctgaaggctgtgattggcatgaccgcaggtgccactggtgcctttgtgggaacaccagccgaagtggctcttatccgcatgactgccgatggccggcttccagctgaccagcgccgtggctacaaaaatgtgtttaacgccctgattcgaatcacccgggaagagggtgtcctcacactgtggcggggctgcatccctaccatggctcgggccgtcgtcgtcaatgctgcccagctcgcctcctactcccaatccaagcagttcttactggactcaggctacttctctgacaacatcttgtgccacttctgtgccagcatgatcagcggtcttgtcaccactgctgcctccatgcctgtggacattgccaagacccgaatccagaacatgcggatgattgatgggaagccggaatacaagaacgggctggacgtgctgttcaaagttgtccgctacgagggcttcttcagcctgtggaagggcttcacgccgtactatgcccgcctgggcccccacaccgtcctcaccttcatcttcttggagcagatgaacaaggcctacaagcgtctcttcctcagtggctgaagcggccgggggctcccactcgcctgctgcgcctatagccactgcgccctgggggcctgggctctgctgccctggacccctctatttatttcccttccacagtgtggtttcttcctctgcggtaaaggacttggtctgttctaccccctgctccagcttgccctgctcgtcctgatcctgtgatttctctgtccttggctattcttgcagggagctggaaaacttcctgaggatttctggcctccccctgggttttagtttcagggcacacaggacagcagaagatcccctttgtcagtggggaaaccaaggcagagctgaggggacagggaggagcagaagccatcaagatggtcaaagggcctgcagagggagatgtggcccttcctccccctcattgaggacttaataaattggattgatgacacca

SEQ ID NO: 352705 - DNA, 1386 bp, Homo sapiens
ctttgcgctgcgcgcctgcgcccgcgccggcttccagcgggtgtcggacctgagagctggaggggcgtgcgcgcgccctcgctctgttgcgcgcgcggtgtcaccttgggcgcgagcggggccgcgcgcgcacgggacccggagccgagggccattgagtggcgatggcggcgacggcgagtgccggggccggcgggatagacgggaagccccgtacctcccctaagtccgtcaagttcctgtttgggggcctggccgggctgtcggctggcctgctgcgtcaggccacctacaccactacccgccttggcatctataccgtgctgtttgagcgcctgactggggctgatggtactccccctggctttctgctgaaggctgtgattggcatgaccgcaggtgccactggtgcctttgtgggaacaccagccgaagtggctcttatccgcatgactgccgatggccggcttccagctgaccagcgccgtggctacaaaaatgtgtttaacgccctgattcgaatcacccgggaagagggtgtcctcacactgtggcggggctgcatccctaccatggctcgggccgtcgtcgtcaatgctgcccagctcgcctcctactcccaatccaagcagttcttactggactcaggctacttctctgacaacatcttgtgccacttctgtgccagcatgatcagcggtcttgtcaccactgctgcctccatgcctgtggacattgccaagacccgaatccagaacatgcggatgattgatgggaagccggaatacaagaacgggctggacgtgctgttcaaagttgtccgctacgagggcttcttcagcctgtggaagggcttcacgccgtactatgcccgcctgggcccccacaccgtcctcaccttcatcttcttggagcagatgaacaaggcctacaagcgtctcttcctcagtggctgaagcggccgggggctcccactcgcctgctgcgcctatagccactgcgccctgggggcctgggctctgctgccctggacccctctatttatttcccttccacagtgtggtttcttcctctgcggtaaaggacttggtctgttctaccccctgctccagcttgccctgctcgtcctgatcctgtgatttctctgtccttggctattcttgcagggagctggaaaacttcctgaggatttctggcctccccctgggttttagtttcagggcacacaggacagcagaagatcccctttgtcagtggggaaaccaaggcagagctgaggggacagggaggagcagaagccatcaagatggtcaaagggcctgcagagggagatgtggcccttcctccccctcattgaggacttaataaattggattgatgacacca

SEQ ID NO: 352706 - DNA, 1247 bp, Homo sapiens
ctttgcgctgcgcgcctgcgcccgcgccggcttccagcgggtgtcggacctgagagctggaggggcgtgcgcgcgccctcgctctgttgcgcgcgcggtgtcaccttgggcgcgagcggggccgcgcgcgcacgggacccggagccgagggccattgagtggcgatggcggcgacggcgagtgccggggccggcgggatagacgggaagccccgtacctcccctaagtccgtcaagttcctgtttgggggcctggccgggatgggagctacagtttttgtccagcccctggacctggtgaagaaccggatgcagttgagcggggaaggggccaagactcgagagtacaaaaccagcttccatgccctcaccagtatcctgaaggcagaaggcctgaggggcatttacactgggctgtcggctggcctgctgcgtcaggccacctacaccactacccgccttggcatctataccgtgctgtttgagcgcctgactggggctgatggtactccccctggctttctgctgaaggctgtgattggcatgaccgcaggtgccactggtgcctttgtgggaacaccagccgaagtggctcttatccgcatgactgccgatggccggcttccagctgaccagcgccgtggctacaaaaatgtgtttaacgccctgattcgaatcacccgggaagagggtgtcctcacactgtggcggggctgcatccctaccatggctcgggccgtcgtcgtcaatgctgcccagctcgcctcctactcccaatccaagcagttcttactggactcaggctacttctctgacaacatcttgtgccacttctgtgccagcatgatcagcggtcttgtcaccactgctgcctccatgcctgtggacattgccaagacccgaatccagaacatgcggatgattgatgagagccggcgtcagacgggctggccgtctgtcaagtgtgcgtacgaggcttcttcgcctgtggagggcttcacccgtctatgccgctgtgccgcaaatcgtctcaactcatcctcgtgggcgattgacaagcctaaagcgcctttcccgggtgagcgccgggctcctgcgtggcttagctggccgtggctggtctgtgctgcctcatatctcacgggttctctggaagtgggttcccttcagcctcgcggctgatcgcgggctggggaccgttcccctttgcagcaaacctgcgcggcacagcgggcccccacgtcttta

SEQ ID NO: 352707 - DNA, 1072 bp, Homo sapiens
ctttgcgctgcgcgcctgcgcccgcgccggcttccagcgggtgtcggacctgagagctggaggggcgtgcgcgcgccctcgctctgttgcgcgcgcggtgtcaccttgggcgcgagcggggccgcgcgcgcacgggacccggagccgagggccattgagtggcgatggcggcgacggcgagtgccggggccggcgggatagacgggaagccccgtacctcccctaagtccgtcaagttcctgtttgggggcctggccgggatgggagctacagtttttgtccagcccctggacctggtgaagaaccggatgcagttgagcggggaaggggccaagactcgagagtacaaaaccagcttccatgccctcaccagtatcctgaaggcagaaggcctgaggggcatttacactgggctgtcggctggcctgctgcgtcaggccacctacaccactacccgccttggcatctataccgtgctgtttgagcgcctgactggggctgatggtactccccctggctttctgctgaaggctgtgattggcatgaccgcaggtgccactggtgcctttgtgggaacaccagccgaagtggctcttatccgcatgactgccgatggccggcttccagctgaccagcgccgtggctacaaaaatgtgtttaacgccctgattcgaatcacccgggaagagggtgtcctcacactgtggcggggctgcatccctaccatggctcgggccgtcgtcgtcaatgctgcccagctcgcctcctactcccaatccaagcagttcttactggactcaggtgagatccagagctgggcccttagttcccagcctggcctgagccacctctgagctgactgccacccccgcctcacctcccccaggctacttctctgacaacatcttgtgccacttctgtgccagcatgatcagcggtcttgtcaccactgctgcctccatgcctgtggacattgccaagacccgcaatccaggaagcaagtgacggcatgattgatgggaagccggaatacaagaacgggctggacgtggcgtctgtccgggtaccgagc

SEQ ID NO: 352708 - DNA, 1910 bp, Homo sapiens
ctttgcgctgcgcgcctgcgcccgcgccggcttccagcgggtgtcggacctgagagctggaggggcgtgcgcgcgccctcgctctgttgcgcgcgcggtgtcaccttgggcgcgagcggggccgcgcgcgcacgggacccggagccgagggccattgagtggcgatggcggcgacggcgagtgccggggccggcgggatagacgggaagccccgtacctcccctaagtccgtcaagttcctgtttgggggcctggccgggatgggagctacagtttttgtccagcccctggacctggtgaagaaccggatgcagttgagcggggaaggggccaagactcgagagtacaaaaccagcttccatgccctcaccagtatcctgaaggcagaaggcctgaggggcatttacactgggctgtcggctggcctgctgcgtcaggccacctacaccactacccgccttggcatctataccgtgctgtttgagcgcctgactggggctgatggtactccccctggctttctgctgaaggctgtgattggcatgaccgcaggtgccactggtgcctttgtgggaacaccagccgaagtggctcttatccgcatgactgccgatggccggcttccagctgaccagcgccgtggctacaaaaatgtgtttaacgccctgattcgaatcacccgggaagagggtgtcctcacactgtggcggggctgcatccctaccatggctcgggccgtcgtcgtcaatgctgcccagctcgcctcctactcccaatccaagcagttcttactggactcaggctacttctctgacaacatcttgtgccacttctgtgccagcatgatcagcggtcttgtcaccactgctgcctccatgcctgtggacattgccaagacccgaatccagaacatgcggatgattgatgggaagccggaatacaagaacgggctggacgtgctgttcaaagttgtccgctacgagggcttcttcagcctgtggaagggcttcacgccgtactatgcccgcctgggcccccacaccgtcctcaccttcatcttcttggagcagatgaacaaggcctacaagcgtctcttcctcagtggctgaagcggccgggggctcccactcgcctgctgcgcctatagccactgcgccctgggggcctgggctctgctgccctggacccctctatttatttcccttccacagtgtggtttcttcctctgcggtaaaggacttggtctgttctaccccctgctccagcttgccctgctcgtcctgatcctgtgatttctctgtccttggctattcttgcagggagctggaaaacttcctgaggatttctggcctccccctgggttttagtttcagggcacacaggacagcagaagatcccctttgtcagtggggaaaccaaggcagagctgaggggacagggaggagcagaagccatcaagatggtcaaagggcctgcagagggagatgtggcccttcctccccctcattgaggacttaataaattggattgatgacaccagccccaaatctggagagtctggggggtggctaggagaggggaggagactggacaaagaagctggagaataggaactggagtttttaagaaaaattgttaaagaaaaagcagccgctggttttttgcaaatgctgtataaatctgtcatgccacagcagctgacagggccagaaaaactcaaatcccaggcccggtgtgtttcctccagccactcgcccaagaatgccaccgatgcccagatcatctcacataatccccaggaaaagcccctcggtctgatgactgcttctgcagcctaaagagggaggaaataaagagacttagagaggaagtcagaccactgtgggctggaggcagtgcaggtggaaggc

SEQ ID NO: 352709 - DNA, 1489 bp, Homo sapiens
ctttgcgctgcgcgcctgcgcccgcgccggcttccagcgggtgtcggacctgagagctggaggggcgtgcgcgcgccctcgctctgttgcgcgcgcggtgtcaccttgggcgcgagcggggccgcgcgcgcacgggacccggagccgagggccattgagtggcgatggcggcgacggcgagtgccggggccggcgggatagacgggaagccccgtacctcccctaagtccgtcaagttcctgtttgggggcctggccgggatgggagctacagtttttgtccagcccctggacctggtgaagaaccggatgcagttgagcggggaaggggccaagactcgagagtacaaaaccagcttccatgccctcaccagtatcctgaaggcagaaggcctgaggggcatttacactgggctgtcggctggcctgctgcgtcaggccacctacaccactacccgccttggcatctataccgtgctgtttgagcgcctgactggggctgatggtactccccctggctttctgctgaaggctgtgattggcatgaccgcaggtgccactggtgcctttgtgggaacaccagccgaagtggctcttatccgcatgactgccgatggccggcttccagctgaccagcgccgtggctacaaaaatgtgtttaacgccctgattcgaatcacccgggaagagggtgtcctcacactgtggcggggctgcatccctaccatggctcgggccgtcgtcgtcaatgctgcccagctcgcctcctactcccaatccaagcagttcttactggactcaggctacttctctgacaacatcttgtgccacttctgtgccagcatgatcagcggtcttgtcaccactgctgcctccatgcctgtggacattgccaagacccgaatccagaacatgcggatgattgatgggaagccggaatacaagaacgggctggacgtgctgttcaaagttgtccgctacgagggcttcttcagcctgtggaagggcttcacgccgtactatgcccgcctgggcccccacaccgtcctcaccttcatcttcttggagcagatgaacaaggcctacaagcgtctcttcctcagtggctgaagcggccgggggctcccactcgcctgctgcgcctatagccactgcgccctgggggcctgggctctgctgccctggacccctctatttatttcccttccacagtgtggtttcttcctctgcggtaaaggacttggtctgttctaccccctgctccagcttgccctgctcgtcctgatcctgtgatttctggcctccccctgggttttagtttcagggcacacaggacagcagaagatcccctttgtcagtggggaaaccaaggcagagctgaggggacagggaggagcagaagccatcaagatggtcaaagggcctgcagagggagatgtggcccttcctccccctcattgaggacttaataaattggattgatgacacca

SEQ ID NO: 352710 - DNA, 1169 bp, Homo sapiens
ctttgcgctgcgcgcctgcgcccgcgccggcttccagcgggtgtcggacctgagagctggaggggcgtgcgcgcgccctcgctctgttgcgcgcgcggtgtcaccttgggcgcgagcggggccgcgcgcgcacgggacccggagccgagggccattgagtggcgatggcggcgacggcgagtgccggggccggcgggatagacgggaagccccgtacctcccctaagtccgtcaagttcctgtttgggggcctggccgggatgggagctacagtttttgtccagcccctggacctggtgaagaaccggatgcagttgagcggggaaggggccaagactcgagagtacaaaaccagcttccatgccctcaccagtatcctgaaggcagaaggcctgaggggcatttacactgggctgtcggctggcctgctgcgtcaggccacctacaccactacccgccttggcatctataccgtgctgtttgagcgcctgactggggctgatggtactccccctggctttctgctgaaggctgtgattggcatgaccgcaggtgccactggtgcctttgtgggaacaccagccgaagtggctcttatccgcatgactgccgatggccggcttccagctgaccagcgccgtggctacaaaaatgtgtttaacgccctgattcgaatcacccgggaagagggtgtcctcacactgtggcggggctgcatccctaccatggctcgggccgtcgtcgtcaatgctgcccagctcgcctcctactcccaatccaagcagttcttactggactcaggctacttctctgacaacatcttgtgccacttctgtgccagcatgatcagcggtcttgtcaccactgctgcctccatgcctgtggacattgccaagacccgaatccagaacatgcggatgattgatgggaagccggaatacaagaacgggctggacgtgctgttcaaagttgtccgctacgagggcttcttcagcctgtggaagggcttcacgccgtactatgcccgcctgggcccccacaccgtcctcaccttcatcttcttggagcagatgaacaaggcctacaagcgtctcttcctcagtggctgaagcgactagatcacgtgtgactcgggcgcgagtctgctcacagctgccacgctgggaacc

SEQ ID NO: 352711 - DNA, 1730 bp, Homo sapiens
ccctggaagcattcttcacttctttggttccccgcccactgcggtccactcaaggtgttgtgtcttgtgcctacttacctgggtccatcccagagtgccctctctcagcatgccaagcagacatacagactggacgacaggcaactgacagggtatacagccagtccttacccagaggagaacacctgtgtaggaaataaatagagggtcaggcacagaaccaggccacagggcgcattgctataaggcgcacaggcgaattgggaaccccgccgctttcaaccactgaggaagagacgcttgtagccttgttcatctgctccaagaagatgaaggtgaggacggttggggccaagcgggcatagtacggctgaagccctttcacatgtggtttcttcctctgcggtaaaggacttggtctgtcaagttcctgtttgggggcctggccgggatgggagctacagtttttgtccagcccctggacctggtgaagaaccggatgcagttgagcggggaaggggccaagactcgagagtacaaaaccagcttccatgccctcaccagtatcctgaaggcagaaggcctgaggggcatttacactgggctgtcggctggcctgctgcgtcaggccacctacaccactacccgccttggcatctataccgtgctgtttgagcgcctgactggggctgatggtactccccctggctttctgctgaaggctgtgattggcatgaccgcaggtgccactggtgcctttgtgggaacaccagccgaagtggctcttatccgcatgactgccgatggccggcttccagctgaccagcgccgtggctacaaaaatgtgtttaacgccctgattcgaatcacccgggaagagggtgtcctcacactgtggcggggctgcatccctaccatggctcgggccgtcgtcgtcaatgctgcccagctcgcctcctactcccaatccaagcagttcttactggactcaggctacttctctgacaacatcttgtgccacttctgtgccagcatgatcagcggtcttgtcaccactgctgcctccatgcctgtggacattgccaagacccgaatccagaacatgcggatgattgatgggaagccggaatacaagaacgggctggacgtgctgttcaaagttgtccgctacgagggcttcttcagcctgtggaagggcttcacgccgtactatgcccgcctgggcccccacaccgtcctcaccttcatcttcttggagcagatgaacaaggcctacaagcgtctcttcctcagtggctgaagcggccgggggctcccactcgcctgctgcgcctatagccactgcgccctgggggcctgggctctgctgccctggacccctctatttatttcccttccacagtgtggtttcttcctctgcggtaaaggacttggtctgttctaccccctgctccagcttgccctgctcgtcctgatcctgtgatttctctgtccttggctattcttgcagggagctggaaaacttcctgaggatttctggcctccccctgggttttagtttcagggcacacaggacagcagaagatcccctttgtcagtggggaaaccaaggcagagctgaggggacagggaggagcagaagccatcaagatggtcaaagggcctgcagagggagatgtggcccttcctccccctcattgaggacttaataaattggattgatgacacca

SEQ ID NO: 352712 - DNA, 1236 bp, Homo sapiens
ggacgcgtgggtggtttgtactctcgagtcttggccccttccccgccttcaggatactggtgagggcatggaagctgaaggcagaaggcctgaggggcatttacactgggctgtcggctggcctgctgcgtcaggccacctacaccactacccgccttggcatctataccgtgctgtttgagcgcctgactggggctgatggtactccccctggctttctgctgaaggctgtgattggcatgaccgcaggtgccactggtgcctttgtgggaacaccagccgaagtggctcttatccgcatgactgccgatggccggcttccagctgaccagcgccgtggctacaaaaatgtgtttaacgccctgattcgaatcacccgggaagagggtgtcctcacactgtggcggggctgcatccctaccatggctcgggccgtcgtcgtcaatgctgcccagctcgcctcctactcccaatccaagcagttcttactggactcaggctacttctctgacaacatcttgtgccacttctgtgccagcatgatcagcggtcttgtcaccactgctgcctccatgcctgtggacattgccaagacccgaatccagaacatgcggatgattgatgggaagccggaatacaagaacgggctggacgtgctgttcaaagttgtccgctacgagggcttcttcagcctgtggaagggcttcacgccgtactatgcccgcctgggcccccacaccgtcctcaccttcatcttcttggagcagatgaacaaggcctacaagcgtctcttcctcagtggctgaagcggccgggggctcccactcgcctgctgcgcctatagccactgcgccctgggggcctgggctctgctgccctggacccctctatttatttcccttccacagtgtggtttcttcctctgcggtaaaggacttggtctgttctaccccctgctccagcttgccctgctcgtcctgatcctgtgatttctctgtccttggctattcttgcagggagctggaaaacttcctgaggatttctggcctccccctgggttttagtttcagggcacacaggacagcagaagatcccctttgtcagtggggaaaccaaggcagagctgaggggacagggaggagcagaagccatcaagatggtcaaagggcctgcagagggagatgtggcccttcctccccctcattgaggacttaataaattggattgatgacacca

SEQ ID NO: 352713 - DNA, 1048 bp, Homo sapiens
ctttgcgctgcgcgcctgcgcccgcgccggcttccagcgggtgtcggacctgagagctggaggggcgtgcgcgcgccctcgctctgttgcgcgcgcggtgtcaccttgggcgcgagcggggccgcgcgcgcacgggacccggagccgagggccattgagtggcgatggcggcgacggcgagtgccggggccggcgggatagacgggaagccccgtacctcccctaagtccgtcaagttcctgtttgggggcctggccgggatgggagctacagtttttgtccagcccctggacctggtgaagaaccggatgcagttgagcggggaaggggccaagactcgagagtacaaaaccagcttccatgccctcaccagtatcctgaaggcagaaggcctgaggggcatttacactgggctgtcggctggcctgctgcgtcaggccacctacaccactacccgccttggcatctataccgtgctgtttgagcgcctgactggggctgatggtactccccctggctttctgctgaaggctgtgattggcatgaccgcaggtgccactggtgcctttgtgggaacaccagccgaagtggctcttatccgcatgactgccgatggccggcttccagctgaccagcgccgtggctacaaaaatgtgtttaacgcccctgggggcctgggctctgctgccctggacccctctatttatttcccttccacagtgtggtttcttcctctgcggtaaaggacttggtctgttctaccccctgctccagcttgccctgctcgtcctgatcctgtgatttctctgtccttggctattcttgcagggagctggaaaacttcctgaggatttctggcctccccctgggttttagtttcagggcacacaggacagcagaagatcccctttgtcagtggggaaaccaaggcagagctgaggggacagggaggagcagaagccatcaagatggtcaaagggcctgcagagggagatgtggcccttcctccccctcattgaggacttaataaattggattgatgacacca

SEQ ID NO: 352714 - DNA, 955 bp, Homo sapiens
tgctccggagaagcggcgcctcctccccgccaggaccccgaggcggggggttcccgccttctcttctgagcgcctcttcccgctgcgcccgcatcagtctgggcctggcccagggtccccggtggagacgtgtttttttctccaaccaccgtgcccctctgtttaaaagcagccagtcaacctttgtgtcctttctccagaaggaaaagcatctcagctgttgtggaaaagggccccagcgtcctcttgtcaccgacagggcgattgcagtgcgttccggtcattttttccaggacactttctgtcttcatgacaggaacatcgagaagccaaggctagtggctgggttactgatggattactgatggattcttctcagcacttagtgacctttgaggatgtggctgtggactttacccaggaggagtggactttgttggatcaagcccagagagatctctacagagatgtgatgttggagaactacaagaatctcattatactagcagggtctgaattattcaaacgtagtctcatgtctggattggaacaaatggaagagctgaggacaggagtgacaggagttctgcaggaattggatttgcaactcaaaaccaaaggctccccactgctgcaagatatttctgcagaaagatcaccaaatggagtacaattggagagaagcaatactgcagagaaactgtatgactctaaccattctggaaaagtcttcaatgaacacccatttcttatgactcacatgataactcacattggagagaaaacttctgaggataatcagagtggaaaagccttaagaaagaactttcctcatagtttttacaagaaaagtcatgctgaggggaaaatgcctaagtgtgttaaacatgaaaaagccttcaaccagtttccaaatcttactaggcagaataaaactcacacacaagagaaattg

SEQ ID NO: 352715 - DNA, 712 bp, Homo sapiens
agacctgtgccagcatgccctgctaatttttgtatttttagtagagaggaagtttcaccacgttggccaggctggtcttgaactcctaacctcaagtgatctccctgccttggcttcccaaagtgctgaggtatgaggcatgagccattatacctgggcaacatttttgttattttaaaaatagttttagtgcatgtattggaaatgttatatgattagtttgctatttgtaaagttacacttgaccatctttagaatccccgaaggcaaaagtattggttccccattgaaggacatggtgttatgtcttgcatgggcctcttcttttgtgcatttttccctccagcagggtctgaattattcaaacgtagtctcatgtctggattggaacaaatggaagagctgaggacaggagtgacaggagttctgcagggagagaagcaatactgcagagaaactgtatgactctaaccattctggaaaagtcttcaatgaacacccatttcttatgactcacatgataactcacattggagagaaaacttctgaggataatcagagtggaaaagccttaagaaagaactttcctcatagtttttacaagaaaagtcatgctgaggggaaaatgcctaagtgtgttaaacatgaaaaagccttcaaccagtttccaaatcttactaggcagaataaaactcacacacaagagaaattg

SEQ ID NO: 352716 - DNA, 208 bp, Homo sapiens
gcctaccttggcctcccaaagtgctgggattacaggcatgagccaccatgcctagcctgaaatactttttctttgatgtatccaactgacatgccattattcttttccaaaggtcattttttccaggacactttctgtcttcatgacaggaacatcgagaagccaaggctagtggctgggttactgatggattactgatggattcttc

SEQ ID NO: 352717 - DNA, 661 bp, Homo sapiens
tgcccagtgaagccggagggacggggtccaaccgttgtcggctgcgcggaaactgggacttctccccagggtcgtggaggacgcggccgccgaccctcccaccgcctcacgcctcggagaccgggtccagagccctcagccgcttccgagccccgagaggggaatcagaagtgcgcgtgatcagagcggcacccccttcccaggaaccgcagctgaaccaacggtttcccctgcaccagcctttgcgaccagaccagaagaccatgtagcaccaaaaagatagctgcaaagcggaataaagttggggaaaacaatctgctggccggaagagagtaagatgcaggaggatgattgccggttctccgcagcacgagtcagggaggccatgagatggaagagccaccccacaatgggaagaacctggagacaaggttctccttgtctatgcccaagagaagccacccttcaggagagagtttctgagtttcatgaacttggggaacattctaaacctattcaaaatatgcttactcacagagaggtctcacaagtaggcacgtcgtccataaatgagactcgcatgttgaatatttacacagaattcagtttttgtttagatgactatcagaataaaatatctgtgtatgaaaagccttatgaa

SEQ ID NO: 352718 - DNA, 928 bp, Homo sapiens
tgcccagtgaagccggagggacggggtccaaccgttgtcggctgcgcggaaactgggacttctccccagggtcgtggaggacgcggccgccgaccctcccaccgcctcacgcctcggagaccgggtccagagccctcagccgcttccgagccccgagaggggaatcagaagtgcgcgtgatcagagcggcacccccttcccaggaaccgcagctgaaccaacggtttcccctgcaccagcctttgcgaccaggtcattttttccaggacactttctgtcttcatgacaggaacatcgagaagccaaggctagtggctgggttactgatggattactgatggattcttctcagcacttagtgacctttgaggatgtggctgtggactttacccaggaggagtggactttgttggatcaagcccagagagatctctacagagatgtgatgttggagaactacaagaatctcattatactagcagggtctgaattattcaaacgtagtctcatgtctggattggaacaaatggaagagctgaggacaggagtgacaggagttctgcaggaattggatttgcaactcaaaaccaaaggctccccactgctgcaagatatttctgcagaaagatcaccaaatggagtacaattggagagaagcaatactgcagagaaactgtatgactctaaccattctggaaaagtcttcaatgaacacccatttcttatgactcacatgataactcacattggagagaaaacttctgaggataatcagagtggaaaagccttaagaaagaactttcctcatagtttttacaagaaaagtcatgctgaggggaaaatgcctaagtgtgttaaacatgaaaaagccttcaaccagtttccaaatcttactaggcagaataaaactcacacacaagagaaattg

SEQ ID NO: 352719 - DNA, 533 bp, Homo sapiens
tatacttcatggctgggtgtggtggctcatgcctgtaatcccagcacttagggaggccaaggcgggtggatcatgagatcaggagttcaagaccagactgcccaagatggtgaaaccccgtctctactaaaaatacaaaaattagccaggcatggtggcgggcatctgtaatcccagctactcggcaggctgaggcagagaattgcttgaacccgggaggcagaggttgcagtgagccgagatggtgccactgcactgcagcctgggtgacagagtgagactccatctcaaaaaatatatataaaaaataaaaataataaaaataaaataaaacaaagtgtacttcatatgatagtcatttggttggaatttgaccaatgtgtctttcatcattttgcttccagcctgtttcagatgtggctcttgggcatatagttggattttattttttattctgtctggaaagtttttttgtcttttaacaagataacttggtattttgcatttaataaaatccgcaacatatgtggatt

SEQ ID NO: 352720 - DNA, 1598 bp, Homo sapiens
gactactgacttggaccagcaggggaatggctgtgacaataaataagattgggaaaacaagaagacgcccttgcatacattaagatatgtatatatggaaatgttaccgggagtcccggttatcccaaaaagggttgtttcctgttgcgtggtgaggccaatgcacgaaaccgaaagggagtgtgtcaagcagtgcaggctgtattcaatggctatggaattggaagatctgaaatcaacttagcttgtgagagctgggaagtttcagagtcgttgtcatggcgaccgtcagttgtcacggcgctggtgggagtgttgtttagcatgagaacaggatgatgataaagccagaggctcttcagaggcgccatcttggatttcgccagcttcagctggtttcgtcctaagaaggaacttcgaaacacaggcattctttttcctgaaaataagcagagttacagctgagtaggaatttagctctgtcccatatgctatcgcattgggcagcaaaagcagggtggggtccagcgaaatcagcaggcactgcaatgagtaacatacccagccacgtttatgcagcatttttacgaaaatgaaaccatactacctgtaaaggaagatatgctaacaaacaacaaaactggcaggaaccaagattcctactgacactacccttagttttaattttccctgacaacaaatgaggttaacagagcataattatctaccgtgaccccttcaaaaagacaggctgtatacatttgcactaagagaagaaatcgtgtaatgtcagcaaatttcccccacttaaagcttctctatttaaaaagcttcacgcacacatgcacgcatatgtcttcaagatgaccacaatttattttgcagtcattctttgcaccagttcccaatttttcccactagcttgcaagctccgtgactcgaggagaccgggggatcagagtttgtttttgcggagaagtgagtcctttatgccccaaatagtgactgacatagagaaggtactcagtaaacactttttaaaggaacgcctgcctgactgaagcttaatgatgtgaggcttctagtgtgataccctaccttgttttaacctgaagtgactcttccttagctaagagagccagacggactccatcgtgactccttcactcgcagccccttacccacccccttcctcaaggacttaacttgtgcaagctgactcccagcacatcaagaatgcaattaactgataagatactgtggcaagctatatccgcagttcccaggaattcgcccggttaatagcacccagagcccctgcgtttgtgtccggttgataacgcccaaagcccggcgtccatcaccttaggatagacttaaagcctctgcacctggaactgtttactttcctgtaaccgtttatccttttaactttttgcctactttacttctgtaagattgtttcaactagactccccctctcccctgtctaaaccaaagtataaaagaaaatctagctccttcttcggggccaagagaatttgagcgctagctgtctctcggctgccggctaataaagactcctgaattcgtctcag

SEQ ID NO: 352721 - DNA, 1557 bp, Homo sapiens
gactactgacttggaccagcaggggaatggctgtgacaataaataagattgggaaaacaagaagacgcccttgcatacattaagatatgtatatatggaaatgttaccgggagtcccggttatcccaaaaagggttgtttcctgttgcgtggtgaggccaatgcacgaaaccgaaagggagtgtgtcaagcagtgcaggctgtattcaatggctatggaattggaagatctgaaatcaacttagcttgtgagagctgggaagtttcagagagtgttgtttagcatgagaacaggatgatgataaagccagaggctcttcagaggcgccatcttggatttcgccagcttcagctggtttcgtcctaagaaggaacttcgaaacacaggcattctttttcctgaaaataagcagagttacagctgagtaggaatttagctctgtcccatatgctatcgcattgggcagcaaaagcagggtggggtccagcgaaatcagcaggcactgcaatgagtaacatacccagccacgtttatgcagcatttttacgaaaatgaaaccatactacctgtaaaggaagatatgctaacaaacaacaaaactggcaggaaccaagattcctactgacactacccttagttttaattttccctgacaacaaatgaggttaacagagcataattatctaccgtgaccccttcaaaaagacaggctgtatacatttgcactaagagaagaaatcgtgtaatgtcagcaaatttcccccacttaaagcttctctatttaaaaagcttcacgcacacatgcacgcatatgtcttcaagatgaccacaatttattttgcagtcattctttgcaccagttcccaatttttcccactagcttgcaagctccgtgactcgaggagaccgggggatcagagtttgtttttgcggagaagtgagtcctttatgccccaaatagtgactgacatagagaaggtactcagtaaacactttttaaaggaacgcctgcctgactgaagcttaatgatgtgaggcttctagtgtgataccctaccttgttttaacctgaagtgactcttccttagctaagagagccagacggactccatcgtgactccttcactcgcagccccttacccacccccttcctcaaggacttaacttgtgcaagctgactcccagcacatcaagaatgcaattaactgataagatactgtggcaagctatatccgcagttcccaggaattcgcccggttaatagcacccagagcccctgcgtttgtgtccggttgataacgcccaaagcccggcgtccatcaccttaggatagacttaaagcctctgcacctggaactgtttactttcctgtaaccgtttatccttttaactttttgcctactttacttctgtaagattgtttcaactagactccccctctcccctgtctaaaccaaagtataaaagaaaatctagctccttcttcggggccaagagaatttgagcgctagctgtctctcggctgccggctaataaagactcctgaattcgtctcag

SEQ ID NO: 352722 - DNA, 1250 bp, Homo sapiens
cgatctgactacgcggctcgatctgactacgcggctcgatctgactacgcggctcctaagaaggaacttcgaaacacaggcattctttttcctgaaaataagcagagttacagctgagtaggaatttagctctgtcccatatgctatcgcattgggcagcaaaagcagggtggggtccagcgaaatcagcaggcactgcaatgagtaacatacccagccacgtttatgcagcatttttacgaaaatgaaaccatactacctgtaaaggaagatatgctaacaaacaacaaaactggcaggaaccaagattcctactgacactacccttagttttaattttccctgacaacaaatgaggttaacagagcataattatctaccgtgaccccttcaaaaagacaggctgtatacatttgcactaagagaagaaatcgtgtaatgtcagcaaatttcccccacttaaagcttctctatttaaaaagcttcacgcacacatgcacgcatatgtcttcaagatgaccacaatttattttgcagtcattctttgcaccagttcccaatttttcccactagcttgcaagctccgtgactcgaggagaccgggggatcagagtttgtttttgcggagaagtgagtcctttatgccccaaatagtgactgacatagagaaggtactcagtaaacactttttaaaggaacgcctgcctgactgaagcttaatgatgtgaggcttctagtgtgataccctaccttgttttaacctgaagtgactcttccttagctaagagagccagacggactccatcgtgactccttcactcgcagccccttacccacccccttcctcaaggacttaacttgtgcaagctgactcccagcacatcaagaatgcaattaactgataagatactgtggcaagctatatccgcagttcccaggaattcgcccggttaatagcacccagagcccctgcgtttgtgtccggttgataacgcccaaagcccggcgtccatcaccttaggatagacttaaagcctctgcacctggaactgtttactttcctgtaaccgtttatccttttaactttttgcctactttacttctgtaagattgtttcaactagactccccctctcccctgtctaaaccaaagtataaaagaaaatctagctccttcttcggggccaagagaatttgagcgctagctgtctctcggctgccggctaataaagactcctgaattcgtctcag

SEQ ID NO: 352723 - DNA, 683 bp, Homo sapiens
tgagtgggcggggcctcggcgtggtaggcgcgctgcgtaaagaggcctgcagtcccgcggcgcggggcaggttccgggctgcttaggttggcaccggtccgtggtccccgggggcgcagtcgcagcgctcccgccctccaggcgtcagcgagtgcgcggtccagtgcggccggaacctggcgcaactcctagagcggtccttggggagacgcgggtcccagtcctgcggctcctactggggagtgcgctggtcggaagattgctggactcgctgaagagagactacgcaggaaagccccagccacccatcaaatcagagagaaggaatccaccttcttacgctatggcaggtaagaaagtactcattgtctatgcacaccaggaacccaagtctttcaacggatccttgaagaatgtggctgtagatgaactgagcaggcagggctgcaccgtcacagtgtctgatttgtatgccatgaactttgagccgagggccacagacaaagatatcactggtactctttctaatcctgaggttttcaattatggagtggaaacccacgaagcctacaagcaaaggtctctggctagcgacatcactgatgagcagaaagggtgccaggcatcctggagggcttgatggattaggttcttgtgcagggcttttgcccttgcaatccact

SEQ ID NO: 352724 - DNA, 816 bp, Homo sapiens
aaatggtttgatttattttcttagggcctatatattttctcacatacataatttttattataggtttattacatttactgctcttttacatgaatggtatatcataaatacggcttaaaatttgtttgttattttcatttaacagatatcttgaacaaacttccatggtatatattatagctagaataacctcattctggaataatctatagtgtgaatgtaccataatttgcccaatcaagcagaactataatgtttggcatctgaatcagttgcaaagattgtaggttaattgcagttataaaaatagagcttggaaattgcaactgccccaagttcttcacggctcttatgcaaggctgtgtcctaaagccatagggaagtttagctttcagttgcctgtaacattaaggttgtttcatgattttttgaaggtttgtttcacaccatttccccccttaaatcatttaactgaatggtatgtaacaggtgtagtttctaatgagttcttttcttcccctgtggctttagcatggcacattacacttctgtggatttaaagtccttgcccctcagatcagctttgctcctgaaattgcatccgaagaagaaagaaaggggatggtggctgcgtggtcccagaggctgcagaccatctggaaggaagagcccatcccctgcacagcccactggcacttcgggcaataactctgtggcacgtgggcatcacgtaagcagcacactaggaggcccaggcgcaggcaaagagaagatggtgctgtcatgaaataaaattacaacatagctacctgggga

SEQ ID NO: 352725 - DNA, 468 bp, Homo sapiens
  misc_feature (404)..(404): n is a, c, g, or t
  misc_feature (418)..(419): n is a, c, g, or t
gactactgacttggaccagcaggggaatggctgtgacaataaataagattgggaaaacaagaagataagggcctcgctctgttacccaggctggagtgctgtggtgtgtttgtgactcaccgtagccttgaactcctgggctcaagcaatcctcccacctaagcctctggagtagctgggactacagattgctggactcgctgaagagagactacgcaggaaagccccagccacccatcaaatcagagagaaggaatccaccttcttacgctatggcaggtcggctagtcggggcccgactagcccgacaggagggcgaggggctgcagaggagggggaagggcctgcagaattataggtgaattgtagtttggccccggagccattagctgactccagaggcnaatgctgccaagtnnaagagggaagaattagcatatatgcccacgggctgtcgggctagtcggg

SEQ ID NO: 352726 - DNA, 306 bp, Homo sapiens
gaaacatactgagtaaccaagatgtgtcttggaccatgaatggtgctaccacttactgagcagccctgtgtgctgggaaccttgtcctgtggtcagtgcctcggccgtatccatcacacatggtgtcatggaaaccaggtttccaccagcaacctgggcatgttagagcttctgtgtctgcttggtccattcacttggattgtctcctcctcctcttgggatgtcattgtcacctatggatgggagtgttgcatttgtccatccctggagggtgtccacacgcatgttccctgctggctgtgctga

SEQ ID NO: 352727 - DNA, 1147 bp, Homo sapiens
tgagtgggcggggcctcggcgtggtaggcgcgctgcgtaaagaggcctgcagtcccgcggcgcggggcaggttccgggctgcttaggttggcaccggtccgtggtccccgggggcgcagtcgcagcgctcccgccctccaggcgtcagcgagtgcgcggtccagtgcggccggaacctggcgcaactcctagagcggtccttggggagacgcgggtcccagtcctgcggctcctactggggagtgcgctggtcggaagattgctggactcgctgaagagagactacgcaggaaagccccagccacccatcaaatcagagagaaggaatccaccttcttacgctatggcaggtaagaaagtactcattgtctatgcacaccaggaacccaagtctttcaacggatccttgaagaatgtggctgtagatgaactgagcaggcagggctgcaccgtcacagtgtctgatttgtatgccatgaactttgagccgagggccacagacaaagatatcactggtactctttctaatcctgaggttttcaattatggagtggaaacccacgaagcctacaagcaaaggtctctggctagcgacatcactgatgagcagaaaaaggttcgggaggctgacctagtgatatttcagttcccgctgtactggttcagcgtgccggccatcctgaagggctggatggatagggtgctgtgccagggctttgcctttgacatcccaggattctacgattccggtttgctccagggtaaactagcgctcctttccgtaaccacgggaggcacggccgagatgtacacgaagacaggagtcaatggagattctcgatacttcctgtggccactccagcatggcacattacacttctgtggatttaaagtccttgcccctcagatcagctttgctcctgaaattgcatccgaagaagaaagaaaggggatggtggctgcgtggtcccagaggctgcagaccatctggaaggaagagcccatcccctgcacagcccactggcacttcgggcaataactctgtggcacgtgggcatcacgtaagcagcacactaggaggcccaggcgcaggcaaagagaagatggtgctgtcatgaaataaaattacaacatagctacctgggga

SEQ ID NO: 352728 - DNA, 1076 bp, Homo sapiens
gtaggggaggcggggctggagggagatggcgccgcgctcccggatgaacagagaaagcgacaggataagggcctcgctctgttacccaggctggagtgctgtggtgtgtttgtgactcaccgtagccttgaactcctgggctcaagcaatcctcccacctaagcctctggagtagctgggactacagattgctggactcgctgaagagagactacgcaggaaagccccagccacccatcaaatcagagagaaggaatccaccttcttacgctatggcaggtaagaaagtactcattgtctatgcacaccaggaacccaagtctttcaacggatccttgaagaatgtggctgtagatgaactgagcaggcagggctgcaccgtcacagtgtctgatttgtatgccatgaactttgagccgagggccacagacaaagatatcactggtactctttctaatcctgaggttttcaattatggagtggaaacccacgaagcctacaagcaaaggtctctggctagcgacatcactgatgagcagaaaaaggttcgggaggctgacctagtgatatttcagttcccgctgtactggttcagcgtgccggccatcctgaagggctggatggatagggtgctgtgccagggctttgcctttgacatcccaggattctacgattccggtttgctccagggtaaactagcgctcctttccgtaaccacgggaggcacggccgagatgtacacgaagacaggagtcaatggagattctcgatacttcctgtggccactccagcatggcacattacacttctgtggatttaaagtccttgcccctcagatcagctttgctcctgaaattgcatccgaagaagaaagaaaggggatggtggctgcgtggtcccagaggctgcagaccatctggaaggaagagcccatcccctgcacagcccactggcacttcgggcaataactctgtggcacgtgggcatcacgtaagcagcacactaggaggcccaggcgcaggcaaagagaagatggtgctgtcatgaaataaaattacaacatagctacctgggga

SEQ ID NO: 352729 - DNA, 1304 bp, Homo sapiens
tgagtgggcggggcctcggcgtggtaggcgcgctgcgtaaagaggcctgcagtcccgcggcgcggggcaggttccgggctgcttaggttggcaccggtccgtggtccccgggggcgcagtcgcagcgctcccgccctccaggcgtcagcgagtgcgcggtccagtgcggccggaacctggcgcaactcctagagcggtccttggggagacgcgggtcccagtcctgcggctcctactggggagtgcgctggtcggaagggcacctggcctgggtggagcccactcctcagcacccacctcacttcttgcagtattctgcagaccccagccctgtgcctgtgctcctggacagctggagataaggagtgggccctggaagatgctcattcaggccctgctcaagattccagtcctgattgctggactcgctgaagagagactacgcaggaaagccccagccacccatcaaatcagagagaaggaatccaccttcttacgctatggcaggtaagaaagtactcattgtctatgcacaccaggaacccaagtctttcaacggatccttgaagaatgtggctgtagatgaactgagcaggcagggctgcaccgtcacagtgtctgatttgtatgccatgaactttgagccgagggccacagacaaagatatcactggtactctttctaatcctgaggttttcaattatggagtggaaacccacgaagcctacaagcaaaggtctctggctagcgacatcactgatgagcagaaaaaggttcgggaggctgacctagtgatatttcagttcccgctgtactggttcagcgtgccggccatcctgaagggctggatggatagggtgctgtgccagggctttgcctttgacatcccaggattctacgattccggtttgctccagggtaaactagcgctcctttccgtaaccacgggaggcacggccgagatgtacacgaagacaggagtcaatggagattctcgatacttcctgtggccactccagcatggcacattacacttctgtggatttaaagtccttgcccctcagatcagctttgctcctgaaattgcatccgaagaagaaagaaaggggatggtggctgcgtggtcccagaggctgcagaccatctggaaggaagagcccatcccctgcacagcccactggcacttcgggcaataactctgtggcacgtgggcatcacgtaagcagcacactaggaggcccaggcgcaggcaaagagaagatggtgctgtcatgaaataaaattacaacatagctacctgggga

SEQ ID NO: 352730 - DNA, 1099 bp, Homo sapiens
cagggatttcagctggccggccatatggccctgtgggtcgtcgcgcccgggccagggaccattctgtacataggatcgtgcttggctctcacggaacgcgcccacacgcagggtcccggtgtcgaatcgtctggtggaatctgccctcaaccctatggagcgggtgctggtatcatagtcatattacaagtaggaatcagcgggcccaagattgctggactcgctgaagagagactacgcaggaaagccccagccacccatcaaatcagagagaaggaatccaccttcttacgctatggcaggtaagaaagtactcattgtctatgcacaccaggaacccaagtctttcaacggatccttgaagaatgtggctgtagatgaactgagcaggcagggctgcaccgtcacagtgtctgatttgtatgccatgaactttgagccgagggccacagacaaagatatcactggtactctttctaatcctgaggttttcaattatggagtggaaacccacgaagcctacaagcaaaggtctctggctagcgacatcactgatgagcagaaaaaggttcgggaggctgacctagtgatatttcagttcccgctgtactggttcagcgtgccggccatcctgaagggctggatggatagggtgctgtgccagggctttgcctttgacatcccaggattctacgattccggtttgctccagggtaaactagcgctcctttccgtaaccacgggaggcacggccgagatgtacacgaagacaggagtcaatggagattctcgatacttcctgtggccactccagcatggcacattacacttctgtggatttaaagtccttgcccctcagatcagctttgctcctgaaattgcatccgaagaagaaagaaaggggatggtggctgcgtggtcccagaggctgcagaccatctggaaggaagagcccatcccctgcacagcccactggcacttcgggcaataactctgtggcacgtgggcatcacgtaagcagcacactaggaggcccaggcgcaggcaaagagaagatggtgctgtcatgaaataaaattacaacatagctacctgggga

SEQ ID NO: 352731 - DNA, 943 bp, Homo sapiens
tgctgtctgaggacccttttttaggcacgctggagtagtgcgctggatcggatgattgctggactcgctgaagagagactacgcaggaaagccccagccacccatcaaatcagagagaaggaatccaccttcttacgctatggcaggtaagaaagtactcattgtctatgcacaccaggaacccaagtctttcaacggatccttgaagaatgtggctgtagatgaactgagcaggcagggctgcaccgtcacagtgtctgatttgtatgccatgaactttgagccgagggccacagacaaagatatcactggtactctttctaatcctgaggttttcaattatggagtggaaacccacgaagcctacaagcaaaggtctctggctagcgacatcactgatgagcagaaaaaggttcgggaggctgacctagtgatatttcagttcccgctgtactggttcagcgtgccggccatcctgaagggctggatggatagggtgctgtgccagggctttgcctttgacatcccaggattctacgattccggtttgctccagggtaaactagcgctcctttccgtaaccacgggaggcacggccgagatgtacacgaagacaggagtcaatggagattctcgatacttcctgtggccactccagcatggcacattacacttctgtggatttaaagtccttgcccctcagatcagctttgctcctgaaattgcatccgaagaagaaagaaaggggatggtggctgcgtggtcccagaggctgcagaccatctggaaggaagagcccatcccctgcacagcccactggcacttcgggcaataactctgtggcacgtgggcatcacgtaagcagcacactaggaggcccaggcgcaggcaaagagaagatggtgctgtcatgaaataaaattacaacatagctacctgggga

SEQ ID NO: 352732 - DNA, 1336 bp, Homo sapiens
agtaacttgttcttcacaatcactgccctcccaagaacatccaggatttcagcctcagtgctaagacaaccatgtctctccctgacacatgctcgctgctgagaattctaggaaaagcagagggctgtgcaggcgcccctgcccctaggctaggagagctggcaaatgcctggagacccaaaggcctcatcctcagggcggccaactcttctgttttagtgatatacagactatcttttattgtgatttatagtgcaacttaccggttcaaacaatactacctgtattcataaactttctttttcctttccttcctcactgcccagctttaggttcacccctgtaagtgttgctggtgtcagaataggaacctccctgcgctttgaagggatggatgtgacctctcccacattctccggtgctgtgatgtaccttaaacacagcaagattgctggactcgctgaagagagactacgcaggaaagccccagccacccatcaaatcagagagaaggaatccaccttcttacgctatggcaggtaagaaagtactcattgtctatgcacaccaggaacccaagtctttcaacggatccttgaagaatgtggctgtagatgaactgagcaggcagggctgcaccgtcacagtgtctgatttgtatgccatgaactttgagccgagggccacagacaaagatatcactggtactctttctaatcctgaggttttcaattatggagtggaaacccacgaagcctacaagcaaaggtctctggctagcgacatcactgatgagcagaaaaaggttcgggaggctgacctagtgatatttcagttcccgctgtactggttcagcgtgccggccatcctgaagggctggatggatagggtgctgtgccagggctttgcctttgacatcccaggattctacgattccggtttgctccagggtaaactagcgctcctttccgtaaccacgggaggcacggccgagatgtacacgaagacaggagtcaatggagattctcgatacttcctgtggccactccagcatggcacattacacttctgtggatttaaagtccttgcccctcagatcagctttgctcctgaaattgcatccgaagaagaaagaaaggggatggtggctgcgtggtcccagaggctgcagaccatctggaaggaagagcccatcccctgcacagcccactggcacttcgggcaataactctgtggcacgtgggcatcacgtaagcagcacactaggaggcccaggcgcaggcaaagagaagatggtgctgtcatgaaataaaattacaacatagctacctgggga

SEQ ID NO: 352733 - DNA, 1102 bp, Homo sapiens
ttctgctgacacctcactggccatctcaactgcaaggcagcctaggaaatgtagtgcttacctgtacacgtggattcctggaatcaattcaggattgctggactcgctgaagagagactacgcaggaaagccccagccacccatcaaatcagagagaaggaatccaccttcttacgctatggcagaatttaggttcctcaaaagtggggccctgcctatcctgtctttgctgtgcctccaggccctgaaattctccctgggctgtagcaggggctcaagtgaatgaaccccaggaggcatcttgggtaagaaagtactcattgtctatgcacaccaggaacccaagtctttcaacggatccttgaagaatgtggctgtagatgaactgagcaggcagggctgcaccgtcacagtgtctgatttgtatgccatgaactttgagccgagggccacagacaaagatatcactggtactctttctaatcctgaggttttcaattatggagtggaaacccacgaagcctacaagcaaaggtctctggctagcgacatcactgatgagcagaaaaaggttcgggaggctgacctagtgatatttcagttcccgctgtactggttcagcgtgccggccatcctgaagggctggatggatagggtgctgtgccagggctttgcctttgacatcccaggattctacgattccggtttgctccagggtaaactagcgctcctttccgtaaccacgggaggcacggccgagatgtacacgaagacaggagtcaatggagattctcgatacttcctgtggccactccagcatggcacattacacttctgtggatttaaagtccttgcccctcagatcagctttgctcctgaaattgcatccgaagaagaaagaaaggggatggtggctgcgtggtcccagaggctgcagaccatctggaaggaagagcccatcccctgcacagcccactggcacttcgggcaataactctgtggcacgtgggcatcacgtaagcagcacactaggaggcccaggcgcaggcaaagagaagatggtgctgtcatgaaataaaattacaacatagctacctgggga

SEQ ID NO: 352734 - DNA, 1094 bp, Homo sapiens
tgagtgggcggggcctcggcgtggtaggcgcgctgcgtaaagaggcctgcagtcccgcggcgcggggcaggttccgggctgcttaggttggcaccggtccgtggtccccgggggcgcagtcgcagcgctcccgccctccaggcgtcagcgagtgcgcggtccagtgcggccggaacctggcgcaactcctagagcggtccttggggagacgcgggtcccagtcctgcggctcctactggggagtgcgctggtcggaagattgctggactcgctgaagagagactacgcaggaaagccccagccacccatcaaatcagagagaaggaatccaccttcttacgctatggcaggtaagaaagtactcattgtctatgcacaccaggaacccaagtctttcaacggatccttgaagaatgtggctgtagatgaactgagcaggcagggctgcaccgtcacagtgtctgatttgtatgccatgaactttgagccgagggccacagacaaagatatcactggtactctttctaatcctgaggttttcaattatggagtggaaacccacgaagcctacaagcaaaggtctctggctagcgacatcactgatgagcagaaacgtgccggccatcctgaagggctggatggatagggtgctgtgccagggctttgcctttgacatcccaggattctacgattccggtttgctccagggtaaactagcgctcctttccgtaaccacgggaggcacggccgagatgtacacgaagacaggagtcaatggagattctcgatacttcctgtggccactccagcatggcacattacacttctgtggatttaaagtccttgcccctcagatcagctttgctcctgaaattgcatccgaagaagaaagaaaggggatggtggctgcgtggtcccagaggctgcagaccatctggaaggaagagcccatcccctgcacagcccactggcacttcgggcaataactctgtggcacgtgggcatcacgtaagcagcacactaggaggcccaggcgcaggcaaagagaagatggtgctgtcatgaaataaaattacaacatagctacctgggga

SEQ ID NO: 352735 - DNA, 1033 bp, Homo sapiens
tgagtgggcggggcctcggcgtggtaggcgcgctgcgtaaagaggcctgcagtcccgcggcgcggggcaggttccgggctgcttaggttggcaccggtccgtggtccccgggggcgcagtcgcagcgctcccgccctccaggcgtcagcgagtgcgcggtccagtgcggccggaacctggcgcaactcctagagcggtccttggggagacgcgggtcccagtcctgcggctcctactggggagtgcgctggtcggaagattgctggactcgctgaagagagactacgcaggaaagccccagccacccatcaaatcagagagaaggaatccaccttcttacgctatggcaggtaagaaagtactcattgtctatgcacaccaggaacccaagtctttcaacggatccttgaagaatgtggctgtagatgaactgagcaggcagggctgcaccgtcacagtgtctgatttgtatgccatgaactttgagccgagggccacagacaaagatatcactggtactctttctaatcctgaggttttcaattatggagtggaaacccacgaagcctacaagcaaaggtctctggctagcgacatcactgatgagcagaaaaaggttcgggaggctgacctagtgatatttcagggtaaactagcgctcctttccgtaaccacgggaggcacggccgagatgtacacgaagacaggagtcaatggagattctcgatacttcctgtggccactccagcatggcacattacacttctgtggatttaaagtccttgcccctcagatcagctttgctcctgaaattgcatccgaagaagaaagaaaggggatggtggctgcgtggtcccagaggctgcagaccatctggaaggaagagcccatcccctgcacagcccactggcacttcgggcaataactctgtggcacgtgggcatcacgtaagcagcacactaggaggcccaggcgcaggcaaagagaagatggtgctgtcatgaaataaaattacaacatagctacctgggga

SEQ ID NO: 352736 - DNA, 1809 bp, Homo sapiens
gtaggggaggcggggctggagggagatggcgccgcgctcccggatgaacagagaaagcgacagggtgagtcgcagggcacagtgtgggatgagtcaccgacagcaaggcatggactccgggaagaaggggagacgagccgggaaagacttgcatcggggatgtgagctgagctgcacccagacaaaagcggctcggggctcctgaaagcagcaggcaccgccggtcctgccaaggggctacttcctgcgcggagtaggagagtaggagaccccagacgcccttgcatacattaagatatgtatatatggaaatgttaccgggagtcccggttatcccaaaaagggttgtttcctgttgcgtggtgaggccaatgcacgaaaccgaaagggagtgtgtcaagcagtgcaggctgtattcaatggctatggaattggaagatctgaaatcaacttagcttgtgagagctgggaagtttcagagtcgttgtcatggcgaccgtcagttgtcacggcgctggtgggagtgttgtttagcatgagaacaggatgatgataaagccagaggctcttcagaggcgccatcttggatttcgccagcttcagctggtttcgtcctaagaaggaacttcgaaacacaggcattctttttcctgaaaataagcagagttacagctgagtaggaatttagctctgtcccatatgctatcgcattgggcagcaaaagcagggtggggtccagcgaaatcagcaggcactgcaatgagtaacatacccagccacgtttatgcagcatttttacgaaaatgaaaccatactacctgtaaaggaagatatgctaacaaacaacaaaactggcaggaaccaagattcctactgacactacccttagttttaattttccctgacaacaaatgaggttaacagagcataattatctaccgtgaccccttcaaaaagacaggctgtatacatttgcactaagagaagaaatcgtgtaatgtcagcaaatttcccccacttaaagcttctctatttaaaaagcttcacgcacacatgcacgcatatgtcttcaagatgaccacaatttattttgcagtcattctttgcaccagttcccaatttttcccactagcttgcaagctccgtgactcgaggagaccgggggatcagagtttgtttttgcggagaagtgagtcctttatgccccaaatagtgactgacatagagaaggtactcagtaaacactttttaaaggaacgcctgcctgactgaagcttaatgatgtgaggcttctagtgtgataccctaccttgttttaacctgaagtgactcttccttagctaagagagccagacggactccatcgtgactccttcactcgcagccccttacccacccccttcctcaaggacttaacttgtgcaagctgactcccagcacatcaagaatgcaattaactgataagatactgtggcaagctatatccgcagttcccaggaattcgcccggttaatagcacccagagcccctgcgtttgtgtccggttgataacgcccaaagcccggcgtccatcaccttaggatagacttaaagcctctgcacctggaactgtttactttcctgtaaccgtttatccttttaactttttgcctactttacttctgtaagattgtttcaactagactccccctctcccctgtctaaaccaaagtataaaagaaaatctagctccttcttcggggccaagagaatttgagcgctagctgtctctcggctgccggctaataaagactcctgaattcgtctcag

SEQ ID NO: 352737 - DNA, 837 bp, Homo sapiens
tgagtgggcggggcctcggcgtggtaggcgcgctgcgtaaagaggcctgcagtcccgcggcgcggggcaggttccgggctgcttaggttggcaccggtccgtggtccccgggggcgcagtcgcagcgctcccgccctccaggcgtcagcgagtgcgcggtccagtgcggccggaacctggcgcaactcctagagcggtccttggggagacgcgggtcccagtcctgcggctcctactggggagtgcgctggtcggaagattgctggactcgctgaagagagactacgcaggaaagccccagccacccatcaaatcagagagaaggaatccaccttcttacgctatggcaggtaagaaagtactcattgtctatgcacaccaggaacccaagtctttcaacggatccttgaagaatgtggctgtagatgaactgagcaggcagggctgcaccgtcacagtgtctgatttgtatgccatgaactttgagccgagggccacagacaaagatatcactggtactctttctaatcctgaggttttcaattatggagtggaaacccacgaagcctacaagcaaaggtctctggctagcgacatcactgatgagcagaaaaaggttcgggaggctgacctagtgatatttcaggtttgtttttctctaattaatatattgaatcagattcatcttatgtacaaactctttctgaatattgagttttgtgctgcttctggaagtggcatcaatgttttgagcacagttgcacacttactgagcaaatattgtaacctggttacaacacctagttacaacatttcacctagttacaccacttcacc

SEQ ID NO: 352738 - DNA, 2159 bp, Homo sapiens
aaatggtttgatttattttcttagggcctatatattttctcacatacataatttttattataggtttattacatttactgctcttttacatgaatggtatatcataaatacggcttaaaatttgtttgttattttcatttaacagatatcttgaacaaacttccatggtatatattatagctagaataacctcattctggaataatctatagtgtgaatgtaccataatttgcccaatcaagcagaactataatgtttggcatctgaatcagttgcaaagattgtaggttaattgcagttataaaaatagagcttggaaattgcaactgccccaagttcttcacggctcttatgcaaggctgtgtcctaaagccatagggaagtttagctttcagttgcctgtaacattaaggttgtttcatgattttttgaaggtttgtttcacaccatttccccccttaaatcatttaactgaatggtatgtaacaggtgtagtttctaatgagttcttttcttcccctgtggctttagcatggcacattacacttctgtggatttaaagtccttgcccctcagatcagctttgctcctgaaattgcatccgaagaagaaagaaaggggatggtggctgcgtggtcccagaggctgcagaccatctggaaggaagagcccatcccctgcacagcccactggcacttcgggcaataactctgtggcacgtgggcatcacgtaagcagcacactaggaggcccaggcgcaggcaaagagaagatggtgctgtcatgaaataaaattacaacatagctacctggggatacttttttctttctgttttttgtttgtttttaattttagctttaaggagcacatggccagtactgtttcaggggaatattgggtggcgctggggtttgggcttctattgatcccatcacccaaacagtgagcatagttcccaatagatagtttttcaacacttcctttcctcccttccttcccgcttttggattcccagcatctattgatcccgtcttttcacccctgtgtacccaatgtttagttcccacttataagttagaacatggggaatttggttttgtttctgtgttgattcacttaggataatgacctccagctgcatccacgttactgcaaaggacaggatttcatgtttttttatggctgcatagtattccatggcgtccgtgtaccacactttctttatccagtccactgttgatgggcacctgggttgattccatgtctttgctactgtaaatagttctgtgatgaacatacaagtgcaggcatcttttcatagaatgattttttttttccttttggtagatacccagtaatgggattgctgggttgaagggtaattctatttttagcaaactagaaatatttaatgaagtacatgaatgagtgtcttcagaattgtacacagtgagatcaaatattttaataatgagcttgttatgttgaattctattctgaccatcattcactgagattttcttttctttcttttttaaagagacagagtttcactatgttgcccaggctggtctcaaaccccttgcctcaagtaatcttcccaccttgggcctcccaaagtgctgggattgcaggtgtgagccaccacacctggcccagattttctttaatatttgtctaatatctttccatctccctatattcaagcttcatgtaattttattttctggtaattctctgagcatagagctggatttgctagtttttttattttatgactcaacatgagagtttctatttttcatagaaaagttgaatctgggcctgtttcttaattttcttctttgtctttttaaatttacattaggactatgaagttttaattgaacagccattaacatatatggttatatgttgcatgatgtttcaatcagtgatggactgcatgtacgatggtggtcccctaagattataatgccatgttttgtttattaaaatttatttaagatttattttattatttttatagatgaggtctcactctgttgccccagctgggtgcagtggcatgatcatacctcactaggctcaagtgatcctcctgcctcagcatccctagtaactaggactacaggcacatgctaccacgcctggctaa

SEQ ID NO: 352739 - DNA, 994 bp, Homo sapiens
tgagtgggcggggcctcggcgtggtaggcgcgctgcgtaaagaggcctgcagtcccgcggcgcggggcaggttccgggctgcttaggttggcaccggtccgtggtccccgggggcgcagtcgcagcgctcccgccctccaggcgtcagcgagtgcgcggtccagtgcggccggaacctggcgcaactcctagagcggtccttggggagacgcgggtcccagtcctgcggctcctactggggagtgcgctggtcggaagggcacctggcctgggtggagcccactcctcagcacccacctcacttcttgcagtattctgcagaccccagccctgtgcctgtgctcctggacagctggagataaggagtgggccctggaagatgctcattcaggccctgctcaagattccagtcctgattgctggactcgctgaagagagactacgcaggaaagccccagccacccatcaaatcagagagaaggaatccaccttcttacgctatggcaggtaagaaagtactcattgtctatgcacaccaggaacccaagtctttcaacggatccttgaagaatgtggctgtagatgaactgagcaggcagggctgcaccgtcacagtgtctgatttgtatgccatgaactttgagccgagggccacagacaaagatatcactggtactctttctaatcctgaggttttcaattatggagtggaaacccacgaagcctacaagcaaaggtctctggctagcgacatcactgatgagcagaaaaaggttcgggaggctgacctagtgatatttcaggtttgtttttctctaattaatatattgaatcagattcatcttatgtacaaactctttctgaatattgagttttgtgctgcttctggaagtggcatcaatgttttgagcacagttgcacacttactgagcaaatattgtaacctggttacaacacctagttacaacatttcacctagttacaccacttcacc

SEQ ID NO: 352740 - DNA, 1144 bp, Homo sapiens
tgagtgggcggggcctcggcgtggtaggcgcgctgcgtaaagaggcctgcagtcccgcggcgcggggcaggttccgggctgcttaggttggcaccggtccgtggtccccgggggcgcagtcgcagcgctcccgccctccaggcgtcagcgagtgcgcggtccagtgcggccggaacctggcgcaactcctagagcggtccttggggagacgcgggtcccagtcctgcggctcctactggggagtgcgctggtcggaagggggatggagacagaagtcacaaactcacatgccaccagccatatgatgtaaacatgtaaactgggccaaggaatacaaaagggagtggtgagctggggacactgaagaatggatgccctgtctagaggagtgaaaatgaagcatttcatacaaacaacatgatttcgggcaatcactttgggaatcaggataaggtgttcccccagtctgcagaaacactggcaacatttacaaagctttaggttcacccctgtaagtgttgctggtgtcagaataggaacctccctgcgctttgaagggatggatgtgacctctcccacattctccggtgctgtgatgtaccttaaacacagcaagggcacctggcctgggtggagcccactcctcagcacccacctcacttcttgcagtattctgcagaccccagccctgtgcctgtgctcctggacagctggagataaggagtgggccctggaagatgctcattcaggccctgctcaagattccagtcctggtggggataagcaccacttttgtgtgtctctgtgctttttgttttgctgtaaagacacactgataggttcacgttgtcgtttggacacaacatgcgcgatgcgtgtcttcacactaagccctagtcacactctctgcattgtttttttatcccattttttcctactgtggtacagaacatctcacataaaattgaccattttaaccactttttttgtttgtttgttttttgtgtttttggacagagtctcgctctgtctcagctactcaggaggctgaggtaggagaattgcttgaacccgggaggcagaggttgcagtgagctgggatcgttgctccagcctgggcaacaagagcgaaactctgtttcaa

SEQ ID NO: 352741 - DNA, 311 bp, Homo sapiens
gtaggggaggcggggctggagggagatggcgccgcgctcccggatgaacagagaaagcgacaggataagggcctcgctctgttacccaggctggagtgctgtggtgtgtttgtgactcaccgtagccttgaactcctgggctcaagcaatcctcccacctaagcctctggagtagctgggactacagttctccttcaccttcctccatgagtagaggcagcctgaggccctcaccagatgcagatgcccaaccttgaactttccaaccattcagagtcattagccaaataaaccttttatctttataaatt

SEQ ID NO: 352742 - DNA, 469 bp, Homo sapiens
ctctggagtagctgggactacaggtgagcaccgccaagcctgacctcaagttgaaatgtgatcaccaatgttggagtggggcttaatgggtggtgtttaggttgcagggccagatccttatgaatagatgaatgccctccctcaggggtgagtgagttcttccagagctggtggttagaaacaatccttgacctccctcctttctctcttgcttactctcttgccatgtaatctctgcacactccagttctccttcaccttcctccatgagtagaggcagcctgaggccctcaccagatgcagatgcccaaccttgaactttccaaccattcagagtcattagccaaataaaccttttatctttataaattactcagcctcaggtattcctttatagcaacacaaaacagactaagacaggaacctacactccttagaagaaggccatatgatataagggtgttgagtc

SEQ ID NO: 352743 - DNA, 635 bp, Homo sapiens
gtaccacactttctttatccagtccactgttgatgggcacctgggttgattccatgtctttgctactgtaaatagttctgtgatgaacatacaagtgcaggcatcttttcatagaatgattttttttttccttttggtagatacccagtaatgggattgctgggttgaagggtaattctatttttagcaaactagaaatatttaatgaagtacatgaatgagtgtcttcagaattgtacacagtgagatcaaatattttaataatgagcttgttatgttgaattctattctgaccatcattcactgagattttcttttctttctttcttttcttttctttcttttttaaagagacagagtttcactatgttgcccaggctggtctcaaaccccttgcctcaagtaatcttcccaccttgggcctcccaaagtgctgggattgcaggtgtgagccaccacacctggcccagattttctttaatatttgtctaatatctttccatctccctatattcaagcttcatgtaattttattttctggtaattctctgagcatagagctggatttgctagtttttttattttatgactcaacatgagagtttctatttttcatagaaaagttgaatctgggc

SEQ ID NO: 352744 - DNA, 553 bp, Homo sapiens
ttctgtgtctgcttggtccattcacttggattgtctcctcctcctcttgggatgtcattgtcacctatggatgggagtgttgcatttgtccatccctggagggtgtccacacgcatgttccctgctggctgtgctgagcccgtgtgctggaggctcagcaacatttctgtcctcttctggagtccacacaaatgcatctgctttctcccttgcagggtaaactagcgctcctttccgtaaccacgggaggcacggccgagatgtacacgaagacaggagtcaatggagattctcgatacttcctgtggccactccaggtagaccagctgcgagtggctcccttgcttgttggcacacgcacacacagacacacacatgcacacatgcatacacacacacacgcacacacatacatgccctcagctccccgaggggtgagatgagatgggatggaagcgtgatgccccacaccattttgactcccctggatacaagaaaattataacattttgccccttttaaatgctttacttgacagatttgaaaagcttga

SEQ ID NO: 352745 - DNA, 449 bp, Homo sapiens
gtttcgatgctttttttaattctgcaaatgtaagcctttccactttaagtccaagctcagcgcagaggactgttctataatacatacaatttagtttaaaaatgttgcaaatgttaacatgtgtcacaaactcaagcaatccagtattatagaaagcaaagaatgaaatgtgctgcttctttctcccccagacgcccttgcatacattaagatatgtatatatggaaatgttaccgggagtcccggttatcccaaaaagggttgtttcctgttgcgtggtgaggccaatgcacgaaaccgaaagggagtgtgtcaagcagtgcaggctgtattcaatggctatggaattggaagatctgaaatcaacttagcttgtgagagctgggaagtttcagaggtagggtgtctttaatgaaggggctgggcattaagagcacgggggggaatat

SEQ ID NO: 352746 - DNA, 2490 bp, Homo sapiens
tgagtgggcggggcctcggcgtggtaggcgcgctgcgtaaagaggcctgcagtcccgcggcgcggggcaggttccgggctgcttaggttggcaccggtccgtggtccccgggggcgcagtcgcagcgctcccgccctccaggcgtcagcgagtgcgcggtccagtgcggccggaacctggcgcaactcctagagcggtccttggggagacgcgggtcccagtcctgcggctcctactggggagtgcgctggtcggaagattgctggactcgctgaagagagactacgcaggaaagccccagccacccatcaaatcagagagaaggaatccaccttcttacgctatggcaggtaagaaagtactcattgtctatgcacaccaggaacccaagtctttcaacggatccttgaagaatgtggctgtagatgaactgagcaggcagggctgcaccgtcacagtgtctgatttgtatgccatgaactttgagccgagggccacagacaaagatatcactggtactctttctaatcctgaggttttcaattatggagtggaaacccacgaagcctacaagcaaaggtctctggctagcgacatcactgatgagcagaaaaaggttcgggaggctgacctagtgatatttcagttcccgctgtactggttcagcgtgccggccatcctgaagggctggatggatagggtgctgtgccagggctttgcctttgacatcccaggattctacgattccggtttgctccagggtaaactagcgctcctttccgtaaccacgggaggcacggccgagatgtacacgaagacaggagtcaatggagattctcgatacttcctgtggccactccagcatggcacattacacttctgtggatttaaagtccttgcccctcagatcagctttgctcctgaaattgcatccgaagaagaaagaaaggggatggtggctgcgtggtcccagaggctgcagaccatctggaaggaagagcccatcccctgcacagcccactggcacttcgggcaataactctgtggcacgtgggcatcacgtaagcagcacactaggaggcccaggcgcaggcaaagagaagatggtgctgtcatgaaataaaattacaacatagctacctggggatacttttttctttctgttttttgtttgtttttaattttagctttaaggagcacatggccagtactgtttcaggggaatattgggtggcgctggggtttgggcttctattgatcccatcacccaaacagtgagcatagttcccaatagatagtttttcaacacttcctttcctcccttccttcccgcttttggattcccagcatctattgatcccgtcttttcacccctgtgtacccaatgtttagttcccacttataagttagaacatggggaatttggttttgtttctgtgttgattcacttaggataatgacctccagctgcatccacgttactgcaaaggacaggatttcatgtttttttatggctgcatagtattccatggcgtccgtgtaccacactttctttatccagtccactgttgatgggcacctgggttgattccatgtctttgctactgtaaatagttctgtgatgaacatacaagtgcaggcatcttttcatagaatgattttttttttccttttggtagatacccagtaatgggattgctgggttgaagggtaattctatttttagcaaactagaaatatttaatgaagtacatgaatgagtgtcttcagaattgtacacagtgagatcaaatattttaataatgagcttgttatgttgaattctattctgaccatcattcactgagattttcttttctttcttttttaaagagacagagtttcactatgttgcccaggctggtctcaaaccccttgcctcaagtaatcttcccaccttgggcctcccaaagtgctgggattgcaggtgtgagccaccacacctggcccagattttctttaatatttgtctaatatctttccatctccctatattcaagcttcatgtaattttattttctggtaattctctgagcatagagctggatttgctagtttttttattttatgactcaacatgagagtttctatttttcatagaaaagttgaatctgggcctgtttcttaattttcttctttgtctttttaaatttacattaggactatgaagttttaattgaacagccattaacatatatggttatatgttgcatgatgtttcaatcagtgatggactgcatgtacgatggtggtcccctaagattataatgccatgttttgtttattaaaatttatttaagatttattttattatttttatagatgaggtctcactctgttgccccagctgggtgcagtggcatgatcatacctcactaggctcaagtgatcctcctgcctcagcatccctagtaactaggactacaggcacatgctaccacgcctggctaa

SEQ ID NO: 352747 - DNA, 1076 bp, Homo sapiens
gactactgacttggaccagcaggggaatggctgtgacaataaataagattgggaaaacaagaagataagggcctcgctctgttacccaggctggagtgctgtggtgtgtttgtgactcaccgtagccttgaactcctgggctcaagcaatcctcccacctaagcctctggagtagctgggactacagattgctggactcgctgaagagagactacgcaggaaagccccagccacccatcaaatcagagagaaggaatccaccttcttacgctatggcaggtaagaaagtactcattgtctatgcacaccaggaacccaagtctttcaacggatccttgaagaatgtggctgtagatgaactgagcaggcagggctgcaccgtcacagtgtctgatttgtatgccatgaactttgagccgagggccacagacaaagatatcactggtactctttctaatcctgaggttttcaattatggagtggaaacccacgaagcctacaagcaaaggtctctggctagcgacatcactgatgagcagaaaaaggttcgggaggctgacctagtgatatttcagttcccgctgtactggttcagcgtgccggccatcctgaagggctggatggatagggtgctgtgccagggctttgcctttgacatcccaggattctacgattccggtttgctccagggtaaactagcgctcctttccgtaaccacgggaggcacggccgagatgtacacgaagacaggagtcaatggagattctcgatacttcctgtggccactccagcatggcacattacacttctgtggatttaaagtccttgcccctcagatcagctttgctcctgaaattgcatccgaagaagaaagaaaggggatggtggctgcgtggtcccagaggctgcagaccatctggaaggaagagcccatcccctgcacagcccactggcacttcgggcaataactctgtggcacgtgggcatcacgtaagcagcacactaggaggcccaggcgcaggcaaagagaagatggtgctgtcatgaaataaaattacaacatagctacctgggga

SEQ ID NO: 352748 - DNA, 1268 bp, Homo sapiens
tgagtgggcggggcctcggcgtggtaggcgcgctgcgtaaagaggcctgcagtcccgcggcgcggggcaggttccgggctgcttaggttggcaccggtccgtggtccccgggggcgcagtcgcagcgctcccgccctccaggcgtcagcgagtgcgcggtccagtgcggccggaacctggcgcaactcctagagcggtccttggggagacgcgggtcccagtcctgcggctcctactggggagtgcgctggtcggaagctttaggttcacccctgtaagtgttgctggtgtcagaataggaacctccctgcgctttgaagggatggatgtgacctctcccacattctccggtgctgtgatgtaccttaaacacagcaagattgctggactcgctgaagagagactacgcaggaaagccccagccacccatcaaatcagagagaaggaatccaccttcttacgctatggcaggtaagaaagtactcattgtctatgcacaccaggaacccaagtctttcaacggatccttgaagaatgtggctgtagatgaactgagcaggcagggctgcaccgtcacagtgtctgatttgtatgccatgaactttgagccgagggccacagacaaagatatcactggtactctttctaatcctgaggttttcaattatggagtggaaacccacgaagcctacaagcaaaggtctctggctagcgacatcactgatgagcagaaaaaggttcgggaggctgacctagtgatatttcagttcccgctgtactggttcagcgtgccggccatcctgaagggctggatggatagggtgctgtgccagggctttgcctttgacatcccaggattctacgattccggtttgctccagggtaaactagcgctcctttccgtaaccacgggaggcacggccgagatgtacacgaagacaggagtcaatggagattctcgatacttcctgtggccactccagcatggcacattacacttctgtggatttaaagtccttgcccctcagatcagctttgctcctgaaattgcatccgaagaagaaagaaaggggatggtggctgcgtggtcccagaggctgcagaccatctggaaggaagagcccatcccctgcacagcccactggcacttcgggcaataactctgtggcacgtgggcatcacgtaagcagcacactaggaggcccaggcgcaggcaaagagaagatggtgctgtcatgaaataaaattacaacatagctacctgggga

SEQ ID NO: 352749 - DNA, 2277 bp, Homo sapiens
tgagtgggcggggcctcggcgtggtaggcgcgctgcgtaaagaggcctgcagtcccgcggcgcggggcaggttccgggctgcttaggttggcaccggtccgtggtccccgggggcgcagtcgcagcgctcccgccctccaggcgtcagcgagtgcgcggtccagtgcggccggaacctggcgcaactcctagagcggtccttggggagacgcgggtcccagtcctgcggctcctactggggagtgcgctggtcggaagattgctggactcgctgaagagagactacgcaggaaagccccagccacccatcaaatcagagagaaggaatccaccttcttacgctatggcaggtaagaaagtactcattgtctatgcacaccaggaacccaagtctttcaacggatccttgaagaatgtggctgtagatgaactgagcaggcagggctgcaccgtcacagtgtctgatttgtatgccatgaactttgagccgagggccacagacaaagatatcactggtactctttctaatcctgaggttttcaattatggagtggaaacccacgaagcctacaagcaaaggtctctggctagcgacatcactgatgagcagaaaaaggttcgggaggctgacctagtgatatttcagttcccgctgtactggttcagcgtgccggccatcctgaagggctggatggatagggtgctgtgccagggctttgcctttgacatcccaggattctacgattccggtttgctccagggtaaactagcgctcctttccgtaaccacgggaggcacggccgagatgtacacgaagacaggagtcaatggagattctcgatacttcctgtggccactccagcatggcacattacacttctgtggatttaaagtccttgcccctcagatcagctttgctcctgaaattgcatccgaagaagaaagaaaggggatggtggctgcgtggtcccagaggctgcagaccatctggaaggaagagcccatcccctgcacagcccactggcacttcgggcaataactctgtggcacgtgggcatcacgtaagcagcacactaggaggcccaggcgcaggcaaagagaagatggtgctgtcatgaaataaaattacaacatagctacctggggatacttttttctttctgttttttgtttgtttttaattttagctttaaggagcacatggccagtactgtttcaggggaatattgggtggcgctggggtttgggcttctattgatcccatcacccaaacagtgagcatagttcccaatagatagtttttcaacacttcctttcctcccttccttcccgcttttggattcccagcatctattgatcccgtcttttcacccctgtgtacccaatgtttagttcccacttataagttagaacatggggaatttggttttgtttctgtgttgattcacttaggataatgacctccagctgcatccacgttactgcaaaggacaggatttcatgtttttttatggctgcatagtattccatggcgtccgtgtaccacactttctttatccagtccactgttgatgggcacctgggttgattccatgtctttgctactgtaaatagttctgtgatgaacatacaagtgcaggcatcttttcatagaatgattttttttttccttttggtagatacccagtaatgggattgctgggttgaagggtaattctatttttagcaaactagaaatatttaatgaagtacatgaatgagtgtcttcagaattgtacacagtgagatcaaatattttaataatgagcttgttatgttgaattctattctgaccatcattcactgagattttcttttctttcttttttaaagagacagagtttcactatgttgcccaggctggtctcaaaccccttgcctcaagtaatcttcccaccttgggcctgtttcttaattttcttctttgtctttttaaatttacattaggactatgaagttttaattgaacagccattaacatatatggttatatgttgcatgatgtttcaatcagtgatggactgcatgtacgatggtggtcccctaagattataatgccatgttttgtttattaaaatttatttaagatttattttattatttttatagatgaggtctcactctgttgccccagctgggtgcagtggcatgatcatacctcactaggctcaagtgatcctcctgcctcagcatccctagtaactaggactacaggcacatgctaccacgcctggctaa

SEQ ID NO: 352750 - DNA, 1662 bp, Homo sapiens
tgagtgggcggggcctcggcgtggtaggcgcgctgcgtaaagaggcctgcagtcccgcggcgcggggcaggttccgggctgcttaggttggcaccggtccgtggtccccgggggcgcagtcgcagcgctcccgccctccaggcgtcagcgagtgcgcggtccagtgcggccggaacctggcgcaactcctagagcggtccttggggagacgcgggtcccagtcctgcggctcctactggggagtgcgctggtcggaagggggatggagacagaagtcacaaactcacatgccaccagccatatgatgtaaacatgtaaactgggccaaggaatacaaaagggagtggtgagctggggacactgaagaatggatgccctgtctagaggagtgaaaatgaagcatttcatacaaacaacatgatttcgggcaatcactttgggaatcaggataaggtgttcccccagtctgcagaaacactggcaacatttacaaagctttaggttcacccctgtaagtgttgctggtgtcagaataggaacctccctgcgctttgaagggatggatgtgacctctcccacattctccggtgctgtgatgtaccttaaacacagcaagggcacctggcctgggtggagcccactcctcagcacccacctcacttcttgcagtattctgcagaccccagccctgtgcctgtgctcctggacagctggagataaggagtgggccctggaagatgctcattcaggccctgctcaagattccagtcctgattgctggactcgctgaagagagactacgcaggaaagccccagccacccatcaaatcagagagaaggaatccaccttcttacgctatggcaggtaagaaagtactcattgtctatgcacaccaggaacccaagtctttcaacggatccttgaagaatgtggctgtagatgaactgagcaggcagggctgcaccgtcacagtgtctgatttgtatgccatgaactttgagccgagggccacagacaaagatatcactggtactctttctaatcctgaggttttcaattatggagtggaaacccacgaagcctacaagcaaaggtctctggctagcgacatcactgatgagcagaaaaaggttcgggaggctgacctagtgatatttcagttcccgctgtactggttcagcgtgccggccatcctgaagggctggatggatagggtgctgtgccagggctttgcctttgacatcccaggattctacgattccggtttgctccagggtaaactagcgctcctttccgtaaccacgggaggcacggccgagatgtacacgaagacaggagtcaatggagattctcgatacttcctgtggccactccagcatggcacattacacttctgtggatttaaagtccttgcccctcagatcagctttgctcctgaaattgcatccgaagaagaaagaaaggggatggtggctgcgtggtcccagaggctgcagaccatctggaaggaagagcccatcccctgcacagcccactggcacttcgggcaataactctgtggcacgtgggcatcacgtaagcagcacactaggaggcccaggcgcaggcaaagagaagatggtgctgtcatgaaataaaattacaacatagctacctgggga

SEQ ID NO: 352751 - DNA, 1118 bp, Homo sapiens
tgagtgggcggggcctcggcgtggtaggcgcgctgcgtaaagaggcctgcagtcccgcggcgcggggcaggttccgggctgcttaggttggcaccggtccgtggtccccgggggcgcagtcgcagcgctcccgccctccaggcgtcagcgagtgcgcggtccagtgcggccggaacctggcgcaactcctagagcggtccttggggagacgcgggtcccagtcctgcggctcctactggggagtgcgctggtcggaagattgctggactcgctgaagagagactacgcaggaaagccccagccacccatcaaatcagagagaaggaatccaccttcttacgctatggcagcaggaacccaagtctttcaacggatccttgaagaatgtggctgtagatgaactgagcaggcagggctgcaccgtcacagtgtctgatttgtatgccatgaactttgagccgagggccacagacaaagatatcactggtactctttctaatcctgaggttttcaattatggagtggaaacccacgaagcctacaagcaaaggtctctggctagcgacatcactgatgagcagaaaaaggttcgggaggctgacctagtgatatttcagttcccgctgtactggttcagcgtgccggccatcctgaagggctggatggatagggtgctgtgccagggctttgcctttgacatcccaggattctacgattccggtttgctccagggtaaactagcgctcctttccgtaaccacgggaggcacggccgagatgtacacgaagacaggagtcaatggagattctcgatacttcctgtggccactccagcatggcacattacacttctgtggatttaaagtccttgcccctcagatcagctttgctcctgaaattgcatccgaagaagaaagaaaggggatggtggctgcgtggtcccagaggctgcagaccatctggaaggaagagcccatcccctgcacagcccactggcacttcgggcaataactctgtggcacgtgggcatcacgtaagcagcacactaggaggcccaggcgcaggcaaagagaagatggtgctgtcatgaaataaaattacaacatagctacctgggga

SEQ ID NO: 352752 - DNA, 962 bp, Homo sapiens
tgagtgggcggggcctcggcgtggtaggcgcgctgcgtaaagaggcctgcagtcccgcggcgcggggcaggttccgggctgcttaggttggcaccggtccgtggtccccgggggcgcagtcgcagcgctcccgccctccaggcgtcagcgagtgcgcggtccagtgcggccggaacctggcgcaactcctagagcggtccttggggagacgcgggtcccagtcctgcggctcctactggggagtgcgctggtcggaagattgctggactcgctgaagagagactacgcaggaaagccccagccacccatcaaatcagagagaaggaatccaccttcttacgctatggcaggtaagaaagtactcattgtctatgcacaccaggaacccaagtctttcaacggatccttgaagaatgtggctgtagatgaactgagcaggcagggctgcaccgtcacagtgtctgatttgtatgccatgaactttgagccgagggccacagacaaagatatcactggtactctttctaatcctgaggttttcaattatggagtggaaacccacgaagcctacaagcaaaggtctctggctagcgacatcactgatgagcagaaaaaggttcgggaggctgacctagtgatatttcagttcccgctgtactggttcagcgtgccggccatcctgaagggctggatggatagggtgctgtgccagggctttgcctttgacatcccaggattctacgattccggtttgctccagggtaaactagcgctcctttccgtaaccacgggaggcacggccgagatgtacacgaagacaggagtcaatggagattctcgatacttcctgtggccactccagttggtttccagtaataaagtcatgttgtctgaagctgggtgcggtggctcacgcctgtaattccagcactctgggaggctgaggcagtggatcacctgag

SEQ ID NO: 352753 - DNA, 2317 bp, Homo sapiens
tgagtgggcggggcctcggcgtggtaggcgcgctgcgtaaagaggcctgcagtcccgcggcgcggggcaggttccgggctgcttaggttggcaccggtccgtggtccccgggggcgcagtcgcagcgctcccgccctccaggcgtcagcgagtgcgcggtccagtgcggccggaacctggcgcaactcctagagcggtccttggggagacgcgggtcccagtcctgcggctcctactggggagtgcgctggtcggaagattgctggactcgctgaagagagactacgcaggaaagccccagccacccatcaaatcagagagaaggaatccaccttcttacgctatggcaggtaagaaagtactcattgtctatgcacaccaggaacccaagtctttcaacggatccttgaagaatgtggctgtagatgaactgagcaggcagggctgcaccgtcacagtgtctgatttgtatgccatgaactttgagccgagggccacagacaaagatatcactggtactctttctaatcctgaggttttcaattatggagtggaaacccacgaagcctacaagcaaaggtctctggctagcgacatcactgatgagcagaaacacgggaggcacggccgagatgtacacgaagacaggagtcaatggagattctcgatacttcctgtggccactccagcatggcacattacacttctgtggatttaaagtccttgcccctcagatcagctttgctcctgaaattgcatccgaagaagaaagaaaggggatggtggctgcgtggtcccagaggctgcagaccatctggaaggaagagcccatcccctgcacagcccactggcacttcgggcaataactctgtggcacgtgggcatcacgtaagcagcacactaggaggcccaggcgcaggcaaagagaagatggtgctgtcatgaaataaaattacaacatagctacctggggatacttttttctttctgttttttgtttgtttttaattttagctttaaggagcacatggccagtactgtttcaggggaatattgggtggcgctggggtttgggcttctattgatcccatcacccaaacagtgagcatagttcccaatagatagtttttcaacacttcctttcctcccttccttcccgcttttggattcccagcatctattgatcccgtcttttcacccctgtgtacccaatgtttagttcccacttataagttagaacatggggaatttggttttgtttctgtgttgattcacttaggataatgacctccagctgcatccacgttactgcaaaggacaggatttcatgtttttttatggctgcatagtattccatggcgtccgtgtaccacactttctttatccagtccactgttgatgggcacctgggttgattccatgtctttgctactgtaaatagttctgtgatgaacatacaagtgcaggcatcttttcatagaatgattttttttttccttttggtagatacccagtaatgggattgctgggttgaagggtaattctatttttagcaaactagaaatatttaatgaagtacatgaatgagtgtcttcagaattgtacacagtgagatcaaatattttaataatgagcttgttatgttgaattctattctgaccatcattcactgagattttcttttctttcttttttaaagagacagagtttcactatgttgcccaggctggtctcaaaccccttgcctcaagtaatcttcccaccttgggcctcccaaagtgctgggattgcaggtgtgagccaccacacctggcccagattttctttaatatttgtctaatatctttccatctccctatattcaagcttcatgtaattttattttctggtaattctctgagcatagagctggatttgctagtttttttattttatgactcaacatgagagtttctatttttcatagaaaagttgaatctgggcctgtttcttaattttcttctttgtctttttaaatttacattaggactatgaagttttaattgaacagccattaacatatatggttatatgttgcatgatgtttcaatcagtgatggactgcatgtacgatggtggtcccctaagattataatgccatgttttgtttattaaaatttatttaagatttattttattatttttatagatgaggtctcactctgttgccccagctgggtgcagtggcatgatcatacctcactaggctcaagtgatcctcctgcctcagcatccctagtaactaggactacaggcacatgctaccacgcctggctaa

SEQ ID NO: 352754 - DNA, 1598 bp, Homo sapiens
gtaggggaggcggggctggagggagatggcgccgcgctcccggatgaacagagaaagcgacaggacgcccttgcatacattaagatatgtatatatggaaatgttaccgggagtcccggttatcccaaaaagggttgtttcctgttgcgtggtgaggccaatgcacgaaaccgaaagggagtgtgtcaagcagtgcaggctgtattcaatggctatggaattggaagatctgaaatcaacttagcttgtgagagctgggaagtttcagagtcgttgtcatggcgaccgtcagttgtcacggcgctggtgggagtgttgtttagcatgagaacaggatgatgataaagccagaggctcttcagaggcgccatcttggatttcgccagcttcagctggtttcgtcctaagaaggaacttcgaaacacaggcattctttttcctgaaaataagcagagttacagctgagtaggaatttagctctgtcccatatgctatcgcattgggcagcaaaagcagggtggggtccagcgaaatcagcaggcactgcaatgagtaacatacccagccacgtttatgcagcatttttacgaaaatgaaaccatactacctgtaaaggaagatatgctaacaaacaacaaaactggcaggaaccaagattcctactgacactacccttagttttaattttccctgacaacaaatgaggttaacagagcataattatctaccgtgaccccttcaaaaagacaggctgtatacatttgcactaagagaagaaatcgtgtaatgtcagcaaatttcccccacttaaagcttctctatttaaaaagcttcacgcacacatgcacgcatatgtcttcaagatgaccacaatttattttgcagtcattctttgcaccagttcccaatttttcccactagcttgcaagctccgtgactcgaggagaccgggggatcagagtttgtttttgcggagaagtgagtcctttatgccccaaatagtgactgacatagagaaggtactcagtaaacactttttaaaggaacgcctgcctgactgaagcttaatgatgtgaggcttctagtgtgataccctaccttgttttaacctgaagtgactcttccttagctaagagagccagacggactccatcgtgactccttcactcgcagccccttacccacccccttcctcaaggacttaacttgtgcaagctgactcccagcacatcaagaatgcaattaactgataagatactgtggcaagctatatccgcagttcccaggaattcgcccggttaatagcacccagagcccctgcgtttgtgtccggttgataacgcccaaagcccggcgtccatcaccttaggatagacttaaagcctctgcacctggaactgtttactttcctgtaaccgtttatccttttaactttttgcctactttacttctgtaagattgtttcaactagactccccctctcccctgtctaaaccaaagtataaaagaaaatctagctccttcttcggggccaagagaatttgagcgctagctgtctctcggctgccggctaataaagactcctgaattcgtctcag

SEQ ID NO: 352755 - DNA, 611 bp, Homo sapiens
  misc_feature (516)..(517): n is a, c, g, or t
tgagtgggcggggcctcggcgtggtaggcgcgctgcgtaaagaggcctgcagtcccgcggcgcggggcaggttccgggctgcttaggttggcaccggtccgtggtccccgggggcgcagtcgcagcgctcccgccctccaggcgtcagcgagtgcgcggtccagtgcggccggaacctggcgcaactcctagagcggtccttggggagacgcgggtcccagtcctgcggctcctactggggagtgcgctggtcggaagattgctggactcgctgaagagagactacgcaggaaagccccagccacccatcaaatcagagagaaggaatccaccttcttacgctatggcaggtaagaaagtactcattgtctatgcacaccaggaacccaagtctttcaacggatccttgaagaatgtggctgtagatgaactgagcaggcagggctgcaccgtcacagtgtctgatttgtatgccatgaactttgagccgagggccacagacaaagatatcactgnnactcttttcctaatccctgagggttttcaactttatgggggtggggaaaccccccggaaggccctaacaatgccacaaggggtcctccctgggg

SEQ ID NO: 352756 - DNA, 2120 bp, Homo sapiens
ctaggcaggatcccgctttctcagggcgtctctctgtttctcttaaggcattccactgattggatggggcccacccaccttctagagggtcatctgcttcactcaaatctaccaatttgaaagttaatctcttccagattggagactattattctaagtgaagtaactcaggaatggaaaaccaaacattgtatgttctcactcataagtgggagctaagctatgaggatgcaaaggcataacaatgacacagttgactttggggactcggggaaagggtgggaagggagtgagggataaaagactacaaattgtgtgcagtgtgcactgctagagtgcactaaatctcacaaatcaccactaaataacttactcatgtaaccaaacaccacctgtttcccaaaaacctatggaaattaaaaaaaaaaagttaatctcatctggaaaataccttttcagcaacatgtcgtctggtatttggccaaatatctggttactgtgacctagtcaaggtgatgtgtaaagttatccatcacaaacagctagattcattccacctacacttcaagggatcgccttgaagaagtcagtatttttgcagagatgcgtctccacccaaaggtcctaggtacctttgagcaattgtgaaagccataacccctcaccccgaaatgacctgtcctcatgcatatagaatcttacaatcacaggggttatggatcctatttagagcctatattgaaatcttgaggacgtcagtagttctctagaatccctgttccaggcgcctctgttcctgagcagtgttatgtgaacagtgtcctctgtctgtggctctgtgtcctggctgagaaaggcagcgctgccttcagggaactgggcccattgctgggagtcagagccttacgtgctcactgtgccccacgtggcttagacagtaccggctacagcccttatcccgactccacgggtgtgagcacagaggctgagtcacctgcccgaagcagcacagcgagtaagtcacagaggggatttgaagccaggctcagagcccaggatttgaccagtgtctctgtgcccactcaagggaggaagagtatcctgagtaagagggaagctgcatgtggatcacggggaagttgctctgccctcacatcagctcctcatgtgtacagctccagatgggtgggtgttgtcggagaattgctcataggaagctacagttccttctccacagtctccccttctagatgctgatctttccagatgacaggcttcctaaaaaccaaccactgagtgagtgctttctgtccgagctggcagtctcttgcactaagcttaggacttctttgaatgtaggagaatcttgactctcatttcttcccaatttgtagctgaaccgtgtgaatggcacgtcatcaccacagtcccctctgagcacatcgggcagggtcgctgctgtggggccttatatccaggttcccagtgccggaagctttcctgtgctgggggaccctataaagccccagtctctcagtattgcctcaaatgctgctcatggaagatccaaatccggtgagtggtcctggccctcttcctgggggagagtttgtgagcagggaatggggcctgcggtggaggggcggggggtggggcaggctcctgaggctctgccccacacatcgtcagactccaggctcagtctccccgtgaggcgcttggagagctgtgttcccctgtggtaacaatcctaaaaggaaaacaagttatttttactgaactagaggtctctactgtgtggcttttcaaaacacaaatgattaattaaaactctgatccatgggccgggtgcagtggctcacgcctgtaatcccagcactttgggaggccaaggcgggtggatcacctgaggtcaggagttcaagaccagcctggccaacatggtgaaaccctgtctttactaaaactacgaaaattagccgggcgtggtggcgtgcacctgtaatcccagctactcaggaggctgaagcgggagaatcacttgaacctgggaggcggaggttgcagtgagatcgtgccactgtgcttcagcctgggcaacaagagtgaaacttcatctc

SEQ ID NO: 352757 - DNA, 447 bp, Homo sapiens
cggccgcggggagaagcagatgcatttggggccggtcatctcctcggtcctctcaggtgcgcggtcggacgctggggcacaggtctggtgggtggcgcagctgtgacccgcctgaaacgaacgttctggggtcgccctgggagtcggcggggtgggcacccgcgcccggagttcccacactctgcaggcgcattcccgtagccttcgcggttgtactgaggaaaggtgccgagtgcacggatttggagagccatcttaggaattcccttttcccgtatctgcaatgttggttcgttttgctttaactggtttgttctccgtgttctgaaggttgaacgaggttcgtttgtagtggtggtgtctttgtcctgcccttaaggatgctttcgcctagaaagacattggccattagatttgccatcgtcctaccgacccttccctttacct

SEQ ID NO: 352758 - DNA, 4943 bp, Homo sapiens
ggcggccgcgacagggccagcgagagccccgcagcccgccgcagctgccgcctcgccgcggccgggccggagagcacggcggcgggagcgcggccttaggaggcggccggagcggtgggcacagctcggcgcggagcgtcctgtcaggcggcggccgagggcgtcgcggactctccccgcgatgatgccgatgatattaactgttttcttgagcaacaatgaacagattttaacagaagttcctataacaccggaaacaacctgtcgagatgttgtagaattttgcaaggaacctggagaaggcagctgccatttagctgaagtgtggaggggaaatggtttcagagaaccctcacataaaacttactgcacctggccgggcactgtggctcactcttgtaatctcaacactttgggaggccgagaacgtcccataccctttgatcatatgatgtacgaacatcttcagaaatggggtccacggagggaagaagtgaaatttttccttcgacacgaggactccccaactgagaacagtgaacaaggtggccgtcagacccaagagcaacgaactcagagaaatgtaataaatgtacctggagaaaaacgtactgaaaatggggttgggaatccacgtgttgaacttaccctctcagagctccaagatatggcagctaggcaacagcagcagattgaaaatcagcagcagatgttggttgccaaggaacagcgtttacattttctaaagcaacaggagcgccgtcagcagcagtctatttctgaaaatgaaaagcttcagaaattgaaagaacgagttgaagcccaggagaacaagctgaagaaaattcgtgcaatgagaggacaagtcgactacagcaaaatcatgaacggcaatctgtctgctgaaatagaaaggttcagtgccatgttccaggaaaagaagcaggaagtacagactgcaattttaagggttgatcagcttagtcagcaattggaagatttaaagaaaggaaaactgaatgggttccagtcttacaatggcaaattgacgggaccagcggcggtggagttaaaaagactgtaccaagaactacagattcgtaaccaacttaaccaggaacaaaattcaaaacttcagcagcagaaggaactcttaaataagcgcaacatggaggtggccatgatggacaagcgaatcagtgaactgcgtgaacgtctctatgggaaaaaaattcagctgaaccgtgtgaatggcacgtcatcaccacagtcccctctgagcacatcgggcagggtcgctgctgtggggccttatatccaggttcccagtgccggaagctttcctgtgctgggggaccctataaagccccagtctctcagtattgcctcaaatgctgctcatggaagatccaaatccgctaatgatggaaactggccaacattaaaacagaattctagctcttccgtgaaaccagtgcaggtggccggtgcagactggaaggatccgagcgtggaggggtctgtcaagcagggcactgtctccagccagcctgtgcccttctcagcactgggacccacggagaagccgggcatcgagattggtaaagtgccacctcccatcccgggtgtaggcaagcagctgcctccaagctatgggacatacccaagtcctacacctctgggtcctgggtcgacaagctccctggaaaggaggaaggaaggcagcttgcccaggcccagtgcaggcctgccaagtcgacagaggcccaccctgctgcccgccacaggcagcaccccccagccaggctcctcacaacagattcagcagaggatttccgtaccgccaagtcccacgtacccgccagcgggaccacctgcatttccagctggggacagcaagcctgaactcccactgacagtggccattaggcctttcctggctgataaagggtcaaggccacagtctcccaggaaaggaccccagacagtgaattcaagttccatatactccatgtacctccagcaagccacaccacctaagaattaccagccggcagcacacagcgccttaaataagtcagttaaagcagtgtatggtaagcccgttttaccttcgggttcaacctctccatcgccgctgccgtttcttcacgggtcactgtccacgggcacaccacagcctcagccaccttcagaaagtactgagaaagagcctgagcaggatggccccgccgcccccgcagatggcagcaccgtggagagcctgccacggccactcagccccaccaagctcacgcccatcgtgcattcgccactgcgctaccagagtgatgcagacctggaggccctccgcaggaagctggccaacgcgccccggcccctgaaaaagcgcagctccatcacagagcccgagggccccggcgggcccaacatccagaagctgctgtaccagcgcttcaacaccctggccggtggcatggagggcacccctttctaccagcccagcccctcccaggacttcatgggcaccttggccgatgtggacaatggaaacaccaatgccaatggaaacctggaagagctcccccctgcccagcccacagccccactccccgctgagcctgccccgtcatcagatgccaatgataatgagttaccttcccccgaaccagaggagctcatctgtccccaaaccacccaccaaactgccgagccggcagaggacaataacaacaacgtggccacggtccccaccacggagcagatcccgagtcctgtggctgaggccccatctccaggggaagagcaggtccctccagcacctcttccccctgccagccaccctcctgccacctccacgaacaagcggaccaacttgaagaagcccaactcggagcggacggggcacgggctgagagtccggtttaaccccctggcactgctcctagacgcgtctctggaaggagagttcgatctggtgcagaggatcatctatgaggtggaagatcccagcaagcccaacgacgaagggatcaccccactgcacaacgccgtctgcgccggccaccatcacatcgtgaagttcctgctggattttggtgtcaacgtgaatgctgctgatagtgatggatggacgccgctgcactgcgctgcctcttgtaacagcgttcacctctgcaaacagctggtggagagtggtgccgccatttttgcctcaaccataagcgacattgaaactgctgcagacaagtgtgaggagatggaggaaggctacatccagtgctcccagtttctatatggggtgcaggaaaagctgggtgtgatgaacaaaggtgtggcgtatgctctgtgggactacgaggcccagaacagtgacgagctgtccttccacgaaggggacgccctcaccatcctgaggcgcaaggacgaaagcgagactgagtggtggtgggctcgccttggagaccgggagggctatgtgcccaaaaacctgctggggctgtatccacggatcaaaccccgacagcgaacactcgcctgaacttccttttggagcaccgcatggtcttgccagctaccaggagccacttaagagattattgtgctgttttccaggaaagctgcagctagaaaatggtcttaatggtgctcactttagcagacagcgtccacaatgtgaatcctacagtttccaggtgaggccctttctccagtttgcccattaactgggagaggtactttcgcctccaaggactgaattttgccaattactataaatccaaataaatacccactttcaaaacacccacccctcttgccattaagaagtcccataacccccggttggttgccagtgaagacagaagctcttactgacttggccccgaggccatcaccccctccagcagtgaacactgtccgccgctgtgaggcctgctcccctgcgaccgccctgccccccgtcaccgaatcggacactcatcctttctcacacttcccacacatgatccttcttcccttcatcaccaaaggagcctctgtatggaaacatgtccagtgttgctgcccagtgtgtatgcctcccagtacccactctgctcggccgccttgggggttccgcttcctgttccagttcacctaaaggctgattgtgcaggcccagcactgtggctggactgccgcgccacgggcaccaggacccctaagaccaagtgacaactgggagagcctcagcatatactcttctcctccgatctcacagcctgtcatgctgctcagtgtggttctcacccctgcaagctcaaattcagttccctgaatggagtcaggtgctggaggccgtggcagcggagggtggttggggttggggctgggggtggactggtgtgagggcagaccagggccaggtagacggggctgtttggtgcctgaaggatggcagacgcctggtgtcaggaggggccgccaccaaggagcagcagctggggcagaggagctggggtcaggggccacccctctctgccgatctccctgcctgggctggctgtgaggccacctttgtcccaggcccagcctcaaggcaaggagggcgcttcactgaggtgtgaattgtacgtacaggctttttatataccaaaagtattttttgactagaccattcaaagctacccgaactatgttggaaattttttttttctcattaaaatacaggcccttaggctctatttttcatgtatgagtcgtgtgtaatttatgtaaaaatgtgtgtacagactcactgatgcagcactgtagcccatcaccttggagcactgactgtacatagtgtggtgaagaaaagtgaacgcccttgtagagcagcccgaccacaggagcatggccgctgccagcccagacgctgctgacgctgtgtaaatgtgcacaataaacccgtctcaccccgg

SEQ ID NO: 352759 - DNA, 4689 bp, Homo sapiens
ggcggccgcgacagggccagcgagagccccgcagcccgccgcagctgccgcctcgccgcggccgggccggagagcacggcggcgggagcgcggccttaggaggcggccggagcggtgggcacagctcggcgcggagcgtcctgtcaggcggcggccgagggcgtcgcggactctccccgcgatgatgccgatgatattaactgttttcttgagcaacaatgaacagattttaacagaagttcctataacaccggaaacaacctgtcgagatgttgtagaattttgcaaggaacctggagaaggcagctgccatttagctgaagtgtggaggggaaatgaacgtcccataccctttgatcatatgatgtacgaacatcttcagaaatggggtccacggagggaagaagtgaaatttttccttcgacacgaggactccccaactgagaacagtgaacaaggtggccgtcagacccaagagcaacgaactcagagaaatgtaataaatgtacctggagaaaaacgtactgaaaatggggttgggaatccacgtgttgaacttaccctctcagagctccaagatatggcagctaggcaacagcagcagattgaaaatcagcagcagatgttggttgccaaggaacagcgtttacattttctaaagcaacaggagcgccgtcagcagcagtctatttctgaaaatgaaaagcttcagaaattgaaagaacgagttgaagcccaggagaacaagctgaagaaaattcgtgcaatgagaggacaagtcgactacagcaaaatcatgaacggcaatctgtctgctgaaatagaaaggttcagtgccatgttccaggaaaagaagcaggaagtacagactgcaattttaagggttgatcagcttagtcagcaattggaagatttaaagaaaggaaaactgaatgggttccagtcttacaatggcaaattgacgggaccagcggcggtggagttaaaaagactgtaccaagaactacagattcgtaaccaacttaaccaggaacaaaattcaaaacttcagcagcagaaggaactcttaaataagcgcaacatggaggtggccatgatggacaagcgaatcagtgaactgcgtgaacgtctctatgggaaaaaaattcagctgaaccgtgtgaatggcacgtcatcaccacagtcccctctgagcacatcgggcagggtcgctgctgtggggccttatatccaggttcccagtgccggaagctttcctgtgctgggggaccctataaagccccagtctctcagtattgcctcaaatgctgctcatggaagatccaaatccgctaatgatggaaactggccaacattaaaacagaattctagctcttccgtgaaaccagtgcaggtggccggtgcagactggaaggatccgagcgtggaggggtctgtcaagcagggcactgtctccagccagcctgtgcccttctcagcactgggacccacggagaagccgggcatcgagattggtaaagtgccacctcccatcccgggtgtaggcaagcagctgcctccaagctatgggacatacccaagtcctacacctctgggtcctgggtcgacaagctccctggaaaggaggaaggaaggcagcttgcccaggcccagtgcaggcctgccaagtcgacagaggcccaccctgctgcccgccacaggcagcaccccccagccaggctcctcacaacagattcagcagaggatttccgtaccgccaagtcccacgtacccgccagcgggaccacctgcatttccagctggggacagcaagcctgaactcccactgacagtggccattaggcctttcctggctgataaagggtcaaggccacagtctcccaggaaaggaccccagacagtgaattcaagttccatatactccatgtacctccagcaagccacaccacctaagaattaccagccggcagcacacagcgccttaaataagtcagttaaagcagtgtatggtaagcccgttttaccttcgggttcaacctctccatcgccgctgccgtttcttcacgggtcactgtccacgggcacaccacagcctcagccaccttcagaaagtactgagaaagagcctgagcaggatggccccgccgcccccgcagatggcagcaccgtggagagcctgccacggccactcagccccaccaagctcacgcccatcgtgcattcgccactgcgctaccagagtgatgcagacctggaggccctccgcaggaagctggccaacgcgccccggcccctgaaaaagcgcagctccatcacagagcccgagggccccggcgggcccaacatccagaagctgctgtaccagcgcttcaacaccctggccggtggcatggagggcacccctttctaccagcccagcccctcccaggacttcatgggcaccttggccgatgtggacaatggaaacaccaatgccaatggaaacctggaagagctcccccctgcccagcccacagccccactccccgctgagcctgccccgtcatcagatgccaatgataatgagttaccttcccccgaaccagaggagctcatctgtccccaaaccacccaccaaactgccgagccggcagaggacaataacaacaacgtggccacggtccccaccacggagcagatcccgagtcctgtggctgaggccccatctccaggggaagagcaggtccctccagcacctcttccccctgccagccaccctcctgccacctccacgaacaagcggaccaacttgaagaagcccaactcggagcggacggggcacgggctgagagtccggtttaaccccctggcactgctcctagacgcgtctctggaaggagagttcgatctggtgcagaggatcatctatgaggtggaagatcccagcaagcccaacgacgaagggatcaccccactgcacaacgccgtctgcgccggccaccatcacatcgtgaagttcctgctggattttggtgtcaacgtgaatgctgctgatagtgatggatggggtgcaggaaaagctgggtgtgatgaacaaaggtgtggcgtatgctctgtgggactacgaggcccagaacagtgacgagctgtccttccacgaaggggacgccctcaccatcctgaggcgcaaggacgaaagcgagactgagtggtggtgggctcgccttggagaccgggagggctatgtgcccaaaaacctgctggggctgtatccacggatcaaaccccgacagcgaacactcgcctgaacttccttttggagcaccgcatggtcttgccagctaccaggagccacttaagagattattgtgctgttttccaggaaagctgcagctagaaaatggtcttaatggtgctcactttagcagacagcgtccacaatgtgaatcctacagtttccaggtgaggccctttctccagtttgcccattaactgggagaggtactttcgcctccaaggactgaattttgccaattactataaatccaaataaatacccactttcaaaacacccacccctcttgccattaagaagtcccataacccccggttggttgccagtgaagacagaagctcttactgacttggccccgaggccatcaccccctccagcagtgaacactgtccgccgctgtgaggcctgctcccctgcgaccgccctgccccccgtcaccgaatcggacactcatcctttctcacacttcccacacatgatccttcttcccttcatcaccaaaggagcctctgtatggaaacatgtccagtgttgctgcccagtgtgtatgcctcccagtacccactctgctcggccgccttgggggttccgcttcctgttccagttcacctaaaggctgattgtgcaggcccagcactgtggctggactgccgcgccacgggcaccaggacccctaagaccaagtgacaactgggagagcctcagcatatactcttctcctccgatctcacagcctgtcatgctgctcagtgtggttctcacccctgcaagctcaaattcagttccctgaatggagtcaggtgctggaggccgtggcagcggagggtggttggggttggggctgggggtggactggtgtgagggcagaccagggccaggtagacggggctgtttggtgcctgaaggatggcagacgcctggtgtcaggaggggccgccaccaaggagcagcagctggggcagaggagctggggtcaggggccacccctctctgccgatctccctgcctgggctggctgtgaggccacctttgtcccaggcccagcctcaaggcaaggagggcgcttcactgaggtgtgaattgtacgtacaggctttttatataccaaaagtattttttgactagaccattcaaagctacccgaactatgttggaaattttttttttctcattaaaatacaggcccttaggctctatttttcatgtatgagtcgtgtgtaatttatgtaaaaatgtgtgtacagactcactgatgcagcactgtagcccatcaccttggagcactgactgtacatagtgtggtgaagaaaagtgaacgcccttgtagagcagcccgaccacaggagcatggccgctgccagcccagacgctgctgacgctgtgtaaatgtgcacaataaacccgtctcaccccgg

SEQ ID NO: 352760 - DNA, 4286 bp, Homo sapiens
  misc_feature (126)..(126): n is a, c, g, or t
gaactcctgacctcaggtgatccacctacctcagcctctcaaagtgctggaattacagatgtgagccaccgcgcccagccttcaattttcaaagttacatttttctttcttttgttaggagttgtnttgacagggagttccgggacgggaccgcgtggtcgaggacgaggtggtcctgtggttgcgagaaggggggggggggggggggggggggggggggggggggggggggggggggggggggggggggcggggcgggggggggggcgccgtcagcagcagtctatttctgaaaatgaaaagcttcagaaattgaaagaacgagttgaagcccaggagaacaagctgaagaaaattcgtgcaatgagaggacaagtcgactacagcaaaatcatgaacggcaatctgtctgctgaaatagaaaggttcagtgccatgttccaggaaaagaagcaggaagtacagactgcaattttaagggttgatcagcttagtcagcaattggaagatttaaagaaaggaaaactgaatgggttccagtcttacaatggcaaattgacgggaccagcggcggtggagttaaaaagactgtaccaagaactacagattcgtaaccaacttaaccaggaacaaaattcaaaacttcagcagcagaaggaactcttaaataagcgcaacatggaggtggccatgatggacaagcgaatcagtgaactgcgtgaacgtctctatgggaaaaaaattcagctgaaccgtgtgaatggcacgtcatcaccacagtcccctctgagcacatcgggcagggtcgctgctgtggggccttatatccaggttcccagtgccggaagctttcctgtgctgggggaccctataaagccccagtctctcagtattgcctcaaatgctgctcatggaagatccaaatccgctaatgatggaaactggccaacattaaaacagaattctagctcttccgtgaaaccagtgcaggtggccggtgcagactggaaggatccgagcgtggaggggtctgtcaagcagggcactgtctccagccagcctgtgcccttctcagcactgggacccacggagaagccgggcatcgagattggtaaagtgccacctcccatcccgggtgtaggcaagcagctgcctccaagctatgggacatacccaagtcctacacctctgggtcctgggtcgacaagctccctggaaaggaggaaggaaggcagcttgcccaggcccagtgcaggcctgccaagtcgacagaggcccaccctgctgcccgccacaggcagcaccccccagccaggctcctcacaacagattcagcagaggatttccgtaccgccaagtcccacgtacccgccagcgggaccacctgcatttccagctggggacagcaagcctgaactcccactgacagtggccattaggcctttcctggctgataaagggtcaaggccacagtctcccaggaaaggaccccagacagtgaattcaagttccatatactccatgtacctccagcaagccacaccacctaagaattaccagccggcagcacacagcgccttaaataagtcagttaaagcagtgtatggtaagcccgttttaccttcgggttcaacctctccatcgccgctgccgtttcttcacgggtcactgtccacgggcacaccacagcctcagccaccttcagaaagtactgagaaagagcctgagcaggatggccccgccgcccccgcagatggcagcaccgtggagagcctgccacggccactcagccccaccaagctcacgcccatcgtgcattcgccactgcgctaccagagtgatgcagacctggaggccctccgcaggaagctggccaacgcgccccggcccctgaaaaagcgcagctccatcacagagcccgagggccccggcgggcccaacatccagaagctgctgtaccagcgcttcaacaccctggccggtggcatggagggcacccctttctaccagcccagcccctcccaggacttcatgggcaccttggccgatgtggacaatggaaacaccaatgccaatggaaacctggaagagctcccccctgcccagcccacagccccactccccgctgagcctgccccgtcatcagatgccaatgataatgagttaccttcccccgaaccagaggagctcatctgtccccaaaccacccaccaaactgccgagccggcagaggacaataacaacaacgtggccacggtccccaccacggagcagatcccgagtcctgtggctgaggccccatctccaggggaagagcaggtccctccagcacctcttccccctgccagccaccctcctgccacctccacgaacaagcggaccaacttgaagaagcccaactcggagcggacggggcacgggctgagagtccggtttaaccccctggcactgctcctagacgcgtctctggaaggagagttcgatctggtgcagaggatcatctatgaggtggaagatcccagcaagcccaacgacgaagggatcaccccactgcacaacgccgtctgcgccggccaccatcacatcgtgaagttcctgctggattttggtgtcaacgtgaatgctgctgatagtgatggatggggtgcaggaaaagctgggtgtgatgaacaaaggtgtggcgtatgctctgtgggactacgaggcccagaacagtgacgagctgtccttccacgaaggggacgccctcaccatcctgaggcgcaaggacgaaagcgagactgagtggtggtgggctcgccttggagaccgggagggctatgtgcccaaaaacctgctggggctgtatccacggatcaaaccccgacagcgaacactcgcctgaacttccttttggagcaccgcatggtcttgccagctaccaggagccacttaagagattattgtgctgttttccaggaaagctgcagctagaaaatggtcttaatggtgctcactttagcagacagcgtccacaatgtgaatcctacagtttccaggtgaggccctttctccagtttgcccattaactgggagaggtactttcgcctccaaggactgaattttgccaattactataaatccaaataaatacccactttcaaaacacccacccctcttgccattaagaagtcccataacccccggttggttgccagtgaagacagaagctcttactgacttggccccgaggccatcaccccctccagcagtgaacactgtccgccgctgtgaggcctgctcccctgcgaccgccctgccccccgtcaccgaatcggacactcatcctttctcacacttcccacacatgatccttcttcccttcatcaccaaaggagcctctgtatggaaacatgtccagtgttgctgcccagtgtgtatgcctcccagtacccactctgctcggccgccttgggggttccgcttcctgttccagttcacctaaaggctgattgtgcaggcccagcactgtggctggactgccgcgccacgggcaccaggacccctaagaccaagtgacaactgggagagcctcagcatatactcttctcctccgatctcacagcctgtcatgctgctcagtgtggttctcacccctgcaagctcaaattcagttccctgaatggagtcaggtgctggaggccgtggcagcggagggtggttggggttggggctgggggtggactggtgtgagggcagaccagggccaggtagacggggctgtttggtgcctgaaggatggcagacgcctggtgtcaggaggggccgccaccaaggagcagcagctggggcagaggagctggggtcaggggccacccctctctgccgatctccctgcctgggctggctgtgaggccacctttgtcccaggcccagcctcaaggcaaggagggcgcttcactgaggtgtgaattgtacgtacaggctttttatataccaaaagtattttttgactagaccattcaaagctacccgaactatgttggaaattttttttttctcattaaaatacaggcccttaggctctatttttcatgtatgagtcgtgtgtaatttatgtaaaaatgtgtgtacagactcactgatgcagcactgtagcccatcaccttggagcactgactgtacatagtgtggtgaagaaaagtgaacgcccttgtagagcagcccgaccacaggagcatggccgctgccagcccagacgctgctgacgctgtgtaaatgtgcacaataaacccgtctcaccccgg

SEQ ID NO: 352761 - DNA, 3987 bp, Homo sapiens
attcgaatcgagctcggtccctctataccttctgatgatttttctcctctaccttgctgtttttacaggcccactaatttgcctgcttgactaaaataaggacgagttatctgctgaaatagaaaggttcagtgccatgttccaggaaaagaagcaggaagtacagactgcaattttaagggttgatcagcttagtcagcaattggaagatttaaagaaaggaaaactgaatgggttccagtcttacaatggcaaattgacgggaccagcggcggtggagttaaaaagactgtaccaagaactacagattcgtaaccaacttaaccaggaacaaaattcaaaacttcagcagcagaaggaactcttaaataagcgcaacatggaggtggccatgatggacaagcgaatcagtgaactgcgtgaacgtctctatgggaaaaaaattcagctgaaccgtgtgaatggcacgtcatcaccacagtcccctctgagcacatcgggcagggtcgctgctgtggggccttatatccaggttcccagtgccggaagctttcctgtgctgggggaccctataaagccccagtctctcagtattgcctcaaatgctgctcatggaagatccaaatccgctaatgatggaaactggccaacattaaaacagaattctagctcttccgtgaaaccagtgcaggtggccggtgcagactggaaggatccgagcgtggaggggtctgtcaagcagggcactgtctccagccagcctgtgcccttctcagcactgggacccacggagaagccgggcatcgagattggtaaagtgccacctcccatcccgggtgtaggcaagcagctgcctccaagctatgggacatacccaagtcctacacctctgggtcctgggtcgacaagctccctggaaaggaggaaggaaggcagcttgcccaggcccagtgcaggcctgccaagtcgacagaggcccaccctgctgcccgccacaggcagcaccccccagccaggctcctcacaacagattcagcagaggatttccgtaccgccaagtcccacgtacccgccagcgggaccacctgcatttccagctggggacagcaagcctgaactcccactgacagtggccattaggcctttcctggctgataaagggtcaaggccacagtctcccaggaaaggaccccagacagtgaattcaagttccatatactccatgtacctccagcaagccacaccacctaagaattaccagccggcagcacacagcgccttaaataagtcagttaaagcagtgtatggtaagcccgttttaccttcgggttcaacctctccatcgccgctgccgtttcttcacgggtcactgtccacgggcacaccacagcctcagccaccttcagaaagtactgagaaagagcctgagcaggatggccccgccgcccccgcagatggcagcaccgtggagagcctgccacggccactcagccccaccaagctcacgcccatcgtgcattcgccactgcgctaccagagtgatgcagacctggaggccctccgcaggaagctggccaacgcgccccggcccctgaaaaagcgcagctccatcacagagcccgagggccccggcgggcccaacatccagaagctgctgtaccagcgcttcaacaccctggccggtggcatggagggcacccctttctaccagcccagcccctcccaggacttcatgggcaccttggccgatgtggacaatggaaacaccaatgccaatggaaacctggaagagctcccccctgcccagcccacagccccactccccgctgagcctgccccgtcatcagatgccaatgataatgagttaccttcccccgaaccagaggagctcatctgtccccaaaccacccaccaaactgccgagccggcagaggacaataacaacaacgtggccacggtccccaccacggagcagatcccgagtcctgtggctgaggccccatctccaggggaagagcaggtccctccagcacctcttccccctgccagccaccctcctgccacctccacgaacaagcggaccaacttgaagaagcccaactcggagcggacggggcacgggctgagagtccggtttaaccccctggcactgctcctagacgcgtctctggaaggagagttcgatctggtgcagaggatcatctatgaggtggaagatcccagcaagcccaacgacgaagggatcaccccactgcacaacgccgtctgcgccggccaccatcacatcgtgaagttcctgctggattttggtgtcaacgtgaatgctgctgatagtgatggatggggtgcaggaaaagctgggtgtgatgaacaaaggtgtggcgtatgctctgtgggactacgaggcccagaacagtgacgagctgtccttccacgaaggggacgccctcaccatcctgaggcgcaaggacgaaagcgagactgagtggtggtgggctcgccttggagaccgggagggctatgtgcccaaaaacctgctggggctgtatccacggatcaaaccccgacagcgaacactcgcctgaacttccttttggagcaccgcatggtcttgccagctaccaggagccacttaagagattattgtgctgttttccaggaaagctgcagctagaaaatggtcttaatggtgctcactttagcagacagcgtccacaatgtgaatcctacagtttccaggtgaggccctttctccagtttgcccattaactgggagaggtactttcgcctccaaggactgaattttgccaattactataaatccaaataaatacccactttcaaaacacccacccctcttgccattaagaagtcccataacccccggttggttgccagtgaagacagaagctcttactgacttggccccgaggccatcaccccctccagcagtgaacactgtccgccgctgtgaggcctgctcccctgcgaccgccctgccccccgtcaccgaatcggacactcatcctttctcacacttcccacacatgatccttcttcccttcatcaccaaaggagcctctgtatggaaacatgtccagtgttgctgcccagtgtgtatgcctcccagtacccactctgctcggccgccttgggggttccgcttcctgttccagttcacctaaaggctgattgtgcaggcccagcactgtggctggactgccgcgccacgggcaccaggacccctaagaccaagtgacaactgggagagcctcagcatatactcttctcctccgatctcacagcctgtcatgctgctcagtgtggttctcacccctgcaagctcaaattcagttccctgaatggagtcaggtgctggaggccgtggcagcggagggtggttggggttggggctgggggtggactggtgtgagggcagaccagggccaggtagacggggctgtttggtgcctgaaggatggcagacgcctggtgtcaggaggggccgccaccaaggagcagcagctggggcagaggagctggggtcaggggccacccctctctgccgatctccctgcctgggctggctgtgaggccacctttgtcccaggcccagcctcaaggcaaggagggcgcttcactgaggtgtgaattgtacgtacaggctttttatataccaaaagtattttttgactagaccattcaaagctacccgaactatgttggaaattttttttttctcattaaaatacaggcccttaggctctatttttcatgtatgagtcgtgtgtaatttatgtaaaaatgtgtgtacagactcactgatgcagcactgtagcccatcaccttggagcactgactgtacatagtgtggtgaagaaaagtgaacgcccttgtagagcagcccgaccacaggagcatggccgctgccagcccagacgctgctgacgctgtgtaaatgtgcacaataaacccgtctcaccccgg

SEQ ID NO: 352762 - DNA, 3624 bp, Homo sapiens
gatgtcccagtgctgtttttgtttctggcagagtgttattcttaggttggttcaactacattgagaaaagttttacgtaagttctgtgttcttttcaagctaatgatggaaactggccaacattaaaacagaattctagctcttccgtgaaaccagtgcaggtggccggtgcagactggaaggatccgagcgtggaggggtctgtcaagcagggcactgtctccagccagcctgtgcccttctcagcactgggacccacggagaagccgggcatcgagattggtaaagtgccacctcccatcccgggtgtaggcaagcagctgcctccaagctatgggacatacccaagtcctacacctctgggtcctgggtcgacaagctccctggaaaggaggaaggaaggcagcttgcccaggcccagtgcaggcctgccaagtcgacagaggcccaccctgctgcccgccacaggcagcaccccccagccaggctcctcacaacagattcagcagaggatttccgtaccgccaagtcccacgtacccgccagcgggaccacctgcatttccagctggggacagcaagcctgaactcccactgacagtggccattaggcctttcctggctgataaagggtcaaggccacagtctcccaggaaaggaccccagacagtgaattcaagttccatatactccatgtacctccagcaagccacaccacctaagaattaccagccggcagcacacagcgccttaaataagtcagttaaagcagtgtatggtaagcccgttttaccttcgggttcaacctctccatcgccgctgccgtttcttcacgggtcactgtccacgggcacaccacagcctcagccaccttcagaaagtactgagaaagagcctgagcaggatggccccgccgcccccgcagatggcagcaccgtggagagcctgccacggccactcagccccaccaagctcacgcccatcgtgcattcgccactgcgctaccagagtgatgcagacctggaggccctccgcaggaagctggccaacgcgccccggcccctgaaaaagcgcagctccatcacagagcccgagggccccggcgggcccaacatccagaagctgctgtaccagcgcttcaacaccctggccggtggcatggagggcacccctttctaccagcccagcccctcccaggacttcatgggcaccttggccgatgtggacaatggaaacaccaatgccaatggaaacctggaagagctcccccctgcccagcccacagccccactccccgctgagcctgccccgtcatcagatgccaatgataatgagttaccttcccccgaaccagaggagctcatctgtccccaaaccacccaccaaactgccgagccggcagaggacaataacaacaacgtggccacggtccccaccacggagcagatcccgagtcctgtggctgaggccccatctccaggggaagagcaggtccctccagcacctcttccccctgccagccaccctcctgccacctccacgaacaagcggaccaacttgaagaagcccaactcggagcggacggggcacgggctgagagtccggtttaaccccctggcactgctcctagacgcgtctctggaaggagagttcgatctggtgcagaggatcatctatgaggtggaagatcccagcaagcccaacgacgaagggatcaccccactgcacaacgccgtctgcgccggccaccatcacatcgtgaagttcctgctggattttggtgtcaacgtgaatgctgctgatagtgatggatggacgccgctgcactgcgctgcctcttgtaacagcgttcacctctgcaaacagctggtggagagtggtgccgccatttttgcctcaaccataagcgacattgaaactgctgcagacaagtgtgaggagatggaggaaggctacatccagtgctcccagtttctatatggggtgcaggaaaagctgggtgtgatgaacaaaggtgtggcgtatgctctgtgggactacgaggcccagaacagtgacgagctgtccttccacgaaggggacgccctcaccatcctgaggcgcaaggacgaaagcgagactgagtggtggtgggctcgccttggagaccgggagggctatgtgcccaaaaacctgctggggctgtatccacggatcaaaccccgacagcgaacactcgcctgaacttccttttggagcaccgcatggtcttgccagctaccaggagccacttaagagattattgtgctgttttccaggaaagctgcagctagaaaatggtcttaatggtgctcactttagcagacagcgtccacaatgtgaatcctacagtttccaggtgaggccctttctccagtttgcccattaactgggagaggtactttcgcctccaaggactgaattttgccaattactataaatccaaataaatacccactttcaaaacacccacccctcttgccattaagaagtcccataacccccggttggttgccagtgaagacagaagctcttactgacttggccccgaggccatcaccccctccagcagtgaacactgtccgccgctgtgaggcctgctcccctgcgaccgccctgccccccgtcaccgaatcggacactcatcctttctcacacttcccacacatgatccttcttcccttcatcaccaaaggagcctctgtatggaaacatgtccagtgttgctgcccagtgtgtatgcctcccagtacccactctgctcggccgccttgggggttccgcttcctgttccagttcacctaaaggctgattgtgcaggcccagcactgtggctggactgccgcgccacgggcaccaggacccctaagaccaagtgacaactgggagagcctcagcatatactcttctcctccgatctcacagcctgtcatgctgctcagtgtggttctcacccctgcaagctcaaattcagttccctgaatggagtcaggtgctggaggccgtggcagcggagggtggttggggttggggctgggggtggactggtgtgagggcagaccagggccaggtagacggggctgtttggtgcctgaaggatggcagacgcctggtgtcaggaggggccgccaccaaggagcagcagctggggcagaggagctggggtcaggggccacccctctctgccgatctccctgcctgggctggctgtgaggccacctttgtcccaggcccagcctcaaggcaaggagggcgcttcactgaggtgtgaattgtacgtacaggctttttatataccaaaagtattttttgactagaccattcaaagctacccgaactatgttggaaattttttttttctcattaaaatacaggcccttaggctctatttttcatgtatgagtcgtgtgtaatttatgtaaaaatgtgtgtacagactcactgatgcagcactgtagcccatcaccttggagcactgactgtacatagtgtggtgaagaaaagtgaacgcccttgtagagcagcccgaccacaggagcatggccgctgccagcccagacgctgctgacgctgtgtaaatgtgcacaataaacccgtctcaccccgg

SEQ ID NO: 352763 - DNA, 2368 bp, Homo sapiens
tcacaagtcatttattccacacattacttgagaacatactatgtgccctacactggactctaggtttgaaattatccatgaaaacagccatgtgatgccctctttggcccaagctcccacaacagagccaagcaacaaactctcaggctgtgtggcagggctaggggaggcacagcagcccccaggtgagtcccgccagtgtgaggaggaggctgccgtcacagtggcaccaccacagggaagggaagctccccatggtcaccacaactgggtctcagaagcagagtgtcccacagaagggccctttcttgggaacccacaagtagctgctcagtcagggctcagttgtgtgtagtttgttcattaccatccaagagcagtcacagctgctctagctagtgactttagaaatctgttctggctgtgattgctaagcgtcaccttaagaacagcacactcttgccctggggctcaggagctcgtttgtcctgtctgtcctgcaggacttagaaagggccggcagcaggagcagcagctgggccgggcaggggaggtatcgggtgggggccctagtcttcaatagtgtctcatctccctcgctggcctctgtggggcctgctgagagcagcctcggcagcagcacgactgtgtcctgttcctcgagcagggtcccttgctgcaggccaccctctgctgaggcctgaccattgctctctggctccaggggtgcaggaaaagctgggtgtgatgaacaaaggtgtggcgtatgctctgtgggactacgaggcccagaacagtgacgagctgtccttccacgaaggggacgccctcaccatcctgaggcgcaaggacgaaagcgagactgagtggtggtgggctcgccttggagaccgggagggctatgtgcccaaaaacctgctggggctgtatccacggatcaaaccccgacagcgaacactcgcctgaacttccttttggagcaccgcatggtcttgccagctaccaggagccacttaagagattattgtgctgttttccaggaaagctgcagctagaaaatggtcttaatggtgctcactttagcagacagcgtccacaatgtgaatcctacagtttccaggtgaggccctttctccagtttgcccattaactgggagaggtactttcgcctccaaggactgaattttgccaattactataaatccaaataaatacccactttcaaaacacccacccctcttgccattaagaagtcccataacccccggttggttgccagtgaagacagaagctcttactgacttggccccgaggccatcaccccctccagcagtgaacactgtccgccgctgtgaggcctgctcccctgcgaccgccctgccccccgtcaccgaatcggacactcatcctttctcacacttcccacacatgatccttcttcccttcatcaccaaaggagcctctgtatggaaacatgtccagtgttgctgcccagtgtgtatgcctcccagtacccactctgctcggccgccttgggggttccgcttcctgttccagttcacctaaaggctgattgtgcaggcccagcactgtggctggactgccgcgccacgggcaccaggacccctaagaccaagtgacaactgggagagcctcagcatatactcttctcctccgatctcacagcctgtcatgctgctcagtgtggttctcacccctgcaagctcaaattcagttccctgaatggagtcaggtgctggaggccgtggcagcggagggtggttggggttggggctgggggtggactggtgtgagggcagaccagggccaggtagacggggctgtttggtgcctgaaggatggcagacgcctggtgtcaggaggggccgccaccaaggagcagcagctggggcagaggagctggggtcaggggccacccctctctgccgatctccctgcctgggctggctgtgaggccacctttgtcccaggcccagcctcaaggcaaggagggcgcttcactgaggtgtgaattgtacgtacaggctttttatataccaaaagtattttttgactagaccattcaaagctacccgaactatgttggaaattttttttttctcattaaaatacaggcccttaggctctatttttcatgtatgagtcgtgtgtaatttatgtaaaaatgtgtgtacagactcactgatgcagcactgtagcccatcaccttggagcactgactgtacatagtgtggtgaagaaaagtgaacgcccttgtagagcagcccgaccacaggagcatggccgctgccagcccagacgctgctgacgctgtgtaaatgtgcacaataaacccgtctcaccccgg

SEQ ID NO: 352764 - DNA, 1876 bp, Homo sapiens
ggcggccgcgacagggccagcgagagccccgcagcccgccgcagctgccgcctcgccgcggccgggccggagagcacggcggcgggagcgcggccttaggaggcggccggagcggtgggcacagctcggcgcggagcgtcctgtcaggcggcggccgagggcgtcgcggactctccccgcgatgatgccgatgatattaactgttttcttgagcaacaatgaacagattttaacagaagttcctataacaccggaaacaacctgtcgagatgttgtagaattttgcaaggaacctggagaaggcagctgccatttagctgaagtgtggaggggaaatgaacgtcccataccctttgatcatatgatgtacgaacatcttcagaaatggggtccacggagggaagaagtgaaatttttccttcgacacgaggactccccaactgagaacagtgaacaaggtggccgtcagacccaagagcaacgaactcagagaaatgtaataaatgtacctggagaaaaacgtactgaaaatggggttgggaatccacgtgttgaacttaccctctcagagctccaagatatggcagctaggcaacagcagcagattgaaaatcagcagcagatgttggttgccaaggaacagcgtttacattttctaaagcaacaggagcgccgtcagcagcagtctatttctgaaaatgaaaagcttcagaaattgaaagaacgagttgaagcccaggagaacaagctgaagaaaattcgtgcaatgagaggacaagtcgactacagcaaaatcatgaacggcaatctgtctgctgaaatagaaaggttcagtgccatgttccaggaaaagaagcaggaagtacagactgcaattttaagggttgatcagcttagtcagcaattggaagatttaaagaaaggaaaactgaatgggttccagtcttacaatggcaaattgacgggaccagcggcggtggagttaaaaagactgtaccaagaactacagattcgtaaccaacttaaccaggaacaaaattcaaaacttcagcagcagaaggaactcttaaataagcgcaacatggaggtggccatgatggacaagcgaatcagtgaactgcgtgaacgtctctatgggaaaaaaattcagctgaaccgtgtgaatggcacgtcatcaccacagtcccctctgagcacatcgggcagggtcgctgctgtggggccttatatccaggttcccagtgccggaagctttcctgtgctgggggaccctataaagccccagtctctcagtattgcctcaaatgctgctcatggaagatccaaatccggtgagtggtcctggccctcttcctgggggagagtttgtgagcagggaatggggcctgcggtggaggggcggggggtggggcaggctcctgaggctctgccccacacatcgtcagactccaggctcagtctccccgtgaggcgcttggagagctgtgttcccctgtggtaacaatcctaaaaggaaaacaagttatttttactgaactagaggtctctactgtgtggcttttcaaaacacaaatgattaattaaaactctgatccatgggccgggtgcagtggctcacgcctgtaatcccagcactttgggaggccaaggcgggtggatcacctgaggtcaggagttcaagaccagcctggccaacatggtgaaaccctgtctttactaaaactacgaaaattagccgggcgtggtggcgtgcacctgtaatcccagctactcaggaggctgaagcgggagaatcacttgaacctgggaggcggaggttgcagtgagatcgtgccactgtgcttcagcctgggcaacaagagtgaaacttcatctc

SEQ ID NO: 352765 - DNA, 404 bp, Homo sapiens
cagcccacgagtacacacacctttcggtcagaacttttgcagacaggcaatgagctcaacagtgtgccccaagtcctggtcacagccaatttgacggattacaaattctactgtgtattctcttgggaatgtgggtggaaatattcttaactgttcaaagggtgactttgtttttcttcttaacacctaaacttagggcatcgagattggtaaagtgccacctcccatcccgggtgtaggcaagcagctgcctccaagctatgggacatacccaagtcctacacctctgggtcctgggtcgacaagctccctggaaaggaggaaggaaggcagcttgcccaggcccagtgcaggcctgccaagtcgacagaggcccaccctgctgcccgccacaggcagcaccc

SEQ ID NO: 352766 - DNA, 177 bp, Homo sapiens
acacttgtgttcaataaatatttgaatacatgaagaaatgggagaatattacttttttctaatacgccttttggtgagtttggttcttttatttctttaggtggccgtcagacccaagagcaacgaactcagagaaatgtaataaatgtacctggagaaaaacgtactgaaaatggg

SEQ ID NO: 352767 - DNA, 321 bp, Homo sapiens
tggttatgctctttctgtgcctcgtcattaacattgcagtctaagcattctgtgaatcattccatcttccccttctcatatgttccgtatggactcttcacactctgtgctccgtgtgaaaagcagcctcagcatccccctgggtcaggcatgtaggttgtcgcattgttcattccgtttgccttcgggagctctgctgctgggcgaggcgtgttggtctcctgtgggggttattttgaactttcagacagctgacattgtgctgcatttgaatcgtggtaaaatacacataacataaaatttcacatcttagctattttt

SEQ ID NO: 352768 - DNA, 4856 bp, Homo sapiens
ggcggccgcgacagggccagcgagagccccgcagcccgccgcagctgccgcctcgccgcggccgggccggagagcacggcggcgggagcgcggccttaggaggcggccggagcggtgggcacagctcggcgcggagcgtcctgtcaggcggcggccgagggcgtcgcggactctccccgcgatgatgccgatgatattaactgttttcttgagcaacaatgaacagattttaacagaagttcctataacaccggaaacaacctgtcgagatgttgtagaattttgcaaggaacctggagaaggcagctgccatttagctgaagtgtggaggggaaatgaacgtcccataccctttgatcatatgatgtacgaacatcttcagaaatggggtccacggagggaagaagtgaaatttttccttcgacacgaggactccccaactgagaacagtgaacaaggtggccgtcagacccaagagcaacgaactcagagaaatgtaataaatgtacctggagaaaaacgtactgaaaatggggttgggaatccacgtgttgaacttaccctctcagagctccaagatatggcagctaggcaacagcagcagattgaaaatcagcagcagatgttggttgccaaggaacagcgtttacattttctaaagcaacaggagcgccgtcagcagcagtctatttctgaaaatgaaaagcttcagaaattgaaagaacgagttgaagcccaggagaacaagctgaagaaaattcgtgcaatgagaggacaagtcgactacagcaaaatcatgaacggcaatctgtctgctgaaatagaaaggttcagtgccatgttccaggaaaagaagcaggaagtacagactgcaattttaagggttgatcagcttagtcagcaattggaagatttaaagaaaggaaaactgaatgggttccagtcttacaatggcaaattgacgggaccagcggcggtggagttaaaaagactgtaccaagaactacagattcgtaaccaacttaaccaggaacaaaattcaaaacttcagcagcagaaggaactcttaaataagcgcaacatggaggtggccatgatggacaagcgaatcagtgaactgcgtgaacgtctctatgggaaaaaaattcagctgaaccgtgtgaatggcacgtcatcaccacagtcccctctgagcacatcgggcagggtcgctgctgtggggccttatatccaggttcccagtgccggaagctttcctgtgctgggggaccctataaagccccagtctctcagtattgcctcaaatgctgctcatggaagatccaaatccgctaatgatggaaactggccaacattaaaacagaattctagctcttccgtgaaaccagtgcaggtggccggtgcagactggaaggatccgagcgtggaggggtctgtcaagcagggcactgtctccagccagcctgtgcccttctcagcactgggacccacggagaagccgggcatcgagattggtaaagtgccacctcccatcccgggtgtaggcaagcagctgcctccaagctatgggacatacccaagtcctacacctctgggtcctgggtcgacaagctccctggaaaggaggaaggaaggcagcttgcccaggcccagtgcaggcctgccaagtcgacagaggcccaccctgctgcccgccacaggcagcaccccccagccaggctcctcacaacagattcagcagaggatttccgtaccgccaagtcccacgtacccgccagcgggaccacctgcatttccagctggggacagcaagcctgaactcccactgacagtggccattaggcctttcctggctgataaagggtcaaggccacagtctcccaggaaaggaccccagacagtgaattcaagttccatatactccatgtacctccagcaagccacaccacctaagaattaccagccggcagcacacagcgccttaaataagtcagttaaagcagtgtatggtaagcccgttttaccttcgggttcaacctctccatcgccgctgccgtttcttcacgggtcactgtccacgggcacaccacagcctcagccaccttcagaaagtactgagaaagagcctgagcaggatggccccgccgcccccgcagatggcagcaccgtggagagcctgccacggccactcagccccaccaagctcacgcccatcgtgcattcgccactgcgctaccagagtgatgcagacctggaggccctccgcaggaagctggccaacgcgccccggcccctgaaaaagcgcagctccatcacagagcccgagggccccggcgggcccaacatccagaagctgctgtaccagcgcttcaacaccctggccggtggcatggagggcacccctttctaccagcccagcccctcccaggacttcatgggcaccttggccgatgtggacaatggaaacaccaatgccaatggaaacctggaagagctcccccctgcccagcccacagccccactccccgctgagcctgccccgtcatcagatgccaatgataatgagttaccttcccccgaaccagaggagctcatctgtccccaaaccacccaccaaactgccgagccggcagaggacaataacaacaacgtggccacggtccccaccacggagcagatcccgagtcctgtggctgaggccccatctccaggggaagagcaggtccctccagcacctcttccccctgccagccaccctcctgccacctccacgaacaagcggaccaacttgaagaagcccaactcggagcggacggggcacgggctgagagtccggtttaaccccctggcactgctcctagacgcgtctctggaaggagagttcgatctggtgcagaggatcatctatgaggtggaagatcccagcaagcccaacgacgaagggatcaccccactgcacaacgccgtctgcgccggccaccatcacatcgtgaagttcctgctggattttggtgtcaacgtgaatgctgctgatagtgatggatggacgccgctgcactgcgctgcctcttgtaacagcgttcacctctgcaaacagctggtggagagtggtgccgccatttttgcctcaaccataagcgacattgaaactgctgcagacaagtgtgaggagatggaggaaggctacatccagtgctcccagtttctatatggggtgcaggaaaagctgggtgtgatgaacaaaggtgtggcgtatgctctgtgggactacgaggcccagaacagtgacgagctgtccttccacgaaggggacgccctcaccatcctgaggcgcaaggacgaaagcgagactgagtggtggtgggctcgccttggagaccgggagggctatgtgcccaaaaacctgctggggctgtatccacggatcaaaccccgacagcgaacactcgcctgaacttccttttggagcaccgcatggtcttgccagctaccaggagccacttaagagattattgtgctgttttccaggaaagctgcagctagaaaatggtcttaatggtgctcactttagcagacagcgtccacaatgtgaatcctacagtttccaggtgaggccctttctccagtttgcccattaactgggagaggtactttcgcctccaaggactgaattttgccaattactataaatccaaataaatacccactttcaaaacacccacccctcttgccattaagaagtcccataacccccggttggttgccagtgaagacagaagctcttactgacttggccccgaggccatcaccccctccagcagtgaacactgtccgccgctgtgaggcctgctcccctgcgaccgccctgccccccgtcaccgaatcggacactcatcctttctcacacttcccacacatgatccttcttcccttcatcaccaaaggagcctctgtatggaaacatgtccagtgttgctgcccagtgtgtatgcctcccagtacccactctgctcggccgccttgggggttccgcttcctgttccagttcacctaaaggctgattgtgcaggcccagcactgtggctggactgccgcgccacgggcaccaggacccctaagaccaagtgacaactgggagagcctcagcatatactcttctcctccgatctcacagcctgtcatgctgctcagtgtggttctcacccctgcaagctcaaattcagttccctgaatggagtcaggtgctggaggccgtggcagcggagggtggttggggttggggctgggggtggactggtgtgagggcagaccagggccaggtagacggggctgtttggtgcctgaaggatggcagacgcctggtgtcaggaggggccgccaccaaggagcagcagctggggcagaggagctggggtcaggggccacccctctctgccgatctccctgcctgggctggctgtgaggccacctttgtcccaggcccagcctcaaggcaaggagggcgcttcactgaggtgtgaattgtacgtacaggctttttatataccaaaagtattttttgactagaccattcaaagctacccgaactatgttggaaattttttttttctcattaaaatacaggcccttaggctctatttttcatgtatgagtcgtgtgtaatttatgtaaaaatgtgtgtacagactcactgatgcagcactgtagcccatcaccttggagcactgactgtacatagtgtggtgaagaaaagtgaacgcccttgtagagcagcccgaccacaggagcatggccgctgccagcccagacgctgctgacgctgtgtaaatgtgcacaataaacccgtctcaccccgg

SEQ ID NO: 352769 - DNA, 4722 bp, Homo sapiens
cggccgcggggagaagcagatgcatttggggccggtcatctcctcggtcctctcagatgatattaactgttttcttgagcaacaatgaacagattttaacagaagttcctataacaccggaaacaacctgtcgagatgttgtagaattttgcaaggaacctggagaaggcagctgccatttagctgaagtgtggaggggaaatgaacgtcccataccctttgatcatatgatgtacgaacatcttcagaaatggggtccacggagggaagaagtgaaatttttccttcgacacgaggactccccaactgagaacagtgaacaaggtggccgtcagacccaagagcaacgaactcagagaaatgtaataaatgtacctggagaaaaacgtactgaaaatggggttgggaatccacgtgttgaacttaccctctcagagctccaagatatggcagctaggcaacagcagcagattgaaaatcagcagcagatgttggttgccaaggaacagcgtttacattttctaaagcaacaggagcgccgtcagcagcagtctatttctgaaaatgaaaagcttcagaaattgaaagaacgagttgaagcccaggagaacaagctgaagaaaattcgtgcaatgagaggacaagtcgactacagcaaaatcatgaacggcaatctgtctgctgaaatagaaaggttcagtgccatgttccaggaaaagaagcaggaagtacagactgcaattttaagggttgatcagcttagtcagcaattggaagatttaaagaaaggaaaactgaatgggttccagtcttacaatggcaaattgacgggaccagcggcggtggagttaaaaagactgtaccaagaactacagattcgtaaccaacttaaccaggaacaaaattcaaaacttcagcagcagaaggaactcttaaataagcgcaacatggaggtggccatgatggacaagcgaatcagtgaactgcgtgaacgtctctatgggaaaaaaattcagctgaaccgtgtgaatggcacgtcatcaccacagtcccctctgagcacatcgggcagggtcgctgctgtggggccttatatccaggttcccagtgccggaagctttcctgtgctgggggaccctataaagccccagtctctcagtattgcctcaaatgctgctcatggaagatccaaatccgctaatgatggaaactggccaacattaaaacagaattctagctcttccgtgaaaccagtgcaggtggccggtgcagactggaaggatccgagcgtggaggggtctgtcaagcagggcactgtctccagccagcctgtgcccttctcagcactgggacccacggagaagccgggcatcgagattggtaaagtgccacctcccatcccgggtgtaggcaagcagctgcctccaagctatgggacatacccaagtcctacacctctgggtcctgggtcgacaagctccctggaaaggaggaaggaaggcagcttgcccaggcccagtgcaggcctgccaagtcgacagaggcccaccctgctgcccgccacaggcagcaccccccagccaggctcctcacaacagattcagcagaggatttccgtaccgccaagtcccacgtacccgccagcgggaccacctgcatttccagctggggacagcaagcctgaactcccactgacagtggccattaggcctttcctggctgataaagggtcaaggccacagtctcccaggaaaggaccccagacagtgaattcaagttccatatactccatgtacctccagcaagccacaccacctaagaattaccagccggcagcacacagcgccttaaataagtcagttaaagcagtgtatggtaagcccgttttaccttcgggttcaacctctccatcgccgctgccgtttcttcacgggtcactgtccacgggcacaccacagcctcagccaccttcagaaagtactgagaaagagcctgagcaggatggccccgccgcccccgcagatggcagcaccgtggagagcctgccacggccactcagccccaccaagctcacgcccatcgtgcattcgccactgcgctaccagagtgatgcagacctggaggccctccgcaggaagctggccaacgcgccccggcccctgaaaaagcgcagctccatcacagagcccgagggccccggcgggcccaacatccagaagctgctgtaccagcgcttcaacaccctggccggtggcatggagggcacccctttctaccagcccagcccctcccaggacttcatgggcaccttggccgatgtggacaatggaaacaccaatgccaatggaaacctggaagagctcccccctgcccagcccacagccccactccccgctgagcctgccccgtcatcagatgccaatgataatgagttaccttcccccgaaccagaggagctcatctgtccccaaaccacccaccaaactgccgagccggcagaggacaataacaacaacgtggccacggtccccaccacggagcagatcccgagtcctgtggctgaggccccatctccaggggaagagcaggtccctccagcacctcttccccctgccagccaccctcctgccacctccacgaacaagcggaccaacttgaagaagcccaactcggagcggacggggcacgggctgagagtccggtttaaccccctggcactgctcctagacgcgtctctggaaggagagttcgatctggtgcagaggatcatctatgaggtggaagatcccagcaagcccaacgacgaagggatcaccccactgcacaacgccgtctgcgccggccaccatcacatcgtgaagttcctgctggattttggtgtcaacgtgaatgctgctgatagtgatggatggacgccgctgcactgcgctgcctcttgtaacagcgttcacctctgcaaacagctggtggagagtggtgccgccatttttgcctcaaccataagcgacattgaaactgctgcagacaagtgtgaggagatggaggaaggctacatccagtgctcccagtttctatatggggtgcaggaaaagctgggtgtgatgaacaaaggtgtggcgtatgctctgtgggactacgaggcccagaacagtgacgagctgtccttccacgaaggggacgccctcaccatcctgaggcgcaaggacgaaagcgagactgagtggtggtgggctcgccttggagaccgggagggctatgtgcccaaaaacctgctggggctgtatccacggatcaaaccccgacagcgaacactcgcctgaacttccttttggagcaccgcatggtcttgccagctaccaggagccacttaagagattattgtgctgttttccaggaaagctgcagctagaaaatggtcttaatggtgctcactttagcagacagcgtccacaatgtgaatcctacagtttccaggtgaggccctttctccagtttgcccattaactgggagaggtactttcgcctccaaggactgaattttgccaattactataaatccaaataaatacccactttcaaaacacccacccctcttgccattaagaagtcccataacccccggttggttgccagtgaagacagaagctcttactgacttggccccgaggccatcaccccctccagcagtgaacactgtccgccgctgtgaggcctgctcccctgcgaccgccctgccccccgtcaccgaatcggacactcatcctttctcacacttcccacacatgatccttcttcccttcatcaccaaaggagcctctgtatggaaacatgtccagtgttgctgcccagtgtgtatgcctcccagtacccactctgctcggccgccttgggggttccgcttcctgttccagttcacctaaaggctgattgtgcaggcccagcactgtggctggactgccgcgccacgggcaccaggacccctaagaccaagtgacaactgggagagcctcagcatatactcttctcctccgatctcacagcctgtcatgctgctcagtgtggttctcacccctgcaagctcaaattcagttccctgaatggagtcaggtgctggaggccgtggcagcggagggtggttggggttggggctgggggtggactggtgtgagggcagaccagggccaggtagacggggctgtttggtgcctgaaggatggcagacgcctggtgtcaggaggggccgccaccaaggagcagcagctggggcagaggagctggggtcaggggccacccctctctgccgatctccctgcctgggctggctgtgaggccacctttgtcccaggcccagcctcaaggcaaggagggcgcttcactgaggtgtgaattgtacgtacaggctttttatataccaaaagtattttttgactagaccattcaaagctacccgaactatgttggaaattttttttttctcattaaaatacaggcccttaggctctatttttcatgtatgagtcgtgtgtaatttatgtaaaaatgtgtgtacagactcactgatgcagcactgtagcccatcaccttggagcactgactgtacatagtgtggtgaagaaaagtgaacgcccttgtagagcagcccgaccacaggagcatggccgctgccagcccagacgctgctgacgctgtgtaaatgtgcacaataaacccgtctcaccccgg

SEQ ID NO: 352770 - DNA, 4933 bp, Homo sapiens
ctaggcaggatcccgctttctcagggcgtctctctgtttctcttaaggcattccactgattggatggggcccacccaccttctagagggtcatctgcttcactcaaatctaccaatttgaaagttaatctcttccagattggagactattattctaagtgaagtaactcaggaatggaaaaccaaacattgtatgttctcactcataagtgggagctaagctatgaggatgcaaaggcataacaatgacacagttgactttggggactcggggaaagggtgggaagggagtgagggataaaagactacaaattgtgtgcagtgtgcactgctagagtgcactaaatctcacaaatcaccactaaataacttactcatgtaaccaaacaccacctgtttcccaaaaacctatggaaattaaaaaaaaaaagttaatctcatctggaaaataccttttcagcaacatgtcgtctggtatttggccaaatatctggttactgtgacctagtcaaggtgatgtgtaaagttatccatcacaaacagctagattcattccacctacacttcaagggatcgccttgaagaagtcagtatttttgcagagatgcgtctccacccaaaggtcctaggtacctttgagcaattgtgaaagccataacccctcaccccgaaatgacctgtcctcatgcatatagaatcttacaatcacaggggttatggatcctatttagagcctatattgaaatcttgaggacgtcagtagttctctagaatccctgttccaggcgcctctgttcctgagcagtgttatgtgaacagtgtcctctgtctgtggctctgtgtcctggctgagaaaggcagcgctgccttcagggaactgggcccattgctgggagtcagagccttacgtgctcactgtgccccacgtggcttagacagtaccggctacagcccttatcccgactccacgggtgtgagcacagaggctgagtcacctgcccgaagcagcacagcgagtaagtcacagaggggatttgaagccaggctcagagcccaggatttgaccagtgtctctgtgcccactcaagggaggaagagtatcctgagtaagagggaagctgcatgtggatcacggggaagttgctctgccctcacatcagctcctcatgtgtacagctccagatgggtgggtgttgtcggagaattgctcataggaagctacagttccttctccacagtctccccttctagatgctgatctttccagatgacaggcttcctaaaaaccaaccactgagtgagtgctttctgtccgagctggcagtctcttgcactaagcttaggacttctttgaatgtaggagaatcttgactctcatttcttcccaatttgtagctgaaccgtgtgaatggcacgtcatcaccacagtcccctctgagcacatcgggcagggtcgctgctgtggggccttatatccaggttcccagtgccggaagctttcctgtgctgggggaccctataaagccccagtctctcagtattgcctcaaatgctgctcatggaagatccaaatccgctaatgatggaaactggccaacattaaaacagaattctagctcttccgtgaaaccagtgcaggtggccggtgcagactggaaggatccgagcgtggaggggtctgtcaagcagggcactgtctccagccagcctgtgcccttctcagcactgggacccacggagaagccgggcatcgagattggtaaagtgccacctcccatcccgggtgtaggcaagcagctgcctccaagctatgggacatacccaagtcctacacctctgggtcctgggtcgacaagctccctggaaaggaggaaggaaggcagcttgcccaggcccagtgcaggcctgccaagtcgacagaggcccaccctgctgcccgccacaggcagcaccccccagccaggctcctcacaacagattcagcagaggatttccgtaccgccaagtcccacgtacccgccagcgggaccacctgcatttccagctggggacagcaagcctgaactcccactgacagtggccattaggcctttcctggctgataaagggtcaaggccacagtctcccaggaaaggaccccagacagtgaattcaagttccatatactccatgtacctccagcaagccacaccacctaagaattaccagccggcagcacacagcgccttaaataagtcagttaaagcagtgtatggtaagcccgttttaccttcgggttcaacctctccatcgccgctgccgtttcttcacgggtcactgtccacgggcacaccacagcctcagccaccttcagaaagtactgagaaagagcctgagcaggatggccccgccgcccccgcagatggcagcaccgtggagagcctgccacggccactcagccccaccaagctcacgcccatcgtgcattcgccactgcgctaccagagtgatgcagacctggaggccctccgcaggaagctggccaacgcgccccggcccctgaaaaagcgcagctccatcacagagcccgagggccccggcgggcccaacatccagaagctgctgtaccagcgcttcaacaccctggccggtggcatggagggcacccctttctaccagcccagcccctcccaggacttcatgggcaccttggccgatgtggacaatggaaacaccaatgccaatggaaacctggaagagctcccccctgcccagcccacagccccactccccgctgagcctgccccgtcatcagatgccaatgataatgagttaccttcccccgaaccagaggagctcatctgtccccaaaccacccaccaaactgccgagccggcagaggacaataacaacaacgtggccacggtccccaccacggagcagatcccgagtcctgtggctgaggccccatctccaggggaagagcaggtccctccagcacctcttccccctgccagccaccctcctgccacctccacgaacaagcggaccaacttgaagaagcccaactcggagcggacggggcacgggctgagagtccggtttaaccccctggcactgctcctagacgcgtctctggaaggagagttcgatctggtgcagaggatcatctatgaggtggaagatcccagcaagcccaacgacgaagggatcaccccactgcacaacgccgtctgcgccggccaccatcacatcgtgaagttcctgctggattttggtgtcaacgtgaatgctgctgatagtgatggatggggtgcaggaaaagctgggtgtgatgaacaaaggtgtggcgtatgctctgtgggactacgaggcccagaacagtgacgagctgtccttccacgaaggggacgccctcaccatcctgaggcgcaaggacgaaagcgagactgagtggtggtgggctcgccttggagaccgggagggctatgtgcccaaaaacctgctggggctgtatccacggatcaaaccccgacagcgaacactcgcctgaacttccttttggagcaccgcatggtcttgccagctaccaggagccacttaagagattattgtgctgttttccaggaaagctgcagctagaaaatggtcttaatggtgctcactttagcagacagcgtccacaatgtgaatcctacagtttccaggtgaggccctttctccagtttgcccattaactgggagaggtactttcgcctccaaggactgaattttgccaattactataaatccaaataaatacccactttcaaaacacccacccctcttgccattaagaagtcccataacccccggttggttgccagtgaagacagaagctcttactgacttggccccgaggccatcaccccctccagcagtgaacactgtccgccgctgtgaggcctgctcccctgcgaccgccctgccccccgtcaccgaatcggacactcatcctttctcacacttcccacacatgatccttcttcccttcatcaccaaaggagcctctgtatggaaacatgtccagtgttgctgcccagtgtgtatgcctcccagtacccactctgctcggccgccttgggggttccgcttcctgttccagttcacctaaaggctgattgtgcaggcccagcactgtggctggactgccgcgccacgggcaccaggacccctaagaccaagtgacaactgggagagcctcagcatatactcttctcctccgatctcacagcctgtcatgctgctcagtgtggttctcacccctgcaagctcaaattcagttccctgaatggagtcaggtgctggaggccgtggcagcggagggtggttggggttggggctgggggtggactggtgtgagggcagaccagggccaggtagacggggctgtttggtgcctgaaggatggcagacgcctggtgtcaggaggggccgccaccaaggagcagcagctggggcagaggagctggggtcaggggccacccctctctgccgatctccctgcctgggctggctgtgaggccacctttgtcccaggcccagcctcaaggcaaggagggcgcttcactgaggtgtgaattgtacgtacaggctttttatataccaaaagtattttttgactagaccattcaaagctacccgaactatgttggaaattttttttttctcattaaaatacaggcccttaggctctatttttcatgtatgagtcgtgtgtaatttatgtaaaaatgtgtgtacagactcactgatgcagcactgtagcccatcaccttggagcactgactgtacatagtgtggtgaagaaaagtgaacgcccttgtagagcagcccgaccacaggagcatggccgctgccagcccagacgctgctgacgctgtgtaaatgtgcacaataaacccgtctcaccccgg

SEQ ID NO: 352771 - DNA, 3656 bp, Homo sapiens
ggccttggaatgcctcgccaggacccacggggcttgactagagctgtctcagaagccgctgcctggagcctgcatcataacttcacagcccagcagtgtatgcagctggggttgcggtgcggctgcatcggctaatgatggaaactggccaacattaaaacagaattctagctcttccgtgaaaccagtgcaggtggccggtgcagactggaaggatccgagcgtggaggggtctgtcaagcagggcactgtctccagccagcctgtgcccttctcagcactgggacccacggagaagccgggcatcgagattggtaaagtgccacctcccatcccgggtgtaggcaagcagctgcctccaagctatgggacatacccaagtcctacacctctgggtcctgggtcgacaagctccctggaaaggaggaaggaaggcagcttgcccaggcccagtgcaggcctgccaagtcgacagaggcccaccctgctgcccgccacaggcagcaccccccagccaggctcctcacaacagattcagcagaggatttccgtaccgccaagtcccacgtacccgccagcgggaccacctgcatttccagctggggacagcaagcctgaactcccactgacagtggccattaggcctttcctggctgataaagggtcaaggccacagtctcccaggaaaggaccccagacagtgaattcaagttccatatactccatgtacctccagcaagccacaccacctaagaattaccagccggcagcacacagcgccttaaataagtcagttaaagcagtgtatggtaagcccgttttaccttcgggttcaacctctccatcgccgctgccgtttcttcacgggtcactgtccacgggcacaccacagcctcagccaccttcagaaagtactgagaaagagcctgagcaggatggccccgccgcccccgcagatggcagcaccgtggagagcctgccacggccactcagccccaccaagctcacgcccatcgtgcattcgccactgcgctaccagagtgatgcagacctggaggccctccgcaggaagctggccaacgcgccccggcccctgaaaaagcgcagctccatcacagagcccgagggccccggcgggcccaacatccagaagctgctgtaccagcgcttcaacaccctggccggtggcatggagggcacccctttctaccagcccagcccctcccaggacttcatgggcaccttggccgatgtggacaatggaaacaccaatgccaatggaaacctggaagagctcccccctgcccagcccacagccccactccccgctgagcctgccccgtcatcagatgccaatgataatgagttaccttcccccgaaccagaggagctcatctgtccccaaaccacccaccaaactgccgagccggcagaggacaataacaacaacgtggccacggtccccaccacggagcagatcccgagtcctgtggctgaggccccatctccaggggaagagcaggtccctccagcacctcttccccctgccagccaccctcctgccacctccacgaacaagcggaccaacttgaagaagcccaactcggagcggacggggcacgggctgagagtccggtttaaccccctggcactgctcctagacgcgtctctggaaggagagttcgatctggtgcagaggatcatctatgaggtggaagatcccagcaagcccaacgacgaagggatcaccccactgcacaacgccgtctgcgccggccaccatcacatcgtgaagttcctgctggattttggtgtcaacgtgaatgctgctgatagtgatggatggacgccgctgcactgcgctgcctcttgtaacagcgttcacctctgcaaacagctggtggagagtggtgccgccatttttgcctcaaccataagcgacattgaaactgctgcagacaagtgtgaggagatggaggaaggctacatccagtgctcccagtttctatatggggtgcaggaaaagctgggtgtgatgaacaaaggtgtggcgtatgctctgtgggactacgaggcccagaacagtgacgagctgtccttccacgaaggggacgccctcaccatcctgaggcgcaaggacgaaagcgagactgagtggtggtgggctcgccttggagaccgggagggctatgtgcccaaaaacctgctggggctgtatccacggatcaaaccccgacagcgaacactcgcctgaacttccttttggagcaccgcatggtcttgccagctaccaggagccacttaagagattattgtgctgttttccaggaaagctgcagctagaaaatggtcttaatggtgctcactttagcagacagcgtccacaatgtgaatcctacagtttccaggtgaggccctttctccagtttgcccattaactgggagaggtactttcgcctccaaggactgaattttgccaattactataaatccaaataaatacccactttcaaaacacccacccctcttgccattaagaagtcccataacccccggttggttgccagtgaagacagaagctcttactgacttggccccgaggccatcaccccctccagcagtgaacactgtccgccgctgtgaggcctgctcccctgcgaccgccctgccccccgtcaccgaatcggacactcatcctttctcacacttcccacacatgatccttcttcccttcatcaccaaaggagcctctgtatggaaacatgtccagtgttgctgcccagtgtgtatgcctcccagtacccactctgctcggccgccttgggggttccgcttcctgttccagttcacctaaaggctgattgtgcaggcccagcactgtggctggactgccgcgccacgggcaccaggacccctaagaccaagtgacaactgggagagcctcagcatatactcttctcctccgatctcacagcctgtcatgctgctcagtgtggttctcacccctgcaagctcaaattcagttccctgaatggagtcaggtgctggaggccgtggcagcggagggtggttggggttggggctgggggtggactggtgtgagggcagaccagggccaggtagacggggctgtttggtgcctgaaggatggcagacgcctggtgtcaggaggggccgccaccaaggagcagcagctggggcagaggagctggggtcaggggccacccctctctgccgatctccctgcctgggctggctgtgaggccacctttgtcccaggcccagcctcaaggcaaggagggcgcttcactgaggtgtgaattgtacgtacaggctttttatataccaaaagtattttttgactagaccattcaaagctacccgaactatgttggaaattttttttttctcattaaaatacaggcccttaggctctatttttcatgtatgagtcgtgtgtaatttatgtaaaaatgtgtgtacagactcactgatgcagcactgtagcccatcaccttggagcactgactgtacatagtgtggtgaagaaaagtgaacgcccttgtagagcagcccgaccacaggagcatggccgctgccagcccagacgctgctgacgctgtgtaaatgtgcacaataaacccgtctcaccccgg

SEQ ID NO: 352772 - DNA, 3564 bp, Homo sapiens
ggcggccgcgacagggccagcgagagccccgcagcccgccgcagctgccgcctcgccgcggccgggccggagagcacggcggcgggagcgcggccttaggaggcggccggagcggtgggcacagctcggcgcggagcgtcctgtcaggcggcggccgagggcgtcgcggactctccccgcgatgatgccgatgatattaactgttttcttgagcaacaatgaacagattttaacagaagttcctataacaccggaaacaacctgtcgagatgttgtagaattttgcaaggaacctggagaaggcagctgccatttagctgaagtgtggaggggaaatgaacgtcccataccctttgatcatatgatgtacgaacatcttcagaaatggggtccacggagggaagaagtgaaatttttccttcgacacgaggactccccaactgagaacagtgaacaaggtggccgtcagacccaagagcaacgaactcagagaaatgtaataaatgtacctggagaaaaacgtactgaaaatggggttgggaatccacgtgttgaacttaccctctcagagctccaagatatggcagctaggcaacagcagcagattgaaaatcagcagcagatgttggttgccaaggaacagcgtttacattttctaaagcaacaggagcgccgtcagcagcagtctatttctgaaaatgaaaagcttcagaaattgaaagaacgagttgaagcccaggagaacaagctgaagaaaattcgtgcaatgagaggacaagtcgactacagcaaaatcatgaacggcaatctgtctgctgaaatagaaaggttcagtgccatgttccaggaaaagaagcaggaagtacagactgcaattttaagggttgatcagcttagtcagcaattggaagatttaaagaaaggaaaactgaatgggttccagtcttacaatggcaaattgacgggaccagcggcggtggagttaaaaagactgtaccaagaactacagattcgtaaccaacttaaccaggaacaaaattcaaaacttcagcagcagaaggaactcttaaataagcgcaacatggaggtggccatgatggacaagcgaatcagtgaactgcgtgaacgtctctatgggaaaaaaattcagctgaaccgtgtgaatggcacgtcatcaccacagtcccctctgagcacatcgggcagggtcgctgctgtggggccttatatccaggttcccagtgccggaagctttcctgtgctgggggaccctataaagccccagtctctcagtattgcctcaaatgctgctcatggaagatccaaatccgctaatgatggaaactggccaacattaaaacagaattctagctcttccgtgaaaccagtgcaggtggccggtgcagactggaaggatccgagcgtggaggggtctgtcaagcagggcactgtctccagccagcctgtgcccttctcagcactgggacccacggagaagccgggcatcgagattggtaaagtgccacctcccatcccgggtgtaggcaagcagctgcctccaagctatgggacatacccaagtcctacacctctgggtcctgggtcgacaagctccctggaaaggaggaaggaaggcagcttgcccaggcccagtgcaggcctgccaagtcgacagaggcccaccctgctgcccgccacaggcagcaccccccagccaggctcctcacaacagattcagcagaggatttccgtaccgccaagtcccacgtacccgccagcgggaccacctgcatttccagctggggacagcaagcctgaactcccactgacagtggccattaggcctttcctggctgataaagggtcaaggccacagtctcccaggaaaggaccccagacagtgaattcaagttccatatactccatgtacctccagcaagccacaccacctaagaattaccagccggcagcacacagcgccttaaataagtcagttaaagcagtgtatggtaagcccgttttaccttcgggttcaacctctccatcgccgctgccgtttcttcacgggtcactgtccacgggcacaccacagcctcagccaccttcagaaagtactgagaaagagcctgagcaggatggccccgccgcccccgcagatggcagcaccgtggagagcctgccacggccactcagccccaccaagctcacgcccatcgtgcattcgccactgcgctaccagagtgatgcagacctggaggccctccgcaggaagctggccaacgcgccccggcccctgaaaaagcgcagctccatcacagagcccgagggccccggcgggcccaacatccagaagctgctgtaccagcgcttcaacaccctggccggtggcatggagggcacccctttctaccagcccagcccctcccaggacttcatgggcaccttggccgatgtggacaatggaaacaccaatgccaatggaaacctggaagagctcccccctgcccagcccacagccccactccccgctgagcctgccccgtcatcagatgccaatgataatgagttaccttcccccgaaccagaggagctcatctgtccccaaaccacccaccaaactgccgagccggcagaggacaataacaacaacgtggccacggtccccaccacggagcagatcccgagtcctgtggctgaggccccatctccaggggaagagcaggtccctccagcacctcttccccctgccagccaccctcctgccacctccacgaacaagcggaccaacttgaagaagcccaactcggagcggacggggcacgggctgagagtccggtttaaccccctggcactgctcctagacgcgtctctggaaggagagttcgatctggtgcagaggatcatctatgaggtggaagatcccagcaagcccaacgacgaagggatcaccccactgcacaacgccgtctgcgccggccaccatcacatcgtgaagttcctgctggattttggtgtcaacgtgaatgctgctgatagtgatggatggtgaggcccgtaggagtgtggggtggacagatttactttccctgctttgcataaggaaaacaggcgtgttctagacaattaggaagcacggaagagagaattagagcaagaacacccatcatttcatccttgaaagacagctgttgccagggtttccttgcctttttttccagccttttctcttgatgattttgttaaaaacgtggctgtggttatgctctttctgtgcctcgtcattaacattgcagtctaagcattctgtgaatcattccatcttccccttctcatatgttccgtatggactcttcacactctgtgctccgtgtgaaaagcagcctcagcatccccctgggtcaggcatgtaggttgtcgcattgttcattccgtttgccttcgggagctctgctgctgggcgaggcgtgttggtctcctgtgggggttattttgaactttcagacagctgtacccagtgcccgaccgttattacgcgacggccagtgatccgtatcatgtcatact

SEQ ID NO: 352773 - DNA, 985 bp, Homo sapiens
  misc_feature (24)..(25): n is a, c, g, or t
gggctaggtacgaggctgggtgtnncgtggtgttggaaagacagcgggtgatcatagatgagttaataaagaaactggacatgaatctgaatgaggacatcagttccctgtccactgaagagcttcgtcagcgtgtagatgcagcagtggctcagatcgtcaacccagcccgagtcaaagaacagttggttgagcaactgaaaactcagatccgagaccttgagatgtttatcaacttcatccaagatgaagtgggaagccccttgcagacaggtggtggacactgtgagtgcaaggccggtgggaagacaggaaatggctgcagcagaacaggcagcagcagaacgcctccaggaaacagcaaaacaaaggcagaggatgtgaagaaagtccgggagacggggctgcacctgatgcggcgagcgctggccgtgctccagatctttgctgttagccagtttggttgtgccacaggccagatccctccaaccctgtggcagagggtccaggctgacagagactactctcccttgctgaagaggctggaggtgtcagtggacagagtgaagcagctagccttgaggcagcagccacatgaccatgtcatcacctctgccaacctccaggacctctctctgggaggcaaggatgagctgactatggctgtgcggaaggagctaacggtggctgtgagggacctgctggcccatggactgtatgcctcctccccagggatgagccttgtaggtctaatgtgttgtgcagcttctctcggccagagcatgaccgggagtctgaagacacatgaagaaggcggtatgtgatccaggcgagttcagcttgctcgtaggagggcgggcccaagacatgaggacctgggggagggctaggaggagcaaaagcgggggagaaaaggggggggaacgggggcacacaaaacgagaagagccacacacgagggaaagggcgcgaaggggcgagtggg

SEQ ID NO: 352774 - DNA, 468 bp, Homo sapiens
tgattcatggttcattcacttagcaaatatttattgagccaactactgtatgccagtcctcattttacacaattaaataggacaagagtttgtgaaattcttgtttctaataggcaccattaagtattatttttcctttaaagatctgccataaagggctaaataagtgtctcttctataatttctgattccagatgaagtgggaagccccttgcagacaggtggtggacactgtgagtgcaaggccggtgggaagacaggaaatggctgcagcagaacaggcagcagcagaacgcctccaggaaacagcaaaagtaagtgcagtttccagaacaggcaaatctctagagacagaaagtagatgagtggttgcctagggcttgggtgtgttgaggagaagaggggaatgagaaatgctgatggtatggatttgcttttgggaaggatgaaatattctaaaattgattg

SEQ ID NO: 352775 - DNA, 2780 bp, Homo sapiens
  misc_feature (2742)..(2742): n is a, c, g, or t
gcctctccttatatggtcgggagagcagttgagaggaagagagaacatgacctggcagccaagggatctgcactctggagatactctgggacagcttcatccttgcagcccttcaccgtggggtcttcagaaatgcatagactatgaagagacaacccatctgctggaaccagggcaaaggctgccctagacgctacacacagggaatgacttttccccggtatcattcacctgtttctccgacgcttactgctcagtgtctgattcacaataggcgctcaataaaacattattgtcctgaattaaattcccggggaaggcgcgccctcggggacttgggtacttcaggccccgcccaccactcccctggggttccaggccaccgcgccgttgccatggcagcaggggggcgcggctgacgtgcggcggtgtttccgggaagatggcggctgtcgaagcggctgcagagccggtaacggtggtggcggctgttgggccaaaggcgaaagacgaagaggaggaggaagaggagccgctgccaccgtgcgaggcggtgcgctgggccccagtgggggcggtggcggaggcccggcctggggcaaccgcgtttttagaagaggcgacggccgaggagcctggcgcggccccgggctccccgccggattcgccgggccggacgctgcggcggctgcgggcagagcggcggcggctggactcggcgctgctggcgctgtcctcgcacttcgcgcaggtgcagttccgcctgcgccaggtggtgcgcggggcgccggcggagcagcagcgccttctgcgggagctcgaagacttcgccttccgcggctgccctcacgtcctaggttacgaagggcccggcgaccccgccagcgatgagggcgatgggctgccaggggaccggccacggttgcggggcgaggaccagagtgagcaggaaaagcaagagcgtctggaaacccaaagggagaagcagaaagaactgatactgcagctcaagacccagctagatgacctggaaacgtttgcctatcaagagggcagttatgactcgctgccacagtccgtggtgttggaaagacagcgggtgatcatagatgagttaataaagaaactggacatgaatctgaatgaggacatcagttccctgtccactgaagagcttcgtcagcgtgtagatgcagcagtggctcagatcgtcaacccagcccgagtcaaagaacagttggttgagcaactgaaaactcagatccgagaccttgagatgtttatcaacttcatccaagatgaagtgggaagccccttgcagacaggtggtggacactgtgagtgcaaggccggtgggaagacaggaaatggctgcagcagaacaggcagcagcagaacgcctccaggaaacagcaaaacaaaggcagaggatgtgaagaaagtccgggagacggggctgcacctgatgcggcgagcgctggccgtgctccagatctttgctgttagccagtttggttgtgccacaggccagatccctccaaccctgtggcagagggtccaggctgacagagactactctcccttgctgaagaggctggaggtgtcagtggacagagtgaagcagctagccttgaggcagcagccacatgaccatgtcatcacctctgccaacctccaggacctctctctgggaggcaaggatgagctgactatggctgtgcggaaggagctaacggtggctgtgagggacctgctggcccatggactgtatgcctcctccccagggatgagccttgttatggctcctattgcttgtttgctgccagccttctcctcggccccagaggccatgcacccgtgggagctctttgtaaagtactaccatgctaagaacggccgtgcttatgtggaatccccagcccggaagctctcccagtccttcgcccttcctgttacgggaggcactgttgtcacccccaaacagagcctactgacagccatccacatggtgctgacagagcatgacccttttaagcgcagtgcagactcagaattgaaggccttggtgtgcatggcactgaatgagcagcgtctggtgtcctgggtgaacctcatctgcaagtccgggtcactcatcgagcctcactaccagccctggagctacatggcacacacaggctttgagagtgccctcaacctgctcagtcgcctcagcagcctcaagtttagcctccctgtagatctggctgtgcgccagctcaaaaacatcaaagatgccttttgatgagagtgccctaaccccagacaagctccttgttcagtagggatagatgtgctagtcttctagcataggagcaaggaatcagaggtggggttaaaggcatttttcccagaccctgctcaggcagtcggccaaatgagtgcaaagtctgttttccccaccaacttagctctcggaaagatgtgctggagggaccctcttgttaagaaggttctgccaggccgggcgcggtggctcacacctgtaatcccagcactttgggaggccgaggcgggcggatcacaaggtcaggagttcgagaccatcctgtctaacatggtgaaaccccatctctactaaaaatacaaaaattagctaggcggggtagtgcatgcctgtaatcccagctactcaggaggctgaggccggagaatcgcttgagcccgagaggtggagactgcagtaagccaagatcatgccantgcactccagcctgggcaacacagggagactccatctc

SEQ ID NO: 352776 - DNA, 1885 bp, Homo sapiens
  misc_feature (1847)..(1847): n is a, c, g, or t
tttccctttgtctgcataatagacccaattattttcttgccttagagtgagcaggaaaagcaagagcgtctggaaacccaaagggagaagcagaaagaactgatactgcagctcaagacccagctagatgacctggaaacgtttgcctatcaagagggcagttatgactcgctgccacagtccgtggtgttggaaagacagcgggtgatcatagatgagttaataaagaaactggacatgaatctgaatgaggacatcagttccctgtccactgaagagcttcgtcagcgtgtagatgcagcagtggctcagatcgtcaacccagcccgagtcaaagaacagttggttgagcaactgaaaactcagatccgagaccttgagatgtttatcaacttcatccaagatgaagtgggaagccccttgcagacaggtggtggacactgtgagtgcaaggccggtgggaagacaggaaatggctgcagcagaacaggcagcagcagaacgcctccaggaaacagcaaaacaaaggcagaggatgtgaagaaagtccgggagacggggctgcacctgatgcggcgagcgctggccgtgctccagatctttgctgttagccagtttggttgtgccacaggccagatccctccaaccctgtggcagagggtccaggctgacagagactactctcccttgctgaagaggctggaggtgtcagtggacagagtgaagcagctagccttgaggcagcagccacatgaccatgtcatcacctctgccaacctccaggacctctctctgggaggcaaggatgagctgactatggctgtgcggaaggagctaacggtggctgtgagggacctgctggcccatggactgtatgcctcctccccagggatgagccttgttatggctcctattgcttgtttgctgccagccttctcctcggccccagaggccatgcacccgtgggagctctttgtaaagtactaccatgctaagaacggccgtgcttatgtggaatccccagcccggaagctctcccagtccttcgcccttcctgttacgggaggcactgttgtcacccccaaacagagcctactgacagccatccacatggtgctgacagagcatgacccttttaagcgcagtgcagactcagaattgaaggccttggtgtgcatggcactgaatgagcagcgtctggtgtcctgggtgaacctcatctgcaagtccgggtcactcatcgagcctcactaccagccctggagctacatggcacacacaggctttgagagtgccctcaacctgctcagtcgcctcagcagcctcaagtttagcctccctgtagatctggctgtgcgccagctcaaaaacatcaaagatgccttttgatgagagtgccctaaccccagacaagctccttgttcagtagggatagatgtgctagtcttctagcataggagcaaggaatcagaggtggggttaaaggcatttttcccagaccctgctcaggcagtcggccaaatgagtgcaaagtctgttttccccaccaacttagctctcggaaagatgtgctggagggaccctcttgttaagaaggttctgccaggccgggcgcggtggctcacacctgtaatcccagcactttgggaggccgaggcgggcggatcacaaggtcaggagttcgagaccatcctgtctaacatggtgaaaccccatctctactaaaaatacaaaaattagctaggcggggtagtgcatgcctgtaatcccagctactcaggaggctgaggccggagaatcgcttgagcccgagaggtggagactgcagtaagccaagatcatgccantgcactccagcctgggcaacacagggagactccatctc

SEQ ID NO: 352777 - DNA, 1728 bp, Homo sapiens
  misc_feature (24)..(25): n is a, c, g, or t
  misc_feature (1690)..(1690): n is a, c, g, or t
gggctaggtacgaggctgggtgtnncgtggtgttggaaagacagcgggtgatcatagatgagttaataaagaaactggacatgaatctgaatgaggacatcagttccctgtccactgaagagcttcgtcagcgtgtagatgcagcagtggctcagatcgtcaacccagcccgagtcaaagaacagttggttgagcaactgaaaactcagatccgagaccttgagatgtttatcaacttcatccaagatgaagtgggaagccccttgcagacaggtggtggacactgtgagtgcaaggccggtgggaagacaggaaatggctgcagcagaacaggcagcagcagaacgcctccaggaaacagcaaaacaaaggcagaggatgtgaagaaagtccgggagacggggctgcacctgatgcggcgagcgctggccgtgctccagatctttgctgttagccagtttggttgtgccacaggccagatccctccaaccctgtggcagagggtccaggctgacagagactactctcccttgctgaagaggctggaggtgtcagtggacagagtgaagcagctagccttgaggcagcagccacatgaccatgtcatcacctctgccaacctccaggacctctctctgggaggcaaggatgagctgactatggctgtgcggaaggagctaacggtggctgtgagggacctgctggcccatggactgtatgcctcctccccagggatgagccttgttatggctcctattgcttgtttgctgccagccttctcctcggccccagaggccatgcacccgtgggagctctttgtaaagtactaccatgctaagaacggccgtgcttatgtggaatccccagcccggaagctctcccagtccttcgcccttcctgttacgggaggcactgttgtcacccccaaacagagcctactgacagccatccacatggtgctgacagagcatgacccttttaagcgcagtgcagactcagaattgaaggccttggtgtgcatggcactgaatgagcagcgtctggtgtcctgggtgaacctcatctgcaagtccgggtcactcatcgagcctcactaccagccctggagctacatggcacacacaggctttgagagtgccctcaacctgctcagtcgcctcagcagcctcaagtttagcctccctgtagatctggctgtgcgccagctcaaaaacatcaaagatgccttttgatgagagtgccctaaccccagacaagctccttgttcagtagggatagatgtgctagtcttctagcataggagcaaggaatcagaggtggggttaaaggcatttttcccagaccctgctcaggcagtcggccaaatgagtgcaaagtctgttttccccaccaacttagctctcggaaagatgtgctggagggaccctcttgttaagaaggttctgccaggccgggcgcggtggctcacacctgtaatcccagcactttgggaggccgaggcgggcggatcacaaggtcaggagttcgagaccatcctgtctaacatggtgaaaccccatctctactaaaaatacaaaaattagctaggcggggtagtgcatgcctgtaatcccagctactcaggaggctgaggccggagaatcgcttgagcccgagaggtggagactgcagtaagccaagatcatgccantgcactccagcctgggcaacacagggagactccatctc

SEQ ID NO: 352778 - DNA, 342 bp, Homo sapiens
tccctttgtctgcataatagacccaattattttcttgccttagagtgagcaggaaaagcaagagcgtctggaaacccaaagggagaagcagaaagaactgatactgcagctcaagacccagctagatgacctggaaacgtttgcctatcaagagggcagttatgactcgctgccacagtccgtggtgttggaaagacagcgggtgagcagaccccagaggaacctccaccactgcccgaggttaacttgtcccttccagcattcacagggcatcctctctcagctcagttctcctttggccttactgagaatccctctgctggcccaaatcaaagggaaatt

SEQ ID NO: 352779 - DNA, 2405 bp, Homo sapiens
  misc_feature (2367)..(2367): n is a, c, g, or t
cacgaaatattatagctcgatacctggttttatttcgtcacgaggggcggtgctttcagttgtatagatggcggctgtcgaagcggctgcagagccggtaacggtggtggcggctgttgggccaaaggcgaaagacgaagaggaggaggaagaggagccgctgccaccgtgcgaggcggtgcgctgggccccagtgggggcggtggcggaggcccggcctggggcaaccgcgtttttagaagaggcgacggccgaggagcctggcgcggccccgggctccccgccggattcgccgggccggacgctgcggcggctgcgggcagagcggcggcggctggactcggcgctgctggcgctgtcctcgcacttcgcgcaggtgcagttccgcctgcgccaggtggtgcgcggggcgccggcggagcagcagcgccttctgcgggagctcgaagacttcgccttccgcggctgccctcacgtcctaggttacgaagggcccggcgaccccgccagcgatgagggcgatgggctgccaggggaccggccacggttgcggggcgaggaccagagtgagcaggaaaagcaagagcgtctggaaacccaaagggagaagcagaaagaactgatactgcagctcaagacccagctagatgacctggaaacgtttgcctatcaagagggcagttatgactcgctgccacagtccgtggtgttggaaagacagcgggtgatcatagatgagttaataaagaaactggacatgaatctgaatgaggacatcagttccctgtccactgaagagcttcgtcagcgtgtagatgcagcagtggctcagatcgtcaacccagcccgagtcaaagaacagttggttgagcaactgaaaactcagatccgagaccttgagatgtttatcaacttcatccaagatgaagtgggaagccccttgcagacaggtggtggacactgtgagtgcaaggccggtgggaagacaggaaatggctgcagcagaacaggcagcagcagaacgcctccaggaaacagcaaaacaaaggcagaggatgtgaagaaagtccgggagacggggctgcacctgatgcggcgagcgctggccgtgctccagatctttgctgttagccagtttggttgtgccacaggccagatccctccaaccctgtggcagagggtccaggctgacagagactactctcccttgctgaagaggctggaggtgtcagtggacagagtgaagcagctagccttgaggcagcagccacatgaccatgtcatcacctctgccaacctccaggacctctctctgggaggcaaggatgagctgactatggctgtgcggaaggagctaacggtggctgtgagggacctgctggcccatggactgtatgcctcctccccagggatgagccttgttatggctcctattgcttgtttgctgccagccttctcctcggccccagaggccatgcacccgtgggagctctttgtaaagtactaccatgctaagaacggccgtgcttatgtggaatccccagcccggaagctctcccagtccttcgcccttcctgttacgggaggcactgttgtcacccccaaacagagcctactgacagccatccacatggtgctgacagagcatgacccttttaagcgcagtgcagactcagaattgaaggccttggtgtgcatggcactgaatgagcagcgtctggtgtcctgggtgaacctcatctgcaagtccgggtcactcatcgagcctcactaccagccctggagctacatggcacacacaggctttgagagtgccctcaacctgctcagtcgcctcagcagcctcaagtttagcctccctgtagatctggctgtgcgccagctcaaaaacatcaaagatgccttttgatgagagtgccctaaccccagacaagctccttgttcagtagggatagatgtgctagtcttctagcataggagcaaggaatcagaggtggggttaaaggcatttttcccagaccctgctcaggcagtcggccaaatgagtgcaaagtctgttttccccaccaacttagctctcggaaagatgtgctggagggaccctcttgttaagaaggttctgccaggccgggcgcggtggctcacacctgtaatcccagcactttgggaggccgaggcgggcggatcacaaggtcaggagttcgagaccatcctgtctaacatggtgaaaccccatctctactaaaaatacaaaaattagctaggcggggtagtgcatgcctgtaatcccagctactcaggaggctgaggccggagaatcgcttgagcccgagaggtggagactgcagtaagccaagatcatgccantgcactccagcctgggcaacacagggagactccatctc

SEQ ID NO: 352780 - DNA, 677 bp, Homo sapiens
tttccctttgtctgcataatagacccaattattttcttgccttagagtgagcaggaaaagcaagagcgtctggaaacccaaagggagaagcagaaagaactgatactgcagctcaagacccagctagatgacctggaaacgtttgcctatcaagagggcagttatgactcgctgccacagtccgtggtgttggaaagacagcgggtgatcatagatgagttaataaagaaactggacatgaatctgaatgaggacatcagttccctgtccactgaagagcttcgtcagcgtgtagatgcagcagtggctcagatcgtcaacccagcccgagtcaaagaacagttggttgagcaactgaaaactcagatccgagaccttgagatgtttatcaacttcatccaagatgaagtgggaagccccttgcagacaggtggtggacactgtgagtgcaaggccggtgggaagacaggaaatggctgcagcagaacaggcagcagcagaacgcctccaggaaacagcaaaagtaagtgcagtttccagaacaggcaaatctctagagacagaaagtagatgagtggttgcctagggcttgggtgtgttgaggagaagaggggaatgagaaatgctgatggtatggatttgcttttgggaaggatgaaatattctaaaattgattg

SEQ ID NO: 352781 - DNA, 1509 bp, Homo sapiens
  misc_feature (1471)..(1471): n is a, c, g, or t
aaaattcggctaggtacgaggcctgggatgaagtgggaagccccttgcagacaggtggtggacactgtgagtgcaaggccggtgggaagacaggaaatggctgcagcagaacaggcagcagcagaacgcctccaggaaacagcaaaacaaaggcagaggatgtgaagaaagtccgggagacggggctgcacctgatgcggcgagcgctggccgtgctccagatctttgctgttagccagtttggttgtgccacaggccagatccctccaaccctgtggcagagggtccaggctgacagagactactctcccttgctgaagaggctggaggtgtcagtggacagagtgaagcagctagccttgaggcagcagccacatgaccatgtcatcacctctgccaacctccaggacctctctctgggaggcaaggatgagctgactatggctgtgcggaaggagctaacggtggctgtgagggacctgctggcccatggactgtatgcctcctccccagggatgagccttgttatggctcctattgcttgtttgctgccagccttctcctcggccccagaggccatgcacccgtgggagctctttgtaaagtactaccatgctaagaacggccgtgcttatgtggaatccccagcccggaagctctcccagtccttcgcccttcctgttacgggaggcactgttgtcacccccaaacagagcctactgacagccatccacatggtgctgacagagcatgacccttttaagcgcagtgcagactcagaattgaaggccttggtgtgcatggcactgaatgagcagcgtctggtgtcctgggtgaacctcatctgcaagtccgggtcactcatcgagcctcactaccagccctggagctacatggcacacacaggctttgagagtgccctcaacctgctcagtcgcctcagcagcctcaagtttagcctccctgtagatctggctgtgcgccagctcaaaaacatcaaagatgccttttgatgagagtgccctaaccccagacaagctccttgttcagtagggatagatgtgctagtcttctagcataggagcaaggaatcagaggtggggttaaaggcatttttcccagaccctgctcaggcagtcggccaaatgagtgcaaagtctgttttccccaccaacttagctctcggaaagatgtgctggagggaccctcttgttaagaaggttctgccaggccgggcgcggtggctcacacctgtaatcccagcactttgggaggccgaggcgggcggatcacaaggtcaggagttcgagaccatcctgtctaacatggtgaaaccccatctctactaaaaatacaaaaattagctaggcggggtagtgcatgcctgtaatcccagctactcaggaggctgaggccggagaatcgcttgagcccgagaggtggagactgcagtaagccaagatcatgccantgcactccagcctgggcaacacagggagactccatctc

SEQ ID NO: 352782 - DNA, 3066 bp, Homo sapiens
cacttccggcctcgcgagggccgcaatcactgctccgcagttcccgcctgcattcctcgcgccgtcttcctggagtcccagctctccttcagcccgccccaacgctgacgctcagtcctcaggcgtcgagggtagctcctgtgaggggctcgcttggcgcacgcaaaacgctcagcgcgcaccacagggcgtccgccccaaccccgcccccggaggcctccagctcggccccgcccctgtcccttccccgtcgcggaggcagcctagcctcgcgccccgcccgttgcttctgccctccggccttcccgccgccgtcgccgggaccagccgctcggggccgggctgatacagccgcttcaccgtgcccctgcccgcgaccatggcctcctccgaggtggcgcggcacctgctctttcagtctcacatggcaacgaaaacaacttgtatgtcttcacaaggatcagatgatgaacagataaaaagagaaaacattcgttcgttgactatgtctggccatgttggttttgagagtttgcctgatcagctggtgaacagatccattcagcaaggtttctgctttaatattctctgtgtgggggaaactggaattggaaaatcaacactgattgacacattgtttaatactaattttgaagactatgaatcctcacatttttgcccaaatgttaaacttaaagctcagacatatgaactccaggaaagtaatgttcaattgaaattgaccattgtgaatacagtgggatttggtgaccaaataaataaagaagagagctaccaaccaatagttgactacatagatgctcagtttgaggcctatctccaagaagaactgaagattaagcgttctctctttacctaccatgattctcgcatccatgtgtgtctctacttcatttcaccgacaggccactctctgaagacacttgatctcttaaccatgaagaaccttgacagcaaggtaaacattataccagtgattgccaaagcagatacggtttctaaaactgaattacagaagtttaagatcaagctcatgagtgaattggtcagcaatggcgtccagatataccagttcccaacggatgatgacactattgctaaggtcaacgctgcaatgaatggacagttgccgtttgctgttgtgggaagtatggatgaggtaaaagtcggaaacaagatggtcaaagctcgccagtacccttggggtgttgtacaagtggaaaatgaaaaccactgtgactttgtaaagctgcgggaaatgctcatttgtacaaatatggaggacctgcgagagcagacccataccaggcactatgagctttacaggcgctgcaaactggaggaaatgggctttacagatgtgggcccagaaaacaagccagtcagtgttcaagagacctatgaagccaaaagacatgagttccatggtgaacgtcagaggaaggaagaagaaatgaaacagatgtttgtgcagcgagtaaaggagaaagaagccatattgaaagaagctgagagagagctacaggccaaatttgagcaccttaagagacttcaccaagaagagagaatgaagcttgaagaaaagagaagacttttggaagaagaaataattgctttctctaaaaagaaagctacctccgagatatttcacagccagtcctttctggcaacaggcagcaacctgaggaaggacaaggaccgtaagaactccaattttttgtaaaacagaagttccagagcacagaaggtcatcatcacaagcaaactttattaaaaaaaaactagaagtgtgctttgattttgctgttatttgttttatcacttctatatttggtgaacagccacagttactgatatttatggaaaagtactttcaagtacaaggtcaatacataagccagagtgaatgatactacaagttgagcatctctaattcaaaaatctgaaatccagaagcttcaaaatctgaatctttttgagcactgacttgaccccacaagtggaaaattccccacccgacacctttgctttctgatggttcagtttaaacagattttgtttcttgcacaaaatttttgtataaattactttcaggctatatgtataaggtggatgtgaaacatgaattatgtaattagagtcgggtcccgttgtgtatatgcagatattccaaacctgaaatccaaaacacttctggtccctagcattttggataagggatactcagcttgtacctatatattcatatatattcactgttgttagaaatgtttaagttgctgttctgtgatgaatctaaatcttttctcttgctaccaagctattgtcactgcagtgcattataccaaagagcgaagtcagtgccactgaaaatacagaacccattaatatcgtggctatctgattacatttatattccaagatgaaccttttttatatatgctaaaaattttggggaatatgttttgggatgtattatggagctaaaactctaacctcttaatagttttatagaacttaaaaattttttatacaattacccaattggtgatatgatcttaagcttttgtgtcagattatttaatatgatgacttcatgctttattatgccttattatggctgacgtattactgtggtgaaacaaaatatctttaaaagttaaaacatccagatatataagctattttttcctaaggataaagtacctttgagcatgagtgtatcacagctttcattaggaaaacttttcattacatacttgtttaaactctgtcttccagggtaaaaataataaggttgaatcattttattaaaaatactttttaagaaaataactatgaacatctgaatattaaagatataaaaatgcacataattcatatttcaggtggtatttgcattcagtgccttactggtattctcagaacattttaatgatttctaacatttcttaacagtcatagatatatacattttcattttttgtacttgaatattctaaataaaactgacatttactcttgacaaataaaacatatatttac

SEQ ID NO: 352783 - DNA, 3183 bp, Homo sapiens
  misc_feature (3104)..(3104): n is a, c, g, or t
cacttccggcctcgcgagggccgcaatcactgctccgcagttcccgcctgcattcctcgcgccgtcttcctggagtcccagctctccttcagcccgccccaacgctgacgctcagtcctcaggcgtcgagggtagctcctgtgaggggctcgcttggcgcacgcaaaacgctcagcgcgcaccacagggcgtccgccccaaccccgcccccggaggcctccagctcggccccgcccctgtcccttccccgtcgcggaggcagcctagcctcgcgccccgcccgttgcttctgccctccggccttcccgccgccgtcgccgggaccagccgctcggggccgggctgatacagccgcttcaccgtgcccctgcccgcgaccatggcctcctccgaggtggcgcggcacctgaaaagagaaaacattcgttcgttgactatgtctggccatgttggttttgagagtttgcctgatcagctggtgaacagatccattcagcaaggtttctgctttaatattctctgtgtgggggaaactggaattggaaaatcaacactgattgacacattgtttaatactaattttgaagactatgaatcctcacatttttgcccaaatgttaaacttaaagctcagacatatgaactccaggaaagtaatgttcaattgaaattgaccattgtgaatacagtgggatttggtgaccaaataaataaagaagagagctaccaaccaatagttgactacatagatgctcagtttgaggcctatctccaagaagaactgaagattaagcgttctctctttacctaccatgattctcgcatccatgtgtgtctctacttcatttcaccgacaggccactctctgaagacacttgatctcttaaccatgaagaaccttgacagcaaggtaaacattataccagtgattgccaaagcagatacggtttctaaaactgaattacagaagtttaagatcaagctcatgagtgaattggtcagcaatggcgtccagatataccagttcccaacggatgatgacactattgctaaggtcaacgctgcaatgaatggacagttgccgtttgctgttgtgggaagtatggatgaggtaaaagtcggaaacaagatggtcaaagctcgccagtacccttggggtgttgtacaagtggaaaatgaaaaccactgtgactttgtaaagctgcgggaaatgctcatttgtacaaatatggaggacctgcgagagcagacccataccaggcactatgagctttacaggcgctgcaaactggaggaaatgggctttacagatgtgggcccagaaaacaagccagtcagtgttcaagagacctatgaagccaaaagacatgagttccatggtgaacgtcagaggaaggaagaagaaatgaaacagatgtttgtgcagcgagtaaaggagaaagaagccatattgaaagaagctgagagagagctacaggccaaatttgagcaccttaagagacttcaccaagaagagagaatgaagcttgaagaaaagagaagacttttggaagaagaaataattgctttctctaaaaagaaagctacctccgagatatttcacagccagtcctttctggcaacaggcagcaacctgaggaaggacaaggaccgtaagaactccaattttttgtaaaacagaagttccagagcacagaaggtcatcatcacaagcaaactttattaaaaaaaaactagaagtgtgctttgattttgctgttatttgttttatcacttctatatttggtgaacagccacagttactgatatttatggaaaagtactttcaagtacaaggtcaatacataagccagagtgaatgatactacaagttgagcatctctaattcaaaaatctgaaatccagaagcttcaaaatctgaatctttttgagcactgacttgaccccacaagtggaaaattccccacccgacacctttgctttctgatggttcagtttaaacagattttgtttcttgcacaaaatttttgtataaattactttcaggctatatgtataaggtggatgtgaaacatgaattatgtaattagagtcgggtcccgttgtgtatatgcagatattccaaacctgaaatccaaaacacttctggtccctagcattttggataagggatactcagcttgtacctatatattcatatatattcactgttgttagaaatgtttaagttgctgttctgtgatgaatctaaatcttttctcttgctaccaagctattgtcactgcagtgcattataccaaagagcgaagtcagtgccactgaaaatacagaacccattaatatcgtggctatctgattacatttatattccaagatgaaccttttttatatatgctaaaaattttggggaatatgttttgggatgtattatggagctaaaactctaacctcttaatagttttatagaacttaaaaattttttatacaattacccaattggtgatatgatcttaagcttttgtgtcagattatttaatatgatgacttcatgctttattatgccttattatggctgacgtattactgtggtgaaacaaaatatctttaaaagttaaaacatccagatatataagctattttttcctaaggataaagtacctttgagcatgagtgtatcacagctttcattaggaaaacttttcattacatacttgtttaaactctgtcttccagggtaaaaataataaggttgaatcattttattaaaaatactttttaagaaaataactatgaacatctgaatattaaagatataaaaatgcacataattcatatttcaggtggtatttgcattcagtgccttactggtattctcagaacattttaatgatttctaacatttcttaacagtcatagatatatacattttcattttttgtacttgaatattctaaataaaactgacatttactcttgacaaataaaacatatatttactaaaatgtgtttaattttcctttctgaaaactctcattttaaaaacgttcatttaattatgtatttgaattattttggagatgaggtattttatgagtattttcagncaatgaaacttattagtctgtgtcagattctgagcaatcatagagtcatctaagttgtaaataaaaccttgcatagcac

SEQ ID NO: 352784 - DNA, 3267 bp, Homo sapiens
  misc_feature (3188)..(3188): n is a, c, g, or t
tccgcggcggccgggcgcctggggcgggagaggagcctctgcggagcctgggcgcggccggaccccggttcgcggggcgcggcgccagcgtcgggacggtgggagagttcttgaacgacttcccggtctttgccaaaagttacatccacagcggtgtttgtgggtctcttacggctataacggagttgaaggcgcagtgcggactgattgaatagcggtcatcttttgcagccgtgagcacttccgagcctccctgccgccgggagaaagcccggctcccctggcttttcaaaagctctcccgttttatccgatggtgtggtcgtccaagttttcctccattgggattttaaaccgtttttttcccgccttgactcttttgtactctaaaagaacgcgtttgttcactgttttgaacctttccagttacttttgtagatttatctcgcttgttagtaagccagcggttttccaagtgtggttacaactattttcgttaatagtaccaaggtcgtgtacatcgagttttccaaaggctacatgctctttcagtctcacatggcaacgaaaacaacttgtatgtcttcacaaggatcagatgatgaacagatagggaaactggaattggaaaatcaacactgattgacacattgtttaatactaattttgaagactatgaatcctcacatttttgcccaaatgttaaacttaaagctcagacatatgaactccaggaaagtaatgttcaattgaaattgaccattgtgaatacagtgggatttggtgaccaaataaataaagaagagagctaccaaccaatagttgactacatagatgctcagtttgaggcctatctccaagaagaactgaagattaagcgttctctctttacctaccatgattctcgcatccatgtgtgtctctacttcatttcaccgacaggccactctctgaagacacttgatctcttaaccatgaagaaccttgacagcaaggtaaacattataccagtgattgccaaagcagatacggtttctaaaactgaattacagaagtttaagatcaagctcatgagtgaattggtcagcaatggcgtccagatataccagttcccaacggatgatgacactattgctaaggtcaacgctgcaatgaatggacagttgccgtttgctgttgtgggaagtatggatgaggtaaaagtcggaaacaagatggtcaaagctcgccagtacccttggggtgttgtacaagtggaaaatgaaaaccactgtgactttgtaaagctgcgggaaatgctcatttgtacaaatatggaggacctgcgagagcagacccataccaggcactatgagctttacaggcgctgcaaactggaggaaatgggctttacagatgtgggcccagaaaacaagccagtcagtgttcaagagacctatgaagccaaaagacatgagttccatggtgaacgtcagaggaaggaagaagaaatgaaacagatgtttgtgcagcgagtaaaggagaaagaagccatattgaaagaagctgagagagagctacaggccaaatttgagcaccttaagagacttcaccaagaagagagaatgaagcttgaagaaaagagaagacttttggaagaagaaataattgctttctctaaaaagaaagctacctccgagatatttcacagccagtcctttctggcaacaggcagcaacctgaggaaggacaaggaccgtaagaactccaattttttgtaaaacagaagttccagagcacagaaggtcatcatcacaagcaaactttattaaaaaaaaactagaagtgtgctttgattttgctgttatttgttttatcacttctatatttggtgaacagccacagttactgatatttatggaaaagtactttcaagtacaaggtcaatacataagccagagtgaatgatactacaagttgagcatctctaattcaaaaatctgaaatccagaagcttcaaaatctgaatctttttgagcactgacttgaccccacaagtggaaaattccccacccgacacctttgctttctgatggttcagtttaaacagattttgtttcttgcacaaaatttttgtataaattactttcaggctatatgtataaggtggatgtgaaacatgaattatgtaattagagtcgggtcccgttgtgtatatgcagatattccaaacctgaaatccaaaacacttctggtccctagcattttggataagggatactcagcttgtacctatatattcatatatattcactgttgttagaaatgtttaagttgctgttctgtgatgaatctaaatcttttctcttgctaccaagctattgtcactgcagtgcattataccaaagagcgaagtcagtgccactgaaaatacagaacccattaatatcgtggctatctgattacatttatattccaagatgaaccttttttatatatgctaaaaattttggggaatatgttttgggatgtattatggagctaaaactctaacctcttaatagttttatagaacttaaaaattttttatacaattacccaattggtgatatgatcttaagcttttgtgtcagattatttaatatgatgacttcatgctttattatgccttattatggctgacgtattactgtggtgaaacaaaatatctttaaaagttaaaacatccagatatataagctattttttcctaaggataaagtacctttgagcatgagtgtatcacagctttcattaggaaaacttttcattacatacttgtttaaactctgtcttccagggtaaaaataataaggttgaatcattttattaaaaatactttttaagaaaataactatgaacatctgaatattaaagatataaaaatgcacataattcatatttcaggtggtatttgcattcagtgccttactggtattctcagaacattttaatgatttctaacatttcttaacagtcatagatatatacattttcattttttgtacttgaatattctaaataaaactgacatttactcttgacaaataaaacatatatttactaaaatgtgtttaattttcctttctgaaaactctcattttaaaaacgttcatttaattatgtatttgaattattttggagatgaggtattttatgagtattttcagncaatgaaacttattagtctgtgtcagattctgagcaatcatagagtcatctaagttgtaaataaaaccttgcatagcac

SEQ ID NO: 352785 - DNA, 2430 bp, Homo sapiens
  misc_feature (20)..(20): n is a, c, g, or t
  misc_feature (32)..(32): n is a, c, g, or t
  misc_feature (41)..(41): n is a, c, g, or t
caccgacgagtagaaggcgngcccggggttantccggccgnggacgccattctcctgcctcagcctcccgagtagctgggactacagctctttcagtctcacatggcaacgaaaacaacttgtatgtcttcacaaggatcagatgatgaacagatactaccaaccaatagttgactacatagatgctcagtttgaggcctatctccaagaagaactgaagattaagcgttctctctttacctaccatgattctcgcatccatgtgtgtctctacttcatttcaccgacaggccactctctgaagacacttgatctcttaaccatgaagaaccttgacagcaaggtaaacattataccagtgattgccaaagcagatacggtttctaaaactgaattacagaagtttaagatcaagctcatgagtgaattggtcagcaatggcgtccagatataccagttcccaacggatgatgacactattgctaaggtcaacgctgcaatgaatggacagttgccgtttgctgttgtgggaagtatggatgaggtaaaagtcggaaacaagatggtcaaagctcgccagtacccttggggtgttgtacaagtggaaaatgaaaaccactgtgactttgtaaagctgcgggaaatgctcatttgtacaaatatggaggacctgcgagagcagacccataccaggcactatgagctttacaggcgctgcaaactggaggaaatgggctttacagatgtgggcccagaaaacaagccagtcagtgttcaagagacctatgaagccaaaagacatgagttccatggtgaacgtcagaggaaggaagaagaaatgaaacagatgtttgtgcagcgagtaaaggagaaagaagccatattgaaagaagctgagagagagctacaggccaaatttgagcaccttaagagacttcaccaagaagagagaatgaagcttgaagaaaagagaagacttttggaagaagaaataattgctttctctaaaaagaaagctacctccgagatatttcacagccagtcctttctggcaacaggcagcaacctgaggaaggacaaggaccgtaagaactccaattttttgtaaaacagaagttccagagcacagaaggtcatcatcacaagcaaactttattaaaaaaaaactagaagtgtgctttgattttgctgttatttgttttatcacttctatatttggtgaacagccacagttactgatatttatggaaaagtactttcaagtacaaggtcaatacataagccagagtgaatgatactacaagttgagcatctctaattcaaaaatctgaaatccagaagcttcaaaatctgaatctttttgagcactgacttgaccccacaagtggaaaattccccacccgacacctttgctttctgatggttcagtttaaacagattttgtttcttgcacaaaatttttgtataaattactttcaggctatatgtataaggtggatgtgaaacatgaattatgtaattagagtcgggtcccgttgtgtatatgcagatattccaaacctgaaatccaaaacacttctggtccctagcattttggataagggatactcagcttgtacctatatattcatatatattcactgttgttagaaatgtttaagttgctgttctgtgatgaatctaaatcttttctcttgctaccaagctattgtcactgcagtgcattataccaaagagcgaagtcagtgccactgaaaatacagaacccattaatatcgtggctatctgattacatttatattccaagatgaaccttttttatatatgctaaaaattttggggaatatgttttgggatgtattatggagctaaaactctaacctcttaatagttttatagaacttaaaaattttttatacaattacccaattggtgatatgatcttaagcttttgtgtcagattatttaatatgatgacttcatgctttattatgccttattatggctgacgtattactgtggtgaaacaaaatatctttaaaagttaaaacatccagatatataagctattttttcctaaggataaagtacctttgagcatgagtgtatcacagctttcattaggaaaacttttcattacatacttgtttaaactctgtcttccagggtaaaaataataaggttgaatcattttattaaaaatactttttaagaaaataactatgaacatctgaatattaaagatataaaaatgcacataattcatatttcaggtggtatttgcattcagtgccttactggtattctcagaacattttaatgatttctaacatttcttaacagtcatagatatatacattttcattttttgtacttgaatattctaaataaaactgacatttactcttgacaaataaaacatatatttac

SEQ ID NO: 352786 - DNA, 3375 bp, Homo sapiens
cacttccggcctcgcgagggccgcaatcactgctccgcagttcccgcctgcattcctcgcgccgtcttcctggagtcccagctctccttcagcccgccccaacgctgacgctcagtcctcaggcgtcgagggtagctcctgtgaggggctcgcttggcgcacgcaaaacgctcagcgcgcaccacagggcgtccgccccaaccccgcccccggaggcctccagctcggccccgcccctgtcccttccccgtcgcggaggcagcctagcctcgcgccccgcccgttgcttctgccctccggccttcccgccgccgtcgccgggaccagccgctcggggccgggctgatacagccgcttcaccgtgcccctgcccgcgaccatggcctcctccgaggtggcgcggcacctgctctttcagtctcacatggcaacgaaaacaacttgtatgtcttcacaaggatcagatgatgaacagataaaaagagaaaacattcgttcgttgactatgtctggccatgttggttttgagagtttgcctgatcagctggtgaacagatccattcagcaaggtttctgctttaatattctctgtgtgggggaaactggaattggaaaatcaacactgattgacacattgtttaatactaattttgaagactatgaatcctcacatttttgcccaaatgttaaacttaaagctcagacatatgaactccaggaaagtaatgttcaattgaaattgaccattgtgaatacagtgggatttggtgaccaaataaataaagaagagagctaccaaccaatagttgactacatagatgctcagtttgaggcctatctccaagaagaactgaagattaagcgttctctctttacctaccatgattctcgcatccatgtgtgtctctacttcatttcaccgacaggccactctctgaagacacttgatctcttaaccatgaagaaccttgacagcaaggtaaacattataccagtgattgccaaagcagatacggtttctaaaactgaattacagaagtttaagatcaagctcatgagtgaattggtcagcaatggcgtccagatataccagttcccaacggatgatgacactattgctaaggtcaacgctgcaatgaatggacagttgccgtttgctgttgtgggaagtatggatgaggtaaaagtcggaaacaagatggtcaaagctcgccagtacccttggggtgttgtacaagtggaaaatgaaaaccactgtgactttgtaaagctgcgggaaatgctcatttgtacaaatatggaggacctgcgagagcagacccataccaggcactatgagctttacaggcgctgcaaactggaggaaatgggctttacagatgtgggcccagaaaacaagccagtcagtgttcaagagacctatgaagccaaaagacatgagttccatggtgaacgtcagaggaaggaagaagaaatgaaacagatgtttgtgcagcgagtaaaggagaaagaagccatattgaaagaagctgagagagagctacaggccaaatttgagcaccttaagagacttcaccaagaagagagaatgaagcttgaagaaaagagaagacttttggaagaagaaataattgctttctctaaaaagaaagctacctccgagatatttcacagccagtcctttctggcaacaggcagcaacctgaggaaggacaaggaccgtaagaagtaagaggcccagccaccctccctggcagccctgcccacacttgtcacattgccctgtcggatcttcctagcgcttcttacttctgcttccttatgctttgtcttccttctccaactaaatgtcagctcctggagaggagagaccttgtccctcttgttcactgctgtttccccagcatccagaacagcacctggcacatgttatgtgttcagtatttgccaaaatgaatgaatgaacaaaataaaaatacatcacagtgtgaaaaggatcagttagctgggggaaaatggctgctcttattgaatagcccagccgtggccctagtacacagctaatggctgctgacctaccatgagttattttgaatttcatgtctaaataaagctgtgccctttgttggggaattatagacataagatagtattttattgaattaattcttaggttcagttttttagaacaaattctactgatactgattttgtgagaatttttattttaataagggaaccaggctgtcgattcgaactcctgtgcattgatgtcagagcttgtgaaaccaatggtggacgtaaagacgcagagaaaggtagagagggccacagtgcaagggggcagccatgagtagcatgtggatgataatcgcaaggcgtgtaggtttggggtatgtgttaaaatcagttacccaagttttagaaaataagtttatttttcctttttgataatttccttctgtactttgtgtcccttgttttatttctcccacttaagtatccctgtcggtttaactatttggctcttgaggaaattcatcatgccttgttctattcagaatgctcatttgggggactctgcctcagtttactctagctacctctgtgctagcagcgttgcatgctcccatgttccccacagagcaacacatctggtttaatgctctcactgcatctatttcagacccattttcagaatattgcaactcaactttaaaataggaaaacataaccttggcccattggtggctttcaatttttaaatatggagaagtaaaccacaggactttggcagattttattggcttatatattttacaggtatttttgtttgtttgtttgtttttttggaaaagaggaaggaattctcatgtatgatctttcaatgcaagctctccaagggcatggatctttatcttgttcattgatatagccatccccagagcctagagcagttgtctggtacatagtaggcatgcaattatttttgaaagaataaatagtataaaagctgtattttattcaagcattgaatttagaaagataaactataaatttattactgcttttcaacatgctttggattttaaagctaatggatcttttattaataccttttttcctttcatcttaacccagtgttactaaaattagatttcccattttttcccctatatgaaagataatttacatttaccttgtaaaaattatcaccctgctccacttgagaaccctgctgttgtttgcaaaatcaggaccaagcccatattttttgagagctctctagaagaatttatcttcaagaaaatatggtgtgggtcaggttttcttttcttttcaaagtcccatggcagatatcctataatatactag

SEQ ID NO: 352787 - DNA, 3410 bp, Homo sapiens
  misc_feature (3331)..(3331): n is a, c, g, or t
cacttccggcctcgcgagggccgcaatcactgctccgcagttcccgcctgcattcctcgcgccgtcttcctggagtcccagctctccttcagcccgccccaacgctgacgctcagtcctcaggcgtcgagggtagctcctgtgaggggctcgcttggcgcacgcaaaacgctcagcgcgcaccacagggcgtccgccccaaccccgcccccggaggcctccagctcggccccgcccctgtcccttccccgtcgcggaggcagcctagcctcgcgccccgcccgttgcttctgccctccggccttcccgccgccgtcgccgggaccagccgctcggggccgggctgatacagccgcttcaccgtgcccctgcccgcgaccatggcctcctccgaggtggcgcggcacctgctctttcagtctcacatggcaacgaaaacaacttgtatgtcttcacaaggatcagatgatgaacagataaaaagagaaaacattcgttcgttgactatgtctggccatgttggttttgagagtttgcctgatcagctggtgaacagatccattcagcaaggtttctgctttaatattctctgtgtgggggaaactggaattggaaaatcaacactgattgacacattgtttaatactaattttgaagactatgaatcctcacatttttgcccaaatgttaaacttaaagctcagacatatgaactccaggaaagtaatgttcaattgaaattgaccattgtgaatacagtgggatttggtgaccaaataaataaagaagagagctaccaaccaatagttgactacatagatgctcagtttgaggcctatctccaagaagaactgaagattaagcgttctctctttacctaccatgattctcgcatccatgtgtgtctctacttcatttcaccgacaggccactctctgaagacacttgatctcttaaccatgaagaaccttgacagcaaggtaaacattataccagtgattgccaaagcagatacggtttctaaaactgaattacagaagtttaagatcaagctcatgagtgaattggtcagcaatggcgtccagatataccagttcccaacggatgatgacactattgctaaggtcaacgctgcaatgaatggacagttgccgtttgctgttgtgggaagtatggatgaggtaaaagtcggaaacaagatggtcaaagctcgccagtacccttggggtgttgtacaagtggaaaatgaaaaccactgtgactttgtaaagctgcgggaaatgctcatttgtacaaatatggaggacctgcgagagcagacccataccaggcactatgagctttacaggcgctgcaaactggaggaaatgggctttacagatgtgggcccagaaaacaagccagtcagtgttcaagagacctatgaagccaaaagacatgagttccatggtgaacgtcagaggaaggaagaagaaatgaaacagatgtttgtgcagcgagtaaaggagaaagaagccatattgaaagaagctgagagagagctacaggccaaatttgagcaccttaagagacttcaccaagaagagagaatgaagcttgaagaaaagagaagacttttggaagaagaaataattgctttctctaaaaagaaagctacctccgagatatttcacagccagtcctttctggcaacaggcagcaacctgaggaaggacaaggaccgtaagaaggaaccaggctgtcgattcgaactcctgtgcattgatgtcagagcttgtgaaaccaatggtggacgtaaagacgcagagaaaggtagagagggccacagtgcaagggggcagccatgagtagcatgtggatgataatcgcaaggcgtgtaggtttgggctccaattttttgtaaaacagaagttccagagcacagaaggtcatcatcacaagcaaactttattaaaaaaaaactagaagtgtgctttgattttgctgttatttgttttatcacttctatatttggtgaacagccacagttactgatatttatggaaaagtactttcaagtacaaggtcaatacataagccagagtgaatgatactacaagttgagcatctctaattcaaaaatctgaaatccagaagcttcaaaatctgaatctttttgagcactgacttgaccccacaagtggaaaattccccacccgacacctttgctttctgatggttcagtttaaacagattttgtttcttgcacaaaatttttgtataaattactttcaggctatatgtataaggtggatgtgaaacatgaattatgtaattagagtcgggtcccgttgtgtatatgcagatattccaaacctgaaatccaaaacacttctggtccctagcattttggataagggatactcagcttgtacctatatattcatatatattcactgttgttagaaatgtttaagttgctgttctgtgatgaatctaaatcttttctcttgctaccaagctattgtcactgcagtgcattataccaaagagcgaagtcagtgccactgaaaatacagaacccattaatatcgtggctatctgattacatttatattccaagatgaaccttttttatatatgctaaaaattttggggaatatgttttgggatgtattatggagctaaaactctaacctcttaatagttttatagaacttaaaaattttttatacaattacccaattggtgatatgatcttaagcttttgtgtcagattatttaatatgatgacttcatgctttattatgccttattatggctgacgtattactgtggtgaaacaaaatatctttaaaagttaaaacatccagatatataagctattttttcctaaggataaagtacctttgagcatgagtgtatcacagctttcattaggaaaacttttcattacatacttgtttaaactctgtcttccagggtaaaaataataaggttgaatcattttattaaaaatactttttaagaaaataactatgaacatctgaatattaaagatataaaaatgcacataattcatatttcaggtggtatttgcattcagtgccttactggtattctcagaacattttaatgatttctaacatttcttaacagtcatagatatatacattttcattttttgtacttgaatattctaaataaaactgacatttactcttgacaaataaaacatatatttactaaaatgtgtttaattttcctttctgaaaactctcattttaaaaacgttcatttaattatgtatttgaattattttggagatgaggtattttatgagtattttcagncaatgaaacttattagtctgtgtcagattctgagcaatcatagagtcatctaagttgtaaataaaaccttgcatagcac

SEQ ID NO: 352788 - DNA, 1652 bp, Homo sapiens
cacttccggcctcgcgagggccgcaatcactgctccgcagttcccgcctgcattcctcgcgccgtcttcctggagtcccagctctccttcagcccgccccaacgctgacgctcagtcctcaggcgtcgagggtagctcctgtgaggggctcgcttggcgcacgcaaaacgctcagcgcgcaccacagggcgtccgccccaaccccgcccccggaggcctccagctcggccccgcccctgtcccttccccgtcgcggaggcagcctagcctcgcgccccgcccgttgcttctgccctccggccttcccgccgccgtcgccgggaccagccgctcggggccgggctgatacagccgcttcaccgtgcccctgcccgcgaccatggcctcctccgaggtggcgcggcacctgctctttcagtctcacatggcaacgaaaacaacttgtatgtcttcacaaggatcagatgatgaacagataaaaagagaaaacattcgttcgttgactatgtctggccatgttggttttgagagtttgcctgatcagctggtgaacagatccattcagcaaggtttctgctttaatattctctgtgtgggggaaactggaattggaaaatcaacactgattgacacattgtttaatactaattttgaagactatgaatcctcacatttttgcccaaatgttaaacttaaagctcagacatatgaactccaggaaagtaatgttcaattgaaattgaccattgtgaatacagtgggatttggtgaccaaataaataaagaagagagctaccaaccaatagttgactacatagatgctcagtttgaggcctatctccaagaagaactgaagattaagcgttctctctttacctaccatgattctcgcatccatgtgtgtctctacttcatttcaccgacaggccactctctgaagacacttgatctcttaaccatgaagaaccttgacagcaaggtaaacattataccagtgattgccaaagcagatacggtttctaaaactgaattacagaagtttaagatcaagctcatgagtgaattggtcagcaatggcgtccagatataccagttcccaacggatgatgacactattgctaaggtcaacgctgcaatgaatggacagttgccgtttgctgttgtgggaagtatggatgaggtaaaagtcggaaacaagatggtcaaagctcgccagtacccttggggtgttgtacaagtggaaaatgaaaaccactgtgactttgtaaagctgcgggaaatgctcatttgtacaaatatggaggacctgcgagagcagacccataccaggcactatgagctttacaggcgctgcaaactggaggaaatgggctttacagatgtgggcccagaaaacaagccagtcagctgcttggactccgtagagtggaggcgccacagcctgctcacgtggccctgatcagtggacacgtggctgtcagttgcttgatgtcacagcaaacgtcgccgtgactgcctgaccacatgccgctcctttgtgcacaggtgatctctggctcagctcgcctccctgggccatgctttttgtgttcccaccacattgccacacccatgagttctggccactctgagggcaatcgcaaaaaaaaaaa

SEQ ID NO: 352789 - DNA, 2206 bp, Homo sapiens
attctcccacctcagcctcccatgtagctgggattacaggcacctgctatcatgcccagctaatttttttatttttgtagagacagggtttcactatgttggccaggctggtcttggactcctgaccttaggtgatccacctgcctcggcctcccaaagtgttgggattacaggcgtgagccgccatacccgacctatatcactttttagcaggagagtaacacaaataactttttagtgttcaagagacctatgaagccaaaagacatgagttccatggtgaacgtcagaggaaggaagaagaaatgaaacagatgtttgtgcagcgagtaaaggagaaagaagccatattgaaagaagctgagagagagctacaggccaaatttgagcaccttaagagacttcaccaagaagagagaatgaagcttgaagaaaagagaagacttttggaagaagaaataattgctttctctaaaaagaaagctacctccgagatatttcacagccagtcctttctggcaacaggcagcaacctgaggaaggacaaggaccgtaagaagtaagaggcccagccaccctccctggcagccctgcccacacttgtcacattgccctgtcggatcttcctagcgcttcttacttctgcttccttatgctttgtcttccttctccaactaaatgtcagctcctggagaggagagaccttgtccctcttgttcactgctgtttccccagcatccagaacagcacctggcacatgttatgtgttcagtatttgccaaaatgaatgaatgaacaaaataaaaatacatcacagtgtgaaaaggatcagttagctgggggaaaatggctgctcttattgaatagcccagccgtggccctagtacacagctaatggctgctgacctaccatgagttattttgaatttcatgtctaaataaagctgtgccctttgttggggaattatagacataagatagtattttattgaattaattcttaggttcagttttttagaacaaattctactgatactgattttgtgagaatttttattttaataagggaaccaggctgtcgattcgaactcctgtgcattgatgtcagagcttgtgaaaccaatggtggacgtaaagacgcagagaaaggtagagagggccacagtgcaagggggcagccatgagtagcatgtggatgataatcgcaaggcgtgtaggtttggggtatgtgttaaaatcagttacccaagttttagaaaataagtttatttttcctttttgataatttccttctgtactttgtgtcccttgttttatttctcccacttaagtatccctgtcggtttaactatttggctcttgaggaaattcatcatgccttgttctattcagaatgctcatttgggggactctgcctcagtttactctagctacctctgtgctagcagcgttgcatgctcccatgttccccacagagcaacacatctggtttaatgctctcactgcatctatttcagacccattttcagaatattgcaactcaactttaaaataggaaaacataaccttggcccattggtggctttcaatttttaaatatggagaagtaaaccacaggactttggcagattttattggcttatatattttacaggtatttttgtttgtttgtttgtttttttggaaaagaggaaggaattctcatgtatgatctttcaatgcaagctctccaagggcatggatctttatcttgttcattgatatagccatccccagagcctagagcagttgtctggtacatagtaggcatgcaattatttttgaaagaataaatagtataaaagctgtattttattcaagcattgaatttagaaagataaactataaatttattactgcttttcaacatgctttggattttaaagctaatggatcttttattaataccttttttcctttcatcttaacccagtgttactaaaattagatttcccattttttcccctatatgaaagataatttacatttaccttgtaaaaattatcaccctgctccacttgagaaccctgctgttgtttgcaaaatcaggaccaagcccatattttttgagagctctctagaagaatttatcttcaagaaaatatggtgtgggtcaggttttcttttcttttcaaagtcccatggcagatatcctataatatactag

SEQ ID NO: 352790 - DNA, 1869 bp, Homo sapiens
gtgtcagtagtggggattgcacttttgtttccagctacaggccaaatttgagcaccttaagagacttcaccaagaagagagaatgaagcttgaagaaaagagaagacttttggaagaagaaataattgctttctctaaaaagaaagctacctccgagatatttcacagccagtcctttctggcaacaggcagcaacctgaggaaggacaaggaccgtaagaagtaagaggcccagccaccctccctggcagccctgcccacacttgtcacattgccctgtcggatcttcctagcgcttcttacttctgcttccttatgctttgtcttccttctccaactaaatgtcagctcctggagaggagagaccttgtccctcttgttcactgctgtttccccagcatccagaacagcacctggcacatgttatgtgttcagtatttgccaaaatgaatgaatgaacaaaataaaaatacatcacagtgtgaaaaggatcagttagctgggggaaaatggctgctcttattgaatagcccagccgtggccctagtacacagctaatggctgctgacctaccatgagttattttgaatttcatgtctaaataaagctgtgccctttgttggggaattatagacataagatagtattttattgaattaattcttaggttcagttttttagaacaaattctactgatactgattttgtgagaatttttattttaataagggaaccaggctgtcgattcgaactcctgtgcattgatgtcagagcttgtgaaaccaatggtggacgtaaagacgcagagaaaggtagagagggccacagtgcaagggggcagccatgagtagcatgtggatgataatcgcaaggcgtgtaggtttggggtatgtgttaaaatcagttacccaagttttagaaaataagtttatttttcctttttgataatttccttctgtactttgtgtcccttgttttatttctcccacttaagtatccctgtcggtttaactatttggctcttgaggaaattcatcatgccttgttctattcagaatgctcatttgggggactctgcctcagtttactctagctacctctgtgctagcagcgttgcatgctcccatgttccccacagagcaacacatctggtttaatgctctcactgcatctatttcagacccattttcagaatattgcaactcaactttaaaataggaaaacataaccttggcccattggtggctttcaatttttaaatatggagaagtaaaccacaggactttggcagattttattggcttatatattttacaggtatttttgtttgtttgtttgtttttttggaaaagaggaaggaattctcatgtatgatctttcaatgcaagctctccaagggcatggatctttatcttgttcattgatatagccatccccagagcctagagcagttgtctggtacatagtaggcatgcaattatttttgaaagaataaatagtataaaagctgtattttattcaagcattgaatttagaaagataaactataaatttattactgcttttcaacatgctttggattttaaagctaatggatcttttattaataccttttttcctttcatcttaacccagtgttactaaaattagatttcccattttttcccctatatgaaagataatttacatttaccttgtaaaaattatcaccctgctccacttgagaaccctgctgttgtttgcaaaatcaggaccaagcccatattttttgagagctctctagaagaatttatcttcaagaaaatatggtgtgggtcaggttttcttttcttttcaaagtcccatggcagatatcctataatatactag

SEQ ID NO: 352791 - DNA, 3252 bp, Homo sapiens
  misc_feature (3173)..(3173): n is a, c, g, or t
cacttccggcctcgcgagggccgcaatcactgctccgcagttcccgcctgcattcctcgcgccgtcttcctggagtcccagctctccttcagcccgccccaacgctgacgctcagtcctcaggcgtcgagggtagctcctgtgaggggctcgcttggcgcacgcaaaacgctcagcgcgcaccacagggcgtccgccccaaccccgcccccggaggcctccagctcggccccgcccctgtcccttccccgtcgcggaggcagcctagcctcgcgccccgcccgttgcttctgccctccggccttcccgccgccgtcgccgggaccagccgctcggggccgggctgatacagccgcttcaccgtgcccctgcccgcgaccatggcctcctccgaggtggcgcggcacctgctctttcagtctcacatggcaacgaaaacaacttgtatgtcttcacaaggatcagatgatgaacagataaaaagagaaaacattcgttcgttgactatgtctggccatgttggttttgagagtttgcctgatcagctggtgaacagatccattcagcaaggtttctgctttaatattctctgtgtgggggaaactggaattggaaaatcaacactgattgacacattgtttaatactaattttgaagactatgaatcctcacatttttgcccaaatgttaaacttaaagctcagacatatgaactccaggaaagtaatgttcaattgaaattgaccattgtgaatacagtgggatttggtgaccaaataaataaagaagagagctaccaaccaatagttgactacatagatgctcagtttgaggcctatctccaagaagaactgaagattaagcgttctctctttacctaccatgattctcgcatccatgtgtgtctctacttcatttcaccgacaggccactctctgaagacacttgatctcttaaccatgaagaaccttgacagcaaggtaaacattataccagtgattgccaaagcagatacggtttctaaaactgaattacagaagtttaagatcaagctcatgagtgaattggtcagcaatggcgtccagatataccagttcccaacggatgatgacactattgctaaggtcaacgctgcaatgaatggacagttgccgtttgctgttgtgggaagtatggatgaggtaaaagtcggaaacaagatggtcaaagctcgccagtacccttggggtgttgtacaagtggaaaatgaaaaccactgtgactttgtaaagctgcgggaaatgctcatttgtacaaatatggaggacctgcgagagcagacccataccaggcactatgagctttacaggcgctgcaaactggaggaaatgggctttacagatgtgggcccagaaaacaagccagtcagtgttcaagagacctatgaagccaaaagacatgagttccatggtgaacgtcagaggaaggaagaagaaatgaaacagatgtttgtgcagcgagtaaaggagaaagaagccatattgaaagaagctgagagagagctacaggccaaatttgagcaccttaagagacttcaccaagaagagagaatgaagcttgaagaaaagagaagacttttggaagaagaaataattgctttctctaaaaagaaagctacctccgagatatttcacagccagtcctttctggcaacaggcagcaacctgaggaaggacaaggaccgtaagaactccaattttttgtaaaacagaagttccagagcacagaaggtcatcatcacaagcaaactttattaaaaaaaaactagaagtgtgctttgattttgctgttatttgttttatcacttctatatttggtgaacagccacagttactgatatttatggaaaagtactttcaagtacaaggtcaatacataagccagagtgaatgatactacaagttgagcatctctaattcaaaaatctgaaatccagaagcttcaaaatctgaatctttttgagcactgacttgaccccacaagtggaaaattccccacccgacacctttgctttctgatggttcagtttaaacagattttgtttcttgcacaaaatttttgtataaattactttcaggctatatgtataaggtggatgtgaaacatgaattatgtaattagagtcgggtcccgttgtgtatatgcagatattccaaacctgaaatccaaaacacttctggtccctagcattttggataagggatactcagcttgtacctatatattcatatatattcactgttgttagaaatgtttaagttgctgttctgtgatgaatctaaatcttttctcttgctaccaagctattgtcactgcagtgcattataccaaagagcgaagtcagtgccactgaaaatacagaacccattaatatcgtggctatctgattacatttatattccaagatgaaccttttttatatatgctaaaaattttggggaatatgttttgggatgtattatggagctaaaactctaacctcttaatagttttatagaacttaaaaattttttatacaattacccaattggtgatatgatcttaagcttttgtgtcagattatttaatatgatgacttcatgctttattatgccttattatggctgacgtattactgtggtgaaacaaaatatctttaaaagttaaaacatccagatatataagctattttttcctaaggataaagtacctttgagcatgagtgtatcacagctttcattaggaaaacttttcattacatacttgtttaaactctgtcttccagggtaaaaataataaggttgaatcattttattaaaaatactttttaagaaaataactatgaacatctgaatattaaagatataaaaatgcacataattcatatttcaggtggtatttgcattcagtgccttactggtattctcagaacattttaatgatttctaacatttcttaacagtcatagatatatacattttcattttttgtacttgaatattctaaataaaactgacatttactcttgacaaataaaacatatatttactaaaatgtgtttaattttcctttctgaaaactctcattttaaaaacgttcatttaattatgtatttgaattattttggagatgaggtattttatgagtattttcagncaatgaaacttattagtctgtgtcagattctgagcaatcatagagtcatctaagttgtaaataaaaccttgcatagcac

SEQ ID NO: 352792 - DNA, 3385 bp, Homo sapiens
  misc_feature (3306)..(3306): n is a, c, g, or t
tccgcggcggccgggcgcctggggcgggagaggagcctctgcggagcctgggcgcggccggaccccggttcgcggggcgcggcgccagcgtcgggacggtgggagagttcttgaacgacttcccggtctttgccaaaagttacatccacagcggtgtttgtgggtctcttacggctataacggagttgaaggcgcagtgcggactgattgaatagcggtcatcttttgcagccgtgagcacttccgagcctccctgccgccgggagaaagcccggctcccctggcttttcaaaagctctcccgttttatccgatggtgtggtcgtccaagttttcctccattgggattttaaaccgtttttttcccgccttgactcttttgtactctaaaagaacgcgtttgttcactgttttgaacctttccagttacttttgtagatttatctcgcttgttagtaagccagcggttttccaagtgtggttacaactattttcgttaatagtaccaaggtcgtgtacatcgagttttccaaaggctacatgctctttcagtctcacatggcaacgaaaacaacttgtatgtcttcacaaggatcagatgatgaacagataaaaagagaaaacattcgttcgttgactatgtctggccatgttggttttgagagtttgcctgatcagctggtgaacagatccattcagcaaggtttctgctttaatattctctgtgtgggggaaactggaattggaaaatcaacactgattgacacattgtttaatactaattttgaagactatgaatcctcacatttttgcccaaatgttaaacttaaagctcagacatatgaactccaggaaagtaatgttcaattgaaattgaccattgtgaatacagtgggatttggtgaccaaataaataaagaagagagctaccaaccaatagttgactacatagatgctcagtttgaggcctatctccaagaagaactgaagattaagcgttctctctttacctaccatgattctcgcatccatgtgtgtctctacttcatttcaccgacaggccactctctgaagacacttgatctcttaaccatgaagaaccttgacagcaaggtaaacattataccagtgattgccaaagcagatacggtttctaaaactgaattacagaagtttaagatcaagctcatgagtgaattggtcagcaatggcgtccagatataccagttcccaacggatgatgacactattgctaaggtcaacgctgcaatgaatggacagttgccgtttgctgttgtgggaagtatggatgaggtaaaagtcggaaacaagatggtcaaagctcgccagtacccttggggtgttgtacaagtggaaaatgaaaaccactgtgactttgtaaagctgcgggaaatgctcatttgtacaaatatggaggacctgcgagagcagacccataccaggcactatgagctttacaggcgctgcaaactggaggaaatgggctttacagatgtgggcccagaaaacaagccagtcagtgttcaagagacctatgaagccaaaagacatgagttccatggtgaacgtcagaggaaggaagaagaaatgaaacagatgtttgtgcagcgagtaaaggagaaagaagccatattgaaagaagctgagagagagctacaggccaaatttgagcaccttaagagacttcaccaagaagagagaatgaagcttgaagaaaagagaagacttttggaagaagaaataattgctttctctaaaaagaaagctacctccgagatatttcacagccagtcctttctggcaacaggcagcaacctgaggaaggacaaggaccgtaagaactccaattttttgtaaaacagaagttccagagcacagaaggtcatcatcacaagcaaactttattaaaaaaaaactagaagtgtgctttgattttgctgttatttgttttatcacttctatatttggtgaacagccacagttactgatatttatggaaaagtactttcaagtacaaggtcaatacataagccagagtgaatgatactacaagttgagcatctctaattcaaaaatctgaaatccagaagcttcaaaatctgaatctttttgagcactgacttgaccccacaagtggaaaattccccacccgacacctttgctttctgatggttcagtttaaacagattttgtttcttgcacaaaatttttgtataaattactttcaggctatatgtataaggtggatgtgaaacatgaattatgtaattagagtcgggtcccgttgtgtatatgcagatattccaaacctgaaatccaaaacacttctggtccctagcattttggataagggatactcagcttgtacctatatattcatatatattcactgttgttagaaatgtttaagttgctgttctgtgatgaatctaaatcttttctcttgctaccaagctattgtcactgcagtgcattataccaaagagcgaagtcagtgccactgaaaatacagaacccattaatatcgtggctatctgattacatttatattccaagatgaaccttttttatatatgctaaaaattttggggaatatgttttgggatgtattatggagctaaaactctaacctcttaatagttttatagaacttaaaaattttttatacaattacccaattggtgatatgatcttaagcttttgtgtcagattatttaatatgatgacttcatgctttattatgccttattatggctgacgtattactgtggtgaaacaaaatatctttaaaagttaaaacatccagatatataagctattttttcctaaggataaagtacctttgagcatgagtgtatcacagctttcattaggaaaacttttcattacatacttgtttaaactctgtcttccagggtaaaaataataaggttgaatcattttattaaaaatactttttaagaaaataactatgaacatctgaatattaaagatataaaaatgcacataattcatatttcaggtggtatttgcattcagtgccttactggtattctcagaacattttaatgatttctaacatttcttaacagtcatagatatatacattttcattttttgtacttgaatattctaaataaaactgacatttactcttgacaaataaaacatatatttactaaaatgtgtttaattttcctttctgaaaactctcattttaaaaacgttcatttaattatgtatttgaattattttggagatgaggtattttatgagtattttcagncaatgaaacttattagtctgtgtcagattctgagcaatcatagagtcatctaagttgtaaataaaaccttgcatagcac

SEQ ID NO: 352793 - DNA, 3119 bp, Homo sapiens
  misc_feature (3040)..(3040): n is a, c, g, or t
cacttccggcctcgcgagggccgcaatcactgctccgcagttcccgcctgcattcctcgcgccgtcttcctggagtcccagctctccttcagcccgccccaacgctgacgctcagtcctcaggcgtcgagggtagctcctgtgaggggctcgcttggcgcacgcaaaacgctcagcgcgcaccacagggcgtccgccccaaccccgcccccggaggcctccagctcggccccgcccctgtcccttccccgtcgcggaggcagcctagcctcgcgccccgcccgttgcttctgccctccggccttcccgccgccgtcgccgggaccagccgctcggggccgggctgatacagccgcttcaccgtgcccctgcccgcgaccatggcctcctccgaggtggcgcggcacctgctctttcagtctcacatggcaacgaaaacaacttgtatgtcttcacaaggatcagatgatgaacagataaaaagagaaaacattcgttcgttgactatgtctggccatgttggttttgagagtttgcctgatcagctggtgaacagatccattcagcaaggtttctgctttaatattctctgtgtgggggaaactggaattggaaaatcaacactgattgacacattgtttaatactaattttgaagactatgaatcctcacatttttgcccaaatgttaaacttaaagctcagacatatgaactccaggaaagtaatgttcaattgaaattgaccattgtgaatacagtgggatttggtgaccaaataaataaagaagagagctaccaaccaatagttgactacatagatgctcagtttgaggcctatctccaagaagaactgaagattaagcgttctctctttacctaccatgattctcgcatccatgtgtgtctctacttcatttcaccgacaggccactctctgaagacacttgatctcttaaccatgaagaaccttgacagcaaggtaaacattataccagtgattgccaaagcagatacggtttctaaaactgaattacagaagtttaagatcaagctcatgagtgaattggtcagcaatggcgtccagatataccagttcccaacggatgatgacactattgctaaggtcaacgctgcaatgaatggacagttgccgtttgctgttgtgggaagtatggatgaggtaaaagtcggaaacaagatggtcaaagctcgccagtacccttggggtgttgtacaagtggaaaatgaaaaccactgtgactttgtaaagctgcgggaaatgctcatttgtacaaatatggaggacctgcgagagcagacccataccaggcactatgagctttacaggcgctgcaaactggaggaaatgggctttacagatgtgggcccagaaaacaagccagtcagctacaggccaaatttgagcaccttaagagacttcaccaagaagagagaatgaagcttgaagaaaagagaagacttttggaagaagaaataattgctttctctaaaaagaaagctacctccgagatatttcacagccagtcctttctggcaacaggcagcaacctgaggaaggacaaggaccgtaagaactccaattttttgtaaaacagaagttccagagcacagaaggtcatcatcacaagcaaactttattaaaaaaaaactagaagtgtgctttgattttgctgttatttgttttatcacttctatatttggtgaacagccacagttactgatatttatggaaaagtactttcaagtacaaggtcaatacataagccagagtgaatgatactacaagttgagcatctctaattcaaaaatctgaaatccagaagcttcaaaatctgaatctttttgagcactgacttgaccccacaagtggaaaattccccacccgacacctttgctttctgatggttcagtttaaacagattttgtttcttgcacaaaatttttgtataaattactttcaggctatatgtataaggtggatgtgaaacatgaattatgtaattagagtcgggtcccgttgtgtatatgcagatattccaaacctgaaatccaaaacacttctggtccctagcattttggataagggatactcagcttgtacctatatattcatatatattcactgttgttagaaatgtttaagttgctgttctgtgatgaatctaaatcttttctcttgctaccaagctattgtcactgcagtgcattataccaaagagcgaagtcagtgccactgaaaatacagaacccattaatatcgtggctatctgattacatttatattccaagatgaaccttttttatatatgctaaaaattttggggaatatgttttgggatgtattatggagctaaaactctaacctcttaatagttttatagaacttaaaaattttttatacaattacccaattggtgatatgatcttaagcttttgtgtcagattatttaatatgatgacttcatgctttattatgccttattatggctgacgtattactgtggtgaaacaaaatatctttaaaagttaaaacatccagatatataagctattttttcctaaggataaagtacctttgagcatgagtgtatcacagctttcattaggaaaacttttcattacatacttgtttaaactctgtcttccagggtaaaaataataaggttgaatcattttattaaaaatactttttaagaaaataactatgaacatctgaatattaaagatataaaaatgcacataattcatatttcaggtggtatttgcattcagtgccttactggtattctcagaacattttaatgatttctaacatttcttaacagtcatagatatatacattttcattttttgtacttgaatattctaaataaaactgacatttactcttgacaaataaaacatatatttactaaaatgtgtttaattttcctttctgaaaactctcattttaaaaacgttcatttaattatgtatttgaattattttggagatgaggtattttatgagtattttcagncaatgaaacttattagtctgtgtcagattctgagcaatcatagagtcatctaagttgtaaataaaaccttgcatagcac

SEQ ID NO: 352794 - DNA, 2683 bp, Homo sapiens
cacttccggcctcgcgagggccgcaatcactgctccgcagttcccgcctgcattcctcgcgccgtcttcctggagtcccagctctccttcagcccgccccaacgctgacgctcagtcctcaggcgtcgagggtagctcctgtgaggggctcgcttggcgcacgcaaaacgctcagcgcgcaccacagggcgtccgccccaaccccgcccccggaggcctccagctcggccccgcccctgtcccttccccgtcgcggaggcagcctagcctcgcgccccgcccgttgcttctgccctccggccttcccgccgccgtcgccgggaccagccgctcggggccgggctgatacagccgcttcaccgtgcccctgcccgcgaccatggcctcctccgaggtggcgcggcacctgctaccaaccaatagttgactacatagatgctcagtttgaggcctatctccaagaagaactgaagattaagcgttctctctttacctaccatgattctcgcatccatgtgtgtctctacttcatttcaccgacaggccactctctgaagacacttgatctcttaaccatgaagaaccttgacagcaaggtaaacattataccagtgattgccaaagcagatacggtttctaaaactgaattacagaagtttaagatcaagctcatgagtgaattggtcagcaatggcgtccagatataccagttcccaacggatgatgacactattgctaaggtcaacgctgcaatgaatggacagttgccgtttgctgttgtgggaagtatggatgaggtaaaagtcggaaacaagatggtcaaagctcgccagtacccttggggtgttgtacaagtggaaaatgaaaaccactgtgactttgtaaagctgcgggaaatgctcatttgtacaaatatggaggacctgcgagagcagacccataccaggcactatgagctttacaggcgctgcaaactggaggaaatgggctttacagatgtgggcccagaaaacaagccagtcagtgttcaagagacctatgaagccaaaagacatgagttccatggtgaacgtcagaggaaggaagaagaaatgaaacagatgtttgtgcagcgagtaaaggagaaagaagccatattgaaagaagctgagagagagctacaggccaaatttgagcaccttaagagacttcaccaagaagagagaatgaagcttgaagaaaagagaagacttttggaagaagaaataattgctttctctaaaaagaaagctacctccgagatatttcacagccagtcctttctggcaacaggcagcaacctgaggaaggacaaggaccgtaagaactccaattttttgtaaaacagaagttccagagcacagaaggtcatcatcacaagcaaactttattaaaaaaaaactagaagtgtgctttgattttgctgttatttgttttatcacttctatatttggtgaacagccacagttactgatatttatggaaaagtactttcaagtacaaggtcaatacataagccagagtgaatgatactacaagttgagcatctctaattcaaaaatctgaaatccagaagcttcaaaatctgaatctttttgagcactgacttgaccccacaagtggaaaattccccacccgacacctttgctttctgatggttcagtttaaacagattttgtttcttgcacaaaatttttgtataaattactttcaggctatatgtataaggtggatgtgaaacatgaattatgtaattagagtcgggtcccgttgtgtatatgcagatattccaaacctgaaatccaaaacacttctggtccctagcattttggataagggatactcagcttgtacctatatattcatatatattcactgttgttagaaatgtttaagttgctgttctgtgatgaatctaaatcttttctcttgctaccaagctattgtcactgcagtgcattataccaaagagcgaagtcagtgccactgaaaatacagaacccattaatatcgtggctatctgattacatttatattccaagatgaaccttttttatatatgctaaaaattttggggaatatgttttgggatgtattatggagctaaaactctaacctcttaatagttttatagaacttaaaaattttttatacaattacccaattggtgatatgatcttaagcttttgtgtcagattatttaatatgatgacttcatgctttattatgccttattatggctgacgtattactgtggtgaaacaaaatatctttaaaagttaaaacatccagatatataagctattttttcctaaggataaagtacctttgagcatgagtgtatcacagctttcattaggaaaacttttcattacatacttgtttaaactctgtcttccagggtaaaaataataaggttgaatcattttattaaaaatactttttaagaaaataactatgaacatctgaatattaaagatataaaaatgcacataattcatatttcaggtggtatttgcattcagtgccttactggtattctcagaacattttaatgatttctaacatttcttaacagtcatagatatatacattttcattttttgtacttgaatattctaaataaaactgacatttactcttgacaaataaaacatatatttac

SEQ ID NO: 352795 - DNA, 2618 bp, Homo sapiens
cacttccggcctcgcgagggccgcaatcactgctccgcagttcccgcctgcattcctcgcgccgtcttcctggagtcccagctctccttcagcccgccccaacgctgacgctcagtcctcaggcgtcgagggtagctcctgtgaggggctcgcttggcgcacgcaaaacgctcagcgcgcaccacagggcgtccgccccaaccccgcccccggaggcctccagctcggccccgcccctgtcccttccccgtcgcggaggcagcctagcctcgcgccccgcccgttgcttctgccctccggccttcccgccgccgtcgccgggaccagccgctcggggccgggctgatacagccgcttcaccgtgcccctgcccgcgaccatggcctcctccgaggtggcgcggcacctgctctttcagtctcacatggcaacgaaaacaacttgtatgtcttcacaaggatcagatgatgaacagatagccactctctgaagacacttgatctcttaaccatgaagaaccttgacagcaaggtaaacattataccagtgattgccaaagcagatacggtttctaaaactgaattacagaagtttaagatcaagctcatgagtgaattggtcagcaatggcgtccagatataccagttcccaacggatgatgacactattgctaaggtcaacgctgcaatgaatggacagttgccgtttgctgttgtgggaagtatggatgaggtaaaagtcggaaacaagatggtcaaagctcgccagtacccttggggtgttgtacaagtggaaaatgaaaaccactgtgactttgtaaagctgcgggaaatgctcatttgtacaaatatggaggacctgcgagagcagacccataccaggcactatgagctttacaggcgctgcaaactggaggaaatgggctttacagatgtgggcccagaaaacaagccagtcagtgttcaagagacctatgaagccaaaagacatgagttccatggtgaacgtcagaggaaggaagaagaaatgaaacagatgtttgtgcagcgagtaaaggagaaagaagccatattgaaagaagctgagagagagctacaggccaaatttgagcaccttaagagacttcaccaagaagagagaatgaagcttgaagaaaagagaagacttttggaagaagaaataattgctttctctaaaaagaaagctacctccgagatatttcacagccagtcctttctggcaacaggcagcaacctgaggaaggacaaggaccgtaagaactccaattttttgtaaaacagaagttccagagcacagaaggtcatcatcacaagcaaactttattaaaaaaaaactagaagtgtgctttgattttgctgttatttgttttatcacttctatatttggtgaacagccacagttactgatatttatggaaaagtactttcaagtacaaggtcaatacataagccagagtgaatgatactacaagttgagcatctctaattcaaaaatctgaaatccagaagcttcaaaatctgaatctttttgagcactgacttgaccccacaagtggaaaattccccacccgacacctttgctttctgatggttcagtttaaacagattttgtttcttgcacaaaatttttgtataaattactttcaggctatatgtataaggtggatgtgaaacatgaattatgtaattagagtcgggtcccgttgtgtatatgcagatattccaaacctgaaatccaaaacacttctggtccctagcattttggataagggatactcagcttgtacctatatattcatatatattcactgttgttagaaatgtttaagttgctgttctgtgatgaatctaaatcttttctcttgctaccaagctattgtcactgcagtgcattataccaaagagcgaagtcagtgccactgaaaatacagaacccattaatatcgtggctatctgattacatttatattccaagatgaaccttttttatatatgctaaaaattttggggaatatgttttgggatgtattatggagctaaaactctaacctcttaatagttttatagaacttaaaaattttttatacaattacccaattggtgatatgatcttaagcttttgtgtcagattatttaatatgatgacttcatgctttattatgccttattatggctgacgtattactgtggtgaaacaaaatatctttaaaagttaaaacatccagatatataagctattttttcctaaggataaagtacctttgagcatgagtgtatcacagctttcattaggaaaacttttcattacatacttgtttaaactctgtcttccagggtaaaaataataaggttgaatcattttattaaaaatactttttaagaaaataactatgaacatctgaatattaaagatataaaaatgcacataattcatatttcaggtggtatttgcattcagtgccttactggtattctcagaacattttaatgatttctaacatttcttaacagtcatagatatatacattttcattttttgtacttgaatattctaaataaaactgacatttactcttgacaaataaaacatatatttac

SEQ ID NO: 352796 - DNA, 371 bp, Homo sapiens
cctttaaagacaaggacaagataaaatacaaagggaaaagcactgcagagtaaggaaagtaaagattagaataacaaaatactgaattagactattcactgtaaactctcagagccattataattactaggaattctggcttatagtgtgattaaatagagtaaccttggcaaggtccgtagttgtattttgggtgagtttctccatctgcatttggtgtgaggataagacttgctctaaaacagcctgaggtcaggtgcagtggctcaagcctgtaatcccagcaatttgggaggctgaagtggtaggatcacttgagctcaggagtttgagaccaccctgggcaacacagagggaccccgtttctactt

SEQ ID NO: 352797 - DNA, 5660 bp, Homo sapiens
  misc_feature (26)..(26): n is a, c, g, or t
  misc_feature (1015)..(1015): n is a, c, g, or t
gtcactgacaagaccttcacagtagnggatagggaaattaaaggcaagtgagcatgtgaagtaccaaaatgtaaactaatctgctacttttaacctttgtaatcttttggagatatatgtacagaaaccagttttacctgcaagtatccccactgcatgaagtcagctttgtattttttatagtgttttctgttgctgaggagattgctagcactagttcagcattttgtcttcactgcagtcaagtaggatgttgtatcattcctgatatatacataattaggaaacatgaacaagaatggcagagaattacatctcacctaagtcatttgatgaatcatttgacaagtatcttttcccacagatgcattgcctatagcagatattgataaagctttataaaattatacatgcagtccacaaaatgtggtaagatcagaaatgagtcaggtgccatttgctctagtgctgtagttgtgaaagcggtggcctgcttcatcgagtatgagtagccagtattcctggggttgtcagaaaaagaggacagctgctcccttgacagttccagggtaagagctcgaaagtgctgaccatgctctaggatcctccccagggtcctggctcacagtcagagcatcactgagccgcaggtgtactatcaagtggccttgccatcagtaggtgacttcgcctatcagagaagagaaaggttcctgtgagcaaaaaggcaggtttcatttgtgctcgtggacatttttctcattgccattcttgtgttttactttcttatagaagctgttgctaatttcttaagttttatgtgtttcactaaggtgaaatacaataactaaaggaaaactcaagataaagtagctgtagaccttaggtagaagagaagcagatgatgactacctttacgtgcctctttgggagactgccactgtctcccaaaaagtgtatcctgtgaagtgttttatatcctgaaataaggacagttcacagaagcacaggaatnatacatatttaagctttcctactttgtcttttaattaaatatatctggaaataatgtaatcttgaattctgaaggtagaaggaatgtgtggagaaggaagagttttgagtttaaaaaacaaaaacaaataaaaagtctgttggattctatgtaaagttaactggacgatagcattgcagtccatacttttgataatccattgaacttggaactatttggaaaatattaatctcaggttttattttgtgcttaggaaaactccaaaagcatgaagatgcaataattgctcttaaaacataacgagactattcttggttaaatataatgtagtatatataatagaattttgctatttttttgtaatgttgactattcaatatgcagttgtttttcagtttcaatagcttctgttttgttgagatgacactgaatgcagcttataaaatagaggctagaatggtagcacaaagttaatatctttaattatacaaactttactactgggttaaaatattaataatttattaatatgtttcgaatgttcctttactctgcaaatatgtttgtattaactgtcacataagatgatgttctcagaacaaacttgaaagtggttgtatcttttcttgctggatgtactcattttgtgaaaattccacttacatgttatgtgctttttacagatatatctattgtgatgaaattgacttggctgctgacacagtgctggccacactttatgctgccaaaaagtacattgtccctcaccttgccagagcctgtgttaatttcctggagaccagcctgagtgccaagaatgcctgtgtgctcctctcccagagctgcctgttcgaggagccagacctgacccagcgttgctgggaggtgattgatgcccaggctgagttagctctcaagtctgagggattctgcgatattgacttccagacactagaaagtattctccgtagggaaactctgaatgccaaagaaattgtggtttttgaggcagctctcaactgggctgaagtagaatgccaacgacaagatctggcgttgagcattgaaaataaacgcaaggttctaggaaaggcactttacttgatccgcatacccacaatggccctcgatgattttgcaaatggtgctgcacagtccggggtattaactctcaatgagaccaacgacatcttcctctggtatactgcagccaaaaagcctgagcttcagtttgtgagtaaagcccgtaagggccttgtcccccagcgctgtcaccgtttccagtcgtgtgcctatcgaagcaaccaatggcgctatcgtggtcgctgtgacagcatccagtttgcagttgataaaagagtgttcattgctggctttgggctgtatggctccagctgtggttctgcagaatacagtgccaagattgaacttaagcggcagggcgttgtcctggggcagaacttgagcaagtacttctcagatgggtccagcaatacctttcccgtatggtttgaatacccagtgcagatcgagccagacaccttctacacagccagtgtgatactggatggcaatgaactcagctactttggacaagaaggcatgacagaagttcagtgtggcaaagtgactgtccagtttcagtgctcctcagatagcaccaatggcactggggtacagggagggcagatccctgaacttatattctatgcttgaaaactcacttcctgaagcagcttgagctccaaagtgcacatctggttccaacttgcctgatgcttagctcatctgcaaatatgtgatcagtgccggtaatttgtaatgaatgaagcggtaggcaggttctaatttcttttaaccttttaattatgtacaggcaaaaatgcagcattccgcttttaactatctgcttaaaagagctaacgttcttattaaggctttgtggtttttagagttgcatctatgaacctggggagattatgtgctttcccaagcgttccaccaccctctcagttttgtccctctgaagataattttggatcaccttgaatttccttttggacgttatttgatgaacagaaataaattgataacaagagttatttttaaacagaactcctcttaccccccaaaacagataaacctcagtgtacaattttgaaagaagttttgccttgtaatgagtaataatttagaaagtagacagtggttgtgtttggctctcgttttattccttttacatttgttgcttctgggatttaaaaaattactaaattcataagatagttaggtattaaacacttcagaatatcaatgtaaaattggaaaataaggaactgggggcatttgtttaggccatgacttctacaagcagatttcttttcttttagtttagaagacaaaaaatttcaatacagatacttcttttagaagtaaatttttagattttattgtcagtagaaaaaagttaaactcctactaatttaaactaagacagtttaaaaaggaagcctgaaaaagactcatactacaaataatttaattgatggcatataagaatatgcagtttgaaaaagccaaactcttctctccacttagcttttgatccccactgtttgcttatttgtataagtcatactgtgtagaatttctattttctttttccccattaaaagaggaccaaacaattctttatacaaatggagtagcaactagttttgtagcactacatttaatgtaatgagatacctttgttcatttttttaaatttgaaatatactttacctgatccactttgattgtatactatattctttgttaattttaattttgtcctgttcctagactgctagaatctggcccctggccatcttaaagtgccaacatatgcctgcagggtttataaaaaatggcctggagtgacacattttattatacctaatattcactgcatcagtatcacatctagctcccttacttgtccacagataatgtaaacaaaggagggaaaaacttattaaattctccttcgctgctggcttgtgctggtttagtgcctgtgtccctggcagtgtccagtgtgttcacttccagttgaagtatccatgtgtttctgggcagcttttctgctcagtgtgatcctgagatggcttccccgccgccacccagagtgtggtccttggccgcctcctgctcctgctctgcaagcctgaaactggcttgtctggagccaggagttagtcctggggtgtgtgtgtgcctgcgcacccatgcgcatgcaagtgtgtttgccagctcaggagctgtctcctctctacctggctagtaagaggtgggacagtaatggtcctcctgctggccccagcaaggcccatgagtgactgccctgacgtattcactgtgcctctgggccacttcttcccctgtagatgtgggcttgttgccttcagccggcttccctgagggaggagaacactggattattggaaatgttttaatcactcttgccattacctacatctattagcatagatgatgaaaagctgttactggtgattatagatgagtatttccaggacaacattctaaaagtacaattatttcttattggggagattacaggtagtttggcaaagcattgaagtacaaaggtacattttcaattaaaaagcacacttctacaaaagatttggtttttaaattatggttacacatttcagtaactcatagctgctgtgcaaattggtagaccttataagaaggcacttgtttgtaagccagagaagaaactttaattgcatcctatcagattgttgaggtgggtgtgatagtcttcaggtgcagtgcgttcattcactaacgctcactgtcagtgcccatgtttgctagctgcctccatgtgactagtgagctgctggtgaaagtcgtgtgaaatcctgtacactgtgtatagaacaatgtaattttatgttaattgttattactttaaaacatatctaccatctgattggctggtaccgagagctgtgggtaaaatttgaaaattgtatttagaataagaaattttacattttaaaccctattgtcctttatgcattttcaatgaaatggaatgaaggctaatatgcttgctttatttacttttgtaatcttggattttgtagcttttaaaactagaaaccattgttctaacaaagcaggcaactttattctataaacacaactttattaagcagaatacactgtagatgcttttccccaacgtatctggctggcagtctttgtcgttgttcattctggggataaaggggaactaggctagcagttctaatgtgacattctttaagcatatcttaaaatagtatttaagtaaatggtctaatttctacataattattgcactgaacttttttgtttattaaggtgtttaaataagctcagctaattcaagacactgtagtcacttgtgcatcagtgtgcttgaatttagtagcttacagcattatttatgaaggaaaaaatacataaatatgaagtacctcatgttgaatgttattgtactgtatttttaatgtaacagtgcagatcttgttagacacatgaatgtgtataatcatgttaaatgcaaataaaactagttcataga

SEQ ID NO: 352798 - DNA, 4512 bp, Homo sapiens
agcgggcgggtgcccgccgagcccgccgggcgctggatctccgagtgccccggccggggcctgaggagcgggcacagggcaaggcggcggacggctgcgtcgcccgaggcgaggaggagcgctggcgagacggtaaagaacaggtccaagaaaagctcaaagaaagcaaataccagcagcagcagtagcaacagcagcaagttgccaccagtttgttatgaaataattaccttgaagactaaaaagaagaagatggctgctgatatattcccccgtaaaaagccagccaactccagcagcaccagcgtccagcagtaccaccagcagaatctcagtaacaacaaccttatcccggccccaaactggcagggtctttatcccaccattagagagagaaatgcgatgatgttcaataatgatttgatggcagatgtacattttgtggttgggccaccaggtgggactcaacggttgccaggacacaaatatgttttagctgttgggagctctgtgttccatgcgatgttttacggagaacttgcagaggacaaagatgaaatccgtataccagatgtcgaacctgctgcttttctcgctatgctgaaatatatctattgtgatgaaattgacttggctgctgacacagtgctggccacactttatgctgccaaaaagtacattgtccctcaccttgccagagcctgtgttaatttcctggagaccagcctgagtgccaagaatgcctgtgtgctcctctcccagagctgcctgttcgaggagccagacctgacccagcgttgctgggaggtgattgatgcccaggctgagttagctctcaagtctgagggattctgcgatattgacttccagacactagaaagtattctccgtagggaaactctgaatgccaaagaaattgtggtttttgaggcagctctcaactgggctgaagtagaatgccaacgacaagatctggcgttgagcattgaaaataaacgcaaggttctaggaaaggcactttacttgatccgcatacccacaatggccctcgatgattttgcaaatggtgctgcacagtccggggtattaactctcaatgagaccaacgacatcttcctctggtatactgcagccaaaaagcctgagcttcagtttgtgagtaaagcccgtaagggccttgtcccccagcgctgtcaccgtttccagtcgtgtgcctatcgaagcaaccaatggcgctatcgtggtcgctgtgacagcatccagtttgcagttgataaaagagtgttcattgctggctttgggctgtatggctccagctgtggttctgcagaatacagtgccaagattgaacttaagcggcagggcgttgtcctggggcagaacttgagcaagtacttctcagatgggtccagcaatacctttcccgtatggtttgaatacccagtgcagatcgagccagacaccttctacacagccagtgtgatactggatggcaatgaactcagctactttggacaagaaggcatgacagaagttcagtgtggcaaagtgactgtccagtttcagtgctcctcagatagcaccaatggcactggggtacagggagggcagatccctgaacttatattctatgcttgaaaactcacttcctgaagcagcttgagctccaaagtgcacatctggttccaacttgcctgatgcttagctcatctgcaaatatgtgatcagtgccggtaatttgtaatgaatgaagcggtaggcaggttctaatttcttttaaccttttaattatgtacaggcaaaaatgcagcattccgcttttaactatctgcttaaaagagctaacgttcttattaaggctttgtggtttttagagttgcatctatgaacctggggagattatgtgctttcccaagcgttccaccaccctctcagttttgtccctctgaagataattttggatcaccttgaatttccttttggacgttatttgatgaacagaaataaattgataacaagagttatttttaaacagaactcctcttaccccccaaaacagataaacctcagtgtacaattttgaaagaagttttgccttgtaatgagtaataatttagaaagtagacagtggttgtgtttggctctcgttttattccttttacatttgttgcttctgggatttaaaaaattactaaattcataagatagttaggtattaaacacttcagaatatcaatgtaaaattggaaaataaggaactgggggcatttgtttaggccatgacttctacaagcagatttcttttcttttagtttagaagacaaaaaatttcaatacagatacttcttttagaagtaaatttttagattttattgtcagtagaaaaaagttaaactcctactaatttaaactaagacagtttaaaaaggaagcctgaaaaagactcatactacaaataatttaattgatggcatataagaatatgcagtttgaaaaagccaaactcttctctccacttagcttttgatccccactgtttgcttatttgtataagtcatactgtgtagaatttctattttctttttccccattaaaagaggaccaaacaattctttatacaaatggagtagcaactagttttgtagcactacatttaatgtaatgagatacctttgttcatttttttaaatttgaaatatactttacctgatccactttgattgtatactatattctttgttaattttaattttgtcctgttcctagactgctagaatctggcccctggccatcttaaagtgccaacatatgcctgcagggtttataaaaaatggcctggagtgacacattttattatacctaatattcactgcatcagtatcacatctagctcccttacttgtccacagataatgtaaacaaaggagggaaaaacttattaaattctccttcgctgctggcttgtgctggtttagtgcctgtgtccctggcagtgtccagtgtgttcacttccagttgaagtatccatgtgtttctgggcagcttttctgctcagtgtgatcctgagatggcttccccgccgccacccagagtgtggtccttggccgcctcctgctcctgctctgcaagcctgaaactggcttgtctggagccaggagttagtcctggggtgtgtgtgtgcctgcgcacccatgcgcatgcaagtgtgtttgccagctcaggagctgtctcctctctacctggctagtaagaggtgggacagtaatggtcctcctgctggccccagcaaggcccatgagtgactgccctgacgtattcactgtgcctctgggccacttcttcccctgtagatgtgggcttgttgccttcagccggcttccctgagggaggagaacactggattattggaaatgttttaatcactcttgccattacctacatctattagcatagatgatgaaaagctgttactggtgattatagatgagtatttccaggacaacattctaaaagtacaattatttcttattggggagattacaggtagtttggcaaagcattgaagtacaaaggtacattttcaattaaaaagcacacttctacaaaagatttggtttttaaattatggttacacatttcagtaactcatagctgctgtgcaaattggtagaccttataagaaggcacttgtttgtaagccagagaagaaactttaattgcatcctatcagattgttgaggtgggtgtgatagtcttcaggtgcagtgcgttcattcactaacgctcactgtcagtgcccatgtttgctagctgcctccatgtgactagtgagctgctggtgaaagtcgtgtgaaatcctgtacactgtgtatagaacaatgtaattttatgttaattgttattactttaaaacatatctaccatctgattggctggtaccgagagctgtgggtaaaatttgaaaattgtatttagaataagaaattttacattttaaaccctattgtcctttatgcattttcaatgaaatggaatgaaggctaatatgcttgctttatttacttttgtaatcttggattttgtagcttttaaaactagaaaccattgttctaacaaagcaggcaactttattctataaacacaactttattaagcagaatacactgtagatgcttttccccaacgtatctggctggcagtctttgtcgttgttcattctggggataaaggggaactaggctagcagttctaatgtgacattctttaagcatatttttttgtttattaaggtgtttaaataagctcagctaattcaagacactgtagtcacttgtgcatcagtgtgcttgaatttagtagcttacagcattatttatgaaggaaaaaatacataaatatgaagtacctcatgttgaatgttattgtactgtatttttaatgtaacagtgcagatcttgttagacacatgaatgtgtataatcatgttaaatgcaaataaaactagttcataga

SEQ ID NO: 352799 - DNA, 5271 bp, Homo sapiens
atagactggaggattttgttttaagtatttgaaactaaatgctgctgggaaaaagattttagtagaaatatagatatctgtccctaccctttgttaattgatcctgcttaactggggacataatgtatgtctactgaagagaaatctgtgggcataaactcctcccttcctgttgtcaaatatatttcatatgttattatcttgtttaaatatacagtagacaagaaaatgcaactgctgttcctttaatatcagaactatgcatgttacaataggtgtcactgttttgcttggtccaatcatgattggtgacttcagctattggctcggagcactggctgtctgactccatctgcagggctgtaatacctactctcctccgatccattcaccacacaacttcagccggctgaacagactcacgcagctccagcccatcttgctgacctaattcagaaaagaagtgctacagctctgtgcctgtcatctttgcagtgtagcattttcaggtgatctaggaaacagttatttttatgagcaaataagagaaacaggaatcatgatggggatatatttaacagacccagtactggataaaacttaaagccagtttctattcaacatagtgaaaaggtcaccttgcctggctgagaaaagcagcaaaatatcagctttgttggtttcagttaacctcttagcccgggctaatctcttttccttgatgttcaaaccaatttgggatatctaactctaaagagagacacactgtactcatggtagatgacaaggaaaagaacatgaaatgtctcaccttcttcttgatgcttccagagacggtaaagaacaggtccaagaaaagctcaaagaaagcaaataccagcagcagcagtagcaacagcagcaagttgccaccagtttgttatgaaataattaccttgaagactaaaaagaagaagatggctgctgatatattcccccgtaaaaagccagccaactccagcagcaccagcgtccagcagtaccaccagcagaatctcagtaacaacaaccttatcccggccccaaactggcagggtctttatcccaccattagagagagaaatgcgatgatgttcaataatgatttgatggcagatgtacattttgtggttgggccaccaggtgggactcaacggttgccaggacacaaatatgttttagctgttgggagctctgtgttccatgcgatgttttacggagaacttgcagaggacaaagatgaaatccgtataccagatgtcgaacctgctgcttttctcgctatgctgaaatatatctattgtgatgaaattgacttggctgctgacacagtgctggccacactttatgctgccaaaaagtacattgtccctcaccttgccagagcctgtgttaatttcctggagaccagcctgagtgccaagaatgcctgtgtgctcctctcccagagctgcctgttcgaggagccagacctgacccagcgttgctgggaggtgattgatgcccaggctgagttagctctcaagtctgagggattctgcgatattgacttccagacactagaaagtattctccgtagggaaactctgaatgccaaagaaattgtggtttttgaggcagctctcaactgggctgaagtagaatgccaacgacaagatctggcgttgagcattgaaaataaacgcaaggttctaggaaaggcactttacttgatccgcatacccacaatggccctcgatgattttgcaaatggtgctgcacagtccggggtattaactctcaatgagaccaacgacatcttcctctggtatactgcagccaaaaagcctgagcttcagtttgtgagtaaagcccgtaagggccttgtcccccagcgctgtcaccgtttccagtcgtgtgcctatcgaagcaaccaatggcgctatcgtggtcgctgtgacagcatccagtttgcagttgataaaagagtgttcattgctggctttgggctgtatggctccagctgtggttctgcagaatacagtgccaagattgaacttaagcggcagggcgttgtcctggggcagaacttgagcaagtacttctcagatgggtccagcaatacctttcccgtatggtttgaatacccagtgcagatcgagccagacaccttctacacagccagtgtgatactggatggcaatgaactcagctactttggacaagaaggcatgacagaagttcagtgtggcaaagtgactgtccagtttcagtgctcctcagatagcaccaatggcactggggtacagggagggcagatccctgaacttatattctatgcttgaaaactcacttcctgaagcagcttgagctccaaagtgcacatctggttccaacttgcctgatgcttagctcatctgcaaatatgtgatcagtgccggtaatttgtaatgaatgaagcggtaggcaggttctaatttcttttaaccttttaattatgtacaggcaaaaatgcagcattccgcttttaactatctgcttaaaagagctaacgttcttattaaggctttgtggtttttagagttgcatctatgaacctggggagattatgtgctttcccaagcgttccaccaccctctcagttttgtccctctgaagataattttggatcaccttgaatttccttttggacgttatttgatgaacagaaataaattgataacaagagttatttttaaacagaactcctcttaccccccaaaacagataaacctcagtgtacaattttgaaagaagttttgccttgtaatgagtaataatttagaaagtagacagtggttgtgtttggctctcgttttattccttttacatttgttgcttctgggatttaaaaaattactaaattcataagatagttaggtattaaacacttcagaatatcaatgtaaaattggaaaataaggaactgggggcatttgtttaggccatgacttctacaagcagatttcttttcttttagtttagaagacaaaaaatttcaatacagatacttcttttagaagtaaatttttagattttattgtcagtagaaaaaagttaaactcctactaatttaaactaagacagtttaaaaaggaagcctgaaaaagactcatactacaaataatttaattgatggcatataagaatatgcagtttgaaaaagccaaactcttctctccacttagcttttgatccccactgtttgcttatttgtataagtcatactgtgtagaatttctattttctttttccccattaaaagaggaccaaacaattctttatacaaatggagtagcaactagttttgtagcactacatttaatgtaatgagatacctttgttcatttttttaaatttgaaatatactttacctgatccactttgattgtatactatattctttgttaattttaattttgtcctgttcctagactgctagaatctggcccctggccatcttaaagtgccaacatatgcctgcagggtttataaaaaatggcctggagtgacacattttattatacctaatattcactgcatcagtatcacatctagctcccttacttgtccacagataatgtaaacaaaggagggaaaaacttattaaattctccttcgctgctggcttgtgctggtttagtgcctgtgtccctggcagtgtccagtgtgttcacttccagttgaagtatccatgtgtttctgggcagcttttctgctcagtgtgatcctgagatggcttccccgccgccacccagagtgtggtccttggccgcctcctgctcctgctctgcaagcctgaaactggcttgtctggagccaggagttagtcctggggtgtgtgtgtgcctgcgcacccatgcgcatgcaagtgtgtttgccagctcaggagctgtctcctctctacctggctagtaagaggtgggacagtaatggtcctcctgctggccccagcaaggcccatgagtgactgccctgacgtattcactgtgcctctgggccacttcttcccctgtagatgtgggcttgttgccttcagccggcttccctgagggaggagaacactggattattggaaatgttttaatcactcttgccattacctacatctattagcatagatgatgaaaagctgttactggtgattatagatgagtatttccaggacaacattctaaaagtacaattatttcttattggggagattacaggtagtttggcaaagcattgaagtacaaaggtacattttcaattaaaaagcacacttctacaaaagatttggtttttaaattatggttacacatttcagtaactcatagctgctgtgcaaattggtagaccttataagaaggcacttgtttgtaagccagagaagaaactttaattgcatcctatcagattgttgaggtgggtgtgatagtcttcaggtgcagtgcgttcattcactaacgctcactgtcagtgcccatgtttgctagctgcctccatgtgactagtgagctgctggtgaaagtcgtgtgaaatcctgtacactgtgtatagaacaatgtaattttatgttaattgttattactttaaaacatatctaccatctgattggctggtaccgagagctgtgggtaaaatttgaaaattgtatttagaataagaaattttacattttaaaccctattgtcctttatgcattttcaatgaaatggaatgaaggctaatatgcttgctttatttacttttgtaatcttggattttgtagcttttaaaactagaaaccattgttctaacaaagcaggcaactttattctataaacacaactttattaagcagaatacactgtagatgcttttccccaacgtatctggctggcagtctttgtcgttgttcattctggggataaaggggaactaggctagcagttctaatgtgacattctttaagcatatcttaaaatagtatttaagtaaatggtctaatttctacataattattgcactgaacttttttgtttattaaggtgtttaaataagctcagctaattcaagacactgtagtcacttgtgcatcagtgtgcttgaatttagtagcttacagcattatttatgaaggaaaaaatacataaatatgaagtacctcatgttgaatgttattgtactgtatttttaatgtaacagtgcagatcttgttagacacatgaatgtgtataatcatgttaaatgcaaataaaactagttcataga

SEQ ID NO: 352800 - DNA, 4567 bp, Homo sapiens
agcgggcgggtgcccgccgagcccgccgggcgctggatctccgagtgccccggccggggcctgaggagcgggcacagggcaaggcggcggacggctgcgtcgcccgaggcgaggaggagcgctggcgagacggtaaagaacaggtccaagaaaagctcaaagaaagcaaataccagcagcagcagtagcaacagcagcaagttgccaccagtttgttatgaaataattaccttgaagactaaaaagaagaagatggctgctgatatattcccccgtaaaaagccagccaactccagcagcaccagcgtccagcagtaccaccagcagaatctcagtaacaacaaccttatcccggccccaaactggcagggtctttatcccaccattagagagagaaatgcgatgatgttcaataatgatttgatggcagatgtacattttgtggttgggccaccaggtgggactcaacggttgccaggacacaaatatgttttagctgttgggagctctgtgttccatgcgatgttttacggagaacttgcagaggacaaagatgaaatccgtataccagatgtcgaacctgctgcttttctcgctatgctgaaatatatctattgtgatgaaattgacttggctgctgacacagtgctggccacactttatgctgccaaaaagtacattgtccctcaccttgccagagcctgtgttaatttcctggagaccagcctgagtgccaagaatgcctgtgtgctcctctcccagagctgcctgttcgaggagccagacctgacccagcgttgctgggaggtgattgatgcccaggctgagttagctctcaagtctgagggattctgcgatattgacttccagacactagaaagtattctccgtagggaaactctgaatgccaaagaaattgtggtttttgaggcagctctcaactgggctgaagtagaatgccaacgacaagatctggcgttgagcattgaaaataaacgcaaggttctaggaaaggcactttacttgatccgcatacccacaatggccctcgatgattttgcaaatggtgctgcacagtccggggtattaactctcaatgagaccaacgacatcttcctctggtatactgcagccaaaaagcctgagcttcagtttgtgagtaaagcccgtaagggccttgtcccccagcgctgtcaccgtttccagtcgtgtgcctatcgaagcaaccaatggcgctatcgtggtcgctgtgacagcatccagtttgcagttgataaaagagtgttcattgctggctttgggctgtatggctccagctgtggttctgcagaatacagtgccaagattgaacttaagcggcagggcgttgtcctggggcagaacttgagcaagtacttctcagatgggtccagcaatacctttcccgtatggtttgaatacccagtgcagatcgagccagacaccttctacacagccagtgtgatactggatggcaatgaactcagctactttggacaagaaggcatgacagaagttcagtgtggcaaagtgactgtccagtttcagtgctcctcagatagcaccaatggcactggggtacagggagggcagatccctgaacttatattctatgcttgaaaactcacttcctgaagcagcttgagctccaaagtgcacatctggttccaacttgcctgatgcttagctcatctgcaaatatgtgatcagtgccggtaatttgtaatgaatgaagcggtaggcaggttctaatttcttttaaccttttaattatgtacaggcaaaaatgcagcattccgcttttaactatctgcttaaaagagctaacgttcttattaaggctttgtggtttttagagttgcatctatgaacctggggagattatgtgctttcccaagcgttccaccaccctctcagttttgtccctctgaagataattttggatcaccttgaatttccttttggacgttatttgatgaacagaaataaattgataacaagagttatttttaaacagaactcctcttaccccccaaaacagataaacctcagtgtacaattttgaaagaagttttgccttgtaatgagtaataatttagaaagtagacagtggttgtgtttggctctcgttttattccttttacatttgttgcttctgggatttaaaaaattactaaattcataagatagttaggtattaaacacttcagaatatcaatgtaaaattggaaaataaggaactgggggcatttgtttaggccatgacttctacaagcagatttcttttcttttagtttagaagacaaaaaatttcaatacagatacttcttttagaagtaaatttttagattttattgtcagtagaaaaaagttaaactcctactaatttaaactaagacagtttaaaaaggaagcctgaaaaagactcatactacaaataatttaattgatggcatataagaatatgcagtttgaaaaagccaaactcttctctccacttagcttttgatccccactgtttgcttatttgtataagtcatactgtgtagaatttctattttctttttccccattaaaagaggaccaaacaattctttatacaaatggagtagcaactagttttgtagcactacatttaatgtaatgagatacctttgttcatttttttaaatttgaaatatactttacctgatccactttgattgtatactatattctttgttaattttaattttgtcctgttcctagactgctagaatctggcccctggccatcttaaagtgccaacatatgcctgcagggtttataaaaaatggcctggagtgacacattttattatacctaatattcactgcatcagtatcacatctagctcccttacttgtccacagataatgtaaacaaaggagggaaaaacttattaaattctccttcgctgctggcttgtgctggtttagtgcctgtgtccctggcagtgtccagtgtgttcacttccagttgaagtatccatgtgtttctgggcagcttttctgctcagtgtgatcctgagatggcttccccgccgccacccagagtgtggtccttggccgcctcctgctcctgctctgcaagcctgaaactggcttgtctggagccaggagttagtcctggggtgtgtgtgtgcctgcgcacccatgcgcatgcaagtgtgtttgccagctcaggagctgtctcctctctacctggctagtaagaggtgggacagtaatggtcctcctgctggccccagcaaggcccatgagtgactgccctgacgtattcactgtgcctctgggccacttcttcccctgtagatgtgggcttgttgccttcagccggcttccctgagggaggagaacactggattattggaaatgttttaatcactcttgccattacctacatctattagcatagatgatgaaaagctgttactggtgattatagatgagtatttccaggacaacattctaaaagtacaattatttcttattggggagattacaggtagtttggcaaagcattgaagtacaaaggtacattttcaattaaaaagcacacttctacaaaagatttggtttttaaattatggttacacatttcagtaactcatagctgctgtgcaaattggtagaccttataagaaggcacttgtttgtaagccagagaagaaactttaattgcatcctatcagattgttgaggtgggtgtgatagtcttcaggtgcagtgcgttcattcactaacgctcactgtcagtgcccatgtttgctagctgcctccatgtgactagtgagctgctggtgaaagtcgtgtgaaatcctgtacactgtgtatagaacaatgtaattttatgttaattgttattactttaaaacatatctaccatctgattggctggtaccgagagctgtgggtaaaatttgaaaattgtatttagaataagaaattttacattttaaaccctattgtcctttatgcattttcaatgaaatggaatgaaggctaatatgcttgctttatttacttttgtaatcttggattttgtagcttttaaaactagaaaccattgttctaacaaagcaggcaactttattctataaacacaactttattaagcagaatacactgtagatgcttttccccaacgtatctggctggcagtctttgtcgttgttcattctggggataaaggggaactaggctagcagttctaatgtgacattctttaagcatatcttaaaatagtatttaagtaaatggtctaatttctacataattattgcactgaacttttttgtttattaaggtgtttaaataagctcagctaattcaagacactgtagtcacttgtgcatcagtgtgcttgaatttagtagcttacagcattatttatgaaggaaaaaatacataaatatgaagtacctcatgttgaatgttattgtactgtatttttaatgtaacagtgcagatcttgttagacacatgaatgtgtataatcatgttaaatgcaaataaaactagttcataga

SEQ ID NO: 352801 - DNA, 4835 bp, Homo sapiens
agcgggcgggtgcccgccgagcccgccgggcgctggatctccgagtgccccggccggggcctgaggagcgggcacagggcaaggcggcggacggctgcgtcgcccgaggcgaggaggagcgctggcgagacggtaaagaacaggtccaagaaaagctcaaagaaagcaaataccagcagcagcagtagcaacagcagcaagttgccaccagtttgttatgaaataattaccttgaagactaaaaagaagaagatggctgctgatatattcccccgtaaaaagccagccaactccagcagcaccagcgtccagcagtaccaccagcagaatctcagtaacaacaaccttatcccggccccaaactggcagggtctttatcccaccattagagagagaaatgcgatgatgttcaataatgatttgatggcagatgtacattttgtggttgggccaccaggtgggactcaacggttgccaggacacaaatatgttttagctgttgggagctctgtgttccatgcgatgttttacggagaacttgcagaggacaaagatgaaatccgtataccagatgtcgaacctgctgcttttctcgctatgctgaaatatatctattgtgatgaaattgacttggctgctgacacagtgctggccacactttatgctgccaaaaagtacattgtccctcaccttgccagagcctgtgttaatttcctggagaccagcctgagtgccaagaatgcctgtgtgctcctctcccagagctgcctgttcgaggagccagacctgacccagcgttgctgggaggtgattgatgcccaggctgagttagctctcaagtctgagggattctgcgatattgacttccagacactagaaagtattctccgtagggaaactctgaatgccaaagaaattgtggtttttgaggcagctctcaactgggctgaagtagaatgccaacgacaagatctggcgttgagcattgaaaataaacgcaaggttctaggaaaggcactttacttgatccgcatacccacaatggccctcgatgattttgcaaatggtgctgcacagtccggggtattaactctcaatgagaccaacgacatcttcctctggtatactgcagccaaaaagcctgagcttcagtttgtgagtaaagcccgtaagggccttgtcccccagcgctgtcaccgtttccagtcgtgtgcctatcgaagcaaccaatggcgctatcgtggtcgctgtgacagcatccagtttgcagttgataaaagagtgttcattgctggctttgggctgtatggctccagctgtggttctgcagaatacagtgccaagattgaacttaagcggcagggcgttgtcctggggcagaacttgagcaagtacttctcagatgggtccagcaatacctttcccgtatggtttgaatacccagtgcagatcgagccagacaccttctacacagccagtgtgatactggatggcaatgaactcagctactttggacaagaaggcatgacagaagttcagtgtggcaaagtgactgtccagtttcagtgctcctcagatagcaccaatggcactggggtacagggagggcagatccctgaacttatattctatgcttgaaaactcacttcctgaagcagcttgagctccaaagtgcacatctggttccaacttgcctgatgcttagctcatctgcaaatatgtgatcagtgccggtaatttgtaatgaatgaagcggtaggcaggttctaatttcttttaaccttttaattatgtacaggcaaaaatgcagcattccgcttttaactatctgcttaaaagagctaacgttcttattaaggctttgtggtttttagagttgcatctatgaacctggggagattatgtgctttcccaagcgttccaccaccctctcagttttgtccctctgaagataattttggatcaccttgaatttccttttggacgttatttgatgaacagaaataaattgataacaagagttatttttaaacagaactcctcttaccccccaaaacagataaacctcagtgtacaattttgaaagaagttttgccttgtaatgagtaataatttagaaagtagacagtggttgtgtttggctctcgttttattccttttacatttgttgcttctgggatttaaaaaattactaaattcataagatagttaggtattaaacacttcagaatatcaatgtaaaattggaaaataaggaactgggggcatttgtttaggccatgacttctacaagcagatttcttttcttttagtttagaagacaaaaaatttcaatacagatacttcttttagaagtaaatttttagattttattgtcagtagaaaaaagttaaactcctactaatttaaactaagacagtttaaaaaggaagcctgaaaaagactcatactacaaataatttaattgatggcatataagaatatgcagtttgaaaaagccaaactcttctctccacttagcttttgatccccactgtttgcttatttgtataagtcatactgtgtagaatttctattttctttttccccattaaaagaggaccaaacaattctttatacaaatggagtagcaactagttttgtagcactacatttaatgtaatgagatacctttgttcatttttttaaatttgaaatatactttacctgatccactttgattgtatactatattctttgttaattttaattttgtcctgttcctagactgctagaatctggcccctggccatcttaaagtgccaacatatgcctgcagggtttataaaaaatggcctggagtgacacattttattatacctaatattcactgcatcagtatcacatctagctcccttacttgtccacagataatgtaaacaaaggagggaaaaacttattaaattctccttcgctgctggcttgtgctggtttagtgcctgtgtccctggcagtgtccagtgtgttcacttccagttgaagtatccatgtgtttctgggcagcttttctgctcagtgtgatcctgagatggcttccccgccgccacccagagtgtggtccttggccgcctcctgctcctgctctgcaagcctgaaactggcttgtctggagccaggagttagtcctggggtgtgtgtgtgcctgcgcacccatgcgcatgcaagtgtgtttgccagctcaggagctgtctcctctctacctggctagtaagaggtgggacagtaatggtcctcctgctggccccagcaaggcccatgagtgactgccctgacgtattcactgtgcctctgggccacttcttcccctgtagatgtgggcttgttgccttcagccggcttccctgagggaggagaacactggattattggaaatgttttaatcactcttgccattacctacatctattagcatagatgatgaaaagctgttactggtgattatagatgagtatttccaggacaacattctaaaagtacaattatttcttattggggagattacaggtagtttggcaaagcattgaagtacaaaggtacattttcaattaaaaagcacacttctacaaaagatttggtttttaaattatggttacacatttcagtaactcatagctgctgtgcaaattggtagaccttataagaaggcacttgtttgtaagccagagaagaaactttaattgcatcctatcagattgttgaggtgggtgtgatagtcttcaggtgcagtgcgttcattcactaacgctcactgtcagtgcccatgtttgctagctgcctccatgtgactagtgagctgctggtgaaagtcgtgtgaaatcctgtacactgtgtatagaacaatgtaattttatgttaattgttattactttaaaacatatctaccatctgattggctggtaccgagagctgtgggtaaaatttgaaaattgtatttagaataagaaattttacattttaaaccctattgtcctttatgcattttcaatgaaatggaatgaaggctaatatgcttgctttatttacttttgtaatcttggattttgtagcttttaaaactagaaaccattgttctaacaaagcaggcaactttattctataaacacaactttattaagcagaatacactgtagatgcttttccccaacgtatctggctggcagtctttgtcgttgttcattctggggataaaggggaactaggctagcagttctaatgtgacattctttaagcatatcttaaaatagtatttaagtaaatggtctaatttctacataattattgcactgaacttttttgtttattaaggtgtttaaataagctcagctaattcaagacactgtagtcacttgtgcatcagtgtgcttgaatttagtagcttacagcattatttatgaaggaaaaaatacataaatatgaagtacctcatgttgaatgttattgtactgtatttttaatgtaacagtgcagatcttgttagacacatgaatgtgtataatcatgttaaatgcaaataaaactagttcatagaaccacgcaacatacactcggcaacgcgacacgacaatacacaaaagaacacaccacatgacatacccaccaaaacacccagcctagtacaagaacaacgcacgaccacgagccagcatgactcgcgcggacccacgtatatccctccctagctagccgacccacccaagcaatgaacgatgcgtagcacacatcgcacagcacgcagtccggcactaaccagcgcacgatcgaccgacagcacgatacgagagcccacacgcctgagc

SEQ ID NO: 352802 - DNA, 5135 bp, Homo sapiens
agcgggcgggtgcccgccgagcccgccgggcgctggatctccgagtgccccggccggggcctgaggagcgggcacagggcaaggcggcggacggctgcgtcgcccgaggcgaggaggagcgctggcgagacggtaaagaacaggtccaagaaaagctcaaagaaagcaaataccagcagcagcagtagcaacagcagcaagttgccaccagtttgttatgaaataattaccttgaagactaaaaagaagaagatggctgctgatatattcccccgtaaaaagccagccaactccagcagcaccagcgtccagcagtaccaccagcagaatctcagtaacaacaaccttatcccggccccaaactggcagggtctttatcccaccattagagagagaaatgcgatgatgttcaataatgatttgatggcagatgtacattttgtggttgggccaccaggtgggactcaacggttgccaggacacaaatatgttttagctgttgggagctctgtgttccatgcgatgttttacggagaacttgcagaggacaaagatgaaatccgtataccagatgtcgaacctgctgcttttctcgctatgctgaaatatatctattgtgatgaaattgacttggctgctgacacagtgctggccacactttatgctgccaaaaagtacattgtccctcaccttgccagagcctgtgttaatttcctggagaccagcctgagtgccaagaatgcctgtgtgctcctctcccagagctgcctgttcgaggagccagacctgacccagcgttgctgggaggtgattgatgcccaggctgagttagctctcaagtctgagggattctgcgatattgacttccagacactagaaagtattctccgtagggaaactctgaatgccaaagaaattgtggtttttgaggcagctctcaactgggctgaagtagaatgccaacgacaagatctggcgttgagcattgaaaataaacgcaaggttctaggaaaggcactttacttgatccgcatacccacaatggccctcgatgattttgcaaatggtgctgcacagtccggggtattaactctcaatgagaccaacgacatcttcctctggtatactgcagccaaaaagcctgagcttcagtttgtgagtaaagcccgtaagggccttgtcccccagcgctgtcaccgtttccagtcgtgtgcctatcgaagcaaccaatggcgctatcgtggtcgctgtgacagcatccagtttgcagttgataaaagagtgttcattgctggctttgggctgtatggctccagctgtggttctgcagaatacagtgccaagattgaacttaagcggcagggcgttgtcctggggcagaacttgagcaagtacttctcagatgggtccagcaatacctttcccgtatggtttgaatacccagtgcagatcgagccagacaccttctacacagccagtgtgatactggatggcaatgaactcagctactttggacaagaaggcatgacagaagttcagtgtggcaaagtgactgtccagtttcagtgctcctcagatagcaccaatggcactggggtacagggagggcagatccctgaacttatattctatgcttgaaaactcacttcctgaagcagcttgagctccaaagtgcacatctggttccaacttgcctgatgcttagctcatctgcaaatatgtgatcagtgccggtaatttgtaatgaatgaagcggtaggcaggttctaatttcttttaaccttttaattatgtacaggcaaaaatgcagcattccgcttttaactatctgcttaaaagagctaacgttcttattaaggctttgtggtttttagagttgcatctatgaacctggggagattatgtgctttcccaagcgttccaccaccctctcagttttgtccctctgaagataattttggatcaccttgaatttccttttggacgttatttgatgaacagaaataaattgataacaagagttatttttaaacagaactcctcttaccccccaaaacagataaacctcagtgtacaattttgaaagaagttttgccttgtaatgagtaataatttagaaagtagacagtggttgtgtttggctctcgttttattccttttacatttgttgcttctgggatttaaaaaattactaaattcataagatagttaggtattaaacacttcagaatatcaatgtaaaattggaaaataaggaactgggggcatttgtttaggccatgacttctacaagcagatttcttttcttttagtttagaagacaaaaaatttcaatacagatacttcttttagaagtaaatttttagattttattgtcagtagaaaaaagttaaactcctactaatttaaactaagacagtttaaaaaggaagcctgaaaaagactcatactacaaataatttaattgatggcatataagaatatgcagtttgaaaaagccaaactcttctctccacttagcttttgatccccactgtttgcttatttgtataagtcatactgtgtagaatttctattttctttttccccattaaaagaggaccaaacaattctttatacaaatggagtagcaactagttttgtagcactacatttaatgtaatgagatacctttgttcatttttttaaatttgaaatatactttacctgatccactttgattgtatactatattctttgttaattttaattttgtcctgttcctagactgctagaatctggcccctggccatcttaaagtgccaacatatgcctgcagggtttataaaaaatggcctggagtgacacattttattatacctaatattcactgcatcagtatcacatctagctcccttacttgtccacagataatgtaaacaaaggagggaaaaacttattaaattctccttcgctgctggcttgtgctggtttagtgcctgtgtccctggcagtgtccagtgtgttcacttccagttgaagtatccatgtgtttctgggcagcttttctgctcagtgtgatcctgagatggcttccccgccgccacccagagtgtggtccttggccgcctcctgctcctgctctgcaagcctgaaactggcttgtctggagccaggagttagtcctggggtgtgtgtgtgcctgcgcacccatgcgcatgcaagtgtgtttgccagctcaggagctgtctcctctctacctggctagtaagaggtgggacagtaatggtcctcctgctggccccagcaaggcccatgagtgactgccctgacgtattcactgtgcctctgggccacttcttcccctgtagatgtgggcttgttgccttcagccggcttccctgagggaggagaacactggattattggaaatgttttaatcactcttgccattacctacatctattagcatagatgatgaaaagctgttactggtgattatagatgagtatttccaggacaacattctaaaagtacaattatttcttattggggagattacaggtagtttggcaaagcattgaagtacaaaggtacattttcaattaaaaagcacacttctacaaaagatttggtttttaaattatggttacacatttcagtaactcatagctgctgtgcaaattggtagaccttataagaaggcacttgtttgtaagccagagaagaaactttaattgcatcctatcagattgttgaggtgggtgtgatagtcttcaggtgcagtgcgttcattcactaacgctcactgtcagtgcccatgtttgctagctgcctccatgtgactagtgagctgctggtgaaagtcgtgtgaaatcctgtacactgtgtatagaacaatgtaattttatgttaattgttattactttaaaacatatctaccatctgattggctggtaccgagagctgtgggtaaaatttgaaaattgtatttagaataagaaattttacattttaaaccctattgtcctttatgcattttcaatgaaatggaatgaaggctaatatgcttgctttatttacttttgtaatcttggattttgtagcttttaaaactagaaaccattgttctaacaaagcaggcaactttattctataaacacaactttattaagcagaatacactgtagatgcttttccccaacgtatctggctggcagtctttgtcgttgttcattctggggataaaggggaactaggctagcagttctaatgtgacattctttaagcatatcttaaaatagtatttaagtaaatggtctaatttctacataattattgcactgaacttttttgtttattaaggtgtttaaataagctcagctaattcaagacactgtagtcacttgtgcatcagtgtgcttgaatttagtagcttacagcattatttatgaaggaaaaaatacataaatatgaagtacctcatgttgaatgttattgtactgtatttttaatgtaacagtgcagatcttgttagacacatgaatgtgtataatcatgttaaatgcaaataaaactagttcatagaaaaaaaaacaaacaaacaaaaaaaaaaaaaaaaaaaaaaaaaaaaaaaaaaaaaaaaggaggggggggcgcgccccaaaaatttcccccgggggggcccccattttcggcctctcaccaccgctctttttgttaatacaaggggtcgccccccataagagggagacgctgtatattagtaacgccgaagcaaccgagggcgccggtggtttacaacaacccggttcgcgagaacgtggcggaaaacaaccgtgctcaacgtggggagaactcctttgtggagaagaggaaaacccctatcactgagcgggggggggggcggaacaacatcctagtgggacaacaacactcccccatccggaagaaatattttcaagcacccctcagaagggggataacattcattagaccactcttgagacggggtgttatcaatggtgcggtgtaacaccacagccgccggataatatttgtttgccgcgcgtgaaaaaaaagttgtgggcccaccgggacattatgtgtatttctacgaacaaacttttttattcccggggagctggtatagaacc

SEQ ID NO: 352803 - DNA, 3365 bp, Homo sapiens
agcgggcgggtgcccgccgagcccgccgggcgctggatctccgagtgccccggccggggcctgaggagcgggcacagggcaaggcggcggacggctgcgtcgcccgaggcgaggaggagcgctggcgagacggtaaagaacaggtccaagaaaagctcaaagaaagcaaataccagcagcagcagtagcaacagcagcaagttgccaccagtttgttatgaaataattaccttgaagactaaaaagaagaagatggctgctgatatattcccccgtaaaaagccagccaactccagcagcaccagcgtccagcagtaccaccagcagaatctcagtaacaacaaccttatcccggccccaaactggcagggtctttatcccaccattagagagagaaatgcgatgatgttcaataatgatttgatggcagatgtacattttgtggttgggccaccaggtgggactcaacggttgccaggacacaaatatgttttagctgttgggagctctgtgttccatgcgatgttttacggagaacttgcagaggacaaagatgaaatccgtataccagatgtcgaacctgctgcttttctcgctatgctgaaatatatctattgtgatgaaattgacttggctgctgacacagtgctggccacactttatgctgccaaaaagtacattgtccctcaccttgccagagcctgtgttaatttcctggagaccagcctgagtgccaagaatgcctgtgtgctcctctcccagagctgcctgttcgaggagccagacctgacccagcgttgctgggaggtgattgatgcccaggctgagttagctctcaagtctgagggattctgcgatattgacttccagacactagaaagtattctccgtagggaaactctgaatgccaaagaaattgtggtttttgaggcagctctcaactgggctgaagtagaatgccaacgacaagatctggcgttgagcattgaaaataaacgcaaggttctaggaaaggcactttacttgatccgcatacccacaatggccctcgatgattttgcaaatggtgctgcacagtccggggtattaactctcaatgagaccaacgacatcttcctctggtatactgcagccaaaaagcctgagcttcagtttgtgagtaaagcccgtaagggccttgtcccccagcgctgtcaccgtttccagtcgtgtgcctatcgaagcaaccaatggcgctatcgtggtcgctgtgacagcatccagtttgcagttgataaaagagtgttcattgctggctttgggctgtatggctccagctgtggttctgcagaatacagtgccaagattgaacttaagcggcagggcgttgtcctggggcagaacttgagcaagtacttctcagatgggtccagcaatacctttcccgtatggtttgaatacccagtgcagatcgagccagacaccttctacacagccagtgtgatactggatggcaatgaactcagctactttggacaagaaggcatgacagaagttcagtgtggcaaagtgactgtccagtttcagtgctcctcagatagcaccaatggcactggggtacagggagggcagatccctgaacttatattctatgcttgaaaactcacttcctgaagcagcttgagctccaaagtgcacatctggttccaacttgcctgatgcttagctcatctgcaaatatgtgatcagtgccggtaatttgtaatgaatgaagcggtaggcaggttctaatttcttttaaccttttaattatgtacaggcaaaaatgcagcattccgcttttaactatctgcttaaaagagctaacgttcttattaaggctttgtggtttttagagttgcatctatgaacctggggagattatgtgctttcccaagcgttccaccaccctctcagttttgtccctctgaagataattttggatcaccttgaatttccttttggacgttatttgatgaacagaaataaattgataacaagagttatttttaaacagaactcctcttaccccccaaaacagataaacctcagtgtacaattttgaaagaagttttgccttgtaatgagtaataatttagaaagtagacagtggttgtgtttggctctcgttttattccttttacatttgttgcttctgggatttaaaaaattactaaattcataagatagttaggtattaaacacttcagaatatcaatgtaaaattggaaaataaggaactgggggcatttgtttaggccatgacttctacaagcagatttcttttcttttagtttagaagacaaaaaatttcaatacagatacttcttttagaagtaaatttttagattttattgtcagtagaaaaaagttaaactcctactaatttaaactaagacagtttaaaaaggaagcctgaaaaagactcatactacaaataatttaattgatggcatataagaatatgcagtttgaaaaagccaaactcttctctccacttagcttttgatccccactgtttgcttatttgtataagtcatactgtgtagaatttctattttctttttccccattaaaagaggaccaaacaattctttatacaaatggagtagcaactagttttgtagcactacatttaatgtaatgagatacctttgttcatttttttaaatttgaaatatactttacctgatccactttgattgtatactatattctttgttaattttaattttgtcctgttcctagactgctagaatctggcccctggccatcttaaagtgccaacatatgcctgcagggtttataaaaaatggcctggagtgacacattttattatacctaatattcactgcatcagtatcacatctagctcccttacttgtccacagataatgtaaacaaaggagggaaaaacttattaaattctccttcgctgctggcttgtgctggtttagtgcctgtgtccctggcagtgtccagtgtgttcacttccagttgaagataaaggggaactaggctagcagttctaatgtgacattctttaagcatatcttaaaatagtatttaagtaaatggtctaatttctacataattattgcactgaacttttttgtttattaaggtgtttaaataagctcagctaattcaagacactgtagtcacttgtgcatcagtgtgcttgaatttagtagcttacagcattatttatgaaggaaaaaatacataaatatgaagtacctcatgttgaatgttattgtactgtatttttaatgtaacagtgcagatcttgttagacacatgaatgtgtataatcatgttaaatgcaaataaaactagttcataga

SEQ ID NO: 352804 - DNA, 2947 bp, Homo sapiens
aacgcggactggagataccgggggcgttgtcttgggcacgactgcgtaggggcaaaggtcgagtacccgcgccgccgccattttttatgagggcatattccatttctgattatacacccgctgccatcggcaccgttagtttccacgccctctagtgcgccctcgggggccctagtaacctccctccttcccttgggcccgggccggggaggctttctcgggcgcaggaggttccgcaggcccaggccaggccaggggaggcagccgatccgtcgtcggggttgacagttaccatggcgccgcctctggccccgctccctccccgggacccaaacggggccggacccgagtggagggagccgggggctgtgagcttcgcggacgtggccgtgtacttctgccgggaggagtggggctgcttgcggccagcgcagagggccctgtaccgggacgtgatgcgggagacctacggccacctgagcgctctcggaatcggaggcaacaagccagctctcatctcctgggtggaggaggaggccgaactgtggggtccggctgcccaggatccggaggtggcgaaatgtcagacacaaacggacccaggattccagaaacaagaaaaaggaaagacaaagggaagggacgggagccctggagaagcccgaccctgtggccgccgggtctcctgggctgaagtctccccaagccccctcggccgggcccccttatggttgggagcagctgtccaaggcaccgcaccggggacgcccctccctctgtgcccacccccctgtcccccgagctgaccagcgtcatggctgctacgtgtgcgggaagagctttgcctggcgctccacactggtggagcacgtctacagtcacactggcgagaagcccttccactgcactgactgcggcaagggcttcggccacgcttcctccctgagcaaacaccgggccatccatcgtggggagcggccccaccgctgtctggagtgtggccgggccttcacgcagcgctcggcgctgacttcgcacctgcgcgtccacaccggcgagaaaccctatggctgcgccgactgtggccgccgcttcagccagagctctgccctctaccagcaccggcgcgtgcacagcggcgagacccccttcccctgcccggactgtggccgcgccttcgcctacccctcggacctgcggcgccacgtgcgcacccacaccggcgagaagccctacccgtgcccggactgcgggcgctgcttccgccagagctcggagatggcagtccacaggcgcacccacagcggcgagaagccctacccctgcccgcagtgcggccgccgctttggccagaagtcagccgtggccaaacaccagtgggttcatcggcccggggccgggggccacaggggccgggtcgccgggcgtctgtctgtgaccctgacccctggccacggagacctggacccgcccgtgggcttccagctgtacccggagatattccaggagtgtgggtgacggccttaaaagtgactatctagacattacgggaggcccgagatgggctcaggggcccgaacctctgcggcggcctgcagggaggtcccagaatctagggcaagagctggccctggggtgcggacagtctgatcttgggcccttagcagcctcctctgccagcaccttgctccccactgcccagggctctccaaggccccctctactgaggcagggctgagttgagaacccccagacctacataaggggaaccaaaagctgtttctcagcccagaggtgctaagaggactgaggtagaggagaaccttgttttacccattgtctttttaaattttttatcattatttttattcttgtgaccctcccagaacacaatactcattgtctttttatttatttatttatttatttctgagacagcttcctgctctgtcacccaggctggagtgcagtggtgtgaacagggctaactgcagcctcaacctgcagtgctcaaggaatcctctcccatcagccttccaaatatctgagactacaggcgggcaacactacggccagctaatttttaaattttacatagagatgaggttctcactgttgtccaggctggtctcaaactccttggctgaagtgatcctgtcgtctcggcttccgcaagtgctgggattacaggcgtgagctaccaccatgcctggcttccattgtctttgtgtgtgtgtgtgtgtgatggggttttgctcttgttgcccaggctggagtgcaatagcgcaatctcagctcactgcaacctctgcctccagagttcaagcaattctccttcctcagcctcccaagtagctgggactacaggcacccaccacctccattgtctttttactgcccaagttaaaatcctgtgactgtgtactggatctggcctgcggttgtcatatttattgatctgagtccaggcagtgtttttaagtgatatgagttagtagtgaaaattgaaaaggatattttacaaccaaatacaggttttctggtgtcttttgaaaaatccaaagatttggcaactcgacctaggctccgacaaaaccacagttgttgggagctgagccggagccagaactcacaattcaccgtggcccggccacccatccccaccactcccgtgggctcctgaccaagcaccacgtgccattcatcatggcttgcttttagtgtttttggtgtttatcttaaagtacagcgaagaagaaagggaagtatttcttagacccatgtctctgtccaaataggcctttccatctggcatttcccgctcatttatatgacttgctgagttcctatggtcatttgagtttgcaaacagtggtctgtagcactcaggttttctggagttggagagaaagggtggcaagagagaagtaaaagttggttttatttt

SEQ ID NO: 352805 - DNA, 4225 bp, Homo sapiens
aacgcggactggagataccgggggcgttgtcttgggcacgactgcgtaggggcaaaggtcgagtacccgcgccgccgccattttttatgagggcatattccatttctgattatacacccgctgccatcggcaccgttagtttccacgccctctagtgcgccctcgggggccctagtaacctccctccttcccttgggcccgggccggggaggctttctcgggcgcaggaggttccgcaggcccaggccaggccaggggaggcagccgatccgtcgtcggggttgacagttaccatggcgccgcctctggccccgctccctccccgggacccaaacggggccggacccgagtggagggagccgggggctgtgagcttcgcggacgtggccgtgtacttctgccgggaggagtggggctgcttgcggccagcgcagagggccctgtaccgggacgtgatgcgggagacctacggccacctgagcgctctcggtgagagccccacctgctcgcctgagccctgcgcccccacaggccctgccgcgcctctgggagctgcgcgtgaagttgggggccccggggccgggcaggtggcctccccgcagcgtggggtttgcgttcttcttccctaggaatcggaggcaacaagccagctctcatctcctgggtggaggaggaggccgaactgtggggtccggctgcccaggatccggaggtggcgaaatgtcagacacaaacggacccaggattccagaaacaagaaaaaggaaagacaaagggaagggacgggagccctggagaagcccgaccctgtggccgccgggtctcctgggctgaagtctccccaagccccctcggccgggcccccttatggttgggagcagctgtccaaggcaccgcaccggggacgcccctccctctgtgcccacccccctgtcccccgagctgaccagcgtcatggctgctacgtgtgcgggaagagctttgcctggcgctccacactggtggagcacgtctacagtcacactggcgagaagcccttccactgcactgactgcggcaagggcttcggccacgcttcctccctgagcaaacaccgggccatccatcgtggggagcggccccaccgctgtctggagtgtggccgggccttcacgcagcgctcggcgctgacttcgcacctgcgcgtccacaccggcgagaaaccctatggctgcgccgactgtggccgccgcttcagccagagctctgccctctaccagcaccggcgcgtgcacagcggcgagacccccttcccctgcccggactgtggccgcgccttcgcctacccctcggacctgcggcgccacgtgcgcacccacaccggcgagaagccctacccgtgcccggactgcgggcgctgcttccgccagagctcggagatggcagtccacaggcgcacccacagcggcgagaagccctacccctgcccgcagtgcggccgccgctttggccagaagtcagccgtggccaaacaccagtgggttcatcggcccggggccgggggccacaggggccgggtcgccgggcgtctgtctgtgaccctgacccctggccacggagacctggacccgcccgtgggcttccagctgtacccggagatattccaggagtgtgggtgacggccttaaaagtgactatctagacattacgggaggcccgagatgggctcaggggcccgaacctctgcggcggcctgcagggaggtcccagaatctagggcaagagctggccctggggtgcggacagtctgatcttgggcccttagcagcctcctctgccagcaccttgctccccactgcccagggctctccaaggccccctctactgaggcagggctgagttgagaacccccagacctacataaggggaaccaaaagctgtttctcagcccagaggtgctaagaggactgaggtagaggagaaccttgttttacccattgtctttttaaattttttatcattatttttattcttgtgaccctcccagaacacaatactcattgtctttttatttatttatttatttatttctgagacagcttcctgctctgtcacccaggctggagtgcagtggtgtgaacagggctaactgcagcctcaacctgcagtgctcaaggaatcctctcccatcagccttccaaatatctgagactacaggcgggcaacactacggccagctaatttttaaattttacatagagatgaggttctcactgttgtccaggctggtctcaaactccttggctgaagtgatcctgtcgtctcggcttccgcaagtgctgggattacaggcgtgagctaccaccatgcctggcttccattgtctttgtgtgtgtgtgtgtgtgatggggttttgctcttgttgcccaggctggagtgcaatagcgcaatctcagctcactgcaacctctgcctccagagttcaagcaattctccttcctcagcctcccaagtagctgggactacaggcacccaccacctccattgtctttttactgcccaagttaaaatcctgtgactgtgtactggatctggcctgcggttgtcatatttattgatctgagtccaggcagtgtttttaagtgatatgagttagtagtgaaaattgaaaaggatattttacaaccaaatacaggttttctggtgtcttttgaaaaatccaaagatttggcaactcgacctaggctccgacaaaaccacagttgttgggagctgagccggagccagaactcacaattcaccgtggcccggccacccatccccaccactcccgtgggctcctgaccaagcaccacgtgccattcatcatggcttgcttttagtgtttttggtgtttatcttaaagtacagcgaagaagaaagggaagtatttcttagacccatgtctctgtccaaataggcctttccatctggcatttcccgctcatttatatgacttgctgagttcctatggtcatttgagtttgcaaacagtggtctgtagcactcaggttttctggagttggagagaaagggtggcaagagagaagtaaaagttggttttattttagatctttgcttgtattgcattttatggtttacaaagtactgtctcttccattgaatcatttcaccttcataagtgctgagagaaaccccttggttgaagaggacagcctggtcaggaagaggcagtcaggactgcctttcatcccaaaccaaggggtgtgtccgccatcagccaacaggcagttcctgtttttgaatgggaaggttttgagagctccctccagtcttctttgggcctccctgagatagccacatgcctcaggacttcttagccctcctagaccctgccaggagggccttatcacagttttgaactagaagagatcttcactttcctaggcttttacagttggagacactgagaccaaggagggctaagcagcctgtccagggtcacacagagaccccagggttcttagctgactgctgactttacccatcactcctgaggccttcactggtgtctcagccagggttttgcaggcatctgcccctccctgtgataacacccagccctgacctggatggggtcagactagcccagcatcagtgaagcccacgtaccagatgagttctgacaaagtggccatgtgacagatcaggtcaactcagaatccaggcaacgaggagagtcccaaggcgcacagaccttgcatttttcctctgtaccatcatgggcagagcggggtaggccaggaacacctggtgttagattagatttgtagccaggggtgactacccatctgtatccccaagctctgcacagaatccccacccccattatccatctaccactaattcctttgtgggcagagtctagccatgggcagcccctgccctgctcctggttaggacaacatctccctgaggagagcaagggcctgtgacctctgctggcctatgcagagtcacccagctcagccctgtgtctggcctacccaggaaggaagaaaccagattaatcaacctggaaggaggtagaagttttggagaaaagacactgttccggtgtcaagtgaagtaatgaactgactttattccaacctcatctccaatccgaccccaccaaggtctctctctccttcagcttttctggggcgggttgactcgtgcgccaccttatcacaggggcatattg

SEQ ID NO: 352806 - DNA, 4170 bp, Homo sapiens
aacgcggactggagataccgggggcgttgtcttgggcacgactgcgtaggggcaaaggtcgagtacccgcgccgccgccattttttatgagggcatattccatttctgattatacacccgctgccatcggcaccgttagtttccacgccctctagtgcgccctcgggggccctagtaacctccctccttcccttgggcccgggccggggaggctttctcgggcgcaggaggttccgcaggcccaggccaggccaggggaggcagccgatccgtcgtcggggttgacagttaccatggcgccgcctctggccccgctccctccccgggacccaaacggggccggacccgagtggagggagccgggggctgtgagcttcgcggacgtggccgtgtacttctgccgggaggagtggggctgcttgcggccagcgcagagggccctgtaccgggacgtgatgcgggagacctacggccacctgagcgctctcggtgagagccccacctgctcgcctgagccctgcgcccccacaggccctgccgcgcctctgggagctgcgcgtgaagttgggggccccggggccgggcaggtggcctccccgcagcgtggggtttgcgttcttcttccctaggaatcggaggcaacaagccagctctcatctcctgggtggaggaggaggccgaactgtggggtccggctgcccaggatccggaggtggcgaaatgtcagacacaaacggacccaggattccagaaacaagaaaaaggaaagacaaagggaagggacgggagccctggagaagcccgaccctgtggccgccgggtctcctgggctgaagtctccccaagccccctcggccgggcccccttatggttgggagcagctgtccaaggcaccgcaccggggacgcccctccctctgtgcccacccccctgtcccccgagctgaccagcgtcatggctgctacgtgtgcgggaagagctttgcctggcgctccacactggtggagcacgtctacagtcacactggcgagaagcccttccactgcactgactgcggcaagggcttcggccacgcttcctccctgagcaaacaccgggccatccatcgtggggagcggccccaccgctgtctggagtgtggccgggccttcacgcagcgctcggcgctgacttcgcacctgcgcgtccacaccggcgagaaaccctatggctgcgccgactgtggccgccgcttcagccagagctctgccctctaccagcaccggcgcgtgcacagcggcgagacccccttcccctgcccggactgtggccgcgccttcgcctacccctcggacctgcggcgccacgtgcgcacccacaccggcgagaagccctacccgtgcccggactgcgggcgctgcttccgccagagctcggagatggcagtccacaggcgcacccacagcggcgagaagccctacccctgcccgcagtgcggccgccgctttggccagaagtcagccgtggccaaacaccagtgggttcatcggcccggggccgggggccacaggggccgggtcgccgggcgtctgtctgtgaccctgacccctggccacggagacctggacccgcccgtgggcttccagctgtacccggagatattccaggagtgtgggtgacggccttaaaagtgactatctagacattacgggaggcccgagatgggctcaggggcccgaacctctgcggcggcctgcagggaggtcccagaatctagggcaagagctggccctggggtgcggacagtctgatcttgggcccttagcagcctcctctgccagcaccttgctccccactgcccagggctctccaaggccccctctactgaggcagggctgagttgagaacccccagacctacataaggggaaccaaaagctgtttctcagcccagaggtgctaagaggactgaggtagaggagaaccttgttttacccattgtctttttaaattttttatcattatttttattcttgtgaccctcccagaacacaatactcattgtctttttatttatttatttatttatttctgagacagcttcctgctctgtcacccaggctggagtgcagtggtgtgaacagggctaactgcagcctcaacctgcagtgctcaaggaatcctctcccatcagccttccaaatatctgagactacaggcgggcaacactacggccagctaatttttaaattttacatagagatgaggttctcactgttgtccaggctggtctcaaactccttggctgaagtgatcctgtcgtctcggcttccgcaagtgctgggattacaggcgtgagctaccaccatgcctggcttccattgtctttgtgtgtgtgtgtgtgtgatggggttttgctcttgttgcccaggctggagtgcaatagcgcaatctcagctcactgcaacctctgcctccagagttcaagcaattctccttcctcagcctcccaagtagctgggactacaggcacccaccacctccattgtctttttactgcccaagttaaaatcctgtgactgtgtactggatctggcctgcggttgtcatatttattgatctgagtccaggcagtgtttttaagtgatatgagttagtagtgaaaattgaaaaggatattttacaaccaaatacaggttttctggtgtcttttgaaaaatccaaagatttggcaactcgacctaggctccgacaaaaccacagttgttgggagctgagccggagccagaactcacaattcaccgtggcccggccacccatccccaccactcccgtgggctcctgaccaagcaccacgtgccattcatcatggcttgcttttagtgtttttggtgtttatcttaaagtacagcgaagaagaaagggaagtatttcttagacccatgtctctttcctatggtcatttgagtttgcaaacagtggtctgtagcactcaggttttctggagttggagagaaagggtggcaagagagaagtaaaagttggttttattttagatctttgcttgtattgcattttatggtttacaaagtactgtctcttccattgaatcatttcaccttcataagtgctgagagaaaccccttggttgaagaggacagcctggtcaggaagaggcagtcaggactgcctttcatcccaaaccaaggggtgtgtccgccatcagccaacaggcagttcctgtttttgaatgggaaggttttgagagctccctccagtcttctttgggcctccctgagatagccacatgcctcaggacttcttagccctcctagaccctgccaggagggccttatcacagttttgaactagaagagatcttcactttcctaggcttttacagttggagacactgagaccaaggagggctaagcagcctgtccagggtcacacagagaccccagggttcttagctgactgctgactttacccatcactcctgaggccttcactggtgtctcagccagggttttgcaggcatctgcccctccctgtgataacacccagccctgacctggatggggtcagactagcccagcatcagtgaagcccacgtaccagatgagttctgacaaagtggccatgtgacagatcaggtcaactcagaatccaggcaacgaggagagtcccaaggcgcacagaccttgcatttttcctctgtaccatcatgggcagagcggggtaggccaggaacacctggtgttagattagatttgtagccaggggtgactacccatctgtatccccaagctctgcacagaatccccacccccattatccatctaccactaattcctttgtgggcagagtctagccatgggcagcccctgccctgctcctggttaggacaacatctccctgaggagagcaagggcctgtgacctctgctggcctatgcagagtcacccagctcagccctgtgtctggcctacccaggaaggaagaaaccagattaatcaacctggaaggaggtagaagttttggagaaaagacactgttccggtgtcaagtgaagtaatgaactgactttattccaacctcatctccaatccgaccccaccaaggtctctctctccttcagcttttctggggcgggttgactcgtgcgccaccttatcacaggggcatattg

SEQ ID NO: 352807 - DNA, 4172 bp, Homo sapiens
aacgcggactggagataccgggggcgttgtcttgggcacgactgcgtaggggcaaaggtcgagtacccgcgccgccgccattttttatgagggcatattccatttctgattatacacccgctgccatcggcaccgttagtttccacgccctctagtgcgccctcgggggccctagtaacctccctccttcccttgggcccgggccggggaggctttctcgggcgcaggaggttccgcaggcccaggccaggccaggggaggcagccgatccgtcgtcggggttgacagttaccatggcgccgcctctggccccgctccctccccgggacccaaacggggccggacccgagtggagggagccgggggctgtgagcttcgcggacgtggccgtgtacttctgccgggaggagtggggctgcttgcggccagcgcagagggccctgtaccgggacgtgatgcgggagacctacggccacctgagcgctctcggtgagagccccacctgctcgcctgagccctgcgcccccacaggccctgccgcgcctctgggagctgcgcgtgaagttgggggccccggggccgggcaggtggcctccccgcagcgtggggtttgcgttcttcttccctaggaatcggaggcaacaagccagctctcatctcctgggtggaggaggaggccgaactgtggggtccggctgcccaggatccggaggtggcgaaatgtcagacacaaacggacccaggattccagaaacaagaaaaaggaaagacaaagggaagggacgggagccctggagaagcccgaccctgtggccgccgggtctcctgggctgaagtctccccaagccccctcggccgggcccccttatggttgggagcagctgtccaaggcaccgcaccggggacgcccctccctctgtgcccacccccctgtcccccgagctgaccagcgtcatggctgctacgtgtgcgggaagagctttgcctggcgctccacactggtggagcacgtctacagtcacactggcgagaagcccttccactgcactgactgcggcaagggcttcggccacgcttcctccctgagcaaacaccgggccatccatcgtggggagcggccccaccgctgtctggagtgtggccgggccttcacgcagcgctcggcgctgacttcgcacctgcgcgtccacaccggcgagaaaccctatggctgcgccgactgtggccgccgcttcagccagagctctgccctctaccagcaccggcgcgtgcacagcggcgagacccccttcccctgcccggactgtggccgcgccttcgcctacccctcggacctgcggcgccacgtgcgcacccacaccggcgagaagccctacccgtgcccggactgcgggcgctgcttccgccagagctcggagatggcagtccacaggcgcacccacagcggcgagaagccctacccctgcccgcagtgcggccgccgctttggccagaagtcagccgtggccaaacaccagtgggttcatcggcccggggccgggggccacaggggccgggtcgccgggcgtctgtctgtgaccctgacccctggccacggagacctggacccgcccgtgggcttccagctgtacccggagatattccaggagtgtgggtgacggccttaaaagtgactatctagacattacgggaggcccgagatgggctcaggggcccgaacctctgcggcggcctgcagggaggtcccagaatctagggcaagagctggccctggggtgcggacagtctgatcttgggcccttagcagcctcctctgccagcaccttgctccccactgcccagggctctccaaggccccctctactgaggcagggctgagttgagaacccccagacctacataaggggaaccttgttttacccattgtctttttaaattttttatcattatttttattcttgtgaccctcccagaacacaatactcattgtctttttatttatttatttatttatttctgagacagcttcctgctctgtcacccaggctggagtgcagtggtgtgaacagggctaactgcagcctcaacctgcagtgctcaaggaatcctctcccatcagccttccaaatatctgagactacaggcgggcaacactacggccagctaatttttaaattttacatagagatgaggttctcactgttgtccaggctggtctcaaactccttggctgaagtgatcctgtcgtctcggcttccgcaagtgctgggattacaggcgtgagctaccaccatgcctggcttccattgtctttgtgtgtgtgtgtgtgtgatggggttttgctcttgttgcccaggctggagtgcaatagcgcaatctcagctcactgcaacctctgcctccagagttcaagcaattctccttcctcagcctcccaagtagctgggactacaggcacccaccacctccattgtctttttactgcccaagttaaaatcctgtgactgtgtactggatctggcctgcggttgtcatatttattgatctgagtccaggcagtgtttttaagtgatatgagttagtagtgaaaattgaaaaggatattttacaaccaaatacaggttttctggtgtcttttgaaaaatccaaagatttggcaactcgacctaggctccgacaaaaccacagttgttgggagctgagccggagccagaactcacaattcaccgtggcccggccacccatccccaccactcccgtgggctcctgaccaagcaccacgtgccattcatcatggcttgcttttagtgtttttggtgtttatcttaaagtacagcgaagaagaaagggaagtatttcttagacccatgtctctgtccaaataggcctttccatctggcatttcccgctcatttatatgacttgctgagttcctatggtcatttgagtttgcaaacagtggtctgtagcactcaggttttctggagttggagagaaagggtggcaagagagaagtaaaagttggttttattttagatctttgcttgtattgcattttatggtttacaaagtactgtctcttccattgaatcatttcaccttcataagtgctgagagaaaccccttggttgaagaggacagcctggtcaggaagaggcagtcaggactgcctttcatcccaaaccaaggggtgtgtccgccatcagccaacaggcagttcctgtttttgaatgggaaggttttgagagctccctccagtcttctttgggcctccctgagatagccacatgcctcaggacttcttagccctcctagaccctgccaggagggccttatcacagttttgaactagaagagatcttcactttcctaggcttttacagttggagacactgagaccaaggagggctaagcagcctgtccagggtcacacagagaccccagggttcttagctgactgctgactttacccatcactcctgaggccttcactggtgtctcagccagggttttgcaggcatctgcccctccctgtgataacacccagccctgacctggatggggtcagactagcccagcatcagtgaagcccacgtaccagatgagttctgacaaagtggccatgtgacagatcaggtcaactcagaatccaggcaacgaggagagtcccaaggcgcacagaccttgcatttttcctctgtaccatcatgggcagagcggggtaggccaggaacacctggtgttagattagatttgtagccaggggtgactacccatctgtatccccaagctctgcacagaatccccacccccattatccatctaccactaattcctttgtgggcagagtctagccatgggcagcccctgccctgctcctggttaggacaacatctccctgaggagagcaagggcctgtgacctctgctggcctatgcagagtcacccagctcagccctgtgtctggcctacccaggaaggaagaaaccagattaatcaacctggaaggaggtagaagttttggagaaaagacactgttccggtgtcaagtgaagtaatgaactgactttattccaacctcatctccaatccgaccccaccaaggtctctctctccttcagcttttctggggcgggttgactcgtgcgccaccttatcacaggggcatattg

SEQ ID NO: 352808 - DNA, 2486 bp, Homo sapiens
aacgcggactggagataccgggggcgttgtcttgggcacgactgcgtaggggcaaaggtcgagtacccgcgccgccgccattttttatgagggcatattccatttctgattatacacccgctgccatcggcaccgttagtttccacgccctctagtgcgccctcgggggccctagtaacctccctccttcccttgggcccgggccggggaggctttctcgggcgcaggaggttccgcaggcccaggccaggccaggggaggcagccgatccgtcgtcggggttgacagttaccatggcgccgcctctggccccgctccctccccgggacccaaacggggccggacccgagtggagggagccgggggctgtgagcttcgcggacgtggccgtgtacttctgccgggaggagtggggctgcttgcggccagcgcagagggccctgtaccgggacgtgatgcgggagacctacggccacctgagcgctctcggtgagagccccacctgctcgcctgagccctgcgcccccacaggccctgccgcgcctctgggagctgcgcgtgaagttgggggccccggggccgggcaggtggcctccccgcagcgtggggtttgcgttcttcttccctaggaatcggaggcaacaagccagctctcatctcctgggtggaggaggaggccgaactgtggggtccggctgcccaggatccggaggtggcgaaatgtcagacacaaacggacccaggattccagaaacaagaaaaaggaaagacaaagggaagggacgggagccctggagaagcccgaccctgtggccgccgggtctcctgggctgaagtctccccaagccccctcggccgggcccccttatggttgggagcagctgtccaaggcaccgcaccggggacgcccctccctctgtgcccacccccctgtcccccgagctgaccagcgtcatggctgctacgtgtgcgggaagagctttgcctggcgctccacactggtggagcacgtctacagtcacactggcgagaagcccttccactgcactgactgcggcaagggcttcggccacgcttcctccctgagcaaacaccgggccatccatcgtggggagcggccccaccgctgtctggagtgtggccgggccttcacgcagcgctcggcgctgacttcgcacctgcgcgtccacaccggcgagaaaccctatggctgcgccgactgtggccgccgcttcagccagagctctgccctctaccagcaccggcgcgtgcacagcggcgagacccccttcccctgcccggactgtggccgcgccttcgcctacccctcggacctgcggcgccacgtgcgcacccacaccggcgagaagccctacccgtgcccggactgcgggcgctgcttccgccagagctcggagatggcagtccacaggcgcacccacagcggcgagaagccctacccctgcccgcagtgcggccgccgctttggccagaagtcagccgtggccaaacaccagtgggttcatcggcccggggccgggggccacaggggccgggtcgccgggcgtctgtctgtgaccctgacccctggccacggagacctggacccgcccgtgggcttccagctgtacccggagatattccaggagtgtgggtgacggccttaaaagtgactatctagacattacgggaggcccgagatgggctcaggggcccgaacctctgcggcggcctgcagggaggtcccagaatctagggcaagagctggccctggggtgcggacagtctgatcttgggcccttagcagcctcctctgccagcaccttgctccccactgcccagggctctccaaggccccctctactgaggcagggctgagttgagaacccccagacctacataaggggaaccaaaagctgtttctcagcccagaggtgctaagaggactgaggtagaggagaaccttgttttacccattgtctttttaaattttttatcattatttttattcttgtgaccctcccagaacacaatactcattgtctttttatttatttatttatttatttctgagacagcttcctgctctgtcacccaggctggagtgcagtggtgtgaacagggctaactgcagcctcaacctgcagtgctcaaggaatcctctcccatcagccttccaaatatctgagactacaggcgggcaacactacggccagctaatttttaaattttacatagagatgaggttctcactgttgtccaggctggtctcaaactccttggctgaagtgatcctgtcgtctcggcttccgcaagtgctgggattacaggcgtgagctaccaccatgcctggcttccattgtctttgtgtgtgtgtgtgtgtgatggggttttgctcttgttgcccgttgcagtgagctgagattgcaccactgcacactccagcctggatgacaaagcgagactctgtctcaaaaaaaaaaaaa

SEQ ID NO: 352809 - DNA, 2384 bp, Homo sapiens
aacgcggactggagataccgggggcgttgtcttgggcacgactgcgtaggggcaaaggtcgagtacccgcgccgccgccattttttatgagggcatattccatttctgattatacacccgctgccatcggcaccgttagtttccacgccctctagtgcgccctcgggggccctagtaacctccctccttcccttgggcccgggccggggaggctttctcgggcgcaggaggttccgcaggcccaggccaggccaggggaggcagccgatccgtcgtcggggttgacagttaccatggcgccgcctctggccccgctccctccccgggacccaaacggggccggacccgagtggagggagccgggggctgtgagcttcgcggacgtggccgtgtacttctgccgggaggagtggggctgcttgcggccagcgcagagggccctgtaccgggacgtgatgcgggagacctacggccacctgagcgctctcggtgagagccccacctgctcgcctgagccctgcgcccccacaggccctgccgcgcctctgggagctgcgcgtgaagttgggggccccggggccgggcaggtggcctccccgcagcgtggggtttgcgttcttcttccctaggaatcggaggcaacaagccagctctcatctcctgggtggaggaggaggccgaactgtggggtccggctgcccaggatccggaggtggcgaaatgtcagacacaaacggacccaggattccagaaacaagaaaaaggaaagacaaagggaagggacgggagccctggagaagcccgaccctgtggccgccgggtctcctgggctgaagtctccccaagccccctcggccgggcccccttatggttgggagcagctgtccaaggcaccgcaccggggacgcccctccctctgtgcccacccccctgtcccccgagctgaccagcgtcatggctgctacgtgtgcgggaagagctttgcctggcgctccacactggtggagcacgtctacagtcacactggcgagaagcccttccactgcactgactgcggcaagggcttcggccacgcttcctccctgagcaaacaccgggccatccatcgtggggagcggccccaccgctgtctggagtgtggccgggccttcacgcagcgctcggcgctgacttcgcacctgcgcgtccacaccggcgagaaaccctatggctgcgccgactgtggccgccgcttcagccagagctctgccctctaccagcaccggcgcgtgcacagcggcgagacccccttcccctgcccggactgtggccgcgccttcgcctacccctcggacctgcggcgccacgtgcgcacccacaccggcgagaagccctacccgtgcccggactgcgggcgctgcttccgccagagctcggagatggcagtccacaggcgcacccacagcggcgagaagccctacccctgcccgcagtgcggccgccgctttggccagaagtcagccgtggccaaacaccagtgggttcatcggcccggggccgggggccacaggggccgggtcgccgggcgtctgtctgtgaccctgacccctggccacggagacctggacccgcccgtgggcttccagctgtacccggagatattccaggagtgtgggtgacggccttaaaagtgactatctagacattacgggaggcccgagatgggctcaggggcccgaacctctgcggcggcctgcagggaggtcccagaatctagggcaagagctggccctggggtgcggacagtctgatcttgggcccttagcagcctcctctgccagcaccttgctccccactgcccagggctctccaaggccccctctactgaggcagggctgagttgagaacccccagacctacataaggggaaccaaaagctgtttctcagcccagaggtgctaagaggactgaggtagaggagaaccttgttttacccattgtctttttaaattttttatcattatttttattcttgtgaccctcccagaacacaatactcattgtctttttatttatttatttatttatttctgagacagcttcctgctctgtcacccaggctggagtgcagtggtgtgaacagggctaactgcagcctcaacctgcagtgctcaaggaatcctctcccatcagccttccaaatatctgagactacaggcgggcaacactacggccagctaatttttaaattttacatagagatgaggttctcactgttgtccaggctggtctcagcgtgagctacaccatgcctgccttcaatggccttgggtgtgtgtttgcgtgaaggggctttgttcttggtgcccaagttggagggcataaccgcacctgtctatggcccg

SEQ ID NO: 352810 - DNA, 4080 bp, Homo sapiens
aacgcggactggagataccgggggcgttgtcttgggcacgactgcgtaggggcaaaggtcgagtacccgcgccgccgccattttttatgagggcatattccatttctgattatacacccgctgccatcggcaccgttagtttccacgccctctagtgcgccctcgggggccctagtaacctccctccttcccttgggcccgggccggggaggctttctcgggcgcaggaggttccgcaggcccaggccaggccaggggaggcagccgatccgtcgtcggggttgacagttaccatggcgccgcctctggccccgctccctccccgggacccaaacggggccggacccgagtggagggagccgggggctgtgagcttcgcggacgtggccgtgtacttctgccgggaggagtggggctgcttgcggccagcgcagagggccctgtaccgggacgtgatgcgggagacctacggccacctgagcgctctcggtgagagccccacctgctcgcctgagccctgcgcccccacaggccctgccgcgcctctgggagctgcgcgtgaagttgggggccccggggccgggcaggtggcctccccgcagcgtggggtttgcgttcttcttccctaggaatcggaggcaacaagccagctctcatctcctgggtggaggaggaggccgaactgtggggtccggctgcccaggatccggaggtggcgaaatgtcagacacaaacggacccaggattccagaaacaagaaaaaggaaagacaaagggaagggacgggagccctggagaagcccgaccctgtggccgccgggtctcctgggctgaagtctccccaagccccctcggccgggcccccttatggttgggagcagctgtccaaggcaccgcaccggggacgcccctccctctgtgcccacccccctgtcccccgagctgaccagcgtcatggctgctacgtgtgcgggaagagctttgcctggcgctccacactggtggagcacgtctacagtcacactggcgagaagcccttccactgcactgactgcggcaagggcttcggccacgcttcctccctgagcaaacaccgggccatccatcgtggggagcggccccaccgctgtctggagtgtggccgggccttcacgcagcgctcggcgctgacttcgcctacccctcggacctgcggcgccacgtgcgcacccacaccggcgagaagccctacccgtgcccggactgcgggcgctgcttccgccagagctcggagatggcagtccacaggcgcacccacagcggcgagaagccctacccctgcccgcagtgcggccgccgctttggccagaagtcagccgtggccaaacaccagtgggttcatcggcccggggccgggggccacaggggccgggtcgccgggcgtctgtctgtgaccctgacccctggccacggagacctggacccgcccgtgggcttccagctgtacccggagatattccaggagtgtgggtgacggccttaaaagtgactatctagacattacgggaggcccgagatgggctcaggggcccgaacctctgcggcggcctgcagggaggtcccagaatctagggcaagagctggccctggggtgcggacagtctgatcttgggcccttagcagcctcctctgccagcaccttgctccccactgcccagggctctccaaggccccctctactgaggcagggctgagttgagaacccccagacctacataaggggaaccaaaagctgtttctcagcccagaggtgctaagaggactgaggtagaggagaaccttgttttacccattgtctttttaaattttttatcattatttttattcttgtgaccctcccagaacacaatactcattgtctttttatttatttatttatttatttctgagacagcttcctgctctgtcacccaggctggagtgcagtggtgtgaacagggctaactgcagcctcaacctgcagtgctcaaggaatcctctcccatcagccttccaaatatctgagactacaggcgggcaacactacggccagctaatttttaaattttacatagagatgaggttctcactgttgtccaggctggtctcaaactccttggctgaagtgatcctgtcgtctcggcttccgcaagtgctgggattacaggcgtgagctaccaccatgcctggcttccattgtctttgtgtgtgtgtgtgtgtgatggggttttgctcttgttgcccaggctggagtgcaatagcgcaatctcagctcactgcaacctctgcctccagagttcaagcaattctccttcctcagcctcccaagtagctgggactacaggcacccaccacctccattgtctttttactgcccaagttaaaatcctgtgactgtgtactggatctggcctgcggttgtcatatttattgatctgagtccaggcagtgtttttaagtgatatgagttagtagtgaaaattgaaaaggatattttacaaccaaatacaggttttctggtgtcttttgaaaaatccaaagatttggcaactcgacctaggctccgacaaaaccacagttgttgggagctgagccggagccagaactcacaattcaccgtggcccggccacccatccccaccactcccgtgggctcctgaccaagcaccacgtgccattcatcatggcttgcttttagtgtttttggtgtttatcttaaagtacagcgaagaagaaagggaagtatttcttagacccatgtctctgtccaaataggcctttccatctggcatttcccgctcatttatatgacttgctgagttcctatggtcatttgagtttgcaaacagtggtctgtagcactcaggttttctggagttggagagaaagggtggcaagagagaagtaaaagttggttttattttagatctttgcttgtattgcattttatggtttacaaagtactgtctcttccattgaatcatttcaccttcataagtgctgagagaaaccccttggttgaagaggacagcctggtcaggaagaggcagtcaggactgcctttcatcccaaaccaaggggtgtgtccgccatcagccaacaggcagttcctgtttttgaatgggaaggttttgagagctccctccagtcttctttgggcctccctgagatagccacatgcctcaggacttcttagccctcctagaccctgccaggagggccttatcacagttttgaactagaagagatcttcactttcctaggcttttacagttggagacactgagaccaaggagggctaagcagcctgtccagggtcacacagagaccccagggttcttagctgactgctgactttacccatcactcctgaggccttcactggtgtctcagccagggttttgcaggcatctgcccctccctgtgataacacccagccctgacctggatggggtcagactagcccagcatcagtgaagcccacgtaccagatgagttctgacaaagtggccatgtgacagatcaggtcaactcagaatccaggcaacgaggagagtcccaaggcgcacagaccttgcatttttcctctgtaccatcatgggcagagcggggtaggccaggaacacctggtgttagattagatttgtagccaggggtgactacccatctgtatccccaagctctgcacagaatccccacccccattatccatctaccactaattcctttgtgggcagagtctagccatgggcagcccctgccctgctcctggttaggacaacatctccctgaggagagcaagggcctgtgacctctgctggcctatgcagagtcacccagctcagccctgtgtctggcctacccaggaaggaagaaaccagattaatcaacctggaaggaggtagaagttttggagaaaagacactgttccggtgtcaagtgaagtaatgaactgactttattccaacctcatctccaatccgaccccaccaaggtctctctctccttcagcttttctggggcgggttgactcgtgcgccaccttatcacaggggcatattg

SEQ ID NO: 352811 - DNA, 791 bp, Homo sapiens
ggctggtcctgaaatcctaggctgatcctccttctctacctcccaaagcgctgggattaccgccttgagcccccacgcccagtctcttaaactctgttgactctacctccacctcaggacccacccctgccgttcacctgcaggctggttcctttctccccgtccgcccccctttttttctttcatttcttgccctcagcctttgcagagtatccagccccactgaacttggccatgccctcctggttctgcctttcttggtgctgttcctgctgcctggaacatcctcaggtgtccgttcctccttctggatcaggcccagatgttcatgtcatctctgcccttcccccaccgtgacatttccccagccccgaggcggaatgggctgttctctccctcccggctctgtctggctctgcagccgaggaacaggtgtcactcctccatctcccaggagcagccggggatccagcaggcctgtccctgtccacgcgggctgtgggattcaaggaccaggatgagccgagcctgaactctcccctctttatctctcagcagattccagaaacaagaaaaaggaaagacaaagggaagggacgggagccctggagaagcccgaccctgtggccgccgggtctcctgggctgaagtctccccaagccccctcggccgggcccccttatggttgggagcagctgtccaaggcaccgcaccggggacgcccctccctctgtgcccacccccctgtcccccgagctgaccagcgtcatggctgctacgtgtgcgggaag

SEQ ID NO: 352812 - DNA, 3087 bp, Homo sapiens
aacgcggactggagataccgggggcgttgtcttgggcacgactgcgtaggggcaaaggtcgagtacccgcgccgccgccattttttatgagggcatattccatttctgattatacacccgctgccatcggcaccgttagtttccacgccctctagtgcgccctcgggggccctagtaacctccctccttcccttgggcccgggccggggaggctttctcgggcgcaggaggttccgcaggcccaggccaggccaggggaggcagccgatccgtcgtcggggttgacagttaccatggcgccgcctctggccccgctccctccccgggacccaaacggggccggacccgagtggagggagccgggggctgtgagcttcgcggacgtggccgtgtacttctgccgggaggagtggggctgcttgcggccagcgcagagggccctgtaccgggacgtgatgcgggagacctacggccacctgagcgctctcggtgagagccccacctgctcgcctgagccctgcgcccccacaggccctgccgcgcctctgggagctgcgcgtgaagttgggggccccggggccgggcaggtggcctccccgcagcgtggggtttgcgttcttcttccctaggaatcggaggcaacaagccagctctcatctcctgggtggaggaggaggccgaactgtggggtccggctgcccaggatccggaggtggcgaaatgtcagacacaaacggacccaggattccagaaacaagaaaaaggaaagacaaagggaagggacgggagccctggagaagcccgaccctgtggccgccgggtctcctgggctgaagtctccccaagccccctcggccgggcccccttatggttgggagcagctgtccaaggcaccgcaccggggacgcccctccctctgtgcccacccccctgtcccccgagctgaccagcgtcatggctgctacgtgtgcgggaagagctttgcctggcgctccacactggtggagcacgtctacagtcacactggcgagaagcccttccactgcactgactgcggcaagggcttcggccacgcttcctccctgagcaaacaccgggccatccatcgtggggagcggccccaccgctgtctggagtgtggccgggccttcacgcagcgctcggcgctgacttcgcacctgcgcgtccacaccggcgagaaaccctatggctgcgccgactgtggccgccgcttcagccagagctctgccctctaccagcaccggcgcgtgcacagcggcgagacccccttcccctgcccggactgtggccgcgccttcgcctacccctcggacctgcggcgccacgtgcgcacccacaccggcgagaagccctacccgtgcccggactgcgggcgctgcttccgccagagctcggagatggcagtccacaggcgcacccacagcggcgagaagccctacccctgcccgcagtgcggccgccgctttggccagaagtcagccgtggccaaacaccagtgggttcatcggcccggggccgggggccacaggggccgggtcgccgggcgtctgtctgtgaccctgacccctggccacggagacctggacccgcccgtgggcttccagctgtacccggagatattccaggagtgtgggtgacggccttaaaagtgactatctagacattacgggaggcccgagatgggctcaggggcccgaacctctgcggcggcctgcagggaggtcccagaatctagggcaagagctggccctggggtgcggacagtctgatcttgggcccttagcagcctcctctgccagcaccttgctccccactgcccagggctctccaaggccccctctactgaggcagggctgagttgagaacccccagacctacataaggggaaccaaaagctgtttctcagcccagaggtgctaagaggactgaggtagaggagaaccttgttttacccattgtctttttaaattttttatcattatttttattcttgtgaccctcccagaacacaatactcattgtctttttatttatttatttatttatttctgagacagcttcctgctctgtcacccaggctggagtgcagtggtgtgaacagggctaactgcagcctcaacctgcagtgctcaaggaatcctctcccatcagccttccaaatatctgagactacaggcgggcaacactacggccagctaatttttaaattttacatagagatgaggttctcactgttgtccaggctggtctcaaactccttggctgaagtgatcctgtcgtctcggcttccgcaagtgctgggattacaggcgtgagctaccaccatgcctggcttccattgtctttgtgtgtgtgtgtgtgtgatggggttttgctcttgttgcccaggctggagtgcaatagcgcaatctcagctcactgcaacctctgcctccagagttcaagcaattctccttcctcagcctcccaagtagctgggactacaggcacccaccacctccattgtctttttactgcccaagttaaaatcctgtgactgtgtactggatctggcctgcggttgtcatatttattgatctgagtccaggcagtgtttttaagtgatatgagttagtagtgaaaattgaaaaggatattttacaaccaaatacaggttttctggtgtcttttgaaaaatccaaagatttggcaactcgacctaggctccgacaaaaccacagttgttgggagctgagccggagccagaactcacaattcaccgtggcccggccacccatccccaccactcccgtgggctcctgaccaagcaccacgtgccattcatcatggcttgcttttagtgtttttggtgtttatcttaaagtacagcgaagaagaaagggaagtatttcttagacccatgtctctgtccaaataggcctttccatctggcatttcccgctcatttatatgacttgctgagttcctatggtcatttgagtttgcaaacagtggtctgtagcactcaggttttctggagttggagagaaagggtggcaagagagaagtaaaagttggttttatttt

SEQ ID NO: 352813 - DNA, 2833 bp, Homo sapiens
aacgcggactggagataccgggggcgttgtcttgggcacgactgcgtaggggcaaaggtcgagtacccgcgccgccgccattttttatgagggcatattccatttctgattatacacccgctgccatcggcaccgttagtttccacgccctctagtgcgccctcgggggccctagtaacctccctccttcccttgggcccgggccggggaggctttctcgggcgcaggaggttccgcaggcccaggccaggccaggggaggcagccgatccgtcgtcggggttgacagttaccatggcgccgcctctggccccgctccctccccgggacccaaacggggccggacccgagtggagggagccgggggctgtgagcttcgcggacgtggccgtgtacttctgccgggaggagtggggctgcttgcggccagcgcagagggccctgtaccgggacgtgatgcgggagacctacggccacctgagcgctctcggattccagaaacaagaaaaaggaaagacaaagggaagggacgggagccctggagaagcccgaccctgtggccgccgggtctcctgggctgaagtctccccaagccccctcggccgggcccccttatggttgggagcagctgtccaaggcaccgcaccggggacgcccctccctctgtgcccacccccctgtcccccgagctgaccagcgtcatggctgctacgtgtgcgggaagagctttgcctggcgctccacactggtggagcacgtctacagtcacactggcgagaagcccttccactgcactgactgcggcaagggcttcggccacgcttcctccctgagcaaacaccgggccatccatcgtggggagcggccccaccgctgtctggagtgtggccgggccttcacgcagcgctcggcgctgacttcgcacctgcgcgtccacaccggcgagaaaccctatggctgcgccgactgtggccgccgcttcagccagagctctgccctctaccagcaccggcgcgtgcacagcggcgagacccccttcccctgcccggactgtggccgcgccttcgcctacccctcggacctgcggcgccacgtgcgcacccacaccggcgagaagccctacccgtgcccggactgcgggcgctgcttccgccagagctcggagatggcagtccacaggcgcacccacagcggcgagaagccctacccctgcccgcagtgcggccgccgctttggccagaagtcagccgtggccaaacaccagtgggttcatcggcccggggccgggggccacaggggccgggtcgccgggcgtctgtctgtgaccctgacccctggccacggagacctggacccgcccgtgggcttccagctgtacccggagatattccaggagtgtgggtgacggccttaaaagtgactatctagacattacgggaggcccgagatgggctcaggggcccgaacctctgcggcggcctgcagggaggtcccagaatctagggcaagagctggccctggggtgcggacagtctgatcttgggcccttagcagcctcctctgccagcaccttgctccccactgcccagggctctccaaggccccctctactgaggcagggctgagttgagaacccccagacctacataaggggaaccaaaagctgtttctcagcccagaggtgctaagaggactgaggtagaggagaaccttgttttacccattgtctttttaaattttttatcattatttttattcttgtgaccctcccagaacacaatactcattgtctttttatttatttatttatttatttctgagacagcttcctgctctgtcacccaggctggagtgcagtggtgtgaacagggctaactgcagcctcaacctgcagtgctcaaggaatcctctcccatcagccttccaaatatctgagactacaggcgggcaacactacggccagctaatttttaaattttacatagagatgaggttctcactgttgtccaggctggtctcaaactccttggctgaagtgatcctgtcgtctcggcttccgcaagtgctgggattacaggcgtgagctaccaccatgcctggcttccattgtctttgtgtgtgtgtgtgtgtgatggggttttgctcttgttgcccaggctggagtgcaatagcgcaatctcagctcactgcaacctctgcctccagagttcaagcaattctccttcctcagcctcccaagtagctgggactacaggcacccaccacctccattgtctttttactgcccaagttaaaatcctgtgactgtgtactggatctggcctgcggttgtcatatttattgatctgagtccaggcagtgtttttaagtgatatgagttagtagtgaaaattgaaaaggatattttacaaccaaatacaggttttctggtgtcttttgaaaaatccaaagatttggcaactcgacctaggctccgacaaaaccacagttgttgggagctgagccggagccagaactcacaattcaccgtggcccggccacccatccccaccactcccgtgggctcctgaccaagcaccacgtgccattcatcatggcttgcttttagtgtttttggtgtttatcttaaagtacagcgaagaagaaagggaagtatttcttagacccatgtctctgtccaaataggcctttccatctggcatttcccgctcatttatatgacttgctgagttcctatggtcatttgagtttgcaaacagtggtctgtagcactcaggttttctggagttggagagaaagggtggcaagagagaagtaaaagttggttttatttt

SEQ ID NO: 352814 - DNA, 2516 bp, Homo sapiens
aacgcggactggagataccgggggcgttgtcttgggcacgactgcgtaggggcaaaggtcgagtacccgcgccgccgccattttttatgagggcatattccatttctgattatacacccgctgccatcggcaccgttagtttccacgccctctagtgcgccctcgggggccctagtaacctccctccttcccttgggcccgggccggggaggctttctcgggcgcaggaggttccgcaggcccaggccaggccaggggaggcagccgatccgtcgtcggggttgacagttaccatggcgccgcctctggccccgctccctccccgggacccaaacggggccggacccgagtggagggagccgggggctgtgagcttcgcggacgtggccgtgtacttctgccgggaggagtggggctgcttgcggccagcgcagagggccctgtaccgggacgtgatgcgggagacctacggccacctgagcgctctcggtgagagccccacctgctcgcctgagccctgcgcccccacaggccctgccgcgcctctgggagctgcgcgtgaagttgggggccccggggccgggcaggtggcctccccgcagcgtggggtttgcgttcttcttccctaggaatcggaggcaacaagccagctctcatctcctgggtggaggaggaggccgaactgtggggtccggctgcccaggatccggaggtggcgaaatgtcagacacaaacggacccaggattccagaaacaagaaaaaggaaagacaaagggaagggacgggagccctggagaagcccgaccctgtggccgccgggtctcctgggctgaagtctccccaagccccctcggccgggcccccttatggttgggagcagctgtccaaggcaccgcaccggggacgcccctccctctgtgcccacccccctgtcccccgagctgaccagcgtcatggctgctacgtgtgcgggaagagctttgcctggcgctccacactggtggagcacgtctacagtcacactggcgagaagcccttccactgcactgactgcggcaagggcttcggccacgcttcctccctgagcaaacaccgggccatccatcgtggggagcggccccaccgctgtctggagtgtggccgggccttcacgcagcgctcggcgctgacttcgcacctgcgcgtccacaccggcgagaaaccctatggctgcgccgactgtggccgccgcttcagccagagctctgccctctaccagcaccggcgcgtgcacagcggcgagacccccttcccctgcccggactgtggccgcgccttcgcctacccctcggacctgcggcgccacgtgcgcacccacaccggcgagaagccctacccgtgcccggactgcgggcgctgcttccgccagagctcggagatggcagtccacaggcgcacccacagcggcgagaagccctacccctgcccgcagtgcggccgccgctttggccagaagtcagccgtggccaaacaccagtgggttcatcggcccggggccgggggccacaggggccgggtcgccgggcgtctgtctgtgaccctgacccctggccacggagacctggacccgcccgtgggcttccagctgtacccggagatattccaggagtgtgggtgacggccttaaaagtgactatctagacattacgggaggcccgagatgggctcaggggcccgaacctctgcggcggcctgcagggaggtcccagaatctagggcaagagctggccctggggtgcggacagtctgatcttgggcccttagcagcctcctctgccagcaccttgctccccactgcccagggctctccaaggccccctctactgaggcagggctgagttgagaacccccagacctacataaggggaaccaaaagctgtttctcagcccagaggtgctaagaggactgaggtagaggagaaccttgttttacccattgtctttttaaattttttatcattatttttattcttgtgaccctcccagaacacaatactcattgtctttttatttatttatttatttatttctgagacagcttcctgctctgtcacccaggctggagtgcagtggtgtgaacagggctaactgcagcctcaacctgcagtgctcaaggaatcctctcccatcagccttccaaatatctgagactacaggcgggcaacactacggccagctaatttttaaattttacatagagatgaggttctcactgttgtccaggctggtctcaaactccttggctgaagtgatcctgtcgtctcggcttccgcaagtgctgggattacaggcgtgagctaccaccatgcctggcttccattgtctttgtgtgtgtgtgtgtgtgatggggttttgctcttgttgccctccgattataaaaaggtccagagacgaaaactaacttctgagttcacgagggctgccttccgcagggcgctgctttgttcccgcaaacccgggcggaagctctgagctg

SEQ ID NO: 352815 - DNA, 453 bp, Homo sapiens
aactcagaatccctgcttatcacttctccttcagcacacaactgtttcattttctatttaagaaacttcctctcactgcaaaaagacattctggctgataaagttagcctataatttcagtaaatctaagaatatgactaatggaagttgccagacctaaactttgaaaattattgttccactgaagagcgtcttatgactgagtgttccagtctccttctcaagctgaaccttgcttttcaaaccagattaagaacactatcataagttatactgcattttatttccctacccatgtccactgcatcattctctatagtacaaagagcttgtctcgccaggcgcatctataatcttagcactttggggcgccaaggcgggtggatcacttgagcccaggagtttgagaccagcctggacagcatggcaaaaacccatctctacaaaaaaaaa

SEQ ID NO: 352816 - DNA, 1431 bp, Homo sapiens
gatgcgcctgtgccggggagggcagaacgctggtgcctggcacaggtgccacaacacatacgggtgaggacactgaaaacccctcagttcccccgactcatggccacttgtcccagtgacacagccatgctctcccactcacccacaatagggtctgaatgtgccccccagattcacagtgagaaactcattccccagagcaacagtgtagagaggtggaacctgatgggagccccgccctcacagacaaactcctgtagctgtcaagacagcttgggcatggattcctctctgccttctgccatgtggacacgtggccttcctcccctctctcctccggggaatgcagtgtttgggcgccatcttggaagcagagatcaggcctcaccagacaccaagcctgctggcaccatgaccctggactcccaacctccacagctgggaaagaactctgctccctagaaattacccaggctcgctcaggcacccactgactccagcctcatggaaccaccattcaccaggcttgaggggaggatgtcacggcgcgctgctcccttcggtgccagccaggatggggccgggtgggtgcagctggtgaaaagaaatgcagccccccagcccctgcagaccaagccgaacagcccagctcgcgggtggatcacagggcacccagcagccgccttccctccggaagagccaagaaggcttccaagaccagaaatgcccccagtgtggctgtgcctgtccccggtgccccgccagctggggggcagcatacccaaacagatgcaccctgcccatgatggcaccccagggacccccatcctcaggaccctccagtcgttcaagctggaattggcaggtttctgcctgtataggcatcggcttcagagtctcaggtgctgcttggcaggaaaatgcagggcaggaggggctgggcctcagctcgaggctcccaggtgcagccccccactccactgcagggcccaggggggccaagaacagccacaacaacaacaaaagccaaactgggaacggaatcgtggaaaaaaccctcataggcttttgggaacttacaaagaaatgcccacatccattctactaacatggcatctactaacgtggcatctactaggatgccacaaaacagacaaatccttccacgtaaggctggacacgtgtcagggcggtgtctcaaagctgggccacaggcagcatccacggccaggccactgggtggaggagacggtgctggggaggagccggagggaggggccggggctgttcccttaggcagaacggctcacctgtggtgtgcgcacagcaggattgtggggacacaagatgcccccttcattcatcagttacttgtattctttgtatgaaacacctgccgataaaatgtgaaaaaggggcatttcctaaagt

SEQ ID NO: 352817 - DNA, 2260 bp, Homo sapiens
gatgcgcctgtgccggggagggcagaacgctggtgcctggcacaggtgccacaacacatacgggtgaggacactgaaaacccctcagttcccccgactcatggccacttgtcccagtgacacagccatgctctcccactcacccacaatagggtctgaatgtgccccccagattcacagtgagaaactcattccccagagcaacagtgtagagaggtggaacctgatgggagccccgccctcacagacaaactcctgtagctgtcaagacagcttgggcatggattcctctctgccttctgccatgtggacacgtggccttcctcccctctctcctccggggaatgcagtgtttgggcgccatcttggaagcagagatcaggcctcaccagacaccaagcctgctggcaccatgaccctggactcccaacctccacagctgggaaagaactctgctccctagaaattacccaggctcgctcaggtattctgttacagcagcaccaagagacattcactcgcttactccctcactctctaacccactcccattcaccctctcactccctctctaacccactcccattcaccctctcactccctcgctaacccactcccattcactcattcactcactcactctctagcccactttttttttgagatggagtcttgctctgttgcccaggctggagtgcagtggcgcgatctcggctcactgcaacctctgactccgattcaagctattctcctgcctcagtctcctgagtagccgggactacaggcatgcaccaccatgcccagctaattttgttttttgtttttgttttgagactcgctctgtctcccaggctgaagtgcagtggcacgatctcggctcactgcaagctccacctcccaggttcacaccattctcccgcctcagccttctgagtagctgggagtacaggcgcccgccaccacgcctggctaattttgtttttgtatttttagtagaggcagggtttcaccatgttgaccaggctgctcccgaactgctgacctcagatcatctgccctcctcggcctcccaaagtgctgggattacaggcgtgagccaccgcgcccggccctctttagcccactcattcactcactccctcgctctctaacccactcctgctcactcactcattcactggctcactcactctctaacccactctctctcattcccttgctcgttctctagcccaccctcgcacactcattcactggcccgccccttaggtgtgtgctcctgtaccaacactgaaatccagctgtcacaacaggcacccactgactccagcctcatggaaccaccattcaccaggcttgaggggaggatgtcacggcgcgctgctcccttcggtgccagccaggatggggccgggtgggtgcagctggtgaaaagaaatgcagccccccagcccctgcagaccaagccgaacagcccagctcgcgggtggatcacagggcacccagcagccgccttccctccggaagagccaagaaggcttccaagaccagaaatgcccccagtgtggctgtgcctgtccccggtgccccgccagctggggggcagcatacccaaacagatgcaccctgcccatgatggcaccccagggacccccatcctcaggaccctccagtcgttcaagctggaattggcaggtttctgcctgtataggcatcggcttcagagtctcaggtgctgcttggcaggaaaatgcagggcaggaggggctgggcctcagctcgaggctcccaggtgcagccccccactccactgcagggcccaggggggccaagaacagccacaacaacaacaaaagccaaactgggaacggaatcgtggaaaaaaccctcataggcttttgggaacttacaaagaaatgcccacatccattctactaacatggcatctactaacgtggcatctactaggatgccacaaaacagacaaatccttccacgtaaggctggacacgtgtcagggcggtgtctcaaagctgggccacaggcagcatccacggccaggccactgggtggaggagacggtgctggggaggagccggagggaggggccggggctgttcccttaggcagaacggctcacctgtggtgtgcgcacagcaggattgtggggacacaagatgcccccttcattcatcagttacttgtattctttgtatgaaacacctgccgataaaatgtgaaaaaggggcatttcctaaagt

SEQ ID NO: 352818 - DNA, 634 bp, Homo sapiens
cccggcgctcggagcccgagtccgcgggaagatggcggcgccgctcatccccctctcccagcagattcccactggaaattcgttgtatgaatcttattacaagcaggtcgatccggcatacacagggagggtgggggcgagtgaagctgcgctttttctaaagaagtctggcctctcggacattatccttgggaagatatgggacttggccgatccagaaggtaaagggttcttggacaaacagggtttctatgttgcactgagactggtggcctgtgcacagagtggccatgaagttaccttgagcaatctgaatttgagcatgccaccgcctaaatttcacgacaccagcagccctctgatggtcacaccgccctctgcagaggcccactgggctgtgagggtaagtgaacgggaatagctccctccttggctctccttcagatagaattgttccagcagttgttctagaattgttctggaattgttctagtttgatgttgttcagaacattttataggatgattgtgtcagctcttctgtctcagtgtgagtggccacagcacttggatgaaacgcctcttctaatgaacaccttttacaaaggctgtggcccttcactggaattgggagt

SEQ ID NO: 352819 - DNA, 2941 bp, Homo sapiens
cccggcgctcggagcccgagtccgcgggaagatggcggcgccgctcatccccctctcccagcagattcccactggaaattcgttgtatgaatcttattacaagcaggtcgatccggcatacacagggagggtgggggcgagtgaagctgcgctttttctaaagaagtctggcctctcggacattatccttgggaagatatgggacttggccgatccagaaggtaaagggttcttggacaaacagggtttctatgttgcactgagactggtggcctgtgcacagagtggccatgaagttaccttgagcaatctgaatttgagcatgccaccgcctaaatttcacgacaccagcagccctctgatggtcacaccgccctctgcagaggcccactgggctgtgagggtggaagaaaaggccaaatttgatgggatttttgaaagcctcttgcccatcaatggtttgctctctggagacaaagtcaagccagtcctcatgaactcaaagctgcctcttgatgtcctgggcagggtctgggacctcagtgacattgacaaggatgggcacttggatcgagatgagttcgctgtggccatgcacttggtgtaccgagccctggagaaggagcccgtgccctccgccctgcccccgtccctcatcccaccctccaagagaaagaagactgtgttccctggcgccgtccccgtcctgcctgccagccccccaccaaaagacagcctccgctccacgccgtcccacggcagcgtcagcagcctcaacagcacagggagcctgtcccccaagcacagcctcaagcaaacacagccaacagtgaactgggtggtgcccgtggcagacaagatgcgatttgatgagatattcctgaagaccgacctggacctggatggctacgtgagtggccaggaggtgaaggagatcttcatgcactcgggcctcacccagaaccttctagcacacatatgggccctggccgatacgaggcaaacggggaagttaagcaaagaccaattcgcgttagctatgtatttcattcagcagaaggtcagtaaaggcatcgaccctcctcaagtcctctcgccggacatggtcccgccttcggagagaggcacgcccggcccggacagttcaggctctctcggctccggggagtttactggcgtgaaggagcttgatgacatcagtcaagagattgcccagttacaaagagagaaatattcactggaacaagacattcgagaaaaggaagaggcaatcagacagaaaaccagcgaggtgcaggaattacaaaatgacctagaccgggaaacaagcagtttgcaggagctcgaggctcagaaacaggatgctcaagaccgcctggacgagatggaccagcagaaggccaagctccgagacatgctgagcgacgtccggcagaagtgccaggatgagactcagatgatctcatcactgaaaacgcaaatccaatctcaggaatctgacttaaagtcccaggaagacgatctgaaccgagccaagtcggagctgaaccgattgcagcaggaggaaacccagctggagcagagcattcaggctgggcgagtccagctggaaaccatcatcaagtccctgaagtcaacgcaagacgaaatcaaccaggcaaggagcaaactttcccagctgcatgaaagccgccaggaggcccacaggagcctggagcagtatgaccaggtgctcgatggagcccatggtgccagcctgaccgacctggccaacctgagcgaaggcgtctccctggcagagaggggcagttttggagccatggatgatcctttcaaaaataaagccttgttatttagcaacaacacgcaagagttgcatccggatcctttccagacagaagaccccttcaaatctgacccatttaaaggagctgaccccttcaaaggcgacccgttccagaatgacccctttgcagaacagcagacaacttcaacagatccatttggaggggaccctttcaaagaaagtgacccattccgtggctctgccactgacgacttcttcaagaaacagacaaagaatgacccatttacctcggatccattcacgaaaaacccttccttaccttcgaagctcgacccctttgaatccagtgatcccttttcatcctccagtgtctcctcaaaaggatcagatccctttggaaccttagatcccttcggaagtgggtccttcaatagtgctgaaggctttgccgacttcagccagatgtccaagcccccaccttctggccctttcacctcctccttgggaggggcaggattctcagatgacccctttaaaagtaaacaggacactcctgctctgcctccgaagaaacctgctcctccacggcctaaaccgcccagcggtaaaagtacacctgtaagccagcttggttccgcagactttcccgaggcccccgatccattccagccactcggggctgacagcggcgacccgttccaaagtaaaaaggggtttggggacccgtttagtggaaaagacccatttgtcccctcctctgcagctaaaccttctaaggcctctgcctcgggctttgcagacttcacctctgtaagttgagtcctccgcctccgggccaccccactcccttccgcttgcagcttccctgggatttttgtctccttttaaaggcaaacctcccagcttctttagcctcttggtacctcacactctctgtccctcgcgttatttattctacactgccacttctgtaagaaaaacagtttctcaataaaaaaaagagcggaaaaaaaaaaaaaaaaaaaatgttggggccgggccgaaattaaaccattgggggggccagaagaagcaagcaagacgcggagggggttccaaaacgggggcgggacacaagtggtggttaagcacacg

SEQ ID NO: 352820 - DNA, 3087 bp, Homo sapiens
cccggcgctcggagcccgagtccgcgggaagatggcggcgccgctcatccccctctcccagcagattcccactggaaattcgttgtatgaatcttattacaagcaggtcgatccggcatacacagggagggtgggggcgagtgaagctgcgctttttctaaagaagtctggcctctcggacattatccttgggaagatatgggacttggccgatccagaaggtaaagggttcttggacaaacagggtttctatgttgcactgagactggtggcctgtgcacagagtggccatgaagttaccttgagcaatctgaatttgagcatgccaccgcctaaatttcacgacaccagcagccctctgatggtcacaccgccctctgcagaggcccactgggctgtgagggtggaagaaaaggccaaatttgatgggatttttgaaagcctcttgcccatcaatggtttgctctctggagacaaagtcaagccagtcctcatgaactcaaagctgcctcttgatgtcctgggcagggtctgggacctcagtgacattgacaaggatgggcacttggatcgagatgagttcgctgtggccatgcacttggtgtaccgagccctggagaaggagcccgtgccctccgccctgcccccgtccctcatcccaccctccaagagaaagaagactgtgttccctggcgccgtccccgtcctgcctgccagccccccaccaaaagacagcctccgctccacgccgtcccacggcagcgtcagcagcctcaacagcacagggagcctgtcccccaagcacagcctcaagcaaacacagccaacagtgaactgggtggtgcccgtggcagacaagatgcgatttgatgagatattcctgaagaccgacctggacctggatggctacgtgagtggccaggaggtgaaggagatcttcatgcactcgggcctcacccagaaccttctagcacacatatgggccctggccgatacgaggcaaacggggaagttaagcaaagaccaattcgcgttagctatgtatttcattcagcagaaggtcagtaaaggcatcgaccctcctcaagtcctctcgccggacatggtcccgccttcggagagaggcacgcccggcccggacagttcaggctctctcggctccggggagtttactggcgtgaaggagcttgatgacatcagtcaagagattgcccagttacaaagagagaaatattcactggaacaagacattcgagaaaaggaagaggcaatcagacagaaaaccagcgaggtgcaggaattacaaaatgacctagaccgggaaacaagcagtttgcaggagctcgaggctcagaaacaggatgctcaagaccgcctggacgagatggaccagcagaaggccaagctccgagacatgctgagcgacgtccggcagaagtgccaggatgagactcagatgatctcatcactgaaaacgcaaatccaatctcaggaatctgacttaaagtcccaggaagacgatctgaaccgagccaagtcggagctgaaccgattgcagcaggaggaaacccagctggagcagagcattcaggctgggcgagtccagctggaaaccatcatcaagtccctgaagtcaacgcaagacgaaatcaaccaggcaaggagcaaactttcccagctgcatgaaagccgccaggaggcccacaggagcctggagcagtatgaccaggtgctcgatggagcccatggtgccagcctgaccgacctggccaacctgagcgaaggcgtctccctggcagagaggggcagttttggagccatggatgatcctttcaaaaataaagccttgttatttagcaacaacacgcaagagttgcatccggatcctttccagacagaagaccccttcaaatctgacccatttaaaggagctgaccccttcaaaggcgacccgttccagaatgacccctttgcagaacagcagacaacttcaacagatccatttggaggggaccctttcaaagaaagtgacccattccgtggctctgccactgacgacttcttcaagaaacagacaaagaatgacccatttacctcggatccattcacgaaaaacccttccttaccttcgaagctcgacccctttgaatccagtgatcccttttcatcctccagtgtctcctcaaaaggatcagatccctttggaaccttagatcccttcggaagtgggtccttcaatagtgctgaaggctttgccgacttcagccagatgtccaaggtaaaagtacacctgtaagccagcttggttccgcagactttcccgaggcccccgatccattccagccactcggggctgacagcggcgacccgttccaaagtaaaaaggggtttggggacccgtttagtggaaaagacccatttgtcccctcctctgcagctaaaccttctaaggcctctgcctcgggctttgcagacttcacctcttttggcaatgaggagcagcagctggcgtgggccaagcgggagagcgagaaggcggaacaggagaggctggcgcggctgcggcggcaggagcaggaggacctggaactggccatcgcgctcagcaaggctgacatgcctgccgcctaggcgagggccgtgtgtaggcgggacagggcacgggcgggttccagagagggggcagtgcagatgtctatatatacacacacacaccgtcgccaccgtactccaaggaccgggactcgggggcttgttcagggtgagcagactcggctgcaagacctggaaaggtcacatctcctggggaagcccttacagaggccttggccaccacttctgcaggtccgtctctccactgtgccatcccccccggggctgactgcctcccgctcttcctctggggacgaacacacagcggtcagtcgaggagaggaagcacccagggcttccccgcctcctccctactcatagctgcagacatccccgcccgccctcccacgcatcagtcagacactcccccagtggtgtatgcactcgttgtataaaatgaagtttgaatgattaatataaaatattttaatacaa

SEQ ID NO: 352821 - DNA, 3220 bp, Homo sapiens
cccggcgctcggagcccgagtccgcgggaagatggcggcgccgctcatccccctctcccagcagattcccactggaaattcgttgtatgaatcttattacaagcaggtcgatccggcatacacagggagggtgggggcgagtgaagctgcgctttttctaaagaagtctggcctctcggacattatccttgggaagatatgggacttggccgatccagaaggtaaagggttcttggacaaacagggtttctatgttgcactgagactggtggcctgtgcacagagtggccatgaagttaccttgagcaatctgaatttgagcatgccaccgcctaaatttcacgacaccagcagccctctgatggtcacaccgccctctgcagaggcccactgggctgtgagggtggaagaaaaggccaaatttgatgggatttttgaaagcctcttgcccatcaatggtttgctctctggagacaaagtcaagccagtcctcatgaactcaaagctgcctcttgatgtcctgggcagggtctgggacctcagtgacattgacaaggatgggcacttggatcgagatgagttcgctgtggccatgcacttggtgtaccgagccctggagaaggagcccgtgccctccgccctgcccccgtccctcatcccaccctccaagagaaagaagactgtgttccctggcgccgtccccgtcctgcctgccagccccccaccaaaagacagcctccgctccacgccgtcccacggcagcgtcagcagcctcaacagcacagggagcctgtcccccaagcacagcctcaagcaaacacagccaacagtgaactgggtggtgcccgtggcagacaagatgcgatttgatgagatattcctgaagaccgacctggacctggatggctacgtgagtggccaggaggtgaaggagatcttcatgcactcgggcctcacccagaaccttctagcacacatatgggccctggccgatacgaggcaaacggggaagttaagcaaagaccaattcgcgttagctatgtatttcattcagcagaaggtcagtaaaggcatcgaccctcctcaagtcctctcgccggacatggtcccgccttcggagagaggcacgcccggcccggacagttcaggctctctcggctccggggagtttactggcgtgaaggagcttgatgacatcagtcaagagattgcccagttacaaagagagaaatattcactggaacaagacattcgagaaaaggaagaggcaatcagacagaaaaccagcgaggtgcaggaattacaaaatgacctagaccgggaaacaagcagtttgcaggagctcgaggctcagaaacaggatgctcaagaccgcctggacgagatggaccagcagaaggccaagctccgagacatgctgagcgacgtccggcagaagtgccaggatgagactcagatgatctcatcactgaaaacgcaaatccaatctcaggaatctgacttaaagtcccaggaagacgatctgaaccgagccaagtcggagctgaaccgattgcagcaggaggaaacccagctggagcagagcattcaggctgggcgagtccagctggaaaccatcatcaagtccctgaagtcaacgcaagacgaaatcaaccaggcaaggagcaaactttcccagctgcatgaaagccgccaggaggcccacaggagcctggagcagtatgaccaggtgctcgatggagcccatggtgccagcctgaccgacctggccaacctgagcgaaggcgtctccctggcagagaggggcagttttggagccatggatgatcctttcaaaaataaagccttgttatttagcaacaacacgcaagagttgcatccggatcctttccagacagaagaccccttcaaatctgacccatttaaaggagctgaccccttcaaaggcgacccgttccagaatgacccctttgcagaacagcagacaacttcaacagatccatttggaggggaccctttcaaagaaagtgacccattccgtggctctgccactgacgacttcttcaagaaacagacaaagaatgacccatttacctcggatccattcacgaaaaacccttccttaccttcgaagctcgacccctttgaatccagtgatcccttttcatcctccagtgtctcctcaaaaggatcagatccctttggaaccttagatcccttcggaagtgggtccttcaatagtgctgaaggctttgccgacttcagccagatgtccaagcccccaccttctggccctttcacctcctccttgggaggggcaggattctcagatgacccctttaaaagtaaacaggacactcctgctctgcctccgaagaaacctgctcctccacggcctaaaccgcccagcggtaaaagtacacctgtaagccagcttggttccgcagactttcccgaggcccccgatccattccagccactcggggctgacagcggcgacccgttccaaagtaaaaaggggtttggggacccgtttagtggaaaagacccatttgtcccctcctctgcagctaaaccttctaaggcctctgcctcgggctttgcagacttcacctcttttggcaatgaggagcagcagctggcgtgggccaagcgggagagcgagaaggcggaacaggagaggctggcgcggctgcggcggcaggagcaggaggacctggaactggccatcgcgctcagcaaggctgacatgcctgccgcctaggcgagggccgtgtgtaggcgggacagggcacgggcgggttccagagagggggcagtgcagatgtctatatatacacacacacaccgtcgccaccgtactccaaggaccgggactcgggggcttgttcagggtgagcagactcggctgcaagacctggaaaggtcacatctcctggggaagcccttacagaggccttggccaccacttctgcaggtccgtctctccactgtgccatcccccccggggctgactgcctcccgctcttcctctggggacgaacacacagcggtcagtcgaggagaggaagcacccagggcttccccgcctcctccctactcatagctgcagacatccccgcccgccctcccacgcatcagtcagacactcccccagtggtgtatgcactcgttgtataaaatgaagtttgaatgattaatataaaatattttaatacaa

SEQ ID NO: 352822 - DNA, 3006 bp, Homo sapiens
cccggcgctcggagcccgagtccgcgggaagatggcggcgccgctcatccccctctcccagcagattcccactggaaattcgttgtatgaatcttattacaagcaggtcgatccggcatacacagggagggtgggggcgagtgaagctgcgctttttctaaagaagtctggcctctcggacattatccttgggaagatatgggacttggccgatccagaaggtaaagggttcttggacaaacagggtttctatgttgcactgagactggtggcctgtgcacagagtggccatgaagttaccttgagcaatctgaatttgagcatgccaccgcctaaatttcaaacccacccacctatgatttaattctgtgccagccacaaaggaatgtttctctctcttctcagcacgacaccagcagccctctgatggtcacaccgccctctgcagaggcccactgggctgtgagggtggaagaaaaggccaaatttgatgggatttttgaaagcctcttgcccatcaatggtttgctctctggagacaaagtcaagccagtcctcatgaactcaaagctgcctcttgatgtcctgggcagggtctgggacctcagtgacattgacaaggatgggcacttggatcgagatgagttcgctgtggccatgcacttggtgtaccgagccctggagaaggagcccgtgccctccgccctgcccccgtccctcatcccaccctccaagagaaagaagactgtgttccctggcgccgtccccgtcctgcctgccagccccccaccaaaagacagcctccgctccacgccgtcccacggcagcgtcagcagcctcaacagcacagggagcctgtcccccaagcacagcctcaagcaaacacagccaacagtgaactgggtggtgcccgtggcagacaagatgcgatttgatgagatattcctgaagaccgacctggacctggatggctacgtgagtggccaggaggtgaaggagatcttcatgcactcgggcctcacccagaaccttctagcacacatatgggccctggccgatacgaggcaaacggggaagttaagcaaagaccaattcgcgttagctatgtatttcattcagcagaaggtcagtaaaggcatcgaccctcctcaagtcctctcgccggacatggtcccgccttcggagagaggcacgcccggcccggacagttcaggctctctcggctccggggagtttactggcgtgaaggagcttgatgacatcagtcaagagattgcccagttacaaagagagaaatattcactggaacaagacattcgagaaaaggaagaggcaatcagacagaaaaccagcgaggtgcaggaattacaaaatgacctagaccgggaaacaagcagtttgcaggagctcgaggctcagaaacaggatgctcaagaccgcctggacgagatggaccagcagaaggccaagctccgagacatgctgagcgacgtccggcagaagtgccaggatgagactcagatgatctcatcactgaaaacgcaaatccaatctcaggaatctgacttaaagtcccaggaagacgatctgaaccgagccaagtcggagctgaaccgattgcagcaggaggaaacccagctggagcagagcattcaggctgggcgagtccagctggaaaccatcatcaagtccctgaagtcaacgcaagacgaaatcaaccaggcaaggagcaaactttcccagctgcatgaaagccgccaggaggcccacaggagcctggagcagtatgaccaggtgctcgatggagcccatggtgccagcctgaccgacctggccaacctgagcgaaggcgtctccctggcagagaggggcagttttggagccatggatgatcctttcaaaaataaagccttgttatttagcaacaacacgcaagagttgcatccggatcctttccagacagaagaccccttcaaatctgacccatttaaaggagctgaccccttcaaaggcgacccgttccagaatgacccctttgcagaacagcagacaacttcaacagatccatttggaggggaccctttcaaagaaagtgacccattccgtggctctgccactgacgacttcttcaagaaacagacaaagaatgacccatttacctcggatccattcacgaaaaacccttccttaccttcgaagctcgacccctttgaatccagtgatcccttttcatcctccagtgtctcctcaaaaggatcagatccctttggaaccttagatcccttcggaagtgggtccttcaatagtgctgaaggctttgccgacttcagccagatgtccaagcccccaccttctggccctttcacctcctccttgggaggggcaggattctcagatgacccctttaaaagtaaacaggacactcctgctctgcctccgaagaaacctgctcctccacggcctaaaccgcccagcggtaaaagtacacctgtaagccagcttggttccgcagactttcccgaggcccccgatccattccagccactcggggctgacagcggcgacccgttccaaagtaaaaaggggtttggggacccgtttagtggaaaagacccatttgtcccctcctctgcagctaaaccttctaaggcctctgcctcgggctttgcagacttcacctctgtaagttgagtcctccgcctccgggccaccccactcccttccgcttgcagcttccctgggatttttgtctccttttaaaggcaaacctcccagcttctttagcctcttggtacctcacactctctgtccctcgcgttatttattctacactgccacttctgtaagaaaaacagtttctcaataaaaaaaagagcggaaaaaaaaaaaaaaaaaaaatgttggggccgggccgaaattaaaccattgggggggccagaagaagcaagcaagacgcggagggggttccaaaacgggggcgggacacaagtggtggttaagcacacg

SEQ ID NO: 352823 - DNA, 2881 bp, Homo sapiens
cccggcgctcggagcccgagtccgcgggaagatggcggcgccgctcatccccctctcccagcagattcccactggaaattcgttgtatgaatcttattacaagcaggtcgatccggcatacacagggagggtgggggcgagtgaagctgcgctttttctaaagaagtctggcctctcggacattatccttgggaagatatgggacttggccgatccagaaggtaaagggttcttggacaaacagggtttctatgttgcactgagactggtggcctgtgcacagagtggccatgaagttaccttgagcaatctgaatttgagcatgccaccgcctaaatttcacgacaccagcagccctctgatggtcacaccgccctctgcagaggcccactgggctgtgagggtggaagaaaaggccaaatttgatgggatttttgaaagcctcttgcccatcaatggtttgctctctggagacaaagtcaagccagtcctcatgaactcaaagctgcctcttgatgtcctgggcagggtctgggacctcagtgacattgacaaggatgggcacttggatcgagatgagttcgctgtggccatgcacttggtgtaccgagccctggagaaggagcccgtgccctccgccctgcccccgtccctcatcccaccctccaagagaaagaagactgtgttccctggcgccgtccccgtcctgcctgccagccccccaccaaaagacagcctccgctccacgccgtcccacggcagcgtcagcagcctcaacagcacagggagcctgtcccccaagcacagcctcaagcaaacacagccaacagtgaactgggtggtgcccgtggcagacaagatgcgatttgatgagatattcctgaagaccgacctggacctggatggctacgtgagtggccaggaggtgaaggagatcttcatgcactcgggcctcacccagaaccttctagcacacatatgggccctggccgatacgaggcaaacggggaagttaagcaaagaccaattcgcgttagctatgtatttcattcagcagaaggtcagtaaaggcatcgaccctcctcaagtcctctcgccggacatggtcccgccttcggagagaggcacgcccggcccggacagttcaggctctctcggctccggggagtttactggcgtgaaggagcttgatgacatcagtcaagagattgcccagttacaaagagagaaatattcactggaacaagacattcgagaaaaggaagaggcaatcagacagaaaaccagcgaggtgcaggaattacaaaatgacctagaccgggaaacaagcagtttgcaggagctcgaggctcagaaacaggatgctcaagaccgcctggacgagatggaccagcagaaggccaagctccgagacatgctgagcgacgtccggcagaagtgccaggatgagactcagatgatctcatcactgaaaacgcaaatccaatctcaggaatctgacttaaagtcccaggaagacgatctgaaccgagccaagtcggagctgaaccgattgcagcaggaggaaacccagctggagcagagcattcaggctgggcgagtccagctggaaaccatcatcaagtccctgaagtcaacgcaagacgaaatcaaccaggcaaggagcaaactttcccagctgcatgaaagccgccaggaggcccacaggagcctggagcagtatgaccaggtgctcgatggagcccatggtgccagcctgaccgacctggccaacctgagcgaaggcgtctccctggcagagaggggcagttttggagccatggatgatcctttcaaaaataaagccttgttatttagcaacaacacgcaagagttgcatccggatcctttccagacagaagaccccttcaaatctgacccatttaaaggagctgaccccttcaaaggcgacccgttccagaatgacccctttgcagaacagcagacaacttcaacagatccatttggaggggaccctttcaaagaaagtgacccattccgtggctctgccactgacgacttcttcaagaaacagacaaagaatgacccatttacctcggatccattcacgaaaaacccttccttaccttcgaagctcgacccctttgaatccagtgatcccttttcatcctccagtgtctcctcaaaaggatcagatccctttggaaccttagatcccttcggaagtgggtccttcaatagtgctgaaggctttgccgacttcagccagatgtccaagtttggcaatgaggagcagcagctggcgtgggccaagcgggagagcgagaaggcggaacaggagaggctggcgcggctgcggcggcaggagcaggaggacctggaactggccatcgcgctcagcaaggctgacatgcctgccgcctaggcgagggccgtgtgtaggcgggacagggcacgggcgggttccagagagggggcagtgcagatgtctatatatacacacacacaccgtcgccaccgtactccaaggaccgggactcgggggcttgttcagggtgagcagactcggctgcaagacctggaaaggtcacatctcctggggaagcccttacagaggccttggccaccacttctgcaggtccgtctctccactgtgccatcccccccggggctgactgcctcccgctcttcctctggggacgaacacacagcggtcagtcgaggagaggaagcacccagggcttccccgcctcctccctactcatagctgcagacatccccgcccgccctcccacgcatcagtcagacactcccccagtggtgtatgcactcgttgtataaaatgaagtttgaatgattaatataaaatattttaatacaa

SEQ ID NO: 352824 - DNA, 3572 bp, Homo sapiens
  misc_feature (2119)..(2119): n is a, c, g, or t
  misc_feature (2125)..(2125): n is a, c, g, or t
  misc_feature (2169)..(2169): n is a, c, g, or t
  misc_feature (2669)..(2669): n is a, c, g, or t
cccggcgctcggagcccgagtccgcgggaagatggcggcgccgctcatccccctctcccagcagattcccactggaaattcgttgtatgaatcttattacaagcaggtcgatccggcatacacagggagggtgggggcgagtgaagctgcgctttttctaaagaagtctggcctctcggacattatccttgggaagatatgggacttggccgatccagaaggtaaagggttcttggacaaacagggtttctatgttgcactgagactggtggcctgtgcacagagtggccatgaagttaccttgagcaatctgaatttgagcatgccaccgcctaaatttcacgacaccagcagccctctgatggtcacaccgccctctgcagaggcccactgggctgtgagggtggaagaaaaggccaaatttgatgggatttttgaaagcctcttgcccatcaatggtttgctctctggagacaaagtcaagccagtcctcatgaactcaaagctgcctcttgatgtcctgggcagggtctgggacctcagtgacattgacaaggatgggcacttggatcgagatgagttcgctgtggccatgcacttggtgtaccgagccctggagaaggagcccgtgccctccgccctgcccccgtccctcatcccaccctccaagagaaagaagactgtgttccctggcgccgtccccgtcctgcctgccagccccccaccaaaagacagcctccgctccacgccgtcccacggcagcgtcagcagcctcaacagcacagggagcctgtcccccaagcacagcctcaagcaaacacagccaacagtgaactgggtggtgcccgtggcagacaagatgcgatttgatgagatattcctgaagaccgacctggacctggatggctacgtgagtggccaggaggtgaaggagatcttcatgcactcgggcctcacccagaaccttctagcacacatatgggccctggccgatacgaggcaaacggggaagttaagcaaagaccaattcgcgttagctatgtatttcattcagcagaaggtcagtaaaggcatcgaccctcctcaagtcctctcgccggacatggtcccgccttcggagagaggcacgcccggcccggacagttcaggctctctcggctccggggagtttactggcgtgaaggagcttgatgacatcagtcaagagattgcccagttacaaagagagaaatattcactggaacaagacattcgagaaaaggaagaggcaatcagacagaaaaccagcgaggtgcaggaattacaaaatgacctagaccgggaaacaagcagtttgcaggagctcgaggctcagaaacaggatgctcaagaccgcctggacgagatggaccagcagaaggccaagctccgagacatgctgagcgacgtccggcagaagtgccaggatgagactcagatgatctcatcactgaaaacgcaaatccaatctcaggaatctgacttaaagtcccaggaagacgatctgaaccgagccaagtcggagctgaaccgattgcagcaggaggaaacccagctggagcagagcattcaggctgggcgagtccagctggaaaccatcatcaagtccctgaagtcaacgcaagacgaaatcaaccaggcaaggagcaaactttcccagctgcatgaaagccgccaggaggcccacaggagcctggagcagtatgaccaggtgctcgatggagcccatggtgccagcctgaccgacctggccaacctgagcgaaggcgtctccctggcagagaggggcagttttggagccatggtaaaggttgaataaacgtattacagtatggggctctggtcccctggtgtgacagcagaacatcccacccgccagatctgttcatggccaacgttggttccagccaagtgcaggcggctgtctgttgtttttgctgccactttgcgcgttcacaccaggccttgcagcctggcacaggtggccatgctgaatcctggcttccagaacaaagtccaagataggcctggatcctttcagaacctgttttgaatgccctccatctctgcggaagtatttacattgggccaaccacccaanttcagngggcttctcaaacttaaccaaaattggatcagtttctgctcatngtggaaaccccacattctactaatcagggggcaggggacatctgaggggcatgtgtctatgtgtatgtgtgtttccacaaggaacaccttgaaaagcaaatgtgttgctaaagatgaggaagtaatggcaagcagcgccccagggtgttgctctttcaagtaagaattggcctctcctgaaattttggttatgtttaaaaacctctgcactttactctgacctcatgaccctggagttgtgatcaggcctggggcaggggactgtcggccccttacatttttgagagctcttgagcccctgataccaagacaggtgtgaccttttccttaggtggtcacatcccccctgttcacaccagagtctgcccctgcagcctcgaacctggggacatgtagtttcccatttcgtcttggtgctgttccgggagcggatgggccgggccgcgcatgtctggatgtttccttggtgctctgctgcctccagcagctctctccgtgcngccaccctctctcccagggctcctccctggagcccttctgctcctgggcctctgtacgtcatggattcctcttcctccctggaataagagtgagcgctcgtgctctctaaacaccacacttgcctctttatgttcaatgcttgatgtgtttcttttctcagcagccaagtcctcagtcccaaggatttatggggaagcacacgcgtcccctgggctgctgggaaggcactgctggcgagctcatctgtctcttgtgtctggcccccgctgggtgcaccgcctccctctttcctcccatactctcttttctcgtggactcgtaatgaggtggtttccatagccgcccccgggcccgtcatcatcagctttatcgtctaaatttaaacgatgagcattcatccttcatgagttacgagaagccagaactcctcgctttgctccctggctgttcttggcgtgtgtgtttccgtctcacaacccggctcctactttccccatctggcattgtcccctggcaccgcttttggcttgtcctgctcagtcttcgttcagggaacagcttcctcttaaatgtcccttttgcaggtttttagaaaccggttttcttggataaaagttggcagtgaagtggcagtttgcaagtggccagtgattcccccaactccaaagacagatttttacctttctggttatttttgttcatcttttgggcagggcaaaggttacctgagacacaattactttgggaatgtagattaagatacgttacatggaaacttgcaactggcatccgaaagaaaaactgtttttatcctgttgtacaaatacagtttttaaagcatttttctggcttgtttctatttcttaataaatacttggaagagagatttttgtttactcctg

SEQ ID NO: 352825 - DNA, 2005 bp, Homo sapiens
cccggcgctcggagcccgagtccgcgggaagatggcggcgccgctcatccccctctcccagcagattcccactggaaattcgttgtatgaatcttattacaagcaggtcgatccggcatacacagggagggtgggggcgagtgaagctgcgctttttctaaagaagtctggcctctcggacattatccttgggaagatatgggacttggccgatccagaaggtaaagggttcttggacaaacagggtttctatgttgcactgagactggtggcctgtgcacagagtggccatgaagttaccttgagcaatctgaatttgagcatgccaccgcctaaatttcacgacaccagcagccctctgatggtcacaccgccctctgcagaggcccactgggctgtgagggtggaagaaaaggccaaatttgatgggatttttgaaagcctcttgcccatcaatggtttgctctctggagacaaagtcaagccagtcctcatgaactcaaagctgcctcttgatgtcctgggcagggtctgggacctcagtgacattgacaaggatgggcacttggatcgagatgagttcgctgtggccatgcacttggtgtaccgagccctggagaaggagcccgtgccctccgccctgcccccgtccctcatcccaccctccaagagaaagaagactgtgttccctggcgccgtccccgtcctgcctgccagccccccaccaaaagacagcctccgctccacgccgtcccacggcagcgtcagcagcctcaacagcacagggagcctgtcccccaagcacagcctcaagcaaacacagccaacagtgaactgggtggtgcccgtggcagacaagatgcgatttgatgagatattcctgaagaccgacctggacctggatggctacgtgagtggccaggaggtgaaggagatcttcatgcactcgggcctcacccagaaccttctagcacacatatgggccctggccgatacgaggcaaacggggaagttaagcaaagaccaattcgcgttagctatgtatttcattcagcagaaggtcagtaaaggcatcgaccctcctcaagtcctctcgccggacatggtcccgccttcggagagaggcacgcccggcccggacagttcaggctctctcggctccggggagtttactggcgtgaaggagcttgatgacatcagtcaagagattgcccagttacaaagagagaaatattcactggaacaagacattcgagaaaaggaagaggcaatcagacagaaaaccagcgaggtgcaggaattacaaaatgacctagaccgggaaacaagcagtttgcaggagctcgaggctcagaaacaggatgctcaagaccgcctggacgagatggaccagcagaaggccaagctccgagacatgctgagcgacgtccggcagaagtgccaggatgagactcagatgatctcatcactgaaaacgcaaatccaatctcaggaatctgacttaaagtcccaggaagacgatctgaaccgagccaagtcggagctgaaccgattgcagcaggaggaaacccagctggagcagagcattcaggctgggcgagtccagctggaaaccatcatcaagtccctgaagtcaacgcaagacgaaatcaaccaggcaaggagcaaactttcccaactgcatgaaggccggtcccgcctcctggttgttgtacatctcctcctccgagccctgggcccgcccggcagtacaggatgcccaccttgcgttggaagctcagcacttgctcatccagtgtgagcagcgtccgtggtaccttgggtgaagctgagcccaggcgcaggcagctggggctcagctgcggcgccacgtgctccagaagtttccttggggacagaccccgtgggggccccggcggcagcgcgtcctccgagatggtgccacggagtgtccggtcagtccagttaggccggggatcctcaagatacagccaggcgaaatacg

SEQ ID NO: 352826 - DNA, 1926 bp, Homo sapiens
ctctcgtctgtctttctgttttgctctcctctcttctctcttctcctgtctttttctttctgctccggttccggctctcctggtcgtgtcccgtcgctccttcttctctttcctctgttccttgtctctttgtcctcctctgccctctctcgtctcctcgtctctccgcttgcgcgtgtcctgctcttccctgccgtctgctttctaggggtccttttgctcttgccttttcttgttgctcttttggccccaccttgggccttgcttcccgtctctttcctccttctttctccctctctcgttgtcctctctttccttttgtcttttcctctctctagcgtctctgtctcttttgatgctccctcttggtcgcttgtccccgctgctcctcctgatttctaatggtgctgctcctctcgtctgctaaggttctgcctttttctgtttgtctcgtggtcatggctcattctcgtctgttctctctacgaagtcggtcactggcggagccacggtatggtcacccttctttgtataggttcccctccatcttggatctcttgttgttgtctgctgttctgcaaagggctcattttggaacggctcgcctttgacaggtgtcagctcctttcccctgggtcagatctcgaagggctcttctgtctggaaaggatccggatcgcactcttgcgtgttgttctcttttatacataggctttatttttgataaggatcatccatggtctccttttctgcccctctcctgccagggtgacgccttcgctcaggttgtccaggtcggtcaggctggcaccatgggctccactcgagcacctggtcatactgctccatggctcctgtgggcctcctggcaggctttcatgcacgctgggaatagtttgctccttgcctggttgatttcgtcttgcgttgacttcaggcacttgatgatggtttccagctggactcgcccagcctgatgtcacacccccaccttctggccctttcacctcctccttgggaggggcaggattctcagatgacccctttaaaagtaaacaggacactcctgctctgcctccgaagaaacctgctcctccacggcctaaaccgcccagcggtaaaagtacacctgtaagccagcttggttccgcagactttcccgaggcccccgatccattccagccactcggggctgacagcggcgacccgttccaaagtaaaaaggggtttggggacccgtttagtggaaaagacccatttgtcccctcctctgcagctaaaccttctaaggcctctgcctcgggctttgcagacttcacctcttttggcaatgaggagcagcagctggcgtgggccaagcgggagagcgagaaggcggaacaggagaggctggcgcggctgcggcggcaggagcaggaggacctggaactggccatcgcgctcagcaaggctgacatgcctgccgcctaggcgagggccgtgtgtaggcgggacagggcacgggcgggttccagagagggggcagtgcagatgtctatatatacacacacacaccgtcgccaccgtactccaaggaccgggactcgggggcttgttcagggtgagcagactcggctgcaagacctggaaaggtcacatctcctggggaagcccttacagaggccttggccaccacttctgcaggtccgtctctccactgtgccatcccccccggggctgactgcctcccgctcttcctctggggacgaacacacagcggtcagtcgaggagaggaagcacccagggcttccccgcctcctccctactcatagctgcagacatccccgcccgccctcccacgcatcagtcagacactcccccagtggtgtatgcactcgttgtataaaatgaagtttgaatgattaatataaaatattttaatacaa

SEQ ID NO: 352827 - DNA, 235 bp, Homo sapiens
aaggtaaagggttcttggacaaacaggtatatacacatgtacacagagcaaatggaggggctgggcagagcccccaggctgggtgacctccacggctccttccacattcctccactgtcaagtattactaggcatgagcacggctgtcaaacttaacacgggaagttttcattttgaaataaaggtcttttaaacacttggagccatctttcatggctagtgtatcttttattta

SEQ ID NO: 352828 - DNA, 420 bp, Homo sapiens
gctttgcagacttcacctctgtaagttgagtcctccgcctccgggccaccccactcccttccgcttgcagcttccctgggatttttgtctccttttaaaggcaaacctcccagcttctttagcctcttggtacctcacactctctgtccctcgcgttatttattctacactgccacttctgtaagaaaaacagtttctcaataaaaaaaaaaagagccgcagtttggatgctctatcataagggcacgttttcttccagcagggaggcgggacctatctgtccttcacggtagattcattgtattatttctgacgcaccgaggctgttgtgttcactggtttttggaagccaagatgtcaaacacttccgaagtatgaaaagaagattgcgaaagttacattagggttctgctgtcccca

SEQ ID NO: 352829 - DNA, 275 bp, Homo sapiens
gctggccctgagcacggtcacagtgggtggtttcggaggcttcccctggacttctggcccaggctgccccccgttatcttggacatgcttcatttttcccatcctcacgtaaacccctgcaactcctccctaggaattacaaaatgacctagaccgggaaacaagcagtttgcaggagctcgaggctcagaaacaggatgctcaagaccgcctggacgagatggaccagcagaaggccaagctccgagacatgctgagcgacgtccggcagaagt

SEQ ID NO: 352830 - DNA, 3912 bp, Homo sapiens
  misc_feature (544)..(544): n is a, c, g, or t
  misc_feature (578)..(578): n is a, c, g, or t
  misc_feature (2521)..(2521): n is a, c, g, or t
  misc_feature (2527)..(2527): n is a, c, g, or t
  misc_feature (2571)..(2571): n is a, c, g, or t
  misc_feature (3071)..(3071): n is a, c, g, or t
cgtattaatttatttaccattagaaatggagggcttcctgtatgtggctgggcttggtggctcacacctgtaatcccagcactttgggaggccgaggcaggcggatcacttgaggccaggagttcaagaccaacccggccatcatgttgaaacaccatctctacaaaaaatacaaaaattagccgggcctggtggcgcatgcctgtgatcccagctactcgggaggtacgagtgctgaggcacgagaattgcttgaacctgggagtcggaagttgcagtgagctgagattgtgccactacactccagcctgggcgacagagcaagatttttgtctcaaaaaaagaaaaaaaaaaaaaaaagaggacttcctgtactttaagttgattttgataattatttgctcaagcactaacatctgctcacacttttgtctttctggtacaagtgggctccttggaggcaggtgagactgatctttgtctccctgcaaagacactgccccaccatgggagactcctgccacactcaggcagcagctaggangaaggacaagacccggggccagggcctccctccngaggaccttggctcccagatccgaggttgccataacgttatttccttcagggtatatgttcactttggaaaccaaggggccaagactgttctaagatcattttgtgcttttagccaagggtgatgatgggtccgtggccattttcacttggctttcggtcagagctcggtctggacattcacacaggtgtgctctcctacttactcgggctatttctttccaactaggtggaagaaaaggccaaatttgatgggatttttgaaagcctcttgcccatcaatggtttgctctctggagacaaagtcaagccagtcctcatgaactcaaagctgcctcttgatgtcctgggcagggtctgggacctcagtgacattgacaaggatgggcacttggatcgagatgagttcgctgtggccatgcacttggtgtaccgagccctggagaaggagcccgtgccctccgccctgcccccgtccctcatcccaccctccaagagaaagaagactgtgttccctggcgccgtccccgtcctgcctgccagccccccaccaaaagacagcctccgctccacgccgtcccacggcagcgtcagcagcctcaacagcacagggagcctgtcccccaagcacagcctcaagcaaacacagccaacagtgaactgggtggtgcccgtggcagacaagatgcgatttgatgagatattcctgaagaccgacctggacctggatggctacgtgagtggccaggaggtgaaggagatcttcatgcactcgggcctcacccagaaccttctagcacacatatgggccctggccgatacgaggcaaacggggaagttaagcaaagaccaattcgcgttagctatgtatttcattcagcagaaggtcagtaaaggcatcgaccctcctcaagtcctctcgccggacatggtcccgccttcggagagaggcacgcccggcccggacagttcaggctctctcggctccggggagtttactggcgtgaaggagcttgatgacatcagtcaagagattgcccagttacaaagagagaaatattcactggaacaagacattcgagaaaaggaagaggcaatcagacagaaaaccagcgaggtgcaggaattacaaaatgacctagaccgggaaacaagcagtttgcaggagctcgaggctcagaaacaggatgctcaagaccgcctggacgagatggaccagcagaaggccaagctccgagacatgctgagcgacgtccggcagaagtgccaggatgagactcagatgatctcatcactgaaaacgcaaatccaatctcaggaatctgacttaaagtcccaggaagacgatctgaaccgagccaagtcggagctgaaccgattgcagcaggaggaaacccagctggagcagagcattcaggctgggcgagtccagctggaaaccatcatcaagtccctgaagtcaacgcaagacgaaatcaaccaggcaaggagcaaactttcccagctgcatgaaagccgccaggaggcccacaggagcctggagcagtatgaccaggtgctcgatggagcccatggtgccagcctgaccgacctggccaacctgagcgaaggcgtctccctggcagagaggggcagttttggagccatggtaaaggttgaataaacgtattacagtatggggctctggtcccctggtgtgacagcagaacatcccacccgccagatctgttcatggccaacgttggttccagccaagtgcaggcggctgtctgttgtttttgctgccactttgcgcgttcacaccaggccttgcagcctggcacaggtggccatgctgaatcctggcttccagaacaaagtccaagataggcctggatcctttcagaacctgttttgaatgccctccatctctgcggaagtatttacattgggccaaccacccaanttcagngggcttctcaaacttaaccaaaattggatcagtttctgctcatngtggaaaccccacattctactaatcagggggcaggggacatctgaggggcatgtgtctatgtgtatgtgtgtttccacaaggaacaccttgaaaagcaaatgtgttgctaaagatgaggaagtaatggcaagcagcgccccagggtgttgctctttcaagtaagaattggcctctcctgaaattttggttatgtttaaaaacctctgcactttactctgacctcatgaccctggagttgtgatcaggcctggggcaggggactgtcggccccttacatttttgagagctcttgagcccctgataccaagacaggtgtgaccttttccttaggtggtcacatcccccctgttcacaccagagtctgcccctgcagcctcgaacctggggacatgtagtttcccatttcgtcttggtgctgttccgggagcggatgggccgggccgcgcatgtctggatgtttccttggtgctctgctgcctccagcagctctctccgtgcngccaccctctctcccagggctcctccctggagcccttctgctcctgggcctctgtacgtcatggattcctcttcctccctggaataagagtgagcgctcgtgctctctaaacaccacacttgcctctttatgttcaatgcttgatgtgtttcttttctcagcagccaagtcctcagtcccaaggatttatggggaagcacacgcgtcccctgggctgctgggaaggcactgctggcgagctcatctgtctcttgtgtctggcccccgctgggtgcaccgcctccctctttcctcccatactctcttttctcgtggactcgtaatgaggtggtttccatagccgcccccgggcccgtcatcatcagctttatcgtctaaatttaaacgatgagcattcatccttcatgagttacgagaagccagaactcctcgctttgctccctggctgttcttggcgtgtgtgtttccgtctcacaacccggctcctactttccccatctggcattgtcccctggcaccgcttttggcttgtcctgctcagtcttcgttcagggaacagcttcctcttaaatgtcccttttgcaggtttttagaaaccggttttcttggataaaagttggcagtgaagtggcagtttgcaagtggccagtgattcccccaactccaaagacagatttttacctttctggttatttttgttcatcttttgggcagggcaaaggttacctgagacacaattactttgggaatgtagattaagatacgttacatggaaacttgcaactggcatccgaaagaaaaactgtttttatcctgttgtacaaatacagtttttaaagca

SEQ ID NO: 352831 - DNA, 2808 bp, Homo sapiens
cccggcgctcggagcccgagtccgcgggaagatggcggcgccgctcatccccctctcccagcagattcccactggaaattcgttgtatgaatcttattacaagcaggtcgatccggcatacacagggagggtgggggcgagtgaagctgcgctttttctaaagaagtctggcctctcggacattatccttgggaagatatgggacttggccgatccagaaggtaaagggttcttggacaaacagggtttctatgttgcactgagactggtggcctgtgcacagagtggccatgaagttaccttgagcaatctgaatttgagcatgccaccgcctaaatttcacgacaccagcagccctctgatggtcacaccgccctctgcagaggcccactgggctgtgagggtggaagaaaaggccaaatttgatgggatttttgaaagcctcttgcccatcaatggtttgctctctggagacaaagtcaagccagtcctcatgaactcaaagctgcctcttgatgtcctgggcagggtctgggacctcagtgacattgacaaggatgggcacttggatcgagatgagttcgctgtggccatgcacttggtgtaccgagccctggagaaggagcccgtgccctccgccctgcccccgtccctcatcccaccctccaagagaaagaagactgtgttccctggcgccgtccccgtcctgcctgccagccccccaccaaaagacagcctccgctccacgccgtcccacggcagcgtcagcagcctcaacagcacagggagcctgtcccccaagcacagcctcaagcaaacacagccaacagtgaactgggtggtgcccgtggcagacaagatgcgatttgatgagatattcctgaagaccgacctggacctggatggctacgtgagtggccaggaggtgaaggagatcttcatgcactcgggcctcacccagaaccttctagcacacatatgggccctggccgatacgaggcaaacggggaagttaagcaaagaccaattcgcgttagctatgtatttcattcagcagaaggtcagtaaaggcatcgaccctcctcaagtcctctcgccggacatggtcccgccttcggagagaggcacgcccggcccggacagttcaggctctctcggctccggggagtttactggcgtgaaggagcttgatgacatcagtcaagagattgcccagttacaaagagagaaatattcactggaacaagacattcgagaaaaggaagaggcaatcagacagaaaaccagcgaggtgcaggaattacaaaatgacctagaccgggaaacaagcagtttgcaggagctcgaggctcagaaacaggatgctcaagaccgcctggacgagatggaccagcagaaggccaagctccgagacatgctgagcgacgtccggcagaagtgccaggatgagactcagatgatctcatcactgaaaacgcaaatccaatctcaggaatctgacttaaagtcccaggaagacgatctgaaccgagccaagtcggagctgaaccgattgcagcaggaggaaacccagctggagcagagcattcaggctgggcgagtccagctggaaaccatcatcaagtccctgaagtcaacgcaagacgaaatcaaccaggcaaggagcaaactttcccagctgcatgaaagccgccaggaggcccacaggagcctggagcagtatgaccaggtgctcgatggagcccatggtgccagcctgaccgacctggccaacctgagcgaaggcgtctccctggcagagaggggcagttttggagccatggatgatcctttcaaaaataaagccttgttatttagcaacaacacgcaagagttgcatccggatcctttccagacagaagaccccttcaaatctgacccatttaaaggagctgaccccttcaaaggcgacccgttccagaatgacccctttgcagaacagcagacaacttcaacagatccatttggaggggaccctttcaaagaaagtgacccattccgtggctctgccactgacgacttcttcaagaaacagacaaagaatgacccatttacctcggatccattcacgaaaaacccttccttaccttcgaagctcgacccctttgaatccagtgatcccttttcatcctccagtgtctcctcaaaaggatcagatccctttggaaccttagatcccttcggaagtgggtccttcaatagtgctgaaggctttgccgacttcagccagatgtccaaggtaaaagtacacctgtaagccagcttggttccgcagactttcccgaggcccccgatccattccagccactcggggctgacagcggcgacccgttccaaagtaaaaaggggtttggggacccgtttagtggaaaagacccatttgtcccctcctctgcagctaaaccttctaaggcctctgcctcgggctttgcagacttcacctctgtaagttgagtcctccgcctccgggccaccccactcccttccgcttgcagcttccctgggatttttgtctccttttaaaggcaaacctcccagcttctttagcctcttggtacctcacactctctgtccctcgcgttatttattctacactgccacttctgtaagaaaaacagtttctcaataaaaaaaagagcggaaaaaaaaaaaaaaaaaaaatgttggggccgggccgaaattaaaccattgggggggccagaagaagcaagcaagacgcggagggggttccaaaacgggggcgggacacaagtggtggttaagcacacg

SEQ ID NO: 352832 - DNA, 1411 bp, Homo sapiens
cccggcgctcggagcccgagtccgcgggaagatggcggcgccgctcatccccctctcccagcagattcccactggaaattcgttgtatgaatcttattacaagcaggtcgatccggcatacacagggagggtgggggcgagtgaagctgcgctttttctaaagaagtctggcctctcggacattatccttgggaagatatgggacttggccgatccagaaggtaaagggttcttggacaaacagggtttctatgttgcactgagactggtggcctgtgcacagagtggccatgaagttaccttgagcaatctgaatttgagcatgccaccgcctaaatttcacgacaccagcagccctctgatggtcacaccgccctctgcagaggcccactgggctgtgagggtggaagaaaaggccaaatttgatgggatttttgaaagcctcttgcccatcaatggtttgctctctggagacaaagtcaagccagtcctcatgaactcaaagctgcctcttgatgtcctgggcagggtctgggacctcagtgacattgacaaggatgggcacttggatcgagatgagttcgctgtggccatgcacttggtgtaccgagccctggagaaggagcccgtgccctccgccctgcccccgtccctcatcccaccctccaagagaaagaagactgtgttccctggcgccgtccccgtcctgcctgccagccccccaccaaaagacagcctccgctccacgccgtcccacggcagcgtcagcagcctcaacagcacagggagcctgtcccccaagcacagcctcaagcaaacacagccaacagtgaactgggtggtgcccgtggcagacaagatgcgatttgatgagatattcctgaagaccgacctggacctggatggctacgtgagtggccaggaggtgaaggagatcttcatgcactcgggcctcacccagaaccttctagcacacatatgggccctggccgatacgaggcaaacggggaagttaagcaaagaccaattcgcgttagctatgtatttcattcagcagaaggtcagtaaaggcatcgaccctcctcaagtcctctcgccggacatggtcccgccttcggagagaggcacgcccggcccggacagttcaggctctctcggctccggggagtttactggcgtgaaggagcttgatgacatcagtcaagagattgcccagttacaaagagagaaatattcactggaacaagacattcgagaaaaggaagaggcaatcagacagaaaaccagcgaggtgcagctgcagacatccccgcccgccctcccacgcatcagtcagacactcccccagtggtgtatgcactcgttgtataaaatgaagtttgaatgattaatataaaatattttaatacaa

SEQ ID NO: 352833 - DNA, 589 bp, Homo sapiens
  misc_feature (1)..(1): n is a, c, g, or t
  misc_feature (37)..(37): n is a, c, g, or t
  misc_feature (54)..(54): n is a, c, g, or t
naggccccccaacctttatggccctttcacttcatcnacgggcttaaaccgccnaagcggtaaaagtacacctgtaagccagcttggttccgcagactttcccgaggcccccgatccattccagccactcggggctgacagcggcgacccgttccaaagtaaaaaggggtttggggacccgtttagtggaaaagacccatttgtcccctcctctgcagctaaaccttctaaggcctctgcctcgggctttgcagacttcacctctgtaagttgagtcctccgcctccgggccaccccactcccttccgcttgcagcttccctgggatttttgtctccttttaaaggcaaacctcccagcttctttagcctcttggtacctcacactctctgtccctcgcgttatttattctacactgccacttctgtaagaaaaacagtttctcaataaaaaaaagagcggaaaaaaaaaaaaaaaaaaaatgttggggccgggccgaaattaaaccattgggggggccagaagaagcaagcaagacgcggagggggttccaaaacgggggcgggacacaagtggtggttaagcacacg

SEQ ID NO: 352834 - DNA, 786 bp, Homo sapiens
gattgttctgaaacttcatgtaaataaaatcacacagtgcatcttctcgatggagtctgggatcgtcgaattggccaatggtctctgagattcatccacgtggttgtgtgcagcgagagtgcaccctttttctgtgctgtgctataactgatcatagaatcaacaagaaagtgttgaccagctctcccattaagggcttccaggttgattccagtttgaggcaatgatgtatgaagctgtagaaaacattcttgtctgtgtcctcaggtgtaacttggacccatttctcttgcgtgaatattgaacatcgaggagcggaattcctgggtcacagggtaggcatctgttcagatttagtagatgccagagaattatccaagtgcttgtccctttttcctctgccaccagcaatgcatgagagctggaagtggaagagcttacaggatcacttgagcccaggagttcaaggctacagtgagctataattgcaccactgaactccagcctgggcgacagaggaagaccccatctcaaaaacaaaaaaagtgactcggctagatcccgtctatttcaaagatctaagttcactgaaataatgctgcactttcctgttctgtgagatttgagaaaatagctgtaaaaccacctgggcctttaaacatgttttttagttattattttaattttgaaattattattcttttttagagacagagtctcactctgttgccctggctggagtgcagcagctcaaagctcactgcagccttgaactttattgccttt

SEQ ID NO: 352835 - DNA, 604 bp, Homo sapiens
accactacccccagctaattttttgtattttttgtagagacggggtttcaccatgttggctaggctggtctcaaactcctgagctcgtgatcctcccgcctcagcctcccaaagtgctgggattataggtgtgagccaccgcacccagccttggttctccctttcttcatctggataaggaaggctggactgcaccttctctacaggctgagttggacattcgcagatctaccctcccaacctgcattctgcctcaagcagcaacgcccaccccaggctcaggccacatggagaagccacccctagttccagtggtggatgtggcacctcggcctggccaatcagagctcccttgtcctaggttcctagtgattggttcgagatggacacgtgacccaatgagcggcctttcctgggagttctaccaggagcatcaggaaggttgagctgggtgtatgggaaccaggccggggcgaggggttccaggggggacctgagaacattgcgtggagccctggatccaactgtacctgacactagccaatttcatttcttcagtttcatggacccctaaattatgatttttgccaaaatgaaaaaaagt

SEQ ID NO: 352836 - DNA, 787 bp, Homo sapiens
tatttttagtagagacggggtttcgccatgttggccaggctggtcttgaactcctgacctcaggtgatccacccacctcagcctcccaaagtgctgggattacaggcgtgagccaccgttcctggcccactcatcccacttttaagcaggatgccccagaagctcaagccagaggtctttgagaccagagtatcacccaaacatacactccagccagctgagcaagccttgtggcctctgaccttggcctcatggatgctgcacatgttttgttgcagcccggaggaaccacccccgccctcctcagcctgatcctggaagagactcggggccccccagcctccgccaacccagaggtcagtgccgagggtagccacgagcctctctctctgctctgaactaaccaacccgcccgcttggcagccaggcaggcacctgcttgtctaaccacttggggtttctcactgggcttgtgggatgatttcggaggtggcaggtggaggggtgtctgcaggtccagaatgttccaccctgctgctcagggaccatgtcagcccatctctcccactctctctccaccaccttcctctctcttttccaggccataggccccatgctagtcccagagatttccaccccccaagacagagaagggagcccacatttcctctatcctaccacgtgccagcagcctgctttacccgtgcacagtctctcaggcagagcccggcatgggcaattacccacctatctctgggacctccccacccatctactgcctacctgc

SEQ ID NO: 352837 - DNA, 2596 bp, Homo sapiens
cgcggggcgtctggaacttaaaggggcagcgtaccttggccgtcccgttccacaacaaggtcccttctgcggtctcaaaggcttataagcaagggcgggggcagagggctaaagaagggagtttttgcggcccgagtgggtaatgcgtggaggactcccccaactcgtctctcaaggaaaagggggttcagaaagggagagagttcttccccctctcctgcctgggtgtcgctccaccagcctcctggccgtcgcgccccctcctcactgcgccacccccgggtgtgcctccttccctgcgtctcacacagcccctttcttgtccgcaaagactgaggagcggggagggcgggccctctgacaccggaacaggagccgtgcggcgtccggtttcagcagggaaggcttaggcgggcgtcccaacctccgggcttccggtgccgtttcccggttcgctcggccgcggtcgctatggaggagccggagatgcagctcaaggggaagaaagtcacggacaagttcactgagagcgtctacgtcctggccaacgagccatccgtggccctgtaccggctgcaggagcatgtgcgtcgctccctccccgagctggcccagcacaaggcagacatgcagcgttgggaggagcagagccagggagccatctacactgtggagtacgcctgcagcgccgtgaagaacctggtggacagcagcgtctacttccgcagcgtggagggtctgctcaaacaggccatcagcatccgggaccatatgaatgccagtgcccagggccacaggtagctcctgggaccgcccgcccccactgccactcccagctgcaaggaccgtctctcagctgcgctgggaaccgctgcttctcgcttattagaaaactgtctctttccttttgtcctggtgtctggtgacctcctcttgtcctgtggcatctataacctgagttcagtcacttaataccgaggtcctgcgctctgctgtgtgcctggccctgggctgggcactggggacatagcagtgaccgagacagacaggctcacaaggagacatacgacaaccagcccggaggaaccacccccgccctcctcagcctgatcctggaagagactcggggccccccagcctccgccaacccaggtgtaacttggacccatttctcttgcgtgaatattgaacatcgaggagcggaattcctgggtcacaggacaaagatcattccactcagcctgggacgatggggaggaaaaaaatccagatctcccgcatcctggaccaaaggaatcggcaggtgacgttcaccaagcggaagttcgggctgatgaagaaggcctatgagctgagcgtgctctgtgactgtgagatagccctcatcatcttcaacagcgccaaccgcctcttccagtatgccagcacggacatggaccgtgtgctgctgaagtacacagagtacagcgagccccacgagagccgcaccaacactgacatcctcgagacgctgaagcggaggggcattggcctcgatgggccagagctggagccggatgaagggcctgaggagccaggagagaagtttcggaggctggcaggcgaagggggtgatccggccttgccccgaccccggctgtatcctgcagctcctgctatgcccagcccagatgtggtatacggggccttaccgccaccaggctgtgaccccagtgggcttggggaagcactgcccgcccagagccgcccatctcccttccgaccagcagcccccaaagccgggcccccaggcctggtgcaccctctcttctcaccaagccacctcaccagcaagacaccacccccactgtacctgccgacggaagggcggaggtcagacctgcctggtggcctggctgggccccgagggggactaaacacctccagaagcctctacagtggcctgcagaacccctgctccactgcaactcccggacccccactggggagcttccccttcctccccggaggccccccagaatatggcctgggagaccctccaccgccccctggcttgttgcagccccccaccctggccccctggcagccctcgaggggtgatgggccccccgccgtgtcctcccagcccagtgggggccgaagcctgggcgaggagggtcccccaacccgcggcgcctccccgccgacccccccagtcagcatcaagtctgagcgcctctctccggcccccgggggccccggcgactttcctaagaccttcccctatcccttgctcctcgcccggtccctggcagagcctctgcggcctgggcccgccctgcgccggctgcccttggccgacggctggccccggtaggagatcacccggtggcaccagcccagagcgctcgccaggtacggcgagggcacgtggggaccccacctccctccaggcctcttcagagaagacccaacagtgacgcccccctccgcggtgggggcttggaggtgggcggctggactcaatccaccctggggggctcctttccttcttcctatttgtgtgtatatccacaaataaaacgcgcgtggcgtccgtggaccagaaaaaatgtga

SEQ ID NO: 352838 - DNA, 2317 bp, Homo sapiens
cgcggggcgtctggaacttaaaggggcagcgtaccttggccgtcccgttccacaacaaggtcccttctgcggtctcaaaggcttataagcaagggcgggggcagagggctaaagaagggagtttttgcggcccgagtgggtaatgcgtggaggactcccccaactcgtctctcaaggaaaagggggttcagaaagggagagagttcttccccctctcctgcctgggtgtcgctccaccagcctcctggccgtcgcgccccctcctcactgcgccacccccgggtgtgcctccttccctgcgtctcacacagcccctttcttgtccgcaaagactgaggagcggggagggcgggccctctgacaccggaacaggagccgtgcggcgtccggtttcagcagggaaggcttaggcgggcgtcccaacctccgggcttccggtgccgtttcccggttcgctcggccgcggtcgctatggaggagccggagatgcagctcaaggggaagaaagtcacggacaagttcactgagagcgtctacgtcctggccaacgagccatccgtggccctgtaccggctgcaggagcatgtgcgtcgctccctccccgagctggcccagcacaaggcagacatgcagcgttgggaggagcagagccagggagccatctacactgtggagtacgcctgcagcgccgtgaagaacctggtggacagcagcgtctacttccgcagcgtggagggtctgctcaaacaggccatcagcatccgggaccatatgaatgccagtgcccagggccacagcccggaggaaccacccccgccctcctcagcctgatcctggaagagactcggggccccccagcctccgccaacccaggtgtaacttggacccatttctcttgcgtgaatattgaacatcgaggagcggaattcctgggtcacaggacaaagatcattccactcagcctgggacgatggggaggaaaaaaatccagatctcccgcatcctggaccaaaggaatcggcaggtgacgttcaccaagcggaagttcgggctgatgaagaaggcctatgagctgagcgtgctctgtgactgtgagatagccctcatcatcttcaacagcgccaaccgcctcttccagtatgccagcacggacatggaccgtgtgctgctgaagtacacagagtacagcgagccccacgagagccgcaccaacactgacatcctcgagacgctgaagcggaggggcattggcctcgatgggccagagctggagccggatgaagggcctgaggagccaggagagaagtttcggaggctggcaggcgaagggggtgatccggccttgccccgaccccggctgtatcctgcagctcctgctatgcccagcccagatgtggtatacggggccttaccgccaccaggctgtgaccccagtgggcttggggaagcactgcccgcccagagccgcccatctcccttccgaccagcagcccccaaagccgggcccccaggcctggtgcaccctctcttctcaccaagccacctcaccagcaagacaccacccccactgtacctgccgacggaagggcggaggtcagacctgcctggtggcctggctgggccccgagggggactaaacacctccagaagcctctacagtggcctgcagaacccctgctccactgcaactcccggacccccactggggagcttccccttcctccccggaggccccccagaatatggcctgggagaccctccaccgccccctggcttgttgcagccccccaccctggccccctggcagccctcgaggggtgatgggccccccgccgtgtcctcccagcccagtgggggccgaagcctgggcgaggagggtcccccaacccgcggcgcctccccgccgacccccccagtcagcatcaagtctgagcgcctctctccggcccccgggggccccggcgactttcctaagaccttcccctatcccttgctcctcgcccggtccctggcagagcctctgcggcctgggcccgccctgcgccggctgcccttggccgacggctggccccggtaggagatcacccggtggcaccagcccagagcgctcgccaggtacggcgagggcacgtggggaccccacctccctccaggcctcttcagagaagacccaacagtgacgcccccctccgcggtgggggcttggaggtgggcggctggactcaatccaccctggggggctcctttccttcttcctatttgtgtgtatatccacaaataaaacgcgcgtggcgtccgtggaccagaaaaaatgtga

SEQ ID NO: 352839 - DNA, 2350 bp, Homo sapiens
gcctggctaatttttgtatttttagtagagatgggttttaccatgttggcctggctggtcttgaattcctgacctcaggtgatctgcccacctcagcctccaaagtgctaggattacaggcgtgagccaccgcacccggtctcattaatgtcctcttgagtgagccctgctgtgaccacttcctccagcctgtcatgggccaggagtgacctagctgcggagggacacgccagatgccccctttgctctggctgggctcaacacttgagcaatgaggaggctgacgctttgtctccccacacccgccccatccctaccacctgtatctagtcacggacaagttcactgagagcgtctacgtcctggccaacgagccatccgtggccctgtaccggctgcaggagcatgtgcgtcgctccctccccgagctggcccagcacaaggcagacatgcagcgttgggaggagcagagccagggagccatctacactgtggagtacgcctgcagcgccgtgaagaacctggtggacagcagcgtctacttccgcagcgtggagggtctgctcaaacaggccatcagcatccgggaccatatgaatgccagtgcccagggccacaggtagctcctgggaccgcccgcccccactgccactcccagctgcaaggaccgtctctcagctgcgctgggaaccgctgcttctcgcttattagaaaactgtctctttccttttgtcctggtgtctggtgacctcctcttgtcctgtggcatctataacctgagttcagtcacttaataccgaggtcctgcgctctgctgtgtgcctggccctgggctgggcactggggacatagcagtgaccgagacagacaggctcacaaggagacatacgacaaccagcccggaggaaccacccccgccctcctcagcctgatcctggaagagactcggggccccccagcctccgccaacccagacaaagatcattccactcagcctgggacgatggggaggaaaaaaatccagatctcccgcatcctggaccaaaggaatcggcaggtgacgttcaccaagcggaagttcgggctgatgaagaaggcctatgagctgagcgtgctctgtgactgtgagatagccctcatcatcttcaacagcgccaaccgcctcttccagtatgccagcacggacatggaccgtgtgctgctgaagtacacagagtacagcgagccccacgagagccgcaccaacactgacatcctcgagacgctgaagcggaggggcattggcctcgatgggccagagctggagccggatgaagggcctgaggagccaggagagaagtttcggaggctggcaggcgaagggggtgatccggccttgccccgaccccggctgtatcctgcagctcctgctatgcccagcccagatgtggtatacggggccttaccgccaccaggctgtgaccccagtgggcttggggaagcactgcccgcccagagccgcccatctcccttccgaccagcagcccccaaagccgggcccccaggcctggtgcaccctctcttctcaccaagccacctcaccagcaagacaccacccccactgtacctgccgacggaagggcggaggtcagacctgcctggtggcctggctgggccccgagggggactaaacacctccagaagcctctacagtggcctgcagaacccctgctccactgcaactcccggacccccactggggagcttccccttcctccccggaggccccccagaatatggcctgggagaccctccaccgccccctggcttgttgcagccccccaccctggccccctggcagccctcgaggggtgatgggccccccgccgtgtcctcccagcccagtgggggccgaagcctgggcgaggagggtcccccaacccgcggcgcctccccgccgacccccccagtcagcatcaagtctgagcgcctctctccggcccccgggggccccggcgactttcctaagaccttcccctatcccttgctcctcgcccggtccctggcagagcctctgcggcctgggcccgccctgcgccggctgcccttggccgacggctggccccggtaggagatcacccggtggcaccagcccagagcgctcgccaggtacggcgagggcacgtggggaccccacctccctccaggcctcttcagagaagacccaacagtgacgcccccctccgcggtgggggcttggaggtgggcggctggactcaatccaccctggggggctcctttccttcttcctatttgtgtgtatatccacaaataaaacgcgcgtggcgtccgtggaccagaaaaaatgtga

SEQ ID NO: 352840 - DNA, 2071 bp, Homo sapiens
cgcggggcgtctggaacttaaaggggcagcgtaccttggccgtcccgttccacaacaaggtcccttctgcggtctcaaaggcttataagcaagggcgggggcagagggctaaagaagggagtttttgcggcccgagtgggtaatgcgtggaggactcccccaactcgtctctcaaggaaaagggggttcagaaagggagagagttcttccccctctcctgcctgggtgtcgctccaccagcctcctggccgtcgcgccccctcctcactgcgccacccccgggtgtgcctccttccctgcgtctcacacagcccctttcttgtccgcaaagactgaggagcggggagggcgggccctctgacaccggaacaggagccgtgcggcgtccggtttcagcagggaaggcttaggcgggcgtcccaacctccgggcttccggtgccgtttcccggttcgctcggccgcggtcgctatggaggagccggagatgcagctcaaggggaagaaagcgccgtgaagaacctggtggacagcagcgtctacttccgcagcgtggagggtctgctcaaacaggccatcagcatccgggaccatatgaatgccagtgcccagggccacagcccggaggaaccacccccgccctcctcagcctgatcctggaagagactcggggccccccagcctccgccaacccagacaaagatcattccactcagcctgggacgatggggaggaaaaaaatccagatctcccgcatcctggaccaaaggaatcggcaggtgacgttcaccaagcggaagttcgggctgatgaagaaggcctatgagctgagcgtgctctgtgactgtgagatagccctcatcatcttcaacagcgccaaccgcctcttccagtatgccagcacggacatggaccgtgtgctgctgaagtacacagagtacagcgagccccacgagagccgcaccaacactgacatcctcgagacgctgaagcggaggggcattggcctcgatgggccagagctggagccggatgaagggcctgaggagccaggagagaagtttcggaggctggcaggcgaagggggtgatccggccttgccccgaccccggctgtatcctgcagctcctgctatgcccagcccagatgtggtatacggggccttaccgccaccaggctgtgaccccagtgggcttggggaagcactgcccgcccagagccgcccatctcccttccgaccagcagcccccaaagccgggcccccaggcctggtgcaccctctcttctcaccaagccacctcaccagcaagacaccacccccactgtacctgccgacggaagggcggaggtcagacctgcctggtggcctggctgggccccgagggggactaaacacctccagaagcctctacagtggcctgcagaacccctgctccactgcaactcccggacccccactggggagcttccccttcctccccggaggccccccagaatatggcctgggagaccctccaccgccccctggcttgttgcagccccccaccctggccccctggcagccctcgaggggtgatgggccccccgccgtgtcctcccagcccagtgggggccgaagcctgggcgaggagggtcccccaacccgcggcgcctccccgccgacccccccagtcagcatcaagtctgagcgcctctctccggcccccgggggccccggcgactttcctaagaccttcccctatcccttgctcctcgcccggtccctggcagagcctctgcggcctgggcccgccctgcgccggctgcccttggccgacggctggccccggtaggagatcacccggtggcaccagcccagagcgctcgccaggtacggcgagggcacgtggggaccccacctccctccaggcctcttcagagaagacccaacagtgacgcccccctccgcggtgggggcttggaggtgggcggctggactcaatccaccctggggggctcctttccttcttcctatttgtgtgtatatccacaaataaaacgcgcgtggcgtccgtggaccagaaaaaatgtga

SEQ ID NO: 352841 - DNA, 2079 bp, Homo sapiens
cgcggggcgtctggaacttaaaggggcagcgtaccttggccgtcccgttccacaacaagtcacggacaagttcactgagagcgtctacgtcctggccaacgagccatccgtggccctgtaccggctgcaggagcatgtgcgtcgctccctccccgagctggcccagcacaaggcagacatgcagcgttgggaggagcagagccagggagccatctacactgtggagtacgcctgcagcgccgtgaagaacctggtggacagcagcgtctacttccgcagcgtggagggtctgctcaaacaggccatcagcatccgggaccatatgaatgccagtgcccagggccacaggtagctcctgggaccgcccgcccccactgccactcccagctgcaaggaccgtctctcagctgcgctgggaaccgctgcttctcgcttattagaaaactgtctctttccttttgtcctggtgtctggtgacctcctcttgtcctgtggcatctataacctgagttcagtcacttaataccgaggtcctgcgctctgctgtgtgcctggccctgggctgggcactggggacatagcagtgaccgagacagacaggctcacaaggagacatacgacaaccagcccggaggaaccacccccgccctcctcagcctgatcctggaagagactcggggccccccagcctccgccaacccagacaaagatcattccactcagcctgggacgatggggaggaaaaaaatccagatctcccgcatcctggaccaaaggaatcggcaggtgacgttcaccaagcggaagttcgggctgatgaagaaggcctatgagctgagcgtgctctgtgactgtgagatagccctcatcatcttcaacagcgccaaccgcctcttccagtatgccagcacggacatggaccgtgtgctgctgaagtacacagagtacagcgagccccacgagagccgcaccaacactgacatcctcgagacgctgaagcggaggggcattggcctcgatgggccagagctggagccggatgaagggcctgaggagccaggagagaagtttcggaggctggcaggcgaagggggtgatccggccttgccccgaccccggctgtatcctgcagctcctgctatgcccagcccagatgtggtatacggggccttaccgccaccaggctgtgaccccagtgggcttggggaagcactgcccgcccagagccgcccatctcccttccgaccagcagcccccaaagccgggcccccaggcctggtgcaccctctcttctcaccaagccacctcaccagcaagacaccacccccactgtacctgccgacggaagggcggaggtcagacctgcctggtggcctggctgggccccgagggggactaaacacctccagaagcctctacagtggcctgcagaacccctgctccactgcaactcccggacccccactggggagcttccccttcctccccggaggccccccagaatatggcctgggagaccctccaccgccccctggcttgttgcagccccccaccctggccccctggcagccctcgaggggtgatgggccccccgccgtgtcctcccagcccagtgggggccgaagcctgggcgaggagggtcccccaacccgcggcgcctccccgccgacccccccagtcagcatcaagtctgagcgcctctctccggcccccgggggccccggcgactttcctaagaccttcccctatcccttgctcctcgcccggtccctggcagagcctctgcggcctgggcccgccctgcgccggctgcccttggccgacggctggccccggtaggagatcacccggtggcaccagcccagagcgctcgccaggtacggcgagggcacgtggggaccccacctccctccaggcctcttcagagaagacccaacagtgacgcccccctccgcggtgggggcttggaggtgggcggctggactcaatccaccctggggggctcctttccttcttcctatttgtgtgtatatccacaaataaaacgcgcgtggcgtccgtggaccagaaaaaatgtga

SEQ ID NO: 352842 - DNA, 1440 bp, Homo sapiens
cgcggggcgtctggaacttaaaggggcagcgtaccttggccgtcccgttccacaacaaggtcccttctgcggtctcaaaggcttataagcaagggcgggggcagagggctaaagaagggagtttttgcggcccgagtgggtaatgcgtggaggactcccccaactcgtctctcaaggaaaagggggttcagaaagggagagagttcttccccctctcctgcctgggtgtcgctccaccagcctcctggccgtcgcgccccctcctcactgcgccacccccgggtgtgcctccttccctgcgtctcacacagcccctttcttgtccgcaaagactgaggagcggggagggcgggccctctgacaccggaacaggagccgtgcggcgtccggtttcagcagggaaggcttaggcgggcgtcccaacctccgggcttccggtgccgtttcccggttcgctcggccgcggtcgctatggaggagccggagatgcagctcaaggggaagaaagtcacggacaagttcactgagagcgtctacgtcctggccaacgagccatccgtggccctgtaccggctgcaggagcatgtgcgtcgctccctccccgagctggcccagcacaaggcagacatgcagcgttgggaggagcagagccagggagccatctacactgtggagtacgcctgcagcgccgtgaagaacctggtggacagcagcgtctacttccgcagcgtggagggtctgctcaaacaggccatcagcatccgggaccatatgaatgccagtgcccagggccacagcccggaggaaccacccccgccctcctcagcctgatcctggaagagactcggggccccccagcctccgccaacccagagacggggtttcaccatgttggctaggctggtctcaaactcctgagctcgtgatcctcccgcctcagcctcccaaagtgctgggattataggtgtgagccaccgcacccagccttggttctccctttcttcatctggataaggaaggctggactgcaccttctctacaggctgagttggacattcgcagatctaccctcccaacctgcattctgcctcaagcagcaacgcccaccccaggctcaggccacatggagaagccacccctagttccagtggtggatgtggcacctcggcctggccaatcagagctcccttgtcctaggttcctagtgattggttcgagatggacacgtgacccaatgagcggcctttcctgggagttctaccaggagcatcaggaaggttgagctgggtgtatgggaaccaggccggggcgaggggttccaggggggacctgagaacattgcgtggagccctggatccaactgtacctgacactagccaatttcatttcttcagtttcatggacccctaaattatgatttttgccaaaatgaaaaaaagt

SEQ ID NO: 352843 - DNA, 1995 bp, Homo sapiens
cgcggggcgtctggaacttaaaggggcagcgtaccttggccgtcccgttccacaacaaggtcccttctgcggtctcaaaggcttataagcaagggcgggggcagagggctaaagaagggagtttttgcggcccgagtgggtaatgcgtggaggactcccccaactcgtctctcaaggaaaagggggttcagaaagggagagagttcttccccctctcctgcctgggtgtcgctccaccagcctcctggccgtcgcgccccctcctcactgcgccacccccgggtgtgcctccttccctgcgtctcacacagcccctttcttgtccgcaaagactgaggagcggggagggcgggccctctgacaccggaacaggagccgtgcggcgtccggtttcagcagggaaggcttaggcgggcgtcccaacctccgggcttccggtgccgtttcccggttcgctcggccgcggtcgctatggaggagccggagatgcagctcaaggggaagaaagcgccgtgaagaacctggtggacagcagcgtctacttccgcagcgtggagggtctgctcaaacaggccatcagcatccgggaccatatgaatgccagtgcccagggccacagacaaagatcattccactcagcctgggacgatggggaggaaaaaaatccagatctcccgcatcctggaccaaaggaatcggcaggtgacgttcaccaagcggaagttcgggctgatgaagaaggcctatgagctgagcgtgctctgtgactgtgagatagccctcatcatcttcaacagcgccaaccgcctcttccagtatgccagcacggacatggaccgtgtgctgctgaagtacacagagtacagcgagccccacgagagccgcaccaacactgacatcctcgagacgctgaagcggaggggcattggcctcgatgggccagagctggagccggatgaagggcctgaggagccaggagagaagtttcggaggctggcaggcgaagggggtgatccggccttgccccgaccccggctgtatcctgcagctcctgctatgcccagcccagatgtggtatacggggccttaccgccaccaggctgtgaccccagtgggcttggggaagcactgcccgcccagagccgcccatctcccttccgaccagcagcccccaaagccgggcccccaggcctggtgcaccctctcttctcaccaagccacctcaccagcaagacaccacccccactgtacctgccgacggaagggcggaggtcagacctgcctggtggcctggctgggccccgagggggactaaacacctccagaagcctctacagtggcctgcagaacccctgctccactgcaactcccggacccccactggggagcttccccttcctccccggaggccccccagaatatggcctgggagaccctccaccgccccctggcttgttgcagccccccaccctggccccctggcagccctcgaggggtgatgggccccccgccgtgtcctcccagcccagtgggggccgaagcctgggcgaggagggtcccccaacccgcggcgcctccccgccgacccccccagtcagcatcaagtctgagcgcctctctccggcccccgggggccccggcgactttcctaagaccttcccctatcccttgctcctcgcccggtccctggcagagcctctgcggcctgggcccgccctgcgccggctgcccttggccgacggctggccccggtaggagatcacccggtggcaccagcccagagcgctcgccaggtacggcgagggcacgtggggaccccacctccctccaggcctcttcagagaagacccaacagtgacgcccccctccgcggtgggggcttggaggtgggcggctggactcaatccaccctggggggctcctttccttcttcctatttgtgtgtatatccacaaataaaacgcgcgtggcgtccgtggaccagaaaaaatgtga

SEQ ID NO: 352844 - DNA, 1902 bp, Homo sapiens
gattgttctgaaacttcatgtaaataaaatcacacagtgcatcttctcgatggagtctgggatcgtcgaattggccaatggtctctgagattcatccacgtggttgtgtgcagcgagagtgcaccctttttctgtgctgtgctataactgatcatagaatcaacaagaaagtgttgaccagctctcccattaagggcttccaggttgattccagtttgaggcaatgatgtatgaagctgtagaaaacattcttgtctgtgtcctcaggtgtaacttggacccatttctcttgcgtgaatattgaacatcgaggagcggaattcctgggtcacagggtaggcatctgttcagatttagtagatgccagagaattatccaagtgcttgtccctttttcctctgccaccagcaatgcatgagagctggaagtggaagagcttacaagatcatcatcgctcactgtaaccttgaactcctgggctcacagaatcctcccgtctcaggctcccacatagccaggactacagacaaagatcattccactcagcctgggacgatggggaggaaaaaaatccagatctcccgcatcctggaccaaaggaatcggcaggtgacgttcaccaagcggaagttcgggctgatgaagaaggcctatgagctgagcgtgctctgtgactgtgagatagccctcatcatcttcaacagcgccaaccgcctcttccagtatgccagcacggacatggaccgtgtgctgctgaagtacacagagtacagcgagccccacgagagccgcaccaacactgacatcctcgagacgctgaagcggaggggcattggcctcgatgggccagagctggagccggatgaagggcctgaggagccaggagagaagtttcggaggctggcaggcgaagggggtgatccggccttgccccgaccccggctgtatcctgcagctcctgctatgcccagcccagatgtggtatacggggccttaccgccaccaggctgtgaccccagtgggcttggggaagcactgcccgcccagagccgcccatctcccttccgaccagcagcccccaaagccgggcccccaggcctggtgcaccctctcttctcaccaagccacctcaccagcaagacaccacccccactgtacctgccgacggaagggcggaggtcagacctgcctggtggcctggctgggccccgagggggactaaacacctccagaagcctctacagtggcctgcagaacccctgctccactgcaactcccggacccccactggggagcttccccttcctccccggaggccccccagaatatggcctgggagaccctccaccgccccctggcttgttgcagccccccaccctggccccctggcagccctcgaggggtgatgggccccccgccgtgtcctcccagcccagtgggggccgaagcctgggcgaggagggtcccccaacccgcggcgcctccccgccgacccccccagtcagcatcaagtctgagcgcctctctccggcccccgggggccccggcgactttcctaagaccttcccctatcccttgctcctcgcccggtccctggcagagcctctgcggcctgggcccgccctgcgccggctgcccttggccgacggctggccccggtaggagatcacccggtggcaccagcccagagcgctcgccaggtacggcgagggcacgtggggaccccacctccctccaggcctcttcagagaagacccaacagtgacgcccccctccgcggtgggggcttggaggtgggcggctggactcaatccaccctggggggctcctttccttcttcctatttgtgtgtatatccacaaataaaacgcgcgtggcgtccgtggaccagaaaaaatgtga

SEQ ID NO: 352845 - DNA, 2499 bp, Homo sapiens
cgcggggcgtctggaacttaaaggggcagcgtaccttggccgtcccgttccacaacaaggtcccttctgcggtctcaaaggcttataagcaagggcgggggcagagggctaaagaagggagtttttgcggcccgagtgggtaatgcgtggaggactcccccaactcgtctctcaaggaaaagggggttcagaaagggagagagttcttccccctctcctgcctgggtgtcgctccaccagcctcctggccgtcgcgccccctcctcactgcgccacccccgggtgtgcctccttccctgcgtctcacacagcccctttcttgtccgcaaagactgaggagcggggagggcgggccctctgacaccggaacaggagccgtgcggcgtccggtttcagcagggaaggcttaggcgggcgtcccaacctccgggcttccggtgccgtttcccggttcgctcggccgcggtcgctatggaggagccggagatgcagctcaaggggaagaaagtcacggacaagttcactgagagcgtctacgtcctggccaacgagccatccgtggccctgtaccggctgcaggagcatgtgcgtcgctccctccccgagctggcccagcacaaggcagacatgcagcgttgggaggagcagagccagggagccatctacactgtggagtacgcctgcagcgccgtgaagaacctggtggacagcagcgtctacttccgcagcgtggagggtctgctcaaacaggccatcagcatccgggaccatatgaatgccagtgcccagggccacaggtagctcctgggaccgcccgcccccactgccactcccagctgcaaggaccgtctctcagctgcgctgggaaccgctgcttctcgcttattagaaaactgtctctttccttttgtcctggtgtctggtgacctcctcttgtcctgtggcatctataacctgagttcagtcacttaataccgaggtcctgcgctctgctgtgtgcctggccctgggctgggcactggggacatagcagtgaccgagacagacaggctcacaaggagacatacgacaaccagcccggaggaaccacccccgccctcctcagcctgatcctggaagagactcggggccccccagcctccgccaacccagacaaagatcattccactcagcctgggacgatggggaggaaaaaaatccagatctcccgcatcctggaccaaaggaatcggcaggtgacgttcaccaagcggaagttcgggctgatgaagaaggcctatgagctgagcgtgctctgtgactgtgagatagccctcatcatcttcaacagcgccaaccgcctcttccagtatgccagcacggacatggaccgtgtgctgctgaagtacacagagtacagcgagccccacgagagccgcaccaacactgacatcctcgagacgctgaagcggaggggcattggcctcgatgggccagagctggagccggatgaagggcctgaggagccaggagagaagtttcggaggctggcaggcgaagggggtgatccggccttgccccgaccccggctgtatcctgcagctcctgctatgcccagcccagatgtggtatacggggccttaccgccaccaggctgtgaccccagtgggcttggggaagcactgcccgcccagagccgcccatctcccttccgaccagcagcccccaaagccgggcccccagcacctcaccagcaagacaccacccccactgtacctgccgacggaagggcggaggtcagacctgcctggtggcctggctgggccccgagggggactaaacacctccagaagcctctacagtggcctgcagaacccctgctccactgcaactcccggacccccactggggagcttccccttcctccccggaggccccccagaatatggcctgggagaccctccaccgccccctggcttgttgcagccccccaccctggccccctggcagccctcgaggggtgatgggccccccgccgtgtcctcccagcccagtgggggccgaagcctgggcgaggagggtcccccaacccgcggcgcctccccgccgacccccccagtcagcatcaagtctgagcgcctctctccggcccccgggggccccggcgactttcctaagaccttcccctatcccttgctcctcgcccggtccctggcagagcctctgcggcctgggcccgccctgcgccggctgcccttggccgacggctggccccggtaggagatcacccggtggcaccagcccagagcgctcgccaggtacggcgagggcacgtggggaccccacctccctccaggcctcttcagagaagacccaacagtgacgcccccctccgcggtgggggcttggaggtgggcggctggactcaatccaccctggggggctcctttccttcttcctatttgtgtgtatatccacaaataaaacgcgcgtggcgtccgtggaccagaaaaaatgtga

SEQ ID NO: 352846 - DNA, 1578 bp, Homo sapiens
cgcgggtccgtgcgcccagcgtcccaggcccaggccgagcagacaaagatcattccactcagcctgggacgatggggaggaaaaaaatccagatctcccgcatcctggaccaaaggaatcggcaggtgacgttcaccaagcggaagttcgggctgatgaagaaggcctatgagctgagcgtgctctgtgactgtgagatagccctcatcatcttcaacagcgccaaccgcctcttccagtatgccagcacggacatggaccgtgtgctgctgaagtacacagagtacagcgagccccacgagagccgcaccaacactgacatcctcgagacgctgaagcggaggggcattggcctcgatgggccagagctggagccggatgaagggcctgaggagccaggagagaagtttcggaggctggcaggcgaagggggtgatccggccttgccccgaccccggctgtatcctgcagctcctgctatgcccagcccagatgtggtatacggggccttaccgccaccaggctgtgaccccagtgggcttggggaagcactgcccgcccagagccgcccatctcccttccgaccagcagcccccaaagccgggcccccaggtgagcatgggacagtggggcaggggtgaggtcctgaggggctgtttgggtgcatcttggctctggcattgccaggctgcgtgcatcacctctaaacctcagacttcattagttgacatggcctgcctgtcctctctctctggggtctcctcttccccaggcctggtgcaccctctcttctcaccaagccacctcaccagcaagacaccacccccactgtacctgccgacggaagggcggaggtcagacctgcctggtggcctggctgggccccgagggggactaaacacctccagaagcctctacagtggcctgcagaacccctgctccactgcaactcccggacccccactggggagcttccccttcctccccggaggccccccagaatatggcctgggagaccctccaccgccccctggcttgttgcagccccccaccctggccccctggcagccctcgaggggtgatgggccccccgccgtgtcctcccagcccagtgggggccgaagcctgggcgaggagggtcccccaacccgcggcgcctccccgccgacccccccagtcagcatcaagtctgagcgcctctctccggcccccgggggccccggcgactttcctaagaccttcccctatcccttgctcctcgcccggtccctggcagagcctctgcggcctgggcccgccctgcgccggctgcccttggccgacggctggccccggtaggagatcacccggtggcaccagcccagagcgctcgccaggtacggcgagggcacgtggggaccccacctccctccaggcctcttcagagaagacccaacagtgacgcccccctccgcggtgggggcttggaggtgggcggctggactcaatccaccctggggggctcctttccttcttcctatttgtgtgtatatccacaaataaaacgcgcgtggcgtccgtggaccagaaaaaatgtga

SEQ ID NO: 352847 - DNA, 1290 bp, Homo sapiens
cgcgggtccgtgcgcccagcgtcccaggcccaggccgagcagcaatgcatgagagctggaagtggaagagcttacaagatcatcatcgctcactgtaaccttgaactcctgggctcacagaatcctcccgtctcaggctcccacatagccaggactacagacaaagatcattccactcagcctgggacgatggggaggaaaaaaatccagatctcccgcatcctggaccaaaggaatcggcaggtgacgttcaccaagcggaagttcgggctgatgaagaaggcctatgagctgagcgtgctctgtgactgtgagatagccctcatcatcttcaacagcgccaaccgcctcttccagtatgccagcacggacatggaccgtgtgctgctgaagtacacagagtacagcgagccccacgagagccgcaccaacactgacatcctcgagacgctgaagcggaggggcattggcctcgatgggccagagctggagccggatgaagggcctgaggagccaggagagaagtttcggaggctggcaggcgaagggggtgatccggccttgccccgaccccggctgtatcctgcagctcctgctatgcccagcccagatgtggtatacggggccttaccgccaccaggctgtgaccccagtgggcttggggaagcactgcccgcccagagccgcccatctcccttccgaccagcagcccccaaagccgggcccccagagaagcctctacagtggcctgcagaacccctgctccactgcaactcccggacccccactggggagcttccccttcctccccggaggccccccagtgggggccgaagcctgggcgaggagggtcccccaacccgcggcgcctccccgccgacccccccagtcagcatcaagtctgagcgcctctctccggcccccgggggccccggcgactttcctaagaccttcccctatcccttgctcctcgcccggtccctggcagagcctctgcggcctgggcccgccctgcgccggctgcccttggccgacggctggccccggtaggagatcacccggtggcaccagcccagagcgctcgccaggtacggcgagggcacgtggggaccccacctccctccaggcctcttcagagaagacccaacagtgacgcccccctccgcggtgggggcttggaggtgggcggctggactcaatccaccctggggggctcctttccttcttcctatttgtgtgtatatccacaaataaaacgcgcgtggcgtccgtggaccagaaaaaatgtga

SEQ ID NO: 352848 - DNA, 1262 bp, Homo sapiens
cgcggggcgtctggaacttaaaggggcagcgtaccttggccgtcccgttccacaacaaggtcccttctgcggtctcaaaggcttataagcaagggcgggggcagagggctaaagaagggagtttttgcggcccgagtgggtaatgcgtggaggactcccccaactcgtctctcaaggaaaagggggttcagaaagggagagagttcttccccctctcctgcctgggtgtcgctccaccagcctcctggccgtcgcgccccctcctcactgcgccacccccgggtgtgcctccttccctgcgtctcacacagcccctttcttgtccgcaaagactgaggagcggggagggcgggccctctgacaccggaacaggagccgtgcggcgtccggtttcagcagggaaggcttaggcgggcgtcccaacctccgggcttccggtgccgtttcccggttcgctcggccgcggtcgctatggaggagccggagatgcagctcaaggggaagaaagcgccgtgaagaacctggtggacagcagcgtctacttccgcagcgtggagggtctgctcaaacaggccatcagcatccgggaccatatgaatgccagtgcccagggccacagcccggaggaaccacccccgccctcctcagcctgatcctggaagagactcggggccccccagcctccgccaacccagagacggggtttcaccatgttggctaggctggtctcaaactcctgagctcgtgatcctcccgcctcagcctcccaaagtgctgggattataggtgtgagccaccgcacccagccttggttctccctttcttcatctggataaggaaggctggactgcaccttctctacaggctgagttggacattcgcagatctaccctcccaacctgcattctgcctcaagcagcaacgcccaccccaggctcaggccacatggagaagccacccctagttccagtggtggatgtggcacctcggcctggccaatcagagctcccttgtcctaggttcctagtgattggttcgagatggacacgtgacccaatgagcggcctttcctgggagttctaccaggagcatcaggaaggttgagctgggtgtatgggaaccaggccggggcgaggggttccaggggggacctgagaacattgcgtggagccctggatccaactgtacctgacactagccaatttcatttcttcagtttcatggacccctaaattatgatttttgccaaaatgaaaaaaagt

SEQ ID NO: 352849 - DNA, 1600 bp, Homo sapiens
  misc_feature (1340)..(1340): n is a, c, g, or t
  misc_feature (1346)..(1346): n is a, c, g, or t
cgcggggcgtctggaacttaaaggggcagcgtaccttggccgtcccgttccacaacaaggtcccttctgcggtctcaaaggcttataagcaagggcgggggcagagggctaaagaagggagtttttgcggcccgagtgggtaatgcgtggaggactcccccaactcgtctctcaaggaaaagggggttcagaaagggagagagttcttccccctctcctgcctgggtgtcgctccaccagcctcctggccgtcgcgccccctcctcactgcgccacccccgggtgtgcctccttccctgcgtctcacacagcccctttcttgtccgcaaagactgaggagcggggagggcgggccctctgacaccggaacaggagccgtgcggcgtccggtttcagcagggaaggcttaggcgggcgtcccaacctccgggcttccggtgccgtttcccggttcgctcggccgcggtcgctatggaggagccggagatgcagctcaaggggaagaaagcgccgtgaagaacctggtggacagcagcgtctacttccgcagcgtggagggtctgctcaaacaggccatcagcatccgggaccatatgaatgccagtgcccagggccacagacaaagatcattccactcagcctgggacgatggggaggaaaaaaatccagatctcccgcatcctggaccaaaggaatcggcaggtgacgttcaccaagcggaagttcgggctgatgaagaaggcctatgagctgagcgtgctctgtgactgtgagatagccctcatcatcttcaacagcgccaaccgcctcttccagtatgccagcacggacatggaccgtgtgctgctgaagtacacagagtacagcgagccccacgagagccgcaccaacactgacatcctcgagacgctgaagcggaggggcattggcctcgatgggccagagctggagccggatgaagggcctgaggagccaggagagaagtttcggaggctggcaggcgaagggggtgatccggccttgccccgaccccggctgtatcctgcagctcctgctatgcccagcccagatgtggtatacggggccttaccgccaccaggctgtgaccccagtgggcttggggaagcactgcccgcccagagccgcccatctcccttccgaccagcagcccccaaagccgggcccccaggcctggtgcaccctctcttctcaccaagccacctcaccagcaagacaccacccccactgtacctgccgacggaagggcggaggtcagacctgcctggtggcctggctgggccccgagggggactaaacacctcctccagaagctctacagnggctgnagaacccctgtcatgcattccgggacccactgtgggttcccgttctcccggaggccccaaaatgtggggagagagcaccagaggccggagttatggcacccagatgcgtgggagcccagaggaatgagccccggtggtctcccaaaggggggacaaggagaaggacacaaggcgccccgggccctgataaaacggcccaccagcgccggccaaaaaaaacactgtgggcaacaaacacagacaacgcgacacga

SEQ ID NO: 352850 - DNA, 1585 bp, Homo sapiens
cgcggggcgtctggaacttaaaggggcagcgtaccttggccgtcccgttccacaacaaggtcccttctgcggtctcaaaggcttataagcaagggcgggggcagagggctaaagaagggagtttttgcggcccgagtgggtaatgcgtggaggactcccccaactcgtctctcaaggaaaagggggttcagaaagggagagagttcttccccctctcctgcctgggtgtcgctccaccagcctcctggccgtcgcgccccctcctcactgcgccacccccgggtgtgcctccttccctgcgtctcacacagcccctttcttgtccgcaaagactgaggagcggggagggcgggccctctgacaccggaacaggagccgtgcggcgtccggtttcagcagggaaggcttaggcgggcgtcccaacctccgggcttccggtgccgtttcccggttcgctcggccgcggtcgctatggaggagccggagatgcagctcaaggggaagaaagtcacggacaagttcactgagagcgtctacgtcctggccaacgagccatccgtggccctgtaccggctgcaggagcatgtgcgtcgctccctccccgagctggcccagcacaaggcagacatgcagcgttgggaggagcagagccagggagccatctacactgtggagtacgcctgcagcgccgtgaagaacctggtggacagcagcgtctacttccgcagcgtggagggtctgctcaaacaggccatcagcatccgggaccatatgaatgccagtgcccagggccacaggtagctcctgggaccgcccgcccccactgccactcccagctgcaaggaccgtctctcagctgcgctgggaaccgctgcttctcgcttattagaaaactgtctctttccttttgtcctggtgtctggtgacctcctcttgtcctgtggcatctataacctgagttcagtcacttaataccgaggtcctgcgctctgctgtgtgcctggccctgggctgggcactggggacatagcagtgaccgagacagacaggctcacaaggagacatacgacaaccagcccggaggaaccacccccgccctcctcagcctgatcctggaagagactcggggccccccagcctccgccaacccagaggtcagtgccgagggtagccacgagcctctctctctgctctgaactaaccaacccgcccgcttggcagccaggcaggcacctgcttgtctaaccacttggggtttctcactgggcttgtgggatgatttcggaggtggcaggtggaggggtgtctgcaggtccagaatgttccaccctgctgctcagggaccatgtcagcccatctctcccactctctctccaccaccttcctctctcttttccaggccataggccccatgctagtcccagagatttccaccccccaagacagagaagggagcccacatttcctctatcctaccacgtgccagcagcctgctttacccgtgcacagtctctcaggcagagcccggcatgggcaattacccacctatctctgggacctccccacccatctactgcctacctgc

SEQ ID NO: 352851 - DNA, 1306 bp, Homo sapiens
cgcggggcgtctggaacttaaaggggcagcgtaccttggccgtcccgttccacaacaaggtcccttctgcggtctcaaaggcttataagcaagggcgggggcagagggctaaagaagggagtttttgcggcccgagtgggtaatgcgtggaggactcccccaactcgtctctcaaggaaaagggggttcagaaagggagagagttcttccccctctcctgcctgggtgtcgctccaccagcctcctggccgtcgcgccccctcctcactgcgccacccccgggtgtgcctccttccctgcgtctcacacagcccctttcttgtccgcaaagactgaggagcggggagggcgggccctctgacaccggaacaggagccgtgcggcgtccggtttcagcagggaaggcttaggcgggcgtcccaacctccgggcttccggtgccgtttcccggttcgctcggccgcggtcgctatggaggagccggagatgcagctcaaggggaagaaagtcacggacaagttcactgagagcgtctacgtcctggccaacgagccatccgtggccctgtaccggctgcaggagcatgtgcgtcgctccctccccgagctggcccagcacaaggcagacatgcagcgttgggaggagcagagccagggagccatctacactgtggagtacgcctgcagcgccgtgaagaacctggtggacagcagcgtctacttccgcagcgtggagggtctgctcaaacaggccatcagcatccgggaccatatgaatgccagtgcccagggccacagcccggaggaaccacccccgccctcctcagcctgatcctggaagagactcggggccccccagcctccgccaacccagaggtcagtgccgagggtagccacgagcctctctctctgctctgaactaaccaacccgcccgcttggcagccaggcaggcacctgcttgtctaaccacttggggtttctcactgggcttgtgggatgatttcggaggtggcaggtggaggggtgtctgcaggtccagaatgttccaccctgctgctcagggaccatgtcagcccatctctcccactctctctccaccaccttcctctctcttttccaggccataggccccatgctagtcccagagatttccaccccccaagacagagaagggagcccacatttcctctatcctaccacgtgccagcagcctgctttacccgtgcacagtctctcaggcagagcccggcatgggcaattacccacctatctctgggacctccccacccatctactgcctacctgc

SEQ ID NO: 352852 - DNA, 1116 bp, Homo sapiens
cgcggggcgtctggaacttaaaggggcagcgtaccttggccgtcccgttccacaacaaggtcccttctgcggtctcaaaggcttataagcaagggcgggggcagagggctaaagaagggagtttttgcggcccgagtgggtaatgcgtggaggactcccccaactcgtctctcaaggaaaagggggttcagaaagggagagagttcttccccctctcctgcctgggtgtcgctccaccagcctcctggccgtcgcgccccctcctcactgcgccacccccgggtgtgcctccttccctgcgtctcacacagcccctttcttgtccgcaaagactgaggagcggggagggcgggccctctgacaccggaacaggagccgtgcggcgtccggtttcagcagggaaggcttaggcgggcgtcccaacctccgggcttccggtgccgtttcccggttcgctcggccgcggtcgctatggaggagccggagatgcagctcaaggggaagaaagtcacggacaagttcactgagagcgtctacgtcctggccaacgagccatccgtggccctgtaccggctgcaggagcatgtgcgtcgctccctccccgagctggcccagcacaaggcagacatgcagcgttgggaggagcagagccagggagccatctacactgtggagtacgcctgcagcgccgtgaagaacctggtggacagcagcgtctacttccgcagcgtggagggtctgctcaaacaggccatcagcatccgggaccatatgaatgccagtgcccagggccacagcccggaggaaccacccccgccctcctcagcctgatcctggaagagactcggggccccccagcctccgccaacccaggttcctagtgattggttcgagatggacacgtgacccaatgagcggcctttcctgggagttctaccaggagcatcaggaaggttgagctgggtgtatgggaaccaggccggggcgaggggttccaggggggacctgagaacattgcgtggagccctggatccaactgtacctgacactagccaatttcatttcttcagtttcatggacccctaaattatgatttttgccaaaatgaaaaaaagt

SEQ ID NO: 352853 - DNA, 1046 bp, Homo sapiens
cgcggggcgtctggaacttaaaggggcagcgtaccttggccgtcccgttccacaacaaggtcccttctgcggtctcaaaggcttataagcaagggcgggggcagagggctaaagaagggagtttttgcggcccgagtgggtaatgcgtggaggactcccccaactcgtctctcaaggaaaagggggttcagaaagggagagagttcttccccctctcctgcctgggtgtcgctccaccagcctcctggccgtcgcgccccctcctcactgcgccacccccgggtgtgcctccttccctgcgtctcacacagcccctttcttgtccgcaaagactgaggagcggggagggcgggccctctgacaccggaacaggagccgtgcggcgtccggtttcagcagggaaggcttaggcgggcgtcccaacctccgggcttccggtgccgtttcccggttcgctcggccgcggtcgctatggaggagccggagatgcagctcaaggggaagaaagtcacggacaagttcactgagagcgtctacgtcctggccaacgagccatccgtggccctgtaccggctgcaggagcatgtgcgtcgctccctccccgagctggcccagcacaaggcagacatgcagcgttgggaggagcagagccagggagccatctacactgtggagtacgcctgcagcgccgtgaagaacctggtggacagcagcgtctacttccgcagcgtggagggtctgctcaaacaggccatcagcatccgggaccatatgaatgccagtgcccagggccacagcccggaggaaccacccccgccctcctcagcctgatcctggaagagactcggggccccccagcctccgccaacccagcccgtctctactaaaaatacaaaaaattagccaggcgtggtggcaggcgcctgtagtcccagctactggggaggctgaggcaggagaatggcgtgaacccgggaggtggagcttgcagtgagccaagatcgcgccactgcactccagcctgggcaacagagcgagactccgtc

SEQ ID NO: 352854 - DNA, 409 bp, Homo sapiens
gattcatcaaacactctgtgcagccccctcagtgccaactctacactaagtgagaggtcttggctctggacctacctgtcaaggacaggcagagccagacagaagctcccccagcctgtagggttagggcagggggaggagcaggtagggagcctggtgggaggtggagcaaaggcttcctgaaggtagagctgggcccctgaactcatcaggattttctcccttggacttggcacccccatctggcctggggtcctctgacccatcccttctctacccacagcctgcagctcctgctatgcccagcccagatgtggtatacggggccttaccgccaccaggctgtgaccccagtgggcttggggaagcactgcccgcccagagccgcccatctcccttccgaccagca

SEQ ID NO: 352855 - DNA, 991 bp, Homo sapiens
cgcggggcgtctggaacttaaaggggcagcgtaccttggccgtcccgttccacaacaagtcacggacaagttcactgagagcgtctacgtcctggccaacgagccatccgtggccctgtaccggctgcaggagcatgtgcgtcgctccctccccgagctggcccagcacaaggcagacatgcagcgttgggaggagcagagccagggagccatctacactgtggagtacgcctgcagcgccgtgaagaacctggtggacagcagcgtctacttccgcagcgtggagggtctgctcaaacaggccatcagcatccgggaccatatgaatgccagtgcccagggccacagcccggaggaaccacccccgccctcctcagcctgatcctggaagagactcggggccccccagcctccgccaacccagagacggggtttcaccatgttggctaggctggtctcaaactcctgagctcgtgatcctcccgcctcagcctcccaaagtgctgggattataggtgtgagccaccgcacccagccttggttctccctttcttcatctggataaggaaggctggactgcaccttctctacaggctgagttggacattcgcagatctaccctcccaacctgcattctgcctcaagcagcaacgcccaccccaggctcaggccacatggagaagccacccctagttccagtggtggatgtggcacctcggcctggccaatcagagctcccttgtcctaggttcctagtgattggttcgagatggacacgtgacccaatgagcggcctttcctgggagttctaccaggagcatcaggaaggttgagctgggtgtatgggaaccaggccggggcgaggggttccaggggggacctgagaacattgcgtggagccctggatccaactgtacctgacactagccaatttcatttcttcagtttcatggacccctaaattatgatttttgccaaaatgaaaaaaagt

SEQ ID NO: 352856 - DNA, 1502 bp, Homo sapiens
cgcggggcgtctggaacttaaaggggcagcgtaccttggccgtcccgttccacaacaaggtcccttctgcggtctcaaaggcttataagcaagggcgggggcagagggctaaagaagggagtttttgcggcccgagtgggtaatgcgtggaggactcccccaactcgtctctcaaggaaaagggggttcagaaagggagagagttcttccccctctcctgcctgggtgtcgctccaccagcctcctggccgtcgcgccccctcctcactgcgccacccccgggtgtgcctccttccctgcgtctcacacagcccctttcttgtccgcaaagactgaggagcggggagggcgggccctctgacaccggaacaggagccgtgcggcgtccggtttcagcagggaaggcttaggcgggcgtcccaacctccgggcttccggtgccgtttcccggttcgctcggccgcggtcgctatggaggagccggagatgcagctcaaggggaagaaagtcacggacaagttcactgagagcgtctacgtcctggccaacgagccatccgtggccctgtaccggctgcaggagcatgtgcgtcgctccctccccgagctggcccagcacaaggcagacatgcagcgttgggaggagcagagccagggagccatctacactgtggagtacgcctgcagcgccgtgaagaacctggtggacagcagcgtctacttccgcagcgtggagggtctgctcaaacaggccatcagcatccgggaccatatgaatgccagtgcccagggccacaggtagctcctgggaccgcccgcccccactgccactcccagctgcaaggaccgtctctcagctgcgctgggaaccgctgcttctcgcttattagaaaactgtctctttccttttgtcctggtgtctggtgacctcctcttgtcctgtggcatctataacctgagttcagtcacttaataccgaggtcctgcgctctgctgtgtgcctggccctgggctgggcactggggacatagcagtgaccgagacagacaggctcacaaggagacatacgacaaccaggtaaacatggcagacaagagcatgtcagatgcgctgtgaagaacactgcggggcccctcctaggaggtggcatgagttacatgcagacagagacgatccgggggcagacggagttccatgtggggcagtggtgagggcagacgctctggggctgggatccctgggagtgttcgagaagcaccgagaaggcttctgtggctggagccggccagctgggggagatggggccagggagatggcaggggcctctccctgtcccaggacccagagccaagggaggctttaagcccaggaccaggggtctgaaaacgaaaagcactcacagtccttgaacattggaaagagaatttttgaagagtagcccttctttttgtttttgttggcattctaagttaataaacacgcttatgaacacaaaaaaaaaag

SEQ ID NO: 352857 - DNA, 2137 bp, Homo sapiens
cgcggggcgtctggaacttaaaggggcagcgtaccttggccgtcccgttccacaacaaggtcccttctgcggtctcaaaggcttataagcaagggcgggggcagagggctaaagaagggagtttttgcggcccgagtgggtaatgcgtggaggactcccccaactcgtctctcaaggaaaagggggttcagaaagggagagagttcttccccctctcctgcctgggtgtcgctccaccagcctcctggccgtcgcgccccctcctcactgcgccacccccgggtgtgcctccttccctgcgtctcacacagcccctttcttgtccgcaaagactgaggagcggggagggcgggccctctgacaccggaacaggagccgtgcggcgtccggtttcagcagggaaggcttaggcgggcgtcccaacctccgggcttccggtgccgtttcccggttcgctcggccgcggtcgctatggaggagccggagatgcagctcaaggggaagaaagtcacggacaagttcactgagagcgtctacgtcctggccaacgagccatccgtggccctgtaccggctgcaggagcatgtgcgtcgctccctccccgagctggcccagcacaaggcagacatgcagcgttgggaggagcagagccagggagccatctacactgtggagtacgcctgcagcgccgtgaagaacctggtggacagcagcgtctacttccgcagcgtggagggtctgctcaaacaggccatcagcatccgggaccatatgaatgccagtgcccagggccacagcccggaggaaccacccccgccctcctcagcctgatcctggaagagactcggggccccccagcctccgccaacccagacaaagatcattccactcagcctgggacgatggggaggaaaaaaatccagatctcccgcatcctggaccaaaggaatcggcaggtgacgttcaccaagcggaagttcgggctgatgaagaaggcctatgagctgagcgtgctctgtgactgtgagatagccctcatcatcttcaacagcgccaaccgcctcttccagtatgccagcacggacatggaccgtgtgctgctgaagtacacagagtacagcgagccccacgagagccgcaccaacactgacatcctcgagacgctgaagcggaggggcattggcctcgatgggccagagctggagccggatgaagggcctgaggagccaggagagaagtttcggaggctggcaggcgaagggggtgatccggccttgccccgaccccggctgtatcctgcagctcctgctatgcccagcccagatgtggtatacggggccttaccgccaccaggctgtgaccccagtgggcttggggaagcactgcccgcccagagccgcccatctcccttccgaccagcagcccccaaagccgggcccccaggcctggtgcaccctctcttctcaccaagccacctcaccagcaagacaccacccccactgtacctgccgacggaagggcggaggtcagacctgcctggtggcctggctgggccccgagggggactaaacacctccagaagcctctacagtggcctgcagaacccctgctccactgcaactcccggacccccactggggagcttccccttcctccccggaggccccccagtgggggccgaagcctgggcgaggagggtcccccaacccgcggcgcctccccgccgacccccccagtcagcatcaagtctgagcgcctctctccggcccccgggggccccggcgactttcctaagaccttcccctatcccttgctcctcgcccggtccctggcagagcctctgcggcctgggcccgccctgcgccggctgcccttggccgacggctggccccggtaggagatcacccggtggcaccagcccagagcgctcgccaggtacggcgagggcacgtggggaccccacctccctccaggcctcttcagagaagacccaacagtgacgcccccctccgcggtgggggcttggaggtgggcggctggactcaatccaccctggggggctcctttccttcttcctatttgtgtgtatatccacaaataaaacgcgcgtggcgtccgtggaccagaaaaaatgtga

SEQ ID NO: 352858 - DNA, 2528 bp, Homo sapiens
cgcggggcgtctggaacttaaaggggcagcgtaccttggccgtcccgttccacaacaaggtcccttctgcggtctcaaaggcttataagcaagggcgggggcagagggctaaagaagggagtttttgcggcccgagtgggtaatgcgtggaggactcccccaactcgtctctcaaggaaaagggggttcagaaagggagagagttcttccccctctcctgcctgggtgtcgctccaccagcctcctggccgtcgcgccccctcctcactgcgccacccccgggtgtgcctccttccctgcgtctcacacagcccctttcttgtccgcaaagactgaggagcggggagggcgggccctctgacaccggaacaggagccgtgcggcgtccggtttcagcagggaaggcttaggcgggcgtcccaacctccgggcttccggtgccgtttcccggttcgctcggccgcggtcgctatggaggagccggagatgcagctcaaggggaagaaagtcacggacaagttcactgagagcgtctacgtcctggccaacgagccatccgtggccctgtaccggctgcaggagcatgtgcgtcgctccctccccgagctggcccagcacaaggcagacatgcagcgttgggaggagcagagccagggagccatctacactgtggagtacgcctgcagcgccgtgaagaacctggtggacagcagcgtctacttccgcagcgtggagggtctgctcaaacaggccatcagcatccgggaccatatgaatgccagtgcccagggccacaggtagctcctgggaccgcccgcccccactgccactcccagctgcaaggaccgtctctcagctgcgctgggaaccgctgcttctcgcttattagaaaactgtctctttccttttgtcctggtgtctggtgacctcctcttgtcctgtggcatctataacctgagttcagtcacttaataccgaggtcctgcgctctgctgtgtgcctggccctgggctgggcactggggacatagcagtgaccgagacagacaggctcacaaggagacatacgacaaccagcccggaggaaccacccccgccctcctcagcctgatcctggaagagactcggggccccccagcctccgccaacccagacaaagatcattccactcagcctgggacgatggggaggaaaaaaatccagatctcccgcatcctggaccaaaggaatcggcaggtgacgttcaccaagcggaagttcgggctgatgaagaaggcctatgagctgagcgtgctctgtgactgtgagatagccctcatcatcttcaacagcgccaaccgcctcttccagtatgccagcacggacatggaccgtgtgctgctgaagtacacagagtacagcgagccccacgagagccgcaccaacactgacatcctcgagacgctgaagcggaggggcattggcctcgatgggccagagctggagccggatgaagggcctgaggagccaggagagaagtttcggaggctggcaggcgaagggggtgatccggccttgccccgaccccggctgtatcctgcagctcctgctatgcccagcccagatgtggtatacggggccttaccgccaccaggctgtgaccccagtgggcttggggaagcactgcccgcccagagccgcccatctcccttccgaccagcagcccccaaagccgggcccccaggcctggtgcaccctctcttctcaccaagccacctcaccagcaagacaccacccccactgtacctgccgacggaagggcggaggtcagacctgcctggtggcctggctgggccccgagggggactaaacacctccagaagcctctacagtggcctgcagaacccctgctccactgcaactcccggacccccactggggagcttccccttcctccccggaggccccccagaatatggcctgggagaccctccaccgccccctggcttgttgcagccccccaccctggccccctggcagccctcgaggggtgatgggccccccgccgtgtcctcccagcccagtgggggccgaagcctgggcgaggagggtcccccaacccgcggcgcctccccgccgacccccccagtcagcatcaagtctgagcgcctctctccggcccccgggggccccggcgactttcctaagaccttcccctatcccttgctcctcgcccggtccctggcagagcctctgcggcctgggcccgccctgcgccggctgcccttggccgacggctggccccggtaggagatcacccggtggcaccagcccagagcgctcgccaggtacggcgagggcacgtggggaccccacctccctccaggcctcttcagagaagacccaacagtgacgcccccctccgcggtgggggcttggaggtgggcggctggactcaatccaccctggggggctcctttccttcttcctatttgtgtgtatatccacaaataaaacgcgcgtggcgtccgtggaccagaaaaaatgtga

SEQ ID NO: 352859 - DNA, 1418 bp, Homo sapiens
cgcgggtccgtgcgcccagcgtcccaggcccaggccgagcagacaaagatcattccactcagcctgggacgatggggaggaaaaaaatccagatctcccgcatcctggaccaaaggaatcggcaggtgacgttcaccaagcggaagttcgggctgatgaagaaggcctatgagctgagcgtgctctgtgactgtgagatagccctcatcatcttcaacagcgccaaccgcctcttccagtatgccagcacggacatggaccgtgtgctgctgaagtacacagagtacagcgagccccacgagagccgcaccaacactgacatcctcgagacgctgaagcggaggggcattggcctcgatgggccagagctggagccggatgaagggcctgaggagccaggagagaagtttcggaggctggcaggcgaagggggtgatccggccttgccccgaccccggctgtatcctgcagctcctgctatgcccagcccagatgtggtatacggggccttaccgccaccaggctgtgaccccagtgggcttggggaagcactgcccgcccagagccgcccatctcccttccgaccagcagcccccaaagccgggcccccaggcctggtgcaccctctcttctcaccaagccacctcaccagcaagacaccacccccactgtacctgccgacggaagggcggaggtcagacctgcctggtggcctggctgggccccgagggggactaaacacctccagaagcctctacagtggcctgcagaacccctgctccactgcaactcccggacccccactggggagcttccccttcctccccggaggccccccagaatatggcctgggagaccctccaccgccccctggcttgttgcagccccccaccctggccccctggcagccctcgaggggtgatgggccccccgccgtgtcctcccagcccagtgggggccgaagcctgggcgaggagggtcccccaacccgcggcgcctccccgccgacccccccagtcagcatcaagtctgagcgcctctctccggcccccgggggccccggcgactttcctaagaccttcccctatcccttgctcctcgcccggtccctggcagagcctctgcggcctgggcccgccctgcgccggctgcccttggccgacggctggccccggtaggagatcacccggtggcaccagcccagagcgctcgccaggtacggcgagggcacgtggggaccccacctccctccaggcctcttcagagaagacccaacagtgacgcccccctccgcggtgggggcttggaggtgggcggctggactcaatccaccctggggggctcctttccttcttcctatttgtgtgtatatccacaaataaaacgcgcgtggcgtccgtggaccagaaaaaatgtga

SEQ ID NO: 352860 - DNA, 1959 bp, Homo sapiens
cgcggggcgtctggaacttaaaggggcagcgtaccttggccgtcccgttccacaacaaggtcccttctgcggtctcaaaggcttataagcaagggcgggggcagagggctaaagaagggagtttttgcggcccgagtgggtaatgcgtggaggactcccccaactcgtctctcaaggaaaagggggttcagaaagggagagagttcttccccctctcctgcctgggtgtcgctccaccagcctcctggccgtcgcgccccctcctcactgcgccacccccgggtgtgcctccttccctgcgtctcacacagcccctttcttgtccgcaaagactgaggagcggggagggcgggccctctgacaccggaacaggagccgtgcggcgtccggtttcagcagggaaggcttaggcgggcgtcccaacctccgggcttccggtgccgtttcccggttcgctcggccgcggtcgctatggaggagccggagatgcagctcaaggggaagaaagcgccgtgaagaacctggtggacagcagcgtctacttccgcagcgtggagggtctgctcaaacaggccatcagcatccgggaccatatgaatgccagtgcccagggccacagcccggaggaaccacccccgccctcctcagcctgatcctggaagagactcggggccccccagcctccgccaacccagacaaagatcattccactcagcctgggacgatggggaggaaaaaaatccagatctcccgcatcctggaccaaaggaatcggcaggtgacgttcaccaagcggaagttcgggctgatgaagaaggcctatgagctgagcgtgctctgtgactgtgagatagccctcatcatcttcaacagcgccaaccgcctcttccagtatgccagcacggacatggaccgtgtgctgctgaagtacacagagtacagcgagccccacgagagccgcaccaacactgacatcctcgagacgctgaagcggaggggcattggcctcgatgggccagagctggagccggatgaagggcctgaggagccaggagagaagtttcggaggctggcaggcgaagggggtgatccggccttgccccgaccccggctgtatcctgcagctcctgctatgcccagcccagatgtggtatacggggccttaccgccaccaggctgtgaccccagtgggcttggggaagcactgcccgcccagagccgcccatctcccttccgaccagcagcccccaaagccgggcccccaggcctggtgcaccctctcttctcaccaagccacctcaccagcaagacaccacccccactgtacctgccgacggaagggcggaggtcagacctgcctggtggcctggctgggccccgagggggactaaacacctccagaagcctctacagtggcctgcagaacccctgctccactgcaactcccggacccccactggggagcttccccttcctccccggaggccccccagtgggggccgaagcctgggcgaggagggtcccccaacccgcggcgcctccccgccgacccccccagtcagcatcaagtctgagcgcctctctccggcccccgggggccccggcgactttcctaagaccttcccctatcccttgctcctcgcccggtccctggcagagcctctgcggcctgggcccgccctgcgccggctgcccttggccgacggctggccccggtaggagatcacccggtggcaccagcccagagcgctcgccaggtacggcgagggcacgtggggaccccacctccctccaggcctcttcagagaagacccaacagtgacgcccccctccgcggtgggggcttggaggtgggcggctggactcaatccaccctggggggctcctttccttcttcctatttgtgtgtatatccacaaataaaacgcgcgtggcgtccgtggaccagaaaaaatgtga

SEQ ID NO: 352861 - DNA, 2282 bp, Homo sapiens
cgcggggcgtctggaacttaaaggggcagcgtaccttggccgtcccgttccacaacaaggtcccttctgcggtctcaaaggcttataagcaagggcgggggcagagggctaaagaagggagtttttgcggcccgagtgggtaatgcgtggaggactcccccaactcgtctctcaaggaaaagggggttcagaaagggagagagttcttccccctctcctgcctgggtgtcgctccaccagcctcctggccgtcgcgccccctcctcactgcgccacccccgggtgtgcctccttccctgcgtctcacacagcccctttcttgtccgcaaagactgaggagcggggagggcgggccctctgacaccggaacaggagccgtgcggcgtccggtttcagcagggaaggcttaggcgggcgtcccaacctccgggcttccggtgccgtttcccggttcgctcggccgcggtcgctatggaggagccggagatgcagctcaaggggaagaaagtcacggacaagttcactgagagcgtctacgtcctggccaacgagccatccgtggccctgtaccggctgcaggagcatgtgcgtcgctccctccccgagctggcccagcacaaggcagacatgcagcgttgggaggagcagagccagggagccatctacactgtggagtacgcctgcagcgccgtgaagaacctggtggacagcagcgtctacttccgcagcgtggagggtctgctcaaacaggccatcagcatccgggaccatatgaatgccagtgcccagggccacaggtagctcctgggaccgcccgcccccactgccactcccagctgcaaggaccgtctctcagctgcgctgggaaccgctgcttctcgcttattagaaaactgtctctttccttttgtcctggtgtctggtgacctcctcttgtcctgtggcatctataacctgagttcagtcacttaataccgaggtcctgcgctctgctgtgtgcctggccctgggctgggcactggggacatagcagtgaccgagacagacaggctcacaaggagacatacgacaaccagcccggaggaaccacccccgccctcctcagcctgatcctggaagagactcggggccccccagcctccgccaacccagacaaagatcattccactcagcctgggacgatggggaggaaaaaaatccagatctcccgcatcctggaccaaaggaatcggcaggtgacgttcaccaagcggaagttcgggctgatgaagaaggcctatgagctgagcgtgctctgtgactgtgagatagccctcatcatcttcaacagcgccaaccgcctcttccagtatgccagcacggacatggaccgtgtgctgctgaagtacacagagtacagcgagccccacgagagccgcaccaacactgacatcctcgagacgctgaagcggaggggcattggcctcgatgggccagagctggagccggatgaagggcctgaggagccaggagagaagtttcggaggctggcaggcgaagggggtgatccggccttgccccgaccccggctgtatcctgcagctcctgctatgcccagcccagatgtggtatacggggccttaccgccaccaggctgtgaccccagtgggcttggggaagcactgcccgcccagagccgcccatctcccttccgaccagcagcccccaaagccgggcccccagagaagcctctacagtggcctgcagaacccctgctccactgcaactcccggacccccactggggagcttccccttcctccccggaggccccccagtgggggccgaagcctgggcgaggagggtcccccaacccgcggcgcctccccgccgacccccccagtcagcatcaagtctgagcgcctctctccggcccccgggggccccggcgactttcctaagaccttcccctatcccttgctcctcgcccggtccctggcagagcctctgcggcctgggcccgccctgcgccggctgcccttggccgacggctggccccggtaggagatcacccggtggcaccagcccagagcgctcgccaggtacggcgagggcacgtggggaccccacctccctccaggcctcttcagagaagacccaacagtgacgcccccctccgcggtgggggcttggaggtgggcggctggactcaatccaccctggggggctcctttccttcttcctatttgtgtgtatatccacaaataaaacgcgcgtggcgtccgtggaccagaaaaaatgtga

SEQ ID NO: 352862 - DNA, 1495 bp, Homo sapiens
cgcggggcgtctggaacttaaaggggcagcgtaccttggccgtcccgttccacaacaaggtcccttctgcggtctcaaaggcttataagcaagggcgggggcagagggctaaagaagggagtttttgcggcccgagtgggtaatgcgtggaggactcccccaactcgtctctcaaggaaaagggggttcagaaagggagagagttcttccccctctcctgcctgggtgtcgctccaccagcctcctggccgtcgcgccccctcctcactgcgccacccccgggtgtgcctccttccctgcgtctcacacagcccctttcttgtccgcaaagactgaggagcggggagggcgggccctctgacaccggaacaggagccgtgcggcgtccggtttcagcagggaaggcttaggcgggcgtcccaacctccgggcttccggtgccgtttcccggttcgctcggccgcggtcgctatggaggagccggagatgcagctcaaggggaagaaagtcacggacaagttcactgagagcgtctacgtcctggccaacgagccatccgtggccctgtaccggctgcaggagcatgtgcgtcgctccctccccgagctggcccagcacaaggcagacatgcagcgttgggaggagcagagccagggagccatctacactgtggagtacgcctgcagcgccgtgaagaacctggtggacagcagcgtctacttccgcagcgtggagggtctgctcaaacaggccatcagcatccgggaccatatgaatgccagtgcccagggccacaggtagctcctgggaccgcccgcccccactgccactcccagctgcaaggaccgtctctcagctgcgctgggaaccgctgcttctcgcttattagaaaactgtctctttccttttgtcctggtgtctggtgacctcctcttgtcctgtggcatctataacctgagttcagtcacttaataccgaggtcctgcgctctgctgtgtgcctggccctgggctgggcactggggacatagcagtgaccgagacagacaggctcacaaggagacatacgacaaccaggtaaacatggcagacaagagcatgtcagatgcgctgtgaagaacactgcggggcccctcctaggaggtggcatgagttacatgcagacagagacgatccgggggcagacggagttccatgtggggcagtggtgagggcagacgctctggggctgggatccctgggagtgttcgagaagcaccgagaaggcttctgtggctggagccggccagctgggggagatggggccagggagatggcaggggcctctccctgtccagaccaagcaggaggttaaccaggaccgggttgaaacgaagatcccgtcttgacattggcagaatttggaggcccctttggttggcgtcattaaaacctgaaaaaaaaaatcgtttggggagagaagggattcacctagaggaggcctagtataggaaagg

SEQ ID NO: 352863 - DNA, 1874 bp, Homo sapiens
cgcggggcgtctggaacttaaaggggcagcgtaccttggccgtcccgttccacaacaaggtcccttctgcggtctcaaaggcttataagcaagggcgggggcagagggctaaagaagggagtttttgcggcccgagtgggtaatgcgtggaggactcccccaactcgtctctcaaggaaaagggggttcagaaagggagagagttcttccccctctcctgcctgggtgtcgctccaccagcctcctggccgtcgcgccccctcctcactgcgccacccccgggtgtgcctccttccctgcgtctcacacagcccctttcttgtccgcaaagactgaggagcggggagggcgggccctctgacaccggaacaggagccgtgcggcgtccggtttcagcagggaaggcttaggcgggcgtcccaacctccgggcttccggtgccgtttcccggttcgctcggccgcggtcgctatggaggagccggagatgcagctcaaggggaagaaagtcacggacaagttcactgagagcgtctacgtcctggccaacgagccatccgtggccctgtaccggctgcaggagcatgtgcgtcgctccctccccgagctggcccagcacaaggcagacatgcagcgttgggaggagcagagccagggagccatctacactgtggagtacgcctgcagcgccgtgaagaacctggtggacagcagcgtctacttccgcagcgtggagggtctgctcaaacaggccatcagcatccgggaccatatgaatgccagtgcccagggccacaggtagctcctgggaccgcccgcccccactgccactcccagctgcaaggaccgtctctcagctgcgctgggaaccgctgcttctcgcttattagaaaactgtctctttccttttgtcctggtgtctggtgacctcctcttgtcctgtggcatctataacctgagttcagtcacttaataccgaggtcctgcgctctgctgtgtgcctggccctgggctgggcactggggacatagcagtgaccgagacagacaggctcacaaggagacatacgacaaccagcccggaggaaccacccccgccctcctcagcctgatcctggaagagactcggggccccccagcctccgccaacccagacaaagatcattccactcagcctgggacgatggggaggaaaaaaatccagatctcccgcatcctggaccaaaggaatcggcaggtgacgttcaccaagcggaagttcgggctgatgaagaaggcctatgagctgagcgtgctctgtgactgtgagatagccctcatcatcttcaacagcgccaaccgcctcttccagtatgccagcacggacatggaccgtgtgctgctgaagtacacagagtacagcgagccccacgagagccgcaccaacactgacatcctcgagacgctgaagcggaggggcattggcctcgatgggccagagctggagccggatgaagggcctgaggagccaggagagaacgataacgaacaggctggcacgcgccgaaccgcgggtgaaccgagccattgcccacccgaacaccacgggcacggacaacatgcaaaacaccctgacaactgcccaaggcccagactgtggaaaacgagcgcccaacccgcccaccacgcgccgaagaccacaagagagcccaacgccggaaagcactggcccagacccaaacacacgacccaagtcgacaccaattaccggaacccacaccagacaccaccacacacgcccagggaccacaacaaggggacaggaaggacaaacacagacagaccaacgaacaccacaagaccaaccccaacaacacccagcaacaacaaaacagcc

SEQ ID NO: 352864 - DNA, 1671 bp, Homo sapiens
cgcggggcgtctggaacttaaaggggcagcgtaccttggccgtcccgttccacaacaaggtcccttctgcggtctcaaaggcttataagcaagggcgggggcagagggctaaagaagggagtttttgcggcccgagtgggtaatgcgtggaggactcccccaactcgtctctcaaggaaaagggggttcagaaagggagagagttcttccccctctcctgcctgggtgtcgctccaccagcctcctggccgtcgcgccccctcctcactgcgccacccccgggtgtgcctccttccctgcgtctcacacagcccctttcttgtccgcaaagactgaggagcggggagggcgggccctctgacaccggaacaggagccgtgcggcgtccggtttcagcagggaaggcttaggcgggcgtcccaacctccgggcttccggtgccgtttcccggttcgctcggccgcggtcgctatggaggagccggagatgcagctcaaggggaagaaagtcacggacaagttcactgagagcgtctacgtcctggccaacgagccatccgtggccctgtaccggctgcaggagcatgtgcgtcgctccctccccgagctggcccagcacaaggcagacatgcagcgttgggaggagcagagccagggagccatctacactgtggagtacgcctgcagcgccgtgaagaacctggtggacagcagcgtctacttccgcagcgtggagggtctgctcaaacaggccatcagcatccgggaccatatgaatgccagtgcccagggccacaggtagctcctgggaccgcccgcccccactgccactcccagctgcaaggaccgtctctcagctgcgctgggaaccgctgcttctcgcttattagaaaactgtctctttccttttgtcctggtgtctggtgacctcctcttgtcctgtggcatctataacctgagttcagtcacttaataccgaggtcctgcgctctgctgtgtgcctggccctgggctgggcactggggacatagcagtgaccgagacagacaggctcacaaggagacatacgacaaccagcccggaggaaccacccccgccctcctcagcctgatcctggaagagactcggggccccccagcctccgccaacccaggtgtaacttggacccatttctcttgcgtgaatattgaacatcgaggagcggaattcctgggtcacagggtaggcatctgttcagatttagtagatgccagagaattatccaagtgcttgtccctttttcctctgccaccagcaatgcatgagagctggaagtggaagagcttacaggatcacttgagcccaggagttcaaggctacagtgagctataattgcaccactgaactccagcctgggcgacagaggaagaccccatctcaaaaacaaaaaaagtgactcggctagatcccgtctatttcaaagatctaagttcactgaaataatgctgcactttcctgttctgtgagatttgagaaaatagctgtaaaaccacctgggcctttaaacatgttttttagttattattttaattttgaaattattattcttttttagagacagagtctcactctgttgccctggctggagtgcagcagctcaaagctcactgcagccttgaactttattgccttt

SEQ ID NO: 352865 - DNA, 1395 bp, Homo sapiens
cgcggggcgtctggaacttaaaggggcagcgtaccttggccgtcccgttccacaacaaggtcccttctgcggtctcaaaggcttataagcaagggcgggggcagagggctaaagaagggagtttttgcggcccgagtgggtaatgcgtggaggactcccccaactcgtctctcaaggaaaagggggttcagaaagggagagagttcttccccctctcctgcctgggtgtcgctccaccagcctcctggccgtcgcgccccctcctcactgcgccacccccgggtgtgcctccttccctgcgtctcacacagcccctttcttgtccgcaaagactgaggagcggggagggcgggccctctgacaccggaacaggagccgtgcggcgtccggtttcagcagggaaggcttaggcgggcgtcccaacctccgggcttccggtgccgtttcccggttcgctcggccgcggtcgctatggaggagccggagatgcagctcaaggggaagaaagtcacggacaagttcactgagagcgtctacgtcctggccaacgagccatccgtggccctgtaccggctgcaggagcatgtgcgtcgctccctccccgagctggcccagcacaaggcagacatgcagcgttgggaggagcagagccagggagccatctacactgtggagtacgcctgcagcgccgtgaagaacctggtggacagcagcgtctacttccgcagcgtggagggtctgctcaaacaggccatcagcatccgggaccatatgaatgccagtgcccagggccacaggtagctcctgggaccgcccgcccccactgccactcccagctgcaaggaccgtctctcagctgcgctgggaaccgctgcttctcgcttattagaaaactgtctctttccttttgtcctggtgtctggtgacctcctcttgtcctgtggcatctataacctgagttcagtcacttaataccgaggtcctgcgctctgctgtgtgcctggccctgggctgggcactggggacatagcagtgaccgagacagacaggctcacaaggagacatacgacaaccagcccggaggaaccacccccgccctcctcagcctgatcctggaagagactcggggccccccagcctccgccaacccaggttcctagtgattggttcgagatggacacgtgacccaatgagcggcctttcctgggagttctaccaggagcatcaggaaggttgagctgggtgtatgggaaccaggccggggcgaggggttccaggggggacctgagaacattgcgtggagccctggatccaactgtacctgacactagccaatttcatttcttcagtttcatggacccctaaattatgatttttgccaaaatgaaaaaaagt

SEQ ID NO: 352866 - DNA, 543 bp, Homo sapiens
ggtggaggaagcagaattaaagcagaatagaataaaaggtttaaaaaaagtttcaattatctgaaattggcaggaaacagagcaggaaatgctgaatagtgatttgctttctgtttatgagcggatgtcttataatttctgtgctgtggatttcagaatagcacaatagtgtttgctggaaccaaatgtagaaatattcttttatattcaagagggtgcagagtgccttaccatgacatgatatcaatacggcagaattttatgtttgtattaatactacacatctcctttcatgtataagcctttgtcaaatacttaatacagtgctattacaatggcctctgtacaaggacctcaaagcatttttgaaagaactagcatatttagatgtccccaaaacatggaaactagaaacatttagtattttgagtataaaaaaaagaatgggacacaaaaattaatggtgcttctaggaactctatcttttcttgaaatcttttttctgaatcctttgataaaccaagaaaaagaaaccatggaaac

SEQ ID NO: 352867 - DNA, 1178 bp, Homo sapiens
atgtgttgtggcacctgtgccaggcaccagcgttctgccctccccggcacaggcgcatcaccgagtcccaggcccgcctgctgggcattttcctgccaagcagcacctgagattctgaagtcgatgcctggataggcagaaatgggccggcaggaggctcctgacagacgggtctgtgcagtgccagcgcaggcagggtgctgtggccaggtcctacacctttatggtcagggttccaagacgtcatgagacggcttgttcagccagttagttgtcggtgcccctctgaacaaggacccccccaaggaagggggtggcctcgcatgggtggctggggatcctgctccgtcccacatgtggccagcatggccgacactggcatttctcagctcgacaacaatttttctgactttggatattttctagattttgtgttgtaagaaaaaacacttggcagtcaaatactaggcagattgaaatgctgactttctcactgtttcattttgtgattgaagtgcgtgcaaaacactcaatctggtagggatgatgcccgcgcggagctgacccttctcctattgtttttccaagctggagaagaagcaggcgctccctccattccagccacagatcacagacgactacggtctggacaactttgacacacagttcaccagcgagcccgtgcagctgaccccagacgatgaggatgccataaagaggatcgaccagtcagagttcgaaggctttgagtatatcaacccattattgctgtccaccgaggagtcggtgtgaggccgcgtgcgtctctgtcgtggacacgcgtgattgaccctttaactgtatccttaaccaccgcatatgcatgccaggctgggcacggctccgagggcggccagggacagacgcttgcgccgagaccgcagagggaagcgtcagcgggcgctgctgggagcagaacagtccctcacacctgggcccgggcaggccagcttcgtgctggaggaacttgctgctgtgcctgcgtcgcggcggatccgcggggaccctgccgagggggctgtcatgcggtttccaaggtgcacattttccacggaaacagaactcgatgcactgacctgctccgccaggaaagtgagcgtgtagcgtcctgaggaataaaatgttccgatgatgtggaa

SEQ ID NO: 352868 - DNA, 962 bp, Homo sapiens
  misc_feature (780)..(780): n is a, c, g, or t
  misc_feature (782)..(782): n is a, c, g, or t
  misc_feature (788)..(789): n is a, c, g, or t
agacggacccggcctgcgttggcctggggtgacttcacggctccactgtcagcaagcacacctgggcctctgtctccagccgccgaggccgtgacaccatgaggatcataatctatctaccgccggggagccagaagatggaggaagctgtaccgtgccaacggccacctcttccaagccaagcgctttaacaggagagcgtactgcggtcagtgcagcgagaggatatggggcctcgcgaggcaaggctacaggtgcatcaactgcaaactgctggtccataagcgctgccacggcctcgtcccgctgacctgcaggaagcatatggatgcagctttgggacaggggagatgaccaagcattgtgcaaaatatcccgttgtataaagcacttggtggaaaggtcatggcctgcagtaccgagtggccacctccgtctgcagaatcataggattctgtcatgccttcccaagagcctccagtagacgacaagaacgaggacgccgaccttccttccgaggagacagatggaattgcttacatttcctcatcccggaagcatgacagcattaaagacgactcggaggaccttaagccagttatcgatgggatggatggaatcaaaatctctcaggggcttgggctgcaggactttgacctaatcagagtcatcgggcgcgggagctacgccaaggttctcctggtgcggttgaagaagaatgaccaaatttacgccatgaaagtggtgaagaaagagctggtgcatgatgacgaggatatngnctggtnncgacgagaacccggtgttgaccggctccagaaaccctctggtcggttacctctgttccagagacagcggcgtctggctgagactcacgggggccgggtcccaggggaagagacagagaacgggtgggaaggcccacctgaaggggaaaggggaaccggggccacagggggggg

SEQ ID NO: 352869 - DNA, 837 bp, Homo sapiens
ggagcatccaggggaagccagtgtgggtggggactgggaggagagagggaggctgggcctgccctggcgaggggtggtcagaacatcgctcggtgccagacaggcaggacgcagcgggctggcctgcggggctcactgctgccccccggggccgagcacgaaagggagagttggagggcgcttcctcaccgggtgttgcggtgtgagcggggactggtgagtgtgtgctgtcttcagagagagaagagcagttttcaggaatctatctaccgccggggagccagaagatggaggaagctgtaccgtgccaacggccacctcttccaagccaagcgctttaacaggagagcgtactgcggtcagtgcagcgagaggatatggggcctcgcgaggcaaggctacaggtgcatcaactgcaaactgctggtccataagcgctgccacggcctcgtcccgctgacctgcaggaagcatatggattctgtcatgccttcccaagagcctccagtagacgacaagaacgaggactttgacctaatcagagtcatcgggcgcgggagctacgccaaggttctcctggtgcggttgaagaagaatgaccaaaatttacgccatgaaaagtggtgaagaaaagagctggtgcatgatgacgaggatattgactgggtacagacagagaagcacgtgtttgagcaggcatccagcaaccccttcctggtcggattacactcctgcttccagacgacaagtcggttgttcctggtcattgagtacgtcaacggcggggacttgatgtcagaaaatccagtctgtgccgcaccgacctctatttgggta

SEQ ID NO: 352870 - DNA, 664 bp, Homo sapiens
atgtgttgtggcacctgtgccaggcaccagcgttctgccctccccggcacaggcgcatcaccgagtcccaggcccgcctgctgggcattttcctgccaagcagcacctgagattctgaagtcgatgcctggataggcagaaatgggccggcaggaggctcctgacagacgggtctgtgcagtgccagcgcaggcagggtgctgtggccaggtcctacacctttatggtcagggttccaagacgtcatgagacggcttgttcagccagttagttgtcggtgcccctctgaacaaggacccccccaaggaagggggtggcctcgcatgggtggctggggatcctgctccgtcccacatgtggccagcatggccgacactggcatttctcagctcgacaacaatttttctgactttggatattttctagattttgtgttgtaagaaaaaacacttggcagtcaaatactaggcagattgaaatgctgactttctcactgtttcattttgtgattgaagtgcgtgcaaaacactcaatctggtagggatgatgcccgcgcggagctgacccttctcctattgtttttccaagctggagaagaagcaggcgctccctccattccagccacagatccgccccgggtcaatccgtactactgttaaaactg

SEQ ID NO: 352871 - DNA, 693 bp, Homo sapiens
acgtcctctggaaagtctgtgagcctgtctctggggtagtcacggaaatctagatgtgaaatagacatggtccggggtgttgctaactaatcttcacgggtgtggatgtctagaaggaagtccttattcttgggtcttacttcaggcatgtccttgatgaatacctgcaggcagctgtccccgcaggtggtctggggaccacaccctgcgggggaagccgtgccccacatcctctccattcaggtggtacagtggcccaggggctggcttttgagctgcaatttttatcaagttgtgtctgcaccatgccttccgaattgtgttgcctcatttggccatcctggcaaaccctctgaagccctttcatgtccttccccaacttgagccaagaggctcaactgagcctcacgtctgtgtccagctctgcaccataaaccctgagaagggaacagaagagcttgctgcgttctcagcctctgctcgtaaaacccagggaaggactgcactagcgaagcccactcctttccagagcaccaacaagtgtcaccctcacaactcgtgctccttcctggccatcctgtgtctggagggaggccggggcacttagaaagcagaatctgaggctgagcacggcgactcacacctccaatcccagcattttgggaggctgcgcacatcgcttgagtccaggag

SEQ ID NO: 352872 - DNA, 282 bp, Homo sapiens
ggagcatccaggggaagccagtgtgggtggggactgggaggagagagggaggctgggcctgccctggcgaggggtggtcagaacatcgctcggtgccagacaggcaggacgcagcgggctggcctgcggggctcactgctgccccccggggccgagcacgaaagggagagttggagggcgcttcctcaccgggtgttgcggtgtgagcggggactggtgagtgtgtgctgtcttcagagagagaagagcagttttcagggtgagtagcctttattcttcaca

SEQ ID NO: 352873 - DNA, 2202 bp, Homo sapiens
  misc_feature (8)..(8): n is a, c, g, or t
  misc_feature (11)..(12): n is a, c, g, or t
  misc_feature (15)..(17): n is a, c, g, or t
  misc_feature (20)..(21): n is a, c, g, or t
  misc_feature (41)..(41): n is a, c, g, or t
gtccgtgncannacnnncgnntaggtacgaggctgggtggngcagcaggaccggccccaagatggaagggagcggcggccgcgtccgcctcaaggcgcattacgggggggacatcttcatcaccagcgtggacgccgccacgaccttcgaggagctctgtgaggaagtgagagacatgtgtcgtctgcaccagcagcacccgctcaccctcaagtgggtggacagcgaaggtgacccttgcacggtgtcctcccagatggagctggaagaggctttccgcctggcccgtcagtgcagggacgaaggcctcatcattcatgttttcccgagcacccctgagcagcctggcctgccatgtccgggagaagacaaatctatctaccgccggggagccagaagatggaggaagctgtaccgtgccaacggccacctcttccaagccaagcgctttaacaggagagcgtactgcggtcagtgcagcgagaggatatggggcctcgcgaggcaaggctacaggtgcatcaactgcaaactgctggtccataagcgctgccacggcctcgtcccgctgacctgcaggaagcatatggattctgtcatgccttcccaagagcctccagtagacgacaagaacgaggacgccgaccttccttccgaggagacagatggaattgcttacatttcctcatcccggaagcatgacagcattaaagacgactcggaggaccttaagccagttatcgatgggatggatggaatcaaaatctctcaggggcttgggctgcaggactttgacctaatcagagtcatcgggcgcgggagctacgccaaggttctcctggtgcggttgaagaagaatgaccaaatttacgccatgaaagtggtgaagaaagagctggtgcatgatgacgaggatattgactgggtacagacagagaagcacgtgtttgagcaggcatccagcaaccccttcctggtcggattacactcctgcttccagacgacaagtcggttgttcctggtcattgagtacgtcaacggcggggacctgatgttccacatgcagaggcagaggaagctccctgaggagcacgccaggttctacgcggccgagatctgcatcgccctcaacttcctgcacgagagggggatcatctacagggacctgaagctggacaacgtcctcctggatgcggacgggcacatcaagctcacagactacggcatgtgcaaggaaggcctgggccctggtgacacaacgagcactttctgcggaaccccgaattacatcgcccccgaaatcctgcggggagaggagtacgggttcagcgtggactggtgggcgctgggagtcctcatgtttgagatgatggccgggcgctccccgttcgacatcatcaccgacaacccggacatgaacacagaggactaccttttccaagtgatcctggagaagcccatccggatcccccggttcctgtccgtcaaagcctcccatgttttaaaaggatttttaaataaggaccccaaagagaggctcggctgccggccacagactggattttctgacatcaagtcccacgcgttcttccgcagcatagactgggacttgctggagaagaagcaggcgctccctccattccagccacagatcacagacgactacggtctggacaactttgacacacagttcaccagcgagcccgtgcagctgaccccagacgatgaggatgccataaagaggatcgaccagtcagagttcgaaggctttgagtatatcaacccattattgctgtccaccgaggagtcggtgtgaggccgcgtgcgtctctgtcgtggacacgcgtgattgaccctttaactgtatccttaaccaccgcatatgcatgccaggctgggcacggctccgagggcggccagggacagacgcttgcgccgagaccgcagagggaagcgtcagcgggcgctgctgggagcagaacagtccctcacacctgggcccgggcaggccagcttcgtgctggaggaacttgctgctgtgcctgcgtcgcggcggatccgcggggaccctgccgagggggctgtcatgcggtttccaaggtgcacattttccacggaaacagaactcgatgcactgacctgctccgccaggaaagtgagcgtgtagcgtcctgaggaataaaatgttccgatgatgtggaa

SEQ ID NO: 352874 - DNA, 2121 bp, Homo sapiens
  misc_feature (12)..(12): n is a, c, g, or t
catgccgtgttntagtttgtgcctcagctgctggctacagcttcccgggggagccgggtaccacccgggcctggagacatgaggaggcagggatgtgaggggcgggggacaggacagccggccttccgttaaatatctgctcctcgcgctcgagcctccctgcctattgtcggggccggagggagccgacgcagcatcagctcgtcaacgggaaggaagatgcctccctgcacgcccgccgcgcacagagcataaagaatctgcgctgaggaggcaggagaagaaagccgaatctatctaccgccggggagccagaagatggaggaagctgtaccgtgccaacggccacctcttccaagccaagcgctttaacaggagagcgtactgcggtcagtgcagcgagaggatatggggcctcgcgaggcaaggctacaggtgcatcaactgcaaactgctggtccataagcgctgccacggcctcgtcccgctgacctgcaggaagcatatggattctgtcatgccttcccaagagcctccagtagacgacaagaacgaggacgccgaccttccttccgaggagacagatggaattgcttacatttcctcatcccggaagcatgacagcattaaagacgactcggaggaccttaagccagttatcgatgggatggatggaatcaaaatctctcaggggcttgggctgcaggactttgacctaatcagagtcatcgggcgcgggagctacgccaaggttctcctggtgcggttgaagaagaatgaccaaatttacgccatgaaagtggtgaagaaagagctggtgcatgatgacgaggatattgactgggtacagacagagaagcacgtgtttgagcaggcatccagcaaccccttcctggtcggattacactcctgcttccagacgacaagtcggttgttcctggtcattgagtacgtcaacggcggggacctgatgttccacatgcagaggcagaggaagctccctgaggagcacgccaggttctacgcggccgagatctgcatcgccctcaacttcctgcacgagagggggatcatctacagggacctgaagctggacaacgtcctcctggatgcggacgggcacatcaagctcacagactacggcatgtgcaaggaaggcctgggccctggtgacacaacgagcactttctgcggaaccccgaattacatcgcccccgaaatcctgcggggagaggagtacgggttcagcgtggactggtgggcgctgggagtcctcatgtttgagatgatggccgggcgctccccgttcgacatcatcaccgacaacccggacatgaacacagaggactaccttttccaagtgatcctggagaagcccatccggatcccccggttcctgtccgtcaaagcctcccatgttttaaaaggatttttaaataaggaccccaaagagaggctcggctgccggccacagactggattttctgacatcaagtcccacgcgttcttccgcagcatagactgggacttgctggagaagaagcaggcgctccctccattccagccacagatcacagacgactacggtctggacaactttgacacacagttcaccagcgagcccgtgcagctgaccccagacgatgaggatgccataaagaggatcgaccagtcagagttcgaaggctttgagtatatcaacccattattgctgtccaccgaggagtcggtgtgaggccgcgtgcgtctctgtcgtggacacgcgtgattgaccctttaactgtatccttaaccaccgcatatgcatgccaggctgggcacggctccgagggcggccagggacagacgcttgcgccgagaccgcagagggaagcgtcagcgggcgctgctgggagcagaacagtccctcacacctgggcccgggcaggccagcttcgtgctggaggaacttgctgctgtgcctgcgtcgcggcggatccgcggggaccctgccgagggggctgtcatgcggtttccaaggtgcacattttccacggaaacagaactcgatgcactgacctgctccgccaggaaagtgagcgtgtagcgtcctgaggaataaaatgttccgatgatgtggaa

SEQ ID NO: 352875 - DNA, 2063 bp, Homo sapiens
agacggacccggcctgcgttggcctggggtgacttcacggctccactgtcagcaagcacacctgggcctctgtctccagccgccgaggccgtgacaccatgaggatcataatctatctaccgccggggagccagaagatggaggaagctgtaccgtgccaacggccacctcttccaagccaagcgctttaacaggagagcgtactgcggtcagtgcagcgagaggatatggggcctcgcgaggcaaggctacaggtgcatcaactgcaaactgctggtccataagcgctgccacggcctcgtcccgctgacctgcaggaagcatatggatgcagctttgggacaggggagatgaccaagcattgtgcaaaatatcccgttgtataaagcacttggtggaaaggtcatggcctgcagtaccgagtggccacctccgtctgcagaatcataggattctgtcatgccttcccaagagcctccagtagacgacaagaacgaggacgccgaccttccttccgaggagacagatggaattgcttacatttcctcatcccggaagcatgacagcattaaagacgactcggaggaccttaagccagttatcgatgggatggatggaatcaaaatctctcaggggcttgggctgcaggactttgacctaatcagagtcatcgggcgcgggagctacgccaaggttctcctggtgcggttgaagaagaatgaccaaatttacgccatgaaagtggtgaagaaagagctggtgcatgatgacgaggatattgactgggtacagacagagaagcacgtgtttgagcaggcatccagcaaccccttcctggtcggattacactcctgcttccagacgacaagtcggttgttcctggtcattgagtacgtcaacggcggggacctgatgttccacatgcagaggcagaggaagctccctgaggagcacgccaggttctacgcggccgagatctgcatcgccctcaacttcctgcacgagagggggatcatctacagggacctgaagctggacaacgtcctcctggatgcggacgggcacatcaagctcacagactacggcatgtgcaaggaaggcctgggccctggtgacacaacgagcactttctgcggaaccccgaattacatcgcccccgaaatcctgcggggagaggagtacgggttcagcgtggactggtgggcgctgggagtcctcatgtttgagatgatggccgggcgctccccgttcgacatcatcaccgacaacccggacatgaacacagaggactaccttttccaagtgatcctggagaagcccatccggatcccccggttcctgtccgtcaaagcctcccatgttttaaaaggatttttaaataaggaccccaaagagaggctcggctgccggccacagactggattttctgacatcaagtcccacgcgttcttccgcagcatagactgggacttgctggagaagaagcaggcgctccctccattccagccacagatcacagacgactacggtctggacaactttgacacacagttcaccagcgagcccgtgcagctgaccccagacgatgaggatgccataaagaggatcgaccagtcagagttcgaaggctttgagtatatcaacccattattgctgtccaccgaggagtcggtgtgaggccgcgtgcgtctctgtcgtggacacgcgtgattgaccctttaactgtatccttaaccaccgcatatgcatgccaggctgggcacggctccgagggcggccagggacagacgcttgcgccgagaccgcagagggaagcgtcagcgggcgctgctgggagcagaacagtccctcacacctgggcccgggcaggccagcttcgtgctggaggaacttgctgctgtgcctgcgtcgcggcggatccgcggggaccctgccgagggggctgtcatgcggtttccaaggtgcacattttccacggaaacagaactcgatgcactgacctgctccgccaggaaagtgagcgtgtagcgtcctgaggaataaaatgttccgatgatgtggaa

SEQ ID NO: 352876 - DNA, 2110 bp, Homo sapiens
aaaaaaaaaaaaaaaagaacatcgctcggtgccaagacaggcaggacgcagcgggctggcctgcggggctcactgctgccccccggggccgagcacgaaagggagagttggagggcgcttcctcaccgggtgttgcggtgtgagcggggactggtgagtgtgtgctgtcttcagagagagaagagcagttttcaggaatctatctaccgccggggagccagaagatggaggaagctgtaccgtgccaacggccacctcttccaagccaagcgctttaacaggagagcgtactgcggtcagtgcagcgagaggatatggggcctcgcgaggcaaggctacaggtgcatcaactgcaaactgctggtccataagcgctgccacggcctcgtcccgctgacctgcaggaagcatatggattctgtcatgccttcccaagagcctccagtagacgacaagaacgaggacgccgaccttccttccgaggagacagatggaattgcttacatttcctcatcccggaagcatgacagcattaaagacgactcggaggaccttaagccagttatcgatgggatggatggaatcaaaatctctcaggggcttgggctgcaggactttgacctaatcagagtcatcgggcgcgggagctacgccaaggttctcctggtgcggttgaagaagaatgaccaaatttacgccatgaaagtggtgaagaaagagctggtgcatgatgacgaggatattgactgggtacagacagagaagcacgtgtttgagcaggcatccagcaaccccttcctggtcggattacactcctgcttccagacgacaagtcggttgttcctggtcattgagtacgtcaacggcggggacctgatgttccacatgcagaggcagaggaagctccctgaggagcacgccaggttctacgcggccgagatctgcatcgccctcaacttcctgcacgagagggggatcatctacagggacctgaagctggacaacgtcctcctggatgcggacgggcacatcaagctcacagactacggcatgtgcaaggaaggcctgggccctggtgacacaacgagcactttctgcggaaccccgaattacatcgcccccgaaatcctgcggggagaggagtacgggttcagcgtggactggtgggcgctgggagtcctcatgtttgagatgatggccgggcgctccccgttcgacatcatcaccgacaacccggacatgaacacagaggactaccttttccaagtgatcctggagaagcccatccggatcccccggttcctgtccgtcaaagcctcccatgttttaaaaggatttttaaataaggaccccaaagagaggctcggctgccggccacagactggattttctgacatcaagtcccacgcgttcttccgcagcatagactgggacttggtgtttcatacaaagaatacaagtaactgatgaatgaagggggcatcttgtgtccccacaatcctgctgtgcgcacaccacagctggagaagaagcaggcgctccctccattccagccacagatcacagacgactacggtctggacaactttgacacacagttcaccagcgagcccgtgcagctgaccccagacgatgaggatgccataaagaggatcgaccagtcagagttcgaaggctttgagtatatcaacccattattgctgtccaccgaggagtcggtgtgaggccgcgtgcgtctctgtcgtggacacgcgtgattgaccctttaactgtatccttaaccaccgcatatgcatgccaggctgggcacggctccgagggcggccagggacagacgcttgcgccgagaccgcagagggaagcgtcagcgggcgctgctgggagcagaacagtccctcacacctgggcccgggcaggccagcttcgtgctggaggaacttgctgctgtgcctgcgtcgcggcggatccgcggggaccctgccgagggggctgtcatgcggtttccaaggtgcacattttccacggaaacagaactcgatgcactgacctgctccgccaggaaagtgagcgtgtagcgtcctgaggaataaaatgttccgatgatgtggaa

SEQ ID NO: 352877 - DNA, 1529 bp, Homo sapiens
tagaggatccccgttcgaccggagcatgacagcattaaagacgactcggaggaccttaagccagttatcgatgggatggatggaatcaaaatctctcaggggcttgggctgcaggactttgacctaatcagagtcatcgggcgcgggagctacgccaaggttctcctggtgcggttgaagaagaatgaccaaatttacgccatgaaagtggtgaagaaagagctggtgcatgatgacgaggatattgactgggtacagacagagaagcacgtgtttgagcaggcatccagcaaccccttcctggtcggattacactcctgcttccagacgacaagtcggttgttcctggtcattgagtacgtcaacggcggggacctgatgttccacatgcagaggcagaggaagctccctgaggagcacgccaggttctacgcggccgagatctgcatcgccctcaacttcctgcacgagagggggatcatctacagggacctgaagctggacaacgtcctcctggatgcggacgggcacatcaagctcacagactacggcatgtgcaaggaaggcctgggccctggtgacacaacgagcactttctgcggaaccccgaattacatcgcccccgaaatcctgcggggagaggagtacgggttcagcgtggactggtgggcgctgggagtcctcatgtttgagatgatggccgggcgctccccgttcgacatcatcaccgacaacccggacatgaacacagaggactaccttttccaagtgatcctggagaagcccatccggatcccccggttcctgtccgtcaaagcctcccatgttttaaaaggatttttaaataaggaccccaaagagaggctcggctgccggccacagactggattttctgacatcaagtcccacgcgttcttccgcagcatagactgggacttgctggagaagaagcaggcgctccctccattccagccacagatcacagacgactacggtctggacaactttgacacacagttcaccagcgagcccgtgcagctgaccccagacgatgaggatgccataaagaggatcgaccagtcagagttcgaaggctttgagtatatcaacccattattgctgtccaccgaggagtcggtgtgaggccgcgtgcgtctctgtcgtggacacgcgtgattgaccctttaactgtatccttaaccaccgcatatgcatgccaggctgggcacggctccgagggcggccagggacagacgcttgcgccgagaccgcagagggaagcgtcagcgggcgctgctgggagcagaacagtccctcacacctgggcccgggcaggccagcttcgtgctggaggaacttgctgctgtgcctgcgtcgcggcggatccgcggggaccctgccgagggggctgtcatgcggtttccaaggtgcacattttccacggaaacagaactcgatgcactgacctgctccgccaggaaagtgagcgtgtagcgtcctgaggaataaaatgttccgatgatgtggaa

SEQ ID NO: 352878 - DNA, 1506 bp, Homo sapiens
tcttaagtgcatctgactgttgaggagtgttagttaaacctagtatcctggtggtgagacccatctgtgtaaaatgcaaatacttctctgacagcccaacacattaattcttctgcctgccccaaccccgaacacggatatatccgtgttcgggaagaagaatgaccaaatttacgccatgaaagtggtgaagaaagagctggtgcatgatgacgaggatattgactgggtacagacagagaagcacgtgtttgagcaggcatccagcaaccccttcctggtcggattacactcctgcttccagacgacaagtcggttgttcctggtcattgagtacgtcaacggcggggacctgatgttccacatgcagaggcagaggaagctccctgaggagcacgccaggttctacgcggccgagatctgcatcgccctcaacttcctgcacgagagggggatcatctacagggacctgaagctggacaacgtcctcctggatgcggacgggcacatcaagctcacagactacggcatgtgcaaggaaggcctgggccctggtgacacaacgagcactttctgcggaaccccgaattacatcgcccccgaaatcctgcggggagaggagtacgggttcagcgtggactggtgggcgctgggagtcctcatgtttgagatgatggccgggcgctccccgttcgacatcatcaccgacaacccggacatgaacacagaggactaccttttccaagtgatcctggagaagcccatccggatcccccggttcctgtccgtcaaagcctcccatgttttaaaaggatttttaaataaggaccccaaagagaggctcggctgccggccacagactggattttctgacatcaagtcccacgcgttcttccgcagcatagactgggacttgctggagaagaagcaggcgctccctccattccagccacagatcacagacgactacggtctggacaactttgacacacagttcaccagcgagcccgtgcagctgaccccagacgatgaggatgccataaagaggatcgaccagtcagagttcgaaggctttgagtatatcaacccattattgctgtccaccgaggagtcggtgtgaggccgcgtgcgtctctgtcgtggacacgcgtgattgaccctttaactgtatccttaaccaccgcatatgcatgccaggctgggcacggctccgagggcggccagggacagacgcttgcgccgagaccgcagagggaagcgtcagcgggcgctgctgggagcagaacagtccctcacacctgggcccgggcaggccagcttcgtgctggaggaacttgctgctgtgcctgcgtcgcggcggatccgcggggaccctgccgagggggctgtcatgcggtttccaaggtgcacattttccacggaaacagaactcgatgcactgacctgctccgccaggaaagtgagcgtgtagcgtcctgaggaataaaatgttccgatgatgtggaa

SEQ ID NO: 352879 - DNA, 1112 bp, Homo sapiens
ccgttgtcagtggcacaaagtggacggagacctcaccgctacttcctgcacgagagggggatcatctacagggacctgaagctggacaacgtcctcctggatgcggacgggcacatcaagctcacagactacggcatgtgcaaggaaggcctgggccctggtgacacaacgagcactttctgcggaaccccgaattacatcgcccccgaaatcctgcggggagaggagtacgggttcagcgtggactggtgggcgctgggagtcctcatgtttgagatgatggccgggcgctccccgttcgacatcatcaccgacaacccggacatgaacacagaggactaccttttccaagtgatcctggagaagcccatccggatcccccggttcctgtccgtcaaagcctcccatgttttaaaaggatttttaaataaggaccccaaagagaggctcggctgccggccacagactggattttctgacatcaagtcccacgcgttcttccgcagcatagactgggacttgctggagaagaagcaggcgctccctccattccagccacagatcacagacgactacggtctggacaactttgacacacagttcaccagcgagcccgtgcagctgaccccagacgatgaggatgccataaagaggatcgaccagtcagagttcgaaggctttgagtatatcaacccattattgctgtccaccgaggagtcggtgtgaggccgcgtgcgtctctgtcgtggacacgcgtgattgaccctttaactgtatccttaaccaccgcatatgcatgccaggctgggcacggctccgagggcggccagggacagacgcttgcgccgagaccgcagagggaagcgtcagcgggcgctgctgggagcagaacagtccctcacacctgggcccgggcaggccagcttcgtgctggaggaacttgctgctgtgcctgcgtcgcggcggatccgcggggaccctgccgagggggctgtcatgcggtttccaaggtgcacattttccacggaaacagaactcgatgcactgacctgctccgccaggaaagtgagcgtgtagcgtcctgaggaataaaatgttccgatgatgtggaa

SEQ ID NO: 352880 - DNA, 2250 bp, Homo sapiens
aaaaaaaaaaaaaaaagaacatcgctcggtgccaagacaggcaggacgcagcgggctggcctgcggggctcactgctgccccccggggccgagcacgaaagggagagttggagggcgcttcctcaccgggtgttgcggtgtgagcggggactggtgagtgtgtgctgtcttcagagagagaagagcagttttcaggaatctatctaccgccggggagccagaagatggaggaagctgtaccgtgccaacggccacctcttccaagccaagcgctttaacaggagagcgtactgcggtcagtgcagcgagaggatatggggcctcgcgaggcaaggctacaggtgcatcaactgcaaactgctggtccataagcgctgccacggcctcgtcccgctgacctgcaggaagcatatggattctgtcatgccttcccaagagcctccagtagacgacaagaacgaggacgccgaccttccttccgaggagacagatggaattgcttacatttcctcatcccggaagcatgacagcattaaagacgactcggaggaccttaagccagttatcgatgggatggatggaatcaaaatctctcaggggcttgggctgcaggactttgacctaatcagagtcatcgggcgcgggagctacgccaaggttctcctggtgcggttgaagaagaatgaccaaatttacgccatgaaagtggtgaagaaagagctggtgcatgatgacgaggatattgactgggtacagacagagaagcacgtgtttgagcaggcatccagcaaccccttcctggtcggattacactcctgcttccagacgacaagtcggttgttcctggtcattgagtacgtcaacggcggggacctgatgttccacatgcagaggcagaggaagctccctgaggagcacgccaggttctacgcggccgagatctgcatcgccctcaacttcctgcacgagagggggatcatctacagggacctgaagctggacaacgtcctcctggatgcggacgggcacatcaagctcacagactacggcatgtgcaaggaaggcctgggccctggtgacacaacgagcactttctgcggaaccccgaattacatcgcccccgaaatcctgcggggagaggagtacgggttcagcgtggactggtgggcgctgggagtcctcatgtttgagatgatggccgggcgctccccgttcgacatcatcaccgacaacccggacatgaacacagaggactaccttttccaagtgatcctggagaagcccatccggatcccccggttcctgtccgtcaaagcctcccatgttttaaaaggatttttaaataaggaccccaaagagaggctcggctgccggccacagactggattttctgacatcaagtcccacgcgttcttccgcagcatagactgggacttgctggagaagaagcaggcgctccctccattccagccacagatcacagacgactacggtctggacaactttgacacacagttcaccagcgagcccgtgcagctgaccccagacgatgagtgagtcccactgggtgcgggtccctggagcacccctcgggcagccccatggcaggccggcaccttgggcagctggtgacccagcctgcccttgagtcccacccgcctggtgtcatctctccagtgggcgttgggggaggattcttatgcgaacgtgactccgcttcccccaagggaatgaacacacggtcacccccctcccccctgccacctttgcccacagggatgccataaagaggatcgaccagtcagagttcgaaggctttgagtatatcaacccattattgctgtccaccgaggagtcggtgtgaggccgcgtgcgtctctgtcgtggacacgcgtgattgaccctttaactgtatccttaaccaccgcatatgcatgccaggctgggcacggctccgagggcggccagggacagacgcttgcgccgagaccgcagagggaagcgtcagcgggcgctgctgggagcagaacagtccctcacacctgggcccgggcaggccagcttcgtgctggaggaacttgctgctgtgcctgcgtcgcggcggatccgcggggaccctgccgagggggctgtcatgcggtttccaaggtgcacattttccacggaaacagaactcgatgcactgacctgctccgccaggaaagtgagcgtgtagcgtcctgaggaataaaatgttccgatgatgtggaa

SEQ ID NO: 352881 - DNA, 2772 bp, Homo sapiens
  misc_feature (2694)..(2694): n is a, c, g, or t
aaaaaaaaaaaaaaaagaacatcgctcggtgccaagacaggcaggacgcagcgggctggcctgcggggctcactgctgccccccggggccgagcacgaaagggagagttggagggcgcttcctcaccgggtgttgcggtgtgagcggggactggtgagtgtgtgctgtcttcagagagagaagagcagttttcaggaatctatctaccgccggggagccagaagatggaggaagctgtaccgtgccaacggccacctcttccaagccaagcgctttaacaggagagcgtactgcggtcagtgcagcgagaggatatggggcctcgcgaggcaaggctacaggtgcatcaactgcaaactgctggtccataagcgctgccacggcctcgtcccgctgacctgcaggaagcatatggattctgtcatgccttcccaagagcctccagtagacgacaagaacgaggacgccgaccttccttccgaggagacagatggaattgcttacatttcctcatcccggaagcatgacagcattaaagacgactcggaggaccttaagccagttatcgatgggatggatggaatcaaaatctctcaggggcttgggctgcaggactttgacctaatcagagtcatcgggcgcgggagctacgccaaggttctcctggtgcggttgaagaagaatgaccaaatttacgccatgaaagtggtgaagaaagagctggtgcatgatgacgaggatattgactgggtacagacagagaagcacgtgtttgagcaggcatccagcaaccccttcctggtcggattacactcctgcttccagacgacaagtcggttgttcctggtcattgagtacgtcaacggcggggacctgatgttccacatgcagaggcagaggaagctccctgaggagcacgccaggttctacgcggccgagatctgcatcgccctcaacttcctgcacgagagggggatcatctacagggacctgaagctggacaacgtcctcctggatgcggacgggcacatcaagctcacagactacggcatgtgcaaggaaggcctgggccctggtgacacaacgagcactttctgcggaaccccgaattacatcgcccccgaaatcctgcggggagaggagtacgggttcagcgtggactggtgggcgctgggagtcctcatgtttgagatgatggccgggcgctccccgttcgacatcatcaccgacaacccggacatgaacacagaggactaccttttccaagtgatcctggagaagcccatccggatcccccggttcctgtccgtcaaagcctcccatgttttaaaaggatttttaaataaggaccccaaagagaggctcggctgccggccacagactggattttctgacatcaagtcccacgcgttcttccgcagcatagactgggacttgctggagaagaagcaggcgctccctccattccagccacagatcacagacgactacggtctggacaactttgacacacagttcaccagcgagcccgtgcagctgaccccagacgatgaggatgccataaagaggatcgaccagtcagagttcgaaggctttgagtatatcaacccattattgctgtccaccgaggagtcggtgtgaggccgcgtgcgtctctgtcgtggacacgcgtgattgaccctttaactgtatccttaaccaccgcatatgcatgccaggctgggcacggctccgagggcggccagggacagacgcttgcgccgagaccgcagagggaagcgtcagcgggcgctgctgggagcagaacagtccctcacacctgggcccgggcaggccagcttcgtgctggaggaacttgctgctgtgcctgcgtcgcggcggatccgcggggaccctgccgagggggctgtcatgcggtttccaaggtgcacaaatctatctaccgccggggagccagaagatggaggaagctgtaccgtgccaacggccacctcttccaagccaagcgctttaacaggagagcgtactgcggtcagtgcagcgagaggatatggggcctcgcgaggcaaggctacaggtgcatcaactgcaaactgctggtccataagcgctgccacggcctcgtcccgctgacctgcaggaagcatatggatgcagctttgggacaggggagatgaccaagcattgtgcaaaatatcccgttgtataaagcacttggtggaaaggtcatggcctgcagtaccgagtggccacctccgtctgcagaatcataggattctgtcatgccttcccaagagcctccagtagacgacaagaacgaggacgccgaccttccttccgaggagacagatggaattgcttacatttcctcatcccggaagcatgacagcattaaagacgactcggaggaccttaagccagttatcgatgggatggatggaatcaaaatctctcaggggcttgggctgcaggactttgacctaatcagagtcatcgggcgcgggagctacgccaaggttctcctggtgcggttgaagaagaatgaccaaaatttacgccatgaaaagtggtgaagaaaagagctggtgcatgatgacgaggatattgactgggtacagacagagaagcacgtgtttgagcaggcatccagcaaccccttcctggtcggattacactcctgcttccgtaggaagnccagtctaggagtcctgggacatagagatcgtcaacggcagagaccatgagttccgctgcaaaggcgaggaagtccat

SEQ ID NO: 352882 - DNA, 2660 bp, Homo sapiens
aaaaaaaaaaaaaaaagaacatcgctcggtgccaagacaggcaggacgcagcgggctggcctgcggggctcactgctgccccccggggccgagcacgaaagggagagttggagggcgcttcctcaccgggtgttgcggtgtgagcggggactggtgagtgtgtgctgtcttcagagagagaagagcagttttcaggaatctatctaccgccggggagccagaagatggaggaagctgtaccgtgccaacggccacctcttccaagccaagcgctttaacaggagagcgtactgcggtcagtgcagcgagaggatatggggcctcgcgaggcaaggctacaggtgcatcaactgcaaactgctggtccataagcgctgccacggcctcgtcccgctgacctgcaggaagcatatggattctgtcatgccttcccaagagcctccagtagacgacaagaacgaggacgccgaccttccttccgaggagacagatggaattgcttacatttcctcatcccggaagcatgacagcattaaagacgactcggaggaccttaagccagttatcgatgggatggatggaatcaaaatctctcaggggcttgggctgcaggactttgacctaatcagagtcatcgggcgcgggagctacgccaaggttctcctggtgcggttgaagaagaatgaccaaatttacgccatgaaagtggtgaagaaagagctggtgcatgatgacgaggatattgactgggtacagacagagaagcacgtgtttgagcaggcatccagcaaccccttcctggtcggattacactcctgcttccagacgacaagtcggttgttcctggtcattgagtacgtcaacggcggggacctgatgttccacatgcagaggcagaggaagctccctgaggagcacgccaggttctacgcggccgagatctgcatcgccctcaacttcctgcacgagagggggatcatctacagggacctgaagctggacaacgtcctcctggatgcggacgggcacatcaagctcacagactacggcatgtgcaaggaaggcctgggccctggtgacacaacgagcactttctgcggaaccccgaattacatcgcccccgaaatcctgcggggagaggagtacgggttcagcgtggactggtgggcgctgggagtcctcatgtttgagatgatggccgggcgctccccgttcgacatcatcaccgacaacccggacatgaacacagaggactaccttttccaagtgatcctggagaagcccatccggatcccccggttcctgtccgtcaaagcctcccatgttttaaaaggatttttaaataaggaccccaaagagaggctcggctgccggccacagactggattttctgacatcaagtcccacgcgttcttccgcagcatagactgggacttgctggagaagaagcaggcgctccctccattccagccacagatcacagacgactacggtctggacaactttgacacacagttcaccagcgagcccgtgcagctgaccccagacgatgaggatgccataaagaggatcgaccagtcagagttcgaaggctttgagtatatcaacccattattgctgtccaccgaggagtcggtgtgaggccgcgtgcgtctctgtcgtggacacgcgtgattgaccctttaactgtatccttaaccaccgcatatgcatgccaggctgggcacggctccgagggcggccagggacagacgcttgcgccgagaccgcagagggaagcgtcagcgggcgctgctgggagcagaacagtccctcacacctgggcccgggcaggccagcttcgtgctggaggaacttgctgctgtgcctgcgtcgcggcggatccgcggggaccctgccgagggggctgtcatgcggtttccaaggtgcacaaatctatctaccgccggggagccagaagatggaggaagctgtaccgtgccaacggccacctcttccaagccaagcgctttaacaggagagcgtactgcggtcagtgcagcgagaggatatggggcctcgcgaggcaaggctacaggtgcatcaactgcaaactgctggtccataagcgctgccacggcctcgtcccgctgacctgcaggaagcatatggattctgtcatgccttcccaagagcctccagtagacgacaagaacgaggacgccgaccttccttccgaggagacagatggaattgcttacatttcctcatcccggaagcatgacagcattaaagacgactcggaggaccttaagccagttatcgatgggatggatggaatcaaaatctctcaggggcttgggctgcaggactttgacctaatcagagtcatcgggcgcgggagctacgccaaggttctcctggtgcggttgaagaagaatgaccaaaatttacgccatgaaaagtggtgaagaaaagagctggtgcatgatgacgaggatattgactgggtacagacagagaagcacgtgtttgagcaggcatccagcaaccccttcctggtcggattacactcctgcttccagacgacaagtcggttgttcctggtcattgagtacgtcaacggcggggacttgatgtcagaaaatccagtctgtgccgcaccgacctctatttgggta

SEQ ID NO: 352883 - DNA, 2018 bp, Homo sapiens
aaaaaaaaaaaaaaaagaacatcgctcggtgccaagacaggcaggacgcagcgggctggcctgcggggctcactgctgccccccggggccgagcacgaaagggagagttggagggcgcttcctcaccgggtgttgcggtgtgagcggggactggtgagtgtgtgctgtcttcagagagagaagagcagttttcaggaatctatctaccgccggggagccagaagatggaggaagctgtaccgtgccaacggccacctcttccaagccaagcgctttaacaggagagcgtactgcggtcagtgcagcgagaggatatggggcctcgcgaggcaaggctacaggtgcatcaactgcaaactgctggtccataagcgctgccacggcctcgtcccgctgacctgcaggaagcatatggattctgtcatgccttcccaagagcctccagtagacgacaagaacgaggacgccgaccttccttccgaggagacagatggaattgcttacatttcctcatcccggaagcatgacagcattaaagacgactcggaggaccttaagccagttatcgatgggatggatggaatcaaaatctctcaggggcttgggctgcaggactttgacctaatcagagtcatcgggcgcgggagctacgccaaggttctcctggtgcggttgaagaagaatgaccaaatttacgccatgaaagtggtgaagaaagagctggtgcatgatgacgaggatattgactgggtacagacagagaagcacgtgtttgagcaggcatccagcaaccccttcctggtcggattacactcctgcttccagacgacaagtcggttgttcctggtcattgagtacgtcaacggcggggacctgatgttccacatgcagaggcagaggaagctccctgaggagcacgccaggttctacgcggccgagatctgcatcgccctcaacttcctgcacgagagggggatcatctacagggacctgaagctggacaacgtcctcctggatgcggacgggcacatcaagctcacagactacggcatgtgcaaggaaggcctgggccctggtgacacaacgagcactttctgcggaaccccgaattacatcgcccccgaaatcctgcggggagaggagtacgggttcagcgtggactggtgggcgctgggagtcctcatgtttgagatgatggccgggcgctccccgttcgacatcatcaccgacaacccggacatgaacacagaggactaccttttccaagtgatcctggagaagcccatccggatcccccggttcctgtccgtcaaagcctcccatgttttaaaaggatttttaaataaggaccccaaagagaggctcggctgccggccacagactggattttctgacatcaagtcccacgcgttcttccgcagcatagactgggacttgctggagaagaagcaggcgctccctccattccagccacagatcacagacgactacggtctggacaactttgacacacagttcaccagcgagcccgtgcagctgaccccagacgatgaggatgccataaagaggatcgaccagtcagagttcgaaggctttgagtatatcaacccattattgctgtccaccgaggagtcggtgtgaggccgcgtgcgtctctgtcgtggacacgcgtgattgaccctttaactgtatccttaaccaccgcatatgcatgccaggctgggcacggctccgagggcggccagggacagacgcttgcgccgagaccgcagagggaagcgtcagcgggcgctgctgggagcagaacagtccctcacacctgggcccgggcaggccagcttcgtgctggaggaacttgctgctgtgcctgcgtcgcggcggatccgcggggaccctgccgaggggcctcccccaaccccccccccgcacttgttccagctctttgaaatagtctgtgtgaaggtgaaagtgccgttcagtaataacctgtggtttctcagtgaaaaaaaagaaaaaaa

SEQ ID NO: 352884 - DNA, 1488 bp, Homo sapiens
aaaaaaaaaaaaaaaagaacatcgctcggtgccaagacaggcaggacgcagcgggctggcctgcggggctcactgctgccccccggggccgagcacgaaagggagagttggagggcgcttcctcaccgggtgttgcggtgtgagcggggactggtgagtgtgtgctgtcttcagagagagaagagcagttttcaggaatctatctaccgccggggagccagaagatggaggaagctgtaccgtgccaacggccacctcttccaagccaagcgctttaacaggagagcgtactgcggtcagtgcagcgagaggatatggggcctcgcgaggcaaggctacaggtgcatcaactgcaaactgctggtccataagcgctgccacggcctcgtcccgctgacctgcaggaagcatatggattctgtcatgccttcccaagagcctccagtagacgacaagaacgaggacgccgaccttccttccgaggagacagatggaattgcttacatttcctcatcccggaagcatgacagcattaaagacgactcggaggaccttaagccagttatcgatgggatggatggaatcaaaatctctcaggggcttgggctgcaggactttgacctaatcagagtcatcgggcgcgggagctacgccaaggttctcctggtgcggttgaagaagaatgaccaaatttacgccatgaaagtggtgaagaaagagctggtgcatgatgacgaggatattgactgggtacagacagagaagcacgtgtttgagcaggcatccagcaaccccttcctggtcggattacactcctgcttccagacgacaagtcggttgttcctggtcattgagtacgtcaacggcggggacctgatgttccacatgcagaggcagaggaagctccctgaggagcacgccaggttctacgcggccgagatctgcatcgccctcaacttcctgcacgagagggggatcatctacagggacctgaagctggacaacgtcctcctggatgcggacgggcacatcaagctcacagactacggcatgtgcaaggaaggcctgggccctggtgacacaacgagcactttctgcggaaccccgaattacatcgcccccgaaatcctgcggggagaggagtacgggttcagcgtggactggtgggcgctgggagtcctcatgtttgagatgatggccgggcgctccccgttcgacatcatcaccgacaacccggacatgaacacagaggactaccttttccaagtgatcctggagaagcccatccggatcccccggttcctgtccgtcaaagcctcccatgttttaaaaggatttttaaataaggaccccaaagagaggctcggctgccggccacagactggattttctgacatcaagtcccacgcgttcttccgcagcatagactgggacttggtaaagcatcacggagcctatttgcacccccatccccatcccaaccccaaa

SEQ ID NO: 352885 - DNA, 1387 bp, Homo sapiens
aaaaaaaaaaaaaaaagaacatcgctcggtgccaagacaggcaggacgcagcgggctggcctgcggggctcactgctgccccccggggccgagcacgaaagggagagttggagggcgcttcctcaccgggtgttgcggtgtgagcggggactggtgagtgtgtgctgtcttcagagagagaagagcagttttcaggaatctatctaccgccggggagccagaagatggaggaagctgtaccgtgccaacggccacctcttccaagccaagcgctttaacaggagagcgtactgcggtcagtgcagcgagaggatatggggcctcgcgaggcaaggctacaggtgcatcaactgcaaactgctggtccataagcgctgccacggcctcgtcccgctgacctgcaggaagcatatggattctgtcatgccttcccaagagcctccagtagacgacaagaacgaggacgccgaccttccttccgaggagacagatggaattgcttacatttcctcatcccggaagcatgacagcattaaagacgactcggaggaccttaagccagttatcgatgggatggatggaatcaaaatctctcaggggcttgggctgcaggactttgacctaatcagagtcatcgggcgcgggagctacgccaaggttctcctggtgcggttgaagaagaatgaccaaatttacgccatgaaagtggtgaagaaagagctggtgcatgatgacgaggatattgactgggtacagacagagaagcacgtgtttgagcaggcatccagcaaccccttcctggtcggattacactcctgcttccagacgacaagtcggttgttcctggtcattgagtacgtcaacggcggggacctgatgttccacatgcagaggcagaggaagctccctgaggagcacgccaggttctacgcggccgagatctgcatcgccctcaacttcctgcacgagagggggatcatctacagggacctgaagctggacaacgtcctcctggatgcggacgggcacatcaagctcacagactacggcatgtgcaagaaggcctgggccctggtgacacaacgagccttttctgcaaggaaccacgcgcgtgggttccttgcagagggaaaggcaggatttgaactctggtcctctcaggtggatcttgtgtatgttctgctgctgtgtgctggggttcatttttcctgcaacatggttgtcaacagaccaagcacaaacacaagagacagaactgaagcgtggcagccgtcggaaaggtcatcaggttgtgaaggtgccccaatactaaattttcgacaaaccatgaaaattgactttagcactgatcccttaattctgtctagaaaatgccatcatcgcaaga

SEQ ID NO: 352886 - DNA, 1253 bp, Homo sapiens
aaaaaaaaaaaaaaaagaacatcgctcggtgccaagacaggcaggacgcagcgggctggcctgcggggctcactgctgccccccggggccgagcacgaaagggagagttggagggcgcttcctcaccgggtgttgcggtgtgagcggggactggtgagtgtgtgctgtcttcagagagagaagagcagttttcaggaatctatctaccgccggggagccagaagatggaggaagctgtaccgtgccaacggccacctcttccaagccaagcgctttaacaggagagcgtactgcggtcagtgcagcgagaggatatggggcctcgcgaggcaaggctacaggtgcatcaactgcaaactgctggtccataagcgctgccacggcctcgtcccgctgacctgcaggaagcatatggattctgtcatgccttcccaagagcctccagtagacgacaagaacgaggacgccgaccttccttccgaggagacagatggaattgcttacatttcctcatcccggaagcatgacagcattaaagacgactcggaggaccttaagccagttatcgatgggatggatggaatcaaaatctctcaggggcttgggctgcaggactttgacctaatcagagtcatcgggcgcgggagctacgccaaggttctcctggtgcggttgaagaagaatgaccaaatttacgccatgaaagtggtgaagaaagagctggtgcatgatgacgaggatattgactgggtacagacagagaagcacgtgtttgagcaggcatccagcaaccccttcctggtcggattacactcctgcttccagacgacaagtcggttgttcctggtcattgagtacgtcaacggcggggacctgatgttccacatgcagaggcagaggaagctccctgaggagcacgccaggttctacgcggccgagatctgcatcgccctcaacttcctgcacgagagggggatcatctacagggacctgaagctggacaacgtcctcctggatgcggacgggcacatcaagctcacagactacggcatgtgcaaggccagcttcgtgctggaggaacttgctgctgtgcctgcgtcgcggcggatccgcggggaccctgccgagggggctgtcatgcggtttccaaggtgcacattttccacggaaacagaactcgatgcactgacctgctccgccaggaaagtgagcgtgtagcgtcctgaggaataaaatgttccgatgatgtggaa

SEQ ID NO: 352887 - DNA, 1137 bp, Homo sapiens
aaaaaaaaaaaaaaaagaacatcgctcggtgccaagacaggcaggacgcagcgggctggcctgcggggctcactgctgccccccggggccgagcacgaaagggagagttggagggcgcttcctcaccgggtgttgcggtgtgagcggggactggtgagtgtgtgctgtcttcagagagagaagagcagttttcaggaatctatctaccgccggggagccagaagatggaggaagctgtaccgtgccaacggccacctcttccaagccaagcgctttaacaggagagcgtactgcggtcagtgcagcgagaggatatggggcctcgcgaggcaaggctacaggtgcatcaactgcaaactgctggtccataagcgctgccacggcctcgtcccgctgacctgcaggaagcatatggattctgtcatgccttcccaagagcctccagtagacgacaagaacgaggacgccgaccttccttccgaggagacagatggaattgcttacatttcctcatcccggaagcatgacagcattaaagacgactcggaggaccttaagccagttatcgatgggatggatggaatcaaaatctctcaggggcttgggctgcaggactttgacctaatcagagtcatcgggcgcgggagctacgccaaggttctcctggtgcggttgaagaagaatgaccaaatttacgccatgaaagtggtgaagaaagagctggtgcatgatgacgaggatattgactgggtacagacagagaagcacgtgtttgagcaggcatccagcaaccccttcctggtcggattacactcctgcttccagacgacaagtcggttgttcctggtcattgagtacgtcaacggcggggacctgatgttccacatgcagaggcagaggaagctccctgaggagcacgccaggttctacgcggccgagatctgcatcgccctcaacttcctgcacgagagggggatcatctacagggacctgaagctggacaacgtcctccctgcccaagccccctggaggagattttggattcccatcccatccccatccgataacttggttttaaggtcctcccgagtccgtctttttaatgcccgacccttcccttcccgaggagacagatgg

SEQ ID NO: 352888 - DNA, 1401 bp, Homo sapiens
atgtgttgtggcacctgtgccaggcaccagcgttctgccctccccggcacaggcgcatcaccgagtcccaggcccgcctgctgggcattttcctgccaagcagcacctgagattctgaagtcgatgcctggataggcagaaatgggccggcaggaggctcctgacagacgggtctgtgcagtgccagcgcaggcagggtgctgtggccaggtcctacacctttatggtcagggttccaagacgtcatgagacggcttgttcagccagttagttgtcggtgcccctctgaacaaggacccccccaaggaagggggtggcctcgcatgggtggctggggatcctgctccgtcccacatgtggccagcatggccgacactggcatttctcagctcgacaacaatttttctgactttggatattttctagattttgtgttgtaagaaaaaacacttggcagtcaaatactaggcagattgaaatgctgactttctcactgtttcattttgtgattgaagtgcgtgcaaaacactcaatctggtagggatgatgcccgcgcggagctgacccttctcctattgtttttccaagctggagaagaagcaggcgctccctccattccagccacagatcacagacgactacggtctggacaactttgacacacagttcaccagcgagcccgtgcagctgaccccagacgatgagtgagtcccactgggtgcgggtccctggagcacccctcgggcagccccatggcaggccggcaccttgggcagctggtgacccagcctgcccttgagtcccacccgcctggtgtcatctctccagtgggcgttgggggaggattcttatgcgaacgtgactccgcttcccccaagggaatgaacacacggtcacccccctcccccctgccacctttgcccacagggatgccataaagaggatcgaccagtcagagttcgaaggctttgagtatatcaacccattattgctgtccaccgaggagtcggtgtgaggccgcgtgcgtctctgtcgtggacacgcgtgattgaccctttaactgtatccttaaccaccgcatatgcatgccaggctgggcacggctccgagggcggccagggacagacgcttgcgccgagaccgcagagggaagcgtcagcgggcgctgctgggagcagaacagtccctcacacctgggcccgggcaggccagcttcgtgctggaggaacttgctgctgtgcctgcgtcgcggcggatccgcggggaccctgccgagggggctgtcatgcggtttccaaggtgcacattttccacggaaacagaactcgatgcactgacctgctccgccaggaaagtgagcgtgtagcgtcctgaggaataaaatgttccgatgatgtggaa

SEQ ID NO: 352889 - DNA, 572 bp, Homo sapiens
atcgctgactcttgagggtaaaaggacgcccagggagacggacatgatccccaaggctgttacccgaggcaagacggacggccccggaaagatgattaggatgccataaagaggatcgaccagtcagagttcgaaggctttgagtatatcaacccattattgctgtccaccgaggagtcggtgtgaggccgcgtgcgtctctgtcgtggacacgcgtgattgaccctttaactgtatccttaaccaccgcatatgcatgccaggctgggcacggctccgagggcggccagggacagacgcttgcgccgagaccgcagagggaagcgtcagcgggcgctgctgggagcagaacagtccctcacacctgggcccgggcaggccagcttcgtgctggaggaacttgctgctgtgcctgcgtcgcggcggatccgcggggaccctgccgagggggctgtcatgcggtttccaaggtgcacattttccacggaaacagaactcgatgcactgacctgctccgccaggaaagtgagcgtgtagcgtcctgaggaataaaatgttccgatgatgtggaa

SEQ ID NO: 352890 - DNA, 969 bp, Homo sapiens
ttggctaggtactgaggctgtgttgtaatcggcacgagggccccgcgcgccgccggagttccgcggagttgaccgggtcggcgccgtcggtcctgagcgctgccttccgcgttccgccgcggccccacctggagcccccgccccgcgccatggccggagctcccggggcgcagcgctgacggcggcggggggagcgcgccatgcccagcaggaccggccccaagatggaagggagcggcggccgcgtccgcctcaaggcgcattacgggggggacatcttcatcaccagcgtggacgccgccacgaccttcgaggagctctgtgaggaagtgagagacatgtgtcgtctgcaccagcagcacccgctcaccctcaagtgggtggacagcgaaggtgacccttgcacggtgtcctcccagatggagctggaagaggctttccgcctggcccgtcagtgcagggatgaaggcctcatcattcatgttttcccgagcacccctgagcagcctggcctgccatgtccgggagaagacaaatctatctaccgccggggagccagaagatggaggaagctgtaccgtgccaacggccacctcttccaagccaagcgctttaacaggagagcgtactgcggtcagtgcagcgagaggatatggggcctcgcgaggcaaggctacaggtgcatcaactgcaaactgctggtccataagcgctgccacggcctcgtcccgctgacctgcaggaagcatatggattctgtcatgccttcccaagagcctccagtagacgacaagaacgaggacgccgaccttccttccgaggagacagatggaattgcttactttcctctccggagctgacgcttaagaggtcgggggccttagccgtttcgggggtggggggtccattctcgggtgggctgcggttggctgatggctcgggggggtcgcgtccgggggtggcgtgcca

SEQ ID NO: 352891 - DNA, 1348 bp, Homo sapiens
  misc_feature (1270)..(1270): n is a, c, g, or t
cccaggaacactttgggcacttaggcaaggcagaaaatgtccaagcaggtcccgacaacattcattctcatgccttttgtaacatttaaacgttcatgaaaacatcgccaaacaagctgataattaccatcattttggaattgttcagaaccatgaagaataaagaaggatcatttaaaatcttgaaaaatactgaacaaagaatactaagataattgcaggctgccatgtagcagttcaagatgttcatgagtccgagttccccttctctgaggctgtcaggaggaggttctgtttgaatgaaggtcaggcagggggtgcccccacacactctgcttagccctagacgggaccccaggctgctctacgcagagcgcagcaggagctgcagccccccagcccctgcaagccacggggccttgcctgaagcagcacctcgtcacccctgcccgatggcacctcccctgtgtcccctcatgcagagcagggttccaggcctctccttggggccactggttcccccaaccttgggatagacccaagaggaggctctcaagcttgggcaagcctggcgcccggaagggacaaggtgccggggccacctgttgcccggctcagtgtcctcttttgagaaggtataggtgtggaaggccctgcctgtcctctccgctggcccctcagtgtggcctgggcctgacgctctgttcccacctgcagagagcgtactgcggtcagtgcagcgagaggatatggggcctcgcgaggcaaggctacaggtgcatcaactgcaaactgctggtccataagcgctgccacggcctcgtcccgctgacctgcaggaagcatatggattctgtcatgccttcccaagagcctccagtagacgacaagaacgaggacgccgaccttccttccgaggagacagatggaattgcttacatttcctcatcccggaagcatgacagcattaaagacgactcggaggaccttaagccagttatcgatgggatggatggaatcaaaatctctcaggggcttgggctgcaggactttgacctaatcagagtcatcgggcgcgggagctacgccaaggttctcctggtgcggttgaagaagaatgaccaaaatttacgccatgaaaagtggtgaagaaaagagctggtgcatgatgacgaggatattgactgggtacagacagagaagcacgtgtttgagcaggcatccagcaaccccttcctggtcggattacactcctgcttccgtaggaagnccagtctaggagtcctgggacatagagatcgtcaacggcagagaccatgagttccgctgcaaaggcgaggaagtccat

SEQ ID NO: 352892 - DNA, 1099 bp, Homo sapiens
  misc_feature (1021)..(1021): n is a, c, g, or t
ggagcatccaggggaagccagtgtgggtggggactgggaggagagagggaggctgggcctgccctggcgaggggtggtcagaacatcgctcggtgccagacaggcaggacgcagcgggctggcctgcggggctcactgctgccccccggggccgagcacgaaagggagagttggagggcgcttcctcaccgggtgttgcggtgtgagcggggactggtgagtgtgtgctgtcttcagagagagaagagcagttttcaggaatctatctaccgccggggagccagaagatggaggaagctgtaccgtgccaacggccacctcttccaagccaagcgctttaacaggagagcgtactgcggtcagtgcagcgagaggatatggggcctcgcgaggcaaggctacaggtgcatcaactgcaaactgctggtccataagcgctgccacggcctcgtcccgctgacctgcaggaagcatatggatgcagctttgggacaggggagatgaccaagcattgtgcaaaatatcccgttgtataaagcacttggtggaaaggtcatggcctgcagtaccgagtggccacctccgtctgcagaatcataggattctgtcatgccttcccaagagcctccagtagacgacaagaacgaggacgccgaccttccttccgaggagacagatggaattgcttacatttcctcatcccggaagcatgacagcattaaagacgactcggaggaccttaagccagttatcgatgggatggatggaatcaaaatctctcaggggcttgggctgcaggactttgacctaatcagagtcatcgggcgcgggagctacgccaaggttctcctggtgcggttgaagaagaatgaccaaaatttacgccatgaaaagtggtgaagaaaagagctggtgcatgatgacgaggatattgactgggtacagacagagaagcacgtgtttgagcaggcatccagcaaccccttcctggtcggattacactcctgcttccgtaggaagnccagtctaggagtcctgggacatagagatcgtcaacggcagagaccatgagttccgctgcaaaggcgaggaagtccat

SEQ ID NO: 352893 - DNA, 1026 bp, Homo sapiens
  misc_feature (948)..(948): n is a, c, g, or t
aatttccgctccgcaagaagccggtgaaggttttttgtgcctcagctgctggctacagcttcccgggggagccgggtaccacccgggcctggagacatgaggaggcagggatgtgaggggcgggggacaggacagccggccttccgttaaatatctgctcctcgcgctcgagcctccctgcctattgtcggggccggaggcgagccgacgcagcatcagctcgtcaacgggaaggaagatgcctccctgcacgcccgccgcgcacagagcataaagaatctgcgctgaggaggcaggagaagaaagccgaatctatctaccgccggggagccagaagatggaggaagctgtaccgtgccaacggccacctcttccaagccaagcgctttaacaggagagcgtactgcggtcagtgcagcgagaggatatggggcctcgcgaggcaaggctacaggtgcatcaactgcaaactgctggtccataagcgctgccacggcctcgtcccgctgacctgcaggaagcatatggattctgtcatgccttcccaagagcctccagtagacgacaagaacgaggacgccgaccttccttccgaggagacagatggaattgcttacatttcctcatcccggaagcatgacagcattaaagacgactcggaggaccttaagccagttatcgatgggatggatggaatcaaaatctctcaggggcttgggctgcaggactttgacctaatcagagtcatcgggcgcgggagctacgccaaggttctcctggtgcggttgaagaagaatgaccaaaatttacgccatgaaaagtggtgaagaaaagagctggtgcatgatgacgaggatattgactgggtacagacagagaagcacgtgtttgagcaggcatccagcaaccccttcctggtcggattacactcctgcttccgtaggaagnccagtctaggagtcctgggacatagagatcgtcaacggcagagaccatgagttccgctgcaaaggcgaggaagtccat

SEQ ID NO: 352894 - DNA, 609 bp, Homo sapiens
  misc_feature (8)..(8): n is a, c, g, or t
  misc_feature (11)..(12): n is a, c, g, or t
  misc_feature (15)..(17): n is a, c, g, or t
  misc_feature (20)..(21): n is a, c, g, or t
  misc_feature (41)..(41): n is a, c, g, or t
gtccgtgncannacnnncgnntaggtacgaggctgggtggngcagcaggaccggccccaagatggaagggagcggcggccgcgtccgcctcaaggcgcattacgggggggacatcttcatcaccagcgtggacgccgccacgaccttcgaggagctctgtgaggaagtgagagacatgtgtcgtctgcaccagcagcacccgctcaccctcaagtgggtggacagcgaaggtgacccttgcacggtgtcctcccagatggagctggaagaggctttccgcctggcccgtcagtgcagggatgaaggcctcatcattcatgttttcccgagcacccctgagcagcctggcctgccatgtccgggagaagacaggagggtcaagtgggaagagagcggccccaccgagtgtgttccaggccccggcggcgtctgagaggaggcggccaaacctagtggggctgcgcgaccgcctgtggaacagtggggacgctgctggtgtcctccaggcctgggtgggcgggttaccacggaagcctatcaacggatgcctgtgattccctggtatttataggtatgtctattgttttattaaaaaatccagtttcattc

SEQ ID NO: 352895 - DNA, 392 bp, Homo sapiens
cgtcaccctgcagaggagcaaggtccacagggtcgctgtgttcccagtgcgttcctgaccacaccgtaacgccccttccttcctccctctctcaccagttgcttacatttcctcatcccggaagcatgacagcattaaagacgactcggaggtgagtgtgtggagcagctcgctgccatttccgacgtcctctggaaagtctgtgagcctgtctctggggtagtcacggaaatctagatgtgaaatagacatggtccggggtgttgctaactaatcttcacgggtgtggatgtctagaaggaagtccttattcttgggtcttacttcaggcatgtccttgatgaatacctgcaggcagctgtccccgcaggtggtctggggaccacaccctg

SEQ ID NO: 352896 - DNA, 2365 bp, Homo sapiens
ttggctaggtactgaggctgtgttgtaatcggcacgagggccccgcgcgccgccggagttccgcggagttgaccgggtcggcgccgtcggtcctgagcgctgccttccgcgttccgccgcggccccacctggagcccccgccccgcgccatggccggagctcccggggcgcagcgctgacggcggcggggggagcgcgccatgcccagcaggaccggccccaagatggaagggagcggcggccgcgtccgcctcaaggcgcattacgggggggacatcttcatcaccagcgtggacgccgccacgaccttcgaggagctctgtgaggaagtgagagacatgtgtcgtctgcaccagcagcacccgctcaccctcaagtgggtggacagcgaaggtgacccttgcacggtgtcctcccagatggagctggaagaggctttccgcctggcccgtcagtgcagggacgaaggcctcatcattcatgttttcccgagcacccctgagcagcctggcctgccatgtccgggagaagacaaatctatctaccgccggggagccagaagatggaggaagctgtaccgtgccaacggccacctcttccaagccaagcgctttaacaggagagcgtactgcggtcagtgcagcgagaggatatggggcctcgcgaggcaaggctacaggtgcatcaactgcaaactgctggtccataagcgctgccacggcctcgtcccgctgacctgcaggaagcatatggattctgtcatgccttcccaagagcctccagtagacgacaagaacgaggacgccgaccttccttccgaggagacagatggaattgcttacatttcctcatcccggaagcatgacagcattaaagacgactcggaggaccttaagccagttatcgatgggatggatggaatcaaaatctctcaggggcttgggctgcaggactttgacctaatcagagtcatcgggcgcgggagctacgccaaggttctcctggtgcggttgaagaagaatgaccaaatttacgccatgaaagtggtgaagaaagagctggtgcatgatgacgaggatattgactgggtacagacagagaagcacgtgtttgagcaggcatccagcaaccccttcctggtcggattacactcctgcttccagacgacaagtcggttgttcctggtcattgagtacgtcaacggcggggacctgatgttccacatgcagaggcagaggaagctccctgaggagcacgccaggttctacgcggccgagatctgcatcgccctcaacttcctgcacgagagggggatcatctacagggacctgaagctggacaacgtcctcctggatgcggacgggcacatcaagctcacagactacggcatgtgcaaggaaggcctgggccctggtgacacaacgagcactttctgcggaaccccgaattacatcgcccccgaaatcctgcggggagaggagtacgggttcagcgtggactggtgggcgctgggagtcctcatgtttgagatgatggccgggcgctccccgttcgacatcatcaccgacaacccggacatgaacacagaggactaccttttccaagtgatcctggagaagcccatccggatcccccggttcctgtccgtcaaagcctcccatgttttaaaaggatttttaaataaggaccccaaagagaggctcggctgccggccacagactggattttctgacatcaagtcccacgcgttcttccgcagcatagactgggacttgctggagaagaagcaggcgctccctccattccagccacagatcacagacgactacggtctggacaactttgacacacagttcaccagcgagcccgtgcagctgaccccagacgatgaggatgccataaagaggatcgaccagtcagagttcgaaggctttgagtatatcaacccattattgctgtccaccgaggagtcggtgtgaggccgcgtgcgtctctgtcgtggacacgcgtgattgaccctttaactgtatccttaaccaccgcatatgcatgccaggctgggcacggctccgagggcggccagggacagacgcttgcgccgagaccgcagagggaagcgtcagcgggcgctgctgggagcagaacagtccctcacacctgggcccgggcaggccagcttcgtgctggaggaacttgctgctgtgcctgcgtcgcggcggatccgcggggaccctgccgagggggctgtcatgcggtttccaaggtgcacattttccacggaaacagaactcgatgcactgacctgctccgccaggaaagtgagcgtgtagcgtcctgaggaataaaatgttccgatgatgtggaa

SEQ ID NO: 352897 - DNA, 711 bp, Homo sapiens
cccgaagggatgtgttggaacccttccccttgtgtaaccaggccagcctgtccactccaaaacccaggatcgggacttccgggagcctgtacccattgcaactagttgaactgtcccccgggcccctgttgcggggatttggtctcgtgccgaattcggcacgacagacgactacggtctggacaactttgacacacagttcaccagcgagcccgtgcagctgaccccagacgatgaggatgccataaagaggatcgaccagtcagagttcgaaggctttgagtatatcaacccattattgctgtccaccgaggagtcggtgtgaggccgcgtgcgtctctgtcgtggacacgcgtgattgaccctttaactgtatccttaaccaccgcatatgcatgccaggctgggcacggctccgagggcggccagggacagacgcttgcgccgagaccgcagagggaagcgtcagcgggcgctgctgggagcagaacagtccctcacacctgggcccgggcaggccagcttcgtgctggaggaacttgctgctgtgcctgcgtcgcggcggatccgcggggaccctgccgagggggctgtcatgcggtttccaaggtgcacattttccacggaaacagaactcgatgcactgacctgctccgccaggaaagtgagcgtgtagcgtcctgaggaataaaatgttccgatgatgtggaa

SEQ ID NO: 352898 - DNA, 1073 bp, Homo sapiens
  misc_feature (903)..(903): n is a, c, g, or t
  misc_feature (907)..(907): n is a, c, g, or t
ttggctaggtactgaggctgtgttgtaatcggcacgagggccccgcgcgccgccggagttccgcggagttgaccgggtcggcgccgtcggtcctgagcgctgccttccgcgttccgccgcggccccacctggagcccccgccccgcgccatggccggagctcccggggcgcagcgctgacggcggcggggggagcgcgccatgcccagcaggaccggccccaagatggaagggagcggcggccgcgtccgcctcaaggcgcattacgggggggacatcttcatcaccagcgtggacgccgccacgaccttcgaggagctctgtgaggaagtgagagacatgtgtcgtctgcaccagcagcacccgctcaccctcaagtgggtggacagcgaaggtgacccttgcacggtgtcctcccagatggagctggaagaggctttccgcctggcccgtcagtgcagggatgaaggcctcatcattcatgttttcccgagcacccctgagcagcctggcctgccatgtccgggagaagacaaatctatctaccgccggggagccagaagatggaggaagctgtaccgtgccaacggccacctcttccaagccaagcgctttaacaggagagcgtactgcggtcagtgcagcgagaggatatggggcctcgcgaggcaaggctacaggtgcatcaactgcaaactgctggtccataagcgctgccacggcctcgtcccgctgacctgcaggaagcatatggattctgtcatgccttcccaagagcctccagtagacgacaagaacgaggacgccgaccttccttccgaggagacagatggaattgcttacatttcctcatcccggaagcatgacagcattaaagacgactcggaggaccttaagccagttngagnggatgtggacaaaattaggtgtggggggagaattggaaaagatggggcggacaaccagctgatgggagaaaagacatcagagatttagaatggtgtgcagaatggacgagaggtcgacagtgaagaaggagaagggaagaaaagagaaataggttctatcgctttg

SEQ ID NO: 352899 - DNA, 885 bp, Homo sapiens
  misc_feature (807)..(807): n is a, c, g, or t
aactggcagggctgctgccggcctggactcaggaccctcaccctccagcccgcaccctcgactccccaccagccagaccctctgtcctggtgtggacagcacccacatcctggctccacccttgtttcttgccctttgacctacagcctcaggacgtgcaggagggagaatctatctaccgccggggagccagaagatggaggaagctgtaccgtgccaacggccacctcttccaagccaagcgctttaacaggagagcgtactgcggtcagtgcagcgagaggatatggggcctcgcgaggcaaggctacaggtgcatcaactgcaaactgctggtccataagcgctgccacggcctcgtcccgctgacctgcaggaagcatatggattctgtcatgccttcccaagagcctccagtagacgacaagaacgaggacgccgaccttccttccgaggagacagatggaattgcttacatttcctcatcccggaagcatgacagcattaaagacgactcggaggaccttaagccagttatcgatgggatggatggaatcaaaatctctcaggggcttgggctgcaggactttgacctaatcagagtcatcgggcgcgggagctacgccaaggttctcctggtgcggttgaagaagaatgaccaaaatttacgccatgaaaagtggtgaagaaaagagctggtgcatgatgacgaggatattgactgggtacagacagagaagcacgtgtttgagcaggcatccagcaaccccttcctggtcggattacactcctgcttccgtaggaagnccagtctaggagtcctgggacatagagatcgtcaacggcagagaccatgagttccgctgcaaaggcgaggaagtccat

SEQ ID NO: 352900 - DNA, 979 bp, Homo sapiens
ggagcatccaggggaagccagtgtgggtggggactgggaggagagagggaggctgggcctgccctggcgaggggtggtcagaacatcgctcggtgccagacaggcaggacgcagcgggctggcctgcggggctcactgctgccccccggggccgagcacgaaagggagagttggagggcgcttcctcaccgggtgttgcggtgtgagcggggactggtgagtgtgtgctgtcttcagagagagaagagcagttttcaggaatctatctaccgccggggagccagaagatggaggaagctgtaccgtgccaacggccacctcttccaagccaagcgctttaacaggagagcgtactgcggtcagtgcagcgagaggatatggggcctcgcgaggcaaggctacaggtgcatcaactgcaaactgctggtccataagcgctgccacggcctcgtcccgctgacctgcaggaagcatatggtgagtggcagggctggggaggcccggggggcacgggcggggtcggggcgtggcagccagcccattgtccaagcagaccttggtgaccctgggttcttcaagaggggccgtggtgccgtcctagctctgggctgcagcgtgagactcaggcggcagtcttggataggacccatcttcctgagcccccacaagcccccggcacactctgctcattggggcatgaggctcaggcagcaggctcaggtaggacgtggtacgctctgctcagtgggtcggaggtaaggttcattcataccccagtcttgaaccagctcttaaggactgtggaggtgaaagccaggtctgacctagtagcattgggcacgctgaggctccgaacatctggagcctctccctggcatcccccctgggaagccatgcccagcctgtgatgagggcggcaccttccctccgccatccccgagtgcttggacttgaagcatccaggcctttgggggcctta

SEQ ID NO: 352901 - DNA, 419 bp, Homo sapiens
actagtgatacaaccgagcaataactgttagacaccgcgaataacattaccccggaaatcctgcgaaacgaggagtacggttcagcgtggactggtgggcgctgggagtcctcatgtttgagatgatggccgggcgctccccgttcgacatcatcaccgacaacccggacatgaacacagaggactaccttttccaagtgatcctggagaagcccatccggatcccccggttcctgtccgtcaaagcctcccatgttttaaaaggatttttaaataaggaccccaaagagaggctcggctgccggccacagactggattttctgacatcaagtcccacgcgttcttccgcagcatagactgggacttggtaaagcatcacggagcctatttgcacccccatccccatcccaaccccaaa

SEQ ID NO: 352902 - DNA, 2027 bp, Homo sapiens
aaaaaaaaaaaaaaaagaacatcgctcggtgccaagacaggcaggacgcagcgggctggcctgcggggctcactgctgccccccggggccgagcacgaaagggagagttggagggcgcttcctcaccgggtgttgcggtgtgagcggggactggtgagtgtgtgctgtcttcagagagagaagagcagttttcaggaatctatctaccgccggggagccagaagatggaggaagctgtaccgtgccaacggccacctcttccaagccaagcgctttaacaggagagcgtactgcggtcagtgcagcgagaggatatggggcctcgcgaggcaaggctacaggtgcatcaactgcaaactgctggtccataagcgctgccacggcctcgtcccgctgacctgcaggaagcatatggattctgtcatgccttcccaagagcctccagtagacgacaagaacgaggacgccgaccttccttccgaggagacagatggaattgcttacatttcctcatcccggaagcatgacagcattaaagacgactcggaggaccttaagccagttatcgatgggatggatggaatcaaaatctctcaggggcttgggctgcaggactttgacctaatcagagtcatcgggcgcgggagctacgccaaggttctcctggtgcggttgaagaagaatgaccaaatttacgccatgaaagtggtgaagaaagagctggtgcatgatgacgaggatattgactgggtacagacagagaagcacgtgtttgagcaggcatccagcaaccccttcctggtcggattacactcctgcttccagacgacaagtcggttgttcctggtcattgagtacgtcaacggcggggacctgatgttccacatgcagaggcagaggaagctccctgaggagcacgccaggttctacgcggccgagatctgcatcgccctcaacttcctgcacgagagggggatcatctacagggacctgaagctggacaacgtcctcctggatgcggacgggcacatcaagctcacagactacggcatgtgcaaggaaggcctgggccctggtgacacaacgagcactttctgcggaaccccgaattacatcgcccccgaaatcctgcggggagaggagtacgggttcagcgtggactggtgggcgctgggagtcctcatgtttgagatgatggccgggcgctccccgttcgacatcatcaccgacaacccggacatgaacacagaggactaccttttccaagtgatcctggagaagcccatccggatcccccggttcctgtccgtcaaagcctcccatgttttaaaaggatttttaaataaggaccccaaagagaggctcggctgccggccacagactggattttctgacatcaagtcccacgcgttcttccgcagcatagactgggacttgctggagaagaagcaggcgctccctccattccagccacagatcacagacgactacggtctggacaactttgacacacagttcaccagcgagcccgtgcagctgaccccagacgatgaggatgccataaagaggatcgaccagtcagagttcgaaggctttgagtatatcaacccattattgctgtccaccgaggagtcggtgtgaggccgcgtgcgtctctgtcgtggacacgcgtgattgaccctttaactgtatccttaaccaccgcatatgcatgccaggctgggcacggctccgagggcggccagggacagacgcttgcgccgagaccgcagagggaagcgtcagcgggcgctgctgggagcagaacagtccctcacacctgggcccgggcaggccagcttcgtgctggaggaacttgctgctgtgcctgcgtcgcggcggatccgcggggaccctgccgagggggctgtcatgcggtttccaaggtgcacattttccacggaaacagaactcgatgcactgacctgctccgccaggaaagtgagcgtgtagcgtcctgaggaataaaatgttccgatgatgtggaa

SEQ ID NO: 352903 - DNA, 2051 bp, Homo sapiens
aaaaaaaaaaaaaaaagaacatcgctcggtgccaagacaggcaggacgcagcgggctggcctgcggggctcactgctgccccccggggccgagcacgaaagggagagttggagggcgcttcctcaccgggtgttgcggtgtgagcggggactggtgagtgtgtgctgtcttcagagagagaagagcagttttcaggaatctatctaccgccggggagccagaagatggaggaagctgtaccgtgccaacggccacctcttccaagccaagcgctttaacaggagagcgtactgcggtcagtgcagcgagaggatatggggcctcgcgaggcaaggctacaggtgcatcaactgcaaactgctggtccataagcgctgccacggcctcgtcccgctgacctgcaggaagcatatggattctgtcatgccttcccaagagcctccagtagacgacaagaacgaggacgccgaccttccttccgaggagacagatggaattgcttacatttcctcatcccggaagcatgacagcattaaagacgactcggaggaccttaagccagttatcgatgggatggatggaatcaaaatctctcaggggcttgggctgcaggactttgacctaatcagagtcatcgggcgcgggagctacgccaaggttctcctggtgcggttgaagaagaatgaccaaatttacgccatgaaagtggtgaagaaagagctggtgcatgatgacgaggatattgactgggtacagacagagaagcacgtgtttgagcaggcatccagcaaccccttcctggtcggattacactcctgcttccagacgacaagtcgcctccggcgcctctctccctgcaggttgttcctggtcattgagtacgtcaacggcggggacctgatgttccacatgcagaggcagaggaagctccctgaggagcacgccaggttctacgcggccgagatctgcatcgccctcaacttcctgcacgagagggggatcatctacagggacctgaagctggacaacgtcctcctggatgcggacgggcacatcaagctcacagactacggcatgtgcaaggaaggcctgggccctggtgacacaacgagcactttctgcggaaccccgaattacatcgcccccgaaatcctgcggggagaggagtacgggttcagcgtggactggtgggcgctgggagtcctcatgtttgagatgatggccgggcgctccccgttcgacatcatcaccgacaacccggacatgaacacagaggactaccttttccaagtgatcctggagaagcccatccggatcccccggttcctgtccgtcaaagcctcccatgttttaaaaggatttttaaataaggaccccaaagagaggctcggctgccggccacagactggattttctgacatcaagtcccacgcgttcttccgcagcatagactgggacttgctggagaagaagcaggcgctccctccattccagccacagatcacagacgactacggtctggacaactttgacacacagttcaccagcgagcccgtgcagctgaccccagacgatgaggatgccataaagaggatcgaccagtcagagttcgaaggctttgagtatatcaacccattattgctgtccaccgaggagtcggtgtgaggccgcgtgcgtctctgtcgtggacacgcgtgattgaccctttaactgtatccttaaccaccgcatatgcatgccaggctgggcacggctccgagggcggccagggacagacgcttgcgccgagaccgcagagggaagcgtcagcgggcgctgctgggagcagaacagtccctcacacctgggcccgggcaggccagcttcgtgctggaggaacttgctgctgtgcctgcgtcgcggcggatccgcggggaccctgccgagggggctgtcatgcggtttccaaggtgcacattttccacggaaacagaactcgatgcactgacctgctccgccaggaaagtgagcgtgtagcgtcctgaggaataaaatgttccgatgatgtggaa

SEQ ID NO: 352904 - DNA, 2209 bp, Homo sapiens
  misc_feature (1)..(1): n is a, c, g, or t
naacaagtttctaaaaaagcaggtggtacggtcggaattcccgggatggcaggacgcagcgggctggcctgcggggctcactgctgccccccggggccgagcacgaaagggagagttggagggcgcttcctcaccgggtgttgcggtgtgagcggggactggtgagtgtgtgctgtcttcagagagagaagagcagttttcaggaatctatctaccgccggggagccagaagatggaggaagctgtaccgtgccaacggccacctcttccaagccaagcgctttaacaggagagcgtactgcggtcagtgcagcgagaggatatggggcctcgcgaggcaaggctacaggtgcatcaactgcaaactgctggtccataagcgctgccacggcctcgtcccgctgacctgcaggaagcatatggcggaacccagaggcccttagaatggccccctgatgcttggttactgacaggatgcagctttgggacaggggagatgaccaagcattgtgcaaaatatcccgttgtataaagcacttggtggaaaggtcatggcctgcagtaccgagtggccacctccgtctgcagaatcataggattctgtcatgccttcccaagagcctccagtagacgacaagaacgaggacgccgaccttccttccgaggagacagatggaattgcttacatttcctcatcccggaagcatgacagcattaaagacgactcggaggaccttaagccagttatcgatgggatggatggaatcaaaatctctcaggggcttgggctgcaggactttgacctaatcagagtcatcgggcgcgggagctacgccaaggttctcctggtgcggttgaagaagaatgaccaaatttacgccatgaaagtggtgaagaaagagctggtgcatgatgacgaggatattgactgggtacagacagagaagcacgtgtttgagcaggcatccagcaaccccttcctggtcggattacactcctgcttccagacgacaagtcggttgttcctggtcattgagtacgtcaacggcggggacctgatgttccacatgcagaggcagaggaagctccctgaggagcacgccaggttctacgcggccgagatctgcatcgccctcaacttcctgcacgagagggggatcatctacagggacctgaagctggacaacgtcctcctggatgcggacgggcacatcaagctcacagactacggcatgtgcaaggaaggcctgggccctggtgacacaacgagcactttctgcggaaccccgaattacatcgcccccgaaatcctgcggggagaggagtacgggttcagcgtggactggtgggcgctgggagtcctcatgtttgagatgatggccgggcgctccccgttcgacatcatcaccgacaacccggacatgaacacagaggactaccttttccaagtgatcctggagaagcccatccggatcccccggttcctgtccgtcaaagcctcccatgttttaaaaggatttttaaataaggaccccaaagagaggctcggctgccggccacagactggattttctgacatcaagtcccacgcgttcttccgcagcatagactgggacttgctggagaagaagcaggcgctccctccattccagccacagatcacagacgactacggtctggacaactttgacacacagttcaccagcgagcccgtgcagctgaccccagacgatgaggatgccataaagaggatcgaccagtcagagttcgaaggctttgagtatatcaacccattattgctgtccaccgaggagtcggtgtgaggccgcgtgcgtctctgtcgtggacacgcgtgattgaccctttaactgtatccttaaccaccgcatatgcatgccaggctgggcacggctccgagggcggccagggacagacgcttgcgccgagaccgcagagggaagcgtcagcgggcgctgctgggagcagaacagtccctcacacctgggcccgggcaggccagcttcgtgctggaggaacttgctgctgtgcctgcgtcgcggcggatccgcggggaccctgccgagggggctgtcatgcggtttccaaggtgcacattttccacggaaacagaactcgatgcactgacctgctccgccaggaaagtgagcgtgtagcgtcctgaggaataaaatgttccgatgatgtggaa

SEQ ID NO: 352905 - DNA, 2039 bp, Homo sapiens
  misc_feature (12)..(12): n is a, c, g, or t
catgccgtgttntagtttgtgcctcagctgctggctacagcttcccgggggagccgggtaccacccgggcctggagacatgaggaggcagggatgtgaggggcgggggacaggacagccggccttccgttaaatatctgctcctcgcgctcgagcctccctgcctattgtcggggccggagggagccgacgcagcatcagctcgtcaacgggaaggaagatgcctccctgcacgcccgccgcgcacagagcataaagaatctgcgctgaggaggcaggagaagaaagccgaatctatctaccgccggggagccagaagatggaggaagctgtaccgtgccaacggccacctcttccaagccaagcgctttaacaggagagcgtactgcggtcagtgcagcgagaggatatggggcctcgcgaggcaaggctacaggtgcatcaactgcaaactgctggtccataagcgctgccacggcctcgtcccgctgacctgcaggaagcatatgttgcttacatttcctcatcccggaagcatgacagcattaaagacgactcggaggaccttaagccagttatcgatgggatggatggaatcaaaatctctcaggggcttgggctgcaggactttgacctaatcagagtcatcgggcgcgggagctacgccaaggttctcctggtgcggttgaagaagaatgaccaaatttacgccatgaaagtggtgaagaaagagctggtgcatgatgacgaggatattgactgggtacagacagagaagcacgtgtttgagcaggcatccagcaaccccttcctggtcggattacactcctgcttccagacgacaagtcggttgttcctggtcattgagtacgtcaacggcggggacctgatgttccacatgcagaggcagaggaagctccctgaggagcacgccaggttctacgcggccgagatctgcatcgccctcaacttcctgcacgagagggggatcatctacagggacctgaagctggacaacgtcctcctggatgcggacgggcacatcaagctcacagactacggcatgtgcaaggaaggcctgggccctggtgacacaacgagcactttctgcggaaccccgaattacatcgcccccgaaatcctgcggggagaggagtacgggttcagcgtggactggtgggcgctgggagtcctcatgtttgagatgatggccgggcgctccccgttcgacatcatcaccgacaacccggacatgaacacagaggactaccttttccaagtgatcctggagaagcccatccggatcccccggttcctgtccgtcaaagcctcccatgttttaaaaggatttttaaataaggaccccaaagagaggctcggctgccggccacagactggattttctgacatcaagtcccacgcgttcttccgcagcatagactgggacttgctggagaagaagcaggcgctccctccattccagccacagatcacagacgactacggtctggacaactttgacacacagttcaccagcgagcccgtgcagctgaccccagacgatgaggatgccataaagaggatcgaccagtcagagttcgaaggctttgagtatatcaacccattattgctgtccaccgaggagtcggtgtgaggccgcgtgcgtctctgtcgtggacacgcgtgattgaccctttaactgtatccttaaccaccgcatatgcatgccaggctgggcacggctccgagggcggccagggacagacgcttgcgccgagaccgcagagggaagcgtcagcgggcgctgctgggagcagaacagtccctcacacctgggcccgggcaggccagcttcgtgctggaggaacttgctgctgtgcctgcgtcgcggcggatccgcggggaccctgccgagggggctgtcatgcggtttccaaggtgcacattttccacggaaacagaactcgatgcactgacctgctccgccaggaaagtgagcgtgtagcgtcctgaggaataaaatgttccgatgatgtggaa

SEQ ID NO: 352906 - DNA, 1246 bp, Homo sapiens
cccacgcgtcgcggacgcgtgggggattacactcctgcttccagacgacaagtcggttgttcctggtcattgagtacgtcaacggcggggacctgatgttccacatgcagaggcagaggaagctccctgaggagcacgccaggttctacgcggccgagatctgcatcgccctcaacttcctgcacgagagggggatcatctacagggacctgaagctggacaacgtcctcctggatgcggacgggcacatcaagctcacagactacggcatgtgcaaggaaggcctgggccctggtgacacaacgagcactttctgcggaaccccgaattacatcgcccccgaaatcctgcggggagaggagtacgggttcagcgtggactggtgggcgctgggagtcctcatgtttgagatgatggccgggcgctccccgttcgacatcatcaccgacaacccggacatgaacacagaggactaccttttccaagtgatcctggagaagcccatccggatcccccggttcctgtccgtcaaagcctcccatgttttaaaaggatttttaaataaggaccccaaagagaggctcggctgccggccacagactggattttctgacatcaagtcccacgcgttcttccgcagcatagactgggacttgctggagaagaagcaggcgctccctccattccagccacagatcacagacgactacggtctggacaactttgacacacagttcaccagcgagcccgtgcagctgaccccagacgatgaggatgccataaagaggatcgaccagtcagagttcgaaggctttgagtatatcaacccattattgctgtccaccgaggagtcggtgtgaggccgcgtgcgtctctgtcgtggacacgcgtgattgaccctttaactgtatccttaaccaccgcatatgcatgccaggctgggcacggctccgagggcggccagggacagacgcttgcgccgagaccgcagagggaagcgtcagcgggcgctgctgggagcagaacagtccctcacacctgggcccgggcaggccagcttcgtgctggaggaacttgctgctgtgcctgcgtcgcggcggatccgcggggaccctgccgagggggctgtcatgcggtttccaaggtgcacattttccacggaaacagaactcgatgcactgacctgctccgccaggaaagtgagcgtgtagcgtcctgaggaataaaatgttccgatgatgtggaa

SEQ ID NO: 352907 - DNA, 2235 bp, Homo sapiens
aaaaaaaaaaaaaaaagaacatcgctcggtgccaagacaggcaggacgcagcgggctggcctgcggggctcactgctgccccccggggccgagcacgaaagggagagttggagggcgcttcctcaccgggtgttgcggtgtgagcggggactggtgagtgtgtgctgtcttcagagagagaagagcagttttcaggaatctatctaccgccggggagccagaagatggaggaagctgtaccgtgccaacggccacctcttccaagccaagcgctttaacaggagagcgtactgcggtcagtgcagcgagaggatatggggcctcgcgaggcaaggctacaggtgcatcaactgcaaactgctggtccataagcgctgccacggcctcgtcccgctgacctgcaggaagcatatggattctgtcatgccttcccaagagcctccagtagacgacaagaacgaggacgccgaccttccttccgaggagacagatggaattgcttacatttcctcatcccggaagcatgacagcattaaagacgactcggaggaccttaagccagttatcgatgggatggatggaatcaaaatctctcaggggcttgggctgcaggactttgacctaatcagagtcatcgggcgcgggagctacgccaaggttctcctggtgcggttgaagaagaatgaccaaatttacgccatgaaagtggtgaagaaagagctggtgcatgatgacgaggatattgactgggtacagacagagaagcacgtgtttgagcaggcatccagcaaccccttcctggtcggattacactcctgcttccagacgacaagtcggttgttcctggtcattgagtacgtcaacggcggggacctgatgttccacatgcagaggcagaggaagctccctgaggagcacgccaggttctacgcggccgagatctgcatcgccctcaacttcctgcacgagagggggatcatctacagggacctgaagctggacaacgtcctcctggatgcggacgggcacatcaagctcacagactacggcatgtgcaaggaaggcctgggccctggtgacacaacgagcactttctgcggaaccccgaattacatcgcccccgaaatcctgcggggagaggagtacgggttcagcgtggactggtgggcgctgggagtcctcatgtttgagatgatggccgggcgctccccgttcgacatcatcaccgacaacccggacatgaacacagaggactaccttttccaagtgatcctggagaagcccatccggatcccccggttcctgtccgtcaaagcctcccatgttttaaaaggatttttaaataaggaccccaaagagaggctcggctgccggccacagactggattttctgacatcaagtcccacgcgttcttccgcagcatagactgggacttgctggagaagaagcaggcgctccctccattccagccacagatcacagacgactacggtctggacaactttgacacacagttcaccagcgagcccgtgcagctgaccccagacgatgaggatgccataaagaggatcgaccagtcagagttcgaaggctttgagtatatcaacccattattgctgtccaccgaggagtcggtgtgaggccgcgtgcgtctctgtcgtggacacgcgtgattgaccctttaactgtatccttaaccaccgcatatgcatgccaggctgggcacggctccgagggcggccagggacagacgcttgcgccgagaccgcagagggaagcgtcagcgggcgctgctgggagcagaacagtccctcacacctgggcccgggcaggccagcttcgtgctggaggaacttgctgctgtgcctgcgtcgcggcggatccgcggggaccctgccgagggggctgtcatgcggtttccaaggtgcacattttccacggaaacagaactcgatgcactgacctgctccgccaggaaagtgagcgtgtagcgtcctgaggaataaaatgttccgatgatgtggaaaaaaaacaagaaaacaccaaaacaacccttcgagggcactcaatttcgtacggggcggcgggaacacagggggattcagaactggcgccattgggcacatacggctggtttcccggcccaaggcttcttttggcacacggggacactctggcgggcacccataaggagaggccgaataattcagatagcccgggtacccggctgatac

SEQ ID NO: 352908 - DNA, 2649 bp, Homo sapiens
  misc_feature (2571)..(2571): n is a, c, g, or t
aaaaaaaaaaaaaaaagaacatcgctcggtgccaagacaggcaggacgcagcgggctggcctgcggggctcactgctgccccccggggccgagcacgaaagggagagttggagggcgcttcctcaccgggtgttgcggtgtgagcggggactggtgagtgtgtgctgtcttcagagagagaagagcagttttcaggaatctatctaccgccggggagccagaagatggaggaagctgtaccgtgccaacggccacctcttccaagccaagcgctttaacaggagagcgtactgcggtcagtgcagcgagaggatatggggcctcgcgaggcaaggctacaggtgcatcaactgcaaactgctggtccataagcgctgccacggcctcgtcccgctgacctgcaggaagcatatggattctgtcatgccttcccaagagcctccagtagacgacaagaacgaggacgccgaccttccttccgaggagacagatggaattgcttacatttcctcatcccggaagcatgacagcattaaagacgactcggaggaccttaagccagttatcgatgggatggatggaatcaaaatctctcaggggcttgggctgcaggactttgacctaatcagagtcatcgggcgcgggagctacgccaaggttctcctggtgcggttgaagaagaatgaccaaatttacgccatgaaagtggtgaagaaagagctggtgcatgatgacgaggatattgactgggtacagacagagaagcacgtgtttgagcaggcatccagcaaccccttcctggtcggattacactcctgcttccagacgacaagtcggttgttcctggtcattgagtacgtcaacggcggggacctgatgttccacatgcagaggcagaggaagctccctgaggagcacgccaggttctacgcggccgagatctgcatcgccctcaacttcctgcacgagagggggatcatctacagggacctgaagctggacaacgtcctcctggatgcggacgggcacatcaagctcacagactacggcatgtgcaaggaaggcctgggccctggtgacacaacgagcactttctgcggaaccccgaattacatcgcccccgaaatcctgcggggagaggagtacgggttcagcgtggactggtgggcgctgggagtcctcatgtttgagatgatggccgggcgctccccgttcgacatcatcaccgacaacccggacatgaacacagaggactaccttttccaagtgatcctggagaagcccatccggatcccccggttcctgtccgtcaaagcctcccatgttttaaaaggatttttaaataaggaccccaaagagaggctcggctgccggccacagactggattttctgacatcaagtcccacgcgttcttccgcagcatagactgggacttgctggagaagaagcaggcgctccctccattccagccacagatcacagacgactacggtctggacaactttgacacacagttcaccagcgagcccgtgcagctgaccccagacgatgaggatgccataaagaggatcgaccagtcagagttcgaaggctttgagtatatcaacccattattgctgtccaccgaggagtcggtgtgaggccgcgtgcgtctctgtcgtggacacgcgtgattgaccctttaactgtatccttaaccaccgcatatgcatgccaggctgggcacggctccgagggcggccagggacagacgcttgcgccgagaccgcagagggaagcgtcagcgggcgctgctgggagcagaacagtccctcacacctgggcccgggcaggccagcttcgtgctggaggaacttgctgctgtgcctgcgtcgcggcggatccgcggggaccctgccgagggggctgtcatgcggtttccaaggtgcacaaatctatctaccgccggggagccagaagatggaggaagctgtaccgtgccaacggccacctcttccaagccaagcgctttaacaggagagcgtactgcggtcagtgcagcgagaggatatggggcctcgcgaggcaaggctacaggtgcatcaactgcaaactgctggtccataagcgctgccacggcctcgtcccgctgacctgcaggaagcatatggattctgtcatgccttcccaagagcctccagtagacgacaagaacgaggacgccgaccttccttccgaggagacagatggaattgcttacatttcctcatcccggaagcatgacagcattaaagacgactcggaggaccttaagccagttatcgatgggatggatggaatcaaaatctctcaggggcttgggctgcaggactttgacctaatcagagtcatcgggcgcgggagctacgccaaggttctcctggtgcggttgaagaagaatgaccaaaatttacgccatgaaaagtggtgaagaaaagagctggtgcatgatgacgaggatattgactgggtacagacagagaagcacgtgtttgagcaggcatccagcaaccccttcctggtcggattacactcctgcttccgtaggaagnccagtctaggagtcctgggacatagagatcgtcaacggcagagaccatgagttccgctgcaaaggcgaggaagtccat

SEQ ID NO: 352909 - DNA, 2149 bp, Homo sapiens
aaaaaaaaaaaaaaaagaacatcgctcggtgccaagacaggcaggacgcagcgggctggcctgcggggctcactgctgccccccggggccgagcacgaaagggagagttggagggcgcttcctcaccgggtgttgcggtgtgagcggggactggtgagtgtgtgctgtcttcagagagagaagagcagttttcaggaatctatctaccgccggggagccagaagatggaggaagctgtaccgtgccaacggccacctcttccaagccaagcgctttaacaggagagcgtactgcggtcagtgcagcgagaggatatggggcctcgcgaggcaaggctacaggtgcatcaactgcaaactgctggtccataagcgctgccacggcctcgtcccgctgacctgcaggaagcatatggattctgtcatgccttcccaagagcctccagtagacgacaagaacgaggacgccgaccttccttccgaggagacagatggaattgcttacatttcctcatcccggaagcatgacagcattaaagacgactcggaggaccttaagccagttatcgatgggatggatggaatcaaaatctctcaggggcttgggctgcaggactttgacctaatcagagtcatcgggcgcgggagctacgccaaggttctcctggtgcggttgaagaagaatgaccaaatttacgccatgaaagtggtgaagaaagagctggtgcatgatgacgaggatattgactgggtacagacagagaagcacgtgtttgagcaggcatccagcaaccccttcctggtcggattacactcctgcttccagacgacaagtcggttgttcctggtcattgagtacgtcaacggcggggacctgatgttccacatgcagaggcagaggaagctccctgaggagcacgccaggttctacgcggccgagatctgcatcgccctcaacttcctgcacgagagggggatcatctacagggacctgaagctggacaacgtcctcctggatgcggacgggcacatcaagctcacagactacggcatgtgcaaggaaggcctgggccctggtgacacaacgagcactttctgcggaaccccgaattacatcgcccccgaaatcctgcggggagaggagtacgggttcagcgtggactggtgggcgctgggagtcctcatgtttgagatgatggccgggcgctccccgttcgacatcatcaccgacaacccggacatgaacacagaggactaccttttccaagtgatcctggagaagcccatccggatcccccggttcctgtccgtcaaagcctcccatgttttaaaaggatttttaaataaggaccccaaagagaggctcggctgccggccacagactggattttctgacatcaagtcccacgcgttcttccgcagcatagactgggacttggtgtttcatacaaagaatacaagtaactgatgaatgaagggggcatcttgtgtccccacaatcctgctgtgcgcacaccacaggtgagccgttctgcctaagggaacagccccggcccctccctccggctcctccccagcaccgtctcctccacccagtggcctggccgtggatgctgcctgtggcccagctttgagacaccgccctgacacgtgtccagccttacgtggaaggatttgtctgttttgtggcatcctagtagatgccacgttagtagatgccatgttagtagaagggatgtgggcatttctttgtaagttcccaaaagcctatgagggttttttccacgattccgttcccagtttggcttttgttgttgttgtggctgttcttggcccccctgggccctgcagtggagtggggggctgcacctgggagcctcgagctgaggcccagcccctcctgccctgcattttcctgccaagcagcacctgagactctgaagccgatgcctatacaggcagaaacctgccaattccagcttgaacgactggagggtcctgaggatgggggtccctggggtgccatcatgggcagggtgcatctgtttgggtatgctgccccccagctggcggggcaccggggacaggcacagccacactgggggcatttctggtcttggaagccttcttggctcttccggagggaaggc

SEQ ID NO: 352910 - DNA, 1875 bp, Homo sapiens
  misc_feature (1797)..(1797): n is a, c, g, or t
aaaaaaaaaaaaaaaagaacatcgctcggtgccaagacaggcaggacgcagcgggctggcctgcggggctcactgctgccccccggggccgagcacgaaagggagagttggagggcgcttcctcaccgggtgttgcggtgtgagcggggactggtgagtgtgtgctgtcttcagagagagaagagcagttttcaggaatctatctaccgccggggagccagaagatggaggaagctgtaccgtgccaacggccacctcttccaagccaagcgctttaacaggagagcgtactgcggtcagtgcagcgagaggatatggggcctcgcgaggcaaggctacaggtgcatcaactgcaaactgctggtccataagcgctgccacggcctcgtcccgctgacctgcaggaagcatatggattctgtcatgccttcccaagagcctccagtagacgacaagaacgaggacgccgaccttccttccgaggagacagatggaattgcttacatttcctcatcccggaagcatgacagcattaaagacgactcggaggaccttaagccagttatcgatgggatggatggaatcaaaatctctcaggggcttgggctgcaggactttgacctaatcagagtcatcgggcgcgggagctacgccaaggttctcctggtgcggttgaagaagaatgaccaaatttacgccatgaaagtggtgaagaaagagctggtgcatgatgacgaggatattgactgggtacagacagagaagcacgtgtttgagcaggcatccagcaaccccttcctggtcggattacactcctgcttccagacgacaagtcggttgttcctggtcattgagtacgtcaacggcggggacctgatgttccacatgcagaggcagaggaagctccctgaggagcacgccaggttctacgcggccgagatctgcatcgccctcaacttcctgcacgagagggggatcatctacagggacctgaagctggacaacgtcctcctggatgcggacgggcacatcaagctcacagactacggcatgtgcaaggccagcttcgtgctggaggaacttgctgctgtgcctgcgtcgcggcggatccgcggggaccctgccgagggggctgtcatgcggtttccaaggtgcacaaatctatctaccgccggggagccagaagatggaggaagctgtaccgtgccaacggccacctcttccaagccaagcgctttaacaggagagcgtactgcggtcagtgcagcgagaggatatggggcctcgcgaggcaaggctacaggtgcatcaactgcaaactgctggtccataagcgctgccacggcctcgtcccgctgacctgcaggaagcatatggattctgtcatgccttcccaagagcctccagtagacgacaagaacgaggacgccgaccttccttccgaggagacagatggaattgcttacatttcctcatcccggaagcatgacagcattaaagacgactcggaggaccttaagccagttatcgatgggatggatggaatcaaaatctctcaggggcttgggctgcaggactttgacctaatcagagtcatcgggcgcgggagctacgccaaggttctcctggtgcggttgaagaagaatgaccaaaatttacgccatgaaaagtggtgaagaaaagagctggtgcatgatgacgaggatattgactgggtacagacagagaagcacgtgtttgagcaggcatccagcaaccccttcctggtcggattacactcctgcttccgtaggaagnccagtctaggagtcctgggacatagagatcgtcaacggcagagaccatgagttccgctgcaaaggcgaggaagtccat

SEQ ID NO: 352911 - DNA, 1430 bp, Homo sapiens
aaaaaaaaaaaaaaaagaacatcgctcggtgccaagacaggcaggacgcagcgggctggcctgcggggctcactgctgccccccggggccgagcacgaaagggagagttggagggcgcttcctcaccgggtgttgcggtgtgagcggggactggtgagtgtgtgctgtcttcagagagagaagagcagttttcaggaatctatctaccgccggggagccagaagatggaggaagctgtaccgtgccaacggccacctcttccaagccaagcgctttaacaggagagcgtactgcggtcagtgcagcgagaggatatggggcctcgcgaggcaaggctacaggtgcatcaactgcaaactgctggtccataagcgctgccacggcctcgtcccgctgacctgcaggaagcatatggattctgtcatgccttcccaagagcctccagtagacgacaagaacgaggacgccgaccttccttccgaggagacagatggaattgcttacatttcctcatcccggaagcatgacagcattaaagacgactcggaggaccttaagccagttatcgatgggatggatggaatcaaaatctctcaggggcttgggctgcaggactttgacctaatcagagtcatcgggcgcgggagctacgccaaggttctcctggtgcggttgaagaagaatgaccaaatttacgccatgaaagtggtgaagaaagagctggtgcatgatgacgaggatattgactgggtacagacagagaagcacgtgtttgagcaggcatccagcaaccccttcctggtcggattacactcctgcttccagacgacaagtcggttgttcctggtcattgagtacgtcaacggcggggacctgatgttccacatgcagaggcagaggaagctccctgaggagcacgccaggttctacgcggccgagatctgcatcgccctcaacttcctgcacgagagggggatcatctacagggacctgaagctggacaacgtcctcctggatgcggacgggcacatcaagctcacagactacggcatgtgcaaggaaggcctgggccctggtgacacaacgagcactttctgcggaacccacgccagaggcaccaatccaattcatgtgggctccaccctcatgacctaatcacctcaaaaggtcccaccacataataccatcacactggggattcaatttcaacatgtgaatttcgggggaacacaaacactcagtccataacactcccccagcccacctctgctgccttttctctttgaaagcacttaccttctctttctgcattgatgtaatgccagaggattggatctgggaaaggaagtacatgtgggagggaagaatcagggttcagccatttagcgagcacaagtaggtgccgtgtgtctgcaagggacccacgcggg

SEQ ID NO: 352912 - DNA, 947 bp, Homo sapiens
  misc_feature (869)..(869): n is a, c, g, or t
agagagggttgttgggcaggcagagcatcccccgaggggacaagtcaggcctacggactcctggagccaggacctgccgtaggctggttagggcaggatgcgccctgtcttcgtgggtagagccacatgggggctcacccgaccccctcagggctgaggggcacaggggccgaaagtgtggccgcccctgggggtctgcgcctcttgtggagcccaggcctggcgcccagaatctatctaccgccggggagccagaagatggaggaagctgtaccgtgccaacggccacctcttccaagccaagcgctttaacaggagagcgtactgcggtcagtgcagcgagaggatatggggcctcgcgaggcaaggctacaggtgcatcaactgcaaactgctggtccataagcgctgccacggcctcgtcccgctgacctgcaggaagcatatggattctgtcatgccttcccaagagcctccagtagacgacaagaacgaggacgccgaccttccttccgaggagacagatggaattgcttacatttcctcatcccggaagcatgacagcattaaagacgactcggaggaccttaagccagttatcgatgggatggatggaatcaaaatctctcaggggcttgggctgcaggactttgacctaatcagagtcatcgggcgcgggagctacgccaaggttctcctggtgcggttgaagaagaatgaccaaaatttacgccatgaaaagtggtgaagaaaagagctggtgcatgatgacgaggatattgactgggtacagacagagaagcacgtgtttgagcaggcatccagcaaccccttcctggtcggattacactcctgcttccgtaggaagnccagtctaggagtcctgggacatagagatcgtcaacggcagagaccatgagttccgctgcaaaggcgaggaagtccat

SEQ ID NO: 352913 - DNA, 1188 bp, Homo sapiens
  misc_feature (167)..(168): n is a, c, g, or t
  misc_feature (184)..(184): n is a, c, g, or t
  misc_feature (196)..(196): n is a, c, g, or t
  misc_feature (240)..(241): n is a, c, g, or t
  misc_feature (249)..(249): n is a, c, g, or t
  misc_feature (297)..(298): n is a, c, g, or t
  misc_feature (1110)..(1110): n is a, c, g, or t
ttggctaggtactgaggctgtgttgtaatcggcacgagggccccgcgcgccgccggagttccgcggagttgaccgggtcggcgccgtcggtcctgagcgctgccttccgcgttccgccgcggccccacctggagcccccgccccgcgccatggccggagctccctgnnggcgcagctgctgacnggctggctgtgngtgtgatgctgctgccagtgcccagcatgtgacctgtgccccanngatggaangtggatgctggctggcctgcgtccgcctcaatggcgcattacgtgggnnggacatcttcatcaccagcgtggacgccgccacgaccttcgaggagctctgtgaggaagtgagagacatgtgtcgtctgcaccagcagcacccgctcaccctcaagtgggtggacagcgaagttttcccgagcacccctgagcagcctggcctgccatgtccgggagaagacaaatctatctaccgccggggagccagaagatggaggaagctgtaccgtgccaacggccacctcttccaagccaagcgctttaacaggagagcgtactgcggtcagtgcagcgagaggatatggggcctcgcgaggcaaggctacaggtgcatcaactgcaaactgctggtccataagcgctgccacggcctcgtcccgctgacctgcaggaagcatatggattctgtcatgccttcccaagagcctccagtagacgacaagaacgaggacgccgaccttccttccgaggagacagatggaattgcttacatttcctcatcccggaagcatgacagcattaaagacgactcggaggaccttaagccagttatcgatgggatggatggaatcaaaatctctcaggggcttgggctgcaggactttgacctaatcagagtcatcgggcgcgggagctacgccaaggttctcctggtgcggttgaagaagaatgaccaaaatttacgccatgaaaagtggtgaagaaaagagctggtgcatgatgacgaggatattgactgggtacagacagagaagcacgtgtttgagcaggcatccagcaaccccttcctggtcggattacactcctgcttccgtaggaagnccagtctaggagtcctgggacatagagatcgtcaacggcagagaccatgagttccgctgcaaaggcgaggaagtccat

SEQ ID NO: 352914 - DNA, 976 bp, Homo sapiens
  misc_feature (898)..(898): n is a, c, g, or t
ggagcatccaggggaagccagtgtgggtggggactgggaggagagagggaggctgggcctgccctggcgaggggtggtcagaacatcgctcggtgccagacaggcaggacgcagcgggctggcctgcggggctcactgctgccccccggggccgagcacgaaagggagagttggagggcgcttcctcaccgggtgttgcggtgtgagcggggactggtgagtgtgtgctgtcttcagagagagaagagcagttttcaggaatctatctaccgccggggagccagaagatggaggaagctgtaccgtgccaacggccacctcttccaagccaagcgctttaacaggagagcgtactgcggtcagtgcagcgagaggatatggggcctcgcgaggcaaggctacaggtgcatcaactgcaaactgctggtccataagcgctgccacggcctcgtcccgctgacctgcaggaagcatatggattctgtcatgccttcccaagagcctccagtagacgacaagaacgaggacgccgaccttccttccgaggagacagatggaattgcttacatttcctcatcccggaagcatgacagcattaaagacgactcggaggaccttaagccagttatcgatgggatggatggaatcaaaatctctcaggggcttgggctgcaggactttgacctaatcagagtcatcgggcgcgggagctacgccaaggttctcctggtgcggttgaagaagaatgaccaaaatttacgccatgaaaagtggtgaagaaaagagctggtgcatgatgacgaggatattgactgggtacagacagagaagcacgtgtttgagcaggcatccagcaaccccttcctggtcggattacactcctgcttccgtaggaagnccagtctaggagtcctgggacatagagatcgtcaacggcagagaccatgagttccgctgcaaaggcgaggaagtccat

SEQ ID NO: 352915 - DNA, 1149 bp, Homo sapiens
  misc_feature (1071)..(1071): n is a, c, g, or t
aatttccgctccgcaagaagccggtgaaggttttttgtgcctcagctgctggctacagcttcccgggggagccgggtaccacccgggcctggagacatgaggaggcagggatgtgaggggcgggggacaggacagccggccttccgttaaatatctgctcctcgcgctcgagcctccctgcctattgtcggggccggaggcgagccgacgcagcatcagctcgtcaacgggaaggaagatgcctccctgcacgcccgccgcgcacagagcataaagaatctgcgctgaggaggcaggagaagaaagccgaatctatctaccgccggggagccagaagatggaggaagctgtaccgtgccaacggccacctcttccaagccaagcgctttaacaggagagcgtactgcggtcagtgcagcgagaggatatggggcctcgcgaggcaaggctacaggtgcatcaactgcaaactgctggtccataagcgctgccacggcctcgtcccgctgacctgcaggaagcatatggatgcagctttgggacaggggagatgaccaagcattgtgcaaaatatcccgttgtataaagcacttggtggaaaggtcatggcctgcagtaccgagtggccacctccgtctgcagaatcataggattctgtcatgccttcccaagagcctccagtagacgacaagaacgaggacgccgaccttccttccgaggagacagatggaattgcttacatttcctcatcccggaagcatgacagcattaaagacgactcggaggaccttaagccagttatcgatgggatggatggaatcaaaatctctcaggggcttgggctgcaggactttgacctaatcagagtcatcgggcgcgggagctacgccaaggttctcctggtgcggttgaagaagaatgaccaaaatttacgccatgaaaagtggtgaagaaaagagctggtgcatgatgacgaggatattgactgggtacagacagagaagcacgtgtttgagcaggcatccagcaaccccttcctggtcggattacactcctgcttccgtaggaagnccagtctaggagtcctgggacatagagatcgtcaacggcagagaccatgagttccgctgcaaaggcgaggaagtccat

SEQ ID NO: 352916 - DNA, 329 bp, Homo sapiens
gggcaggatgcgccctgtcttcgtgggtagagccacatgggggctcacccgaccccctcagggctgaggggcacaggggccgaaagtgtggccgcccctgggggtctgcgcctcttgtggagcccaggcctggcgcccaggtgggtggagtgtggagggggcacaggctgcacgaccccagcctggcctcgggcttgctgggagtcgcgtctgtggccggaggggcctttggtgtcaccaggcctctgtcaaaccccaagccgcatcctgggagggctgggtgggctgagccgcccgctgccgtgaggcctctttgacctgcgctcctg

SEQ ID NO: 352917 - DNA, 2152 bp, Homo sapiens
cgcttagaggacagcccgctgccgccggggacgcgcaggcgcagcacccctgtttgtcggccccccgagagaagaggtacggtcgaagccaggagccaggccgagcgggagctgaccaggcttgactcgggtacagaacgaggcaccagtccccttgcgaaccgaagggcctcgcagtggatggaggaggcccagccctgaggtcaacgccaaccaggctagcctggcacggggcctacagggtgggtaggcgggcgtgccgcagccgtccagggccttccctcaggtcccgggcgaggggcctacgctgcggcccggcaacaaggcccgactcggcccctcgggaccagagccccacccgatcggaagcggatcctttaccagggccataggccagtgactaggccgggcctgggcctcccatcggggccggactaggacgaggccccggggaggcccctggcctaccagacccttttctcaggccgacagccgccaggaagatgcaacgtgccctgccaggcgcccgccagcacttgggggccattctggccagcgccagcgtggtggtgaaggctctgtgtgcggcggtactattcctctacctgctctccttcgccgtggacacaggctgcctggcggtcaccccgggctacctctttcctcccaacttctggatctggaccctggccacccatgggctgatggagcagcatgtgtgggacgtggccatcagcctgacaacggtggtggtggccgggcgtttgctggagcccctctggggggccttggagctgctcatcttcttctcagtggtgaatgtgtctgtagggctgctgggggccttcgcctacctcctcacctacatggcttccttcaacctggtctacctgttcactgtccgtatccacggcgccttgggcttcctaggtggcgtcctggtggcactcaagcaaaccatgggggactgtgtggtcctgcgagtgccccaggtgcgcgtcagtgtgatgcccatgctgctgctggcgctgctgctcctgctgcggctcgccacgctgctccagagcccggcgctggcttcctatggcttcgggctgctctccagttgggtatatcttcgcttctaccagcgccatagccggggccgaggggacatggctgaccactttgctttcgccactttcttccctgagatcctgcagcctgtggtgggtttgctggcgaacttggtgcacagcctcctggtgaaggtaaagatatgccagaagacggtgaagcgctacgatgtgggtgccccatcctccatcaccatcagcctgccaggcacagaccctcaagacgccgagcggagaaggcaactggccctgaaggcactcaatgagcggctgaagagagtggaagaccagtccatctggcccagcatggatgatgatgaagaggagtctggggccaaggtggacagccccctgccctcagacaaagctcccacacccccagggaagggggctgccccagaatccagtctaatcaccttcgaggcagctcccccgacgctgtaactccagaccaccttgagtgtggcacctcccctcccaagccccccttgacatcctctcagctactccagggcacctgactgctctgaggagagggaagaaggcctgctggggctttccatggccttctgctgtttctcgccaacactacccaggactcttgctacctggttccaactccagacaaccactatgccaggcccggagcctctgaggcatcggccagtccaggccctcatctgaggtaagaatgtacatcagctggcagccccaagcaagtggctgcagggacactgatgccacagctcctgggccggccctcacatctgaaactggttgccgagagccctgagccaaggcaaggatttgccaaaaatgttctgggggcccagcaaatgcaggagccgacctggggctgcacatccctgcccatccccagaaagactgttcctgtcaggatttgtttccctctgctgtggcggtgactgcttctggaccagaacagctccagctcccaggtattttctacaggaccacttgagtgggcagccaagcccaggctcgcagtatcaataaagcagttctctgaggaatga

SEQ ID NO: 352918 - DNA, 168 bp, Homo sapiens
tcccttggaatctgaacaaaggaatataaaattgccatttgaaaactgaccagctaatctggacctcagagatagatcagccagtggcccaaagccattttatattcctttgttccggcagccaagcccaggctcgcagtatcaataaagcagttctctgaggaatga

SEQ ID NO: 352919 - DNA, 2536 bp, Homo sapiens
cgcttagaggacagcccgctgccgccggggacgcgcaggcgcagcacccctgtttgtcggccccccgagagaagaggtacggtcgaagccaggagccaggccgagcgggagctgaccaggcttgactcgggtacagaacgaggcaccagtccccttgcgaaccgaagggcctcgcagtggatggaggaggcccagccctgaggtcaacgccaaccaggctagcctggcacggggcctacagggtgggtaggcgggcgtgccgcagccgtccagggccttccctcaggtcccgggcgaggggcctacgctgcggcccggcaacaaggcccgactcggcccctcgggaccagagccccacccgatcggaagcggatcctttaccagggccataggccagtgactaggccgggcctgggcctcccatcggggccggactaggacgaggccccggggaggcccctggcctaccagacccttttctcaggccgacagccgccaggaagatgcaacgtgccctgccaggcgcccgccagcacttgggggccattctggccagcgccagcgtggtggtgaaggctctgtgtgcggcggtactattcctctacctgctctccttcgccgtggacacaggctgcctggcggtcaccccgggctacctctttcctcccaacttctggatctggaccctggccacccatgggctgatggagcagcatgtgtgggacgtggccatcagcctgacaacggtggtggtggccgggcgtttgctggagcccctctggggggccttggagctgctcatcttcttctcagtggtgaatgtgtctgtagggctgctgggggccttcgcctacctcctcacctacatggcttccttcaacctggtctacctgttcactgtccgtatccacggcgccttgggcttcctaggtggcgtcctggtggcactcaagcaaaccatgggggactgtgtggtcctgcgagtgccccaggtgcgcgtcagtgtgatgcccatgctgctgctggcgctgctgctcctgctgcggctcgccacgctgctccagagcccggcgctggcttcctatggcttcgggctgctctccagttgggtatatcttcgcttctaccagcgccatagccggggccgaggggacatggctgaccactttgctttcgccactttcttccctgagatcctgcagcctgtggtgggtttgctggcgaacttggtgcacagcctcctggtgaaggtaaagatatgccagaagacggtgaagcgctacgatgtgggtgccccatcctccatcaccatcagcctgccaggcacagaccctcaagacgccgagcggagaaggcaactggccctgaaggcactcaatgagcggctgaagagagtggaagaccagtccatctggcccagcatggatgatgatgaagaggagtctggggccaaggtggacagccccctgccctcagacaaagctcccacacccccagggaagggggctgccccagaatccagtctaatcaccttcgaggcagctcccccgacgctgtaactccagaccaccttgagtgtggcacctcccctcccaagccccccttgacatcctctcagctactccagggcacctgactgctctgaggagagggaagaaggcctgctggggctttccatggccttctgctgtttctcgccaacactacccaggactcttgctacctggttccaactccagacaaccactatgccaggcccggagcctctgaggcatcggccagtccaggccctcatctgaggtaagaatgtacatcagctggcagccccaagcaagtggctgcagggacactgatgccacagctcctgggccggccctcacatctgaaactggttgccgagagccctgagccaaggcaaggatttgccaaaaatgttctgggggcccagcaaatgcaggagccgacctggggctgcacatccctgcccatccccagaaagactgttcctgtcaggatttgtttccctctgctgtggcggtgactgcttctggaccagaacagctccagctcccaggtattttctacaggaccacttgagtgggcagccaagcccaggctcgcagtatcaataaagcagttctctgaggaatgaaaaaaaaaacacacaaaaaaaaaaaggaagagaaagaaaaaaaaaaggggggaaaaaaaaaaaaaaaaaaaaccagagtggcgggcgcggccgcccgcacgacgaaaaagaagagttaccaaaaacaccggagggggggcggcgagcaccaccaaacaaaaaggaaaaaccaacagcacaccaaccgggtgtcccaaaaaaagaagagcacgggcgaaagaacacaaggcgggggcgggtgacctccccaaaaaaaaaaaacgccgggggggaggcaaagaggcggtgttgcagaaaacaccaccagcgagggaggtcgagagcagtcacgacaggcgaccaaaaaaaggaggagccagcagcagacgaataaaaaaaaccccg

SEQ ID NO: 352920 - DNA, 2172 bp, Homo sapiens
cgcttagaggacagcccgctgccgccggggacgcgcaggcgcagcacccctgtttgtcggccccccgagagaagaggtacggtcgaagccaggagccaggccgagcgggagctgaccaggcttgactcgggtacagaacgaggcaccagtccccttgcgaaccgaagggcctcgcagtggatggaggaggcccagccctgaggtcaacgccaaccaggctagcctggcacggggcctacagggtgggtaggcgggcgtgccgcagccgtccagggccttccctcaggtcccgggcgaggggcctacgctgcggcccggcaacaaggcccgactcggcccctcgggaccagagccccacccgatcggaagcggatcctttaccagggccataggccagtgactaggccgggcctgggcctcccatcggggccggactaggacgaggccccggggaggcccctggcctaccagacccttttctcaggccgacagccgccaggaagatgcaacgtgccctgccaggcgcccgccagcacttgggggccattctggccagcgccagcgtggtggtgaaggctctgtgtgcggcggtactattcctctacctgctctccttcgccgtggacacaggctgcctggcggtcaccccgggctacctctttcctcccaacttctggatctggaccctggccacccatgggctgatggagcagcatgtgtgggacgtggccatcagcctgacaacggtggtggtggccgggcgtttgctggagcccctctggggggccttggagctgctcatcttcttctcagtggtgaatgtgtctgtagggctgctgggggccttcgcctacctcctcacctacatggcttccttcaacctggtctacctgttcactgtccgtatccacggcgccttgggcttcctaggtggcgtcctggtggcactcaagcaaaccatgggggactgtgtggtcctgcgagtgccccaggtgcgcgtcagtgtgatgcccatgctgctgctggcgctgctgctcctgctgcggctcgccacgctgctccagagcccggcgctggcttcctatggcttcgggctgctctccagttgggtatatcttcgcttctaccagcgccatagccggggccgaggggacatggctgaccactttgctttcgccactttcttccctgagatcctgcagcctgtggtgggtttgctggcgaacttggtgcacagcctcctggtgaaggtaaagatatgccagaagacggtgaagcgctacgatgtgggtgccccatcctccatcaccatcagcctgccaggcacagaccctcaagacgccgagcggagaaggcaactggccctgaaggcactcaatgagcggctgaagagagtggaagaccagtccatctggcccagcatggatgatgatgaagaggagtctggggccaaggtggacagccccctgccctcagacaaagctcccacacccccagggaagggggctgccccagaatccagtctaatcaccttcgaggcagctcccccgacgctgtaactccagaccaccttgagtgtggcacctcccctcccaagccccccttgacatcctctcagctactccagggcacctgactgctctgaggagagggaagaaggcctgctggggctttccatggccttctgctgtttctcgccaacactacccaggactcttgctacctggttccaactccagacaaccactatgccaggcccggagcctctgaggcatcggccagtccaggccctcatctgaggtaagaatgtacatcagctggcagccccaagcaagtggctgcagggacactgatgccacagctcctgggccggccctcacatctgaaactggttgccgagagccctgagccaaggcaaggatttgccaaaaatgttctgggggcccagcaaatgcaggagccgacctggggctgcacatccctgcccatccccagaaagactgttcctgtcaggatttgtttccctctgctgtggcggtgactgcttctggaccagaacagctccagctcccaggtattttctacaggaccacttgagtgggcagccaagcccaggctcgcagtatcaataaagcagttctctgaggaatgaaaaaaaaaaaagtcgacgcg

SEQ ID NO: 352921 - DNA, 1987 bp, Homo sapiens
cgcttagaggacagcccgctgccgccggggacgcgcaggcgcagcacccctgtttgtcggccccccgagagaagaggtacggtcgaagccaggagccaggccgagcgggagctgaccaggcttgactcgggtacagaacgaggcaccagtccccttgcgaaccgaagggcctcgcagtggatggaggaggcccagccctgaggtcaacgccaaccaggctagcctggcacggggcctacagggtgggtaggcgggcgtgccgcagccgtccagggccttccctcaggtcccgggcgaggggcctacgctgcggcccggcaacaaggcccgactcggcccctcgggaccagagccccacccgatcggaagcggatcctttaccagggccataggccagtgactaggccgggcctgggcctcccatcggggccggactaggacgaggccccggggaggcccctggcctaccagacccttttctcaggccgacagccgccaggaagatgcaacgtgccctgccaggcgcccgccagcacttgggggccattctggccagcgccagcgtggtggtgaaggctctgtgtgcggcggtactattcctctacctgctctccttcgccgtggacacaggctgcctggcggtcaccccgggctacctctttcctcccaacttctggatctggaccctggccacccatgggctgatggagcagcatgtgtgggacgtggccatcagcctgacaacggtggtggtggccgggcgtttgctggagcccctctggggggccttggagctgctcatcttcttctcagtggtgaatgtgtctgtagggctgctgggggccttcgcctacctcctcacctacatggcttccttcaacctggtctacctgttcactgtccgtatccacggcgccttgggcttcctaggtggcgtcctggtggcactcaagcaaaccatgggggactgtgtggtcctgcgagtgccccaggtgcgcgtcagtgtgatgcccatgctgctgctggcgctgctgctcctgctgcggctcgccacgctgctccagagcccggcgctggcttcctatggcttcgggctgctctccagttgggtatatcttcgcttctaccagcgccatagccggggccgaggggacatggctgaccactttgctttcgccactttcttccctgagatcctgcagcctgtggtgggtttgctggcgaacttggtgcacagcctcctggtgaaggtaaagatatgccagaagacggtgaagcgctacgatgtgggtgccccatcctccatcaccatcagcctgccaggcacagaccctcaagacgccgagcggagaaggcaactggccctgaaggcactcaatgagcggctgaagagagtggaagaccagtccatctggcccagcatggatgatgatgaagaggagtctggggccaaggtggacagccccctgccctcagacaaagctcccacacccccagggaagggggctgccccagaatccagtctaatcaccttcgaggcagctcccccgacgctgtaactccagaccaccttgagtgtggcacctcccctcccaagccccccttgacatcctctcagctactccagggcacctgactgctctgaggagagggaagaaggcctgctggggctttccatggccttctgctgtttctcgccaacactacccaggactcttgctacctggttccaactccagacaaccactatgccaggcccggagcctctgaggcatcggccagtccaggccctcatctgaggtaagaatgcacatccctgcccatccccagaaagactgttcctgtcaggatttgtttccctctgctgtggcggtgactgcttctggaccagaacagctccagctcccaggtattttctacaggaccacttgagtgggcagccaagcccaggctcgcagtatcaataaagcagttctctgaggaatga

SEQ ID NO: 352922 - DNA, 629 bp, Homo sapiens
cgcttagaggacagcccgctgccgccggggacgcgcaggcgcagcacccctgtttgtcggccccccgagagaagaggtacggtcgaagccaggagccaggccgagcgggagctgaccaggcttgactcgggtacagaacgaggcaccagtccccttgcgaaccgaagggcctcgcagtggatggaggaggcccagccctgaggtcaacgccaaccaggctagcctggcacggggcctacagggtgggtaggcgggcgtgccgcagccgtccagggccttccctcaggtcccgggcgaggggcctacgctgcggcccggcaacaaggcccgactcggcccctcgggaccagagccccacccgatcggaagcggatcctttaccagggccataggccagtgactaggccgggcctgggcctcccatcggggccggactaggacgaggccccggggaggcccctggcctaccagacccttttctcaggccgacagccgccaggaagatgcaacgtgccctgccaggcgcccgccagcacttgggggccattctggccagcgccagcgtggtggtgaaggctctgtgtgcggcggtactattcctctacctgcacgacaacacataaaaaaaa

SEQ ID NO: 352923 - DNA, 2113 bp, Homo sapiens
cgcttagaggacagcccgctgccgccggggacgcgcaggcgcagcacccctgtttgtcggccccccgagagaagaggtacggtcgaagccaggagccaggccgagcgggagctgaccaggcttgactcgggtacagaacgaggcaccagtccccttgcgaaccgaagggcctcgcagtggatggaggaggcccagccctgaggtcaacgccaaccaggctagcctggcacggggcctacagggtgggtaggcgggcgtgccgcagccgtccagggccttccctcaggtcccgggcgaggggcctacgctgcggcccggcaacaaggcccgactcggcccctcgggaccagagccccacccgatcggaagcggatcctttaccagggccataggccagtgactaggccgggcctgggcctcccatcggggccggactaggacgaggccccggggaggcccctggcctaccagacccttttctcaggccgacagccgccaggaagatgcaacgtgccctgccaggcgcccgccagcacttgggggccattctggccagcgccagcgtggtggtgaaggctctgtgtgcggcggtactattcctctacctgctctccttcgccgtggacacaggctgcctggcggtcaccccgggctacctctttcctcccaacttctggatctggaccctggccacccatgggctgatggagcagcatgtgtgggacgtggccatcagcctgacaacggtggtggtggccgggcgtttgctggagcccctctggggggccttggagctgctcatcttcttctcagtggtgaatgtgtctgtagggctgctgggggccttcgcctacctcctcacctacatggcttccttcaacctggtctacctgttcactgtccgtatccacggcgccttgggcttcctaggtggcgtcctggtggcactcaagcaaaccatgggggactgtgtggtcctgcgagtgccccaggtgcgcgtcagtgtgatgcccatgctgctgctggcgctgctgctcctgctgcggctcgccacgctgctccagagcccggcgctggcttcctatggcttcgggctgctctccagttgggtatatcttcgcttctaccagcgccatagccggggccgaggggacatggctgaccactttgctttcgccactttcttccctgagatcctgcagcctgtggtgggtttgctggcgaacttggtgcacagcctcctggtgaaggtaaagatatgccagaagacggtgaagcgctacgatgtgggtgccccatcctccatcaccatcagcctgccaggcacagaccctcaagacgccgagcggagaaggcaactggccctgaaggcactcaatgagcggctgaagagagtggaagaccagtccatctggcccagcatggatgatgatgaagaggagtctggggccaaggtggacagccccctgccctcagacaaagctcccacacccccagggaagggggctgccccagaatccagtctaatcaccttcgaggcagctcccccgacgctgtaatccaggccctcatctgaggtaagaatgtacatcagctggcagccccaagcaagtggctgcagggacactgatgccacagctcctgggccggccctcacatctgaaactggttgccgagagccctgagccaaggcaaggatttgccaaaaatgttctgggggcccagcaaatgcaggagccgacctggggctgcacatccctgcccatccccagaaagactgttcctgtcaggatttgtttccctctgctgtggcggtgactgcttctggaccagaacagctccagctcccaggtattttctacaggaccacttgagtgggcagccaagcccaggctcgcagtatcaataaagcagttctctgaggaatgaaaaaaaaaaaaagggggcgttaaatatctgagggcaagttaggtccagttttggtcaaggccctaagggggcgataaagaagatggcggttcaagcggatggaatgcatggttgggagacttttggggctttggatccagattagtagaataattgggtagggaagtgtgggatgtgttgatag

SEQ ID NO: 352924 - DNA, 1782 bp, Homo sapiens
cgcttagaggacagcccgctgccgccggggacgcgcaggcgcagcacccctgtttgtcggccccccgagagaagaggtacggtcgaagccaggagccaggccgagcgggagctgaccaggcttgactcgggtacagaacgaggcaccagtccccttgcgaaccgaagggcctcgcagtggatggaggaggcccagccctgaggtcaacgccaaccaggctagcctggcacggggcctacagggtgggtaggcgggcgtgccgcagccgtccagggccttccctcaggtcccgggcgaggggcctacgctgcggcccggcaacaaggcccgactcggcccctcgggaccagagccccacccgatcggaagcggatcctttaccagggccataggccagtgactaggccgggcctgggcctcccatcggggccggactaggacgaggccccggggaggcccctggcctaccagacccttttctcaggccgacagccgccaggaagatgcaacgtgccctgccaggcgcccgccagcacttgggggccattctggccagcgccagcgtggtggtgaaggctctgtgtgcggcggtactattcctctacctgctctccttcgccgtggacacaggctgcctggcggtcaccccgggctacctctttcctcccaacttctggatctggaccctggccacccatgggctgatggagcagcatgtgtgggacgtggccatcagcctgacaacggtggtggtggccgggcgtttgctggagcccctctggggggccttggagctgctcatcttcttctcagtggtgaatgtgtctgtagggctgctgggggccttcgcctacctcctcacctacatggcttccttcaacctggtctactgctctccagttgggtatatcttcgcttctaccagcgccatagccggggccgaggggacatggctgaccactttgctttcgccactttcttccctgagatcctgcagcctgtggtgggtttgctggcgaacttggtgcacagcctcctggtgaaggtaaagatatgccagaagacggtgaagcgctacgatgtgggtgccccatcctccatcaccatcagcctgccaggcacagaccctcaagacgccgagcggagaaggcaactggccctgaaggcactcaatgagcggctgaagagagtggaagaccagtccatctggcccagcatggatgatgatgaagaggagtctggggccaaggtggacagccccctgccctcagacaaagctcccacacccccagggaagggggctgccccagaatccagtctaatcaccttcgaggcagctcccccgacgctgtaactccagaccaccttgagtgtggcacctcccctcccaagccccccttgacatcctctcagctactccagggcacctgactgctctgaggagagggaagaaggcctgctggggctttccatggccttctgctgtttctcgccaacactacccaggactcttgctacctggttccaactccagacaaccactatgccaggcccggagcctctgaggcatcggccagtccaggccctcatctgaggtaagaatgcacatccctgcccatccccagaaagactgttcctgtcaggatttgtttccctctgctgtggcggtgactgcttctggaccagaacagctccagctcccaggtattttctacaggaccacttgagtgggcagccaagcccaggctcgcagtatcaataaagcagttctctgaggaatga

SEQ ID NO: 352925 - DNA, 1627 bp, Homo sapiens
ttcgctttcctgccgatgtcgttgaggaaaatgaaagcggtcgtggccaggactggcgcagctgccgtttcaggcgaggggcgcagaatgcagcggccgccagcctggagcgcgggccctggggccgcaacccgcgccgggcgaggtggcagcacaccctgggccccccactccccgccgcaagtcctgaggatggccagcagagaaacaagaaaatggactccctggctgctggagagttgaatgccagccaccagccatgggtgccagagtttgtagcctattggaggaaaacacaccaagcctacgccactctgtgccctttagccaaggaagcccagctgaggccccgcagcgtccctgcccagcagagctacaggaggcccgaggccccttcctgttcactcttgctctatagacgccacgctgcaaagcagatgtgcagggacaccacctgaagacccagcctgcagctcagccctacacactgtggatggtggagatcccagagggccaagagaagcttattgagacttctctgcactgcccctcccacagcaggaggttcatggcccatgcatttctgggagggttgacagggcccaggttgtggaatacctgtctgtgagccccatgtcctgtcttgtcccagctgcctgtagtttgacagagtatgctagaggtcagccattgctagggaggctgccactaaccacacagagaggaaggaaaattctcagccacagcacttagagctgagcctgacatggtcctcagcaagatgttgcaagttcctaatctgaacacagaggccagggagtaagcatcatctggagcccagagctgactgtcattacccacaaacataaacaccctgagtctggccttctccccaccctgccgaggttgtcagagcctcagcactggctctgccctgggtggcagcccctgggaagcccagctgccacctctctacaaatggccctgtagaagctgtgctcagtgatccacttcctggggggggctgggcccaccttgttgccattacaccccattacaaactgatgcaaccagctttcaacagacactgccaaggaagatacacattacaacagcatgctgcaatacctctgcctgtgcaagagactgacccacatccaaaaaatggacatcttcccaccccagtgtctcactccactgagctggaagtggcctttgtcaggaccctgtgaggtcttgagtggatctgcttttcccaagatattaaaccagtgactttaaatcctggctgcatattaccatcatctgggatattaaaaaatactgatgcctggatcttgctcccacccaaagagtctgactgaattgatggggttttcaaacattttttaagtgtttgttgaaggatgacatatatgcaaaaaaaaaaaaaaagcacaaaccataagtgtaaagctcagtgaattttcacaaaatgaatttaccccgagtaaccagcatccaaatcatgaaacagaacatcaccagcaacccctggtaccccttccacttactacctggctccaaaggctaatgtccattctggcttctaatggtgtacagtcatttctcctgttttcaaacttta

SEQ ID NO: 352926 - DNA, 4371 bp, Homo sapiens
ccaggagagcggcgtggacgcgtgcgggcctagaggcccacgtgatccgcagggcggccgaggcaggaagctgtgagtgcgcggttgcggggtcgcattgtggctacggctttgcgtccccggcgggcagccccaggctggtccccgcctccgctctccccaccggcggggaaagcagctggtgtgggaggaaaggctccatcccccgccccctctctcccgctgttggctggcaggatcttttggcagtcctgtggcctcgctccccgcccggatcctcctgaccctgagattcgcgggtctcacgtcccgtgcacgccttgcttcggcctcagttaagcctttgtggactccaggtccctggtgagattagaaacgtttgcaaacatgtcccggatcgaaaagatgagcattctgggcgtgcggagttttggaatagaggacaaagataagcaaattatcactttcttcagcccccttacaattttggttggacccaatggggcgggaaagacgaccatcattgaatgtctaaaatatatttgtactggagatttccctcctggaaccaaaggaaatacatttgtacacgatcccaaggttgctcaagaaacagatgtgagagcccagattcgtctgcaatttcgtgatgtcaatggagaacttatagctgtgcaaagatctatggcatggtgaaaaggtcagtctgagctctaagtgtgcagaaattgaccgagaaatgatcagttctcttggggtttccaaggctgtgctaaataatgtcattttctgtcatcaagaagattctaattggcctttaagtgaaggaaaggctttgaagcaaaagtttgatgagattttttcagcaacaagatacattaaagccttagaaacacttcggcaggtacgtcagacacaaggtcagaaagtaaaagaatatcaaatggaactaaaatatctgaagcaatataaggaaaaagcttgtgagattcgtgatcagattacaagtaaggaagcccagttaacatcttcaaaggaaattgtcaaatcctatgagaatgaacttgatccattgaagaatcgtctaaaagaaattgaacataatctctctaaaataatgaaacttgacaatgaaattaaagccttggatagccgaaagaagcaaatggagaaagataatagtgaactggaagagaaaatggaaaaggtttttcaagggactgatgagcaactaaatgacttatatcacaatcaccagagaacagtaagggagaaagaaaggaaattggtagactgtcatcgtgaactggaaaaactaaataaagaatctaggcttctcaatcaggaaaaatcagaactgcttgttgaacagggtcgtctacagctgcaagcagatcgccatcaagaacatatccgagctagagattcattaattcagtctttggcaacacagctagaattggatggctttgagcgtggaccattcagtgaaagacagattaaaaattttcacaaacttgtgagagagagacaagaaggggaagcaaaaactgccaaccaactgatgaatgactttgcagaaaaagagactctgaaacaaaaacagatagatgagataagagataagaaaactggactgggaagaataattgagttaaaatcagaaatcctaagtaagaagcagaatgagctgaaaaatgtgaagtatgaattacagcagttggaaggatcttcagacaggattcttgaactggaccaggagctcataaaagctgaacgtgagttaagcaaggctgagaaaaacagcaatgtagaaaccttaaaaatggaagtaataagtctccaaaatgaaaaagcagacttagacaggaccctgcgtaaacttgaccaggagatggagcagttaaaccatcatacaacaacacgtacccaaatggagatgctgaccaaagacaaagctgacaaagatgaacaaatcagaaaaataaaatctaggcacagtgatgaattaacctcactgttgggatattttcccaacaaaaaacagcttgaagactggctacatagtaaatcaaaagaaattaatcagaccagggacagacttgccaaattgaacaaggaactagcttcatctgagcagaataaaaatcatataaataatgaactaaaaagaaaggaagagcagttgtccagttacgaagacaagctgtttgatgtttgtggtagccaggattttgaaagtgatttagacaggcttaaagaggaaattgaaaaatcatcaaaacagcgagccatgctggctggagccacagcagtttactcccagttcattactcagctaacagacgaaaaccagtcatgttgccccgtttgtcagagagtttttcagacagaggctgagttacaagaagtcatcagtgatttgcagtctaaactgcgacttgctccagataaactcaagtcaacagaatcagagctaaaaaaaaaggaaaagcggcgtgatgaaatgctgggacttgtgcccatgaggcaaagcataattgatttgaaggagaaggaaataccagaattaagaaacaaactgcagaatgtcaatagagacatacagcgcctaaagaacgacatagaagaacaagaaacactcttgggtacaataatgcctgaagaagaaagtgccaaagtatgcctgacagatgttacaattatggagaggttccagatggaacttaaagatgttgaaagaaaaattgcacaacaagcagctaagctacaaggaatagacttagatcgaactgtccaacaagtcaaccaggagaaacaagagaaacagcacaagttagacacagtttctagtaagattgaattgaatcgtaagcttatacaggaccagcaggaacagattcaacatctaaaaagtacaacaaatgagctaaaatctgagaaacttcagatatccactaatttgcaacgtcgtcagcaactggaggagcagactgtggaattatccactgaagttcagtctttgtacagagagataaaggatgctaaagagcaggtaagccctttggaaacaacattggaaaagttccagcaagaaaaagaagaattaatcaacaaaaaaaatacaagcaacaaaatagcacaggataaactgaatgatattaaagagaaggttaaaaatattcatggctatatgaaagacattgagaattatattcaagatgggaaagacgactataagaagcaaaaagaaactgaacttaataaagtaatagctcaactaagtgaatgcgagaaacacaaagaaaagataaatgaagatatgagactcatgagacaagatattgatacacagaagatacaagaaaggtggctacaagataaccttactttaagaaaaagaaatgaggaactaaaagaagttgaagaagaaagaaaacaacatttgaaggaaatgggtcaaatgcaggttttgcaaatgaaaagtgaacatcagaagttggaagagaacatagacaatataaaaagaaatcataatttggcattagggcgacagaaaggttatgaagaagaaattattcattttaagaaagaacttcgagaaccacaatttcgggatgctgaggaaaagtatagagaaatgatgattgttatgaggacaacagaacttgtgaacaaggatctggatatttattataagactcttgaccaagcaataatgaaatttcacagtatgaaaatggaagaaatcaataaaattatacgtgacctgtggcgaagtacctatcgtggacaagatattgaatacatagaaatacggtctgatgccgatgaaaatgtatcagcttctgataaaaggcggaattataactaccgagtggtgatgctgaagggagacacagccttggatatgcgaggacgatgcagtgctggacaaaaggtattagcctcactcatcattcgcctggccctggctgaaacgttctgcctcaactgtggcatcattgccttggatgagccaacaacaaatcttgaccgagaaaacattgaatctcttgcacatgctctggttgagataataaaaagtcgctcacagcagcgtaacttccagcttctggtaatcactcatgatgaagattttgtggagcttttaggacgttctgaatatgtggagaaattctacaggattaaaaagaacatcgatcagtgctcagagattgtgaaatgcagtgttagctccctgggattcaatgttcattaaaaatatccaagatttaaatgccatagaaatgtaggtcctcagaaagtgtataataagaaacttatttctcatatcaacttagtcaataagaaaatatattctttcaaagg

SEQ ID NO: 352927 - DNA, 3101 bp, Homo sapiens
ctagactagcattttagtggtgcttcaggagagaaaggaaactaggagtgtaaataactgatgtgttgaactggaaaccctgttgtacctctcttgtatggatctatctctacattgtgttatagtcttccctgccctgtaacagctctgtgaagcagtacagtgacatttaaccttctgttgatcattcagagtcctccttatgaaaatacttgtttaccttggaattattaagctattaagctattaccttggaattattaagtaaagctatttgttcttccataatgaggaccccagtcattttgctgggattctttaaacctttcttcgtggccgcctctgtccctggctgcctttcatcctatgtatttgtggtgagagtgccacattacagcacgttagcttctgatgtactcttttcaaatggccagccctggtgactctgccgggcattgtttgtttgccacccccccacacatccctgctccagttgattttctgctctttcccactcctcccaggatttgacctttgtggattccatcagccaggctccaggtccccaagcttccagttgggtttggccaattgaagacccctcccctgaccagaggttggaggctgggaggggaaatgggaggtgctttatccccccagctccctcccttgccaggtctcaggtcaatagtgcctgtgtttttcaccctaaaaccacagctcctgccggcagtcccctcctacaggtctctctgggttccaggagccctcccacctcctccctggggattggtggtcacagctcccactgttgctggctgcaggatgcttcacctttccttgagggtttctcttcatcttgctcacccttggaaacggtcctttcctcagtctctcctgttaccagtggagtgtgcatttgtttcctgctgggactgtgatcaatacagcaaccttttctgatttgcatctaaaacaaggatactcaagcagagagggtatcaacatttaaaaaaataaaacaagaataaatagtccctgagtgagccctgagagactctcttaggcgagagtctgggtgtgagctttgtgacttctctaggctacgcaagggcttttgtttgttcatgtcgatgtttttaactataatgcagataatagagggcaatagattagtgacttctgtacttactggagtgatttgagaaggaaaataagcatgtaaatcaagggaagccaggatcactcactctcctggtcccagtcagccctcgtttttgtttaatttgtgtatttcgaagcacacatatctctagggaagaaaatgaaatcaagaactcctcctggccaccggtttcctgaagcatgaaaaggaagcatttcataaatgctttgtaaagaagacaacaggaaggggtagtgtcactggctggcaagagctgctgttgtggtatttcacagacaagggaggtgacatggcacatgggggctgaggtcccagccagaggccacacaggcacaggcctcagagcccaggcctccctctggcctgtagaccctcagccctactggacaggaggaaaaggcctaggggacattgcccccatttcacagagaggaggctgaagccagtgaagcagagagttgcagcttcagtggggagacactgttatgccccgcctgtcttattcatgcttcttttacctgtagggatttttttttacatggctacccttgagtgatagagccttcatcagcttagcttgtcctcttgcagcctacgccactctgtgccctttagccaaggaagcccagctgaggccccgcagcgtccctgcccagcagagctacaggaggcccgaggccccttcctgttcactcttgctctatagacgccacgctgcaaagcagatgtgcagggacaccacctgaagacccagcctgcagctcagccctacacactgtggatggtggagatcccagagggccaagagaagcttattgagacttctctgcactgcccctcccacagcaggaggttcatggcccatgcatttctgggagggttgacagggcccaggttgtggaatacctgtctgtgagccccatgtcctgtcttgtcccagctgcctgtagtttgacagagtatgctagaggtcagccattgctagggaggctgccactaaccacacagagaggaaggaaaattctcagccacagcacttagagctgagcctgacatggtcctcagcaagatgttgcaagttcctaatctgaacacagaggccagggagtaagcatcatctggagcccagagctgactgtcattacccacaaacataaacaccctgagtctggccttctccccaccctgccgaggttgtcagagcctcagcactggctctgccctgggtggcagcccctgggaagcccagctgccacctctctacaaatggccctgtagaagctgtgctcagtgatccacttcctggggggggctgggcccaccttgttgccattacaccccattacaaactgatgcaaccagctttcaacagacactgccaaggaagatacacattacaacagcatgctgcaatacctctgcctgtgcaagagactgacccacatccaaaaaatggacatcttcccaccccagtgtctcactccactgagctggaagtggcctttgtcaggaccctgtgaggtcttgagtggatctgcttttcccaagatattaaaccagtgactttaaatcctggctgcatattaccatcatctgggatattaaaaaatactgatgcctggatcttgctcccacccaaagagtctgactgaattgatggggttttcaaacattttttaagtgtttgttgaaggatgacatatatgcaaaaaaaaaaaaaaagcacaaaccataagtgtaaagctcagtgaattttcacaaaatgaatttaccccgagtaaccagcatccaaatcatgaaacagaacatcaccagcaacccctggtaccccttccacttactacctggctccaaaggctaatgtccattctggcttctaatggtgtacagtcatttctcctgttttcaaacttta

SEQ ID NO: 352928 - DNA, 1173 bp, Homo sapiens
ttcgctttcctgccgatgtcgttgaggaaaatgaaagcggtcgtggccaggactggcgcagctgccgtttcaggcgaggggcgcagaatgcagcggccgccagcctggagcgcgggccctggggccgcaacccgcgccgggcgaggtggcagcacaccctgggccccccactccccgccgcaagtcctgaggatggccagcagagaaacaagaaaatggactccctggctgctggagagttgaatgccagccaccagccatgggtgccagagtttgtagcctattggaggaaaacacaccaagccccgaacagcacagtgaatggatagggcagcagatgagctctgccccacgccggccctgtttcagaacagcactccagagtgccgcactgcttgctgaaccacagctgttactgcagattgaggagcctcagagggaacagaagataaagatcattatggaatttaggattgcaggacattctttgacatttcataacagccaggggagatcaactgtggtcaggggacaggggcaggaagaaaccatggccaaggcctgtctggcaggacttgaaggggcagagggacccttgcaaatgaccctgcctggaacccacccccagttggcccctgtatagcactgatccagctggggcttttatcccaggataccctcttcagggatgcctgtatttgttgattatctgccatatgcctggtcactgcagaatacaaggaagaaaatagccttcagcagaagctgagacaggagcctagaggatggacagtaaggagtcgaaggctcaggatgaggctttcctgactttctcccctaggggactgatgttctctactggtacagaccttgttttattcatccttatgtccctaacctggaatgggcccagggtgacagttataataagtgtttgtcaagtgagcaagtgtgtggagtgtgcattgtagagagtaaggtctctacaggatcctgctggagaggcagcccactgggctcaccacttctccagaggagggactggtcccttgccagacagccctgccagctggagcaggcttcctcaggggtgcctggagctgttgaccatggctgttgccctctggcccctcttgggaagagcaacctgtcaggtgttaaagacggtcttca

SEQ ID NO: 352929 - DNA, 608 bp, Homo sapiens
ttcgctttcctgccgatgtcgttgaggaaaatgaaagcggtcgtggccaggactggcgcagctgccgtttcaggcgaggggcgcagaatgcagcggccgccagcctggagcgcgggccctggggccgcaacccgcgccgggcgaggtggcagcacaccctgggccccccactccccgccgcaagtcctgaggatggccagcagagaaacaagaaaatggactccctggctgctggagagttgaatgccagccaccagccatgggtgccagagtttgtagcctattggaggaaaacacaccaaggtaagacaacaataagaccacatcttgtttgggactgcccaacgtagccttggaaactgtccaaggaagaccagggtgctaagtgttggcagctggataaagggaaggcccaagagactttgcgttgacttcctggatagagtgagagtcctggggacagtgaggcagctcagtatagtcagtgatggctgtgaggtctttagactcaggaagacagtgttgcacttgggaaaatgtagcagcctcccccaagccagttggttgtgggcccacagcatggccctcttgccctcacttccctacct

SEQ ID NO: 352930 - DNA, 539 bp, Homo sapiens
cctcctcccaccccccacccaactgcaaggtagggaggctactgaggggccagcctgtggattccagagggcacagggctatctggggtggaggggacagggttctgaagacagaaggtgggaaggtcacactgtaagggcagacataccccatttcttctacctaaacaactgggtgtaataccactgtttccctgagaaacactttcaggattaaaaagtatataagtaaagaaaataaagcatataagtgatgtggctttaatacgtgttatttgctcatctgtatttcttactctttgcacaattaaaccatgttccttttacttatgtacatttttaataaaagaaagttgttaatgactcagccttctatctccagtactgccgaaagagacaagcggtcctgctgcatgtcatgcacacactggcccttgttctggggactttgaccttggctgctggttggtcatggcctgttttgcccagggctctactgcaggggcagggttggttattcctctgtgccctttttgcct

SEQ ID NO: 352931 - DNA, 8310 bp, Homo sapiens
ccaggagagcggcgtggacgcgtgcgggcctagaggcccacgtgatccgcagggcggccgaggcaggaagctgtgagtgcgcggttgcggggtcgcattgtggctacggctttgcgtccccggcgggcagccccaggctggtccccgcctccgctctccccaccggcggggaaagcagctggtgtgggaggaaaggctccatcccccgccccctctctcccgctgttggctggcaggatcttttggcagtcctgtggcctcgctccccgcccggatcctcctgaccctgagattcgcgggtctcacgtcccgtgcacgccttgcttcggcctcagttaagcctttgtggactccaggtccctggtgagattagaaacgtttgcaaacatgtcccggatcgaaaagatgagcattctgggcgtgcggagttttggaatagaggacaaagataagcaaattatcactttcttcagcccccttacaattttggttggacccaatggggcgggaaagacgaccatcattgaatgtctaaaatatatttgtactggagatttccctcctggaaccaaaggaaatacatttgtacacgatcccaaggttgctcaagaaacagatgtgagagcccagattcgtctgcaatttcgtgatgtcaatggagaacttatagctgtgcaaagatctatggtgtgtactcagaaaagcaaaaagacagaatttaaaactctggaaggagtcattactagaacaaagcatggtgaaaaggtcagtctgagctctaagtgtgcagaaattgaccgagaaatgatcagttctcttggggtttccaaggctgtgctaaataatgtcattttctgtcatcaagaagattctaattggcctttaagtgaaggaaaggctttgaagcaaaagtttgatgagattttttcagcaacaagatacattaaagccttagaaacacttcggcaggtacgtcagacacaaggtcagaaagtaaaagaatatcaaatggaactaaaatatctgaagcaatataaggaaaaagcttgtgagattcgtgatcagattacaagtaaggaagcccagttaacatcttcaaaggaaattgtcaaatcctatgagaatgaacttgatccattgaagaatcgtctaaaagaaattgaacataatctctctaaaataatgaaacttgacaatgaaattaaagccttggatagccgaaagaagcaaatggagaaagataatagtgaactggaagagaaaatggaaaaggtttttcaagggactgatgagcaactaaatgacttatatcacaatcaccagagaacagtaagggagaaagaaaggaaattggtagactgtcatcgtgaactggaaaaactaaataaagaatctaggcttctcaatcaggaaaaatcagaactgcttgttgaacagggtcgtctacagctgcaagcagatcgccatcaagaacatatccgagctagagattcattaattcagtctttggcaacacagctagaattggatggctttgagcgtggaccattcagtgaaagacagattaaaaattttcacaaacttgtgagagagagacaagaaggggaagcaaaaactgccaaccaactgatgaatgactttgcagaaaaagagactctgaaacaaaaacagatagatgagataagagataagaaaactggactgggaagaataattgagttaaaatcagaaatcctaagtaagaagcagaatgagctgaaaaatgtgaagtatgaattacagcagttggaaggatcttcagacaggattcttgaactggaccaggagctcataaaagctgaacgtgagttaagcaaggctgagaaaaacagcaatgtagaaaccttaaaaatggaagtaataagtctccaaaatgaaaaagcagacttagacaggaccctgcgtaaacttgaccaggagatggagcagttaaaccatcatacaacaacacgtacccaaatggagatgctgaccaaagacaaagctgacaaagatgaacaaatcagaaaaataaaatctaggcacagtgatgaattaacctcactgttgggatattttcccaacaaaaaacagcttgaagactggctacatagtaaatcaaaagaaattaatcagaccagggacagacttgccaaattgaacaaggaactagcttcatctgagcagaataaaaatcatataaataatgaactaaaaagaaaggaagagcagttgtccagttacgaagacaagctgtttgatgtttgtggtagccaggattttgaaagtgatttagacaggcttaaagaggaaattgaaaaatcatcaaaacagcgagccatgctggctggagccacagcagtttactcccagttcattactcagctaacagacgaaaaccagtcatgttgccccgtttgtcagagagtttttcagacagaggctgagttacaagaagtcatcagtgatttgcagtctaaactgcgacttgctccagataaactcaagtcaacagaatcagagctaaaaaaaaaggaaaagcggcgtgatgaaatgctgggacttgtgcccatgaggcaaagcataattgatttgaaggagaaggaaataccagaattaagaaacaaactgcagaatgtcaatagagacatacagcgcctaaagaacgacatagaagaacaagaaacactcttgggtacaataatgcctgaagaagaaagtgccaaagtatgcctgacagatgttacaattatggagaggttccagatggaacttaaagatgttgaaagaaaaattgcacaacaagcagctaagctacaaggaatagacttagatcgaactgtccaacaagtcaaccaggagaaacaagagaaacagcacaagttagacacagtttctagtaagattgaattgaatcgtaagcttatacaggaccagcaggaacagattcaacatctaaaaagtacaacaaatgagctaaaatctgagaaacttcagatatccactaatttgcaacgtcgtcagcaactggaggagcagactgtggaattatccactgaagttcagtctttgtacagagagataaaggatgctaaagagcaggtaagccctttggaaacaacattggaaaagttccagcaagaaaaagaagaattaatcaacaaaaaaaatacaagcaacaaaatagcacaggataaactgaatgatattaaagagaaggttaaaaatattcatggctatatgaaagacattgagaattatattcaagatgggaaagacgactataagaagcaaaaagaaactgaacttaataaagtaatagctcaactaagtgaatgcgagaaacacaaagaaaagataaatgaagatatgagactcatgagacaagatattgatacacagaagatacaagaaaggtggctacaagataaccttactttaagaaaaagaaatgaggaactaaaagaagttgaagaagaaagaaaacaacatttgaaggaaatgggtcaaatgcaggttttgcaaatgaaaagtgaacatcagaagttggaagagaacatagacaatataaaaagaaatcataatttggcattagggcgacagaaaggttatgaagaagaaattattcattttaagaaagaacttcgagaaccacaatttcgggatgctgaggaaaagtatagagaaatgatgattgttatgaggacaacagaacttgtgaacaaggatctggatatttattataagactcttgaccaagcaataatgaaatttcacagtatgaaaatggaagaaatcaataaaattatacgtgacctgtggcgaagtacctatcgtggacaagatattgaatacatagaaatacggtctgatgccgatgaaaatgtatcagcttctgataaaaggcggaattataactaccgagtggtgatgctgaagggagacacagccttggatatgcgaggacgatgcagtgctggacaaaaggtattagcctcactcatcattcgcctggccctggctgaaacgttctgcctcaactgtggcatcattgccttggatgagccaacaacaaatcttgaccgagaaaacattgaatctcttgcacatgctctggttgagataataaaaagtcgctcacagcagcgtaacttccagcttctggtaatcactcatgatgaagattttgtggagcttttaggacgttctgaatatgtggagaaattctacaggattaaaaagaacatcgatcagtgctcagagattgtgaaatgcagtgttagctccctgggattcaatgttcattaaaaatatccaagatttaaatgccatagaaatgtaggtcctcagaaagtgtataataagaaacttatttctcatatcaacttagtcaataagaaaatatattctttcaaaggaacattgtgtctaggattttggatgttgagaggttctaaaatcatgaaacttgtttcactgaaaattggacagattgcctgtttctgatttgctgctcttcatcccattccaggcagcctctgtcaggccttcagggttcagcagtacagccgagactcgactctgtgcctccctccccagtgcaaatgcatgcttcttctcaaagcactgttgagaaggagataattactgccttgaaaatttatggttttggtatttttttaaatcatagttaaatgttacctctgaatttacttccttgcatgtggtttgaaaaactgagtattaatatctgaggatgaccagaaatggtgagatgtatgtttggctctgcttttaactttataaatccagtgacctctctctctgggacttggtttccccaactaaaatttgaagtagttgaatggggtctcaaagtttgacaggaaccttaagtaatcatctaagtcagtacccaccaccttcttctcctacatatcccttccagatggtcatccagactcagagctctctctacagagaggaaattctccactgtgcacacccacctttggaaagctctgaccacttgaggcctgatctgcccatcgtgaagaagcctgtaacactcctctgcgtctatcctgtgtagcatactggcttcaccatcaatcctgattcctctctaagtgggcattgccatgtggaaggcaagccaggctcactcacagagtcaaggcctgctccctgtagggtccaaccagacctggaagaacaggcctctccatttgctcttcagatgccacttctaagaaaagcctaatcacagtttttcctggaattgccagctgacatcttgaatccttccattccacacagaatgcaaccaagtcacacgcttttgaattatgctttgtagagttttgtcattcagagtcagccaggaccataccgggtcttgattcagtcacatggcatggttttgtgccatctgtagctataatgagcatgtttgcctagacagcttttctcaactgggtccagaagagaattaagccctaaggtcctaaggcatctatctgtgctaggttaaatggttggcccccaaagatagacaggtcctgatttctagaacccgtgactgttactttatacagcaaaggaaactttgcagatgtgattaaagctaaggaccttaagacagagtatcctgggggtggtggtggggtgggggggggtcctaaatgtaatcacgagtaagattaagagcaaatcaattctagtcatatattaaacatccacaataaccaagatatttttatcccaagaatgcaagatttcagaaaatgaaaaatctgttgataaatccatcactataataaaaccgaaggtgaaaaaaattctgaaaaaattctagcagctatatttgataaaattcaacatctcctagctttagcaaactcacagttttgcaaataatattttcttaatgttatctgttgctaaatcaaaattaaacagtcatcttaactgcaaaataaaacatttctcagtaaatattaaagccagttaccttctatcaacatgttaatgaaagtgctagttgttgcagcaaagaataacaaaggcaatacacgatcaatataggcagtgaaacaaaagtatcatttgcaagttaaaacagacttcccaattttaaatctggtttccccctgaatatgtggcatccttggcagcacttctgagagtggctgctttcattccaagaagcccatgggtttggaggtgggataggtgcctttctggcttctcattgctgcttctagatcagtctccaaatatcccccttccccacattggaatgaatagccatcacagcatggatggaggttagaatgagccagactgcctgggctcaaatcctagcacaccactcactagctggggaccttgagcaagttatttgtcctgttttctgtttccttatatgtaaaagtgggtaaaatggtacatattttgtagggttgttatgaagattgaatgacattatttacaaactgcttagaactgcttgccacctactaaatactgtgtaagtgttcaagaaaaagctgtcttcatttcactcttgttgcagttatctttcattcccagcttggtcactccctcttatttgttgaagagtttagctcccggttcagtgtcaccccattactaataatcattgctgatttcaatatccaagtgatggtctaatacaactccttggcctctcagtcttttttattttttgaggtggagtcttgctctgtcacccaggctggagtgcaatggcaccatctcagctcactgcaacctctgcctccctgatacaagcaatcctcctgcctcagcctcccaagtagctaggattacaggcatgtaccaccacaccaggctaatttttgtattttagtagagacagggtttcgccttgttggccaggctggtcttgaacgtctggcctcaagtgatctgcctaccttggcctccctcagcccctttttgtttcctccagtgagaagatactcagttctatggtcttattctagagccccgtccttttaataacaataactgcacccctccaaaatctcagttttaagcatctcactctccaataaccccatggtgtctacaattttcctgtggtcctcaaccccagcaattctttgaccccactgagatttcaatccattgattctatggctttttcacaggttgtttccctgatgcctgtacttctctccttattcaacttaaattccatggctcatcattatgtcaccctccactgcattgtactcaaactgtcccgacaatccccagccctactggaatccagctctgcctcctccctgcaacacctgcacatcccgtttcctttgctgtttcctcctcatttccctggcccctcaatgtcacaggttttagtactcagagtctgcacctcttttcttctctgtgctcacttatttggtgatctcatccagtctcatagctttaaattatcttagtttgggttctcccagaagcagagcgtaaaacaatgcttcacgtgaaagtaatcagtaggaaattggggaaattgtgtatgaaagagaaagcagccaatgaaaagtttactattaagccagctacggtaagtgggcaattagagtttggtgccccagggagactctggggagtttggcaaaatatatacctcagaattatcccacctaaggggcaagagacctggagtatttatataacaacttgccagggttactgagtgaaggctattctagcacatgttagttactggcttgccatgtgtaccgacacagctgctttccacagtttaaaaagaaagtctgagcaacatagtgacatcccatctttacataaaatttttaaaaaattagcaaggcatggtggtgcacacctgtggtctcagctacttggctgagataggatccctggagtctgagggttcaaggctgcagtgagctgtgatttgtgccactgcaccccagcctgggtgggtggcagagtgagaccctgtctaaaaagacaaaaaaaaaaaaaaaaaaaaaagcagcagcagctgaaagttggcaggagcacactggcagttcctaggatcataggatataggcagggcactgaccactcctacaaccaccatctatacactgataactcataaatgtttgtgtccaatccagatctctcctaaatgcttgactgatatattcagctgcctgtggataactgggcatctatctgcacttgaatatctaataaacgtctaaaacttaaaatgaccaa

SEQ ID NO: 352932 - DNA, 8279 bp, Homo sapiens
ccaggagagcggcgtggacgcgtgcgggcctagaggcccacgtgatccgcagggcggccgaggcaggaagctgtgagtgcgcggttgcggggtcgcattgtggctacggctttgcgtccccggcgggcagccccaggctggtccccgcctccgctctccccaccggcggggaaagcagctggtgtgggaggaaaggctccatcccccgccccctctctcccgctgttggctggcaggatcttttggcagtcctgtggcctcgctccccgcccggatcctcctgaccctgagattcgcgggtctcacgtcccgtgcacgccttgcttcggcctcagttaagcctttgtggactccaggtccctggtgagattagaaacgtttgcaaacatgtcccggatcgaaaagatgagcattctgggcgtgcggagttttggaatagaggacaaagataagcaaattatcactttcttcagcccccttacaattttggttggacccaatggggcgggaaagacgaccatcattgaatgtctaaaatatatttgtactggagatttccctcctggaaccaaaggaaatacatttgtacacgatcccaaggttgctcaagaaacagatgtgagagcccagattcgtctgcaatttcgtgatgtcaatggagaacttatagctgtgcaaagatctatggtgtgtactcagaaaagcaaaaagacagaatttaaaactctggaaggagtcattactagaacaaagcatggtgaaaaggtcagtctgagctctaagtgtgcagaaattgaccgagaaatgatcagttctcttggggtttccaaggctgtgctaaataatgtcattttctgtcatcaagaagattctaattggcctttaagtgaaggaaaggctttgaagcaaaagtttgatgagattttttcagcaacaaggtacgtcagacacaaggtcagaaagtaaaagaatatcaaatggaactaaaatatctgaagcaatataaggaaaaagcttgtgagattcgtgatcagattacaagtaaggaagcccagttaacatcttcaaaggaaattgtcaaatcctatgagaatgaacttgatccattgaagaatcgtctaaaagaaattgaacataatctctctaaaataatgaaacttgacaatgaaattaaagccttggatagccgaaagaagcaaatggagaaagataatagtgaactggaagagaaaatggaaaaggtttttcaagggactgatgagcaactaaatgacttatatcacaatcaccagagaacagtaagggagaaagaaaggaaattggtagactgtcatcgtgaactggaaaaactaaataaagaatctaggcttctcaatcaggaaaaatcagaactgcttgttgaacagggtcgtctacagctgcaagcagatcgccatcaagaacatatccgagctagagattcattaattcagtctttggcaacacagctagaattggatggctttgagcgtggaccattcagtgaaagacagattaaaaattttcacaaacttgtgagagagagacaagaaggggaagcaaaaactgccaaccaactgatgaatgactttgcagaaaaagagactctgaaacaaaaacagatagatgagataagagataagaaaactggactgggaagaataattgagttaaaatcagaaatcctaagtaagaagcagaatgagctgaaaaatgtgaagtatgaattacagcagttggaaggatcttcagacaggattcttgaactggaccaggagctcataaaagctgaacgtgagttaagcaaggctgagaaaaacagcaatgtagaaaccttaaaaatggaagtaataagtctccaaaatgaaaaagcagacttagacaggaccctgcgtaaacttgaccaggagatggagcagttaaaccatcatacaacaacacgtacccaaatggagatgctgaccaaagacaaagctgacaaagatgaacaaatcagaaaaataaaatctaggcacagtgatgaattaacctcactgttgggatattttcccaacaaaaaacagcttgaagactggctacatagtaaatcaaaagaaattaatcagaccagggacagacttgccaaattgaacaaggaactagcttcatctgagcagaataaaaatcatataaataatgaactaaaaagaaaggaagagcagttgtccagttacgaagacaagctgtttgatgtttgtggtagccaggattttgaaagtgatttagacaggcttaaagaggaaattgaaaaatcatcaaaacagcgagccatgctggctggagccacagcagtttactcccagttcattactcagctaacagacgaaaaccagtcatgttgccccgtttgtcagagagtttttcagacagaggctgagttacaagaagtcatcagtgatttgcagtctaaactgcgacttgctccagataaactcaagtcaacagaatcagagctaaaaaaaaaggaaaagcggcgtgatgaaatgctgggacttgtgcccatgaggcaaagcataattgatttgaaggagaaggaaataccagaattaagaaacaaactgcagaatgtcaatagagacatacagcgcctaaagaacgacatagaagaacaagaaacactcttgggtacaataatgcctgaagaagaaagtgccaaagtatgcctgacagatgttacaattatggagaggttccagatggaacttaaagatgttgaaagaaaaattgcacaacaagcagctaagctacaaggaatagacttagatcgaactgtccaacaagtcaaccaggagaaacaagagaaacagcacaagttagacacagtttctagtaagattgaattgaatcgtaagcttatacaggaccagcaggaacagattcaacatctaaaaagtacaacaaatgagctaaaatctgagaaacttcagatatccactaatttgcaacgtcgtcagcaactggaggagcagactgtggaattatccactgaagttcagtctttgtacagagagataaaggatgctaaagagcaggtaagccctttggaaacaacattggaaaagttccagcaagaaaaagaagaattaatcaacaaaaaaaatacaagcaacaaaatagcacaggataaactgaatgatattaaagagaaggttaaaaatattcatggctatatgaaagacattgagaattatattcaagatgggaaagacgactataagaagcaaaaagaaactgaacttaataaagtaatagctcaactaagtgaatgcgagaaacacaaagaaaagataaatgaagatatgagactcatgagacaagatattgatacacagaagatacaagaaaggtggctacaagataaccttactttaagaaaaagaaatgaggaactaaaagaagttgaagaagaaagaaaacaacatttgaaggaaatgggtcaaatgcaggttttgcaaatgaaaagtgaacatcagaagttggaagagaacatagacaatataaaaagaaatcataatttggcattagggcgacagaaaggttatgaagaagaaattattcattttaagaaagaacttcgagaaccacaatttcgggatgctgaggaaaagtatagagaaatgatgattgttatgaggacaacagaacttgtgaacaaggatctggatatttattataagactcttgaccaagcaataatgaaatttcacagtatgaaaatggaagaaatcaataaaattatacgtgacctgtggcgaagtacctatcgtggacaagatattgaatacatagaaatacggtctgatgccgatgaaaatgtatcagcttctgataaaaggcggaattataactaccgagtggtgatgctgaagggagacacagccttggatatgcgaggacgatgcagtgctggacaaaaggtattagcctcactcatcattcgcctggccctggctgaaacgttctgcctcaactgtggcatcattgccttggatgagccaacaacaaatcttgaccgagaaaacattgaatctcttgcacatgctctggttgagataataaaaagtcgctcacagcagcgtaacttccagcttctggtaatcactcatgatgaagattttgtggagcttttaggacgttctgaatatgtggagaaattctacaggattaaaaagaacatcgatcagtgctcagagattgtgaaatgcagtgttagctccctgggattcaatgttcattaaaaatatccaagatttaaatgccatagaaatgtaggtcctcagaaagtgtataataagaaacttatttctcatatcaacttagtcaataagaaaatatattctttcaaaggaacattgtgtctaggattttggatgttgagaggttctaaaatcatgaaacttgtttcactgaaaattggacagattgcctgtttctgatttgctgctcttcatcccattccaggcagcctctgtcaggccttcagggttcagcagtacagccgagactcgactctgtgcctccctccccagtgcaaatgcatgcttcttctcaaagcactgttgagaaggagataattactgccttgaaaatttatggttttggtatttttttaaatcatagttaaatgttacctctgaatttacttccttgcatgtggtttgaaaaactgagtattaatatctgaggatgaccagaaatggtgagatgtatgtttggctctgcttttaactttataaatccagtgacctctctctctgggacttggtttccccaactaaaatttgaagtagttgaatggggtctcaaagtttgacaggaaccttaagtaatcatctaagtcagtacccaccaccttcttctcctacatatcccttccagatggtcatccagactcagagctctctctacagagaggaaattctccactgtgcacacccacctttggaaagctctgaccacttgaggcctgatctgcccatcgtgaagaagcctgtaacactcctctgcgtctatcctgtgtagcatactggcttcaccatcaatcctgattcctctctaagtgggcattgccatgtggaaggcaagccaggctcactcacagagtcaaggcctgctccctgtagggtccaaccagacctggaagaacaggcctctccatttgctcttcagatgccacttctaagaaaagcctaatcacagtttttcctggaattgccagctgacatcttgaatccttccattccacacagaatgcaaccaagtcacacgcttttgaattatgctttgtagagttttgtcattcagagtcagccaggaccataccgggtcttgattcagtcacatggcatggttttgtgccatctgtagctataatgagcatgtttgcctagacagcttttctcaactgggtccagaagagaattaagccctaaggtcctaaggcatctatctgtgctaggttaaatggttggcccccaaagatagacaggtcctgatttctagaacccgtgactgttactttatacagcaaaggaaactttgcagatgtgattaaagctaaggaccttaagacagagtatcctgggggtggtggtggggtgggggggggtcctaaatgtaatcacgagtaagattaagagcaaatcaattctagtcatatattaaacatccacaataaccaagatatttttatcccaagaatgcaagatttcagaaaatgaaaaatctgttgataaatccatcactataataaaaccgaaggtgaaaaaaattctgaaaaaattctagcagctatatttgataaaattcaacatctcctagctttagcaaactcacagttttgcaaataatattttcttaatgttatctgttgctaaatcaaaattaaacagtcatcttaactgcaaaataaaacatttctcagtaaatattaaagccagttaccttctatcaacatgttaatgaaagtgctagttgttgcagcaaagaataacaaaggcaatacacgatcaatataggcagtgaaacaaaagtatcatttgcaagttaaaacagacttcccaattttaaatctggtttccccctgaatatgtggcatccttggcagcacttctgagagtggctgctttcattccaagaagcccatgggtttggaggtgggataggtgcctttctggcttctcattgctgcttctagatcagtctccaaatatcccccttccccacattggaatgaatagccatcacagcatggatggaggttagaatgagccagactgcctgggctcaaatcctagcacaccactcactagctggggaccttgagcaagttatttgtcctgttttctgtttccttatatgtaaaagtgggtaaaatggtacatattttgtagggttgttatgaagattgaatgacattatttacaaactgcttagaactgcttgccacctactaaatactgtgtaagtgttcaagaaaaagctgtcttcatttcactcttgttgcagttatctttcattcccagcttggtcactccctcttatttgttgaagagtttagctcccggttcagtgtcaccccattactaataatcattgctgatttcaatatccaagtgatggtctaatacaactccttggcctctcagtcttttttattttttgaggtggagtcttgctctgtcacccaggctggagtgcaatggcaccatctcagctcactgcaacctctgcctccctgatacaagcaatcctcctgcctcagcctcccaagtagctaggattacaggcatgtaccaccacaccaggctaatttttgtattttagtagagacagggtttcgccttgttggccaggctggtcttgaacgtctggcctcaagtgatctgcctaccttggcctccctcagcccctttttgtttcctccagtgagaagatactcagttctatggtcttattctagagccccgtccttttaataacaataactgcacccctccaaaatctcagttttaagcatctcactctccaataaccccatggtgtctacaattttcctgtggtcctcaaccccagcaattctttgaccccactgagatttcaatccattgattctatggctttttcacaggttgtttccctgatgcctgtacttctctccttattcaacttaaattccatggctcatcattatgtcaccctccactgcattgtactcaaactgtcccgacaatccccagccctactggaatccagctctgcctcctccctgcaacacctgcacatcccgtttcctttgctgtttcctcctcatttccctggcccctcaatgtcacaggttttagtactcagagtctgcacctcttttcttctctgtgctcacttatttggtgatctcatccagtctcatagctttaaattatcttagtttgggttctcccagaagcagagcgtaaaacaatgcttcacgtgaaagtaatcagtaggaaattggggaaattgtgtatgaaagagaaagcagccaatgaaaagtttactattaagccagctacggtaagtgggcaattagagtttggtgccccagggagactctggggagtttggcaaaatatatacctcagaattatcccacctaaggggcaagagacctggagtatttatataacaacttgccagggttactgagtgaaggctattctagcacatgttagttactggcttgccatgtgtaccgacacagctgctttccacagtttaaaaagaaagtctgagcaacatagtgacatcccatctttacataaaatttttaaaaaattagcaaggcatggtggtgcacacctgtggtctcagctacttggctgagataggatccctggagtctgagggttcaaggctgcagtgagctgtgatttgtgccactgcaccccagcctgggtgggtggcagagtgagaccctgtctaaaaagacaaaaaaaaaaaaaaaaaaaaaagcagcagcagctgaaagttggcaggagcacactggcagttcctaggatcataggatataggcagggcactgaccactcctacaaccaccatctatacactgataactcataaatgtttgtgtccaatccagatctctcctaaatgcttgactgatatattcagctgcctgtggataactgggcatctatctgcacttgaatatctaataaacgtctaaaacttaaaatgaccaa

SEQ ID NO: 352933 - DNA, 6634 bp, Homo sapiens
ccaggagagcggcgtggacgcgtgcgggcctagaggcccacgtgatccgcagggcggccgaggcaggaagctgtgagtgcgcggttgcggggtcgcattgtggctacggctttgcgtccccggcgggcagccccaggctggtccccgcctccgctctccccaccggcggggaaagcagctggtgtgggaggaaaggctccatcccccgccccctctctcccgctgttggctggcaggatcttttggcagtcctgtggcctcgctccccgcccggatcctcctgaccctgagattcgcgggtctcacgtcccgtgcacgccttgcttcggcctcagttaagcctttgtggactccaggtccctggtgagattagaaacgtttgcaaacatgtcccggatcgaaaagatgagcattctgggcgtgcggagttttggaatagaggacaaagataagcaaattatcactttcttcagcccccttacaattttggttggacccaatggggcgggaaagacgaccatcattgaatgtctaaaatatatttgtactggagatttccctcctggaaccaaaggaaatacatttgtacacgatcccaaggttgctcaagaaacagatgtgagagcccagattcgtctgcaatttcgtgatgtcaatggagaacttatagctgtgcaaagatctatggtgtgtactcagaaaagcaaaaagacagaatttaaaactctggaaggagtcattactagaacaaagcatggtgaaaaggtcagtctgagctctaagtgtgcagaaattgaccgagaaatgatcagttctcttggggtttccaaggctgtgctaaataatgtcattttctgtcatcaagaagattctaattggcctttaagtgaaggaaaggctttgaagcaaaagtttgatgagattttttcagcaacaagatacattaaagccttagaaacacttcggcaggtacgtcagacacaaggtcagaaagtaaaagaatatcaaatggaactaaaatatctgaagcaatataaggaaaaagcttgtgagattcgtgatcagattacaagtaaggaagcccagttaacatcttcaaaggaaattgtcaaatcctatgagaatgaacttgatccattgaagaatcgtctaaaagaaattgaacataatctctctaaaataatgaaacttgacaatgaaattaaagccttggatagccgaaagaagcaaatggagaaagataatagtgaactggaagagaaaatggaaaaggtttttcaagggactgatgagcaactaaatgacttatatcacaatcaccagagaacagtaagggagaaagaaaggaaattggtagactgtcatcgtgaactggaaaaactaaataaagaatctaggcttctcaatcaggaaaaatcagaactgcttgttgaacagggtcgtctacagctgcaagcagatcgccatcaagaacatatccgagctagagattcattaattcagtctttggcaacacagctagaattggatggctttgagcgtggaccattcagtgaaagacagattaaaaattttcacaaacttgtgagagagagacaagaaggggaagcaaaaactgccaaccaactgatgaatgactttgcagaaaaagagactctgaaacaaaaacagatagatgagataagagataagaaaactggactgggaagaataattgagttaaaatcagaaatcctaagtaagaagcagaatgagctgaaaaatgtgaagtatgaattacagcagttggaaggatcttcagacaggattcttgaactggaccaggagctcataaaagctgaacgtgagttaagcaaggctgagaaaaacagcaatgtagaaaccttaaaaatggaagtaataagtctccaaaatgaaaaagcagacttagacaggaccctgcgtaaacttgaccaggagatggagcagttaaaccatcatacaacaacacgtacccaaatggagatgctgaccaaagacaaagctgacaaagatgaacaaatcagaaaaataaaatctaggcacagtgatgaattaacctcactgttgggatattttcccaacaaaaaacagcttgaagactggctacatagtaaatcaaaagaaattaatcagaccagggacagacttgccaaattgaacaaggaactagcttcatctgagcagaataaaaatcatataaataatgaactaaaaagaaaggaagagcagttgtccagttacgaagacaagctgtttgatgtttgtggtagccaggattttgaaagtgatttagacaggcttaaagaggaaattgaaaaatcatcaaaacagcgagccatgctggctggagccacagcagtttactcccagttcattactcagctaacagacgaaaaccagtcatgttgccccgtttgtcagagagtttttcagacagaggctgagttacaagaagtcatcagtgatttgcagtctaaactgcgacttgctccagataaactcaagtcaacagaatcagagctaaaaaaaaaggaaaagcggcgtgatgaaatgctgggacttgtgcccatgaggcaaagcataattgatttgaaggagaaggaaataccagaattaagaaacaaactgcagaatgtcaatagagacatacagcgcctaaagaacgacatagaagaacaagaaacactcttgggtacaataatgcctgaagaagaaagtgccaaagtatgcctgacagatgttacaattatggagaggttccagatggaacttaaagatgttgaaagaaaaattgcacaacaagcagctaagctacaaggaatagacttagatcgaactgtccaacaagtcaaccaggagaaacaagagaaacagcacaagttagacacagtttctagtaagattgaattgaatcgtaagcttatacaggaccagcaggaacagattcaacatctaaaaagtacaacaaatgagctaaaatctgagaaacttcagatatccactaatttgcaacgtcgtcagcaactggaggagcagactgtggaattatccactgaagttcagtctttgtacagagagataaaggatgctaaagagcaggtaagccctttggaaacaacattggaaaagttccagcaagaaaaagaagaattaatcaacaaaaaaaatacaagcaacaaaatagcacaggataaactgaatgatattaaagagaaggttaaaaatattcatggctatatgaaagacattgagaattatattcaagatgggaaagacgactataagaagcaaaaagaaactgaacttaataaagtaatagctcaactaagtgaatgcgagaaacacaaagaaaagataaatgaagatatgagactcatgagacaagatattgatacacagaagatacaagaaaggtggctacaagataaccttactttaagaaaaagaaatgaggaactaaaagaagttgaagaagaaagaaaacaacatttgaaggaaatgggtcaaatgcaggttttgcaaatgaaaagtgaacatcagaagttggaagagaacatagacaatataaaaagaaatcataatttggcattagggcgacagaaaggttatgaagaagaaattattcattttaagaaagaacttcgagaaccacaatttcgggatgctgaggaaaagtatagagaaatgatgattgttatgaggacaacagaacttgtgaacaaggatctggatatttattataagactcttgaccaagcaataatgaaatttcacagtatgaaaatggaagaaatcaataaaattatacgtgacctgtggcgaagtacctatcgtggacaagatattgaatacatagaaatacggtctgatgccgatgaaaatgtatcagcttctgataaaaggcggaattataactaccgagtggtgatgctgaagggagacacagccttggatatgcgaggacgatgcagtgctggacaaaaggtattagcctcactcatcattcgcctggccctggctgaaacgttctgcctcaactgtggcatcattgccttggatgagccaacaacaaatcttgaccgagaaaacattgaatctcttgcacatgctctggttgagataataaaaagtcgctcacagcagcgtaacttccagcttctggtaatcactcatgatgaagattttgtggagcttttaggacgttctgaatatgtggagaaattctacaggattaaaaagaacatcgatcagtgctcagagattgtgaaatgcagtgttagctccctgggattcaatgttcattaaaaatatccaagatttaaatgccatagaaatgtaggtcctcagaaagtgtataataagaaacttatttctcatatcaacttagtcaataagaaaatatattctttcaaaggaacattgtgtctaggattttggatgttgagaggttctaaaatcatgaaacttgtttcactgaaaattggacagattgcctgtttctgatttgctgctcttcatcccattccaggcagcctctgtcaggccttcagggttcagcagtacagccgagactcgactctgtgcctccctccccagtgcaaatgcatgcttcttctcaaagcactgttgagaaggagataattactgccttgaaaatttatggttttggtatttttttaaatcatagttaaatgttacctctgaatttacttccttgcatgtggtttgaaaaactgagtattaatatctgaggatgaccagaaatggtgagatgtatgtttggctctgcttttaactttataaatccagtgacctctctctctgggacttggtttccccaactaaaatttgaagtagttgaatggggtctcaaagtttgacaggaaccttaagtaatcatctaagtcagtacccaccaccttcttctcctacatatcccttccagatggtcatccagactcagagctctctctacagagaggaaattctccactgtgcacacccacctttggaaagctctgaccacttgaggcctgatctgcccatcgtgaagaagcctgtaacactcctctgcgtctatcctgtgtagcatactggcttcaccatcaatcctgattcctctctaagtgggcattgccatgtggaaggcaagccaggctcactcacagagtcaaggcctgctccctgtagggtccaaccagacctggaagaacaggcctctccatttgctcttcagatgccacttctaagaaaagcctaatcacagtttttcctggaattgccagctgacatcttgaatccttccattccacacagaatgcaaccaagtcacacgcttttgaattatgctttgtagagttttgtcattcagagtcagccaggaccataccgggtcttgattcagtcacatggcatggttttgtgccatctgtagctataatgagcatgtttgcctagacagcttttctcaactgggtccagaagagaattaagccctaaggtcctaaggcatctatctgtgctaggttaaatggttggcccccaaagatagacaggtcctgatttctagaacccgtgactgttactttatacagcaaaggaaactttgcagatgtgattaaagctaaggaccttaagacagagtatcctgggggtggtggtggggtgggggggggtcctaaatgtaatcacgagtaagattaagagcaaatcaattctagtcatatattaaacatccacaataaccaagatatttttatcccaagaatgcaagatttcagaaaatgaaaaatctgttgataaatccatcactataataaaaccgaaggtgaaaaaaattctgaaaaaattctagcagctatatttgataaaattcaacatctcctagctttagcaaactcacagttttgcaaataatattttcttaatgttatctgttgctaaatcaaaattaaacagtcatcttaactgcaaaataaaacatttctcagtaaatattaaagccagttaccttctatcaacatgttaatgaaagtgctagttgttgcagcaaagaataacaaaggcaatacacgatcaatataggcagtgaaacaaaagtatcatttgcaagttaaaacagacttcccaattttaaatctggtttccccctgaatatgtggcatccttggcagcacttctgagagtggctgctttcattccaagaagcccatgggtttggaggtgggataggtgcctttctggcttctcattgctgcttctagatcaaagagtactggtaaaggtaaatatataggtaatataaaagtataaatgtattttgggggctgggagcagtggctcatgcctgtaatcccaacactttgagaggccgaggtgggcggatcacctgaggtcaggagtttgagaccagcctgcccaacatggtgaaaccctgtctctactaaaaatacaaaaaatcagccaggcgttgtggtgggcgcctgtaatcccagctactcaggaggctgaggcaggagaatctcttgaacccaggaggcggaggttgcggtgagctgagatcacgccactgcactccagccttggtgacaagagcaaaactcggtctcaaaaa

SEQ ID NO: 352934 - DNA, 6844 bp, Homo sapiens
acacatttatctgaaacaaatttctcaaagtagtacatatacatacagcctactccaatatattaccgtctattctgtttcatttttaaaaaatatgctgaatacattaaattgattacatggtagctaatgcatctaaacctgcaaattgaaaaaccatgttatgtgtgagtattgaggttggctaggatgatgtttaagaattaaagtggggataaattgtactagtaagcaaaatctttgatgaatgagagggaatgactgatctggacgcaagtgggatgacagcaacaaggagggggaggatacaaaagaaacagtatttacaggagagtaaggaagtagtatttgtgaaaggactaaagggaattacggggatgttctcttgtcttctttctgtccaatagtcctagcaagcatcttgctgaggcttaacctgggatcaaagaccatgaacccccagaaaccaggcagaattctgtgtacatttttctgggagcaggcccatgagtaggactggcaggtgagtcagtgtcctagggggagagttaaggcagaagtggactagtccctcaacttctgaaaaaaattatttggtcataccaaactcttgtcatgatttgttggcagaatttgtcttgtttttgcctactcaaattttcaaactaatttctcctattttaaaatgaaaatccatatttgctcttattttagcaaggaactagcttcatctgagcagaataaaaatcatataaataatgaactaaaaagaaaggaagagcagttgtccagttacgaagacaagctgtttgatgtttgtggtagccaggattttgaaagtgatttagacaggcttaaagaggaaattgaaaaatcatcaaaacagcgagccatgctggctggagccacagcagtttactcccagttcattactcagctaacagacgaaaaccagtcatgttgccccgtttgtcagagagtttttcagacagaggctgagttacaagaagtcatcagtgatttgcagtctaaactgcgacttgctccagataaactcaagtcaacagaatcagagctaaaaaaaaaggaaaagcggcgtgatgaaatgctgggacttgtgcccatgaggcaaagcataattgatttgaaggagaaggaaataccagaattaagaaacaaactgcagaatgtcaatagagacatacagcgcctaaagaacgacatagaagaacaagaaacactcttgggtacaataatgcctgaagaagaaagtgccaaagtatgcctgacagatgttacaattatggagaggttccagatggaacttaaagatgttgaaagaaaaattgcacaacaagcagctaagctacaaggaatagacttagatcgaactgtccaacaagtcaaccaggagaaacaagagaaacagcacaagttagacacagtttctagtaagattgaattgaatcgtaagcttatacaggaccagcaggaacagattcaacatctaaaaagtacaacaaatgagctaaaatctgagaaacttcagatatccactaatttgcaacgtcgtcagcaactggaggagcagactgtggaattatccactgaagttcagtctttgtacagagagataaaggatgctaaagagcaggtaagccctttggaaacaacattggaaaagttccagcaagaaaaagaagaattaatcaacaaaaaaaatacaagcaacaaaatagcacaggataaactgaatgatattaaagagaaggttaaaaatattcatggctatatgaaagacattgagaattatattcaagatgggaaagacgactataagaagcaaaaagaaactgaacttaataaagtaatagctcaactaagtgaatgcgagaaacacaaagaaaagataaatgaagatatgagactcatgagacaagatattgatacacagaagatacaagaaaggtggctacaagataaccttactttaagaaaaagaaatgaggaactaaaagaagttgaagaagaaagaaaacaacatttgaaggaaatgggtcaaatgcaggttttgcaaatgaaaagtgaacatcagaagttggaagagaacatagacaatataaaaagaaatcataatttggcattagggcgacagaaaggttatgaagaagaaattattcattttaagaaagaacttcgagaaccacaatttcgggatgctgaggaaaagtatagagaaatgatgattgttatgaggacaacagaacttgtgaacaaggatctggatatttattataagactcttgaccaagcaataatgaaatttcacagtatgaaaatggaagaaatcaataaaattatacgtgacctgtggcgaagtacctatcgtggacaagatattgaatacatagaaatacggtctgatgccgatgaaaatgtatcagcttctgataaaaggcggaattataactaccgagtggtgatgctgaagggagacacagccttggatatgcgaggacgatgcagtgctggacaaaaggtattagcctcactcatcattcgcctggccctggctgaaacgttctgcctcaactgtggcatcattgccttggatgagccaacaacaaatcttgaccgagaaaacattgaatctcttgcacatgctctggttgagataataaaaagtcgctcacagcagcgtaacttccagcttctggtaatcactcatgatgaagattttgtggagcttttaggacgttctgaatatgtggagaaattctacaggattaaaaagaacatcgatcagtgctcagagattgtgaaatgcagtgttagctccctgggattcaatgttcattaaaaatatccaagatttaaatgccatagaaatgtaggtcctcagaaagtgtataataagaaacttatttctcatatcaacttagtcaataagaaaatatattctttcaaaggaacattgtgtctaggattttggatgttgagaggttctaaaatcatgaaacttgtttcactgaaaattggacagattgcctgtttctgatttgctgctcttcatcccattccaggcagcctctgtcaggccttcagggttcagcagtacagccgagactcgactctgtgcctccctccccagtgcaaatgcatgcttcttctcaaagcactgttgagaaggagataattactgccttgaaaatttatggttttggtatttttttaaatcatagttaaatgttacctctgaatttacttccttgcatgtggtttgaaaaactgagtattaatatctgaggatgaccagaaatggtgagatgtatgtttggctctgcttttaactttataaatccagtgacctctctctctgggacttggtttccccaactaaaatttgaagtagttgaatggggtctcaaagtttgacaggaaccttaagtaatcatctaagtcagtacccaccaccttcttctcctacatatcccttccagatggtcatccagactcagagctctctctacagagaggaaattctccactgtgcacacccacctttggaaagctctgaccacttgaggcctgatctgcccatcgtgaagaagcctgtaacactcctctgcgtctatcctgtgtagcatactggcttcaccatcaatcctgattcctctctaagtgggcattgccatgtggaaggcaagccaggctcactcacagagtcaaggcctgctccctgtagggtccaaccagacctggaagaacaggcctctccatttgctcttcagatgccacttctaagaaaagcctaatcacagtttttcctggaattgccagctgacatcttgaatccttccattccacacagaatgcaaccaagtcacacgcttttgaattatgctttgtagagttttgtcattcagagtcagccaggaccataccgggtcttgattcagtcacatggcatggttttgtgccatctgtagctataatgagcatgtttgcctagacagcttttctcaactgggtccagaagagaattaagccctaaggtcctaaggcatctatctgtgctaggttaaatggttggcccccaaagatagacaggtcctgatttctagaacccgtgactgttactttatacagcaaaggaaactttgcagatgtgattaaagctaaggaccttaagacagagtatcctgggggtggtggtggggtgggggggggtcctaaatgtaatcacgagtaagattaagagcaaatcaattctagtcatatattaaacatccacaataaccaagatatttttatcccaagaatgcaagatttcagaaaatgaaaaatctgttgataaatccatcactataataaaaccgaaggtgaaaaaaattctgaaaaaattctagcagctatatttgataaaattcaacatctcctagctttagcaaactcacagttttgcaaataatattttcttaatgttatctgttgctaaatcaaaattaaacagtcatcttaactgcaaaataaaacatttctcagtaaatattaaagccagttaccttctatcaacatgttaatgaaagtgctagttgttgcagcaaagaataacaaaggcaatacacgatcaatataggcagtgaaacaaaagtatcatttgcaagttaaaacagacttcccaattttaaatctggtttccccctgaatatgtggcatccttggcagcacttctgagagtggctgctttcattccaagaagcccatgggtttggaggtgggataggtgcctttctggcttctcattgctgcttctagatcagtctccaaatatcccccttccccacattggaatgaatagccatcacagcatggatggaggttagaatgagccagactgcctgggctcaaatcctagcacaccactcactagctggggaccttgagcaagttatttgtcctgttttctgtttccttatatgtaaaagtgggtaaaatggtacatattttgtagggttgttatgaagattgaatgacattatttacaaactgcttagaactgcttgccacctactaaatactgtgtaagtgttcaagaaaaagctgtcttcatttcactcttgttgcagttatctttcattcccagcttggtcactccctcttatttgttgaagagtttagctcccggttcagtgtcaccccattactaataatcattgctgatttcaatatccaagtgatggtctaatacaactccttggcctctcagtcttttttattttttgaggtggagtcttgctctgtcacccaggctggagtgcaatggcaccatctcagctcactgcaacctctgcctccctgatacaagcaatcctcctgcctcagcctcccaagtagctaggattacaggcatgtaccaccacaccaggctaatttttgtattttagtagagacagggtttcgccttgttggccaggctggtcttgaacgtctggcctcaagtgatctgcctaccttggcctccctcagcccctttttgtttcctccagtgagaagatactcagttctatggtcttattctagagccccgtccttttaataacaataactgcacccctccaaaatctcagttttaagcatctcactctccaataaccccatggtgtctacaattttcctgtggtcctcaaccccagcaattctttgaccccactgagatttcaatccattgattctatggctttttcacaggttgtttccctgatgcctgtacttctctccttattcaacttaaattccatggctcatcattatgtcaccctccactgcattgtactcaaactgtcccgacaatccccagccctactggaatccagctctgcctcctccctgcaacacctgcacatcccgtttcctttgctgtttcctcctcatttccctggcccctcaatgtcacaggttttagtactcagagtctgcacctcttttcttctctgtgctcacttatttggtgatctcatccagtctcatagctttaaattatcttagtttgggttctcccagaagcagagcgtaaaacaatgcttcacgtgaaagtaatcagtaggaaattggggaaattgtgtatgaaagagaaagcagccaatgaaaagtttactattaagccagctacggtaagtgggcaattagagtttggtgccccagggagactctggggagtttggcaaaatatatacctcagaattatcccacctaaggggcaagagacctggagtatttatataacaacttgccagggttactgagtgaaggctattctagcacatgttagttactggcttgccatgtgtaccgacacagctgctttccacagtttaaaaagaaagtctgagcaacatagtgacatcccatctttacataaaatttttaaaaaattagcaaggcatggtggtgcacacctgtggtctcagctacttggctgagataggatccctggagtctgagggttcaaggctgcagtgagctgtgatttgtgccactgcaccccagcctgggtgggtggcagagtgagaccctgtctaaaaagacaaaaaaaaaaaaaaaaaaaaaagcagcagcagctgaaagttggcaggagcacactggcagttcctaggatcataggatataggcagggcactgaccactcctacaaccaccatctatacactgataactcataaatgtttgtgtccaatccagatctctcctaaatgcttgactgatatattcagctgcctgtggataactgggcatctatctgcacttgaatatctaataaacgtctaaaacttaaaatgaccaa

SEQ ID NO: 352935 - DNA, 5004 bp, Homo sapiens
gatggcccactctagagtatcccctcctaccccactcaactaagtgaatgcgagaaacacaaagaaaagataaatgaagatatgagactcatgagacaagatattgatacacagaagatacaagaaaggtggctacaagataaccttactttaagaaaaagaaatgaggaactaaaagaagttgaagaagaaagaaaacaacatttgaaggaaatgggtcaaatgcaggttttgcaaatgaaaagtgaacatcagaagttggaagagaacatagacaatataaaaagaaatcataatttggcattagggcgacagaaaggttatgaagaagaaattattcattttaagaaagaacttcgagaaccacaatttcgggatgctgaggaaaagtatagagaaatgatgattgttatgaggacaacagaacttgtgaacaaggatctggatatttattataagactcttgaccaagcaataatgaaatttcacagtatgaaaatggaagaaatcaataaaattatacgtgacctgtggcgaagtacctatcgtggacaagatattgaatacatagaaatacggtctgatgccgatgaaaatgtatcagcttctgataaaaggcggaattataactaccgagtggtgatgctgaagggagacacagccttggatatgcgaggacgatgcagtgctggacaaaaggtattagcctcactcatcattcgcctggccctggctgaaacgttctgcctcaactgtggcatcattgccttggatgagccaacaacaaatcttgaccgagaaaacattgaatctcttgcacatgctctggttgagataataaaaagtcgctcacagcagcgtaacttccagcttctggtaatcactcatgatgaagattttgtggagcttttaggacgttctgaatatgtggagaaattctacaggattaaaaagaacatcgatcagtgctcagagattgtgaaatgcagtgttagctccctgggattcaatgttcattaaaaatatccaagatttaaatgccatagaaatgtaggtcctcagaaagtgtataataagaaacttatttctcatatcaacttagtcaataagaaaatatattctttcaaaggaacattgtgtctaggattttggatgttgagaggttctaaaatcatgaaacttgtttcactgaaaattggacagattgcctgtttctgatttgctgctcttcatcccattccaggcagcctctgtcaggccttcagggttcagcagtacagccgagactcgactctgtgcctccctccccagtgcaaatgcatgcttcttctcaaagcactgttgagaaggagataattactgccttgaaaatttatggttttggtatttttttaaatcatagttaaatgttacctctgaatttacttccttgcatgtggtttgaaaaactgagtattaatatctgaggatgaccagaaatggtgagatgtatgtttggctctgcttttaactttataaatccagtgacctctctctctgggacttggtttccccaactaaaatttgaagtagttgaatggggtctcaaagtttgacaggaaccttaagtaatcatctaagtcagtacccaccaccttcttctcctacatatcccttccagatggtcatccagactcagagctctctctacagagaggaaattctccactgtgcacacccacctttggaaagctctgaccacttgaggcctgatctgcccatcgtgaagaagcctgtaacactcctctgcgtctatcctgtgtagcatactggcttcaccatcaatcctgattcctctctaagtgggcattgccatgtggaaggcaagccaggctcactcacagagtcaaggcctgctccctgtagggtccaaccagacctggaagaacaggcctctccatttgctcttcagatgccacttctaagaaaagcctaatcacagtttttcctggaattgccagctgacatcttgaatccttccattccacacagaatgcaaccaagtcacacgcttttgaattatgctttgtagagttttgtcattcagagtcagccaggaccataccgggtcttgattcagtcacatggcatggttttgtgccatctgtagctataatgagcatgtttgcctagacagcttttctcaactgggtccagaagagaattaagccctaaggtcctaaggcatctatctgtgctaggttaaatggttggcccccaaagatagacaggtcctgatttctagaacccgtgactgttactttatacagcaaaggaaactttgcagatgtgattaaagctaaggaccttaagacagagtatcctgggggtggtggtggggtgggggggggtcctaaatgtaatcacgagtaagattaagagcaaatcaattctagtcatatattaaacatccacaataaccaagatatttttatcccaagaatgcaagatttcagaaaatgaaaaatctgttgataaatccatcactataataaaaccgaaggtgaaaaaaattctgaaaaaattctagcagctatatttgataaaattcaacatctcctagctttagcaaactcacagttttgcaaataatattttcttaatgttatctgttgctaaatcaaaattaaacagtcatcttaactgcaaaataaaacatttctcagtaaatattaaagccagttaccttctatcaacatgttaatgaaagtgctagttgttgcagcaaagaataacaaaggcaatacacgatcaatataggcagtgaaacaaaagtatcatttgcaagttaaaacagacttcccaattttaaatctggtttccccctgaatatgtggcatccttggcagcacttctgagagtggctgctttcattccaagaagcccatgggtttggaggtgggataggtgcctttctggcttctcattgctgcttctagatcagtctccaaatatcccccttccccacattggaatgaatagccatcacagcatggatggaggttagaatgagccagactgcctgggctcaaatcctagcacaccactcactagctggggaccttgagcaagttatttgtcctgttttctgtttccttatatgtaaaagtgggtaaaatggtacatattttgtagggttgttatgaagattgaatgacattatttacaaactgcttagaactgcttgccacctactaaatactgtgtaagtgttcaagaaaaagctgtcttcatttcactcttgttgcagttatctttcattcccagcttggtcactccctcttatttgttgaagagtttagctcccggttcagtgtcaccccattactaataatcattgctgatttcaatatccaagtgatggtctaatacaactccttggcctctcagtcttttttattttttgaggtggagtcttgctctgtcacccaggctggagtgcaatggcaccatctcagctcactgcaacctctgcctccctgatacaagcaatcctcctgcctcagcctcccaagtagctaggattacaggcatgtaccaccacaccaggctaatttttgtattttagtagagacagggtttcgccttgttggccaggctggtcttgaacgtctggcctcaagtgatctgcctaccttggcctccctcagcccctttttgtttcctccagtgagaagatactcagttctatggtcttattctagagccccgtccttttaataacaataactgcacccctccaaaatctcagttttaagcatctcactctccaataaccccatggtgtctacaattttcctgtggtcctcaaccccagcaattctttgaccccactgagatttcaatccattgattctatggctttttcacaggttgtttccctgatgcctgtacttctctccttattcaacttaaattccatggctcatcattatgtcaccctccactgcattgtactcaaactgtcccgacaatccccagccctactggaatccagctctgcctcctccctgcaacacctgcacatcccgtttcctttgctgtttcctcctcatttccctggcccctcaatgtcacaggttttagtactcagagtctgcacctcttttcttctctgtgctcacttatttggtgatctcatccagtctcatagctttaaattatcttagtttgggttctcccagaagcagagcgtaaaacaatgcttcacgtgaaagtaatcagtaggaaattggggaaattgtgtatgaaagagaaagcagccaatgaaaagtttactattaagccagctacggtaagtgggcaattagagtttggtgccccagggagactctggggagtttggcaaaatatatacctcagaattatcccacctaaggggcaagagacctggagtatttatataacaacttgccagggttactgagtgaaggctattctagcacatgttagttactggcttgccatgtgtaccgacacagctgctttccacagtttaaaaagaaagtctgagcaacatagtgacatcccatctttacataaaatttttaaaaaattagcaaggcatggtggtgcacacctgtggtctcagctacttggctgagataggatccctggagtctgagggttcaaggctgcagtgagctgtgatttgtgccactgcaccccagcctgggtgggtggcagagtgagaccctgtctaaaaagacaaaaaaaaaaaaaaaaaaaaaagcagcagcagctgaaagttggcaggagcacactggcagttcctaggatcataggatataggcagggcactgaccactcctacaaccaccatctatacactgataactcataaatgtttgtgtccaatccagatctctcctaaatgcttgactgatatattcagctgcctgtggataactgggcatctatctgcacttgaatatctaataaacgtctaaaacttaaaatgaccaa

SEQ ID NO: 352936 - DNA, 4385 bp, Homo sapiens
ccaggagagcggcgtggacgcgtgcgggcctagaggcccacgtgatccgcagggcggccgaggcaggaagctgtgagtgcgcggttgcggggtcgcattgtggctacggctttgcgtccccggcgggcagccccaggctggtccccgcctccgctctccccaccggcggggaaagcagctggtgtgggaggaaaggctccatcccccgccccctctctcccgctgttggctggcaggatcttttggcagtcctgtggcctcgctccccgcccggatcctcctgaccctgagattcgcgggtctcacgtcccgtgcacgccttgcttcggcctcagttaagcctttgtggactccaggtccctggtgagattagaaacgtttgcaaacatgtcccggatcgaaaagatgagcattctgggcgtgcggagttttggaatagaggacaaagataagcaaattatcactttcttcagcccccttacaattttggttggacccaatggggcgggaaagacgaccatcattgaatgtctaaaatatatttgtactggagatttccctcctggaaccaaaggaaatacatttgtacacgatcccaaggttgctcaagaaacagatgtgagagcccagattcgtctgcaatttcgtgatgtcaatggagaacttatagctgtgcaaagatctatggtgtgtactcagaaaagcaaaaagacagaatttaaaactctggaaggagtcattactagaacaaagcatggtgaaaaggtcagtctgagctctaagtgtgcagaaattgaccgagaaatgatcagttctcttggggtttccaaggctgtgctaaataatgtcattttctgtcatcaagaagattctaattggcctttaagtgaaggaaaggctttgaagcaaaagtttgatgagattttttcagcaacaagatacattaaagccttagaaacacttcggcaggtacgtcagacacaaggtcagaaagtaaaagaatatcaaatggaactaaaatatctgaagcaatataaggaaaaagcttgtgagattcgtgatcagattacaagtaaggaagcccagttaacatcttcaaaggaaattgtcaaatcctatgagaatgaacttgatccattgaagaatcgtctaaaagaaattgaacataatctctctaaaataatgaaacttgacaatgaaattaaagccttggatagccgaaagaagcaaatggagaaagataatagtgaactggaagagaaaatggaaaaggtttttcaagggactgatgagcaactaaatgacttatatcacaatcaccagagaacagtaagggagaaagaaaggaaattggtagactgtcatcgtgaactggaaaaactaaataaagaatctaggcttctcaatcaggaaaaatcagaactgcttgttgaacagggtcgtctacagctgcaagcagatcgccatcaagaacatatccgagctagagattcattaattcagtctttggcaacacagctagaattggatggctttgagcgtggaccattcagtgaaagacagattaaaaattttcacaaacttgtgagagagagacaagaaggggaagcaaaaactgccaaccaactgatgaatgactttgcagaaaaagagactctgaaacaaaaacagatagatgagataagagataagaaaactggactgggaagaataattgagttaaaatcagaaatcctaagtaagaagcagaatgagctgaaaaatgtgaagtatgaattacagcagttggaaggatcttcagacaggattcttgaactggaccaggagctcataaaagctgaacgtgagttaagcaaggctgagaaaaacagcaatgtagaaaccttaaaaatggaagtaataagtctccaaaatgaaaaagcagacttagacaggaccctgcgtaaacttgaccaggagatggagcagttaaaccatcatacaacaacacgtacccaaatggagatgctgaccaaagacaaagctgacaaagatgaacaaatcagaaaaataaaatctaggcacagtgatgaattaacctcactgttgggatattttcccaacaaaaaacagcttgaagactggctacatagtaaatcaaaagaaattaatcagaccagggacagacttgccaaattgaacaaggaactagcttcatctgagcagaataaaaatcatataaataatgaactaaaaagaaaggaagagcagttgtccagttacgaagacaagctgtttgatgtttgtggtagccaggattttgaaagtgatttagacaggcttaaagaggaaattgaaaaatcatcaaaacagcgagccatgctggctggagccacagcagtttactcccagttcattactcagctaacagacgaaaaccagtcatgttgccccgtttgtcagagagtttttcagacagaggctgagttacaagaagtcatcagtgatttgcagtctaaactgcgacttgctccagataaactcaagtcaacagaatcagagctaaaaaaaaaggaaaagcggcgtgatgaaatgctgggacttgtgcccatgaggcaaagcataattgatttgaaggagaaggaaataccagaattaagaaacaaactgcagaatgtcaatagagacatacagcgcctaaagaacgacatagaagaacaagaaacactcttgggtacaataatgcctgaagaagaaagtgccaaagtatgcctgacagatgttacaattatggagaggttccagatggaacttaaagatgttgaaagaaaaattgcacaacaagcagctaagctacaaggaatagacttagatcgaactgtccaacaagtcaaccaggagaaacaagagaaacagcacaagttagacacagtttctagtaagattgaattgaatcgtaagcttatacaggaccagcaggaacagattcaacatctaaaaagtacaacaaatgagctaaaatctgagaaacttcagatatccactaatttgcaacgtcgtcagcaactggaggagcagactgtggaattatccactgaagttcagtctttgtacagagagataaaggatgctaaagagcaggtaagccctttggaaacaacattggaaaagttccagcaagaaaaagaagaattaatcaacaaaaaaaatacaagcaacaaaatagcacaggataaactgaatgatattaaagagaaggttaaaaatattcatggctatatgaaagacattgagaattatattcaagatgggaaagacgactataagaagcaaaaagaaactgaacttaataaagtaatagctcaactaagtgaatgcgagaaacacaaagaaaagataaatgaagatatgagactcatgagacaagatattgatacacagaagatacaagaaaggtggctacaagataaccttactttaagaaaaagaaatgaggaactaaaagaagttgaagaagaaagaaaacaacatttgaaggaaatgggtcaaatgcaggttttgcaaatgaaaagtgaacatcagaagttggaagagaacatagacaatataaaaagaaatcataatttggcattagggcgacagaaaggttatgaagaagaaattattcattttaagaaagaacttcgagaaccacaatttcgggatgctgaggaaaagtatagagaaatgatgattgttatgaggacaacagaacttgtgaacaaggatctggatatttattataagactcttgaccaagcaataatgaaatttcacagtatgaaaatggaagaaatcaataaaattatacgtgacctgtggcgaagtacctatcgtggacaagatattgaatacatagaaatacggtctgatgccgatgaaaatgtatcagcttctgataaaaggcggaattataactaccgagtggtgatgctgaagggagacacagccttggatatgcgaggacgatgcagtgctggacaaaaggtattagcctcactcatcattcgcctggccctggctgaaacgttctgcctcaactgtggcatcattgccttggatgagccaacaacaaatcttgaccgagaaaacattgaatctcttgcacatgctctggttgagataataaaaagtcgctcacagcagcgtaacttccagcttctggtaatcactcatgatgaagattttgtggagcttttaggacgttctgaatatgtggagaaattctacaggattaaaaagaacatcgatcagtaaaaatatccaagatttaaatgccatagaaatgtaggtcctcagaaagtgtataataagaaacttatttctcatatcaacttagtcaataagaaaatatattctttcaaagg

SEQ ID NO: 352937 - DNA, 2226 bp, Homo sapiens
aaatggtttcccagtggatcagtttcctattgctgctctaacaaattatcataaacaggggcttaaaacaacacaattttttatttatttatttttttggatacagggtcttgctctgtcactcaggctggagtgcagtggctcaatcttgactcactgcaacctctccctcctgggctcaggccatcctcctacctcagcctcccaagtagccaggactaaaggcacgtgctaccacacctggctaattttttgtatactttatagagacagggtctcactatgttgccctggctggtctcaaactcctgggcacaagcaatctgcctgcctcagcctcccaaagtgctaggattacaggtgtaagccactgcacctggcccgtttcttttcttatagttctgtagtcagaagtccaaaacaggtctcactgggctaaactcaaggtgtcaacagagctgcatttcttcctgggggctctagtggagaatccctttccttcctttccctttccagcttttagaggctgcctgcattccttggcctgcaaccccttcctccactttcaaagccagcactggctggtcaggtttttcacaatgcgatctctctggttctgacccttctgcctcctccttcttcatttaagaacccttgtgattacactgggcccacaccaataatccagggtaatctctctatttgcaagtgagctggttagcaaccttaattccatctgcagttttaattcctctttgccatgtagcaacatattcataggctcatgcattaggacgtggacctctttattccactgtggaccaatactctgccttccacacctagcctctcttctgagttttccaagggccccccatcctcaggcatcctcaggcatagacagccggctgggccagaccacagtcaggatgttcccgccactatcagagaggtcctttctacccaagtcccctcccacctgcctgctcctctttcagctcggtctgtcctggattcctcttccttcatcctctgctcccagtcttaggtagagaagagctgagcaggaagtgccagggggtgtggagatggaggagggggaaggtaaggcctgaggcaccagggctctgggagcccagggagctgaggcctttcaatccagacaccctgcacttctctggctctggggcctctggggaccacacactcagctccagggctggaggggtggccagccaagtattggaacccttctgcttgtacatccctagctgcccttaacagccacagttcacctggcccttttcttgggtgatgacagactgtctgccttaatttattccctttcccctgtccctccctaggcctcaggctggaactttcaggagcttccacgggaggcaaggccccagccaggcctctgtccctgggctgcttggtgtggggatgggggatccagaaccccagcaggagggcagatggggagcacagggcaggagaggcaggacaaagcctttggccctcagggagggtgaccaactggccctggtttgcctgggactttcccagttttggcactgaaagtcccaaatcctgggaaactcctcagtcctaagcaaactggaacagttggtcagcctatctccaagccttttgcacctcctaatctactctagatcacctctgcagcctgcacagccgggcctttggactcctggatgctagagtgacctgggcgctgaggagggcccccgagccagtaccaggaaaggatagactcctgcttgcagcattcccagcagaggcatcgcctgtggacaccgcgtctgtgtctgtatatggcagagctcccagatatatgcacaagggagtgaaaaaatgtgtttgcaccccagtctctaaaaattcaacagcctggttacttctgggtggtatatcgtaggtggctttaatacgtgttatttgctcatctgtatttcttactctttgcacaattaaaccatgttccttttacttatgtacatttttaataaaagaaagttgttaatgactcagccttctatctccagtactgccgaaagagacaagcggtcctgctgcatgtcatgcacacactggcccttgttctggggactttgaccttggctgctggttggtcatggcctgttttgcccagggctctactgcaggggcagggttggttattcctctgtgccctttttgcct

SEQ ID NO: 352938 - DNA, 550 bp, Homo sapiens
gaattataactaccgagtggtgatgctgaagggagacacagccttggatatgcgaggacgatgcagtgctggacaaaaggcaggtatctcaaaagcctggggagccaactcacccaagtaactgaaagagagaaacaaacatcagtgcagtggaagcacccaaggctacacctgaatggtgggaagctctttgctgctatataaaatgaatcaggctcagctactattattacactctcctgaagctaaccaacatttcctgcaacattatgtagacttttaaaagaagggcctgaagcattctcacaggataggctaaatgtagaacaagaagctgaagacccgttagagttttcatggcactccttatcagaataaggtcactgtctcatcagttataagacataccactattttatgtgccagcaggaatgaaaaaatgcaattataaccataagatgtttcagaatcaatgacataatagtattgcaaaccagattctagcttaagctagaatgaatattccagtatagtaaggagtctcattaag

SEQ ID NO: 352939 - DNA, 240 bp, Homo sapiens
tcacttaccattatgtcataggcattttacaagttattaaaaactcattgtaactgtaatcttagtgacagcataatatcccactgtatgaatatataccataatttactttgccagaaatttgatttttgtttcatatcttcaaagatacattaaagccttagaaacacttcggcaggtacgtcagacacaaggtcagaaagtaaaagaatatcaaatggaactaaaatatctgaagca

SEQ ID NO: 352940 - DNA, 408 bp, Homo sapiens
cttcaggcggatgattgtggccgttgcttatgttttttccttgtttggcctgcaggtggcagcacaccctgggccccccactccccgccgcaagtcctgaggatggccagcagagaaacaagaaaatggactccctggctgctggagagttgaatgccagccaccagccatgggtgagtggagagcctgactggagtttttctctaatttgttctgcattatttgtgttttgatatatgaattggtgtaaatcacatgtgttcaattttgaggccatttgttgatttttgcggtttatttacaaaaacaacaaacaatagcagtgaaaccagaattattcctgcaatgtttcagagagtatgagggacaagggcgcatcctctgcattgtaagtgtgacttcccttcc

SEQ ID NO: 352941 - DNA, 5863 bp, Homo sapiens
ccaggagagcggcgtggacgcgtgcgggcctagaggcccacgtgatccgcagggcggccgaggcaggaagctgtgagtgcgcggttgcggggtcgcattgtggctacggctttgcgtccccggcgggcagccccaggctggtccccgcctccgctctccccaccggcggggaaagcagctggtgtgggaggaaaggctccatcccccgccccctctctcccgctgttggctggcaggatcttttggcagtcctgtggcctcgctccccgcccggatcctcctgaccctgagattcgcgggtctcacgtcccgtgcacgccttgcttcggcctcagttaagcctttgtggactccaggtccctggtgagattagaaacgtttgcaaacatgtcccggatcgaaaagatgagcattctgggcgtgcggagttttggaatagaggacaaagataagcaaattatcactttcttcagcccccttacaattttggttggacccaatggggcgggaaagacgaccatcattgaatgtctaaaatatatttgtactggagatttccctcctggaaccaaaggaaatacatttgtacacgatcccaaggttgctcaagaaacagatgtgagagcccagattcgtctgcaatttcgtgatgtcaatggagaacttatagctgtgcaaagatctatggtgtgtactcagaaaagcaaaaagacagaatttaaaactctggaaggagtcattactagaacaaagcatggtgaaaaggtcagtctgagctctaagtgtgcagaaattgaccgagaaatgatcagttctcttggggtttccaaggctgtgctaaataatgtcattttctgtcatcaagaagattctaattggcctttaagtgaaggaaaggctttgaagcaaaagtttgatgagattttttcagcaacaagatacattaaagccttagaaacacttcggcaggtacgtcagacacaaggtcagaaagtaaaagaatatcaaatggaactaaaatatctgaagcaatataaggaaaaagcttgtgagattcgtgatcagattacaagtaaggaagcccagttaacatcttcaaaggaaattgtcaaatcctatgagaatgaacttgatccattgaagaatcgtctaaaagaaattgaacataatctctctaaaataatgaaacttgacaatgaaattaaagccttggatagccgaaagaagcaaatggagaaagataatagtgaactggaagagaaaatggaaaaggtttttcaagggactgatgagcaactaaatgacttatatcacaatcaccagagaacagtaagggagaaagaaaggaaattggtagactgtcatcgtgaactggaaaaactaaataaagaatctaggcttctcaatcaggaaaaatcagaactgcttgttgaacagggtcgtctacagctgcaagcagatcgccatcaagaacatatccgagctagagattcattaattcagtctttggcaacacagctagaattggatggctttgagcgtggaccattcagtgaaagacagattaaaaattttcacaaacttgtgagagagagacaagaaggggaagcaaaaactgccaaccaactgatgaatgactttgcagaaaaagagactctgaaacaaaaacagatagatgagataagagataagaaaactggactgggaagaataattgagttaaaatcagaaatcctaagtaagaagcagaatgagctgaaaaatgtgaagtatgaattacagcagttggaaggatcttcagacaggattcttgaactggaccaggagctcataaaagctgaacgtgagttaagcaaggctgagaaaaacagcaatgtagaaaccttaaaaatggaagtaataagtctccaaaatgaaaaagcagacttagacaggaccctgcgtaaacttgaccaggagatggagcagttaaaccatcatacaacaacacgtacccaaatggagatgctgaccaaagacaaagctgacaaagatgaacaaatcagaaaaataaaatctaggcacagtgatgaattaacctcactgttgggatattttcccaacaaaaaacagcttgaagactggctacatagtaaatcaaaagaaattaatcagaccagggacagacttgccaaattgaacaaggaactagcttcatctgagcagaataaaaatcatataaataatgaactaaaaagaaaggaagagcagttgtccagttacgaagacaagctgtttgatgtttgtggtagccaggattttgaaagtgatttagacaggcttaaagaggaaattgaaaaatcatcaaaacagcgagccatgctggctggagccacagcagtttactcccagttcattactcagctaacagacgaaaaccagtcatgttgccccgtttgtcagagagtttttcagacagaggctgagttacaagaagtcatcagtgatttgcagtctaaactgcgacttgctccagataaactcaagtcaacagaatcagagctaaaaaaaaaggaaaagcggcgtgatgaaatgctgggacttgtgcccatgaggcaaagcataattgatttgaaggagaaggaaataccagaattaagaaacaaactgcagaatgtcaatagagacatacagcgcctaaagaacgacatagaagaacaagaaacactcttgggtacaataatgcctgaagaagaaagtgccaaagtatgcctgacagatgttacaattatggagaggttccagatggaacttaaagatgttgaaagaaaaattgcacaacaagcagctaagctacaaggaatagacttagatcgaactgtccaacaagtcaaccaggagaaacaagagaaacagcacaagttagacacagtttctagtaagattgaattgaatcgtaagcttatacaggaccagcaggaacagattcaacatctaaaaagtacaacaaatgagctaaaatctgagaaacttcagatatccactaatttgcaacgtcgtcagcaactggaggagcagactgtggaattatccactgaagttcagtctttgtacagagagataaaggatgctaaagagcaggtaagccctttggaaacaacattggaaaagttccagcaagaaaaagaagaattaatcaacaaaaaaaatacaagcaacaaaatagcacaggataaactgaatgatattaaagagaaggttaaaaatattcatggctatatgaaagacattgagaattatattcaagatgggaaagacgactataagaagcaaaaagaaactgaacttaataaagtaatagctcaactaagtgaatgcgagaaacacaaagaaaagataaatgaagatatgagactcatgagacaagatattgatacacagaagatacaagaaaggtggctacaagataaccttactttaagaaaaagaaatgaggaactaaaagaagttgaagaagaaagaaaacaacatttgaaggaaatgggtcaaatgcaggttttgcaaatgaaaagtgaacatcagaagttggaagagaacatagacaatataaaaagaaatcataatttggcattagggcgacagaaaggttatgaagaagaaattattcattttaagaaagaacttcgagaaccacaatttcgggatgctgaggaaaagtatagagaaatgatgattgttatgaggacaacagaacttgtgaacaaggatctggatatttattataagactcttgaccaagcaataatgaaatttcacagtatgaaaatggaagaaatcaataaaattatacgtgacctgtggcgaagtacctatcgtggacaagatattgaatacatagaaatacggtctgatgccgatgaaaatgtatcagcttctgataaaaggcggaattataactaccgagtggtgatgctgaagggagacacagccttggatatgcgaggacgatgcagtgctggacaaaaggtattagcctcactcatcattcgcctggccctggctgaaacgttctgcctcaactgtggcatcattgccttggatgagccaacaacaaatcttgaccgagaaaacattgaatctcttgcacatgctctggttgagataataaaaagtcgctcacagcagcgtaacttccagcttctggtaatcactcatgatgaagattttgtggagcttttaggacgttctgaatatgtggagaaattctacaggattaaaaagaacatcgatcagtgctcagagattgtgaaatgcagtgttagctccctgggattcaatgttcattaaaaatatccaagatttaaatgccatagaaatgtaggtcctcagaaagtgtataataagaaacttatttctcatatcaacttagtcaataagaaaatatattctttcaaaggaacattgtgtctaggattttggatgttgagaggttctaaaatcatgaaacttgtttcactgaaaattggacagattgcctgtttctgatttgctgctcttcatcccattccaggcagcctctgtcaggccttcagggttcagcagtacagccgagactcgactctgtgcctccctccccagtgcaaatgcatgcttcttctcaaagcactgttgagaaggagataattactgccttgaaaatttatggttttggtatttttttaaatcatagttaaatgttacctctgaatttacttccttgcatgtggtttgaaaaactgagtattaatatctgaggatgaccagaaatggtgagatgtatgtttggctctgcttttaactttataaatccagtgacctctctctctgggacttggtttccccaactaaaatttgaagtagttgaatggggtctcaaagtttgacaggaaccttaagtaatcatctaagtcagtacccaccaccttcttctcctacatatcccttccagatggtcatccagactcagagctctctctacagagaggaaattctccactgtgcacacccacctttggaaagctctgaccacttgaggcctgatctgcccatcgtgaagaagcctgtaacactcctctgcgtctatcctgtgtagcatactggcttcaccatcaatcctgattcctctctaagtgggcattgccatgtggaaggcaagccaggctcactcacagagtcaaggcctgctccctgtagggtccaaccagacctggaagaacaggcctctccatttgctcttcagatgccacttctaagaaaagcctaatcacagtttttcctggaattgccagctgacatcttgaatccttccattccacacagaatgcaaccaagtcacacgcttttgaattatgctttgtagagttttgtcattcagagtcagccaggaccataccgggtcttgattcagtcacatggcatggttttgtgccatctgtagctataatgagcatgtttgcctagacagcttttctcaactgggtccagaagagaattaagccctaaggtcctaaggcatctatctgtgctaggttaaatggttggcccccaaagatagacaggtcctgatttctagaacccgtgactgttactttatacagcaaaggaaactttgcagatgtgattaaagctaaggaccttaagacagagtatcctgggggtggtggtggggtgggggggggtcctaaatgtaatcacgagtaagattaagagcaaatcaattctagtcatatattaaacatccacaataaccaagatatttttatcccaagaatgcaagatttcagaaaatgaaaaatctgttgataaatccatcactataataaaaccgaaggtgaaaaaaattctg

SEQ ID NO: 352942 - DNA, 4109 bp, Homo sapiens
tgcggagttttggaatagaggacaaagataagcacgcccagaatgctcatcttttcggtccgggacatgtttgcaaagatgagcattctgggcgtgcggagttttggaatagaggacaaagataagcaaattatcactttcttcagcccccttacaattttggttggacccaatggggcgggaaagacgaccatcattgaatgtctaaaatatatttgtactggagatttccctcctggaaccaaaggaaatacatttgtacacgatcccaaggttgctcaagaaacagatgtgagagcccagattcgtctgcaatttcgtgatgtcaatggagaacttatagctgtgcaaagatctatggtgtgtactcagaaaagcaaaaagacagaatttaaaactctggaaggagtcattactagaacaaagcatggtgaaaaggtcagtctgagctctaagtgtgcagaaattgaccgagaaatgatcagttctcttggggtttccaaggctgtgctaaataatgtcattttctgtcatcaagaagattctaattggcctttaagtgaaggaaaggctttgaagcaaaagtttgatgagattttttcagcaacaagatacattaaagccttagaaacacttcggcaggtacgtcagacacaaggtcagaaagtaaaagaatatcaaatggaactaaaatatctgaagcaatataaggaaaaagcttgtgagattcgtgatcagattacaagtaaggaagcccagttaacatcttcaaaggaaattgtcaaatcctatgagaatgaacttgatccattgaagaatcgtctaaaagaaattgaacataatctctctaaaataatgaaacttgacaatgaaattaaagccttggatagccgaaagaagcaaatggagaaagataatagtgaactggaagagaaaatggaaaaggtttttcaagggactgatgagcaactaaatgacttatatcacaatcaccagagaacagtaagggagaaagaaaggaaattggtagactgtcatcgtgaactggaaaaactaaataaagaatctaggcttctcaatcaggaaaaatcagaactgcttgttgaacagggtcgtctacagctgcaagcagatcgccatcaagaacatatccgagctagagattcattaattcagtctttggcaacacagctagaattggatggctttgagcgtggaccattcagtgaaagacagattaaaaattttcacaaacttgtgagagagagacaagaaggggaagcaaaaactgccaaccaactgatgaatgactttgcagaaaaagagactctgaaacaaaaacagatagatgagataagagataagaaaactggactgggaagaataattgagttaaaatcagaaatcctaagtaagaagcagaatgagctgaaaaatgtgaagtatgaattacagcagttggaaggatcttcagacaggattcttgaactggaccaggagctcataaaagctgaacgtgagttaagcaaggctgagaaaaacagcaatgtagaaaccttaaaaatggaagtaataagtctccaaaatgaaaaagcagacttagacaggaccctgcgtaaacttgaccaggagatggagcagttaaaccatcatacaacaacacgtacccaaatggagatgctgaccaaagacaaagctgacaaagatgaacaaatcagaaaaataaaatctaggcacagtgatgaattaacctcactgttgggatattttcccaacaaaaaacagcttgaagactggctacatagtaaatcaaaagaaattaatcagaccagggacagacttgccaaattgaacaaggaactagcttcatctgagcagaataaaaatcatataaataatgaactaaaaagaaaggaagagcagttgtccagttacgaagacaagctgtttgatgtttgtggtagccaggattttgaaagtgatttagacaggcttaaagaggaaattgaaaaatcatcaaaacagcgagccatgctggctggagccacagcagtttactcccagttcattactcagctaacagacgaaaaccagtcatgttgccccgtttgtcagagagtttttcagacagaggctgagttacaagaagtcatcagtgatttgcagtctaaactgcgacttgctccagataaactcaagtcaacagaatcagagctaaaaaaaaaggaaaagcggcgtgatgaaatgctgggacttgtgcccatgaggcaaagcataattgatttgaaggagaaggaaataccagaattaagaaacaaactgcagaatgtcaatagagacatacagcgcctaaagaacgacatagaagaacaagaaacactcttgggtacaataatgcctgaagaagaaagtgccaaagtatgcctgacagatgttacaattatggagaggttccagatggaacttaaagatgttgaaagaaaaattgcacaacaagcagctaagctacaaggaatagacttagatcgaactgtccaacaagtcaaccaggagaaacaagagaaacagcacaagttagacacagtttctagtaagattgaattgaatcgtaagcttatacaggaccagcaggaacagattcaacatctaaaaagtacaacaaatgagctaaaatctgagaaacttcagatatccactaatttgcaacgtcgtcagcaactggaggagcagactgtggaattatccactgaagttcagtctttgtacagagagataaaggatgctaaagagcaggtaagccctttggaaacaacattggaaaagttccagcaagaaaaagaagaattaatcaacaaaaaaaatacaagcaacaaaatagcacaggataaactgaatgatattaaagagaaggttaaaaatattcatggctatatgaaagacattgagaattatattcaagatgggaaagacgactataagaagcaaaaagaaactgaacttaataaagtaatagctcaactaagtgaatgcgagaaacacaaagaaaagataaatgaagatatgagactcatgagacaagatattgatacacagaagatacaagaaaggtggctacaagataaccttactttaagaaaaagaaatgaggaactaaaagaagttgaagaagaaagaaaacaacatttgaaggaaatgggtcaaatgcaggttttgcaaatgaaaagtgaacatcagaagttggaagagaacatagacaatataaaaagaaatcataatttggcattagggcgacagaaaggttatgaagaagaaattattcattttaagaaagaacttcgagaaccacaatttcgggatgctgaggaaaagtatagagaaatgatgattgttatgaggacaacagaacttgtgaacaaggatctggatatttattataagactcttgaccaagcaataatgaaatttcacagtatgaaaatggaagaaatcaataaaattatacgtgacctgtggcgaagtacctatcgtggacaagatattgaatacatagaaatacggtctgatgccgatgaaaatgtatcagcttctgataaaaggcggaattataactaccgagtggtgatgctgaagggagacacagccttggatatgcgaggacgatgcagtgctggacaaaaggtattagcctcactcatcattcgcctggccctggctgaaacgttctgcctcaactgtggcatcattgccttggatgagccaacaacaaatcttgaccgagaaaacattgaatctcttgcacatgctctggttgagataataaaaagtcgctcacagcagcgtaacttccagcttctggtaatcactcatgatgaagattttgtggagcttttaggacgttctgaatatgtggagaaattctacaggattaaaaagaacatcgatcagtgctcagagattgtgaaatgcagtgttagctccctgggattcaatgttcattaaaaatatccaagatttaaatgccatagaaatgtaggtcctcagaaagtgtataataagaaacttatttctcatatcaacttagtcaataagaaaatatattctttcaaagg

SEQ ID NO: 352943 - DNA, 4436 bp, Homo sapiens
ccaggagagcggcgtggacgcgtgcgggcctagaggcccacgtgatccgcagggcggccgaggcaggaagctgtgagtgcgcggttgcggggtcgcattgtggctacggctttgcgtccccggcgggcagccccaggctggtccccgcctccgctctccccaccggcggggaaagcagctggtgtgggaggaaaggctccatcccccgccccctctctcccgctgttggctggcaggatcttttggcagtcctgtggcctcgctccccgcccggatcctcctgaccctgagattcgcgggtctcacgtcccgtgcacgccttgcttcggcctcagttaagcctttgtggactccaggtccctggtgagattagaaacgtttgcaaacatgtcccggatcgaaaagatgagcattctgggcgtgcggagttttggaatagaggacaaagataagcaaattatcactttcttcagcccccttacaattttggttggacccaatggggcgggaaagacgaccatcattgaatgtctaaaatatatttgtactggagatttccctcctggaaccaaaggaaatacatttgtacacgatcccaaggttgctcaagaaacagatgtgagagcccagattcgtctgcaatttcgtgatgtcaatggagaacttatagctgtgcaaagatctatggtgtgtactcagaaaagcaaaaagacagaatttaaaactctggaaggagtcattactagaacaaagcatggtgaaaaggtcagtctgagctctaagtgtgcagaaattgaccgagaaatgatcagttctcttggggtttccaaggctgtgctaaataatgtcattttctgtcatcaagaagattctaattggcctttaagtgaaggaaaggctttgaagcaaaagtttgatgagattttttcagcaacaagatacattaaagccttagaaacacttcggcaggtacgtcagacacaaggtcagaaagtaaaagaatatcaaatggaactaaaatatctgaagcaatataaggaaaaagcttgtgagattcgtgatcagattacaagtaaggaagcccagttaacatcttcaaaggaaattgtcaaatcctatgagaatgaacttgatccattgaagaatcgtctaaaagaaattgaacataatctctctaaaataatgaaacttgacaatgaaattaaagccttggatagccgaaagaagcaaatggagaaagataatagtgaactggaagagaaaatggaaaaggtttttcaagggactgatgagcaactaaatgacttatatcacaatcaccagagaacagtaagggagaaagaaaggaaattggtagactgtcatcgtgaactggaaaaactaaataaagaatctaggcttctcaatcaggaaaaatcagaactgcttgttgaacagggtcgtctacagctgcaagcagatcgccatcaagaacatatccgagctagagattcattaattcagtctttggcaacacagctagaattggatggctttgagcgtggaccattcagtgaaagacagattaaaaattttcacaaacttgtgagagagagacaagaaggggaagcaaaaactgccaaccaactgatgaatgactttgcagaaaaagagactctgaaacaaaaacagatagatgagataagagataagaaaactggactgggaagaataattgagttaaaatcagaaatcctaagtaagaagcagaatgagctgaaaaatgtgaagtatgaattacagcagttggaaggatcttcagacaggattcttgaactggaccaggagctcataaaagctgaacgtgagttaagcaaggctgagaaaaacagcaatgtagaaaccttaaaaatggaagtaataagtctccaaaatgaaaaagcagacttagacaggaccctgcgtaaacttgaccaggagatggagcagttaaaccatcatacaacaacacgtacccaaatggagatgctgaccaaagacaaagctgacaaagatgaacaaatcagaaaaataaaatctaggcacagtgatgaattaacctcactgttgggatattttcccaacaaaaaacagcttgaagactggctacatagtaaatcaaaagaaattaatcagaccagggacagacttgccaaattgaacaaggaactagcttcatctgagcagaataaaaatcatataaataatgaactaaaaagaaaggaagagcagttgtccagttacgaagacaagctgtttgatgtttgtggtagccaggattttgaaagtgatttagacaggcttaaagaggaaattgaaaaatcatcaaaacagcgagccatgctggctggagccacagcagtttactcccagttcattactcagctaacagacgaaaaccagtcatgttgccccgtttgtcagagagtttttcagacagaggctgagttacaagaagtcatcagtgatttgcagtctaaactgcgacttgctccagataaactcaagtcaacagaatcagagctaaaaaaaaaggaaaagcggcgtgatgaaatgctgggacttgtgcccatgaggcaaagcataattgatttgaaggagaaggaaataccagaattaagaaacaaactgcagaatgtcaatagagacatacagcgcctaaagaacgacatagaagaacaagaaacactcttgggtacaataatgcctgaagaagaaagtgccaaagtatgcctgacagatgttacaattatggagaggttccagatggaacttaaagatgttgaaagaaaaattgcacaacaagcagctaagctacaaggaatagacttagatcgaactgtccaacaagtcaaccaggagaaacaagagaaacagcacaagttagacacagtttctagtaagattgaattgaatcgtaagcttatacaggaccagcaggaacagattcaacatctaaaaagtacaacaaatgagctaaaatctgagaaacttcagatatccactaatttgcaacgtcgtcagcaactggaggagcagactgtggaattatccactgaagttcagtctttgtacagagagataaaggatgctaaagagcaggtaagccctttggaaacaacattggaaaagttccagcaagaaaaagaagaattaatcaacaaaaaaaatacaagcaacaaaatagcacaggataaactgaatgatattaaagagaaggttaaaaatattcatggctatatgaaagacattgagaattatattcaagatgggaaagacgactataagaagcaaaaagaaactgaacttaataaagtaatagctcaactaagtgaatgcgagaaacacaaagaaaagataaatgaagatatgagactcatgagacaagatattgatacacagaagatacaagaaaggtggctacaagataaccttactttaagaaaaagaaatgaggaactaaaagaagttgaagaagaaagaaaacaacatttgaaggaaatgggtcaaatgcaggttttgcaaatgaaaagtgaacatcagaagttggaagagaacatagacaatataaaaagaaatcataatttggcattagggcgacagaaaggttatgaagaagaaattattcattttaagaaagaacttcgagaaccacaatttcgggatgctgaggaaaagtatagagaaatgatgattgttatgaggacaacagaacttgtgaacaaggatctggatatttattataagactcttgaccaagcaataatgaaatttcacagtatgaaaatggaagaaatcaataaaattatacgtgacctgtggcgaagtacctatcgtggacaagatattgaatacatagaaatacggtctgatgccgatgaaaatgtatcagcttctgataaaaggcggaattataactaccgagtggtgatgctgaagggagacacagccttggatatgcgaggacgatgcagtgctggacaaaaggtattagcctcactcatcattcgcctggccctggctgaaacgttctgcctcaactgtggcatcattgccttggatgagccaacaacaaatcttgaccgagaaaacattgaatctcttgcacatgctctggttgagataataaaaagtcgctcacagcagcgtaacttccagcttctggtaatcactcatgatgaagattttgtggagcttttaggacgttctgaatatgtggagaaattctacaggattaaaaagaacatcgatcagtgctcagagattgtgaaatgcagtgttagctccctgggattcaatgttcattaaaaatatccaagatttaaatgccatagaaatgtaggtcctcagaaagtgtataataagaaacttatttctcatatcaacttagtcaataagaaaatatattctttcaaagg

SEQ ID NO: 352944 - DNA, 8097 bp, Homo sapiens
ttcgctttcctgccgatgtcgttgaggaaaatgaaagcggtcgtggccaggactggcgcagctgccgtttcaggcgaggggcgcagaatgcagcggccgccagcctggagcgcgggccctggggccgcaacccgcgccgggcgaggtggcagcacaccctgggccccccactccccgccgcaagtcctgaggatggccagcagagaaacaagaaaatggactccctggctgctggagagttgaatgccagccaccagccatgggtgccagagtttgtagcctattggaggaaaacacaccaagaccatcattgaatgtctaaaatatatttgtactggagatttccctcctggaaccaaaggaaatacatttgtacacgatcccaaggttgctcaagaaacagatgtgagagcccagattcgtctgcaatttcgtgatgtcaatggagaacttatagctgtgcaaagatctatggtgtgtactcagaaaagcaaaaagacagaatttaaaactctggaaggagtcattactagaacaaagcatggtgaaaaggtcagtctgagctctaagtgtgcagaaattgaccgagaaatgatcagttctcttggggtttccaaggctgtgctaaataatgtcattttctgtcatcaagaagattctaattggcctttaagtgaaggaaaggctttgaagcaaaagtttgatgagattttttcagcaacaagatacattaaagccttagaaacacttcggcaggtacgtcagacacaaggtcagaaagtaaaagaatatcaaatggaactaaaatatctgaagcaatataaggaaaaagcttgtgagattcgtgatcagattacaagtaaggaagcccagttaacatcttcaaaggaaattgtcaaatcctatgagaatgaacttgatccattgaagaatcgtctaaaagaaattgaacataatctctctaaaataatgaaacttgacaatgaaattaaagccttggatagccgaaagaagcaaatggagaaagataatagtgaactggaagagaaaatggaaaaggtttttcaagggactgatgagcaactaaatgacttatatcacaatcaccagagaacagtaagggagaaagaaaggaaattggtagactgtcatcgtgaactggaaaaactaaataaagaatctaggcttctcaatcaggaaaaatcagaactgcttgttgaacagggtcgtctacagctgcaagcagatcgccatcaagaacatatccgagctagagattcattaattcagtctttggcaacacagctagaattggatggctttgagcgtggaccattcagtgaaagacagattaaaaattttcacaaacttgtgagagagagacaagaaggggaagcaaaaactgccaaccaactgatgaatgactttgcagaaaaagagactctgaaacaaaaacagatagatgagataagagataagaaaactggactgggaagaataattgagttaaaatcagaaatcctaagtaagaagcagaatgagctgaaaaatgtgaagtatgaattacagcagttggaaggatcttcagacaggattcttgaactggaccaggagctcataaaagctgaacgtgagttaagcaaggctgagaaaaacagcaatgtagaaaccttaaaaatggaagtaataagtctccaaaatgaaaaagcagacttagacaggaccctgcgtaaacttgaccaggagatggagcagttaaaccatcatacaacaacacgtacccaaatggagatgctgaccaaagacaaagctgacaaagatgaacaaatcagaaaaataaaatctaggcacagtgatgaattaacctcactgttgggatattttcccaacaaaaaacagcttgaagactggctacatagtaaatcaaaagaaattaatcagaccagggacagacttgccaaattgaacaaggaactagcttcatctgagcagaataaaaatcatataaataatgaactaaaaagaaaggaagagcagttgtccagttacgaagacaagctgtttgatgtttgtggtagccaggattttgaaagtgatttagacaggcttaaagaggaaattgaaaaatcatcaaaacagcgagccatgctggctggagccacagcagtttactcccagttcattactcagctaacagacgaaaaccagtcatgttgccccgtttgtcagagagtttttcagacagaggctgagttacaagaagtcatcagtgatttgcagtctaaactgcgacttgctccagataaactcaagtcaacagaatcagagctaaaaaaaaaggaaaagcggcgtgatgaaatgctgggacttgtgcccatgaggcaaagcataattgatttgaaggagaaggaaataccagaattaagaaacaaactgcagaatgtcaatagagacatacagcgcctaaagaacgacatagaagaacaagaaacactcttgggtacaataatgcctgaagaagaaagtgccaaagtatgcctgacagatgttacaattatggagaggttccagatggaacttaaagatgttgaaagaaaaattgcacaacaagcagctaagctacaaggaatagacttagatcgaactgtccaacaagtcaaccaggagaaacaagagaaacagcacaagttagacacagtttctagtaagattgaattgaatcgtaagcttatacaggaccagcaggaacagattcaacatctaaaaagtacaacaaatgagctaaaatctgagaaacttcagatatccactaatttgcaacgtcgtcagcaactggaggagcagactgtggaattatccactgaagttcagtctttgtacagagagataaaggatgctaaagagcaggtaagccctttggaaacaacattggaaaagttccagcaagaaaaagaagaattaatcaacaaaaaaaatacaagcaacaaaatagcacaggataaactgaatgatattaaagagaaggttaaaaatattcatggctatatgaaagacattgagaattatattcaagatgggaaagacgactataagaagcaaaaagaaactgaacttaataaagtaatagctcaactaagtgaatgcgagaaacacaaagaaaagataaatgaagatatgagactcatgagacaagatattgatacacagaagatacaagaaaggtggctacaagataaccttactttaagaaaaagaaatgaggaactaaaagaagttgaagaagaaagaaaacaacatttgaaggaaatgggtcaaatgcaggttttgcaaatgaaaagtgaacatcagaagttggaagagaacatagacaatataaaaagaaatcataatttggcattagggcgacagaaaggttatgaagaagaaattattcattttaagaaagaacttcgagaaccacaatttcgggatgctgaggaaaagtatagagaaatgatgattgttatgaggacaacagaacttgtgaacaaggatctggatatttattataagactcttgaccaagcaataatgaaatttcacagtatgaaaatggaagaaatcaataaaattatacgtgacctgtggcgaagtacctatcgtggacaagatattgaatacatagaaatacggtctgatgccgatgaaaatgtatcagcttctgataaaaggcggaattataactaccgagtggtgatgctgaagggagacacagccttggatatgcgaggacgatgcagtgctggacaaaaggtattagcctcactcatcattcgcctggccctggctgaaacgttctgcctcaactgtggcatcattgccttggatgagccaacaacaaatcttgaccgagaaaacattgaatctcttgcacatgctctggttgagataataaaaagtcgctcacagcagcgtaacttccagcttctggtaatcactcatgatgaagattttgtggagcttttaggacgttctgaatatgtggagaaattctacaggattaaaaagaacatcgatcagtgctcagagattgtgaaatgcagtgttagctccctgggattcaatgttcattaaaaatatccaagatttaaatgccatagaaatgtaggtcctcagaaagtgtataataagaaacttatttctcatatcaacttagtcaataagaaaatatattctttcaaaggaacattgtgtctaggattttggatgttgagaggttctaaaatcatgaaacttgtttcactgaaaattggacagattgcctgtttctgatttgctgctcttcatcccattccaggcagcctctgtcaggccttcagggttcagcagtacagccgagactcgactctgtgcctccctccccagtgcaaatgcatgcttcttctcaaagcactgttgagaaggagataattactgccttgaaaatttatggttttggtatttttttaaatcatagttaaatgttacctctgaatttacttccttgcatgtggtttgaaaaactgagtattaatatctgaggatgaccagaaatggtgagatgtatgtttggctctgcttttaactttataaatccagtgacctctctctctgggacttggtttccccaactaaaatttgaagtagttgaatggggtctcaaagtttgacaggaaccttaagtaatcatctaagtcagtacccaccaccttcttctcctacatatcccttccagatggtcatccagactcagagctctctctacagagaggaaattctccactgtgcacacccacctttggaaagctctgaccacttgaggcctgatctgcccatcgtgaagaagcctgtaacactcctctgcgtctatcctgtgtagcatactggcttcaccatcaatcctgattcctctctaagtgggcattgccatgtggaaggcaagccaggctcactcacagagtcaaggcctgctccctgtagggtccaaccagacctggaagaacaggcctctccatttgctcttcagatgccacttctaagaaaagcctaatcacagtttttcctggaattgccagctgacatcttgaatccttccattccacacagaatgcaaccaagtcacacgcttttgaattatgctttgtagagttttgtcattcagagtcagccaggaccataccgggtcttgattcagtcacatggcatggttttgtgccatctgtagctataatgagcatgtttgcctagacagcttttctcaactgggtccagaagagaattaagccctaaggtcctaaggcatctatctgtgctaggttaaatggttggcccccaaagatagacaggtcctgatttctagaacccgtgactgttactttatacagcaaaggaaactttgcagatgtgattaaagctaaggaccttaagacagagtatcctgggggtggtggtggggtgggggggggtcctaaatgtaatcacgagtaagattaagagcaaatcaattctagtcatatattaaacatccacaataaccaagatatttttatcccaagaatgcaagatttcagaaaatgaaaaatctgttgataaatccatcactataataaaaccgaaggtgaaaaaaattctgaaaaaattctagcagctatatttgataaaattcaacatctcctagctttagcaaactcacagttttgcaaataatattttcttaatgttatctgttgctaaatcaaaattaaacagtcatcttaactgcaaaataaaacatttctcagtaaatattaaagccagttaccttctatcaacatgttaatgaaagtgctagttgttgcagcaaagaataacaaaggcaatacacgatcaatataggcagtgaaacaaaagtatcatttgcaagttaaaacagacttcccaattttaaatctggtttccccctgaatatgtggcatccttggcagcacttctgagagtggctgctttcattccaagaagcccatgggtttggaggtgggataggtgcctttctggcttctcattgctgcttctagatcagtctccaaatatcccccttccccacattggaatgaatagccatcacagcatggatggaggttagaatgagccagactgcctgggctcaaatcctagcacaccactcactagctggggaccttgagcaagttatttgtcctgttttctgtttccttatatgtaaaagtgggtaaaatggtacatattttgtagggttgttatgaagattgaatgacattatttacaaactgcttagaactgcttgccacctactaaatactgtgtaagtgttcaagaaaaagctgtcttcatttcactcttgttgcagttatctttcattcccagcttggtcactccctcttatttgttgaagagtttagctcccggttcagtgtcaccccattactaataatcattgctgatttcaatatccaagtgatggtctaatacaactccttggcctctcagtcttttttattttttgaggtggagtcttgctctgtcacccaggctggagtgcaatggcaccatctcagctcactgcaacctctgcctccctgatacaagcaatcctcctgcctcagcctcccaagtagctaggattacaggcatgtaccaccacaccaggctaatttttgtattttagtagagacagggtttcgccttgttggccaggctggtcttgaacgtctggcctcaagtgatctgcctaccttggcctccctcagcccctttttgtttcctccagtgagaagatactcagttctatggtcttattctagagccccgtccttttaataacaataactgcacccctccaaaatctcagttttaagcatctcactctccaataaccccatggtgtctacaattttcctgtggtcctcaaccccagcaattctttgaccccactgagatttcaatccattgattctatggctttttcacaggttgtttccctgatgcctgtacttctctccttattcaacttaaattccatggctcatcattatgtcaccctccactgcattgtactcaaactgtcccgacaatccccagccctactggaatccagctctgcctcctccctgcaacacctgcacatcccgtttcctttgctgtttcctcctcatttccctggcccctcaatgtcacaggttttagtactcagagtctgcacctcttttcttctctgtgctcacttatttggtgatctcatccagtctcatagctttaaattatcttagtttgggttctcccagaagcagagcgtaaaacaatgcttcacgtgaaagtaatcagtaggaaattggggaaattgtgtatgaaagagaaagcagccaatgaaaagtttactattaagccagctacggtaagtgggcaattagagtttggtgccccagggagactctggggagtttggcaaaatatatacctcagaattatcccacctaaggggcaagagacctggagtatttatataacaacttgccagggttactgagtgaaggctattctagcacatgttagttactggcttgccatgtgtaccgacacagctgctttccacagtttaaaaagaaagtctgagcaacatagtgacatcccatctttacataaaatttttaaaaaattagcaaggcatggtggtgcacacctgtggtctcagctacttggctgagataggatccctggagtctgagggttcaaggctgcagtgagctgtgatttgtgccactgcaccccagcctgggtgggtggcagagtgagaccctgtctaaaaagacaaaaaaaaaaaaaaaaaaaaaagcagcagcagctgaaagttggcaggagcacactggcagttcctaggatcataggatataggcagggcactgaccactcctacaaccaccatctatacactgataactcataaatgtttgtgtccaatccagatctctcctaaatgcttgactgatatattcagctgcctgtggataactgggcatctatctgcacttgaatatctaataaacgtctaaaacttaaaatgaccaa

SEQ ID NO: 352945 - DNA, 8467 bp, Homo sapiens
ccaggagagcggcgtggacgcgtgcgggcctagaggcccacgtgatccgcagggcggccgaggcaggaagctgtgagtgcgcggttgcggggtcgcattgtggctacggctttgcgtccccggcgggcagccccaggctggtccccgcctccgctctccccaccggcggggaaagcagctggtgtgggaggaaaggctccatcccccgccccctctctcccgctgttggctggcaggatcttttggcagtcctgtggcctcgctccccgcccggatcctcctgaccctgagattcgcgggtctcacgtcccgtgcacgccttgcttcggcctcagttaagcctttgtggactccaggtccctggtgagattagaaacgtttgcaaacatgtcccggatcgaaaagatgagcattctgggcgtgcggagttttggaatagaggacaaagataagcaaattatcactttcttcagcccccttacaattttggttggacccaatggggcgggaaagacgaccatcattgaatgtctaaaatatatttgtactggagatttccctcctggaaccaaaggaaatacatttgtacacgatcccaaggttgctcaagaaacagatgtgagagcccagattcgtctgcaatttcgtgatgtcaatggagaacttatagctgtgcaaagatctatggtgtgtactcagaaaagcaaaaagacagaatttaaaactctggaaggagtcattactagaacaaagcatggtgaaaaggtcagtctgagctctaagtgtgcagaaattgaccgagaaatgatcagttctcttggggtttccaaggctgtgctaaataatgtcattttctgtcatcaagaagattctaattggcctttaagtgaaggaaaggctttgaagcaaaagtttgatgagattttttcagcaacaagatacattaaagccttagaaacacttcggcaggtacgtcagacacaaggtcagaaagtaaaagaatatcaaatggaactaaaatatctgaagcaatataaggaaaaagcttgtgagattcgtgatcagattacaagtaaggaagcccagttaacatcttcaaaggaaattgtcaaatcctatgagaatgaacttgatccattgaagaatcgtctaaaagaaattgaacataatctctctaaaataatgaaacttgacaatgaaattaaagccttggatagccgaaagaagcaaatggagaaagataatagtgaactggaagagaaaatggaaaaggtttttcaagggactgatgagcaactaaatgacttatatcacaatcaccagagaacagtaagggagaaagaaaggaaattggtagactgtcatcgtgaactggaaaaactaaataaagaatctaggcttctcaatcaggaaaaatcagaactgcttgttgaacagggtcgtctacagctgcaagcagatcgccatcaagaacatatccgagctagagattcattaattcagtctttggcaacacagctagaattggatggctttgagcgtggaccattcagtgaaagacagattaaaaattttcacaaacttgtgagagagagacaagaaggggaagcaaaaactgccaaccaactgatgaatgactttgcagaaaaagagactctgaaacaaaaacagatagatgagataagagataagaaaactggactgggaagaataattgagttaaaatcagaaatcctaagtaagaagcagaatgagctgaaaaatgtgaagtatgaattacagcagttggaaggatcttcagacaggattcttgaactggaccaggagctcataaaagctgaacgtgagttaagcaaggctgagaaaaacagcaatgtagaaaccttaaaaatggaagtaataagtctccaaaatgaaaaagcagacttagacaggaccctgcgtaaacttgaccaggagatggagcagttaaaccatcatacaacaacacgtacccaaatggagatgctgaccaaagacaaagctgacaaagatgaacaaatcagaaaaataaaatctaggcacagtgatgaattaacctcactgttgggatattttcccaacaaaaaacagcttgaagactggctacatagtaaatcaaaagaaattaatcagaccagggacagacttgccaaattgaacaaggaactagcttcatctgagcagaataaaaatcatataaataatgaactaaaaagaaaggaagagcagttgtccagttacgaagacaagctgtttgatgtttgtggtagccaggattttgaaagtgatttagacaggcttaaagaggaaattgaaaaatcatcaaaacagcgaggtaagttgtctactttatattatcaggatactttgacacctttgaattttcattcacaggtaactgttaaggatggggaatttaaaaacctggttatggagcctaatggcttggatttcagtcctggctctacaacttactcactgtgtgactttagccatgctggctggagccacagcagtttactcccagttcattactcagctaacagacgaaaaccagtcatgttgccccgtttgtcagagagtttttcagacagaggctgagttacaagaagtcatcagtgatttgcagtctaaactgcgacttgctccagataaactcaagtcaacagaatcagagctaaaaaaaaaggaaaagcggcgtgatgaaatgctgggacttgtgcccatgaggcaaagcataattgatttgaaggagaaggaaataccagaattaagaaacaaactgcagaatgtcaatagagacatacagcgcctaaagaacgacatagaagaacaagaaacactcttgggtacaataatgcctgaagaagaaagtgccaaagtatgcctgacagatgttacaattatggagaggttccagatggaacttaaagatgttgaaagaaaaattgcacaacaagcagctaagctacaaggaatagacttagatcgaactgtccaacaagtcaaccaggagaaacaagagaaacagcacaagttagacacagtttctagtaagattgaattgaatcgtaagcttatacaggaccagcaggaacagattcaacatctaaaaagtacaacaaatgagctaaaatctgagaaacttcagatatccactaatttgcaacgtcgtcagcaactggaggagcagactgtggaattatccactgaagttcagtctttgtacagagagataaaggatgctaaagagcaggtaagccctttggaaacaacattggaaaagttccagcaagaaaaagaagaattaatcaacaaaaaaaatacaagcaacaaaatagcacaggataaactgaatgatattaaagagaaggttaaaaatattcatggctatatgaaagacattgagaattatattcaagatgggaaagacgactataagaagcaaaaagaaactgaacttaataaagtaatagctcaactaagtgaatgcgagaaacacaaagaaaagataaatgaagatatgagactcatgagacaagatattgatacacagaagatacaagaaaggtggctacaagataaccttactttaagaaaaagaaatgaggaactaaaagaagttgaagaagaaagaaaacaacatttgaaggaaatgggtcaaatgcaggttttgcaaatgaaaagtgaacatcagaagttggaagagaacatagacaatataaaaagaaatcataatttggcattagggcgacagaaaggttatgaagaagaaattattcattttaagaaagaacttcgagaaccacaatttcgggatgctgaggaaaagtatagagaaatgatgattgttatgaggacaacagaacttgtgaacaaggatctggatatttattataagactcttgaccaagcaataatgaaatttcacagtatgaaaatggaagaaatcaataaaattatacgtgacctgtggcgaagtacctatcgtggacaagatattgaatacatagaaatacggtctgatgccgatgaaaatgtatcagcttctgataaaaggcggaattataactaccgagtggtgatgctgaagggagacacagccttggatatgcgaggacgatgcagtgctggacaaaaggtattagcctcactcatcattcgcctggccctggctgaaacgttctgcctcaactgtggcatcattgccttggatgagccaacaacaaatcttgaccgagaaaacattgaatctcttgcacatgctctggttgagataataaaaagtcgctcacagcagcgtaacttccagcttctggtaatcactcatgatgaagattttgtggagcttttaggacgttctgaatatgtggagaaattctacaggattaaaaagaacatcgatcagtgctcagagattgtgaaatgcagtgttagctccctgggattcaatgttcattaaaaatatccaagatttaaatgccatagaaatgtaggtcctcagaaagtgtataataagaaacttatttctcatatcaacttagtcaataagaaaatatattctttcaaaggaacattgtgtctaggattttggatgttgagaggttctaaaatcatgaaacttgtttcactgaaaattggacagattgcctgtttctgatttgctgctcttcatcccattccaggcagcctctgtcaggccttcagggttcagcagtacagccgagactcgactctgtgcctccctccccagtgcaaatgcatgcttcttctcaaagcactgttgagaaggagataattactgccttgaaaatttatggttttggtatttttttaaatcatagttaaatgttacctctgaatttacttccttgcatgtggtttgaaaaactgagtattaatatctgaggatgaccagaaatggtgagatgtatgtttggctctgcttttaactttataaatccagtgacctctctctctgggacttggtttccccaactaaaatttgaagtagttgaatggggtctcaaagtttgacaggaaccttaagtaatcatctaagtcagtacccaccaccttcttctcctacatatcccttccagatggtcatccagactcagagctctctctacagagaggaaattctccactgtgcacacccacctttggaaagctctgaccacttgaggcctgatctgcccatcgtgaagaagcctgtaacactcctctgcgtctatcctgtgtagcatactggcttcaccatcaatcctgattcctctctaagtgggcattgccatgtggaaggcaagccaggctcactcacagagtcaaggcctgctccctgtagggtccaaccagacctggaagaacaggcctctccatttgctcttcagatgccacttctaagaaaagcctaatcacagtttttcctggaattgccagctgacatcttgaatccttccattccacacagaatgcaaccaagtcacacgcttttgaattatgctttgtagagttttgtcattcagagtcagccaggaccataccgggtcttgattcagtcacatggcatggttttgtgccatctgtagctataatgagcatgtttgcctagacagcttttctcaactgggtccagaagagaattaagccctaaggtcctaaggcatctatctgtgctaggttaaatggttggcccccaaagatagacaggtcctgatttctagaacccgtgactgttactttatacagcaaaggaaactttgcagatgtgattaaagctaaggaccttaagacagagtatcctgggggtggtggtggggtgggggggggtcctaaatgtaatcacgagtaagattaagagcaaatcaattctagtcatatattaaacatccacaataaccaagatatttttatcccaagaatgcaagatttcagaaaatgaaaaatctgttgataaatccatcactataataaaaccgaaggtgaaaaaaattctgaaaaaattctagcagctatatttgataaaattcaacatctcctagctttagcaaactcacagttttgcaaataatattttcttaatgttatctgttgctaaatcaaaattaaacagtcatcttaactgcaaaataaaacatttctcagtaaatattaaagccagttaccttctatcaacatgttaatgaaagtgctagttgttgcagcaaagaataacaaaggcaatacacgatcaatataggcagtgaaacaaaagtatcatttgcaagttaaaacagacttcccaattttaaatctggtttccccctgaatatgtggcatccttggcagcacttctgagagtggctgctttcattccaagaagcccatgggtttggaggtgggataggtgcctttctggcttctcattgctgcttctagatcagtctccaaatatcccccttccccacattggaatgaatagccatcacagcatggatggaggttagaatgagccagactgcctgggctcaaatcctagcacaccactcactagctggggaccttgagcaagttatttgtcctgttttctgtttccttatatgtaaaagtgggtaaaatggtacatattttgtagggttgttatgaagattgaatgacattatttacaaactgcttagaactgcttgccacctactaaatactgtgtaagtgttcaagaaaaagctgtcttcatttcactcttgttgcagttatctttcattcccagcttggtcactccctcttatttgttgaagagtttagctcccggttcagtgtcaccccattactaataatcattgctgatttcaatatccaagtgatggtctaatacaactccttggcctctcagtcttttttattttttgaggtggagtcttgctctgtcacccaggctggagtgcaatggcaccatctcagctcactgcaacctctgcctccctgatacaagcaatcctcctgcctcagcctcccaagtagctaggattacaggcatgtaccaccacaccaggctaatttttgtattttagtagagacagggtttcgccttgttggccaggctggtcttgaacgtctggcctcaagtgatctgcctaccttggcctccctcagcccctttttgtttcctccagtgagaagatactcagttctatggtcttattctagagccccgtccttttaataacaataactgcacccctccaaaatctcagttttaagcatctcactctccaataaccccatggtgtctacaattttcctgtggtcctcaaccccagcaattctttgaccccactgagatttcaatccattgattctatggctttttcacaggttgtttccctgatgcctgtacttctctccttattcaacttaaattccatggctcatcattatgtcaccctccactgcattgtactcaaactgtcccgacaatccccagccctactggaatccagctctgcctcctccctgcaacacctgcacatcccgtttcctttgctgtttcctcctcatttccctggcccctcaatgtcacaggttttagtactcagagtctgcacctcttttcttctctgtgctcacttatttggtgatctcatccagtctcatagctttaaattatcttagtttgggttctcccagaagcagagcgtaaaacaatgcttcacgtgaaagtaatcagtaggaaattggggaaattgtgtatgaaagagaaagcagccaatgaaaagtttactattaagccagctacggtaagtgggcaattagagtttggtgccccagggagactctggggagtttggcaaaatatatacctcagaattatcccacctaaggggcaagagacctggagtatttatataacaacttgccagggttactgagtgaaggctattctagcacatgttagttactggcttgccatgtgtaccgacacagctgctttccacagtttaaaaagaaagtctgagcaacatagtgacatcccatctttacataaaatttttaaaaaattagcaaggcatggtggtgcacacctgtggtctcagctacttggctgagataggatccctggagtctgagggttcaaggctgcagtgagctgtgatttgtgccactgcaccccagcctgggtgggtggcagagtgagaccctgtctaaaaagacaaaaaaaaaaaaaaaaaaaaaagcagcagcagctgaaagttggcaggagcacactggcagttcctaggatcataggatataggcagggcactgaccactcctacaaccaccatctatacactgataactcataaatgtttgtgtccaatccagatctctcctaaatgcttgactgatatattcagctgcctgtggataactgggcatctatctgcacttgaatatctaataaacgtctaaaacttaaaatgaccaa

SEQ ID NO: 352946 - DNA, 6081 bp, Homo sapiens
tgtttcattgtctataaaatgaggacacaactaccacctgtggtactgagccatgctggctggagccacagcagtttactcccagttcattactcagctaacagacgaaaaccagtcatgttgccccgtttgtcagagagtttttcagacagaggctgagttacaagaagtcatcagtgatttgcagtctaaactgcgacttgctccagataaactcaagtcaacagaatcagagctaaaaaaaaaggaaaagcggcgtgatgaaatgctgggacttgtgcccatgagaatatgcccttgatgccaccactatcatgagaactgtctattcatgcaaccaatataggcagtctactggagtgcaggcaaagcataattgatttgaaggagaaggaaataccagaattaagaaacaaactgcagaatgtcaatagagacatacagcgcctaaagaacgacatagaagaacaagaaacactcttgggtacaataatgcctgaagaagaaagtgccaaagtatgcctgacagatgttacaattatggagaggttccagatggaacttaaagatgttgaaagaaaaattgcacaacaagcagctaagctacaaggaatagacttagatcgaactgtccaacaagtcaaccaggagaaacaagagaaacagcacaagttagacacagtttctagtaagattgaattgaatcgtaagcttatacaggaccagcaggaacagattcaacatctaaaaagtacaacaaatgagctaaaatctgagaaacttcagatatccactaatttgcaacgtcgtcagcaactggaggagcagactgtggaattatccactgaagttcagtctttgtacagagagataaaggatgctaaagagcaggtaagccctttggaaacaacattggaaaagttccagcaagaaaaagaagaattaatcaacaaaaaaaatacaagcaacaaaatagcacaggataaactgaatgatattaaagagaaggttaaaaatattcatggctatatgaaagacattgagaattatattcaagatgggaaagacgactataagaagcaaaaagaaactgaacttaataaagtaatagctcaactaagtgaatgcgagaaacacaaagaaaagataaatgaagatatgagactcatgagacaagatattgatacacagaagatacaagaaaggtggctacaagataaccttactttaagaaaaagaaatgaggaactaaaagaagttgaagaagaaagaaaacaacatttgaaggaaatgggtcaaatgcaggttttgcaaatgaaaagtgaacatcagaagttggaagagaacatagacaatataaaaagaaatcataatttggcattagggcgacagaaaggttatgaagaagaaattattcattttaagaaagaacttcgagaaccacaatttcgggatgctgaggaaaagtatagagaaatgatgattgttatgaggacaacagaacttgtgaacaaggatctggatatttattataagactcttgaccaagcaataatgaaatttcacagtatgaaaatggaagaaatcaataaaattatacgtgacctgtggcgaagtacctatcgtggacaagatattgaatacatagaaatacggtctgatgccgatgaaaatgtatcagcttctgataaaaggcggaattataactaccgagtggtgatgctgaagggagacacagccttggatatgcgaggacgatgcagtgctggacaaaaggtattagcctcactcatcattcgcctggccctggctgaaacgttctgcctcaactgtggcatcattgccttggatgagccaacaacaaatcttgaccgagaaaacattgaatctcttgcacatgctctggttgagataataaaaagtcgctcacagcagcgtaacttccagcttctggtaatcactcatgatgaagattttgtggagcttttaggacgttctgaatatgtggagaaattctacaggattaaaaagaacatcgatcagtgctcagagattgtgaaatgcagtgttagctccctgggattcaatgttcattaaaaatatccaagatttaaatgccatagaaatgtaggtcctcagaaagtgtataataagaaacttatttctcatatcaacttagtcaataagaaaatatattctttcaaaggaacattgtgtctaggattttggatgttgagaggttctaaaatcatgaaacttgtttcactgaaaattggacagattgcctgtttctgatttgctgctcttcatcccattccaggcagcctctgtcaggccttcagggttcagcagtacagccgagactcgactctgtgcctccctccccagtgcaaatgcatgcttcttctcaaagcactgttgagaaggagataattactgccttgaaaatttatggttttggtatttttttaaatcatagttaaatgttacctctgaatttacttccttgcatgtggtttgaaaaactgagtattaatatctgaggatgaccagaaatggtgagatgtatgtttggctctgcttttaactttataaatccagtgacctctctctctgggacttggtttccccaactaaaatttgaagtagttgaatggggtctcaaagtttgacaggaaccttaagtaatcatctaagtcagtacccaccaccttcttctcctacatatcccttccagatggtcatccagactcagagctctctctacagagaggaaattctccactgtgcacacccacctttggaaagctctgaccacttgaggcctgatctgcccatcgtgaagaagcctgtaacactcctctgcgtctatcctgtgtagcatactggcttcaccatcaatcctgattcctctctaagtgggcattgccatgtggaaggcaagccaggctcactcacagagtcaaggcctgctccctgtagggtccaaccagacctggaagaacaggcctctccatttgctcttcagatgccacttctaagaaaagcctaatcacagtttttcctggaattgccagctgacatcttgaatccttccattccacacagaatgcaaccaagtcacacgcttttgaattatgctttgtagagttttgtcattcagagtcagccaggaccataccgggtcttgattcagtcacatggcatggttttgtgccatctgtagctataatgagcatgtttgcctagacagcttttctcaactgggtccagaagagaattaagccctaaggtcctaaggcatctatctgtgctaggttaaatggttggcccccaaagatagacaggtcctgatttctagaacccgtgactgttactttatacagcaaaggaaactttgcagatgtgattaaagctaaggaccttaagacagagtatcctgggggtggtggtggggtgggggggggtcctaaatgtaatcacgagtaagattaagagcaaatcaattctagtcatatattaaacatccacaataaccaagatatttttatcccaagaatgcaagatttcagaaaatgaaaaatctgttgataaatccatcactataataaaaccgaaggtgaaaaaaattctgaaaaaattctagcagctatatttgataaaattcaacatctcctagctttagcaaactcacagttttgcaaataatattttcttaatgttatctgttgctaaatcaaaattaaacagtcatcttaactgcaaaataaaacatttctcagtaaatattaaagccagttaccttctatcaacatgttaatgaaagtgctagttgttgcagcaaagaataacaaaggcaatacacgatcaatataggcagtgaaacaaaagtatcatttgcaagttaaaacagacttcccaattttaaatctggtttccccctgaatatgtggcatccttggcagcacttctgagagtggctgctttcattccaagaagcccatgggtttggaggtgggataggtgcctttctggcttctcattgctgcttctagatcagtctccaaatatcccccttccccacattggaatgaatagccatcacagcatggatggaggttagaatgagccagactgcctgggctcaaatcctagcacaccactcactagctggggaccttgagcaagttatttgtcctgttttctgtttccttatatgtaaaagtgggtaaaatggtacatattttgtagggttgttatgaagattgaatgacattatttacaaactgcttagaactgcttgccacctactaaatactgtgtaagtgttcaagaaaaagctgtcttcatttcactcttgttgcagttatctttcattcccagcttggtcactccctcttatttgttgaagagtttagctcccggttcagtgtcaccccattactaataatcattgctgatttcaatatccaagtgatggtctaatacaactccttggcctctcagtcttttttattttttgaggtggagtcttgctctgtcacccaggctggagtgcaatggcaccatctcagctcactgcaacctctgcctccctgatacaagcaatcctcctgcctcagcctcccaagtagctaggattacaggcatgtaccaccacaccaggctaatttttgtattttagtagagacagggtttcgccttgttggccaggctggtcttgaacgtctggcctcaagtgatctgcctaccttggcctccctcagcccctttttgtttcctccagtgagaagatactcagttctatggtcttattctagagccccgtccttttaataacaataactgcacccctccaaaatctcagttttaagcatctcactctccaataaccccatggtgtctacaattttcctgtggtcctcaaccccagcaattctttgaccccactgagatttcaatccattgattctatggctttttcacaggttgtttccctgatgcctgtacttctctccttattcaacttaaattccatggctcatcattatgtcaccctccactgcattgtactcaaactgtcccgacaatccccagccctactggaatccagctctgcctcctccctgcaacacctgcacatcccgtttcctttgctgtttcctcctcatttccctggcccctcaatgtcacaggttttagtactcagagtctgcacctcttttcttctctgtgctcacttatttggtgatctcatccagtctcatagctttaaattatcttagtttgggttctcccagaagcagagcgtaaaacaatgcttcacgtgaaagtaatcagtaggaaattggggaaattgtgtatgaaagagaaagcagccaatgaaaagtttactattaagccagctacggtaagtgggcaattagagtttggtgccccagggagactctggggagtttggcaaaatatatacctcagaattatcccacctaaggggcaagagacctggagtatttatataacaacttgccagggttactgagtgaaggctattctagcacatgttagttactggcttgccatgtgtaccgacacagctgctttccacagtttaaaaagaaagtctgagcaacatagtgacatcccatctttacataaaatttttaaaaaattagcaaggcatggtggtgcacacctgtggtctcagctacttggctgagataggatccctggagtctgagggttcaaggctgcagtgagctgtgatttgtgccactgcaccccagcctgggtgggtggcagagtgagaccctgtctaaaaagacaaaaaaaaaaaaaaaaaaaaaagcagcagcagctgaaagttggcaggagcacactggcagttcctaggatcataggatataggcagggcactgaccactcctacaaccaccatctatacactgataactcataaatgtttgtgtccaatccagatctctcctaaatgcttgactgatatattcagctgcctgtggataactgggcatctatctgcacttgaatatctaataaacgtctaaaacttaaaatgaccaa

SEQ ID NO: 352947 - DNA, 5353 bp, Homo sapiens
  misc_feature (5299)..(5299): n is a, c, g, or t
  misc_feature (5304)..(5304): n is a, c, g, or t
  misc_feature (5311)..(5311): n is a, c, g, or t
  misc_feature (5327)..(5327): n is a, c, g, or t
  misc_feature (5342)..(5342): n is a, c, g, or t
ccaggagagcggcgtggacgcgtgcgggcctagaggcccacgtgatccgcagggcggccgaggcaggaagctgtgagtgcgcggttgcggggtcgcattgtggctacggctttgcgtccccggcgggcagccccaggctggtccccgcctccgctctccccaccggcggggaaagcagctggtgtgggaggaaaggctccatcccccgccccctctctcccgctgttggctggcaggatcttttggcagtcctgtggcctcgctccccgcccggatcctcctgaccctgagattcgcgggtctcacgtcccgtgcacgccttgcttcggcctcagttaagcctttgtggactccaggtccctggtgagattagaaacgtttgcaaacatgtcccggatcgaaaagatgagcattctgggcgtgcggagttttggaatagaggacaaagataagcaaattatcactttcttcagcccccttacaattttggttggacccaatggggcgggaaagacgaccatcattgaatgtctaaaatatatttgtactggagatttccctcctggaaccaaaggaaatacatttgtacacgatcccaaggttgctcaagaaacagatgtgagagcccagattcgtctgcaatttcgtgatgtcaatggagaacttatagctgtgcaaagatctatggtgtgtactcagaaaagcaaaaagacagaatttaaaactctggaaggagtcattactagaacaaagcatggtgaaaaggtcagtctgagctctaagtgtgcagaaattgaccgagaaatgatcagttctcttggggtttccaaggctgtgctaaataatgtcattttctgtcatcaagaagattctaattggcctttaagtgaaggaaaggctttgaagcaaaagtttgatgagattttttcagcaacaagatacattaaagccttagaaacacttcggcaggtacgtcagacacaaggtcagaaagtaaaagaatatcaaatggaactaaaatatctgaagcaatataaggaaaaagcttgtgagattcgtgatcagattacaagtaaggaagcccagttaacatcttcaaaggaaattgtcaaatcctatgagaatgaacttgatccattgaagaatcgtctaaaagaaattgaacataatctctctaaaataatgaaacttgacaatgaaattaaagccttggatagccgaaagaagcaaatggagaaagataatagtgaactggaagagaaaatggaaaaggtttttcaagggactgatgagcaactaaatgacttatatcacaatcaccagagaacagtaagggagaaagaaaggaaattggtagactgtcatcgtgaactggaaaaactaaataaagaatctaggcttctcaatcaggaaaaatcagaactgcttgttgaacagggtcgtctacagctgcaagcagatcgccatcaagaacatatccgagctagagattcattaattcagtctttggcaacacagctagaattggatggctttgagcgtggaccattcagtgaaagacagattaaaaattttcacaaacttgtgagagagagacaagaaggggaagcaaaaactgccaaccaactgatgaatgactttgcagaaaaagagactctgaaacaaaaacagatagatgagataagagataagaaaactggactgggaagaataattgagttaaaatcagaaatcctaagtaagaagcagaatgagctgaaaaatgtgaagtatgaattacagcagttggaaggatcttcagacaggattcttgaactggaccaggagctcataaaagctgaacgtgagttaagcaaggctgagaaaaacagcaatgtagaaaccttaaaaatggaagtaataagtctccaaaatgaaaaagcagacttagacaggaccctgcgtaaacttgaccaggagatggagcagttaaaccatcatacaacaacacgtacccaaatggagatgctgaccaaagacaaagctgacaaagatgaacaaatcagaaaaataaaatctaggcacagtgatgaattaacctcactgttgggatattttcccaacaaaaaacagcttgaagactggctacatagtaaatcaaaagaaattaatcagaccagggacagacttgccaaattgaacaaggaactagcttcatctgagcagaataaaaatcatataaataatgaactaaaaagaaaggaagagcagttgtccagttacgaagacaagctgtttgatgtttgtggtagccaggattttgaaagtgatttagacaggcttaaagaggaaattgaaaaatcatcaaaacagcgagccatgctggctggagccacagcagtttactcccagttcattactcagctaacagacgaaaaccagtcatgttgccccgtttgtcagagagtttttcagacagaggctgagttacaagaagtcatcagtgatttgcagtctaaactgcgacttgctccagataaactcaagtcaacagaatcagagctaaaaaaaaaggaaaagcggcgtgatgaaatgctgggacttgtgcccatgaggcaaagcataattgatttgaaggagaaggaaataccagaattaagaaacaaactgcagaatgtcaatagagacatacagcgcctaaagaacgacatagaagaacaagaaacactcttgggtacaataatgcctgaagaagaaagtgccaaagtatgcctgacagatgttacaattatggagaggttccagatggaacttaaagatgttgaaagaaaaattgcacaacaagcagctaagctacaaggaatagacttagatcgaactgtccaacaagtcaaccaggagaaacaagagaaacagcacaagttagacacagtttctagtaagattgaattgaatcgtaagcttatacaggaccagcaggaacagattcaacatctaaaaagtacaacaaatgagctaaaatctgagaaacttcagatatccactaatttgcaacgtcgtcagcaactggaggagcagactgtggaattatccactgaagttcagtctttgtacagagagataaaggatgctaaagagcaggtaagccctttggaaacaacattggaaaagttccagcaagaaaaagaagaattaatcaacaaaaaaaatacaagcaacaaaatagcacaggataaactgaatgatattaaagagaaggttaaaaatattcatggctatatgaaagacattgagaattatattcaagatgggaaagacgactataagaagcaaaaagaaactgaacttaataaagtaatagctcaactaagtgaatgcgagaaacacaaagaaaagataaatgaagatatgagactcatgagacaagatattgatacacagaagatacaagaaaggtggctacaagataaccttactttaagaaaaagaaatgaggaactaaaagaagttgaagaagaaagaaaacaacatttgaaggaaatgggtcaaatgcaggttttgcaaatgaaaagtgaacatcagaagttggaagagaacatagacaatataaaaagaaatcataatttggcattagggcgacagaaaggttatgaagaagaaattattcattttaagaaagaacttcgagaaccacaatttcgggatgctgaggaaaagtatagagaaatgatgattgttatgaggacaacagaacttgtgaacaaggatctggatatttattataagactcttgaccaagcaataatgaaatttcacagtatgaaaatggaagaaatcaataaaattatacgtgacctgtggcgaagtacctatcgtggacaagatattgaatacatagaaatacggtctgatgccgatgaaaatgtatcagcttctgataaaaggcggaattataactaccgagtggtgatgctgaagggagacacagccttggatatgcgaggacgatgcagtgctggacaaaaggtattagcctcactcatcattcgcctggccctggctgaaacgttctgcctcaactgtggcatcattgccttggatgagccaacaacaaatcttgaccgagaaaacattgaatctcttgcacatgctctggttgagataataaaaagtcgctcacagcagcgtaacttccagcttctggtaatcactcatgatgaagattttgtggagcttttaggacgttctgaatatgtggagaaattctacaggattaaaaagaacatcgatcagtgctcagagattgtgaaatgcagtgttagctccctgggattcaatgttcattaaaaatatccaagatttaaatgccatagaaatgtaggtcctcagaaagtgtataataagaaacttatttctcatatcaacttagtcaataagaaaatatattctttcaaaggaacattgtgtctaggattttggatgttgagaggttctaaaatcatgaaacttgtttcactgaaaattggacagattgcctgtttctgatttgctgctcttcatcccattccaggcagcctctgtcaggccttcagggttcagcagtacagccgagactcgactctgtgcctccctccccagtgcaaatgcatgcttcttctcaaagcactgttgagaaggagataattactgccttgaaaatttatggttttggtatttttttaaatcatagttaaatgttacctctgaatttacttccttgcatgtggtttgaaaaactgagtattaatatctgaggatgaccagaaatggtgagatgtatgtttggctctgcttttaactttataaatccagtgacctctctctctgggacttggtttccccaactaaaatttgaagtagttgaatggggtctcaaagtttgacaggaaccttaagtaatcatctaagtcagtacccaccaccttcttctcctacatatcccttccagatggtcatccagactcagagctctctctacagagaggaaattctccactgtgcacacccacctttggaaagctctgaccacttgaggcctgatctgcccatcgtgaagaagcctgtaacactcctctgcgtctatcctgtgtagcatactggcttcaccatcaatcctgattcctctctaagtgggcattgccatgtggaaggcaagccaggctcactcacagagtcaaggcctgctccctgtagggtccaaccagacctggaagaacaggcctctccatttgctcttcagatgccacacgtatgcgtgaagacgtgcagctcgacttctcgnggatngccagcngactatatagaatctntgcatgacacactgnacgaagcaaat

SEQ ID NO: 352948 - DNA, 853 bp, Homo sapiens
ttcgctttcctgccgatgtcgttgaggaaaatgaaagcggtcgtggccaggactggcgcagctgccgtttcaggcgaggggcgcagaatgcagcggccgccagcctggagcgcgggccctggggccgcaacccgcgccgggcgaggtggcagcacaccctgggccccccactccccgccgcaagtcctgaggatggccagcagagaaacaagaaaatggactccctggctgctggagagttgaatgccagccaccagccatgggtgccagagtttgtagcctattggaggaaaacacaccaagatcacctctgcagcctgcacagccgggcctttggactcctggatgctagagtgacctgggcgctgaggagggcccccgagccagtaccaggaaaggatagactcctgcttgcagcattcccagcagaggcatcgcctgtggacaccgcgtctgtgtctgtatatggcagagctcccagatatatgcacaagggagtgaaaaaatgtgtttgcaccccagtctctaaaaattcaacagcctggttacttctgggtggtatatcgtaggtggctttaatacgtgttatttgctcatctgtatttcttactctttgcacaattaaaccatgttccttttacttatgtacatttttaataaaagaaagttgttaatgactcagccttctatctccagtactgccgaaagagacaagcggtcctgctgcatgtcatgcacacactggcccttgttctggggactttgaccttggctgctggttggtcatggcctgttttgcccagggctctactgcaggggcagggttggttattcctctgtgccctttttgcct

SEQ ID NO: 352949 - DNA, 1871 bp, Homo sapiens
aagcaggctgtacgaccggaagtatgggattggagagcaaggacgcgggggagcagagatgatccgagccgcgccgccgccgctgttcctgctgctgctgctgctgctgctgctagtgtcctgggcgtcccgaggcgaggcagcccccgaccaggacgagatccagcgcctccccgggctggccaagcagccgtctttccgccagtactccggctacctcaaaggctccggctccaagcacctccactactggtttgtggagtcccagaaggatcccgagaacagccctgtggtgctttggctcaatgggggtcccggctgcagctcactagatgggctcctcacagagcatggccccttcctggtccagccagatggtgtcaccctggagtacaacccctattcttggaatctgattgccaatgtgttatacctggagtccccagctggggtgggcttctcctactccgatgacaagttttatgcaactaatgacactgaggtcgcccagagcaattttgaggcccttcaagatttcttccgcctctttccggagtacaagaacaacaaacttttcctgaccggggagagctatgctggcatctacatccccaccctggccgtgctggtcatgcaggatcccagcatgaaccttcaggggctggctgtgggcaatggactctcctcctatgagcagaatgacaactccctggtctactttgcctactaccatggccttctggggaacaggctttggtcttctctccagacccactgctgctctcaaaacaagtgtaacttctatgacaacaaagacctggaatgcgtgaccaatcttcaggaagtggcccgcatcgtgggcaactctggcctcaacatctacaatctctatgccccgtgtgctggaggggtgcccagccattttaggtatgagaaggacactgttgtggtccaggatttgggcaacatcttcactcgcctgccactcaagcggatgtggcatcaggcactgctgcgctcaggggataaagtgcgcatggaccccccctgcaccaacacaacagctgcttccacctacctcaacaacccgtacgtgcggaaggccctcaacatcccggagcagctgccacaatgggacatgtgcaactttctggtaaacttacagtaccgccgtctctaccgaagcatgaactcccagtatctgaagctgcttagctcacagaaataccagatcctattatataatggagatgtagacatggcctgcaatttcatgggggatgagtggtttgtggattccctcaaccagaagatggaggtgcagcgccggccctggttagtgaagtacggggacagcggggagcagattgccggcttcgtgaaggagttctcccacatcgcctttctcacgatcaagggcgccggccacatggttcccaccgacaagcccctcgctgccttcaccatgttctcccgcttcctgaacaagcagccatactgatgaccacagcaaccagctccacggcctgatgcagcccctcccagcctctcccgctaggagagtcctcttctaagcaaagtgcccctgcaggccgggttctgccgccaggactgcccccttcccagagccctgtacatcccagactgggcccagggtctcccatagacagcctgggggcaagttagcactttattcccgcagcagttcctgaatggggtggcctggccccttctctgcttaaagaatgccctttatgatgcactgattccatcccaggaacccaacagagctcaggacagcccacagggaggtggtggacggactgtaattgatagattgattatggaattaaattgggtacagcttcaaa

SEQ ID NO: 352950 - DNA, 927 bp, Homo sapiens
cccccccccaaaaaggggagtggaacccagctgtctgccttctgggttggagcttggagataggagagaaggtctgatctgttgactacttttcgccccgacctggtcttcctggggcctgctcgtatgttcccggcaactttctggtaaacttacagtaccgccgtctctaccgaagcatgaactcccagtatctgaagctgcttagctcacagaaataccagatcctattatataatggagatgtagacatggcctgcaatttcatgggggatgagtggtttgtggattccctcaaccagaagatggaggtgcagcgccggccctggttagtgaagtacggggacagcggggagcagattgccggcttcgtgaaggagttctcccacatcgcctttctcacgatcaagggcgccggccacatggttcccaccgacaagcccctcgctgccttcaccatgttctcccgcttcctgaacaagcagccatactgatgaccacagcaaccagctccacggcctgatgcagcccctcccagcctctcccgctaggagagtcctcttctaagcaaagtgcccctgcaggccgggttctgccgccaggactgcccccttcccagagccctgtacatcccagactgggcccagggtctcccatagacagcctgggggcaagttagcactttattcccgcagcagttcctgaatggggtggcctggccccttctctgcttaaagaatgccctttatgatgcactgattccatcccaggaacccaacagagctcaggacagcccacagggaggtggtggacggactgtaattgatagattgattatggaattaaattgggtacagcttcaaaaaaaaaaaagaacaataaccaactgacacgataagacagctgacgagaaaaagaagagggggc

SEQ ID NO: 352951 - DNA, 890 bp, Homo sapiens
  misc_feature (828)..(828): n is a, c, g, or t
gaggaggctcgcgggtgggagctggcgctggggccggggcttccctcgcggaggcgccgccagcaactccccgggggctgctgcacggaagcgctgaggagcgagtcaacagcccctctgctgcctcccgtagatgatccgagccgcgccgccgccgctgttcctgctgctgctgctgctgctgctgctagtgtcctgggcgtcccgaggcgaggcagcccccgaccaggacgagatccagcgcctccccgggctggccaagcagccgtctttccgccagtactccggctacctcaaaggctccggctccaagcacctccactactggtttgtggagtcccagaaggatcccgagaacagccctgtggtgctttggctcaatgggggtcccggctgcagctcactagatgggctcctcacagagcatggccccttcctggtccagccagatggtgtcaccctggagtacaacccctattcttggaatctgattgccaatgtgttatacctggagtccccagctggggtgggcttctcctactccgatgacaagttttatgcaactaatgacactgaggtcgcccagagcaattttgaggcccttcaagatttcttccgcctctttccggagtacaagaacaacaaacttttcctgaccggggagagctatgctggcatctacatccccaccctggccgtgctggtcatgcaggatcccagcatgaaccttcaggggctggctgtgggcaatggactctcctcctatgagcagaatgacaactccctggtctactttgcctactaccatggccttctggggaacaggcnttggtcttctctcagaccatgctgctctccaaacagtgaccatgctgctctccaaacagtgt

SEQ ID NO: 352952 - DNA, 1934 bp, Homo sapiens
aagcaggctgtacgaccggaagtatgggattggagagcaaggacgcgggggagcagagatgatccgagccgcgccgccgccgctgttcctgctgctgctgctgctgctgctgctagtgtcctgggcgtcccgaggcgaggcagcccccgaccaggacgagatccagcgcctccccgggctggccaagcagccgtctttccgccagtactccggctacctcaaaggctccggctccaagcacctccactactggtttgtggagtcccagaaggatcccgagaacagccctgtggtgctttggctcaatgggggtcccggctgcagctcactagatgggctcctcacagagcatggccccttcctggtccagccagatggtgtcaccctggagtacaacccctattcttggaatctgattgccaatgtgttatacctggagtccccagctggggtgggcttctcctactccgatgacaagttttatgcaactaatgacactgaggtcgcccagagcaattttgaggcccttcaagatttcttccgcctctttccggagtacaagaacaacaaacttttcctgaccggggagagctatgctggcatctacatccccaccctggccgtgctggtcatgcaggatcccagcatgaaccttcaggggctggctgtgggcaatggactctcctcctatgagcagaatgacaactccctggtctactttgcctactaccatggccttctggggaacaggctttggtcttctctccagacccactgctgctctcaaaacaagtgtaacttctatgacaacaaagacctggaatgcgtgaccaatcttcaggaagtggcccgcatcgtgggcaactctggcctcaacatctacaatctctatgccccgtgtgctggaggggtgcccagccattttaggtatgagaaggacactgttgtggtccaggatttgggcaacatcttcactcgcctgccactcaagcggatgtggcatcaggcactgctgcgctcaggggataaagtgcgcatggaccccccctgcaccaacacaacagctgcttccacctacctcaacaacccgtacgtgcggaaggccctcaacatcccggagcagctgccacaatgggacatgtgcaactttctggtaaacttacagtaccgccgtctctaccgaagcatgaactcccagtatctgaagctgcttagctcacagaaataccagatcctattatataatggagatgtagacatggcctgcaatttcatgggggatgagtggtttgtggattccctcaaccagaagatggaggtgcagcgccggccctggttagtgaagtacggggacagcggggagcagattgccggcttcgtgaaggagttctcccacatcgcctttctcacgatcaagggcgccggccacatggttcccaccgacaagcccctcgctgccttcaccatgttctcccgcttcctgaacaagcagccatactgatgaccacagcaaccagctccacggcctgatgcagcccctcccagcctctcccgctaggagagtcctcttctaagcaaagtgcccctgcaggccgggttctgccgccaggactgcccccttcccagagccctgtacatcccagactgggcccagggtctcccatagacagcctgggggcaagttagcactttattcccgcagcagttcctgaatggggtggcctggccccttctctgcttaaagaatgccctttatgatgcactgattccatcccaggaacccaacagagctcaggacagcccacagggaggtggtggacggactgtaattgatagattgattatggaattaaattgggtacagcttcaaaaaaaaaaaagaacaataaccaactgacacgataagacagctgacgagaaaaagaagagggggc

SEQ ID NO: 352953 - DNA, 2149 bp, Homo sapiens
gcaatgatggtgaccgcaaggcgaccttgtaaggcatttcccccctgactcccttccccgagcctctgcccgggggtcctagcgccgctttctcagccatcccgcctacaacttagccgtccacaacaggatcatctgatcgcgtgcgcccgggctacgatctgcgaggcccgcggaccttgacccggcattgaccgccaccgccccccaggtccgtagggaccaaagaaggggcgggaggaagactgtcacgtggcgccggagttcacgtgactcgtacacatgacttccagtccccgggcgcctcctggagagcaaggacgcgggggagcagagatgatccgagccgcgccgccgccgctgttcctgctgctgctgctgctgctgctgctagtgtcctgggcgtcccgaggcgaggcagcccccgaccaggacgagatccagcgcctccccgggctggccaagcagccgtctttccgccagtactccggctacctcaaaggctccggctccaagcacctccactactggtttgtggagtcccagaaggatcccgagaacagccctgtggtgctttggctcaatgggggtcccggctgcagctcactagatgggctcctcacagagcatggccccttcctggtccagccagatggtgtcaccctggagtacaacccctattcttggaatctgattgccaatgtgttatacctggagtccccagctggggtgggcttctcctactccgatgacaagttttatgcaactaatgacactgaggtcgcccagagcaattttgaggcccttcaagatttcttccgcctctttccggagtacaagaacaacaaacttttcctgaccggggagagctatgctggcatctacatccccaccctggccgtgctggtcatgcaggatcccagcatgaaccttcaggggctggctgtgggcaatggactctcctcctatgagcagaatgacaactccctggtctactttgcctactaccatggccttctggggaacaggctttggtcttctctccagacccactgctgctctcaaaacaagtgtaacttctatgacaacaaagacctggaatgcgtgaccaatcttcaggaagtggcccgcatcgtgggcaactctggcctcaacatctacaatctctatgccccgtgtgctggaggggtgcccagccattttaggtatgagaaggacactgttgtggtccaggatttgggcaacatcttcactcgcctgccactcaagcggatgtggcatcaggcactgctgcgctcaggggataaagtgcgcatggaccccccctgcaccaacacaacagctgcttccacctacctcaacaacccgtacgtgcggaaggccctcaacatcccggagcagctgccacaatgggacatgtgcaactttctggtaaacttacagtaccgccgtctctaccgaagcatgaactcccagtatctgaagctgcttagctcacagaaataccagatcctattatataatggagatgtagacatggcctgcaatttcatgggggatgagtggtttgtggattccctcaaccagaagatggaggtgcagcgccggccctggttagtgaagtacggggacagcggggagcagattgccggcttcgtgaaggagttctcccacatcgcctttctcacgatcaagggcgccggccacatggttcccaccgacaagcccctcgctgccttcaccatgttctcccgcttcctgaacaagcagccatactgatgaccacagcaaccagctccacggcctgatgcagcccctcccagcctctcccgctaggagagtcctcttctaagcaaagtgcccctgcaggccgggttctgccgccaggactgcccccttcccagagccctgtacatcccagactgggcccagggtctcccatagacagcctgggggcaagttagcactttattcccgcagcagttcctgaatggggtggcctggccccttctctgcttaaagaatgccctttatgatgcactgattccatcccaggaacccaacagagctcaggacagcccacagggaggtggtggacggactgtaattgatagattgattatggaattaaattgggtacagcttcaaa

SEQ ID NO: 352954 - DNA, 1859 bp, Homo sapiens
  misc_feature (9)..(9): n is a, c, g, or t
gcaaatccncgacgacaggcgactctggagacgcgggggagcagagatgatccgagccgcgccgccgccgctgttcctgctgctgctgctgctgctgctgctagtgtcctgggcgtcccgaggcgaggcagcccccgaccaggacgagatccagcgcctccccgggctggccaagcagccgtctttccgccagtactccggctacctcaaaggctccggctccaagcacctccactactggtttgtggagtcccagaaggatcccgagaacagccctgtggtgctttggctcaatgggggtcccggctgcagctcactagatgggctcctcacagagcatggccccttcctggtccagccagatggtgtcaccctggagtacaacccctattcttggaatctgattgccaatgtgttatacctggagtccccagctggggtgggcttctcctactccgatgacaagttttatgcaactaatgacactgaggtcgcccagagcaattttgaggcccttcaagatttcttccgcctctttccggagtacaagaacaacaaacttttcctgaccggggagagctatgctggcatctacatccccaccctggccgtgctggtcatgcaggatcccagcatgaaccttcaggggctggctgtgggcaatggactctcctcctatgagcagaatgacaactccctggtctactttgcctactaccatggccttctggggaacaggctttggtcttctctccagacccactgctgctctcaaaacaagtgtaacttctatgacaacaaagacctggaatgcgtgaccaatcttcaggaagtggcccgcatcgtgggcaactctggcctcaacatctacaatctctatgccccgtgtgctggaggggtgcccagccattttaggtatgagaaggacactgttgtggtccaggatttgggcaacatcttcactcgcctgccactcaagcggatgtggcatcaggcactgctgcgctcaggggataaagtgcgcatggaccccccctgcaccaacacaacagctgcttccacctacctcaacaacccgtacgtgcggaaggccctcaacatcccggagcagctgccacaatgggacatgtgcaactttctggtaaacttacagtaccgccgtctctaccgaagcatgaactcccagtatctgaagctgcttagctcacagaaataccagatcctattatataatggagatgtagacatggcctgcaatttcatgggggatgagtggtttgtggattccctcaaccagaagatggaggtgcagcgccggccctggttagtgaagtacggggacagcggggagcagattgccggcttcgtgaaggagttctcccacatcgcctttctcacgatcaagggcgccggccacatggttcccaccgacaagcccctcgctgccttcaccatgttctcccgcttcctgaacaagcagccatactgatgaccacagcaaccagctccacggcctgatgcagcccctcccagcctctcccgctaggagagtcctcttctaagcaaagtgcccctgcaggccgggttctgccgccaggactgcccccttcccagagccctgtacatcccagactgggcccagggtctcccatagacagcctgggggcaagttagcactttattcccgcagcagttcctgaatggggtggcctggccccttctctgcttaaagaatgccctttatgatgcactgattccatcccaggaacccaacagagctcaggacagcccacagggaggtggtggacggactgtaattgatagattgattatggaattaaattgggtacagcttcaaa

SEQ ID NO: 352955 - DNA, 2098 bp, Homo sapiens
gcaatgatggtgaccgcaaggcgaccttgtaaggcatttcccccctgactcccttccccgagcctctgcccgggggtcctagcgccgctttctcagccatcccgcctacaacttagccgtccacaacaggatcatctgatcgcgtgcgcccgggctacgatctgcgaggcccgcggaccttgacccggcattgaccgccaccgccccccaggtccgtagggaccaaagaaggggcgggaggaagactgtcacgtggcgccggagttcacgtgactcgtacacatgacttccagtccccgggcgcctcctggagagcaaggacgcgggggagcagagatgatccgagccgcgccgccgccgctgttcctgctgctgctgctgctgctgctgctagtgtcctgggcgtcccgaggcgaggcagcccccgaccaggacgagatccagcgcctccccgggctggccaagcagccgtctttccgccagtactccggctacctcaaaggctccggctccaagcacctccactactggtttgtggagtcccagaaggatcccgagaacagccctgtggtgctttggctcaatgggggtcccggctgcagctcactagatgggctcctcacagagcatggccccttcctgattgccaatgtgttatacctggagtccccagctggggtgggcttctcctactccgatgacaagttttatgcaactaatgacactgaggtcgcccagagcaattttgaggcccttcaagatttcttccgcctctttccggagtacaagaacaacaaacttttcctgaccggggagagctatgctggcatctacatccccaccctggccgtgctggtcatgcaggatcccagcatgaaccttcaggggctggctgtgggcaatggactctcctcctatgagcagaatgacaactccctggtctactttgcctactaccatggccttctggggaacaggctttggtcttctctccagacccactgctgctctcaaaacaagtgtaacttctatgacaacaaagacctggaatgcgtgaccaatcttcaggaagtggcccgcatcgtgggcaactctggcctcaacatctacaatctctatgccccgtgtgctggaggggtgcccagccattttaggtatgagaaggacactgttgtggtccaggatttgggcaacatcttcactcgcctgccactcaagcggatgtggcatcaggcactgctgcgctcaggggataaagtgcgcatggaccccccctgcaccaacacaacagctgcttccacctacctcaacaacccgtacgtgcggaaggccctcaacatcccggagcagctgccacaatgggacatgtgcaactttctggtaaacttacagtaccgccgtctctaccgaagcatgaactcccagtatctgaagctgcttagctcacagaaataccagatcctattatataatggagatgtagacatggcctgcaatttcatgggggatgagtggtttgtggattccctcaaccagaagatggaggtgcagcgccggccctggttagtgaagtacggggacagcggggagcagattgccggcttcgtgaaggagttctcccacatcgcctttctcacgatcaagggcgccggccacatggttcccaccgacaagcccctcgctgccttcaccatgttctcccgcttcctgaacaagcagccatactgatgaccacagcaaccagctccacggcctgatgcagcccctcccagcctctcccgctaggagagtcctcttctaagcaaagtgcccctgcaggccgggttctgccgccaggactgcccccttcccagagccctgtacatcccagactgggcccagggtctcccatagacagcctgggggcaagttagcactttattcccgcagcagttcctgaatggggtggcctggccccttctctgcttaaagaatgccctttatgatgcactgattccatcccaggaacccaacagagctcaggacagcccacagggaggtggtggacggactgtaattgatagattgattatggaattaaattgggtacagcttcaaa

SEQ ID NO: 352956 - DNA, 1568 bp, Homo sapiens
cccgcatcgtggcaactctggcctcaacatctacaatctctatgccccgtgtgctggaggggtgcccagccattttaggtatgagaagtacaacccctattcttggaatctgattgccaatgtgttatacctggagtccccagctggggtgggcttctcctactccgatgacaagttttatgcaactaatgacactgaggtcgcccagagcaattttgaggcccttcaagatttcttccgcctctttccggagtacaagaacaacaaacttttcctgaccggggagagctatgctggcatctacatccccaccctggccgtgctggtcatgcaggatcccagcatgaaccttcaggggctggctgtgggcaatggactctcctcctatgagcagaatgacaactccctggtctactttgcctactaccatggccttctggggaacaggctttggtcttctctccagacccactgctgctctcaaaacaagtgtaacttctatgacaacaaagacctggaatgcgtgaccaatcttcaggaagtggcccgcatcgtgggcaactctggcctcaacatctacaatctctatgccccgtgtgctggaggggtgcccagccattttaggtatgagaaggacactgttgtggtccaggatttgggcaacatcttcactcgcctgccactcaagcggatgtggcatcaggcactgctgcgctcaggggataaagtgcgcatggaccccccctgcaccaacacaacagctgcttccacctacctcaacaacccgtacgtgcggaaggccctcaacatcccggagcagctgccacaatgggacatgtgcaactttctggtaaacttacagtaccgccgtctctaccgaagcatgaactcccagtatctgaagctgcttagctcacagaaataccagatcctattatataatggagatgtagacatggcctgcaatttcatgggggatgagtggtttgtggattccctcaaccagaagatggaggtgcagcgccggccctggttagtgaagtacggggacagcggggagcagattgccggcttcgtgaaggagttctcccacatcgcctttctcacgatcaagggcgccggccacatggttcccaccgacaagcccctcgctgccttcaccatgttctcccgcttcctgaacaagcagccatactgatgaccacagcaaccagctccacggcctgatgcagcccctcccagcctctcccgctaggagagtcctcttctaagcaaagtgcccctgcaggccgggttctgccgccaggactgcccccttcccagagccctgtacatcccagactgggcccagggtctcccatagacagcctgggggcaagttagcactttattcccgcagcagttcctgaatggggtggcctggccccttctctgcttaaagaatgccctttatgatgcactgattccatcccaggaacccaacagagctcaggacagcccacagggaggtggtggacggactgtaattgatagattgattatggaattaaattgggtacagcttcaaa

SEQ ID NO: 352957 - DNA, 1241 bp, Homo sapiens
aagcaggctgtacgaccggaagtatgggattggagagcaaggacgcgggggagcagagatgatccgagccgcgccgccgccgctgttcctgctgctgctgctgctgctgctgctagtgtcctgggcgtcccgaggcgaggcagcccccgaccaggacgagatccagcgcctccccgggctggccaagcagccgtctttccgccagtactccggctacctcaaaggctccggctccaagcacctccactactggtttgtggagtcccagaaggatcccgagaacagccctgtggtgctttggctcaatgggggtcccggctgcagctcactagatgggctcctcacagagcatggccccttcctggtccagccagatggtgtcaccctggagtacaacccctattcttggaatctgattgccaatgtgttatacctggagtccccagctggggtgggcttctcctactccgatgacaagttttatgcaactaatgacactgaggtcgcccagagcaattttgaggcccttcaagatttcttccgcctctttccggagtacaagaacaacaaacttttcctgaccggggagagctatgctggcatctacatccccaccctggccgtgctggtcatgcaggatcccagcatgaaccttcaggggctggctgtgggcaatggactctcctcctatgagcagaatgacaactccctggtctactttgcctactaccatggccttctggggaacaggctttggtcttctctccagacccactgctgctctcaaaacaagtgtaacttctatgacaacaaagacctggaatgcgtgaccaatcttcaggaagtggcccgcatcgtgggcaactctggcctcaacatctacaatctctatgccccgtgtgctggaggggtgcccagccattttaggtatgagaaggacactgttgtggtccaggatttgggcaacatcttcactcgcctgccactcaagcggatgtggcatcaggcactgctgcgctcaggggataaagtgcgcatggaccccccctgcaccaacacaacagctgcttccacctacctcaacaacccgtacgggccccttctctgcttaaagaatgccctttatgatgcactgattccatcccaggaacccaacagagctcaggacagcccacagggaggtggtggacggactgtaattgatagattgattatggaattaaattgggtacagcttcaaa

SEQ ID NO: 352958 - DNA, 1146 bp, Homo sapiens
aagcaggctgtacgaccggaagtatgggattggagagcaaggacgcgggggagcagagatgatccgagccgcgccgccgccgctgttcctgctgctgctgctgctgctgctgctagtgtcctgggcgtcccgaggcgaggcagcccccgaccaggacgagatccagcgcctccccgggctggccaagcagccgtctttccgccagtactccggctacctcaaaggctccggctccaagcacctccactactggtttgtggagtcccagaaggatcccgagaacagccctgtggtgctttggctcaatgggggtcccggctgcagctcactagatgggctcctcacagagcatggccccttcctggtccagccagatggtgtcaccctggagtacaacccctattcttggaatctgattgccaatgtgttatacctggagtccccagctggggtgggcttctcctactccgatgacaagttttatgcaactaatgacactgaggtcgcccagagcaattttgaggcccttcaagatttcttccgcctctttccggagtacaagaacaacaaacttttcctgaccggggagagctatgctggcatctacatccccaccctggccgtgctggtcatgcaggatcccagcatgaaccttcaggggctggctgtgggcaatggactctcctcctatgagcagaatgacaactccctggtctactttgcctactaccatggccttctggggaacaggctttggtcttctctccagacccactgctgctctcaaaacaagtgtaacttctatgacaacaaagacctggaatgcgtgaccaatcttcaggaagtggcccgcatcgtgggcaactctggcctcaacatctacaatctctatgccccgtgtgctggaggggtgcccagccattttaggtatgagaaggacactgttgtggtccaggatttgggcaacatcttcactcgcctgccactcaagcggatgtggcatcaggcactgctgcgctcaggggataaagtgcgcatggaccccccctgcaccaacacaacaagctcaggacagcccacagggaggtggtggacggactgtaattgatagattgattatggaattaaattgggtacagcttcaaa

SEQ ID NO: 352959 - DNA, 1163 bp, Homo sapiens
  misc_feature (78)..(78): n is a, c, g, or t
ttgggccaacgcaccgtgtggggccaacgcaccgtgttgggccaacgcaccgtgttgggccaacgcaccgtgttgggncaacgcaccgtgttgggccaacgcaccgtgttgggccaacgcaccgtgtcttcaggaagtggcccgcatcgtgggcaactctggcctcaacatctacaatctctatgccccgtgtgctggaggggtgcccagccattttaggtatgagaaggacactgttgtggtccaggatttgggcaacatcttcactcgcctgccactcaagcggatgtggcatcaggcactgctgcgctcaggggataaagtgcgcatggaccccccctgcaccaacacaacagctgcttccacctacctcaacaacccgtacgtgcggaaggccctcaacatcccggagcagctgccacaatgggacatgtgcaactttctggtaaacttacagtaccgccgtctctaccgaagcatgaactcccagtatctgaagctgcttagctcacagaaataccagatcctattatataatggagatgtagacatggcctgcaatttcatgggggatgagtggtttgtggattccctcaaccagaagatggaggtgcagcgccggccctggttagtgaagtacggggacagcggggagcagattgccggcttcgtgaaggagttctcccacatcgcctttctcacgatcaagggcgccggccacatggttcccaccgacaagcccctcgctgccttcaccatgttctcccgcttcctgaacaagcagccatactgatgaccacagcaaccagctccacggcctgatgcagcccctcccagcctctcccgctaggagagtcctcttctaagcaaagtgcccctgcaggccgggttctgccgccaggactgcccccttcccagagccctgtacatcccagactgggcccagggtctcccatagacagcctgggggcaagttagcactttattcccgcagcagttcctgaatggggtggcctggccccttctctgcttaaagaatgccctttatgatgcactgattccatcccaggaacccaacagagctcaggacagcccacagggaggtggtggacggactgtaattgatagattgattatggaattaaattgggtacagcttcaaa

SEQ ID NO: 352960 - DNA, 982 bp, Homo sapiens
aagcaggctgtacgaccggaagtatgggattggagagcaaggacgcgggggagcagagatgatccgagccgcgccgccgccgctgttcctgctgctgctgctgctgctgctgctagtgtcctgggcgtcccgaggcgaggcagcccccgaccaggacgagatccagcgcctccccgggctggccaagcagccgtctttccgccagtactccggctacctcaaaggctccggctccaagcacctccactactggtttgtggagtcccagaaggatcccgagaacagccctgtggtgctttggctcaatgggggtcccggctgcagctcactagatgggctcctcacagagcatggccccttcctggtccagccagatggtgtcaccctggagtacaacccctattcttggaatctgattgccaatgtgttatacctggagtccccagctggggtgggcttctcctactccgatgacaagttttatgcaactaatgacactgaggtcgcccagagcaattttgaggcccttcaagatttcttccgcctctttccggagtacaagaacaacaaacttttcctgaccggggagagctatgctggcatctacatccccaccctggccgtgctggtcatgcaggatcccagcatgaaccttcaggggctggctgtgggcaatggactctcctcctatgagcagaatgacaactccctggtctactttgcctactaccatggccttctggggaacaggctttggtcttctctccagacccactgctgctctcaaaacaagtgtaacttctatgacaacaaagacctggaatgcgtgaccaatggccccttctctgcttaaagaatgccctttatgatgcactgattccatcccaggaacccaacagagctcaggacagcccacagggaggtggtggacggactgtaattgatagattgattatggaattaaattgggtacagcttcaaa

SEQ ID NO: 352961 - DNA, 704 bp, Homo sapiens
ccgagcttataacggggctggaactcccactatcgtgatactgcttagctcacagaaataccagatcctattatataatggagatgtagacatggcctgcaatttcatgggggatgagtggtttgtggattccctcaaccagaagatggaggtgcagcgccggccctggttagtgaagtacggggacagcggggagcagattgccggcttcgtgaaggagttctcccacatcgcctttctcacgatcaagggcgccggccacatggttcccaccgacaagcccctcgctgccttcaccatgttctcccgcttcctgaacaagcagccatactgatgaccacagcaaccagctccacggcctgatgcagcccctcccagcctctcccgctaggagagtcctcttctaagcaaagtgcccctgcaggccgggttctgccgccaggactgcccccttcccagagccctgtacatcccagactgggcccagggtctcccatagacagcctgggggcaagttagcactttattcccgcagcagttcctgaatggggtggcctggccccttctctgcttaaagaatgccctttatgatgcactgattccatcccaggaacccaacagagctcaggacagcccacagggaggtggtggacggactgtaattgatagattgattatggaattaaattgggtacagcttcaaa

SEQ ID NO: 352962 - DNA, 831 bp, Homo sapiens
cacagataaaacatttagtagaatactggacatgcagtaagtcgttagaaaacatgaaaattccctggttcgtgttatctagcttggccccttgaatttcctgaggggtaggccttgaactagggaagggctggggactgggcttgttccacacccctcatttttaccccatcctgctttagaaataccagatcctattatataatggagatgtagacatggcctgcaatttcatgggggatgagtggtttgtggattccctcaaccagaagatggaggtgcagcgccggccctggttagtgaagtacggggacagcggggagcagattgccggcttcgtgaaggagttctcccacatcgcctttctcacgatcaagggcgccggccacatggttcccaccgacaagcccctcgctgccttcaccatgttctcccgcttcctgaacaagcagccatactgatgaccacagcaaccagctccacggcctgatgcagcccctcccagcctctcccgctaggagagtcctcttctaagcaaagtgcccctgcaggccgggttctgccgccaggactgcccccttcccagagccctgtacatcccagactgggcccagggtctcccatagacagcctgggggcaagttagcactttattcccgcagcagttcctgaatggggtggcctggccccttctctgcttaaagaatgccctttatgatgcactgattccatcccaggaacccaacagagctcaggacagcccacagggaggtggtggacggactgtaattgatagattgattatggaattaaattgggtacagcttcaaa

SEQ ID NO: 352963 - DNA, 561 bp, Homo sapiens
aagcaggctgtacgaccggaagtatgggattggagagcaaggacgcgggggagcagagatgatccgagccgcgccgccgccgctgttcctgctgctgctgctgctgctgctgctagtgtcctgggcgtcccgaggcgaggcagcccccgaccaggacgagatccagcgcctccccgggctggccaagcagccgtctttccgccagtactccggctacctcaaaggctccggctccaagcacctccactactggtttgtggagtcccagaaggatcccgagaacagccctgtggtgctttggctcaatgggggtcccggctgcagctcactagatgggctcctcacagagcatggccccttcctggtccagccagatggtgtcaccctggagtacaacccctattcttggaatctgattgccaatgtgttatacctggagtccccagctggggtgggcttctcctactccgatgacaagttttatgcaactaatgacactgaggtcgcccagagcaattttgagcccttcaagatttcttcctttggcaaccaagtgggagc

SEQ ID NO: 352964 - DNA, 563 bp, Homo sapiens
aagcaggctgtacgaccggaagtatgggattggagagcaaggacgcgggggagcagagatgatccgagccgcgccgccgccgctgttcctgctgctgctgctgctgctgctgctagtgtcctgggcgtcccgaggcgaggcagcccccgaccaggacgagatccagcgcctccccgggctggccaagcagccgtctttccgccagtactccggctacctcaaaggctccggctccaagcacctccactactggtttgtggagtcccagaaggatcccgagaacagccctgtggtgctttggctcaatgggggtcccggctgcagctcactagatgggctcctcacagagcatggccccttcctggtccagccagatggtgtcaccctggagtacaacccctattcttggaatctgattgccaatgtgttatacctggagtccccagctggggtgggcttctcctactccgatgacaagttttatgcaactaatgacactgaggtcgcccagagcaattgaggccctctatgattgccttatccgagggtacagagctcgattc

SEQ ID NO: 352965 - DNA, 288 bp, Homo sapiens
ttcctctatgccattggctttgctgcctgtacctctcagaggttttacccacatgtaaagtgcctctcatggtggccctttccctccacccagctggcccttgggacttactcagccatctctttcctcctcaggtccagccagatggtgtcaccctggagtacaacccctattcttggaatctggtatagctggagctgtgggtgtgtctgggcacttggatggggtggcatttagctaatttttccctcccctctagattgccaatgtgttatacctggagtcccc

SEQ ID NO: 352966 - DNA, 864 bp, Homo sapiens
cccccccccaaaaaggggagtggaacccagctgtctgccttctgggttggagcttggagataggagagaaggtctgatctgttgactacttttcgccccgacctggtcttcctggggcctgctcgtatgttcccggcaactttctggtaaacttacagtaccgccgtctctaccgaagcatgaactcccagtatctgaagctgcttagctcacagaaataccagatcctattatataatggagatgtagacatggcctgcaatttcatgggggatgagtggtttgtggattccctcaaccagaagatggaggtgcagcgccggccctggttagtgaagtacggggacagcggggagcagattgccggcttcgtgaaggagttctcccacatcgcctttctcacgatcaagggcgccggccacatggttcccaccgacaagcccctcgctgccttcaccatgttctcccgcttcctgaacaagcagccatactgatgaccacagcaaccagctccacggcctgatgcagcccctcccagcctctcccgctaggagagtcctcttctaagcaaagtgcccctgcaggccgggttctgccgccaggactgcccccttcccagagccctgtacatcccagactgggcccagggtctcccatagacagcctgggggcaagttagcactttattcccgcagcagttcctgaatggggtggcctggccccttctctgcttaaagaatgccctttatgatgcactgattccatcccaggaacccaacagagctcaggacagcccacagggaggtggtggacggactgtaattgatagattgattatggaattaaattgggtacagcttcaaa

SEQ ID NO: 352967 - DNA, 678 bp, Homo sapiens
gattgccaatgtgttatacctggagtccccagctggggtgggcttctcctactccgatgacaagttttatgcaactaatgacactgaggtcgcccagagcaattttgaggcccttcaagatttcttccgcctctttccggagtacaagaacaacaaacttttcctgaccggggagagctatgctggcatctacatccccaccctggccgtgctggtcatgcaggatcccagcatgaaccttcaggggctggctgtgggcaatggactctcctcctatgagcagaatgacaactccctggtctactttgcctactaccatggccttctggggaacaggctttggtcttctctccagacccactgctgctctcaaaacaagtgtaacttctatgacaacaaagacctggaatgcgtgaccaatgtgaggttctgccatcactttgcatgagctctcccatccctaatcctgagaacaggaccacattccctccttggggactccttgttctccgtccctcattgctttcttgcacctttaagcaatttagtgttctctgggacatgtgtctaagtgtgtattcccaccaccacctcctatggtggcaaatcccataacctccgtgaggagaaaggacttcttcacatttatcaaacacctgcaacgtggcaggcactgtg

SEQ ID NO: 352968 - DNA, 2195 bp, Homo sapiens
gcaatgatggtgaccgcaaggcgaccttgtaaggcatttcccccctgactcccttccccgagcctctgcccgggggtcctagcgccgctttctcagccatcccgcctacaacttagccgtccacaacaggatcatctgatcgcgtgcgcccgggctacgatctgcgaggcccgcggaccttgacccggcattgaccgccaccgccccccaggtccgtagggaccaaagaaggggcgggaggaagactgtcacgtggcgccggagttcacgtgactcgtacacatgacttccagtccccgggcgcctcctggagagcaaggacgcgggggagcagaggtgagctggcaccggaggctggaggggatccccgagcccgggatcgatgatccgagccgcgccgccgccgctgttcctgctgctgctgctgctgctgctgctagtgtcctgggcgtcccgaggcgaggcagcccccgaccaggacgagatccagcgcctccccgggctggccaagcagccgtctttccgccagtactccggctacctcaaaggctccggctccaagcacctccactactggtttgtggagtcccagaaggatcccgagaacagccctgtggtgctttggctcaatgggggtcccggctgcagctcactagatgggctcctcacagagcatggccccttcctggtccagccagatggtgtcaccctggagtacaacccctattcttggaatctgattgccaatgtgttatacctggagtccccagctggggtgggcttctcctactccgatgacaagttttatgcaactaatgacactgaggtcgcccagagcaattttgaggcccttcaagatttcttccgcctctttccggagtacaagaacaacaaacttttcctgaccggggagagctatgctggcatctacatccccaccctggccgtgctggtcatgcaggatcccagcatgaaccttcaggggctggctgtgggcaatggactctcctcctatgagcagaatgacaactccctggtctactttgcctactaccatggccttctggggaacaggctttggtcttctctccagacccactgctgctctcaaaacaagtgtaacttctatgacaacaaagacctggaatgcgtgaccaatcttcaggaagtggcccgcatcgtgggcaactctggcctcaacatctacaatctctatgccccgtgtgctggaggggtgcccagccattttaggtatgagaaggacactgttgtggtccaggatttgggcaacatcttcactcgcctgccactcaagcggatgtggcatcaggcactgctgcgctcaggggataaagtgcgcatggaccccccctgcaccaacacaacagctgcttccacctacctcaacaacccgtacgtgcggaaggccctcaacatcccggagcagctgccacaatgggacatgtgcaactttctggtaaacttacagtaccgccgtctctaccgaagcatgaactcccagtatctgaagctgcttagctcacagaaataccagatcctattatataatggagatgtagacatggcctgcaatttcatgggggatgagtggtttgtggattccctcaaccagaagatggaggtgcagcgccggccctggttagtgaagtacggggacagcggggagcagattgccggcttcgtgaaggagttctcccacatcgcctttctcacgatcaagggcgccggccacatggttcccaccgacaagcccctcgctgccttcaccatgttctcccgcttcctgaacaagcagccatactgatgaccacagcaaccagctccacggcctgatgcagcccctcccagcctctcccgctaggagagtcctcttctaagcaaagtgcccctgcaggccgggttctgccgccaggactgcccccttcccagagccctgtacatcccagactgggcccagggtctcccatagacagcctgggggcaagttagcactttattcccgcagcagttcctgaatggggtggcctggccccttctctgcttaaagaatgccctttatgatgcactgattccatcccaggaacccaacagagctcaggacagcccacagggaggtggtggacggactgtaattgatagattgattatggaattaaattgggtacagcttcaaa

SEQ ID NO: 352969 - DNA, 1837 bp, Homo sapiens
accgctgtggccacagcatggccctttattcctcccgcccccgccaaggggcaccaagggcacgtttccgtgccacctcctgtctactcattgttgcatgagccctgtctgccagcccaccccaggactgggggcagcaccaggtcccggggagagggattgagccaagaggtgagggtgcacgtcttgcgctcctgtcccagctcccctagactggtgtttgtggagtcccagaaggatcccgagaacagccctgtggtgctttggctcaatgggggtcccggctgcagctcactagatgggctcctcacagagcatggccccttcctggtccagccagatggtgtcaccctggagtacaacccctattcttggaatctgattgccaatgtgttatacctggagtccccagctggggtgggcttctcctactccgatgacaagttttatgcaactaatgacactgaggtcgcccagagcaattttgaggcccttcaagatttcttccgcctctttccggagtacaagaacaacaaacttttcctgaccggggagagctatgctggcatctacatccccaccctggccgtgctggtcatgcaggatcccagcatgaaccttcaggggctggctgtgggcaatggactctcctcctatgagcagaatgacaactccctggtctactttgcctactaccatggccttctggggaacaggctttggtcttctctccagacccactgctgctctcaaaacaagtgtaacttctatgacaacaaagacctggaatgcgtgaccaatcttcaggaagtggcccgcatcgtgggcaactctggcctcaacatctacaatctctatgccccgtgtgctggaggggtgcccagccattttaggtatgagaaggacactgttgtggtccaggatttgggcaacatcttcactcgcctgccactcaagcggatgtggcatcaggcactgctgcgctcaggggataaagtgcgcatggaccccccctgcaccaacacaacagctgcttccacctacctcaacaacccgtacgtgcggaaggccctcaacatcccggagcagctgccacaatgggacatgtgcaactttctggtaaacttacagtaccgccgtctctaccgaagcatgaactcccagtatctgaagctgcttagctcacagaaataccagatcctattatataatggagatgtagacatggcctgcaatttcatgggggatgagtggtttgtggattccctcaaccagaagatggaggtgcagcgccggccctggttagtgaagtacggggacagcggggagcagattgccggcttcgtgaaggagttctcccacatcgcctttctcacgatcaagggcgccggccacatggttcccaccgacaagcccctcgctgccttcaccatgttctcccgcttcctgaacaagcagccatactgatgaccacagcaaccagctccacggcctgatgcagcccctcccagcctctcccgctaggagagtcctcttctaagcaaagtgcccctgcaggccgggttctgccgccaggactgcccccttcccagagccctgtacatcccagactgggcccagggtctcccatagacagcctgggggcaagttagcactttattcccgcagcagttcctgaatggggtggcctggccccttctctgcttaaagaatgccctttatgatgcactgattccatcccaggaacccaacagagctcaggacagcccacagggaggtggtggacggactgtaattgatagattgattatggaattaaattgggtacagcttcaaa

SEQ ID NO: 352970 - DNA, 1345 bp, Homo sapiens
aagcaggctgtacgaccggaagtatgggattggagagcaaggacgcgggggagcagagatgatccgagccgcgccgccgccgctgttcctgctgctgctgctgctgctgctgctagtgtcctgggcgtcccgaggcgaggcagcccccgaccaggacgagatccagcgcctccccgggctggccaagcagccgtctttccgccagtactccggctacctcaaaggctccggctccaagcacctccactactggtttgtggagtcccagaaggatcccgagaacagccctgtggtgctttggctcaatgggggtcccggctgcagctcactagatgggctcctcacagagcatggccccttcctggtccagccagatggtgtcaccctggagtacaacccctattcttggaatctgattgccaatgtgttatacctggagtccccagctggggtgggcttctcctactccgatgacaagttttatgcaactaatgacactgaggtcgcccagagcaattttgaggcccttcaagatttcttccgcctctttccggagtacaagaacaacaaacttttcctgaccggggagagctatgctggcatctacatccccaccctggccgtgctggtcatgcaggatcccagcatgaaccttcaggggctggctgtgggcaatggactctcctcctatgagcagaatgacaactccctggtctactttgcctactaccatggccttctggggaacaggctttggtcttctctccagacccactgctgctctcaaaacaagtgtaacttctatgacaacaaagacctggaatgcgtgaccaatcttcaggaagtggcccgcatcgtgggcaactctggcctcaacatctacaatctctatgccccgtgtgctggaggggtgcccagccattttaggtatgagaaggacactgttgtggtccaggatttgggcaacatcttcactcgcctgccactcaagcggatgtggcatcaggcactgctgcgctcaggggataaagtgcgcatggaccccccctgcaccaacacaacagctgcttccacctacctcaacaacccgtacgtgcggaaggccctcaacatcccggagcagctgccacaatgggacatgtgcaactttctggtaaacttacagtaccgccgtctctaccgaagcatgaactcccagtatctgaagctgcttagctcacagaaataccagatcctattatataatggacgatgtagaaccttggccctgcaaattttccaatgggggggaactcaaattcggggttagggcgggagatttccacttcaagccaggaaagcaatg

SEQ ID NO: 352971 - DNA, 1309 bp, Homo sapiens
aagcaggctgtacgaccggaagtatgggattggagagcaaggacgcgggggagcagagatgatccgagccgcgccgccgccgctgttcctgctgctgctgctgctgctgctgctagtgtcctgggcgtcccgaggcgaggcagcccccgaccaggacgagatccagcgcctccccgggctggccaagcagccgtctttccgccagtactccggctacctcaaaggctccggctccaagcacctccactactggtttgtggagtcccagaaggatcccgagaacagccctgtggtgctttggctcaatgggggtcccggctgcagctcactagatgggctcctcacagagcatggccccttcctggtccagccagatggtgtcaccctggagtacaacccctattcttggaatctgattgccaatgtgttatacctggagtccccagctggggtgggcttctcctactccgatgacaagttttatgcaactaatgacactgaggtcgcccagagcaattttgaggcccttcaagatttcttccgcctctttccggagtacaagaacaacaaacttttcctgaccggggagagctatgctggcatctacatccccaccctggccgtgctggtcatgcaggatcccagcatgaaccttcaggggctggctgtgggcaatggactctcctcctatgagcagaatgacaactccctggtctactttgcctactaccatggccttctggggaacaggctttggtcttctctccagacccactgctgctctcaaaacaagtgtaacttctatgacaacaaagacctggaatgcgtgaccaatcttcaggaagtggcccgcatcgtgggcaactctggcctcaacatctacaatctctatgccccgtgtgctggaggggtgcccagccattttaggtatgagaaggacactgttgtggtccaggatttgggcaacatcttcactcgcctgccactcaagcggatgtggcatcaggcactgctgcgctcaggggataaagtgcgcatggaccccccctgcaccaacacaacagctgcttccacctacctcaacaacccgtacgttggcccaacgttgggccaacgcaccgtctgctggggcggccaccctggcttcactgagaggacccaggtgaggacctggctgccggtcactgggctgctggtcactgagctaccagtcactgggcctgcagctgctgcttcctgctcagcattgtggtcagcgccaaagctgccgcgcgcggctccccgccgcctccgcgtggaagcggggagc

SEQ ID NO: 352972 - DNA, 1196 bp, Homo sapiens
aagcaggctgtacgaccggaagtatgggattggagagcaaggacgcgggggagcagagatgatccgagccgcgccgccgccgctgttcctgctgctgctgctgctgctgctgctagtgtcctgggcgtcccgaggcgaggcagcccccgaccaggacgagatccagcgcctccccgggctggccaagcagccgtctttccgccagtactccggctacctcaaaggctccggctccaagcacctccactactggtttgtggagtcccagaaggatcccgagaacagccctgtggtgctttggctcaatgggggtcccggctgcagctcactagatgggctcctcacagagcatggccccttcctggtccagccagatggtgtcaccctggagtacaacccctattcttggaatctgattgccaatgtgttatacctggagtccccagctggggtgggcttctcctactccgatgacaagttttatgcaactaatgacactgaggtcgcccagagcaattttgaggcccttcaagatttcttccgcctctttccggagtacaagaacaacaaacttttcctgaccggggagagctatgctggcatctacatccccaccctggccgtgctggtcatgcaggatcccagcatgaaccttcaggggctggctgtgggcaatggactctcctcctatgagcagaatgacaactccctggtctactttgcctactaccatggccttctggggaacaggctttggtcttctctccagacccactgctgctctcaaaacaagtgtaacttctatgacaacaaagacctggaatgcgtgaccaatcttcaggaagtggcccgcatcgtgggcaactctggcctcaacatctacaatctctatgccccgtgtgctggaggggtgcccagccattttaggtatgagaaggacactgttgtggtccaggatttgggcaacatcttcactcgcctgccactcaagcggatgtggcatcaggcactgctgcgctcaggggataaagtgcgcatggaccccccctgcaccaacacaacagctgcttccacctacctcaacaacccgtacgttggcccaacgttgggccaacgcaccgtccagttcgtccctttccagttttacagtgattgctgcgatctggtacggtgtgtgccacaacggtacgagctga

SEQ ID NO: 352973 - DNA, 1097 bp, Homo sapiens
  misc_feature (78)..(78): n is a, c, g, or t
ttgggccaacgcaccgtgtggggccaacgcaccgtgttgggccaacgcaccgtgttgggccaacgcaccgtgttgggncaacgcaccgtgttgggccaacgcaccgtgttgggccaacgcaccgtgtgctggaggggtgcccagccattttaggtatgagaaggacactgttgtggtccaggatttgggcaacatcttcactcgcctgccactcaagcggatgtggcatcaggcactgctgcgctcaggggataaagtgcgcatggaccccccctgcaccaacacaacagctgcttccacctacctcaacaacccgtacgtgcggaaggccctcaacatcccggagcagctgccacaatgggacatgtgcaactttctggtaaacttacagtaccgccgtctctaccgaagcatgaactcccagtatctgaagctgcttagctcacagaaataccagatcctattatataatggagatgtagacatggcctgcaatttcatgggggatgagtggtttgtggattccctcaaccagaagatggaggtgcagcgccggccctggttagtgaagtacggggacagcggggagcagattgccggcttcgtgaaggagttctcccacatcgcctttctcacgatcaagggcgccggccacatggttcccaccgacaagcccctcgctgccttcaccatgttctcccgcttcctgaacaagcagccatactgatgaccacagcaaccagctccacggcctgatgcagcccctcccagcctctcccgctaggagagtcctcttctaagcaaagtgcccctgcaggccgggttctgccgccaggactgcccccttcccagagccctgtacatcccagactgggcccagggtctcccatagacagcctgggggcaagttagcactttattcccgcagcagttcctgaatggggtggcctggccccttctctgcttaaagaatgccctttatgatgcactgattccatcccaggaacccaacagagctcaggacagcccacagggaggtggtggacggactgtaattgatagattgattatggaattaaattgggtacagcttcaaa

SEQ ID NO: 352974 - DNA, 899 bp, Homo sapiens
aagcaggctgtacgaccggaagtatgggattggagagcaaggacgcgggggagcagagatgatccgagccgcgccgccgccgctgttcctgctgctgctgctgctgctgctgctagtgtcctgggcgtcccgaggcgaggcagcccccgaccaggacgagatccagcgcctccccgggctggccaagcagccgtctttccgccagtactccggctacctcaaaggctccggctccaagcacctccactactggtttgtggagtcccagaaggatcccgagaacagccctgtggtgctttggctcaatgggggtcccggctgcagctcactagatgggctcctcacagagcatggccccttcctggtccagccagatggtgtcaccctggagtacaacccctattcttggaatctgattgccaatgtgttatacctggagtccccagctggggtgggcttctcctactccgatgacaagttttatgcaactaatgacactgaggtcgcccagagcaattttgaggcccttcaagatttcttccgcctctttccggagtacaagaacaacaaacttttcctgaccggggagagctatgctggcatctacatccccaccctggccgtgctggtcatgcaggatcccagcatgaaccttcaggggctggctgtgggcaatggactctcctcctatgagcagaatgacaactccctggtctactttgcctactaccatggccttctggggaacaggctttggtcttctctccagacccactgctgctctcaaaacaagtgtaacttctatgactagagtggccggccactctagtcaagagcaagttgacaactttactctggatataaatactgcctatgccagactcagaggaatcgaacag

SEQ ID NO: 352975 - DNA, 1007 bp, Homo sapiens
gcaatgatggtgaccgcaaggcgaccttgtaaggcatttcccccctgactcccttccccgagcctctgcccgggggtcctagcgccgctttctcagccatcccgcctacaacttagccgtccacaacaggatcatctgatcgcgtgcgcccgggctacgatctgcgaggcccgcggaccttgacccggcattgaccgccaccgccccccaggtccgtagggaccaaagaaggggcgggaggaagactgtcacgtggcgccggagttcacgtgactcgtacacatgacttccagtccccgggcgcctcctggagagcaaggacgcgggggagcagaggtgagctggcaccggaggctggaggggatccccgagcccgggatcgatgatccgagccgcgccgccgccgctgttcctgctgctgctgctgctgctgctgctagtgtcctgggcgtcccgaggcgaggcagcccccgaccaggacgagatccagcgcctccccgggctggccaagcagccgtctttccgccagtactccggctacctcaaaggctccggctccaagcacctccactactggtttgtggagtcccagaaggatcccgagaacagccctgtggtgctttggctcaatgggggtcccggctgcagctcactagatgggctcctcacagagcatggccccttcctggtccagccagatggtgtcaccctggagtacaacccctattcttggaatctgattgccaatgtgttatacctggagtccccagctggggtgggcttctcctactccgatgacaagttttatgcaactaatgacactgaggtcgcccagagcaattttgaggcccttcaagatttcttccgcctctttccggagtacaagaacaacaaacttttcctgaccggggagagctatgctggcatctacatccccaccctggccgtgctggtcatgcaggatcccagcatgaaccttcaggtgcagggtagctgcaggagggaag

SEQ ID NO: 352976 - DNA, 511 bp, Homo sapiens
aagcaggctgtacgaccggaagtatgggattggagagcaaggacgcgggggagcagagatgatccgagccgcgccgccgccgctgttcctgctgctgctgctgctgctgctgctagtgtcctgggcgtcccgaggcgaggcagcccccgaccaggacgagatccagcgcctccccgggctggccaagcagccgtctttccgccagtactccggctacctcaaaggctccggctccaagcacctccactactggtttgtggagtcccagaaggatcccgagaacagccctgtggtgctttggctcaatgggggtcccggctgcagctcactagatgggctcctcacagagcatggccccttcctgggccccttctctgcttaaagaatgccctttatgatgcactgattccatcccaggaacccaacagagctcaggacagcccacagggaggtggtggacggactgtaattgatagattgattatggaattaaattgggtacagcttcaaa

SEQ ID NO: 352977 - DNA, 3327 bp, Homo sapiens
gagacataaaggcctgaagaagacccacttcatcaagaacatgaggcagtacgacaccaggaacagcaggatcgtgctcatctgtgccaagcggtccctgtgcgcggccttctcggtcctgccctatggggaaggcctgcggatcagtgacctgagggtggacagccagaagcagaggcacccgtccggcggcgtctctgtgtcttccgagatggtctttgagctagaaggtgtggagctaggagcagacgggaaggtcgtgtcttatgcgaagttcctgtatcccaccaacgccctggtcacacacaagagtgacagccatggcctgctgcccacacctcggcccagtgtcccccggactctgccagggccaagacataaacctgcccccaccaagtcggcaccagccagcacagaactagggagtgacgtgggggacaccctggagtacaaccccaacctcctggatgacccgcagtggccctgcggcaagcacaaacgtgtcctcatctttgcgtcgtacatgaccacagtgatagaatacgtgaagccctcagacctcaaaaaggacatgaacgagaccttcagggagaagttcccccatgtcaaactgacgctgagcaaaatcaggagcttaaagcgggagatgcggagcctgtcggaggagtgcagcctggagcccgtgacggtggccatggcctacgtgtactttgagaagctggtcctgcagggcaagctcagcaaacagaaccgcaagctgtgcgctggcgcctgcgtgctgctggctgccaagatcagcagtgacctgcgcaagagcggcgtgaagcagctcatcgataagttagaagaaaggtttcgattcaacaggcgcgacctgatagggtttgagttcacagtgctcgtggccttggagctggccctgtatcttcccgagaaccaagtgttacctcattacaggcgcctcacccagcagttctagcagaggccccacagaaggctcagggcaccgaggtgcacttgccggcctgggaggtgtcccactgaagccccgcgcctcctcctgccagcacccccagcacctgctagcaggaggcacctggcctccgctggtgcagctttcctttttgcctctttgccatttccttggaaagagacgtcgctttcatccccaagtgcaccgtccctccgaggggatttctgagaattctcctgcatttttacataaactaaatgtgaggtttgttactggtatttttttcacgtgcctgagaccagcctggtaccaggaccttttgttcacagcgtgcagcagcgagccggctgcagtgtgtctcccctggcctcgccttctgcaaaccaccgcagccaccacagcgtcagggtggagatctgggtttctagacctcactgaacacactggaatggctgagtttaacttatttaggcattcatcttggagatgtggtttttcgggttccccagcagcatctcccgacaccaactgtgccgctggctccctgccacctgaagccgagctcctccagagctttctccgcccacctcactgcatcccaagtggagcttttggtgtccagttaggccagcgggagcagtctcctgatttattttgatctcattcttggactcttggacctctctgttcttcaagcatcgtgtcactgtgaaatcctaacgcccctgtgtcctacagaccgacggcacaacagacagctgcccatcccatgccatgctctaccctctgcctctcaccaggagacactctgggcctccaggacaattgctgcttgccggctcttatttttctaagcaatattgtgatggagaaaaataacatatttattgggatttggttttttgggtcttttttttttaagggaacaaaaaatggttaaatgaggtctgctgaagttgacttgaaaacacacttgaccctcaggcaggagggcactgaccacaccccacacaacctcaaagggtcagtgcgtcagtgccttttcttctgaggcaggaaacaggtgccatcttggccacctcggccagggcagcccaccatgctaaaaggaccccaaatggtggtcgttgtcccttctgtgcaggccagcagggccccatctctagtttttccacgtctgtctgaagttcttgcaacaaattctgcatggtccagcgctccagctagctgcctcatcaaaaacactgaataaccaaggactgctgagtttttcttcatggggggtcagctggtctcaaaactggccactgcctcagccaccaagctttttcctaccactaccttataaacctgcctggccctggaggggctctgggacgactttgtctctagcccattaatacaatacatcctatgctttctgtgcagactggtgcttccgcagaaaggagatgccaattctgctatcacagaactccaccagcaactccacccgaccccagcagtggtgcaggacagctgccagcacccacctggccctcctccttttccacagccactcactggggccaccaaaacccagagatggcaggtgtgtgggacagactggaggatgaggacaaaccaaagcctttgttctttcttattgtggagcgtccccttccatcaagcagcctgccctcaagccaaggatcatcccctggaacccagtatgcacccagaggggactcagcttcaaagctgctccaccatgctgggtcccaggcagctttcctctgaaaagcaacctctcctgccacccagatcccatctcaagagctcgcccatgttacgagcatgtaaaggactgacttcctagtaactgttgcagtttacaacctgccctccagggacacgtctccatggtttttcctacacatgaatgcgagaaatggctgataagcacagtaatttaagattgcgtattcatgtagtgagatttagtcattaaccaacccggtctttgtgatgtgtgaagccttcccttcagttatgtcccatttttatgatgccaaaagctgccactgtgtggtattcgaggattattgcaacaaagccagtagttaaaccaaactacagtctcagcctgtcattctctagaacacatccaggtgtcggagctaaggtgttcagctcggctgtgactatacagaaccaggcctggcgttgcttccgcaccggtagcagttgtggatgtcagtgtgcataagcaagtatctgacctcagaatgtttgagttattttgtcttagatatctgtttttaaatggataatgtatttgtcctttaaacctcagttttgcaatatgtttcaca

SEQ ID NO: 352978 - DNA, 3444 bp, Homo sapiens
ctagtgggctagtgaaggtgggcgccaccccgggggctctaccagccagtgtctgtactggggaagcggggctgaaaaacccctccttccatgaaagcactcctgacgtgcgccttcctggtcacaccggtgccgcctttctttcccgaggggctgtgctgacattgttcccgagagcacctcgggccagcggacaggtgggctgggctgccagagcctgagttcagcgcagaccacagccccttgcctctcccatgtttgcagtgacctgagggtggacagccagaagcagaggcacccgtccggcggcgtctctgtgtcttccgagatggtctttgagctagaaggtgtggagctaggagcagacgggaaggtcgtgtcttatgcgaagttcctgtatcccaccaacgccctggtcacacacaagagtgacagccatggcctgctgcccacacctcggcccagtgtcccccggactctgccagggccaagacataaacctgcccccaccaagtcggcaccagccagcacagaactagggagtgacgtgggggacaccctggagtacaaccccaacctcctggatgacccgcagtggccctgcggcaagcacaaacgtgtcctcatctttgcgtcgtacatgaccacagtgatagaatacgtgaagccctcagacctcaaaaaggacatgaacgagaccttcagggagaagttcccccatgtcaaactgacgctgagcaaaatcaggagcttaaagcgggagatgcggagcctgtcggaggagtgcagcctggagcccgtgacggtggccatggcctacgtgtactttgagaagctggtcctgcagggcaagctcagcaaacagaaccgcaagctgtgcgctggcgcctgcgtgctgctggctgccaagatcagcagtgacctgcgcaagagcggcgtgaagcagctcatcgataagttagaagaaaggtttcgattcaacaggcgcgacctgatagggtttgagttcacagtgctcgtggccttggagctggccctgtatcttcccgagaaccaagtgttacctcattacaggcgcctcacccagcagttctagcagaggccccacagaaggctcagggcaccgaggtgcacttgccggcctgggaggtgtcccactgaagccccgcgcctcctcctgccagcacccccagcacctgctagcaggaggcacctggcctccgctggtgcagctttcctttttgcctctttgccatttccttggaaagagacgtcgctttcatccccaagtgcaccgtccctccgaggggatttctgagaattctcctgcatttttacataaactaaatgtgaggtttgttactggtatttttttcacgtgcctgagaccagcctggtaccaggaccttttgttcacagcgtgcagcagcgagccggctgcagtgtgtctcccctggcctcgccttctgcaaaccaccgcagccaccacagcgtcagggtggagatctgggtttctagacctcactgaacacactggaatggctgagtttaacttatttaggcattcatcttggagatgtggtttttcgggttccccagcagcatctcccgacaccaactgtgccgctggctccctgccacctgaagccgagctcctccagagctttctccgcccacctcactgcatcccaagtggagcttttggtgtccagttaggccagcgggagcagtctcctgatttattttgatctcattcttggactcttggacctctctgttcttcaagcatcgtgtcactgtgaaatcctaacgcccctgtgtcctacagaccgacggcacaacagacagctgcccatcccatgccatgctctaccctctgcctctcaccaggagacactctgggcctccaggacaattgctgcttgccggctcttatttttctaagcaatattgtgatggagaaaaataacatatttattgggatttggttttttgggtcttttttttttaagggaacaaaaaatggttaaatgaggtctgctgaagttgacttgaaaacacacttgaccctcaggcaggagggcactgaccacaccccacacaacctcaaagggtcagtgcgtcagtgccttttcttctgaggcaggaaacaggtgccatcttggccacctcggccagggcagcccaccatgctaaaaggaccccaaatggtggtcgttgtcccttctgtgcaggccagcagggccccatctctagtttttccacgtctgtctgaagttcttgcaacaaattctgcatggtccagcgctccagctagctgcctcatcaaaaacactgaataaccaaggactgctgagtttttcttcatggggggtcagctggtctcaaaactggccactgcctcagccaccaagctttttcctaccactaccttataaacctgcctggccctggaggggctctgggacgactttgtctctagcccattaatacaatacatcctatgctttctgtgcagactggtgcttccgcagaaaggagatgccaattctgctatcacagaactccaccagcaactccacccgaccccagcagtggtgcaggacagctgccagcacccacctggccctcctccttttccacagccactcactggggccaccaaaacccagagatggcaggtgtgtgggacagactggaggatgaggacaaaccaaagcctttgttctttcttattgtggagcgtccccttccatcaagcagcctgccctcaagccaaggatcatcccctggaacccagtatgcacccagaggggactcagcttcaaagctgctccaccatgctgggtcccaggcagctttcctctgaaaagcaacctctcctgccacccagatcccatctcaagagctcgcccatgttacgagcatgtaaaggactgacttcctagtaactgttgcagtttacaacctgccctccagggacacgtctccatggtttttcctacacatgaatgcgagaaatggctgataagcacagtaatttaagattgcgtattcatgtagtgagatttagtcattaaccaacccggtctttgtgatgtgtgaagccttcccttcagttatgtcccatttttatgatgccaaaagctgccactgtgtggtattcgaggattattgcaacaaagccagtagttaaaccaaactacagtctcagcctgtcattctctagaacacatccaggtgtcggagctaaggtgttcagctcggctgtgactatacagaaccaggcctggcgttgcttccgcaccggtagcagttgtggatgtcagtgtgcataagcaagtatctgacctcagaatgtttgagttattttgtcttagatatctgtttttaaatggataatgtatttgtcctttaaacctcagttttgcaatatgtttcaca

SEQ ID NO: 352979 - DNA, 1716 bp, Homo sapiens
gagacataaaggcctgaagaagacccacttcatcaagaacatgaggcagtacgacaccaggaacagcaggatcgtgctcatctgtgccaagcggtccctgtgcgcggccttctcggtcctgccctatggggaaggcctgcggatcagtgacctgagggtggacagccagaagcagaggcacccgtccggcggcgtctctgtgtcttccgagatggtctttgagctagaaggtgtggagctaggagcagacgggaaggtcgtgtcttatgcgaagttcctgtatcccaccaacgccctggtcacacacaagagtgacagccatggcctgctgcccacacctcggcccagtgtcccccggactctgccagggccaagacataaacctgcccccaccaagtcggcaccagccagcacagaactagggagtgacgtgggggacaccctggagtacaaccccaacctcctggatgacccgcagtggccctgcggcaagcacaaacgtgtcctcatctttgcgtcgtacatgaccacagtgatagaatacgtgaagccctcagacctcaaaaaggacatgaacgagaccttcagggagaagttcccccatgtcaaactgacgctgagcaaaatcaggagcttaaagcgggagatgcggagcctgtcggaggagtgcagcctggagcccgtgacggtggccatggcctacgtgtactttgagaagctggtcctgcagggcaagctcagcaaacagaaccgcaagctgtgcgctggcgcctgcgtgctgctggctgccaagatcagcagtgacctgcgcaagagcggcgtgaagcagctcatcgataagttagaagaaaggtttcgattcaacaggcgcgacctgatagggtttgagttcacagtgctcgtggccttggagctggccctgtatcttcccgagaaccaagtgttacctcattacaggcgcctcacccagcagttctagcagaggccccacagaaggctcagggcaccgaggtgcacttgccggcctgggaggtgtcccactgaagccccgcgcctcctcctgccagcacccccagcacctgctagcaggaggcacctggcctccgctggtgcagctttcctttttgcctctttgccatttccttggaaagagacgtcgctttcatccccaagtgcaccgtccctccgaggggatttctgagaattctcctgcatttttacataaactaaatgtgaggtttgttactggtatttttttcacgtgcctgagaccagcctggtaccaggaccttttgttcacagcgtgcagcagcgagccggctgcagtgtgtctcccctggcctcgccttctgcaaaccaccgcagccaccacagcgtcagggtggagatctgggtttctagacctcactgaacacactggaatggctgagtttaacttatttaggcattcatcttggagatgtggtttttcgggttccccagcagcatctcccgacaccaactgtgccgctggctccctgccacctgaagccgagctcctccagagctttctccgccctggagtacaaccccaacctcctggatgacccgcagtggccctgcggcaagcacaaacgtgtcctcatctttgcgtcgtacatgaccacagtgatagaatacgtgaagccctcagaccttaaaaagggcaatgacgagacctttagggaaaagtccccc

SEQ ID NO: 352980 - DNA, 297 bp, Homo sapiens
gctgtcgatgtacaggtggctgggctgtcccacctcctgtggacagagccacttggtgctgtgaccatccaggcagtcgtatccgtgcgtaattcagggaaggaggaaacagctatggggtggggattatgtgtggccctggcttaaaaacagtggtggagaaacctgaccaggcgtgggcacatgtacctagtgggctagtgaaggtgggcgccaccccgggggctctaccagccagtgtctgtactggggaagcggggctgaaaaacccctccttccatgaaagcactcctgacg

SEQ ID NO: 352981 - DNA, 3287 bp, Homo sapiens
gagacataaaggcctgaagaagacccacttcatcaagaacatgaggcagtacgacaccaggaacagcaggatcgtgctcatctgtgccaagcggtccctgtgcgcggccttctcggtcctgccctatggggaaggcctgcggatcagtgacctgagggtggacagccagaagcagaggcacccgtccggcggcgtctctgtgtcttccgagatggtctttgagctagaaggtgtggagctaggagcagacgggaaggtcgtgtcttatgcgaagttcctgtatcccaccaacgccctggtcacacacaagagtgacagccatggcctgctgcccacacctcggcccagtgtcccccggactctgccagggccaagacataaacctgcccccaccaagtcggcaccagccagcacagaactagggagtgacgtgggggacaccctggagtacaaccccaacctcctggatgacccgcagtggccctgcggcaagcacaaacgtgtcctcatctttgcgtcgtacatgaccacagtgatagaatacgtgaagccctcagacctcaaaaaggacatgaacgagaccttcagggagaagttcccccatgtcaaactgacgctgagcaaaatcaggagcttaaagcgggagatgcggagcctgtcggaggagtgcagcctggagcccgtgacggtggccatggcctacgtgtactttgagaagctggtcctgcagggcaagctcagcaaacagaaccgcaagctgtgcgctggcgcctgcgtgctgctggctgccaagatcagcagtgacctgcgcaagagcggcgtgaagcagctcatcgataagttagaagaaaggtttcgattcaacaggcgcgacctgatagggtttgagttcacagtgctcgtggccttggagctggccctgtatcttcccgagaaccaagtgttacctcattacaggcgcctcacccagcagttctagcagaggccccacagaaggctcagggcaccgaggtgcacttgccggcctgggaggtgtcccactgaagccccgcgcctcctcctgccagcacccccagcacctgctagcaggaggcacctggcctccgctggtgcagctttcctttttgcctctttgccatttccttggaaagagacgtcgctttcatccccaagtgcaccgtccctccgaggggatttctgagaattctcctgcatttttacataaactaaatgtgaggtttgttactggtatttttttcacgtgcctgagaccagcctggtaccaggaccttttgttcacagcgtgcagcagcgagccggctgcagtgtgtctcccctggcctcgccttctgcaaaccaccgcagccaccacagcgtcagggtggagatctgggtttctagacctcactgaacacactggaatggctgagtttaacttatttaggcattcatcttggagatgtggtttttcgggttccccagcagcatctcccgacaccaactgtgccgctggctccctgccacctgaagccgagctcctccagagctttctccgcccacctcactgcatcccaagtggagcttttggtgtccagttaggccagcgggagcagtctcctgatttattttgatctcattcttggactcttggacctctctgttcttcaagcatcgtgtcactgtgaaatcctaacgcccctgtgtcctacagaccgacggcacaacagacagctgcccatcccatgccatgctctaccctctgcctctcaccaggagacactctgggcctccaggacaattgctgcttgccggctcttatttttctaagcaatattgtgatggagaaaaataacatatttattgggatttggttttttgggtcttttttttttaagggaacaaaaaatggttaaatgaggtctgctgaagttgacttgaaaacacacttgaccctcaggcaggagggcactgaccacaccccacacaacctcaaagggtcagtgcgtcagtgccttttcttctgaggcaggaaacaggtgccatcttggccacctcggccagggcagcccaccatgctaaaaggaccccaaatggtggtcgttgtcccttctgtgcaggccagcagggccccatctctagtttttccacgtctgtctgaagttcttgcaacaaattctgcatggtccagcgctccagctagctgcctcatcaaaaacactgaataaccaaggactgctgagtttttcttcatggggggtcagctggtctcaaaactggccactgcctcagccaccaagctttttcctaccactaccttataaacctgcctggccctggaggggctctgggacgactttgtctctagcccattaatacaatacatcctatgctttctgtgcagactggtgcttccgcagaaaggagatgccaattctgctatcacagaactccaccagcaactccacccgaccccagcagtggtgcaggacagctgccagcacccacctggccctcctccttttccacagccactcactggggccaccaaaacccagagatggcaggtgtgtgggacagactggaggatgaggacaaaccaaagcctttgttctttcttattgtggagcgtccccttccatcaagcagcctgccctcaagccaaggatcatcccctggaacccagtatgcacccagaggggactcagcttcaaagctgctccaccatgctgggtcccaggcagctttcctctgaaaagcaacctctcctgccacccagatcccatctcaagagctcgcccatgttacgagcatgtaaaggactgacttcctagtaactgttgcagtttacaacctgccctccagggacacgtctccatggtttttcctacacatgaatgcgagaaatggctgataagcacagtaatttaagattgcgtattcatgtagtgagatttagtcattaaccaacccggtctttgtgatgtgtgaagccttcccttcagttatgtcccatttttatgatgccaaaagctgccactgtgtggtattcgaggattattgcaacaaagccagtagttaaaccaaaaaaaaaaaaaaaaaaaaaaaaaaaaaaaaaaaaaaacagaaaacaaaaaacaaaacagaagagagagagacaagagaaacagaaagaagaaacagaacaacaaaggaggaaacaaaagaacacaaaaaccaccgaccaactgatgatgagaacaaccgagggacccaccggccggccgagcccgcacttctacgcacctcga

SEQ ID NO: 352982 - DNA, 875 bp, Homo sapiens
tgtgcgctggcgcctgcgtgctgctggctgccaagatcagcagtgacctgcgcaagagcggcgtgaagcagctcatcgatgtgagtgcccggctcggcaggcactgcaggcagggtcatgacatcgagccagggccactgctgggatggggctggccgggtgggaaatgtggaagagggaaggctcccgtgtaacccttctctcttctcccctgcagaagttagaagaaaggtttcgattcaacaggcgcgacctgatagggtttgagttcacagtgctcgtggccttggagctggccctgtatcttcccgagaaccaagtgttacctcattacaggcgcctcacccagcagttctagcagaggccccacagaaggctcagggcaccgaggtgcacttgccggcctgggaggtgtcccactgaagccccgcgcctcctcctgccagcacccccagcacctgctagcaggaggcacctggcctccgctggtgcagctttcctttttgcctctttgccatttccttggaaagagacgtcgctttcatccccaagtgcaccgtccctccgaggggatttctgagaattctcctgcatttttacataaactaaatgtgaggtttgttactggtatttttttcacgtgcctgagaccagcctggtaccaggaccttttgttcacagcgtgcagcagcgagccggctgcagtgtgtctcccctggcctcgccttctgcaaaccaccgcagccaccacagcgtcagggtggagatctgggtttctagacctcactgaacacactggaatggctgagtttaacttatttaggcattcatcttggagatgtggtttttcgggttccccagcagcatctcccgac

SEQ ID NO: 352983 - DNA, 239 bp, Homo sapiens
agtgaagattttatctcaaaaggtgctagtaagtaaagagcttcttagaaactcacttttactttcttttttatagagtagtaatttaactttagattttatttctaatcaattactttttattagttaaagctttaaataatcgtcttttttagtagagacgggcagatcacctgaggtcaggagttcaagaccagcctggccaaccaacatggtgaaaccccgtctcgtcgacgcgg

SEQ ID NO: 352984 - DNA, 544 bp, Homo sapiens
ttctgcaggtacatgtccaggggcccagcctctgggcccagtaactcagctactctttgtggctttcttcatggctttttttgtgggctgccacgcccatctttatcaccagaatgaggaactcctggaagttaactgcaccatcagtgttgatatccaactctttgaaccagacgtctgcaccctttttctgtcaagattgaggagcaagtacccacctgcatcttctcatcaaagccatccagggatacacagggagcttctttcctcttagcctgtgatcggcctgtgatgatctctgatagcaaaaggttttctttttgaggctgccatactgccactgtcgaggtggagactgagcaaaggaagtcctgggctgtgccagctcccagagcttcagaagaaagagcagctctctccctgggaaccattagagaattctgttgatgttttctgtgtctgtctgtcccctgggcatgagcttccaccacctgtgcaggtgggtactttcctttcactccctgaataaagaatctatgcatat

SEQ ID NO: 352985 - DNA, 669 bp, Homo sapiens
tcctggtacctaagcaccgatctgccttggagaacctgattctgagactccagcaggatgtcttatcaacagcagcagtgcaagcagccctgccagccacctcctgtgtgccccgcgccaaagtgcccagagccatgtccacccccgaagtgccctgagccctgcccaccatcaaagtgtccacagtcctgcccacctcagcagtgccagcagaaatgtcctcctgtgacaccttccccaccctgccagccaaagtgtccacccaagagcaagtaacagcttcaggattcatcaggagcatgaaaggataaggataattggctcacctcgttccacagcccacctgcatcttctcatcaaagccatccagggatacacagggagcttctttcctcttagcctgtgatcggcctgtgatgatctctgatagcaaaaggttttctttttgaggctgccatactgccactgtcgaggtggagactgagcaaaggaagtcctgggctgtgccagctcccagagcttcagaagaaagagcagctctctccctgggaaccattagagaattctgttgatgttttctgtgtctgtctgtcccctgggcatgagcttccaccacctgtgcaggtgggtactttcctttcactccctgaataaagaatctatgcatat

SEQ ID NO: 352986 - DNA, 441 bp, Homo sapiens
gcaacaagttaagaaggtgtagaacattatatgtacctatagaatgtccaaattcaattttataaaataattaatctaaactgaattctacccagtttataggtgggctttataaaacatagttcagtaaccagccttctggataccttctgaataaactaggttaccttctggataaactaggttacaaattataggaaatgttttgaaagggaaagaaaatttaaataattttccagtgagaatattcaaatacactcttgacaactttttaaaacattatttaacaggaaaaaatatatatttgtcatgaagcaaactaaaagaaactaggcatcaggccaggtgtggtggctcatgcctgtaatcccaacactttgggaggctgaggcgggtggatcacctgaggtcaggagttcaagaccagcctgtccaacatgg

SEQ ID NO: 352987 - DNA, 921 bp, Homo sapiens
  misc_feature (870)..(870): n is a, c, g, or t
  misc_feature (875)..(875): n is a, c, g, or t
  misc_feature (877)..(878): n is a, c, g, or t
  misc_feature (880)..(881): n is a, c, g, or t
  misc_feature (884)..(884): n is a, c, g, or t
  misc_feature (894)..(894): n is a, c, g, or t
  misc_feature (899)..(899): n is a, c, g, or t
ccacgagtcggcattgtcaggcggcggcaccgcgcgggacggagcttggctgttggtcggtgggttcccgtgcggcggcggccaaggaggaggagacacagttggagcagctccgtgggctgactggggcgaggcctcagcagcgcgagcttgagtgcggccgagcctgcggcgccttcccctgcgggtggggacgagcgggccccgcggcgtcatcggcggcgaggtgagcggcggccggcgggcgggagctctggcgggagccgcaccggcctgacgcgctgtcgccgctggttgcaggagccgccgcgcctcggcctagcatgtcggaagcgggcgaggagcagcccatggagacgacgggcgccaccgagaacggacatgaggccgtccccgaaggcgagtcgccggccggggctggcacgggcgccgcggcgggggctggaggcgcgaccgcggcgcccccgagcgggaatcagaacggcgccgagggcgaccagatcaacgccagcaagaacgaggaggacgcgggaaaaatgttcgttggtggcctgagctgggatactagcaaaaaagatttaaaagactattttactaaatttggagaggtcgttgactgtacaataaaaatggatcccaacactggacggtcaagagggtttgggtttatcctgttcaaagatgcagccagtgtggagaaggtcctagaccagaaggagcacaggctggatggccgtgtcattgaccctaaaaaggccatggctatgaagaaggacccggtgaagaaaatcttcgttgggggtctgaatcctgaagccactgaggaaaagatcagggagtactttggcgagtttggggagtgaggctgantgcangnncnngtnacaagagagntggtntacttaaaaaacggaaggtgga

SEQ ID NO: 352988 - DNA, 742 bp, Homo sapiens
gtggccggatgcttacgcgtctggtccgtctgcgcgggtccggggaattgcacctcgttagggtcctggttgagttcaatttggagggtagtggagatttaacatctttctaaggtgctccttgcagactctaagggtagctgtagacttcgtgagaactttgccagggccagtcctttccaaaatcacagcttgcttacaagacttgttgccgtgtgtctcaccctaccatttcagaaaaatgttcgttggtggcctgagctgggatactagcaaaaaagatttaaaagactattttactaaatttggagaggtcgttgactgtacaataaaaatggatcccaacactggacggtcaagagggtttgggtttatcctgttcaaagatgcagccagtgtggagaaggtaagctgggtactggatttcagcagtctcagtggaaacgatttgaattctaagaggacacctttcttaaagcatgactagtttgtgtggtctgcatgtgatttaagtgctttgggcaaaacccaaagccggaggttatgttccggtttttgaggggatgaaaatacagattaagctgggagtgagagaatgtgctggagtggttcgggaagatgacagttgacattcattaccttttatgtgcctattctgggtacggcgctaaacatctgggaggattacaagagagtccatgattggtatgataggcttttagccccattttacaggacaaaa

SEQ ID NO: 352989 - DNA, 1670 bp, Homo sapiens
agggatcctttaattaatattatattccctcccccgctcccccccgagggcaccgcgcgggacggagcttggctgttggtcggtgggttcccgtgcggcggcggccaaggaggaggagacacagttggagcagctccgtgggctgactggggcgaggcctcagcagcgcgagcttgagtgcggccgagcctgcggcgccttcccctgcgggtggggacgagcgggccccgcggcgtcatcggcggcgaggagccgccgcgcctcggcctagcatgtcggaagcgggcgaggagcagcccatggagacgacgggcgccaccgagaacggacatgaggccgtccccgaaggcgagtcgccggccggggctggcacgggcgccgcggcgggggctggaggcgcgaccgcggcgcccccgagcgggaatcagaacggcgccgagggcgaccagatcaacgccagcaagaacgaggaggacgcgggaaaaatgttcgttggtggcctgagctgggatactagcaaaaaagatttaaaagactattttactaaatttggagaggtcgttgactgtacaataaaaatggatcccaacactggacggtcaagagggtttgggtttatcctgttcaaagatgcagccagtgtggagaaggtcctagaccagaaggagcacaggctggatggccgtgtcattgaccctaaaaaggccatggctatgaagaaggacccggtgaagaaaatcttcgttgggggtctgaatcctgaagccactgaggaaaagatcagggagtactttggcgagtttggggagattgaggccattgaattgccaatggatccaaagttgaacaaaagacgaggttttgtgtttatcacctttaaagaagaagaacccgtgaagaaggttctggagaaaaagttccatactgtcagtggaagcaagtgtgagatcaaggtggcccagcccaaagaagtctatcagcagcagcagtatggctctgggggccgtggaaaccgcaaccgagggaaccgaggcagcggaggtggtggtggaggtggaggtcagggtagtacaaactacggcaagagccagcgacgtggtggccatcagaataactacaagccatactgaggcggcagcaggagcgaccaactgatcgcacacatgctttgtttggatatggagtgaacacaattatgtaccaaatttaacttggcaaactttctattgcctgtcccatgtgcatcttatttaaaatttcccccatggaaatcactctcctgttgactatttccagagctctaggtgtttaggcagcgtgtggtgtctgagaggccatagcgccatcatgggctgatttttattaccaggtcccccagaagcaggtgggaggctctgcttcctgctgccgctctgcagcctggacctgtggaccctggttgtaaagagtaaattgtatcttaggaaaccagtgtcacctttttttcaccttttaattttatattatttgcgtcatacatttcctgtaacggaagtgttaattttactgtactttttggtaccttttgggaatctaatgtattgtaaggtattttacacgtgtcctgattttgccacaacctggatattgaagctatccaagcttttgaaataaaatttaaaaacccccaa

SEQ ID NO: 352990 - DNA, 1647 bp, Homo sapiens
ccacgagtcggcattgtcaggcggcggcaccgcgcgggacggagcttggctgttggtcggtgggttcccgtgcggcggcggccaaggaggaggagacacagttggagcagctccgtgggctgactggggcgaggcctcagcagcgcgagcttgagtgcggccgagcctgcggcgccttcccctgcgggtggggacgagcgggccccgcggcgtcatcggcggcgaggagccgccgcgcctcggcctagcatgtcggaagcgggcgaggagcagcccatggagacgacgggcgccaccgagaacggacatgaggccgtccccgaaggcgagtcgccggccggggctggcacgggcgccgcggcgggggctggaggcgcgaccgcggcgcccccgagcgggaatcagaacggcgccgagggcgaccagatcaacgccagcaagaacgaggaggacgcgggaaaaatgttcgttggtggcctgagctgggatactagcaaaaaagatttaaaagactattttactaaatttggagaggtcgttgactgtacaataaaaatggatcccaacactggacggtcaagagggtttgggtttatcctgttcaaagatgcagccagtgtggagaaggtcctagaccagaaggagcacaggctggatggccgtgtcattgaccctaaaaaggccatggctatgaagaaggacccggtgaagaaaatcttcgttgggggtctgaatcctgaagccactgaggaaaagatcagggagtactttggcgagtttggggagattgaggccattgaattgccaatggatccaaagttgaacaaaagacgaggttttgtgtttatcacctttaaagaagaagaacccgtgaagaaggttctggagaaaaagttccatactgtcagtggaagcaagtgtgagatcaaggtggcccagcccaaagaagtctatcagcagcagcagtatggctctgggggccgtggaaaccgcaaccgagggaaccgaggcagcggaggtggtggtggaggtggaggtcagggtagtacaaactacggcaagagccagcgacgtggtggccatcagaataactacaagccatactgaggcggcagcaggagcgaccaactgatcgcacacatgctttgtttggatatggagtgaacacaattatgtaccaaatttaacttggcaaactttctattgcctgtcccatgtgcatcttatttaaaatttcccccatggaaatcactctcctgttgactatttccagagctctaggtgtttaggcagcgtgtggtgtctgagaggccatagcgccatcatgggctgatttttattaccaggtcccccagaagcaggtgggaggctctgcttcctgctgccgctctgcagcctggacctgtggaccctggttgtaaagagtaaattgtatcttaggaaaccagtgtcacctttttttcaccttttaattttatattatttgcgtcatacatttcctgtaacggaagtgttaattttactgtactttttggtaccttttgggaatctaatgtattgtaaggtattttacacgtgtcctgattttgccacaacctggatattgaagctatccaagcttttgaaataaaatttaaaaacccccaa

SEQ ID NO: 352991 - DNA, 1853 bp, Homo sapiens
cgctaggtggaggctgggtgttaatcggccgaggggcaccgcgcgggacggagcttggctgttggtcggtgggttcccgtgcggcggcggccaaggaggaggagacacagttggagcagctccgtgggctgactggggcgaggcctcagcagcgcgagcttgagtgcggccgagcctgcggcgccttcccctgcgggtggggacgagcgggccccgcggcgtcatcggcggcgaggagccgccgcgcctcggcctagcatgtcggaagcgggcgaggagcagcccatggagacgacgggcgccaccgagaacggacatgaggccgtccccgaaggcgagtcgccggccggggctggcacgggcgccgcggcgggggctggaggcgcgaccgcggcgcccccgagcgggaatcagaacggcgccgagggcgaccagatcaacgccagcaagaacgaggaggacgcgggaaaaatgttcgttggtggcctgagctgggatactagcaaaaaagatttaaaagactattttactaaatttggagaggtcgttgactgtacaataaaaatggatcccaacactggacggtcaagagggtttgggtttatcctgttcaaagatgcagccagtgtggagaaggtcctagaccagaaggagcacaggctggatggccgtgtcattgaccctaaaaaggccatggctatgaagaaggacccggtgaagaaaatcttcgttgggggtctgaatcctgaagccactgaggaaaagatcagggagtactttggcgagtttggggagattgaggccattgaattgccaatggatccaaagttgaacaaaagacgaggttttgtgtttatcacctttaaagaagaagaacccgtgaagaaggttctggagaaaaagttccatactgtcagtggaagcaagtgtgagatcaaggtggcccagcccaaagaagtctatcagcagcagcagtatggctctgggggccgtggaaaccgcaaccgagggaaccgaggcagcggaggtggtggtggaggtggaggtcagagtcagagttggaatcagggctacggcaactactggaaccagggctacggctaccagcagggctacgggcctggctatggcggctacgactactcgccctatggctattacggctacggccccggctacgactacagtcagggtagtacaaactacggcaagagccagcgacgtggtggccatcagaataactacaagccatactgaggcggcagcaggagcgaccaactgatcgcacacatgctttgtttggatatggagtgaacacaattatgtaccaaatttaacttggcaaactttctattgcctgtcccatgtgcatcttatttaaaatttcccccatggaaatcactctcctgttgactatttccagagctctaggtgtttaggcagcgtgtggtgtctgagaggccatagcgccatcatgggctgatttttattaccaggtcccccagaagcaggtgggaggctctgcttcctgctgccgctctgcagcctggacctgtggaccctggttgtaaagagtaaattgtatcttaggaaaccagtgtcacctttttttcaccttttaattttatattatttgcgtcatacatttcctgtaacggaagtgttaattttactgtactttttggtaccttttgggaatctaatgtattgtaaggtattttacacgtgtcctgattttgccacaacctggatattgaagctatccaagcttttgaaataaaatttaaaaacccccaaaaaaaaggcggccgaccaaaaaaggggcggcgcaaaaatagcccaaaggcccgaaa

SEQ ID NO: 352992 - DNA, 2035 bp, Homo sapiens
cgctaggtggaggctgggtgttaatcggccgaggggcaccgcgcgggacggagcttggctgttggtcggtgggttcccgtgcggcggcggccaaggaggaggagacacagttggagcagctccgtgggctgactggggcgaggcctcagcagcgcgagcttgagtgcggccgagcctgcggcgccttcccctgcgggtggggacgagcgggccccgcggcgtcatcggcggcgaggagccgccgcgcctcggcctagcatgtcggaagcgggcgaggagcagcccatggagacgacgggcgccaccgagaacggacatgaggccgtccccgaaggcgagtcgccggccggggctggcacgggcgccgcggcgggggctggaggcgcgaccgcggcgcccccgagcgggaatcagaacggcgccgagggcgaccagatcaacgccagcaagaacgaggaggacgcgggaaaaatgttcgttggtggcctgagctgggatactagcaaaaaagatttaaaagactattttactaaatttggagaggtcgttgactgtacaataaaaatggatcccaacactggacggtcaagagggtttgggtttatcctgttcaaagatgcagccagtgtggagaaggtcctagaccagaaggagcacaggctggatggccgtgtcattgaccctaaaaaggccatggctatgaagaaggacccggtgaagaaaatcttcgttgggggtctgaatcctgaagccactgaggaaaagatcagggagtactttggcgagtttggggagattgaggccattgaattgccaatggatccaaagttgaacaaaagacgaggttttgtgtttatcacctttaaagaagaagaacccgtgaagaaggttctggagaaaaagttccatactgtcagtggaagcaagtgtgagatcaaggtggcccagcccaaagaagtctatcagcagcagcagtatggctctgggggccgtggaaaccgcaaccgagggaaccgaggcagcggaggtggtggtggaggtggaggtcagagtcagagttggaatcagggctacggcaactactggaaccagggctacggctaccagcagggctacgggcctggctatggcggctacgactactcgccctatggctattacggctacggccccggctacgactacagtcagggtagtacaaactacggcaagagccagcgacgtggtggccatcagaataactacaagccatactgaggcggcagcaggagcgaccaactgatcgcacacatgctttgtttggatatggagtgaacacaattatgtaccaaatttaacttggcaaactttctattgcctgtcccatgtgcatcttatttaaaatttcccccatggaaatcactctcctgttgactatttccagagctctaggtgtttaggcagcgtgtggtgtctgagaggccatagcgccatcatgggctgatttttattaccaggtcccccagaagcaggtgggaggctctgcttcctgctgccgctctgcagcctggacctgtggaccctggttgtaaagagtaaattgtatcttaggaaaccagtgtcacctttttttcaccttttaattttatattatttgcgtcatacatttcctgtaacggaagtgttaattttactgtactttttggtaccttttgggaatctaatgtattgtaaggtattttacacgtgtcctgattttgccacaacctggatattgaagctatccaagcttttgaaataaaatttaaaaacccccaagcctgggtgagtgtgggacacacacaacgcacccgggccgcaccctacgccaagcaccacctcaccaccgcgctatcaccacaggccccacacagacacaccacccagaacacagaaccaccagcgcggcgccgccaaccaacacccgggggcagcaaccccaagccatctgtacgaccccacgtggagctataaacgccccggccaaaaagaggcggaaaactcgtcgatacacccc

SEQ ID NO: 352993 - DNA, 2148 bp, Homo sapiens
cgctaggtggaggctgggtgttaatcggccgaggggcaccgcgcgggacggagcttggctgttggtcggtgggttcccgtgcggcggcggccaaggaggaggagacacagttggagcagctccgtgggctgactggggcgaggcctcagcagcgcgagcttgagtgcggccgagcctgcggcgccttcccctgcgggtggggacgagcgggccccgcggcgtcatcggcggcgaggagccgccgcgcctcggcctagcatgtcggaagcgggcgaggagcagcccatggagacgacgggcgccaccgagaacggacatgaggccgtccccgaaggcgagtcgccggccggggctggcacgggcgccgcggcgggggctggaggcgcgaccgcggcgcccccgagcgggaatcagaacggcgccgagggcgaccagatcaacgccagcaagaacgaggaggacgcgggaaaaatgttcgttggtggcctgagctgggatactagcaaaaaagatttaaaagactattttactaaatttggagaggtcgttgactgtacaataaaaatggatcccaacactggacggtcaagagggtttgggtttatcctgttcaaagatgcagccagtgtggagaaggtcctagaccagaaggagcacaggctggatggccgtgtcattgaccctaaaaaggccatggctatgaagaaggacccggtgaagaaaatcttcgttgggggtctgaatcctgaagccactgaggaaaagatcagggagtactttggcgagtttggggagattgaggccattgaattgccaatggatccaaagttgaacaaaagacgaggttttgtgtttatcacctttaaagaagaagaacccgtgaagaaggttctggagaaaaagttccatactgtcagtggaagcaagtgtgagatcaaggtggcccagcccaaagaagtctatcagcagcagcagtatggctctgggggccgtggaaaccgcaaccgagggaaccgaggcagcggaggtggtggtggaggtggaggtcagagtcagagttggaatcagggctacggcaactactggaaccagggctacggctaccagcagggctacgggcctggctatggcggctacgactactcgccctatggctattacggctacggccccggctacgactacagtcagggtagtacaaactacggcaagagccagcgacgtggtggccatcagaataactacaagccatactgaggcggcagcaggagcgaccaactgatcgcacacatgctttgtttggatatggagtgaacacaattatgtaccaaatttaacttggcaaactttctattgcctgtcccatgtgcatcttatttaaaatttcccccatggaaatcactctcctgttgactatttccagagctctaggtgtttaggcagcgtgtggtgtctgagaggccatagcgccatcatgggctgatttttattaccaggtcccccagaagcaggtgggaggctctgcttcctgctgccgctctgcagcctggacctgtggaccctggttgtaaagagtaaattgtatcttaggaaaccagtgtcacctttttttcaccttttaattttatattatttgcgtcatacatttcctgtaacggaagtgttaattttactgtactttttggtaccttttgggaatctaatgtattgtaaggtattttacacgtgtcctgattttgccacaacctggatattgaagctatccaagcttttgaaataaaatttaaaaacccccaaaacacacacacaaacacacacaacaacaacacgacggacaccacaaccgtggcccccacaacacctacagagaaaaccacacaccagacacaagacgacccccaacagaacacgaacacgcgcgacaacaccgggacaccgagaagcaaactcgcgggaccacgcaacaccaacgcgcagaaacgaaccaccaccacgaacacaacaaaccgccccagagagacactacagaactgacttctaacagaaaaaactccgaacgagaagacagaccagaacaccaaaagtgcaccatcaaccaagacgacacaccaagcgaccccgcaatatataacccaccccagcggctca

SEQ ID NO: 352994 - DNA, 1941 bp, Homo sapiens
cgctaggtggaggctgggtgttaatcggccgaggggcaccgcgcgggacggagcttggctgttggtcggtgggttcccgtgcggcggcggccaaggaggaggagacacagttggagcagctccgtgggctgactggggcgaggcctcagcagcgcgagcttgagtgcggccgagcctgcggcgccttcccctgcgggtggggacgagcgggccccgcggcgtcatcggcggcgaggagccgccgcgcctcggcctagcatgtcggaagcgggcgaggagcagcccatggagacgacgggcgccaccgagaacggacatgaggccgtccccgaaggcgagtcgccggccggggctggcacgggcgccgcggcgggggctggaggcgcgaccgcggcgcccccgagcgggaatcagaacggcgccgagggcgaccagatcaacgccagcaagaacgaggaggacgcgggaaaaatgttcgttggtggcctgagctgggatactagcaaaaaagatttaaaagactattttactaaatttggagaggtcgttgactgtacaataaaaatggatcccaacactggacggtcaagagggtttgggtttatcctgttcaaagatgcagccagtgtggagaaggtcctagaccagaaggagcacaggctggatggccgtgtcattgaccctaaaaaggccatggctatgaagaaggacccggtgaagaaaatcttcgttgggggtctgaatcctgaagccactgaggaaaagatcagggagtactttggcgagtttggggagattgaggccattgaattgccaatggatccaaagttgaacaaaagacgaggttttgtgtttatcacctttaaagaagaagaacccgtgaagaaggttctggagaaaaagttccatactgtcagtggaagcaagtgtgagatcaaggtggcccagcccaaagaagtctatcagcagcagcagtatggctctgggggccgtggaaaccgcaaccgagggaaccgaggcagcggaggtggtggtggaggtggaggtcagggtagtacaaactacggcaagagccagcgacgtggtggccatcagaataactacaagccatactgaggcggcagcaggagcgaccaactgatcgcacacatgctttgtttggatatggagtgaacacaattatgtaccaaatttaacttggcaaactttctattgcctgtcccatgtgcatcttatttaaaatttcccccatggaaatcactctcctgttgactatttccagagctctaggtgtttaggcagcgtgtggtgtctgagaggccatagcgccatcatgggctgatttttattaccaggtcccccagaagcaggtgggaggctctgcttcctgctgccgctctgcagcctggacctgtggaccctggttgtaaagagtaaattgtatcttaggaaaccagtgtcacctttttttcaccttttaattttatattatttgcgtcatacatttcctgtaacggaagtgttaattttactgtactttttggtaccttttgggaatctaatgtattgtaaggtattttacacgtgtcctgattttgccacaacctggatattgaagctatccaagcttttgaaataaaatttaaaaacccccaagcctgggtgagtgtgggatatgctgtgtgagacctcttgctcagggtcgagggaggcggggggggggtgccaggtgccctggacttggggctttctcctgcagcaggctcttccagctgcaggcccagttgtgggggtatcctttaaggactgccctgcctagggctgagccccccttcaaagaaaggaatgagaggcctatggggagtgaggatggggcagtgatgagggcttacatccccagcaggcatgtcccctcctgggacaccttggaacaccaacctt

SEQ ID NO: 352995 - DNA, 2007 bp, Homo sapiens
cgctaggtggaggctgggtgttaatcggccgaggggcaccgcgcgggacggagcttggctgttggtcggtgggttcccgtgcggcggcggccaaggaggaggagacacagttggagcagctccgtgggctgactggggcgaggcctcagcagcgcgagcttgagtgcggccgagcctgcggcgccttcccctgcgggtggggacgagcgggccccgcggcgtcatcggcggcgaggagccgccgcgcctcggcctagcatgtcggaagcgggcgaggagcagcccatggagacgacgggcgccaccgagaacggacatgaggccgtccccgaaggcgagtcgccggccggggctggcacgggcgccgcggcgggggctggaggcgcgaccgcggcgcccccgagcgggaatcagaacggcgccgagggcgaccagatcaacgccagcaagaacgaggaggacgcgggaaaaatgttcgttggtggcctgagctgggatactagcaaaaaagatttaaaagactattttactaaatttggagaggtcgttgactgtacaataaaaatggatcccaacactggacggtcaagagggtttgggtttatcctgttcaaagatgcagccagtgtggagaaggtcctagaccagaaggagcacaggctggatggccgtgtcattgaccctaaaaaggccatggctatgaagaaggacccggtgaagaaaatcttcgttgggggtctgaatcctgaagccactgaggaaaagatcagggagtactttggcgagtttggggagattgaggccattgaattgccaatggatccaaagttgaacaaaagacgaggttttgtgtttatcacctttaaagaagaagaacccgtgaagaaggttctggagaaaaagttccatactgtcagtggaagcaagtgtgagatcaaggtggcccagcccaaagaagtctatcagcagcagcagtatggctctgggggccgtggaaaccgcaaccgagggaaccgaggcagcggaggtggtggtggaggtggaggtcagggtagtacaaactacggcaagagccagcgacgtggtggccatcagaataactacaagccatactgaggcggcagcaggagcgaccaactgatcgcacacatgctttgtttggatatggagtgaacacaattatgtaccaaatttaacttggcaaactttctattgcctgtcccatgtgcatcttatttaaaatttcccccatggaaatcactctcctgttgactatttccagagctctaggtgtttaggcagcgtgtggtgtctgagaggccatagcgccatcatgggctgatttttattaccaggtcccccagaagcaggtgggaggctctgcttcctgctgccgctctgcagcctggacctgtggaccctggttgtaaagagtaaattgtatcttaggaaaccagtgtcacctttttttcaccttttaattttatattatttgcgtcatacatttcctgtaacggaagtgttaattttactgtactttttggtaccttttgggaatctaatgtattgtaaggtattttacacgtgtcctgattttgccacaacctggatattgaagctatccaagcttttgaaataaaatttaaaaacccccaaaacacacacacaaacacacacaacaacaacacgacggacaccacaaccgtggcccccacaacacctacagagaaaaccacacaccagacacaagacgacccccaacagaacacgaacacgcgcgacaacaccgggacaccgagaagcaaactcgcgggaccacgcaacaccaacgcgcagaaacgaaccaccaccacgaacacaacaaaccgccccagagagacactacagaactgacttctaacagaaaaaactccgaacgagaagacagaccagaacaccaaaagtgcaccatcaaccaagacgacacaccaagcgaccccgcaatatataacccaccccagcggctca

SEQ ID NO: 352996 - DNA, 1737 bp, Homo sapiens
cgctaggtggaggctgggtgttaatcggccgaggggcaccgcgcgggacggagcttggctgttggtcggtgggttcccgtgcggcggcggccaaggaggaggagacacagttggagcagctccgtgggctgactggggcgaggcctcagcagcgcgagcttgagtgcggccgagcctgcggcgccttcccctgcgggtggggacgagcgggccccgcggcgtcatcggcggcgaggagccgccgcgcctcggcctagcatgtcggaagcgggcgaggagcagcccatggagacgacgggcgccaccgagaacggacatgaggccgtccccgaaggcgagtcgccggccggggctggcacgggcgccgcggcgggggctggaggcgcgaccgcggcgcccccgagcgggaatcagaacggcgccgagggcgaccagatcaacgccagcaagaacgaggaggacgcgggaaaaatgttcgttggtggcctgagctgggatactagcaaaaaagatttaaaagactattttactaaatttggagaggtcgttgactgtacaataaaaatggatcccaacactggacggtcaagagggtttgggtttatcctgttcaaagatgcagccagtgtggagaaggtcctagaccagaaggagcacaggctggatggccgtgtcattgaccctaaaaaggccatggctatgaagaaggacccggtgaagaaaatcttcgttgggggtctgaatcctgaagccactgaggaaaagatcagggagtactttggcgagtttggggagattgaggccattgaattgccaatggatccaaagttgaacaaaagacgaggttttgtgtttatcacctttaaagaagaagaacccgtgaagaaggttctggagaaaaatcagcagcagcagtatggctctgggggccgtggaaaccgcaaccgagggaaccgaggcagcggaggtggtggtggaggtggaggtcagagtcagagttggaatcagggctacggcaactactggaaccagggctacggctaccagcagggctacgggcctggctatggcggctacgactactcgccctatggctattacggctacggccccggctacgactacagtcagggtagtacaaactacggcaagagccagcgacgtggtggccatcagaataactacaagccatactgaggcggcagcaggagcgaccaactgatcgcacacatgctttgtttggatatggagtgaacacaattatgtaccaaatttaacttggcaaactttctattgcctgtcccatgtgcatcttatttaaaatttcccccatggaaatcactctcctgttgactatttccagagctctaggtgtttaggcagcgtgtggtgtctgagaggccatagcgccatcatgggctgatttttattaccaggtcccccagaagcaggtgggaggctctgcttcctgctgccgctctgcagcctggacctgtggaccctggttgtaaagagtaaattgtatcttaggaaaccagtgtcacctttttttcaccttttaattttatattatttgcgtcatacatttcctgtaacggaagtgttaattttactgtactttttggtaccttttgggaatctaatgtattgtaaggtattttacacgtgtcctgattttgccacaacctggatattgaagctatccaagcttttgaaataaaatttaaaaacccccaa

SEQ ID NO: 352997 - DNA, 1865 bp, Homo sapiens
  misc_feature (28)..(28): n is a, c, g, or t
attacgggctaggtcgaggctgggtgtnggcaccgcgcgggacggagcttggctgttggtcggtgggttcccgtgcggcggcggccaaggaggaggagacacagttggagcagctccgtgggctgactggggcgaggcctcagcagcgcgagcttgagtgcggccgagcctgcggcgccttcccctgcgggtggggacgagcgggccccgcggcgtcatcggcggcgaggtgagcggcggccggcgggcgggagctctggcgggagccgcaccggcctgacgcgctgtcgccgctggttgcaggagccgccgcgcctcggcctagcatgtcggaagcgggcgaggagcagcccatggagacgacgggcgccaccgagaacggacatgaggccgtccccgaaggcgagtcgccggccggggctggcacgggcgccgcggcgggggctggaggcgcgaccgcggcgcccccgagcgggaatcagaacggcgccgagggcgaccagatcaacgccagcaagaacgaggaggacgcgggaaaaatgttcgttggtggcctgagctgggatactagcaaaaaagatttaaaagactattttactaaatttggagaggtcgttgactgtacaataaaaatggatcccaacactggacggtcaagagggtttgggtttatcctgttcaaagatgcagccagtgtggagaaggtcctagaccagaaggagcacaggctggatggccgtgtcattgaccctaaaaaggccatggctatgaagaaggacccggtgaagaaaatcttcgttgggggtctgaatcctgaagccactgaggaaaagatcagggagtactttggcgagtttggggagattgaggccattgaattgccaatggatccaaagttgaacaaaagacgaggttttgtgtttatcacctttaaagaagaagaacccgtgaagaaggttctggagaaaaagttccatactgtcagtggaagcaagtgtgagatcaaggtggcccagcccaaagaagtctatcagcagcagcagtatggctctgggggccgtggaaaccgcaaccgagggaaccgaggcagcggaggtggtggtggaggtggaggtcagagtcagagttggaatcagggctacggcaactactggaaccagggctacggctaccagcagggctacgggcctggctatggcggctacgactactcgccctatggctattacggctacggccccggctacgactacagtcagggtagtacaaactacggcaagagccagcgacgtggtggccatcagaataactacaagccatactgaggcggcagcaggagcgaccaactgatcgcacacatgctttgtttggatatggagtgaacacaattatgtaccaaatttaacttggcaaactttctattgcctgtcccatgtgcatcttatttaaaatttcccccatggaaatcactctcctgttgactatttccagagctctaggtgtttaggcagcgtgtggtgtctgagaggccatagcgccatcatgggctgatttttattaccaggtcccccagaagcaggtgggaggctctgcttcctgctgccgctctgcagcctggacctgtggaccctggttgtaaagagtaaattgtatcttaggaaaccagtgtcacctttttttcaccttttaattttatattatttgcgtcatacatttcctgtaacggaagtgttaattttactgtactttttggtaccttttgggaatctaatgtattgtaaggtattttacacgtgtcctgattttgccacaacctggatattgaagctatccaagcttttgaaataaaatttaaaaacccccaa

SEQ ID NO: 352998 - DNA, 1872 bp, Homo sapiens
atccttaattaaattaaactccccccccccccgagggcaccgcgcgggacggagcttggctgttggtcggtgggttcccgtgcggcggcggccaaggaggaggagacacagttggagcagctccgtgggctgactggggcgaggcctcagcagcgcgagcttgagtgcggccgagcctgcggcgccttcccctgcgggtggggacgagcgggccccgcggcgtcatcggcggcgaggtgagcggcggccggcgggcgggagctctggcgggagccgcaccggcctgacgcgctgtcgccgctggttgcaggagccgccgcgcctcggcctagcatgtcggaagcgggcgaggagcagcccatggagacgacgggcgccaccgagaacggacatgaggccgtccccgaaggcgagtcgccggccggggctggcacgggcgccgcggcgggggctggaggcgcgaccgcggcgcccccgagcgggaatcagaacggcgccgagggcgaccagatcaacgccagcaagaacgaggaggacgcgggaaaaatgttcgttggtggcctgagctgggatactagcaaaaaagatttaaaagactattttactaaatttggagaggtcgttgactgtacaataaaaatggatcccaacactggacggtcaagagggtttgggtttatcctgttcaaagatgcagccagtgtggagaaggtcctagaccagaaggagcacaggctggatggccgtgtcattgaccctaaaaaggccatggctatgaagaaggacccggtgaagaaaatcttcgttgggggtctgaatcctgaagccactgaggaaaagatcagggagtactttggcgagtttggggagattgaggccattgaattgccaatggatccaaagttgaacaaaagacgaggttttgtgtttatcacctttaaagaagaagaacccgtgaagaaggttctggagaaaaagttccatactgtcagtggaagcaagtgtgagatcaaggtggcccagcccaaagaagtctatcagcagcagcagtatggctctgggggccgtggaaaccgcaaccgagggaaccgaggcagcggaggtggtggtggaggtggaggtcagagtcagagttggaatcagggctacggcaactactggaaccagggctacggctaccagcagggctacgggcctggctatggcggctacgactactcgccctatggctattacggctacggccccggctacgactacagtcagggtagtacaaactacggcaagagccagcgacgtggtggccatcagaataactacaagccatactgaggcggcagcaggagcgaccaactgatcgcacacatgctttgtttggatatggagtgaacacaattatgtaccaaatttaacttggcaaactttctattgcctgtcccatgtgcatcttatttaaaatttcccccatggaaatcactctcctgttgactatttccagagctctaggtgtttaggcagcgtgtggtgtctgagaggccatagcgccatcatgggctgatttttattaccaggtcccccagaagcaggtgggaggctctgcttcctgctgccgctctgcagcctggacctgtggaccctggttgtaaagagtaaattgtatcttaggaaaccagtgtcacctttttttcaccttttaattttatattatttgcgtcatacatttcctgtaacggaagtgttaattttactgtactttttggtaccttttgggaatctaatgtattgtaaggtattttacacgtgtcctgattttgccacaacctggatattgaagctatccaagcttttgaaataaaatttaaaaacccccaa

SEQ ID NO: 352999 - DNA, 1675 bp, Homo sapiens
ggtttaattggcctcaattctgcaggctgtacagaaagcatgatgctggcatctactcagcttctagggaggcctcaggaaacttacaatcatggcagaatgtgaagcaggagccagcacttcacatggctggagcaggaggaaggcgggcgaggagcagcccatggagacgacgggcgccaccgagaacggacatgaggccgtccccgaaggcgagtcgccggccggggctggcacgggcgccgcggcgggggctggaggcgcgaccgcggcgcccccgagcgggaatcagaacggcgccgagggcgaccagatcaacgccagcaagaacgaggaggacgcgggaaaaatgttcgttggtggcctgagctgggatactagcaaaaaagatttaaaagactattttactaaatttggagaggtcgttgactgtacaataaaaatggatcccaacactggacggtcaagagggtttgggtttatcctgttcaaagatgcagccagtgtggagaaggtcctagaccagaaggagcacaggctggatggccgtgtcattgaccctaaaaaggccatggctatgaagaaggacccggtgaagaaaatcttcgttgggggtctgaatcctgaagccactgaggaaaagatcagggagtactttggcgagtttggggagattgaggccattgaattgccaatggatccaaagttgaacaaaagacgaggttttgtgtttatcacctttaaagaagaagaacccgtgaagaaggttctggagaaaaagttccatactgtcagtggaagcaagtgtgagatcaaggtggcccagcccaaagaagtctatcagcagcagcagtatggctctgggggccgtggaaaccgcaaccgagggaaccgaggcagcggaggtggtggtggaggtggaggtcagagtcagagttggaatcagggctacggcaactactggaaccagggctacggctaccagcagggctacgggcctggctatggcggctacgactactcgccctatggctattacggctacggccccggctacgactacagtcagggtagtacaaactacggcaagagccagcgacgtggtggccatcagaataactacaagccatactgaggcggcagcaggagcgaccaactgatcgcacacatgctttgtttggatatggagtgaacacaattatgtaccaaatttaacttggcaaactttctattgcctgtcccatgtgcatcttatttaaaatttcccccatggaaatcactctcctgttgactatttccagagctctaggtgtttaggcagcgtgtggtgtctgagaggccatagcgccatcatgggctgatttttattaccaggtcccccagaagcaggtgggaggctctgcttcctgctgccgctctgcagcctggacctgtggaccctggttgtaaagagtaaattgtatcttaggaaaccagtgtcacctttttttcaccttttaattttatattatttgcgtcatacatttcctgtaacggaagtgttaattttactgtactttttggtaccttttgggaatctaatgtattgtaaggtattttacacgtgtcctgattttgccacaacctggatattgaagctatccaagcttttgaaataaaatttaaaaacccccaa

SEQ ID NO: 353000 - DNA, 1475 bp, Homo sapiens
  misc_feature (1416)..(1416): n is a, c, g, or t
  misc_feature (1418)..(1418): n is a, c, g, or t
  misc_feature (1420)..(1420): n is a, c, g, or t
  misc_feature (1433)..(1434): n is a, c, g, or t
  misc_feature (1439)..(1439): n is a, c, g, or t
  misc_feature (1441)..(1441): n is a, c, g, or t
  misc_feature (1444)..(1444): n is a, c, g, or t
  misc_feature (1461)..(1461): n is a, c, g, or t
cgctaggtggaggctgggtgttaatcggccgaggggcaccgcgcgggacggagcttggctgttggtcggtgggttcccgtgcggcggcggccaaggaggaggagacacagttggagcagctccgtgggctgactggggcgaggcctcagcagcgcgagcttgagtgcggccgagcctgcggcgccttcccctgcgggtggggacgagcgggccccgcggcgtcatcggcggcgaggagccgccgcgcctcggcctagcatgtcggaagcgggcgaggagcagcccatggagacgacgggcgccaccgagaacggacatgaggccgtccccgaaggcgagtcgccggccggggctggcacgggcgccgcggcgggggctggaggcgcgaccgcggcgcccccgagcgggaatcagaacggcgccgagggcgaccagatcaacgccagcaagaacgaggaggacgcgggaaaaatgttcgttggtggcctgagctgggatactagcaaaaaagatttaaaagactattttactaaatttggagaggtcgttgactgtacaataaaaatggatcccaacactggacggtcaagagggtttgggtttatcctgttcaaagatgcagccagtgtggagaaggtcctagaccagaaggagcacaggctggatggccgtgtcattgaccctaaaaaggccatggctatgaagaaggacccggtgaagaaaatcttcgttgggggtctgaatcctgaagccactgaggaaaagatcagggagtactttggcgagtttggggagattgaggccattgaattgccaatggatccaaagttgaacaaaagacgaggttttgtgtttatcacctttaaagaagaagaacccgtgaagaaggttctggagaaaaagttccatactgtcagtggaagcaaggtaaggtgttcccagctctgcttggcctcctgtgctgctggagagctggcccttagagggatgggttaggggttgggcctcatgcaggagctctccaggttggtcagactttactatttctctgaagcgtatgctgccctgattggggcagtgttccaatccttgaaagacttcccaggctgggaggactgccaataaacaacacaggatgtgagggaggtaggagaaggtggcctctgtgaatagagcaggttgagtagcctctttagctcctcacttaaagctagaggtgacagttctagattcttgagtccaggggtatgaagcctgcagtttaaggtctcagaagatcctagaacttctgcaactcactgattctcctctgtggtgaagtttttcttattccagagcctttctacctccttctacaaccaagtctttgtccacttccatccactttgagcactttttttttttttttttttgggntngnaaaaaaattttgnntgggngnccngggggggggggggaaancaaatccggggccc

SEQ ID NO: 353001 - DNA, 1870 bp, Homo sapiens
agggatcctttaattaatattatattccctcccccgctcccccccgagggcaccgcgcgggacggagcttggctgttggtcggtgggttcccgtgcggcggcggccaaggaggaggagacacagttggagcagctccgtgggctgactggggcgaggcctcagcagcgcgagcttgagtgcggccgagcctgcggcgccttcccctgcgggtggggacgagcgggccccgcggcgtcatcggcggcgaggagccgccgcgcctcggcctagcatgtcggaagcgggcgaggagcagcccatggagacgacgggcgccaccgagaacggacatgaggccgtccccgaaggcgagtcgccggccggggctggcacgggcgccgcggcgggggctggaggcgcgaccgcggcgcccccgagcgggaatcagaacggcgccgagggcgaccagatcaacgccagcaagaacgaggaggacgcgggaatcagaacggcgccgagggcgaccagatcaacgccagcaagaacgaggaggacgcgggaaaaatgttcgttggtggcctgagctgggatactagcaaaaaagatttaaaagactattttactaaatttggagaggtcgttgactgtacaataaaaatggatcccaacactggacggtcaagagggtttgggtttatcctgttcaaagatgcagccagtgtggagaaggtcctagaccagaaggagcacaggctggatggccgtgtcattgaccctaaaaaggccatggctatgaagaaggacccggtgaagaaaatcttcgttgggggtctgaatcctgaagccactgaggaaaagatcagggagtactttggcgagtttggggagattgaggccattgaattgccaatggatccaaagttgaacaaaagacgaggttttgtgtttatcacctttaaagaagaagaacccgtgaagaaggttctggagaaaaagttccatactgtcagtggaagcaagtgtgagatcaaggtggcccagcccaaagaagtctatcagcagcagcagtatggctctgggggccgtggaaaccgcaaccgagggaaccgaggcagcggaggtggtggtggaggtggaggtcagagtcagagttggaatcagggctacggcaactactggaaccagggctacggctaccagcagggctacgggcctggctatggcggctacgactactcgccctatggctattacggctacggccccggctacgactacagtcagggtagtacaaactacggcaagagccagcgacgtggtggccatcagaataactacaagccatactgaggcggcagcaggagcgaccaactgatcgcacacatgctttgtttggatatggagtgaacacaattatgtaccaaatttaacttggcaaactttctattgcctgtcccatgtgcatcttatttaaaatttcccccatggaaatcactctcctgttgactatttccagagctctaggtgtttaggcagcgtgtggtgtctgagaggccatagcgccatcatgggctgatttttattaccaggtcccccagaagcaggtgggaggctctgcttcctgctgccgctctgcagcctggacctgtggaccctggttgtaaagagtaaattgtatcttaggaaaccagtgtcacctttttttcaccttttaattttatattatttgcgtcatacatttcctgtaacggaagtgttaattttactgtactttttggtaccttttgggaatctaatgtattgtaaggtattttacacgtgtcctgattttgccacaacctggatattgaagctatccaagcttttgaaataaaatttaaaaacccccaa

SEQ ID NO: 353002 - DNA, 978 bp, Homo sapiens
ccttgtttgccccaagtaaagttagcatcctggtctctgatcctctgcttgggtctctcagatgcagggttgggcccagggcccttatacaccagaacagcagccccttggcttctgcctgagttgccacagtaaccctgccaccccaaagggcaggatttcctccatcctagctcctgcgtatgctaaatggtccacgggcccctgtgccctgctccccccacaggtcagagtcagagttggaatcagggctacggcaactactggaaccagggctacggctaccagcagggctacgggcctggctatggcggctacgactactcgccctatggctattacggctacggccccggctacgactacagtcagggtagtacaaactacggcaagagccagcgacgtggtggccatcagaataactacaagccatactgaggcggcagcaggagcgaccaactgatcgcacacatgctttgtttggatatggagtgaacacaattatgtaccaaatttaacttggcaaactttctattgcctgtcccatgtgcatcttatttaaaatttcccccatggaaatcactctcctgttgactatttccagagctctaggtgtttaggcagcgtgtggtgtctgagaggccatagcgccatcatgggctgatttttattaccaggtcccccagaagcaggtgggaggctctgcttcctgctgccgctctgcagcctggacctgtggaccctggttgtaaagagtaaattgtatcttaggaaaccagtgtcacctttttttcaccttttaattttatattatttgcgtcatacatttcctgtaacggaagtgttaattttactgtactttttggtaccttttgggaatctaatgtattgtaaggtattttacacgtgtcctgattttgccacaacctggatattgaagctatccaagcttttgaaataaaatttaaaaacccccaa

SEQ ID NO: 353003 - DNA, 986 bp, Homo sapiens
  misc_feature (796)..(796): n is a, c, g, or t
  misc_feature (984)..(986): n is a, c, g, or t
cgctaggtggaggctgggtgttaatcggccgaggggcaccgcgcgggacggagcttggctgttggtcggtgggttcccgtgcggcggcggccaaggaggaggagacacagttggagcagctccgtgggctgactggggcgaggcctcagcagcgcgagcttgagtgcggccgagcctgcggcgccttcccctgcgggtggggacgagcgggccccgcggcgtcatcggcggcgaggagccgccgcgcctcggcctagcatgtcggaagcgggcgaggagcagcccatggagacgacgggcgccaccgagaacggacatgaggccgtccccgaaggcgagtcgccggccggggctggcacgggcgccgcggcgggggctggaggcgcgaccgcggcgcccccgagcgggaatcagaacggcgccgagggcgaccagatcaacgccagcaagaacgaggaggacgcgggaaaaatgttcgttggtggcctgagctgggatactagcaaaaaagatttaaaagactattttactaaatttggagaggtcgttgactgtacaataaaaatggatcccaacactggacggtcaagagggtttgggtttatcctgttcaaagatgcagccagtgtggagaaggtcctagaccagaaggagcacaggctggatggccgtgtcattgaccctaaaaaggccatggctatgaagaaggacccggtgaagaaaatcttcgttgggggtctgaatcctgaagccactgaggaaaagatccggctactgggagttgggggatgaggcntgattgcaggtccacgtgacaacagaggttggtataccttagaagagaccggcagttggaaagtcccgcccgggccgtgggcgggcccaaatttacgcatgctggggtacccacgaaccgcgtgttggggcacactcaatcgccgcagtctagcttcattttatgtgcgattcccttggtttcgtccnnn

SEQ ID NO: 353004 - DNA, 986 bp, Homo sapiens
agggatcctttaattaatattatattccctcccccgctcccccccgagggcaccgcgcgggacggagcttggctgttggtcggtgggttcccgtgcggcggcggccaaggaggaggagacacagttggagcagctccgtgggctgactggggcgaggcctcagcagcgcgagcttgagtgcggccgagcctgcggcgccttcccctgcgggtggggacgagcgggccccgcggcgtcatcggcggcgaggagccgccgcgcctcggcctagcatgtcggaagcgggcgaggagcagcccatggagacgacgggcgccaccgagaacggacatgaggccgtccccgaaggcgagtcgccggccggggctggcacgggcgccgcggcgggggctggaggcgcgaccgcggcgcccccgagcgggaatcagaacggcgccgagggcgaccagatcaacgccagcaagaacgaggaggacgcgggaaaaatgttcgttggtggcctgagctgggatactagcaaaaaagatttaaaagactattttactaaatttggagaggtcgttgactgtacaataaaaatggatcccaacactggacggtcaagagggtttgggtttatcctgttcaaagatgcagccagtgtggagaaggtaagctgggtactggatttcagcagtctcagtggaaacgatttgaattctaagaggacacctttcttaaagcatgactagtttgtgtggtctgcatgtgatttaagtgctttgggcaaaacccaaagccggaggttatgttccggtttttgaggggatgaaaatacagattaagctgggagtgagagaatgtgctggagtggttcgggaagatgacagttgacattcattaccttttatgtgcctattctgggtacggcgctaaacatctgggaggattacaagagagtccatgattggtatgataggcttttagccccattttacaggacaaaa

SEQ ID NO: 353005 - DNA, 924 bp, Homo sapiens
  misc_feature (28)..(28): n is a, c, g, or t
  misc_feature (873)..(873): n is a, c, g, or t
  misc_feature (878)..(878): n is a, c, g, or t
  misc_feature (880)..(881): n is a, c, g, or t
  misc_feature (883)..(884): n is a, c, g, or t
  misc_feature (887)..(887): n is a, c, g, or t
  misc_feature (897)..(897): n is a, c, g, or t
  misc_feature (902)..(902): n is a, c, g, or t
attacgggctaggtcgaggctgggtgtnggcaccgcgcgggacggagcttggctgttggtcggtgggttcccgtgcggcggcggccaaggaggaggagacacagttggagcagctccgtgggctgactggggcgaggcctcagcagcgcgagcttgagtgcggccgagcctgcggcgccttcccctgcgggtggggacgagcgggccccgcggcgtcatcggcggcgaggtgagcggcggccggcgggcgggagctctggcgggagccgcaccggcctgacgcgctgtcgccgctggttgcaggagccgccgcgcctcggcctagcatgtcggaagcgggcgaggagcagcccatggagacgacgggcgccaccgagaacggacatgaggccgtccccgaaggcgagtcgccggccggggctggcacgggcgccgcggcgggggctggaggcgcgaccgcggcgcccccgagcgggaatcagaacggcgccgagggcgaccagatcaacgccagcaagaacgaggaggacgcgggaaaaatgttcgttggtggcctgagctgggatactagcaaaaaagatttaaaagactattttactaaatttggagaggtcgttgactgtacaataaaaatggatcccaacactggacggtcaagagggtttgggtttatcctgttcaaagatgcagccagtgtggagaaggtcctagaccagaaggagcacaggctggatggccgtgtcattgaccctaaaaaggccatggctatgaagaaggacccggtgaagaaaatcttcgttgggggtctgaatcctgaagccactgaggaaaagatcagggagtactttggcgagtttggggagtgaggctgantgcangnncnngtnacaagagagntggtntacttaaaaaacggaaggtgga

SEQ ID NO: 353006 - DNA, 1656 bp, Homo sapiens
cgctaggtggaggctgggtgttaatcggccgaggggcaccgcgcgggacggagcttggctgttggtcggtgggttcccgtgcggcggcggccaaggaggaggagacacagttggagcagctccgtgggctgactggggcgaggcctcagcagcgcgagcttgagtgcggccgagcctgcggcgccttcccctgcgggtggggacgagcgggccccgcggcgtcatcggcggcgaggagccgccgcgcctcggcctagcatgtcggaagcgggcgaggagcagcccatggagacgacgggcgccaccgagaacggacatgaggccgtccccgaaggcgagtcgccggccggggctggcacgggcgccgcggcgggggctggaggcgcgaccgcggcgcccccgagcgggaatcagaacggcgccgagggcgaccagatcaacgccagcaagaacgaggaggacgcgggaaaaatgttcgttggtggcctgagctgggatactagcaaaaaagatttaaaagactattttactaaatttggagaggtcgttgactgtacaataaaaatggatcccaacactggacggtcaagagggtttgggtttatcctgttcaaagatgcagccagtgtggagaaggtcctagaccagaaggagcacaggctggatggccgtgtcattgaccctaaaaaggccatggctatgaagaaggacccggtgaagaaaatcttcgttgggggtctgaatcctgaagccactgaggaaaagatcagggagtactttggcgagtttggggagattgaggccattgaattgccaatggatccaaagttgaacaaaagacgaggttttgtgtttatcacctttaaagaagaagaacccgtgaagaaggttctggagaaaaagttccatactgtcagtggaagcaagtgtgagatcaaggtggcccagcccaaagaagtctatcagcagcagcagtatggctctgggggccgtggaaaccgcaaccgagggaaccgaggcagcggaggtggtggtggaggtggaggtcagggtagtacaaactacggcaagagccagcgacgtggtggccatcagaataactacaagccatactgaggcggcagcaggagcgaccaactgatcgcacacatgctttgtttggatatggagtgaacacaattatgtaccaaatttaacttggcaaactttctattgcctgtcccatgtgcatcttatttaaaatttcccccatggaaatcactctcctgttgactatttccagagctctaggtgtttaggcagcgtgtggtgtctgagaggccatagcgccatcatgggctgatttttattaccaggtcccccagaagcaggtgggaggctctgcttcctgctgccgctctgcagcctggacctgtggaccctggttgtaaagagtaaattgtatcttaggaaaccagtgtcacctttttttcaccttttaattttatattatttgcgtcatacatttcctgtaacggaagtgttaattttactgtactttttggtaccttttgggaatctaatgtattgtaaggtattttacacgtgtcctgattttgccacaacctggatattgaagctatccaagcttttgaaataaaatttaaaaacccccaa

SEQ ID NO: 353007 - DNA, 1797 bp, Homo sapiens
cgctaggtggaggctgggtgttaatcggccgaggggcaccgcgcgggacggagcttggctgttggtcggtgggttcccgtgcggcggcggccaaggaggaggagacacagttggagcagctccgtgggctgactggggcgaggcctcagcagcgcgagcttgagtgcggccgagcctgcggcgccttcccctgcgggtggggacgagcgggccccgcggcgtcatcggcggcgaggagccgccgcgcctcggcctagcatgtcggaagcgggcgaggagcagcccatggagacgacgggcgccaccgagaacggacatgaggccgtccccgaaggcgagtcgccggccggggctggcacgggcgccgcggcgggggctggaggcgcgaccgcggcgcccccgagcgggaatcagaacggcgccgagggcgaccagatcaacgccagcaagaacgaggaggacgcgggaaaaatgttcgttggtggcctgagctgggatactagcaaaaaagatttaaaagactattttactaaatttggagaggtcgttgactgtacaataaaaatggatcccaacactggacggtcaagagggtttgggtttatcctgttcaaagatgcagccagtgtggagaaggtcctagaccagaaggagcacaggctggatggccgtgtcattgaccctaaaaaggccatggctatgaagaaggacccggtgaagaaaatcttcgttgggggtctgaatcctgaagccactgaggaaaagatcagggagtactttggcgagtttggggagattgaggccattgaattgccaatggatccaaagttgaacaaaagacgaggttttgtgtttatcacctttaaagaagaagaacccgtgaagaaggttctggagaaaaagttccatactgtcagtggaagcaagtgtgagatcaaggtggcccagcccaaagaagtctatcagcagcagcagtatggctctgggggccgtggaaaccgcaaccgagggaaccgaggcagcggaggtggtggtggaggtggaggtcagagtcagagttggaatcagggctacggcaactactggaaccagggctacggctaccagcagggctacgggcctggctatggcggctacgactactcgccctatggctattacggctacggccccggctacgactacagtcagggtagtacaaactacggcaagagccagcgacgtggtggccatcagaataactacaagccatactgaggcggcagcaggagcgaccaactgatcgcacacatgctttgtttggatatggagtgaacacaattatgtaccaaatttaacttggcaaactttctattgcctgtcccatgtgcatcttatttaaaatttcccccatggaaatcactctcctgttgactatttccagagctctaggtgtttaggcagcgtgtggtgtctgagaggccatagcgccatcatgggctgatttttattaccaggtcccccagaagcaggtgggaggctctgcttcctgctgccgctctgcagcctggacctgtggaccctggttgtaaagagtaaattgtatcttaggaaaccagtgtcacctttttttcaccttttaattttatattatttgcgtcatacatttcctgtaacggaagtgttaattttactgtactttttggtaccttttgggaatctaatgtattgtaaggtattttacacgtgtcctgattttgccacaacctggatattgaagctatccaagcttttgaaataaaatttaaaaacccccaa

SEQ ID NO: 353008 - DNA, 2082 bp, Homo sapiens
cgctaggtggaggctgggtgttaatcggccgaggggcaccgcgcgggacggagcttggctgttggtcggtgggttcccgtgcggcggcggccaaggaggaggagacacagttggagcagctccgtgggctgactggggcgaggcctcagcagcgcgagcttgagtgcggccgagcctgcggcgccttcccctgcgggtggggacgagcgggccccgcggcgtcatcggcggcgaggagccgccgcgcctcggcctagcatgtcggaagcgggcgaggagcagcccatggagacgacgggcgccaccgagaacggacatgaggccgtccccgaaggcgagtcgccggccggggctggcacgggcgccgcggcgggggctggaggcgcgaccgcggcgcccccgagcgggaatcagaacggcgccgagggcgaccagatcaacgccagcaagaacgaggaggacgcgggaaaaatgttcgttggtggcctgagctgggatactagcaaaaaagatttaaaagactattttactaaatttggagaggtcgttgactgtacaataaaaatggatcccaacactggacggtcaagagggtttgggtttatcctgttcaaagatgcagccagtgtggagaaggtcctagaccagaaggagcacaggctggatggccgtgtcattgaccctaaaaaggccatggctatgaagaaggacccggtgaagaaaatcttcgttgggggtctgaatcctgaagccactgaggaaaagatcagggagtactttggcgagtttggggagattgaggccattgaattgccaatggatccaaagttgaacaaaagacgaggttttgtgtttatcacctttaaagaagaagaacccgtgaagaaggttctggagaaaaagttccatactgtcagtggaagcaagtgtgagatcaaggtggcccagcccaaagaagtctatcagcagcagcagtatggctctgggggccgtggaaaccgcaaccgagggaaccgaggcagcggaggtggtggtggaggtggaggtcagagtcagagttggaatcagggctacggcaactactggaaccagggctacggctaccagcagggctacgggcctggctatggcggctacgactactcgccctatggctattacggctacggccccggctacgactacagtcagggtagtacaaactacggcaagagccagcgacgtggtggccatcagaataactacaagccatactgaggcggcagcaggagcgaccaactgatcgcacacatgctttgtttggatatggagtgaacacaattatgtaccaaatttaacttggcaaactttctattgcctgtcccatgtgcatcttatttaaaatttcccccatggaaatcactctcctgttgactatttccagagctctaggtgtttaggcagcgtgtggtgtctgagaggccatagcgccatcatgggctgatttttattaccaggtcccccagaagcaggtgggaggctctgcttcctgctgccgctctgcagcctggacctgtggaccctggttgtaaagagtaaattgtatcttaggaaaccagtgtcacctttttttcaccttttaattttatattatttgcgtcatacatttcctgtaacggaagtgttaattttactgtactttttggtaccttttgggaatctaatgtattgtaaggtattttacacgtgtcctgattttgccacaacctggatattgaagctatccaagcttttgaaataaaatttaaaaacccccaagcctgggtgagtgtgggatatgctgtgtgagacctcttgctcagggtcgagggaggcggggggggggtgccaggtgccctggacttggggctttctcctgcagcaggctcttccagctgcaggcccagttgtgggggtatcctttaaggactgccctgcctagggctgagccccccttcaaagaaaggaatgagaggcctatggggagtgaggatggggcagtgatgagggcttacatccccagcaggcatgtcccctcctgggacaccttggaacaccaacctt

SEQ ID NO: 353009 - DNA, 1938 bp, Homo sapiens
cgctaggtggaggctgggtgttaatcggccgaggggcaccgcgcgggacggagcttggctgttggtcggtgggttcccgtgcggcggcggccaaggaggaggagacacagttggagcagctccgtgggctgactggggcgaggcctcagcagcgcgagcttgagtgcggccgagcctgcggcgccttcccctgcgggtggggacgagcgggccccgcggcgtcatcggcggcgaggagccgccgcgcctcggcctagcatgtcggaagcgggcgaggagcagcccatggagacgacgggcgccaccgagaacggacatgaggccgtccccgaaggcgagtcgccggccggggctggcacgggcgccgcggcgggggctggaggcgcgaccgcggcgcccccgagcgggaatcagaacggcgccgagggcgaccagatcaacgccagcaagaacgaggaggacgcgggaaaaatgttcgttggtggcctgagctgggatactagcaaaaaagatttaaaagactattttactaaatttggagaggtcgttgactgtacaataaaaatggatcccaacactggacggtcaagagggtttgggtttatcctgttcaaagatgcagccagtgtggagaaggtcctagaccagaaggagcacaggctggatggccgtgtcattgaccctaaaaaggccatggctatgaagaaggacccggtgaagaaaatcttcgttgggggtctgaatcctgaagccactgaggaaaagatcagggagtactttggcgagtttggggagattgaggccattgaattgccaatggatccaaagttgaacaaaagacgaggttttgtgtttatcacctttaaagaagaagaacccgtgaagaaggttctggagaaaaagttccatactgtcagtggaagcaagtgtgagatcaaggtggcccagcccaaagaagtctatcagcagcagcagtatggctctgggggccgtggaaaccgcaaccgagggaaccgaggcagcggaggtggtggtggaggtggaggtcagagtcagagttggaatcagggctacggcaactactggaaccagggctacggctaccagcagggctacgggcctggctatggcggctacgactactcgccctatggctattacggctacggccccggctacgactacagtcagggtagtacaaactacggcaagagccagcgacgtggtggccatcagaataactacaagccatactgaggcggcagcaggagcgaccaactgatcgcacacatgctttgtttggatatggagtgaacacaattatgtaccaaatttaacttggcaaactttctattgcctgtcccatgtgcatcttatttaaaatttcccccatggaaatcactctcctgttgactatttccagagctctaggtgtttaggcagcgtgtggtgtctgagaggccatagcgccatcatgggctgatttttattaccaggtcccccagaagcaggtgggaggctctgcttcctgctgccgctctgcagcctggacctgtggaccctggttgtaaagagtaaattgtatcttaggaaaccagtgtcacctttttttcaccttttaattttatattatttgcgtcatacatttcctgtaacggaagtgttaattttactgtactttttggtaccttttgggaatctaatgtattgtaaggtattttacacgtgtcctgattttgccacaacctggatattgaagctatccaagcttttgaaataaaatttaaaaacccccaagcctgggtgagtgtgggaaaaaaaaaaagcacacctgggagacagcgataaaaaaacttgaggggggggcccgaacccaattcgccctatagggggccgtattacaaatcaatggccgtgggtttaaaacgcgggactgga

SEQ ID NO: 353010 - DNA, 2077 bp, Homo sapiens
cgctaggtggaggctgggtgttaatcggccgaggggcaccgcgcgggacggagcttggctgttggtcggtgggttcccgtgcggcggcggccaaggaggaggagacacagttggagcagctccgtgggctgactggggcgaggcctcagcagcgcgagcttgagtgcggccgagcctgcggcgccttcccctgcgggtggggacgagcgggccccgcggcgtcatcggcggcgaggagccgccgcgcctcggcctagcatgtcggaagcgggcgaggagcagcccatggagacgacgggcgccaccgagaacggacatgaggccgtccccgaaggcgagtcgccggccggggctggcacgggcgccgcggcgggggctggaggcgcgaccgcggcgcccccgagcgggaatcagaacggcgccgagggcgaccagatcaacgccagcaagaacgaggaggacgcgggaaaaatgttcgttggtggcctgagctgggatactagcaaaaaagatttaaaagactattttactaaatttggagaggtcgttgactgtacaataaaaatggatcccaacactggacggtcaagagggtttgggtttatcctgttcaaagatgcagccagtgtggagaaggtcctagaccagaaggagcacaggctggatggccgtgtcattgaccctaaaaaggccatggctatgaagaaggacccggtgaagaaaatcttcgttgggggtctgaatcctgaagccactgaggaaaagatcagggagtactttggcgagtttggggagattgaggccattgaattgccaatggatccaaagttgaacaaaagacgaggttttgtgtttatcacctttaaagaagaagaacccgtgaagaaggttctggagaaaaagttccatactgtcagtggaagcaagtgtgagatcaaggtggcccagcccaaagaagtctatcagcagcagcagtatggctctgggggccgtggaaaccgcaaccgagggaaccgaggcagcggaggtggtggtggaggtggaggtcagagtcagagttggaatcagggctacggcaactactggaaccagggctacggctaccagcagggctacgggcctggctatggcggctacgactactcgccctatggctattacggctacggccccggctacgactacagtaagtaggagagagggaggccccatccgctcacccctcgtccccaggggaggcaggacagtgtaggagccactggcagcaggggctttggagtcagacaggcctggctcagccatgggagctacttgattttgagccttagacttcggggtcttaataacatgaggaaggcagtctctgctgtcacggctggtgagggtcctgggaagatgcatatcaagcgcgtggcacagggcaaatgcttgtaaatagtagctgctatggttgttctcgtccctaggtcagggtagtacaaactacggcaagagccagcgacgtggtggccatcagaataactacaagccatactgaggcggcagcaggagcgaccaactgatcgcacacatgctttgtttggatatggagtgaacacaattatgtaccaaatttaacttggcaaactttctattgcctgtcccatgtgcatcttatttaaaatttcccccatggaaatcactctcctgttgactatttccagagctctaggtgtttaggcagcgtgtggtgtctgagaggccatagcgccatcatgggctgatttttattaccaggtcccccagaagcaggtgggaggctctgcttcctgctgccgctctgcagcctggacctgtggaccctggttgtaaagagtaaattgtatcttaggaaaccagtgtcacctttttttcaccttttaattttatattatttgcgtcatacatttcctgtaacggaagtgttaattttactgtactttttggtaccttttgggaatctaatgtattgtaaggtattttacacgtgtcctgattttgccacaacctggatattgaagctatccaagcttttgaaataaaatttaaaaacccccaa

SEQ ID NO: 353011 - DNA, 1603 bp, Homo sapiens
cgctaggtggaggctgggtgttaatcggccgaggggcaccgcgcgggacggagcttggctgttggtcggtgggttcccgtgcggcggcggccaaggaggaggagacacagttggagcagctccgtgggctgactggggcgaggcctcagcagcgcgagcttgagtgcggccgagcctgcggcgccttcccctgcgggtggggacgagcgggccccgcggcgtcatcggcggcgaggagccgccgcgcctcggcctagcatgtcggaagcgggcgaggagcagcccatggagacgacgggcgccaccgagaacggacatgaggccgtccccgaaggcgagtcgccggccggggctggcacgggcgccgcggcgggggctggaggcgcgaccgcggcgcccccgagcgggaatcagaacggcgccgagggcgaccagatcaacgccagcaagaacgaggaggacgcgggaaaaatgttcgttggtggcctgagctgggatactagcaaaaaagatttaaaagactattttactaaatttggagaggtcgttgactgtacaataaaaatggatcccaacactggacggtcaagagggtttgggtttatcctgttcaaagatgcagccagtgtggagaaggtcctagaccagaaggagcacaggctggatggccgtgtcattgaccctaaaaaggccatggctatgaagaaggacccggtgaagaaaatcttcgttgggggtctgaatcctgaagccactgaggaaaagatcagggagtactttggcgagtttggggagattgaggccattgaattgccaatggatccaaagttgaacaaaagacgaggttttgtgtttatcacctttaaagaagaagaacccgtgaagaaggttctggagaaaaagttccatactgtcagtggaagcaagtgtgagatcaaggtggcccagcccaaagaagtctatcagcagcagcagtatggctctgggggccgtggaaaccgcaaccgagggaaccgagagccagcgacgtggtggccatcagaataactacaagccatactgaggcggcagcaggagcgaccaactgatcgcacacatgctttgtttggatatggagtgaacacaattatgtaccaaatttaacttggcaaactttctattgcctgtcccatgtgcatcttatttaaaatttcccccatggaaatcactctcctgttgactatttccagagctctaggtgtttaggcagcgtgtggtgtctgagaggccatagcgccatcatgggctgatttttattaccaggtcccccagaagcaggtgggaggctctgcttcctgctgccgctctgcagcctggacctgtggaccctggttgtaaagagtaaattgtatcttaggaaaccagtgtcacctttttttcaccttttaattttatattatttgcgtcatacatttcctgtaacggaagtgttaattttactgtactttttggtaccttttgggaatctaatgtattgtaaggtattttacacgtgtcctgattttgccacaacctggatattgaagctatccaagcttttgaaataaaatttaaaaacccccaa

SEQ ID NO: 353012 - DNA, 1744 bp, Homo sapiens
cgctaggtggaggctgggtgttaatcggccgaggggcaccgcgcgggacggagcttggctgttggtcggtgggttcccgtgcggcggcggccaaggaggaggagacacagttggagcagctccgtgggctgactggggcgaggcctcagcagcgcgagcttgagtgcggccgagcctgcggcgccttcccctgcgggtggggacgagcgggccccgcggcgtcatcggcggcgaggagccgccgcgcctcggcctagcatgtcggaagcgggcgaggagcagcccatggagacgacgggcgccaccgagaacggacatgaggccgtccccgaaggcgagtcgccggccggggctggcacgggcgccgcggcgggggctggaggcgcgaccgcggcgcccccgagcgggaatcagaacggcgccgagggcgaccagatcaacgccagcaagaacgaggaggacgcgggaaaaatgttcgttggtggcctgagctgggatactagcaaaaaagatttaaaagactattttactaaatttggagaggtcgttgactgtacaataaaaatggatcccaacactggacggtcaagagggtttgggtttatcctgttcaaagatgcagccagtgtggagaaggtcctagaccagaaggagcacaggctggatggccgtgtcattgaccctaaaaaggccatggctatgaagaaggacccggtgaagaaaatcttcgttgggggtctgaatcctgaagccactgaggaaaagatcagggagtactttggcgagtttggggagattgaggccattgaattgccaatggatccaaagttgaacaaaagacgaggttttgtgtttatcacctttaaagaagaagaacccgtgaagaaggttctggagaaaaagttccatactgtcagtggaagcaagtgtgagatcaaggtggcccagcccaaagaagtctatcagcagcagcagtatggctctgggggccgtggaaaccgcaaccgagggaaccgaggcagcggaggtggtggtggaggtggaggtcagagtcagagttggaatcagggctacggcaactactggaaccagggctacggctaccagcagggctacgggcctggctatggcggctacgactactcgccctatggctattacggctacggccccggctacgactacagtcagggtagtacaaactacggcaagagccagcgacgtggtggccatcagaataactacaagccatactgaggcggcagcaggagcgaccaactgatcgcacacatgctttgtttggatatggagtgaacacaattatgtaccaaatttaacttggcaaactttctattgcctgtcccatgtgcatcttattgtgtttaggcagcgtgtggtgtctgagaggccatagcgccatcatgggctgatttttattaccaggtcccccagaagcaggtgggaggctctgcttcctgctgccgctctgcagcctggacctgtggaccctggttgtaaagagtaaattgtatcttaggaaaccagtgtcacctttttttcaccttttaattttatattatttgcgtcatacatttcctgtaacggaagtgttaattttactgtactttttggtaccttttgggaatctaatgtattgtaaggtattttacacgtgtcctgattttgccacaacctggatattgaagctatccaagcttttgaaataaaatttaaaaacccccaa

SEQ ID NO: 353013 - DNA, 1492 bp, Homo sapiens
cgctaggtggaggctgggtgttaatcggccgaggggcaccgcgcgggacggagcttggctgttggtcggtgggttcccgtgcggcggcggccaaggaggaggagacacagttggagcagctccgtgggctgactggggcgaggcctcagcagcgcgagcttgagtgcggccgagcctgcggcgccttcccctgcgggtggggacgagcgggccccgcggcgtcatcggcggcgaggagccgccgcgcctcggcctagcatgtcggaagcgggcgaggagcagcccatggagacgacgggcgccaccgagaacggacatgaggccgtccccgaaggcgagtcgccggccggggctggcacgggcgccgcggcgggggctggaggcgcgaccgcggcgcccccgagcgggaatcagaacggcgccgagggcgaccagatcaacgccagcaagaacgaggaggacgcgggaaaaatgttcgttggtggcctgagctgggatactagcaaaaaagatttaaaagactattttactaaatttggagaggtcgttgactgtacaataaaaatggatcccaacactggacggtcaagagggtttgggtttatcctgttcaaagatgcagccagtgtggagaaggtcctagaccagaaggagcacaggctggatggccgtgtcattgaccctaaaaaggccatggctatgaagaaggacccggtgaagaaaatcttcgttgggggtctgaatcctgaagccactgaggaaaagatcagggagtactttggcgagtttggggagattgaggccattgaattgccaatggatccaaagttgaacaaaagacgaggttttgtgtttatcacctttaaagaagaagaacccgtgaagaaggttctggagaaaaagttccatactgtcagtggaagcaagtgtgagatcaaggtggcccagcccaaagaagtctatcagcagcagcagtatggctctgggggccgtggaaaccgcaaccgagggaaccgaggcagcggaggtggtggtggaggtggaggtgagtggaacgtggatgaagataggtcctgtttccctgcctacatggagccttccaagcctgtcttggggctccctctggtgctgtgcagcaggggtgggcagattgtgtgaggttggggacgaacaggaataggaacggctctgggtcagggctgtatgcttgaggctgttgcctgctgctgccccttggaatggcttgggtgcccagggcagagagagcatttgtgttacactctgggggaggggatgtgatgggtgtcttggctttgtggatgtcctgagtctggtacacctgtgagcaggtaggcagaagggtgggtagggcagagctgtgccaggcatttatccccttccatcccaggcccctctgactccaaagcctgaactgcatctttttaaaggctaagctgccaaggagagtgggagtgatcagagagtgactgag

SEQ ID NO: 353014 - DNA, 1251 bp, Homo sapiens
cgctaggtggaggctgggtgttaatcggccgaggggcaccgcgcgggacggagcttggctgttggtcggtgggttcccgtgcggcggcggccaaggaggaggagacacagttggagcagctccgtgggctgactggggcgaggcctcagcagcgcgagcttgagtgcggccgagcctgcggcgccttcccctgcgggtggggacgagcgggccccgcggcgtcatcggcggcgaggagccgccgcgcctcggcctagcatgtcggaagcgggcgaggagcagcccatggagacgacgggcgccaccgagaacggacatgaggccgtccccgaaggcgagtcgccggccggggctggcacgggcgccgcggcgggggctggaggcgcgaccgcggcgcccccgagcgggaatcagaacggcgccgagggcgaccagatcaacgccagcaagaacgaggaggacgcgggaaaaatgttcgttggtggcctgagctgggatactagcaaaaaagatttaaaagactattttactaaatttggagaggtcgttgactgtacaataaaaatggatcccaacactggacggtcaagagggtttgggtttatcctgttcaaagatgcagccagtgtggagaaggtcctagaccagaaggagcacaggctggatggccgtgtcattgaccctaaaaaggccatggctatgaagaaggacccggtgaagaaaatcttcgttgggggtctgaatcctgaagccactgaggaaaagatcagggagtactttggcgagtttggggagattgaggccattgaattgccaatggatccaaagttgaacaaaagacgaggttttgtgtttatcacctttaaagaagaagaacccgtgaagaaggttctggagaaaaagttccatactgtcagtggaagcaagtgtgagatcaaggtggcccagcccaaagaagtctacaggtgggaggctctgcttcctgctgccgctctgcagcctggacctgtggaccctggttgtaaagagtaaattgtatcttaggaaaccagtgtcacctttttttcaccttttaattttatattatttgcgtcatacatttcctgtaacggaagtgttaattttactgtactttttggtaccttttgggaatctaatgtattgtaaggtattttacacgtgtcctgattttgccacaacctggatattgaagctatccaagcttttgaaataaaatttaaaaacccccaa

SEQ ID NO: 353015 - DNA, 2118 bp, Homo sapiens
cggccgcgggcggacgggggcgccgcctttgttccggggccgccttttgttggcgccacgcggcggggggaggggcggcggcctggcccgggtcggggctggtgcggcccgcggactgtcgccgctgcgttcgcgggccgggcctggcgctgccactcgcgctggagtttgcgggagtttgttgggtcgactttggcgccgccccggggccgctcgcgcgctgccagggccagggccagggccggagccggcgcaggggcgggcggatggcccggaagagggaaagcgctcggacccggggcccggcggcgtcttgggccgcgccgggggctgcgtgggcggagttggcgcgagccggggcccggacctccctcctccgcctctcccgggggcggagtcacggtctgaaccctgggcgggcttggtccccggaaacatcgagttccttgaaacgagttctcaggagttggtggagacgctggccctttgctacatggttgtagaacacatgaatttccagttatgagtggttaggtcccatacccctggtgaggtggtcccttctttgcttctcacaggctggggctgcagagccttgttaagcctcgttagggtcctggttgagttcaatttggagggtagtggagatttaacatctttctaaggtgctccttgcagactctaagggtagctgtagacttcgtgagaactttgccagggccagtcctttccaaaatcacagcttgcttacaagacttgttgccgtgtgtctcaccctaccatttcagaaaaatgttcgttggtggcctgagctgggatactagcaaaaaagatttaaaagactattttactaaatttggagaggtcgttgactgtacaataaaaatggatcccaacactggacggtcaagagggtttgggtttatcctgttcaaagatgcagccagtgtggagaaggtcctagaccagaaggagcacaggctggatggccgtgtcattgaccctaaaaaggccatggctatgaagaaggacccggtgaagaaaatcttcgttgggggtctgaatcctgaagccactgaggaaaagatcagggagtactttggcgagtttggggagattgaggccattgaattgccaatggatccaaagttgaacaaaagacgaggttttgtgtttatcacctttaaagaagaagaacccgtgaagaaggttctggagaaaaagttccatactgtcagtggaagcaagtgtgagatcaaggtggcccagcccaaagaagtctatcagcagcagcagtatggctctgggggccgtggaaaccgcaaccgagggaaccgaggcagcggaggtggtggtggaggtggaggtcagagtcagagttggaatcagggctacggcaactactggaaccagggctacggctaccagcagggctacgggcctggctatggcggctacgactactcgccctatggctattacggctacggccccggctacgactacagtcagggtagtacaaactacggcaagagccagcgacgtggtggccatcagaataactacaagccatactgaggcggcagcaggagcgaccaactgatcgcacacatgctttgtttggatatggagtgaacacaattatgtaccaaatttaacttggcaaactttctattgcctgtcccatgtgcatcttatttaaaatttcccccatggaaatcactctcctgttgactatttccagagctctaggtgtttaggcagcgtgtggtgtctgagaggccatagcgccatcatgggctgatttttattaccaggtcccccagaagcaggtgggaggctctgcttcctgctgccgctctgcagcctggacctgtggaccctggttgtaaagagtaaattgtatcttaggaaaccagtgtcacctttttttcaccttttaattttatattatttgcgtcatacatttcctgtaacggaagtgttaattttactgtactttttggtaccttttgggaatctaatgtattgtaaggtattttacacgtgtcctgattttgccacaacctggatattgaagctatccaagcttttgaaataaaatttaaaaacccccaa

SEQ ID NO: 353016 - DNA, 960 bp, Homo sapiens
cggacgcgtgggtcgacccacgcgtcgatcttcgttgggggtctgaatcctgaagccactgaggaaaagatcagggagtactttggcgagtttggggagattgaggccattgaattgccaatggatccaaagttgaacaaaagacgaggttttgtgtttatcacctttaaagaagaagaacccgtgaagaaggttctggagaaaaagttccatactgtcagtggaagcaagtgtgagatcaaggtggcccagcccaaagaagtctatcagcagcagcagtatggctctgggggccgtggaaaccgcaaccgagggaaccgaggcagcggaggtggtggtggaggtggaggtcagggtagtacaaactacggcaagagccagcgacgtggtggccatcagaataactacaagccatactgaggcggcagcaggagcgaccaactgatcgcacacatgctttgtttggatatggagtgaacacaattatgtaccaaatttaacttggcaaactttctattgcctgtcccatgtgcatcttatttaaaatttcccccatggaaatcactctcctgttgactatttccagagctctaggtgtttaggcagcgtgtggtgtctgagaggccatagcgccatcatgggctgatttttattaccaggtcccccagaagcaggtgggaggctctgcttcctgctgccgctctgcagcctggacctgtggaccctggttgtaaagagtaaattgtatcttaggaaaccagtgtcacctttttttcaccttttaattttatattatttgcgtcatacatttcctgtaacggaagtgttaattttactgtactttttggtaccttttgggaatctaatgtattgtaaggtattttacacgtgtcctgattttgccacaacctggatattgaagctatccaagcttttgaaataaaatttaaaaacccccaa

SEQ ID NO: 353017 - DNA, 1258 bp, Homo sapiens
ccttgtttgccccaagtaaagttagcatcctggtctctgatcctctgcttgggtctctcagatgcagggttgggcccagggcccttatacaccagaacagcagccccttggcttctgcctgagttgccacagtaaccctgccaccccaaagggcaggatttcctccatcctagctcctgcgtatgctaaatggtccacgggcccctgtgccctgctccccccacaggtcagagtcagagttggaatcagggctacggcaactactggaaccagggctacggctaccagcagggctacgggcctggctatggcggctacgactactcgccctatggctattacggctacggccccggctacgactacagtaagtaggagagagggaggccccatccgctcacccctcgtccccaggggaggcaggacagtgtaggagccactggcagcaggggctttggagtcagacaggcctggctcagccatgggagctacttgattttgagccttagacttcggggtcttaataacatgaggaaggcagtctctgctgtcacggctggtgagggtcctgggaagatgcatatcaagcgcgtggcacagggcaaatgcttgtaaatagtagctgctatggttgttctcgtccctaggtcagggtagtacaaactacggcaagagccagcgacgtggtggccatcagaataactacaagccatactgaggcggcagcaggagcgaccaactgatcgcacacatgctttgtttggatatggagtgaacacaattatgtaccaaatttaacttggcaaactttctattgcctgtcccatgtgcatcttatttaaaatttcccccatggaaatcactctcctgttgactatttccagagctctaggtgtttaggcagcgtgtggtgtctgagaggccatagcgccatcatgggctgatttttattaccaggtcccccagaagcaggtgggaggctctgcttcctgctgccgctctgcagcctggacctgtggaccctggttgtaaagagtaaattgtatcttaggaaaccagtgtcacctttttttcaccttttaattttatattatttgcgtcatacatttcctgtaacggaagtgttaattttactgtactttttggtaccttttgggaatctaatgtattgtaaggtattttacacgtgtcctgattttgccacaacctggatattgaagctatccaagcttttgaaataaaatttaaaaacccccaa

SEQ ID NO: 353018 - DNA, 935 bp, Homo sapiens
gggctagttgacttcggcacgtatgaaaagacgaggttttgtgtttatcacctttaaagaagaagaacccgtgaagaaggttctggagaaaaagttccatactgtcagtggaagcaagtgtgagatcaaggtggcccagcccaaagaagtctatcagcagcagcagtatggctctgggggccgtggaaaccgcaaccgagggaaccgaggcagcggaggtggtggtggaggtggaggtcagagtcagagttggaatcagggctacggcaactactggaaccagggctacggctaccagcagggctacgggcctggctatggcggctacgactactcgccctatggctattacggctacggccccggctacgactacagtcagggtagtacaaactacggcaagagccagcgacgtggtggccatcagaataactacaagccatactgaggcggcagcaggagcgaccaactgatcgcacacatgctttgtttggatatggagtgaacacaattatgtaccaaatttaacttggcaaactttctattgcctgtcccatgtgcatcttattgtgtttaggcagcgtgtggtgtctgagaggccatagcgccatcatgggctgatttttattaccaggtcccccagaagcaggtgggaggctctgcttcctgctgccgctctgcagcctggacctgtggaccctggttgtaaagagtaaattgtatcttaggaaaccagtgtcacctttttttcaccttttaattttatattatttgcgtcatacatttcctgtaacggaagtgttaattttactgtactttttggtaccttttgggaatctaatgtattgtaaggtattttacacgtgtcctgattttgccacaacctggatattgaagctatccaagcttttgaaataaaatttaaaaacccccaa

SEQ ID NO: 353019 - DNA, 1293 bp, Homo sapiens
cggccgcgggcggacgggggcgccgcctttgttccggggccgccttttgttggcgccacgcggcggggggaggggcggcggcctggcccgggtcggggctggtgcggcccgcggactgtcgccgctgcgttcgcgggccgggcctggcgctgccactcgcgctggagtttgcgggagtttgttgggtcgactttggcgccgccccggggccgctcgcgcgctgccagggccagggccagggccggagccggcgcaggggcgggcggatggcccggaagagggaaagcgctcggacccggggcccggcggcgtcttgggccgcgccgggggctgcgtgggcggagttggcgcgagccggggcccggacctccctcctccgcctctcccgggggcggagtcacggtctgaaccctgggcgggcttggtccccggaaacatcgagttccttgaaacgagttctcaggagttggtggagacgctggccctttgctacatggttgtagaacacatgaatttccagttatgagtggttaggtcccatacccctggtgaggtggtcccttctttgcttctcacaggctggggctgcagagccttgttaagcctcgttagggtcctggttgagttcaatttggagggtagtggagatttaacatctttctaaggtgctccttgcagactctaagggtagctgtagacttcgtgagaactttgccagggccagtcctttccaaaatcacagcttgcttacaagacttgttgccgtgtgtctcaccctaccatttcagaaaaatgttcgttggtggcctgagctgggatactagcaaaaaagatttaaaagactattttactaaatttggagaggtcgttgactgtacaataaaaatggatcccaacactggacggtcaagagggtttgggtttatcctgttcaaagatgcagccagtgtggagaaggtaagctgggtactggatttcagcagtctcagtggaaacgatttgaattctaagaggacacctttcttaaagcatgactagtttgtgtggtctgcatgtgatttaagtgctttgggcaaaacccaaagccggaggttatgttccggtttttgaggggatgaaaatacagattaagctgggagtgagagaatgtgctggagtggttcgggaagatgacagttgacattcattaccttttatgtgcctattctgggtacggcgctaaacatctgggaggattacaagagagtccatgattggtatgataggcttttagccccattttacaggacaaaa

SEQ ID NO: 353020 - DNA, 1195 bp, Homo sapiens
cctggggacaatgtgggcttcaatggtaagaatggtgcctgtcctgctgtctctgctgctgcttctgggtcctgctgtcccccaggagaaccaagatggtcgttactctctgacctatatctacactgggctgtccaagcatgttgaagacgtccccgcgtttcaggcccttggctcactcaatgacctccagttctttagatacaacagtaaagacaggaagtctcagcccatgggactctggagacaggtggaaggaatggaggattggaagcaggacagccaacttcagaaggccagggaggacatctttatggagaccctgaaagacatcgtggagtattacaacgacagtaacgggtctcacgtattgcagggaaggtttggttgtgagatcgagaataacagaagcagcggagcattctggaaatattactatgatggaaaggactacattgaattcaacaaagaaatcccagcctgggtccccttcgacccagcagcccagataaccaagcagaagtgggaggcagaaccagtctacgtgcagcgggccaaggcttacctggaggaggagtgccctgcgactctgcggaaatacctgaaatacagcaaaaatatcctggaccggcaagatcctccctctgtggtggtcaccagccaccaggccccaggagaaaagaagaaactgaagtgcctggcctacgacttctacccagggaaaattgatgtgcactggactcgggccggcgaggtgcaggagcctgagttacggggagatgttcttcacaatggaaatggcacttaccagtcctgggtggtggtggcagtgcccccgcaggacacagccccctactcctgccacgtgcagcacagcagcctggcccagcccctcgtggtgccctgggaggccagctaggaagcaagggttggaggcaatgtgggatctcagacccagtagctgcccttcctgcctgatgtgggagctgaaccacagaaatcacagtcaatggatccacaaggcctgaggagcagtgtggggggacagacaggaggtggatttggagaccgaagactgggatgcctgtcttgagtagacttggacccaaaaaatcatctcaccttgagcccacccccaccccattgtctaatctgtagaagctaataaataatcatccctccttgcctagcataa

SEQ ID NO: 353021 - DNA, 624 bp, Homo sapiens
gaagagacctgggccgggagaagtccacctcaagcctgcagtgtcacactctatccctccacagatcctccctctgtggtggtcaccagccaccaggccccaggagaaaagaagaaactgaagtgcctggcctacgacttctacccagggaaaattgatgtgcactggactcgggccggcgaggtgcaggagcctgagttacggggagatgttcttcacaatggaaatggcacttaccagtcctgggtggtggtggcagtgcccccgcaggacacagccccctactcctgccacgtgcagcacagcagcctggcccagcccctcgtggtgccctgggaggccagctaggaagcaagggttggaggcaatgtgggatctcagacccagtagctgcccttcctgcctgatgtgggagctgaaccacagaaatcacagtcaatggatccacaaggcctgaggagcagtgtggggggacagacaggaggtggatttggagaccgaagactgggatgcctgtcttgagtagacttggacccaaaaaatcatctcaccttgagcccacccccaccccattgtctaatctgtagaagctaataaataatcatccctccttgcctagcataa

SEQ ID NO: 353022 - DNA, 1195 bp, Homo sapiens
cagaaccctccaagcagacacaatggtaagaatggtgcctgtcctgctgtctctgctgctgcttctgggtcctgctgtcccccaggagaaccaagatggtcgttactctctgacctatatctacactgggctgtccaagcatgttgaagacgtccccgcgtttcaggcccttggctcactcaatgacctccagttctttagatacaacagtaaagacaggaagtctcagcccatgggactctggagacaggtggaaggaatggaggattggaagcaggacagccaacttcagaaggccagggaggacatctttatggagaccctgaaagacatcgtggagtattacaacgacagtaacgggtctcacgtattgcagggaaggtttggttgtgagatcgagaataacagaagcagcggagcattctggaaatattactatgatggaaaggactacattgaattcaacaaagaaatcccagcctgggtccccttcgacccagcagcccagataaccaagcagaagtgggaggcagaaccagtctacgtgcagcgggccaaggcttacctggaggaggagtgccctgcgactctgcggaaatacctgaaatacagcaaaaatatcctggaccggcaagatcctccctctgtggtggtcaccagccaccaggccccaggagaaaagaagaaactgaagtgcctggcctacgacttctacccagggaaaattgatgtgcactggactcgggccggcgaggtgcaggagcctgagttacggggagatgttcttcacaatggaaatggcacttaccagtcctgggtggtggtggcagtgcccccgcaggacacagccccctactcctgccacgtgcagcacagcagcctggcccagcccctcgtggtgccctgggaggccagctaggaagcaagggttggaggcaatgtgggatctcagacccagtagctgcccttcctgcctgatgtgggagctgaaccacagaaatcacagtcaatggatccacaaggcctgaggagcagtgtggggggacagacaggaggtggatttggagaccgaagactgggatgcctgtcttgagtagacttggacccaaaaaatcatctcaccttgagcccacccccaccccattgtctaatctgtagaagctaataaataatcatccctccttgcctagcataa

SEQ ID NO: 353023 - DNA, 1376 bp, Homo sapiens
ttttttttgagatagggtctcactctgtcacccaggctgaaatgcagtagtgtgattttggctcattgcagccttgacttcccaggctgaagtgatcctcccacctcagcctcctgagtagctggggctacaggcatgcaccaccatgctgcgctaatttttatattttttgtagtggtgggattttgccatatcaccctggctggtctggaacccctgggctcaagcgatccactcgcttcagcttctcaaagtgctgggattacaggcatgagccacagcgcccaggctgtagctctcttaaggaggaacatatctcatctgagacaaacctgaaatgccaaaccaaactgagttagcccctctctgtctgttgtatatattggagtaataacctatttgtcttgataaagggattgcatgcttgaattgcaaaaacctttatttcttttgggttgcccaatgtgcaagactaagagttattttgataaatttctcaccaggctgactgtctctctgtggggtcgggggagttttcagggtctcacgtattgcagggaaggtttggttgtgagatcgagaataacagaagcagcggagcattctggaaatattactatgatggaaaggactacattgaattcaacaaagaaatcccagcctgggtccccttcgacccagcagcccagataaccaagcagaagtgggaggcagaaccagtctacgtgcagcgggccaaggcttacctggaggaggagtgccctgcgactctgcggaaatacctgaaatacagcaaaaatatcctggaccggcaagatcctccctctgtggtggtcaccagccaccaggccccaggagaaaagaagaaactgaagtgcctggcctacgacttctacccagggaaaattgatgtgcactggactcgggccggcgaggtgcaggagcctgagttacggggagatgttcttcacaatggaaatggcacttaccagtcctgggtggtggtggcagtgcccccgcaggacacagccccctactcctgccacgtgcagcacagcagcctggcccagcccctcgtggtgccctgggaggccagctaggaagcaagggttggaggcaatgtgggatctcagacccagtagctgcccttcctgcctgatgtgggagctgaaccacagaaatcacagtcaatggatccacaaggcctgaggagcagtgtggggggacagacaggaggtggatttggagaccgaagactgggatgcctgtcttgagtagacttggacccaaaaaatcatctcaccttgagcccacccccaccccattgtctaatctgtagaagctaataaataatcatccctccttgcctagcataa

SEQ ID NO: 353024 - DNA, 1415 bp, Homo sapiens
cagggtcttttcccctcaaactgtcattttatttttacgttgttagatatggggagtagtgtgattgaggtggagtagattaggcgtaggtagaagaatggtaagaatggtgcctgtcctgctgtctctgctgctgcttctgggtcctgctgtcccccaggagaaccaagatggtcgttactctctgacctatatctacactgggctgtccaagcatgttgaagacgtccccgcgtttcaggcccttggctcactcaatgacctccagttctttagatacaacagtaaagacaggaagtctcagcccatgggactctggagacaggtggaaggaatggaggattggaagcaggacagccaacttcagaaggccagggaggacatctttatggagaccctgaaagacatcgtggagtattacaacgacagtaacgggtctcacgtattgcagggaaggtttggttgtgagatcgagaataacagaagcagcggagcattctggaaatattactatgatggaaaggactacattgaattcaacaaagaaatcccagcctgggtccccttcgacccagcagcccagataaccaagcagaagtgggaggcagaaccagtctacgtgcagcgggccaaggcttacctggaggaggagtgccctgcgactctgcggaaatacctgaaatacagcaaaaatatcctggaccggcaagatcctccctctgtggtggtcaccagccaccaggccccaggagaaaagaagaaactgaagtgcctggcctacgacttctacccagggaaaattgatgtgcactggactcgggccggcgaggtgcaggagcctgagttacggggagatgttcttcacaatggaaatggcacttaccagtcctgggtggtggtggcagtgcccccgcaggacacagccccctactcctgccacgtgcagcacagcagcctggcccagcccctcgtggtgccctgggaggccagctaggaagcaagggttggaggcaatgtgggatctcagacccagtagctgcccttcctgcctgatgtgggagctgaaccacagaaatcacagtcaatggatccacaaggcctgaggagcagtgtggggggacagacaggaggtggatttggagaccgaagactgggatgcctgtcttgagtagacttggacccaaaaaatcatctcaccttgagcccacccccaccccattgtctaatctgtagaagctaataaataatcatccctccttgcctagcataaaaaaaaaaaaaaaaaaaattccaccaactccttgaaggggattttattatcctcacatcgcgatgagatttgagacttaaacgaggtggctgaccccaagactaaaggtgcctggtccaaattaaatcttaatgaggggctcctt

SEQ ID NO: 353025 - DNA, 1532 bp, Homo sapiens
cagggtcttttcccctcaaactgtcattttatttttacgttgttagatatggggagtagtgtgattgaggtggagtagattaggcgtaggtagaagaatggtaagaatggtgcctgtcctgctgtctctgctgctgcttctgggtcctgctgtcccccaggagaaccaagatggtcgttactctctgacctatatctacactgggctgtccaagcatgttgaagacgtccccgcgtttcaggcccttggctcactcaatgacctccagttctttagatacaacagtaaagacaggaagtctcagcccatgggactctggagacaggtggaaggaatggaggattggaagcaggacagccaacttcagaaggccagggaggacatctttatggagaccctgaaagacatcgtggagtattacaacgacagtaacgggtctcacgtattgcagggaaggtttggttgtgagatcgagaataacagaagcagcggagcattctggaaatattactatgatggaaaggactacattgaattcaacaaagaaatcccagcctgggtccccttcgacccagcagcccagataaccaagcagaagtgggaggcagaaccagtctacgtgcagcgggccaaggcttacctggaggaggagtgccctgcgactctgcggaaatacctgaaatacagcaaaaatatcctggaccggcaagatcctccctctgtggtggtcaccagccaccaggccccaggagaaaagaagaaactgaagtgcctggcctacgacttctacccagggaaaattgatgtgcactggactcgggccggcgaggtgcaggagcctgagttacggggagatgttcttcacaatggaaatggcacttaccagtcctgggtggtggtggcagtgcccccgcaggacacagccccctactcctgccacgtgcagcacagcagcctggcccagcccctcgtggtgccctgggaggccagctaggaagcaagggttggaggcaatgtgggatctcagacccagtagctgcccttcctgcctgatgtgggagctgaaccacagaaatcacagtcaatggatccacaaggcctgaggagcagtgtggggggacagacaggaggtggatttggagaccgaagactgggatgcctgtcttgagtagacttggacccaaaaaatcatctcaccttgagcccacccccaccccattgtctaatctgtagaagctaataaataatcatccctccttgcctagcataaaaaaaaaaaaaaaaaaaaaaaaaaaaaaaaaaaaaaaaaaaaaaaaaaaaaaaaaaaaaaaccaaaagagaggccaaaaaccaaaaaacagcccaaaaaaaaacaacaaacaagacagaaaaacacaaagaaaacaacccaacaaactgggggggccccccgagccccaatccccctgatggcggaccagtttcaagttccgccccgtgggttaaaaccaacgggtggggaaaccctctggcttccccacatatgccgctct

SEQ ID NO: 353026 - DNA, 1142 bp, Homo sapiens
cagaaccctccaagcagacacaatggtaagaatggtgcctgtcctgctgtctctgctgctgcttctgggtcctgctgtcccccaggagaaccaagatggtcgttactctctgacctatatctacactgggctgtccaagcatgttgaagacgtccccgcgtttcaggcccttggctcactcaatgacctccagttctttagatacaacagtaaagacaggaagtctcagcccatgggactctggagacaggtggaaggaatggaggattggaagcaggacagccaacttcagaaggccagggaggacatctttatggagaccctgaaagacatcgtggagtattacaacgacagtaacgggtctcacgtattgcagggaaggtttggttgtgagatcgagaataacagaagcagcggagcattctggaaatattactatgatggaaaggactacattgaattcaacaaagaaatcccagcctgggtccccttcgacccagcagcccagataaccaagcagaagtgggaggcagaaccagtctacgtgcagcgggccaaggcttacctggaggaggagtgccctgcgactctgcggaaatacctgaaatacagcaaaaatatcctggaccggcaagatcctccctctgtggtggtcaccagccaccaggccccaggagaaaagaagaaactgaagtgcctggcctacgacttctacccaggggggagatgttcttcacaatggaaatggcacttaccagtcctgggtggtggtggcagtgcccccgcaggacacagccccctactcctgccacgtgcagcacagcagcctggcccagcccctcgtggtgccctgggaggccagctaggaagcaagggttggaggcaatgtgggatctcagacccagtagctgcccttcctgcctgatgtgggagctgaaccacagaaatcacagtcaatggatccacaaggcctgaggagcagtgtggggggacagacaggaggtggatttggagaccgaagactgggatgcctgtcttgagtagacttggacccaaaaaatcatctcaccttgagcccacccccaccccattgtctaatctgtagaagctaataaataatcatccctccttgcctagcataa

SEQ ID NO: 353027 - DNA, 1090 bp, Homo sapiens
cagggtcttttcccctcaaactgtcattttatttttacgttgttagatatggggagtagtgtgattgaggtggagtagattaggcgtaggtagaagaatggtaagaatggtgcctgtcctgctgtctctgctgctgcttctgggtcctgctgtcccccaggagaaccaagatggtcgttactctctgacctatatctacactgggctgtccaagcatgttgaagacgtccccgcgtttcaggcccttggctcactcaatgacctccagttctttagatacaacagtaaagacaggaagtctcagcccatgggactctggagacaggtggaaggaatggaggattggaagcaggacagccaacttcagaaggccagggaggacatctttatggagaccctgaaagacatcgtggagtattacaacgacagtaacgggtctcacgtattgcagggaaggtttggttgtgagatcgagaataacagaagcagcggagcattctggaaatattactatgatggaaaggactacattgaattcaacaaagaaatcccagcctgggtccccttcgacccagcagcccagataaccaagcagaagtgggaggcagaaccagtctacgtgcagcgggccaaggcttacctggaggaggagtgccctgcgactctgcggggagatgttcttcacaatggaaatggcacttaccagtcctgggtggtggtggcagtgcccccgcaggacacagccccctactcctgccacgtgcagcacagcagcctggcccagcccctcgtggtgccctgggaggccagctaggaagcaagggttggaggcaatgtgggatctcagacccagtagctgcccttcctgcctgatgtgggagctgaaccacagaaatcacagtcaatggatccacaaggcctgaggagcagtgtggggggacagacaggaggtggatttggagaccgaagactgggatgcctgtcttgagtagacttggacccaaaaaatcatctcaccttgagcccacccccaccccattgtctaatctgtagaagctaataaataatcatccctccttgcctagcataa

SEQ ID NO: 353028 - DNA, 1120 bp, Homo sapiens
cagggtcttttcccctcaaactgtcattttatttttacgttgttagatatggggagtagtgtgattgaggtggagtagattaggcgtaggtagaagaatggtaagaatggtgcctgtcctgctgtctctgctgctgcttctgggtcctgctgtcccccaggagaaccaagatggtcgttactctctgacctatatctacactgggctgtccaagcatgttgaagacgtccccgcgtttcaggcccttggctcactcaatgacctccagttctttagatacaacagtaaagacaggaagtctcagcccatgggactctggagacaggtggaaggaatggaggattggaagcaggacagccaacttcagaaggccagggaggacatctttatggagaccctgaaagacatcgtggagtattacaacgacagtaacgggtctcacgtattgcagggaaggtttggttgtgagatcgagaataacagaagcagcggagcattctggaaatattactatgatggaaaggactacattgaattcaacaaagaaatcccagcctgggtccccttcgacccagcagcccagataaccaagcagaagtgggaggcagaaccagtctacgtgcagcgggccaaggcttacctggaggaggagtgccctgcgactctgcggaaatacctgaaatacagcaaaaatatcctggaccggcaaggtactcactgcttcctgctccccagtactgagcccagaataaaagacgatctcaggctaggagctcaggcaacatcttagtccggtctcatctgttcctggatgtccctcagacccccagctttcatcttttaggatttattccttccctgggataatataatttgtggtccaaaaagaacatcatcaaaatttcaggcagaatgggccaggaaggccattctttcttgatgagtgtccccaaatcatctccaattaacagacaaggagcttgaggttagggaggtgagggtaacactgtctgtaagaggcagagctgggactcaaattccagatttcagattccaaatcccatcgttttttatctctacaatgatgcctcccatctgggtggtggagagaagggaggcg

SEQ ID NO: 353029 - DNA, 697 bp, Homo sapiens
cagggtcttttcccctcaaactgtcattttatttttacgttgttagatatggggagtagtgtgattgaggtggagtagattaggcgtaggtagaagaatggtaagaatggtgcctgtcctgctgtctctgctgctgcttctgggtcctgctgtcccccaggagaaccaagatggtcgttactctctgacctatatctacactgggctgtccaagcatgttgaagacgtccccgcgtttcaggcccttggctcactcaatgacctccagttctttagatacaacagtaaagacaggaagtctcagcccatgggactctggagacaggtggaaggaatggaggattggaagcaggacagccaacttcagaaggccagggaggacatctttatggagaccctgaaagacatcgtggagtattacaacgacagtaacgggtctcacgtattgcagggaaggtttggttgtgagatcgagaataacagaagcagcggagcattctggaaatattactatgatggaaaggactacattgaattcaacaaagaaatcccagcctgggtccccttcgacccagcagcccagataaccaagcagaagtgggaggcagaaccagtctacgtgcagcatggcgcactcgtgtcagacgtgaacgagcaccggcgagacatggccatggctcgtggcctcgagatgcac

SEQ ID NO: 353030 - DNA, 691 bp, Homo sapiens
cagggtcttttcccctcaaactgtcattttatttttacgttgttagatatggggagtagtgtgattgaggtggagtagattaggcgtaggtagaagaatggtaagaatggtgcctgtcctgctgtctctgctgctgcttctgggtcctgctgtcccccaggagaaccaagatggtcgttactctctgacctatatctacactgggctgtccaagcatgttgaagacgtccccgcgtttcaggcccttggctcactcaatgacctccagttctttagatacaacagtaaagacaggaagtctcagcccatgggactctggagacaggtggaaggaatggaggattggaagcaggacagccaacttcagaaggccagggaggacatctttatggagaccctgaaagacatcgtggagtattacaacgacagtaacgttccaggaagaagcttagcccaggaaaaacaaagaccagttggacccagagatgcctgagttggagatgaactttggccaactttcctcatcaccatacttaaaatcctgtccaaggaggagcttattcaccattttctatacatgtgacatatgtagcagcataaccgacaactgggactgcgctgccttgactccacctctacatacaatgactcagctaaccagactaataaaagccatgtttgcaccattgct

SEQ ID NO: 353031 - DNA, 1270 bp, Homo sapiens
cagggtcttttcccctcaaactgtcattttatttttacgttgttagatatggggagtagtgtgattgaggtggagtagattaggcgtaggtagaagaatggtaagaatggtgcctgtcctgctgtctctgctgctgcttctgggtcctgctgtcccccaggagaaccaagatggtcgttactctctgacctatatctacactgggctgtccaagcatgttgaagacgtccccgcgtttcaggcccttggctcactcaatgacctccagttctttagatacaacagtaaagacaggaagtctcagcccatgggactctggagacaggtggaaggaatggaggattggaagcaggacagccaacttcagaaggccagggaggacatctttatggagaccctgaaagacatcgtggagtattacaacgacagtaacgggtctcacgtattgcagggaaggtttggttgtgagatcgagaataacagaagcagcggagcattctggaaatattactatgatggaaaggactacattgaattcaacaaagaaatcccagcctgggtccccttcgacccagcagcccagataaccaagcagaagtgggaggcagaaccagtctacgtgcagcgggccaaggcttacctggaggaggagtgccctgcgactctgcggaaatacctgaaatacagcaaaaatatcctggaccggcaagatcctccctctgtggtggtcaccagccaccaggccccaggagaaaagaagaaactgaagtgcctggcctacgacttctacccagggaaaattgatgtgcactggactcgggccggcgaggtgcaggagcctgagttacggggagatgttcttcacaatggaaatggcacttaccagtcctgggtggtggtggcagtgcccccgcaggacacagccccctactcctgccacgtgcagcacagcagcctggcccagcccctcgtggtgccctgggaggccagctaggaagcaagggttggaggcaatgtgggatctcagacccagtagctgcccttcctgcctgatgtgggagctgaaccacagaaatcacagtcaatggatccacaaggcctgaggagcagtgtggggggacagacaggaggtggatttggagaccgaagactgggatgcctgtcttgagtagacttggacccaaaaaatcatctcaccttgagcccacccccaccccattgtctaatctgtagaagctaataaataatcatccctccttgcctagcataa

SEQ ID NO: 353032 - DNA, 1168 bp, Homo sapiens
ctcaatggaatcaaaaaaaactctgctgcaccggttgtgttaccatgcaatcccccaggagaaccaagatggtcgttactctctgacctatatctacactgggctgtccaagcatgttgaagacgtccccgcgtttcaggcccttggctcactcaatgacctccagttctttagatacaacagtaaagacaggaagtctcagcccatgggactctggagacaggtggaaggaatggaggattggaagcaggacagccaacttcagaaggccagggaggacatctttatggagaccctgaaagacatcgtggagtattacaacgacagtaacgggtctcacgtattgcagggaaggtttggttgtgagatcgagaataacagaagcagcggagcattctggaaatattactatgatggaaaggactacattgaattcaacaaagaaatcccagcctgggtccccttcgacccagcagcccagataaccaagcagaagtgggaggcagaaccagtctacgtgcagcgggccaaggcttacctggaggaggagtgccctgcgactctgcggaaatacctgaaatacagcaaaaatatcctggaccggcaagatcctccctctgtggtggtcaccagccaccaggccccaggagaaaagaagaaactgaagtgcctggcctacgacttctacccagggaaaattgatgtgcactggactcgggccggcgaggtgcaggagcctgagttacggggagatgttcttcacaatggaaatggcacttaccagtcctgggtggtggtggcagtgcccccgcaggacacagccccctactcctgccacgtgcagcacagcagcctggcccagcccctcgtggtgccctgggaggccagctaggaagcaagggttggaggcaatgtgggatctcagacccagtagctgcccttcctgcctgatgtgggagctgaaccacagaaatcacagtcaatggatccacaaggcctgaggagcagtgtggggggacagacaggaggtggatttggagaccgaagactgggatgcctgtcttgagtagacttggacccaaaaaatcatctcaccttgagcccacccccaccccattgtctaatctgtagaagctaataaataatcatccctccttgcctagcataa

SEQ ID NO: 353033 - DNA, 1382 bp, Homo sapiens
  misc_feature (1272)..(1273): n is a, c, g, or t
  misc_feature (1280)..(1280): n is a, c, g, or t
cagggtcttttcccctcaaactgtcattttatttttacgttgttagatatggggagtagtgtgattgaggtggagtagattaggcgtaggtagaagaatggtaagaatggtgcctgtcctgctgtctctgctgctgcttctgggtcctgctgtcccccaggagaaccaagatggtcgttactctctgacctatatctacactgggctgtccaagcatgttgaagacgtccccgcgtttcaggcccttggctcactcaatgacctccagttctttagatacaacagtaaagacaggaagtctcagcccatgggactctggagacaggtggaaggaatggaggattggaagcaggacagccaacttcagaaggccagggaggacatctttatggagaccctgaaagacatcgtggagtattacaacgacagtaacgggtctcacgtattgcagggaaggtttggttgtgagatcgagaataacagaagcagcggagcattctggaaatattactatgatggaaaggactacattgaattcaacaaagaaatcccagcctgggtccccttcgacccagcagcccagataaccaagcagaagtgggaggcagaaccagtctacgtgcagcgggccaaggcttacctggaggaggagtgccctgcgactctgcggaaatacctgaaatacagcaaaaatatcctggaccggcaagatcctccctctgtggtggtcaccagccaccaggccccaggagaaaagaagaaactgaagtgcctggcctacgacttctacccagggaaaattgatgtgcactggactcgggccggcgaggtgcaggagcctgagttacggggagatgttcttcacaatggaaatggcacttaccagtcctgggtggtggtggcagtgcccccgcaggacacagccccctactcctgccacgtgcagcacagcagcctggcccagcccctcgtggtgccctgggaggccagctaggaagcaagggttggaggcaatgtgggatctcagacccagtagctgcccttcctgcctgatgtgggagctgaaccacagaaatcacagtcaatggatccacaaggcctgaggagcagtgtggggggacagacaggaggtggatttggagaccgaagactgggatgcctgtcttgagtagacttggacccaaaaaatcatctcaccttgagcccacccccaccccattgtctaatctgtagaagctaataaataatcatccctccttgcctagcataaanngtcgttnacaattactggccggcgtttacaacgtcggactgggaacccctgcgtacccactaatcgccttgagacatcccctttgcagctgcgtatagcgaggcgcacc

SEQ ID NO: 353034 - DNA, 1182 bp, Homo sapiens
cagggtcttttcccctcaaactgtcattttatttttacgttgttagatatggggagtagtgtgattgaggtggagtagattaggcgtaggtagaagaatggtaagaatggtgcctgtcctgctgtctctgctgctgcttctgggtcctgctgtcccccaggagaaccaagatggtcgttactctctgacctatatctacactgggctgtccaagcatgttgaagacgtccccgcgtttcaggcccttggctcactcaatgacctccagttctttagatacaacagtaaagacaggaagtctcagcccatgggactctggagacaggtggaaggaatggaggattggaagcaggacagccaacttcagaaggccagggaggacatctttatggagaccctgaaagacatcgtggagtattacaacgacagtaacgggtctcacgtattgcagggaaggtttggttgtgagatcgagaataacagaagcagcggagcattctggaaatattactatgatggaaaggactacattgaattcaacaaagaaatcccagcctgggtccccttcgacccagcagcccagataaccaagcagaagtgggaggcagaaccagtctacgtgcagcgggccaaggcttacctggaggaggagtgccctgcgactctgcggaaatacctgaaatacagcaaaaatatcctggaccggcaagatcctccctctgtggtggtcaccagccaccaggccccaggagaaaagaagaaactgaagtgcctggcctacgacttctacccagggaaaattgatgtgcactggactcgggccggcgaggtgcaggagcctgagttacggggagatgttcttcacaatggaaatggcacttaccagtcctgggtggtggtggcagtgcccccgcaggacacagccccctactcctgccacgtgcagcacagcagcctggcccagcccctcgtggtgccctgggaggccagctaggaagcaagggttggaggcaatgtgggatctcagacccagtagctgcccgtggatttggagaccgaagactgggatgcctgtcttgagtagacttggacccaaaaaatcatctcaccttgagcccacccccaccccattgtctaatctgtagaagctaataaataatcatccctccttgcctagcataa

SEQ ID NO: 353035 - DNA, 857 bp, Homo sapiens
  misc_feature (828)..(828): n is a, c, g, or t
  misc_feature (835)..(835): n is a, c, g, or t
cagggtcttttcccctcaaactgtcattttatttttacgttgttagatatggggagtagtgtgattgaggtggagtagattaggcgtaggtagaagaatggtaagaatggtgcctgtcctgctgtctctgctgctgcttctgggtcctgctgtcccccaggagaaccaagatggtcgttactctctgacctatatctacactgggctgtccaagcatgttgaagacgtccccgcgtttcaggcccttggctcactcaatgacctccagttctttagatacaacagtaaagacaggaagtctcagcccatgggactctggagacaggtggaaggaatggaggattggaagcaggacagccaacttcagaaggccagggaggacatctttatggagaccctgaaagacatcgtggagtattacaacgacagtaacgggtctcacgtattgcagggaaggtttggttgtgagatcgagaataacagaagcagcggagcattctggaaatattactatgatggaaaggactacattgaattcaacaaagaaatcccagcctgggtccccttcgacccagcagcccagataaccaagcagaagtgggaggcagaaccagtctacgtgcagcgggccaaggcttacctggaggaggagtgccctgcgactctgcggaaatacctgaaatacagcaaaaatatcctggaccggcaagatcctccctctgtggtggtcaccagccaccaggccccaggagaaaagaagaaactgaagtgcctggcctacgacttctacccagggatggtcttcacaatgaaatgggaactacccantcttggntgtgggtgcaatccccccgcgc

SEQ ID NO: 353036 - DNA, 1193 bp, Homo sapiens
cagggtcttttcccctcaaactgtcattttatttttacgttgttagatatggggagtagtgtgattgaggtggagtagattaggcgtaggtagaagaatggtaagaatggtgcctgtcctgctgtctctgctgctgcttctgggtcctgctgtcccccaggagaaccaagatggtcgttactctctgacctatatctacactgggctgtccaagcatgttgaagacgtccccgcgtttcaggcccttggctcactcaatgacctccagttctttagatacaacagtaaagacaggaagtctcagcccatgggactctggagacaggtggaaggaatggaggattggaagcaggacagccaacttcagaaggccagggaggacatctttatggagaccctgaaagacatcgtggagtattacaacgacagtaacgggtctcacgtattgcagggaaggtttggttgtgagatcgagaataacagaagcagcggagcattctggaaatattactatgatggaaaggactacattgaattcaacaaagaaatcccagcctgggtccccttcgacccagcagcccagataaccaagcagaagtgggaggcagaaccagtctacgtgcagcacagcagcctggcccagcccctcgtggtgccctgggaggccagctaggaagcaagggttggaggcaatgtgggatctcagacccagtagctgcccttcctgcctgatgtgggagctgaaccacagaaatcacagtcaatggatccacaaggcctgaggagcagtgtggggggacagacaggaggtggatttggagaccgaagactgggatgcctgtcttgagtagacttggacccaaaaaatcatctcaccttgagcccacccccaccccattgtctaatctgtagaagctaataaataatcatccctccttgcctagcataaaaaaaaaaaaaaaaaaaaaaaaaaaaaaaaaaaaaaaaaaaaaccaaaagagaggccaaaaaccaaaaaacagcccaaaaaaaaacaacaaacaagacagaaaaacacaaagaaaacaacccaacaaactgggggggccccccgagccccaatccccctgatggcggaccagtttcaagttccgccccgtgggttaaaaccaacgggtggggaaaccctctggcttccccacatatgccgctct

SEQ ID NO: 353037 - DNA, 741 bp, Homo sapiens
cagggtcttttcccctcaaactgtcattttatttttacgttgttagatatggggagtagtgtgattgaggtggagtagattaggcgtaggtagaagaatggtaagaatggtgcctgtcctgctgtctctgctgctgcttctgggtcctgctgtcccccaggagaaccaagatggtcgttactctctgacctatatctacactgggctgtccaagcatgttgaagacgtccccgcgtttcaggcccttggctcactcaatgacctccagttctttagatacaacagtaaagacaggaagtctcagcccatgggactctggagacaggtggaaggaatggaggattggaagcaggacagccaacttcagaaggccagggaggacatctttatggagaccctgaaagacatcgtggagtattacaacgacagtaacgggtctcacgtattgcagggaaggtttggttgtgagatcgagaataacagaagcagcggagcattctggaaatattactattcctgcctgatgtgggagctgaaccacagaaatcacagtcaatggatccacaaggcctgaggagcagtgtggggggacagacaggaggtggatttggagaccgaagactgggatgcctgtcttgagtagacttggacccaaaaaatcatctcaccttgagcccacccccaccccattgtctaatctgtagaagctaataaataatcatccctccttgcctagcataa

SEQ ID NO: 353038 - DNA, 527 bp, Homo sapiens
cagggtcttttcccctcaaactgtcattttatttttacgttgttagatatggggagtagtgtgattgaggtggagtagattaggcgtaggtagaagaatggtaagaatggtgcctgtcctgctgtctctgctgctgcttctgggtcctgctgtcccccaggagaaccaagatggtcgttactctctgacctatatctacactgggctgtccaagcatgttgaagacgtccccgcgtttcaggcccttggctcactcaatgacctccagttctttagatacaacagtaaagacaggaagtctcagcccatgggactctggagacaggtggaaggaatggaggattggaagcaggacagccaacttcagaaggccagggaggacatctttatggagaccctgaaagacatcgtggagtattacaacgacagtaacggtcagtgaataacagaccacaggggtggaaggtctaacccaagaggcagcccccccagtgtgagtggcaagggatcagcaggatggaaatagt

SEQ ID NO: 353039 - DNA, 449 bp, Homo sapiens
tgttccaggtactgaagataccgcagtgaacaaaatgtacaaaaatgccttccctcatggactcattccacagttggagggggaaggaagatagacagtacatcaattagcaaaatgttggattgaatcatatgaaattgccattttggtaggtaaaaatttcatatggttcaacctaacatatacataaatgtcattgtcttgtaatgaagtattaattcaagacaagcctagttccagaccagcctaggcaacattgtgggccccatttttatttaaaaaaaaaaaaaaagaagaaattagctgagtgtggtgacaagcacctgtagtctcagctactcaagaggctgaagtgggaggattacttggacctgggaggttgaggtggcagtaagctgtgattgtgccactgcactccagcctgggtgacagagtgaaaccctgtgtcc

SEQ ID NO: 353040 - DNA, 384 bp, Homo sapiens
ggtggttcttccctgtctggatggtaccaagagaaaaatgatacccacagaggcttttcataccaacagtttctctggccaaaatactgcacatacagggagttccacaaagaagggcctttgctgcttggttcctaaagcctgggggtatccaggtagggctctccctctagcccacccccaggtagacacagcataggtcctcaaacagcaggggccagcaggtgtaatgacagtctgtatacctccttccaaccttccctgcccagtgggagtggagacttgtttttgttgtccctccctgggtagaggatcatgccttatacctgtgcaaaatatatttttctcattcatatttccctagaaacttttatacagagacat

SEQ ID NO: 353041 - DNA, 396 bp, Homo sapiens
ctcttgtatcattttatgggattccttagattcagctttctcctgaatctcaatgatcttcattgccatccagaatctaaattatttgtttgtcatttcagctatctctgtctggttaacaaccattactggggagctagtgtgtcatttagaggtaagaagacactcttgcttttagaattgccagagttgtttcactgtttctcatctgtatgagtcaatgttcctttaatctttgaagttgttgtcctttggatgcggttttttgctttcatattctttgattcccttgaggatttgactgtggtaaaagttgggtttagtcaattggcctcatttctggatgatttcaggggtccaatgctcagctcagcactcctggacttcatgttctaa

SEQ ID NO: 353042 - DNA, 552 bp, Homo sapiens
ctccctggccacgggccctacaagcccatgggaaggtcacctggtcctctctgaggaagaggaggcagtttcccagccatcctggctgaaggcagtaaggtcagccctctcgccggcctaatagaacgttcttcgtccccaggcaaggtgactctcagaagcaacaataaagcttttcatttttgagacagggtcttgtgctgtcacccagactggagggcagtggtgtgatcactcatccctgctgccttggcctaggctcaagtgatcctcctgtctcagcctcccaagtagctgggactgcaggtgcatgcagccacacctggctaatttttaatttttatttttagtaggaacagggcaacatagcaagaccctgtctctacaaaaaatgaaaatattagccaggcatggtggtgcatgcctatagtcccagctccccaggaggttgaggtgggcagattgcttgagccagggaggcagaggttgaggtgagccgaggtcatgccaccacacttcggtctgggtgacagagccagactctgtctcaaa

SEQ ID NO: 353043 - DNA, 641 bp, Homo sapiens
agccctactgtggagcacagcctcagcccctgtccgctgtctgtggctggctcgcctgctccccatgtcctgttcctccccagagtcgttccctgccccctacccctcctcaggccccaaggcctggttgaagggccacactcttagctgatagtggcagaatgagtcagggatgggtgagcaggaggaagccgcttcccttctcacccctggttatcacctgttaaccagctctgttatcaccccttcccttctaccctgggggtcccatgggccagaaccaagctgtgatttgattgaccaattagtgattggttgctgatatcctggaatgttgactgccccaacaccctggcctgggaaccttgggggtagatgggtccaatccatctagccacttgcccttgccgagtctcattgctctctgcccggcccgcagcgagctggattactacgactcccacaatgtcaacacccggtgccagaagatctgtgaccagtgggacgccctcggctctctgacacatagtcgcagggaagccctggaggtgaggagggggtgacatcacccacggagctctgtgcccctgctgccccggggctggtggtgtggatagtgtccagacctgtgagctcccccc

SEQ ID NO: 353044 - DNA, 584 bp, Homo sapiens
caggtcgcagtgatgactgggagagatgtgcttcctgccctcgaagggctcccggtctgtgaggacagccgagctatccacggggaacagaagggccccctaggcctctctacagctggtatttcaccttgttcaaagcacaggcttggtggccaggcacatggcacagattcaggccctgacaccaccacctcctggggcagccctggtcaagcgactctcctcggggccgtgaggattaagcagggccgtgtgtcctggcagttgggcctggcagcatccgtctgcatccggaatgggagtggctgtcccgctgctatcactgctgctgttgttaggacagatatcctctccccttgggtttcgtttgaccccaggcctgagccgaaagtcccatccaacttgggctgagttctgagggtttatttttgagccagtgctcactgtctttgtgtgttttgcagagacctcggccaaggaagggctccttctctggtgccagagaaagacagccccgtataagaacgtcaatgtgcagaacttccacatcaggtaagcgccagtcctggtcatcctctcctttc

SEQ ID NO: 353045 - DNA, 3939 bp, Homo sapiens
tagaggatccgtgtccatcccccttcgtaggggagcggttacctaagccggagcgggggaagatgagagtgcacaaaatcaacaatgtgaacaaagcgctggactttattgccagcaaaggcgtcaagctggtctccatcggggcagaagagattgtggacggcaacgcaaagatgaccctgggaatgatctggaccatcatccttaggttcgccatccaggacatctccgtggaagagacctcggccaaggaagggctccttctctggtgccagagaaagacagccccgtataagaacgtcaatgtgcagaacttccacatcagctggaaggatggtcttgccttcaatgccctgatccaccggcacagaccagagctgattgagtatgacaagctgaggaaggacgaccctgtcaccaacctgaacaatgccttcgaagtggctgagaaatacctcgacatccccaagatgctggatgcagaggacatcgtgaacacggcccggcccgacgagaaggccataatgacctatgtgtccagcttctaccatgccttttcaggagcgcagaaggctgaaactgccgccaaccggatctgtaaggtgctggctgtcaaccaagagaacgagcacctgatggaggactacgagaagctggccagcgacctcctggagtggatccggcgcaccatcccctggctggaggaccgtgtgccccaaaagactatccaggagatgcagcagaagctggaggacttccgcgactaccggcgtgtgcacaagccgcccaaggtgcaggagaagtgccagctggagatcaacttcaacacgctgcagaccaagctgcgcctcagcaaccggcccgccttcatgccctccgagggcaagatggtctcggacatcaacaatggctggcagcacttggagcaggctgagaagggctacgaggagtggctgctgaatgagatccgcaggctggagcggctcgaccacctggcagagaagttccggcagaaggcctccatccacgaggcctggactgacgggaaggaagccatgctgaagcaccgggactacgagacggccacactatcggacatcaaagccctcattcgcaagcacgaggccttcgagagcgacctggctgcgcaccaggaccgcgtggagcagatcgccgccattgcccaggagctcaacgagctggattactacgactcccacaatgtcaacacccggtgccagaagatctgtgaccagtgggacgccctcggctctctgacacatagtcgcagggaagccctggagaaaacagagaagcagctggaggccatcgaccagctgcacctggaatacgccaagcgcgcggcccccttcaacaactggatggagagcgccatggaggacctccaggacatgttcatcgtccataccatcgaggagattgagggcctgatctcagcccatgaccagttcaagtccaccctgccggacgccgatagggagcgcgaggccatcctggccatccacaaggaggcccagaggatcgctgagagcaaccacatcaagctgtcgggcagcaacccctacaccaccgtcaccccgcaaatcatcaactccaagtgggagaaggtgcagcagctggtgccaaaacgggaccatgccctcctggaggagcagagcaagcagcagtccaacgagcacctgcgccgccagttcgccagccaggccaatgttgtggggccctggatccagaccaagatggaggagatcgggcgcatctccattgagatgaacgggaccctggaggaccagctgagccacctgaagcagtatgaacgcagcatcgtggactacaagcccaacctggacctgctggagcagcagcaccagctcatccaggaggccctcatcttcgacaacaagcacaccaactataccatggagcacatccgcgtgggctgggagcagctgctcaccaccattgcccgcaccatcaacgaggtggagaaccagatcctcacccgcgacgccaagggcatcagccaggagcagatgcaggagttccgggcgtccttcaaccacttcgacaaggatcatggcggggcgctggggcccgaggagttcaaggcctgcctcatcagcctgggctacgacgtggagaacgaccggcagggtgaggccgagttcaaccgcatcatgagcctggtcgaccccaaccatagcggccttgtgaccttccaagccttcatcgacttcatgtcgcgggagaccaccgacacggacacggctgaccaggtcatcgcttccttcaaggtcttagcaggggacaagaacttcatcacagctgaggagctgcggagagagctgccccccgaccaggccgagtactgcatcgcccgcatggcgccataccagggccctgacgccgtgcccggtgccctcgactacaagtccttctccacggccttgtatggcgagagcgacctgtgaggccccagagacctgacccaacacccccgacggcctccaggaggggcctgggcagccccacagtcccattcctccactctgtatctatgcaaagcactctctgcagtcctccggggtgggtgggtgggcagggaggggctggggcaggctctctcctctctctctttgtgggttggccaggaggttcccccgaccaggttggggagacttggggccagcgcttctggtctggtaaatatgtatgatgtgttgtgcttttttaaccaaggaggggccagtggattcccacagcacaaccggtcccttccatgccctgggatgcctcaccacacccaggtctcttcctttgctctgaggtcccttcaaggcctccccaatccaggccaaagccccatgtgccttgtccaggaactgcctgggccatgcgaggggccagcagagggcgccaccaccacctgacggctggggacccacccagcccctctcccctctctgctccagactcacttgccattgccaggagatggccccaacaagcaccccgcttttgcagcagaggagctgagttggcagaccgggcccccctgaaccgcaccccatcccaccagccccggccttgctttgtctggcctcacgtgtctcagattttctaagaaccaaaaaaaaaaaagggaaaaaaaacacaaaacaacaaaaaccaaaaaaaaaaaaaatcacaaaaacaaaaaaactataaaaaagaaagaattaaaaactttcagagaattactatttactttattaacttacggatttattatataaatatatattcacctagcaacatatctctgccgtctctcctgctctcataatgaagacatagccgattctctgcccgggccccttgctgatgctcctccgggtctgcgtcgggcgtgggtctctggggaccctccagaggtggaggtgggctgatggcctggctgcctggtggttgatggttttgctccccctaccttttttttttgagtttattctgattgattttttttcttggtttctggataaaccaccctctggggacaggataataaaacatgtaatatttttaagaaggaattcctgcagcatcatctttttttatttctcctgtgtctgtcctccaccttctaggagagccagggcagagctagcactgtcttaagctgtcaacgtggactagctcgtgtcatctgctcgagaggggctgtcgctgttcttgtttctgagtgaggagtacgcaggccagagtggtcacccggccgtgagcagtgagggccagagactagccccagacaggtggatgccagagagagtggcacccatgccaggcaaggcctagggaggtggtcttgctcagcaaccctgccctgagcagcaggtgcgcccatccggagatcctaggagaaggtggccacctccatccact

SEQ ID NO: 353046 - DNA, 4139 bp, Homo sapiens
tagaggatccgtgtccatcccccttcgtaggggagcggttacctaagccggagcgggggaagatgagagtgcacaaaatcaacaatgtgaacaaagcgctggactttattgccagcaaaggcgtcaagctggtctccatcggggcagaagagattgtggacggcaacgcaaagatgaccctgggaatgatctggaccatcatccttaggttcgccatccaggacatctccgtggaagagacctcggccaaggaagggctccttctctggtgccagagaaagacagccccgtataagaacgtcaatgtgcagaacttccacatcagctggaaggatggtcttgccttcaatgccctgatccaccggcacagaccagagctgattgagtatgacaagctgaggaaggacgaccctgtcaccaacctgaacaatgccttcgaagtggctgagaaatacctcgacatccccaagatgctggatgcagaggacatcgtgaacacggcccggcccgacgagaaggccataatgacctatgtgtccagcttctaccatgccttttcaggagcgcagaaggctgaaactgccgccaaccggatctgtaaggtgctggctgtcaaccaagagaacgagcacctgatggaggactacgagaagctggccagcgacctcctggagtggatccggcgcaccatcccctggctggaggaccgtgtgccccaaaagactatccaggagatgcagcagaagctggaggacttccgcgactaccggcgtgtgcacaagccgcccaaggtgcaggagaagtgccagctggagatcaacttcaacacgctgcagaccaagctgcgcctcagcaaccggcccgccttcatgccctccgagggcaagatggtctcggacatcaacaatggctggcagcacttggagcaggctgagaagggctacgaggagtggctgctgaatgagatccgcaggctggagcggctcgaccacctggcagagaagttccggcagaaggcctccatccacgaggcctggactgacgggaaggaagccatgctgaagcaccgggactacgagacggccacactatcggacatcaaagccctcattcgcaagcacgaggccttcgagagcgacctggctgcgcaccaggaccgcgtggagcagatcgccgccattgcccaggagctcaacgagctggattactacgactcccacaatgtcaacacccggtgccagaagatctgtgaccagtgggacgccctcggctctctgacacatagtcgcagggaagccctggagaaaacagagaagcagctggaggccatcgaccagctgcacctggaatacgccaagcgcgcggcccccttcaacaactggatggagagcgccatggaggacctccaggacatgttcatcgtccataccatcgaggagattgagggcctgatctcagcccatgaccagttcaagtccaccctgccggacgccgatagggagcgcgaggccatcctggccatccacaaggaggcccagaggatcgctgagagcaaccacatcaagctgtcgggcagcaacccctacaccaccgtcaccccgcaaatcatcaactccaagtgggagaaggtgcagcagctggtgccaaaacgggaccatgccctcctggaggagcagagcaagcagcagtccaacgagcacctgcgccgccagttcgccagccaggccaatgttgtggggccctggatccagaccaagatggaggagatcgggcgcatctccattgagatgaacgggaccctggaggaccagctgagccacctgaagcagtatgaacgcagcatcgtggactacaagcccaacctggacctgctggagcagcagcaccagctcatccaggaggccctcatcttcgacaacaagcacaccaactataccatggagcacatccgcgtgggctgggagcagctgctcaccaccattgcccgcaccatcaacgaggtggagaaccagatcctcacccgcgacgccaagggcatcagccaggagcagatgcaggagttccgggcgtccttcaaccacttcgacaaggatcatggcggggcgctggggcccgaggagttcaaggcctgcctcatcagcctgggctacgacgtggagaacgaccggcagggtgaggccgagttcaaccgcatcatgagcctggtcgaccccaaccatagcggccttgtgaccttccaagccttcatcgacttcatgtcgcgggagaccaccgacacggacacggctgaccaggtcatcgcttccttcaaggtcttagcaggggacaagaacttcatcacagctgaggagctgcggagagagctgccccccgaccaggccgagtactgcatcgcccgcatggcgccataccagggccctgacgccgtgcccggtgccctcgactacaagtccttctccacggccttgtatggcgagagcgacctgtgaggccccagagacctgacccaacacccccgacggcctccaggaggggcctgggcagccccacagtcccattcctccactctgtatctatgcaaagcactctctgcagtcctccggggtgggtgggtgggcagggaggggctggggcaggctctctcctctctctctttgtgggttggccaggaggttcccccgaccaggttggggagacttggggccagcgcttctggtctggtaaatatgtatgatgtgttgtgcttttttaaccaaggaggggccagtggattcccacagcacaaccggtcccttccatgccctgggatgcctcaccacacccaggtctcttcctttgctctgaggtcccttcaaggcctccccaatccaggccaaagccccatgtgccttgtccaggaactgcctgggccatgcgaggggccagcagagggcgccaccaccacctgacggctggggacccacccagcccctctcccctctctgctccagactcacttgccattgccaggagatggccccaacaagcaccccgcttttgcagcagaggagctgagttggcagaccgggcccccctgaaccgcaccccatcccaccagccccggccttgctttgtctggcctcacgtgtctcagattttctaagaaccaaaaaaaaaaaagggaaaaaaaacacaaaacaacaaaaaccaaaaaaaaaaaaaatcacaaaaacaaaaaaactataaaaaagaaagaattaaaaactttcagagaattactatttactttattaacttacggatttattatataaatatatattcacctagcaacatatctctgccgtctctcctgctctcataatgaagacatagccgattctctgcccgggccccttgctgatgctcctccgggtctgcgtcgggcgtgggtctctggggaccctccagaggtggaggtgggctgatggcctggctgcctggtggttgatggttttgctccccctaccttttttttttgagtttattctgattgattttttttcttggtttctggataaaccaccctctggggacaggataataaaacatgtaatatttttaagaaggaaaaaaaaaaaaaaaaaaaaaaaaaaaaaaaaaaaaaaaaaaaaaaaaaaaaaaaaaaaaaaaaaaaaaaaaaaaaaaaaaaacaaaagaaaaaaaaaaaaaaaaaaaaaaaaaaaagaaaaaaaaaaaaaaaaagacaaaacaacacaaaagacaaagagacggagagcaccacaagaacaaacaaacagaagaggagagacgaaaacacaaaacaagcaaagaaagaaggcggagaagcacgaaaaacagcaacaaacaaaagaacgaaaaaaaaaacacacgaaaaaagagagagagagagagtaaaagcaaaaagcaaacgaaagacggcagaagaacagagcaggggacagcgagacacagagaggacggaaacaaaaaaggtatacaaacggaaaggacaaacacaaagcaacaaacacagcaacagaacacacacgaacagccaagacaggcgagacgaagagaaagagaaaagaaacacgctgccgaagagaagagaaagcgacggagaggaaagaacaaacacaacgcagaagacgcaaaag

SEQ ID NO: 353047 - DNA, 3714 bp, Homo sapiens
  misc_feature (3591)..(3591): n is a, c, g, or t
  misc_feature (3608)..(3608): n is a, c, g, or t
  misc_feature (3611)..(3611): n is a, c, g, or t
  misc_feature (3613)..(3613): n is a, c, g, or t
  misc_feature (3622)..(3623): n is a, c, g, or t
  misc_feature (3626)..(3627): n is a, c, g, or t
  misc_feature (3636)..(3636): n is a, c, g, or t
  misc_feature (3638)..(3639): n is a, c, g, or t
  misc_feature (3646)..(3646): n is a, c, g, or t
tagaggatccgtgtccatcccccttcgtaggggagcggttacctaagccggagcgggggaagatgagagtgcacaaaatcaacaatgtgaacaaagcgctggactttattgccagcaaaggcgtcaagctggtctccatcggggcagaagagattgtggacggcaacgcaaagatgaccctgggaatgatctggaccatcatccttaggttcgccatccaggacatctccgtggaagagacctcggccaaggaagggctccttctctggtgccagagaaagacagccccgtataagaacgtcaatgtgcagaacttccacatcagctggaaggatggtcttgccttcaatgccctgatccaccggcacagaccagagctgattgagtatgacaagctgaggaaggacgaccctgtcaccaacctgaacaatgccttcgaagtggctgagaaatacctcgacatccccaagatgctggatgcagaggacatcgtgaacacggcccggcccgacgagaaggccataatgacctatgtgtccagcttctaccatgccttttcaggagcgcagaaggctgaaactgccgccaaccggatctgtaaggtgctggctgtcaaccaagagaacgagcacctgatggaggactacgagaagctggccagcgacctcctggagtggatccggcgcaccatcccctggctggaggaccgtgtgccccaaaagactatccaggagatgcagcagaagctggaggacttccgcgactaccggcgtgtgcacaagccgcccaaggtgcaggagaagtgccagctggagatcaacttcaacacgctgcagaccaagctgcgcctcagcaaccggcccgccttcatgccctccgagggcaagatggtctcggacatcaacaatggctggcagcacttggagcaggctgagaagggctacgaggagtggctgctgaatgagatccgcaggctggagcggctcgaccacctggcagagaagttccggcagaaggcctccatccacgaggcctggactgacgggaaggaagccatgctgaagcaccgggactacgagacggccacactatcggacatcaaagccctcattcgcaagcacgaggccttcgagagcgacctggctgcgcaccaggaccgcgtggagcagatcgccgccattgcccaggagctcaacgagctggattactacgactcccacaatgtcaacacccggtgccagaagatctgtgaccagtgggacgccctcggctctctgacacatagtcgcagggaagccctggagaaaacagagaagcagctggaggccatcgaccagctgcacctggaatacgccaagcgcgcggcccccttcaacaactggatggagagcgccatggaggacctccaggacatgttcatcgtccataccatcgaggagattgagggcctgatctcagcccatgaccagttcaagtccaccctgccggacgccgatagggagcgcgaggccatcctggccatccacaaggaggcccagaggatcgctgagagcaaccacatcaagctgtcgggcagcaacccctacaccaccgtcaccccgcaaatcatcaactccaagtgggagaaggtgcagcagctggtgccaaaacgggaccatgccctcctggaggagcagagcaagcagcagtccaacgagcacctgcgccgccagttcgccagccaggccaatgttgtggggccctggatccagaccaagatggaggagatcgggcgcatctccattgagatgaacgggaccctggaggaccagctgagccacctgaagcagtatgaacgcagcatcgtggactacaagcccaacctggacctgctggagcagcagcaccagctcatccaggaggccctcatcttcgacaacaagcacaccaactataccatggagcacatccgcgtgggctgggagcagctgctcaccaccattgcccgcaccatcaacgaggtggagaaccagatcctcacccgcgacgccaagggcatcagccaggagcagatgcaggagttccgggcgtccttcaaccacttcgacaaggatcatggcggggcgctggggcccgaggagttcaaggcctgcctcatcagcctgggctacgacgtggagaacgaccggcagggtgaggccgagttcaaccgcatcatgagcctggtcgaccccaaccatagcggccttgtgaccttccaagccttcatcgacttcatgtcgcgggagaccaccgacacggacacggctgaccaggtcatcgcttccttcaaggtcttagcaggggacaagaacttcatcacagctgaggagctgcggagagagctgccccccgaccaggccgagtactgcatcgcccgcatggcgccataccagggccctgacgccgtgcccggtgccctcgactacaagtccttctccacggccttgtatggcgagagcgacctgtgaggccccagagacctgacccaacacccccgacggcctccaggaggggcctgggcagccccacagtcccattcctccactctgtatctatgcaaagcactctctgcagtcctccggggtgggtgggtgggcagggaggggctggggcaggctctctcctctctctctttgtgggttggccaggaggttcccccgaccaggttggggagacttggggccagcgcttctggtctggtaaatatgtatgatgtgttgtgcttttttaaccaaggaggggccagtggattcccacagcacaaccggtcccttccatgccctgggatgcctcaccacacccaggtctcttcctttgctctgaggtcccttcaaggcctccccaatccaggccaaagccccatgtgccttgtccaggaactgcctgggccatgcgaggggccagcagagggcgccaccaccacctgacggctggggacccacccagcccctctcccctctctgctccagactcacttgccattgccaggagatggccccaacaagcaccccgcttttgcagcagaggagctgagttggcagaccgggcccccctgaaccgcaccccatcccaccagccccggccttgctttgtctggcctcacgtgtctcagattttctaagaaccaaaaaaaaaaaagggaaaaaaaacacaaaacaacaaaaaccaaaaaaaaaaaaaatcacaaaaacaaaaaaactataaaaaagaaagaattaaaaactttcagagaattactatttactttattaacttacggatttattatataaatatatattcacctagcaacatatctctgccgtctctcctgctctcataatgaagacatagccgattctctgcccgggccccttgctgatgctcctccgggtctgcgtcgggcgtgggtctctggggaccctccagaggtggaggtgggctgatggcctggctgcctggtggttgatggttttgctccccctaccttttttttttgagtttattctgattgattttttttcttggtttctggataaaccaccctctggggacaggataataaaacatgtaatatttttaagaaggaanaacaaaagaagttttgnccnanagtgagtcnnatnnaaattgtcnanncggcgcnaatttgtaataatcgccccggataccgggcggtaaccataggggaacggggttcccctagtgataggt

SEQ ID NO: 353048 - DNA, 3939 bp, Homo sapiens
tagaggatccgtgtccatcccccttcgtaggggagcggttacctaagccggagcgggggaagatgagagtgcacaaaatcaacaatgtgaacaaagcgctggactttattgccagcaaaggcgtcaagctggtctccatcggggcagaagagattgtggacggcaacgcaaagatgaccctgggaatgatctggaccatcatccttaggttcgccatccaggacatctccgtggaagagacctcggccaaggaagggctccttctctggtgccagagaaagacagccccgtataagaacgtcaatgtgcagaacttccacatcagctggaaggatggtcttgccttcaatgccctgatccaccggcacagaccagagctgattgagtatgacaagctgaggaaggacgaccctgtcaccaacctgaacaatgccttcgaagtggctgagaaatacctcgacatccccaagatgctggatgcagaggatattgtgggcactctgaggccagatgagaaggccatcatgacttacgtgtcctgcttctaccacgctttctcgggggctcagaaggctgaaactgccgccaaccggatctgtaaggtgctggctgtcaaccaagagaacgagcacctgatggaggactacgagaagctggccagcgacctcctggagtggatccggcgcaccatcccctggctggaggaccgtgtgccccaaaagactatccaggagatgcagcagaagctggaggacttccgcgactaccggcgtgtgcacaagccgcccaaggtgcaggagaagtgccagctggagatcaacttcaacacgctgcagaccaagctgcgcctcagcaaccggcccgccttcatgccctccgagggcaagatggtctcggacatcaacaatggctggcagcacttggagcaggctgagaagggctacgaggagtggctgctgaatgagatccgcaggctggagcggctcgaccacctggcagagaagttccggcagaaggcctccatccacgaggcctggactgacgggaaggaagccatgctgaagcaccgggactacgagacggccacactatcggacatcaaagccctcattcgcaagcacgaggccttcgagagcgacctggctgcgcaccaggaccgcgtggagcagatcgccgccattgcccaggagctcaacgagctggattactacgactcccacaatgtcaacacccggtgccagaagatctgtgaccagtgggacgccctcggctctctgacacatagtcgcagggaagccctggagaaaacagagaagcagctggaggccatcgaccagctgcacctggaatacgccaagcgcgcggcccccttcaacaactggatggagagcgccatggaggacctccaggacatgttcatcgtccataccatcgaggagattgagggcctgatctcagcccatgaccagttcaagtccaccctgccggacgccgatagggagcgcgaggccatcctggccatccacaaggaggcccagaggatcgctgagagcaaccacatcaagctgtcgggcagcaacccctacaccaccgtcaccccgcaaatcatcaactccaagtgggagaaggtgcagcagctggtgccaaaacgggaccatgccctcctggaggagcagagcaagcagcagtccaacgagcacctgcgccgccagttcgccagccaggccaatgttgtggggccctggatccagaccaagatggaggagatcgggcgcatctccattgagatgaacgggaccctggaggaccagctgagccacctgaagcagtatgaacgcagcatcgtggactacaagcccaacctggacctgctggagcagcagcaccagctcatccaggaggccctcatcttcgacaacaagcacaccaactataccatggagcacatccgcgtgggctgggagcagctgctcaccaccattgcccgcaccatcaacgaggtggagaaccagatcctcacccgcgacgccaagggcatcagccaggagcagatgcaggagttccgggcgtccttcaaccacttcgacaaggatcatggcggggcgctggggcccgaggagttcaaggcctgcctcatcagcctgggctacgacgtggagaacgaccggcagggtgaggccgagttcaaccgcatcatgagcctggtcgaccccaaccatagcggccttgtgaccttccaagccttcatcgacttcatgtcgcgggagaccaccgacacggacacggctgaccaggtcatcgcttccttcaaggtcttagcaggggacaagaacttcatcacagctgaggagctgcggagagagctgccccccgaccaggccgagtactgcatcgcccgcatggcgccataccagggccctgacgccgtgcccggtgccctcgactacaagtccttctccacggccttgtatggcgagagcgacctgtgaggccccagagacctgacccaacacccccgacggcctccaggaggggcctgggcagccccacagtcccattcctccactctgtatctatgcaaagcactctctgcagtcctccggggtgggtgggtgggcagggaggggctggggcaggctctctcctctctctctttgtgggttggccaggaggttcccccgaccaggttggggagacttggggccagcgcttctggtctggtaaatatgtatgatgtgttgtgcttttttaaccaaggaggggccagtggattcccacagcacaaccggtcccttccatgccctgggatgcctcaccacacccaggtctcttcctttgctctgaggtcccttcaaggcctccccaatccaggccaaagccccatgtgccttgtccaggaactgcctgggccatgcgaggggccagcagagggcgccaccaccacctgacggctggggacccacccagcccctctcccctctctgctccagactcacttgccattgccaggagatggccccaacaagcaccccgcttttgcagcagaggagctgagttggcagaccgggcccccctgaaccgcaccccatcccaccagccccggccttgctttgtctggcctcacgtgtctcagattttctaagaaccaaaaaaaaaaaagggaaaaaaaacacaaaacaacaaaaaccaaaaaaaaaaaaaatcacaaaaacaaaaaaactataaaaaagaaagaattaaaaactttcagagaattactatttactttattaacttacggatttattatataaatatatattcacctagcaacatatctctgccgtctctcctgctctcataatgaagacatagccgattctctgcccgggccccttgctgatgctcctccgggtctgcgtcgggcgtgggtctctggggaccctccagaggtggaggtgggctgatggcctggctgcctggtggttgatggttttgctccccctaccttttttttttgagtttattctgattgattttttttcttggtttctggataaaccaccctctggggacaggataataaaacatgtaatatttttaagaaggaattcctgcagcatcatctttttttatttctcctgtgtctgtcctccaccttctaggagagccagggcagagctagcactgtcttaagctgtcaacgtggactagctcgtgtcatctgctcgagaggggctgtcgctgttcttgtttctgagtgaggagtacgcaggccagagtggtcacccggccgtgagcagtgagggccagagactagccccagacaggtggatgccagagagagtggcacccatgccaggcaaggcctagggaggtggtcttgctcagcaaccctgccctgagcagcaggtgcgcccatccggagatcctaggagaaggtggccacctccatccact

SEQ ID NO: 353049 - DNA, 3412 bp, Homo sapiens
aaattaggctagtacgaggcccgcgtgttaatcggcagagggaaggctgaaactgccgccaaccggatctgtaaggtgctggctgtcaaccaagagaacgagcacctgatggaggactacgagaagctggccagcgacctcctggagtggatccggcgcaccatcccctggctggaggaccgtgtgccccaaaagactatccaggagatgcagcagaagctggaggacttccgcgactaccggcgtgtgcacaagccgcccaaggtgcaggagaagtgccagctggagatcaacttcaacacgctgcagaccaagctgcgcctcagcaaccggcccgccttcatgccctccgagggcaagatggtctcggacatcaacaatggctggcagcacttggagcaggctgagaagggctacgaggagtggctgctgaatgagatccgcaggctggagcggctcgaccacctggcagagaagttccggcagaaggcctccatccacgaggcctggactgacgggaaggaagccatgctgaagcaccgggactacgagacggccacactatcggacatcaaagccctcattcgcaagcacgaggccttcgagagcgacctggctgcgcaccaggaccgcgtggagcagatcgccgccattgcccaggagctcaacgagctggattactacgactcccacaatgtcaacacccggtgccagaagatctgtgaccagtgggacgccctcggctctctgacacatagtcgcagggaagccctggagaaaacagagaagcagctggaggccatcgaccagctgcacctggaatacgccaagcgcgcggcccccttcaacaactggatggagagcgccatggaggacctccaggacatgttcatcgtccataccatcgaggagattgagggcctgatctcagcccatgaccagttcaagtccaccctgccggacgccgatagggagcgcgaggccatcctggccatccacaaggaggcccagaggatcgctgagagcaaccacatcaagctgtcgggcagcaacccctacaccaccgtcaccccgcaaatcatcaactccaagtgggagaaggtgcagcagctggtgccaaaacgggaccatgccctcctggaggagcagagcaagcagcagtccaacgagcacctgcgccgccagttcgccagccaggccaatgttgtggggccctggatccagaccaagatggaggagatcgggcgcatctccattgagatgaacgggaccctggaggaccagctgagccacctgaagcagtatgaacgcagcatcgtggactacaagcccaacctggacctgctggagcagcagcaccagctcatccaggaggccctcatcttcgacaacaagcacaccaactataccatggagcacatccgcgtgggctgggagcagctgctcaccaccattgcccgcaccatcaacgaggtggagaaccagatcctcacccgcgacgccaagggcatcagccaggagcagatgcaggagttccgggcgtccttcaaccacttcgacaaggatcatggcggggcgctggggcccgaggagttcaaggcctgcctcatcagcctgggctacgacgtggagaacgaccggcagggtgaggccgagttcaaccgcatcatgagcctggtcgaccccaaccatagcggccttgtgaccttccaagccttcatcgacttcatgtcgcgggagaccaccgacacggacacggctgaccaggtcatcgcttccttcaaggtcttagcaggggacaagaacttcatcacagctgaggagctgcggagagagctgccccccgaccaggccgagtactgcatcgcccgcatggcgccataccagggccctgacgccgtgcccggtgccctcgactacaagtccttctccacggccttgtatggcgagagcgacctgtgaggccccagagacctgacccaacacccccgacggcctccaggaggggcctgggcagccccacagtcccattcctccactctgtatctatgcaaagcactctctgcagtcctccggggtgggtgggtgggcagggaggggctggggcaggctctctcctctctctctttgtgggttggccaggaggttcccccgaccaggttggggagacttggggccagcgcttctggtctggtaaatatgtatgatgtgttgtgcttttttaaccaaggaggggccagtggattcccacagcacaaccggtcccttccatgccctgggatgcctcaccacacccaggtctcttcctttgctctgaggtcccttcaaggcctccccaatccaggccaaagccccatgtgccttgtccaggaactgcctgggccatgcgaggggccagcagagggcgccaccaccacctgacggctggggacccacccagcccctctcccctctctgctccagactcacttgccattgccaggagatggccccaacaagcaccccgcttttgcagcagaggagctgagttggcagaccgggcccccctgaaccgcaccccatcccaccagccccggccttgctttgtctggcctcacgtgtctcagattttctaagaaccaaaaaaaaaaaagggaaaaaaaacacaaaacaacaaaaaccaaaaaaaaaaaaaatcacaaaaacaaaaaaactataaaaaagaaagaattaaaaactttcagagaattactatttactttattaacttacggatttattatataaatatatattcacctagcaacatatctctgccgtctctcctgctctcataatgaagacatagccgattctctgcccgggccccttgctgatgctcctccgggtctgcgtcgggcgtgggtctctggggaccctccagaggtggaggtgggctgatggcctggctgcctggtggttgatggttttgctccccctaccttttttttttgagtttattctgattgattttttttcttggtttctggataaaccaccctctggggacaggataataaaacatgtaatatttttaagaaggaattcctgcagcatcatctttttttatttctcctgtgtctgtcctccaccttctaggagagccagggcagagctagcactgtcttaagctgtcaacgtggactagctcgtgtcatctgctcgagaggggctgtcgctgttcttgtttctgagtgaggagtacgcaggccagagtggtcacccggccgtgagcagtgagggccagagactagccccagacaggtggatgccagagagagtggcacccatgccaggcaaggcctagggaggtggtcttgctcagcaaccctgccctgagcagcaggtgcgcccatccggagatcctaggagaaggtggccacctccatccact

SEQ ID NO: 353050 - DNA, 3197 bp, Homo sapiens
  misc_feature (3166)..(3166): n is a, c, g, or t
  misc_feature (3174)..(3174): n is a, c, g, or t
tagaggatccgtgtccatcccccttcgtaggggagcggttacctaagccggagcgggggaagatgagagtgcacaaaatcaacaatgtgaacaaagcgctggactttattgccagcaaaggcgtcaagctggtctccatcggggcagaagagattgtggacggcaacgcaaagatgaccctgggaatgatctggaccatcatccttaggttcgccatccaggacatctccgtggaagagacctcggccaaggaagggctccttctctggtgccagagaaagacagccccgtataagaacgtcaatgtgcagaacttccacatcagctggaaggatggtcttgccttcaatgccctgatccaccggcacagaccagagctgattgagtatgacaagctgaggaaggacgaccctgtcaccaacctgaacaatgccttcgaagtggctgagaaatacctcgacatccccaagatgctggatgcagaggacatcgtgaacacggcccggcccgacgagaaggccataatgacctatgtgtccagcttctaccatgccttttcaggagcgcagaaggctgaaactgccgccaaccggatctgtaaggtgctggctgtcaaccaagagaacgagcacctgatggaggactacgagaagctggccagcgacctcctggagtggatccggcgcaccatcccctggctggaggaccgtgtgccccaaaagactatccaggagatgcagcagaagctggaggacttccgcgactaccggcgtgtgcacaagccgcccaaggtgcaggagaagtgccagctggagatcaacttcaacacgctgcagaccaagctgcgcctcagcaaccggcccgccttcatgccctccgagggcaagatggtctcggacatcaacaatggctggcagcacttggagcaggctgagaagggctacgaggagtggctgctgaatgagatccgcaggctggagcggctcgaccacctggcagagaagttccggcagaaggcctccatccacgaggcctggactgacgggaaggaagccatgctgaagcaccgggactacgagacggccacactatcggacatcaaagccctcattcgcaagcacgaggccttcgagagcgacctggctgcgcaccaggaccgcgtggagcagatcgccgccattgcccaggagctcaacgagctggattactacgactcccacaatgtcaacacccggtgccagaagatctgtgaccagtgggacgccctcggctctctgacacatagtcgcagggaagccctggagaaaacagagaagcagctggaggccatcgaccagctgcacctggaatacgccaagcgcgcggcccccttcaacaactggatggagagcgccatggaggacctccaggacatgttcatcgtccataccatcgaggagattgagggcctgatctcagcccatgaccagttcaagtccaccctgccggacgccgatagggagcgcgaggccatcctggccatccacaaggaggcccagaggatcgctgagagcaaccacatcaagctgtcgggcagcaacccctacaccaccgtcaccccgcaaatcatcaactccaagtgggagaaggtgcagcagctggtgccaaaacgggaccatgccctcctggaggagcagagcaagcagcagtccaacgagcacctgcgccgccagttcgccagccaggccaatgttgtggggccctggatccagaccaagatggaggagatcgggcgcatctccattgagatgaacgggaccctggaggaccagctgagccacctgaagcagtatgaacgcagcatcgtggactacaagcccaacctggacctgctggagcagcagcaccagctcatccaggaggccctcatcttcgacaacaagcacaccaactataccatggagcacatccgcgtgggctgggagcagctgctcaccaccattgcccgcaccatcaacgaggtggagaaccagatcctcacccgcgacgccaagggcatcagccaggagcagatgcaggagttccgggcgtccttcaaccacttcgacaaggatcatggcggggcgctggggcccgaggagttcaaggcctgcctcatcagcctgggctacgacgtggagaacgaccggcagggtgaggccgagttcaaccgcatcatgagcctggtcgaccccaaccatagcggccttgtgaccttccaagccttcatcgacttcatgtcgcgggagaccaccgacacggacacggctgaccaggtcatcgcttccttcaaggtcttagcaggggacaagaacttcatcacagctgaggagctgcggagagagctgccccccgaccaggccgagtactgcatcgcccgcatggcgccataccagggccctgacgccgtgcccggtgccctcgactacaagtccttctccacggccttgtatggcgagagcgacctgtgaggccccagagacctgacccaacacccccgacggcctccaggaggggcctgggcagccccacagtcccattcctccactctgtatctatgcaaagcactctctgcagtcctccggggtgggtgggtgggcagggaggggctggggcaggctctctcctctctctctttgtgggttggccaggaggttcccccgaccaggttggggagacttggggccagcgcttctggtctggtaaatatgtatgatgtgttgtgcttttttaaccaaggaggggccagtggattcccacagcacaaccggtcccttccatgccctgggatgcctcaccacacccaggtctcttcctttgctctgaggtcccttcaaggcctccccaatccaggccaaagccccatgtgccttgtccaggaactgcctgggccatgcgaggggccagcagagggcgccaccaccacctgacggctggggacccacccagcccctctcccctctctgctccagactcacttgccattgccaggagatggccccaacaagcaccccgcttttgcagcagaggagctgagttggcagaccgggcccccctgaaccgcaccccatcccaccagccccggccttgctttgtctggcctcacgtgtctcagattttctaagaaccaaaaaaaaaaggacaagancaaaaacnaaggggggggccggctcaaaatg

SEQ ID NO: 353051 - DNA, 3924 bp, Homo sapiens
tagaggatccgtgtccatcccccttcgtaggggagcggttacctaagccggagcgggggaagatgagagtgcacaaaatcaacaatgtgaacaaagcgctggactttattgccagcaaaggcgtcaagctggtctccatcggggcagaagagattgtggacggcaacgcaaagatgaccctgggaatgatctggaccatcatccttaggttcgccatccaggacatctccgtggaagagacctcggccaaggaagggctccttctctggtgccagagaaagacagccccgtataagaacgtcaatgtgcagaacttccacatcagctggaaggatggtcttgccttcaatgccctgatccaccggcacagaccagagctgattgagtatgacaagctgaggaaggacgaccctgtcaccaacctgaacaatgccttcgaagtggctgagaaatacctcgacatccccaagatgctggatgcagaggacatcgtgaacacggcccggcccgacgagaaggccataatgacctatgtgtccagcttctaccatgccttttcaggagcgcagaaggctgaaactgccgccaaccggatctgtaaggtgctggctgtcaaccaagagaacgagcacctgatggaggactacgagaagctggccagcgacctcctggagtggatccggcgcaccatcccctggctggaggaccgtgtgccccaaaagactatccaggagatgcagcagaagctggaggacttccgcgactaccggcgtgtgcacaagccgcccaaggtgcaggagaagtgccagctggagatcaacttcaacacgctgcagaccaagctgcgcctcagcaaccggcccgccttcatgccctccgagggcaagatggtctcggacatcaacaatggctggcagcacttggagcaggctgagaagggctacgaggagtggctgctgaatgagatccgcaggctggagcggctcgaccacctggcagagaagttccggcagaaggcctccatccacgaggcctggactgacgggaaggaagccatgctgaagcaccgggactacgagacggccacactatcggacatcaaagccctcattcgcaagcacgaggccttcgagagcgacctggctgcgcaccaggaccgcgtggagcagatcgccgccattgcccaggagctcaacgagctggattactacgactcccacaatgtcaacacccggtgccagaagatctgtgaccagtgggacgccctcggctctctgacacatagtcgcagggaagccctggagaaaacagagaagcagctggaggccatcgaccagctgcacctggaatacgccaagcgcgcggcccccttcaacaactggatggagagcgccatggaggacctccaggacatgttcatcgtccataccatcgaggagattgagggcctgatctcagcccatgaccagttcaagtccaccctgccggacgccgatagggagcgcgaggccatcctggccatccacaaggaggcccagaggatcgctgagagcaaccacatcaagctgtcgggcagcaacccctacaccaccgtcaccccgcaaatcatcaactccaagtgggagaaggtgcagcagctggtgccaaaacgggaccatgccctcctggaggagcagagcaagcagcagtccaacgagcacctgcgccgccagttcgccagccaggccaatgttgtggggccctggatccagaccaagatggaggagatcgggcgcatctccattgagatgaacgggaccctggaggaccagctgagccacctgaagcagtatgaacgcagcatcgtggactacaagcccaacctggacctgctggagcagcagcaccagctcatccaggaggccctcatcttcgacaacaagcacaccaactataccatggagcacatccgcgtgggctgggagcagctgctcaccaccattgcccgcaccatcaacgaggtggagaaccagatcctcacccgcgacgccaagggcatcagccaggagcagatgcaggagttccgggcgtccttcaaccacttcgacaagaagcagacaggcagcatggactccgatgacttcagggctctgcttatctccacaggatacagcctgggtgaggccgagttcaaccgcatcatgagcctggtcgaccccaaccatagcggccttgtgaccttccaagccttcatcgacttcatgtcgcgggagaccaccgacacggacacggctgaccaggtcatcgcttccttcaaggtcttagcaggggacaagaacttcatcacagctgaggagctgcggagagagctgccccccgaccaggccgagtactgcatcgcccgcatggcgccataccagggccctgacgccgtgcccggtgccctcgactacaagtccttctccacggccttgtatggcgagagcgacctgtgaggccccagagacctgacccaacacccccgacggcctccaggaggggcctgggcagccccacagtcccattcctccactctgtatctatgcaaagcactctctgcagtcctccggggtgggtgggtgggcagggaggggctggggcaggctctctcctctctctctttgtgggttggccaggaggttcccccgaccaggttggggagacttggggccagcgcttctggtctggtaaatatgtatgatgtgttgtgcttttttaaccaaggaggggccagtggattcccacagcacaaccggtcccttccatgccctgggatgcctcaccacacccaggtctcttcctttgctctgaggtcccttcaaggcctccccaatccaggccaaagccccatgtgccttgtccaggaactgcctgggccatgcgaggggccagcagagggcgccaccaccacctgacggctggggacccacccagcccctctcccctctctgctccagactcacttgccattgccaggagatggccccaacaagcaccccgcttttgcagcagaggagctgagttggcagaccgggcccccctgaaccgcaccccatcccaccagccccggccttgctttgtctggcctcacgtgtctcagattttctaagaaccaaaaaaaaaaaagggaaaaaaaacacaaaacaacaaaaaccaaaaaaaaaaaaaatcacaaaaacaaaaaaactataaaaaagaaagaattaaaaactttcagagaattactatttactttattaacttacggatttattatataaatatatattcacctagcaacatatctctgccgtctctcctgctctcataatgaagacatagccgattctctgcccgggccccttgctgatgctcctccgggtctgcgtcgggcgtgggtctctggggaccctccagaggtggaggtgggctgatggcctggctgcctggtggttgatggttttgctccccctaccttttttttttgagtttattctgattgattttttttcttggtttctggataaaccaccctctggggacaggataataaaacatgtaatatttttaagaaggaattcctgcagcatcatctttttttatttctcctgtgtctgtcctccaccttctaggagagccagggcagagctagcactgtcttaagctgtcaacgtggactagctcgtgtcatctgctcgagaggggctgtcgctgttcttgtttctgagtgaggagtacgcaggccagagtggtcacccggccgtgagcagtgagggccagagactagccccagacaggtggatgccagagagagtggcacccatgccaggcaaggcctagggaggtggtcttgctcagcaaccctgccctgagcagcaggtgcgcccatccggagatcctaggagaaggtggccacctccatccact

SEQ ID NO: 353052 - DNA, 3878 bp, Homo sapiens
tagaggatccgtgtccatcccccttcgtaggggagcggttacctaagccggagcgggggaagatgagagtgcacaaaatcaacaatgtgaacaaagcgctggactttattgccagcaaaggcgtcaagctggtctccatcggggcagaagagattgtggacggcaacgcaaagatgaccctgggaatgatctggaccatcatccttaggttcgccatccaggacatctccgtggaagagacctcggccaaggaagggctccttctctggtgccagagaaagacagccccgtataagaacgtcaatgtgcagaacttccacatcagctggaaggatggtcttgccttcaatgccctgatccaccggcacagaccagagctgattgagtatgacaagctgaggaaggacgaccctgtcaccaacctgaacaatgccttcgaagtggctgagaaatacctcgacatccccaagatgctggatgcagaggacatcgtgaacacggcccggcccgacgagaaggccataatgacctatgtgtccagcttctaccatgccttttcaggagcgcagaaggctgaaactgccgccaaccggatctgtaaggtgctggctgtcaaccaagagaacgagcacctgatggaggactacgagaagctggccagcgacctcctggagtggatccggcgcaccatcccctggctggaggaccgtgtgccccaaaagactatccaggagatgcagcagaagctggaggacttccgcgactaccggcgtgtgcacaagccgcccaaggtgcaggagaagtgccagctggagatcaacttcaacacgctgcagaccaagctgcgcctcagcaaccggcccgccttcatgccctccgagggcaagatggtctcggacatcaacaatggctggcagcacttggagcaggctgagaagggctacgaggagtggctgctgaatgagatccgcaggctggagcggctcgaccacctggcagagaagttccggcagaaggcctccatccacgaggcctggactgacgggaaggaagccatgctgaagcaccgggactacgagacggccacactatcggacatcaaagccctcattcgcaagcacgaggccttcgagagcgacctggctgcgcaccaggaccgcgtggagcagatcgccgccattgcccaggagctcaacgagctggattactacgactcccacaatgtcaacacccggtgccagaagatctgtgaccagtgggacgccctcggctctctgacacatagtcgcagggaagccctggagaaaacagagaagcagctggaggccatcgaccagctgcacctggaatacgccaagcgcgcggcccccttcaacaactggatggagagcgccatggaggacctccaggacatgttcatcgtccataccatcgaggagattgagggcctgatctcagcccatgaccagttcaagtccaccctgccggacgccgatagggagcgcgaggccatcctggccatccacaaggaggcccagaggatcgctgagagcaaccacatcaagctgtcgggcagcaacccctacaccaccgtcaccccgcaaatcatcaactccaagtgggagaagccaacgagcacctgcgccgccagttcgccagccaggccaatgttgtggggccctggatccagaccaagatggaggagatcgggcgcatctccattgagatgaacgggaccctggaggaccagctgagccacctgaagcagtatgaacgcagcatcgtggactacaagcccaacctggacctgctggagcagcagcaccagctcatccaggaggccctcatcttcgacaacaagcacaccaactataccatggagcacatccgcgtgggctgggagcagctgctcaccaccattgcccgcaccatcaacgaggtggagaaccagatcctcacccgcgacgccaagggcatcagccaggagcagatgcaggagttccgggcgtccttcaaccacttcgacaaggatcatggcggggcgctggggcccgaggagttcaaggcctgcctcatcagcctgggctacgacgtggagaacgaccggcagggtgaggccgagttcaaccgcatcatgagcctggtcgaccccaaccatagcggccttgtgaccttccaagccttcatcgacttcatgtcgcgggagaccaccgacacggacacggctgaccaggtcatcgcttccttcaaggtcttagcaggggacaagaacttcatcacagctgaggagctgcggagagagctgccccccgaccaggccgagtactgcatcgcccgcatggcgccataccagggccctgacgccgtgcccggtgccctcgactacaagtccttctccacggccttgtatggcgagagcgacctgtgaggccccagagacctgacccaacacccccgacggcctccaggaggggcctgggcagccccacagtcccattcctccactctgtatctatgcaaagcactctctgcagtcctccggggtgggtgggtgggcagggaggggctggggcaggctctctcctctctctctttgtgggttggccaggaggttcccccgaccaggttggggagacttggggccagcgcttctggtctggtaaatatgtatgatgtgttgtgcttttttaaccaaggaggggccagtggattcccacagcacaaccggtcccttccatgccctgggatgcctcaccacacccaggtctcttcctttgctctgaggtcccttcaaggcctccccaatccaggccaaagccccatgtgccttgtccaggaactgcctgggccatgcgaggggccagcagagggcgccaccaccacctgacggctggggacccacccagcccctctcccctctctgctccagactcacttgccattgccaggagatggccccaacaagcaccccgcttttgcagcagaggagctgagttggcagaccgggcccccctgaaccgcaccccatcccaccagccccggccttgctttgtctggcctcacgtgtctcagattttctaagaaccaaaaaaaaaaaagggaaaaaaaacacaaaacaacaaaaaccaaaaaaaaaaaaaatcacaaaaacaaaaaaactataaaaaagaaagaattaaaaactttcagagaattactatttactttattaacttacggatttattatataaatatatattcacctagcaacatatctctgccgtctctcctgctctcataatgaagacatagccgattctctgcccgggccccttgctgatgctcctccgggtctgcgtcgggcgtgggtctctggggaccctccagaggtggaggtgggctgatggcctggctgcctggtggttgatggttttgctccccctaccttttttttttgagtttattctgattgattttttttcttggtttctggataaaccaccctctggggacaggataataaaacatgtaatatttttaagaaggaattcctgcagcatcatctttttttatttctcctgtgtctgtcctccaccttctaggagagccagggcagagctagcactgtcttaagctgtcaacgtggactagctcgtgtcatctgctcgagaggggctgtcgctgttcttgtttctgagtgaggagtacgcaggccagagtggtcacccggccgtgagcagtgagggccagagactagccccagacaggtggatgccagagagagtggcacccatgccaggcaaggcctagggaggtggtcttgctcagcaaccctgccctgagcagcaggtgcgcccatccggagatcctaggagaaggtggccacctccatccact

SEQ ID NO: 353053 - DNA, 3838 bp, Homo sapiens
tagaggatccgtgtccatcccccttcgtaggggagcggttacctaagccggagcgggggaagatgagagtgcacaaaatcaacaatgtgaacaaagcgctggactttattgccagcaaaggcgtcaagctggtctccatcggggcagaagagattgtggacggcaacgcaaagatgaccctgggaatgatctggaccatcatccttaggttcgccatccaggacatctccgtggaagagacctcggccaaggaagggctccttctctggtgccagagaaagacagccccgtataagaacgtcaatgtgcagaacttccacatcagctggaaggatggtcttgccttcaatgccctgatccaccggcacagaccagagctgattgagtatgacaagctgaggaaggacgaccctgtcaccaacctgaacaatgccttcgaagtggctgagaaatacctcgacatccccaagatgctggatgcagaggacatcgtgaacacggcccggcccgacgagaaggccataatgacctatgtgtccagcttctaccatgccttttcaggagcgcagaaggctgaaactgccgccaaccggatctgtaaggtgctggctgtcaaccaagagaacgagcacctgatggaggactacgagaagctggccagcgacctcctggagtggatccggcgcaccatcccctggctggaggaccgtgtgccccaaaagactatccaggagatgcagcagaagctggaggacttccgcgactaccggcgtgtgcacaagccgcccaaggtgcaggagaagtgccagctggagatcaacttcaacacgctgcagaccaagctgcgcctcagcaaccggcccgccttcatgccctccgagggcaagatggtctcggacatcaacaatggctggcagcacttggagcaggctgagaagggctacgaggagtggctgctgaatgagatccgcaggctggagcggctcgaccacctggcagagaagttccggcagaaggcctccatccacgaggcctggactgacgggaaggaagccatgctgaagcaccgggactacgagacggccacactatcggacatcaaagccctcattcgcaagcacgaggccttcgagagcgacctggctgcgcaccaggaccgcgtggagcagatcgccgccattgcccaggagctcaacgagctggattactacgactcccacaatgtcaacacccggtgccagaagatctgtgaccagtgggacgccctcggctctctgacacatagtcgcagggaagccctggagaaaacagagaagcagctggaggccatcgaccagctgcacctggaatacgccaagcgcgcggcccccttcaacaactggatggagagcgccatggaggacctccaggacatgttcatcgtccataccatcgaggagattgagggcctgatctcagcccatgaccagttcaagtccaccctgccggacgccgatagggagcgcgaggccatcctggccatccacaaggaggcccagaggatcgctgagagcaaccacatcaagctgtcgggcagcaacccctacaccaccgtcaccccgcaaatcatcaactccaagtgggagaaggtgcagcagctggtgccaaaacgggaccatgccctcctggaggagcagagcaagcagcagtccaacgagcacctgcgccgccagttcgccagccaggccaatgttgtggggccctggatccagaccaagatggaggagatcgggcgcatctccattgagatgaacgggaccctggaggaccagctgagccacctgaagcagtatgaacgcagcatcgtggactacaagcccaacctggacctgctggagcagcagcaccagctcatccaggaggccctcatcttcgacaacaagcacaccaactataccatggagcacatccgcgtgggctgggagcagctgctcaccaccattgcccgcaccatcaacgaggtggagaaccagatcctcacccgcgacgccaagggcatcagccaggagcagatgcaggagttccgggcgtccttcaaccacttcgacaaggatcatggcggggcgctggggcccgaggagttcaaggcctgcctcatcagcctgggctacgacgtggagaacgaccggcagggtgaggccgagttcaaccgcatcatgagcctggtcgaccccaaccatagcggccttgtgaccttccaagccttcatcgacttcatgtcgcgggagaccagaccaggccgagtactgcatcgcccgcatggcgccataccagggccctgacgccgtgcccggtgccctcgactacaagtccttctccacggccttgtatggcgagagcgacctgtgaggccccagagacctgacccaacacccccgacggcctccaggaggggcctgggcagccccacagtcccattcctccactctgtatctatgcaaagcactctctgcagtcctccggggtgggtgggtgggcagggaggggctggggcaggctctctcctctctctctttgtgggttggccaggaggttcccccgaccaggttggggagacttggggccagcgcttctggtctggtaaatatgtatgatgtgttgtgcttttttaaccaaggaggggccagtggattcccacagcacaaccggtcccttccatgccctgggatgcctcaccacacccaggtctcttcctttgctctgaggtcccttcaaggcctccccaatccaggccaaagccccatgtgccttgtccaggaactgcctgggccatgcgaggggccagcagagggcgccaccaccacctgacggctggggacccacccagcccctctcccctctctgctccagactcacttgccattgccaggagatggccccaacaagcaccccgcttttgcagcagaggagctgagttggcagaccgggcccccctgaaccgcaccccatcccaccagccccggccttgctttgtctggcctcacgtgtctcagattttctaagaaccaaaaaaaaaaaagggaaaaaaaacacaaaacaacaaaaaccaaaaaaaaaaaaaatcacaaaaacaaaaaaactataaaaaagaaagaattaaaaactttcagagaattactatttactttattaacttacggatttattatataaatatatattcacctagcaacatatctctgccgtctctcctgctctcataatgaagacatagccgattctctgcccgggccccttgctgatgctcctccgggtctgcgtcgggcgtgggtctctggggaccctccagaggtggaggtgggctgatggcctggctgcctggtggttgatggttttgctccccctaccttttttttttgagtttattctgattgattttttttcttggtttctggataaaccaccctctggggacaggataataaaacatgtaatatttttaagaaggaattcctgcagcatcatctttttttatttctcctgtgtctgtcctccaccttctaggagagccagggcagagctagcactgtcttaagctgtcaacgtggactagctcgtgtcatctgctcgagaggggctgtcgctgttcttgtttctgagtgaggagtacgcaggccagagtggtcacccggccgtgagcagtgagggccagagactagccccagacaggtggatgccagagagagtggcacccatgccaggcaaggcctagggaggtggtcttgctcagcaaccctgccctgagcagcaggtgcgcccatccggagatcctaggagaaggtggccacctccatccact

SEQ ID NO: 353054 - DNA, 2736 bp, Homo sapiens
  misc_feature (38)..(38): n is a, c, g, or t
tcggtacctgcactgttgccatacccagatcgccgccngttgcccaggagcaacgagctggattactacgactcccacaatgtcaacacccggtgccagaagatctgtgaccagtgggacgccctcggctctctgacacatagtcgcagggaagccctggagaaaacagagaagcagctggaggccatcgaccagctgcacctggaatacgccaagcgcgcggcccccttcaacaactggatggagagcgccatggaggacctccaggacatgttcatcgtccataccatcgaggagattgagggcctgatctcagcccatgaccagttcaagtccaccctgccggacgccgatagggagcgcgaggccatcctggccatccacaaggaggcccagaggatcgctgagagcaaccacatcaagctgtcgggcagcaacccctacaccaccgtcaccccgcaaatcatcaactccaagtgggagaagccaacgagcacctgcgccgccagttcgccagccaggccaatgttgtggggccctggatccagaccaagatggaggagatcgggcgcatctccattgagatgaacgggaccctggaggaccagctgagccacctgaagcagtatgaacgcagcatcgtggactacaagcccaacctggacctgctggagcagcagcaccagctcatccaggaggccctcatcttcgacaacaagcacaccaactataccatggagcacatccgcgtgggctgggagcagctgctcaccaccattgcccgcaccatcaacgaggtggagaaccagatcctcacccgcgacgccaagggcatcagccaggagcagatgcaggagttccgggcgtccttcaaccacttcgacaaggatcatggcggggcgctggggcccgaggagttcaaggcctgcctcatcagcctgggctacgacgtggagaacgaccggcagggtgaggccgagttcaaccgcatcatgagcctggtcgaccccaaccatagcggccttgtgaccttccaagccttcatcgacttcatgtcgcgggagaccaccgacacggacacggctgaccaggtcatcgcttccttcaaggtcttagcaggggacaagaacttcatcacagctgaggagctgcggagagagctgccccccgaccaggccgagtactgcatcgcccgcatggcgccataccagggccctgacgccgtgcccggtgccctcgactacaagtccttctccacggccttgtatggcgagagcgacctgtgaggccccagagacctgacccaacacccccgacggcctccaggaggggcctgggcagccccacagtcccattcctccactctgtatctatgcaaagcactctctgcagtcctccggggtgggtgggtgggcagggaggggctggggcaggctctctcctctctctctttgtgggttggccaggaggttcccccgaccaggttggggagacttggggccagcgcttctggtctggtaaatatgtatgatgtgttgtgcttttttaaccaaggaggggccagtggattcccacagcacaaccggtcccttccatgccctgggatgcctcaccacacccaggtctcttcctttgctctgaggtcccttcaaggcctccccaatccaggccaaagccccatgtgccttgtccaggaactgcctgggccatgcgaggggccagcagagggcgccaccaccacctgacggctggggacccacccagcccctctcccctctctgctccagactcacttgccattgccaggagatggccccaacaagcaccccgcttttgcagcagaggagctgagttggcagaccgggcccccctgaaccgcaccccatcccaccagccccggccttgctttgtctggcctcacgtgtctcagattttctaagaaccaaaaaaaaaaaagggaaaaaaaacacaaaacaacaaaaaccaaaaaaaaaaaaaatcacaaaaacaaaaaaactataaaaaagaaagaattaaaaactttcagagaattactatttactttattaacttacggatttattatataaatatatattcacctagcaacatatctctgccgtctctcctgctctcataatgaagacatagccgattctctgcccgggccccttgctgatgctcctccgggtctgcgtcgggcgtgggtctctggggaccctccagaggtggaggtgggctgatggcctggctgcctggtggttgatggttttgctccccctaccttttttttttgagtttattctgattgattttttttcttggtttctggataaaccaccctctggggacaggataataaaacatgtaatatttttaagaaggaattcctgcagcatcatctttttttatttctcctgtgtctgtcctccaccttctaggagagccagggcagagctagcactgtcttaagctgtcaacgtggactagctcgtgtcatctgctcgagaggggctgtcgctgttcttgtttctgagtgaggagtacgcaggccagagtggtcacccggccgtgagcagtgagggccagagactagccccagacaggtggatgccagagagagtggcacccatgccaggcaaggcctagggaggtggtcttgctcagcaaccctgccctgagcagcaggtgcgcccatccggagatcctaggagaaggtggccacctccatccact

SEQ ID NO: 353055 - DNA, 3136 bp, Homo sapiens
tagaggatccgtgtccatcccccttcgtaggggagcggttacctaagccggagcgggggaagatgagagtgcacaaaatcaacaatgtgaacaaagcgctggactttattgccagcaaaggcgtcaagctggtctccatcggggcagaagagattgtggacggcaacgcaaagatgaccctgggaatgatctggaccatcatccttaggttcgccatccaggacatctccgtggaagagacctcggccaaggaagggctccttctctggtgccagagaaagacagccccgtataagaacgtcaatgtgcagaacttccacatcagctggaaggatggtcttgccttcaatgccctgatccaccggcacagaccagagctgattgagtatgacaagctgaggaaggacgaccctgtcaccaacctgaacaatgccttcgaagtggctgagaaatacctcgacatccccaagatgctggatgcagaggacatcgtgaacacggcccggcccgacgagaaggccataatgacctatgtgtccagcttctaccatgccttttcaggagcgcagaaggctgaaactgccgccaaccggatctgtaaggtgctggctgtcaaccaagagaacgagcacctgatggaggactacgagaagctggccagcgacctcctggagtggatccggcgcaccatcccctggctggaggaccgtgtgccccaaaagactatccaggagatgcagcagaagctggaggacttccgcgactaccggcgtgtgcacaagccgcccaaggtgcaggagaagtgccagctggagatcaacttcaacacgctgcagaccaagctgcgcctcagcaaccggcccgccttcatgccctccgagggcaagatggtctcggacatcaacaatggctggcagcacttggagcaggctgagaagggctacgaggagtggctgctgaatgagatccgcaggctggagcggctcgaccacctggcagagaagttccggcagaaggcctccatccacgaggcctggactgacgggaaggaagccatgctgaagcaccgggactacgagacggccacactatcggacatcaaagccctcattcgcaagcacgaggccttcgagagcgacctggctgcgcaccaggaccgcgtggagcagatcgccgccattgcccaggagctcaacgagctggattactacgactcccacaatgtcaacacccggtgccagaagatctgtgaccagtgggacgccctcggctctctgacacatagtcgcagggaagccctggagaaaacagagaagcagctggaggccatcgaccagctgcacctggaatacgccaagcgcgcggcccccttcaacaactggatggagagcgccatggaggacctccaggacatgttcatcgtccataccatcgaggagattgagggcctgatctcagcccatgaccagttcaagtccaccctgccggacgccgatagggagcgcgaggccatcctggccatccacaaggaggcccagaggatcgctgagagcaaccacatcaagctgtcgggcagcaacccctacaccaccgtcaccccgcaaatcatcaactccaagtgggagaaggtgcagcagctggtgccaaaacgggaccatgccctcctggaggagcagagcaagcagcagtccaacgagcacctgcgccgccagttcgccagccaggccaatgttgtggggccctggatccagaccaagatggaggagatcgggcgcatctccattgagatgaacgggaccctggaggaccagctgagccacctgaagcagtatgaacgcagcatcgtggactacaagcccaacctggacctgctggagcagcagcaccagctcatccaggaggccctcatcttcgacaacaagcacaccaactataccatggagcacatccgcgtgggctgggagcagctgctcaccaccattgcccgcaccatcaacgaggtggagaaccagatcctcacccgcgacgccaagggcatcagccaggagcagatgcaggagttccgggcgtccttcaaccacttcgacaaggatcatggcggggcgctggggcccgaggagttcaaggcctgcctcatcagcctgggctacgacgtggagaacgaccggcagggtgaggccgagttcaaccgcatcatgagcctggtcgaccccaaccatagcggccttgtgaccttccaagccttcatcgacttcatgtcgcgggagaccaccgacacggacacggctgaccaggtcatcgcttccttcaaggtcttagcaggggacaagaacttcatcacagctgaggagctgcggagagagctgccccccgaccaggccgagtactgcatcgcccgcatggcgccataccagggccctgacgccgtgcccggtgccctcgactacaagtccttctccacggccttgtatggcgagagcgacctgtgaggccccagagacctgacccaacacccccgacggcctccaggaggggcctgggcagccccacagtcccattcctccactctgtatctatgcaaagcactctctgcagtcctccggggtgggtgggtgggcagggaggggctggggcaggctctctcctctctctctttgtgggttggccaggaggttcccccgaccaggttggggagacttggggccagcgcttctggtctggtaaatatgtatgatgtgttgtgcttttttaaccaaggaggggccagtggattcccacagcacaaccggtcccttccatgccctgggatgcctcaccacacccaggtctcttcctttgctctgaggtcccttcaaggcctccccaatccaggccaaagccccatgtgccttgtccaggaactgcctgggccatgcgaggggccagcagagggcgccaccaccacctgacggctggggacccacccagcccctctcccctctctgctccagactcacttgccattgccaggagatggccccaacaagcaccccgcttttgcagcagaggagctgagttggcagaccgggcccccctgaaccgcaattactctctgcctacgttattccgttttcttttgttccgttgttttttgtgt

SEQ ID NO: 353056 - DNA, 3513 bp, Homo sapiens
tagaggatccgtgtccatcccccttcgtaggggagcggttacctaagccggagcgggggaagatgagagtgcacaaaatcaacaatgtgaacaaagcgctggactttattgccagcaaaggcgtcaagctggtctccatcggggcagaagagattgtggacggcaacgcaaagatgaccctgggaatgatctggaccatcatccttaggttcgccatccaggacatctccgtggaagagacctcggccaaggaagggctccttctctggtgccagagaaagacagccccgtataagaacgtcaatgtgcagaacttccacatcagctggaaggatggtcttgccttcaatgccctgatccaccggcacagaccagagctgattgagtatgacaagctgaggaaggacgaccctgtcaccaacctgaacaatgccttcgaagtggctgagaaatacctcgacatccccaagatgctggatgcagaggacatcgtgaacacggcccggcccgacgagaaggccataatgacctatgtgtccagcttctaccatgccttttcaggagcgcagaaggctgaaactgccgccaaccggatctgtaaggtgctggctgtcaaccaagagaacgagcacctgatggaggactacgagaagctggccagcgacctcctggagtggatccggcgcaccatcccctggctggaggaccgtgtgccccaaaagactatccaggagatgcagcagaagctggaggacttccgcgactaccggcgtgtgcacaagccgcccaaggtgcaggagaagtgccagctggagatcaacttcaacacgctgcagaccaagctgcgcctcagcaaccggcccgccttcatgccctccgagggcaagatggtctcggacatcaacaatggctggcagcacttggagcaggctgagaagggctacgaggagtggctgctgaatgagatccgcaggctggagcggctcgaccacctggcagagaagttccggcagaaggcctccatccacgaggcctggactgacgggaaggaagccatgctgaagcaccgggactacgagacggccacactatcggacatcaaagccctcattcgcaagcacgaggccttcgagagcgacctggctgcgcaccaggaccgcgtggagcagatcgccgccattgcccaggagctcaacgagctggattactacgactcccacaatgtcaacacccggtgccagaagatctgtgaccagtgggacgccctcggctctctgacacatagtcgcagggaagccctggagaaaacagagaagcagctggaggccatcgaccagctgcacctggaatacgccaagcgcgcggcccccttcaacaactggatggagagcgccatggaggacctccaggacatgttcatcgtccataccatcgaggagattgagggcctgatctcagcccatgaccagttcaagtccaccctgccggacgccgatagggagcgcgaggccatcctggccatccacaaggaggcccagaggatcgctgagagcaaccacatcaagctgtcgggcagcaacccctacaccaccgtcaccccgcaaatcatcaactccaagtgggagaaggtgcagcagctggtgccaaaacgggaccatgccctcctggaggagcagagcaagcagcagtccaacgagcacctgcgccgccagttcgccagccaggccaatgttgtggggccctggatccagaccaagatggaggagatcgggcgcatctccattgagatgaacgggaccctggaggaccagctgagccacctgaagcagtatgaacgcagcatcgtggactacaagcccaacctggacctgctggagcagcagcaccagctcatccaggaggccctcatcttcgacaacaagcacaccaactataccatggagcacatccgcgtgggctgggagcagctgctcaccaccattgcccgcaccatcaacgaggtggagaaccagatcctcacccgcgacgccaagggcatcagccaggagcagatgcaggagttccgggcgtccttcaaccacttcgacaaggatcatggcggggcgctggggcccgaggagttcaaggcctgcctcatcagcctgggctacgacgtggagaacgaccggcagggtgaggccgagttcaaccgcatcatgagcctggtcgaccccaaccatagcggccttgtgaccttccaagccttcatcgacttcatgtcgcgggagaccaccgacacggacacggctgaccaggtcatcgcttccttcaaggtcttagcaggggacaagaacttcatcacagctgaggagctgcggagagagctgccccccgaccaggccgagtactgcatcgcccgcatggcgccataccagggccctgacgccgtgcccggtgccctcgactacaagtccttctccacggccttgtatggcgagagcgacctgtgaggccccagagacctgacccaacacccccgacggcctccaggaggggcctgggcagccccacagtcccattcctccactctgtatctatgcaaagcactctctgcagtcctccggggtgggtgggtggcagaggagctgagttggcagaccgggcccccctgaaccgcaccccatcccaccagccccggccttgctttgtctggcctcacgtgtctcagattttctaagaaccaaaaaaaaaaaagggaaaaaaaacacaaaacaacaaaaaccaaaaaaaaaaaaaatcacaaaaacaaaaaaactataaaaaagaaagaattaaaaactttcagagaattactatttactttattaacttacggatttattatataaatatatattcacctagcaacatatctctgccgtctctcctgctctcataatgaagacatagccgattctctgcccgggccccttgctgatgctcctccgggtctgcgtcgggcgtgggtctctggggaccctccagaggtggaggtgggctgatggcctggctgcctggtggttgatggttttgctccccctaccttttttttttgagtttattctgattgattttttttcttggtttctggataaaccaccctctggggacaggataataaaacatgtaatatttttaagaaggaattcctgcagcatcatctttttttatttctcctgtgtctgtcctccaccttctaggagagccagggcagagctagcactgtcttaagctgtcaacgtggactagctcgtgtcatctgctcgagaggggctgtcgctgttcttgtttctgagtgaggagtacgcaggccagagtggtcacccggccgtgagcagtgagggccagagactagccccagacaggtggatgccagagagagtggcacccatgccaggcaaggcctagggaggtggtcttgctcagcaaccctgccctgagcagcaggtgcgcccatccggagatcctaggagaaggtggccacctccatccact

SEQ ID NO: 353057 - DNA, 3459 bp, Homo sapiens
tagaggatccgtgtccatcccccttcgtaggggagcggttacctaagccggagcgggggaagatgagagtgcacaaaatcaacaatgtgaacaaagcgctggactttattgccagcaaaggcgtcaagctggtctccatcggggcagaagagattgtggacggcaacgcaaagatgaccctgggaatgatctggaccatcatccttaggttcgccatccaggacatctccgtggaagagacctcggccaaggaagggctccttctctggtgccagagaaagacagccccgtataagaacgtcaatgtgcagaacttccacatcagctggaaggatggtcttgccttcaatgccctgatccaccggcacagaccagagctgattgagtatgacaagctgaggaaggacgaccctgtcaccaacctgaacaatgccttcgaagtggctgagaaatacctcgacatccccaagatgctggatgcagaggacatcgtgaacacggcccggcccgacgagaaggccataatgacctatgtgtccagcttctaccatgccttttcaggagcgcagaaggctgaaactgccgccaaccggatctgtaaggtgctggctgtcaaccaagagaacgagcacctgatggaggactacgagaagctggccagcgacctcctggagtggatccggcgcaccatcccctggctggaggaccgtgtgccccaaaagactatccaggagatgcagcagaagctggaggacttccgcgactaccggcgtgtgcacaagccgcccaaggtgcaggagaagtgccagctggagatcaacttcaacacgctgcagaccaagctgcgcctcagcaaccggcccgccttcatgccctccgagggcaagatggtctcggacatcaacaatggctggcagcacttggagcaggctgagaagggctacgaggagtggctgctgaatgagatccgcaggctggagcggctcgaccacctggcagagaagttccggcagaaggcctccatccacgaggcctggactgacgggaaggaagccatgctgaagcaccgggactacgagacggccacactatcggacatcaaagccctcattcgcaagcacgaggccttcgagagcgacctggctgcgcaccaggaccgcgtggagcagatcgccgccattgcccaggagctcaacgagctggattactacgactcccacaatgtcaacacccggtgccagaagatctgtgaccagtgggacgccctcggctctctgacacatagtcgcagggaagccctggagaaaacagagaagcagctggaggccatcgaccagctgcacctggaatacgccaagcgcgcggcccccttcaacaactggatggagagcgccatggaggacctccaggacatgttcatcgtccataccatcgaggagattgagggcctgatctcagcccatgaccagttcaagtccaccctgccggacgccgatagggagcgcgaggccatcctggccatccacaaggaggcccagaggatcgctgagagcaaccacatcaagctgtcgggcagcaacccctacaccaccgtcaccccgcaaatcatcaactccaagtgggagaaggtgcagcagctggtgccaaaacgggaccatgccctcctggaggagcagagcaagcagcagtccaacgagcacctgcgccgccagttcgccagccaggccaatgttgtggggccctggatccagaccaagatggaggagatcgggcgcatctccattgagatgaacgggaccctggaggaccagctgagccacctgaagcagtatgaacgcagcatcgtggactacaagcccaacctggacctgctggagcagcagcaccagctcatccaggaggccctcatcttcgacaacaagcacaccaactataccatggagcacatccgcgtgggctgggagcagctgctcaccaccattgcccgcaccatcaacgaggtggagaaccagatcctcacccgcgacgccaagggcatcagccaggagcagatgcaggagttccgggcgtccttcaaccacttcgacaaggatcatggcggggcgctggggcccgaggagttcaaggcctgcctcatcagcctgggctacgacgtggagaacgaccggcagggtgaggccgagttcaaccgcatcatgagcctggtcgaccccaaccatagcggccttgtgaccttccaagccttcatcgacttcatgtcgcgggagaccaccgacacggacacggctgaccaggtcatcgcttccttcaaggtcttagcaggggacaagaacttcatcacagctgaggagctgcggagagagctgccccccgaccaggccgagtactgcatcgcccgcatggcgccataccagggccctgacgccgtgcccggtgccctcgactacaagtccttctccacggccttgtatggcgagagcgacctgtgaggccccagagacctgacccaacacccccgacggcctccaggaggggcctgggcagccccacagtcccattcctccactctgtatctatgcaaagcactctctgcagtcctccggggtgggtgggtgggcagggaggggctggggcaggctctctcctctctctctttgtgggttggccaggaggttcccccgaccaggttggggagacttggggccagcgcttctggtctggtaaatatgtatgatgtgttgtgcttttttaaccaaggaggggccagtggattcccacagcacaaccggtcccttccatgccctgggatgcctcaccacacccaggtctcttcctttgctctgaggtcccttcaaggcctccccaatccaggccaaagccccatgtgccttgtccaggaactgcctgggccatgcgaggggccagcagagggcgccaccaccacctgacggctggggacccactgatggcctggctgcctggtggttgatggttttgctccccctaccttttttttttgagtttattctgattgattttttttcttggtttctggataaaccaccctctggggacaggataataaaacatgtaatatttttaagaaggaattcctgcagcatcatctttttttatttctcctgtgtctgtcctccaccttctaggagagccagggcagagctagcactgtcttaagctgtcaacgtggactagctcgtgtcatctgctcgagaggggctgtcgctgttcttgtttctgagtgaggagtacgcaggccagagtggtcacccggccgtgagcagtgagggccagagactagccccagacaggtggatgccagagagagtggcacccatgccaggcaaggcctagggaggtggtcttgctcagcaaccctgccctgagcagcaggtgcgcccatccggagatcctaggagaaggtggccacctccatccact

SEQ ID NO: 353058 - DNA, 3276 bp, Homo sapiens
tagaggatccgtgtccatcccccttcgtaggggagcggttacctaagccggagcgggggaagatgagagtgcacaaaatcaacaatgtgaacaaagcgctggactttattgccagcaaaggcgtcaagctggtctccatcggggcagaagagattgtggacggcaacgcaaagatgaccctgggaatgatctggaccatcatccttaggttcgccatccaggacatctccgtggaagagacctcggccaaggaagggctccttctctggtgccagagaaagacagccccgtataagaacgtcaatgtgcagaacttccacatcagctggaaggatggtcttgccttcaatgccctgatccaccggcacagaccagagctgattgagtatgacaagctgaggaaggacgaccctgtcaccaacctgaacaatgccttcgaagtggctgagaaatacctcgacatccccaagatgctggatgcagaggacatcgtgaacacggcccggcccgacgagaaggccataatgacctatgtgtccagcttctaccatgccttttcaggagcgcagaaggctgaaactgccgccaaccggatctgtaaggtgctggctgtcaaccaagagaacgagcacctgatggaggactacgagaagctggccagcgacctcctggagtggatccggcgcaccatcccctggctggaggaccgtgtgccccaaaagactatccaggagatgcagcagaagctggaggacttccgcgactaccggcgtgtgcacaagccgcccaaggtgcaggagaagtgccagctggagatcaacttcaacacgctgcagaccaagctgcgcctcagcaaccggcccgccttcatgccctccgagggcaagatggtctcggacatcaacaatggctggcagcacttggagcaggctgagaagggctacgaggagtggctgctgaatgagatccgcaggctggagcggctcgaccacctggcagagaagttccggcagaaggcctccatccacgaggcctggactgacgggaaggaagccatgctgaagcaccgggactacgagacggccacactatcggacatcaaagccctcattcgcaagcacgaggccttcgagagcgacctggctgcgcaccaggaccgcgtggagcagatcgccgccattgcccaggagctcaacgagctggattactacgactcccacaatgtcaacacccggtgccagaagatctgtgaccagtgggacgccctcggctctctgacacatagtcgcagggaagccctggagaaaacagagaagcagctggaggccatcgaccagctgcacctggaatacgccaagcgcgcggcccccttcaacaactggatggagagcgccatggaggacctccaggacatgttcatcgtccataccatcgaggagattgagggcctgatctcagcccatgaccagttcaagtccaccctgccggacgccgatagggagcgcgaggccatcctggccatccacaaggaggcccagaggatcgctgagagcaaccacatcaagctgtcgggcagcaacccctacaccaccgtcaccccgcaaatcatcaactccaagtgggagaaggtgcagcagctggtgccaaaacgggaccatgccctcctggaggagcagagcaagcagcagtccaacgagcacctgcgccgccagttcgccagccaggccaatgttgtggggccctggatccagaccaagatggaggagatcgggcgcatctccattgagatgaacgggaccctggaggaccagctgagccacctgaagcagtatgaacgcagcatcgtggactacaagcccaacctggacctgctggagcagcagcaccagctcatccaggaggccctcatcttcgacaacaagcacaccaactataccatggagcacatccgcgtgggctgggagcagctgctcaccaccattgcccgcaccatcaacgaggtggagaaccagatcctcacccgcgacgccaagggcatcagccaggagcagatgcaggagttccgggcgtccttcaaccacttcgacaaggatcatggcggggcgctggggcccgaggagttcaaggcctgcctcatcagcctgggctacgacgtggagaacgaccggcagggtgaggccgagttcaaccgcatcatgagcctggtcgaccccaaccatagcggccttgtgaccttccaagccttcatcgacttcatgtcgcgggagaccaccgacacggacacggctgaccaggtcatcgcttccttcaaggtcttagcaggggacaagaacttcatcacagctgaggagctgcggagagagctgccccccgaccaggccgagtactgcatcgcccgcatggcgccataccagggcccaccccatcccaccagccccggccttgctttgtctggcctcacgtgtctcagattttctaagaaccaaaaaaaaaaaagggaaaaaaaacacaaaacaacaaaaaccaaaaaaaaaaaaaatcacaaaaacaaaaaaactataaaaaagaaagaattaaaaactttcagagaattactatttactttattaacttacggatttattatataaatatatattcacctagcaacatatctctgccgtctctcctgctctcataatgaagacatagccgattctctgcccgggccccttgctgatgctcctccgggtctgcgtcgggcgtgggtctctggggaccctccagaggtggaggtgggctgatggcctggctgcctggtggttgatggttttgctccccctaccttttttttttgagtttattctgattgattttttttcttggtttctggataaaccaccctctggggacaggataataaaacatgtaatatttttaagaaggaattcctgcagcatcatctttttttatttctcctgtgtctgtcctccaccttctaggagagccagggcagagctagcactgtcttaagctgtcaacgtggactagctcgtgtcatctgctcgagaggggctgtcgctgttcttgtttctgagtgaggagtacgcaggccagagtggtcacccggccgtgagcagtgagggccagagactagccccagacaggtggatgccagagagagtggcacccatgccaggcaaggcctagggaggtggtcttgctcagcaaccctgccctgagcagcaggtgcgcccatccggagatcctaggagaaggtggccacctccatccact

SEQ ID NO: 353059 - DNA, 3230 bp, Homo sapiens
tagaggatccgtgtccatcccccttcgtaggggagcggttacctaagccggagcgggggaagatgagagtgcacaaaatcaacaatgtgaacaaagcgctggactttattgccagcaaaggcgtcaagctggtctccatcggggcagaagagattgtggacggcaacgcaaagatgaccctgggaatgatctggaccatcatccttaggttcgccatccaggacatctccgtggaagagacctcggccaaggaagggctccttctctggtgccagagaaagacagccccgtataagaacgtcaatgtgcagaacttccacatcagctggaaggatggtcttgccttcaatgccctgatccaccggcacagaccagagctgattgagtatgacaagctgaggaaggacgaccctgtcaccaacctgaacaatgccttcgaagtggctgagaaatacctcgacatccccaagatgctggatgcagaggacatcgtgaacacggcccggcccgacgagaaggccataatgacctatgtgtccagcttctaccatgccttttcaggagcgcagaaggctgaaactgccgccaaccggatctgtaaggtgctggctgtcaaccaagagaacgagcacctgatggaggactacgagaagctggccagcgacctcctggagtggatccggcgcaccatcccctggctggaggaccgtgtgccccaaaagactatccaggagatgcagcagaagctggaggacttccgcgactaccggcgtgtgcacaagccgcccaaggtgcaggagaagtgccagctggagatcaacttcaacacgctgcagaccaagctgcgcctcagcaaccggcccgccttcatgccctccgagggcaagatggtctcggacatcaacaatggctggcagcacttggagcaggctgagaagggctacgaggagtggctgctgaatgagatccgcaggctggagcggctcgaccacctggcagagaagttccggcagaaggcctccatccacgaggcctggactgacgggaaggaagccatgctgaagcaccgggactacgagacggccacactatcggacatcaaagccctcattcgcaagcacgaggccttcgagagcgacctggctgcgcaccaggaccgcgtggagcagatcgccgccattgcccaggagctcaacgagctggattactacgactcccacaatgtcaacacccggtgccagaagatctgtgaccagtgggacgccctcggctctctgacacatagtcgcagggaagccctggagaaaacagagaagcagctggaggccatcgaccagctgcacctggaatacgccaagcgcgcggcccccttcaacaactggatggagagcgccatggaggacctccaggacatgttcatcgtccataccatcgaggagattgagggcctgatctcagcccatgaccagttcaagtccaccctgccggacgccgatagggagcgcgaggccatcctggccatccacaaggaggcccagaggatcgctgagagcaaccacatcaagctgtcgggcagcaacccctacaccaccgtcaccccgcaaatcatcaactccaagtgggagaaggtgcagcagctggtgccaaaacgggaccatgccctcctggaggagcagagcaagcagcagtccaacgagcacctgcgccgccagttcgccagccaggccaatgttgtggggccctggatccagaccaagatggaggagatcgggcgcatctccattgagatgaacgggaccctggaggaccagctgagccacctgaagcagtatgaacgcagcatcgtggactacaagcccaacctggacctgctggagcagcagcaccagctcatccaggaggccctcatcttcgacaacaagcacaccaactataccatggagcacatccgcgtgggctgggagcagctgctcaccaccattgcccgcaccatcaacgaggtggagaaccagatcctcacccgcgacgccaagggcatcagccaggagcagatgcaggagttccgggcgtccttcaaccacttcgacaaggatcatggcggggcgctggggcccgaggagttcaaggcctgcctcatcagcctgggctacgacgtggagaacgaccggcagggtgaggccgagttcaaccgcatcatgagcctggtcgaccccaaccatagcggccttgtgaccttccaagccttcatcgacttcatgtcgcgggagaccaccgacacggacacggctgaccaggtcatcgcttccttcaaggtcttagcaggggacaagaacttcatcacagctgaggagctgcggagagagctgcccccccaccccatcccaccagccccggccttgctttgtctggcctcacgtgtctcagattttctaagaaccaaaaaaaaaaaagggaaaaaaaacacaaaacaacaaaaaccaaaaaaaaaaaaaatcacaaaaacaaaaaaactataaaaaagaaagaattaaaaactttcagagaattactatttactttattaacttacggatttattatataaatatatattcacctagcaacatatctctgccgtctctcctgctctcataatgaagacatagccgattctctgcccgggccccttgctgatgctcctccgggtctgcgtcgggcgtgggtctctggggaccctccagaggtggaggtgggctgatggcctggctgcctggtggttgatggttttgctccccctaccttttttttttgagtttattctgattgattttttttcttggtttctggataaaccaccctctggggacaggataataaaacatgtaatatttttaagaaggaattcctgcagcatcatctttttttatttctcctgtgtctgtcctccaccttctaggagagccagggcagagctagcactgtcttaagctgtcaacgtggactagctcgtgtcatctgctcgagaggggctgtcgctgttcttgtttctgagtgaggagtacgcaggccagagtggtcacccggccgtgagcagtgagggccagagactagccccagacaggtggatgccagagagagtggcacccatgccaggcaaggcctagggaggtggtcttgctcagcaaccctgccctgagcagcaggtgcgcccatccggagatcctaggagaaggtggccacctccatccact

SEQ ID NO: 353060 - DNA, 2579 bp, Homo sapiens
  misc_feature (2512)..(2512): n is a, c, g, or t
  misc_feature (2517)..(2518): n is a, c, g, or t
  misc_feature (2524)..(2524): n is a, c, g, or t
  misc_feature (2529)..(2529): n is a, c, g, or t
  misc_feature (2532)..(2532): n is a, c, g, or t
  misc_feature (2539)..(2539): n is a, c, g, or t
tagaggatccgtgtccatcccccttcgtaggggagcggttacctaagccggagcgggggaagatgagagtgcacaaaatcaacaatgtgaacaaagcgctggactttattgccagcaaaggcgtcaagctggtctccatcggggcagaagagattgtggacggcaacgcaaagatgaccctgggaatgatctggaccatcatccttaggttcgccatccaggacatctccgtggaagagacctcggccaaggaagggctccttctctggtgccagagaaagacagccccgtataagaacgtcaatgtgcagaacttccacatcagctggaaggatggtcttgccttcaatgccctgatccaccggcacagaccagagctgattgagtatgacaagctgaggaaggacgaccctgtcaccaacctgaacaatgccttcgaagtggctgagaaatacctcgacatccccaagatgctggatgcagaggacatcgtgaacacggcccggcccgacgagaaggccataatgacctatgtgtccagcttctaccatgccttttcaggagcgcagaaggctgaaactgccgccaaccggatctgtaaggtgctggctgtcaaccaagagaacgagcacctgatggaggactacgagaagctggccagcgacctcctggagtggatccggcgcaccatcccctggctggaggaccgtgtgccccaaaagactatccaggagatgcagcagaagctggaggacttccgcgactaccggcgtgtgcacaagccgcccaaggtgcaggagaagtgccagctggagatcaacttcaacacgctgcagaccaagctgcgcctcagcaaccggcccgccttcatgccctccgagggcaagatggtctcggacatcaacaatggctggcagcacttggagcaggctgagaagggctacgaggagtggctgctgaatgagatccgcaggctggagcggctcgaccacctggcagagaagttccggcagaaggcctccatccacgaggcctggactgacgggaaggaagccatgctgaagcaccgggactacgagacggccacactatcggacatcaaagccctcattcgcaagcacgaggccttcgagagcgacctggctgcgcaccaggaccgcgtggagcagatcgccgccattgcccaggagctcaacgagctggattactacgactcccacaatgtcaacacccggtgccagaagatctgtgaccagtgggacgccctcggctctctgacacatagtcgcagggaagccctggagaaaacagagaagcagctggaggccatcgaccagctgcacctggaatacgccaagcgcgcggcccccttcaacaactggatggagagcgccatggaggacctccaggacatgttcatcgtccataccatcgaggagattgagggcctgatctcagcccatgaccagttcaagtccaccctgccggacgccgatagggagcgcgaggccatcctggccatccacaaggaggcccagaggatcgctgagagcaaccacatcaagctgtcgggcagcaacccctacaccaccgtcaccccgcaaatcatcaactccaagtgggagaaggtgcagcagctggtgccaaaacgggaccatgccctcctggaggagcagagcaagcagcagtccaacgagcacctgcgccgccagttcgccagccaggccaatgttgtggggccctggatccagaccaagatggaggagatcgggcgcatctccattgagatgaacgggaccctggaggaccagctgagccacctgaagcagtatgaacgcagcatcgtggactacaagcccaacctggacctgctggagcagcagcaccagctcatccaggaggccctcatcttcgacaacaagcacaccaactataccatggagcacatccgcgtgggctgggagcagctgctcaccaccattgcccgcaccatcaacgaggtggagaaccagatcctcacccgcgacgccaagggcatcagccaggagcagatgcaggagttccgggcgtccttcaaccacttcgacaaggatcatggcggggcgctggggcccgaggagttcaaggcctgcctcatcagcctgggctacgacgtggagaacgaccggcagggtgaggccgagttcaaccgcatcatgagcctggtcgaccccaaccatagcggccttgtgaccttccaagccttcatcgacttcatgtcgcgggagaccaccgacacggacacggctgaccaggtcatcgcttccttcaaggtcttagcaggggacaagaacttcatcacagctgaggagctgcggagagagctgccccccgaccaggccgagtactgcatcgcccgcatggcgccataccagggccctgacgccgtgcccggtgccctcgactacaagtccttctccacggccttgtatggcgagagcgacctgtgaggccccagagaccttacaaaccngaggnnccagangggcnggngccaagnccatcccacctgttttcaagcctcgagcccgggggggtgc

SEQ ID NO: 353061 - DNA, 2568 bp, Homo sapiens
  misc_feature (2337)..(2337): n is a, c, g, or t
tagaggatccgtgtccatcccccttcgtaggggagcggttacctaagccggagcgggggaagatgagagtgcacaaaatcaacaatgtgaacaaagcgctggactttattgccagcaaaggcgtcaagctggtctccatcggggcagaagagattgtggacggcaacgcaaagatgaccctgggaatgatctggaccatcatccttaggttcgccatccaggacatctccgtggaagagacctcggccaaggaagggctccttctctggtgccagagaaagacagccccgtataagaacgtcaatgtgcagaacttccacatcagctggaaggatggtcttgccttcaatgccctgatccaccggcacagaccagagctgattgagtatgacaagctgaggaaggacgaccctgtcaccaacctgaacaatgccttcgaagtggctgagaaatacctcgacatccccaagatgctggatgcagaggacatcgtgaacacggcccggcccgacgagaaggccataatgacctatgtgtccagcttctaccatgccttttcaggagcgcagaaggctgaaactgccgccaaccggatctgtaaggtgctggctgtcaaccaagagaacgagcacctgatggaggactacgagaagctggccagcgacctcctggagtggatccggcgcaccatcccctggctggaggaccgtgtgccccaaaagactatccaggagatgcagcagaagctggaggacttccgcgactaccggcgtgtgcacaagccgcccaaggtgcaggagaagtgccagctggagatcaacttcaacacgctgcagaccaagctgcgcctcagcaaccggcccgccttcatgccctccgagggcaagatggtctcggacatcaacaatggctggcagcacttggagcaggctgagaagggctacgaggagtggctgctgaatgagatccgcaggctggagcggctcgaccacctggcagagaagttccggcagaaggcctccatccacgaggcctggactgacgggaaggaagccatgctgaagcaccgggactacgagacggccacactatcggacatcaaagccctcattcgcaagcacgaggccttcgagagcgacctggctgcgcaccaggaccgcgtggagcagatcgccgccattgcccaggagctcaacgagctggattactacgactcccacaatgtcaacacccggtgccagaagatctgtgaccagtgggacgccctcggctctctgacacatagtcgcagggaagccctggagaaaacagagaagcagctggaggccatcgaccagctgcacctggaatacgccaagcgcgcggcccccttcaacaactggatggagagcgccatggaggacctccaggacatgttcatcgtccataccatcgaggagattgagggcctgatctcagcccatgaccagttcaagtccaccctgccggacgccgatagggagcgcgaggccatcctggccatccacaaggaggcccagaggatcgctgagagcaaccacatcaagctgtcgggcagcaacccctacaccaccgtcaccccgcaaatcatcaactccaagtgggagaaggtgcagcagctggtgccaaaacgggaccatgccctcctggaggagcagagcaagcagcagtccaacgagcacctgcgccgccagttcgccagccaggccaatgttgtggggccctggatccagaccaagatggaggagatcgggcgcatctccattgagatgaacgggaccctggaggaccagctgagccacctgaagcagtatgaacgcagcatcgtggactacaagcccaacctggacctgctggagcagcagcaccagctcatccaggaggccctcatcttcgacaacaagcacaccaactataccatggagcacatccgcgtgggctgggagcagctgctcaccaccattgcccgcaccatcaacgaggtggagaaccagatcctcacccgcgacgccaagggcatcagccaggagcagatgcaggagttccgggcgtccttcaaccacttcgacaaggatcatggcggggcgctggggcccgaggagttcaaggcctgcctcatcagcctgggctacgacgtggagaacgaccggcagggtgaggccgagttcaaccgcatcatgagcctggtcgaccccaaccatagcggccttgtgaccttccaagccttcatcgacttcatgtcgcgggagaccaccgacacggacacggctgaccaggtcatcgcttccttcaaggtcttagcaggggacaaggtggctntgggccctggcaagatggattccaggggtgagcacagacaggatcgcagggagaggccgtattaattagcctggctccccaggttctggaacagctttttgtcctgtacccagtgttaccctcgttattttgtaaccttccaattcctgatcacccaagggtttttttgtgtcggactatgtaattgtaactatacctctggttcccattaaaagtgaccattttagttaa

SEQ ID NO: 353062 - DNA, 2800 bp, Homo sapiens
tagaggatccgtgtccatcccccttcgtaggggagcggttacctaagccggagcgggggaagatgagagtgcacaaaatcaacaatgtgaacaaagcgctggactttattgccagcaaaggcgtcaagctggtctccatcggggcagaagagattgtggacggcaacgcaaagatgaccctgggaatgatctggaccatcatccttaggttcgccatccaggacatctccgtggaagagacctcggccaaggaagggctccttctctggtgccagagaaagacagccccgtataagaacgtcaatgtgcagaacttccacatcagctggaaggatggtcttgccttcaatgccctgatccaccggcacagaccagagctgattgagtatgacaagctgaggaaggacgaccctgtcaccaacctgaacaatgccttcgaagtggctgagaaatacctcgacatccccaagatgctggatgcagaggacatcgtgaacacggcccggcccgacgagaaggccataatgacctatgtgtccagcttctaccatgccttttcaggagcgcagaaggctgaaactgccgccaaccggatctgtaaggtgctggctgtcaaccaagagaacgagcacctgatggaggactacgagaagctggccagcgacctcctggagtggatccggcgcaccatcccctggctggaggaccgtgtgccccaaaagactatccaggagatgcagcagaagctggaggacttccgcgactaccggcgtgtgcacaagccgcccaaggtgcaggagaagtgccagctggagatcaacttcaacacgctgcagaccaagctgcgcctcagcaaccggcccgccttcatgccctccgagggcaagatggtctcggacatcaacaatggctggcagcacttggagcaggctgagaagggctacgaggagtggctgctgaatgagatccgcaggctggagcggctcgaccacctggcagagaagttccggcagaaggcctccatccacgaggcctggactgacgggaaggaagccatgctgaagcaccgggactacgagacggccacactatcggacatcaaagccctcattcgcaagcacgaggccttcgagagcgacctggctgcgcaccaggaccgcgtggagcagatcgccgccattgcccaggagctcaacgagctggattactacgactcccacaatgtcaacacccggtgccagaagatctgtgaccagtgggacgccctcggctctctgacacatagtcgcagggaagccctggagaaaacagagaagcagctggaggccatcgaccagctgcacctggaatacgccaagcgcgcggcccccttcaacaactggatggagagcgccatggaggacctccaggacatgttcatcgtccataccatcgaggagattgagggcctgatctcagcccatgaccagttcaagtccaccctgccggacgccgatagggagcgcgaggccatcctggccatccacaaggaggcccagaggatcgctgagagcaaccacatcaagctgtcgggcagcaacccctacaccaccgtcaccccgcaaatcatcaactccaagtgggagaaggtgcagcagctggtgccaaaacgggaccatgccctcctggaggagcagagcaagcagcagtccaacgagcacctgcgccgccagttcgccagccaggccaatgttgtggggccctggatccagaccaagatggaggagatcgggcgcatctccattgagatgaacgggaccctggaggaccagctgagccacctgaagcagtatgaacgcagcatcgtggactacaagcccaacctggacctgctggagcagcagcaccagctcatccaggaggccctcatcttcgacaacaagcacaccaactataccatggagcacatccgcgtgggctgggagcagctgctcaccaccattgcccgcaccatcaacgaggtggagaaccagatcctcacccgcgacgccaagggcatcagccaggagcagatgcaggagttccgggcgtccttcaaccacttcgacaaggatcatggcggggcgctggggcccgaggagttcaaggcctgcctcatcagcctgggctacgacgtggagaacgaccggcagggtgaggccgagttcaaccgcatcatgagcctggtcgaccccaaccatagcggccttgtgaccttccaagccttcatcgacttcatgtcgcgggagaccagacccaacacccccgacggcctccaggaggggctgatggcctggctgcctggtggttgatggttttgctccccctaccttttttttttgagtttattctgattgattttttttcttggtttctggataaaccaccctctggggacaggataataaaacatgtaatatttttaagaaggaattcctgcagcatcatctttttttatttctcctgtgtctgtcctccaccttctaggagagccagggcagagctagcactgtcttaagctgtcaacgtggactagctcgtgtcatctgctcgagaggggctgtcgctgttcttgtttctgagtgaggagtacgcaggccagagtggtcacccggccgtgagcagtgagggccagagactagccccagacaggtggatgccagagagagtggcacccatgccaggcaaggcctagggaggtggtcttgctcagcaaccctgccctgagcagcaggtgcgcccatccggagatcctaggagaaggtggccacctccatccact

SEQ ID NO: 353063 - DNA, 2143 bp, Homo sapiens
tagaggatccgtgtccatcccccttcgtaggggagcggttacctaagccggagcgggggaagatgagagtgcacaaaatcaacaatgtgaacaaagcgctggactttattgccagcaaaggcgtcaagctggtctccatcggggcagaagagattgtggacggcaacgcaaagatgaccctgggaatgatctggaccatcatccttaggttcgccatccaggacatctccgtggaagagacctcggccaaggaagggctccttctctggtgccagagaaagacagccccgtataagaacgtcaatgtgcagaacttccacatcagctggaaggatggtcttgccttcaatgccctgatccaccggcacagaccagagctgattgagtatgacaagctgaggaaggacgaccctgtcaccaacctgaacaatgccttcgaagtggctgagaaatacctcgacatccccaagatgctggatgcagaggacatcgtgaacacggcccggcccgacgagaaggccataatgacctatgtgtccagcttctaccatgccttttcaggagcgcagaaggctgaaactgccgccaaccggatctgtaaggtgctggctgtcaaccaagagaacgagcacctgatggaggactacgagaagctggccagcgacctcctggagtggatccggcgcaccatcccctggctggaggaccgtgtgccccaaaagactatccaggagatgcagcagaagctggaggacttccgcgactaccggcgtgtgcacaagccgcccaaggtgcaggagaagtgccagctggagatcaacttcaacacgctgcagaccaagctgcgcctcagcaaccggcccgccttcatgccctccgagggcaagatggtctcggacatcaacaatggctggcagcacttggagcaggctgagaagggctacgaggagtggctgctgaatgagatccgcaggctggagcggctcgaccacctggcagagaagttccggcagaaggcctccatccacgaggcctggactgacgggaaggaagccatgctgaagcaccgggactacgagacggccacactatcggacatcaaagccctcattcgcaagcacgaggccttcgagagcgacctggctgcgcaccaggaccgcgtggagcagatcgccgccattgcccaggagctcaacgagctggattactacgactcccacaatgtcaacacccggtgccagaagatctgtgaccagtgggacgccctcggctctctgacacatagtcgcagggaagccctggagaaaacagagaagcagctggaggccatcgaccagctgcacctggaatacgccaagcgcgcggcccccttcaacaactggatggagagcgccatggaggacctccaggacatgttcatcgtccataccatcgaggagattgagggcctgatctcagcccatgaccagttcaagtccaccctgccggacgccgatagggagcgcgaggccatcctggccatccacaaggaggcccagaggatcgctgagagcaaccacatcaagctgtcgggcagcaacccctacaccaccgtcaccccgcaaatcatcaactccaagtgggagaaggtgcagcagctggtgccaaaacgggaccatgccctcctggaggagcagagcaagcagcagtccaacgagcacctgcgccgccagttcgccagccaggccaatgttgtggggccctggatccagaccaagatggaggagatcgggcgcatctccattgagatgaacgggaccctggaggaccagctgagccacctgaagcagtatgaacgcagcatcgtggactacaagcccaacctggacctgctggagcagcagcaccagctcatccaggaggccctcatcttcgacaacaagcacaccaactataccatggagcacatccgcgtgggctgggagcagctgctcaccaccattgcccgcaccatcaacgaggtggagaaccagatcctcacccgcgacgccaagggcatcagccaggagcagatgcaggagttccgggcgtccttcaaccacttcgacaaggtgagcagcctgccacctcctcggcctctcccctcccgccgttgccgtaccag

SEQ ID NO: 353064 - DNA, 2169 bp, Homo sapiens
  misc_feature (2144)..(2145): n is a, c, g, or t
  misc_feature (2155)..(2155): n is a, c, g, or t
  misc_feature (2157)..(2158): n is a, c, g, or t
tagaggatccgtgtccatcccccttcgtaggggagcggttacctaagccggagcgggggaagatgagagtgcacaaaatcaacaatgtgaacaaagcgctggactttattgccagcaaaggcgtcaagctggtctccatcggggcagaagagattgtggacggcaacgcaaagatgaccctgggaatgatctggaccatcatccttaggttcgccatccaggacatctccgtggaagagacctcggccaaggaagggctccttctctggtgccagagaaagacagccccgtataagaacgtcaatgtgcagaacttccacatcagctggaaggatggtcttgccttcaatgccctgatccaccggcacagaccagagctgattgagtatgacaagctgaggaaggacgaccctgtcaccaacctgaacaatgccttcgaagtggctgagaaatacctcgacatccccaagatgctggatgcagaggacatcgtgaacacggcccggcccgacgagaaggccataatgacctatgtgtccagcttctaccatgccttttcaggagcgcagaaggctgaaactgccgccaaccggatctgtaaggtgctggctgtcaaccaagagaacgagcacctgatggaggactacgagaagctggccagcgacctcctggagtggatccggcgcaccatcccctggctggaggaccgtgtgccccaaaagactatccaggagatgcagcagaagctggaggacttccgcgactaccggcgtgtgcacaagccgcccaaggtgcaggagaagtgccagctggagatcaacttcaacacgctgcagaccaagctgcgcctcagcaaccggcccgccttcatgccctccgagggcaagatggtctcggacatcaacaatggctggcagcacttggagcaggctgagaagggctacgaggagtggctgctgaatgagatccgcaggctggagcggctcgaccacctggcagagaagttccggcagaaggcctccatccacgaggcctggactgacgggaaggaagccatgctgaagcaccgggactacgagacggccacactatcggacatcaaagccctcattcgcaagcacgaggccttcgagagcgacctggctgcgcaccaggaccgcgtggagcagatcgccgccattgcccaggagctcaacgagctggattactacgactcccacaatgtcaacacccggtgccagaagatctgtgaccagtgggacgccctcggctctctgacacatagtcgcagggaagccctggagaaaacagagaagcagctggaggccatcgaccagctgcacctggaatacgccaagcgcgcggcccccttcaacaactggatggagagcgccatggaggacctccaggacatgttcatcgtccataccatcgaggagattgagggcctgatctcagcccatgaccagttcaagtccaccctgccggacgccgatagggagcgcgaggccatcctggccatccacaaggaggcccagaggatcgctgagagcaaccacatcaagctgtcgggcagcaacccctacaccaccgtcaccccgcaaatcatcaactccaagtgggagaaggtgcagcagctggtgccaaaacgggaccatgccctcctggaggagcagagcaagcagcagtccaacgagcacctgcgccgccagttcgccagccaggccaatgttgtggggccctggatccagaccaagatggaggagatcgggcgcatctccattgagatgaacgggaccctggaggaccagctgagccacctgaagcagtatgaacgcagcatcgtggactacaagcccaacctggacctgctggagcagcagcaccagctcatccaggaggccctcatcttcgacaacaagcacaccaactataccatggagcacatccgcgtgggctgggagcagctgctcaccaccattgcccgcaccatcaacgaggtggagaaccagatcctcacccgcgacgccaagggcatcagccaggagcagatgcaggagttccgggcgtccttcaaccacttcgacaagatgatgggcctgctcatggcacttcccagcatgtagccgccaaggccccccacnnctgccccagntnntgcagcaccag

SEQ ID NO: 353065 - DNA, 1900 bp, Homo sapiens
tagaggatccgtgtccatcccccttcgtaggggagcggttacctaagccggagcgggggaagatgagagtgcacaaaatcaacaatgtgaacaaagcgctggactttattgccagcaaaggcgtcaagctggtctccatcggggcagaagagattgtggacggcaacgcaaagatgaccctgggaatgatctggaccatcatccttaggttcgccatccaggacatctccgtggaagagacctcggccaaggaagggctccttctctggtgccagagaaagacagccccgtataagaacgtcaatgtgcagaacttccacatcagctggaaggatggtcttgccttcaatgccctgatccaccggcacagaccagagctgattgagtatgacaagctgaggaaggacgaccctgtcaccaacctgaacaatgccttcgaagtggctgagaaatacctcgacatccccaagatgctggatgcagaggacatcgtgaacacggcccggcccgacgagaaggccataatgacctatgtgtccagcttctaccatgccttttcaggagcgcagaaggctgaaactgccgccaaccggatctgtaaggtgctggctgtcaaccaagagaacgagcacctgatggaggactacgagaagctggccagcgacctcctggagtggatccggcgcaccatcccctggctggaggaccgtgtgccccaaaagactatccaggagatgcagcagaagctggaggacttccgcgactaccggcgtgtgcacaagccgcccaaggtgcaggagaagtgccagctggagatcaacttcaacacgctgcagaccaagctgcgcctcagcaaccggcccgccttcatgccctccgagggcaagatggtctcggacatcaacaatggctggcagcacttggagcaggctgagaagggctacgaggagtggctgctgaatgagatccgcaggctggagcggctcgaccacctggcagagaagttccggcagaaggcctccatccacgaggcctggactgacgggaaggaagccatgctgaagcaccgggactacgagacggccacactatcggacatcaaagccctcattcgcaagcacgaggccttcgagagcgacctggctgcgcaccaggaccgcgtggagcagatcgccgccattgcccaggagctcaacgagctggattactacgactcccacaatgtcaacacccggtgccagaagatctgtgaccagtgggacgccctcggctctctgacacatagtcgcagggaagccctggagaaaacagagaagcagctggaggccatcgaccagctgcacctggaatacgccaagcgcgcggcccccttcaacaactggatggagagcgccatggaggacctccaggacatgttcatcgtccataccatcgaggagattgagggcctgatctcagcccatgaccagttcaagtccaccctgccggacgccgatagggagcgcgaggccatcctggccatccacaaggaggcccagaggatcgctgagagcaaccacatcaagctgtcgggcagcaacccctacaccaccgtcaccccgcaaatcatcaactccaagtgggagaaggtgcagcagctggtgccaaaacgggaccatgccctcctggaggagcagagcaagcagcagtccaacgagcacctgcgccgccagttcgccagccaggccaatgttgtggggccctggatccagaccaagatggaggagatcgggcgcatctccattgagatgaacgggaccctggaggaccagctgagccacctgaagcagtatgaacaacagtgcaggtatgaacaacgctgcaggtatgaacaacagtgcagtatgaaccacagtgcagc

SEQ ID NO: 353066 - DNA, 1820 bp, Homo sapiens
tagaggatccgtgtccatcccccttcgtaggggagcggttacctaagccggagcgggggaagatgagagtgcacaaaatcaacaatgtgaacaaagcgctggactttattgccagcaaaggcgtcaagctggtctccatcggggcagaagagattgtggacggcaacgcaaagatgaccctgggaatgatctggaccatcatccttaggttcgccatccaggacatctccgtggaagagacctcggccaaggaagggctccttctctggtgccagagaaagacagccccgtataagaacgtcaatgtgcagaacttccacatcagctggaaggatggtcttgccttcaatgccctgatccaccggcacagaccagagctgattgagtatgacaagctgaggaaggacgaccctgtcaccaacctgaacaatgccttcgaagtggctgagaaatacctcgacatccccaagatgctggatgcagaggacatcgtgaacacggcccggcccgacgagaaggccataatgacctatgtgtccagcttctaccatgccttttcaggagcgcagaaggctgaaactgccgccaaccggatctgtaaggtgctggctgtcaaccaagagaacgagcacctgatggaggactacgagaagctggccagcgacctcctggagtggatccggcgcaccatcccctggctggaggaccgtgtgccccaaaagactatccaggagatgcagcagaagctggaggacttccgcgactaccggcgtgtgcacaagccgcccaaggtgcaggagaagtgccagctggagatcaacttcaacacgctgcagaccaagctgcgcctcagcaaccggcccgccttcatgccctccgagggcaagatggtctcggacatcaacaatggctggcagcacttggagcaggctgagaagggctacgaggagtggctgctgaatgagatccgcaggctggagcggctcgaccacctggcagagaagttccggcagaaggcctccatccacgaggcctggactgacgggaaggaagccatgctgaagcaccgggactacgagacggccacactatcggacatcaaagccctcattcgcaagcacgaggccttcgagagcgacctggctgcgcaccaggaccgcgtggagcagatcgccgccattgcccaggagctcaacgagctggattactacgactcccacaatgtcaacacccggtgccagaagatctgtgaccagtgggacgccctcggctctctgacacatagtcgcagggaagccctggagaaaacagagaagcagctggaggccatcgaccagctgcacctggaatacgccaagcgcgcggcccccttcaacaactggatggagagcgccatggaggacctccaggacatgttcatcgtccataccatcgaggagattgagggcctgatctcagcccatgaccagttcaagtccaccctgccggacgccgatagggagcgcgaggccatcctggccatccacaaggaggcccagaggatcgctgagagcaaccacatcaagctgtcgggcagcaacccctacaccaccgtcaccccgcaaatcatcaactccaagtgggagaaggtgcagcagctggtgccaaaacgggaccatgccctcctggaggagcagagcaagcagcagtccaacgagcacctgcgccgccagttcgccagccaggccaatgttgtggggccctggatccagaccaagatggaggagatcgcgcagtctgtgaggggggactcctctagagacgaccatcagccatcacca

SEQ ID NO: 353067 - DNA, 2185 bp, Homo sapiens
tagaggatccgtgtccatcccccttcgtaggggagcggttacctaagccggagcgggggaagatgagagtgcacaaaatcaacaatgtgaacaaagcgctggactttattgccagcaaaggcgtcaagctggtctccatcggggcagaagagattgtggacggcaacgcaaagatgaccctgggaatgatctggaccatcatccttaggttcgccatccaggacatctccgtggaagagacctcggccaaggaagggctccttctctggtgccagagaaagacagccccgtataagaacgtcaatgtgcagaacttccacatcagctggaaggatggtcttgccttcaatgccctgatccaccggcacagaccagagctgattgagtatgacaagctgaggaaggacgaccctgtcaccaacctgaacaatgccttcgaagtggctgagaaatacctcgacatccccaagatgctggatgcagaggacatcgtgaacacggcccggcccgacgagaaggccataatgacctatgtgtccagcttctaccatgccttttcaggagcgcagaaggctgaaactgccgccaaccggatctgtaaggtgctggctgtcaaccaagagaacgagcacctgatggaggactacgagaagctggccagcgacctcctggagtggatccggcgcaccatcccctggctggaggaccgtgtgccccaaaagactatccaggagatgcagcagaagctggaggacttccgcgactaccggcgtgtgcacaagccgcccaaggtgcaggagaagtgccagctggagatcaacttcaacacgctgcagaccaagctgcgcctcagcaaccggcccgccttcatgccctccgagggcaagatggtctcggacatcaacaatggctggcagcacttggagcaggctgagaagggctacgaggagtggctgctgaatgagatccgcaggctggagcggctcgaccacctggcagagaagttccggcagaaggcctccatccacgaggcctggactgacgggaaggaagccatgctgaagcaccgggactacgagacggccacactatcggacatcaaagccctcattcgcaagcacgaggccttcgagagcgacctggctgcgcaccaggaccgcgtggagcagatcgccgccattgcccaggagctcaacgagctggattactacgactcccacaatgtcaacacccggtgccagaagatctgtgaccagtgggacgccctcggctctctgacacatagtcgcagggaagccctggagaaaacagagaagcagctggaggccatcgaccagctgcacctggaatacgccaagcgcgcggcccccttcaacaactggatggagagcgccatggaggacctccaggacatgttcatcgtccataccatcgaggagattgagggcctgatctcagcccatgaccagttcaagtccaccctgccggacgccgatagggagcgcgaggccatcctggccatccacaaggaggcccagaggatcgctgagagcaaccacatcaagctgtcgggcagcaacccctacaccaccgtcaccccgcaaatcatcaactccaagtgggagaaggtgcagcagctggtgccaaaacgggaccatgccctcctggaggagcagagcaagcagcagttgatggcctggctgcctggtggttgatggttttgctccccctaccttttttttttgagtttattctgattgattttttttcttggtttctggataaaccaccctctggggacaggataataaaacatgtaatatttttaagaaggaattcctgcagcatcatctttttttatttctcctgtgtctgtcctccaccttctaggagagccagggcagagctagcactgtcttaagctgtcaacgtggactagctcgtgtcatctgctcgagaggggctgtcgctgttcttgtttctgagtgaggagtacgcaggccagagtggtcacccggccgtgagcagtgagggccagagactagccccagacaggtggatgccagagagagtggcacccatgccaggcaaggcctagggaggtggtcttgctcagcaaccctgccctgagcagcaggtgcgcccatccggagatcctaggagaaggtggccacctccatccact

SEQ ID NO: 353068 - DNA, 2032 bp, Homo sapiens
tagaggatccgtgtccatcccccttcgtaggggagcggttacctaagccggagcgggggaagatgagagtgcacaaaatcaacaatgtgaacaaagcgctggactttattgccagcaaaggcgtcaagctggtctccatcggggcagaagagattgtggacggcaacgcaaagatgaccctgggaatgatctggaccatcatccttaggttcgccatccaggacatctccgtggaagagacctcggccaaggaagggctccttctctggtgccagagaaagacagccccgtataagaacgtcaatgtgcagaacttccacatcagctggaaggatggtcttgccttcaatgccctgatccaccggcacagaccagagctgattgagtatgacaagctgaggaaggacgaccctgtcaccaacctgaacaatgccttcgaagtggctgagaaatacctcgacatccccaagatgctggatgcagaggacatcgtgaacacggcccggcccgacgagaaggccataatgacctatgtgtccagcttctaccatgccttttcaggagcgcagaaggctgaaactgccgccaaccggatctgtaaggtgctggctgtcaaccaagagaacgagcacctgatggaggactacgagaagctggccagcgacctcctggagtggatccggcgcaccatcccctggctggaggaccgtgtgccccaaaagactatccaggagatgcagcagaagctggaggacttccgcgactaccggcgtgtgcacaagccgcccaaggtgcaggagaagtgccagctggagatcaacttcaacacgctgcagaccaagctgcgcctcagcaaccggcccgccttcatgccctccgagggcaagatggtctcggacatcaacaatggctggcagcacttggagcaggctgagaagggctacgaggagtggctgctgaatgagatccgcaggctggagcggctcgaccacctggcagagaagttccggcagaaggcctccatccacgaggcctggactgacgggaaggaagccatgctgaagcaccgggactacgagacggccacactatcggacatcaaagccctcattcgcaagcacgaggccttcgagagcgacctggctgcgcaccaggaccgcgtggagcagatcgccgccattgcccaggagctcaacgagctggattactacgactcccacaatgtcaacacccggtgccagaagatctgtgaccagtgggacgccctcggctctctgacacatagtcgcagggaagccctggagaaaacagagaagcagctggaggccatcgaccagctgcacctggaatacgccaagcgcgcggcccccttcaacaactggatggagagcgccatggaggacctccaggacatgttcatcgtccataccatcgaggagattgagggcctgatctcagcccatgaccagttcaagtccaccctgccggacgccgatagggagcgcgaggccatcctggccatccacaaggaggcccagaggatcgctgagagcaaccacatcaagctgtcgggcagcaaccctttttttttgagtttattctgattgattttttttcttggtttctggataaaccaccctctggggacaggataataaaacatgtaatatttttaagaaggaattcctgcagcatcatctttttttatttctcctgtgtctgtcctccaccttctaggagagccagggcagagctagcactgtcttaagctgtcaacgtggactagctcgtgtcatctgctcgagaggggctgtcgctgttcttgtttctgagtgaggagtacgcaggccagagtggtcacccggccgtgagcagtgagggccagagactagccccagacaggtggatgccagagagagtggcacccatgccaggcaaggcctagggaggtggtcttgctcagcaaccctgccctgagcagcaggtgcgcccatccggagatcctaggagaaggtggccacctccatccact

SEQ ID NO: 353069 - DNA, 931 bp, Homo sapiens
tagaggatccgtgtccatcccccttcgtaggggagcggttacctaagccggagcgggggaagatgagagtgcacaaaatcaacaatgtgaacaaagcgctggactttattgccagcaaaggcgtcaagctggtctccatcggggcagaagagattgtggacggcaacgcaaagatgaccctgggaatgatctggaccatcatccttaggttcgccatccaggacatctccgtggaagagacctcggccaaggaagggctccttctctggtgccagagaaagacagccccgtataagaacgtcaatgtgcagaacttccacatcagctggaaggatggtcttgccttcaatgccctgatccaccggcacagaccagagctgattgagtatgacaagctgaggaaggacgaccctgtcaccaacctgaacaatgccttcgaagtggctgagaaatacctcgacatccccaagatgctggatgcagaggacatcgtgaacacggcccggcccgacgagaaggccataatgacctatgtgtccagcttctaccatgccttttcaggagcgcagaaggctgaaactgccgccaaccggatctgtaaggtgctggctgtcaaccaagagaacgagcacctgatggaggactacgagaagctggccagcgacctcctggagtggatccggcgcaccatcccctggctggaggaccgtgtgccccaaaagactatccaggagatgcagcagaagctggaggacttccgcgactaccggcgtgtgcacaagccgcccaaggtgcaggagaagtgccagctggagatcaacttcaacacgctgcagaccaagctgcgcctcagcaaccggcccgccttcatgccctccgagggcaagatggtctcggacatcctgttggctggcgacacgggtcctctaga

SEQ ID NO: 353070 - DNA, 385 bp, Homo sapiens
tagaggatccgtgtccatcccccttcgtaggggagcggttacctaagccggagcgggggaagatgagagtgcacaaaatcaacaatgtgaacaaagcgctggactttattgccagcaaaggcgtcaagctggtctccatcggggcagaagagattgtggacggcaacgcaaagatgaccctgggaatgatctggaccatcatccttaggttcgccatccaggacatctccgtggaagagacctcggccaaggaagggctccttctctggtgccagagaaagacagccccgtataagaacgtcaatgtgcagaacttccacatcagctggaaggatggtcttgccttccatgccctggacaccccaacccctgaatggaggcccaa

SEQ ID NO: 353071 - DNA, 808 bp, Homo sapiens
tcatggatggcgggggcttctgtttgcgccgctgaggtgatcttgcttgtgccccgcgcgccagacaggtaccacagcgaacggccttcgccacgaatgttcccattagtccctaacgatcgtcggacgttcgaccactatcaatcctctcagactctccactggcagcacctgccgaccgccagcttctgcgcacgctcgtcctactgtcgtcatgtactaggaccctctgacgatggaggagatcgggcgcatctccattgagatgaacgggaccctggaggaccagctgagccacctgaagcagtatgaacgcagcatcgtggactacaagcccaacctggacctgctggagcagcagcaccagctcatccaggaggccctcatcttcgacaacaagcacaccaactataccatggaggtgcgcggctgccccgcccgctggcctttccaccagcatggccggcttcctcactggaaatggttcgggccagtgagaagatagctgtctgctgtctgttgtttttcactctgtttaaaaattattgaagagaccagcactttgggaggccaagtgggaggatggcttgagcccaggagttcaagaccagcctgggcaacatagcaagaccctgtctctacaaaaaatgaaaatattagccaggcatggtggtgcatgcctatagtcccagctccccaggaggttgaggtgggcagattgcttgagccagggaggcagaggttgaggtgagccgaggtcatgccaccacacttcggtctgggtgacagagccagactctgtctcaaa

SEQ ID NO: 353072 - DNA, 3668 bp, Homo sapiens
tagaggatccgtgtccatcccccttcgtaggggagcggttacctaagccggagcgggggaagatgagagtgcacaaaatcaacaatgtgaacaaagcgctggactttattgccagcaaaggcgtcaagctggtctccatcggggcagaagagattgtggacggcaacgcaaagatgaccctgggaatgatctggaccatcatccttaggttcgccatccaggacatctccgtggaagagacctcggccaaggaagggctccttctctggtgccagagaaagacagccccgtataagaacgtcaatgtgcagaacttccacatcagctggaaggatggtcttgccttcaatgccctgatccaccggcacagaccagagctgattgagtatgacaagctgaggaaggacgaccctgtcaccaacctgaacaatgccttcgaagtggctgagaaatacctcgacatccccaagatgctggatgcagaggacatcgtgaacacggcccggcccgacgagaaggccataatgacctatgtgtccagcttctaccatgccttttcaggagcgcagaaggctgaaactgccgccaaccggatctgtaaggtgctggctgtcaaccaagagaacgagcacctgatggaggactacgagaagctggccagcgacctcctggagtggatccggcgcaccatcccctggctggaggaccgtgtgccccaaaagactatccaggagatgcagcagaagctggaggacttccgcgactaccggcgtgtgcacaagccgcccaaggtgcaggagaagtgccagctggagatcaacttcaacacgctgcagaccaagctgcgcctcagcaaccggcccgccttcatgccctccgagggcaagatggtctcggacatcaacaatggctggcagcacttggagcaggctgagaagggctacgaggagtggctgctgaatgagatccgcaggctggagcggctcgaccacctggcagagaagttccggcagaaggcctccatccacgaggcctggactgacgggaaggaagccatgctgaagcaccgggactacgagacggccacactatcggacatcaaagccctcattcgcaagcacgaggccttcgagagcgacctggctgcgcaccaggaccgcgtggagcagatcgccgccattgcccaggagctcaacgagctggattactacgactcccacaatgtcaacacccggtgccagaagatctgtgaccagtgggacgccctcggctctctgacacatagtcgcagggaagccctggagaaaacagagaagcagctggaggccatcgaccagctgcacctggaatacgccaagcgcgcggcccccttcaacaactggatggagagcgccatggaggacctccaggacatgttcatcgtccataccatcgaggagattgagggcctgatctcagcccatgaccagttcaagtccaccctgccggacgccgatagggagcgcgaggccatcctggccatccacaaggaggcccagaggatcgctgagagcaaccacatcaagctgtcgggcagcaacccctacaccaccgtcaccccgcaaatcatcaactccaagtgggagaaggtgcagcagctggtgccaaaacgggaccatgccctcctggaggagcagagcaagcagcagtccaacgagcacctgcgccgccagttcgccagccaggccaatgttgtggggccctggatccagaccaagatggaggagatcgggcgcatctccattgagatgaacgggaccctggaggaccagctgagccacctgaagcagtatgaacgcagcatcgtggactacaagcccaacctggacctgctggagcagcagcaccagctcatccaggaggccctcatcttcgacaacaagcacaccaactataccatggagcacatccgcgtgggctgggagcagctgctcaccaccattgcccgcaccatcaacgaggtggagaaccagatcctcacccgcgacgccaagggcatcagccaggagcagatgcaggagttccgggcgtccttcaaccacttcgacaaggatcatggcggggcgctggggcccgaggagttcaaggcctgcctcatcagcctgggctacgacgtggagaacgaccggcagggtgaggccgagttcaaccgcatcatgagcctggtcgaccccaaccatagcggccttgtgaccttccaagccttcatcgacttcatgtcgcgggagaccaccgacacggacacggctgaccaggtcatcgcttccttcaaggtcttagcaggggacaagaacttcatcacagctgaggagctgcggagagagctgccccccgaccaggccgagtactgcatcgcccgcatggcgccataccagggccctgacgccgtgcccggtgccctcgactacaagtccttctccacggccttgtatggcgagagcgacctgtgaggccccagagacctgacccaacacccccgacggcctccaggaggggcctgggcagccccacagtcccattcctccactctgtatctatgcaaagcactctctgcagtcctccggggtgggtgggtgggcagggaggggctggggcaggctctctcctctctctctttgtgggttggccaggaggttcccccgaccaggttggggagacttggggccagcgcttctggtctggtaaatatgtatgatgtgttgtgcttttttaaccaaggaggggccagtggattcccacagcacaaccggtcccttccatgccctgggatgcctcaccacacccaggtctcttcctttgctctgaggtcccttcaaggcctccccaatccaggccaaagccccatgtgccttgtccaggaactgcctgggccatgcgaggggccagcagagggcgccaccaccacctgacggctggggacccacccagcccctctcccctctctgctccagactcacttgccattgccaggagatggccccaacaagcaccccgcttttgcagcagaggagctgagttggcagaccgggcccccctgaaccgcaccccatcccaccagccccggccttgctttgtctggcctcacgtgtctcagattttctaagaaccaaaaaaaaaaaagggaaaaaaaacacaaaacaacaaaaaccaaaaaaaaaaaaaatcacaaaaacaaaaaaactataaaaaagaaagaattaaaaactttcagagaattactatttactttattaacttacggatttattatataaatatatattcacctagcaacatatctctgccgtctctcctgctctcataatgaagacatagccgattctctgcccgggccccttgctgatgctcctccgggtctgcgtcgggcgtgggtctctggggaccctccagaggtggaggtgggctgatggcctggctgcctggtggttgatggttttgctccccctaccttttttttttgagtttattctgattgattttttttcttggtttctggataaaccaccctctggggacaggataataaaacatgtaatatttttaagaaggacccctaggttgaaatgggcacagaaatttcactttccttagctgcattctagtagcttggccaagttatctcgtaattc

SEQ ID NO: 353073 - DNA, 4018 bp, Homo sapiens
tagaggatccgtgtccatcccccttcgtaggggagcggttacctaagccggagcgggggaagatgagagtgcacaaaatcaacaatgtgaacaaagcgctggactttattgccagcaaaggcgtcaagctggtctccatcggggcagaagagattgtggacggcaacgcaaagatgaccctgggaatgatctggaccatcatccttaggttcgccatccaggacatctccgtggaagagacctcggccaaggaagggctccttctctggtgccagagaaagacagccccgtataagaacgtcaatgtgcagaacttccacatcagctggaaggatggtcttgccttcaatgccctgatccaccggcacagaccagagctgattgagtatgacaagctgaggaaggacgaccctgtcaccaacctgaacaatgccttcgaagtggctgagaaatacctcgacatccccaagatgctggatgcagaggacatcgtgaacacggcccggcccgacgagaaggccataatgacctatgtgtccagcttctaccatgccttttcaggagcgcagaaggctgaaactgccgccaaccggatctgtaaggtgctggctgtcaaccaagagaacgagcacctgatggaggactacgagaagctggccagcgacctcctggagtggatccggcgcaccatcccctggctggaggaccgtgtgccccaaaagactatccaggagatgcagcagaagctggaggacttccgcgactaccggcgtgtgcacaagccgcccaaggtgcaggagaagtgccagctggagatcaacttcaacacgctgcagaccaagctgcgcctcagcaaccggcccgccttcatgccctccgagggcaagatggtctcggacatcaacaatggctggcagcacttggagcaggctgagaagggctacgaggagtggctgctgaatgagatccgcaggctggagcggctcgaccacctggcagagaagttccggcagaaggcctccatccacgaggcctggactgacgggaaggaagccatgctgaagcaccgggactacgagacggccacactatcggacatcaaagccctcattcgcaagcacgaggccttcgagagcgacctggctgcgcaccaggaccgcgtggagcagatcgccgccattgcccaggagctcaacgagctggattactacgactcccacaatgtcaacacccggtgccagaagatctgtgaccagtgggacgccctcggctctctgacacatagtcgcagggaagccctggagaaaacagagaagcagctggaggccatcgaccagctgcacctggaatacgccaagcgcgcggcccccttcaacaactggatggagagcgccatggaggacctccaggacatgttcatcgtccataccatcgaggagattgaggttcgcaccccccggccccccatcttcccaagagcctctgtggggctgggccgccccctcactccagctcctcccctagggcctgatctcagcccatgaccagttcaagtccaccctgccggacgccgatagggagcgcgaggccatcctggccatccacaaggaggcccagaggatcgctgagagcaaccacatcaagctgtcgggcagcaacccctacaccaccgtcaccccgcaaatcatcaactccaagtgggagaaggtgcagcagctggtgccaaaacgggaccatgccctcctggaggagcagagcaagcagcagtccaacgagcacctgcgccgccagttcgccagccaggccaatgttgtggggccctggatccagaccaagatggaggagatcgggcgcatctccattgagatgaacgggaccctggaggaccagctgagccacctgaagcagtatgaacgcagcatcgtggactacaagcccaacctggacctgctggagcagcagcaccagctcatccaggaggccctcatcttcgacaacaagcacaccaactataccatggagcacatccgcgtgggctgggagcagctgctcaccaccattgcccgcaccatcaacgaggtggagaaccagatcctcacccgcgacgccaagggcatcagccaggagcagatgcaggagttccgggcgtccttcaaccacttcgacaaggatcatggcggggcgctggggcccgaggagttcaaggcctgcctcatcagcctgggctacgacgtggagaacgaccggcagggtgaggccgagttcaaccgcatcatgagcctggtcgaccccaaccatagcggccttgtgaccttccaagccttcatcgacttcatgtcgcgggagaccaccgacacggacacggctgaccaggtcatcgcttccttcaaggtcttagcaggggacaagaacttcatcacagctgaggagctgcggagagagctgccccccgaccaggccgagtactgcatcgcccgcatggcgccataccagggccctgacgccgtgcccggtgccctcgactacaagtccttctccacggccttgtatggcgagagcgacctgtgaggccccagagacctgacccaacacccccgacggcctccaggaggggcctgggcagccccacagtcccattcctccactctgtatctatgcaaagcactctctgcagtcctccggggtgggtgggtgggcagggaggggctggggcaggctctctcctctctctctttgtgggttggccaggaggttcccccgaccaggttggggagacttggggccagcgcttctggtctggtaaatatgtatgatgtgttgtgcttttttaaccaaggaggggccagtggattcccacagcacaaccggtcccttccatgccctgggatgcctcaccacacccaggtctcttcctttgctctgaggtcccttcaaggcctccccaatccaggccaaagccccatgtgccttgtccaggaactgcctgggccatgcgaggggccagcagagggcgccaccaccacctgacggctggggacccacccagcccctctcccctctctgctccagactcacttgccattgccaggagatggccccaacaagcaccccgcttttgcagcagaggagctgagttggcagaccgggcccccctgaaccgcaccccatcccaccagccccggccttgctttgtctggcctcacgtgtctcagattttctaagaaccaaaaaaaaaaaagggaaaaaaaacacaaaacaacaaaaaccaaaaaaaaaaaaaatcacaaaaacaaaaaaactataaaaaagaaagaattaaaaactttcagagaattactatttactttattaacttacggatttattatataaatatatattcacctagcaacatatctctgccgtctctcctgctctcataatgaagacatagccgattctctgcccgggccccttgctgatgctcctccgggtctgcgtcgggcgtgggtctctggggaccctccagaggtggaggtgggctgatggcctggctgcctggtggttgatggttttgctccccctaccttttttttttgagtttattctgattgattttttttcttggtttctggataaaccaccctctggggacaggataataaaacatgtaatatttttaagaaggaattcctgcagcatcatctttttttatttctcctgtgtctgtcctccaccttctaggagagccagggcagagctagcactgtcttaagctgtcaacgtggactagctcgtgtcatctgctcgagaggggctgtcgctgttcttgtttctgagtgaggagtacgcaggccagagtggtcacccggccgtgagcagtgagggccagagactagccccagacaggtggatgccagagagagtggcacccatgccaggcaaggcctagggaggtggtcttgctcagcaaccctgccctgagcagcaggtgcgcccatccggagatcctaggagaaggtggccacctccatccact

SEQ ID NO: 353074 - DNA, 3697 bp, Homo sapiens
tagaggatccgtgtccatcccccttcgtaggggagcggttacctaagccggagcgggggaagatgagagtgcacaaaatcaacaatgtgaacaaagcgctggactttattgccagcaaaggcgtcaagctggtctccatcggggcagaagagattgtggacggcaacgcaaagatgaccctgggaatgatctggaccatcatccttaggttcgccatccaggacatctccgtggaagagacctcggccaaggaagggctccttctctggtgccagagaaagacagccccgtataagaacgtcaatgtgcagaacttccacatcagctggaaggatggtcttgccttcaatgccctgatccaccggcacagaccagagctgattgagtatgacaagctgaggaaggacgaccctgtcaccaacctgaacaatgccttcgaagtggctgagaaatacctcgacatccccaagatgctggatgcagaggacatcgtgaacacggcccggcccgacgagaaggccataatgacctatgtgtccagcttctaccatgccttttcaggagcgcagaaggctgaaactgccgccaaccggatctgtaaggtgctggctgtcaaccaagagaacgagcacctgatggaggactacgagaagctggccagcgacctcctggagtggatccggcgcaccatcccctggctggaggaccgtgtgccccaaaagactatccaggagatgcagcagaagctggaggacttccgcgactaccggcgtgtgcacaagccgcccaaggtgcaggagaagtgccagctggagatcaacttcaacacgctgcagaccaagctgcgcctcagcaaccggcccgccttcatgccctccgagggcaagatggtctcggacatcaacaatggctggcagcacttggagcaggctgagaagggctacgaggagtggctgctgaatgagatccgcaggctggagcggctcgaccacctgccagaagatctgtgaccagtgggacgccctcggctctctgacacatagtcgcagggaagccctggagaaaacagagaagcagctggaggccatcgaccagctgcacctggaatacgccaagcgcgcggcccccttcaacaactggatggagagcgccatggaggacctccaggacatgttcatcgtccataccatcgaggagattgagggcctgatctcagcccatgaccagttcaagtccaccctgccggacgccgatagggagcgcgaggccatcctggccatccacaaggaggcccagaggatcgctgagagcaaccacatcaagctgtcgggcagcaacccctacaccaccgtcaccccgcaaatcatcaactccaagtgggagaaggtgcagcagctggtgccaaaacgggaccatgccctcctggaggagcagagcaagcagcagtccaacgagcacctgcgccgccagttcgccagccaggccaatgttgtggggccctggatccagaccaagatggaggagatcgggcgcatctccattgagatgaacgggaccctggaggaccagctgagccacctgaagcagtatgaacgcagcatcgtggactacaagcccaacctggacctgctggagcagcagcaccagctcatccaggaggccctcatcttcgacaacaagcacaccaactataccatggagcacatccgcgtgggctgggagcagctgctcaccaccattgcccgcaccatcaacgaggtggagaaccagatcctcacccgcgacgccaagggcatcagccaggagcagatgcaggagttccgggcgtccttcaaccacttcgacaaggatcatggcggggcgctggggcccgaggagttcaaggcctgcctcatcagcctgggctacgacgtggagaacgaccggcagggtgaggccgagttcaaccgcatcatgagcctggtcgaccccaaccatagcggccttgtgaccttccaagccttcatcgacttcatgtcgcgggagaccaccgacacggacacggctgaccaggtcatcgcttccttcaaggtcttagcaggggacaagaacttcatcacagctgaggagctgcggagagagctgccccccgaccaggccgagtactgcatcgcccgcatggcgccataccagggccctgacgccgtgcccggtgccctcgactacaagtccttctccacggccttgtatggcgagagcgacctgtgaggccccagagacctgacccaacacccccgacggcctccaggaggggcctgggcagccccacagtcccattcctccactctgtatctatgcaaagcactctctgcagtcctccggggtgggtgggtgggcagggaggggctggggcaggctctctcctctctctctttgtgggttggccaggaggttcccccgaccaggttggggagacttggggccagcgcttctggtctggtaaatatgtatgatgtgttgtgcttttttaaccaaggaggggccagtggattcccacagcacaaccggtcccttccatgccctgggatgcctcaccacacccaggtctcttcctttgctctgaggtcccttcaaggcctccccaatccaggccaaagccccatgtgccttgtccaggaactgcctgggccatgcgaggggccagcagagggcgccaccaccacctgacggctggggacccacccagcccctctcccctctctgctccagactcacttgccattgccaggagatggccccaacaagcaccccgcttttgcagcagaggagctgagttggcagaccgggcccccctgaaccgcaccccatcccaccagccccggccttgctttgtctggcctcacgtgtctcagattttctaagaaccaaaaaaaaaaaagggaaaaaaaacacaaaacaacaaaaaccaaaaaaaaaaaaaatcacaaaaacaaaaaaactataaaaaagaaagaattaaaaactttcagagaattactatttactttattaacttacggatttattatataaatatatattcacctagcaacatatctctgccgtctctcctgctctcataatgaagacatagccgattctctgcccgggccccttgctgatgctcctccgggtctgcgtcgggcgtgggtctctggggaccctccagaggtggaggtgggctgatggcctggctgcctggtggttgatggttttgctccccctaccttttttttttgagtttattctgattgattttttttcttggtttctggataaaccaccctctggggacaggataataaaacatgtaatatttttaagaaggaattcctgcagcatcatctttttttatttctcctgtgtctgtcctccaccttctaggagagccagggcagagctagcactgtcttaagctgtcaacgtggactagctcgtgtcatctgctcgagaggggctgtcgctgttcttgtttctgagtgaggagtacgcaggccagagtggtcacccggccgtgagcagtgagggccagagactagccccagacaggtggatgccagagagagtggcacccatgccaggcaaggcctagggaggtggtcttgctcagcaaccctgccctgagcagcaggtgcgcccatccggagatcctaggagaaggtggccacctccatccact

SEQ ID NO: 353075 - DNA, 3565 bp, Homo sapiens
tagaggatccgtgtccatcccccttcgtaggggagcggttacctaagccggagcgggggaagatgagagtgcacaaaatcaacaatgtgaacaaagcgctggactttattgccagcaaaggcgtcaagctggtctccatcggggcagaagagattgtggacggcaacgcaaagatgaccctgggaatgatctggaccatcatccttaggttcgccatccaggacatctccgtggaagagacctcggccaaggaagggctccttctctggtgccagagaaagacagccccgtataagaacgtcaatgtgcagaacttccacatcagctggaaggatggtcttgccttcaatgccctgatccaccggcacagaccagagctgattgagtatgacaagctgaggaaggacgaccctgtcaccaacctgaacaatgccttcgaagtggctgagaaatacctcgacatccccaagatgctggatgcagaggacatcgtgaacacggcccggcccgacgagaaggccataatgacctatgtgtccagcttctaccatgccttttcaggagcgcagaaggctgaaactgccgccaaccggatctgtaaggtgctggctgtcaaccaagagaacgagcacctgatggaggactacgagaagctggccagcgacctcctggagtggatccggcgcaccatcccctggctggaggaccgtgtgccccaaaagactatccaggagatgcagcagaagctggaggacttccgcgactaccggcgtgtgcacaagccgcccaaggtgcaggagaagtgccagctggagatcaacttcaacacgctgcagaccaagctgcgcctcagcaaccggcccgccttcatgccctccgagggcaagatggtctcggacatcaacaatggctggcagcacttggagcaggctgagaagggctacgaggagtggctgctgaatgagatccgcaggctggagcggctcgaccacctggcagagaagttccggcagaaggcctccatccacgaggcctggactgacgggaaggaagccatgctgaagcaccgggactacgagacggccacactatcggacatcaaagccctcattcgcaagcacgaggccttcgagagcgacctggctgcgcaccaggaccgcgtggagcagatcgccgccattgcccaggagctcaacgagctggattactacgactcccacaatgtcaacacccggtgccagaagatctgtgaccagtgggacgccctcggctctctgacacatagtcgcagggaagccctggagaaaacagagaagcagctggaggccatcgaccagctgcacctggaatacgccaagcgcgcggcccccttcaacaactggatggagagcgccatggaggacctccaggacatgttcatcgtccataccatcgaggagattgagggcctgatctcagcccatgaccagttcaagtccaccctgccggacgccgatagggagcgcgaggccatcctggccatccacaaggaggcccagaggatcgctgagagcaaccacatcaagctgtcgggcagcaacccctacaccaccgtcaccccgcaaatcatcaactccaagtgggagaaggtgcagcagctggtgccaaaacgggaccatgccctcctggaggagcagagcaagcagcagtccaacgagcacctgcgccgccagttcgccagccaggccaatgttgtggggccctggatccagaccaagatggaggagatcgggcgcatctccattgagatgaacgggaccctggaggaccagctgagccacctgaagcagtatgaacgcagcatcgtggactacaagcccaacctggacctgctggagcagcagcaccagctcatccaggaggccctcatcttcgacaacaagcacaccaactataccatggagcacatccgcgtgggctgggagcagctgctcaccaccattgcccgcaccatcaacgaggtggagaaccagatcctcacccgcgacgccaagggcatcagccaggagcagatgcaggagttccgggcgtccttcaaccacttcgacaaggatcatggcggggcgctggggcccgaggagttcaaggcctgcctcatcagcctgggctacgacgtggagaacgaccggcagggtgaggccgagttcaaccgcatcatgagcctggtcgaccccaaccatagcggccttgtgaccttccaagccttcatcgacttcatgtcgcgggagaccaccgacacggacacggctgaccaggtcatcgcttccttcaaggtcttagcaggggacaagaacttcatcacagctgaggagctgcggagagagctgccccccgaccaggccgagtactgcatcgcccgcatggcgccataccagggccctgacgccgtgcccggtgccctcgactacaagtccttctccacggccttgtatggcgagagcgacctgtgaggccccagagacctgacccaacacccccgacggcctccaggaggggcctgggcagccccacagtcccattcctccactctgtatctatgcaaagcactctccagcccctctcccctctctgctccagactcacttgccattgccaggagatggccccaacaagcaccccgcttttgcagcagaggagctgagttggcagaccgggcccccctgaaccgcaccccatcccaccagccccggccttgctttgtctggcctcacgtgtctcagattttctaagaaccaaaaaaaaaaaagggaaaaaaaacacaaaacaacaaaaaccaaaaaaaaaaaaaatcacaaaaacaaaaaaactataaaaaagaaagaattaaaaactttcagagaattactatttactttattaacttacggatttattatataaatatatattcacctagcaacatatctctgccgtctctcctgctctcataatgaagacatagccgattctctgcccgggccccttgctgatgctcctccgggtctgcgtcgggcgtgggtctctggggaccctccagaggtggaggtgggctgatggcctggctgcctggtggttgatggttttgctccccctaccttttttttttgagtttattctgattgattttttttcttggtttctggataaaccaccctctggggacaggataataaaacatgtaatatttttaagaaggaattcctgcagcatcatctttttttatttctcctgtgtctgtcctccaccttctaggagagccagggcagagctagcactgtcttaagctgtcaacgtggactagctcgtgtcatctgctcgagaggggctgtcgctgttcttgtttctgagtgaggagtacgcaggccagagtggtcacccggccgtgagcagtgagggccagagactagccccagacaggtggatgccagagagagtggcacccatgccaggcaaggcctagggaggtggtcttgctcagcaaccctgccctgagcagcaggtgcgcccatccggagatcctaggagaaggtggccacctccatccact

SEQ ID NO: 353076 - DNA, 3711 bp, Homo sapiens
tagaggatccgtgtccatcccccttcgtaggggagcggttacctaagccggagcgggggaagatgagagtgcacaaaatcaacaatgtgaacaaagcgctggactttattgccagcaaaggcgtcaagctggtctccatcggggcagaagagattgtggacggcaacgcaaagatgaccctgggaatgatctggaccatcatccttaggttcgccatccaggacatctccgtggaagagacctcggccaaggaagggctccttctctggtgccagagaaagacagccccgtataagaacgtcaatgtgcagaacttccacatcagctggaaggatggtcttgccttcaatgccctgatccaccggcacagaccagagctgattgagtatgacaagctgaggaaggacgaccctgtcaccaacctgaacaatgccttcgaagtggctgagaaatacctcgacatccccaagatgctggatgcagaggacatcgtgaacacggcccggcccgacgagaaggccataatgacctatgtgtccagcttctaccatgccttttcaggagcgcagaaggctgaaactgccgccaaccggatctgtaaggtgctggctgtcaaccaagagaacgagcacctgatggaggactacgagaagctggccagcgacctcctggagtggatccggcgcaccatcccctggctggaggaccgtgtgccccaaaagactatccaggagatgcagcagaagctggaggacttccgcgactaccggcgtgtgcacaagccgcccaaggtgcaggagaagtgccagctggagatcaacttcaacacgctgcagaccaagctgcgcctcagcaaccggcccgccttcatgccctccgagggcaagatggtctcggacatcaacaatggctggcagcacttggagcaggctgagaagggctacgaggagtggctgctgaatgagatccgcaggctggagcggctcgaccacctggcagagaagttccggcagaaggcctccatccacgaggcctggactgacgggaaggaagccatgctgaagcaccgggactacgagacggccacactatcggacatcaaagccctcattcgcaagcacgaggccttcgagagcgacctggctgcgcaccaggaccgcgtggagcagatcgccgccattgcccaggagctcaacgagctggattactacgactcccacaatgtcaacacccggtgccagaagatctgtgaccagtgggacgccctcggctctctgacacatagtcgcagggaagccctggagaaaacagagaagcagctggaggccatcgaccagctgcacctggaatacgccaagcgcgcggcccccttcaacaactggatggagagcgccatggaggacctccaggacatgttcatcgtccataccatcgaggagattgagggcctgatctcagcccatgaccagttcaagtccaccctgccggacgccgatagggagcgcgaggccatcctggccatccacaaggaggcccagaggatcgctgagagcaaccacatcaagctgtcgggcagcaacccctacaccaccgtcaccccgcaaatcatcaactccaagtgggagaaggtgcagcagctggtgccaaaacgggaccatgccctcctggaggagcagagcaagcagcagtccaacgagcacctgcgccgccagttcgccagccaggccaatgttgtggggccctggatccagaccaagatggaggagatcgggcgcatctccattgagatgaacgggaccctggaggaccagctgagccacctgaagcagtatgaacgcagcatcgtggactacaagcccaacctggacctgctggagcagcagcaccagctcatccaggaggccctcatcttcgacaacaagcacaccaactataccatggagcacatccgcgtgggctgggagcagctgctcaccaccattgcccgcaccatcaacgaggtggagaaccagatcctcacccgcgacgccaagggcatcagccaggagcagatgcaggagttccgggcgtccttcaaccacttcgacaaggatcatggcggggcgctggggcccgaggagttcaaggcctgcctcatcagcctgggctacgacgtggagaacgaccggcagggtgaggccgagttcaaccgcatcatgagcctggtcgaccccaaccatagcggccttgtgaccttccaagccttcatcgacttcatgtcgcgggagaccaccgacacggacacggctgaccaggtcatcgcttccttcaaggtcttagcaggggacaagaacttcatcacagctgaggagctgcggagagagctgccccccgaccaggccgagtactgcatcgcccgcatggcgccataccagggccctgacgccgtgcccggtgccctcgactacaagtccttctccacggccttgtatggcgagagcgacctgtgaggccccagagacctgacccaacacccccgacggcctccaggaggggcctgggcagccccacagtcccattcctccactctgtatctatgcaaagcactctctgcagtcctccggggtgggtgggtgggcagggaggggctggggcaggctctctcctctctctctttgtgggttggccaggaggttcccccgaccaggttggggagacttggggccagcgcttctggtctggtaaatatgtatgatgtgttgtgcttttttaaccaaggaggggccagtggattcccacagcacaaccggtcccttccatgccctgggatgcctcaccacacccaggtctcttcctttgctctgaggtcccttcaaggcctccccaatccaggccaaagccccatgtgccttgtccaggaactgcctgggccatgcgaggggccagcagagggcgccaccaccacctgacggctggggacccacccagcccctctcccctctctgctccagactcacttgccattgccaggagatggccccaacaagcaccccgcttttgcagcagaggagctgagttggcagaccgggcccccctgaaccgacccctctctgctccagactcacttgccattgccagtgagatggcccaacaagcaaccccgcttacgcagcagaggagctgcgttgtgcagaccgggccccctgataccgtcgccccattccatacagcacccggctacaagccctctaatcctggctgcaccgtgtcatcagatatctcatcacgcaaccaaccaaacagacaagctaaagaaagtccgttagagcaacacagacacaccgagacacaactaacacgtcacatcagtaacatcatcaacctatatacaacgaggtgatttcaatcgtcgatcacagcacattcccatctctcctgcatcaacacacgcaaatatcaacaacgacttaatagacccgacaacatccagacggcttgccgggagacctaagaagaccacaccctccgccggcaccctgcagctaccacgcattcgtaacgagagtccccacggcacccctaagatcaagacatgcatcgatgcatgcgtagaacgccccactatacgaaatccactcacaacccgaggcggcagaccgcgccagacactcgcctcgagacaacaatcgcagtggccagatgccgcaagcccagctgaagcaatacacacct

SEQ ID NO: 353077 - DNA, 3502 bp, Homo sapiens
tagaggatccgtgtccatcccccttcgtaggggagcggttacctaagccggagcgggggaagatgagagtgcacaaaatcaacaatgtgaacaaagcgctggactttattgccagcaaaggcgtcaagctggtctccatcggggcagaagagattgtggacggcaacgcaaagatgaccctgggaatgatctggaccatcatccttaggttcgccatccaggacatctccgtggaagagacctcggccaaggaagggctccttctctggtgccagagaaagacagccccgtataagaacgtcaatgtgcagaacttccacatcagctggaaggatggtcttgccttcaatgccctgatccaccggcacagaccagagctgattgagtatgacaagctgaggaaggacgaccctgtcaccaacctgaacaatgccttcgaagtggctgagaaatacctcgacatccccaagatgctggatgcagaggacatcgtgaacacggcccggcccgacgagaaggccataatgacctatgtgtccagcttctaccatgccttttcaggagcgcagaaggctgaaactgccgccaaccggatctgtaaggtgctggctgtcaaccaagagaacgagcacctgatggaggactacgagaagctggccagcgacctcctggagtggatccggcgcaccatcccctggctggaggaccgtgtgccccaaaagactatccaggagatgcagcagaagctggaggacttccgcgactaccggcgtgtgcacaagccgcccaaggtgcaggagaagtgccagctggagatcaacttcaacacgctgcagaccaagctgcgcctcagcaaccggcccgccttcatgccctccgagggcaagatggtctcggacatcaacaatggctggcagcacttggagcaggctgagaagggctacgaggagtggctgctgaatgagatccgcaggctggagcggctcgaccacctggcagagaagttccggcagaaggcctccatccacgaggcctggactgacgggaaggaagccatgctgaagcaccgggactacgagacggccacactatcggacatcaaagccctcattcgcaagcacgaggccttcgagagcgacctggctgcgcaccaggaccgcgtggagcagatcgccgccattgcccaggagctcaacgagctggattactacgactcccacaatgtcaacacccggtgccagaagatctgtgaccagtgggacgccctcggctctctgacacatagtcgcagggaagccctggagaaaacagagaagcagctggaggccatcgaccagctgcacctggaatacgccaagcgcgcggcccccttcaacaactggatggagagcgccatggaggacctccaggacatgttcatcgtccataccatcgaggagattgagggcctgatctcagcccatgaccagttcaagtccaccctgccggacgccgatagggagcgcgaggccatcctggccatccacaaggaggcccagaggatcgctgagagcaaccacatcaagctgtcgggcagcaacccctacaccaccgtcaccccgcaaatcatcaactccaagtgggagaaggtgcagcagctggtgccaaaacgggaccatgccctcctggaggagcagagcaagcagcagtccaacgagcacctgcgccgccagttcgccagccaggccaatgttgtggggccctggatccagaccaagatggaggagatcgggcgcatctccattgagatgaacgggaccctggaggaccagctgagccacctgaagcagtatgaacgcagcatcgtggactacaagcccaacctggacctgctggagcagcagcaccagctcatccaggaggccctcatcttcgacaacaagcacaccaactataccatggagcacatccgcgtgggctgggagcagctgctcaccaccattgcccgcaccatcaacgaggtggagaaccagatcctcacccgcgacgccaagggcatcagccaggagcagatgcaggagttccgggcgtccttcaaccacttcgacaaggatcatggcggggcgctggggcccgaggagttcaaggcctgcctcatcagcctgggctacgacgtggagaacgaccggcagggtgaggccgagttcaaccgcatcatgagcctggtcgaccccaaccatagcggccttgtgaccttccaagccttcatcgacttcatgtcgcgggagaccaccgacacggacacggctgaccaggtcatcgcttccttcaaggtcttagcaggggacaagaacttcatcacagctgaggagctgcggagagagctgccccccgaccaggccgagtactgcatcgcccgcatggcgccataccagggccctgacgccgtgcccggtgccctcgactacaagtccttctccacggccttgtatggcgagagcgacctgtgaggccccagagacctgacccaacacccccgacggcctccaggaggggcctgggcagccccacagtcccattcctccattgccaggagatggccccaacaagcaccccgcttttgcagcagaggagctgagttggcagaccgggcccccctgaaccgcaccccatcccaccagccccggccttgctttgtctggcctcacgtgtctcagattttctaagaaccaaaaaaaaaaaagggaaaaaaaacacaaaacaacaaaaaccaaaaaaaaaaaaaatcacaaaaacaaaaaaactataaaaaagaaagaattaaaaactttcagagaattactatttactttattaacttacggatttattatataaatatatattcacctagcaacatatctctgccgtctctcctgctctcataatgaagacatagccgattctctgcccgggccccttgctgatgctcctccgggtctgcgtcgggcgtgggtctctggggaccctccagaggtggaggtgggctgatggcctggctgcctggtggttgatggttttgctccccctaccttttttttttgagtttattctgattgattttttttcttggtttctggataaaccaccctctggggacaggataataaaacatgtaatatttttaagaaggaattcctgcagcatcatctttttttatttctcctgtgtctgtcctccaccttctaggagagccagggcagagctagcactgtcttaagctgtcaacgtggactagctcgtgtcatctgctcgagaggggctgtcgctgttcttgtttctgagtgaggagtacgcaggccagagtggtcacccggccgtgagcagtgagggccagagactagccccagacaggtggatgccagagagagtggcacccatgccaggcaaggcctagggaggtggtcttgctcagcaaccctgccctgagcagcaggtgcgcccatccggagatcctaggagaaggtggccacctccatccact

SEQ ID NO: 353078 - DNA, 3361 bp, Homo sapiens
tagaggatccgtgtccatcccccttcgtaggggagcggttacctaagccggagcgggggaagatgagagtgcacaaaatcaacaatgtgaacaaagcgctggactttattgccagcaaaggcgtcaagctggtctccatcggggcagaagagattgtggacggcaacgcaaagatgaccctgggaatgatctggaccatcatccttaggttcgccatccaggacatctccgtggaagagacctcggccaaggaagggctccttctctggtgccagagaaagacagccccgtataagaacgtcaatgtgcagaacttccacatcagctggaaggatggtcttgccttcaatgccctgatccaccggcacagaccagagctgattgagtatgacaagctgaggaaggacgaccctgtcaccaacctgaacaatgccttcgaagtggctgagaaatacctcgacatccccaagatgctggatgcagaggacatcgtgaacacggcccggcccgacgagaaggccataatgacctatgtgtccagcttctaccatgccttttcaggagcgcagaaggctgaaactgccgccaaccggatctgtaaggtgctggctgtcaaccaagagaacgagcacctgatggaggactacgagaagctggccagcgacctcctggagtggatccggcgcaccatcccctggctggaggaccgtgtgccccaaaagactatccaggagatgcagcagaagctggaggacttccgcgactaccggcgtgtgcacaagccgcccaaggtgcaggagaagtgccagctggagatcaacttcaacacgctgcagaccaagctgcgcctcagcaaccggcccgccttcatgccctccgagggcaagatggtctcggacatcaacaatggctggcagcacttggagcaggctgagaagggctacgaggagtggctgctgaatgagatccgcaggctggagcggctcgaccacctggcagagaagttccggcagaaggcctccatccacgaggcctggactgacgggaaggaagccatgctgaagcaccgggactacgagacggccacactatcggacatcaaagccctcattcgcaagcacgaggccttcgagagcgacctggctgcgcaccaggaccgcgtggagcagatcgccgccattgcccaggagctcaacgagctggattactacgactcccacaatgtcaacacccggtgccagaagatctgtgaccagtgggacgccctcggctctctgacacatagtcgcagggaagccctggagaaaacagagaagcagctggaggccatcgaccagctgcacctggaatacgccaagcgcgcggcccccttcaacaactggatggagagcgccatggaggacctccaggacatgttcatcgtccataccatcgaggagattgagggcctgatctcagcccatgaccagttcaagtccaccctgccggacgccgatagggagcgcgaggccatcctggccatccacaaggaggcccagaggatcgctgagagcaaccacatcaagctgtcgggcagcaacccctacaccaccgtcaccccgcaaatcatcaactccaagtgggagaaggtgcagcagctggtgccaaaacgggaccatgccctcctggaggagcagagcaagcagcagtccaacgagcacctgcgccgccagttcgccagccaggccaatgttgtggggccctggatccagaccaagatggaggagatcgggcgcatctccattgagatgaacgggaccctggaggaccagctgagccacctgaagcagtatgaacgcagcatcgtggactacaagcccaacctggacctgctggagcagcagcaccagctcatccaggaggccctcatcttcgacaacaagcacaccaactataccatggagcacatccgcgtgggctgggagcagctgctcaccaccattgcccgcaccatcaacgaggtggagaaccagatcctcacccgcgacgccaagggcatcagccaggagcagatgcaggagttccgggcgtccttcaaccacttcgacaaggatcatggcggggcgctggggcccgaggagttcaaggcctgcctcatcagcctgggctacgacgtggagaacgaccggcagggtgaggccgagttcaaccgcatcatgagcctggtcgaccccaaccatagcggccttgtgaccttccaagccttcatcgacttcatgtcgcgggagaccaccgacacggacacggctgaccaggtcatcgcttccttcaaggtcttagcaggggacaagaacttcatcacagctgaggagctgcggagagagctgccccccgaccaggccgagtactgcatcgcccgcatggcgccataccagggccctgacgccgtgcccggtgccctcgactacaagtccttctccacggccttgtatggcgagagcgacctgtgaggccccagagacctcaccccatcccaccagccccggccttgctttgtctggcctcacgtgtctcagattttctaagaaccaaaaaaaaaaaagggaaaaaaaacacaaaacaacaaaaaccaaaaaaaaaaaaaatcacaaaaacaaaaaaactataaaaaagaaagaattaaaaactttcagagaattactatttactttattaacttacggatttattatataaatatatattcacctagcaacatatctctgccgtctctcctgctctcataatgaagacatagccgattctctgcccgggccccttgctgatgctcctccgggtctgcgtcgggcgtgggtctctggggaccctccagaggtggaggtgggctgatggcctggctgcctggtggttgatggttttgctccccctaccttttttttttgagtttattctgattgattttttttcttggtttctggataaaccaccctctggggacaggataataaaacatgtaatatttttaagaaggaattcctgcagcatcatctttttttatttctcctgtgtctgtcctccaccttctaggagagccagggcagagctagcactgtcttaagctgtcaacgtggactagctcgtgtcatctgctcgagaggggctgtcgctgttcttgtttctgagtgaggagtacgcaggccagagtggtcacccggccgtgagcagtgagggccagagactagccccagacaggtggatgccagagagagtggcacccatgccaggcaaggcctagggaggtggtcttgctcagcaaccctgccctgagcagcaggtgcgcccatccggagatcctaggagaaggtggccacctccatccact

SEQ ID NO: 353079 - DNA, 3083 bp, Homo sapiens
tagaggatccgtgtccatcccccttcgtaggggagcggttacctaagccggagcgggggaagatgagagtgcacaaaatcaacaatgtgaacaaagcgctggactttattgccagcaaaggcgtcaagctggtctccatcggggcagaagagattgtggacggcaacgcaaagatgaccctgggaatgatctggaccatcatccttaggttcgccatccaggacatctccgtggaagagacctcggccaaggaagggctccttctctggtgccagagaaagacagccccgtataagaacgtcaatgtgcagaacttccacatcagctggaaggatggtcttgccttcaatgccctgatccaccggcacagaccagagctgattgagtatgacaagctgaggaaggacgaccctgtcaccaacctgaacaatgccttcgaagtggctgagaaatacctcgacatccccaagatgctggatgcagaggacatcgtgaacacggcccggcccgacgagaaggccataatgacctatgtgtccagcttctaccatgccttttcaggagcgcagaaggctgaaactgccgccaaccggatctgtaaggtgctggctgtcaaccaagagaacgagcacctgatggaggactacgagaagctggccagcgacctcctggagtggatccggcgcaccatcccctggctggaggaccgtgtgccccaaaagactatccaggagatgcagcagaagctggaggacttccgcgactaccggcgtgtgcacaagccgcccaaggtgcaggagaagtgccagctggagatcaacttcaacacgctgcagaccaagctgcgcctcagcaaccggcccgccttcatgccctccgagggcaagatggtctcggacatcaacaatggctggcagcacttggagcaggctgagaagggctacgaggagtggctgctgaatgagatccgcaggctggagcggctcgaccacctggcagagaagttccggcagaaggcctccatccacgaggcctggactgacgggaaggaagccatgctgaagcaccgggactacgagacggccacactatcggacatcaaagccctcattcgcaagcacgaggccttcgagagcgacctggctgcgcaccaggaccgcgtggagcagatcgccgccattgcccaggagctcaacgagctggattactacgactcccacaatgtcaacacccggtgccagaagatctgtgaccagtgggacgccctcggctctctgacacatagtcgcagggaagccctggagaaaacagagaagcagctggaggccatcgaccagctgcacctggaatacgccaagcgcgcggcccccttcaacaactggatggagagcgccatggaggacctccaggacatgttcatcgtccataccatcgaggagattgagggcctgatctcagcccatgaccagttcaagtccaccctgccggacgccgatagggagcgcgaggccatcctggccatccacaaggaggcccagaggatcgctgagagcaaccacatcaagctgtcgggcagcaacccctacaccaccgtcaccccgcaaatcatcaactccaagtgggagaaggtgcagcagctggtgccaaaacgggaccatgccctcctggaggagcagagcaagcagcagtccaacgagcacctgcgccgccagttcgccagccaggccaatgttgtggggccctggatccagaccaagatggaggagatcgggcgcatctccattgagatgaacgggaccctggaggaccagctgagccacctgaagcagtatgaacgcagcatcgtggactacaagcccaacctggacctgctggagcagcagcaccagctcatccaggaggccctcatcttcgacaacaagcacaccaactataccatggagcacatccgcgtgggctgggagcagctgctcaccaccattgcccgcaccatcaacgaggtggagaaccagatcctcacccgcgacgccaagggcatcagccaggagcagatgcaggagttccgggcgtccttcaaccacttcgacaaggatcatggcggggcgctggggcccgaggagttcaaggcctgcctcatcagcctgggctacgacgtggagaacgaccggcagggtgaggccgagttcaaccgcatcatgagcctggtcgaccccaaccatagcggccaccccatcccaccagccccggccttgctttgtctggcctcacgtgtctcagattttctaagaaccaaaaaaaaaaaagggaaaaaaaacacaaaacaacaaaaaccaaaaaaaaaaaaaatcacaaaaacaaaaaaactataaaaaagaaagaattaaaaactttcagagaattactatttactttattaacttacggatttattatataaatatatattcacctagcaacatatctctgccgtctctcctgctctcataatgaagacatagccgattctctgcccgggccccttgctgatgctcctccgggtctgcgtcgggcgtgggtctctggggaccctccagaggtggaggtgggctgatggcctggctgcctggtggttgatggttttgctccccctaccttttttttttgagtttattctgattgattttttttcttggtttctggataaaccaccctctggggacaggataataaaacatgtaatatttttaagaaggaattcctgcagcatcatctttttttatttctcctgtgtctgtcctccaccttctaggagagccagggcagagctagcactgtcttaagctgtcaacgtggactagctcgtgtcatctgctcgagaggggctgtcgctgttcttgtttctgagtgaggagtacgcaggccagagtggtcacccggccgtgagcagtgagggccagagactagccccagacaggtggatgccagagagagtggcacccatgccaggcaaggcctagggaggtggtcttgctcagcaaccctgccctgagcagcaggtgcgcccatccggagatcctaggagaaggtggccacctccatccact

SEQ ID NO: 353080 - DNA, 3007 bp, Homo sapiens
tagaggatccgtgtccatcccccttcgtaggggagcggttacctaagccggagcgggggaagatgagagtgcacaaaatcaacaatgtgaacaaagcgctggactttattgccagcaaaggcgtcaagctggtctccatcggggcagaagagattgtggacggcaacgcaaagatgaccctgggaatgatctggaccatcatccttaggttcgccatccaggacatctccgtggaagagacctcggccaaggaagggctccttctctggtgccagagaaagacagccccgtataagaacgtcaatgtgcagaacttccacatcagctggaaggatggtcttgccttcaatgccctgatccaccggcacagaccagagctgattgagtatgacaagctgaggaaggacgaccctgtcaccaacctgaacaatgccttcgaagtggctgagaaatacctcgacatccccaagatgctggatgcagaggacatcgtgaacacggcccggcccgacgagaaggccataatgacctatgtgtccagcttctaccatgccttttcaggagcgcagaaggctgaaactgccgccaaccggatctgtaaggtgctggctgtcaaccaagagaacgagcacctgatggaggactacgagaagctggccagcgacctcctggagtggatccggcgcaccatcccctggctggaggaccgtgtgccccaaaagactatccaggagatgcagcagaagctggaggacttccgcgactaccggcgtgtgcacaagccgcccaaggtgcaggagaagtgccagctggagatcaacttcaacacgctgcagaccaagctgcgcctcagcaaccggcccgccttcatgccctccgagggcaagatggtctcggacatcaacaatggctggcagcacttggagcaggctgagaagggctacgaggagtggctgctgaatgagatccgcaggctggagcggctcgaccacctggcagagaagttccggcagaaggcctccatccacgaggcctggactgacgggaaggaagccatgctgaagcaccgggactacgagacggccacactatcggacatcaaagccctcattcgcaagcacgaggccttcgagagcgacctggctgcgcaccaggaccgcgtggagcagatcgccgccattgcccaggagctcaacgagctggattactacgactcccacaatgtcaacacccggtgccagaagatctgtgaccagtgggacgccctcggctctctgacacatagtcgcagggaagccctggagaaaacagagaagcagctggaggccatcgaccagctgcacctggaatacgccaagcgcgcggcccccttcaacaactggatggagagcgccatggaggacctccaggacatgttcatcgtccataccatcgaggagattgagggcctgatctcagcccatgaccagttcaagtccaccctgccggacgccgatagggagcgcgaggccatcctggccatccacaaggaggcccagaggatcgctgagagcaaccacatcaagctgtcgggcagcaacccctacaccaccgtcaccccgcaaatcatcaactccaagtgggagaaggtgcagcagctggtgccaaaacgggaccatgccctcctggaggagcagagcaagcagcagtccaacgagcacctgcgccgccagttcgccagccaggccaatgttgtggggccctggatccagaccaagatggaggagatcgggcgcatctccattgagatgaacgggaccctggaggaccagctgagccacctgaagcagtatgaacgcagcatcgtggactacaagcccaacctggacctgctggagcagcagcaccagctcatccaggaggccctcatcttcgacaacaagcacaccaactataccatggagcacatccgcgtgggctgggagcagctgctcaccaccattgcccgcaccatcaacgaggtggagaaccagatcctcacccgcgacgccaagggcatcagccaggagcagatgcaggagttccgggcgtccttcaaccacttcgacaaggatcatggcggggcgctggggcccgaggagttcaaggcctgcctcatcagcctgggctacgacgtggagaacgaccggcagggtgaggccgagttcaaccgcatcatgagcctggtcgaccccaaccatagcggccttgtgaccttccaagccttcatcgacttcatgtcgcgggagaccaccgacacggacacggctgaccaggtcatcgcttccttcaaggtcttagcaggggacaagaacttcatcacagctgaggagctgcggagagagctgccccccgaccaggccgagtactgcatcgcccgcatggcgccataccagggccctgacgccgtgcccggtgccctcgactacaagtccttctccacggccttgtatggcgtgggtctctggggaccctccagaggtggaggtgggctgatggcctggctgcctggtggttgatggttttgctccccctaccttttttttttgagtttattctgattgattttttttcttggtttctggataaaccaccctctggggacaggataataaaacatgtaatatttttaagaaggaattcctgcagcatcatctttttttatttctcctgtgtctgtcctccaccttctaggagagccagggcagagctagcactgtcttaagctgtcaacgtggactagctcgtgtcatctgctcgagaggggctgtcgctgttcttgtttctgagtgaggagtacgcaggccagagtggtcacccggccgtgagcagtgagggccagagactagccccagacaggtggatgccagagagagtggcacccatgccaggcaaggcctagggaggtggtcttgctcagcaaccctgccctgagcagcaggtgcgcccatccggagatcctaggagaaggtggccacctccatccact

SEQ ID NO: 353081 - DNA, 2400 bp, Homo sapiens
tagaggatccgtgtccatcccccttcgtaggggagcggttacctaagccggagcgggggaagatgagagtgcacaaaatcaacaatgtgaacaaagcgctggactttattgccagcaaaggcgtcaagctggtctccatcggggcagaagagattgtggacggcaacgcaaagatgaccctgggaatgatctggaccatcatccttaggttcgccatccaggacatctccgtggaagagacctcggccaaggaagggctccttctctggtgccagagaaagacagccccgtataagaacgtcaatgtgcagaacttccacatcagctggaaggatggtcttgccttcaatgccctgatccaccggcacagaccagagctgattgagtatgacaagctgaggaaggacgaccctgtcaccaacctgaacaatgccttcgaagtggctgagaaatacctcgacatccccaagatgctggatgcagaggacatcgtgaacacggcccggcccgacgagaaggccataatgacctatgtgtccagcttctaccatgccttttcaggagcgcagaaggctgaaactgccgccaaccggatctgtaaggtgctggctgtcaaccaagagaacgagcacctgatggaggactacgagaagctggccagcgacctcctggagtggatccggcgcaccatcccctggctggaggaccgtgtgccccaaaagactatccaggagatgcagcagaagctggaggacttccgcgactaccggcgtgtgcacaagccgcccaaggtgcaggagaagtgccagctggagatcaacttcaacacgctgcagaccaagctgcgcctcagcaaccggcccgccttcatgccctccgagggcaagatggtctcggacatcaacaatggctggcagcacttggagcaggctgagaagggctacgaggagtggctgctgaatgagatccgcaggctggagcggctcgaccacctggcagagaagttccggcagaaggcctccatccacgaggcctggactgacgggaaggaagccatgctgaagcaccgggactacgagacggccacactatcggacatcaaagccctcattcgcaagcacgaggccttcgagagcgacctggctgcgcaccaggaccgcgtggagcagatcgccgccattgcccaggagctcaacgagctggattactacgactcccacaatgtcaacacccggtgccagaagatctgtgaccagtgggacgccctcggctctctgacacatagtcgcagggaagccctggagaaaacagagaagcagctggaggccatcgaccagctgcacctggaatacgccaagcgcgcggcccccttcaacaactggatggagagcgccatggaggacctccaggacatgttcatcgtccataccatcgaggagattgagggcctgatctcagcccatgaccagttcaagtccaccctgccggacgccgatagggagcgcgaggccatcctggccatccacaaggaggcccagaggatcgctgagagcaaccacatcaagctgtcgggcagcaacccctacaccaccgtcaccccgcaaatcatcaactccaagtgggagaaggtgcagcagctggtgccaaaacgggaccatgccctcctggaggagcagagcaagcagcagtccaacgagcacctgcgccgccagttcgccagccaggccaatgttgtggggccctggatccagaccaagatggaggagatcgggcgcatctccattgagatgaacgggaccctggaggaccagctgagccacctgaagcagtatgaacgcagcatcgtggactacaagcccaacctggacctgctggagcagcagcaccagctcatccaggaggccctcatcttcgacaacaagcacaccaactataccatggagcacatccgcgtgggctgggagcagctgctcaccaccattgcccgcaccatcaacgaggtggagaaccagatcctcacccgcgacgccaagggcatcagccaggagcagatgcaggagttccgggcgtccttcaaccacttcgacaaggatcatggcggggcgctggggcccgaggagttcaaggcctgcctcatcagcctgggctacgacgtggagaacgaccggcagggtgaggccgagttcaaccgcatcatgagcctggtcgaccccaaccatagcggccttgtgaccttccaagccttcatcgacttcatgtcgcgggagaccaccgacacggacacggctgaccaggtcatcgcttccttcaaggtcttagcaggggacaagaacttcatcacagcctgacggagctgcaggagagaagctgtggacggccgggaggactcctctagacgtc

SEQ ID NO: 353082 - DNA, 2440 bp, Homo sapiens
tagaggatccgtgtccatcccccttcgtaggggagcggttacctaagccggagcgggggaagatgagagtgcacaaaatcaacaatgtgaacaaagcgctggactttattgccagcaaaggcgtcaagctggtctccatcggggcagaagagattgtggacggcaacgcaaagatgaccctgggaatgatctggaccatcatccttaggttcgccatccaggacatctccgtggaagagacctcggccaaggaagggctccttctctggtgccagagaaagacagccccgtataagaacgtcaatgtgcagaacttccacatcagctggaaggatggtcttgccttcaatgccctgatccaccggcacagaccagagctgattgagtatgacaagctgaggaaggacgaccctgtcaccaacctgaacaatgccttcgaagtggctgagaaatacctcgacatccccaagatgctggatgcagaggacatcgtgaacacggcccggcccgacgagaaggccataatgacctatgtgtccagcttctaccatgccttttcaggagcgcagaaggctgaaactgccgccaaccggatctgtaaggtgctggctgtcaaccaagagaacgagcacctgatggaggactacgagaagctggccagcgacctcctggagtggatccggcgcaccatcccctggctggaggaccgtgtgccccaaaagactatccaggagatgcagcagaagctggaggacttccgcgactaccggcgtgtgcacaagccgcccaaggtgcaggagaagtgccagctggagatcaacttcaacacgctgcagaccaagctgcgcctcagcaaccggcccgccttcatgccctccgagggcaagatggtctcggacatcaacaatggctggcagcacttggagcaggctgagaagggctacgaggagtggctgctgaatgagatccgcaggctggagcggctcgaccacctggcagagaagttccggcagaaggcctccatccacgaggcctggactgacgggaaggaagccatgctgaagcaccgggactacgagacggccacactatcggacatcaaagccctcattcgcaagcacgaggccttcgagagcgacctggctgcgcaccaggaccgcgtggagcagatcgccgccattgcccaggagctcaacgagctggattactacgactcccacaatgtcaacacccggtgccagaagatctgtgaccagtgggacgccctcggctctctgacacatagtcgcagggaagccctggagaaaacagagaagcagctggaggccatcgaccagctgcacctggaatacgccaagcgcgcggcccccttcaacaactggatggagagcgccatggaggacctccaggacatgttcatcgtccataccatcgaggagattgagggcctgatctcagcccatgaccagttcaagtccaccctgccggacgccgatagggagcgcgaggccatcctggccatccacaaggaggcccagaggatcgctgagagcaaccacatcaagctgtcgggcagcaaccccaccccatcccaccagccccggccttgctttgtctggcctcacgtgtctcagattttctaagaaccaaaaaaaaaaaagggaaaaaaaacacaaaacaacaaaaaccaaaaaaaaaaaaaatcacaaaaacaaaaaaactataaaaaagaaagaattaaaaactttcagagaattactatttactttattaacttacggatttattatataaatatatattcacctagcaacatatctctgccgtctctcctgctctcataatgaagacatagccgattctctgcccgggccccttgctgatgctcctccgggtctgcgtcgggcgtgggtctctggggaccctccagaggtggaggtgggctgatggcctggctgcctggtggttgatggttttgctccccctaccttttttttttgagtttattctgattgattttttttcttggtttctggataaaccaccctctggggacaggataataaaacatgtaatatttttaagaaggaattcctgcagcatcatctttttttatttctcctgtgtctgtcctccaccttctaggagagccagggcagagctagcactgtcttaagctgtcaacgtggactagctcgtgtcatctgctcgagaggggctgtcgctgttcttgtttctgagtgaggagtacgcaggccagagtggtcacccggccgtgagcagtgagggccagagactagccccagacaggtggatgccagagagagtggcacccatgccaggcaaggcctagggaggtggtcttgctcagcaaccctgccctgagcagcaggtgcgcccatccggagatcctaggagaaggtggccacctccatccact

SEQ ID NO: 353083 - DNA, 2206 bp, Homo sapiens
tagaggatccgtgtccatcccccttcgtaggggagcggttacctaagccggagcgggggaagatgagagtgcacaaaatcaacaatgtgaacaaagcgctggactttattgccagcaaaggcgtcaagctggtctccatcggggcagaagagattgtggacggcaacgcaaagatgaccctgggaatgatctggaccatcatccttaggttcgccatccaggacatctccgtggaagagacctcggccaaggaagggctccttctctggtgccagagaaagacagccccgtataagaacgtcaatgtgcagaacttccacatcagctggaaggatggtcttgccttcaatgccctgatccaccggcacagaccagagctgattgagtatgacaagctgaggaaggacgaccctgtcaccaacctgaacaatgccttcgaagtggctgagaaatacctcgacatccccaagatgctggatgcagaggacatcgtgaacacggcccggcccgacgagaaggccataatgacctatgtgtccagcttctaccatgccttttcaggagcgcagaaggctgaaactgccgccaaccggatctgtaaggtgctggctgtcaaccaagagaacgagcacctgatggaggactacgagaagctggccagcgacctcctggagtggatccggcgcaccatcccctggctggaggaccgtgtgccccaaaagactatccaggagatgcagcagaagctggaggacttccgcgactaccggcgtgtgcacaagccgcccaaggtgcaggagaagtgccagctggagatcaacttcaacacgctgcagaccaagctgcgcctcagcaaccggcccgccttcatgccctccgagggcaagatggtctcggacatcaacaatggctggcagcacttggagcaggctgagaagggctacgaggagtggctgctgaatgagatccgcaggctggagcggctcgaccacctggcagagaagttccggcagaaggcctccatccacgaggcctggactgacgggaaggaagccatgctgaagcaccgggactacgagacggccacactatcggacatcaaagccctcattcgcaagcacgaggccttcgagagcgacctggctgcgcaccaggaccgcgtggagcagatcgccgccatgcgaggggccagcagagggcgccaccaccacctgacggctggggacccacccagcccctctcccctctctgctccagactcacttgccattgccaggagatggccccaacaagcaccccgcttttgcagcagaggagctgagttggcagaccgggcccccctgaaccgcaccccatcccaccagccccggccttgctttgtctggcctcacgtgtctcagattttctaagaaccaaaaaaaaaaaagggaaaaaaaacacaaaacaacaaaaaccaaaaaaaaaaaaaatcacaaaaacaaaaaaactataaaaaagaaagaattaaaaactttcagagaattactatttactttattaacttacggatttattatataaatatatattcacctagcaacatatctctgccgtctctcctgctctcataatgaagacatagccgattctctgcccgggccccttgctgatgctcctccgggtctgcgtcgggcgtgggtctctggggaccctccagaggtggaggtgggctgatggcctggctgcctggtggttgatggttttgctccccctaccttttttttttgagtttattctgattgattttttttcttggtttctggataaaccaccctctggggacaggataataaaacatgtaatatttttaagaaggaattcctgcagcatcatctttttttatttctcctgtgtctgtcctccaccttctaggagagccagggcagagctagcactgtcttaagctgtcaacgtggactagctcgtgtcatctgctcgagaggggctgtcgctgttcttgtttctgagtgaggagtacgcaggccagagtggtcacccggccgtgagcagtgagggccagagactagccccagacaggtggatgccagagagagtggcacccatgccaggcaaggcctagggaggtggtcttgctcagcaaccctgccctgagcagcaggtgcgcccatccggagatcctaggagaaggtggccacctccatccact

SEQ ID NO: 353084 - DNA, 2301 bp, Homo sapiens
tagaggatccgtgtccatcccccttcgtaggggagcggttacctaagccggagcgggggaagatgagagtgcacaaaatcaacaatgtgaacaaagcgctggactttattgccagcaaaggcgtcaagctggtctccatcggggcagaagagattgtggacggcaacgcaaagatgaccctgggaatgatctggaccatcatccttaggttcgccatccaggacatctccgtggaagagacctcggccaaggaagggctccttctctggtgccagagaaagacagccccgtataagaacgtcaatgtgcagaacttccacatcagctggaaggatggtcttgccttcaatgccctgatccaccggcacagaccagagctgattgagtatgacaagctgaggaaggacgaccctgtcaccaacctgaacaatgccttcgaagtggctgagaaatacctcgacatccccaagatgctggatgcagaggacatcgtgaacacggcccggcccgacgagaaggccataatgacctatgtgtccagcttctaccatgccttttcaggagcgcagaaggctgaaactgccgccaaccggatctgtaaggtgctggctgtcaaccaagagaacgagcacctgatggaggactacgagaagctggccagcgacctcctggagtggatccggcgcaccatcccctggctggaggaccgtgtgccccaaaagactatccaggagatgcagcagaagctggaggacttccgcgactaccggcgtgtgcacaagccgcccaaggtgcaggagaagtgccagctggagatcaacttcaacacgctgcagaccaagctgcgcctcagcaaccggcccgccttcatgccctccgagggcaagatggtctcggacatcaacaatggctggcagcacttggagcaggctgagaagggctacgaggagtggctgctgaatgagatccgcaggctggagcggctcgaccacctggcagagaagttccggcagaaggcctccatccacgaggcctggactgacgggaaggaagccatgctgaagcaccgggactacgagacggccacactatcggacatcaaagccctcattcgcaagcacgaggccttcgagagcgacctggctgcgcaccaggaccgcgtggagcagatcgccgccattgcccaggagctcaacgagctggattactacgactcccacaatgtcaacacccggtgccagaagatctgtgaccagtgggacgccctcggctctctgacacatagtcgcagggaagccctggagaaaacagagaagcagctggaggccatcgaccagctgcacctggaatacgccaagcgcgcggcccccttcaacaactggatggagagcgccatggaggacctccaggacatgttcatcgtccataccatcgaggagattgagggcctgatctcagcccatgaccagttcaagtccaccctgccggacgccgatagggagcgcgaggccatcctggccatccacaaggaggcccagaggatcgctgagagcaaccacatcaagctgtcgggcagcaacccctacaccaccgtcaccccgcaaatcatcaactccaagtgggagaaggtgcagcagctggtgccaaaacgggaccatgccctcctggaggagcagagcaagcagcagtccaacgagcacctgcgccgccagttcgccagccaggccaatgttgtggggccctggatccagaccaagatggaggtgaggcacggctgagccccacagagctgagaaggttccaagagagctcccgtagtgagggggtccccggccagcccagggcctgcagactgaggcgcctggcagagcaggtcccaattctcaccacccaggggccgtgatcaccctgcggggttaggagagtccacagagcttgcgcctggaatcccggcacctggggaggctgaggcgggcggatcgcttgagcccaggagttcgagaccagcctgggcaacatagtgagaccccaactctacaaaaaatacaaaaattagctgggcatgatggtgcgcagcccaaggaggtcgaggctgccgtgagctacgatcatgccactgcacttcagcctgacagcgagaccctgtggtctctagtgggctacctatgggaggtgggtttgatccctgaatgccctggtctgatgattgtgagactcaggcactattgaacctctgatcctgtcctcccagctctaaaatggggatgaaaacagttaccttattacttcaacaaatgcttt

SEQ ID NO: 353085 - DNA, 2053 bp, Homo sapiens
tagaggatccgtgtccatcccccttcgtaggggagcggttacctaagccggagcgggggaagatgagagtgcacaaaatcaacaatgtgaacaaagcgctggactttattgccagcaaaggcgtcaagctggtctccatcggggcagaagagattgtggacggcaacgcaaagatgaccctgggaatgatctggaccatcatccttaggttcgccatccaggacatctccgtggaagagacctcggccaaggaagggctccttctctggtgccagagaaagacagccccgtataagaacgtcaatgtgcagaacttccacatcagctggaaggatggtcttgccttcaatgccctgatccaccggcacagaccagagctgattgagtatgacaagctgaggaaggacgaccctgtcaccaacctgaacaatgccttcgaagtggctgagaaatacctcgacatccccaagatgctggatgcagaggacatcgtgaacacggcccggcccgacgagaaggccataatgacctatgtgtccagcttctaccatgccttttcaggagcgcagaaggctgaaactgccgccaaccggatctgtaaggtgctggctgtcaaccaagagaacgagcacctgatggaggactacgagaagctggccagcgacctcctggagtggatccggcgcaccatcccctggctggaggaccgtgtgccccaaaagactatccaggagatgcagcagaagctggaggacttccgcgactaccggcgtgtgcacaagccgcccaaggtgcaggagaagtgccagctggagatcaacttcaacacgctgcagaccaagctgcgcctcagcaaccggcccgccttcatgccctccgagggcaagatggtctcggacatcaacaatggctggcagcacttggagcaggctgagaagggctacgaggagtggctgctgaatgagatccgcaggctggagcggctcgaccacctggcagagaagttccggcagaaggcctccatccacgaggcctggactgacgggaaggaagccatgctgaagcaccgggactacgagacggccacactatcggacatcaaagccctcattcgcaagcacgaggccttcgagagcgacctggctgcgcaccaggaccgcgtggagcagatcgccgccattgcccaggagctcaacaccccatcccaccagccccggccttgctttgtctggcctcacgtgtctcagattttctaagaaccaaaaaaaaaaaagggaaaaaaaacacaaaacaacaaaaaccaaaaaaaaaaaaaatcacaaaaacaaaaaaactataaaaaagaaagaattaaaaactttcagagaattactatttactttattaacttacggatttattatataaatatatattcacctagcaacatatctctgccgtctctcctgctctcataatgaagacatagccgattctctgcccgggccccttgctgatgctcctccgggtctgcgtcgggcgtgggtctctggggaccctccagaggtggaggtgggctgatggcctggctgcctggtggttgatggttttgctccccctaccttttttttttgagtttattctgattgattttttttcttggtttctggataaaccaccctctggggacaggataataaaacatgtaatatttttaagaaggaattcctgcagcatcatctttttttatttctcctgtgtctgtcctccaccttctaggagagccagggcagagctagcactgtcttaagctgtcaacgtggactagctcgtgtcatctgctcgagaggggctgtcgctgttcttgtttctgagtgaggagtacgcaggccagagtggtcacccggccgtgagcagtgagggccagagactagccccagacaggtggatgccagagagagtggcacccatgccaggcaaggcctagggaggtggtcttgctcagcaaccctgccctgagcagcaggtgcgcccatccggagatcctaggagaaggtggccacctccatccact

SEQ ID NO: 353086 - DNA, 1397 bp, Homo sapiens
tagaggatccgtgtccatcccccttcgtaggggagcggttacctaagccggagcgggggaagatgagagtgcacaaaatcaacaatgtgaacaaagcgctggactttattgccagcaaaggcgtcaagctggtctccatcggggcagaagagattgtggacggcaacgcaaagatgaccctgggaatgatctggaccatcatccttaggttcgccatccaggacatctccgtggaagagacctcggccaaggaagggctccttctctggtgccagagaaagacagccccgtataagaacgtcaatgtgcagaacttccacatcagctggaaggatggtcttgccttcaatgccctgatccaccggcacagaccagagctgattgagtatgacaagctgaggaaggacgaccctgtcaccaacctgaacaatgccttcgaagtggctgagaaatacctcgacatccccaagatgctggatgcagaggacatcgtgaacacggcccggcccgacgagaaggccataatgacctatgtgtccagcttctaccatgccttttcaggagcgcagaaggctgaaactgccgccaaccggatctgtaaggtgctggctgtcaaccaagagaacgagcacctgatggaggactacgagaagctggccagcgacctcctggagtggatccggcgcaccatcccctggctggaggaccgtgtgccccaaaagactatccaggagatgcagcagaagctggaggacttccgcgactaccggcgtgtgcacaagccgcccaaggtgcaggagaagtgccagctggagatcaacttcaacacgctgcagaccaagctgcgcctcagcaaccggcccgccttcatgccctccgagggcaagatggtctcggacatcaacaatggctggcagcacttggagcaggctgagaagggctacgaggagtggctgctgaatgagatccgcaggctggagcggctcgaccacctggcagagaagttccggcagaaggcctccatccacgaggcctggactgacgggaaggaagccatgctgaagcaccgggactacgagacggccacactatcggacatcaaagccctcattcgcaagcacgaggccttcgagagcgacctggctgcgcaccaggaccgcgtggagcagatcgccgccattgcccaggagctcaacgagctggattactacgactcccacaatgtcaacacccggtgccagaagatctgtgaccagtgggacgccctcggctctctgacacatagtcgcagggaagccctggaggtgaggagggggtgacatcacccacggagctctgtgcccctgctgccccggggctggtggtgtggatagtgtccagacctgtgagctcccccc

SEQ ID NO: 353087 - DNA, 355 bp, Homo sapiens
tagaggatccgtgtccatcccccttcgtaggggagcggttacctaagccggagcgggggaagatgagagtgcacaaaatcaacaatgtgaacaaagcgctggactttattgccagcaaaggcgtcaagctggtctccatcggggcagaagagattgtggacggcaacgcaaagatgaccctgggaatgatctggaccatcatccttaggttcgccatccaggacatctccgtggaagagacctcggccaaggaagggctccttctctggtgccagagaaagacagccccgtataagaacgtcaatgtgcagaacttccacatcagacctcgaccgggtcatcgcccgtgccatcg

SEQ ID NO: 353088 - DNA, 2817 bp, Homo sapiens
ccacagggacaccacgacggctcgcggcccccagcctctaccccgctccggatccgggatctgagcgccggccgcggtgcccaggcactcccttggcgggccggatggcggaccccggcccagatcccgaatctgagtcggaatcggtgttcccgcgggaggtcgggctctttgcagactcttactcggagaagagccagttctgtttctgtgggcatgtgctgaccatcacgcagaactttgggtcccgcctcggggtggcggcgcgcgtgtgggacgcggccctgagcctgtgcaattatttcgagagtcaaaatgtggatttccgaggcaagaaggtgatcgaactgggtgcggggacaggcatcgtggggatcttggcagcgctgcagggagcttatggtctagtgagggagacagaggacgatgtcatagaacaagaactctggcgaggtatgcgtggagcctgtggacatgctctatccatgtctaccatgactccctgggaatccatcaagggaagctctgtcagggggggatgttaccatcactgacctgcccctggccctagaacagatccagggcaacgtccaggccaatgtgccagctggaggccaggcccaggtgcgtgccttgtcctgggggattgaccatcatgtcttccctgcaaactatgacctggtgctgggggctgatatcgtgtacctggaacccaccttccctctgctgctggggaccctccaacacctgtgcaggccccatggcaccatctatctggcctccaagatgagaaaggagcatgggacagagagcttctttcagcacctcctgccccagcatttccaactggagctggctcagcgggatgaggatgaaaatgtcaacatctatagggccaggcacagggaaccaagacctgcttgacatcacccttgctgttcttctcaatctcttgctctaatgaaggaactgtgtatctcaaaaaccatatttccagagccacaaacatgaggaccaaaaaggatggatttccctggcctctctcactttcctccttccctctttgttaccccagatactcttgggcaggtgcagtgaggtgcctgcttacaaggaatcccagagttctggcagcactagtgttagaacaccaaggaggttcctggctcctgttctcagagaaggaggatggtaaggtatccaggatttttagggggtaagggagatatatgggatgtgagagcagtgattgtagacagactgtcactgatcacttccattcctgttgctgtttacacagaatggactttaaaaaaattctgtgggatttttttttctttttttctttttttttgagacagggtctcactctgtcatccaggctggagtgcagtggtgtgatcacagctcactgcagcctcaacctctgaaggcccagatgatcttcctgcctcagctccccaagtagctgggactagaggcatgcgccaccacacccggctaatttttgtattttcagtagagacagggtttcgccatgttgcccagggtggtctcaaactcctgggctcaagtgatccacccgccttgcctcccaaagtgctgggattgcaggcatggcccactgtgctagcctaggatttttttttttttttaagaaagaattaagccttaaaaatctattgtgcaagaacctaacttttactcaggagctgagaaggaagaagcctcaaaccacccatttcctgctttttagagatagagtctagtggaaccatggctctaactgggtcaagtcctcctagctctgaagctaaggctgcagagctgtcctttggactgtagtttcttcatgctttccagagttagagccttgatcacggaacatcattgtgtgcagaagaatactgtacctagtactaagttcttttcatctttgatttttctttagcttcatcagtccttccttcctaatctctaatcccctgaagcctaacacagttcctaatgtgttttgccttaacctcttttctcttcccacattggtacttctggttggggctctctttacttactgcttaggcacatagtcaccttctctggactccctgcttccatgctttctccttcagtccattccgcaaactcttgtgatcttccaaaattagctctgattagctttcacttcctgtagaagcaagaacaagctcctctgcttggtacttagtctgtgtccatgtgatccaaaattaccttcctattgcatttcctactcctttgctacgtgtattggacctctggccaaattacaaaagatgtactctttgttctctaaaaccacactaaagttttctgacttctttcacactctttatgataatcctctgcctgaaaggctattgccacctgtcaaaatcttcattattctttgcctctttcctgagcctcttgcttgaatgtgatttctttctccctgagacccataaggttcatcttatgggaccttaatttgtcttgcatggacatttgtgattctcattttctcaccattaaattaccttggagggtagggctgtggtttactcctgtctaaacccctgaagcctaacacagttcctggcacacaacaggtgttcaacagatattgtgctcattcaataaatatttactcgctttgtttaatggattccacccctgccttcctaggtgaccttggacaaattctcgaacccattcaccaaccacacaagtttgttgtgagtcataaatggataatgaatataaatgcgcattgaaaataaacataaaatgttaccc

SEQ ID NO: 353089 - DNA, 949 bp, Homo sapiens
tgtgtcgtctcaagaaatcaagtagaggcgaggactgtgttcctccggccagcaggtggcaccatactcgcttggtgcgttccgctggagaattctggcccttccgccgcgccgtaggtttgttgcctcaccagtgcgcccgccggagggtgtttatcgcggctagagagatgtcgctgctgcggtcgctgcgcgtgtttctggtcgcgcggaccgggagctacccggctgggtctcttctgcgtcagtcgccccagccaaggcacacattttatgctgggccccgtctgtctgcctcggcctccagcaaggagctcctcatgaagctgcggcggaaaacaggctactcctttgtaaattgcaagaaagctctggagacttgtggcggggacctcaaacaggcagagatctggctccacaaggaggcccagaaggagggctggagcaaagctgccaagctccaagggaggaagaccaaagaaggcctgattgggctgttgcaggaaggaaacacaactgtattagtagaggtaaactgtgagacagattttgtttctagaaatttaaaatttcaactgttggtccagcaagtagcccttggaaccatgatgcattgtcagaccctaaaggatcaaccctctgcatacagtaaaggtttcttgaattcctctgagctttctggacttccagctgggcctgacagagaaggctcactcaaggatcagttggctttagcaattgtgctgaggactcatcacatttgcatgatttgaatcgtgagatgaactgggccatcctgttcaggagcatcccatcatggctcggtctttgcaaggctgagcaatgatttgaatatatcttccaggtgagatattgatagcacatttgaggatgtgcctttcactaccctgaaaactctacagactcacaagactcttaaagaagactc

SEQ ID NO: 353090 - DNA, 458 bp, Homo sapiens
tgtgtcgtctcaagaaatcaagtagaggcgaggactgtgttcctccggccagcaggtggcaccatactcgcttggtgcgttccgctggagaattctggcccttccgccgcgccgtaggtttgttgcctcaccagtgcgcccgccggagggtgtttatcgcggctagagagatgtcgctgctgcggtcgctgcgcgtgtttctggtcgcgcggaccgggagctacccggtgagaagtcctggtgctggtaccgacctgctgtccctgcagctctcctgtgcgcctgtacctttcccttcctcccaacctcgtttgactccatctcaccttccccgacagcattgcctctgcccagtccagccccggtgcacccccctttgcacactgtccgctccctaaggtcgcttccctgcccgtgtacccttcaccctctggagtttgctggtccctgctcctcat

SEQ ID NO: 353091 - DNA, 645 bp, Homo sapiens
ccgatccacctccactgcctggtatgctgaggctgccagctcatcctgtgaggcgtggcggccctgcaatggtgagaggccatgaaggacccatgctccccgccccagcccagtggccagaggacacatcaggatccaaagctgaagcctgtgccaggcctacctgccagatgtacaagatgtgatgtggcttcccatttacctcgtatgtgtagaggaccagataacagtctcccccataaaagaagccataccattgatactccacagggaccagctccaggttctcaattctccagacctgggcatagaaggagacaccgttttccagagatgggggtgctgagaggggctaggccacactaaagagagaatccaggtgggaaaggtgctgacgtttactccatgttccctttctccctctggttctctcccagtgctgaggactcatcacatttgcatgatttgaatcgtgagatgaactgggccatcctgttcaggagcatcccatcatggctcggtctttgcaaggctgagcaatgatttgaatatatcttccaggtgagatattgatagcacatttgaggatgtgcctttcactaccctgaaaactctacagactcacaagactcttaaagaagactc

SEQ ID NO: 353092 - DNA, 553 bp, Homo sapiens
ccacagggacaccacgacggctcgcggcccccagcctctaccccgctccggatccgggatctgagcgccggccgcggtgcccaggcactcccttggcgggccggatggcggaccccggcccagatcccgaatctgagtcggaatcggtgttcccgcgggaggtcgggctctttgcagactcttactcggagaagagccagttctgtttctgtgggcatgtgctgaccatcacgcagaactttgggtcccgcctcggggtggcggcgcgcgtgtgggacgcggccctgagcctgtgcaattatttcgagagtcaaaatgtggatttccgaggcaagaaggtgatcgaactgggtgcggggacaggcatcgtggggatcttggcagcgctgcaggctccccagtccaaaccaccacgatcacttgcctggactactacaacagccacacttgtcttcctgctttgactccttgtcctcacctagacctctgcccttccacctagtggtcagagtgatcttttcaaaataaaactgtaatcatgtattcccacccc

SEQ ID NO: 353093 - DNA, 1302 bp, Homo sapiens
tgtgtcgtctcaagaaatcaagtagaggcgaggactgtgttcctccggccagcaggtggcaccatactcgcttggtgcgttccgctggagaattctggcccttccgccgcgccgtaggtttgttgcctcaccagtgcgcccgccggagggtgtttatcgcggctagagagatgtcgctgctgcggtcgctgcgcgtgtttctggtcgcgcggaccgggagctacccggctgggtctcttctgcgtcagtcgccccagccaaggcacacattttatgctgggccccgtctgtctgcctcggcctccagcaaggagctcctcatgaagctgcggcggaaaacaggctactcctttgtaaattgcaagaaagctctggagacttgtggcggggacctcaaacaggcagagatctggctccacaaggaggcccagaaggagggctggagcaaagctgccaagctccaagggaggaagaccaaagaaggcctgattgggctgttgcaggaaggaaacacaactgtattagtagaggtaaactgtgagacagattttgtttctagaaatttaaaatttcaactgttggtccagcaagtagcccttggaaccatgatgcattgtcagaccctaaaggatcaaccctctgcatacagtaaaggtttcttgaattcctctgagctttctggacttccagctgggcctgacagagaaggctcactcaaggatcagttggctttagcaattggaaaactgggagaaaacatgattcttaaacgagctgcatgggtgaaggtgccatctgggttctacgttggctcttatgtccacggagcaatgcagagtccctcacttcacaagctggtgctggggaagtatggggccctggtcatctgtgagacgtctgaacagaaaacaaaccttgaagacgttggccgccgccttgggcagcatgtggtgggcatggcccccctctctgttggctccctggacgatgagcctgggggagaggcagagactaagatgctgtcccagccgtatttgctggatccctccattaccttggggcagtatgtgcagcctcagggggtgtcggtagtagactttgtgcggtttgaatgtggagaaggtgaagaggcagcagaaactgaataggttccagagacttttggcccaggaggaatatttacttttagctctggacatcattacaaaaaggaatatttcccaaacctcttcagaccgagaatgcatgggtaaaattattaaatagttgtataataaaaataattttttccttgtttgcgta

SEQ ID NO: 353094 - DNA, 1546 bp, Homo sapiens
tgtgtcgtctcaagaaatcaagtagaggcgaggactgtgttcctccggccagcaggtggcaccatactcgcttggtgcgttccgctggagaattctggcccttccgccgcgccgtaggtttgttgcctcaccagtgcgcccgccggagggtgtttatcgcggctagagagatgtcgctgctgcggtcgctgcgcgtgtttctggtcgcgcggaccgggagctacccggctgggtctcttctgcgtcagtcgccccagccaaggcacacattttatgctgggccccgtctgtctgcctcggcctccagcaaggagctcctcatgaagctgcggcggaaaacaggctactcctttgtaaattgcaagaaagctctggagacttgtggcggggacctcaaacaggcagagatctggctccacaaggaggcccagaaggagggctggagcaaagctgccaagctccaagggaggaagaccaaagaaggcctgattgggctgttgcaggaaggaaacacaactgtattagtagaggtaaactgtgagacagattttgtttctagaaatttaaaatttcaactgttggtccagcaagtagcccttggaaccatgatgcattgtcagaccctaaaggatcaaccctctgcatacagtaaaggtttcttgaattcctctgagctttctggacttccagctgggcctgacagagaaggctcactcaaggatcagttggctttagcaattggaaaactgggagaaaacatgattcttaaacgagctgcatgggtgaaggtgccatctgggttctacgttggctcttatgtccacggagcaatgcagagtccctcacttcacaagctggtgctggggaagtatggggccctggtcatctgtgagacgtctgaacagaaaacaaaccttgaagacgttggccgccgccttgggcagcatgtggtgggcatggcccccctctctgttggctccctggacgatgagcctgggggagaggcagagactaagatgctgtcccagccgtatttgctggatccctccattaccttggggcagtatgtgcagcctcagggggtgtcggtagtagactttgtgcggtttgaatgtggagaaggtgaagaggcagcagaaactgaataggttccagagacttttggcccaggaggaatatttacttttagctctggacatcattacaaaaaggaatatttcccaaacctcttcagaccgagaatgcatgggtaaaattattaaatagttgtataataaaaataattttttccttgtttgcgtaaaaaaaaaccgagacaaacaaaaaaattggtgtgcggccggttcggggctcagagaagcttgcccaaacccatctgtggggggcgggcccatgcgtcaggtggacctcggtcaagggctgcccaagaaacccgggtctgcctacgtggtggtttctcacaattaaaaaacgccgggaaccggcggtctaacaatcatgggtcggagcttcggtttcccgggccagcggctagtatccccagtgg

SEQ ID NO: 353095 - DNA, 1280 bp, Homo sapiens
tgtgtcgtctcaagaaatcaagtagaggcgaggactgtgttcctccggccagcaggtggcaccatactcgcttggtgcgttccgctggagaattctggcccttccgccgcgccgtaggtttgttgcctcaccagtgcgcccgccggagggtgtttatcgcggctagagagatgtcgctgctgcggtcgctgcgcgtgtttctggtcgcgcggaccgggagctacccggctgggtctcttctgcgtcagtcgccccagccaaggcacacattttatgctgggccccgtctgtctgcctcggcctccagcaaggagctcctcatgaagctgcggcggaaaacaggctactcctttgtaaattgcaagaaagctctggagacttgtggcggggacctcaaacaggcagagatctggctccacaaggaggcccagaaggagggctggagcaaagctgccaagctccaagggaggaagaccaaagaaggcctgattgggctgttgcaggaaggaaacacaactgtattagtagaggtaaactgtgagacagattttgtttctagaaatttaaaatttcaactgttggtccagcaagtagcccttggaaccatgatgcattgtcagaccctaaaggatcaaccctctgcatacagtaaaggtttcttgaattcctctgagctttctggacttccagctgggcctgacagagaaggctcactcaaggatcagttggctttagcaattggaaaactgggagaaaacatgattcttaaacgagctgcatgggtgaaggtgccatctgggttctacgttggctcttatgtccacggagcaatgcagagtccctcacttcacaagctggtgctggggaagtatggggccctggtcatctgtgagacgtctgaacagaaaacaaaccttgaagacgttggccgccgccttgggcagcatgtggtgggcatggcccccctctctgttggctccctggacgatgagcctgggggagaggcagagactaagatgctgtcccagccgtatttgctggatccctccattaccttggggcagtatgtgcagcctcagggggtgtcggtagtagactttgtgcggtttgaatgtggagaaggtgaagaggcagcagaaactgaataggttccagagacttttggcccaggaggaatatttacttttagctctggacatcattacaaaaaggaatatttcccaaacctcttcagaccgagaatgcatgggtaagtcggcagtttcatcgggttaccgagc

SEQ ID NO: 353096 - DNA, 1321 bp, Homo sapiens
tgtgtcgtctcaagaaatcaagtagaggcgaggactgtgttcctccggccagcaggtggcaccatactcgcttggtgcgttccgctggagaattctggcccttccgccgcgccgtaggtttgttgcctcaccagtgcgcccgccggagggtgtttatcgcggctagagagatgtcgctgctgcggtcgctgcgcgtgtttctggtcgcgcggaccgggagctacccggtgagaagtcctggtgctggctgggtctcttctgcgtcagtcgccccagccaaggcacacattttatgctgggccccgtctgtctgcctcggcctccagcaaggagctcctcatgaagctgcggcggaaaacaggctactcctttgtaaattgcaagaaagctctggagacttgtggcggggacctcaaacaggcagagatctggctccacaaggaggcccagaaggagggctggagcaaagctgccaagctccaagggaggaagaccaaagaaggcctgattgggctgttgcaggaaggaaacacaactgtattagtagaggtaaactgtgagacagattttgtttctagaaatttaaaatttcaactgttggtccagcaagtagcccttggaaccatgatgcattgtcagaccctaaaggatcaaccctctgcatacagtaaaggtttcttgaattcctctgagctttctggacttccagctgggcctgacagagaaggctcactcaaggatcagttggctttagcaattggaaaactgggagaaaacatgattcttaaacgagctgcatgggtgaaggtgccatctgggttctacgttggctcttatgtccacggagcaatgcagagtccctcacttcacaagctggtgctggggaagtatggggccctggtcatctgtgagacgtctgaacagaaaacaaaccttgaagacgttggccgccgccttgggcagcatgtggtgggcatggcccccctctctgttggctccctggacgatgagcctgggggagaggcagagactaagatgctgtcccagccgtatttgctggatccctccattaccttggggcagtatgtgcagcctcagggggtgtcggtagtagactttgtgcggtttgaatgtggagaaggtgaagaggcagcagaaactgaataggttccagagacttttggcccaggaggaatatttacttttagctctggacatcattacaaaaaggaatatttcccaaacctcttcagaccgagaatgcatgggtaaaattattaaatagttgtataataaaaataattttttccttgtttgcgta

SEQ ID NO: 353097 - DNA, 1582 bp, Homo sapiens
atcctttgggtcatcgtggctctgattttgagtgagtggagcgaagaactctgggtatagctcagaccagtccatctcctctggcttcacagggctattggaaagaagacataagaagcatgagaaggccctgagcctgtgcaattatttcgagagtcaaaatgtggatttccgaggcaagaaggtgatcgaactgggtgcggggacaggcatcgtggggatcttggcagcgctgcagggctgggtctcttctgcgtcagtcgccccagccaaggcacacattttatgctgggccccgtctgtctgcctcggcctccagcaaggagctcctcatgaagctgcggcggaaaacaggctactcctttgtaaattgcaagaaagctctggagacttgtggcggggacctcaaacagacggagtcttgctctgtggcccaggccggcgtgcaatgagttgtgtagtttttgcctgtacggtcatgcgtctcttaataggaagatacattctgagaaatggcgtcgttaggagattttggcttatgcacatcatagagtacctacacaaacctagatggtatattgtactacaacctgggctatatggaattgccagctgctcctaggctacaaaccgttacaaaatgttactggactgaatactgtaggcagttgtaacacagtggcagagatctggctccacaaggaggcccagaaggagggctggagcaaagctgccaagctccaagggaggaagaccaaagaaggcctgattgggctgttgcaggaaggaaacacaactgtattagtagaggtaaactgtgagacagattttgtttctagaaatttaaaatttcaactgttggtccagcaagtagcccttggaaccatgatgcattgtcagaccctaaaggatcaaccctctgcatacagtaaaggtttcttgaattcctctgagctttctggacttccagctgggcctgacagagaaggctcactcaaggatcagttggctttagcaattggaaaactgggagaaaacatgattcttaaacgagctgcatgggtgaaggtgccatctgggttctacgttggctcttatgtccacggagcaatgcagagtccctcacttcacaagctggtgctggggaagtatggggccctggtcatctgtgagacgtctgaacagaaaacaaaccttgaagacgttggccgccgccttgggcagcatgtggtgggcatggcccccctctctgttggctccctggacgatgagcctgggggagaggcagagactaagatgctgtcccagccgtatttgctggatccctccattaccttggggcagtatgtgcagcctcagggggtgtcggtagtagactttgtgcggtttgaatgtggagaaggtgaagaggcagcagaaactgaataggttccagagacttttggcccaggaggaatatttacttttagctctggacatcattacaaaaaggaatatttcccaaacctcttcagaccgagaatgcatgggtaaaattattaaatagttgtataataaaaataattttttccttgtttgcgta

SEQ ID NO: 353098 - DNA, 2678 bp, Homo sapiens
ccacagggacaccacgacggctcgcggcccccagcctctaccccgctccggatccgggatctgagcgccggccgcggtgcccaggcactcccttggcgggccggatggcggaccccggcccagatcccgaatctgagtcggaatcggtgttcccgcgggaggtcgggctctttgcagactcttactcggagaagagccagttctgtttctgtgggcatgtgctgaccatcacgcagaactttgggtcccgcctcggggtggcggcgcgcgtgtgggacgcggccctgagcctgtgcaattatttcgagagtcaaaatgtggatttccgaggcaagaaggtgatcgaactgggtgcggggacaggcatcgtggggatcttggcagcgctgcaggggggggatgttaccatcactgacctgcccctggccctagaacagatccagggcaacgtccaggccaatgtgccagctggaggccaggcccaggtgcgtgccttgtcctgggggattgaccatcatgtcttccctgcaaactatgacctggtgctgggggctgatatcgtgtacctggaacccaccttccctctgctgctggggaccctccaacacctgtgcaggccccatggcaccatctatctggcctccaagatgagaaaggagcatgggacagagagcttctttcagcacctcctgccccagcatttccaactggagctggctcagcgggatgaggatgaaaatgtcaacatctatagggccaggcacagggaaccaagacctgcttgacatcacccttgctgttcttctcaatctcttgctctaatgaaggaactgtgtatctcaaaaaccatatttccagagccacaaacatgaggaccaaaaaggatggatttccctggcctctctcactttcctccttccctctttgttaccccagatactcttgggcaggtgcagtgaggtgcctgcttacaaggaatcccagagttctggcagcactagtgttagaacaccaaggaggttcctggctcctgttctcagagaaggaggatggtaaggtatccaggatttttagggggtaagggagatatatgggatgtgagagcagtgattgtagacagactgtcactgatcacttccattcctgttgctgtttacacagaatggactttaaaaaaattctgtgggatttttttttctttttttctttttttttgagacagggtctcactctgtcatccaggctggagtgcagtggtgtgatcacagctcactgcagcctcaacctctgaaggcccagatgatcttcctgcctcagctccccaagtagctgggactagaggcatgcgccaccacacccggctaatttttgtattttcagtagagacagggtttcgccatgttgcccagggtggtctcaaactcctgggctcaagtgatccacccgccttgcctcccaaagtgctgggattgcaggcatggcccactgtgctagcctaggatttttttttttttttaagaaagaattaagccttaaaaatctattgtgcaagaacctaacttttactcaggagctgagaaggaagaagcctcaaaccacccatttcctgctttttagagatagagtctagtggaaccatggctctaactgggtcaagtcctcctagctctgaagctaaggctgcagagctgtcctttggactgtagtttcttcatgctttccagagttagagccttgatcacggaacatcattgtgtgcagaagaatactgtacctagtactaagttcttttcatctttgatttttctttagcttcatcagtccttccttcctaatctctaatcccctgaagcctaacacagttcctaatgtgttttgccttaacctcttttctcttcccacattggtacttctggttggggctctctttacttactgcttaggcacatagtcaccttctctggactccctgcttccatgctttctccttcagtccattccgcaaactcttgtgatcttccaaaattagctctgattagctttcacttcctgtagaagcaagaacaagctcctctgcttggtacttagtctgtgtccatgtgatccaaaattaccttcctattgcatttcctactcctttgctacgtgtattggacctctggccaaattacaaaagatgtactctttgttctctaaaaccacactaaagttttctgacttctttcacactctttatgataatcctctgcctgaaaggctattgccacctgtcaaaatcttcattattctttgcctctttcctgagcctcttgcttgaatgtgatttctttctccctgagacccataaggttcatcttatgggaccttaatttgtcttgcatggacatttgtgattctcattttctcaccattaaattaccttggagggtagggctgtggtttactcctgtctaaacccctgaagcctaacacagttcctggcacacaacaggtgttcaacagatattgtgctcattcaataaatatttactcgctttgtttaatggattccacccctgccttcctaggtgaccttggacaaattctcgaacccattcaccaaccacacaagtttgttgtgagtcataaatggataatgaatataaatgcgcattgaaaataaacataaaatgttaccc

SEQ ID NO: 353099 - DNA, 2423 bp, Homo sapiens
caactaaaagccagtgtgggctctgggctgtcaagacattgtcctctatgctctgaggtctctggaccttccaggcaggagccaagaacccttggttggttcctctgacttgcatttttcctccttcctctctctcagggggggatgttaccatcactgacctgcccctggccctagaacagatccagggcaacgtccaggccaatgtgccagctggaggccaggcccaggtgcgtgccttgtcctgggggattgaccatcatgtcttccctgcaaactatgacctggtgctgggggctgatatcgtgtacctggaacccaccttccctctgctgctggggaccctccaacacctgtgcaggccccatggcaccatctatctggcctccaagatgagaaaggagcatgggacagagagcttctttcagcacctcctgccccagcatttccaactggagctggctcagcgggatgaggatgaaaatgtcaacatctatagggccaggcacagggaaccaagacctgcttgacatcacccttgctgttcttctcaatctcttgctctaatgaaggaactgtgtatctcaaaaaccatatttccagagccacaaacatgaggaccaaaaaggatggatttccctggcctctctcactttcctccttccctctttgttaccccagatactcttgggcaggtgcagtgaggtgcctgcttacaaggaatcccagagttctggcagcactagtgttagaacaccaaggaggttcctggctcctgttctcagagaaggaggatggtaaggtatccaggatttttagggggtaagggagatatatgggatgtgagagcagtgattgtagacagactgtcactgatcacttccattcctgttgctgtttacacagaatggactttaaaaaaattctgtgggatttttttttctttttttctttttttttgagacagggtctcactctgtcatccaggctggagtgcagtggtgtgatcacagctcactgcagcctcaacctctgaaggcccagatgatcttcctgcctcagctccccaagtagctgggactagaggcatgcgccaccacacccggctaatttttgtattttcagtagagacagggtttcgccatgttgcccagggtggtctcaaactcctgggctcaagtgatccacccgccttgcctcccaaagtgctgggattgcaggcatggcccactgtgctagcctaggatttttttttttttttaagaaagaattaagccttaaaaatctattgtgcaagaacctaacttttactcaggagctgagaaggaagaagcctcaaaccacccatttcctgctttttagagatagagtctagtggaaccatggctctaactgggtcaagtcctcctagctctgaagctaaggctgcagagctgtcctttggactgtagtttcttcatgctttccagagttagagccttgatcacggaacatcattgtgtgcagaagaatactgtacctagtactaagttcttttcatctttgatttttctttagcttcatcagtccttccttcctaatctctaatcccctgaagcctaacacagttcctaatgtgttttgccttaacctcttttctcttcccacattggtacttctggttggggctctctttacttactgcttaggcacatagtcaccttctctggactccctgcttccatgctttctccttcagtccattccgcaaactcttgtgatcttccaaaattagctctgattagctttcacttcctgtagaagcaagaacaagctcctctgcttggtacttagtctgtgtccatgtgatccaaaattaccttcctattgcatttcctactcctttgctacgtgtattggacctctggccaaattacaaaagatgtactctttgttctctaaaaccacactaaagttttctgacttctttcacactctttatgataatcctctgcctgaaaggctattgccacctgtcaaaatcttcattattctttgcctctttcctgagcctcttgcttgaatgtgatttctttctccctgagacccataaggttcatcttatgggaccttaatttgtcttgcatggacatttgtgattctcattttctcaccattaaattaccttggagggtagggctgtggtttactcctgtctaaacccctgaagcctaacacagttcctggcacacaacaggtgttcaacagatattgtgctcattcaataaatatttactcgctttgtttaatggattccacccctgccttcctaggtgaccttggacaaattctcgaacccattcaccaaccacacaagtttgttgtgagtcataaatggataatgaatataaatgcgcattgaaaataaacataaaatgttaccc

SEQ ID NO: 353100 - DNA, 3056 bp, Homo sapiens
ccacagggacaccacgacggctcgcggcccccagcctctaccccgctccggatccgggatctgagcgccggccgcggtgcccaggcactcccttggcgggccggatggcggaccccggcccagatcccgaatctgagtcggaatcggtgttcccgcgggaggtcgggctctttgcagactcttactcggagaagagccagttctgtttctgtgggcatgtgctgaccatcacgcagaactttgggtcccgcctcggggtggcggcgcgcgtgtgggacgcggccctgagcctgtgcaattatttcgagagtcaaaatgtggatttccgaggcaagaaggtgatcgaactgggtgcggggacaggcatcgtggggatcttggcagcgctgcaggggggggatgttaccatcactgacctgcccctggccctagaacagatccagggcaacgtccaggccaatgtgccagctggaggccaggcccaggtgcgtgccttgtcctgggggattgaccatcatgtcttccctgcaaactatgacctggtgctgggggctgatatcgtgtacctggaacccaccttccctctgctgctggggaccctccaacacctgtgcaggccccatggcaccatctatctggcctccaagatgagaaaggagcatgggacagagagcttctttcagcacctcctgccccagcatttccaactggagctggctcagcgggatgaggatgaaaatgtcaacatctatagggccaggcacagggaaccaagacctgcttgacatcacccttgctgttcttctcaatctcttgctctaatgaaggaactgtgtatctcaaaaaccatatttccagagccacaaacatgaggaccaaaaaggatggatttccctggcctctctcactttcctccttccctctttgttaccccagatactcttgggcaggtgcagtgaggtgcctgcttacaaggaatcccagagttctggcagcactagtgttagaacaccaaggaggttcctggctcctgttctcagagaaggaggatggtaaggtatccaggatttttagggggtaagggagatatatgggatgtgagagcagtgattgtagacagactgtcactgatcacttccattcctgttgctgtttacacagaatggactttaaaaaaattctgtgggatttttttttctttttttctttttttttgagacagggtctcactctgtcatccaggctggagtgcagtggtgtgatcacagctcactgcagcctcaacctctgaaggcccagatgatcttcctgcctcagctccccaagtagctgggactagaggcatgcgccaccacacccggctaatttttgtattttcagtagagacagggtttcgccatgttgcccagggtggtctcaaactcctgggctcaagtgatccacccgccttgcctcccaaagtgctgggattgcaggcatggcccactgtgctagcctaggatttttttttttttttaagaaagaattaagccttaaaaatctattgtgcaagaacctaacttttactcaggagctgagaaggaagaagcctcaaaccacccatttcctgctttttagagatagagtctagtggaaccatggctctaactgggtcaagtcctcctagctctgaagctaaggctgcagagctgtcctttggactgtagtttcttcatgctttccagagttagagccttgatcacggaacatcattgtgtgcagaagaatactgtacctagtactaagttcttttcatctttgatttttctttagcttcatcagtccttccttcctaatctctaatcccctgaagcctaacacagttcctaatgtgttttgccttaacctcttttctcttcccacattggtacttctggttggggctctctttacttactgcttaggcacatagtcaccttctctggactccctgcttccatgctttctccttcagtccattccgcaaactcttgtgatcttccaaaattagctctgattagctttcacttcctgtagaagcaagaacaagctcctctgcttggtacttagtctgtgtccatgtgatccaaaattaccttcctattgcatttcctactcctttgctacgtgtattggacctctggccaaattacaaaagatgtactctttgttctctaaaaccacactaaagttttctgacttctttcacactctttatgataatcctctgcctgaaaggctattgccacctgtcaaaatcttcattattctttgcctctttcctgagcctcttgcttgaatgtgatttctttctccctgagacccataaggttcatcttatgggaccttaatttgtcttgcatggacatttgtgattctcattttctcaccattaaattaccttggagggtagggctgtggtttactcctgtctaaacccctgaagcctaacacagttcctggcacacaacaggtgttcaacagatattgtgctcattcaataaatatttactcgctttgtttaatggattccacccctgccttcctaggtgaccttggacaaattctcgaacccattcaccaaccacacaagtttgttgtgagtcataaatggataatgaatataaatgcgcattgaaaataaacataaaatgttaccccgcaaaaaaaaaaaaaaaaaaaaaaaaaaaaactgttgtgtgcgggcgcgcgcttggggccctgagaaaaagcgtttttaaacaccacttcccgtgttgggggcgcggggggcccagtgtgggtaagttgaaccctgtgggcaaaatgcgtggtcccaagggagaagatccggggccagtgagactaaggtcgttggggtgtttctctccccaaatttaaaaaaacgcgcgcgggggggacacccgagcgggtctctgtgagaaaaactctccaagaggggggagtcccggaggaggccataaccgggagttcttatcaacagggagctgtccacggaagcgtctggatataaaattacgcgggcccgctggggggag

SEQ ID NO: 353101 - DNA, 2762 bp, Homo sapiens
ccacagggacaccacgacggctcgcggcccccagcctctaccccgctccggatccgggatctgagcgccggccgcggtgcccaggcactcccttggcgggccggatggcggaccccggcccagatcccgaatctgagtcggaatcggtgttcccgcgggaggtcgggctctttgcagactcttactcggagaagagccagttctgtttctgtgggcatgtgctgaccatcacgcagaactttgggtcccgcctcggggtggcggcgcgcgtgtgggacgcggccctgagcctgtgcaattatttcgagagtcaaaatgtggatttccgaggcaagaaggagcttatggtctagtgagggagacagaggacgatgtcatagaacaagaactctggcgaggtatgcgtggagcctgtggacatgctctatccatgtctaccatgactccctgggaatccatcaagggaagctctgtcagggggggatgttaccatcactgacctgcccctggccctagaacagatccagggcaacgtccaggccaatgtgccagctggaggccaggcccaggtgcgtgccttgtcctgggggattgaccatcatgtcttccctgcaaactatgacctggtgctgggggctgatatcgtgtacctggaacccaccttccctctgctgctggggaccctccaacacctgtgcaggccccatggcaccatctatctggcctccaagatgagaaaggagcatgggacagagagcttctttcagcacctcctgccccagcatttccaactggagctggctcagcgggatgaggatgaaaatgtcaacatctatagggccaggcacagggaaccaagacctgcttgacatcacccttgctgttcttctcaatctcttgctctaatgaaggaactgtgtatctcaaaaaccatatttccagagccacaaacatgaggaccaaaaaggatggatttccctggcctctctcactttcctccttccctctttgttaccccagatactcttgggcaggtgcagtgaggtgcctgcttacaaggaatcccagagttctggcagcactagtgttagaacaccaaggaggttcctggctcctgttctcagagaaggaggatggtaaggtatccaggatttttagggggtaagggagatatatgggatgtgagagcagtgattgtagacagactgtcactgatcacttccattcctgttgctgtttacacagaatggactttaaaaaaattctgtgggatttttttttctttttttctttttttttgagacagggtctcactctgtcatccaggctggagtgcagtggtgtgatcacagctcactgcagcctcaacctctgaaggcccagatgatcttcctgcctcagctccccaagtagctgggactagaggcatgcgccaccacacccggctaatttttgtattttcagtagagacagggtttcgccatgttgcccagggtggtctcaaactcctgggctcaagtgatccacccgccttgcctcccaaagtgctgggattgcaggcatggcccactgtgctagcctaggatttttttttttttttaagaaagaattaagccttaaaaatctattgtgcaagaacctaacttttactcaggagctgagaaggaagaagcctcaaaccacccatttcctgctttttagagatagagtctagtggaaccatggctctaactgggtcaagtcctcctagctctgaagctaaggctgcagagctgtcctttggactgtagtttcttcatgctttccagagttagagccttgatcacggaacatcattgtgtgcagaagaatactgtacctagtactaagttcttttcatctttgatttttctttagcttcatcagtccttccttcctaatctctaatcccctgaagcctaacacagttcctaatgtgttttgccttaacctcttttctcttcccacattggtacttctggttggggctctctttacttactgcttaggcacatagtcaccttctctggactccctgcttccatgctttctccttcagtccattccgcaaactcttgtgatcttccaaaattagctctgattagctttcacttcctgtagaagcaagaacaagctcctctgcttggtacttagtctgtgtccatgtgatccaaaattaccttcctattgcatttcctactcctttgctacgtgtattggacctctggccaaattacaaaagatgtactctttgttctctaaaaccacactaaagttttctgacttctttcacactctttatgataatcctctgcctgaaaggctattgccacctgtcaaaatcttcattattctttgcctctttcctgagcctcttgcttgaatgtgatttctttctccctgagacccataaggttcatcttatgggaccttaatttgtcttgcatggacatttgtgattctcattttctcaccattaaattaccttggagggtagggctgtggtttactcctgtctaaacccctgaagcctaacacagttcctggcacacaacaggtgttcaacagatattgtgctcattcaataaatatttactcgctttgtttaatggattccacccctgccttcctaggtgaccttggacaaattctcgaacccattcaccaaccacacaagtttgttgtgagtcataaatggataatgaatataaatgcgcattgaaaataaacataaaatgttaccc

SEQ ID NO: 353102 - DNA, 871 bp, Homo sapiens
tgtgtcgtctcaagaaatcaagtagaggcgaggactgtgttcctccggccagcaggtggcaccatactcgcttggtgcgttccgctggagaattctggcccttccgccgcgccgtaggtttgttgcctcaccagtgcgcccgccggagggtgtttatcgcggctagagagatgtcgctgctgcggtcgctgcgcgtgtttctggtcgcgcggaccgggagctacccggctgggtctcttctgcgtcagtcgccccagccaaggcacacattttatgctgggccccgtctgtctgcctcggcctccagcaaggagctcctcatgaagctgcggcggaaaacaggctactcctttgtaaattgcaagaaagctctggagacttgtggcggggacctcaaacaggcagagatctggctccacaaggaggcccagaaggagggctggagcaaagctgccaagctccaagggaggaagaccaaagaaggcctgattgggctgttgcaggaaggaaacacaactgtattagtagagccccctctctgttggctccctggacgatgagcctgggggagaggcagagactaagatgctgtcccagccgtatttgctggatccctccattaccttggggcagtatgtgcagcctcagggggtgtcggtagtagactttgtgcggtttgaatgtggagaaggtgaagaggcagcagaaactgaataggttccagagacttttggcccaggaggaatatttacttttagctctggacatcattacaaaaaggaatatttcccaaacctcttcagaccgagaatgcatgggtaaaattattaaatagttgtataataaaaataattttttccttgtttgcgta

SEQ ID NO: 353103 - DNA, 500 bp, Homo sapiens
atcctttgggtcatcgtggctctgattttgagtgagtggagcgaagaactctgggtatagctcagaccagtccatctcctctggcttcacagggctattggaaagaagacataagaagcatgagaaggccctgagcctgtgcaattatttcgagagtcaaaatgtggatttccgaggcaagaaggtgatcgaactgggtgcggggacaggcatcgtggggatcttggcagcgctgcagggtgcgtgagctggctttttacgggagagagtggggacccaggggcgcggagaaatggtcacttcgtggatctttgggggagaggggagaactttgggcccagtctaaccccttctttttaacaaatttttttttaaaatttgtttttgtttttattttggcgtctgcttctgcgtgccagacagcgcgaattgcctgtcaaagcacctagggtgggtgattggggagggcaggaaataaaactcaggcaggcctataagaa

SEQ ID NO: 353104 - DNA, 2153 bp, Homo sapiens
tgtgtcgtctcaagaaatcaagtagaggcgaggactgtgttcctccggccagcaggtggcaccatactcgcttggtgcgttccgctggagaattctggcccttccgccgcgccgtaggtttgttgcctcaccagtgcgcccgccggagggtgtttatcgcggctagagagatgtcgctgctgcggtcgctgcgcgtgtttctggtcgcgcggaccgggagctacccggctgggtctcttctgcgtcagtcgccccagccaaggcacacattttatgctgggccccgtctgtctgcctcggcctccagcaaggagctcctcatgaagctgcggcggaaaacaggctactcctttgtaaattgcaagaaagctctggagacttgtggcggggacctcaaacaggcagagatctggctccacaaggaggcccagaaggagggctggagcaaagctgccaagctccaagggaggaagaccaaagaaggcctgattgggctgttgcaggaaggaaacacaactgtattagtagaggtaaactgtgagacagattttgtttctagaaatttaaaatttcaactgttggtccagcaagtagcccttggaaccatgatgcattgtcagaccctaaaggatcaaccctctgcatacagtaaaggtttcttgaattcctctgagctttctggacttccagctgggcctgacagagaaggctcactcaaggatcagttggctttagcaattggaaaactgggagaaaacatgattcttaaacgagctgcatgggtgaaggtgccatctgggttctacgttggctcttatgtccacggagcaatgcagagtccctcacttcacaagctggtgctggggaagtatggggccctggtcatctgtgagacgtctgaacagaaaacaaaccttgaagacgttggccgccgccttgggcagcatgtggtgggcatggcccccctctctgttggctccctggacgatgagcctgggggagaggcagagactaagatgctgtcccagccgtatttgctggatccctccattaccttggggcagtatgtgcagcctcagggggtgtcggtagtagactttgtgcggtttgaatgtggagaaggtgaagaggcagcagaaactgaataggttccagagacttttggcccaggaggaatatttacttttagctctggacatcattacaaaaaggaatatttcccaaacctcttcagaccgagaatgcatgggtaaaattattaaatagttgtataataaaaataattttttccttgtttgcgtaatactggatttagcttttctgtgcctttcaaaaacaacaggtgggccttattgacgtgatagtgtcgtggagaacaggcatcaacaatactgctgctcccttcaacatagatttattatggtatttctgaaatttctaacttatatgttctgtcttacaccttttatgacatagaactcttttgttctgtttttgctttgcgacactgtgaaccgtgcttctgcctcggaacctccctagttatattacttgtgccacatggatttctttaggattattgattcaaacctagagttgtctggaaaatgtgggttctcttctttgtgattgtctgtagtatgctttgaaggtgctctgcagtggtagacacactggttctggcctcatttaatgaaattaataacacatgcccctatttctcttttggatgatgtgtgggtgggtgggtactgaggtttcctggccagctgtaaggcagattttgacattcttgtgccagaaacagaaattagagtagtccagttacccagagagctcacttaacattgcctctttacttccccagtactgaaacatttcttcaagtataacataaaattaccgtaacaagcagacccagaatactgaaaataactccatttgttcattataggtatctttatttgaaaagtgaaaaatgctttgacacattacagatctgggtatttggattttgcctatggagtgcatatatgatttcaatgatttacaggctaaatagattttagaaataatcatcttaaaattgaaaacaaaggtaggtcctggtataatattaaacataaagttattaaacattttaagcattgttt

SEQ ID NO: 353105 - DNA, 1306 bp, Homo sapiens
tgtgtcgtctcaagaaatcaagtagaggcgaggactgtgttcctccggccagcaggtggcaccatactcgcttggtgcgttccgctggagaattctggcccttccgccgcgccgtaggtttgttgcctcaccagtgcgcccgccggagggtgtttatcgcggctagagagatgtcgctgctgcggtcgctgcgcgtgtttctggtcgcgcggaccgggagctacccggctgggtctcttctgcgtcagtcgccccagccaaggcacacattttatgctgggccccgtctgtctgcctcggcctccagcaaggagctcctcatgaagctgcggcggaaaacaggctactcctttgtaaattgcaagaaagctctggagacttgtggcggggacctcaaacaggcagagatctggctccacaaggaggcccagaaggagggctggagcaaagctgccaagctccaagggaggaagaccaaagaaggcctgattgggctgttgcaggaaggaaacacaactgtattagtagaggtaaactgtgagacagattttgtttctagaaatttaaaatttcaactgttggtccagcaagtagcccttggaaccatgatgcattgtcagaccctaaaggatcaaccctctgcatacagtaaaggtttcttgaattcctctgagctttctggacttccagctgggcctgacagagaaggctcactcaaggatcagttggctttagcaattggaaaactgggagaaaacatgattcttaaacgagctgcatgggtgaaggtgccatctgggttctacgttggctcttatgtccacggagcaatgcagagtccctcacttcacaagctggtgctggggaagtatggggccctggtcatctgtgagacgtctgaacagaaaacaaaccttgaagacgttggccgccgccttgggcagcatgtggtgggcatggcccccctctctgttggctccctggacgatgagcctgggggagaggcagagactaagatgctgtcccagccgtatttgctggatccctccattaccttggggcagtatgtgcagcctcagggggtgtcggtagtagactttgtgcggtttgaatgtggagaaggtgaagaggcagcagaaactgaataggttccagagacttttggcccaggaggaatatttacttttagctctggacatcattacaaaaaggaatatttcccaaacctcttcagaccgagaatgcatgggtaaatatacccttgtataatagataattccttgttgcggcggggggaggggggggg

SEQ ID NO: 353106 - DNA, 1351 bp, Homo sapiens
tgtgtcgtctcaagaaatcaagtagaggcgaggactgtgttcctccggccagcaggtggcaccatactcgcttggtgcgttccgctggagaattctggcccttccgccgcgccgtaggtttgttgcctcaccagtgcgcccgccggagggtgtttatcgcggctagagagatgtcgctgctgcggtcgctgcgcgtgtttctggtcgcgcggaccgggagctacccggtgagaagtcctggtgctggtaccgacctgctgtccctgcagctctcctgctgggtctcttctgcgtcagtcgccccagccaaggcacacattttatgctgggccccgtctgtctgcctcggcctccagcaaggagctcctcatgaagctgcggcggaaaacaggctactcctttgtaaattgcaagaaagctctggagacttgtggcggggacctcaaacaggcagagatctggctccacaaggaggcccagaaggagggctggagcaaagctgccaagctccaagggaggaagaccaaagaaggcctgattgggctgttgcaggaaggaaacacaactgtattagtagaggtaaactgtgagacagattttgtttctagaaatttaaaatttcaactgttggtccagcaagtagcccttggaaccatgatgcattgtcagaccctaaaggatcaaccctctgcatacagtaaaggtttcttgaattcctctgagctttctggacttccagctgggcctgacagagaaggctcactcaaggatcagttggctttagcaattggaaaactgggagaaaacatgattcttaaacgagctgcatgggtgaaggtgccatctgggttctacgttggctcttatgtccacggagcaatgcagagtccctcacttcacaagctggtgctggggaagtatggggccctggtcatctgtgagacgtctgaacagaaaacaaaccttgaagacgttggccgccgccttgggcagcatgtggtgggcatggcccccctctctgttggctccctggacgatgagcctgggggagaggcagagactaagatgctgtcccagccgtatttgctggatccctccattaccttggggcagtatgtgcagcctcagggggtgtcggtagtagactttgtgcggtttgaatgtggagaaggtgaagaggcagcagaaactgaataggttccagagacttttggcccaggaggaatatttacttttagctctggacatcattacaaaaaggaatatttcccaaacctcttcagaccgagaatgcatgggtaaaattattaaatagttgtataataaaaataattttttccttgtttgcgta

SEQ ID NO: 353107 - DNA, 2216 bp, Homo sapiens
tgtgtcgtctcaagaaatcaagtagaggcgaggactgtgttcctccggccagcaggtggcaccatactcgcttggtgcgttccgctggagaattctggcccttccgccgcgccgtaggtttgttgcctcaccagtgcgcccgccggagggtgtttatcgcggctagagagatgtcgctgctgcggtcgctgcgcgtgtttctggtcgcgcggaccgggagctacccggctgggtctcttctgcgtcagtcgccccagccaaggcacacattttatgctgggccccgtctgtctgcctcggcctccagcaaggagctcctcatgaagctgcggcggaaaacaggctactcctttgtaaattgcaagaaagctctggagacttgtggcggggacctcaaacaggcagagatctggctccacaaggaggcccagaaggagggctggagcaaagctgccaagctccaagggaggaagaccaaagaaggcctgattgggctgttgcaggaaggaaacacaactgtattagtagaggtaaactgtgagacagattttgtttctagaaatttaaaatttcaactgttggtccagcaagtagcccttggaaccatgatgcattgtcagaccctaaaggatcaaccctctgcatacagtaaagtgcagtggctcacgcctgtaaacctagcactttgggaggctgaagcaggtggatcacttgagggtttcttgaattcctctgagctttctggacttccagctgggcctgacagagaaggctcactcaaggatcagttggctttagcaattggaaaactgggagaaaacatgattcttaaacgagctgcatgggtgaaggtgccatctgggttctacgttggctcttatgtccacggagcaatgcagagtccctcacttcacaagctggtgctggggaagtatggggccctggtcatctgtgagacgtctgaacagaaaacaaaccttgaagacgttggccgccgccttgggcagcatgtggtgggcatggcccccctctctgttggctccctggacgatgagcctgggggagaggcagagactaagatgctgtcccagccgtatttgctggatccctccattaccttggggcagtatgtgcagcctcagggggtgtcggtagtagactttgtgcggtttgaatgtggagaaggtgaagaggcagcagaaactgaataggttccagagacttttggcccaggaggaatatttacttttagctctggacatcattacaaaaaggaatatttcccaaacctcttcagaccgagaatgcatgggtaaaattattaaatagttgtataataaaaataattttttccttgtttgcgtaatactggatttagcttttctgtgcctttcaaaaacaacaggtgggccttattgacgtgatagtgtcgtggagaacaggcatcaacaatactgctgctcccttcaacatagatttattatggtatttctgaaatttctaacttatatgttctgtcttacaccttttatgacatagaactcttttgttctgtttttgctttgcgacactgtgaaccgtgcttctgcctcggaacctccctagttatattacttgtgccacatggatttctttaggattattgattcaaacctagagttgtctggaaaatgtgggttctcttctttgtgattgtctgtagtatgctttgaaggtgctctgcagtggtagacacactggttctggcctcatttaatgaaattaataacacatgcccctatttctcttttggatgatgtgtgggtgggtgggtactgaggtttcctggccagctgtaaggcagattttgacattcttgtgccagaaacagaaattagagtagtccagttacccagagagctcacttaacattgcctctttacttccccagtactgaaacatttcttcaagtataacataaaattaccgtaacaagcagacccagaatactgaaaataactccatttgttcattataggtatctttatttgaaaagtgaaaaatgctttgacacattacagatctgggtatttggattttgcctatggagtgcatatatgatttcaatgatttacaggctaaatagattttagaaataatcatcttaaaattgaaaacaaaggtaggtcctggtataatattaaacataaagttattaaacattttaagcattgttt

SEQ ID NO: 353108 - DNA, 1464 bp, Homo sapiens
tcacctgcagctcccactctttatttccaaagaatcagggtcacacatgcagatcacaaagcgggtctccctgtgctgcttccttctgtgttttctagtctctcccccaggggctgcccagggccctcaggaactgagcctcgtgccgaattcgcacgaggcaagctggtgctggggaagtatggggccctggtcatctgtgagacgtctgaacagaaaacaaaccttgaagacgttggccgccgccttgggcagcatgtggtgggcatggcccccctctctgttggctccctggacgatgagcctgggggagaggcagagactaagatgctgtcccagccgtatttgctggatccctccattaccttggggcagtatgtgcagcctcagggggtgtcggtagtagactttgtgcggtttgaatgtggagaaggtgaagaggcagcagaaactgaataggttccagagacttttggcccaggaggaatatttacttttagctctggacatcattacaaaaaggaatatttcccaaacctcttcagaccgagaatgcatgggtaaaattattaaatagttgtataataaaaataattttttccttgtttgcgtaatactggatttagcttttctgtgcctttcaaaaacaacaggtgggccttattgacgtgatagtgtcgtggagaacaggcatcaacaatactgctgctcccttcaacatagatttattatggtatttctgaaatttctaacttatatgttctgtcttacaccttttatgacatagaactcttttgttctgtttttgctttgcgacactgtgaaccgtgcttctgcctcggaacctccctagttatattacttgtgccacatggatttctttaggattattgattcaaacctagagttgtctggaaaatgtgggttctcttctttgtgattgtctgtagtatgctttgaaggtgctctgcagtggtagacacactggttctggcctcatttaatgaaattaataacacatgcccctatttctcttttggatgatgtgtgggtgggtgggtactgaggtttcctggccagctgtaaggcagattttgacattcttgtgccagaaacagaaattagagtagtccagttacccagagagctcacttaacattgcctctttacttccccagtactgaaacatttcttcaagtataacataaaattaccgtaacaagcagacccagaatactgaaaataactccatttgttcattataggtatctttatttgaaaagtgaaaaatgctttgacacattacagatctgggtatttggattttgcctatggagtgcatatatgatttcaatgatttacaggctaaatagattttagaaataatcatcttaaaattgaaaacaaaggtaggtcctggtataatattaaacataaagttattaaacattttaagcattgttt

SEQ ID NO: 353109 - DNA, 531 bp, Homo sapiens
ggccgagaaagggcctgggcggccgcactgagagctttacgcccggaggcgtcggcgctgccactggcccgcgacgggaacggggcgaaaaggcggcggcaccatgttctccctcaagccgcccaaacccaccttcaggtcctacctcctgccaccgccccagactgacgataagatcaattcggaaccgaaagtgctgggattacaggcgtgagccactgcgcctggccacttttttaaaattagcttttaaatttaagatatgtgctaagaaaaggtgttactaagtatgcataaacttgaagaactttctcactgagggttatcaattctataaaatggctaaaagtcagagttttctggggaagttgtaaaccaagtttctgactgtgcttttcttgtcccagaaatggcagctaaattccgtattatttttagagaaattctaaaagagctgtaacactaagtctgaaccttttagttgcccattaaggaattctctgacctgtgttaatttttattgcattggcg

SEQ ID NO: 353110 - DNA, 4971 bp, Homo sapiens
ggccgagaaagggcctgggcggccgcactgagagctttacgcccggaggcgtcggcgctgccactggcccgcgacgggaacggggcgaaaaggcggcggcaccatgttctccctcaagccgcccaaacccaccttcaggtcctacctcctgccaccgccccagactgacgataagatcaattcggaaccgaagattaaaaaactggagccagtccttttgccaggagaaattgtcgtaaatgaagtcaattttgtgagaaaatgcattgcaacagacacaagccagtacgatttgtggggaaagctgatatgcagtaacttcaaaatctcctttattacagatgacccaatgccattacagaaattccattacagaaaccttcttcttggtgaacacgatgtccctttaacatgtattgaacaaattgtcacagtaaacgaccacaagaggaagcagaaagtcctaggccccaaccagaaactgaaatttaatccaacagagttaattatttattgtaaagatttcagaattgtcagatttcgctttgatgaatcaggtcccgaaagtgctaaaaaggtatgccttgcaatagctcattattcccagccaacagacctccagctactctttgcatttgaatatgttgggaaaaaataccacaattcagcaaacaaaattaatggaattccctcaggagatggaggaggaggaggaggaggaggtaatggagctggtggtggcagcagccagaaaactccactctttgaaacttactcggattgggacagagaaatcaagaggacaggtgcttccgggtggagagtttgttctattaacgagggttacatgatatccacttgccttccagaatacattgtagtgccaagttctttagcagaccaagatctaaagatcttttcccattcttttgttgggagaaggatgccactctggtgctggagccactctaacggcagtgctcttgtgcgaatggccctcatcaaagacgtgctgcagcagaggaagattgaccagaggatttgtaatgcaataactaaaagtcacccacagagaagtgatgtttacaaatcagatttggataagaccttgcctaatattcaagaagtacaagcagcatttgtaaaactgaagcagctatgcgttaatgagccttttgaagaaactgaagagaaatggttatcttcactggaaaatactcgatggttagaatatgtaagggcattccttaagcattcagcagaacttgtatacatgctagaaagcaaacatctctctgtagtcctacaagaggaggaaggaagagacttgagctgttgtgtagcttctcttgttcaagtgatgctggatccctattttaggacaattactggatttcagagtctgatacagaaggagtgggtcatggcaggatatcagtttctagacagatgcaaccatctaaagagatcagagaaagagtctcctttatttttgctattcttggatgccacctggcagctgttagaacaatatcctgcagcttttgagttctccgaaacctacctggcagtgttgtatgacagcacccggatctcactgtttggcaccttcctgttcaactcccctcaccagcgagtgaagcaaagcacggaatttgctataagcaaaaacatccaattgggtgatgagaagggcttaaaattcccctctgtttgggactggtctctccagtttacagcaaaggatcgcacccttttccataaccccttctacattggaaagagcacaccttgtatacagaatggctccgtgaagtcttttaaacggacaaagaaaagctacagctccacactaagaggaatgccgtctgccttaaagaatggaatcatcagtgaccaagaattacttccaaggagaaattcattgatattaaaaccaaagccagatccagctcagcaaaccgacagccagaacagtgatacggagcagtattttagagaatggttttccaaacccgccaacctgcacggtgttattctgccacgtgtctctggaacacacataaaactgtggaaactgtgctacttccgctgggttcccgaggcccagatcagcctgggtggctccatcacagcctttcacaagctctccctcctggctgatgaagtcgacgtactgagcaggatgctgcggcaacagcgcagtggccccctggaggcctgctatggggagctgggccagagcaggatgtacttcaacgccagcggccctcaccacaccgacacctcggggacaccggagtttctctcctcctcatttccattttctcctgtagggaatctgtgcagacgaagcattttaggaacaccattaagcaaatttttaagtggggccaaaatatggttgtctactgagacattagcaaatgaagactaaaatagggtgttttctgaacattttgagggaagctgtcaacttttttcctctgaattaacattgctaacctaggcgtttgaatctctaataactttatatgtaagaataatagttggaatttgcactaatatttaaaaacatgttgaatcatgcttctttcacacttattttaagagagatgtaaattttgttcctgtcctctttctgtcattacaggtctggctcttgtaaccgtgatcaaactgttcatgttgtctgctacatttttgtctccatccatttttcctaccacctcctgaaggctatctgatagtcagtcacattagcagccccaggcagcagacaacaggaaagttaggaaatttgtgtttcgtgtcatttttaggagcatctgataaaacctccagcaggttttaggaagtattcatgtatttttctggttactttctgtcatctctaattgaactcacctgatgaaggttcagtgttctggggccagaatttatgattttagatcaccttctttggaaccttagatcactgtgttttgaaatcatgagtttgcttttaacttcatagggtcaactttaaaatgatatgcactgttaattttaaagcatttgctgcagataattaaacttagaagtgcctttgactttaggatacaaatattacagaagaaaatataatttcactttttaaaattggggtgggaaaatcccattgcatatttgaaataggcttttcatactaagcttcatagccaggagtccccagagtcttgttcctctgaaagccactggggagtggcctctggggtgctgattccacagaggtgtatgctgtagacaggagagtgccatctatgccaaaactcgccctcaaaaacaaacaaggcttgctgggaggcgtgctgggcttggccatcagtatttccagtgtggtaaactattgctggcacttccccctggaaataactaatgaggttacgagttgggcacctgcacagatgtccttctctcatagttcctaatgcttaggaatagaggagaaataaaaaaatggattctctcaaaacactgccatttgaatagcgacagaagtgctcccccagcccccaactttggacagcaaagttgaggagaatgagcagacacagttgtttgcttgatctgaatctctctaaagtaaagtatttccaaactgtgtgacaagagcctacctaccactgtagcggtcaaagctgaagcttcttacagcagtgaaacggggcaccacctcccccacactcctcattccccgcttaaaacatggatactttcaaatttgactgtttcttaaactgccatcctaagatatggaaaatttttatagtaaagtgtctagttagcttatttccttttctaaaacaagtgttttcaagataactgtattttacctttatatgtactgaatagctgtttctttttgaattatttgccttttaaaatttgataatgtctctggatataacaggacaggagttcttaaaaaatatcttaagaaattcactttatgggtaaacccaaggtttttgccaacttgttgcctagaaaataagggctagtttcagtttatacaaatagaattattaaacattttacagtccttgattagaaaccagacccaatctccttataacaccacagcgtatcctgccattgacagtgtaatcacaattctccctttttcatttagctgcttttttattattactaaatgttttggattgagcatttttccctctgtaattttcttccttcacgtttattttattttaactcttgtagtattttattgttgttaatttacaagtttaaaaatattaggtactattaataatggttaaaaatagaaaaatgcatatttttgtatgataatcaaatgtaaaatacttttatttttgctggacagttgttatatcatgattattgtgctacagtttattgtgcataatatgaaaaacaactatgacagccttcagtcgggccagggtgaagctgcttataccacctctgccgtcagagggacatgtggtgacagcagtggtgtggctgcacagggcgcactagagagagctcagcacccctgctgcccgccagcagagcccgtgctgagggaatgccgcacagatgctgatgcactgggtgaaatttctagtattgaacgtaaaggtgtacagtgtcttgctgttattttatgatggaaactgattttgaaaccaaaaatagctaactaactttatttaaggaaaggatattaatttgtactaacagagggtgaaagctgttcacatttgtcaacaaaatctgcttgctgcagtagtaacctcaagtggttaaaacttgatttcccgagaaaactaaaacctttgtgcctaaaattgatgacttgagttcaagtgggatgagcaagaagatgtgttatcttgttgttcaacagtattgagtgtgaaggaaattttgatggcttaataaaattccacagcgactgtt

SEQ ID NO: 353111 - DNA, 4910 bp, Homo sapiens
ggccgagaaagggcctgggcggccgcactgagagctttacgcccggaggcgtcggcgctgccactggcccgcgacgggaacggggcgaaaaggcggcggcaccatgttctccctcaagccgcccaaacccaccttcaggtcctacctcctgccaccgccccaggagaaattgtcgtaaatgaagtcaattttgtgagaaaatgcattgcaacagacacaagccagtacgatttgtggggaaagctgatatgcagtaacttcaaaatctcctttattacagatgacccaatgccattacagaaattccattacagaaaccttcttcttggtgaacacgatgtccctttaacatgtattgaacaaattgtcacagtaaacgaccacaagaggaagcagaaagtcctaggccccaaccagaaactgaaatttaatccaacagagttaattatttattgtaaagatttcagaattgtcagatttcgctttgatgaatcaggtcccgaaagtgctaaaaaggtatgccttgcaatagctcattattcccagccaacagacctccagctactctttgcatttgaatatgttgggaaaaaataccacaattcagcaaacaaaattaatggaattccctcaggagatggaggaggaggaggaggaggaggtaatggagctggtggtggcagcagccagaaaactccactctttgaaacttactcggattgggacagagaaatcaagaggacaggtgcttccgggtggagagtttgttctattaacgagggttacatgatatccacttgccttccagaatacattgtagtgccaagttctttagcagaccaagatctaaagatcttttcccattcttttgttgggagaaggatgccactctggtgctggagccactctaacggcagtgctcttgtgcgaatggccctcatcaaagacgtgctgcagcagaggaagattgaccagaggatttgtaatgcaataactaaaagtcacccacagagaagtgatgtttacaaatcagatttggataagaccttgcctaatattcaagaagtacaagcagcatttgtaaaactgaagcagctatgcgttaatgagccttttgaagaaactgaagagaaatggttatcttcactggaaaatactcgatggttagaatatgtaagggcattccttaagcattcagcagaacttgtatacatgctagaaagcaaacatctctctgtagtcctacaagaggaggaaggaagagacttgagctgttgtgtagcttctcttgttcaagtgatgctggatccctattttaggacaattactggatttcagagtctgatacagaaggagtgggtcatggcaggatatcagtttctagacagatgcaaccatctaaagagatcagagaaagagtctcctttatttttgctattcttggatgccacctggcagctgttagaacaatatcctgcagcttttgagttctccgaaacctacctggcagtgttgtatgacagcacccggatctcactgtttggcaccttcctgttcaactcccctcaccagcgagtgaagcaaagcacggaatttgctataagcaaaaacatccaattgggtgatgagaagggcttaaaattcccctctgtttgggactggtctctccagtttacagcaaaggatcgcacccttttccataaccccttctacattggaaagagcacaccttgtatacagaatggctccgtgaagtcttttaaacggacaaagaaaagctacagctccacactaagaggaatgccgtctgccttaaagaatggaatcatcagtgaccaagaattacttccaaggagaaattcattgatattaaaaccaaagccagatccagctcagcaaaccgacagccagaacagtgatacggagcagtattttagagaatggttttccaaacccgccaacctgcacggtgttattctgccacgtgtctctggaacacacataaaactgtggaaactgtgctacttccgctgggttcccgaggcccagatcagcctgggtggctccatcacagcctttcacaagctctccctcctggctgatgaagtcgacgtactgagcaggatgctgcggcaacagcgcagtggccccctggaggcctgctatggggagctgggccagagcaggatgtacttcaacgccagcggccctcaccacaccgacacctcggggacaccggagtttctctcctcctcatttccattttctcctgtagggaatctgtgcagacgaagcattttaggaacaccattaagcaaatttttaagtggggccaaaatatggttgtctactgagacattagcaaatgaagactaaaatagggtgttttctgaacattttgagggaagctgtcaacttttttcctctgaattaacattgctaacctaggcgtttgaatctctaataactttatatgtaagaataatagttggaatttgcactaatatttaaaaacatgttgaatcatgcttctttcacacttattttaagagagatgtaaattttgttcctgtcctctttctgtcattacaggtctggctcttgtaaccgtgatcaaactgttcatgttgtctgctacatttttgtctccatccatttttcctaccacctcctgaaggctatctgatagtcagtcacattagcagccccaggcagcagacaacaggaaagttaggaaatttgtgtttcgtgtcatttttaggagcatctgataaaacctccagcaggttttaggaagtattcatgtatttttctggttactttctgtcatctctaattgaactcacctgatgaaggttcagtgttctggggccagaatttatgattttagatcaccttctttggaaccttagatcactgtgttttgaaatcatgagtttgcttttaacttcatagggtcaactttaaaatgatatgcactgttaattttaaagcatttgctgcagataattaaacttagaagtgcctttgactttaggatacaaatattacagaagaaaatataatttcactttttaaaattggggtgggaaaatcccattgcatatttgaaataggcttttcatactaagcttcatagccaggagtccccagagtcttgttcctctgaaagccactggggagtggcctctggggtgctgattccacagaggtgtatgctgtagacaggagagtgccatctatgccaaaactcgccctcaaaaacaaacaaggcttgctgggaggcgtgctgggcttggccatcagtatttccagtgtggtaaactattgctggcacttccccctggaaataactaatgaggttacgagttgggcacctgcacagatgtccttctctcatagttcctaatgcttaggaatagaggagaaataaaaaaatggattctctcaaaacactgccatttgaatagcgacagaagtgctcccccagcccccaactttggacagcaaagttgaggagaatgagcagacacagttgtttgcttgatctgaatctctctaaagtaaagtatttccaaactgtgtgacaagagcctacctaccactgtagcggtcaaagctgaagcttcttacagcagtgaaacggggcaccacctcccccacactcctcattccccgcttaaaacatggatactttcaaatttgactgtttcttaaactgccatcctaagatatggaaaatttttatagtaaagtgtctagttagcttatttccttttctaaaacaagtgttttcaagataactgtattttacctttatatgtactgaatagctgtttctttttgaattatttgccttttaaaatttgataatgtctctggatataacaggacaggagttcttaaaaaatatcttaagaaattcactttatgggtaaacccaaggtttttgccaacttgttgcctagaaaataagggctagtttcagtttatacaaatagaattattaaacattttacagtccttgattagaaaccagacccaatctccttataacaccacagcgtatcctgccattgacagtgtaatcacaattctccctttttcatttagctgcttttttattattactaaatgttttggattgagcatttttccctctgtaattttcttccttcacgtttattttattttaactcttgtagtattttattgttgttaatttacaagtttaaaaatattaggtactattaataatggttaaaaatagaaaaatgcatatttttgtatgataatcaaatgtaaaatacttttatttttgctggacagttgttatatcatgattattgtgctacagtttattgtgcataatatgaaaaacaactatgacagccttcagtcgggccagggtgaagctgcttataccacctctgccgtcagagggacatgtggtgacagcagtggtgtggctgcacagggcgcactagagagagctcagcacccctgctgcccgccagcagagcccgtgctgagggaatgccgcacagatgctgatgcactgggtgaaatttctagtattgaacgtaaaggtgtacagtgtcttgctgttattttatgatggaaactgattttgaaaccaaaaatagctaactaactttatttaaggaaaggatattaatttgtactaacagagggtgaaagctgttcacatttgtcaacaaaatctgcttgctgcagtagtaacctcaagtggttaaaacttgatttcccgagaaaactaaaacctttgtgcctaaaattgatgacttgagttcaagtgggatgagcaagaagatgtgttatcttgttgttcaacagtattgagtgtgaaggaaattttgatggcttaataaaattccacagcgactgtt

SEQ ID NO: 353112 - DNA, 4427 bp, Homo sapiens
  misc_feature (42)..(42): n is a, c, g, or t
gtctgtgtaacctcgcggtattcccgtcgcaacagcaggccntctcatcctaagttaaaacagcgccagttacaacagctccagttacaacagctgaatatgttgggaaaaaataccacaattccaaacaaaattaatggaattccctcaggagatggaggaggaggaggaggaggaggtaatggagctggtggtggcagcagccagaaaactccactctttgaaacttactcggattgggacagagaaatcaagaggacaggtgcttccgggtggagagtttgttctattaacgagggttacatgatatccacttgccttccagaatacattgtagtgccaagttctttagcagaccaagatctaaagatcttttcccattcttttgttgggagaaggatgccactctggtgctggagccactctaacggcagtgctcttgtgcgaatggccctcatcaaagacgtgctgcagcagaggaagattgaccagaggatttgtaatgcaataactaaaagtcacccacagagaagtgatgtttacaaatcagatttggataagaccttgcctaatattcaagaagtacaagcagcatttgtaaaactgaagcagctatgcgttaatgagccttttgaagaaactgaagagaaatggttatcttcactggaaaatactcgatggttagaatatgtaagggcattccttaagcattcagcagaacttgtatacatgctagaaagcaaacatctctctgtagtcctacaagaggaggaaggaagagacttgagctgttgtgtagcttctcttgttcaagtgatgctggatccctattttaggacaattactggatttcagagtctgatacagaaggagtgggtcatggcaggatatcagtttctagacagatgcaaccatctaaagagatcagagaaagagtctcctttatttttgctattcttggatgccacctggcagctgttagaacaatatcctgcagcttttgagttctccgaaacctacctggcagtgttgtatgacagcacccggatctcactgtttggcaccttcctgttcaactcccctcaccagcgagtgaagcaaagcacggaatttgctataagcaaaaacatccaattgggtgatgagaagggcttaaaattcccctctgtttgggactggtctctccagtttacagcaaaggatcgcacccttttccataaccccttctacattggaaagagcacaccttgtatacagaatggctccgtgaagtcttttaaacggacaaagaaaagctacagctccacactaagaggaatgccgtctgccttaaagaatggaatcatcagtgaccaagaattacttccaaggagaaattcattgatattaaaaccaaagccagatccagctcagcaaaccgacagccagaacagtgatacggagcagtattttagagaatggttttccaaacccgccaacctgcacggtgttattctgccacgtgtctctggaacacacataaaactgtggaaactgtgctacttccgctgggttcccgaggcccagatcagcctgggtggctccatcacagcctttcacaagctctccctcctggctgatgaagtcgacgtactgagcaggatgctgcggcaacagcgcagtggccccctggaggcctgctatggggagctgggccagagcaggatgtacttcaacgccagcggccctcaccacaccgacacctcggggacaccggagtttctctcctcctcatttccattttctcctgtagggaatctgtgcagacgaagcattttaggaacaccattaagcaaatttttaagtggggccaaaatatggttgtctactgagacattagcaaatgaagactaaaatagggtgttttctgaacattttgagggaagctgtcaacttttttcctctgaattaacattgctaacctaggcgtttgaatctctaataactttatatgtaagaataatagttggaatttgcactaatatttaaaaacatgttgaatcatgcttctttcacacttattttaagagagatgtaaattttgttcctgtcctctttctgtcattacaggtctggctcttgtaaccgtgatcaaactgttcatgttgtctgctacatttttgtctccatccatttttcctaccacctcctgaaggctatctgatagtcagtcacattagcagccccaggcagcagacaacaggaaagttaggaaatttgtgtttcgtgtcatttttaggagcatctgataaaacctccagcaggttttaggaagtattcatgtatttttctggttactttctgtcatctctaattgaactcacctgatgaaggttcagtgttctggggccagaatttatgattttagatcaccttctttggaaccttagatcactgtgttttgaaatcatgagtttgcttttaacttcatagggtcaactttaaaatgatatgcactgttaattttaaagcatttgctgcagataattaaacttagaagtgcctttgactttaggatacaaatattacagaagaaaatataatttcactttttaaaattggggtgggaaaatcccattgcatatttgaaataggcttttcatactaagcttcatagccaggagtccccagagtcttgttcctctgaaagccactggggagtggcctctggggtgctgattccacagaggtgtatgctgtagacaggagagtgccatctatgccaaaactcgccctcaaaaacaaacaaggcttgctgggaggcgtgctgggcttggccatcagtatttccagtgtggtaaactattgctggcacttccccctggaaataactaatgaggttacgagttgggcacctgcacagatgtccttctctcatagttcctaatgcttaggaatagaggagaaataaaaaaatggattctctcaaaacactgccatttgaatagcgacagaagtgctcccccagcccccaactttggacagcaaagttgaggagaatgagcagacacagttgtttgcttgatctgaatctctctaaagtaaagtatttccaaactgtgtgacaagagcctacctaccactgtagcggtcaaagctgaagcttcttacagcagtgaaacggggcaccacctcccccacactcctcattccccgcttaaaacatggatactttcaaatttgactgtttcttaaactgccatcctaagatatggaaaatttttatagtaaagtgtctagttagcttatttccttttctaaaacaagtgttttcaagataactgtattttacctttatatgtactgaatagctgtttctttttgaattatttgccttttaaaatttgataatgtctctggatataacaggacaggagttcttaaaaaatatcttaagaaattcactttatgggtaaacccaaggtttttgccaacttgttgcctagaaaataagggctagtttcagtttatacaaatagaattattaaacattttacagtccttgattagaaaccagacccaatctccttataacaccacagcgtatcctgccattgacagtgtaatcacaattctccctttttcatttagctgcttttttattattactaaatgttttggattgagcatttttccctctgtaattttcttccttcacgtttattttattttaactcttgtagtattttattgttgttaatttacaagtttaaaaatattaggtactattaataatggttaaaaatagaaaaatgcatatttttgtatgataatcaaatgtaaaatacttttatttttgctggacagttgttatatcatgattattgtgctacagtttattgtgcataatatgaaaaacaactatgacagccttcagtcgggccagggtgaagctgcttataccacctctgccgtcagagggacatgtggtgacagcagtggtgtggctgcacagggcgcactagagagagctcagcacccctgctgcccgccagcagagcccgtgctgagggaatgccgcacagatgctgatgcactgggtgaaatttctagtattgaacgtaaaggtgtacagtgtcttgctgttattttatgatggaaactgattttgaaaccaaaaatagctaactaactttatttaaggaaaggatattaatttgtactaacagagggtgaaagctgttcacatttgtcaacaaaatctgcttgctgcagtagtaacctcaagtggttaaaacttgatttcccgagaaaactaaaacctttgtgcctaaaattgatgacttgagttcaagtgggatgagcaagaagatgtgttatcttgttgttcaacagtattgagtgtgaaggaaattttgatggcttaataaaattccacagcgactgtt

SEQ ID NO: 353113 - DNA, 2922 bp, Homo sapiens
ggccgagaaagggcctgggcggccgcactgagagctttacgcccggaggcgtcggcgctgccactggcccgcgacgggaacggggcgaaaaggcggcggcaccatgttctccctcaagccgcccaaacccaccttcaggtcctacctcctgccaccgccccagactgacgataagatcaattcggaaccgaagattaaaaaactggagccagtccttttgccaggagaaattgtcgtaaatgaagtcaattttgtgagaaaatgcattgcaacagacacaagccagtacgatttgtggggaaagctgatatgcagtaacttcaaaatctcctttattacagatgacccaatgccattacagaaattccattacagaaaccttcttcttggtgaacacgatgtccctttaacatgtattgaacaaattgtcacagtaaacgaccacaagaggaagcagaaagtcctaggccccaaccagaaactgaaatttaatccaacagagttaattatttattgtaaagatttcagaattgtcagatttcgctttgatgaatcaggtcccgaaagtgctaaaaaggtatgccttgcaatagctcattattcccagccaacagacctccagctactctttgcatttgaatatgttgggaaaaaataccacaattcagcaaacaaaattaatggaattccctcaggagatggaggaggaggaggaggaggaggtaatggagctggtggtggcagcagccagaaaactccactctttgaaacttactcggattgggacagagaaatcaagaggacaggtgcttccgggtggagagtttgttctattaacgagggttacatgatatccacttgccttccagaatacattgtagtgccaagttctttagcagaccaagatctaaagatcttttcccattcttttgttgggagaaggatgccactctggtgctggagccactctaacggcagtgctcttgtgcgaatggccctcatcaaagacgtgctgcagcagaggaagattgaccagaggatttgtaatgcaataactaaaagtcacccacagagaagtgatgtttacaaatcagatttggataagaccttgcctaatattcaagaagtacaagcagcatttgtaaaactgaagcagctatgcgttaatgagccttttgaagaaactgaagagaaatggttatcttcactggaaaatactcgatggttagaatatgtaagggcattccttaagcattcagcagaacttgtatacatgctagaaagcaaacatctctctgtagtcctacaagaggaggaaggaagagacttgagctgttgtgtagcttctcttgttcaagtgatgctggatccctattttaggacaattactggatttcagagtctgatacagaaggagtgggtcatggcaggatatcagtttctagacagatgcaaccatctaaagagatcagagaaagagtctcctttatttttgctattcttggatgccacctggcagctgttagaacaatatcctgcagcttttgagttctccgaaacctacctggcagtgttgtatgacagcacccggatctcactgtttggcaccttcctgttcaactcccctcaccagcgagtgaagcaaagcacggaatttgctataagcaaaaacatccaattgggtgatgagaagggcttaaaattcccctctgtttgggactggtctctccagtttacagcaaaggatcgcacccttttccataaccccttctacattggaaagagcacaccttgtatacagaatggctccgtgaagtcttttaaacggacaaagaaaagctacagctccacactaagaggaatgccgtctgccttaaagaatggaatcatcagtgaccaagaattacttccaaggagaaattcattgatattaaaaccaaagccagatccagctctacaagaacttctttttttgtgtttgtatatttttattttccctttttggaaatggagtctcactctgtcacccaggctggtgtgcagtggcgcgatctcagctcactgcaacctctacctcccaggttcaggcaattctcctgactcagcctcccaagtagctgggattacaggcacctgccaccacaccaggctaatttttgtatttttagtagagacagggttttaccatattggccaggctggtctcgaactcctgatcttgtgatccacctgcctcagcctcccaaagtgctgggattacaggtgtgagccactgtgcccagccagagggtggctaaatttaatgtttacttgcttataaaatgttacatataaggttaacatcaaatacttaagaaatacaattagataaagaaaggacttagaagacatttaacataccacacagatgaggattctatacttctcaagtcaattaattacaagtatgtaatttattgaagtactttttaaaaatctataacacgagcttttttcaagtgttggtatttatatttttcttaatgtctgccttattacacctatgtttcattaaagattagtatttatagcacctccccaacaaggatgggctcataacaactgaaatatacaaaacaaatatataaaataaataacaacatcatgttaaagtgttttcaaaagcatcctctcatttcatcctcgactccacagtagtgaattcccaggctagagttgatatagtttgattatataaataacatgggcaaaagaaatcaattctaaaagtttttgtaattttcaactgaaacaggtcaagggcttctcaaggacaaaagaagccactcacagtttttggtaaattgttacgtttaaactcaggaaaacttgcacattaagactgcctgattatactttgtttagtaaacaaaaactaaaata

SEQ ID NO: 353114 - DNA, 2184 bp, Homo sapiens
ggccgagaaagggcctgggcggccgcactgagagctttacgcccggaggcgtcggcgctgccactggcccgcgacgggaacggggcgaaaaggcggcggcaccatgttctccctcaagccgcccaaacccaccttcaggtcctacctcctgccaccgccccagactgacgataagatcaattcggaaccgaagattaaaaaactggagccagtccttttgccaggagaaattgtcgtaaatgaagtcaattttgtgagaaaatgcattgcaacagacacaagccagtacgatttgtggggaaagctgatatgcagtaacttcaaaatctcctttattacagatgacccaatgccattacagaaattccattacagaaaccttcttcttggtgaacacgatgtccctttaacatgtattgaacaaattgtcacagtaaacgaccacaagaggaagcagaaagtcctaggccccaaccagaaactgaaatttaatccaacagagttaattatttattgtaaagatttcagaattgtcagatttcgctttgatgaatcaggtcccgaaagtgctaaaaaggtatgccttgcaatagctcattattcccagccaacagacctccagctactctttgcatttgaatatgttgggaaaaaataccacaattcagcaaacaaaattaatggaattccctcaggagatggaggaggaggaggaggaggaggtaatggagctggtggtggcagcagccagaaaactccactctttgaaacttactcggattgggacagagaaatcaagaggacaggtgcttccgggtggagagtttgttctattaacgagggttacatgatatccacttgccttccagaatacattgtagtgccaagttctttagcagaccaagatctaaagatcttttcccattcttttgttgggagaaggatgccactctggtgctggagccactctaacggcagtgctcttgtgcgaatggccctcatcaaagacgtgctgcagcagaggaagattgaccagaggatttgtaatgcaataactaaaagtcacccacagagaagtgatgtttacaaatcagatttggataagaccttgcctaatattcaagaagtacaagcagcatttgtaaaactgaagcagctatgcgttaatgagccttttgaagaaactgaagagaaatggttatcttcactggaaaatactcgatggttagaatatgtaagggcattccttaagcattcagcagaacttgtatacatgctagaaagcaaacatctctctgtagtcctacaagaggaggaaggaagagacttgagctgttgtgtagcttctcttgttcaagtgatgctggatccctattttaggacaattactggatttcagagtctgatacagaaggagtgggtcatggcaggatatcagtttctagacagatgcaaccatctaaagagatcagagaaagagtctcctttatttttgctattcttggatgccacctggcagctgttagaacaatatcctgcagcttttgagttctccgaaacctacctggcagtgttgtatgacagcacccggatctcactgtttggcaccttcctgttcaactcccctcaccagcgagtgaagcaaagcacggaatttgctataagcaaaaacatccaattgggtgatgagaagggcttaaaattcccctctgtttgggactggtctctccagtttacagcaaaggatcgcacccttttccataaccccttctacattggaaagagcacaccttgtatacagaatggctccgtgaagtcttttaaacggacaaaggtgaaccattacctgagcttgctgaagagacgtgaagcgatcccagctgacaagggaagccactctgccttcctgctcatgccacgtggctgccacccaggcccgcaggctctcctcgggggcatcatgaatcagctgcagcctggcctcaagggctgggcgtctgcttgtgaagaagctgtctgtgcacaagtccagggggaatgcctgtgtcacagggaaagcaagctgtcatactgtgcctgcagagagccgtgttcaccagaggactagtcagtacatacaaaacttggaaaccggccaaccgatacattctttctctcaaaagataagtaaaagttaattgatat

SEQ ID NO: 353115 - DNA, 383 bp, Homo sapiens
gtttcaacttgttacatgtactgggcaaataagggttgtgatgtttatcacggttgaatgttacttcttgggtttgatagatgtgtatagctcagcttagaaggcaagtgttttaggcttcgatgttttctcattcatctcttctttaacatcagcagtacattttgaagtaaatgtgaacggctgaaggataacattaaatgatcccattgtctctttgtatttgccagtctcctttatttttgctattcttggatgccacctggcagctgttagaacaatatcctgcagcttttgagttctccgaaacctacctggcagtgttgtatgacagcacccggatctcactgtttggcaccttcctgttcaactcccctcaccag

SEQ ID NO: 353116 - DNA, 2226 bp, Homo sapiens
ctcctctgcgcttccgtggagcctccaggccgacccccgggaactggaggaccccaggaggctgcgcgcgtctccctgcccacagcagcgcggctgcctgattcccggcgccgcgaaatgcgccttctcgggagcccccactggctcggcgaaaacttactgacgataagatcaattcggaaccgaagattaaaaaactggagccagtccttttgccaggagaaattgtcgtaaatgaagtcaattttgtgagaaaatgcattgcaacagacacaagccagtacgatttgtggggaaagctgatatgcagtaacttcaaaatctcctttattacagatgacccaatgccattacagaaattccattacagaaaccttcttcttggtgaacacgatgtccctttaacatgtattgaacaaattgtcacagtaaacgaccacaagaggaagcagaaagtcctaggccccaaccagaaactgaaatttaatccaacagagttaattatttattgtaaagatttcagaattgtcagatttcgctttgatgaatcaggtcccgaaagtgctaaaaaggtatgccttgcaatagctcattattcccagccaacagacctccagctactctttgcatttgaatatgttgggaaaaaataccacaattcagcaaacaaaattaatggaattccctcaggagatggaggaggaggaggaggaggaggtaatggagctggtggtggcagcagccagaaaactccactctttgaaacttactcggattgggacagagaaatcaagaggacaggtgcttccgggtggagagtttgttctattaacgagggttacatgatatccacttgccttccagaatacattgtagtgccaagttctttagcagaccaagatctaaagatcttttcccattcttttgttgggagaaggatgccactctggtgctggagccactctaacggcagtgctcttgtgcgaatggccctcatcaaagacgtgctgcagcagaggaagattgaccagaggatttgtaatgcaataactaaaagtcacccacagagaagtgatgtttacaaatcagatttggataagaccttgcctaatattcaagaagtacaagcagcatttgtaaaactgaagcagctatgcgttaatgagccttttgaagaaactgaagagaaatggttatcttcactggaaaatactcgatggttagaatatgtaagggcattccttaagcattcagcagaacttgtatacatgctagaaagcaaacatctctctgtagtcctacaagaggaggaaggaagagacttgagctgttgtgtagcttctcttgttcaagtgatgctggatccctattttaggacaattactggatttcagagtctgatacagaaggagtgggtcatggcaggatatcagtttctagacagatgcaaccatctaaagagatcagagaaagagtctcctttatttttgctattcttggatgccacctggcagctgttagaacaatatcctgcagcttttgagttctccgaaacctacctggcagtgttgtatgacagcacccggatctcactgtttggcaccttcctgttcaactcccctcaccagcgagtgaagcaaagcacggtcagtaggataaaaagttgtacaaaacaagattattttccttcacgagtttgaagtttctggtcacaattcattgatgtagaggatttatgactaagcagggtctcaagccaaacttgaaaccattctgaaccaaagtgccatttcacccacctcgaaccaacaacagaagctgacaaatgccgtggagaccattgagggaaacagaaaggggcagctcttgtggaccttcaggaagcctttctaggaagaggattgccctcatagtgagctccggggtcttcagcctcagccgtaaggccctgggctaggcagtgtgacctagggagcgggaaacctgagttctggccctggtctgggaaaagtgctaggcccatgttccactcaggcttcagcctgagagtccaggttgctaacctgtaaaatggatctgtcaaactaacacttatgcctttagtctcattgtatgaggtgtaacattttgtaaactgtgaatcattatgcaaattttcctaaagacatatgaattattctggatttgttggtataaaagacaaaatacactggtcaaaaaaaaaaa

SEQ ID NO: 353117 - DNA, 4917 bp, Homo sapiens
ggccgagaaagggcctgggcggccgcactgagagctttacgcccggaggcgtcggcgctgccactggcccgcgacgggaacggggcgaaaaggcggcggcaccatgttctccctcaagccgcccaaacccaccttcaggtcctacctcctgccaccgccccagactgacgataagatcaattcggaaccgaagattaaaaaactggagccagtccttttgccaggagaaattgtcgtaaatgaagtcaattttgtgagaaaatgcattgcaacagacacaagccagtacgatttgtggggaaagctgatatgcagtaacttcaaaatctcctttattacagatgacccaatgccattacagaaattccattacagaaaccttcttcttggtgaacacgatgtccctttaacatgtattgaacaaattgtcacagtaaacgaccacaagaggaagcagaaagtcctaggccccaaccagaaactgaaatttaatccaacagagttaattatttattgtaaagatttcagaattgtcagatttcgctttgatgaatcaggtcccgaaagtgctaaaaaggtatgccttgcaatagctcattattcccagccaacagacctccagctactctttgcatttgaatatgttgggaaaaaataccacaattcagcaaacaaaattaatggaattccctcaggagatggaggaggaggaggaggaggaggtaatggagctggtggtggcagcagccagaaaactccactctttgaaacttactcggattgggacagagaaatcaagaggacaggtgcttccgggtggagagtttgttctattaacgagggttacatgatatccacttgccttccagaatacattgtagtgccaagttctttagcagaccaagatctaaagatcttttcccattcttttgttgggagaaggatgccactctggtgctggagccactctaacggcagtgctcttgtgcgaatggccctcatcaaagacgtgctgcagcagaggaagattgaccagaggatttgtaatgcaataactaaaagtcacccacagagaagtgatgtttacaaatcagatttggataagaccttgcctaatattcaagaagtacaagcagcatttgtaaaactgaagcagctatgcgttaatgagccttttgaagaaactgaagagaaatggttatcttcactggaaaatactcgatggttagaatatgtaagggcattccttaagcattcagcagaacttgtatacatgctagaaagcaaacatctctctgtagtcctacaagaggaggaaggaagagacttgagctgttgtgtagcttctcttgttcaagtgatgctggatccctattttaggacaattactggatttcagagtctgatacagaaggagtgggtcatggcaggatatcagtttctagacagatgcaaccatctaaagagatcagagaaagagtctcctttatttttgctattcttggatgccacctggcagctgttagaacaatatcctgcagcttttgagttctccgaaacctacctggcagtgttgtatgacagcacccggatctcactgtttggcaccttcctgttcaactcccctcaccagcgagtgaagcaaagcacggaatttgctataagcaaaaacatccaattgggtgatgagaagggcttaaaattcccctctgtttgggactggtctctccagtttacagcaaaggatcgcacccttttccataaccccttctacattggaaagagcacaccttgtatacagaatggctccgtgaagtcttttaaacggacaaagaaaagctacagctccacactaagaggaatgccgtctgccttaaagaatggaatcatcagtgaccaagaattacttccaaggagaaattcattgatattaaaaccaaagccagatccagctcagcaaaccgacagccagaacagtgatacggagcagtattttagagaatggttttccaaacccgccaacctgcacggtgttattctgccacgtgtctctggaacacacataaaactgtggaaactgtgctacttccgctgggttcccgaggcccagatcagcctgggtggctccatcacagcctttcacaagctctccctcctggctgatgaagtcgacgtactgagcaggatgctgcggcaacagcgcagtggccccctggaggcctgctatggggagctgggccagagcaggatgtacttcaacgccagcggccctcaccacaccgacacctcggggacaccggagtttctctcctcctcatttccattttctcctgtagggaatctgtgcagacgaagcattttaggaacaccattaagcaaatttttaagtggggccaaaatatggttgtctactgagacattagcaaatgaagactaaaatagggtgttttctgaacattttgagggaagctgtcaacttttttcctctgaattaacattgctaacctaggcgtttgaatctctaataactttatatgtaagaataatagttggaatttgcactaatatttaaaaacatgttgaatcatgcttctttcacacttattttaagagagatgtaaattttgttcctgtcctctttctgtcattacaggtctggctcttgtaaccgtgatcaaactgttcatgttgtctgctacatttttgtctccatccatttttcctaccacctcctgaaggctatctgatagtcagtcacattagcagccccaggcagcagacaacaggaaagttaggaaatttgtgtttcgtgtcatttttaggagcatctgattcatctctaattgaactcacctgatgaaggttcagtgttctggggccagaatttatgattttagatcaccttctttggaaccttagatcactgtgttttgaaatcatgagtttgcttttaacttcatagggtcaactttaaaatgatatgcactgttaattttaaagcatttgctgcagataattaaacttagaagtgcctttgactttaggatacaaatattacagaagaaaatataatttcactttttaaaattggggtgggaaaatcccattgcatatttgaaataggcttttcatactaagcttcatagccaggagtccccagagtcttgttcctctgaaagccactggggagtggcctctggggtgctgattccacagaggtgtatgctgtagacaggagagtgccatctatgccaaaactcgccctcaaaaacaaacaaggcttgctgggaggcgtgctgggcttggccatcagtatttccagtgtggtaaactattgctggcacttccccctggaaataactaatgaggttacgagttgggcacctgcacagatgtccttctctcatagttcctaatgcttaggaatagaggagaaataaaaaaatggattctctcaaaacactgccatttgaatagcgacagaagtgctcccccagcccccaactttggacagcaaagttgaggagaatgagcagacacagttgtttgcttgatctgaatctctctaaagtaaagtatttccaaactgtgtgacaagagcctacctaccactgtagcggtcaaagctgaagcttcttacagcagtgaaacggggcaccacctcccccacactcctcattccccgcttaaaacatggatactttcaaatttgactgtttcttaaactgccatcctaagatatggaaaatttttatagtaaagtgtctagttagcttatttccttttctaaaacaagtgttttcaagataactgtattttacctttatatgtactgaatagctgtttctttttgaattatttgccttttaaaatttgataatgtctctggatataacaggacaggagttcttaaaaaatatcttaagaaattcactttatgggtaaacccaaggtttttgccaacttgttgcctagaaaataagggctagtttcagtttatacaaatagaattattaaacattttacagtccttgattagaaaccagacccaatctccttataacaccacagcgtatcctgccattgacagtgtaatcacaattctccctttttcatttagctgcttttttattattactaaatgttttggattgagcatttttccctctgtaattttcttccttcacgtttattttattttaactcttgtagtattttattgttgttaatttacaagtttaaaaatattaggtactattaataatggttaaaaatagaaaaatgcatatttttgtatgataatcaaatgtaaaatacttttatttttgctggacagttgttatatcatgattattgtgctacagtttattgtgcataatatgaaaaacaactatgacagccttcagtcgggccagggtgaagctgcttataccacctctgccgtcagagggacatgtggtgacagcagtggtgtggctgcacagggcgcactagagagagctcagcacccctgctgcccgccagcagagcccgtgctgagggaatgccgcacagatgctgatgcactgggtgaaatttctagtattgaacgtaaaggtgtacagtgtcttgctgttattttatgatggaaactgattttgaaaccaaaaatagctaactaactttatttaaggaaaggatattaatttgtactaacagagggtgaaagctgttcacatttgtcaacaaaatctgcttgctgcagtagtaacctcaagtggttaaaacttgatttcccgagaaaactaaaacctttgtgcctaaaattgatgacttgagttcaagtgggatgagcaagaagatgtgttatcttgttgttcaacagtattgagtgtgaaggaaattttgatggcttaataaaattccacagcgactgtt

SEQ ID NO: 353118 - DNA, 4917 bp, Homo sapiens
ggccgagaaagggcctgggcggccgcactgagagctttacgcccggaggcgtcggcgctgccactggcccgcgacgggaacggggcgaaaaggcggcggcaccatgttctccctcaagccgcccaaacccaccttcaggtcctacctcctgccaccgccccagactgacgataagatcaattcggaaccgaagattaaaaaactggagccagtccttttgccaggagaaattgtcgtaaatgaagtcaattttgtgagaaaatgcattgcaacagacacaagccagtacgatttgtggggaaagctgatatgcagtaacttcaaaatctcctttattacagatgacccaatgccattacagaaattccattacagaaaccttcttcttggtgaacacgatgtccctttaacatgtattgaacaaattgtcacagtaaacgaccacaagaggaagcagaaagtcctaggccccaaccagaaactgaaatttaatccaacagagttaattatttattgtaaagatttcagaattgtcagatttcgctttgatgaatcaggtcccgaaagtgctaaaaaggtatgccttgcaatagctcattattcccagccaacagacctccagctactctttgcatttgaatatgttgggaaaaaataccacaattcagcaaacaaaattaatggaattccctcaggagatggaggaggaggaggaggaggaggtaatggagctggtggtggcagcagccagaaaactccactctttgaaacttactcggattgggacagagaaatcaagaggacaggtgcttccgggtggagagtttgttctattaacgagggttacatgatatccacttgccttccagaatacattgtagtgccaagttctttagcagaccaagatctaaagatcttttcccattcttttgttgggagaaggatgccactctggtgctggagccactctaacggcagtgctcttgtgcgaatggccctcatcaaagacgtgctgcagcagaggaagattgaccagaggatttgtaatgcaataactaaaagtcacccacagagaagtgatgtttacaaatcagatttggataagaccttgcctaatattcaagaagtacaagcagcatttgtaaaactgaagcagctatgcgttaatgagccttttgaagaaactgaagagaaatggttatcttcactggaaaatactcgatggttagaatatgtaagggcattccttaagcattcagcagaacttgtatacatgctagaaagcaaacatctctctgtagtcctacaagaggaggaaggaagagacttgagctgttgtgtagcttctcttgttcaagtgatgctggatccctattttaggacaattactggatttcagagtctgatacagaaggagtgggtcatggcaggatatcagtttctagacagatgcaaccatctaaagagatcagagaaagagtctcctttatttttgctattcttggatgccacctggcagctgttagaacaatatcctgcagcttttgagttctccgaaacctacctggcagtgttgtatgacagcacccggatctcactgtttggcaccttcctgttcaactcccctcaccagcgagtgaagcaaagcacggaatttgctataagcaaaaacatccaattgggtgatgagaagggcttaaaattcccctctgtttgggactggtctctccagtttacagcaaaggatcgcacccttttccataaccccttctacattggaaagagcacaccttgtatacagaatggctccgtgaagtcttttaaacggacaaagaaaagctacagctccacactaagaggaatgccgtctgccttaaagaatggaatcatcagtgaccaagaattacttccaaggagaaattcattgatattaaaaccaaagccagatccagctcagcaaaccgacagccagaacagtgatacggagcagtattttagagaatggttttccaaacccgccaacctgcacggtgttattctgccacgtgtctctggaacacacataaaactgtggaaactgtgctacttccgctgggttcccgaggcccagatcagcctgggtggctccatcacagcctttcacaagctctccctcctggctgatgaagtcgacgtactgagcaggatgctgcggcaacagcgcagtggccccctggaggcctgctatggggagctgggccagagcaggatgtacttcaacgccagcggccctcaccacaccgacacctcggggacaccggagtttctctcctcctcatttccattttctcctgtagggaatctgtgcagacgaagcattttaggaacaccattaagcaaatttttaagtggggccaaaatatggttgtctactgagacattagcaaatgaagactaaaatagggtgttttctgaacattttgagggaagctgtcaacttttttcctctgaattaacattgctaacctaggcgtttgaatctctaataactttatatgtaagaataatagttggaatttgcactaatatttatgttcctgtcctctttctgtcattacaggtctggctcttgtaaccgtgatcaaactgttcatgttgtctgctacatttttgtctccatccatttttcctaccacctcctgaaggctatctgatagtcagtcacattagcagccccaggcagcagacaacaggaaagttaggaaatttgtgtttcgtgtcatttttaggagcatctgataaaacctccagcaggttttaggaagtattcatgtatttttctggttactttctgtcatctctaattgaactcacctgatgaaggttcagtgttctggggccagaatttatgattttagatcaccttctttggaaccttagatcactgtgttttgaaatcatgagtttgcttttaacttcatagggtcaactttaaaatgatatgcactgttaattttaaagcatttgctgcagataattaaacttagaagtgcctttgactttaggatacaaatattacagaagaaaatataatttcactttttaaaattggggtgggaaaatcccattgcatatttgaaataggcttttcatactaagcttcatagccaggagtccccagagtcttgttcctctgaaagccactggggagtggcctctggggtgctgattccacagaggtgtatgctgtagacaggagagtgccatctatgccaaaactcgccctcaaaaacaaacaaggcttgctgggaggcgtgctgggcttggccatcagtatttccagtgtggtaaactattgctggcacttccccctggaaataactaatgaggttacgagttgggcacctgcacagatgtccttctctcatagttcctaatgcttaggaatagaggagaaataaaaaaatggattctctcaaaacactgccatttgaatagcgacagaagtgctcccccagcccccaactttggacagcaaagttgaggagaatgagcagacacagttgtttgcttgatctgaatctctctaaagtaaagtatttccaaactgtgtgacaagagcctacctaccactgtagcggtcaaagctgaagcttcttacagcagtgaaacggggcaccacctcccccacactcctcattccccgcttaaaacatggatactttcaaatttgactgtttcttaaactgccatcctaagatatggaaaatttttatagtaaagtgtctagttagcttatttccttttctaaaacaagtgttttcaagataactgtattttacctttatatgtactgaatagctgtttctttttgaattatttgccttttaaaatttgataatgtctctggatataacaggacaggagttcttaaaaaatatcttaagaaattcactttatgggtaaacccaaggtttttgccaacttgttgcctagaaaataagggctagtttcagtttatacaaatagaattattaaacattttacagtccttgattagaaaccagacccaatctccttataacaccacagcgtatcctgccattgacagtgtaatcacaattctccctttttcatttagctgcttttttattattactaaatgttttggattgagcatttttccctctgtaattttcttccttcacgtttattttattttaactcttgtagtattttattgttgttaatttacaagtttaaaaatattaggtactattaataatggttaaaaatagaaaaatgcatatttttgtatgataatcaaatgtaaaatacttttatttttgctggacagttgttatatcatgattattgtgctacagtttattgtgcataatatgaaaaacaactatgacagccttcagtcgggccagggtgaagctgcttataccacctctgccgtcagagggacatgtggtgacagcagtggtgtggctgcacagggcgcactagagagagctcagcacccctgctgcccgccagcagagcccgtgctgagggaatgccgcacagatgctgatgcactgggtgaaatttctagtattgaacgtaaaggtgtacagtgtcttgctgttattttatgatggaaactgattttgaaaccaaaaatagctaactaactttatttaaggaaaggatattaatttgtactaacagagggtgaaagctgttcacatttgtcaacaaaatctgcttgctgcagtagtaacctcaagtggttaaaacttgatttcccgagaaaactaaaacctttgtgcctaaaattgatgacttgagttcaagtgggatgagcaagaagatgtgttatcttgttgttcaacagtattgagtgtgaaggaaattttgatggcttaataaaattccacagcgactgtt

SEQ ID NO: 353119 - DNA, 4743 bp, Homo sapiens
ggccgagaaagggcctgggcggccgcactgagagctttacgcccggaggcgtcggcgctgccactggcccgcgacgggaacggggcgaaaaggcggcggcaccatgttctccctcaagccgcccaaacccaccttcaggtcctacctcctgccaccgccccagactgacgataagatcaattcggaaccgaagattaaaaaactggagccagtccttttgccagaaattccattacagaaaccttcttcttggtgaacacgatgtccctttaacatgtattgaacaaattgtcacagtaaacgaccacaagaggaagcagaaagtcctaggccccaaccagaaactgaaatttaatccaacagagttaattatttattgtaaagatttcagaattgtcagatttcgctttgatgaatcaggtcccgaaagtgctaaaaagcaaacaaaattaatggaattccctcaggagatggaggaggaggaggaggaggaggtaatggagctggtggtggcagcagccagaaaactccactctttgaaacttactcggattgggacagagaaatcaagaggacaggtgcttccgggtggagagtttgttctattaacgagggttacatgatatccacttgccttccagaatacattgtagtgccaagttctttagcagaccaagatctaaagatcttttcccattcttttgttgggagaaggatgccactctggtgctggagccactctaacggcagtgctcttgtgcgaatggccctcatcaaagacgtgctgcagcagaggaagattgaccagaggatttgtaatgcaataactaaaagtcacccacagagaagtgatgtttacaaatcagatttggataagaccttgcctaatattcaagaagtacaagcagcatttgtaaaactgaagcagctatgcgttaatgagccttttgaagaaactgaagagaaatggttatcttcactggaaaatactcgatggttagaatatgtaagggcattccttaagcattcagcagaacttgtatacatgctagaaagcaaacatctctctgtagtcctacaagaggaggaaggaagagacttgagctgttgtgtagcttctcttgttcaagtgatgctggatccctattttaggacaattactggatttcagagtctgatacagaaggagtgggtcatggcaggatatcagtttctagacagatgcaaccatctaaagagatcagagaaagagtctcctttatttttgctattcttggatgccacctggcagctgttagaacaatatcctgcagcttttgagttctccgaaacctacctggcagtgttgtatgacagcacccggatctcactgtttggcaccttcctgttcaactcccctcaccagcgagtgaagcaaagcacggaatttgctataagcaaaaacatccaattgggtgatgagaagggcttaaaattcccctctgtttgggactggtctctccagtttacagcaaaggatcgcacccttttccataaccccttctacattggaaagagcacaccttgtatacagaatggctccgtgaagtcttttaaacggacaaagaaaagctacagctccacactaagaggaatgccgtctgccttaaagaatggaatcatcagtgaccaagaattacttccaaggagaaattcattgatattaaaaccaaagccagatccagctcagcaaaccgacagccagaacagtgatacggagcagtattttagagaatggttttccaaacccgccaacctgcacggtgttattctgccacgtgtctctggaacacacataaaactgtggaaactgtgctacttccgctgggttcccgaggcccagatcagcctgggtggctccatcacagcctttcacaagctctccctcctggctgatgaagtcgacgtactgagcaggatgctgcggcaacagcgcagtggccccctggaggcctgctatggggagctgggccagagcaggatgtacttcaacgccagcggccctcaccacaccgacacctcggggacaccggagtttctctcctcctcatttccattttctcctgtagggaatctgtgcagacgaagcattttaggaacaccattaagcaaatttttaagtggggccaaaatatggttgtctactgagacattagcaaatgaagactaaaatagggtgttttctgaacattttgagggaagctgtcaacttttttcctctgaattaacattgctaacctaggcgtttgaatctctaataactttatatgtaagaataatagttggaatttgcactaatatttaaaaacatgttgaatcatgcttctttcacacttattttaagagagatgtaaattttgttcctgtcctctttctgtcattacaggtctggctcttgtaaccgtgatcaaactgttcatgttgtctgctacatttttgtctccatccatttttcctaccacctcctgaaggctatctgatagtcagtcacattagcagccccaggcagcagacaacaggaaagttaggaaatttgtgtttcgtgtcatttttaggagcatctgataaaacctccagcaggttttaggaagtattcatgtatttttctggttactttctgtcatctctaattgaactcacctgatgaaggttcagtgttctggggccagaatttatgattttagatcaccttctttggaaccttagatcactgtgttttgaaatcatgagtttgcttttaacttcatagggtcaactttaaaatgatatgcactgttaattttaaagcatttgctgcagataattaaacttagaagtgcctttgactttaggatacaaatattacagaagaaaatataatttcactttttaaaattggggtgggaaaatcccattgcatatttgaaataggcttttcatactaagcttcatagccaggagtccccagagtcttgttcctctgaaagccactggggagtggcctctggggtgctgattccacagaggtgtatgctgtagacaggagagtgccatctatgccaaaactcgccctcaaaaacaaacaaggcttgctgggaggcgtgctgggcttggccatcagtatttccagtgtggtaaactattgctggcacttccccctggaaataactaatgaggttacgagttgggcacctgcacagatgtccttctctcatagttcctaatgcttaggaatagaggagaaataaaaaaatggattctctcaaaacactgccatttgaatagcgacagaagtgctcccccagcccccaactttggacagcaaagttgaggagaatgagcagacacagttgtttgcttgatctgaatctctctaaagtaaagtatttccaaactgtgtgacaagagcctacctaccactgtagcggtcaaagctgaagcttcttacagcagtgaaacggggcaccacctcccccacactcctcattccccgcttaaaacatggatactttcaaatttgactgtttcttaaactgccatcctaagatatggaaaatttttatagtaaagtgtctagttagcttatttccttttctaaaacaagtgttttcaagataactgtattttacctttatatgtactgaatagctgtttctttttgaattatttgccttttaaaatttgataatgtctctggatataacaggacaggagttcttaaaaaatatcttaagaaattcactttatgggtaaacccaaggtttttgccaacttgttgcctagaaaataagggctagtttcagtttatacaaatagaattattaaacattttacagtccttgattagaaaccagacccaatctccttataacaccacagcgtatcctgccattgacagtgtaatcacaattctccctttttcatttagctgcttttttattattactaaatgttttggattgagcatttttccctctgtaattttcttccttcacgtttattttattttaactcttgtagtattttattgttgttaatttacaagtttaaaaatattaggtactattaataatggttaaaaatagaaaaatgcatatttttgtatgataatcaaatgtaaaatacttttatttttgctggacagttgttatatcatgattattgtgctacagtttattgtgcataatatgaaaaacaactatgacagccttcagtcgggccagggtgaagctgcttataccacctctgccgtcagagggacatgtggtgacagcagtggtgtggctgcacagggcgcactagagagagctcagcacccctgctgcccgccagcagagcccgtgctgagggaatgccgcacagatgctgatgcactgggtgaaatttctagtattgaacgtaaaggtgtacagtgtcttgctgttattttatgatggaaactgattttgaaaccaaaaatagctaactaactttatttaaggaaaggatattaatttgtactaacagagggtgaaagctgttcacatttgtcaacaaaatctgcttgctgcagtagtaacctcaagtggttaaaacttgatttcccgagaaaactaaaacctttgtgcctaaaattgatgacttgagttcaagtgggatgagcaagaagatgtgttatcttgttgttcaacagtattgagtgtgaaggaaattttgatggcttaataaaattccacagcgactgtt

SEQ ID NO: 353120 - DNA, 2430 bp, Homo sapiens
ggccgagaaagggcctgggcggccgcactgagagctttacgcccggaggcgtcggcgctgccactggcccgcgacgggaacggggcgaaaaggcggcggcaccatgttctccctcaagccgcccaaacccaccttcaggtcctacctcctgccaccgccccagactgacgataagatcaattcggaaccgaagattaaaaaactggagccagtccttttgccaggagaaattgtcgtaaatgaagtcaattttgtgagaaaatgcattgcaacagacacaagccagtacgatttgtggggaaagctgatatgcagtaacttcaaaatctcctttattacagatgacccaatgccattacagaaattccattacagaaaccttcttcttggtgaacacgatgtccctttaacatgtattgaacaaattgtcacagtaaacgaccacaagaggaagcagaaagtcctaggccccaaccagaaactgaaatttaatccaacagagttaattatttattgtaaagatttcagaattgtcagatttcgctttgatgaatcaggtcccgaaagtgctaaaaaggtatgccttgcaatagctcattattcccagccaacagacctccagctactctttgcatttgaatatgttgggaaaaaataccacaattcagcaaacaaaattaatggaattccctcaggagatggaggaggaggaggaggaggaggtaatggagctggtggtggcagcagccagaaaactccactctttgaaacttactcggattgggacagagaaatcaagaggacaggtgcttccgggtggagagtttgttctattaacgagggttacatgatatccacttgccttccagaatacattgtagtgccaagttctttagcagaccaagatctaaagatcttttcccattcttttgttgggagaaggatgccactctggtgctggagccactctaacggcagtgctcttgtgcgaatggccctcatcaaagacgtgctgcagcagaggaagattgaccagaggatttgtaatgcaataactaaaagtcacccacagagaagtgatgtttacaaatcagatttggataagaccttgcctaatattcaagaagtacaagcagcatttgtaaaactgaagcagctatgcgttaatgagccttttgaagaaactgaagagaaatggttatcttcactggaaaatactcgatggttagaatatgtaagggcattccttaagcattcagcagaacttgtatacatgctagaaagcaaacatctctctgtagtcctacaagaggaggaaggaagagacttgagctgttgtgtagcttctcttgttcaagtgatgctggatccctattttaggacaattactggatttcagagtctgatacagaaggagtgggtcatggcaggatatcagtttctagacagatgcaaccatctaaagagatcagagaaagagtctcctttatttttgctattcttggatgccacctggcagctgttagaacaatatcctgcagcttttgagttctccgaaacctacctggcagtgttgtatgacagcacccggatctcactgtttggcaccttcctgttcaactcccctcaccagcgagtgaagcaaagcacggaatttgctataagcaaaaacatccaattgggtgatgagaagggcttaaaattcccctctgtttgggactggtctctccagtttacagcaaaggatcgcacccttttccataaccccttctacattggaaagagcacaccttgtatacagaatggctccgtgaagtcttttaaacggacaaaggtaaatcacagctaacaaaacgtgatgttggctcacacgtaaccaaacacctctttttcagaacagagagcgttaaaagtaaaggcacttccaagagtaacactgctaatgcgggtttctgaggggtcattccctttttaactcaaatgactgtatcccaactttcttcctggtgtctgaggcccacaaagtctcagtacctgagagtgggcagattgcagctttgagcctgcaagcctgatttactaaagccccatttatccatttcttgatgattcaagccgccactgtggcagggaatgccgcctggctgtgatgtagtcatggcctcctgactgctatattcttgtcctaataacattcattgtttgcctttttaataattcccaaataaattcttgggattttttttggtagaaaatttgcagactactgaaaggtacagaacaaagaatcagacatttggcctcctgactgcctctgttcagtttgccattgttcttgatagaatcggccaggtctagtgttttttctagcccgtcttagaacttatccttaagcaaattagtggataggaggtactctcatcccgcccc

SEQ ID NO: 353121 - DNA, 420 bp, Homo sapiens
gtgatgaaacgccccgtagatcgtgaaccttcacctctctgtcaacatttctggaggccgctgctccctcgtcctcttcctttcccatctctccaccttctagcccgtagcggaagggaagagctaactgccattcggagaggcctaggtactttgttacaacaaccctgcaagatgcctgccgtcatcaccattttaaagaatgagaaactgagattcaacggaggaatcgaccagcccaaggtcatggagttagactagaagagttgtctcaaacccaaagcagtcatgtcatagtttacgctctttctaccacgtggtgctaattgaagggcacagttaacaatctttttagaagtctttagttggtgattgtaataataacacagtcagacatttattgagcagttactgttggcc

SEQ ID NO: 353122 - DNA, 5970 bp, Homo sapiens
tgtggttgtgagaaggcggcggcggcggcggagtagcagccggacgagacgtcccagcggctcaggcgctgcccagcgccggccctggcagggagcctggtggggtggcggagggggagactgtgccgtggagggcctcgccatgtcctgctgcccgacttccttgtgaaacctcctagtagaaaaagttcttgggacaaacttcatttgacttcaccataagggaaagaagagagccttgttggacactgaagaagggacggggatttctcctcctaatctgggcctcttgtcatggatgaagagactcggcacagccttgagtgcatccaggccaatcagatctttcccaggaagcagctgatccgggaggatgagaatcttcaggttcctttccttgaacttcatggagagagcacagagtttgtgggccgtgccgaggatgccatcattgccctttccaattacagacttcacatcaagttcaaggagtctcttgttaatgttccattacagcttatagaaagtgttgaatgccgagatatatttcagcttcatttgacttgcaaagactgcaaagttatcaggtgtcagttttcaacctttgagcagtgtcaagagtggctgaagagactgaacaacgcaatccgaccacctgctaaaatagaagatctcttctcatttgcataccatgcttggtgcatggaggtctatgccagtgaaaaagagcaacatggagacctgtgcagaccaggggagcatgtaacttcaaggtttaaaaacgaggtggagaggatgggttttgatatgaacaacgcctggaggatttccaacatcaatgagaagtacaaattatgtggtagctatcctcaagagctcatagtgcctgcctggatcactgacaaagaactggaaagtgtatcaagtttcaggtcctggaagcgcatccctgccgtcatctacaggcaccagagcaatggagctgtcattgcccgctgtggacagccagaggttagctggtggggctggcgaaatgcagatgatgagcatctggtacagtcagtagccaaagcttgtgcctctgactcccgatcgagtggcagcaagctgtcaactaggaacacttctcgagactttcccaatgggggagacctttctgacgtggagttcgattcttctctgtcaaatgcttcaggagcagagagtttagccatccaaccgcagaagcttttgatcttggatgcacgctcctatgcagctgctgtggcaaaccgagccaaaggaggaggctgcgaatgcccagagtattacccaaactgtgaagttgtgtttatggggatggcaaacattcattctattcggaggagttttcagtctctgcggttgctgtgcactcagatgccagatccgggaaattggctatcagctcttgaaagcacaaaatggctccatcacttgtctgtgcttctgaaatcagcgcttctggtagtgcatgctgtggatcaggatcagcggccggtgctagtacactgctcagatggctgggaccgcaccccccagattgtggcattggctaagctcttgctggacccttattaccgaaccatagagggtttccaggtcctcgtggaaatggagtggctggattttggccataaatttgctgaccggtgtggtcatggggagaactcggatgatctgaatgaacgttgcccagtgtttctgcagtggcttgactgtgttcatcagcttcagaggcaatttccttgctcttttgagttcaatgaagcattccttgtgaaactggtgcagcatacctattcctgcctgtttggaacattcctgtgcaacaacgccaaggagagaggggaaaagcatactcaggaacggacatgttccgtgtggtcacttcttcgggcaggcaacaaggctttcaaaaacctactgtattcctctcagtcagaagccgtgctgtaccctgtgtgccatgtgcgtaacctgatgctgtggagtgcagtgtacctgccctgcccatccccaaccacccctgtggacgacagctgtgcaccatacccagccccaggcaccagccctgatgatccccccctgagccggctaccaaagactagatcatacgacaatctgaccacagcctgtgacaacacagtgcctctggccagccggcgctgcagcgaccccagcctgaacgagaagtggcaggagcaccggcgctcactagagctgagcagcctggctggccctggagaggatcccctttctgccgacagcctagggaagcccaccagagtgccggggggtgccgagctttctgttgcagccggagtagctgaggggcagatggagaacatcttgcaggaggccaccaaagaggagagtggagtagaggaacctgcccacagggcaggcattgagatacaggagggtaaagaggaccctctcttagaaaaggagagcaggaggaagacacctgaggcctcagccattggacttcaccaagacccagaactgggtgatgctgctctgaggagccatctggatatgagctggcctctgttctcacagggcatttctgaacagcagagtgggctcagtgttctcctcagttctctccaggtcccccccaggggagaggattccctggaggtccctgtggagcagtttcgaatagaagagattgcagagggtagggaggaagcagttcttccaatcccagtagatgcaaaagttggctatggtacctcacagtcatgttctctgctaccttcccaagtcccttttgagaccagaggaccaaacgtggacagttctacagacatgttagtggaagataaggtgaagtcagtaagtgggccccaaggtcatcatagatcttgccttgtaaatagtggcaaggacaggcttcctcagaccatggaacccagcccttcagagacaagcctggtcgagaggccccaagtggggtctgtggtgcataggacttcccttggcagcactctcagcctgacacgttccccttgtgccttgcctttagccgaatgtaaagaggggcttgtgtgcaatggtgccccagagactgaaaacagggcctcagagcagcccccaggtcttagcaccctccagatgtaccccacacccaatgggcattgcgccaatggggaggctggtaggagcaaggactcactgagccgtcagctgtctgctatgagctgcagctctgcccacttacactcaaggaacttgcaccacaagtggctgcatagccactcaggaaggccatctgcaaccagcagccccgaccagccttcccgcagccacctggacgatgatggcatgtcagtgtacacagacacgatccaacagcgcctgcgtcagattgagtcaggccaccagcaggaagtagaaactttgaagaaacaagtccaggagctgaagagtcgcctggagagccagtacctgaccagctccctacactttaatggagactttggggatgaggtgacttcaatccccgactcggaaagcaatctggatcagaactgtttgtctcgctgcagcacagagattttctctgaagccagctgggagcaggtggataaacaggacacagagatgacccgttggcttcctgaccacctggccgcccactgctatgcgtgcgacagtgccttctggcttgccagcaggaagcaccactgcaggaattgtgggaacgtattctgctccagttgttgtaaccagaaggttccagttcccagccagcagctctttgaacccagtcgagtatgcaagtcttgctatagcagcctacatcccacaagctccagcattgaccttgaactggataagcccattgctgccacttccaactgaagctcagtgacctgggtgggcagtggccaagctgctgttcctatgacaggcccactcaacctgggcagaccgagaggcccgtgcactttggaatgggagcgtggaaccacctgtacagagtgacagatttgggatgcaccactggattgtagattgatttttctttcctgtccccctactccctccctaccttttccatcctcctcctctgccttcaaaaaaggaaactttcccttggttgtcttaatttttttttttttttgatggaagaccaagggttgccaggcccactgtaactgccgagctgcctgctgtcacgtgacactgagggatggcttgtttcttccgggtgggaggatggtggtcagagccaggagtatggagatctgagaccgtgagcagggaagaaagccagtgctaacatgcaaccattcctcacgccaccgccacatcagagctggttgggaaccctttgctgctggggaggctggaagcatattccccaagagcactgccctgggcatcatctccctcctgcgaggagctgagccagtcccctcacagatggataaatgaggctgatgtttggagggagaggcacacggtaaatggcatccccttaggcgcctctttgggaaaggaaagtggatgctcctttgaggcaggcgaggggctgggagtgggtagccgtcatgttgtcccccgtgggatcccatttttaacttgacccagattgtcttgggctccttttactttcagggggctgctttcctgggccaggctgtgtagcacttcccaccctcaggcatgagtacagactggtcaaaatgtttatgcagtcaaggccaaagcctgccctgagcccagacacacctgggtccccattctggggcctggtcccctaaacaatctcttcctcagccagcacagggaaatccagactcagggttccagaaatcccccgttcccaaaccaaaccaatcatggatcttccctttaaggggtagaatcagcctttagagttacaagcccctggaaaagggagcaggtcccatacaatcagcctttctcctcttctcttcttgggacaggaataactgctgagcagtccccctttgccactcctggctgtctgagtgggcacttgtctggctgctggccagcagtgaagggccacttggtgacttcgtagggttccttagagaagtgacatggccttgaggagattcagggcacctttcctcagtgagctttgatatggtccaaaaacagccttaaatcaagaatatttgtggaggtaggtgtggggaaggttggagaagagttaggtttgtgctttgtaatcttggcatccatgttttgtgcctgccctccctcttggggaggccatgcttgactctgctgaaagctgctaactggtgacagggtggatcatggtgaggactaggggtaaggtcagggaatgcttaagctctggccctgccctgtattcctcttccccttggtagcagttccctgaccaagggcaaggtgtgtctcaggaaggtggttctgtgcatgcctgggtgtggttaaggcgtggcccagaaggcttccctggtgctctcagtccaggcaaagcccagagcatctgagcacgtctctgacttccagtggcaacacagtttgaacgtggtgaaacagggtgtagttcttttccacattctgtgtcatctagtcgtgcaggtagggaaaaagttggtctaattgaagattgtgcatttcctagtgacaggtgccaagaggttatgatacgggtttcttgggtctgatgtacagtgtgaataaatgcttgcagctcttagctcttttttgatcgatgaagcacttttttattaatattttcctttgttaaaggaggaaccgtaactctccatagctgtacatataacccttttctcctaaagaggagtcagtcagtgctcctatatttttcattttttgtcaaagcaagaagtaaatactttagaattgttaaatatataaataaagcaaataaagttgagtgttccacatggtagcatttgctaacacttccta

SEQ ID NO: 353123 - DNA, 5772 bp, Homo sapiens
tgtggttgtgagaaggcggcggcggcggcggagtagcagccggacgagacgtcccagcggctcaggcgctgcccagcgccggccctggcagggagcctggtggggtggcggagggggagactgtgccgtggagggcctcgccatgtcctgctgcccgacttccttgtgaaacctcctagtagaaaaagttcttgggacaaacttcatttggatgaagagactcggcacagccttgagtgcatccaggccaatcagatctttcccaggaagcagctgatccgggaggatgagaatcttcaggttcctttccttgaacttcatggagagagcacagagtttgtgggccgtgccgaggatgccatcattgccctttccaattacagacttcacatcaagttcaaggagtctcttgttaatgttccattacagcttatagaaagtgttgaatgccgagatatatttcagcttcatttgacttgcaaagactgcaaagttatcaggtgtcagttttcaacctttgagcagtgtcaagagtggctgaagagactgaacaacgcaatccgaccacctgctaaaatagaagatctcttctcatttgcataccatgcttggtgcatggaggtctatgccagtgaaaaagagcaacatggagacctgtgcagaccaggggagcatgtaacttcaaggtttaaaaacgaggtggagaggatgggttttgatatgaacaacgcctggaggatttccaacatcaatgagaagtacaaattatgtggtagctatcctcaagagctcatagtgcctgcctggatcactgacaaagaactggaaagtgtatcaagtttcaggtcctggaagcgcatccctgccgtcatctacaggcaccagagcaatggagctgtcattgcccgctgtggacagccagaggttagctggtggggctggcgaaatgcagatgatgagcatctggtacagtcagtagccaaagcttgtgcctctgactcccgatcgagtggcagcaagctgtcaactaggaacacttctcgagactttcccaatgggggagacctttctgacgtggagttcgattcttctctgtcaaatgcttcaggagcagagagtttagccatccaaccgcagaagcttttgatcttggatgcacgctcctatgcagctgctgtggcaaaccgagccaaaggaggaggctgcgaatgcccagagtattacccaaactgtgaagttgtgtttatggggatggcaaacattcattctattcggaggagttttcagtctctgcggttgctgtgcactcagatgccagatccgggaaattggctatcagctcttgaaagcacaaaatggctccatcacttgtctgtgcttctgaaatcagcgcttctggtagtgcatgctgtggatcaggatcagcggccggtgctagtacactgctcagatggctgggaccgcaccccccagattgtggcattggctaagctcttgctggacccttattaccgaaccatagagggtttccaggtcctcgtggaaatggagtggctggattttggccataaatttgctgaccggtgtggtcatggggagaactcggatgatctgaatgaacgttgcccagtgtttctgcagtggcttgactgtgttcatcagcttcagaggcaatttccttgctcttttgagttcaatgaagcattccttgtgaaactggtgcagcatacctattcctgcctgtttggaacattcctgtgcaacaacgccaaggagagaggggaaaagcatactcaggaacggacatgttccgtgtggtcacttcttcgggcaggcaacaaggctttcaaaaacctactgtattcctctcagtcagaagccgtgctgtaccctgtgtgccatgtgcgtaacctgatgctgtggagtgcagtgtacctgccctgcccatccccaaccacccctgtggacgacagctgtgcaccatacccagccccaggcaccagccctgatgatccccccctgagccggctaccaaagactagatcatacgacaatctgaccacagcctgtgacaacacagtgcctctggccagccggcgctgcagcgaccccagcctgaacgagaagtggcaggagcaccggcgctcactagagctgagcagcctggctggccctggagaggatcccctttctgccgacagcctagggaagcccaccagagtgccggggggtgccgagctttctgttgcagccggagtagctgaggggcagatggagaacatcttgcaggaggccaccaaagaggagagtggagtagaggaacctgcccacagggcaggcattgagatacaggagggtaaagaggaccctctcttagaaaaggagagcaggaggaagacacctgaggcctcagccattggacttcaccaagacccagaactgggtgatgctgctctgaggagccatctggatatgagctggcctctgttctcacagggcatttctgaacagcagagtgggctcagtgttctcctcagttctctccaggtcccccccaggggagaggattccctggaggtccctgtggagcagtttcgaatagaagagattgcagagggtagggaggaagcagttcttccaatcccagtagatgcaaaagttggctatggtacctcacagtcatgttctctgctaccttcccaagtcccttttgagaccagaggaccaaacgtggacagttctacagacatgttagtggaagataaggtgaagtcagtaagtgggccccaaggtcatcatagatcttgccttgtaaatagtggcaaggacaggcttcctcagaccatggaacccagcccttcagagacaagcctggtcgagaggccccaagtggggtctgtggtgcataggacttcccttggcagcactctcagcctgacacgttccccttgtgccttgcctttagccgaatgtaaagaggggcttgtgtgcaatggtgccccagagactgaaaacagggcctcagagcagcccccaggtcttagcaccctccagatgtaccccacacccaatgggcattgcgccaatggggaggctggtaggagcaaggactcactgagccgtcagctgtctgctatgagctgcagctctgcccacttacactcaaggaacttgcaccacaagtggctgcatagccactcaggaaggccatctgcaaccagcagccccgaccagccttcccgcagccacctggacgatgatggcatgtcagtgtacacagacacgatccaacagcgcctgcgtcagattgagtcaggccaccagcaggaagtagaaactttgaagaaacaagtccaggagctgaagagtcgcctggagagccagtacctgaccagctccctacactttaatggagactttggggatgaggtgatgacccgttggcttcctgaccacctggccgcccactgctatgcgtgcgacagtgccttctggcttgccagcaggaagcaccactgcaggaattgtgggaacgtattctgctccagttgttgtaaccagaaggttccagttcccagccagcagctctttgaacccagtcgagtatgcaagtcttgctatagcagcctacatcccacaagctccagcattgaccttgaactggataagcccattgctgccacttccaactgaagctcagtgacctgggtgggcagtggccaagctgctgttcctatgacaggcccactcaacctgggcagaccgagaggcccgtgcactttggaatgggagcgtggaaccacctgtacagagtgacagatttgggatgcaccactggattgtagattgatttttctttcctgtccccctactccctccctaccttttccatcctcctcctctgccttcaaaaaaggaaactttcccttggttgtcttaatttttttttttttttgatggaagaccaagggttgccaggcccactgtaactgccgagctgcctgctgtcacgtgacactgagggatggcttgtttcttccgggtgggaggatggtggtcagagccaggagtatggagatctgagaccgtgagcagggaagaaagccagtgctaacatgcaaccattcctcacgccaccgccacatcagagctggttgggaaccctttgctgctggggaggctggaagcatattccccaagagcactgccctgggcatcatctccctcctgcgaggagctgagccagtcccctcacagatggataaatgaggctgatgtttggagggagaggcacacggtaaatggcatccccttaggcgcctctttgggaaaggaaagtggatgctcctttgaggcaggcgaggggctgggagtgggtagccgtcatgttgtcccccgtgggatcccatttttaacttgacccagattgtcttgggctccttttactttcagggggctgctttcctgggccaggctgtgtagcacttcccaccctcaggcatgagtacagactggtcaaaatgtttatgcagtcaaggccaaagcctgccctgagcccagacacacctgggtccccattctggggcctggtcccctaaacaatctcttcctcagccagcacagggaaatccagactcagggttccagaaatcccccgttcccaaaccaaaccaatcatggatcttccctttaaggggtagaatcagcctttagagttacaagcccctggaaaagggagcaggtcccatacaatcagcctttctcctcttctcttcttgggacaggaataactgctgagcagtccccctttgccactcctggctgtctgagtgggcacttgtctggctgctggccagcagtgaagggccacttggtgacttcgtagggttccttagagaagtgacatggccttgaggagattcagggcacctttcctcagtgagctttgatatggtccaaaaacagccttaaatcaagaatatttgtggaggtaggtgtggggaaggttggagaagagttaggtttgtgctttgtaatcttggcatccatgttttgtgcctgccctccctcttggggaggccatgcttgactctgctgaaagctgctaactggtgacagggtggatcatggtgaggactaggggtaaggtcagggaatgcttaagctctggccctgccctgtattcctcttccccttggtagcagttccctgaccaagggcaaggtgtgtctcaggaaggtggttctgtgcatgcctgggtgtggttaaggcgtggcccagaaggcttccctggtgctctcagtccaggcaaagcccagagcatctgagcacgtctctgacttccagtggcaacacagtttgaacgtggtgaaacagggtgtagttcttttccacattctgtgtcatctagtcgtgcaggtagggaaaaagttggtctaattgaagattgtgcatttcctagtgacaggtgccaagaggttatgatacgggtttcttgggtctgatgtacagtgtgaataaatgcttgcagctcttagctcttttttgatcgatgaagcacttttttattaatattttcctttgttaaaggaggaaccgtaactctccatagctgtacatataacccttttctcctaaagaggagtcagtcagtgctcctatatttttcattttttgtcaaagcaagaagtaaatactttagaattgttaaatatataaataaagcaaataaagttgagtgttccacatggtagcatttgctaacacttccta

SEQ ID NO: 353124 - DNA, 6373 bp, Homo sapiens
ctgccgtcatctacagtttgccggctttttggactctccctgagttgggcccatccagtggcttacagttagaaacttcattccactgaaatattgagattgtaggaagggatttgtctccttgtggaattcctacagaggcaccagagcaatggagctgtcattgcccgctgtggacagccagaggttagctggtggggctggcgaaatgcagatgatgagcatctggtacagtcagtagccaaagcttgtgcctctgactcccgatcgagtggcagcaagctgtcaactaggaacacttctcgagactttcccaatgggggagacctttctgacgtggagttcgattcttctctgtcaaatgcttcaggagcagagagtttagccatccaaccgcagaagcttttgatcttggatgcacgctcctatgcagctgctgtggcaaaccgagccaaaggaggaggctgcgaatgcccagagtattacccaaactgtgaagttgtgtttatggggatggcaaacattcattctattcggaggagttttcagtctctgcggttgctgtgcactcagatgccagatccgggaaattggctatcagctcttgaaagcacaaaatggctccatcacttgtctgtgcttctgaaatcagcgcttctggtagtgcatgctgtggatcaggatcagcggccggtgctagtacactgctcagatggctgggaccgcaccccccagattgtggcattggctaagctcttgctggacccttattaccgaaccatagagggtttccaggtcctcgtggaaatggagtggctggattttggccataaatttgctgaccggtgtggtcatggggagaactcggatgatctgaatgaacgttgcccagtgtttctgcagtggcttgactgtgttcatcagcttcagaggcaatttccttgctcttttgagttcaatgaagcattccttgtgaaactggtgcagcatacctattcctgcctgtttggaacattcctgtgcaacaacgccaaggagagaggggaaaagcatactcaggaacggacatgttccgtgtggtcacttcttcgggcaggcaacaaggctttcaaaaacctactgtattcctctcagtcagaagccgtatgtatccttcagcctttccactgtggtcagcagaaggaatttggggttggttacatatgagagcctttttgagtagtgactgtttttgtgaagacatctctactgtctctggatggactggttccatttttcccccatgattctgtcctgaggaaggcctgcttctgatggtgctctgatctgtttctgatgactacttgctgagggtggtttggtttaacacagatctctactttgccaccctagacatgaatcttttttggcactgcctccagagcttatttctagcatattctgtcttacgggagaggcacttaagttgcttcctgatgcactgatagctcagaatgagctgccaccaggcccccagcaccctcccagtgtcaataagcaatgatacccaccaaagcttctgtctcagaacagtaaactgtgtttgacattggtatgtgtgtctgtctgattctctgctcacatgaagagctggcaggccctttaagactttgttccccgaaggaatgaataccttctgttaagcagagaaaaggaggcacatagacctatgtgtcagtttcatagtaatactagctttgtcagaatgcatcttagaccctaaagaagtcaaaaggaggctaatcagagttcatactgatttcctggactattaatatggttctcattacatttaagtaatcacagaaaagatttaagctgactgcttgtctctccccttcagtgtgccttctggggaagtaacaatacagcaggaaaatttccttcttttcacatgattaatttaaatgatcccataaaatgggtttgacagtgtttcttgaagccaagcttttgtgccagcaggatggacaatcaccatctaacagaatgactcactttcttaggcagtaaaagcaacaaatcaagctgatgaaagtcagacattgaaggtgacctaagaaataactataatgagaaagggatctaaaaaatattttatattttcatgctctcaagtggctcttaggtgaaaaatgttggctatataaaatgtctagtcctgtattggtcctcttgggatagacctgtatccattggtgctgcttctttgtggagatcctgtcagccctgttgggtattccagctgggtgcttgctcttgatcctcatttccagacatcctagaagacttattggggcatatttaaacctgtgtcctcccccctcctcaggtgctgtaccctgtgtgccatgtgcgtaacctgatgctgtggagtgcagtgtacctgccctgcccatccccaaccacccctgtggacgacagctgtgcaccatacccagccccaggcaccagccctgatgatccccccctgagccggctaccaaagactagatcatacgacaatctgaccacagcctgtgacaacacagtgcctctggccagccggcgctgcagcgaccccagcctgaacgagaagtggcaggagcaccggcgctcactagagctgagcagcctggctggccctggagaggatcccctttctgccgacagcctagggaagcccaccagagtgccggggggtgccgagctttctgttgcagccggagtagctgaggggcagatggagaacatcttgcaggaggccaccaaagaggagagtggagtagaggaacctgcccacagggcaggcattgagatacaggagggtaaagaggaccctctcttagaaaaggagagcaggaggaagacacctgaggcctcagccattggacttcaccaagacccagaactgggtgatgctgctctgaggagccatctggatatgagctggcctctgttctcacagggcatttctgaacagcagagtgggctcagtgttctcctcagttctctccaggtcccccccaggggagaggattccctggaggtccctgtggagcagtttcgaatagaagagattgcagagggtagggaggaagcagttcttccaatcccagtagatgcaaaagttggctatggtacctcacagtcatgttctctgctaccttcccaagtcccttttgagaccagaggaccaaacgtggacagttctacagacatgttagtggaagataaggtgaagtcagtaagtgggccccaaggtcatcatagatcttgccttgtaaatagtggcaaggacaggcttcctcagaccatggaacccagcccttcagagacaagcctggtcgagaggccccaagtggggtctgtggtgcataggacttcccttggcagcactctcagcctgacacgttccccttgtgccttgcctttagccgaatgtaaagaggggcttgtgtgcaatggtgccccagagactgaaaacagggcctcagagcagcccccaggtcttagcaccctccagatgtaccccacacccaatgggcattgcgccaatggggaggctggtaggagcaaggactcactgagccgtcagctgtctgctatgagctgcagctctgcccacttacactcaaggaacttgcaccacaagtggctgcatagccactcaggaaggccatctgcaaccagcagccccgaccagccttcccgcagccacctggacgatgatggcatgtcagtgtacacagacacgatccaacagcgcctgcgtcagattgagtcaggccaccagcaggaagtagaaactttgaagaaacaagtccaggagctgaagagtcgcctggagagccagtacctgaccagctccctacactttaatggagactttggggatgaggtgacttcaatccccgactcggaaagcaatctggatcagaactgtttgtctcgctgcagcacagagattttctctgaagccagctgggagcaggtggataaacaggacacagagatgacccgttggcttcctgaccacctggccgcccactgctatgcgtgcgacagtgccttctggcttgccagcaggaagcaccactgcaggaattgtgggaacgtattctgctccagttgttgtaaccagaaggttccagttcccagccagcagctctttgaacccagtcgagtatgcaagtcttgctatagcagcctacatcccacaagctccagcattgaccttgaactggataagcccattgctgccacttccaactgaagctcagtgacctgggtgggcagtggccaagctgctgttcctatgacaggcccactcaacctgggcagaccgagaggcccgtgcactttggaatgggagcgtggaaccacctgtacagagtgacagatttgggatgcaccactggattgtagattgatttttctttcctgtccccctactccctccctaccttttccatcctcctcctctgccttcaaaaaaggaaactttcccttggttgtcttaatttttttttttttttgatggaagaccaagggttgccaggcccactgtaactgccgagctgcctgctgtcacgtgacactgagggatggcttgtttcttccgggtgggaggatggtggtcagagccaggagtatggagatctgagaccgtgagcagggaagaaagccagtgctaacatgcaaccattcctcacgccaccgccacatcagagctggttgggaaccctttgctgctggggaggctggaagcatattccccaagagcactgccctgggcatcatctccctcctgcgaggagctgagccagtcccctcacagatggataaatgaggctgatgtttggagggagaggcacacggtaaatggcatccccttaggcgcctctttgggaaaggaaagtggatgctcctttgaggcaggcgaggggctgggagtgggtagccgtcatgttgtcccccgtgggatcccatttttaacttgacccagattgtcttgggctccttttactttcagggggctgctttcctgggccaggctgtgtagcacttcccaccctcaggcatgagtacagactggtcaaaatgtttatgcagtcaaggccaaagcctgccctgagcccagacacacctgggtccccattctggggcctggtcccctaaacaatctcttcctcagccagcacagggaaatccagactcagggttccagaaatcccccgttcccaaaccaaaccaatcatggatcttccctttaaggggtagaatcagcctttagagttacaagcccctggaaaagggagcaggtcccatacaatcagcctttctcctcttctcttcttgggacaggaataactgctgagcagtccccctttgccactcctggctgtctgagtgggcacttgtctggctgctggccagcagtgaagggccacttggtgacttcgtagggttccttagagaagtgacatggccttgaggagattcagggcacctttcctcagtgagctttgatatggtccaaaaacagccttaaatcaagaatatttgtggaggtaggtgtggggaaggttggagaagagttaggtttgtgctttgtaatcttggcatccatgttttgtgcctgccctccctcttggggaggccatgcttgactctgctgaaagctgctaactggtgacagggtggatcatggtgaggactaggggtaaggtcagggaatgcttaagctctggccctgccctgtattcctcttccccttggtagcagttccctgaccaagggcaaggtgtgtctcaggaaggtggttctgtgcatgcctgggtgtggttaaggcgtggcccagaaggcttccctggtgctctcagtccaggcaaagcccagagcatctgagcacgtctctgacttccagtggcaacacagtttgaacgtggtgaaacagggtgtagttcttttccacattctgtgtcatctagtcgtgcaggtagggaaaaagttggtctaattgaagattgtgcatttcctagtgacaggtgccaagaggttatgatacgggtttcttgggtctgatgtacagtgtgaataaatgcttgcagctcttagctcttttttgatcgatgaagcacttttttattaatattttcctttgttaaaggaggaaccgtaactctccatagctgtacatataacccttttctcctaaagaggagtcagtcagtgctcctatatttttcattttttgtcaaagcaagaagtaaatactttagaattgttaaatatataaataaagcaaataaagttgagtgttccacatggtagcatttgctaacacttccta

SEQ ID NO: 353125 - DNA, 6976 bp, Homo sapiens
cggtgcctgagagatatattctccccttcttccaaaggtggtgccacctctttgttgccttcatgctatgacatgacttgagaccactgatttagagataaagggaagtcctaattcactttgtagtaaatcacttgagtactgttgatccagataagtttgcagttctatttttgttgctttcccttatagatctttttaattagtcttgttggacacattgaagaactccagggtcaatgcctttttgactaagaggacttcatttttttaaaattgcaggttccattacagcttatagaaagtgttgaatgccgagatatatttcagcttcatttgacttgcaaagactgcaaagttatcaggtgtcagttttcaacctttgagcagtgtcaagagtggctgaagagactgaacaacgcaatccgaccacctgctaaaatagaagatctcttctcatttgcataccatgcttggtgcatggaggtctatgccagtgaaaaagagcaacatggagacctgtgcagaccaggggagcatgtaacttcaaggtttaaaaacgaggtggagaggatgggttttgatatgaacaacgcctggaggatttccaacatcaatgagaagtacaaattatgtggtagctatcctcaagagctcatagtgcctgcctggatcactgacaaagaactggaaagtgtatcaagtttcaggtcctggaagcgcatccctgccgtcatctacaggcaccagagcaatggagctgtcattgcccgctgtggacagccagaggttagctggtggggctggcgaaatgcagatgatgagcatctggtacagtcagtagccaaagcttgtgcctctgactcccgatcgagtggcagcaagctgtcaactaggaacacttctcgagactttcccaatgggggagacctttctgacgtggagttcgattcttctctgtcaaatgcttcaggagcagagagtttagccatccaaccgcagaagcttttgatcttggatgcacgctcctatgcagctgctgtggcaaaccgagccaaaggaggaggctgcgaatgcccagagtattacccaaactgtgaagttgtgtttatggggatggcaaacattcattctattcggaggagttttcagtctctgcggttgctgtgcactcagatgccagatccgggaaattggctatcagctcttgaaagcacaaaatggctccatcacttgtctgtgcttctgaaatcagcgcttctggtagtgcatgctgtggatcaggatcagcggccggtgctagtacactgctcagatggctgggaccgcaccccccagattgtggcattggctaagctcttgctggacccttattaccgaaccatagagggtttccaggtcctcgtggaaatggagtggctggattttggccataaatttgctgaccggtgtggtcatggggagaactcggatgatctgaatgaacgttgcccagtgtttctgcagtggcttgactgtgttcatcagcttcagaggcaatttccttgctcttttgagttcaatgaagcattccttgtgaaactggtgcagcatacctattcctgcctgtttggaacattcctgtgcaacaacgccaaggagagaggggaaaagcatactcaggaacggacatgttccgtgtggtcacttcttcgggcaggcaacaaggctttcaaaaacctactgtattcctctcagtcagaagccgtatgtatccttcagcctttccactgtggtcagcagaaggaatttggggttggttacatatgagagcctttttgagtagtgactgtttttgtgaagacatctctactgtctctggatggactggttccatttttcccccatgattctgtcctgaggaaggcctgcttctgatggtgctctgatctgtttctgatgactacttgctgagggtggtttggtttaacacagatctctactttgccaccctagacatgaatcttttttggcactgcctccagagcttatttctagcatattctgtcttacgggagaggcacttaagttgcttcctgatgcactgatagctcagaatgagctgccaccaggcccccagcaccctcccagtgtcaataagcaatgatacccaccaaagcttctgtctcagaacagtaaactgtgtttgacattggtatgtgtgtctgtctgattctctgctcacatgaagagctggcaggccctttaagactttgttccccgaaggaatgaataccttctgttaagcagagaaaaggaggcacatagacctatgtgtcagtttcatagtaatactagctttgtcagaatgcatcttagaccctaaagaagtcaaaaggaggctaatcagagttcatactgatttcctggactattaatatggttctcattacatttaagtaatcacagaaaagatttaagctgactgcttgtctctccccttcagtgtgccttctggggaagtaacaatacagcaggaaaatttccttcttttcacatgattaatttaaatgatcccataaaatgggtttgacagtgtttcttgaagccaagcttttgtgccagcaggatggacaatcaccatctaacagaatgactcactttcttaggcagtaaaagcaacaaatcaagctgatgaaagtcagacattgaaggtgacctaagaaataactataatgagaaagggatctaaaaaatattttatattttcatgctctcaagtggctcttaggtgaaaaatgttggctatataaaatgtctagtcctgtattggtcctcttgggatagacctgtatccattggtgctgcttctttgtggagatcctgtcagccctgttgggtattccagctgggtgcttgctcttgatcctcatttccagacatcctagaagacttattggggcatatttaaacctgtgtcctcccccctcctcaggtgctgtaccctgtgtgccatgtgcgtaacctgatgctgtggagtgcagtgtacctgccctgcccatccccaaccacccctgtggacgacagctgtgcaccatacccagccccaggcaccagccctgatgatccccccctgagccggctaccaaagactagatcatacgacaatctgaccacagcctgtgacaacacagtgcctctggccagccggcgctgcagcgaccccagcctgaacgagaagtggcaggagcaccggcgctcactagagctgagcagcctggctggccctggagaggatcccctttctgccgacagcctagggaagcccaccagagtgccggggggtgccgagctttctgttgcagccggagtagctgaggggcagatggagaacatcttgcaggaggccaccaaagaggagagtggagtagaggaacctgcccacagggcaggcattgagatacaggagggtaaagaggaccctctcttagaaaaggagagcaggaggaagacacctgaggcctcagccattggacttcaccaagacccagaactgggtgatgctgctctgaggagccatctggatatgagctggcctctgttctcacagggcatttctgaacagcagagtgggctcagtgttctcctcagttctctccaggtcccccccaggggagaggattccctggaggtccctgtggagcagtttcgaatagaagagattgcagagggtagggaggaagcagttcttccaatcccagtagatgcaaaagttggctatggtacctcacagtcatgttctctgctaccttcccaagtcccttttgagaccagaggaccaaacgtggacagttctacagacatgttagtggaagataaggtgaagtcagtaagtgggccccaaggtcatcatagatcttgccttgtaaatagtggcaaggacaggcttcctcagaccatggaacccagcccttcagagacaagcctggtcgagaggccccaagtggggtctgtggtgcataggacttcccttggcagcactctcagcctgacacgttccccttgtgccttgcctttagccgaatgtaaagaggggcttgtgtgcaatggtgccccagagactgaaaacagggcctcagagcagcccccaggtcttagcaccctccagatgtaccccacacccaatgggcattgcgccaatggggaggctggtaggagcaaggactcactgagccgtcagctgtctgctatgagctgcagctctgcccacttacactcaaggaacttgcaccacaagtggctgcatagccactcaggaaggccatctgcaaccagcagccccgaccagccttcccgcagccacctggacgatgatggcatgtcagtgtacacagacacgatccaacagcgcctgcgtcagattgagtcaggccaccagcaggaagtagaaactttgaagaaacaagtccaggagctgaagagtcgcctggagagccagtacctgaccagctccctacactttaatggagactttggggatgaggtgacttcaatccccgactcggaaagcaatctggatcagaactgtttgtctcgctgcagcacagagattttctctgaagccagctgggagcaggtggataaacaggacacagagatgacccgttggcttcctgaccacctggccgcccactgctatgcgtgcgacagtgccttctggcttgccagcaggaagcaccactgcaggaattgtgggaacgtattctgctccagttgttgtaaccagaaggttccagttcccagccagcagctctttgaacccagtcgagtatgcaagtcttgctatagcagcctacatcccacaagctccagcattgaccttgaactggataagcccattgctgccacttccaactgaagctcagtgacctgggtgggcagtggccaagctgctgttcctatgacaggcccactcaacctgggcagaccgagaggcccgtgcactttggaatgggagcgtggaaccacctgtacagagtgacagatttgggatgcaccactggattgtagattgatttttctttcctgtccccctactccctccctaccttttccatcctcctcctctgccttcaaaaaaggaaactttcccttggttgtcttaatttttttttttttttgatggaagaccaagggttgccaggcccactgtaactgccgagctgcctgctgtcacgtgacactgagggatggcttgtttcttccgggtgggaggatggtggtcagagccaggagtatggagatctgagaccgtgagcagggaagaaagccagtgctaacatgcaaccattcctcacgccaccgccacatcagagctggttgggaaccctttgctgctggggaggctggaagcatattccccaagagcactgccctgggcatcatctccctcctgcgaggagctgagccagtcccctcacagatggataaatgaggctgatgtttggagggagaggcacacggtaaatggcatccccttaggcgcctctttgggaaaggaaagtggatgctcctttgaggcaggcgaggggctgggagtgggtagccgtcatgttgtcccccgtgggatcccatttttaacttgacccagattgtcttgggctccttttactttcagggggctgctttcctgggccaggctgtgtagcacttcccaccctcaggcatgagtacagactggtcaaaatgtttatgcagtcaaggccaaagcctgccctgagcccagacacacctgggtccccattctggggcctggtcccctaaacaatctcttcctcagccagcacagggaaatccagactcagggttccagaaatcccccgttcccaaaccaaaccaatcatggatcttccctttaaggggtagaatcagcctttagagttacaagcccctggaaaagggagcaggtcccatacaatcagcctttctcctcttctcttcttgggacaggaataactgctgagcagtccccctttgccactcctggctgtctgagtgggcacttgtctggctgctggccagcagtgaagggccacttggtgacttcgtagggttccttagagaagtgacatggccttgaggagattcagggcacctttcctcagtgagctttgatatggtccaaaaacagccttaaatcaagaatatttgtggaggtaggtgtggggaaggttggagaagagttaggtttgtgctttgtaatcttggcatccatgttttgtgcctgccctccctcttggggaggccatgcttgactctgctgaaagctgctaactggtgacagggtggatcatggtgaggactaggggtaaggtcagggaatgcttaagctctggccctgccctgtattcctcttccccttggtagcagttccctgaccaagggcaaggtgtgtctcaggaaggtggttctgtgcatgcctgggtgtggttaaggcgtggcccagaaggcttccctggtgctctcagtccaggcaaagcccagagcatctgagcacgtctctgacttccagtggcaacacagtttgaacgtggtgaaacagggtgtagttcttttccacattctgtgtcatctagtcgtgcaggtagggaaaaagttggtctaattgaagattgtgcatttcctagtgacaggtgccaagaggttatgatacgggtttcttgggtctgatgtacagtgtgaataaatgcttgcagctcttagctcttttttgatcgatgaagcacttttttattaatattttcctttgttaaaggaggaaccgtaactctccatagctgtacatataacccttttctcctaaagaggagtcagtcagtgctcctatatttttcattttttgtcaaagcaagaagtaaatactttagaattgttaaatatataaataaagcaaataaagttgagtgttccacatggtagcatttgctaacacttccta

SEQ ID NO: 353126 - DNA, 2081 bp, Homo sapiens
acatgtacttaacgtgttaaaaggctgtaccgtcggatcagcttgctatacgcctcaactgggcagacgagagccggcactttggacactggggggaagcccgtggaaccacctgtacagagtgacagatttgggatgcaccactggattgtagattgatttttctttcctgtccccctactccctccctaccttttccatcctcctcctctgccttcaaaaaaggaaactttcccttggttgtcttaatttttttttttttttgatggaagaccaagggttgccaggcccactgtaactgccgagctgcctgctgtcacgtgacactgagggatggcttgtttcttccgggtgggaggatggtggtcagagccaggagtatggagatctgagaccgtgagcagggaagaaagccagtgctaacatgcaaccattcctcacgccaccgccacatcagagctggttgggaaccctttgctgctggggaggctggaagcatattccccaagagcactgccctgggcatcatctccctcctgcgaggagctgagccagtcccctcacagatggataaatgaggctgatgtttggagggagaggcacacggtaaatggcatccccttaggcgcctctttgggaaaggaaagtggatgctcctttgaggcaggcgaggggctgggagtgggtagccgtcatgttgtcccccgtgggatcccatttttaacttgacccagattgtcttgggctccttttactttcagggggctgctttcctgggccaggctgtgtagcacttcccaccctcaggcatgagtacagactggtcaaaatgtttatgcagtcaaggccaaagcctgccctgagcccagacacacctgggtccccattctggggcctggtcccctaaacaatctcttcctcagccagcacagggaaatccagactcagggttccagaaatcccccgttcccaaaccaaaccaatcatggatcttccctttaaggggtagaatcagcctttagagttacaagcccctggaaaagggagcaggtcccatacaatcagcctttctcctcttctcttcttgggacaggaataactgctgagcagtccccctttgccactcctggctgtctgagtgggcacttgtctggctgctggccagcagtgaagggccacttggtgacttcgtagggttccttagagaagtgacatggccttgaggagattcagggcacctttcctcagtgagctttgatatggtccaaaaacagccttaaatcaagaatatttgtggaggtaggtgtggggaaggttggagaagagttaggtttgtgctttgtaatcttggcatccatgttttgtgcctgccctccctcttggggaggccatgcttgactctgctgaaagctgctaactggtgacagggtggatcatggtgaggactaggggtaaggtcagggaatgcttaagctctggccctgccctgtattcctcttccccttggtagcagttccctgaccaagggcaaggtgtgtctcaggaaggtggttctgtgcatgcctgggtgtggttaaggcgtggcccagaaggcttccctggtgctctcagtccaggcaaagcccagagcatctgagcacgtctctgacttccagtggcaacacagtttgaacgtggtgaaacagggtgtagttcttttccacattctgtgtcatctagtcgtgcaggtagggaaaaagttggtctaattgaagattgtgcatttcctagtgacaggtgccaagaggttatgatacgggtttcttgggtctgatgtacagtgtgaataaatgcttgcagctcttagctcttttttgatcgatgaagcacttttttattaatattttcctttgttaaaggaggaaccgtaactctccatagctgtacatataacccttttctcctaaagaggagtcagtcagtgctcctatatttttcattttttgtcaaagcaagaagtaaatactttagaattgttaaatatataaataaagcaaataaagttgagtgttccacatggtagcatttgctaacacttccta

SEQ ID NO: 353127 - DNA, 5654 bp, Homo sapiens
tgtggttgtgagaaggcggcggcggcggcggagtagcagccggacgagacgtcccagcggctcaggcgctgcccagcgccggccctggcagggagcctggtggggtggcggagggggagactgtgccgtggagggcctcgccatgtcctgctgcccgacttccttgtgaaacctcctagtagaaaaagttcttgggacaaacttcatttgacttcaccataagggaaagaagagagccttgttggacactgaagaagggacggggatttctcctcctaatctgggcctcttgtcatggatgaagagactcggcacagccttgagtgcatccaggccaatcagatctttcccaggaagcagctgatccgggaggatgagaatcttcaggttcctttccttgaacttcatggagagagcacagagtttgtgggccgtgccgaggatgccatcattgccctttccaattacagacttcacatcaagttcaaggagtctcttgttaatgttccattacagcttatagaaagtgttgaatgccgagatatatttcagcttcatttgacttgcaaagactgcaaagttatcaggtgtcagttttcaacctttgagcagtgtcaagagtggctgaagagactgaacaacgcaatccgaccacctgctaaaatagaagatctcttctcatttgcataccatgcttggtgcatggaggtctatgccagtgaaaaagagcaacatggagacctgtgcagaccaggggagcatgtaacttcaaggtttaaaaacgaggtggagaggatgggttttgatatgaacaacgcctggaggatttccaacatcaatgagaagtacaaattatgtggtagctatcctcaagagctcatagtgcctgcctggatcactgacaaagaactggaaagtgtatcaagtttcaggtcctggaagcgcatccctgccgtcatctacaggcaccagagcaatggagctgtcattgcccgctgtggacagccagaggttagctggtggggctggcgaaatgcagatgatgagcatctggtacagtcagtagccaaagcttgtgcctctgactcccgatcgagtggcagcaagctgtcaactaggaacacttctcgagactttcccaatgggggagacctttctgacgtggagttcgattcttctctgtcaaatgcttcaggagcagagagtttagccatccaaccgcagaagcttttgatcttggatgcacgctcctatgcagctgctgtggcaaaccgagccaaaggaggaggctgcgaatgcccagagtattacccaaactgtgaagttgtgtttatggggatggcaaacattcattctattcggaggagttttcagtctctgcggttgctgtgcactcagatgccagatccgggaaattggctatcagctcttgaaagcacaaaatggctccatcacttgtctgtgcttctgaaatcagcgcttctggtagtgcatgctgtggatcaggatcagcggccggtgctagtacactgctcagatggctgggaccgcaccccccagattgtggcattggctaagctcttgctggacccttattaccgaaccatagagggtttccaggtcctcgtggaaatggagtggctggattttggccataaatttgctgaccggtgtggtcatggggagaactcggatgatctgaatgaacgttgcccagtgtttctgcagtggcttgactgtgttcatcagcttcagaggcaatttccttgctcttttgagttcaatgaagcattccttgtgaaactggtgcagcatacctattcctgcctgtttggaacattcctgtgcaacaacgccaaggagagaggggaaaagcatactcaggaacggacatgttccgtgtggtcacttcttcgggcaggcaacaaggctttcaaaaacctactgtattcctctcagtcagaagccgtgctgtaccctgtgtgccatgtgcgtaacctgatgctgtggagtgcagtgtacctgccctgcccatccccaaccacccctgtggacgacagctgtgcaccatacccagccccaggcaccagccctgatgatccccccctgagccggctaccaaagactagatcatacgacaatctgaccacagcctgtgacaacacagtgcctctggccagccggcgctgcagcgaccccagcctgaacgagaagtggcaggagcaccggcgctcactagagctgagcagcctggctggccctggagaggatcccctttctgccgacagcctagggaagcccaccagagtgccggggggtgccgagctttctgttgcagccggagtagctgaggggcagatggagaacatcttgcaggaggccaccaaagaggagagtggagtagaggaacctgcccacagggcaggcattgagatacaggagggtaaagaggaccctctcttagaaaaggagagcaggaggaagacacctgaggcctcagccattggacttcaccaagacccagaactgggtgatgctgctctgaggagccatctggatatgagctggcctctgttctcacagggcatttctgaacagcagagtgggctcagtgttctcctcagttctctccaggtcccccccaggggagaggattccctggaggtccctgtggagcagtttcgaatagaagagattgcagagggtagggaggaagcagttcttccaatcccagtagatgcaaaagttggctatggtacctcacagtcatgttctctgctaccttcccaagtcccttttgagaccagaggaccaaacgtggacagttctacagacatgttagtggaagataaggtgaagtcagtaagtgggccccaaggtcatcatagatcttgccttgtaaatagtggcaaggacaggcttcctcagaccatggaacccagcccttcagagacaagcctggtcgagaggccccaagtggggtctgtggtgcataggacttcccttggcagcactctcagcctgacacgttccccttgtgccttgcctttagccgaatgtaaagaggggcttgtgtgcaatggtgccccagagactgaaaacagggcctcagagcagcccccaggtcttagcaccctccagatgtaccccacacccaatgggcattgcgccaatggggaggctggtaggagcaaggactcactgagccgtcagctgtctgctatgagctgcagctctgcccacttacactcaaggaacttgcaccacaagtggctgcatagccactcaggaaggccatctgcaaccagcagccccgaccagccttcccgcagccacctggacgatgatggcatgtcagtgtacacagacacgatccaacagcgcctgcgtcagattgagtcaggccaccagcaggaagtagaaactttgaagaaacaagtccaggagctgaagagtcgcctggagagccagtacctgaccagctccctacactttaatggagactttggggatgaggtgacttcaatccccgactcggaaagcaatctggatcagaactgtttgtctcgctgcagcacagagattttctctgaagccagctgggagcaggtggataaacaggacacagagatgacccgttggcttcctgaccacctggccgcccactgctatgcgtgcgacagtgccttctggcttgccagcaggaagcaccactgcaggaattgtgggaacgtattctgctccagttgttgtaaccagaaggttccagttcccagccagcagctctttgaacccagtcgagtatgcaagtcttgctatagcagcctacatcccacaagctccagcattgaccttgaactggataagcccattgctgccacttccaactgaagctcagtgacctgggtgggcagtggccaagctgctgttcctatgacaggcccactcaacctgggcagaccgagaggcccgtgcactttggaatgggagcgtggaaccacctgtacagagtgacagatttgggatgcaccactggattgtagattgatttttctttcctgtccccctactccctccctaccttttccatcctcctcctctgccttcaaaaaaggaaactttcccttggttgtcttaatttttttttttttttgatggaagaccaagggttgccaggcccactgtaactgccgagctgcctgctgtcacgtgacactgagggatggcttgtttcttccgggtgggaggatggtggtcagagccaggagtatggagatctgagaccgtgagcagggaagaaagccagtgctaacatgcaaccattcctcacgccaccgccacatcagagctggttgggaaccctttgctgctggggaggctggaagcatattccccaagagcactgccctgggcatcatctccctcctgcgaggagctgagccagtcccctcacagatggataaatgaggctgatgtttggagggagaggcacacggtaaatggcatccccttaggcgcctctttgggaaaggaaagtggatgctcctttgaggcaggcgaggggctgggagtgggtagccgtcatgttgtcccccgtgggatcccatttttaacttgacccagattgtcttgggctccttttactttcagggggctgctttcctgggccaggctgtgtagcacttcccaccctcaggcatgagtacagactggtcaaaatgtttatgcagtcaaggccaaagcctgccctgagcccagacacacctgggtccccattctggggcctggtcccctaaacaatctcttcctcagccagcacagggaaatccagactcagggttccagaaatcccccgttcccaaaccaaaccaatcatggatcttccctttaaggggtagaatcagcctttagagttacaagcccctggaaaagggagcaggtcccatacaatcagcctttctcctcttctcttcttgggacaggaataactgctgagcagtccccctttgccactcctggctgtctgagtgggcacttgtctggctgctggccagcagtgaagggccacttggtgacttcgtagggttccttagagaagtgacatggccttgaggagattcagggcacctttcctcagtgagctttgatatggtccaaaaacagccttaaatcaagaatatttgtggaggtaggtgtggggaaggttggagaagagttaggtttgtgctttgtaatcttggcatccatgttttgtgcctgccctccctcttggggaggccatgcttgactctgctgaaagctgctaactggtgacagggtggatcatggtgaggactaggggtaaggtcagggaatgcttaagctctggccctgccctgtattcctcttccccttggtagcagttccctgaccaagggcaaggtgtgtctcaggaaggtggttctgtgcatgcctgggtgtggttaaggcgtggcccagaaggcttccctggtgctctcagtccaggcaaagcccagagcatctgagcacgtctctgacttccagtggcaacacagtttgaacgtggtgaaacagggtgtagttcttttccacattctgtgtcatctagtcgtatgttgggactagtcggggtacgacgctcgcattcggtaatc

SEQ ID NO: 353128 - DNA, 1365 bp, Homo sapiens
tttttgagatggagtttcactcttgttgcccaagattacaccaccgcactacctgtgcactacactaccagtgcaccactgcctgggtgatagtgagattctgtctcaaaaaaagaaaaaaaagtattaagaagctgttagtgcctaatagaaatattctaacctctttgacattttttttgcatcaatgtgttttcagactagatgtaactaatgtattggatagaaaaactttttaagatcaatattgtttccttgagcttttctgcctgttcaccttggtctttgtactttcattgtgattatgctagcagatatggcagaaaaaccaaatatgaatgattagaagctttgaaattattttaaggttttggacttttccaggatgaagagactcggcacagccttgagtgcatccaggccaatcagatctttcccaggaagcagctgatccgggaggatgagaatcttcaggttcctttccttgaacttcatggagagagcacagagtttgtgggccgtgccgaggatgccatcattgccctttccaattacagacttcacatcaagttcaaggagtctcttgttaatgttccattacagcttatagaaagtgttgaatgccgagatatatttcagcttcatttgacttgcaaagactgcaaagttatcaggtgtcagttttcaacctttgagcagtgtcaagagtggctgaagagactgaacaacgcaatccgaccacctgctaaaatagaagatctcttctcatttgcataccatgcttggtgcatggaggtctatgccagtgaaaaagagcaacatggagacctgtgcagaccaggggagcatgtaacttcaaggtttaaaaacgaggtggagaggatgggttttgatatgaacaacgcctggaggatttccaacatcaatgagaagtacaaattatgtggtagctatcctcaagagctcatagtgcctgcctggatcactgacaaagaactggaaagtgtatcaagtttcaggtcctggaagcgcatccctgccgtcatctacaggcaccagagcaatggagctgtcattgcccgctgtggacagccagaggttagctggtggggctggcgaaatgcagatgatgagcatctggtacagtcagtagccaaagcttgtgcctctgactcccgatcgagtggcagcaagctgtcaactaggaacacttctcgagactttcccaatgggggagacctttctgacgtggagttcgattcttctctgtgacgtgactagaagttgaaatctacttccctgctaaagggcacaggggtggtgtacaaagaaagctaccttcccacgcaatcagtcactggatga

SEQ ID NO: 353129 - DNA, 276 bp, Homo sapiens
gacccagggtgctgctgcctgctactttatctcaggggagattggagtcccctccagggaaacgatttggacgcctttcttgtactgttgacatcagatctgctgggctggtgccactggagctgatgtggtccttgtgactcttgctgcccccagcatggctctgctggctccagctggatggcccatctcctgtcagtaacctggtcccatctgttttgcagatgacccgttggcttcctgaccacctggccgcccactgctatgcgtgcgaca

SEQ ID NO: 353130 - DNA, 230 bp, Homo sapiens
gggagcatgtaacttcaaggtttaaaaacgaggtggagaggatgggttttgatatgaacaacgcctggaggatttccaacatcaatgagaagtacaagtgagttatatgggtccctgtggactgtttcacagccagtgcctttgcagaaaccgcaattctcatgtggcagaacatttgaacttagactttttatttgaaatggttttatttattaaatctaaaggcatga

SEQ ID NO: 353131 - DNA, 488 bp, Homo sapiens
cccaaactgtgaagttgtgtttatggggatggcaaacattcattctattcggaggagttttcagtctctgcggttgctgtgcactcagatgccagatccgggaaagtaagtccttggccttggctttcattttgcattgctcttaaataataagtttgcttctttccttgaactaagggggaaaaaaagaaaaaaaaattaatttggagcagtctttccttctgtttcttggtaatcttcagttaccagaccagtctctgcaagtatctccttgctgggtctgaaatgtggcagcacagaggaagagttgggagaaaatacagccatttgaaaggttttaaaatctgcagcacagaagaaatctcagcatcaaaacagaagcattaccttactgtttgtcctgggacctttcccttccacgtcatttttagcccaaagaaatttaattcttcagtttctgatgtcccatagtgatacataacctgttt

SEQ ID NO: 353132 - DNA, 302 bp, Homo sapiens
cacttgagtactgttgatccagataagtttgcagttctatttttgttgctttcccttatagatctttttaattagtcttgttggacacattgaagaactccagggtcaatgcctttttgactaagaggacttcatttttttaaaattgcaggttccattacagcttatagaaagtgttgaatgccgagatatatttcagcttcatttgacttgcaaagactgcaaagttatcaggtatgtggtatggtatgtttgtgttgctgtttagtgtggaaaatattttttaaagaatgggtccatta

SEQ ID NO: 353133 - DNA, 500 bp, Homo sapiens
tcattagtctaaaaaaataggttttccaatggtcagcttcctccttttggacattttgttccattggctaacatttgtttttcttataagtgataatgagcatgcgaatgactgactgcctcagatgctttcttggttgtagttcccacttcactacgagtgggcattcttgaaataatggcttttcttacatttcatttcaactgtcttctgattacatccatacttgtttggctttacaaaaggtgtcagttttcaacctttgagcagtgtcaagagtggctgaagagactgaacaacgcaatccgaccacctgctaaaatagaagatctcttctcatttgcataccatgcttggtgcatggaggtctatgccagtgaaaaagagcaacatggagacctgtgcagaccaggtacgcctttctgaaatgtgcaaatggccaggggctttatcaagctactgatggaggtacttttaacatgaaatgggacacctaagca

SEQ ID NO: 353134 - DNA, 5946 bp, Homo sapiens
tttttgagatggagtttcactcttgttgcccaagattacaccaccgcactacctgtgcactacactaccagtgcaccactgcctgggtgatagtgagattctgtctcaaaaaaagaaaaaaaagtattaagaagctgttagtgcctaatagaaatattctaacctctttgacattttttttgcatcaatgtgttttcagactagatgtaactaatgtattggatagaaaaactttttaagatcaatattgtttccttgagcttttctgcctgttcaccttggtctttgtactttcattgtgattatgctagcagatatggcagaaaaaccaaatatgaatgattagaagctttgaaattattttaaggttttggacttttccaggatgaagagactcggcacagccttgagtgcatccaggccaatcagatctttcccaggaagcagctgatccgggaggatgagaatcttcaggttcctttccttgaacttcatggagagagcacagagtttgtgggccgtgccgaggatgccatcattgccctttccaattacagacttcacatcaagttcaaggagtctcttgttaatgttccattacagcttatagaaagtgttgaatgccgagatatatttcagcttcatttgacttgcaaagactgcaaagttatcaggtgtcagttttcaacctttgagcagtgtcaagagtggctgaagagactgaacaacgcaatccgaccacctgctaaaatagaagatctcttctcatttgcataccatgcttggtgcatggaggtctatgccagtgaaaaagagcaacatggagacctgtgcagaccaggggagcatgtaacttcaaggtttaaaaacgaggtggagaggatgggttttgatatgaacaacgcctggaggatttccaacatcaatgagaagtacaaattatgtggtagctatcctcaagagctcatagtgcctgcctggatcactgacaaagaactggaaagtgtatcaagtttcaggtcctggaagcgcatccctgccgtcatctacaggcaccagagcaatggagctgtcattgcccgctgtggacagccagaggttagctggtggggctggcgaaatgcagatgatgagcatctggtacagtcagtagccaaagcttgtgcctctgactcccgatcgagtggcagcaagctgtcaactaggaacacttctcgagactttcccaatgggggagacctttctgacgtggagttcgattcttctctgtcaaatgcttcaggagcagagagtttagccatccaaccgcagaagcttttgatcttggatgcacgctcctatgcagctgctgtggcaaaccgagccaaaggaggaggctgcgaatgcccagagtattacccaaactgtgaagttgtgtttatggggatggcaaacattcattctattcggaggagttttcagtctctgcggttgctgtgcactcagatgccagatccgggaaattggctatcagctcttgaaagcacaaaatggctccatcacttgtctgtgcttctgaaatcagcgcttctggtagtgcatgctgtggatcaggatcagcggccggtgctagtacactgctcagatggctgggaccgcaccccccagattgtggcattggctaagctcttgctggacccttattaccgaaccatagagggtttccaggtcctcgtggaaatggagtggctggattttggccataaatttgctgaccggtgtggtcatggggagaactcggatgatctgaatgaacgttgcccagtgtttctgcagtggcttgactgtgttcatcagcttcagaggcaatttccttgctcttttgagttcaatgaagcattccttgtgaaactggtgcagcatacctattcctgcctgtttggaacattcctgtgcaacaacgccaaggagagaggggaaaagcatactcaggaacggacatgttccgtgtggtcacttcttcgggcaggcaacaaggctttcaaaaacctactgtattcctctcagtcagaagccgtgctgtaccctgtgtgccatgtgcgtaacctgatgctgtggagtgcagtgtacctgccctgcccatccccaaccacccctgtggacgacagctgtgcaccatacccagccccaggcaccagccctgatgatccccccctgagccggctaccaaagactagatcatacgacaatctgaccacagcctgtgacaacacagtgcctctggccagccggcgctgcagcgaccccagcctgaacgagaagtggcaggagcaccggcgctcactagagctgagcagcctggctggccctggagaggatcccctttctgccgacagcctagggaagcccaccagagtgccggggggtgccgagctttctgttgcagccggagtagctgaggggcagatggagaacatcttgcaggaggccaccaaagaggagagtggagtagaggaacctgcccacagggcaggcattgagatacaggagggtaaagaggaccctctcttagaaaaggagagcaggaggaagacacctgaggcctcagccattggacttcaccaagacccagaactgggtgatgctgctctgaggagccatctggatatgagctggcctctgttctcacagggcatttctgaacagcagagtgggctcagtgttctcctcagttctctccaggtcccccccaggggagaggattccctggaggtccctgtggagcagtttcgaatagaagagattgcagagggtagggaggaagcagttcttccaatcccagtagatgcaaaagttggctatggtacctcacagtcatgttctctgctaccttcccaagtcccttttgagaccagaggaccaaacgtggacagttctacagacatgttagtggaagataaggtgaagtcagtaagtgggccccaaggtcatcatagatcttgccttgtaaatagtggcaaggacaggcttcctcagaccatggaacccagcccttcagagacaagcctggtcgagaggccccaagtggggtctgtggtgcataggacttcccttggcagcactctcagcctgacacgttccccttgtgccttgcctttagccgaatgtaaagaggggcttgtgtgcaatggtgccccagagactgaaaacagggcctcagagcagcccccaggtcttagcaccctccagatgtaccccacacccaatgggcattgcgccaatggggaggctggtaggagcaaggactcactgagccgtcagctgtctgctatgagctgcagctctgcccacttacactcaaggaacttgcaccacaagtggctgcatagccactcaggaaggccatctgcaaccagcagccccgaccagccttcccgcagccacctggacgatgatggcatgtcagtgtacacagacacgatccaacagcgcctgcgtcagattgagtcaggccaccagcaggaagtagaaactttgaagaaacaagtccaggagctgaagagtcgcctggagagccagtacctgaccagctccctacactttaatggagactttggggatgaggtgatgacccgttggcttcctgaccacctggccgcccactgctatgcgtgcgacagtgccttctggcttgccagcaggaagcaccactgcaggaattgtgggaacgtattctgctccagttgttgtaaccagaaggttccagttcccagccagcagctctttgaacccagtcgagtatgcaagtcttgctatagcagcctacatcccacaagctccagcattgaccttgaactggataagcccattgctgccacttccaactgaagctcagtgacctgggtgggcagtggccaagctgctgttcctatgacaggcccactcaacctgggcagaccgagaggcccgtgcactttggaatgggagcgtggaaccacctgtacagagtgacagatttgggatgcaccactggattgtagattgatttttctttcctgtccccctactccctccctaccttttccatcctcctcctctgccttcaaaaaaggaaactttcccttggttgtcttaatttttttttttttttgatggaagaccaagggttgccaggcccactgtaactgccgagctgcctgctgtcacgtgacactgagggatggcttgtttcttccgggtgggaggatggtggtcagagccaggagtatggagatctgagaccgtgagcagggaagaaagccagtgctaacatgcaaccattcctcacgccaccgccacatcagagctggttgggaaccctttgctgctggggaggctggaagcatattccccaagagcactgccctgggcatcatctccctcctgcgaggagctgagccagtcccctcacagatggataaatgaggctgatgtttggagggagaggcacacggtaaatggcatccccttaggcgcctctttgggaaaggaaagtggatgctcctttgaggcaggcgaggggctgggagtgggtagccgtcatgttgtcccccgtgggatcccatttttaacttgacccagattgtcttgggctccttttactttcagggggctgctttcctgggccaggctgtgtagcacttcccaccctcaggcatgagtacagactggtcaaaatgtttatgcagtcaaggccaaagcctgccctgagcccagacacacctgggtccccattctggggcctggtcccctaaacaatctcttcctcagccagcacagggaaatccagactcagggttccagaaatcccccgttcccaaaccaaaccaatcatggatcttccctttaaggggtagaatcagcctttagagttacaagcccctggaaaagggagcaggtcccatacaatcagcctttctcctcttctcttcttgggacaggaataactgctgagcagtccccctttgccactcctggctgtctgagtgggcacttgtctggctgctggccagcagtgaagggccacttggtgacttcgtagggttccttagagaagtgacatggccttgaggagattcagggcacctttcctcagtgagctttgatatggtccaaaaacagccttaaatcaagaatatttgtggaggtaggtgtggggaaggttggagaagagttaggtttgtgctttgtaatcttggcatccatgttttgtgcctgccctccctcttggggaggccatgcttgactctgctgaaagctgctaactggtgacagggtggatcatggtgaggactaggggtaaggtcagggaatgcttaagctctggccctgccctgtattcctcttccccttggtagcagttccctgaccaagggcaaggtgtgtctcaggaaggtggttctgtgcatgcctgggtgtggttaaggcgtggcccagaaggcttccctggtgctctcagtccaggcaaagcccagagcatctgagcacgtctctgacttccagtggcaacacagtttgaacgtggtgaaacagggtgtagttcttttccacattctgtgtcatctagtcgtgcaggtagggaaaaagttggtctaattgaagattgtgcatttcctagtgacaggtgccaagaggttatgatacgggtttcttgggtctgatgtacagtgtgaataaatgcttgcagctcttagctcttttttgatcgatgaagcacttttttattaatattttcctttgttaaaggaggaaccgtaactctccatagctgtacatataacccttttctcctaaagaggagtcagtcagtgctcctatatttttcattttttgtcaaagcaagaagtaaatactttagaattgttaaatatataaataaagcaaataaagttgagtgttccacatggtagcatttgctaacacttccta

SEQ ID NO: 353135 - DNA, 5973 bp, Homo sapiens
tttttgagatggagtttcactcttgttgcccaagattacaccaccgcactacctgtgcactacactaccagtgcaccactgcctgggtgatagtgagattctgtctcaaaaaaagaaaaaaaagtattaagaagctgttagtgcctaatagaaatattctaacctctttgacattttttttgcatcaatgtgttttcagactagatgtaactaatgtattggatagaaaaactttttaagatcaatattgtttccttgagcttttctgcctgttcaccttggtctttgtactttcattgtgattatgctagcagatatggcagaaaaaccaaatatgaatgattagaagctttgaaattattttaaggttttggacttttccaggatgaagagactcggcacagccttgagtgcatccaggccaatcagatctttcccaggaagcagctgatccgggaggatgagaatcttcaggttcctttccttgaacttcatggagagagcacagagtttgtgggccgtgccgaggatgccatcattgccctttccaattacagacttcacatcaagttcaaggagtctcttgttaatgttccattacagcttatagaaagtgttgaatgccgagatatatttcagcttcatttgacttgcaaagactgcaaagttatcaggtgtcagttttcaacctttgagcagtgtcaagagtggctgaagagactgaacaacgcaatccgaccacctgctaaaatagaagatctcttctcatttgcataccatgcttggtgcatggaggtctatgccagtgaaaaagagcaacatggagacctgtgcagaccaggggagcatgtaacttcaaggtttaaaaacgaggtggagaggatgggttttgatatgaacaacgcctggaggatttccaacatcaatgagaagtacaaattatgtggtagctatcctcaagagctcatagtgcctgcctggatcactgacaaagaactggaaagtgtatcaagtttcaggtcctggaagcgcatccctgccgtcatctacaggcaccagagcaatggagctgtcattgcccgctgtggacagccagaggttagctggtggggctggcgaaatgcagatgatgagcatctggtacagtcagtagccaaagcttgtgcctctgactcccgatcgagtggcagcaagctgtcaactaggaacacttctcgagactttcccaatgggggagacctttctgacgtggagttcgattcttctctgtcaaatgcttcaggagcagagagtttagccatccaaccgcagaagcttttgatcttggatgcacgctcctatgcagctgctgtggcaaaccgagccaaaggaggaggctgcgaatgcccagagtattacccaaactgtgaagttgtgtttatggggatggcaaacattcattctattcggaggagttttcagtctctgcggttgctgtgcactcagatgccagatccgggaaattggctatcagctcttgaaagcacaaaatggctccatcacttgtctgtgcttctgaaatcagcgcttctggtagtgcatgctgtggatcaggatcagcggccggtgctagtacactgctcagatggctgggaccgcaccccccagattgtggcattggctaagctcttgctggacccttattaccgaaccatagagggtttccaggtcctcgtggaaatggagtggctggattttggccataaatttgctgaccggtgtggtcatggggagaactcggatgatctgaatgaacgttgcccagtgtttctgcagtggcttgactgtgttcatcagcttcagaggcaatttccttgctcttttgagttcaatgaagcattccttgtgaaactggtgcagcatacctattcctgcctgtttggaacattcctgtgcaacaacgccaaggagagaggggaaaagcatactcaggaacggacatgttccgtgtggtcacttcttcgggcaggcaacaaggctttcaaaaacctactgtattcctctcagtcagaagccgtgctgtaccctgtgtgccatgtgcgtaacctgatgctgtggagtgcagtgtacctgccctgcccatccccaaccacccctgtggacgacagctgtgcaccatacccagccccaggcaccagccctgatgatccccccctgagccggctaccaaagactagatcatacgacaatctgaccacagcctgtgacaacacagtgcctctggccagccggcgctgcagcgaccccagcctgaacgagaagtggcaggagcaccggcgctcactagagctgagcagcctggctggccctggagaggatcccctttctgccgacagcctagggaagcccaccagagtgccggggggtgccgagctttctgttgcagccggagtagctgaggggcagatggagaacatcttgcaggaggccaccaaagaggagagtggagtagaggaacctgcccacagggcaggcattgagatacaggagggtaaagaggaccctctcttagaaaaggagagcaggaggaagacacctgaggcctcagccattggacttcaccaagacccagaactgggtgatgctgctctgaggagccatctggatatgagctggcctctgttctcacagggcatttctgaacagcagagtgggctcagtgttctcctcagttctctccaggtcccccccaggggagaggattccctggaggtccctgtggagcagtttcgaatagaagagattgcagagggtagggaggaagcagttcttccaatcccagtagatgcaaaagttggctatggtacctcacagtcatgttctctgctaccttcccaagtcccttttgagaccagaggaccaaacgtggacagttctacagacatgttagtggaagataaggtgaagtcagtaagtgggccccaaggtcatcatagatcttgccttgtaaatagtggcaaggacaggcttcctcagaccatggaacccagcccttcagagacaagcctggtcgagaggccccaagtggggtctgtggtgcataggacttcccttggcagcactctcagcctgacacgttccccttgtgccttgcctttagccgaatgtaaagaggggcttgtgtgcaatggtgccccagagactgaaaacagggcctcagagcagcccccaggtcttagcaccctccagatgtaccccacacccaatgggcattgcgccaatggggaggctggtaggagcaaggactcactgagccgtcagctgtctgctatgagctgcagctctgcccacttacactcaaggaacttgcaccacaagtggctgcatagccactcaggaaggccatctgcaaccagcagccccgaccagccttcccgcagccacctggacgatgatggcatgtcagtgtacacagacacgatccaacagcgcctgcgtcagattgagtcaggccaccagcaggaagtagaaactttgaagaaacaagtccaggagctgaagagtcgcctggagagccagtacctgaccagctccctacactttaatggagactttggggatgaggtgatgacccgttggcttcctgaccacctggccgcccactgctatgcgtgcgacagtgccttctggcttgccagcaggaagcaccactgcagggacactgaccgtgttgatcaaacgtggaattgtgggaacgtattctgctccagttgttgtaaccagaaggttccagttcccagccagcagctctttgaacccagtcgagtatgcaagtcttgctatagcagcctacatcccacaagctccagcattgaccttgaactggataagcccattgctgccacttccaactgaagctcagtgacctgggtgggcagtggccaagctgctgttcctatgacaggcccactcaacctgggcagaccgagaggcccgtgcactttggaatgggagcgtggaaccacctgtacagagtgacagatttgggatgcaccactggattgtagattgatttttctttcctgtccccctactccctccctaccttttccatcctcctcctctgccttcaaaaaaggaaactttcccttggttgtcttaatttttttttttttttgatggaagaccaagggttgccaggcccactgtaactgccgagctgcctgctgtcacgtgacactgagggatggcttgtttcttccgggtgggaggatggtggtcagagccaggagtatggagatctgagaccgtgagcagggaagaaagccagtgctaacatgcaaccattcctcacgccaccgccacatcagagctggttgggaaccctttgctgctggggaggctggaagcatattccccaagagcactgccctgggcatcatctccctcctgcgaggagctgagccagtcccctcacagatggataaatgaggctgatgtttggagggagaggcacacggtaaatggcatccccttaggcgcctctttgggaaaggaaagtggatgctcctttgaggcaggcgaggggctgggagtgggtagccgtcatgttgtcccccgtgggatcccatttttaacttgacccagattgtcttgggctccttttactttcagggggctgctttcctgggccaggctgtgtagcacttcccaccctcaggcatgagtacagactggtcaaaatgtttatgcagtcaaggccaaagcctgccctgagcccagacacacctgggtccccattctggggcctggtcccctaaacaatctcttcctcagccagcacagggaaatccagactcagggttccagaaatcccccgttcccaaaccaaaccaatcatggatcttccctttaaggggtagaatcagcctttagagttacaagcccctggaaaagggagcaggtcccatacaatcagcctttctcctcttctcttcttgggacaggaataactgctgagcagtccccctttgccactcctggctgtctgagtgggcacttgtctggctgctggccagcagtgaagggccacttggtgacttcgtagggttccttagagaagtgacatggccttgaggagattcagggcacctttcctcagtgagctttgatatggtccaaaaacagccttaaatcaagaatatttgtggaggtaggtgtggggaaggttggagaagagttaggtttgtgctttgtaatcttggcatccatgttttgtgcctgccctccctcttggggaggccatgcttgactctgctgaaagctgctaactggtgacagggtggatcatggtgaggactaggggtaaggtcagggaatgcttaagctctggccctgccctgtattcctcttccccttggtagcagttccctgaccaagggcaaggtgtgtctcaggaaggtggttctgtgcatgcctgggtgtggttaaggcgtggcccagaaggcttccctggtgctctcagtccaggcaaagcccagagcatctgagcacgtctctgacttccagtggcaacacagtttgaacgtggtgaaacagggtgtagttcttttccacattctgtgtcatctagtcgtgcaggtagggaaaaagttggtctaattgaagattgtgcatttcctagtgacaggtgccaagaggttatgatacgggtttcttgggtctgatgtacagtgtgaataaatgcttgcagctcttagctcttttttgatcgatgaagcacttttttattaatattttcctttgttaaaggaggaaccgtaactctccatagctgtacatataacccttttctcctaaagaggagtcagtcagtgctcctatatttttcattttttgtcaaagcaagaagtaaatactttagaattgttaaatatataaataaagcaaataaagttgagtgttccacatggtagcatttgctaacacttccta

SEQ ID NO: 353136 - DNA, 7285 bp, Homo sapiens
tttttgagatggagtttcactcttgttgcccaagattacaccaccgcactacctgtgcactacactaccagtgcaccactgcctgggtgatagtgagattctgtctcaaaaaaagaaaaaaaagtattaagaagctgttagtgcctaatagaaatattctaacctctttgacattttttttgcatcaatgtgttttcagactagatgtaactaatgtattggatagaaaaactttttaagatcaatattgtttccttgagcttttctgcctgttcaccttggtctttgtactttcattgtgattatgctagcagatatggcagaaaaaccaaatatgaatgattagaagctttgaaattattttaaggttttggacttttccaggatgaagagactcggcacagccttgagtgcatccaggccaatcagatctttcccaggaagcagctgatccgggaggatgagaatcttcaggttcctttccttgaacttcatggagagagcacagagtttgtgggccgtgccgaggatgccatcattgccctttccaattacagacttcacatcaagttcaaggagtctcttgttaatgttccattacagcttatagaaagtgttgaatgccgagatatatttcagcttcatttgacttgcaaagactgcaaagttatcaggtgtcagttttcaacctttgagcagtgtcaagagtggctgaagagactgaacaacgcaatccgaccacctgctaaaatagaagatctcttctcatttgcataccatgcttggtgcatggaggtctatgccagtgaaaaagagcaacatggagacctgtgcagaccaggggagcatgtaacttcaaggtttaaaaacgaggtggagaggatgggttttgatatgaacaacgcctggaggatttccaacatcaatgagaagtacaaattatgtggtagctatcctcaagagctcatagtgcctgcctggatcactgacaaagaactggaaagtgtatcaagtttcaggtcctggaagcgcatccctgccgtcatctacaggcaccagagcaatggagctgtcattgcccgctgtggacagccagaggttagctggtggggctggcgaaatgcagatgatgagcatctggtacagtcagtagccaaagcttgtgcctctgactcccgatcgagtggcagcaagctgtcaactaggaacacttctcgagactttcccaatgggggagacctttctgacgtggagttcgattcttctctgtcaaatgcttcaggagcagagagtttagccatccaaccgcagaagcttttgatcttggatgcacgctcctatgcagctgctgtggcaaaccgagccaaaggaggaggctgcgaatgcccagagtattacccaaactgtgaagttgtgtttatggggatggcaaacattcattctattcggaggagttttcagtctctgcggttgctgtgcactcagatgccagatccgggaaattggctatcagctcttgaaagcacaaaatggctccatcacttgtctgtgcttctgaaatcagcgcttctggtagtgcatgctgtggatcaggatcagcggccggtgctagtacactgctcagatggctgggaccgcaccccccagattgtggcattggctaagctcttgctggacccttattaccgaaccatagagggtttccaggtcctcgtggaaatggagtggctggattttggccataaatttgctgaccggtgtggtcatggggagaactcggatgatctgaatgaacgttgcccagtgtttctgcagtggcttgactgtgttcatcagcttcagaggcaatttccttgctcttttgagttcaatgaagcattccttgtgaaactggtgcagcatacctattcctgcctgtttggaacattcctgtgcaacaacgccaaggagagaggggaaaagcatactcaggaacggacatgttccgtgtggtcacttcttcgggcaggcaacaaggctttcaaaaacctactgtattcctctcagtcagaagccgtatgtatccttcagcctttccactgtggtcagcagaaggaatttggggttggttacatatgagagcctttttgagtagtgactgtttttgtgaagacatctctactgtctctggatggactggttccatttttcccccatgattctgtcctgaggaaggcctgcttctgatggtgctctgatctgtttctgatgactacttgctgagggtggtttggtttaacacagatctctactttgccaccctagacatgaatcttttttggcactgcctccagagcttatttctagcatattctgtcttacgggagaggcacttaagttgcttcctgatgcactgatagctcagaatgagctgccaccaggcccccagcaccctcccagtgtcaataagcaatgatacccaccaaagcttctgtctcagaacagtaaactgtgtttgacattggtatgtgtgtctgtctgattctctgctcacatgaagagctggcaggccctttaagactttgttccccgaaggaatgaataccttctgttaagcagagaaaaggaggcacatagacctatgtgtcagtttcatagtaatactagctttgtcagaatgcatcttagaccctaaagaagtcaaaaggaggctaatcagagttcatactgatttcctggactattaatatggttctcattacatttaagtaatcacagaaaagatttaagctgactgcttgtctctccccttcagtgtgccttctggggaagtaacaatacagcaggaaaatttccttcttttcacatgattaatttaaatgatcccataaaatgggtttgacagtgtttcttgaagccaagcttttgtgccagcaggatggacaatcaccatctaacagaatgactcactttcttaggcagtaaaagcaacaaatcaagctgatgaaagtcagacattgaaggtgacctaagaaataactataatgagaaagggatctaaaaaatattttatattttcatgctctcaagtggctcttaggtgaaaaatgttggctatataaaatgtctagtcctgtattggtcctcttgggatagacctgtatccattggtgctgcttctttgtggagatcctgtcagccctgttgggtattccagctgggtgcttgctcttgatcctcatttccagacatcctagaagacttattggggcatatttaaacctgtgtcctcccccctcctcaggtgctgtaccctgtgtgccatgtgcgtaacctgatgctgtggagtgcagtgtacctgccctgcccatccccaaccacccctgtggacgacagctgtgcaccatacccagccccaggcaccagccctgatgatccccccctgagccggctaccaaagactagatcatacgacaatctgaccacagcctgtgacaacacagtgcctctggccagccggcgctgcagcgaccccagcctgaacgagaagtggcaggagcaccggcgctcactagagctgagcagcctggctggccctggagaggatcccctttctgccgacagcctagggaagcccaccagagtgccggggggtgccgagctttctgttgcagccggagtagctgaggggcagatggagaacatcttgcaggaggccaccaaagaggagagtggagtagaggaacctgcccacagggcaggcattgagatacaggagggtaaagaggaccctctcttagaaaaggagagcaggaggaagacacctgaggcctcagccattggacttcaccaagacccagaactgggtgatgctgctctgaggagccatctggatatgagctggcctctgttctcacagggcatttctgaacagcagagtgggctcagtgttctcctcagttctctccaggtcccccccaggggagaggattccctggaggtccctgtggagcagtttcgaatagaagagattgcagagggtagggaggaagcagttcttccaatcccagtagatgcaaaagttggctatggtacctcacagtcatgttctctgctaccttcccaagtcccttttgagaccagaggaccaaacgtggacagttctacagacatgttagtggaagataaggtgaagtcagtaagtgggccccaaggtcatcatagatcttgccttgtaaatagtggcaaggacaggcttcctcagaccatggaacccagcccttcagagacaagcctggtcgagaggccccaagtggggtctgtggtgcataggacttcccttggcagcactctcagcctgacacgttccccttgtgccttgcctttagccgaatgtaaagaggggcttgtgtgcaatggtgccccagagactgaaaacagggcctcagagcagcccccaggtcttagcaccctccagatgtaccccacacccaatgggcattgcgccaatggggaggctggtaggagcaaggactcactgagccgtcagctgtctgctatgagctgcagctctgcccacttacactcaaggaacttgcaccacaagtggctgcatagccactcaggaaggccatctgcaaccagcagccccgaccagccttcccgcagccacctggacgatgatggcatgtcagtgtacacagacacgatccaacagcgcctgcgtcagattgagtcaggccaccagcaggaagtagaaactttgaagaaacaagtccaggagctgaagagtcgcctggagagccagtacctgaccagctccctacactttaatggagactttggggatgaggtgacttcaatccccgactcggaaagcaatctggatcagaactgtttgtctcgctgcagcacagagattttctctgaagccagctgggagcaggtggataaacaggacacagagatgacccgttggcttcctgaccacctggccgcccactgctatgcgtgcgacagtgccttctggcttgccagcaggaagcaccactgcaggaattgtgggaacgtattctgctccagttgttgtaaccagaaggttccagttcccagccagcagctctttgaacccagtcgagtatgcaagtcttgctatagcagcctacatcccacaagctccagcattgaccttgaactggataagcccattgctgccacttccaactgaagctcagtgacctgggtgggcagtggccaagctgctgttcctatgacaggcccactcaacctgggcagaccgagaggcccgtgcactttggaatgggagcgtggaaccacctgtacagagtgacagatttgggatgcaccactggattgtagattgatttttctttcctgtccccctactccctccctaccttttccatcctcctcctctgccttcaaaaaaggaaactttcccttggttgtcttaatttttttttttttttgatggaagaccaagggttgccaggcccactgtaactgccgagctgcctgctgtcacgtgacactgagggatggcttgtttcttccgggtgggaggatggtggtcagagccaggagtatggagatctgagaccgtgagcagggaagaaagccagtgctaacatgcaaccattcctcacgccaccgccacatcagagctggttgggaaccctttgctgctggggaggctggaagcatattccccaagagcactgccctgggcatcatctccctcctgcgaggagctgagccagtcccctcacagatggataaatgaggctgatgtttggagggagaggcacacggtaaatggcatccccttaggcgcctctttgggaaaggaaagtggatgctcctttgaggcaggcgaggggctgggagtgggtagccgtcatgttgtcccccgtgggatcccatttttaacttgacccagattgtcttgggctccttttactttcagggggctgctttcctgggccaggctgtgtagcacttcccaccctcaggcatgagtacagactggtcaaaatgtttatgcagtcaaggccaaagcctgccctgagcccagacacacctgggtccccattctggggcctggtcccctaaacaatctcttcctcagccagcacagggaaatccagactcagggttccagaaatcccccgttcccaaaccaaaccaatcatggatcttccctttaaggggtagaatcagcctttagagttacaagcccctggaaaagggagcaggtcccatacaatcagcctttctcctcttctcttcttgggacaggaataactgctgagcagtccccctttgccactcctggctgtctgagtgggcacttgtctggctgctggccagcagtgaagggccacttggtgacttcgtagggttccttagagaagtgacatggccttgaggagattcagggcacctttcctcagtgagctttgatatggtccaaaaacagccttaaatcaagaatatttgtggaggtaggtgtggggaaggttggagaagagttaggtttgtgctttgtaatcttggcatccatgttttgtgcctgccctccctcttggggaggccatgcttgactctgctgaaagctgctaactggtgacagggtggatcatggtgaggactaggggtaaggtcagggaatgcttaagctctggccctgccctgtattcctcttccccttggtagcagttccctgaccaagggcaaggtgtgtctcaggaaggtggttctgtgcatgcctgggtgtggttaaggcgtggcccagaaggcttccctggtgctctcagtccaggcaaagcccagagcatctgagcacgtctctgacttccagtggcaacacagtttgaacgtggtgaaacagggtgtagttcttttccacattctgtgtcatctagtcgtgcaggtagggaaaaagttggtctaattgaagattgtgcatttcctagtgacaggtgccaagaggttatgatacgggtttcttgggtctgatgtacagtgtgaataaatgcttgcagctcttagctcttttttgatcgatgaagcacttttttattaatattttcctttgttaaaggaggaaccgtaactctccatagctgtacatataacccttttctcctaaagaggagtcagtcagtgctcctatatttttcattttttgtcaaagcaagaagtaaatactttagaattgttaaatatataaataaagcaaataaagttgagtgttccacatggtagcatttgctaacacttccta

SEQ ID NO: 353137 - DNA, 6198 bp, Homo sapiens
aatgccaggcttcatgaaaggacaacagatacagaaatgaagtataagagactgggctgtgtgaaccccatgtgtactctgggagtcagttttggagaataaatccttctcatctttcataagaaggccacatagaaaaaaagagaaaaatcctatgtatcaagggttttgattcttctctgtcaaatgcttcaggagcagagagtttagccatccaaccgcagaagcttttgatcttggatgcacgctcctatgcagctgctgtggcaaaccgagccaaaggaggaggctgcgaatgcccagagtattacccaaactgtgaagttgtgtttatggggatggcaaacattcattctattcggaggagttttcagtctctgcggttgctgtgcactcagatgccagatccgggaaattggctatcagctcttgaaagcacaaaatggctccatcacttgtctgtgcttctgaaatcagcgcttctggtagtgcatgctgtggatcaggatcagcggccggtgctagtacactgctcagatggctgggaccgcaccccccagattgtggcattggctaagctcttgctggacccttattaccgaaccatagagggtttccaggtcctcgtggaaatggagtggctggattttggccataaatttgctgaccggtgtggtcatggggagaactcggatgatctgaatgaacgttgcccagtgtttctgcagtggcttgactgtgttcatcagcttcagaggcaatttccttgctcttttgagttcaatgaagcattccttgtgaaactggtgcagcatacctattcctgcctgtttggaacattcctgtgcaacaacgccaaggagagaggggaaaagcatactcaggaacggacatgttccgtgtggtcacttcttcgggcaggcaacaaggctttcaaaaacctactgtattcctctcagtcagaagccgtatgtatccttcagcctttccactgtggtcagcagaaggaatttggggttggttacatatgagagcctttttgagtagtgactgtttttgtgaagacatctctactgtctctggatggactggttccatttttcccccatgattctgtcctgaggaaggcctgcttctgatggtgctctgatctgtttctgatgactacttgctgagggtggtttggtttaacacagatctctactttgccaccctagacatgaatcttttttggcactgcctccagagcttatttctagcatattctgtcttacgggagaggcacttaagttgcttcctgatgcactgatagctcagaatgagctgccaccaggcccccagcaccctcccagtgtcaataagcaatgatacccaccaaagcttctgtctcagaacagtaaactgtgtttgacattggtatgtgtgtctgtctgattctctgctcacatgaagagctggcaggccctttaagactttgttccccgaaggaatgaataccttctgttaagcagagaaaaggaggcacatagacctatgtgtcagtttcatagtaatactagctttgtcagaatgcatcttagaccctaaagaagtcaaaaggaggctaatcagagttcatactgatttcctggactattaatatggttctcattacatttaagtaatcacagaaaagatttaagctgactgcttgtctctccccttcagtgtgccttctggggaagtaacaatacagcaggaaaatttccttcttttcacatgattaatttaaatgatcccataaaatgggtttgacagtgtttcttgaagccaagcttttgtgccagcaggatggacaatcaccatctaacagaatgactcactttcttaggcagtaaaagcaacaaatcaagctgatgaaagtcagacattgaaggtgacctaagaaataactataatgagaaagggatctaaaaaatattttatattttcatgctctcaagtggctcttaggtgaaaaatgttggctatataaaatgtctagtcctgtattggtcctcttgggatagacctgtatccattggtgctgcttctttgtggagatcctgtcagccctgttgggtattccagctgggtgcttgctcttgatcctcatttccagacatcctagaagacttattggggcatatttaaacctgtgtcctcccccctcctcaggtgctgtaccctgtgtgccatgtgcgtaacctgatgctgtggagtgcagtgtacctgccctgcccatccccaaccacccctgtggacgacagctgtgcaccatacccagccccaggcaccagccctgatgatccccccctgagccggctaccaaagactagatcatacgacaatctgaccacagcctgtgacaacacagtgcctctggccagccggcgctgcagcgaccccagcctgaacgagaagtggcaggagcaccggcgctcactagagctgagcagcctggctggccctggagaggatcccctttctgccgacagcctagggaagcccaccagagtgccggggggtgccgagctttctgttgcagccggagtagctgaggggcagatggagaacatcttgcaggaggccaccaaagaggagagtggagtagaggaacctgcccacagggcaggcattgagatacaggagggtaaagaggaccctctcttagaaaaggagagcaggaggaagacacctgaggcctcagccattggacttcaccaagacccagaactgggtgatgctgctctgaggagccatctggatatgagctggcctctgttctcacagggcatttctgaacagcagagtgggctcagtgttctcctcagttctctccaggtcccccccaggggagaggattccctggaggtccctgtggagcagtttcgaatagaagagattgcagagggtagggaggaagcagttcttccaatcccagtagatgcaaaagttggctatggtacctcacagtcatgttctctgctaccttcccaagtcccttttgagaccagaggaccaaacgtggacagttctacagacatgttagtggaagataaggtgaagtcagtaagtgggccccaaggtcatcatagatcttgccttgtaaatagtggcaaggacaggcttcctcagaccatggaacccagcccttcagagacaagcctggtcgagaggccccaagtggggtctgtggtgcataggacttcccttggcagcactctcagcctgacacgttccccttgtgccttgcctttagccgaatgtaaagaggggcttgtgtgcaatggtgccccagagactgaaaacagggcctcagagcagcccccaggtcttagcaccctccagatgtaccccacacccaatgggcattgcgccaatggggaggctggtaggagcaaggactcactgagccgtcagctgtctgctatgagctgcagctctgcccacttacactcaaggaacttgcaccacaagtggctgcatagccactcaggaaggccatctgcaaccagcagccccgaccagccttcccgcagccacctggacgatgatggcatgtcagtgtacacagacacgatccaacagcgcctgcgtcagattgagtcaggccaccagcaggaagtagaaactttgaagaaacaagtccaggagctgaagagtcgcctggagagccagtacctgaccagctccctacactttaatggagactttggggatgaggtgacttcaatccccgactcggaaagcaatctggatcagaactgtttgtctcgctgcagcacagagattttctctgaagccagctgggagcaggtggataaacaggacacagagatgacccgttggcttcctgaccacctggccgcccactgctatgcgtgcgacagtgccttctggcttgccagcaggaagcaccactgcaggaattgtgggaacgtattctgctccagttgttgtaaccagaaggttccagttcccagccagcagctctttgaacccagtcgagtatgcaagtcttgctatagcagcctacatcccacaagctccagcattgaccttgaactggataagcccattgctgccacttccaactgaagctcagtgacctgggtgggcagtggccaagctgctgttcctatgacaggcccactcaacctgggcagaccgagaggcccgtgcactttggaatgggagcgtggaaccacctgtacagagtgacagatttgggatgcaccactggattgtagattgatttttctttcctgtccccctactccctccctaccttttccatcctcctcctctgccttcaaaaaaggaaactttcccttggttgtcttaatttttttttttttttgatggaagaccaagggttgccaggcccactgtaactgccgagctgcctgctgtcacgtgacactgagggatggcttgtttcttccgggtgggaggatggtggtcagagccaggagtatggagatctgagaccgtgagcagggaagaaagccagtgctaacatgcaaccattcctcacgccaccgccacatcagagctggttgggaaccctttgctgctggggaggctggaagcatattccccaagagcactgccctgggcatcatctccctcctgcgaggagctgagccagtcccctcacagatggataaatgaggctgatgtttggagggagaggcacacggtaaatggcatccccttaggcgcctctttgggaaaggaaagtggatgctcctttgaggcaggcgaggggctgggagtgggtagccgtcatgttgtcccccgtgggatcccatttttaacttgacccagattgtcttgggctccttttactttcagggggctgctttcctgggccaggctgtgtagcacttcccaccctcaggcatgagtacagactggtcaaaatgtttatgcagtcaaggccaaagcctgccctgagcccagacacacctgggtccccattctggggcctggtcccctaaacaatctcttcctcagccagcacagggaaatccagactcagggttccagaaatcccccgttcccaaaccaaaccaatcatggatcttccctttaaggggtagaatcagcctttagagttacaagcccctggaaaagggagcaggtcccatacaatcagcctttctcctcttctcttcttgggacaggaataactgctgagcagtccccctttgccactcctggctgtctgagtgggcacttgtctggctgctggccagcagtgaagggccacttggtgacttcgtagggttccttagagaagtgacatggccttgaggagattcagggcacctttcctcagtgagctttgatatggtccaaaaacagccttaaatcaagaatatttgtggaggtaggtgtggggaaggttggagaagagttaggtttgtgctttgtaatcttggcatccatgttttgtgcctgccctccctcttggggaggccatgcttgactctgctgaaagctgctaactggtgacagggtggatcatggtgaggactaggggtaaggtcagggaatgcttaagctctggccctgccctgtattcctcttccccttggtagcagttccctgaccaagggcaaggtgtgtctcaggaaggtggttctgtgcatgcctgggtgtggttaaggcgtggcccagaaggcttccctggtgctctcagtccaggcaaagcccagagcatctgagcacgtctctgacttccagtggcaacacagtttgaacgtggtgaaacagggtgtagttcttttccacattctgtgtcatctagtcgtgcaggtagggaaaaagttggtctaattgaagattgtgcatttcctagtgacaggtgccaagaggttatgatacgggtttcttgggtctgatgtacagtgtgaataaatgcttgcagctcttagctcttttttgatcgatgaagcacttttttattaatattttcctttgttaaaggaggaaccgtaactctccatagctgtacatataacccttttctcctaaagaggagtcagtcagtgctcctatatttttcattttttgtcaaagcaagaagtaaatactttagaattgttaaatatataaataaagcaaataaagttgagtgttccacatggtagcatttgctaacacttccta

SEQ ID NO: 353138 - DNA, 2776 bp, Homo sapiens
tttttgagatggagtttcactcttgttgcccaagattacaccaccgcactacctgtgcactacactaccagtgcaccactgcctgggtgatagtgagattctgtctcaaaaaaagaaaaaaaagtattaagaagctgttagtgcctaatagaaatattctaacctctttgacattttttttgcatcaatgtgttttcagactagatgtaactaatgtattggatagaaaaactttttaagatcaatattgtttccttgagcttttctgcctgttcaccttggtctttgtactttcattgtgattatgctagcagatatggcagaaaaaccaaatatgaatgattagaagctttgaaattattttaaggttttggacttttccaggatgaagagactcggcacagccttgagtgcatccaggccaatcagatctttcccaggaagcagctgatccgggaggatgagaatcttcaggttcctttccttgaacttcatggagagagcacagagtttgtgggccgtgccgaggatgccatcattgccctttccaattacagacttcacatcaagttcaaggagtctcttgttaatgttccattacagcttatagaaagtgttgaatgccgagatatatttcagcttcatttgacttgcaaagactgcaaagttatcaggtgtcagttttcaacctttgagcagtgtcaagagtggctgaagagactgaacaacgcaatccgaccacctgctaaaatagaagatctcttctcatttgcataccatgcttggtgcatggaggtctatgccagtgaaaaagagcaacatggagacctgtgcagaccaggggagcatgtaacttcaaggtttaaaaacgaggtggagaggatgggttttgatatgaacaacgcctggaggatttccaacatcaatgagaagtacaaattatgtggtagctatcctcaagagctcatagtgcctgcctggatcactgacaaagaactggaaagtgtatcaagtttcaggtcctggaagcgcatccctgccgtcatctacaggcaccagagcaatggagctgtcattgcccgctgtggacagccagaggttagctggtggggctggcgaaatgcagatgatgagcatctggtacagtcagtagccaaagcttgtgcctctgactcccgatcgagtggcagcaagctgtcaactaggaacacttctcgagactttcccaatgggggagacctttctgacgtggagttcgattcttctctgtcaaatgcttcaggagcagagagtttagccatccaaccgcagaagcttttgatcttggatgcacgctcctatgcagctgctgtggcaaaccgagccaaaggaggaggctgcgaatgcccagagtattacccaaactgtgaagttgtgtttatggggatggcaaacattcattctattcggaggagttttcagtctctgcggttgctgtgcactcagatgccagatccgggaaattggctatcagctcttgaaagcacaaaatggctccatcacttgtctgtgcttctgaaatcagcgcttctggtagtgcatgctgtggatcaggatcagcggccggtgctagtacactgctcagatggctgggaccgcaccccccagattgtggcattggctaagctcttgctggacccttattaccgaaccatagagggtttccaggtcctcgtggaaatggagtggctggattttggccataaatttgctgaccggtgtggtcatggggagaactcggatgatctgaatgaacgttgcccagtgtttctgcagtggcttgactgtgttcatcagcttcagaggcaatttccttgctcttttgagttcaatgaagcattccttgtaagtttcttcattttggggactttctcaatttgaaggagggtcagtacaaatgttagtgggccagttctcacatgaaactgtgctgcctcttcagaatttaatagaggtgatttttttcctgtttctgcttttttttttagtaaataattttgctattttcaaaaagagaaaatccaggtataccaggtttgcatgaagtccttgtgttgttttaaacttagtttttttttaaagggatggtagaaaccctaaatagcagttagaaatagaagcaatcagaatgtctggaccatactccctccagtctgtctaccagacccccatgactgtctcagactctgcaccctctcctttgatggagggtacactatccctgccctctttcagcccctctgtccatttgtataccagctctcatctcctctcatctgctgcactggctggctccagcatttctcttctctgccttctgcatcagtgcgtttccctctctaccagagcatgggtttcagcttaaaaatgtgtagtgtctctcatctttttaaaacccattcttggtcctgcatttacctctagctatcatcctattgctcttgttcccctttacagcagagctcctcaagttttctacccttgctatctcaaatttctctttccactctctcttaaacccacttcaatcaggcattcaccccactgcttaacaaagctgctcttgttaaaatgaccagtgaccttcatgccaccaatccagtgagaagttctcagtcttcatctctttgatccatcattaccatttggcacagtttaaccactccttccttgaaatgctttcttcaattgaccttctagtacttccttgcagttgacttctagtacttccttgctg

SEQ ID NO: 353139 - DNA, 820 bp, Homo sapiens
tgatcctccctcctcagccttctgagtagccaggactgcaggcgcgcatcaccatgcccagctaatttttgtattttctgtagaggtgaggtttttccacgttgcccaggctggtcttgaactcctgggctcaaagtgatccgtctgcctcagcctcccaaagtgctgggattacaggtgtgagccaccgcgaccagcccctctccctattttttaatgaggaactaatactccctgcaaaagtgccccacagatatcagactaatctgataggtgtagttatgatttattacttgaaaatactccccaaaggctgccaatttagttggggacgctggctgctgtccagcttaataaatacaatcgctacatgactcctggaagatttccaagtaaggcctcaagccaagctcatttggaatgtgttttaatacccgcagggatgagaaaagcggtgtgatccgtgagagagcataccggtctgtcacgataaagcactccaagctttcatagcggagagaacacatttggtaatgtgttgccatcactgttcctcacatacacacacacagattccagagtggcataggactgcaagtatttagaacttagaagcagcctgaattttatagagagcaaaagcagaacaagaggagaaatgtgcttctaataagccaataagtattggaaagtagactgtagaaatgaaaggtaaagtagccttagtgtagcctgtaagtcattccatcaaggatcttttcctttctttatccaatctcttgaccaagttccaagtgattatacgttctagtttgggaaa

SEQ ID NO: 353140 - DNA, 1998 bp, Homo sapiens
  misc_feature (53)..(53): n is a, c, g, or t
cgggtccggaactctccggggaatgaacaacatatgcacgaaagaaatgcgtntggacgaaaggccctttgggggaacccacaagaggtggggcccttgttgaacacaatgatcaagggccgatacaactagcctgccaggggtcaaggcctcctgccaggtgactgctatcccgtccacaccgcttcattgatgaggacaggagactccaagcgctagtattgcacgctgcacttaatggactggactcttgccatggcccaggagtcaggtgtttggagcgaggcagggcagttggcactccactcctatttggagggacttcatacccttgcctcttgtgccccagcaccttctctctctgccccccgcctaaagtcctgcattcagtgtgtggagtcccagcttttggttgtcatcatgtctgtgtgtatgttagtctgtcaacttcggaatgtgtgcgtgtgtgtgcatgcacacgcatgtatgtatctgttccctgttccttctgggtcaggctgtcacttccggctctcagccctatctcctgcaacctcagtgcctcagcctgagagagagatgagatgctcttggactccccactgcatctgggctgcagggccagagctagtctgaccattaggtcagtctgcctcctgacagtttttgcgtagtcaagctctaggcggtatgggaatggctaccgggactctaatggggtgaaagagaggggaggcttgcctttgagagcctatatagccttcctgtgagagaggattagatagggttccaactgggcctacaagctcaagccatacataaaaggaccttgggacataagaaccaatgattgtgcataagttctaaattagagacacatatagtttctctctttcagcaccagctcttgcccctatgctgggtaccaagggagttctcctagctgtggcttctctaggttctaggggtgcaagcctctgtgtgtttgtttgtgtgtgtctgtgtgtgcgtatccacactaggggtgcaagcctctgggtgtgtgtgtgtgtgtgcgtgcgtgtgtgtgtgtgtgtccgtgtgtgtgtgtgtgtgtgtccacactggccagcctccctacttaccaaggttctccactgcttaccttttccagtgggacagtacagtgtgagcccccgggaagtactgcctgacctatcctaagcttttacacttggattttagccatcatatgttggccaggtctcactgcagcctgcccgaggctaactggctagagcctccaggccctatgatgctccctgcccaggccatatcctttattcctgctgagcttcctggctgaatagatgaaatggggtcaagcccaggcagctcattcactacctgtgatccacctcagggcacgggcaaacacataggcttgcgtcttaaagccagctcctctgccagaccccgttgtaatgtgccacaacaccctcaatagtcagggcaactggtggagcatggaagtcgaatttccttttctgttaggagctactcctgggaacccctctcagggctgcagcttacaggtgggcagctgtgattgcacaacttgaagggccatcattcacatctattcagtgggagtggggtccctgggattgggcagtgtggtggccctgtgtctcctcacctctgctcctgtcttcatcaccttctctctggaagggaagaggagttggaaggtctctggttttcttttctttttttttttttttgccaaaggtttacttccagcatctgagctctggctctcacccctgaagctcagttatagtgcactgatgaactgagaggatgcgtgtggatgtgtgtgcatgcctgagtgcgttttttggggaggggtgtttatttttagtaccccattctggggttctctgatgcagtgtggatgtgaagatatggtaccttctcaagtgtagctctttcaaatatagtcaatgctgggaaatg

SEQ ID NO: 353141 - DNA, 3705 bp, Homo sapiens
ggccgtccctggcggcggagatggcggcgacagcggcggaggctgtggcctctggctctggagagccccgggaggaggctggagccctcggccccgcctgggatgaatcccagttgcgcagttatagcttcccgactaggcccattccgcgtctgagtcagagcgacccccgggcagaggagcttattgagaatgaggagcctgtggtgctgaccgacacaaatcttgtgtatcctgccctgaaatgggaccttgaatacctgcaagagaatattggcaatggagacttctctgtgtacagtgccagcacccacaagttcttgtactatgatgagaagaagatggccaatttccagaactttaagccgaggtccaacagggaagaaatgaaatttcatgagttcgttgagaaactgcaggatatacagcagcgaggaggggaagagaggttgtatctgcagcaaacgctcaatgacactgtgggcaggaagattgtcatggacttcttaggttttaactggaactggattaataagcaacagggaaagcgtggctgggggcagcttacctctaacctgctgctcattggcatggaaggaaatgtgacacctgctcactatgatgagcagcagaacttttttgctcagataaaaggttacaaacgatgcatcttattccctccggatcagttcgagtgcctctacccataccctgttcatcacccatgtgacagacagagccaggtggactttgacaatcccgactacgagaggttccctaatttccaaaatgtggttggttacgaaacagtggttggccctggtgatgttctttacatcccaatgtactggtggcatcacatagagtcattactaaatggggggattaccatcactgtgaacttctggtataagggggctcccacccctaagagaattgaatatcctctcaaagctcatcagaaagtggccataatgagaaacattgagaagatgcttggagaggccttggggaacccacaagaggtggggcccttgttgaacacaatgatcaagggccgatacaactagcctgccaggggtcaaggcctcctgccaggtgactgctatcccgtccacaccgcttcattgatgaggacaggagactccaagcgctagtattgcacgctgcacttaatggactggactcttgccatggcccaggagtcaggtgtttggagcgaggcagggcagttggcactccactcctatttggagggacttcatacccttgcctcttgtgccccagcaccttctctctctgccccccgcctaaagtcctgcattcagtgtgtggagtcccagcttttggttgtcatcatgtctgtgtgtatgttagtctgtcaacttcggaatgtgtgcgtgtgtgtgcatgcacacgcatgtatgtatctgttccctgttccttctgggtcaggctgtcacttccggctctcagccctatctcctgcaacctcagtgcctcagcctgagagagagatgagatgctcttggactccccactgcatctgggctgcagggccagagctagtctgaccattaggtcagtctgcctcctgacagtttttgcgtagtcaagctctaggcggtatgggaatggctaccgggactctaatggggtgaaagagaggggaggcttgcctttgagagcctatatagccttcctgtgagagaggattagatagggttccaactgggcctacaagctcaagccatacataaaaggaccttgggacataagaaccaatgattgtgcataagttctaaattagagacacatatagtttctctctttcagcaccagctcttgcccctatgctgggtaccaagggagttctcctagctgtggcttctctaggttctaggggtgcaagcctctgtgtgtttgtttgtgtgtgtctgtgtgtgcgtatccacactaggggtgcaagcctctgggtgtgtgtgtgtgtgtgcgtgcgtgtgtgtgtgtgtgtccgtgtgtgtgtgtgtgtgtgtccacactggccagcctccctacttaccaaggttctccactgcttaccttttccagtgggacagtacagtgtgagcccccgggaagtactgcctgacctatcctaagcttttacacttggattttagccatcatatgttggccaggtctcactgcagcctgcccgaggctaactggctagagcctccaggccctatgatgctccctgcccaggccatatcctttattcctgctgagcttcctggctgaatagatgaaatggggtcaagcccaggcagctcattcactacctgtgatccacctcagggcacgggcaaacacataggcttgcgtcttaaagccagctcctctgccagaccccgttgtaatgtgccacaacaccctcaatagtcagggcaactggtggagcatggaagtcgaatttccttttctgttaggagctactcctgggaacccctctcagggctgcagcttacaggtgggcagctgtgattgcacaacttgaagggccatcattcacatctattcagtgggagtggggtccctgggattgggcagtgtggtggccctgtgtctcctcacctctgctcctgtcttcatcaccttctctctggaagggaagaggagttggaaggtctctggttttcttttctttttttttttttttgccaaaggtttacttccagcatctgagctctggctctcacccctgaagctcagttatagtgcactgatgaactgagaggatgcgtgtggatgtgtgtgcatgcctgagtgcgttttttggggaggggtgtttatttttagtaccccattctggggttctctgatgcagtgtggatgtgaagatatggtaccttctcaagtgtagctctttcaaatatagtcaatgctgggaaatgtgattgcagtgatctctatctctccacttcttttgggaaagaggagcacaggagcggaggaaaaacttggccacagtcacacttggaagatagtagattattttcgttctcctcagcaggtctgctgtattcctcgctcagcgctcaaagatgtgggtgatgtgtcaaggaggcatgcactcagctggtccttgctgagttatttgctgacacaggtctcactaaggtggctgaggggtgggagggagaaggctaatcttggaaccttcacaggattggccttgatccttgggtaacacaagagtgattcctgatttttagacacctaatatgtgcctagtgcttttctctttgttcctcactatcctgcaaggtaggtattctcacttacagatgaataaatgggctcagagagattaggtgattagtgacaatcagttgtaacttagcaatatgtcctttaactttcaatggtaaacaatctaggatagtgtttaaaggcatggattttggagtcacatatagttggtttgaatttctagcttcactacttaccagctgggtttgaccttggttgatttacttaacctctctgagcctcagtttcctcaactataataacatgggtggagggaggcatgttgaaaatatctacctcagggttgttggaataactgaaacaatgtttgtaaagctttagcacagtgcctggcaagcacttaataaatggctgtggtggtggtggttatatttaaaaatgtgatttatt

SEQ ID NO: 353142 - DNA, 3705 bp, Homo sapiens
ggccgtccctggcggcggagatggcggcgacagcggcggaggctgtggcctctggctctggagagccccgggaggaggctggagccctcggccccgcctgggatgaatcccagttgcgcagttatagcttcccgactaggcccattccgcgtctgagtcagagcgacccccgggcagaggagcttattgagaatgaggagcctgtggtgctgaccgacacaaatcttgtgtatcctgccctgaaatgggaccttgaatacctgcaagagaatattggcaatggagacttctctgtgtacagtgccagcacccacaagttcttgtactatgatgagaagaagatggccaatttccagaactttaagccgaggtccaacagggaagaaatgaaatttcatgagttcgttgagaaactgcaggatatacagcagcgaggaggggaagagaggttgtatctgcagcaaacgctcaatgacactgtgggcaggaagattgtcatggacttcttaggttttaactggaactggattaataagcaacagggaaagcgtggctgggggcagcttacctctaacctgctgctcattggcatggaaggaaatgtgacacctgctcactatgatgagcagcagaacttttttgctcagataaaaggttacaaacgatgcatcttattccctccggatcagttcgagtgcctctacccataccctgttcatcacccatgtgacagacagagccaggtggactttgacaatcccgactacgagaggttccctaatttccaaaatgtggttggttacgaaacagtggttggccctggtgatgttctttacatcccaatgtactggtggcatcacatagagtcattactaaatggggggattaccatcactgtgaacttctggtataagggggctcccacccctaagagaattgaatatcctctcaaagctcatcagaaagtggccataatgagaaacattgagaagatgcttggagaggccttggggaacccacaagaggtggggcccttgttgaacacaatgatcaagggccgatacaactagcctgccaggggtcaaggcctcctgccaggtgactgctatcccgtccacaccgcttcattgatgaggacaggagactccaagcgctagtattgcacgctgcacttaatggactggactcttgccatggcccaggagtcaggtgtttggagcgaggcagggcagttggcactccactcctatttggagggacttcatacccttgcctcttgtgccccagcaccttctctctctgccccccgcctaaagtcctgcattcagtgtgtggagtcccagcttttggttgtcatcatgtctgtgtgtatgttagtctgtcaacttcggaatgtgtgcgtgtgtgtgcatgcacacgcatgtatgtatctgttccctgttccttctgggtcaggctgtcacttccggctctcagccctatctcctgcaacctcagtgcctcagcctgagagagagatgagatgctcttggactccccactgcatctgggctgcagggccagagctagtctgaccattaggtcagtctgcctcctgacagtttttgcgtagtcaagctctaggcggtatgggaatggctaccgggactctaatggggtgaaagagaggggaggcttgcctttgagagcctatatagccttcctgtgagagaggattagatagggttccaactgggcctacaagctcaagccatacataaaaggaccttgggacataagaaccaatgattgtgcataagttctaaattagagacacatatagtttctctctttcagcaccagctcttgcccctatgctgggtaccaagggagttctcctagctgtggcttctctaggttctaggggtgcaagcctctgtgtgtttgtttgtgtgtgtctgtgtgtgcgtatccacactaggggtgcaagcctctgggtgtgtgtgtgtgtgtgcgtgcgtgtgtgtgtgtgtgtccgtgtgtgtgtgtgtgtgtgtccacactggccagcctccctacttaccaaggttctccactgcttaccttttccagtgggacagtacagtgtgagcccccgggaagtactgcctgacctatcctaagcttttacacttggattttagccatcatatgttggccaggtctcactgcagcctgcccgaggctaactggctagagcctccaggccctatgatgctccctgcccaggccatatcctttattcctgctgagcttcctggctgaatagatgaaatggggtcaagcccaggcagctcattcactacctgtgatccacctcagggcacgggcaaacacataggcttgcgtcttaaagccagctcctctgccagaccccgttgtaatgtgccacaacaccctcaatagtcagggcaactggtggagcatggaagtcgaatttccttttctgttaggagctactcctgggaacccctctcagggctgcagcttacaggtgggcagctgtgattgcacaacttgaagggccatcattcacatctattcagtgggagtggggtccctgggattgggcagtgtggtggccctgtgtctcctcacctctgctcctgtcttcatcaccttctctctggaagggaagaggagttggaaggtctctggttttcttttctttttttttttttttgccaaaggtttacttccagcatctgagctctggctctcacccctgaagctcagttatagtgcactgatgaactgagaggatgcgtgtggatgtgtgtgcatgcctgagtgcgttttttggggaggggtgtttatttttagtaccccattctggggttctctgatgcagtgtggatgtgaagatatggtaccttctcaagtgtagctctttcaaatatagtcaatgctgggaaatgtgattgcagtgatctctatctctccacttcttttgggaaagaggagcacaggagcggaggaaaaacttggccacagtcacacttggaagatagtagattattttcgttctcctcagcaggtctgctgtattcctcgctcagcgctcaaagatgtgggtgatgtgtcaaggaggcatgcactcagctggtccttgctgagttatttgctgacacaggtctcactaaggtggctgaggggtgggagggagaaggctaatcttggaaccttcacaggattggccttgatccttgggtaacacaagagtgattcctgatttttagacacctaatatgtgcctagtgcttttctctttgttcctcactatcctgcaaggtaggtattctcacttacagatgaataaatgggctcagagagattaggtgattagtgacaatcagttgtaacttagcactgttaggctgcaaaccccttgctccttcctttccaccaaactatgttgattttccttccttacctccctccttgtaccacaggttctgtcctcaagatatcaccccactgggcagtatctgaaggcagacccagcccaagatggtgcagaatatacagctcagggtgaaagttcttctgggctcctgctaacaaagtcttggaaaaactgcctgggaagccatattatgaattagtgctagaagaagctgtggggggaactgagttctgtgtctaattgcattacttatgtgtccttgaataggacccataactcct

SEQ ID NO: 353143 - DNA, 2761 bp, Homo sapiens
  misc_feature (2525)..(2525): n is a, c, g, or t
  misc_feature (2532)..(2532): n is a, c, g, or t
  misc_feature (2537)..(2537): n is a, c, g, or t
  misc_feature (2555)..(2555): n is a, c, g, or t
  misc_feature (2560)..(2560): n is a, c, g, or t
  misc_feature (2562)..(2562): n is a, c, g, or t
  misc_feature (2570)..(2570): n is a, c, g, or t
  misc_feature (2578)..(2578): n is a, c, g, or t
  misc_feature (2592)..(2592): n is a, c, g, or t
  misc_feature (2600)..(2600): n is a, c, g, or t
  misc_feature (2602)..(2602): n is a, c, g, or t
  misc_feature (2619)..(2619): n is a, c, g, or t
  misc_feature (2622)..(2622): n is a, c, g, or t
  misc_feature (2642)..(2647): n is a, c, g, or t
  misc_feature (2665)..(2666): n is a, c, g, or t
  misc_feature (2668)..(2668): n is a, c, g, or t
  misc_feature (2688)..(2689): n is a, c, g, or t
  misc_feature (2691)..(2691): n is a, c, g, or t
  misc_feature (2757)..(2757): n is a, c, g, or t
ggccgtccctggcggcggagatggcggcgacagcggcggaggctgtggcctctggctctggagagccccgggaggaggctggagccctcggccccgcctgggatgaatcccagttgcgcagttatagcttcccgactaggcccattccgcgtctgagtcagagcgacccccgggcagaggagcttattgagaatgaggagcctgtggtgctgaccgacacaaatcttgtgtatcctgccctgaaatgggaccttgaatacctgcaagagaatattggcaatggagacttctctgtgtacagtgccagcacccacaagttcttgtactatgatgagaagaagatggccaatttccagaactttaagccgaggtccaacagggaagaaatgaaatttcatgagttcgttgagaaactgcaggatatacagcagcgaggaggggaagagaggttgtatctgcagcaaacgctcaatgacactgtgggcaggaagattgtcatggacttcttaggttttaactggaactggattaataagcaacagggaaagcgtggctgggggcagcttacctctaacctgctgctcattggcatggaaggaaatgtgacacctgctcactatgatgagcagcagaacttttttgctcagataaaaggttacaaacgatgcatcttattccctccggatcagttcgagtgcctctacccataccctgttcatcacccatgtgacagacagagccaggtggactttgacaatcccgactacgagaggttccctaatttccaaaatgtggttggttacgaaacagtggttggccctggtgatgttctttacatcccaatgtactggtggcatcacatagagtcattactaaatggggggattaccatcactgtgaacttctggtataagggggctcccacccctaagagaattgaatatcctctcaaagctcatcagaaagtggccataatgagaaacattgagaagatgcttggagaggccttggggaacccacaagaggtggggcccttgttgaacacaatgatcaagggccgatacaactagcctgccaggggtcaaggcctcctgccaggtgactgctatcccgtccacaccgcttcattgatgaggacaggagactccaagcgctagtattgcacgctgcacttaatggactggactcttgccatggcccaggagtcaggtgtttggagcgaggcagggcagttggcactccactcctatttggagggacttcatacccttgcctcttgtgccccagcaccttctctctctgccccccgcctaaagtcctgcattcagtgtgtggagtcccagcttttggttgtcatcatgtctgtgtgtatgttagtctgtcaacttcggaatgtgtgcgtgtgtgtgcatgcacacgcatgtatgtatctgttccctgttccttctgggtcaggctgtcacttccggctctcagccctatctcctgcaacctcagtgcctcagcctgagagagagatgagatgctcttggactccccactgcatctgggctgcagggccagagctagtctgaccattaggtcagtctgcctcctgacagtttttgcgtagtcaagctctaggcggtatgggaatggctaccgggactctaatggggtgaaagagaggggaggcttgcctttgagagcctatatagccttcctgtgagagaggattagatagggttccaactgggcctacaagctcaagccatacataaaaggaccttgggacataagaaccaatgattgtgcataagttctaaattagagacacatatagtttctctctttcagcaccagctcttgcccctatgctgggtaccaagggagttctcctagctgtggcttctctaggttctaggggtgcaagcctctgtgtgtttgtttgtgtgtgtctgtgtgtgcgtatccacactaggggtgcaagcctctgggtgtgtgtgtgtgtgtgcgtgcgtgtgtgtgtgtgtgtccgtgtgtgtgtgtgtgtgtgtccacactggccagcctccctacttaccaaggttctccactgcttaccttttccagtgggacagtacagtgtgagcccccgggaagtactgcctgacctatcctaagcttttacacttggattttagccatcatatgttggccaggtctcactgcagcctgcccgaggctaactggctagagcctccaggccctatgatgctccctgcccaggccatatcctttattcctgctgagcttcctggctgaatagatgaaatggggtcaagcccaggcagctcattcactacctgtgatccacctcagggcacgggcaaacacataggcttgcgtcttaaagccagctcctctgccagaccccgttgtaatgtgccacaacaccctcaatagtcagggcaactggtggagcatggaagtcgaatttccttttctgttaggagctacttccttcccacaccccccccacccacacccaccccacaccccccccnccccccnccccncaaccccaacccccaccnccccncncccacccnccccccancccccccccccccncccccccncnccccccccccccccccnccncccccccccccccccccccnnnnnncccccccccccccccccnncncccccccccccccccccccnntncttttcttttttttttccccacccaaaactatacttccaacaactaaacctacactcacccacaangccc

SEQ ID NO: 353144 - DNA, 2413 bp, Homo sapiens
  misc_feature (1)..(1): n is a, c, g, or t
  misc_feature (30)..(30): n is a, c, g, or t
naggctagtagaggcctggtgttaatcggncgaggcaacagggaaagcgtggctgggggcagcttacctctaacctgctgctcattggcatggaaggaaatgtgacacctgctcactatgatgagcagcagaacttttttgctcagataaaaggttacaaacgatgcatcttattccctccggatcagttcgagtgcctctacccataccctgttcatcacccatgtgacagacagagccaggtggactttgacaatcccgactacgagaggttccctaatttccaaaatgtggttggttacgaaacagtggttggccctggtgatgttctttacatcccaatgtactggtggcatcacatagagtcattactaaatggggggattaccatcactgtgaacttctggtataagggggctcccacccctaagagaattgaatatcctctcaaagctcatcagaaagtggccataatgagaaacattgagaagatgcttggagaggccttggggaacccacaagaggtggggcccttgttgaacacaatgatcaagggccgatacaactagcctgccaggggtcaaggcctcctgccaggtgactgctatcccgtccacaccgcttcattgatgaggacaggagactccaagcgctagtattgcacgctgcacttaatggactggactcttgccatggcccaggagtcaggtgtttggagcgaggcagggcagttggcactccactcctatttggagggacttcatacccttgcctcttgtgccccagcaccttctctctctgccccccgcctaaagtcctgcattcagtgtgtggagtcccagcttttggttgtcatcatgtctgtgtgtatgttagtctgtcaacttcggaatgtgtgcgtgtgtgtgcatgcacacgcatgtatgtatctgttccctgttccttctgggtcaggctgtcacttccggctctcagccctatctcctgcaacctcagtgcctcagcctgagagagagatgagatgctcttggactccccactgcatctgggctgcagggccagagctagtctgaccattaggtcagtctgcctcctgacagtttttgcgtagtcaagctctaggcggtatgggaatggctaccgggactctaatggggtgaaagagaggggaggcttgcctttgagagcctatatagccttcctgtgagagaggattagatagggttccaactgggcctacaagctcaagccatacataaaaggaccttgggacataagaaccaatgattgtgcataagttctaaattagagacacatatagtttctctctttcagcaccagctcttgcccctatgctgggtaccaagggagttctcctagctgtggcttctctaggttctaggggtgcaagcctctgtgtgtttgtttgtgtgtgtctgtgtgtgcgtatccacactaggggtgcaagcctctgggtgtgtgtgtgtgtgtccgtgtgtgtgtgtgtgtgtgtccacactggccagcctccctacttaccaaggttctccactgcttaccttttccagtgggacagtacagtgtgagcccccgggaagtactgcctgacctatcctaagcttttacacttggattttagccatcatatgttggccaggtctcactgcagcctgcccgaggctaactggctagagcctccaggccctatgatgctccctgcccaggccatatcctttattcctgctgagcttcctggctgaatagatgaaatggggtcaagcccaggcagctcattcactacctgtgatccacctcagggcacgggcaaacacataggcttgcgtcttaaagccagctcctctgccagaccccgttgtaatgtgccacaacaccctcaatagtcagggcaactggtggagcatggaagtcgaatttccttttctgttaggagctactcctgggaacccctctcagggctgcagcttacaggtgggcagctgtgattgcacaacttgaagggccatcattcacatctattcagtgggagtggggtccctgggattgggcagtgtggtggccctgtgtctcctcacctctgctcctgtcttcatcaccttctctctggaagggaagaggagttggaaggtctctggttttcttttctttttttttttttttgccaaaggtttacttccagcatctgagctctggctctcacccctgaagctcagttatagtgcactgatgaactgagaggatgcgtgtggatgtgtgtgcatgcctgagtgcgttttttggggaggggtgtttatttttagtaccccattctggggttctctgatgcagtgtggatgtgaagatatggtaccttctcaagtgtagctctttcaaatatagtcaatgctgggaaatg

SEQ ID NO: 353145 - DNA, 3119 bp, Homo sapiens
cactacagggtctgggttcatattcagctgctgcttccccccaaggaaaagatgaggtttttccccttcgattaccttttgagggatgtttaggctcaaattctgcttgccacagaggaaacatttctgctgtagttgtttacctccatcctagctggcagtgtgggacacacacatacagcaagtgaaggtgggggtttgggcctgtatagaggtcagctacgctgcaggctcatctattcacaccagcaggtacagagaaaactagtgttttgtaaagtcaaatatttgttgggggttggagttctggggttggaggaggggctgttctgggcatcagttgagcagatgcccaggatgcctgggggagaccagcttcccctacaaatcagagctctaaattacaaggtttttaccaacgtgaacagttgggggaagtcgtctgctctcatttgcgtaatggtttctgtcactggtgattagacacaggatgaaggaaaagaaatttgacaattaggaatgagcgatcattaatctgaatctgttaggagacagagaggggaaggatccttatcagtgggccagcccagtatggggagacactccctccctctgcccccagagactcctgggctacatcctctttcagtattgccacaagtgggcagagcttgtatttcttaacaaagattagggacccagttgccagcctgagatggatataggaacagacatctttgggcatgagccaacaaagatagaaatagatgagtgtcaggtacaagctataaggcaaagaataacagtggaaaaagtttgacatgtgtttgccatttgtggaaaatgtttttgtaatagtcaacacccctcatagcccacctgtgacaagtacttgttacattccagcactgtagggcgtgaggaaaatctggtccttatcaaatcccaggagcttctgcttagttggggaagaaattacatgaagcaaccagaggttataaggccacacttgtatatcgtgcaccctgtgtggacaagattagggactgttgagagaggaggaaaccagtagagagcaaagctctacccaggctccttgtaagcctctgggctcccccgagagggcctcgctactctacgcttcctagcaacgttgatgtccccacaaccccacatcagtgcagctgtggctgtgtggaggggctctgaggcctctgaggccagatgtgtaaacagtgctgaggttcagtaataggatgagtcttcaggtgtggagcagcccaccttggctcttcccatgtctctgtgttacttctcatattctgctgtcctttcaaacttcaaggacagtattaatttatactagtatttcttcctcagttttgtgacttgaatgcagtgagtgccttagaggatccaaggatgaaggaatgcgggttggtggttctctctttcagaatgggaacttcccaaaaatggggctgcgtctcgcctctcagtaggttccctacctctgggtcttccacccttcaaaatctggtacagaatttagcaggggctgcagggaatgaccctcagggaccagtttcacccagatggggtagatgatgaggtatacctagaagtagctcagggctccagagtctggcctttcagctggtgtcttactcccctttgagaccttcagctgcttgtcttccactgcctgcatacttctctgatgtcttctcaaactgttggctctaaagggatgttccagcctccctctccagagctgcctgcagtttcccttattcagctgtctcctgcctagtctctccagcggcctccttaccaagaccctttttcctaaacagttgtccttccctcagaaactccatggctgcaagtgtgaatagacttgtctttaggatccctctctctggtcatccctgatcatcttagggccgtctcccttttctgatttttgacagctctgtttattttgcccatggctagtcctcttgttttgtgtctgctgtgtgttcttgcccttccattgtcagttctgtacatcctggttcagcttgtctcactgtggtagccccttctgcttgtcttcagccatcttggtttaatcctcataggtcatggatgaatggagccttgctgagcactttgagggcatttctgttgggcacaacctcagaaacgggaagtcttgaggcctgggggcgtgtggtcagtgaggcctccagaggtgggttaggggtgggcacctacaagggccagttgaggggagaggtgcagggattgctgaggagactttgtgagaatgatgtcaggcccgggaagctggtgtggaagaactgagctgtcagaaggagataccaatatcccctttgcagggtggtgatgggcatcaaacatgacgtggaacatgtccccttcatggagggtttccatctaaatgcatctgtgtgccttagggatcagtagttcaggggtggtggacttttttgagtgtctcctaatttctctgaggtgtctttggctctgtgtcaccaaatgtgcctgacctctgcatcccagtggttgctgaaagggaaacagtatattgcgtagtcagatgtcaggagtagagatcttaatgagaaaggccctggcagctggagagatgagaggacctagtggtcagcttatacccagactatctctccactcctccaagagtttgagtcccatagctgatgaaagaatttacatatgggctcccccctgctttcccactgaaaatctattctcatattttgggaaggagcatatgtcctttaactttcaatggtaaacaatctaggatagtgtttaaaggcatggattttggagtcacatatagttggtttgaatttctagcttcactacttaccagctgggtttgaccttggttgatttacttaacctctctgagcctcagtttcctcaactataataacatgggtggagggaggcatgttgaaaatatctacctcagggttgttggaataactgaaacaatgtttgtaaagctttagcacagtgcctggcaagcacttaataaatggctgtggtggtggtggttatatttaaaaatgtgatttatt

SEQ ID NO: 353146 - DNA, 2111 bp, Homo sapiens
ggccgtccctggcggcggagatggcggcgacagcggcggaggctgtggcctctggctctggagagccccgggaggaggctggagccctcggccccgcctgggatgaatcccagttgcgcagttatagcttcccgactaggcccattccgcgtctgagtcagagcgacccccgggcagaggagcttattgagaatgaggagcctgtggtgctgaccgacacaaatcttgtgtatcctgccctgaaatgggaccttgaatacctgcaagagaatattggcaatggagacttctctgtgtacagtgccagcacccacaagttcttgtactatgatgagaagaagatggccaatttccagaactttaagccgaggtccaacagggaagaaatgaaatttcatgagttcgttgagaaactgcaggatatacagcagcgaggaggggaagagaggttgtatctgcagcaaacgctcaatgacactgtgggcaggaagattgtcatggacttcttaggttttaactggaactggattaataagcaacagggaaagcgtggctgggggcagcttacctctaacctgctgctcattggcatggaaggaaatgtgacacctgctcactatgatgagcagcagaacttttttgctcagataaaaggttacaaacgatgcatcttattccctccggatcagttcgagtgcctctacccataccctgttcatcacccatgtgacagacagagccaggtggactttgacaatcccgactacgagaggttccctaatttccaaaatgtggttggttacgaaacagtggttggccctggtgatgttctttacatcccaatgtactggtggcatcacatagagtcattactaaatggggggattaccatcactgtgaacttctggtataagggggctcccacccctaagagaattgaatatcctctcaaagctcatcagaaagtggccataatgagaaacattgagaagatgcttggagaggccttggggaacccacaagaggtggggcccttgttgaacacaatgatcaagggccgatacaactagcctgccaggggtgcaagcctctgtgtgtttgtttgtgtgtgtctgtgtgtgcgtatccacactaggggtgcaagcctctgggtgtgtgtgtgtgtgtgcgtgcgtgtgtgtgtgtgtgtccgtgtgtgtgtgtgtgtgtgtccacactggccagcctccctacttaccaaggttctccactgcttaccttttccagtgggacagtacagtgtgagcccccgggaagtactgcctgacctatcctaagcttttacacttggattttagccatcatatgttggccaggtctcactgcagcctgcccgaggctaactggctagagcctccaggccctatgatgctccctgcccaggccatatcctttattcctgctgagcttcctggctgaatagatgaaatggggtcaagcccaggcagctcattcactacctgtgatccacctcagggcacgggcaaacacataggcttgcgtcttaaagccagctcctctgccagaccccgttgtaatgtgccacaacaccctcaatagtcagggcaactggtggagcatggaagtcgaatttccttttctgttaggagctactcctgggaacccctctcagggctgcagcttacaggtgggcagctgtgattgcacaacttgaagggccatcattcacatctattcagtgggagtggggtccctgggattgggcagtgtggtggccctgtgtctcctcacctctgctcctgtcttcatcaccttctctctggaagggaagaggagttggaaggtctctggttttcttttctttttttttttttttgccaaaggtttacttccagcatctgagctctggctctcacccctgaagctcagttatagtgcactgatgaactgagaggatgcgtgtggatgtgtgtgcatgcctgagtgcgttttttggggaggggtgtttatttttagtaccccattctggggttctctgatgcagtgtggatgtgaagatatggtaccttctcaagtgtagctctttcaaatatagtcaatgctgggaaatg

SEQ ID NO: 353147 - DNA, 1575 bp, Homo sapiens
agttcgacggagactctctacagggaggcttgcctttgagagcctatatagccttcctgtgagagaggattagatagggttccttctgggtcaggctgtcacttccggctctcagccctatctcctgcaacctcagtgcctcagcctgagagagagatgagatgctcttggactccccactgcatctgggctgcagggccagagctagtctgaccattaggtcagtctgcctcctgacagtttttgcgtagtcaagctctaggcggtatgggaatggctaccgggactctaatggggtgaaagagaggggaggcttgcctttgagagcctatatagccttcctgtgagagaggattagatagggttccaactgggcctacaagctcaagccatacataaaaggaccttgggacataagaaccaatgattgtgcataagttctaaattagagacacatatagtttctctctttcagcaccagctcttgcccctatgctgggtaccaagggagttctcctagctgtggcttctctaggttctaggggtgcaagcctctgtgtgtttgtttgtgtgtgtctgtgtgtgcgtatccacactaggggtgcaagcctctgggtgtgtgtgtgtgtgtgcgtgcgtgtgtgtgtgtgtgtccgtgtgtgtgtgtgtgtgtgtccacactggccagcctccctacttaccaaggttctccactgcttaccttttccagtgggacagtacagtgtgagcccccgggaagtactgcctgacctatcctaagcttttacacttggattttagccatcatatgttggccaggtctcactgcagcctgcccgaggctaactggctagagcctccaggccctatgatgctccctgcccaggccatatcctttattcctgctgagcttcctggctgaatagatgaaatggggtcaagcccaggcagctcattcactacctgtgatccacctcagggcacgggcaaacacataggcttgcgtcttaaagccagctcctctgccagaccccgttgtaatgtgccacaacaccctcaatagtcagggcaactggtggagcatggaagtcgaatttccttttctgttaggagctactcctgggaacccctctcagggctgcagcttacaggtgggcagctgtgattgcacaacttgaagggccatcattcacatctattcagtgggagtggggtccctgggattgggcagtgtggtggccctgtgtctcctcacctctgctcctgtcttcatcaccttctctctggaagggaagaggagttggaaggtctctggttttcttttctttttttttttttttgccaaaggtttacttccagcatctgagctctggctctcacccctgaagctcagttatagtgcactgatgaactgagaggatgcgtgtggatgtgtgtgcatgcctgagtgcgttttttggggaggggtgtttatttttagtaccccattctggggttctctgatgcagtgtggatgtgaagatatggtaccttctcaagtgtagctctttcaaatatagtcaatgctgggaaatg

SEQ ID NO: 353148 - DNA, 1466 bp, Homo sapiens
  misc_feature (1)..(1): n is a, c, g, or t
  misc_feature (30)..(30): n is a, c, g, or t
naggctagtagaggcctggtgttaatcggncgaggcctgagagagagatgagatgctcttggactccccactgcatctgggctgcagggccagagctagtctgaccattaggtcagtctgcctcctgacagtttttgcgtagtcaagctctaggcggtatgggaatggctaccgggactctaatggggtgaaagagaggggaggcttgcctttgagagcctatatagccttcctgtgagagaggattagatagggttccaactgggcctacaagctcaagccatacataaaaggaccttgggacataagaaccaatgattgtgcataagttctaaattagagacacatatagtttctctctttcagcaccagctcttgcccctatgctgggtaccaagggagttctcctagctgtggcttctctaggttctaggggtgcaagcctctgtgtgtttgtttgtgtgtgtctgtgtgtgcgtatccacactaggggtgcaagcctctgggtgtgtgtgtgtgtgtgcgtgcgtgtgtgtgtgtgtgtccgtgtgtgtgtgtgtgtgtgtccacactggccagcctccctacttaccaaggttctccactgcttaccttttccagtgggacagtacagtgtgagcccccgggaagtactgcctgacctatcctaagcttttacacttggattttagccatcatatgttggccaggtctcactgcagcctgcccgaggctaactggctagagcctccaggccctatgatgctccctgcccaggccatatcctttattcctgctgagcttcctggctgaatagatgaaatggggtcaagcccaggcagctcattcactacctgtgatccacctcagggcacgggcaaacacataggcttgcgtcttaaagccagctcctctgccagaccccgttgtaatgtgccacaacaccctcaatagtcagggcaactggtggagcatggaagtcgaatttccttttctgttaggagctactcctgggaacccctctcagggctgcagcttacaggtgggcagctgtgattgcacaacttgaagggccatcattcacatctattcagtgggagtggggtccctgggattgggcagtgtggtggccctgtgtctcctcacctctgctcctgtcttcatcaccttctctctggaagggaagaggagttggaaggtctctggttttcttttctttttttttttttttgccaaaggtttacttccagcatctgagctctggctctcacccctgaagctcagttatagtgcactgatgaactgagaggatgcgtgtggatgtgtgtgcatgcctgagtgcgttttttggggaggggtgtttatttttagtaccccattctggggttctctgatgcagtgtggatgtgaagatatggtaccttctcaagtgtagctctttcaaatatagtcaatgctgggaaatg

SEQ ID NO: 353149 - DNA, 1249 bp, Homo sapiens
aagctcagcaggaataaaggatatggcctgggcagggagcatcatagggcctggaggctcaagccatacataaaaggaccttgggacataagaaccaatgattgtgcataagttctaaattagagacacatatagtttctctctttcagcaccagctcttgcccctatgctgggtaccaagggagttctcctagctgtggcttctctaggttctaggggtgcaagcctctgtgtgtttgtttgtgtgtgtctgtgtgtgcgtatccacactaggggtgcaagcctctgggtgtgtgtgtgtgtgtgcgtgcgtgtgtgtgtgtgtgtccgtgtgtgtgtgtgtgtgtgtccacactggccagcctccctacttaccaaggttctccactgcttaccttttccagtgggacagtacagtgtgagcccccgggaagtactgcctgacctatcctaagcttttacacttggattttagccatcatatgttggccaggtctcactgcagcctgcccgaggctaactggctagagcctccaggccctatgatgctccctgcccaggccatatcctttattcctgctgagcttcctggctgaatagatgaaatggggtcaagcccaggcagctcattcactacctgtgatccacctcagggcacgggcaaacacataggcttgcgtcttaaagccagctcctctgccagaccccgttgtaatgtgccacaacaccctcaatagtcagggcaactggtggagcatggaagtcgaatttccttttctgttaggagctactcctgggaacccctctcagggctgcagcttacaggtgggcagctgtgattgcacaacttgaagggccatcattcacatctattcagtgggagtggggtccctgggattgggcagtgtggtggccctgtgtctcctcacctctgctcctgtcttcatcaccttctctctggaagggaagaggagttggaaggtctctggttttcttttctttttttttttttttgccaaaggtttacttccagcatctgagctctggctctcacccctgaagctcagttatagtgcactgatgaactgagaggatgcgtgtggatgtgtgtgcatgcctgagtgcgttttttggggaggggtgtttatttttagtaccccattctggggttctctgatgcagtgtggatgtgaagatatggtaccttctcaagtgtagctctttcaaatatagtcaatgctgggaaatg

SEQ ID NO: 353150 - DNA, 1156 bp, Homo sapiens
caaaaagcaggaaccgttcgtgggctttgggtttgacaagccagactccctattcttagatctcctggcttgacaggacccaagctcttgcccctatgctgggtaccaagggagttctcctagctgtggcttctctaggttctaggggtgcaagcctctgtgtgtttgtttgtgtgtgtctgtgtgtgcgtatccacactaggggtgcaagcctctgggtgtgtgtgtgtgtgtccgtgtgtgtgtgtgtgtgtgtccacactggccagcctccctacttaccaaggttctccactgcttaccttttccagtgggacagtacagtgtgagcccccgggaagtactgcctgacctatcctaagcttttacacttggattttagccatcatatgttggccaggtctcactgcagcctgcccgaggctaactggctagagcctccaggccctatgatgctccctgcccaggccatatcctttattcctgctgagcttcctggctgaatagatgaaatggggtcaagcccaggcagctcattcactacctgtgatccacctcagggcacgggcaaacacataggcttgcgtcttaaagccagctcctctgccagaccccgttgtaatgtgccacaacaccctcaatagtcagggcaactggtggagcatggaagtcgaatttccttttctgttaggagctactcctgggaacccctctcagggctgcagcttacaggtgggcagctgtgattgcacaacttgaagggccatcattcacatctattcagtgggagtggggtccctgggattgggcagtgtggtggccctgtgtctcctcacctctgctcctgtcttcatcaccttctctctggaagggaagaggagttggaaggtctctggttttcttttctttttttttttttttgccaaaggtttacttccagcatctgagctctggctctcacccctgaagctcagttatagtgcactgatgaactgagaggatgcgtgtggatgtgtgtgcatgcctgagtgcgttttttggggaggggtgtttatttttagtaccccattctggggttctctgatgcagtgtggatgtgaagatatggtaccttctcaagtgtagctctttcaaatatagtcaatgctgggaaatg

SEQ ID NO: 353151 - DNA, 411 bp, Homo sapiens
gggctctagactagggcctatgggaagatggagagaaaggcgaggagatacggaacttaggggttcgtgctgattaacaggagaaattattctgaagttgagaagtagttgggatcatggaggccaacccaccggctccttggcattacttcatttggtgtttttcacctgttgttttcatttaggagcctgtggtgctgaccgacacaaatcttgtgtatcctgccctgaaatgggaccttgaatacctgcaagagaatattggcaatggagacttctctgtgtacagtgccagcacccacaagttcttgtactatgatgagaagaagatggccaatttccagaactttaagccgaggtccaacagggaagaaatgaaatttcatgagttcgttgagaaactgcaggata

SEQ ID NO: 353152 - DNA, 2936 bp, Homo sapiens
ggccgtccctggcggcggagatggcggcgacagcggcggaggctgtggcctctggctctggagagccccgggaggaggctggagccctcggccccgcctgggatgaatcccagttgcgcagttatagcttcccgactaggcccattccgcgtctgagtcagagcgacccccgggcagaggagcttattgagaatgaggagcctgtggtgctgaccgacacaaatcttgtgtatcctgccctgaaatgggaccttgaatacctgcaagagaatattggcaatggagacttctctgtgtacagtgccagcacccacaagttcttgtactatgatgagaagaagatggccaatttccagaactttaagccgaggtccaacagggaagaaatgaaatttcatgagttcgttgagaaactgcaggatatacagcagcgaggaggggaagagaggttgtatctgcagcaaacgctcaatgacactgtgggcaggaagattgtcatggacttcttaggttttaactggaactggattaataagcaacagggaaagcgtggctgggggcagcttacctctaacctgctgctcattggcatggaaggaaatgtgacacctgctcactatgatgagcagcagaacttttttgctcagataaaaggttacaaacgatgcatcttattccctccggatcagttcgagtgcctctacccataccctgttcatcacccatgtgacagacagagccaggtggactttgacaatcccgactacgagaggttccctaatttccaaaatgtggttggttacgaaacagtggttggccctggtgatgttctttacatcccaatgtactggtggcatcacatagagtcattactaaatggggggattaccatcactgtgaacttctggtataagggggctcccacccctaagagaattgaatatcctctcaaagctcatcagaaagtggccataatgagaaacattgagaagatgcttggagaggccttggggaacccacaagaggtggggcccttgttgaacacaatgatcaagggccgatacaactagcctgccaggggtcaaggcctcctgccaggtgactgctatcccgtccacaccgcttcattgatgaggacaggagactccaagcgctagtattgcacgctgcacttaatggactggactcttgccatggcccaggagtcaggtgtttggagcgaggcagggcagttggcactccactcctatttggagggacttcatacccttgcctcttgtgccccagcaccttctctctctgccccccgcctaaagtcctgcattcagtgtgtggagtcccagcttttggttgtcatcatgtctgtgtgtatgttagtctgtcaacttcggaatgtgtgcgtgtgtgtgcatgcacacgcatgtatgtatctgttccctgttccttctgggtcaggctgtcacttccggctctcagccctatctcctgcaacctcagtgcctcagcctgagagagagatgagatgctcttggactccccactgcatctgggctgcagggccagagctagtctgaccattaggtcagtctgcctcctgacagtttttgcgtagtcaagctctaggcggtatgggaatggctaccgggactctaatggggtgaaagagaggggaggcttgcctttgagagcctatatagccttcctgtgagagaggattagatagggttccaactgggcctacaagctcaagccatacataaaaggaccttgggacataagaaccaatgattgtgcataagttctaaattagagacacatatagtttctctctttcagcaccagctcttgcccctatgctgggtaccaagggagttctcctagctgtggcttctctaggttctaggggtgcaagcctctgtgtgtttgtttgtgtgtgtctgtgtgtgcgtatccacactaggggtgcaagcctctgggtgtgtgtgtgtgtgtgcgtgcgtgtgtgtgtgtgtgtccgtgtgtgtgtgtgtgtgtgtccacactggccagcctccctacttaccaaggttctccactgcttaccttttccagtgggacagtacagtgtgagcccccgggaagtactgcctgacctatcctaagcttttacacttggattttagccatcatatgttggccaggtctcactgcagcctgcccgaggctaactggctagagcctccaggccctatgatgctccctgcccaggccatatcctttattcctgctgagcttcctggctgaatagatgaaatggggtcaagcccaggcagctcattcactacctgtgatccacctcagggcacgggcaaacacataggcttgcgtcttaaagccagctcctctgccagaccccgttgtaatgtgccacaacaccctcaatagtcagggcaactggtggagcatggaagtcgaatttccttttctgttaggagctactcctgggaacccctctcagggctgcagcttacaggtgggcagctgtgattgcacaacttgaagggccatcattcacatctattcagtgggagtggggtccctgggattgggcagtgtggtggccctgtgtctcctcacctctgctcctgtcttcatcaccttctctctggaagggaagaggagttggaaggtctctggttttcttttctttttttttttttttgccaaaggtttacttccagcatctgagctctggctctcacccctgaagctcagttatagtgcactgatgaactgagaggatgcgtgtggatgtgtgtgcatgcctgagtgcgttttttggggaggggtgtttatttttagtaccccattctggggttctctgatgcagtgtggatgtgaagatatggtaccttctcaagtgtagctctttcaaatatagtcaatgctgggaaatg

SEQ ID NO: 353153 - DNA, 2914 bp, Homo sapiens
ggccgtccctggcggcggagatggcggcgacagcggcggaggctgtggcctctggctctggagagccccgggaggaggctggagccctcggccccgcctgggatgaatcccagttgcgcagttatagcttcccgactaggcccattccgcgtctgagtcagagcgacccccgggcagaggagcttattgagaatgaggagcctgtggtgctgaccgacacaaatcttgtgtatcctgccctgaaatgggaccttgaatacctgcaagagaatattggcaatggagacttctctgtgtacagtgccagcacccacaagttcttgtactatgatgagaagaagatggccaatttccagaactttaagccgaggtccaacagggaagaaatgaaatttcatgagttcgttgagaaactgcaggatatacagcagcgaggaggggaagagaggttgtatctgcagcaaacgctcaatgacactgtgggcaggaagattgtcatggacttcttaggttttaactggaactggattaataagcaacagggaaagcgtggctgggggcagcttacctctaacctgctgctcattggcatggaaggaaatgtgacacctgctcactatgatgagcagcagaacttttttgctcagataaaaggttacaaacgatgcatcttattccctccggatcagttcgagtgcctctacccataccctgttcatcacccatgtgacagacagagccaggtggactttgacaatcccgactacgagaggttccctaatttccaaaatgtggttggttacgaaacagtggttggccctggtgatgttctttacatcccaatgtactggtggcatcacatagagtcattactaaatggggggattaccatcactgtgaacttctggtataagggggctcccacccctaagagaattgaatatcctctcaaagctcatcagaaagtggccataatgagaaacattgagaagatgcttggagaggccttggggaacccacaagaggtggggcccttgttgaacacaatgatcaagggccgatacaactagcctgccaggggtcaaggcctcctgccaggtgactgctatcccgtccacaccgcttcattgatgaggacaggagactccaagcgctagtattgcacgctgcacttaatggactggactcttgccatggcccaggagtcaggtgtttggagcgaggcagggcagttggcactccactcctatttggagggacttcatacccttgcctcttgtgccccagcaccttctctctctgccccccgcctaaagtcctgcattcagtgtgtggagtcccagcttttggttgtcatcatgtctgtgtgtatgttagtctgtcaacttcggaatgtgtgcgtgtgtgtgcatgcacacgcatgtatgtatctgttccctgttccttctgggtcaggctgtcacttccggctctcagccctatctcctgcaacctcagtgcctcagcctgagagagagatgagatgctcttggactccccactgcatctgggctgcagggccagagctagtctgaccattaggtcagtctgcctcctgacagtttttgcgtagtcaagctctaggcggtatgggaatggctaccgggactctaatggggtgaaagagaggggaggcttgcctttgagagcctatatagccttcctgtgagagaggattagatagggttccaactgggcctacaagctcaagccatacataaaaggaccttgggacataagaaccaatgattgtgcataagttctaaattagagacacatatagtttctctctttcagcaccagctcttgcccctatgctgggtaccaagggagttctcctagctgtggcttctctaggttctaggggtgcaagcctctgtgtgtttgtttgtgtgtgtctgtgtgtgcgtatccacactaggggtgcaagcctctgggtgtgtgtgtgtgtgtccgtgtgtgtgtgtgtgtgtgtccacactggccagcctccctacttaccaaggttctccactgcttaccttttccagtgggacagtacagtgtgagcccccgggaagtactgcctgacctatcctaagcttttacacttggattttagccatcatatgttggccaggtctcactgcagcctgcccgaggctaactggctagagcctccaggccctatgatgctccctgcccaggccatatcctttattcctgctgagcttcctggctgaatagatgaaatggggtcaagcccaggcagctcattcactacctgtgatccacctcagggcacgggcaaacacataggcttgcgtcttaaagccagctcctctgccagaccccgttgtaatgtgccacaacaccctcaatagtcagggcaactggtggagcatggaagtcgaatttccttttctgttaggagctactcctgggaacccctctcagggctgcagcttacaggtgggcagctgtgattgcacaacttgaagggccatcattcacatctattcagtgggagtggggtccctgggattgggcagtgtggtggccctgtgtctcctcacctctgctcctgtcttcatcaccttctctctggaagggaagaggagttggaaggtctctggttttcttttctttttttttttttttgccaaaggtttacttccagcatctgagctctggctctcacccctgaagctcagttatagtgcactgatgaactgagaggatgcgtgtggatgtgtgtgcatgcctgagtgcgttttttggggaggggtgtttatttttagtaccccattctggggttctctgatgcagtgtggatgtgaagatatggtaccttctcaagtgtagctctttcaaatatagtcaatgctgggaaatg

SEQ ID NO: 353154 - DNA, 2810 bp, Homo sapiens
cagccggccttctcccatcactacttgggtgcgagcataccctctctgtctcaccccatgccatcatccgggagcctgtggtgctgaccgacacaaatcttgtgtatcctgccctgaaatgggaccttgaatacctgcaagagaatattggcaatggagacttctctgtgtacagtgccagcacccacaagttcttgtactatgatgagaagaagatggccaatttccagaactttaagccgaggtccaacagggaagaaatgaaatttcatgagttcgttgagaaactgcaggatatacagcagcgaggaggggaagagaggttgtatctgcagcaaacgctcaatgacactgtgggcaggaagattgtcatggacttcttaggttttaactggaactggattaataagcaacagggaaagcgtggctgggggcagcttacctctaacctgctgctcattggcatggaaggaaatgtgacacctgctcactatgatgagcagcagaacttttttgctcagataaaaggttacaaacgatgcatcttattccctccggatcagttcgagtgcctctacccataccctgttcatcacccatgtgacagacagagccaggtggactttgacaatcccgactacgagaggttccctaatttccaaaatgtggttggttacgaaacagtggttggccctggtgatgttctttacatcccaatgtactggtggcatcacatagagtcattactaaatggggggattaccatcactgtgaacttctggtataagggggctcccacccctaagagaattgaatatcctctcaaagctcatcagaaagtggccataatgagaaacattgagaagatgcttggagaggccttggggaacccacaagaggtggggcccttgttgaacacaatgatcaagggccgatacaactagcctgccaggggtcaaggcctcctgccaggtgactgctatcccgtccacaccgcttcattgatgaggacaggagactccaagcgctagtattgcacgctgcacttaatggactggactcttgccatggcccaggagtcaggtgtttggagcgaggcagggcagttggcactccactcctatttggagggacttcatacccttgcctcttgtgccccagcaccttctctctctgccccccgcctaaagtcctgcattcagtgtgtggagtcccagcttttggttgtcatcatgtctgtgtgtatgttagtctgtcaacttcggaatgtgtgcgtgtgtgtgcatgcacacgcatgtatgtatctgttccctgttccttctgggtcaggctgtcacttccggctctcagccctatctcctgcaacctcagtgcctcagcctgagagagagatgagatgctcttggactccccactgcatctgggctgcagggccagagctagtctgaccattaggtcagtctgcctcctgacagtttttgcgtagtcaagctctaggcggtatgggaatggctaccgggactctaatggggtgaaagagaggggaggcttgcctttgagagcctatatagccttcctgtgagagaggattagatagggttccaactgggcctacaagctcaagccatacataaaaggaccttgggacataagaaccaatgattgtgcataagttctaaattagagacacatatagtttctctctttcagcaccagctcttgcccctatgctgggtaccaagggagttctcctagctgtggcttctctaggttctaggggtgcaagcctctgtgtgtttgtttgtgtgtgtctgtgtgtgcgtatccacactaggggtgcaagcctctgggtgtgtgtgtgtgtgtgcgtgcgtgtgtgtgtgtgtgtccgtgtgtgtgtgtgtgtgtgtccacactggccagcctccctacttaccaaggttctccactgcttaccttttccagtgggacagtacagtgtgagcccccgggaagtactgcctgacctatcctaagcttttacacttggattttagccatcatatgttggccaggtctcactgcagcctgcccgaggctaactggctagagcctccaggccctatgatgctccctgcccaggccatatcctttattcctgctgagcttcctggctgaatagatgaaatggggtcaagcccaggcagctcattcactacctgtgatccacctcagggcacgggcaaacacataggcttgcgtcttaaagccagctcctctgccagaccccgttgtaatgtgccacaacaccctcaatagtcagggcaactggtggagcatggaagtcgaatttccttttctgttaggagctactcctgggaacccctctcagggctgcagcttacaggtgggcagctgtgattgcacaacttgaagggccatcattcacatctattcagtgggagtggggtccctgggattgggcagtgtggtggccctgtgtctcctcacctctgctcctgtcttcatcaccttctctctggaagggaagaggagttggaaggtctctggttttcttttctttttttttttttttgccaaaggtttacttccagcatctgagctctggctctcacccctgaagctcagttatagtgcactgatgaactgagaggatgcgtgtggatgtgtgtgcatgcctgagtgcgttttttggggaggggtgtttatttttagtaccccattctggggttctctgatgcagtgtggatgtgaagatatggtaccttctcaagtgtagctctttcaaatatagtcaatgctgggaaatg

SEQ ID NO: 353155 - DNA, 412 bp, Homo sapiens
ttgtatctgcagcaaacgctcaatgacactgtgggcaggaagattgtcatggacttcttaggttttaactggaactggattaataagcaacagggaaagcgtggctgggggcagcttacctctaacctgctgctcattggcatggaaggtaagaaatctttcaaaagcagcatggcttggagtcatatgaacctgatttctaatcctgtcttcaccgcttattagctccatgactttgaacaagccacttcactttcttaagcctcagcctactcagctctaaaagaaacataataggggctggatgccgtggctcacgcctgtaatcccagcagtttgggaggccaaggtgggtggatgatgaggtcaggagatggagaccatcccggccaacatcatgaaaccccgtctc

SEQ ID NO: 353156 - DNA, 279 bp, Homo sapiens
acgttaacctaagccatcagaagccattaactccggtgacactacatttcagcgaaaccttcgcgacccaacccctcgctccctctcgcccaaacgctgggtcaaccccacgaactggcggtggcaaggccctgggcaccggtgaagttctcgtggcagcgcagatcggcgaccttctcttctttcgcgctcagacggcggcggcagcagtacgctttcgggctgctggagccggcagcggcgcgaggccggagcccgggcagccaggctgggtggggg

SEQ ID NO: 353157 - DNA, 2526 bp, Homo sapiens
aggacggcgggaagaggagtgcggaacccgcgggagagtccccagggagacacttaagggaaattaaactgcagagtgcaagagatgcctcagtcaagtcagccaaaaacacgcgggtcatccccaagccccagagagtgacagagccccgatgacacggacacctcggctgctgtcacttccctggttcgggcctcccacaggctttgaattgaaggcgagtgcctcagaatttgcatccattgttctgtctttcctgggaagttattcatcctggtggccagcccaccgacaaaatggatttggatctactggacctgaatcccagaattattgctgcaattaagaaagccaaactgaaatcggtaaaggaggttttacacttttctggaccagacttgaagagactgaccaacctctccagccccgaggtctggcacttgctgagaacggcctccttacacttgcggggaagcagcatccttacagcactgcagctgcaccagcagaaggagcggttccccacgcagcaccagcgcctgagcctgggctgcccggtgctggacgcgctgctccgcggtggcctgcccctggacggcatcactgagctggccggacgcagctcggcagggaagacccagctggcgctgcagctctgcctggctgtgcagttcccgcggcagcacggaggcctggaggctggagccgtctacatctgcacggaagacgccttcccgcacaagcgcctgcagcagctcatggcccagcagccgcggctgcgcactgacgttccaggagagctgcttcagaagctccgatttggcagccagatcttcatcgagcacgtggccgatgtggacaccttgttggagtgtgtgaataagaaggtccccgtactgctgtctcggggcatggctcgcctggtggtcatcgactcggtggcagccccattccgctgtgaatttgacagccaggcctccgcccccagggccaggcatctgcagtccctgggggccacgctgcgtgagctgagcagtgccttccagagccctgtgctgtgcatcaaccaggtgacagaggccatggaggagcagggcgcagcacacgggccgctggggttctgggacgaacgtgtttccccagcccttggcataacctgggctaaccagctcctggtgagactgctggctgaccggctccgcgaggaagaggctgccctcggctgcccagcccggaccctgcgggtgctctctgccccccacctgcccccctcctcctgttcctacacgatcagtgccgaaggggtgcgagggacacctgggacccagtcccactgacacggtggcggctgcacaacagccctgcctgagaagccccgacacacggggctcgggcctttaaaacgcgtctgcctgggccgtggcacagctgggagcctggttcagacacagctcttccagggcagcggctccactttctcatccgaagatggtggccacagactgacccccatctgagctggggggatgttctgcctctccctgggtctggggacaggcccgcttgctgggtacctggtccccactgctgagctggcccttggggagaggtgattctcagggctggagcctggggtgtcctacagtgactccctgggagccgcctgcttcttctctccacatggaagcccaactggggttgcgtctgaggcctgccccctgggctggggcctcagaccccctcagccttgggaccgtgcccacgagggtctcccctcctgcacacagggcagtccttactcccccaccactcaggccacagtggggctgcaggcaggcggctcctcctcacccacctctgggtccttggctcccgggggccccacctcggcacacactgtgccccacaaaacttcagtgtggtacaaggtggagaaagcatatcccaccaacctccagtgtcagggtccaggagagcctgggggtggggggactgccttgtctctagtagtgtggcctgtgccagcaccacagccggtcagaggagcgcaggcagcgcagggctggcacgtgacaggctcgtcagccacctgggaacacagttctgggcaaagaggatccgaggttgagaggaaggagggtcccggtgtatcctggccctgggggtctgggcgtccagctcagccctggcctggctgggtggtattctggtagggatatggcaggactcctggcagggccacctgcaggaccctgtcctgcagtcccacactgtgcagacccagtcccacactgtggccaggccttacatctggctggaaagcagagcctcctgggaacacatctggctgcacaggctgaaatatccacccagcaggcagagtggcgtggcctccccatgggcacagtggtgacccccttgattcccaccgtacaaccccctccaccccccactcagtgcctccacatgctgcctggcacagaccaggcctttgacaaataaatgttcaatggatgcagttccagg

SEQ ID NO: 353158 - DNA, 1042 bp, Homo sapiens
gtatgattccacgaatcacacggtttattgtcaaagaagatttgttctcgggttcacagtgctcagaggggaggagaggggaggaggtgaagacacctggcagggaagcagggcctccatggatggggtgcattcacggcagggaggtgagtggcagaacggccagggtccggttgctctgctgggatggagcgggcccctggagagtgagatctggtgagagttcgaggtttgccttggtagcagtggagagcgtgagagcgggagctctctgagaagctgggaccgaggtccagctcccaggccagcagcgtatagcttgcctcaaagcatctgcacaaccttcaagctgatgtctgtttttgcagtccagcagtcagggtcagtaactcacataagggagtgtctgacaaggtttaagtggcattcccaaggttgcggagttcactcaagtcctcacatatgtggtctgataagacatcacactcttgcaggggggtcaggtcaccccaaaacatcagactatgtaagtgctgtgaatcacttcaaagctacacagcaggtcccagggcccaaggcagaggagtgagtccacctcggaaggctcagagcagctccaggcagtaaccacggcatttccagagtctggtgtgtgagcctaacagctctggtgtgaccgtccgtactcacctagcagcacgtgacatcagctctccccctgaagtcattgctcagctcgggtgctgcaggaagacatacaggtctgtcttgggccagccccttgcctgctgtgggctgctccctgtgtgtggccttcaccccggtgtagagagatgggctggtcacacccctgcccctcacagcggcgagaggacagaggcatgtgccgggctgtctgtggagctcccaggccagtgtctgggatgcggcaggtgcttggtgttaaagggaaaatattccaggatatctgtgaaagcacgttaggcagagaccaggctttcattcagaacctttgagagatgtgggaaccaccacactgcgg

SEQ ID NO: 353159 - DNA, 1112 bp, Homo sapiens
ggggacagtggaagatgaggcgcctaatcagctgtcaagggtgatgggacacgggaggaggtcgtcactaaacagactttgagccaggcctgttaaaccaagttctcagcaggatgtgcacagagggcccaggaggagcctcaggagccggactgccgttggccaaccggtgagtctgttatccgtcagtggacactctgcttccaggtgccttggcctcggcccgcgtcctgaaggcgggagacgttgcagccacgtgctggccttcccggtgctcctgccagcgtcccgctgcttgacacagtccaagttttgtatccagacccagcctgggacagcagcctcccgacagcccccaggcccagcctgtctgtgacagtcacgcctgctcagggaaccatccctccgtgcagatctgggctgtgttttgggtggtacctcgggtgtggggtcccctaccaggtgcgaggttcatactccccaggctgcctcctgtcctcagggcttggagagtcccatgttctgaaaatgacctcttttcgagccgggcaaggccgcatctcctttggcagtgtagtgtcttccctggaggtggcattcctttttgatttgccttctgtgcttgggaacctcacttcctcactctggccagctctgccagcagtttggagctggttcagcgccccaccgccctgccttggcctgcgcccggccctccagggtggcttctcgccagttcctgtcaggcctgcctgggcaaccaggcctgggcacctccctgtcccttgctcagaaaacccacaggctgtgggggcccgggagccaagcctggtgcgcgggcaggaaacgcatcctggagcaccagcttccctgccctgcccgcctcacggggtgcctgggggcgtgcctcagcctgctgctcctgtagtctgttctccacgccgggcctgtctccctgagcaggctgaacatgggcatacgagtgaccagcgtgatcgtgtccaggccagtgccgcattctgtgtggtccaagggaaaaccttctccaagtccacggcccgccctttcctctgctgggttacggccaagggcgccaggcctcactggaggac

SEQ ID NO: 353160 - DNA, 2701 bp, Homo sapiens
gtatgattccacgaatcacacggtttattgtcaaagaagatttgttctcgggttcacagtgctcagaggggaggagaggggaggaggtgaagacacctggcagggaagcagggcctccatggatggggtgcattcacggcagggaggtgagtgggatgtgcacagagggcccaggaggagcctcaggagccggactgccgttggccaaccgagtccccagggagacacttaagggaaattaaactgcagagtgcaagagatgcctcagtcaagtcagccaaaaacacgcgggtcatccccaagccccagagagtgacagagccccgatgacacggacacctcggctgctgtcacttccctggttcgggcctcccacaggctttgaattgaaggcgagtgcctcagaatttgcatccattgttctgtctttcctgggaagttattcatcctggtggccagcccaccgacaaaatggatttggatctactggacctgaatcccagaattattgctgcaattaagaaagccaaactgaaatcggtaaaggaggttttacacttttctggaccagacttgaagagactgaccaacctctccagccccgaggtctggcacttgctgagaacggcctccttacacttgcggggaagcagcatccttacagcactgcagctgcaccagcagaaggagcggttccccacgcagcaccagcgcctgagcctgggctgcccggtgctggacgcgctgctccgcggtggcctgcccctggacggcatcactgagctggccggacgcagctcggcagggaagacccagctggcgctgcagctctgcctggctgtgcagttcccgcggcagcacggaggcctggaggctggagccgtctacatctgcacggaagacgccttcccgcacaagcgcctgcagcagctcatggcccagcagccgcggctgcgcactgacgttccaggagagctgcttcagaagctccgatttggcagccagatcttcatcgagcacgtggccgatgtggacaccttgttggagtgtgtgaataagaaggtccccgtactgctgtctcggggcatggctcgcctggtggtcatcgactcggtggcagccccattccgctgtgaatttgacagccaggcctccgcccccagggccaggcatctgcagtccctgggggccacgctgcgtgagctgagcagtgccttccagagccctgtgctgtgcatcaaccaggtgacagaggccatggaggagcagggcgcagcacacgggccgctggggttctgggacgaacgtgtttccccagcccttggcataacctgggctaaccagctcctggtgagactgctggctgaccggctccgcgaggaagaggctgccctcggctgcccagcccggaccctgcgggtgctctctgccccccacctgcccccctcctcctgttcctacacgatcagtgccgaaggggtgcgagggacacctgggacccagtcccactgacacggtggcggctgcacaacagccctgcctgagaagccccgacacacggggctcgggcctttaaaacgcgtctgcctgggccgtggcacagctgggagcctggttcagacacagctcttccagggcagcggctccactttctcatccgaagatggtggccacagactgacccccatctgagctggggggatgttctgcctctccctgggtctggggacaggcccgcttgctgggtacctggtccccactgctgagctggcccttggggagaggtgattctcagggctggagcctggggtgtcctacagtgactccctgggagccgcctgcttcttctctccacatggaagcccaactggggttgcgtctgaggcctgccccctgggctggggcctcagaccccctcagccttgggaccgtgcccacgagggtctcccctcctgcacacagggcagtccttactcccccaccactcaggccacagtggggctgcaggcaggcggctcctcctcacccacctctgggtccttggctcccgggggccccacctcggcacacactgtgccccacaaaacttcagtgtggtacaaggtggagaaagcatatcccaccaacctccagtgtcagggtccaggagagcctgggggtggggggactgccttgtctctagtagtgtggcctgtgccagcaccacagccggtcagaggagcgcaggcagcgcagggctggcacgtgacaggctcgtcagccacctgggaacacagttctgggcaaagaggatccgaggttgagaggaaggagggtcccggtgtatcctggccctgggggtctgggcgtccagctcagccctggcctggctgggtggtattctggtagggatatggcaggactcctggcagggccacctgcaggaccctgtcctgcagtcccacactgtgcagacccagtcccacactgtggccaggccttacatctggctggaaagcagagcctcctgggaacacatctggctgcacaggctgaaatatccacccagcaggcagagtggcgtggcctccccatgggcacagtggtgacccccttgattcccaccgtacaaccccctccaccccccactcagtgcctccacatgctgcctggcacagaccaggcctttgacaaataaatgttcaatggatgcagttccagg

SEQ ID NO: 353161 - DNA, 2544 bp, Homo sapiens
tgcgagccgggcggcagcggggtcggaggtcgtgggcggcagcgggcgtgagggagtccccagggagacacttaagggaaattaaactgcagagtgcaagagatgcctcagtcaagtcagccaaaaacacgcgggtcatccccaagccccagagagtgacagagccccgatgacacggacacctcggctgctgtcacttccctggttcgggcctcccacaggctttgaattgaaggcgagtgcctcagaatttgcatccattgttctgtctttcctgggaagttattcatcctggtggccagcccaccgacaaaatggatttggatctactggacctgaatcccagaattattgctgcaattaagaaagccaaactgaaatcggtaaaggaggttttacacttttctggaccagacttgaagagactgaccaacctctccagccccgaggtctggcacttgctgagaacggcctccttacacttgcggggaagcagcatccttacagcactgcagctgcaccagcagaaggagcggttccccacgcagcaccagcgcctgagcctgggctgcccggtgctggacgcgctgctccgcggtggcctgcccctggacggcatcactgagctggccggacgcagctcggcagggaagacccagctggcgctgcagctctgcctggctgtgcagttcccgcggcagcacggaggcctggaggctggagccgtctacatctgcacggaagacgccttcccgcacaagcgcctgcagcagctcatggcccagcagccgcggctgcgcactgacgttccaggagagctgcttcagaagctccgatttggcagccagatcttcatcgagcacgtggccgatgtggacaccttgttggagtgtgtgaataagaaggtccccgtactgctgtctcggggcatggctcgcctggtggtcatcgactcggtggcagccccattccgctgtgaatttgacagccaggcctccgcccccagggccaggcatctgcagtccctgggggccacgctgcgtgagctgagcagtgccttccagagccctgtgctgtgcatcaaccaggtgacagaggccatggaggagcagggcgcagcacacgggccgctggggttctgggacgaacgtgtttccccagcccttggcataacctgggctaaccagctcctggtgagactgctggctgaccggctccgcgaggaagaggctgccctcggctgcccagcccggaccctgcgggtgctctctgccccccacctgcccccctcctcctgttcctacacgatcagtgccgaaggggtgcgagggacacctgggacccagtcccactgacacggtggcggctgcacaacagccctgcctgagaagccccgacacacggggctcgggcctttaaaacgcgtctgcctgggccgtggcacagctgggagcctggttcagacacagctcttccagggcagcggctccactttctcatccgaagatggtggccacagactgacccccatctgagctggggggatgttctgcctctccctgggtctggggacaggcccgcttgctgggtacctggtccccactgctgagctggcccttggggagaggtgattctcagggctggagcctggggtgtcctacagtgactccctgggagccgcctgcttcttctctccacatggaagcccaactggggttgcgtctgaggcctgccccctgggctggggcctcagaccccctcagccttgggaccgtgcccacgagggtctcccctcctgcacacagggcagtccttactcccccaccactcaggccacagtggggctgcaggcaggcggctcctcctcacccacctctgggtccttggctcccgggggccccacctcggcacacactgtgccccacaaaacttcagtgtggtacaaggtggagaaagcatatcccaccaacctccagtgtcagggtccaggagagcctgggggtggggggactgccttgtctctagtagtgtggcctgtgccagcaccacagccggtcagaggagcgcaggcagcgcagggctggcacgtgacaggctcgtcagccacctgggaacacagttctgggcaaagaggatccgaggttgagaggaaggagggtcccggtgtatcctggccctgggggtctgggcgtccagctcagccctggcctggctgggtggtattctggtagggatatggcaggactcctggcagggccacctgcaggaccctgtcctgcagtcccacactgtgcagacccagtcccacactgtggccaggccttacatctggctggaaagcagagcctcctgggaacacatctggctgcacaggctgaaatatccacccagcaggcagagtggcgtggcctccccatgggcacagtggtgacccccttgattcccaccgtacaaccccctccaccccccactcagtgcctccacatgctgcctggcacagaccaggcctttgacaaataaatgttcaatggatgcagttccagg

SEQ ID NO: 353162 - DNA, 1481 bp, Homo sapiens
aggacggcgggaagaggagtgcggaacccgcgggaggatgtgcacagagggcccaggaggagcctcaggagccggactgccgttggccaaccgagtccccagggagacacttaagggaaattaaactgcagagtgcaagagatgcctcagtcaagtcagccaaaaacacgcgggtcatccccaagccccagagagtgacagagccccgatgacacggacacctcggctgctgtcacttccctggttcgggcctcccacaggctttgaattgaaggcgagtgcctcagaatttgcatccattgttctgtctttcctgggaagttattcatcctggtggccagcccaccgacaaaatggatttggatctactggacctgaatcccagaattattgctgcaattaagaaagccaaactgaaatcggtaaaggaggttttacacttttctggaccagacttgaagagactgaccaacctctccagccccgaggtctggcacttgctgagaacggcctccttacacttgcggggaagcagcatccttacagcactgcagctgcaccagcagaaggagcggttccccacgcagcaccagcgcctgagcctgggctgcccggtgctggacgcgctgctccgcggtggcctgcccctggacggcatcactgagctggccggacgcagctcggcagggaagacccagctggcgctgcagctctgcctggctgtgcagttcccgcggcagcacggaggcctggaggctggagccgtctacatctgcacggaagacgccttcccgcacaagcgcctgcagcagctcatggcccagcagccgcggctgcgcactgacgttccaggagagctgcttcagaagctccgatttggcagccagatcttcatcgagcacgtggccgatgtgatgtaactgggcgcctgtacaccatctgtcaaccttgcccatgaagacggagtgggaaagagaagccccaggcgggtggcaaggacctcctctgggctgtgggcccctgaccagctgccccaggagaccaccgccctgagaaggatgcgacctgctctccaggctgctgccctggtgagatagctgtgttggtttccccttgcctctgaggggaagacggccctcactaggggcacaggggctccacctggccaaggcctgctgggcacccagctcagacaggtgacctcagatccttgaccactgcctggctgctggcttccctgcagacactggctgggcttggaggagggacctatggcagggccttgcagagagcaggggccactcaccgggggccagtggagtccgtcctgtagccaagaagcaggcaagagaggctgggacccatccctgcagctggggcagcagtgctgtgagctgtcagtgcttagtttatagacatcatcctgggagggagaagtgatgaagtagaaaagacgcagaagaaaagatgggacgtttggg

SEQ ID NO: 353163 - DNA, 997 bp, Homo sapiens
cgcaaccaaagaaagagggaaggtaaaaactaggctaggtagcgggccgggtgttgtgctgagctggcccttggggagaggtgattctcagggctggagcctggggtgtcctacagtgactccctgggagccgcctgcttcttctctccacatggaagcccaactggggttgcgtctgaggcctgccccctgggctggggcctcagaccccctcagccttgggaccgtgcccacgagggtctcccctcctgcacacagggcagtccttactcccccaccactcaggccacagtggggctgcaggcaggcggctcctcctcacccacctctgggtccttggctcccgggggccccacctcggcacacactgtgccccacaaaacttcagtgtggtacaaggtggagaaagcatatcccaccaacctccagtgtcagggtccaggagagcctgggggtggggggactgccttgtctctagtagtgtggcctgtgccagcaccacagccggtcagaggagcgcaggcagcgcagggctggcacgtgacaggctcgtcagccacctgggaacacagttctgggcaaagaggatccgaggttgagaggaaggagggtcccggtgtatcctggccctgggggtctgggcgtccagctcagccctggcctggctgggtggtattctggtagggatatggcaggactcctggcagggccacctgcaggaccctgtcctgcagtcccacactgtgcagacccagtcccacactgtggccaggccttacatctggctggaaagcagagcctcctgggaacacatctggctgcacaggctgaaatatccacccagcaggcagagtggcgtggcctccccatgggcacagtggtgacccccttgattcccaccgtacaaccccctccaccccccactcagtgcctccacatgctgcctggcacagaccaggcctttgacaaataaatgttcaatggatgcagttccagg

SEQ ID NO: 353164 - DNA, 833 bp, Homo sapiens
aggacggcgggaagaggagtgcggaacccgcgggagagtccccagggagacacttaagggaaattaaactgcagagtgcaagagatgcctcagtcaagtcagccaaaaacacgcgggtcatccccaagccccagagagtgacagagccccgatgacacggacacctcggctgctgtcacttccctggttcgggcctcccacaggctttgaattgaaggcgagtgcctcagaatttgcatccattgttctgtctttcctgggaagttattcatcctggtggccagcccaccgacaaaatggatttggatctactggacctgaatcccagaattattgctgcaattaagaaagccaaactgaaatcggtaaaggaggttttacacttttctggaccagacttgaagagactgaccaacctctccagccccgaggtctggcacttgctgagaacggcctccttacacttgcggggaagcagcatccttacagcactgcagctgcaccagcagaaggagcggttccccacgcagcaccagcgcctgagcctgggctgcccggtgctggacgcgctgctccgcggtggcctgcccctggacggcatcactgagctggccggacgcagctcggcagggaagacccagctggcgctgcagctctgcctggctgtgcagttcccgcggcagcacggaggcctggaggctggagccgtctacatctgcacggaagacgccttcccgcacaagcgcctgcgagccgggcggcagcggggtcggaggtcgtgggcggcagcgggcgtgaggggtgaggcagggtcaaggggcgggggcggccgc

SEQ ID NO: 353165 - DNA, 2583 bp, Homo sapiens
aggacggcgggaagaggagtgcggaacccgcgggaggatgtgcacagagggcccaggaggagcctcaggagccggactgccgttggccaaccgagtccccagggagacacttaagggaaattaaactgcagagtgcaagagatgcctcagtcaagtcagccaaaaacacgcgggtcatccccaagccccagagagtgacagagccccgatgacacggacacctcggctgctgtcacttccctggttcgggcctcccacaggctttgaattgaaggcgagtgcctcagaatttgcatccattgttctgtctttcctgggaagttattcatcctggtggccagcccaccgacaaaatggatttggatctactggacctgaatcccagaattattgctgcaattaagaaagccaaactgaaatcggtaaaggaggttttacacttttctggaccagacttgaagagactgaccaacctctccagccccgaggtctggcacttgctgagaacggcctccttacacttgcggggaagcagcatccttacagcactgcagctgcaccagcagaaggagcggttccccacgcagcaccagcgcctgagcctgggctgcccggtgctggacgcgctgctccgcggtggcctgcccctggacggcatcactgagctggccggacgcagctcggcagggaagacccagctggcgctgcagctctgcctggctgtgcagttcccgcggcagcacggaggcctggaggctggagccgtctacatctgcacggaagacgccttcccgcacaagcgcctgcagcagctcatggcccagcagccgcggctgcgcactgacgttccaggagagctgcttcagaagctccgatttggcagccagatcttcatcgagcacgtggccgatgtggacaccttgttggagtgtgtgaataagaaggtccccgtactgctgtctcggggcatggctcgcctggtggtcatcgactcggtggcagccccattccgctgtgaatttgacagccaggcctccgcccccagggccaggcatctgcagtccctgggggccacgctgcgtgagctgagcagtgccttccagagccctgtgctgtgcatcaaccaggtgacagaggccatggaggagcagggcgcagcacacgggccgctggggttctgggacgaacgtgtttccccagcccttggcataacctgggctaaccagctcctggtgagactgctggctgaccggctccgcgaggaagaggctgccctcggctgcccagcccggaccctgcgggtgctctctgccccccacctgcccccctcctcctgttcctacacgatcagtgccgaaggggtgcgagggacacctgggacccagtcccactgacacggtggcggctgcacaacagccctgcctgagaagccccgacacacggggctcgggcctttaaaacgcgtctgcctgggccgtggcacagctgggagcctggttcagacacagctcttccagggcagcggctccactttctcatccgaagatggtggccacagactgacccccatctgagctggggggatgttctgcctctccctgggtctggggacaggcccgcttgctgggtacctggtccccactgctgagctggcccttggggagaggtgattctcagggctggagcctggggtgtcctacagtgactccctgggagccgcctgcttcttctctccacatggaagcccaactggggttgcgtctgaggcctgccccctgggctggggcctcagaccccctcagccttgggaccgtgcccacgagggtctcccctcctgcacacagggcagtccttactcccccaccactcaggccacagtggggctgcaggcaggcggctcctcctcacccacctctgggtccttggctcccgggggccccacctcggcacacactgtgccccacaaaacttcagtgtggtacaaggtggagaaagcatatcccaccaacctccagtgtcagggtccaggagagcctgggggtggggggactgccttgtctctagtagtgtggcctgtgccagcaccacagccggtcagaggagcgcaggcagcgcagggctggcacgtgacaggctcgtcagccacctgggaacacagttctgggcaaagaggatccgaggttgagaggaaggagggtcccggtgtatcctggccctgggggtctgggcgtccagctcagccctggcctggctgggtggtattctggtagggatatggcaggactcctggcagggccacctgcaggaccctgtcctgcagtcccacactgtgcagacccagtcccacactgtggccaggccttacatctggctggaaagcagagcctcctgggaacacatctggctgcacaggctgaaatatccacccagcaggcagagtggcgtggcctccccatgggcacagtggtgacccccttgattcccaccgtacaaccccctccaccccccactcagtgcctccacatgctgcctggcacagaccaggcctttgacaaataaatgttcaatggatgcagttccagg

SEQ ID NO: 353166 - DNA, 2555 bp, Homo sapiens
aggacggcgggaagaggagtgcggaacccgcgggagactttgagccaggcctgttaaaccaagttctcagcaggatgtgcacagagggcccaggaggagcctcaggagccggactgccgttggccaaccgagtccccagggagacacttaagggaaattaaactgcagagtgcaagagatgcctcagtcaagtcagccaaaaacacgcgggtcatccccaagccccagagaggctttgaattgaaggcgagtgcctcagaatttgcatccattgttctgtctttcctgggaagttattcatcctggtggccagcccaccgacaaaatggatttggatctactggacctgaatcccagaattattgctgcaattaagaaagccaaactgaaatcggtaaaggaggttttacacttttctggaccagacttgaagagactgaccaacctctccagccccgaggtctggcacttgctgagaacggcctccttacacttgcggggaagcagcatccttacagcactgcagctgcaccagcagaaggagcggttccccacgcagcaccagcgcctgagcctgggctgcccggtgctggacgcgctgctccgcggtggcctgcccctggacggcatcactgagctggccggacgcagctcggcagggaagacccagctggcgctgcagctctgcctggctgtgcagttcccgcggcagcacggaggcctggaggctggagccgtctacatctgcacggaagacgccttcccgcacaagcgcctgcagcagctcatggcccagcagccgcggctgcgcactgacgttccaggagagctgcttcagaagctccgatttggcagccagatcttcatcgagcacgtggccgatgtggacaccttgttggagtgtgtgaataagaaggtccccgtactgctgtctcggggcatggctcgcctggtggtcatcgactcggtggcagccccattccgctgtgaatttgacagccaggcctccgcccccagggccaggcatctgcagtccctgggggccacgctgcgtgagctgagcagtgccttccagagccctgtgctgtgcatcaaccaggtgacagaggccatggaggagcagggcgcagcacacgggccgctggggttctgggacgaacgtgtttccccagcccttggcataacctgggctaaccagctcctggtgagactgctggctgaccggctccgcgaggaagaggctgccctcggctgcccagcccggaccctgcgggtgctctctgccccccacctgcccccctcctcctgttcctacacgatcagtgccgaaggggtgcgagggacacctgggacccagtcccactgacacggtggcggctgcacaacagccctgcctgagaagccccgacacacggggctcgggcctttaaaacgcgtctgcctgggccgtggcacagctgggagcctggttcagacacagctcttccagggcagcggctccactttctcatccgaagatggtggccacagactgacccccatctgagctggggggatgttctgcctctccctgggtctggggacaggcccgcttgctgggtacctggtccccactgctgagctggcccttggggagaggtgattctcagggctggagcctggggtgtcctacagtgactccctgggagccgcctgcttcttctctccacatggaagcccaactggggttgcgtctgaggcctgccccctgggctggggcctcagaccccctcagccttgggaccgtgcccacgagggtctcccctcctgcacacagggcagtccttactcccccaccactcaggccacagtggggctgcaggcaggcggctcctcctcacccacctctgggtccttggctcccgggggccccacctcggcacacactgtgccccacaaaacttcagtgtggtacaaggtggagaaagcatatcccaccaacctccagtgtcagggtccaggagagcctgggggtggggggactgccttgtctctagtagtgtggcctgtgccagcaccacagccggtcagaggagcgcaggcagcgcagggctggcacgtgacaggctcgtcagccacctgggaacacagttctgggcaaagaggatccgaggttgagaggaaggagggtcccggtgtatcctggccctgggggtctgggcgtccagctcagccctggcctggctgggtggtattctggtagggatatggcaggactcctggcagggccacctgcaggaccctgtcctgcagtcccacactgtgcagacccagtcccacactgtggccaggccttacatctggctggaaagcagagcctcctgggaacacatctggctgcacaggctgaaatatccacccagcaggcagagtggcgtggcctccccatgggcacagtggtgacccccttgattcccaccgtacaaccccctccaccccccactcagtgcctccacatgctgcctggcacagaccaggcctttgacaaataaatgttcaatggatgcagttccagg

SEQ ID NO: 353167 - DNA, 399 bp, Homo sapiens
ctattcatcggcacctcgctattcatccacacctcgctaatcatcggcacctcgctattaatcggcactctccccctgaagtcattgctcagctcgggtgctgcaggaagacatacaggtctgtcttgggccagccccttgcctgctgtgggctgctccctgtgtgtggccttcaccccggtgtagagagatgggctggtcacacccctgcccctcacagcggcgagaggacagaggcatgtgccgggctgtctgtggagctcccaggccagtgtctgggatgcggcaggtgcttggtgttaaagggaaaatattccaggatatctgtgaaagcacgttaggcagagaccaggctttcattcagaacctttgagagatgtgggaaccaccacactgcgg

SEQ ID NO: 353168 - DNA, 2627 bp, Homo sapiens
gggccccttagcagcctccatctggccagagctgctggcaaggcccgtggggcctgaactacactgcttggtgccaggagcagctgtgtcaccctcccccatcaccatggctcaccaagctgtgcggtcagaggccaggccagccatgccaatggctctggcacccacaggccacggcagcacccagagggaggccgaggacacctgccttcactgggggggtcctcccctggaagctctcctgggagctggtgggcacagggctgtttccaccccttggccaggccaggccagctcagagcacagggctaaggcctggatgcacgggaggcactggccttgagggtgtctcaacctacagccccatcctgacccccaggtggtctcccagagtgccccacgccttggcagaggcaggccaggcctgactcgcctgagtaacgcctgaagggcatcaggcccctgccttgctgagcgtctgaagaggtcatggccaccacgggctggctttggtggcactgtggccaggtttgggtggtctgagtacctggtgcggggccactgaaggagggggctggttgctgctgacctgtgagggggagagggtgaaaccatggcagaaggagagcagacccccgcaaggactcaggagcctgcgcaaaggacacctctacagaggacggtgttggcacagccaaggggtgactgcctgggggggccagaggaaggacatggggccaagggaaccagttgtgtgagcctgaagcttctatagttggggcctctttgagaaaaatacagaattgggctcagagtatggggactacagagtatgggcactgtgagccccaggtgggtaggaaggttttcagacggtcgagtgacagtccaaacggggtctggtcacctggggcggggacttgctgaccagcatagacaatgacggctgtccccacaggacaccttgttggagtgtgtgaataagaaggtccccgtactgctgtctcggggcatggctcgcctggtggtcatcgactcggtggcagccccattccgctgtgaatttgacagccaggcctccgcccccagggccaggcatctgcagtccctgggggccacgctgcgtgagctgagcagtgccttccagagccctgtgctgtgcatcaaccaggtgacagaggccatggaggagcagggcgcagcacacgggccgctggggttctgggacgaacgtgtttccccagcccttggcataacctgggctaaccagctcctggtgagactgctggctgaccggctccgcgaggaagaggctgccctcggctgcccagcccggaccctgcgggtgctctctgccccccacctgcccccctcctcctgttcctacacgatcagtgccgaaggggtgcgagggacacctgggacccagtcccactgacacggtggcggctgcacaacagccctgcctgagaagccccgacacacggggctcgggcctttaaaacgcgtctgcctgggccgtggcacagctgggagcctggttcagacacagctcttccagggcagcggctccactttctcatccgaagatggtggccacagactgacccccatctgagctggggggatgttctgcctctccctgggtctggggacaggcccgcttgctgggtacctggtccccactgctgagctggcccttggggagaggtgattctcagggctggagcctggggtgtcctacagtgactccctgggagccgcctgcttcttctctccacatggaagcccaactggggttgcgtctgaggcctgccccctgggctggggcctcagaccccctcagccttgggaccgtgcccacgagggtctcccctcctgcacacagggcagtccttactcccccaccactcaggccacagtggggctgcaggcaggcggctcctcctcacccacctctgggtccttggctcccgggggccccacctcggcacacactgtgccccacaaaacttcagtgtggtacaaggtggagaaagcatatcccaccaacctccagtgtcagggtccaggagagcctgggggtggggggactgccttgtctctagtagtgtggcctgtgccagcaccacagccggtcagaggagcgcaggcagcgcagggctggcacgtgacaggctcgtcagccacctgggaacacagttctgggcaaagaggatccgaggttgagaggaaggagggtcccggtgtatcctggccctgggggtctgggcgtccagctcagccctggcctggctgggtggtattctggtagggatatggcaggactcctggcagggccacctgcaggaccctgtcctgcagtcccacactgtgcagacccagtcccacactgtggccaggccttacatctggctggaaagcagagcctcctgggaacacatctggctgcacaggctgaaatatccacccagcaggcagagtggcgtggcctccccatgggcacagtggtgacccccttgattcccaccgtacaaccccctccaccccccactcagtgcctccacatgctgcctggcacagaccaggcctttgacaaataaatgttcaatggatgcagttccagg

SEQ ID NO: 353169 - DNA, 1845 bp, Homo sapiens
tcaggcactcttgcttcccaggagccgtctacatctgcacggaagacgccttcccgcacaagcgcctgcagcagctcatggcccagcagccgcggctgcgcactgacgttccaggagagctgcttcagaagctccgatttggcagccagatcttcatcgagcacgtggccgatgtggacaccttgttggagtgtgtgaataagaaggtccccgtactgctgtctcggggcatggctcgcctggtggtcatcgactcggtggcagccccattccgctgtgaatttgacagccaggcctccgcccccagggccaggcatctgcagtccctgggggccacgctgcgtgagctgagcagtgccttccagagccctgtgctgtgcatcaaccaggtgacagaggccatggaggagcagggcgcagcacacgggccgctggggttctgggacgaacgtgtttccccagcccttggcataacctgggctaaccagctcctggtgagactgctggctgaccggctccgcgaggaagaggctgccctcggctgcccagcccggaccctgcgggtgctctctgccccccacctgcccccctcctcctgttcctacacgatcagtgccgaaggggtgcgagggacacctgggacccagtcccactgacacggtggcggctgcacaacagccctgcctgagaagccccgacacacggggctcgggcctttaaaacgcgtctgcctgggccgtggcacagctgggagcctggttcagacacagctcttccagggcagcggctccactttctcatccgaagatggtggccacagactgacccccatctgagctggggggatgttctgcctctccctgggtctggggacaggcccgcttgctgggtacctggtccccactgctgagctggcccttggggagaggtgattctcagggctggagcctggggtgtcctacagtgactccctgggagccgcctgcttcttctctccacatggaagcccaactggggttgcgtctgaggcctgccccctgggctggggcctcagaccccctcagccttgggaccgtgcccacgagggtctcccctcctgcacacagggcagtccttactcccccaccactcaggccacagtggggctgcaggcaggcggctcctcctcacccacctctgggtccttggctcccgggggccccacctcggcacacactgtgccccacaaaacttcagtgtggtacaaggtggagaaagcatatcccaccaacctccagtgtcagggtccaggagagcctgggggtggggggactgccttgtctctagtagtgtggcctgtgccagcaccacagccggtcagaggagcgcaggcagcgcagggctggcacgtgacaggctcgtcagccacctgggaacacagttctgggcaaagaggatccgaggttgagaggaaggagggtcccggtgtatcctggccctgggggtctgggcgtccagctcagccctggcctggctgggtggtattctggtagggatatggcaggactcctggcagggccacctgcaggaccctgtcctgcagtcccacactgtgcagacccagtcccacactgtggccaggccttacatctggctggaaagcagagcctcctgggaacacatctggctgcacaggctgaaatatccacccagcaggcagagtggcgtggcctccccatgggcacagtggtgacccccttgattcccaccgtacaaccccctccaccccccactcagtgcctccacatgctgcctggcacagaccaggcctttgacaaataaatgttcaatggatgcagttccagg

SEQ ID NO: 353170 - DNA, 1503 bp, Homo sapiens
  misc_feature (20)..(20): n is a, c, g, or t
ggctggtcggccggacgtanggattcagagcctgtgctgtgcatcaccaggtgacagaggcatggaggagcagggcgggggacgggccgctggggttctgggacgaacgtgtttccccagcccttggcataacctgggctaaccagctcctggtgagactgctggctgaccggctccgcgaggaagaggctgccctcggctgcccagcccggaccctgcgggtgctctctgccccccacctgcccccctcctcctgttcctacacgatcagtgccgaaggggtgcgagggacacctgggacccagtcccactgacacggtggcggctgcacaacagccctgcctgagaagccccgacacacggggctcgggcctttaaaacgcgtctgcctgggccgtggcacagctgggagcctggttcagacacagctcttccagggcagcggctccactttctcatccgaagatggtggccacagactgacccccatctgagctggggggatgttctgcctctccctgggtctggggacaggcccgcttgctgggtacctggtccccactgctgagctggcccttggggagaggtgattctcagggctggagcctggggtgtcctacagtgactccctgggagccgcctgcttcttctctccacatggaagcccaactggggttgcgtctgaggcctgccccctgggctggggcctcagaccccctcagccttgggaccgtgcccacgagggtctcccctcctgcacacagggcagtccttactcccccaccactcaggccacagtggggctgcaggcaggcggctcctcctcacccacctctgggtccttggctcccgggggccccacctcggcacacactgtgccccacaaaacttcagtgtggtacaaggtggagaaagcatatcccaccaacctccagtgtcagggtccaggagagcctgggggtggggggactgccttgtctctagtagtgtggcctgtgccagcaccacagccggtcagaggagcgcaggcagcgcagggctggcacgtgacaggctcgtcagccacctgggaacacagttctgggcaaagaggatccgaggttgagaggaaggagggtcccggtgtatcctggccctgggggtctgggcgtccagctcagccctggcctggctgggtggtattctggtagggatatggcaggactcctggcagggccacctgcaggaccctgtcctgcagtcccacactgtgcagacccagtcccacactgtggccaggccttacatctggctggaaagcagagcctcctgggaacacatctggctgcacaggctgaaatatccacccagcaggcagagtggcgtggcctccccatgggcacagtggtgacccccttgattcccaccgtacaaccccctccaccccccactcagtgcctccacatgctgcctggcacagaccaggcctttgacaaataaatgttcaatggatgcagttccagg

SEQ ID NO: 353171 - DNA, 1222 bp, Homo sapiens
aggacggcgggaagaggagtgcggaacccgcgggaggatgtgcacagagggcccaggaggagcctcaggagccggactgccgttggccaaccgagtccccagggagacacttaagggaaattaaactgcagagtgcaagagatgcctcagtcaagtcagccaaaaacacgcgggtcatccccaagccccagagagtgacagagccccgatgacacggacacctcggctgctgtcacttccctggttcgggcctcccacaggctttgaattgaaggcgagtgcctcagaatttgcatccattgttctgtctttcctgggaagttattcatcctggtggccagcccaccgacaaaatggatttggatctactggacctgaatcccagaattattgctgcaattaagaaagccaaactgaaatcggtaaaggaggttttacacttttctggaccagacttgaagagactgaccaacctctccagccccgaggtctggcacttgctgagaacggcctccttacacttgcggggaagcagcatccttacagcactgcagctgcaccagcagaaggagcggttccccacgcagcaccagcgcctgagcctgggctgcccggtgctggacgcgctgctccgcggtggcctgcccctggacggcatcactgagctggccggacgcagctcggcagggaagacccagctggcgctgcagctctgcctggctgtgcagttcccgcggcagcacggaggcctggaggctggagccgtctacatctgcacggaagacgccttcccgcacaagcgcctgcagcagctcatggcccagcagccgcggctgcgcactgacgttccaggagagctgcttcagaagctccgatttggcagccagatcttcatcgagcacgtggccgatgtggtgagtgtgggagaagccccatgacacccccaaggagcaggtggggtcagaggatggagagtgactgagaggaactggcaggggagggaattctggctaaagcatcctgccaggacccttgctgaaggtgtgccttggggatcagacggcctctggggactgtggaggatggaccagtcagctactgagggcgactggatacggagagcaggggtcctgctacaatctcagcagggatttgcctccacatgctgcctggcacagaccaggcctttgacaaataaatgttcaatggatgcagttccagg

SEQ ID NO: 353172 - DNA, 330 bp, Homo sapiens
cacagcaccttcctcccgtcccacaggaagctgtcttctgctgttggctgctgggggcgactgatgtttggatccctgagcaccctgccaatcccagactcaccttcccactctttccagagtccccagggagacacttaagggaaattaaactgcagagtgcaagagatgcctcagtcaagtcagccaaaaacacgcgggtcatccccaagccccagagaggtgagtcgggcagggcactcaactgctgcaggaggatggtcttatttctagcactttccacaggaggtaaatgtggtgggtttggggggtttttcaaatgcatcagtg

SEQ ID NO: 353173 - DNA, 1753 bp, Homo sapiens
  misc_feature (35)..(36): n is a, c, g, or t
  misc_feature (40)..(40): n is a, c, g, or t
  misc_feature (44)..(44): n is a, c, g, or t
  misc_feature (47)..(47): n is a, c, g, or t
  misc_feature (53)..(53): n is a, c, g, or t
  misc_feature (58)..(58): n is a, c, g, or t
  misc_feature (73)..(73): n is a, c, g, or t
  misc_feature (119)..(119): n is a, c, g, or t
  misc_feature (124)..(124): n is a, c, g, or t
  misc_feature (131)..(131): n is a, c, g, or t
  misc_feature (136)..(136): n is a, c, g, or t
  misc_feature (140)..(141): n is a, c, g, or t
  misc_feature (145)..(145): n is a, c, g, or t
  misc_feature (153)..(154): n is a, c, g, or t
  misc_feature (160)..(160): n is a, c, g, or t
  misc_feature (163)..(163): n is a, c, g, or t
  misc_feature (168)..(168): n is a, c, g, or t
  misc_feature (178)..(178): n is a, c, g, or t
  misc_feature (208)..(208): n is a, c, g, or t
  misc_feature (219)..(219): n is a, c, g, or t
  misc_feature (221)..(221): n is a, c, g, or t
  misc_feature (228)..(228): n is a, c, g, or t
  misc_feature (269)..(269): n is a, c, g, or t
gcgcagcgtcgcacctctgcccaatgaggtgcccnngacntgcntgntgcggntgccntgctcccccccagcntccctgcatcccgggatgggggagggcgccaggcgcagctcccggnccctnaggggtntcccngccnnaccncaccagcnngggttnggnacctnggggctcagntgtgcagtcagctgttaatgtggcaaaatntggggaagtcntntgcagcngcaaaatccagttcccaccagttggaggccgggcggggaanggtggggacagacagcactccgctgtgggaggcaaggccaggcgggtgctgcctgggacccagtgactcagcacccctgcccggatcaactggacttttgccccctgctccgccagcctcctgcttggatctctcctgggtctccctgctgcgcctgtccaggatgcagggagctcgggctcccagggaccagggccagtcccccggcaggatgagcgctctaggccggtcctcggtcatcttgcttacctacgtgctggccgccacagaacttacctgcctcttcatgcagttctccatcgtgccatacctgtctcggaaactgggcctggattccattgccttcggctacctgcaaaccaccttcggggtgctgcagctgctgggcgggccggtgtttggcaggttcgcagaccagcgcggggcgcgggcggcgctcacgctctccttcctggctgccttggcgctctacctgctcctggcggccgcctccagcccggccctgcccggggtctacctgctcttcgcctcgcgcctgcccggagcgctcatgcacacgctgccagccgcccagatggtcatcacggacctgtcggcacccgaggagcggcccgcggccctgggccggctgggcctctgcttcggcgtcggagtcatcctcggctccctgctgggcgggaccctggtctccgcgtacgggattcagtgcccggccatcctggctgccctggccaccctcctgggagctgtcctcagcttcacctgcatccccgccagcaccaaaggggccaaaactgacgcccaggctccactgccaggcggcccccgggccagtgtgttcgacctgaaggccatcgcctccctgctgcggctgccagacgtcccgaggatcttcctggtgaaggtggcctccaactgccccacagggctcttcatggtcatgttctccatcatctccatggacttcttccagctggaggccgcccaagctggctacctcatgtccttcttcgggctcctccagatggtgacccagggcctggtcatcgggcagctgagcagccacttctcggaggaggtgctgctccgggccagcgtgctggtcttcatcgtggtgggcctggccatggcctggatgtccagcgtcttccacttctgcctcctggtgcccggcctggtgttcagcctctgcaccctcaacgtggtcaccgacagcatgctgatcaaggctgtctccacctcggacacagggaccatgctgggcctctgcgcctctgtacaaccactgctccgaactctgggacccacggtcggcggcctcctgtaccgcagctttggcgtccccgtcttcggccacgtgcaggttgctatcaatacccttgtcctcctggtcctctggaggaaacctatgccccagaggaaggacaaagtccggtgaccgctgcccagacacagactggcaataaactcctactaaatccctc

SEQ ID NO: 353174 - DNA, 1546 bp, Homo sapiens
  misc_feature (1)..(1): n is a, c, g, or t
  misc_feature (3)..(4): n is a, c, g, or t
  misc_feature (7)..(7): n is a, c, g, or t
ngnncangacaaaaaaaaaggtctctccgatttcctctgctcaaccagttccctggctacctgaggccctgcttcacctggaggaagacagtggcaaggccaggcgggtgctgcctgggacccagtgactcagcacccctgcccggatcaactggacttttgccccctgctccgccagcctcctgcttggatctctcctgggtctccctgctgcgcctgtccaggatgcagggagctcgggctcccagggaccagggccagtcccccggcaggatgagcgctctaggccggtcctcggtcatcttgcttacctacgtgctggccgccacagaacttacctgcctcttcatgcagttctccatcgtgccatacctgtctcggaaactgggcctggattccattgccttcggctacctgcaaaccaccttcggggtgctgcagctgctgggcgggccggtgtttggcaggttcgcagaccagcgcggggcgcgggcggcgctcacgctctccttcctggctgccttggcgctctacctgctcctggcggccgcctccagcccggccctgcccggggtctacctgctcttcgcctcgcgcctgcccggagcgctcatgcacacgctgccagccgcccagatggtcatcacggacctgtcggcacccgaggagcggcccgcggccctgggccggctgggcctctgcttcggcgtcggagtcatcctcggctccctgctgggcgggaccctggtctccgcgtacgggattcagtgcccggccatcctggctgccctggccaccctcctgggagctgtcctcagcttcacctgcatccccgccagcaccaaaggggccaaaactgacgcccaggctccactgccaggcggcccccgggccagtgtgttcgacctgaaggccatcgcctccctgctgcggctgccagacgtcccgaggatcttcctggtgaaggtggcctccaactgccccacagggctcttcatggtcatgttctccatcatctccatggacttcttccagctggaggccgcccaagctggctacctcatgtccttcttcgggctcctccagatggtgacccagggcctggtcatcgggcagctgagcagccacttctcggaggaggtgctgctccgggccagcgtgctggtcttcatcgtggtgggcctggccatggcctggatgtccagcgtcttccacttctgcctcctggtgcccggcctggtgttcagcctctgcaccctcaacgtggtcaccgacagcatgctgatcaaggctgtctccacctcggacacagggaccatgctgggcctctgcgcctctgtacaaccactgctccgaactctgggacccacggtcggcggcctcctgtaccgcagctttggcgtccccgtcttcggccacgtgcaggttgctatcaatacccttgtcctcctggtcctctggaggaaacctatgccccagaggaaggacaaagtccggtgaccgctgcccagacacagactggcaataaactcctactaaatccctc

SEQ ID NO: 353175 - DNA, 883 bp, Homo sapiens
ggcacgaggaggtcaccctggagcgctcaccccaccggcacccgtgcccaagcccgcccctgcaaaggcaggcaaggccaggcgggtgctgcctgggacccagtgactcagcacccctgcccggatcaactggacttttgccccctgctccgccagcctcctgcttggatctctcctgggtctccctgctgcgcctgtccaggatgcagggagctcgggctcccagggaccagggccagtcccccggcaggatgagcgctctaggccggtcctcggtcatcttgcttacctacgtgctggccgccacagaacttacctgcctcttcatgcagttctccatcgtgccatacctgtctcggaaactgggcctggattccattgccttcggctacctgcaaaccaccttcggggtgctgcagctgctgggcgggccggtgtttggcaggttcgcagaccagcgcggggcgcgggcggcgctcacgctctccttcctggctgccttggcgctctacctgctcctggcggccgcctccagcccggccctgcccggggtctacctgctcttcgcctcgcgcctgcccggagcgctcatgcacacgctgccagccgcccagatggtcatcacggacctgtcggcacccgaggagcggcccgcggccctgggccggctgggcctctgcttcggcgtcggagtcatcctcggctccctgctgggcgggaccctggtctccgcgtacgggtgagtggtgggggccggggcggagtctgtgggtcaggacgcccgcggctgggtcggccccgccccgcctcctcttggcctcggtttcctcttttgctcgtggggcgcgagtggccacgtgatgtggctactggggacgtctgg

SEQ ID NO: 353176 - DNA, 2063 bp, Homo sapiens
  misc_feature (1539)..(1539): n is a, c, g, or t
ggcacgaggaggtcaccctggagcgctcaccccaccggcacccgtgcccaagcccgcccctgcaaaggcaggcaaggccaggcgggtgctgcctgggacccagtgactcagcacccctgcccggatcaactggacttttgccccctgctccgccagcctcctgcttggatctctcctgggtctccctgctgcgcctgtccaggatgcagggagctcgggctcccagggaccagggccagtcccccggcaggatgagcgctctaggccggtcctcggtcatcttgcttacctacgtgctggccgccacagaacttacctgcctcttcatgcagttctccatcgtgccatacctgtctcggaaactgggcctggattccattgccttcggctacctgcaaaccaccttcggggtgctgcagctgctgggcgggccggtgtttggcaggttcgcagaccagcgcggggcgcgggcggcgctcacgctctccttcctggctgccttggcgctctacctgctcctggcggccgcctccagcccggccctgcccggggtctacctgctcttcgcctcgcgcctgcccggagcgctcatgcacacgctgccagccgcccagatggtcatcacggacctgtcggcacccgaggagcggcccgcggccctgggccggctgggcctctgcttcggcgtcggagtcatcctcggctccctgctgggcgggaccctggtctccgcgtacgggattcagtgcccggccatcctggctgccctggccaccctcctgggagctgtcctcagcttcacctgcatccccgccagcaccaaaggggccaaaactgacgcccaggctccactgccaggcggcccccgggccagtgtgttcgacctgaaggccatcgcctccctgctgcggctgccagacgtcccgaggatcttcctggtgaaggtggcctccaactgccccacagggctcttcatggtcatgttctccatcatctccatggacttcttccagctggaggccgcccaagctggctacctcatgtccttcttcgggctcctccagatggtgacccagggcctggtcatcgggcagctgagcagccacttctcggaggaggtgctgctccgggccagcgtgctggtcttcatcgtggtgggcctggccatggcctggatgtccagcgtcttccacttctgcctcctggtgcccggcctggtgttcagcctctgcaccctcaacgtggtcaccgacagcatgctgatcaaggctgtctccacctcggacacagggaccatgctgggcctctgcgcctctgtacaaccactgctccgaactctgggacccacggtcggcggcctcctgtaccgcagctttggcgtccccgtcttcggccacgtgcaggttgctatcaatacccttgtcctcctggtcctctggaggaaacctatgccccagaggaaggacaaagtccggtgaccgctgcccagacacagactggcaataaactcctactaaatccctcaaaaaaaaaaaaaanaaaaaaaaaaaaaaaaaaaaaaaaaaaaagggggggggcggttaaaaagattcccccgggggggccccaattttagcgcggaaaccaagagtatttgtggaacaaaaggggcgccccattatagagggcggcatataaaaaaagcacaaagcacacgtgccacgccctttaaacacagctgcaagcagcgagaaaaacacgagaaaacagggagaaaacctcggaggaagagaaacactaaacaccagcgagaggggagagcccaaaacaagctgcgccaccaaaacacaccgaagcagagcaacaatttttacacgcgcgccacacgaggggagcaacaaccaactccaacgcacactccaaagcaggcgactatccaaagagcggcggctcacaacaacagccgcggcgaccatttaccgagtcgccagccgaaatagaaaaaaaacggaccaacacacgagcaaaacagtagcttacaagagacaaaatttgtaactccagaggacaacaggcaaaaaaac

SEQ ID NO: 353177 - DNA, 1180 bp, Homo sapiens
ggcacgaggaggtcaccctggagcgctcaccccaccggcacccgtgcccaagcccgcccctgcaaaggcaggcaaggccaggcgggtgctgcctgggacccagtgactcagcacccctgcccggatcaactggacttttgccccctgctccgccagcctcctgcttggatctctcctgggtctccctgctgcgcctgtccaggatgcagggagctcgggctcccagggaccagggccagtcccccggcaggatgagcgctctaggccggtcctcggtcatcttgcttacctacgtgctggccgccacagaacttacctgcctcttcatgcagttctccatcgtgccatacctgtctcggaaactgggcctggattccattgccttcggctacctgcaaaccaccttcggggtgctgcagctgctgggcgggccggtgtttggcaggttcgcagaccagcgcggggcgcgggcggcgctcacgctctccttcctggctgccttggcgctctacctgctcctggcggccgcctccagcccggccctgcccggggtctacctgcttgcggctgccagacgtcccgaggatcttcctggtgaaggtggcctccaactgccccacagggctcttcatggtcatgttctccatcatctccatggacttcttccagctggaggccgcccaagctggctacctcatgtccttcttcgggctcctccagatggtgacccagggcctggtcatcgggcagctgagcagccacttctcggaggaggtgctgctccgggccagcgtgctggtcttcatcgtggtgggcctggccatggcctggatgtccagcgtcttccacttctgcctcctggtgcccggcctggtgttcagcctctgcaccctcaacgtggtcaccgacagcatgctgatcaaggctgtctccacctcggacacagggaccatgctgggcctctgcgcctctgtacaaccactgctccgaactctgggacccacggtcggcggcctcctgtaccgcagctttggcgtccccgtcttcggccacgtgcaggttgctatcaatacccttgtcctcctggtcctctggaggaaacctatgccccagaggaaggacaaagtccggtgaccgctgcccagacacagactggcaataaactcctactaaatccctc

SEQ ID NO: 353178 - DNA, 1773 bp, Homo sapiens
  misc_feature (1773)..(1773): n is a, c, g, or t
ggcacgaggaggtcaccctggagcgctcaccccaccggcacccgtgcccaagcccgcccctgcaaaggcaggcaaggccaggcgggtgctgcctgggacccagtgactcagcacccctgcccggatcaactggacttttgccccctgctccgccagcctcctgcttggatctctcctgggtctccctgctgcgcctgtccaggatgcagggagctcgggctcccagggaccagggccagtcccccggcaggatgagcgctctaggccggtcctcggtcatcttgcttacctacgtgctggccgccacagaacttacctgcctcttcatgcagttctccatcgtgccatacctgtctcggaaactgggcctggattccattgccttcggctacctgcaaaccaccttcggggtgctgcagctgctgggcgggccggtgtttggcaggttcgcagaccagcgcggggcgcgggcggcgctcacgctctccttcctggctgccttggcgctctacctgctcctggcggccgcctccagcccggccctgcccggggtctacctgctcttcgcctcgcgcctgcccggagcgctcatgcacacgctgccagccgcccagatggtcatcacggacctgtcggcacccgaggagcggcccgcggccctgggccggctgggcctctgcttcggcgtcggagtcatcctcggctccctgctgggcgggaccctggtctccgcgtacgggattcagtgcccggccatcctggctgccctggccaccctcctgggagctgtcctcagcttcacctgcatccccgccagcaccaaaggggccaaaactgacgcccaggctccactgccaggcggcccccgggccagtgtgttcgacctgaaggccatcgcctccctgctgcggctgccagacgtcccgaggatcttcctggtgaaggtggcctccaactgccccacagggctcttcatggtcatgttctccatcatctccatggacttcttccagctggaggccgcccaagctggctacctcatgtccttcttcgggctcctccagatggtgacccagggcctggtcatcgggcagctgagcagccacttctcggaggaggtgctgctccgggccagcgtgctggtcttcatcgtggtgggcctggccatggcctggatgtccagcgtcttccacttctgcctcctggtgcccggcctggtgttcagcctctgcaccctcaacgtggtcaccgacagcatgctgatcaaggctgtctccacctcggacacagggaccatgctgggcctctgcgcctctgtacaaccactgctccgaactctgggacccacggtcggcggcctcctgtaccgcagctttggcgtccccgtcttcggccacgtgcaggttgctatcaatacccttgtcctcctggtcctctggaggaaacctatgccccagaggaaggacaaagtccggtgaccgctcgtcccaaagcctgtgctttgggacggcggatgtgatacagatagcaagagaactagaattagaagttggaacgctgaagattgggcctgattgccagaatctcatgataaaacttgaatggatgaggagttgcatcttatggaggagcacagaaagtggttcctcagatgaagtctactcctggtgaagatgctgtgaacattgttgaacgacagcaaggatttagatattccctaactttgttgataaaccggcgttggaagattgctcccgttccaaagacgtctcn

SEQ ID NO: 353179 - DNA, 1065 bp, Homo sapiens
ggcacgaggaggtcaccctggagcgctcaccccaccggcacccgtgcccaagcccgcccctgcaaaggcaggcaaggccaggcgggtgctgcctgggacccagtgactcagcacccctgcccggatcaactggacttttgccccctgctccgccagcctcctgcttggatctctcctgggtctccctgctgcgcctgtccaggatgcagggagctcgggctcccagggaccagggccagtcccccggcaggatgagcgctctaggccggtcctcggtcatcttgcttacctacgtgctggccgccacagaacttacctgcctcttcatgcagttctccatcgtgccatacctgtctcggaaactgggcctggattccattgccttcggctacctgcaaaccaccttcggggtgctgcagctgctgggcgggccggtgtttggcaggttcgcagaccagcgcggggcgcgggcggcgctcacgctctccttcctggctgccttggcgctctacctgctcctggcggccgcctccagcccggccctgcccggggtctacctgctcttcgcctcgcgcctgcccggagcgctcatgcacacgctgccagccgcccagatggtcatcacggacctgtcggcacccgaggagcggcccgcggccctgggccggctgggcctctgcttcggcgtcggagtcatcctcggctccctgctgggcgggaccctggtctccgcgtacgggattcagtgcccggccatcctggctgccctggccaccctcctgggagctgtcctcagcttcacctgcatccccgccagcaccaaaggggccaaaactgacgcccaggctccactgccaggcggcccccgggccagtgtgttcgacctgaaggccatcgcctccctgctgcggctgccagacgtcccgaggatcttcctggtgaaggtggcctccaactgccccacaggctggtctcaaactcctggcctcaatcagtcctccctcttcggcctcccaaagtgctgggattgcagacgtgactttgagggctcttataacagagagc

SEQ ID NO: 353180 - DNA, 746 bp, Homo sapiens
ctccggcaggcagggaggcccagagaggcaggaaggcccagacagggaaggcgttaggaggggaggcccagacagggaaggcggcccccgggccagtgtgttcgacctgaaggccatcgcctccctgctgcggctgccagacgtcccgaggatcttcctggtgaaggtggcctccaactgccccacagggctcttcatggtcatgttctccatcatctccatggacttcttccagctggaggccgcccaagctggctacctcatgtccttcttcgggctcctccagatggtgacccagggcctggtcatcgggcagctgagcagccacttctcggaggaggtgctgctccgggccagcgtgctggtcttcatcgtggtgggcctggccatggcctggatgtccagcgtcttccacttctgcctcctggtgcccggcctggtgttcagcctctgcaccctcaacgtggtcaccgacagcatgctgatcaaggctgtctccacctcggacacagggaccatgctgggcctctgcgcctctgtacaaccactgctccgaactctgggacccacggtcggcggcctcctgtaccgcagctttggcgtccccgtcttcggccacgtgcaggttgctatcaatacccttgtcctcctggtcctctggaggaaacctatgccccagaggaaggacaaagtccggtgaccgctgcccagacacagactggcaataaactcctactaaatccctc

SEQ ID NO: 353181 - DNA, 1104 bp, Homo sapiens
ggcacgaggaggtcaccctggagcgctcaccccaccggcacccgtgcccaagcccgcccctgcaaaggcaggcaaggccaggcgggtgctgcctgggacccagtgactcagcacccctgcccggatcaactggacttttgccccctgctccgccagcctcctgcttggatctctcctgggtctccctgctgcgcctgtccaggatgcagggagctcgggctcccagggaccagggccagtcccccggcaggatgagcgctctaggccggtcctcggtcatcttgcttacctacgtgctggccgccacagaacttacctgcctcttcatgcagttctccatcgtgccatacctgtctcggaaactgggcctggattccattgccttcggctacctgcaaaccaccttcggggtgctgcagctgctgggcgggccggtgtttggcaggttcgcagaccagcgcggggcgcgggcggcgctcacgctctccttcctggctgccttggcgctctacctgctcctggcggccgcctccagcccggccctgcccggggtctacctgctcttcgcctcgcgcctgcccggagcgctcatgcacacgctgccaggtagggccgggggactggagtccaggtggggccgggtcgggggcagcctgcggaggacccgggacacctccagggaggtctgcgtgcgcgcggggtctggccctaagggctggacgggggtggggggcgacgtggggcgtggcttgtggaggggcgggtcagggggggaaagggccccaccgaggggctttcgccgctcagctcccccgccccgtccccagccgcccagatggtcatcacggacctgtcggcacccgaggagcggcccgcggccctgggccggctgggcctctgcttcggcgtcggagtcatcctcggctccctgctgggcgggaccctggtctccgcgtacgggtgagtggtgggggccggggcggagtctgtgggtcaggacgcccgcggctgggtcggccccgccccgcctcctcttggcctcggtttcctcttttgctcgtggggcgcgagtggccacgtgatgtggctactggggacgtctgg

SEQ ID NO: 353182 - DNA, 1524 bp, Homo sapiens
ggcacgaggaggtcaccctggagcgctcaccccaccggcacccgtgcccaagcccgcccctgcaaaggcaggcaaggccaggcgggtgctgcctgggacccagtgactcagcacccctgcccggatcaactggacttttgccccctgctccgccagcctcctgcttggatctctcctgggtctccctgctgcgcctgtccaggatgcagggagctcgggctcccagggaccagggccagtcccccggcaggatgagcgctctaggccggtcctcggtcatcttgcttacctacgtgctggccgccacagaacttacctgcctcttcatgcagttctccatcgtgccatacctgtctcggaaactgggcctggattccattgccttcggctacctgcaaaccaccttcggggtgctgcagctgctgggcgggccggtgtttggcaggttcgcagaccagcgcggggcgcgggcggcgctcacgctctccttcctggctgccttggcgctctacctgctcctggcggccgcctccagcccggccctgcccggggtctacctgctcttcgcctcgcgcctgcccggagcgctcatgcacacgctgccagccgcccagatggtcatcacggacctgtcggcacccgaggagcggcccgcggccctgggccggctgggcctctgcttcggcgtcggagtcatcctcggctccctgctgggcgggaccctggtctccgcgtacgggattcagtgcccggccatcctggctgccctggccaccctcctgggagctgtcctcagcttcacctgcatccccgccagcaccaaaggggccaaaactgacgcccaggctccactgccaggcggcccccgggccagtgtgttcgacctgaaggccatcgcctccctgctgcggctgccagacgtcccgaggatcttcctggtgaaggtggcctccaactgccccacagggctcttcatggtcatgttctccatcatctccatggacttcttccagctggaggccgcccaagctggctacctcatgtccttcttcgggctcctccagatggtgacccagggcctggtcatcgggcagctgagcagccacttctcggaggaggtgctgctccgggccagcgtgctggtcttcatcgtggtgggcctggccatggcctggatgtccagcgtcttccacttctgcctcctggtgcccggcctggtgttcagcctctgcaccctcaacgtggtcaccgacagcatgctgatcaaggctgtctccacctcggacacagggaccatgctgggcctctgcgcctctgtacaaccactgctccgaactctgggacccacggtcggcggcctcctgtaccgcagctttggcgtccccgtcttcggccacgtgcaggttgctatcaatacccttgtcctcctggtcctctggaggaaacctatgccccagaggaaggacaaagtccggtgaccgctgcccagacacagactggcaataaactcctactaaatccctc

SEQ ID NO: 353183 - DNA, 1021 bp, Homo sapiens
  misc_feature (784)..(784): n is a, c, g, or t
  misc_feature (822)..(823): n is a, c, g, or t
  misc_feature (825)..(825): n is a, c, g, or t
  misc_feature (828)..(828): n is a, c, g, or t
  misc_feature (844)..(844): n is a, c, g, or t
tggctaggtagagcccggtgtgatcggccgaggctgtcacggatgcagggagctcgggctcccagggaccagggccagtcccccggcaggatgagcgctctaggccggtcctcggtcatcttgcttacctacgtgctggccgccacagaacttacctgcctcttcatgcagttctccatcgtgccatacctgtctcggaaactgggcctggattccattgccttcggctacctgcaaaccaccttcggggtgctgcagctgctgggcgggccggtgtttggcaggttcgcagaccagcgcggggcgcgggcggcgctcacgctctccttcctggctgccttggcgctctacctgctcctggcggccgcctccagcccggccctgcccggggtctacctgctcttcgcctcgcgcctgcccggagcgctcatgcacacgctgccagccgcccagatggtcatcacggacctgtcggcacccgaggagcggcccgcggccctgggccggctgggcctctgcttcggcgtcggagtcatcctcggctccctgctgggcgggaccctggtctccgcgtacggcacaggtgcccaggtctcggagagcccctcccaggacatgcacaccaggcttgccctttggagcctctcctgaccttggccagcgtgggagctgctgttcctgggaggatccgccacctgcccaggcgctcaccagcctggcttccacagctgctacccacagggctgcggggcctgcatggcgtggcgagggtccggatggttcngtgcccggccatctggctgcctggcacctctggagctnncncanttcactgatccgcgcncaagggcaattgcgcaggtcatgcagcggccggcgttgtcgactgaagctgcactgtggtgccaggtccggtcggggaggcgcagcccggttagggccaacactgatacggggcaggacatttggccaagacgggtgaaaccggtcgggaaagggagaacggtacggggaggacgcg

SEQ ID NO: 353184 - DNA, 2019 bp, Homo sapiens
  misc_feature (1539)..(1539): n is a, c, g, or t
  misc_feature (1880)..(1880): n is a, c, g, or t
ggcacgaggaggtcaccctggagcgctcaccccaccggcacccgtgcccaagcccgcccctgcaaaggcaggcaaggccaggcgggtgctgcctgggacccagtgactcagcacccctgcccggatcaactggacttttgccccctgctccgccagcctcctgcttggatctctcctgggtctccctgctgcgcctgtccaggatgcagggagctcgggctcccagggaccagggccagtcccccggcaggatgagcgctctaggccggtcctcggtcatcttgcttacctacgtgctggccgccacagaacttacctgcctcttcatgcagttctccatcgtgccatacctgtctcggaaactgggcctggattccattgccttcggctacctgcaaaccaccttcggggtgctgcagctgctgggcgggccggtgtttggcaggttcgcagaccagcgcggggcgcgggcggcgctcacgctctccttcctggctgccttggcgctctacctgctcctggcggccgcctccagcccggccctgcccggggtctacctgctcttcgcctcgcgcctgcccggagcgctcatgcacacgctgccagccgcccagatggtcatcacggacctgtcggcacccgaggagcggcccgcggccctgggccggctgggcctctgcttcggcgtcggagtcatcctcggctccctgctgggcgggaccctggtctccgcgtacgggattcagtgcccggccatcctggctgccctggccaccctcctgggagctgtcctcagcttcacctgcatccccgccagcaccaaaggggccaaaactgacgcccaggctccactgccaggcggcccccgggccagtgtgttcgacctgaaggccatcgcctccctgctgcggctgccagacgtcccgaggatcttcctggtgaaggtggcctccaactgccccacagggctcttcatggtcatgttctccatcatctccatggacttcttccagctggaggccgcccaagctggctacctcatgtccttcttcgggctcctccagatggtgacccagggcctggtcatcgggcagctgagcagccacttctcggaggaggtgctgctccgggccagcgtgctggtcttcatcgtggtgggcctggccatggcctggatgtccagcgtcttccacttctgcctcctggtgcccggcctggtgttcagcctctgcaccctcaacgtggtcaccgacagcatgctgatcaaggctgtctccacctcggacacagggaccatgctgggcctctgcgcctctgtacaaccactgctccgaactctgggacccacggtcggcggcctcctgtaccgcagctttggcgtccccgtcttcggccacgtgcaggttgctatcaatacccttgtcctcctggtcctctggaggaaacctatgccccagaggaaggacaaagtccggtgaccgctgcccagacacagactggcaataaactcctactaaatccctcaaaaaaaaaaaaaanaaaaaaaaaaaaaaaaaaaaaggggggggggctaagattttccctgggggggcccttttttgtcccgccagcttttttttgttgacaagaatggtggccccctaatgtgggaggagcctgtatatatataaaagcggagaaaggcgggagcgggagttttgaaacagagtgccagattgggggaaacaaggtggtatacctcgtgggtacactctttgttggaagagagaacccttatatgttgtggtggggggtggagaacacatatattgttgggggacaacacatttatgcctctatacatgggcagatatgttacagaagggcgctctaagaggtgngcatgatattataaatgttttatagtaagggtggtatatataggtgtgtgtgtgtaagacctcggaggtgctggataatgtgtggtatggctggggtgtaggataaaagttttgaggtgattagcgggaggttatatat

SEQ ID NO: 353185 - DNA, 1745 bp, Homo sapiens
ggcacgaggaggtcaccctggagcgctcaccccaccggcacccgtgcccaagcccgcccctgcaaaggcaggcaaggccaggcgggtgctgcctgggacccagtgactcagcacccctgcccggatcaactggacttttgccccctgctccgccagcctcctgcttggatctctcctgggtctccctgctgcgcctgtccaggatgcagggagctcgggctcccagggaccagggccagtcccccggcaggatgagcgctctaggccggtcctcggtcatcttgcttacctacgtgctggccgccacagaacttacctgcctcttcatgcagttctccatcgtgccatacctgtctcggaaactgggcctggattccattgccttcggctacctgcaaaccaccttcggggtgctgcagctgctgggcgggccggtgtttggcaggttcgcagaccagcgcggggcgcgggcggcgctcacgctctccttcctggctgccttggcgctctacctgctcctggcggccgcctccagcccggccctgcccggggtctacctgctcttcgcctcgcgcctgcccggagcgctcatgcacacgctgccaggtagggccgggggactggagtccaggtggggccgggtcgggggcagcctgcggaggacccgggacacctccagggaggtctgcgtgcgcgcggggtctggccctaagggctggacgggggtggggggcgacgtggggcgtggcttgtggaggggcgggtcagggggggaaagggccccaccgaggggctttcgccgctcagctcccccgccccgtccccagccgcccagatggtcatcacggacctgtcggcacccgaggagcggcccgcggccctgggccggctgggcctctgcttcggcgtcggagtcatcctcggctccctgctgggcgggaccctggtctccgcgtacgggattcagtgcccggccatcctggctgccctggccaccctcctgggagctgtcctcagcttcacctgcatccccgccagcaccaaaggggccaaaactgacgcccaggctccactgccaggcggcccccgggccagtgtgttcgacctgaaggccatcgcctccctgctgcggctgccagacgtcccgaggatcttcctggtgaaggtggcctccaactgccccacagggctcttcatggtcatgttctccatcatctccatggacttcttccagctggaggccgcccaagctggctacctcatgtccttcttcgggctcctccagatggtgacccagggcctggtcatcgggcagctgagcagccacttctcggaggaggtgctgctccgggccagcgtgctggtcttcatcgtggtgggcctggccatggcctggatgtccagcgtcttccacttctgcctcctggtgcccggcctggtgttcagcctctgcaccctcaacgtggtcaccgacagcatgctgatcaaggctgtctccacctcggacacagggaccatgctgggcctctgcgcctctgtacaaccactgctccgaactctgggacccacggtcggcggcctcctgtaccgcagctttggcgtccccgtcttcggccacgtgcaggttgctatcaatacccttgtcctcctggtcctctggaggaaacctatgccccagaggaaggacaaagtccggtgaccgctgcccagacacagactggcaataaactcctactaaatccctc

SEQ ID NO: 353186 - DNA, 958 bp, Homo sapiens
aataaatgtgctctgagggtcccagtccccactctttaggccacagactgtggggatgtgggaggtcagatttaagctattttagtgcaaccaaaggtgcaggttgggggatgtggctggggcgcctgggccctgggacccgcaccctgtgcagccgaggctgttgcccgcaggattcagtgcccggccatcctggctgccctggccaccctcctgggagctgtcctcagcttcacctgcatccccgccagcaccaaaggggccaaaactgacgcccaggctccactgccaggcggcccccgggccagtgtgttcgacctgaaggccatcgcctccctgctgcggctgccagacgtcccgaggatcttcctggtgaaggtggcctccaactgccccacagggctcttcatggtcatgttctccatcatctccatggacttcttccagctggaggccgcccaagctggctacctcatgtccttcttcgggctcctccagatggtgacccagggcctggtcatcgggcagctgagcagccacttctcggaggaggtgctgctccgggccagcgtgctggtcttcatcgtggtgggcctggccatggcctggatgtccagcgtcttccacttctgcctcctggtgcccggcctggtgttcagcctctgcaccctcaacgtggtcaccgacagcatgctgatcaaggctgtctccacctcggacacagggaccatgctgggcctctgcgcctctgtacaaccactgctccgaactctgggacccacggtcggcggcctcctgtaccgcagctttggcgtccccgtcttcggccacgtgcaggttgctatcaatacccttgtcctcctggtcctctggaggaaacctatgccccagaggaaggacaaagtccggtgaccgctgcccagacacagactggcaataaactcctactaaatccctc

SEQ ID NO: 353187 - DNA, 1182 bp, Homo sapiens
  misc_feature (945)..(945): n is a, c, g, or t
  misc_feature (983)..(984): n is a, c, g, or t
  misc_feature (986)..(986): n is a, c, g, or t
  misc_feature (989)..(989): n is a, c, g, or t
  misc_feature (1005)..(1005): n is a, c, g, or t
ggcacgaggaggtcaccctggagcgctcaccccaccggcacccgtgcccaagcccgcccctgcaaaggcaggcaaggccaggcgggtgctgcctgggacccagtgactcagcacccctgcccggatcaactggacttttgccccctgctccgccagcctcctgcttggatctctcctgggtctccctgctgcgcctgtccaggatgcagggagctcgggctcccagggaccagggccagtcccccggcaggatgagcgctctaggccggtcctcggtcatcttgcttacctacgtgctggccgccacagaacttacctgcctcttcatgcagttctccatcgtgccatacctgtctcggaaactgggcctggattccattgccttcggctacctgcaaaccaccttcggggtgctgcagctgctgggcgggccggtgtttggcaggttcgcagaccagcgcggggcgcgggcggcgctcacgctctccttcctggctgccttggcgctctacctgctcctggcggccgcctccagcccggccctgcccggggtctacctgctcttcgcctcgcgcctgcccggagcgctcatgcacacgctgccagccgcccagatggtcatcacggacctgtcggcacccgaggagcggcccgcggccctgggccggctgggcctctgcttcggcgtcggagtcatcctcggctccctgctgggcgggaccctggtctccgcgtacggcacaggtgcccaggtctcggagagcccctcccaggacatgcacaccaggcttgccctttggagcctctcctgaccttggccagcgtgggagctgctgttcctgggaggatccgccacctgcccaggcgctcaccagcctggcttccacagctgctacccacagggctgcggggcctgcatggcgtggcgagggtccggatggttcngtgcccggccatctggctgcctggcacctctggagctnncncanttcactgatccgcgcncaagggcaattgcgcaggtcatgcagcggccggcgttgtcgactgaagctgcactgtggtgccaggtccggtcggggaggcgcagcccggttagggccaacactgatacggggcaggacatttggccaagacgggtgaaaccggtcgggaaagggagaacggtacggggaggacgcg

SEQ ID NO: 353188 - DNA, 589 bp, Homo sapiens
gccttctctgcagaggggccctggccaccacaggccagtctggaggtccccagctttgggggctggccacagtccagacgcccctccctcgcctcccccatacccacttctaccctctctgtctggctctaggtgacccagggcctggtcatcgggcagctgagcagccacttctcggaggaggtgctgctccgggccagcgtgctggtcttcatcgtggtgggcctggccatggcctggatgtccagcgtcttccacttctgcctcctggtgcccggcctggtgttcagcctctgcaccctcaacgtggtcaccgacagcatgctgatcaaggctgtctccacctcggacacagggaccatgctgggcctctgcgcctctgtacaaccactgctccgaactctgggacccacggtcggcggcctcctgtaccgcagctttggcgtccccgtcttcggccacgtgcaggttgctatcaatacccttgtcctcctggtcctctggaggaaacctatgccccagaggaaggacaaagtccggtgaccgctgcccagacacagactggcaataaactcctactaaatccctc

SEQ ID NO: 353189 - DNA, 491 bp, Homo sapiens
agctcctaggtttaattttagaacacagggtccatagtgaggtaggagatagaggaaaataataaaaggggtccatggaagtgaaacagttaggaagcaatatttgagaaaagctcagcatttgctgattagagaactgtagtttgtttcctttttagtactattaaaagtcatgatccttaataatccttaattgctaatgtcagatggagtaatgatatgggctttcaggattcaacgtttcctaacatcaacttcagagtttacaaatatttgccgtgatgaataagtagagctgtgcctaaagaaaagtaggcagaacttgaggctgaaggtaaagagactgcttaggaagtcaaaacaaaatctaagcaaaagataaagtctaaacgtaaggtgtggcagcaggaatggaaaaggaaagacattataatgtggatgtaaaatgaatcaaatatctaggtctcaaactttggagtaaaggaggttac

SEQ ID NO: 353190 - DNA, 637 bp, Homo sapiens
cctgtatcttttagcaattacttgaagaaataccataatactatatgtggaagacatcccattggggtgttattaaatgctataatggaatgaatatgagtttttcgtttttgaattatgcccagtcgagccagtgtagaaactggcaagacagttcagtgagttatggtccactgaagctctgaatcctcagggatgccacctgcacattctcatactctgtccggggtcccagcctagcctttaccacgatagggattctgaaacctcaaactaatagaactttcttctctttttttctagtaggtgtagtccttccttaatttcaactcattaaaaaatgtggaaggaaggctggcatcaaaatattttgatcaaaaaagatgacaatgtaaaggctcagttgtggcagacagttttttgaaagtaacttctaaatttgcactctttgcagacttgtgcacatatattccgctttcagaatagttttgcaaattgtacacaaacaaacaaaaaggtggaagctttttaataaagaaattgcaatataataaatctccagttatagtcaattactacccatgttgtacaacagataccttctattttagttgctaataaagggctacacaactca

SEQ ID NO: 353191 - DNA, 678 bp, Homo sapiens
cctgtatcttttagcaattacttgaagaaataccataatactatatgtggaagacatcccattggggtgttattaaatgctataatggaatgaatatgagtttttcgtttttgaattatgcccagtcgagccagtgtagaaactggcaagacagttcagtgagttatggtccactgaagctctgaatcctcagggatgccacctgcacattctcatactctgtccggggtcccagcctagcctttaccacgatagggattctgaaacctcaaactaatagaactttcttctctttttttctagtaggtgtagtccttccttaatttcaactcattaaaaaatgtggaaggaaggctggcatcaaaatattttgatcaaaaaagatgacaatgtaaaggctcagttgtggcagacagttttttgaaagtaacttgtaaagcatttaccatatcctaaatttgcactctttgcagacttgtgcacatatattccgctttcagaatagttttgcaaattgtacacaaacaaacaaaaaggtggaagctttttaataaagaaattgcatttataaatgatctgtattagaatataataaatctccagttatagtcaattactacccatgttgtacaacagataccttctattttagttgctaataaagggctacacaactca

SEQ ID NO: 353192 - DNA, 978 bp, Homo sapiens
cctgtatcttttagcaattacttgaagaaataccataatactatatgtggaagacatcccattggggtgttattaaatgctataatggaatgaatatgagtttttcgtttttgaattatgcccagtcgagccagtgtagaaactggcaagacagttcagtgagttatggtccactgaagctctgaatcctcagggatgccacctgcacattctcatactctgtccggggtcccagcctagcctttaccacgatagggattctgaaacctcaaactaatagaactttcttctctttttttctagtaggtgtagtccttccttaatttcaactcattaaaaaatgtggaaggaaggctggcatcaaaatattttgatcaaaaaagatgacaatgtaaaggctcagttgtggcagacagttttttgaaagtaacttctaaatttgcactctttgcagacttgtgcacatatattccgctttcagaatagttttgcaaattgtacacaaacaaacaaaaaggtggaagctttttaataaagaaattgcatttataaatgatctgtattagaatataataaatctccagttatagtcaattactacccatgttgtacaacagataccttctattttagttgctaataaagggctacacaactcaaaataaataaataaataaataatttaaaaaataaataaaaataaactgaatgaaattgaaaacatatcaatgtgagatgccactaaagtcatactaaaagggaatttacaccacttactgcctacattagaaaagaagtctcaaatcaatgcaaatcaatgacttctgcctttacagtaagaaaccagaaaaagagcaaataaaatccagtaagcagaagaaaggaaacaaagatcagaacagaaattaatataatcaggaaaagagagagagagagaatcattgtaaccagaagtttgaggaaaatcaaatcaattgg

SEQ ID NO: 353193 - DNA, 997 bp, Homo sapiens
cctgtatcttttagcaattacttgaagaaataccataatactatatgtggaagacatcccattggggtgttattaaatgctataatggaatgaatatgagtttttcgtttttgaattatgcccagtcgagccagtgtagaaactggcaagacagttcagtgagttatggtccactgaagctctgaatcctcagggatgccacctgcacattctcatactctgtccggggtcccagcctagcctttaccacgatagggattctgaaacctcaaactaatagaactttcttctctttttttctagtaggtgtagtccttccttaatttcaactcattaaaaaatgtggaaggaaggctggcatcaaaatattttgatcaaaaaagatgacaatgtaaaggctcagttgtggcagacagttttttgaaagtaacttgtaaagcatttaccatatcctaaatttgcactctttgcagacttgtgcacatatattccgctttcagaatagttttgcaaattgtacacaaacaaacaaaaaggtggaagctttttaataaagaaattgcatttataaatgatctgtattagaatataataaatctccagttatagtcaattactacccatgttgtacaacagataccttctattttagttgctaataaagggctacacaactcaaaataaataaataaataaataatttaaaaaataaataaaaataaactgaatgaaattgaaaacatatcaatgtgagatgccactaaagtcatactaaaagggaatttacaccacttactgcctacattagaaaagaagtctcaaatcaatgcaaatcaatgacttctgcctttacagtaagaaaccagaaaaagagcaaataaaatccagtaagcagaagaaaggaaacaaagatcagaacagaaattaatataatcaggaaaagagagagagagagaatcattgtaaccagaagtttgaggaaaatcaaatcaattgg

SEQ ID NO: 353194 - DNA, 132 bp, Homo sapiens
gggtcccagcctagcctttaccacgatactggtcctggtttggggggattctgaaacctcaaactaatagaactttcttctctttttttctagtaggtgtagtccttccttaatttcaactcattaaaaaat

SEQ ID NO: 353195 - DNA, 458 bp, Homo sapiens
gtgatccacctgcctcagcctctcaaagtgctgggattacaggcgtgagccactgcgcctggctgaaagtagggtttttgctttgtctttttccaccatcttgcatcagaaactctttctcattattattctgtgttaaaatgaaataatcagcgtatacaaaagaatatatataatatttattataactcataataatatataataataagacatagacctgtgagttggctcctaacttatcaccaagacaagaccagtactgttgaggtcacggcatgttccttccggatcccatctctttgcctcccctcatgcccaggaaacagctcctcttgggtattttctgttcatctttctcttgattctcccctccattattttttcaccaaatttttctttttctttctgtcttttttttaaaattgtttaattttttttttattttgagacagaat

SEQ ID NO: 353196 - DNA, 378 bp, Homo sapiens
gtgtttttcaacatgactgactcgctagagggaggcctttcaaacaacagagacctccatttccagcccaaattcctatcctaaaacgtacagtcgccgagcatggtggctcacgcgtgtaatcccagcactctggaaggccaaggcaggcagatcacctgaggtcaggagttcaagaccagcctggctaacatggtgaaaccccgtctctactaaaaatacaaaaaactagctgggcgtggtggcacatgcctgtaatcccagctactcgggaggctgaggcaggagaatcacttgaactggagaggtggaagttgcagtaagccgagatcatgccaccgcactctagcctgggcaacaagagcaaactccatgtca

SEQ ID NO: 353197 - DNA, 428 bp, Homo sapiens
cttggattctccattaaggtggcatcctctcaaacccatggggtatcctggcatcttccttgctgagtttgtcctgcaaacccctggggtcctcaggtttggggcttgagtgtccctgtgctccacaattctctctctctcttttttttttttttttttgatggagtctcactctgttgcccaggctggagggcagttgtgcgatcccagctcactgcaacctccacctcctgggtttgagcgattctccagcctcagcctcccgaatagttggaattacaggcgcccaccaccacgcccagctaatttttgtatttttagtagagacggggtttcatcgtgttggccaggctggtctcagactcctggcctctggttatctgctcgcctcagcctcccaaagtgttgggattacaggcgtgagccac

SEQ ID NO: 353198 - DNA, 1495 bp, Homo sapiens
cccctctggtgacagaaagtcggcccagcagatgaggaagtggcaggcaggcaggctggccccggggacttctctctggccctgctccctccgagcgctccgccgttgcccgcctggcccctacggagtccttagccaggatggaggctgttgtgaacttgtaccaagaggtgatgaagcacgcagatccccggatccagggctaccctctgatggggtcccccttgctaatgacctccattctcctgacctacgtgtacttcgttctctcacttgggcctcgcatcatggctaatcggaagcccttccagctccgtggcttcatgattgtctacaacttctcactggtggcactctccctctacattgtctatgagttcctgatgtcgggctggctgagcacctatacctggcgctgtgaccctgtggactattccaacagccctgaggcacttaggatggttcgggtggcctggctcttcctcttctccaagttcattgagctgatggacacagtgatctttattctccgaaagaaagacgggcaggtgaccttcctacatgtcttccatcactctgtgcttccctggagctggtggtggggggtaaagattgccccgggaggaatgggctctttccatgccatgataaactcttccgtgcatgtcataatgtacctgtactacggattatctgcctttggccctgtggcacaaccctacctttggtggaaaaagcacatgacagccattcagctgatccagtttgtcctggtctcactgcacatctcccagtactactttatgtccagctgtaactaccagtacccagtcattattcacctcatctggatgtatggcaccatcttcttcatgctgttctccaacttctggtatcactcttataccaagggcaagcggctgccccgtgcacttcagcaaaatggagctccaggtattgccaaggtcaaggccaactgagaagcatggcctagataggcgcccacctaagtgcctcaggactgcaccttagggcagtgtccgtcagtgccctctccacctacacctgtgaccaaggcttatgtggtcaggactgagcaggggactggccctcccctccccacagctgctctacagggaccacggctttggttcctcacccacttcccccgggcagctccagggatgtggcctcattgctgtctgccactccagagctgggggctaaaagggctgtacagttatttccccctccctgccttaaaacttgggagaggagcactcagggctggccccacaaagggtctcgtggcctttttcctcacacagaagaggtcagcaataatgtcactgtggacccagtctcactcctccaccccacacactgaagcagtagcttctgggccaaaggtcagggtgggcgggggcctgggaatacagcctgtggaggctgcttactcaacttgtgtcttaattaaaagtgacagaggaaacca

SEQ ID NO: 353199 - DNA, 165 bp, Homo sapiens
gaaaaggggaagggaggcaggaagtaaaactgtggagaggagaggagagtaaggtgtggagaggaagggtggaacagctcttcccaggcaagcaggatgtgtggggagcagatgcctcaaccaaactgcctcctccccctagttcccagtaattccttcctttca

SEQ ID NO: 353200 - DNA, 1743 bp, Homo sapiens
cccctctggtgacagaaagtcggcccagcagatgaggaagtggcaggcaggcaggctggccccggggacttctctctggccctgctccctccgagcgctccgccgttgcccgcctggcccctacggagtccttagccaggatggaggctgttgtgaacttgtaccaagaggtgatgaagcacgcagatccccggatccagggctaccctctgatggggtcccccttgctaatgacctccattctcctgacctacgtgtacttcgttctctcacttgggcctcgcatcatggctaatcggaagcccttccagctccgtggcttcatgattgtctacaacttctcactggtggcactctccctctacattgtctatgagttcctgatgtcgggctggctgagcacctatacctggcgctgtgaccctgtggactattccaacagccctgaggcacttaggatggttcgggtggcctggctcttcctcttctccaagttcattgagctgatggacacagtgatctttattctccgaaagaaagacgggcaggtgaccttcctacatgtcttccatcactctgtgcttccctggagctggtggtggggggtaaagattgccccgggaggaatgggctctttccatgccatgataaactcttccgtgcatgtcataatgtacctgtactacggattatctgcctttggccctgtggcacaaccctacctttggtggaaaaagcacatgacagccattcagctgatccagtttgtcctggtctcactgcacatctcccagtactactttatgtccagctgtaactaccagtacccagtcattattcacctcatctggatgtatggcaccatcttcttcatgctgttctccaacttctggtatcactcttataccaagggcaagcggctgccccgtgcacttcagcaaaatggagctccaggtattgccaaggtcaaggccaactgagaagcatggcctagataggcgcccacctaagtgcctcaggactgcaccttagggcagtgtccgtcagtgccctctccacctacacctgtgaccaaggcttatgtggtcaggactgagcaggggactggccctcccctccccacagctgctctacagggaccacggctttggttcctcacccacttcccccgggcagctccagggatgtggcctcattgctgtctgccactccagagctgggggctaaaagggctgtacagttatttccccctccctgccttaaaacttgggagaggagcactcagggctggccccacaaagggtctcgtggcctttttcctcacacagaagaggtcagcaataatgtcactgtggacccagtctcactcctccaccccacacactgaagcagtagcttctgggccaaaggtcagggtgggcgggggcctgggaatacagcctgtggaggctgcttactcaacttgtgtcttaattaaaagtgacagaggaaaccaaaaaaaaaaaaaaaaaaaaaaaacaaaaaaaaataaaaaaaaaaaaaaaaaaaccgcgcgagagagactctattaccggggggcggaaaaaagaggagctaagaaaggcgccatggcgcaataagtttctctgcacccactttttttttaacagggggaaaaaccggggggccccccataaggagggcaataaaattacaaacccccggtaccctgtattgtctcacaacaaccccaaaaataacacg

SEQ ID NO: 353201 - DNA, 2123 bp, Homo sapiens
cccctctggtgacagaaagtcggcccagcagatgaggaagtggcaggcaggcaggctggccccggggacttctctctggccctgctccctccgagcgctccgccgttgcccgcctggcccctacggagtccttagccaggatggaggctgttgtgaacttgtaccaagaggtgatgaagcacgcagatccccggatccagggctaccctctgatggggtcccccttgctaatgacctccattctcctgacctacgtgtacttcgttctctcacttgggcctcgcatcatggctaatcggaagcccttccagctccgtggcttcatgattgtctacaacttctcactggtggcactctccctctacattgtctatgagttcctgatgtcgggctggctgagcacctatacctggcgctgtgaccctgtggactattccaacagccctgaggcacttaggatggttcgggtggcctggctcttcctcttctccaagttcattgagctgatggacacagtgatctttattctccgaaagaaagacgggcaggtgaccttcctacatgtcttccatcactctgtgcttccctggagctggtggtggggggtaaagattgccccgggaggaatgggctctttccatgccatgataaactcttccgtgcatgtcataatgtacctgtactacggattatctgcctttggccctgtggcacaaccctacctttggtggaaaaagcacatgacagccattcagctgatccagtttgtcctggtctcactgcacatctcccagtactactttatgtccagctgtaactaccagtacccagtcattattcacctcatctggatgtatggcaccatcttcttcatgctgttctccaacttctggtatcactcttataccaagggcaagcggctgccccgtgcacttcagcaaaatggagctccaggtattgccaaggtcaaggccaactgagaagcatggcctagataggcgcccacctaagtgcctcaggactgcaccttagggcagtgtccgtcagtgccctctccacctacacctgtgaccaaggcttatgtggtcaggactgagcaggggactggccctcccctccccacagctgctctacagggaccacggctttggttcctcacccacttcccccgggcagctccagggatgtggcctcattgctgtctgccactccagagctgggggctaaaagggctgtacagttatttccccctccctgccttaaaacttgggagaggagcactcagggctggccccacaaagggtctcgtggcctttttcctcacacagaagaggtcagcaataatgtcactgtggacccagtctcactcctccaccccacacactgaagcagtagcttctgggccaaaggtcagggtgggcgggggcctgggaatacagcctgtggaggctgcttactcaacttgtgtcttaattaaaagtgacagaggaaaccaaaaaaaaaaaaaaaaaaaaaaaactcgaccccggtaaaaaagcttgccagggcgggatagggctcccgggatatgttgcggcctggggtcacgatccagggattgtagggtctcatgggtccagggaccacgtgagagctcctgggagatagttccactctacttggtgtacacacgggtacccctgcaagggattgtgggcgctgactgggaggggcggcacggacgcacgggatacactcccaggggagggggccacaaattccgggccaatggcatctggcaagggctcgggatcaaaaacttcatttcccccattatcccaacaaaattccagggataagggggagggctcccattcgggacttcacctcaccaagggattaaagggccagagtgcaacggtaacgtcggaccctggcgtgtgcgcgctcgggacgggtctacgagcacagcgggcggggtccacagagagtcctcatcacatccataagccaggaaccccccaatatcaactcccacaatgaagtggtgcggccaaaaagaactctggcgcagcacgggggtggtcctcacatcaccgtggcgcaacgagggtcactaatttccagaagatactaagggaagg

SEQ ID NO: 353202 - DNA, 1689 bp, Homo sapiens
ggtcagaggaggtttctggctcagaatctaggaccttagctcatcaggctggtcccacgtgggtgggtgggtggcgagtctggggctttacttggctttcccaatcctggtgggtcctgctcccccaggcactgacctgtggcccggacccaccctccaccccctgcacagtacagcaggggcgggcagagggcggggctgctgccagatctagtcagacaggtggagccgccggggcaggagtctcaaagagccaggctccaggagaggaagggctctgcgagaggagagaggagagcgctggagaggagaggctggagagtccttagccaggatggaggctgttgtgaacttgtaccaagaggtgatgaagcacgcagatccccggatccagggctaccctctgatggggtcccccttgctaatgacctccattctcctgacctacgtgtacttcgttctctcacttgggcctcgcatcatggctaatcggaagcccttccagctccgtggcttcatgattgtctacaacttctcactggtggcactctccctctacattgtctatgagttcctgatgtcgggctggctgagcacctatacctggcgctgtgaccctgtggactattccaacagccctgaggcacttaggatggttcgggtggcctggctcttcctcttctccaagttcattgagctgatggacacagtgatctttattctccgaaagaaagacgggcaggtgaccttcctacatgtcttccatcactctgtgcttccctggagctggtggtggggggtaaagattgccccgggaggaatgggctctttccatgccatgataaactcttccgtgcatgtcataatgtacctgtactacggattatctgcctttggccctgtggcacaaccctacctttggtggaaaaagcacatgacagccattcagctgatccagtttgtcctggtctcactgcacatctcccagtactactttatgtccagctgtaactaccagtacccagtcattattcacctcatctggatgtatggcaccatcttcttcatgctgttctccaacttctggtatcactcttataccaagggcaagcggctgccccgtgcacttcagcaaaatggagctccaggtattgccaaggtcaaggccaactgagaagcatggcctagataggcgcccacctaagtgcctcaggactgcaccttagggcagtgtccgtcagtgccctctccacctacacctgtgaccaaggcttatgtggtcaggactgagcaggggactggccctcccctccccacagctgctctacagggaccacggctttggttcctcacccacttcccccgggcagctccagggatgtggcctcattgctgtctgccactccagagctgggggctaaaagggctgtacagttatttccccctccctgccttaaaacttgggagaggagcactcagggctggccccacaaagggtctcgtggcctttttcctcacacagaagaggtcagcaataatgtcactgtggacccagtctcactcctccaccccacacactgaagcagtagcttctgggccaaaggtcagggtgggcgggggcctgggaatacagcctgtggaggctgcttactcaacttgtgtcttaattaaaagtgacagaggaaacca

SEQ ID NO: 353203 - DNA, 1586 bp, Homo sapiens
cccgggccttcctccaccacccctgcatttacctctctccctcctcctctcccctccctccccccgctaccctaactttgccaggcaccttttcccttccatccatcttaaaggaaggaagggacgggctgagttccccgacgagagacacacccagattttcctgcagcttggggagaggtcctcccaggagccttggtccctcctggcctgccggagtccttagccaggatggaggctgttgtgaacttgtaccaagaggtgatgaagcacgcagatccccggatccagggctaccctctgatggggtcccccttgctaatgacctccattctcctgacctacgtgtacttcgttctctcacttgggcctcgcatcatggctaatcggaagcccttccagctccgtggcttcatgattgtctacaacttctcactggtggcactctccctctacattgtctatgagttcctgatgtcgggctggctgagcacctatacctggcgctgtgaccctgtggactattccaacagccctgaggcacttaggatggttcgggtggcctggctcttcctcttctccaagttcattgagctgatggacacagtgatctttattctccgaaagaaagacgggcaggtgaccttcctacatgtcttccatcactctgtgcttccctggagctggtggtggggggtaaagattgccccgggaggaatgggctctttccatgccatgataaactcttccgtgcatgtcataatgtacctgtactacggattatctgcctttggccctgtggcacaaccctacctttggtggaaaaagcacatgacagccattcagctgatccagtttgtcctggtctcactgcacatctcccagtactactttatgtccagctgtaactaccagtacccagtcattattcacctcatctggatgtatggcaccatcttcttcatgctgttctccaacttctggtatcactcttataccaagggcaagcggctgccccgtgcacttcagcaaaatggagctccaggtattgccaaggtcaaggccaactgagaagcatggcctagataggcgcccacctaagtgcctcaggactgcaccttagggcagtgtccgtcagtgccctctccacctacacctgtgaccaaggcttatgtggtcaggactgagcaggggactggccctcccctccccacagctgctctacagggaccacggctttggttcctcacccacttcccccgggcagctccagggatgtggcctcattgctgtctgccactccagagctgggggctaaaagggctgtacagttatttccccctccctgccttaaaacttgggagaggagcactcagggctggccccacaaagggtctcgtggcctttttcctcacacagaagaggtcagcaataatgtcactgtggacccagtctcactcctccaccccacacactgaagcagtagcttctgggccaaaggtcagggtgggcgggggcctgggaatacagcctgtggaggctgcttactcaacttgtgtcttaattaaaagtgacagaggaaacca

SEQ ID NO: 353204 - DNA, 1562 bp, Homo sapiens
  misc_feature (106)..(106): n is a, c, g, or t
tcatcatgcacgatcgagagacagctggcgagcgcatggcacgtgcatgtgccctcgagagggacattctcgtcatcggtcccgtgtcgtccactcgcgctggcgnacatcctgcctgtatgtcccagtccttgggtccaccatatcggaagctcgcattacgcctagggcattaggagagcgtgcttgatgatactctgatagccacatgagagtgattgacagcacgcatgattctccacggattccatggatccccggatccagggctaccctctgatggggtcccccttgctaatgacctccattctcctgacctacgtgtacttcgttctctcacttgggcctcgcatcatggctaatcggaagcccttccagctccgtggcttcatgattgtctacaacttctcactggtggcactctccctctacattgtctatgagttcctgatgtcgggctggctgagcacctatacctggcgctgtgaccctgtggactattccaacagccctgaggcacttaggatggttcgggtggcctggctcttcctcttctccaagttcattgagctgatggacacagtgatctttattctccgaaagaaagacgggcaggtgaccttcctacatgtcttccatcactctgtgcttccctggagctggtggtggggggtaaagattgccccgggaggaatgggctctttccatgccatgataaactcttccgtgcatgtcataatgtacctgtactacggattatctgcctttggccctgtggcacaaccctacctttggtggaaaaagcacatgacagccattcagctgatccagtttgtcctggtctcactgcacatctcccagtactactttatgtccagctgtaactaccagtacccagtcattattcacctcatctggatgtatggcaccatcttcttcatgctgttctccaacttctggtatcactcttataccaagggcaagcggctgccccgtgcacttcagcaaaatggagctccaggtattgccaaggtcaaggccaactgagaagcatggcctagataggcgcccacctaagtgcctcaggactgcaccttagggcagtgtccgtcagtgccctctccacctacacctgtgaccaaggcttatgtggtcaggactgagcaggggactggccctcccctccccacagctgctctacagggaccacggctttggttcctcacccacttcccccgggcagctccagggatgtggcctcattgctgtctgccactccagagctgggggctaaaagggctgtacagttatttccccctccctgccttaaaacttgggagaggagcactcagggctggccccacaaagggtctcgtggcctttttcctcacacagaagaggtcagcaataatgtcactgtggacccagtctcactcctccaccccacacactgaagcagtagcttctgggccaaaggtcagggtgggcgggggcctgggaatacagcctgtggaggctgcttactcaacttgtgtcttaattaaaagtgacagaggaaacca

SEQ ID NO: 353205 - DNA, 1570 bp, Homo sapiens
ctgacctcatgtctgtagacccttcaaatgaagacccttcgaaccctgtgactcttcctgattcctttgacccttattcatagaatccccggatccagggctaccctctgatggggtcccccttgctaatgacctccattctcctgacctacgtgtacttcgttctctcacttgggcctcgcatcatggctaatcggaagcccttccagctccgtggcttcatgattgtctacaacttctcactggtggcactctccctctacattgtctatgaggtgggcccctgggatgccgggctttaatttctgtcagcaggataaggagcaggccatagagccagagcatggcatttctcctttccagagaggttcagatccatgtcctcagctagcgaaggggagggatggctgggaagggagaactctggtggtctaatccacatcccttcccagttcctgatgtcgggctggctgagcacctatacctggcgctgtgaccctgtggactattccaacagccctgaggcacttaggatggttcgggtggcctggctcttcctcttctccaagttcattgagctgatggacacagtgatctttattctccgaaagaaagacgggcaggtgaccttcctacatgtcttccatcactctgtgcttccctggagctggtggtggggggtaaagattgccccgggaggaatgggctctttccatgccatgataaactcttccgtgcatgtcataatgtacctgtactacggattatctgcctttggccctgtggcacaaccctacctttggtggaaaaagcacatgacagccattcagctgatccagtttgtcctggtctcactgcacatctcccagtactactttatgtccagctgtaactaccagtacccagtcattattcacctcatctggatgtatggcaccatcttcttcatgctgttctccaacttctggtatcactcttataccaagggcaagcggctgccccgtgcacttcagcaaaatggagctccaggtattgccaaggtcaaggccaactgagaagcatggcctagataggcgcccacctaagtgcctcaggactgcaccttagggcagtgtccgtcagtgccctctccacctacacctgtgaccaaggcttatgtggtcaggactgagcaggggactggccctcccctccccacagctgctctacagggaccacggctttggttcctcacccacttcccccgggcagctccagggatgtggcctcattgctgtctgccactccagagctgggggctaaaagggctgtacagttatttccccctccctgccttaaaacttgggagaggagcactcagggctggccccacaaagggtctcgtggcctttttcctcacacagaagaggtcagcaataatgtcactgtggacccagtctcactcctccaccccacacactgaagcagtagcttctgggccaaaggtcagggtgggcgggggcctgggaatacagcctgtggaggctgcttactcaacttgtgtcttaattaaaagtgacagaggaaacca

SEQ ID NO: 353206 - DNA, 1395 bp, Homo sapiens
cccgggccttcctccaccacccctgcatttacctctctccctcctcctctcccctccctccccccgctaccctaactttgccaggcaccttttcccttccatccatcttaaaggaaggaagggacgggctgagttccccgacgagagacacacccagattttcctgcagcttggggagaggtcctcccaggagccttggtccctcctggcctgccggagtccttagccaggatggaggctgttgtgaacttgtaccaagaggtgatgaagcacgcagttcctgatgtcgggctggctgagcacctatacctggcgctgtgaccctgtggactattccaacagccctgaggcacttaggatggttcgggtggcctggctcttcctcttctccaagttcattgagctgatggacacagtgatctttattctccgaaagaaagacgggcaggtgaccttcctacatgtcttccatcactctgtgcttccctggagctggtggtggggggtaaagattgccccgggaggaatgggctctttccatgccatgataaactcttccgtgcatgtcataatgtacctgtactacggattatctgcctttggccctgtggcacaaccctacctttggtggaaaaagcacatgacagccattcagctgatccagtttgtcctggtctcactgcacatctcccagtactactttatgtccagctgtaactaccagtacccagtcattattcacctcatctggatgtatggcaccatcttcttcatgctgttctccaacttctggtatcactcttataccaagggcaagcggctgccccgtgcacttcagcaaaatggagctccaggtattgccaaggtcaaggccaactgagaagcatggcctagataggcgcccacctaagtgcctcaggactgcaccttagggcagtgtccgtcagtgccctctccacctacacctgtgaccaaggcttatgtggtcaggactgagcaggggactggccctcccctccccacagctgctctacagggaccacggctttggttcctcacccacttcccccgggcagctccagggatgtggcctcattgctgtctgccactccagagctgggggctaaaagggctgtacagttatttccccctccctgccttaaaacttgggagaggagcactcagggctggccccacaaagggtctcgtggcctttttcctcacacagaagaggtcagcaataatgtcactgtggacccagtctcactcctccaccccacacactgaagcagtagcttctgggccaaaggtcagggtgggcgggggcctgggaatacagcctgtggaggctgcttactcaacttgtgtcttaattaaaagtgacagaggaaacca

SEQ ID NO: 353207 - DNA, 1437 bp, Homo sapiens
cccctctggtgacagaaagtcggcccagcagatgaggaagtggcaggcaggcaggctggccccggggacttctctctggccctgctccctccgagcgctccgccgttgcccgcctggcccctacggagtccttagccaggatggaggctgttgtgaacttgtaccaagaggtgatgaagcacgcagatccccggatccagggctaccctctgatggggtcccccttgctaatgacctccattctcctgacctacgtgtacttcgttctctcacttgggcctcgcatcatggctaatcggaagcccttccagctccgtggcttcatgattgtctacaacttctcactggtggcactctccctctacattgtctatgagttcctgatgtcgggctggctgagcacctatacctggcgctgtgaccctgtggactattccaacagccctgaggcacttaggatggttcgggtggcctggctcttcctcttctccaagttcattgagctgatggacacagtgatctttattctccgaaagaaagacgggcaggtgaccttcctacatgtcttccatcactctgtgcttccctggagctggtggtggggggtaaagattgccccgggaggaatgggctctttccatgccatgataaactcttccgtgcatgtcataatgtacctgtactacggattatctgcctttggccctgtggcacaaccctacctttggtggaaaaagcacatgacagccattcagctgatccagtttgtcctggtctcactgcacatctcccagtactactttatgtccagctgtaactaccagtacccagtcattattcacctcatctggatgtatggcaccatcttcttcatgctgttctccaacttctggtatcactcttataccaagggcaagcggctgccccgtgcacttcagcaaaatggagctccaggtattgccaaggtcaaggccaactgagaagcatggcctagataggcgcccacctaagtgcctcaggactgcaccttagggcagtgtccgtcagtgccctctccacctacacctgtgaccaaggcttatgtggtcaggactgagcaggggactggccctcccctccccacagctgctctacagggaccacggctttggttcctcactgggggctaaaagggctgtacagttatttccccctccctgccttaaaacttgggagaggagcactcagggctggccccacaaagggtctcgtggcctttttcctcacacagaagaggtcagcaataatgtcactgtggacccagtctcactcctccaccccacacactgaagcagtagcttctgggccaaaggtcagggtgggcgggggcctgggaatacagcctgtggaggctgcttactcaacttgtgtcttaattaaaagtgacagaggaaacca

SEQ ID NO: 353208 - DNA, 1414 bp, Homo sapiens
cccctctggtgacagaaagtcggcccagcagatgaggaagtggcaggcaggcaggctggccccggggacttctctctggccctgctccctccgagcgctccgccgttgcccgcctggcccctacggagtccttagccaggatggaggctgttgtgaacttgtaccaagaggtgatgaagcacgcagatccccggatccagggctaccctctgatggggtcccccttgctaatgacctccattctcctgacctacgtgtacttcgttctctcacttgggcctcgcatcatggctaatcggaagcccttccagctccgtggcttcatgattgtctacaacttctcactggtggcactctccctctacattgtctatgagatggttcgggtggcctggctcttcctcttctccaagttcattgagctgatggacacagtgatctttattctccgaaagaaagacgggcaggtgaccttcctacatgtcttccatcactctgtgcttccctggagctggtggtggggggtaaagattgccccgggaggaatgggctctttccatgccatgataaactcttccgtgcatgtcataatgtacctgtactacggattatctgcctttggccctgtggcacaaccctacctttggtggaaaaagcacatgacagccattcagctgatccagtttgtcctggtctcactgcacatctcccagtactactttatgtccagctgtaactaccagtacccagtcattattcacctcatctggatgtatggcaccatcttcttcatgctgttctccaacttctggtatcactcttataccaagggcaagcggctgccccgtgcacttcagcaaaatggagctccaggtattgccaaggtcaaggccaactgagaagcatggcctagataggcgcccacctaagtgcctcaggactgcaccttagggcagtgtccgtcagtgccctctccacctacacctgtgaccaaggcttatgtggtcaggactgagcaggggactggccctcccctccccacagctgctctacagggaccacggctttggttcctcacccacttcccccgggcagctccagggatgtggcctcattgctgtctgccactccagagctgggggctaaaagggctgtacagttatttccccctccctgccttaaaacttgggagaggagcactcagggctggccccacaaagggtctcgtggcctttttcctcacacagaagaggtcagcaataatgtcactgtggacccagtctcactcctccaccccacacactgaagcagtagcttctgggccaaaggtcagggtgggcgggggcctgggaatacagcctgtggaggctgcttactcaacttgtgtcttaattaaaagtgacagaggaaacca

SEQ ID NO: 353209 - DNA, 1422 bp, Homo sapiens
cccctctggtgacagaaagtcggcccagcagatgaggaagtggcaggcaggcaggctggccccggggacttctctctggccctgctccctccgagcgctccgccgttgcccgcctggcccctacggagtccttagccaggatggaggctgttgtgaacttgtaccaagaggtgatgaagcacgcagatccccggatccagggctaccctctgatggggtcccccttgctaatgacctccattctcctgacctacgtgtacttcgttctctcacttgggcctcgcatcatggctaatcggaagcccttccagctccgtggcttcatgattgtctacaacttctcactggtggcactctccctctacattgtctatgagttcctgatgtcgggctggctgagcacctatacctggcgctgtgaccctgtggactattccaacagccctgaggcacttaggatggttcgggtggcctggctcttcctcttctccaagttcattgagctgatggacacagtgatctttattctccgaaagaaagacgggcaggaggaatgggctctttccatgccatgataaactcttccgtgcatgtcataatgtacctgtactacggattatctgcctttggccctgtggcacaaccctacctttggtggaaaaagcacatgacagccattcagctgatccagtttgtcctggtctcactgcacatctcccagtactactttatgtccagctgtaactaccagtacccagtcattattcacctcatctggatgtatggcaccatcttcttcatgctgttctccaacttctggtatcactcttataccaagggcaagcggctgccccgtgcacttcagcaaaatggagctccaggtattgccaaggtcaaggccaactgagaagcatggcctagataggcgcccacctaagtgcctcaggactgcaccttagggcagtgtccgtcagtgccctctccacctacacctgtgaccaaggcttatgtggtcaggactgagcaggggactggccctcccctccccacagctgctctacagggaccacggctttggttcctcacccacttcccccgggcagctccagggatgtggcctcattgctgtctgccactccagagctgggggctaaaagggctgtacagttatttccccctccctgccttaaaacttgggagaggagcactcagggctggccccacaaagggtctcgtggcctttttcctcacacagaagaggtcagcaataatgtcactgtggacccagtctcactcctccaccccacacactgaagcagtagcttctgggccaaaggtcagggtgggcgggggcctgggaatacagcctgtggaggctgcttactcaacttgtgtcttaattaaaagtgacagaggaaacca

SEQ ID NO: 353210 - DNA, 1170 bp, Homo sapiens
  misc_feature (896)..(896): n is a, c, g, or t
  misc_feature (898)..(899): n is a, c, g, or t
  misc_feature (902)..(902): n is a, c, g, or t
  misc_feature (908)..(908): n is a, c, g, or t
  misc_feature (983)..(983): n is a, c, g, or t
cccctctggtgacagaaagtcggcccagcagatgaggaagtggcaggcaggcaggctggccccggggacttctctctggccctgctccctccgagcgctccgccgttgcccgcctggcccctacggagtccttagccaggatggaggctgttgtgaacttgtaccaagaggtgatgaagcacgcagatccccggatccagggctaccctctgatggggtcccccttgctaatgacctccattctcctgacctacgtgtacttcgttctctcacttgggcctcgcatcatggctaatcggaagcccttccagctccgtggcttcatgattgtctacaacttctcactggtggcactctccctctacattgtctatgagttcctgatgtcgggctggctgagcacctatacctggcgctgtgaccctgtggactattccaacagccctgaggcacttaggatggttcgggtggcctggctcttcctcttctccaagttcattgagctgatggacacagtgatctttattctccgaaagaaagacgggcaggtgaccttcctacatgtcttccatcactctgtgcttccctggagctggtggtggggggtaaagattgccccgggaggaatgggctctttccatgccatgataaactcttccgtgcatgtcataatgtacctgtactacggattatctgcctttggccctgtggcacaaccctacctttggtggaaaaagcacatgacagccattcagctgatccagtttgtcctggtctcactgcacatctcccagtactactttatgtccagctgtaactaccagtacccagtcattattcacctcatctggatgtatggcaccatcttcttcatgctgttctccaacttctggtancnngangaatgngctctttccatgccatgataaactcttccgtgcatgtcataatgtacctgtactacggattatctgcctttggcnctgttggcccagccttacctttggtggcacaaacgccatgacagcgattcaggtgatccagtttggtcctggtcctccactgcccctttacggcagtggtcccgtccgttgccttctctcactaaaacctggtgaaccaggcttatggggtccggacctgagccgggagcttggccttcccttacca

SEQ ID NO: 353211 - DNA, 918 bp, Homo sapiens
cccctctggtgacagaaagtcggcccagcagatgaggaagtggcaggcaggcaggctggccccggggacttctctctggccctgctccctccgagcgctccgccgttgcccgcctggcccctacggagtccttagccaggatggaggctgttgtgaacttgtaccaagaggtgatgaagcacgcagatccccggatccagggctaccctctgatggggtcccccttgctaatgacctccattctcctgacctacgtgtacttcgttctctcacttgggcctcgcatcatggctaatcggaagcccttccagctccgtggcttcatgattgtctacaacttctcactggtggcactctccctctacattgtctatgagttcctgatgtcgggctggctgagcacctatacctggcgctgtgaccctgtggactattccctcaggactgcaccttagggcagtgtccgtcagtgccctctccacctacacctgtgaccaaggcttatgtggtcaggactgagcaggggactggccctcccctccccacagctgctctacagggaccacggctttggttcctcacccacttcccccgggcagctccagggatgtggcctcattgctgtctgccactccagagctgggggctaaaagggctgtacagttatttccccctccctgccttaaaacttgggagaggagcactcagggctggccccacaaagggtctcgtggcctttttcctcacacagaagaggtcagcaataatgtcactgtggacccagtctcactcctccaccccacacactgaagcagtagcttctgggccaaaggtcagggtgggcgggggcctgggaatacagcctgtggaggctgcttactcaacttgtgtcttaattaaaagtgacagaggaaacca

SEQ ID NO: 353212 - DNA, 537 bp, Homo sapiens
gaaatcttggagaagggtctaaaggtgcgggagtatgagttaagaaaaaacaacttctcaggactgcaccttagggcagtgtccgtcagtgccctctccacctacacctgtgaccaaggcttatgtggtcaggactgagcaggggactggccctcccctccccacagctgctctacagggaccacggctttggttcctcacccacttcccccgggcagctccagggatgtggcctcattgctgtctgccactccagagctgggggctaaaagggctgtacagttatttccccctccctgccttaaaacttgggagaggagcactcagggctggccccacaaagggtctcgtggcctttttcctcacacagaagaggtcagcaataatgtcactgtggacccagtctcactcctccaccccacacactgaagcagtagcttctgggccaaaggtcagggtgggcgggggcctgggaatacagcctgtggaggctgcttactcaacttgtgtcttaattaaaagtgacagaggaaacca

SEQ ID NO: 353213 - DNA, 948 bp, Homo sapiens
cccctctggtgacagaaagtcggcccagcagatgaggaagtggcaggcaggcaggctggccccggggacttctctctggccctgctccctccgagcgctccgccgttgcccgcctggcccctacggagtccttagccaggatggaggctgttgtgaacttgtaccaagaggtgatgaagcacgcagatccccggatccagggctaccctctgatggggtcccccttgctaatgacctccattctcctgacctacgtgtacttcgttctctcacttgggcctcgcatcatggctaatcggaagcccttccagctccgtggcttcatgattgtctacaacttctcactggtggcactctccctctacattgtctatgaggtgggcccctgggatgccgggctttaatttctgtcagcaggataaggagcaggccatagagccagagcatggcatttctcctttccagagaggttcagatccatgtcctcagctagcgaaggggagggatggctgggaagggagaactctggtggtctaatccacatcccttcccagttcctgatgtcgggctggctgagcacctatacctggcgctgtgaccctgtggactattccaacagccctgaggcacttaggatggttcgggtggcctggctcttcctcttctccaagttcattgagctgatggacacagtgagtagttatatgagatgtgagaacttgaggggagaatgaggtggagaagcccaggttctgaatccccttccctcactcttctctcaggtgatctttattctccgaaagaaagacgggcaggtgaccttcctacatgtcttccatcactctgtgcttccctggagctggtggtggggggtaaagattgccccgggtgagtggtgaaggccactatgggaaagggtgggctacagaggctgactctgcagaccct

SEQ ID NO: 353214 - DNA, 722 bp, Homo sapiens
cccctctggtgacagaaagtcggcccagcagatgaggaagtggcaggcaggcaggctggccccggggacttctctctggccctgctccctccgagcgctccgccgttgcccgcctggcccctacggagtccttagccaggatggaggctgttgtgaacttgtaccaagaggtgatgaagcacgcagatccccggatccagggctaccctctgatggggtcccccttgctaatgacctccattctcctgacctacgtgtacttcgttctctcacttgggcctcgcatcatggctaatcggaagcccttccagctccgtggcttcatgattgtctacaacttctcactggtggcactctccctctacattgtctatgaggtgggcccctgggatgccgggctttaatttctgtcagcaggataaggagcaggccatagagccagagcatggcatttctcctttccagagaggttcagatccatgtcctcagctagcgaaggggagggatggctgggaagggagaactctggtggtctaatccacatcccttcccagttcctgatgtcgggctggctgagcacctatacctggcgctgtgaccctgtggactattccaacagccctgaggcacttaggatggttcgggtggcctggctcttcctcttctccaagttcattgagctgatggacacaatgttcaggtaccagctcggttcgtatcag

SEQ ID NO: 353215 - DNA, 616 bp, Homo sapiens
cccctctggtgacagaaagtcggcccagcagatgaggaagtggcaggcaggcaggctggccccggggacttctctctggccctgctccctccgagcgctccgccgttgcccgcctggcccctacggagtccttagccaggatggaggctgttgtgaacttgtaccaagaggtgatgaagcacgcagatccccggatccagggctaccctctgatggggtcccccttgctaatgacctccattctcctgacctacgtgtacttcgttctctcacttgggcctcgcatcatggctaatcggaagcccttccagctccgtggcttcatgattgtctacaacttctcactggtggcactctccctctacattgtctatgagttcctgatgtcgggctggctgagcacctatactggccccacaaagggtctcgtggcctttttcctcacacagaagaggtcagcaataatgtcactgtggacccagtctcactcctccaccccacacactgaagcagtagcttctgggccaaaggtcagggtgggcgggggcctgggaatacagcctgtggaggctgcttactcaacttgtgtcttaattaaaagtgacagaggaaacca

SEQ ID NO: 353216 - DNA, 430 bp, Homo sapiens
gaaaaggggaagggaggcaggaagtaaaactgtggagaggagaggagagtaaggtgtggagaggaagggtggaacagctcttcccaggcaagcaggatgtgtggggagcagatgcctcaaccaaactgcctcctccccctagttcccagtaattccttcctttcactgttctgtcctttctgcaatgaggcattgcaggtgtcttgtctggttctgtgtcttatctctgtgggatgggggtgtgcagtgggatctgtctgacatccgccctctgtacctccccagagtccttagccaggatggaggctgttgtgaacttgtaccaagaggtgatgaagcacgcaggtaagacgctatccaccagccctttccttccttctttcccgggatccctggatctacggctgtcttctaatggagagttcctatg

SEQ ID NO: 353217 - DNA, 394 bp, Homo sapiens
caaccctacctttggtggaaaaagcacatgacagccattcagctggtgaggggcttggcctgacttacctataaccatccccccacattcctagcctggatcctgcctttatccagtctgtctcacctttgaccccatctctccctactcaacgtttgtctctttctctaccccctcttcccctctagtcctctcactattccctctgaccctggtctttctctatcctagatccagtttgtcctggtctcactgcacatctcccagtactactttatgtccagctgtaactaccagtacccagtcattattcacctcatctggatgtatggcaccatcttcttcatgctgttctccaacttctggtatcactcttataccaagggcaagcggc
